(19) United States
(12) Patent Application Publication
(10) Pub. No.: US 2005/0266417 A1
(43) Pub. Date: Dec. 1, 2005

(54) Methods for identifying target nucleic acid molecules

(76) Inventors: Francis Barany, New York, NY (US); Daniel Turner, New York, NY (US); Maneesh Pingle, New York, NY (US); Hanna Pincas, New York, NY (US)

Correspondence Address: Michael L. Goldman;Nixon Peabody LLP, Clinton Square, P.O. Box 31051, Rochester, NY, 14603-1051, US

(21) Appl. No.: 10/939,294

(22) Filed: Sep. 10, 2004

Related U.S. Application Data
(60) Provisional application No. 60/502,731, filed on Sep. 12, 2003.

(51) Int. Cl. C12Q 1/68

(52) U.S. Cl. 435/6

(57) ABSTRACT

The present invention relates to methods for identifying target nucleic acid molecules differing by one or more single-base changes, insertions, deletions, or translocations; and identifying one or more target mRNA molecules differing by one or more splice site variations in a plurality of mRNA molecules. Also disclosed is a method of generating a linearly amplified representation of a whole genome. Other aspects of the present invention relate to labeled detection oligonucleotide probes and translational oligonucleotide probes as well as to methods of designing such probes.

[0001] This application claims the benefit of U.S. Provisional Patent Application Ser. No. 60/502,731, filed Sep. 12, 2003.

[0002] The subject matter of this application was made with support from the United States Government under the National Institutes of Health, Grant No. P01 CA65930-06. The U.S. Government may have certain rights.

### FIELD OF THE INVENTION

[0003] The present invention relates to methods for identifying and quantifying target nucleic acid molecules differing by single-base changes, insertions, deletions, copy number changes, or translocations, or target mRNA molecules differing by one or more splice site variations.

### BACKGROUND OF THE INVENTION

[0004] The need for large-scale multiplexed analysis of polymorphic loci and gene copy number status across the genome has intensified in recent years, especially in cancer biology. Despite the successes of microarrays for expression profiling, with notable exceptions, they have been unsuccessful in predicting patient outcomes or helping to identify new candidate cancer genes. For example, important DNA alterations in known cancer genes (mutations, methylation, gene copy number, allele imbalance, LOH) are frequently not detected by gene expression arrays. To date, DNA changes in individual genes, loss of heterozygosity (LOH), or microsatellite instability (MSI) have been the strongest predictors of prognosis in colon cancer.

[0005] Genes that have alterations at both the DNA and RNA level are more likely to lead to tumor development. There is thus an urgent need to profile DNA and RNA changes on the same tumors. Moreover, sophisticated mathematical mining of RNA expression profiles for new candidates is likely to require stratification of tumors by DNA alterations in known cancer genes.

[0006] Cancers arise from the accumulation of inherited and/or sporadic mutations at the DNA level within cell cycle, DNA repair, and growth signaling genes. Knowledge of these molecular changes can influence patient management. For instance, members of certain ethnic groups have a higher risk of carrying single nucleotide polymorphisms (SNPs) in cancer genes such as BRCA1, BRCA2 or APC. These SNPs confer an increased risk of developing breast, ovarian, prostate or colon cancers and carriers would benefit from increased vigilance in testing (Laken et al., “Genotyping by Mass Spectrometric Analysis of Short DNA Fragments,” Nature Biotechnology 16:1352-6 (1998); Abeliovich et al., “The Founder Mutations 185delAG and 5382insC in BRCA1 and 6174delT in BRCA2 Appear in 60% of Ovarian Cancer and 30% of Early-Onset Breast Cancer Patients among Ashkenazi Women,” Am. J. Human Gen. 60:505-514 (1997); Beller et al., “High Frequency of BRCA1 and BRCA2 Germline Mutations in Ashkenazi Jewish Ovarian Cancer Patients, Regardless of Family History,” Gyn. Oncol. 67:123-126 (1997); Berman et al., “A Common Mutation in BRCA2 that Predisposes to a Variety of Cancers is Found in Both Jewish Ashkenazi and Non-Jewish Individuals,” Cancer Res. 56:3409-3414 (1996); Oddoux et al., “The Carrier Frequency of the BRCA2 6174delT Mutation Among Ashkenazi Jewish Individuals is Approximately 1%,” Nature Genetics 14:188-190 (1996); Roa et al., “Ashkenazi Jewish Population Frequencies for Common Mutations in BRCA1 and BRCA2,” Nature Genetics 14:185-187 (1996); Struewing et al., “The Carrier Frequency of the BRCA1 185delAG Mutation is Approximately 1 Percent in Ashkenazi Jewish Individuals,” Nature Genetics 11:198-200 (1995); Struewing et al., “The Risk of Cancer Associated with Specific Mutations of BRCA1 and BRCA2 among Ashkenazi Jews,” New Engl. J. Med. 336:1401-8 (1997)). Sporadic mutations, such as those in the p53 gene, influence both clinical outcome and response to therapy (Broll et al., “Expression of p53 and mdm2 mRNA and Protein in Colorectal Carcinomas,” Eur. J. Cancer 35:1083-1088 (1999); Bunz et al., “Disruption of p53 in Human Cancer Cells Alters the Responses to Therapeutic Agents,” Clin. Invest. 104:263-269 (1999); Dameron et al., “Control of Angiogenesis in Fibroblasts by p53 Regulation of Thrombospondin-1,” Science 265:1582-1584 (1995); Heide et al., “The Status of p53 in the Metastatic Progression of Colorectal Cancer. Eur. J. Cancer 33:1314-1322 (1997); Prives et al., “The p53 Pathway,” J. Path. 187:112-126 (1999); Tortola et al., “p53 and K-ras Gene Mutations Correlate With Tumor Aggressiveness But Are Not of Routine Prognostic Value in Colorectal Cancer,” J. Clin. Oncol. 17:375 (1999); Zou et al., “p53 Regulates the Expression of the Tumor Suppressor Gene Maspin,” J. of Biol. Chem. 275:6051-6054 (2000)). The precise nature of the p53 mutation, therefore, may alter treatment protocols and other clinical considerations (Aurelio et al., “Germ-line-derived Hinge Domain p53 Mutants Have Lost Apoptotic But Not Cell Cycle Arrest Fnctions,” Cancer Res. 58:2190-2195 (1998); Aurelio et al., “p53 Mutants have Selective Dominant-Negative Effects on Apoptosis but not Growth Arrest,” Molec. Cell Biol. 20:770-778 (2000); Foster et al., “Pharmacological Rescue of Mutant p53 Conformation and Function,” Science 286:2507-2510 (1999); Wang et al., “Induced p53 Expression in Lung Cancer Cell Line Promotes Cell Senescence and Differentially Modifies the Cytotoxicity of Anti-Cancer Drugs,” Oncogene 17:1923-1930 (1998); Webley et al., “Effect of Mutation and Conformation on the Function of p53 in Colorectal Cancer,” J. Path. 191:361-367 (2000)).

[0007] In addition to the inherited and sporadic mutations, many tumors exhibit aneuploidy and chromosomal instability (CIN) in which the diploid structure of the genome is corrupted. Chromosomal rearrangement is common, and the genome may exhibit amplification of alleles, or conversely the loss of an allele—“loss of heterozygosity” (LOH). These changes serve to characterize the unique molecular signature of the tumor further and, consequently, also influence patient management. It is imperative, therefore, that detection techniques have the ability to accurately identify and describe these changes.

[0008] SNPs are recognized as powerful markers that may be used to help identify genes responsible for complex diseases including cancer. Fundamental concepts intrinsic to these genetic models include “linkage” and “linkage disequilibrium” (LD). Linkage refers to the tendency of two or more loci to be inherited together because of their location near to one another on the same chromosome. Tightly linked loci do not assort independently during the creation of germ cells (meiosis). This results in a state of disequilibrium, since the two-locus haplotype frequency for a pair of alleles is not equal to the product of the individual allele frequencies. This difference reflects the degree of linkage disequilibrium (Lynch et al., Genetics and Analysis of Quantitative Traits (1997).

[0009] These principles form the conceptual foundation for a whole-genome based candidate gene identification approach, often referred to as an association study. Here, geneticists attempt to correlate SNP patterns with phenotypes (e.g. normal vs. disease) to predict the locations of susceptibility genes. In principle, if a genomic region demonstrates high LD, then multiple polymorphisms within that region will be inherited together (co-segregate), thereby behaving in aggregate. In such regions, a single polymorphic site can be used as a marker for the entire set of loci. Therefore, when attempting to identify a susceptibility gene across the entire genome, regions of relatively higher LD would require fewer loci to be genotyped, because a single locus can represent a larger set (Hoh et al., “Trimming, Weighting and Grouping SNPs in Human Case-Control Association Studies,” Genome Res. 11:2115-2119 (2001)).

[0010] Association studies using LD to identify susceptibility genes have achieved some recent success. Proof of principle experiments using a high-density SNP map in genomic regions already known to contain susceptibility genes for complex diseases (including Parkinson's, Alzheimer's, psoriasis, migraine, type II diabetes, and Crohn's disease) have confirmed known genes or identified new ones (Rioux et al., “Genetic Variation in the 5q31 Cytokine Gene Cluster Confers Susceptibility to Crohn Disease,” Nature Genetics 29:223-228 (2001); Hewett et al., “Identification of a Psoriasis Susceptibility Candidate Gene by Linkage Disequilibrium Mapping with a Localized Single Nucleotide Polymorphism Map,” Genomics 79:305-314 (2002); Martin et al., “SNPing Away at Complex Diseases: Analysis of Single-Nucleotide Polymorphisms Around APOE in Alzheimer Disease,” Am. J. Human Genet. 67:383-394 (2000); Martin et al., “Association of Single-Nucleotide Polymorphisms of the tau gene with Late-Onset Parkinson Disease,” J. Am. Med. Assoc. 286:2245-2250 (2001); McCarthy et al., “Single Nucleotide Polymorphism Alleles in the Insulin Receptor Gene are Associated with Typical Migraine,” Genomics 78:135-149 (2001); Horikawa et al., “Genetic Variation in the Gene Encoding Calpain-10 is Associated with Type 2 Diabetes Mellitus,” Nature Genetics 26:135-137 (2000)).

[0011] These successful association studies are “candidate gene” approaches, where the location of the susceptibility gene is either already known or suspected. A more global approach attempts to identify the location of unknown susceptibility genes across the whole genome, without bias to initial candidate locations. This experimental design is based on a two step LD methodology (Roses, A. D., “Pharmacogenetics and the Practice of Medicine,” Nature 405:857-865 (2000)). In the first step, a low-density SNP map (i.e. “picket fence”) of the whole genome is used to identify a region(s) containing the potential susceptibility gene(s). Once the region is identified, a high-density SNP map is used to home in on the susceptibility gene within the region. The success of this approach greatly depends upon the degree of LD across the human genome, since this will determine the number and location of SNPs required to make meaningful predictions (estimates range from 10,000-30,000 for select ethnic populations, 100,000-200,000 for outbred populations, to as many as 1,000,000 SNPs). Thus, there is an urgent need to accurately score thousands of SNPs in a cost effective manner (Kruglyak, L., “Prospects for Whole-Genome Linkage Disequilibrium Mapping of Common Disease Genes,” Nature Genetics 22(2):139-44 (1999); Eaves et al., “The Genetically Isolated Populations of Finland and Sardinia may not be a Panacea for Linkage Disequilibrium Mapping of Common Disease Genes,” Nature Genetics 25(3):320-3 (2000); Taillon-Miller et al., “Juxtaposed Regions of Extensive and Minimal Linkage Disequilibrium in Human Xq25 and Xq28,” Nature Genetics 25:324-8 (2000); Collins et al., “Genetic Epidemiology of Single-Nucleotide Polymorphisms,” Proc. Nat'l Acad. Sci. USA 96:15173-7 (1999); Roses, A., “Pharmacogenetics Place in Modern Medical Science and Practice,” Life Sciences 70:1471-1480 (2002)).

[0012] Returning to the problem of tumor aneuploidy, some LOH and gene amplification events reflect the presence of tumor suppressor genes and oncogenes respectively. To track such changes accurately throughout the genome at a low resolution of 1 MB regions would require scoring 3,000 informative SNPs for each sample. Since not every SNP in a given individual is informative, a minimum of some 10,000 SNPs would need to be interrogated. Since solid tumors contain a mixture of both tumor and non-tumor (stromal) cells, analysis of copy number changes in tumor cells is complicated by the presence of the extra contaminating stromal cells with diploid copy numbers. While preparations of “pure” tumor cells may be prepared by laser capture microscopy (LCM), this limits the number of tumor cells for analysis to a few hundred. There is thus an urgent need to accurately quantify allele imbalance in thousands of SNPs in tumor cells, both in the presence of stromal cells and when starting with limiting amounts of tumor cells.

[0013] Thus, to recapitulate, there are two major uses of SNPs in genetics and tumor biology that require high-throughput and quantitative SNP scoring:
[0014] 1. Use of SNPs as markers of complex disease.
[0015] 2. Use of SNPs as markers of chromosome regions, to determine gains and losses in tumors.

[0016] The total number of SNPs that can be scored is limited by the amount of sample available. When sample DNA is in short supply, it can be amplified by polymerase chain reaction (PCR). However, the PCR step can generate cross-contamination artifacts, affecting the overall specificity and sensitivity, and can yield variable multiplexing results, limiting the throughput of the assay. Since the majority of methodologies currently available use PCR amplification, development of an alternative method for the high throughput genotyping of low quantity DNA samples (such as from tumor biopsies) would be desirable.

[0017] Current gene and mutation detection techniques fall into three general strategies; (i) target amplification (i.e. PCR, whole genome amplification (WGA), strand displacement assay (SDA)), (ii) probe amplification (ligase chain reaction (LCR), ligase detection reaction (LDR), rolling circle amplification (RCA)), and (iii) signal amplification (3D dendrimer labeling systems, enzymatic cascade reporters). Combining two orthogonal techniques, such as PCR with LDR can significantly improve signal to noise.

[0018] Multiple mutations or polymorphisms on multiple genes can be detected using PCR/PCR/LDR/Universal Array, which has the advantage of amplifying many regions together, before the LDR is performed (See Belgrader et al., “A Multiplex PCR-Ligase Detection Reaction Assay for Human Identity Testing,” Genome Sci. Technol. 1:77-87 (1996); and Favis et al., “Multiplex PCR/PCR/LDR Detection of BRCA1 and BRCA2 Small Insertions and Deletions Using a Universal DNA Array,” Nature Biotechnology 18:561-564 (2000)). Gene-specific PCR primers (all of which share a universal sequence on their 5′ ends) are used at low concentration for an initial simultaneous amplification of multiple regions using a limited number of PCR cycles. All primary fragments are then amplified with additional PCR cycles using the universal primer. Adjacent ligation probes, one containing a fluorescent label the other a complementary zip-code sequence, are covalently linked by ligase when there is perfect complementarity at the junction. Finally, ligation products are captured on a universal array containing the zip-code sequences. This approach has been validated for detecting K-ras and p53 gene mutations in non-microdissected tumors as well as stool, demonstrating the ability to find mutations despite a large quantity of background normal sequence. However, the method is not quantitative, and, moreover, PCR primers occasionally need to be redesigned to ensure that the different exons amplify together.

[0019] An alternative approach is to begin with an LDR step where discriminating LDR probes, encoded by a zip-code sequence, are used in conjunction with a common set of universal PCR primers. Amplification products are then rendered single-stranded and are identified by capturing at the zip-code sequence on a universal array. The advantage of this approach is the ability to multiplex about 100 probe sets together, but as with the previous example, the method is not quantitative. Furthermore, there are problems of some alleles “dropping out” during the PCR step. Even though these approaches are the most robust for multiplexing gene amplifications to date, they may not detect all potential biothreats in clinical samples. Since the dropout problem is a consequence of the PCR step, performing the LDR without a PCR step may allow quantitative scoring of hundreds to thousands of genes or SNPs.

[0020] There are certain practical limits to performing a straight multiplexed LDR reaction querying for hundreds of genes or several thousand SNPs, and then attempting to capture the LDR products on a zip-code array. A certain minimum number of molecules is needed for any hybridization-based assay to achieve efficient capture in a reasonable period of time, as required for a clinical test. For a hybridization event to take place successfully, the two DNA molecules need to encounter one another in the correct orientation. The problem is exacerbated when one of the molecules is tethered to a large support, as this limits the degree of freedom. Thermodynamically, an array will eventually capture a few molecules of complementary target DNA, but kinetically, it may take days or even weeks. The reason why PCR works is because initially there is a million-fold excess of primer over target DNA, so the hybridizations take place very rapidly.

[0021] One approach to circumvent arrays is to encode a tiny bar with gold and silver (known as molecular bar coding). Another approach is to put highly fluorescent nanocrystals, known as quantum dots (Q-dots) into beads (Han et al., “Quantum-Dot-Tagged Microbeads for Multiplexed Optical Coding of Biomolecules,” Nature Biotechnology, 19:631-635 (2001)).

[0022] Thus, the need remains for a rapid single assay to identify or quantify accurately dozens to hundreds of single base differences, copy number changes, insertions, deletions, loss of heterozygosity, or translocations in a polynucleotide sample.

[0023] The present invention is directed toward overcoming these deficiencies in the art.

### SUMMARY OF THE INVENTION

[0024] The present invention relates to a method for identifying one or more target nucleic acid molecules differing by one or more single-base changes, insertions, deletions, or translocations. This method involves providing a test sample potentially containing one or more target nucleic acid molecules differing by one or more single-base changes, insertions, deletions, or translocations. Also provided is one or more primary oligonucleotide probe sets, each set characterized by (a) a first oligonucleotide probe, having a target-specific portion and (b) a second oligonucleotide probe, having a target-specific portion, where the oligonucleotide probes in a particular set are suitable for ligation together when hybridized on a corresponding target nucleic acid molecule, but have a mismatch which interferes with such ligation when hybridized to any other nucleic acid molecule present in the sample, and where one or both oligonucleotide probes in the set contain one or more detection oligonucleotide probe-specific portions or their complements such that each probe set contains a unique set of one or more detection oligonucleotide probe-specific portions or their complements. The sample, the one or more primary oligonucleotide probe sets, and a ligase are blended to form a primary ligase detection reaction mixture. The primary ligase detection reaction mixture is subjected to one or more ligase detection reaction cycles. These cycles each include a denaturation treatment, where any hybridized oligonucleotides are separated from the target nucleic acid molecules, and a hybridization treatment, where the primary oligonucleotide probe sets hybridize in a base-specific manner to their respective target nucleic acid molecules, if present in the sample, and ligate to one another to form a primary ligation product containing the target-specific portions and one or more detection oligonucleotide probe-specific portions or their complements. The primary ligation product for each of the primary oligonucleotide probe sets are distinguishable from other nucleic acid molecules in the primary ligase detection reaction mixture by a unique set of one or more detection oligonucleotide probe-specific portions or their complements. The primary oligonucleotide probe sets may hybridize to nucleic acid molecules in the sample other than their respective target nucleic acid molecules but do not ligate together due to a presence of one or more mismatches and individually separate during the denaturation treatment. Detection oligonucleotide probes which bind to the complementary detection oligonucleotide probe-specific portion of the captured primary ligation product or complements thereof are provided, where each detection oligonucleotide probe has a reporter label, thereby providing each primary ligation product with a unique detectable encryption code. The primary ligation products and the detection oligonucleotide probes are contacted under conditions effective to permit hybridization of the detection oligonucleotide probes to the primary ligation products so that a labeled primary ligation product is formed. The reporter label(s) on the primary ligation product are then detected, thereby indicating the presence of one or more target nucleic acid molecules in the sample. Nucleic acid molecules differing by one or more single-base changes, insertions, deletions, or translocations are discriminated from one another during the one or more ligase detection reaction cycles and the discriminated nucleic acid molecules are detected as a result of each differently labeled, primary ligation product having a unique encryption code with a different pattern of detectable emission spectra.

[0025] Another embodiment of the present invention relates to a method for identifying one or more target nucleic acid molecules differing by one or more single-base changes, insertions, deletions, or translocations. This method involves providing a test sample potentially containing one or more target nucleic acid molecules. One or more primary oligonucleotide probe sets, each set characterized by (a) a first oligonucleotide probe, having a target-specific portion and a 5′ upstream portion containing a translational oligonucleotide portion and (b) a second oligonucleotide probe, having a target-specific portion, and a 3′ downstream primer-specific portion are provided. The oligonucleotide probes in a particular primary oligonucleotide probe set are suitable for ligation together when hybridized to a corresponding target nucleic acid molecule, but have a mismatch which interferes with this ligation when hybridized to any other nucleic acid molecule present in the test sample. The test sample, the one or more primary oligonucleotide probe sets, and a ligase are blended to form a primary ligase detection reaction mixture. The primary ligase detection reaction mixture is subjected to one or more ligase detection reaction cycles. These cycles each include a denaturation treatment, where any hybridized oligonucleotide probes are separated from the target nucleic acid molecules, and a hybridization treatment, where the primary oligonucleotide probe sets hybridize in a base-specific manner to their respective target nucleic acid molecules, if present in the test sample, and ligate to one another to form a primary ligation product containing (a) the 5′ upstream translational oligonucleotide portion, (b) the target-specific portions, and (c) the 3′ downstream primer-specific portion. The primary ligation product for each primary oligonucleotide probe set is distinguishable from other nucleic acids in the ligase detection reaction mixture, and the primary oligonucleotide probe sets may hybridize to nucleic acid molecules in the test sample other than their respective target nucleic acid molecules but do not ligate together due to a presence of one or more mismatches and individually separate during the denaturation treatment. Also provided in this aspect of the present invention is a downstream primer complementary to the 3′ downstream primer-specific portion of the primary ligation product. The primary ligation product is blended with the downstream primer and a polymerase to form a polymerase chain reaction mixture. The polymerase chain reaction mixture is subjected to one or more polymerase chain reaction cycles comprising a denaturation treatment, where hybridized nucleic acid molecules are separated, a hybridization treatment, where the primer hybridizes to its complementary 3′ downstream primer-specific portion of the primary ligation product, and an extension treatment, where the hybridized primers are extended to form extension products complementary to the primary ligation product. The extension product is captured on one or more solid supports, so that the extension product may be individually distinguished. Also provided are one or more secondary oligonucleotide probe sets, each set characterized by (a) a first oligonucleotide probe, having a translational oligonucleotide portion and a 5′ upstream portion complementary to one or more detection oligonucleotide probe-specific portions and (b) a second oligonucleotide probe, having a target portion, and a 3′ downstream portion complementary to one or more detection oligonucleotide probe-specific portions. The oligonucleotide probes in a particular secondary oligonucleotide probe set are suitable for ligation together when hybridized to a corresponding captured primary extension product, but have a mismatch which interferes with this ligation when hybridized to any other nucleic acid molecule. The captured extension product, the one or more secondary oligonucleotide probe sets, and the ligase are blended to form a second ligase detection reaction mixture. The second ligase detection reaction mixture is subjected to one ligase detection reaction cycle. This cycle comprises a denaturation treatment, where any hybridized oligonucleotides are separated from the captured extension product, and a hybridization treatment, where the secondary oligonucleotide probe sets hybridize in a base-specific manner to their respective captured extension products, if present, and ligate to one another to form a secondary ligation product containing (a) the 5′ upstream portion comprising one or more detection oligonucleotide probe-specific portions, (b) the upstream translational oligonucleotide portion connected to the target portion, and (c) the 3′ downstream portion comprising one or more detection oligonucleotide probe-specific portions. The secondary ligation product for each secondary oligonucleotide probe set are distinguishable from other nucleic acids in the second ligase detection reaction mixture. The one or more secondary oligonucleotide probe sets may hybridize to nucleic acid molecules in the sample other than their respective captured extension products but do not ligate together due to the presence of one or more mismatches and individually separate during the denaturation treatment by heating to above the temperature at which each translational oligonucleotide portion melts, but below a temperature at which each secondary ligation product melts. As a result, each secondary ligation product remains hybridized to the captured extension product as a complex. Also provided are detection oligonucleotide probes which bind to the detection oligonucleotide probe-specific portions of the complex, where each detection oligonucleotide probe has a reporter label, thereby providing each complex containing a secondary ligation product with a unique detectable encryption code. The complex and the detection oligonucleotide probes are contacted under conditions effective to permit hybridization of the detection oligonucleotide probes to the complex so that a labeled complex is formed. The reporter label(s) on the complex are then detected, thereby indicating the presence of one or more target nucleic acid molecule in the test sample. As a result, nucleic acid molecules differing by one or more single-base changes, insertions, deletions, or translocations are discriminated from one another during the primary and secondary ligase detection reactions and the discriminated nucleic acid molecules are detected as a result of each different labeled complex having a unique encryption code with a different pattern of detectable emission spectra.

[0026] Another aspect of the present invention is directed to a method for identifying one or more target nucleic acid molecules, differing by one or more single-base changes, insertions, deletions, or translocations, in a plurality of nucleic acid molecules or identifying one or more target mRNA molecules differing by one or more splice site variations in a plurality of mRNA molecules. This method involves providing a test sample potentially containing one or more target nucleic acid molecules differing by one or more single-base changes, insertions, deletions, or translocations, in a plurality of nucleic acid molecules or one or more target mRNA molecules differing by one or more splice site variations in a plurality of mRNA molecules. One or more primary oligonucleotide probe sets are provided. Each set is characterized by (a) a first oligonucleotide probe, having one or more detection oligonucleotide probe-specific portions or their complements and a target-specific portion and (b) a second oligonucleotide probe, having a target-specific portion and an addressable array-specific portion or its complement. The oligonucleotide probes in a particular set are suitable for ligation together when hybridized to a corresponding target nucleic acid molecule or target mRNA molecule, but have a mismatch which interferes with this ligation when hybridized to any other nucleic acid molecule or mRNA molecule present in the sample, and such that each probe set contains a unique combination of detection oligonucleotide probe-specific portions and addressable array-specific portions or their complements. The sample, the one or more oligonucleotide probe sets, and a ligase are blended to form a primary ligase detection reaction mixture. The primary ligase detection reaction mixture is then subjected to one or more primary ligase detection reaction cycles. These cycles include a denaturation treatment, where any hybridized oligonucleotides are separated from the target nucleic acid molecules or target mRNA molecules, and a hybridization treatment, where the one or more oligonucleotide probe sets hybridize in a base-specific manner to their respective target nucleic acid molecules or target mRNA molecules, if present in the sample, and ligate to one another to form a primary ligation product containing (a) the one or more detection oligonucleotide probe-specific portions or their complements, (b) the target-specific portions, and (c) the addressable array-specific portion or its complement. The primary ligation product for each one or more oligonucleotide probe set is distinguished from other nucleic acid molecules or mRNA molecules in the primary ligase detection reaction mixture by virtue of their containing a unique combination of detection oligonucleotide probe-specific portions and addressable array-specific portions or their complements. The primary oligonucleotide probe sets may hybridize to nucleic acid molecules or mRNA molecules in the sample other than their respective target nucleic acid molecules or target mRNA molecules but do not ligate together due to the presence of one or more mismatches and individually separate during the denaturation treatment. Also provided is a solid support with capture oligonucleotide probes immobilized at different sites, where the capture oligonucleotide probes have nucleotide sequences complementary to the addressable array-specific portions or their complements. The primary ligation products, copies of primary ligation products, or complements thereof are contacted with the solid support under conditions effective to hybridize the primary ligation products, copies of primary ligation products, or complements thereof to the capture oligonucleotide probes in a base-specific manner. As a result, the primary ligation products, copies of primary ligation products, or complements thereof are captured on the solid support at the site with the complementary capture oligonucleotide. Detection oligonucleotide probes are provided which bind to the detection oligonucleotide probe-specific portions of the captured primary ligation products, copies of primary ligation products, or complements thereof. Each detection oligonucleotide probe has a reporter label, so that each of the captured primary ligation products, copies of primary ligation products, or complements thereof have a unique detectable encryption code. The captured primary ligation products, copies of primary ligation products, or complements thereof are contacted with the detection oligonucleotide probes under conditions effective to permit hybridization of the detection oligonucleotide probes to the captured primary ligation products, copies of primary ligation products, or complements thereof so that labeled, captured primary ligation products, copies of primary ligation products, or complements thereof are formed. The reporter labels on the labeled, captured primary ligation products, copies of primary ligation products, or complements thereof are detected, thereby indicating the presence of one or more target nucleic acid molecules or target mRNA molecules in the sample. As a result, target nucleic acid molecules differing by one or more single-base changes, insertions, deletions, or translocations in a plurality of nucleic acid molecules or target mRNA molecules differing by one or more splice site variations in a plurality of mRNA molecules are discriminated from one another during the primary ligase detection reaction. The discriminated molecules are detected as a result of different labeled ligation products having encryption codes with a different pattern of detectable emission spectra, at different sites on the solid support.

[0027] Another embodiment of the present invention relates to a method for identifying one or more target nucleic acid molecules, differing by one or more single-base changes, insertions, deletions, or translocations, in a plurality of nucleic acid molecules or identifying one or more target mRNA molecules differing by one or more splice site variations in a plurality of mRNA molecules. This involves providing a sample potentially containing one or more target nucleic acid molecules differing by one or more single-base changes, insertions, deletions, or translocations or one or more target mRNA molecules differing by one or more splice site variations. The target nucleic acid molecules or target mRNA molecules in the sample are captured on one or a plurality of solid supports, so that they may be individually distinguished. One or more primary oligonucleotide probe sets are provided, each set characterized by (a) a first oligonucleotide probe, having a target-specific portion and a 5′ upstream portion complementary to one or more detection oligonucleotide probes and (b) a second oligonucleotide probe, having a target-specific portion and a 3′ downstream portion complementary to one or more detection oligonucleotide probes. The oligonucleotide probes in a particular set are suitable for ligation together when hybridized to one another on a corresponding target nucleic molecule, but have a mismatch which interferes with this ligation when hybridized to any other nucleic molecule present in the sample. Each probe set contains a unique set of 5′ upstream and 3′ downstream portions. The sample, the one or more primary oligonucleotide probe sets, and the ligase are blended to form a primary ligase detection reaction mixture. The primary ligase detection reaction mixture is subjected to one or more ligase detection reaction cycles. These cycles include a denaturation treatment, where any hybridized oligonucleotides are separated from the target nucleic acid molecule or target mRNA molecule, and a hybridization treatment, where the oligonucleotide probe sets hybridize in a base-specific manner to their respective target nucleic acid molecules or target mRNA molecule, if present in the sample, and ligate to one another to form a primary ligation product. The primary ligation product contains (a) the 5′ upstream portion, (b) the target-specific portions, and (c) the 3′ downstream portion with the primary ligation product remaining bound to the captured target nucleic acid molecule or target mRNA molecule. The primary ligation product for each primary oligonucleotide probe set is distinguishable from other nucleic acids in the primary ligase detection reaction mixture by virtue of its containing a unique set of 5′ upstream portion and 3′ downstream portion. The oligonucleotide probe sets may hybridize to nucleic acid molecules in the sample other than their respective target nucleic acid molecule or target mRNA sequences but do not ligate together due to the presence of one or more mismatches and individually separate during the denaturation treatment. Also provided are detection oligonucleotide probes which bind to the 5′ upstream and 3′ downstream portions of the ligation products. Each detection oligonucleotide probe has a reporter label, so that each labeled primary ligation product has a unique detectable encryption code. The primary ligation products and the detection oligonucleotide probes are contacted under conditions effective to permit hybridization of the detection oligonucleotide probes to the primary ligation products so that a labeled captured primary ligation product is formed. The reporter labels on the primary ligation products are detected. As a result, the presence of one or more target nucleic acid molecules differing by one or more single base changes, insertions, deletions, or translocations or one or more target mRNA molecules differing by one or more splice site variations are discriminated from one another during the ligase detection reaction and the discriminated target nucleic acid molecules or the target mRNA molecules are detected due to each different reporter label having a unique encryption code with a different pattern of detectable emission spectra.

[0028] Another aspect of the present is directed to a method for identifying one or more target nucleic acid molecules differing by one or more single-base changes, insertions, deletions, or translocations in a plurality of nucleic acid molecules. This method involves providing a test sample potentially containing one or more target nucleic acid molecules. Also provided are one or more primary oligonucleotide probe sets, each set characterized by (a) a first oligonucleotide probe, having a target-specific portion and a 5′ upstream portion containing one or more translational oligonucleotide probes or their complements, and (b) a second oligonucleotide probe, having a target-specific portion. The oligonucleotide probes in a particular primary oligonucleotide set are suitable for ligation together when hybridized to a corresponding target nucleic acid molecule, but have a mismatch which interferes with this ligation when hybridized to any other nucleic acid molecule present in the sample. Each probe set contains a unique combination of translational oligonucleotide probes or their complements. The sample, the one or more primary oligonucleotide probe sets, and the ligase are blended to form a primary ligase detection reaction mixture. The primary ligase detection reaction mixture is subjected to one or more ligase detection reaction cycles. These cycles include a denaturation treatment, where any hybridized oligonucleotides are separated from the target nucleic acid molecules, and a hybridization treatment, where the oligonucleotide probes or the primary oligonucleotide probe sets hybridize in a base-specific manner to their respective target nucleic acid molecules, if present in the sample, and ligate to one another to form a primary ligation product. The primary ligation product contains (a) the translational oligonucleotide-specific portion or their complements and (b) the target-specific portions. The ligation product for each primary oligonculeotide probe set is distinguishable from other nucleic acids in the primary ligase detection reaction mixture by virtue of its containing a unique combination of translational oligonucleotide portions or their complements. The primary oligonucleotide probe sets may hybridize to nucleic acid molecules in the sample other than their respective target nucleic acid molecules but do not ligate together due to the presence of one or more mismatches and individually separate during the denaturation treatment. Also provided are one or more secondary oligonucleotide probe sets, each set characterized by (a) a first oligonucleotide probe, having a translational oligonucleotide-specific portion and a 5′ upstream portion complementary to one or more detection oligonucleotide probe sequences and (b) a second oligonucleotide probe, having a translational oligonucleotide-specific portion, and a 3′ downstream portion complementary to one or more detection oligonucleotide probe sequences. The oligonucleotide probes in a particular secondary oligonucleotide probe set are suitable for ligation together when hybridized to a corresponding complement of a primary ligation product, but have a mismatch which interferes with this ligation when hybridized to any other nucleic acid molecule present in the sample. As a result, each secondary oligonucleotide probe set contains a unique set of 5′ upstream and 3′ downstream portions. The primary ligation products, the plurality of secondary oligonucleotide probe sets, and the ligase are blended to form a secondary ligase detection reaction mixture. The secondary ligase detection reaction mixture is subjected to one ligase detection reaction cycle. Each cycle includes a denaturation treatment, where any hybridized oligonucleotide probes are separated from nucleic acid molecules to which they are hybridized, and a hybridization treatment, where the secondary oligonucleotide probe sets hybridize in a base-specific manner to their corresponding primary ligation products, if present, and ligate to one another to form a secondary ligation product containing (a) the 5′ upstream portion complementary to one or more distinct oligonucleotide probe sequences, (b) the upstream translational oligonucleotide-specific portion, (c) the downstream translational oligonucleotide-specific portion, and (d) the 3′ downstream portion complementary to one or more distinct oligonucleotide probe sequences. The secondary oligonucleotide probe sets may hybridize to nucleic acid molecules other than their respective primary ligation products but do not ligate together due to the presence of one or more mismatches and individually separate during the denaturation treatment. Also provided are detection oligonucleotide probes which bind to the 5′ upstream portion and the 3′ downstream portion, where each detection oligonucleotide probe has a reporter label, so that each of the products has a unique detectable encryption code. The secondary ligation products and the detection oligonucleotide probes are contacted under conditions effective to permit hybridization of the detection oligonucleotide probes to the ligation products so that labeled, secondary ligation products are formed. The reporter labels on the labeled, secondary ligation products are detected. The presence of one or more target nucleic acid molecules in the sample is indicated, where sequences differing by one or more single-base changes, insertions, deletions, or translocations are discriminated from one another during the primary ligase detection reaction. The discriminated sequences are detected as a result of each different labeled secondary ligation product having a unique encryption code with a different pattern of detectable emission spectra.

[0029] Another aspect of the present invention relates to a method of generating a linearly amplified representation of a whole genome. This involves providing genomic DNA molecules and subjecting the genomic DNA molecules to enzymatic digestion with a first restriction endonuclease to produce a degenerate oligonucleotide fragment with a degenerate overhang. A hairpin linker is provided which contains an overhang complementary to the degenerate overhang and a modification complementing the 5′ end of the degenerate oligonucleotide fragment within a second restriction site. The modification blocks restriction endonuclease cleavage on the 5′ side, but not the 3′ side, of the degenerate oligonucleotide fragment. The enzymatic digestion step is carried out in the presence of the hairpin linker, a ligase, and a first restriction endonuclease, under conditions effective to permit cleavage of genomic DNA molecules and ligation of the hairpin linker onto ends of the degenerate oligonucleotide fragments. Unligated linkers are then removed. Also provided are a second restriction endonuclease and a processive DNA polymerase with strand-displacement activity. The enzymatically digested genomic DNA molecules, the second restriction endonuclease, and the polymerase are blended to form a representational genome amplification mixture. The representational genome amplification mixture is incubated under conditions effective to permit the second restriction endonuclease to nick the hairpin DNA on its unmodified strand and the polymerase to extend the degenerate oligonucleotide fragments at their free 3′ ends. As the polymerase extends and displaces the pre-existing strand, it reproduces the second restriction site allowing for repeated nicking/polymerase extension and linear amplification of a representation of the whole genome.

[0030] Another aspect of the present relates to a method of designing a plurality of labeled detection oligonucleotide probes for use in combinations of one to four or more probes to identify or quantify complementary sequences which will hybridize with little mismatch. The plurality labeled oligonucleotide probes have melting temperatures within a narrow range. This method involves providing a first set of a plurality of tetramers of four nucleotides linked together, where (1) each tetramer within the set differs from all other tetramers in the set by at least two nucleotide bases, (2) no two tetramers within a set are complementary to one another, (3) no tetramers within a set are palindromic or dinucleotide repeats, and (4) no tetramer within a set has less than one or more than three G and C nucleotides. Groups of 2 to 4 tetramers from the first set are linked together to form a collection of multimer units. All multimer units formed from the same tetramer and all multimer units having a melting temperature in ° C. of less than 6 times the number of tetramers forming a multimer unit are removed from the collection of multimer units, to form a modified collection of multimer units. A second collection of multimer units are selected from the modified collection of multimer units such that no consecutive tetramer pair is used twice. 1 or 2 tetramers are added to either or both ends of the second collection of multimers to generate a new set of modified multimer units with higher melting temperatures, so that no consecutive tetramer pair is used twice. The new set of modified multimer units are arranged in a list in order of melting temperature. Units having a melting temperature in ° C. of less than 12 times the number of tetramers and more than 18 times the number of tetramers are removed from the set of modified multimer units to form a further collection of multimer units. Reporter labels are linked to the further collection of multimer units, to form labeled detection oligonucleotide probes.

[0031] The present invention also relates to a method of designing a plurality of translational oligonucleotides for attachment to target-specific oligonucleotide probes to identify or quantify complementary sequences which will hybridize with little mismatch, where the plural translating oligonucleotide sequences have melting temperatures within a narrow range. This involves providing a first set of a plurality of tetramers of four nucleotides linked together, where (1) each tetramer within the set differs from all other tetramers in the set by at least two nucleotide bases, (2) no two tetramers within a set are complementary to one another, (3) no tetramers within a set are palindromic or dinucleotide repeats, and (4) no tetramer within a set has less than one or more than three G and C nucleotides. Groups of 2 to 4 tetramers from the first set are linked together to form a collection of multimer units. All multimer units formed from the same tetramer and all multimer units having a melting temperature in ° C. of less than 3 times the number of tetramers forming a multimer unit are removed from the collection of multimer units to form a modified collection of multimer units. The modified collection of multimer units are arranged in a list in order of melting temperature. The order of the modified collection of multimer units is randomized in 0.1° C. increments of melting temperature. Alternating multimer units in the list are divided into first and second subcollections, each arranged in order of melting temperature. The order of the second subcollection is inverted. In order, the first subcollection of multimer units is linked to the inverted second subcollection of multimer units in order to form a collection of double multimer units. The collection of double multimer units is arranged in a list in order of melting temperature. Those units having a melting temperature in ° C. of less than 12 times the number of tetramers and more than 18 times the number of tetramers are removed from the ordered collection of double multimer units to form a modified collection of multimer units. The double multimer units are linked to a target-specific oligonucleotide probe.

[0032] The present invention also relates to a collection of labeled detection oligonucleotide probes. These probes include a collection of detection oligonucleotide probes to which complementary oligonucleotide probes will hybridize, within a narrow temperature range of greater than 24° C. with little mismatch. The oligonucleotide probes are formed from sets of tetramers where (1) each tetramer within the set differs from all other tetramers in the set by at least two nucleotide bases, (2) no two tetramers within a set are complementary to one another, (3) no tetramers within a set are palindromic or dinucleotide repeats, and (4) no tetramer within a set has less than one or more than three G and C nucleotides. The collection of oligonucleotide probes has oligonucleotides having a melting temperature in ° C. less than 12 times the number of tetramers and more than 18 times the number of tetramers. This aspect of the present invention also includes reporter labels linked to each of the oligonucleotide probes in the collection.

[0033] The present invention also relates to a collection of fusion oligonucleotide probes. These probes includes a collection of translational oligonucleotide probes to which complementary oligonucleotide probes will hybridize, within a narrow temperature range of greater than 24° C. with little mismatch. The oligonucleotide probes are formed from sets of tetramers where (1) each tetramer within the set differs from all other tetramers in the set by at least two nucleotide bases, (2) no two tetramers within a set are complementary to one another, and (3) no tetramers within a set are palindromic or dinucleotide repeats, and (4) no tetramer within a set has less than one or more than three G and C nucleotides. The collection of oligonucleotide probes has oligonucleotides having a melting temperature in ° C. less than 12 times the number of tetramers and more than 18 times the number of tetramers. Target-specific oligonucleotide probes linked to each of the oligonucleotide probes in the collection.

[0034] The methods of the present invention can be used to detect a wide variety of infectious diseases, genetic diseases, and cancer and can be applied to biodefense, environmental monitoring, forensics, and the food and feed industry. The methods hold the promise of high-throughput identification and quantification of dozens to hundreds of nucleic acid sequences in a single homogneous reaction. This will assist in determining the presence of genetic diseases that arise from deletions or copy number imbalance. Furthermore, it will help with LOH and gene dosage analysis of tumor samples on a genome-wide scale. This will be invaluable for identifying genes responsible for tumor development, and consequently new targets for therapies.

[0035] The ligase detection primers are designed to contain detection probe sequences. When two ligase detection primers hybridize adjacent to each other on the target nucleic acid, they may be ligated to each other provided there is perfect complementarity at the ligation junction. The resultant ligation product may be uniquely distinguished, identified, and quantified, separately from all other potential ligation products in the reaction mix, by virtue of containing a unique set of 2, 3, 4, or more detection probe or complementary detection probe sequences. Detection probes, containing distinct reporter groups are then hybridized directly to the ligation product, the complement of the ligation product, or an amplified form of the ligation product, and the unique combination of reporter groups is subsequently detected and scored. This process serves to assemble the unique reporter signal at a molecular level.

[0036] This invention addresses problems that could not be overcome by previous approaches. Firstly, individual reporter groups, such as nanocrystal Quantum dots are small, so they may be used at high concentrations, typically between 500 and 1,000 femtomoles compared to a limit of approximately 3 femtomoles for the smallest quantum beads (100 nM diameter). Thus, the detection probes may be used at sufficiently high concentration to allow for rapid and accurate hybridization to all ligation products. Secondly, prior art methods required 1,000 different LDR or PCR products finding and correctly hybridizing to 1,000 different quantum beads or addresses on arrays or beads or solid supports. In contrast, in the present invention, the total number of reporter detection probes has been reduced to 8, 12, or 16 sequences, which need to find and correctly hybridize to 8, 12, or 16 complementary sequences. This also reduces the total amount of labeled probe present in the reaction from 200 pmol for labeling individual probes to between 4 and 16 pmol using reporter detection probes. Furthermore, it reduces the cost of manufacturing labeled LDR probes from thousands of specialty probes to 8,12, or 16 reporter detection probes. Finally, a true signal requires 2, 3, or 4 reporter detection probes on the same DNA, and thus a positive signal can be distinguished from the non-specific binding of individual reporter detection probes that generate noise.

### BRIEF DESCRIPTION OF THE DRAWINGS

[0037] FIG. 1 is a schematic diagram of a ligase detection reaction (“LDR”) process, in accordance with the present invention, where multiple oligonucleotide probes (“Q-Zip probes”) containing quantum dots (“Q-dots”) are used on a single tail to distinguish single base differences in nucleic acid molecules.

[0038] FIG. 2 is a schematic diagram of an LDR process, in accordance with the present invention, where multiple Q-Zip probes containing Q-dots on a single tail are used with microbead capture to score allele imbalance in a tumor sample compared with a normal sample.

[0039] FIG. 3 is a schematic diagram of an LDR process, in accordance with the present invention, where multiple Q-Zip portions containing Q-dots on a single tail are used with microbead capture to score gene copy number in a tumor sample compared with a normal sample.

[0040] FIG. 4 is a schematic diagram of an LDR process, in accordance with the present invention, where multiple Q-Zip portions containing Q-dots on a single tail are used with microbead capture and a polymerase extension step to distinguish single base differences in nucleic acid molecules.

[0041] FIG. 5 is a schematic diagram of an LDR process, in accordance with the present invention, where double Q-Zip portions containing Q-dots on a single tail are used are used with microbead capture and a polymerase extension step to score allele imbalance in a tumor sample compared with a normal sample.

[0042] FIG. 6 is a schematic diagram of an LDR process, in accordance with the present invention, where multiple Q-Zip portions containing Q-dots on a single tail are used with microbead capture and a polymerase extension step to score gene copy number in a tumor sample compared with a normal sample.

[0043] FIG. 7 is a schematic diagram of an LDR process, in accordance with the present invention, where double Q-Zip portions containing Q-dots on double tails are used with microbead capture and a polymerase extension step to score allele imbalance in a tumor sample compared with a normal sample.

[0044] FIG. 8 is a schematic diagram of an LDR process, in accordance with the present invention, where double ligated Q-Zip portions containing Q-dots on double tails are used with microbead capture and a polymerase extension step to score allele imbalance in a tumor sample compared with a normal sample.

[0045] FIG. 9 is a schematic diagram of an LDR process, in accordance with the present invention, where double Q-Zip portions containing Q-dots on double tails are used with microbead capture and a polymerase extension step to score gene copy number in a tumor sample compared with a normal sample.

[0046] FIG. 10 is a schematic diagram of an LDR process, in accordance with the present invention, where double ligated Q-Zip portions containing Q-dots on double tails are used with microbead capture and a polymerase extension step to score gene copy number in a tumor sample compared with a normal sample.

[0047] FIG. 11 is a schematic diagram of an LDR process, in accordance with the present invention, where double Q-Zip portions containing Q-dots on a single tail are used with universal array capture to distinguish single base differences in nucleic acid molecules.

[0048] FIG. 12 is a schematic diagram of an LDR process, in accordance with the present invention, where ligated double Q-Zip portions containing Q-dots on a single tail are used with universal array capture to distinguish single base differences in nucleic acid molecules.

[0049] FIG. 13 is a schematic diagram of an LDR process, in accordance with the present invention, where double Q-Zip portions containing Q-dots on a single tail are used with universal array capture to score allele imbalance in a tumor sample compared with a normal sample.

[0050] FIG. 14 is a schematic diagram of an LDR process, in accordance with the present invention, where ligated double Q-Zip portions containing Q-dots on a single tail are used with universal array capture to score allele imbalance in a tumor sample compared with a normal sample.

[0051] FIG. 15 is a schematic diagram of an LDR process, in accordance with the present invention, where double Q-Zip portions containing Q-dots on a single tail are used with universal array capture to score gene copy number in a tumor sample compared with a normal sample.

[0052] FIG. 16 is a schematic diagram of an LDR process, in accordance with the present invention, where ligated double Q-Zip portions containing Q-dots on a single tail are used with universal array capture to score gene copy number in a tumor sample compared with a normal sample.

[0053] FIG. 17 is a schematic diagram of an LDR process, in accordance with the present invention, where double Q-Zip portions containing Q-dots on double tails are used with microbead capture to distinguish single base differences in nucleic acid molecules.

[0054] FIG. 18 is a schematic diagram of an LDR process, in accordance with the present invention, where ligated double Q-Zip portions containing Q-dots on double tails are used with microbead capture to distinguish single base differences in nucleic acid molecules.

[0055] FIG. 19 is a schematic diagram of an LDR process, in accordance with the present invention, where double Q-Zip portions containing Q-dots on double tails are used with microbead capture to score allele imbalance in a tumor sample compared with a normal sample.

[0056] FIG. 20 is a schematic diagram of an LDR process, in accordance with the present invention, where ligated double Q-Zip portions containing Q-dots on double tails are used with microbead capture to score allele imbalance in a tumor sample compared with a normal sample.

[0057] FIG. 21 is a schematic diagram of an LDR process, in accordance with the present invention, where double Q-Zip portions containing Q-dots on double tails are used with microbead capture to score gene copy number in a tumor sample compared with a normal sample.

[0058] FIG. 22 is a schematic diagram of an LDR process, in accordance with the present invention, where ligated double Q-Zip portions containing Q-dots on double tails are used with microbead capture to score gene copy number in a tumor sample compared with a normal sample.

[0059] FIG. 23 is a schematic diagram of an LDR process, in accordance with the present invention, where double Q-Zip portions containing Q-dots on double tails are used with microbead capture to distinguish single base differences in nucleic acid molecules.

[0060] FIG. 24 is a schematic diagram of an LDR process, in accordance with the present invention, where ligated double Q-Zip portions containing Q-dots on double tails are used with microbead capture to distinguish single base differences in nucleic acid molecules.

[0061] FIG. 25 is a schematic diagram of an LDR process, in accordance with the present invention, where double Q-Zip portions containing Q-dots on double tails are used with microbead capture to score allele imbalance in a tumor sample compared with a normal sample.

[0062] FIG. 26 is a schematic diagram of an LDR process, in accordance with the present invention, where ligated double Q-Zip portions containing Q-dots on double tails are used with microbead capture to score allele imbalance in a tumor sample compared with a normal sample.

[0063] FIG. 27 is a schematic diagram of an LDR process, in accordance with the present invention, where double Q-Zip portions containing Q-dots on double tails are used with microbead capture to score gene copy number in a tumor sample compared with a normal sample.

[0064] FIG. 28 is a schematic diagram of an LDR process, in accordance with the present invention, where ligated double Q-Zip portions containing Q-dots on double tails are used with microbead capture to score gene copy number in a tumor sample compared with a normal sample.

[0065] FIG. 29 is a schematic diagram of an LDR process, in accordance with the present invention, where double Q-Zip portions containing Q-dots on double tails are used with microbead capture to distinguish and quantify splice variants on mRNA.

[0066] FIG. 30 is a schematic diagram of an LDR process, in accordance with the present invention, where ligated double Q-Zip portions containing Q-dots on double tails are used with microbead capture to distinguish and quantify splice variants on mRNA.

[0067] FIG. 31 is a schematic diagram of an LDR process, in accordance with the present invention, where double Q-Zip portions containing Q-dots on double tails are used with microbead capture to distinguish and quantify splice variants on mRNA in a tumor sample compared with a normal sample.

[0068] FIG. 32 is a schematic diagram of an LDR process, in accordance with the present invention, where ligated double Q-Zip portions containing Q-dots on double tails are used with microbead capture to distinguish and quantify splice variants on mRNA in a tumor sample compared with a normal sample.

[0069] FIG. 33 is a schematic diagram of an LDR process, in accordance with the present invention, where double Q-Zip portions containing Q-dots on double tails are used with microbead capture to distinguish and quantify splice variants on mRNA.

[0070] FIG. 34 is a schematic diagram of an LDR process, in accordance with the present invention, where ligated double Q-Zip portions containing Q-dots on double tails are used with microbead capture to distinguish and quantify splice variants on mRNA.

[0071] FIG. 35 is a schematic diagram of an LDR process, in accordance with the present invention, where double Q-Zip portions containing Q-dots on double tails are used with microbead capture to distinguish and quantify splice variants on mRNA in a tumor sample compared with a normal sample.

[0072] FIG. 36 is a schematic diagram of an LDR process, in accordance with the present invention, where ligated double Q-Zip portions containing Q-dots on double tails are used with microbead capture to distinguish and quantify splice variants on mRNA in a tumor sample compared with a normal sample.

[0073] FIG. 37 is a schematic diagram of an LDR process, in accordance with the present invention, where double Q-Zip portions containing Q-dots on a single tail are used with a universal array to distinguish and quantify splice variants on mRNA.

[0074] FIG. 38 is a schematic diagram of an LDR process, in accordance with the present invention, where ligated double Q-Zip portions containing Q-dots on a single tail are used with a universal array to distinguish and quantify splice variants on mRNA.

[0075] FIG. 39 is a schematic diagram of an LDR process, in accordance with the present invention, where double Q-Zip portions containing Q-dots on a single tail are used with a universal array to distinguish and quantify splice variants on mRNA in a tumor sample compared with a normal sample.

[0076] FIG. 40 is a schematic diagram of an LDR process, in accordance with the present invention, where ligated double Q-Zip portions containing Q-dots on a single tail are used with a universal array to distinguish and quantify splice variants on mRNA in a tumor sample compared with a normal sample.

[0077] FIG. 41 is a schematic diagram of an LDR process, in accordance with the present invention, where double Q-Zip portions containing Q-dots on a single tail are used with a universal array to distinguish and quantify splice variants directly on mRNA.

[0078] FIG. 42 is a schematic diagram of an LDR process, in accordance with the present invention, where ligated double Q-Zip portions containing Q-dots on a single tail are used with a universal array to distinguish and quantify splice variants directly on mRNA.

[0079] FIG. 43 is a schematic diagram of an LDR process, in accordance with the present invention, where double Q-Zip portions containing Q-dots on a single tail are used with a universal array to distinguish and quantify splice variants directly on mRNA in a tumor sample compared with a normal sample.

[0080] FIG. 44 is a schematic diagram of an LDR process, in accordance with the present invention, where ligated double Q-Zip portions containing Q-dots on a single tail are used with a universal array to distinguish and quantify splice variants directly on mRNA in a tumor sample compared with a normal sample.

[0081] FIG. 45 is a schematic diagram of an LDR process, in accordance with the present invention, where whole genome amplification and double Q-Zip portions containing Q-dots on a single tail are used with universal array capture to distinguish single base differences in nucleic acid molecules.

[0082] FIG. 46 is a schematic diagram of an LDR process, in accordance with the present invention, where whole genome amplification and ligated double Q-Zip portions containing Q-dots on a single tail are used with universal array capture to distinguish single base differences in nucleic acid molecules.

[0083] FIG. 47 is a schematic diagram of an LDR process, in accordance with the present invention, where whole genome amplification and ligated double Q-Zip portions containing Q-dots on a single tail are used with ligation to a universal array to distinguish single base differences in nucleic acid molecules.

[0084] FIG. 48 is a schematic diagram of an LDR process, in accordance with the present invention, where whole genome amplification and double Q-Zip portions containing Q-dots on a single tail are used with universal array capture to score allele imbalance in a tumor sample compared with a normal sample.

[0085] FIG. 49 is a schematic diagram of an LDR process, in accordance with the present invention, where whole genome amplification and ligated double Q-Zip portions containing Q-dots on a single tail are used with universal array capture to score allele imbalance in a tumor sample compared with a normal sample.

[0086] FIG. 50 is a schematic diagram of an LDR process, in accordance with the present invention, where whole genome amplification and ligated double Q-Zip portions containing Q-dots on a single tail are used with ligation to universal array capture to score allele imbalance in a tumor sample compared with a normal sample.

[0087] FIG. 51 is a schematic diagram of an LDR process, in accordance with the present invention, where whole genome amplification and double Q-Zip portions containing Q-dots on a single tail are used with universal array capture to score gene copy number in a tumor sample compared with a normal sample.

[0088] FIG. 52 is a schematic diagram of an LDR process, in accordance with the present invention, where whole genome amplification and ligated double Q-Zip portions containing Q-dots on a single tail are used with universal array capture to score gene copy number in a tumor sample compared with a normal sample.

[0089] FIG. 53 is a schematic diagram of an LDR process, in accordance with the present invention, where whole genome amplification and ligated double Q-Zip portions containing Q-dots on a single tail are used with ligation to a universal array to score gene copy number in a tumor sample compared with a normal sample.

[0090] FIG. 54 is a schematic diagram of an LDR process, in accordance with the present invention, where isothermal amplification and double Q-Zip portions containing Q-dots on a single tail are used with universal array capture to distinguish single base differences in nucleic acid molecules.

[0091] FIG. 55 is a schematic diagram of an LDR process, in accordance with the present invention, where isothermal amplification and ligated double Q-Zip portions containing Q-dots on a single tail are used with universal array capture to distinguish single base differences in nucleic acid molecules.

[0092] FIG. 56 is a schematic diagram of an LDR process, in accordance with the present invention, where isothermal amplification and ligated double Q-Zip portions containing Q-dots on a single tail are used with ligation to a universal array to distinguish single base differences in nucleic acid molecules.

[0093] FIG. 57 is a schematic diagram of an LDR process, in accordance with the present invention, where isothermal amplification and double Q-Zip portions containing Q-dots on a single tail are used with universal array capture to score allele imbalance in a tumor sample compared with a normal sample.

[0094] FIG. 58 is a schematic diagram of an LDR process, in accordance with the present invention, where isothermal amplification and ligated double Q-Zip portions containing Q-dots on a single tail are used with universal array capture to score allele imbalance in a tumor sample compared with a normal sample.

[0095] FIG. 59 is a schematic diagram of an LDR process, in accordance with the present invention, where isothermal amplification and ligated double Q-Zip portions containing Q-dots on a single tail are used with ligation to a universal array to score allele imbalance in a tumor sample compared with a normal sample.

[0096] FIG. 60 is a schematic diagram of an LDR process, in accordance with the present invention, where isothermal amplification and double Q-Zip portions containing Q-dots on a single tail are used with universal array to score gene copy number in a tumor sample compared with a normal sample.

[0097] FIG. 61 is a schematic diagram of an LDR process, in accordance with the present invention, where isothermal amplification and ligated double Q-Zip portions containing Q-dots on a single tail are used with universal array capture to score gene copy number in a tumor sample compared with a normal sample.

[0098] FIG. 62 is a schematic diagram of an LDR process, in accordance with the present invention, where isothermal amplification and ligated double Q-Zip portions containing Q-dots on a single tail are used with ligation to a universal array to score gene copy number in a tumor sample compared with a normal sample.

[0099] FIG. 63 is a schematic diagram of an LDR process, in accordance with the present invention, where isothermal amplification and double Q-Zip portions containing Q-dots on double tails are used with translation oligonucleotide probe (“T-Zip portion”) ligation and universal bead capture with addressable array-specific portions to distinguish single base differences in nucleic acid molecules.

[0100] FIG. 64 is a schematic diagram of an LDR process, in accordance with the present invention, where isothermal amplification and ligated double Q-Zip portions containing Q-dots on double tails are used with T-Zip portion ligation and universal bead capture with addressable array-specific portions to distinguish single base differences in nucleic acid molecules.

[0101] FIG. 65 is a schematic diagram of an LDR process, in accordance with the present invention, where isothermal amplification and ligated double Q-Zip portions containing Q-dots on double tails are used with T-Zip portion ligation and ligation to universal capture probes with addressable array-specific portions on beads to distinguish single base differences in nucleic acid molecules.

[0102] FIG. 66 is a schematic diagram of an LDR process, in accordance with the present invention, where isothermal amplification and double Q-Zip portions containing Q-dots on double tails are used with T-Zip portion ligation and universal bead capture with addressable array-specific portions to score allele imbalance in a tumor sample compared with a normal sample.

[0103] FIG. 67 is a schematic diagram of an LDR process, in accordance with the present invention, where isothermal amplification and double Q-Zip portions containing Q-dots on double tails are used with T-Zip portion ligation and universal bead capture with addressable array-specific portions to score allele imbalance in a tumor sample compared with a normal sample.

[0104] FIG. 68 is a schematic diagram of an LDR process, in accordance with the present invention, where isothermal amplification and ligated double Q-Zip portions containing Q-dots on double tails are used with T-Zip portion ligation and ligation to universal capture probes with addressable array-specific portions on beads to score allele imbalance in a tumor sample compared with a normal sample.

[0105] FIG. 69 is a schematic diagram of an LDR process, in accordance with the present invention, where isothermal amplification and double Q-Zip portions containing Q-dots on double tails are used with T-Zip portion ligation and universal bead capture with addressable array-specific portions to score gene copy number in a tumor sample compared with a normal sample.

[0106] FIG. 70 is a schematic diagram of an LDR process, in accordance with the present invention, where isothermal amplification and ligated double Q-Zip portions containing Q-dots on double tails are used with T-Zip portion ligation and universal bead capture with addressable array-specific portions to score gene copy number in a tumor sample compared with a normal sample.

[0107] FIG. 71 is a schematic diagram of an LDR process, in accordance with the present invention, where isothermal amplification and ligated double Q-Zip portions containing Q-dots on double tails are used with T-Zip portion ligation and ligation to universal capture probes with addressable array-specific portions on beads to score gene copy number in a tumor sample compared with a normal sample.

[0108] FIGS. 72A-C are schematic diagrams showing isothermal representational amplification of genomic DNA. FIG. 72A shows one approach for generating single stranded DNA representations of genomic DNA by using an oligonucleotide containing an infrequent restriction site. FIGS. 72B-C show a second approach for generating single stranded DNA representations of genomic DNA by using an oligonucleotide containing a frequent restriction site.

[0109] FIG. 73 is a graph showing the equalization of LDR yields using minicyles, where primers anneal to target 1 (first bar) with 40% efficiency and to target 2 (second bar) with 80% efficiency. For each mini-cycle, the percent yield of a target sequence is calculated from the efficiency of primer ligation multiplied by the amount of free template. For the first mini-cycle, 100% of the template is available. Primers anneal to target 1 with an efficiency of 40% and to target 2 with an efficiency of 80% and ligation occurs. Considering target 1, in the second mini-cycle primers anneal to the remaining 60% of available target with an efficiency of 40%, and ligate. Ligation thus occurs at a further 24% of target 1, leaving 36% of the target available for ligation in the third round, and so on. After 10 mini-cycles, 99% of target 1 and 100% of target 2 have ligation product annealed. The third bar of each mini-cycle shown in FIG. 73 represents the ratio of target 1 to target 2, and indicates that after 10 mini-cycles, both targets are virtually completely annealed to ligated probes.

[0110] FIG. 74 is a graph showing the equalization of LDR yields using minicyles, where probes anneal to target 1 (first bar) with 30% efficiency and to target 2 (second bar) with 90% efficiency. For each mini-cycle, the percent yield of a target sequence is calculated from the efficiency of probe ligation multiplied by the amount of free template. For the first mini-cycle, 100% of the template is available. Probes anneal to target 1 with an efficiency of 30% and to target 2 with an efficiency of 90% and ligation occurs. Considering target 1, in the second mini-cycle probes anneal to the remaining 70% of available target 1, with an efficiency of 30%, and ligate. Ligation thus occurs at a further 21% of target 1, leaving 49% of target 1 available for annealing in the third round, and so on. After 10 mini-cycles, 97% of target 1 and 100% of target 2 have ligation product annealed. The third bar of each mini-cycle shown in FIG. 74 represents the ratio of target 1 to target 2, and indicates that after 10 mini-cycles, both targets are virtually completely annealed to ligated probes.

[0111] FIG. 75 is a graph showing the equalization of LDR yields using minicyles, where for each target region there is a probe that is specific for the wild type target and one that is specific for the SNP, and where probes anneal to target 1 (first bar) with an overall efficiency of 20% and to target 2 (second bar) with an overall efficiency of 40%. For each mini-cycle, the percent yield of a target sequence is calculated from the efficiency of primer ligation multiplied by the amount of free template. For the first mini-cycle, 100% of the template is available. Primers anneal to target 1 with an efficiency of 40%, to target 2 with an efficiency of 80%, and ligation occurs. However, for each target region there is a primer that is specific for the wild type target and one that is specific for the SNP. Although both primers will compete to anneal to the target region, only one of these probes will ligate successfully. Thus, the overall efficiency of ligation is 20% at target 1 and 40% at target 2. Considering target 1, in the second mini-cycle, probes anneal to the remaining 80% of available target 1 with an efficiency of 20%, and ligate. Ligation thus occurs at a further 16% of target 1, leaving 64% of target 1 available for ligation in the third round, and so on. After 10 mini-cycles, 89% of target 1 and 99% of target 2 have ligation product annealed. The third bar of each mini-cycle shown in FIG. 75 represents the ratio of target 1 to target 2, and indicates that after 10 mini-cycles, comparable proportions of each target are annealed to ligated probes.

[0112] FIG. 76 is a graph showing the equalization of LDR yields using minicycles, where for each target region there is a probe that is specific for the wild type target and one that is specific for the SNP, and where probes anneal to target 1 (first bar) with an overall efficiency of 15% and to target 2 (second bar) with an overall efficiency of 45%. For each mini-cycle, the percent yield of a target sequence is calculated from the efficiency of primer ligation multiplied by the amount of free template. For the first mini-cycle, 100% of the template is available. Probes anneal to target 1 with an efficiency of 30%, to target 2 with an efficiency of 90% and ligation occurs. However, for each target region there is a probe that is specific for the wild type target and one that is specific for the SNP. Although both probes will compete to anneal to the target region, only one of these probes will successfully ligate. Thus, the overall efficiency of ligation is 15% at target 1 and 45% at target 2. Considering target 1, in the second mini-cycle, probes anneal to the remaining 85% of available target 1 with an efficiency of 15%, and ligate. Ligation thus occurs at a further 12.75% of target 1, leaving 72.25% of target 1 available for annealing in the third round, and so on. After 10 mini-cycles, 80% of target 1 and 100% of target 2 have ligation product annealed. The third bar of each mini-cycle shown in FIG. 76 represents the ratio of target 1 to target 2, and indicates that after 10 mini-cycles, comparable proportions of each target are annealed to ligated probes.

[0113] FIG. 77 is a graph showing the equalization of LDR yields using minicyles, where probes anneal to target 1 (first bar) with 40% efficiency and to target 2 (second bar) with 80% efficiency, and 5% of target molecules dissociate after ligation. For each mini-cycle, the percent yield of a target sequence is calculated from the efficiency of probe ligation multiplied by the amount of free template. For the first mini-cycle, 100% of the template is available. Probes anneal to target 1 with an efficiency of 40%, to target 2 with an efficiency of 80%, and ligation occurs. However, following ligation, 5% of product molecules dissociate. Considering target 1, 62% is available for further annealing in the second mini-cycle, and this proceeds again with an efficiency of 40%. Following ligation, 5% of ligation product dissociates, leaving 37% of target 1 available for further annealing in the third round, and so on. Because ligation product molecules dissociate from the target after each mini-cycle, the total yield can exceed the amount represented by 100% of the target region. After 10 mini-cycles, the amount of ligation product from target 1 corresponds to 128% of the total region, and the amount from target 2 corresponds to 142% of the total region. The third bar of each mini-cycle shown in FIG. 77 represents the ratio of target 1 to target 2, and indicates that after 10 mini-cycles, comparable amounts of product have been produced from each target.

[0114] FIG. 78 is a graph showing the equalization of LDR yields using minicyles, where probes anneal to target 1 (first bar) with 30% efficiency and to target 2 (second bar) with 90% efficiency, and 5% of product molecules dissociate after ligation. For each mini-cycle, the percent yield of a target sequence is calculated from the efficiency of probe ligation multiplied by the amount of free template. For the first mini-cycle, 100% of the template is available. Probes anneal to target 1 with an efficiency of 30%, to target 2 with an efficiency of 90%, and ligation occurs. However, following ligation, 5% of product molecules dissociate. Considering target 1, 71.5% is available for further annealing in the second mini-cycle, and this proceeds again with an efficiency of 40%. Following ligation, 5% of ligation product dissociates, leaving 49% of target 1 available for further annealing in the third round, and so on. Because ligation product molecules dissociates from the target after each mini-cycle, the total yield can exceed the amount represented by 100% of the target region. After 10 mini-cycles, the amount of ligation product from target 1 corresponds to 120% of the total region, and the amount from target 2 corresponds to 144% of the total region. The third bar of each mini-cycle shown in FIG. 78 represents the ratio of target 1 to target 2, and indicates that after 10 mini-cycles, comparable amounts of product have been produced from each target.

[0115] FIG. 79 is a graph showing the equalization of LDR yields using minicyles, where for each target region there is a probe that is specific for the wild type target and one that is specific for the SNP, and where probes anneal to target 1 (first bar) with an overall efficiency of 20% and to target 2 (second bar) with an overall efficiency of 40%, and 5% of product molecules dissociate after ligation. For each mini-cycle, the percent yield of each target sequence is calculated from the efficiency of probe ligation multiplied by the amount of free template. For the first mini-cycle, 100% of the template is available. Probes anneal to target 1 with an efficiency of 40%, to target 2 with an efficiency of 80% and ligation occurs. However, for each target region there is a probe that is specific for the wild type target and one that is specific for the SNP. Although both probes will compete to anneal to the target region, only one of these probes will successfully ligate. Thus, the overall efficiency of ligation is 20% at target 1 and 40% at target 2. Once ligation has occurred, 5% of product molecules dissociate. Considering target 1, in the second mini-cycle, probes anneal to the remaining 81% of available target 1, again with an efficiency of 20%, and ligate. Following ligation, 5% of ligation product dissociates, leaving 66% of target 1 available for further annealing in the third round, and so on. Because ligation product dissociates from the target after each mini-cycle, the total yield can exceed the amount represented by 100% of the target region. After 10 mini-cycles, the amount of ligation product from target 1 corresponds to 103% of the total region, and the amount from target 2 corresponds to 128% of the total region. The third bar of each mini-cycle shown in FIG. 79 represents the ratio of target 1 to target 2, and indicates that after 10 mini-cycles, comparable amounts of product have been produced from each target.

[0116] FIG. 80 is a graph showing the equalization of LDR yields using minicyles, where for each target region there is a probe that is specific for the wild type target and one that is specific for the SNP, and where probes anneal to target 1 (first bar) with an overall efficiency of 15% and to target 2 (second bar) with an overall efficiency of 45%, and 5% of product molecules dissociate after ligation. For each mini-cycle, the percent yield of each target sequence is calculated from the efficiency of probe ligation multiplied by the amount of free template. For the first mini-cycle, 100% of the template is available. Probes anneal to target 1 with an efficiency of 30% and to target 2 with an efficiency of 90%. However, for each target region there is a probe that is specific for the wild type target and one that is specific for the SNP. Although both probes will compete to anneal to the target region, only one of these probes will successfully ligate. Thus, the overall efficiency of ligation is 15% at target 1 and 45% at target 2. Once ligation has occurred, 5% of product molecules dissociate. Considering target 1, in the second mini-cycle, probes anneal to the remaining 86% of available target 1, again with an efficiency of 15%, and ligate. Following ligation, 5% of ligation product dissociates, leaving 72% of target 1 available for further annealing in the third round, and so on. Because ligation product dissociates from the target after each mini-cycle, the total yield can exceed the amount represented by 100% of the target region. After 10 mini-cycles, the amount of ligation product from target 1 corresponds to 90% of the total region, and the amount from target 2 corresponds to 131% of the total region. The third bar of each mini-cycle shown in FIG. 80 represents the ratio of target 1 to target 2, and indicates that after 10 mini-cycles, comparable amounts of product have been produced from both targets.

[0117] FIG. 81 is a graph showing the Tm values of Q-Zip portions containing Q-dots that are 16mers, where the Tm values are from 63° C. to 69.5° C.

[0118] FIG. 82 is a graph showing the Tm values of T-Zip portions that are 16mers, where the Tm values are from 66.2° C. to 67.4° C.

[0119] FIG. 83 is an agarose gel photograph showing product yields for whole genome amplification of 100 ng of genomic human DNA. The colors have been inverted for clarity. Probe mixes 1, labeled AA probe mix, and 2, labeled CC probe mix, both contain semi-random hexamers, but represent different approaches to the probe design. No template DNA was added to the amplification mixture displayed in the left hand two lanes to confirm that, under the reaction conditions used, no detectable primer dimerism was occurring. The center two lanes show the product obtained from whole genome amplification using the polymerase buffer supplied by the manufacturer (New England Biolabs), and the right hand two lanes contain products from the amplification using optimized buffer conditions. The gel is 1.5% agarose, run for 40 minutes at 6V/cm in 1×TBE buffer. Due to the hyperbranched nature of the product molecules, the DNA does not migrate as far as would be anticipated for linear DNA of the same length.

[0120] FIG. 84 is a polyacrylamide gel showing a test of synthetic oligonucleotides with different blocking groups for resistance to Lambda Exonuclease or Exonuclease I. 3.5 ng of substrate was incubated at 37° C. for 1 h in a 30-μl reaction volume in the presence or absence of increasing amounts (units) of Exonuclease (5′→3′ Lambda Exonuclease and/or 3′→5′ Exonuclease I). Prior to the digestion reaction, the 5′ end of substrate XS 3′ F1 (μg) was phosphorylated by 10 units of T4 polynucleotide kinase in the presence of 10 mM ATP at 37° C. for 1 h in a 25 μl reaction volume. Aliquots of the digestion reactions were electrophoresed in a 10% denaturing polyacrylamide gel, and detected using filter C setting on an ABI 377 DNA sequencer (blue signal). 3.5 ng oligonucleotide diluted in water was used as a control (lane “-”).

[0121] FIG. 85 is a polyacrylamide gel showing a test of synthetic oligonucleotides with different blocking groups for resistance to Exonuclease I. 15 ng of substrate was incubated at 37° C. for 1 h in a 15 μl reaction volume in the presence or absence of 3′→5′ Exonuclease I. Aliquots of the digestion reactions were electrophoresed in a 10% denaturing polyacrylamide gel, and detected using filter C setting on an ABI 377 DNA sequencer (blue signal). 15 ng oligonucleotide diluted in water was used as a control (lane “-”).

[0122] FIG. 86 is a polyacrylamide gel showing a test of synthetic oligonucleotides with different blocking groups for resistance to Exonuclease III. 15 ng of substrate was incubated at 37° C. for 1 h in a 15 μl reaction volume in the presence or absence of 3′→5′ Exonuclease III. Aliquots of the digestion reactions were electrophoresed in a 10% denaturing polyacrylamide gel, and detected using filter C setting on an ABI 377 DNA sequencer (blue signal). 15 ng oligonucleotide diluted in water was used as a control (lane “-”).

[0123] FIG. 87 is a polyacrylamide gel showing a test of synthetic oligonucleotides with different blocking groups for resistance to Lambda Exonuclease. 3.5 ng of substrate was incubated at 37° C. for 1 h in a 30 μl reaction volume in the presence or absence of 5′ 3′ Lambda Exonuclease. Prior to the digestion reaction, the 5′end of substrate XS 3′F1 (1 μg) was phosphorylated by 10 units of T4 polynucleotide kinase in the presence of 10 mM ATP at 37° C. for 1 h in a 25 μl reaction volume. Aliquots of the digestion reactions were electrophoresed in a 10% denaturing polyacrylamide gel, and detected using filter C setting on an ABI 377 DNA sequencer (blue signal). 3.5 ng oligonucleotide diluted in water was used as a control (lane “-”).

[0124] FIG. 88 is a polyacrylamide gel showing a test of synthetic oligonucleotides with different blocking groups for resistance to Exonuclease VII. 15 ng of substrate was incubated at 37° C. for 1 h in a 15 μl reaction volume in the presence or absence of 5′→3′ and 3→5′ Exonuclease VII. Aliquots of the digestion reactions were electrophoresed in a 10% denaturing polyacrylamide gel, and detected using filter C setting on an ABI 377 DNA sequencer (blue signal). 15 ng oligonucleotide diluted in water was used as a control (lane “-”).

[0125] FIG. 89A-B illustrate a procedure for preparing Q-dots with monovalent tails.

[0126] FIGS. 89A-B are flow diagrams showing the preparation of Q-dots with monovalent tails. Two exemplary methods for preparing Q-dots with monovalent tails are shown. In either case, the first step is preparation of magnetic beads bearing a single complementary Q-Zip-oligonucleotide, as shown in FIGS. 89A and B. Magnetic beads containing COOH groups are activated with 1-[3-(Dimethylamino)propyl]-3-ethylcarbodiimide (EDC) in imidazole buffer and 5′-amino complementary Q-Zips are linked covalently to the magnetic beads via formation of an amide bond. (For attaching Q-Zips on the 3′ end, 3′ amino complementary Q-Zips are used.) The magnetic beads are captured and washed extensively to remove free unreacted oligonucleotides. The degree of functionalization of the magnetic beads can be tuned by using another amine such as ethanolamine or 1-aminohexanol along with the oligonucleotide.

[0127] In one method, shown in FIG. 89A, Q-Zips bearing a 5′-biotin group or 5′-amino are then hybridized to the magnetic beads. The beads are captured and washed extensively to remove unhybridized oligonucleotides. Streptavidin Q-dots or COOH Q-dots with EDC are added to the beads to capture the Q-dots on to the Q-Zips and then washed extensively to remove unreacted Q-Zips. The product is denatured with 0.1 M NaOH to elute the Q-dots with monovalent tails.

[0128] In a second method, shown in FIG. 89B, streptavidin Q-dots or COOH Q-dots are instead treated with Q-Zips bearing a 5′-biotin or 5′-amino group and EDC respectively to conjugate the Q-dots to the Q-Zips. The oligonucleotides containing a capture group are hybridized to magnetic beads and washed extensively to remove unhybridzed oligonucleotides and unreacted Q-dots. The product is denatured with 0.1M NaOH to elute the Q-dots with monovalent tails.

[0129] FIG. 90 is a graph depicting the standard curve for Q-dot dilution.

[0130] FIG. 91 is a schematic diagram showing the effect of Q-dot loading on signal intensity.

[0131] FIG. 92 is a schematic diagram showing the titration of oligonucleotide probe concentration on magnetic microspheres using Biocytin.

[0132] FIG. 93 is a schematic diagram showing the titration of oligonucleotide probe concentration on magnetic microspheres using Zip1.

[0133] FIG. 94 is a schematic diagram showing an estimation of the relative intensity of Q-dot/Q-Zip1 and Q-dot/Q-Zip2 signals.

[0134] FIG. 95 is a schematic diagram showing indirect hybridization of Q-dots to magnetic microspheres using a ‘bridging oligo’.

[0135] FIG. 96 shows a list of 16 Q-Zip probes (SEQ ID NO:1 through SEQ ID NO:16), and their 16 complements (SEQ ID NO:17 through SEQ ID NO:32).

[0136] FIG. 97 shows a list of 16 complementary Q-Zip probe-containing tails (“Q-tails”) (SEQ ID NO:33 through SEQ ID NO:48). The tails are each 48mers and consist of three concatenated 16mer Q-Zip probes. The tails were constructed from the four complementary Q-Zip probes (SEQ ID NO:17 through SEQ ID NO:20) labeled QZ1-QZ4 in FIG. 96, as described in Example 2.

[0137] FIG. 98 shows a list of 16 Q-tails (SEQ ID NO:833 through SEQ ID NO:848). The tails are each 48mers and consist of three concatenated 16mer Q-Zip portions. The tails were constructed from the four Q-Zip probes (SEQ ID NO:1 through SEQ ID NO:4) labeled QZ1-QZ4 in FIG. 96.

[0138] FIGS. 99A-D show a list of 112 complementary Q-tails (SEQ ID NO:33 through SEQ ID NO:144). The tails are each 48mers and consist of three concatenated 16mer Q-Zip portions. The tails were constructed from the eight complementary Q-Zip portions (SEQ ID NO:17 through SEQ ID NO:24) labeled QZ1-QZ8 in FIG. 96, as described in Example 2.

[0139] FIGS 100A-D show a list of 112 Q-tails (SEQ ID NO:833 through SEQ ID NO:944). The tails are each 48mers and consist of three concatenated 16mer Q-Zip portions. The tails were constructed from the eight Q-Zip portions (SEQ ID NO:1 through SEQ ID NO:8) labeled QZ1-QZ8 in FIG. 96.

[0140] FIGS. 101A-M show a list of 352 complementary Q-tails (SEQ ID NO:33 through SEQ ID NO:384). The tails are each 48mers and consist of three concatenated 16mer Q-Zip portions. The tails were constructed from the twelve complementary Q-Zip portions (SEQ ID NO:17 through SEQ ID NO:28) labeled QZ1-QZ12 in FIG. 96.

[0141] FIGS. 102A-J show a list of 352 Q-tails (SEQ ID NO:833 through SEQ ID NO:1184). The tails are each 48mers and consist of three concatenated 16mer Q-Zip portions. The tails were constructed from the twelve Q-Zip portions (SEQ ID NO:1 through SEQ ID NO:12) labeled QZ1-QZ12 in FIG. 96.

[0142] FIGS. 103A-X show a list of 800 complementary Q-tails (SEQ ID NO:33 through SEQ ID NO:832). The tails are each 48mers and consist of three concatenated 16mer Q-Zip portions. The tails were constructed from the sixteen complementary Q-Zip portions (SEQ ID NO:17 through SEQ ID NO:32) labeled QZ1-QZ16 in FIG. 96.

[0143] FIGS. 104A-X show a list of 800 Q-tails (SEQ ID NO:833 through SEQ ID NO:1632). The tails are each 48mers and consist of three concatenated 16mer Q-Zip portions. The tails were constructed from the sixteen Q-Zip portions (SEQ ID NO:1 through SEQ ID NO:16) labeled QZ1-QZ12 in FIG. 96.

[0144] FIGS. 105A-G show a list of 238 complementary Q-tails (SEQ ID NO:1633 through SEQ ID NO:1870). The tails are each 64 mers and consist of four concatenated 16mer Q-Zip portions. The tails were constructed from the eight complementary Q-Zip portions (SEQ ID NO:17 through SEQ ID NO:24) labeled QZ1-QZ8 in FIG. 96.

[0145] FIGS. 106A-DD show a list of 1155 complementary Q-tails (SEQ ID NO:1633 through SEQ ID NO:2787). The tails are each 64 mers and consist of four concatenated 16mer Q-Zip portions. The tails were constructed, from the twelve complementary Q-Zip portions (SEQ ID NO:17 through SEQ ID NO:28) labeled QZ1-QZ12 in FIG. 96.

[0146] FIGS. 107A-TTTT show a list of 3500 complementary Q-tails (SEQ ID NO:1633 through SEQ ID NO:5132). The tails are each 64 mers and consist of four concatenated 16mer Q-Zip portions. The tails were constructed from the sixteen complementary Q-Zip portions (SEQ ID NO:17 through SEQ ID NO:32) labeled QZ1-QZ16 in FIG. 96.

[0147] FIGS. 108A-G show a list of 238 pairs of complementary Q-tails. Each tail (SEQ ID NO:7593 through SEQ ID NO:7830; SEQ ID NO:11093 through SEQ ID NO:1330) is a 32 mer and consists of two concatenated Q-Zip portions. The tails were constructed from the eight complementary Q-Zip portions (SEQ ID NO:17 through SEQ ID NO:24) labeled QZ1-QZ8 in FIG. 96. The first tail (i.e. the discriminating oligonucleotide probe) in each pair will ligate to the second tail (i.e. the common oligonucleotide probe) during the ligase detection reaction if the allele-specific oligonucleotide probe is present. Two Q-Zip portions containing Q-dots will hybridize with each oligonucleotide probe, allowing detection of four Q-dots per oligonucleotide probe.

[0148] FIG. 109A-Z show a list of 1155 pairs of complementary Q-tails. Each tail (SEQ ID NO:7593 through SEQ ID NO:8747; SEQ ID NO:11093 through SEQ ID NO:12247) is a 32 mer and consists of two concatenated Q-Zip portions. The tails were constructed from the twelve complementary Q-Zip portions (SEQ ID NO:17 through SEQ ID NO:28) labeled QZ1-QZ12 in FIG. 96. The first tail (i.e. the discriminating oligonucleotide probe) in each pair will ligate to the second tail (i.e. the common oligonucleotide probe) during the ligase detection reaction if the allele-specific oligonucleotide probe is present. Two Q-Zip portions containing Q-dots will hybridize with each oligonucleotide probe, allowing detection of four Q-dots per oligonucleotide probe.

[0149] FIGS. 110A-LLLL show a list of 3500 pairs of complementary Q-tails. Each tail (SEQ ID NO:7593 through SEQ ID NO:11092; SEQ ID NO:11093 through SEQ ID NO:14592) is a 32 mer and consists of two concatenated Q-Zip portions. The tails were constructed from the sixteen complementary Q-Zip portions (SEQ ID NO:17 through SEQ ID NO:32) labeled QZ1-QZ16 in FIG. 96. The first tail (i.e. the discriminating oligonucleotide probe) in each pair will ligate to the second tail (i.e. the common oligonucleotide probe) during the ligase detection reaction if the allele-specific oligonucleotide is present. Two Q-Zip portions containing Q-dots will hybridize with each oligonucleotide probe, allowing detection of four Q-dots per oligonucleotide probe.

[0150] FIGS. 111A-B show a list of 84 pairs of complementary Q-tails. Each tail (SEQ ID NO:5133 through SEQ ID NO:5216; SEQ ID NO:6363 through SEQ ID NO:6446) is a 32 mer and consists of two concatenated Q-Zip portions. The tails were constructed from the eight complementary Q-Zip portions (SEQ ID NO:17 through SEQ ID NO:24) labeled QZ1-QZ8 in FIG. 96. The first tail (i.e. the discriminating oligonucleotide probe) in each pair will ligate to the second tail (i.e. the common oligonucleotide probe) during the ligase detection reaction if the allele-specific oligonucleotide probe is present. Two Q-Zip portions containing Q-dots will hybridize with each oligonucleotide probe, allowing detection of four Q-dot probes per oligonucleotide probe. The two Q-Zip portions containing Q-dots hybridizing to the same oligonucleotide probe will also ligate to each other in the presence of thermostable ligase.

[0151] FIGS. 112A-I show a list of 403 pairs of complementary Q-tails. Each tail (SEQ ID NO:5133 through SEQ ID NO:5535; SEQ ID NO:6363 through SEQ ID NO:6765) is a 32 mer and consists of two concatenated Q-Zip portions. The tails were constructed from the twelve complementary Q-Zip portions (SEQ ID NO:17 through SEQ ID NO:28) labeled QZ1-QZ12 in FIG. 96. The first tail (i.e. the discriminating oligonucleotide probe) in each pair will ligate to the second tail (i.e. the common oligonucleotide probe) during the ligase detection reaction if the allele-specific oligonucleotide is present. Two Q-Zip portions containing Q-dots will hybridize with each oligonucleotide probe, allowing detection of four Q-Zip portions containing Q-dots per oligonucleotide probe. The two Q-Zip portions containing Q-dots hybridizing to the same oligonucleotide probe will also ligate to each other in the presence of thermostable ligase.

[0152] FIGS. 113A-BB show a list of 1230 pairs of complementary Q-tails. Each tail (SEQ ID NO:5133 through SEQ ID NO:6362; SEQ ID NO:6363 through SEQ ID NO:7592) is a 32 mer and consists of two concatenated Q-Zip portions. The tails were constructed from the sixteen complementary Q-Zip portions (SEQ ID NO:17 through SEQ ID NO:32) labeled QZ1-QZ16 in FIG. 96. The first tail (i.e. the discriminating oligonucleotide probe) in each pair will ligate to the second tail (i.e. the common oligonucleotide probe) during the ligase detection reaction if the allele-specific oligonucleotide is present. Two Q-Zip portions containing Q-dots will hybridize with each oligonucleotide probe, allowing detection of four Q-dots per oligonucleotide probe. The two Q-Zip portions containing Q-dots hybridizing to the same oligonucleotide probe will also ligate to each other in the presence of thermostable ligase.

[0153] FIGS. 114A-D show a list of 120 single complementary Q-tails. Each tail (SEQ ID NO:14593 through SEQ ID NO:14712) is a 32 mer and consists of two concatenated Q-Zip portions. The tails were constructed from the sixteen complementary Q-Zip portions (SEQ ID NO:17 through SEQ ID NO:32) labeled QZ1-QZ16 in FIG. 96. Two Q-Zip portions containing Q-dots will hybridize with each tail, allowing detection of two Q-dots per oligonucleotide probe.

[0154] FIGS. 115A-E show a list of 120 single Q-tails. Each tail (SEQ ID NO:14713 through SEQ ID NO:14832) is a 32 mer and consists of two concatenated Q-Zip portions. The tails were constructed from the sixteen Q-Zip portions (SEQ ID NO:1 through SEQ ID NO:16) labeled QZ1-QZ16 in FIG. 96. Two Q-Zip portions containing Q-dots will hybridize with each tail, allowing detection of two Q-dots per oligonucleotide probe.

[0155] FIGS. 116A-C show a list of 64 single complementary Q-tails. Each tail (SEQ ID NO:14833 through SEQ ID NO:14896) is a 32 mer and consists of two concatenated Q-Zip portions. The tails were constructed from the sixteen complementary Q-Zip portions (SEQ ID NO:17 through SEQ ID NO:32) labeled QZ1-QZ16 in FIG. 96. Two Q-Zip portions containing Q-dots will hybridize with each tail, allowing detection of two Q-dot probes per oligonucleotide probe. Upon hybridization, Q-Zip portions containing Q-dots will ligate to each other in the presence of thermostable ligase.

[0156] FIGS. 117A-C show a list of 64 single Q-tails. Each tail (SEQ ID NO:14897 through SEQ ID NO:14960) is a 32 mer and consists of two concatenated Q-Zip portions. The tails were constructed from the sixteen Q-Zip portions (SEQ ID NO:1 through SEQ ID NO:16) labeled QZ1-QZ16 in FIG. 96. Two Q-Zip portions containing Q-dots will hybridize with each tail, allowing detection of two Q-dot probes per oligonucleotide probe. Upon hybridization, Q-Zip portions containing Q-dots will ligate to each other in the presence of thermostable ligase.

[0157] FIGS. 118A-E show a list of 136 T-Zip portions (SEQ ID NO:14961 through SEQ ID NO:15096), and their 136 complements (SEQ ID NO:15097 through SEQ ID NO:15232). The T-Zip portions are each 16mers and were constructed.

[0158] FIGS. 119A-E show the list of 136 T-Zip portions (SEQ ID NO:14961 through SEQ ID NO:15096) and their 136 complements (SEQ ID NO:15097 through SEQ ID NO:15232) shown in FIG. 118. Also shown are the Q-Zip portions and reverse Q-Zip portion numbers.

[0159] FIGS. 120A-UUUUU show a list of 3500 T-Zip portion-containing tails (“T-Zip tails”) (SEQ ID NO:15233 through SEQ ID NO:18732) (initial LDR oligonucleotide probes). Each tail is a 32 mer and consists of two concatenated T-Zip portions. The tails were constructed from the 136 T-Zip portions (SEQ ID NO:14961 through SEQ ID NO:15096) shown in FIG. 119.

[0160] FIGS. 121A-YYY show a list of 3500 upstream and 3500 downstream oligonucleotide probes. Each upstream oligonucleotide probe consists of two concatenated Q-Zip portions followed by a spacer and a T-Zip portion. Each downstream oligonucleotide probe consists of one T-Zip portion followed by a spacer and two concatenated complementary Q-Zip portions. The oligonucleotide probes were constructed from the 136 T-Zip portions (SEQ ID NO:14961 through SEQ ID NO:15096) shown in FIG. 119 and the 16 complementary Q-Zip portions (SEQ ID NO:17 through SEQ ID NO:32) labeled QZ1-QZ16 in FIG. 96. Sequence identification numbers refer to the nucleotide sequence immediately following or immediately preceding the sequence identification number, as applicable.

[0161] FIGS. 122A-RR show a list of 1230 T-Zip tails (SEQ ID NO:18733 through SEQ ID NO:19962) (initial LDR oligonucleotide probes). Each tail is a 32 mer and consists of two concatenated T-Zip portions. The tails were constructed from the 136 T-Zip portions (SEQ ID NO:14961 through SEQ ID NO:15096) shown in FIG. 119.

[0162] FIGS. 123A-AA show a list of 1230 upstream and 1230 downstream oligonucleotide probes. Each upstream oligonucleotide probe consists of one ligated Q-tail followed by a spacer and a T-Zip portion. Each downstream oligonucleotide probe consists of one T-Zip portion followed by a spacer and one complementary ligated Q-tail. The oligonucleotide probes were constructed from the 1230 T-Zip tails (SEQ ID NO:18733 through SEQ ID NO:19962) shown in FIG. 122, and the 1230 Q-tails (SEQ ID NO:5133 through SEQ ID NO:6362) and 1230 complementary Q-tails (SEQ ID NO:6363 through SEQ ID NO:7592) shown in FIG. 113. Sequence identification numbers refer to the nucleotide sequence immediately following or immediately preceding the sequence identification number, as applicable.

### DETAILED DESCRIPTION OF THE INVENTION

Ligase Detection Reaction/Detection Probe Hybridization/Detection Scheme

[0163] The present invention relates to a method for identifying one or more target nucleic acid molecules differing by one or more single-base changes, insertions, deletions, or translocations. This method includes a ligase detection reaction phase, a detection probe hybridization phase, and a detection phase.

[0164] The ligation detection reaction phase involves providing a test sample potentially containing one or more target nucleic acid molecules differing by one or more single-base changes, insertions, deletions, or translocations. One or more primary oligonucleotide probe sets are used in this phase. Each set is characterized by (a) a first oligonucleotide probe, having a target-specific portion and (b) a second oligonucleotide probe, having a target-specific portion, where the oligonucleotide probes in a particular set are suitable for ligation together when hybridized on a corresponding target nucleic acid molecule, but have a mismatch which interferes with such ligation when hybridized to any other nucleic acid molecule present in the sample. One or both oligonucleotide probes in the set contain one or more detection oligonucleotide probe-specific portions or their complements such that each probe set contains a unique set of one or more detection oligonucleotide probe-specific portions or their complements. The sample, the one or more primary oligonucleotide probe sets, and a ligase are blended to form a primary ligase detection reaction mixture. The primary ligase detection reaction mixture is subjected to one or more ligase detection reaction cycles. These cycles each include a denaturation treatment and a hybridization treatment. In the denaturation treatment, any hybridized oligonucleotides are separated from the target nucleic acid molecules. With the hybridization treatment, the primary oligonucleotide probe sets hybridize in a base-specific manner to their respective target nucleic acid molecules, if present in the sample, and ligate to one another to form a primary ligation product containing the target-specific portions and one or more detection oligonucleotide probe-specific portions or their complements. The primary ligation product for each of the primary oligonucleotide probe sets are distinguishable from other nucleic acid molecules in the primary ligase detection reaction mixture by a unique set of one or more detection oligonucleotide probe-specific portions or their complements. The primary oligonucleotide probe sets may hybridize to nucleic acid molecules in the sample other than their respective target nucleic acid molecules but do not ligate together due to the presence of one or more mismatches and individually separate during the denaturation treatment.

[0165] For the detection probe hybridization phase, detection oligonucleotide probes which bind to the complementary detection oligonucleotide probe-specific portion of the captured primary ligation product or complements thereof are provided. Each detection oligonucleotide probe has a reporter label, thereby providing each primary ligation product with a unique detectable encryption code. The primary ligation products and the detection oligonucleotide probes are contacted under conditions effective to permit hybridization of the detection oligonucleotide probes to the primary ligation products so that a labeled primary ligation product is formed.

[0166] In the detection phase, the reporter label(s) on the primary ligation product are detected, thereby indicating the presence of one or more target nucleic acid molecules in the sample. Nucleic acid molecules differing by one or more single-base changes, insertions, deletions, or translocations are discriminated from one another during the one or more ligase detection reaction cycles and the discriminated nucleic acid molecules are detected as a result of each different labeled, primary ligation product having a unique encryption code with a different pattern of detectable emission spectra.

[0167] The ligase detection reaction process, in accordance with the present invention, is described generally in WO 90/17239 to Barany et al., F. Barany et al., “Cloning, Overexpression and Nucleotide Sequence of a Thermostable DNA Ligase-encoding Gene,” Gene 109:1-11 (1991), and F. Barany, “Genetic Disease Detection and DNA Amplification Using Cloned Thermostable Ligase,” Proc. Natl. Acad. Sci. USA, 88:189-193 (1991), the disclosures of which are hereby incorporated by reference in their entirety. In accordance with the present invention, the ligase detection reaction can use 2 sets of complementary oligonucleotides. This is known as the ligase chain reaction which is described in the 3 immediately preceding references, which are hereby incorporated by reference in their entirety. Alternatively, the ligase detection reaction can involve a single cycle which is known as the oligonucleotide ligation assay. See Landegren, et al., “A Ligase-Mediated Gene Detection Technique,” Science 241:1077-80 (1988); Landegren, et al., “DNA Diagnostics—Molecular Techniques and Automation,” Science 242:229-37 (1988); and U.S. Pat. No. 4,988,617 to Landegren, et al.

[0168] During the ligase detection reaction phase of the process, the denaturation treatment is carried out at a temperature of 80-105° C., while hybridization takes place at 50-85° C. Each cycle comprises a denaturation treatment and a thermal hybridization treatment which in total is from about one to five minutes long. Typically, the ligation detection reaction involves repeatedly denaturing and hybridizing for 2 to 50 cycles. The total time for the ligase detection reaction phase of the process is 1 to 250 minutes.

[0169] The oligonucleotide probe sets can be in the form of ribonucleotides, deoxynucleotides, modified ribonucleotides, modified deoxyribonucleotides, peptide nucleotide analogues, modified peptide nucleic acid analogues, modified phosphate-sugar-backbone oligonucleotides, nucleotide analogs, and mixtures thereof.

[0170] In one variation, the oligonucleotides of the oligonucleotide probe sets each have a hybridization or melting temperature (i.e. Tₘ) of 66-70° C. These oligonucleotides are 20-28 nucleotides long.

[0171] It may be desirable to destroy chemically or enzymatically unconverted LDR oligonucleotide probes that contain addressable nucleotide array-specific portions after the ligase detection reaction process is completed. Such unconverted probes will otherwise compete with ligation products for hybridization to other nucleic acid molecules during downstream processing. Destruction can be accomplished by utilizing an exonuclease, such as exonuclease III (L-H Guo and R. Wu, Methods in Enzymology 100:60-96 (1985), which is hereby incorporated by reference in its entirety) in combination with LDR probes that are blocked at the ends and not involved with ligation of probes to one another. The blocking moiety could be a reporter group or a phosphorothioate group. T. T. Nikiforow, et al., “The Use of Phosphorothioate Primers and Exonuclease Hydrolysis for the Preparation of Single-stranded PCR Products and their Detection by Solid-phase Hybridization,” PCR Methods and Applications, 3:p. 285-291 (1994), which is hereby incorporated by reference in its entirety. After the LDR process, unligated probes are selectively destroyed by incubation of the reaction mixture with the exonuclease. The ligated probes are protected due to the elimination of free 3′ ends which are required for initiation of the exonuclease reaction. This approach results in an increase in the signal-to-noise ratio, especially where the LDR reaction forms only a small amount of product. Since unligated oligonucleotides compete for hybridization to other nucleic acid molecules in downstream processing, such competition with the ligated oligonucleotides lowers the signal. An additional advantage of this approach is that unhybridized label-containing sequences are degraded and, therefore, are less able to cause a target-independent background signal, because they can be removed more easily by washing.

[0172] Prior to the ligation detection reaction phase of the present invention, the sample is preferably amplified by an initial target nucleic acid amplification procedure. This increases the quantity of the target nucleotide sequence in the sample. For example, the initial target nucleic acid amplification may be accomplished using the polymerase chain reaction process, self-sustained sequence replication, Q-β replicase-mediated RNA amplification, or ligase chain reaction. The polymerase chain reaction process is the preferred amplification procedure and is fully described in H. Erlich, et. al., “Recent Advances in the Polymerase Chain Reaction,” Science 252: 1643-50 (1991); M. Innis, et. al., PCR Protocols: A Guide to Methods and Applications, Academic Press: New York (1990); and R. Saiki, et. al., “Primer-directed Enzymatic Amplification of DNA with a Thermostable DNA Polymerase,” Science 239: 487-91 (1988), which are hereby incorporated by reference in their entirety. The ligase chain reaction process is fully described in F. Barany, et. al., “Cloning, Overexpression and Nucleotide Sequence of a Thermostable DNA Ligase-encoding Gene,” Gene 109: 1-11 (1991) and F. Barany, “Genetic Disease Detection and DNA Amplification Using Cloned Thermostable Ligase,” Proc. Natl. Acad. Sci. USA 88: 189-93 (1991), which are hereby incorporated by reference in their entirety. J. Guatelli, et. al., “Isothermal, in vitro Amplification of Nucleic Acids by a Multienzyme Reaction Modeled After Retroviral Replication,” Proc. Natl. Acad. Sci. USA 87: 1874-78 (1990), which is hereby incorporated by reference in its entirety, describes the self-sustained sequence replication process. The Q-β replicase-mediated RNA amplification is disclosed in F. Kramer, et. al., “Replicatable RNA Reporters,” Nature 339: 401-02 (1989), which is hereby incorporated by reference in its entirety.

[0173] Of these amplification procedures, the polymerase chain reaction is preferred. In carrying out this procedure, the target nucleic acid, when present in the form of a double stranded DNA molecule is denatured to separate the strands. This is achieved by heating to a temperature of 80-105° C. Polymerase chain reaction primers are then added and allowed to hybridize to the strands, typically at a temperature of 20-85° C. A thermostable polymerase (e.g., Thermus aquaticus polymerase) is also added, and the temperature is then adjusted to 50-85° C. to extend the primer along the length of the nucleic acid to which the primer is hybridized. After the extension phase of the polymerase chain reaction, the resulting double stranded molecule is heated to a temperature of 80-105° C. to denature the molecule and to separate the strands. These hybridization, extension, and denaturation steps may be repeated a number of times to amplify the target nucleic acid to an appropriate level.

[0174] In carrying out the ligase detection reaction of the present invention, a suitable thermostable ligase can be isolated from Thermus aquaticus, as set forth in M. Takahashi, et al., “Thermophillic DNA Ligase,” J. Biol. Chem. 259:10041-47 (1984), which is hereby incorporated by reference in its entirety. Alternatively, it can be prepared recombinantly. Procedures for such isolation as well as the recombinant production of Thermus aquaticus ligase (and Thermus themophilus ligase) are disclosed in WO 90/17239 to Barany, et. al., and F. Barany, et al., “Cloning, Overexpression and Nucleotide Sequence of a Thermostable DNA-Ligase Encoding Gene,” Gene 109:1-11 (1991), which are hereby incorporated by reference in their entirety. These references contain complete sequence information for this ligase as well as the encoding DNA. Other suitable ligases include, without limitation, E. coli ligase, T4 ligase, Thermus sp. AK16 ligase (WO 00/26381 to Barany et al., which is hereby incorporated by reference), Aquifex aeolicus ligase, Thermotoga maritima ligase, and Pyrococcus ligase. The ligation detection reaction mixture may include a carrier DNA, such as salmon sperm DNA.

[0175] The hybridization step, which is preferably a thermal hybridization treatment, discriminates between nucleotide sequences based on a distinguishing nucleotide at the ligation junctions. The difference between the target nucleotide sequences can be, for example, a single nucleic acid base difference, a nucleic acid deletion, a nucleic acid insertion, or translocation. Such sequence differences involving more than one base can also be detected. Preferably, the oligonucleotide probe sets have substantially the same length so that they hybridize to target nucleotide sequences at substantially similar hybridization conditions. As a result, the process of the present invention is able to detect infectious diseases, genetic diseases, and cancer. It is also useful in environmental monitoring, forensics, and food science.

[0176] A wide variety of infectious diseases can be detected by the process of the present invention. Typically, these are caused by bacterial, viral, parasite, and fungal infectious agents. The resistance of various infectious agents to drugs can also be determined using the present invention.

[0177] Bacterial infectious agents which can be detected by the present invention include, without limitation, Escherichia coli, Salmonella, Shigella, Klebsiella, Pseudomonas, Listeria monocytogenes, Mycobacterium tuberculosis, Mycobacterium avium-intracellulare, Yersinia, Francisella, Pasteurella, Brucella, Clostridia, Bordetella pertussis, Bacteroides, Staphylococcus aureus, Streptococcus pneumonia, B-Hemolytic strep., Corynebacteria, Legionella, Mycoplasma, Ureaplasma, Chlamydia, Neisseria gonorrhea, Neisseria meningitides, Hemophilus influenza, Enterococcus faecalis, Proteus vulgaris, Proteus mirabilis, Helicobacter pylori, Treponema palladium, Borrelia burgdorferi, Borrelia recurrentis, Rickettsial pathogens, Nocardia, and Actinomycetes.

[0178] Fungal infectious agents which can be detected by the present invention include, without limitation, Cryptococcus neoformans, Blastomyces dermatitidis, Histoplasma capsulatum, Coccidioides immitis, Paracoccicioides brasiliensis, Candida albicans, Aspergillus fumigautus, Phycomycetes (Rhizopus), Sporothrix schenckii, Chromomycosis, and Maduromycosis.

[0179] Viral infectious agents which can be detected by the present invention include, without limitation, human immunodeficiency virus, human T-cell lymphocytotrophic virus, hepatitis viruses (e.g., Hepatitis B Virus and Hepatitis C Virus), Epstein-Barr Virus, cytomegalovirus, human papillomaviruses, orthomyxo viruses, paramyxo viruses, adenoviruses, corona viruses, rhabdo viruses, polio viruses, toga viruses, bunya viruses, arena viruses, rubella viruses, and reo viruses.

[0180] Parasitic agents which can be detected by the present invention include, without limitation, Plasmodium falciparum, Plasmodium malaria, Plasmodium vivax, Plasmodium ovale, Onchoverva volvulus, Leishmania, Trypanosoma spp., Schistosoma spp., Entamoeba histolytica, Cryptosporidum, Giardia spp., Trichimonas spp., Balatidium coli, Wuchereria bancrofti, Toxoplasma spp., Enterobius vermicularis, Ascaris lumbricoides, Trichuris trichiura, Dracunculus medinesis, trematodes, Diphyllobothrium latum, Taenia spp., Pneumocystis carinii, and Necator americanis.

[0181] The present invention is also useful for detection of drug resistance by infectious agents. For example, vancomycin-resistant Enterococcus faecium, methicillin-resistant Staphylococcus aureus, penicillin-resistant Streptococcus pneumoniae, multi-drug resistant Mycobacterium tuberculosis, and AZT-resistant human immunodeficiency virus can all be identified with the present invention.

[0182] Genetic diseases can also be detected by the process of the present invention. This can be carried out by prenatal screening for chromosomal and genetic aberrations or post natal screening for genetic diseases. Examples of detectable genetic diseases include, without limitation, 21 hydroxylase deficiency, cystic fibrosis, Fragile X Syndrome, Turner Syndrome, Duchenne Muscular Dystrophy, Down Syndrome or other trisomies, heart disease, single gene diseases, HLA typing, phenylketonuria, sickle cell anemia, Tay-Sachs Syndrome, thalassemia, Kinefelter's Syndrome, Huntington's Disease, autoimmune diseases, lipidosis, obesity defects, hemophilia, inborn errors in metabolism, and diabetes.

[0183] Cancers which can be detected by the process of the present invention generally involve oncogenes, tumor suppressor genes, or genes involved in DNA amplification, replication, recombination, or repair. Examples of these include, without limitation, MSH2 gene, MLH2 gene, APC, AKT, ALT, AXL, BAX, Bcl2, Beta-Catenin, bFGF, BRCA1, BRCA2, Braf, Cdc25A, Cdk4, c-Fos, c-Jun, c-Kit, C-met, c-Myc, c-Ret, CSF1R, CSF2, c-Src, CYCD-CDK4, CYCE-CDK2, Cyclin D1, Cyclin E1, Cytokines, Dishevelled, E2F, E-Cadherin, EGFR, elF4E, ErbB-3, ErbB-4, FGFR-1, FGFR-2, FGFR-3, FGFR-4, FH4 (VEGFR-3), Fit-1 (VEGFR-1), Flk-1 (VEGFR-2), Frizzled, G Proteins, GPCR, GRB2-SOS, GSK3 beta, Her2-neu, HGF, HSP27, HSP70, IFGII, IGFR1, K-ras, H-ras, N-ras, LT, MAPK, MDM2, MEK, MLH1, MSH2, MSH6, MYC, p15^{INK4b}, p16^{INK4a}, p19^{ARF}, p21^{Cip}, p27^{Kip}, p53, PDGFR alpha, PDGFR beta, PI3K, PP2A, PTEN, RAF, RAS, RB, Ron, RSK, RTK, Ski, Smad2, Smad4, ST, surviving, TbRII, TCF, Tcf4, TERT, TGF-Beta, TGF-Beta R, TIC2, TOR, VEGF, WAF1, Wisp-1, Wisp-3, WNT, SNPs within cancer genes or adjacent regions that serve as markers for copy number changes or loss of heterozygosity in such genes, BRCA1 gene, p53 gene, Familial polyposis coli, Her2/Neu amplification, Bcr/Ab1, K-ras gene, human papillomavirus Types 16 and 18, leukemia, colon cancer, breast cancer, lung cancer, prostate cancer, brain tumors, central nervous system tumors, bladder tumors, melanomas, liver cancer, osteosarcoma and other bone cancers, testicular and ovarian carcinomas, ENT tumors, and loss of heterozygosity. Suitable adjacent regions can be in areas in the 100 kilobases adjacent to known or candidate cancer genes. An example of this is SNPs adjacent to Her2-Neu that co-amplifies Her-Neu gene or SNPs or the Q-arm of chromosome 18 that may used to score loss of heterozygosity on 18Q.

[0184] In the area of environmental monitoring, the present invention can be used, for example, for detection, identification, and monitoring of pathogenic and indigenous microorganisms in natural and engineered ecosystems and microcosms such as in municipal waste water purification systems and water reservoirs or in polluted areas undergoing bioremediation. It is also possible to detect plasmids containing genes that can metabolize xenobiotics, to monitor specific target microorganisms in population dynamic studies, or either to detect, identify, or monitor genetically modified microorganisms in the environment and in industrial plants.

[0185] The present invention can also be used in a variety or forensic areas, including, without limitation, for human identification for military personnel and criminal investigation, paternity testing and family relation analysis, HLA compatibility typing, and screening blood, sperm, or transplantation organs for contamination.

[0186] In the food and feed industry, the present invention has a wide variety of applications. For example, it can be used for identification and characterization of production organisms such as yeast for production of beer, wine, cheese, yogurt, bread, etc. Another area of use is with regard to quality control and certification of products and processes (e.g., livestock, pasteurization, and meat processing) for contaminants. Other uses include the characterization of plants, bulbs, and seeds for breeding purposes, identification of the presence of plant-specific pathogens, and detection and identification of veterinary infections.

[0187] Once the ligation detection reaction phase of the process is completed, the detection probe hybridization phase is initiated. During this phase of the process, the ligation products and the detection oligonucleotide probes are contacted with each other at a temperature of 25-90° C., preferably 60-80° C., and for a time period of 10-180 minutes, preferably up to 60 minutes.

[0188] The detection phase of the present invention may involve scanning and identifying if ligation of particular oligonucleotide sets occurred and correlating ligation to the presence or absence of the target nucleotide sequence in the test sample. Scanning can be carried out by scanning electron microscopy, confocal microscopy, charge-coupled device, scanning tunneling electron microscopy, infrared microscopy, atomic force microscopy, electrical conductance, and fluorescent or phosphor imaging. Correlating is carried out with a computer.

[0189] Suitable reporter labels in accordance with the present invention include, without limitation, nanocrystals. When nanocrystals are used as reporting labels in the present invention, detecting includes exciting the nanocrystals to produce an emission spectrum and evaluating the emission spectra of the nanocrystals.

[0190] The preferred embodiment of the present invention uses nanocrystals known as Quantum dots. Quantum dots (Q-dots) are nanometer sized semiconductor crystals with optical properties that are strongly dependent on both the size and the material of the crystal (Alivisatos, “Semiconductor Clusters, Nanocrystals, and Quantum Dots,” Science 271:933-937 (1996), which is hereby incorporated by reference in its entirety). Most notably, the absorption and emission spectra from Q-dots can be tuned across a broad range of the electromagnetic spectrum simply by changing their size (Bruchez et al., “Semiconductor Nanocrystals as Fluorescent Biological Labels,” Science 281:2013 (1998), which is hereby incorporated by reference in its entirety).

[0191] The principle behind the size dependent properties of Quantum dots is called “quantum confinement.” The absorbing and emitting states shift to higher energy as the size of the particle decreases, requiring more energy to “confine” the excitation within the crystal structure (Efros, et al., “Interband Absorption of Light in a Semiconductor Sphere,” Soviet Physics Semiconductors 16(7):772-775 (1982), which is hereby incorporated by reference in its entirety). 12 to 16 or more easily distinguishable Quantum dots may be synthesized in the visible and IR regions alone.

[0192] Quantum dots can be synthesized with a predetermined emission wavelength with an accuracy of ±2 nm, a full width at half-maximum (FWHM) less than 35 nm and quantum yields (QYs) as high as 50% (Hines et al., “Synthesis and Characterization of Strongly Luminescing Layered Semiconductor Nanoclusters ((CdSe)ZnS),” J. Phys. Chem. 100(2):468-471 (1996), Peng, et al., “Epitaxial Growth of Highly Luminescent CdSe/CdS Core/Shell Nanocrystals with Photostability and Electronic Accessibility,” J. Am. Chem. Soc. 119(30):7019-7029 (1997), Dabbousi et al., “(CdSe)ZnS Core-Shell Quantum Dots: Synthesis and Characterization of a Size Series of Highly luminescent Nanocrystallites,” J. Phys. Chem. B 101:9463 (1997), which is hereby incorporated by reference in their entirety). A recent advance in Q-dot synthesis was the discovery of “core/shell” Q-dots. These are Quantum dots made from one material (e.g. CdSe) that are coated with a shell of a second, higher bandgap material (e.g. ZnS). The shell protects the fluorescent core from the surface and surrounding environment, significantly enhancing quantum yield to as high as 80%, meaning that most of the photons absorbed are re-emitted as fluorescence (Peng, et al., “Epitaxial Growth of Highly Luminescent CdSe/CdS Core/Shell Nanocrystals with Photostability and Electronic Accessibility,” J. Am. Chem. Soc. 119(30):7019-7029 (1997), which is hereby incorporated by reference in its entirety).

[0193] In addition to tunable emission wavelengths, other novel optical properties give Q-dots distinct advantages over organic dyes as has already been reported in the literature cited above:
[0194] 1) Flexible excitation: relative to organic dyes, Q-dots have extremely large excitation spectra (50 to 90-fold higher with excitation at 350 nm), which allows all Q-dot colors to be excited efficiently with a single wavelength or a broadband source (e.g., a lamp). Single wavelength excitation simplifies optical systems for multiplexed Q-dot assays by allowing the use of inexpensive and robust light-sources such as blue solid-state lasers or LEDs.
[0195] 2) Minimal spectral overlap: emission spectra from organic dyes are broad and asymmetric. In contrast, the symmetric emission spectra of Q-dots greatly reduce cross-talk in multiplexed assays, increasing sensitivity as well as the number of available colors.
[0196] 3) Controllable surface chemistry: modifiable surface molecules allow all Q-dots to be conjugated using standard chemistries. Since the surface of all Q-dots can be coated with an identical organic layer, differential reactivity is minimized. Surface chemistry can also be tailored to eliminate non-specific binding in bio-assays.
[0197] 4) High photostability: unlike organic dyes, Q-dots are extremely photostable. Enhanced photostability means that fluorescence can be measured over long periods of time, enhancing detection sensitivity.

[0198] The reporter label is connected to its probe using a binding agent-binding partner. Suitable binding agent-binding partner pairs in accordance with the present invention include, without limitation, antibody-antigen binding partners, streptavidin-biotin binding partners, complementary oligonucleotides, amino groups and EDC activated carboxylic acid groups, thiol based binding partners, histidine moieties and nickel-NTA, and other chemical moieties that may be covalently or ionically linked to each other.

[0199] The reporter probe sequences need to be designed so that there is no cross hybridization between any of the sequences or their complements, yet the Tm should be high. The preferred embodiment of this invention uses probe sequences of 16 bases. Most 16mer sequences have Tₘ values in the range of 44° C. to 52° C. The preferred embodiment of this invention uses probe sequences of 16 bases which have Tm values between 65° C. and 67° C. The preferred embodiment for selection of these special sequences is illustrated in FIG. 96. One solution to the set of 16 is provided in Table 3 (infra), other permutations and variations of these and closely related sequences may also be used, provided that there is no cross-hybridization between them.

[0200] There are different formulations for using the reporter probe sequences. In one formulation, the discriminating LDR probes each have regions with 3 or 4 reporter probe sequences or their complements, and the common probe possesses a binding agent for subsequent capture. Alternatively, the genomic DNA has a binding agent (such as biotin groups) incorporated to allow capture, the discriminating LDR probes each have 2 reporter probe sequences, and the common probes also possess 2 reporter probe sequences. In another formulation, the discriminating LDR probes each have 2 reporter probe sequences, the common probes have standard addressable array-specific portion, and the products are captured on a standard Universal array. Also included in some of these formulations is the option of capturing reporter probes onto the detection sequences using a thermostable ligase to ligate two or more detection probes together.

[0201] In addressing the encryption problem, due to the quantitative nature of quantum dot nanocrystals, the use of one, two, or even three of the same color quantum dot nanocrystals can be used to distinguish between ligation products at a given location or address. For the encryption solutions presented below, the number of quantum dot nanocrystals of the same color at a given location or address has been limited to a maximum of two, defined as “doublets” in this application.

[0202] The individual primary ligation products or complements thereof may be captured on one or a plurality of solid supports. This takes place after subjecting the primary ligase detection reaction mixture to one or more ligase detection reaction cycles and prior to contacting the primary ligation products and the detection oligonucleotide probes. As a result, each primary ligation product is individually identified.

[0203] Paramagnetic beads are suitable solid supports in accordance with the present invention. Where the solid support is a paramagnetic bead, the method further involves recovering the paramagnetic beads by magnetic attraction after capturing, and placing the recovered paramagnetic beads on a microscope slide.

[0204] In permitting attachment of ligation products to solid supports, the first oligonucleotide probe of the primary oligonucleotide probe set or sets may have a binding agent which is incorporated in any primary ligation product, and the solid support can have one or more attached binding partner to the binding agent. The ligation product is captured in the solid support by use of conditions effective for the binding agent and its binding partner to become coupled together. As a result, any primary ligation product is immobilized to the solid support.

[0205] Suitable binding agent-binding partner pairs in accordance with the present invention include, without limitation, antibody-antigen binding partners, streptavidin-biotin binding partners, complementary oligonucleotides, amino groups and EDC activated carboxylic acid groups, thiol based binding partners, histidine moieties and nickel-NTA, and other chemical moieties that may be covalently or ionically linked to each other.

[0206] A complement of the primary ligation product sequence may be captured on the solid support in accordance with the present invention. This involves subjecting the primary ligation product to a polymerase extension reaction after subjecting the primary ligase detection reaction mixture to one or more ligase detection reaction cycles and prior to capturing. Alternatively, the primary ligation product itself can be captured on the solid support.

[0207] In this aspect of the present invention, the capture oligonucleotide probes at the particular sites on the solid support may be the same as each other. The capture oligonucleotide probes at the particular sites on the solid support may also each be unique with respect to one another.

[0208] Embodiments of the ligase detection reaction/detection probe hybridization/detection scheme of the present invention are shown in FIGS. 1-6.

[0209] FIG. 1 is a flow diagram of an LDR process, in accordance with the present invention, where multiple Q-dots are used on a single tail to distinguish single base differences in nucleic acid molecules. LDR is performed using allele-specific LDR probes containing multiple 16mer complementary Q-Zip portions, common probes containing a capture group (such as biotin), and a thermostable ligase. The allele-specific oligonucleotide probes (Z7,Z4,Z1), (Z8,Z3,Z2), (Z1,Z1,Z5), and (Z8,Z8,Z6) discriminate A, G, T, and C, respectively, on the target nucleic acid molecule. Allele-specific oligonucleotide probes ligate to common oligonucleotide probes only when there is perfect complementarity at the junction. Subsequently, unligated oligonucleotide probes are destroyed using 5′→3′ and 3′→5′ exonucleases. Ligation products are blocked at both ends and are thus resistant to digestion. The remaining biotin-containing fragments are removed using filtration or size-exclusion columns. Ligation products are then captured on streptavidin-magnetic beads and washed extensively. Magnetic beads containing the ligation products are resuspended and hybridized with Q-dot containing Q-Zip code portions. After capture and extensive washing, the magnetic beads are resuspended and dried onto a slide. Emission spectra at each pixel are quantified to decode the presence of specific Q-dots, to score each allele.

[0210] The detection results in FIG. 1 show that the sample is heterozygous A, G at SNP1 and homozygous C at SNP2. The A allele at SNP1 is indicated by Q-dots (Q7, Q4, Q1), which are part of detection oligonucleotide probes (Z7, Z4, Z1, respectively). The G allele at SNP1 is indicated by Q-dots (Q8, Q3, Q2), which are part of detection olignucleotide probes (Z8, Z3, Z2, respectively). The C allele at SNP 2 is indicated by the Q-dots (Q8, Q8, Q6,) which are part of detection olignucleotide probes (Z8, Z8, and Z6, respectively).

[0211] FIG. 2 is a schematic diagram of an LDR process, in accordance with the present invention, where multiple Q-Zip portions containing Q-dots on a single tail are used with microbead capture to score allele imbalance in a tumor sample compared with a normal sample. FIG. 2 is similar to FIG. 1, except the Q-dot encryption is used to score allele imbalance in a tumor sample compared with the normal sample. The detection results in FIG. 2 show that, at SNP1, the normal sample is heterozygous A, G and the tumor sample demonstrates a loss of the A allele and amplification of the G allele. The normal sample has a ratio of Q-dots which are part of detection oligonucleotide probes (i.e. Q7, Q4, Q1)/)(Q8, Q3, Q2) of 1, indicating that the sample is heterozygous for A and G alleles. In the tumor sample, the ratio of Q-dots which are part of detection oligonucleotide probes (i.e. Q1, Q1, Q5)/(Q7, Q4, Q1) is about zero, indicating loss of the A allele. The ratio of Q-dots which are part of detection oligonucleotide probes (i.e. Q8, Q8, Q6)/(Q8, Q3, Q2) is about three, indicating an approximately three-fold amplification of the G allele in the tumor.

[0212] FIG. 3 is a schematic diagram of an LDR process, in accordance with the present invention, where multiple Q-Zip portions containg Q-dots on a single tail are used with microbead capture and a polymerase extension step to score gene copy number in a tumor sample compared with a normal sample. FIG. 3 is similar to FIG. 2, except the Q-dot encryption is used to score gene copy number in a tumor sample compared with the normal sample. The detection results in FIG. 3 show an approximately three-fold amplification of gene 1 in the tumor sample, which is indicated by a ratio of hybridized Q-Zip portions containg Q-dots Q8, Q8, Q6)/(Q8, Q3, Q2) of about three.

[0213] FIG. 4 is a flow diagram of an LDR process, in accordance with the present invention, where multiple Q-Zip portions containing Q-dots are used on a single tail with microbead capture and a polymerase extension step to detect single base differences in nucleic acid molecules. LDR is performed using allele-specific LDR oligonucleotide probes containing multiple 16mer complementary detection probe-specific sequences, common oligonucleotide probes containing a universal sequence, and thermostable ligase. Allele-specific oligonucleotide probes (Z7, Z4, Z1), (Z8, Z3, Z2), (Z1, Z1, Z5), and (Z8, Z8, Z6) discriminate A, G, T, and C, respectively, on the target 3′→5′ nucleotide sequence. Allele-specific oligonucleotide probes ligate to common oligonucleotide probes only when there is perfect complementarity at the junction. Subsequently, unligated LDR oligonucleotide probes are destroyed using 5′→3′ and 3′→5′ exonucleases. Ligation products are blocked at both ends and are thus resistant to digestion. These products may be amplified linearly by extending the primary ligation products using a universal primer containing a capture group (such as biotin), and Taq polymerase. The remaining biotin-containing primers are removed using filtration or size-exclusion columns. Extension products are captured on streptavidin-magnetic beads and washed extensively. Magnetic beads containing the extension products are resuspended and hybridized with Q-dot containing Q-Zip portions. After capture and extensive washing, the magnetic beads are resuspended and dried onto a slide. Emission spectra at each pixel are quantified to decode the presence of specific Q-dots, to score each allele.

[0214] The detection results in FIG. 4 show that the sample is heterozygous for A and G at SNP1 and homozygous for C at SNP2. The A allele is indicated by the Q-dots (Q7, Q4, Q1) which are part of detection oligonucleotide probes hybridizing to the ligation product having oligonucleotide probes with Z7, Z4, and Z1, respectively. The G allele is indicated by the Q-dots (Q8, Q3, Q2) which are part of the detection probe hybridizing to the ligation product having oligonucleotide probes Z8, Z3, Z2. The C allele is indicated by Q-dots (Q8, Q8, Q6) which are part of the detection probe hybridizing to the ligation product having oligonucleotide probes with Z8, Z8, Z6.

[0215] FIG. 5 is a schematic diagram of an LDR process, in accordance with the present invention, where double Q-Zip portion containing Q-dots on a single tail are used with microbead capture and a polymerase extension step to score allele imbalance in a tumor sample compared with a normal sample. FIG. 5 is similar to FIG. 4, except the Q-dot encryption is used to score allele imbalance in a tumor sample compared with the normal sample. The detection results in FIG. 5 show that at SNP1 the normal sample is heterozygous A, G and the tumor sample demonstrates a loss of the A allele and amplification of the G allele. The normal sample has a ratio of Q-dots which are part of detection oligonucleotide probes (i.e. (Q7, Q4, Q1)/(Q8, Q3, Q2)) of 1, indicating that the sample is heterozygous for the A and G alleles. In FIG. 5 the ratio of Q-dots which are part of the detection probe hybridizing to a ligation product (i.e. Q1, Q1, Q5)/(Q7, Q4, Q1)) is about zero, indicating loss of the A allele in the tumor. The ratio of Q-dots which are part of the detection probe hybridizing to a ligation product (i.e. (Q8, Q8, Q6)/(Q8, Q3, Q2)) is about three, indicating an approximately three-fold amplification of the G allele in the tumor.

[0216] FIG. 6 is a schematic diagram of an LDR process, in accordance with the present invention, where multiple Q-Zip portions containing Q-dots on a single tail are used with microbead capture and a polymerase extension step to score gene copy number in a tumor sample compared with a normal sample. FIG. 6 is similar to FIG. 4, except the Q-dot encryption is used to score gene copy number in a tumor sample compared with the normal sample. In the initial LDR reaction a given gene is interrogated with an allele-specific encrypted oligonucleotide probes in the normal sample in a first tube. The detection results in FIG. 6 show an approximately three-fold amplification of gene 1 in the tumor sample (indicated by a ratio of Q-dots (i.e. (Q8, Q8, Q6)/(Q8, Q3, Q2)) which are part of detection oligonucleotide probes, of about three).

[0217] Solid supports containing capture oligonucleotide probes complementary to an addressable array-specific portion of the ligation product (and, initially, in the primary oligonucleotide probe sets) can also used in carrying out the present invention. In this aspect of the present invention, the ligation product is contacted with the solid support at a temperature of 45-90° C. and for a time period of up to 60 minutes. Hybridization may be accelerated by adding volume exclusion or chaotropic agents. When an array consists of dozens to hundreds of addresses, it is important that the correct ligation products have an opportunity to hybridize to the appropriate address. This may be achieved by the thermal motion of oligonucleotides at the high temperatures used, by mechanical movement of the fluid in contact with the array surface, or by moving the oligonucleotides across the array by electric fields. After hybridization, the array is washed sequentially with a low stringency wash buffer and then a high stringency wash buffer.

[0218] It is important to select capture oligonucleotide probes and addressable array-specific portions which will hybridize in a stable fashion. This requires that the oligonucleotide probe sets and the capture oligonucleotides be configured so that the oligonucleotide sets hybridize to the target nucleic acid molecules at a temperature less than that which the capture oligonucleotides hybridize to the addressable array-specific portions. Unless the oligonucleotides are designed in this fashion, false positive signals may result due to capture of adjacent unreacted oligonucleotides from the same oligonucleotide set which are hybridized to the target.

[0219] The solid support can be made from a wide variety of materials. The substrate may be biological, nonbiological, organic, inorganic, or a combination of any of these, existing as particles, strands, precipitates, gels, sheets, tubing, spheres, containers, capillaries, pads, slices, films, plates, slides, discs, membranes, etc. The substrate may have any convenient shape, such as a disc, square, circle, etc. The substrate is preferably flat but may take on a variety of alternative surface configurations. For example, the substrate may contain raised or depressed regions on which the synthesis takes place. The substrate and its surface preferably form a rigid support on which to carry out the reactions described herein. The substrate and its surface is also chosen to provide appropriate light-absorbing characteristics. For instance, the substrate may be a polymerized Langmuir Blodgett film, functionalized glass, Si, Ge, GaAs, GaP, SiO₂, SiN₄, modified silicon, or any one of a wide variety of gels or polymers such as (poly)tetrafluoroethylene, (poly)vinylidenedifluoride, polystyrene, polycarbonate, polyethylene, polypropylene, polyvinyl chloride, poly(methyl acrylate), poly(methyl methacrylate), or combinations thereof. Other substrate materials will be readily apparent to those of ordinary skill in the art upon review of this disclosure. In a preferred embodiment, the substrate is flat glass or single-crystal silicon.

[0220] A variety of commercially-available materials, which include suitably modified glass, plastic, or carbohydrate surfaces or a variety of membranes, can be used. Depending on the material, surface functional groups (e.g., silanol, hydroxyl, carboxyl, amino) may be present from the outset (perhaps as part of the coating polymer), or will require a separate procedure (e.g., plasma amination, chromic acid oxidation, treatment with a functionalized side chain alkyltrichlorosilane) for introduction of the functional group.

[0221] The surface of the functionalized substrate is preferably provided with a layer of linker molecules, although it will be understood that the linker molecules are not required elements of the invention. The linker molecules are preferably of sufficient length to permit polymers in a completed substrate to interact freely with molecules exposed to the substrate. The linker molecules should be 6-50 atoms long to provide sufficient exposure. The linker molecules may be, for example, aryl acetylene, ethylene glycol oligomers containing 2-10 monomer units, diamines, diacids, amino acids, or combinations thereof.

[0222] Further details regarding solid supports, functional groups, and linker are set forth in U.S. patent application Ser. No. 08/794,851 to Barany et. al., and WO 97/31256 to Barany et. al., which are hereby incorporated by reference in their entirety. Techniques for improving the performance of addressable arrays is set forth in U.S. Pat. No. 6,506,594 to Barany et. al., which is hereby incorporated by reference in its entirety.

[0223] In all aspects of the present invention, a plurality of primary oligonucleotide probe sets may be utilized, with each set characterized by (a) the first oligonucleotide probe being identical in each oligonucleotide probe set and (b) the second oligonucleotide probes in each set having a target-specific portion which is different in each second oligonucleotide probe at a location where single-base changes, insertions, deletions, or translocations occur.

[0224] Examples of carrying out the ligase detection reaction/detection oligonucleotide probe hybridization/detection scheme of the present invention with an addressable array are shown in FIGS. 37-53.

[0225] FIG. 37 is a schematic diagram of an LDR process, in accordance with the present invention, where double Q-Zip portions containing Q-dots on a single tail are used with a universal array to distinguish and quantify splice variants on mRNA. A cDNA copy of the mRNA is generated using reverse transcriptase on an oligo dT primer containing a capture group (e.g., biotin) on the 5′ end. RNA is fragmented using RNaseH or base. Excess linkers are removed using filtration or size-exclusion columns. LDR is performed directly on the resulting cDNA using exon-specific oligonucleotide probes containing 16mer complementary Q-Zip portions, common oligonucleotide probes containing addressable array-specific portions, and thermostable ligase. Different Q-Zip portions are used on exon-specific oligonucleotide probes. Unligated oligonucleotide probes are destroyed with exonucleases. Ligation products are captured on a universal array by hybridizing the 24-mer addressable array-specific portions to capture probes on the array. Q-Zip portions containing Q-dots are hybridized to ligation products on the universal array. Emission spectra at each location or address on the array are quantified to decode the presence of specific Q-dots, to score each splice variant.

[0226] The detection results in FIG. 37 show an approximately three-fold higher expression of the Ex1a splice variant in the sample (indicated by a ratio of Q-Zip code signals (Q8,Q6)/(Q3,Q2) at address Zp1 of about three).

[0227] FIG. 38 is a schematic diagram of an LDR process, in accordance with the present invention, where ligated double Q-Zip portions containing Q-dots on a single tail are used with a universal array to distinguish and quantify splice variants on mRNA. FIG. 38 is similar to FIG. 37, but with the addition of ligating adjacent Q-dot containing Q-Zip portions on adjacent 16mer complementary Q-Zip portions in the last step. The detection results in FIG. 38 show an approximately three-fold amplification of gene 1 in the tumor sample (indicated by a ratio of Q-dots (Q8,Q6)/(Q3,Q2) on ligated Q-Zip portions at address Zp1 of about three).

[0228] FIG. 39 is a schematic diagram of an LDR process, in accordance with the present invention, where double Q-Zip portions containing Q-dots on a single tail are used with a universal array to distinguish and quantify splice variants on mRNA in a tumor sample compared with a normal sample. FIG. 39 is similar to FIG. 37, except that the Q-dot encryption is used to score splice variants in a tumor sample compared with a normal sample. cDNAs are prepared as described above. Tumor and normal samples are kept separate. In the initial LDR reaction, a given splice junction is interrogated with two allele-specific encrypted oligonucleotide probes in the normal sample in a first tube. The same splice junction is interrogated with two different allele-specific encrypted oligonucleotide probes in the tumor sample in a second tube. Although multiple different splice variants are detected in each tube, for simplicity only splice variants 1 and 2 are shown. After the ligation step, the ligation products are combined in a single tube and treated with exonucleases to destroy unligated oligonucleotide probes. Ligation products are hybridized onto a universal array via the 24-mer addressable array-specific portion on the ligation product and capture oligonucleotide probe on the solid support. Q-dot containing Q-Zip portions are hybridized to the ligation products on the universal array. Emission spectra at each address are quantified to decode the presence of specific Q-dots, to score splice variants in the tumor compared to the normal sample.

[0229] The detection results in FIG. 39 show that the tumor demonstrates a loss of the Ex1 variant and an approximately three-fold higher expression of the Ex1a splice variant. In FIG. 39, the ratio of hybridized Q-Zip probes (Q1,Q5)/(Q4,Q1) at the Zp1 address is about zero, indicating a loss of the Ex1 variant in the tumor. The ratio of Q-dots on hybridized Q-Zip portions (i.e. (Q8,Q6)/(Q3,Q2)) at the Zp1 address is about three, indicating an approximately three-fold higher expression of the Ex1a splicing variant in the tumor.

[0230] FIG. 40 is a schematic diagram of an LDR process, in accordance with the present invention, where ligated double Q-Zip portions containing Q-dots on a single tail are used with a universal array to score splice variants on mRNA in a tumor sample compared with a normal sample. FIG. 40 is similar to FIG. 39, but with the addition of ligating adjacent Q-dot containing Q-Zip portions on adjacent 16mer complementary Q-Zip portions in the last step.

[0231] The detection results in FIG. 40 show that the tumor demonstrates a loss of the Ex1 variant and an approximately three-fold higher expression of the Ex1 a splicing variant. In FIG. 40 the ratio of hybridized ligated Q-Zip portions containing Q-dots (Q1,Q5)/(Q4,Q1) at the Zp1 address is about zero, indicating loss of the Ex1 variant in the tumor. The ratio of hybridized ligated Q-Zip portions containing Q-dots (Q8,Q6)/(Q3,Q2) at the Zp1 address is about three, indicating an approximately three-fold higher expression of the Ex1a splicing variant in the tumor.

[0232] FIG. 41 is a flow diagram of an LDR process, in accordance with the present invention, where double Q-Zip portions containing Q-dots on a single tail are used with a universal array to distinguish and quantify splice variants directly on mRNA. Ligation is performed directly on mRNA using exon-specific oligonucleotide probes containing 16mer Q-Zip portions, common oligonucleotide probes containing addressable array-specific portions and a universal primer site, and T4 ligase. Different Q-Zip portions containing Q-dots are used on exon-specific oligonucleotide probes. Unligated probes are destroyed with exonucleases. Subsequently, all primary ligation products are extended using a universal primer, dNTPs, and Taq polymerase. The extension step is repeated for linear amplification of ligation products as necessary. Extension products are hybridized onto a universal array via the 24-mer zip code sequences. Extension products on the universal array are hybridized with Q-dot containing Q-Zip portions. Emission spectra at each address are quantified to decode the presence of specific Q-dots, to score each splice variant. The detection results in FIG. 41 show an approximately three-fold higher expression of the Ex1a splicing variant in the sample (indicated by a ratio of Q-dots on Q-Zip portions (Q8,Q6)/(Q3,Q2) at address Zp1 of about three).

[0233] FIG. 42 is a schematic diagram of an LDR process, in accordance with the present invention, where ligated double Q-Zip portions containing Q-dots on a single tail are used with a universal array to distinguish and quantify splice variants directly on mRNA. FIG. 42 is similar to FIG. 41, but with the addition of ligating adjacent Q-dot containing Q-Zip portions containing Q-dots in the last step. The detection results in FIG. 42 show an approximately three-fold higher expression of the Ex1a splicing variant in the tumor sample (indicated by a ratio of ligated Q-Zip portions containing Q-dots (i.e. (Q8,Q6)/(Q3,Q2)) at address Zp1 of about three).

[0234] FIG. 43 is a schematic diagram of an LDR process, in accordance with the present invention, where double Q-Zip portions containing Q-dots on a single tail are used with a universal array to score splice variants directly on mRNA in a tumor sample compared with a normal sample. FIG. 43 is similar to FIG. 41, except the Q-dot encryption is used to score splice variants in the tumor sample compared with the normal sample. Tumor and normal samples are kept separate. In the initial ligation reaction a given splice junction is interrogated with two allele-specific encrypted oligonucleotide probes in the normal sample in a first tube. The same splice junction is interrogated with two different allele-specific encrypted oligonucleotide probes in the tumor sample in a second tube. Although multiple different splice variants are detected in each tube, for simplicity only splice variants 1 and 2 are shown. After the ligation step, the ligation products are combined in a single tube and treated with exonucleases to destroy unligated probes. Subsequently, all primary ligation products are extended using a universal primer, dNTPs, and Taq polymerase. The extension step is repeated for linear amplification of ligation products as necessary. Extension products are hybridized onto a universal array via the 24-mer zip code sequences. Extension products on the universal array are hybridized with Q-dots containing Q-Zip portions containing Q-dots. Emission spectra at each address are quantified to decode the presence of specific Q-dots, to score splice variants in the tumor compared to the normal sample.

[0235] The detection results in FIG. 43 show that the tumor demonstrates a loss of the Ex1 variant and an approximately three-fold higher expression of the Ex1a splicing variant. In FIG. 43, the ratio of Q-dots attached to Q-Zip portions (Q1,Q5)/(Q4,Q1) hybridized at the Zp1 address is about zero, indicating loss of the Ex1 variant in the tumor. The ratio of Q-dots contained on Q-Zip portions (Q8,Q6)/(Q3,Q2) hybridized at the Zp1 address is about three, indicating an approximately three-fold higher expression of the Ex1a splicing variant in the tumor.

[0236] FIG. 44 is a schematic diagram of an LDR process, in accordance with the present invention, where ligated double Q-Zip portions containing Q-dots on a single tail are used with a universal array to score splice variants directly on mRNA in a tumor sample compared with a normal sample. FIG. 44 is similar to FIG. 43, but with the addition of ligating adjacent Q-dot containing Q-Zip portions on adjacent 16mer complementary Q-Zip portions in the last step.

[0237] The detection results in FIG. 44 show that the tumor demonstrates a loss of the Ex1 variant and an approximately three-fold higher expression of the Ex1 a splicing variant. In FIG. 44 the ratio of ligated Q-Zip portions containing Q-dots (Q1,Q5)/(Q4,Q1) hybridized at the Zp1 address is about zero, indicating loss of the Ex1 variant in the tumor. The ratio of ligated Q-Zip portions containing Q-dots (Q8,Q6)/(Q3,Q2) hybridized at the Zp1 address is about three, indicating an approximately three-fold higher expression of the Ex1a splicing variant in the tumor.

[0238] FIG. 45 is a flow diagram of an LDR process, in accordance with the present invention, where whole genome amplification and double Q-Zip portions containing Q-dots on a single tail are used with universal array capture to detect single base differences directly from genomic DNA. Whole genome amplification is performed using random primers and polymerase. LDR is performed using allele-specific oligonucleotide probes containing complementary 16mer Q-Zip portions, common oligonucleotide probes containing complementary 24mer addressable array-specific portions, and thermostable ligase. Allele-specific oligonucleotide probes (i.e. (Z4,Z1), (Z3,Z2), (Z1,Z5), and (Z8,Z6)) discriminate A, G, T, and C, respectively, on the target 3′→5′ nucleotide sequence. The allele-specific oligonucleotide probes ligate to common oligonucleotide probes only when there is perfect complementarity at the junction. Subsequently, unligated oligonucleotide probes are destroyed using 5′→3′ and 3′→5′ exonucleases. Ligation products are blocked at both ends and thus are resistant to digestion. Ligation products are captured on a universal array via the 24-mer addressable array-specific portions in the ligation product and capture oligonucleotide probes on the solid support. Ligation products on the universal array are hybridized with Q-dot containing Q-Zip portions. Emission spectra at each address are quantified to decode the presence of specific Q-dots to score each allele.

[0239] The detection results in FIG. 45 show that the sample is heterozygous A, G at SNP1 and homozygous C at SNP2. The A allele is indicated by the presence of Q-Zip portions containing Q-dots (Q4,Q1) at address Zp1. The G allele is indicated by the presence of Q-Zip portions containing Q-dots (Q3,Q2) at address Zp1. The C allele is indicated by the presence of Q-Zip portions containing Q-dots (Q8,Q6) at address Zp2.

[0240] FIG. 46 is a schematic diagram of an LDR process, in accordance with the present invention, where whole genome amplification and ligated double Q-Zip portions containing Q-dots on a single tail are used with universal array capture to distinguish single base differences in nucleic acid molecules. FIG. 46 is similar to FIG. 45, but with the addition of ligating adjacent Q-dot containing Q-Zip portions in the last step.

[0241] The detection results in FIG. 46 show that the sample is heterozygous A, G at SNP1 and homozygous C at SNP2. The A allele is indicated by the presence of ligated Q-Zip portions containing Q-dots (Q4,Q1) at address Zp1. The G allele is indicated by the presence of ligated Q-Zip portions containing Q-dots (Q3,Q2) at address Zp1. The C allele is indicated by the presence of Q-Zip portions containing Q-dots (Q8,Q6) at address Zp2.

[0242] FIG. 47 is a schematic diagram of an/LDR process, in accordance with the present invention, where whole genome amplification and ligated double Q-Zip portions containing Q-dots on a single tail are used with ligation to universal array capture to distinguish single base differences in nucleic acid molecules. FIG. 47 is similar to FIG. 46, but with the addition of ligating the captured complementary addressable array-specific portions to their respective capture probes on the array. In order to allow ligation, the 3′ end of the addressable array-specific portion needs to remain unblocked and, consequently only a 5′→3′ exonuclease is used to destroy unligated versions of this oligonucleotide probe. Alternatively, the 3′ end of the addressable array-specific portion may be synthesized with a thiophosphate group or other modification that inhibits 3′→5′ exonuclease activity, but not ligation. After ligation of ligation products to the array, unligated oligonucleotide probes containing complementary Q-Zip portions are removed by a stringent wash step. Subsequently, Q-dots containing adjacent Q-Zip portions are ligated on adjacent 16mer complementary Q-Zip portions in the last step.

[0243] The detection results in FIG. 47 show that the sample is heterozygous A, G at SNP1 and homozygous C at SNP2. The A allele is indicated by the presence of ligated Q-Zip portions containing Q-dots (Q4,Q1) at address Zp1. The G allele is indicated by the presence of ligated Q-Zip portions containing Q-dots (Q3,Q2) at address Zp1. The C allele is indicated by the presence of Q-Zip portions containing Q-dots (Q8,Q6) at address Zp2.

[0244] FIG. 48 is a schematic diagram of an LDR process, in accordance with the present invention, where whole genome amplification and double Q-Zip portions containing Q-dots on a single tail are used with universal array capture to score allele imbalance in a tumor sample compared with a normal sample. This figure is similar to FIG. 45, except the Q-dot encryption is used to score allele imbalance in a tumor sample compared with the normal sample. In the initial LDR reaction a given single base difference is interrogated with two allele-specific encrypted oligonucleotide probes in the normal sample in a first tube. The same single base difference is interrogated with two different allele-specific encrypted oligonucleotide probes in the tumor sample in a second tube. Although multiple different single base differences are detected in each tube, for simplicity, only SNP1 is shown. The ligation products are combined in a single tube and the exonuclease digestion and remaining procedure is the same as described in FIG. 45. Emission spectra at each address are quantified to decode the presence of specific Q-dots to score allele imbalance in the tumor compared to the normal sample.

[0245] The detection results in FIG. 48 show that at SNP1 the normal sample is heterozygous A, G and the tumor sample demonstrates a loss of the A allele and amplification of the G allele. In FIG. 48, the ratio of Q-Zip portions containing Q-dots (Q1,Q5)/(Q4,Q1) at address Zp1 is about zero, indicating loss of the A allele in the tumor. The ratio of Q-Zip portions containing Q-dots (Q8,Q6)/(Q3,Q2) at address Zp1 is about three, indicating an approximately three-fold amplification of the G allele in the tumor.

[0246] FIG. 49 is a schematic diagram of an LDR process, in accordance with the present invention, where whole genome amplification and ligated double Q-Zip portions containing Q-dots on a single tail are used with universal array capture to score allele imbalance in a tumor sample compared with a normal sample. FIG. 49 is similar to FIG. 48, but with the addition of ligating adjacent Q-dot containing Q-Zip portions in the last step.

[0247] The detection results in FIG. 49 show that at SNP1 the normal sample is heterozygous A, G and the tumor sample demonstrates a loss of the A allele and amplification of the G allele. In FIG. 49, the ratio of ligated Q-Zip portions containing Q-dots (Q1,Q5)/(Q4,Q1) at address Zp1 is about zero, indicating loss of the A allele in the tumor. The ratio of ligated Q-Zip portions containing Q-dots (Q8,Q6)/(Q3,Q2) at address Zp1 is about three, indicating an approximately three-fold amplification of the G allele in the tumor.

[0248] FIG. 50 is a schematic diagram of an LDR process, in accordance with the present invention, where whole genome amplification and ligated double Q-Zip portions containing Q-dots on a single tail are used with ligation to universal array capture to score allele imbalance in a tumor sample compared with a normal sample. FIG. 50 is similar to FIG. 49, but with the addition of ligating the captured addressable array-specific portions of their respective capture probes on the array. In order to allow ligation, the 3′ end of the addressable array-specific portion needs to remain unblocked, and, consequently, only a 5′→3′ exonuclease is used to destroy unligated versions of this probe. Alternatively, the 3′ end of the addressable array-specific portion may be synthesized with a thiophosphate group or other modification that inhibits 3′→5′ exonuclease activity, but not ligation. After ligation of ligation products to the array, unligated oligonucleotide probes containing complementary Q-Zip portions are removed by a stringent wash step. Subsequently, adjacent Q-dot containing adjacent Q-Zip portions are ligated in the last step.

[0249] The detection results in FIG. 50 show that at SNP1 the normal sample is heterozygous A, G and the tumor sample demonstrates a loss of the A allele and amplification of the G allele. In FIG. 50, the ratio of ligated Q-Zip portions containing Q-dots (Q1,Q5)/(Q4,Q1) at address Zp1 is about zero, indicating a loss of the A allele in the tumor. The ratio of ligated Q-Zip portions containing Q-dots (Q8,Q6)/(Q3,Q2) at address Zp1 is about three, indicating an approximately three-fold amplification of the G allele in the tumor.

[0250] FIG. 51 is a schematic diagram of an LDR process, in accordance with the present invention, where whole genome amplification and double Q-Zip portions containing Q-dots on a single tail are used with universal array capture to score gene copy number in a tumor sample compared with a normal sample. This figure is similar to FIG. 48, except that the Q-dot encryption is used to score gene copy number in a tumor sample compared with the normal sample. In the initial LDR reaction, a given gene is interrogated with an allele-specific encrypted oligonucleotide probes in the normal sample in a first tube. The same gene is interrogated with a different allele-specific encrypted oligonucleotide probe in the tumor sample in a second tube. Although multiple different genes are detected in each tube, for simplicity, only one gene is shown. The ligation products are combined in a single tube, and the exonuclease digestion and remaining procedure is the same as described for FIG. 48. Emission spectra at each address are quantified to decode the presence of specific Q-dots to score gene copy number in the tumor compared to the normal sample. The detection results in FIG. 51 show an approximately three-fold amplification of gene 1 in the tumor sample (indicated by a ratio of Q-Zip portions containing Q-dots (Q8,Q6)/(Q3,Q2) at address Zp1 of about three).

[0251] FIG. 52 is a schematic diagram of an LDR process, in accordance with the present invention, where whole genome amplification and ligated double Q-Zip portions containing Q-dots on a single tail are used with universal array capture to score gene copy number in a tumor sample compared with a normal sample. FIG. 52 is similar to FIG. 51, but with the addition of ligating adjacent Q-dot containing Q-Zip portions in the last step. The detection results in FIG. 51 show an approximately three-fold amplification of gene 1 in the tumor sample (indicated by a ratio of ligated Q-Zip portions containing Q-dots (Q8,Q6)/(Q3,Q2) at address Zp1 of about three).

[0252] FIG. 53 is a schematic diagram of an LDR process, in accordance with the present invention, where whole genome amplification and ligated double Q-Zip portions containing Q-dots on a single tail are used with ligation to universal array capture to score gene copy number in a tumor sample compared with a normal sample. FIG. 53 is similar to FIG. 52, but with the addition of ligating the addressable array-specific portions to their respective capture oligonucleotide probes on the array. In order to allow ligation, the 3′ end of the addressable array-specific portion needs to remain unblocked, and, consequently, only a 5′→3′ exonuclease is used to destroy unligated versions of this oligonucleotide probe. Alternatively, the 3′ end of the addressable array-specific portion may be synthesized with a thiophosphate group or other modification that inhibits 3′→5′ exonuclease activity, but not ligation. After ligation of ligation products to the array, unligated oligonucleotide probes containing complementary Q-Zip portions are removed by a stringent wash step. Subsequently, Q-dot containing adjacent Q-Zip portions are ligated in the last step. The detection results in FIG. 53 show an approximately three-fold amplification of gene 1 in the tumor sample (indicated by a ratio of ligated Q-Zip portions containing Q-dots (Q8,Q6)/(Q3,Q2) at address Zp1 of about three).

[0253] In carrying out the ligase detection reaction/detection probe hybridization/detection scheme of the present invention, relative amounts of one or more of a plurality of target nucleic acid molecules in the test sample, differing by one or more single-base changes, insertions, deletions, or translocations, may be quantified by comparison with a reference sample having reference target nucleic acid molecules. This involves providing one or more secondary oligonucleotide probe sets, which differ from the primary oligonucleotide probe sets. Each of the secondary oligonucleotide probes sets are characterized by (a) a first oligonucleotide probe having a reference target-specific portion and (b) a second oligonucleotide probe having a reference target-specific portion. The oligonucleotide probes in a particular secondary oligonucleotide probe set are suitable for ligation together when hybridized adjacent to a corresponding reference target nucleic acid molecule. However, they have a mismatch which interferes with this ligation when hybridized to any other nucleic acid molecule present in the reference sample. One or both oligonucleotide probes in the secondary oligonucleotide probe set contain one or more detection oligonucleotide probe-specific portions or their complements so that each secondary oligonucleotide probe set contains a unique set of one or more detection oligonucleotide probe-specific portions or their complements. The reference sample, the one or more secondary oligonucleotide probe sets, and the ligase are blended to form a secondary ligase detection reaction mixture. The secondary ligase detection reaction mixture is then subjected to one or more ligase detection reaction cycles comprising a denaturation treatment and a hybridization treatment. In the denaturation treatment, any hybridized oligonucleotides are separated from reference target nucleic acid molecules. In the hybridization treatment, the oligonucleotide probe sets hybridize in a base-specific manner to their respective reference sample target nucleic acid molecule, if present in the sample, and ligate to one another to form a secondary ligation product. The secondary ligation product contains (a) the reference sample-specific portions and (b) the one or more detection oligonucleotide probe-specific portions or their complements. The secondary ligation product for each secondary oligonucleotide probe set is distinguishable from other nucleic acid molecules in the secondary ligase detection reaction mixture. The secondary oligonucleotide probe sets may hybridize to nucleic acid molecules in the reference sample other than their respective reference target nucleic acid molecules but do not ligate together due to the presence of one or more mismatches and individually separate during the denaturation treatment. The first and second ligase detection reaction mixtures are blended after subjecting them to one or more ligase detection reaction cycles and before capturing. As a result, the blended first and second ligase detection reaction mixtures are subjected to capturing, contacting, and detecting. The relative amounts of the reporter labels on the primary and secondary ligation products are then compared. This provides a quantitative measure of the relative level of the one or more target nucleic acid molecules in the test sample compared with the reference sample based on each different labeled ligation product having a unique encryption code with a different pattern of detectable emission spectra.

Ligase Detection Reaction/Polymerase Chain Reaction/Solid Support Capture/Ligase Detection Reaction/Detection Probe Hybridization/Detection Scheme

[0254] Another embodiment of the present invention relates to a method for identifying one or more target nucleic acid molecules differing by one or more single-base changes, insertions, deletions, or translocations. This method includes ligase detection reaction, polymerase chain reaction, solid support capture, ligase detection reaction, detection probe hybridization, and detection.

[0255] The ligase detection reaction phase involves providing a test sample potentially containing one or more target nucleic acid molecules. One or more primary oligonucleotide probe sets, each set characterized by (a) a first oligonucleotide probe, having a target-specific portion and a 5′ upstream portion containing a translational oligonucleotide portion and (b) a second oligonucleotide probe, having a target-specific portion, and a 3′ downstream primer-specific portion are provided. The oligonucleotide probes in a particular primary oligonucleotide probe set are suitable for ligation together when hybridized to a corresponding target nucleic acid molecule, but have a mismatch which interferes with this ligation when hybridized to any other nucleic acid molecule present in the test sample. The test sample, the one or more primary oligonucleotide probe sets, and a ligase are blended to form a primary ligase detection reaction mixture. The primary ligase detection reaction mixture is subjected to one or more ligase detection reaction cycles, as fully described above. These cycles each include a denaturation treatment and a hybridization treatment. In the denaturation treatment, any hybridized oligonucleotide probes are separated from the target nucleic acid molecules. In the hybridization treatment, the primary oligonucleotide probe sets hybridize in a base-specific manner to their respective target nucleic acid molecules, if present in the test sample, and ligate to one another to form a primary ligation product-containing (a) the 5′ upstream translational oligonucleotide portion, (b) the target-specific portions, and (c) the 3′ downstream primer-specific portion. The primary ligation product for each primary oligonucleotide probe set is distinguishable from other nucleic acids in the ligase detection reaction mixture. The primary oligonucleotide probe sets may hybridize to nucleic acid molecules in the test sample other than their respective target nucleic acid molecules but do not ligate together due to the presence of one or more mismatches and individually separate during the denaturation treatment.

[0256] In the polymerase chain reaction phase, a downstream primer complementary to the 3′ downstream primer-specific portion of the primary ligation product is provided. The primary ligation product is blended with the downstream primer and a polymerase to form a polymerase chain reaction mixture. The polymerase chain reaction mixture is subjected to one or more polymerase chain reaction cycles. As described above, the polymerase chain reaction comprising a denaturation treatment, where hybridized nucleic acid molecules are separated, a hybridization treatment, where the primer hybridizes to its complementary 3′ downstream primer-specific portion of the primary ligation product, and an extension treatment, where the hybridized primers are extended to form extension products complementary to the primary ligation product.

[0257] In the solid support capture phase, as described above, the extension product is captured on one or more solid supports, so that the extension product may be distinguished individually.

[0258] In the second ligase detection reaction phase, as described above, one or more secondary oligonucleotide probe sets, each set characterized by (a) a first oligonucleotide probe, having a translational oligonucleotide portion and a 5′ upstream portion complementary to one or more detection oligonucleotide probe-specific portions and (b) a second oligonucleotide probe, having a target portion, and a 3′ downstream portion complementary to one or more detection oligonucleotide probe-specific portions are provided. The oligonucleotide probes in a particular secondary oligonucleotide probe set are suitable for ligation together when hybridized to a corresponding captured primary extension product, but have a mismatch which interferes with this ligation when hybridized to any other nucleic acid molecule. The captured extension product, the one or more secondary oligonucleotide probe sets, and the ligase are blended to form a second ligase detection reaction mixture. The second ligase detection reaction mixture is subjected to one ligase detection reaction cycle. This cycle comprises a denaturation treatment, where any hybridized oligonucleotides are separated from the captured extension product, and a hybridization treatment, where the secondary oligonucleotide probe sets hybridize in a base-specific manner to their respective captured extension products, if present, and ligate to one another to form a secondary ligation product. The secondary ligation product contains (a) the 5 upstream portion comprising one or more detection oligonucleotide probe-specific portions, (b) the upstream translational oligonucleotide portion connected to the target portion, and (c) the 3′ downstream portion comprising one or more detection oligonucleotide probe-specific portions. The secondary ligation products for each secondary oligonucleotide probe set are distinguishable from other nucleic acids in the second ligase detection reaction mixture. The one or more secondary oligonucleotide probe sets may hybridize to nucleic acid molecules in the sample other than their respective captured extension products but do not ligate together due to the presence of one or more mismatches and individually separate during the denaturation treatment by heating to above the temperature at which each translational oligonucleotide portion melts, but below a temperature at which each secondary ligation product melts. As a result, each secondary ligation product remains hybridized to the captured extension product as a complex.

[0259] In the detection probe hybridization phase, as described above, detection oligonucleotide probes which bind to the detection oligonucleotide probe-specific portions of the complex are provided. Each detection oligonucleotide probe has a reporter label, thereby providing each complex containing a secondary ligation product with a unique detectable encryption code. The complex and the detection oligonucleotide probes are contacted under conditions effective to permit hybridization of the detection oligonucleotide probes to the complex so that a labeled complex is formed.

[0260] In the detection phase, as described above, the reporter label(s) on the complex are detected, thereby indicating the presence of one or more target nucleic acid molecule in the test sample. As a result, nucleic acid molecules differing by one or more single-base changes, insertions, deletions, or translocations are discriminated from one another during the primary and secondary ligase detection reactions and the discriminated nucleic acid molecules are detected as a result of each different labeled complex having a unique encryption code with a different pattern of detectable emission spectra.

[0261] Examples of the ligase chain reaction, polymerase chain reaction, solid support capture, ligase detection reaction, detection probe hybridization, and detection scheme are shown in FIGS. 7-10.

[0262] FIG. 7 is a schematic diagram of an LDR process, in accordance with the present invention, where double Q-Zip portions containg Q-dots on double tails are used with microbead capture and a polymerase extension step to score allele imbalance in a tumor sample compared with a normal sample. LDR is performed using allele-specific oligonucleotide probes containing translation oligonucleotide portions (“T-Zip portions”), common oligonucleotide probes containing a universal sequence, and thermostable ligase. Allele-specific oligonucleotide probes containing T-Zip portions T4 and T6 discriminate A and G, respectively, on the target 3′→5′ nucleotide sequence of the normal sample. Allele-specific oligonucleotide probes containing T-Zip portions T 11 and T33 discriminate A and G, respectively, on the target 3′→5′ nucleotide sequence of the tumor sample. Allele-specific oligonucleotide probes ligate to common oligonucleotide probes only when there is perfect complementarity at the junction. Subsequently, unligated oligonucleotide probes are destroyed using 5′→3′ and 3′→5′ exonucleases. Ligation products are blocked at both ends and are thus resistant to digestion. These products may be linearly amplified by extending the primary ligation products using a universal primer containing a capture group (e.g., biotin), and Taq polymerase. The remaining biotin-containing primers are removed using filtration or size-exclusion columns. Extension products are then captured on streptavidin-magnetic beads and washed extensively. Magnetic beads containing the extension products are resuspended and a second LDR reaction is performed, using T-zip portion specific and target-specific oligonucleotide probes containing 16mer complementary Q-Zip portion. Magnetic beads are captured, washed extensively, resuspended, and hybridized with Q-dot containing Q-Zip portions. After capture and extensive washing, the magnetic beads are resuspended and dried onto a slide. Emission spectra at each pixel are quantified to decode the presence of specific Q-dots, to score allele imbalance in the tumor compared to the normal sample.

[0263] The detection results in FIG. 7 show that at SNP1 the normal sample is heterozygous A, G and the tumor sample demonstrates a loss of the A allele and amplification of the G allele. In FIG. 7, the ratio of hybridized Q-dot containing Q-Zip portions (Q1,Q5,Q5,Q7)/(Q4,Q1,Q5,Q7) is about zero, indicating loss of the A allele in the tumor. The ratio of hybridized Q-dot containing Q-Zip portions (Q8,Q6,Q5,Q7)/(Q3,Q2,Q5,Q7) is about three, indicating an approximately three-fold amplification of the G allele in the tumor.

[0264] FIG. 8 is a schematic diagram of an LDR process, in accordance with the present invention, where ligated double Q-Zip portions containing Q-dots on double tails are used with microbead capture and a polymerase extension step to score allele imbalance in a tumor sample compared with a normal sample. FIG. 8 is similar to FIG. 7, but with the addition of ligating adjacent Q-Zip portions containing Q-dots.

[0265] The detection results in FIG. 8 show that at SNP1 the normal sample is heterozygous A, G and the tumor sample demonstrates a loss of the A allele and amplification of the G allele. In FIG. 8, the ratio of hybridized ligated Q-Zip portions containing Q-dots (Q1,Q5,Q5,Q7)/(Q4,Q1,Q5,Q7) is about zero, indicating loss of the A allele in the tumor. The ratio of hybridized ligated Q-Zip portions containing Q-dots (Q8,Q6,Q5,Q7)/(Q3,Q2,Q5,Q7) is about three, indicating an approximately three-fold amplification of the G allele in the tumor.

[0266] FIG. 9 is a schematic diagram of an LDR process, in accordance with the present invention, where double Q-Zip portions containing Q-dots on double tails are used with microbead capture and a polymerase extension step to score gene copy number in a tumor sample compared with a normal sample. FIG. 9 is similar to FIG. 7, except the Q-dot encryption is used to score gene copy number in a tumor sample compared with the normal sample. In the initial LDR reaction, a given gene is interrogated with a gene-specific encrypted oligonucleotide probes, containing a T-Zip portion in the normal sample in a first tube. The same gene is interrogated with a different gene-specific encrypted oligonucleotide probes, containing a different T-Zip portion in the tumor sample in a second tube. Although multiple different genes are detected in each tube, for simplicity only one gene is shown. The ligation products are combined in a single tube and the exonuclease digestion and subsequent procedure are the same as described in FIG. 7. Emission spectra at each pixel are quantified to decode the presence of specific Q-Zip portions containing Q-dots, to score gene copy number in the tumor compared to the normal sample. The detection results in FIG. 9 show an approximately three-fold amplification of gene 1 in the tumor sample (indicated by a ratio of hybridized Q-Zp portions containing Q-dots (Q8,Q6,Q5,Q7)/(Q3,Q2,Q5,Q7) of about three).

[0267] FIG. 10 is a schematic diagram of an LDR process, in accordance with the present invention, where ligated double Q-Zip portions containing Q-dots on double tails are used with microbead capture and a polymerase extension step to score gene copy number in a tumor sample compared with a normal sample. FIG. 10 is similar to FIG. 9, but with the addition of ligating adjacent Q-Zip portions containing Q-dots in the last step. The detection results in FIG. 10 show an approximately three-fold amplification of gene 1 in the tumor sample (indicated by a ratio of hybridized ligated Q-Zip portions containing Q-dots (Q8,Q6,Q5Q7)/(Q3Q2,Q5Q7) of about three).

[0268] In carrying out the ligase chain reaction, polymerase extension, solid support capture, ligase detection reaction, detection probe hybridization, and detection scheme of the present invention, relative amounts of one or more of a plurality of target nucleic acid molecules in the test sample, differing by one or more single-base changes, insertions, deletions, or translocations, may be quantified by comparison with a reference sample.

[0269] This involves providing one or more tertiary oligonucleotide probe sets, which differ from the primary oligonucleotide probe sets. Each of the tertiary oligonucleotide probes sets are characterized by (a) a first oligonucleotide probe, having a reference target-specific portion and a 5′ upstream portion containing a translational oligonucleotide probe-specific portion and (b) a second oligonucleotide probe, having a reference target-specific portion, and a 3′ downstream primer specific portion. The oligonucleotide probes in a particular tertiary oligonucleotide probe set are suitable for ligation together when hybridized on a corresponding reference target nucleic acid molecule, but have a mismatch which interferes with this ligation when hybridized to any other nucleic acid molecule present in the reference sample.

[0270] The reference sample, the one or more tertiary oligonucleotide probe sets, and the ligase are blended to form a tertiary ligase detection reaction mixture. The tertiary ligase detection reaction mixture is then subjected to one or more ligase detection reaction cycles comprising a denaturation treatment and a hybridization treatment. In the denaturation treatment, any hybridized oligonucleotides are separated from the reference target nucleic acid molecules. In the hybridization treatment, the oligonucleotide probe sets hybridize in a base-specific manner to their respective reference target nucleic acid molecule, if present in the sample, and ligate to one another to form a tertiary ligation product containing (a) the 5′ upstream translational oligonucleotide-specific portion, (b) the target-specific portions, and (c) the 3′ downstream primer specific portion. The tertiary ligation product for each tertiary oligonucleotide probe set is distinguishable from other nucleic acid molecules in the tertiary ligase detection reaction mixture. The tertiary oligonucleotide probe sets may hybridize to nucleic acid molecules in the sample other than their respective reference target nucleic acid molecules but do not ligate together due to the presence of one or more mismatches and individually separate during the denaturation treatment.

[0271] The primary and tertiary ligase detection reaction mixtures are blended after subjecting them to one or more ligase detection reaction cycles and before subjecting the polymerase chain reaction mixture to one or more polymerase chain reaction cycles. The blended primary and tertiary ligase detection reaction mixtures are subjected to one or more polymerase chain reaction cycles, capturing, subjecting the secondary ligase detection reaction mixture to one ligase detection reaction cycles, contacting the complex and the detection oligonucleotide probes, and detecting the reporter labels on the complex. The relative amounts of the reporter label on the complexes is then compared, to provide a quantitative measure of the relative level of the one or more target nucleic acid molecules in the test sample compared with the reference sample as a result of each different labeled complex having a unique encryption code with a different pattern of detectable emission spectra.

Ligase Detection Reaction, Solid Support Capture, Detection Probe Hybridization, and Detection Scheme

[0272] Another aspect of the present invention is directed to a method for identifying one or more target nucleic acid molecules, differing by one or more single-base changes, insertions, deletions, or translocations, in a plurality of nucleic acid molecules or identifying one or more target mRNA molecules differing by one or more splice site variations in a plurality of mRNA molecules. This method includes ligase detection reaction, solid support capture, detection probe hybridization, and detection.

[0273] The ligase detection reaction phase, as described above, involves providing a test sample potentially containing one or more target nucleic acid molecules differing by one or more single-base changes, insertions, deletions, or translocations, in a plurality of nucleic acid molecules or one or more target mRNA molecules differing by one or more splice site variations in a plurality of mRNA molecules.

[0274] One or more primary oligonucleotide probe sets are provided. Each set is characterized by (a) a first oligonucleotide probe, having one or more detection oligonucleotide probe-specific portions or their complements and a target-specific portion and (b) a second oligonucleotide probe, having a target-specific portion and an addressable array-specific portion or its complement. The oligonucleotide probes in a particular set are suitable for ligation together when hybridized to a corresponding target nucleic acid molecule or target mRNA molecule, but have a mismatch which interferes with this ligation when hybridized to any other nucleic acid molecule or mRNA molecule present in the sample. As a result, each probe set contains a unique combination of detection oligonucleotide probe-specific portions and addressable array-specific portions or their complements.

[0275] The sample, the one or more oligonucleotide probe sets, and a ligase are blended to form a primary ligase detection reaction mixture. The primary ligase detection reaction mixture is then subjected to one or more primary ligase detection reaction cycles. These cycles include a denaturation treatment and a hybridization treatment. In the denaturation treatment, any hybridized oligonucleotides are separated from the target nucleic acid molecules or target mRNA molecules. During the hybridization treatment, the one or more oligonucleotide probe sets hybridize in a base-specific manner to their respective target nucleic acid molecules or target mRNA molecules, if present in the sample, and ligate to one another to form a primary ligation product containing (a) the one or more detection oligonucleotide probe-specific portions or their complements, (b) the target-specific portions, and (c) the addressable array-specific portion or its complement. The primary ligation product for each one or more oligonucleotide probe set is distinguished from other nucleic acid molecules or mRNA molecules in the primary ligase detection reaction mixture by virtue of their containing a unique combination of detection oligonucleotide probe-specific portions and addressable array-specific portions or their complements. The primary oligonucleotide probe sets may hybridize to nucleic acid molecules or mRNA molecules in the sample other than their respective target nucleic acid molecules or target mRNA molecules but do not ligate together due to the presence of one or more mismatches and individually separate during the denaturation treatment.

[0276] In the solid support capture phase, as described above, a solid support with capture oligonucleotide probes immobilized at different sites is provided. The capture oligonucleotide probes have nucleotide sequences complementary to the addressable array-specific portions or their complements. The primary ligation products, copies of primary ligation products, or complements thereof are contacted with the solid support under conditions effective to hybridize the primary ligation products, copies of primary ligation products, or complements thereof to the capture oligonucleotide probes in a base-specific manner. As a result, the primary ligation products, copies of primary ligation products, or complements thereof are captured on the solid support at the site with the complementary capture oligonucleotide.

[0277] In the detection probe hybridization phase, as described bove, detection oligonucleotide probes are provided which bind to the detection oligonucleotide probe-specific portions of the captured primary ligation products, copies of primary ligation products, or complements thereof. Each detection oligonucleotide probe has a reporter label, so that each of the captured primary ligation products, copies of primary ligation products, or complements thereof have a unique detectable encryption code. The captured primary ligation products, copies of primary ligation products, or complements thereof are contacted with the detection oligonucleotide probes under conditions effective to permit hybridization of the detection oligonucleotide probes to the captured primary ligation products, copies of primary ligation products, or complements thereof so that labeled, captured primary ligation products, copies of primary ligation products, or complements thereof are formed.

[0278] In the detection phase, as described above, the reporter labels on the labeled, captured primary ligation products, copies of primary ligation products, or complements thereof are detected, thereby indicating the presence of one or more target nucleic acid molecules or target mRNA molecules in the sample. As a result, target nucleic acid molecules differing by one or more single-base changes, insertions, deletions, or translocations in a plurality of nucleic acid molecules or target mRNA molecules differing by one or more splice site variations in a plurality of mRNA molecules are discriminated from one another during the primary ligase detection reaction. The discriminated molecules are detected as a result of different labeled ligation products having encryption codes with a different pattern of detectable emission spectra, at different sites on the solid support.

[0279] Examples of the ligase detection reaction, solid support capture, detection probe hybridization, and detection scheme are shown in FIGS. 11-16 and 54-62.

[0280] FIG. 11 is a schematic diagram of an LDR process, in accordance with the present invention, where double Q-Zip portions containing Q-dots on a single tail are used with universal array capture to distinguish single base differences in nucleic acid molecules. LDR is performed using allele-specific oligonucleotide probes containing 16mer complementary Q-Zip portions, common oligonucleotide probes containing 24mer addressable array-specific portions and a universal sequence, and thermostable ligase. Allele-specific addressable array-specific portions (Z4,Z1), (Z3,Z2), (Z1,Z5), and (Z8,Z6) discriminate A, G, T, and C, respectively, on the target 3′→5′ nucleotide sequence. Allele-specific oligonucleotide probes ligate to common oligonucleotide probes only when there is perfect complementarity at the junction. Subsequently, unligated oligonucleotide probes are destroyed using 5′→3′ and 3′→5′ exonucleases. Ligation products are blocked at both ends and are thus resistant to digestion. All primary ligation products are extended using a universal primer, dNTPs and Taq polymerase. The extension step is repeated for linear amplification of ligation products as necessary. Extension products are hybridized onto a universal array via the 24-mer addressable array-specific portions. Extension products on the universal array are hybridized with Q-dot containing Q-Zip portions. Emission spectra at each address are quantified to decode the presence of specific Q-dots, to score each allele.

[0281] The detection results in FIG. 11 show that the sample is heterozygous A, G at SNP1 and homozygous C at SNP2. The A allele is indicated by the presence of Q-Zip portions containing Q-dots (Q4,Q1) at address Zp1. The G allele is indicated by the presence of Q-Zip portions containing Q-dots (Q3,Q2) at address Zp1. The C allele is indicated by the presence of Q-Zip portions containing Q-dots (Q8,Q6) at address Zp2.

[0282] FIG. 12 is a schematic diagram of an LDR process, in accordance with the present invention, where ligated double Q-Zip portions containing Q-dots on a single tail are used with universal array capture to distinguish single base differences in nucleic acid molecules. FIG. 12 is similar to FIG. 11, but with the addition of ligating adjacent Q-Zip portions containing Q-dots in the last step.

[0283] The detection results in FIG. 12 show that the sample is heterozygous A, G at SNP1 and homozygous C at SNP2. The A allele is indicated by the presence of ligated Q-Zip portions containg Q-dots (Q4,Q1) at address Zp1. The G allele is indicated by the presence of ligated Q-Zip portions containing Q-dots (Q3,Q2) at address Zp1. The C allele is indicated by the presence of ligated Q-Zip portions containing Q-dots (Q8,Q6) at address Zp2.

[0284] FIG. 13 is a schematic diagram of an LDR process, in accordance with the present invention, where double Q-Zip portions containing Q-dots on a single tail are used with universal array capture to score allele imbalance in a tumor sample compared with a normal sample. FIG. 13 is similar to FIG. 11, except the Q-dot encryption is used to score allele imbalance in a tumor sample compared with the normal sample. In the initial LDR reaction, a given single base difference is interrogated with two allele-specific encrypted oligonucleotide probes in the normal sample in a first tube. The same single base difference is interrogated with two different allele-specific encrypted oligonucleotide probes in the tumor sample in a second tube. Although multiple different single base differences are detected in each tube, for simplicity only SNP1 is shown. The ligation products are combined in a single tube and the exonuclease digestion and subsequent procedure are the same as described in FIG. 11. Emission spectra at each address are quantified to decode the presence of specific Q-dots, to score allele imbalance in the tumor compared to the normal sample.

[0285] The detection results in FIG. 13 show that at SNP1 the normal sample is heterozygous A, G and the tumor sample demonstrates a loss of the A allele and amplification of the G allele. In FIG. 13, the ratio of Q-Zip portions containing Q-dots (Q1,Q5)/(Q4,Q1) at address Zp1 is about zero, indicating loss of the A allele in the tumor. The ratio of Q-Zip portions containing Q-dots (Q8,Q6)/(Q3,Q2) at address Zp1 is about three, indicating an approximately three-fold amplification of the G allele in the tumor.

[0286] FIG. 14 is a schematic diagram of an LDR process, in accordance with the present invention, where ligated double Q-Zip portions containing Q-dots on a single tail are used with universal array capture to score allele imbalance in a tumor sample compared with a normal sample. FIG. 14 is similar to FIG. 13, but with the addition of ligating adjacent Q-Zip portions containing Q-dots in the last step.

[0287] The detection results in FIG. 14 show that at SNP1 the normal sample is heterozygous A, G and the tumor sample demonstrates a loss of the A allele and amplification of the G allele. In FIG. 14, the ratio of ligated Q-Zip portions containing Q-dots (Q1,Q5)/(Q4,Q1) at address Zp1 is about zero, indicating loss of the A allele in the tumor. The ratio of ligated Q-Zip portions containing Q-dots (Q8,Q6)/(Q3,Q2) at address Zp1 is about three, indicating an approximately three-fold amplification of the G allele in the tumor.

[0288] FIG. 15 is a schematic diagram of an LDR process, in accordance with the present invention, where double Q-Zip portions containing Q-dots on a single tail are used with universal array capture to score gene copy number in a tumor sample compared with a normal sample. FIG. 15 is similar to FIG. 11, except the Q-dot encryption is used to score gene copy number in a tumor sample compared with the normal sample. In the initial LDR reaction, a given gene is interrogated with an allele-specific encrypted oligonucleotide probe in the normal sample in a first tube. The same gene is interrogated with a different allele-specific encrypted oligonucleotide probe in the tumor sample in a second tube. Although multiple different genes are detected in each tube, for simplicity only one gene is shown. The ligation products are combined in a single tube and the exonuclease digestion and subsequent procedure are the same as described in FIG. 11. Emission spectra at each address are quantified to decode the presence of specific Q-dots, to score gene copy number in the tumor compared to the normal sample. The detection results in FIG. 15 show an approximately three-fold amplification of gene 1 in the tumor sample (indicated by a ratio of Q-Zip portions containing Q-dots (Q8,Q6)/(Q3,Q2) at address Zp1 of about three).

[0289] FIG. 16 is a schematic diagram of an LDR process, in accordance with the present invention, where ligated double Q-Zip portions containing Q-dots on a single tail are used with universal array capture to score gene copy number in a tumor sample compared with a normal sample. FIG. 16 is similar to FIG. 15, but with the addition of ligating adjacent Q-Zip portions containing Q-dots in the last step. The detection results in FIG. 16 show an approximately three-fold amplification of gene 1 in the tumor sample (indicated by a ratio of ligated Q-Zip portions containing Q-dots (Q8,Q6)/(Q3,Q2) at address Zp1 of about three).

[0290] FIG. 54 is a schematic diagram of an LDR process, in accordance with the present invention, where isothermal amplification and double Q-Zip portions containing Q-dots on a single tail are used with universal array capture to distinguish single base differences in nucleic acid molecules. LDR is performed using allele-specific oligonucleotide probes containing 16mer Q-Zip portions, common oligonucleotide probes containing 24mer addressable array-specific portions and a universal sequence, and thermostable ligase. Allele-specific oligonucleotide probes contain a capture group on the 5′ end, and the common oligonucleotide probes contain a restriction site whose cleavage is blocked by a thiophosphate group at the scissile bond. Allele-specific addressable array-specific portions (Z4,Z1), (Z3,Z2), (Z1,Z5), and (Z8,Z6) discriminate A, G, T, and C, respectively, on the target 3′→5′ nucleotide sequence. Allele-specific oligonucleotide probes ligate to common oligonucleotide probes only when there is perfect complementarity at the junction. Subsequently, ligation products are captured on streptavidin-magnetic beads and washed extensively. All primary ligtion products are amplified isothermally using a universal primer, dNTPs, a restriction endonuclease, and Bst polymerase. The universal primer contains the restriction endonuclease site and hybridizes to the ligation products. Once Bst polymerase extends this primer, the restriction endonuclease nicks this strand while extension continues. The ligation product is not cleaved as the thiophosphate strand is resistant. However, the nicked primer becomes a substrate for a new polymerase to bind and extend, displacing the previous strand. This isothermal amplification allows hundreds to thousands or more copies to accumulate in a linear fashion. Extension products are hybridized onto a universal array via the 24-mer addressable array-specific portions in the ligation products and capture oligonucleotide probes on the solid support. Extension products on the universal array are hybridized with Q-dot containing Q-Zip portions. Emission spectra at each address are quantified to decode the presence of specific Q-dots, to score each allele.

[0291] The detection results in FIG. 54 show that the sample is heterozygous A, G at SNP1 and homozygous C at SNP2. The A allele is indicated by the presence of Q-Zip portions containing Q-dots (Q4,Q1) at address Zp1. The G allele is indicated by the presence of Q-Zip portions containing Q-dots (Q3,Q2) at address Zp1. The C allele is indicated by the presence of Q-Zip portions containing Q-dots (Q8,Q6) at address Zp2.

[0292] FIG. 55 is a schematic diagram of an LDR process, in accordance with the present invention, where isothermal amplification and ligated double Q-Zip portions containing Q-dots on a single tail are used with universal array capture to distinguish single base differences in nucleic acid molecules. FIG. 55 is similar to FIG. 54, but with the addition of ligating adjacent Q-dot containing Q-Zip portions in the last step.

[0293] The detection results in FIG. 55 show that the sample is heterozygous A, G at SNP1 and homozygous C at SNP2. The A allele is indicated by the presence of ligated Q-Zip portions containing Q-dots (Q4,Q1) at address Zp1. The G allele is indicated by the presence of ligated Q-Zip portions containing Q-dots (Q3,Q2) at address Zp1. The C allele is indicated by the presence of ligated Q-Zip portions containing Q-dots (Q8,Q6) at address Zp2.

[0294] FIG. 56 is a schematic diagram of an LDR process, in accordance with the present invention, where isothermal amplification and ligated double Q-Zip portions containing Q-dots on a single tail are used with ligation to universal array capture to distinguish single base differences in nucleic acid molecules. FIG. 56 is similar to FIG. 55, but with the addition of ligating the captured ligation products to their respective capture probes of the array followed by a stringent wash step. Subsequently, adjacent Q-Zip portions containing Q-dots are ligated in the last step.

[0295] The detection results in FIG. 56 show that the sample is heterozygous A, G at SNP1 and homozygous C at SNP2. The A allele is indicated by the presence of ligated Q-Zip portions containing Q-dots (Q4,Q1) at address Zp1. The G allele is indicated by the presence of ligated Q-Zip portions containing Q-dots (Q3,Q2) at address Zp1. The C allele is indicated by the presence of ligated Q-Zip portions containing Q-dots (Q8,Q6) at address Zp2.

[0296] FIG. 57 is a schematic diagram of an LDR process, in accordance with the present invention, where isothermal amplification and double Q-Zip portions containing Q-dots on a single tail are used with universal array capture to score allele imbalance in a tumor sample compared with a normal sample. This figure is similar to FIG. 54, except the Q-dot encryption is used to score allele imbalance in a tumor sample compared with the normal sample. In the initial LDR reaction a given single base difference is interrogated with two allele-specific encrypted oligonucleotide probes in the normal sample in a first tube. The same single base difference is interrogated with two different allele-specific encrypted oligonucleotide probes in the tumor sample in a second tube. Although multiple different single base differences are detected in each tube, for simplicity only SNP1 is shown. The ligation products are combined in a single tube and the LDR product capture, isothermal amplification, and subsequent procedure are the same as described in FIG. 54. Emission spectra at each address are quantified to decode the presence of specific Q-dots, to score allele imbalance in the tumor compared to the normal sample.

[0297] The detection results in FIG. 57 show that at SNP1 the normal sample is heterozygous A, G and the tumor sample demonstrates a loss of the A allele and amplification of the G allele. In FIG. 57, the ratio of Q-Zip portions containing Q-dots (Q1,Q5)/(Q4,Q1) at address Zp1 is about zero, indicating loss of the A allele in the tumor. The ratio of Q-Zip portions containing Q-dots (Q8,Q6)/(Q3,Q2) at address Zp1 is about three, indicating an approximately three-fold amplification of the G allele in the tumor.

[0298] FIG. 58 is a schematic diagram of an LDR process, in accordance with the present invention, where isothermal amplification and ligated double Q-Zip portions containing Q-dots on a single tail are used with universal array capture to score allele imbalance in a tumor sample compared with a normal sample. FIG. 58 is similar to FIG. 57, but with the addition of ligating adjacent Q-Zip portions containing Q-dots are ligated in the last step.

[0299] The detection results in FIG. 58 show that at SNP1 the normal sample is heterozygous A, G and the tumor sample demonstrates a loss of the A allele and amplification of the G allele. In FIG. 58, the ratio of ligated Q-Zip portions containing Q-dots (Q1,Q5)/(Q4,Q1) at address Zp1 is about zero, indicating loss of the A allele in the tumor. The ratio of ligated Q-Zip portions containing Q-dots (Q8,Q6)/(Q3,Q2) at address Zp1 is about three, indicating an approximately three-fold amplification of the G allele in the tumor.

[0300] FIG. 59 is a schematic diagram of an LDR process, in accordance with the present invention, where isothermal amplification and ligated double Q-Zip portions containing Q-dots on a single tail are used with ligation to a universal array to score allele imbalance in a tumor sample compared with a normal sample. FIG. 59 is similar to FIG. 58, but with the addition of ligating the captured addressable array-specific portions of the ligation products to their respective capture probes on the array followed by a stringent wash step. Subsequently, adjacent Q-Zip portions containing Q-dots in the last step.

[0301] The detection results in FIG. 59 show that at SNP1 the normal sample is heterozygous A, G and the tumor sample demonstrates a loss of the A allele and amplification of the G allele. In FIG. 59, the ratio of ligated Q-Zip portions containing Q-dots (Q1,Q5)/(Q4,Q1) at address Zp1 is about zero, indicating loss of the A allele in the tumor. The ratio of ligated Q-Zip portions containing Q-dots (Q8,Q6)/(Q3,Q2) at address Zp1 is about three, indicating an approximately three-fold amplification of the G allele in the tumor.

[0302] FIG. 60 is a schematic diagram of an LDR process, in accordance with the present invention, where isothermal amplification and double Q-Zip portions containing Q-dots on a single tail are used with universal array capture to score gene copy number in a tumor sample compared with a normal sample. FIG. 60 is similar to FIG. 57, except the Q-dot encryption is used to score gene copy number in a tumor sample compared with the normal sample. In the initial LDR reaction, a given gene is interrogated with an allele-specific encrypted oligonucleotide probes in the normal sample in a first tube. The same gene is interrogated with a different allele-specific encrypted oligonucleotide probes in the tumor sample in a second tube. Although multiple different genes are detected in each tube, for simplicity only one gene is shown. The ligation products are combined in a single tube and the ligation product capture, isothermal amplification, and subsequent procedure are the same as described in FIG. 57. Emission spectra at each address are quantified to decode the presence of specific Q-dots, to score gene copy number in the tumor compared to the normal sample. The detection results in FIG. 60 show an approximately three-fold amplification of gene 1 in the tumor sample (indicated by a ratio of Q-Zip portions containing Q-dots (Q8,Q6)/(Q3,Q2) at address Zp1 of about three).

[0303] FIG. 61 is a schematic diagram of an LDR process, in accordance with the present invention, where isothermal amplification and ligated double Q-Zip portions containing Q-dots on a single tail are used with universal array capture to score gene copy number in a tumor sample compared with a normal sample. FIG. 61 is similar to FIG. 60, but with the addition of ligating adjacent Q-Zip portions containing Q-dots in the last step. The detection results in FIG. 61 show an approximately three-fold amplification of gene 1 in the tumor sample (indicated by a ratio of ligated Q-Zip portions containing Q-dots (Q8,Q6)/(Q3,Q2) at address Zp1 of about three).

[0304] FIG. 62 is a schematic diagram of an LDR process, in accordance with the present invention, where isothermal amplification and ligated double Q-Zip portions containing Q-dots on a single tail are used with ligation to a universal array to score gene copy number in a tumor sample compared with a normal sample. FIG. 62 is similar to FIG. 61, but with the addition of ligating the addressable array-specific portions of the ligation products to their respective capture probes on the array followed by a stringent wash step. Subsequently, adjacent Q-Zip portions containing Q-dots are ligated in the last step. The detection results in FIG. 62 show an approximately three-fold amplification of gene 1 in the tumor sample (indicated by a ratio of ligated Q-Zip portions containing Q-dots (Q8,Q6)/(Q3,Q2) at address Zp1 of about three).

[0305] When working with an mRNA target, this aspect of the present invention may further involve, prior to blending, providing a primer complementary to the target mRNA molecule, providing a reverse transcriptase, blending the primer, the reverse transcriptase, and the sample to form a reverse transcription mixture, and subjecting the reverse transcription mixture to a reverse transcription reaction to produce cDNA copies of the target mRNA molecule.

[0306] This aspect of the present invention may further involve subjecting the sample to whole genome amplification prior to blending. This may involve providing random primers, providing a polymerase, blending the sample, the random primers, and the polymerase to form a whole genome amplification reaction mixture, and subjecting the whole genome amplification reaction mixture to a polymerase extension reaction under conditions effective to amplify the whole genome. Whole genome amplification is described in Lage et al., “Whole Genome Analysis of Genetic Alterations in Small DNA Samples Using Hyperbranched Strand Displacement Amplification and Array-CGH,” Genome Res. 13:294-307 (2003), which is hereby incorporated by reference in its entirety.

[0307] In carrying out the ligase detection reaction, solid support capture, detection probe hybridization, and detection scheme of the present invention, relative amounts of one or more target nucleic acid molecules in the test sample, differing by one or more single-base changes, insertions, deletions, or translocations, or one or more target mRNA molecules differing by one or more splice site variations, may be quantified by comparison with a reference sample having reference target nucleic acid molecules or reference target mRNA molecules.

[0308] This involves providing one or more secondary oligonucleotide probe sets, which differ from the primary oligonucleotide probe sets. Each of the secondary oligonucleotide probes sets are characterized by (a) a first oligonucleotide probe, having one or more detection oligonucleotide probe-specific portions or their complements and a reference target-specific portion, and (b) a second oligonucleotide probe, having a reference target-specific portion and an addressable array-specific portion or its complement. The oligonucleotide probes in a particular secondary oligonucleotide probe set are suitable for ligation together when hybridized to one another on a corresponding reference target nucleic acid molecule or reference target mRNA molecules, but have a mismatch which interferes with this ligation when hybridized to any other nucleic acid or mRNA molecule present in the reference sample. One or both oligonucleotide probes in the secondary oligonucleotide probe set contain one or more detection oligonucleotide probe-specific portions or their complements so that each secondary oligonucleotide probe set contains a unique set of one or more detection oligonucleotide probe-specific portions or their complements.

[0309] The reference sample, the one or more secondary oligonucleotide probe sets, and the ligase are blended to form a secondary ligase detection reaction mixture. The secondary ligase detection reaction mixture is then subjected to one or more ligase detection reaction cycles comprising a denaturation treatment and a hybridization treatment. In the denaturation treatment, any hybridized oligonucleotides are separated from reference target nucleic acid molecules or reference target mRNA molecules. During the hybridization treatment, the oligonucleotide probe sets hybridize in a base-specific manner to their respective reference target nucleic acid molecule or reference target mRNA molecules, if present in the reference sample, and ligate to one another to form a secondary ligation product containing (a) the one or more detection oligonucleotide probe-specific portions or their complements, (b) the reference sample-specific portions and (c) the addressable array-specific portion or its complement. The secondary ligation products for each secondary oligonucleotide probe set are distinguishable from other nucleic acid molecules or mRNA molecules in the secondary ligase detection reaction mixture. The secondary oligonucleotide probe sets may hybridize to nucleic acid molecules or mRNA molecules in the reference sample other than their respective reference target nucleic acid molecules or reference target mRNA molecules but do not ligate together due to the presence of one or more mismatches and individually separate during the denaturation treatment.

[0310] The primary and secondary ligase detection reaction mixtures are blended after subjecting them to one or more ligase detection reaction cycles and before capturing, whereby the blended first and second ligase detection reaction mixtures are subjected to capturing, contacting, and detecting. The relative amounts of the reporter labels on the primary and secondary ligation products are compared, to provide a quantitative measure of the relative level of the one or more target nucleic acid molecules or target mRNA molecules in the test sample compared with that of the reference target nucleic acid molecules or reference target mRNA molecules in the reference sample as a result of each different labeled ligation product having a unique encryption code. This aspect of the present invention is useful for quantifying, without limitation, gene copy number, mRNA copy number, or mRNA splice variant copy number.

Solid Support Capture, Ligase Detection Reaction, Detection Probe Hybridization, and Detection Scheme

[0311] Another embodiment of the present invention relates to a method for identifying one or more target nucleic acid molecules, differing by one or more single-base changes, insertions, deletions, or translocations, in a plurality of nucleic acid molecules or identifying one or more target mRNA molecules differing by one or more splice site variations in a plurality of mRNA molecules. This includes solid support capture, ligase detection reaction, detection probe hybridization, and detection.

[0312] The solid support capture phase, as described above, involves providing a sample potentially containing one or more target nucleic acid molecules differing by one or more single-base changes, insertions, deletions, or translocations or one or more target mRNA molecules differing by one or more splice site variations. The target nucleic acid molecules or target mRNA molecules in the sample are captured on one or a plurality of solid supports, so that they may be individually distinguished.

[0313] In the ligase detection reaction phase, as described above, one or more primary oligonucleotide probe sets are provided, each set characterized by (a) a first oligonucleotide probe, having a target-specific portion and a 5′ upstream portion complementary to one or more detection oligonucleotide probes and (b) a second oligonucleotide probe, having a target-specific portion and a 3′ downstream portion complementary to one or more detection oligonucleotide probes. The oligonucleotide probes in a particular set are suitable for ligation together when hybridized to one another on a corresponding target nucleic molecule, but have a mismatch which interferes with this ligation when hybridized to any other nucleic molecule present in the sample. Each probe set contains a unique set of 5′ upstream and 3′ downstream portions. The sample, the one or more primary oligonucleotide probe sets, and the ligase are blended to form a primary ligase detection reaction mixture. The primary ligase detection reaction mixture is subjected to one or more ligase detection reaction cycles. These cycles include a denaturation treatment and hybridization treatment. In the denaturation treatment, any hybridized oligonucleotides are separated from the target nucleic acid molecule or target mRNA molecule. For the hybridization treatment, the oligonucleotide probe sets hybridize in a base-specific manner to their respective target nucleic acid molecules or target mRNA molecule, if present in the sample, and ligate to one another to form a primary ligation product. The primary ligation product contains (a) the 5′ upstream portion, (b) the target-specific portions, and (c) the 3′ downstream portion with the primary ligation product remaining bound to the captured target nucleic acid molecule or target mRNA molecule. The primary ligation product for each primary oligonucleotide probe set is distinguishable from other nucleic acids in the primary ligase detection reaction mixture by virtue of its containing a unique set of 5′ upstream portion and 3′ downstream portion. The oligonucleotide probe sets may hybridize to nucleic acid molecules in the sample other than their respective target nucleic acid molecule or target mRNA sequences but do not ligate together due to the presence of one or more mismatches and individually separate during the denaturation treatment.

[0314] In the detection probe hybridization phase, as described above, detection oligonucleotide probes which bind to the 5′ upstream and 3′ downstream portions of the ligation products are provided. Each detection oligonucleotide probe has a reporter label, so that each labeled primary ligation product has a unique detectable encryption code. The primary ligation products and the detection oligonucleotide probes are contacted under conditions effective to permit hybridization of the detection oligonucleotide probes to the primary ligation products so that a labeled captured primary ligation product is formed.

[0315] In the detection phase, as described above, the reporter labels on the primary ligation products are detected. As a result, the presence of one or more target nucleic acid molecules differing by one or more single base changes, insertions, deletions, or translocations or one or more target mRNA molecules differing by one or more splice site variations are discriminated from one another during the ligase detection reaction. The discriminated target nucleic acid molecules or the target mRNA molecules are detected due to each different reporter label having a unique encryption code with a different pattern of detectable emission spectra.

[0316] Examples of the solid support capture, ligase detection reaction, detection probe hybridization, and detection scheme are shown in FIGS. 17-36.

[0317] FIG. 17 is a schematic diagram of an LDR process, in accordance with the present invention, where double Q-Zip portions containing Q-dots on double tails are used with microbead capture to distinguish single base differences in nucleic acid molecules. Genomic DNA fragments are generated by cleaving DNA with restriction endonuclease(s). Linkers containing a capture group (such as biotin) are ligated onto the 5′ end. Excess linker is removed using filtration or size-exclusion columns. Genomic fragments are captured on streptavidin-magnetic beads and washed extensively. Magnetic beads containing the genomic fragments are resuspended, and LDR is performed directly on the nucleic acid attached to beads using allele-specific oligonucleotide probes containing 16mer complementary Q-Zip portions containing Q-dots, common oligonucleotide probes containing 16mer complementary Q-Zip portions containing Q-dots, and thermostable ligase. Allele-specific oligonucleotide probes (Z4,Z1), (Z3,Z2), (Z1,Z5), and (Z8,Z6) discriminate A, G, T, and C, respectively, on the target 3′->5′ nucleotide sequence. Allele-specific oligonucleotide probes ligate to common oligonucleotide probes only when there is perfect complementarity at the junction. Subsequently, magnetic beads are captured, washed extensively, resuspended, and hybridized with Q-Zip portions containing Q-dots. After capture and extensive washing, the magnetic beads are resuspended and dried onto a slide. Emission spectra at each pixel are quantified to decode the presence of specific Q-dots, to score each allele.

[0318] The detection results in FIG. 17 show that the sample is heterozygous A, G at SNP1 and homozygous C at SNP2. The A allele is indicated by the Q-Zip portions containing Q-dots (Q4,Q1,Q5,Q7) hybridizing to the ligation product having addressable array-specific portion (Z4, Z1). The G allele is indicated by the Q-Zip portions containing Q-dots (Q3,Q2,Q5,Q7) hybridizing to the ligation product having addressable array-specific portions (Z3,Z2). The C allele is indicated by the Q-Zip portions containing Q-dots (Q8,Q6,Q5,Q7) hybridizing to the ligation product having addressable array-specific portions (Z8,Z6).

[0319] FIG. 18 is a schematic diagram of an LDR process, in accordance with the present invention, where ligated double Q-Zip portions containing Q-dots on double tails are used with microbead capture to distinguish single base differences in nucleic acid molecules. FIG. 18 is similar to FIG. 17, but with the addition of ligating adjacent Q-Zip portions containing Q-dots in the last step.

[0320] The detection results in FIG. 18 show that the sample is heterozygous A, G at SNP1 and homozygous C at SNP2. The A allele is indicated by the ligated Q-Zip portions containing Q-dots (Q4,Q1,Q5,Q7) hybridizing to the ligation product having portions containing Q-dots (Z4,Z1). The G allele is indicated by the ligated Q-Zip portions containing Q-dots (Q3,Q2,Q5,Q7) hybridizing to the ligation product having Q-Zip portions containing Q-dots (Z3,Z2). The C allele is indicated by the ligated Q-Zip portions containing Q-dots (Q8,Q6,Q5,Q7) hybridizing to the ligation product having portions containing Q-dots (Z8,Z6).

[0321] FIG. 19 is a schematic diagram of an LDR process, in accordance with the present invention, where double Q-Zip portions containing Q-dots on double tails are used with microbead capture to score allele imbalance in a tumor sample compared with a normal sample. This figure is similar to FIG. 17, except the Q-dot encryption is used to score allele imbalance in a tumor sample compared with the normal sample. Genomic fragments are captured on streptavidin-magnetic beads and washed extensively as described above. Tumor and normal samples are kept separate. In the initial LDR reaction a given single base difference is interrogated with two allele-specific encrypted oligonucleotide probes in the normal sample in a first tube. The same single base difference is interrogated with two different allele-specific encrypted oligonucleotide probes in the tumor sample in a second tube. Although multiple different single base differences are detected in each tube, for simplicity only SNP1 is shown. After the ligation detection reaction, the ligation products on magnetic beads are combined in a single tube and washed extensively. The beads are resuspended and dried onto a microscope slide. Emission spectra at each pixel are quantified to decode the presence of specific Q-dots, to score allele imbalance in the tumor compared to the normal sample.

[0322] The detection results in FIG. 19 show that at SNP1 the normal sample is heterozygous A, G and the tumor sample demonstrates a loss of the A allele and amplification of the G allele. In FIG. 19, the ratio of hybridized Q-Zip portions containing Q-dots (Q1,Q5,Q5,Q7)/(Q4,Q1,Q5,Q7) is about zero, indicating loss of the A allele in the tumor. The ratio of hybridized Q-Zip portions containing Q-dots (Q8,Q6,Q5,Q7)/(Q3,Q2,Q5,Q7) is about three, indicating an approximately three-fold amplification of the G allele in the tumor.

[0323] FIG. 20 is a schematic diagram of an LDR process, in accordance with the present invention, where ligated double Q-Zip portions containing Q-dots on double tails are used with microbead capture to score allele imbalance in a tumor sample compared with a normal sample. FIG. 20 is similar to FIG. 19, but with the addition of ligating adjacent Q-Zip portions containing Q-dots in the last step.

[0324] The detection results in FIG. 20 show that at SNP1 the normal sample is heterozygous A, G and the tumor sample demonstrates a loss of the A allele and amplification of the G allele. In FIG. 20, the ratio of hybridized ligated Q-Zip portions containing Q-dots (Q1,Q5,Q5,Q7)/(Q4,Q1,Q5,Q7) is about zero, indicating loss of the A allele in the tumor. The ratio of hybridized ligated Q-Zip portions containing Q-dots (Q8,Q6,Q5,Q7)/(Q3,Q2,Q5,Q7) is about three, indicating an approximately three-fold amplification of the G allele in the tumor.

[0325] FIG. 21 is a schematic diagram of an LDR process, in accordance with the present invention, where double Q-Zip portions containing Q-dots on double tails are used with microbead capture to score gene copy number in a tumor sample compared with a normal sample. This figure is similar to FIG. 17, except the Q-dot encryption is used to score allele imbalance in a tumor sample compared with the normal sample. Genomic fragments are captured on streptavidin-magnetic beads and washed extensively as described above. Tumor and normal samples are kept separate. In the initial LDR reaction, a given gene is interrogated with a gene-specific encrypted oligonucleotide probe in the normal sample in a first tube. The same gene is interrogated with a different gene-specific encrypted oligonucleotide probe in the tumor sample in a second tube. Although multiple different genes are detected in each tube, for simplicity only gene1 is shown. After ligase detection reaction, the ligation products on magnetic beads are combined in a single tube and washed extensively. The beads are resuspended and dried onto a slide. Emission spectra at each pixel are quantified to decode the presence of specific Q-dots, to score gene copy number in the tumor compared to the normal sample. The detection results in FIG. 21 show an approximately three-fold amplification of gene 1 in the tumor sample (indicated by a ratio of hybridized Q-Zip portions containing Q-dots (Q8,Q6,Q5,Q7)/(Q3,Q2,Q5,Q7) of about three).

[0326] FIG. 22 is a schematic diagram of an LDR process, in accordance with the present invention, where ligated double Q-Zip portions containing Q-dots on double tails are used with microbead capture to score gene copy number in a tumor sample compared with a normal sample. FIG. 22 is similar to FIG. 21, but with the addition of ligating adjacent Q-Zip portions containing Q-dots in the last step. The detection results in FIG. 22 show an approximately three-fold amplification of gene 1 in the tumor sample (indicated by a ratio of hybridized ligated Q-Zip portions containing Q-dots (Q8,Q6,Q5,Q7)/(Q3,Q2,Q5,Q7) of about three).

[0327] FIG. 23 is a schematic diagram of an LDR process, in accordance with the present invention, where double Q-Zip portions containing Q-dots on double tails are used with microbead capture to distinguish single base differences in nucleic acids. Genomic DNA fragments are generated by cleaving DNA with restriction endonuclease(s), or nicking with DNase. 3′ ends are extended with a polymerase such as Klenow using a dNTP containing a capture group (such as biotin). Excess dNTP is removed using filtration or size-exclusion columns. Genomic fragments are captured on streptavidin-magnetic beads and washed extensively. Magnetic beads containing the genomic fragments are resuspended, and LDR is performed directly on DNA attached to beads using allele-specific oligonucleotide probes containing 16mer complementary Q-Zip portions, common oligonucleotide probes containing 16mer complementary Q-Zip portions, and thermostable ligase. Allele-specific oligonucleotide probes (Z4,Z1), (Z3,Z2), (Z1,Z5), and (Z8,Z6) discriminate A, G, T, and C, respectively, on the target 3′→5′ nucleotide sequence. Allele-specific oligonucleotide probes ligate to common oligonucleotide probes only when there is perfect complementarity at the junction. Subsequently, magnetic beads are captured, washed extensively, resuspended, and hybridized with Q-Zip portions containing Q-dots. After capture and extensive washing, the magnetic beads are resuspended and dried onto a microscope slide. Emission spectra at each pixel are quantified to decode the presence of specific Q-dots, to score each allele.

[0328] The detection results in FIG. 23 show that the sample is heterozygous A, G at SNP1 and homozygous C at SNP2. The A allele is indicated by the Q-Zip portions containing Q-dots (Q4,Q1,Q5,Q7) hybridizing to the ligation product having addressable array-specific portions (Z4,Z1). The G allele is indicated by the Q-Zip portions containing Q-dots (Q3,Q2,Q5,Q7) hybridizing to the ligation product having addressable array-specific portions (Z3,Z2). The C allele is indicated by the Q-Zip portions containing Q-dots (Q8,Q6,Q5,Q7) hybridizing to the ligation product having addressable array-specific portions (Z8,Z6).

[0329] FIG. 24 is a schematic diagram of an LDR process, in accordance with the present invention, where ligated double Q-Zip portions containing Q-dots on double tails are used with microbead capture to distinguish single base differences in nucleic acid molecules. FIG. 24 is similar to FIG. 23, but with the addition of ligating adjacent Q-Zip portions containing Q-dots in the last step.

[0330] The detection results in FIG. 24 show that the sample is heterozygous A, G at SNP1 and homozygous C at SNP2. The A allele is indicated by the ligated Q-Zip portions containing Q-dots (Q4,Q1,Q5,Q7) hybridizing to the ligation product having addressable array-specific portions (Z4,Z1); the G allele is indicated by the ligated Q-Zip portions containing Q-dots (Q3,Q2,Q5,Q7) hybridizing to the ligation product having addressable array-specific portions (Z3,Z2). The C allele is indicated by the ligated Q-Zip portions containing Q-dots (Q8,Q6,Q5,Q7) hybridizing to the ligation product having addressable array-specific portions (Z8,Z6).

[0331] FIG. 25 is a schematic diagram of an LDR process, in accordance with the present invention, where double Q-Zip portions containing Q-dots on double tails are used with microbead capture to score allele imbalance in a tumor sample compared with a normal sample. This figure is similar to FIG. 23, except the Q-dot encryption is used to score allele imbalance in a tumor sample compared with the normal sample. Genomic fragments are captured on streptavidin-magnetic beads and washed extensively as described above. Tumor and normal samples are kept separate. In the initial LDR reaction, a given single base difference is interrogated with two allele-specific encrypted oligonucleotide probes in the normal sample in a first tube. The same single base difference is interrogated with two different allele-specific encrypted oligonucleotide probes in the tumor sample in a second tube. Although multiple different single base differences are detected in each tube, for simplicity only SNP1 is shown. After the ligase detection reaction, ligation products on magnetic beads are combined in a single tube and washed extensively. The beads are resuspended and dried onto a microscope slide. Emission spectra at each pixel are quantified to decode the presence of specific Q-dots, to score allele imbalance in the tumor compared to the normal sample.

[0332] The detection results in FIG. 25 show that at SNP1 the normal sample is heterozygous A, G and the tumor sample demonstrates a loss of the A allele and amplification of the G allele. In FIG. 25, the ratio of hybridized Q-Zip portions containing Q-dots (Q1,Q5,Q5,Q7)/(Q4,Q1,Q5,Q7) is about zero, indicating loss of the A allele in the tumor. The ratio of hybridized Q-Zip portions containing Q-dots (Q8,Q6,Q5,Q7)/(Q3,Q2,Q5,Q7) is about three, indicating an approximately three-fold amplification of the G allele in the tumor.

[0333] FIG. 26 is a schematic diagram of an LDR process, in accordance with the present invention, where ligated double Q-Zip portions containing Q-dots on double tails are used with microbead capture to score allele imbalance in a tumor sample compared with a normal sample. FIG. 26 is similar to FIG. 25, but with the addition of ligating adjacent Q-Zip portions containing Q-dots in the last step.

[0334] The detection results in FIG. 26 show that at SNP1 the normal sample is heterozygous A, G and the tumor sample demonstrates a loss of the A allele and amplification of the G allele. In FIG. 26, the ratio of hybridized ligated Q-Zip portions containing Q-dots (Q1,Q5,Q5,Q7)/(Q4,Q1,Q5,Q7) is about zero, indicating loss of the A allele in the tumor. The ratio of hybridized ligated Q-Zip portions containing Q-dots (Q8,Q6,Q5,Q7)/(Q3,Q2,Q5,Q7) is about three, indicating an approximately three-fold amplification of the G allele in the tumor.

[0335] FIG. 27 is a schematic diagram of an LDR process, in accordance with the present invention, where double Q-Zip portions containing Q-dots on double tails are used with microbead capture to score gene copy number in a tumor sample compared with a normal sample. This figure is similar to FIG. 23, except the Q-dot encryption is used to score gene copy number in a tumor sample compared with the normal sample. Genomic fragments are captured on streptavidin-magnetic beads and washed extensively as described above. Tumor and normal samples are kept separate. In the initial LDR reaction, a given gene is interrogated with a gene-specific encrypted oligonucleotide probe in the normal sample in a first tube. The same gene is interrogated with a different gene-specific encrypted oligonucleotide probe in the tumor sample in a second tube. Although multiple different genes are detected in each tube, for simplicity only gene 1 is shown. After the ligase detection reaction, the ligation products on magnetic beads are combined in a single tube and washed extensively. The beads are resuspended and dried onto a microscope slide. Emission spectra at each pixel are quantified to decode the presence of specific Q-dots, to score gene copy number in the tumor compared to the normal sample. The detection results in FIG. 27 show an approximately three-fold amplification of gene 1 in the tumor sample (indicated by a ratio of hybridized Q-Zip portions containing Q-dots (Q8,Q6,Q5,Q7)/(Q3,Q2,Q5,Q7) of about three).

[0336] FIG. 28 is a schematic diagram of an LDR process, in accordance with the present invention, where ligated double Q-Zip portions containing Q-dots on double tails are used with microbead capture to score gene copy number in a tumor sample compared with a normal sample. FIG. 28 is similar to FIG. 27, but with the addition of ligating adjacent Q-Zip portions containing Q-dots in the last step. The detection results in FIG. 28 show an approximately three-fold amplification of gene 1 in the tumor sample (indicated by a ratio of hybridized ligated Q-Zip portions containing Q-dots (Q8,Q6,Q5,Q7)/(Q3,Q2,Q5,Q7) of about three).

[0337] FIG. 29 is a schematic diagram of an LDR process, in accordance with the present invention, where double Q-Zip portions containing Q-dots on double tails are used with microbead capture to distinguish and quantify splice variants on mRNA. A cDNA copy of mRNA is generated using reverse transcriptase on an oligodT primer containing a capture group (such as biotin) on the 5′ end. RNA is fragmented using RNaseH or base. Excess linkers are removed using filtration or size-exclusion columns. cDNAs are captured on streptavidin-magnetic beads and washed extensively. Magnetic beads containing the cDNAs are resuspended, and LDR performed directly on cDNA attached to beads using exon-specific oligonucleotide probes containing 16mer complementary Q-Zip portions containing Q-dots, common oligonucleotide probes containing 16mer complementary Q-Zip portions containing Q-dots, and thermostable ligase. Different Q-Zip probes are used on exon-specific oligonucleotide probes. Subsequently, magnetic beads are captured, washed extensively, resuspended, and hybridized with Q-Zip portions containing Q-dots. After capture and extensive washing, the magnetic beads are resuspended and dried onto a microscope slide. Emission spectra at each pixel are quantified to decode the presence of specific Q-dots, to score mRNA copy number between the two splice variants. The detection results in FIG. 29 show an approximately three-fold greater amount of splice variant containing Ex1a over the splice variant containing Ex1 (indicated by a ratio of hybridized Q-Zip portions containing Q-dots (Q8,Q6,Q5,Q7)/(Q3,Q2,Q5,Q7) of about three).

[0338] FIG. 30 is a schematic diagram of an LDR process, in accordance with the present invention, where ligated double Q-Zip portions containing Q-dots on double tails are used with microbead capture to distinguish and quantify splice variants on mRNA. FIG. 30 is similar to FIG. 29, but with the addition of ligating adjacent Q-Zip portions containing Q-dots in the last step. The detection results in FIG. 30 show an approximately three-fold greater amount of splice variant containing Ex1a over the splice variant containing Ex1 (indicated by a ratio of hybridized ligated Q-Zip portions containing Q-dots (Q8,Q6,Q5,Q7)/(Q3,Q2,Q5,Q7) of about three).

[0339] FIG. 31 is a schematic diagram of an LDR process, in accordance with the present invention, where double Q-Zip portions containing Q-dots on double tails are used with microbead capture to distinguish and quantify splice variants on mRNA in a tumor sample compared with a normal sample. This figure is similar to FIG. 29, except the Q-dot encryption is used to score splice variants in the tumor sample compared with the normal sample. cDNAs are captured on streptavidin-magnetic beads and washed extensively as described above. Tumor and normal samples are kept separate. In the initial LDR reaction, a given splice junction is interrogated with two allele-specific encrypted oligonucleotice probes in the normal sample in a first tube. The same splice junction is interrogated with two different allele-specific encrypted oligonucleotice probes in the tumor sample in a second tube. Although multiple different splice variants are detected in each tube, for simplicity only splice variants 1 and 2 are shown. After the ligase detection reaction, the ligation products on magnetic beads are combined in a single tube and washed extensively. The beads are resuspended and dried onto a slide. Emission spectra at each pixel are quantified to decode the presence of specific Q-dots, to score splice variants in the tumor compared to the normal sample.

[0340] The detection results in FIG. 31 show that the tumor demonstrates a loss of the Ex1 variant and an approximately three-fold higher expression of the Ex1a splicing variant. In FIG. 31, the ratio of hybridized Q-Zip portions containing Q-dots (Q1,Q5,Q5,Q7)/(Q4,Q1,Q5,Q7) is about zero, indicating loss of the Ex1 variant in the tumor. The ratio of hybridized Q-Zip portions containing Q-dots (Q8,Q6,Q5,Q7)/(Q3,Q2,Q5,Q7) is about three, indicating an approximately three-fold higher expression of the Ex1a splicing variant in the tumor.

[0341] FIG. 32 is a schematic diagram of an LDR process, in accordance with the present invention, where ligated double Q-Zip portions containing Q-dots on double tails are used with microbead capture to distinguish and quantify splice variants on mRNA in a tumor sample compared with a normal sample. FIG. 32 is similar to FIG. 31, but with the addition of ligating adjacent Q-Zip portions containing Q-dots in the last step.

[0342] The detection results in FIG. 32 show that the tumor demonstrates a loss of the Ex1 variant and an approximately three-fold higher expression of the Ex1a splicing variant. In FIG. 32, the ratio of hybridized ligated Q-Zip portions containing Q-dots (Q1,Q5,Q5,Q7)/(Q4,Q1,Q5,Q7) is about zero, indicating loss of the Ex1 variant in the tumor. The ratio of hybridized ligated Q-Zip portions containing Q-dots (Q8,Q6,Q5,Q7)/(Q3,Q2,Q5,Q7) is about three, indicating an approximately three-fold higher expression of the Ex1a splicing variant in the tumor.

[0343] FIG. 33 is a schematic diagram of an LDR process, in accordance with the present invention, where double Q-Zip portions containing Q-dots on double tails are used with microbead capture to distinguish and quantify splice variants on mRNA. FIG. 33 is similar to FIG. 29, but with the use of gene specific primer(s) instead of oligo dT primers to generate the cDNA strand. The detection results in FIG. 33 show an approximately three-fold greater amount of splice variant containing Ex1a over the splice variant containing Ex1 (indicated by a ratio of hybridized Q-Zip portions containing Q-dots (Q8,Q6,Q5,Q7)/(Q3,Q2,Q5,Q7) of about three).

[0344] FIG. 34 is a schematic diagram of an LDR process, in accordance with the present invention, where ligated double Q-Zip portions containing Q-dots on double tails are used with microbead capture to distinguish and quantify splice variants on mRNA. FIG. 34 is similar to FIG. 33, but with the addition of ligating adjacent Q-Zip portions containing Q-dots in the last step. The detection results in FIG. 34 show an approximately three-fold greater amount of splice variant containing Ex1a over the splice variant containing Ex1 (indicated by a ratio of hybridized ligated Q-Zip portions containing Q-dots (Q8,Q6,Q5,Q7)/(Q3,Q2,Q5,Q7) of about three).

[0345] FIG. 35 is a schematic diagram of an LDR process, in accordance with the present invention, where double Q-Zip portions containing Q-dots on double tails are used with microbead capture to distinguish and quantify splice variants on mRNA in a tumor sample compared with a normal sample. FIG. 35 is similar to FIG. 31, but with the use of gene specific primer(s) instead of oligo dT primers to generate the cDNA strand.

[0346] The detection results in FIG. 35 show that the tumor demonstrates a loss of the Ex1 variant and an approximately three-fold higher expression of the Ex1 a splicing variant. In FIG. 35, the ratio of hybridized Q-Zip portions containing Q-dots (Q1,Q5,Q5,Q7)/(Q4,Q1,Q5,Q7) is about zero, indicating loss of the Ex1 variant in the tumor. The ratio of hybridized Q-Zip portions containing Q-dots (Q8,Q6,Q5,Q7)/(Q3,Q2,Q5,Q7) is about three, indicating an approximately three-fold higher expression of the Ex1a splicing variant in the tumor.

[0347] FIG. 36 is a schematic diagram of an LDR process, in accordance with the present invention, where ligated double Q-Zip portions containing Q-dots on double tails are used with microbead capture to distinguish and quantify splice variants on mRNA in a tumor sample compared with a normal sample. FIG. 36 is similar to FIG. 35, but with the addition of ligating adjacent Q-Zip portions containing Q-dots in the last step.

[0348] The detection results in FIG. 36 show that the tumor demonstrates a loss of the Ex1 variant and an approximately three-fold higher expression of the Ex1a splicing variant. In FIG. 36, the ratio of hybridized ligated Q-Zip portions containing Q-dots (Q1,Q5,Q5,Q7)/(Q4,Q1,Q5,Q7) is about zero, indicating loss of the Ex1 variant in the tumor. The ratio of hybridized ligated Q-Zip portions containing Q-dots (Q8,Q6,Q5,Q7)/(Q3,Q2,Q5,Q7) is about three, indicating an approximately three-fold higher expression of the Ex1a splicing variant in the tumor.

[0349] In carrying out the solid support capture, ligase detection reaction, detection probe hybridization, and detection scheme of the present invention, relative amounts of one or more of a plurality of target nucleic acid molecules in the test sample, differing by one or more single-base changes, insertions, deletions, or translocations or one or more target mRNA molecules differing by one or more splice site variables may be quantified. This is achieved by comparison with a reference sample having reference target nucleic acid molecules or reference target mRNA molecule.

[0350] This involves providing one or more secondary oligonucleotide probe sets, which differ from the primary oligonucleotide probe sets. Each of the secondary oligonucleotide probe sets are characterized by (a) a first oligonucleotide probe having a reference target-specific portion and a 5′ upstream portion complementary to one or more detection oligonucleotide probes and (b) a second oligonucleotide probe having a reference target-specific portion and a 3′ downstream portion complementary to one or more detection oligonucleotide probes. The oligonucleotide probes in a particular secondary oligonucleotide probe set are suitable for ligation together when hybridized to one another on a corresponding reference target nucleic acid molecule or reference target mRNA molecule, but have a mismatch which interferes with this ligation when hybridized to any other nucleic acid or mRNA molecule present in the reference sample. One or both oligonucleotide probes in the secondary oligonucleotide probe set contain one or more detection oligonucleotide probe-specific portions or their complements so that each secondary oligonucleotide probe set contains a unique set of one or more detection oligonucleotide probe-specific portions or their complements.

[0351] The reference sample, the one or more secondary oligonucleotide probe sets, and the ligase are blended to form a secondary ligase detection reaction mixture. The secondary ligase detection reaction mixture is then subjected to one or more ligase detection reaction cycles comprising a denaturation treatment and a hybridization treatment. In the denaturation treatment, any hybridized oligonucleotides are separated from reference target nucleic acid molecules or reference target mRNA molecules. In the hybridization treatment, the oligonucleotide probe sets hybridize in a base-specific manner to their respective reference sample target nucleic acid molecule or reference target mRNA molecule, if present in the sample, and ligate to one another to form a secondary ligation product containing (a) the reference sample-specific portions and (b) the one or more detection oligonucleotide probe-specific portions or their complements. The secondary ligation product for each secondary oligonucleotide probe set being distinguishable from other nucleic acid molecules in the secondary ligase detection reaction mixture. The secondary oligonucleotide probe sets may hybridize to nucleic acid molecules in the reference sample other than their respective reference target nucleic acid molecules or reference mRNA molecules but do not ligate together due to the presence of one or more mismatches and individually separate during the denaturation treatment.

[0352] The primary and secondary ligase detection reaction mixtures are blended after subjecting them to one or more ligase detection reaction cycles and before contacting. As a result, the blended primary and secondary ligase detection reaction mixtures are subjected to contacting and detecting. The relative amounts of the reporter labels on the primary and secondary ligation products are compared, to provide a quantitative measure of the relative level of the one or more target nucleic acid molecules or target mRNA molecules in the test sample compared with that of the reference target nucleic acid molecules or reference target mRNA molecules in the reference sample as a result of each different labeled ligation product having a unique encryption code. This aspect of the present invention is useful for quantifying, without limitation, gene copy number, mRNA copy number, or mRNA splice variant copy number.

Ligase Detection Reaction, Ligase Detection Reaction, Detection Probe Hybridization, and Detection Scheme

[0353] Another aspect of the present is directed to a method for identifying one or more target nucleic acid molecules differing by one or more single-base changes, insertions, deletions, or translocations in a plurality of nucleic acid molecules. This method includes ligase detection reaction, ligase detection reaction, detection probe hybridization, and detection.

[0354] The first ligase detection reaction phase, as described above, involves providing a test sample potentially containing one or more target nucleic acid molecules. Also provided are one or more primary oligonucleotide probe sets, each set characterized by (a) a first oligonucleotide probe, having a target-specific portion and a 5′ upstream portion containing one or more translational oligonucleotide probes or their complements, and (b) a second oligonucleotide probe, having a target-specific portion. The oligonucleotide probes in a particular primary oligonucleotide set are suitable for ligation together when hybridized to a corresponding target nucleic acid molecule, but have a mismatch which interferes with this ligation when hybridized to any other nucleic acid molecule present in the sample. Each probe set contains a unique combination of translational oligonucleotide probes or their complements.

[0355] The sample, the one or more primary oligonucleotide probe sets, and the ligase are blended to form a primary ligase detection reaction mixture. The primary ligase detection reaction mixture is subjected to one or more ligase detection reaction cycles. These cycles include a denaturation treatment and hybridization treatment. In the denaturation treatment, any hybridized oligonucleotides are separated from the target nucleic acid molecules. During the hybridization treatment, the oligonucleotide probes or the primary oligonucleotide probe sets hybridize in a base-specific manner to their respective target nucleic acid molecules, if present in the sample, and ligate to one another to form a primary ligation product. The primary ligation product contains (a) the translational oligonucleotide-specific portion or their complements and (b) the target-specific portions. The ligation product for each primary oligonculeotide probe set is distinguishable from other nucleic acids in the primary ligase detection reaction mixture by virtue of its containing a unique combination of translational oligonucleotide portions or their complements. The primary oligonucleotide probe sets may hybridize to nucleic acid molecules in the sample other than their respective target nucleic acid molecules but do not ligate together due to the presence of one or more mismatches and individually separate during the denaturation treatment.

[0356] For the second ligase detection phase, as substantially described above, one or more secondary oligonucleotide probe sets are provided. Each set is characterized by (a) a first oligonucleotide probe, having a translational oligonucleotide-specific portion and a 5′ upstream portion complementary to one or more detection oligonucleotide probe sequences and (b) a second oligonucleotide probe, having a translational oligonucleotide-specific portion, and a 3′ downstream portion complementary to one or more detection oligonucleotide probe sequences. The oligonucleotide probes in a particular secondary oligonucleotide probe set are suitable for ligation together when hybridized to a corresponding complement of a primary ligation product, but have a mismatch which interferes with this ligation when hybridized to any other nucleic acid molecule present in the sample. As a result, each secondary oligonucleotide probe set contains a unique set of 5′ upstream and 3′ downstream portions.

[0357] The primary ligation products, the plurality of secondary oligonucleotide probe sets, and the ligase are blended to form a secondary ligase detection reaction mixture. The secondary ligase detection reaction mixture is subjected to one ligase detection reaction cycle. Each cycle includes a denaturation treatment and a hybridization treatment. In the denaturation treatment, any hybridized oligonucleotide probes are separated from nucleic acid molecules to which they are hybridized. During the hybridization treatment, the secondary oligonucleotide probe sets hybridize in a base-specific manner to their corresponding primary ligation products, if present, and ligate to one another to form a secondary ligation product containing (a) the 5′ upstream portion complementary to one or more distinct oligonucleotide probe sequences, (b) the upstream translational oligonucleotide-specific portion, (c) the downstream translational oligonucleotide-specific portion, and (d) the 3′ downstream portion complementary to one or more distinct oligonucleotide probe sequences. The secondary oligonucleotide probe sets may hybridize to nucleic acid molecules other than their respective primary ligation products but do not ligate together due to the presence of one or more mismatches and individually separate during the denaturation treatment. Also provided are detection oligonucleotide probes which bind to the 5′ upstream portion and the 3′ downstream portion, where each detection oligonucleotide probe has a reporter label, so that each of the products has a unique detectable encryption code.

[0358] In the detection probe hybridization phase, as described above, the secondary ligation products and the detection oligonucleotide probes are contacted under conditions effective to permit hybridization of the detection oligonucleotide probes to the ligation products so that labeled, secondary ligation products are formed.

[0359] In the detection phase, as described above, the reporter labels on the labeled, secondary ligation products are detected. The presence of one or more target nucleic acid molecule in the sample is indicated, where sequences differing by one or more single-base changes, insertions, deletions, or translocations are discriminated from one another during the primary ligase detection reaction. The discriminated 30 sequences are detected as a result of each different labeled secondary ligation product having a unique encryption code with a different pattern of detectable emission spectra.

[0360] Examples of the ligase detection reaction, ligase detection reaction, detection probe hybridization, and detection scheme are shown in FIGS. 63-71.

[0361] FIG. 63 is a schematic diagram of an LDR process, in accordance with the present invention, where isothermal amplification and double Q-Zip portions containing Q-dots on double tails are used with T-Zip portion ligation and universal bead capture with addressable array-specific portions to distinguish single base differences in nucleic acid molecules. LDR is performed using allele-specific oligonucleotide probes containing 16mer T-Zip portions, common oligonucleotide probes containing 24mer addressable array-specific portions and a universal sequence, and a thermostable ligase. Allele-specific T-Zip portions (T4,T29), (T6,T29), (T11,T29), and (T33,T29) discriminate A, G, T, and C, respectively, on the target 3′→5′ nucleotide sequence. Allele-specific oligonucleotide probes contain a capture group on the 5′ end, and the common oligonucleotide probes contain a restriction site whose cleavage is blocked by a thiophosphate group at the scissile bond. Allele-specific oligonucleotide probes ligate to common oligonucleotide probes only when there is perfect complementarity at the junction. Subsequently, ligation products are captured on streptavidin-magnetic beads and washed extensively. All primary ligation products are amplified isothermally using a universal primer, dNTPs, a restriction endonuclease, and Bst polymerase. The universal primer contains the restriction endonuclease site and hybridizes to the ligation products. Once Bst polymerase extends this primer, the restriction endonuclease nicks this strand while extension continues. The ligation product strand is not cleaved as the thiophosphate containing strand is resistant. However, the nicked primer becomes a substrate for a new polymerase to bind and extend, displacing the previous strand. This isothermal amplification allows hundreds to thousands or more copies to accumulate in a linear fashion. Extension products are hybridized onto individual beads containing the universal 24-mer addressable array-specific portions. Pairs of T-Zip portions containing 16mer Q-Zip portions are hybridized onto the extension products and ligated together. T-Zip ligation products on the beads are then hybridized with Q-Zip portions containing Q-dots. Emission spectra at each address are quantified to decode the presence of specific Q-dots, to score each allele.

[0362] The detection results in FIG. 63 show that the sample is heterozygous A, G at SNP1 and homozygous C at SNP2. The A allele is indicated by the presence of Q-Zip portions containing Q-dots (Q4,Q1,Q5,Q7) at address Zp1. The G allele is indicated by the presence of Q-Zip portions containing Q-dots (Q3,Q2,Q5,Q7) at address Zp1. The C allele is indicated by the presence of Q-Zip portions containing Q-dots (Q8,Q6,Q5,Q7) at address Zp2.

[0363] FIG. 64 is a schematic diagram of an LDR process, in accordance with the present invention, where isothermal amplification and ligated double Q-Zip portions containing Q-dots on double tails are used with T-Zip portion ligation and universal addressable array-specific portions to distinguish single base differences in nucleic acid molecules. FIG. 64 is similar to FIG. 63, but with the addition of ligating adjacent Q-Zip portions containing Q-dots in the last step.

[0364] The detection results in FIG. 64 show that the sample is heterozygous A, G at SNP1 and homozygous C at SNP2. The A allele is indicated by the presence of ligated Q-Zip portions containing Q-dots (Q4,Q1,Q5,Q7) at address Zp1. The G allele is indicated by the presence of ligated Q-Zip portions containing Q-dots (Q3,Q2,Q5,Q7) at address Zp1. The C allele is indicated by the presence of ligated Q-Zip portions containing Q-dots (Q8,Q6,Q5,Q7) at address Zp2.

[0365] FIG. 65 is a schematic diagram of an LDR process, in accordance with the present invention, where isothermal amplification and ligated double Q-Zip portions containing Q-dots on double tails are used with T-Zip portions and ligation to universal capture probes with addressable array-specific portions on beads to distinguish single base differences in nucleic acid molecules. FIG. 65 is similar to FIG. 64, but with the addition of ligating the captured ligation products to capture probes on the beads prior to or during when the T-Zip portions are ligated. This may be followed by a stringent wash step. Subsequently, adjacent Q-Zip portions containing Q-dots are ligated in the last step.

[0366] The detection results in FIG. 65 show that the sample is heterozygous A, G at SNP1 and homozygous C at SNP2. The A allele is indicated by the presence of ligated Q-Zip portions containing Q-dots (Q4,Q1,Q5,Q7) at address Zp1. The G allele is indicated by the presence of ligated Q-Zip portions containing Q-dots (Q3,Q2,Q5,Q7) at address Zp1. The C allele is indicated by the presence of ligated Q-Zip portions containing Q-dots (Q8,Q6,Q5,Q7) at address Zp2.

[0367] FIG. 66 is a schematic diagram of an LDR process, in accordance with the present invention, where isothermal amplification and ligated double Q-Zip portions containing Q-dots on double tails are used with T-Zip portion ligation to universal capture probes with addressable array-specific portions to score allele imbalance in a tumor sample compared with a normal sample. FIG. 66 is similar to FIG. 63, except the Q-dot encryption is used to score allele imbalance in a tumor sample compared with the normal sample. In the initial LDR reaction a given single base difference is interrogated with two allele-specific encrypted oligonucleotide probes in the normal sample in a first tube. The same single base difference is interrogated with two different allele-specific encrypted oligonucleotide probes in the tumor sample in a second tube. Although multiple different single base differences are detected in each tube, for simplicity only SNP1 is shown. The ligation products are combined in a single tube and the ligation product capture, isothermal amplification, and subsequent procedure are the same as described in FIG. 63. Emission spectra at each bead are quantified to decode the presence of specific Q-dots, to score allele imbalance in the tumor compared to the normal sample.

[0368] The detection results in FIG. 66 show that at SNP1 the normal sample is heterozygous A, G and the tumor sample demonstrates a loss of the A allele and amplification of the G allele. In FIG. 66, the ratio of Q-Zip portions containing Q-dots (Q1,Q5,Q5,Q7)/(Q4,Q1,Q5,Q7) at address Zp1 is about zero, indicating loss of the A allele in the tumor. The ratio of Q-Zip portions containing Q-dots (Q8,Q6,Q5,Q7)/(Q3,Q2,Q5,Q7) at address Zp1 is about three, indicating an approximately three-fold amplification of the G allele in the tumor.

[0369] FIG. 67 is a schematic diagram of an LDR process, in accordance with the present invention, where isothermal amplification and double Q-Zip portions containing Q-dots on double tails are used with T-Zip portion ligation and universal bead capture with addressable array-specific portions to score allele imbalance in a tumor sample compared with a normal sample. FIG. 67 is similar to FIG. 66, but with the addition of ligating adjacent Q-Zip portions containing Q-dots in the last step.

[0370] The detection results in FIG. 67 show that at SNP1 the normal sample is heterozygous A, G and the tumor sample demonstrates a loss of the A allele and amplification of the G allele. In FIG. 67, the ratio of ligated Q-Zip portions containing Q-dots (Q1,Q5,Q5,Q7)/(Q4,Q1,Q5,Q7) at address Zp1 is about zero, indicating loss of the A allele in the tumor. The ratio of ligated Q-Zip portions containing Q-dots (Q8,Q6,Q5,Q7)/(Q3,Q2,Q5,Q7) at address Zp1 is about three, indicating an approximately three-fold amplification of the G allele in the tumor.

[0371] FIG. 68 is a schematic diagram of an LDR process, in accordance with the present invention, where isothermal amplification and ligated double Q-Zip portions containing Q-dots on double tails are used with T-Zip portion ligation and ligation to universal capture probes with addressable array-specific portions on beads to score allele imbalance in a tumor sample compared with a normal sample. FIG. 68 is similar to FIG. 67, but with the addition of ligating the captured ligation products to capture probes on the beads prior to or at the same time as the T-Zip portions are ligated. This may be followed by a stringent wash step. Subsequently, adjacent Q-Zip portions containing Q-dots are ligated in the last step.

[0372] The detection results in FIG. 68 show that at SNP1 the normal sample is heterozygous A, G and the tumor sample demonstrates a loss of the A allele and amplification of the G allele. In FIG. 68 the ratio of ligated Q-Zip portions containing Q-dots (Q1,Q5,Q5,Q7)/(Q4,Q1,Q5,Q7) at address Zp1 is about zero, indicating loss of the A allele in the tumor. The ratio of ligated Q-Zip portions containing Q-dots (Q8,Q6,Q5,Q7)/(Q3,Q2,Q5,Q7) at address Zp1 is about three, indicating an approximately three-fold amplification of the G allele in the tumor.

[0373] FIG. 69 is a schematic diagram of an LDR process, in accordance with the present invention, where isothermal amplification and double Q-Zip portions containing Q-dots on double tails are used with T-Zip portion ligation and universal bead capture with addressable array-specific portions to score gene copy number in a tumor sample compared with a normal sample. FIG. 69 is similar to FIG. 63, except the Q-dot encryption is used to score gene copy number in a tumor sample compared with the normal sample. In the initial LDR reaction, a given gene is interrogated with an allele-specific encrypted oligonucleotide probes in the normal sample in a first tube. The same gene is interrogated with a different allele-specific encrypted oligonucleotide probes in the tumor sample in a second tube. Although multiple different genes are detected in each tube, for simplicity only gene 1 is shown. The ligation products are combined in a single tube and the ligation product capture, isothermal amplification, and subsequent procedure are the same as described above. Emission spectra at each address are quantified to decode the presence of specific Q-dots, to score gene copy number in the tumor compared to the normal sample. The detection results in FIG. 69 show an approximately three-fold amplification of gene 1 in the tumor sample (indicated by a ratio of Q-Zip portions containing Q-dots (Q8,Q6,Q5,Q7)/(Q3,Q2,Q5,Q7) at address Zp1 of about three).

[0374] FIG. 70 is a schematic diagram of an LDR process, in accordance with the present invention, where isothermal amplification and ligated double Q-Zip portions containing Q-dots on double tails are used with T-Zip portion ligation and universal bead capture with addressable array-specific portions to score gene copy number in a tumor sample compared with a normal sample. FIG. 70 is similar to FIG. 69, but with the addition of ligating adjacent Q-Zip portions containing Q-dots in the last step. The detection results in FIG. 70 show an approximately three-fold amplification of gene 1 in the tumor sample (indicated by a ratio of ligated Q-Zip portions containing Q-dots (Q8,Q6,Q5,Q7)/(Q3,Q2,Q5,Q7) at address Zp1 of about three).

[0375] FIG. 71 is a schematic diagram of an LDR process, in accordance with the present invention, where isothermal amplification and ligated double Q-Zip portions containing Q-dots on double tails are used with T-Zip portion ligation and ligation to universal capture probes on beads to score gene copy number in a tumor sample compared with a normal sample. FIG. 71 is similar to FIG. 70, but with the addition of ligating the captured ligation products to the beads prior to or during the same step that the T-Zip portions are ligated to the ligation product. This may be followed by a stringent wash step. Subsequently, adjacent Q-Zip portions containing Q-dots are ligated in the last step. The detection results in FIG. 71 show an approximately three-fold amplification of gene 1 in the tumor sample (indicated by a ratio of ligated Q-Zip portions containing Q-dots (Q8,Q6,Q5,Q7)/(Q3,Q2,Q5,Q7) at address Zp1 of about three).

[0376] In carrying out the ligase detection reaction, ligase detection reaction, detection probe hybridization, and detection scheme of the present invention, relative amounts of one or more of a plurality of target nucleic acid molecules in the test sample, differing by one or more single-base changes, insertions, deletions, or translocations, may be quantified by comparison with a reference sample having reference target nucleic acid molecules.

[0377] This involves providing one or more reference oligonucleotide probe sets, which differ from the primary oligonucleotide probe sets, where each of the reference oligonucleotide probe sets are characterized by (a) a first oligonucleotide probe having a reference target-specific portion and a 5′ upstream portion containing one or more translational oligonucleotide probes or their complements and (b) a second oligonucleotide probe having a reference target-specific portion. The oligonucleotide probes in a particular reference oligonucleotide probe set are suitable for ligation together when hybridized to one another on a corresponding reference target nucleic acid molecule, but have a mismatch which interferes with this ligation when hybridized to any other nucleic acid molecule present in the reference sample. The reference sample, the one or more reference oligonucleotide probe sets, and the ligase are blended to form a reference ligase detection reaction mixture. The reference ligase detection reaction mixture is then subjected to one or more ligase detection reaction cycles comprising a denaturation treatment and a hybridization treatment. In the denaturation treatment, any hybridized oligonucleotides are separated from reference target nucleic acid molecules. During the hybridization treatment, the reference oligonucleotide probe sets hybridize in a base-specific manner to their respective reference sample target nucleic acid molecule, if present in the sample, and ligate to one another to form a reference ligation product sequence containing (a) the reference sample-specific portions and (b) the 5′ upstream portion containing one or more translation oligonucleotide probes or their complements. The reference ligation product for each reference oligonucleotide probe set is distinguishable from other nucleic acid molecules in the reference ligase detection reaction mixture. The reference oligonucleotide probe sets may hybridize to nucleic acid molecules in the reference sample other than their respective reference target nucleic acid molecules but do not ligate together due to the presence of one or more mismatches and individually separate during the denaturation treatment.

[0378] The primary and reference ligase detection reaction mixtures are blended after subjecting them to one or more ligase detection reaction cycles and before blending the primary ligation products, the plurality of secondary oligonucleotide probe sets, and the ligase, subjecting the secondary ligase detection reaction mixture to one or more ligase detection reaction cycles, contacting the secondary ligation products and the detection oligonucleotide probes, and detecting.

[0379] The relative amounts of the reporter labels on the secondary and reference ligation products are compared, to provide a quantitative measure of the relative level of the one or more target nucleic acid molecules in the test sample compared with the reference sample as a result of each different labeled ligation product having a unique encryption code.

Whole Genome Amplification Scheme

[0380] Another aspect of the present invention relates to a method of generating a linearly amplified representation of a whole genome. This involves providing genomic DNA molecules and subjecting the genomic DNA molecules to enzymatic digestion with a first restriction endonuclease to produce a degenerate oligonucleotide fragment with a degenerate overhang. A hairpin linker is provided which contains an overhang complementary to the degenerate overhang and a modification complementing the 5′ end of the degenerate oligonucleotide fragment within a second restriction site. The modification blocks restriction endonuclease cleavage on the 5′ side, but not the 3′ side, of the degenerate oligonucleotide fragment. The enzymatic digestion step is carried out in the presence of the hairpin linker, a ligase, and a first restriction endonuclease, under conditions effective to permit cleavage of genomic DNA molecules and ligation of the hairpin linker onto ends of the degenerate oligonucleotide fragments. Unligated linkers are then removed. Also provided are a second restriction endonuclease and a processive DNA polymerase with strand-displacement activity. The enzymatically digested genomic DNA molecules, the second restriction endonuclease, and the polymerase are blended to form a representational genome amplification mixture. The representational genome amplification mixture is incubated under conditions effective to permit the second restriction endonuclease to nick the hairpin DNA on its unmodified strand and the polymerase to extend the degenerate oligonucleotide fragments at their free 3′ ends. As the polymerase extends and displaces the pre-existing strand, it reforms the second restriction site allowing for repeated nicking/polymerase extension and linear amplification of a representation of the whole genome.

[0381] FIGS. 72A-C are flow diagrams showing isothermal representational amplification of genomic DNA. Two approaches for generating single stranded DNA representations of genomic DNA, suitable for subsequent ligation-based detection assays, are shown. Genomic DNA is cleaved with a restriction endonuclease that has an interrupted palindrome recognition sequence which generates a degenerate overhang in the presence of ligase and a hairpinned oligonucleotide containing a complementary overhang. Examples of such restriction enzymes include, without limitation, AlwNI (CAGNNN↓CTG), BglI (GCCNNNN↓NGGC (SEQ ID NO: 38883)), BstAPI (GCANNNN↓NTGC (SEQ ID NO: 38884)), BstXI (CCANNNNN↓NTGG (SEQ ID NO: 38885)), DrdI (GACNNNN↓NNGTC (SEQ ID NO: 38886)), PflMI (CCANNNN↓NTGG (SEQ ID NO: 38887)), and SfiI (GGCCNNNN↓NGGCC (SEQ ID NO: 38888)). The reaction is driven to completion, because genomic DNA that religates also reforms the recognition sequence and is recleaved. However, the site is not regenerated when a genomic end ligates to the linker. Since degenerate ends are non-palindromic, the linker does not form dimers. The oligonucleotide shown in FIG. 72A also contains an infrequent restriction site, such as SfiI (GGCCNNNN↓NGGCC (SEQ ID NO: 38888)) or BssHI (G↓CGCGC), whose cleavage is blocked by thiophosphate. Incubation with polymerase and the second endonuclease results in linear amplification of large single-stranded DNA (avg. 10 kb to 15 kb) adjacent to the linker, and representing from 5% to 10% of the genome. Use of different overhang linkers should allow amplification of representations totaling 75% to 85% of the genome.

[0382] The oligonucleotide linker shown in FIG. 72B contains a frequent restriction site whose cleavage is blocked by thiophosphate. Linear isothermal amplification yields thousands of single stranded DNA fragments representing from 0.1% to 1% of the genome.

[0383] As shown in FIG. 72C, genomic DNA is incubated in the presence of DrdI (GACNNNN↓NNGTC (SEQ ID NO: 38886)), T4 ligase, and a hairpinned oligonucleotide linker. The linker is complementary to the chosen 2 base 3′ DrdI overhang (CA), and contains a TaqI site whose cleavage is blocked by thiophosphate. The linker may contain a capture group (such as biotin within the hairpin). Ligation products may be captured on streptavidin-magnetic beads and washed extensively to remove other genomic DNA. Representation of genomic DNA may be isothermally amplified using dNTPs, TaqI (T→CGA) and Bst polymerase. Endonuclease nicks, shown in FIG. 72C, extend the primer allowing for repeated extension hundreds to thousands of times. The resultant single-stranded DNA products are substrates for subsequent ligation-based detection assays as described previously.

Designing a Plurality of Detection Oligonucleotide Probes

[0384] Another aspect of the present invention relates to a method of designing a plurality of labeled detection oligonucleotide probes for use in combinations of one to four or more probes to identify or quantify complementary sequences which will hybridize with little mismatch. The plurality labeled oligonucleotide probes have melting temperatures within a narrow range. This method involves providing a first set of a plurality of tetramers of four nucleotides linked together, where (1) each tetramer within the set differs from all other tetramers in the set by at least two nucleotide bases, (2) no two tetramers within a set are complementary to one another, (3) no tetramers within a set are palindromic or dinucleotide repeats, and (4) no tetramer within a set has less than one or more than three G and C nucleotides. Groups of 2 to 4 tetramers from the first set are linked together to form a collection of multimer units. All multimer units formed from the same tetramer and all multimer units having a melting temperature in ° C. of less than 6 times the number of tetramers forming a multimer unit removed from the collection of multimer units, to form a modified collection of multimer units. A second collection of multimer units are selected from the modified collection of multimer units so that no consecutive tetramer pair is used twice. 1 or 2 tetramers are added to either or both ends of the second collection of multimers to generate a new set of modified multimer units with higher melting temperatures, so that no consecutive tetramer pair is used twice. The new set of modified multimer units are arranged in a list in order of melting temperature. Units having a melting temperature in ° C. of less than 12 times the number of tetramers and more than 18 times the number of tetramers are removed from the set of modified multimer units to form a further collection of multimer units. Reporter labels are linked to the further collection of multimer units, to form labeled detection oligonucleotide probes.

[0385] The present invention also relates to a collection of labeled detection oligonucleotide probes. These probes include a collection of detection oligonucleotide probes to which complementary oligonucleotide probes will hybridize, within a narrow temperature range of greater than 24° C. with little mismatch. The oligonucleotide probes are formed from sets of tetramers where (1) each tetramer within the set differs from all other tetramers in the set by at least two nucleotide bases, (2) no two tetramers within a set are complementary to one another, (3) no tetramers within a set are palindromic or dinucleotide repeats, and (4) no tetramer within a set has less than one or more than three G and C nucleotides. The collection of oligonucleotide probes has oligonucleotides having a melting temperature in ° C. less than 12 times the number of tetramers and more than 18 times the number of tetramers. This aspect of the present invention also includes reporter labels linked to each of the oligonucleotide probes in the collection.

Designing a Plurality of Translational Oligonucleotides for Attachment to Target-Specific Oligonucleotide Probes

[0386] The present invention also relates to a method of designing a plurality of translational oligonucleotides for attachment to target-specific oligonucleotide probes to identify or quantify complementary sequences which will hybridize with little mismatch, where the plural translating oligonucleotide sequences have melting temperatures within a narrow range. This involves providing a first set of a plurality of tetramers of four nucleotides linked together, where (1) each tetramer within the set differs from all other tetramers in the set by at least two nucleotide bases, (2) no two tetramers within a set are complementary to one another, (3) no tetramers within a set are palindromic or dinucleotide repeats, and (4) no tetramer within a set has less than one or more than three G and C nucleotides. Groups of 2 to 4 tetramers from the first set are linked together to form a collection of multimer units. All multimer units formed from the same tetramer and all multimer units having a melting temperature in ° C. of less than 3 times the number of tetramers forming a multimer unit are removed from the collection of multimer units to form a modified collection of multimer units. The modified collection of multimer units are arranged in a list in order of melting temperature. The order of the modified collection of multimer units is randomized in 0.1° C. increments of melting temperature. Alternating multimer units in the list are divided into first and second subcollections, each arranged in order of melting temperature. The order of the second subcollection is inverted. In order, the first subcollection of multimer units is linked to the inverted second subcollection of multimer units in order to form a collection of double multimer units. The collection of double multimer units is arranged in a list in order of melting temperature. Those units having a melting temperature in ° C. of less than 12 times the number of tetramers and more than 18 times the number of tetramers are removed from the ordered collection of double multimer units to form a modified collection of multimer units. The double multimer units are linked to a target-specific oligonucleotide probe.

[0387] The present invention also relates to a collection of fusion oligonucleotide probes. These probes includes a collection of translational oligonucleotide probes to which complementary oligonucleotide probes will hybridize, within a narrow temperature range of greater than 24° C. with little mismatch. The oligonucleotide probes are formed from sets of tetramers where (1) each tetramer within the set differs from all other tetramers in the set by at least two nucleotide bases, (2) no two tetramers within a set are complementary to one another, and (3) no tetramers within a set are palindromic or dinucleotide repeats, and (4) no tetramer within a set has less than one or more than three G and C nucleotides. The collection of oligonucleotide probes has oligonucleotides having a melting temperature in ° C. less than 12 times the number of tetramers and more than 18 times the number of tetramers. Target-specific oligonucleotide probes linked to each of the oligonucleotide probes in the collection.

Mini-Cycling

[0388] When a LDR is performed on two different targets, the percent yield from each will depend upon the abilities of the different probes to ligate at each target region. For example, if probes at Gene 1 ligate with an efficiency of 40%, and at Gene 2 with an efficiency of 80%, analysis of the results would falsely indicate that Gene 2 copy number is twice that of target 1. Differences in ligation efficiency have been adjusted for by always comparing results from the tumor sample with the normal control. In the example above, if the product yield for Control Gene 1=400, Cancer Gene 2=800 in the tumor, and Control Gene 1=300, Cancer Gene 2=600 in the normal sample, the ratio of ratios=800/600:400/300=1.33:1.33=1:1, indicating no amplification of Cancer Gene 2 in the tumor. If product yield for Control Gene 1=400, Cancer Gene 2=800 in the tumor, and Control Gene 1=300, Cancer Gene 2=200 in the normal sample, the ratio of ratios=800/200: 400/300=4:1.33=3:1, or three-fold amplification of Cancer Gene 2 in the tumor.

[0389] However, there are situations where a direct comparison of copy number from different gene targets would be preferred. This may be achieved by driving the ligation on a target to completion.

[0390] The basic format of an LDR is to denature the DNA, allow annealing of probes, ligation, and repeating several times, giving linear amplification. With mini-cycling, once ligation has occurred, the temperature is increased to dissociate unligated probes, but the temperature is not increased sufficiently to cause the ligation product to dissociate. The temperature is then allowed to fall so that annealing and ligation are repeated, thus increasing the amount of ligation product that is annealed to the target region. For example, ligation may be performed at 65° C. using probes with Tₘ values of 65° C., and then the temperature may be raised to 75° C. to dissociate unligated probes, but not ligation product. In these examples, the mini-cycling is repeated up to 10 times. Four different situations are considered below:

[0391] a) Equalizing Ligation Yields on Two Different Targets:
P₍ᵢ₎=x(100−P₍ᵢ₋₁₎)+P₍ᵢ₋₁₎
Where P₍ᵢ₎=the product yield for a given target after i mini-cycles and x=the efficiency of ligation.

[0392] FIG. 73 considers a situation where probes ligate at target 1 with an efficiency of 40%. This leaves 60% of the target available for ligation in the next round of mini-cycling. Again, probes ligate at the remaining 60% of this target with an efficiency of 40%, so in this round, a further 24% of the target is covered. This leaves 36% of the target available for ligation in the next mini-cycle, etc. In this way, 99% of the target region has ligation product molecules annealed after 10 rounds of mini-cycling. For target 2, probes ligate with an efficiency of 80%, so after the initial annealing and ligation, there is twice as much ligation product from this target compared to target 1. After 10 mini-cycles, 100% of the target region has ligation product molecules attached. Thus, 10 rounds of mini-cycling has virtually eliminated any bias in the ratio of products from the two targets.

[0393] In FIG. 74, a situation is considered where the efficiency of probe ligation at target 1 is one third that of target 2. Following 10 rounds of mini-cycling, 97% of target I has ligation product molecules annealed, compared to 100% of target 2, so it is evident that the initial 1:3 ratio of product yields has again been virtually eliminated.
(b) Equalizing Ligation Yields of Two Different SNPs on the Same Target:

$${P}_{( i )} = \frac{x}{2} ( 100 - {P}_{( i - 1 )} ) + {P}_{( i - 1 )}$$

Where P₍ᵢ₎=the product yield for a given target after i mini-cycles and x=the efficiency of ligation.

[0394] In the case of single nucleotide polymorphisms (SNPs), probes designed to distinguish between wild-type and mutant alleles will differ only at a single position. Therefore, both probes will anneal at a particular target, but only the perfectly matched probe at the junction will allow ligation to occur. In FIG. 75, the two discriminating probes compete for ligation at each target. Therefore, the efficiency with which ligation will occur is halved at each probe. In this example, the efficiency for probe 1 is 40%, and for probe 2 80%, but since they compete for the same target, the yields are 20% and 40%, respectively. After the initial ligation, it can be seen that the percent yield from probe 2 is twice that from probe 1. However, following ten rounds of mini-cycling, the percent yield from probe 1 is 89%, and from probe 2 99%, and thus one ligation yield is within 90% of the other.

[0395] In FIG. 76, target regions with ligation efficiencies of 30% and 90% are examined, but again, for each SNP there are two competing probes, reducing the effective efficiency of ligation to 15% and 45% respectively. Following the first ligation, the percent yield from target 1 is thus one third that of target 1. After 10 rounds of mini-cycling, however, this bias is reduced to 80%.
(c) Equalizing Ligation Yields on Two Different Targets, with 5% Product Dissociation:

$${P}_{( i )} = x ( 100 - 0.95 {P}_{( i - 1 )} ) + 0.95 {P}_{( i - 1 )} + {\sum }_{1}^{i - 1} 0.05 P$$

Where P₍ᵢ₎=the product yield for a given target after i mini-cycles and x=the efficiency of ligation.

[0396] The mini-cycling temperatures may require some optimization. Under conditions that allow efficient dissociation of unligated probes, a small fraction of ligation products may dissociate from the target regions. It is estimated that less than 5% of the ligation product may dissociate during each round of mini-cycling. In the example, probes ligate at target 1 with an efficiency of 40%, in the first round of mini-cycling. Although 40% of the available target will be represented in the ligation product, 5% of this product will dissociate from the target, and so more target will become exposed for annealing of probes in the next round of mini-cycling. Since a proportion of the target region becomes available for probe annealing again due to product dissociation, the percent yield from each target region can exceed 100%. In FIG. 77, from a starting efficiency of 40%, after 10 rounds of mini-cycling, the percent yield from target 1 is 128%, and from target 2, with a probe binding efficiency of 80%, the yield is 142%. The ratio of target 1 to target 2 has improved from 50% to 90%.

[0397] In FIG. 78, from a starting efficiency of 30%, after 10 rounds of mini-cycling, the percent yield from target 1 is 120% and from target 2, with a ligation efficiency of 90%, the percent yield is 144%, so the ratio has improved from 33% to 83%.
(d) Equalizing Ligation Yields of Two Different SNPs on the Same Target, with 5% Product Dissociation:

$${P}_{( i )} = \frac{x}{2} ( 100 - 0.95 {P}_{( i - 1 )} ) + 0.95 {P}_{( i - 1 )} + {\sum }_{1}^{i - 1} 0.05 P$$

Where P₍ᵢ₎=the product yield for a given target after i mini-cycles and x=the efficiency of ligation.

[0398] In FIGS. 79-80, a situation where there are two competing probes for each target region, combined with 5% dissociation of ligation product is examined. In FIG. 79, the efficiency of probes ligation at target 1 and 2 are 40% and 80%, respectively, but because of competition between probes, the overall respective efficiencies are 20% and 40%. Following ten rounds of mini-cycling, the percent yield from target 1 is 103% and from target 2 128%, so the ratio of percent yields has risen from 50% to 81% with mini-cycling.

[0399] In FIG. 80, the efficiency of ligation to targets 1 and 2 are 30% and 90%, respectively, but, as seen above, the overall efficiencies of probe binding are 15% and 45%, respectively, due to competition between probes. Following ten rounds of mini-cycling, the percent yield from target 1 is 90%, and from target 2 is 131%. Thus, the ratio of percent yields has increased from 33% in the first round to 68% after ten rounds of mini-cycling.

[0400] In summary, minicycling ligation reactions contain internal cycles comprising of a hybridization treatment, wherein the oligonucleotide probe sets hybridize at adjacent positions in a base-specific manner to their respective target nucleotide sequences, if present in the sample, and ligate to one another to form a ligation product, and a probe denaturation treatment, where the reaction is heated to above the melting temperature of each probe-specific portion so unligated probes separate from the target, but below the melting temperature of each product-specific portion such that ligation products accumulate on the target with each successive internal cycle (i.e. minicycle), to provide a more quantitative measure of the relative level of two or more target nucleotide sequences in the sample.

### EXAMPLES

### Example 1

### Reagents, Equipment, and Oligodeoxynucleotides

[0401] All routine chemical reagents were purchased from Sigma Chemicals (St. Louis, Mo.) or Fisher Scientific (Fair Lawn, N.J.). Microcon YM-50 spin columns were purchased from Millipore Corporation (Bedford, Mass.). Thin-walled 250 μl PCR-tubes were purchased from the Applied Biosystems Division of Perkin-Elmer corporation (Foster City, Calif.).

[0402] Streptavidin-coated Proactive magnetic microspheres, with a mean diameter of 860 nm and binding capacity of 686 pmol biotin-FITC/mg., were purchased from Bangs Laboratories, Inc. (Fishers, Ind.). Streptavidin-coated quantum dots, with an emission maximum of 608-611 nm and carrying 3 to 7 streptavidin molecules per Q-dot, were purchased from Quantum Dot Corporation (Hayward, Calif.).

[0403] Hybridizations and incubations were performed in a LabLine 307 Hybridization Incubator (Melrose Park, Ill.). Magnetic capture of microspheres was done using a nickel-alloy magnet supplied by Clemente Associates, Inc. (Madison, Conn.). Fluorescence was detected using a GSI Lumonics ScanArray 5000 (Billerica, Mass.) and was quantified by the Packard Biochip Technologies' ScanArray Microarray Acquisition Software (Billerica, Mass.). The absorbance and emission maxima for various fluorescent and near infrared dyes is listed in Table 1, below.

TABLE 1
Absorbance and emission maxima for the various
fluorescent and near infrared dyes

| Dye | Abs. Max(nm) | Em. Max (nm) |
|---|---|---|
| Marina Blue | 365 | 460 |
| Fluorescein | 495 | 520 |
| TET | 521 | 536 |
| TAMRA | 565 | 580 |
| Rhodamine | 575 | 590 |
| ROX | 585 | 610 |
| Texas Red | 600 | 615 |
| Cy2 | 489 | 506 |
| Cy3 | 550 | 570 |
| Cy3.5 | 581 | 596 |
| Cy5 | 649 | 670 |
| Cy5.5 | 675 | 694 |
| Cy7 | 743 | 767 |
| Spectrum Aqua | 433 | 480 |
| Spectrum Green | 509 | 538 |
| Spectrum Orange | 559 | 588 |
| BODIPY FL | 505 | 515 |
| BODIPY R6G | 530 | 550 |
| BODIPY TMR | 545 | 575 |
| BODIPY 564/6570 | 565 | 575 |
| BODIPY 581/591 | 580 | 600 |
| BODIPY TR | 595 | 625 |
| BODIPY 630/650 | 640 | 650 |
| ABI, 5-FAM | 494 | 522 |
| ABI, JOE | 520 | 548 |
| ABI, TAMRA | 560 | 582 |
| ABI, ROX | 588 | 608 |
| YO-PRO ™ -3 | 612 | 631 |
| YOYO ™ -3 | 612 | 631 |
| R-phycocyanin | 618 | 642 |
| C-Phycocyanin | 620 | 648 |
| RiboGreen ™ | 500 | 525 |
| Rhodamine Green | 502 | 527 |
| Rhodamine 123 | 507 | 529 |
| Magnesium Green ™ | 506 | 531 |
| Calcium Green ™ | 506 | 533 |
| TO-PRO ™ -1 | 514 | 533 |
| TOTO ® -1 | 514 | 533 |
| YO-PRO ™ -1 | 491 | 509 |
| YOYO ™ -1 | 491 | 509 |
| Alexa ™ 488 | 490 | 520 |
| Alexa ™ 546 | 555 | 570 |
| Alexa ™ 594 | 590 | 615 |
| Texas Red ® | 595 | 615 |
| Nile Red | 549 | 628 |
| Magnesium Orange ™ | 550 | 575 |
| Phycoerythrin, R & B | 565 | 575 |
| Rhodamine Phalloidin | 550 | 575 |
| Calcium Orange ™ | 549 | 576 |
| Pyronin Y | 555 | 580 |
| Rhodamine B | 555 | 580 |
| DiD DilC(5) | 644 | 665 |
| Thiadicarbocyanine | 651 | 671 |
| FAR-Green One (SE) | 800 | 820 |
| FAR-Green Two (SE) | 772 | 788 |
| DY-750 | 747 | 776 |
| DY-782 | 782 | 800 |
| Alexa Fluor 750 | 749 | 775 |

[0404] Oligonucleotides (Table 2) were purchased from Integrated DNA Technologies, Inc. (Coralville, Iowa) or were synthesised on an Expedite Multiple Oligo Synthesis System (PerSeptive Biosystems, Framingham, Mass., a part of the Applied Biosystems family of companies) using reagents supplied by Applied Biosystems.

TABLE 2
Oligonucleotides

| | |
|---|---|
| Oligonucleotide name | Oligonucleotide sequence |

| | | |
|---|---|---|
| BcQz122 | 5′Biotin TEG-Spacer18- | |
| | TTGAAATCCAGCGCAAAATCTGCGAAGCCGTGCGCAACGACGCA | (SEQ ID NO: 38889) |
| | TTGCGGCTTTCGCGCATTGCGGCTTTCG 3′ | |
| Q-Zip1 | 5′ Biotin TEG-Biotin TEG-Spacer 18- | |
| | TCGTTGCGCACGGC(UOMe)(UOMe) 3′ | (SEQ ID NO: 38890) |
| Q-Zip2 | 5′ Biotin TEG-Biotin TEG-Spacer18- | |
| | CGAAAGCCGCAATG(COMe)(GOMe) 3′ | (SEQ ID NO: 38891) |
| Q-Zip4 | 5′ Biotin TEG-Biotin TEG-Spacer18- | |
| | TGCGCTTGCAGCCG(UOMe)(UOMe) 3′ | (SEQ ID NO: 38892) |
| Cy3Qz1 | 5′ Cy3-TCGTTGCGCACGGCTT 3′ | (SEQ ID NO: 38893) |
| Cy3p16Ex1 | 5′ Cy3-ATTGGTTTTTGATTGTAATTATTTGGTGC 3′ | (SEQ ID NO: 38894) |
| Zip1 | 5′ TTGAAATCCAGCGCAAAATCTGCGAAGCC-Spacer18- | (SEQ ID NO: 38895) |
| | Biotin TEG 3′ | |
| cZ1cQ1cQ2 | 5′ CGCAGATTTTGCGCTGGATTTCAATGTGGTAGTTGGAGCT | (SEQ ID NO: 38896) |
| | GGTG AAGCCGTGCGCAACGACGCATTGCGGCTTTCG 3′ | |

### Example 2

### Selection of a Set of 16 Q-Zip Sequences of 16 Bases Each with High Tₘ Values that are within a Close Range of Each Other (65° C. to 68° C.)

[0405] Each Q-zip-code sequence is composed of four tetramers (designed as described in the following) so that the full length 16-mers have similar Tₘ values. The 256 (44) possible combinations in which four bases can be arranged as tetramers were reduced to a set of 36; these were chosen so that each tetramer differs from all others by at least two bases (See Table 3). Tetramer complements, as well as tetramers that would result in self-pairing or hairpin formation of the zip codes, were eliminated. Additionally, tetramers that were palindromic, e.g., TCGA, or repetitive, e.g., CACA, were excluded. The indicated set of thirty-six tetramers represents just one of the possible sets that can be created. In the following description, a tetramer is referred to by its designation in the first column of Table 3. For example, #29=TGCG.

TABLE 3
Original Tetramers used to construct Universal
Arrays, Universal Beads, and Q-zips

| | Original | Tetramer | Tetramer | |
|---|---|---|---|---|
| New tetramer | tetramer | sequence | complement | G + C |
| designation | designation | 5′-3′ | 5′-3′ | bases |
| 1 | 6 | TTGA | TCAA | 1 |
| 2 | 7 | TGAT | ATCA | 1 |
| 3 | 8 | TTAG | CTAA | 1 |
| 4 | 26 | AATC | GATT | 1 |
| 5 | 31 | ATAC | GTAT | 1 |
| 6 | 32 | AAAG | CTTT | 1 |
| 7 | 36 | TACA | TGTA | 1 |
| 8 | 1 | TCTG | CAGA | 2 |
| 9 | 2 | TGTC | GACA | 2 |
| 10 | 5 | TCGT | ACGA | 2 |
| 11 | 9 | CTTG | CAAG | 2 |
| 12 | 10 | CGTT | AACG | 2 |
| 13 | 11 | CTCA | TGAG | 2 |
| 14 | 13 | CTGT | ACAG | 2 |
| 15 | 15 | CCAT | ATGG | 2 |
| 16 | 16 | CGAA | TTCG | 2 |
| 17 | 17 | GCTT | AAGC | 2 |
| 18 | 18 | GGTA | TACC | 2 |
| 19 | 19 | GTCT | AGAC | 2 |
| 20 | 21 | GAGT | ACTC | 2 |
| 21 | 23 | GCAA | TTGC | 2 |
| 22 | 25 | AGTG | CACT | 2 |
| 23 | 27 | ACCT | AGGT | 2 |
| 24 | 28 | ATCG | CGAT | 2 |
| 25 | 30 | AGGA | TCCT | 2 |
| 26 | 33 | CCTA | TAGG | 2 |
| 27 | 34 | GATG | CATC | 2 |
| 28 | 3 | TCCC | GGGA | 3 |
| 29 | 4 | TGCG | CGCA | 3 |
| 30 | 12 | CACG | CGTG | 3 |
| 31 | 14 | CAGC | GCTG | 3 |
| 32 | 20 | GACC | GGTC | 3 |
| 33 | 22 | GTGC | GCAC | 3 |
| 34 | 24 | GGAC | GTCC | 3 |
| 35 | 29 | ACGG | CCGT | 3 |
| 36 | 35 | AGCC | GGCT | 3 |

This procedure involved the following steps:

[0406] 1. Create two columns, 1-46656 all variations of 36×36×36 tetramers.

[0407] 2. Compute Tₘ values of 46656 12-mers in Oligo 6.4 and sort according to T_{m.}

[0408] 3. Remove trimer-tetramers (designated herein as “trimers” i.e. 3 tetramers together yielding a 12mer) that contain 1 GC base in each tetramer or contain 3 GC bases in each tetramer.

[0409] 4. Select trimers (i.e. 12mers) with Tm values between 48 and 50.5. There are 410 “trimer-tetramers” in this list.

[0410] 5. Since #29 appears in many of the “410 list,” the following procedure is suggested to save #29 for trimers where it is really needed. Remove all trimers with #29 in them.

[0411] 6. Start selecting some trimers from the remaining list. These are placed onto short list (Short List 1 Tm 48-50.5). For each trimer selected, remove the pair from the No #29 trimers list. For example, if a trimer uses tetramers #28, #34, and #17 in that order, then other trimers containing #28 followed by #34, or #34 followed by #17 should be removed from the list.

[0412] 7. Create pairs used list to avoid using the same pair of tetramers twice. (Pairs used from Tm 48-50.5).

[0413] 8. When a tetramer has been used twice in a given column, it should be “retired” and preferably not used again.

[0414] 9. Now go back to “410 list” and use trimers with 29. Short list now stands at 12 trimers=28 pairs used.

[0415] 10. Remove pairs from 410 list.

[0416] 11. Select four more trimers. Put onto short list (Short List 1 Tm 48-50.5). For each trimer selected, remove the pair from the 410 trimers list. The tetramer 29 was used three times in the last position.

[0417] 12. With a total of 16 probes of length 12, with calculated Tₘ values of 48-49.2, go to 37787 trimers and look up trimers with the first two tetramers the same as the last two tetramers of the Short list primers. Arrange these in order of ascending Tₘ value, and write down the last several tetramers for that position with the caveat that (i) it cannot be the same as one of the existing tetramers in the short list probes, and (ii) it cannot yield a pair which has already been used.

[0418] 13. Manually choose the last tetramer and add to the short list. (Short List 3+1 Tm 48-50.5).

[0419] 14. Add newly formed pair to “Pairs used from Tm 48-50.5” list, and verify that no pair has been used twice.

[0420] 15. Copy sequences into Oligo 6.4. Determine Tₘ of each 16 mer. Range from 64.1 to 68. (Results Short list 3+1.1 Tm)

[0421] 16. Take 4 lowest sequences and 3 highest sequences and rearrange last tetramers to try to increase lower Tm values, and decrease higher ones. (Short List 3+1.2 W Tm 64.1-68).

[0422] 17. Copy sequences into Oligo 6.4. Determine Tm of each 16 mer. Range from 64.1 to 68. (Results Short list 3+1.2 W Tm).

[0423] 18. All sequences moved toward the means except one increased slightly. Adjust manually again.

[0424] 19. Take final sequence into a new document (Short List 3+1.2 Tm 65.5-67.4), and verify Tms with Oligo 6.4 (Results Short list 3+1.2 Tm), verify pairs (Pairs used from Tm 65.5-67.4).

[0425] 20. For some applications, Q-Zips and zip-codes will be used together. Therefore, it would be preferable that the two do not have any identical sequences of 16 contiguous bases. Go to master list of 4633 universal zip codes and check to see if Q-Zip tetramers (i.e. 16mers) are used in hexamer (i.e. 24mer) sequences. One sequence was found with a match=Zip code #1459=tetramer #2, #27, #33, #17, #29, #12 with QZ12=#33, #17, #29, #12=GTGCGCTTTGCGCGTT (SEQ ID NO: 38883).

[0426] 21. Change QZ12 into #33, #17, #29, #31=GTGCGCTTTGCGCAGC (SEQ ID NO: 38884). Incorporate change into other documents.

[0427] 22. Analyze Q-zipcode sequences for hairpin structures. QZ6=TGCGCTTGCAGCGCTT (SEQ ID NO: 38885) has a 5 bp hairpin. Also, QZ12=GTGCGCTTTGCGCAGC (SEQ ID NO: 38886) has a 5 bp hairpin.

[0428] 23. Fix QZ6=TGCGCTTGCAGCCGTT (SEQ ID NO: 6) reduce hairpin to 3. Fix QZ12=GTGCGCTTTGCGACGG (SEQ ID NO:12), reduce hairpin to 3.

[0429] 24. Go back to master list of 4633 zip codes and check to see if replacement Q-Zip tetramers (i.e. 16mer) are used in universal zip-code hexamer (i.e. 24mer) sequences. Now, none are used. Incorporate change into other documents.

[0430] 25. Final list of Q-zip-code sequences and complements are provided in Table 4.

TABLE 4
Q-dot zip-code sequences and their components.

| | | | | | |
|---|---|---|---|---|---|
| | | | | Tetramer | |
| Q-dot Zip | Tri-# | Tm | Sequence (5′-3′) | Designations | Complement (5′-3′) |

| | | | | | | | | |
|---|---|---|---|---|---|---|---|---|
| QdotZ1 | 12702 | 66.6 | TCGTTGCGCACGGCTT | 10 | 29 | 30 | 17 | AAGCCGTGCGCAACGA |
| | | | (SEQ ID NO:1) | | | | | (SEQ ID NO:17) |
| QdotZ2 | 20721 | 66.9 | CGAAAGCCGCAATGCG | 16 | 36 | 21 | 29 | CGCATTGCGGCTTTCG |
| | | | (SEQ ID NO:2) | | | | | (SEQ ID NO:18) |
| QdotZ3 | 36197 | 66.2 | TCCCGGACGCTTGCAA | 28 | 34 | 17 | 21 | TTGCAAGCGTCCGGGA |
| | | | (SEQ ID NO:3) | | | | | (SEQ ID NO:19) |
| QdotZ4 | 36679 | 66.8 | TGCGCTTGCAGCCGTT | 29 | 11 | 31 | 12 | AACGGCTGCAAGCGCA |
| | | | (SEQ ID NO:4) | | | | | (SEQ ID NO:20) |
| QdotZ5 | 38757 | 66.4 | CACGGTGCGCAAAGCC | 30 | 33 | 21 | 36 | GGCTTTGCGCACCGTG |
| | | | (SEQ ID NO:5) | | | | | (SEQ ID NO:21) |
| QdotZ6 | 40061 | 66.9 | CAGCGTGCTGCGCCAT | 31 | 33 | 29 | 15 | ATGGCGCAGCACGCTG |
| | | | (SEQ ID NO:6) | | | | | (SEQ ID NO:22) |
| QdotZ7 | 44488 | 67 | ACGGCGTTTCCCCGAA | 35 | 12 | 28 | 16 | TTCGGGGAAACGCCGT |
| | | | (SEQ ID NO:7) | | | | | (SEQ ID NO:23) |
| QdotZ8 | 46456 | 66.7 | AGCCCAGCCGAAACGG | 36 | 31 | 16 | 35 | CCGTTTCGGCTGGGCT |
| | | | (SEQ ID NO:8) | | | | | (SEQ ID NO:24) |
| QdotZ9 | 37032 | 66.7 | TGCGGCAAATCGCGTT | 29 | 21 | 24 | 12 | AACGCGATTTGCCGCA |
| | | | (SEQ ID NO:9) | | | | | (SEQ ID NO:25) |
| QdotZ10 | 39635 | 67.4 | CAGCGCAAACGGCGAA | 31 | 21 | 35 | 16 | TTCGCCGTTTGCGCTG |
| | | | (SEQ ID NO:10) | | | | | (SEQ ID NO:26) |
| QdotZ11 | 42077 | 66.6 | GTGCGCTTTGCGACGG | 33 | 17 | 29 | 35 | CCGTCGCAAAGCGCAC |
| | | | (SEQ ID NO:11) | | | | | (SEQ ID NO:27) |
| QdotZ12 | 45213 | 67 | ACGGGACCGTGCAGCC | 35 | 32 | 33 | 36 | GGCTGCACGGTCCCGT |
| | | | (SEQ ID NO:12) | | | | | (SEQ ID NO:28) |
| QdotZ13 | 15280 | 65.5 | CGTTTGCGCGAATCCC | 12 | 29 | 16 | 28 | GGGATTCGCGCAAACG |
| | | | (SEQ ID NO:13) | | | | | (SEQ ID NO:29) |
| QdotZ14 | 36051 | 66.7 | TCCCCACGCCATGCAA | 28 | 30 | 15 | 21 | TTGCATGGCGTGGGGA |
| | | | (SEQ ID NO:14) | | | | | (SEQ ID NO:30) |
| QdotZ15 | 38693 | 67.4 | CACGCAGCTGCGGTGC | 30 | 31 | 29 | 33 | GCACCGCAGCTGCGTG |
| | | | (SEQ ID NO:15) | | | | | (SEQ ID NO:31) |
| QdotZ16 | 45964 | 66.9 | AGCCGCTTTCCCGTGC | 36 | 17 | 28 | 33 | GCACGGGAAAGCGGCT |
| | | | (SEQ ID NO:16) | | | | | (SEQ ID NO:32) |

[0431] 26. Suitable Q-dot-zip codes according to the present invention include, without limitation, those shown in FIG. 96. FIG. 96 shows a list of 16 Q-dot-zip codes (SEQ ID NO:1 through SEQ ID NO:16), and their 16 complements (SEQ ID NO:17 through SEQ ID NO:32). The Q-Zips are each 16mer.

[0432] 27. FIG. 81 is a graph showing the Tm values of Q-Zip codes. Q-Zip codes, 16mers with Tm values from 63° C. to 69.5° C., are attached to Q-dots to aid in encrypting signal. See FIG. 96.

### Example 3

### Construction of Q-Zip Tails with Three or Four Q-dots Together to Score any LDR Product

[0433] Q-Zip tails can be constructed in the following ways:

[0434] 1. Take list of Q-Zips from “Q-Zip List Trimer Construction” document. Reorder them to have first group of 8 QDot-zips, next 4 QDot-zips (12 total), and last 4 QDot-zips (16 total).

[0435] 2. Determine Complements of New QdotZ1-Z16 (Q-dot zip+Complement Tm65.5-67.4). Final list of Q-zip-code sequences and complements are provided in Table 3.

[0436] 3. For the following descriptions and numbering system, each Q-Zip is now designated by its Q-object number. For example, Q# 2=5′ CGAAAGCCGCAATGCG 3′ (SEQ ID NO: 2) (see Table 3).

[0437] 4. Make a list of all combinations of 12 things taken 3 at a time, with no repeats. To avoid repeats each subsequent column has to have an object number greater than the previous. Total=12×11×10/1×2×3=220.

[0438] 5. Relabel this list and provide numbers 1-220.

[0439] 6. Expand the list to include all combinations of 12 things taken 4 at a time, with no repeats. Total=12×11×10×9/1×2×3×4=495. Provide numbers 1-495.

[0440] 7. Take list of 12 things taken 3 at a time, with no repeats, copy three times, moving the second and the third column to the front for each copy. Recopy that column to obtain all the ways you can have 12 things, 4 at a time, 1st number repeated twice, the other two different. Total=3×12×11×10/1×2×3=3×220=660 Reorder these and number 1-660.

[0441] 8. Add the repeats to the bottom of the unique 4 at a time list=1155 objects.

[0442] 9. Reduce this set to also list unique and repeats for 8-Q-dots=8×7×6×5/1×2×3×4=70; add 3×8×7×6/1×2×3=3×56=168. Total=238.

[0443] 10. Expand the above set to also list unique and repeats for 16-Q-dots=16×15×14×13/1×2×3×4=1820; add 3×16×15×14/1×2×3=3×560=1680. Total=3500.

[0444] 11. The above results suggest a substantial number of Q-zip tails may be available from just three 16mers. The design of tails should start with a limited number of Q-dots, and expand to include an increasingly larger set. Further, the oligos should be randomized within the initial set to provide a balance in QDot-zip usage. Therefore, prepare sets of three 16mers (48mer) starting with 4, 8, 12, and 16 Q-dot-Zips.

[0445] 12. Four (4) things taken 3 at a time, with no repeats. Total=4×3×2/1×2×3=4. Then add 4 things, three at a time with 1st number repeated twice=2×4×3/2×1=12. Total=16.

[0446] 13. Eight (8) things taken 3 at a time, with no repeats. Total=8×7×6/1×2×3=56. Then add 8 things, three at a time with 1st number repeated twice=2×8×7/2×1=56. Total=112. 14. Twelve (12) things taken 3 at a time, with no repeats. Total=12×11×10/1×2×3=220. Then add 12 things, three at a time with 1st number repeated twice=2×12×11/2×1=132. Total=352.

[0447] 15. Sixteen (16) things taken 3 at a time, with no repeats. Total=16×15×14/1×2×3=560. Then add 12 things, three at a time with 1st number repeated twice=2×16×15/2×1=240. Total=800.

[0448] 16. The list of Q-Zip tails needs to be randomized, while still retaining the general order of 4 to 16 Q-dots. In other words, if only 8 Q-dots are available at a given time, then those tails need to be used first. Also, if for some technical reason the repeat of a Q-dot provides technical difficulties (i.e. it turns out that some Q-dots have two primers attached, both of which bind to the consecutive repeat 16mers), the repeat sequences are being randomized separately.

[0449] 17. For making tails with 3Q-dots, start with 3×16mer Tails 4Q-dots UWR.xls” document and randomize both unique and repeat tails separately. Then, place into master document and concatenate Q-dot Zip-complements. Paste back next to tail designation. 4Q Unique=1-4. 4Q Repeat=5-16.

[0450] 18. Suitable complementary Q-tails according to the present invention include, without limitation, those shown in FIG. 97. FIG. 97 shows a list of 16 complementary Q-tails (SEQ ID NO:33 through SEQ ID NO:48). The tails are each 48mer and consist of three concatenated 16mer Q-Zips. The tails were constructed from the four complementary Q-Zips (SEQ ID NO:17 through SEQ ID NO:20) labeled QZ1-QZ4 in FIG. 96. Use of this format of encryption is illustrated in FIGS. 1-3. Take 3×16merTails 4Q-dot FIN.xls document, and concatenate Q-dot zip. Paste back next to tail designation.

[0451] 19. Suitable Q-tails according to the present invention include, without limitation, those shown in FIG. 98. FIG. 98 shows a list of 16 Q-tails (SEQ ID NO:49 through SEQ ID NO:64). The tails are each 48mer and consist of three concatenated 16mer Q-Zips. The tails were constructed from the four Q-Zips (SEQ ID NO:1 through SEQ ID NO:4) labeled QZ1-QZ4 in FIG. 96.

[0452] 20. Use of this format of encryption is illustrated in FIGS. 4-6.

[0453] 21. Continue with “3×16mer Tails 8Q-dots UWR.xls” document, bring 4Q sequences to top and remove, and randomize both unique and repeat tails separately. Then place into master document and concatenate Q-dot zip-complements. Paste back next to tail designation. 8Q Unique=17-68. 8Q Repeat=69-112.

[0454] 22. Suitable complementary Q-Zip tails according to the present invention include, without limitation, those shown in FIG. 99. FIG. 99 shows a list of 112 complementary Q-Zip tails (SEQ ID NO:33 through SEQ ID NO:144). The tails are each 48mer and consist of three concatenated 16mer Q-Zips. The tails were constructed from the eight complementary Q-Zips (SEQ ID NO:17 through SEQ ID NO:24) labeled QZ1-QZ8 in FIG. 96. Use of this format of encryption is illustrated in FIGS. 1-3. Take 3×16merTails 8Q-dot FIN.xls document, and concatenate Q-dot zip. Paste back next to tail designation.

[0455] 23. Suitable Q-Zip tails according to the present invention include, without limitation, those shown in FIG. 100. FIG. 100 shows a list of 112 Q-Zip tails (SEQ ID NO:833 through SEQ ID NO:944). The tails are each 48mer and consist of three concatenated 16mer Q-Zips. The tails were constructed from the eight Q-Zips (SEQ ID NO:1 through SEQ ID NO:8) labeled QZ1-QZ8 in FIG. 96. Use of this format of encryption is illustrated in FIGS. 4-6.

[0456] 24. Continue with “3×16mer Tails 12Q-dots UWR.xls” document, bring 8Q sequences to top and remove, and randomize both unique and repeat tails separately, (3×16mer Tails 12Q-8Q-dRand.xls). Then place into master document and concatenate Q-dot zip-complements. Paste back next to tail designation. 12Q Unique=113-276. 12Q Repeat=277-352.

[0457] 25. Suitable complementary Q-Zip tails according to the present invention include, without limitation, those shown in FIG. 101. FIG. 101 shows a list of 352 complementary Q-Zip tails (SEQ ID NO:33 through SEQ ID NO:384). The tails are each 48mer and consist of three concatenated 16mer Q-Zips. The tails were constructed from the twelve complementary Q-Zips (SEQ ID NO:17 through SEQ ID NO:28) labeled QZ1-QZ12 in FIG. 96. Use of this format of encryption is illustrated in FIGS. 1-3. Take 3×16merTails 8Q-dot FIN.xls document, and concatenate Q-dot zip. Paste back next to tail designation.

[0458] 26. Suitable Q-Zip tails according to the present invention include, without limitation, those shown in FIG. 102. FIG. 102 shows a list of 352 Q-Zip tails (SEQ ID NO:833 through SEQ ID NO:1184). The tails are each 48mer and consist of three concatenated 16mer Q-zips. The tails were constructed from the twelve Q-zips (SEQ ID NO:1 through SEQ ID NO:12) labeled QZ1-QZ12 in FIG. 96. Use of this format of encryption is illustrated in FIGS. 4-6.

[0459] 27. Continue with “3×16mer Tails 16Q-dots UWR.xls” document, bring 12Q sequences to top and remove, and randomize both unique and repeat tails separately. Then place into master document and concatenate Q-dot Zip-complements. Paste back next to tail designation. 16Q Unique=353-692. 16Q Repeat=693-800. Suitable complementary Q-Zip tails according to the present invention include, without limitation, those shown in FIG. 103. FIG. 103 shows a list of 800 complementary Q-Zip tails (SEQ ID NO:33 through SEQ ID NO:832). The tails are each 48mer and consist of three concatenated 16mer Q-Zips. The tails were constructed from the sixteen complementary Q-Zips (SEQ ID NO:17 through SEQ ID NO:32) labeled QZ1-QZ16 in FIG. 96. Use of this format of encryption is illustrated in FIGS. 1-3. Take 3×16merTails 8Q-dot FIN.xls document, and concatenate Q-dot zip. Paste back next to tail designation.

[0460] 28. Suitable Q-Zip tails according to the present invention include, without limitation, those shown in FIG. 104. FIG. 104 shows a list of 800 Q-Zip tails (SEQ ID NO:833 through SEQ ID NO:1632). The tails are each 48mer and consist of three concatenated 16mer Q-Zips. The tails were constructed from the sixteen Q-Zips (SEQ ID NO:1 through SEQ ID NO:16) labeled QZ1-QZ12 in FIG. 96. Use of this format of encryption is illustrated in FIGS. 4-6.

[0461] 29. For making tails with 4Q-dots, start with “4×16mer Tails 8Q-dots UWR.xls” document and randomize both unique and repeat tails separately. Then place into master document and concatenate Q-dot Zip-complements. Paste back next to tail designation. 8Q Unique=1-70. 8Q Repeat=71-238.

[0462] 30. Suitable complementary Q-Zip tails according to the present invention include, without limitation, those shown in FIG. 105. FIG. 105 shows a list of 238 complementary Q-Zip tails (SEQ ID NO:1633 through SEQ ID NO:1870). The tails are each 64mer and consist of four concatenated 16mer Q-Zips. The tails were constructed from the eight complementary Q-Zips (SEQ ID NO:17 through SEQ ID NO:24) labeled QZ1-QZ8 in FIG. 96.

[0463] 31. Continue with “4×16mer Tails 12Q-dots UWR.xls” document and randomize both unique and repeat tails separately. Then place into master document and concatenate Q-dot zip-complements. Paste back next to tail designation. 12Q Unique=239-663. 12Q Repeat=664-1,155.

[0464] 32. Suitable complementary Q-Zip tails according to the present invention include, without limitation, those shown in FIG. 106. FIG. 106 shows a list of 1155 complementary Q-Zip tails (SEQ ID NO:1633 through SEQ ID NO:2787). The tails are each 64mer and consist of four concatenated 16mer Q-Zips. The tails were constructed from the twelve complementary Q-Zips (SEQ ID NO:17 through SEQ ID NO:28) labeled QZ1-QZ12 in FIG. 96.

[0465] 33. Continue with “4×16mer Tails 16Q-dots UWR.xls” document and randomize both unique and repeat tails separately. Then place into master document and concatenate Q-dot Zip-complements. Paste back next to tail designation. 16Q Unique=1,156-2,481. 16Q Repeat=2,482-3,500.

[0466] 34. Suitable complementary Q-Zip tails according to the present invention include, without limitation, those shown in FIG. 107. FIG. 107 shows a list of 3500 complementary Q-Zip tails (SEQ ID NO:1633 through SEQ ID NO:5132). The tails are each 64mer and consist of four concatenated 16mer Q-Zips. The tails were constructed from the sixteen complementary Q-Zips (SEQ ID NO:17 through SEQ ID NO:32) labeled QZ1-QZ16 in FIG. 96.

### Example 4

### Construction of Q-Zip Tails with 2 Q-Dots Together on Each LDR Primer to Score LDR Product

[0467] One concept is to capture genomic DNA onto a support (e.g. magnetic beads), render it single stranded before or after capture, and then perform a single LDR directly on the captured single-stranded DNA target, effectively, capturing the LDR product onto the support. “Mini-cycling” during the LDR reaction (i.e. cycling between 65° C. and 75° C.) may be used to drive the LDR reaction toward completion, so that the LDR product accurately reflects the initial abundance of starting template. Excess LDR probes may be washed away. Each LDR probe would contain a 2×16mer tail, so that the LDR product is suitable for detection of a total of 4 Q-dots. These four Q-dots may be captured as hybridization reactions, chemical ligations, or biological ligation reactions.

[0468] 1. Start with list of Q-dot zip and complements in Table 2 below. Sequences were generated as described in Example 1.

[0469] 2. For making 2 tails with 2Q-dots each, start with “4×16mer Tails 8Q-dRand.xls” and reverse the randomization. The tails need to be re-randomized, but in sets of two to reflect the need to have two different discriminating primers ligating to the same common probe. For each tail, determine if numbers in first two columns (equivalent to common probe) are identical in pairs, label first “1” and second “2”. For odd tails, label “3”. Then sort by this designation. Tag “1” with random number (from 1-10,000), and use same set of random numbers to Tag “2”. Tag “3” with random number from 10,000 to 20,000. Sort by random number. Then place into master document and concatenate 2 tails of Q-dot zip-complements. List discriminating tails first (Columns 3 and 4), then complementary tails (Columns 1 and 2). By flipping the order of the Unique Singlets, they can be made into pairs. Paste back next to tail designation. 8Q Unique Pairs=1-60. 8Q Unique Singlets flipped into pairs=61-70 8Q Repeat Pairs=71-230. 8Q Unique Repeat for controls=231-238.

[0470] 3. Suitable pairs of complementary Q-Zip tails according to the present invention include, without limitation, those shown in FIG. 108. FIG. 108 shows a list of 238 pairs of complementary Q-Zip tails. Each tail (SEQ ID NO:7593 through SEQ ID NO:7830; SEQ ID NO:11093 through SEQ ID NO:11330) is 32mer and consists of two concatenated Q-Zips. The tails were constructed from the eight complementary Q-Zips (SEQ ID NO:17 through SEQ ID NO:24) labeled QZ1-QZ8 in FIG. 96. Use of this format of encryption is illustrated in FIGS. 7-10, and 17-36.

[0471] 4. Continue with “4×16mer Tails 12Q-8Q-dRan.xls” and reverse the randomization. The tails need to be re-randomized, but in sets of 2 to reflect the need to have two different discriminating primers ligating to the same common primer. For each tail, determine if numbers in first two columns (equivalent to common primer) are identical in pairs, label first “1” and second “2”. For odd tails, label “3”. Then sort by this designation. Tag “1” with random number (from 1-10,000), and use same set of random numbers to Tag “2”. Tag “3” with random number from 10,000 to 20,000. Sort by random number. Then place into master document and concatenate 2 tails of Q-dot zip-complements. List discriminating tails first (Columns 3 and 4), then complementary tails (Columns 1 and 2). Paste back next to tail designation. 12Q Unique Pairs=239-646. 12Q Unique Singlets flipped into pairs=647-662. 12Q Unique Singlet=663. 12Q Repeat Pairs=664-1155. 12Q Unique Repeat for controls=none.

[0472] 5. Suitable pairs of complementary Q-Zip tails according to the present invention include, without limitation, those shown in FIG. 109. FIG. 109 shows a list of 1155 pairs of complementary Q-Zip tails. Each tail (SEQ ID NO:7593 through SEQ ID NO:8747; SEQ ID NO:11093 through SEQ ID NO:12247) is 32mer and consists of two concatenated Q-Zips. The tails were constructed from the twelve complementary Q-Zips (SEQ ID NO:17 through SEQ ID NO:28) labeled QZ1-QZ12 in FIG. 96. Use of this format of encryption is illustrated in FIGS. 7-10, and 17-36.

[0473] 6. Continue with “4×16mer Tails 16Q-12Q-dRan.xls” and reverse the randomization. The tails need to be re-randomized, but in sets of 2 to reflect the need to have two different discriminating probes ligating to the same common probe. For each tail, determine if numbers in first two columns (equivalent to common probe) are identical in pairs, label first “1” and second “2”. For odd tails, label “3”. Then sort by this designation. Tag “1” with random number (from 1-10,000), and use same set of random numbers to Tag “2”. Tag “3” with random number from 10,000 to 20,000. Sort by random number. Then place into master document and concatenate 2 tails of Q-dot zip-complements. List discriminating tails first (Columns 3 and 4), then complementary tails (Columns 1 and 2). Paste back next to tail designation. 16Q Unique Pairs=1146-2457. 16Q Unique Singlets flipped into pairs=2458-2479. 16Q Unique singlet=2480 16Q Repeat Pairs=2481-3496.

[0474] 16Q Unique Repeat for controls=3497-3500.

[0475] 7. Suitable pairs of complementary Q-Zip tails according to the present invention include, without limitation, those shown in FIG. 110. FIG. 110 shows a list of 3500 pairs of complementary Q-Zip tails. Each tail (SEQ ID NO:7593 through SEQ ID NO:11092; SEQ ID NO:11093 through SEQ ID NO:14592) is 32mer and consists of two concatenated Q-Zips. The tails were constructed from the sixteen complementary Q-Zips (SEQ ID NO:17 through SEQ ID NO:32) labeled QZ1-QZ16 in FIG. 96.

### Example 5

### Construction of Q-Zip Tails With 2 Q-dots Ligated Together On Each LDR Probe To Score LDR Product

[0476] Q-Zip tails with 2 Q-dots ligated together on each LDR probe are constructed as follows:

[0477] 1. Start with list of Q-dot Zips and complements in Table 3 below. Sequences were generated as described in Example 2.

[0478] 2. One possibility is to ligate the Q-dot Zips together onto the tails. There are a number of different ways this may be accomplished, but the simplest format would have the Q-dots attached to the non-ligating ends of each 16mer sequence. As such, there may be a need to either make two Q-dots versions for each 16mer; one with the attachment on the 3′ end, the other with the attachment on the 5′ end. Alternatively, by reducing the list of tails, so that two will be “even” and two will be “odd” the Q-dot will always hybridize in the correct orientation. In order to make this list, start with “4×16mer Tails 8Q-dRand.xls” and reverse the randomization. Calculate the sum of the four columns and determine if the sum is even (=True) or Odd (=False). Sort, and remove all odd sums. Thus, a given row will have two odd and two even numbers (what we are looking for), or all even, or all odd. Test for all odd numbers in the first column, all even numbers in the second column. Move to bottom, and remove from list. For each tail, determine if numbers in first two columns (equivalent to common probe) are identical in pairs (one odd, the other even), label first “1” and second “2”. For odd tails, label “3”. Then sort by this designation. Tag “1” with random number (from 1-10,000), and use same set of random numbers to Tag “2”. Look at Tag “3”. If it has two even or two odd numbers in the first two columns, mix columns until one even and one odd in first two columns. Then proceed with labeling these “1” and “2”. Leftovers get 3 designation, and try again, (label 11 and 12 until only left with 13's, tag with random number from 10,000 to 20,000. Sort by random number.

[0479] 3. Now one needs to orient the pairs so that odd numbers go in the first row, even in the second, odd in the third, and even in the last row. Then place into master document and concatenate 2 tails of Q-dot zip-complements. List discriminating tails first (Columns 3 and 4), then complementary tails (Columns 1 and 2). Once sequences are concatenated, discriminating tails are listed under “First 2XQ-Zip Lig tail complement”, then common tails are listed under “Second 2XQ-Zip Lig tail complement”. 8Q Unique Pairs=1-34. 8Q Unique Singlets for controls=35-36. 8Q Repeat Pairs=37-84.

[0480] 4. Suitable pairs of complementary Q-Zip tails according to the present invention include, without limitation, those shown in FIG. 111. FIG. 111 shows a list of 84 pairs of complementary Q-Zip tails. Each tail (SEQ ID NO:5133 through SEQ ID NO:5126; SEQ ID NO:6363 through SEQ ID NO:6446) is 32mer and consists of two concatenated Q-Zips. The tails were constructed from the eight complementary Q-Zips (SEQ ID NO:17 through SEQ ID NO:24) labeled QZ1-QZ8 in FIG. 96. Use of this format of encryption is illustrated in FIGS. 8, 10, 18, 20, 22, 24, 26, 28, 30, 32, 34, and 36.

[0481] 5. Continue with the next set, orienting the pairs so that odd numbers go in the first row, even in the second, odd in the third, and even in the last row. Then place into master document and concatenate 2 tails of Q-dot zip-complements. List discriminating tails first (Columns 3 and 4), then complementary tails (Columns 1 and 2). Once sequences are concatenated, discriminating tails are listed under “First 2XQ-Zip Lig tail complement”, then common tails are listed under “Second 2XQ-Zip Lig tail complement”. 12Q Unique Pairs=85-268. 12Q Unique Singlets for controls=268-273. 12Q Repeat Pairs=274-393. 12Q Repeat Singlets for controls=394-403.

[0482] 6. Suitable pairs of complementary Q-Zip tails according to the present invention include, without limitation, those shown in FIG. 112. FIG. 112 shows a list of 403 pairs of complementary Q-Zip tails. Each tail (SEQ ID NO:5133 through SEQ ID NO:5535; SEQ ID NO:6363 through SEQ ID NO:6765) is 32mer and consists of two concatenated Q-Zips. The tails were constructed from the twelve complementary Q-Zips (SEQ ID NO:17 through SEQ ID NO:28) labeled QZ1-QZ12 in FIG. 96. Use of this format of encryption is illustrated in FIGS. 8, 10, 18, 20, 22, 24, 26, 28, 30, 32, 34, and 36.

[0483] 7. Continue with the next set, orienting the pairs so that odd numbers go in the first row, even in the second, odd in the third, and even in the last row. Then place into master document and concatenate 2 tails of Q-dot zip-complements. List discriminating tails first (Columns 3 and 4), then complementary tails (Columns 1 and 2). Once sequences are concatenated, discriminating tails are listed under “First 2XQ-Zip Lig tail complement”, then common tails are listed under “Second 2XQ-Zip Lig tail complement”. 16Q Unique Pairs=404-955. 16Q Unique Singlets for controls=956-962. 16Q Repeat Pairs=963-1218. 16Q Repeat Singlets for controls=1219-1230.

[0484] 8. Suitable pairs of complementary Q-Zip tails according to the present invention include, without limitation, those shown in FIG. 113. FIG. 113 shows a list of 1230 pairs of complementary Q-Zip tails. Each tail (SEQ ID NO:5133 through SEQ ID NO:6362; SEQ ID NO:6363 through SEQ ID NO:7592) is 32mer and consists of two concatenated Q-Zips. The tails were constructed from the sixteen complementary Q-Zips (SEQ ID NO:17 through SEQ ID NO:32) labeled QZ1-QZ16 in FIG. 96. Use of this format of encryption is illustrated in FIGS. 8, 10, 18, 20, 22, 24, 26, 28, 30, 32, 34, and 36.

### Example 6

### Construction of Q-Zip Tails with 2 Q-dots Together on One LDR Probe (and Universal Array Zipcode on Other LDR Probe) to Score LDR Product

[0485] Another concept is to retain the original universal array architecture, but take advantage of the multiple colors made available by using a combination of Q-dots. Here the LDR products will have a traditional 24mer zipcode complementary sequence on one side, for capture on the universal array, and a 32mer Q-dot zip complementary sequence on the other side to allow for capture of two Q-dots. By judicious choice of Q-dots, sequences may be chosen that allow one to distinguish true signal from noise at a given address.

[0486] 1. Start with list of Q-dot zip and complements in Table 2 below. Sequences were generated as described in Example 1.

[0487] 2. For making single tails with 2Q-dots each, start with “3×16mer Tails 16Q-dotsUWR.xls” and save the listing of all 120 pairs of 16 items, each used only once (first column has lower number). Then make subcategories of all pairs with numbers <5 (=zips 1-6), <9 (=zips 7-28), and <13 (=zips 29-66), and remaining=67-120.

[0488] 3. Resave as “16mer SingleTail16Q-dotsRAN.xls” for randomization. For zips 1-6, tag with random numbers 1-10,000. For zips 7-28, tag with random numbers 10,000-20,000. For zips 29-66, tag with random numbers 30,000-40,000. For zips 67-120, tag with random numbers 50,000-60,000. Sort by random number. Then place into master document and concatenate single tail of Q-dot zip-complements.

[0489] 4. Suitable single complementary Q-Zip tails according to the present invention include, without limitation, those shown in FIG. 114. FIG. 114 shows a list of 120 single complementary Q-Zip tails. Each tail (SEQ ID NO:14593 through SEQ ID NO:14712) is 32mer and consists of two concatenated Q-Zips. The tails were constructed from the sixteen complementary Q-Zips (SEQ ID NO:17 through SEQ ID NO:32) labeled QZ1-QZ16 in FIG. 96. Two Q-dots will hybridize with each tail, allowing detection of two Q-dots per tail. Use of this format of encryption is illustrated in FIGS. 37-40, 45-53. Take 16mer SingleTail16Q-dotsFIN.xls document, and concatenate Q-dot zip. Paste back next to tail designation.

[0490] 5. Suitable single Q-Zip tails according to the present invention include, without limitation, those shown in FIG. 115. FIG. 115 shows a list of 120 single Q-Zip tails. Each tail (SEQ ID NO:14713 through SEQ ID NO:14832) is 32mer and consists of two concatenated Q-Zips. The tails were constructed from the sixteen Q-Zips (SEQ ID NO:1 through SEQ ID NO:16) labeled QZ1-QZ16 in FIG. 96. Two Q-dots will hybridize with each tail, allowing detection of two Q-dots per tail. Use of this format of encryption is illustrated in FIGS. 11-16, 41-44, and 54-62.

### Example 7

### Construction of Q-Zip Tails with 2 Q-Dots Ligated Together on One LDR Probe (and Universal Array Zipcode on Other LDR Probe) to Score LDR Product

[0491] Q-Zip tails with Q-dots ligated together on one LDR probe:

[0492] 1. Start with list of Q-dot Zip and complements in Table 2 below. (Q-dot zip+Complement Tm65.5-67.4). Sequences were generated as described in Example 2.

[0493] 2. One possibility is to ligate the Q-dot Zips together onto the tails. There are a number of different ways this may be accomplished, but the simplest format would have the Q-dots attached to the non-ligating ends of each 16mer sequence. As such, there may be a need to either make two Q-dots versions for each 16mer; one with the attachment on the 3′ end, the other with the attachment on the 5′ end. Alternatively, by reducing the list of tails, so that the first position will be “odd” and the second “even” the Q-dot will always hybridize in the correct orientation. Manually make such a list from 1-16, with odd numbers in first row, even numbers in second row. Since the rows are segregated into odd and even, there is no risk of the same two numbers being used in opposite orientation (i.e. 1-8 vs. 8-1). Then make subcategories of all pairs with numbers <5 (=zips 1-4), <9 (=zips 5-16), and <13 (=zips 17-36), and remaining=37-64.

[0494] 3. Resave as “16mer LigSingleTail 16Q-Ran.xls” for randomization. For zips 1-4, tag with random numbers 1-10,000. For zips 5-16, tag with random numbers 10,000-20,000. For zips 17-36, tag with random numbers 30,000-40,000. For zips 37-64, tag with random numbers 50,000-60,000. Sort by random number. Then place into master document and concatenate single tail of Q-dot zip-complements.

[0495] 4. Suitable single complementary Q-Zip tails according to the present invention include, without limitation, those shown in FIG. 116. FIG. 116 shows a list of 64 single complementary Q-Zip tails. Each tail (SEQ ID NO:14833 through SEQ ID NO:14896) is 32mer and consists of two concatenated Q-Zips. The tails were constructed from the sixteen complementary Q-Zips (SEQ ID NO:17 through SEQ ID NO:32) labeled QZ1-QZ16 in FIG. 96. Two Q-dots will hybridize with each tail, allowing detection of two Q-dots per tail. Upon hybridization, the Q-dots will ligate to each other in the presence of a thermostable ligase. Use of this format of encryption is illustrated in FIGS. 38, 40, 46, 47, 49, 50, 52, and 53. Take 16mer SingleTail16Q-dotsFIN.xls document, and concatenate Q-dot zip. Paste back next to tail designation.

[0496] 5. Suitable single Q-Zip tails according to the present invention include, without limitation, those shown in FIG. 117. FIG. 117 shows a list of 64 single Q-Zip tails. Each tail (SEQ ID NO:14897 through SEQ ID NO:14960) is 32mer and consists of two concatenated Q-Zips. The tails were constructed from the sixteen Q-Zips (SEQ ID NO:1 through SEQ ID NO:16) labeled QZ1-QZ16 in FIG. 96. Two Q-dots will hybridize with each tail, allowing detection of two Q-dots per tail. Upon hybridization, the Q-dots will ligate to each other in the presence of a thermostable ligase. Use of this format of encryption is illustrated in FIGS. 12, 14 and 16, 42, 44, 55, 56, 58, 59, 61, and 62.

### Example 8

### T-Zip Tails Construction

[0497] Each T-zip-code sequence is composed of four tetramers (designed as described in the following) so that the full-length 16-mers have similar Tm values. The 256 (44) possible combinations in which four bases can be arranged as tetramers were reduced to a set of 36 for use in standard universal array zip codes and Q-Zips; these were chosen so that each tetramer differs from all others by at least two bases (See Table 2). For construction of T-zip sequences, a different set of tetramers were chosen, with the aim of selecting tetramers with 2 or 3 G+C bases, that are substantially different than the set of tetramers used to construct Q-Zips and universal zip codes (see Table 5, below). Tetramer complements, as well as tetramers that would result in self-pairing or hairpin formation of the zip-codes, were eliminated. Furthermore, tetramers that were palindromic, e.g., TCGA, or repetitive, e.g., CACA, were excluded. The indicated set of twenty tetramers represents just one of the possible sets that can be created. In the following description, a tetramer is referred to by its designation in the first column of Table 5. For example, #5=GGAA. In the set of T-tetramers chosen, only two are related to those in Table 1, T-tetramer #3 AGAC is the complement of #19, and T-tetramer #21 GGTC is the complement of #32.

TABLE 5

Tetramer sequences and complements
used to construct T-zip sequences

| | Tetramer | Tetramer | |
|---|---|---|---|
| T-Tetramer | sequence | complement | |
| designation | 5′-3′ | 5′-3′ | G + C bases |
| 1 | ACCA | TGGT | 2 |
| 2 | ACTG | CAGT | 2 |
| 3 | AGAC | GTCT | 2 |
| 4 | CCAA | TTGG | 2 |
| 5 | GGAA | TTCC | 2 |
| 6 | TCAC | GTGA | 2 |
| 7 | TGCT | AGCA | 2 |
| 8 | ACGC | GCGT | 3 |
| 9 | AGCG | CGCT | 3 |
| 10 | CACC | GGTG | 3 |
| 11 | CAGG | CCTG | 3 |
| 12 | CCTC | GAGG | 3 |
| 13 | CGAG | CTCG | 3 |
| 14 | CGGA | TCCG | 3 |
| 15 | GACG | CGTC | 3 |
| 16 | GAGC | GCTC | 3 |
| 17 | GCAG | CTGC | 3 |
| 18 | GCCT | AGGC | 3 |
| 19 | GCGA | TCGC | 3 |
| 20 | GGGT | ACCC | 3 |
| 21 | GGTC | GACC | 3 |
| 22 | GTCC | GGAC | 3 |
| 23 | GTGG | CCAC | 3 |
| 24 | TGGC | GCCA | 3 |

[0498] 1. Create list 1-576 of all variations of 24×24 tetramers.

[0499] 2. Compute Tm values of 576 8-mers in Oligo 6.4 and sort according to Tm.

[0500] 3. Take the 300 8mers with the highest Tm Values (between 6.6 and 25) randomize within Tm value, split in half, reverse one half, and recombine to form 150 16 mers. Calculate Tm values of these=61° C. to 69.5° C. Remove sequences that use a tetramer 3 times. Remove lower Tm oligos so list has 136 members with Tm values from 63° C. to 69.5° C. Attach random number generator and randomize these 16 mer T-Zip sequences. (T-zip Tetramer Tm sortRan2.xls). Plot Tm values (FIG. 82). Also determine complement sequence.

[0501] 4. Suitable T-Zip codes according to the present invention include, without limitation, those shown in FIG. 118. FIG. 118 shows a list of 136 T-Zip code sequences (SEQ ID NO:14961 through SEQ ID NO:15096), and their 136 complements (SEQ ID NO:15097 through SEQ ID NO:15232). The T-Zips are each 16mer and were constructed.

### Example 9

### Adding Q-Zips to T-Zip Tails for Universal Detection

[0502] A set of 136 T-Zip sequences of 16 bases each, compatible for use with either Q-Zips, universal Zip codes, or both, with high Tm values have been designed in Example 8. Each T-Zip is equivalent to two Q-Zips, where each Q-Zip can be from 1 to 16, and the order does not matter ((16×15)/2+16=136). These 136 T-Zips may be combined to form a 32mer sequence (9180 combinations) that may be attached to an oligonucleotide, bead, or array. The presence of this 32mer sequence allows deconvoluting of the original signal by ligating on probes that contain the T-Zip sequences at the ligation junction, and two Q-Zip complements at the non-ligating end of each T-Zip.

[0503] 1. Starting with the set of 136 different ways to have 2 Q-Zips (from 1-16) combined, sort by combinations less than 5, 9, and 13. Create second list of 136 where order of Q-Zips is inverted. These lists are combined with the unique 136 different T-Zip sequences.

[0504] 2. Suitable T-Zip codes according to the present invention include, without limitation, those shown in FIG. 119. FIG. 119 shows the list of 136 T-Zip code sequences (SEQ ID NO:14961 through SEQ ID NO:15096) and their 136 complements (SEQ ID NO:15097 through SEQ ID NO:15232) shown in FIG. 118. Also shown are the Q-Zip and reverse Q-Zip numbers. Provide each pair with a unique identifier=(Position 1+Position 2)*40+(Position 2-Position 1). Combine columns and sort by unique identifier, from 80 to 1280. Those examples where a given Q-Zip was used twice will be repeated.

[0505] 3. Create a new document that contains the 136 different T-Zip sequences. Combine the numbers with the unique identifiers, such that each T-Zip number and corresponding T-Zip sequence is listed at the position corresponding to the unique identifiers.

[0506] 4. The expanded list serves as a template to interconvert pre-existing Q-Zip lists into Q-Zip/T-Zip lists.

[0507] 5. Start with the 2×16mer 2Tails 16Q-dotFIN.xls document. Insert 136 Expand list and concatenate Q-Zip complement with T-Zip sequence, with a spacer in between. For the initial LDR probe, the 2 T-Zip portions are fused together. For the upstream probe, the sequence is 2×Q-Zip complement-spacer-T-Zip. For the downstream (phosphorylated) probe, the sequence is T-Zip-spacer-2×Q-Zip-complement.

[0508] 6. Suitable T-Zip tails according to the present invention include, without limitation, those shown in FIG. 120. FIG. 120 shows a list of 3500 T-Zip tails (SEQ ID NO:15233 through SEQ ID NO:18732) (initial LDR probes). Each tail is 32mer and consists of two concatenated T-Zips. The tails were constructed from the 136 T-Zips (SEQ ID NO:14961 through SEQ ID NO:15096) shown in FIG. 119.

[0509] 7. Suitable upstream and downstream probes according to the present invention include, without limitation, those shown in FIG. 121. FIG. 121 shows a list of 3500 upstream and 3500 downstream probes. Each upstream probe consists of two concatenated Q-Zips (SEQ ID NO:19963 through SEQ ID NO:23462) followed by a spacer and a T-Zip (SEQ ID NO:23463 through SEQ ID NO:26962). Each downstream probe consists of one T-Zip (SEQ ID NO:26963 through SEQ ID NO:30462) followed by a spacer and two concatenated complementary Q-Zips (SEQ ID NO:30463 through SEQ ID NO:33962). The probes were constructed from the 136 T-Zips (SEQ ID NO:14961 through SEQ ID NO:15096) shown in FIG. 119 and the 16 complementary Q-Zips (SEQ ID NO:17 through SEQ ID NO:32) labeled QZ1-QZ16 in FIG. 96. Sequence identification numbers refer to the nucleotide sequence immediately following or immediately preceding the sequence identification number, as applicable. Use of this format of encryption is illustrated in FIGS. 63-71.

[0510] 8. Repeat the above procedure with document 2×16mer 2LigTails16Q-FIN.xls to yield appropriate Q-Zip/T-Zip oligonucleotide sequences.

[0511] 9. Suitable T-Zip tails according to the present invention include, without limitation, those shown in FIG. 122. FIG. 122 shows a list of 1230 T-Zip tails (SEQ ID NO:18733 through SEQ ID NO:19962) (initial LDR primers). Each tail is 32mer and consists of two concatenated T-Zips. The tails were constructed from the 136 T-Zips (SEQ ID NO:14961 through SEQ ID NO:15096) shown in FIG. 119.

[0512] 10. Suitable upstream and downstream probes according to the present invention include, without limitation, those shown in FIG. 123. FIG. 123 shows a list of 1230 upstream and 1230 downstream probes. Each upstream probe consists of one ligated Q-Zip tail (SEQ ID NO:33963 through SEQ ID NO:35192) followed by a spacer and a T-Zip (SEQ ID NO:35193 through SEQ ID NO:36422). Each downstream probe consists of one T-Zip (SEQ ID NO:36423 through SEQ ID NO:37652) followed by a spacer and one complementary ligated Q-Zip tail (SEQ ID NO:37653 through SEQ ID NO:38882). The probes were constructed from the 1230 T-Zips tails (SEQ ID NO:18733 through SEQ ID NO:19962) shown in FIG. 122, and the 1230 Q-Zip tails (SEQ ID NO:5133 through SEQ ID NO:6362) and 1230 complementary Q-Zip tails (SEQ ID NO:6363 through SEQ ID NO:7592) shown in FIG. 113. Sequence identification numbers refer to the nucleotide sequence immediately following or immediately preceding the sequence identification number, as applicable. Use of this format of encryption is illustrated in FIGS. 64, 65, 67, 68, 70, and 71.

### Example 10

### Whole Genome Amplification

[0513] Whole genome amplification is a method of isothermal DNA amplification that is capable of producing in the order of 50 μg of DNA from 100 ng starting material in a 50 μl reaction (Lage et al., “Whole Genome Analysis of Genetic Alterations in Small DNA Samples Using Hyperbranched Strand Displacement Amplification and Array-CGH,” Genome Res. 13:294-307 (2003), which is hereby incorporated by reference in its entirety). The technique has several advantages over the polymerase chain reaction. For example, amplification bias in the product is low (reported to be 3 fold as opposed to 4 to 6 orders of magnitude for PCR) so representation across the genome is highly uniform; amplification products have a high average size; and primer interference and dimerization, which can be particularly problematic when PCR is performed on small amounts of product, are avoided. The technique can be used, for example, when limited quantities of tumor samples are available from a needle biopsy and the amount of DNA that is present is insufficient for detailed analysis.

[0514] Semi-random octamer oligonucleotide primers were designed so that the two nucleotides at the 3′ end were known. Two sets of primers were synthesized (Integrated DNA Technologies), one with 3′ AA and another with 3′ CC, with a phosphorothioate linkage between these nucleotides (designated as “s”), to confer resistance to enzymatic digestion. Two nitroindole bases (designated as I(NO₂)) were included at the 5′ end of the primers (Lage et al., “Whole Genome Analysis of Genetic Alterations in Small DNA Samples Using Hyperbranched Strand Displacement Amplification and Array-CGH,” Genome Res. 13:294-307 (2003), which is hereby incorporated by reference in its entirety):

5′-I(NO₂) - I(NO₂) NNN NNN AsA -3′
and
5′-I(NO₂) - I(NO₂) NNN NNN CsC -3′

[0515] 1.2 μM of one semi-random octamer set was added to 50-100 ng human genomic DNA (Roche) in a total volume of 7.5 μl. These DNAs were heated for 10 minutes at 960 C and were cooled on ice.

[0516] A master mix was prepared, containing 5 μl of 2.5 mMdNTPs (Roche), 2 μl DMSO (Sigma), 16 units Bst polymerase (New England Biolabs), 5 μl 10× buffer (consisting of 100 mM tricine, 100 mM KCl, 50 mM (NH₄)₂SO₄, 52.5 mM MgCl₂, 1% Triton X-100, pH adjusted to 9.1-9.15 using NaOH; all reagents supplied by Sigma) and water to a total volume of 43.5 μl for each reaction. Following a brief centrifugation of the DNAs, 43.5 μl of master mix was added to each reaction, giving a total volume of 50 μl. Tubes were incubated at 50° C. for 4 hours, followed by 96° C. for 10 minutes.

[0517] During whole genome amplification, semi-random hexamer oligonucleotides anneal to the template DNA and are amplified by Bst polymerase. Bst polymerase is suited to this task, because it is highly processive and has strong displacement activity. Product DNA molecules are more readily dislodged from the template, allowing new primers to anneal. Although the optimal temperature of this enzyme is 65° C., yields of the amplified product were negligible at this temperature, presumably due to primer dissociation. Optimal compromise between enzyme activity and primer annealing was obtained at 500 C. Following incubation at 50° C. for 4 hours, a hyperbranched product is formed that represents a several hundred-fold amplification of the template DNA.

[0518] Product yields from amplification of 100 ng human genomic DNA are shown in FIG. 83. Amplification products using no DNA template were run in the left hand two lanes; these appear to be blank, showing that no detectable primer dimers are formed under the conditions used. The right hand lanes show amplification products using the optimized buffer described above; the yield obtained is considerable greater than with the manufacturer's buffer (center lanes). It can be seen that the yield obtained from the semi-random octamers ending in 3′ CC is higher than that obtained from the 3′ AA primers. This presumably reflects the higher average melting temperature of the 3′ CC primers.

### Example 11

### Testing of Synthetic Oligonucleotides for Resistance to Different Exonucleases

[0519] As shown in FIGS. 1-71 scoring of ligation products may be achieved by using Q-dots. It is important to minimize any non-specific background noise in the SNP detection that would arise from non-specific binding of unligated LDR oligonucleotide probes. These must be removed or destroyed by exonuclease digestion following the ligation step. For removal by exonucleases, both the allele-specific and common oligonucleotide probes should contain protecting groups on their 5′- and 3′-end, respectively, so that only ligation products are rendered resistant to exonuclease digestion, while unligated LDR oligonucleotide probes are targeted by 5′→3′ and 3′ 5′ exonucleases. With this aim, nine fluorescently labeled oligonucleotides were designed with various protecting groups, listed in Table 6, below, and group(s) resistant to exonuclease digestion were determined.

TABLE 6

List of the synthetic substrates (24-mers) used in the
Exonuclease Test, each carrying one or several protecting
group(s) (shown in bold) on their 5′ and/or 3′ end.

| | |
|---|---|
| Oligo- | |
| nucleotide name: | Oligonucleotide sequence |

| | | |
|---|---|---|
| XS 3′F1 | 5′ CGCAGATTTTGCGCTGGATTTCAA Fluorescein 3′ | (SEQ ID NO: 38887) |
| XS 5′F2 | 5′ Fluorescein -CGCAGATTTTGCGCTGGATTTCAA 3′ | (SEQ ID NO: 38887) |
| XRS 4 | 5′ Biotin TEG - Spacer 18- | (SEQ ID NO: 38887) |
| | CGCAGATTTTGCGCTGGATTTCAA Fluorescein- | |
| | Spacer 18- spacer C3 3′ | |
| XRS 5 | 5′ Amino-Modifier C3- | (SEQ ID NO: 38887) |
| | CGCAGATTTTGCGCTGGATTTCAA Fluorescein- Spacer | |
| | 18- Biotin TEG 3′ | |
| XRS 6 | 5′ Biotin TEG -UOMeCGCAGATTTTGCGCTGGATTTCAA | (SEQ ID NO: 38887) |
| | Fluorescein-UOMe-Biotin TEG 3′ | |
| XRS 7 | 5′ UOMe-Biotin TEG-CGCAGATTTTGCGCTGGATTTCAA | (SEQ ID NO: 38887) |
| | Fluorescein-Biotin TEG UOMe 3′ | |
| XRS 8 | 5′ Biotin TEG -(UOMe)4- | (SEQ ID NO: 38887) |
| | CGCAGATTTTGCGCTGGATTTCAA Fluorescein- | |
| | (UOMe)4-Biotin TEG 3′ | |
| XRS 9 | 5′ (UOMe)4-Biotin TEG- | (SEQ ID NO: 38887) |
| | CGCAGATTTTGCGCTGGATTTCAA Fluorescein- | |
| | (UOMe)4 3′ | |
| XRS 10 | 5′ (UOMe)4-Biotin TEG-CGCAGATTTTGC-Spacer | (SEQ ID NO: 38887) |
| | 18-GCTGGATTTCAA | |
| | Fluorescein Biotin TEG -(UOMe)4 3′ | |

Fluorescein = green fluorescent dye
Biotin TEG (5′ or branched) = 1-Dimethoxytrityloxy-3-O-(N-biotinyl-3-aminopropyl)-triethyleneglycolyl-glyceryl-2-O-(2-cyanoethyl)-(N,N-diisopropyl)-phosphoramidite
Biotin TEG (3′) = 1-Dimethoxytrityloxy-3-O-(N-biotinyl-3-aminopropyl)-triethyleneglycolyl-glyceryl-2-O-succinyl-long chain alkylamino-CPG
Spacer C3 or 18 = spacer phosphoramidites are used to insert a spacer arm in an oligonucleotide, and may also act as blockers of exonuclease activity
5′-Amino-Modifier C3 = designed to functionalize the 5′-terminus of the oligonucleotide with an amino-group attached to a triple carbon chain
UOMe = 2′-O-methyl-uridine riboside

[0520] The following commercially available exonucleases were tested:
[0521] 5′→3′ Lambda exonuclease, whose preferred substrate is 5′-phosphorylated double-stranded DNA;
[0522] 5′→3′ T7 exonuclease, whose preferred substrate is duplex DNA;
[0523] 3′→5′ E. coli Exonuclease I, which catalyzes the removal of nucleotides from single-stranded DNA;
[0524] 3′→5′ Exonuclease III, which catalyzes the removal of nucleotides from double-stranded DNA; and
[0525] 5′→3′ and 3′→5′ E. coli Exonuclease VII, which is an exclusively single-strand directed enzyme.

[0526] The results of these experiments are shown in FIGS. 84-88. A summary of these results is presented in Table 7, below.

TABLE 7
Test of synthetic oligonucleotides for resistance to different exonucleases.

| | | Lambda | | | | |
|---|---|---|---|---|---|---|
| | Oligo | Exo | T7 Exo | Exo I | Exo III | Exo VII |
| Synthetic oligonucleotides | name | 5'−>3′ | 5′−>3′ | 3′−>5′ | 3′−>5′ | 5′−>3′ & 3′−>5′ |
| 5′ --- F1 3′ | XS 3′F1 | no(*) | partial | untested | untested | no |
| 5′ F1---- 3′ | XS 5′F2 | untested | untested | no | no | no |
| 5′ B-S18-- -F1-S18-Sc3 3′ | XRS 4 | yes | yes | yes | no | no |
| 5′ NH2---F1-S18-B 3′ | XRS 5 | yes | untested | partial | no | no |
| 5′ B-UOMe----F1-UOMe-B 3′ | XRS 6 | partial | yes | yes | partial | no |
| 5′ UOMe-B----F1-B-UOMe 3′ | XRS 7 | partial | untested | yes | partial | no |
| 5′ B-(UOMe)4---F1-(UOMe)4-B 3′ | XRS 8 | yes | yes | yes | partial | no |
| 5′ (UOMe)4-B---F1-(UOMe)4 3′ | XRS 9 | partial | yes | yes | partial | no |
| 5′ (UOMe)4-B--S18-F1-B-(UOMe)4 3′ | XRS 10 | yes | partial | partial | no | no |

yes = Fully resistant to exonuclease digestion.
partial = Partially resistant to exonuclease digestion.
no = Sensitive to exonuclease digestion.

[0527] Among the nine synthetic substrates tested for exonuclease resistance, control oligos referred to as XS 3′F1 and XS 5′F2 were designed with a 5′- and a 3′-free terminus, respectively. Prior to exonuclease digestion, the 5′ end of XS 3′ F1 was phosphorylated by T4 polynucleotide kinase. As anticipated, 5′-phosphorylated XS 3′F1 is fully digested by 5′→3′ Lambda exonuclease in Lambda Exo digestion buffer. In the presence of the enzyme, the band corresponding to the substrate is no longer detected, yet digestion products appear at the lower part of the gel, as shown in FIG. 84. One unit of Lambda exonuclease is sufficient to digest the control oligo to completion, whether the reaction is performed in Lambda Exo buffer or in Exonuclease I buffer, both in the presence and absence of Exonuclease I.

[0528] Similarly, XS 5′F2 is digested by Exonuclease I in either Exonuclease I buffer or in Lambda Exo buffer. One unit results in complete digestion in either buffer, both in the presence and absence of Lambda exonucleases, as shown in FIG. 84.

[0529] Exo I digestion tests were subsequently conducted on oligos XRS 4 through XRS 10, as well as on XS 5′F2 control oligo, as shown in FIG. 85. As previously observed, XS 5′F2 is digested by 0.5 unit Exo I. As shown in FIG. 85, XRS 4, XRS 6, XRS 7, XRS 8, and XRS 9 are totally resistant to Exo I digestion. In contrast, the detection of some digestion products indicates that XRS 5 and XRS 10 are only partially resistant.

[0530] Digestion by Exo III was performed on the same oligos, as shown in FIG. 86. As shown in FIG. 86, XS 5′F2 is degraded by 5 units of Exo III as are XRS 4, XRS 5, and XRS 10. In contrast, XRS 6, XRS 7, XRS 8, and XRS 9 display partial resistance to Exo III digestion.

[0531] One unit of Lambda exonuclease led to the complete digestion of 5′-phosphorylated XS 3′ F1, shown in FIG. 87, as previously described. As shown in FIG. 87, all the other oligos are resistant to digestion, although XRS 6, XRS 7 and XRS 9 seem very slightly digested, and are therefore considered to be partially resistant.

[0532] Data obtained with T7 Exonuclease are summarized in Table 6, above. As shown in FIG. 88, none of the tested oligos, including the control oligos, is resistant to Exo VII digestion.

[0533] In conclusion, the most effective protecting groups on the 5′-terminus appear to be Biotin-Spacer 18 (on XRS 4) and Biotin-(UOMe)4 (on XRS 8), as well as (UOMe)4-Biotin (on XRS 9). Regarding the 3′-terminus, Spacer 18-Spacer C3, (UOMe)4, Biotin-UOMe, UOMe-Biotin, and (UOMe)4-Biotin and (UOMe)4 are all suitable protecting groups against Exo I digestion. These findings enable the design of LDR oligonucleotide probes with the appropriate blocking groups and thus significantly reduce one important source of background noise.

### Example 12

### Preparation of Q-dot/Q-Zip Conjugates, Immobilization of Biotinylated Oligos on the Streptavidin Microbeads, Hybridization of the Q-Dot/Q-Zip Conjugates, Elution of Q-Dot/Q-Zip Conjugates and Analysis

[0534] 25 pmol Q-dots were added to 500 pmol double-biotinylated Q-Zips in a final volume of 100 μl, made up with 10 mM HEPES buffer pH7.5. The 20-fold excess of oligonucleotide was used to ensure a high yield of conjugation. Lower loading conditions could be achieved by the use of various ratios of biotinylated oligo to Biocytin. After incubation for 30 minutes at room temperature under gentle agitation, Q-dot/Q-Zip conjugates were purified on Microcon YM-50 spin columns and stored at 4° C. until needed.

[0535] 0.5 mg of streptavidin-coated microspheres (supplied at 1% suspension in 100 mM borate pH8.5, 0.01% BSA, 0.05% Tween 20, 10 mM EDTA and 0.1% NaN₃) were separated from the storage buffer by magnetic capture and were resuspended in 100 μl TTL buffer (100 mM Tris-HCl pH8, 0.1% Tween 20, 1M LiCl). Magnetic capture was repeated and the microspheres were again resuspended in 50 μl TTL buffer.

[0536] 0.2 mg aliquots of magnetic beads were incubated for 15 min at room temperature, under gentle agitation, with 68.6 pmol of biotinylated oligodeoxynucleotide to achieve saturation of the microspheres with DNA, in a final volume of 30 μl, made up with TTL buffer. If loading percentages of less than 100% were required, incubation of the microspheres with the appropriate molar quantity of DNA was followed by a second incubation, performed under identical conditions, with 350 pmol Biocytin or a different, unreactive biotinylated oligo (e.g. Zip1), to saturate any excess streptavidin molecules surrounding the spheres.

[0537] Following magnetic capture, the microspheres were rinsed twice in TT buffer (250 mM Tris-HCl pH8, 0.1% Tween 20), with appropriate separation steps. The microspheres were then resuspended in 250 μl 2× hybridization buffer (100 mM Tris acetate pH7.5, 600 mM NaCl, 20 mMMgCl₂, 0.1% Tween 20) to give a final concentration of 0.8 μg/μl. Magnetic complexes were stored at 4° C. until needed.

[0538] Twelve micrograms (15 μl) of the 0.8 μg/pl magnetic complexes were mixed with 1 pmol of either Q-dot/Q-Zip conjugate, Cy3-labeled control oligo, or 1 pmol water, and the volume was made up to 30 μl with deionized water. This hybridization mixture was incubated at 55° C. for 1 hour in a rotating hybridization oven at position 8. After magnetic capture, magnetic hybrid complexes were washed twice in Wash 1 buffer (50 mM Tris acetate pH7.5, 0.05% Tween 20) at 45° C. for 10 min, and then twice in Wash 2 buffer (50 mM Tris acetate pH7.5, 20 mM NaCl, 0.05% Tween 20) for 10 min at 45° C. Following magnetic capture, magnetic hybrid complexes were resuspended in 20 μl TE buffer.

[0539] Two microlitres of 1M NaOH were added to the resuspended magnetic hybrid complexes and incubated at room temperature for 10 min to allow denaturation. The supernatant was collected and neutralized with 0.8 μl 3M sodium acetate pH5.2. Aliquots of 1 μl were loaded onto a glass microscope slide, dried and scanned using GSI Scan Array 5000.

### Example 13

### Plotting of the Q-Dot Standard Curve

[0540] 0-10 fmol of Q-dots, with no oligonucleotides attached, were spotted directly onto a glass microscope slide. The spots were allowed to dry and the intensity of fluorescence was measured using the ScanArray software on the GSI Lumonics ScanArray 5000 (see Example 1). A standard curve of intensity against quantity of Q-dots, shown in FIG. 90, was plotted using Microsoft Excel. This standard curve allows the quantification of results. Because a saturating signal is obtained from concentrations of Q-dots exceeding 6 fmol, dilutions are sometimes required for accurate quantification.

### Example 14

### Effect of Q-Dot Loading on Signal Intensity

[0541] Q-dot/Q-Zip conjugates were prepared using various ratios of oligonucleotide to biocytin (1:0, 1:0.5, 1:1, 1:3, 1:6.6 and 1:13), for both Q-Zip4 and Q-Zip1, as described in Example 12. These Q-dot/Q-Zip conjugates were hybridized onto magnetic microspheres that had oligonucleotide BcQz122 attached at 25% of the total loading capacity of the spheres in a rotating hybridization oven. To allow comparison, Cy3-labeled oligos and Q-dots with Q-Zip1 and Q-Zip2 conjugated at 100% of the loading capacity of the Q-dots. See FIG. 91.

[0542] The different loading density of the Q-dots produced signals of variable intensity. The most intense Q-dot/Q-Zip1 signal was obtained from a 1:3 ratio of Q-Zip1 to biocytin (36-fold higher than the signal from the corresponding Q-dot/Q-Zip4 negative control). The intensity of the signal was comparable to that obtained from 100% loading of the Q-dots (27-fold higher than the corresponding Q-dot/Q-Zip4 conjugate signal). Visibly weaker signals were produced from Q-dots with 1:6.6 and 1:13 loading of Q-Zip1 to biocytin. The Cy3-labeled positive control (Cy3Qz1) produced a strong signal.

[0543] The loading ratio of the Q-dots does not have a large effect on the efficiency of hybridization, with similar intensity signal produced from Q-dots conjugated to Q-Zip1 to biocytin in ratios of 1:0, 1:0.5, 1: 1, and 1:3. This result is consistent with the Q-dots possessing more than one oligonucleotide, on average, when loading levels greater than this ratio are used. At lower loading levels, each Q-dot may have fewer than one oligonucleotide attached, on average, hence the decrease in the intensity of the signal at 1:6.6 and 1:13 Q-Zip1 to biocytin ratios. Therefore, a 1:3 ratio was used in subsequent Examples.

### Example 15

### Titration of Oligonucleotide Concentration on Magnetic Microspheres Using Biocytin

[0544] Variable amounts of oligonucleotide BcQz122 were attached to streptavidin-coated magnetic microspheres giving loading of 100%, 50%, 25%, 10% and 0%. This was followed by saturation of the remaining free streptavidin molecules using an excess of biocytin, as described in Example 12. Cy3-labeled and Q-dot conjugated Q-Zips were incubated with these magnetic conjugates in a rotating hybridization oven. Following denaturation to separate them from the magnetic microspheres, the fluorescent oligos were spotted onto a glass microscope slide and the fluorescent signal was detected using the ScanArray software on the GSI Lumonics ScanArray 5000 (see Example 1). FIG. 92 shows a diagram of Example 15, along with the scanned slide.

[0545] The Cy3 labeled Q-Zip1 gave strong signals when hybridized to magnetic beads with attached oligo, although in FIG. 92 the filter sets used are optimized for orange Q-dots, rather than for Cy3 (row A). As shown in FIG. 92, Cy3 labeled p16Ex1 gave virtually no signal (row B), as did magnetic beads with no oligo attached. For Q-dots with no oligo attached (row C) and Q-dot/Q-Zip4 (row D), the intensity of the background signal increases as the amount of oligo on the magnetic beads decreases. For Q-dot/Q-Zip1 (row E) and Q-dot/Q-Zip2 (row F), the signal is strongest for 100% loading of the beads. The signal decreases as the amount of oligonucleotide on the magnetic beads decreases.

[0546] The most intense signal is obtained when the magnetic microspheres are saturated with oligonucleotide, at 100% of their loading capacity. Some background signal appears to be produced by non-specific binding when biocytin is used on magnetic beads, and as the amount of BcQz122 surrounding the spheres decreases, the intensity of this background signal increases.

### Example 16

### Titration of Oligonucleotide Concentration on Magnetic Microspheres Using Zip1

[0547] Variable amounts of oligonucleotide BcQz122 were attached to streptavidin-coated magnetic microspheres giving loading of 100%, 10%, 1%, 0.1% and 0%. This was followed by saturation of the remaining free streptavidin molecules using an excess of Zip1, as described in Example 11. Cy3-labeled and Q-dot conjugated Q-Zips were incubated with these magnetic conjugates in a rotating hybridization oven. Following denaturation to separate them from the magnetic microspheres, the fluorescent oligos were spotted onto a glass microscope slide and the fluorescent signal was detected using the ScanArray software on the GSI Lumonics ScanArray 5000 (see Example 1). FIG. 93 shows a diagram of Example 16, along with the scanned slide.

[0548] The Cy3 labeled Q-Zip1 gave strong signals when hybridized to magnetic beads with attached oligo, although in FIG. 93 the filter sets used are optimized for orange Q-dots, rather than for Cy3 (row A). As shown in FIG. 93, Cy3 labeled p16Ex1 gave virtually no signal (row B), as did magnetic beads with no oligo attached. For Q-dots with no oligo attached (row C) and Q-dot/Q-Zip4 (row D), compared with the analogous positions in FIG. 92, the intensity of the background signal is low, indicating no non-specific binding of either Q-dots or oligos to the magnetic microspheres, and no longer increases as the amount of oligo on the magnetic beads decreases. For Q-dot/Q-Zip1 (row E) and Q-dot/Q-Zip2 (row F), the signal decreases as the amount of oligonucleotide attached to the magnetic beads decreases, but a positive signal is still visible in column C, representing a 100-fold dilution of oligo.

[0549] The use of Zip1 to block free streptavidin molecules on the magnetic microspheres results in a lower background signal compared to the use of biocytin as a blocking agent. This would suggest that the biocytin molecules themselves have the ability to bind oligonucleotides and, to a lesser extent, Q-dots, in a non-specific manner. The use of an ‘inert’ biotinylated oligonucleotide circumvents this problem. As shown in FIG. 93, the intensity of signals corresponding to Q-Zip2 (row F) is higher than signals corresponding to Q-Zip1 (row E). This is consistent with the inclusion of two cQ-Zip 2 sequences in B1cQz122 whereas there is only one cQ-Zip 1 sequence, thus allowing twice as many Q-Zip2 Q-dots to hybridize compared to Q-Zip1 Q-dots.

### Example 17

### Estimation of the Relative Intensity of Q-Dot/Q-Zip1 and Q-Dot/Q-Zip2 signals

[0550] The products of hybridizations from Example 16 corresponding to FIG. 93 (rows E, F), 100% and 10% loading, were mixed with water to produce a dilution series, shown in FIG. 94, and were spotted onto a microscope slide. The intensity of the fluorescence was measured using the ScanArray software on the GSI Lumonics ScanArray 5000 (see Example 1), and the corresponding quantity of Q-dots was calculated by reference to the standard curve shown in FIG. 90. From this, it was possible to estimate the amount of Q-dots producing the signals.

[0551] As shown in FIG. 94, the amount of Q-Zip2 Q-dots corresponding to the intensity of the spot is twice that of Q-Zip1 Q-dots. For the more intense signals, dilution of Q-Zip2 samples with an equal volume of water produces a signal intensity that is comparable to that of Q-Zip1, indicating that the Q-Zip2 signal is roughly twice that of Q-Zip1. The signal intensity of Q-dot/Q-Zip2 may be twice that of Q-dot/Q-Zip1 because of the presence of two cQ-Zip sequences on the magnetic beads compared with one cQ-Zip 1.

### Example 18

### Indirect Hybridization of Q-Dots to Magnetic Microspheres Using a ‘Bridging Oligo’

[0552] Biotinylated oligonucleotide Zip1 was attached to magnetic microspheres at 100% of the loading capacity, as described in Example 12. An equimolar amount of bridging oligonucleotide, cZ1 cQ1cQ2, was incubated with the magnetic conjugates at 55° C. in 1× hybridization buffer, in a rotating hybridization oven for 1 hour. After magnetic capture of the hybridized conjugates, samples were washed in Wash buffer 1 and Wash buffer 2 once at 45° C. for 10 minutes, and were resuspended in 250 μl 2× hybridization buffer. A second hybridization was then performed, this time to anneal Cy3-labeled oligonucleotides and Q-dots/Q-Zips onto the bridging oligo, using the conditions described in Example 12. Following denaturation to separate them from the magnetic microspheres, the fluorescent oligos were spotted onto a glass microscope slide and the fluorescent signal was detected using the ScanArray software on the GSI Lumonics ScanArray 5000. FIG. 95 shows a diagram of Example 17, along with the scanned slide. To enable comparison, the results of a direct hybridization of labeled oligos to BcQz122 are shown alongside a negative control, consisting of magnetic microspheres with biotinylated Zip 1 attached, as described in Example 16.

[0553] The magnetic microspheres with biotinylated Zip1 attached gave very weak signals for all hybridizations. The Cy3 labeled Q-Zip1 gave strong signals when hybridized to magnetic beads with attached oligo, although in FIG. 95 the filter sets used are optimized for orange Q-dots, rather than for Cy3 (row A). As shown in FIG. 95, Cy3 labeled p16Ex1 gave virtually no signal (row B), as did magnetic beads with no oligo attached. For Q-dots with no oligo attached (row C) and Q-dot/Q-Zip4 (row D), the intensity of the background signal is low, indicating no non-specific binding of either Q-dots or oligos to the magnetic microspheres. For Q-dot/Q-Zip1 (row E) and Q-dot/Q-Zip2 (row F), a strong signal is visible for both the bridging oligo and the direct hybridization. The intensity of the signals produced by direct hybridization (corresponding to 9.8 fmol and 10.0 fmol of Q-dots respectively) are more intense than those using a bridging oligo (corresponding to 6.7 fmol and 6.3 fmol of Q-dots respectively), because in the latter case, a second hybridization was required.

[0554] Although preferred embodiments have been depicted and described in detail herein, it will be apparent to those skilled in the relevant art that various modifications, additions, substitutions, and the like can be made without departing from the spirit of the invention and these are therefore considered to be within the scope of the invention as defined in the claims which follow.

1. A method for identifying one or more target nucleic acid molecules differing by one or more single-base changes, insertions, deletions, or translocations, said method comprising:
providing a test sample potentially containing one or more target nucleic acid molecules differing by one or more single-base changes, insertions, deletions, or translocations;
providing one or more primary oligonucleotide probe sets, each set characterized by (a) a first oligonucleotide probe, having a target-specific portion and (b) a second oligonucleotide probe, having a target-specific portion, wherein the oligonucleotide probes in a particular set are suitable for ligation together when hybridized on a corresponding target nucleic acid molecule, but have a mismatch which interferes with such ligation when hybridized to any other nucleic acid molecule present in the sample, and wherein one or both oligonucleotide probes in the set contain one or more detection oligonucleotide probe-specific portions or their complements such that each probe set contains a unique set of one or more detection oligonucleotide probe-specific portions or their complements;
providing a ligase;
blending the sample, the one or more primary oligonucleotide probe sets, and the ligase to form a primary ligase detection reaction mixture;
subjecting the primary ligase detection reaction mixture to one or more ligase detection reaction cycles comprising a denaturation treatment, wherein any hybridized oligonucleotides are separated from the target nucleic acid molecules, and a hybridization treatment, wherein the primary oligonucleotide probe sets hybridize in a base-specific manner to their respective target nucleic acid molecules, if present in the sample, and ligate to one another to form a primary ligation product containing the target-specific portions and one or more detection oligonucleotide probe-specific portions or their complements, with the primary ligation product for each of the primary oligonucleotide probe sets being distinguishable from other nucleic acid molecules in the primary ligase detection reaction mixture by a unique set of one or more detection oligonucleotide probe-specific portions or their complements, and, wherein the primary oligonucleotide probe sets may hybridize to nucleic acid molecules in the sample other than their respective target nucleic acid molecules but do not ligate together due to a presence of one or more mismatches and individually separate during the denaturation treatment;
providing detection oligonucleotide probes which bind to the complementary detection oligonucleotide probe-specific portion of the primary ligation product or complements thereof, wherein each detection oligonucleotide probe has a reporter label, thereby providing each primary ligation product with a unique detectable encryption code;
contacting the primary ligation products and the detection oligonucleotide probes under conditions effective to permit hybridization of the detection oligonucleotide probes to the primary ligation products so that a labeled primary ligation product is formed; and
detecting the reporter label(s) on the primary ligation product, thereby indicating the presence of one or more target nucleic acid molecules in the sample, wherein nucleic acid molecules differing by one or more single-base changes, insertions, deletions, or translocations are discriminated from one another during the one or more ligase detection reaction cycles and the discriminated nucleic acid molecules are detected as a result of each different labeled, primary ligation product having a unique encryption code with a different pattern of detectable emission spectra.

2. The method according to claim 1 further comprising:
capturing the individual primary ligation products or complements thereof on one or a plurality of solid supports after said subjecting the primary ligase detection reaction mixture to one or more ligase detection reaction cycles and prior to said contacting the captured primary ligation products and the detection oligonucleotide probes, whereby each primary ligation product is individually distinguished.

3. The method according to claim 2, wherein relative amounts of one or more of a plurality of target nucleic acid molecules in the test sample, differing by one or more single-base changes, insertions, deletions, or translocations, are quantified by comparison with a reference sample having reference target nucleic acid molecules, said method further comprising:
providing one or more secondary oligonucleotide probe sets, which differ from the primary oligonucleotide probe sets, wherein each of the secondary oligonucleotide probes sets are characterized by (a) a first oligonucleotide probe having a reference target-specific portion and (b) a second oligonucleotide probe having a reference target-specific portion, wherein the oligonucleotide probes in a particular secondary oligonucleotide probe set are suitable for ligation together when hybridized adjacent to a corresponding reference target nucleic acid molecule, but have a mismatch which interferes with such ligation when hybridized to any other nucleic acid molecule present in the reference sample, and wherein one or both oligonucleotide probes in the secondary oligonucleotide probe set contain one or more detection oligonucleotide probe-specific portions or their complements such that each secondary oligonucleotide probe set contains a unique set of one or more detection oligonucleotide probe-specific portions or their complements;
blending the reference sample, the one or more secondary oligonucleotide probe sets, and the ligase to form a secondary ligase detection reaction mixture;
subjecting the secondary ligase detection reaction mixture to one or more ligase detection reaction cycles comprising a denaturation treatment, wherein any hybridized oligonucleotides are separated from reference target nucleic acid molecules, and a hybridization treatment, wherein the oligonucleotide probe sets hybridize in a base-specific manner to their respective reference sample target nucleic acid molecule, if present in the sample, and ligate to one another to form a secondary ligation product containing (a) the reference sample-specific portions and (b) the one or more detection oligonucleotide probe-specific portions or their complements with the secondary ligation product for each secondary oligonucleotide probe set being distinguishable from other nucleic acid molecules in the secondary ligase detection reaction mixture, and, wherein the secondary oligonucleotide probe sets may hybridize to nucleic acid molecules in the reference sample other than their respective reference target nucleic acid molecules but do not ligate together due to a presence of one or more mismatches and individually separate during the denaturation treatment;
blending the first and second ligase detection reaction mixtures after subjecting them to one or more ligase detection reaction cycles and before said capturing, whereby the blended first and second ligase detection reaction mixtures are subjected to said capturing, said contacting, and said detecting; and
comparing relative amounts of the reporter labels on the primary and secondary ligation products, to provide a quantitative measure of the relative level of the one or more target nucleic acid molecules in the test sample compared with the reference sample based on each different labeled ligation product having a unique encryption code with a different pattern of detectable emission spectra.

4. The method according to claim 2 further comprising:
subjecting the primary ligation detection reaction mixture to exonuclease digestion after said subjecting the primary ligase detection reaction mixture to one or more ligase detection reaction cycles and prior to said capturing under conditions effective to destroy unligated oligonucleotide probes.

5. The method according to claim 4, wherein for each primary oligonucleotide probe set, the first oligonucleotide probe contains a blocking group on its 5′ end, rendering the first oligonucleotide probe resistant to a 5′→3′exonuclease, and the second oligonucleotide probe contains a blocking group on its 3′ end, rendering it resistant to a 3′→5′exonuclease.

6. A method according to claim 5 further comprising:
filtering to remove capture agents from the primary ligation detection reaction mixture after exonuclease digestion.

7. The method according to claim 2, wherein one of the oligonucleotide probes in the oligonucleotide probe set contains one or more detection oligonucleotide probe-specific portions or their complements.

8. The method according to claim 2, wherein both of the oligonucleotide probes in the oligonucleotide probe set contains one or more detection oligonucleotide probe-specific portions or their complements.

9. The method according to claim 2, wherein the first oligonucleotide probe has a binding agent which is incorporated in any primary ligation product, and the solid support has one or more attached binding partner to the binding agent, whereby said capturing is carried out under conditions effective for the binding agent and its binding partner to become coupled together, thereby immobilizing any primary ligation product to the solid support.

10. The method according to claim 9, wherein the binding agent-binding partner pairs are selected from the group consisting of antibody-antigen binding partners, streptavidin-biotin binding partners, complementary oligonucleotides, amino group and EDC activated carboxylic acid group, thiol based binding partners, histidine moieties and nickel-NTA, and other chemical moieties that may be covalently or ionically linked to each other.

11. The method according to claim 2, wherein the solid support is a paramagnetic bead and said method further comprises:
recovering the paramagnetic beads by magnetic attraction after said capturing and placing the recovered paramagnetic beads on a microscope slide.

12. The method according to claim 2, wherein a complement of the primary ligation product sequence is captured on the solid support, said method further comprising:
subjecting the primary ligation product to a polymerase extension reaction after said subjecting the primary ligase detection reaction mixture to one or more ligase detection reaction cycles and prior to said capturing.

13. The method according to claim 2, wherein the primary ligation product is captured on the solid support.

14. The method according to claim 2, wherein the reporter label(s) are nanocrystals and said detecting comprises:
exciting the nanocrystals to produce an emission spectrum and
evaluating the emission spectra of the nanocrystals.

15. The method according to claim 2, wherein the ligase is selected from the group consisting of Thermus aquaticus ligase, Thermus thermophilus ligase, AK16D thermostable ligase, E. coli ligase, T4 ligase, and Pyrococcus ligase.

16. The method according to claim 2, wherein the target-specific portions of the oligonucleotide probes each have a hybridization temperature of 20-85° C.

17. The method according to claim 2, wherein the target-specific portions of the oligonucleotide probes are 15 to 30 nucleotides long.

18. The method according to claim 2, wherein the oligonucleotide probe sets are selected from the group consisting of ribonucleotides, deoxyribonucleotides, modified ribonucleotides, modified deoxyribonucleotides, peptide nucleic acids, modified peptide nucleotide analogues, modified phosphate-sugar backbone oligonucleotides, nucleotide analogues, and mixtures thereof.

19. The method according to claim 2, wherein said method is used to detect infectious diseases caused by bacterial, viral, parasitic, and fungal infectious agents.

20. The method according to claim 19, wherein the infectious disease is caused by a bacterium selected from the group consisting of Escherichia coli, Salmonella, Shigella, Klebsiella, Pseudomonas, Listeria monocytogenes, Mycobacterium tuberculosis, Mycobacterium avium-intracellulare, Yersinia, Francisella, Pasteurella, Brucella, Clostridia, Bordetella pertussis, Bacteroides, Staphylococcus aureus, Streptococcus pneumonia, B-Hemolytic strep., Corynebacteria, Legionella, Mycoplasma, Ureaplasma, Chlamydia, Neisseria gonorrhea, Neisseria meningitides, Hemophilus influenza, Enterococcus faecalis, Proteus vulgaris, Proteus mirabilis, Helicobacter pylori, Treponema palladium, Borrelia burgdorferi, Borrelia recurrentis, Rickettsial pathogens, Nocardia, and Actinomycetes.

21. The method according to claim 19, wherein the infectious disease is caused by a fungal infectious agent selected from the group consisting of Cryptococcus neoformans, Blastomyces dermatitidis, Histoplasma capsulatum, Coccidioides immitis, Paracoccicioides brasiliensis, Candida albicans, Aspergillus fumigautus, Phycomycetes (Rhizopus), Sporothrix schenckii, Chromomycosis, and Maduromycosis.

22. The method according to claim 19, wherein the infectious disease is caused by a viral infectious agent selected from the group consisting of human immunodeficiency virus, human T-cell lymphocytotrophic virus, hepatitis viruses, Epstein-Barr Virus, cytomegalovirus, human papillomaviruses, orthomyxo viruses, paramyxo viruses, adenoviruses, corona viruses, rhabdo viruses, polio viruses, toga viruses, bunya viruses, arena viruses, rubella viruses, and reo viruses.

23. The method according to claim 19, wherein the infectious disease is caused by a parasitic infectious agent selected from the group consisting of Plasmodium falciparum, Plasmodium malaria, Plasmodium vivax, Plasmodium ovale, Onchoverva volvulus, Leishmania, Trypanosoma spp., Schistosoma spp., Entamoeba histolytica, Cryptosporidum, Giardia spp., Trichimonas spp., Balatidium coli, Wuchereria bancrofti, Toxoplasma spp., Enterobius vermicularis, Ascaris lumbricoides, Trichuris trichiura, Dracunculus medinesis, trematodes, Diphyllobothrium latum, Taenia spp., Pneumocystis carinii, and Necator americanis.

24. The method according to claim 2, wherein said method is used to detect genetic diseases.

25. The method according to claim 24, wherein the genetic disease is selected from the group consisting of 21 hydroxylase deficiency, cystic fibrosis, Fragile X Syndrome, Turner Syndrome, Duchenne Muscular Dystrophy, Down Syndrome, heart disease, single gene diseases, HLA typing, phenylketonuria, sickle cell anemia, Tay-Sachs Syndrome, thalassemia, Klinefelter's Syndrome, Huntington's Disease, autoimmune diseases, lipidosis, obesity defects, hemophilia, inborn errors in metabolism, and diabetes.

26. The method according to claim 2, wherein said method is used to detect cancer involving oncogenes, tumor suppressor genes, or genes involved in DNA amplification, replication, recombination, or repair, or SNPs or adjacent regions that serve as markers for copy number changes or loss of heterozygosity in such genes.

27. The method according to claim 26, wherein the cancer is associated with a gene selected from the group consisting of APC, AKT, ALT, AXL, BAX, Bcl2, Beta-Catenin, bFGF, BRCA1, BRCA2, Braf, Cdc25A, Cdk4, c-Fos, c-Jun, c-Kit, C-met, c-Myc, c-Ret, CSF1R, CSF2, c-Src, CYCD-CDK4, CYCE-CDK2, Cyclin D1, Cyclin E1, Cytokines, Dishevelled, E2F, E-Cadherin, EGFR, elF4E, ErbB-3, ErbB-4, FGFR-1, FGFR-2, FGFR-3, FGFR-4, FH4 (VEGFR-3), Fit-1 (VEGFR-1), Flk-1 (VEGFR-2), Frizzled, G Proteins, GPCR, GRB2-SOS, GSK3 beta, Her2-neu, HGF, HSP27, HSP70, IFGII, IGFR1, K-ras, H-ras, N-ras, LT, MAPK, MDM2, MEK, MLH1, MSH2, MSH6, MYC, p15^{INK4b}, p16^{INK4a}, p19^{ARF}, p21^{Cip}, p27^{Kip}, p53, PDGFR alpha, PDGFR beta, PI3K, PP2A, PTEN, RAF, RAS, RB, Ron, RSK, RTK, Ski, Smad2, Smad4, ST, surviving, TbRII, TCF, Tcf4, TERT, TGF-Beta, TGF-Beta R, TIC2, TOR, VEGF, WAF1, Wisp-1, Wisp-3, WNT, or SNPs or adjacent regions that serve as markers for copy number changes or loss of heterozygosity in such genes, human papillomavirus Types 16 and 18, leukemia, colon cancer, breast cancer, lung cancer, prostate cancer, brain tumors, central nervous system tumors, bladder tumors, melanomas, liver cancer, osteosarcoma and other bone cancers, testicular and ovarian carcinomas, ENT tumors, and loss of heterozygosity.

28. The method according to claim 2, wherein said method is used for environmental monitoring, forensics, and food and feed industry monitoring.

29. The method according to claim 2, wherein a plurality of primary oligonucleotide probe sets are utilized with each set characterized by (a) the first oligonucleotide probe being identical in each oligonucleotide probe set and (b) the second oligonucleotide probes in each set having a target-specific portion which is different in each second oligonucleotide probe at a location where single-base changes, insertions, deletions, or translocations occur.

30. The method according to claim 2, wherein the target-specific portions of the primary oligonucleotide probe sets have a 3′ discriminating base.

31. The method according to claim 1, wherein the primary ligase detection reaction mixture is subjected to one ligase detection reaction cycle.

32. The method according to claim 1, wherein one or both of the oligonucleotide probes in the primary oligonucleotide probe set contain a plurality of detection oligonucleotide probe-specific portions or their complements.

33. The method according to claim 1, wherein the detection oligonucleotide probe-specific portions of the primary ligation products or complements thereof is selected from the set of sequences shown in FIGS. 97, 98, 99A, 100A, 101A, 102A, 103A, 104A, 105A, 106A, and or 107A or their complements.

34. The method according to claim 2, wherein the relative amounts of two or of a plurality of nucleic acid molecules, differing by one or more single-base changes, insertions, deletions, or translocations and present in a sample in unknown amounts with a plurality of target nucleic acid molecules are quantified, said method further comprising;
quantifying the relative amount of the ligation products after said detecting and
comparing the relative amounts of the ligation products to provide a quantitative measure of the relative amounts of two or a plurality of target nucleic acid molecules in the sample.

35. The method according to claim 34, wherein within one or more of the ligase detection reaction cycles includes internal cycles comprising a hybridization treatment, wherein the oligonucleotide probe sets hybridize at adjacent positions in a base-specific manner to their respective target nucleic acid molecules, if present in the sample, and ligate to one another to form a ligation product and a probe denaturation treatment, wherein when the primary ligase detection reaction mixture is heated to a temperature above that at which each target-specific portion melts, unligated probes separate from the nucleic acid molecules to which they are hybridized, and when heated to a temperature below the melting temperature of each target-specific portion, ligation products hybridized to nucleic acid molecules accumulate with each successive internal cycle to provide a quantitative measure of the relative level of two or more target nucleic acid molecules in the sample.

36. A method for identifying one or more target nucleic acid molecules differing by one or more single-base changes, insertions, deletions, or translocations, said method comprising:
providing a test sample potentially containing one or more target nucleic acid molecules;
providing one or more primary oligonucleotide probe sets, each set characterized by (a) a first oligonucleotide probe, having a target-specific portion and a 5′ upstream portion containing a translational oligonucleotide portion and (b) a second oligonucleotide probe, having a target-specific portion, and a 3′ downstream primer-specific portion, wherein the oligonucleotide probes in a particular primary oligonucleotide probe set are suitable for ligation together when hybridized to a corresponding target nucleic acid molecule, but have a mismatch which interferes with such ligation when hybridized to any other nucleic acid molecule present in the test sample;
providing a ligase;
blending the test sample, the one or more primary oligonucleotide probe sets, and the ligase to form a primary ligase detection reaction mixture;
subjecting the primary ligase detection reaction mixture to one or more ligase detection reaction cycles comprising a denaturation treatment, wherein any hybridized oligonucleotide probes are separated from the target nucleic acid molecules, and a hybridization treatment, wherein the primary oligonucleotide probe sets hybridize in a base-specific manner to their respective target nucleic acid molecules, if present in the test sample, and ligate to one another to form a primary ligation product containing (a) the 5′ upstream translational oligonucleotide portion, (b) the target-specific portions, and (c) the 3′ downstream primer-specific portion, with the primary ligation product for each primary oligonucleotide probe set being distinguishable from other nucleic acids in the ligase detection reaction mixture, and, wherein the primary oligonucleotide probe sets may hybridize to nucleic acid molecules in the test sample other than their respective target nucleic acid molecules but do not ligate together due to a presence of one or more mismatches and individually separate during the denaturation treatment;
providing a downstream primer complementary to the 3′ downstream primer-specific portion of the primary ligation product;
providing a polymerase;
blending the primary ligation product with the downstream primer, and the polymerase to form a polymerase extension reaction mixture;
subjecting the polymerase extension reaction mixture to one or more polymerase chain reaction cycles comprising a denaturation treatment, wherein hybridized nucleic acid molecules are separated, a hybridization treatment, wherein the primer hybridizes to its complementary 3′ downstream primer-specific portion of the primary ligation product, and an extension treatment, wherein the hybridized primers are extended to form extension products complementary to the primary ligation product;
capturing the extension product on one or more solid supports, so that the extension product may be individually distinguished,
providing one or more secondary oligonucleotide probe sets, each set characterized by (a) a first oligonucleotide probe, having a translational oligonucleotide portion and a 5′ upstream portion complementary to one or more detection oligonucleotide probe-specific portions and (b) a second oligonucleotide probe, having a target portion, and a 3′ downstream portion complementary to one or more detection oligonucleotide probe-specific portions, wherein the oligonucleotide probes in a particular secondary oligonucleotide probe set are suitable for ligation together when hybridized to a corresponding captured primary extension product, but have a mismatch which interferes with such ligation when hybridized to any other nucleic acid molecule;
blending the captured extension product, the one or more secondary oligonucleotide probe sets, and the ligase to form a second ligase detection reaction mixture;
subjecting the second ligase detection reaction mixture to one ligase detection reaction cycle comprising a denaturation treatment, wherein any hybridized oligonucleotides are separated from the captured extension product, and a hybridization treatment, wherein the secondary oligonucleotide probe sets hybridize in a base-specific manner to their respective captured extension products, if present, and ligate to one another to form a secondary ligation product containing (a) the 5′ upstream portion comprising one or more detection oligonucleotide probe-specific portions, (b) the upstream translational oligonucleotide portion connected to the target portion, and (c) the 3′ downstream portion comprising one or more detection oligonucleotide probe-specific portions, with the secondary ligation product for each secondary oligonucleotide probe set being distinguishable from other nucleic acids in the second ligase detection reaction mixture, and, wherein the one or more secondary oligonucleotide probe sets may hybridize to nucleic acid molecules in the sample other than their respective captured extension products but do not ligate together due to a presence of one or more mismatches and individually separate during the denaturation treatment by heating to above the temperature at which each translational oligonucleotide portion melts, but below a temperature at which each secondary ligation product melts, whereby each secondary ligation product remains hybridized to the captured extension product as a complex;
providing detection oligonucleotide probes which bind to the detection oligonucleotide probe-specific portions of the complex, wherein each detection oligonucleotide probe has a reporter label, thereby providing each complex containing a secondary ligation product with a unique detectable encryption code;
contacting the complex and the detection oligonucleotide probes under conditions effective to permit hybridization of the detection oligonucleotide probes to the complex so that a labeled complex is formed; and
detecting the reporter label(s) on the complex, thereby indicating the presence of one or more target nucleic acid molecule(s) in the test sample, wherein nucleic acid molecules differing by one or more single-base changes, insertions, deletions, or translocations are discriminated from one another during the primary and secondary ligase detection reactions and the discriminated nucleic acid molecules are detected as a result of each different labeled complex having a unique encryption code with a different pattern of detectable emission spectra.

37. The method according to claim 35, wherein relative amounts of one or more of a plurality of target nucleic acid molecules in the test sample, differing by one or more single-base changes, insertions, deletions, or translocations, are quantified by comparison with a reference sample, said method comprising:
providing one or more tertiary oligonucleotide probe sets, which differ from the primary oligonucleotide probe sets, wherein each of the tertiary oligonucleotide probes sets are characterized by (a) a first oligonucleotide probe, having a reference target-specific portion and a 5′ upstream portion containing a translational oligonucleotide probe-specific portion and (b) a second oligonucleotide probe, having a reference target-specific portion, and a 3′ downstream primer specific portion, wherein the oligonucleotide probes in a particular tertiary oligonucleotide probe set are suitable for ligation together when hybridized on a corresponding reference target nucleic acid molecule, but have a mismatch which interferes with such ligation when hybridized to any other nucleic acid molecule present in the reference sample;
blending the reference sample, the one or more tertiary oligonucleotide probe sets, and the ligase to form a tertiary ligase detection reaction mixture;
subjecting the tertiary ligase detection reaction mixture to one or more ligase detection reaction cycles comprising a denaturation treatment, wherein any hybridized oligonucleotides are separated from the reference target nucleic acid molecules, and a hybridization treatment, wherein the oligonucleotide probe sets hybridize in a base-specific manner to their respective reference target nucleic acid molecule, if present in the sample, and ligate to one another to form a tertiary ligation product containing (a) the 5′ upstream translational oligonucleotide-specific portion, (b) the target-specific portions, and (c) the 3′ downstream primer specific portion with the tertiary ligation product for each tertiary oligonucleotide probe set being distinguishable from other nucleic acid molecules in the tertiary ligase detection reaction mixture, and, wherein the tertiary oligonucleotide probe sets may hybridize to nucleic acid molecules in the sample other than their respective reference target nucleic acid molecules but do not ligate together due to a presence of one or more mismatches and individually separate during the denaturation treatment;
blending the primary and tertiary ligase detection reaction mixtures after subjecting them to one or more ligase detection reaction cycles and before said subjecting the polymerase chain reaction mixture to one or more polymerase extension reaction cycles, whereby the blended primary and tertiary ligase detection reaction mixtures are subjected to one or more polymerase chain reaction cycles, said capturing, said subjecting the secondary ligase detection reaction mixture to one ligase detection reaction cycles, said contacting the complex and the detection oligonucleotide probes, and said detecting the reporter labels on the complex; and
comparing relative amounts of the reporter label on the complexes, to provide a quantitative measure of the relative level of the one or more target nucleic acid molecules in the test sample compared with the reference sample as a result of each different labeled complex having a unique encryption code with a different pattern of detectable emission spectra.

38. The method according to claim 36 further comprising:
subjecting the primary ligation detection reaction mixture to exonuclease digestion after said subjecting the primary ligase detection reaction mixture to one or more ligase detection reaction cycles and prior to said capturing under conditions effective to destroy unligated oligonucleotide primers.

39. The method according to claim 38, wherein for each primary oligonucleotide probe set, the first oligonucleotide probe contains a blocking group on its 5′ end, rendering the first oligonucleotide probe resistant to a 5′→3′exonuclease, and the second oligonucleotide probe contains a blocking group on its 3′ end, rendering it resistant to a 3′→5′exonuclease.

40. A method according to claim 38 further comprising:
filtering to remove capture agents from the primary ligation detection reaction mixture after exonuclease digestion.

41. The method according to claim 36, wherein both of the oligonucleotide probes in each of the secondary oligonucleotide probe sets contains one or more detection oligonucleotide probe-specific portions.

42. The method according to claim 36, wherein the first oligonucleotide probe of each of the primary oligonucleotide probe sets has a binding agent which is incorporated in any primary ligation product, and the solid support has one or more attached binding partner to the binding agent, whereby said capturing is carried out under conditions effective for the binding agent and its binding partner to become coupled together, thereby immobilizing any primary ligation product to the solid support.

43. The method according to claim 42, wherein the binding agent-binding partner pairs are selected from the group consisting of antibody-antigen binding partners, streptavidin-biotin binding partners, complementary oligonucleotides, amino group and EDC activated carboxylic acid group, thiol based binding partners, histidine moieties and nickel-NTA, and other chemical moieties that may be covalently or ionically linked to each other.

44. The method according to claim 36, wherein the solid support is a paramagnetic bead and said method further comprises:
recovering the paramagnetic beads by magnetic attraction after said capturing and
placing the recovered paramagnetic beads on a slide.

45. The method according to claim 36, wherein a complement of the primary ligation product sequence is captured on the solid support.

46. The method according to claim 36, wherein the reporter labels are nanocrystals and said detecting comprises:
exciting the nanocrystals to produce emission spectra and
evaluating the emission spectra of the nanocrystals.

47. The method according to claim 36, wherein the ligase is selected from the group consisting of Thermus aquaticus ligase, Thermus thermophilus ligase, AK16D thermostable DNA ligase, E. coli ligase, T4 ligase, and Pyrococcus ligase.

48. The method according to claim 36, wherein the target-specific portions of the oligonucleotide probes each have a hybridization temperature of 20-85° C.

49. The method according to claim 36, wherein the target-specific portions of the oligonucleotide probes are 15 to 30 nucleotides long.

50. The method according to claim 36, wherein the oligonucleotide probe sets are selected from the group consisting of ribonucleotides, deoxyribonucleotides, modified ribonucleotides, modified deoxyribonucleotides, peptide nucleic acids, modified peptide nucleotide analogues, modified phosphate-sugar backbone oligonucleotides, nucleotide analogues, and mixtures thereof.

51. The method according to claim 36, wherein said method is used to detect infectious diseases caused by bacterial, viral, parasitic, and fungal infectious agents.

52. The method according to claim 51, wherein the infectious disease is caused by a bacterium selected from the group consisting of Escherichia coli, Salmonella, Shigella, Klebsiella, Pseudomonas, Listeria monocytogenes, Mycobacterium tuberculosis, Mycobacterium avium-intracellulare, Yersinia, Francisella, Pasteurella, Brucella, Clostridia, Bordetella pertussis, Bacteroides, Staphylococcus aureus, Streptococcus pneumonia, B-Hemolytic strep., Corynebacteria, Legionella, Mycoplasma, Ureaplasma, Chlamydia, Neisseria gonorrhea, Neisseria meningitides, Hemophilus influenza, Enterococcus faecalis, Proteus vulgaris, Proteus mirabilis, Helicobacter pylori, Treponema palladium, Borrelia burgdorferi, Borrelia recurrentis, Rickettsial pathogens, Nocardia, and Actinomycetes.

53. The method according to claim 51, wherein the infectious disease is caused by a fungal infectious agent selected from the group consisting of Cryptococcus neoformans, Blastomyces dermatitidis, Histoplasma capsulatum, Coccidioides immitis, Paracoccicioides brasiliensis, Candida albicans, Aspergillus fumigautus, Phycomycetes (Rhizopus), Sporothrix schenckii, Chromomycosis, and Maduromycosis.

54. The method according to claim 51, wherein the infectious disease is caused by a viral infectious agent selected from the group consisting of human immunodeficiency virus, human T-cell lymphocytotrophic virus, hepatitis viruses, Epstein-Barr Virus, cytomegalovirus, human papillomaviruses, orthomyxo viruses, paramyxo viruses, adenoviruses, corona viruses, rhabdo viruses, polio viruses, toga viruses, bunya viruses, arena viruses, rubella viruses, and reo viruses.

55. The method according to claim 51, wherein the infectious disease is caused by a parasitic infectious agent selected from the group consisting of Plasmodium falciparum, Plasmodium malaria, Plasmodium vivax, Plasmodium ovale, Onchoverva volvulus, Leishmania, Trypanosoma spp., Schistosoma spp., Entamoeba histolytica, Cryptosporidum, Giardia spp., Trichimonas spp., Balatidium coli, Wuchereria bancrofti, Toxoplasma spp., Enterobius vermicularis, Ascaris lumbricoides, Trichuris trichiura, Dracunculus medinesis, trematodes, Diphyllobothrium latum, Taenia spp., Pneumocystis carinii, and Necator americanis.

56. The method according to claim 36, wherein said method is used to detect genetic diseases.

57. The method according to claim 56, wherein the genetic disease is selected from the group consisting of 21 hydroxylase deficiency, cystic fibrosis, Fragile X Syndrome, Turner Syndrome, Duchenne Muscular Dystrophy, Down Syndrome, heart disease, single gene diseases, HLA typing, phenylketonuria, sickle cell anemia, Tay-Sachs Syndrome, thalassemia, Klinefelter's Syndrome, Huntington's Disease, autoimmune diseases, lipidosis, obesity defects, hemophilia, inborn errors in metabolism, and diabetes.

58. The method according to claim 36, wherein said method is used to detect cancer involving oncogenes, tumor suppressor genes, or genes involved in DNA amplification, replication, recombination, or repair, or SNPs or adjacent regions that serve as markers for copy number changes or loss of heterozygosity in such genes.

59. The method according to claim 58, wherein the cancer is associated with a gene selected from the group consisting of APC, AKT, ALT, AXL, BAX, Bcl2, Beta-Catenin, bFGF, BRCA1, BRCA2, Braf, Cdc25A, Cdk4, c-Fos, c-Jun, c-Kit, C-met, c-Myc, c-Ret, CSF1R, CSF2, c-Src, CYCD-CDK4, CYCE-CDK2, Cyclin D1, Cyclin E1, Cytokines, Dishevelled, E2F, E-Cadherin, EGFR, elF4E, ErbB-3, ErbB-4, FGFR-1, FGFR-2, FGFR-3, FGFR-4, FH4 (VEGFR-3), Fit-1 (VEGFR-1), Flk-1 (VEGFR-2), Frizzled, G Proteins, GPCR, GRB2-SOS, GSK3 beta, Her2-neu, HGF, HSP27, HSP70, IFGII, IGFR1, K-ras, H-ras, N-ras, LT, MAPK, MDM2, MEK, MLH1, MSH2, MSH6, MYC, p15^{INK4b}, p16^{Ink4a}, p19^{ARF}, p21^{Cip}, p27^{Kip}, p53, PDGFR alpha, PDGFR beta, PI3K, PP2A, PTEN, RAF, RAS, RB, Ron, RSK, RTK, Ski, Smad2, Smad4, ST, surviving, TbRII, TCF, Tcf4, TERT, TGF-Beta, TGF-Beta R, TIC2, TOR, VEGF, WAF1, Wisp-1, Wisp-3, WNT, or SNPs or adjacent regions that serve as markers for copy number changes or loss of heterozygosity in such genes, human papillomavirus Types 16 and 18, leukemia, colon cancer, breast cancer, lung cancer, prostate cancer, brain tumors, central nervous system tumors, bladder tumors, melanomas, liver cancer, osteosarcoma and other bone cancers, testicular and ovarian carcinomas, ENT tumors, and loss of heterozygosity.

60. The method according to claim 36, wherein said method is used for environmental monitoring, forensics, and food and feed industry monitoring.

61. The method according to claim 36, wherein a plurality of primary oligonucleotide probe sets are utilized with each set characterized by (a) the first oligonucleotide probe being identical in each oligonucleotide probe set and (b) the second oligonucleotide probes in each set having a target-specific portion which is different in each second oligonucleotide probe at a location where single-base changes, insertions, deletions, or translocations occur.

62. The method according to claim 36, wherein the primary ligase detection reaction mixture is subject to one ligase detection reaction cycle.

63. The method according to claim 36, wherein one or both of the oligonucleotide probes in each of the secondary oligonucleotide probe sets contain a plurality of detection oligonucleotide probe-specific portions, said method further comprising:
ligating the plurality of detection oligonucleotide probes hybridized to a particular oligonucleotide probe of the secondary oligonucleotide probe set after said contacting the complex and the detection oligonucleotide probes and before said detecting.

64. The method according to claim 37, wherein the 5′ upstream translational oligonucleotide-specific portion is selected from the set of sequences shown in FIGS. 120A and 122A or their complements.

65. The method according to claim 37, wherein the oligonucleotide probes having a translational oligonucleotide portion and a 5′ upstream portion complementary to one or more detection oligonucleotide probe-specific sequences is selected from the set of sequences shown in FIGS. 121A and 123A or their complements.

66. The method according to claim 37, wherein the 3′ downstream primer-specific portion is selected from the set of sequences shown in FIGS. 108A, 109A, 110A, 111A, 112A, and 113A or their complements.

67. The method according to claim 37, wherein the relative amounts of two or of a plurality of sequences, differing by one or more single-base changes, insertions, deletions, or translocations and present in a sample in unknown amounts with a plurality of target nucleic acid molecules are quantified, said method further comprising;
quantifying the relative amount of the ligation products, after said detecting and
comparing the relative amounts of the ligation products to provide a quantitative measure of the relative amounts of two or a plurality of target nucleic acid molecules in the sample.

68. The method according to claim 67, wherein within one or more of the ligase detection reaction cycles includes internal cycles comprising a hybridization treatment, wherein the oligonucleotide probe sets hybridize at adjacent positions in a base-specific manner to their respective target nucleic acid molecules, if present in the sample, and ligate to one another to form a ligation product, and a probe denaturation treatment, wherein, when the reaction mixture is heated to a temperature above that at which each target-specific portion melts, unligated probes separate from the nucleic acid molecules to which they are hybridized and when heated to a temperature below the melting temperature of each target-specific portion, ligation products hybridized to nucleic acid molecules accumulate with each successive internal cycle to provide a quantitative measure of the relative level of two or more target nucleic acid molecules in the sample.

69. The method according to claim 37, wherein the test sample comprises nucleic acid molecules isolated from a tumor, and the reference sample comprises nucleic acid molecules isolated from normal tissue or matched blood, wherein the relative level of the one or more target nucleic acid molecules in the test sample compared with the reference sample provides a measure of allele imbalance in the tumor at the corresponding loci.

70. The method according to claim 36, wherein the target-specific portions of the primary oligonucleotide probe sets have a 3′ discriminating base.

71. A method for identifying one or more target nucleic acid molecules, differing by one or more single-base changes, insertions, deletions, or translocations, in a plurality of nucleic acid molecules or identifying one or more target mRNA molecules differing by one or more splice site variations in a plurality of mRNA molecules, said method comprising:
providing a test sample potentially containing one or more target nucleic acid molecules differing by one or more single-base changes, insertions, deletions, or translocations, in a plurality of nucleic acid molecules or one or more target mRNA molecules differing by one or more splice site variations in a plurality of mRNA molecules;
providing one or more primary oligonucleotide probe sets, each set characterized by (a) a first oligonucleotide probe, having one or more detection oligonucleotide probe-specific portions or their complements and a target-specific portion and (b) a second oligonucleotide probe, having a target-specific portion and an addressable array-specific portion or its complement, wherein the oligonucleotide probes in a particular set are suitable for ligation together when hybridized to a corresponding target nucleic acid molecule or target mRNA molecule, but have a mismatch which interferes with such ligation when hybridized to any other nucleic acid molecule or mRNA molecule present in the sample, and such that each probe set contains a unique combination of detection oligonucleotide probe-specific portions and addressable array-specific portions or their complements;
providing a ligase;
blending the sample, the one or more oligonucleotide probe sets, and the ligase to form a primary ligase detection reaction mixture;
subjecting the primary ligase detection reaction mixture to one or more primary ligase detection reaction cycles comprising a denaturation treatment, wherein any hybridized oligonucleotides are separated from the target nucleic acid molecules or target mRNA molecules, and a hybridization treatment, wherein the one or more oligonucleotide probe sets hybridize in a base-specific manner to their respective target nucleic acid molecules or target mRNA molecules, if present in the sample, and ligate to one another to form a primary ligation product containing (a) the one or more detection oligonucleotide probe-specific portions or their complements, (b) the target-specific portions, and (c) the addressable array-specific portion or its complement, with the primary ligation product sequence for each one or more oligonucleotide probe set being distinguished from other nucleic acid molecules or mRNA molecules in the primary ligase detection reaction mixture by virtue of their containing a unique combination of detection oligonucleotide probe-specific portions and addressable array-specific portions or their complements, and wherein the primary oligonucleotide probe sets may hybridize to nucleic acid molecules or mRNA molecules in the sample other than their respective target nucleic acid molecules or target mRNA molecules but do not ligate together due to a presence of one or more mismatches and individually separate during the denaturation treatment;
providing a solid support with capture oligonucleotide probes immobilized at different sites, wherein the capture oligonucleotide probes have nucleotide sequences complementary to the addressable array-specific portions or their complements;
contacting the primary ligation products, copies of primary ligation products, or complements thereof with the solid support under conditions effective to hybridize the primary ligation products, copies of primary ligation products, or complements thereof to the capture oligonucleotide probes in a base-specific manner, thereby capturing the primary ligation products, copies of primary ligation products, or complements thereof on the solid support at the site with the complementary capture oligonucleotide,
providing detection oligonucleotide probes which bind to the detection oligonucleotide probe-specific portions of the captured primary ligation products, copies of primary ligation products, or complements thereof, wherein each detection oligonucleotide probe has a reporter label, such that each of the captured primary ligation products, copies of primary ligation products, or
complements thereof have a unique detectable encryption code;
contacting the captured primary ligation products, copies of primary ligation products, or complements thereof and the detection oligonucleotide probes under conditions effective to permit hybridization of the detection oligonucleotide probes to the captured primary ligation products, copies of primary ligation products, or complements thereof so that labeled, captured primary ligation products, copies of primary ligation products, or complements thereof are formed; and
detecting the reporter label on the labeled, captured primary ligation products, copies of primary ligation products, or complements thereof, thereby indicating the presence of one or more target nucleic acid molecules or target mRNA molecules in the sample, wherein target nucleic acid molecules differing by one or more single-base changes, insertions, deletions, or translocations in a plurality of nucleic acid molecules or target mRNA molecules differing by one or more splice site variations in a plurality of mRNA molecules are discriminated from one another during the primary ligase detection reaction and the discriminated molecules are detected as a result of different labeled ligation products having encryption codes with a different pattern of detectable emission spectra, at different sites on the solid support.

72. The method according to claim 71, wherein relative amounts of one or more target nucleic acid molecules in the test sample, differing by one or more single-base changes, insertions, deletions, or translocations, or one or more target mRNA molecules differing by one or more splice site variations, are quantified by comparison with a reference sample having reference target nucleic acid molecules or reference target mRNA molecules, said method comprising:
providing one or more secondary oligonucleotide probe sets, which differ from the primary oligonucleotide probe sets, wherein each of the secondary oligonucleotide probes sets are characterized by (a) a first oligonucleotide probe, having one or more detection oligonucleotide probe-specific portions or their complements and a reference target-specific portion, and (b) a second oligonucleotide probe, having a reference target-specific portion and an addressable array-specific portion or its complement, wherein the oligonucleotide probes in a particular secondary oligonucleotide probe set are suitable for ligation together when hybridized to one another on a corresponding reference target nucleic acid molecule or reference target mRNA molecules, but have a mismatch which interferes with such ligation when hybridized to any other nucleic acid or mRNA molecule present in the reference sample, and wherein one or both oligonucleotide probes in the secondary oligonucleotide probe set contain one or more detection oligonucleotide probe-specific portions or their complements such that each secondary oligonucleotide probe set contains a unique set of one or more detection oligonucleotide probe-specific portions or their complements;
blending the reference sample, the one or more secondary oligonucleotide probe sets, and the ligase to form a secondary ligase detection reaction mixture;
subjecting the secondary ligase detection reaction mixture to one or more ligase detection reaction cycles comprising a denaturation treatment, wherein any hybridized oligonucleotides are separated from reference target nucleic acid molecules or reference target mRNA molecules, and a hybridization treatment, wherein the oligonucleotide probe sets hybridize in a base-specific manner to their respective reference target nucleic acid molecule or reference target mRNA molecules, if present in the reference sample, and ligate to one another to form a secondary ligation product containing (a) the one or more detection oligonucleotide probe-specific portions or their complements, (b) the reference sample-specific portions and (c) the addressable array-specific portion or its complement, with the secondary ligation product for each secondary oligonucleotide probe set being distinguishable from other nucleic acid molecules or mRNA molecules in the secondary ligase detection reaction mixture, and, wherein the secondary oligonucleotide probe sets may hybridize to nucleic acid molecules or mRNA molecules in the reference sample other than their respective reference target nucleic acid molecules or reference target mRNA molecules but do not ligate together due to a presence of one or more mismatches and individually separate during the denaturation treatment;
blending the primary and secondary ligase detection reaction mixtures after subjecting them to one or more ligase detection reaction cycles and before said capturing, whereby the blended first and second ligase detection reaction mixtures are subjected to said capturing, said contacting, and said detecting; and
comparing relative amounts of the reporter labels on the primary and secondary ligation products, to provide a quantitative measure of the relative level of the one or more target nucleic acid molecules or target mRNA molecules in the test sample compared with that of the reference target nucleic acid molecules or reference target mRNA molecules in the reference sample as a result of each different labeled ligation product having a unique encryption code.

73. The method according to claim 72, wherein gene copy number is quantified.

74. The method according to claim 72, wherein mRNA copy number is quantified.

75. The method according to claim 72, wherein mRNA splice variant copy number is quantified.

76. The method according to claim 72, wherein one or more target nucleic acid molecules, differing by one or more single-base changes, insertions, deletions, or translocations, in a plurality of nucleic acid molecules are identified.

77. The method according to claim 71, wherein one or more target mRNA molecules differing by one or more splice site variations in a plurality of mRNA molecules are identified.

78. The method according to claim 71, wherein the detection oligonucleotide probes are in a form of one or more of detection oligonucleotide probe sets, each set characterized by (a) a first oligonucleotide probe and (b) a second oligonucleotide probe, wherein the detection oligonucleotide probes in a particular set are suitable for ligation together when hybridized to the primary ligation product sequence with corresponding detection oligonucleotide specific portions, but have a mismatch which interferes with such ligation when hybridized to any other nucleic acid molecule present and such that each detection oligonucleotide probe set contains a unique combination of detection oligonucleotide probes, and wherein said contacting comprises:
blending the captured primary ligation products, the one or more detection oligonucleotide probe sets, and the ligase to form a tertiary ligase detection reaction mixture and
subjecting the tertiary ligase detection reaction mixture to one or more ligase detection reaction cycles comprising a denaturation treatment, wherein any hybridized oligonucleotides are separated from the captured primary ligation products, and a hybridization treatment, wherein the one or more detection oligonucleotide probe sets hybridize in a base-specific manner to their respective ligation products, if present, and ligate to one another to form a tertiary ligation complex containing the one or more detection oligonucleotide probes or their complements hybridized to a nucleic acid molecule comprising the target-specific portions and the addressable array-specific portion or its complement, with the tertiary ligation complex for each one or more detection oligonucleotide probe set being distinguished from other nucleic acid molecules in the tertiary ligase detection reaction mixture by virtue of their containing a unique combination of detection oligonucleotide probes and addressable array-specific portions or their complements, and wherein the detection oligonucleotide probe sets may hybridize to nucleic acid molecules other than their respective captured primary ligation products but do not ligate together due to a presence of one or more mismatches and individually separate during the denaturation treatment.

79. The method according to claim 71 further comprising:
subjecting the primary ligation detection reaction mixture to exonuclease digestion after said subjecting the primary ligase detection reaction mixture to one or more ligase detection reaction cycles and prior to said contacting the primary ligation products, copies of primary ligation products, or complements thereof with the solid support under conditions effective to destroy unligated oligonucleotide probes.

80. The method according to claim 79, wherein for each primary oligonucleotide probe set, the first oligonucleotide probe contains a blocking group on its 5′ end, rendering the first oligonucleotide probe resistant to a 5′→3′exonuclease, and the second oligonucleotide probe contains a blocking group on its 3′ end, rendering it resistant to a 3′→5′exonuclease.

81. The method according to claim 71, wherein one of the oligonucleotide probes in the primary oligonucleotide probe set contains one or more detection oligonucleotide probe-specific portions or their complements.

82. The method according to claim 71, wherein both of the oligonucleotide probes in the primary oligonucleotide probe set contain one or more detection oligonucleotide probe-specific portions or their complements.

83. The method according to claim 71, wherein a complement of the primary ligation product is captured on the solid support.

84. The method according to claim 83 further comprising:
amplifying the primary ligation product prior to said contacting the primary ligation products, copies of primary ligation products, or complements thereof with the solid support.

85. The method according to claim 84, wherein said amplifying comprises:
hybridizing an oligonucleotide primer to the primary ligation product and
subjecting the hybridized oligonucleotide primer to a polymerase extension reaction under conditions effective to produce an extension product complementary to the primary ligation product.

86. The method according to claim 71, wherein the primary ligation product sequence is captured on the solid support.

87. The method according to claim 71, wherein the capture oligonucleotide probes at the particular sites on the solid support are the same as each other.

88. The method according to claim 71, wherein the capture oligonucleotide probes at the particular sites on the solid support are each unique with respect to one another.

89. The method according to claim 71, wherein the reporter labels are nanocrystals and said detecting comprises:
exciting the nanocrystals to produce emission spectra and
evaluating the emission spectra of the nanocrystals.

90. The method according to claim 71, wherein the ligase is selected from the group consisting of Thermus aquaticus ligase, Thermus thermophilus ligase, AK16D thermostable ligase, E. coli ligase, T4 ligase, and Pyrococcus ligase.

91. The method according to claim 71, wherein the target-specific portions of the oligonucleotide probes each have a hybridization temperature of 20-85° C.

92. The method according to claim 71, wherein the target-specific portions of the oligonucleotide probes are 15 to 30 nucleotides long.

93. The method according to claim 71, wherein the oligonucleotide probe sets are selected from the group consisting of ribonucleotides, deoxyribonucleotides, modified ribonucleotides, modified deoxyribonucleotides, peptide nucleic acids, modified peptide nucleotide analogues, modified phosphate-sugar backbone oligonucleotides, nucleotide analogues, and mixtures thereof.

94. The method according to claim 71, wherein said method is used to detect infectious diseases caused by bacterial, viral, parasitic, and fungal infectious agents.

95. The method according to claim 94, wherein the infectious disease is caused by a bacterium selected from the group consisting of Escherichia coli, Salmonella, Shigella, Klebsiella, Pseudomonas, Listeria monocytogenes, Mycobacterium tuberculosis, Mycobacterium avium-intracellulare, Yersinia, Francisella, Pasteurella, Brucella, Clostridia, Bordetella pertussis, Bacteroides, Staphylococcus aureus, Streptococcus pneumonia, B-Hemolytic strep., Corynebacteria, Legionella, Mycoplasma, Ureaplasma, Chlamydia, Neisseria gonorrhea, Neisseria meningitides, Hemophilus influenza, Enterococcus faecalis, Proteus vulgaris, Proteus mirabilis, Helicobacter pylori, Treponema palladium, Borrelia burgdorferi, Borrelia recurrentis, Rickettsial pathogens, Nocardia, and Actinomycetes.

96. The method according to claim 94, wherein the infectious disease is caused by a fungal infectious agent selected from the group consisting of Cryptococcus neoformans, Blastomyces dermatitidis, Histoplasma capsulatum, Coccidioides immitis, Paracoccicioides brasiliensis, Candida albicans, Aspergillus fumigautus, Phycomycetes (Rhizopus), Sporothrix schenckii, Chromomycosis, and Maduromycosis.

97. The method according to claim 94, wherein the infectious disease is caused by a viral infectious agent selected from the group consisting of human immunodeficiency virus, human T-cell lymphocytotrophic virus, hepatitis viruses, Epstein-Barr Virus, cytomegalovirus, human papillomaviruses, orthomyxo viruses, paramyxo viruses, adenoviruses, corona viruses, rhabdo viruses, polio viruses, toga viruses, bunya viruses, arena viruses, rubella viruses, and reo viruses.

98. The method according to claim 94, wherein the infectious disease is caused by a parasitic infectious agent selected from the group consisting of Plasmodium falciparum, Plasmodium malaria, Plasmodium vivax, Plasmodium ovale, Onchoverva volvulus, Leishmania, Trypanosoma spp., Schistosoma spp., Entamoeba histolytica, Cryptosporidum, Giardia spp., Trichimonas spp., Balatidium coli, Wuchereria bancrofti, Toxoplasma spp., Enterobius vermicularis, Ascaris lumbricoides, Trichuris trichiura, Dracunculus medinesis, trematodes, Diphyllobothrium latum, Taenia spp., Pneumocystis carinii, and Necator americanis.

99. The method according to claim 71, wherein said method is used to detect genetic diseases.

100. The method according to claim 94, wherein the genetic disease is selected from the group consisting of 21 hydroxylase deficiency, cystic fibrosis, Fragile X Syndrome, Turner Syndrome, Duchenne Muscular Dystrophy, Down Syndrome, heart disease, single gene diseases, HLA typing, phenylketonuria, sickle cell anemia, Tay-Sachs Syndrome, thalassemia, Klinefelter's Syndrome, Huntington's Disease, autoimmune diseases, lipidosis, obesity defects, hemophilia, inborn errors in metabolism, and diabetes.

101. The method according to claim 71, wherein said method is used to detect cancer involving oncogenes, tumor suppressor genes, or genes involved in DNA amplification, replication, recombination, or repair, or SNPs or adjacent regions that serve as markers for copy number changes or loss of heterozygosity in such genes.

102. The method according to claim 101, wherein the cancer is associated with a gene selected from the group consisting of APC, AKT, ALT, AXL, BAX, Bcl2, Beta-Catenin, bFGF, BRCA1, BRCA2, Braf, Cdc25A, Cdk4, c-Fos, c-Jun, c-Kit, C-met, c-Myc, c-Ret, CSF1R, CSF2, c-Src, CYCD-CDK4, CYCE-CDK2, Cyclin D1, Cyclin E1, Cytokines, Dishevelled, E2F, E-Cadherin, EGFR, elF4E, ErbB-3, ErbB-4, FGFR-1, FGFR-2, FGFR-3, FGFR-4, FH4 (VEGFR-3), Fit-1 (VEGFR-1), Flk-I (VEGFR-2), Frizzled, G Proteins, GPCR, GRB2-SOS, GSK3 beta, Her2-neu, HGF, HSP27, HSP70, IFGII, IGFR1, K-ras, H-ras, N-ras, LT, MAPK, MDM2, MEK, MLH1, MSH2, MSH6, MYC, p15 p16^{Ink4a}, p19, p21^{Cip}, p27^{Kip}, p53, PDGFR alpha, PDGFR beta, PI3K, PP2A, PTEN, RAF, RAS, RB, Ron, RSK, RTK, Ski, Smad2, Smad4, ST, surviving, TbRII, TCF, Tcf4, TERT, TGF-Beta, TGF-Beta R, TIC2, TOR, VEGF, WAF1, Wisp-1, Wisp-3, WNT, or SNPs or adjacent regions that serve as markers for copy number changes or loss of heterozygosity in such genes, human papillomavirus Types 16 and 18, leukemia, colon cancer, breast cancer, lung cancer, prostate cancer, brain tumors, central nervous system tumors, bladder tumors, melanomas, liver cancer, osteosarcoma and other bone cancers, testicular and ovarian carcinomas, ENT tumors, and loss of heterozygosity.

103. The method according to claim 71, wherein said method is used for environmental monitoring, forensics, and food and feed industry monitoring.

104. The method according to claim 71, wherein a plurality of primary oligonucleotide probe sets are utilized with each set characterized by (a) the first oligonucleotide probe being identical in each oligonucleotide probe set and (b) the second oligonucleotide probes in each set having a target-specific portion which is different in each second oligonucleotide probe at locations where single-base changes, insertions, deletions, or translocations occur.

105. The method according to claim 71, wherein the primary ligase detection reaction mixture is subjected to one ligase detection reaction cycle.

106. The method according to claim 71, wherein one or both of the oligonucleotide probes in the primary oligonucleotide probe set contain a plurality of detection oligonucleotide probe-specific portions or their complements.

107. The method according to claim 71, wherein, prior to said blending, said method further comprises:
providing a primer complementary to the target mRNA molecule;
providing a reverse transcriptase;
blending the primer, the reverse transcriptase, and the sample to form a reverse transcription mixture; and
subjecting the reverse transcription mixture to a reverse transcription reaction to produce cDNA copies of the target mRNA molecule.

108. The method according to claim 71 further comprising:
subjecting the sample to whole genome amplification prior to said blending.

109. The method according to claim 108, wherein said subjecting the sample to whole genome amplification comprises:
providing random primers;
providing a polymerase;
blending the sample, the random primers, and the polymerase to form a whole genome amplification reaction mixture; and
subjecting the whole genome amplification reaction mixture to a polymerase extension reaction under conditions effective to amplify the whole genome.

110. The method according to claim 71 further comprising:
providing a universal primer complementary to the primary ligation product;
providing a polymerase;
blending the captured ligation products, copies of the ligation products, or complements thereof, the universal primer, and the polymerase to form an isothermal amplification mixture prior to said contacting the captured ligation products, copies of the captured ligation products, or complements thereof, and the detection oligonucleotide probes; and
subjecting the isothermal amplification mixture to an isothermal amplification procedure to produce a complement of the primary ligation product.

111. The method according to claim 110, wherein the polymerase is Bst polymerase.

112. The method according to claim 110 further comprising:
subjecting the complement of the primary ligation product to restriction endonuclease digestion to cleave the complement of the primary ligation product.

113. The method according to claim 71, wherein the capture probe is provided with a hairpin oligonucleotide and, wherein said method further comprises:
ligating the hairpin oligonucleotide to the ligation products after said contacting the primary ligation products, copies of primary ligation products, or complements thereof with the solid support.

114. The method according to claim 71, wherein the target-specific portions of the primary oligonucleotide probe sets have a 3′ discriminating base.

115. The method according to claim 71, wherein within one or more of the ligase detection reaction cycles includes internal cycles comprising a hybridization treatment, wherein the oligonucleotide probe sets hybridize at adjacent positions in a base-specific manner to their respective target nucleic acid molecules, if present in the sample, and ligate to one another to form a ligation product a probe denaturation treatment, wherein, when the reaction mixture is heated to a temperature above that at which each target-specific portion melts, unligated probes separate from the nucleic acid molecules to which they are hybridized and when heated to a temperature below the melting temperature of each target-specific portion, ligation products hybridized to nucleic acid molecules accumulate with each successive internal cycle to provide a quantitative measure of the relative level of two or more target nucleic acid molecules in the sample.

116. The method according to claim 71, wherein the detection oligonucleotide probe-specific portions of the primary ligation products or complements thereof is selected from the set of sequences shown in FIGS. 114A, 115A, 116A, or 117A or their complements.

117. The method according to claim 71 further comprising:
ligating the detection oligonucleotide probes hybridized to a particular captured primary ligation product after said contacting the captured primary ligation products, copies of primary ligation products, or complements thereof and the detection oligonucleotide probes.

118. A method for identifying one or more target nucleic acid molecules, differing by one or more single-base changes, insertions, deletions, or translocations, in a plurality of nucleic acid molecules or identifying one or more target mRNA molecules differing by one or more splice site variations in a plurality of mRNA molecules, said method comprising:
providing a sample potentially containing one or more target nucleic acid molecules differing by one or more single-base changes, insertions, deletions, or translocations or one or more target mRNA molecules differing by one or more splice site variations;
capturing the target nucleic acid molecules or target mRNA molecules in the sample on one or a plurality of solid supports, so that they may be individually distinguished;
providing one or more primary oligonucleotide probe sets, each set characterized by (a) a first oligonucleotide probe, having a target-specific portion and a 5′ upstream portion complementary to one or more detection oligonucleotide probes and (b) a second oligonucleotide probe, having a target-specific portion and a 3′ downstream portion complementary to one or more detection oligonucleotide probes, wherein the oligonucleotide probes in a particular set are suitable for ligation together when hybridized to one another on a corresponding target nucleic molecule, but have a mismatch which interferes with such ligation when hybridized to any other nucleic molecule present in the sample, and such that each probe set contains a unique set of 5′ upstream and 3′ downstream portions;
providing a ligase;
blending the captured target nucleic acid molecules or target mRNA molecules, the one or more primary oligonucleotide probe sets, and the ligase to form a primary ligase detection reaction mixture;
subjecting the primary ligase detection reaction mixture to one or more ligase detection reaction cycles comprising a denaturation treatment, wherein any hybridized oligonucleotides are separated from the target nucleic acid molecule or target mRNA molecule, and a hybridization treatment, wherein the oligonucleotide probe sets hybridize in a base-specific manner to their respective target nucleic acid molecules or target mRNA molecule, if present in the sample, and ligate to one another to form a primary ligation product containing (a) the 5′ upstream portion, (b) the target-specific portions, and (c) the 3′ downstream portion with the primary ligation product remaining bound to the captured target nucleic acid molecule or target mRNA molecule, with the primary ligation product for each primary oligonucleotide probe set being distinguishable from other nucleic acids in the primary ligase detection reaction mixture by virtue of containing a unique set of 5′ upstream portion and 3′ downstream portion, and, wherein the oligonucleotide probe sets may hybridize to nucleic acid molecules in the sample other than their respective target nucleic acid molecule or target mRNA sequences but do not ligate together due to a presence of one or more mismatches and individually separate during the denaturation treatment;
providing detection oligonucleotide probes which bind to the 5′ upstream and 3′ downstream portions of the ligation products, wherein each detection oligonucleotide probe has a reporter label, such that each labeled primary ligation product has a unique detectable encryption code;
contacting the primary ligation products and the detection oligonucleotide probes under conditions effective to permit hybridization of the detection oligonucleotide probes to the primary ligation products so that a labeled captured primary ligation product is formed; and
detecting the reporter label on the primary ligation products, thereby indicating the presence of one or more target nucleic acid molecules differing by one or more single base changes, insertions, deletions, or translocations or one or more target mRNA molecules differing by one or more splice site variations are discriminated from one another during the ligase detection reaction and the discriminated target nucleic acid molecules or the target mRNA molecules are detected due to each different reporter labels having a unique encryption code with a different pattern of detectable emission spectra.

119. The method according to claim 118, wherein relative amounts of one or more of a plurality of target nucleic acid molecules in the test sample, differing by one or more single-base changes, insertions, deletions, or translocations or one or more target mRNA molecules differing by one or more splice site variables are quantified by comparison with a reference sample having reference target nucleic acid molecules or reference target mRNA molecule, said method comprising:
providing one or more secondary oligonucleotide probe sets, which differ from the primary oligonucleotide probe sets, wherein each of the secondary oligonucleotide probe sets are characterized by (a) a first oligonucleotide probe having a reference target-specific portion and a 5′ upstream portion complementary to one or more detection oligonucleotide probes and (b) a second oligonucleotide probe having a reference target-specific portion and a 3′ downstream portion complementary to one or more detection oligonucleotide probes, wherein the oligonucleotide probes in a particular secondary oligonucleotide probe set are suitable for ligation together when hybridized to one another on a corresponding reference target nucleic acid molecule or reference target mRNA molecule, but have a mismatch which interferes with such ligation when hybridized to any other nucleic acid or mRNA molecule present in the reference sample, and wherein one or both oligonucleotide probes in the secondary oligonucleotide probe set contain one or more detection oligonucleotide probe-specific portions or their complements such that each secondary oligonucleotide probe set contains a unique set of one or more detection oligonucleotide probe-specific portions or their complements;
blending the reference sample, the one or more secondary oligonucleotide probe sets, and the ligase to form a secondary ligase detection reaction mixture;
subjecting the secondary ligase detection reaction mixture to one or more ligase detection reaction cycles comprising a denaturation treatment, wherein any hybridized oligonucleotides are separated from reference target nucleic acid molecules or reference target mRNA molecules, and a hybridization treatment, wherein the oligonucleotide probe sets hybridize in a base-specific manner to their respective reference sample target nucleic acid molecule or reference target mRNA molecule, if present in the sample, and ligate to one another to form a secondary ligation product containing (a) the reference sample-specific portions and (b) the one or more detection oligonucleotide probe-specific portions or their complements with the secondary ligation product for each secondary oligonucleotide probe set being distinguishable from other nucleic acid molecules in the secondary ligase detection reaction mixture, and, wherein the secondary oligonucleotide probe sets may hybridize to nucleic acid molecules in the reference sample other than their respective reference target nucleic acid molecules or reference mRNA molecules but do not ligate together due to a presence of one or more mismatches and individually separate during the denaturation treatment;
blending the primary and secondary ligase detection reaction mixtures after subjecting them to one or more ligase detection reaction cycles and before said contacting, whereby the blended primary and secondary ligase detection reaction mixtures are subjected to said contacting and said detecting; and
comparing relative amounts of the reporter labels on the primary and secondary ligation products, to provide a quantitative measure of the relative level of the one or more target nucleic acid molecules or target mRNA molecules in the test sample compared with that of the reference target nucleic acid molecules or reference target mRNA molecules in the reference sample as a result of each different labeled ligation product having a unique encryption code.

120. The method according to claim 119, wherein gene copy number is quantified.

121. The method according to claim 119, wherein mRNA copy number is quantified.

122. The method according to claim 119, wherein mRNA splice variant copy number is quantified.

123. The method according to claim 118, wherein the detection oligonucleotide probes are in a form of one or more of detection oligonucleotide probe sets, each set characterized by (a) a first oligonucleotide probe and a second oligonucleotide probe, wherein the detection oligonucleotide probes in a particular set are suitable for ligation together when hybridized to the primary ligation products with corresponding detection oligonucleotide specific portions, but have a mismatch which interferes with such ligation when hybridized to any other nucleic acid molecule present, wherein each detection oligonucleotide probe set contains a unique combination of detection oligonucleotide probes, wherein said contacting comprises:
blending the primary ligation products, the one or more detection oligonucleotide probe sets, and the ligase to form a tertiary ligase detection reaction mixture and
subjecting the tertiary ligase detection reaction mixture to one or more ligase detection reaction cycles comprising a denaturation treatment, wherein any hybridized oligonucleotides are separated from the primary ligation products, and a hybridization treatment, wherein the one or more detection oligonucleotide probe sets hybridize in a base-specific manner to their respective primary ligation products, if present, and ligate to one another to form a tertiary ligation complex containing the one or more detection oligonucleotide probes or their complements hybridized to a nucleic acid molecule comprising the target-specific portions and the addressable array-specific portion or its complement, with the tertiary ligation complex for each one or more detection oligonucleotide probe set being distinguished from other nucleic acid molecules in the tertiary ligase detection reaction mixture by virtue of their containing a unique combination of detection oligonucleotide probes and addressable array-specific portions or their complements, and wherein the detection oligonucleotide probe sets may hybridize to nucleic acid molecules other than their respective primary ligation products but do not ligate together due to a presence of one or more mismatches and individually separate during the denaturation treatment.

124. The method according to claim 118, wherein the first oligonucleotide probe has a binding agent which is incorporated in any primary ligation product, said method further comprising:
providing the solid support with one or more attached binding partners to the binding agent;
contacting the primary ligation product, with the solid support under conditions effective for the binding agent and its binding partner to become coupled together, thereby immobilizing any primary ligation product to the solid support, wherein said detecting involves detecting the reporter label of the primary ligation product immobilized to the solid support.

125. The method according to claim 124, wherein the binding agent-binding partner pairs are selected from the group consisting of antibody-antigen binding partners, streptavidin-biotin binding partners, complementary oligonucleotides, amino group and EDC activated carboxylic acid group, thiol based binding partners, histidine moieties and nickel-NTA, and other chemical moieties that may be covalently or ionically linked to each other.

126. The method according to claim 118, wherein the reporter labels are nanocrystals and said detecting comprises:
exciting the nanocrystals to produce emission spectra and
evaluating the emission spectra of the nanocrystals.

127. The method according to claim 118, wherein the ligase is selected from the group consisting of Thermus aquaticus ligase, Thermus thermophilus ligase, AK16D thermostable ligase, E. coli ligase, T4 ligase, and Pyrococcus ligase.

128. The method according to claim 118, wherein the target-specific portions of the oligonucleotide probes each have a hybridization temperature of 20-85° C.

129. The method according to claim 118, wherein the target-specific portions of the oligonucleotide probes are 15 to 30 nucleotides long.

130. The method according to claim 118, wherein the oligonucleotide probe sets are selected from the group consisting of ribonucleotides, deoxyribonucleotides, modified ribonucleotides, modified deoxyribonucleotides, peptide nucleic acids, modified peptide nucleotide analogues, modified phosphate-sugar backbone oligonucleotides, nucleotide analogues, and mixtures thereof.

131. The method according to claim 118, wherein said method is used to detect infectious diseases caused by bacterial, viral, parasitic, and fungal infectious agents.

132. The method according to claim 131, wherein the infectious disease is caused by a bacterium selected from the group consisting of Escherichia coli, Salmonella, Shigella, Klebsiella, Pseudomonas, Listeria monocytogenes, Mycobacterium tuberculosis, Mycobacterium avium-intracellulare, Yersinia, Francisella, Pasteurella, Brucella, Clostridia, Bordetella pertussis, Bacteroides, Staphylococcus aureus, Streptococcus pneumonia, B-Hemolytic strep., Corynebacteria, Legionella, Mycoplasma, Ureaplasma, Chlamydia, Neisseria gonorrhea, Neisseria meningitides, Hemophilus influenza, Enterococcus faecalis, Proteus vulgaris, Proteus mirabilis, Helicobacter pylori, Treponema palladium, Borrelia burgdorferi, Borrelia recurrentis, Rickettsial pathogens, Nocardia, and Actinomycetes.

133. The method according to claim 131, wherein the infectious disease is caused by a fungal infectious agent selected from the group consisting of Cryptococcus neoformans, Blastomyces dermatitidis, Histoplasma capsulatum, Coccidioides immitis, Paracoccicioides brasiliensis, Candida albicans, Aspergillus fumigautus, Phycomycetes (Rhizopus), Sporothrix schenckii, Chromomycosis, and Maduromycosis.

134. The method according to claim 131, wherein the infectious disease is caused by a viral infectious agent selected from the group consisting of human immunodeficiency virus, human T-cell lymphocytotrophic virus, hepatitis viruses, Epstein-Barr Virus, cytomegalovirus, human papillomaviruses, orthomyxo viruses, paramyxo viruses, adenoviruses, corona viruses, rhabdo viruses, polio viruses, toga viruses, bunya viruses, arena viruses, rubella viruses, and reo viruses.

135. The method according to claim 131, wherein the infectious disease is caused by a parasitic infectious agent selected from the group consisting of Plasmodium falciparum, Plasmodium malaria, Plasmodium vivax, Plasmodium ovale, Onchoverva volvulus, Leishmania, Trypanosoma spp., Schistosoma spp., Entamoeba histolytica, Cryptosporidum, Giardia spp., Trichimonas spp., Balatidium coli, Wuchereria bancrofti, Toxoplasma spp., Enterobius vermicularis, Ascaris lumbricoides, Trichuris trichiura, Dracunculus medinesis, trematodes, Diphyllobothrium latum, Taenia spp., Pneumocystis carinii, and Necator americanis.

136. The method according to claim 118, wherein said method is used to detect genetic diseases.

137. The method according to claim 136, wherein the genetic disease is selected from the group consisting of 21 hydroxylase deficiency, cystic fibrosis, Fragile X Syndrome, Turner Syndrome, Duchenne Muscular Dystrophy, Down Syndrome, heart disease, single gene diseases, HLA typing, phenylketonuria, sickle cell anemia, Tay-Sachs Syndrome, thalassemia, Klinefelter's Syndrome, Huntington's Disease, autoimmune diseases, lipidosis, obesity defects, hemophilia, inborn errors in metabolism, and diabetes.

138. The method according to claim 118, wherein said method is used to detect cancer involving oncogenes, tumor suppressor genes, or genes involved in DNA amplification, replication, recombination, or repair, or SNPs or adjacent regions that serve as markers for copy number changes or loss of heterozygosity in such genes.

139. The method according to claim 138, wherein the cancer is associated with a gene selected from the group consisting of APC, AKT, ALT, AXL, BAX, Bcl2, Beta-Catenin, bFGF, BRCA1, BRCA2, Braf, Cdc25A, Cdk4, c-Fos, c-Jun, c-Kit, C-met, c-Myc, c-Ret, CSF1R, CSF2, c-Src, CYCD-CDK4, CYCE-CDK2, Cyclin D1, Cyclin E1, Cytokines, Dishevelled, E2F, E-Cadherin, EGFR, elF4E, ErbB-3, ErbB-4, FGFR-1, FGFR-2, FGFR-3, FGFR-4, FH4 (VEGFR-3), Fit-1 (VEGFR-1), Flk-1 (VEGFR-2), Frizzled, G Proteins, GPCR, GRB2-SOS, GSK3 beta, Her2-neu, HGF, HSP27, HSP70, IFGII, IGFR1, K-ras, H-ras, N-ras, LT, MAPK, MDM2, MEK, MLH1, MSH2, MSH6, MYC, p15^{INK4b}, p16^{Ink4a}, p19^{ARF}, p21^{Cip}, p27^{Kip}, p53, PDGFR alpha, PDGFR beta, PI3K, PP2A, PTEN, RAF, RAS, RB, Ron, RSK, RTK, Ski, Smad2, Smad4, ST, surviving, TbRII, TCF, Tcf4, TERT, TGF-Beta, TGF-Beta R, TIC2, TOR, VEGF, WAF1, Wisp-1, Wisp-3, WNT, or SNPs or adjacent regions that serve as markers for copy number changes or loss of heterozygosity in such genes, human papillomavirus Types 16 and 18, leukemia, colon cancer, breast cancer, lung cancer, prostate cancer, brain tumors, central nervous system tumors, bladder tumors, melanomas, liver cancer, osteosarcoma and other bone cancers, testicular and ovarian carcinomas, ENT tumors, and loss of heterozygosity.

140. The method according to claim 118, wherein said method is used for environmental monitoring, forensics, and food and feed industry monitoring.

141. The method according to claim 118, wherein a plurality of primary oligonucleotide probe sets are utilized with each set characterized by (a) the first oligonucleotide probe being identical in each oligonucleotide probe set and (b) the second oligonucleotide probes in each set having a target-specific portion which is different in each second oligonucleotide probe at locations where single-base changes, insertions, deletions, or translocations occur.

142. The method according to claim 118 wherein one or more target nucleic acid molecules, differing by one or more single-base changes, insertions, deletions, or translocations, in a plurality of nucleic acid molecules are identified.

143. The method according to claim 118, wherein one or more target mRNA molecules differing by one or more splice site variations in a plurality of mRNA molecules are identified.

144. The method according to claim 142, wherein the sample is mRNA, said method further comprising:
providing a primer complementary to the target mRNA molecule;
providing a reverse transcriptase;
blending the primer, the reverse transcriptase, and the sample to form a reverse transcription mixture; and
subjecting the reverse transcription mixture to a reverse transcription reaction to produce cDNA copies of the target mRNA molecule.

145. The method according to claim 144, wherein the primer is complementary to the target mRNA molecule.

146. The method according to claim 143, wherein the primer is a complementary to an oligodT added to the target mRNA molecule.

147. The method according to claim 118 further comprising:
subjecting the sample to nucleic acid fragmentation prior to capturing.

148. The method according to claim 118, wherein the primary ligase detection reaction mixture is subjected to one ligase detection reaction cycle.

149. The method according to claim 118, wherein one or both of the oligonucleotide probes in the primary oligonucleotide probe set contain a plurality of detection oligonucleotide probe-specific portions or their complements.

150. The method according to claim 118, wherein the target-specific portions of the primary oligonucleotide probe sets have a 3′ discriminating base.

151. The method according to claim 118, wherein the solid support is a paramagnetic bead and said method further comprises:
recovering the paramagnetic beads by magnetic attraction after said capturing and
placing the recovered paramagnetic beads on a slide.

152. The method according to claim 118, wherein within one or more of the ligase detection reaction cycles includes internal cycles comprising a hybridization treatment, wherein the oligonucleotide probe sets hybridize at adjacent positions in a base-specific manner to their respective target nucleic acid molecules, if present in the sample, and ligate to one another to form a ligation product a probe denaturation treatment, wherein, when the reaction mixture is heated to a temperature above that at which each target-specific portion melts, unligated probes separate from the nucleic acid molecules to which they are hybridized and when heated to a temperature below the melting temperature of each target-specific portion, ligation products hybridized to nucleic acid molecules accumulate with each successive internal cycle to provide a quantitative measure of the relative level of two or more target nucleic acid molecules in the sample.

153. The method according to claim 118, wherein the detection oligonucleotide probe-specific portions of the primary ligation products or complements thereof is selected from the set of sequences shown in FIGS. 108A, 109A, 110A, or 111A or their complements.

154. The method according to claim 118 further comprising:
ligating the detection oligonucleotide probes hybridized to the primary ligation product after said contacting the primary ligation products and the detection oligonucleotide probes.

155. The method according to claim 118 further comprising:
providing a linker containing a capture group;
blending the sample, the linker, a restriction endonuclease, and a ligase to form a ligase/restriction reaction mixture;
incubating the ligase/restriction reaction mixture under conditions to permit cleavage of DNA in the sample and ligation of linkers containing capture groups onto ends of resulting fragments.

156. The method according to claim 155 further comprising:
removing unligated linkers from the ligase/restriction reaction mixture after said incubating by filtration.

157. The method according to claim 118 further comprising:
providing a nucleotide containing a capture group;
providing a polymerase;
providing a restriction endonuclease which generates 5′ overhangs;
blending the sample, the nucleotide containing a capture group, the restriction endonuclease, and the polymerase to form a polymerase/restriction reaction mixture; and
incubating the polymerase/restriction reaction mixture under conditions to permit cleavage of DNA in the sample and extension with the nucleotide containing a capture group onto ends of resulting fragments.

158. A method for identifying one or more target nucleic acid molecules differing by one or more single-base changes, insertions, deletions, or translocations in a plurality of nucleic acid molecules comprising:
providing a test sample potentially containing one or more target nucleic acid molecules;
providing one or more primary oligonucleotide probe sets, each set characterized by (a) a first oligonucleotide probe, having a target-specific portion and a 5′ upstream portion containing one or more translational oligonucleotide probes or their complements, and (b) a second oligonucleotide probe, having a target-specific portion, wherein the oligonucleotide probes in a particular primary oligonucleotide set are suitable for ligation together when hybridized to a corresponding target nucleic acid molecule, but have a mismatch which interferes with such ligation when hybridized to any other nucleic acid molecule present in the sample, and such that each probe set contains a unique combination of translational oligonucleotide probes or their complements;
providing a ligase;
blending the sample, the one or more primary oligonucleotide probe sets, and the ligase to form a primary ligase detection reaction mixture;
subjecting the primary ligase detection reaction mixture to one or more ligase detection reaction cycles comprising a denaturation treatment, wherein any hybridized oligonucleotides are separated from the target nucleic acid molecules, and a hybridization treatment, wherein the oligonucleotide probes or the primary oligonucleotide probe sets hybridize in a base-specific manner to their respective target nucleic acid molecules, if present in the sample, and ligate to one another to form a primary ligation product containing (a) the translational oligonucleotide-specific portion or their complements and (b) the target-specific portions, with the ligation product for each primary oligonculeotide probe set being distinguishable from other nucleic acids in the primary ligase detection reaction mixture by virtue of containing a unique combination of translational oligonucleotide portions or their complements, and, wherein the primary oligonucleotide probe sets may hybridize to nucleic acid molecules in the sample other than their respective target nucleic acid molecules but do not ligate together due to a presence of one or more mismatches and individually separate during the denaturation treatment;
providing one or more secondary oligonucleotide probe sets, each set characterized by (a) a first oligonucleotide probe, having a translational oligonucleotide-specific portion and a 5′ upstream portion complementary to one or more detection oligonucleotide probe sequences and (b) a second oligonucleotide probe, having a translational oligonucleotide-specific portion, and a 3′ downstream portion complementary to one or more detection oligonucleotide probe sequences, wherein the oligonucleotide probes in a particular secondary oligonucleotide probe set are suitable for ligation together when hybridized to a corresponding complement of a primary ligation product, but have a mismatch which interferes with such ligation when hybridized to any other nucleic acid molecule present in the sample, and such that each secondary oligonucleotide probe set contains a unique set of 5′ upstream and 3′ downstream portions, blending the primary ligation products, the plurality of secondary oligonucleotide probe sets, and the ligase to form a secondary ligase detection reaction mixture;
subjecting the secondary ligase detection reaction mixture to one ligase detection reaction cycle comprising a denaturation treatment, wherein any hybridized oligonucleotide probes are separated from nucleic acid molecules to which they are hybridized, and a hybridization treatment, wherein the secondary oligonucleotide probe sets hybridize in a base-specific manner to their corresponding primary ligation products, if present, and ligate to one another to form a secondary ligation product containing (a) the 5′ upstream portion complementary to one or more distinct oligonucleotide probe sequences, (b) the upstream translational oligonucleotide-specific portion, (c) the downstream translational oligonucleotide-specific portion, and (d) the 3′ downstream portion complementary to one or more distinct oligonucleotide probe sequences, wherein the secondary oligonucleotide probe sets may hybridize to nucleic acid molecules other than their respective primary ligation products but do not ligate together due to a presence of one or more mismatches and individually separate during the denaturation treatment;
providing detection oligonucleotide probes which bind to the 5′ upstream portion and the 3′ downstream portion, wherein each detection oligonucleotide probe has a reporter label, such that each of the products has a unique detectable encryption code;
contacting the secondary ligation products and the detection oligonucleotide probes under conditions effective to permit hybridization of the detection oligonucleotide probes to the ligation products so that labeled, secondary ligation products are formed; and
detecting the reporter labels on the labeled, secondary ligation products, thereby indicating a presence of one or more target nucleic acid molecule in the sample, wherein sequences differing by one or more single-base changes, insertions, deletions, or translocations are discriminated from one another during the primary ligase detection reaction and the discriminated sequences are detected as a result of each different labeled secondary ligation product having a unique encryption code with a different pattern of detectable emission spectra.

159. The method according to claim 158, wherein relative amounts of one or more of a plurality of target nucleic acid molecules in the test sample, differing by one or more single-base changes, insertions, deletions, or translocations, are quantified by comparison with a reference sample having reference target nucleic acid molecules, said method comprising:
providing one or more reference oligonucleotide probe sets, which differ from the primary oligonucleotide probe sets, wherein each of the reference oligonucleotide probe sets are characterized by (a) a first oligonucleotide probe having a reference target-specific portion and a 5′ upstream portion containing one or more translational oligonucleotide probes or their complements and (b) a second oligonucleotide probe having a reference target-specific portion, wherein the oligonucleotide probes in a particular reference oligonucleotide probe set are suitable for ligation together when hybridized to one another on a corresponding reference target nucleic acid molecule, but have a mismatch which interferes with such ligation when hybridized to any other nucleic acid molecule present in the reference sample;
blending the reference sample, the one or more reference oligonucleotide probe sets, and the ligase to form a reference ligase detection reaction mixture;
subjecting the reference ligase detection reaction mixture to one or more ligase detection reaction cycles comprising a denaturation treatment, wherein any hybridized oligonucleotides are separated from reference target nucleic acid molecules, and a hybridization treatment, wherein the reference oligonucleotide probe sets hybridize in a base-specific manner to their respective reference sample target nucleic acid molecule, if present in the sample, and ligate to one another to form a reference ligation product sequence containing (a) the reference sample-specific portions and (b) the 5′ upstream portion containing one or more translation oligonucleotide probes or their complements with the reference ligation product for each reference oligonucleotide probe set being distinguishable from other nucleic acid molecules in the reference ligase detection reaction mixture, and, wherein the reference oligonucleotide probe sets may hybridize to nucleic acid molecules in the reference sample other than their respective reference target nucleic acid molecules but do not ligate together due to a presence of one or more mismatches and individually separate during the denaturation treatment;
blending the primary and reference ligase detection reaction mixtures after subjecting them to one or more ligase detection reaction cycles and before said blending the primary ligation products, the plurality of secondary oligonucleotide probe sets, and the ligase, said subjecting the secondary ligase detection reaction mixture to one or more ligase detection reaction cycles, said contacting the secondary ligation products and the detection oligonucleotide probes, whereby the blended primary and reference ligation products are subjected to said detecting; and
comparing relative amounts of the reporter labels on the secondary and reference ligation products, to provide a quantitative measure of the relative level of the one or more target nucleic acid molecules in the test sample compared with the reference sample as a result of each different labeled ligation product having a unique encryption code.

160. The method according to claim 158, wherein the detection oligonucleotide probes are in a form of one or more of detection oligonucleotide probe sets, each set characterized by (a) a first oligonucleotide probe and (b) a second oligonucleotide probe, wherein the detection oligonucleotide probes in a particular set are suitable for ligation together when hybridized to the secondary ligation product with corresponding detection oligonucleotide specific portions, but have a mismatch which interferes with such ligation when hybridized to any other nucleic acid molecule present and such that each detection oligonucleotide probe set contains a unique combination of detection oligonucleotide probes, wherein said contacting the secondary ligation products and the detection oligonucleotide probes comprises:
blending the secondary ligation products, the one or more detection oligonucleotide probe sets, and the ligase to form a tertiary ligase detection reaction mixture and
subjecting the tertiary ligase detection reaction mixture to one or more ligase detection reaction cycles comprising a denaturation treatment, wherein any hybridized oligonucleotides are separated from the secondary ligation products, and a hybridization treatment, wherein the one or more detection oligonucleotide probe sets hybridize in a base-specific manner to their respective secondary ligation products, if present, and ligate to one another to form a tertiary ligation complex containing the one or more detection oligonucleotide probes or their complements hybridized to the corresponding secondary ligation product comprising the 5′ upstream portion, the upstream translational oligonucleotide-specific portion, the downstream translational oligonucleotide-specific portion, and the 3′ downstream portion, with the tertiary ligation complex for each one or more detection oligonucleotide probe set being distinguished from other nucleic acid molecules in the tertiary ligase detection reaction mixture by virtue of their containing a unique combination of detection oligonucleotide probes, and wherein the detection oligonucleotide probe sets may hybridize to nucleic acid molecules other than their respective secondary ligation products but do not ligate together due to a presence of one or more mismatches and individually separate during the denaturation treatment.

161. The method according to claim 158, wherein one of the secondary oligonucleotide probes in the secondary oligonucleotide probe set contains one or more detection oligonucleotide probe-specific portions or their complements.

162. The method according to claim 158, wherein both of the oligonucleotide probes in the secondary oligonucleotide probe set contain one or more detection oligonucleotide probe-specific portions or their complements.

163. The method according to claim 158, wherein the reporter labels are nanocrystals and said detecting comprises:
exciting the nanocrystals to produce emission spectra and evaluating the emission spectra of the nanocrystals.

164. The method according to claim 158, wherein the ligase is selected from the group consisting of Thermus aquaticus ligase, Thermus thermophilus ligase, AK16D thermostable ligase, E. coli ligase, T4 ligase, and Pyrococcus ligase.

165. The method according to claim 158, wherein the target-specific portions of the oligonucleotide probes each have a hybridization temperature of 20-85° C.

166. The method according to claim 158, wherein the target-specific portions of the oligonucleotide probes are 15 to 30 nucleotides long.

167. The method according to claim 158, wherein the oligonucleotide probe sets are selected from the group consisting of ribonucleotides, deoxyribonucleotides, modified ribonucleotides, modified deoxyribonucleotides, peptide nucleic acids, modified peptide nucleotide analogues, modified phosphate-sugar backbone oligonucleotides, nucleotide analogues, and mixtures thereof.

168. The method according to claim 158, wherein said method is used to detect infectious diseases caused by bacterial, viral, parasitic, and fungal infectious agents.

169. The method according to claim 168, wherein the infectious disease is caused by a bacterium selected from the group consisting of Escherichia coli, Salmonella, Shigella, Klebsiella, Pseudomonas, Listeria monocytogenes, Mycobacterium tuberculosis, Mycobacterium avium-intracellulare, Yersinia, Francisella, Pasteurella, Brucella, Clostridia, Bordetella pertussis, Bacteroides, Staphylococcus aureus, Streptococcus pneumonia, B-Hemolytic strep., Corynebacteria, Legionella, Mycoplasma, Ureaplasma, Chlamydia, Neisseria gonorrhea, Neisseria meningitides, Hemophilus influenza, Enterococcus faecalis, Proteus vulgaris, Proteus mirabilis, Helicobacter pylori, Treponema palladium, Borrelia burgdorferi, Borrelia recurrentis, Rickettsial pathogens, Nocardia, and Actinomycetes.

170. The method according to claim 168, wherein the infectious disease is caused by a fungal infectious agent selected from the group consisting of Cryptococcus neoformans, Blastomyces dermatitidis, Histoplasma capsulatum, Coccidioides immitis, Paracoccicioides brasiliensis, Candida albicans, Aspergillus fumigautus, Phycomycetes (Rhizopus), Sporothrix schenckii, Chromomycosis, and Maduromycosis.

171. The method according to claim 168, wherein the infectious disease is caused by a viral infectious agent selected from the group consisting of human immunodeficiency virus, human T-cell lymphocytotrophic virus, hepatitis viruses, Epstein-Barr Virus, cytomegalovirus, human papillomaviruses, orthomyxo viruses, paramyxo viruses, adenoviruses, corona viruses, rhabdo viruses, polio viruses, toga viruses, bunya viruses, arena viruses, rubella viruses, and reo viruses.

172. The method according to claim 168, wherein the infectious disease is caused by a parasitic infectious agent selected from the group consisting of Plasmodium falciparum, Plasmodium malaria, Plasmodium vivax, Plasmodium ovale, Onchoverva volvulus, Leishmania, Trypanosoma spp., Schistosoma spp., Entamoeba histolytica, Cryptosporidum, Giardia spp., Trichimonas spp., Balatidium coli, Wuchereria bancrofti, Toxoplasma spp., Enterobius vermicularis, Ascaris lumbricoides, Trichuris trichiura, Dracunculus medinesis, trematodes, Diphyllobothrium latum, Taenia spp., Pneumocystis carinii, and Necator americanis.

173. The method according to claim 158, wherein said method is used to detect genetic diseases.

174. The method according to claim 173, wherein the genetic disease is selected from the group consisting of 21 hydroxylase deficiency, cystic fibrosis, Fragile X Syndrome, Turner Syndrome, Duchenne Muscular Dystrophy, Down Syndrome, heart disease, single gene diseases, HLA typing, phenylketonuria, sickle cell anemia, Tay-Sachs Syndrome, thalassemia, Klinefelter's Syndrome, Huntington's Disease, autoimmune diseases, lipidosis, obesity defects, hemophilia, inborn errors in metabolism, and diabetes.

175. The method according to claim 158, wherein said method is used to detect cancer involving oncogenes, tumor suppressor genes, or genes involved in DNA amplification, replication, recombination, or repair, or SNPs or adjacent regions that serve as markers for copy number changes or loss of heterozygosity in such genes.

176. The method according to claim 175, wherein the cancer is associated with a gene selected from the group consisting of APC, AKT, ALT, AXL, BAX, Bcl2, Beta-Catenin, bFGF, BRCA1, BRCA2, Braf, Cdc25A, Cdk4, c-Fos, c-Jun, c-Kit, C-met, c-Myc, c-Ret, CSF1R, CSF2, c-Src, CYCD-CDK4, CYCE-CDK2, Cyclin D1, Cyclin E1, Cytokines, Dishevelled, E2F, E-Cadherin, EGFR, elF4E, ErbB-3, ErbB-4, FGFR-1, FGFR-2, FGFR-3, FGFR-4, FH4 (VEGFR-3), Fit-1 (VEGFR-1), Flk-1 (VEGFR-2), Frizzled, G Proteins, GPCR, GRB2-SOS, GSK3 beta, Her2-neu, HGF, HSP27, HSP70, IFGII, IGFR1, K-ras, H-ras, N-ras, LT, MAPK, MDM2, MEK, MLH1, MSH2, MSH6, MYC, p15^{INK4b}, p16^{Ink4a}, p19^{ARF}, p21^{Cip}, p27^{Kip}, p53, PDGFR alpha, PDGFR beta, PI3K, PP2A, PTEN, RAF, RAS, RB, Ron, RSK, RTK, Ski, Smad2, Smad4, ST, surviving, TbRII, TCF, Tcf4, TERT, TGF-Beta, TGF-Beta R, TIC2, TOR, VEGF, WAF1, Wisp-1, Wisp-3, WNT, or SNPs or adjacent regions that serve as markers for copy number changes or loss of heterozygosity in such genes, human papillomavirus Types 16 and 18, leukemia, colon cancer, breast cancer, lung cancer, prostate cancer, brain tumors, central nervous system tumors, bladder tumors, melanomas, liver cancer, osteosarcoma and other bone cancers, testicular and ovarian carcinomas, ENT tumors, and loss of heterozygosity.

177. The method according to claim 158, wherein said method is used for environmental monitoring, forensics, and food and feed industry monitoring.

178. The method according to claim 158 further comprising:
providing a plurality of solid supports;
contacting the primary ligation products, copies of the primary ligation products, or complements thereof with the plurality of solid supports, prior to blending the primary ligation products, the plurality of oligonucleotide probe sets, and the ligase, under conditions effective to immobilize the primary ligation products, copies of the primary ligation products, or complements thereof to the solid supports; and
producing complements of the immobilized primary ligation products.

179. The method according to claim 178, wherein said producing complements comprises:
providing a universal primer complementary to the immobilized primary ligation product;
providing a polymerase;
blending the immobilized primary ligation product, the universal primer, and the polymerase to form an isothermal amplification mixture; and
subjecting the isothermal amplification mixture to an isothermal amplification procedure to produce a complement of the primary ligation product.

180. The method according to claim 179, wherein the polymerase is Bst polymerase.

181. The method according to claim 179 further comprising:
subjecting the complement of the primary ligation product to restriction endonuclease digestion to cleave the complement of the primary ligation product.

182. The method according to claim 178, wherein the second oligonucleotide probe of the first oligonucleotide probe set has a binding agent which is incorporated in any primary ligation product, and the solid support has one or more attached binding partner to the binding agent, whereby said contacting the primary ligation products, copies of the primary ligation products, or complements thereof with the plurality of solid supports is carried out under conditions effective for the binding agent and its binding partner to become coupled together, thereby immobilizing the primary ligation products to the solid support.

183. The method according to claim 182, wherein the binding agent-binding partner are selected from the group consisting of antibody-antigen binding partners, streptavidin-biotin binding partners, complementary oligonucleotides, amino group and EDC activated carboxylic acid group, thiol based binding partners, histidine moieties and nickel-NTA, and other chemical moieties that may be covalently or ionically linked to each other.

184. The method according to claim 178, wherein the solid support is a paramagnetic bead and said method further comprises:
recovering the paramagnetic beads by magnetic attraction after said contacting the primary ligation products, copies of the primary ligation products, or complements thereof with the plurality of solid supports and
placing the recovered paramagnetic beads on a microscope slide.

185. The method according to claim 158, wherein the second oligonucleotide probe of the primary oligonucleotide probe set has an addressable array-specific portion or its complement, said method further comprising:
providing a solid support with capture oligonucleotide probes immobilized at different sites, wherein the capture oligonulceotide probes have nucleotide sequences complementary to the addressable array-specific portions or their complement and
contacting the primary ligation products, copies of the primary ligation products, or complements thereof with the solid support with capture oligonucleotides, prior to said blending the primary ligation products, the plurality of second oligonucleotide probe sets, and the ligase, under conditions effective to hybridize the primary ligation products, copies of primary ligation products, or complements thereof to the capture oligonucleotide probes in a base-specific manner, thereby capturing the primary ligation products, copies of the primary ligation products, or complements thereof on the solid support at the site with the complementary capture oligonucleotide.

186. The method according to claim 185, wherein each of the capture probes are provided with a hairpin oligonucleotide and said method further comprises:
ligating the hairpin oligonucleotide to the primary ligation products after said contacting the primary ligation products, copies of primary ligation products, or complements thereof with the solid support.

187. The method according to claim 158, wherein the primary ligase detection reaction mixture is subjected to one ligase detection reaction cycle.

188. The method according to claim 158, wherein the secondary ligase detection reaction mixture is subjected to one ligase detection reaction cycle.

189. The method according to claim 158, wherein a plurality of primary oligonucleotide probe sets are utilized with each set characterized by (a) the first oligonucleotide probes being identical in each oligonucleotide probe set and (b) the second oligonucleotide probes in each set having a target-specific portion which is different in each second oligonucleotide probe at a location where single-base changes, insertions, deletions, or translocations occur.

190. The method according to claim 158, wherein the relative amounts of two or of a plurality of nucleic acid molecules, differing by one or more single-base changes, insertions, deletions, or translocations and present in a sample in unknown amounts with a plurality of target nucleic acid molecules being quantified, said method further comprising;
quantifying the relative amount of the ligation products, after said detecting and
comparing the relative amounts of the ligation products to provide a quantitative measure of the relative amounts of two or a plurality of target nucleic acid molecules in the sample.

191. The method according to claim 158, wherein within one or more of the ligase detection reaction cycles includes internal cycles comprising a hybridization treatment, wherein the oligonucleotide probe sets hybridize at adjacent positions in a base-specific manner to their respective target nucleic acid molecules, if present in the sample, and ligate to one another to form a ligation product and a probe denaturation treatment, wherein, when the ligase detection reaction mixture is heated to a temperature above that at which each target-specific portion melts, so unligated probes separate from the nucleic acid molecules to which they are hybridized, and when heated to a temperature below the melting temperature of each target-specific portion, ligation products hybridized to nucleic acid molecules accumulate with each successive internal cycle to provide a quantitative measure of the relative level of two or more target nucleic acid molecules in the sample.

192. The method according to claim 158, wherein the test sample comprises nucleic acid molecules isolated from a tumor, and the reference sample comprises nucleic acid molecules isolated from normal tissue or matched blood, wherein the relative level of the one or more target nucleic acid molecules in the test sample compared with the reference sample provides a measure of allele imbalance in the tumor at the corresponding loci.

193. The method according to claim 159, wherein the target specific portions of the primary oligonucleotide probe sets have a 3′ discriminating base.

194. The method according to claim 158, wherein the detection oligonucleotide probe-specific portions of the primary ligation products or complements thereof is selected from the set of sequences shown in FIGS. 121A or 123 A.

195. The method according to claim 158 further comprising:
ligating the detection oligonucleotide probes hybridized to a particular secondary ligation product after said contacting the secondary ligation products, copies of secondary ligation products, or complements thereof and the detection oligonucleotide probes.

196. The method according to claim 158 further comprising:
separating any unligated oligonucleotide probes from the ligation products.

197. A method of generating a linearly amplified representation of a whole genome comprising:
providing genomic DNA molecules;
subjecting the genomic DNA molecules to enzymatic digestion with a first restriction endonuclease to produce a degenerate oligonucleotide fragment with a degenerate overhang, wherein said subjecting is carried out in the presence of a hairpin linker containing an overhang complementary to the degenerate overhang and a modification complementing the 5′ end of the degenerate oligonucleotide fragment within a second restriction site, wherein the modification blocks restriction endonuclease cleavage on the 5′ side, but not the 3′ side, of the degenerate oligonucleotide fragment, a ligase, and a first restriction endonuclease, under conditions effective to permit cleavage of genomic DNA molecules and ligation of the hairpin linker containing the second restriction site onto ends of the degenerate oligonucleotide fragments;
removing unligated linkers;
providing a second restriction endonuclease;
providing a processive DNA polymerase with strand-displacement activity;
blending the enzymatically digested genomic DNA molecules, the second restriction endonuclease, and the polymerase to form a representational genome amplification mixture, and
incubating the representational genome amplification mixture under conditions effective to permit the second restriction endonuclease to nick the hairpin DNA on its unmodified strand and the polymerase to extend the degenerate oligonucleotide fragments at their free 3′ ends, wherein, as the polymerase extends and displaces the pre-existing strand, it reforms the second restriction site allowing for repeated nicking/polymerase extension and linear amplification of a representation of the whole genome.

198. A method of designing a plurality of labeled detection oligonucleotide probes for use in combinations of one to four or more probes to identify or quantify complementary sequences which will hybridize with little mismatch, wherein the plurality labeled oligonucleotide probes have melting temperatures within a narrow range, said method comprising:
providing a first set of a plurality of tetramers of four nucleotides linked together, wherein (1) each tetramer within the set differs from all other tetramers in the set by at least two nucleotide bases, (2) no two tetramers within a set are complementary to one another, (3) no tetramers within a set are palindromic or dinucleotide repeats, and (4) no tetramer within a set has less than one or more than three G and C nucleotides;
linking groups of 2 to 4 tetramers from the first set together to form a collection of multimer units;
removing from the collection of multimer units all multimer units formed from the same tetramer and all multimer units having a melting temperature in ° C. of less than 6 times the number of tetramers forming a multimer unit, to form a modified collection of multimer units;
selecting from the modified collection of multimer units a second collection of multimer units such that no consecutive tetramer pair is used twice;
adding 1 or 2 tetramers to either or both ends of the second collection of multimers to generate a new set of modified multimer units with higher melting temperatures, such that no consecutive tetramer pair is used twice;
arranging the new set of modified multimer units in a list in order of melting temperature;
removing from the set of modified multimer units those units having a melting temperature in ° C. of less than 12 times the number of tetramers and more than 18 times the number of tetramers, to form a further collection of multimer units; and
linking reporter labels to the further collection of multimer units, to form labeled detection oligonucleotide probes.

199. The method according to claim 198, wherein the reporter labels are nanocrystals.

200. The method according to claim 198, wherein the further collection of multimer units is shown in FIG. 96.

201. The method according to claim 198, wherein the set of tetramers is shown in Table 1 and complements thereof.

202. The method according to claim 198, wherein the oligonucleotide probes are selected from the group consisting of ribonucleotides, deoxyribonucleotides, modified ribonucleotides, modified deoxyribonucleotides, peptide nucleic acids, modified peptide nucleotide analogues, modified phosphate-sugar backbone oligonucleotides, nucleotide analogues, and mixtures thereof.

203. A method of designing a plurality of translational oligonucleotides for attachment to target-specific oligonucleotide probes to identify or quantify complementary sequences which will hybridize with little mismatch, wherein the plural translating oligonucleotide sequences have melting temperatures within a narrow range, said method comprising:
providing a first set of a plurality of tetramers of four nucleotides linked together, wherein (1) each tetramer within the set differs from all other tetramers in the set by at least two nucleotide bases, (2) no two tetramers within a set are complementary to one another, (3) no tetramers within a set are palindromic or dinucleotide repeats, and (4) no tetramer within a set has less than one or more than three G and C nucleotides;
linking groups of 2 to 4 tetramers from the first set together to form a collection of multimer units;
removing from the collection of multimer units all multimer units formed from the same tetramer and all multimer units having a melting temperature in ° C. of less than 3 times the number of tetramers forming a multimer unit, to form a modified collection of multimer units;
arranging the modified collection of multimer units in a list in order of melting temperature;
randomizing, in 0.1° C. increments of melting temperature, the order of the modified collection of multimer units;
dividing alternating multimer units in the list into first and second subcollections, each arranged in order of melting temperature;
inverting the order of the second subcollection;
linking in order the first subcollection of multimer units to the inverted second subcollection of multimer units in order to form a collection of double multimer units;
arranging the collection of double multimer units in a list in order of melting temperature;
removing from the ordered collection of double multimer units those units having a melting temperature in ° C. of less than 12 times the number of tetramers and more than 18 times the number of tetramers, to form a modified collection of multimer units; and
linking the double multimer units to a target-specific oligonucleotide probe.

204. The method according to claim 203, wherein the collection of double multimer units is shown in FIG. 118A.

205. The method according to claim 203, wherein the set of tetramers is shown in Table 1 and complements thereof.

206. The method according to claim 203, wherein the oligonucleotide probes are selected from the group consisting of ribonucleotides, deoxyribonucleotides, modified ribonucleotides, modified deoxyribonucleotides, peptide nucleic acids, modified peptide nucleotide analogues, modified phosphate-sugar backbone oligonucleotides, nucleotide analogues, and mixtures thereof

207. A collection of labeled detection oligonucleotide probes comprising:
a collection of detection oligonucleotide probes to which complementary oligonucleotide probes will hybridize, within a narrow temperature range of greater than 24° C. with little mismatch, wherein the oligonucleotide probes are formed from sets of tetramers where (1) each tetramer within the set differs from all other tetramers in the set by at least two nucleotide bases, (2) no two tetramers within a set are complementary to one another, (3) no tetramers within a set are palindromic or dinucleotide repeats, and (4) no tetramer within a set has less than one or more than three G and C nucleotides, and wherein the collection of oligonucleotide probes has oligonucleotides having a melting temperature in ° C. less than 12 times the number of tetramers and more than 18 times the number of tetramers and
reporter labels linked to each of the oligonucleotide probes in the collection.

208. The collection according to claim 207, wherein the reporter labels are nanocrystals.

209. The collection according to claim 206, wherein the collection of detection oligonucleotide probes is shown in FIG. 119A.

210. The collection according to claim 207, wherein the set of tetramers is shown in Table 1 and complements thereof.

211. The method according to claim 207, wherein the oligonucleotide probes are selected from the group consisting of ribonucleotides, deoxyribonucleotides, modified ribonucleotides, modified deoxyribonucleotides, peptide nucleic acids, modified peptide nucleotide analogues, modified phosphate-sugar backbone oligonucleotides, nucleotide analogues, and mixtures thereof.

212. A collection of fusion oligonucleotide probes comprising:
a collection of translational oligonucleotide probes to which complementary oligonucleotide probes will hybridize, within a narrow temperature range of greater than 24° C. with little mismatch, wherein the oligonucleotide probes are formed from sets of tetramers where (1) each tetramer within the set differs from all other tetramers in the set by at least two nucleotide bases, (2) no two tetramers within a set are complementary to one another, and (3) no tetramers within a set are palindromic or dinucleotide repeats, and (4) no tetramer within a set has less than one or more than three G and C nucleotides, and wherein the collection of oligonucleotide probes has oligonucleotides having a melting temperature in ° C. less than 12 times the number of tetramers and more than 18 times the number of tetramers removed and
target-specific oligonucleotide probes linked to each of the oligonucleotide probes in the collection.

213. The collection according to claim 212, wherein the collection of translation oligonucleotide probes is shown in FIGS. 121A and 123A.

214. The collection according to claim 212, wherein the set of tetramers is shown in Table 1 and complements thereof.

215. The method according to claim 212, wherein the oligonucleotide probes are selected from the group consisting of ribonucleotides, deoxyribonucleotides, modified ribonucleotides, modified deoxyribonucleotides, peptide nucleic acids, modified peptide nucleotide analogues, modified phosphate-sugar backbone oligonucleotides, nucleotide analogues, and mixtures thereof

The application's sequence listing, which the Patent Office published only in electronic form, follows.

SEQUENCE LISTING (38895 sequences)

SEQ ID NO: 1 - DNA, 16 bp, Artificial
  oligonucleotide probe
tcgttgcgcacggctt

SEQ ID NO: 2 - DNA, 16 bp, Artificial
  oligonucleotide probe
cgaaagccgcaatgcg

SEQ ID NO: 3 - DNA, 16 bp, Artificial
  oligonucleotide probe
tcccggacgcttgcaa

SEQ ID NO: 4 - DNA, 16 bp, Artificial
  oligonucleotide probe
tgcgcttgcagccgtt

SEQ ID NO: 5 - DNA, 16 bp, Artificial
  oligonucleotide probe
cacggtgcgcaaagcc

SEQ ID NO: 6 - DNA, 16 bp, Artificial
  oligonucleotide probe
cagcgtgctgcgccat

SEQ ID NO: 7 - DNA, 16 bp, Artificial
  oligonucleotide probe
acggcgtttccccgaa

SEQ ID NO: 8 - DNA, 16 bp, Artificial
  oligonucleotide probe
agcccagccgaaacgg

SEQ ID NO: 9 - DNA, 16 bp, Artificial
  oligonucleotide probe
tgcggcaaatcgcgtt

SEQ ID NO: 10 - DNA, 16 bp, Artificial
  oligonucleotide probe
cagcgcaaacggcgaa

SEQ ID NO: 11 - DNA, 16 bp, Artificial
  oligonucleotide probe
gtgcgctttgcgacgg

SEQ ID NO: 12 - DNA, 16 bp, Artificial
  oligonucleotide probe
acgggaccgtgcagcc

SEQ ID NO: 13 - DNA, 16 bp, Artificial
  oligonucleotide probe
cgtttgcgcgaatccc

SEQ ID NO: 14 - DNA, 16 bp, Artificial
  oligonucleotide probe
tccccacgccatgcaa

SEQ ID NO: 15 - DNA, 16 bp, Artificial
  oligonucleotide probe
cacgcagctgcggtgc

SEQ ID NO: 16 - DNA, 16 bp, Artificial
  oligonucleotide probe
agccgctttcccgtgc

SEQ ID NO: 17 - DNA, 16 bp, Artificial
  oligonucleotide probe
aagccgtgcgcaacga

SEQ ID NO: 18 - DNA, 16 bp, Artificial
  oligonucleotide probe
cgcattgcggctttcg

SEQ ID NO: 19 - DNA, 16 bp, Artificial
  oligonucleotide probe
ttgcaagcgtccggga

SEQ ID NO: 20 - DNA, 16 bp, Artificial
  oligonucleotide probe
aacggctgcaagcgca

SEQ ID NO: 21 - DNA, 16 bp, Artificial
  oligonucleotide probe
ggctttgcgcaccgtg

SEQ ID NO: 22 - DNA, 16 bp, Artificial
  oligonucleotide probe
atggcgcagcacgctg

SEQ ID NO: 23 - DNA, 16 bp, Artificial
  oligonucleotide probe
ttcggggaaacgccgt

SEQ ID NO: 24 - DNA, 16 bp, Artificial
  oligonucleotide probe
ccgtttcggctgggct

SEQ ID NO: 25 - DNA, 16 bp, Artificial
  oligonucleotide probe
aacgcgatttgccgca

SEQ ID NO: 26 - DNA, 16 bp, Artificial
  oligonucleotide probe
ttcgccgtttgcgctg

SEQ ID NO: 27 - DNA, 16 bp, Artificial
  oligonucleotide probe
ccgtcgcaaagcgcac

SEQ ID NO: 28 - DNA, 16 bp, Artificial
  oligonucleotide probe
ggctgcacggtcccgt

SEQ ID NO: 29 - DNA, 16 bp, Artificial
  oligonucleotide probe
gggattcgcgcaaacg

SEQ ID NO: 30 - DNA, 16 bp, Artificial
  oligonucleotide probe
ttgcatggcgtgggga

SEQ ID NO: 31 - DNA, 16 bp, Artificial
  oligonucleotide probe
gcaccgcagctgcgtg

SEQ ID NO: 32 - DNA, 16 bp, Artificial
  oligonucleotide probe
gcacgggaaagcggct

SEQ ID NO: 33 - DNA, 48 bp, Artificial
  oligonucleotide probe
aagccgtgcgcaacgacgcattgcggctttcgttgcaagcgtccggga

SEQ ID NO: 34 - DNA, 48 bp, Artificial
  oligonucleotide probe
aagccgtgcgcaacgacgcattgcggctttcgaacggctgcaagcgca

SEQ ID NO: 35 - DNA, 48 bp, Artificial
  oligonucleotide probe
aagccgtgcgcaacgattgcaagcgtccgggaaacggctgcaagcgca

SEQ ID NO: 36 - DNA, 48 bp, Artificial
  oligonucleotide probe
cgcattgcggctttcgttgcaagcgtccgggaaacggctgcaagcgca

SEQ ID NO: 37 - DNA, 48 bp, Artificial
  oligonucleotide probe
aagccgtgcgcaacgaaagccgtgcgcaacgaaacggctgcaagcgca

SEQ ID NO: 38 - DNA, 48 bp, Artificial
  oligonucleotide probe
aacggctgcaagcgcaaacggctgcaagcgcacgcattgcggctttcg

SEQ ID NO: 39 - DNA, 48 bp, Artificial
  oligonucleotide probe
aacggctgcaagcgcaaacggctgcaagcgcattgcaagcgtccggga

SEQ ID NO: 40 - DNA, 48 bp, Artificial
  oligonucleotide probe
ttgcaagcgtccgggattgcaagcgtccgggaaagccgtgcgcaacga

SEQ ID NO: 41 - DNA, 48 bp, Artificial
  oligonucleotide probe
aacggctgcaagcgcaaacggctgcaagcgcaaagccgtgcgcaacga

SEQ ID NO: 42 - DNA, 48 bp, Artificial
  oligonucleotide probe
aagccgtgcgcaacgaaagccgtgcgcaacgacgcattgcggctttcg

SEQ ID NO: 43 - DNA, 48 bp, Artificial
  oligonucleotide probe
cgcattgcggctttcgcgcattgcggctttcgaacggctgcaagcgca

SEQ ID NO: 44 - DNA, 48 bp, Artificial
  oligonucleotide probe
cgcattgcggctttcgcgcattgcggctttcgaagccgtgcgcaacga

SEQ ID NO: 45 - DNA, 48 bp, Artificial
  oligonucleotide probe
ttgcaagcgtccgggattgcaagcgtccgggacgcattgcggctttcg

SEQ ID NO: 46 - DNA, 48 bp, Artificial
  oligonucleotide probe
cgcattgcggctttcgcgcattgcggctttcgttgcaagcgtccggga

SEQ ID NO: 47 - DNA, 48 bp, Artificial
  oligonucleotide probe
aagccgtgcgcaacgaaagccgtgcgcaacgattgcaagcgtccggga

SEQ ID NO: 48 - DNA, 48 bp, Artificial
  oligonucleotide probe
ttgcaagcgtccgggattgcaagcgtccgggaaacggctgcaagcgca

SEQ ID NO: 49 - DNA, 48 bp, Artificial
  oligonucleotide probe
aagccgtgcgcaacgacgcattgcggctttcgccgtttcggctgggct

SEQ ID NO: 50 - DNA, 48 bp, Artificial
  oligonucleotide probe
ggctttgcgcaccgtgttcggggaaacgccgtccgtttcggctgggct

SEQ ID NO: 51 - DNA, 48 bp, Artificial
  oligonucleotide probe
ttgcaagcgtccgggaatggcgcagcacgctgttcggggaaacgccgt

SEQ ID NO: 52 - DNA, 48 bp, Artificial
  oligonucleotide probe
ttgcaagcgtccgggattcggggaaacgccgtccgtttcggctgggct

SEQ ID NO: 53 - DNA, 48 bp, Artificial
  oligonucleotide probe
aagccgtgcgcaacgaatggcgcagcacgctgccgtttcggctgggct

SEQ ID NO: 54 - DNA, 48 bp, Artificial
  oligonucleotide probe
ttgcaagcgtccgggaaacggctgcaagcgcaggctttgcgcaccgtg

SEQ ID NO: 55 - DNA, 48 bp, Artificial
  oligonucleotide probe
cgcattgcggctttcgttgcaagcgtccgggaccgtttcggctgggct

SEQ ID NO: 56 - DNA, 48 bp, Artificial
  oligonucleotide probe
cgcattgcggctttcgttgcaagcgtccgggaggctttgcgcaccgtg

SEQ ID NO: 57 - DNA, 48 bp, Artificial
  oligonucleotide probe
aagccgtgcgcaacgaaacggctgcaagcgcaggctttgcgcaccgtg

SEQ ID NO: 58 - DNA, 48 bp, Artificial
  oligonucleotide probe
cgcattgcggctttcgaacggctgcaagcgcattcggggaaacgccgt

SEQ ID NO: 59 - DNA, 48 bp, Artificial
  oligonucleotide probe
cgcattgcggctttcgggctttgcgcaccgtgttcggggaaacgccgt

SEQ ID NO: 60 - DNA, 48 bp, Artificial
  oligonucleotide probe
cgcattgcggctttcgggctttgcgcaccgtgatggcgcagcacgctg

SEQ ID NO: 61 - DNA, 48 bp, Artificial
  oligonucleotide probe
cgcattgcggctttcgaacggctgcaagcgcaggctttgcgcaccgtg

SEQ ID NO: 62 - DNA, 48 bp, Artificial
  oligonucleotide probe
ttgcaagcgtccgggaaacggctgcaagcgcaatggcgcagcacgctg

SEQ ID NO: 63 - DNA, 48 bp, Artificial
  oligonucleotide probe
aagccgtgcgcaacgaggctttgcgcaccgtgatggcgcagcacgctg

SEQ ID NO: 64 - DNA, 48 bp, Artificial
  oligonucleotide probe
aagccgtgcgcaacgacgcattgcggctttcgttcggggaaacgccgt

SEQ ID NO: 65 - DNA, 48 bp, Artificial
  oligonucleotide probe
aagccgtgcgcaacgattgcaagcgtccgggaggctttgcgcaccgtg

SEQ ID NO: 66 - DNA, 48 bp, Artificial
  oligonucleotide probe
cgcattgcggctttcgttgcaagcgtccgggaatggcgcagcacgctg

SEQ ID NO: 67 - DNA, 48 bp, Artificial
  oligonucleotide probe
cgcattgcggctttcgaacggctgcaagcgcaccgtttcggctgggct

SEQ ID NO: 68 - DNA, 48 bp, Artificial
  oligonucleotide probe
cgcattgcggctttcgttcggggaaacgccgtccgtttcggctgggct

SEQ ID NO: 69 - DNA, 48 bp, Artificial
  oligonucleotide probe
aagccgtgcgcaacgacgcattgcggctttcgggctttgcgcaccgtg

SEQ ID NO: 70 - DNA, 48 bp, Artificial
  oligonucleotide probe
cgcattgcggctttcgatggcgcagcacgctgttcggggaaacgccgt

SEQ ID NO: 71 - DNA, 48 bp, Artificial
  oligonucleotide probe
aagccgtgcgcaacgaatggcgcagcacgctgttcggggaaacgccgt

SEQ ID NO: 72 - DNA, 48 bp, Artificial
  oligonucleotide probe
ttgcaagcgtccgggaggctttgcgcaccgtgttcggggaaacgccgt

SEQ ID NO: 73 - DNA, 48 bp, Artificial
  oligonucleotide probe
aagccgtgcgcaacgaggctttgcgcaccgtgccgtttcggctgggct

SEQ ID NO: 74 - DNA, 48 bp, Artificial
  oligonucleotide probe
aagccgtgcgcaacgaaacggctgcaagcgcaccgtttcggctgggct

SEQ ID NO: 75 - DNA, 48 bp, Artificial
  oligonucleotide probe
ttgcaagcgtccgggaatggcgcagcacgctgccgtttcggctgggct

SEQ ID NO: 76 - DNA, 48 bp, Artificial
  oligonucleotide probe
aagccgtgcgcaacgaaacggctgcaagcgcattcggggaaacgccgt

SEQ ID NO: 77 - DNA, 48 bp, Artificial
  oligonucleotide probe
ttgcaagcgtccgggaaacggctgcaagcgcattcggggaaacgccgt

SEQ ID NO: 78 - DNA, 48 bp, Artificial
  oligonucleotide probe
ttgcaagcgtccgggaaacggctgcaagcgcaccgtttcggctgggct

SEQ ID NO: 79 - DNA, 48 bp, Artificial
  oligonucleotide probe
aagccgtgcgcaacgattgcaagcgtccgggaatggcgcagcacgctg

SEQ ID NO: 80 - DNA, 48 bp, Artificial
  oligonucleotide probe
ttgcaagcgtccgggaggctttgcgcaccgtgccgtttcggctgggct

SEQ ID NO: 81 - DNA, 48 bp, Artificial
  oligonucleotide probe
aagccgtgcgcaacgaggctttgcgcaccgtgttcggggaaacgccgt

SEQ ID NO: 82 - DNA, 48 bp, Artificial
  oligonucleotide probe
ggctttgcgcaccgtgatggcgcagcacgctgttcggggaaacgccgt

SEQ ID NO: 83 - DNA, 48 bp, Artificial
  oligonucleotide probe
aacggctgcaagcgcaggctttgcgcaccgtgatggcgcagcacgctg

SEQ ID NO: 84 - DNA, 48 bp, Artificial
  oligonucleotide probe
cgcattgcggctttcgttgcaagcgtccgggattcggggaaacgccgt

SEQ ID NO: 85 - DNA, 48 bp, Artificial
  oligonucleotide probe
ggctttgcgcaccgtgatggcgcagcacgctgccgtttcggctgggct

SEQ ID NO: 86 - DNA, 48 bp, Artificial
  oligonucleotide probe
aagccgtgcgcaacgattgcaagcgtccgggaccgtttcggctgggct

SEQ ID NO: 87 - DNA, 48 bp, Artificial
  oligonucleotide probe
ttgcaagcgtccgggaggctttgcgcaccgtgatggcgcagcacgctg

SEQ ID NO: 88 - DNA, 48 bp, Artificial
  oligonucleotide probe
cgcattgcggctttcgatggcgcagcacgctgccgtttcggctgggct

SEQ ID NO: 89 - DNA, 48 bp, Artificial
  oligonucleotide probe
aagccgtgcgcaacgaaacggctgcaagcgcaatggcgcagcacgctg

SEQ ID NO: 90 - DNA, 48 bp, Artificial
  oligonucleotide probe
aagccgtgcgcaacgattcggggaaacgccgtccgtttcggctgggct

SEQ ID NO: 91 - DNA, 48 bp, Artificial
  oligonucleotide probe
aacggctgcaagcgcaggctttgcgcaccgtgttcggggaaacgccgt

SEQ ID NO: 92 - DNA, 48 bp, Artificial
  oligonucleotide probe
aacggctgcaagcgcaggctttgcgcaccgtgccgtttcggctgggct

SEQ ID NO: 93 - DNA, 48 bp, Artificial
  oligonucleotide probe
aacggctgcaagcgcattcggggaaacgccgtccgtttcggctgggct

SEQ ID NO: 94 - DNA, 48 bp, Artificial
  oligonucleotide probe
aagccgtgcgcaacgacgcattgcggctttcgatggcgcagcacgctg

SEQ ID NO: 95 - DNA, 48 bp, Artificial
  oligonucleotide probe
aagccgtgcgcaacgattgcaagcgtccgggattcggggaaacgccgt

SEQ ID NO: 96 - DNA, 48 bp, Artificial
  oligonucleotide probe
cgcattgcggctttcgggctttgcgcaccgtgccgtttcggctgggct

SEQ ID NO: 97 - DNA, 48 bp, Artificial
  oligonucleotide probe
atggcgcagcacgctgttcggggaaacgccgtccgtttcggctgggct

SEQ ID NO: 98 - DNA, 48 bp, Artificial
  oligonucleotide probe
aacggctgcaagcgcaatggcgcagcacgctgttcggggaaacgccgt

SEQ ID NO: 99 - DNA, 48 bp, Artificial
  oligonucleotide probe
cgcattgcggctttcgaacggctgcaagcgcaatggcgcagcacgctg

SEQ ID NO: 100 - DNA, 48 bp, Artificial
  oligonucleotide probe
aacggctgcaagcgcaatggcgcagcacgctgccgtttcggctgggct

SEQ ID NO: 101 - DNA, 48 bp, Artificial
  oligonucleotide probe
atggcgcagcacgctgatggcgcagcacgctgcgcattgcggctttcg

SEQ ID NO: 102 - DNA, 48 bp, Artificial
  oligonucleotide probe
ccgtttcggctgggctccgtttcggctgggctggctttgcgcaccgtg

SEQ ID NO: 103 - DNA, 48 bp, Artificial
  oligonucleotide probe
cgcattgcggctttcgcgcattgcggctttcgggctttgcgcaccgtg

SEQ ID NO: 104 - DNA, 48 bp, Artificial
  oligonucleotide probe
aagccgtgcgcaacgaaagccgtgcgcaacgaatggcgcagcacgctg

SEQ ID NO: 105 - DNA, 48 bp, Artificial
  oligonucleotide probe
atggcgcagcacgctgatggcgcagcacgctgttcggggaaacgccgt

SEQ ID NO: 106 - DNA, 48 bp, Artificial
  oligonucleotide probe
atggcgcagcacgctgatggcgcagcacgctgttgcaagcgtccggga

SEQ ID NO: 107 - DNA, 48 bp, Artificial
  oligonucleotide probe
ttcggggaaacgccgtttcggggaaacgccgtcgcattgcggctttcg

SEQ ID NO: 108 - DNA, 48 bp, Artificial
  oligonucleotide probe
ggctttgcgcaccgtgggctttgcgcaccgtgatggcgcagcacgctg

SEQ ID NO: 109 - DNA, 48 bp, Artificial
  oligonucleotide probe
ttgcaagcgtccgggattgcaagcgtccgggaatggcgcagcacgctg

SEQ ID NO: 110 - DNA, 48 bp, Artificial
  oligonucleotide probe
ggctttgcgcaccgtgggctttgcgcaccgtgttcggggaaacgccgt

SEQ ID NO: 111 - DNA, 48 bp, Artificial
  oligonucleotide probe
ttcggggaaacgccgtttcggggaaacgccgtccgtttcggctgggct

SEQ ID NO: 112 - DNA, 48 bp, Artificial
  oligonucleotide probe
ggctttgcgcaccgtgggctttgcgcaccgtgaagccgtgcgcaacga

SEQ ID NO: 113 - DNA, 48 bp, Artificial
  oligonucleotide probe
ttcggggaaacgccgtttcggggaaacgccgtaacggctgcaagcgca

SEQ ID NO: 114 - DNA, 48 bp, Artificial
  oligonucleotide probe
ggctttgcgcaccgtgggctttgcgcaccgtgccgtttcggctgggct

SEQ ID NO: 115 - DNA, 48 bp, Artificial
  oligonucleotide probe
ttcggggaaacgccgtttcggggaaacgccgtggctttgcgcaccgtg

SEQ ID NO: 116 - DNA, 48 bp, Artificial
  oligonucleotide probe
ttcggggaaacgccgtttcggggaaacgccgtttgcaagcgtccggga

SEQ ID NO: 117 - DNA, 48 bp, Artificial
  oligonucleotide probe
ggctttgcgcaccgtgggctttgcgcaccgtgcgcattgcggctttcg

SEQ ID NO: 118 - DNA, 48 bp, Artificial
  oligonucleotide probe
cgcattgcggctttcgcgcattgcggctttcgatggcgcagcacgctg

SEQ ID NO: 119 - DNA, 48 bp, Artificial
  oligonucleotide probe
aagccgtgcgcaacgaaagccgtgcgcaacgaccgtttcggctgggct

SEQ ID NO: 120 - DNA, 48 bp, Artificial
  oligonucleotide probe
ttcggggaaacgccgtttcggggaaacgccgtatggcgcagcacgctg

SEQ ID NO: 121 - DNA, 48 bp, Artificial
  oligonucleotide probe
ccgtttcggctgggctccgtttcggctgggctttcggggaaacgccgt

SEQ ID NO: 122 - DNA, 48 bp, Artificial
  oligonucleotide probe
aagccgtgcgcaacgaaagccgtgcgcaacgaggctttgcgcaccgtg

SEQ ID NO: 123 - DNA, 48 bp, Artificial
  oligonucleotide probe
ccgtttcggctgggctccgtttcggctgggctttgcaagcgtccggga

SEQ ID NO: 124 - DNA, 48 bp, Artificial
  oligonucleotide probe
ccgtttcggctgggctccgtttcggctgggctaagccgtgcgcaacga

SEQ ID NO: 125 - DNA, 48 bp, Artificial
  oligonucleotide probe
ccgtttcggctgggctccgtttcggctgggctaacggctgcaagcgca

SEQ ID NO: 126 - DNA, 48 bp, Artificial
  oligonucleotide probe
ttgcaagcgtccgggattgcaagcgtccgggaccgtttcggctgggct

SEQ ID NO: 127 - DNA, 48 bp, Artificial
  oligonucleotide probe
ttgcaagcgtccgggattgcaagcgtccgggaggctttgcgcaccgtg

SEQ ID NO: 128 - DNA, 48 bp, Artificial
  oligonucleotide probe
aagccgtgcgcaacgaaagccgtgcgcaacgattcggggaaacgccgt

SEQ ID NO: 129 - DNA, 48 bp, Artificial
  oligonucleotide probe
cgcattgcggctttcgcgcattgcggctttcgttcggggaaacgccgt

SEQ ID NO: 130 - DNA, 48 bp, Artificial
  oligonucleotide probe
aacggctgcaagcgcaaacggctgcaagcgcaccgtttcggctgggct

SEQ ID NO: 131 - DNA, 48 bp, Artificial
  oligonucleotide probe
ttcggggaaacgccgtttcggggaaacgccgtaagccgtgcgcaacga

SEQ ID NO: 132 - DNA, 48 bp, Artificial
  oligonucleotide probe
aacggctgcaagcgcaaacggctgcaagcgcattcggggaaacgccgt

SEQ ID NO: 133 - DNA, 48 bp, Artificial
  oligonucleotide probe
ccgtttcggctgggctccgtttcggctgggctatggcgcagcacgctg

SEQ ID NO: 134 - DNA, 48 bp, Artificial
  oligonucleotide probe
ggctttgcgcaccgtgggctttgcgcaccgtgttgcaagcgtccggga

SEQ ID NO: 135 - DNA, 48 bp, Artificial
  oligonucleotide probe
atggcgcagcacgctgatggcgcagcacgctgaacggctgcaagcgca

SEQ ID NO: 136 - DNA, 48 bp, Artificial
  oligonucleotide probe
atggcgcagcacgctgatggcgcagcacgctgggctttgcgcaccgtg

SEQ ID NO: 137 - DNA, 48 bp, Artificial
  oligonucleotide probe
aacggctgcaagcgcaaacggctgcaagcgcaggctttgcgcaccgtg

SEQ ID NO: 138 - DNA, 48 bp, Artificial
  oligonucleotide probe
ccgtttcggctgggctccgtttcggctgggctcgcattgcggctttcg

SEQ ID NO: 139 - DNA, 48 bp, Artificial
  oligonucleotide probe
atggcgcagcacgctgatggcgcagcacgctgccgtttcggctgggct

SEQ ID NO: 140 - DNA, 48 bp, Artificial
  oligonucleotide probe
ttgcaagcgtccgggattgcaagcgtccgggattcggggaaacgccgt

SEQ ID NO: 141 - DNA, 48 bp, Artificial
  oligonucleotide probe
aacggctgcaagcgcaaacggctgcaagcgcaatggcgcagcacgctg

SEQ ID NO: 142 - DNA, 48 bp, Artificial
  oligonucleotide probe
ggctttgcgcaccgtgggctttgcgcaccgtgaacggctgcaagcgca

SEQ ID NO: 143 - DNA, 48 bp, Artificial
  oligonucleotide probe
atggcgcagcacgctgatggcgcagcacgctgaagccgtgcgcaacga

SEQ ID NO: 144 - DNA, 48 bp, Artificial
  oligonucleotide probe
cgcattgcggctttcgcgcattgcggctttcgccgtttcggctgggct

SEQ ID NO: 145 - DNA, 48 bp, Artificial
  oligonucleotide probe
ttgcaagcgtccgggaggctttgcgcaccgtgttcgccgtttgcgctg

SEQ ID NO: 146 - DNA, 48 bp, Artificial
  oligonucleotide probe
cgcattgcggctttcgttcggggaaacgccgtccgtcgcaaagcgcac

SEQ ID NO: 147 - DNA, 48 bp, Artificial
  oligonucleotide probe
aacggctgcaagcgcattcggggaaacgccgtttcgccgtttgcgctg

SEQ ID NO: 148 - DNA, 48 bp, Artificial
  oligonucleotide probe
cgcattgcggctttcgttcggggaaacgccgtttcgccgtttgcgctg

SEQ ID NO: 149 - DNA, 48 bp, Artificial
  oligonucleotide probe
aagccgtgcgcaacgacgcattgcggctttcgttcgccgtttgcgctg

SEQ ID NO: 150 - DNA, 48 bp, Artificial
  oligonucleotide probe
ggctttgcgcaccgtgccgtttcggctgggctaacgcgatttgccgca

SEQ ID NO: 151 - DNA, 48 bp, Artificial
  oligonucleotide probe
cgcattgcggctttcgttgcaagcgtccgggaaacgcgatttgccgca

SEQ ID NO: 152 - DNA, 48 bp, Artificial
  oligonucleotide probe
ccgtttcggctgggctaacgcgatttgccgcaggctgcacggtcccgt

SEQ ID NO: 153 - DNA, 48 bp, Artificial
  oligonucleotide probe
ggctttgcgcaccgtgaacgcgatttgccgcattcgccgtttgcgctg

SEQ ID NO: 154 - DNA, 48 bp, Artificial
  oligonucleotide probe
cgcattgcggctttcgaacggctgcaagcgcattcgccgtttgcgctg

SEQ ID NO: 155 - DNA, 48 bp, Artificial
  oligonucleotide probe
aagccgtgcgcaacgaaacggctgcaagcgcaccgtcgcaaagcgcac

SEQ ID NO: 156 - DNA, 48 bp, Artificial
  oligonucleotide probe
atggcgcagcacgctgccgtcgcaaagcgcacggctgcacggtcccgt

SEQ ID NO: 157 - DNA, 48 bp, Artificial
  oligonucleotide probe
atggcgcagcacgctgaacgcgatttgccgcaggctgcacggtcccgt

SEQ ID NO: 158 - DNA, 48 bp, Artificial
  oligonucleotide probe
aagccgtgcgcaacgaccgtttcggctgggctccgtcgcaaagcgcac

SEQ ID NO: 159 - DNA, 48 bp, Artificial
  oligonucleotide probe
ttcggggaaacgccgtaacgcgatttgccgcaccgtcgcaaagcgcac

SEQ ID NO: 160 - DNA, 48 bp, Artificial
  oligonucleotide probe
ttcggggaaacgccgtaacgcgatttgccgcattcgccgtttgcgctg

SEQ ID NO: 161 - DNA, 48 bp, Artificial
  oligonucleotide probe
ttcggggaaacgccgtttcgccgtttgcgctgccgtcgcaaagcgcac

SEQ ID NO: 162 - DNA, 48 bp, Artificial
  oligonucleotide probe
ttgcaagcgtccgggattcgccgtttgcgctgccgtcgcaaagcgcac

SEQ ID NO: 163 - DNA, 48 bp, Artificial
  oligonucleotide probe
aacggctgcaagcgcaccgtcgcaaagcgcacggctgcacggtcccgt

SEQ ID NO: 164 - DNA, 48 bp, Artificial
  oligonucleotide probe
atggcgcagcacgctgttcgccgtttgcgctgggctgcacggtcccgt

SEQ ID NO: 165 - DNA, 48 bp, Artificial
  oligonucleotide probe
ttgcaagcgtccgggaaacgcgatttgccgcattcgccgtttgcgctg

SEQ ID NO: 166 - DNA, 48 bp, Artificial
  oligonucleotide probe
ccgtttcggctgggctttcgccgtttgcgctgccgtcgcaaagcgcac

SEQ ID NO: 167 - DNA, 48 bp, Artificial
  oligonucleotide probe
aacgcgatttgccgcattcgccgtttgcgctgggctgcacggtcccgt

SEQ ID NO: 168 - DNA, 48 bp, Artificial
  oligonucleotide probe
aagccgtgcgcaacgaaacggctgcaagcgcattcgccgtttgcgctg

SEQ ID NO: 169 - DNA, 48 bp, Artificial
  oligonucleotide probe
cgcattgcggctttcgttcgccgtttgcgctgggctgcacggtcccgt

SEQ ID NO: 170 - DNA, 48 bp, Artificial
  oligonucleotide probe
aacggctgcaagcgcaccgtttcggctgggctttcgccgtttgcgctg

SEQ ID NO: 171 - DNA, 48 bp, Artificial
  oligonucleotide probe
ttcggggaaacgccgtccgtttcggctgggctggctgcacggtcccgt

SEQ ID NO: 172 - DNA, 48 bp, Artificial
  oligonucleotide probe
aagccgtgcgcaacgaatggcgcagcacgctgaacgcgatttgccgca

SEQ ID NO: 173 - DNA, 48 bp, Artificial
  oligonucleotide probe
aagccgtgcgcaacgattcggggaaacgccgtttcgccgtttgcgctg

SEQ ID NO: 174 - DNA, 48 bp, Artificial
  oligonucleotide probe
ttgcaagcgtccgggattcgccgtttgcgctgggctgcacggtcccgt

SEQ ID NO: 175 - DNA, 48 bp, Artificial
  oligonucleotide probe
atggcgcagcacgctgccgtttcggctgggctccgtcgcaaagcgcac

SEQ ID NO: 176 - DNA, 48 bp, Artificial
  oligonucleotide probe
ggctttgcgcaccgtgatggcgcagcacgctgccgtcgcaaagcgcac

SEQ ID NO: 177 - DNA, 48 bp, Artificial
  oligonucleotide probe
ggctttgcgcaccgtgatggcgcagcacgctgaacgcgatttgccgca

SEQ ID NO: 178 - DNA, 48 bp, Artificial
  oligonucleotide probe
aagccgtgcgcaacgaaacgcgatttgccgcaccgtcgcaaagcgcac

SEQ ID NO: 179 - DNA, 48 bp, Artificial
  oligonucleotide probe
cgcattgcggctttcgaacgcgatttgccgcattcgccgtttgcgctg

SEQ ID NO: 180 - DNA, 48 bp, Artificial
  oligonucleotide probe
aacggctgcaagcgcaaacgcgatttgccgcattcgccgtttgcgctg

SEQ ID NO: 181 - DNA, 48 bp, Artificial
  oligonucleotide probe
ttgcaagcgtccgggaccgtttcggctgggctccgtcgcaaagcgcac

SEQ ID NO: 182 - DNA, 48 bp, Artificial
  oligonucleotide probe
aagccgtgcgcaacgaccgtttcggctgggctaacgcgatttgccgca

SEQ ID NO: 183 - DNA, 48 bp, Artificial
  oligonucleotide probe
aacggctgcaagcgcaccgtttcggctgggctccgtcgcaaagcgcac

SEQ ID NO: 184 - DNA, 48 bp, Artificial
  oligonucleotide probe
aagccgtgcgcaacgaaacgcgatttgccgcattcgccgtttgcgctg

SEQ ID NO: 185 - DNA, 48 bp, Artificial
  oligonucleotide probe
ttgcaagcgtccgggattcggggaaacgccgtccgtcgcaaagcgcac

SEQ ID NO: 186 - DNA, 48 bp, Artificial
  oligonucleotide probe
aacggctgcaagcgcaatggcgcagcacgctgccgtcgcaaagcgcac

SEQ ID NO: 187 - DNA, 48 bp, Artificial
  oligonucleotide probe
cgcattgcggctttcgggctttgcgcaccgtgccgtcgcaaagcgcac

SEQ ID NO: 188 - DNA, 48 bp, Artificial
  oligonucleotide probe
aacggctgcaagcgcaaacgcgatttgccgcaggctgcacggtcccgt

SEQ ID NO: 189 - DNA, 48 bp, Artificial
  oligonucleotide probe
aacggctgcaagcgcattcggggaaacgccgtggctgcacggtcccgt

SEQ ID NO: 190 - DNA, 48 bp, Artificial
  oligonucleotide probe
ttgcaagcgtccgggaggctttgcgcaccgtgccgtcgcaaagcgcac

SEQ ID NO: 191 - DNA, 48 bp, Artificial
  oligonucleotide probe
ttgcaagcgtccgggaccgtttcggctgggctttcgccgtttgcgctg

SEQ ID NO: 192 - DNA, 48 bp, Artificial
  oligonucleotide probe
aacggctgcaagcgcattcgccgtttgcgctgggctgcacggtcccgt

SEQ ID NO: 193 - DNA, 48 bp, Artificial
  oligonucleotide probe
cgcattgcggctttcgaacgcgatttgccgcaggctgcacggtcccgt

SEQ ID NO: 194 - DNA, 48 bp, Artificial
  oligonucleotide probe
aagccgtgcgcaacgaggctttgcgcaccgtgttcgccgtttgcgctg

SEQ ID NO: 195 - DNA, 48 bp, Artificial
  oligonucleotide probe
aagccgtgcgcaacgattcgccgtttgcgctgccgtcgcaaagcgcac

SEQ ID NO: 196 - DNA, 48 bp, Artificial
  oligonucleotide probe
aagccgtgcgcaacgaaacggctgcaagcgcaggctgcacggtcccgt

SEQ ID NO: 197 - DNA, 48 bp, Artificial
  oligonucleotide probe
aagccgtgcgcaacgaatggcgcagcacgctgggctgcacggtcccgt

SEQ ID NO: 198 - DNA, 48 bp, Artificial
  oligonucleotide probe
ggctttgcgcaccgtgatggcgcagcacgctgggctgcacggtcccgt

SEQ ID NO: 199 - DNA, 48 bp, Artificial
  oligonucleotide probe
cgcattgcggctttcgttcggggaaacgccgtggctgcacggtcccgt

SEQ ID NO: 200 - DNA, 48 bp, Artificial
  oligonucleotide probe
aagccgtgcgcaacgaatggcgcagcacgctgttcgccgtttgcgctg

SEQ ID NO: 201 - DNA, 48 bp, Artificial
  oligonucleotide probe
ggctttgcgcaccgtgttcgccgtttgcgctgggctgcacggtcccgt

SEQ ID NO: 202 - DNA, 48 bp, Artificial
  oligonucleotide probe
ttgcaagcgtccgggaaacggctgcaagcgcattcgccgtttgcgctg

SEQ ID NO: 203 - DNA, 48 bp, Artificial
  oligonucleotide probe
aacggctgcaagcgcaatggcgcagcacgctgaacgcgatttgccgca

SEQ ID NO: 204 - DNA, 48 bp, Artificial
  oligonucleotide probe
aacggctgcaagcgcaccgtttcggctgggctggctgcacggtcccgt

SEQ ID NO: 205 - DNA, 48 bp, Artificial
  oligonucleotide probe
aacggctgcaagcgcaaacgcgatttgccgcaccgtcgcaaagcgcac

SEQ ID NO: 206 - DNA, 48 bp, Artificial
  oligonucleotide probe
aagccgtgcgcaacgaggctttgcgcaccgtgaacgcgatttgccgca

SEQ ID NO: 207 - DNA, 48 bp, Artificial
  oligonucleotide probe
aacggctgcaagcgcattcggggaaacgccgtccgtcgcaaagcgcac

SEQ ID NO: 208 - DNA, 48 bp, Artificial
  oligonucleotide probe
aagccgtgcgcaacgaaacgcgatttgccgcaggctgcacggtcccgt

SEQ ID NO: 209 - DNA, 48 bp, Artificial
  oligonucleotide probe
aacgcgatttgccgcattcgccgtttgcgctgccgtcgcaaagcgcac

SEQ ID NO: 210 - DNA, 48 bp, Artificial
  oligonucleotide probe
aacgcgatttgccgcaccgtcgcaaagcgcacggctgcacggtcccgt

SEQ ID NO: 211 - DNA, 48 bp, Artificial
  oligonucleotide probe
aacggctgcaagcgcaatggcgcagcacgctgggctgcacggtcccgt

SEQ ID NO: 212 - DNA, 48 bp, Artificial
  oligonucleotide probe
ggctttgcgcaccgtgatggcgcagcacgctgttcgccgtttgcgctg

SEQ ID NO: 213 - DNA, 48 bp, Artificial
  oligonucleotide probe
ttcggggaaacgccgtccgtttcggctgggctccgtcgcaaagcgcac

SEQ ID NO: 214 - DNA, 48 bp, Artificial
  oligonucleotide probe
ttcggggaaacgccgtaacgcgatttgccgcaggctgcacggtcccgt

SEQ ID NO: 215 - DNA, 48 bp, Artificial
  oligonucleotide probe
aacggctgcaagcgcaggctttgcgcaccgtgccgtcgcaaagcgcac

SEQ ID NO: 216 - DNA, 48 bp, Artificial
  oligonucleotide probe
aagccgtgcgcaacgacgcattgcggctttcgccgtcgcaaagcgcac

SEQ ID NO: 217 - DNA, 48 bp, Artificial
  oligonucleotide probe
aagccgtgcgcaacgaggctttgcgcaccgtgggctgcacggtcccgt

SEQ ID NO: 218 - DNA, 48 bp, Artificial
  oligonucleotide probe
aagccgtgcgcaacgattcggggaaacgccgtccgtcgcaaagcgcac

SEQ ID NO: 219 - DNA, 48 bp, Artificial
  oligonucleotide probe
ggctttgcgcaccgtgttcggggaaacgccgtaacgcgatttgccgca

SEQ ID NO: 220 - DNA, 48 bp, Artificial
  oligonucleotide probe
ttcggggaaacgccgtccgtttcggctgggctttcgccgtttgcgctg

SEQ ID NO: 221 - DNA, 48 bp, Artificial
  oligonucleotide probe
ttgcaagcgtccgggaaacggctgcaagcgcaaacgcgatttgccgca

SEQ ID NO: 222 - DNA, 48 bp, Artificial
  oligonucleotide probe
cgcattgcggctttcgccgtcgcaaagcgcacggctgcacggtcccgt

SEQ ID NO: 223 - DNA, 48 bp, Artificial
  oligonucleotide probe
aagccgtgcgcaacgaatggcgcagcacgctgccgtcgcaaagcgcac

SEQ ID NO: 224 - DNA, 48 bp, Artificial
  oligonucleotide probe
aagccgtgcgcaacgattcggggaaacgccgtaacgcgatttgccgca

SEQ ID NO: 225 - DNA, 48 bp, Artificial
  oligonucleotide probe
ccgtttcggctgggctaacgcgatttgccgcaccgtcgcaaagcgcac

SEQ ID NO: 226 - DNA, 48 bp, Artificial
  oligonucleotide probe
ttgcaagcgtccgggaaacgcgatttgccgcaccgtcgcaaagcgcac

SEQ ID NO: 227 - DNA, 48 bp, Artificial
  oligonucleotide probe
ggctttgcgcaccgtgaacgcgatttgccgcaggctgcacggtcccgt

SEQ ID NO: 228 - DNA, 48 bp, Artificial
  oligonucleotide probe
ttcggggaaacgccgtccgtttcggctgggctaacgcgatttgccgca

SEQ ID NO: 229 - DNA, 48 bp, Artificial
  oligonucleotide probe
cgcattgcggctttcgttgcaagcgtccgggaggctgcacggtcccgt

SEQ ID NO: 230 - DNA, 48 bp, Artificial
  oligonucleotide probe
cgcattgcggctttcgccgtttcggctgggctccgtcgcaaagcgcac

SEQ ID NO: 231 - DNA, 48 bp, Artificial
  oligonucleotide probe
aagccgtgcgcaacgacgcattgcggctttcgaacgcgatttgccgca

SEQ ID NO: 232 - DNA, 48 bp, Artificial
  oligonucleotide probe
ttgcaagcgtccgggaggctttgcgcaccgtgggctgcacggtcccgt

SEQ ID NO: 233 - DNA, 48 bp, Artificial
  oligonucleotide probe
aacggctgcaagcgcaggctttgcgcaccgtgggctgcacggtcccgt

SEQ ID NO: 234 - DNA, 48 bp, Artificial
  oligonucleotide probe
ggctttgcgcaccgtgttcggggaaacgccgtggctgcacggtcccgt

SEQ ID NO: 235 - DNA, 48 bp, Artificial
  oligonucleotide probe
ttgcaagcgtccgggattcggggaaacgccgtttcgccgtttgcgctg

SEQ ID NO: 236 - DNA, 48 bp, Artificial
  oligonucleotide probe
cgcattgcggctttcgatggcgcagcacgctgggctgcacggtcccgt

SEQ ID NO: 237 - DNA, 48 bp, Artificial
  oligonucleotide probe
aacggctgcaagcgcattcggggaaacgccgtaacgcgatttgccgca

SEQ ID NO: 238 - DNA, 48 bp, Artificial
  oligonucleotide probe
atggcgcagcacgctgaacgcgatttgccgcaccgtcgcaaagcgcac

SEQ ID NO: 239 - DNA, 48 bp, Artificial
  oligonucleotide probe
cgcattgcggctttcgaacggctgcaagcgcaggctgcacggtcccgt

SEQ ID NO: 240 - DNA, 48 bp, Artificial
  oligonucleotide probe
atggcgcagcacgctgttcgccgtttgcgctgccgtcgcaaagcgcac

SEQ ID NO: 241 - DNA, 48 bp, Artificial
  oligonucleotide probe
aagccgtgcgcaacgaaacggctgcaagcgcaaacgcgatttgccgca

SEQ ID NO: 242 - DNA, 48 bp, Artificial
  oligonucleotide probe
ttgcaagcgtccgggaatggcgcagcacgctgccgtcgcaaagcgcac

SEQ ID NO: 243 - DNA, 48 bp, Artificial
  oligonucleotide probe
ttcgccgtttgcgctgccgtcgcaaagcgcacggctgcacggtcccgt

SEQ ID NO: 244 - DNA, 48 bp, Artificial
  oligonucleotide probe
aagccgtgcgcaacgattcggggaaacgccgtggctgcacggtcccgt

SEQ ID NO: 245 - DNA, 48 bp, Artificial
  oligonucleotide probe
cgcattgcggctttcgaacggctgcaagcgcaaacgcgatttgccgca

SEQ ID NO: 246 - DNA, 48 bp, Artificial
  oligonucleotide probe
ttgcaagcgtccgggaggctttgcgcaccgtgaacgcgatttgccgca

SEQ ID NO: 247 - DNA, 48 bp, Artificial
  oligonucleotide probe
cgcattgcggctttcgatggcgcagcacgctgccgtcgcaaagcgcac

SEQ ID NO: 248 - DNA, 48 bp, Artificial
  oligonucleotide probe
ttgcaagcgtccgggaccgtttcggctgggctaacgcgatttgccgca

SEQ ID NO: 249 - DNA, 48 bp, Artificial
  oligonucleotide probe
ggctttgcgcaccgtgccgtttcggctgggctggctgcacggtcccgt

SEQ ID NO: 250 - DNA, 48 bp, Artificial
  oligonucleotide probe
ttgcaagcgtccgggaccgtcgcaaagcgcacggctgcacggtcccgt

SEQ ID NO: 251 - DNA, 48 bp, Artificial
  oligonucleotide probe
ccgtttcggctgggctttcgccgtttgcgctgggctgcacggtcccgt

SEQ ID NO: 252 - DNA, 48 bp, Artificial
  oligonucleotide probe
ttgcaagcgtccgggaaacgcgatttgccgcaggctgcacggtcccgt

SEQ ID NO: 253 - DNA, 48 bp, Artificial
  oligonucleotide probe
ttgcaagcgtccgggaatggcgcagcacgctgttcgccgtttgcgctg

SEQ ID NO: 254 - DNA, 48 bp, Artificial
  oligonucleotide probe
cgcattgcggctttcgttgcaagcgtccgggattcgccgtttgcgctg

SEQ ID NO: 255 - DNA, 48 bp, Artificial
  oligonucleotide probe
cgcattgcggctttcgggctttgcgcaccgtgggctgcacggtcccgt

SEQ ID NO: 256 - DNA, 48 bp, Artificial
  oligonucleotide probe
aacggctgcaagcgcattcgccgtttgcgctgccgtcgcaaagcgcac

SEQ ID NO: 257 - DNA, 48 bp, Artificial
  oligonucleotide probe
ttcggggaaacgccgtttcgccgtttgcgctgggctgcacggtcccgt

SEQ ID NO: 258 - DNA, 48 bp, Artificial
  oligonucleotide probe
aagccgtgcgcaacgattcgccgtttgcgctgggctgcacggtcccgt

SEQ ID NO: 259 - DNA, 48 bp, Artificial
  oligonucleotide probe
ggctttgcgcaccgtgccgtcgcaaagcgcacggctgcacggtcccgt

SEQ ID NO: 260 - DNA, 48 bp, Artificial
  oligonucleotide probe
ttgcaagcgtccgggaatggcgcagcacgctgggctgcacggtcccgt

SEQ ID NO: 261 - DNA, 48 bp, Artificial
  oligonucleotide probe
aagccgtgcgcaacgattgcaagcgtccgggaggctgcacggtcccgt

SEQ ID NO: 262 - DNA, 48 bp, Artificial
  oligonucleotide probe
aacggctgcaagcgcaccgtttcggctgggctaacgcgatttgccgca

SEQ ID NO: 263 - DNA, 48 bp, Artificial
  oligonucleotide probe
cgcattgcggctttcgccgtttcggctgggctggctgcacggtcccgt

SEQ ID NO: 264 - DNA, 48 bp, Artificial
  oligonucleotide probe
atggcgcagcacgctgccgtttcggctgggctttcgccgtttgcgctg

SEQ ID NO: 265 - DNA, 48 bp, Artificial
  oligonucleotide probe
atggcgcagcacgctgccgtttcggctgggctggctgcacggtcccgt

SEQ ID NO: 266 - DNA, 48 bp, Artificial
  oligonucleotide probe
cgcattgcggctttcgggctttgcgcaccgtgttcgccgtttgcgctg

SEQ ID NO: 267 - DNA, 48 bp, Artificial
  oligonucleotide probe
cgcattgcggctttcgccgtttcggctgggctaacgcgatttgccgca

SEQ ID NO: 268 - DNA, 48 bp, Artificial
  oligonucleotide probe
aacggctgcaagcgcaggctttgcgcaccgtgaacgcgatttgccgca

SEQ ID NO: 269 - DNA, 48 bp, Artificial
  oligonucleotide probe
cgcattgcggctttcgaacgcgatttgccgcaccgtcgcaaagcgcac

SEQ ID NO: 270 - DNA, 48 bp, Artificial
  oligonucleotide probe
aagccgtgcgcaacgattgcaagcgtccgggaaacgcgatttgccgca

SEQ ID NO: 271 - DNA, 48 bp, Artificial
  oligonucleotide probe
ggctttgcgcaccgtgccgtttcggctgggctccgtcgcaaagcgcac

SEQ ID NO: 272 - DNA, 48 bp, Artificial
  oligonucleotide probe
aagccgtgcgcaacgaccgtttcggctgggctggctgcacggtcccgt

SEQ ID NO: 273 - DNA, 48 bp, Artificial
  oligonucleotide probe
atggcgcagcacgctgttcggggaaacgccgtccgtcgcaaagcgcac

SEQ ID NO: 274 - DNA, 48 bp, Artificial
  oligonucleotide probe
atggcgcagcacgctgttcggggaaacgccgtggctgcacggtcccgt

SEQ ID NO: 275 - DNA, 48 bp, Artificial
  oligonucleotide probe
ggctttgcgcaccgtgttcggggaaacgccgtccgtcgcaaagcgcac

SEQ ID NO: 276 - DNA, 48 bp, Artificial
  oligonucleotide probe
ttgcaagcgtccgggaaacggctgcaagcgcaggctgcacggtcccgt

SEQ ID NO: 277 - DNA, 48 bp, Artificial
  oligonucleotide probe
atggcgcagcacgctgttcggggaaacgccgtaacgcgatttgccgca

SEQ ID NO: 278 - DNA, 48 bp, Artificial
  oligonucleotide probe
atggcgcagcacgctgaacgcgatttgccgcattcgccgtttgcgctg

SEQ ID NO: 279 - DNA, 48 bp, Artificial
  oligonucleotide probe
aagccgtgcgcaacgaccgtcgcaaagcgcacggctgcacggtcccgt

SEQ ID NO: 280 - DNA, 48 bp, Artificial
  oligonucleotide probe
atggcgcagcacgctgccgtttcggctgggctaacgcgatttgccgca

SEQ ID NO: 281 - DNA, 48 bp, Artificial
  oligonucleotide probe
aagccgtgcgcaacgaggctttgcgcaccgtgccgtcgcaaagcgcac

SEQ ID NO: 282 - DNA, 48 bp, Artificial
  oligonucleotide probe
ttgcaagcgtccgggattcggggaaacgccgtaacgcgatttgccgca

SEQ ID NO: 283 - DNA, 48 bp, Artificial
  oligonucleotide probe
aagccgtgcgcaacgattgcaagcgtccgggaccgtcgcaaagcgcac

SEQ ID NO: 284 - DNA, 48 bp, Artificial
  oligonucleotide probe
ttgcaagcgtccgggaatggcgcagcacgctgaacgcgatttgccgca

SEQ ID NO: 285 - DNA, 48 bp, Artificial
  oligonucleotide probe
ccgtttcggctgggctccgtcgcaaagcgcacggctgcacggtcccgt

SEQ ID NO: 286 - DNA, 48 bp, Artificial
  oligonucleotide probe
ttcggggaaacgccgtccgtcgcaaagcgcacggctgcacggtcccgt

SEQ ID NO: 287 - DNA, 48 bp, Artificial
  oligonucleotide probe
cgcattgcggctttcgaacggctgcaagcgcaccgtcgcaaagcgcac

SEQ ID NO: 288 - DNA, 48 bp, Artificial
  oligonucleotide probe
ggctttgcgcaccgtgccgtttcggctgggctttcgccgtttgcgctg

SEQ ID NO: 289 - DNA, 48 bp, Artificial
  oligonucleotide probe
cgcattgcggctttcgccgtttcggctgggctttcgccgtttgcgctg

SEQ ID NO: 290 - DNA, 48 bp, Artificial
  oligonucleotide probe
aagccgtgcgcaacgacgcattgcggctttcgggctgcacggtcccgt

SEQ ID NO: 291 - DNA, 48 bp, Artificial
  oligonucleotide probe
cgcattgcggctttcgttcggggaaacgccgtaacgcgatttgccgca

SEQ ID NO: 292 - DNA, 48 bp, Artificial
  oligonucleotide probe
atggcgcagcacgctgttcggggaaacgccgtttcgccgtttgcgctg

SEQ ID NO: 293 - DNA, 48 bp, Artificial
  oligonucleotide probe
cgcattgcggctttcgttcgccgtttgcgctgccgtcgcaaagcgcac

SEQ ID NO: 294 - DNA, 48 bp, Artificial
  oligonucleotide probe
ttgcaagcgtccgggaaacggctgcaagcgcaccgtcgcaaagcgcac

SEQ ID NO: 295 - DNA, 48 bp, Artificial
  oligonucleotide probe
aacggctgcaagcgcaggctttgcgcaccgtgttcgccgtttgcgctg

SEQ ID NO: 296 - DNA, 48 bp, Artificial
  oligonucleotide probe
ggctttgcgcaccgtgttcgccgtttgcgctgccgtcgcaaagcgcac

SEQ ID NO: 297 - DNA, 48 bp, Artificial
  oligonucleotide probe
cgcattgcggctttcgggctttgcgcaccgtgaacgcgatttgccgca

SEQ ID NO: 298 - DNA, 48 bp, Artificial
  oligonucleotide probe
aacggctgcaagcgcaatggcgcagcacgctgttcgccgtttgcgctg

SEQ ID NO: 299 - DNA, 48 bp, Artificial
  oligonucleotide probe
ttgcaagcgtccgggattcggggaaacgccgtggctgcacggtcccgt

SEQ ID NO: 300 - DNA, 48 bp, Artificial
  oligonucleotide probe
aagccgtgcgcaacgaccgtttcggctgggctttcgccgtttgcgctg

SEQ ID NO: 301 - DNA, 48 bp, Artificial
  oligonucleotide probe
aagccgtgcgcaacgattgcaagcgtccgggattcgccgtttgcgctg

SEQ ID NO: 302 - DNA, 48 bp, Artificial
  oligonucleotide probe
cgcattgcggctttcgttgcaagcgtccgggaccgtcgcaaagcgcac

SEQ ID NO: 303 - DNA, 48 bp, Artificial
  oligonucleotide probe
cgcattgcggctttcgatggcgcagcacgctgaacgcgatttgccgca

SEQ ID NO: 304 - DNA, 48 bp, Artificial
  oligonucleotide probe
ttgcaagcgtccgggaccgtttcggctgggctggctgcacggtcccgt

SEQ ID NO: 305 - DNA, 48 bp, Artificial
  oligonucleotide probe
ggctttgcgcaccgtgttcggggaaacgccgtttcgccgtttgcgctg

SEQ ID NO: 306 - DNA, 48 bp, Artificial
  oligonucleotide probe
ggctttgcgcaccgtgaacgcgatttgccgcaccgtcgcaaagcgcac

SEQ ID NO: 307 - DNA, 48 bp, Artificial
  oligonucleotide probe
ccgtttcggctgggctaacgcgatttgccgcattcgccgtttgcgctg

SEQ ID NO: 308 - DNA, 48 bp, Artificial
  oligonucleotide probe
cgcattgcggctttcgatggcgcagcacgctgttcgccgtttgcgctg

SEQ ID NO: 309 - DNA, 48 bp, Artificial
  oligonucleotide probe
aacgcgatttgccgcaaacgcgatttgccgcaggctgcacggtcccgt

SEQ ID NO: 310 - DNA, 48 bp, Artificial
  oligonucleotide probe
ggctgcacggtcccgtggctgcacggtcccgtaacgcgatttgccgca

SEQ ID NO: 311 - DNA, 48 bp, Artificial
  oligonucleotide probe
ggctgcacggtcccgtggctgcacggtcccgtcgcattgcggctttcg

SEQ ID NO: 312 - DNA, 48 bp, Artificial
  oligonucleotide probe
ggctttgcgcaccgtgggctttgcgcaccgtgccgtcgcaaagcgcac

SEQ ID NO: 313 - DNA, 48 bp, Artificial
  oligonucleotide probe
ccgtcgcaaagcgcacccgtcgcaaagcgcacccgtttcggctgggct

SEQ ID NO: 314 - DNA, 48 bp, Artificial
  oligonucleotide probe
ttcgccgtttgcgctgttcgccgtttgcgctgttcggggaaacgccgt

SEQ ID NO: 315 - DNA, 48 bp, Artificial
  oligonucleotide probe
ggctgcacggtcccgtggctgcacggtcccgtaagccgtgcgcaacga

SEQ ID NO: 316 - DNA, 48 bp, Artificial
  oligonucleotide probe
aagccgtgcgcaacgaaagccgtgcgcaacgaggctgcacggtcccgt

SEQ ID NO: 317 - DNA, 48 bp, Artificial
  oligonucleotide probe
ccgtcgcaaagcgcacccgtcgcaaagcgcaccgcattgcggctttcg

SEQ ID NO: 318 - DNA, 48 bp, Artificial
  oligonucleotide probe
ggctgcacggtcccgtggctgcacggtcccgtccgtttcggctgggct

SEQ ID NO: 319 - DNA, 48 bp, Artificial
  oligonucleotide probe
atggcgcagcacgctgatggcgcagcacgctgttcgccgtttgcgctg

SEQ ID NO: 320 - DNA, 48 bp, Artificial
  oligonucleotide probe
ttcgccgtttgcgctgttcgccgtttgcgctgccgtttcggctgggct

SEQ ID NO: 321 - DNA, 48 bp, Artificial
  oligonucleotide probe
aagccgtgcgcaacgaaagccgtgcgcaacgaaacgcgatttgccgca

SEQ ID NO: 322 - DNA, 48 bp, Artificial
  oligonucleotide probe
ccgtcgcaaagcgcacccgtcgcaaagcgcacttcggggaaacgccgt

SEQ ID NO: 323 - DNA, 48 bp, Artificial
  oligonucleotide probe
ccgtcgcaaagcgcacccgtcgcaaagcgcacggctttgcgcaccgtg

SEQ ID NO: 324 - DNA, 48 bp, Artificial
  oligonucleotide probe
ttgcaagcgtccgggattgcaagcgtccgggaccgtcgcaaagcgcac

SEQ ID NO: 325 - DNA, 48 bp, Artificial
  oligonucleotide probe
ccgtttcggctgggctccgtttcggctgggctggctgcacggtcccgt

SEQ ID NO: 326 - DNA, 48 bp, Artificial
  oligonucleotide probe
ggctgcacggtcccgtggctgcacggtcccgtttgcaagcgtccggga

SEQ ID NO: 327 - DNA, 48 bp, Artificial
  oligonucleotide probe
aacggctgcaagcgcaaacggctgcaagcgcaccgtcgcaaagcgcac

SEQ ID NO: 328 - DNA, 48 bp, Artificial
  oligonucleotide probe
atggcgcagcacgctgatggcgcagcacgctgccgtcgcaaagcgcac

SEQ ID NO: 329 - DNA, 48 bp, Artificial
  oligonucleotide probe
cgcattgcggctttcgcgcattgcggctttcgggctgcacggtcccgt

SEQ ID NO: 330 - DNA, 48 bp, Artificial
  oligonucleotide probe
atggcgcagcacgctgatggcgcagcacgctgggctgcacggtcccgt

SEQ ID NO: 331 - DNA, 48 bp, Artificial
  oligonucleotide probe
aacggctgcaagcgcaaacggctgcaagcgcaaacgcgatttgccgca

SEQ ID NO: 332 - DNA, 48 bp, Artificial
  oligonucleotide probe
aacgcgatttgccgcaaacgcgatttgccgcattcggggaaacgccgt

SEQ ID NO: 333 - DNA, 48 bp, Artificial
  oligonucleotide probe
aagccgtgcgcaacgaaagccgtgcgcaacgaccgtcgcaaagcgcac

SEQ ID NO: 334 - DNA, 48 bp, Artificial
  oligonucleotide probe
ttcgccgtttgcgctgttcgccgtttgcgctgaacggctgcaagcgca

SEQ ID NO: 335 - DNA, 48 bp, Artificial
  oligonucleotide probe
ttcgccgtttgcgctgttcgccgtttgcgctgccgtcgcaaagcgcac

SEQ ID NO: 336 - DNA, 48 bp, Artificial
  oligonucleotide probe
aacgcgatttgccgcaaacgcgatttgccgcaaagccgtgcgcaacga

SEQ ID NO: 337 - DNA, 48 bp, Artificial
  oligonucleotide probe
ttcgccgtttgcgctgttcgccgtttgcgctgatggcgcagcacgctg

SEQ ID NO: 338 - DNA, 48 bp, Artificial
  oligonucleotide probe
aagccgtgcgcaacgaaagccgtgcgcaacgattcgccgtttgcgctg

SEQ ID NO: 339 - DNA, 48 bp, Artificial
  oligonucleotide probe
ttgcaagcgtccgggattgcaagcgtccgggaaacgcgatttgccgca

SEQ ID NO: 340 - DNA, 48 bp, Artificial
  oligonucleotide probe
ggctgcacggtcccgtggctgcacggtcccgtaacggctgcaagcgca

SEQ ID NO: 341 - DNA, 48 bp, Artificial
  oligonucleotide probe
ccgtttcggctgggctccgtttcggctgggctaacgcgatttgccgca

SEQ ID NO: 342 - DNA, 48 bp, Artificial
  oligonucleotide probe
ttgcaagcgtccgggattgcaagcgtccgggattcgccgtttgcgctg

SEQ ID NO: 343 - DNA, 48 bp, Artificial
  oligonucleotide probe
cgcattgcggctttcgcgcattgcggctttcgaacgcgatttgccgca

SEQ ID NO: 344 - DNA, 48 bp, Artificial
  oligonucleotide probe
ccgtttcggctgggctccgtttcggctgggctccgtcgcaaagcgcac

SEQ ID NO: 345 - DNA, 48 bp, Artificial
  oligonucleotide probe
aacgcgatttgccgcaaacgcgatttgccgcaccgtcgcaaagcgcac

SEQ ID NO: 346 - DNA, 48 bp, Artificial
  oligonucleotide probe
ggctgcacggtcccgtggctgcacggtcccgtttcggggaaacgccgt

SEQ ID NO: 347 - DNA, 48 bp, Artificial
  oligonucleotide probe
ggctgcacggtcccgtggctgcacggtcccgtatggcgcagcacgctg

SEQ ID NO: 348 - DNA, 48 bp, Artificial
  oligonucleotide probe
ttgcaagcgtccgggattgcaagcgtccgggaggctgcacggtcccgt

SEQ ID NO: 349 - DNA, 48 bp, Artificial
  oligonucleotide probe
ccgtcgcaaagcgcacccgtcgcaaagcgcacttcgccgtttgcgctg

SEQ ID NO: 350 - DNA, 48 bp, Artificial
  oligonucleotide probe
ttcggggaaacgccgtttcggggaaacgccgtttcgccgtttgcgctg

SEQ ID NO: 351 - DNA, 48 bp, Artificial
  oligonucleotide probe
ttcggggaaacgccgtttcggggaaacgccgtggctgcacggtcccgt

SEQ ID NO: 352 - DNA, 48 bp, Artificial
  oligonucleotide probe
aacgcgatttgccgcaaacgcgatttgccgcattgcaagcgtccggga

SEQ ID NO: 353 - DNA, 48 bp, Artificial
  oligonucleotide probe
cgcattgcggctttcgcgcattgcggctttcgccgtcgcaaagcgcac

SEQ ID NO: 354 - DNA, 48 bp, Artificial
  oligonucleotide probe
ggctttgcgcaccgtgggctttgcgcaccgtgttcgccgtttgcgctg

SEQ ID NO: 355 - DNA, 48 bp, Artificial
  oligonucleotide probe
aacgcgatttgccgcaaacgcgatttgccgcaatggcgcagcacgctg

SEQ ID NO: 356 - DNA, 48 bp, Artificial
  oligonucleotide probe
ttcgccgtttgcgctgttcgccgtttgcgctgaagccgtgcgcaacga

SEQ ID NO: 357 - DNA, 48 bp, Artificial
  oligonucleotide probe
cgcattgcggctttcgcgcattgcggctttcgttcgccgtttgcgctg

SEQ ID NO: 358 - DNA, 48 bp, Artificial
  oligonucleotide probe
ttcggggaaacgccgtttcggggaaacgccgtccgtcgcaaagcgcac

SEQ ID NO: 359 - DNA, 48 bp, Artificial
  oligonucleotide probe
ccgtttcggctgggctccgtttcggctgggctttcgccgtttgcgctg

SEQ ID NO: 360 - DNA, 48 bp, Artificial
  oligonucleotide probe
aacggctgcaagcgcaaacggctgcaagcgcattcgccgtttgcgctg

SEQ ID NO: 361 - DNA, 48 bp, Artificial
  oligonucleotide probe
ggctttgcgcaccgtgggctttgcgcaccgtgggctgcacggtcccgt

SEQ ID NO: 362 - DNA, 48 bp, Artificial
  oligonucleotide probe
ggctgcacggtcccgtggctgcacggtcccgtttcgccgtttgcgctg

SEQ ID NO: 363 - DNA, 48 bp, Artificial
  oligonucleotide probe
ccgtcgcaaagcgcacccgtcgcaaagcgcacggctgcacggtcccgt

SEQ ID NO: 364 - DNA, 48 bp, Artificial
  oligonucleotide probe
atggcgcagcacgctgatggcgcagcacgctgaacgcgatttgccgca

SEQ ID NO: 365 - DNA, 48 bp, Artificial
  oligonucleotide probe
ggctgcacggtcccgtggctgcacggtcccgtccgtcgcaaagcgcac

SEQ ID NO: 366 - DNA, 48 bp, Artificial
  oligonucleotide probe
ggctgcacggtcccgtggctgcacggtcccgtggctttgcgcaccgtg

SEQ ID NO: 367 - DNA, 48 bp, Artificial
  oligonucleotide probe
aacgcgatttgccgcaaacgcgatttgccgcaaacggctgcaagcgca

SEQ ID NO: 368 - DNA, 48 bp, Artificial
  oligonucleotide probe
ttcgccgtttgcgctgttcgccgtttgcgctgggctgcacggtcccgt

SEQ ID NO: 369 - DNA, 48 bp, Artificial
  oligonucleotide probe
aacggctgcaagcgcaaacggctgcaagcgcaggctgcacggtcccgt

SEQ ID NO: 370 - DNA, 48 bp, Artificial
  oligonucleotide probe
aacgcgatttgccgcaaacgcgatttgccgcaggctttgcgcaccgtg

SEQ ID NO: 371 - DNA, 48 bp, Artificial
  oligonucleotide probe
ccgtcgcaaagcgcacccgtcgcaaagcgcacaagccgtgcgcaacga

SEQ ID NO: 372 - DNA, 48 bp, Artificial
  oligonucleotide probe
aacgcgatttgccgcaaacgcgatttgccgcacgcattgcggctttcg

SEQ ID NO: 373 - DNA, 48 bp, Artificial
  oligonucleotide probe
ccgtcgcaaagcgcacccgtcgcaaagcgcacatggcgcagcacgctg

SEQ ID NO: 374 - DNA, 48 bp, Artificial
  oligonucleotide probe
ttcggggaaacgccgtttcggggaaacgccgtaacgcgatttgccgca

SEQ ID NO: 375 - DNA, 48 bp, Artificial
  oligonucleotide probe
ttcgccgtttgcgctgttcgccgtttgcgctgttgcaagcgtccggga

SEQ ID NO: 376 - DNA, 48 bp, Artificial
  oligonucleotide probe
ccgtcgcaaagcgcacccgtcgcaaagcgcacttgcaagcgtccggga

SEQ ID NO: 377 - DNA, 48 bp, Artificial
  oligonucleotide probe
ggctttgcgcaccgtgggctttgcgcaccgtgaacgcgatttgccgca

SEQ ID NO: 378 - DNA, 48 bp, Artificial
  oligonucleotide probe
aacgcgatttgccgcaaacgcgatttgccgcattcgccgtttgcgctg

SEQ ID NO: 379 - DNA, 48 bp, Artificial
  oligonucleotide probe
ttcgccgtttgcgctgttcgccgtttgcgctgcgcattgcggctttcg

SEQ ID NO: 380 - DNA, 48 bp, Artificial
  oligonucleotide probe
ccgtcgcaaagcgcacccgtcgcaaagcgcacaacgcgatttgccgca

SEQ ID NO: 381 - DNA, 48 bp, Artificial
  oligonucleotide probe
aacgcgatttgccgcaaacgcgatttgccgcaccgtttcggctgggct

SEQ ID NO: 382 - DNA, 48 bp, Artificial
  oligonucleotide probe
ttcgccgtttgcgctgttcgccgtttgcgctgaacgcgatttgccgca

SEQ ID NO: 383 - DNA, 48 bp, Artificial
  oligonucleotide probe
ccgtcgcaaagcgcacccgtcgcaaagcgcacaacggctgcaagcgca

SEQ ID NO: 384 - DNA, 48 bp, Artificial
  oligonucleotide probe
ttcgccgtttgcgctgttcgccgtttgcgctgggctttgcgcaccgtg

SEQ ID NO: 385 - DNA, 48 bp, Artificial
  oligonucleotide probe
ttgcaagcgtccgggaaacgcgatttgccgcagcaccgcagctgcgtg

SEQ ID NO: 386 - DNA, 48 bp, Artificial
  oligonucleotide probe
cgcattgcggctttcgatggcgcagcacgctggggattcgcgcaaacg

SEQ ID NO: 387 - DNA, 48 bp, Artificial
  oligonucleotide probe
atggcgcagcacgctgccgtttcggctgggctgggattcgcgcaaacg

SEQ ID NO: 388 - DNA, 48 bp, Artificial
  oligonucleotide probe
ttcgccgtttgcgctgttgcatggcgtggggagcaccgcagctgcgtg

SEQ ID NO: 389 - DNA, 48 bp, Artificial
  oligonucleotide probe
aagccgtgcgcaacgacgcattgcggctttcggggattcgcgcaaacg

SEQ ID NO: 390 - DNA, 48 bp, Artificial
  oligonucleotide probe
cgcattgcggctttcggcaccgcagctgcgtggcacgggaaagcggct

SEQ ID NO: 391 - DNA, 48 bp, Artificial
  oligonucleotide probe
ggctttgcgcaccgtgccgtttcggctgggctgcaccgcagctgcgtg

SEQ ID NO: 392 - DNA, 48 bp, Artificial
  oligonucleotide probe
aacgcgatttgccgcattcgccgtttgcgctgttgcatggcgtgggga

SEQ ID NO: 393 - DNA, 48 bp, Artificial
  oligonucleotide probe
aacgcgatttgccgcattgcatggcgtggggagcaccgcagctgcgtg

SEQ ID NO: 394 - DNA, 48 bp, Artificial
  oligonucleotide probe
ccgtcgcaaagcgcacggctgcacggtcccgtgcacgggaaagcggct

SEQ ID NO: 395 - DNA, 48 bp, Artificial
  oligonucleotide probe
ttgcaagcgtccgggaggctgcacggtcccgtgcaccgcagctgcgtg

SEQ ID NO: 396 - DNA, 48 bp, Artificial
  oligonucleotide probe
aagccgtgcgcaacgaaacgcgatttgccgcagcacgggaaagcggct

SEQ ID NO: 397 - DNA, 48 bp, Artificial
  oligonucleotide probe
ccgtttcggctgggctttcgccgtttgcgctggcaccgcagctgcgtg

SEQ ID NO: 398 - DNA, 48 bp, Artificial
  oligonucleotide probe
ttcgccgtttgcgctggcaccgcagctgcgtggcacgggaaagcggct

SEQ ID NO: 399 - DNA, 48 bp, Artificial
  oligonucleotide probe
ggctttgcgcaccgtggggattcgcgcaaacggcaccgcagctgcgtg

SEQ ID NO: 400 - DNA, 48 bp, Artificial
  oligonucleotide probe
ttgcaagcgtccgggaggctttgcgcaccgtggggattcgcgcaaacg

SEQ ID NO: 401 - DNA, 48 bp, Artificial
  oligonucleotide probe
ttcggggaaacgccgtccgtttcggctgggctttgcatggcgtgggga

SEQ ID NO: 402 - DNA, 48 bp, Artificial
  oligonucleotide probe
atggcgcagcacgctgttcgccgtttgcgctgttgcatggcgtgggga

SEQ ID NO: 403 - DNA, 48 bp, Artificial
  oligonucleotide probe
ttcggggaaacgccgtgggattcgcgcaaacgttgcatggcgtgggga

SEQ ID NO: 404 - DNA, 48 bp, Artificial
  oligonucleotide probe
aacggctgcaagcgcattcggggaaacgccgtgcaccgcagctgcgtg

SEQ ID NO: 405 - DNA, 48 bp, Artificial
  oligonucleotide probe
ttgcaagcgtccgggaccgtttcggctgggctgggattcgcgcaaacg

SEQ ID NO: 406 - DNA, 48 bp, Artificial
  oligonucleotide probe
aagccgtgcgcaacgattcggggaaacgccgtgggattcgcgcaaacg

SEQ ID NO: 407 - DNA, 48 bp, Artificial
  oligonucleotide probe
ccgtcgcaaagcgcacggctgcacggtcccgtgcaccgcagctgcgtg

SEQ ID NO: 408 - DNA, 48 bp, Artificial
  oligonucleotide probe
aacgcgatttgccgcaggctgcacggtcccgtgcaccgcagctgcgtg

SEQ ID NO: 409 - DNA, 48 bp, Artificial
  oligonucleotide probe
atggcgcagcacgctgccgtttcggctgggctgcaccgcagctgcgtg

SEQ ID NO: 410 - DNA, 48 bp, Artificial
  oligonucleotide probe
aagccgtgcgcaacgaggctgcacggtcccgtttgcatggcgtgggga

SEQ ID NO: 411 - DNA, 48 bp, Artificial
  oligonucleotide probe
cgcattgcggctttcgttcggggaaacgccgtgcacgggaaagcggct

SEQ ID NO: 412 - DNA, 48 bp, Artificial
  oligonucleotide probe
ccgtttcggctgggctccgtcgcaaagcgcacttgcatggcgtgggga

SEQ ID NO: 413 - DNA, 48 bp, Artificial
  oligonucleotide probe
cgcattgcggctttcgaacgcgatttgccgcattgcatggcgtgggga

SEQ ID NO: 414 - DNA, 48 bp, Artificial
  oligonucleotide probe
ttgcaagcgtccgggattcggggaaacgccgtgcacgggaaagcggct

SEQ ID NO: 415 - DNA, 48 bp, Artificial
  oligonucleotide probe
cgcattgcggctttcgaacggctgcaagcgcagggattcgcgcaaacg

SEQ ID NO: 416 - DNA, 48 bp, Artificial
  oligonucleotide probe
cgcattgcggctttcgaacggctgcaagcgcattgcatggcgtgggga

SEQ ID NO: 417 - DNA, 48 bp, Artificial
  oligonucleotide probe
cgcattgcggctttcgggctttgcgcaccgtggggattcgcgcaaacg

SEQ ID NO: 418 - DNA, 48 bp, Artificial
  oligonucleotide probe
ggctgcacggtcccgtgggattcgcgcaaacggcacgggaaagcggct

SEQ ID NO: 419 - DNA, 48 bp, Artificial
  oligonucleotide probe
cgcattgcggctttcggggattcgcgcaaacgttgcatggcgtgggga

SEQ ID NO: 420 - DNA, 48 bp, Artificial
  oligonucleotide probe
atggcgcagcacgctgttcgccgtttgcgctggcacgggaaagcggct

SEQ ID NO: 421 - DNA, 48 bp, Artificial
  oligonucleotide probe
aagccgtgcgcaacgagcaccgcagctgcgtggcacgggaaagcggct

SEQ ID NO: 422 - DNA, 48 bp, Artificial
  oligonucleotide probe
cgcattgcggctttcgttgcaagcgtccgggagcacgggaaagcggct

SEQ ID NO: 423 - DNA, 48 bp, Artificial
  oligonucleotide probe
ggctttgcgcaccgtgaacgcgatttgccgcagcacgggaaagcggct

SEQ ID NO: 424 - DNA, 48 bp, Artificial
  oligonucleotide probe
ttcggggaaacgccgtccgtcgcaaagcgcacgggattcgcgcaaacg

SEQ ID NO: 425 - DNA, 48 bp, Artificial
  oligonucleotide probe
atggcgcagcacgctggcaccgcagctgcgtggcacgggaaagcggct

SEQ ID NO: 426 - DNA, 48 bp, Artificial
  oligonucleotide probe
aagccgtgcgcaacgattcgccgtttgcgctggcacgggaaagcggct

SEQ ID NO: 427 - DNA, 48 bp, Artificial
  oligonucleotide probe
aagccgtgcgcaacgaggctgcacggtcccgtgcaccgcagctgcgtg

SEQ ID NO: 428 - DNA, 48 bp, Artificial
  oligonucleotide probe
ttcggggaaacgccgtttcgccgtttgcgctggcaccgcagctgcgtg

SEQ ID NO: 429 - DNA, 48 bp, Artificial
  oligonucleotide probe
ttcgccgtttgcgctgggctgcacggtcccgtgcacgggaaagcggct

SEQ ID NO: 430 - DNA, 48 bp, Artificial
  oligonucleotide probe
ccgtcgcaaagcgcacggctgcacggtcccgtttgcatggcgtgggga

SEQ ID NO: 431 - DNA, 48 bp, Artificial
  oligonucleotide probe
aacggctgcaagcgcaccgtttcggctgggctgcacgggaaagcggct

SEQ ID NO: 432 - DNA, 48 bp, Artificial
  oligonucleotide probe
ggctttgcgcaccgtggggattcgcgcaaacggcacgggaaagcggct

SEQ ID NO: 433 - DNA, 48 bp, Artificial
  oligonucleotide probe
aacggctgcaagcgcattcgccgtttgcgctggcaccgcagctgcgtg

SEQ ID NO: 434 - DNA, 48 bp, Artificial
  oligonucleotide probe
ggctttgcgcaccgtgggctgcacggtcccgtgcacgggaaagcggct

SEQ ID NO: 435 - DNA, 48 bp, Artificial
  oligonucleotide probe
aagccgtgcgcaacgattgcaagcgtccgggattgcatggcgtgggga

SEQ ID NO: 436 - DNA, 48 bp, Artificial
  oligonucleotide probe
aagccgtgcgcaacgacgcattgcggctttcggcaccgcagctgcgtg

SEQ ID NO: 437 - DNA, 48 bp, Artificial
  oligonucleotide probe
ttgcaagcgtccgggagcaccgcagctgcgtggcacgggaaagcggct

SEQ ID NO: 438 - DNA, 48 bp, Artificial
  oligonucleotide probe
ttgcaagcgtccgggaaacggctgcaagcgcagcacgggaaagcggct

SEQ ID NO: 439 - DNA, 48 bp, Artificial
  oligonucleotide probe
ggctttgcgcaccgtggggattcgcgcaaacgttgcatggcgtgggga

SEQ ID NO: 440 - DNA, 48 bp, Artificial
  oligonucleotide probe
ggctttgcgcaccgtgttcgccgtttgcgctggcacgggaaagcggct

SEQ ID NO: 441 - DNA, 48 bp, Artificial
  oligonucleotide probe
ggctttgcgcaccgtgttcgccgtttgcgctggcaccgcagctgcgtg

SEQ ID NO: 442 - DNA, 48 bp, Artificial
  oligonucleotide probe
aacgcgatttgccgcagggattcgcgcaaacgttgcatggcgtgggga

SEQ ID NO: 443 - DNA, 48 bp, Artificial
  oligonucleotide probe
cgcattgcggctttcgaacggctgcaagcgcagcaccgcagctgcgtg

SEQ ID NO: 444 - DNA, 48 bp, Artificial
  oligonucleotide probe
ccgtcgcaaagcgcacggctgcacggtcccgtgggattcgcgcaaacg

SEQ ID NO: 445 - DNA, 48 bp, Artificial
  oligonucleotide probe
ttcggggaaacgccgtaacgcgatttgccgcagggattcgcgcaaacg

SEQ ID NO: 446 - DNA, 48 bp, Artificial
  oligonucleotide probe
ggctttgcgcaccgtgccgtttcggctgggctttgcatggcgtgggga

SEQ ID NO: 447 - DNA, 48 bp, Artificial
  oligonucleotide probe
aacggctgcaagcgcaccgtttcggctgggctttgcatggcgtgggga

SEQ ID NO: 448 - DNA, 48 bp, Artificial
  oligonucleotide probe
ttcggggaaacgccgtttcgccgtttgcgctggcacgggaaagcggct

SEQ ID NO: 449 - DNA, 48 bp, Artificial
  oligonucleotide probe
atggcgcagcacgctgccgtcgcaaagcgcacttgcatggcgtgggga

SEQ ID NO: 450 - DNA, 48 bp, Artificial
  oligonucleotide probe
aagccgtgcgcaacgaaacgcgatttgccgcagggattcgcgcaaacg

SEQ ID NO: 451 - DNA, 48 bp, Artificial
  oligonucleotide probe
atggcgcagcacgctgttcggggaaacgccgtgcacgggaaagcggct

SEQ ID NO: 452 - DNA, 48 bp, Artificial
  oligonucleotide probe
cgcattgcggctttcgttcggggaaacgccgtgggattcgcgcaaacg

SEQ ID NO: 453 - DNA, 48 bp, Artificial
  oligonucleotide probe
ccgtttcggctgggctgcaccgcagctgcgtggcacgggaaagcggct

SEQ ID NO: 454 - DNA, 48 bp, Artificial
  oligonucleotide probe
cgcattgcggctttcgggctttgcgcaccgtggcacgggaaagcggct

SEQ ID NO: 455 - DNA, 48 bp, Artificial
  oligonucleotide probe
aacgcgatttgccgcaggctgcacggtcccgtttgcatggcgtgggga

SEQ ID NO: 456 - DNA, 48 bp, Artificial
  oligonucleotide probe
aagccgtgcgcaacgacgcattgcggctttcgttgcatggcgtgggga

SEQ ID NO: 457 - DNA, 48 bp, Artificial
  oligonucleotide probe
ccgtcgcaaagcgcacgggattcgcgcaaacgttgcatggcgtgggga

SEQ ID NO: 458 - DNA, 48 bp, Artificial
  oligonucleotide probe
ttgcaagcgtccgggaatggcgcagcacgctggcaccgcagctgcgtg

SEQ ID NO: 459 - DNA, 48 bp, Artificial
  oligonucleotide probe
aagccgtgcgcaacgagggattcgcgcaaacgttgcatggcgtgggga

SEQ ID NO: 460 - DNA, 48 bp, Artificial
  oligonucleotide probe
aacggctgcaagcgcattgcatggcgtggggagcacgggaaagcggct

SEQ ID NO: 461 - DNA, 48 bp, Artificial
  oligonucleotide probe
ttgcaagcgtccgggaaacggctgcaagcgcagggattcgcgcaaacg

SEQ ID NO: 462 - DNA, 48 bp, Artificial
  oligonucleotide probe
cgcattgcggctttcgttgcatggcgtggggagcaccgcagctgcgtg

SEQ ID NO: 463 - DNA, 48 bp, Artificial
  oligonucleotide probe
aagccgtgcgcaacgaatggcgcagcacgctggcacgggaaagcggct

SEQ ID NO: 464 - DNA, 48 bp, Artificial
  oligonucleotide probe
ttcggggaaacgccgtggctgcacggtcccgtgcaccgcagctgcgtg

SEQ ID NO: 465 - DNA, 48 bp, Artificial
  oligonucleotide probe
aacggctgcaagcgcaaacgcgatttgccgcagggattcgcgcaaacg

SEQ ID NO: 466 - DNA, 48 bp, Artificial
  oligonucleotide probe
atggcgcagcacgctgggctgcacggtcccgtgcaccgcagctgcgtg

SEQ ID NO: 467 - DNA, 48 bp, Artificial
  oligonucleotide probe
ttcgccgtttgcgctgccgtcgcaaagcgcacttgcatggcgtgggga

SEQ ID NO: 468 - DNA, 48 bp, Artificial
  oligonucleotide probe
ggctgcacggtcccgtgggattcgcgcaaacgttgcatggcgtgggga

SEQ ID NO: 469 - DNA, 48 bp, Artificial
  oligonucleotide probe
aacggctgcaagcgcaggctgcacggtcccgtgggattcgcgcaaacg

SEQ ID NO: 470 - DNA, 48 bp, Artificial
  oligonucleotide probe
ttcggggaaacgccgtttcgccgtttgcgctgttgcatggcgtgggga

SEQ ID NO: 471 - DNA, 48 bp, Artificial
  oligonucleotide probe
aacggctgcaagcgcaatggcgcagcacgctggcaccgcagctgcgtg

SEQ ID NO: 472 - DNA, 48 bp, Artificial
  oligonucleotide probe
ccgtttcggctgggctggctgcacggtcccgtgcaccgcagctgcgtg

SEQ ID NO: 473 - DNA, 48 bp, Artificial
  oligonucleotide probe
aagccgtgcgcaacgaggctgcacggtcccgtgggattcgcgcaaacg

SEQ ID NO: 474 - DNA, 48 bp, Artificial
  oligonucleotide probe
atggcgcagcacgctgaacgcgatttgccgcagcacgggaaagcggct

SEQ ID NO: 475 - DNA, 48 bp, Artificial
  oligonucleotide probe
atggcgcagcacgctggggattcgcgcaaacggcacgggaaagcggct

SEQ ID NO: 476 - DNA, 48 bp, Artificial
  oligonucleotide probe
ttgcaagcgtccgggaccgtttcggctgggctgcacgggaaagcggct

SEQ ID NO: 477 - DNA, 48 bp, Artificial
  oligonucleotide probe
ttcggggaaacgccgtgggattcgcgcaaacggcacgggaaagcggct

SEQ ID NO: 478 - DNA, 48 bp, Artificial
  oligonucleotide probe
aagccgtgcgcaacgattcggggaaacgccgtttgcatggcgtgggga

SEQ ID NO: 479 - DNA, 48 bp, Artificial
  oligonucleotide probe
gggattcgcgcaaacggcaccgcagctgcgtggcacgggaaagcggct

SEQ ID NO: 480 - DNA, 48 bp, Artificial
  oligonucleotide probe
cgcattgcggctttcgaacggctgcaagcgcagcacgggaaagcggct

SEQ ID NO: 481 - DNA, 48 bp, Artificial
  oligonucleotide probe
cgcattgcggctttcgttgcaagcgtccgggagcaccgcagctgcgtg

SEQ ID NO: 482 - DNA, 48 bp, Artificial
  oligonucleotide probe
aagccgtgcgcaacgattcgccgtttgcgctggggattcgcgcaaacg

SEQ ID NO: 483 - DNA, 48 bp, Artificial
  oligonucleotide probe
ccgtttcggctgggctgggattcgcgcaaacggcaccgcagctgcgtg

SEQ ID NO: 484 - DNA, 48 bp, Artificial
  oligonucleotide probe
atggcgcagcacgctgggctgcacggtcccgtgcacgggaaagcggct

SEQ ID NO: 485 - DNA, 48 bp, Artificial
  oligonucleotide probe
ttgcaagcgtccgggaatggcgcagcacgctgttgcatggcgtgggga

SEQ ID NO: 486 - DNA, 48 bp, Artificial
  oligonucleotide probe
aagccgtgcgcaacgattcggggaaacgccgtgcacgggaaagcggct

SEQ ID NO: 487 - DNA, 48 bp, Artificial
  oligonucleotide probe
aacggctgcaagcgcaggctgcacggtcccgtgcacgggaaagcggct

SEQ ID NO: 488 - DNA, 48 bp, Artificial
  oligonucleotide probe
ttgcaagcgtccgggaccgtttcggctgggctttgcatggcgtgggga

SEQ ID NO: 489 - DNA, 48 bp, Artificial
  oligonucleotide probe
aagccgtgcgcaacgaggctttgcgcaccgtggcaccgcagctgcgtg

SEQ ID NO: 490 - DNA, 48 bp, Artificial
  oligonucleotide probe
cgcattgcggctttcgggctgcacggtcccgtgggattcgcgcaaacg

SEQ ID NO: 491 - DNA, 48 bp, Artificial
  oligonucleotide probe
ttcggggaaacgccgtaacgcgatttgccgcagcacgggaaagcggct

SEQ ID NO: 492 - DNA, 48 bp, Artificial
  oligonucleotide probe
ttcgccgtttgcgctggggattcgcgcaaacgttgcatggcgtgggga

SEQ ID NO: 493 - DNA, 48 bp, Artificial
  oligonucleotide probe
ggctttgcgcaccgtgttcggggaaacgccgtgcacgggaaagcggct

SEQ ID NO: 494 - DNA, 48 bp, Artificial
  oligonucleotide probe
ttgcaagcgtccgggattcggggaaacgccgtgggattcgcgcaaacg

SEQ ID NO: 495 - DNA, 48 bp, Artificial
  oligonucleotide probe
ggctttgcgcaccgtgttgcatggcgtggggagcaccgcagctgcgtg

SEQ ID NO: 496 - DNA, 48 bp, Artificial
  oligonucleotide probe
ttcggggaaacgccgtccgtcgcaaagcgcacttgcatggcgtgggga

SEQ ID NO: 497 - DNA, 48 bp, Artificial
  oligonucleotide probe
ggctttgcgcaccgtggcaccgcagctgcgtggcacgggaaagcggct

SEQ ID NO: 498 - DNA, 48 bp, Artificial
  oligonucleotide probe
aagccgtgcgcaacgaatggcgcagcacgctggcaccgcagctgcgtg

SEQ ID NO: 499 - DNA, 48 bp, Artificial
  oligonucleotide probe
ccgtttcggctgggctccgtcgcaaagcgcacgcaccgcagctgcgtg

SEQ ID NO: 500 - DNA, 48 bp, Artificial
  oligonucleotide probe
aacgcgatttgccgcaccgtcgcaaagcgcacgcacgggaaagcggct

SEQ ID NO: 501 - DNA, 48 bp, Artificial
  oligonucleotide probe
ttgcaagcgtccgggaccgtcgcaaagcgcacttgcatggcgtgggga

SEQ ID NO: 502 - DNA, 48 bp, Artificial
  oligonucleotide probe
aacggctgcaagcgcattcggggaaacgccgtgcacgggaaagcggct

SEQ ID NO: 503 - DNA, 48 bp, Artificial
  oligonucleotide probe
aagccgtgcgcaacgaccgtttcggctgggctgggattcgcgcaaacg

SEQ ID NO: 504 - DNA, 48 bp, Artificial
  oligonucleotide probe
aacggctgcaagcgcaaacgcgatttgccgcattgcatggcgtgggga

SEQ ID NO: 505 - DNA, 48 bp, Artificial
  oligonucleotide probe
ttcggggaaacgccgtggctgcacggtcccgtgggattcgcgcaaacg

SEQ ID NO: 506 - DNA, 48 bp, Artificial
  oligonucleotide probe
aagccgtgcgcaacgaaacgcgatttgccgcagcaccgcagctgcgtg

SEQ ID NO: 507 - DNA, 48 bp, Artificial
  oligonucleotide probe
atggcgcagcacgctgaacgcgatttgccgcagggattcgcgcaaacg

SEQ ID NO: 508 - DNA, 48 bp, Artificial
  oligonucleotide probe
atggcgcagcacgctgccgtttcggctgggctttgcatggcgtgggga

SEQ ID NO: 509 - DNA, 48 bp, Artificial
  oligonucleotide probe
ggctttgcgcaccgtgttcggggaaacgccgtgggattcgcgcaaacg

SEQ ID NO: 510 - DNA, 48 bp, Artificial
  oligonucleotide probe
aagccgtgcgcaacgaaacggctgcaagcgcagcaccgcagctgcgtg

SEQ ID NO: 511 - DNA, 48 bp, Artificial
  oligonucleotide probe
aacggctgcaagcgcaatggcgcagcacgctggggattcgcgcaaacg

SEQ ID NO: 512 - DNA, 48 bp, Artificial
  oligonucleotide probe
ttgcaagcgtccgggaggctttgcgcaccgtgttgcatggcgtgggga

SEQ ID NO: 513 - DNA, 48 bp, Artificial
  oligonucleotide probe
ccgtttcggctgggctggctgcacggtcccgtgcacgggaaagcggct

SEQ ID NO: 514 - DNA, 48 bp, Artificial
  oligonucleotide probe
ttgcaagcgtccgggagggattcgcgcaaacggcacgggaaagcggct

SEQ ID NO: 515 - DNA, 48 bp, Artificial
  oligonucleotide probe
aacggctgcaagcgcaccgtcgcaaagcgcacgcaccgcagctgcgtg

SEQ ID NO: 516 - DNA, 48 bp, Artificial
  oligonucleotide probe
ccgtttcggctgggctggctgcacggtcccgtttgcatggcgtgggga

SEQ ID NO: 517 - DNA, 48 bp, Artificial
  oligonucleotide probe
cgcattgcggctttcgatggcgcagcacgctggcacgggaaagcggct

SEQ ID NO: 518 - DNA, 48 bp, Artificial
  oligonucleotide probe
aagccgtgcgcaacgattcggggaaacgccgtgcaccgcagctgcgtg

SEQ ID NO: 519 - DNA, 48 bp, Artificial
  oligonucleotide probe
aagccgtgcgcaacgattcgccgtttgcgctggcaccgcagctgcgtg

SEQ ID NO: 520 - DNA, 48 bp, Artificial
  oligonucleotide probe
cgcattgcggctttcgttcgccgtttgcgctggcacgggaaagcggct

SEQ ID NO: 521 - DNA, 48 bp, Artificial
  oligonucleotide probe
aagccgtgcgcaacgattgcaagcgtccgggagcacgggaaagcggct

SEQ ID NO: 522 - DNA, 48 bp, Artificial
  oligonucleotide probe
ggctttgcgcaccgtgttgcatggcgtggggagcacgggaaagcggct

SEQ ID NO: 523 - DNA, 48 bp, Artificial
  oligonucleotide probe
cgcattgcggctttcgccgtttcggctgggctgcacgggaaagcggct

SEQ ID NO: 524 - DNA, 48 bp, Artificial
  oligonucleotide probe
ttcgccgtttgcgctgggctgcacggtcccgtgggattcgcgcaaacg

SEQ ID NO: 525 - DNA, 48 bp, Artificial
  oligonucleotide probe
aagccgtgcgcaacgaatggcgcagcacgctgttgcatggcgtgggga

SEQ ID NO: 526 - DNA, 48 bp, Artificial
  oligonucleotide probe
ggctttgcgcaccgtgttcgccgtttgcgctgttgcatggcgtgggga

SEQ ID NO: 527 - DNA, 48 bp, Artificial
  oligonucleotide probe
cgcattgcggctttcggggattcgcgcaaacggcaccgcagctgcgtg

SEQ ID NO: 528 - DNA, 48 bp, Artificial
  oligonucleotide probe
ccgtttcggctgggctaacgcgatttgccgcattgcatggcgtgggga

SEQ ID NO: 529 - DNA, 48 bp, Artificial
  oligonucleotide probe
atggcgcagcacgctgccgtcgcaaagcgcacgcacgggaaagcggct

SEQ ID NO: 530 - DNA, 48 bp, Artificial
  oligonucleotide probe
aacgcgatttgccgcaccgtcgcaaagcgcacgggattcgcgcaaacg

SEQ ID NO: 531 - DNA, 48 bp, Artificial
  oligonucleotide probe
ttcggggaaacgccgtggctgcacggtcccgtttgcatggcgtgggga

SEQ ID NO: 532 - DNA, 48 bp, Artificial
  oligonucleotide probe
cgcattgcggctttcgttgcatggcgtggggagcacgggaaagcggct

SEQ ID NO: 533 - DNA, 48 bp, Artificial
  oligonucleotide probe
cgcattgcggctttcgttcgccgtttgcgctggggattcgcgcaaacg

SEQ ID NO: 534 - DNA, 48 bp, Artificial
  oligonucleotide probe
ccgtcgcaaagcgcacttgcatggcgtggggagcaccgcagctgcgtg

SEQ ID NO: 535 - DNA, 48 bp, Artificial
  oligonucleotide probe
cgcattgcggctttcgttgcaagcgtccgggattgcatggcgtgggga

SEQ ID NO: 536 - DNA, 48 bp, Artificial
  oligonucleotide probe
ttcggggaaacgccgtttcgccgtttgcgctggggattcgcgcaaacg

SEQ ID NO: 537 - DNA, 48 bp, Artificial
  oligonucleotide probe
aagccgtgcgcaacgaaacgcgatttgccgcattgcatggcgtgggga

SEQ ID NO: 538 - DNA, 48 bp, Artificial
  oligonucleotide probe
ggctgcacggtcccgtgggattcgcgcaaacggcaccgcagctgcgtg

SEQ ID NO: 539 - DNA, 48 bp, Artificial
  oligonucleotide probe
aacgcgatttgccgcattgcatggcgtggggagcacgggaaagcggct

SEQ ID NO: 540 - DNA, 48 bp, Artificial
  oligonucleotide probe
ggctttgcgcaccgtgaacgcgatttgccgcattgcatggcgtgggga

SEQ ID NO: 541 - DNA, 48 bp, Artificial
  oligonucleotide probe
ttgcaagcgtccgggagggattcgcgcaaacggcaccgcagctgcgtg

SEQ ID NO: 542 - DNA, 48 bp, Artificial
  oligonucleotide probe
ccgtttcggctgggctttgcatggcgtggggagcaccgcagctgcgtg

SEQ ID NO: 543 - DNA, 48 bp, Artificial
  oligonucleotide probe
cgcattgcggctttcgttgcaagcgtccgggagggattcgcgcaaacg

SEQ ID NO: 544 - DNA, 48 bp, Artificial
  oligonucleotide probe
atggcgcagcacgctggggattcgcgcaaacgttgcatggcgtgggga

SEQ ID NO: 545 - DNA, 48 bp, Artificial
  oligonucleotide probe
aagccgtgcgcaacgaccgtttcggctgggctgcaccgcagctgcgtg

SEQ ID NO: 546 - DNA, 48 bp, Artificial
  oligonucleotide probe
ttcggggaaacgccgtggctgcacggtcccgtgcacgggaaagcggct

SEQ ID NO: 547 - DNA, 48 bp, Artificial
  oligonucleotide probe
aagccgtgcgcaacgaccgtcgcaaagcgcacgcacgggaaagcggct

SEQ ID NO: 548 - DNA, 48 bp, Artificial
  oligonucleotide probe
cgcattgcggctttcgccgtttcggctgggctgcaccgcagctgcgtg

SEQ ID NO: 549 - DNA, 48 bp, Artificial
  oligonucleotide probe
atggcgcagcacgctgccgtttcggctgggctgcacgggaaagcggct

SEQ ID NO: 550 - DNA, 48 bp, Artificial
  oligonucleotide probe
ttgcaagcgtccgggaccgtcgcaaagcgcacgcaccgcagctgcgtg

SEQ ID NO: 551 - DNA, 48 bp, Artificial
  oligonucleotide probe
ccgtttcggctgggctttcgccgtttgcgctggggattcgcgcaaacg

SEQ ID NO: 552 - DNA, 48 bp, Artificial
  oligonucleotide probe
ttcgccgtttgcgctgttgcatggcgtggggagcacgggaaagcggct

SEQ ID NO: 553 - DNA, 48 bp, Artificial
  oligonucleotide probe
ccgtttcggctgggctgggattcgcgcaaacggcacgggaaagcggct

SEQ ID NO: 554 - DNA, 48 bp, Artificial
  oligonucleotide probe
gggattcgcgcaaacgttgcatggcgtggggagcacgggaaagcggct

SEQ ID NO: 555 - DNA, 48 bp, Artificial
  oligonucleotide probe
aagccgtgcgcaacgaccgtttcggctgggctgcacgggaaagcggct

SEQ ID NO: 556 - DNA, 48 bp, Artificial
  oligonucleotide probe
ttgcaagcgtccgggattcgccgtttgcgctgttgcatggcgtgggga

SEQ ID NO: 557 - DNA, 48 bp, Artificial
  oligonucleotide probe
ttcggggaaacgccgtgggattcgcgcaaacggcaccgcagctgcgtg

SEQ ID NO: 558 - DNA, 48 bp, Artificial
  oligonucleotide probe
ccgtttcggctgggctgggattcgcgcaaacgttgcatggcgtgggga

SEQ ID NO: 559 - DNA, 48 bp, Artificial
  oligonucleotide probe
aacggctgcaagcgcagggattcgcgcaaacggcacgggaaagcggct

SEQ ID NO: 560 - DNA, 48 bp, Artificial
  oligonucleotide probe
aacggctgcaagcgcattcgccgtttgcgctgttgcatggcgtgggga

SEQ ID NO: 561 - DNA, 48 bp, Artificial
  oligonucleotide probe
ggctttgcgcaccgtgttcggggaaacgccgtttgcatggcgtgggga

SEQ ID NO: 562 - DNA, 48 bp, Artificial
  oligonucleotide probe
aacggctgcaagcgcaccgtcgcaaagcgcacttgcatggcgtgggga

SEQ ID NO: 563 - DNA, 48 bp, Artificial
  oligonucleotide probe
ttgcaagcgtccgggagggattcgcgcaaacgttgcatggcgtgggga

SEQ ID NO: 564 - DNA, 48 bp, Artificial
  oligonucleotide probe
aacggctgcaagcgcaatggcgcagcacgctgttgcatggcgtgggga

SEQ ID NO: 565 - DNA, 48 bp, Artificial
  oligonucleotide probe
atggcgcagcacgctgccgtcgcaaagcgcacgggattcgcgcaaacg

SEQ ID NO: 566 - DNA, 48 bp, Artificial
  oligonucleotide probe
ttgcaagcgtccgggattcggggaaacgccgtgcaccgcagctgcgtg

SEQ ID NO: 567 - DNA, 48 bp, Artificial
  oligonucleotide probe
aagccgtgcgcaacgaccgtcgcaaagcgcacttgcatggcgtgggga

SEQ ID NO: 568 - DNA, 48 bp, Artificial
  oligonucleotide probe
cgcattgcggctttcgccgtcgcaaagcgcacttgcatggcgtgggga

SEQ ID NO: 569 - DNA, 48 bp, Artificial
  oligonucleotide probe
atggcgcagcacgctgggctgcacggtcccgtgggattcgcgcaaacg

SEQ ID NO: 570 - DNA, 48 bp, Artificial
  oligonucleotide probe
aacgcgatttgccgcagggattcgcgcaaacggcaccgcagctgcgtg

SEQ ID NO: 571 - DNA, 48 bp, Artificial
  oligonucleotide probe
ttcgccgtttgcgctgggctgcacggtcccgtttgcatggcgtgggga

SEQ ID NO: 572 - DNA, 48 bp, Artificial
  oligonucleotide probe
aagccgtgcgcaacgaccgtcgcaaagcgcacgggattcgcgcaaacg

SEQ ID NO: 573 - DNA, 48 bp, Artificial
  oligonucleotide probe
atggcgcagcacgctgaacgcgatttgccgcattgcatggcgtgggga

SEQ ID NO: 574 - DNA, 48 bp, Artificial
  oligonucleotide probe
aacgcgatttgccgcagcaccgcagctgcgtggcacgggaaagcggct

SEQ ID NO: 575 - DNA, 48 bp, Artificial
  oligonucleotide probe
atggcgcagcacgctgttcggggaaacgccgtgcaccgcagctgcgtg

SEQ ID NO: 576 - DNA, 48 bp, Artificial
  oligonucleotide probe
ccgtcgcaaagcgcacttgcatggcgtggggagcacgggaaagcggct

SEQ ID NO: 577 - DNA, 48 bp, Artificial
  oligonucleotide probe
ttcgccgtttgcgctgccgtcgcaaagcgcacgcaccgcagctgcgtg

SEQ ID NO: 578 - DNA, 48 bp, Artificial
  oligonucleotide probe
ttgcaagcgtccgggaggctgcacggtcccgtgggattcgcgcaaacg

SEQ ID NO: 579 - DNA, 48 bp, Artificial
  oligonucleotide probe
cgcattgcggctttcgttcggggaaacgccgtgcaccgcagctgcgtg

SEQ ID NO: 580 - DNA, 48 bp, Artificial
  oligonucleotide probe
ttgcaagcgtccgggaaacgcgatttgccgcagggattcgcgcaaacg

SEQ ID NO: 581 - DNA, 48 bp, Artificial
  oligonucleotide probe
aacggctgcaagcgcaaacgcgatttgccgcagcaccgcagctgcgtg

SEQ ID NO: 582 - DNA, 48 bp, Artificial
  oligonucleotide probe
ttgcaagcgtccgggaaacgcgatttgccgcattgcatggcgtgggga

SEQ ID NO: 583 - DNA, 48 bp, Artificial
  oligonucleotide probe
cgcattgcggctttcgccgtcgcaaagcgcacgggattcgcgcaaacg

SEQ ID NO: 584 - DNA, 48 bp, Artificial
  oligonucleotide probe
aacggctgcaagcgcaccgtttcggctgggctgcaccgcagctgcgtg

SEQ ID NO: 585 - DNA, 48 bp, Artificial
  oligonucleotide probe
aacggctgcaagcgcaccgtttcggctgggctgggattcgcgcaaacg

SEQ ID NO: 586 - DNA, 48 bp, Artificial
  oligonucleotide probe
atggcgcagcacgctgttcgccgtttgcgctggggattcgcgcaaacg

SEQ ID NO: 587 - DNA, 48 bp, Artificial
  oligonucleotide probe
aacgcgatttgccgcaccgtcgcaaagcgcacgcaccgcagctgcgtg

SEQ ID NO: 588 - DNA, 48 bp, Artificial
  oligonucleotide probe
cgcattgcggctttcgatggcgcagcacgctggcaccgcagctgcgtg

SEQ ID NO: 589 - DNA, 48 bp, Artificial
  oligonucleotide probe
ccgtttcggctgggctaacgcgatttgccgcagcaccgcagctgcgtg

SEQ ID NO: 590 - DNA, 48 bp, Artificial
  oligonucleotide probe
ggctgcacggtcccgtttgcatggcgtggggagcaccgcagctgcgtg

SEQ ID NO: 591 - DNA, 48 bp, Artificial
  oligonucleotide probe
ttcggggaaacgccgtgcaccgcagctgcgtggcacgggaaagcggct

SEQ ID NO: 592 - DNA, 48 bp, Artificial
  oligonucleotide probe
aacggctgcaagcgcaggctttgcgcaccgtgttgcatggcgtgggga

SEQ ID NO: 593 - DNA, 48 bp, Artificial
  oligonucleotide probe
ttgcaagcgtccgggattcgccgtttgcgctggcaccgcagctgcgtg

SEQ ID NO: 594 - DNA, 48 bp, Artificial
  oligonucleotide probe
ttgcaagcgtccgggattgcatggcgtggggagcacgggaaagcggct

SEQ ID NO: 595 - DNA, 48 bp, Artificial
  oligonucleotide probe
ccgtttcggctgggctaacgcgatttgccgcagggattcgcgcaaacg

SEQ ID NO: 596 - DNA, 48 bp, Artificial
  oligonucleotide probe
atggcgcagcacgctgccgtcgcaaagcgcacgcaccgcagctgcgtg

SEQ ID NO: 597 - DNA, 48 bp, Artificial
  oligonucleotide probe
ttcggggaaacgccgtttgcatggcgtggggagcaccgcagctgcgtg

SEQ ID NO: 598 - DNA, 48 bp, Artificial
  oligonucleotide probe
aacggctgcaagcgcagcaccgcagctgcgtggcacgggaaagcggct

SEQ ID NO: 599 - DNA, 48 bp, Artificial
  oligonucleotide probe
ttgcaagcgtccgggaccgtttcggctgggctgcaccgcagctgcgtg

SEQ ID NO: 600 - DNA, 48 bp, Artificial
  oligonucleotide probe
ttgcaagcgtccgggaaacgcgatttgccgcagcacgggaaagcggct

SEQ ID NO: 601 - DNA, 48 bp, Artificial
  oligonucleotide probe
cgcattgcggctttcgggctgcacggtcccgtttgcatggcgtgggga

SEQ ID NO: 602 - DNA, 48 bp, Artificial
  oligonucleotide probe
atggcgcagcacgctgttcggggaaacgccgtttgcatggcgtgggga

SEQ ID NO: 603 - DNA, 48 bp, Artificial
  oligonucleotide probe
ttcggggaaacgccgtaacgcgatttgccgcattgcatggcgtgggga

SEQ ID NO: 604 - DNA, 48 bp, Artificial
  oligonucleotide probe
ttcgccgtttgcgctgccgtcgcaaagcgcacgcacgggaaagcggct

SEQ ID NO: 605 - DNA, 48 bp, Artificial
  oligonucleotide probe
ccgtttcggctgggctggctgcacggtcccgtgggattcgcgcaaacg

SEQ ID NO: 606 - DNA, 48 bp, Artificial
  oligonucleotide probe
aacggctgcaagcgcattcggggaaacgccgtttgcatggcgtgggga

SEQ ID NO: 607 - DNA, 48 bp, Artificial
  oligonucleotide probe
cgcattgcggctttcgttcgccgtttgcgctgttgcatggcgtgggga

SEQ ID NO: 608 - DNA, 48 bp, Artificial
  oligonucleotide probe
atggcgcagcacgctgttcggggaaacgccgtgggattcgcgcaaacg

SEQ ID NO: 609 - DNA, 48 bp, Artificial
  oligonucleotide probe
aacgcgatttgccgcattcgccgtttgcgctggcaccgcagctgcgtg

SEQ ID NO: 610 - DNA, 48 bp, Artificial
  oligonucleotide probe
cgcattgcggctttcgaacgcgatttgccgcagggattcgcgcaaacg

SEQ ID NO: 611 - DNA, 48 bp, Artificial
  oligonucleotide probe
ggctttgcgcaccgtgggctgcacggtcccgtgcaccgcagctgcgtg

SEQ ID NO: 612 - DNA, 48 bp, Artificial
  oligonucleotide probe
ttgcaagcgtccgggattcgccgtttgcgctggggattcgcgcaaacg

SEQ ID NO: 613 - DNA, 48 bp, Artificial
  oligonucleotide probe
ggctttgcgcaccgtgccgtcgcaaagcgcacgcaccgcagctgcgtg

SEQ ID NO: 614 - DNA, 48 bp, Artificial
  oligonucleotide probe
aacgcgatttgccgcaccgtcgcaaagcgcacttgcatggcgtgggga

SEQ ID NO: 615 - DNA, 48 bp, Artificial
  oligonucleotide probe
ttgcaagcgtccgggattgcatggcgtggggagcaccgcagctgcgtg

SEQ ID NO: 616 - DNA, 48 bp, Artificial
  oligonucleotide probe
ccgtttcggctgggctttgcatggcgtggggagcacgggaaagcggct

SEQ ID NO: 617 - DNA, 48 bp, Artificial
  oligonucleotide probe
ttgcaagcgtccgggaaacggctgcaagcgcattgcatggcgtgggga

SEQ ID NO: 618 - DNA, 48 bp, Artificial
  oligonucleotide probe
aacggctgcaagcgcattcgccgtttgcgctggcacgggaaagcggct

SEQ ID NO: 619 - DNA, 48 bp, Artificial
  oligonucleotide probe
cgcattgcggctttcgccgtttcggctgggctttgcatggcgtgggga

SEQ ID NO: 620 - DNA, 48 bp, Artificial
  oligonucleotide probe
cgcattgcggctttcggggattcgcgcaaacggcacgggaaagcggct

SEQ ID NO: 621 - DNA, 48 bp, Artificial
  oligonucleotide probe
atggcgcagcacgctgaacgcgatttgccgcagcaccgcagctgcgtg

SEQ ID NO: 622 - DNA, 48 bp, Artificial
  oligonucleotide probe
aagccgtgcgcaacgaccgtttcggctgggctttgcatggcgtgggga

SEQ ID NO: 623 - DNA, 48 bp, Artificial
  oligonucleotide probe
ggctttgcgcaccgtgaacgcgatttgccgcagggattcgcgcaaacg

SEQ ID NO: 624 - DNA, 48 bp, Artificial
  oligonucleotide probe
ttgcaagcgtccgggaatggcgcagcacgctggcacgggaaagcggct

SEQ ID NO: 625 - DNA, 48 bp, Artificial
  oligonucleotide probe
gggattcgcgcaaacgttgcatggcgtggggagcaccgcagctgcgtg

SEQ ID NO: 626 - DNA, 48 bp, Artificial
  oligonucleotide probe
ggctgcacggtcccgtgcaccgcagctgcgtggcacgggaaagcggct

SEQ ID NO: 627 - DNA, 48 bp, Artificial
  oligonucleotide probe
ggctttgcgcaccgtgatggcgcagcacgctggcacgggaaagcggct

SEQ ID NO: 628 - DNA, 48 bp, Artificial
  oligonucleotide probe
ggctttgcgcaccgtgttcgccgtttgcgctggggattcgcgcaaacg

SEQ ID NO: 629 - DNA, 48 bp, Artificial
  oligonucleotide probe
cgcattgcggctttcgttcggggaaacgccgtttgcatggcgtgggga

SEQ ID NO: 630 - DNA, 48 bp, Artificial
  oligonucleotide probe
cgcattgcggctttcgttcgccgtttgcgctggcaccgcagctgcgtg

SEQ ID NO: 631 - DNA, 48 bp, Artificial
  oligonucleotide probe
ccgtttcggctgggctccgtcgcaaagcgcacgggattcgcgcaaacg

SEQ ID NO: 632 - DNA, 48 bp, Artificial
  oligonucleotide probe
aagccgtgcgcaacgagggattcgcgcaaacggcaccgcagctgcgtg

SEQ ID NO: 633 - DNA, 48 bp, Artificial
  oligonucleotide probe
cgcattgcggctttcgggctgcacggtcccgtgcaccgcagctgcgtg

SEQ ID NO: 634 - DNA, 48 bp, Artificial
  oligonucleotide probe
aagccgtgcgcaacgacgcattgcggctttcggcacgggaaagcggct

SEQ ID NO: 635 - DNA, 48 bp, Artificial
  oligonucleotide probe
aacggctgcaagcgcattcgccgtttgcgctggggattcgcgcaaacg

SEQ ID NO: 636 - DNA, 48 bp, Artificial
  oligonucleotide probe
cgcattgcggctttcgccgtttcggctgggctgggattcgcgcaaacg

SEQ ID NO: 637 - DNA, 48 bp, Artificial
  oligonucleotide probe
aagccgtgcgcaacgaggctgcacggtcccgtgcacgggaaagcggct

SEQ ID NO: 638 - DNA, 48 bp, Artificial
  oligonucleotide probe
ttcggggaaacgccgtccgtttcggctgggctgcaccgcagctgcgtg

SEQ ID NO: 639 - DNA, 48 bp, Artificial
  oligonucleotide probe
aacggctgcaagcgcaaacgcgatttgccgcagcacgggaaagcggct

SEQ ID NO: 640 - DNA, 48 bp, Artificial
  oligonucleotide probe
ttcggggaaacgccgtccgtttcggctgggctgggattcgcgcaaacg

SEQ ID NO: 641 - DNA, 48 bp, Artificial
  oligonucleotide probe
ttcggggaaacgccgtccgtttcggctgggctgcacgggaaagcggct

SEQ ID NO: 642 - DNA, 48 bp, Artificial
  oligonucleotide probe
aacggctgcaagcgcaatggcgcagcacgctggcacgggaaagcggct

SEQ ID NO: 643 - DNA, 48 bp, Artificial
  oligonucleotide probe
aacggctgcaagcgcattcggggaaacgccgtgggattcgcgcaaacg

SEQ ID NO: 644 - DNA, 48 bp, Artificial
  oligonucleotide probe
ggctttgcgcaccgtgatggcgcagcacgctggggattcgcgcaaacg

SEQ ID NO: 645 - DNA, 48 bp, Artificial
  oligonucleotide probe
ccgtcgcaaagcgcacgcaccgcagctgcgtggcacgggaaagcggct

SEQ ID NO: 646 - DNA, 48 bp, Artificial
  oligonucleotide probe
aagccgtgcgcaacgaggctttgcgcaccgtggggattcgcgcaaacg

SEQ ID NO: 647 - DNA, 48 bp, Artificial
  oligonucleotide probe
cgcattgcggctttcgccgtcgcaaagcgcacgcacgggaaagcggct

SEQ ID NO: 648 - DNA, 48 bp, Artificial
  oligonucleotide probe
ccgtttcggctgggctttcgccgtttgcgctggcacgggaaagcggct

SEQ ID NO: 649 - DNA, 48 bp, Artificial
  oligonucleotide probe
aacgcgatttgccgcattcgccgtttgcgctggggattcgcgcaaacg

SEQ ID NO: 650 - DNA, 48 bp, Artificial
  oligonucleotide probe
ggctttgcgcaccgtgccgtcgcaaagcgcacgcacgggaaagcggct

SEQ ID NO: 651 - DNA, 48 bp, Artificial
  oligonucleotide probe
aacggctgcaagcgcaggctttgcgcaccgtggggattcgcgcaaacg

SEQ ID NO: 652 - DNA, 48 bp, Artificial
  oligonucleotide probe
ggctttgcgcaccgtgatggcgcagcacgctggcaccgcagctgcgtg

SEQ ID NO: 653 - DNA, 48 bp, Artificial
  oligonucleotide probe
aacggctgcaagcgcagggattcgcgcaaacgttgcatggcgtgggga

SEQ ID NO: 654 - DNA, 48 bp, Artificial
  oligonucleotide probe
ttgcaagcgtccgggaggctgcacggtcccgtttgcatggcgtgggga

SEQ ID NO: 655 - DNA, 48 bp, Artificial
  oligonucleotide probe
ttgcaagcgtccgggaccgtcgcaaagcgcacgggattcgcgcaaacg

SEQ ID NO: 656 - DNA, 48 bp, Artificial
  oligonucleotide probe
cgcattgcggctttcgaacgcgatttgccgcagcacgggaaagcggct

SEQ ID NO: 657 - DNA, 48 bp, Artificial
  oligonucleotide probe
ttgcaagcgtccgggaggctgcacggtcccgtgcacgggaaagcggct

SEQ ID NO: 658 - DNA, 48 bp, Artificial
  oligonucleotide probe
cgcattgcggctttcgggctgcacggtcccgtgcacgggaaagcggct

SEQ ID NO: 659 - DNA, 48 bp, Artificial
  oligonucleotide probe
aacggctgcaagcgcagggattcgcgcaaacggcaccgcagctgcgtg

SEQ ID NO: 660 - DNA, 48 bp, Artificial
  oligonucleotide probe
ggctttgcgcaccgtgttcggggaaacgccgtgcaccgcagctgcgtg

SEQ ID NO: 661 - DNA, 48 bp, Artificial
  oligonucleotide probe
ggctttgcgcaccgtgccgtttcggctgggctgggattcgcgcaaacg

SEQ ID NO: 662 - DNA, 48 bp, Artificial
  oligonucleotide probe
aagccgtgcgcaacgaaacggctgcaagcgcattgcatggcgtgggga

SEQ ID NO: 663 - DNA, 48 bp, Artificial
  oligonucleotide probe
ttcggggaaacgccgtccgtcgcaaagcgcacgcaccgcagctgcgtg

SEQ ID NO: 664 - DNA, 48 bp, Artificial
  oligonucleotide probe
ttgcaagcgtccgggaatggcgcagcacgctggggattcgcgcaaacg

SEQ ID NO: 665 - DNA, 48 bp, Artificial
  oligonucleotide probe
ttgcaagcgtccgggattcggggaaacgccgtttgcatggcgtgggga

SEQ ID NO: 666 - DNA, 48 bp, Artificial
  oligonucleotide probe
aagccgtgcgcaacgaatggcgcagcacgctggggattcgcgcaaacg

SEQ ID NO: 667 - DNA, 48 bp, Artificial
  oligonucleotide probe
ccgtcgcaaagcgcacgggattcgcgcaaacggcaccgcagctgcgtg

SEQ ID NO: 668 - DNA, 48 bp, Artificial
  oligonucleotide probe
aagccgtgcgcaacgattgcatggcgtggggagcaccgcagctgcgtg

SEQ ID NO: 669 - DNA, 48 bp, Artificial
  oligonucleotide probe
aacggctgcaagcgcaggctgcacggtcccgtttgcatggcgtgggga

SEQ ID NO: 670 - DNA, 48 bp, Artificial
  oligonucleotide probe
ggctttgcgcaccgtgccgtttcggctgggctgcacgggaaagcggct

SEQ ID NO: 671 - DNA, 48 bp, Artificial
  oligonucleotide probe
aacgcgatttgccgcaggctgcacggtcccgtgggattcgcgcaaacg

SEQ ID NO: 672 - DNA, 48 bp, Artificial
  oligonucleotide probe
aagccgtgcgcaacgaaacggctgcaagcgcagcacgggaaagcggct

SEQ ID NO: 673 - DNA, 48 bp, Artificial
  oligonucleotide probe
aacgcgatttgccgcaggctgcacggtcccgtgcacgggaaagcggct

SEQ ID NO: 674 - DNA, 48 bp, Artificial
  oligonucleotide probe
atggcgcagcacgctgttgcatggcgtggggagcacgggaaagcggct

SEQ ID NO: 675 - DNA, 48 bp, Artificial
  oligonucleotide probe
ttcgccgtttgcgctggggattcgcgcaaacggcaccgcagctgcgtg

SEQ ID NO: 676 - DNA, 48 bp, Artificial
  oligonucleotide probe
aacggctgcaagcgcaggctgcacggtcccgtgcaccgcagctgcgtg

SEQ ID NO: 677 - DNA, 48 bp, Artificial
  oligonucleotide probe
aagccgtgcgcaacgattcgccgtttgcgctgttgcatggcgtgggga

SEQ ID NO: 678 - DNA, 48 bp, Artificial
  oligonucleotide probe
aagccgtgcgcaacgattgcatggcgtggggagcacgggaaagcggct

SEQ ID NO: 679 - DNA, 48 bp, Artificial
  oligonucleotide probe
ccgtcgcaaagcgcacgggattcgcgcaaacggcacgggaaagcggct

SEQ ID NO: 680 - DNA, 48 bp, Artificial
  oligonucleotide probe
ttcggggaaacgccgtaacgcgatttgccgcagcaccgcagctgcgtg

SEQ ID NO: 681 - DNA, 48 bp, Artificial
  oligonucleotide probe
ttcgccgtttgcgctggggattcgcgcaaacggcacgggaaagcggct

SEQ ID NO: 682 - DNA, 48 bp, Artificial
  oligonucleotide probe
ccgtttcggctgggctccgtcgcaaagcgcacgcacgggaaagcggct

SEQ ID NO: 683 - DNA, 48 bp, Artificial
  oligonucleotide probe
cgcattgcggctttcgatggcgcagcacgctgttgcatggcgtgggga

SEQ ID NO: 684 - DNA, 48 bp, Artificial
  oligonucleotide probe
ccgtttcggctgggctaacgcgatttgccgcagcacgggaaagcggct

SEQ ID NO: 685 - DNA, 48 bp, Artificial
  oligonucleotide probe
aagccgtgcgcaacgaggctttgcgcaccgtgttgcatggcgtgggga

SEQ ID NO: 686 - DNA, 48 bp, Artificial
  oligonucleotide probe
aacggctgcaagcgcattgcatggcgtggggagcaccgcagctgcgtg

SEQ ID NO: 687 - DNA, 48 bp, Artificial
  oligonucleotide probe
aagccgtgcgcaacgaggctttgcgcaccgtggcacgggaaagcggct

SEQ ID NO: 688 - DNA, 48 bp, Artificial
  oligonucleotide probe
cgcattgcggctttcgggctttgcgcaccgtggcaccgcagctgcgtg

SEQ ID NO: 689 - DNA, 48 bp, Artificial
  oligonucleotide probe
ggctttgcgcaccgtgaacgcgatttgccgcagcaccgcagctgcgtg

SEQ ID NO: 690 - DNA, 48 bp, Artificial
  oligonucleotide probe
aacggctgcaagcgcaggctttgcgcaccgtggcaccgcagctgcgtg

SEQ ID NO: 691 - DNA, 48 bp, Artificial
  oligonucleotide probe
aacgcgatttgccgcattcgccgtttgcgctggcacgggaaagcggct

SEQ ID NO: 692 - DNA, 48 bp, Artificial
  oligonucleotide probe
aagccgtgcgcaacgagggattcgcgcaaacggcacgggaaagcggct

SEQ ID NO: 693 - DNA, 48 bp, Artificial
  oligonucleotide probe
atggcgcagcacgctgttgcatggcgtggggagcaccgcagctgcgtg

SEQ ID NO: 694 - DNA, 48 bp, Artificial
  oligonucleotide probe
aagccgtgcgcaacgaaacggctgcaagcgcagggattcgcgcaaacg

SEQ ID NO: 695 - DNA, 48 bp, Artificial
  oligonucleotide probe
ggctgcacggtcccgtttgcatggcgtggggagcacgggaaagcggct

SEQ ID NO: 696 - DNA, 48 bp, Artificial
  oligonucleotide probe
ttgcaagcgtccgggaaacggctgcaagcgcagcaccgcagctgcgtg

SEQ ID NO: 697 - DNA, 48 bp, Artificial
  oligonucleotide probe
ttcggggaaacgccgtttgcatggcgtggggagcacgggaaagcggct

SEQ ID NO: 698 - DNA, 48 bp, Artificial
  oligonucleotide probe
aacgcgatttgccgcagggattcgcgcaaacggcacgggaaagcggct

SEQ ID NO: 699 - DNA, 48 bp, Artificial
  oligonucleotide probe
ttcggggaaacgccgtccgtcgcaaagcgcacgcacgggaaagcggct

SEQ ID NO: 700 - DNA, 48 bp, Artificial
  oligonucleotide probe
aagccgtgcgcaacgattgcaagcgtccgggagcaccgcagctgcgtg

SEQ ID NO: 701 - DNA, 48 bp, Artificial
  oligonucleotide probe
ttgcatggcgtggggagcaccgcagctgcgtggcacgggaaagcggct

SEQ ID NO: 702 - DNA, 48 bp, Artificial
  oligonucleotide probe
aagccgtgcgcaacgattgcaagcgtccgggagggattcgcgcaaacg

SEQ ID NO: 703 - DNA, 48 bp, Artificial
  oligonucleotide probe
cgcattgcggctttcgaacgcgatttgccgcagcaccgcagctgcgtg

SEQ ID NO: 704 - DNA, 48 bp, Artificial
  oligonucleotide probe
ttgcaagcgtccgggattcgccgtttgcgctggcacgggaaagcggct

SEQ ID NO: 705 - DNA, 48 bp, Artificial
  oligonucleotide probe
ttcgccgtttgcgctgccgtcgcaaagcgcacgggattcgcgcaaacg

SEQ ID NO: 706 - DNA, 48 bp, Artificial
  oligonucleotide probe
aagccgtgcgcaacgaccgtcgcaaagcgcacgcaccgcagctgcgtg

SEQ ID NO: 707 - DNA, 48 bp, Artificial
  oligonucleotide probe
ggctttgcgcaccgtgggctgcacggtcccgtgggattcgcgcaaacg

SEQ ID NO: 708 - DNA, 48 bp, Artificial
  oligonucleotide probe
cgcattgcggctttcgggctttgcgcaccgtgttgcatggcgtgggga

SEQ ID NO: 709 - DNA, 48 bp, Artificial
  oligonucleotide probe
ttgcaagcgtccgggaggctttgcgcaccgtggcaccgcagctgcgtg

SEQ ID NO: 710 - DNA, 48 bp, Artificial
  oligonucleotide probe
ggctttgcgcaccgtgccgtcgcaaagcgcacttgcatggcgtgggga

SEQ ID NO: 711 - DNA, 48 bp, Artificial
  oligonucleotide probe
ttgcaagcgtccgggaccgtcgcaaagcgcacgcacgggaaagcggct

SEQ ID NO: 712 - DNA, 48 bp, Artificial
  oligonucleotide probe
ggctttgcgcaccgtgccgtcgcaaagcgcacgggattcgcgcaaacg

SEQ ID NO: 713 - DNA, 48 bp, Artificial
  oligonucleotide probe
ggctttgcgcaccgtgggctgcacggtcccgtttgcatggcgtgggga

SEQ ID NO: 714 - DNA, 48 bp, Artificial
  oligonucleotide probe
ttgcaagcgtccgggaggctttgcgcaccgtggcacgggaaagcggct

SEQ ID NO: 715 - DNA, 48 bp, Artificial
  oligonucleotide probe
ttcgccgtttgcgctgggctgcacggtcccgtgcaccgcagctgcgtg

SEQ ID NO: 716 - DNA, 48 bp, Artificial
  oligonucleotide probe
atggcgcagcacgctgggctgcacggtcccgtttgcatggcgtgggga

SEQ ID NO: 717 - DNA, 48 bp, Artificial
  oligonucleotide probe
ggctttgcgcaccgtgatggcgcagcacgctgttgcatggcgtgggga

SEQ ID NO: 718 - DNA, 48 bp, Artificial
  oligonucleotide probe
atggcgcagcacgctgttcgccgtttgcgctggcaccgcagctgcgtg

SEQ ID NO: 719 - DNA, 48 bp, Artificial
  oligonucleotide probe
aacggctgcaagcgcaggctttgcgcaccgtggcacgggaaagcggct

SEQ ID NO: 720 - DNA, 48 bp, Artificial
  oligonucleotide probe
cgcattgcggctttcgccgtcgcaaagcgcacgcaccgcagctgcgtg

SEQ ID NO: 721 - DNA, 48 bp, Artificial
  oligonucleotide probe
aacggctgcaagcgcaccgtcgcaaagcgcacgcacgggaaagcggct

SEQ ID NO: 722 - DNA, 48 bp, Artificial
  oligonucleotide probe
ccgtttcggctgggctttcgccgtttgcgctgttgcatggcgtgggga

SEQ ID NO: 723 - DNA, 48 bp, Artificial
  oligonucleotide probe
aacggctgcaagcgcaccgtcgcaaagcgcacgggattcgcgcaaacg

SEQ ID NO: 724 - DNA, 48 bp, Artificial
  oligonucleotide probe
atggcgcagcacgctggggattcgcgcaaacggcaccgcagctgcgtg

SEQ ID NO: 725 - DNA, 48 bp, Artificial
  oligonucleotide probe
gcacgggaaagcggctgcacgggaaagcggctttgcatggcgtgggga

SEQ ID NO: 726 - DNA, 48 bp, Artificial
  oligonucleotide probe
gcacgggaaagcggctgcacgggaaagcggctatggcgcagcacgctg

SEQ ID NO: 727 - DNA, 48 bp, Artificial
  oligonucleotide probe
gcacgggaaagcggctgcacgggaaagcggctcgcattgcggctttcg

SEQ ID NO: 728 - DNA, 48 bp, Artificial
  oligonucleotide probe
gggattcgcgcaaacggggattcgcgcaaacggcaccgcagctgcgtg

SEQ ID NO: 729 - DNA, 48 bp, Artificial
  oligonucleotide probe
ttgcaagcgtccgggattgcaagcgtccgggagggattcgcgcaaacg

SEQ ID NO: 730 - DNA, 48 bp, Artificial
  oligonucleotide probe
ggctttgcgcaccgtgggctttgcgcaccgtggcaccgcagctgcgtg

SEQ ID NO: 731 - DNA, 48 bp, Artificial
  oligonucleotide probe
gcacgggaaagcggctgcacgggaaagcggctttgcaagcgtccggga

SEQ ID NO: 732 - DNA, 48 bp, Artificial
  oligonucleotide probe
ttgcatggcgtggggattgcatggcgtggggaccgtcgcaaagcgcac

SEQ ID NO: 733 - DNA, 48 bp, Artificial
  oligonucleotide probe
aagccgtgcgcaacgaaagccgtgcgcaacgattgcatggcgtgggga

SEQ ID NO: 734 - DNA, 48 bp, Artificial
  oligonucleotide probe
gcacgggaaagcggctgcacgggaaagcggctaacggctgcaagcgca

SEQ ID NO: 735 - DNA, 48 bp, Artificial
  oligonucleotide probe
gggattcgcgcaaacggggattcgcgcaaacgaagccgtgcgcaacga

SEQ ID NO: 736 - DNA, 48 bp, Artificial
  oligonucleotide probe
ggctttgcgcaccgtgggctttgcgcaccgtgttgcatggcgtgggga

SEQ ID NO: 737 - DNA, 48 bp, Artificial
  oligonucleotide probe
gcacgggaaagcggctgcacgggaaagcggctccgtttcggctgggct

SEQ ID NO: 738 - DNA, 48 bp, Artificial
  oligonucleotide probe
ttgcatggcgtggggattgcatggcgtggggagcaccgcagctgcgtg

SEQ ID NO: 739 - DNA, 48 bp, Artificial
  oligonucleotide probe
ggctgcacggtcccgtggctgcacggtcccgtgcaccgcagctgcgtg

SEQ ID NO: 740 - DNA, 48 bp, Artificial
  oligonucleotide probe
gggattcgcgcaaacggggattcgcgcaaacgggctttgcgcaccgtg

SEQ ID NO: 741 - DNA, 48 bp, Artificial
  oligonucleotide probe
aacgcgatttgccgcaaacgcgatttgccgcagggattcgcgcaaacg

SEQ ID NO: 742 - DNA, 48 bp, Artificial
  oligonucleotide probe
gcaccgcagctgcgtggcaccgcagctgcgtgggctgcacggtcccgt

SEQ ID NO: 743 - DNA, 48 bp, Artificial
  oligonucleotide probe
ttcggggaaacgccgtttcggggaaacgccgtgcaccgcagctgcgtg

SEQ ID NO: 744 - DNA, 48 bp, Artificial
  oligonucleotide probe
gcacgggaaagcggctgcacgggaaagcggctggctgcacggtcccgt

SEQ ID NO: 745 - DNA, 48 bp, Artificial
  oligonucleotide probe
gggattcgcgcaaacggggattcgcgcaaacgttcgccgtttgcgctg

SEQ ID NO: 746 - DNA, 48 bp, Artificial
  oligonucleotide probe
ttcgccgtttgcgctgttcgccgtttgcgctgttgcatggcgtgggga

SEQ ID NO: 747 - DNA, 48 bp, Artificial
  oligonucleotide probe
ccgtcgcaaagcgcacccgtcgcaaagcgcacttgcatggcgtgggga

SEQ ID NO: 748 - DNA, 48 bp, Artificial
  oligonucleotide probe
ccgtttcggctgggctccgtttcggctgggctgcacgggaaagcggct

SEQ ID NO: 749 - DNA, 48 bp, Artificial
  oligonucleotide probe
ttgcatggcgtggggattgcatggcgtggggaaacggctgcaagcgca

SEQ ID NO: 750 - DNA, 48 bp, Artificial
  oligonucleotide probe
aacggctgcaagcgcaaacggctgcaagcgcagcacgggaaagcggct

SEQ ID NO: 751 - DNA, 48 bp, Artificial
  oligonucleotide probe
gcaccgcagctgcgtggcaccgcagctgcgtgccgtttcggctgggct

SEQ ID NO: 752 - DNA, 48 bp, Artificial
  oligonucleotide probe
gcaccgcagctgcgtggcaccgcagctgcgtgaacggctgcaagcgca

SEQ ID NO: 753 - DNA, 48 bp, Artificial
  oligonucleotide probe
cgcattgcggctttcgcgcattgcggctttcggcacgggaaagcggct

SEQ ID NO: 754 - DNA, 48 bp, Artificial
  oligonucleotide probe
atggcgcagcacgctgatggcgcagcacgctggcaccgcagctgcgtg

SEQ ID NO: 755 - DNA, 48 bp, Artificial
  oligonucleotide probe
aacgcgatttgccgcaaacgcgatttgccgcagcacgggaaagcggct

SEQ ID NO: 756 - DNA, 48 bp, Artificial
  oligonucleotide probe
aagccgtgcgcaacgaaagccgtgcgcaacgagcaccgcagctgcgtg

SEQ ID NO: 757 - DNA, 48 bp, Artificial
  oligonucleotide probe
cgcattgcggctttcgcgcattgcggctttcgttgcatggcgtgggga

SEQ ID NO: 758 - DNA, 48 bp, Artificial
  oligonucleotide probe
gggattcgcgcaaacggggattcgcgcaaacgttgcaagcgtccggga

SEQ ID NO: 759 - DNA, 48 bp, Artificial
  oligonucleotide probe
ttcgccgtttgcgctgttcgccgtttgcgctggcaccgcagctgcgtg

SEQ ID NO: 760 - DNA, 48 bp, Artificial
  oligonucleotide probe
gcaccgcagctgcgtggcaccgcagctgcgtgttcggggaaacgccgt

SEQ ID NO: 761 - DNA, 48 bp, Artificial
  oligonucleotide probe
ggctgcacggtcccgtggctgcacggtcccgtgggattcgcgcaaacg

SEQ ID NO: 762 - DNA, 48 bp, Artificial
  oligonucleotide probe
gcaccgcagctgcgtggcaccgcagctgcgtgttgcaagcgtccggga

SEQ ID NO: 763 - DNA, 48 bp, Artificial
  oligonucleotide probe
gcacgggaaagcggctgcacgggaaagcggctttcgccgtttgcgctg

SEQ ID NO: 764 - DNA, 48 bp, Artificial
  oligonucleotide probe
gcaccgcagctgcgtggcaccgcagctgcgtgaacgcgatttgccgca

SEQ ID NO: 765 - DNA, 48 bp, Artificial
  oligonucleotide probe
ccgtcgcaaagcgcacccgtcgcaaagcgcacgggattcgcgcaaacg

SEQ ID NO: 766 - DNA, 48 bp, Artificial
  oligonucleotide probe
gcacgggaaagcggctgcacgggaaagcggctaacgcgatttgccgca

SEQ ID NO: 767 - DNA, 48 bp, Artificial
  oligonucleotide probe
gggattcgcgcaaacggggattcgcgcaaacgcgcattgcggctttcg

SEQ ID NO: 768 - DNA, 48 bp, Artificial
  oligonucleotide probe
ggctttgcgcaccgtgggctttgcgcaccgtggggattcgcgcaaacg

SEQ ID NO: 769 - DNA, 48 bp, Artificial
  oligonucleotide probe
gggattcgcgcaaacggggattcgcgcaaacgccgtcgcaaagcgcac

SEQ ID NO: 770 - DNA, 48 bp, Artificial
  oligonucleotide probe
ccgtcgcaaagcgcacccgtcgcaaagcgcacgcacgggaaagcggct

SEQ ID NO: 771 - DNA, 48 bp, Artificial
  oligonucleotide probe
ttgcatggcgtggggattgcatggcgtggggaatggcgcagcacgctg

SEQ ID NO: 772 - DNA, 48 bp, Artificial
  oligonucleotide probe
ttgcatggcgtggggattgcatggcgtggggaccgtttcggctgggct

SEQ ID NO: 773 - DNA, 48 bp, Artificial
  oligonucleotide probe
gcacgggaaagcggctgcacgggaaagcggctccgtcgcaaagcgcac

SEQ ID NO: 774 - DNA, 48 bp, Artificial
  oligonucleotide probe
aacgcgatttgccgcaaacgcgatttgccgcagcaccgcagctgcgtg

SEQ ID NO: 775 - DNA, 48 bp, Artificial
  oligonucleotide probe
aagccgtgcgcaacgaaagccgtgcgcaacgagcacgggaaagcggct

SEQ ID NO: 776 - DNA, 48 bp, Artificial
  oligonucleotide probe
ttgcatggcgtggggattgcatggcgtggggattcggggaaacgccgt

SEQ ID NO: 777 - DNA, 48 bp, Artificial
  oligonucleotide probe
ccgtttcggctgggctccgtttcggctgggctgcaccgcagctgcgtg

SEQ ID NO: 778 - DNA, 48 bp, Artificial
  oligonucleotide probe
ttgcatggcgtggggattgcatggcgtggggacgcattgcggctttcg

SEQ ID NO: 779 - DNA, 48 bp, Artificial
  oligonucleotide probe
ttgcatggcgtggggattgcatggcgtggggattcgccgtttgcgctg

SEQ ID NO: 780 - DNA, 48 bp, Artificial
  oligonucleotide probe
gcaccgcagctgcgtggcaccgcagctgcgtgcgcattgcggctttcg

SEQ ID NO: 781 - DNA, 48 bp, Artificial
  oligonucleotide probe
ttgcatggcgtggggattgcatggcgtggggaggctgcacggtcccgt

SEQ ID NO: 782 - DNA, 48 bp, Artificial
  oligonucleotide probe
ccgtttcggctgggctccgtttcggctgggctgggattcgcgcaaacg

SEQ ID NO: 783 - DNA, 48 bp, Artificial
  oligonucleotide probe
gggattcgcgcaaacggggattcgcgcaaacgggctgcacggtcccgt

SEQ ID NO: 784 - DNA, 48 bp, Artificial
  oligonucleotide probe
ttgcaagcgtccgggattgcaagcgtccgggattgcatggcgtgggga

SEQ ID NO: 785 - DNA, 48 bp, Artificial
  oligonucleotide probe
ggctttgcgcaccgtgggctttgcgcaccgtggcacgggaaagcggct

SEQ ID NO: 786 - DNA, 48 bp, Artificial
  oligonucleotide probe
ttgcaagcgtccgggattgcaagcgtccgggagcaccgcagctgcgtg

SEQ ID NO: 787 - DNA, 48 bp, Artificial
  oligonucleotide probe
ttgcaagcgtccgggattgcaagcgtccgggagcacgggaaagcggct

SEQ ID NO: 788 - DNA, 48 bp, Artificial
  oligonucleotide probe
ccgtttcggctgggctccgtttcggctgggctttgcatggcgtgggga

SEQ ID NO: 789 - DNA, 48 bp, Artificial
  oligonucleotide probe
atggcgcagcacgctgatggcgcagcacgctggggattcgcgcaaacg

SEQ ID NO: 790 - DNA, 48 bp, Artificial
  oligonucleotide probe
ttgcatggcgtggggattgcatggcgtggggagggattcgcgcaaacg

SEQ ID NO: 791 - DNA, 48 bp, Artificial
  oligonucleotide probe
ccgtcgcaaagcgcacccgtcgcaaagcgcacgcaccgcagctgcgtg

SEQ ID NO: 792 - DNA, 48 bp, Artificial
  oligonucleotide probe
gcacgggaaagcggctgcacgggaaagcggctgcaccgcagctgcgtg

SEQ ID NO: 793 - DNA, 48 bp, Artificial
  oligonucleotide probe
gcaccgcagctgcgtggcaccgcagctgcgtgccgtcgcaaagcgcac

SEQ ID NO: 794 - DNA, 48 bp, Artificial
  oligonucleotide probe
aagccgtgcgcaacgaaagccgtgcgcaacgagggattcgcgcaaacg

SEQ ID NO: 795 - DNA, 48 bp, Artificial
  oligonucleotide probe
cgcattgcggctttcgcgcattgcggctttcggggattcgcgcaaacg

SEQ ID NO: 796 - DNA, 48 bp, Artificial
  oligonucleotide probe
gcaccgcagctgcgtggcaccgcagctgcgtgttgcatggcgtgggga

SEQ ID NO: 797 - DNA, 48 bp, Artificial
  oligonucleotide probe
ttgcatggcgtggggattgcatggcgtggggagcacgggaaagcggct

SEQ ID NO: 798 - DNA, 48 bp, Artificial
  oligonucleotide probe
gggattcgcgcaaacggggattcgcgcaaacggcacgggaaagcggct

SEQ ID NO: 799 - DNA, 48 bp, Artificial
  oligonucleotide probe
gcaccgcagctgcgtggcaccgcagctgcgtgaagccgtgcgcaacga

SEQ ID NO: 800 - DNA, 48 bp, Artificial
  oligonucleotide probe
gggattcgcgcaaacggggattcgcgcaaacgaacggctgcaagcgca

SEQ ID NO: 801 - DNA, 48 bp, Artificial
  oligonucleotide probe
gggattcgcgcaaacggggattcgcgcaaacgatggcgcagcacgctg

SEQ ID NO: 802 - DNA, 48 bp, Artificial
  oligonucleotide probe
gcaccgcagctgcgtggcaccgcagctgcgtgttcgccgtttgcgctg

SEQ ID NO: 803 - DNA, 48 bp, Artificial
  oligonucleotide probe
ttgcatggcgtggggattgcatggcgtggggaaagccgtgcgcaacga

SEQ ID NO: 804 - DNA, 48 bp, Artificial
  oligonucleotide probe
aacgcgatttgccgcaaacgcgatttgccgcattgcatggcgtgggga

SEQ ID NO: 805 - DNA, 48 bp, Artificial
  oligonucleotide probe
gcaccgcagctgcgtggcaccgcagctgcgtggcacgggaaagcggct

SEQ ID NO: 806 - DNA, 48 bp, Artificial
  oligonucleotide probe
gggattcgcgcaaacggggattcgcgcaaacgttgcatggcgtgggga

SEQ ID NO: 807 - DNA, 48 bp, Artificial
  oligonucleotide probe
ttcggggaaacgccgtttcggggaaacgccgtttgcatggcgtgggga

SEQ ID NO: 808 - DNA, 48 bp, Artificial
  oligonucleotide probe
aacggctgcaagcgcaaacggctgcaagcgcagcaccgcagctgcgtg

SEQ ID NO: 809 - DNA, 48 bp, Artificial
  oligonucleotide probe
gcaccgcagctgcgtggcaccgcagctgcgtggggattcgcgcaaacg

SEQ ID NO: 810 - DNA, 48 bp, Artificial
  oligonucleotide probe
ttcggggaaacgccgtttcggggaaacgccgtgggattcgcgcaaacg

SEQ ID NO: 811 - DNA, 48 bp, Artificial
  oligonucleotide probe
ggctgcacggtcccgtggctgcacggtcccgtgcacgggaaagcggct

SEQ ID NO: 812 - DNA, 48 bp, Artificial
  oligonucleotide probe
ttgcatggcgtggggattgcatggcgtggggaaacgcgatttgccgca

SEQ ID NO: 813 - DNA, 48 bp, Artificial
  oligonucleotide probe
gcaccgcagctgcgtggcaccgcagctgcgtgggctttgcgcaccgtg

SEQ ID NO: 814 - DNA, 48 bp, Artificial
  oligonucleotide probe
aacggctgcaagcgcaaacggctgcaagcgcattgcatggcgtgggga

SEQ ID NO: 815 - DNA, 48 bp, Artificial
  oligonucleotide probe
aacggctgcaagcgcaaacggctgcaagcgcagggattcgcgcaaacg

SEQ ID NO: 816 - DNA, 48 bp, Artificial
  oligonucleotide probe
ttcgccgtttgcgctgttcgccgtttgcgctggggattcgcgcaaacg

SEQ ID NO: 817 - DNA, 48 bp, Artificial
  oligonucleotide probe
ttcgccgtttgcgctgttcgccgtttgcgctggcacgggaaagcggct

SEQ ID NO: 818 - DNA, 48 bp, Artificial
  oligonucleotide probe
gcacgggaaagcggctgcacgggaaagcggctttcggggaaacgccgt

SEQ ID NO: 819 - DNA, 48 bp, Artificial
  oligonucleotide probe
gcaccgcagctgcgtggcaccgcagctgcgtgatggcgcagcacgctg

SEQ ID NO: 820 - DNA, 48 bp, Artificial
  oligonucleotide probe
gggattcgcgcaaacggggattcgcgcaaacgttcggggaaacgccgt

SEQ ID NO: 821 - DNA, 48 bp, Artificial
  oligonucleotide probe
ttgcatggcgtggggattgcatggcgtggggattgcaagcgtccggga

SEQ ID NO: 822 - DNA, 48 bp, Artificial
  oligonucleotide probe
ttcggggaaacgccgtttcggggaaacgccgtgcacgggaaagcggct

SEQ ID NO: 823 - DNA, 48 bp, Artificial
  oligonucleotide probe
atggcgcagcacgctgatggcgcagcacgctgttgcatggcgtgggga

SEQ ID NO: 824 - DNA, 48 bp, Artificial
  oligonucleotide probe
ttgcatggcgtggggattgcatggcgtggggaggctttgcgcaccgtg

SEQ ID NO: 825 - DNA, 48 bp, Artificial
  oligonucleotide probe
atggcgcagcacgctgatggcgcagcacgctggcacgggaaagcggct

SEQ ID NO: 826 - DNA, 48 bp, Artificial
  oligonucleotide probe
gcacgggaaagcggctgcacgggaaagcggctgggattcgcgcaaacg

SEQ ID NO: 827 - DNA, 48 bp, Artificial
  oligonucleotide probe
gggattcgcgcaaacggggattcgcgcaaacgccgtttcggctgggct

SEQ ID NO: 828 - DNA, 48 bp, Artificial
  oligonucleotide probe
ggctgcacggtcccgtggctgcacggtcccgtttgcatggcgtgggga

SEQ ID NO: 829 - DNA, 48 bp, Artificial
  oligonucleotide probe
cgcattgcggctttcgcgcattgcggctttcggcaccgcagctgcgtg

SEQ ID NO: 830 - DNA, 48 bp, Artificial
  oligonucleotide probe
gggattcgcgcaaacggggattcgcgcaaacgaacgcgatttgccgca

SEQ ID NO: 831 - DNA, 48 bp, Artificial
  oligonucleotide probe
gcacgggaaagcggctgcacgggaaagcggctaagccgtgcgcaacga

SEQ ID NO: 832 - DNA, 48 bp, Artificial
  oligonucleotide probe
gcacgggaaagcggctgcacgggaaagcggctggctttgcgcaccgtg

SEQ ID NO: 833 - DNA, 48 bp, Artificial
  oligonucleotide probe
tcgttgcgcacggcttcgtttgcgcgaatccccgaaagccgcaatgcg

SEQ ID NO: 834 - DNA, 48 bp, Artificial
  oligonucleotide probe
tcgttgcgcacggcttcgtttgcgcgaatccctccccacgccatgcaa

SEQ ID NO: 835 - DNA, 48 bp, Artificial
  oligonucleotide probe
tcgttgcgcacggcttcgaaagccgcaatgcgtccccacgccatgcaa

SEQ ID NO: 836 - DNA, 48 bp, Artificial
  oligonucleotide probe
cgtttgcgcgaatccccgaaagccgcaatgcgtccccacgccatgcaa

SEQ ID NO: 837 - DNA, 48 bp, Artificial
  oligonucleotide probe
tcgttgcgcacggctttcgttgcgcacggctttccccacgccatgcaa

SEQ ID NO: 838 - DNA, 48 bp, Artificial
  oligonucleotide probe
tccccacgccatgcaatccccacgccatgcaacgtttgcgcgaatccc

SEQ ID NO: 839 - DNA, 48 bp, Artificial
  oligonucleotide probe
tccccacgccatgcaatccccacgccatgcaacgaaagccgcaatgcg

SEQ ID NO: 840 - DNA, 48 bp, Artificial
  oligonucleotide probe
cgaaagccgcaatgcgcgaaagccgcaatgcgtcgttgcgcacggctt

SEQ ID NO: 841 - DNA, 48 bp, Artificial
  oligonucleotide probe
tccccacgccatgcaatccccacgccatgcaatcgttgcgcacggctt

SEQ ID NO: 842 - DNA, 48 bp, Artificial
  oligonucleotide probe
tcgttgcgcacggctttcgttgcgcacggcttcgtttgcgcgaatccc

SEQ ID NO: 843 - DNA, 48 bp, Artificial
  oligonucleotide probe
cgtttgcgcgaatccccgtttgcgcgaatccctccccacgccatgcaa

SEQ ID NO: 844 - DNA, 48 bp, Artificial
  oligonucleotide probe
cgtttgcgcgaatccccgtttgcgcgaatccctcgttgcgcacggctt

SEQ ID NO: 845 - DNA, 48 bp, Artificial
  oligonucleotide probe
cgaaagccgcaatgcgcgaaagccgcaatgcgcgtttgcgcgaatccc

SEQ ID NO: 846 - DNA, 48 bp, Artificial
  oligonucleotide probe
cgtttgcgcgaatccccgtttgcgcgaatccccgaaagccgcaatgcg

SEQ ID NO: 847 - DNA, 48 bp, Artificial
  oligonucleotide probe
tcgttgcgcacggctttcgttgcgcacggcttcgaaagccgcaatgcg

SEQ ID NO: 848 - DNA, 48 bp, Artificial
  oligonucleotide probe
cgaaagccgcaatgcgcgaaagccgcaatgcgtccccacgccatgcaa

SEQ ID NO: 849 - DNA, 48 bp, Artificial
  oligonucleotide probe
tcgttgcgcacggcttcgtttgcgcgaatccccacgcagctgcggtgc

SEQ ID NO: 850 - DNA, 48 bp, Artificial
  oligonucleotide probe
tcccggacgcttgcaatgcggcaaatcgcgttcacgcagctgcggtgc

SEQ ID NO: 851 - DNA, 48 bp, Artificial
  oligonucleotide probe
cgaaagccgcaatgcgtgcgcttgcagccgtttgcggcaaatcgcgtt

SEQ ID NO: 852 - DNA, 48 bp, Artificial
  oligonucleotide probe
cgaaagccgcaatgcgtgcggcaaatcgcgttcacgcagctgcggtgc

SEQ ID NO: 853 - DNA, 48 bp, Artificial
  oligonucleotide probe
tcgttgcgcacggctttgcgcttgcagccgttcacgcagctgcggtgc

SEQ ID NO: 854 - DNA, 48 bp, Artificial
  oligonucleotide probe
cgaaagccgcaatgcgtccccacgccatgcaatcccggacgcttgcaa

SEQ ID NO: 855 - DNA, 48 bp, Artificial
  oligonucleotide probe
cgtttgcgcgaatccccgaaagccgcaatgcgcacgcagctgcggtgc

SEQ ID NO: 856 - DNA, 48 bp, Artificial
  oligonucleotide probe
cgtttgcgcgaatccccgaaagccgcaatgcgtcccggacgcttgcaa

SEQ ID NO: 857 - DNA, 48 bp, Artificial
  oligonucleotide probe
tcgttgcgcacggctttccccacgccatgcaatcccggacgcttgcaa

SEQ ID NO: 858 - DNA, 48 bp, Artificial
  oligonucleotide probe
cgtttgcgcgaatccctccccacgccatgcaatgcggcaaatcgcgtt

SEQ ID NO: 859 - DNA, 48 bp, Artificial
  oligonucleotide probe
cgtttgcgcgaatccctcccggacgcttgcaatgcggcaaatcgcgtt

SEQ ID NO: 860 - DNA, 48 bp, Artificial
  oligonucleotide probe
cgtttgcgcgaatccctcccggacgcttgcaatgcgcttgcagccgtt

SEQ ID NO: 861 - DNA, 48 bp, Artificial
  oligonucleotide probe
cgtttgcgcgaatccctccccacgccatgcaatcccggacgcttgcaa

SEQ ID NO: 862 - DNA, 48 bp, Artificial
  oligonucleotide probe
cgaaagccgcaatgcgtccccacgccatgcaatgcgcttgcagccgtt

SEQ ID NO: 863 - DNA, 48 bp, Artificial
  oligonucleotide probe
tcgttgcgcacggctttcccggacgcttgcaatgcgcttgcagccgtt

SEQ ID NO: 864 - DNA, 48 bp, Artificial
  oligonucleotide probe
tcgttgcgcacggcttcgtttgcgcgaatccctgcggcaaatcgcgtt

SEQ ID NO: 865 - DNA, 48 bp, Artificial
  oligonucleotide probe
tcgttgcgcacggcttcgaaagccgcaatgcgtcccggacgcttgcaa

SEQ ID NO: 866 - DNA, 48 bp, Artificial
  oligonucleotide probe
cgtttgcgcgaatccccgaaagccgcaatgcgtgcgcttgcagccgtt

SEQ ID NO: 867 - DNA, 48 bp, Artificial
  oligonucleotide probe
cgtttgcgcgaatccctccccacgccatgcaacacgcagctgcggtgc

SEQ ID NO: 868 - DNA, 48 bp, Artificial
  oligonucleotide probe
cgtttgcgcgaatccctgcggcaaatcgcgttcacgcagctgcggtgc

SEQ ID NO: 869 - DNA, 48 bp, Artificial
  oligonucleotide probe
tcgttgcgcacggcttcgtttgcgcgaatccctcccggacgcttgcaa

SEQ ID NO: 870 - DNA, 48 bp, Artificial
  oligonucleotide probe
cgtttgcgcgaatccctgcgcttgcagccgtttgcggcaaatcgcgtt

SEQ ID NO: 871 - DNA, 48 bp, Artificial
  oligonucleotide probe
tcgttgcgcacggctttgcgcttgcagccgtttgcggcaaatcgcgtt

SEQ ID NO: 872 - DNA, 48 bp, Artificial
  oligonucleotide probe
cgaaagccgcaatgcgtcccggacgcttgcaatgcggcaaatcgcgtt

SEQ ID NO: 873 - DNA, 48 bp, Artificial
  oligonucleotide probe
tcgttgcgcacggctttcccggacgcttgcaacacgcagctgcggtgc

SEQ ID NO: 874 - DNA, 48 bp, Artificial
  oligonucleotide probe
tcgttgcgcacggctttccccacgccatgcaacacgcagctgcggtgc

SEQ ID NO: 875 - DNA, 48 bp, Artificial
  oligonucleotide probe
cgaaagccgcaatgcgtgcgcttgcagccgttcacgcagctgcggtgc

SEQ ID NO: 876 - DNA, 48 bp, Artificial
  oligonucleotide probe
tcgttgcgcacggctttccccacgccatgcaatgcggcaaatcgcgtt

SEQ ID NO: 877 - DNA, 48 bp, Artificial
  oligonucleotide probe
cgaaagccgcaatgcgtccccacgccatgcaatgcggcaaatcgcgtt

SEQ ID NO: 878 - DNA, 48 bp, Artificial
  oligonucleotide probe
cgaaagccgcaatgcgtccccacgccatgcaacacgcagctgcggtgc

SEQ ID NO: 879 - DNA, 48 bp, Artificial
  oligonucleotide probe
tcgttgcgcacggcttcgaaagccgcaatgcgtgcgcttgcagccgtt

SEQ ID NO: 880 - DNA, 48 bp, Artificial
  oligonucleotide probe
cgaaagccgcaatgcgtcccggacgcttgcaacacgcagctgcggtgc

SEQ ID NO: 881 - DNA, 48 bp, Artificial
  oligonucleotide probe
tcgttgcgcacggctttcccggacgcttgcaatgcggcaaatcgcgtt

SEQ ID NO: 882 - DNA, 48 bp, Artificial
  oligonucleotide probe
tcccggacgcttgcaatgcgcttgcagccgtttgcggcaaatcgcgtt

SEQ ID NO: 883 - DNA, 48 bp, Artificial
  oligonucleotide probe
tccccacgccatgcaatcccggacgcttgcaatgcgcttgcagccgtt

SEQ ID NO: 884 - DNA, 48 bp, Artificial
  oligonucleotide probe
cgtttgcgcgaatccccgaaagccgcaatgcgtgcggcaaatcgcgtt

SEQ ID NO: 885 - DNA, 48 bp, Artificial
  oligonucleotide probe
tcccggacgcttgcaatgcgcttgcagccgttcacgcagctgcggtgc

SEQ ID NO: 886 - DNA, 48 bp, Artificial
  oligonucleotide probe
tcgttgcgcacggcttcgaaagccgcaatgcgcacgcagctgcggtgc

SEQ ID NO: 887 - DNA, 48 bp, Artificial
  oligonucleotide probe
cgaaagccgcaatgcgtcccggacgcttgcaatgcgcttgcagccgtt

SEQ ID NO: 888 - DNA, 48 bp, Artificial
  oligonucleotide probe
cgtttgcgcgaatccctgcgcttgcagccgttcacgcagctgcggtgc

SEQ ID NO: 889 - DNA, 48 bp, Artificial
  oligonucleotide probe
tcgttgcgcacggctttccccacgccatgcaatgcgcttgcagccgtt

SEQ ID NO: 890 - DNA, 48 bp, Artificial
  oligonucleotide probe
tcgttgcgcacggctttgcggcaaatcgcgttcacgcagctgcggtgc

SEQ ID NO: 891 - DNA, 48 bp, Artificial
  oligonucleotide probe
tccccacgccatgcaatcccggacgcttgcaatgcggcaaatcgcgtt

SEQ ID NO: 892 - DNA, 48 bp, Artificial
  oligonucleotide probe
tccccacgccatgcaatcccggacgcttgcaacacgcagctgcggtgc

SEQ ID NO: 893 - DNA, 48 bp, Artificial
  oligonucleotide probe
tccccacgccatgcaatgcggcaaatcgcgttcacgcagctgcggtgc

SEQ ID NO: 894 - DNA, 48 bp, Artificial
  oligonucleotide probe
tcgttgcgcacggcttcgtttgcgcgaatccctgcgcttgcagccgtt

SEQ ID NO: 895 - DNA, 48 bp, Artificial
  oligonucleotide probe
tcgttgcgcacggcttcgaaagccgcaatgcgtgcggcaaatcgcgtt

SEQ ID NO: 896 - DNA, 48 bp, Artificial
  oligonucleotide probe
cgtttgcgcgaatccctcccggacgcttgcaacacgcagctgcggtgc

SEQ ID NO: 897 - DNA, 48 bp, Artificial
  oligonucleotide probe
tgcgcttgcagccgtttgcggcaaatcgcgttcacgcagctgcggtgc

SEQ ID NO: 898 - DNA, 48 bp, Artificial
  oligonucleotide probe
tccccacgccatgcaatgcgcttgcagccgtttgcggcaaatcgcgtt

SEQ ID NO: 899 - DNA, 48 bp, Artificial
  oligonucleotide probe
cgtttgcgcgaatccctccccacgccatgcaatgcgcttgcagccgtt

SEQ ID NO: 900 - DNA, 48 bp, Artificial
  oligonucleotide probe
tccccacgccatgcaatgcgcttgcagccgttcacgcagctgcggtgc

SEQ ID NO: 901 - DNA, 48 bp, Artificial
  oligonucleotide probe
tgcgcttgcagccgtttgcgcttgcagccgttcgtttgcgcgaatccc

SEQ ID NO: 902 - DNA, 48 bp, Artificial
  oligonucleotide probe
cacgcagctgcggtgccacgcagctgcggtgctcccggacgcttgcaa

SEQ ID NO: 903 - DNA, 48 bp, Artificial
  oligonucleotide probe
cgtttgcgcgaatccccgtttgcgcgaatccctcccggacgcttgcaa

SEQ ID NO: 904 - DNA, 48 bp, Artificial
  oligonucleotide probe
tcgttgcgcacggctttcgttgcgcacggctttgcgcttgcagccgtt

SEQ ID NO: 905 - DNA, 48 bp, Artificial
  oligonucleotide probe
tgcgcttgcagccgtttgcgcttgcagccgtttgcggcaaatcgcgtt

SEQ ID NO: 906 - DNA, 48 bp, Artificial
  oligonucleotide probe
tgcgcttgcagccgtttgcgcttgcagccgttcgaaagccgcaatgcg

SEQ ID NO: 907 - DNA, 48 bp, Artificial
  oligonucleotide probe
tgcggcaaatcgcgtttgcggcaaatcgcgttcgtttgcgcgaatccc

SEQ ID NO: 908 - DNA, 48 bp, Artificial
  oligonucleotide probe
tcccggacgcttgcaatcccggacgcttgcaatgcgcttgcagccgtt

SEQ ID NO: 909 - DNA, 48 bp, Artificial
  oligonucleotide probe
cgaaagccgcaatgcgcgaaagccgcaatgcgtgcgcttgcagccgtt

SEQ ID NO: 910 - DNA, 48 bp, Artificial
  oligonucleotide probe
tcccggacgcttgcaatcccggacgcttgcaatgcggcaaatcgcgtt

SEQ ID NO: 911 - DNA, 48 bp, Artificial
  oligonucleotide probe
tgcggcaaatcgcgtttgcggcaaatcgcgttcacgcagctgcggtgc

SEQ ID NO: 912 - DNA, 48 bp, Artificial
  oligonucleotide probe
tcccggacgcttgcaatcccggacgcttgcaatcgttgcgcacggctt

SEQ ID NO: 913 - DNA, 48 bp, Artificial
  oligonucleotide probe
tgcggcaaatcgcgtttgcggcaaatcgcgtttccccacgccatgcaa

SEQ ID NO: 914 - DNA, 48 bp, Artificial
  oligonucleotide probe
tcccggacgcttgcaatcccggacgcttgcaacacgcagctgcggtgc

SEQ ID NO: 915 - DNA, 48 bp, Artificial
  oligonucleotide probe
tgcggcaaatcgcgtttgcggcaaatcgcgtttcccggacgcttgcaa

SEQ ID NO: 916 - DNA, 48 bp, Artificial
  oligonucleotide probe
tgcggcaaatcgcgtttgcggcaaatcgcgttcgaaagccgcaatgcg

SEQ ID NO: 917 - DNA, 48 bp, Artificial
  oligonucleotide probe
tcccggacgcttgcaatcccggacgcttgcaacgtttgcgcgaatccc

SEQ ID NO: 918 - DNA, 48 bp, Artificial
  oligonucleotide probe
cgtttgcgcgaatccccgtttgcgcgaatccctgcgcttgcagccgtt

SEQ ID NO: 919 - DNA, 48 bp, Artificial
  oligonucleotide probe
tcgttgcgcacggctttcgttgcgcacggcttcacgcagctgcggtgc

SEQ ID NO: 920 - DNA, 48 bp, Artificial
  oligonucleotide probe
tgcggcaaatcgcgtttgcggcaaatcgcgtttgcgcttgcagccgtt

SEQ ID NO: 921 - DNA, 48 bp, Artificial
  oligonucleotide probe
cacgcagctgcggtgccacgcagctgcggtgctgcggcaaatcgcgtt

SEQ ID NO: 922 - DNA, 48 bp, Artificial
  oligonucleotide probe
tcgttgcgcacggctttcgttgcgcacggctttcccggacgcttgcaa

SEQ ID NO: 923 - DNA, 48 bp, Artificial
  oligonucleotide probe
cacgcagctgcggtgccacgcagctgcggtgccgaaagccgcaatgcg

SEQ ID NO: 924 - DNA, 48 bp, Artificial
  oligonucleotide probe
cacgcagctgcggtgccacgcagctgcggtgctcgttgcgcacggctt

SEQ ID NO: 925 - DNA, 48 bp, Artificial
  oligonucleotide probe
cacgcagctgcggtgccacgcagctgcggtgctccccacgccatgcaa

SEQ ID NO: 926 - DNA, 48 bp, Artificial
  oligonucleotide probe
cgaaagccgcaatgcgcgaaagccgcaatgcgcacgcagctgcggtgc

SEQ ID NO: 927 - DNA, 48 bp, Artificial
  oligonucleotide probe
cgaaagccgcaatgcgcgaaagccgcaatgcgtcccggacgcttgcaa

SEQ ID NO: 928 - DNA, 48 bp, Artificial
  oligonucleotide probe
tcgttgcgcacggctttcgttgcgcacggctttgcggcaaatcgcgtt

SEQ ID NO: 929 - DNA, 48 bp, Artificial
  oligonucleotide probe
cgtttgcgcgaatccccgtttgcgcgaatccctgcggcaaatcgcgtt

SEQ ID NO: 930 - DNA, 48 bp, Artificial
  oligonucleotide probe
tccccacgccatgcaatccccacgccatgcaacacgcagctgcggtgc

SEQ ID NO: 931 - DNA, 48 bp, Artificial
  oligonucleotide probe
tgcggcaaatcgcgtttgcggcaaatcgcgtttcgttgcgcacggctt

SEQ ID NO: 932 - DNA, 48 bp, Artificial
  oligonucleotide probe
tccccacgccatgcaatccccacgccatgcaatgcggcaaatcgcgtt

SEQ ID NO: 933 - DNA, 48 bp, Artificial
  oligonucleotide probe
cacgcagctgcggtgccacgcagctgcggtgctgcgcttgcagccgtt

SEQ ID NO: 934 - DNA, 48 bp, Artificial
  oligonucleotide probe
tcccggacgcttgcaatcccggacgcttgcaacgaaagccgcaatgcg

SEQ ID NO: 935 - DNA, 48 bp, Artificial
  oligonucleotide probe
tgcgcttgcagccgtttgcgcttgcagccgtttccccacgccatgcaa

SEQ ID NO: 936 - DNA, 48 bp, Artificial
  oligonucleotide probe
tgcgcttgcagccgtttgcgcttgcagccgtttcccggacgcttgcaa

SEQ ID NO: 937 - DNA, 48 bp, Artificial
  oligonucleotide probe
tccccacgccatgcaatccccacgccatgcaatcccggacgcttgcaa

SEQ ID NO: 938 - DNA, 48 bp, Artificial
  oligonucleotide probe
cacgcagctgcggtgccacgcagctgcggtgccgtttgcgcgaatccc

SEQ ID NO: 939 - DNA, 48 bp, Artificial
  oligonucleotide probe
tgcgcttgcagccgtttgcgcttgcagccgttcacgcagctgcggtgc

SEQ ID NO: 940 - DNA, 48 bp, Artificial
  oligonucleotide probe
cgaaagccgcaatgcgcgaaagccgcaatgcgtgcggcaaatcgcgtt

SEQ ID NO: 941 - DNA, 48 bp, Artificial
  oligonucleotide probe
tccccacgccatgcaatccccacgccatgcaatgcgcttgcagccgtt

SEQ ID NO: 942 - DNA, 48 bp, Artificial
  oligonucleotide probe
tcccggacgcttgcaatcccggacgcttgcaatccccacgccatgcaa

SEQ ID NO: 943 - DNA, 48 bp, Artificial
  oligonucleotide probe
tgcgcttgcagccgtttgcgcttgcagccgtttcgttgcgcacggctt

SEQ ID NO: 944 - DNA, 48 bp, Artificial
  oligonucleotide probe
cgtttgcgcgaatccccgtttgcgcgaatccccacgcagctgcggtgc

SEQ ID NO: 945 - DNA, 48 bp, Artificial
  oligonucleotide probe
cgaaagccgcaatgcgtcccggacgcttgcaacagcgcaaacggcgaa

SEQ ID NO: 946 - DNA, 48 bp, Artificial
  oligonucleotide probe
cgtttgcgcgaatccctgcggcaaatcgcgttcagcgtgctgcgccat

SEQ ID NO: 947 - DNA, 48 bp, Artificial
  oligonucleotide probe
tccccacgccatgcaatgcggcaaatcgcgttcagcgcaaacggcgaa

SEQ ID NO: 948 - DNA, 48 bp, Artificial
  oligonucleotide probe
cgtttgcgcgaatccctgcggcaaatcgcgttcagcgcaaacggcgaa

SEQ ID NO: 949 - DNA, 48 bp, Artificial
  oligonucleotide probe
tcgttgcgcacggcttcgtttgcgcgaatccccagcgcaaacggcgaa

SEQ ID NO: 950 - DNA, 48 bp, Artificial
  oligonucleotide probe
tcccggacgcttgcaacacgcagctgcggtgccacggtgcgcaaagcc

SEQ ID NO: 951 - DNA, 48 bp, Artificial
  oligonucleotide probe
cgtttgcgcgaatccccgaaagccgcaatgcgcacggtgcgcaaagcc

SEQ ID NO: 952 - DNA, 48 bp, Artificial
  oligonucleotide probe
cacgcagctgcggtgccacggtgcgcaaagccgtgcgctttgcgacgg

SEQ ID NO: 953 - DNA, 48 bp, Artificial
  oligonucleotide probe
tcccggacgcttgcaacacggtgcgcaaagcccagcgcaaacggcgaa

SEQ ID NO: 954 - DNA, 48 bp, Artificial
  oligonucleotide probe
cgtttgcgcgaatccctccccacgccatgcaacagcgcaaacggcgaa

SEQ ID NO: 955 - DNA, 48 bp, Artificial
  oligonucleotide probe
tcgttgcgcacggctttccccacgccatgcaacagcgtgctgcgccat

SEQ ID NO: 956 - DNA, 48 bp, Artificial
  oligonucleotide probe
tgcgcttgcagccgttcagcgtgctgcgccatgtgcgctttgcgacgg

SEQ ID NO: 957 - DNA, 48 bp, Artificial
  oligonucleotide probe
tgcgcttgcagccgttcacggtgcgcaaagccgtgcgctttgcgacgg

SEQ ID NO: 958 - DNA, 48 bp, Artificial
  oligonucleotide probe
tcgttgcgcacggcttcacgcagctgcggtgccagcgtgctgcgccat

SEQ ID NO: 959 - DNA, 48 bp, Artificial
  oligonucleotide probe
tgcggcaaatcgcgttcacggtgcgcaaagcccagcgtgctgcgccat

SEQ ID NO: 960 - DNA, 48 bp, Artificial
  oligonucleotide probe
tgcggcaaatcgcgttcacggtgcgcaaagcccagcgcaaacggcgaa

SEQ ID NO: 961 - DNA, 48 bp, Artificial
  oligonucleotide probe
tgcggcaaatcgcgttcagcgcaaacggcgaacagcgtgctgcgccat

SEQ ID NO: 962 - DNA, 48 bp, Artificial
  oligonucleotide probe
cgaaagccgcaatgcgcagcgcaaacggcgaacagcgtgctgcgccat

SEQ ID NO: 963 - DNA, 48 bp, Artificial
  oligonucleotide probe
tccccacgccatgcaacagcgtgctgcgccatgtgcgctttgcgacgg

SEQ ID NO: 964 - DNA, 48 bp, Artificial
  oligonucleotide probe
tgcgcttgcagccgttcagcgcaaacggcgaagtgcgctttgcgacgg

SEQ ID NO: 965 - DNA, 48 bp, Artificial
  oligonucleotide probe
cgaaagccgcaatgcgcacggtgcgcaaagcccagcgcaaacggcgaa

SEQ ID NO: 966 - DNA, 48 bp, Artificial
  oligonucleotide probe
cacgcagctgcggtgccagcgcaaacggcgaacagcgtgctgcgccat

SEQ ID NO: 967 - DNA, 48 bp, Artificial
  oligonucleotide probe
cacggtgcgcaaagcccagcgcaaacggcgaagtgcgctttgcgacgg

SEQ ID NO: 968 - DNA, 48 bp, Artificial
  oligonucleotide probe
tcgttgcgcacggctttccccacgccatgcaacagcgcaaacggcgaa

SEQ ID NO: 969 - DNA, 48 bp, Artificial
  oligonucleotide probe
cgtttgcgcgaatccccagcgcaaacggcgaagtgcgctttgcgacgg

SEQ ID NO: 970 - DNA, 48 bp, Artificial
  oligonucleotide probe
tccccacgccatgcaacacgcagctgcggtgccagcgcaaacggcgaa

SEQ ID NO: 971 - DNA, 48 bp, Artificial
  oligonucleotide probe
tgcggcaaatcgcgttcacgcagctgcggtgcgtgcgctttgcgacgg

SEQ ID NO: 972 - DNA, 48 bp, Artificial
  oligonucleotide probe
tcgttgcgcacggctttgcgcttgcagccgttcacggtgcgcaaagcc

SEQ ID NO: 973 - DNA, 48 bp, Artificial
  oligonucleotide probe
tcgttgcgcacggctttgcggcaaatcgcgttcagcgcaaacggcgaa

SEQ ID NO: 974 - DNA, 48 bp, Artificial
  oligonucleotide probe
cgaaagccgcaatgcgcagcgcaaacggcgaagtgcgctttgcgacgg

SEQ ID NO: 975 - DNA, 48 bp, Artificial
  oligonucleotide probe
tgcgcttgcagccgttcacgcagctgcggtgccagcgtgctgcgccat

SEQ ID NO: 976 - DNA, 48 bp, Artificial
  oligonucleotide probe
tcccggacgcttgcaatgcgcttgcagccgttcagcgtgctgcgccat

SEQ ID NO: 977 - DNA, 48 bp, Artificial
  oligonucleotide probe
tcccggacgcttgcaatgcgcttgcagccgttcacggtgcgcaaagcc

SEQ ID NO: 978 - DNA, 48 bp, Artificial
  oligonucleotide probe
tcgttgcgcacggcttcacggtgcgcaaagcccagcgtgctgcgccat

SEQ ID NO: 979 - DNA, 48 bp, Artificial
  oligonucleotide probe
cgtttgcgcgaatccccacggtgcgcaaagcccagcgcaaacggcgaa

SEQ ID NO: 980 - DNA, 48 bp, Artificial
  oligonucleotide probe
tccccacgccatgcaacacggtgcgcaaagcccagcgcaaacggcgaa

SEQ ID NO: 981 - DNA, 48 bp, Artificial
  oligonucleotide probe
cgaaagccgcaatgcgcacgcagctgcggtgccagcgtgctgcgccat

SEQ ID NO: 982 - DNA, 48 bp, Artificial
  oligonucleotide probe
tcgttgcgcacggcttcacgcagctgcggtgccacggtgcgcaaagcc

SEQ ID NO: 983 - DNA, 48 bp, Artificial
  oligonucleotide probe
tccccacgccatgcaacacgcagctgcggtgccagcgtgctgcgccat

SEQ ID NO: 984 - DNA, 48 bp, Artificial
  oligonucleotide probe
tcgttgcgcacggcttcacggtgcgcaaagcccagcgcaaacggcgaa

SEQ ID NO: 985 - DNA, 48 bp, Artificial
  oligonucleotide probe
cgaaagccgcaatgcgtgcggcaaatcgcgttcagcgtgctgcgccat

SEQ ID NO: 986 - DNA, 48 bp, Artificial
  oligonucleotide probe
tccccacgccatgcaatgcgcttgcagccgttcagcgtgctgcgccat

SEQ ID NO: 987 - DNA, 48 bp, Artificial
  oligonucleotide probe
cgtttgcgcgaatccctcccggacgcttgcaacagcgtgctgcgccat

SEQ ID NO: 988 - DNA, 48 bp, Artificial
  oligonucleotide probe
tccccacgccatgcaacacggtgcgcaaagccgtgcgctttgcgacgg

SEQ ID NO: 989 - DNA, 48 bp, Artificial
  oligonucleotide probe
tccccacgccatgcaatgcggcaaatcgcgttgtgcgctttgcgacgg

SEQ ID NO: 990 - DNA, 48 bp, Artificial
  oligonucleotide probe
cgaaagccgcaatgcgtcccggacgcttgcaacagcgtgctgcgccat

SEQ ID NO: 991 - DNA, 48 bp, Artificial
  oligonucleotide probe
cgaaagccgcaatgcgcacgcagctgcggtgccagcgcaaacggcgaa

SEQ ID NO: 992 - DNA, 48 bp, Artificial
  oligonucleotide probe
tccccacgccatgcaacagcgcaaacggcgaagtgcgctttgcgacgg

SEQ ID NO: 993 - DNA, 48 bp, Artificial
  oligonucleotide probe
cgtttgcgcgaatccccacggtgcgcaaagccgtgcgctttgcgacgg

SEQ ID NO: 994 - DNA, 48 bp, Artificial
  oligonucleotide probe
tcgttgcgcacggctttcccggacgcttgcaacagcgcaaacggcgaa

SEQ ID NO: 995 - DNA, 48 bp, Artificial
  oligonucleotide probe
tcgttgcgcacggcttcagcgcaaacggcgaacagcgtgctgcgccat

SEQ ID NO: 996 - DNA, 48 bp, Artificial
  oligonucleotide probe
tcgttgcgcacggctttccccacgccatgcaagtgcgctttgcgacgg

SEQ ID NO: 997 - DNA, 48 bp, Artificial
  oligonucleotide probe
tcgttgcgcacggctttgcgcttgcagccgttgtgcgctttgcgacgg

SEQ ID NO: 998 - DNA, 48 bp, Artificial
  oligonucleotide probe
tcccggacgcttgcaatgcgcttgcagccgttgtgcgctttgcgacgg

SEQ ID NO: 999 - DNA, 48 bp, Artificial
  oligonucleotide probe
cgtttgcgcgaatccctgcggcaaatcgcgttgtgcgctttgcgacgg

SEQ ID NO: 1000 - DNA, 48 bp, Artificial
  oligonucleotide probe
tcgttgcgcacggctttgcgcttgcagccgttcagcgcaaacggcgaa

SEQ ID NO: 1001 - DNA, 48 bp, Artificial
  oligonucleotide probe
tcccggacgcttgcaacagcgcaaacggcgaagtgcgctttgcgacgg

SEQ ID NO: 1002 - DNA, 48 bp, Artificial
  oligonucleotide probe
cgaaagccgcaatgcgtccccacgccatgcaacagcgcaaacggcgaa

SEQ ID NO: 1003 - DNA, 48 bp, Artificial
  oligonucleotide probe
tccccacgccatgcaatgcgcttgcagccgttcacggtgcgcaaagcc

SEQ ID NO: 1004 - DNA, 48 bp, Artificial
  oligonucleotide probe
tccccacgccatgcaacacgcagctgcggtgcgtgcgctttgcgacgg

SEQ ID NO: 1005 - DNA, 48 bp, Artificial
  oligonucleotide probe
tccccacgccatgcaacacggtgcgcaaagcccagcgtgctgcgccat

SEQ ID NO: 1006 - DNA, 48 bp, Artificial
  oligonucleotide probe
tcgttgcgcacggctttcccggacgcttgcaacacggtgcgcaaagcc

SEQ ID NO: 1007 - DNA, 48 bp, Artificial
  oligonucleotide probe
tccccacgccatgcaatgcggcaaatcgcgttcagcgtgctgcgccat

SEQ ID NO: 1008 - DNA, 48 bp, Artificial
  oligonucleotide probe
tcgttgcgcacggcttcacggtgcgcaaagccgtgcgctttgcgacgg

SEQ ID NO: 1009 - DNA, 48 bp, Artificial
  oligonucleotide probe
cacggtgcgcaaagcccagcgcaaacggcgaacagcgtgctgcgccat

SEQ ID NO: 1010 - DNA, 48 bp, Artificial
  oligonucleotide probe
cacggtgcgcaaagcccagcgtgctgcgccatgtgcgctttgcgacgg

SEQ ID NO: 1011 - DNA, 48 bp, Artificial
  oligonucleotide probe
tccccacgccatgcaatgcgcttgcagccgttgtgcgctttgcgacgg

SEQ ID NO: 1012 - DNA, 48 bp, Artificial
  oligonucleotide probe
tcccggacgcttgcaatgcgcttgcagccgttcagcgcaaacggcgaa

SEQ ID NO: 1013 - DNA, 48 bp, Artificial
  oligonucleotide probe
tgcggcaaatcgcgttcacgcagctgcggtgccagcgtgctgcgccat

SEQ ID NO: 1014 - DNA, 48 bp, Artificial
  oligonucleotide probe
tgcggcaaatcgcgttcacggtgcgcaaagccgtgcgctttgcgacgg

SEQ ID NO: 1015 - DNA, 48 bp, Artificial
  oligonucleotide probe
tccccacgccatgcaatcccggacgcttgcaacagcgtgctgcgccat

SEQ ID NO: 1016 - DNA, 48 bp, Artificial
  oligonucleotide probe
tcgttgcgcacggcttcgtttgcgcgaatccccagcgtgctgcgccat

SEQ ID NO: 1017 - DNA, 48 bp, Artificial
  oligonucleotide probe
tcgttgcgcacggctttcccggacgcttgcaagtgcgctttgcgacgg

SEQ ID NO: 1018 - DNA, 48 bp, Artificial
  oligonucleotide probe
tcgttgcgcacggctttgcggcaaatcgcgttcagcgtgctgcgccat

SEQ ID NO: 1019 - DNA, 48 bp, Artificial
  oligonucleotide probe
tcccggacgcttgcaatgcggcaaatcgcgttcacggtgcgcaaagcc

SEQ ID NO: 1020 - DNA, 48 bp, Artificial
  oligonucleotide probe
tgcggcaaatcgcgttcacgcagctgcggtgccagcgcaaacggcgaa

SEQ ID NO: 1021 - DNA, 48 bp, Artificial
  oligonucleotide probe
cgaaagccgcaatgcgtccccacgccatgcaacacggtgcgcaaagcc

SEQ ID NO: 1022 - DNA, 48 bp, Artificial
  oligonucleotide probe
cgtttgcgcgaatccccagcgtgctgcgccatgtgcgctttgcgacgg

SEQ ID NO: 1023 - DNA, 48 bp, Artificial
  oligonucleotide probe
tcgttgcgcacggctttgcgcttgcagccgttcagcgtgctgcgccat

SEQ ID NO: 1024 - DNA, 48 bp, Artificial
  oligonucleotide probe
tcgttgcgcacggctttgcggcaaatcgcgttcacggtgcgcaaagcc

SEQ ID NO: 1025 - DNA, 48 bp, Artificial
  oligonucleotide probe
cacgcagctgcggtgccacggtgcgcaaagcccagcgtgctgcgccat

SEQ ID NO: 1026 - DNA, 48 bp, Artificial
  oligonucleotide probe
cgaaagccgcaatgcgcacggtgcgcaaagcccagcgtgctgcgccat

SEQ ID NO: 1027 - DNA, 48 bp, Artificial
  oligonucleotide probe
tcccggacgcttgcaacacggtgcgcaaagccgtgcgctttgcgacgg

SEQ ID NO: 1028 - DNA, 48 bp, Artificial
  oligonucleotide probe
tgcggcaaatcgcgttcacgcagctgcggtgccacggtgcgcaaagcc

SEQ ID NO: 1029 - DNA, 48 bp, Artificial
  oligonucleotide probe
cgtttgcgcgaatccccgaaagccgcaatgcggtgcgctttgcgacgg

SEQ ID NO: 1030 - DNA, 48 bp, Artificial
  oligonucleotide probe
cgtttgcgcgaatccccacgcagctgcggtgccagcgtgctgcgccat

SEQ ID NO: 1031 - DNA, 48 bp, Artificial
  oligonucleotide probe
tcgttgcgcacggcttcgtttgcgcgaatccccacggtgcgcaaagcc

SEQ ID NO: 1032 - DNA, 48 bp, Artificial
  oligonucleotide probe
cgaaagccgcaatgcgtcccggacgcttgcaagtgcgctttgcgacgg

SEQ ID NO: 1033 - DNA, 48 bp, Artificial
  oligonucleotide probe
tccccacgccatgcaatcccggacgcttgcaagtgcgctttgcgacgg

SEQ ID NO: 1034 - DNA, 48 bp, Artificial
  oligonucleotide probe
tcccggacgcttgcaatgcggcaaatcgcgttgtgcgctttgcgacgg

SEQ ID NO: 1035 - DNA, 48 bp, Artificial
  oligonucleotide probe
cgaaagccgcaatgcgtgcggcaaatcgcgttcagcgcaaacggcgaa

SEQ ID NO: 1036 - DNA, 48 bp, Artificial
  oligonucleotide probe
cgtttgcgcgaatccctgcgcttgcagccgttgtgcgctttgcgacgg

SEQ ID NO: 1037 - DNA, 48 bp, Artificial
  oligonucleotide probe
tccccacgccatgcaatgcggcaaatcgcgttcacggtgcgcaaagcc

SEQ ID NO: 1038 - DNA, 48 bp, Artificial
  oligonucleotide probe
tgcgcttgcagccgttcacggtgcgcaaagcccagcgtgctgcgccat

SEQ ID NO: 1039 - DNA, 48 bp, Artificial
  oligonucleotide probe
cgtttgcgcgaatccctccccacgccatgcaagtgcgctttgcgacgg

SEQ ID NO: 1040 - DNA, 48 bp, Artificial
  oligonucleotide probe
tgcgcttgcagccgttcagcgcaaacggcgaacagcgtgctgcgccat

SEQ ID NO: 1041 - DNA, 48 bp, Artificial
  oligonucleotide probe
tcgttgcgcacggctttccccacgccatgcaacacggtgcgcaaagcc

SEQ ID NO: 1042 - DNA, 48 bp, Artificial
  oligonucleotide probe
cgaaagccgcaatgcgtgcgcttgcagccgttcagcgtgctgcgccat

SEQ ID NO: 1043 - DNA, 48 bp, Artificial
  oligonucleotide probe
cagcgcaaacggcgaacagcgtgctgcgccatgtgcgctttgcgacgg

SEQ ID NO: 1044 - DNA, 48 bp, Artificial
  oligonucleotide probe
tcgttgcgcacggctttgcggcaaatcgcgttgtgcgctttgcgacgg

SEQ ID NO: 1045 - DNA, 48 bp, Artificial
  oligonucleotide probe
cgtttgcgcgaatccctccccacgccatgcaacacggtgcgcaaagcc

SEQ ID NO: 1046 - DNA, 48 bp, Artificial
  oligonucleotide probe
cgaaagccgcaatgcgtcccggacgcttgcaacacggtgcgcaaagcc

SEQ ID NO: 1047 - DNA, 48 bp, Artificial
  oligonucleotide probe
cgtttgcgcgaatccctgcgcttgcagccgttcagcgtgctgcgccat

SEQ ID NO: 1048 - DNA, 48 bp, Artificial
  oligonucleotide probe
cgaaagccgcaatgcgcacgcagctgcggtgccacggtgcgcaaagcc

SEQ ID NO: 1049 - DNA, 48 bp, Artificial
  oligonucleotide probe
tcccggacgcttgcaacacgcagctgcggtgcgtgcgctttgcgacgg

SEQ ID NO: 1050 - DNA, 48 bp, Artificial
  oligonucleotide probe
cgaaagccgcaatgcgcagcgtgctgcgccatgtgcgctttgcgacgg

SEQ ID NO: 1051 - DNA, 48 bp, Artificial
  oligonucleotide probe
cacgcagctgcggtgccagcgcaaacggcgaagtgcgctttgcgacgg

SEQ ID NO: 1052 - DNA, 48 bp, Artificial
  oligonucleotide probe
cgaaagccgcaatgcgcacggtgcgcaaagccgtgcgctttgcgacgg

SEQ ID NO: 1053 - DNA, 48 bp, Artificial
  oligonucleotide probe
cgaaagccgcaatgcgtgcgcttgcagccgttcagcgcaaacggcgaa

SEQ ID NO: 1054 - DNA, 48 bp, Artificial
  oligonucleotide probe
cgtttgcgcgaatccccgaaagccgcaatgcgcagcgcaaacggcgaa

SEQ ID NO: 1055 - DNA, 48 bp, Artificial
  oligonucleotide probe
cgtttgcgcgaatccctcccggacgcttgcaagtgcgctttgcgacgg

SEQ ID NO: 1056 - DNA, 48 bp, Artificial
  oligonucleotide probe
tccccacgccatgcaacagcgcaaacggcgaacagcgtgctgcgccat

SEQ ID NO: 1057 - DNA, 48 bp, Artificial
  oligonucleotide probe
tgcggcaaatcgcgttcagcgcaaacggcgaagtgcgctttgcgacgg

SEQ ID NO: 1058 - DNA, 48 bp, Artificial
  oligonucleotide probe
tcgttgcgcacggcttcagcgcaaacggcgaagtgcgctttgcgacgg

SEQ ID NO: 1059 - DNA, 48 bp, Artificial
  oligonucleotide probe
tcccggacgcttgcaacagcgtgctgcgccatgtgcgctttgcgacgg

SEQ ID NO: 1060 - DNA, 48 bp, Artificial
  oligonucleotide probe
cgaaagccgcaatgcgtgcgcttgcagccgttgtgcgctttgcgacgg

SEQ ID NO: 1061 - DNA, 48 bp, Artificial
  oligonucleotide probe
tcgttgcgcacggcttcgaaagccgcaatgcggtgcgctttgcgacgg

SEQ ID NO: 1062 - DNA, 48 bp, Artificial
  oligonucleotide probe
tccccacgccatgcaacacgcagctgcggtgccacggtgcgcaaagcc

SEQ ID NO: 1063 - DNA, 48 bp, Artificial
  oligonucleotide probe
cgtttgcgcgaatccccacgcagctgcggtgcgtgcgctttgcgacgg

SEQ ID NO: 1064 - DNA, 48 bp, Artificial
  oligonucleotide probe
tgcgcttgcagccgttcacgcagctgcggtgccagcgcaaacggcgaa

SEQ ID NO: 1065 - DNA, 48 bp, Artificial
  oligonucleotide probe
tgcgcttgcagccgttcacgcagctgcggtgcgtgcgctttgcgacgg

SEQ ID NO: 1066 - DNA, 48 bp, Artificial
  oligonucleotide probe
cgtttgcgcgaatccctcccggacgcttgcaacagcgcaaacggcgaa

SEQ ID NO: 1067 - DNA, 48 bp, Artificial
  oligonucleotide probe
cgtttgcgcgaatccccacgcagctgcggtgccacggtgcgcaaagcc

SEQ ID NO: 1068 - DNA, 48 bp, Artificial
  oligonucleotide probe
tccccacgccatgcaatcccggacgcttgcaacacggtgcgcaaagcc

SEQ ID NO: 1069 - DNA, 48 bp, Artificial
  oligonucleotide probe
cgtttgcgcgaatccccacggtgcgcaaagcccagcgtgctgcgccat

SEQ ID NO: 1070 - DNA, 48 bp, Artificial
  oligonucleotide probe
tcgttgcgcacggcttcgaaagccgcaatgcgcacggtgcgcaaagcc

SEQ ID NO: 1071 - DNA, 48 bp, Artificial
  oligonucleotide probe
tcccggacgcttgcaacacgcagctgcggtgccagcgtgctgcgccat

SEQ ID NO: 1072 - DNA, 48 bp, Artificial
  oligonucleotide probe
tcgttgcgcacggcttcacgcagctgcggtgcgtgcgctttgcgacgg

SEQ ID NO: 1073 - DNA, 48 bp, Artificial
  oligonucleotide probe
tgcgcttgcagccgtttgcggcaaatcgcgttcagcgtgctgcgccat

SEQ ID NO: 1074 - DNA, 48 bp, Artificial
  oligonucleotide probe
tgcgcttgcagccgtttgcggcaaatcgcgttgtgcgctttgcgacgg

SEQ ID NO: 1075 - DNA, 48 bp, Artificial
  oligonucleotide probe
tcccggacgcttgcaatgcggcaaatcgcgttcagcgtgctgcgccat

SEQ ID NO: 1076 - DNA, 48 bp, Artificial
  oligonucleotide probe
cgaaagccgcaatgcgtccccacgccatgcaagtgcgctttgcgacgg

SEQ ID NO: 1077 - DNA, 48 bp, Artificial
  oligonucleotide probe
tgcgcttgcagccgtttgcggcaaatcgcgttcacggtgcgcaaagcc

SEQ ID NO: 1078 - DNA, 48 bp, Artificial
  oligonucleotide probe
tgcgcttgcagccgttcacggtgcgcaaagcccagcgcaaacggcgaa

SEQ ID NO: 1079 - DNA, 48 bp, Artificial
  oligonucleotide probe
tcgttgcgcacggcttcagcgtgctgcgccatgtgcgctttgcgacgg

SEQ ID NO: 1080 - DNA, 48 bp, Artificial
  oligonucleotide probe
tgcgcttgcagccgttcacgcagctgcggtgccacggtgcgcaaagcc

SEQ ID NO: 1081 - DNA, 48 bp, Artificial
  oligonucleotide probe
tcgttgcgcacggctttcccggacgcttgcaacagcgtgctgcgccat

SEQ ID NO: 1082 - DNA, 48 bp, Artificial
  oligonucleotide probe
cgaaagccgcaatgcgtgcggcaaatcgcgttcacggtgcgcaaagcc

SEQ ID NO: 1083 - DNA, 48 bp, Artificial
  oligonucleotide probe
tcgttgcgcacggcttcgaaagccgcaatgcgcagcgtgctgcgccat

SEQ ID NO: 1084 - DNA, 48 bp, Artificial
  oligonucleotide probe
cgaaagccgcaatgcgtgcgcttgcagccgttcacggtgcgcaaagcc

SEQ ID NO: 1085 - DNA, 48 bp, Artificial
  oligonucleotide probe
cacgcagctgcggtgccagcgtgctgcgccatgtgcgctttgcgacgg

SEQ ID NO: 1086 - DNA, 48 bp, Artificial
  oligonucleotide probe
tgcggcaaatcgcgttcagcgtgctgcgccatgtgcgctttgcgacgg

SEQ ID NO: 1087 - DNA, 48 bp, Artificial
  oligonucleotide probe
cgtttgcgcgaatccctccccacgccatgcaacagcgtgctgcgccat

SEQ ID NO: 1088 - DNA, 48 bp, Artificial
  oligonucleotide probe
tcccggacgcttgcaacacgcagctgcggtgccagcgcaaacggcgaa

SEQ ID NO: 1089 - DNA, 48 bp, Artificial
  oligonucleotide probe
cgtttgcgcgaatccccacgcagctgcggtgccagcgcaaacggcgaa

SEQ ID NO: 1090 - DNA, 48 bp, Artificial
  oligonucleotide probe
tcgttgcgcacggcttcgtttgcgcgaatcccgtgcgctttgcgacgg

SEQ ID NO: 1091 - DNA, 48 bp, Artificial
  oligonucleotide probe
cgtttgcgcgaatccctgcggcaaatcgcgttcacggtgcgcaaagcc

SEQ ID NO: 1092 - DNA, 48 bp, Artificial
  oligonucleotide probe
tgcgcttgcagccgtttgcggcaaatcgcgttcagcgcaaacggcgaa

SEQ ID NO: 1093 - DNA, 48 bp, Artificial
  oligonucleotide probe
cgtttgcgcgaatccccagcgcaaacggcgaacagcgtgctgcgccat

SEQ ID NO: 1094 - DNA, 48 bp, Artificial
  oligonucleotide probe
cgaaagccgcaatgcgtccccacgccatgcaacagcgtgctgcgccat

SEQ ID NO: 1095 - DNA, 48 bp, Artificial
  oligonucleotide probe
tccccacgccatgcaatcccggacgcttgcaacagcgcaaacggcgaa

SEQ ID NO: 1096 - DNA, 48 bp, Artificial
  oligonucleotide probe
tcccggacgcttgcaacagcgcaaacggcgaacagcgtgctgcgccat

SEQ ID NO: 1097 - DNA, 48 bp, Artificial
  oligonucleotide probe
cgtttgcgcgaatccctcccggacgcttgcaacacggtgcgcaaagcc

SEQ ID NO: 1098 - DNA, 48 bp, Artificial
  oligonucleotide probe
tccccacgccatgcaatgcgcttgcagccgttcagcgcaaacggcgaa

SEQ ID NO: 1099 - DNA, 48 bp, Artificial
  oligonucleotide probe
cgaaagccgcaatgcgtgcggcaaatcgcgttgtgcgctttgcgacgg

SEQ ID NO: 1100 - DNA, 48 bp, Artificial
  oligonucleotide probe
tcgttgcgcacggcttcacgcagctgcggtgccagcgcaaacggcgaa

SEQ ID NO: 1101 - DNA, 48 bp, Artificial
  oligonucleotide probe
tcgttgcgcacggcttcgaaagccgcaatgcgcagcgcaaacggcgaa

SEQ ID NO: 1102 - DNA, 48 bp, Artificial
  oligonucleotide probe
cgtttgcgcgaatccccgaaagccgcaatgcgcagcgtgctgcgccat

SEQ ID NO: 1103 - DNA, 48 bp, Artificial
  oligonucleotide probe
cgtttgcgcgaatccctgcgcttgcagccgttcacggtgcgcaaagcc

SEQ ID NO: 1104 - DNA, 48 bp, Artificial
  oligonucleotide probe
cgaaagccgcaatgcgcacgcagctgcggtgcgtgcgctttgcgacgg

SEQ ID NO: 1105 - DNA, 48 bp, Artificial
  oligonucleotide probe
tcccggacgcttgcaatgcggcaaatcgcgttcagcgcaaacggcgaa

SEQ ID NO: 1106 - DNA, 48 bp, Artificial
  oligonucleotide probe
tcccggacgcttgcaacacggtgcgcaaagcccagcgtgctgcgccat

SEQ ID NO: 1107 - DNA, 48 bp, Artificial
  oligonucleotide probe
cacgcagctgcggtgccacggtgcgcaaagcccagcgcaaacggcgaa

SEQ ID NO: 1108 - DNA, 48 bp, Artificial
  oligonucleotide probe
cgtttgcgcgaatccctgcgcttgcagccgttcagcgcaaacggcgaa

SEQ ID NO: 1109 - DNA, 48 bp, Artificial
  oligonucleotide probe
cacggtgcgcaaagcccacggtgcgcaaagccgtgcgctttgcgacgg

SEQ ID NO: 1110 - DNA, 48 bp, Artificial
  oligonucleotide probe
gtgcgctttgcgacgggtgcgctttgcgacggcacggtgcgcaaagcc

SEQ ID NO: 1111 - DNA, 48 bp, Artificial
  oligonucleotide probe
gtgcgctttgcgacgggtgcgctttgcgacggcgtttgcgcgaatccc

SEQ ID NO: 1112 - DNA, 48 bp, Artificial
  oligonucleotide probe
tcccggacgcttgcaatcccggacgcttgcaacagcgtgctgcgccat

SEQ ID NO: 1113 - DNA, 48 bp, Artificial
  oligonucleotide probe
cagcgtgctgcgccatcagcgtgctgcgccatcacgcagctgcggtgc

SEQ ID NO: 1114 - DNA, 48 bp, Artificial
  oligonucleotide probe
cagcgcaaacggcgaacagcgcaaacggcgaatgcggcaaatcgcgtt

SEQ ID NO: 1115 - DNA, 48 bp, Artificial
  oligonucleotide probe
gtgcgctttgcgacgggtgcgctttgcgacggtcgttgcgcacggctt

SEQ ID NO: 1116 - DNA, 48 bp, Artificial
  oligonucleotide probe
tcgttgcgcacggctttcgttgcgcacggcttgtgcgctttgcgacgg

SEQ ID NO: 1117 - DNA, 48 bp, Artificial
  oligonucleotide probe
cagcgtgctgcgccatcagcgtgctgcgccatcgtttgcgcgaatccc

SEQ ID NO: 1118 - DNA, 48 bp, Artificial
  oligonucleotide probe
gtgcgctttgcgacgggtgcgctttgcgacggcacgcagctgcggtgc

SEQ ID NO: 1119 - DNA, 48 bp, Artificial
  oligonucleotide probe
tgcgcttgcagccgtttgcgcttgcagccgttcagcgcaaacggcgaa

SEQ ID NO: 1120 - DNA, 48 bp, Artificial
  oligonucleotide probe
cagcgcaaacggcgaacagcgcaaacggcgaacacgcagctgcggtgc

SEQ ID NO: 1121 - DNA, 48 bp, Artificial
  oligonucleotide probe
tcgttgcgcacggctttcgttgcgcacggcttcacggtgcgcaaagcc

SEQ ID NO: 1122 - DNA, 48 bp, Artificial
  oligonucleotide probe
cagcgtgctgcgccatcagcgtgctgcgccattgcggcaaatcgcgtt

SEQ ID NO: 1123 - DNA, 48 bp, Artificial
  oligonucleotide probe
cagcgtgctgcgccatcagcgtgctgcgccattcccggacgcttgcaa

SEQ ID NO: 1124 - DNA, 48 bp, Artificial
  oligonucleotide probe
cgaaagccgcaatgcgcgaaagccgcaatgcgcagcgtgctgcgccat

SEQ ID NO: 1125 - DNA, 48 bp, Artificial
  oligonucleotide probe
cacgcagctgcggtgccacgcagctgcggtgcgtgcgctttgcgacgg

SEQ ID NO: 1126 - DNA, 48 bp, Artificial
  oligonucleotide probe
gtgcgctttgcgacgggtgcgctttgcgacggcgaaagccgcaatgcg

SEQ ID NO: 1127 - DNA, 48 bp, Artificial
  oligonucleotide probe
tccccacgccatgcaatccccacgccatgcaacagcgtgctgcgccat

SEQ ID NO: 1128 - DNA, 48 bp, Artificial
  oligonucleotide probe
tgcgcttgcagccgtttgcgcttgcagccgttcagcgtgctgcgccat

SEQ ID NO: 1129 - DNA, 48 bp, Artificial
  oligonucleotide probe
cgtttgcgcgaatccccgtttgcgcgaatcccgtgcgctttgcgacgg

SEQ ID NO: 1130 - DNA, 48 bp, Artificial
  oligonucleotide probe
tgcgcttgcagccgtttgcgcttgcagccgttgtgcgctttgcgacgg

SEQ ID NO: 1131 - DNA, 48 bp, Artificial
  oligonucleotide probe
tccccacgccatgcaatccccacgccatgcaacacggtgcgcaaagcc

SEQ ID NO: 1132 - DNA, 48 bp, Artificial
  oligonucleotide probe
cacggtgcgcaaagcccacggtgcgcaaagcctgcggcaaatcgcgtt

SEQ ID NO: 1133 - DNA, 48 bp, Artificial
  oligonucleotide probe
tcgttgcgcacggctttcgttgcgcacggcttcagcgtgctgcgccat

SEQ ID NO: 1134 - DNA, 48 bp, Artificial
  oligonucleotide probe
cagcgcaaacggcgaacagcgcaaacggcgaatccccacgccatgcaa

SEQ ID NO: 1135 - DNA, 48 bp, Artificial
  oligonucleotide probe
cagcgcaaacggcgaacagcgcaaacggcgaacagcgtgctgcgccat

SEQ ID NO: 1136 - DNA, 48 bp, Artificial
  oligonucleotide probe
cacggtgcgcaaagcccacggtgcgcaaagcctcgttgcgcacggctt

SEQ ID NO: 1137 - DNA, 48 bp, Artificial
  oligonucleotide probe
cagcgcaaacggcgaacagcgcaaacggcgaatgcgcttgcagccgtt

SEQ ID NO: 1138 - DNA, 48 bp, Artificial
  oligonucleotide probe
tcgttgcgcacggctttcgttgcgcacggcttcagcgcaaacggcgaa

SEQ ID NO: 1139 - DNA, 48 bp, Artificial
  oligonucleotide probe
cgaaagccgcaatgcgcgaaagccgcaatgcgcacggtgcgcaaagcc

SEQ ID NO: 1140 - DNA, 48 bp, Artificial
  oligonucleotide probe
gtgcgctttgcgacgggtgcgctttgcgacggtccccacgccatgcaa

SEQ ID NO: 1141 - DNA, 48 bp, Artificial
  oligonucleotide probe
cacgcagctgcggtgccacgcagctgcggtgccacggtgcgcaaagcc

SEQ ID NO: 1142 - DNA, 48 bp, Artificial
  oligonucleotide probe
cgaaagccgcaatgcgcgaaagccgcaatgcgcagcgcaaacggcgaa

SEQ ID NO: 1143 - DNA, 48 bp, Artificial
  oligonucleotide probe
cgtttgcgcgaatccccgtttgcgcgaatccccacggtgcgcaaagcc

SEQ ID NO: 1144 - DNA, 48 bp, Artificial
  oligonucleotide probe
cacgcagctgcggtgccacgcagctgcggtgccagcgtgctgcgccat

SEQ ID NO: 1145 - DNA, 48 bp, Artificial
  oligonucleotide probe
cacggtgcgcaaagcccacggtgcgcaaagcccagcgtgctgcgccat

SEQ ID NO: 1146 - DNA, 48 bp, Artificial
  oligonucleotide probe
gtgcgctttgcgacgggtgcgctttgcgacggtgcggcaaatcgcgtt

SEQ ID NO: 1147 - DNA, 48 bp, Artificial
  oligonucleotide probe
gtgcgctttgcgacgggtgcgctttgcgacggtgcgcttgcagccgtt

SEQ ID NO: 1148 - DNA, 48 bp, Artificial
  oligonucleotide probe
cgaaagccgcaatgcgcgaaagccgcaatgcggtgcgctttgcgacgg

SEQ ID NO: 1149 - DNA, 48 bp, Artificial
  oligonucleotide probe
cagcgtgctgcgccatcagcgtgctgcgccatcagcgcaaacggcgaa

SEQ ID NO: 1150 - DNA, 48 bp, Artificial
  oligonucleotide probe
tgcggcaaatcgcgtttgcggcaaatcgcgttcagcgcaaacggcgaa

SEQ ID NO: 1151 - DNA, 48 bp, Artificial
  oligonucleotide probe
tgcggcaaatcgcgtttgcggcaaatcgcgttgtgcgctttgcgacgg

SEQ ID NO: 1152 - DNA, 48 bp, Artificial
  oligonucleotide probe
cacggtgcgcaaagcccacggtgcgcaaagcccgaaagccgcaatgcg

SEQ ID NO: 1153 - DNA, 48 bp, Artificial
  oligonucleotide probe
cgtttgcgcgaatccccgtttgcgcgaatccccagcgtgctgcgccat

SEQ ID NO: 1154 - DNA, 48 bp, Artificial
  oligonucleotide probe
tcccggacgcttgcaatcccggacgcttgcaacagcgcaaacggcgaa

SEQ ID NO: 1155 - DNA, 48 bp, Artificial
  oligonucleotide probe
cacggtgcgcaaagcccacggtgcgcaaagcctgcgcttgcagccgtt

SEQ ID NO: 1156 - DNA, 48 bp, Artificial
  oligonucleotide probe
cagcgcaaacggcgaacagcgcaaacggcgaatcgttgcgcacggctt

SEQ ID NO: 1157 - DNA, 48 bp, Artificial
  oligonucleotide probe
cgtttgcgcgaatccccgtttgcgcgaatccccagcgcaaacggcgaa

SEQ ID NO: 1158 - DNA, 48 bp, Artificial
  oligonucleotide probe
tgcggcaaatcgcgtttgcggcaaatcgcgttcagcgtgctgcgccat

SEQ ID NO: 1159 - DNA, 48 bp, Artificial
  oligonucleotide probe
cacgcagctgcggtgccacgcagctgcggtgccagcgcaaacggcgaa

SEQ ID NO: 1160 - DNA, 48 bp, Artificial
  oligonucleotide probe
tccccacgccatgcaatccccacgccatgcaacagcgcaaacggcgaa

SEQ ID NO: 1161 - DNA, 48 bp, Artificial
  oligonucleotide probe
tcccggacgcttgcaatcccggacgcttgcaagtgcgctttgcgacgg

SEQ ID NO: 1162 - DNA, 48 bp, Artificial
  oligonucleotide probe
gtgcgctttgcgacgggtgcgctttgcgacggcagcgcaaacggcgaa

SEQ ID NO: 1163 - DNA, 48 bp, Artificial
  oligonucleotide probe
cagcgtgctgcgccatcagcgtgctgcgccatgtgcgctttgcgacgg

SEQ ID NO: 1164 - DNA, 48 bp, Artificial
  oligonucleotide probe
tgcgcttgcagccgtttgcgcttgcagccgttcacggtgcgcaaagcc

SEQ ID NO: 1165 - DNA, 48 bp, Artificial
  oligonucleotide probe
gtgcgctttgcgacgggtgcgctttgcgacggcagcgtgctgcgccat

SEQ ID NO: 1166 - DNA, 48 bp, Artificial
  oligonucleotide probe
gtgcgctttgcgacgggtgcgctttgcgacggtcccggacgcttgcaa

SEQ ID NO: 1167 - DNA, 48 bp, Artificial
  oligonucleotide probe
cacggtgcgcaaagcccacggtgcgcaaagcctccccacgccatgcaa

SEQ ID NO: 1168 - DNA, 48 bp, Artificial
  oligonucleotide probe
cagcgcaaacggcgaacagcgcaaacggcgaagtgcgctttgcgacgg

SEQ ID NO: 1169 - DNA, 48 bp, Artificial
  oligonucleotide probe
tccccacgccatgcaatccccacgccatgcaagtgcgctttgcgacgg

SEQ ID NO: 1170 - DNA, 48 bp, Artificial
  oligonucleotide probe
cacggtgcgcaaagcccacggtgcgcaaagcctcccggacgcttgcaa

SEQ ID NO: 1171 - DNA, 48 bp, Artificial
  oligonucleotide probe
cagcgtgctgcgccatcagcgtgctgcgccattcgttgcgcacggctt

SEQ ID NO: 1172 - DNA, 48 bp, Artificial
  oligonucleotide probe
cacggtgcgcaaagcccacggtgcgcaaagcccgtttgcgcgaatccc

SEQ ID NO: 1173 - DNA, 48 bp, Artificial
  oligonucleotide probe
cagcgtgctgcgccatcagcgtgctgcgccattgcgcttgcagccgtt

SEQ ID NO: 1174 - DNA, 48 bp, Artificial
  oligonucleotide probe
tgcggcaaatcgcgtttgcggcaaatcgcgttcacggtgcgcaaagcc

SEQ ID NO: 1175 - DNA, 48 bp, Artificial
  oligonucleotide probe
cagcgcaaacggcgaacagcgcaaacggcgaacgaaagccgcaatgcg

SEQ ID NO: 1176 - DNA, 48 bp, Artificial
  oligonucleotide probe
cagcgtgctgcgccatcagcgtgctgcgccatcgaaagccgcaatgcg

SEQ ID NO: 1177 - DNA, 48 bp, Artificial
  oligonucleotide probe
tcccggacgcttgcaatcccggacgcttgcaacacggtgcgcaaagcc

SEQ ID NO: 1178 - DNA, 48 bp, Artificial
  oligonucleotide probe
cacggtgcgcaaagcccacggtgcgcaaagcccagcgcaaacggcgaa

SEQ ID NO: 1179 - DNA, 48 bp, Artificial
  oligonucleotide probe
cagcgcaaacggcgaacagcgcaaacggcgaacgtttgcgcgaatccc

SEQ ID NO: 1180 - DNA, 48 bp, Artificial
  oligonucleotide probe
cagcgtgctgcgccatcagcgtgctgcgccatcacggtgcgcaaagcc

SEQ ID NO: 1181 - DNA, 48 bp, Artificial
  oligonucleotide probe
cacggtgcgcaaagcccacggtgcgcaaagcccacgcagctgcggtgc

SEQ ID NO: 1182 - DNA, 48 bp, Artificial
  oligonucleotide probe
cagcgcaaacggcgaacagcgcaaacggcgaacacggtgcgcaaagcc

SEQ ID NO: 1183 - DNA, 48 bp, Artificial
  oligonucleotide probe
cagcgtgctgcgccatcagcgtgctgcgccattccccacgccatgcaa

SEQ ID NO: 1184 - DNA, 48 bp, Artificial
  oligonucleotide probe
cagcgcaaacggcgaacagcgcaaacggcgaatcccggacgcttgcaa

SEQ ID NO: 1185 - DNA, 48 bp, Artificial
  oligonucleotide probe
cgaaagccgcaatgcgcacggtgcgcaaagccagccgctttcccgtgc

SEQ ID NO: 1186 - DNA, 48 bp, Artificial
  oligonucleotide probe
cgtttgcgcgaatccctgcgcttgcagccgttacggcgtttccccgaa

SEQ ID NO: 1187 - DNA, 48 bp, Artificial
  oligonucleotide probe
tgcgcttgcagccgttcacgcagctgcggtgcacggcgtttccccgaa

SEQ ID NO: 1188 - DNA, 48 bp, Artificial
  oligonucleotide probe
cagcgcaaacggcgaaacgggaccgtgcagccagccgctttcccgtgc

SEQ ID NO: 1189 - DNA, 48 bp, Artificial
  oligonucleotide probe
tcgttgcgcacggcttcgtttgcgcgaatcccacggcgtttccccgaa

SEQ ID NO: 1190 - DNA, 48 bp, Artificial
  oligonucleotide probe
cgtttgcgcgaatcccagccgctttcccgtgcagcccagccgaaacgg

SEQ ID NO: 1191 - DNA, 48 bp, Artificial
  oligonucleotide probe
tcccggacgcttgcaacacgcagctgcggtgcagccgctttcccgtgc

SEQ ID NO: 1192 - DNA, 48 bp, Artificial
  oligonucleotide probe
cacggtgcgcaaagcccagcgcaaacggcgaaacgggaccgtgcagcc

SEQ ID NO: 1193 - DNA, 48 bp, Artificial
  oligonucleotide probe
cacggtgcgcaaagccacgggaccgtgcagccagccgctttcccgtgc

SEQ ID NO: 1194 - DNA, 48 bp, Artificial
  oligonucleotide probe
cagcgtgctgcgccatgtgcgctttgcgacggagcccagccgaaacgg

SEQ ID NO: 1195 - DNA, 48 bp, Artificial
  oligonucleotide probe
cgaaagccgcaatgcggtgcgctttgcgacggagccgctttcccgtgc

SEQ ID NO: 1196 - DNA, 48 bp, Artificial
  oligonucleotide probe
tcgttgcgcacggcttcacggtgcgcaaagccagcccagccgaaacgg

SEQ ID NO: 1197 - DNA, 48 bp, Artificial
  oligonucleotide probe
cacgcagctgcggtgccagcgcaaacggcgaaagccgctttcccgtgc

SEQ ID NO: 1198 - DNA, 48 bp, Artificial
  oligonucleotide probe
cagcgcaaacggcgaaagccgctttcccgtgcagcccagccgaaacgg

SEQ ID NO: 1199 - DNA, 48 bp, Artificial
  oligonucleotide probe
tcccggacgcttgcaaacggcgtttccccgaaagccgctttcccgtgc

SEQ ID NO: 1200 - DNA, 48 bp, Artificial
  oligonucleotide probe
cgaaagccgcaatgcgtcccggacgcttgcaaacggcgtttccccgaa

SEQ ID NO: 1201 - DNA, 48 bp, Artificial
  oligonucleotide probe
tgcggcaaatcgcgttcacgcagctgcggtgcacgggaccgtgcagcc

SEQ ID NO: 1202 - DNA, 48 bp, Artificial
  oligonucleotide probe
tgcgcttgcagccgttcagcgcaaacggcgaaacgggaccgtgcagcc

SEQ ID NO: 1203 - DNA, 48 bp, Artificial
  oligonucleotide probe
tgcggcaaatcgcgttacggcgtttccccgaaacgggaccgtgcagcc

SEQ ID NO: 1204 - DNA, 48 bp, Artificial
  oligonucleotide probe
tccccacgccatgcaatgcggcaaatcgcgttagccgctttcccgtgc

SEQ ID NO: 1205 - DNA, 48 bp, Artificial
  oligonucleotide probe
cgaaagccgcaatgcgcacgcagctgcggtgcacggcgtttccccgaa

SEQ ID NO: 1206 - DNA, 48 bp, Artificial
  oligonucleotide probe
tcgttgcgcacggctttgcggcaaatcgcgttacggcgtttccccgaa

SEQ ID NO: 1207 - DNA, 48 bp, Artificial
  oligonucleotide probe
cagcgtgctgcgccatgtgcgctttgcgacggagccgctttcccgtgc

SEQ ID NO: 1208 - DNA, 48 bp, Artificial
  oligonucleotide probe
cacggtgcgcaaagccgtgcgctttgcgacggagccgctttcccgtgc

SEQ ID NO: 1209 - DNA, 48 bp, Artificial
  oligonucleotide probe
tgcgcttgcagccgttcacgcagctgcggtgcagccgctttcccgtgc

SEQ ID NO: 1210 - DNA, 48 bp, Artificial
  oligonucleotide probe
tcgttgcgcacggcttgtgcgctttgcgacggacgggaccgtgcagcc

SEQ ID NO: 1211 - DNA, 48 bp, Artificial
  oligonucleotide probe
cgtttgcgcgaatccctgcggcaaatcgcgttagcccagccgaaacgg

SEQ ID NO: 1212 - DNA, 48 bp, Artificial
  oligonucleotide probe
cacgcagctgcggtgccagcgtgctgcgccatacgggaccgtgcagcc

SEQ ID NO: 1213 - DNA, 48 bp, Artificial
  oligonucleotide probe
cgtttgcgcgaatccccacggtgcgcaaagccacgggaccgtgcagcc

SEQ ID NO: 1214 - DNA, 48 bp, Artificial
  oligonucleotide probe
cgaaagccgcaatgcgtgcggcaaatcgcgttagcccagccgaaacgg

SEQ ID NO: 1215 - DNA, 48 bp, Artificial
  oligonucleotide probe
cgtttgcgcgaatccctccccacgccatgcaaacggcgtttccccgaa

SEQ ID NO: 1216 - DNA, 48 bp, Artificial
  oligonucleotide probe
cgtttgcgcgaatccctccccacgccatgcaaacgggaccgtgcagcc

SEQ ID NO: 1217 - DNA, 48 bp, Artificial
  oligonucleotide probe
cgtttgcgcgaatccctcccggacgcttgcaaacggcgtttccccgaa

SEQ ID NO: 1218 - DNA, 48 bp, Artificial
  oligonucleotide probe
gtgcgctttgcgacggacggcgtttccccgaaagcccagccgaaacgg

SEQ ID NO: 1219 - DNA, 48 bp, Artificial
  oligonucleotide probe
cgtttgcgcgaatcccacggcgtttccccgaaacgggaccgtgcagcc

SEQ ID NO: 1220 - DNA, 48 bp, Artificial
  oligonucleotide probe
tgcgcttgcagccgttcagcgcaaacggcgaaagcccagccgaaacgg

SEQ ID NO: 1221 - DNA, 48 bp, Artificial
  oligonucleotide probe
tcgttgcgcacggcttagccgctttcccgtgcagcccagccgaaacgg

SEQ ID NO: 1222 - DNA, 48 bp, Artificial
  oligonucleotide probe
cgtttgcgcgaatccccgaaagccgcaatgcgagcccagccgaaacgg

SEQ ID NO: 1223 - DNA, 48 bp, Artificial
  oligonucleotide probe
tcccggacgcttgcaacacggtgcgcaaagccagcccagccgaaacgg

SEQ ID NO: 1224 - DNA, 48 bp, Artificial
  oligonucleotide probe
tgcggcaaatcgcgttcagcgtgctgcgccatacggcgtttccccgaa

SEQ ID NO: 1225 - DNA, 48 bp, Artificial
  oligonucleotide probe
tgcgcttgcagccgttagccgctttcccgtgcagcccagccgaaacgg

SEQ ID NO: 1226 - DNA, 48 bp, Artificial
  oligonucleotide probe
tcgttgcgcacggcttcagcgcaaacggcgaaagcccagccgaaacgg

SEQ ID NO: 1227 - DNA, 48 bp, Artificial
  oligonucleotide probe
tcgttgcgcacggcttgtgcgctttgcgacggagccgctttcccgtgc

SEQ ID NO: 1228 - DNA, 48 bp, Artificial
  oligonucleotide probe
tgcggcaaatcgcgttcagcgcaaacggcgaaagccgctttcccgtgc

SEQ ID NO: 1229 - DNA, 48 bp, Artificial
  oligonucleotide probe
cagcgcaaacggcgaagtgcgctttgcgacggagcccagccgaaacgg

SEQ ID NO: 1230 - DNA, 48 bp, Artificial
  oligonucleotide probe
cagcgtgctgcgccatgtgcgctttgcgacggacgggaccgtgcagcc

SEQ ID NO: 1231 - DNA, 48 bp, Artificial
  oligonucleotide probe
tccccacgccatgcaacacgcagctgcggtgcagcccagccgaaacgg

SEQ ID NO: 1232 - DNA, 48 bp, Artificial
  oligonucleotide probe
tcccggacgcttgcaaacggcgtttccccgaaagcccagccgaaacgg

SEQ ID NO: 1233 - DNA, 48 bp, Artificial
  oligonucleotide probe
tccccacgccatgcaacagcgcaaacggcgaaagccgctttcccgtgc

SEQ ID NO: 1234 - DNA, 48 bp, Artificial
  oligonucleotide probe
tcccggacgcttgcaagtgcgctttgcgacggagcccagccgaaacgg

SEQ ID NO: 1235 - DNA, 48 bp, Artificial
  oligonucleotide probe
tcgttgcgcacggcttcgaaagccgcaatgcgacgggaccgtgcagcc

SEQ ID NO: 1236 - DNA, 48 bp, Artificial
  oligonucleotide probe
tcgttgcgcacggcttcgtttgcgcgaatcccagccgctttcccgtgc

SEQ ID NO: 1237 - DNA, 48 bp, Artificial
  oligonucleotide probe
cgaaagccgcaatgcgagccgctttcccgtgcagcccagccgaaacgg

SEQ ID NO: 1238 - DNA, 48 bp, Artificial
  oligonucleotide probe
cgaaagccgcaatgcgtccccacgccatgcaaagcccagccgaaacgg

SEQ ID NO: 1239 - DNA, 48 bp, Artificial
  oligonucleotide probe
tcccggacgcttgcaaacggcgtttccccgaaacgggaccgtgcagcc

SEQ ID NO: 1240 - DNA, 48 bp, Artificial
  oligonucleotide probe
tcccggacgcttgcaacagcgcaaacggcgaaagcccagccgaaacgg

SEQ ID NO: 1241 - DNA, 48 bp, Artificial
  oligonucleotide probe
tcccggacgcttgcaacagcgcaaacggcgaaagccgctttcccgtgc

SEQ ID NO: 1242 - DNA, 48 bp, Artificial
  oligonucleotide probe
cacggtgcgcaaagccacggcgtttccccgaaacgggaccgtgcagcc

SEQ ID NO: 1243 - DNA, 48 bp, Artificial
  oligonucleotide probe
cgtttgcgcgaatccctccccacgccatgcaaagccgctttcccgtgc

SEQ ID NO: 1244 - DNA, 48 bp, Artificial
  oligonucleotide probe
cagcgtgctgcgccatgtgcgctttgcgacggacggcgtttccccgaa

SEQ ID NO: 1245 - DNA, 48 bp, Artificial
  oligonucleotide probe
tgcggcaaatcgcgttcacggtgcgcaaagccacggcgtttccccgaa

SEQ ID NO: 1246 - DNA, 48 bp, Artificial
  oligonucleotide probe
tcccggacgcttgcaacacgcagctgcggtgcacgggaccgtgcagcc

SEQ ID NO: 1247 - DNA, 48 bp, Artificial
  oligonucleotide probe
tccccacgccatgcaacacgcagctgcggtgcacgggaccgtgcagcc

SEQ ID NO: 1248 - DNA, 48 bp, Artificial
  oligonucleotide probe
tgcggcaaatcgcgttcagcgcaaacggcgaaagcccagccgaaacgg

SEQ ID NO: 1249 - DNA, 48 bp, Artificial
  oligonucleotide probe
tgcgcttgcagccgttcagcgtgctgcgccatacgggaccgtgcagcc

SEQ ID NO: 1250 - DNA, 48 bp, Artificial
  oligonucleotide probe
tcgttgcgcacggcttcacggtgcgcaaagccacggcgtttccccgaa

SEQ ID NO: 1251 - DNA, 48 bp, Artificial
  oligonucleotide probe
tgcgcttgcagccgtttgcggcaaatcgcgttagcccagccgaaacgg

SEQ ID NO: 1252 - DNA, 48 bp, Artificial
  oligonucleotide probe
cgtttgcgcgaatccctgcggcaaatcgcgttacggcgtttccccgaa

SEQ ID NO: 1253 - DNA, 48 bp, Artificial
  oligonucleotide probe
cacgcagctgcggtgcagccgctttcccgtgcagcccagccgaaacgg

SEQ ID NO: 1254 - DNA, 48 bp, Artificial
  oligonucleotide probe
cgtttgcgcgaatccctcccggacgcttgcaaagcccagccgaaacgg

SEQ ID NO: 1255 - DNA, 48 bp, Artificial
  oligonucleotide probe
cacggtgcgcaaagccgtgcgctttgcgacggacgggaccgtgcagcc

SEQ ID NO: 1256 - DNA, 48 bp, Artificial
  oligonucleotide probe
tcgttgcgcacggcttcgtttgcgcgaatcccacgggaccgtgcagcc

SEQ ID NO: 1257 - DNA, 48 bp, Artificial
  oligonucleotide probe
cagcgtgctgcgccatacggcgtttccccgaaacgggaccgtgcagcc

SEQ ID NO: 1258 - DNA, 48 bp, Artificial
  oligonucleotide probe
cgaaagccgcaatgcgtgcgcttgcagccgttagccgctttcccgtgc

SEQ ID NO: 1259 - DNA, 48 bp, Artificial
  oligonucleotide probe
tcgttgcgcacggcttacggcgtttccccgaaacgggaccgtgcagcc

SEQ ID NO: 1260 - DNA, 48 bp, Artificial
  oligonucleotide probe
tccccacgccatgcaaacgggaccgtgcagccagcccagccgaaacgg

SEQ ID NO: 1261 - DNA, 48 bp, Artificial
  oligonucleotide probe
cgaaagccgcaatgcgtccccacgccatgcaaacggcgtttccccgaa

SEQ ID NO: 1262 - DNA, 48 bp, Artificial
  oligonucleotide probe
cgtttgcgcgaatcccacgggaccgtgcagccagccgctttcccgtgc

SEQ ID NO: 1263 - DNA, 48 bp, Artificial
  oligonucleotide probe
tcgttgcgcacggctttgcgcttgcagccgttagcccagccgaaacgg

SEQ ID NO: 1264 - DNA, 48 bp, Artificial
  oligonucleotide probe
tgcggcaaatcgcgttgtgcgctttgcgacggagccgctttcccgtgc

SEQ ID NO: 1265 - DNA, 48 bp, Artificial
  oligonucleotide probe
tccccacgccatgcaacacggtgcgcaaagccacggcgtttccccgaa

SEQ ID NO: 1266 - DNA, 48 bp, Artificial
  oligonucleotide probe
tgcgcttgcagccgttgtgcgctttgcgacggagccgctttcccgtgc

SEQ ID NO: 1267 - DNA, 48 bp, Artificial
  oligonucleotide probe
cagcgcaaacggcgaacagcgtgctgcgccatacgggaccgtgcagcc

SEQ ID NO: 1268 - DNA, 48 bp, Artificial
  oligonucleotide probe
gtgcgctttgcgacggacggcgtttccccgaaacgggaccgtgcagcc

SEQ ID NO: 1269 - DNA, 48 bp, Artificial
  oligonucleotide probe
tccccacgccatgcaagtgcgctttgcgacggacggcgtttccccgaa

SEQ ID NO: 1270 - DNA, 48 bp, Artificial
  oligonucleotide probe
tgcggcaaatcgcgttcagcgcaaacggcgaaacgggaccgtgcagcc

SEQ ID NO: 1271 - DNA, 48 bp, Artificial
  oligonucleotide probe
tccccacgccatgcaatgcgcttgcagccgttagccgctttcccgtgc

SEQ ID NO: 1272 - DNA, 48 bp, Artificial
  oligonucleotide probe
cacgcagctgcggtgcgtgcgctttgcgacggagccgctttcccgtgc

SEQ ID NO: 1273 - DNA, 48 bp, Artificial
  oligonucleotide probe
tcgttgcgcacggcttgtgcgctttgcgacggacggcgtttccccgaa

SEQ ID NO: 1274 - DNA, 48 bp, Artificial
  oligonucleotide probe
tgcgcttgcagccgttcacggtgcgcaaagccagcccagccgaaacgg

SEQ ID NO: 1275 - DNA, 48 bp, Artificial
  oligonucleotide probe
tgcgcttgcagccgttacggcgtttccccgaaagcccagccgaaacgg

SEQ ID NO: 1276 - DNA, 48 bp, Artificial
  oligonucleotide probe
cgaaagccgcaatgcgcacgcagctgcggtgcagcccagccgaaacgg

SEQ ID NO: 1277 - DNA, 48 bp, Artificial
  oligonucleotide probe
tgcggcaaatcgcgttacggcgtttccccgaaagcccagccgaaacgg

SEQ ID NO: 1278 - DNA, 48 bp, Artificial
  oligonucleotide probe
tcgttgcgcacggctttgcggcaaatcgcgttacgggaccgtgcagcc

SEQ ID NO: 1279 - DNA, 48 bp, Artificial
  oligonucleotide probe
acggcgtttccccgaaagccgctttcccgtgcagcccagccgaaacgg

SEQ ID NO: 1280 - DNA, 48 bp, Artificial
  oligonucleotide probe
cgtttgcgcgaatccctccccacgccatgcaaagcccagccgaaacgg

SEQ ID NO: 1281 - DNA, 48 bp, Artificial
  oligonucleotide probe
cgtttgcgcgaatccccgaaagccgcaatgcgagccgctttcccgtgc

SEQ ID NO: 1282 - DNA, 48 bp, Artificial
  oligonucleotide probe
tcgttgcgcacggcttcagcgcaaacggcgaaacggcgtttccccgaa

SEQ ID NO: 1283 - DNA, 48 bp, Artificial
  oligonucleotide probe
cacgcagctgcggtgcacggcgtttccccgaaagccgctttcccgtgc

SEQ ID NO: 1284 - DNA, 48 bp, Artificial
  oligonucleotide probe
tgcgcttgcagccgttgtgcgctttgcgacggagcccagccgaaacgg

SEQ ID NO: 1285 - DNA, 48 bp, Artificial
  oligonucleotide probe
cgaaagccgcaatgcgtgcgcttgcagccgttacgggaccgtgcagcc

SEQ ID NO: 1286 - DNA, 48 bp, Artificial
  oligonucleotide probe
tcgttgcgcacggctttgcggcaaatcgcgttagcccagccgaaacgg

SEQ ID NO: 1287 - DNA, 48 bp, Artificial
  oligonucleotide probe
tccccacgccatgcaagtgcgctttgcgacggagcccagccgaaacgg

SEQ ID NO: 1288 - DNA, 48 bp, Artificial
  oligonucleotide probe
cgaaagccgcaatgcgcacgcagctgcggtgcacgggaccgtgcagcc

SEQ ID NO: 1289 - DNA, 48 bp, Artificial
  oligonucleotide probe
tcgttgcgcacggctttcccggacgcttgcaaagccgctttcccgtgc

SEQ ID NO: 1290 - DNA, 48 bp, Artificial
  oligonucleotide probe
cgtttgcgcgaatcccgtgcgctttgcgacggacggcgtttccccgaa

SEQ ID NO: 1291 - DNA, 48 bp, Artificial
  oligonucleotide probe
tgcggcaaatcgcgttcacggtgcgcaaagccagcccagccgaaacgg

SEQ ID NO: 1292 - DNA, 48 bp, Artificial
  oligonucleotide probe
cagcgcaaacggcgaaacggcgtttccccgaaacgggaccgtgcagcc

SEQ ID NO: 1293 - DNA, 48 bp, Artificial
  oligonucleotide probe
tcccggacgcttgcaatgcggcaaatcgcgttagcccagccgaaacgg

SEQ ID NO: 1294 - DNA, 48 bp, Artificial
  oligonucleotide probe
cgaaagccgcaatgcgtgcggcaaatcgcgttacggcgtttccccgaa

SEQ ID NO: 1295 - DNA, 48 bp, Artificial
  oligonucleotide probe
tcccggacgcttgcaaacgggaccgtgcagccagccgctttcccgtgc

SEQ ID NO: 1296 - DNA, 48 bp, Artificial
  oligonucleotide probe
tgcggcaaatcgcgttcagcgtgctgcgccatacgggaccgtgcagcc

SEQ ID NO: 1297 - DNA, 48 bp, Artificial
  oligonucleotide probe
tcccggacgcttgcaaagccgctttcccgtgcagcccagccgaaacgg

SEQ ID NO: 1298 - DNA, 48 bp, Artificial
  oligonucleotide probe
tcgttgcgcacggctttgcgcttgcagccgttagccgctttcccgtgc

SEQ ID NO: 1299 - DNA, 48 bp, Artificial
  oligonucleotide probe
cacgcagctgcggtgccagcgtgctgcgccatagccgctttcccgtgc

SEQ ID NO: 1300 - DNA, 48 bp, Artificial
  oligonucleotide probe
cacggtgcgcaaagcccagcgtgctgcgccatagcccagccgaaacgg

SEQ ID NO: 1301 - DNA, 48 bp, Artificial
  oligonucleotide probe
cgaaagccgcaatgcgcagcgtgctgcgccatacgggaccgtgcagcc

SEQ ID NO: 1302 - DNA, 48 bp, Artificial
  oligonucleotide probe
tccccacgccatgcaatgcggcaaatcgcgttagcccagccgaaacgg

SEQ ID NO: 1303 - DNA, 48 bp, Artificial
  oligonucleotide probe
tcgttgcgcacggcttcacgcagctgcggtgcacggcgtttccccgaa

SEQ ID NO: 1304 - DNA, 48 bp, Artificial
  oligonucleotide probe
tccccacgccatgcaacacggtgcgcaaagccacgggaccgtgcagcc

SEQ ID NO: 1305 - DNA, 48 bp, Artificial
  oligonucleotide probe
tgcggcaaatcgcgttgtgcgctttgcgacggacggcgtttccccgaa

SEQ ID NO: 1306 - DNA, 48 bp, Artificial
  oligonucleotide probe
tcgttgcgcacggcttcacggtgcgcaaagccagccgctttcccgtgc

SEQ ID NO: 1307 - DNA, 48 bp, Artificial
  oligonucleotide probe
tgcgcttgcagccgttcacggtgcgcaaagccacggcgtttccccgaa

SEQ ID NO: 1308 - DNA, 48 bp, Artificial
  oligonucleotide probe
tgcgcttgcagccgttcacgcagctgcggtgcacgggaccgtgcagcc

SEQ ID NO: 1309 - DNA, 48 bp, Artificial
  oligonucleotide probe
tcccggacgcttgcaatgcggcaaatcgcgttacggcgtttccccgaa

SEQ ID NO: 1310 - DNA, 48 bp, Artificial
  oligonucleotide probe
tcgttgcgcacggctttccccacgccatgcaaagccgctttcccgtgc

SEQ ID NO: 1311 - DNA, 48 bp, Artificial
  oligonucleotide probe
tccccacgccatgcaatgcgcttgcagccgttacggcgtttccccgaa

SEQ ID NO: 1312 - DNA, 48 bp, Artificial
  oligonucleotide probe
cgaaagccgcaatgcgtcccggacgcttgcaaacgggaccgtgcagcc

SEQ ID NO: 1313 - DNA, 48 bp, Artificial
  oligonucleotide probe
cacgcagctgcggtgcgtgcgctttgcgacggagcccagccgaaacgg

SEQ ID NO: 1314 - DNA, 48 bp, Artificial
  oligonucleotide probe
cgaaagccgcaatgcgacggcgtttccccgaaagcccagccgaaacgg

SEQ ID NO: 1315 - DNA, 48 bp, Artificial
  oligonucleotide probe
tccccacgccatgcaacagcgtgctgcgccatagccgctttcccgtgc

SEQ ID NO: 1316 - DNA, 48 bp, Artificial
  oligonucleotide probe
cacgcagctgcggtgcgtgcgctttgcgacggacgggaccgtgcagcc

SEQ ID NO: 1317 - DNA, 48 bp, Artificial
  oligonucleotide probe
cgtttgcgcgaatccctgcgcttgcagccgttagcccagccgaaacgg

SEQ ID NO: 1318 - DNA, 48 bp, Artificial
  oligonucleotide probe
tcgttgcgcacggctttgcggcaaatcgcgttagccgctttcccgtgc

SEQ ID NO: 1319 - DNA, 48 bp, Artificial
  oligonucleotide probe
tcgttgcgcacggcttcagcgcaaacggcgaaagccgctttcccgtgc

SEQ ID NO: 1320 - DNA, 48 bp, Artificial
  oligonucleotide probe
cgtttgcgcgaatccccagcgcaaacggcgaaagcccagccgaaacgg

SEQ ID NO: 1321 - DNA, 48 bp, Artificial
  oligonucleotide probe
tcgttgcgcacggcttcgaaagccgcaatgcgagcccagccgaaacgg

SEQ ID NO: 1322 - DNA, 48 bp, Artificial
  oligonucleotide probe
tcccggacgcttgcaaacgggaccgtgcagccagcccagccgaaacgg

SEQ ID NO: 1323 - DNA, 48 bp, Artificial
  oligonucleotide probe
cgtttgcgcgaatccccacgcagctgcggtgcagcccagccgaaacgg

SEQ ID NO: 1324 - DNA, 48 bp, Artificial
  oligonucleotide probe
cagcgcaaacggcgaagtgcgctttgcgacggacggcgtttccccgaa

SEQ ID NO: 1325 - DNA, 48 bp, Artificial
  oligonucleotide probe
tcgttgcgcacggctttgcgcttgcagccgttacgggaccgtgcagcc

SEQ ID NO: 1326 - DNA, 48 bp, Artificial
  oligonucleotide probe
tcccggacgcttgcaacagcgcaaacggcgaaacgggaccgtgcagcc

SEQ ID NO: 1327 - DNA, 48 bp, Artificial
  oligonucleotide probe
cgtttgcgcgaatcccacggcgtttccccgaaagccgctttcccgtgc

SEQ ID NO: 1328 - DNA, 48 bp, Artificial
  oligonucleotide probe
cacgcagctgcggtgccacggtgcgcaaagccacgggaccgtgcagcc

SEQ ID NO: 1329 - DNA, 48 bp, Artificial
  oligonucleotide probe
tgcgcttgcagccgttcagcgtgctgcgccatagcccagccgaaacgg

SEQ ID NO: 1330 - DNA, 48 bp, Artificial
  oligonucleotide probe
cacggtgcgcaaagcccagcgtgctgcgccatacggcgtttccccgaa

SEQ ID NO: 1331 - DNA, 48 bp, Artificial
  oligonucleotide probe
tgcggcaaatcgcgttgtgcgctttgcgacggacgggaccgtgcagcc

SEQ ID NO: 1332 - DNA, 48 bp, Artificial
  oligonucleotide probe
cgtttgcgcgaatcccacgggaccgtgcagccagcccagccgaaacgg

SEQ ID NO: 1333 - DNA, 48 bp, Artificial
  oligonucleotide probe
cgtttgcgcgaatccccagcgcaaacggcgaaacggcgtttccccgaa

SEQ ID NO: 1334 - DNA, 48 bp, Artificial
  oligonucleotide probe
cagcgtgctgcgccatacgggaccgtgcagccagccgctttcccgtgc

SEQ ID NO: 1335 - DNA, 48 bp, Artificial
  oligonucleotide probe
cgtttgcgcgaatccccgaaagccgcaatgcgacgggaccgtgcagcc

SEQ ID NO: 1336 - DNA, 48 bp, Artificial
  oligonucleotide probe
tgcggcaaatcgcgttcagcgcaaacggcgaaacggcgtttccccgaa

SEQ ID NO: 1337 - DNA, 48 bp, Artificial
  oligonucleotide probe
tcgttgcgcacggcttcacggtgcgcaaagccacgggaccgtgcagcc

SEQ ID NO: 1338 - DNA, 48 bp, Artificial
  oligonucleotide probe
gtgcgctttgcgacggacggcgtttccccgaaagccgctttcccgtgc

SEQ ID NO: 1339 - DNA, 48 bp, Artificial
  oligonucleotide probe
cacggtgcgcaaagccacgggaccgtgcagccagcccagccgaaacgg

SEQ ID NO: 1340 - DNA, 48 bp, Artificial
  oligonucleotide probe
tcccggacgcttgcaacacggtgcgcaaagccacgggaccgtgcagcc

SEQ ID NO: 1341 - DNA, 48 bp, Artificial
  oligonucleotide probe
cgaaagccgcaatgcgacggcgtttccccgaaagccgctttcccgtgc

SEQ ID NO: 1342 - DNA, 48 bp, Artificial
  oligonucleotide probe
cacgcagctgcggtgcacgggaccgtgcagccagccgctttcccgtgc

SEQ ID NO: 1343 - DNA, 48 bp, Artificial
  oligonucleotide probe
cgtttgcgcgaatccccgaaagccgcaatgcgacggcgtttccccgaa

SEQ ID NO: 1344 - DNA, 48 bp, Artificial
  oligonucleotide probe
tgcgcttgcagccgttacggcgtttccccgaaacgggaccgtgcagcc

SEQ ID NO: 1345 - DNA, 48 bp, Artificial
  oligonucleotide probe
tcgttgcgcacggcttcacgcagctgcggtgcagccgctttcccgtgc

SEQ ID NO: 1346 - DNA, 48 bp, Artificial
  oligonucleotide probe
tgcggcaaatcgcgttgtgcgctttgcgacggagcccagccgaaacgg

SEQ ID NO: 1347 - DNA, 48 bp, Artificial
  oligonucleotide probe
tcgttgcgcacggcttcagcgtgctgcgccatagcccagccgaaacgg

SEQ ID NO: 1348 - DNA, 48 bp, Artificial
  oligonucleotide probe
cgtttgcgcgaatccccacgcagctgcggtgcagccgctttcccgtgc

SEQ ID NO: 1349 - DNA, 48 bp, Artificial
  oligonucleotide probe
tgcgcttgcagccgttcacgcagctgcggtgcagcccagccgaaacgg

SEQ ID NO: 1350 - DNA, 48 bp, Artificial
  oligonucleotide probe
cgaaagccgcaatgcgcagcgtgctgcgccatagccgctttcccgtgc

SEQ ID NO: 1351 - DNA, 48 bp, Artificial
  oligonucleotide probe
cacgcagctgcggtgccagcgcaaacggcgaaacggcgtttccccgaa

SEQ ID NO: 1352 - DNA, 48 bp, Artificial
  oligonucleotide probe
cagcgcaaacggcgaaacgggaccgtgcagccagcccagccgaaacgg

SEQ ID NO: 1353 - DNA, 48 bp, Artificial
  oligonucleotide probe
cacgcagctgcggtgcacggcgtttccccgaaagcccagccgaaacgg

SEQ ID NO: 1354 - DNA, 48 bp, Artificial
  oligonucleotide probe
acggcgtttccccgaaacgggaccgtgcagccagcccagccgaaacgg

SEQ ID NO: 1355 - DNA, 48 bp, Artificial
  oligonucleotide probe
tcgttgcgcacggcttcacgcagctgcggtgcagcccagccgaaacgg

SEQ ID NO: 1356 - DNA, 48 bp, Artificial
  oligonucleotide probe
cgaaagccgcaatgcgcagcgcaaacggcgaaacgggaccgtgcagcc

SEQ ID NO: 1357 - DNA, 48 bp, Artificial
  oligonucleotide probe
tgcggcaaatcgcgttacggcgtttccccgaaagccgctttcccgtgc

SEQ ID NO: 1358 - DNA, 48 bp, Artificial
  oligonucleotide probe
cacgcagctgcggtgcacggcgtttccccgaaacgggaccgtgcagcc

SEQ ID NO: 1359 - DNA, 48 bp, Artificial
  oligonucleotide probe
tccccacgccatgcaaacggcgtttccccgaaagcccagccgaaacgg

SEQ ID NO: 1360 - DNA, 48 bp, Artificial
  oligonucleotide probe
tccccacgccatgcaacagcgcaaacggcgaaacgggaccgtgcagcc

SEQ ID NO: 1361 - DNA, 48 bp, Artificial
  oligonucleotide probe
tcccggacgcttgcaatgcggcaaatcgcgttacgggaccgtgcagcc

SEQ ID NO: 1362 - DNA, 48 bp, Artificial
  oligonucleotide probe
tccccacgccatgcaacagcgtgctgcgccatacgggaccgtgcagcc

SEQ ID NO: 1363 - DNA, 48 bp, Artificial
  oligonucleotide probe
cgaaagccgcaatgcgacggcgtttccccgaaacgggaccgtgcagcc

SEQ ID NO: 1364 - DNA, 48 bp, Artificial
  oligonucleotide probe
tccccacgccatgcaatgcgcttgcagccgttacgggaccgtgcagcc

SEQ ID NO: 1365 - DNA, 48 bp, Artificial
  oligonucleotide probe
tgcgcttgcagccgttcagcgtgctgcgccatacggcgtttccccgaa

SEQ ID NO: 1366 - DNA, 48 bp, Artificial
  oligonucleotide probe
cgaaagccgcaatgcgtgcggcaaatcgcgttagccgctttcccgtgc

SEQ ID NO: 1367 - DNA, 48 bp, Artificial
  oligonucleotide probe
tcgttgcgcacggcttcagcgtgctgcgccatacgggaccgtgcagcc

SEQ ID NO: 1368 - DNA, 48 bp, Artificial
  oligonucleotide probe
cgtttgcgcgaatccccagcgtgctgcgccatacgggaccgtgcagcc

SEQ ID NO: 1369 - DNA, 48 bp, Artificial
  oligonucleotide probe
tgcgcttgcagccgttgtgcgctttgcgacggacggcgtttccccgaa

SEQ ID NO: 1370 - DNA, 48 bp, Artificial
  oligonucleotide probe
cacggtgcgcaaagccacggcgtttccccgaaagccgctttcccgtgc

SEQ ID NO: 1371 - DNA, 48 bp, Artificial
  oligonucleotide probe
cagcgcaaacggcgaagtgcgctttgcgacggacgggaccgtgcagcc

SEQ ID NO: 1372 - DNA, 48 bp, Artificial
  oligonucleotide probe
tcgttgcgcacggcttcagcgtgctgcgccatacggcgtttccccgaa

SEQ ID NO: 1373 - DNA, 48 bp, Artificial
  oligonucleotide probe
tgcgcttgcagccgttcacggtgcgcaaagccacgggaccgtgcagcc

SEQ ID NO: 1374 - DNA, 48 bp, Artificial
  oligonucleotide probe
cacggtgcgcaaagccagccgctttcccgtgcagcccagccgaaacgg

SEQ ID NO: 1375 - DNA, 48 bp, Artificial
  oligonucleotide probe
tgcgcttgcagccgtttgcggcaaatcgcgttagccgctttcccgtgc

SEQ ID NO: 1376 - DNA, 48 bp, Artificial
  oligonucleotide probe
cagcgtgctgcgccatacgggaccgtgcagccagcccagccgaaacgg

SEQ ID NO: 1377 - DNA, 48 bp, Artificial
  oligonucleotide probe
cagcgcaaacggcgaacagcgtgctgcgccatagccgctttcccgtgc

SEQ ID NO: 1378 - DNA, 48 bp, Artificial
  oligonucleotide probe
cgaaagccgcaatgcggtgcgctttgcgacggacggcgtttccccgaa

SEQ ID NO: 1379 - DNA, 48 bp, Artificial
  oligonucleotide probe
cgtttgcgcgaatccctgcggcaaatcgcgttagccgctttcccgtgc

SEQ ID NO: 1380 - DNA, 48 bp, Artificial
  oligonucleotide probe
cgaaagccgcaatgcgcacggtgcgcaaagccacggcgtttccccgaa

SEQ ID NO: 1381 - DNA, 48 bp, Artificial
  oligonucleotide probe
tccccacgccatgcaacacggtgcgcaaagccagccgctttcccgtgc

SEQ ID NO: 1382 - DNA, 48 bp, Artificial
  oligonucleotide probe
cgaaagccgcaatgcgcacggtgcgcaaagccacgggaccgtgcagcc

SEQ ID NO: 1383 - DNA, 48 bp, Artificial
  oligonucleotide probe
cgtttgcgcgaatccccagcgtgctgcgccatacggcgtttccccgaa

SEQ ID NO: 1384 - DNA, 48 bp, Artificial
  oligonucleotide probe
tccccacgccatgcaacacgcagctgcggtgcagccgctttcccgtgc

SEQ ID NO: 1385 - DNA, 48 bp, Artificial
  oligonucleotide probe
tccccacgccatgcaacacgcagctgcggtgcacggcgtttccccgaa

SEQ ID NO: 1386 - DNA, 48 bp, Artificial
  oligonucleotide probe
tgcgcttgcagccgttcagcgcaaacggcgaaacggcgtttccccgaa

SEQ ID NO: 1387 - DNA, 48 bp, Artificial
  oligonucleotide probe
cacggtgcgcaaagcccagcgtgctgcgccatagccgctttcccgtgc

SEQ ID NO: 1388 - DNA, 48 bp, Artificial
  oligonucleotide probe
cgtttgcgcgaatccctgcgcttgcagccgttagccgctttcccgtgc

SEQ ID NO: 1389 - DNA, 48 bp, Artificial
  oligonucleotide probe
cacgcagctgcggtgccacggtgcgcaaagccagccgctttcccgtgc

SEQ ID NO: 1390 - DNA, 48 bp, Artificial
  oligonucleotide probe
gtgcgctttgcgacggacgggaccgtgcagccagccgctttcccgtgc

SEQ ID NO: 1391 - DNA, 48 bp, Artificial
  oligonucleotide probe
tgcggcaaatcgcgttagccgctttcccgtgcagcccagccgaaacgg

SEQ ID NO: 1392 - DNA, 48 bp, Artificial
  oligonucleotide probe
tccccacgccatgcaatcccggacgcttgcaaacgggaccgtgcagcc

SEQ ID NO: 1393 - DNA, 48 bp, Artificial
  oligonucleotide probe
cgaaagccgcaatgcgcagcgcaaacggcgaaagccgctttcccgtgc

SEQ ID NO: 1394 - DNA, 48 bp, Artificial
  oligonucleotide probe
cgaaagccgcaatgcgacgggaccgtgcagccagcccagccgaaacgg

SEQ ID NO: 1395 - DNA, 48 bp, Artificial
  oligonucleotide probe
cacgcagctgcggtgccacggtgcgcaaagccacggcgtttccccgaa

SEQ ID NO: 1396 - DNA, 48 bp, Artificial
  oligonucleotide probe
tgcgcttgcagccgttcagcgtgctgcgccatagccgctttcccgtgc

SEQ ID NO: 1397 - DNA, 48 bp, Artificial
  oligonucleotide probe
tgcggcaaatcgcgttacgggaccgtgcagccagccgctttcccgtgc

SEQ ID NO: 1398 - DNA, 48 bp, Artificial
  oligonucleotide probe
tccccacgccatgcaaagccgctttcccgtgcagcccagccgaaacgg

SEQ ID NO: 1399 - DNA, 48 bp, Artificial
  oligonucleotide probe
cgaaagccgcaatgcgcacgcagctgcggtgcagccgctttcccgtgc

SEQ ID NO: 1400 - DNA, 48 bp, Artificial
  oligonucleotide probe
cgaaagccgcaatgcgcacggtgcgcaaagccagcccagccgaaacgg

SEQ ID NO: 1401 - DNA, 48 bp, Artificial
  oligonucleotide probe
cgtttgcgcgaatcccgtgcgctttgcgacggacgggaccgtgcagcc

SEQ ID NO: 1402 - DNA, 48 bp, Artificial
  oligonucleotide probe
tgcgcttgcagccgtttgcggcaaatcgcgttacgggaccgtgcagcc

SEQ ID NO: 1403 - DNA, 48 bp, Artificial
  oligonucleotide probe
tgcggcaaatcgcgttcacggtgcgcaaagccacgggaccgtgcagcc

SEQ ID NO: 1404 - DNA, 48 bp, Artificial
  oligonucleotide probe
cagcgcaaacggcgaacagcgtgctgcgccatagcccagccgaaacgg

SEQ ID NO: 1405 - DNA, 48 bp, Artificial
  oligonucleotide probe
cacgcagctgcggtgcgtgcgctttgcgacggacggcgtttccccgaa

SEQ ID NO: 1406 - DNA, 48 bp, Artificial
  oligonucleotide probe
tccccacgccatgcaatgcggcaaatcgcgttacgggaccgtgcagcc

SEQ ID NO: 1407 - DNA, 48 bp, Artificial
  oligonucleotide probe
cgtttgcgcgaatccccagcgcaaacggcgaaacgggaccgtgcagcc

SEQ ID NO: 1408 - DNA, 48 bp, Artificial
  oligonucleotide probe
tgcgcttgcagccgtttgcggcaaatcgcgttacggcgtttccccgaa

SEQ ID NO: 1409 - DNA, 48 bp, Artificial
  oligonucleotide probe
cacggtgcgcaaagcccagcgcaaacggcgaaagccgctttcccgtgc

SEQ ID NO: 1410 - DNA, 48 bp, Artificial
  oligonucleotide probe
cgtttgcgcgaatccccacggtgcgcaaagccacggcgtttccccgaa

SEQ ID NO: 1411 - DNA, 48 bp, Artificial
  oligonucleotide probe
tcccggacgcttgcaagtgcgctttgcgacggagccgctttcccgtgc

SEQ ID NO: 1412 - DNA, 48 bp, Artificial
  oligonucleotide probe
cgaaagccgcaatgcgcagcgcaaacggcgaaacggcgtttccccgaa

SEQ ID NO: 1413 - DNA, 48 bp, Artificial
  oligonucleotide probe
tcccggacgcttgcaacagcgtgctgcgccatagccgctttcccgtgc

SEQ ID NO: 1414 - DNA, 48 bp, Artificial
  oligonucleotide probe
cacggtgcgcaaagcccagcgtgctgcgccatacgggaccgtgcagcc

SEQ ID NO: 1415 - DNA, 48 bp, Artificial
  oligonucleotide probe
cgaaagccgcaatgcgacgggaccgtgcagccagccgctttcccgtgc

SEQ ID NO: 1416 - DNA, 48 bp, Artificial
  oligonucleotide probe
cacgcagctgcggtgcacgggaccgtgcagccagcccagccgaaacgg

SEQ ID NO: 1417 - DNA, 48 bp, Artificial
  oligonucleotide probe
cgaaagccgcaatgcgtccccacgccatgcaaacgggaccgtgcagcc

SEQ ID NO: 1418 - DNA, 48 bp, Artificial
  oligonucleotide probe
tccccacgccatgcaacagcgcaaacggcgaaagcccagccgaaacgg

SEQ ID NO: 1419 - DNA, 48 bp, Artificial
  oligonucleotide probe
cgtttgcgcgaatccccacgcagctgcggtgcacgggaccgtgcagcc

SEQ ID NO: 1420 - DNA, 48 bp, Artificial
  oligonucleotide probe
cgtttgcgcgaatcccacggcgtttccccgaaagcccagccgaaacgg

SEQ ID NO: 1421 - DNA, 48 bp, Artificial
  oligonucleotide probe
tgcgcttgcagccgttcacggtgcgcaaagccagccgctttcccgtgc

SEQ ID NO: 1422 - DNA, 48 bp, Artificial
  oligonucleotide probe
tcgttgcgcacggcttcacgcagctgcggtgcacgggaccgtgcagcc

SEQ ID NO: 1423 - DNA, 48 bp, Artificial
  oligonucleotide probe
tcccggacgcttgcaacacggtgcgcaaagccacggcgtttccccgaa

SEQ ID NO: 1424 - DNA, 48 bp, Artificial
  oligonucleotide probe
cgaaagccgcaatgcgtgcgcttgcagccgttagcccagccgaaacgg

SEQ ID NO: 1425 - DNA, 48 bp, Artificial
  oligonucleotide probe
acggcgtttccccgaaacgggaccgtgcagccagccgctttcccgtgc

SEQ ID NO: 1426 - DNA, 48 bp, Artificial
  oligonucleotide probe
gtgcgctttgcgacggagccgctttcccgtgcagcccagccgaaacgg

SEQ ID NO: 1427 - DNA, 48 bp, Artificial
  oligonucleotide probe
tcccggacgcttgcaatgcgcttgcagccgttagcccagccgaaacgg

SEQ ID NO: 1428 - DNA, 48 bp, Artificial
  oligonucleotide probe
tcccggacgcttgcaacagcgcaaacggcgaaacggcgtttccccgaa

SEQ ID NO: 1429 - DNA, 48 bp, Artificial
  oligonucleotide probe
cgtttgcgcgaatccctgcggcaaatcgcgttacgggaccgtgcagcc

SEQ ID NO: 1430 - DNA, 48 bp, Artificial
  oligonucleotide probe
cgtttgcgcgaatccccagcgcaaacggcgaaagccgctttcccgtgc

SEQ ID NO: 1431 - DNA, 48 bp, Artificial
  oligonucleotide probe
cacgcagctgcggtgccagcgtgctgcgccatacggcgtttccccgaa

SEQ ID NO: 1432 - DNA, 48 bp, Artificial
  oligonucleotide probe
tcgttgcgcacggcttacggcgtttccccgaaagccgctttcccgtgc

SEQ ID NO: 1433 - DNA, 48 bp, Artificial
  oligonucleotide probe
cgtttgcgcgaatcccgtgcgctttgcgacggagccgctttcccgtgc

SEQ ID NO: 1434 - DNA, 48 bp, Artificial
  oligonucleotide probe
tcgttgcgcacggcttcgtttgcgcgaatcccagcccagccgaaacgg

SEQ ID NO: 1435 - DNA, 48 bp, Artificial
  oligonucleotide probe
tccccacgccatgcaacagcgcaaacggcgaaacggcgtttccccgaa

SEQ ID NO: 1436 - DNA, 48 bp, Artificial
  oligonucleotide probe
cgtttgcgcgaatccccacgcagctgcggtgcacggcgtttccccgaa

SEQ ID NO: 1437 - DNA, 48 bp, Artificial
  oligonucleotide probe
tcgttgcgcacggcttgtgcgctttgcgacggagcccagccgaaacgg

SEQ ID NO: 1438 - DNA, 48 bp, Artificial
  oligonucleotide probe
tgcggcaaatcgcgttcacgcagctgcggtgcagccgctttcccgtgc

SEQ ID NO: 1439 - DNA, 48 bp, Artificial
  oligonucleotide probe
tccccacgccatgcaacacggtgcgcaaagccagcccagccgaaacgg

SEQ ID NO: 1440 - DNA, 48 bp, Artificial
  oligonucleotide probe
tgcggcaaatcgcgttcacgcagctgcggtgcacggcgtttccccgaa

SEQ ID NO: 1441 - DNA, 48 bp, Artificial
  oligonucleotide probe
tgcggcaaatcgcgttcacgcagctgcggtgcagcccagccgaaacgg

SEQ ID NO: 1442 - DNA, 48 bp, Artificial
  oligonucleotide probe
tccccacgccatgcaatgcgcttgcagccgttagcccagccgaaacgg

SEQ ID NO: 1443 - DNA, 48 bp, Artificial
  oligonucleotide probe
tccccacgccatgcaatgcggcaaatcgcgttacggcgtttccccgaa

SEQ ID NO: 1444 - DNA, 48 bp, Artificial
  oligonucleotide probe
tcccggacgcttgcaatgcgcttgcagccgttacggcgtttccccgaa

SEQ ID NO: 1445 - DNA, 48 bp, Artificial
  oligonucleotide probe
cagcgtgctgcgccatagccgctttcccgtgcagcccagccgaaacgg

SEQ ID NO: 1446 - DNA, 48 bp, Artificial
  oligonucleotide probe
tcgttgcgcacggctttcccggacgcttgcaaacggcgtttccccgaa

SEQ ID NO: 1447 - DNA, 48 bp, Artificial
  oligonucleotide probe
cgtttgcgcgaatccccagcgtgctgcgccatagcccagccgaaacgg

SEQ ID NO: 1448 - DNA, 48 bp, Artificial
  oligonucleotide probe
cacgcagctgcggtgccagcgcaaacggcgaaagcccagccgaaacgg

SEQ ID NO: 1449 - DNA, 48 bp, Artificial
  oligonucleotide probe
cacggtgcgcaaagcccagcgcaaacggcgaaacggcgtttccccgaa

SEQ ID NO: 1450 - DNA, 48 bp, Artificial
  oligonucleotide probe
tcccggacgcttgcaacagcgtgctgcgccatagcccagccgaaacgg

SEQ ID NO: 1451 - DNA, 48 bp, Artificial
  oligonucleotide probe
tccccacgccatgcaatcccggacgcttgcaaacggcgtttccccgaa

SEQ ID NO: 1452 - DNA, 48 bp, Artificial
  oligonucleotide probe
tcccggacgcttgcaatgcgcttgcagccgttagccgctttcccgtgc

SEQ ID NO: 1453 - DNA, 48 bp, Artificial
  oligonucleotide probe
tccccacgccatgcaaacggcgtttccccgaaacgggaccgtgcagcc

SEQ ID NO: 1454 - DNA, 48 bp, Artificial
  oligonucleotide probe
cgaaagccgcaatgcggtgcgctttgcgacggacgggaccgtgcagcc

SEQ ID NO: 1455 - DNA, 48 bp, Artificial
  oligonucleotide probe
cgaaagccgcaatgcgcagcgtgctgcgccatacggcgtttccccgaa

SEQ ID NO: 1456 - DNA, 48 bp, Artificial
  oligonucleotide probe
cgtttgcgcgaatccccacggtgcgcaaagccagcccagccgaaacgg

SEQ ID NO: 1457 - DNA, 48 bp, Artificial
  oligonucleotide probe
cgaaagccgcaatgcggtgcgctttgcgacggagcccagccgaaacgg

SEQ ID NO: 1458 - DNA, 48 bp, Artificial
  oligonucleotide probe
cgtttgcgcgaatcccgtgcgctttgcgacggagcccagccgaaacgg

SEQ ID NO: 1459 - DNA, 48 bp, Artificial
  oligonucleotide probe
tccccacgccatgcaaacggcgtttccccgaaagccgctttcccgtgc

SEQ ID NO: 1460 - DNA, 48 bp, Artificial
  oligonucleotide probe
tcccggacgcttgcaatgcggcaaatcgcgttagccgctttcccgtgc

SEQ ID NO: 1461 - DNA, 48 bp, Artificial
  oligonucleotide probe
tcccggacgcttgcaacacgcagctgcggtgcacggcgtttccccgaa

SEQ ID NO: 1462 - DNA, 48 bp, Artificial
  oligonucleotide probe
tcgttgcgcacggctttccccacgccatgcaaacgggaccgtgcagcc

SEQ ID NO: 1463 - DNA, 48 bp, Artificial
  oligonucleotide probe
tgcggcaaatcgcgttcagcgtgctgcgccatagccgctttcccgtgc

SEQ ID NO: 1464 - DNA, 48 bp, Artificial
  oligonucleotide probe
cgaaagccgcaatgcgtgcgcttgcagccgttacggcgtttccccgaa

SEQ ID NO: 1465 - DNA, 48 bp, Artificial
  oligonucleotide probe
cgaaagccgcaatgcgtgcggcaaatcgcgttacgggaccgtgcagcc

SEQ ID NO: 1466 - DNA, 48 bp, Artificial
  oligonucleotide probe
tcgttgcgcacggctttgcgcttgcagccgttacggcgtttccccgaa

SEQ ID NO: 1467 - DNA, 48 bp, Artificial
  oligonucleotide probe
cagcgtgctgcgccatacggcgtttccccgaaagccgctttcccgtgc

SEQ ID NO: 1468 - DNA, 48 bp, Artificial
  oligonucleotide probe
tcgttgcgcacggcttacgggaccgtgcagccagccgctttcccgtgc

SEQ ID NO: 1469 - DNA, 48 bp, Artificial
  oligonucleotide probe
tccccacgccatgcaagtgcgctttgcgacggacgggaccgtgcagcc

SEQ ID NO: 1470 - DNA, 48 bp, Artificial
  oligonucleotide probe
tcccggacgcttgcaacacgcagctgcggtgcagcccagccgaaacgg

SEQ ID NO: 1471 - DNA, 48 bp, Artificial
  oligonucleotide probe
cacggtgcgcaaagccgtgcgctttgcgacggacggcgtttccccgaa

SEQ ID NO: 1472 - DNA, 48 bp, Artificial
  oligonucleotide probe
tcgttgcgcacggctttccccacgccatgcaaagcccagccgaaacgg

SEQ ID NO: 1473 - DNA, 48 bp, Artificial
  oligonucleotide probe
cacggtgcgcaaagccgtgcgctttgcgacggagcccagccgaaacgg

SEQ ID NO: 1474 - DNA, 48 bp, Artificial
  oligonucleotide probe
tgcgcttgcagccgttacgggaccgtgcagccagcccagccgaaacgg

SEQ ID NO: 1475 - DNA, 48 bp, Artificial
  oligonucleotide probe
cagcgcaaacggcgaaacggcgtttccccgaaagccgctttcccgtgc

SEQ ID NO: 1476 - DNA, 48 bp, Artificial
  oligonucleotide probe
tccccacgccatgcaagtgcgctttgcgacggagccgctttcccgtgc

SEQ ID NO: 1477 - DNA, 48 bp, Artificial
  oligonucleotide probe
tcgttgcgcacggcttcagcgcaaacggcgaaacgggaccgtgcagcc

SEQ ID NO: 1478 - DNA, 48 bp, Artificial
  oligonucleotide probe
tcgttgcgcacggcttacgggaccgtgcagccagcccagccgaaacgg

SEQ ID NO: 1479 - DNA, 48 bp, Artificial
  oligonucleotide probe
cagcgtgctgcgccatacggcgtttccccgaaagcccagccgaaacgg

SEQ ID NO: 1480 - DNA, 48 bp, Artificial
  oligonucleotide probe
tgcggcaaatcgcgttcacggtgcgcaaagccagccgctttcccgtgc

SEQ ID NO: 1481 - DNA, 48 bp, Artificial
  oligonucleotide probe
cagcgcaaacggcgaaacggcgtttccccgaaagcccagccgaaacgg

SEQ ID NO: 1482 - DNA, 48 bp, Artificial
  oligonucleotide probe
cacgcagctgcggtgccagcgtgctgcgccatagcccagccgaaacgg

SEQ ID NO: 1483 - DNA, 48 bp, Artificial
  oligonucleotide probe
cgtttgcgcgaatccctgcgcttgcagccgttacgggaccgtgcagcc

SEQ ID NO: 1484 - DNA, 48 bp, Artificial
  oligonucleotide probe
cacgcagctgcggtgccacggtgcgcaaagccagcccagccgaaacgg

SEQ ID NO: 1485 - DNA, 48 bp, Artificial
  oligonucleotide probe
tcgttgcgcacggctttcccggacgcttgcaaacgggaccgtgcagcc

SEQ ID NO: 1486 - DNA, 48 bp, Artificial
  oligonucleotide probe
tccccacgccatgcaaacgggaccgtgcagccagccgctttcccgtgc

SEQ ID NO: 1487 - DNA, 48 bp, Artificial
  oligonucleotide probe
tcgttgcgcacggctttcccggacgcttgcaaagcccagccgaaacgg

SEQ ID NO: 1488 - DNA, 48 bp, Artificial
  oligonucleotide probe
cgtttgcgcgaatccctcccggacgcttgcaaagccgctttcccgtgc

SEQ ID NO: 1489 - DNA, 48 bp, Artificial
  oligonucleotide probe
tcccggacgcttgcaacacggtgcgcaaagccagccgctttcccgtgc

SEQ ID NO: 1490 - DNA, 48 bp, Artificial
  oligonucleotide probe
tccccacgccatgcaatcccggacgcttgcaaagccgctttcccgtgc

SEQ ID NO: 1491 - DNA, 48 bp, Artificial
  oligonucleotide probe
cacggtgcgcaaagcccagcgcaaacggcgaaagcccagccgaaacgg

SEQ ID NO: 1492 - DNA, 48 bp, Artificial
  oligonucleotide probe
tcgttgcgcacggcttacggcgtttccccgaaagcccagccgaaacgg

SEQ ID NO: 1493 - DNA, 48 bp, Artificial
  oligonucleotide probe
tgcgcttgcagccgttacgggaccgtgcagccagccgctttcccgtgc

SEQ ID NO: 1494 - DNA, 48 bp, Artificial
  oligonucleotide probe
tcgttgcgcacggctttccccacgccatgcaaacggcgtttccccgaa

SEQ ID NO: 1495 - DNA, 48 bp, Artificial
  oligonucleotide probe
gtgcgctttgcgacggacgggaccgtgcagccagcccagccgaaacgg

SEQ ID NO: 1496 - DNA, 48 bp, Artificial
  oligonucleotide probe
cgaaagccgcaatgcgtccccacgccatgcaaagccgctttcccgtgc

SEQ ID NO: 1497 - DNA, 48 bp, Artificial
  oligonucleotide probe
tgcggcaaatcgcgttacgggaccgtgcagccagcccagccgaaacgg

SEQ ID NO: 1498 - DNA, 48 bp, Artificial
  oligonucleotide probe
cacggtgcgcaaagccacggcgtttccccgaaagcccagccgaaacgg

SEQ ID NO: 1499 - DNA, 48 bp, Artificial
  oligonucleotide probe
tgcggcaaatcgcgttcagcgtgctgcgccatagcccagccgaaacgg

SEQ ID NO: 1500 - DNA, 48 bp, Artificial
  oligonucleotide probe
tcgttgcgcacggcttcgaaagccgcaatgcgagccgctttcccgtgc

SEQ ID NO: 1501 - DNA, 48 bp, Artificial
  oligonucleotide probe
acgggaccgtgcagccagccgctttcccgtgcagcccagccgaaacgg

SEQ ID NO: 1502 - DNA, 48 bp, Artificial
  oligonucleotide probe
tcgttgcgcacggcttcgaaagccgcaatgcgacggcgtttccccgaa

SEQ ID NO: 1503 - DNA, 48 bp, Artificial
  oligonucleotide probe
cgtttgcgcgaatccccacggtgcgcaaagccagccgctttcccgtgc

SEQ ID NO: 1504 - DNA, 48 bp, Artificial
  oligonucleotide probe
cgaaagccgcaatgcgcagcgcaaacggcgaaagcccagccgaaacgg

SEQ ID NO: 1505 - DNA, 48 bp, Artificial
  oligonucleotide probe
cagcgcaaacggcgaacagcgtgctgcgccatacggcgtttccccgaa

SEQ ID NO: 1506 - DNA, 48 bp, Artificial
  oligonucleotide probe
tcgttgcgcacggcttcagcgtgctgcgccatagccgctttcccgtgc

SEQ ID NO: 1507 - DNA, 48 bp, Artificial
  oligonucleotide probe
tcccggacgcttgcaagtgcgctttgcgacggacggcgtttccccgaa

SEQ ID NO: 1508 - DNA, 48 bp, Artificial
  oligonucleotide probe
cgtttgcgcgaatccctcccggacgcttgcaaacgggaccgtgcagcc

SEQ ID NO: 1509 - DNA, 48 bp, Artificial
  oligonucleotide probe
cgaaagccgcaatgcgtcccggacgcttgcaaagccgctttcccgtgc

SEQ ID NO: 1510 - DNA, 48 bp, Artificial
  oligonucleotide probe
tcccggacgcttgcaacagcgtgctgcgccatacgggaccgtgcagcc

SEQ ID NO: 1511 - DNA, 48 bp, Artificial
  oligonucleotide probe
cgaaagccgcaatgcgcagcgtgctgcgccatagcccagccgaaacgg

SEQ ID NO: 1512 - DNA, 48 bp, Artificial
  oligonucleotide probe
tcccggacgcttgcaacagcgtgctgcgccatacggcgtttccccgaa

SEQ ID NO: 1513 - DNA, 48 bp, Artificial
  oligonucleotide probe
tcccggacgcttgcaagtgcgctttgcgacggacgggaccgtgcagcc

SEQ ID NO: 1514 - DNA, 48 bp, Artificial
  oligonucleotide probe
cgaaagccgcaatgcgtcccggacgcttgcaaagcccagccgaaacgg

SEQ ID NO: 1515 - DNA, 48 bp, Artificial
  oligonucleotide probe
cagcgcaaacggcgaagtgcgctttgcgacggagccgctttcccgtgc

SEQ ID NO: 1516 - DNA, 48 bp, Artificial
  oligonucleotide probe
tgcgcttgcagccgttgtgcgctttgcgacggacgggaccgtgcagcc

SEQ ID NO: 1517 - DNA, 48 bp, Artificial
  oligonucleotide probe
tcccggacgcttgcaatgcgcttgcagccgttacgggaccgtgcagcc

SEQ ID NO: 1518 - DNA, 48 bp, Artificial
  oligonucleotide probe
tgcgcttgcagccgttcagcgcaaacggcgaaagccgctttcccgtgc

SEQ ID NO: 1519 - DNA, 48 bp, Artificial
  oligonucleotide probe
tccccacgccatgcaatcccggacgcttgcaaagcccagccgaaacgg

SEQ ID NO: 1520 - DNA, 48 bp, Artificial
  oligonucleotide probe
cgtttgcgcgaatccccagcgtgctgcgccatagccgctttcccgtgc

SEQ ID NO: 1521 - DNA, 48 bp, Artificial
  oligonucleotide probe
tccccacgccatgcaacagcgtgctgcgccatagcccagccgaaacgg

SEQ ID NO: 1522 - DNA, 48 bp, Artificial
  oligonucleotide probe
cacgcagctgcggtgccagcgcaaacggcgaaacgggaccgtgcagcc

SEQ ID NO: 1523 - DNA, 48 bp, Artificial
  oligonucleotide probe
tccccacgccatgcaacagcgtgctgcgccatacggcgtttccccgaa

SEQ ID NO: 1524 - DNA, 48 bp, Artificial
  oligonucleotide probe
tgcgcttgcagccgttacggcgtttccccgaaagccgctttcccgtgc

SEQ ID NO: 1525 - DNA, 48 bp, Artificial
  oligonucleotide probe
agcccagccgaaacggagcccagccgaaacggacgggaccgtgcagcc

SEQ ID NO: 1526 - DNA, 48 bp, Artificial
  oligonucleotide probe
agcccagccgaaacggagcccagccgaaacggtgcgcttgcagccgtt

SEQ ID NO: 1527 - DNA, 48 bp, Artificial
  oligonucleotide probe
agcccagccgaaacggagcccagccgaaacggcgtttgcgcgaatccc

SEQ ID NO: 1528 - DNA, 48 bp, Artificial
  oligonucleotide probe
acggcgtttccccgaaacggcgtttccccgaaagccgctttcccgtgc

SEQ ID NO: 1529 - DNA, 48 bp, Artificial
  oligonucleotide probe
cgaaagccgcaatgcgcgaaagccgcaatgcgacggcgtttccccgaa

SEQ ID NO: 1530 - DNA, 48 bp, Artificial
  oligonucleotide probe
tcccggacgcttgcaatcccggacgcttgcaaagccgctttcccgtgc

SEQ ID NO: 1531 - DNA, 48 bp, Artificial
  oligonucleotide probe
agcccagccgaaacggagcccagccgaaacggcgaaagccgcaatgcg

SEQ ID NO: 1532 - DNA, 48 bp, Artificial
  oligonucleotide probe
acgggaccgtgcagccacgggaccgtgcagcccagcgtgctgcgccat

SEQ ID NO: 1533 - DNA, 48 bp, Artificial
  oligonucleotide probe
tcgttgcgcacggctttcgttgcgcacggcttacgggaccgtgcagcc

SEQ ID NO: 1534 - DNA, 48 bp, Artificial
  oligonucleotide probe
agcccagccgaaacggagcccagccgaaacggtccccacgccatgcaa

SEQ ID NO: 1535 - DNA, 48 bp, Artificial
  oligonucleotide probe
acggcgtttccccgaaacggcgtttccccgaatcgttgcgcacggctt

SEQ ID NO: 1536 - DNA, 48 bp, Artificial
  oligonucleotide probe
tcccggacgcttgcaatcccggacgcttgcaaacgggaccgtgcagcc

SEQ ID NO: 1537 - DNA, 48 bp, Artificial
  oligonucleotide probe
agcccagccgaaacggagcccagccgaaacggcacgcagctgcggtgc

SEQ ID NO: 1538 - DNA, 48 bp, Artificial
  oligonucleotide probe
acgggaccgtgcagccacgggaccgtgcagccagccgctttcccgtgc

SEQ ID NO: 1539 - DNA, 48 bp, Artificial
  oligonucleotide probe
gtgcgctttgcgacgggtgcgctttgcgacggagccgctttcccgtgc

SEQ ID NO: 1540 - DNA, 48 bp, Artificial
  oligonucleotide probe
acggcgtttccccgaaacggcgtttccccgaatcccggacgcttgcaa

SEQ ID NO: 1541 - DNA, 48 bp, Artificial
  oligonucleotide probe
cacggtgcgcaaagcccacggtgcgcaaagccacggcgtttccccgaa

SEQ ID NO: 1542 - DNA, 48 bp, Artificial
  oligonucleotide probe
agccgctttcccgtgcagccgctttcccgtgcgtgcgctttgcgacgg

SEQ ID NO: 1543 - DNA, 48 bp, Artificial
  oligonucleotide probe
tgcggcaaatcgcgtttgcggcaaatcgcgttagccgctttcccgtgc

SEQ ID NO: 1544 - DNA, 48 bp, Artificial
  oligonucleotide probe
agcccagccgaaacggagcccagccgaaacgggtgcgctttgcgacgg

SEQ ID NO: 1545 - DNA, 48 bp, Artificial
  oligonucleotide probe
acggcgtttccccgaaacggcgtttccccgaacagcgcaaacggcgaa

SEQ ID NO: 1546 - DNA, 48 bp, Artificial
  oligonucleotide probe
cagcgcaaacggcgaacagcgcaaacggcgaaacgggaccgtgcagcc

SEQ ID NO: 1547 - DNA, 48 bp, Artificial
  oligonucleotide probe
cagcgtgctgcgccatcagcgtgctgcgccatacgggaccgtgcagcc

SEQ ID NO: 1548 - DNA, 48 bp, Artificial
  oligonucleotide probe
cacgcagctgcggtgccacgcagctgcggtgcagcccagccgaaacgg

SEQ ID NO: 1549 - DNA, 48 bp, Artificial
  oligonucleotide probe
acgggaccgtgcagccacgggaccgtgcagcctccccacgccatgcaa

SEQ ID NO: 1550 - DNA, 48 bp, Artificial
  oligonucleotide probe
tccccacgccatgcaatccccacgccatgcaaagcccagccgaaacgg

SEQ ID NO: 1551 - DNA, 48 bp, Artificial
  oligonucleotide probe
agccgctttcccgtgcagccgctttcccgtgccacgcagctgcggtgc

SEQ ID NO: 1552 - DNA, 48 bp, Artificial
  oligonucleotide probe
agccgctttcccgtgcagccgctttcccgtgctccccacgccatgcaa

SEQ ID NO: 1553 - DNA, 48 bp, Artificial
  oligonucleotide probe
cgtttgcgcgaatccccgtttgcgcgaatcccagcccagccgaaacgg

SEQ ID NO: 1554 - DNA, 48 bp, Artificial
  oligonucleotide probe
tgcgcttgcagccgtttgcgcttgcagccgttagccgctttcccgtgc

SEQ ID NO: 1555 - DNA, 48 bp, Artificial
  oligonucleotide probe
cacggtgcgcaaagcccacggtgcgcaaagccagcccagccgaaacgg

SEQ ID NO: 1556 - DNA, 48 bp, Artificial
  oligonucleotide probe
tcgttgcgcacggctttcgttgcgcacggcttagccgctttcccgtgc

SEQ ID NO: 1557 - DNA, 48 bp, Artificial
  oligonucleotide probe
cgtttgcgcgaatccccgtttgcgcgaatcccacgggaccgtgcagcc

SEQ ID NO: 1558 - DNA, 48 bp, Artificial
  oligonucleotide probe
acggcgtttccccgaaacggcgtttccccgaacgaaagccgcaatgcg

SEQ ID NO: 1559 - DNA, 48 bp, Artificial
  oligonucleotide probe
cagcgcaaacggcgaacagcgcaaacggcgaaagccgctttcccgtgc

SEQ ID NO: 1560 - DNA, 48 bp, Artificial
  oligonucleotide probe
agccgctttcccgtgcagccgctttcccgtgctgcggcaaatcgcgtt

SEQ ID NO: 1561 - DNA, 48 bp, Artificial
  oligonucleotide probe
gtgcgctttgcgacgggtgcgctttgcgacggacggcgtttccccgaa

SEQ ID NO: 1562 - DNA, 48 bp, Artificial
  oligonucleotide probe
agccgctttcccgtgcagccgctttcccgtgccgaaagccgcaatgcg

SEQ ID NO: 1563 - DNA, 48 bp, Artificial
  oligonucleotide probe
agcccagccgaaacggagcccagccgaaacggcagcgcaaacggcgaa

SEQ ID NO: 1564 - DNA, 48 bp, Artificial
  oligonucleotide probe
agccgctttcccgtgcagccgctttcccgtgccacggtgcgcaaagcc

SEQ ID NO: 1565 - DNA, 48 bp, Artificial
  oligonucleotide probe
cagcgtgctgcgccatcagcgtgctgcgccatacggcgtttccccgaa

SEQ ID NO: 1566 - DNA, 48 bp, Artificial
  oligonucleotide probe
agcccagccgaaacggagcccagccgaaacggcacggtgcgcaaagcc

SEQ ID NO: 1567 - DNA, 48 bp, Artificial
  oligonucleotide probe
acggcgtttccccgaaacggcgtttccccgaacgtttgcgcgaatccc

SEQ ID NO: 1568 - DNA, 48 bp, Artificial
  oligonucleotide probe
tcccggacgcttgcaatcccggacgcttgcaaacggcgtttccccgaa

SEQ ID NO: 1569 - DNA, 48 bp, Artificial
  oligonucleotide probe
acggcgtttccccgaaacggcgtttccccgaacagcgtgctgcgccat

SEQ ID NO: 1570 - DNA, 48 bp, Artificial
  oligonucleotide probe
cagcgtgctgcgccatcagcgtgctgcgccatagcccagccgaaacgg

SEQ ID NO: 1571 - DNA, 48 bp, Artificial
  oligonucleotide probe
acgggaccgtgcagccacgggaccgtgcagcctgcgcttgcagccgtt

SEQ ID NO: 1572 - DNA, 48 bp, Artificial
  oligonucleotide probe
acgggaccgtgcagccacgggaccgtgcagcccacgcagctgcggtgc

SEQ ID NO: 1573 - DNA, 48 bp, Artificial
  oligonucleotide probe
agcccagccgaaacggagcccagccgaaacggcagcgtgctgcgccat

SEQ ID NO: 1574 - DNA, 48 bp, Artificial
  oligonucleotide probe
cacggtgcgcaaagcccacggtgcgcaaagccagccgctttcccgtgc

SEQ ID NO: 1575 - DNA, 48 bp, Artificial
  oligonucleotide probe
tcgttgcgcacggctttcgttgcgcacggcttagcccagccgaaacgg

SEQ ID NO: 1576 - DNA, 48 bp, Artificial
  oligonucleotide probe
acgggaccgtgcagccacgggaccgtgcagcctgcggcaaatcgcgtt

SEQ ID NO: 1577 - DNA, 48 bp, Artificial
  oligonucleotide probe
cacgcagctgcggtgccacgcagctgcggtgcagccgctttcccgtgc

SEQ ID NO: 1578 - DNA, 48 bp, Artificial
  oligonucleotide probe
acgggaccgtgcagccacgggaccgtgcagcccgtttgcgcgaatccc

SEQ ID NO: 1579 - DNA, 48 bp, Artificial
  oligonucleotide probe
acgggaccgtgcagccacgggaccgtgcagcccagcgcaaacggcgaa

SEQ ID NO: 1580 - DNA, 48 bp, Artificial
  oligonucleotide probe
agccgctttcccgtgcagccgctttcccgtgccgtttgcgcgaatccc

SEQ ID NO: 1581 - DNA, 48 bp, Artificial
  oligonucleotide probe
acgggaccgtgcagccacgggaccgtgcagccgtgcgctttgcgacgg

SEQ ID NO: 1582 - DNA, 48 bp, Artificial
  oligonucleotide probe
cacgcagctgcggtgccacgcagctgcggtgcacggcgtttccccgaa

SEQ ID NO: 1583 - DNA, 48 bp, Artificial
  oligonucleotide probe
acggcgtttccccgaaacggcgtttccccgaagtgcgctttgcgacgg

SEQ ID NO: 1584 - DNA, 48 bp, Artificial
  oligonucleotide probe
cgaaagccgcaatgcgcgaaagccgcaatgcgacgggaccgtgcagcc

SEQ ID NO: 1585 - DNA, 48 bp, Artificial
  oligonucleotide probe
tcccggacgcttgcaatcccggacgcttgcaaagcccagccgaaacgg

SEQ ID NO: 1586 - DNA, 48 bp, Artificial
  oligonucleotide probe
cgaaagccgcaatgcgcgaaagccgcaatgcgagccgctttcccgtgc

SEQ ID NO: 1587 - DNA, 48 bp, Artificial
  oligonucleotide probe
cgaaagccgcaatgcgcgaaagccgcaatgcgagcccagccgaaacgg

SEQ ID NO: 1588 - DNA, 48 bp, Artificial
  oligonucleotide probe
cacgcagctgcggtgccacgcagctgcggtgcacgggaccgtgcagcc

SEQ ID NO: 1589 - DNA, 48 bp, Artificial
  oligonucleotide probe
tgcgcttgcagccgtttgcgcttgcagccgttacggcgtttccccgaa

SEQ ID NO: 1590 - DNA, 48 bp, Artificial
  oligonucleotide probe
acgggaccgtgcagccacgggaccgtgcagccacggcgtttccccgaa

SEQ ID NO: 1591 - DNA, 48 bp, Artificial
  oligonucleotide probe
cagcgtgctgcgccatcagcgtgctgcgccatagccgctttcccgtgc

SEQ ID NO: 1592 - DNA, 48 bp, Artificial
  oligonucleotide probe
agcccagccgaaacggagcccagccgaaacggagccgctttcccgtgc

SEQ ID NO: 1593 - DNA, 48 bp, Artificial
  oligonucleotide probe
agccgctttcccgtgcagccgctttcccgtgccagcgtgctgcgccat

SEQ ID NO: 1594 - DNA, 48 bp, Artificial
  oligonucleotide probe
tcgttgcgcacggctttcgttgcgcacggcttacggcgtttccccgaa

SEQ ID NO: 1595 - DNA, 48 bp, Artificial
  oligonucleotide probe
cgtttgcgcgaatccccgtttgcgcgaatcccacggcgtttccccgaa

SEQ ID NO: 1596 - DNA, 48 bp, Artificial
  oligonucleotide probe
agccgctttcccgtgcagccgctttcccgtgcacgggaccgtgcagcc

SEQ ID NO: 1597 - DNA, 48 bp, Artificial
  oligonucleotide probe
acgggaccgtgcagccacgggaccgtgcagccagcccagccgaaacgg

SEQ ID NO: 1598 - DNA, 48 bp, Artificial
  oligonucleotide probe
acggcgtttccccgaaacggcgtttccccgaaagcccagccgaaacgg

SEQ ID NO: 1599 - DNA, 48 bp, Artificial
  oligonucleotide probe
agccgctttcccgtgcagccgctttcccgtgctcgttgcgcacggctt

SEQ ID NO: 1600 - DNA, 48 bp, Artificial
  oligonucleotide probe
acggcgtttccccgaaacggcgtttccccgaatccccacgccatgcaa

SEQ ID NO: 1601 - DNA, 48 bp, Artificial
  oligonucleotide probe
acggcgtttccccgaaacggcgtttccccgaatgcgcttgcagccgtt

SEQ ID NO: 1602 - DNA, 48 bp, Artificial
  oligonucleotide probe
agccgctttcccgtgcagccgctttcccgtgccagcgcaaacggcgaa

SEQ ID NO: 1603 - DNA, 48 bp, Artificial
  oligonucleotide probe
acgggaccgtgcagccacgggaccgtgcagcctcgttgcgcacggctt

SEQ ID NO: 1604 - DNA, 48 bp, Artificial
  oligonucleotide probe
cacggtgcgcaaagcccacggtgcgcaaagccacgggaccgtgcagcc

SEQ ID NO: 1605 - DNA, 48 bp, Artificial
  oligonucleotide probe
agccgctttcccgtgcagccgctttcccgtgcagcccagccgaaacgg

SEQ ID NO: 1606 - DNA, 48 bp, Artificial
  oligonucleotide probe
acggcgtttccccgaaacggcgtttccccgaaacgggaccgtgcagcc

SEQ ID NO: 1607 - DNA, 48 bp, Artificial
  oligonucleotide probe
tgcggcaaatcgcgtttgcggcaaatcgcgttacgggaccgtgcagcc

SEQ ID NO: 1608 - DNA, 48 bp, Artificial
  oligonucleotide probe
tccccacgccatgcaatccccacgccatgcaaagccgctttcccgtgc

SEQ ID NO: 1609 - DNA, 48 bp, Artificial
  oligonucleotide probe
agccgctttcccgtgcagccgctttcccgtgcacggcgtttccccgaa

SEQ ID NO: 1610 - DNA, 48 bp, Artificial
  oligonucleotide probe
tgcggcaaatcgcgtttgcggcaaatcgcgttacggcgtttccccgaa

SEQ ID NO: 1611 - DNA, 48 bp, Artificial
  oligonucleotide probe
gtgcgctttgcgacgggtgcgctttgcgacggagcccagccgaaacgg

SEQ ID NO: 1612 - DNA, 48 bp, Artificial
  oligonucleotide probe
acgggaccgtgcagccacgggaccgtgcagcccacggtgcgcaaagcc

SEQ ID NO: 1613 - DNA, 48 bp, Artificial
  oligonucleotide probe
agccgctttcccgtgcagccgctttcccgtgctcccggacgcttgcaa

SEQ ID NO: 1614 - DNA, 48 bp, Artificial
  oligonucleotide probe
tccccacgccatgcaatccccacgccatgcaaacgggaccgtgcagcc

SEQ ID NO: 1615 - DNA, 48 bp, Artificial
  oligonucleotide probe
tccccacgccatgcaatccccacgccatgcaaacggcgtttccccgaa

SEQ ID NO: 1616 - DNA, 48 bp, Artificial
  oligonucleotide probe
cagcgcaaacggcgaacagcgcaaacggcgaaacggcgtttccccgaa

SEQ ID NO: 1617 - DNA, 48 bp, Artificial
  oligonucleotide probe
cagcgcaaacggcgaacagcgcaaacggcgaaagcccagccgaaacgg

SEQ ID NO: 1618 - DNA, 48 bp, Artificial
  oligonucleotide probe
agcccagccgaaacggagcccagccgaaacggtgcggcaaatcgcgtt

SEQ ID NO: 1619 - DNA, 48 bp, Artificial
  oligonucleotide probe
agccgctttcccgtgcagccgctttcccgtgctgcgcttgcagccgtt

SEQ ID NO: 1620 - DNA, 48 bp, Artificial
  oligonucleotide probe
acggcgtttccccgaaacggcgtttccccgaatgcggcaaatcgcgtt

SEQ ID NO: 1621 - DNA, 48 bp, Artificial
  oligonucleotide probe
acgggaccgtgcagccacgggaccgtgcagcccgaaagccgcaatgcg

SEQ ID NO: 1622 - DNA, 48 bp, Artificial
  oligonucleotide probe
tgcggcaaatcgcgtttgcggcaaatcgcgttagcccagccgaaacgg

SEQ ID NO: 1623 - DNA, 48 bp, Artificial
  oligonucleotide probe
tgcgcttgcagccgtttgcgcttgcagccgttacgggaccgtgcagcc

SEQ ID NO: 1624 - DNA, 48 bp, Artificial
  oligonucleotide probe
acgggaccgtgcagccacgggaccgtgcagcctcccggacgcttgcaa

SEQ ID NO: 1625 - DNA, 48 bp, Artificial
  oligonucleotide probe
tgcgcttgcagccgtttgcgcttgcagccgttagcccagccgaaacgg

SEQ ID NO: 1626 - DNA, 48 bp, Artificial
  oligonucleotide probe
agcccagccgaaacggagcccagccgaaacggacggcgtttccccgaa

SEQ ID NO: 1627 - DNA, 48 bp, Artificial
  oligonucleotide probe
acggcgtttccccgaaacggcgtttccccgaacacgcagctgcggtgc

SEQ ID NO: 1628 - DNA, 48 bp, Artificial
  oligonucleotide probe
gtgcgctttgcgacgggtgcgctttgcgacggacgggaccgtgcagcc

SEQ ID NO: 1629 - DNA, 48 bp, Artificial
  oligonucleotide probe
cgtttgcgcgaatccccgtttgcgcgaatcccagccgctttcccgtgc

SEQ ID NO: 1630 - DNA, 48 bp, Artificial
  oligonucleotide probe
acggcgtttccccgaaacggcgtttccccgaacacggtgcgcaaagcc

SEQ ID NO: 1631 - DNA, 48 bp, Artificial
  oligonucleotide probe
agcccagccgaaacggagcccagccgaaacggtcgttgcgcacggctt

SEQ ID NO: 1632 - DNA, 48 bp, Artificial
  oligonucleotide probe
agcccagccgaaacggagcccagccgaaacggtcccggacgcttgcaa

SEQ ID NO: 1633 - DNA, 64 bp, Artificial
  oligonucleotide probe
ttgcaagcgtccgggaaacggctgcaagcgcaggctttgcgcaccgtgccgtttcggctgggct

SEQ ID NO: 1634 - DNA, 64 bp, Artificial
  oligonucleotide probe
aagccgtgcgcaacgacgcattgcggctttcgttgcaagcgtccgggaatggcgcagcacgctg

SEQ ID NO: 1635 - DNA, 64 bp, Artificial
  oligonucleotide probe
aagccgtgcgcaacgacgcattgcggctttcgaacggctgcaagcgcaatggcgcagcacgctg

SEQ ID NO: 1636 - DNA, 64 bp, Artificial
  oligonucleotide probe
ttgcaagcgtccgggaggctttgcgcaccgtgatggcgcagcacgctgccgtttcggctgggct

SEQ ID NO: 1637 - DNA, 64 bp, Artificial
  oligonucleotide probe
ttgcaagcgtccgggaggctttgcgcaccgtgttcggggaaacgccgtccgtttcggctgggct

SEQ ID NO: 1638 - DNA, 64 bp, Artificial
  oligonucleotide probe
cgcattgcggctttcgaacggctgcaagcgcaggctttgcgcaccgtgttcggggaaacgccgt

SEQ ID NO: 1639 - DNA, 64 bp, Artificial
  oligonucleotide probe
cgcattgcggctttcgaacggctgcaagcgcaatggcgcagcacgctgccgtttcggctgggct

SEQ ID NO: 1640 - DNA, 64 bp, Artificial
  oligonucleotide probe
aagccgtgcgcaacgacgcattgcggctttcgaacggctgcaagcgcaggctttgcgcaccgtg

SEQ ID NO: 1641 - DNA, 64 bp, Artificial
  oligonucleotide probe
aagccgtgcgcaacgaaacggctgcaagcgcaggctttgcgcaccgtgttcggggaaacgccgt

SEQ ID NO: 1642 - DNA, 64 bp, Artificial
  oligonucleotide probe
cgcattgcggctttcgggctttgcgcaccgtgttcggggaaacgccgtccgtttcggctgggct

SEQ ID NO: 1643 - DNA, 64 bp, Artificial
  oligonucleotide probe
aagccgtgcgcaacgacgcattgcggctttcgttgcaagcgtccgggaggctttgcgcaccgtg

SEQ ID NO: 1644 - DNA, 64 bp, Artificial
  oligonucleotide probe
aagccgtgcgcaacgacgcattgcggctttcgatggcgcagcacgctgttcggggaaacgccgt

SEQ ID NO: 1645 - DNA, 64 bp, Artificial
  oligonucleotide probe
aagccgtgcgcaacgattgcaagcgtccgggattcggggaaacgccgtccgtttcggctgggct

SEQ ID NO: 1646 - DNA, 64 bp, Artificial
  oligonucleotide probe
cgcattgcggctttcgttgcaagcgtccgggattcggggaaacgccgtccgtttcggctgggct

SEQ ID NO: 1647 - DNA, 64 bp, Artificial
  oligonucleotide probe
aagccgtgcgcaacgacgcattgcggctttcgttgcaagcgtccgggaccgtttcggctgggct

SEQ ID NO: 1648 - DNA, 64 bp, Artificial
  oligonucleotide probe
cgcattgcggctttcgttgcaagcgtccgggaggctttgcgcaccgtgttcggggaaacgccgt

SEQ ID NO: 1649 - DNA, 64 bp, Artificial
  oligonucleotide probe
ttgcaagcgtccgggaaacggctgcaagcgcaggctttgcgcaccgtgatggcgcagcacgctg

SEQ ID NO: 1650 - DNA, 64 bp, Artificial
  oligonucleotide probe
ttgcaagcgtccgggaaacggctgcaagcgcattcggggaaacgccgtccgtttcggctgggct

SEQ ID NO: 1651 - DNA, 64 bp, Artificial
  oligonucleotide probe
aagccgtgcgcaacgaaacggctgcaagcgcaatggcgcagcacgctgttcggggaaacgccgt

SEQ ID NO: 1652 - DNA, 64 bp, Artificial
  oligonucleotide probe
cgcattgcggctttcgaacggctgcaagcgcaggctttgcgcaccgtgatggcgcagcacgctg

SEQ ID NO: 1653 - DNA, 64 bp, Artificial
  oligonucleotide probe
aagccgtgcgcaacgacgcattgcggctttcgttgcaagcgtccgggaaacggctgcaagcgca

SEQ ID NO: 1654 - DNA, 64 bp, Artificial
  oligonucleotide probe
aagccgtgcgcaacgaaacggctgcaagcgcaatggcgcagcacgctgccgtttcggctgggct

SEQ ID NO: 1655 - DNA, 64 bp, Artificial
  oligonucleotide probe
ttgcaagcgtccgggaaacggctgcaagcgcaggctttgcgcaccgtgttcggggaaacgccgt

SEQ ID NO: 1656 - DNA, 64 bp, Artificial
  oligonucleotide probe
ttgcaagcgtccgggaaacggctgcaagcgcaatggcgcagcacgctgccgtttcggctgggct

SEQ ID NO: 1657 - DNA, 64 bp, Artificial
  oligonucleotide probe
cgcattgcggctttcgttgcaagcgtccgggaaacggctgcaagcgcaatggcgcagcacgctg

SEQ ID NO: 1658 - DNA, 64 bp, Artificial
  oligonucleotide probe
aagccgtgcgcaacgattgcaagcgtccgggaggctttgcgcaccgtgatggcgcagcacgctg

SEQ ID NO: 1659 - DNA, 64 bp, Artificial
  oligonucleotide probe
aagccgtgcgcaacgacgcattgcggctttcgggctttgcgcaccgtgttcggggaaacgccgt

SEQ ID NO: 1660 - DNA, 64 bp, Artificial
  oligonucleotide probe
aacggctgcaagcgcaggctttgcgcaccgtgttcggggaaacgccgtccgtttcggctgggct

SEQ ID NO: 1661 - DNA, 64 bp, Artificial
  oligonucleotide probe
aagccgtgcgcaacgaggctttgcgcaccgtgttcggggaaacgccgtccgtttcggctgggct

SEQ ID NO: 1662 - DNA, 64 bp, Artificial
  oligonucleotide probe
cgcattgcggctttcgttgcaagcgtccgggaatggcgcagcacgctgccgtttcggctgggct

SEQ ID NO: 1663 - DNA, 64 bp, Artificial
  oligonucleotide probe
aagccgtgcgcaacgattgcaagcgtccgggaaacggctgcaagcgcaatggcgcagcacgctg

SEQ ID NO: 1664 - DNA, 64 bp, Artificial
  oligonucleotide probe
ttgcaagcgtccgggaatggcgcagcacgctgttcggggaaacgccgtccgtttcggctgggct

SEQ ID NO: 1665 - DNA, 64 bp, Artificial
  oligonucleotide probe
aagccgtgcgcaacgaaacggctgcaagcgcattcggggaaacgccgtccgtttcggctgggct

SEQ ID NO: 1666 - DNA, 64 bp, Artificial
  oligonucleotide probe
aagccgtgcgcaacgattgcaagcgtccgggaggctttgcgcaccgtgttcggggaaacgccgt

SEQ ID NO: 1667 - DNA, 64 bp, Artificial
  oligonucleotide probe
aagccgtgcgcaacgattgcaagcgtccgggaatggcgcagcacgctgttcggggaaacgccgt

SEQ ID NO: 1668 - DNA, 64 bp, Artificial
  oligonucleotide probe
aagccgtgcgcaacgattgcaagcgtccgggaaacggctgcaagcgcattcggggaaacgccgt

SEQ ID NO: 1669 - DNA, 64 bp, Artificial
  oligonucleotide probe
aagccgtgcgcaacgacgcattgcggctttcgaacggctgcaagcgcaccgtttcggctgggct

SEQ ID NO: 1670 - DNA, 64 bp, Artificial
  oligonucleotide probe
aagccgtgcgcaacgacgcattgcggctttcgatggcgcagcacgctgccgtttcggctgggct

SEQ ID NO: 1671 - DNA, 64 bp, Artificial
  oligonucleotide probe
cgcattgcggctttcgttgcaagcgtccgggaaacggctgcaagcgcattcggggaaacgccgt

SEQ ID NO: 1672 - DNA, 64 bp, Artificial
  oligonucleotide probe
aagccgtgcgcaacgattgcaagcgtccgggaatggcgcagcacgctgccgtttcggctgggct

SEQ ID NO: 1673 - DNA, 64 bp, Artificial
  oligonucleotide probe
cgcattgcggctttcgttgcaagcgtccgggaaacggctgcaagcgcaccgtttcggctgggct

SEQ ID NO: 1674 - DNA, 64 bp, Artificial
  oligonucleotide probe
ggctttgcgcaccgtgatggcgcagcacgctgttcggggaaacgccgtccgtttcggctgggct

SEQ ID NO: 1675 - DNA, 64 bp, Artificial
  oligonucleotide probe
cgcattgcggctttcgaacggctgcaagcgcattcggggaaacgccgtccgtttcggctgggct

SEQ ID NO: 1676 - DNA, 64 bp, Artificial
  oligonucleotide probe
cgcattgcggctttcgaacggctgcaagcgcaggctttgcgcaccgtgccgtttcggctgggct

SEQ ID NO: 1677 - DNA, 64 bp, Artificial
  oligonucleotide probe
cgcattgcggctttcgttgcaagcgtccgggaggctttgcgcaccgtgatggcgcagcacgctg

SEQ ID NO: 1678 - DNA, 64 bp, Artificial
  oligonucleotide probe
aagccgtgcgcaacgaggctttgcgcaccgtgatggcgcagcacgctgttcggggaaacgccgt

SEQ ID NO: 1679 - DNA, 64 bp, Artificial
  oligonucleotide probe
aagccgtgcgcaacgacgcattgcggctttcgaacggctgcaagcgcattcggggaaacgccgt

SEQ ID NO: 1680 - DNA, 64 bp, Artificial
  oligonucleotide probe
aagccgtgcgcaacgaaacggctgcaagcgcaggctttgcgcaccgtgccgtttcggctgggct

SEQ ID NO: 1681 - DNA, 64 bp, Artificial
  oligonucleotide probe
cgcattgcggctttcgttgcaagcgtccgggaggctttgcgcaccgtgccgtttcggctgggct

SEQ ID NO: 1682 - DNA, 64 bp, Artificial
  oligonucleotide probe
ttgcaagcgtccgggaggctttgcgcaccgtgatggcgcagcacgctgttcggggaaacgccgt

SEQ ID NO: 1683 - DNA, 64 bp, Artificial
  oligonucleotide probe
aagccgtgcgcaacgacgcattgcggctttcgttcggggaaacgccgtccgtttcggctgggct

SEQ ID NO: 1684 - DNA, 64 bp, Artificial
  oligonucleotide probe
cgcattgcggctttcgatggcgcagcacgctgttcggggaaacgccgtccgtttcggctgggct

SEQ ID NO: 1685 - DNA, 64 bp, Artificial
  oligonucleotide probe
aacggctgcaagcgcaggctttgcgcaccgtgatggcgcagcacgctgttcggggaaacgccgt

SEQ ID NO: 1686 - DNA, 64 bp, Artificial
  oligonucleotide probe
ttgcaagcgtccgggaaacggctgcaagcgcaatggcgcagcacgctgttcggggaaacgccgt

SEQ ID NO: 1687 - DNA, 64 bp, Artificial
  oligonucleotide probe
aagccgtgcgcaacgacgcattgcggctttcgggctttgcgcaccgtgccgtttcggctgggct

SEQ ID NO: 1688 - DNA, 64 bp, Artificial
  oligonucleotide probe
aagccgtgcgcaacgacgcattgcggctttcgggctttgcgcaccgtgatggcgcagcacgctg

SEQ ID NO: 1689 - DNA, 64 bp, Artificial
  oligonucleotide probe
cgcattgcggctttcgttgcaagcgtccgggaaacggctgcaagcgcaggctttgcgcaccgtg

SEQ ID NO: 1690 - DNA, 64 bp, Artificial
  oligonucleotide probe
cgcattgcggctttcgggctttgcgcaccgtgatggcgcagcacgctgccgtttcggctgggct

SEQ ID NO: 1691 - DNA, 64 bp, Artificial
  oligonucleotide probe
aacggctgcaagcgcaggctttgcgcaccgtgatggcgcagcacgctgccgtttcggctgggct

SEQ ID NO: 1692 - DNA, 64 bp, Artificial
  oligonucleotide probe
aagccgtgcgcaacgattgcaagcgtccgggaggctttgcgcaccgtgccgtttcggctgggct

SEQ ID NO: 1693 - DNA, 64 bp, Artificial
  oligonucleotide probe
aagccgtgcgcaacgacgcattgcggctttcgttgcaagcgtccgggattcggggaaacgccgt

SEQ ID NO: 1694 - DNA, 64 bp, Artificial
  oligonucleotide probe
cgcattgcggctttcgggctttgcgcaccgtgatggcgcagcacgctgttcggggaaacgccgt

SEQ ID NO: 1695 - DNA, 64 bp, Artificial
  oligonucleotide probe
aagccgtgcgcaacgaggctttgcgcaccgtgatggcgcagcacgctgccgtttcggctgggct

SEQ ID NO: 1696 - DNA, 64 bp, Artificial
  oligonucleotide probe
cgcattgcggctttcgttgcaagcgtccgggaatggcgcagcacgctgttcggggaaacgccgt

SEQ ID NO: 1697 - DNA, 64 bp, Artificial
  oligonucleotide probe
aagccgtgcgcaacgattgcaagcgtccgggaaacggctgcaagcgcaggctttgcgcaccgtg

SEQ ID NO: 1698 - DNA, 64 bp, Artificial
  oligonucleotide probe
aagccgtgcgcaacgattgcaagcgtccgggaaacggctgcaagcgcaccgtttcggctgggct

SEQ ID NO: 1699 - DNA, 64 bp, Artificial
  oligonucleotide probe
cgcattgcggctttcgaacggctgcaagcgcaatggcgcagcacgctgttcggggaaacgccgt

SEQ ID NO: 1700 - DNA, 64 bp, Artificial
  oligonucleotide probe
aacggctgcaagcgcaatggcgcagcacgctgttcggggaaacgccgtccgtttcggctgggct

SEQ ID NO: 1701 - DNA, 64 bp, Artificial
  oligonucleotide probe
aagccgtgcgcaacgaatggcgcagcacgctgttcggggaaacgccgtccgtttcggctgggct

SEQ ID NO: 1702 - DNA, 64 bp, Artificial
  oligonucleotide probe
aagccgtgcgcaacgaaacggctgcaagcgcaggctttgcgcaccgtgatggcgcagcacgctg

SEQ ID NO: 1703 - DNA, 64 bp, Artificial
  oligonucleotide probe
cgcattgcggctttcgcgcattgcggctttcgttgcaagcgtccgggattcggggaaacgccgt

SEQ ID NO: 1704 - DNA, 64 bp, Artificial
  oligonucleotide probe
ttcggggaaacgccgtttcggggaaacgccgtaagccgtgcgcaacgacgcattgcggctttcg

SEQ ID NO: 1705 - DNA, 64 bp, Artificial
  oligonucleotide probe
cgcattgcggctttcgcgcattgcggctttcgggctttgcgcaccgtgatggcgcagcacgctg

SEQ ID NO: 1706 - DNA, 64 bp, Artificial
  oligonucleotide probe
ccgtttcggctgggctccgtttcggctgggctaagccgtgcgcaacgacgcattgcggctttcg

SEQ ID NO: 1707 - DNA, 64 bp, Artificial
  oligonucleotide probe
ggctttgcgcaccgtgggctttgcgcaccgtgttcggggaaacgccgtcgcattgcggctttcg

SEQ ID NO: 1708 - DNA, 64 bp, Artificial
  oligonucleotide probe
ttcggggaaacgccgtttcggggaaacgccgtcgcattgcggctttcgaacggctgcaagcgca

SEQ ID NO: 1709 - DNA, 64 bp, Artificial
  oligonucleotide probe
atggcgcagcacgctgatggcgcagcacgctgccgtttcggctgggctttgcaagcgtccggga

SEQ ID NO: 1710 - DNA, 64 bp, Artificial
  oligonucleotide probe
ggctttgcgcaccgtgggctttgcgcaccgtgccgtttcggctgggctcgcattgcggctttcg

SEQ ID NO: 1711 - DNA, 64 bp, Artificial
  oligonucleotide probe
atggcgcagcacgctgatggcgcagcacgctgttcggggaaacgccgtaacggctgcaagcgca

SEQ ID NO: 1712 - DNA, 64 bp, Artificial
  oligonucleotide probe
atggcgcagcacgctgatggcgcagcacgctgcgcattgcggctttcgggctttgcgcaccgtg

SEQ ID NO: 1713 - DNA, 64 bp, Artificial
  oligonucleotide probe
atggcgcagcacgctgatggcgcagcacgctgaacggctgcaagcgcaggctttgcgcaccgtg

SEQ ID NO: 1714 - DNA, 64 bp, Artificial
  oligonucleotide probe
atggcgcagcacgctgatggcgcagcacgctgcgcattgcggctttcgttgcaagcgtccggga

SEQ ID NO: 1715 - DNA, 64 bp, Artificial
  oligonucleotide probe
ccgtttcggctgggctccgtttcggctgggctaagccgtgcgcaacgaatggcgcagcacgctg

SEQ ID NO: 1716 - DNA, 64 bp, Artificial
  oligonucleotide probe
atggcgcagcacgctgatggcgcagcacgctgaagccgtgcgcaacgacgcattgcggctttcg

SEQ ID NO: 1717 - DNA, 64 bp, Artificial
  oligonucleotide probe
aacggctgcaagcgcaaacggctgcaagcgcattcggggaaacgccgtaagccgtgcgcaacga

SEQ ID NO: 1718 - DNA, 64 bp, Artificial
  oligonucleotide probe
atggcgcagcacgctgatggcgcagcacgctgccgtttcggctgggctcgcattgcggctttcg

SEQ ID NO: 1719 - DNA, 64 bp, Artificial
  oligonucleotide probe
aagccgtgcgcaacgaaagccgtgcgcaacgattgcaagcgtccgggaccgtttcggctgggct

SEQ ID NO: 1720 - DNA, 64 bp, Artificial
  oligonucleotide probe
ggctttgcgcaccgtgggctttgcgcaccgtgatggcgcagcacgctgcgcattgcggctttcg

SEQ ID NO: 1721 - DNA, 64 bp, Artificial
  oligonucleotide probe
ccgtttcggctgggctccgtttcggctgggctttgcaagcgtccgggaatggcgcagcacgctg

SEQ ID NO: 1722 - DNA, 64 bp, Artificial
  oligonucleotide probe
cgcattgcggctttcgcgcattgcggctttcgccgtttcggctgggctaagccgtgcgcaacga

SEQ ID NO: 1723 - DNA, 64 bp, Artificial
  oligonucleotide probe
cgcattgcggctttcgcgcattgcggctttcgttcggggaaacgccgtaagccgtgcgcaacga

SEQ ID NO: 1724 - DNA, 64 bp, Artificial
  oligonucleotide probe
aacggctgcaagcgcaaacggctgcaagcgcaatggcgcagcacgctgaagccgtgcgcaacga

SEQ ID NO: 1725 - DNA, 64 bp, Artificial
  oligonucleotide probe
ttcggggaaacgccgtttcggggaaacgccgtaagccgtgcgcaacgaaacggctgcaagcgca

SEQ ID NO: 1726 - DNA, 64 bp, Artificial
  oligonucleotide probe
ttcggggaaacgccgtttcggggaaacgccgtaagccgtgcgcaacgaggctttgcgcaccgtg

SEQ ID NO: 1727 - DNA, 64 bp, Artificial
  oligonucleotide probe
ggctttgcgcaccgtgggctttgcgcaccgtgatggcgcagcacgctgttgcaagcgtccggga

SEQ ID NO: 1728 - DNA, 64 bp, Artificial
  oligonucleotide probe
ttgcaagcgtccgggattgcaagcgtccgggattcggggaaacgccgtaagccgtgcgcaacga

SEQ ID NO: 1729 - DNA, 64 bp, Artificial
  oligonucleotide probe
ggctttgcgcaccgtgggctttgcgcaccgtgatggcgcagcacgctgccgtttcggctgggct

SEQ ID NO: 1730 - DNA, 64 bp, Artificial
  oligonucleotide probe
cgcattgcggctttcgcgcattgcggctttcgttgcaagcgtccgggaggctttgcgcaccgtg

SEQ ID NO: 1731 - DNA, 64 bp, Artificial
  oligonucleotide probe
aacggctgcaagcgcaaacggctgcaagcgcacgcattgcggctttcgttgcaagcgtccggga

SEQ ID NO: 1732 - DNA, 64 bp, Artificial
  oligonucleotide probe
ccgtttcggctgggctccgtttcggctgggctcgcattgcggctttcgatggcgcagcacgctg

SEQ ID NO: 1733 - DNA, 64 bp, Artificial
  oligonucleotide probe
ttcggggaaacgccgtttcggggaaacgccgtttgcaagcgtccgggaggctttgcgcaccgtg

SEQ ID NO: 1734 - DNA, 64 bp, Artificial
  oligonucleotide probe
aacggctgcaagcgcaaacggctgcaagcgcaccgtttcggctgggctttgcaagcgtccggga

SEQ ID NO: 1735 - DNA, 64 bp, Artificial
  oligonucleotide probe
cgcattgcggctttcgcgcattgcggctttcgggctttgcgcaccgtgttcggggaaacgccgt

SEQ ID NO: 1736 - DNA, 64 bp, Artificial
  oligonucleotide probe
atggcgcagcacgctgatggcgcagcacgctgccgtttcggctgggctaacggctgcaagcgca

SEQ ID NO: 1737 - DNA, 64 bp, Artificial
  oligonucleotide probe
ttcggggaaacgccgtttcggggaaacgccgtccgtttcggctgggctggctttgcgcaccgtg

SEQ ID NO: 1738 - DNA, 64 bp, Artificial
  oligonucleotide probe
ttcggggaaacgccgtttcggggaaacgccgtcgcattgcggctttcgggctttgcgcaccgtg

SEQ ID NO: 1739 - DNA, 64 bp, Artificial
  oligonucleotide probe
ttgcaagcgtccgggattgcaagcgtccgggattcggggaaacgccgtcgcattgcggctttcg

SEQ ID NO: 1740 - DNA, 64 bp, Artificial
  oligonucleotide probe
ttcggggaaacgccgtttcggggaaacgccgtccgtttcggctgggctatggcgcagcacgctg

SEQ ID NO: 1741 - DNA, 64 bp, Artificial
  oligonucleotide probe
ttgcaagcgtccgggattgcaagcgtccgggaggctttgcgcaccgtgcgcattgcggctttcg

SEQ ID NO: 1742 - DNA, 64 bp, Artificial
  oligonucleotide probe
ttgcaagcgtccgggattgcaagcgtccgggaaacggctgcaagcgcacgcattgcggctttcg

SEQ ID NO: 1743 - DNA, 64 bp, Artificial
  oligonucleotide probe
ttgcaagcgtccgggattgcaagcgtccgggaatggcgcagcacgctgcgcattgcggctttcg

SEQ ID NO: 1744 - DNA, 64 bp, Artificial
  oligonucleotide probe
aacggctgcaagcgcaaacggctgcaagcgcattcggggaaacgccgtccgtttcggctgggct

SEQ ID NO: 1745 - DNA, 64 bp, Artificial
  oligonucleotide probe
atggcgcagcacgctgatggcgcagcacgctgttcggggaaacgccgtttgcaagcgtccggga

SEQ ID NO: 1746 - DNA, 64 bp, Artificial
  oligonucleotide probe
ggctttgcgcaccgtgggctttgcgcaccgtgaagccgtgcgcaacgacgcattgcggctttcg

SEQ ID NO: 1747 - DNA, 64 bp, Artificial
  oligonucleotide probe
ggctttgcgcaccgtgggctttgcgcaccgtgttcggggaaacgccgtaagccgtgcgcaacga

SEQ ID NO: 1748 - DNA, 64 bp, Artificial
  oligonucleotide probe
ttgcaagcgtccgggattgcaagcgtccgggaggctttgcgcaccgtgaagccgtgcgcaacga

SEQ ID NO: 1749 - DNA, 64 bp, Artificial
  oligonucleotide probe
atggcgcagcacgctgatggcgcagcacgctgttcggggaaacgccgtaagccgtgcgcaacga

SEQ ID NO: 1750 - DNA, 64 bp, Artificial
  oligonucleotide probe
ccgtttcggctgggctccgtttcggctgggctaacggctgcaagcgcaatggcgcagcacgctg

SEQ ID NO: 1751 - DNA, 64 bp, Artificial
  oligonucleotide probe
ttgcaagcgtccgggattgcaagcgtccgggaaacggctgcaagcgcattcggggaaacgccgt

SEQ ID NO: 1752 - DNA, 64 bp, Artificial
  oligonucleotide probe
atggcgcagcacgctgatggcgcagcacgctgccgtttcggctgggctaagccgtgcgcaacga

SEQ ID NO: 1753 - DNA, 64 bp, Artificial
  oligonucleotide probe
aacggctgcaagcgcaaacggctgcaagcgcaggctttgcgcaccgtgcgcattgcggctttcg

SEQ ID NO: 1754 - DNA, 64 bp, Artificial
  oligonucleotide probe
ttcggggaaacgccgtttcggggaaacgccgtccgtttcggctgggctcgcattgcggctttcg

SEQ ID NO: 1755 - DNA, 64 bp, Artificial
  oligonucleotide probe
ttgcaagcgtccgggattgcaagcgtccgggaccgtttcggctgggctaagccgtgcgcaacga

SEQ ID NO: 1756 - DNA, 64 bp, Artificial
  oligonucleotide probe
ggctttgcgcaccgtgggctttgcgcaccgtgatggcgcagcacgctgttcggggaaacgccgt

SEQ ID NO: 1757 - DNA, 64 bp, Artificial
  oligonucleotide probe
aacggctgcaagcgcaaacggctgcaagcgcaaagccgtgcgcaacgacgcattgcggctttcg

SEQ ID NO: 1758 - DNA, 64 bp, Artificial
  oligonucleotide probe
aagccgtgcgcaacgaaagccgtgcgcaacgaaacggctgcaagcgcattcggggaaacgccgt

SEQ ID NO: 1759 - DNA, 64 bp, Artificial
  oligonucleotide probe
cgcattgcggctttcgcgcattgcggctttcgaacggctgcaagcgcattcggggaaacgccgt

SEQ ID NO: 1760 - DNA, 64 bp, Artificial
  oligonucleotide probe
cgcattgcggctttcgcgcattgcggctttcgttgcaagcgtccgggaccgtttcggctgggct

SEQ ID NO: 1761 - DNA, 64 bp, Artificial
  oligonucleotide probe
ccgtttcggctgggctccgtttcggctgggctaagccgtgcgcaacgaggctttgcgcaccgtg

SEQ ID NO: 1762 - DNA, 64 bp, Artificial
  oligonucleotide probe
ttgcaagcgtccgggattgcaagcgtccgggaaacggctgcaagcgcaatggcgcagcacgctg

SEQ ID NO: 1763 - DNA, 64 bp, Artificial
  oligonucleotide probe
ggctttgcgcaccgtgggctttgcgcaccgtgcgcattgcggctttcgttgcaagcgtccggga

SEQ ID NO: 1764 - DNA, 64 bp, Artificial
  oligonucleotide probe
ccgtttcggctgggctccgtttcggctgggctggctttgcgcaccgtgttcggggaaacgccgt

SEQ ID NO: 1765 - DNA, 64 bp, Artificial
  oligonucleotide probe
ttgcaagcgtccgggattgcaagcgtccgggaccgtttcggctgggctcgcattgcggctttcg

SEQ ID NO: 1766 - DNA, 64 bp, Artificial
  oligonucleotide probe
aacggctgcaagcgcaaacggctgcaagcgcaggctttgcgcaccgtgccgtttcggctgggct

SEQ ID NO: 1767 - DNA, 64 bp, Artificial
  oligonucleotide probe
cgcattgcggctttcgcgcattgcggctttcgatggcgcagcacgctgccgtttcggctgggct

SEQ ID NO: 1768 - DNA, 64 bp, Artificial
  oligonucleotide probe
ggctttgcgcaccgtgggctttgcgcaccgtgccgtttcggctgggctttgcaagcgtccggga

SEQ ID NO: 1769 - DNA, 64 bp, Artificial
  oligonucleotide probe
ttgcaagcgtccgggattgcaagcgtccgggaggctttgcgcaccgtgccgtttcggctgggct

SEQ ID NO: 1770 - DNA, 64 bp, Artificial
  oligonucleotide probe
ccgtttcggctgggctccgtttcggctgggctatggcgcagcacgctgttcggggaaacgccgt

SEQ ID NO: 1771 - DNA, 64 bp, Artificial
  oligonucleotide probe
atggcgcagcacgctgatggcgcagcacgctgaagccgtgcgcaacgaggctttgcgcaccgtg

SEQ ID NO: 1772 - DNA, 64 bp, Artificial
  oligonucleotide probe
ggctttgcgcaccgtgggctttgcgcaccgtgttcggggaaacgccgtttgcaagcgtccggga

SEQ ID NO: 1773 - DNA, 64 bp, Artificial
  oligonucleotide probe
aagccgtgcgcaacgaaagccgtgcgcaacgaggctttgcgcaccgtgccgtttcggctgggct

SEQ ID NO: 1774 - DNA, 64 bp, Artificial
  oligonucleotide probe
cgcattgcggctttcgcgcattgcggctttcgttgcaagcgtccgggaatggcgcagcacgctg

SEQ ID NO: 1775 - DNA, 64 bp, Artificial
  oligonucleotide probe
ggctttgcgcaccgtgggctttgcgcaccgtgatggcgcagcacgctgaacggctgcaagcgca

SEQ ID NO: 1776 - DNA, 64 bp, Artificial
  oligonucleotide probe
cgcattgcggctttcgcgcattgcggctttcgggctttgcgcaccgtgaagccgtgcgcaacga

SEQ ID NO: 1777 - DNA, 64 bp, Artificial
  oligonucleotide probe
ttgcaagcgtccgggattgcaagcgtccgggaatggcgcagcacgctgttcggggaaacgccgt

SEQ ID NO: 1778 - DNA, 64 bp, Artificial
  oligonucleotide probe
atggcgcagcacgctgatggcgcagcacgctgttcggggaaacgccgtccgtttcggctgggct

SEQ ID NO: 1779 - DNA, 64 bp, Artificial
  oligonucleotide probe
ttcggggaaacgccgtttcggggaaacgccgtggctttgcgcaccgtgatggcgcagcacgctg

SEQ ID NO: 1780 - DNA, 64 bp, Artificial
  oligonucleotide probe
aagccgtgcgcaacgaaagccgtgcgcaacgaaacggctgcaagcgcaatggcgcagcacgctg

SEQ ID NO: 1781 - DNA, 64 bp, Artificial
  oligonucleotide probe
ccgtttcggctgggctccgtttcggctgggctcgcattgcggctttcgttgcaagcgtccggga

SEQ ID NO: 1782 - DNA, 64 bp, Artificial
  oligonucleotide probe
aagccgtgcgcaacgaaagccgtgcgcaacgacgcattgcggctttcgttcggggaaacgccgt

SEQ ID NO: 1783 - DNA, 64 bp, Artificial
  oligonucleotide probe
aagccgtgcgcaacgaaagccgtgcgcaacgattgcaagcgtccgggattcggggaaacgccgt

SEQ ID NO: 1784 - DNA, 64 bp, Artificial
  oligonucleotide probe
aacggctgcaagcgcaaacggctgcaagcgcattcggggaaacgccgtttgcaagcgtccggga

SEQ ID NO: 1785 - DNA, 64 bp, Artificial
  oligonucleotide probe
atggcgcagcacgctgatggcgcagcacgctgttgcaagcgtccgggaaacggctgcaagcgca

SEQ ID NO: 1786 - DNA, 64 bp, Artificial
  oligonucleotide probe
ccgtttcggctgggctccgtttcggctgggctcgcattgcggctttcgaacggctgcaagcgca

SEQ ID NO: 1787 - DNA, 64 bp, Artificial
  oligonucleotide probe
ttgcaagcgtccgggattgcaagcgtccgggaaacggctgcaagcgcaccgtttcggctgggct

SEQ ID NO: 1788 - DNA, 64 bp, Artificial
  oligonucleotide probe
ccgtttcggctgggctccgtttcggctgggctaagccgtgcgcaacgattcggggaaacgccgt

SEQ ID NO: 1789 - DNA, 64 bp, Artificial
  oligonucleotide probe
aagccgtgcgcaacgaaagccgtgcgcaacgaggctttgcgcaccgtgatggcgcagcacgctg

SEQ ID NO: 1790 - DNA, 64 bp, Artificial
  oligonucleotide probe
ccgtttcggctgggctccgtttcggctgggctaacggctgcaagcgcaggctttgcgcaccgtg

SEQ ID NO: 1791 - DNA, 64 bp, Artificial
  oligonucleotide probe
ttgcaagcgtccgggattgcaagcgtccgggattcggggaaacgccgtccgtttcggctgggct

SEQ ID NO: 1792 - DNA, 64 bp, Artificial
  oligonucleotide probe
atggcgcagcacgctgatggcgcagcacgctgttcggggaaacgccgtcgcattgcggctttcg

SEQ ID NO: 1793 - DNA, 64 bp, Artificial
  oligonucleotide probe
ggctttgcgcaccgtgggctttgcgcaccgtgttgcaagcgtccgggaaacggctgcaagcgca

SEQ ID NO: 1794 - DNA, 64 bp, Artificial
  oligonucleotide probe
ttgcaagcgtccgggattgcaagcgtccgggaggctttgcgcaccgtgatggcgcagcacgctg

SEQ ID NO: 1795 - DNA, 64 bp, Artificial
  oligonucleotide probe
ttcggggaaacgccgtttcggggaaacgccgtaagccgtgcgcaacgaatggcgcagcacgctg

SEQ ID NO: 1796 - DNA, 64 bp, Artificial
  oligonucleotide probe
aagccgtgcgcaacgaaagccgtgcgcaacgattcggggaaacgccgtccgtttcggctgggct

SEQ ID NO: 1797 - DNA, 64 bp, Artificial
  oligonucleotide probe
ttcggggaaacgccgtttcggggaaacgccgtaacggctgcaagcgcaggctttgcgcaccgtg

SEQ ID NO: 1798 - DNA, 64 bp, Artificial
  oligonucleotide probe
aacggctgcaagcgcaaacggctgcaagcgcaggctttgcgcaccgtgttgcaagcgtccggga

SEQ ID NO: 1799 - DNA, 64 bp, Artificial
  oligonucleotide probe
ggctttgcgcaccgtgggctttgcgcaccgtgaagccgtgcgcaacgaaacggctgcaagcgca

SEQ ID NO: 1800 - DNA, 64 bp, Artificial
  oligonucleotide probe
ccgtttcggctgggctccgtttcggctgggctttgcaagcgtccgggattcggggaaacgccgt

SEQ ID NO: 1801 - DNA, 64 bp, Artificial
  oligonucleotide probe
aacggctgcaagcgcaaacggctgcaagcgcaggctttgcgcaccgtgatggcgcagcacgctg

SEQ ID NO: 1802 - DNA, 64 bp, Artificial
  oligonucleotide probe
aagccgtgcgcaacgaaagccgtgcgcaacgaaacggctgcaagcgcaggctttgcgcaccgtg

SEQ ID NO: 1803 - DNA, 64 bp, Artificial
  oligonucleotide probe
atggcgcagcacgctgatggcgcagcacgctgccgtttcggctgggctggctttgcgcaccgtg

SEQ ID NO: 1804 - DNA, 64 bp, Artificial
  oligonucleotide probe
cgcattgcggctttcgcgcattgcggctttcgaacggctgcaagcgcaggctttgcgcaccgtg

SEQ ID NO: 1805 - DNA, 64 bp, Artificial
  oligonucleotide probe
ttcggggaaacgccgtttcggggaaacgccgtccgtttcggctgggctaagccgtgcgcaacga

SEQ ID NO: 1806 - DNA, 64 bp, Artificial
  oligonucleotide probe
ggctttgcgcaccgtgggctttgcgcaccgtgatggcgcagcacgctgaagccgtgcgcaacga

SEQ ID NO: 1807 - DNA, 64 bp, Artificial
  oligonucleotide probe
ccgtttcggctgggctccgtttcggctgggctcgcattgcggctttcgggctttgcgcaccgtg

SEQ ID NO: 1808 - DNA, 64 bp, Artificial
  oligonucleotide probe
cgcattgcggctttcgcgcattgcggctttcgaacggctgcaagcgcaccgtttcggctgggct

SEQ ID NO: 1809 - DNA, 64 bp, Artificial
  oligonucleotide probe
atggcgcagcacgctgatggcgcagcacgctgaagccgtgcgcaacgaaacggctgcaagcgca

SEQ ID NO: 1810 - DNA, 64 bp, Artificial
  oligonucleotide probe
cgcattgcggctttcgcgcattgcggctttcgttcggggaaacgccgtccgtttcggctgggct

SEQ ID NO: 1811 - DNA, 64 bp, Artificial
  oligonucleotide probe
cgcattgcggctttcgcgcattgcggctttcgaacggctgcaagcgcaaagccgtgcgcaacga

SEQ ID NO: 1812 - DNA, 64 bp, Artificial
  oligonucleotide probe
ttgcaagcgtccgggattgcaagcgtccgggaatggcgcagcacgctgccgtttcggctgggct

SEQ ID NO: 1813 - DNA, 64 bp, Artificial
  oligonucleotide probe
cgcattgcggctttcgcgcattgcggctttcgatggcgcagcacgctgaagccgtgcgcaacga

SEQ ID NO: 1814 - DNA, 64 bp, Artificial
  oligonucleotide probe
aagccgtgcgcaacgaaagccgtgcgcaacgaatggcgcagcacgctgccgtttcggctgggct

SEQ ID NO: 1815 - DNA, 64 bp, Artificial
  oligonucleotide probe
ccgtttcggctgggctccgtttcggctgggctcgcattgcggctttcgttcggggaaacgccgt

SEQ ID NO: 1816 - DNA, 64 bp, Artificial
  oligonucleotide probe
ggctttgcgcaccgtgggctttgcgcaccgtgaagccgtgcgcaacgattgcaagcgtccggga

SEQ ID NO: 1817 - DNA, 64 bp, Artificial
  oligonucleotide probe
atggcgcagcacgctgatggcgcagcacgctgaagccgtgcgcaacgattgcaagcgtccggga

SEQ ID NO: 1818 - DNA, 64 bp, Artificial
  oligonucleotide probe
aacggctgcaagcgcaaacggctgcaagcgcaccgtttcggctgggctaagccgtgcgcaacga

SEQ ID NO: 1819 - DNA, 64 bp, Artificial
  oligonucleotide probe
aagccgtgcgcaacgaaagccgtgcgcaacgattgcaagcgtccgggaatggcgcagcacgctg

SEQ ID NO: 1820 - DNA, 64 bp, Artificial
  oligonucleotide probe
aacggctgcaagcgcaaacggctgcaagcgcaccgtttcggctgggctcgcattgcggctttcg

SEQ ID NO: 1821 - DNA, 64 bp, Artificial
  oligonucleotide probe
ttcggggaaacgccgtttcggggaaacgccgtaacggctgcaagcgcaatggcgcagcacgctg

SEQ ID NO: 1822 - DNA, 64 bp, Artificial
  oligonucleotide probe
atggcgcagcacgctgatggcgcagcacgctgttgcaagcgtccgggaggctttgcgcaccgtg

SEQ ID NO: 1823 - DNA, 64 bp, Artificial
  oligonucleotide probe
aagccgtgcgcaacgaaagccgtgcgcaacgacgcattgcggctttcgttgcaagcgtccggga

SEQ ID NO: 1824 - DNA, 64 bp, Artificial
  oligonucleotide probe
aagccgtgcgcaacgaaagccgtgcgcaacgacgcattgcggctttcgaacggctgcaagcgca

SEQ ID NO: 1825 - DNA, 64 bp, Artificial
  oligonucleotide probe
aagccgtgcgcaacgaaagccgtgcgcaacgattgcaagcgtccgggaaacggctgcaagcgca

SEQ ID NO: 1826 - DNA, 64 bp, Artificial
  oligonucleotide probe
ttgcaagcgtccgggattgcaagcgtccgggaatggcgcagcacgctgaagccgtgcgcaacga

SEQ ID NO: 1827 - DNA, 64 bp, Artificial
  oligonucleotide probe
aacggctgcaagcgcaaacggctgcaagcgcaggctttgcgcaccgtgaagccgtgcgcaacga

SEQ ID NO: 1828 - DNA, 64 bp, Artificial
  oligonucleotide probe
ttgcaagcgtccgggattgcaagcgtccgggaaagccgtgcgcaacgacgcattgcggctttcg

SEQ ID NO: 1829 - DNA, 64 bp, Artificial
  oligonucleotide probe
ggctttgcgcaccgtgggctttgcgcaccgtgccgtttcggctgggctaagccgtgcgcaacga

SEQ ID NO: 1830 - DNA, 64 bp, Artificial
  oligonucleotide probe
aagccgtgcgcaacgaaagccgtgcgcaacgaatggcgcagcacgctgttcggggaaacgccgt

SEQ ID NO: 1831 - DNA, 64 bp, Artificial
  oligonucleotide probe
ttcggggaaacgccgtttcggggaaacgccgtccgtttcggctgggctttgcaagcgtccggga

SEQ ID NO: 1832 - DNA, 64 bp, Artificial
  oligonucleotide probe
aacggctgcaagcgcaaacggctgcaagcgcaatggcgcagcacgctgttgcaagcgtccggga

SEQ ID NO: 1833 - DNA, 64 bp, Artificial
  oligonucleotide probe
aagccgtgcgcaacgaaagccgtgcgcaacgacgcattgcggctttcgatggcgcagcacgctg

SEQ ID NO: 1834 - DNA, 64 bp, Artificial
  oligonucleotide probe
ccgtttcggctgggctccgtttcggctgggctggctttgcgcaccgtgatggcgcagcacgctg

SEQ ID NO: 1835 - DNA, 64 bp, Artificial
  oligonucleotide probe
cgcattgcggctttcgcgcattgcggctttcgttgcaagcgtccgggaaacggctgcaagcgca

SEQ ID NO: 1836 - DNA, 64 bp, Artificial
  oligonucleotide probe
ttgcaagcgtccgggattgcaagcgtccgggaggctttgcgcaccgtgttcggggaaacgccgt

SEQ ID NO: 1837 - DNA, 64 bp, Artificial
  oligonucleotide probe
ttcggggaaacgccgtttcggggaaacgccgtcgcattgcggctttcgatggcgcagcacgctg

SEQ ID NO: 1838 - DNA, 64 bp, Artificial
  oligonucleotide probe
ccgtttcggctgggctccgtttcggctgggctaagccgtgcgcaacgaaacggctgcaagcgca

SEQ ID NO: 1839 - DNA, 64 bp, Artificial
  oligonucleotide probe
aacggctgcaagcgcaaacggctgcaagcgcaatggcgcagcacgctgcgcattgcggctttcg

SEQ ID NO: 1840 - DNA, 64 bp, Artificial
  oligonucleotide probe
ccgtttcggctgggctccgtttcggctgggctaagccgtgcgcaacgattgcaagcgtccggga

SEQ ID NO: 1841 - DNA, 64 bp, Artificial
  oligonucleotide probe
ttcggggaaacgccgtttcggggaaacgccgtcgcattgcggctttcgttgcaagcgtccggga

SEQ ID NO: 1842 - DNA, 64 bp, Artificial
  oligonucleotide probe
aacggctgcaagcgcaaacggctgcaagcgcaggctttgcgcaccgtgttcggggaaacgccgt

SEQ ID NO: 1843 - DNA, 64 bp, Artificial
  oligonucleotide probe
atggcgcagcacgctgatggcgcagcacgctgttcggggaaacgccgtggctttgcgcaccgtg

SEQ ID NO: 1844 - DNA, 64 bp, Artificial
  oligonucleotide probe
ttcggggaaacgccgtttcggggaaacgccgtaagccgtgcgcaacgattgcaagcgtccggga

SEQ ID NO: 1845 - DNA, 64 bp, Artificial
  oligonucleotide probe
aacggctgcaagcgcaaacggctgcaagcgcaatggcgcagcacgctgccgtttcggctgggct

SEQ ID NO: 1846 - DNA, 64 bp, Artificial
  oligonucleotide probe
ttcggggaaacgccgtttcggggaaacgccgtttgcaagcgtccgggaaacggctgcaagcgca

SEQ ID NO: 1847 - DNA, 64 bp, Artificial
  oligonucleotide probe
ccgtttcggctgggctccgtttcggctgggctttgcaagcgtccgggaaacggctgcaagcgca

SEQ ID NO: 1848 - DNA, 64 bp, Artificial
  oligonucleotide probe
aacggctgcaagcgcaaacggctgcaagcgcaatggcgcagcacgctgttcggggaaacgccgt

SEQ ID NO: 1849 - DNA, 64 bp, Artificial
  oligonucleotide probe
aagccgtgcgcaacgaaagccgtgcgcaacgacgcattgcggctttcgccgtttcggctgggct

SEQ ID NO: 1850 - DNA, 64 bp, Artificial
  oligonucleotide probe
ttgcaagcgtccgggattgcaagcgtccgggaaacggctgcaagcgcaggctttgcgcaccgtg

SEQ ID NO: 1851 - DNA, 64 bp, Artificial
  oligonucleotide probe
ggctttgcgcaccgtgggctttgcgcaccgtgttcggggaaacgccgtccgtttcggctgggct

SEQ ID NO: 1852 - DNA, 64 bp, Artificial
  oligonucleotide probe
aagccgtgcgcaacgaaagccgtgcgcaacgaggctttgcgcaccgtgttcggggaaacgccgt

SEQ ID NO: 1853 - DNA, 64 bp, Artificial
  oligonucleotide probe
aacggctgcaagcgcaaacggctgcaagcgcattcggggaaacgccgtcgcattgcggctttcg

SEQ ID NO: 1854 - DNA, 64 bp, Artificial
  oligonucleotide probe
cgcattgcggctttcgcgcattgcggctttcgggctttgcgcaccgtgccgtttcggctgggct

SEQ ID NO: 1855 - DNA, 64 bp, Artificial
  oligonucleotide probe
ccgtttcggctgggctccgtttcggctgggctaacggctgcaagcgcattcggggaaacgccgt

SEQ ID NO: 1856 - DNA, 64 bp, Artificial
  oligonucleotide probe
atggcgcagcacgctgatggcgcagcacgctgcgcattgcggctttcgaacggctgcaagcgca

SEQ ID NO: 1857 - DNA, 64 bp, Artificial
  oligonucleotide probe
ggctttgcgcaccgtgggctttgcgcaccgtgccgtttcggctgggctaacggctgcaagcgca

SEQ ID NO: 1858 - DNA, 64 bp, Artificial
  oligonucleotide probe
cgcattgcggctttcgcgcattgcggctttcgttgcaagcgtccgggaaagccgtgcgcaacga

SEQ ID NO: 1859 - DNA, 64 bp, Artificial
  oligonucleotide probe
ggctttgcgcaccgtgggctttgcgcaccgtgttcggggaaacgccgtaacggctgcaagcgca

SEQ ID NO: 1860 - DNA, 64 bp, Artificial
  oligonucleotide probe
ttcggggaaacgccgtttcggggaaacgccgtccgtttcggctgggctaacggctgcaagcgca

SEQ ID NO: 1861 - DNA, 64 bp, Artificial
  oligonucleotide probe
ggctttgcgcaccgtgggctttgcgcaccgtgcgcattgcggctttcgaacggctgcaagcgca

SEQ ID NO: 1862 - DNA, 64 bp, Artificial
  oligonucleotide probe
ccgtttcggctgggctccgtttcggctgggctttgcaagcgtccgggaggctttgcgcaccgtg

SEQ ID NO: 1863 - DNA, 64 bp, Artificial
  oligonucleotide probe
ttcggggaaacgccgtttcggggaaacgccgtttgcaagcgtccgggaatggcgcagcacgctg

SEQ ID NO: 1864 - DNA, 64 bp, Artificial
  oligonucleotide probe
cgcattgcggctttcgcgcattgcggctttcgatggcgcagcacgctgttcggggaaacgccgt

SEQ ID NO: 1865 - DNA, 64 bp, Artificial
  oligonucleotide probe
aagccgtgcgcaacgaaagccgtgcgcaacgattgcaagcgtccgggaggctttgcgcaccgtg

SEQ ID NO: 1866 - DNA, 64 bp, Artificial
  oligonucleotide probe
aacggctgcaagcgcaaacggctgcaagcgcaaagccgtgcgcaacgattgcaagcgtccggga

SEQ ID NO: 1867 - DNA, 64 bp, Artificial
  oligonucleotide probe
aagccgtgcgcaacgaaagccgtgcgcaacgaaacggctgcaagcgcaccgtttcggctgggct

SEQ ID NO: 1868 - DNA, 64 bp, Artificial
  oligonucleotide probe
cgcattgcggctttcgcgcattgcggctttcgaacggctgcaagcgcaatggcgcagcacgctg

SEQ ID NO: 1869 - DNA, 64 bp, Artificial
  oligonucleotide probe
ttgcaagcgtccgggattgcaagcgtccgggaaacggctgcaagcgcaaagccgtgcgcaacga

SEQ ID NO: 1870 - DNA, 64 bp, Artificial
  oligonucleotide probe
aagccgtgcgcaacgaaagccgtgcgcaacgacgcattgcggctttcgggctttgcgcaccgtg

SEQ ID NO: 1871 - DNA, 64 bp, Artificial
  oligonucleotide probe
aagccgtgcgcaacgaaacggctgcaagcgcaggctttgcgcaccgtgggctgcacggtcccgt

SEQ ID NO: 1872 - DNA, 64 bp, Artificial
  oligonucleotide probe
atggcgcagcacgctgttcggggaaacgccgtccgtttcggctgggctccgtcgcaaagcgcac

SEQ ID NO: 1873 - DNA, 64 bp, Artificial
  oligonucleotide probe
ttgcaagcgtccgggattcggggaaacgccgtccgtttcggctgggctccgtcgcaaagcgcac

SEQ ID NO: 1874 - DNA, 64 bp, Artificial
  oligonucleotide probe
aagccgtgcgcaacgaccgtttcggctgggctttcgccgtttgcgctgccgtcgcaaagcgcac

SEQ ID NO: 1875 - DNA, 64 bp, Artificial
  oligonucleotide probe
aagccgtgcgcaacgacgcattgcggctttcgaacgcgatttgccgcaggctgcacggtcccgt

SEQ ID NO: 1876 - DNA, 64 bp, Artificial
  oligonucleotide probe
cgcattgcggctttcgttgcaagcgtccgggaaacgcgatttgccgcaccgtcgcaaagcgcac

SEQ ID NO: 1877 - DNA, 64 bp, Artificial
  oligonucleotide probe
ggctttgcgcaccgtgttcggggaaacgccgtaacgcgatttgccgcaccgtcgcaaagcgcac

SEQ ID NO: 1878 - DNA, 64 bp, Artificial
  oligonucleotide probe
ttgcaagcgtccgggattcggggaaacgccgtaacgcgatttgccgcaccgtcgcaaagcgcac

SEQ ID NO: 1879 - DNA, 64 bp, Artificial
  oligonucleotide probe
aagccgtgcgcaacgacgcattgcggctttcgaacggctgcaagcgcaccgtcgcaaagcgcac

SEQ ID NO: 1880 - DNA, 64 bp, Artificial
  oligonucleotide probe
aacggctgcaagcgcattcggggaaacgccgtccgtttcggctgggctccgtcgcaaagcgcac

SEQ ID NO: 1881 - DNA, 64 bp, Artificial
  oligonucleotide probe
ttgcaagcgtccgggaaacggctgcaagcgcaccgtttcggctgggctaacgcgatttgccgca

SEQ ID NO: 1882 - DNA, 64 bp, Artificial
  oligonucleotide probe
aagccgtgcgcaacgaggctttgcgcaccgtgttcggggaaacgccgtaacgcgatttgccgca

SEQ ID NO: 1883 - DNA, 64 bp, Artificial
  oligonucleotide probe
aagccgtgcgcaacgacgcattgcggctttcgggctttgcgcaccgtgttcgccgtttgcgctg

SEQ ID NO: 1884 - DNA, 64 bp, Artificial
  oligonucleotide probe
ggctttgcgcaccgtgaacgcgatttgccgcaccgtcgcaaagcgcacggctgcacggtcccgt

SEQ ID NO: 1885 - DNA, 64 bp, Artificial
  oligonucleotide probe
ggctttgcgcaccgtgttcggggaaacgccgtaacgcgatttgccgcattcgccgtttgcgctg

SEQ ID NO: 1886 - DNA, 64 bp, Artificial
  oligonucleotide probe
cgcattgcggctttcgttgcaagcgtccgggaaacggctgcaagcgcattcgccgtttgcgctg

SEQ ID NO: 1887 - DNA, 64 bp, Artificial
  oligonucleotide probe
aagccgtgcgcaacgattgcaagcgtccgggaaacggctgcaagcgcaccgtcgcaaagcgcac

SEQ ID NO: 1888 - DNA, 64 bp, Artificial
  oligonucleotide probe
aagccgtgcgcaacgacgcattgcggctttcgccgtttcggctgggctaacgcgatttgccgca

SEQ ID NO: 1889 - DNA, 64 bp, Artificial
  oligonucleotide probe
ttgcaagcgtccgggaccgtttcggctgggctaacgcgatttgccgcaggctgcacggtcccgt

SEQ ID NO: 1890 - DNA, 64 bp, Artificial
  oligonucleotide probe
atggcgcagcacgctgttcggggaaacgccgtccgtttcggctgggctaacgcgatttgccgca

SEQ ID NO: 1891 - DNA, 64 bp, Artificial
  oligonucleotide probe
aacggctgcaagcgcaatggcgcagcacgctgttcggggaaacgccgtttcgccgtttgcgctg

SEQ ID NO: 1892 - DNA, 64 bp, Artificial
  oligonucleotide probe
ggctttgcgcaccgtgttcggggaaacgccgtaacgcgatttgccgcaggctgcacggtcccgt

SEQ ID NO: 1893 - DNA, 64 bp, Artificial
  oligonucleotide probe
cgcattgcggctttcgttgcaagcgtccgggaatggcgcagcacgctgttcgccgtttgcgctg

SEQ ID NO: 1894 - DNA, 64 bp, Artificial
  oligonucleotide probe
ttgcaagcgtccgggaggctttgcgcaccgtgttcggggaaacgccgtggctgcacggtcccgt

SEQ ID NO: 1895 - DNA, 64 bp, Artificial
  oligonucleotide probe
cgcattgcggctttcgatggcgcagcacgctgttcggggaaacgccgtccgtcgcaaagcgcac

SEQ ID NO: 1896 - DNA, 64 bp, Artificial
  oligonucleotide probe
ttgcaagcgtccgggaccgtttcggctgggctaacgcgatttgccgcattcgccgtttgcgctg

SEQ ID NO: 1897 - DNA, 64 bp, Artificial
  oligonucleotide probe
ttgcaagcgtccgggaatggcgcagcacgctgttcggggaaacgccgtaacgcgatttgccgca

SEQ ID NO: 1898 - DNA, 64 bp, Artificial
  oligonucleotide probe
ggctttgcgcaccgtgatggcgcagcacgctgttcggggaaacgccgtggctgcacggtcccgt

SEQ ID NO: 1899 - DNA, 64 bp, Artificial
  oligonucleotide probe
ggctttgcgcaccgtgatggcgcagcacgctgccgtttcggctgggctaacgcgatttgccgca

SEQ ID NO: 1900 - DNA, 64 bp, Artificial
  oligonucleotide probe
aagccgtgcgcaacgacgcattgcggctttcgaacgcgatttgccgcattcgccgtttgcgctg

SEQ ID NO: 1901 - DNA, 64 bp, Artificial
  oligonucleotide probe
aagccgtgcgcaacgacgcattgcggctttcgttcggggaaacgccgtggctgcacggtcccgt

SEQ ID NO: 1902 - DNA, 64 bp, Artificial
  oligonucleotide probe
ggctttgcgcaccgtgatggcgcagcacgctgaacgcgatttgccgcaggctgcacggtcccgt

SEQ ID NO: 1903 - DNA, 64 bp, Artificial
  oligonucleotide probe
atggcgcagcacgctgttcgccgtttgcgctgccgtcgcaaagcgcacggctgcacggtcccgt

SEQ ID NO: 1904 - DNA, 64 bp, Artificial
  oligonucleotide probe
ccgtttcggctgggctttcgccgtttgcgctgccgtcgcaaagcgcacggctgcacggtcccgt

SEQ ID NO: 1905 - DNA, 64 bp, Artificial
  oligonucleotide probe
aacggctgcaagcgcaccgtttcggctgggctttcgccgtttgcgctgccgtcgcaaagcgcac

SEQ ID NO: 1906 - DNA, 64 bp, Artificial
  oligonucleotide probe
cgcattgcggctttcgaacggctgcaagcgcaatggcgcagcacgctgccgtcgcaaagcgcac

SEQ ID NO: 1907 - DNA, 64 bp, Artificial
  oligonucleotide probe
aagccgtgcgcaacgattgcaagcgtccgggaaacgcgatttgccgcaccgtcgcaaagcgcac

SEQ ID NO: 1908 - DNA, 64 bp, Artificial
  oligonucleotide probe
aacggctgcaagcgcaccgtttcggctgggctaacgcgatttgccgcaccgtcgcaaagcgcac

SEQ ID NO: 1909 - DNA, 64 bp, Artificial
  oligonucleotide probe
cgcattgcggctttcgaacggctgcaagcgcaccgtttcggctgggctccgtcgcaaagcgcac

SEQ ID NO: 1910 - DNA, 64 bp, Artificial
  oligonucleotide probe
aagccgtgcgcaacgaaacggctgcaagcgcaaacgcgatttgccgcaccgtcgcaaagcgcac

SEQ ID NO: 1911 - DNA, 64 bp, Artificial
  oligonucleotide probe
ttgcaagcgtccgggaaacggctgcaagcgcaaacgcgatttgccgcattcgccgtttgcgctg

SEQ ID NO: 1912 - DNA, 64 bp, Artificial
  oligonucleotide probe
ttgcaagcgtccgggaggctttgcgcaccgtgccgtttcggctgggctccgtcgcaaagcgcac

SEQ ID NO: 1913 - DNA, 64 bp, Artificial
  oligonucleotide probe
ttgcaagcgtccgggaatggcgcagcacgctgccgtttcggctgggctggctgcacggtcccgt

SEQ ID NO: 1914 - DNA, 64 bp, Artificial
  oligonucleotide probe
aagccgtgcgcaacgattgcaagcgtccgggaaacggctgcaagcgcaaacgcgatttgccgca

SEQ ID NO: 1915 - DNA, 64 bp, Artificial
  oligonucleotide probe
aagccgtgcgcaacgaggctttgcgcaccgtgccgtttcggctgggctaacgcgatttgccgca

SEQ ID NO: 1916 - DNA, 64 bp, Artificial
  oligonucleotide probe
ttgcaagcgtccgggaaacggctgcaagcgcaaacgcgatttgccgcaccgtcgcaaagcgcac

SEQ ID NO: 1917 - DNA, 64 bp, Artificial
  oligonucleotide probe
aagccgtgcgcaacgattcggggaaacgccgtccgtttcggctgggctccgtcgcaaagcgcac

SEQ ID NO: 1918 - DNA, 64 bp, Artificial
  oligonucleotide probe
aacggctgcaagcgcaggctttgcgcaccgtgccgtttcggctgggctccgtcgcaaagcgcac

SEQ ID NO: 1919 - DNA, 64 bp, Artificial
  oligonucleotide probe
aagccgtgcgcaacgaaacggctgcaagcgcaaacgcgatttgccgcaggctgcacggtcccgt

SEQ ID NO: 1920 - DNA, 64 bp, Artificial
  oligonucleotide probe
cgcattgcggctttcgttgcaagcgtccgggattcggggaaacgccgtaacgcgatttgccgca

SEQ ID NO: 1921 - DNA, 64 bp, Artificial
  oligonucleotide probe
aacggctgcaagcgcattcggggaaacgccgtccgtttcggctgggctaacgcgatttgccgca

SEQ ID NO: 1922 - DNA, 64 bp, Artificial
  oligonucleotide probe
aagccgtgcgcaacgattgcaagcgtccgggaccgtttcggctgggctttcgccgtttgcgctg

SEQ ID NO: 1923 - DNA, 64 bp, Artificial
  oligonucleotide probe
aagccgtgcgcaacgattgcaagcgtccgggaaacggctgcaagcgcaggctgcacggtcccgt

SEQ ID NO: 1924 - DNA, 64 bp, Artificial
  oligonucleotide probe
cgcattgcggctttcgaacggctgcaagcgcaaacgcgatttgccgcaccgtcgcaaagcgcac

SEQ ID NO: 1925 - DNA, 64 bp, Artificial
  oligonucleotide probe
aagccgtgcgcaacgaaacggctgcaagcgcattcggggaaacgccgtggctgcacggtcccgt

SEQ ID NO: 1926 - DNA, 64 bp, Artificial
  oligonucleotide probe
aagccgtgcgcaacgattgcaagcgtccgggaaacggctgcaagcgcattcgccgtttgcgctg

SEQ ID NO: 1927 - DNA, 64 bp, Artificial
  oligonucleotide probe
aagccgtgcgcaacgacgcattgcggctttcgggctttgcgcaccgtgaacgcgatttgccgca

SEQ ID NO: 1928 - DNA, 64 bp, Artificial
  oligonucleotide probe
atggcgcagcacgctgttcggggaaacgccgtccgtttcggctgggctttcgccgtttgcgctg

SEQ ID NO: 1929 - DNA, 64 bp, Artificial
  oligonucleotide probe
cgcattgcggctttcgaacggctgcaagcgcaatggcgcagcacgctgaacgcgatttgccgca

SEQ ID NO: 1930 - DNA, 64 bp, Artificial
  oligonucleotide probe
aacggctgcaagcgcaggctttgcgcaccgtgttcggggaaacgccgtaacgcgatttgccgca

SEQ ID NO: 1931 - DNA, 64 bp, Artificial
  oligonucleotide probe
cgcattgcggctttcgttcgccgtttgcgctgccgtcgcaaagcgcacggctgcacggtcccgt

SEQ ID NO: 1932 - DNA, 64 bp, Artificial
  oligonucleotide probe
ttgcaagcgtccgggaggctttgcgcaccgtgaacgcgatttgccgcattcgccgtttgcgctg

SEQ ID NO: 1933 - DNA, 64 bp, Artificial
  oligonucleotide probe
cgcattgcggctttcgccgtttcggctgggctttcgccgtttgcgctgccgtcgcaaagcgcac

SEQ ID NO: 1934 - DNA, 64 bp, Artificial
  oligonucleotide probe
ttgcaagcgtccgggaaacggctgcaagcgcattcgccgtttgcgctgccgtcgcaaagcgcac

SEQ ID NO: 1935 - DNA, 64 bp, Artificial
  oligonucleotide probe
aacggctgcaagcgcaggctttgcgcaccgtgttcggggaaacgccgtggctgcacggtcccgt

SEQ ID NO: 1936 - DNA, 64 bp, Artificial
  oligonucleotide probe
aacggctgcaagcgcaaacgcgatttgccgcattcgccgtttgcgctgggctgcacggtcccgt

SEQ ID NO: 1937 - DNA, 64 bp, Artificial
  oligonucleotide probe
aagccgtgcgcaacgattcggggaaacgccgtttcgccgtttgcgctgccgtcgcaaagcgcac

SEQ ID NO: 1938 - DNA, 64 bp, Artificial
  oligonucleotide probe
ggctttgcgcaccgtgccgtttcggctgggctaacgcgatttgccgcaggctgcacggtcccgt

SEQ ID NO: 1939 - DNA, 64 bp, Artificial
  oligonucleotide probe
cgcattgcggctttcgaacggctgcaagcgcattcggggaaacgccgtccgtcgcaaagcgcac

SEQ ID NO: 1940 - DNA, 64 bp, Artificial
  oligonucleotide probe
cgcattgcggctttcgggctttgcgcaccgtgatggcgcagcacgctgggctgcacggtcccgt

SEQ ID NO: 1941 - DNA, 64 bp, Artificial
  oligonucleotide probe
aagccgtgcgcaacgacgcattgcggctttcgttgcaagcgtccgggaccgtcgcaaagcgcac

SEQ ID NO: 1942 - DNA, 64 bp, Artificial
  oligonucleotide probe
aagccgtgcgcaacgacgcattgcggctttcgttcggggaaacgccgtaacgcgatttgccgca

SEQ ID NO: 1943 - DNA, 64 bp, Artificial
  oligonucleotide probe
aagccgtgcgcaacgaatggcgcagcacgctgttcggggaaacgccgtggctgcacggtcccgt

SEQ ID NO: 1944 - DNA, 64 bp, Artificial
  oligonucleotide probe
ttgcaagcgtccgggattcggggaaacgccgtccgtcgcaaagcgcacggctgcacggtcccgt

SEQ ID NO: 1945 - DNA, 64 bp, Artificial
  oligonucleotide probe
aagccgtgcgcaacgattgcaagcgtccgggattcggggaaacgccgtggctgcacggtcccgt

SEQ ID NO: 1946 - DNA, 64 bp, Artificial
  oligonucleotide probe
ttgcaagcgtccgggaatggcgcagcacgctgaacgcgatttgccgcaccgtcgcaaagcgcac

SEQ ID NO: 1947 - DNA, 64 bp, Artificial
  oligonucleotide probe
aagccgtgcgcaacgaaacggctgcaagcgcaccgtttcggctgggctttcgccgtttgcgctg

SEQ ID NO: 1948 - DNA, 64 bp, Artificial
  oligonucleotide probe
aagccgtgcgcaacgattgcaagcgtccgggaatggcgcagcacgctgccgtcgcaaagcgcac

SEQ ID NO: 1949 - DNA, 64 bp, Artificial
  oligonucleotide probe
ttgcaagcgtccgggattcggggaaacgccgtccgtttcggctgggctaacgcgatttgccgca

SEQ ID NO: 1950 - DNA, 64 bp, Artificial
  oligonucleotide probe
ttcggggaaacgccgtccgtttcggctgggctaacgcgatttgccgcattcgccgtttgcgctg

SEQ ID NO: 1951 - DNA, 64 bp, Artificial
  oligonucleotide probe
cgcattgcggctttcgccgtttcggctgggctaacgcgatttgccgcaccgtcgcaaagcgcac

SEQ ID NO: 1952 - DNA, 64 bp, Artificial
  oligonucleotide probe
ttgcaagcgtccgggaccgtttcggctgggctccgtcgcaaagcgcacggctgcacggtcccgt

SEQ ID NO: 1953 - DNA, 64 bp, Artificial
  oligonucleotide probe
atggcgcagcacgctgttcggggaaacgccgtttcgccgtttgcgctgggctgcacggtcccgt

SEQ ID NO: 1954 - DNA, 64 bp, Artificial
  oligonucleotide probe
cgcattgcggctttcgggctttgcgcaccgtgatggcgcagcacgctgccgtcgcaaagcgcac

SEQ ID NO: 1955 - DNA, 64 bp, Artificial
  oligonucleotide probe
ggctttgcgcaccgtgatggcgcagcacgctgttcgccgtttgcgctgggctgcacggtcccgt

SEQ ID NO: 1956 - DNA, 64 bp, Artificial
  oligonucleotide probe
ttgcaagcgtccgggaatggcgcagcacgctgttcggggaaacgccgtttcgccgtttgcgctg

SEQ ID NO: 1957 - DNA, 64 bp, Artificial
  oligonucleotide probe
aacggctgcaagcgcaggctttgcgcaccgtgatggcgcagcacgctgaacgcgatttgccgca

SEQ ID NO: 1958 - DNA, 64 bp, Artificial
  oligonucleotide probe
cgcattgcggctttcgttgcaagcgtccgggattcgccgtttgcgctgccgtcgcaaagcgcac

SEQ ID NO: 1959 - DNA, 64 bp, Artificial
  oligonucleotide probe
cgcattgcggctttcgttgcaagcgtccgggaggctttgcgcaccgtgttcgccgtttgcgctg

SEQ ID NO: 1960 - DNA, 64 bp, Artificial
  oligonucleotide probe
ggctttgcgcaccgtgatggcgcagcacgctgaacgcgatttgccgcaccgtcgcaaagcgcac

SEQ ID NO: 1961 - DNA, 64 bp, Artificial
  oligonucleotide probe
ttgcaagcgtccgggaggctttgcgcaccgtgttcgccgtttgcgctgccgtcgcaaagcgcac

SEQ ID NO: 1962 - DNA, 64 bp, Artificial
  oligonucleotide probe
aagccgtgcgcaacgattcggggaaacgccgtccgtttcggctgggctggctgcacggtcccgt

SEQ ID NO: 1963 - DNA, 64 bp, Artificial
  oligonucleotide probe
aacggctgcaagcgcaggctttgcgcaccgtgttcggggaaacgccgtccgtcgcaaagcgcac

SEQ ID NO: 1964 - DNA, 64 bp, Artificial
  oligonucleotide probe
cgcattgcggctttcgaacggctgcaagcgcaccgtttcggctgggctggctgcacggtcccgt

SEQ ID NO: 1965 - DNA, 64 bp, Artificial
  oligonucleotide probe
ttgcaagcgtccgggaatggcgcagcacgctgttcgccgtttgcgctgggctgcacggtcccgt

SEQ ID NO: 1966 - DNA, 64 bp, Artificial
  oligonucleotide probe
aagccgtgcgcaacgattcgccgtttgcgctgccgtcgcaaagcgcacggctgcacggtcccgt

SEQ ID NO: 1967 - DNA, 64 bp, Artificial
  oligonucleotide probe
ttgcaagcgtccgggaatggcgcagcacgctgaacgcgatttgccgcaggctgcacggtcccgt

SEQ ID NO: 1968 - DNA, 64 bp, Artificial
  oligonucleotide probe
ttgcaagcgtccgggaatggcgcagcacgctgttcggggaaacgccgtggctgcacggtcccgt

SEQ ID NO: 1969 - DNA, 64 bp, Artificial
  oligonucleotide probe
cgcattgcggctttcgatggcgcagcacgctgaacgcgatttgccgcaggctgcacggtcccgt

SEQ ID NO: 1970 - DNA, 64 bp, Artificial
  oligonucleotide probe
cgcattgcggctttcgggctttgcgcaccgtgttcggggaaacgccgtttcgccgtttgcgctg

SEQ ID NO: 1971 - DNA, 64 bp, Artificial
  oligonucleotide probe
ggctttgcgcaccgtgaacgcgatttgccgcattcgccgtttgcgctgccgtcgcaaagcgcac

SEQ ID NO: 1972 - DNA, 64 bp, Artificial
  oligonucleotide probe
aagccgtgcgcaacgaccgtttcggctgggctaacgcgatttgccgcaggctgcacggtcccgt

SEQ ID NO: 1973 - DNA, 64 bp, Artificial
  oligonucleotide probe
aagccgtgcgcaacgattcggggaaacgccgtaacgcgatttgccgcaggctgcacggtcccgt

SEQ ID NO: 1974 - DNA, 64 bp, Artificial
  oligonucleotide probe
cgcattgcggctttcgaacggctgcaagcgcaccgtttcggctgggctttcgccgtttgcgctg

SEQ ID NO: 1975 - DNA, 64 bp, Artificial
  oligonucleotide probe
aagccgtgcgcaacgaaacggctgcaagcgcaatggcgcagcacgctgttcgccgtttgcgctg

SEQ ID NO: 1976 - DNA, 64 bp, Artificial
  oligonucleotide probe
cgcattgcggctttcgaacggctgcaagcgcaatggcgcagcacgctgggctgcacggtcccgt

SEQ ID NO: 1977 - DNA, 64 bp, Artificial
  oligonucleotide probe
aacggctgcaagcgcaatggcgcagcacgctgccgtcgcaaagcgcacggctgcacggtcccgt

SEQ ID NO: 1978 - DNA, 64 bp, Artificial
  oligonucleotide probe
ttgcaagcgtccgggaggctttgcgcaccgtgaacgcgatttgccgcaccgtcgcaaagcgcac

SEQ ID NO: 1979 - DNA, 64 bp, Artificial
  oligonucleotide probe
aacggctgcaagcgcaatggcgcagcacgctgaacgcgatttgccgcaggctgcacggtcccgt

SEQ ID NO: 1980 - DNA, 64 bp, Artificial
  oligonucleotide probe
cgcattgcggctttcgatggcgcagcacgctgaacgcgatttgccgcattcgccgtttgcgctg

SEQ ID NO: 1981 - DNA, 64 bp, Artificial
  oligonucleotide probe
cgcattgcggctttcgttcggggaaacgccgtaacgcgatttgccgcaccgtcgcaaagcgcac

SEQ ID NO: 1982 - DNA, 64 bp, Artificial
  oligonucleotide probe
aacgcgatttgccgcattcgccgtttgcgctgccgtcgcaaagcgcacggctgcacggtcccgt

SEQ ID NO: 1983 - DNA, 64 bp, Artificial
  oligonucleotide probe
aagccgtgcgcaacgacgcattgcggctttcgttcgccgtttgcgctgggctgcacggtcccgt

SEQ ID NO: 1984 - DNA, 64 bp, Artificial
  oligonucleotide probe
ttgcaagcgtccgggaaacggctgcaagcgcattcggggaaacgccgtttcgccgtttgcgctg

SEQ ID NO: 1985 - DNA, 64 bp, Artificial
  oligonucleotide probe
aacggctgcaagcgcaggctttgcgcaccgtgatggcgcagcacgctgttcgccgtttgcgctg

SEQ ID NO: 1986 - DNA, 64 bp, Artificial
  oligonucleotide probe
cgcattgcggctttcgaacggctgcaagcgcattcgccgtttgcgctgccgtcgcaaagcgcac

SEQ ID NO: 1987 - DNA, 64 bp, Artificial
  oligonucleotide probe
aagccgtgcgcaacgaccgtttcggctgggctaacgcgatttgccgcattcgccgtttgcgctg

SEQ ID NO: 1988 - DNA, 64 bp, Artificial
  oligonucleotide probe
aagccgtgcgcaacgacgcattgcggctttcgttcgccgtttgcgctgccgtcgcaaagcgcac

SEQ ID NO: 1989 - DNA, 64 bp, Artificial
  oligonucleotide probe
aacggctgcaagcgcaatggcgcagcacgctgttcggggaaacgccgtccgtcgcaaagcgcac

SEQ ID NO: 1990 - DNA, 64 bp, Artificial
  oligonucleotide probe
aagccgtgcgcaacgacgcattgcggctttcgttgcaagcgtccgggaaacgcgatttgccgca

SEQ ID NO: 1991 - DNA, 64 bp, Artificial
  oligonucleotide probe
aacggctgcaagcgcaggctttgcgcaccgtgccgtttcggctgggctttcgccgtttgcgctg

SEQ ID NO: 1992 - DNA, 64 bp, Artificial
  oligonucleotide probe
cgcattgcggctttcgttgcaagcgtccgggaccgtttcggctgggctaacgcgatttgccgca

SEQ ID NO: 1993 - DNA, 64 bp, Artificial
  oligonucleotide probe
ttcggggaaacgccgtccgtttcggctgggctttcgccgtttgcgctgggctgcacggtcccgt

SEQ ID NO: 1994 - DNA, 64 bp, Artificial
  oligonucleotide probe
cgcattgcggctttcgggctttgcgcaccgtgttcgccgtttgcgctgccgtcgcaaagcgcac

SEQ ID NO: 1995 - DNA, 64 bp, Artificial
  oligonucleotide probe
aagccgtgcgcaacgaggctttgcgcaccgtgttcggggaaacgccgtccgtcgcaaagcgcac

SEQ ID NO: 1996 - DNA, 64 bp, Artificial
  oligonucleotide probe
aagccgtgcgcaacgaaacggctgcaagcgcaaacgcgatttgccgcattcgccgtttgcgctg

SEQ ID NO: 1997 - DNA, 64 bp, Artificial
  oligonucleotide probe
cgcattgcggctttcgggctttgcgcaccgtgatggcgcagcacgctgaacgcgatttgccgca

SEQ ID NO: 1998 - DNA, 64 bp, Artificial
  oligonucleotide probe
aagccgtgcgcaacgattgcaagcgtccgggattcggggaaacgccgtttcgccgtttgcgctg

SEQ ID NO: 1999 - DNA, 64 bp, Artificial
  oligonucleotide probe
aagccgtgcgcaacgaatggcgcagcacgctgttcggggaaacgccgtttcgccgtttgcgctg

SEQ ID NO: 2000 - DNA, 64 bp, Artificial
  oligonucleotide probe
aagccgtgcgcaacgacgcattgcggctttcgggctttgcgcaccgtgggctgcacggtcccgt

SEQ ID NO: 2001 - DNA, 64 bp, Artificial
  oligonucleotide probe
ggctttgcgcaccgtgttcggggaaacgccgtttcgccgtttgcgctgccgtcgcaaagcgcac

SEQ ID NO: 2002 - DNA, 64 bp, Artificial
  oligonucleotide probe
aagccgtgcgcaacgaaacggctgcaagcgcaccgtttcggctgggctggctgcacggtcccgt

SEQ ID NO: 2003 - DNA, 64 bp, Artificial
  oligonucleotide probe
aagccgtgcgcaacgattcggggaaacgccgtccgtttcggctgggctaacgcgatttgccgca

SEQ ID NO: 2004 - DNA, 64 bp, Artificial
  oligonucleotide probe
cgcattgcggctttcgatggcgcagcacgctgccgtttcggctgggctggctgcacggtcccgt

SEQ ID NO: 2005 - DNA, 64 bp, Artificial
  oligonucleotide probe
ggctttgcgcaccgtgaacgcgatttgccgcattcgccgtttgcgctgggctgcacggtcccgt

SEQ ID NO: 2006 - DNA, 64 bp, Artificial
  oligonucleotide probe
ccgtttcggctgggctaacgcgatttgccgcaccgtcgcaaagcgcacggctgcacggtcccgt

SEQ ID NO: 2007 - DNA, 64 bp, Artificial
  oligonucleotide probe
cgcattgcggctttcgggctttgcgcaccgtgatggcgcagcacgctgttcgccgtttgcgctg

SEQ ID NO: 2008 - DNA, 64 bp, Artificial
  oligonucleotide probe
aagccgtgcgcaacgaatggcgcagcacgctgaacgcgatttgccgcaccgtcgcaaagcgcac

SEQ ID NO: 2009 - DNA, 64 bp, Artificial
  oligonucleotide probe
aagccgtgcgcaacgattgcaagcgtccgggaggctttgcgcaccgtgggctgcacggtcccgt

SEQ ID NO: 2010 - DNA, 64 bp, Artificial
  oligonucleotide probe
cgcattgcggctttcgttcggggaaacgccgtccgtttcggctgggctggctgcacggtcccgt

SEQ ID NO: 2011 - DNA, 64 bp, Artificial
  oligonucleotide probe
aagccgtgcgcaacgacgcattgcggctttcgccgtttcggctgggctccgtcgcaaagcgcac

SEQ ID NO: 2012 - DNA, 64 bp, Artificial
  oligonucleotide probe
cgcattgcggctttcgttgcaagcgtccgggattcggggaaacgccgtttcgccgtttgcgctg

SEQ ID NO: 2013 - DNA, 64 bp, Artificial
  oligonucleotide probe
cgcattgcggctttcgaacggctgcaagcgcaccgtttcggctgggctaacgcgatttgccgca

SEQ ID NO: 2014 - DNA, 64 bp, Artificial
  oligonucleotide probe
aagccgtgcgcaacgaaacggctgcaagcgcattcgccgtttgcgctgggctgcacggtcccgt

SEQ ID NO: 2015 - DNA, 64 bp, Artificial
  oligonucleotide probe
aacggctgcaagcgcaatggcgcagcacgctgccgtttcggctgggctaacgcgatttgccgca

SEQ ID NO: 2016 - DNA, 64 bp, Artificial
  oligonucleotide probe
aagccgtgcgcaacgaggctttgcgcaccgtgaacgcgatttgccgcaccgtcgcaaagcgcac

SEQ ID NO: 2017 - DNA, 64 bp, Artificial
  oligonucleotide probe
ttgcaagcgtccgggaaacggctgcaagcgcattcggggaaacgccgtggctgcacggtcccgt

SEQ ID NO: 2018 - DNA, 64 bp, Artificial
  oligonucleotide probe
aacggctgcaagcgcattcggggaaacgccgtaacgcgatttgccgcaggctgcacggtcccgt

SEQ ID NO: 2019 - DNA, 64 bp, Artificial
  oligonucleotide probe
cgcattgcggctttcgttcggggaaacgccgtaacgcgatttgccgcattcgccgtttgcgctg

SEQ ID NO: 2020 - DNA, 64 bp, Artificial
  oligonucleotide probe
aagccgtgcgcaacgattcggggaaacgccgtaacgcgatttgccgcattcgccgtttgcgctg

SEQ ID NO: 2021 - DNA, 64 bp, Artificial
  oligonucleotide probe
cgcattgcggctttcgttgcaagcgtccgggaatggcgcagcacgctgaacgcgatttgccgca

SEQ ID NO: 2022 - DNA, 64 bp, Artificial
  oligonucleotide probe
ttgcaagcgtccgggaatggcgcagcacgctgttcggggaaacgccgtccgtcgcaaagcgcac

SEQ ID NO: 2023 - DNA, 64 bp, Artificial
  oligonucleotide probe
cgcattgcggctttcgggctttgcgcaccgtgaacgcgatttgccgcattcgccgtttgcgctg

SEQ ID NO: 2024 - DNA, 64 bp, Artificial
  oligonucleotide probe
cgcattgcggctttcgaacgcgatttgccgcattcgccgtttgcgctgccgtcgcaaagcgcac

SEQ ID NO: 2025 - DNA, 64 bp, Artificial
  oligonucleotide probe
atggcgcagcacgctgccgtttcggctgggctttcgccgtttgcgctgccgtcgcaaagcgcac

SEQ ID NO: 2026 - DNA, 64 bp, Artificial
  oligonucleotide probe
ttgcaagcgtccgggaccgtttcggctgggctaacgcgatttgccgcaccgtcgcaaagcgcac

SEQ ID NO: 2027 - DNA, 64 bp, Artificial
  oligonucleotide probe
ggctttgcgcaccgtgatggcgcagcacgctgccgtttcggctgggctccgtcgcaaagcgcac

SEQ ID NO: 2028 - DNA, 64 bp, Artificial
  oligonucleotide probe
aacggctgcaagcgcattcggggaaacgccgtccgtcgcaaagcgcacggctgcacggtcccgt

SEQ ID NO: 2029 - DNA, 64 bp, Artificial
  oligonucleotide probe
ggctttgcgcaccgtgatggcgcagcacgctgaacgcgatttgccgcattcgccgtttgcgctg

SEQ ID NO: 2030 - DNA, 64 bp, Artificial
  oligonucleotide probe
cgcattgcggctttcgaacggctgcaagcgcaaacgcgatttgccgcattcgccgtttgcgctg

SEQ ID NO: 2031 - DNA, 64 bp, Artificial
  oligonucleotide probe
cgcattgcggctttcgggctttgcgcaccgtgccgtttcggctgggctaacgcgatttgccgca

SEQ ID NO: 2032 - DNA, 64 bp, Artificial
  oligonucleotide probe
aagccgtgcgcaacgacgcattgcggctttcgttgcaagcgtccgggaggctgcacggtcccgt

SEQ ID NO: 2033 - DNA, 64 bp, Artificial
  oligonucleotide probe
aagccgtgcgcaacgacgcattgcggctttcgaacgcgatttgccgcaccgtcgcaaagcgcac

SEQ ID NO: 2034 - DNA, 64 bp, Artificial
  oligonucleotide probe
aagccgtgcgcaacgaggctttgcgcaccgtgccgtttcggctgggctccgtcgcaaagcgcac

SEQ ID NO: 2035 - DNA, 64 bp, Artificial
  oligonucleotide probe
atggcgcagcacgctgttcggggaaacgccgtaacgcgatttgccgcaggctgcacggtcccgt

SEQ ID NO: 2036 - DNA, 64 bp, Artificial
  oligonucleotide probe
aagccgtgcgcaacgaaacggctgcaagcgcaccgtcgcaaagcgcacggctgcacggtcccgt

SEQ ID NO: 2037 - DNA, 64 bp, Artificial
  oligonucleotide probe
ttgcaagcgtccgggaaacggctgcaagcgcaggctttgcgcaccgtgggctgcacggtcccgt

SEQ ID NO: 2038 - DNA, 64 bp, Artificial
  oligonucleotide probe
ggctttgcgcaccgtgccgtttcggctgggctaacgcgatttgccgcattcgccgtttgcgctg

SEQ ID NO: 2039 - DNA, 64 bp, Artificial
  oligonucleotide probe
aagccgtgcgcaacgaaacggctgcaagcgcaggctttgcgcaccgtgttcgccgtttgcgctg

SEQ ID NO: 2040 - DNA, 64 bp, Artificial
  oligonucleotide probe
ttgcaagcgtccgggaggctttgcgcaccgtgatggcgcagcacgctgaacgcgatttgccgca

SEQ ID NO: 2041 - DNA, 64 bp, Artificial
  oligonucleotide probe
aagccgtgcgcaacgacgcattgcggctttcgaacggctgcaagcgcaggctgcacggtcccgt

SEQ ID NO: 2042 - DNA, 64 bp, Artificial
  oligonucleotide probe
aagccgtgcgcaacgaaacggctgcaagcgcattcggggaaacgccgtccgtcgcaaagcgcac

SEQ ID NO: 2043 - DNA, 64 bp, Artificial
  oligonucleotide probe
aagccgtgcgcaacgattcggggaaacgccgtccgtttcggctgggctttcgccgtttgcgctg

SEQ ID NO: 2044 - DNA, 64 bp, Artificial
  oligonucleotide probe
aagccgtgcgcaacgaggctttgcgcaccgtgccgtttcggctgggctttcgccgtttgcgctg

SEQ ID NO: 2045 - DNA, 64 bp, Artificial
  oligonucleotide probe
cgcattgcggctttcgaacggctgcaagcgcaggctttgcgcaccgtgaacgcgatttgccgca

SEQ ID NO: 2046 - DNA, 64 bp, Artificial
  oligonucleotide probe
aacggctgcaagcgcaatggcgcagcacgctgccgtttcggctgggctttcgccgtttgcgctg

SEQ ID NO: 2047 - DNA, 64 bp, Artificial
  oligonucleotide probe
aagccgtgcgcaacgaatggcgcagcacgctgaacgcgatttgccgcattcgccgtttgcgctg

SEQ ID NO: 2048 - DNA, 64 bp, Artificial
  oligonucleotide probe
ttgcaagcgtccgggaatggcgcagcacgctgaacgcgatttgccgcattcgccgtttgcgctg

SEQ ID NO: 2049 - DNA, 64 bp, Artificial
  oligonucleotide probe
cgcattgcggctttcgaacgcgatttgccgcaccgtcgcaaagcgcacggctgcacggtcccgt

SEQ ID NO: 2050 - DNA, 64 bp, Artificial
  oligonucleotide probe
ttcggggaaacgccgtccgtttcggctgggctttcgccgtttgcgctgccgtcgcaaagcgcac

SEQ ID NO: 2051 - DNA, 64 bp, Artificial
  oligonucleotide probe
aagccgtgcgcaacgaatggcgcagcacgctgccgtttcggctgggctttcgccgtttgcgctg

SEQ ID NO: 2052 - DNA, 64 bp, Artificial
  oligonucleotide probe
ttgcaagcgtccgggaaacggctgcaagcgcaatggcgcagcacgctgttcgccgtttgcgctg

SEQ ID NO: 2053 - DNA, 64 bp, Artificial
  oligonucleotide probe
aagccgtgcgcaacgaaacggctgcaagcgcattcggggaaacgccgtttcgccgtttgcgctg

SEQ ID NO: 2054 - DNA, 64 bp, Artificial
  oligonucleotide probe
cgcattgcggctttcgaacggctgcaagcgcaccgtcgcaaagcgcacggctgcacggtcccgt

SEQ ID NO: 2055 - DNA, 64 bp, Artificial
  oligonucleotide probe
aacggctgcaagcgcattcggggaaacgccgtttcgccgtttgcgctgccgtcgcaaagcgcac

SEQ ID NO: 2056 - DNA, 64 bp, Artificial
  oligonucleotide probe
cgcattgcggctttcgggctttgcgcaccgtgccgtttcggctgggctccgtcgcaaagcgcac

SEQ ID NO: 2057 - DNA, 64 bp, Artificial
  oligonucleotide probe
ggctttgcgcaccgtgttcggggaaacgccgtccgtttcggctgggctggctgcacggtcccgt

SEQ ID NO: 2058 - DNA, 64 bp, Artificial
  oligonucleotide probe
atggcgcagcacgctgaacgcgatttgccgcaccgtcgcaaagcgcacggctgcacggtcccgt

SEQ ID NO: 2059 - DNA, 64 bp, Artificial
  oligonucleotide probe
ggctttgcgcaccgtgttcggggaaacgccgtccgtttcggctgggctttcgccgtttgcgctg

SEQ ID NO: 2060 - DNA, 64 bp, Artificial
  oligonucleotide probe
aagccgtgcgcaacgaatggcgcagcacgctgccgtttcggctgggctggctgcacggtcccgt

SEQ ID NO: 2061 - DNA, 64 bp, Artificial
  oligonucleotide probe
aacggctgcaagcgcattcggggaaacgccgtaacgcgatttgccgcattcgccgtttgcgctg

SEQ ID NO: 2062 - DNA, 64 bp, Artificial
  oligonucleotide probe
cgcattgcggctttcgggctttgcgcaccgtgttcgccgtttgcgctgggctgcacggtcccgt

SEQ ID NO: 2063 - DNA, 64 bp, Artificial
  oligonucleotide probe
ttgcaagcgtccgggaaacggctgcaagcgcaatggcgcagcacgctgggctgcacggtcccgt

SEQ ID NO: 2064 - DNA, 64 bp, Artificial
  oligonucleotide probe
aacggctgcaagcgcaggctttgcgcaccgtgaacgcgatttgccgcattcgccgtttgcgctg

SEQ ID NO: 2065 - DNA, 64 bp, Artificial
  oligonucleotide probe
cgcattgcggctttcgttcggggaaacgccgtccgtttcggctgggctttcgccgtttgcgctg

SEQ ID NO: 2066 - DNA, 64 bp, Artificial
  oligonucleotide probe
aagccgtgcgcaacgattgcaagcgtccgggaccgtttcggctgggctccgtcgcaaagcgcac

SEQ ID NO: 2067 - DNA, 64 bp, Artificial
  oligonucleotide probe
cgcattgcggctttcgggctttgcgcaccgtgttcggggaaacgccgtggctgcacggtcccgt

SEQ ID NO: 2068 - DNA, 64 bp, Artificial
  oligonucleotide probe
cgcattgcggctttcgatggcgcagcacgctgttcgccgtttgcgctgccgtcgcaaagcgcac

SEQ ID NO: 2069 - DNA, 64 bp, Artificial
  oligonucleotide probe
ttgcaagcgtccgggattcggggaaacgccgtttcgccgtttgcgctgggctgcacggtcccgt

SEQ ID NO: 2070 - DNA, 64 bp, Artificial
  oligonucleotide probe
aagccgtgcgcaacgaccgtttcggctgggctaacgcgatttgccgcaccgtcgcaaagcgcac

SEQ ID NO: 2071 - DNA, 64 bp, Artificial
  oligonucleotide probe
ttgcaagcgtccgggaatggcgcagcacgctgccgtttcggctgggctttcgccgtttgcgctg

SEQ ID NO: 2072 - DNA, 64 bp, Artificial
  oligonucleotide probe
ttgcaagcgtccgggaatggcgcagcacgctgttcgccgtttgcgctgccgtcgcaaagcgcac

SEQ ID NO: 2073 - DNA, 64 bp, Artificial
  oligonucleotide probe
cgcattgcggctttcgaacggctgcaagcgcattcggggaaacgccgtggctgcacggtcccgt

SEQ ID NO: 2074 - DNA, 64 bp, Artificial
  oligonucleotide probe
aagccgtgcgcaacgaatggcgcagcacgctgaacgcgatttgccgcaggctgcacggtcccgt

SEQ ID NO: 2075 - DNA, 64 bp, Artificial
  oligonucleotide probe
cgcattgcggctttcgaacggctgcaagcgcaaacgcgatttgccgcaggctgcacggtcccgt

SEQ ID NO: 2076 - DNA, 64 bp, Artificial
  oligonucleotide probe
aagccgtgcgcaacgaggctttgcgcaccgtgatggcgcagcacgctgccgtcgcaaagcgcac

SEQ ID NO: 2077 - DNA, 64 bp, Artificial
  oligonucleotide probe
aagccgtgcgcaacgaggctttgcgcaccgtgccgtcgcaaagcgcacggctgcacggtcccgt

SEQ ID NO: 2078 - DNA, 64 bp, Artificial
  oligonucleotide probe
ttgcaagcgtccgggaccgtttcggctgggctttcgccgtttgcgctgggctgcacggtcccgt

SEQ ID NO: 2079 - DNA, 64 bp, Artificial
  oligonucleotide probe
atggcgcagcacgctgttcggggaaacgccgtccgtttcggctgggctggctgcacggtcccgt

SEQ ID NO: 2080 - DNA, 64 bp, Artificial
  oligonucleotide probe
aagccgtgcgcaacgattgcaagcgtccgggattcggggaaacgccgtccgtcgcaaagcgcac

SEQ ID NO: 2081 - DNA, 64 bp, Artificial
  oligonucleotide probe
ggctttgcgcaccgtgttcggggaaacgccgtccgtcgcaaagcgcacggctgcacggtcccgt

SEQ ID NO: 2082 - DNA, 64 bp, Artificial
  oligonucleotide probe
aacggctgcaagcgcaccgtttcggctgggctaacgcgatttgccgcattcgccgtttgcgctg

SEQ ID NO: 2083 - DNA, 64 bp, Artificial
  oligonucleotide probe
aagccgtgcgcaacgacgcattgcggctttcgccgtttcggctgggctttcgccgtttgcgctg

SEQ ID NO: 2084 - DNA, 64 bp, Artificial
  oligonucleotide probe
ggctttgcgcaccgtgccgtttcggctgggctaacgcgatttgccgcaccgtcgcaaagcgcac

SEQ ID NO: 2085 - DNA, 64 bp, Artificial
  oligonucleotide probe
aacggctgcaagcgcattcgccgtttgcgctgccgtcgcaaagcgcacggctgcacggtcccgt

SEQ ID NO: 2086 - DNA, 64 bp, Artificial
  oligonucleotide probe
aagccgtgcgcaacgattcggggaaacgccgtccgtcgcaaagcgcacggctgcacggtcccgt

SEQ ID NO: 2087 - DNA, 64 bp, Artificial
  oligonucleotide probe
aacggctgcaagcgcaccgtttcggctgggctaacgcgatttgccgcaggctgcacggtcccgt

SEQ ID NO: 2088 - DNA, 64 bp, Artificial
  oligonucleotide probe
aagccgtgcgcaacgattcggggaaacgccgtaacgcgatttgccgcaccgtcgcaaagcgcac

SEQ ID NO: 2089 - DNA, 64 bp, Artificial
  oligonucleotide probe
cgcattgcggctttcgccgtttcggctgggctccgtcgcaaagcgcacggctgcacggtcccgt

SEQ ID NO: 2090 - DNA, 64 bp, Artificial
  oligonucleotide probe
aagccgtgcgcaacgaggctttgcgcaccgtgatggcgcagcacgctgggctgcacggtcccgt

SEQ ID NO: 2091 - DNA, 64 bp, Artificial
  oligonucleotide probe
cgcattgcggctttcgccgtttcggctgggctaacgcgatttgccgcaggctgcacggtcccgt

SEQ ID NO: 2092 - DNA, 64 bp, Artificial
  oligonucleotide probe
aagccgtgcgcaacgattgcaagcgtccgggaggctttgcgcaccgtgccgtcgcaaagcgcac

SEQ ID NO: 2093 - DNA, 64 bp, Artificial
  oligonucleotide probe
aacggctgcaagcgcaggctttgcgcaccgtgaacgcgatttgccgcaccgtcgcaaagcgcac

SEQ ID NO: 2094 - DNA, 64 bp, Artificial
  oligonucleotide probe
ttcggggaaacgccgtaacgcgatttgccgcattcgccgtttgcgctgggctgcacggtcccgt

SEQ ID NO: 2095 - DNA, 64 bp, Artificial
  oligonucleotide probe
cgcattgcggctttcgaacggctgcaagcgcattcgccgtttgcgctgggctgcacggtcccgt

SEQ ID NO: 2096 - DNA, 64 bp, Artificial
  oligonucleotide probe
aagccgtgcgcaacgaaacggctgcaagcgcaggctttgcgcaccgtgccgtcgcaaagcgcac

SEQ ID NO: 2097 - DNA, 64 bp, Artificial
  oligonucleotide probe
cgcattgcggctttcgggctttgcgcaccgtgccgtcgcaaagcgcacggctgcacggtcccgt

SEQ ID NO: 2098 - DNA, 64 bp, Artificial
  oligonucleotide probe
cgcattgcggctttcgttgcaagcgtccgggaaacgcgatttgccgcaggctgcacggtcccgt

SEQ ID NO: 2099 - DNA, 64 bp, Artificial
  oligonucleotide probe
aagccgtgcgcaacgaggctttgcgcaccgtgaacgcgatttgccgcattcgccgtttgcgctg

SEQ ID NO: 2100 - DNA, 64 bp, Artificial
  oligonucleotide probe
ttgcaagcgtccgggaaacggctgcaagcgcattcgccgtttgcgctgggctgcacggtcccgt

SEQ ID NO: 2101 - DNA, 64 bp, Artificial
  oligonucleotide probe
aagccgtgcgcaacgattgcaagcgtccgggaatggcgcagcacgctgggctgcacggtcccgt

SEQ ID NO: 2102 - DNA, 64 bp, Artificial
  oligonucleotide probe
ttgcaagcgtccgggattcggggaaacgccgtccgtttcggctgggctttcgccgtttgcgctg

SEQ ID NO: 2103 - DNA, 64 bp, Artificial
  oligonucleotide probe
cgcattgcggctttcgttgcaagcgtccgggaccgtttcggctgggctttcgccgtttgcgctg

SEQ ID NO: 2104 - DNA, 64 bp, Artificial
  oligonucleotide probe
cgcattgcggctttcgttcggggaaacgccgtccgtcgcaaagcgcacggctgcacggtcccgt

SEQ ID NO: 2105 - DNA, 64 bp, Artificial
  oligonucleotide probe
aagccgtgcgcaacgaaacgcgatttgccgcaccgtcgcaaagcgcacggctgcacggtcccgt

SEQ ID NO: 2106 - DNA, 64 bp, Artificial
  oligonucleotide probe
ttgcaagcgtccgggaggctttgcgcaccgtgttcggggaaacgccgtccgtcgcaaagcgcac

SEQ ID NO: 2107 - DNA, 64 bp, Artificial
  oligonucleotide probe
aagccgtgcgcaacgattgcaagcgtccgggaccgtttcggctgggctaacgcgatttgccgca

SEQ ID NO: 2108 - DNA, 64 bp, Artificial
  oligonucleotide probe
aagccgtgcgcaacgacgcattgcggctttcgaacggctgcaagcgcattcgccgtttgcgctg

SEQ ID NO: 2109 - DNA, 64 bp, Artificial
  oligonucleotide probe
ggctttgcgcaccgtgatggcgcagcacgctgttcggggaaacgccgtccgtcgcaaagcgcac

SEQ ID NO: 2110 - DNA, 64 bp, Artificial
  oligonucleotide probe
ttgcaagcgtccgggaaacggctgcaagcgcaaacgcgatttgccgcaggctgcacggtcccgt

SEQ ID NO: 2111 - DNA, 64 bp, Artificial
  oligonucleotide probe
atggcgcagcacgctgttcggggaaacgccgtaacgcgatttgccgcaccgtcgcaaagcgcac

SEQ ID NO: 2112 - DNA, 64 bp, Artificial
  oligonucleotide probe
aagccgtgcgcaacgacgcattgcggctttcgccgtcgcaaagcgcacggctgcacggtcccgt

SEQ ID NO: 2113 - DNA, 64 bp, Artificial
  oligonucleotide probe
aagccgtgcgcaacgacgcattgcggctttcgttcggggaaacgccgtttcgccgtttgcgctg

SEQ ID NO: 2114 - DNA, 64 bp, Artificial
  oligonucleotide probe
cgcattgcggctttcgggctttgcgcaccgtgttcggggaaacgccgtccgtcgcaaagcgcac

SEQ ID NO: 2115 - DNA, 64 bp, Artificial
  oligonucleotide probe
aacggctgcaagcgcaggctttgcgcaccgtgatggcgcagcacgctgccgtcgcaaagcgcac

SEQ ID NO: 2116 - DNA, 64 bp, Artificial
  oligonucleotide probe
cgcattgcggctttcgaacggctgcaagcgcaggctttgcgcaccgtgttcgccgtttgcgctg

SEQ ID NO: 2117 - DNA, 64 bp, Artificial
  oligonucleotide probe
aagccgtgcgcaacgaggctttgcgcaccgtgttcgccgtttgcgctgggctgcacggtcccgt

SEQ ID NO: 2118 - DNA, 64 bp, Artificial
  oligonucleotide probe
cgcattgcggctttcgaacggctgcaagcgcaggctttgcgcaccgtgggctgcacggtcccgt

SEQ ID NO: 2119 - DNA, 64 bp, Artificial
  oligonucleotide probe
cgcattgcggctttcgatggcgcagcacgctgttcggggaaacgccgtttcgccgtttgcgctg

SEQ ID NO: 2120 - DNA, 64 bp, Artificial
  oligonucleotide probe
cgcattgcggctttcgttgcaagcgtccgggaccgtcgcaaagcgcacggctgcacggtcccgt

SEQ ID NO: 2121 - DNA, 64 bp, Artificial
  oligonucleotide probe
aagccgtgcgcaacgattgcaagcgtccgggaaacgcgatttgccgcaggctgcacggtcccgt

SEQ ID NO: 2122 - DNA, 64 bp, Artificial
  oligonucleotide probe
atggcgcagcacgctgccgtttcggctgggctccgtcgcaaagcgcacggctgcacggtcccgt

SEQ ID NO: 2123 - DNA, 64 bp, Artificial
  oligonucleotide probe
aagccgtgcgcaacgaaacggctgcaagcgcattcggggaaacgccgtaacgcgatttgccgca

SEQ ID NO: 2124 - DNA, 64 bp, Artificial
  oligonucleotide probe
cgcattgcggctttcgttgcaagcgtccgggaaacggctgcaagcgcaggctgcacggtcccgt

SEQ ID NO: 2125 - DNA, 64 bp, Artificial
  oligonucleotide probe
ggctttgcgcaccgtgatggcgcagcacgctgccgtttcggctgggctggctgcacggtcccgt

SEQ ID NO: 2126 - DNA, 64 bp, Artificial
  oligonucleotide probe
ggctttgcgcaccgtgttcggggaaacgccgtccgtttcggctgggctaacgcgatttgccgca

SEQ ID NO: 2127 - DNA, 64 bp, Artificial
  oligonucleotide probe
cgcattgcggctttcgccgtttcggctgggctaacgcgatttgccgcattcgccgtttgcgctg

SEQ ID NO: 2128 - DNA, 64 bp, Artificial
  oligonucleotide probe
aacggctgcaagcgcaaacgcgatttgccgcaccgtcgcaaagcgcacggctgcacggtcccgt

SEQ ID NO: 2129 - DNA, 64 bp, Artificial
  oligonucleotide probe
aagccgtgcgcaacgattgcaagcgtccgggaccgtttcggctgggctggctgcacggtcccgt

SEQ ID NO: 2130 - DNA, 64 bp, Artificial
  oligonucleotide probe
aagccgtgcgcaacgattgcaagcgtccgggattcggggaaacgccgtaacgcgatttgccgca

SEQ ID NO: 2131 - DNA, 64 bp, Artificial
  oligonucleotide probe
cgcattgcggctttcgaacgcgatttgccgcattcgccgtttgcgctgggctgcacggtcccgt

SEQ ID NO: 2132 - DNA, 64 bp, Artificial
  oligonucleotide probe
cgcattgcggctttcgttcggggaaacgccgtccgtttcggctgggctaacgcgatttgccgca

SEQ ID NO: 2133 - DNA, 64 bp, Artificial
  oligonucleotide probe
aagccgtgcgcaacgattgcaagcgtccgggattcgccgtttgcgctgggctgcacggtcccgt

SEQ ID NO: 2134 - DNA, 64 bp, Artificial
  oligonucleotide probe
aagccgtgcgcaacgacgcattgcggctttcgatggcgcagcacgctgccgtcgcaaagcgcac

SEQ ID NO: 2135 - DNA, 64 bp, Artificial
  oligonucleotide probe
cgcattgcggctttcgatggcgcagcacgctgccgtttcggctgggctccgtcgcaaagcgcac

SEQ ID NO: 2136 - DNA, 64 bp, Artificial
  oligonucleotide probe
aagccgtgcgcaacgaggctttgcgcaccgtgaacgcgatttgccgcaggctgcacggtcccgt

SEQ ID NO: 2137 - DNA, 64 bp, Artificial
  oligonucleotide probe
aacggctgcaagcgcattcggggaaacgccgtccgtttcggctgggctggctgcacggtcccgt

SEQ ID NO: 2138 - DNA, 64 bp, Artificial
  oligonucleotide probe
ttgcaagcgtccgggaaacgcgatttgccgcattcgccgtttgcgctgccgtcgcaaagcgcac

SEQ ID NO: 2139 - DNA, 64 bp, Artificial
  oligonucleotide probe
aacggctgcaagcgcaaacgcgatttgccgcattcgccgtttgcgctgccgtcgcaaagcgcac

SEQ ID NO: 2140 - DNA, 64 bp, Artificial
  oligonucleotide probe
ttgcaagcgtccgggaatggcgcagcacgctgccgtttcggctgggctaacgcgatttgccgca

SEQ ID NO: 2141 - DNA, 64 bp, Artificial
  oligonucleotide probe
aacggctgcaagcgcaccgtttcggctgggctttcgccgtttgcgctgggctgcacggtcccgt

SEQ ID NO: 2142 - DNA, 64 bp, Artificial
  oligonucleotide probe
aagccgtgcgcaacgaggctttgcgcaccgtgttcggggaaacgccgtttcgccgtttgcgctg

SEQ ID NO: 2143 - DNA, 64 bp, Artificial
  oligonucleotide probe
aagccgtgcgcaacgattgcaagcgtccgggaggctttgcgcaccgtgttcgccgtttgcgctg

SEQ ID NO: 2144 - DNA, 64 bp, Artificial
  oligonucleotide probe
cgcattgcggctttcgttgcaagcgtccgggaggctttgcgcaccgtgggctgcacggtcccgt

SEQ ID NO: 2145 - DNA, 64 bp, Artificial
  oligonucleotide probe
cgcattgcggctttcgttgcaagcgtccgggaaacggctgcaagcgcaccgtcgcaaagcgcac

SEQ ID NO: 2146 - DNA, 64 bp, Artificial
  oligonucleotide probe
cgcattgcggctttcgttgcaagcgtccgggattcgccgtttgcgctgggctgcacggtcccgt

SEQ ID NO: 2147 - DNA, 64 bp, Artificial
  oligonucleotide probe
ttgcaagcgtccgggaaacggctgcaagcgcaggctttgcgcaccgtgttcgccgtttgcgctg

SEQ ID NO: 2148 - DNA, 64 bp, Artificial
  oligonucleotide probe
ttgcaagcgtccgggaggctttgcgcaccgtgccgtcgcaaagcgcacggctgcacggtcccgt

SEQ ID NO: 2149 - DNA, 64 bp, Artificial
  oligonucleotide probe
aagccgtgcgcaacgacgcattgcggctttcgttgcaagcgtccgggattcgccgtttgcgctg

SEQ ID NO: 2150 - DNA, 64 bp, Artificial
  oligonucleotide probe
ttgcaagcgtccgggattcgccgtttgcgctgccgtcgcaaagcgcacggctgcacggtcccgt

SEQ ID NO: 2151 - DNA, 64 bp, Artificial
  oligonucleotide probe
cgcattgcggctttcgggctttgcgcaccgtgttcggggaaacgccgtaacgcgatttgccgca

SEQ ID NO: 2152 - DNA, 64 bp, Artificial
  oligonucleotide probe
atggcgcagcacgctgttcggggaaacgccgtaacgcgatttgccgcattcgccgtttgcgctg

SEQ ID NO: 2153 - DNA, 64 bp, Artificial
  oligonucleotide probe
cgcattgcggctttcgttgcaagcgtccgggaggctttgcgcaccgtgaacgcgatttgccgca

SEQ ID NO: 2154 - DNA, 64 bp, Artificial
  oligonucleotide probe
cgcattgcggctttcgttgcaagcgtccgggaatggcgcagcacgctgggctgcacggtcccgt

SEQ ID NO: 2155 - DNA, 64 bp, Artificial
  oligonucleotide probe
ttgcaagcgtccgggaaacggctgcaagcgcattcggggaaacgccgtccgtcgcaaagcgcac

SEQ ID NO: 2156 - DNA, 64 bp, Artificial
  oligonucleotide probe
ggctttgcgcaccgtgatggcgcagcacgctgttcggggaaacgccgtaacgcgatttgccgca

SEQ ID NO: 2157 - DNA, 64 bp, Artificial
  oligonucleotide probe
ttgcaagcgtccgggaggctttgcgcaccgtgaacgcgatttgccgcaggctgcacggtcccgt

SEQ ID NO: 2158 - DNA, 64 bp, Artificial
  oligonucleotide probe
aacggctgcaagcgcaatggcgcagcacgctgttcggggaaacgccgtggctgcacggtcccgt

SEQ ID NO: 2159 - DNA, 64 bp, Artificial
  oligonucleotide probe
aagccgtgcgcaacgaatggcgcagcacgctgttcgccgtttgcgctgccgtcgcaaagcgcac

SEQ ID NO: 2160 - DNA, 64 bp, Artificial
  oligonucleotide probe
ttcggggaaacgccgtccgtttcggctgggctaacgcgatttgccgcaggctgcacggtcccgt

SEQ ID NO: 2161 - DNA, 64 bp, Artificial
  oligonucleotide probe
aagccgtgcgcaacgaggctttgcgcaccgtgttcgccgtttgcgctgccgtcgcaaagcgcac

SEQ ID NO: 2162 - DNA, 64 bp, Artificial
  oligonucleotide probe
aagccgtgcgcaacgattgcaagcgtccgggattcgccgtttgcgctgccgtcgcaaagcgcac

SEQ ID NO: 2163 - DNA, 64 bp, Artificial
  oligonucleotide probe
aagccgtgcgcaacgaccgtttcggctgggctccgtcgcaaagcgcacggctgcacggtcccgt

SEQ ID NO: 2164 - DNA, 64 bp, Artificial
  oligonucleotide probe
cgcattgcggctttcgttgcaagcgtccgggaccgtttcggctgggctggctgcacggtcccgt

SEQ ID NO: 2165 - DNA, 64 bp, Artificial
  oligonucleotide probe
atggcgcagcacgctgccgtttcggctgggctaacgcgatttgccgcaggctgcacggtcccgt

SEQ ID NO: 2166 - DNA, 64 bp, Artificial
  oligonucleotide probe
cgcattgcggctttcgatggcgcagcacgctgccgtttcggctgggctaacgcgatttgccgca

SEQ ID NO: 2167 - DNA, 64 bp, Artificial
  oligonucleotide probe
aagccgtgcgcaacgaggctttgcgcaccgtgccgtttcggctgggctggctgcacggtcccgt

SEQ ID NO: 2168 - DNA, 64 bp, Artificial
  oligonucleotide probe
aagccgtgcgcaacgaaacggctgcaagcgcaatggcgcagcacgctgaacgcgatttgccgca

SEQ ID NO: 2169 - DNA, 64 bp, Artificial
  oligonucleotide probe
cgcattgcggctttcgttgcaagcgtccgggaatggcgcagcacgctgccgtcgcaaagcgcac

SEQ ID NO: 2170 - DNA, 64 bp, Artificial
  oligonucleotide probe
aagccgtgcgcaacgaatggcgcagcacgctgccgtttcggctgggctccgtcgcaaagcgcac

SEQ ID NO: 2171 - DNA, 64 bp, Artificial
  oligonucleotide probe
cgcattgcggctttcgttgcaagcgtccgggaccgtttcggctgggctccgtcgcaaagcgcac

SEQ ID NO: 2172 - DNA, 64 bp, Artificial
  oligonucleotide probe
aagccgtgcgcaacgacgcattgcggctttcgaacggctgcaagcgcaaacgcgatttgccgca

SEQ ID NO: 2173 - DNA, 64 bp, Artificial
  oligonucleotide probe
ttgcaagcgtccgggaatggcgcagcacgctgccgtttcggctgggctccgtcgcaaagcgcac

SEQ ID NO: 2174 - DNA, 64 bp, Artificial
  oligonucleotide probe
aagccgtgcgcaacgattgcaagcgtccgggaatggcgcagcacgctgaacgcgatttgccgca

SEQ ID NO: 2175 - DNA, 64 bp, Artificial
  oligonucleotide probe
aacggctgcaagcgcaccgtttcggctgggctccgtcgcaaagcgcacggctgcacggtcccgt

SEQ ID NO: 2176 - DNA, 64 bp, Artificial
  oligonucleotide probe
ggctttgcgcaccgtgttcggggaaacgccgtccgtttcggctgggctccgtcgcaaagcgcac

SEQ ID NO: 2177 - DNA, 64 bp, Artificial
  oligonucleotide probe
aagccgtgcgcaacgacgcattgcggctttcgatggcgcagcacgctgttcgccgtttgcgctg

SEQ ID NO: 2178 - DNA, 64 bp, Artificial
  oligonucleotide probe
ttgcaagcgtccgggaggctttgcgcaccgtgccgtttcggctgggctaacgcgatttgccgca

SEQ ID NO: 2179 - DNA, 64 bp, Artificial
  oligonucleotide probe
atggcgcagcacgctgttcggggaaacgccgtccgtcgcaaagcgcacggctgcacggtcccgt

SEQ ID NO: 2180 - DNA, 64 bp, Artificial
  oligonucleotide probe
aacggctgcaagcgcattcggggaaacgccgtccgtttcggctgggctttcgccgtttgcgctg

SEQ ID NO: 2181 - DNA, 64 bp, Artificial
  oligonucleotide probe
aacggctgcaagcgcaatggcgcagcacgctgttcggggaaacgccgtaacgcgatttgccgca

SEQ ID NO: 2182 - DNA, 64 bp, Artificial
  oligonucleotide probe
ttgcaagcgtccgggaaacggctgcaagcgcaccgtttcggctgggctttcgccgtttgcgctg

SEQ ID NO: 2183 - DNA, 64 bp, Artificial
  oligonucleotide probe
cgcattgcggctttcgggctttgcgcaccgtgaacgcgatttgccgcaccgtcgcaaagcgcac

SEQ ID NO: 2184 - DNA, 64 bp, Artificial
  oligonucleotide probe
ggctttgcgcaccgtgatggcgcagcacgctgttcggggaaacgccgtttcgccgtttgcgctg

SEQ ID NO: 2185 - DNA, 64 bp, Artificial
  oligonucleotide probe
ggctttgcgcaccgtgccgtttcggctgggctccgtcgcaaagcgcacggctgcacggtcccgt

SEQ ID NO: 2186 - DNA, 64 bp, Artificial
  oligonucleotide probe
cgcattgcggctttcgggctttgcgcaccgtgccgtttcggctgggctggctgcacggtcccgt

SEQ ID NO: 2187 - DNA, 64 bp, Artificial
  oligonucleotide probe
ccgtttcggctgggctaacgcgatttgccgcattcgccgtttgcgctgggctgcacggtcccgt

SEQ ID NO: 2188 - DNA, 64 bp, Artificial
  oligonucleotide probe
ggctttgcgcaccgtgatggcgcagcacgctgccgtttcggctgggctttcgccgtttgcgctg

SEQ ID NO: 2189 - DNA, 64 bp, Artificial
  oligonucleotide probe
ttgcaagcgtccgggattcggggaaacgccgtaacgcgatttgccgcattcgccgtttgcgctg

SEQ ID NO: 2190 - DNA, 64 bp, Artificial
  oligonucleotide probe
ggctttgcgcaccgtgttcggggaaacgccgtttcgccgtttgcgctgggctgcacggtcccgt

SEQ ID NO: 2191 - DNA, 64 bp, Artificial
  oligonucleotide probe
aagccgtgcgcaacgaatggcgcagcacgctgttcggggaaacgccgtaacgcgatttgccgca

SEQ ID NO: 2192 - DNA, 64 bp, Artificial
  oligonucleotide probe
ttgcaagcgtccgggaaacggctgcaagcgcaggctttgcgcaccgtgaacgcgatttgccgca

SEQ ID NO: 2193 - DNA, 64 bp, Artificial
  oligonucleotide probe
ttgcaagcgtccgggaggctttgcgcaccgtgatggcgcagcacgctgggctgcacggtcccgt

SEQ ID NO: 2194 - DNA, 64 bp, Artificial
  oligonucleotide probe
aacggctgcaagcgcaatggcgcagcacgctgttcgccgtttgcgctgggctgcacggtcccgt

SEQ ID NO: 2195 - DNA, 64 bp, Artificial
  oligonucleotide probe
aacggctgcaagcgcattcggggaaacgccgtaacgcgatttgccgcaccgtcgcaaagcgcac

SEQ ID NO: 2196 - DNA, 64 bp, Artificial
  oligonucleotide probe
atggcgcagcacgctgccgtttcggctgggctttcgccgtttgcgctgggctgcacggtcccgt

SEQ ID NO: 2197 - DNA, 64 bp, Artificial
  oligonucleotide probe
ttcggggaaacgccgtccgtttcggctgggctaacgcgatttgccgcaccgtcgcaaagcgcac

SEQ ID NO: 2198 - DNA, 64 bp, Artificial
  oligonucleotide probe
cgcattgcggctttcgttgcaagcgtccgggaaacggctgcaagcgcaaacgcgatttgccgca

SEQ ID NO: 2199 - DNA, 64 bp, Artificial
  oligonucleotide probe
aagccgtgcgcaacgaaacggctgcaagcgcaccgtttcggctgggctaacgcgatttgccgca

SEQ ID NO: 2200 - DNA, 64 bp, Artificial
  oligonucleotide probe
aacggctgcaagcgcaggctttgcgcaccgtgccgtcgcaaagcgcacggctgcacggtcccgt

SEQ ID NO: 2201 - DNA, 64 bp, Artificial
  oligonucleotide probe
ggctttgcgcaccgtgttcgccgtttgcgctgccgtcgcaaagcgcacggctgcacggtcccgt

SEQ ID NO: 2202 - DNA, 64 bp, Artificial
  oligonucleotide probe
aagccgtgcgcaacgaaacggctgcaagcgcaccgtttcggctgggctccgtcgcaaagcgcac

SEQ ID NO: 2203 - DNA, 64 bp, Artificial
  oligonucleotide probe
ttgcaagcgtccgggaggctttgcgcaccgtgatggcgcagcacgctgttcgccgtttgcgctg

SEQ ID NO: 2204 - DNA, 64 bp, Artificial
  oligonucleotide probe
aagccgtgcgcaacgaatggcgcagcacgctgttcggggaaacgccgtccgtcgcaaagcgcac

SEQ ID NO: 2205 - DNA, 64 bp, Artificial
  oligonucleotide probe
aacggctgcaagcgcaggctttgcgcaccgtgatggcgcagcacgctgggctgcacggtcccgt

SEQ ID NO: 2206 - DNA, 64 bp, Artificial
  oligonucleotide probe
cgcattgcggctttcgttgcaagcgtccgggaggctttgcgcaccgtgccgtcgcaaagcgcac

SEQ ID NO: 2207 - DNA, 64 bp, Artificial
  oligonucleotide probe
aagccgtgcgcaacgaccgtttcggctgggctttcgccgtttgcgctgggctgcacggtcccgt

SEQ ID NO: 2208 - DNA, 64 bp, Artificial
  oligonucleotide probe
ttgcaagcgtccgggaaacggctgcaagcgcaccgtttcggctgggctccgtcgcaaagcgcac

SEQ ID NO: 2209 - DNA, 64 bp, Artificial
  oligonucleotide probe
cgcattgcggctttcgccgtttcggctgggctttcgccgtttgcgctgggctgcacggtcccgt

SEQ ID NO: 2210 - DNA, 64 bp, Artificial
  oligonucleotide probe
aagccgtgcgcaacgaatggcgcagcacgctgttcgccgtttgcgctgggctgcacggtcccgt

SEQ ID NO: 2211 - DNA, 64 bp, Artificial
  oligonucleotide probe
aagccgtgcgcaacgacgcattgcggctttcgccgtttcggctgggctggctgcacggtcccgt

SEQ ID NO: 2212 - DNA, 64 bp, Artificial
  oligonucleotide probe
aacggctgcaagcgcaatggcgcagcacgctgccgtttcggctgggctccgtcgcaaagcgcac

SEQ ID NO: 2213 - DNA, 64 bp, Artificial
  oligonucleotide probe
ttgcaagcgtccgggaaacggctgcaagcgcattcggggaaacgccgtaacgcgatttgccgca

SEQ ID NO: 2214 - DNA, 64 bp, Artificial
  oligonucleotide probe
aacggctgcaagcgcaatggcgcagcacgctgttcgccgtttgcgctgccgtcgcaaagcgcac

SEQ ID NO: 2215 - DNA, 64 bp, Artificial
  oligonucleotide probe
ttgcaagcgtccgggaaacggctgcaagcgcaatggcgcagcacgctgaacgcgatttgccgca

SEQ ID NO: 2216 - DNA, 64 bp, Artificial
  oligonucleotide probe
aagccgtgcgcaacgacgcattgcggctttcgggctttgcgcaccgtgccgtcgcaaagcgcac

SEQ ID NO: 2217 - DNA, 64 bp, Artificial
  oligonucleotide probe
aacggctgcaagcgcaggctttgcgcaccgtgttcggggaaacgccgtttcgccgtttgcgctg

SEQ ID NO: 2218 - DNA, 64 bp, Artificial
  oligonucleotide probe
aagccgtgcgcaacgattgcaagcgtccgggaccgtcgcaaagcgcacggctgcacggtcccgt

SEQ ID NO: 2219 - DNA, 64 bp, Artificial
  oligonucleotide probe
ggctttgcgcaccgtgccgtttcggctgggctttcgccgtttgcgctgccgtcgcaaagcgcac

SEQ ID NO: 2220 - DNA, 64 bp, Artificial
  oligonucleotide probe
cgcattgcggctttcgaacggctgcaagcgcaggctttgcgcaccgtgccgtcgcaaagcgcac

SEQ ID NO: 2221 - DNA, 64 bp, Artificial
  oligonucleotide probe
cgcattgcggctttcgaacggctgcaagcgcaatggcgcagcacgctgttcgccgtttgcgctg

SEQ ID NO: 2222 - DNA, 64 bp, Artificial
  oligonucleotide probe
ccgtttcggctgggctaacgcgatttgccgcattcgccgtttgcgctgccgtcgcaaagcgcac

SEQ ID NO: 2223 - DNA, 64 bp, Artificial
  oligonucleotide probe
aagccgtgcgcaacgaatggcgcagcacgctgccgtttcggctgggctaacgcgatttgccgca

SEQ ID NO: 2224 - DNA, 64 bp, Artificial
  oligonucleotide probe
aacggctgcaagcgcaggctttgcgcaccgtgaacgcgatttgccgcaggctgcacggtcccgt

SEQ ID NO: 2225 - DNA, 64 bp, Artificial
  oligonucleotide probe
atggcgcagcacgctgccgtttcggctgggctaacgcgatttgccgcattcgccgtttgcgctg

SEQ ID NO: 2226 - DNA, 64 bp, Artificial
  oligonucleotide probe
ttgcaagcgtccgggaaacgcgatttgccgcattcgccgtttgcgctgggctgcacggtcccgt

SEQ ID NO: 2227 - DNA, 64 bp, Artificial
  oligonucleotide probe
aagccgtgcgcaacgacgcattgcggctttcgatggcgcagcacgctgggctgcacggtcccgt

SEQ ID NO: 2228 - DNA, 64 bp, Artificial
  oligonucleotide probe
ttgcaagcgtccgggaccgtttcggctgggctttcgccgtttgcgctgccgtcgcaaagcgcac

SEQ ID NO: 2229 - DNA, 64 bp, Artificial
  oligonucleotide probe
ttcggggaaacgccgtccgtttcggctgggctccgtcgcaaagcgcacggctgcacggtcccgt

SEQ ID NO: 2230 - DNA, 64 bp, Artificial
  oligonucleotide probe
cgcattgcggctttcgatggcgcagcacgctgttcggggaaacgccgtaacgcgatttgccgca

SEQ ID NO: 2231 - DNA, 64 bp, Artificial
  oligonucleotide probe
ttgcaagcgtccgggaaacggctgcaagcgcaccgtttcggctgggctggctgcacggtcccgt

SEQ ID NO: 2232 - DNA, 64 bp, Artificial
  oligonucleotide probe
aacggctgcaagcgcaatggcgcagcacgctgaacgcgatttgccgcaccgtcgcaaagcgcac

SEQ ID NO: 2233 - DNA, 64 bp, Artificial
  oligonucleotide probe
cgcattgcggctttcgttgcaagcgtccgggattcggggaaacgccgtggctgcacggtcccgt

SEQ ID NO: 2234 - DNA, 64 bp, Artificial
  oligonucleotide probe
aacggctgcaagcgcaggctttgcgcaccgtgccgtttcggctgggctggctgcacggtcccgt

SEQ ID NO: 2235 - DNA, 64 bp, Artificial
  oligonucleotide probe
ttcggggaaacgccgtaacgcgatttgccgcaccgtcgcaaagcgcacggctgcacggtcccgt

SEQ ID NO: 2236 - DNA, 64 bp, Artificial
  oligonucleotide probe
aagccgtgcgcaacgaaacggctgcaagcgcaatggcgcagcacgctgggctgcacggtcccgt

SEQ ID NO: 2237 - DNA, 64 bp, Artificial
  oligonucleotide probe
atggcgcagcacgctgttcggggaaacgccgtttcgccgtttgcgctgccgtcgcaaagcgcac

SEQ ID NO: 2238 - DNA, 64 bp, Artificial
  oligonucleotide probe
ttgcaagcgtccgggaggctttgcgcaccgtgccgtttcggctgggctttcgccgtttgcgctg

SEQ ID NO: 2239 - DNA, 64 bp, Artificial
  oligonucleotide probe
cgcattgcggctttcgttcggggaaacgccgtttcgccgtttgcgctgccgtcgcaaagcgcac

SEQ ID NO: 2240 - DNA, 64 bp, Artificial
  oligonucleotide probe
aagccgtgcgcaacgaatggcgcagcacgctgccgtcgcaaagcgcacggctgcacggtcccgt

SEQ ID NO: 2241 - DNA, 64 bp, Artificial
  oligonucleotide probe
aacggctgcaagcgcaatggcgcagcacgctgaacgcgatttgccgcattcgccgtttgcgctg

SEQ ID NO: 2242 - DNA, 64 bp, Artificial
  oligonucleotide probe
aagccgtgcgcaacgattgcaagcgtccgggaggctttgcgcaccgtgaacgcgatttgccgca

SEQ ID NO: 2243 - DNA, 64 bp, Artificial
  oligonucleotide probe
ttgcaagcgtccgggaatggcgcagcacgctgccgtcgcaaagcgcacggctgcacggtcccgt

SEQ ID NO: 2244 - DNA, 64 bp, Artificial
  oligonucleotide probe
aagccgtgcgcaacgattgcaagcgtccgggaatggcgcagcacgctgttcgccgtttgcgctg

SEQ ID NO: 2245 - DNA, 64 bp, Artificial
  oligonucleotide probe
cgcattgcggctttcgttgcaagcgtccgggaaacgcgatttgccgcattcgccgtttgcgctg

SEQ ID NO: 2246 - DNA, 64 bp, Artificial
  oligonucleotide probe
atggcgcagcacgctgaacgcgatttgccgcattcgccgtttgcgctgggctgcacggtcccgt

SEQ ID NO: 2247 - DNA, 64 bp, Artificial
  oligonucleotide probe
cgcattgcggctttcgggctttgcgcaccgtgccgtttcggctgggctttcgccgtttgcgctg

SEQ ID NO: 2248 - DNA, 64 bp, Artificial
  oligonucleotide probe
cgcattgcggctttcgttcggggaaacgccgtttcgccgtttgcgctgggctgcacggtcccgt

SEQ ID NO: 2249 - DNA, 64 bp, Artificial
  oligonucleotide probe
atggcgcagcacgctgaacgcgatttgccgcattcgccgtttgcgctgccgtcgcaaagcgcac

SEQ ID NO: 2250 - DNA, 64 bp, Artificial
  oligonucleotide probe
atggcgcagcacgctgccgtttcggctgggctaacgcgatttgccgcaccgtcgcaaagcgcac

SEQ ID NO: 2251 - DNA, 64 bp, Artificial
  oligonucleotide probe
aacggctgcaagcgcaggctttgcgcaccgtgttcgccgtttgcgctgccgtcgcaaagcgcac

SEQ ID NO: 2252 - DNA, 64 bp, Artificial
  oligonucleotide probe
aagccgtgcgcaacgacgcattgcggctttcgttcggggaaacgccgtccgtcgcaaagcgcac

SEQ ID NO: 2253 - DNA, 64 bp, Artificial
  oligonucleotide probe
cgcattgcggctttcgatggcgcagcacgctgccgtcgcaaagcgcacggctgcacggtcccgt

SEQ ID NO: 2254 - DNA, 64 bp, Artificial
  oligonucleotide probe
ttgcaagcgtccgggaaacggctgcaagcgcaccgtcgcaaagcgcacggctgcacggtcccgt

SEQ ID NO: 2255 - DNA, 64 bp, Artificial
  oligonucleotide probe
cgcattgcggctttcgatggcgcagcacgctgaacgcgatttgccgcaccgtcgcaaagcgcac

SEQ ID NO: 2256 - DNA, 64 bp, Artificial
  oligonucleotide probe
cgcattgcggctttcgatggcgcagcacgctgccgtttcggctgggctttcgccgtttgcgctg

SEQ ID NO: 2257 - DNA, 64 bp, Artificial
  oligonucleotide probe
ttgcaagcgtccgggaaacggctgcaagcgcaatggcgcagcacgctgccgtcgcaaagcgcac

SEQ ID NO: 2258 - DNA, 64 bp, Artificial
  oligonucleotide probe
ttcggggaaacgccgtttcgccgtttgcgctgccgtcgcaaagcgcacggctgcacggtcccgt

SEQ ID NO: 2259 - DNA, 64 bp, Artificial
  oligonucleotide probe
ttgcaagcgtccgggaggctttgcgcaccgtgccgtttcggctgggctggctgcacggtcccgt

SEQ ID NO: 2260 - DNA, 64 bp, Artificial
  oligonucleotide probe
aacggctgcaagcgcaggctttgcgcaccgtgccgtttcggctgggctaacgcgatttgccgca

SEQ ID NO: 2261 - DNA, 64 bp, Artificial
  oligonucleotide probe
cgcattgcggctttcgttgcaagcgtccgggattcggggaaacgccgtccgtcgcaaagcgcac

SEQ ID NO: 2262 - DNA, 64 bp, Artificial
  oligonucleotide probe
aagccgtgcgcaacgaaacggctgcaagcgcaggctttgcgcaccgtgaacgcgatttgccgca

SEQ ID NO: 2263 - DNA, 64 bp, Artificial
  oligonucleotide probe
ttgcaagcgtccgggattcggggaaacgccgtaacgcgatttgccgcaggctgcacggtcccgt

SEQ ID NO: 2264 - DNA, 64 bp, Artificial
  oligonucleotide probe
aacggctgcaagcgcaatggcgcagcacgctgccgtttcggctgggctggctgcacggtcccgt

SEQ ID NO: 2265 - DNA, 64 bp, Artificial
  oligonucleotide probe
aagccgtgcgcaacgaaacgcgatttgccgcattcgccgtttgcgctgggctgcacggtcccgt

SEQ ID NO: 2266 - DNA, 64 bp, Artificial
  oligonucleotide probe
aagccgtgcgcaacgaaacgcgatttgccgcattcgccgtttgcgctgccgtcgcaaagcgcac

SEQ ID NO: 2267 - DNA, 64 bp, Artificial
  oligonucleotide probe
cgcattgcggctttcgatggcgcagcacgctgttcgccgtttgcgctgggctgcacggtcccgt

SEQ ID NO: 2268 - DNA, 64 bp, Artificial
  oligonucleotide probe
aacggctgcaagcgcattcggggaaacgccgtttcgccgtttgcgctgggctgcacggtcccgt

SEQ ID NO: 2269 - DNA, 64 bp, Artificial
  oligonucleotide probe
aagccgtgcgcaacgaggctttgcgcaccgtgatggcgcagcacgctgttcgccgtttgcgctg

SEQ ID NO: 2270 - DNA, 64 bp, Artificial
  oligonucleotide probe
cgcattgcggctttcgaacggctgcaagcgcattcggggaaacgccgtaacgcgatttgccgca

SEQ ID NO: 2271 - DNA, 64 bp, Artificial
  oligonucleotide probe
ttgcaagcgtccgggaggctttgcgcaccgtgttcggggaaacgccgtttcgccgtttgcgctg

SEQ ID NO: 2272 - DNA, 64 bp, Artificial
  oligonucleotide probe
ttgcaagcgtccgggaggctttgcgcaccgtgttcgccgtttgcgctgggctgcacggtcccgt

SEQ ID NO: 2273 - DNA, 64 bp, Artificial
  oligonucleotide probe
cgcattgcggctttcgaacggctgcaagcgcattcggggaaacgccgtttcgccgtttgcgctg

SEQ ID NO: 2274 - DNA, 64 bp, Artificial
  oligonucleotide probe
ttcggggaaacgccgtaacgcgatttgccgcattcgccgtttgcgctgccgtcgcaaagcgcac

SEQ ID NO: 2275 - DNA, 64 bp, Artificial
  oligonucleotide probe
aacggctgcaagcgcaggctttgcgcaccgtgttcgccgtttgcgctgggctgcacggtcccgt

SEQ ID NO: 2276 - DNA, 64 bp, Artificial
  oligonucleotide probe
ttgcaagcgtccgggaaacgcgatttgccgcaccgtcgcaaagcgcacggctgcacggtcccgt

SEQ ID NO: 2277 - DNA, 64 bp, Artificial
  oligonucleotide probe
cgcattgcggctttcgttcggggaaacgccgtaacgcgatttgccgcaggctgcacggtcccgt

SEQ ID NO: 2278 - DNA, 64 bp, Artificial
  oligonucleotide probe
ggctttgcgcaccgtgatggcgcagcacgctgccgtcgcaaagcgcacggctgcacggtcccgt

SEQ ID NO: 2279 - DNA, 64 bp, Artificial
  oligonucleotide probe
aagccgtgcgcaacgaaacggctgcaagcgcaatggcgcagcacgctgccgtcgcaaagcgcac

SEQ ID NO: 2280 - DNA, 64 bp, Artificial
  oligonucleotide probe
aagccgtgcgcaacgaggctttgcgcaccgtgttcggggaaacgccgtggctgcacggtcccgt

SEQ ID NO: 2281 - DNA, 64 bp, Artificial
  oligonucleotide probe
aagccgtgcgcaacgattgcaagcgtccgggaaacgcgatttgccgcattcgccgtttgcgctg

SEQ ID NO: 2282 - DNA, 64 bp, Artificial
  oligonucleotide probe
cgcattgcggctttcgggctttgcgcaccgtgaacgcgatttgccgcaggctgcacggtcccgt

SEQ ID NO: 2283 - DNA, 64 bp, Artificial
  oligonucleotide probe
ttgcaagcgtccgggattcggggaaacgccgtccgtttcggctgggctggctgcacggtcccgt

SEQ ID NO: 2284 - DNA, 64 bp, Artificial
  oligonucleotide probe
ttgcaagcgtccgggattcggggaaacgccgtttcgccgtttgcgctgccgtcgcaaagcgcac

SEQ ID NO: 2285 - DNA, 64 bp, Artificial
  oligonucleotide probe
cgcattgcggctttcgatggcgcagcacgctgttcggggaaacgccgtggctgcacggtcccgt

SEQ ID NO: 2286 - DNA, 64 bp, Artificial
  oligonucleotide probe
aagccgtgcgcaacgaggctttgcgcaccgtgatggcgcagcacgctgaacgcgatttgccgca

SEQ ID NO: 2287 - DNA, 64 bp, Artificial
  oligonucleotide probe
ggctttgcgcaccgtgccgtttcggctgggctttcgccgtttgcgctgggctgcacggtcccgt

SEQ ID NO: 2288 - DNA, 64 bp, Artificial
  oligonucleotide probe
cgcattgcggctttcgttcggggaaacgccgtccgtttcggctgggctccgtcgcaaagcgcac

SEQ ID NO: 2289 - DNA, 64 bp, Artificial
  oligonucleotide probe
ttgcaagcgtccgggaggctttgcgcaccgtgttcggggaaacgccgtaacgcgatttgccgca

SEQ ID NO: 2290 - DNA, 64 bp, Artificial
  oligonucleotide probe
ttgcaagcgtccgggaggctttgcgcaccgtgatggcgcagcacgctgccgtcgcaaagcgcac

SEQ ID NO: 2291 - DNA, 64 bp, Artificial
  oligonucleotide probe
ggctttgcgcaccgtgatggcgcagcacgctgttcgccgtttgcgctgccgtcgcaaagcgcac

SEQ ID NO: 2292 - DNA, 64 bp, Artificial
  oligonucleotide probe
aagccgtgcgcaacgattcggggaaacgccgtttcgccgtttgcgctgggctgcacggtcccgt

SEQ ID NO: 2293 - DNA, 64 bp, Artificial
  oligonucleotide probe
aagccgtgcgcaacgaaacggctgcaagcgcattcgccgtttgcgctgccgtcgcaaagcgcac

SEQ ID NO: 2294 - DNA, 64 bp, Artificial
  oligonucleotide probe
aagccgtgcgcaacgacgcattgcggctttcgatggcgcagcacgctgaacgcgatttgccgca

SEQ ID NO: 2295 - DNA, 64 bp, Artificial
  oligonucleotide probe
ttgcaagcgtccgggaaacggctgcaagcgcaggctttgcgcaccgtgccgtcgcaaagcgcac

SEQ ID NO: 2296 - DNA, 64 bp, Artificial
  oligonucleotide probe
aacgcgatttgccgcaaacgcgatttgccgcaggctgcacggtcccgtcgcattgcggctttcg

SEQ ID NO: 2297 - DNA, 64 bp, Artificial
  oligonucleotide probe
ccgtcgcaaagcgcacccgtcgcaaagcgcacggctgcacggtcccgtttcggggaaacgccgt

SEQ ID NO: 2298 - DNA, 64 bp, Artificial
  oligonucleotide probe
ccgtcgcaaagcgcacccgtcgcaaagcgcaccgcattgcggctttcgaacggctgcaagcgca

SEQ ID NO: 2299 - DNA, 64 bp, Artificial
  oligonucleotide probe
ccgtcgcaaagcgcacccgtcgcaaagcgcacccgtttcggctgggctaacgcgatttgccgca

SEQ ID NO: 2300 - DNA, 64 bp, Artificial
  oligonucleotide probe
ttcggggaaacgccgtttcggggaaacgccgtttcgccgtttgcgctgggctgcacggtcccgt

SEQ ID NO: 2301 - DNA, 64 bp, Artificial
  oligonucleotide probe
ccgtttcggctgggctccgtttcggctgggctaacgcgatttgccgcaaagccgtgcgcaacga

SEQ ID NO: 2302 - DNA, 64 bp, Artificial
  oligonucleotide probe
atggcgcagcacgctgatggcgcagcacgctgttcggggaaacgccgtccgtcgcaaagcgcac

SEQ ID NO: 2303 - DNA, 64 bp, Artificial
  oligonucleotide probe
ccgtcgcaaagcgcacccgtcgcaaagcgcacggctgcacggtcccgtaacgcgatttgccgca

SEQ ID NO: 2304 - DNA, 64 bp, Artificial
  oligonucleotide probe
ggctttgcgcaccgtgggctttgcgcaccgtgccgtttcggctgggctttcgccgtttgcgctg

SEQ ID NO: 2305 - DNA, 64 bp, Artificial
  oligonucleotide probe
ttcggggaaacgccgtttcggggaaacgccgtaacgcgatttgccgcaggctgcacggtcccgt

SEQ ID NO: 2306 - DNA, 64 bp, Artificial
  oligonucleotide probe
ttgcaagcgtccgggattgcaagcgtccgggaccgtttcggctgggctccgtcgcaaagcgcac

SEQ ID NO: 2307 - DNA, 64 bp, Artificial
  oligonucleotide probe
cgcattgcggctttcgcgcattgcggctttcgggctttgcgcaccgtgaacgcgatttgccgca

SEQ ID NO: 2308 - DNA, 64 bp, Artificial
  oligonucleotide probe
aacggctgcaagcgcaaacggctgcaagcgcattcgccgtttgcgctgcgcattgcggctttcg

SEQ ID NO: 2309 - DNA, 64 bp, Artificial
  oligonucleotide probe
ccgtcgcaaagcgcacccgtcgcaaagcgcacccgtttcggctgggctttcgccgtttgcgctg

SEQ ID NO: 2310 - DNA, 64 bp, Artificial
  oligonucleotide probe
aacgcgatttgccgcaaacgcgatttgccgcaccgtcgcaaagcgcacggctgcacggtcccgt

SEQ ID NO: 2311 - DNA, 64 bp, Artificial
  oligonucleotide probe
ttcgccgtttgcgctgttcgccgtttgcgctgggctgcacggtcccgtccgtttcggctgggct

SEQ ID NO: 2312 - DNA, 64 bp, Artificial
  oligonucleotide probe
ggctgcacggtcccgtggctgcacggtcccgtttcggggaaacgccgtccgtcgcaaagcgcac

SEQ ID NO: 2313 - DNA, 64 bp, Artificial
  oligonucleotide probe
atggcgcagcacgctgatggcgcagcacgctgaacgcgatttgccgcacgcattgcggctttcg

SEQ ID NO: 2314 - DNA, 64 bp, Artificial
  oligonucleotide probe
ggctgcacggtcccgtggctgcacggtcccgtcgcattgcggctttcgatggcgcagcacgctg

SEQ ID NO: 2315 - DNA, 64 bp, Artificial
  oligonucleotide probe
ggctttgcgcaccgtgggctttgcgcaccgtgaacgcgatttgccgcaaagccgtgcgcaacga

SEQ ID NO: 2316 - DNA, 64 bp, Artificial
  oligonucleotide probe
aagccgtgcgcaacgaaagccgtgcgcaacgacgcattgcggctttcgggctgcacggtcccgt

SEQ ID NO: 2317 - DNA, 64 bp, Artificial
  oligonucleotide probe
ggctgcacggtcccgtggctgcacggtcccgtaagccgtgcgcaacgattcggggaaacgccgt

SEQ ID NO: 2318 - DNA, 64 bp, Artificial
  oligonucleotide probe
ccgtcgcaaagcgcacccgtcgcaaagcgcaccgcattgcggctttcgttcgccgtttgcgctg

SEQ ID NO: 2319 - DNA, 64 bp, Artificial
  oligonucleotide probe
ggctgcacggtcccgtggctgcacggtcccgtttgcaagcgtccgggaaacgcgatttgccgca

SEQ ID NO: 2320 - DNA, 64 bp, Artificial
  oligonucleotide probe
aacgcgatttgccgcaaacgcgatttgccgcaaagccgtgcgcaacgaatggcgcagcacgctg

SEQ ID NO: 2321 - DNA, 64 bp, Artificial
  oligonucleotide probe
aacgcgatttgccgcaaacgcgatttgccgcaaagccgtgcgcaacgacgcattgcggctttcg

SEQ ID NO: 2322 - DNA, 64 bp, Artificial
  oligonucleotide probe
aacggctgcaagcgcaaacggctgcaagcgcaggctgcacggtcccgtttgcaagcgtccggga

SEQ ID NO: 2323 - DNA, 64 bp, Artificial
  oligonucleotide probe
ggctgcacggtcccgtggctgcacggtcccgtaacggctgcaagcgcaccgtcgcaaagcgcac

SEQ ID NO: 2324 - DNA, 64 bp, Artificial
  oligonucleotide probe
aacgcgatttgccgcaaacgcgatttgccgcaccgtcgcaaagcgcaccgcattgcggctttcg

SEQ ID NO: 2325 - DNA, 64 bp, Artificial
  oligonucleotide probe
ccgtcgcaaagcgcacccgtcgcaaagcgcacatggcgcagcacgctgttcgccgtttgcgctg

SEQ ID NO: 2326 - DNA, 64 bp, Artificial
  oligonucleotide probe
cgcattgcggctttcgcgcattgcggctttcgccgtttcggctgggctccgtcgcaaagcgcac

SEQ ID NO: 2327 - DNA, 64 bp, Artificial
  oligonucleotide probe
ttcggggaaacgccgtttcggggaaacgccgtggctgcacggtcccgtaacggctgcaagcgca

SEQ ID NO: 2328 - DNA, 64 bp, Artificial
  oligonucleotide probe
ggctgcacggtcccgtggctgcacggtcccgtccgtttcggctgggctccgtcgcaaagcgcac

SEQ ID NO: 2329 - DNA, 64 bp, Artificial
  oligonucleotide probe
ggctgcacggtcccgtggctgcacggtcccgtcgcattgcggctttcgaacgcgatttgccgca

SEQ ID NO: 2330 - DNA, 64 bp, Artificial
  oligonucleotide probe
cgcattgcggctttcgcgcattgcggctttcgttgcaagcgtccgggaggctgcacggtcccgt

SEQ ID NO: 2331 - DNA, 64 bp, Artificial
  oligonucleotide probe
ccgtcgcaaagcgcacccgtcgcaaagcgcacggctttgcgcaccgtgttcggggaaacgccgt

SEQ ID NO: 2332 - DNA, 64 bp, Artificial
  oligonucleotide probe
atggcgcagcacgctgatggcgcagcacgctgccgtttcggctgggctttcgccgtttgcgctg

SEQ ID NO: 2333 - DNA, 64 bp, Artificial
  oligonucleotide probe
aacgcgatttgccgcaaacgcgatttgccgcacgcattgcggctttcgttcggggaaacgccgt

SEQ ID NO: 2334 - DNA, 64 bp, Artificial
  oligonucleotide probe
ccgtcgcaaagcgcacccgtcgcaaagcgcaccgcattgcggctttcgaacgcgatttgccgca

SEQ ID NO: 2335 - DNA, 64 bp, Artificial
  oligonucleotide probe
ggctgcacggtcccgtggctgcacggtcccgtcgcattgcggctttcgaacggctgcaagcgca

SEQ ID NO: 2336 - DNA, 64 bp, Artificial
  oligonucleotide probe
atggcgcagcacgctgatggcgcagcacgctgccgtcgcaaagcgcaccgcattgcggctttcg

SEQ ID NO: 2337 - DNA, 64 bp, Artificial
  oligonucleotide probe
ttcgccgtttgcgctgttcgccgtttgcgctgaagccgtgcgcaacgaccgtttcggctgggct

SEQ ID NO: 2338 - DNA, 64 bp, Artificial
  oligonucleotide probe
ttgcaagcgtccgggattgcaagcgtccgggaatggcgcagcacgctgggctgcacggtcccgt

SEQ ID NO: 2339 - DNA, 64 bp, Artificial
  oligonucleotide probe
ggctttgcgcaccgtgggctttgcgcaccgtgaacgcgatttgccgcaccgtcgcaaagcgcac

SEQ ID NO: 2340 - DNA, 64 bp, Artificial
  oligonucleotide probe
ggctttgcgcaccgtgggctttgcgcaccgtgatggcgcagcacgctgttcgccgtttgcgctg

SEQ ID NO: 2341 - DNA, 64 bp, Artificial
  oligonucleotide probe
ttcggggaaacgccgtttcggggaaacgccgtaacgcgatttgccgcaaacggctgcaagcgca

SEQ ID NO: 2342 - DNA, 64 bp, Artificial
  oligonucleotide probe
ccgtcgcaaagcgcacccgtcgcaaagcgcacaagccgtgcgcaacgattcggggaaacgccgt

SEQ ID NO: 2343 - DNA, 64 bp, Artificial
  oligonucleotide probe
aacggctgcaagcgcaaacggctgcaagcgcaccgtcgcaaagcgcacggctgcacggtcccgt

SEQ ID NO: 2344 - DNA, 64 bp, Artificial
  oligonucleotide probe
atggcgcagcacgctgatggcgcagcacgctgccgtcgcaaagcgcacggctgcacggtcccgt

SEQ ID NO: 2345 - DNA, 64 bp, Artificial
  oligonucleotide probe
aacgcgatttgccgcaaacgcgatttgccgcaggctgcacggtcccgtggctttgcgcaccgtg

SEQ ID NO: 2346 - DNA, 64 bp, Artificial
  oligonucleotide probe
aacggctgcaagcgcaaacggctgcaagcgcaaacgcgatttgccgcaccgtcgcaaagcgcac

SEQ ID NO: 2347 - DNA, 64 bp, Artificial
  oligonucleotide probe
ccgtttcggctgggctccgtttcggctgggctccgtcgcaaagcgcaccgcattgcggctttcg

SEQ ID NO: 2348 - DNA, 64 bp, Artificial
  oligonucleotide probe
ttcgccgtttgcgctgttcgccgtttgcgctgccgtcgcaaagcgcacttcggggaaacgccgt

SEQ ID NO: 2349 - DNA, 64 bp, Artificial
  oligonucleotide probe
atggcgcagcacgctgatggcgcagcacgctgttcggggaaacgccgtggctgcacggtcccgt

SEQ ID NO: 2350 - DNA, 64 bp, Artificial
  oligonucleotide probe
ttcgccgtttgcgctgttcgccgtttgcgctgcgcattgcggctttcgaacgcgatttgccgca

SEQ ID NO: 2351 - DNA, 64 bp, Artificial
  oligonucleotide probe
aagccgtgcgcaacgaaagccgtgcgcaacgaaacgcgatttgccgcattcgccgtttgcgctg

SEQ ID NO: 2352 - DNA, 64 bp, Artificial
  oligonucleotide probe
ttgcaagcgtccgggattgcaagcgtccgggaaacgcgatttgccgcaggctgcacggtcccgt

SEQ ID NO: 2353 - DNA, 64 bp, Artificial
  oligonucleotide probe
aacggctgcaagcgcaaacggctgcaagcgcaccgtcgcaaagcgcacttgcaagcgtccggga

SEQ ID NO: 2354 - DNA, 64 bp, Artificial
  oligonucleotide probe
ccgtttcggctgggctccgtttcggctgggctttcgccgtttgcgctgggctttgcgcaccgtg

SEQ ID NO: 2355 - DNA, 64 bp, Artificial
  oligonucleotide probe
ttcgccgtttgcgctgttcgccgtttgcgctgttgcaagcgtccgggaaacgcgatttgccgca

SEQ ID NO: 2356 - DNA, 64 bp, Artificial
  oligonucleotide probe
aagccgtgcgcaacgaaagccgtgcgcaacgaaacgcgatttgccgcaggctgcacggtcccgt

SEQ ID NO: 2357 - DNA, 64 bp, Artificial
  oligonucleotide probe
atggcgcagcacgctgatggcgcagcacgctgaacgcgatttgccgcaaagccgtgcgcaacga

SEQ ID NO: 2358 - DNA, 64 bp, Artificial
  oligonucleotide probe
aacgcgatttgccgcaaacgcgatttgccgcaaagccgtgcgcaacgaggctttgcgcaccgtg

SEQ ID NO: 2359 - DNA, 64 bp, Artificial
  oligonucleotide probe
atggcgcagcacgctgatggcgcagcacgctgggctgcacggtcccgtaagccgtgcgcaacga

SEQ ID NO: 2360 - DNA, 64 bp, Artificial
  oligonucleotide probe
ttcgccgtttgcgctgttcgccgtttgcgctgttgcaagcgtccgggaatggcgcagcacgctg

SEQ ID NO: 2361 - DNA, 64 bp, Artificial
  oligonucleotide probe
ggctttgcgcaccgtgggctttgcgcaccgtgaacgcgatttgccgcacgcattgcggctttcg

SEQ ID NO: 2362 - DNA, 64 bp, Artificial
  oligonucleotide probe
ggctgcacggtcccgtggctgcacggtcccgtaagccgtgcgcaacgaaacgcgatttgccgca

SEQ ID NO: 2363 - DNA, 64 bp, Artificial
  oligonucleotide probe
aacgcgatttgccgcaaacgcgatttgccgcaatggcgcagcacgctgttcggggaaacgccgt

SEQ ID NO: 2364 - DNA, 64 bp, Artificial
  oligonucleotide probe
cgcattgcggctttcgcgcattgcggctttcgttgcaagcgtccgggaccgtcgcaaagcgcac

SEQ ID NO: 2365 - DNA, 64 bp, Artificial
  oligonucleotide probe
ggctgcacggtcccgtggctgcacggtcccgtaacggctgcaagcgcattcggggaaacgccgt

SEQ ID NO: 2366 - DNA, 64 bp, Artificial
  oligonucleotide probe
ttcggggaaacgccgtttcggggaaacgccgtccgtcgcaaagcgcacaacggctgcaagcgca

SEQ ID NO: 2367 - DNA, 64 bp, Artificial
  oligonucleotide probe
ccgtcgcaaagcgcacccgtcgcaaagcgcacttgcaagcgtccgggaaacgcgatttgccgca

SEQ ID NO: 2368 - DNA, 64 bp, Artificial
  oligonucleotide probe
ttgcaagcgtccgggattgcaagcgtccgggaaacggctgcaagcgcattcgccgtttgcgctg

SEQ ID NO: 2369 - DNA, 64 bp, Artificial
  oligonucleotide probe
aagccgtgcgcaacgaaagccgtgcgcaacgaccgtcgcaaagcgcacggctgcacggtcccgt

SEQ ID NO: 2370 - DNA, 64 bp, Artificial
  oligonucleotide probe
ggctgcacggtcccgtggctgcacggtcccgtaacgcgatttgccgcaccgtcgcaaagcgcac

SEQ ID NO: 2371 - DNA, 64 bp, Artificial
  oligonucleotide probe
ttcgccgtttgcgctgttcgccgtttgcgctgggctgcacggtcccgtatggcgcagcacgctg

SEQ ID NO: 2372 - DNA, 64 bp, Artificial
  oligonucleotide probe
ggctgcacggtcccgtggctgcacggtcccgtaacggctgcaagcgcaggctttgcgcaccgtg

SEQ ID NO: 2373 - DNA, 64 bp, Artificial
  oligonucleotide probe
ccgtttcggctgggctccgtttcggctgggctccgtcgcaaagcgcacaacggctgcaagcgca

SEQ ID NO: 2374 - DNA, 64 bp, Artificial
  oligonucleotide probe
aagccgtgcgcaacgaaagccgtgcgcaacgattcggggaaacgccgtttcgccgtttgcgctg

SEQ ID NO: 2375 - DNA, 64 bp, Artificial
  oligonucleotide probe
atggcgcagcacgctgatggcgcagcacgctgaacgcgatttgccgcattgcaagcgtccggga

SEQ ID NO: 2376 - DNA, 64 bp, Artificial
  oligonucleotide probe
ccgtcgcaaagcgcacccgtcgcaaagcgcacttgcaagcgtccgggaccgtttcggctgggct

SEQ ID NO: 2377 - DNA, 64 bp, Artificial
  oligonucleotide probe
atggcgcagcacgctgatggcgcagcacgctgccgtttcggctgggctaacgcgatttgccgca

SEQ ID NO: 2378 - DNA, 64 bp, Artificial
  oligonucleotide probe
aacggctgcaagcgcaaacggctgcaagcgcaaacgcgatttgccgcacgcattgcggctttcg

SEQ ID NO: 2379 - DNA, 64 bp, Artificial
  oligonucleotide probe
ccgtcgcaaagcgcacccgtcgcaaagcgcacggctgcacggtcccgtccgtttcggctgggct

SEQ ID NO: 2380 - DNA, 64 bp, Artificial
  oligonucleotide probe
aagccgtgcgcaacgaaagccgtgcgcaacgacgcattgcggctttcgccgtcgcaaagcgcac

SEQ ID NO: 2381 - DNA, 64 bp, Artificial
  oligonucleotide probe
cgcattgcggctttcgcgcattgcggctttcgatggcgcagcacgctgaacgcgatttgccgca

SEQ ID NO: 2382 - DNA, 64 bp, Artificial
  oligonucleotide probe
ccgtcgcaaagcgcacccgtcgcaaagcgcacatggcgcagcacgctgttcggggaaacgccgt

SEQ ID NO: 2383 - DNA, 64 bp, Artificial
  oligonucleotide probe
ccgtcgcaaagcgcacccgtcgcaaagcgcacggctttgcgcaccgtgttcgccgtttgcgctg

SEQ ID NO: 2384 - DNA, 64 bp, Artificial
  oligonucleotide probe
aacgcgatttgccgcaaacgcgatttgccgcattgcaagcgtccgggaaacggctgcaagcgca

SEQ ID NO: 2385 - DNA, 64 bp, Artificial
  oligonucleotide probe
ccgtcgcaaagcgcacccgtcgcaaagcgcacttgcaagcgtccgggaatggcgcagcacgctg

SEQ ID NO: 2386 - DNA, 64 bp, Artificial
  oligonucleotide probe
ttcgccgtttgcgctgttcgccgtttgcgctgttgcaagcgtccgggaccgtttcggctgggct

SEQ ID NO: 2387 - DNA, 64 bp, Artificial
  oligonucleotide probe
ttcggggaaacgccgtttcggggaaacgccgtccgtttcggctgggctccgtcgcaaagcgcac

SEQ ID NO: 2388 - DNA, 64 bp, Artificial
  oligonucleotide probe
aacgcgatttgccgcaaacgcgatttgccgcaaagccgtgcgcaacgattcggggaaacgccgt

SEQ ID NO: 2389 - DNA, 64 bp, Artificial
  oligonucleotide probe
atggcgcagcacgctgatggcgcagcacgctgttcgccgtttgcgctgaagccgtgcgcaacga

SEQ ID NO: 2390 - DNA, 64 bp, Artificial
  oligonucleotide probe
ccgtcgcaaagcgcacccgtcgcaaagcgcacaagccgtgcgcaacgacgcattgcggctttcg

SEQ ID NO: 2391 - DNA, 64 bp, Artificial
  oligonucleotide probe
aacgcgatttgccgcaaacgcgatttgccgcattcgccgtttgcgctgaagccgtgcgcaacga

SEQ ID NO: 2392 - DNA, 64 bp, Artificial
  oligonucleotide probe
atggcgcagcacgctgatggcgcagcacgctgaacgcgatttgccgcaggctgcacggtcccgt

SEQ ID NO: 2393 - DNA, 64 bp, Artificial
  oligonucleotide probe
aacgcgatttgccgcaaacgcgatttgccgcattcgccgtttgcgctgaacggctgcaagcgca

SEQ ID NO: 2394 - DNA, 64 bp, Artificial
  oligonucleotide probe
ccgtttcggctgggctccgtttcggctgggctaacgcgatttgccgcattgcaagcgtccggga

SEQ ID NO: 2395 - DNA, 64 bp, Artificial
  oligonucleotide probe
ggctttgcgcaccgtgggctttgcgcaccgtgccgtcgcaaagcgcacaacggctgcaagcgca

SEQ ID NO: 2396 - DNA, 64 bp, Artificial
  oligonucleotide probe
aacgcgatttgccgcaaacgcgatttgccgcattgcaagcgtccgggattcggggaaacgccgt

SEQ ID NO: 2397 - DNA, 64 bp, Artificial
  oligonucleotide probe
atggcgcagcacgctgatggcgcagcacgctgttcggggaaacgccgtttcgccgtttgcgctg

SEQ ID NO: 2398 - DNA, 64 bp, Artificial
  oligonucleotide probe
ggctgcacggtcccgtggctgcacggtcccgtaagccgtgcgcaacgaaacggctgcaagcgca

SEQ ID NO: 2399 - DNA, 64 bp, Artificial
  oligonucleotide probe
ccgtcgcaaagcgcacccgtcgcaaagcgcacaacggctgcaagcgcaccgtttcggctgggct

SEQ ID NO: 2400 - DNA, 64 bp, Artificial
  oligonucleotide probe
ggctttgcgcaccgtgggctttgcgcaccgtgttcgccgtttgcgctgttgcaagcgtccggga

SEQ ID NO: 2401 - DNA, 64 bp, Artificial
  oligonucleotide probe
aagccgtgcgcaacgaaagccgtgcgcaacgaccgtttcggctgggctttcgccgtttgcgctg

SEQ ID NO: 2402 - DNA, 64 bp, Artificial
  oligonucleotide probe
atggcgcagcacgctgatggcgcagcacgctgttcgccgtttgcgctgaacggctgcaagcgca

SEQ ID NO: 2403 - DNA, 64 bp, Artificial
  oligonucleotide probe
atggcgcagcacgctgatggcgcagcacgctgccgtttcggctgggctggctgcacggtcccgt

SEQ ID NO: 2404 - DNA, 64 bp, Artificial
  oligonucleotide probe
ttcggggaaacgccgtttcggggaaacgccgtccgtttcggctgggctttcgccgtttgcgctg

SEQ ID NO: 2405 - DNA, 64 bp, Artificial
  oligonucleotide probe
ggctttgcgcaccgtgggctttgcgcaccgtgttcggggaaacgccgtccgtcgcaaagcgcac

SEQ ID NO: 2406 - DNA, 64 bp, Artificial
  oligonucleotide probe
ggctgcacggtcccgtggctgcacggtcccgtggctttgcgcaccgtgccgtttcggctgggct

SEQ ID NO: 2407 - DNA, 64 bp, Artificial
  oligonucleotide probe
ttcgccgtttgcgctgttcgccgtttgcgctgggctgcacggtcccgtaagccgtgcgcaacga

SEQ ID NO: 2408 - DNA, 64 bp, Artificial
  oligonucleotide probe
ttcgccgtttgcgctgttcgccgtttgcgctgttgcaagcgtccgggaaacggctgcaagcgca

SEQ ID NO: 2409 - DNA, 64 bp, Artificial
  oligonucleotide probe
ttcggggaaacgccgtttcggggaaacgccgtaacgcgatttgccgcacgcattgcggctttcg

SEQ ID NO: 2410 - DNA, 64 bp, Artificial
  oligonucleotide probe
ggctgcacggtcccgtggctgcacggtcccgtttgcaagcgtccgggattcgccgtttgcgctg

SEQ ID NO: 2411 - DNA, 64 bp, Artificial
  oligonucleotide probe
aagccgtgcgcaacgaaagccgtgcgcaacgattgcaagcgtccgggattcgccgtttgcgctg

SEQ ID NO: 2412 - DNA, 64 bp, Artificial
  oligonucleotide probe
ttcgccgtttgcgctgttcgccgtttgcgctgccgtcgcaaagcgcacccgtttcggctgggct

SEQ ID NO: 2413 - DNA, 64 bp, Artificial
  oligonucleotide probe
ccgtttcggctgggctccgtttcggctgggctaacgcgatttgccgcaaacggctgcaagcgca

SEQ ID NO: 2414 - DNA, 64 bp, Artificial
  oligonucleotide probe
ccgtttcggctgggctccgtttcggctgggctggctgcacggtcccgtggctttgcgcaccgtg

SEQ ID NO: 2415 - DNA, 64 bp, Artificial
  oligonucleotide probe
ccgtcgcaaagcgcacccgtcgcaaagcgcacggctgcacggtcccgtttcgccgtttgcgctg

SEQ ID NO: 2416 - DNA, 64 bp, Artificial
  oligonucleotide probe
ccgtttcggctgggctccgtttcggctgggctaacgcgatttgccgcaggctgcacggtcccgt

SEQ ID NO: 2417 - DNA, 64 bp, Artificial
  oligonucleotide probe
ggctgcacggtcccgtggctgcacggtcccgtttgcaagcgtccgggaaacggctgcaagcgca

SEQ ID NO: 2418 - DNA, 64 bp, Artificial
  oligonucleotide probe
ccgtcgcaaagcgcacccgtcgcaaagcgcacaagccgtgcgcaacgaggctttgcgcaccgtg

SEQ ID NO: 2419 - DNA, 64 bp, Artificial
  oligonucleotide probe
ttgcaagcgtccgggattgcaagcgtccgggattcgccgtttgcgctgcgcattgcggctttcg

SEQ ID NO: 2420 - DNA, 64 bp, Artificial
  oligonucleotide probe
ccgtttcggctgggctccgtttcggctgggctccgtcgcaaagcgcacaagccgtgcgcaacga

SEQ ID NO: 2421 - DNA, 64 bp, Artificial
  oligonucleotide probe
aagccgtgcgcaacgaaagccgtgcgcaacgaaacggctgcaagcgcaaacgcgatttgccgca

SEQ ID NO: 2422 - DNA, 64 bp, Artificial
  oligonucleotide probe
atggcgcagcacgctgatggcgcagcacgctgaacgcgatttgccgcaaacggctgcaagcgca

SEQ ID NO: 2423 - DNA, 64 bp, Artificial
  oligonucleotide probe
ttcggggaaacgccgtttcggggaaacgccgtggctgcacggtcccgtcgcattgcggctttcg

SEQ ID NO: 2424 - DNA, 64 bp, Artificial
  oligonucleotide probe
aacggctgcaagcgcaaacggctgcaagcgcaccgtttcggctgggctggctgcacggtcccgt

SEQ ID NO: 2425 - DNA, 64 bp, Artificial
  oligonucleotide probe
ggctttgcgcaccgtgggctttgcgcaccgtgaacgcgatttgccgcaaacggctgcaagcgca

SEQ ID NO: 2426 - DNA, 64 bp, Artificial
  oligonucleotide probe
aacggctgcaagcgcaaacggctgcaagcgcaatggcgcagcacgctgccgtcgcaaagcgcac

SEQ ID NO: 2427 - DNA, 64 bp, Artificial
  oligonucleotide probe
ggctgcacggtcccgtggctgcacggtcccgtggctttgcgcaccgtgaacgcgatttgccgca

SEQ ID NO: 2428 - DNA, 64 bp, Artificial
  oligonucleotide probe
atggcgcagcacgctgatggcgcagcacgctgccgtttcggctgggctccgtcgcaaagcgcac

SEQ ID NO: 2429 - DNA, 64 bp, Artificial
  oligonucleotide probe
ggctgcacggtcccgtggctgcacggtcccgtttcggggaaacgccgtttcgccgtttgcgctg

SEQ ID NO: 2430 - DNA, 64 bp, Artificial
  oligonucleotide probe
cgcattgcggctttcgcgcattgcggctttcgccgtcgcaaagcgcacaagccgtgcgcaacga

SEQ ID NO: 2431 - DNA, 64 bp, Artificial
  oligonucleotide probe
ggctgcacggtcccgtggctgcacggtcccgtggctttgcgcaccgtgttcgccgtttgcgctg

SEQ ID NO: 2432 - DNA, 64 bp, Artificial
  oligonucleotide probe
aacgcgatttgccgcaaacgcgatttgccgcattcgccgtttgcgctgcgcattgcggctttcg

SEQ ID NO: 2433 - DNA, 64 bp, Artificial
  oligonucleotide probe
aacgcgatttgccgcaaacgcgatttgccgcaaagccgtgcgcaacgaaacggctgcaagcgca

SEQ ID NO: 2434 - DNA, 64 bp, Artificial
  oligonucleotide probe
ttcggggaaacgccgtttcggggaaacgccgtccgtttcggctgggctaacgcgatttgccgca

SEQ ID NO: 2435 - DNA, 64 bp, Artificial
  oligonucleotide probe
cgcattgcggctttcgcgcattgcggctttcgttcggggaaacgccgtttcgccgtttgcgctg

SEQ ID NO: 2436 - DNA, 64 bp, Artificial
  oligonucleotide probe
ttgcaagcgtccgggattgcaagcgtccgggaggctttgcgcaccgtgttcgccgtttgcgctg

SEQ ID NO: 2437 - DNA, 64 bp, Artificial
  oligonucleotide probe
cgcattgcggctttcgcgcattgcggctttcgaacgcgatttgccgcaggctgcacggtcccgt

SEQ ID NO: 2438 - DNA, 64 bp, Artificial
  oligonucleotide probe
aacgcgatttgccgcaaacgcgatttgccgcattcgccgtttgcgctgttcggggaaacgccgt

SEQ ID NO: 2439 - DNA, 64 bp, Artificial
  oligonucleotide probe
ttcgccgtttgcgctgttcgccgtttgcgctgcgcattgcggctttcgccgtttcggctgggct

SEQ ID NO: 2440 - DNA, 64 bp, Artificial
  oligonucleotide probe
aacgcgatttgccgcaaacgcgatttgccgcattgcaagcgtccgggaccgtttcggctgggct

SEQ ID NO: 2441 - DNA, 64 bp, Artificial
  oligonucleotide probe
ggctgcacggtcccgtggctgcacggtcccgtatggcgcagcacgctgttcgccgtttgcgctg

SEQ ID NO: 2442 - DNA, 64 bp, Artificial
  oligonucleotide probe
aacgcgatttgccgcaaacgcgatttgccgcacgcattgcggctttcgggctttgcgcaccgtg

SEQ ID NO: 2443 - DNA, 64 bp, Artificial
  oligonucleotide probe
aacgcgatttgccgcaaacgcgatttgccgcacgcattgcggctttcgccgtttcggctgggct

SEQ ID NO: 2444 - DNA, 64 bp, Artificial
  oligonucleotide probe
aacggctgcaagcgcaaacggctgcaagcgcaggctgcacggtcccgtaagccgtgcgcaacga

SEQ ID NO: 2445 - DNA, 64 bp, Artificial
  oligonucleotide probe
cgcattgcggctttcgcgcattgcggctttcgttgcaagcgtccgggattcgccgtttgcgctg

SEQ ID NO: 2446 - DNA, 64 bp, Artificial
  oligonucleotide probe
aacggctgcaagcgcaaacggctgcaagcgcaccgtttcggctgggctccgtcgcaaagcgcac

SEQ ID NO: 2447 - DNA, 64 bp, Artificial
  oligonucleotide probe
ttcgccgtttgcgctgttcgccgtttgcgctgggctgcacggtcccgtaacgcgatttgccgca

SEQ ID NO: 2448 - DNA, 64 bp, Artificial
  oligonucleotide probe
ttgcaagcgtccgggattgcaagcgtccgggaggctttgcgcaccgtgccgtcgcaaagcgcac

SEQ ID NO: 2449 - DNA, 64 bp, Artificial
  oligonucleotide probe
ttcgccgtttgcgctgttcgccgtttgcgctgccgtcgcaaagcgcacggctttgcgcaccgtg

SEQ ID NO: 2450 - DNA, 64 bp, Artificial
  oligonucleotide probe
ggctgcacggtcccgtggctgcacggtcccgtaagccgtgcgcaacgaccgtttcggctgggct

SEQ ID NO: 2451 - DNA, 64 bp, Artificial
  oligonucleotide probe
aacggctgcaagcgcaaacggctgcaagcgcattcggggaaacgccgtggctgcacggtcccgt

SEQ ID NO: 2452 - DNA, 64 bp, Artificial
  oligonucleotide probe
aagccgtgcgcaacgaaagccgtgcgcaacgaaacggctgcaagcgcattcgccgtttgcgctg

SEQ ID NO: 2453 - DNA, 64 bp, Artificial
  oligonucleotide probe
aacggctgcaagcgcaaacggctgcaagcgcattcgccgtttgcgctgggctgcacggtcccgt

SEQ ID NO: 2454 - DNA, 64 bp, Artificial
  oligonucleotide probe
ccgtcgcaaagcgcacccgtcgcaaagcgcaccgcattgcggctttcgttcggggaaacgccgt

SEQ ID NO: 2455 - DNA, 64 bp, Artificial
  oligonucleotide probe
ttcggggaaacgccgtttcggggaaacgccgtccgtcgcaaagcgcacttgcaagcgtccggga

SEQ ID NO: 2456 - DNA, 64 bp, Artificial
  oligonucleotide probe
ggctgcacggtcccgtggctgcacggtcccgtatggcgcagcacgctgccgtttcggctgggct

SEQ ID NO: 2457 - DNA, 64 bp, Artificial
  oligonucleotide probe
ttcgccgtttgcgctgttcgccgtttgcgctgcgcattgcggctttcgttgcaagcgtccggga

SEQ ID NO: 2458 - DNA, 64 bp, Artificial
  oligonucleotide probe
cgcattgcggctttcgcgcattgcggctttcgggctttgcgcaccgtgggctgcacggtcccgt

SEQ ID NO: 2459 - DNA, 64 bp, Artificial
  oligonucleotide probe
ccgtttcggctgggctccgtttcggctgggctggctgcacggtcccgtttgcaagcgtccggga

SEQ ID NO: 2460 - DNA, 64 bp, Artificial
  oligonucleotide probe
cgcattgcggctttcgcgcattgcggctttcgggctgcacggtcccgtaagccgtgcgcaacga

SEQ ID NO: 2461 - DNA, 64 bp, Artificial
  oligonucleotide probe
ccgtttcggctgggctccgtttcggctgggctggctgcacggtcccgtcgcattgcggctttcg

SEQ ID NO: 2462 - DNA, 64 bp, Artificial
  oligonucleotide probe
ttcgccgtttgcgctgttcgccgtttgcgctgaagccgtgcgcaacgacgcattgcggctttcg

SEQ ID NO: 2463 - DNA, 64 bp, Artificial
  oligonucleotide probe
ccgtttcggctgggctccgtttcggctgggctttcgccgtttgcgctgatggcgcagcacgctg

SEQ ID NO: 2464 - DNA, 64 bp, Artificial
  oligonucleotide probe
atggcgcagcacgctgatggcgcagcacgctgttcgccgtttgcgctgcgcattgcggctttcg

SEQ ID NO: 2465 - DNA, 64 bp, Artificial
  oligonucleotide probe
aacggctgcaagcgcaaacggctgcaagcgcaatggcgcagcacgctgaacgcgatttgccgca

SEQ ID NO: 2466 - DNA, 64 bp, Artificial
  oligonucleotide probe
ttcgccgtttgcgctgttcgccgtttgcgctgccgtcgcaaagcgcacatggcgcagcacgctg

SEQ ID NO: 2467 - DNA, 64 bp, Artificial
  oligonucleotide probe
ttcgccgtttgcgctgttcgccgtttgcgctgaacggctgcaagcgcattcggggaaacgccgt

SEQ ID NO: 2468 - DNA, 64 bp, Artificial
  oligonucleotide probe
atggcgcagcacgctgatggcgcagcacgctgccgtcgcaaagcgcacttgcaagcgtccggga

SEQ ID NO: 2469 - DNA, 64 bp, Artificial
  oligonucleotide probe
ccgtttcggctgggctccgtttcggctgggctccgtcgcaaagcgcacatggcgcagcacgctg

SEQ ID NO: 2470 - DNA, 64 bp, Artificial
  oligonucleotide probe
aacggctgcaagcgcaaacggctgcaagcgcattcggggaaacgccgtccgtcgcaaagcgcac

SEQ ID NO: 2471 - DNA, 64 bp, Artificial
  oligonucleotide probe
ggctgcacggtcccgtggctgcacggtcccgtaagccgtgcgcaacgaatggcgcagcacgctg

SEQ ID NO: 2472 - DNA, 64 bp, Artificial
  oligonucleotide probe
aacggctgcaagcgcaaacggctgcaagcgcaccgtcgcaaagcgcacaagccgtgcgcaacga

SEQ ID NO: 2473 - DNA, 64 bp, Artificial
  oligonucleotide probe
atggcgcagcacgctgatggcgcagcacgctgccgtcgcaaagcgcacggctttgcgcaccgtg

SEQ ID NO: 2474 - DNA, 64 bp, Artificial
  oligonucleotide probe
ggctgcacggtcccgtggctgcacggtcccgtaagccgtgcgcaacgattcgccgtttgcgctg

SEQ ID NO: 2475 - DNA, 64 bp, Artificial
  oligonucleotide probe
aacgcgatttgccgcaaacgcgatttgccgcattgcaagcgtccgggaatggcgcagcacgctg

SEQ ID NO: 2476 - DNA, 64 bp, Artificial
  oligonucleotide probe
atggcgcagcacgctgatggcgcagcacgctgggctgcacggtcccgtggctttgcgcaccgtg

SEQ ID NO: 2477 - DNA, 64 bp, Artificial
  oligonucleotide probe
ttcgccgtttgcgctgttcgccgtttgcgctgaacggctgcaagcgcaatggcgcagcacgctg

SEQ ID NO: 2478 - DNA, 64 bp, Artificial
  oligonucleotide probe
ttcggggaaacgccgtttcggggaaacgccgtaacgcgatttgccgcaccgtcgcaaagcgcac

SEQ ID NO: 2479 - DNA, 64 bp, Artificial
  oligonucleotide probe
ttgcaagcgtccgggattgcaagcgtccgggaatggcgcagcacgctgccgtcgcaaagcgcac

SEQ ID NO: 2480 - DNA, 64 bp, Artificial
  oligonucleotide probe
aagccgtgcgcaacgaaagccgtgcgcaacgaaacggctgcaagcgcaggctgcacggtcccgt

SEQ ID NO: 2481 - DNA, 64 bp, Artificial
  oligonucleotide probe
ggctgcacggtcccgtggctgcacggtcccgtttgcaagcgtccgggaccgtttcggctgggct

SEQ ID NO: 2482 - DNA, 64 bp, Artificial
  oligonucleotide probe
ttgcaagcgtccgggattgcaagcgtccgggattcggggaaacgccgtggctgcacggtcccgt

SEQ ID NO: 2483 - DNA, 64 bp, Artificial
  oligonucleotide probe
aagccgtgcgcaacgaaagccgtgcgcaacgattcgccgtttgcgctgggctgcacggtcccgt

SEQ ID NO: 2484 - DNA, 64 bp, Artificial
  oligonucleotide probe
ggctgcacggtcccgtggctgcacggtcccgtggctttgcgcaccgtgatggcgcagcacgctg

SEQ ID NO: 2485 - DNA, 64 bp, Artificial
  oligonucleotide probe
ttcgccgtttgcgctgttcgccgtttgcgctgaagccgtgcgcaacgaaacggctgcaagcgca

SEQ ID NO: 2486 - DNA, 64 bp, Artificial
  oligonucleotide probe
ccgtttcggctgggctccgtttcggctgggctaacgcgatttgccgcaatggcgcagcacgctg

SEQ ID NO: 2487 - DNA, 64 bp, Artificial
  oligonucleotide probe
ttcgccgtttgcgctgttcgccgtttgcgctgaagccgtgcgcaacgaatggcgcagcacgctg

SEQ ID NO: 2488 - DNA, 64 bp, Artificial
  oligonucleotide probe
ttgcaagcgtccgggattgcaagcgtccgggaaacgcgatttgccgcacgcattgcggctttcg

SEQ ID NO: 2489 - DNA, 64 bp, Artificial
  oligonucleotide probe
ttcggggaaacgccgtttcggggaaacgccgtttcgccgtttgcgctgcgcattgcggctttcg

SEQ ID NO: 2490 - DNA, 64 bp, Artificial
  oligonucleotide probe
ggctgcacggtcccgtggctgcacggtcccgtccgtttcggctgggctttcgccgtttgcgctg

SEQ ID NO: 2491 - DNA, 64 bp, Artificial
  oligonucleotide probe
ggctgcacggtcccgtggctgcacggtcccgtaagccgtgcgcaacgattgcaagcgtccggga

SEQ ID NO: 2492 - DNA, 64 bp, Artificial
  oligonucleotide probe
atggcgcagcacgctgatggcgcagcacgctgaacgcgatttgccgcaggctttgcgcaccgtg

SEQ ID NO: 2493 - DNA, 64 bp, Artificial
  oligonucleotide probe
aagccgtgcgcaacgaaagccgtgcgcaacgaaacgcgatttgccgcaccgtcgcaaagcgcac

SEQ ID NO: 2494 - DNA, 64 bp, Artificial
  oligonucleotide probe
ttcgccgtttgcgctgttcgccgtttgcgctgccgtttcggctgggctaacgcgatttgccgca

SEQ ID NO: 2495 - DNA, 64 bp, Artificial
  oligonucleotide probe
ttcggggaaacgccgtttcggggaaacgccgtccgtcgcaaagcgcacggctgcacggtcccgt

SEQ ID NO: 2496 - DNA, 64 bp, Artificial
  oligonucleotide probe
ttcgccgtttgcgctgttcgccgtttgcgctgttgcaagcgtccgggattcggggaaacgccgt

SEQ ID NO: 2497 - DNA, 64 bp, Artificial
  oligonucleotide probe
aacggctgcaagcgcaaacggctgcaagcgcattcggggaaacgccgtttcgccgtttgcgctg

SEQ ID NO: 2498 - DNA, 64 bp, Artificial
  oligonucleotide probe
aagccgtgcgcaacgaaagccgtgcgcaacgattcggggaaacgccgtaacgcgatttgccgca

SEQ ID NO: 2499 - DNA, 64 bp, Artificial
  oligonucleotide probe
ccgtttcggctgggctccgtttcggctgggctttcgccgtttgcgctgccgtcgcaaagcgcac

SEQ ID NO: 2500 - DNA, 64 bp, Artificial
  oligonucleotide probe
aacggctgcaagcgcaaacggctgcaagcgcaggctgcacggtcccgtcgcattgcggctttcg

SEQ ID NO: 2501 - DNA, 64 bp, Artificial
  oligonucleotide probe
ttgcaagcgtccgggattgcaagcgtccgggattcggggaaacgccgtttcgccgtttgcgctg

SEQ ID NO: 2502 - DNA, 64 bp, Artificial
  oligonucleotide probe
cgcattgcggctttcgcgcattgcggctttcgaacgcgatttgccgcaccgtcgcaaagcgcac

SEQ ID NO: 2503 - DNA, 64 bp, Artificial
  oligonucleotide probe
ttcggggaaacgccgtttcggggaaacgccgtttcgccgtttgcgctgaagccgtgcgcaacga

SEQ ID NO: 2504 - DNA, 64 bp, Artificial
  oligonucleotide probe
cgcattgcggctttcgcgcattgcggctttcgaacggctgcaagcgcaaacgcgatttgccgca

SEQ ID NO: 2505 - DNA, 64 bp, Artificial
  oligonucleotide probe
ttcggggaaacgccgtttcggggaaacgccgtggctgcacggtcccgtttgcaagcgtccggga

SEQ ID NO: 2506 - DNA, 64 bp, Artificial
  oligonucleotide probe
ttgcaagcgtccgggattgcaagcgtccgggattcgccgtttgcgctgaagccgtgcgcaacga

SEQ ID NO: 2507 - DNA, 64 bp, Artificial
  oligonucleotide probe
ttgcaagcgtccgggattgcaagcgtccgggattcgccgtttgcgctgccgtcgcaaagcgcac

SEQ ID NO: 2508 - DNA, 64 bp, Artificial
  oligonucleotide probe
aacgcgatttgccgcaaacgcgatttgccgcaggctgcacggtcccgtttcggggaaacgccgt

SEQ ID NO: 2509 - DNA, 64 bp, Artificial
  oligonucleotide probe
ttcgccgtttgcgctgttcgccgtttgcgctgggctttgcgcaccgtgaacgcgatttgccgca

SEQ ID NO: 2510 - DNA, 64 bp, Artificial
  oligonucleotide probe
aagccgtgcgcaacgaaagccgtgcgcaacgaatggcgcagcacgctgaacgcgatttgccgca

SEQ ID NO: 2511 - DNA, 64 bp, Artificial
  oligonucleotide probe
ttcggggaaacgccgtttcggggaaacgccgtccgtcgcaaagcgcacatggcgcagcacgctg

SEQ ID NO: 2512 - DNA, 64 bp, Artificial
  oligonucleotide probe
ttcggggaaacgccgtttcggggaaacgccgtccgtcgcaaagcgcaccgcattgcggctttcg

SEQ ID NO: 2513 - DNA, 64 bp, Artificial
  oligonucleotide probe
ccgtcgcaaagcgcacccgtcgcaaagcgcacaagccgtgcgcaacgattgcaagcgtccggga

SEQ ID NO: 2514 - DNA, 64 bp, Artificial
  oligonucleotide probe
aacggctgcaagcgcaaacggctgcaagcgcattcgccgtttgcgctgttgcaagcgtccggga

SEQ ID NO: 2515 - DNA, 64 bp, Artificial
  oligonucleotide probe
aagccgtgcgcaacgaaagccgtgcgcaacgaaacggctgcaagcgcaccgtcgcaaagcgcac

SEQ ID NO: 2516 - DNA, 64 bp, Artificial
  oligonucleotide probe
ccgtcgcaaagcgcacccgtcgcaaagcgcaccgcattgcggctttcgttgcaagcgtccggga

SEQ ID NO: 2517 - DNA, 64 bp, Artificial
  oligonucleotide probe
ccgtcgcaaagcgcacccgtcgcaaagcgcacatggcgcagcacgctgaacgcgatttgccgca

SEQ ID NO: 2518 - DNA, 64 bp, Artificial
  oligonucleotide probe
ggctttgcgcaccgtgggctttgcgcaccgtgccgtcgcaaagcgcacaagccgtgcgcaacga

SEQ ID NO: 2519 - DNA, 64 bp, Artificial
  oligonucleotide probe
ggctgcacggtcccgtggctgcacggtcccgtcgcattgcggctttcgggctttgcgcaccgtg

SEQ ID NO: 2520 - DNA, 64 bp, Artificial
  oligonucleotide probe
aagccgtgcgcaacgaaagccgtgcgcaacgaggctttgcgcaccgtgggctgcacggtcccgt

SEQ ID NO: 2521 - DNA, 64 bp, Artificial
  oligonucleotide probe
ggctttgcgcaccgtgggctttgcgcaccgtgatggcgcagcacgctgggctgcacggtcccgt

SEQ ID NO: 2522 - DNA, 64 bp, Artificial
  oligonucleotide probe
ggctgcacggtcccgtggctgcacggtcccgtttcggggaaacgccgtccgtttcggctgggct

SEQ ID NO: 2523 - DNA, 64 bp, Artificial
  oligonucleotide probe
atggcgcagcacgctgatggcgcagcacgctgttcggggaaacgccgtaacgcgatttgccgca

SEQ ID NO: 2524 - DNA, 64 bp, Artificial
  oligonucleotide probe
aacgcgatttgccgcaaacgcgatttgccgcattcgccgtttgcgctgccgtcgcaaagcgcac

SEQ ID NO: 2525 - DNA, 64 bp, Artificial
  oligonucleotide probe
ggctgcacggtcccgtggctgcacggtcccgtttgcaagcgtccgggaatggcgcagcacgctg

SEQ ID NO: 2526 - DNA, 64 bp, Artificial
  oligonucleotide probe
ttcggggaaacgccgtttcggggaaacgccgtggctgcacggtcccgtggctttgcgcaccgtg

SEQ ID NO: 2527 - DNA, 64 bp, Artificial
  oligonucleotide probe
ccgtcgcaaagcgcacccgtcgcaaagcgcacggctgcacggtcccgtaagccgtgcgcaacga

SEQ ID NO: 2528 - DNA, 64 bp, Artificial
  oligonucleotide probe
ttcgccgtttgcgctgttcgccgtttgcgctgggctgcacggtcccgtttgcaagcgtccggga

SEQ ID NO: 2529 - DNA, 64 bp, Artificial
  oligonucleotide probe
cgcattgcggctttcgcgcattgcggctttcgaacgcgatttgccgcaaagccgtgcgcaacga

SEQ ID NO: 2530 - DNA, 64 bp, Artificial
  oligonucleotide probe
ggctgcacggtcccgtggctgcacggtcccgtggctttgcgcaccgtgttcggggaaacgccgt

SEQ ID NO: 2531 - DNA, 64 bp, Artificial
  oligonucleotide probe
ccgtcgcaaagcgcacccgtcgcaaagcgcacttcggggaaacgccgtaacgcgatttgccgca

SEQ ID NO: 2532 - DNA, 64 bp, Artificial
  oligonucleotide probe
ttcgccgtttgcgctgttcgccgtttgcgctgggctttgcgcaccgtgatggcgcagcacgctg

SEQ ID NO: 2533 - DNA, 64 bp, Artificial
  oligonucleotide probe
ggctttgcgcaccgtgggctttgcgcaccgtgttcgccgtttgcgctgaagccgtgcgcaacga

SEQ ID NO: 2534 - DNA, 64 bp, Artificial
  oligonucleotide probe
ggctgcacggtcccgtggctgcacggtcccgtccgtttcggctgggctaacgcgatttgccgca

SEQ ID NO: 2535 - DNA, 64 bp, Artificial
  oligonucleotide probe
ccgtttcggctgggctccgtttcggctgggctttcgccgtttgcgctgaacggctgcaagcgca

SEQ ID NO: 2536 - DNA, 64 bp, Artificial
  oligonucleotide probe
ggctgcacggtcccgtggctgcacggtcccgtatggcgcagcacgctgaacgcgatttgccgca

SEQ ID NO: 2537 - DNA, 64 bp, Artificial
  oligonucleotide probe
aacgcgatttgccgcaaacgcgatttgccgcaaacggctgcaagcgcaccgtttcggctgggct

SEQ ID NO: 2538 - DNA, 64 bp, Artificial
  oligonucleotide probe
ggctgcacggtcccgtggctgcacggtcccgtaacgcgatttgccgcattcgccgtttgcgctg

SEQ ID NO: 2539 - DNA, 64 bp, Artificial
  oligonucleotide probe
aacgcgatttgccgcaaacgcgatttgccgcattgcaagcgtccgggaggctttgcgcaccgtg

SEQ ID NO: 2540 - DNA, 64 bp, Artificial
  oligonucleotide probe
aacggctgcaagcgcaaacggctgcaagcgcaccgtttcggctgggctttcgccgtttgcgctg

SEQ ID NO: 2541 - DNA, 64 bp, Artificial
  oligonucleotide probe
ttcggggaaacgccgtttcggggaaacgccgtaacgcgatttgccgcaatggcgcagcacgctg

SEQ ID NO: 2542 - DNA, 64 bp, Artificial
  oligonucleotide probe
ttcgccgtttgcgctgttcgccgtttgcgctgaacggctgcaagcgcaccgtttcggctgggct

SEQ ID NO: 2543 - DNA, 64 bp, Artificial
  oligonucleotide probe
cgcattgcggctttcgcgcattgcggctttcgaacggctgcaagcgcaggctgcacggtcccgt

SEQ ID NO: 2544 - DNA, 64 bp, Artificial
  oligonucleotide probe
ggctgcacggtcccgtggctgcacggtcccgtcgcattgcggctttcgttcgccgtttgcgctg

SEQ ID NO: 2545 - DNA, 64 bp, Artificial
  oligonucleotide probe
aacgcgatttgccgcaaacgcgatttgccgcaatggcgcagcacgctgccgtttcggctgggct

SEQ ID NO: 2546 - DNA, 64 bp, Artificial
  oligonucleotide probe
ccgtcgcaaagcgcacccgtcgcaaagcgcacggctttgcgcaccgtgaacgcgatttgccgca

SEQ ID NO: 2547 - DNA, 64 bp, Artificial
  oligonucleotide probe
ttcgccgtttgcgctgttcgccgtttgcgctgaagccgtgcgcaacgattgcaagcgtccggga

SEQ ID NO: 2548 - DNA, 64 bp, Artificial
  oligonucleotide probe
aagccgtgcgcaacgaaagccgtgcgcaacgattgcaagcgtccgggaaacgcgatttgccgca

SEQ ID NO: 2549 - DNA, 64 bp, Artificial
  oligonucleotide probe
aacgcgatttgccgcaaacgcgatttgccgcaggctgcacggtcccgtttgcaagcgtccggga

SEQ ID NO: 2550 - DNA, 64 bp, Artificial
  oligonucleotide probe
ccgtttcggctgggctccgtttcggctgggctccgtcgcaaagcgcacggctgcacggtcccgt

SEQ ID NO: 2551 - DNA, 64 bp, Artificial
  oligonucleotide probe
ccgtcgcaaagcgcacccgtcgcaaagcgcacttgcaagcgtccgggattcgccgtttgcgctg

SEQ ID NO: 2552 - DNA, 64 bp, Artificial
  oligonucleotide probe
ccgtcgcaaagcgcacccgtcgcaaagcgcacggctttgcgcaccgtgccgtttcggctgggct

SEQ ID NO: 2553 - DNA, 64 bp, Artificial
  oligonucleotide probe
ttgcaagcgtccgggattgcaagcgtccgggaccgtttcggctgggctaacgcgatttgccgca

SEQ ID NO: 2554 - DNA, 64 bp, Artificial
  oligonucleotide probe
aacgcgatttgccgcaaacgcgatttgccgcattcgccgtttgcgctgccgtttcggctgggct

SEQ ID NO: 2555 - DNA, 64 bp, Artificial
  oligonucleotide probe
ttcgccgtttgcgctgttcgccgtttgcgctgcgcattgcggctttcgttcggggaaacgccgt

SEQ ID NO: 2556 - DNA, 64 bp, Artificial
  oligonucleotide probe
ccgtcgcaaagcgcacccgtcgcaaagcgcacaacgcgatttgccgcattcgccgtttgcgctg

SEQ ID NO: 2557 - DNA, 64 bp, Artificial
  oligonucleotide probe
ttcggggaaacgccgtttcggggaaacgccgtccgtttcggctgggctggctgcacggtcccgt

SEQ ID NO: 2558 - DNA, 64 bp, Artificial
  oligonucleotide probe
ccgtcgcaaagcgcacccgtcgcaaagcgcacttgcaagcgtccgggaaacggctgcaagcgca

SEQ ID NO: 2559 - DNA, 64 bp, Artificial
  oligonucleotide probe
ttcgccgtttgcgctgttcgccgtttgcgctgcgcattgcggctttcgaacggctgcaagcgca

SEQ ID NO: 2560 - DNA, 64 bp, Artificial
  oligonucleotide probe
aacgcgatttgccgcaaacgcgatttgccgcaggctgcacggtcccgtaagccgtgcgcaacga

SEQ ID NO: 2561 - DNA, 64 bp, Artificial
  oligonucleotide probe
ggctttgcgcaccgtgggctttgcgcaccgtgttcggggaaacgccgtttcgccgtttgcgctg

SEQ ID NO: 2562 - DNA, 64 bp, Artificial
  oligonucleotide probe
ttcggggaaacgccgtttcggggaaacgccgtggctgcacggtcccgtatggcgcagcacgctg

SEQ ID NO: 2563 - DNA, 64 bp, Artificial
  oligonucleotide probe
atggcgcagcacgctgatggcgcagcacgctgttcgccgtttgcgctgggctgcacggtcccgt

SEQ ID NO: 2564 - DNA, 64 bp, Artificial
  oligonucleotide probe
ttcgccgtttgcgctgttcgccgtttgcgctgggctgcacggtcccgtaacggctgcaagcgca

SEQ ID NO: 2565 - DNA, 64 bp, Artificial
  oligonucleotide probe
cgcattgcggctttcgcgcattgcggctttcgttcggggaaacgccgtaacgcgatttgccgca

SEQ ID NO: 2566 - DNA, 64 bp, Artificial
  oligonucleotide probe
ccgtcgcaaagcgcacccgtcgcaaagcgcacaacggctgcaagcgcattcgccgtttgcgctg

SEQ ID NO: 2567 - DNA, 64 bp, Artificial
  oligonucleotide probe
ttcggggaaacgccgtttcggggaaacgccgtttcgccgtttgcgctgggctttgcgcaccgtg

SEQ ID NO: 2568 - DNA, 64 bp, Artificial
  oligonucleotide probe
cgcattgcggctttcgcgcattgcggctttcgttcggggaaacgccgtggctgcacggtcccgt

SEQ ID NO: 2569 - DNA, 64 bp, Artificial
  oligonucleotide probe
ccgtcgcaaagcgcacccgtcgcaaagcgcacaagccgtgcgcaacgaccgtttcggctgggct

SEQ ID NO: 2570 - DNA, 64 bp, Artificial
  oligonucleotide probe
ggctgcacggtcccgtggctgcacggtcccgtaagccgtgcgcaacgaggctttgcgcaccgtg

SEQ ID NO: 2571 - DNA, 64 bp, Artificial
  oligonucleotide probe
ccgtttcggctgggctccgtttcggctgggctccgtcgcaaagcgcacggctttgcgcaccgtg

SEQ ID NO: 2572 - DNA, 64 bp, Artificial
  oligonucleotide probe
aagccgtgcgcaacgaaagccgtgcgcaacgaccgtttcggctgggctccgtcgcaaagcgcac

SEQ ID NO: 2573 - DNA, 64 bp, Artificial
  oligonucleotide probe
ttcgccgtttgcgctgttcgccgtttgcgctgatggcgcagcacgctgccgtttcggctgggct

SEQ ID NO: 2574 - DNA, 64 bp, Artificial
  oligonucleotide probe
ggctgcacggtcccgtggctgcacggtcccgtaagccgtgcgcaacgaccgtcgcaaagcgcac

SEQ ID NO: 2575 - DNA, 64 bp, Artificial
  oligonucleotide probe
ttcgccgtttgcgctgttcgccgtttgcgctgccgtcgcaaagcgcacaacgcgatttgccgca

SEQ ID NO: 2576 - DNA, 64 bp, Artificial
  oligonucleotide probe
ttgcaagcgtccgggattgcaagcgtccgggaggctttgcgcaccgtgggctgcacggtcccgt

SEQ ID NO: 2577 - DNA, 64 bp, Artificial
  oligonucleotide probe
ttgcaagcgtccgggattgcaagcgtccgggaccgtttcggctgggctttcgccgtttgcgctg

SEQ ID NO: 2578 - DNA, 64 bp, Artificial
  oligonucleotide probe
aacggctgcaagcgcaaacggctgcaagcgcaaacgcgatttgccgcattcgccgtttgcgctg

SEQ ID NO: 2579 - DNA, 64 bp, Artificial
  oligonucleotide probe
ttgcaagcgtccgggattgcaagcgtccgggaaacgcgatttgccgcaccgtcgcaaagcgcac

SEQ ID NO: 2580 - DNA, 64 bp, Artificial
  oligonucleotide probe
ttgcaagcgtccgggattgcaagcgtccgggaccgtcgcaaagcgcaccgcattgcggctttcg

SEQ ID NO: 2581 - DNA, 64 bp, Artificial
  oligonucleotide probe
ggctttgcgcaccgtgggctttgcgcaccgtgaacgcgatttgccgcaggctgcacggtcccgt

SEQ ID NO: 2582 - DNA, 64 bp, Artificial
  oligonucleotide probe
ttcggggaaacgccgtttcggggaaacgccgtttcgccgtttgcgctgaacggctgcaagcgca

SEQ ID NO: 2583 - DNA, 64 bp, Artificial
  oligonucleotide probe
ttcgccgtttgcgctgttcgccgtttgcgctgggctttgcgcaccgtgttcggggaaacgccgt

SEQ ID NO: 2584 - DNA, 64 bp, Artificial
  oligonucleotide probe
aacgcgatttgccgcaaacgcgatttgccgcaccgtcgcaaagcgcacttcggggaaacgccgt

SEQ ID NO: 2585 - DNA, 64 bp, Artificial
  oligonucleotide probe
cgcattgcggctttcgcgcattgcggctttcgccgtttcggctgggctttcgccgtttgcgctg

SEQ ID NO: 2586 - DNA, 64 bp, Artificial
  oligonucleotide probe
ttgcaagcgtccgggattgcaagcgtccgggaaacggctgcaagcgcaggctgcacggtcccgt

SEQ ID NO: 2587 - DNA, 64 bp, Artificial
  oligonucleotide probe
cgcattgcggctttcgcgcattgcggctttcgaacggctgcaagcgcattcgccgtttgcgctg

SEQ ID NO: 2588 - DNA, 64 bp, Artificial
  oligonucleotide probe
ttcggggaaacgccgtttcggggaaacgccgtccgtcgcaaagcgcacaagccgtgcgcaacga

SEQ ID NO: 2589 - DNA, 64 bp, Artificial
  oligonucleotide probe
ggctgcacggtcccgtggctgcacggtcccgtttgcaagcgtccgggaggctttgcgcaccgtg

SEQ ID NO: 2590 - DNA, 64 bp, Artificial
  oligonucleotide probe
aacgcgatttgccgcaaacgcgatttgccgcattcgccgtttgcgctgttgcaagcgtccggga

SEQ ID NO: 2591 - DNA, 64 bp, Artificial
  oligonucleotide probe
ttcggggaaacgccgtttcggggaaacgccgtccgtcgcaaagcgcacggctttgcgcaccgtg

SEQ ID NO: 2592 - DNA, 64 bp, Artificial
  oligonucleotide probe
ccgtcgcaaagcgcacccgtcgcaaagcgcacggctgcacggtcccgtatggcgcagcacgctg

SEQ ID NO: 2593 - DNA, 64 bp, Artificial
  oligonucleotide probe
cgcattgcggctttcgcgcattgcggctttcgccgtttcggctgggctaacgcgatttgccgca

SEQ ID NO: 2594 - DNA, 64 bp, Artificial
  oligonucleotide probe
atggcgcagcacgctgatggcgcagcacgctgggctgcacggtcccgtaacggctgcaagcgca

SEQ ID NO: 2595 - DNA, 64 bp, Artificial
  oligonucleotide probe
ggctttgcgcaccgtgggctttgcgcaccgtgttcggggaaacgccgtggctgcacggtcccgt

SEQ ID NO: 2596 - DNA, 64 bp, Artificial
  oligonucleotide probe
ttcggggaaacgccgtttcggggaaacgccgtaacgcgatttgccgcaggctttgcgcaccgtg

SEQ ID NO: 2597 - DNA, 64 bp, Artificial
  oligonucleotide probe
aacggctgcaagcgcaaacggctgcaagcgcaggctttgcgcaccgtgccgtcgcaaagcgcac

SEQ ID NO: 2598 - DNA, 64 bp, Artificial
  oligonucleotide probe
ggctttgcgcaccgtgggctttgcgcaccgtgccgtcgcaaagcgcacggctgcacggtcccgt

SEQ ID NO: 2599 - DNA, 64 bp, Artificial
  oligonucleotide probe
ggctttgcgcaccgtgggctttgcgcaccgtgttcgccgtttgcgctgaacggctgcaagcgca

SEQ ID NO: 2600 - DNA, 64 bp, Artificial
  oligonucleotide probe
ggctgcacggtcccgtggctgcacggtcccgtaacggctgcaagcgcattcgccgtttgcgctg

SEQ ID NO: 2601 - DNA, 64 bp, Artificial
  oligonucleotide probe
ttcgccgtttgcgctgttcgccgtttgcgctgttcggggaaacgccgtccgtttcggctgggct

SEQ ID NO: 2602 - DNA, 64 bp, Artificial
  oligonucleotide probe
ttcgccgtttgcgctgttcgccgtttgcgctgaagccgtgcgcaacgaggctttgcgcaccgtg

SEQ ID NO: 2603 - DNA, 64 bp, Artificial
  oligonucleotide probe
ttcgccgtttgcgctgttcgccgtttgcgctgatggcgcagcacgctgttcggggaaacgccgt

SEQ ID NO: 2604 - DNA, 64 bp, Artificial
  oligonucleotide probe
aacgcgatttgccgcaaacgcgatttgccgcaaagccgtgcgcaacgattgcaagcgtccggga

SEQ ID NO: 2605 - DNA, 64 bp, Artificial
  oligonucleotide probe
aacggctgcaagcgcaaacggctgcaagcgcaatggcgcagcacgctgttcgccgtttgcgctg

SEQ ID NO: 2606 - DNA, 64 bp, Artificial
  oligonucleotide probe
ggctttgcgcaccgtgggctttgcgcaccgtgggctgcacggtcccgtttgcaagcgtccggga

SEQ ID NO: 2607 - DNA, 64 bp, Artificial
  oligonucleotide probe
ccgtttcggctgggctccgtttcggctgggctggctgcacggtcccgtttcggggaaacgccgt

SEQ ID NO: 2608 - DNA, 64 bp, Artificial
  oligonucleotide probe
aacgcgatttgccgcaaacgcgatttgccgcaccgtcgcaaagcgcacaacggctgcaagcgca

SEQ ID NO: 2609 - DNA, 64 bp, Artificial
  oligonucleotide probe
ccgtcgcaaagcgcacccgtcgcaaagcgcacttgcaagcgtccgggaggctttgcgcaccgtg

SEQ ID NO: 2610 - DNA, 64 bp, Artificial
  oligonucleotide probe
aagccgtgcgcaacgaaagccgtgcgcaacgaggctttgcgcaccgtgaacgcgatttgccgca

SEQ ID NO: 2611 - DNA, 64 bp, Artificial
  oligonucleotide probe
cgcattgcggctttcgcgcattgcggctttcgatggcgcagcacgctgccgtcgcaaagcgcac

SEQ ID NO: 2612 - DNA, 64 bp, Artificial
  oligonucleotide probe
cgcattgcggctttcgcgcattgcggctttcgttcggggaaacgccgtccgtcgcaaagcgcac

SEQ ID NO: 2613 - DNA, 64 bp, Artificial
  oligonucleotide probe
cgcattgcggctttcgcgcattgcggctttcgttcgccgtttgcgctgaagccgtgcgcaacga

SEQ ID NO: 2614 - DNA, 64 bp, Artificial
  oligonucleotide probe
aacgcgatttgccgcaaacgcgatttgccgcaggctttgcgcaccgtgatggcgcagcacgctg

SEQ ID NO: 2615 - DNA, 64 bp, Artificial
  oligonucleotide probe
ggctttgcgcaccgtgggctttgcgcaccgtgttcgccgtttgcgctgggctgcacggtcccgt

SEQ ID NO: 2616 - DNA, 64 bp, Artificial
  oligonucleotide probe
ccgtcgcaaagcgcacccgtcgcaaagcgcacggctgcacggtcccgtaacggctgcaagcgca

SEQ ID NO: 2617 - DNA, 64 bp, Artificial
  oligonucleotide probe
ttcgccgtttgcgctgttcgccgtttgcgctgggctgcacggtcccgtttcggggaaacgccgt

SEQ ID NO: 2618 - DNA, 64 bp, Artificial
  oligonucleotide probe
ggctgcacggtcccgtggctgcacggtcccgtcgcattgcggctttcgccgtcgcaaagcgcac

SEQ ID NO: 2619 - DNA, 64 bp, Artificial
  oligonucleotide probe
ttgcaagcgtccgggattgcaagcgtccgggaatggcgcagcacgctgttcgccgtttgcgctg

SEQ ID NO: 2620 - DNA, 64 bp, Artificial
  oligonucleotide probe
ccgtcgcaaagcgcacccgtcgcaaagcgcacggctgcacggtcccgtcgcattgcggctttcg

SEQ ID NO: 2621 - DNA, 64 bp, Artificial
  oligonucleotide probe
ccgtcgcaaagcgcacccgtcgcaaagcgcacggctgcacggtcccgtggctttgcgcaccgtg

SEQ ID NO: 2622 - DNA, 64 bp, Artificial
  oligonucleotide probe
ttgcaagcgtccgggattgcaagcgtccgggaccgtttcggctgggctggctgcacggtcccgt

SEQ ID NO: 2623 - DNA, 64 bp, Artificial
  oligonucleotide probe
aacgcgatttgccgcaaacgcgatttgccgcaggctttgcgcaccgtgttcggggaaacgccgt

SEQ ID NO: 2624 - DNA, 64 bp, Artificial
  oligonucleotide probe
ttgcaagcgtccgggattgcaagcgtccgggattcggggaaacgccgtaacgcgatttgccgca

SEQ ID NO: 2625 - DNA, 64 bp, Artificial
  oligonucleotide probe
ggctttgcgcaccgtgggctttgcgcaccgtgccgtttcggctgggctaacgcgatttgccgca

SEQ ID NO: 2626 - DNA, 64 bp, Artificial
  oligonucleotide probe
ttcgccgtttgcgctgttcgccgtttgcgctgccgtcgcaaagcgcaccgcattgcggctttcg

SEQ ID NO: 2627 - DNA, 64 bp, Artificial
  oligonucleotide probe
atggcgcagcacgctgatggcgcagcacgctgttcgccgtttgcgctgttgcaagcgtccggga

SEQ ID NO: 2628 - DNA, 64 bp, Artificial
  oligonucleotide probe
ccgtttcggctgggctccgtttcggctgggctttcgccgtttgcgctgttgcaagcgtccggga

SEQ ID NO: 2629 - DNA, 64 bp, Artificial
  oligonucleotide probe
aagccgtgcgcaacgaaagccgtgcgcaacgaggctttgcgcaccgtgttcgccgtttgcgctg

SEQ ID NO: 2630 - DNA, 64 bp, Artificial
  oligonucleotide probe
atggcgcagcacgctgatggcgcagcacgctgaacgcgatttgccgcattcgccgtttgcgctg

SEQ ID NO: 2631 - DNA, 64 bp, Artificial
  oligonucleotide probe
ttcgccgtttgcgctgttcgccgtttgcgctgccgtcgcaaagcgcacttgcaagcgtccggga

SEQ ID NO: 2632 - DNA, 64 bp, Artificial
  oligonucleotide probe
ttcgccgtttgcgctgttcgccgtttgcgctgccgtcgcaaagcgcacggctgcacggtcccgt

SEQ ID NO: 2633 - DNA, 64 bp, Artificial
  oligonucleotide probe
aacggctgcaagcgcaaacggctgcaagcgcaggctttgcgcaccgtgttcgccgtttgcgctg

SEQ ID NO: 2634 - DNA, 64 bp, Artificial
  oligonucleotide probe
cgcattgcggctttcgcgcattgcggctttcgaacggctgcaagcgcaccgtcgcaaagcgcac

SEQ ID NO: 2635 - DNA, 64 bp, Artificial
  oligonucleotide probe
aagccgtgcgcaacgaaagccgtgcgcaacgaatggcgcagcacgctgttcgccgtttgcgctg

SEQ ID NO: 2636 - DNA, 64 bp, Artificial
  oligonucleotide probe
ttgcaagcgtccgggattgcaagcgtccgggaaacggctgcaagcgcaccgtcgcaaagcgcac

SEQ ID NO: 2637 - DNA, 64 bp, Artificial
  oligonucleotide probe
ggctttgcgcaccgtgggctttgcgcaccgtgggctgcacggtcccgtaagccgtgcgcaacga

SEQ ID NO: 2638 - DNA, 64 bp, Artificial
  oligonucleotide probe
atggcgcagcacgctgatggcgcagcacgctgggctgcacggtcccgtcgcattgcggctttcg

SEQ ID NO: 2639 - DNA, 64 bp, Artificial
  oligonucleotide probe
cgcattgcggctttcgcgcattgcggctttcgttcgccgtttgcgctgggctgcacggtcccgt

SEQ ID NO: 2640 - DNA, 64 bp, Artificial
  oligonucleotide probe
cgcattgcggctttcgcgcattgcggctttcgccgtcgcaaagcgcacggctgcacggtcccgt

SEQ ID NO: 2641 - DNA, 64 bp, Artificial
  oligonucleotide probe
ttcggggaaacgccgtttcggggaaacgccgtaacgcgatttgccgcattgcaagcgtccggga

SEQ ID NO: 2642 - DNA, 64 bp, Artificial
  oligonucleotide probe
ttcgccgtttgcgctgttcgccgtttgcgctgggctgcacggtcccgtcgcattgcggctttcg

SEQ ID NO: 2643 - DNA, 64 bp, Artificial
  oligonucleotide probe
aagccgtgcgcaacgaaagccgtgcgcaacgacgcattgcggctttcgttcgccgtttgcgctg

SEQ ID NO: 2644 - DNA, 64 bp, Artificial
  oligonucleotide probe
ttcgccgtttgcgctgttcgccgtttgcgctgggctttgcgcaccgtgccgtttcggctgggct

SEQ ID NO: 2645 - DNA, 64 bp, Artificial
  oligonucleotide probe
ttcggggaaacgccgtttcggggaaacgccgtttcgccgtttgcgctgttgcaagcgtccggga

SEQ ID NO: 2646 - DNA, 64 bp, Artificial
  oligonucleotide probe
ggctgcacggtcccgtggctgcacggtcccgtaacggctgcaagcgcaatggcgcagcacgctg

SEQ ID NO: 2647 - DNA, 64 bp, Artificial
  oligonucleotide probe
ttcggggaaacgccgtttcggggaaacgccgtttcgccgtttgcgctgccgtcgcaaagcgcac

SEQ ID NO: 2648 - DNA, 64 bp, Artificial
  oligonucleotide probe
ccgtcgcaaagcgcacccgtcgcaaagcgcacttcggggaaacgccgtttcgccgtttgcgctg

SEQ ID NO: 2649 - DNA, 64 bp, Artificial
  oligonucleotide probe
ccgtttcggctgggctccgtttcggctgggctaacgcgatttgccgcattcgccgtttgcgctg

SEQ ID NO: 2650 - DNA, 64 bp, Artificial
  oligonucleotide probe
aacgcgatttgccgcaaacgcgatttgccgcattcgccgtttgcgctgatggcgcagcacgctg

SEQ ID NO: 2651 - DNA, 64 bp, Artificial
  oligonucleotide probe
aacggctgcaagcgcaaacggctgcaagcgcaccgtttcggctgggctaacgcgatttgccgca

SEQ ID NO: 2652 - DNA, 64 bp, Artificial
  oligonucleotide probe
aacggctgcaagcgcaaacggctgcaagcgcaaacgcgatttgccgcaaagccgtgcgcaacga

SEQ ID NO: 2653 - DNA, 64 bp, Artificial
  oligonucleotide probe
aacgcgatttgccgcaaacgcgatttgccgcattcggggaaacgccgtccgtttcggctgggct

SEQ ID NO: 2654 - DNA, 64 bp, Artificial
  oligonucleotide probe
aacgcgatttgccgcaaacgcgatttgccgcaccgtcgcaaagcgcacggctttgcgcaccgtg

SEQ ID NO: 2655 - DNA, 64 bp, Artificial
  oligonucleotide probe
aagccgtgcgcaacgaaagccgtgcgcaacgaggctttgcgcaccgtgccgtcgcaaagcgcac

SEQ ID NO: 2656 - DNA, 64 bp, Artificial
  oligonucleotide probe
aacgcgatttgccgcaaacgcgatttgccgcaccgtcgcaaagcgcacaagccgtgcgcaacga

SEQ ID NO: 2657 - DNA, 64 bp, Artificial
  oligonucleotide probe
atggcgcagcacgctgatggcgcagcacgctgttcgccgtttgcgctgccgtcgcaaagcgcac

SEQ ID NO: 2658 - DNA, 64 bp, Artificial
  oligonucleotide probe
aagccgtgcgcaacgaaagccgtgcgcaacgattcggggaaacgccgtggctgcacggtcccgt

SEQ ID NO: 2659 - DNA, 64 bp, Artificial
  oligonucleotide probe
ttcgccgtttgcgctgttcgccgtttgcgctgttcggggaaacgccgtaacgcgatttgccgca

SEQ ID NO: 2660 - DNA, 64 bp, Artificial
  oligonucleotide probe
ggctttgcgcaccgtgggctttgcgcaccgtgccgtcgcaaagcgcaccgcattgcggctttcg

SEQ ID NO: 2661 - DNA, 64 bp, Artificial
  oligonucleotide probe
ggctgcacggtcccgtggctgcacggtcccgtaacggctgcaagcgcaccgtttcggctgggct

SEQ ID NO: 2662 - DNA, 64 bp, Artificial
  oligonucleotide probe
aagccgtgcgcaacgaaagccgtgcgcaacgaatggcgcagcacgctgggctgcacggtcccgt

SEQ ID NO: 2663 - DNA, 64 bp, Artificial
  oligonucleotide probe
aacgcgatttgccgcaaacgcgatttgccgcaccgtcgcaaagcgcacccgtttcggctgggct

SEQ ID NO: 2664 - DNA, 64 bp, Artificial
  oligonucleotide probe
ggctgcacggtcccgtggctgcacggtcccgtcgcattgcggctttcgttcggggaaacgccgt

SEQ ID NO: 2665 - DNA, 64 bp, Artificial
  oligonucleotide probe
ggctgcacggtcccgtggctgcacggtcccgtggctttgcgcaccgtgccgtcgcaaagcgcac

SEQ ID NO: 2666 - DNA, 64 bp, Artificial
  oligonucleotide probe
ccgtcgcaaagcgcacccgtcgcaaagcgcacaacggctgcaagcgcaaacgcgatttgccgca

SEQ ID NO: 2667 - DNA, 64 bp, Artificial
  oligonucleotide probe
ccgtcgcaaagcgcacccgtcgcaaagcgcacttgcaagcgtccgggattcggggaaacgccgt

SEQ ID NO: 2668 - DNA, 64 bp, Artificial
  oligonucleotide probe
ccgtcgcaaagcgcacccgtcgcaaagcgcacaacggctgcaagcgcaatggcgcagcacgctg

SEQ ID NO: 2669 - DNA, 64 bp, Artificial
  oligonucleotide probe
ccgtcgcaaagcgcacccgtcgcaaagcgcaccgcattgcggctttcgatggcgcagcacgctg

SEQ ID NO: 2670 - DNA, 64 bp, Artificial
  oligonucleotide probe
cgcattgcggctttcgcgcattgcggctttcgccgtttcggctgggctggctgcacggtcccgt

SEQ ID NO: 2671 - DNA, 64 bp, Artificial
  oligonucleotide probe
ttgcaagcgtccgggattgcaagcgtccgggaggctgcacggtcccgtaagccgtgcgcaacga

SEQ ID NO: 2672 - DNA, 64 bp, Artificial
  oligonucleotide probe
aacgcgatttgccgcaaacgcgatttgccgcacgcattgcggctttcgatggcgcagcacgctg

SEQ ID NO: 2673 - DNA, 64 bp, Artificial
  oligonucleotide probe
ttcgccgtttgcgctgttcgccgtttgcgctgcgcattgcggctttcgatggcgcagcacgctg

SEQ ID NO: 2674 - DNA, 64 bp, Artificial
  oligonucleotide probe
aagccgtgcgcaacgaaagccgtgcgcaacgattgcaagcgtccgggaggctgcacggtcccgt

SEQ ID NO: 2675 - DNA, 64 bp, Artificial
  oligonucleotide probe
ttcgccgtttgcgctgttcgccgtttgcgctgggctgcacggtcccgtggctttgcgcaccgtg

SEQ ID NO: 2676 - DNA, 64 bp, Artificial
  oligonucleotide probe
ttcggggaaacgccgtttcggggaaacgccgtaacgcgatttgccgcattcgccgtttgcgctg

SEQ ID NO: 2677 - DNA, 64 bp, Artificial
  oligonucleotide probe
aagccgtgcgcaacgaaagccgtgcgcaacgattcgccgtttgcgctgccgtcgcaaagcgcac

SEQ ID NO: 2678 - DNA, 64 bp, Artificial
  oligonucleotide probe
cgcattgcggctttcgcgcattgcggctttcgttcgccgtttgcgctgccgtcgcaaagcgcac

SEQ ID NO: 2679 - DNA, 64 bp, Artificial
  oligonucleotide probe
aacggctgcaagcgcaaacggctgcaagcgcaaacgcgatttgccgcaggctgcacggtcccgt

SEQ ID NO: 2680 - DNA, 64 bp, Artificial
  oligonucleotide probe
cgcattgcggctttcgcgcattgcggctttcgatggcgcagcacgctgggctgcacggtcccgt

SEQ ID NO: 2681 - DNA, 64 bp, Artificial
  oligonucleotide probe
ggctgcacggtcccgtggctgcacggtcccgtatggcgcagcacgctgttcggggaaacgccgt

SEQ ID NO: 2682 - DNA, 64 bp, Artificial
  oligonucleotide probe
aacgcgatttgccgcaaacgcgatttgccgcaaacggctgcaagcgcaatggcgcagcacgctg

SEQ ID NO: 2683 - DNA, 64 bp, Artificial
  oligonucleotide probe
aacgcgatttgccgcaaacgcgatttgccgcaaacggctgcaagcgcaggctttgcgcaccgtg

SEQ ID NO: 2684 - DNA, 64 bp, Artificial
  oligonucleotide probe
ccgtcgcaaagcgcacccgtcgcaaagcgcacatggcgcagcacgctgccgtttcggctgggct

SEQ ID NO: 2685 - DNA, 64 bp, Artificial
  oligonucleotide probe
ggctttgcgcaccgtgggctttgcgcaccgtgttcggggaaacgccgtaacgcgatttgccgca

SEQ ID NO: 2686 - DNA, 64 bp, Artificial
  oligonucleotide probe
ggctttgcgcaccgtgggctttgcgcaccgtgttcgccgtttgcgctgccgtcgcaaagcgcac

SEQ ID NO: 2687 - DNA, 64 bp, Artificial
  oligonucleotide probe
aacggctgcaagcgcaaacggctgcaagcgcaggctttgcgcaccgtgggctgcacggtcccgt

SEQ ID NO: 2688 - DNA, 64 bp, Artificial
  oligonucleotide probe
ttcgccgtttgcgctgttcgccgtttgcgctgaacggctgcaagcgcaggctttgcgcaccgtg

SEQ ID NO: 2689 - DNA, 64 bp, Artificial
  oligonucleotide probe
aagccgtgcgcaacgaaagccgtgcgcaacgaccgtttcggctgggctaacgcgatttgccgca

SEQ ID NO: 2690 - DNA, 64 bp, Artificial
  oligonucleotide probe
aacggctgcaagcgcaaacggctgcaagcgcaaacgcgatttgccgcattgcaagcgtccggga

SEQ ID NO: 2691 - DNA, 64 bp, Artificial
  oligonucleotide probe
ccgtttcggctgggctccgtttcggctgggctttcgccgtttgcgctgttcggggaaacgccgt

SEQ ID NO: 2692 - DNA, 64 bp, Artificial
  oligonucleotide probe
aacgcgatttgccgcaaacgcgatttgccgcaggctgcacggtcccgtatggcgcagcacgctg

SEQ ID NO: 2693 - DNA, 64 bp, Artificial
  oligonucleotide probe
ccgtcgcaaagcgcacccgtcgcaaagcgcacggctgcacggtcccgtttgcaagcgtccggga

SEQ ID NO: 2694 - DNA, 64 bp, Artificial
  oligonucleotide probe
ttcgccgtttgcgctgttcgccgtttgcgctgttgcaagcgtccgggaggctttgcgcaccgtg

SEQ ID NO: 2695 - DNA, 64 bp, Artificial
  oligonucleotide probe
ccgtttcggctgggctccgtttcggctgggctaacgcgatttgccgcaccgtcgcaaagcgcac

SEQ ID NO: 2696 - DNA, 64 bp, Artificial
  oligonucleotide probe
ggctgcacggtcccgtggctgcacggtcccgtatggcgcagcacgctgccgtcgcaaagcgcac

SEQ ID NO: 2697 - DNA, 64 bp, Artificial
  oligonucleotide probe
ttcggggaaacgccgtttcggggaaacgccgtttcgccgtttgcgctgatggcgcagcacgctg

SEQ ID NO: 2698 - DNA, 64 bp, Artificial
  oligonucleotide probe
aacgcgatttgccgcaaacgcgatttgccgcaggctttgcgcaccgtgccgtttcggctgggct

SEQ ID NO: 2699 - DNA, 64 bp, Artificial
  oligonucleotide probe
ttcgccgtttgcgctgttcgccgtttgcgctgaagccgtgcgcaacgaaacgcgatttgccgca

SEQ ID NO: 2700 - DNA, 64 bp, Artificial
  oligonucleotide probe
ttcgccgtttgcgctgttcgccgtttgcgctgccgtcgcaaagcgcacaagccgtgcgcaacga

SEQ ID NO: 2701 - DNA, 64 bp, Artificial
  oligonucleotide probe
ccgtttcggctgggctccgtttcggctgggctaacgcgatttgccgcattcggggaaacgccgt

SEQ ID NO: 2702 - DNA, 64 bp, Artificial
  oligonucleotide probe
ggctgcacggtcccgtggctgcacggtcccgtttcggggaaacgccgtaacgcgatttgccgca

SEQ ID NO: 2703 - DNA, 64 bp, Artificial
  oligonucleotide probe
ttgcaagcgtccgggattgcaagcgtccgggaggctttgcgcaccgtgaacgcgatttgccgca

SEQ ID NO: 2704 - DNA, 64 bp, Artificial
  oligonucleotide probe
ccgtttcggctgggctccgtttcggctgggctggctgcacggtcccgtatggcgcagcacgctg

SEQ ID NO: 2705 - DNA, 64 bp, Artificial
  oligonucleotide probe
ttgcaagcgtccgggattgcaagcgtccgggaccgtcgcaaagcgcacggctgcacggtcccgt

SEQ ID NO: 2706 - DNA, 64 bp, Artificial
  oligonucleotide probe
ccgtcgcaaagcgcacccgtcgcaaagcgcacaagccgtgcgcaacgaaacggctgcaagcgca

SEQ ID NO: 2707 - DNA, 64 bp, Artificial
  oligonucleotide probe
ggctttgcgcaccgtgggctttgcgcaccgtgccgtcgcaaagcgcacttgcaagcgtccggga

SEQ ID NO: 2708 - DNA, 64 bp, Artificial
  oligonucleotide probe
ggctgcacggtcccgtggctgcacggtcccgtttgcaagcgtccgggattcggggaaacgccgt

SEQ ID NO: 2709 - DNA, 64 bp, Artificial
  oligonucleotide probe
aacggctgcaagcgcaaacggctgcaagcgcaggctttgcgcaccgtgaacgcgatttgccgca

SEQ ID NO: 2710 - DNA, 64 bp, Artificial
  oligonucleotide probe
ccgtttcggctgggctccgtttcggctgggctccgtcgcaaagcgcacttgcaagcgtccggga

SEQ ID NO: 2711 - DNA, 64 bp, Artificial
  oligonucleotide probe
ccgtcgcaaagcgcacccgtcgcaaagcgcaccgcattgcggctttcgccgtttcggctgggct

SEQ ID NO: 2712 - DNA, 64 bp, Artificial
  oligonucleotide probe
ccgtttcggctgggctccgtttcggctgggctaacgcgatttgccgcacgcattgcggctttcg

SEQ ID NO: 2713 - DNA, 64 bp, Artificial
  oligonucleotide probe
ggctgcacggtcccgtggctgcacggtcccgtttcgccgtttgcgctgccgtcgcaaagcgcac

SEQ ID NO: 2714 - DNA, 64 bp, Artificial
  oligonucleotide probe
atggcgcagcacgctgatggcgcagcacgctgttcgccgtttgcgctgggctttgcgcaccgtg

SEQ ID NO: 2715 - DNA, 64 bp, Artificial
  oligonucleotide probe
ggctttgcgcaccgtgggctttgcgcaccgtgccgtttcggctgggctggctgcacggtcccgt

SEQ ID NO: 2716 - DNA, 64 bp, Artificial
  oligonucleotide probe
ccgtttcggctgggctccgtttcggctgggctaacgcgatttgccgcaggctttgcgcaccgtg

SEQ ID NO: 2717 - DNA, 64 bp, Artificial
  oligonucleotide probe
ttgcaagcgtccgggattgcaagcgtccgggaaacgcgatttgccgcaaagccgtgcgcaacga

SEQ ID NO: 2718 - DNA, 64 bp, Artificial
  oligonucleotide probe
ttgcaagcgtccgggattgcaagcgtccgggattcggggaaacgccgtccgtcgcaaagcgcac

SEQ ID NO: 2719 - DNA, 64 bp, Artificial
  oligonucleotide probe
cgcattgcggctttcgcgcattgcggctttcgggctttgcgcaccgtgccgtcgcaaagcgcac

SEQ ID NO: 2720 - DNA, 64 bp, Artificial
  oligonucleotide probe
aagccgtgcgcaacgaaagccgtgcgcaacgacgcattgcggctttcgaacgcgatttgccgca

SEQ ID NO: 2721 - DNA, 64 bp, Artificial
  oligonucleotide probe
aagccgtgcgcaacgaaagccgtgcgcaacgattgcaagcgtccgggaccgtcgcaaagcgcac

SEQ ID NO: 2722 - DNA, 64 bp, Artificial
  oligonucleotide probe
aacgcgatttgccgcaaacgcgatttgccgcaggctgcacggtcccgtaacggctgcaagcgca

SEQ ID NO: 2723 - DNA, 64 bp, Artificial
  oligonucleotide probe
ttcggggaaacgccgtttcggggaaacgccgtaacgcgatttgccgcaaagccgtgcgcaacga

SEQ ID NO: 2724 - DNA, 64 bp, Artificial
  oligonucleotide probe
aagccgtgcgcaacgaaagccgtgcgcaacgaatggcgcagcacgctgccgtcgcaaagcgcac

SEQ ID NO: 2725 - DNA, 64 bp, Artificial
  oligonucleotide probe
ttcggggaaacgccgtttcggggaaacgccgtggctgcacggtcccgtaagccgtgcgcaacga

SEQ ID NO: 2726 - DNA, 64 bp, Artificial
  oligonucleotide probe
ccgtcgcaaagcgcacccgtcgcaaagcgcacggctttgcgcaccgtgatggcgcagcacgctg

SEQ ID NO: 2727 - DNA, 64 bp, Artificial
  oligonucleotide probe
cgcattgcggctttcgcgcattgcggctttcgggctttgcgcaccgtgttcgccgtttgcgctg

SEQ ID NO: 2728 - DNA, 64 bp, Artificial
  oligonucleotide probe
atggcgcagcacgctgatggcgcagcacgctgccgtcgcaaagcgcacaagccgtgcgcaacga

SEQ ID NO: 2729 - DNA, 64 bp, Artificial
  oligonucleotide probe
ggctgcacggtcccgtggctgcacggtcccgtaagccgtgcgcaacgacgcattgcggctttcg

SEQ ID NO: 2730 - DNA, 64 bp, Artificial
  oligonucleotide probe
aacgcgatttgccgcaaacgcgatttgccgcaccgtcgcaaagcgcacatggcgcagcacgctg

SEQ ID NO: 2731 - DNA, 64 bp, Artificial
  oligonucleotide probe
ggctttgcgcaccgtgggctttgcgcaccgtgatggcgcagcacgctgaacgcgatttgccgca

SEQ ID NO: 2732 - DNA, 64 bp, Artificial
  oligonucleotide probe
ccgtcgcaaagcgcacccgtcgcaaagcgcacaacggctgcaagcgcattcggggaaacgccgt

SEQ ID NO: 2733 - DNA, 64 bp, Artificial
  oligonucleotide probe
aacgcgatttgccgcaaacgcgatttgccgcaccgtcgcaaagcgcacttgcaagcgtccggga

SEQ ID NO: 2734 - DNA, 64 bp, Artificial
  oligonucleotide probe
ggctttgcgcaccgtgggctttgcgcaccgtgatggcgcagcacgctgccgtcgcaaagcgcac

SEQ ID NO: 2735 - DNA, 64 bp, Artificial
  oligonucleotide probe
ttcgccgtttgcgctgttcgccgtttgcgctgaacggctgcaagcgcaaacgcgatttgccgca

SEQ ID NO: 2736 - DNA, 64 bp, Artificial
  oligonucleotide probe
aacgcgatttgccgcaaacgcgatttgccgcaggctgcacggtcccgtccgtttcggctgggct

SEQ ID NO: 2737 - DNA, 64 bp, Artificial
  oligonucleotide probe
aagccgtgcgcaacgaaagccgtgcgcaacgattcggggaaacgccgtccgtcgcaaagcgcac

SEQ ID NO: 2738 - DNA, 64 bp, Artificial
  oligonucleotide probe
cgcattgcggctttcgcgcattgcggctttcgaacgcgatttgccgcattcgccgtttgcgctg

SEQ ID NO: 2739 - DNA, 64 bp, Artificial
  oligonucleotide probe
ggctttgcgcaccgtgggctttgcgcaccgtgggctgcacggtcccgtaacggctgcaagcgca

SEQ ID NO: 2740 - DNA, 64 bp, Artificial
  oligonucleotide probe
ccgtttcggctgggctccgtttcggctgggctttcgccgtttgcgctgaagccgtgcgcaacga

SEQ ID NO: 2741 - DNA, 64 bp, Artificial
  oligonucleotide probe
aacgcgatttgccgcaaacgcgatttgccgcaaagccgtgcgcaacgaccgtttcggctgggct

SEQ ID NO: 2742 - DNA, 64 bp, Artificial
  oligonucleotide probe
ccgtcgcaaagcgcacccgtcgcaaagcgcacaagccgtgcgcaacgattcgccgtttgcgctg

SEQ ID NO: 2743 - DNA, 64 bp, Artificial
  oligonucleotide probe
ggctttgcgcaccgtgggctttgcgcaccgtgggctgcacggtcccgtcgcattgcggctttcg

SEQ ID NO: 2744 - DNA, 64 bp, Artificial
  oligonucleotide probe
ttgcaagcgtccgggattgcaagcgtccgggaaacggctgcaagcgcaaacgcgatttgccgca

SEQ ID NO: 2745 - DNA, 64 bp, Artificial
  oligonucleotide probe
ttgcaagcgtccgggattgcaagcgtccgggattcgccgtttgcgctgggctgcacggtcccgt

SEQ ID NO: 2746 - DNA, 64 bp, Artificial
  oligonucleotide probe
aacggctgcaagcgcaaacggctgcaagcgcaccgtcgcaaagcgcaccgcattgcggctttcg

SEQ ID NO: 2747 - DNA, 64 bp, Artificial
  oligonucleotide probe
ggctgcacggtcccgtggctgcacggtcccgtttgcaagcgtccgggaccgtcgcaaagcgcac

SEQ ID NO: 2748 - DNA, 64 bp, Artificial
  oligonucleotide probe
ggctgcacggtcccgtggctgcacggtcccgtcgcattgcggctttcgttgcaagcgtccggga

SEQ ID NO: 2749 - DNA, 64 bp, Artificial
  oligonucleotide probe
aacggctgcaagcgcaaacggctgcaagcgcattcggggaaacgccgtaacgcgatttgccgca

SEQ ID NO: 2750 - DNA, 64 bp, Artificial
  oligonucleotide probe
aacggctgcaagcgcaaacggctgcaagcgcattcgccgtttgcgctgaagccgtgcgcaacga

SEQ ID NO: 2751 - DNA, 64 bp, Artificial
  oligonucleotide probe
aacggctgcaagcgcaaacggctgcaagcgcattcgccgtttgcgctgccgtcgcaaagcgcac

SEQ ID NO: 2752 - DNA, 64 bp, Artificial
  oligonucleotide probe
aacgcgatttgccgcaaacgcgatttgccgcacgcattgcggctttcgaacggctgcaagcgca

SEQ ID NO: 2753 - DNA, 64 bp, Artificial
  oligonucleotide probe
ccgtttcggctgggctccgtttcggctgggctttcgccgtttgcgctgggctgcacggtcccgt

SEQ ID NO: 2754 - DNA, 64 bp, Artificial
  oligonucleotide probe
ccgtcgcaaagcgcacccgtcgcaaagcgcacaagccgtgcgcaacgaatggcgcagcacgctg

SEQ ID NO: 2755 - DNA, 64 bp, Artificial
  oligonucleotide probe
ggctttgcgcaccgtgggctttgcgcaccgtgttcgccgtttgcgctgcgcattgcggctttcg

SEQ ID NO: 2756 - DNA, 64 bp, Artificial
  oligonucleotide probe
ttgcaagcgtccgggattgcaagcgtccgggaccgtcgcaaagcgcacaagccgtgcgcaacga

SEQ ID NO: 2757 - DNA, 64 bp, Artificial
  oligonucleotide probe
ccgtttcggctgggctccgtttcggctgggctggctgcacggtcccgtaagccgtgcgcaacga

SEQ ID NO: 2758 - DNA, 64 bp, Artificial
  oligonucleotide probe
ccgtcgcaaagcgcacccgtcgcaaagcgcacttcggggaaacgccgtccgtttcggctgggct

SEQ ID NO: 2759 - DNA, 64 bp, Artificial
  oligonucleotide probe
ttcgccgtttgcgctgttcgccgtttgcgctgaagccgtgcgcaacgattcggggaaacgccgt

SEQ ID NO: 2760 - DNA, 64 bp, Artificial
  oligonucleotide probe
ttcgccgtttgcgctgttcgccgtttgcgctgcgcattgcggctttcgggctttgcgcaccgtg

SEQ ID NO: 2761 - DNA, 64 bp, Artificial
  oligonucleotide probe
ccgtcgcaaagcgcacccgtcgcaaagcgcaccgcattgcggctttcgggctttgcgcaccgtg

SEQ ID NO: 2762 - DNA, 64 bp, Artificial
  oligonucleotide probe
ccgtcgcaaagcgcacccgtcgcaaagcgcacaagccgtgcgcaacgaaacgcgatttgccgca

SEQ ID NO: 2763 - DNA, 64 bp, Artificial
  oligonucleotide probe
aacgcgatttgccgcaaacgcgatttgccgcacgcattgcggctttcgttgcaagcgtccggga

SEQ ID NO: 2764 - DNA, 64 bp, Artificial
  oligonucleotide probe
ttcgccgtttgcgctgttcgccgtttgcgctgatggcgcagcacgctgaacgcgatttgccgca

SEQ ID NO: 2765 - DNA, 64 bp, Artificial
  oligonucleotide probe
ggctttgcgcaccgtgggctttgcgcaccgtgaacgcgatttgccgcattgcaagcgtccggga

SEQ ID NO: 2766 - DNA, 64 bp, Artificial
  oligonucleotide probe
aacgcgatttgccgcaaacgcgatttgccgcattcgccgtttgcgctgggctgcacggtcccgt

SEQ ID NO: 2767 - DNA, 64 bp, Artificial
  oligonucleotide probe
atggcgcagcacgctgatggcgcagcacgctgggctgcacggtcccgtttgcaagcgtccggga

SEQ ID NO: 2768 - DNA, 64 bp, Artificial
  oligonucleotide probe
atggcgcagcacgctgatggcgcagcacgctgccgtcgcaaagcgcacaacggctgcaagcgca

SEQ ID NO: 2769 - DNA, 64 bp, Artificial
  oligonucleotide probe
aagccgtgcgcaacgaaagccgtgcgcaacgaccgtttcggctgggctggctgcacggtcccgt

SEQ ID NO: 2770 - DNA, 64 bp, Artificial
  oligonucleotide probe
ttgcaagcgtccgggattgcaagcgtccgggaaacgcgatttgccgcattcgccgtttgcgctg

SEQ ID NO: 2771 - DNA, 64 bp, Artificial
  oligonucleotide probe
aacgcgatttgccgcaaacgcgatttgccgcattcgccgtttgcgctgggctttgcgcaccgtg

SEQ ID NO: 2772 - DNA, 64 bp, Artificial
  oligonucleotide probe
ggctgcacggtcccgtggctgcacggtcccgtcgcattgcggctttcgccgtttcggctgggct

SEQ ID NO: 2773 - DNA, 64 bp, Artificial
  oligonucleotide probe
ccgtcgcaaagcgcacccgtcgcaaagcgcacaacggctgcaagcgcaggctttgcgcaccgtg

SEQ ID NO: 2774 - DNA, 64 bp, Artificial
  oligonucleotide probe
atggcgcagcacgctgatggcgcagcacgctgaacgcgatttgccgcaccgtcgcaaagcgcac

SEQ ID NO: 2775 - DNA, 64 bp, Artificial
  oligonucleotide probe
ggctttgcgcaccgtgggctttgcgcaccgtgaacgcgatttgccgcattcgccgtttgcgctg

SEQ ID NO: 2776 - DNA, 64 bp, Artificial
  oligonucleotide probe
ttgcaagcgtccgggattgcaagcgtccgggaggctgcacggtcccgtcgcattgcggctttcg

SEQ ID NO: 2777 - DNA, 64 bp, Artificial
  oligonucleotide probe
aacggctgcaagcgcaaacggctgcaagcgcaatggcgcagcacgctgggctgcacggtcccgt

SEQ ID NO: 2778 - DNA, 64 bp, Artificial
  oligonucleotide probe
ttgcaagcgtccgggattgcaagcgtccgggaatggcgcagcacgctgaacgcgatttgccgca

SEQ ID NO: 2779 - DNA, 64 bp, Artificial
  oligonucleotide probe
cgcattgcggctttcgcgcattgcggctttcgatggcgcagcacgctgttcgccgtttgcgctg

SEQ ID NO: 2780 - DNA, 64 bp, Artificial
  oligonucleotide probe
ccgtttcggctgggctccgtttcggctgggctggctgcacggtcccgtaacggctgcaagcgca

SEQ ID NO: 2781 - DNA, 64 bp, Artificial
  oligonucleotide probe
ggctttgcgcaccgtgggctttgcgcaccgtgccgtttcggctgggctccgtcgcaaagcgcac

SEQ ID NO: 2782 - DNA, 64 bp, Artificial
  oligonucleotide probe
ccgtttcggctgggctccgtttcggctgggctttcgccgtttgcgctgcgcattgcggctttcg

SEQ ID NO: 2783 - DNA, 64 bp, Artificial
  oligonucleotide probe
ttcgccgtttgcgctgttcgccgtttgcgctgccgtcgcaaagcgcacaacggctgcaagcgca

SEQ ID NO: 2784 - DNA, 64 bp, Artificial
  oligonucleotide probe
cgcattgcggctttcgcgcattgcggctttcgttgcaagcgtccgggaaacgcgatttgccgca

SEQ ID NO: 2785 - DNA, 64 bp, Artificial
  oligonucleotide probe
ggctgcacggtcccgtggctgcacggtcccgtaacggctgcaagcgcaaacgcgatttgccgca

SEQ ID NO: 2786 - DNA, 64 bp, Artificial
  oligonucleotide probe
ccgtttcggctgggctccgtttcggctgggctccgtcgcaaagcgcacttcggggaaacgccgt

SEQ ID NO: 2787 - DNA, 64 bp, Artificial
  oligonucleotide probe
aacgcgatttgccgcaaacgcgatttgccgcaaacggctgcaagcgcattcggggaaacgccgt

SEQ ID NO: 2788 - DNA, 64 bp, Artificial
  oligonucleotide probe
cgcattgcggctttcgttgcaagcgtccgggattcggggaaacgccgtgcacgggaaagcggct

SEQ ID NO: 2789 - DNA, 64 bp, Artificial
  oligonucleotide probe
ggctttgcgcaccgtgttcggggaaacgccgtggctgcacggtcccgtgggattcgcgcaaacg

SEQ ID NO: 2790 - DNA, 64 bp, Artificial
  oligonucleotide probe
atggcgcagcacgctgttcggggaaacgccgtccgtcgcaaagcgcacgggattcgcgcaaacg

SEQ ID NO: 2791 - DNA, 64 bp, Artificial
  oligonucleotide probe
ggctgcacggtcccgtgggattcgcgcaaacggcaccgcagctgcgtggcacgggaaagcggct

SEQ ID NO: 2792 - DNA, 64 bp, Artificial
  oligonucleotide probe
aagccgtgcgcaacgaaacggctgcaagcgcaccgtttcggctgggctgggattcgcgcaaacg

SEQ ID NO: 2793 - DNA, 64 bp, Artificial
  oligonucleotide probe
cgcattgcggctttcgttgcaagcgtccgggaggctgcacggtcccgtgggattcgcgcaaacg

SEQ ID NO: 2794 - DNA, 64 bp, Artificial
  oligonucleotide probe
aacgcgatttgccgcattcgccgtttgcgctggggattcgcgcaaacggcacgggaaagcggct

SEQ ID NO: 2795 - DNA, 64 bp, Artificial
  oligonucleotide probe
atggcgcagcacgctgccgtcgcaaagcgcacgggattcgcgcaaacggcacgggaaagcggct

SEQ ID NO: 2796 - DNA, 64 bp, Artificial
  oligonucleotide probe
aagccgtgcgcaacgaggctttgcgcaccgtgttcgccgtttgcgctggcaccgcagctgcgtg

SEQ ID NO: 2797 - DNA, 64 bp, Artificial
  oligonucleotide probe
ttgcaagcgtccgggaaacggctgcaagcgcaggctgcacggtcccgtttgcatggcgtgggga

SEQ ID NO: 2798 - DNA, 64 bp, Artificial
  oligonucleotide probe
aagccgtgcgcaacgaaacgcgatttgccgcaggctgcacggtcccgtgcaccgcagctgcgtg

SEQ ID NO: 2799 - DNA, 64 bp, Artificial
  oligonucleotide probe
ttgcaagcgtccgggattcggggaaacgccgtgggattcgcgcaaacggcaccgcagctgcgtg

SEQ ID NO: 2800 - DNA, 64 bp, Artificial
  oligonucleotide probe
atggcgcagcacgctgttcgccgtttgcgctggggattcgcgcaaacggcaccgcagctgcgtg

SEQ ID NO: 2801 - DNA, 64 bp, Artificial
  oligonucleotide probe
ggctttgcgcaccgtgaacgcgatttgccgcaggctgcacggtcccgtgcaccgcagctgcgtg

SEQ ID NO: 2802 - DNA, 64 bp, Artificial
  oligonucleotide probe
ttgcaagcgtccgggaaacggctgcaagcgcattcggggaaacgccgtttgcatggcgtgggga

SEQ ID NO: 2803 - DNA, 64 bp, Artificial
  oligonucleotide probe
aagccgtgcgcaacgaggctttgcgcaccgtgccgtttcggctgggctgggattcgcgcaaacg

SEQ ID NO: 2804 - DNA, 64 bp, Artificial
  oligonucleotide probe
atggcgcagcacgctgttcggggaaacgccgtccgtttcggctgggctgcaccgcagctgcgtg

SEQ ID NO: 2805 - DNA, 64 bp, Artificial
  oligonucleotide probe
cgcattgcggctttcgaacggctgcaagcgcaggctgcacggtcccgtttgcatggcgtgggga

SEQ ID NO: 2806 - DNA, 64 bp, Artificial
  oligonucleotide probe
aacggctgcaagcgcaggctgcacggtcccgtgggattcgcgcaaacggcacgggaaagcggct

SEQ ID NO: 2807 - DNA, 64 bp, Artificial
  oligonucleotide probe
cgcattgcggctttcgatggcgcagcacgctggggattcgcgcaaacggcacgggaaagcggct

SEQ ID NO: 2808 - DNA, 64 bp, Artificial
  oligonucleotide probe
ggctttgcgcaccgtgttcggggaaacgccgtttcgccgtttgcgctggggattcgcgcaaacg

SEQ ID NO: 2809 - DNA, 64 bp, Artificial
  oligonucleotide probe
ggctttgcgcaccgtgttcggggaaacgccgtttcgccgtttgcgctgttgcatggcgtgggga

SEQ ID NO: 2810 - DNA, 64 bp, Artificial
  oligonucleotide probe
ggctttgcgcaccgtgatggcgcagcacgctgttcgccgtttgcgctgttgcatggcgtgggga

SEQ ID NO: 2811 - DNA, 64 bp, Artificial
  oligonucleotide probe
atggcgcagcacgctgccgtttcggctgggctgcaccgcagctgcgtggcacgggaaagcggct

SEQ ID NO: 2812 - DNA, 64 bp, Artificial
  oligonucleotide probe
cgcattgcggctttcgaacggctgcaagcgcaatggcgcagcacgctggcacgggaaagcggct

SEQ ID NO: 2813 - DNA, 64 bp, Artificial
  oligonucleotide probe
aagccgtgcgcaacgacgcattgcggctttcgttgcatggcgtggggagcacgggaaagcggct

SEQ ID NO: 2814 - DNA, 64 bp, Artificial
  oligonucleotide probe
ccgtttcggctgggctccgtcgcaaagcgcacgggattcgcgcaaacgttgcatggcgtgggga

SEQ ID NO: 2815 - DNA, 64 bp, Artificial
  oligonucleotide probe
aacggctgcaagcgcaccgtttcggctgggctaacgcgatttgccgcagcacgggaaagcggct

SEQ ID NO: 2816 - DNA, 64 bp, Artificial
  oligonucleotide probe
aacggctgcaagcgcaaacgcgatttgccgcattgcatggcgtggggagcacgggaaagcggct

SEQ ID NO: 2817 - DNA, 64 bp, Artificial
  oligonucleotide probe
ttgcaagcgtccgggaggctgcacggtcccgtgggattcgcgcaaacggcacgggaaagcggct

SEQ ID NO: 2818 - DNA, 64 bp, Artificial
  oligonucleotide probe
cgcattgcggctttcgggctttgcgcaccgtggggattcgcgcaaacggcaccgcagctgcgtg

SEQ ID NO: 2819 - DNA, 64 bp, Artificial
  oligonucleotide probe
ttgcaagcgtccgggaccgtcgcaaagcgcacggctgcacggtcccgtttgcatggcgtgggga

SEQ ID NO: 2820 - DNA, 64 bp, Artificial
  oligonucleotide probe
aagccgtgcgcaacgaaacgcgatttgccgcagggattcgcgcaaacggcacgggaaagcggct

SEQ ID NO: 2821 - DNA, 64 bp, Artificial
  oligonucleotide probe
cgcattgcggctttcgatggcgcagcacgctgccgtttcggctgggctgggattcgcgcaaacg

SEQ ID NO: 2822 - DNA, 64 bp, Artificial
  oligonucleotide probe
cgcattgcggctttcgaacggctgcaagcgcaccgtttcggctgggctgggattcgcgcaaacg

SEQ ID NO: 2823 - DNA, 64 bp, Artificial
  oligonucleotide probe
aacgcgatttgccgcattcgccgtttgcgctggcaccgcagctgcgtggcacgggaaagcggct

SEQ ID NO: 2824 - DNA, 64 bp, Artificial
  oligonucleotide probe
cgcattgcggctttcgttgcaagcgtccgggaaacggctgcaagcgcagggattcgcgcaaacg

SEQ ID NO: 2825 - DNA, 64 bp, Artificial
  oligonucleotide probe
cgcattgcggctttcgttgcaagcgtccgggaccgtttcggctgggctttgcatggcgtgggga

SEQ ID NO: 2826 - DNA, 64 bp, Artificial
  oligonucleotide probe
aacggctgcaagcgcaatggcgcagcacgctggggattcgcgcaaacggcacgggaaagcggct

SEQ ID NO: 2827 - DNA, 64 bp, Artificial
  oligonucleotide probe
aacggctgcaagcgcaggctttgcgcaccgtgccgtcgcaaagcgcacgggattcgcgcaaacg

SEQ ID NO: 2828 - DNA, 64 bp, Artificial
  oligonucleotide probe
ccgtttcggctgggctccgtcgcaaagcgcacgggattcgcgcaaacggcaccgcagctgcgtg

SEQ ID NO: 2829 - DNA, 64 bp, Artificial
  oligonucleotide probe
cgcattgcggctttcgttgcaagcgtccgggaccgtttcggctgggctgcaccgcagctgcgtg

SEQ ID NO: 2830 - DNA, 64 bp, Artificial
  oligonucleotide probe
aacggctgcaagcgcaggctttgcgcaccgtgccgtttcggctgggctgggattcgcgcaaacg

SEQ ID NO: 2831 - DNA, 64 bp, Artificial
  oligonucleotide probe
aagccgtgcgcaacgattcggggaaacgccgtggctgcacggtcccgtttgcatggcgtgggga

SEQ ID NO: 2832 - DNA, 64 bp, Artificial
  oligonucleotide probe
cgcattgcggctttcgggctgcacggtcccgtgggattcgcgcaaacggcaccgcagctgcgtg

SEQ ID NO: 2833 - DNA, 64 bp, Artificial
  oligonucleotide probe
aagccgtgcgcaacgattcggggaaacgccgtgggattcgcgcaaacggcacgggaaagcggct

SEQ ID NO: 2834 - DNA, 64 bp, Artificial
  oligonucleotide probe
aagccgtgcgcaacgaatggcgcagcacgctgttgcatggcgtggggagcaccgcagctgcgtg

SEQ ID NO: 2835 - DNA, 64 bp, Artificial
  oligonucleotide probe
aacggctgcaagcgcaccgtttcggctgggctaacgcgatttgccgcagggattcgcgcaaacg

SEQ ID NO: 2836 - DNA, 64 bp, Artificial
  oligonucleotide probe
ttcggggaaacgccgtccgtttcggctgggctgggattcgcgcaaacgttgcatggcgtgggga

SEQ ID NO: 2837 - DNA, 64 bp, Artificial
  oligonucleotide probe
aagccgtgcgcaacgaatggcgcagcacgctggggattcgcgcaaacggcacgggaaagcggct

SEQ ID NO: 2838 - DNA, 64 bp, Artificial
  oligonucleotide probe
ttgcaagcgtccgggaaacggctgcaagcgcaccgtcgcaaagcgcacttgcatggcgtgggga

SEQ ID NO: 2839 - DNA, 64 bp, Artificial
  oligonucleotide probe
cgcattgcggctttcgccgtttcggctgggctggctgcacggtcccgtttgcatggcgtgggga

SEQ ID NO: 2840 - DNA, 64 bp, Artificial
  oligonucleotide probe
ttgcaagcgtccgggaggctttgcgcaccgtgaacgcgatttgccgcagggattcgcgcaaacg

SEQ ID NO: 2841 - DNA, 64 bp, Artificial
  oligonucleotide probe
atggcgcagcacgctgttcgccgtttgcgctgttgcatggcgtggggagcaccgcagctgcgtg

SEQ ID NO: 2842 - DNA, 64 bp, Artificial
  oligonucleotide probe
aagccgtgcgcaacgaaacggctgcaagcgcattcggggaaacgccgtttgcatggcgtgggga

SEQ ID NO: 2843 - DNA, 64 bp, Artificial
  oligonucleotide probe
aagccgtgcgcaacgattgcaagcgtccgggaaacggctgcaagcgcagggattcgcgcaaacg

SEQ ID NO: 2844 - DNA, 64 bp, Artificial
  oligonucleotide probe
aacggctgcaagcgcagggattcgcgcaaacgttgcatggcgtggggagcacgggaaagcggct

SEQ ID NO: 2845 - DNA, 64 bp, Artificial
  oligonucleotide probe
ttgcaagcgtccgggaccgtcgcaaagcgcacgggattcgcgcaaacggcaccgcagctgcgtg

SEQ ID NO: 2846 - DNA, 64 bp, Artificial
  oligonucleotide probe
ggctttgcgcaccgtgatggcgcagcacgctgccgtcgcaaagcgcacgcacgggaaagcggct

SEQ ID NO: 2847 - DNA, 64 bp, Artificial
  oligonucleotide probe
aacggctgcaagcgcattcgccgtttgcgctgccgtcgcaaagcgcacgggattcgcgcaaacg

SEQ ID NO: 2848 - DNA, 64 bp, Artificial
  oligonucleotide probe
ggctttgcgcaccgtgggctgcacggtcccgtttgcatggcgtggggagcaccgcagctgcgtg

SEQ ID NO: 2849 - DNA, 64 bp, Artificial
  oligonucleotide probe
cgcattgcggctttcgttgcaagcgtccgggagcaccgcagctgcgtggcacgggaaagcggct

SEQ ID NO: 2850 - DNA, 64 bp, Artificial
  oligonucleotide probe
ccgtttcggctgggctccgtcgcaaagcgcacttgcatggcgtggggagcaccgcagctgcgtg

SEQ ID NO: 2851 - DNA, 64 bp, Artificial
  oligonucleotide probe
aacgcgatttgccgcattcgccgtttgcgctgttgcatggcgtggggagcacgggaaagcggct

SEQ ID NO: 2852 - DNA, 64 bp, Artificial
  oligonucleotide probe
ggctttgcgcaccgtgccgtttcggctgggctaacgcgatttgccgcattgcatggcgtgggga

SEQ ID NO: 2853 - DNA, 64 bp, Artificial
  oligonucleotide probe
aagccgtgcgcaacgaaacggctgcaagcgcaatggcgcagcacgctggcaccgcagctgcgtg

SEQ ID NO: 2854 - DNA, 64 bp, Artificial
  oligonucleotide probe
aagccgtgcgcaacgattgcaagcgtccgggaggctgcacggtcccgtgcaccgcagctgcgtg

SEQ ID NO: 2855 - DNA, 64 bp, Artificial
  oligonucleotide probe
aagccgtgcgcaacgacgcattgcggctttcgaacggctgcaagcgcattgcatggcgtgggga

SEQ ID NO: 2856 - DNA, 64 bp, Artificial
  oligonucleotide probe
ggctttgcgcaccgtgttcggggaaacgccgtgggattcgcgcaaacgttgcatggcgtgggga

SEQ ID NO: 2857 - DNA, 64 bp, Artificial
  oligonucleotide probe
ttcggggaaacgccgtccgtttcggctgggctggctgcacggtcccgtgcaccgcagctgcgtg

SEQ ID NO: 2858 - DNA, 64 bp, Artificial
  oligonucleotide probe
aacggctgcaagcgcaaacgcgatttgccgcaggctgcacggtcccgtgcacgggaaagcggct

SEQ ID NO: 2859 - DNA, 64 bp, Artificial
  oligonucleotide probe
ggctttgcgcaccgtggggattcgcgcaaacggcaccgcagctgcgtggcacgggaaagcggct

SEQ ID NO: 2860 - DNA, 64 bp, Artificial
  oligonucleotide probe
ccgtttcggctgggctaacgcgatttgccgcagggattcgcgcaaacggcaccgcagctgcgtg

SEQ ID NO: 2861 - DNA, 64 bp, Artificial
  oligonucleotide probe
cgcattgcggctttcgggctttgcgcaccgtgttgcatggcgtggggagcacgggaaagcggct

SEQ ID NO: 2862 - DNA, 64 bp, Artificial
  oligonucleotide probe
atggcgcagcacgctgaacgcgatttgccgcagggattcgcgcaaacgttgcatggcgtgggga

SEQ ID NO: 2863 - DNA, 64 bp, Artificial
  oligonucleotide probe
aacggctgcaagcgcattcggggaaacgccgtggctgcacggtcccgtgcaccgcagctgcgtg

SEQ ID NO: 2864 - DNA, 64 bp, Artificial
  oligonucleotide probe
ggctttgcgcaccgtgccgtttcggctgggctgggattcgcgcaaacgttgcatggcgtgggga

SEQ ID NO: 2865 - DNA, 64 bp, Artificial
  oligonucleotide probe
ttgcaagcgtccgggagggattcgcgcaaacggcaccgcagctgcgtggcacgggaaagcggct

SEQ ID NO: 2866 - DNA, 64 bp, Artificial
  oligonucleotide probe
ggctttgcgcaccgtgccgtcgcaaagcgcacgggattcgcgcaaacggcaccgcagctgcgtg

SEQ ID NO: 2867 - DNA, 64 bp, Artificial
  oligonucleotide probe
aacgcgatttgccgcaccgtcgcaaagcgcacttgcatggcgtggggagcacgggaaagcggct

SEQ ID NO: 2868 - DNA, 64 bp, Artificial
  oligonucleotide probe
atggcgcagcacgctgttcggggaaacgccgtccgtcgcaaagcgcacgcaccgcagctgcgtg

SEQ ID NO: 2869 - DNA, 64 bp, Artificial
  oligonucleotide probe
ccgtcgcaaagcgcacggctgcacggtcccgtgggattcgcgcaaacggcaccgcagctgcgtg

SEQ ID NO: 2870 - DNA, 64 bp, Artificial
  oligonucleotide probe
cgcattgcggctttcgatggcgcagcacgctgccgtcgcaaagcgcacgcacgggaaagcggct

SEQ ID NO: 2871 - DNA, 64 bp, Artificial
  oligonucleotide probe
aagccgtgcgcaacgaggctttgcgcaccgtgccgtttcggctgggctttgcatggcgtgggga

SEQ ID NO: 2872 - DNA, 64 bp, Artificial
  oligonucleotide probe
cgcattgcggctttcgttcggggaaacgccgtccgtttcggctgggctgcaccgcagctgcgtg

SEQ ID NO: 2873 - DNA, 64 bp, Artificial
  oligonucleotide probe
ttgcaagcgtccgggaatggcgcagcacgctgccgtttcggctgggctgggattcgcgcaaacg

SEQ ID NO: 2874 - DNA, 64 bp, Artificial
  oligonucleotide probe
ttcggggaaacgccgtaacgcgatttgccgcaggctgcacggtcccgtgggattcgcgcaaacg

SEQ ID NO: 2875 - DNA, 64 bp, Artificial
  oligonucleotide probe
ttcggggaaacgccgtccgtttcggctgggctttcgccgtttgcgctgttgcatggcgtgggga

SEQ ID NO: 2876 - DNA, 64 bp, Artificial
  oligonucleotide probe
atggcgcagcacgctgccgtcgcaaagcgcacttgcatggcgtggggagcaccgcagctgcgtg

SEQ ID NO: 2877 - DNA, 64 bp, Artificial
  oligonucleotide probe
atggcgcagcacgctgttcggggaaacgccgtaacgcgatttgccgcagggattcgcgcaaacg

SEQ ID NO: 2878 - DNA, 64 bp, Artificial
  oligonucleotide probe
aagccgtgcgcaacgattcgccgtttgcgctggggattcgcgcaaacgttgcatggcgtgggga

SEQ ID NO: 2879 - DNA, 64 bp, Artificial
  oligonucleotide probe
cgcattgcggctttcgccgtcgcaaagcgcacgggattcgcgcaaacggcaccgcagctgcgtg

SEQ ID NO: 2880 - DNA, 64 bp, Artificial
  oligonucleotide probe
cgcattgcggctttcgttgcaagcgtccgggattcgccgtttgcgctggcaccgcagctgcgtg

SEQ ID NO: 2881 - DNA, 64 bp, Artificial
  oligonucleotide probe
cgcattgcggctttcgatggcgcagcacgctgttcgccgtttgcgctggcaccgcagctgcgtg

SEQ ID NO: 2882 - DNA, 64 bp, Artificial
  oligonucleotide probe
aagccgtgcgcaacgattgcaagcgtccgggaggctgcacggtcccgtgggattcgcgcaaacg

SEQ ID NO: 2883 - DNA, 64 bp, Artificial
  oligonucleotide probe
aagccgtgcgcaacgaggctttgcgcaccgtgttgcatggcgtggggagcaccgcagctgcgtg

SEQ ID NO: 2884 - DNA, 64 bp, Artificial
  oligonucleotide probe
aagccgtgcgcaacgattgcaagcgtccgggaccgtttcggctgggctgcaccgcagctgcgtg

SEQ ID NO: 2885 - DNA, 64 bp, Artificial
  oligonucleotide probe
aacggctgcaagcgcaggctttgcgcaccgtgttcgccgtttgcgctgttgcatggcgtgggga

SEQ ID NO: 2886 - DNA, 64 bp, Artificial
  oligonucleotide probe
aagccgtgcgcaacgaaacggctgcaagcgcaggctttgcgcaccgtggggattcgcgcaaacg

SEQ ID NO: 2887 - DNA, 64 bp, Artificial
  oligonucleotide probe
aagccgtgcgcaacgacgcattgcggctttcgggctttgcgcaccgtgttgcatggcgtgggga

SEQ ID NO: 2888 - DNA, 64 bp, Artificial
  oligonucleotide probe
ggctttgcgcaccgtgttcgccgtttgcgctggggattcgcgcaaacggcacgggaaagcggct

SEQ ID NO: 2889 - DNA, 64 bp, Artificial
  oligonucleotide probe
cgcattgcggctttcgggctttgcgcaccgtgccgtttcggctgggctttgcatggcgtgggga

SEQ ID NO: 2890 - DNA, 64 bp, Artificial
  oligonucleotide probe
cgcattgcggctttcgggctttgcgcaccgtgttcgccgtttgcgctgttgcatggcgtgggga

SEQ ID NO: 2891 - DNA, 64 bp, Artificial
  oligonucleotide probe
aagccgtgcgcaacgacgcattgcggctttcgatggcgcagcacgctggggattcgcgcaaacg

SEQ ID NO: 2892 - DNA, 64 bp, Artificial
  oligonucleotide probe
aacggctgcaagcgcaatggcgcagcacgctggggattcgcgcaaacgttgcatggcgtgggga

SEQ ID NO: 2893 - DNA, 64 bp, Artificial
  oligonucleotide probe
ggctttgcgcaccgtgttcggggaaacgccgtccgtttcggctgggctgcaccgcagctgcgtg

SEQ ID NO: 2894 - DNA, 64 bp, Artificial
  oligonucleotide probe
ggctttgcgcaccgtgttcgccgtttgcgctggggattcgcgcaaacgttgcatggcgtgggga

SEQ ID NO: 2895 - DNA, 64 bp, Artificial
  oligonucleotide probe
ggctttgcgcaccgtgccgtttcggctgggctccgtcgcaaagcgcacgcaccgcagctgcgtg

SEQ ID NO: 2896 - DNA, 64 bp, Artificial
  oligonucleotide probe
ttcggggaaacgccgtccgtttcggctgggctttcgccgtttgcgctggggattcgcgcaaacg

SEQ ID NO: 2897 - DNA, 64 bp, Artificial
  oligonucleotide probe
aacgcgatttgccgcagggattcgcgcaaacgttgcatggcgtggggagcacgggaaagcggct

SEQ ID NO: 2898 - DNA, 64 bp, Artificial
  oligonucleotide probe
aagccgtgcgcaacgaaacggctgcaagcgcaccgtcgcaaagcgcacgcaccgcagctgcgtg

SEQ ID NO: 2899 - DNA, 64 bp, Artificial
  oligonucleotide probe
ttgcaagcgtccgggaaacgcgatttgccgcagcaccgcagctgcgtggcacgggaaagcggct

SEQ ID NO: 2900 - DNA, 64 bp, Artificial
  oligonucleotide probe
ggctttgcgcaccgtgaacgcgatttgccgcattgcatggcgtggggagcaccgcagctgcgtg

SEQ ID NO: 2901 - DNA, 64 bp, Artificial
  oligonucleotide probe
ccgtttcggctgggctggctgcacggtcccgtgggattcgcgcaaacggcaccgcagctgcgtg

SEQ ID NO: 2902 - DNA, 64 bp, Artificial
  oligonucleotide probe
aagccgtgcgcaacgaatggcgcagcacgctgttgcatggcgtggggagcacgggaaagcggct

SEQ ID NO: 2903 - DNA, 64 bp, Artificial
  oligonucleotide probe
ttcggggaaacgccgtccgtcgcaaagcgcacgggattcgcgcaaacgttgcatggcgtgggga

SEQ ID NO: 2904 - DNA, 64 bp, Artificial
  oligonucleotide probe
ttgcaagcgtccgggaaacggctgcaagcgcaatggcgcagcacgctggcacgggaaagcggct

SEQ ID NO: 2905 - DNA, 64 bp, Artificial
  oligonucleotide probe
ggctttgcgcaccgtgttcgccgtttgcgctgccgtcgcaaagcgcacgggattcgcgcaaacg

SEQ ID NO: 2906 - DNA, 64 bp, Artificial
  oligonucleotide probe
cgcattgcggctttcgaacgcgatttgccgcattcgccgtttgcgctggggattcgcgcaaacg

SEQ ID NO: 2907 - DNA, 64 bp, Artificial
  oligonucleotide probe
aacggctgcaagcgcaggctttgcgcaccgtgttcgccgtttgcgctggcaccgcagctgcgtg

SEQ ID NO: 2908 - DNA, 64 bp, Artificial
  oligonucleotide probe
aagccgtgcgcaacgaatggcgcagcacgctgttcgccgtttgcgctggcaccgcagctgcgtg

SEQ ID NO: 2909 - DNA, 64 bp, Artificial
  oligonucleotide probe
cgcattgcggctttcgttgcaagcgtccgggaccgtcgcaaagcgcacttgcatggcgtgggga

SEQ ID NO: 2910 - DNA, 64 bp, Artificial
  oligonucleotide probe
ccgtttcggctgggctccgtcgcaaagcgcacggctgcacggtcccgtttgcatggcgtgggga

SEQ ID NO: 2911 - DNA, 64 bp, Artificial
  oligonucleotide probe
ttcgccgtttgcgctggggattcgcgcaaacggcaccgcagctgcgtggcacgggaaagcggct

SEQ ID NO: 2912 - DNA, 64 bp, Artificial
  oligonucleotide probe
ttcgccgtttgcgctgccgtcgcaaagcgcacgggattcgcgcaaacggcaccgcagctgcgtg

SEQ ID NO: 2913 - DNA, 64 bp, Artificial
  oligonucleotide probe
atggcgcagcacgctgccgtttcggctgggctttcgccgtttgcgctggcaccgcagctgcgtg

SEQ ID NO: 2914 - DNA, 64 bp, Artificial
  oligonucleotide probe
atggcgcagcacgctgccgtttcggctgggctgggattcgcgcaaacggcaccgcagctgcgtg

SEQ ID NO: 2915 - DNA, 64 bp, Artificial
  oligonucleotide probe
ccgtcgcaaagcgcacgggattcgcgcaaacgttgcatggcgtggggagcacgggaaagcggct

SEQ ID NO: 2916 - DNA, 64 bp, Artificial
  oligonucleotide probe
cgcattgcggctttcgttgcaagcgtccgggaaacggctgcaagcgcagcacgggaaagcggct

SEQ ID NO: 2917 - DNA, 64 bp, Artificial
  oligonucleotide probe
ccgtttcggctgggctaacgcgatttgccgcattcgccgtttgcgctggcaccgcagctgcgtg

SEQ ID NO: 2918 - DNA, 64 bp, Artificial
  oligonucleotide probe
cgcattgcggctttcgggctttgcgcaccgtgaacgcgatttgccgcattgcatggcgtgggga

SEQ ID NO: 2919 - DNA, 64 bp, Artificial
  oligonucleotide probe
ccgtttcggctgggctttcgccgtttgcgctggcaccgcagctgcgtggcacgggaaagcggct

SEQ ID NO: 2920 - DNA, 64 bp, Artificial
  oligonucleotide probe
aagccgtgcgcaacgaaacggctgcaagcgcagggattcgcgcaaacggcacgggaaagcggct

SEQ ID NO: 2921 - DNA, 64 bp, Artificial
  oligonucleotide probe
aacgcgatttgccgcattcgccgtttgcgctgccgtcgcaaagcgcacgcaccgcagctgcgtg

SEQ ID NO: 2922 - DNA, 64 bp, Artificial
  oligonucleotide probe
ttgcaagcgtccgggaggctttgcgcaccgtgggctgcacggtcccgtgcacgggaaagcggct

SEQ ID NO: 2923 - DNA, 64 bp, Artificial
  oligonucleotide probe
ttgcaagcgtccgggaccgtttcggctgggctgcaccgcagctgcgtggcacgggaaagcggct

SEQ ID NO: 2924 - DNA, 64 bp, Artificial
  oligonucleotide probe
aagccgtgcgcaacgaaacggctgcaagcgcaccgtttcggctgggctgcaccgcagctgcgtg

SEQ ID NO: 2925 - DNA, 64 bp, Artificial
  oligonucleotide probe
aagccgtgcgcaacgaccgtttcggctgggctgggattcgcgcaaacggcaccgcagctgcgtg

SEQ ID NO: 2926 - DNA, 64 bp, Artificial
  oligonucleotide probe
cgcattgcggctttcgttcggggaaacgccgtttcgccgtttgcgctgttgcatggcgtgggga

SEQ ID NO: 2927 - DNA, 64 bp, Artificial
  oligonucleotide probe
ttgcaagcgtccgggaatggcgcagcacgctggggattcgcgcaaacgttgcatggcgtgggga

SEQ ID NO: 2928 - DNA, 64 bp, Artificial
  oligonucleotide probe
cgcattgcggctttcgaacgcgatttgccgcattcgccgtttgcgctggcacgggaaagcggct

SEQ ID NO: 2929 - DNA, 64 bp, Artificial
  oligonucleotide probe
aagccgtgcgcaacgaggctttgcgcaccgtgttcgccgtttgcgctggggattcgcgcaaacg

SEQ ID NO: 2930 - DNA, 64 bp, Artificial
  oligonucleotide probe
ttgcaagcgtccgggaaacggctgcaagcgcattgcatggcgtggggagcaccgcagctgcgtg

SEQ ID NO: 2931 - DNA, 64 bp, Artificial
  oligonucleotide probe
ttgcaagcgtccgggaggctttgcgcaccgtgccgtcgcaaagcgcacgggattcgcgcaaacg

SEQ ID NO: 2932 - DNA, 64 bp, Artificial
  oligonucleotide probe
cgcattgcggctttcgggctgcacggtcccgtgggattcgcgcaaacgttgcatggcgtgggga

SEQ ID NO: 2933 - DNA, 64 bp, Artificial
  oligonucleotide probe
ggctttgcgcaccgtgttcgccgtttgcgctgggctgcacggtcccgtttgcatggcgtgggga

SEQ ID NO: 2934 - DNA, 64 bp, Artificial
  oligonucleotide probe
ttgcaagcgtccgggaccgtttcggctgggctttcgccgtttgcgctggcacgggaaagcggct

SEQ ID NO: 2935 - DNA, 64 bp, Artificial
  oligonucleotide probe
ggctttgcgcaccgtgatggcgcagcacgctgccgtttcggctgggctttgcatggcgtgggga

SEQ ID NO: 2936 - DNA, 64 bp, Artificial
  oligonucleotide probe
aagccgtgcgcaacgattgcaagcgtccgggattcgccgtttgcgctggcacgggaaagcggct

SEQ ID NO: 2937 - DNA, 64 bp, Artificial
  oligonucleotide probe
atggcgcagcacgctgaacgcgatttgccgcaggctgcacggtcccgtttgcatggcgtgggga

SEQ ID NO: 2938 - DNA, 64 bp, Artificial
  oligonucleotide probe
ttgcaagcgtccgggaggctttgcgcaccgtgttcgccgtttgcgctggcacgggaaagcggct

SEQ ID NO: 2939 - DNA, 64 bp, Artificial
  oligonucleotide probe
ccgtttcggctgggctttcgccgtttgcgctgccgtcgcaaagcgcacgcaccgcagctgcgtg

SEQ ID NO: 2940 - DNA, 64 bp, Artificial
  oligonucleotide probe
cgcattgcggctttcgggctttgcgcaccgtgatggcgcagcacgctggcacgggaaagcggct

SEQ ID NO: 2941 - DNA, 64 bp, Artificial
  oligonucleotide probe
cgcattgcggctttcgaacggctgcaagcgcattcgccgtttgcgctggcacgggaaagcggct

SEQ ID NO: 2942 - DNA, 64 bp, Artificial
  oligonucleotide probe
ttgcaagcgtccgggattcgccgtttgcgctgggctgcacggtcccgtgcaccgcagctgcgtg

SEQ ID NO: 2943 - DNA, 64 bp, Artificial
  oligonucleotide probe
cgcattgcggctttcgttcggggaaacgccgtgggattcgcgcaaacgttgcatggcgtgggga

SEQ ID NO: 2944 - DNA, 64 bp, Artificial
  oligonucleotide probe
cgcattgcggctttcggggattcgcgcaaacgttgcatggcgtggggagcacgggaaagcggct

SEQ ID NO: 2945 - DNA, 64 bp, Artificial
  oligonucleotide probe
ttgcaagcgtccgggattcggggaaacgccgtggctgcacggtcccgtgcacgggaaagcggct

SEQ ID NO: 2946 - DNA, 64 bp, Artificial
  oligonucleotide probe
aacggctgcaagcgcattcggggaaacgccgtaacgcgatttgccgcagcacgggaaagcggct

SEQ ID NO: 2947 - DNA, 64 bp, Artificial
  oligonucleotide probe
aacggctgcaagcgcaatggcgcagcacgctgccgtcgcaaagcgcacgcaccgcagctgcgtg

SEQ ID NO: 2948 - DNA, 64 bp, Artificial
  oligonucleotide probe
ttcggggaaacgccgtccgtcgcaaagcgcacgggattcgcgcaaacggcaccgcagctgcgtg

SEQ ID NO: 2949 - DNA, 64 bp, Artificial
  oligonucleotide probe
ccgtttcggctgggctttgcatggcgtggggagcaccgcagctgcgtggcacgggaaagcggct

SEQ ID NO: 2950 - DNA, 64 bp, Artificial
  oligonucleotide probe
aagccgtgcgcaacgattgcaagcgtccgggaccgtcgcaaagcgcacgcacgggaaagcggct

SEQ ID NO: 2951 - DNA, 64 bp, Artificial
  oligonucleotide probe
cgcattgcggctttcgaacggctgcaagcgcaggctgcacggtcccgtgcaccgcagctgcgtg

SEQ ID NO: 2952 - DNA, 64 bp, Artificial
  oligonucleotide probe
cgcattgcggctttcgccgtttcggctgggctggctgcacggtcccgtgggattcgcgcaaacg

SEQ ID NO: 2953 - DNA, 64 bp, Artificial
  oligonucleotide probe
ttcggggaaacgccgtccgtcgcaaagcgcacttgcatggcgtggggagcaccgcagctgcgtg

SEQ ID NO: 2954 - DNA, 64 bp, Artificial
  oligonucleotide probe
ggctttgcgcaccgtgaacgcgatttgccgcattcgccgtttgcgctgttgcatggcgtgggga

SEQ ID NO: 2955 - DNA, 64 bp, Artificial
  oligonucleotide probe
aagccgtgcgcaacgaccgtttcggctgggctttcgccgtttgcgctggcaccgcagctgcgtg

SEQ ID NO: 2956 - DNA, 64 bp, Artificial
  oligonucleotide probe
aacgcgatttgccgcaggctgcacggtcccgtttgcatggcgtggggagcacgggaaagcggct

SEQ ID NO: 2957 - DNA, 64 bp, Artificial
  oligonucleotide probe
ttgcaagcgtccgggaggctttgcgcaccgtgccgtcgcaaagcgcacttgcatggcgtgggga

SEQ ID NO: 2958 - DNA, 64 bp, Artificial
  oligonucleotide probe
ttgcaagcgtccgggaatggcgcagcacgctgccgtcgcaaagcgcacttgcatggcgtgggga

SEQ ID NO: 2959 - DNA, 64 bp, Artificial
  oligonucleotide probe
ggctttgcgcaccgtgaacgcgatttgccgcattgcatggcgtggggagcacgggaaagcggct

SEQ ID NO: 2960 - DNA, 64 bp, Artificial
  oligonucleotide probe
aacggctgcaagcgcaggctttgcgcaccgtgccgtcgcaaagcgcacgcaccgcagctgcgtg

SEQ ID NO: 2961 - DNA, 64 bp, Artificial
  oligonucleotide probe
ccgtttcggctgggctttcgccgtttgcgctgccgtcgcaaagcgcacttgcatggcgtgggga

SEQ ID NO: 2962 - DNA, 64 bp, Artificial
  oligonucleotide probe
aacggctgcaagcgcaccgtcgcaaagcgcacttgcatggcgtggggagcaccgcagctgcgtg

SEQ ID NO: 2963 - DNA, 64 bp, Artificial
  oligonucleotide probe
cgcattgcggctttcgttcggggaaacgccgtaacgcgatttgccgcagggattcgcgcaaacg

SEQ ID NO: 2964 - DNA, 64 bp, Artificial
  oligonucleotide probe
ttcgccgtttgcgctgccgtcgcaaagcgcacggctgcacggtcccgtgggattcgcgcaaacg

SEQ ID NO: 2965 - DNA, 64 bp, Artificial
  oligonucleotide probe
cgcattgcggctttcgggctgcacggtcccgtttgcatggcgtggggagcaccgcagctgcgtg

SEQ ID NO: 2966 - DNA, 64 bp, Artificial
  oligonucleotide probe
cgcattgcggctttcgaacggctgcaagcgcagcaccgcagctgcgtggcacgggaaagcggct

SEQ ID NO: 2967 - DNA, 64 bp, Artificial
  oligonucleotide probe
cgcattgcggctttcgatggcgcagcacgctgccgtttcggctgggctgcacgggaaagcggct

SEQ ID NO: 2968 - DNA, 64 bp, Artificial
  oligonucleotide probe
ttgcaagcgtccgggaaacgcgatttgccgcattcgccgtttgcgctggcaccgcagctgcgtg

SEQ ID NO: 2969 - DNA, 64 bp, Artificial
  oligonucleotide probe
atggcgcagcacgctgttcgccgtttgcgctgccgtcgcaaagcgcacgcacgggaaagcggct

SEQ ID NO: 2970 - DNA, 64 bp, Artificial
  oligonucleotide probe
aagccgtgcgcaacgattcggggaaacgccgtccgtttcggctgggctgcaccgcagctgcgtg

SEQ ID NO: 2971 - DNA, 64 bp, Artificial
  oligonucleotide probe
aagccgtgcgcaacgattgcaagcgtccgggaggctttgcgcaccgtggcaccgcagctgcgtg

SEQ ID NO: 2972 - DNA, 64 bp, Artificial
  oligonucleotide probe
ttgcaagcgtccgggaaacgcgatttgccgcagggattcgcgcaaacggcaccgcagctgcgtg

SEQ ID NO: 2973 - DNA, 64 bp, Artificial
  oligonucleotide probe
aacggctgcaagcgcaggctttgcgcaccgtgggctgcacggtcccgtttgcatggcgtgggga

SEQ ID NO: 2974 - DNA, 64 bp, Artificial
  oligonucleotide probe
cgcattgcggctttcgaacggctgcaagcgcaccgtcgcaaagcgcacgcaccgcagctgcgtg

SEQ ID NO: 2975 - DNA, 64 bp, Artificial
  oligonucleotide probe
ccgtttcggctgggctgggattcgcgcaaacgttgcatggcgtggggagcacgggaaagcggct

SEQ ID NO: 2976 - DNA, 64 bp, Artificial
  oligonucleotide probe
ttgcaagcgtccgggaggctttgcgcaccgtggcaccgcagctgcgtggcacgggaaagcggct

SEQ ID NO: 2977 - DNA, 64 bp, Artificial
  oligonucleotide probe
ccgtttcggctgggctggctgcacggtcccgtttgcatggcgtggggagcaccgcagctgcgtg

SEQ ID NO: 2978 - DNA, 64 bp, Artificial
  oligonucleotide probe
aacgcgatttgccgcattcgccgtttgcgctgccgtcgcaaagcgcacgggattcgcgcaaacg

SEQ ID NO: 2979 - DNA, 64 bp, Artificial
  oligonucleotide probe
aacgcgatttgccgcattcgccgtttgcgctgttgcatggcgtggggagcaccgcagctgcgtg

SEQ ID NO: 2980 - DNA, 64 bp, Artificial
  oligonucleotide probe
ttcggggaaacgccgtttcgccgtttgcgctgttgcatggcgtggggagcacgggaaagcggct

SEQ ID NO: 2981 - DNA, 64 bp, Artificial
  oligonucleotide probe
aacggctgcaagcgcaaacgcgatttgccgcattcgccgtttgcgctggcaccgcagctgcgtg

SEQ ID NO: 2982 - DNA, 64 bp, Artificial
  oligonucleotide probe
ttcggggaaacgccgtccgtttcggctgggctccgtcgcaaagcgcacgcacgggaaagcggct

SEQ ID NO: 2983 - DNA, 64 bp, Artificial
  oligonucleotide probe
aagccgtgcgcaacgaatggcgcagcacgctgaacgcgatttgccgcagggattcgcgcaaacg

SEQ ID NO: 2984 - DNA, 64 bp, Artificial
  oligonucleotide probe
ttgcaagcgtccgggaatggcgcagcacgctgggctgcacggtcccgtttgcatggcgtgggga

SEQ ID NO: 2985 - DNA, 64 bp, Artificial
  oligonucleotide probe
aagccgtgcgcaacgattgcaagcgtccgggaggctttgcgcaccgtggcacgggaaagcggct

SEQ ID NO: 2986 - DNA, 64 bp, Artificial
  oligonucleotide probe
aagccgtgcgcaacgattgcaagcgtccgggaccgtttcggctgggctgggattcgcgcaaacg

SEQ ID NO: 2987 - DNA, 64 bp, Artificial
  oligonucleotide probe
cgcattgcggctttcgaacggctgcaagcgcagggattcgcgcaaacggcaccgcagctgcgtg

SEQ ID NO: 2988 - DNA, 64 bp, Artificial
  oligonucleotide probe
ttcggggaaacgccgtttcgccgtttgcgctgggctgcacggtcccgtgcaccgcagctgcgtg

SEQ ID NO: 2989 - DNA, 64 bp, Artificial
  oligonucleotide probe
aagccgtgcgcaacgaccgtcgcaaagcgcacgcaccgcagctgcgtggcacgggaaagcggct

SEQ ID NO: 2990 - DNA, 64 bp, Artificial
  oligonucleotide probe
ggctttgcgcaccgtgatggcgcagcacgctgttgcatggcgtggggagcacgggaaagcggct

SEQ ID NO: 2991 - DNA, 64 bp, Artificial
  oligonucleotide probe
aagccgtgcgcaacgaaacgcgatttgccgcaccgtcgcaaagcgcacttgcatggcgtgggga

SEQ ID NO: 2992 - DNA, 64 bp, Artificial
  oligonucleotide probe
ttgcaagcgtccgggaaacgcgatttgccgcaccgtcgcaaagcgcacttgcatggcgtgggga

SEQ ID NO: 2993 - DNA, 64 bp, Artificial
  oligonucleotide probe
ggctttgcgcaccgtgatggcgcagcacgctgccgtcgcaaagcgcacgggattcgcgcaaacg

SEQ ID NO: 2994 - DNA, 64 bp, Artificial
  oligonucleotide probe
aagccgtgcgcaacgaggctttgcgcaccgtgggctgcacggtcccgtgcacgggaaagcggct

SEQ ID NO: 2995 - DNA, 64 bp, Artificial
  oligonucleotide probe
aagccgtgcgcaacgaatggcgcagcacgctgccgtcgcaaagcgcacgcacgggaaagcggct

SEQ ID NO: 2996 - DNA, 64 bp, Artificial
  oligonucleotide probe
aagccgtgcgcaacgacgcattgcggctttcggggattcgcgcaaacggcaccgcagctgcgtg

SEQ ID NO: 2997 - DNA, 64 bp, Artificial
  oligonucleotide probe
cgcattgcggctttcgttgcaagcgtccgggattcggggaaacgccgtgggattcgcgcaaacg

SEQ ID NO: 2998 - DNA, 64 bp, Artificial
  oligonucleotide probe
ggctttgcgcaccgtgatggcgcagcacgctgttcggggaaacgccgtgggattcgcgcaaacg

SEQ ID NO: 2999 - DNA, 64 bp, Artificial
  oligonucleotide probe
atggcgcagcacgctgttcgccgtttgcgctgggctgcacggtcccgtgcaccgcagctgcgtg

SEQ ID NO: 3000 - DNA, 64 bp, Artificial
  oligonucleotide probe
ttgcaagcgtccgggaggctgcacggtcccgtttgcatggcgtggggagcacgggaaagcggct

SEQ ID NO: 3001 - DNA, 64 bp, Artificial
  oligonucleotide probe
aacggctgcaagcgcaggctgcacggtcccgtttgcatggcgtggggagcacgggaaagcggct

SEQ ID NO: 3002 - DNA, 64 bp, Artificial
  oligonucleotide probe
ttcggggaaacgccgtaacgcgatttgccgcattcgccgtttgcgctggcaccgcagctgcgtg

SEQ ID NO: 3003 - DNA, 64 bp, Artificial
  oligonucleotide probe
aacggctgcaagcgcaccgtcgcaaagcgcacgggattcgcgcaaacggcaccgcagctgcgtg

SEQ ID NO: 3004 - DNA, 64 bp, Artificial
  oligonucleotide probe
cgcattgcggctttcgttcggggaaacgccgtgggattcgcgcaaacggcaccgcagctgcgtg

SEQ ID NO: 3005 - DNA, 64 bp, Artificial
  oligonucleotide probe
ccgtttcggctgggctaacgcgatttgccgcaggctgcacggtcccgtttgcatggcgtgggga

SEQ ID NO: 3006 - DNA, 64 bp, Artificial
  oligonucleotide probe
aacggctgcaagcgcaatggcgcagcacgctgttcggggaaacgccgtttgcatggcgtgggga

SEQ ID NO: 3007 - DNA, 64 bp, Artificial
  oligonucleotide probe
aacggctgcaagcgcaggctttgcgcaccgtgaacgcgatttgccgcagcaccgcagctgcgtg

SEQ ID NO: 3008 - DNA, 64 bp, Artificial
  oligonucleotide probe
cgcattgcggctttcgggctttgcgcaccgtgggctgcacggtcccgtgcacgggaaagcggct

SEQ ID NO: 3009 - DNA, 64 bp, Artificial
  oligonucleotide probe
aacggctgcaagcgcaggctttgcgcaccgtgccgtttcggctgggctgcacgggaaagcggct

SEQ ID NO: 3010 - DNA, 64 bp, Artificial
  oligonucleotide probe
aacggctgcaagcgcaaacgcgatttgccgcattcgccgtttgcgctggcacgggaaagcggct

SEQ ID NO: 3011 - DNA, 64 bp, Artificial
  oligonucleotide probe
aagccgtgcgcaacgaaacgcgatttgccgcattcgccgtttgcgctgttgcatggcgtgggga

SEQ ID NO: 3012 - DNA, 64 bp, Artificial
  oligonucleotide probe
aacggctgcaagcgcaatggcgcagcacgctgccgtcgcaaagcgcacgcacgggaaagcggct

SEQ ID NO: 3013 - DNA, 64 bp, Artificial
  oligonucleotide probe
ttgcaagcgtccgggaatggcgcagcacgctgggctgcacggtcccgtgcacgggaaagcggct

SEQ ID NO: 3014 - DNA, 64 bp, Artificial
  oligonucleotide probe
aagccgtgcgcaacgaggctttgcgcaccgtgttgcatggcgtggggagcacgggaaagcggct

SEQ ID NO: 3015 - DNA, 64 bp, Artificial
  oligonucleotide probe
ttcggggaaacgccgtaacgcgatttgccgcaggctgcacggtcccgtttgcatggcgtgggga

SEQ ID NO: 3016 - DNA, 64 bp, Artificial
  oligonucleotide probe
aacggctgcaagcgcattcggggaaacgccgtccgtttcggctgggctgcaccgcagctgcgtg

SEQ ID NO: 3017 - DNA, 64 bp, Artificial
  oligonucleotide probe
aagccgtgcgcaacgaaacggctgcaagcgcaggctgcacggtcccgtgcacgggaaagcggct

SEQ ID NO: 3018 - DNA, 64 bp, Artificial
  oligonucleotide probe
atggcgcagcacgctgttcggggaaacgccgtccgtcgcaaagcgcacgcacgggaaagcggct

SEQ ID NO: 3019 - DNA, 64 bp, Artificial
  oligonucleotide probe
cgcattgcggctttcgttcgccgtttgcgctgggctgcacggtcccgtttgcatggcgtgggga

SEQ ID NO: 3020 - DNA, 64 bp, Artificial
  oligonucleotide probe
ggctttgcgcaccgtgatggcgcagcacgctgccgtttcggctgggctgcacgggaaagcggct

SEQ ID NO: 3021 - DNA, 64 bp, Artificial
  oligonucleotide probe
cgcattgcggctttcgttgcaagcgtccgggaccgtcgcaaagcgcacgcacgggaaagcggct

SEQ ID NO: 3022 - DNA, 64 bp, Artificial
  oligonucleotide probe
ccgtttcggctgggctgggattcgcgcaaacggcaccgcagctgcgtggcacgggaaagcggct

SEQ ID NO: 3023 - DNA, 64 bp, Artificial
  oligonucleotide probe
aagccgtgcgcaacgaggctttgcgcaccgtgttcggggaaacgccgtgggattcgcgcaaacg

SEQ ID NO: 3024 - DNA, 64 bp, Artificial
  oligonucleotide probe
atggcgcagcacgctgttcggggaaacgccgtccgtttcggctgggctttgcatggcgtgggga

SEQ ID NO: 3025 - DNA, 64 bp, Artificial
  oligonucleotide probe
ggctttgcgcaccgtgccgtttcggctgggctaacgcgatttgccgcagcaccgcagctgcgtg

SEQ ID NO: 3026 - DNA, 64 bp, Artificial
  oligonucleotide probe
aagccgtgcgcaacgacgcattgcggctttcgccgtcgcaaagcgcacgcaccgcagctgcgtg

SEQ ID NO: 3027 - DNA, 64 bp, Artificial
  oligonucleotide probe
ggctttgcgcaccgtgccgtttcggctgggctggctgcacggtcccgtgcacgggaaagcggct

SEQ ID NO: 3028 - DNA, 64 bp, Artificial
  oligonucleotide probe
ttgcaagcgtccgggaggctttgcgcaccgtggggattcgcgcaaacggcacgggaaagcggct

SEQ ID NO: 3029 - DNA, 64 bp, Artificial
  oligonucleotide probe
ccgtttcggctgggctaacgcgatttgccgcaggctgcacggtcccgtgcaccgcagctgcgtg

SEQ ID NO: 3030 - DNA, 64 bp, Artificial
  oligonucleotide probe
ttgcaagcgtccgggaggctttgcgcaccgtgggctgcacggtcccgtgggattcgcgcaaacg

SEQ ID NO: 3031 - DNA, 64 bp, Artificial
  oligonucleotide probe
ccgtttcggctgggctaacgcgatttgccgcattgcatggcgtggggagcaccgcagctgcgtg

SEQ ID NO: 3032 - DNA, 64 bp, Artificial
  oligonucleotide probe
aacggctgcaagcgcaccgtttcggctgggctggctgcacggtcccgtgcacgggaaagcggct

SEQ ID NO: 3033 - DNA, 64 bp, Artificial
  oligonucleotide probe
aagccgtgcgcaacgaggctttgcgcaccgtgccgtcgcaaagcgcacgcaccgcagctgcgtg

SEQ ID NO: 3034 - DNA, 64 bp, Artificial
  oligonucleotide probe
ttgcaagcgtccgggaaacggctgcaagcgcattgcatggcgtggggagcacgggaaagcggct

SEQ ID NO: 3035 - DNA, 64 bp, Artificial
  oligonucleotide probe
ggctttgcgcaccgtgttcggggaaacgccgtgggattcgcgcaaacggcacgggaaagcggct

SEQ ID NO: 3036 - DNA, 64 bp, Artificial
  oligonucleotide probe
atggcgcagcacgctgttcggggaaacgccgtttcgccgtttgcgctggcacgggaaagcggct

SEQ ID NO: 3037 - DNA, 64 bp, Artificial
  oligonucleotide probe
ttcgccgtttgcgctgggctgcacggtcccgtttgcatggcgtggggagcacgggaaagcggct

SEQ ID NO: 3038 - DNA, 64 bp, Artificial
  oligonucleotide probe
aagccgtgcgcaacgaaacgcgatttgccgcaggctgcacggtcccgtgggattcgcgcaaacg

SEQ ID NO: 3039 - DNA, 64 bp, Artificial
  oligonucleotide probe
aagccgtgcgcaacgattgcaagcgtccgggaccgtttcggctgggctttgcatggcgtgggga

SEQ ID NO: 3040 - DNA, 64 bp, Artificial
  oligonucleotide probe
ccgtttcggctgggctaacgcgatttgccgcaggctgcacggtcccgtgcacgggaaagcggct

SEQ ID NO: 3041 - DNA, 64 bp, Artificial
  oligonucleotide probe
ccgtttcggctgggctttcgccgtttgcgctgttgcatggcgtggggagcaccgcagctgcgtg

SEQ ID NO: 3042 - DNA, 64 bp, Artificial
  oligonucleotide probe
ttgcaagcgtccgggaccgtttcggctgggctaacgcgatttgccgcagcaccgcagctgcgtg

SEQ ID NO: 3043 - DNA, 64 bp, Artificial
  oligonucleotide probe
aagccgtgcgcaacgattcggggaaacgccgtttcgccgtttgcgctggggattcgcgcaaacg

SEQ ID NO: 3044 - DNA, 64 bp, Artificial
  oligonucleotide probe
aagccgtgcgcaacgattgcatggcgtggggagcaccgcagctgcgtggcacgggaaagcggct

SEQ ID NO: 3045 - DNA, 64 bp, Artificial
  oligonucleotide probe
aacggctgcaagcgcattcgccgtttgcgctgttgcatggcgtggggagcaccgcagctgcgtg

SEQ ID NO: 3046 - DNA, 64 bp, Artificial
  oligonucleotide probe
ccgtttcggctgggctaacgcgatttgccgcagcaccgcagctgcgtggcacgggaaagcggct

SEQ ID NO: 3047 - DNA, 64 bp, Artificial
  oligonucleotide probe
ttcggggaaacgccgtttgcatggcgtggggagcaccgcagctgcgtggcacgggaaagcggct

SEQ ID NO: 3048 - DNA, 64 bp, Artificial
  oligonucleotide probe
ttgcaagcgtccgggaaacggctgcaagcgcagcaccgcagctgcgtggcacgggaaagcggct

SEQ ID NO: 3049 - DNA, 64 bp, Artificial
  oligonucleotide probe
ttgcaagcgtccgggaggctttgcgcaccgtgggctgcacggtcccgtttgcatggcgtgggga

SEQ ID NO: 3050 - DNA, 64 bp, Artificial
  oligonucleotide probe
cgcattgcggctttcgttgcaagcgtccgggagggattcgcgcaaacggcacgggaaagcggct

SEQ ID NO: 3051 - DNA, 64 bp, Artificial
  oligonucleotide probe
atggcgcagcacgctgttcgccgtttgcgctgggctgcacggtcccgtgcacgggaaagcggct

SEQ ID NO: 3052 - DNA, 64 bp, Artificial
  oligonucleotide probe
ggctttgcgcaccgtgccgtttcggctgggctaacgcgatttgccgcagggattcgcgcaaacg

SEQ ID NO: 3053 - DNA, 64 bp, Artificial
  oligonucleotide probe
aagccgtgcgcaacgattgcaagcgtccgggaatggcgcagcacgctggggattcgcgcaaacg

SEQ ID NO: 3054 - DNA, 64 bp, Artificial
  oligonucleotide probe
aagccgtgcgcaacgacgcattgcggctttcgaacggctgcaagcgcagcacgggaaagcggct

SEQ ID NO: 3055 - DNA, 64 bp, Artificial
  oligonucleotide probe
cgcattgcggctttcgatggcgcagcacgctgaacgcgatttgccgcagcaccgcagctgcgtg

SEQ ID NO: 3056 - DNA, 64 bp, Artificial
  oligonucleotide probe
atggcgcagcacgctgaacgcgatttgccgcagggattcgcgcaaacggcaccgcagctgcgtg

SEQ ID NO: 3057 - DNA, 64 bp, Artificial
  oligonucleotide probe
aacggctgcaagcgcaggctttgcgcaccgtgttcgccgtttgcgctggcacgggaaagcggct

SEQ ID NO: 3058 - DNA, 64 bp, Artificial
  oligonucleotide probe
cgcattgcggctttcgaacggctgcaagcgcaggctttgcgcaccgtgttgcatggcgtgggga

SEQ ID NO: 3059 - DNA, 64 bp, Artificial
  oligonucleotide probe
atggcgcagcacgctgccgtttcggctgggctttcgccgtttgcgctggggattcgcgcaaacg

SEQ ID NO: 3060 - DNA, 64 bp, Artificial
  oligonucleotide probe
ttgcaagcgtccgggaaacgcgatttgccgcattcgccgtttgcgctgttgcatggcgtgggga

SEQ ID NO: 3061 - DNA, 64 bp, Artificial
  oligonucleotide probe
ttgcaagcgtccgggaaacggctgcaagcgcaatggcgcagcacgctgttgcatggcgtgggga

SEQ ID NO: 3062 - DNA, 64 bp, Artificial
  oligonucleotide probe
aacggctgcaagcgcaccgtttcggctgggctccgtcgcaaagcgcacgggattcgcgcaaacg

SEQ ID NO: 3063 - DNA, 64 bp, Artificial
  oligonucleotide probe
ggctttgcgcaccgtgaacgcgatttgccgcagcaccgcagctgcgtggcacgggaaagcggct

SEQ ID NO: 3064 - DNA, 64 bp, Artificial
  oligonucleotide probe
ttgcaagcgtccgggattcgccgtttgcgctgccgtcgcaaagcgcacttgcatggcgtgggga

SEQ ID NO: 3065 - DNA, 64 bp, Artificial
  oligonucleotide probe
ttgcaagcgtccgggaggctttgcgcaccgtgttcggggaaacgccgtttgcatggcgtgggga

SEQ ID NO: 3066 - DNA, 64 bp, Artificial
  oligonucleotide probe
ttgcaagcgtccgggaatggcgcagcacgctgttcgccgtttgcgctgttgcatggcgtgggga

SEQ ID NO: 3067 - DNA, 64 bp, Artificial
  oligonucleotide probe
aacggctgcaagcgcaggctttgcgcaccgtgaacgcgatttgccgcagggattcgcgcaaacg

SEQ ID NO: 3068 - DNA, 64 bp, Artificial
  oligonucleotide probe
atggcgcagcacgctgttcgccgtttgcgctgggctgcacggtcccgtgggattcgcgcaaacg

SEQ ID NO: 3069 - DNA, 64 bp, Artificial
  oligonucleotide probe
ttgcaagcgtccgggattcgccgtttgcgctggcaccgcagctgcgtggcacgggaaagcggct

SEQ ID NO: 3070 - DNA, 64 bp, Artificial
  oligonucleotide probe
aacggctgcaagcgcaccgtttcggctgggctttgcatggcgtggggagcaccgcagctgcgtg

SEQ ID NO: 3071 - DNA, 64 bp, Artificial
  oligonucleotide probe
ttgcaagcgtccgggaggctttgcgcaccgtgatggcgcagcacgctggcaccgcagctgcgtg

SEQ ID NO: 3072 - DNA, 64 bp, Artificial
  oligonucleotide probe
ttgcaagcgtccgggattcggggaaacgccgtgcaccgcagctgcgtggcacgggaaagcggct

SEQ ID NO: 3073 - DNA, 64 bp, Artificial
  oligonucleotide probe
aagccgtgcgcaacgattgcaagcgtccgggaccgtcgcaaagcgcacgggattcgcgcaaacg

SEQ ID NO: 3074 - DNA, 64 bp, Artificial
  oligonucleotide probe
aagccgtgcgcaacgaccgtcgcaaagcgcacggctgcacggtcccgtttgcatggcgtgggga

SEQ ID NO: 3075 - DNA, 64 bp, Artificial
  oligonucleotide probe
aacggctgcaagcgcaaacgcgatttgccgcaccgtcgcaaagcgcacgcaccgcagctgcgtg

SEQ ID NO: 3076 - DNA, 64 bp, Artificial
  oligonucleotide probe
aagccgtgcgcaacgaaacgcgatttgccgcagcaccgcagctgcgtggcacgggaaagcggct

SEQ ID NO: 3077 - DNA, 64 bp, Artificial
  oligonucleotide probe
ccgtttcggctgggctaacgcgatttgccgcattgcatggcgtggggagcacgggaaagcggct

SEQ ID NO: 3078 - DNA, 64 bp, Artificial
  oligonucleotide probe
ttgcaagcgtccgggaccgtttcggctgggctggctgcacggtcccgtttgcatggcgtgggga

SEQ ID NO: 3079 - DNA, 64 bp, Artificial
  oligonucleotide probe
aacggctgcaagcgcaggctttgcgcaccgtgccgtttcggctgggctttgcatggcgtgggga

SEQ ID NO: 3080 - DNA, 64 bp, Artificial
  oligonucleotide probe
ttcggggaaacgccgtccgtcgcaaagcgcacgcaccgcagctgcgtggcacgggaaagcggct

SEQ ID NO: 3081 - DNA, 64 bp, Artificial
  oligonucleotide probe
ggctttgcgcaccgtgccgtttcggctgggctccgtcgcaaagcgcacgcacgggaaagcggct

SEQ ID NO: 3082 - DNA, 64 bp, Artificial
  oligonucleotide probe
atggcgcagcacgctgttcggggaaacgccgtaacgcgatttgccgcagcacgggaaagcggct

SEQ ID NO: 3083 - DNA, 64 bp, Artificial
  oligonucleotide probe
aacggctgcaagcgcaaacgcgatttgccgcagggattcgcgcaaacgttgcatggcgtgggga

SEQ ID NO: 3084 - DNA, 64 bp, Artificial
  oligonucleotide probe
atggcgcagcacgctgggctgcacggtcccgtgggattcgcgcaaacggcacgggaaagcggct

SEQ ID NO: 3085 - DNA, 64 bp, Artificial
  oligonucleotide probe
ttcggggaaacgccgtttcgccgtttgcgctggggattcgcgcaaacgttgcatggcgtgggga

SEQ ID NO: 3086 - DNA, 64 bp, Artificial
  oligonucleotide probe
atggcgcagcacgctgggctgcacggtcccgtgggattcgcgcaaacggcaccgcagctgcgtg

SEQ ID NO: 3087 - DNA, 64 bp, Artificial
  oligonucleotide probe
cgcattgcggctttcgttcggggaaacgccgtttcgccgtttgcgctggggattcgcgcaaacg

SEQ ID NO: 3088 - DNA, 64 bp, Artificial
  oligonucleotide probe
aacggctgcaagcgcattcggggaaacgccgtttgcatggcgtggggagcaccgcagctgcgtg

SEQ ID NO: 3089 - DNA, 64 bp, Artificial
  oligonucleotide probe
ttgcaagcgtccgggaaacgcgatttgccgcagggattcgcgcaaacggcacgggaaagcggct

SEQ ID NO: 3090 - DNA, 64 bp, Artificial
  oligonucleotide probe
ttgcaagcgtccgggaaacggctgcaagcgcattcgccgtttgcgctggcacgggaaagcggct

SEQ ID NO: 3091 - DNA, 64 bp, Artificial
  oligonucleotide probe
ttgcaagcgtccgggaatggcgcagcacgctgccgtttcggctgggctttgcatggcgtgggga

SEQ ID NO: 3092 - DNA, 64 bp, Artificial
  oligonucleotide probe
aagccgtgcgcaacgaggctttgcgcaccgtgccgtcgcaaagcgcacgggattcgcgcaaacg

SEQ ID NO: 3093 - DNA, 64 bp, Artificial
  oligonucleotide probe
ttcggggaaacgccgtttcgccgtttgcgctgggctgcacggtcccgtgcacgggaaagcggct

SEQ ID NO: 3094 - DNA, 64 bp, Artificial
  oligonucleotide probe
aacggctgcaagcgcaaacgcgatttgccgcagggattcgcgcaaacggcaccgcagctgcgtg

SEQ ID NO: 3095 - DNA, 64 bp, Artificial
  oligonucleotide probe
aagccgtgcgcaacgaccgtttcggctgggctgggattcgcgcaaacgttgcatggcgtgggga

SEQ ID NO: 3096 - DNA, 64 bp, Artificial
  oligonucleotide probe
aagccgtgcgcaacgacgcattgcggctttcgggctgcacggtcccgtgggattcgcgcaaacg

SEQ ID NO: 3097 - DNA, 64 bp, Artificial
  oligonucleotide probe
cgcattgcggctttcgttgcaagcgtccgggaaacgcgatttgccgcagcacgggaaagcggct

SEQ ID NO: 3098 - DNA, 64 bp, Artificial
  oligonucleotide probe
aacggctgcaagcgcaatggcgcagcacgctgttcggggaaacgccgtgggattcgcgcaaacg

SEQ ID NO: 3099 - DNA, 64 bp, Artificial
  oligonucleotide probe
ccgtttcggctgggctttcgccgtttgcgctgttgcatggcgtggggagcacgggaaagcggct

SEQ ID NO: 3100 - DNA, 64 bp, Artificial
  oligonucleotide probe
ttcggggaaacgccgtggctgcacggtcccgtgcaccgcagctgcgtggcacgggaaagcggct

SEQ ID NO: 3101 - DNA, 64 bp, Artificial
  oligonucleotide probe
ttgcaagcgtccgggattcgccgtttgcgctgccgtcgcaaagcgcacgcacgggaaagcggct

SEQ ID NO: 3102 - DNA, 64 bp, Artificial
  oligonucleotide probe
cgcattgcggctttcggggattcgcgcaaacgttgcatggcgtggggagcaccgcagctgcgtg

SEQ ID NO: 3103 - DNA, 64 bp, Artificial
  oligonucleotide probe
atggcgcagcacgctgaacgcgatttgccgcattcgccgtttgcgctggcaccgcagctgcgtg

SEQ ID NO: 3104 - DNA, 64 bp, Artificial
  oligonucleotide probe
cgcattgcggctttcgttcggggaaacgccgtgcaccgcagctgcgtggcacgggaaagcggct

SEQ ID NO: 3105 - DNA, 64 bp, Artificial
  oligonucleotide probe
ggctttgcgcaccgtgccgtttcggctgggctaacgcgatttgccgcagcacgggaaagcggct

SEQ ID NO: 3106 - DNA, 64 bp, Artificial
  oligonucleotide probe
aacgcgatttgccgcaccgtcgcaaagcgcacttgcatggcgtggggagcaccgcagctgcgtg

SEQ ID NO: 3107 - DNA, 64 bp, Artificial
  oligonucleotide probe
cgcattgcggctttcgttgcaagcgtccgggaatggcgcagcacgctgttgcatggcgtgggga

SEQ ID NO: 3108 - DNA, 64 bp, Artificial
  oligonucleotide probe
ggctttgcgcaccgtggggattcgcgcaaacgttgcatggcgtggggagcaccgcagctgcgtg

SEQ ID NO: 3109 - DNA, 64 bp, Artificial
  oligonucleotide probe
ggctttgcgcaccgtgttcggggaaacgccgtgggattcgcgcaaacggcaccgcagctgcgtg

SEQ ID NO: 3110 - DNA, 64 bp, Artificial
  oligonucleotide probe
ttcggggaaacgccgtccgtcgcaaagcgcacggctgcacggtcccgtgcaccgcagctgcgtg

SEQ ID NO: 3111 - DNA, 64 bp, Artificial
  oligonucleotide probe
ttgcaagcgtccgggattcggggaaacgccgtttgcatggcgtggggagcacgggaaagcggct

SEQ ID NO: 3112 - DNA, 64 bp, Artificial
  oligonucleotide probe
cgcattgcggctttcgaacgcgatttgccgcagcaccgcagctgcgtggcacgggaaagcggct

SEQ ID NO: 3113 - DNA, 64 bp, Artificial
  oligonucleotide probe
ttgcaagcgtccgggattcggggaaacgccgtccgtcgcaaagcgcacgcacgggaaagcggct

SEQ ID NO: 3114 - DNA, 64 bp, Artificial
  oligonucleotide probe
aagccgtgcgcaacgaccgtcgcaaagcgcacgggattcgcgcaaacggcacgggaaagcggct

SEQ ID NO: 3115 - DNA, 64 bp, Artificial
  oligonucleotide probe
ttgcaagcgtccgggaatggcgcagcacgctgttcgccgtttgcgctggcaccgcagctgcgtg

SEQ ID NO: 3116 - DNA, 64 bp, Artificial
  oligonucleotide probe
ggctttgcgcaccgtgttcggggaaacgccgtttgcatggcgtggggagcaccgcagctgcgtg

SEQ ID NO: 3117 - DNA, 64 bp, Artificial
  oligonucleotide probe
ttcggggaaacgccgtaacgcgatttgccgcagggattcgcgcaaacgttgcatggcgtgggga

SEQ ID NO: 3118 - DNA, 64 bp, Artificial
  oligonucleotide probe
aagccgtgcgcaacgattcgccgtttgcgctggggattcgcgcaaacggcacgggaaagcggct

SEQ ID NO: 3119 - DNA, 64 bp, Artificial
  oligonucleotide probe
aagccgtgcgcaacgaggctttgcgcaccgtgggctgcacggtcccgtgggattcgcgcaaacg

SEQ ID NO: 3120 - DNA, 64 bp, Artificial
  oligonucleotide probe
ttgcaagcgtccgggaaacggctgcaagcgcaggctttgcgcaccgtgttgcatggcgtgggga

SEQ ID NO: 3121 - DNA, 64 bp, Artificial
  oligonucleotide probe
aacggctgcaagcgcattgcatggcgtggggagcaccgcagctgcgtggcacgggaaagcggct

SEQ ID NO: 3122 - DNA, 64 bp, Artificial
  oligonucleotide probe
ttcggggaaacgccgtccgtcgcaaagcgcacggctgcacggtcccgtttgcatggcgtgggga

SEQ ID NO: 3123 - DNA, 64 bp, Artificial
  oligonucleotide probe
aacggctgcaagcgcaccgtttcggctgggctggctgcacggtcccgtgggattcgcgcaaacg

SEQ ID NO: 3124 - DNA, 64 bp, Artificial
  oligonucleotide probe
atggcgcagcacgctgggctgcacggtcccgtttgcatggcgtggggagcacgggaaagcggct

SEQ ID NO: 3125 - DNA, 64 bp, Artificial
  oligonucleotide probe
atggcgcagcacgctgccgtcgcaaagcgcacggctgcacggtcccgtgcacgggaaagcggct

SEQ ID NO: 3126 - DNA, 64 bp, Artificial
  oligonucleotide probe
ttgcaagcgtccgggattcggggaaacgccgtttcgccgtttgcgctggggattcgcgcaaacg

SEQ ID NO: 3127 - DNA, 64 bp, Artificial
  oligonucleotide probe
aacggctgcaagcgcagggattcgcgcaaacgttgcatggcgtggggagcaccgcagctgcgtg

SEQ ID NO: 3128 - DNA, 64 bp, Artificial
  oligonucleotide probe
aagccgtgcgcaacgaccgtttcggctgggctggctgcacggtcccgtgggattcgcgcaaacg

SEQ ID NO: 3129 - DNA, 64 bp, Artificial
  oligonucleotide probe
ggctttgcgcaccgtgccgtttcggctgggctggctgcacggtcccgtgggattcgcgcaaacg

SEQ ID NO: 3130 - DNA, 64 bp, Artificial
  oligonucleotide probe
aagccgtgcgcaacgaaacggctgcaagcgcaaacgcgatttgccgcattgcatggcgtgggga

SEQ ID NO: 3131 - DNA, 64 bp, Artificial
  oligonucleotide probe
ggctttgcgcaccgtgccgtttcggctgggctgggattcgcgcaaacggcaccgcagctgcgtg

SEQ ID NO: 3132 - DNA, 64 bp, Artificial
  oligonucleotide probe
ggctttgcgcaccgtggggattcgcgcaaacgttgcatggcgtggggagcacgggaaagcggct

SEQ ID NO: 3133 - DNA, 64 bp, Artificial
  oligonucleotide probe
ttcggggaaacgccgtttcgccgtttgcgctgggctgcacggtcccgtttgcatggcgtgggga

SEQ ID NO: 3134 - DNA, 64 bp, Artificial
  oligonucleotide probe
ggctttgcgcaccgtgaacgcgatttgccgcagggattcgcgcaaacggcacgggaaagcggct

SEQ ID NO: 3135 - DNA, 64 bp, Artificial
  oligonucleotide probe
aagccgtgcgcaacgaccgtcgcaaagcgcacgggattcgcgcaaacggcaccgcagctgcgtg

SEQ ID NO: 3136 - DNA, 64 bp, Artificial
  oligonucleotide probe
atggcgcagcacgctggggattcgcgcaaacgttgcatggcgtggggagcacgggaaagcggct

SEQ ID NO: 3137 - DNA, 64 bp, Artificial
  oligonucleotide probe
ggctttgcgcaccgtgatggcgcagcacgctgttcgccgtttgcgctggcacgggaaagcggct

SEQ ID NO: 3138 - DNA, 64 bp, Artificial
  oligonucleotide probe
ttgcaagcgtccgggattcggggaaacgccgtccgtcgcaaagcgcacgcaccgcagctgcgtg

SEQ ID NO: 3139 - DNA, 64 bp, Artificial
  oligonucleotide probe
cgcattgcggctttcgttcgccgtttgcgctgggctgcacggtcccgtgcacgggaaagcggct

SEQ ID NO: 3140 - DNA, 64 bp, Artificial
  oligonucleotide probe
ggctttgcgcaccgtgaacgcgatttgccgcaccgtcgcaaagcgcacttgcatggcgtgggga

SEQ ID NO: 3141 - DNA, 64 bp, Artificial
  oligonucleotide probe
aacggctgcaagcgcaggctttgcgcaccgtgggctgcacggtcccgtgggattcgcgcaaacg

SEQ ID NO: 3142 - DNA, 64 bp, Artificial
  oligonucleotide probe
atggcgcagcacgctgccgtttcggctgggctccgtcgcaaagcgcacgcacgggaaagcggct

SEQ ID NO: 3143 - DNA, 64 bp, Artificial
  oligonucleotide probe
ccgtttcggctgggctgggattcgcgcaaacgttgcatggcgtggggagcaccgcagctgcgtg

SEQ ID NO: 3144 - DNA, 64 bp, Artificial
  oligonucleotide probe
cgcattgcggctttcgttcggggaaacgccgtccgtcgcaaagcgcacgcacgggaaagcggct

SEQ ID NO: 3145 - DNA, 64 bp, Artificial
  oligonucleotide probe
ttgcaagcgtccgggattcggggaaacgccgtaacgcgatttgccgcattgcatggcgtgggga

SEQ ID NO: 3146 - DNA, 64 bp, Artificial
  oligonucleotide probe
cgcattgcggctttcgccgtttcggctgggctccgtcgcaaagcgcacgggattcgcgcaaacg

SEQ ID NO: 3147 - DNA, 64 bp, Artificial
  oligonucleotide probe
aacggctgcaagcgcaccgtcgcaaagcgcacggctgcacggtcccgtgggattcgcgcaaacg

SEQ ID NO: 3148 - DNA, 64 bp, Artificial
  oligonucleotide probe
ccgtttcggctgggctttcgccgtttgcgctgggctgcacggtcccgtgcacgggaaagcggct

SEQ ID NO: 3149 - DNA, 64 bp, Artificial
  oligonucleotide probe
ttgcaagcgtccgggaggctttgcgcaccgtgccgtttcggctgggctgcacgggaaagcggct

SEQ ID NO: 3150 - DNA, 64 bp, Artificial
  oligonucleotide probe
cgcattgcggctttcgttgcaagcgtccgggattcgccgtttgcgctggggattcgcgcaaacg

SEQ ID NO: 3151 - DNA, 64 bp, Artificial
  oligonucleotide probe
ggctttgcgcaccgtgatggcgcagcacgctgccgtcgcaaagcgcacgcaccgcagctgcgtg

SEQ ID NO: 3152 - DNA, 64 bp, Artificial
  oligonucleotide probe
ggctttgcgcaccgtgaacgcgatttgccgcattcgccgtttgcgctggcacgggaaagcggct

SEQ ID NO: 3153 - DNA, 64 bp, Artificial
  oligonucleotide probe
aagccgtgcgcaacgagggattcgcgcaaacgttgcatggcgtggggagcaccgcagctgcgtg

SEQ ID NO: 3154 - DNA, 64 bp, Artificial
  oligonucleotide probe
atggcgcagcacgctgttcggggaaacgccgtggctgcacggtcccgtgcacgggaaagcggct

SEQ ID NO: 3155 - DNA, 64 bp, Artificial
  oligonucleotide probe
ggctttgcgcaccgtgccgtttcggctgggctgcaccgcagctgcgtggcacgggaaagcggct

SEQ ID NO: 3156 - DNA, 64 bp, Artificial
  oligonucleotide probe
atggcgcagcacgctgttcggggaaacgccgtccgtcgcaaagcgcacttgcatggcgtgggga

SEQ ID NO: 3157 - DNA, 64 bp, Artificial
  oligonucleotide probe
cgcattgcggctttcgttgcaagcgtccgggaccgtttcggctgggctgcacgggaaagcggct

SEQ ID NO: 3158 - DNA, 64 bp, Artificial
  oligonucleotide probe
cgcattgcggctttcgttgcaagcgtccgggaaacggctgcaagcgcagcaccgcagctgcgtg

SEQ ID NO: 3159 - DNA, 64 bp, Artificial
  oligonucleotide probe
cgcattgcggctttcgttgcaagcgtccgggaggctgcacggtcccgtgcacgggaaagcggct

SEQ ID NO: 3160 - DNA, 64 bp, Artificial
  oligonucleotide probe
aagccgtgcgcaacgacgcattgcggctttcgaacgcgatttgccgcattgcatggcgtgggga

SEQ ID NO: 3161 - DNA, 64 bp, Artificial
  oligonucleotide probe
aacggctgcaagcgcaggctttgcgcaccgtgatggcgcagcacgctggggattcgcgcaaacg

SEQ ID NO: 3162 - DNA, 64 bp, Artificial
  oligonucleotide probe
aagccgtgcgcaacgattcgccgtttgcgctgccgtcgcaaagcgcacgcacgggaaagcggct

SEQ ID NO: 3163 - DNA, 64 bp, Artificial
  oligonucleotide probe
aacggctgcaagcgcaggctttgcgcaccgtgccgtcgcaaagcgcacttgcatggcgtgggga

SEQ ID NO: 3164 - DNA, 64 bp, Artificial
  oligonucleotide probe
ttgcaagcgtccgggaggctttgcgcaccgtgccgtttcggctgggctgggattcgcgcaaacg

SEQ ID NO: 3165 - DNA, 64 bp, Artificial
  oligonucleotide probe
aagccgtgcgcaacgattcggggaaacgccgtccgtcgcaaagcgcacttgcatggcgtgggga

SEQ ID NO: 3166 - DNA, 64 bp, Artificial
  oligonucleotide probe
ttcggggaaacgccgtttcgccgtttgcgctgccgtcgcaaagcgcacgcacgggaaagcggct

SEQ ID NO: 3167 - DNA, 64 bp, Artificial
  oligonucleotide probe
cgcattgcggctttcgatggcgcagcacgctgttcggggaaacgccgtttgcatggcgtgggga

SEQ ID NO: 3168 - DNA, 64 bp, Artificial
  oligonucleotide probe
ttgcaagcgtccgggaggctttgcgcaccgtgatggcgcagcacgctggcacgggaaagcggct

SEQ ID NO: 3169 - DNA, 64 bp, Artificial
  oligonucleotide probe
ccgtttcggctgggctggctgcacggtcccgtgcaccgcagctgcgtggcacgggaaagcggct

SEQ ID NO: 3170 - DNA, 64 bp, Artificial
  oligonucleotide probe
aacggctgcaagcgcattcgccgtttgcgctggggattcgcgcaaacgttgcatggcgtgggga

SEQ ID NO: 3171 - DNA, 64 bp, Artificial
  oligonucleotide probe
aagccgtgcgcaacgaaacggctgcaagcgcaggctttgcgcaccgtgttgcatggcgtgggga

SEQ ID NO: 3172 - DNA, 64 bp, Artificial
  oligonucleotide probe
cgcattgcggctttcgttgcaagcgtccgggattcggggaaacgccgtgcaccgcagctgcgtg

SEQ ID NO: 3173 - DNA, 64 bp, Artificial
  oligonucleotide probe
atggcgcagcacgctgttcggggaaacgccgtgcaccgcagctgcgtggcacgggaaagcggct

SEQ ID NO: 3174 - DNA, 64 bp, Artificial
  oligonucleotide probe
cgcattgcggctttcgttcgccgtttgcgctgccgtcgcaaagcgcacttgcatggcgtgggga

SEQ ID NO: 3175 - DNA, 64 bp, Artificial
  oligonucleotide probe
aagccgtgcgcaacgaaacgcgatttgccgcattcgccgtttgcgctggggattcgcgcaaacg

SEQ ID NO: 3176 - DNA, 64 bp, Artificial
  oligonucleotide probe
atggcgcagcacgctgaacgcgatttgccgcaggctgcacggtcccgtgcaccgcagctgcgtg

SEQ ID NO: 3177 - DNA, 64 bp, Artificial
  oligonucleotide probe
ttgcaagcgtccgggaggctttgcgcaccgtgaacgcgatttgccgcagcaccgcagctgcgtg

SEQ ID NO: 3178 - DNA, 64 bp, Artificial
  oligonucleotide probe
ttgcaagcgtccgggagggattcgcgcaaacgttgcatggcgtggggagcaccgcagctgcgtg

SEQ ID NO: 3179 - DNA, 64 bp, Artificial
  oligonucleotide probe
ggctttgcgcaccgtgatggcgcagcacgctgttcggggaaacgccgtgcaccgcagctgcgtg

SEQ ID NO: 3180 - DNA, 64 bp, Artificial
  oligonucleotide probe
aacggctgcaagcgcaggctgcacggtcccgtttgcatggcgtggggagcaccgcagctgcgtg

SEQ ID NO: 3181 - DNA, 64 bp, Artificial
  oligonucleotide probe
ttgcaagcgtccgggaatggcgcagcacgctgaacgcgatttgccgcagcacgggaaagcggct

SEQ ID NO: 3182 - DNA, 64 bp, Artificial
  oligonucleotide probe
aagccgtgcgcaacgacgcattgcggctttcgggctttgcgcaccgtggcacgggaaagcggct

SEQ ID NO: 3183 - DNA, 64 bp, Artificial
  oligonucleotide probe
aacggctgcaagcgcattcgccgtttgcgctgggctgcacggtcccgtgcaccgcagctgcgtg

SEQ ID NO: 3184 - DNA, 64 bp, Artificial
  oligonucleotide probe
ttcggggaaacgccgtttcgccgtttgcgctgggctgcacggtcccgtgggattcgcgcaaacg

SEQ ID NO: 3185 - DNA, 64 bp, Artificial
  oligonucleotide probe
ttcggggaaacgccgtttcgccgtttgcgctgccgtcgcaaagcgcacgggattcgcgcaaacg

SEQ ID NO: 3186 - DNA, 64 bp, Artificial
  oligonucleotide probe
ggctttgcgcaccgtgaacgcgatttgccgcaccgtcgcaaagcgcacgcacgggaaagcggct

SEQ ID NO: 3187 - DNA, 64 bp, Artificial
  oligonucleotide probe
ttgcaagcgtccgggaaacgcgatttgccgcattcgccgtttgcgctggggattcgcgcaaacg

SEQ ID NO: 3188 - DNA, 64 bp, Artificial
  oligonucleotide probe
atggcgcagcacgctgccgtcgcaaagcgcacggctgcacggtcccgtttgcatggcgtgggga

SEQ ID NO: 3189 - DNA, 64 bp, Artificial
  oligonucleotide probe
aacggctgcaagcgcaccgtttcggctgggctggctgcacggtcccgtttgcatggcgtgggga

SEQ ID NO: 3190 - DNA, 64 bp, Artificial
  oligonucleotide probe
aacggctgcaagcgcaatggcgcagcacgctgggctgcacggtcccgtgcaccgcagctgcgtg

SEQ ID NO: 3191 - DNA, 64 bp, Artificial
  oligonucleotide probe
aacggctgcaagcgcaaacgcgatttgccgcattcgccgtttgcgctggggattcgcgcaaacg

SEQ ID NO: 3192 - DNA, 64 bp, Artificial
  oligonucleotide probe
ttgcaagcgtccgggaggctttgcgcaccgtggggattcgcgcaaacggcaccgcagctgcgtg

SEQ ID NO: 3193 - DNA, 64 bp, Artificial
  oligonucleotide probe
aagccgtgcgcaacgaggctttgcgcaccgtgttcgccgtttgcgctggcacgggaaagcggct

SEQ ID NO: 3194 - DNA, 64 bp, Artificial
  oligonucleotide probe
cgcattgcggctttcgccgtttcggctgggctggctgcacggtcccgtgcaccgcagctgcgtg

SEQ ID NO: 3195 - DNA, 64 bp, Artificial
  oligonucleotide probe
ttcggggaaacgccgtggctgcacggtcccgtgggattcgcgcaaacgttgcatggcgtgggga

SEQ ID NO: 3196 - DNA, 64 bp, Artificial
  oligonucleotide probe
ccgtttcggctgggctggctgcacggtcccgtgggattcgcgcaaacggcacgggaaagcggct

SEQ ID NO: 3197 - DNA, 64 bp, Artificial
  oligonucleotide probe
ttgcaagcgtccgggaaacgcgatttgccgcaccgtcgcaaagcgcacgggattcgcgcaaacg

SEQ ID NO: 3198 - DNA, 64 bp, Artificial
  oligonucleotide probe
cgcattgcggctttcgttgcaagcgtccgggaggctttgcgcaccgtggggattcgcgcaaacg

SEQ ID NO: 3199 - DNA, 64 bp, Artificial
  oligonucleotide probe
aagccgtgcgcaacgaccgtttcggctgggctttcgccgtttgcgctggcacgggaaagcggct

SEQ ID NO: 3200 - DNA, 64 bp, Artificial
  oligonucleotide probe
atggcgcagcacgctgaacgcgatttgccgcattgcatggcgtggggagcaccgcagctgcgtg

SEQ ID NO: 3201 - DNA, 64 bp, Artificial
  oligonucleotide probe
ggctttgcgcaccgtgccgtcgcaaagcgcacttgcatggcgtggggagcacgggaaagcggct

SEQ ID NO: 3202 - DNA, 64 bp, Artificial
  oligonucleotide probe
cgcattgcggctttcgatggcgcagcacgctgaacgcgatttgccgcattgcatggcgtgggga

SEQ ID NO: 3203 - DNA, 64 bp, Artificial
  oligonucleotide probe
aagccgtgcgcaacgattgcaagcgtccgggaaacggctgcaagcgcattgcatggcgtgggga

SEQ ID NO: 3204 - DNA, 64 bp, Artificial
  oligonucleotide probe
cgcattgcggctttcgttcggggaaacgccgtggctgcacggtcccgtgcacgggaaagcggct

SEQ ID NO: 3205 - DNA, 64 bp, Artificial
  oligonucleotide probe
aacgcgatttgccgcattcgccgtttgcgctgggctgcacggtcccgtgggattcgcgcaaacg

SEQ ID NO: 3206 - DNA, 64 bp, Artificial
  oligonucleotide probe
cgcattgcggctttcgttcggggaaacgccgtttgcatggcgtggggagcacgggaaagcggct

SEQ ID NO: 3207 - DNA, 64 bp, Artificial
  oligonucleotide probe
cgcattgcggctttcgccgtttcggctgggctaacgcgatttgccgcattgcatggcgtgggga

SEQ ID NO: 3208 - DNA, 64 bp, Artificial
  oligonucleotide probe
aagccgtgcgcaacgattgcaagcgtccgggagggattcgcgcaaacgttgcatggcgtgggga

SEQ ID NO: 3209 - DNA, 64 bp, Artificial
  oligonucleotide probe
cgcattgcggctttcgttgcaagcgtccgggaccgtttcggctgggctgggattcgcgcaaacg

SEQ ID NO: 3210 - DNA, 64 bp, Artificial
  oligonucleotide probe
ttgcaagcgtccgggaccgtcgcaaagcgcacggctgcacggtcccgtgggattcgcgcaaacg

SEQ ID NO: 3211 - DNA, 64 bp, Artificial
  oligonucleotide probe
cgcattgcggctttcgttcggggaaacgccgtttgcatggcgtggggagcaccgcagctgcgtg

SEQ ID NO: 3212 - DNA, 64 bp, Artificial
  oligonucleotide probe
aagccgtgcgcaacgaatggcgcagcacgctgaacgcgatttgccgcagcacgggaaagcggct

SEQ ID NO: 3213 - DNA, 64 bp, Artificial
  oligonucleotide probe
ccgtttcggctgggctttcgccgtttgcgctgggctgcacggtcccgtgcaccgcagctgcgtg

SEQ ID NO: 3214 - DNA, 64 bp, Artificial
  oligonucleotide probe
cgcattgcggctttcgttcgccgtttgcgctgttgcatggcgtggggagcaccgcagctgcgtg

SEQ ID NO: 3215 - DNA, 64 bp, Artificial
  oligonucleotide probe
aacggctgcaagcgcaggctttgcgcaccgtggggattcgcgcaaacgttgcatggcgtgggga

SEQ ID NO: 3216 - DNA, 64 bp, Artificial
  oligonucleotide probe
ttcggggaaacgccgtaacgcgatttgccgcaggctgcacggtcccgtgcacgggaaagcggct

SEQ ID NO: 3217 - DNA, 64 bp, Artificial
  oligonucleotide probe
ggctttgcgcaccgtgccgtcgcaaagcgcacgcaccgcagctgcgtggcacgggaaagcggct

SEQ ID NO: 3218 - DNA, 64 bp, Artificial
  oligonucleotide probe
aagccgtgcgcaacgattcggggaaacgccgtggctgcacggtcccgtgcacgggaaagcggct

SEQ ID NO: 3219 - DNA, 64 bp, Artificial
  oligonucleotide probe
aagccgtgcgcaacgaatggcgcagcacgctgccgtttcggctgggctttgcatggcgtgggga

SEQ ID NO: 3220 - DNA, 64 bp, Artificial
  oligonucleotide probe
cgcattgcggctttcgggctgcacggtcccgtgggattcgcgcaaacggcacgggaaagcggct

SEQ ID NO: 3221 - DNA, 64 bp, Artificial
  oligonucleotide probe
ttcgccgtttgcgctgccgtcgcaaagcgcacggctgcacggtcccgtgcacgggaaagcggct

SEQ ID NO: 3222 - DNA, 64 bp, Artificial
  oligonucleotide probe
cgcattgcggctttcgaacgcgatttgccgcaccgtcgcaaagcgcacgcaccgcagctgcgtg

SEQ ID NO: 3223 - DNA, 64 bp, Artificial
  oligonucleotide probe
aacggctgcaagcgcattcgccgtttgcgctggggattcgcgcaaacggcaccgcagctgcgtg

SEQ ID NO: 3224 - DNA, 64 bp, Artificial
  oligonucleotide probe
aagccgtgcgcaacgaccgtttcggctgggctccgtcgcaaagcgcacgcaccgcagctgcgtg

SEQ ID NO: 3225 - DNA, 64 bp, Artificial
  oligonucleotide probe
cgcattgcggctttcgccgtttcggctgggctttcgccgtttgcgctgttgcatggcgtgggga

SEQ ID NO: 3226 - DNA, 64 bp, Artificial
  oligonucleotide probe
aacggctgcaagcgcattcgccgtttgcgctgggctgcacggtcccgtgcacgggaaagcggct

SEQ ID NO: 3227 - DNA, 64 bp, Artificial
  oligonucleotide probe
ttcggggaaacgccgtccgtttcggctgggctggctgcacggtcccgtttgcatggcgtgggga

SEQ ID NO: 3228 - DNA, 64 bp, Artificial
  oligonucleotide probe
atggcgcagcacgctgccgtttcggctgggctggctgcacggtcccgtgcaccgcagctgcgtg

SEQ ID NO: 3229 - DNA, 64 bp, Artificial
  oligonucleotide probe
ttcggggaaacgccgtgggattcgcgcaaacgttgcatggcgtggggagcaccgcagctgcgtg

SEQ ID NO: 3230 - DNA, 64 bp, Artificial
  oligonucleotide probe
cgcattgcggctttcgaacggctgcaagcgcaggctgcacggtcccgtgcacgggaaagcggct

SEQ ID NO: 3231 - DNA, 64 bp, Artificial
  oligonucleotide probe
cgcattgcggctttcgaacgcgatttgccgcattgcatggcgtggggagcaccgcagctgcgtg

SEQ ID NO: 3232 - DNA, 64 bp, Artificial
  oligonucleotide probe
ttgcaagcgtccgggaccgtcgcaaagcgcacgggattcgcgcaaacgttgcatggcgtgggga

SEQ ID NO: 3233 - DNA, 64 bp, Artificial
  oligonucleotide probe
aacggctgcaagcgcaggctttgcgcaccgtgccgtcgcaaagcgcacgcacgggaaagcggct

SEQ ID NO: 3234 - DNA, 64 bp, Artificial
  oligonucleotide probe
ttgcaagcgtccgggaatggcgcagcacgctgttcggggaaacgccgtgcacgggaaagcggct

SEQ ID NO: 3235 - DNA, 64 bp, Artificial
  oligonucleotide probe
ttcggggaaacgccgtaacgcgatttgccgcagcaccgcagctgcgtggcacgggaaagcggct

SEQ ID NO: 3236 - DNA, 64 bp, Artificial
  oligonucleotide probe
aagccgtgcgcaacgaaacggctgcaagcgcattgcatggcgtggggagcacgggaaagcggct

SEQ ID NO: 3237 - DNA, 64 bp, Artificial
  oligonucleotide probe
ttgcaagcgtccgggaccgtttcggctgggctggctgcacggtcccgtgcaccgcagctgcgtg

SEQ ID NO: 3238 - DNA, 64 bp, Artificial
  oligonucleotide probe
atggcgcagcacgctgccgtttcggctgggctaacgcgatttgccgcagcacgggaaagcggct

SEQ ID NO: 3239 - DNA, 64 bp, Artificial
  oligonucleotide probe
ttgcaagcgtccgggattcgccgtttgcgctgggctgcacggtcccgtttgcatggcgtgggga

SEQ ID NO: 3240 - DNA, 64 bp, Artificial
  oligonucleotide probe
ttgcaagcgtccgggaggctgcacggtcccgtgggattcgcgcaaacgttgcatggcgtgggga

SEQ ID NO: 3241 - DNA, 64 bp, Artificial
  oligonucleotide probe
aacggctgcaagcgcaatggcgcagcacgctgggctgcacggtcccgtgggattcgcgcaaacg

SEQ ID NO: 3242 - DNA, 64 bp, Artificial
  oligonucleotide probe
cgcattgcggctttcgttcgccgtttgcgctgggctgcacggtcccgtgggattcgcgcaaacg

SEQ ID NO: 3243 - DNA, 64 bp, Artificial
  oligonucleotide probe
cgcattgcggctttcgccgtttcggctgggctgcaccgcagctgcgtggcacgggaaagcggct

SEQ ID NO: 3244 - DNA, 64 bp, Artificial
  oligonucleotide probe
aacggctgcaagcgcattcggggaaacgccgtccgtttcggctgggctgcacgggaaagcggct

SEQ ID NO: 3245 - DNA, 64 bp, Artificial
  oligonucleotide probe
aagccgtgcgcaacgaaacggctgcaagcgcattgcatggcgtggggagcaccgcagctgcgtg

SEQ ID NO: 3246 - DNA, 64 bp, Artificial
  oligonucleotide probe
ttgcaagcgtccgggattcggggaaacgccgtccgtttcggctgggctttgcatggcgtgggga

SEQ ID NO: 3247 - DNA, 64 bp, Artificial
  oligonucleotide probe
aacggctgcaagcgcattcggggaaacgccgtaacgcgatttgccgcattgcatggcgtgggga

SEQ ID NO: 3248 - DNA, 64 bp, Artificial
  oligonucleotide probe
cgcattgcggctttcgatggcgcagcacgctgttcgccgtttgcgctggggattcgcgcaaacg

SEQ ID NO: 3249 - DNA, 64 bp, Artificial
  oligonucleotide probe
ttgcaagcgtccgggaaacggctgcaagcgcattcgccgtttgcgctggggattcgcgcaaacg

SEQ ID NO: 3250 - DNA, 64 bp, Artificial
  oligonucleotide probe
aagccgtgcgcaacgacgcattgcggctttcgttcggggaaacgccgtgcacgggaaagcggct

SEQ ID NO: 3251 - DNA, 64 bp, Artificial
  oligonucleotide probe
ttcggggaaacgccgtccgtttcggctgggctccgtcgcaaagcgcacttgcatggcgtgggga

SEQ ID NO: 3252 - DNA, 64 bp, Artificial
  oligonucleotide probe
ttcggggaaacgccgtttcgccgtttgcgctgccgtcgcaaagcgcacgcaccgcagctgcgtg

SEQ ID NO: 3253 - DNA, 64 bp, Artificial
  oligonucleotide probe
ggctttgcgcaccgtgggctgcacggtcccgtgggattcgcgcaaacgttgcatggcgtgggga

SEQ ID NO: 3254 - DNA, 64 bp, Artificial
  oligonucleotide probe
aagccgtgcgcaacgattgcaagcgtccgggaaacggctgcaagcgcagcacgggaaagcggct

SEQ ID NO: 3255 - DNA, 64 bp, Artificial
  oligonucleotide probe
cgcattgcggctttcgttcggggaaacgccgtaacgcgatttgccgcattgcatggcgtgggga

SEQ ID NO: 3256 - DNA, 64 bp, Artificial
  oligonucleotide probe
atggcgcagcacgctgaacgcgatttgccgcagcaccgcagctgcgtggcacgggaaagcggct

SEQ ID NO: 3257 - DNA, 64 bp, Artificial
  oligonucleotide probe
aacggctgcaagcgcattcggggaaacgccgtgggattcgcgcaaacggcaccgcagctgcgtg

SEQ ID NO: 3258 - DNA, 64 bp, Artificial
  oligonucleotide probe
cgcattgcggctttcgatggcgcagcacgctgaacgcgatttgccgcagggattcgcgcaaacg

SEQ ID NO: 3259 - DNA, 64 bp, Artificial
  oligonucleotide probe
aacgcgatttgccgcagggattcgcgcaaacggcaccgcagctgcgtggcacgggaaagcggct

SEQ ID NO: 3260 - DNA, 64 bp, Artificial
  oligonucleotide probe
ttgcaagcgtccgggaggctttgcgcaccgtgatggcgcagcacgctggggattcgcgcaaacg

SEQ ID NO: 3261 - DNA, 64 bp, Artificial
  oligonucleotide probe
ttgcaagcgtccgggaccgtttcggctgggctggctgcacggtcccgtgcacgggaaagcggct

SEQ ID NO: 3262 - DNA, 64 bp, Artificial
  oligonucleotide probe
cgcattgcggctttcgaacggctgcaagcgcagggattcgcgcaaacgttgcatggcgtgggga

SEQ ID NO: 3263 - DNA, 64 bp, Artificial
  oligonucleotide probe
ggctttgcgcaccgtgaacgcgatttgccgcattcgccgtttgcgctggggattcgcgcaaacg

SEQ ID NO: 3264 - DNA, 64 bp, Artificial
  oligonucleotide probe
cgcattgcggctttcgttcgccgtttgcgctgttgcatggcgtggggagcacgggaaagcggct

SEQ ID NO: 3265 - DNA, 64 bp, Artificial
  oligonucleotide probe
cgcattgcggctttcgaacggctgcaagcgcattgcatggcgtggggagcacgggaaagcggct

SEQ ID NO: 3266 - DNA, 64 bp, Artificial
  oligonucleotide probe
ccgtttcggctgggctccgtcgcaaagcgcacggctgcacggtcccgtgggattcgcgcaaacg

SEQ ID NO: 3267 - DNA, 64 bp, Artificial
  oligonucleotide probe
ttgcaagcgtccgggaggctttgcgcaccgtgttcggggaaacgccgtgcacgggaaagcggct

SEQ ID NO: 3268 - DNA, 64 bp, Artificial
  oligonucleotide probe
aagccgtgcgcaacgaatggcgcagcacgctgaacgcgatttgccgcagcaccgcagctgcgtg

SEQ ID NO: 3269 - DNA, 64 bp, Artificial
  oligonucleotide probe
cgcattgcggctttcgaacggctgcaagcgcaccgtcgcaaagcgcacgcacgggaaagcggct

SEQ ID NO: 3270 - DNA, 64 bp, Artificial
  oligonucleotide probe
ggctgcacggtcccgtttgcatggcgtggggagcaccgcagctgcgtggcacgggaaagcggct

SEQ ID NO: 3271 - DNA, 64 bp, Artificial
  oligonucleotide probe
aagccgtgcgcaacgaaacggctgcaagcgcattcggggaaacgccgtgggattcgcgcaaacg

SEQ ID NO: 3272 - DNA, 64 bp, Artificial
  oligonucleotide probe
aagccgtgcgcaacgaaacggctgcaagcgcaaacgcgatttgccgcagcaccgcagctgcgtg

SEQ ID NO: 3273 - DNA, 64 bp, Artificial
  oligonucleotide probe
cgcattgcggctttcgccgtcgcaaagcgcacggctgcacggtcccgtgcacgggaaagcggct

SEQ ID NO: 3274 - DNA, 64 bp, Artificial
  oligonucleotide probe
ttgcaagcgtccgggaaacggctgcaagcgcaggctttgcgcaccgtggggattcgcgcaaacg

SEQ ID NO: 3275 - DNA, 64 bp, Artificial
  oligonucleotide probe
aacggctgcaagcgcaccgtttcggctgggctccgtcgcaaagcgcacgcaccgcagctgcgtg

SEQ ID NO: 3276 - DNA, 64 bp, Artificial
  oligonucleotide probe
cgcattgcggctttcgaacggctgcaagcgcaccgtcgcaaagcgcacgggattcgcgcaaacg

SEQ ID NO: 3277 - DNA, 64 bp, Artificial
  oligonucleotide probe
aacgcgatttgccgcaggctgcacggtcccgtgggattcgcgcaaacggcacgggaaagcggct

SEQ ID NO: 3278 - DNA, 64 bp, Artificial
  oligonucleotide probe
ggctttgcgcaccgtgaacgcgatttgccgcagggattcgcgcaaacgttgcatggcgtgggga

SEQ ID NO: 3279 - DNA, 64 bp, Artificial
  oligonucleotide probe
aagccgtgcgcaacgattgcaagcgtccgggaggctgcacggtcccgtttgcatggcgtgggga

SEQ ID NO: 3280 - DNA, 64 bp, Artificial
  oligonucleotide probe
atggcgcagcacgctgttcggggaaacgccgtttcgccgtttgcgctggggattcgcgcaaacg

SEQ ID NO: 3281 - DNA, 64 bp, Artificial
  oligonucleotide probe
aagccgtgcgcaacgacgcattgcggctttcgccgtcgcaaagcgcacttgcatggcgtgggga

SEQ ID NO: 3282 - DNA, 64 bp, Artificial
  oligonucleotide probe
ggctttgcgcaccgtgatggcgcagcacgctgttcggggaaacgccgtgcacgggaaagcggct

SEQ ID NO: 3283 - DNA, 64 bp, Artificial
  oligonucleotide probe
cgcattgcggctttcgttcgccgtttgcgctggcaccgcagctgcgtggcacgggaaagcggct

SEQ ID NO: 3284 - DNA, 64 bp, Artificial
  oligonucleotide probe
ccgtttcggctgggctaacgcgatttgccgcagggattcgcgcaaacgttgcatggcgtgggga

SEQ ID NO: 3285 - DNA, 64 bp, Artificial
  oligonucleotide probe
atggcgcagcacgctgttcggggaaacgccgtccgtttcggctgggctgggattcgcgcaaacg

SEQ ID NO: 3286 - DNA, 64 bp, Artificial
  oligonucleotide probe
aagccgtgcgcaacgattcgccgtttgcgctgccgtcgcaaagcgcacgggattcgcgcaaacg

SEQ ID NO: 3287 - DNA, 64 bp, Artificial
  oligonucleotide probe
cgcattgcggctttcgatggcgcagcacgctgttcgccgtttgcgctgttgcatggcgtgggga

SEQ ID NO: 3288 - DNA, 64 bp, Artificial
  oligonucleotide probe
ttgcaagcgtccgggaaacggctgcaagcgcaggctttgcgcaccgtggcaccgcagctgcgtg

SEQ ID NO: 3289 - DNA, 64 bp, Artificial
  oligonucleotide probe
aagccgtgcgcaacgaccgtttcggctgggctccgtcgcaaagcgcacttgcatggcgtgggga

SEQ ID NO: 3290 - DNA, 64 bp, Artificial
  oligonucleotide probe
ggctttgcgcaccgtgatggcgcagcacgctggcaccgcagctgcgtggcacgggaaagcggct

SEQ ID NO: 3291 - DNA, 64 bp, Artificial
  oligonucleotide probe
atggcgcagcacgctgttgcatggcgtggggagcaccgcagctgcgtggcacgggaaagcggct

SEQ ID NO: 3292 - DNA, 64 bp, Artificial
  oligonucleotide probe
aacggctgcaagcgcaggctgcacggtcccgtgggattcgcgcaaacggcaccgcagctgcgtg

SEQ ID NO: 3293 - DNA, 64 bp, Artificial
  oligonucleotide probe
ccgtttcggctgggctccgtcgcaaagcgcacttgcatggcgtggggagcacgggaaagcggct

SEQ ID NO: 3294 - DNA, 64 bp, Artificial
  oligonucleotide probe
ttcggggaaacgccgtgggattcgcgcaaacggcaccgcagctgcgtggcacgggaaagcggct

SEQ ID NO: 3295 - DNA, 64 bp, Artificial
  oligonucleotide probe
ttgcaagcgtccgggaatggcgcagcacgctgttcgccgtttgcgctggggattcgcgcaaacg

SEQ ID NO: 3296 - DNA, 64 bp, Artificial
  oligonucleotide probe
ggctttgcgcaccgtgccgtttcggctgggctttcgccgtttgcgctggcacgggaaagcggct

SEQ ID NO: 3297 - DNA, 64 bp, Artificial
  oligonucleotide probe
atggcgcagcacgctgaacgcgatttgccgcattcgccgtttgcgctggggattcgcgcaaacg

SEQ ID NO: 3298 - DNA, 64 bp, Artificial
  oligonucleotide probe
aacggctgcaagcgcaggctttgcgcaccgtgggctgcacggtcccgtgcaccgcagctgcgtg

SEQ ID NO: 3299 - DNA, 64 bp, Artificial
  oligonucleotide probe
aagccgtgcgcaacgacgcattgcggctttcgttcgccgtttgcgctggcacgggaaagcggct

SEQ ID NO: 3300 - DNA, 64 bp, Artificial
  oligonucleotide probe
aagccgtgcgcaacgaaacggctgcaagcgcaatggcgcagcacgctggggattcgcgcaaacg

SEQ ID NO: 3301 - DNA, 64 bp, Artificial
  oligonucleotide probe
ttcgccgtttgcgctgccgtcgcaaagcgcacgggattcgcgcaaacgttgcatggcgtgggga

SEQ ID NO: 3302 - DNA, 64 bp, Artificial
  oligonucleotide probe
ttcgccgtttgcgctgccgtcgcaaagcgcacggctgcacggtcccgtttgcatggcgtgggga

SEQ ID NO: 3303 - DNA, 64 bp, Artificial
  oligonucleotide probe
cgcattgcggctttcgccgtttcggctgggctccgtcgcaaagcgcacgcaccgcagctgcgtg

SEQ ID NO: 3304 - DNA, 64 bp, Artificial
  oligonucleotide probe
ttcggggaaacgccgtggctgcacggtcccgtgggattcgcgcaaacggcacgggaaagcggct

SEQ ID NO: 3305 - DNA, 64 bp, Artificial
  oligonucleotide probe
ttcgccgtttgcgctggggattcgcgcaaacgttgcatggcgtggggagcaccgcagctgcgtg

SEQ ID NO: 3306 - DNA, 64 bp, Artificial
  oligonucleotide probe
aacggctgcaagcgcaccgtttcggctgggctgggattcgcgcaaacgttgcatggcgtgggga

SEQ ID NO: 3307 - DNA, 64 bp, Artificial
  oligonucleotide probe
atggcgcagcacgctgttcggggaaacgccgtggctgcacggtcccgtgcaccgcagctgcgtg

SEQ ID NO: 3308 - DNA, 64 bp, Artificial
  oligonucleotide probe
ttgcaagcgtccgggaaacggctgcaagcgcattcggggaaacgccgtgggattcgcgcaaacg

SEQ ID NO: 3309 - DNA, 64 bp, Artificial
  oligonucleotide probe
ttgcaagcgtccgggattcggggaaacgccgtgggattcgcgcaaacgttgcatggcgtgggga

SEQ ID NO: 3310 - DNA, 64 bp, Artificial
  oligonucleotide probe
ccgtttcggctgggctccgtcgcaaagcgcacgcaccgcagctgcgtggcacgggaaagcggct

SEQ ID NO: 3311 - DNA, 64 bp, Artificial
  oligonucleotide probe
ttgcaagcgtccgggattcgccgtttgcgctggggattcgcgcaaacggcacgggaaagcggct

SEQ ID NO: 3312 - DNA, 64 bp, Artificial
  oligonucleotide probe
ttgcaagcgtccgggaggctttgcgcaccgtgttcggggaaacgccgtgcaccgcagctgcgtg

SEQ ID NO: 3313 - DNA, 64 bp, Artificial
  oligonucleotide probe
aacggctgcaagcgcaatggcgcagcacgctgttgcatggcgtggggagcacgggaaagcggct

SEQ ID NO: 3314 - DNA, 64 bp, Artificial
  oligonucleotide probe
ttgcaagcgtccgggaatggcgcagcacgctgggctgcacggtcccgtgggattcgcgcaaacg

SEQ ID NO: 3315 - DNA, 64 bp, Artificial
  oligonucleotide probe
aagccgtgcgcaacgaaacggctgcaagcgcagggattcgcgcaaacgttgcatggcgtgggga

SEQ ID NO: 3316 - DNA, 64 bp, Artificial
  oligonucleotide probe
cgcattgcggctttcgaacggctgcaagcgcaggctttgcgcaccgtggggattcgcgcaaacg

SEQ ID NO: 3317 - DNA, 64 bp, Artificial
  oligonucleotide probe
ttcggggaaacgccgtaacgcgatttgccgcaccgtcgcaaagcgcacttgcatggcgtgggga

SEQ ID NO: 3318 - DNA, 64 bp, Artificial
  oligonucleotide probe
aacgcgatttgccgcattcgccgtttgcgctggggattcgcgcaaacgttgcatggcgtgggga

SEQ ID NO: 3319 - DNA, 64 bp, Artificial
  oligonucleotide probe
atggcgcagcacgctgccgtttcggctgggctggctgcacggtcccgtgggattcgcgcaaacg

SEQ ID NO: 3320 - DNA, 64 bp, Artificial
  oligonucleotide probe
cgcattgcggctttcgggctttgcgcaccgtgatggcgcagcacgctggcaccgcagctgcgtg

SEQ ID NO: 3321 - DNA, 64 bp, Artificial
  oligonucleotide probe
ggctttgcgcaccgtgttgcatggcgtggggagcaccgcagctgcgtggcacgggaaagcggct

SEQ ID NO: 3322 - DNA, 64 bp, Artificial
  oligonucleotide probe
aagccgtgcgcaacgacgcattgcggctttcgaacgcgatttgccgcagcaccgcagctgcgtg

SEQ ID NO: 3323 - DNA, 64 bp, Artificial
  oligonucleotide probe
aagccgtgcgcaacgaaacggctgcaagcgcattcgccgtttgcgctggggattcgcgcaaacg

SEQ ID NO: 3324 - DNA, 64 bp, Artificial
  oligonucleotide probe
atggcgcagcacgctgaacgcgatttgccgcaccgtcgcaaagcgcacgcaccgcagctgcgtg

SEQ ID NO: 3325 - DNA, 64 bp, Artificial
  oligonucleotide probe
cgcattgcggctttcgaacggctgcaagcgcattcggggaaacgccgtttgcatggcgtgggga

SEQ ID NO: 3326 - DNA, 64 bp, Artificial
  oligonucleotide probe
ggctttgcgcaccgtgttcggggaaacgccgtccgtcgcaaagcgcacgggattcgcgcaaacg

SEQ ID NO: 3327 - DNA, 64 bp, Artificial
  oligonucleotide probe
aagccgtgcgcaacgaggctttgcgcaccgtgccgtcgcaaagcgcacgcacgggaaagcggct

SEQ ID NO: 3328 - DNA, 64 bp, Artificial
  oligonucleotide probe
ttcggggaaacgccgtaacgcgatttgccgcagggattcgcgcaaacggcaccgcagctgcgtg

SEQ ID NO: 3329 - DNA, 64 bp, Artificial
  oligonucleotide probe
atggcgcagcacgctgccgtttcggctgggctgggattcgcgcaaacgttgcatggcgtgggga

SEQ ID NO: 3330 - DNA, 64 bp, Artificial
  oligonucleotide probe
aagccgtgcgcaacgaaacggctgcaagcgcaccgtcgcaaagcgcacgggattcgcgcaaacg

SEQ ID NO: 3331 - DNA, 64 bp, Artificial
  oligonucleotide probe
cgcattgcggctttcgttgcaagcgtccgggaatggcgcagcacgctggggattcgcgcaaacg

SEQ ID NO: 3332 - DNA, 64 bp, Artificial
  oligonucleotide probe
atggcgcagcacgctgccgtcgcaaagcgcacggctgcacggtcccgtgcaccgcagctgcgtg

SEQ ID NO: 3333 - DNA, 64 bp, Artificial
  oligonucleotide probe
ggctttgcgcaccgtgccgtttcggctgggctttcgccgtttgcgctggcaccgcagctgcgtg

SEQ ID NO: 3334 - DNA, 64 bp, Artificial
  oligonucleotide probe
aacggctgcaagcgcaaacgcgatttgccgcaggctgcacggtcccgtgcaccgcagctgcgtg

SEQ ID NO: 3335 - DNA, 64 bp, Artificial
  oligonucleotide probe
aagccgtgcgcaacgattcggggaaacgccgtggctgcacggtcccgtgggattcgcgcaaacg

SEQ ID NO: 3336 - DNA, 64 bp, Artificial
  oligonucleotide probe
cgcattgcggctttcgccgtttcggctgggctaacgcgatttgccgcagcacgggaaagcggct

SEQ ID NO: 3337 - DNA, 64 bp, Artificial
  oligonucleotide probe
aacggctgcaagcgcaccgtcgcaaagcgcacggctgcacggtcccgtgcaccgcagctgcgtg

SEQ ID NO: 3338 - DNA, 64 bp, Artificial
  oligonucleotide probe
ggctttgcgcaccgtgttcgccgtttgcgctgggctgcacggtcccgtgcaccgcagctgcgtg

SEQ ID NO: 3339 - DNA, 64 bp, Artificial
  oligonucleotide probe
ttgcaagcgtccgggaaacggctgcaagcgcagggattcgcgcaaacgttgcatggcgtgggga

SEQ ID NO: 3340 - DNA, 64 bp, Artificial
  oligonucleotide probe
cgcattgcggctttcgaacggctgcaagcgcattcgccgtttgcgctggggattcgcgcaaacg

SEQ ID NO: 3341 - DNA, 64 bp, Artificial
  oligonucleotide probe
ttgcaagcgtccgggaggctttgcgcaccgtgttcgccgtttgcgctggcaccgcagctgcgtg

SEQ ID NO: 3342 - DNA, 64 bp, Artificial
  oligonucleotide probe
aacggctgcaagcgcaatggcgcagcacgctgttcggggaaacgccgtgcacgggaaagcggct

SEQ ID NO: 3343 - DNA, 64 bp, Artificial
  oligonucleotide probe
aacggctgcaagcgcaccgtttcggctgggctttcgccgtttgcgctgttgcatggcgtgggga

SEQ ID NO: 3344 - DNA, 64 bp, Artificial
  oligonucleotide probe
aacggctgcaagcgcaggctttgcgcaccgtgttcggggaaacgccgtttgcatggcgtgggga

SEQ ID NO: 3345 - DNA, 64 bp, Artificial
  oligonucleotide probe
aagccgtgcgcaacgaaacgcgatttgccgcattgcatggcgtggggagcacgggaaagcggct

SEQ ID NO: 3346 - DNA, 64 bp, Artificial
  oligonucleotide probe
aacggctgcaagcgcaatggcgcagcacgctgggctgcacggtcccgtgcacgggaaagcggct

SEQ ID NO: 3347 - DNA, 64 bp, Artificial
  oligonucleotide probe
aacgcgatttgccgcattcgccgtttgcgctgggctgcacggtcccgtgcacgggaaagcggct

SEQ ID NO: 3348 - DNA, 64 bp, Artificial
  oligonucleotide probe
cgcattgcggctttcgttcggggaaacgccgtgggattcgcgcaaacggcacgggaaagcggct

SEQ ID NO: 3349 - DNA, 64 bp, Artificial
  oligonucleotide probe
cgcattgcggctttcgccgtttcggctgggctttgcatggcgtggggagcaccgcagctgcgtg

SEQ ID NO: 3350 - DNA, 64 bp, Artificial
  oligonucleotide probe
aacggctgcaagcgcaccgtcgcaaagcgcacgggattcgcgcaaacgttgcatggcgtgggga

SEQ ID NO: 3351 - DNA, 64 bp, Artificial
  oligonucleotide probe
ttgcaagcgtccgggattcggggaaacgccgtggctgcacggtcccgtgggattcgcgcaaacg

SEQ ID NO: 3352 - DNA, 64 bp, Artificial
  oligonucleotide probe
aacggctgcaagcgcattcggggaaacgccgtgggattcgcgcaaacggcacgggaaagcggct

SEQ ID NO: 3353 - DNA, 64 bp, Artificial
  oligonucleotide probe
ttcggggaaacgccgtgggattcgcgcaaacgttgcatggcgtggggagcacgggaaagcggct

SEQ ID NO: 3354 - DNA, 64 bp, Artificial
  oligonucleotide probe
ggctttgcgcaccgtgatggcgcagcacgctgccgtttcggctgggctgggattcgcgcaaacg

SEQ ID NO: 3355 - DNA, 64 bp, Artificial
  oligonucleotide probe
ttgcaagcgtccgggaaacggctgcaagcgcaaacgcgatttgccgcagcacgggaaagcggct

SEQ ID NO: 3356 - DNA, 64 bp, Artificial
  oligonucleotide probe
ttgcaagcgtccgggattcggggaaacgccgtccgtttcggctgggctgcaccgcagctgcgtg

SEQ ID NO: 3357 - DNA, 64 bp, Artificial
  oligonucleotide probe
aagccgtgcgcaacgacgcattgcggctttcgttcgccgtttgcgctgttgcatggcgtgggga

SEQ ID NO: 3358 - DNA, 64 bp, Artificial
  oligonucleotide probe
cgcattgcggctttcgaacggctgcaagcgcaccgtttcggctgggctgcaccgcagctgcgtg

SEQ ID NO: 3359 - DNA, 64 bp, Artificial
  oligonucleotide probe
aagccgtgcgcaacgaccgtttcggctgggctttcgccgtttgcgctggggattcgcgcaaacg

SEQ ID NO: 3360 - DNA, 64 bp, Artificial
  oligonucleotide probe
aagccgtgcgcaacgacgcattgcggctttcgttgcaagcgtccgggagggattcgcgcaaacg

SEQ ID NO: 3361 - DNA, 64 bp, Artificial
  oligonucleotide probe
ggctttgcgcaccgtgggctgcacggtcccgtgggattcgcgcaaacggcacgggaaagcggct

SEQ ID NO: 3362 - DNA, 64 bp, Artificial
  oligonucleotide probe
ttgcaagcgtccgggaccgtcgcaaagcgcacttgcatggcgtggggagcaccgcagctgcgtg

SEQ ID NO: 3363 - DNA, 64 bp, Artificial
  oligonucleotide probe
ttgcaagcgtccgggaggctttgcgcaccgtgggctgcacggtcccgtgcaccgcagctgcgtg

SEQ ID NO: 3364 - DNA, 64 bp, Artificial
  oligonucleotide probe
aagccgtgcgcaacgaaacgcgatttgccgcaggctgcacggtcccgtgcacgggaaagcggct

SEQ ID NO: 3365 - DNA, 64 bp, Artificial
  oligonucleotide probe
cgcattgcggctttcgttgcaagcgtccgggattgcatggcgtggggagcacgggaaagcggct

SEQ ID NO: 3366 - DNA, 64 bp, Artificial
  oligonucleotide probe
aacggctgcaagcgcattcggggaaacgccgtccgtttcggctgggctttgcatggcgtgggga

SEQ ID NO: 3367 - DNA, 64 bp, Artificial
  oligonucleotide probe
ttgcaagcgtccgggattcggggaaacgccgtggctgcacggtcccgtgcaccgcagctgcgtg

SEQ ID NO: 3368 - DNA, 64 bp, Artificial
  oligonucleotide probe
aagccgtgcgcaacgaaacggctgcaagcgcaggctttgcgcaccgtggcacgggaaagcggct

SEQ ID NO: 3369 - DNA, 64 bp, Artificial
  oligonucleotide probe
atggcgcagcacgctgccgtttcggctgggctaacgcgatttgccgcattgcatggcgtgggga

SEQ ID NO: 3370 - DNA, 64 bp, Artificial
  oligonucleotide probe
cgcattgcggctttcgaacggctgcaagcgcaccgtcgcaaagcgcacttgcatggcgtgggga

SEQ ID NO: 3371 - DNA, 64 bp, Artificial
  oligonucleotide probe
ttgcaagcgtccgggaatggcgcagcacgctggggattcgcgcaaacggcacgggaaagcggct

SEQ ID NO: 3372 - DNA, 64 bp, Artificial
  oligonucleotide probe
cgcattgcggctttcgttcggggaaacgccgtggctgcacggtcccgtgggattcgcgcaaacg

SEQ ID NO: 3373 - DNA, 64 bp, Artificial
  oligonucleotide probe
aacggctgcaagcgcattcggggaaacgccgtgggattcgcgcaaacgttgcatggcgtgggga

SEQ ID NO: 3374 - DNA, 64 bp, Artificial
  oligonucleotide probe
cgcattgcggctttcgggctttgcgcaccgtgccgtttcggctgggctgcaccgcagctgcgtg

SEQ ID NO: 3375 - DNA, 64 bp, Artificial
  oligonucleotide probe
cgcattgcggctttcgaacggctgcaagcgcattcggggaaacgccgtgggattcgcgcaaacg

SEQ ID NO: 3376 - DNA, 64 bp, Artificial
  oligonucleotide probe
ggctttgcgcaccgtgccgtcgcaaagcgcacggctgcacggtcccgtgcacgggaaagcggct

SEQ ID NO: 3377 - DNA, 64 bp, Artificial
  oligonucleotide probe
ttgcaagcgtccgggaaacgcgatttgccgcattcgccgtttgcgctggcacgggaaagcggct

SEQ ID NO: 3378 - DNA, 64 bp, Artificial
  oligonucleotide probe
ggctttgcgcaccgtgttcggggaaacgccgtggctgcacggtcccgtttgcatggcgtgggga

SEQ ID NO: 3379 - DNA, 64 bp, Artificial
  oligonucleotide probe
atggcgcagcacgctgccgtttcggctgggctttcgccgtttgcgctggcacgggaaagcggct

SEQ ID NO: 3380 - DNA, 64 bp, Artificial
  oligonucleotide probe
aagccgtgcgcaacgattgcaagcgtccgggattcggggaaacgccgtgggattcgcgcaaacg

SEQ ID NO: 3381 - DNA, 64 bp, Artificial
  oligonucleotide probe
aacggctgcaagcgcattcggggaaacgccgtttgcatggcgtggggagcacgggaaagcggct

SEQ ID NO: 3382 - DNA, 64 bp, Artificial
  oligonucleotide probe
ccgtttcggctgggctaacgcgatttgccgcaccgtcgcaaagcgcacttgcatggcgtgggga

SEQ ID NO: 3383 - DNA, 64 bp, Artificial
  oligonucleotide probe
aagccgtgcgcaacgaggctttgcgcaccgtgggctgcacggtcccgtgcaccgcagctgcgtg

SEQ ID NO: 3384 - DNA, 64 bp, Artificial
  oligonucleotide probe
atggcgcagcacgctgttcgccgtttgcgctgccgtcgcaaagcgcacttgcatggcgtgggga

SEQ ID NO: 3385 - DNA, 64 bp, Artificial
  oligonucleotide probe
atggcgcagcacgctgccgtttcggctgggctggctgcacggtcccgtgcacgggaaagcggct

SEQ ID NO: 3386 - DNA, 64 bp, Artificial
  oligonucleotide probe
ttgcaagcgtccgggaaacggctgcaagcgcattcggggaaacgccgtgcacgggaaagcggct

SEQ ID NO: 3387 - DNA, 64 bp, Artificial
  oligonucleotide probe
ggctgcacggtcccgtgggattcgcgcaaacgttgcatggcgtggggagcaccgcagctgcgtg

SEQ ID NO: 3388 - DNA, 64 bp, Artificial
  oligonucleotide probe
atggcgcagcacgctgaacgcgatttgccgcaccgtcgcaaagcgcacgggattcgcgcaaacg

SEQ ID NO: 3389 - DNA, 64 bp, Artificial
  oligonucleotide probe
ggctttgcgcaccgtgttcgccgtttgcgctgggctgcacggtcccgtgcacgggaaagcggct

SEQ ID NO: 3390 - DNA, 64 bp, Artificial
  oligonucleotide probe
ttcggggaaacgccgtccgtttcggctgggctaacgcgatttgccgcagcaccgcagctgcgtg

SEQ ID NO: 3391 - DNA, 64 bp, Artificial
  oligonucleotide probe
ccgtcgcaaagcgcacggctgcacggtcccgtgcaccgcagctgcgtggcacgggaaagcggct

SEQ ID NO: 3392 - DNA, 64 bp, Artificial
  oligonucleotide probe
aacggctgcaagcgcaaacgcgatttgccgcaccgtcgcaaagcgcacgcacgggaaagcggct

SEQ ID NO: 3393 - DNA, 64 bp, Artificial
  oligonucleotide probe
aagccgtgcgcaacgattcgccgtttgcgctggcaccgcagctgcgtggcacgggaaagcggct

SEQ ID NO: 3394 - DNA, 64 bp, Artificial
  oligonucleotide probe
ccgtcgcaaagcgcacgggattcgcgcaaacgttgcatggcgtggggagcaccgcagctgcgtg

SEQ ID NO: 3395 - DNA, 64 bp, Artificial
  oligonucleotide probe
aagccgtgcgcaacgattgcaagcgtccgggagcaccgcagctgcgtggcacgggaaagcggct

SEQ ID NO: 3396 - DNA, 64 bp, Artificial
  oligonucleotide probe
ttcgccgtttgcgctgggctgcacggtcccgtgggattcgcgcaaacgttgcatggcgtgggga

SEQ ID NO: 3397 - DNA, 64 bp, Artificial
  oligonucleotide probe
aagccgtgcgcaacgacgcattgcggctttcgccgtttcggctgggctgcaccgcagctgcgtg

SEQ ID NO: 3398 - DNA, 64 bp, Artificial
  oligonucleotide probe
ttcggggaaacgccgtccgtttcggctgggctttcgccgtttgcgctggcacgggaaagcggct

SEQ ID NO: 3399 - DNA, 64 bp, Artificial
  oligonucleotide probe
cgcattgcggctttcgttgcaagcgtccgggaaacgcgatttgccgcagggattcgcgcaaacg

SEQ ID NO: 3400 - DNA, 64 bp, Artificial
  oligonucleotide probe
aagccgtgcgcaacgaaacggctgcaagcgcaccgtcgcaaagcgcacgcacgggaaagcggct

SEQ ID NO: 3401 - DNA, 64 bp, Artificial
  oligonucleotide probe
ttgcaagcgtccgggattcggggaaacgccgtccgtcgcaaagcgcacttgcatggcgtgggga

SEQ ID NO: 3402 - DNA, 64 bp, Artificial
  oligonucleotide probe
ttcggggaaacgccgtccgtttcggctgggctaacgcgatttgccgcagcacgggaaagcggct

SEQ ID NO: 3403 - DNA, 64 bp, Artificial
  oligonucleotide probe
aagccgtgcgcaacgaaacggctgcaagcgcagcaccgcagctgcgtggcacgggaaagcggct

SEQ ID NO: 3404 - DNA, 64 bp, Artificial
  oligonucleotide probe
aagccgtgcgcaacgattgcaagcgtccgggaccgtttcggctgggctgcacgggaaagcggct

SEQ ID NO: 3405 - DNA, 64 bp, Artificial
  oligonucleotide probe
ttcggggaaacgccgtaacgcgatttgccgcattgcatggcgtggggagcaccgcagctgcgtg

SEQ ID NO: 3406 - DNA, 64 bp, Artificial
  oligonucleotide probe
ggctttgcgcaccgtgttcggggaaacgccgtccgtttcggctgggctgcacgggaaagcggct

SEQ ID NO: 3407 - DNA, 64 bp, Artificial
  oligonucleotide probe
ccgtttcggctgggctttcgccgtttgcgctgggctgcacggtcccgtttgcatggcgtgggga

SEQ ID NO: 3408 - DNA, 64 bp, Artificial
  oligonucleotide probe
ggctttgcgcaccgtgttcgccgtttgcgctgttgcatggcgtggggagcacgggaaagcggct

SEQ ID NO: 3409 - DNA, 64 bp, Artificial
  oligonucleotide probe
cgcattgcggctttcgttcgccgtttgcgctgccgtcgcaaagcgcacgggattcgcgcaaacg

SEQ ID NO: 3410 - DNA, 64 bp, Artificial
  oligonucleotide probe
aagccgtgcgcaacgattcggggaaacgccgtccgtttcggctgggctgggattcgcgcaaacg

SEQ ID NO: 3411 - DNA, 64 bp, Artificial
  oligonucleotide probe
ttgcaagcgtccgggaaacggctgcaagcgcaccgtttcggctgggctgcaccgcagctgcgtg

SEQ ID NO: 3412 - DNA, 64 bp, Artificial
  oligonucleotide probe
atggcgcagcacgctgggctgcacggtcccgtttgcatggcgtggggagcaccgcagctgcgtg

SEQ ID NO: 3413 - DNA, 64 bp, Artificial
  oligonucleotide probe
cgcattgcggctttcgccgtcgcaaagcgcacggctgcacggtcccgtgggattcgcgcaaacg

SEQ ID NO: 3414 - DNA, 64 bp, Artificial
  oligonucleotide probe
ttgcaagcgtccgggaccgtttcggctgggctttgcatggcgtggggagcacgggaaagcggct

SEQ ID NO: 3415 - DNA, 64 bp, Artificial
  oligonucleotide probe
cgcattgcggctttcgatggcgcagcacgctgggctgcacggtcccgtgggattcgcgcaaacg

SEQ ID NO: 3416 - DNA, 64 bp, Artificial
  oligonucleotide probe
cgcattgcggctttcgggctgcacggtcccgtgcaccgcagctgcgtggcacgggaaagcggct

SEQ ID NO: 3417 - DNA, 64 bp, Artificial
  oligonucleotide probe
ttgcaagcgtccgggaccgtcgcaaagcgcacggctgcacggtcccgtgcacgggaaagcggct

SEQ ID NO: 3418 - DNA, 64 bp, Artificial
  oligonucleotide probe
ttgcaagcgtccgggaccgtcgcaaagcgcacttgcatggcgtggggagcacgggaaagcggct

SEQ ID NO: 3419 - DNA, 64 bp, Artificial
  oligonucleotide probe
ttgcaagcgtccgggaggctttgcgcaccgtgccgtttcggctgggctttgcatggcgtgggga

SEQ ID NO: 3420 - DNA, 64 bp, Artificial
  oligonucleotide probe
aacggctgcaagcgcaatggcgcagcacgctgttcgccgtttgcgctggcaccgcagctgcgtg

SEQ ID NO: 3421 - DNA, 64 bp, Artificial
  oligonucleotide probe
aagccgtgcgcaacgacgcattgcggctttcgggctgcacggtcccgtgcacgggaaagcggct

SEQ ID NO: 3422 - DNA, 64 bp, Artificial
  oligonucleotide probe
atggcgcagcacgctgttcgccgtttgcgctgttgcatggcgtggggagcacgggaaagcggct

SEQ ID NO: 3423 - DNA, 64 bp, Artificial
  oligonucleotide probe
cgcattgcggctttcgaacggctgcaagcgcaaacgcgatttgccgcagcaccgcagctgcgtg

SEQ ID NO: 3424 - DNA, 64 bp, Artificial
  oligonucleotide probe
aacgcgatttgccgcattcgccgtttgcgctgggctgcacggtcccgtttgcatggcgtgggga

SEQ ID NO: 3425 - DNA, 64 bp, Artificial
  oligonucleotide probe
ttgcaagcgtccgggaccgtttcggctgggctttcgccgtttgcgctggggattcgcgcaaacg

SEQ ID NO: 3426 - DNA, 64 bp, Artificial
  oligonucleotide probe
cgcattgcggctttcgccgtttcggctgggctccgtcgcaaagcgcacttgcatggcgtgggga

SEQ ID NO: 3427 - DNA, 64 bp, Artificial
  oligonucleotide probe
ttgcaagcgtccgggaccgtttcggctgggctccgtcgcaaagcgcacttgcatggcgtgggga

SEQ ID NO: 3428 - DNA, 64 bp, Artificial
  oligonucleotide probe
aagccgtgcgcaacgaccgtttcggctgggctgcaccgcagctgcgtggcacgggaaagcggct

SEQ ID NO: 3429 - DNA, 64 bp, Artificial
  oligonucleotide probe
aagccgtgcgcaacgattgcaagcgtccgggaccgtcgcaaagcgcacttgcatggcgtgggga

SEQ ID NO: 3430 - DNA, 64 bp, Artificial
  oligonucleotide probe
cgcattgcggctttcgttgcaagcgtccgggaatggcgcagcacgctggcaccgcagctgcgtg

SEQ ID NO: 3431 - DNA, 64 bp, Artificial
  oligonucleotide probe
aagccgtgcgcaacgaccgtcgcaaagcgcacggctgcacggtcccgtgcacgggaaagcggct

SEQ ID NO: 3432 - DNA, 64 bp, Artificial
  oligonucleotide probe
ttgcaagcgtccgggaaacggctgcaagcgcattcgccgtttgcgctggcaccgcagctgcgtg

SEQ ID NO: 3433 - DNA, 64 bp, Artificial
  oligonucleotide probe
ggctttgcgcaccgtgttcggggaaacgccgtccgtttcggctgggctttgcatggcgtgggga

SEQ ID NO: 3434 - DNA, 64 bp, Artificial
  oligonucleotide probe
ttcggggaaacgccgtttcgccgtttgcgctggggattcgcgcaaacggcacgggaaagcggct

SEQ ID NO: 3435 - DNA, 64 bp, Artificial
  oligonucleotide probe
aacggctgcaagcgcaggctttgcgcaccgtggcaccgcagctgcgtggcacgggaaagcggct

SEQ ID NO: 3436 - DNA, 64 bp, Artificial
  oligonucleotide probe
ttgcaagcgtccgggaggctttgcgcaccgtgccgtcgcaaagcgcacgcacgggaaagcggct

SEQ ID NO: 3437 - DNA, 64 bp, Artificial
  oligonucleotide probe
aagccgtgcgcaacgacgcattgcggctttcgttcggggaaacgccgtgcaccgcagctgcgtg

SEQ ID NO: 3438 - DNA, 64 bp, Artificial
  oligonucleotide probe
cgcattgcggctttcgatggcgcagcacgctgttcggggaaacgccgtgcaccgcagctgcgtg

SEQ ID NO: 3439 - DNA, 64 bp, Artificial
  oligonucleotide probe
ggctttgcgcaccgtgatggcgcagcacgctgaacgcgatttgccgcattgcatggcgtgggga

SEQ ID NO: 3440 - DNA, 64 bp, Artificial
  oligonucleotide probe
cgcattgcggctttcgaacgcgatttgccgcaccgtcgcaaagcgcacttgcatggcgtgggga

SEQ ID NO: 3441 - DNA, 64 bp, Artificial
  oligonucleotide probe
ggctttgcgcaccgtgaacgcgatttgccgcaggctgcacggtcccgtgcacgggaaagcggct

SEQ ID NO: 3442 - DNA, 64 bp, Artificial
  oligonucleotide probe
ttgcaagcgtccgggaaacggctgcaagcgcaccgtcgcaaagcgcacgcaccgcagctgcgtg

SEQ ID NO: 3443 - DNA, 64 bp, Artificial
  oligonucleotide probe
ttgcaagcgtccgggaaacgcgatttgccgcaggctgcacggtcccgtgcacgggaaagcggct

SEQ ID NO: 3444 - DNA, 64 bp, Artificial
  oligonucleotide probe
ttgcaagcgtccgggaatggcgcagcacgctgaacgcgatttgccgcattgcatggcgtgggga

SEQ ID NO: 3445 - DNA, 64 bp, Artificial
  oligonucleotide probe
ttcgccgtttgcgctgttgcatggcgtggggagcaccgcagctgcgtggcacgggaaagcggct

SEQ ID NO: 3446 - DNA, 64 bp, Artificial
  oligonucleotide probe
cgcattgcggctttcgggctttgcgcaccgtgttgcatggcgtggggagcaccgcagctgcgtg

SEQ ID NO: 3447 - DNA, 64 bp, Artificial
  oligonucleotide probe
aagccgtgcgcaacgaggctgcacggtcccgtgggattcgcgcaaacggcacgggaaagcggct

SEQ ID NO: 3448 - DNA, 64 bp, Artificial
  oligonucleotide probe
aagccgtgcgcaacgattcggggaaacgccgtccgtcgcaaagcgcacgggattcgcgcaaacg

SEQ ID NO: 3449 - DNA, 64 bp, Artificial
  oligonucleotide probe
cgcattgcggctttcgaacggctgcaagcgcagggattcgcgcaaacggcacgggaaagcggct

SEQ ID NO: 3450 - DNA, 64 bp, Artificial
  oligonucleotide probe
ggctttgcgcaccgtgccgtttcggctgggctttgcatggcgtggggagcacgggaaagcggct

SEQ ID NO: 3451 - DNA, 64 bp, Artificial
  oligonucleotide probe
aagccgtgcgcaacgaggctttgcgcaccgtgatggcgcagcacgctggcaccgcagctgcgtg

SEQ ID NO: 3452 - DNA, 64 bp, Artificial
  oligonucleotide probe
aagccgtgcgcaacgacgcattgcggctttcgaacggctgcaagcgcagggattcgcgcaaacg

SEQ ID NO: 3453 - DNA, 64 bp, Artificial
  oligonucleotide probe
ggctttgcgcaccgtgccgtttcggctgggctttcgccgtttgcgctggggattcgcgcaaacg

SEQ ID NO: 3454 - DNA, 64 bp, Artificial
  oligonucleotide probe
aagccgtgcgcaacgattcggggaaacgccgtaacgcgatttgccgcattgcatggcgtgggga

SEQ ID NO: 3455 - DNA, 64 bp, Artificial
  oligonucleotide probe
ccgtttcggctgggctaacgcgatttgccgcaccgtcgcaaagcgcacgcaccgcagctgcgtg

SEQ ID NO: 3456 - DNA, 64 bp, Artificial
  oligonucleotide probe
cgcattgcggctttcgttgcaagcgtccgggaggctttgcgcaccgtggcacgggaaagcggct

SEQ ID NO: 3457 - DNA, 64 bp, Artificial
  oligonucleotide probe
ttcggggaaacgccgtccgtcgcaaagcgcacgggattcgcgcaaacggcacgggaaagcggct

SEQ ID NO: 3458 - DNA, 64 bp, Artificial
  oligonucleotide probe
atggcgcagcacgctgccgtttcggctgggctccgtcgcaaagcgcacgcaccgcagctgcgtg

SEQ ID NO: 3459 - DNA, 64 bp, Artificial
  oligonucleotide probe
aagccgtgcgcaacgaccgtttcggctgggctaacgcgatttgccgcagggattcgcgcaaacg

SEQ ID NO: 3460 - DNA, 64 bp, Artificial
  oligonucleotide probe
ttcggggaaacgccgtccgtttcggctgggctggctgcacggtcccgtgggattcgcgcaaacg

SEQ ID NO: 3461 - DNA, 64 bp, Artificial
  oligonucleotide probe
ggctttgcgcaccgtgatggcgcagcacgctggggattcgcgcaaacggcaccgcagctgcgtg

SEQ ID NO: 3462 - DNA, 64 bp, Artificial
  oligonucleotide probe
aagccgtgcgcaacgaaacgcgatttgccgcattcgccgtttgcgctggcaccgcagctgcgtg

SEQ ID NO: 3463 - DNA, 64 bp, Artificial
  oligonucleotide probe
aagccgtgcgcaacgaccgtcgcaaagcgcacggctgcacggtcccgtgcaccgcagctgcgtg

SEQ ID NO: 3464 - DNA, 64 bp, Artificial
  oligonucleotide probe
ccgtttcggctgggctccgtcgcaaagcgcacggctgcacggtcccgtgcaccgcagctgcgtg

SEQ ID NO: 3465 - DNA, 64 bp, Artificial
  oligonucleotide probe
ttcggggaaacgccgtggctgcacggtcccgtgggattcgcgcaaacggcaccgcagctgcgtg

SEQ ID NO: 3466 - DNA, 64 bp, Artificial
  oligonucleotide probe
cgcattgcggctttcgttgcaagcgtccgggaccgtcgcaaagcgcacgggattcgcgcaaacg

SEQ ID NO: 3467 - DNA, 64 bp, Artificial
  oligonucleotide probe
atggcgcagcacgctgttcggggaaacgccgtttcgccgtttgcgctggcaccgcagctgcgtg

SEQ ID NO: 3468 - DNA, 64 bp, Artificial
  oligonucleotide probe
aagccgtgcgcaacgaggctttgcgcaccgtggggattcgcgcaaacggcacgggaaagcggct

SEQ ID NO: 3469 - DNA, 64 bp, Artificial
  oligonucleotide probe
aagccgtgcgcaacgaaacgcgatttgccgcagggattcgcgcaaacggcaccgcagctgcgtg

SEQ ID NO: 3470 - DNA, 64 bp, Artificial
  oligonucleotide probe
cgcattgcggctttcgttgcaagcgtccgggattgcatggcgtggggagcaccgcagctgcgtg

SEQ ID NO: 3471 - DNA, 64 bp, Artificial
  oligonucleotide probe
aagccgtgcgcaacgacgcattgcggctttcgatggcgcagcacgctgttgcatggcgtgggga

SEQ ID NO: 3472 - DNA, 64 bp, Artificial
  oligonucleotide probe
aagccgtgcgcaacgacgcattgcggctttcgccgtttcggctgggctgcacgggaaagcggct

SEQ ID NO: 3473 - DNA, 64 bp, Artificial
  oligonucleotide probe
cgcattgcggctttcgatggcgcagcacgctggggattcgcgcaaacggcaccgcagctgcgtg

SEQ ID NO: 3474 - DNA, 64 bp, Artificial
  oligonucleotide probe
aacggctgcaagcgcaccgtttcggctgggctttcgccgtttgcgctggcaccgcagctgcgtg

SEQ ID NO: 3475 - DNA, 64 bp, Artificial
  oligonucleotide probe
ttgcaagcgtccgggaccgtttcggctgggctgggattcgcgcaaacggcacgggaaagcggct

SEQ ID NO: 3476 - DNA, 64 bp, Artificial
  oligonucleotide probe
atggcgcagcacgctgaacgcgatttgccgcaccgtcgcaaagcgcacgcacgggaaagcggct

SEQ ID NO: 3477 - DNA, 64 bp, Artificial
  oligonucleotide probe
ttgcaagcgtccgggaatggcgcagcacgctgaacgcgatttgccgcagggattcgcgcaaacg

SEQ ID NO: 3478 - DNA, 64 bp, Artificial
  oligonucleotide probe
cgcattgcggctttcgaacggctgcaagcgcaaacgcgatttgccgcagggattcgcgcaaacg

SEQ ID NO: 3479 - DNA, 64 bp, Artificial
  oligonucleotide probe
ccgtttcggctgggctggctgcacggtcccgtgggattcgcgcaaacgttgcatggcgtgggga

SEQ ID NO: 3480 - DNA, 64 bp, Artificial
  oligonucleotide probe
ggctttgcgcaccgtgggctgcacggtcccgtgggattcgcgcaaacggcaccgcagctgcgtg

SEQ ID NO: 3481 - DNA, 64 bp, Artificial
  oligonucleotide probe
aacgcgatttgccgcattcgccgtttgcgctgccgtcgcaaagcgcacttgcatggcgtgggga

SEQ ID NO: 3482 - DNA, 64 bp, Artificial
  oligonucleotide probe
aagccgtgcgcaacgaatggcgcagcacgctggggattcgcgcaaacgttgcatggcgtgggga

SEQ ID NO: 3483 - DNA, 64 bp, Artificial
  oligonucleotide probe
aagccgtgcgcaacgattcggggaaacgccgtttgcatggcgtggggagcacgggaaagcggct

SEQ ID NO: 3484 - DNA, 64 bp, Artificial
  oligonucleotide probe
ttcggggaaacgccgtccgtttcggctgggctggctgcacggtcccgtgcacgggaaagcggct

SEQ ID NO: 3485 - DNA, 64 bp, Artificial
  oligonucleotide probe
cgcattgcggctttcgaacggctgcaagcgcaggctttgcgcaccgtggcaccgcagctgcgtg

SEQ ID NO: 3486 - DNA, 64 bp, Artificial
  oligonucleotide probe
cgcattgcggctttcgttgcaagcgtccgggattcgccgtttgcgctggcacgggaaagcggct

SEQ ID NO: 3487 - DNA, 64 bp, Artificial
  oligonucleotide probe
aagccgtgcgcaacgattgcaagcgtccgggaatggcgcagcacgctggcacgggaaagcggct

SEQ ID NO: 3488 - DNA, 64 bp, Artificial
  oligonucleotide probe
ccgtttcggctgggctttcgccgtttgcgctgccgtcgcaaagcgcacgcacgggaaagcggct

SEQ ID NO: 3489 - DNA, 64 bp, Artificial
  oligonucleotide probe
aacggctgcaagcgcaggctttgcgcaccgtgttgcatggcgtggggagcaccgcagctgcgtg

SEQ ID NO: 3490 - DNA, 64 bp, Artificial
  oligonucleotide probe
aagccgtgcgcaacgaccgtcgcaaagcgcacgggattcgcgcaaacgttgcatggcgtgggga

SEQ ID NO: 3491 - DNA, 64 bp, Artificial
  oligonucleotide probe
ttcggggaaacgccgtaacgcgatttgccgcattcgccgtttgcgctggggattcgcgcaaacg

SEQ ID NO: 3492 - DNA, 64 bp, Artificial
  oligonucleotide probe
ttgcaagcgtccgggaaacggctgcaagcgcaccgtttcggctgggctttgcatggcgtgggga

SEQ ID NO: 3493 - DNA, 64 bp, Artificial
  oligonucleotide probe
cgcattgcggctttcgggctttgcgcaccgtgttcgccgtttgcgctggcacgggaaagcggct

SEQ ID NO: 3494 - DNA, 64 bp, Artificial
  oligonucleotide probe
aacggctgcaagcgcaatggcgcagcacgctgccgtcgcaaagcgcacttgcatggcgtgggga

SEQ ID NO: 3495 - DNA, 64 bp, Artificial
  oligonucleotide probe
aacggctgcaagcgcaggctttgcgcaccgtgccgtttcggctgggctgcaccgcagctgcgtg

SEQ ID NO: 3496 - DNA, 64 bp, Artificial
  oligonucleotide probe
cgcattgcggctttcgaacgcgatttgccgcagggattcgcgcaaacggcacgggaaagcggct

SEQ ID NO: 3497 - DNA, 64 bp, Artificial
  oligonucleotide probe
aacggctgcaagcgcaccgtttcggctgggctccgtcgcaaagcgcacttgcatggcgtgggga

SEQ ID NO: 3498 - DNA, 64 bp, Artificial
  oligonucleotide probe
ccgtttcggctgggctaacgcgatttgccgcattcgccgtttgcgctggcacgggaaagcggct

SEQ ID NO: 3499 - DNA, 64 bp, Artificial
  oligonucleotide probe
ttcggggaaacgccgtggctgcacggtcccgtttgcatggcgtggggagcaccgcagctgcgtg

SEQ ID NO: 3500 - DNA, 64 bp, Artificial
  oligonucleotide probe
cgcattgcggctttcgttgcaagcgtccgggagggattcgcgcaaacgttgcatggcgtgggga

SEQ ID NO: 3501 - DNA, 64 bp, Artificial
  oligonucleotide probe
atggcgcagcacgctgccgtttcggctgggctccgtcgcaaagcgcacgggattcgcgcaaacg

SEQ ID NO: 3502 - DNA, 64 bp, Artificial
  oligonucleotide probe
ttgcaagcgtccgggaggctttgcgcaccgtgaacgcgatttgccgcattgcatggcgtgggga

SEQ ID NO: 3503 - DNA, 64 bp, Artificial
  oligonucleotide probe
aagccgtgcgcaacgattcggggaaacgccgtgggattcgcgcaaacggcaccgcagctgcgtg

SEQ ID NO: 3504 - DNA, 64 bp, Artificial
  oligonucleotide probe
atggcgcagcacgctgttcggggaaacgccgtaacgcgatttgccgcattgcatggcgtgggga

SEQ ID NO: 3505 - DNA, 64 bp, Artificial
  oligonucleotide probe
cgcattgcggctttcgaacggctgcaagcgcattcggggaaacgccgtgcaccgcagctgcgtg

SEQ ID NO: 3506 - DNA, 64 bp, Artificial
  oligonucleotide probe
cgcattgcggctttcgaacgcgatttgccgcaccgtcgcaaagcgcacgcacgggaaagcggct

SEQ ID NO: 3507 - DNA, 64 bp, Artificial
  oligonucleotide probe
cgcattgcggctttcgttgcaagcgtccgggattcgccgtttgcgctgttgcatggcgtgggga

SEQ ID NO: 3508 - DNA, 64 bp, Artificial
  oligonucleotide probe
ttgcaagcgtccgggaaacggctgcaagcgcagggattcgcgcaaacggcaccgcagctgcgtg

SEQ ID NO: 3509 - DNA, 64 bp, Artificial
  oligonucleotide probe
aagccgtgcgcaacgattcggggaaacgccgtgcaccgcagctgcgtggcacgggaaagcggct

SEQ ID NO: 3510 - DNA, 64 bp, Artificial
  oligonucleotide probe
cgcattgcggctttcgggctgcacggtcccgtttgcatggcgtggggagcacgggaaagcggct

SEQ ID NO: 3511 - DNA, 64 bp, Artificial
  oligonucleotide probe
cgcattgcggctttcgccgtttcggctgggctttcgccgtttgcgctggcacgggaaagcggct

SEQ ID NO: 3512 - DNA, 64 bp, Artificial
  oligonucleotide probe
ttgcaagcgtccgggaccgtttcggctgggctttcgccgtttgcgctgttgcatggcgtgggga

SEQ ID NO: 3513 - DNA, 64 bp, Artificial
  oligonucleotide probe
aagccgtgcgcaacgaatggcgcagcacgctgttcgccgtttgcgctgttgcatggcgtgggga

SEQ ID NO: 3514 - DNA, 64 bp, Artificial
  oligonucleotide probe
atggcgcagcacgctgaacgcgatttgccgcaggctgcacggtcccgtgcacgggaaagcggct

SEQ ID NO: 3515 - DNA, 64 bp, Artificial
  oligonucleotide probe
ggctttgcgcaccgtgaacgcgatttgccgcaccgtcgcaaagcgcacgggattcgcgcaaacg

SEQ ID NO: 3516 - DNA, 64 bp, Artificial
  oligonucleotide probe
aagccgtgcgcaacgattgcaagcgtccgggattcgccgtttgcgctgttgcatggcgtgggga

SEQ ID NO: 3517 - DNA, 64 bp, Artificial
  oligonucleotide probe
ttgcaagcgtccgggaggctttgcgcaccgtgttgcatggcgtggggagcacgggaaagcggct

SEQ ID NO: 3518 - DNA, 64 bp, Artificial
  oligonucleotide probe
ttcggggaaacgccgtccgtttcggctgggctttcgccgtttgcgctggcaccgcagctgcgtg

SEQ ID NO: 3519 - DNA, 64 bp, Artificial
  oligonucleotide probe
cgcattgcggctttcgttcggggaaacgccgtccgtcgcaaagcgcacttgcatggcgtgggga

SEQ ID NO: 3520 - DNA, 64 bp, Artificial
  oligonucleotide probe
aacggctgcaagcgcattcggggaaacgccgtggctgcacggtcccgtgcacgggaaagcggct

SEQ ID NO: 3521 - DNA, 64 bp, Artificial
  oligonucleotide probe
aagccgtgcgcaacgaatggcgcagcacgctgttcggggaaacgccgtgcacgggaaagcggct

SEQ ID NO: 3522 - DNA, 64 bp, Artificial
  oligonucleotide probe
ttgcaagcgtccgggaccgtttcggctgggctccgtcgcaaagcgcacgcacgggaaagcggct

SEQ ID NO: 3523 - DNA, 64 bp, Artificial
  oligonucleotide probe
aagccgtgcgcaacgattgcaagcgtccgggaatggcgcagcacgctggcaccgcagctgcgtg

SEQ ID NO: 3524 - DNA, 64 bp, Artificial
  oligonucleotide probe
ccgtcgcaaagcgcacggctgcacggtcccgtttgcatggcgtggggagcacgggaaagcggct

SEQ ID NO: 3525 - DNA, 64 bp, Artificial
  oligonucleotide probe
aagccgtgcgcaacgaggctttgcgcaccgtgttcggggaaacgccgtttgcatggcgtgggga

SEQ ID NO: 3526 - DNA, 64 bp, Artificial
  oligonucleotide probe
cgcattgcggctttcgatggcgcagcacgctggcaccgcagctgcgtggcacgggaaagcggct

SEQ ID NO: 3527 - DNA, 64 bp, Artificial
  oligonucleotide probe
cgcattgcggctttcgttgcaagcgtccgggagggattcgcgcaaacggcaccgcagctgcgtg

SEQ ID NO: 3528 - DNA, 64 bp, Artificial
  oligonucleotide probe
aagccgtgcgcaacgattcgccgtttgcgctggggattcgcgcaaacggcaccgcagctgcgtg

SEQ ID NO: 3529 - DNA, 64 bp, Artificial
  oligonucleotide probe
aacgcgatttgccgcaggctgcacggtcccgtgcaccgcagctgcgtggcacgggaaagcggct

SEQ ID NO: 3530 - DNA, 64 bp, Artificial
  oligonucleotide probe
ggctttgcgcaccgtgttcggggaaacgccgtttcgccgtttgcgctggcaccgcagctgcgtg

SEQ ID NO: 3531 - DNA, 64 bp, Artificial
  oligonucleotide probe
aacggctgcaagcgcaggctgcacggtcccgtgcaccgcagctgcgtggcacgggaaagcggct

SEQ ID NO: 3532 - DNA, 64 bp, Artificial
  oligonucleotide probe
aagccgtgcgcaacgaggctgcacggtcccgtttgcatggcgtggggagcacgggaaagcggct

SEQ ID NO: 3533 - DNA, 64 bp, Artificial
  oligonucleotide probe
aacgcgatttgccgcaccgtcgcaaagcgcacggctgcacggtcccgtttgcatggcgtgggga

SEQ ID NO: 3534 - DNA, 64 bp, Artificial
  oligonucleotide probe
ccgtcgcaaagcgcacttgcatggcgtggggagcaccgcagctgcgtggcacgggaaagcggct

SEQ ID NO: 3535 - DNA, 64 bp, Artificial
  oligonucleotide probe
aagccgtgcgcaacgaggctttgcgcaccgtgaacgcgatttgccgcagcacgggaaagcggct

SEQ ID NO: 3536 - DNA, 64 bp, Artificial
  oligonucleotide probe
aagccgtgcgcaacgattgcaagcgtccgggagggattcgcgcaaacggcaccgcagctgcgtg

SEQ ID NO: 3537 - DNA, 64 bp, Artificial
  oligonucleotide probe
cgcattgcggctttcgttcgccgtttgcgctggggattcgcgcaaacggcaccgcagctgcgtg

SEQ ID NO: 3538 - DNA, 64 bp, Artificial
  oligonucleotide probe
aagccgtgcgcaacgaaacggctgcaagcgcattcgccgtttgcgctgttgcatggcgtgggga

SEQ ID NO: 3539 - DNA, 64 bp, Artificial
  oligonucleotide probe
gggattcgcgcaaacgttgcatggcgtggggagcaccgcagctgcgtggcacgggaaagcggct

SEQ ID NO: 3540 - DNA, 64 bp, Artificial
  oligonucleotide probe
aacggctgcaagcgcattcgccgtttgcgctgccgtcgcaaagcgcacgcaccgcagctgcgtg

SEQ ID NO: 3541 - DNA, 64 bp, Artificial
  oligonucleotide probe
aagccgtgcgcaacgattcggggaaacgccgtccgtttcggctgggctgcacgggaaagcggct

SEQ ID NO: 3542 - DNA, 64 bp, Artificial
  oligonucleotide probe
aagccgtgcgcaacgagggattcgcgcaaacgttgcatggcgtggggagcacgggaaagcggct

SEQ ID NO: 3543 - DNA, 64 bp, Artificial
  oligonucleotide probe
ttcggggaaacgccgtaacgcgatttgccgcaggctgcacggtcccgtgcaccgcagctgcgtg

SEQ ID NO: 3544 - DNA, 64 bp, Artificial
  oligonucleotide probe
ttgcaagcgtccgggaatggcgcagcacgctgttcgccgtttgcgctggcacgggaaagcggct

SEQ ID NO: 3545 - DNA, 64 bp, Artificial
  oligonucleotide probe
aagccgtgcgcaacgaccgtttcggctgggctggctgcacggtcccgtttgcatggcgtgggga

SEQ ID NO: 3546 - DNA, 64 bp, Artificial
  oligonucleotide probe
aagccgtgcgcaacgattgcaagcgtccgggaatggcgcagcacgctgttgcatggcgtgggga

SEQ ID NO: 3547 - DNA, 64 bp, Artificial
  oligonucleotide probe
cgcattgcggctttcgccgtcgcaaagcgcacggctgcacggtcccgtttgcatggcgtgggga

SEQ ID NO: 3548 - DNA, 64 bp, Artificial
  oligonucleotide probe
ttgcaagcgtccgggaaacgcgatttgccgcattgcatggcgtggggagcaccgcagctgcgtg

SEQ ID NO: 3549 - DNA, 64 bp, Artificial
  oligonucleotide probe
ggctttgcgcaccgtgggctgcacggtcccgtttgcatggcgtggggagcacgggaaagcggct

SEQ ID NO: 3550 - DNA, 64 bp, Artificial
  oligonucleotide probe
aagccgtgcgcaacgaggctgcacggtcccgtttgcatggcgtggggagcaccgcagctgcgtg

SEQ ID NO: 3551 - DNA, 64 bp, Artificial
  oligonucleotide probe
aacggctgcaagcgcaccgtttcggctgggctgggattcgcgcaaacggcacgggaaagcggct

SEQ ID NO: 3552 - DNA, 64 bp, Artificial
  oligonucleotide probe
atggcgcagcacgctgccgtttcggctgggctttgcatggcgtggggagcaccgcagctgcgtg

SEQ ID NO: 3553 - DNA, 64 bp, Artificial
  oligonucleotide probe
aagccgtgcgcaacgattcggggaaacgccgtccgtcgcaaagcgcacgcaccgcagctgcgtg

SEQ ID NO: 3554 - DNA, 64 bp, Artificial
  oligonucleotide probe
aagccgtgcgcaacgaatggcgcagcacgctgaacgcgatttgccgcattgcatggcgtgggga

SEQ ID NO: 3555 - DNA, 64 bp, Artificial
  oligonucleotide probe
ttgcaagcgtccgggaatggcgcagcacgctgccgtcgcaaagcgcacgcaccgcagctgcgtg

SEQ ID NO: 3556 - DNA, 64 bp, Artificial
  oligonucleotide probe
cgcattgcggctttcgttcggggaaacgccgtccgtcgcaaagcgcacgcaccgcagctgcgtg

SEQ ID NO: 3557 - DNA, 64 bp, Artificial
  oligonucleotide probe
ttgcaagcgtccgggattcggggaaacgccgtttgcatggcgtggggagcaccgcagctgcgtg

SEQ ID NO: 3558 - DNA, 64 bp, Artificial
  oligonucleotide probe
ttcggggaaacgccgtaacgcgatttgccgcattcgccgtttgcgctggcacgggaaagcggct

SEQ ID NO: 3559 - DNA, 64 bp, Artificial
  oligonucleotide probe
aagccgtgcgcaacgacgcattgcggctttcggggattcgcgcaaacgttgcatggcgtgggga

SEQ ID NO: 3560 - DNA, 64 bp, Artificial
  oligonucleotide probe
aacggctgcaagcgcattcggggaaacgccgtgcaccgcagctgcgtggcacgggaaagcggct

SEQ ID NO: 3561 - DNA, 64 bp, Artificial
  oligonucleotide probe
ggctttgcgcaccgtgatggcgcagcacgctgccgtcgcaaagcgcacttgcatggcgtgggga

SEQ ID NO: 3562 - DNA, 64 bp, Artificial
  oligonucleotide probe
ccgtttcggctgggctttcgccgtttgcgctggggattcgcgcaaacggcacgggaaagcggct

SEQ ID NO: 3563 - DNA, 64 bp, Artificial
  oligonucleotide probe
ggctttgcgcaccgtgttcggggaaacgccgtccgtcgcaaagcgcacttgcatggcgtgggga

SEQ ID NO: 3564 - DNA, 64 bp, Artificial
  oligonucleotide probe
ttgcaagcgtccgggaaacggctgcaagcgcattcgccgtttgcgctgttgcatggcgtgggga

SEQ ID NO: 3565 - DNA, 64 bp, Artificial
  oligonucleotide probe
cgcattgcggctttcgttgcaagcgtccgggattcggggaaacgccgtttgcatggcgtgggga

SEQ ID NO: 3566 - DNA, 64 bp, Artificial
  oligonucleotide probe
aacggctgcaagcgcaggctttgcgcaccgtgaacgcgatttgccgcattgcatggcgtgggga

SEQ ID NO: 3567 - DNA, 64 bp, Artificial
  oligonucleotide probe
aacggctgcaagcgcaccgtcgcaaagcgcacggctgcacggtcccgtgcacgggaaagcggct

SEQ ID NO: 3568 - DNA, 64 bp, Artificial
  oligonucleotide probe
aacggctgcaagcgcaatggcgcagcacgctggcaccgcagctgcgtggcacgggaaagcggct

SEQ ID NO: 3569 - DNA, 64 bp, Artificial
  oligonucleotide probe
aacggctgcaagcgcaccgtttcggctgggctttgcatggcgtggggagcacgggaaagcggct

SEQ ID NO: 3570 - DNA, 64 bp, Artificial
  oligonucleotide probe
aagccgtgcgcaacgaatggcgcagcacgctgggctgcacggtcccgtgcacgggaaagcggct

SEQ ID NO: 3571 - DNA, 64 bp, Artificial
  oligonucleotide probe
aacggctgcaagcgcaccgtttcggctgggctttcgccgtttgcgctggcacgggaaagcggct

SEQ ID NO: 3572 - DNA, 64 bp, Artificial
  oligonucleotide probe
aagccgtgcgcaacgaccgtcgcaaagcgcacggctgcacggtcccgtgggattcgcgcaaacg

SEQ ID NO: 3573 - DNA, 64 bp, Artificial
  oligonucleotide probe
aagccgtgcgcaacgaggctttgcgcaccgtggcaccgcagctgcgtggcacgggaaagcggct

SEQ ID NO: 3574 - DNA, 64 bp, Artificial
  oligonucleotide probe
cgcattgcggctttcgatggcgcagcacgctgttcggggaaacgccgtgggattcgcgcaaacg

SEQ ID NO: 3575 - DNA, 64 bp, Artificial
  oligonucleotide probe
atggcgcagcacgctgttcggggaaacgccgtccgtttcggctgggctgcacgggaaagcggct

SEQ ID NO: 3576 - DNA, 64 bp, Artificial
  oligonucleotide probe
ttgcaagcgtccgggattcgccgtttgcgctggggattcgcgcaaacgttgcatggcgtgggga

SEQ ID NO: 3577 - DNA, 64 bp, Artificial
  oligonucleotide probe
aacgcgatttgccgcaggctgcacggtcccgtgggattcgcgcaaacggcaccgcagctgcgtg

SEQ ID NO: 3578 - DNA, 64 bp, Artificial
  oligonucleotide probe
cgcattgcggctttcgggctttgcgcaccgtgatggcgcagcacgctgttgcatggcgtgggga

SEQ ID NO: 3579 - DNA, 64 bp, Artificial
  oligonucleotide probe
aagccgtgcgcaacgaatggcgcagcacgctgccgtttcggctgggctgcaccgcagctgcgtg

SEQ ID NO: 3580 - DNA, 64 bp, Artificial
  oligonucleotide probe
cgcattgcggctttcgatggcgcagcacgctgttgcatggcgtggggagcacgggaaagcggct

SEQ ID NO: 3581 - DNA, 64 bp, Artificial
  oligonucleotide probe
aagccgtgcgcaacgacgcattgcggctttcgccgtcgcaaagcgcacgggattcgcgcaaacg

SEQ ID NO: 3582 - DNA, 64 bp, Artificial
  oligonucleotide probe
aacggctgcaagcgcaggctttgcgcaccgtgttcggggaaacgccgtgggattcgcgcaaacg

SEQ ID NO: 3583 - DNA, 64 bp, Artificial
  oligonucleotide probe
cgcattgcggctttcgggctttgcgcaccgtgatggcgcagcacgctggggattcgcgcaaacg

SEQ ID NO: 3584 - DNA, 64 bp, Artificial
  oligonucleotide probe
cgcattgcggctttcgccgtcgcaaagcgcacttgcatggcgtggggagcacgggaaagcggct

SEQ ID NO: 3585 - DNA, 64 bp, Artificial
  oligonucleotide probe
cgcattgcggctttcgccgtttcggctgggctccgtcgcaaagcgcacgcacgggaaagcggct

SEQ ID NO: 3586 - DNA, 64 bp, Artificial
  oligonucleotide probe
aagccgtgcgcaacgaaacgcgatttgccgcaccgtcgcaaagcgcacgggattcgcgcaaacg

SEQ ID NO: 3587 - DNA, 64 bp, Artificial
  oligonucleotide probe
ttgcaagcgtccgggaaacggctgcaagcgcaggctgcacggtcccgtgcacgggaaagcggct

SEQ ID NO: 3588 - DNA, 64 bp, Artificial
  oligonucleotide probe
aagccgtgcgcaacgattgcaagcgtccgggattcggggaaacgccgtgcaccgcagctgcgtg

SEQ ID NO: 3589 - DNA, 64 bp, Artificial
  oligonucleotide probe
aagccgtgcgcaacgattcggggaaacgccgtccgtcgcaaagcgcacgcacgggaaagcggct

SEQ ID NO: 3590 - DNA, 64 bp, Artificial
  oligonucleotide probe
aacggctgcaagcgcattcgccgtttgcgctggcaccgcagctgcgtggcacgggaaagcggct

SEQ ID NO: 3591 - DNA, 64 bp, Artificial
  oligonucleotide probe
ttgcaagcgtccgggattcggggaaacgccgtttcgccgtttgcgctgttgcatggcgtgggga

SEQ ID NO: 3592 - DNA, 64 bp, Artificial
  oligonucleotide probe
aacggctgcaagcgcagggattcgcgcaaacggcaccgcagctgcgtggcacgggaaagcggct

SEQ ID NO: 3593 - DNA, 64 bp, Artificial
  oligonucleotide probe
aagccgtgcgcaacgaaacggctgcaagcgcattcgccgtttgcgctggcacgggaaagcggct

SEQ ID NO: 3594 - DNA, 64 bp, Artificial
  oligonucleotide probe
aacgcgatttgccgcaccgtcgcaaagcgcacgggattcgcgcaaacggcacgggaaagcggct

SEQ ID NO: 3595 - DNA, 64 bp, Artificial
  oligonucleotide probe
aacggctgcaagcgcaatggcgcagcacgctgttgcatggcgtggggagcaccgcagctgcgtg

SEQ ID NO: 3596 - DNA, 64 bp, Artificial
  oligonucleotide probe
ggctttgcgcaccgtgaacgcgatttgccgcaggctgcacggtcccgtttgcatggcgtgggga

SEQ ID NO: 3597 - DNA, 64 bp, Artificial
  oligonucleotide probe
cgcattgcggctttcgaacggctgcaagcgcattgcatggcgtggggagcaccgcagctgcgtg

SEQ ID NO: 3598 - DNA, 64 bp, Artificial
  oligonucleotide probe
ttcggggaaacgccgtaacgcgatttgccgcaccgtcgcaaagcgcacgcacgggaaagcggct

SEQ ID NO: 3599 - DNA, 64 bp, Artificial
  oligonucleotide probe
atggcgcagcacgctgccgtcgcaaagcgcacgggattcgcgcaaacgttgcatggcgtgggga

SEQ ID NO: 3600 - DNA, 64 bp, Artificial
  oligonucleotide probe
atggcgcagcacgctgttcgccgtttgcgctgggctgcacggtcccgtttgcatggcgtgggga

SEQ ID NO: 3601 - DNA, 64 bp, Artificial
  oligonucleotide probe
cgcattgcggctttcgggctttgcgcaccgtgaacgcgatttgccgcagcaccgcagctgcgtg

SEQ ID NO: 3602 - DNA, 64 bp, Artificial
  oligonucleotide probe
aagccgtgcgcaacgacgcattgcggctttcgttcggggaaacgccgtgggattcgcgcaaacg

SEQ ID NO: 3603 - DNA, 64 bp, Artificial
  oligonucleotide probe
aacggctgcaagcgcaccgtcgcaaagcgcacttgcatggcgtggggagcacgggaaagcggct

SEQ ID NO: 3604 - DNA, 64 bp, Artificial
  oligonucleotide probe
aagccgtgcgcaacgacgcattgcggctttcgggctgcacggtcccgtttgcatggcgtgggga

SEQ ID NO: 3605 - DNA, 64 bp, Artificial
  oligonucleotide probe
ttgcaagcgtccgggaccgtttcggctgggctggctgcacggtcccgtgggattcgcgcaaacg

SEQ ID NO: 3606 - DNA, 64 bp, Artificial
  oligonucleotide probe
aacggctgcaagcgcaggctttgcgcaccgtgttgcatggcgtggggagcacgggaaagcggct

SEQ ID NO: 3607 - DNA, 64 bp, Artificial
  oligonucleotide probe
ggctttgcgcaccgtgttcgccgtttgcgctgttgcatggcgtggggagcaccgcagctgcgtg

SEQ ID NO: 3608 - DNA, 64 bp, Artificial
  oligonucleotide probe
aagccgtgcgcaacgaatggcgcagcacgctgttcggggaaacgccgtgcaccgcagctgcgtg

SEQ ID NO: 3609 - DNA, 64 bp, Artificial
  oligonucleotide probe
cgcattgcggctttcgttcgccgtttgcgctgccgtcgcaaagcgcacgcaccgcagctgcgtg

SEQ ID NO: 3610 - DNA, 64 bp, Artificial
  oligonucleotide probe
aagccgtgcgcaacgaccgtttcggctgggctttcgccgtttgcgctgttgcatggcgtgggga

SEQ ID NO: 3611 - DNA, 64 bp, Artificial
  oligonucleotide probe
ttcggggaaacgccgtccgtttcggctgggctccgtcgcaaagcgcacgcaccgcagctgcgtg

SEQ ID NO: 3612 - DNA, 64 bp, Artificial
  oligonucleotide probe
cgcattgcggctttcgggctttgcgcaccgtgaacgcgatttgccgcagggattcgcgcaaacg

SEQ ID NO: 3613 - DNA, 64 bp, Artificial
  oligonucleotide probe
ttcggggaaacgccgtttcgccgtttgcgctgttgcatggcgtggggagcaccgcagctgcgtg

SEQ ID NO: 3614 - DNA, 64 bp, Artificial
  oligonucleotide probe
ttgcaagcgtccgggattcgccgtttgcgctgttgcatggcgtggggagcacgggaaagcggct

SEQ ID NO: 3615 - DNA, 64 bp, Artificial
  oligonucleotide probe
ttgcaagcgtccgggaatggcgcagcacgctgttcggggaaacgccgtgcaccgcagctgcgtg

SEQ ID NO: 3616 - DNA, 64 bp, Artificial
  oligonucleotide probe
aagccgtgcgcaacgattgcaagcgtccgggaggctgcacggtcccgtgcacgggaaagcggct

SEQ ID NO: 3617 - DNA, 64 bp, Artificial
  oligonucleotide probe
aacggctgcaagcgcattcgccgtttgcgctgggctgcacggtcccgtttgcatggcgtgggga

SEQ ID NO: 3618 - DNA, 64 bp, Artificial
  oligonucleotide probe
atggcgcagcacgctgaacgcgatttgccgcattcgccgtttgcgctggcacgggaaagcggct

SEQ ID NO: 3619 - DNA, 64 bp, Artificial
  oligonucleotide probe
ttcgccgtttgcgctgggctgcacggtcccgtttgcatggcgtggggagcaccgcagctgcgtg

SEQ ID NO: 3620 - DNA, 64 bp, Artificial
  oligonucleotide probe
cgcattgcggctttcgttcggggaaacgccgtccgtcgcaaagcgcacgggattcgcgcaaacg

SEQ ID NO: 3621 - DNA, 64 bp, Artificial
  oligonucleotide probe
ggctttgcgcaccgtgccgtttcggctgggctgggattcgcgcaaacggcacgggaaagcggct

SEQ ID NO: 3622 - DNA, 64 bp, Artificial
  oligonucleotide probe
ggctttgcgcaccgtgttcggggaaacgccgtccgtttcggctgggctgggattcgcgcaaacg

SEQ ID NO: 3623 - DNA, 64 bp, Artificial
  oligonucleotide probe
ttgcaagcgtccgggattcgccgtttgcgctgttgcatggcgtggggagcaccgcagctgcgtg

SEQ ID NO: 3624 - DNA, 64 bp, Artificial
  oligonucleotide probe
aagccgtgcgcaacgattcggggaaacgccgtccgtttcggctgggctttgcatggcgtgggga

SEQ ID NO: 3625 - DNA, 64 bp, Artificial
  oligonucleotide probe
cgcattgcggctttcgatggcgcagcacgctgccgtcgcaaagcgcacgggattcgcgcaaacg

SEQ ID NO: 3626 - DNA, 64 bp, Artificial
  oligonucleotide probe
aagccgtgcgcaacgaatggcgcagcacgctgttcggggaaacgccgtttgcatggcgtgggga

SEQ ID NO: 3627 - DNA, 64 bp, Artificial
  oligonucleotide probe
aacggctgcaagcgcaatggcgcagcacgctgttcggggaaacgccgtgcaccgcagctgcgtg

SEQ ID NO: 3628 - DNA, 64 bp, Artificial
  oligonucleotide probe
ggctttgcgcaccgtgatggcgcagcacgctgaacgcgatttgccgcagcaccgcagctgcgtg

SEQ ID NO: 3629 - DNA, 64 bp, Artificial
  oligonucleotide probe
aacggctgcaagcgcaccgtttcggctgggctgcaccgcagctgcgtggcacgggaaagcggct

SEQ ID NO: 3630 - DNA, 64 bp, Artificial
  oligonucleotide probe
ggctttgcgcaccgtgttcggggaaacgccgtggctgcacggtcccgtgcacgggaaagcggct

SEQ ID NO: 3631 - DNA, 64 bp, Artificial
  oligonucleotide probe
atggcgcagcacgctgttcggggaaacgccgtggctgcacggtcccgtttgcatggcgtgggga

SEQ ID NO: 3632 - DNA, 64 bp, Artificial
  oligonucleotide probe
aagccgtgcgcaacgaccgtttcggctgggctgggattcgcgcaaacggcacgggaaagcggct

SEQ ID NO: 3633 - DNA, 64 bp, Artificial
  oligonucleotide probe
aacggctgcaagcgcaaacgcgatttgccgcattgcatggcgtggggagcaccgcagctgcgtg

SEQ ID NO: 3634 - DNA, 64 bp, Artificial
  oligonucleotide probe
aacggctgcaagcgcaggctttgcgcaccgtgggctgcacggtcccgtgcacgggaaagcggct

SEQ ID NO: 3635 - DNA, 64 bp, Artificial
  oligonucleotide probe
ttcggggaaacgccgtccgtttcggctgggctttgcatggcgtggggagcaccgcagctgcgtg

SEQ ID NO: 3636 - DNA, 64 bp, Artificial
  oligonucleotide probe
aacggctgcaagcgcaggctttgcgcaccgtgttcggggaaacgccgtgcaccgcagctgcgtg

SEQ ID NO: 3637 - DNA, 64 bp, Artificial
  oligonucleotide probe
ttgcaagcgtccgggattcggggaaacgccgtaacgcgatttgccgcagggattcgcgcaaacg

SEQ ID NO: 3638 - DNA, 64 bp, Artificial
  oligonucleotide probe
ttgcaagcgtccgggaaacggctgcaagcgcaggctttgcgcaccgtggcacgggaaagcggct

SEQ ID NO: 3639 - DNA, 64 bp, Artificial
  oligonucleotide probe
ttgcaagcgtccgggagggattcgcgcaaacgttgcatggcgtggggagcacgggaaagcggct

SEQ ID NO: 3640 - DNA, 64 bp, Artificial
  oligonucleotide probe
ccgtttcggctgggctccgtcgcaaagcgcacggctgcacggtcccgtgcacgggaaagcggct

SEQ ID NO: 3641 - DNA, 64 bp, Artificial
  oligonucleotide probe
cgcattgcggctttcgccgtttcggctgggctgggattcgcgcaaacggcacgggaaagcggct

SEQ ID NO: 3642 - DNA, 64 bp, Artificial
  oligonucleotide probe
aagccgtgcgcaacgattcgccgtttgcgctgttgcatggcgtggggagcacgggaaagcggct

SEQ ID NO: 3643 - DNA, 64 bp, Artificial
  oligonucleotide probe
aagccgtgcgcaacgattcgccgtttgcgctgggctgcacggtcccgtgggattcgcgcaaacg

SEQ ID NO: 3644 - DNA, 64 bp, Artificial
  oligonucleotide probe
aagccgtgcgcaacgaccgtcgcaaagcgcacttgcatggcgtggggagcacgggaaagcggct

SEQ ID NO: 3645 - DNA, 64 bp, Artificial
  oligonucleotide probe
ttgcaagcgtccgggattcggggaaacgccgtccgtcgcaaagcgcacgggattcgcgcaaacg

SEQ ID NO: 3646 - DNA, 64 bp, Artificial
  oligonucleotide probe
atggcgcagcacgctgccgtttcggctgggctaacgcgatttgccgcagcaccgcagctgcgtg

SEQ ID NO: 3647 - DNA, 64 bp, Artificial
  oligonucleotide probe
cgcattgcggctttcgatggcgcagcacgctgggctgcacggtcccgtgcacgggaaagcggct

SEQ ID NO: 3648 - DNA, 64 bp, Artificial
  oligonucleotide probe
ttgcaagcgtccgggaccgtttcggctgggctgggattcgcgcaaacggcaccgcagctgcgtg

SEQ ID NO: 3649 - DNA, 64 bp, Artificial
  oligonucleotide probe
ttgcaagcgtccgggaccgtttcggctgggctaacgcgatttgccgcagcacgggaaagcggct

SEQ ID NO: 3650 - DNA, 64 bp, Artificial
  oligonucleotide probe
ggctttgcgcaccgtgccgtttcggctgggctccgtcgcaaagcgcacgggattcgcgcaaacg

SEQ ID NO: 3651 - DNA, 64 bp, Artificial
  oligonucleotide probe
atggcgcagcacgctgttcgccgtttgcgctgccgtcgcaaagcgcacgggattcgcgcaaacg

SEQ ID NO: 3652 - DNA, 64 bp, Artificial
  oligonucleotide probe
cgcattgcggctttcgccgtttcggctgggctttgcatggcgtggggagcacgggaaagcggct

SEQ ID NO: 3653 - DNA, 64 bp, Artificial
  oligonucleotide probe
aagccgtgcgcaacgaggctttgcgcaccgtgttcggggaaacgccgtgcacgggaaagcggct

SEQ ID NO: 3654 - DNA, 64 bp, Artificial
  oligonucleotide probe
ggctttgcgcaccgtgccgtttcggctgggctccgtcgcaaagcgcacttgcatggcgtgggga

SEQ ID NO: 3655 - DNA, 64 bp, Artificial
  oligonucleotide probe
cgcattgcggctttcgatggcgcagcacgctgttcgccgtttgcgctggcacgggaaagcggct

SEQ ID NO: 3656 - DNA, 64 bp, Artificial
  oligonucleotide probe
ttgcaagcgtccgggattcgccgtttgcgctgccgtcgcaaagcgcacgggattcgcgcaaacg

SEQ ID NO: 3657 - DNA, 64 bp, Artificial
  oligonucleotide probe
cgcattgcggctttcgttcggggaaacgccgtccgtttcggctgggctttgcatggcgtgggga

SEQ ID NO: 3658 - DNA, 64 bp, Artificial
  oligonucleotide probe
aagccgtgcgcaacgaggctttgcgcaccgtgttcggggaaacgccgtgcaccgcagctgcgtg

SEQ ID NO: 3659 - DNA, 64 bp, Artificial
  oligonucleotide probe
cgcattgcggctttcgttgcaagcgtccgggaaacgcgatttgccgcattgcatggcgtgggga

SEQ ID NO: 3660 - DNA, 64 bp, Artificial
  oligonucleotide probe
ttgcaagcgtccgggattcgccgtttgcgctgggctgcacggtcccgtgcacgggaaagcggct

SEQ ID NO: 3661 - DNA, 64 bp, Artificial
  oligonucleotide probe
ttgcaagcgtccgggattcggggaaacgccgtccgtttcggctgggctgcacgggaaagcggct

SEQ ID NO: 3662 - DNA, 64 bp, Artificial
  oligonucleotide probe
aacggctgcaagcgcaggctttgcgcaccgtgatggcgcagcacgctggcaccgcagctgcgtg

SEQ ID NO: 3663 - DNA, 64 bp, Artificial
  oligonucleotide probe
aagccgtgcgcaacgattcgccgtttgcgctgttgcatggcgtggggagcaccgcagctgcgtg

SEQ ID NO: 3664 - DNA, 64 bp, Artificial
  oligonucleotide probe
aagccgtgcgcaacgaggctttgcgcaccgtgatggcgcagcacgctggcacgggaaagcggct

SEQ ID NO: 3665 - DNA, 64 bp, Artificial
  oligonucleotide probe
ttgcaagcgtccgggaggctttgcgcaccgtgttcggggaaacgccgtgggattcgcgcaaacg

SEQ ID NO: 3666 - DNA, 64 bp, Artificial
  oligonucleotide probe
aacggctgcaagcgcaggctttgcgcaccgtgttcgccgtttgcgctggggattcgcgcaaacg

SEQ ID NO: 3667 - DNA, 64 bp, Artificial
  oligonucleotide probe
ttcgccgtttgcgctgggctgcacggtcccgtgggattcgcgcaaacggcacgggaaagcggct

SEQ ID NO: 3668 - DNA, 64 bp, Artificial
  oligonucleotide probe
ttgcaagcgtccgggaatggcgcagcacgctgccgtcgcaaagcgcacgcacgggaaagcggct

SEQ ID NO: 3669 - DNA, 64 bp, Artificial
  oligonucleotide probe
cgcattgcggctttcgccgtcgcaaagcgcacttgcatggcgtggggagcaccgcagctgcgtg

SEQ ID NO: 3670 - DNA, 64 bp, Artificial
  oligonucleotide probe
cgcattgcggctttcgggctttgcgcaccgtgggctgcacggtcccgtgggattcgcgcaaacg

SEQ ID NO: 3671 - DNA, 64 bp, Artificial
  oligonucleotide probe
ttcggggaaacgccgtccgtcgcaaagcgcacggctgcacggtcccgtgggattcgcgcaaacg

SEQ ID NO: 3672 - DNA, 64 bp, Artificial
  oligonucleotide probe
ggctttgcgcaccgtgatggcgcagcacgctgggctgcacggtcccgtgggattcgcgcaaacg

SEQ ID NO: 3673 - DNA, 64 bp, Artificial
  oligonucleotide probe
ggctttgcgcaccgtgttcgccgtttgcgctggcaccgcagctgcgtggcacgggaaagcggct

SEQ ID NO: 3674 - DNA, 64 bp, Artificial
  oligonucleotide probe
aacggctgcaagcgcaccgtttcggctgggctccgtcgcaaagcgcacgcacgggaaagcggct

SEQ ID NO: 3675 - DNA, 64 bp, Artificial
  oligonucleotide probe
aacggctgcaagcgcaatggcgcagcacgctgggctgcacggtcccgtttgcatggcgtgggga

SEQ ID NO: 3676 - DNA, 64 bp, Artificial
  oligonucleotide probe
aacggctgcaagcgcattcggggaaacgccgtttcgccgtttgcgctggcacgggaaagcggct

SEQ ID NO: 3677 - DNA, 64 bp, Artificial
  oligonucleotide probe
aagccgtgcgcaacgattcgccgtttgcgctgggctgcacggtcccgtgcaccgcagctgcgtg

SEQ ID NO: 3678 - DNA, 64 bp, Artificial
  oligonucleotide probe
ttgcaagcgtccgggaccgtcgcaaagcgcacggctgcacggtcccgtgcaccgcagctgcgtg

SEQ ID NO: 3679 - DNA, 64 bp, Artificial
  oligonucleotide probe
ttgcaagcgtccgggaaacggctgcaagcgcattcggggaaacgccgtgcaccgcagctgcgtg

SEQ ID NO: 3680 - DNA, 64 bp, Artificial
  oligonucleotide probe
aacggctgcaagcgcaatggcgcagcacgctgccgtcgcaaagcgcacgggattcgcgcaaacg

SEQ ID NO: 3681 - DNA, 64 bp, Artificial
  oligonucleotide probe
aagccgtgcgcaacgaccgtttcggctgggctggctgcacggtcccgtgcacgggaaagcggct

SEQ ID NO: 3682 - DNA, 64 bp, Artificial
  oligonucleotide probe
cgcattgcggctttcgttgcaagcgtccgggaccgtcgcaaagcgcacgcaccgcagctgcgtg

SEQ ID NO: 3683 - DNA, 64 bp, Artificial
  oligonucleotide probe
cgcattgcggctttcgccgtttcggctgggctaacgcgatttgccgcagcaccgcagctgcgtg

SEQ ID NO: 3684 - DNA, 64 bp, Artificial
  oligonucleotide probe
aacggctgcaagcgcaggctttgcgcaccgtgatggcgcagcacgctgttgcatggcgtgggga

SEQ ID NO: 3685 - DNA, 64 bp, Artificial
  oligonucleotide probe
aagccgtgcgcaacgaatggcgcagcacgctggcaccgcagctgcgtggcacgggaaagcggct

SEQ ID NO: 3686 - DNA, 64 bp, Artificial
  oligonucleotide probe
aacggctgcaagcgcaaacgcgatttgccgcaggctgcacggtcccgtgggattcgcgcaaacg

SEQ ID NO: 3687 - DNA, 64 bp, Artificial
  oligonucleotide probe
ttcgccgtttgcgctggggattcgcgcaaacgttgcatggcgtggggagcacgggaaagcggct

SEQ ID NO: 3688 - DNA, 64 bp, Artificial
  oligonucleotide probe
cgcattgcggctttcgaacggctgcaagcgcaggctttgcgcaccgtggcacgggaaagcggct

SEQ ID NO: 3689 - DNA, 64 bp, Artificial
  oligonucleotide probe
ttgcaagcgtccgggaggctttgcgcaccgtgccgtcgcaaagcgcacgcaccgcagctgcgtg

SEQ ID NO: 3690 - DNA, 64 bp, Artificial
  oligonucleotide probe
ccgtttcggctgggctttcgccgtttgcgctgggctgcacggtcccgtgggattcgcgcaaacg

SEQ ID NO: 3691 - DNA, 64 bp, Artificial
  oligonucleotide probe
aacggctgcaagcgcattcggggaaacgccgtccgtcgcaaagcgcacgcaccgcagctgcgtg

SEQ ID NO: 3692 - DNA, 64 bp, Artificial
  oligonucleotide probe
aacggctgcaagcgcaccgtcgcaaagcgcacgcaccgcagctgcgtggcacgggaaagcggct

SEQ ID NO: 3693 - DNA, 64 bp, Artificial
  oligonucleotide probe
cgcattgcggctttcgggctttgcgcaccgtggcaccgcagctgcgtggcacgggaaagcggct

SEQ ID NO: 3694 - DNA, 64 bp, Artificial
  oligonucleotide probe
ttcgccgtttgcgctgggctgcacggtcccgtgcaccgcagctgcgtggcacgggaaagcggct

SEQ ID NO: 3695 - DNA, 64 bp, Artificial
  oligonucleotide probe
ccgtttcggctgggctaacgcgatttgccgcattcgccgtttgcgctgttgcatggcgtgggga

SEQ ID NO: 3696 - DNA, 64 bp, Artificial
  oligonucleotide probe
cgcattgcggctttcgatggcgcagcacgctgccgtcgcaaagcgcacgcaccgcagctgcgtg

SEQ ID NO: 3697 - DNA, 64 bp, Artificial
  oligonucleotide probe
ggctttgcgcaccgtgatggcgcagcacgctgttgcatggcgtggggagcaccgcagctgcgtg

SEQ ID NO: 3698 - DNA, 64 bp, Artificial
  oligonucleotide probe
ttgcaagcgtccgggaccgtcgcaaagcgcacgggattcgcgcaaacggcacgggaaagcggct

SEQ ID NO: 3699 - DNA, 64 bp, Artificial
  oligonucleotide probe
ttgcaagcgtccgggattcggggaaacgccgtaacgcgatttgccgcagcacgggaaagcggct

SEQ ID NO: 3700 - DNA, 64 bp, Artificial
  oligonucleotide probe
aagccgtgcgcaacgattcggggaaacgccgtaacgcgatttgccgcagcaccgcagctgcgtg

SEQ ID NO: 3701 - DNA, 64 bp, Artificial
  oligonucleotide probe
ttgcaagcgtccgggaccgtttcggctgggctaacgcgatttgccgcattgcatggcgtgggga

SEQ ID NO: 3702 - DNA, 64 bp, Artificial
  oligonucleotide probe
cgcattgcggctttcgccgtcgcaaagcgcacgggattcgcgcaaacgttgcatggcgtgggga

SEQ ID NO: 3703 - DNA, 64 bp, Artificial
  oligonucleotide probe
aagccgtgcgcaacgaggctttgcgcaccgtgccgtttcggctgggctgcaccgcagctgcgtg

SEQ ID NO: 3704 - DNA, 64 bp, Artificial
  oligonucleotide probe
aacggctgcaagcgcaggctttgcgcaccgtggggattcgcgcaaacggcaccgcagctgcgtg

SEQ ID NO: 3705 - DNA, 64 bp, Artificial
  oligonucleotide probe
aagccgtgcgcaacgaatggcgcagcacgctggggattcgcgcaaacggcaccgcagctgcgtg

SEQ ID NO: 3706 - DNA, 64 bp, Artificial
  oligonucleotide probe
aagccgtgcgcaacgaccgtttcggctgggctccgtcgcaaagcgcacgcacgggaaagcggct

SEQ ID NO: 3707 - DNA, 64 bp, Artificial
  oligonucleotide probe
aacggctgcaagcgcattcggggaaacgccgtttcgccgtttgcgctggcaccgcagctgcgtg

SEQ ID NO: 3708 - DNA, 64 bp, Artificial
  oligonucleotide probe
aacgcgatttgccgcaccgtcgcaaagcgcacggctgcacggtcccgtgggattcgcgcaaacg

SEQ ID NO: 3709 - DNA, 64 bp, Artificial
  oligonucleotide probe
aacggctgcaagcgcaggctttgcgcaccgtgaacgcgatttgccgcagcacgggaaagcggct

SEQ ID NO: 3710 - DNA, 64 bp, Artificial
  oligonucleotide probe
aacggctgcaagcgcaatggcgcagcacgctgaacgcgatttgccgcattgcatggcgtgggga

SEQ ID NO: 3711 - DNA, 64 bp, Artificial
  oligonucleotide probe
aagccgtgcgcaacgaggctgcacggtcccgtgcaccgcagctgcgtggcacgggaaagcggct

SEQ ID NO: 3712 - DNA, 64 bp, Artificial
  oligonucleotide probe
ttgcaagcgtccgggaggctttgcgcaccgtgttgcatggcgtggggagcaccgcagctgcgtg

SEQ ID NO: 3713 - DNA, 64 bp, Artificial
  oligonucleotide probe
aacggctgcaagcgcaccgtttcggctgggctaacgcgatttgccgcattgcatggcgtgggga

SEQ ID NO: 3714 - DNA, 64 bp, Artificial
  oligonucleotide probe
ggctttgcgcaccgtgttcgccgtttgcgctgggctgcacggtcccgtgggattcgcgcaaacg

SEQ ID NO: 3715 - DNA, 64 bp, Artificial
  oligonucleotide probe
aagccgtgcgcaacgaggctttgcgcaccgtgccgtttcggctgggctgcacgggaaagcggct

SEQ ID NO: 3716 - DNA, 64 bp, Artificial
  oligonucleotide probe
ttgcaagcgtccgggaggctgcacggtcccgtttgcatggcgtggggagcaccgcagctgcgtg

SEQ ID NO: 3717 - DNA, 64 bp, Artificial
  oligonucleotide probe
aagccgtgcgcaacgacgcattgcggctttcgggctttgcgcaccgtggcaccgcagctgcgtg

SEQ ID NO: 3718 - DNA, 64 bp, Artificial
  oligonucleotide probe
ttcggggaaacgccgtaacgcgatttgccgcagggattcgcgcaaacggcacgggaaagcggct

SEQ ID NO: 3719 - DNA, 64 bp, Artificial
  oligonucleotide probe
aagccgtgcgcaacgaatggcgcagcacgctgccgtttcggctgggctgggattcgcgcaaacg

SEQ ID NO: 3720 - DNA, 64 bp, Artificial
  oligonucleotide probe
cgcattgcggctttcgggctttgcgcaccgtgccgtcgcaaagcgcacgcaccgcagctgcgtg

SEQ ID NO: 3721 - DNA, 64 bp, Artificial
  oligonucleotide probe
aagccgtgcgcaacgaatggcgcagcacgctgttcgccgtttgcgctggggattcgcgcaaacg

SEQ ID NO: 3722 - DNA, 64 bp, Artificial
  oligonucleotide probe
ttgcaagcgtccgggaatggcgcagcacgctggcaccgcagctgcgtggcacgggaaagcggct

SEQ ID NO: 3723 - DNA, 64 bp, Artificial
  oligonucleotide probe
aagccgtgcgcaacgaatggcgcagcacgctgccgtcgcaaagcgcacttgcatggcgtgggga

SEQ ID NO: 3724 - DNA, 64 bp, Artificial
  oligonucleotide probe
ggctttgcgcaccgtgatggcgcagcacgctgttcgccgtttgcgctggcaccgcagctgcgtg

SEQ ID NO: 3725 - DNA, 64 bp, Artificial
  oligonucleotide probe
aagccgtgcgcaacgaggctttgcgcaccgtgaacgcgatttgccgcattgcatggcgtgggga

SEQ ID NO: 3726 - DNA, 64 bp, Artificial
  oligonucleotide probe
ttcgccgtttgcgctgccgtcgcaaagcgcacttgcatggcgtggggagcacgggaaagcggct

SEQ ID NO: 3727 - DNA, 64 bp, Artificial
  oligonucleotide probe
ggctttgcgcaccgtgttcggggaaacgccgtccgtcgcaaagcgcacgcaccgcagctgcgtg

SEQ ID NO: 3728 - DNA, 64 bp, Artificial
  oligonucleotide probe
aagccgtgcgcaacgacgcattgcggctttcgttcgccgtttgcgctggggattcgcgcaaacg

SEQ ID NO: 3729 - DNA, 64 bp, Artificial
  oligonucleotide probe
aagccgtgcgcaacgaaacggctgcaagcgcaccgtttcggctgggctgcacgggaaagcggct

SEQ ID NO: 3730 - DNA, 64 bp, Artificial
  oligonucleotide probe
ttgcaagcgtccgggattcggggaaacgccgtggctgcacggtcccgtttgcatggcgtgggga

SEQ ID NO: 3731 - DNA, 64 bp, Artificial
  oligonucleotide probe
aacggctgcaagcgcaaacgcgatttgccgcagcaccgcagctgcgtggcacgggaaagcggct

SEQ ID NO: 3732 - DNA, 64 bp, Artificial
  oligonucleotide probe
ttgcaagcgtccgggattcggggaaacgccgtgggattcgcgcaaacggcacgggaaagcggct

SEQ ID NO: 3733 - DNA, 64 bp, Artificial
  oligonucleotide probe
ggctttgcgcaccgtgaacgcgatttgccgcattcgccgtttgcgctggcaccgcagctgcgtg

SEQ ID NO: 3734 - DNA, 64 bp, Artificial
  oligonucleotide probe
aagccgtgcgcaacgacgcattgcggctttcgttcgccgtttgcgctggcaccgcagctgcgtg

SEQ ID NO: 3735 - DNA, 64 bp, Artificial
  oligonucleotide probe
atggcgcagcacgctgaacgcgatttgccgcaggctgcacggtcccgtgggattcgcgcaaacg

SEQ ID NO: 3736 - DNA, 64 bp, Artificial
  oligonucleotide probe
cgcattgcggctttcgaacggctgcaagcgcaatggcgcagcacgctgttgcatggcgtgggga

SEQ ID NO: 3737 - DNA, 64 bp, Artificial
  oligonucleotide probe
cgcattgcggctttcgatggcgcagcacgctgttcggggaaacgccgtgcacgggaaagcggct

SEQ ID NO: 3738 - DNA, 64 bp, Artificial
  oligonucleotide probe
cgcattgcggctttcgccgtttcggctgggctttcgccgtttgcgctggcaccgcagctgcgtg

SEQ ID NO: 3739 - DNA, 64 bp, Artificial
  oligonucleotide probe
aagccgtgcgcaacgattcggggaaacgccgtttcgccgtttgcgctggcaccgcagctgcgtg

SEQ ID NO: 3740 - DNA, 64 bp, Artificial
  oligonucleotide probe
atggcgcagcacgctgttcgccgtttgcgctggggattcgcgcaaacggcacgggaaagcggct

SEQ ID NO: 3741 - DNA, 64 bp, Artificial
  oligonucleotide probe
ttgcaagcgtccgggaggctttgcgcaccgtgttcgccgtttgcgctggggattcgcgcaaacg

SEQ ID NO: 3742 - DNA, 64 bp, Artificial
  oligonucleotide probe
aagccgtgcgcaacgacgcattgcggctttcgccgtcgcaaagcgcacgcacgggaaagcggct

SEQ ID NO: 3743 - DNA, 64 bp, Artificial
  oligonucleotide probe
aagccgtgcgcaacgaaacgcgatttgccgcaccgtcgcaaagcgcacgcacgggaaagcggct

SEQ ID NO: 3744 - DNA, 64 bp, Artificial
  oligonucleotide probe
ttcggggaaacgccgtccgtttcggctgggctaacgcgatttgccgcagggattcgcgcaaacg

SEQ ID NO: 3745 - DNA, 64 bp, Artificial
  oligonucleotide probe
ggctttgcgcaccgtgatggcgcagcacgctgttcggggaaacgccgtttgcatggcgtgggga

SEQ ID NO: 3746 - DNA, 64 bp, Artificial
  oligonucleotide probe
atggcgcagcacgctgttcgccgtttgcgctgccgtcgcaaagcgcacgcaccgcagctgcgtg

SEQ ID NO: 3747 - DNA, 64 bp, Artificial
  oligonucleotide probe
cgcattgcggctttcgatggcgcagcacgctgaacgcgatttgccgcagcacgggaaagcggct

SEQ ID NO: 3748 - DNA, 64 bp, Artificial
  oligonucleotide probe
aagccgtgcgcaacgattcgccgtttgcgctgccgtcgcaaagcgcacttgcatggcgtgggga

SEQ ID NO: 3749 - DNA, 64 bp, Artificial
  oligonucleotide probe
cgcattgcggctttcgaacgcgatttgccgcattgcatggcgtggggagcacgggaaagcggct

SEQ ID NO: 3750 - DNA, 64 bp, Artificial
  oligonucleotide probe
aacggctgcaagcgcattcggggaaacgccgtaacgcgatttgccgcagggattcgcgcaaacg

SEQ ID NO: 3751 - DNA, 64 bp, Artificial
  oligonucleotide probe
aacggctgcaagcgcaggctttgcgcaccgtggggattcgcgcaaacggcacgggaaagcggct

SEQ ID NO: 3752 - DNA, 64 bp, Artificial
  oligonucleotide probe
aacgcgatttgccgcaccgtcgcaaagcgcacgggattcgcgcaaacggcaccgcagctgcgtg

SEQ ID NO: 3753 - DNA, 64 bp, Artificial
  oligonucleotide probe
cgcattgcggctttcgccgtttcggctgggctggctgcacggtcccgtgcacgggaaagcggct

SEQ ID NO: 3754 - DNA, 64 bp, Artificial
  oligonucleotide probe
cgcattgcggctttcgaacgcgatttgccgcagggattcgcgcaaacggcaccgcagctgcgtg

SEQ ID NO: 3755 - DNA, 64 bp, Artificial
  oligonucleotide probe
aacggctgcaagcgcattcggggaaacgccgtggctgcacggtcccgtttgcatggcgtgggga

SEQ ID NO: 3756 - DNA, 64 bp, Artificial
  oligonucleotide probe
ccgtttcggctgggctttcgccgtttgcgctgccgtcgcaaagcgcacgggattcgcgcaaacg

SEQ ID NO: 3757 - DNA, 64 bp, Artificial
  oligonucleotide probe
ttgcaagcgtccgggaccgtcgcaaagcgcacgcaccgcagctgcgtggcacgggaaagcggct

SEQ ID NO: 3758 - DNA, 64 bp, Artificial
  oligonucleotide probe
ggctttgcgcaccgtgaacgcgatttgccgcagggattcgcgcaaacggcaccgcagctgcgtg

SEQ ID NO: 3759 - DNA, 64 bp, Artificial
  oligonucleotide probe
atggcgcagcacgctgccgtttcggctgggctaacgcgatttgccgcagggattcgcgcaaacg

SEQ ID NO: 3760 - DNA, 64 bp, Artificial
  oligonucleotide probe
aagccgtgcgcaacgaaacggctgcaagcgcaggctttgcgcaccgtggcaccgcagctgcgtg

SEQ ID NO: 3761 - DNA, 64 bp, Artificial
  oligonucleotide probe
ttgcaagcgtccgggaaacgcgatttgccgcaggctgcacggtcccgtgggattcgcgcaaacg

SEQ ID NO: 3762 - DNA, 64 bp, Artificial
  oligonucleotide probe
cgcattgcggctttcgttcgccgtttgcgctggggattcgcgcaaacggcacgggaaagcggct

SEQ ID NO: 3763 - DNA, 64 bp, Artificial
  oligonucleotide probe
cgcattgcggctttcgaacggctgcaagcgcaaacgcgatttgccgcattgcatggcgtgggga

SEQ ID NO: 3764 - DNA, 64 bp, Artificial
  oligonucleotide probe
aagccgtgcgcaacgattcggggaaacgccgtgggattcgcgcaaacgttgcatggcgtgggga

SEQ ID NO: 3765 - DNA, 64 bp, Artificial
  oligonucleotide probe
atggcgcagcacgctgaacgcgatttgccgcattcgccgtttgcgctgttgcatggcgtgggga

SEQ ID NO: 3766 - DNA, 64 bp, Artificial
  oligonucleotide probe
ttgcaagcgtccgggaatggcgcagcacgctgccgtttcggctgggctgcacgggaaagcggct

SEQ ID NO: 3767 - DNA, 64 bp, Artificial
  oligonucleotide probe
aacggctgcaagcgcattcgccgtttgcgctggggattcgcgcaaacggcacgggaaagcggct

SEQ ID NO: 3768 - DNA, 64 bp, Artificial
  oligonucleotide probe
cgcattgcggctttcgaacgcgatttgccgcagggattcgcgcaaacgttgcatggcgtgggga

SEQ ID NO: 3769 - DNA, 64 bp, Artificial
  oligonucleotide probe
ggctttgcgcaccgtgatggcgcagcacgctgaacgcgatttgccgcagggattcgcgcaaacg

SEQ ID NO: 3770 - DNA, 64 bp, Artificial
  oligonucleotide probe
cgcattgcggctttcgatggcgcagcacgctgggctgcacggtcccgtttgcatggcgtgggga

SEQ ID NO: 3771 - DNA, 64 bp, Artificial
  oligonucleotide probe
aagccgtgcgcaacgattcggggaaacgccgtttcgccgtttgcgctgttgcatggcgtgggga

SEQ ID NO: 3772 - DNA, 64 bp, Artificial
  oligonucleotide probe
ttgcaagcgtccgggaaacggctgcaagcgcaggctgcacggtcccgtgggattcgcgcaaacg

SEQ ID NO: 3773 - DNA, 64 bp, Artificial
  oligonucleotide probe
ttcggggaaacgccgtttcgccgtttgcgctggggattcgcgcaaacggcaccgcagctgcgtg

SEQ ID NO: 3774 - DNA, 64 bp, Artificial
  oligonucleotide probe
ggctttgcgcaccgtgccgtcgcaaagcgcacttgcatggcgtggggagcaccgcagctgcgtg

SEQ ID NO: 3775 - DNA, 64 bp, Artificial
  oligonucleotide probe
cgcattgcggctttcgaacgcgatttgccgcaggctgcacggtcccgtttgcatggcgtgggga

SEQ ID NO: 3776 - DNA, 64 bp, Artificial
  oligonucleotide probe
cgcattgcggctttcgggctttgcgcaccgtgttcggggaaacgccgtttgcatggcgtgggga

SEQ ID NO: 3777 - DNA, 64 bp, Artificial
  oligonucleotide probe
ttcgccgtttgcgctgccgtcgcaaagcgcacggctgcacggtcccgtgcaccgcagctgcgtg

SEQ ID NO: 3778 - DNA, 64 bp, Artificial
  oligonucleotide probe
cgcattgcggctttcgaacggctgcaagcgcaatggcgcagcacgctggcaccgcagctgcgtg

SEQ ID NO: 3779 - DNA, 64 bp, Artificial
  oligonucleotide probe
aagccgtgcgcaacgattgcaagcgtccgggattcggggaaacgccgtgcacgggaaagcggct

SEQ ID NO: 3780 - DNA, 64 bp, Artificial
  oligonucleotide probe
ttcggggaaacgccgtaacgcgatttgccgcaccgtcgcaaagcgcacgcaccgcagctgcgtg

SEQ ID NO: 3781 - DNA, 64 bp, Artificial
  oligonucleotide probe
cgcattgcggctttcgccgtcgcaaagcgcacgggattcgcgcaaacggcacgggaaagcggct

SEQ ID NO: 3782 - DNA, 64 bp, Artificial
  oligonucleotide probe
cgcattgcggctttcgggctttgcgcaccgtgccgtttcggctgggctgggattcgcgcaaacg

SEQ ID NO: 3783 - DNA, 64 bp, Artificial
  oligonucleotide probe
atggcgcagcacgctgccgtttcggctgggctggctgcacggtcccgtttgcatggcgtgggga

SEQ ID NO: 3784 - DNA, 64 bp, Artificial
  oligonucleotide probe
aagccgtgcgcaacgacgcattgcggctttcgaacggctgcaagcgcagcaccgcagctgcgtg

SEQ ID NO: 3785 - DNA, 64 bp, Artificial
  oligonucleotide probe
aacggctgcaagcgcaatggcgcagcacgctgttcgccgtttgcgctggggattcgcgcaaacg

SEQ ID NO: 3786 - DNA, 64 bp, Artificial
  oligonucleotide probe
aagccgtgcgcaacgagggattcgcgcaaacggcaccgcagctgcgtggcacgggaaagcggct

SEQ ID NO: 3787 - DNA, 64 bp, Artificial
  oligonucleotide probe
aagccgtgcgcaacgattgcaagcgtccgggaaacgcgatttgccgcattgcatggcgtgggga

SEQ ID NO: 3788 - DNA, 64 bp, Artificial
  oligonucleotide probe
ttgcaagcgtccgggattcgccgtttgcgctggggattcgcgcaaacggcaccgcagctgcgtg

SEQ ID NO: 3789 - DNA, 64 bp, Artificial
  oligonucleotide probe
aagccgtgcgcaacgaccgtttcggctgggctaacgcgatttgccgcagcaccgcagctgcgtg

SEQ ID NO: 3790 - DNA, 64 bp, Artificial
  oligonucleotide probe
aacgcgatttgccgcaccgtcgcaaagcgcacggctgcacggtcccgtgcaccgcagctgcgtg

SEQ ID NO: 3791 - DNA, 64 bp, Artificial
  oligonucleotide probe
aagccgtgcgcaacgaaacggctgcaagcgcaatggcgcagcacgctgttgcatggcgtgggga

SEQ ID NO: 3792 - DNA, 64 bp, Artificial
  oligonucleotide probe
ggctttgcgcaccgtgccgtcgcaaagcgcacggctgcacggtcccgtttgcatggcgtgggga

SEQ ID NO: 3793 - DNA, 64 bp, Artificial
  oligonucleotide probe
aagccgtgcgcaacgacgcattgcggctttcgatggcgcagcacgctggcaccgcagctgcgtg

SEQ ID NO: 3794 - DNA, 64 bp, Artificial
  oligonucleotide probe
aacggctgcaagcgcaccgtttcggctgggctggctgcacggtcccgtgcaccgcagctgcgtg

SEQ ID NO: 3795 - DNA, 64 bp, Artificial
  oligonucleotide probe
cgcattgcggctttcgccgtcgcaaagcgcacggctgcacggtcccgtgcaccgcagctgcgtg

SEQ ID NO: 3796 - DNA, 64 bp, Artificial
  oligonucleotide probe
ttgcaagcgtccgggaaacggctgcaagcgcaaacgcgatttgccgcattgcatggcgtgggga

SEQ ID NO: 3797 - DNA, 64 bp, Artificial
  oligonucleotide probe
cgcattgcggctttcgggctttgcgcaccgtgttcggggaaacgccgtgcacgggaaagcggct

SEQ ID NO: 3798 - DNA, 64 bp, Artificial
  oligonucleotide probe
aacggctgcaagcgcattcggggaaacgccgtccgtcgcaaagcgcacgcacgggaaagcggct

SEQ ID NO: 3799 - DNA, 64 bp, Artificial
  oligonucleotide probe
aagccgtgcgcaacgaggctttgcgcaccgtgccgtcgcaaagcgcacttgcatggcgtgggga

SEQ ID NO: 3800 - DNA, 64 bp, Artificial
  oligonucleotide probe
ttgcaagcgtccgggattgcatggcgtggggagcaccgcagctgcgtggcacgggaaagcggct

SEQ ID NO: 3801 - DNA, 64 bp, Artificial
  oligonucleotide probe
ttcggggaaacgccgtggctgcacggtcccgtttgcatggcgtggggagcacgggaaagcggct

SEQ ID NO: 3802 - DNA, 64 bp, Artificial
  oligonucleotide probe
aagccgtgcgcaacgaaacggctgcaagcgcaggctgcacggtcccgtgcaccgcagctgcgtg

SEQ ID NO: 3803 - DNA, 64 bp, Artificial
  oligonucleotide probe
ccgtttcggctgggctaacgcgatttgccgcattcgccgtttgcgctggggattcgcgcaaacg

SEQ ID NO: 3804 - DNA, 64 bp, Artificial
  oligonucleotide probe
aagccgtgcgcaacgattgcaagcgtccgggattcggggaaacgccgtttgcatggcgtgggga

SEQ ID NO: 3805 - DNA, 64 bp, Artificial
  oligonucleotide probe
ttgcaagcgtccgggaaacgcgatttgccgcaggctgcacggtcccgtttgcatggcgtgggga

SEQ ID NO: 3806 - DNA, 64 bp, Artificial
  oligonucleotide probe
aagccgtgcgcaacgaatggcgcagcacgctgggctgcacggtcccgtgggattcgcgcaaacg

SEQ ID NO: 3807 - DNA, 64 bp, Artificial
  oligonucleotide probe
ttgcaagcgtccgggattcggggaaacgccgtccgtttcggctgggctgggattcgcgcaaacg

SEQ ID NO: 3808 - DNA, 64 bp, Artificial
  oligonucleotide probe
atggcgcagcacgctgttcggggaaacgccgtgggattcgcgcaaacggcaccgcagctgcgtg

SEQ ID NO: 3809 - DNA, 64 bp, Artificial
  oligonucleotide probe
ttgcaagcgtccgggaatggcgcagcacgctggggattcgcgcaaacggcaccgcagctgcgtg

SEQ ID NO: 3810 - DNA, 64 bp, Artificial
  oligonucleotide probe
ttgcaagcgtccgggattcggggaaacgccgtttcgccgtttgcgctggcacgggaaagcggct

SEQ ID NO: 3811 - DNA, 64 bp, Artificial
  oligonucleotide probe
cgcattgcggctttcgaacggctgcaagcgcattcggggaaacgccgtgcacgggaaagcggct

SEQ ID NO: 3812 - DNA, 64 bp, Artificial
  oligonucleotide probe
aacggctgcaagcgcaaacgcgatttgccgcaccgtcgcaaagcgcacttgcatggcgtgggga

SEQ ID NO: 3813 - DNA, 64 bp, Artificial
  oligonucleotide probe
ttgcaagcgtccgggaggctgcacggtcccgtgcaccgcagctgcgtggcacgggaaagcggct

SEQ ID NO: 3814 - DNA, 64 bp, Artificial
  oligonucleotide probe
cgcattgcggctttcgaacgcgatttgccgcaggctgcacggtcccgtgcaccgcagctgcgtg

SEQ ID NO: 3815 - DNA, 64 bp, Artificial
  oligonucleotide probe
aagccgtgcgcaacgacgcattgcggctttcggcaccgcagctgcgtggcacgggaaagcggct

SEQ ID NO: 3816 - DNA, 64 bp, Artificial
  oligonucleotide probe
cgcattgcggctttcgttcggggaaacgccgtccgtttcggctgggctgggattcgcgcaaacg

SEQ ID NO: 3817 - DNA, 64 bp, Artificial
  oligonucleotide probe
ttgcaagcgtccgggaatggcgcagcacgctgaacgcgatttgccgcagcaccgcagctgcgtg

SEQ ID NO: 3818 - DNA, 64 bp, Artificial
  oligonucleotide probe
atggcgcagcacgctggggattcgcgcaaacgttgcatggcgtggggagcaccgcagctgcgtg

SEQ ID NO: 3819 - DNA, 64 bp, Artificial
  oligonucleotide probe
aagccgtgcgcaacgaggctttgcgcaccgtgttcgccgtttgcgctgttgcatggcgtgggga

SEQ ID NO: 3820 - DNA, 64 bp, Artificial
  oligonucleotide probe
cgcattgcggctttcgttcggggaaacgccgtccgtttcggctgggctgcacgggaaagcggct

SEQ ID NO: 3821 - DNA, 64 bp, Artificial
  oligonucleotide probe
aacgcgatttgccgcaccgtcgcaaagcgcacgggattcgcgcaaacgttgcatggcgtgggga

SEQ ID NO: 3822 - DNA, 64 bp, Artificial
  oligonucleotide probe
aagccgtgcgcaacgaaacgcgatttgccgcaccgtcgcaaagcgcacgcaccgcagctgcgtg

SEQ ID NO: 3823 - DNA, 64 bp, Artificial
  oligonucleotide probe
ggctttgcgcaccgtgttcggggaaacgccgtggctgcacggtcccgtgcaccgcagctgcgtg

SEQ ID NO: 3824 - DNA, 64 bp, Artificial
  oligonucleotide probe
atggcgcagcacgctgttcggggaaacgccgtttcgccgtttgcgctgttgcatggcgtgggga

SEQ ID NO: 3825 - DNA, 64 bp, Artificial
  oligonucleotide probe
ccgtcgcaaagcgcacggctgcacggtcccgtgggattcgcgcaaacgttgcatggcgtgggga

SEQ ID NO: 3826 - DNA, 64 bp, Artificial
  oligonucleotide probe
ttcggggaaacgccgtccgtttcggctgggctgcaccgcagctgcgtggcacgggaaagcggct

SEQ ID NO: 3827 - DNA, 64 bp, Artificial
  oligonucleotide probe
cgcattgcggctttcgttgcatggcgtggggagcaccgcagctgcgtggcacgggaaagcggct

SEQ ID NO: 3828 - DNA, 64 bp, Artificial
  oligonucleotide probe
aagccgtgcgcaacgattcgccgtttgcgctgccgtcgcaaagcgcacgcaccgcagctgcgtg

SEQ ID NO: 3829 - DNA, 64 bp, Artificial
  oligonucleotide probe
cgcattgcggctttcggggattcgcgcaaacggcaccgcagctgcgtggcacgggaaagcggct

SEQ ID NO: 3830 - DNA, 64 bp, Artificial
  oligonucleotide probe
aagccgtgcgcaacgaaacggctgcaagcgcaggctgcacggtcccgtttgcatggcgtgggga

SEQ ID NO: 3831 - DNA, 64 bp, Artificial
  oligonucleotide probe
ttgcaagcgtccgggaaacggctgcaagcgcaccgtcgcaaagcgcacgggattcgcgcaaacg

SEQ ID NO: 3832 - DNA, 64 bp, Artificial
  oligonucleotide probe
ggctttgcgcaccgtgttcgccgtttgcgctgccgtcgcaaagcgcacgcaccgcagctgcgtg

SEQ ID NO: 3833 - DNA, 64 bp, Artificial
  oligonucleotide probe
aacggctgcaagcgcaggctttgcgcaccgtgttcggggaaacgccgtgcacgggaaagcggct

SEQ ID NO: 3834 - DNA, 64 bp, Artificial
  oligonucleotide probe
ccgtttcggctgggctccgtcgcaaagcgcacgggattcgcgcaaacggcacgggaaagcggct

SEQ ID NO: 3835 - DNA, 64 bp, Artificial
  oligonucleotide probe
atggcgcagcacgctgccgtcgcaaagcgcacggctgcacggtcccgtgggattcgcgcaaacg

SEQ ID NO: 3836 - DNA, 64 bp, Artificial
  oligonucleotide probe
aagccgtgcgcaacgacgcattgcggctttcgccgtttcggctgggctttgcatggcgtgggga

SEQ ID NO: 3837 - DNA, 64 bp, Artificial
  oligonucleotide probe
cgcattgcggctttcgttgcaagcgtccgggaggctgcacggtcccgtgcaccgcagctgcgtg

SEQ ID NO: 3838 - DNA, 64 bp, Artificial
  oligonucleotide probe
cgcattgcggctttcgatggcgcagcacgctgttgcatggcgtggggagcaccgcagctgcgtg

SEQ ID NO: 3839 - DNA, 64 bp, Artificial
  oligonucleotide probe
cgcattgcggctttcgggctttgcgcaccgtgggctgcacggtcccgtttgcatggcgtgggga

SEQ ID NO: 3840 - DNA, 64 bp, Artificial
  oligonucleotide probe
ccgtttcggctgggctaacgcgatttgccgcaccgtcgcaaagcgcacgcacgggaaagcggct

SEQ ID NO: 3841 - DNA, 64 bp, Artificial
  oligonucleotide probe
atggcgcagcacgctgttcggggaaacgccgtggctgcacggtcccgtgggattcgcgcaaacg

SEQ ID NO: 3842 - DNA, 64 bp, Artificial
  oligonucleotide probe
ttgcaagcgtccgggaggctttgcgcaccgtgccgtttcggctgggctgcaccgcagctgcgtg

SEQ ID NO: 3843 - DNA, 64 bp, Artificial
  oligonucleotide probe
cgcattgcggctttcgggctttgcgcaccgtgttcggggaaacgccgtgggattcgcgcaaacg

SEQ ID NO: 3844 - DNA, 64 bp, Artificial
  oligonucleotide probe
ccgtttcggctgggctaacgcgatttgccgcaggctgcacggtcccgtgggattcgcgcaaacg

SEQ ID NO: 3845 - DNA, 64 bp, Artificial
  oligonucleotide probe
ttgcaagcgtccgggaaacggctgcaagcgcaatggcgcagcacgctggggattcgcgcaaacg

SEQ ID NO: 3846 - DNA, 64 bp, Artificial
  oligonucleotide probe
aagccgtgcgcaacgacgcattgcggctttcgttgcaagcgtccgggattgcatggcgtgggga

SEQ ID NO: 3847 - DNA, 64 bp, Artificial
  oligonucleotide probe
aagccgtgcgcaacgattcggggaaacgccgtggctgcacggtcccgtgcaccgcagctgcgtg

SEQ ID NO: 3848 - DNA, 64 bp, Artificial
  oligonucleotide probe
aacggctgcaagcgcaatggcgcagcacgctgaacgcgatttgccgcagcacgggaaagcggct

SEQ ID NO: 3849 - DNA, 64 bp, Artificial
  oligonucleotide probe
aacggctgcaagcgcattcggggaaacgccgtttcgccgtttgcgctgttgcatggcgtgggga

SEQ ID NO: 3850 - DNA, 64 bp, Artificial
  oligonucleotide probe
ttgcaagcgtccgggaggctttgcgcaccgtgaacgcgatttgccgcagcacgggaaagcggct

SEQ ID NO: 3851 - DNA, 64 bp, Artificial
  oligonucleotide probe
ttgcaagcgtccgggaatggcgcagcacgctgccgtcgcaaagcgcacgggattcgcgcaaacg

SEQ ID NO: 3852 - DNA, 64 bp, Artificial
  oligonucleotide probe
aagccgtgcgcaacgattgcaagcgtccgggattcgccgtttgcgctggcaccgcagctgcgtg

SEQ ID NO: 3853 - DNA, 64 bp, Artificial
  oligonucleotide probe
aagccgtgcgcaacgattgcaagcgtccgggaccgtcgcaaagcgcacgcaccgcagctgcgtg

SEQ ID NO: 3854 - DNA, 64 bp, Artificial
  oligonucleotide probe
ggctttgcgcaccgtgccgtcgcaaagcgcacggctgcacggtcccgtgggattcgcgcaaacg

SEQ ID NO: 3855 - DNA, 64 bp, Artificial
  oligonucleotide probe
ttgcaagcgtccgggaatggcgcagcacgctgccgtttcggctgggctgcaccgcagctgcgtg

SEQ ID NO: 3856 - DNA, 64 bp, Artificial
  oligonucleotide probe
aagccgtgcgcaacgaggctttgcgcaccgtgatggcgcagcacgctgttgcatggcgtgggga

SEQ ID NO: 3857 - DNA, 64 bp, Artificial
  oligonucleotide probe
cgcattgcggctttcgggctttgcgcaccgtgttcggggaaacgccgtgcaccgcagctgcgtg

SEQ ID NO: 3858 - DNA, 64 bp, Artificial
  oligonucleotide probe
aacgcgatttgccgcaggctgcacggtcccgtttgcatggcgtggggagcaccgcagctgcgtg

SEQ ID NO: 3859 - DNA, 64 bp, Artificial
  oligonucleotide probe
ggctttgcgcaccgtgttcggggaaacgccgtaacgcgatttgccgcagcacgggaaagcggct

SEQ ID NO: 3860 - DNA, 64 bp, Artificial
  oligonucleotide probe
aagccgtgcgcaacgattgcaagcgtccgggaaacgcgatttgccgcagggattcgcgcaaacg

SEQ ID NO: 3861 - DNA, 64 bp, Artificial
  oligonucleotide probe
atggcgcagcacgctgggctgcacggtcccgtgcaccgcagctgcgtggcacgggaaagcggct

SEQ ID NO: 3862 - DNA, 64 bp, Artificial
  oligonucleotide probe
ggctttgcgcaccgtgatggcgcagcacgctggggattcgcgcaaacgttgcatggcgtgggga

SEQ ID NO: 3863 - DNA, 64 bp, Artificial
  oligonucleotide probe
ggctttgcgcaccgtgccgtttcggctgggctggctgcacggtcccgtttgcatggcgtgggga

SEQ ID NO: 3864 - DNA, 64 bp, Artificial
  oligonucleotide probe
aacggctgcaagcgcaatggcgcagcacgctgaacgcgatttgccgcagggattcgcgcaaacg

SEQ ID NO: 3865 - DNA, 64 bp, Artificial
  oligonucleotide probe
ccgtttcggctgggctttcgccgtttgcgctggggattcgcgcaaacgttgcatggcgtgggga

SEQ ID NO: 3866 - DNA, 64 bp, Artificial
  oligonucleotide probe
aacggctgcaagcgcaatggcgcagcacgctgccgtttcggctgggctgcaccgcagctgcgtg

SEQ ID NO: 3867 - DNA, 64 bp, Artificial
  oligonucleotide probe
ttgcaagcgtccgggaaacggctgcaagcgcaaacgcgatttgccgcagcaccgcagctgcgtg

SEQ ID NO: 3868 - DNA, 64 bp, Artificial
  oligonucleotide probe
cgcattgcggctttcgccgtttcggctgggctttcgccgtttgcgctggggattcgcgcaaacg

SEQ ID NO: 3869 - DNA, 64 bp, Artificial
  oligonucleotide probe
ttgcaagcgtccgggaccgtttcggctgggctaacgcgatttgccgcagggattcgcgcaaacg

SEQ ID NO: 3870 - DNA, 64 bp, Artificial
  oligonucleotide probe
ggctttgcgcaccgtgatggcgcagcacgctggggattcgcgcaaacggcacgggaaagcggct

SEQ ID NO: 3871 - DNA, 64 bp, Artificial
  oligonucleotide probe
aagccgtgcgcaacgaggctttgcgcaccgtgatggcgcagcacgctggggattcgcgcaaacg

SEQ ID NO: 3872 - DNA, 64 bp, Artificial
  oligonucleotide probe
aagccgtgcgcaacgaaacggctgcaagcgcattcggggaaacgccgtgcacgggaaagcggct

SEQ ID NO: 3873 - DNA, 64 bp, Artificial
  oligonucleotide probe
ggctttgcgcaccgtgatggcgcagcacgctgggctgcacggtcccgtgcacgggaaagcggct

SEQ ID NO: 3874 - DNA, 64 bp, Artificial
  oligonucleotide probe
ttgcaagcgtccgggaccgtttcggctgggctccgtcgcaaagcgcacgcaccgcagctgcgtg

SEQ ID NO: 3875 - DNA, 64 bp, Artificial
  oligonucleotide probe
aacggctgcaagcgcaccgtcgcaaagcgcacggctgcacggtcccgtttgcatggcgtgggga

SEQ ID NO: 3876 - DNA, 64 bp, Artificial
  oligonucleotide probe
cgcattgcggctttcgggctttgcgcaccgtgccgtcgcaaagcgcacttgcatggcgtgggga

SEQ ID NO: 3877 - DNA, 64 bp, Artificial
  oligonucleotide probe
cgcattgcggctttcgttcggggaaacgccgtggctgcacggtcccgtgcaccgcagctgcgtg

SEQ ID NO: 3878 - DNA, 64 bp, Artificial
  oligonucleotide probe
cgcattgcggctttcgttgcaagcgtccgggaggctgcacggtcccgtttgcatggcgtgggga

SEQ ID NO: 3879 - DNA, 64 bp, Artificial
  oligonucleotide probe
aacgcgatttgccgcagggattcgcgcaaacgttgcatggcgtggggagcaccgcagctgcgtg

SEQ ID NO: 3880 - DNA, 64 bp, Artificial
  oligonucleotide probe
aacggctgcaagcgcaggctgcacggtcccgtgggattcgcgcaaacgttgcatggcgtgggga

SEQ ID NO: 3881 - DNA, 64 bp, Artificial
  oligonucleotide probe
ccgtttcggctgggctggctgcacggtcccgtttgcatggcgtggggagcacgggaaagcggct

SEQ ID NO: 3882 - DNA, 64 bp, Artificial
  oligonucleotide probe
ggctttgcgcaccgtgttcggggaaacgccgtttcgccgtttgcgctggcacgggaaagcggct

SEQ ID NO: 3883 - DNA, 64 bp, Artificial
  oligonucleotide probe
ttgcaagcgtccgggaaacggctgcaagcgcaccgtcgcaaagcgcacgcacgggaaagcggct

SEQ ID NO: 3884 - DNA, 64 bp, Artificial
  oligonucleotide probe
ttcggggaaacgccgtccgtttcggctgggctaacgcgatttgccgcattgcatggcgtgggga

SEQ ID NO: 3885 - DNA, 64 bp, Artificial
  oligonucleotide probe
aacggctgcaagcgcaaacgcgatttgccgcaggctgcacggtcccgtttgcatggcgtgggga

SEQ ID NO: 3886 - DNA, 64 bp, Artificial
  oligonucleotide probe
ttcgccgtttgcgctgccgtcgcaaagcgcacgggattcgcgcaaacggcacgggaaagcggct

SEQ ID NO: 3887 - DNA, 64 bp, Artificial
  oligonucleotide probe
aacggctgcaagcgcaccgtttcggctgggctgggattcgcgcaaacggcaccgcagctgcgtg

SEQ ID NO: 3888 - DNA, 64 bp, Artificial
  oligonucleotide probe
aagccgtgcgcaacgattgcaagcgtccgggattgcatggcgtggggagcaccgcagctgcgtg

SEQ ID NO: 3889 - DNA, 64 bp, Artificial
  oligonucleotide probe
cgcattgcggctttcgggctttgcgcaccgtgttcgccgtttgcgctggcaccgcagctgcgtg

SEQ ID NO: 3890 - DNA, 64 bp, Artificial
  oligonucleotide probe
aagccgtgcgcaacgaggctttgcgcaccgtggggattcgcgcaaacggcaccgcagctgcgtg

SEQ ID NO: 3891 - DNA, 64 bp, Artificial
  oligonucleotide probe
ttgcaagcgtccgggaaacggctgcaagcgcagggattcgcgcaaacggcacgggaaagcggct

SEQ ID NO: 3892 - DNA, 64 bp, Artificial
  oligonucleotide probe
aagccgtgcgcaacgaccgtttcggctgggctaacgcgatttgccgcattgcatggcgtgggga

SEQ ID NO: 3893 - DNA, 64 bp, Artificial
  oligonucleotide probe
atggcgcagcacgctgccgtcgcaaagcgcacgggattcgcgcaaacggcaccgcagctgcgtg

SEQ ID NO: 3894 - DNA, 64 bp, Artificial
  oligonucleotide probe
cgcattgcggctttcgggctttgcgcaccgtgaacgcgatttgccgcagcacgggaaagcggct

SEQ ID NO: 3895 - DNA, 64 bp, Artificial
  oligonucleotide probe
aagccgtgcgcaacgattgcaagcgtccgggaggctttgcgcaccgtggggattcgcgcaaacg

SEQ ID NO: 3896 - DNA, 64 bp, Artificial
  oligonucleotide probe
ggctttgcgcaccgtgttcggggaaacgccgtgcaccgcagctgcgtggcacgggaaagcggct

SEQ ID NO: 3897 - DNA, 64 bp, Artificial
  oligonucleotide probe
aagccgtgcgcaacgaccgtttcggctgggctaacgcgatttgccgcagcacgggaaagcggct

SEQ ID NO: 3898 - DNA, 64 bp, Artificial
  oligonucleotide probe
ttgcaagcgtccgggaaacggctgcaagcgcaggctgcacggtcccgtgcaccgcagctgcgtg

SEQ ID NO: 3899 - DNA, 64 bp, Artificial
  oligonucleotide probe
cgcattgcggctttcgggctttgcgcaccgtggggattcgcgcaaacggcacgggaaagcggct

SEQ ID NO: 3900 - DNA, 64 bp, Artificial
  oligonucleotide probe
ttcggggaaacgccgtccgtcgcaaagcgcacggctgcacggtcccgtgcacgggaaagcggct

SEQ ID NO: 3901 - DNA, 64 bp, Artificial
  oligonucleotide probe
ttcggggaaacgccgtaacgcgatttgccgcaccgtcgcaaagcgcacgggattcgcgcaaacg

SEQ ID NO: 3902 - DNA, 64 bp, Artificial
  oligonucleotide probe
ttgcaagcgtccgggaaacgcgatttgccgcaggctgcacggtcccgtgcaccgcagctgcgtg

SEQ ID NO: 3903 - DNA, 64 bp, Artificial
  oligonucleotide probe
cgcattgcggctttcgaacgcgatttgccgcattcgccgtttgcgctggcaccgcagctgcgtg

SEQ ID NO: 3904 - DNA, 64 bp, Artificial
  oligonucleotide probe
aagccgtgcgcaacgaaacggctgcaagcgcaggctgcacggtcccgtgggattcgcgcaaacg

SEQ ID NO: 3905 - DNA, 64 bp, Artificial
  oligonucleotide probe
ttcggggaaacgccgtccgtttcggctgggctttgcatggcgtggggagcacgggaaagcggct

SEQ ID NO: 3906 - DNA, 64 bp, Artificial
  oligonucleotide probe
aacgcgatttgccgcattcgccgtttgcgctggggattcgcgcaaacggcaccgcagctgcgtg

SEQ ID NO: 3907 - DNA, 64 bp, Artificial
  oligonucleotide probe
aagccgtgcgcaacgacgcattgcggctttcgccgtttcggctgggctgggattcgcgcaaacg

SEQ ID NO: 3908 - DNA, 64 bp, Artificial
  oligonucleotide probe
aacggctgcaagcgcattcggggaaacgccgtccgtttcggctgggctgggattcgcgcaaacg

SEQ ID NO: 3909 - DNA, 64 bp, Artificial
  oligonucleotide probe
atggcgcagcacgctgccgtcgcaaagcgcacttgcatggcgtggggagcacgggaaagcggct

SEQ ID NO: 3910 - DNA, 64 bp, Artificial
  oligonucleotide probe
aagccgtgcgcaacgacgcattgcggctttcgttcggggaaacgccgtttgcatggcgtgggga

SEQ ID NO: 3911 - DNA, 64 bp, Artificial
  oligonucleotide probe
ggctttgcgcaccgtgttcggggaaacgccgtccgtcgcaaagcgcacgcacgggaaagcggct

SEQ ID NO: 3912 - DNA, 64 bp, Artificial
  oligonucleotide probe
ccgtttcggctgggctaacgcgatttgccgcaccgtcgcaaagcgcacgggattcgcgcaaacg

SEQ ID NO: 3913 - DNA, 64 bp, Artificial
  oligonucleotide probe
cgcattgcggctttcgttcgccgtttgcgctgccgtcgcaaagcgcacgcacgggaaagcggct

SEQ ID NO: 3914 - DNA, 64 bp, Artificial
  oligonucleotide probe
cgcattgcggctttcgttgcaagcgtccgggaggctttgcgcaccgtggcaccgcagctgcgtg

SEQ ID NO: 3915 - DNA, 64 bp, Artificial
  oligonucleotide probe
ttgcaagcgtccgggaaacggctgcaagcgcaaacgcgatttgccgcagggattcgcgcaaacg

SEQ ID NO: 3916 - DNA, 64 bp, Artificial
  oligonucleotide probe
ttcggggaaacgccgtccgtttcggctgggctgggattcgcgcaaacggcacgggaaagcggct

SEQ ID NO: 3917 - DNA, 64 bp, Artificial
  oligonucleotide probe
aagccgtgcgcaacgaaacggctgcaagcgcaatggcgcagcacgctggcacgggaaagcggct

SEQ ID NO: 3918 - DNA, 64 bp, Artificial
  oligonucleotide probe
ttgcaagcgtccgggaatggcgcagcacgctgggctgcacggtcccgtgcaccgcagctgcgtg

SEQ ID NO: 3919 - DNA, 64 bp, Artificial
  oligonucleotide probe
ggctttgcgcaccgtgatggcgcagcacgctgaacgcgatttgccgcagcacgggaaagcggct

SEQ ID NO: 3920 - DNA, 64 bp, Artificial
  oligonucleotide probe
aacggctgcaagcgcaatggcgcagcacgctgttcgccgtttgcgctggcacgggaaagcggct

SEQ ID NO: 3921 - DNA, 64 bp, Artificial
  oligonucleotide probe
aacggctgcaagcgcaatggcgcagcacgctgccgtttcggctgggctttgcatggcgtgggga

SEQ ID NO: 3922 - DNA, 64 bp, Artificial
  oligonucleotide probe
aagccgtgcgcaacgacgcattgcggctttcgaacgcgatttgccgcagcacgggaaagcggct

SEQ ID NO: 3923 - DNA, 64 bp, Artificial
  oligonucleotide probe
aagccgtgcgcaacgattgcaagcgtccgggagggattcgcgcaaacggcacgggaaagcggct

SEQ ID NO: 3924 - DNA, 64 bp, Artificial
  oligonucleotide probe
aacggctgcaagcgcaaacgcgatttgccgcattcgccgtttgcgctgttgcatggcgtgggga

SEQ ID NO: 3925 - DNA, 64 bp, Artificial
  oligonucleotide probe
cgcattgcggctttcgaacgcgatttgccgcattcgccgtttgcgctgttgcatggcgtgggga

SEQ ID NO: 3926 - DNA, 64 bp, Artificial
  oligonucleotide probe
aagccgtgcgcaacgaaacggctgcaagcgcagggattcgcgcaaacggcaccgcagctgcgtg

SEQ ID NO: 3927 - DNA, 64 bp, Artificial
  oligonucleotide probe
ttgcaagcgtccgggaatggcgcagcacgctgttgcatggcgtggggagcacgggaaagcggct

SEQ ID NO: 3928 - DNA, 64 bp, Artificial
  oligonucleotide probe
aagccgtgcgcaacgacgcattgcggctttcgttgcatggcgtggggagcaccgcagctgcgtg

SEQ ID NO: 3929 - DNA, 64 bp, Artificial
  oligonucleotide probe
aagccgtgcgcaacgaggctttgcgcaccgtggggattcgcgcaaacgttgcatggcgtgggga

SEQ ID NO: 3930 - DNA, 64 bp, Artificial
  oligonucleotide probe
ttgcaagcgtccgggaaacggctgcaagcgcaatggcgcagcacgctggcaccgcagctgcgtg

SEQ ID NO: 3931 - DNA, 64 bp, Artificial
  oligonucleotide probe
aacggctgcaagcgcaatggcgcagcacgctgccgtttcggctgggctgcacgggaaagcggct

SEQ ID NO: 3932 - DNA, 64 bp, Artificial
  oligonucleotide probe
ggctttgcgcaccgtgatggcgcagcacgctgggctgcacggtcccgtttgcatggcgtgggga

SEQ ID NO: 3933 - DNA, 64 bp, Artificial
  oligonucleotide probe
ggctttgcgcaccgtgaacgcgatttgccgcaccgtcgcaaagcgcacgcaccgcagctgcgtg

SEQ ID NO: 3934 - DNA, 64 bp, Artificial
  oligonucleotide probe
aagccgtgcgcaacgaaacgcgatttgccgcattgcatggcgtggggagcaccgcagctgcgtg

SEQ ID NO: 3935 - DNA, 64 bp, Artificial
  oligonucleotide probe
ttgcaagcgtccgggaccgtttcggctgggctccgtcgcaaagcgcacgggattcgcgcaaacg

SEQ ID NO: 3936 - DNA, 64 bp, Artificial
  oligonucleotide probe
aagccgtgcgcaacgattcggggaaacgccgtaacgcgatttgccgcagggattcgcgcaaacg

SEQ ID NO: 3937 - DNA, 64 bp, Artificial
  oligonucleotide probe
aagccgtgcgcaacgaccgtcgcaaagcgcacttgcatggcgtggggagcaccgcagctgcgtg

SEQ ID NO: 3938 - DNA, 64 bp, Artificial
  oligonucleotide probe
cgcattgcggctttcgggctttgcgcaccgtgggctgcacggtcccgtgcaccgcagctgcgtg

SEQ ID NO: 3939 - DNA, 64 bp, Artificial
  oligonucleotide probe
ttgcaagcgtccgggaccgtttcggctgggctttgcatggcgtggggagcaccgcagctgcgtg

SEQ ID NO: 3940 - DNA, 64 bp, Artificial
  oligonucleotide probe
aagccgtgcgcaacgaaacggctgcaagcgcattcggggaaacgccgtgcaccgcagctgcgtg

SEQ ID NO: 3941 - DNA, 64 bp, Artificial
  oligonucleotide probe
cgcattgcggctttcgccgtttcggctgggctaacgcgatttgccgcagggattcgcgcaaacg

SEQ ID NO: 3942 - DNA, 64 bp, Artificial
  oligonucleotide probe
ttgcaagcgtccgggaaacgcgatttgccgcaccgtcgcaaagcgcacgcaccgcagctgcgtg

SEQ ID NO: 3943 - DNA, 64 bp, Artificial
  oligonucleotide probe
aagccgtgcgcaacgaaacggctgcaagcgcaccgtcgcaaagcgcacttgcatggcgtgggga

SEQ ID NO: 3944 - DNA, 64 bp, Artificial
  oligonucleotide probe
aacgcgatttgccgcaccgtcgcaaagcgcacggctgcacggtcccgtgcacgggaaagcggct

SEQ ID NO: 3945 - DNA, 64 bp, Artificial
  oligonucleotide probe
ggctttgcgcaccgtgggctgcacggtcccgtgcaccgcagctgcgtggcacgggaaagcggct

SEQ ID NO: 3946 - DNA, 64 bp, Artificial
  oligonucleotide probe
ttcgccgtttgcgctgccgtcgcaaagcgcacgcaccgcagctgcgtggcacgggaaagcggct

SEQ ID NO: 3947 - DNA, 64 bp, Artificial
  oligonucleotide probe
cgcattgcggctttcgttcggggaaacgccgtttcgccgtttgcgctggcacgggaaagcggct

SEQ ID NO: 3948 - DNA, 64 bp, Artificial
  oligonucleotide probe
ttgcaagcgtccgggaccgtttcggctgggctttcgccgtttgcgctggcaccgcagctgcgtg

SEQ ID NO: 3949 - DNA, 64 bp, Artificial
  oligonucleotide probe
aacggctgcaagcgcaccgtttcggctgggctaacgcgatttgccgcagcaccgcagctgcgtg

SEQ ID NO: 3950 - DNA, 64 bp, Artificial
  oligonucleotide probe
cgcattgcggctttcgccgtttcggctgggctgggattcgcgcaaacgttgcatggcgtgggga

SEQ ID NO: 3951 - DNA, 64 bp, Artificial
  oligonucleotide probe
aagccgtgcgcaacgattcggggaaacgccgtaacgcgatttgccgcagcacgggaaagcggct

SEQ ID NO: 3952 - DNA, 64 bp, Artificial
  oligonucleotide probe
aacggctgcaagcgcattcgccgtttgcgctgggctgcacggtcccgtgggattcgcgcaaacg

SEQ ID NO: 3953 - DNA, 64 bp, Artificial
  oligonucleotide probe
aagccgtgcgcaacgattcggggaaacgccgtttcgccgtttgcgctggcacgggaaagcggct

SEQ ID NO: 3954 - DNA, 64 bp, Artificial
  oligonucleotide probe
ggctttgcgcaccgtgatggcgcagcacgctgggctgcacggtcccgtgcaccgcagctgcgtg

SEQ ID NO: 3955 - DNA, 64 bp, Artificial
  oligonucleotide probe
ttcggggaaacgccgtttcgccgtttgcgctggcaccgcagctgcgtggcacgggaaagcggct

SEQ ID NO: 3956 - DNA, 64 bp, Artificial
  oligonucleotide probe
ggctttgcgcaccgtgccgtttcggctgggctttcgccgtttgcgctgttgcatggcgtgggga

SEQ ID NO: 3957 - DNA, 64 bp, Artificial
  oligonucleotide probe
ttgcaagcgtccgggattcgccgtttgcgctgccgtcgcaaagcgcacgcaccgcagctgcgtg

SEQ ID NO: 3958 - DNA, 64 bp, Artificial
  oligonucleotide probe
ggctttgcgcaccgtgccgtttcggctgggctggctgcacggtcccgtgcaccgcagctgcgtg

SEQ ID NO: 3959 - DNA, 64 bp, Artificial
  oligonucleotide probe
cgcattgcggctttcgttcggggaaacgccgtaacgcgatttgccgcagcacgggaaagcggct

SEQ ID NO: 3960 - DNA, 64 bp, Artificial
  oligonucleotide probe
ggctttgcgcaccgtgttcggggaaacgccgtttgcatggcgtggggagcacgggaaagcggct

SEQ ID NO: 3961 - DNA, 64 bp, Artificial
  oligonucleotide probe
ttgcaagcgtccgggaggctgcacggtcccgtgggattcgcgcaaacggcaccgcagctgcgtg

SEQ ID NO: 3962 - DNA, 64 bp, Artificial
  oligonucleotide probe
ttcgccgtttgcgctgccgtcgcaaagcgcacttgcatggcgtggggagcaccgcagctgcgtg

SEQ ID NO: 3963 - DNA, 64 bp, Artificial
  oligonucleotide probe
atggcgcagcacgctgttcggggaaacgccgtttgcatggcgtggggagcacgggaaagcggct

SEQ ID NO: 3964 - DNA, 64 bp, Artificial
  oligonucleotide probe
ttcggggaaacgccgtaacgcgatttgccgcattgcatggcgtggggagcacgggaaagcggct

SEQ ID NO: 3965 - DNA, 64 bp, Artificial
  oligonucleotide probe
cgcattgcggctttcgatggcgcagcacgctgggctgcacggtcccgtgcaccgcagctgcgtg

SEQ ID NO: 3966 - DNA, 64 bp, Artificial
  oligonucleotide probe
aacggctgcaagcgcaatggcgcagcacgctggggattcgcgcaaacggcaccgcagctgcgtg

SEQ ID NO: 3967 - DNA, 64 bp, Artificial
  oligonucleotide probe
cgcattgcggctttcgaacggctgcaagcgcaggctgcacggtcccgtgggattcgcgcaaacg

SEQ ID NO: 3968 - DNA, 64 bp, Artificial
  oligonucleotide probe
cgcattgcggctttcgaacgcgatttgccgcaggctgcacggtcccgtgcacgggaaagcggct

SEQ ID NO: 3969 - DNA, 64 bp, Artificial
  oligonucleotide probe
aagccgtgcgcaacgaaacggctgcaagcgcattcgccgtttgcgctggcaccgcagctgcgtg

SEQ ID NO: 3970 - DNA, 64 bp, Artificial
  oligonucleotide probe
ttcggggaaacgccgtccgtttcggctgggctccgtcgcaaagcgcacgggattcgcgcaaacg

SEQ ID NO: 3971 - DNA, 64 bp, Artificial
  oligonucleotide probe
aacggctgcaagcgcaaacgcgatttgccgcaccgtcgcaaagcgcacgggattcgcgcaaacg

SEQ ID NO: 3972 - DNA, 64 bp, Artificial
  oligonucleotide probe
cgcattgcggctttcgaacggctgcaagcgcaccgtttcggctgggctgcacgggaaagcggct

SEQ ID NO: 3973 - DNA, 64 bp, Artificial
  oligonucleotide probe
aacgcgatttgccgcaccgtcgcaaagcgcacgcaccgcagctgcgtggcacgggaaagcggct

SEQ ID NO: 3974 - DNA, 64 bp, Artificial
  oligonucleotide probe
aacggctgcaagcgcattcgccgtttgcgctgccgtcgcaaagcgcacgcacgggaaagcggct

SEQ ID NO: 3975 - DNA, 64 bp, Artificial
  oligonucleotide probe
aacggctgcaagcgcattcggggaaacgccgtggctgcacggtcccgtgggattcgcgcaaacg

SEQ ID NO: 3976 - DNA, 64 bp, Artificial
  oligonucleotide probe
atggcgcagcacgctgttcgccgtttgcgctggggattcgcgcaaacgttgcatggcgtgggga

SEQ ID NO: 3977 - DNA, 64 bp, Artificial
  oligonucleotide probe
ggctttgcgcaccgtgccgtcgcaaagcgcacgggattcgcgcaaacggcacgggaaagcggct

SEQ ID NO: 3978 - DNA, 64 bp, Artificial
  oligonucleotide probe
cgcattgcggctttcgatggcgcagcacgctggggattcgcgcaaacgttgcatggcgtgggga

SEQ ID NO: 3979 - DNA, 64 bp, Artificial
  oligonucleotide probe
aagccgtgcgcaacgaatggcgcagcacgctgccgtcgcaaagcgcacgggattcgcgcaaacg

SEQ ID NO: 3980 - DNA, 64 bp, Artificial
  oligonucleotide probe
cgcattgcggctttcgatggcgcagcacgctgccgtttcggctgggctttgcatggcgtgggga

SEQ ID NO: 3981 - DNA, 64 bp, Artificial
  oligonucleotide probe
aacgcgatttgccgcattcgccgtttgcgctgccgtcgcaaagcgcacgcacgggaaagcggct

SEQ ID NO: 3982 - DNA, 64 bp, Artificial
  oligonucleotide probe
cgcattgcggctttcgttgcaagcgtccgggaaacggctgcaagcgcattgcatggcgtgggga

SEQ ID NO: 3983 - DNA, 64 bp, Artificial
  oligonucleotide probe
cgcattgcggctttcgccgtcgcaaagcgcacgcaccgcagctgcgtggcacgggaaagcggct

SEQ ID NO: 3984 - DNA, 64 bp, Artificial
  oligonucleotide probe
ggctttgcgcaccgtgttcgccgtttgcgctgccgtcgcaaagcgcacgcacgggaaagcggct

SEQ ID NO: 3985 - DNA, 64 bp, Artificial
  oligonucleotide probe
aacggctgcaagcgcattcggggaaacgccgtccgtcgcaaagcgcacgggattcgcgcaaacg

SEQ ID NO: 3986 - DNA, 64 bp, Artificial
  oligonucleotide probe
aagccgtgcgcaacgaaacggctgcaagcgcaccgtttcggctgggctttgcatggcgtgggga

SEQ ID NO: 3987 - DNA, 64 bp, Artificial
  oligonucleotide probe
cgcattgcggctttcgaacggctgcaagcgcaccgtttcggctgggctttgcatggcgtgggga

SEQ ID NO: 3988 - DNA, 64 bp, Artificial
  oligonucleotide probe
aacggctgcaagcgcaatggcgcagcacgctgttcgccgtttgcgctgttgcatggcgtgggga

SEQ ID NO: 3989 - DNA, 64 bp, Artificial
  oligonucleotide probe
aagccgtgcgcaacgattgcaagcgtccgggaggctttgcgcaccgtgttgcatggcgtgggga

SEQ ID NO: 3990 - DNA, 64 bp, Artificial
  oligonucleotide probe
ttgcaagcgtccgggaggctttgcgcaccgtgatggcgcagcacgctgttgcatggcgtgggga

SEQ ID NO: 3991 - DNA, 64 bp, Artificial
  oligonucleotide probe
aagccgtgcgcaacgaaacggctgcaagcgcaaacgcgatttgccgcagggattcgcgcaaacg

SEQ ID NO: 3992 - DNA, 64 bp, Artificial
  oligonucleotide probe
aagccgtgcgcaacgaccgtttcggctgggctccgtcgcaaagcgcacgggattcgcgcaaacg

SEQ ID NO: 3993 - DNA, 64 bp, Artificial
  oligonucleotide probe
cgcattgcggctttcgaacggctgcaagcgcattcgccgtttgcgctggcaccgcagctgcgtg

SEQ ID NO: 3994 - DNA, 64 bp, Artificial
  oligonucleotide probe
ggctttgcgcaccgtgatggcgcagcacgctgttcgccgtttgcgctggggattcgcgcaaacg

SEQ ID NO: 3995 - DNA, 64 bp, Artificial
  oligonucleotide probe
cgcattgcggctttcgttcggggaaacgccgtggctgcacggtcccgtttgcatggcgtgggga

SEQ ID NO: 3996 - DNA, 64 bp, Artificial
  oligonucleotide probe
ttcggggaaacgccgtccgtcgcaaagcgcacttgcatggcgtggggagcacgggaaagcggct

SEQ ID NO: 3997 - DNA, 64 bp, Artificial
  oligonucleotide probe
ccgtcgcaaagcgcacggctgcacggtcccgtgggattcgcgcaaacggcacgggaaagcggct

SEQ ID NO: 3998 - DNA, 64 bp, Artificial
  oligonucleotide probe
cgcattgcggctttcgttgcaagcgtccgggaatggcgcagcacgctggcacgggaaagcggct

SEQ ID NO: 3999 - DNA, 64 bp, Artificial
  oligonucleotide probe
ggctttgcgcaccgtgccgtttcggctgggctttgcatggcgtggggagcaccgcagctgcgtg

SEQ ID NO: 4000 - DNA, 64 bp, Artificial
  oligonucleotide probe
ccgtttcggctgggctttcgccgtttgcgctggggattcgcgcaaacggcaccgcagctgcgtg

SEQ ID NO: 4001 - DNA, 64 bp, Artificial
  oligonucleotide probe
ttgcaagcgtccgggattcggggaaacgccgtttcgccgtttgcgctggcaccgcagctgcgtg

SEQ ID NO: 4002 - DNA, 64 bp, Artificial
  oligonucleotide probe
cgcattgcggctttcgaacgcgatttgccgcaccgtcgcaaagcgcacgggattcgcgcaaacg

SEQ ID NO: 4003 - DNA, 64 bp, Artificial
  oligonucleotide probe
ggctttgcgcaccgtgccgtcgcaaagcgcacgggattcgcgcaaacgttgcatggcgtgggga

SEQ ID NO: 4004 - DNA, 64 bp, Artificial
  oligonucleotide probe
cgcattgcggctttcgaacggctgcaagcgcaaacgcgatttgccgcagcacgggaaagcggct

SEQ ID NO: 4005 - DNA, 64 bp, Artificial
  oligonucleotide probe
cgcattgcggctttcgccgtttcggctgggctgggattcgcgcaaacggcaccgcagctgcgtg

SEQ ID NO: 4006 - DNA, 64 bp, Artificial
  oligonucleotide probe
atggcgcagcacgctggggattcgcgcaaacggcaccgcagctgcgtggcacgggaaagcggct

SEQ ID NO: 4007 - DNA, 64 bp, Artificial
  oligonucleotide probe
cgcattgcggctttcgggctttgcgcaccgtgccgtcgcaaagcgcacgcacgggaaagcggct

SEQ ID NO: 4008 - DNA, 64 bp, Artificial
  oligonucleotide probe
atggcgcagcacgctgttcggggaaacgccgtgggattcgcgcaaacgttgcatggcgtgggga

SEQ ID NO: 4009 - DNA, 64 bp, Artificial
  oligonucleotide probe
cgcattgcggctttcgttgcaagcgtccgggaggctttgcgcaccgtgttgcatggcgtgggga

SEQ ID NO: 4010 - DNA, 64 bp, Artificial
  oligonucleotide probe
ttcggggaaacgccgtttcgccgtttgcgctgccgtcgcaaagcgcacttgcatggcgtgggga

SEQ ID NO: 4011 - DNA, 64 bp, Artificial
  oligonucleotide probe
aagccgtgcgcaacgacgcattgcggctttcgaacgcgatttgccgcagggattcgcgcaaacg

SEQ ID NO: 4012 - DNA, 64 bp, Artificial
  oligonucleotide probe
ttcggggaaacgccgtccgtttcggctgggctgggattcgcgcaaacggcaccgcagctgcgtg

SEQ ID NO: 4013 - DNA, 64 bp, Artificial
  oligonucleotide probe
cgcattgcggctttcgatggcgcagcacgctgccgtcgcaaagcgcacttgcatggcgtgggga

SEQ ID NO: 4014 - DNA, 64 bp, Artificial
  oligonucleotide probe
cgcattgcggctttcgggctttgcgcaccgtgccgtcgcaaagcgcacgggattcgcgcaaacg

SEQ ID NO: 4015 - DNA, 64 bp, Artificial
  oligonucleotide probe
ttgcaagcgtccgggaaacgcgatttgccgcagggattcgcgcaaacgttgcatggcgtgggga

SEQ ID NO: 4016 - DNA, 64 bp, Artificial
  oligonucleotide probe
atggcgcagcacgctgggctgcacggtcccgtgggattcgcgcaaacgttgcatggcgtgggga

SEQ ID NO: 4017 - DNA, 64 bp, Artificial
  oligonucleotide probe
aagccgtgcgcaacgattcgccgtttgcgctgggctgcacggtcccgtttgcatggcgtgggga

SEQ ID NO: 4018 - DNA, 64 bp, Artificial
  oligonucleotide probe
atggcgcagcacgctgccgtttcggctgggctgggattcgcgcaaacggcacgggaaagcggct

SEQ ID NO: 4019 - DNA, 64 bp, Artificial
  oligonucleotide probe
ggctttgcgcaccgtgttcggggaaacgccgtaacgcgatttgccgcattgcatggcgtgggga

SEQ ID NO: 4020 - DNA, 64 bp, Artificial
  oligonucleotide probe
cgcattgcggctttcgttcgccgtttgcgctgggctgcacggtcccgtgcaccgcagctgcgtg

SEQ ID NO: 4021 - DNA, 64 bp, Artificial
  oligonucleotide probe
aacggctgcaagcgcaatggcgcagcacgctgccgtttcggctgggctgggattcgcgcaaacg

SEQ ID NO: 4022 - DNA, 64 bp, Artificial
  oligonucleotide probe
ttgcaagcgtccgggaatggcgcagcacgctgttcggggaaacgccgtttgcatggcgtgggga

SEQ ID NO: 4023 - DNA, 64 bp, Artificial
  oligonucleotide probe
aagccgtgcgcaacgaggctttgcgcaccgtgaacgcgatttgccgcagggattcgcgcaaacg

SEQ ID NO: 4024 - DNA, 64 bp, Artificial
  oligonucleotide probe
aacggctgcaagcgcaggctttgcgcaccgtgatggcgcagcacgctggcacgggaaagcggct

SEQ ID NO: 4025 - DNA, 64 bp, Artificial
  oligonucleotide probe
ttgcaagcgtccgggaatggcgcagcacgctgttgcatggcgtggggagcaccgcagctgcgtg

SEQ ID NO: 4026 - DNA, 64 bp, Artificial
  oligonucleotide probe
aagccgtgcgcaacgaaacggctgcaagcgcaaacgcgatttgccgcagcacgggaaagcggct

SEQ ID NO: 4027 - DNA, 64 bp, Artificial
  oligonucleotide probe
ggctttgcgcaccgtgttcgccgtttgcgctgccgtcgcaaagcgcacttgcatggcgtgggga

SEQ ID NO: 4028 - DNA, 64 bp, Artificial
  oligonucleotide probe
aagccgtgcgcaacgattgcaagcgtccgggattgcatggcgtggggagcacgggaaagcggct

SEQ ID NO: 4029 - DNA, 64 bp, Artificial
  oligonucleotide probe
atggcgcagcacgctgttcggggaaacgccgtaacgcgatttgccgcagcaccgcagctgcgtg

SEQ ID NO: 4030 - DNA, 64 bp, Artificial
  oligonucleotide probe
aagccgtgcgcaacgaatggcgcagcacgctgttcgccgtttgcgctggcacgggaaagcggct

SEQ ID NO: 4031 - DNA, 64 bp, Artificial
  oligonucleotide probe
aacggctgcaagcgcaaacgcgatttgccgcagggattcgcgcaaacggcacgggaaagcggct

SEQ ID NO: 4032 - DNA, 64 bp, Artificial
  oligonucleotide probe
ttgcaagcgtccgggaatggcgcagcacgctgttcggggaaacgccgtgggattcgcgcaaacg

SEQ ID NO: 4033 - DNA, 64 bp, Artificial
  oligonucleotide probe
cgcattgcggctttcgttcggggaaacgccgtttcgccgtttgcgctggcaccgcagctgcgtg

SEQ ID NO: 4034 - DNA, 64 bp, Artificial
  oligonucleotide probe
aagccgtgcgcaacgaatggcgcagcacgctgggctgcacggtcccgtttgcatggcgtgggga

SEQ ID NO: 4035 - DNA, 64 bp, Artificial
  oligonucleotide probe
aagccgtgcgcaacgaatggcgcagcacgctgttcggggaaacgccgtgggattcgcgcaaacg

SEQ ID NO: 4036 - DNA, 64 bp, Artificial
  oligonucleotide probe
aacggctgcaagcgcaccgtcgcaaagcgcacgggattcgcgcaaacggcacgggaaagcggct

SEQ ID NO: 4037 - DNA, 64 bp, Artificial
  oligonucleotide probe
aagccgtgcgcaacgattgcaagcgtccgggattcgccgtttgcgctggggattcgcgcaaacg

SEQ ID NO: 4038 - DNA, 64 bp, Artificial
  oligonucleotide probe
cgcattgcggctttcgttcggggaaacgccgtaacgcgatttgccgcagcaccgcagctgcgtg

SEQ ID NO: 4039 - DNA, 64 bp, Artificial
  oligonucleotide probe
aagccgtgcgcaacgacgcattgcggctttcgatggcgcagcacgctggcacgggaaagcggct

SEQ ID NO: 4040 - DNA, 64 bp, Artificial
  oligonucleotide probe
aagccgtgcgcaacgattcgccgtttgcgctgggctgcacggtcccgtgcacgggaaagcggct

SEQ ID NO: 4041 - DNA, 64 bp, Artificial
  oligonucleotide probe
aacggctgcaagcgcaatggcgcagcacgctgaacgcgatttgccgcagcaccgcagctgcgtg

SEQ ID NO: 4042 - DNA, 64 bp, Artificial
  oligonucleotide probe
atggcgcagcacgctgccgtttcggctgggctttgcatggcgtggggagcacgggaaagcggct

SEQ ID NO: 4043 - DNA, 64 bp, Artificial
  oligonucleotide probe
aagccgtgcgcaacgaggctgcacggtcccgtgggattcgcgcaaacggcaccgcagctgcgtg

SEQ ID NO: 4044 - DNA, 64 bp, Artificial
  oligonucleotide probe
aagccgtgcgcaacgattcggggaaacgccgtttgcatggcgtggggagcaccgcagctgcgtg

SEQ ID NO: 4045 - DNA, 64 bp, Artificial
  oligonucleotide probe
aacggctgcaagcgcattcggggaaacgccgtaacgcgatttgccgcagcaccgcagctgcgtg

SEQ ID NO: 4046 - DNA, 64 bp, Artificial
  oligonucleotide probe
aagccgtgcgcaacgacgcattgcggctttcgttgcaagcgtccgggagcaccgcagctgcgtg

SEQ ID NO: 4047 - DNA, 64 bp, Artificial
  oligonucleotide probe
aagccgtgcgcaacgaatggcgcagcacgctgggctgcacggtcccgtgcaccgcagctgcgtg

SEQ ID NO: 4048 - DNA, 64 bp, Artificial
  oligonucleotide probe
atggcgcagcacgctgccgtttcggctgggctttcgccgtttgcgctgttgcatggcgtgggga

SEQ ID NO: 4049 - DNA, 64 bp, Artificial
  oligonucleotide probe
ttgcaagcgtccgggaaacggctgcaagcgcaccgtttcggctgggctgcacgggaaagcggct

SEQ ID NO: 4050 - DNA, 64 bp, Artificial
  oligonucleotide probe
aagccgtgcgcaacgaccgtttcggctgggctttgcatggcgtggggagcaccgcagctgcgtg

SEQ ID NO: 4051 - DNA, 64 bp, Artificial
  oligonucleotide probe
aagccgtgcgcaacgattgcaagcgtccgggaaacggctgcaagcgcagcaccgcagctgcgtg

SEQ ID NO: 4052 - DNA, 64 bp, Artificial
  oligonucleotide probe
atggcgcagcacgctgccgtcgcaaagcgcacgcaccgcagctgcgtggcacgggaaagcggct

SEQ ID NO: 4053 - DNA, 64 bp, Artificial
  oligonucleotide probe
ttgcaagcgtccgggaccgtttcggctgggctgggattcgcgcaaacgttgcatggcgtgggga

SEQ ID NO: 4054 - DNA, 64 bp, Artificial
  oligonucleotide probe
cgcattgcggctttcgggctttgcgcaccgtgttcgccgtttgcgctggggattcgcgcaaacg

SEQ ID NO: 4055 - DNA, 64 bp, Artificial
  oligonucleotide probe
ttcggggaaacgccgtaacgcgatttgccgcattcgccgtttgcgctgttgcatggcgtgggga

SEQ ID NO: 4056 - DNA, 64 bp, Artificial
  oligonucleotide probe
aagccgtgcgcaacgacgcattgcggctttcggggattcgcgcaaacggcacgggaaagcggct

SEQ ID NO: 4057 - DNA, 64 bp, Artificial
  oligonucleotide probe
aagccgtgcgcaacgattgcaagcgtccgggaaacgcgatttgccgcagcacgggaaagcggct

SEQ ID NO: 4058 - DNA, 64 bp, Artificial
  oligonucleotide probe
aagccgtgcgcaacgaccgtttcggctgggctttgcatggcgtggggagcacgggaaagcggct

SEQ ID NO: 4059 - DNA, 64 bp, Artificial
  oligonucleotide probe
aacgcgatttgccgcaggctgcacggtcccgtgggattcgcgcaaacgttgcatggcgtgggga

SEQ ID NO: 4060 - DNA, 64 bp, Artificial
  oligonucleotide probe
aagccgtgcgcaacgaaacgcgatttgccgcattcgccgtttgcgctggcacgggaaagcggct

SEQ ID NO: 4061 - DNA, 64 bp, Artificial
  oligonucleotide probe
ggctttgcgcaccgtgccgtcgcaaagcgcacggctgcacggtcccgtgcaccgcagctgcgtg

SEQ ID NO: 4062 - DNA, 64 bp, Artificial
  oligonucleotide probe
aacgcgatttgccgcattgcatggcgtggggagcaccgcagctgcgtggcacgggaaagcggct

SEQ ID NO: 4063 - DNA, 64 bp, Artificial
  oligonucleotide probe
atggcgcagcacgctgttcggggaaacgccgtttgcatggcgtggggagcaccgcagctgcgtg

SEQ ID NO: 4064 - DNA, 64 bp, Artificial
  oligonucleotide probe
aacggctgcaagcgcattcgccgtttgcgctgccgtcgcaaagcgcacttgcatggcgtgggga

SEQ ID NO: 4065 - DNA, 64 bp, Artificial
  oligonucleotide probe
ttcgccgtttgcgctgggctgcacggtcccgtgggattcgcgcaaacggcaccgcagctgcgtg

SEQ ID NO: 4066 - DNA, 64 bp, Artificial
  oligonucleotide probe
ggctttgcgcaccgtgttcgccgtttgcgctggggattcgcgcaaacggcaccgcagctgcgtg

SEQ ID NO: 4067 - DNA, 64 bp, Artificial
  oligonucleotide probe
aacggctgcaagcgcattcggggaaacgccgtccgtcgcaaagcgcacttgcatggcgtgggga

SEQ ID NO: 4068 - DNA, 64 bp, Artificial
  oligonucleotide probe
ttgcaagcgtccgggaaacggctgcaagcgcaccgtttcggctgggctgggattcgcgcaaacg

SEQ ID NO: 4069 - DNA, 64 bp, Artificial
  oligonucleotide probe
ggctttgcgcaccgtgttcggggaaacgccgtaacgcgatttgccgcagcaccgcagctgcgtg

SEQ ID NO: 4070 - DNA, 64 bp, Artificial
  oligonucleotide probe
aagccgtgcgcaacgaaacgcgatttgccgcaggctgcacggtcccgtttgcatggcgtgggga

SEQ ID NO: 4071 - DNA, 64 bp, Artificial
  oligonucleotide probe
aagccgtgcgcaacgaggctttgcgcaccgtgaacgcgatttgccgcagcaccgcagctgcgtg

SEQ ID NO: 4072 - DNA, 64 bp, Artificial
  oligonucleotide probe
atggcgcagcacgctgaacgcgatttgccgcaccgtcgcaaagcgcacttgcatggcgtgggga

SEQ ID NO: 4073 - DNA, 64 bp, Artificial
  oligonucleotide probe
ccgtcgcaaagcgcacggctgcacggtcccgtttgcatggcgtggggagcaccgcagctgcgtg

SEQ ID NO: 4074 - DNA, 64 bp, Artificial
  oligonucleotide probe
ggctttgcgcaccgtgaacgcgatttgccgcaggctgcacggtcccgtgggattcgcgcaaacg

SEQ ID NO: 4075 - DNA, 64 bp, Artificial
  oligonucleotide probe
atggcgcagcacgctgttcggggaaacgccgtgggattcgcgcaaacggcacgggaaagcggct

SEQ ID NO: 4076 - DNA, 64 bp, Artificial
  oligonucleotide probe
aagccgtgcgcaacgacgcattgcggctttcgttgcaagcgtccgggagcacgggaaagcggct

SEQ ID NO: 4077 - DNA, 64 bp, Artificial
  oligonucleotide probe
aacggctgcaagcgcaccgtttcggctgggctttcgccgtttgcgctggggattcgcgcaaacg

SEQ ID NO: 4078 - DNA, 64 bp, Artificial
  oligonucleotide probe
ttgcaagcgtccgggattcggggaaacgccgtaacgcgatttgccgcagcaccgcagctgcgtg

SEQ ID NO: 4079 - DNA, 64 bp, Artificial
  oligonucleotide probe
ttgcaagcgtccgggaaacgcgatttgccgcaccgtcgcaaagcgcacgcacgggaaagcggct

SEQ ID NO: 4080 - DNA, 64 bp, Artificial
  oligonucleotide probe
ggctgcacggtcccgtgggattcgcgcaaacgttgcatggcgtggggagcacgggaaagcggct

SEQ ID NO: 4081 - DNA, 64 bp, Artificial
  oligonucleotide probe
cgcattgcggctttcgttcgccgtttgcgctggggattcgcgcaaacgttgcatggcgtgggga

SEQ ID NO: 4082 - DNA, 64 bp, Artificial
  oligonucleotide probe
atggcgcagcacgctgccgtttcggctgggctccgtcgcaaagcgcacttgcatggcgtgggga

SEQ ID NO: 4083 - DNA, 64 bp, Artificial
  oligonucleotide probe
cgcattgcggctttcgttgcaagcgtccgggaaacgcgatttgccgcagcaccgcagctgcgtg

SEQ ID NO: 4084 - DNA, 64 bp, Artificial
  oligonucleotide probe
aagccgtgcgcaacgaatggcgcagcacgctgccgtcgcaaagcgcacgcaccgcagctgcgtg

SEQ ID NO: 4085 - DNA, 64 bp, Artificial
  oligonucleotide probe
ttgcaagcgtccgggaaacgcgatttgccgcattgcatggcgtggggagcacgggaaagcggct

SEQ ID NO: 4086 - DNA, 64 bp, Artificial
  oligonucleotide probe
aagccgtgcgcaacgaaacgcgatttgccgcagggattcgcgcaaacgttgcatggcgtgggga

SEQ ID NO: 4087 - DNA, 64 bp, Artificial
  oligonucleotide probe
atggcgcagcacgctgttcgccgtttgcgctggcaccgcagctgcgtggcacgggaaagcggct

SEQ ID NO: 4088 - DNA, 64 bp, Artificial
  oligonucleotide probe
ttgcaagcgtccgggattcgccgtttgcgctgggctgcacggtcccgtgggattcgcgcaaacg

SEQ ID NO: 4089 - DNA, 64 bp, Artificial
  oligonucleotide probe
cgcattgcggctttcgggctttgcgcaccgtgccgtttcggctgggctgcacgggaaagcggct

SEQ ID NO: 4090 - DNA, 64 bp, Artificial
  oligonucleotide probe
aagccgtgcgcaacgaccgtttcggctgggctggctgcacggtcccgtgcaccgcagctgcgtg

SEQ ID NO: 4091 - DNA, 64 bp, Artificial
  oligonucleotide probe
aagccgtgcgcaacgaggctttgcgcaccgtgggctgcacggtcccgtttgcatggcgtgggga

SEQ ID NO: 4092 - DNA, 64 bp, Artificial
  oligonucleotide probe
aagccgtgcgcaacgaggctgcacggtcccgtgggattcgcgcaaacgttgcatggcgtgggga

SEQ ID NO: 4093 - DNA, 64 bp, Artificial
  oligonucleotide probe
atggcgcagcacgctgaacgcgatttgccgcagggattcgcgcaaacggcacgggaaagcggct

SEQ ID NO: 4094 - DNA, 64 bp, Artificial
  oligonucleotide probe
cgcattgcggctttcgggctttgcgcaccgtggggattcgcgcaaacgttgcatggcgtgggga

SEQ ID NO: 4095 - DNA, 64 bp, Artificial
  oligonucleotide probe
cgcattgcggctttcgatggcgcagcacgctgccgtttcggctgggctgcaccgcagctgcgtg

SEQ ID NO: 4096 - DNA, 64 bp, Artificial
  oligonucleotide probe
cgcattgcggctttcgaacgcgatttgccgcaggctgcacggtcccgtgggattcgcgcaaacg

SEQ ID NO: 4097 - DNA, 64 bp, Artificial
  oligonucleotide probe
aacggctgcaagcgcattcgccgtttgcgctgttgcatggcgtggggagcacgggaaagcggct

SEQ ID NO: 4098 - DNA, 64 bp, Artificial
  oligonucleotide probe
cgcattgcggctttcgaacggctgcaagcgcattcgccgtttgcgctgttgcatggcgtgggga

SEQ ID NO: 4099 - DNA, 64 bp, Artificial
  oligonucleotide probe
ccgtcgcaaagcgcacgggattcgcgcaaacggcaccgcagctgcgtggcacgggaaagcggct

SEQ ID NO: 4100 - DNA, 64 bp, Artificial
  oligonucleotide probe
ttgcaagcgtccgggaggctttgcgcaccgtggggattcgcgcaaacgttgcatggcgtgggga

SEQ ID NO: 4101 - DNA, 64 bp, Artificial
  oligonucleotide probe
ttgcaagcgtccgggaggctttgcgcaccgtgttcgccgtttgcgctgttgcatggcgtgggga

SEQ ID NO: 4102 - DNA, 64 bp, Artificial
  oligonucleotide probe
cgcattgcggctttcgaacggctgcaagcgcaatggcgcagcacgctggggattcgcgcaaacg

SEQ ID NO: 4103 - DNA, 64 bp, Artificial
  oligonucleotide probe
atggcgcagcacgctgaacgcgatttgccgcattgcatggcgtggggagcacgggaaagcggct

SEQ ID NO: 4104 - DNA, 64 bp, Artificial
  oligonucleotide probe
aagccgtgcgcaacgacgcattgcggctttcgggctttgcgcaccgtggggattcgcgcaaacg

SEQ ID NO: 4105 - DNA, 64 bp, Artificial
  oligonucleotide probe
aagccgtgcgcaacgattgcaagcgtccgggaaacgcgatttgccgcagcaccgcagctgcgtg

SEQ ID NO: 4106 - DNA, 64 bp, Artificial
  oligonucleotide probe
aagccgtgcgcaacgaatggcgcagcacgctgccgtttcggctgggctgcacgggaaagcggct

SEQ ID NO: 4107 - DNA, 64 bp, Artificial
  oligonucleotide probe
ggctttgcgcaccgtgttcggggaaacgccgtaacgcgatttgccgcagggattcgcgcaaacg

SEQ ID NO: 4108 - DNA, 64 bp, Artificial
  oligonucleotide probe
aacggctgcaagcgcattcggggaaacgccgtttcgccgtttgcgctggggattcgcgcaaacg

SEQ ID NO: 4109 - DNA, 64 bp, Artificial
  oligonucleotide probe
aagccgtgcgcaacgacgcattgcggctttcgggctgcacggtcccgtgcaccgcagctgcgtg

SEQ ID NO: 4110 - DNA, 64 bp, Artificial
  oligonucleotide probe
aacgcgatttgccgcattcgccgtttgcgctgggctgcacggtcccgtgcaccgcagctgcgtg

SEQ ID NO: 4111 - DNA, 64 bp, Artificial
  oligonucleotide probe
ggctttgcgcaccgtgatggcgcagcacgctgccgtttcggctgggctgcaccgcagctgcgtg

SEQ ID NO: 4112 - DNA, 64 bp, Artificial
  oligonucleotide probe
ccgtttcggctgggctaacgcgatttgccgcagggattcgcgcaaacggcacgggaaagcggct

SEQ ID NO: 4113 - DNA, 64 bp, Artificial
  oligonucleotide probe
ttcggggaaacgccgtttcggggaaacgccgtaacgcgatttgccgcagcacgggaaagcggct

SEQ ID NO: 4114 - DNA, 64 bp, Artificial
  oligonucleotide probe
ccgtcgcaaagcgcacccgtcgcaaagcgcacgcaccgcagctgcgtgttcgccgtttgcgctg

SEQ ID NO: 4115 - DNA, 64 bp, Artificial
  oligonucleotide probe
aagccgtgcgcaacgaaagccgtgcgcaacgattgcatggcgtggggagcacgggaaagcggct

SEQ ID NO: 4116 - DNA, 64 bp, Artificial
  oligonucleotide probe
ttgcatggcgtggggattgcatggcgtggggagcacgggaaagcggctggctgcacggtcccgt

SEQ ID NO: 4117 - DNA, 64 bp, Artificial
  oligonucleotide probe
cgcattgcggctttcgcgcattgcggctttcgatggcgcagcacgctggcaccgcagctgcgtg

SEQ ID NO: 4118 - DNA, 64 bp, Artificial
  oligonucleotide probe
gcacgggaaagcggctgcacgggaaagcggctaagccgtgcgcaacgaggctgcacggtcccgt

SEQ ID NO: 4119 - DNA, 64 bp, Artificial
  oligonucleotide probe
gggattcgcgcaaacggggattcgcgcaaacgatggcgcagcacgctgggctgcacggtcccgt

SEQ ID NO: 4120 - DNA, 64 bp, Artificial
  oligonucleotide probe
ttgcaagcgtccgggattgcaagcgtccgggattgcatggcgtggggacgcattgcggctttcg

SEQ ID NO: 4121 - DNA, 64 bp, Artificial
  oligonucleotide probe
gcacgggaaagcggctgcacgggaaagcggctggctttgcgcaccgtgggctgcacggtcccgt

SEQ ID NO: 4122 - DNA, 64 bp, Artificial
  oligonucleotide probe
ccgtttcggctgggctccgtttcggctgggctccgtcgcaaagcgcacttgcatggcgtgggga

SEQ ID NO: 4123 - DNA, 64 bp, Artificial
  oligonucleotide probe
ttgcatggcgtggggattgcatggcgtggggattgcaagcgtccgggattcggggaaacgccgt

SEQ ID NO: 4124 - DNA, 64 bp, Artificial
  oligonucleotide probe
gcaccgcagctgcgtggcaccgcagctgcgtgatggcgcagcacgctgccgtcgcaaagcgcac

SEQ ID NO: 4125 - DNA, 64 bp, Artificial
  oligonucleotide probe
aacgcgatttgccgcaaacgcgatttgccgcaggctgcacggtcccgtgggattcgcgcaaacg

SEQ ID NO: 4126 - DNA, 64 bp, Artificial
  oligonucleotide probe
aacggctgcaagcgcaaacggctgcaagcgcattgcatggcgtggggagcaccgcagctgcgtg

SEQ ID NO: 4127 - DNA, 64 bp, Artificial
  oligonucleotide probe
ttgcatggcgtggggattgcatggcgtggggagcacgggaaagcggctttcggggaaacgccgt

SEQ ID NO: 4128 - DNA, 64 bp, Artificial
  oligonucleotide probe
ggctttgcgcaccgtgggctttgcgcaccgtgggctgcacggtcccgtgggattcgcgcaaacg

SEQ ID NO: 4129 - DNA, 64 bp, Artificial
  oligonucleotide probe
gggattcgcgcaaacggggattcgcgcaaacggcaccgcagctgcgtgaacggctgcaagcgca

SEQ ID NO: 4130 - DNA, 64 bp, Artificial
  oligonucleotide probe
gggattcgcgcaaacggggattcgcgcaaacgccgtcgcaaagcgcacggctgcacggtcccgt

SEQ ID NO: 4131 - DNA, 64 bp, Artificial
  oligonucleotide probe
ttgcaagcgtccgggattgcaagcgtccgggattcggggaaacgccgtgcaccgcagctgcgtg

SEQ ID NO: 4132 - DNA, 64 bp, Artificial
  oligonucleotide probe
ccgtcgcaaagcgcacccgtcgcaaagcgcacttgcatggcgtggggaatggcgcagcacgctg

SEQ ID NO: 4133 - DNA, 64 bp, Artificial
  oligonucleotide probe
aacggctgcaagcgcaaacggctgcaagcgcattcggggaaacgccgtgggattcgcgcaaacg

SEQ ID NO: 4134 - DNA, 64 bp, Artificial
  oligonucleotide probe
ggctttgcgcaccgtgggctttgcgcaccgtggggattcgcgcaaacggcacgggaaagcggct

SEQ ID NO: 4135 - DNA, 64 bp, Artificial
  oligonucleotide probe
ttgcaagcgtccgggattgcaagcgtccgggaggctgcacggtcccgtgcaccgcagctgcgtg

SEQ ID NO: 4136 - DNA, 64 bp, Artificial
  oligonucleotide probe
aacggctgcaagcgcaaacggctgcaagcgcagcacgggaaagcggctttgcaagcgtccggga

SEQ ID NO: 4137 - DNA, 64 bp, Artificial
  oligonucleotide probe
ttcgccgtttgcgctgttcgccgtttgcgctggggattcgcgcaaacgttcggggaaacgccgt

SEQ ID NO: 4138 - DNA, 64 bp, Artificial
  oligonucleotide probe
ttcgccgtttgcgctgttcgccgtttgcgctggcacgggaaagcggctttgcaagcgtccggga

SEQ ID NO: 4139 - DNA, 64 bp, Artificial
  oligonucleotide probe
cgcattgcggctttcgcgcattgcggctttcgccgtttcggctgggctttgcatggcgtgggga

SEQ ID NO: 4140 - DNA, 64 bp, Artificial
  oligonucleotide probe
ttgcaagcgtccgggattgcaagcgtccgggaggctgcacggtcccgtgcacgggaaagcggct

SEQ ID NO: 4141 - DNA, 64 bp, Artificial
  oligonucleotide probe
ggctttgcgcaccgtgggctttgcgcaccgtggggattcgcgcaaacgttgcaagcgtccggga

SEQ ID NO: 4142 - DNA, 64 bp, Artificial
  oligonucleotide probe
ttgcatggcgtggggattgcatggcgtggggattcgccgtttgcgctggggattcgcgcaaacg

SEQ ID NO: 4143 - DNA, 64 bp, Artificial
  oligonucleotide probe
ttgcatggcgtggggattgcatggcgtggggaaagccgtgcgcaacgacgcattgcggctttcg

SEQ ID NO: 4144 - DNA, 64 bp, Artificial
  oligonucleotide probe
aagccgtgcgcaacgaaagccgtgcgcaacgacgcattgcggctttcggcaccgcagctgcgtg

SEQ ID NO: 4145 - DNA, 64 bp, Artificial
  oligonucleotide probe
atggcgcagcacgctgatggcgcagcacgctgaacgcgatttgccgcagcaccgcagctgcgtg

SEQ ID NO: 4146 - DNA, 64 bp, Artificial
  oligonucleotide probe
ggctttgcgcaccgtgggctttgcgcaccgtggcacgggaaagcggctcgcattgcggctttcg

SEQ ID NO: 4147 - DNA, 64 bp, Artificial
  oligonucleotide probe
atggcgcagcacgctgatggcgcagcacgctgaacgcgatttgccgcagggattcgcgcaaacg

SEQ ID NO: 4148 - DNA, 64 bp, Artificial
  oligonucleotide probe
aagccgtgcgcaacgaaagccgtgcgcaacgattgcaagcgtccgggagcacgggaaagcggct

SEQ ID NO: 4149 - DNA, 64 bp, Artificial
  oligonucleotide probe
gcacgggaaagcggctgcacgggaaagcggctttgcaagcgtccgggattgcatggcgtgggga

SEQ ID NO: 4150 - DNA, 64 bp, Artificial
  oligonucleotide probe
gcacgggaaagcggctgcacgggaaagcggctatggcgcagcacgctgccgtcgcaaagcgcac

SEQ ID NO: 4151 - DNA, 64 bp, Artificial
  oligonucleotide probe
gcaccgcagctgcgtggcaccgcagctgcgtgttcggggaaacgccgtaacgcgatttgccgca

SEQ ID NO: 4152 - DNA, 64 bp, Artificial
  oligonucleotide probe
atggcgcagcacgctgatggcgcagcacgctggcaccgcagctgcgtgcgcattgcggctttcg

SEQ ID NO: 4153 - DNA, 64 bp, Artificial
  oligonucleotide probe
gcacgggaaagcggctgcacgggaaagcggctaagccgtgcgcaacgaccgtcgcaaagcgcac

SEQ ID NO: 4154 - DNA, 64 bp, Artificial
  oligonucleotide probe
ggctttgcgcaccgtgggctttgcgcaccgtgaacgcgatttgccgcagcaccgcagctgcgtg

SEQ ID NO: 4155 - DNA, 64 bp, Artificial
  oligonucleotide probe
aacggctgcaagcgcaaacggctgcaagcgcagcaccgcagctgcgtgttgcaagcgtccggga

SEQ ID NO: 4156 - DNA, 64 bp, Artificial
  oligonucleotide probe
atggcgcagcacgctgatggcgcagcacgctgggctgcacggtcccgtgcacgggaaagcggct

SEQ ID NO: 4157 - DNA, 64 bp, Artificial
  oligonucleotide probe
ggctgcacggtcccgtggctgcacggtcccgtttgcatggcgtggggaccgtttcggctgggct

SEQ ID NO: 4158 - DNA, 64 bp, Artificial
  oligonucleotide probe
gcaccgcagctgcgtggcaccgcagctgcgtgttcgccgtttgcgctggggattcgcgcaaacg

SEQ ID NO: 4159 - DNA, 64 bp, Artificial
  oligonucleotide probe
ttcggggaaacgccgtttcggggaaacgccgtttgcatggcgtggggaatggcgcagcacgctg

SEQ ID NO: 4160 - DNA, 64 bp, Artificial
  oligonucleotide probe
gcacgggaaagcggctgcacgggaaagcggctaacgcgatttgccgcaccgtcgcaaagcgcac

SEQ ID NO: 4161 - DNA, 64 bp, Artificial
  oligonucleotide probe
gcaccgcagctgcgtggcaccgcagctgcgtgaagccgtgcgcaacgaaacggctgcaagcgca

SEQ ID NO: 4162 - DNA, 64 bp, Artificial
  oligonucleotide probe
ggctttgcgcaccgtgggctttgcgcaccgtggcacgggaaagcggctaagccgtgcgcaacga

SEQ ID NO: 4163 - DNA, 64 bp, Artificial
  oligonucleotide probe
ttgcaagcgtccgggattgcaagcgtccgggattcgccgtttgcgctggcacgggaaagcggct

SEQ ID NO: 4164 - DNA, 64 bp, Artificial
  oligonucleotide probe
gcacgggaaagcggctgcacgggaaagcggctaacgcgatttgccgcagggattcgcgcaaacg

SEQ ID NO: 4165 - DNA, 64 bp, Artificial
  oligonucleotide probe
ttcggggaaacgccgtttcggggaaacgccgtttcgccgtttgcgctggcacgggaaagcggct

SEQ ID NO: 4166 - DNA, 64 bp, Artificial
  oligonucleotide probe
gggattcgcgcaaacggggattcgcgcaaacggcacgggaaagcggctggctgcacggtcccgt

SEQ ID NO: 4167 - DNA, 64 bp, Artificial
  oligonucleotide probe
aagccgtgcgcaacgaaagccgtgcgcaacgaaacgcgatttgccgcagcaccgcagctgcgtg

SEQ ID NO: 4168 - DNA, 64 bp, Artificial
  oligonucleotide probe
gggattcgcgcaaacggggattcgcgcaaacgaagccgtgcgcaacgaaacggctgcaagcgca

SEQ ID NO: 4169 - DNA, 64 bp, Artificial
  oligonucleotide probe
ttcggggaaacgccgtttcggggaaacgccgtttcgccgtttgcgctggcaccgcagctgcgtg

SEQ ID NO: 4170 - DNA, 64 bp, Artificial
  oligonucleotide probe
ccgtttcggctgggctccgtttcggctgggctttcgccgtttgcgctgttgcatggcgtgggga

SEQ ID NO: 4171 - DNA, 64 bp, Artificial
  oligonucleotide probe
ttgcatggcgtggggattgcatggcgtggggagcacgggaaagcggctttcgccgtttgcgctg

SEQ ID NO: 4172 - DNA, 64 bp, Artificial
  oligonucleotide probe
gggattcgcgcaaacggggattcgcgcaaacgttgcaagcgtccgggattcgccgtttgcgctg

SEQ ID NO: 4173 - DNA, 64 bp, Artificial
  oligonucleotide probe
gcaccgcagctgcgtggcaccgcagctgcgtgggctttgcgcaccgtgccgtttcggctgggct

SEQ ID NO: 4174 - DNA, 64 bp, Artificial
  oligonucleotide probe
gcacgggaaagcggctgcacgggaaagcggctatggcgcagcacgctgttgcatggcgtgggga

SEQ ID NO: 4175 - DNA, 64 bp, Artificial
  oligonucleotide probe
atggcgcagcacgctgatggcgcagcacgctgttgcatggcgtggggaaacggctgcaagcgca

SEQ ID NO: 4176 - DNA, 64 bp, Artificial
  oligonucleotide probe
gggattcgcgcaaacggggattcgcgcaaacgttcggggaaacgccgtccgtttcggctgggct

SEQ ID NO: 4177 - DNA, 64 bp, Artificial
  oligonucleotide probe
gcaccgcagctgcgtggcaccgcagctgcgtgaagccgtgcgcaacgattgcatggcgtgggga

SEQ ID NO: 4178 - DNA, 64 bp, Artificial
  oligonucleotide probe
gcacgggaaagcggctgcacgggaaagcggctttcgccgtttgcgctgccgtcgcaaagcgcac

SEQ ID NO: 4179 - DNA, 64 bp, Artificial
  oligonucleotide probe
gcaccgcagctgcgtggcaccgcagctgcgtgccgtcgcaaagcgcacgggattcgcgcaaacg

SEQ ID NO: 4180 - DNA, 64 bp, Artificial
  oligonucleotide probe
ttcggggaaacgccgtttcggggaaacgccgtgcaccgcagctgcgtgggctttgcgcaccgtg

SEQ ID NO: 4181 - DNA, 64 bp, Artificial
  oligonucleotide probe
gcacgggaaagcggctgcacgggaaagcggctatggcgcagcacgctgttcgccgtttgcgctg

SEQ ID NO: 4182 - DNA, 64 bp, Artificial
  oligonucleotide probe
gcaccgcagctgcgtggcaccgcagctgcgtgggctgcacggtcccgtgggattcgcgcaaacg

SEQ ID NO: 4183 - DNA, 64 bp, Artificial
  oligonucleotide probe
atggcgcagcacgctgatggcgcagcacgctggggattcgcgcaaacgttgcaagcgtccggga

SEQ ID NO: 4184 - DNA, 64 bp, Artificial
  oligonucleotide probe
ggctttgcgcaccgtgggctttgcgcaccgtgggctgcacggtcccgtgcacgggaaagcggct

SEQ ID NO: 4185 - DNA, 64 bp, Artificial
  oligonucleotide probe
gggattcgcgcaaacggggattcgcgcaaacgttgcatggcgtggggaaacgcgatttgccgca

SEQ ID NO: 4186 - DNA, 64 bp, Artificial
  oligonucleotide probe
gcacgggaaagcggctgcacgggaaagcggctttgcaagcgtccgggaggctgcacggtcccgt

SEQ ID NO: 4187 - DNA, 64 bp, Artificial
  oligonucleotide probe
aagccgtgcgcaacgaaagccgtgcgcaacgattcggggaaacgccgtttgcatggcgtgggga

SEQ ID NO: 4188 - DNA, 64 bp, Artificial
  oligonucleotide probe
gggattcgcgcaaacggggattcgcgcaaacgttgcatggcgtggggagcaccgcagctgcgtg

SEQ ID NO: 4189 - DNA, 64 bp, Artificial
  oligonucleotide probe
ttgcatggcgtggggattgcatggcgtggggacgcattgcggctttcgttgcaagcgtccggga

SEQ ID NO: 4190 - DNA, 64 bp, Artificial
  oligonucleotide probe
gcacgggaaagcggctgcacgggaaagcggctggctttgcgcaccgtggcaccgcagctgcgtg

SEQ ID NO: 4191 - DNA, 64 bp, Artificial
  oligonucleotide probe
ttgcatggcgtggggattgcatggcgtggggaaagccgtgcgcaacgattcggggaaacgccgt

SEQ ID NO: 4192 - DNA, 64 bp, Artificial
  oligonucleotide probe
aacggctgcaagcgcaaacggctgcaagcgcattcggggaaacgccgtttgcatggcgtgggga

SEQ ID NO: 4193 - DNA, 64 bp, Artificial
  oligonucleotide probe
aacggctgcaagcgcaaacggctgcaagcgcaatggcgcagcacgctggcacgggaaagcggct

SEQ ID NO: 4194 - DNA, 64 bp, Artificial
  oligonucleotide probe
ttcgccgtttgcgctgttcgccgtttgcgctggcaccgcagctgcgtgatggcgcagcacgctg

SEQ ID NO: 4195 - DNA, 64 bp, Artificial
  oligonucleotide probe
aacgcgatttgccgcaaacgcgatttgccgcaccgtcgcaaagcgcacgcaccgcagctgcgtg

SEQ ID NO: 4196 - DNA, 64 bp, Artificial
  oligonucleotide probe
ccgtcgcaaagcgcacccgtcgcaaagcgcacttgcatggcgtggggaggctttgcgcaccgtg

SEQ ID NO: 4197 - DNA, 64 bp, Artificial
  oligonucleotide probe
gcaccgcagctgcgtggcaccgcagctgcgtgcgcattgcggctttcggggattcgcgcaaacg

SEQ ID NO: 4198 - DNA, 64 bp, Artificial
  oligonucleotide probe
gcacgggaaagcggctgcacgggaaagcggctaagccgtgcgcaacgagcaccgcagctgcgtg

SEQ ID NO: 4199 - DNA, 64 bp, Artificial
  oligonucleotide probe
gggattcgcgcaaacggggattcgcgcaaacgggctttgcgcaccgtgatggcgcagcacgctg

SEQ ID NO: 4200 - DNA, 64 bp, Artificial
  oligonucleotide probe
aagccgtgcgcaacgaaagccgtgcgcaacgattcggggaaacgccgtgcaccgcagctgcgtg

SEQ ID NO: 4201 - DNA, 64 bp, Artificial
  oligonucleotide probe
gcaccgcagctgcgtggcaccgcagctgcgtgttgcaagcgtccgggaggctgcacggtcccgt

SEQ ID NO: 4202 - DNA, 64 bp, Artificial
  oligonucleotide probe
ttgcatggcgtggggattgcatggcgtggggagcacgggaaagcggctccgtcgcaaagcgcac

SEQ ID NO: 4203 - DNA, 64 bp, Artificial
  oligonucleotide probe
ccgtcgcaaagcgcacccgtcgcaaagcgcacgggattcgcgcaaacgttgcaagcgtccggga

SEQ ID NO: 4204 - DNA, 64 bp, Artificial
  oligonucleotide probe
ggctgcacggtcccgtggctgcacggtcccgtgggattcgcgcaaacggcacgggaaagcggct

SEQ ID NO: 4205 - DNA, 64 bp, Artificial
  oligonucleotide probe
ccgtttcggctgggctccgtttcggctgggctgcaccgcagctgcgtgatggcgcagcacgctg

SEQ ID NO: 4206 - DNA, 64 bp, Artificial
  oligonucleotide probe
ggctttgcgcaccgtgggctttgcgcaccgtggcacgggaaagcggctttgcaagcgtccggga

SEQ ID NO: 4207 - DNA, 64 bp, Artificial
  oligonucleotide probe
aagccgtgcgcaacgaaagccgtgcgcaacgaaacgcgatttgccgcattgcatggcgtgggga

SEQ ID NO: 4208 - DNA, 64 bp, Artificial
  oligonucleotide probe
gggattcgcgcaaacggggattcgcgcaaacggcaccgcagctgcgtgaacgcgatttgccgca

SEQ ID NO: 4209 - DNA, 64 bp, Artificial
  oligonucleotide probe
atggcgcagcacgctgatggcgcagcacgctgccgtcgcaaagcgcacgggattcgcgcaaacg

SEQ ID NO: 4210 - DNA, 64 bp, Artificial
  oligonucleotide probe
gggattcgcgcaaacggggattcgcgcaaacggcacgggaaagcggctaacgcgatttgccgca

SEQ ID NO: 4211 - DNA, 64 bp, Artificial
  oligonucleotide probe
ttgcaagcgtccgggattgcaagcgtccgggaaacgcgatttgccgcagcacgggaaagcggct

SEQ ID NO: 4212 - DNA, 64 bp, Artificial
  oligonucleotide probe
ccgtttcggctgggctccgtttcggctgggctgcaccgcagctgcgtgttcggggaaacgccgt

SEQ ID NO: 4213 - DNA, 64 bp, Artificial
  oligonucleotide probe
gcaccgcagctgcgtggcaccgcagctgcgtgttcggggaaacgccgtttgcatggcgtgggga

SEQ ID NO: 4214 - DNA, 64 bp, Artificial
  oligonucleotide probe
aacggctgcaagcgcaaacggctgcaagcgcaggctttgcgcaccgtggggattcgcgcaaacg

SEQ ID NO: 4215 - DNA, 64 bp, Artificial
  oligonucleotide probe
aacggctgcaagcgcaaacggctgcaagcgcaccgtcgcaaagcgcacgcacgggaaagcggct

SEQ ID NO: 4216 - DNA, 64 bp, Artificial
  oligonucleotide probe
ttgcatggcgtggggattgcatggcgtggggattcggggaaacgccgtggctgcacggtcccgt

SEQ ID NO: 4217 - DNA, 64 bp, Artificial
  oligonucleotide probe
gcacgggaaagcggctgcacgggaaagcggctttcggggaaacgccgtttcgccgtttgcgctg

SEQ ID NO: 4218 - DNA, 64 bp, Artificial
  oligonucleotide probe
cgcattgcggctttcgcgcattgcggctttcgggctgcacggtcccgtgggattcgcgcaaacg

SEQ ID NO: 4219 - DNA, 64 bp, Artificial
  oligonucleotide probe
ggctttgcgcaccgtgggctttgcgcaccgtgccgtttcggctgggctgcaccgcagctgcgtg

SEQ ID NO: 4220 - DNA, 64 bp, Artificial
  oligonucleotide probe
gcacgggaaagcggctgcacgggaaagcggctttcggggaaacgccgtttgcatggcgtgggga

SEQ ID NO: 4221 - DNA, 64 bp, Artificial
  oligonucleotide probe
ttgcaagcgtccgggattgcaagcgtccgggaccgtcgcaaagcgcacgcaccgcagctgcgtg

SEQ ID NO: 4222 - DNA, 64 bp, Artificial
  oligonucleotide probe
ccgtttcggctgggctccgtttcggctgggctgcacgggaaagcggctttcggggaaacgccgt

SEQ ID NO: 4223 - DNA, 64 bp, Artificial
  oligonucleotide probe
atggcgcagcacgctgatggcgcagcacgctggcaccgcagctgcgtgggctttgcgcaccgtg

SEQ ID NO: 4224 - DNA, 64 bp, Artificial
  oligonucleotide probe
ccgtcgcaaagcgcacccgtcgcaaagcgcacgggattcgcgcaaacgatggcgcagcacgctg

SEQ ID NO: 4225 - DNA, 64 bp, Artificial
  oligonucleotide probe
aacggctgcaagcgcaaacggctgcaagcgcaggctttgcgcaccgtggcaccgcagctgcgtg

SEQ ID NO: 4226 - DNA, 64 bp, Artificial
  oligonucleotide probe
aacggctgcaagcgcaaacggctgcaagcgcagggattcgcgcaaacggcacgggaaagcggct

SEQ ID NO: 4227 - DNA, 64 bp, Artificial
  oligonucleotide probe
atggcgcagcacgctgatggcgcagcacgctgaacgcgatttgccgcattgcatggcgtgggga

SEQ ID NO: 4228 - DNA, 64 bp, Artificial
  oligonucleotide probe
gggattcgcgcaaacggggattcgcgcaaacgttgcaagcgtccgggaaacggctgcaagcgca

SEQ ID NO: 4229 - DNA, 64 bp, Artificial
  oligonucleotide probe
aagccgtgcgcaacgaaagccgtgcgcaacgaggctgcacggtcccgtttgcatggcgtgggga

SEQ ID NO: 4230 - DNA, 64 bp, Artificial
  oligonucleotide probe
ttgcatggcgtggggattgcatggcgtggggaaagccgtgcgcaacgaaacgcgatttgccgca

SEQ ID NO: 4231 - DNA, 64 bp, Artificial
  oligonucleotide probe
gggattcgcgcaaacggggattcgcgcaaacgttgcaagcgtccgggaccgtttcggctgggct

SEQ ID NO: 4232 - DNA, 64 bp, Artificial
  oligonucleotide probe
gggattcgcgcaaacggggattcgcgcaaacgaacgcgatttgccgcaccgtcgcaaagcgcac

SEQ ID NO: 4233 - DNA, 64 bp, Artificial
  oligonucleotide probe
ccgtttcggctgggctccgtttcggctgggctttgcatggcgtggggattgcaagcgtccggga

SEQ ID NO: 4234 - DNA, 64 bp, Artificial
  oligonucleotide probe
cgcattgcggctttcgcgcattgcggctttcgttgcaagcgtccgggagggattcgcgcaaacg

SEQ ID NO: 4235 - DNA, 64 bp, Artificial
  oligonucleotide probe
ttgcatggcgtggggattgcatggcgtggggagcaccgcagctgcgtggcacgggaaagcggct

SEQ ID NO: 4236 - DNA, 64 bp, Artificial
  oligonucleotide probe
ttgcaagcgtccgggattgcaagcgtccgggaggctgcacggtcccgtttgcatggcgtgggga

SEQ ID NO: 4237 - DNA, 64 bp, Artificial
  oligonucleotide probe
ttgcatggcgtggggattgcatggcgtggggattgcaagcgtccgggagggattcgcgcaaacg

SEQ ID NO: 4238 - DNA, 64 bp, Artificial
  oligonucleotide probe
gcaccgcagctgcgtggcaccgcagctgcgtgttgcaagcgtccgggaccgtttcggctgggct

SEQ ID NO: 4239 - DNA, 64 bp, Artificial
  oligonucleotide probe
ttgcaagcgtccgggattgcaagcgtccgggattgcatggcgtggggagcaccgcagctgcgtg

SEQ ID NO: 4240 - DNA, 64 bp, Artificial
  oligonucleotide probe
ggctgcacggtcccgtggctgcacggtcccgtttgcatggcgtggggattcggggaaacgccgt

SEQ ID NO: 4241 - DNA, 64 bp, Artificial
  oligonucleotide probe
gcacgggaaagcggctgcacgggaaagcggctttgcaagcgtccgggaaacgcgatttgccgca

SEQ ID NO: 4242 - DNA, 64 bp, Artificial
  oligonucleotide probe
ggctgcacggtcccgtggctgcacggtcccgtttgcatggcgtggggagcacgggaaagcggct

SEQ ID NO: 4243 - DNA, 64 bp, Artificial
  oligonucleotide probe
ttgcatggcgtggggattgcatggcgtggggagcaccgcagctgcgtgatggcgcagcacgctg

SEQ ID NO: 4244 - DNA, 64 bp, Artificial
  oligonucleotide probe
ttgcatggcgtggggattgcatggcgtggggattgcaagcgtccgggaatggcgcagcacgctg

SEQ ID NO: 4245 - DNA, 64 bp, Artificial
  oligonucleotide probe
ttgcaagcgtccgggattgcaagcgtccgggattcggggaaacgccgtgcacgggaaagcggct

SEQ ID NO: 4246 - DNA, 64 bp, Artificial
  oligonucleotide probe
ttgcatggcgtggggattgcatggcgtggggaaagccgtgcgcaacgaccgtttcggctgggct

SEQ ID NO: 4247 - DNA, 64 bp, Artificial
  oligonucleotide probe
gcacgggaaagcggctgcacgggaaagcggctaacggctgcaagcgcaccgtcgcaaagcgcac

SEQ ID NO: 4248 - DNA, 64 bp, Artificial
  oligonucleotide probe
ttgcatggcgtggggattgcatggcgtggggaatggcgcagcacgctgggctgcacggtcccgt

SEQ ID NO: 4249 - DNA, 64 bp, Artificial
  oligonucleotide probe
ggctgcacggtcccgtggctgcacggtcccgtgcaccgcagctgcgtggcacgggaaagcggct

SEQ ID NO: 4250 - DNA, 64 bp, Artificial
  oligonucleotide probe
ttgcaagcgtccgggattgcaagcgtccgggaccgtttcggctgggctgcacgggaaagcggct

SEQ ID NO: 4251 - DNA, 64 bp, Artificial
  oligonucleotide probe
ttcgccgtttgcgctgttcgccgtttgcgctgttgcatggcgtggggacgcattgcggctttcg

SEQ ID NO: 4252 - DNA, 64 bp, Artificial
  oligonucleotide probe
ttcgccgtttgcgctgttcgccgtttgcgctggcacgggaaagcggctccgtttcggctgggct

SEQ ID NO: 4253 - DNA, 64 bp, Artificial
  oligonucleotide probe
gcacgggaaagcggctgcacgggaaagcggctttgcaagcgtccgggaggctttgcgcaccgtg

SEQ ID NO: 4254 - DNA, 64 bp, Artificial
  oligonucleotide probe
gcacgggaaagcggctgcacgggaaagcggctttcggggaaacgccgtaacgcgatttgccgca

SEQ ID NO: 4255 - DNA, 64 bp, Artificial
  oligonucleotide probe
ggctgcacggtcccgtggctgcacggtcccgtgcacgggaaagcggctaacgcgatttgccgca

SEQ ID NO: 4256 - DNA, 64 bp, Artificial
  oligonucleotide probe
gcaccgcagctgcgtggcaccgcagctgcgtgatggcgcagcacgctgccgtttcggctgggct

SEQ ID NO: 4257 - DNA, 64 bp, Artificial
  oligonucleotide probe
ccgtcgcaaagcgcacccgtcgcaaagcgcacgcacgggaaagcggctccgtttcggctgggct

SEQ ID NO: 4258 - DNA, 64 bp, Artificial
  oligonucleotide probe
cgcattgcggctttcgcgcattgcggctttcgttgcaagcgtccgggattgcatggcgtgggga

SEQ ID NO: 4259 - DNA, 64 bp, Artificial
  oligonucleotide probe
ttcggggaaacgccgtttcggggaaacgccgtgcacgggaaagcggctaacggctgcaagcgca

SEQ ID NO: 4260 - DNA, 64 bp, Artificial
  oligonucleotide probe
gcacgggaaagcggctgcacgggaaagcggctaagccgtgcgcaacgacgcattgcggctttcg

SEQ ID NO: 4261 - DNA, 64 bp, Artificial
  oligonucleotide probe
ggctttgcgcaccgtgggctttgcgcaccgtgatggcgcagcacgctggcacgggaaagcggct

SEQ ID NO: 4262 - DNA, 64 bp, Artificial
  oligonucleotide probe
ccgtcgcaaagcgcacccgtcgcaaagcgcacgcacgggaaagcggctatggcgcagcacgctg

SEQ ID NO: 4263 - DNA, 64 bp, Artificial
  oligonucleotide probe
ttcgccgtttgcgctgttcgccgtttgcgctggggattcgcgcaaacggcaccgcagctgcgtg

SEQ ID NO: 4264 - DNA, 64 bp, Artificial
  oligonucleotide probe
ttgcatggcgtggggattgcatggcgtggggaccgtcgcaaagcgcacgggattcgcgcaaacg

SEQ ID NO: 4265 - DNA, 64 bp, Artificial
  oligonucleotide probe
gggattcgcgcaaacggggattcgcgcaaacgttgcatggcgtggggattcggggaaacgccgt

SEQ ID NO: 4266 - DNA, 64 bp, Artificial
  oligonucleotide probe
atggcgcagcacgctgatggcgcagcacgctgttcggggaaacgccgtgcaccgcagctgcgtg

SEQ ID NO: 4267 - DNA, 64 bp, Artificial
  oligonucleotide probe
gcaccgcagctgcgtggcaccgcagctgcgtgccgtttcggctgggctggctgcacggtcccgt

SEQ ID NO: 4268 - DNA, 64 bp, Artificial
  oligonucleotide probe
gggattcgcgcaaacggggattcgcgcaaacgaacgcgatttgccgcattcgccgtttgcgctg

SEQ ID NO: 4269 - DNA, 64 bp, Artificial
  oligonucleotide probe
ccgtttcggctgggctccgtttcggctgggctccgtcgcaaagcgcacgcacgggaaagcggct

SEQ ID NO: 4270 - DNA, 64 bp, Artificial
  oligonucleotide probe
gcaccgcagctgcgtggcaccgcagctgcgtgggctgcacggtcccgtttgcatggcgtgggga

SEQ ID NO: 4271 - DNA, 64 bp, Artificial
  oligonucleotide probe
ttgcatggcgtggggattgcatggcgtggggagcacgggaaagcggctaacgcgatttgccgca

SEQ ID NO: 4272 - DNA, 64 bp, Artificial
  oligonucleotide probe
aacgcgatttgccgcaaacgcgatttgccgcattgcatggcgtggggaggctttgcgcaccgtg

SEQ ID NO: 4273 - DNA, 64 bp, Artificial
  oligonucleotide probe
aacgcgatttgccgcaaacgcgatttgccgcagggattcgcgcaaacgaacggctgcaagcgca

SEQ ID NO: 4274 - DNA, 64 bp, Artificial
  oligonucleotide probe
gggattcgcgcaaacggggattcgcgcaaacgttgcatggcgtggggaccgtcgcaaagcgcac

SEQ ID NO: 4275 - DNA, 64 bp, Artificial
  oligonucleotide probe
ttcgccgtttgcgctgttcgccgtttgcgctggggattcgcgcaaacgttgcatggcgtgggga

SEQ ID NO: 4276 - DNA, 64 bp, Artificial
  oligonucleotide probe
gcacgggaaagcggctgcacgggaaagcggctaacggctgcaagcgcattgcatggcgtgggga

SEQ ID NO: 4277 - DNA, 64 bp, Artificial
  oligonucleotide probe
gcaccgcagctgcgtggcaccgcagctgcgtgcgcattgcggctttcgggctgcacggtcccgt

SEQ ID NO: 4278 - DNA, 64 bp, Artificial
  oligonucleotide probe
gggattcgcgcaaacggggattcgcgcaaacgttgcaagcgtccgggaggctttgcgcaccgtg

SEQ ID NO: 4279 - DNA, 64 bp, Artificial
  oligonucleotide probe
ccgtttcggctgggctccgtttcggctgggctgcaccgcagctgcgtgttgcaagcgtccggga

SEQ ID NO: 4280 - DNA, 64 bp, Artificial
  oligonucleotide probe
gggattcgcgcaaacggggattcgcgcaaacggcacgggaaagcggctttgcaagcgtccggga

SEQ ID NO: 4281 - DNA, 64 bp, Artificial
  oligonucleotide probe
gggattcgcgcaaacggggattcgcgcaaacgttgcaagcgtccgggaaacgcgatttgccgca

SEQ ID NO: 4282 - DNA, 64 bp, Artificial
  oligonucleotide probe
gcaccgcagctgcgtggcaccgcagctgcgtgggctttgcgcaccgtgatggcgcagcacgctg

SEQ ID NO: 4283 - DNA, 64 bp, Artificial
  oligonucleotide probe
aacgcgatttgccgcaaacgcgatttgccgcattcgccgtttgcgctggggattcgcgcaaacg

SEQ ID NO: 4284 - DNA, 64 bp, Artificial
  oligonucleotide probe
ggctgcacggtcccgtggctgcacggtcccgtgggattcgcgcaaacgggctttgcgcaccgtg

SEQ ID NO: 4285 - DNA, 64 bp, Artificial
  oligonucleotide probe
atggcgcagcacgctgatggcgcagcacgctggggattcgcgcaaacggcaccgcagctgcgtg

SEQ ID NO: 4286 - DNA, 64 bp, Artificial
  oligonucleotide probe
ttgcatggcgtggggattgcatggcgtggggaatggcgcagcacgctgaacgcgatttgccgca

SEQ ID NO: 4287 - DNA, 64 bp, Artificial
  oligonucleotide probe
gggattcgcgcaaacggggattcgcgcaaacgccgtttcggctgggctaacgcgatttgccgca

SEQ ID NO: 4288 - DNA, 64 bp, Artificial
  oligonucleotide probe
ttcggggaaacgccgtttcggggaaacgccgtgcaccgcagctgcgtgaagccgtgcgcaacga

SEQ ID NO: 4289 - DNA, 64 bp, Artificial
  oligonucleotide probe
ttcggggaaacgccgtttcggggaaacgccgtttgcatggcgtggggaaagccgtgcgcaacga

SEQ ID NO: 4290 - DNA, 64 bp, Artificial
  oligonucleotide probe
ttgcatggcgtggggattgcatggcgtggggagcaccgcagctgcgtgggctgcacggtcccgt

SEQ ID NO: 4291 - DNA, 64 bp, Artificial
  oligonucleotide probe
ttcggggaaacgccgtttcggggaaacgccgtttcgccgtttgcgctggggattcgcgcaaacg

SEQ ID NO: 4292 - DNA, 64 bp, Artificial
  oligonucleotide probe
ggctgcacggtcccgtggctgcacggtcccgtgggattcgcgcaaacgccgtcgcaaagcgcac

SEQ ID NO: 4293 - DNA, 64 bp, Artificial
  oligonucleotide probe
ccgtttcggctgggctccgtttcggctgggctttgcatggcgtggggaggctttgcgcaccgtg

SEQ ID NO: 4294 - DNA, 64 bp, Artificial
  oligonucleotide probe
ttcggggaaacgccgtttcggggaaacgccgtccgtttcggctgggctttgcatggcgtgggga

SEQ ID NO: 4295 - DNA, 64 bp, Artificial
  oligonucleotide probe
ggctttgcgcaccgtgggctttgcgcaccgtgccgtttcggctgggctgggattcgcgcaaacg

SEQ ID NO: 4296 - DNA, 64 bp, Artificial
  oligonucleotide probe
cgcattgcggctttcgcgcattgcggctttcgttcggggaaacgccgtgcacgggaaagcggct

SEQ ID NO: 4297 - DNA, 64 bp, Artificial
  oligonucleotide probe
gcacgggaaagcggctgcacgggaaagcggctatggcgcagcacgctgaacgcgatttgccgca

SEQ ID NO: 4298 - DNA, 64 bp, Artificial
  oligonucleotide probe
ttgcatggcgtggggattgcatggcgtggggagcaccgcagctgcgtgggctttgcgcaccgtg

SEQ ID NO: 4299 - DNA, 64 bp, Artificial
  oligonucleotide probe
gcacgggaaagcggctgcacgggaaagcggctaacggctgcaagcgcagcaccgcagctgcgtg

SEQ ID NO: 4300 - DNA, 64 bp, Artificial
  oligonucleotide probe
aacgcgatttgccgcaaacgcgatttgccgcagcaccgcagctgcgtgatggcgcagcacgctg

SEQ ID NO: 4301 - DNA, 64 bp, Artificial
  oligonucleotide probe
gggattcgcgcaaacggggattcgcgcaaacgatggcgcagcacgctgccgtttcggctgggct

SEQ ID NO: 4302 - DNA, 64 bp, Artificial
  oligonucleotide probe
gcaccgcagctgcgtggcaccgcagctgcgtgttgcaagcgtccgggaatggcgcagcacgctg

SEQ ID NO: 4303 - DNA, 64 bp, Artificial
  oligonucleotide probe
gcaccgcagctgcgtggcaccgcagctgcgtgatggcgcagcacgctgaacgcgatttgccgca

SEQ ID NO: 4304 - DNA, 64 bp, Artificial
  oligonucleotide probe
aagccgtgcgcaacgaaagccgtgcgcaacgagggattcgcgcaaacggcaccgcagctgcgtg

SEQ ID NO: 4305 - DNA, 64 bp, Artificial
  oligonucleotide probe
ccgtttcggctgggctccgtttcggctgggctaacgcgatttgccgcattgcatggcgtgggga

SEQ ID NO: 4306 - DNA, 64 bp, Artificial
  oligonucleotide probe
aacgcgatttgccgcaaacgcgatttgccgcagcaccgcagctgcgtgaagccgtgcgcaacga

SEQ ID NO: 4307 - DNA, 64 bp, Artificial
  oligonucleotide probe
cgcattgcggctttcgcgcattgcggctttcgttcgccgtttgcgctggcaccgcagctgcgtg

SEQ ID NO: 4308 - DNA, 64 bp, Artificial
  oligonucleotide probe
ggctttgcgcaccgtgggctttgcgcaccgtgttgcatggcgtggggagcaccgcagctgcgtg

SEQ ID NO: 4309 - DNA, 64 bp, Artificial
  oligonucleotide probe
aacggctgcaagcgcaaacggctgcaagcgcattcggggaaacgccgtgcaccgcagctgcgtg

SEQ ID NO: 4310 - DNA, 64 bp, Artificial
  oligonucleotide probe
ttcgccgtttgcgctgttcgccgtttgcgctggggattcgcgcaaacggcacgggaaagcggct

SEQ ID NO: 4311 - DNA, 64 bp, Artificial
  oligonucleotide probe
ttcggggaaacgccgtttcggggaaacgccgtgggattcgcgcaaacgggctttgcgcaccgtg

SEQ ID NO: 4312 - DNA, 64 bp, Artificial
  oligonucleotide probe
gcaccgcagctgcgtggcaccgcagctgcgtgggctttgcgcaccgtgggctgcacggtcccgt

SEQ ID NO: 4313 - DNA, 64 bp, Artificial
  oligonucleotide probe
ttgcatggcgtggggattgcatggcgtggggattcggggaaacgccgtgggattcgcgcaaacg

SEQ ID NO: 4314 - DNA, 64 bp, Artificial
  oligonucleotide probe
ccgtttcggctgggctccgtttcggctgggctgggattcgcgcaaacgttgcaagcgtccggga

SEQ ID NO: 4315 - DNA, 64 bp, Artificial
  oligonucleotide probe
gggattcgcgcaaacggggattcgcgcaaacgttgcatggcgtggggaaacggctgcaagcgca

SEQ ID NO: 4316 - DNA, 64 bp, Artificial
  oligonucleotide probe
ttgcatggcgtggggattgcatggcgtggggaaagccgtgcgcaacgaaacggctgcaagcgca

SEQ ID NO: 4317 - DNA, 64 bp, Artificial
  oligonucleotide probe
ttgcatggcgtggggattgcatggcgtggggattgcaagcgtccgggaggctgcacggtcccgt

SEQ ID NO: 4318 - DNA, 64 bp, Artificial
  oligonucleotide probe
ggctttgcgcaccgtgggctttgcgcaccgtggggattcgcgcaaacgaagccgtgcgcaacga

SEQ ID NO: 4319 - DNA, 64 bp, Artificial
  oligonucleotide probe
cgcattgcggctttcgcgcattgcggctttcggggattcgcgcaaacgttgcatggcgtgggga

SEQ ID NO: 4320 - DNA, 64 bp, Artificial
  oligonucleotide probe
ttgcatggcgtggggattgcatggcgtggggaccgtttcggctgggctccgtcgcaaagcgcac

SEQ ID NO: 4321 - DNA, 64 bp, Artificial
  oligonucleotide probe
ttcggggaaacgccgtttcggggaaacgccgtccgtttcggctgggctgcaccgcagctgcgtg

SEQ ID NO: 4322 - DNA, 64 bp, Artificial
  oligonucleotide probe
ttcggggaaacgccgtttcggggaaacgccgtttgcatggcgtggggacgcattgcggctttcg

SEQ ID NO: 4323 - DNA, 64 bp, Artificial
  oligonucleotide probe
ttgcatggcgtggggattgcatggcgtggggattgcaagcgtccgggaaacggctgcaagcgca

SEQ ID NO: 4324 - DNA, 64 bp, Artificial
  oligonucleotide probe
ccgtttcggctgggctccgtttcggctgggctgcacgggaaagcggctaagccgtgcgcaacga

SEQ ID NO: 4325 - DNA, 64 bp, Artificial
  oligonucleotide probe
ccgtttcggctgggctccgtttcggctgggctggctgcacggtcccgtgcacgggaaagcggct

SEQ ID NO: 4326 - DNA, 64 bp, Artificial
  oligonucleotide probe
ggctgcacggtcccgtggctgcacggtcccgtgggattcgcgcaaacgttcgccgtttgcgctg

SEQ ID NO: 4327 - DNA, 64 bp, Artificial
  oligonucleotide probe
ttcgccgtttgcgctgttcgccgtttgcgctgccgtcgcaaagcgcacgcacgggaaagcggct

SEQ ID NO: 4328 - DNA, 64 bp, Artificial
  oligonucleotide probe
gcacgggaaagcggctgcacgggaaagcggctttcggggaaacgccgtggctgcacggtcccgt

SEQ ID NO: 4329 - DNA, 64 bp, Artificial
  oligonucleotide probe
ccgtcgcaaagcgcacccgtcgcaaagcgcacgcacgggaaagcggctttcggggaaacgccgt

SEQ ID NO: 4330 - DNA, 64 bp, Artificial
  oligonucleotide probe
ttgcatggcgtggggattgcatggcgtggggacgcattgcggctttcgaacggctgcaagcgca

SEQ ID NO: 4331 - DNA, 64 bp, Artificial
  oligonucleotide probe
gcacgggaaagcggctgcacgggaaagcggctttgcatggcgtggggagcaccgcagctgcgtg

SEQ ID NO: 4332 - DNA, 64 bp, Artificial
  oligonucleotide probe
gcaccgcagctgcgtggcaccgcagctgcgtgcgcattgcggctttcgccgtcgcaaagcgcac

SEQ ID NO: 4333 - DNA, 64 bp, Artificial
  oligonucleotide probe
gcaccgcagctgcgtggcaccgcagctgcgtgcgcattgcggctttcgttcgccgtttgcgctg

SEQ ID NO: 4334 - DNA, 64 bp, Artificial
  oligonucleotide probe
atggcgcagcacgctgatggcgcagcacgctggggattcgcgcaaacgttgcatggcgtgggga

SEQ ID NO: 4335 - DNA, 64 bp, Artificial
  oligonucleotide probe
gcaccgcagctgcgtggcaccgcagctgcgtggcacgggaaagcggctttgcaagcgtccggga

SEQ ID NO: 4336 - DNA, 64 bp, Artificial
  oligonucleotide probe
gcacgggaaagcggctgcacgggaaagcggctggctgcacggtcccgtgggattcgcgcaaacg

SEQ ID NO: 4337 - DNA, 64 bp, Artificial
  oligonucleotide probe
ccgtcgcaaagcgcacccgtcgcaaagcgcacttgcatggcgtggggaccgtttcggctgggct

SEQ ID NO: 4338 - DNA, 64 bp, Artificial
  oligonucleotide probe
gcaccgcagctgcgtggcaccgcagctgcgtggcacgggaaagcggctatggcgcagcacgctg

SEQ ID NO: 4339 - DNA, 64 bp, Artificial
  oligonucleotide probe
ttgcatggcgtggggattgcatggcgtggggaggctgcacggtcccgtgggattcgcgcaaacg

SEQ ID NO: 4340 - DNA, 64 bp, Artificial
  oligonucleotide probe
ttcgccgtttgcgctgttcgccgtttgcgctgttgcatggcgtggggagcacgggaaagcggct

SEQ ID NO: 4341 - DNA, 64 bp, Artificial
  oligonucleotide probe
ttgcatggcgtggggattgcatggcgtggggattcggggaaacgccgtccgtttcggctgggct

SEQ ID NO: 4342 - DNA, 64 bp, Artificial
  oligonucleotide probe
gcacgggaaagcggctgcacgggaaagcggctaacggctgcaagcgcaccgtttcggctgggct

SEQ ID NO: 4343 - DNA, 64 bp, Artificial
  oligonucleotide probe
ttcgccgtttgcgctgttcgccgtttgcgctgggctgcacggtcccgtgcacgggaaagcggct

SEQ ID NO: 4344 - DNA, 64 bp, Artificial
  oligonucleotide probe
aacggctgcaagcgcaaacggctgcaagcgcattcgccgtttgcgctgttgcatggcgtgggga

SEQ ID NO: 4345 - DNA, 64 bp, Artificial
  oligonucleotide probe
ggctgcacggtcccgtggctgcacggtcccgtttgcatggcgtggggaaacggctgcaagcgca

SEQ ID NO: 4346 - DNA, 64 bp, Artificial
  oligonucleotide probe
gcacgggaaagcggctgcacgggaaagcggctaagccgtgcgcaacgaaacgcgatttgccgca

SEQ ID NO: 4347 - DNA, 64 bp, Artificial
  oligonucleotide probe
ttcgccgtttgcgctgttcgccgtttgcgctggcacgggaaagcggctggctttgcgcaccgtg

SEQ ID NO: 4348 - DNA, 64 bp, Artificial
  oligonucleotide probe
gcaccgcagctgcgtggcaccgcagctgcgtgaagccgtgcgcaacgattgcaagcgtccggga

SEQ ID NO: 4349 - DNA, 64 bp, Artificial
  oligonucleotide probe
ggctgcacggtcccgtggctgcacggtcccgtgcacgggaaagcggctttcggggaaacgccgt

SEQ ID NO: 4350 - DNA, 64 bp, Artificial
  oligonucleotide probe
gcaccgcagctgcgtggcaccgcagctgcgtgaacgcgatttgccgcattgcatggcgtgggga

SEQ ID NO: 4351 - DNA, 64 bp, Artificial
  oligonucleotide probe
gggattcgcgcaaacggggattcgcgcaaacgttgcatggcgtggggaatggcgcagcacgctg

SEQ ID NO: 4352 - DNA, 64 bp, Artificial
  oligonucleotide probe
aacggctgcaagcgcaaacggctgcaagcgcagcaccgcagctgcgtggcacgggaaagcggct

SEQ ID NO: 4353 - DNA, 64 bp, Artificial
  oligonucleotide probe
ttgcatggcgtggggattgcatggcgtggggaggctttgcgcaccgtgccgtcgcaaagcgcac

SEQ ID NO: 4354 - DNA, 64 bp, Artificial
  oligonucleotide probe
gggattcgcgcaaacggggattcgcgcaaacgggctttgcgcaccgtgttcggggaaacgccgt

SEQ ID NO: 4355 - DNA, 64 bp, Artificial
  oligonucleotide probe
ggctttgcgcaccgtgggctttgcgcaccgtgaacgcgatttgccgcagggattcgcgcaaacg

SEQ ID NO: 4356 - DNA, 64 bp, Artificial
  oligonucleotide probe
gcacgggaaagcggctgcacgggaaagcggctttcgccgtttgcgctggggattcgcgcaaacg

SEQ ID NO: 4357 - DNA, 64 bp, Artificial
  oligonucleotide probe
gcacgggaaagcggctgcacgggaaagcggctggctttgcgcaccgtgaacgcgatttgccgca

SEQ ID NO: 4358 - DNA, 64 bp, Artificial
  oligonucleotide probe
gcaccgcagctgcgtggcaccgcagctgcgtgaacggctgcaagcgcaccgtttcggctgggct

SEQ ID NO: 4359 - DNA, 64 bp, Artificial
  oligonucleotide probe
ccgtttcggctgggctccgtttcggctgggctgggattcgcgcaaacggcaccgcagctgcgtg

SEQ ID NO: 4360 - DNA, 64 bp, Artificial
  oligonucleotide probe
gggattcgcgcaaacggggattcgcgcaaacgcgcattgcggctttcgggctgcacggtcccgt

SEQ ID NO: 4361 - DNA, 64 bp, Artificial
  oligonucleotide probe
ttgcatggcgtggggattgcatggcgtggggaaacggctgcaagcgcaggctttgcgcaccgtg

SEQ ID NO: 4362 - DNA, 64 bp, Artificial
  oligonucleotide probe
ccgtcgcaaagcgcacccgtcgcaaagcgcacttgcatggcgtggggaaacgcgatttgccgca

SEQ ID NO: 4363 - DNA, 64 bp, Artificial
  oligonucleotide probe
ccgtttcggctgggctccgtttcggctgggctgggattcgcgcaaacgttgcatggcgtgggga

SEQ ID NO: 4364 - DNA, 64 bp, Artificial
  oligonucleotide probe
ttgcatggcgtggggattgcatggcgtggggagcaccgcagctgcgtgaagccgtgcgcaacga

SEQ ID NO: 4365 - DNA, 64 bp, Artificial
  oligonucleotide probe
gcaccgcagctgcgtggcaccgcagctgcgtgttcgccgtttgcgctgccgtcgcaaagcgcac

SEQ ID NO: 4366 - DNA, 64 bp, Artificial
  oligonucleotide probe
gggattcgcgcaaacggggattcgcgcaaacgcgcattgcggctttcgaacggctgcaagcgca

SEQ ID NO: 4367 - DNA, 64 bp, Artificial
  oligonucleotide probe
ggctttgcgcaccgtgggctttgcgcaccgtgttcgccgtttgcgctggcacgggaaagcggct

SEQ ID NO: 4368 - DNA, 64 bp, Artificial
  oligonucleotide probe
ggctttgcgcaccgtgggctttgcgcaccgtgttcgccgtttgcgctggcaccgcagctgcgtg

SEQ ID NO: 4369 - DNA, 64 bp, Artificial
  oligonucleotide probe
cgcattgcggctttcgcgcattgcggctttcgccgtcgcaaagcgcacgcaccgcagctgcgtg

SEQ ID NO: 4370 - DNA, 64 bp, Artificial
  oligonucleotide probe
gggattcgcgcaaacggggattcgcgcaaacgttgcaagcgtccgggaccgtcgcaaagcgcac

SEQ ID NO: 4371 - DNA, 64 bp, Artificial
  oligonucleotide probe
aagccgtgcgcaacgaaagccgtgcgcaacgattcgccgtttgcgctggcaccgcagctgcgtg

SEQ ID NO: 4372 - DNA, 64 bp, Artificial
  oligonucleotide probe
ggctttgcgcaccgtgggctttgcgcaccgtggggattcgcgcaaacgaacggctgcaagcgca

SEQ ID NO: 4373 - DNA, 64 bp, Artificial
  oligonucleotide probe
aagccgtgcgcaacgaaagccgtgcgcaacgaggctttgcgcaccgtgttgcatggcgtgggga

SEQ ID NO: 4374 - DNA, 64 bp, Artificial
  oligonucleotide probe
ttcgccgtttgcgctgttcgccgtttgcgctggcacgggaaagcggctcgcattgcggctttcg

SEQ ID NO: 4375 - DNA, 64 bp, Artificial
  oligonucleotide probe
ttgcatggcgtggggattgcatggcgtggggaaacgcgatttgccgcagggattcgcgcaaacg

SEQ ID NO: 4376 - DNA, 64 bp, Artificial
  oligonucleotide probe
ccgtttcggctgggctccgtttcggctgggctgcaccgcagctgcgtgggctttgcgcaccgtg

SEQ ID NO: 4377 - DNA, 64 bp, Artificial
  oligonucleotide probe
ccgtcgcaaagcgcacccgtcgcaaagcgcacggctgcacggtcccgtgcacgggaaagcggct

SEQ ID NO: 4378 - DNA, 64 bp, Artificial
  oligonucleotide probe
gggattcgcgcaaacggggattcgcgcaaacggcacgggaaagcggctccgtttcggctgggct

SEQ ID NO: 4379 - DNA, 64 bp, Artificial
  oligonucleotide probe
ccgtttcggctgggctccgtttcggctgggctttcgccgtttgcgctggggattcgcgcaaacg

SEQ ID NO: 4380 - DNA, 64 bp, Artificial
  oligonucleotide probe
ccgtcgcaaagcgcacccgtcgcaaagcgcacttgcatggcgtggggacgcattgcggctttcg

SEQ ID NO: 4381 - DNA, 64 bp, Artificial
  oligonucleotide probe
ttcgccgtttgcgctgttcgccgtttgcgctgccgtcgcaaagcgcacttgcatggcgtgggga

SEQ ID NO: 4382 - DNA, 64 bp, Artificial
  oligonucleotide probe
ggctttgcgcaccgtgggctttgcgcaccgtgttcgccgtttgcgctgttgcatggcgtgggga

SEQ ID NO: 4383 - DNA, 64 bp, Artificial
  oligonucleotide probe
gcaccgcagctgcgtggcaccgcagctgcgtggcacgggaaagcggctggctttgcgcaccgtg

SEQ ID NO: 4384 - DNA, 64 bp, Artificial
  oligonucleotide probe
gggattcgcgcaaacggggattcgcgcaaacgcgcattgcggctttcgatggcgcagcacgctg

SEQ ID NO: 4385 - DNA, 64 bp, Artificial
  oligonucleotide probe
cgcattgcggctttcgcgcattgcggctttcgaacggctgcaagcgcagcacgggaaagcggct

SEQ ID NO: 4386 - DNA, 64 bp, Artificial
  oligonucleotide probe
gcacgggaaagcggctgcacgggaaagcggctccgtcgcaaagcgcacggctgcacggtcccgt

SEQ ID NO: 4387 - DNA, 64 bp, Artificial
  oligonucleotide probe
gcaccgcagctgcgtggcaccgcagctgcgtgggctttgcgcaccgtgccgtcgcaaagcgcac

SEQ ID NO: 4388 - DNA, 64 bp, Artificial
  oligonucleotide probe
ttcgccgtttgcgctgttcgccgtttgcgctggggattcgcgcaaacgcgcattgcggctttcg

SEQ ID NO: 4389 - DNA, 64 bp, Artificial
  oligonucleotide probe
gggattcgcgcaaacggggattcgcgcaaacgttcggggaaacgccgtttcgccgtttgcgctg

SEQ ID NO: 4390 - DNA, 64 bp, Artificial
  oligonucleotide probe
gcacgggaaagcggctgcacgggaaagcggctttcgccgtttgcgctggcaccgcagctgcgtg

SEQ ID NO: 4391 - DNA, 64 bp, Artificial
  oligonucleotide probe
ttgcaagcgtccgggattgcaagcgtccgggaccgtcgcaaagcgcacttgcatggcgtgggga

SEQ ID NO: 4392 - DNA, 64 bp, Artificial
  oligonucleotide probe
ccgtttcggctgggctccgtttcggctgggctggctgcacggtcccgtgcaccgcagctgcgtg

SEQ ID NO: 4393 - DNA, 64 bp, Artificial
  oligonucleotide probe
gggattcgcgcaaacggggattcgcgcaaacgttgcatggcgtggggacgcattgcggctttcg

SEQ ID NO: 4394 - DNA, 64 bp, Artificial
  oligonucleotide probe
ttgcatggcgtggggattgcatggcgtggggaccgtcgcaaagcgcacggctgcacggtcccgt

SEQ ID NO: 4395 - DNA, 64 bp, Artificial
  oligonucleotide probe
gcaccgcagctgcgtggcaccgcagctgcgtgaagccgtgcgcaacgattcgccgtttgcgctg

SEQ ID NO: 4396 - DNA, 64 bp, Artificial
  oligonucleotide probe
aacggctgcaagcgcaaacggctgcaagcgcaggctttgcgcaccgtggcacgggaaagcggct

SEQ ID NO: 4397 - DNA, 64 bp, Artificial
  oligonucleotide probe
cgcattgcggctttcgcgcattgcggctttcgaacgcgatttgccgcagcaccgcagctgcgtg

SEQ ID NO: 4398 - DNA, 64 bp, Artificial
  oligonucleotide probe
ttcggggaaacgccgtttcggggaaacgccgtgcacgggaaagcggctatggcgcagcacgctg

SEQ ID NO: 4399 - DNA, 64 bp, Artificial
  oligonucleotide probe
ttgcatggcgtggggattgcatggcgtggggagcaccgcagctgcgtgcgcattgcggctttcg

SEQ ID NO: 4400 - DNA, 64 bp, Artificial
  oligonucleotide probe
ggctgcacggtcccgtggctgcacggtcccgtgcaccgcagctgcgtgttgcaagcgtccggga

SEQ ID NO: 4401 - DNA, 64 bp, Artificial
  oligonucleotide probe
gcacgggaaagcggctgcacgggaaagcggctccgtttcggctgggctaacgcgatttgccgca

SEQ ID NO: 4402 - DNA, 64 bp, Artificial
  oligonucleotide probe
ccgtcgcaaagcgcacccgtcgcaaagcgcacttgcatggcgtggggattcgccgtttgcgctg

SEQ ID NO: 4403 - DNA, 64 bp, Artificial
  oligonucleotide probe
ttgcatggcgtggggattgcatggcgtggggaaagccgtgcgcaacgattcgccgtttgcgctg

SEQ ID NO: 4404 - DNA, 64 bp, Artificial
  oligonucleotide probe
ttgcaagcgtccgggattgcaagcgtccgggagggattcgcgcaaacggcacgggaaagcggct

SEQ ID NO: 4405 - DNA, 64 bp, Artificial
  oligonucleotide probe
gcacgggaaagcggctgcacgggaaagcggctgggattcgcgcaaacgttgcatggcgtgggga

SEQ ID NO: 4406 - DNA, 64 bp, Artificial
  oligonucleotide probe
aagccgtgcgcaacgaaagccgtgcgcaacgattgcatggcgtggggagcaccgcagctgcgtg

SEQ ID NO: 4407 - DNA, 64 bp, Artificial
  oligonucleotide probe
ttgcatggcgtggggattgcatggcgtggggattcggggaaacgccgtttcgccgtttgcgctg

SEQ ID NO: 4408 - DNA, 64 bp, Artificial
  oligonucleotide probe
ttgcatggcgtggggattgcatggcgtggggacgcattgcggctttcgttcgccgtttgcgctg

SEQ ID NO: 4409 - DNA, 64 bp, Artificial
  oligonucleotide probe
ccgtcgcaaagcgcacccgtcgcaaagcgcacgggattcgcgcaaacgaacggctgcaagcgca

SEQ ID NO: 4410 - DNA, 64 bp, Artificial
  oligonucleotide probe
ttgcaagcgtccgggattgcaagcgtccgggagcaccgcagctgcgtgaagccgtgcgcaacga

SEQ ID NO: 4411 - DNA, 64 bp, Artificial
  oligonucleotide probe
gcacgggaaagcggctgcacgggaaagcggctggctgcacggtcccgtttgcatggcgtgggga

SEQ ID NO: 4412 - DNA, 64 bp, Artificial
  oligonucleotide probe
ttgcaagcgtccgggattgcaagcgtccgggaggctttgcgcaccgtggcaccgcagctgcgtg

SEQ ID NO: 4413 - DNA, 64 bp, Artificial
  oligonucleotide probe
gcacgggaaagcggctgcacgggaaagcggctaagccgtgcgcaacgattgcatggcgtgggga

SEQ ID NO: 4414 - DNA, 64 bp, Artificial
  oligonucleotide probe
aacggctgcaagcgcaaacggctgcaagcgcaatggcgcagcacgctgttgcatggcgtgggga

SEQ ID NO: 4415 - DNA, 64 bp, Artificial
  oligonucleotide probe
ttcggggaaacgccgtttcggggaaacgccgtccgtcgcaaagcgcacgggattcgcgcaaacg

SEQ ID NO: 4416 - DNA, 64 bp, Artificial
  oligonucleotide probe
ccgtttcggctgggctccgtttcggctgggctgggattcgcgcaaacgaagccgtgcgcaacga

SEQ ID NO: 4417 - DNA, 64 bp, Artificial
  oligonucleotide probe
gggattcgcgcaaacggggattcgcgcaaacgatggcgcagcacgctgttcggggaaacgccgt

SEQ ID NO: 4418 - DNA, 64 bp, Artificial
  oligonucleotide probe
aacgcgatttgccgcaaacgcgatttgccgcagcaccgcagctgcgtgcgcattgcggctttcg

SEQ ID NO: 4419 - DNA, 64 bp, Artificial
  oligonucleotide probe
gggattcgcgcaaacggggattcgcgcaaacgaacggctgcaagcgcaggctgcacggtcccgt

SEQ ID NO: 4420 - DNA, 64 bp, Artificial
  oligonucleotide probe
gcaccgcagctgcgtggcaccgcagctgcgtgaacggctgcaagcgcagggattcgcgcaaacg

SEQ ID NO: 4421 - DNA, 64 bp, Artificial
  oligonucleotide probe
gcaccgcagctgcgtggcaccgcagctgcgtgccgtttcggctgggctaacgcgatttgccgca

SEQ ID NO: 4422 - DNA, 64 bp, Artificial
  oligonucleotide probe
gggattcgcgcaaacggggattcgcgcaaacgaagccgtgcgcaacgacgcattgcggctttcg

SEQ ID NO: 4423 - DNA, 64 bp, Artificial
  oligonucleotide probe
ttcgccgtttgcgctgttcgccgtttgcgctgccgtcgcaaagcgcacgggattcgcgcaaacg

SEQ ID NO: 4424 - DNA, 64 bp, Artificial
  oligonucleotide probe
gggattcgcgcaaacggggattcgcgcaaacggcaccgcagctgcgtgccgtcgcaaagcgcac

SEQ ID NO: 4425 - DNA, 64 bp, Artificial
  oligonucleotide probe
gcaccgcagctgcgtggcaccgcagctgcgtgaacggctgcaagcgcaatggcgcagcacgctg

SEQ ID NO: 4426 - DNA, 64 bp, Artificial
  oligonucleotide probe
ccgtttcggctgggctccgtttcggctgggctgcacgggaaagcggctaacggctgcaagcgca

SEQ ID NO: 4427 - DNA, 64 bp, Artificial
  oligonucleotide probe
ttgcatggcgtggggattgcatggcgtggggacgcattgcggctttcgggctgcacggtcccgt

SEQ ID NO: 4428 - DNA, 64 bp, Artificial
  oligonucleotide probe
aacgcgatttgccgcaaacgcgatttgccgcagcaccgcagctgcgtgccgtttcggctgggct

SEQ ID NO: 4429 - DNA, 64 bp, Artificial
  oligonucleotide probe
ggctgcacggtcccgtggctgcacggtcccgtgcacgggaaagcggctatggcgcagcacgctg

SEQ ID NO: 4430 - DNA, 64 bp, Artificial
  oligonucleotide probe
cgcattgcggctttcgcgcattgcggctttcgttgcaagcgtccgggagcacgggaaagcggct

SEQ ID NO: 4431 - DNA, 64 bp, Artificial
  oligonucleotide probe
gggattcgcgcaaacggggattcgcgcaaacggcaccgcagctgcgtgttgcaagcgtccggga

SEQ ID NO: 4432 - DNA, 64 bp, Artificial
  oligonucleotide probe
ttgcatggcgtggggattgcatggcgtggggacgcattgcggctttcgttcggggaaacgccgt

SEQ ID NO: 4433 - DNA, 64 bp, Artificial
  oligonucleotide probe
gcacgggaaagcggctgcacgggaaagcggctttgcaagcgtccgggagcaccgcagctgcgtg

SEQ ID NO: 4434 - DNA, 64 bp, Artificial
  oligonucleotide probe
aacgcgatttgccgcaaacgcgatttgccgcattgcatggcgtggggattcggggaaacgccgt

SEQ ID NO: 4435 - DNA, 64 bp, Artificial
  oligonucleotide probe
ttgcaagcgtccgggattgcaagcgtccgggagggattcgcgcaaacggcaccgcagctgcgtg

SEQ ID NO: 4436 - DNA, 64 bp, Artificial
  oligonucleotide probe
aacggctgcaagcgcaaacggctgcaagcgcattcggggaaacgccgtgcacgggaaagcggct

SEQ ID NO: 4437 - DNA, 64 bp, Artificial
  oligonucleotide probe
cgcattgcggctttcgcgcattgcggctttcggcaccgcagctgcgtggcacgggaaagcggct

SEQ ID NO: 4438 - DNA, 64 bp, Artificial
  oligonucleotide probe
aagccgtgcgcaacgaaagccgtgcgcaacgagggattcgcgcaaacggcacgggaaagcggct

SEQ ID NO: 4439 - DNA, 64 bp, Artificial
  oligonucleotide probe
ggctgcacggtcccgtggctgcacggtcccgtgggattcgcgcaaacgttgcatggcgtgggga

SEQ ID NO: 4440 - DNA, 64 bp, Artificial
  oligonucleotide probe
ttcggggaaacgccgtttcggggaaacgccgtgcacgggaaagcggctaagccgtgcgcaacga

SEQ ID NO: 4441 - DNA, 64 bp, Artificial
  oligonucleotide probe
gggattcgcgcaaacggggattcgcgcaaacgaacggctgcaagcgcattcggggaaacgccgt

SEQ ID NO: 4442 - DNA, 64 bp, Artificial
  oligonucleotide probe
ttcgccgtttgcgctgttcgccgtttgcgctggggattcgcgcaaacgccgtttcggctgggct

SEQ ID NO: 4443 - DNA, 64 bp, Artificial
  oligonucleotide probe
gcaccgcagctgcgtggcaccgcagctgcgtgccgtttcggctgggctgggattcgcgcaaacg

SEQ ID NO: 4444 - DNA, 64 bp, Artificial
  oligonucleotide probe
ttgcaagcgtccgggattgcaagcgtccgggattcgccgtttgcgctggcaccgcagctgcgtg

SEQ ID NO: 4445 - DNA, 64 bp, Artificial
  oligonucleotide probe
ccgtttcggctgggctccgtttcggctgggctttgcatggcgtggggaaacggctgcaagcgca

SEQ ID NO: 4446 - DNA, 64 bp, Artificial
  oligonucleotide probe
ttgcaagcgtccgggattgcaagcgtccgggaccgtttcggctgggctttgcatggcgtgggga

SEQ ID NO: 4447 - DNA, 64 bp, Artificial
  oligonucleotide probe
aagccgtgcgcaacgaaagccgtgcgcaacgaccgtttcggctgggctgcaccgcagctgcgtg

SEQ ID NO: 4448 - DNA, 64 bp, Artificial
  oligonucleotide probe
ttgcaagcgtccgggattgcaagcgtccgggaggctttgcgcaccgtggcacgggaaagcggct

SEQ ID NO: 4449 - DNA, 64 bp, Artificial
  oligonucleotide probe
ccgtcgcaaagcgcacccgtcgcaaagcgcacgggattcgcgcaaacgttgcatggcgtgggga

SEQ ID NO: 4450 - DNA, 64 bp, Artificial
  oligonucleotide probe
ttgcatggcgtggggattgcatggcgtggggaaacgcgatttgccgcaggctgcacggtcccgt

SEQ ID NO: 4451 - DNA, 64 bp, Artificial
  oligonucleotide probe
ttgcatggcgtggggattgcatggcgtggggagcaccgcagctgcgtgttcggggaaacgccgt

SEQ ID NO: 4452 - DNA, 64 bp, Artificial
  oligonucleotide probe
cgcattgcggctttcgcgcattgcggctttcgttcgccgtttgcgctggcacgggaaagcggct

SEQ ID NO: 4453 - DNA, 64 bp, Artificial
  oligonucleotide probe
aagccgtgcgcaacgaaagccgtgcgcaacgattgcaagcgtccgggattgcatggcgtgggga

SEQ ID NO: 4454 - DNA, 64 bp, Artificial
  oligonucleotide probe
aacgcgatttgccgcaaacgcgatttgccgcagggattcgcgcaaacgcgcattgcggctttcg

SEQ ID NO: 4455 - DNA, 64 bp, Artificial
  oligonucleotide probe
ggctgcacggtcccgtggctgcacggtcccgtgcacgggaaagcggctaacggctgcaagcgca

SEQ ID NO: 4456 - DNA, 64 bp, Artificial
  oligonucleotide probe
cgcattgcggctttcgcgcattgcggctttcggggattcgcgcaaacggcacgggaaagcggct

SEQ ID NO: 4457 - DNA, 64 bp, Artificial
  oligonucleotide probe
gggattcgcgcaaacggggattcgcgcaaacgaagccgtgcgcaacgattcggggaaacgccgt

SEQ ID NO: 4458 - DNA, 64 bp, Artificial
  oligonucleotide probe
ccgtcgcaaagcgcacccgtcgcaaagcgcacgcacgggaaagcggctttcgccgtttgcgctg

SEQ ID NO: 4459 - DNA, 64 bp, Artificial
  oligonucleotide probe
atggcgcagcacgctgatggcgcagcacgctgccgtttcggctgggctgggattcgcgcaaacg

SEQ ID NO: 4460 - DNA, 64 bp, Artificial
  oligonucleotide probe
ggctttgcgcaccgtgggctttgcgcaccgtggcaccgcagctgcgtgaacggctgcaagcgca

SEQ ID NO: 4461 - DNA, 64 bp, Artificial
  oligonucleotide probe
gcacgggaaagcggctgcacgggaaagcggctaagccgtgcgcaacgattgcaagcgtccggga

SEQ ID NO: 4462 - DNA, 64 bp, Artificial
  oligonucleotide probe
atggcgcagcacgctgatggcgcagcacgctggcaccgcagctgcgtggcacgggaaagcggct

SEQ ID NO: 4463 - DNA, 64 bp, Artificial
  oligonucleotide probe
aacggctgcaagcgcaaacggctgcaagcgcagggattcgcgcaaacgcgcattgcggctttcg

SEQ ID NO: 4464 - DNA, 64 bp, Artificial
  oligonucleotide probe
ttgcatggcgtggggattgcatggcgtggggagcacgggaaagcggctttgcaagcgtccggga

SEQ ID NO: 4465 - DNA, 64 bp, Artificial
  oligonucleotide probe
ggctttgcgcaccgtgggctttgcgcaccgtgttgcatggcgtggggaaacggctgcaagcgca

SEQ ID NO: 4466 - DNA, 64 bp, Artificial
  oligonucleotide probe
ttgcaagcgtccgggattgcaagcgtccgggattcgccgtttgcgctgttgcatggcgtgggga

SEQ ID NO: 4467 - DNA, 64 bp, Artificial
  oligonucleotide probe
ggctttgcgcaccgtgggctttgcgcaccgtgatggcgcagcacgctgttgcatggcgtgggga

SEQ ID NO: 4468 - DNA, 64 bp, Artificial
  oligonucleotide probe
gggattcgcgcaaacggggattcgcgcaaacggcacgggaaagcggctttcggggaaacgccgt

SEQ ID NO: 4469 - DNA, 64 bp, Artificial
  oligonucleotide probe
ccgtcgcaaagcgcacccgtcgcaaagcgcacgcaccgcagctgcgtgggctttgcgcaccgtg

SEQ ID NO: 4470 - DNA, 64 bp, Artificial
  oligonucleotide probe
ttgcatggcgtggggattgcatggcgtggggaaacggctgcaagcgcaatggcgcagcacgctg

SEQ ID NO: 4471 - DNA, 64 bp, Artificial
  oligonucleotide probe
gggattcgcgcaaacggggattcgcgcaaacgggctttgcgcaccgtgttcgccgtttgcgctg

SEQ ID NO: 4472 - DNA, 64 bp, Artificial
  oligonucleotide probe
ggctttgcgcaccgtgggctttgcgcaccgtgttcgccgtttgcgctggggattcgcgcaaacg

SEQ ID NO: 4473 - DNA, 64 bp, Artificial
  oligonucleotide probe
aagccgtgcgcaacgaaagccgtgcgcaacgaatggcgcagcacgctggcaccgcagctgcgtg

SEQ ID NO: 4474 - DNA, 64 bp, Artificial
  oligonucleotide probe
gcacgggaaagcggctgcacgggaaagcggctttgcaagcgtccgggattcgccgtttgcgctg

SEQ ID NO: 4475 - DNA, 64 bp, Artificial
  oligonucleotide probe
aacggctgcaagcgcaaacggctgcaagcgcagcaccgcagctgcgtgaagccgtgcgcaacga

SEQ ID NO: 4476 - DNA, 64 bp, Artificial
  oligonucleotide probe
aacggctgcaagcgcaaacggctgcaagcgcattcgccgtttgcgctggggattcgcgcaaacg

SEQ ID NO: 4477 - DNA, 64 bp, Artificial
  oligonucleotide probe
cgcattgcggctttcgcgcattgcggctttcgttgcatggcgtggggagcaccgcagctgcgtg

SEQ ID NO: 4478 - DNA, 64 bp, Artificial
  oligonucleotide probe
gcacgggaaagcggctgcacgggaaagcggctggctgcacggtcccgtgcaccgcagctgcgtg

SEQ ID NO: 4479 - DNA, 64 bp, Artificial
  oligonucleotide probe
ccgtttcggctgggctccgtttcggctgggctgggattcgcgcaaacgcgcattgcggctttcg

SEQ ID NO: 4480 - DNA, 64 bp, Artificial
  oligonucleotide probe
gcaccgcagctgcgtggcaccgcagctgcgtgttgcaagcgtccgggaccgtcgcaaagcgcac

SEQ ID NO: 4481 - DNA, 64 bp, Artificial
  oligonucleotide probe
ttgcatggcgtggggattgcatggcgtggggacgcattgcggctttcggggattcgcgcaaacg

SEQ ID NO: 4482 - DNA, 64 bp, Artificial
  oligonucleotide probe
gcacgggaaagcggctgcacgggaaagcggctttcggggaaacgccgtgggattcgcgcaaacg

SEQ ID NO: 4483 - DNA, 64 bp, Artificial
  oligonucleotide probe
cgcattgcggctttcgcgcattgcggctttcgccgtcgcaaagcgcacttgcatggcgtgggga

SEQ ID NO: 4484 - DNA, 64 bp, Artificial
  oligonucleotide probe
gcacgggaaagcggctgcacgggaaagcggctcgcattgcggctttcgaacggctgcaagcgca

SEQ ID NO: 4485 - DNA, 64 bp, Artificial
  oligonucleotide probe
ttgcatggcgtggggattgcatggcgtggggaggctttgcgcaccgtgatggcgcagcacgctg

SEQ ID NO: 4486 - DNA, 64 bp, Artificial
  oligonucleotide probe
cgcattgcggctttcgcgcattgcggctttcgccgtttcggctgggctgcacgggaaagcggct

SEQ ID NO: 4487 - DNA, 64 bp, Artificial
  oligonucleotide probe
ttcgccgtttgcgctgttcgccgtttgcgctggggattcgcgcaaacgaacgcgatttgccgca

SEQ ID NO: 4488 - DNA, 64 bp, Artificial
  oligonucleotide probe
ccgtcgcaaagcgcacccgtcgcaaagcgcacttgcatggcgtggggaaagccgtgcgcaacga

SEQ ID NO: 4489 - DNA, 64 bp, Artificial
  oligonucleotide probe
gcaccgcagctgcgtggcaccgcagctgcgtgaagccgtgcgcaacgattcggggaaacgccgt

SEQ ID NO: 4490 - DNA, 64 bp, Artificial
  oligonucleotide probe
ttgcaagcgtccgggattgcaagcgtccgggagggattcgcgcaaacgttgcatggcgtgggga

SEQ ID NO: 4491 - DNA, 64 bp, Artificial
  oligonucleotide probe
atggcgcagcacgctgatggcgcagcacgctgttgcatggcgtggggaaagccgtgcgcaacga

SEQ ID NO: 4492 - DNA, 64 bp, Artificial
  oligonucleotide probe
ccgtcgcaaagcgcacccgtcgcaaagcgcacgcacgggaaagcggctaagccgtgcgcaacga

SEQ ID NO: 4493 - DNA, 64 bp, Artificial
  oligonucleotide probe
cgcattgcggctttcgcgcattgcggctttcgaacggctgcaagcgcagcaccgcagctgcgtg

SEQ ID NO: 4494 - DNA, 64 bp, Artificial
  oligonucleotide probe
aagccgtgcgcaacgaaagccgtgcgcaacgattcggggaaacgccgtgggattcgcgcaaacg

SEQ ID NO: 4495 - DNA, 64 bp, Artificial
  oligonucleotide probe
ttgcatggcgtggggattgcatggcgtggggagcaccgcagctgcgtgttgcaagcgtccggga

SEQ ID NO: 4496 - DNA, 64 bp, Artificial
  oligonucleotide probe
cgcattgcggctttcgcgcattgcggctttcgttcgccgtttgcgctgttgcatggcgtgggga

SEQ ID NO: 4497 - DNA, 64 bp, Artificial
  oligonucleotide probe
gcaccgcagctgcgtggcaccgcagctgcgtgttgcaagcgtccgggaaacgcgatttgccgca

SEQ ID NO: 4498 - DNA, 64 bp, Artificial
  oligonucleotide probe
cgcattgcggctttcgcgcattgcggctttcgccgtttcggctgggctgggattcgcgcaaacg

SEQ ID NO: 4499 - DNA, 64 bp, Artificial
  oligonucleotide probe
ttgcaagcgtccgggattgcaagcgtccgggaaacggctgcaagcgcagggattcgcgcaaacg

SEQ ID NO: 4500 - DNA, 64 bp, Artificial
  oligonucleotide probe
gcaccgcagctgcgtggcaccgcagctgcgtgcgcattgcggctttcgatggcgcagcacgctg

SEQ ID NO: 4501 - DNA, 64 bp, Artificial
  oligonucleotide probe
ccgtttcggctgggctccgtttcggctgggctgcaccgcagctgcgtgaacggctgcaagcgca

SEQ ID NO: 4502 - DNA, 64 bp, Artificial
  oligonucleotide probe
gcaccgcagctgcgtggcaccgcagctgcgtggcacgggaaagcggctccgtttcggctgggct

SEQ ID NO: 4503 - DNA, 64 bp, Artificial
  oligonucleotide probe
atggcgcagcacgctgatggcgcagcacgctgttgcatggcgtggggaggctttgcgcaccgtg

SEQ ID NO: 4504 - DNA, 64 bp, Artificial
  oligonucleotide probe
gggattcgcgcaaacggggattcgcgcaaacgttcgccgtttgcgctgggctgcacggtcccgt

SEQ ID NO: 4505 - DNA, 64 bp, Artificial
  oligonucleotide probe
ttcggggaaacgccgtttcggggaaacgccgtttcgccgtttgcgctgttgcatggcgtgggga

SEQ ID NO: 4506 - DNA, 64 bp, Artificial
  oligonucleotide probe
ttgcatggcgtggggattgcatggcgtggggagcaccgcagctgcgtgttcgccgtttgcgctg

SEQ ID NO: 4507 - DNA, 64 bp, Artificial
  oligonucleotide probe
ttgcaagcgtccgggattgcaagcgtccgggaggctttgcgcaccgtgttgcatggcgtgggga

SEQ ID NO: 4508 - DNA, 64 bp, Artificial
  oligonucleotide probe
ggctttgcgcaccgtgggctttgcgcaccgtgttcggggaaacgccgtgcacgggaaagcggct

SEQ ID NO: 4509 - DNA, 64 bp, Artificial
  oligonucleotide probe
ttcgccgtttgcgctgttcgccgtttgcgctgttgcatggcgtggggaggctttgcgcaccgtg

SEQ ID NO: 4510 - DNA, 64 bp, Artificial
  oligonucleotide probe
ttgcatggcgtggggattgcatggcgtggggacgcattgcggctttcgccgtcgcaaagcgcac

SEQ ID NO: 4511 - DNA, 64 bp, Artificial
  oligonucleotide probe
gggattcgcgcaaacggggattcgcgcaaacgaagccgtgcgcaacgaggctttgcgcaccgtg

SEQ ID NO: 4512 - DNA, 64 bp, Artificial
  oligonucleotide probe
gcacgggaaagcggctgcacgggaaagcggctccgtttcggctgggctttgcatggcgtgggga

SEQ ID NO: 4513 - DNA, 64 bp, Artificial
  oligonucleotide probe
aacggctgcaagcgcaaacggctgcaagcgcattgcatggcgtggggagcacgggaaagcggct

SEQ ID NO: 4514 - DNA, 64 bp, Artificial
  oligonucleotide probe
aacgcgatttgccgcaaacgcgatttgccgcagggattcgcgcaaacgttgcaagcgtccggga

SEQ ID NO: 4515 - DNA, 64 bp, Artificial
  oligonucleotide probe
gcacgggaaagcggctgcacgggaaagcggctttgcaagcgtccgggaaacggctgcaagcgca

SEQ ID NO: 4516 - DNA, 64 bp, Artificial
  oligonucleotide probe
gcaccgcagctgcgtggcaccgcagctgcgtggcacgggaaagcggctcgcattgcggctttcg

SEQ ID NO: 4517 - DNA, 64 bp, Artificial
  oligonucleotide probe
ttcgccgtttgcgctgttcgccgtttgcgctggcacgggaaagcggctaacggctgcaagcgca

SEQ ID NO: 4518 - DNA, 64 bp, Artificial
  oligonucleotide probe
ttcgccgtttgcgctgttcgccgtttgcgctggggattcgcgcaaacgatggcgcagcacgctg

SEQ ID NO: 4519 - DNA, 64 bp, Artificial
  oligonucleotide probe
cgcattgcggctttcgcgcattgcggctttcgccgtcgcaaagcgcacgcacgggaaagcggct

SEQ ID NO: 4520 - DNA, 64 bp, Artificial
  oligonucleotide probe
gggattcgcgcaaacggggattcgcgcaaacggcaccgcagctgcgtgatggcgcagcacgctg

SEQ ID NO: 4521 - DNA, 64 bp, Artificial
  oligonucleotide probe
gggattcgcgcaaacggggattcgcgcaaacgcgcattgcggctttcgggctttgcgcaccgtg

SEQ ID NO: 4522 - DNA, 64 bp, Artificial
  oligonucleotide probe
gggattcgcgcaaacggggattcgcgcaaacgaagccgtgcgcaacgaccgtttcggctgggct

SEQ ID NO: 4523 - DNA, 64 bp, Artificial
  oligonucleotide probe
ttcggggaaacgccgtttcggggaaacgccgtccgtttcggctgggctgggattcgcgcaaacg

SEQ ID NO: 4524 - DNA, 64 bp, Artificial
  oligonucleotide probe
gggattcgcgcaaacggggattcgcgcaaacggcaccgcagctgcgtgaagccgtgcgcaacga

SEQ ID NO: 4525 - DNA, 64 bp, Artificial
  oligonucleotide probe
ttgcatggcgtggggattgcatggcgtggggaaacggctgcaagcgcaccgtcgcaaagcgcac

SEQ ID NO: 4526 - DNA, 64 bp, Artificial
  oligonucleotide probe
gcacgggaaagcggctgcacgggaaagcggctatggcgcagcacgctgttcggggaaacgccgt

SEQ ID NO: 4527 - DNA, 64 bp, Artificial
  oligonucleotide probe
atggcgcagcacgctgatggcgcagcacgctggggattcgcgcaaacgcgcattgcggctttcg

SEQ ID NO: 4528 - DNA, 64 bp, Artificial
  oligonucleotide probe
gcaccgcagctgcgtggcaccgcagctgcgtgaacgcgatttgccgcagggattcgcgcaaacg

SEQ ID NO: 4529 - DNA, 64 bp, Artificial
  oligonucleotide probe
ggctgcacggtcccgtggctgcacggtcccgtttgcatggcgtggggaggctttgcgcaccgtg

SEQ ID NO: 4530 - DNA, 64 bp, Artificial
  oligonucleotide probe
atggcgcagcacgctgatggcgcagcacgctgttcgccgtttgcgctggggattcgcgcaaacg

SEQ ID NO: 4531 - DNA, 64 bp, Artificial
  oligonucleotide probe
aacgcgatttgccgcaaacgcgatttgccgcaccgtcgcaaagcgcacgggattcgcgcaaacg

SEQ ID NO: 4532 - DNA, 64 bp, Artificial
  oligonucleotide probe
ttgcatggcgtggggattgcatggcgtggggattgcaagcgtccgggaggctttgcgcaccgtg

SEQ ID NO: 4533 - DNA, 64 bp, Artificial
  oligonucleotide probe
gcaccgcagctgcgtggcaccgcagctgcgtgttgcaagcgtccgggaaacggctgcaagcgca

SEQ ID NO: 4534 - DNA, 64 bp, Artificial
  oligonucleotide probe
ttgcaagcgtccgggattgcaagcgtccgggaccgtcgcaaagcgcacgggattcgcgcaaacg

SEQ ID NO: 4535 - DNA, 64 bp, Artificial
  oligonucleotide probe
cgcattgcggctttcgcgcattgcggctttcgaacgcgatttgccgcagcacgggaaagcggct

SEQ ID NO: 4536 - DNA, 64 bp, Artificial
  oligonucleotide probe
gggattcgcgcaaacggggattcgcgcaaacgaagccgtgcgcaacgaatggcgcagcacgctg

SEQ ID NO: 4537 - DNA, 64 bp, Artificial
  oligonucleotide probe
aagccgtgcgcaacgaaagccgtgcgcaacgaccgtcgcaaagcgcacgcacgggaaagcggct

SEQ ID NO: 4538 - DNA, 64 bp, Artificial
  oligonucleotide probe
ccgtcgcaaagcgcacccgtcgcaaagcgcacgcaccgcagctgcgtgcgcattgcggctttcg

SEQ ID NO: 4539 - DNA, 64 bp, Artificial
  oligonucleotide probe
ccgtcgcaaagcgcacccgtcgcaaagcgcacttgcatggcgtggggagcaccgcagctgcgtg

SEQ ID NO: 4540 - DNA, 64 bp, Artificial
  oligonucleotide probe
gcaccgcagctgcgtggcaccgcagctgcgtgttcggggaaacgccgtccgtttcggctgggct

SEQ ID NO: 4541 - DNA, 64 bp, Artificial
  oligonucleotide probe
ggctttgcgcaccgtgggctttgcgcaccgtgttgcatggcgtggggagcacgggaaagcggct

SEQ ID NO: 4542 - DNA, 64 bp, Artificial
  oligonucleotide probe
atggcgcagcacgctgatggcgcagcacgctggcaccgcagctgcgtgttgcaagcgtccggga

SEQ ID NO: 4543 - DNA, 64 bp, Artificial
  oligonucleotide probe
ccgtttcggctgggctccgtttcggctgggctgggattcgcgcaaacggcacgggaaagcggct

SEQ ID NO: 4544 - DNA, 64 bp, Artificial
  oligonucleotide probe
ccgtcgcaaagcgcacccgtcgcaaagcgcacgcaccgcagctgcgtgttgcaagcgtccggga

SEQ ID NO: 4545 - DNA, 64 bp, Artificial
  oligonucleotide probe
aacgcgatttgccgcaaacgcgatttgccgcagcaccgcagctgcgtgaacggctgcaagcgca

SEQ ID NO: 4546 - DNA, 64 bp, Artificial
  oligonucleotide probe
ttcggggaaacgccgtttcggggaaacgccgtgggattcgcgcaaacggcacgggaaagcggct

SEQ ID NO: 4547 - DNA, 64 bp, Artificial
  oligonucleotide probe
gcaccgcagctgcgtggcaccgcagctgcgtgttcggggaaacgccgtgggattcgcgcaaacg

SEQ ID NO: 4548 - DNA, 64 bp, Artificial
  oligonucleotide probe
ttgcaagcgtccgggattgcaagcgtccgggagcaccgcagctgcgtggcacgggaaagcggct

SEQ ID NO: 4549 - DNA, 64 bp, Artificial
  oligonucleotide probe
gggattcgcgcaaacggggattcgcgcaaacgaacggctgcaagcgcaaacgcgatttgccgca

SEQ ID NO: 4550 - DNA, 64 bp, Artificial
  oligonucleotide probe
ttgcatggcgtggggattgcatggcgtggggagcaccgcagctgcgtgaacggctgcaagcgca

SEQ ID NO: 4551 - DNA, 64 bp, Artificial
  oligonucleotide probe
ggctttgcgcaccgtgggctttgcgcaccgtgttcggggaaacgccgtgcaccgcagctgcgtg

SEQ ID NO: 4552 - DNA, 64 bp, Artificial
  oligonucleotide probe
ccgtttcggctgggctccgtttcggctgggctgcaccgcagctgcgtgcgcattgcggctttcg

SEQ ID NO: 4553 - DNA, 64 bp, Artificial
  oligonucleotide probe
atggcgcagcacgctgatggcgcagcacgctggcaccgcagctgcgtgaacggctgcaagcgca

SEQ ID NO: 4554 - DNA, 64 bp, Artificial
  oligonucleotide probe
aacggctgcaagcgcaaacggctgcaagcgcagcaccgcagctgcgtgcgcattgcggctttcg

SEQ ID NO: 4555 - DNA, 64 bp, Artificial
  oligonucleotide probe
atggcgcagcacgctgatggcgcagcacgctggggattcgcgcaaacggcacgggaaagcggct

SEQ ID NO: 4556 - DNA, 64 bp, Artificial
  oligonucleotide probe
ccgtcgcaaagcgcacccgtcgcaaagcgcacttgcatggcgtggggagcacgggaaagcggct

SEQ ID NO: 4557 - DNA, 64 bp, Artificial
  oligonucleotide probe
ggctttgcgcaccgtgggctttgcgcaccgtgatggcgcagcacgctggggattcgcgcaaacg

SEQ ID NO: 4558 - DNA, 64 bp, Artificial
  oligonucleotide probe
gcacgggaaagcggctgcacgggaaagcggctccgtcgcaaagcgcacgggattcgcgcaaacg

SEQ ID NO: 4559 - DNA, 64 bp, Artificial
  oligonucleotide probe
gcaccgcagctgcgtggcaccgcagctgcgtgaacggctgcaagcgcaggctttgcgcaccgtg

SEQ ID NO: 4560 - DNA, 64 bp, Artificial
  oligonucleotide probe
cgcattgcggctttcgcgcattgcggctttcgaacgcgatttgccgcattgcatggcgtgggga

SEQ ID NO: 4561 - DNA, 64 bp, Artificial
  oligonucleotide probe
ccgtttcggctgggctccgtttcggctgggctgggattcgcgcaaacgaacggctgcaagcgca

SEQ ID NO: 4562 - DNA, 64 bp, Artificial
  oligonucleotide probe
aagccgtgcgcaacgaaagccgtgcgcaacgaaacgcgatttgccgcagcacgggaaagcggct

SEQ ID NO: 4563 - DNA, 64 bp, Artificial
  oligonucleotide probe
gcaccgcagctgcgtggcaccgcagctgcgtgaagccgtgcgcaacgacgcattgcggctttcg

SEQ ID NO: 4564 - DNA, 64 bp, Artificial
  oligonucleotide probe
cgcattgcggctttcgcgcattgcggctttcggcacgggaaagcggctaagccgtgcgcaacga

SEQ ID NO: 4565 - DNA, 64 bp, Artificial
  oligonucleotide probe
aagccgtgcgcaacgaaagccgtgcgcaacgaggctttgcgcaccgtggcacgggaaagcggct

SEQ ID NO: 4566 - DNA, 64 bp, Artificial
  oligonucleotide probe
gggattcgcgcaaacggggattcgcgcaaacgggctttgcgcaccgtgccgtcgcaaagcgcac

SEQ ID NO: 4567 - DNA, 64 bp, Artificial
  oligonucleotide probe
cgcattgcggctttcgcgcattgcggctttcgttcggggaaacgccgtgcaccgcagctgcgtg

SEQ ID NO: 4568 - DNA, 64 bp, Artificial
  oligonucleotide probe
gcacgggaaagcggctgcacgggaaagcggctttcggggaaacgccgtgcaccgcagctgcgtg

SEQ ID NO: 4569 - DNA, 64 bp, Artificial
  oligonucleotide probe
gcacgggaaagcggctgcacgggaaagcggctcgcattgcggctttcgaacgcgatttgccgca

SEQ ID NO: 4570 - DNA, 64 bp, Artificial
  oligonucleotide probe
gggattcgcgcaaacggggattcgcgcaaacgcgcattgcggctttcgttcgccgtttgcgctg

SEQ ID NO: 4571 - DNA, 64 bp, Artificial
  oligonucleotide probe
ccgtttcggctgggctccgtttcggctgggctgcacgggaaagcggctttgcaagcgtccggga

SEQ ID NO: 4572 - DNA, 64 bp, Artificial
  oligonucleotide probe
ttgcatggcgtggggattgcatggcgtggggaaacggctgcaagcgcattcggggaaacgccgt

SEQ ID NO: 4573 - DNA, 64 bp, Artificial
  oligonucleotide probe
ttcggggaaacgccgtttcggggaaacgccgtgggattcgcgcaaacggcaccgcagctgcgtg

SEQ ID NO: 4574 - DNA, 64 bp, Artificial
  oligonucleotide probe
gggattcgcgcaaacggggattcgcgcaaacgttgcatggcgtggggagcacgggaaagcggct

SEQ ID NO: 4575 - DNA, 64 bp, Artificial
  oligonucleotide probe
ccgtttcggctgggctccgtttcggctgggctttgcatggcgtggggagcaccgcagctgcgtg

SEQ ID NO: 4576 - DNA, 64 bp, Artificial
  oligonucleotide probe
ccgtcgcaaagcgcacccgtcgcaaagcgcacgggattcgcgcaaacgttcgccgtttgcgctg

SEQ ID NO: 4577 - DNA, 64 bp, Artificial
  oligonucleotide probe
ttgcatggcgtggggattgcatggcgtggggagcaccgcagctgcgtggggattcgcgcaaacg

SEQ ID NO: 4578 - DNA, 64 bp, Artificial
  oligonucleotide probe
ttgcatggcgtggggattgcatggcgtggggagcacgggaaagcggctcgcattgcggctttcg

SEQ ID NO: 4579 - DNA, 64 bp, Artificial
  oligonucleotide probe
cgcattgcggctttcgcgcattgcggctttcgttcgccgtttgcgctggggattcgcgcaaacg

SEQ ID NO: 4580 - DNA, 64 bp, Artificial
  oligonucleotide probe
ggctgcacggtcccgtggctgcacggtcccgtgggattcgcgcaaacgttcggggaaacgccgt

SEQ ID NO: 4581 - DNA, 64 bp, Artificial
  oligonucleotide probe
ggctttgcgcaccgtgggctttgcgcaccgtggcacgggaaagcggctaacggctgcaagcgca

SEQ ID NO: 4582 - DNA, 64 bp, Artificial
  oligonucleotide probe
ggctgcacggtcccgtggctgcacggtcccgtttgcatggcgtggggagcaccgcagctgcgtg

SEQ ID NO: 4583 - DNA, 64 bp, Artificial
  oligonucleotide probe
ttgcaagcgtccgggattgcaagcgtccgggaaacgcgatttgccgcagggattcgcgcaaacg

SEQ ID NO: 4584 - DNA, 64 bp, Artificial
  oligonucleotide probe
ccgtttcggctgggctccgtttcggctgggctgggattcgcgcaaacgggctttgcgcaccgtg

SEQ ID NO: 4585 - DNA, 64 bp, Artificial
  oligonucleotide probe
gcacgggaaagcggctgcacgggaaagcggctaagccgtgcgcaacgaaacggctgcaagcgca

SEQ ID NO: 4586 - DNA, 64 bp, Artificial
  oligonucleotide probe
gggattcgcgcaaacggggattcgcgcaaacgccgtttcggctgggctggctgcacggtcccgt

SEQ ID NO: 4587 - DNA, 64 bp, Artificial
  oligonucleotide probe
ttgcatggcgtggggattgcatggcgtggggagcacgggaaagcggctccgtttcggctgggct

SEQ ID NO: 4588 - DNA, 64 bp, Artificial
  oligonucleotide probe
ggctgcacggtcccgtggctgcacggtcccgtgcaccgcagctgcgtgccgtttcggctgggct

SEQ ID NO: 4589 - DNA, 64 bp, Artificial
  oligonucleotide probe
gggattcgcgcaaacggggattcgcgcaaacgggctttgcgcaccgtgaacgcgatttgccgca

SEQ ID NO: 4590 - DNA, 64 bp, Artificial
  oligonucleotide probe
gcacgggaaagcggctgcacgggaaagcggctttgcaagcgtccgggagggattcgcgcaaacg

SEQ ID NO: 4591 - DNA, 64 bp, Artificial
  oligonucleotide probe
cgcattgcggctttcgcgcattgcggctttcgggctgcacggtcccgtgcaccgcagctgcgtg

SEQ ID NO: 4592 - DNA, 64 bp, Artificial
  oligonucleotide probe
gcacgggaaagcggctgcacgggaaagcggctcgcattgcggctttcgttcgccgtttgcgctg

SEQ ID NO: 4593 - DNA, 64 bp, Artificial
  oligonucleotide probe
gcacgggaaagcggctgcacgggaaagcggctaacggctgcaagcgcattcgccgtttgcgctg

SEQ ID NO: 4594 - DNA, 64 bp, Artificial
  oligonucleotide probe
aacgcgatttgccgcaaacgcgatttgccgcagcacgggaaagcggctcgcattgcggctttcg

SEQ ID NO: 4595 - DNA, 64 bp, Artificial
  oligonucleotide probe
aacggctgcaagcgcaaacggctgcaagcgcaaacgcgatttgccgcattgcatggcgtgggga

SEQ ID NO: 4596 - DNA, 64 bp, Artificial
  oligonucleotide probe
gcacgggaaagcggctgcacgggaaagcggctcgcattgcggctttcgatggcgcagcacgctg

SEQ ID NO: 4597 - DNA, 64 bp, Artificial
  oligonucleotide probe
gggattcgcgcaaacggggattcgcgcaaacgggctttgcgcaccgtgggctgcacggtcccgt

SEQ ID NO: 4598 - DNA, 64 bp, Artificial
  oligonucleotide probe
cgcattgcggctttcgcgcattgcggctttcgatggcgcagcacgctgttgcatggcgtgggga

SEQ ID NO: 4599 - DNA, 64 bp, Artificial
  oligonucleotide probe
ttgcaagcgtccgggattgcaagcgtccgggattgcatggcgtggggagcacgggaaagcggct

SEQ ID NO: 4600 - DNA, 64 bp, Artificial
  oligonucleotide probe
ccgtttcggctgggctccgtttcggctgggctaacgcgatttgccgcagcacgggaaagcggct

SEQ ID NO: 4601 - DNA, 64 bp, Artificial
  oligonucleotide probe
ggctgcacggtcccgtggctgcacggtcccgtgcaccgcagctgcgtgaacggctgcaagcgca

SEQ ID NO: 4602 - DNA, 64 bp, Artificial
  oligonucleotide probe
ttcggggaaacgccgtttcggggaaacgccgtgggattcgcgcaaacgcgcattgcggctttcg

SEQ ID NO: 4603 - DNA, 64 bp, Artificial
  oligonucleotide probe
aacggctgcaagcgcaaacggctgcaagcgcaaacgcgatttgccgcagcacgggaaagcggct

SEQ ID NO: 4604 - DNA, 64 bp, Artificial
  oligonucleotide probe
cgcattgcggctttcgcgcattgcggctttcgttcggggaaacgccgtgggattcgcgcaaacg

SEQ ID NO: 4605 - DNA, 64 bp, Artificial
  oligonucleotide probe
atggcgcagcacgctgatggcgcagcacgctgccgtttcggctgggctgcacgggaaagcggct

SEQ ID NO: 4606 - DNA, 64 bp, Artificial
  oligonucleotide probe
gggattcgcgcaaacggggattcgcgcaaacgttgcatggcgtggggattcgccgtttgcgctg

SEQ ID NO: 4607 - DNA, 64 bp, Artificial
  oligonucleotide probe
gcaccgcagctgcgtggcaccgcagctgcgtgaacggctgcaagcgcattcgccgtttgcgctg

SEQ ID NO: 4608 - DNA, 64 bp, Artificial
  oligonucleotide probe
aacgcgatttgccgcaaacgcgatttgccgcagcacgggaaagcggctatggcgcagcacgctg

SEQ ID NO: 4609 - DNA, 64 bp, Artificial
  oligonucleotide probe
gggattcgcgcaaacggggattcgcgcaaacggcacgggaaagcggctcgcattgcggctttcg

SEQ ID NO: 4610 - DNA, 64 bp, Artificial
  oligonucleotide probe
ggctttgcgcaccgtgggctttgcgcaccgtgaacgcgatttgccgcagcacgggaaagcggct

SEQ ID NO: 4611 - DNA, 64 bp, Artificial
  oligonucleotide probe
aagccgtgcgcaacgaaagccgtgcgcaacgacgcattgcggctttcgttgcatggcgtgggga

SEQ ID NO: 4612 - DNA, 64 bp, Artificial
  oligonucleotide probe
gggattcgcgcaaacggggattcgcgcaaacgaacggctgcaagcgcaggctttgcgcaccgtg

SEQ ID NO: 4613 - DNA, 64 bp, Artificial
  oligonucleotide probe
cgcattgcggctttcgcgcattgcggctttcggggattcgcgcaaacggcaccgcagctgcgtg

SEQ ID NO: 4614 - DNA, 64 bp, Artificial
  oligonucleotide probe
ttcggggaaacgccgtttcggggaaacgccgtttgcatggcgtggggaggctttgcgcaccgtg

SEQ ID NO: 4615 - DNA, 64 bp, Artificial
  oligonucleotide probe
ggctgcacggtcccgtggctgcacggtcccgtgggattcgcgcaaacgaacgcgatttgccgca

SEQ ID NO: 4616 - DNA, 64 bp, Artificial
  oligonucleotide probe
ttgcatggcgtggggattgcatggcgtggggaaagccgtgcgcaacgaccgtcgcaaagcgcac

SEQ ID NO: 4617 - DNA, 64 bp, Artificial
  oligonucleotide probe
aacggctgcaagcgcaaacggctgcaagcgcagggattcgcgcaaacggcaccgcagctgcgtg

SEQ ID NO: 4618 - DNA, 64 bp, Artificial
  oligonucleotide probe
ccgtttcggctgggctccgtttcggctgggctgcaccgcagctgcgtggcacgggaaagcggct

SEQ ID NO: 4619 - DNA, 64 bp, Artificial
  oligonucleotide probe
ggctgcacggtcccgtggctgcacggtcccgtgcaccgcagctgcgtgttcgccgtttgcgctg

SEQ ID NO: 4620 - DNA, 64 bp, Artificial
  oligonucleotide probe
aacggctgcaagcgcaaacggctgcaagcgcaggctgcacggtcccgtgggattcgcgcaaacg

SEQ ID NO: 4621 - DNA, 64 bp, Artificial
  oligonucleotide probe
aacgcgatttgccgcaaacgcgatttgccgcagggattcgcgcaaacgttcggggaaacgccgt

SEQ ID NO: 4622 - DNA, 64 bp, Artificial
  oligonucleotide probe
ggctgcacggtcccgtggctgcacggtcccgtgcaccgcagctgcgtgcgcattgcggctttcg

SEQ ID NO: 4623 - DNA, 64 bp, Artificial
  oligonucleotide probe
atggcgcagcacgctgatggcgcagcacgctgttcggggaaacgccgtgggattcgcgcaaacg

SEQ ID NO: 4624 - DNA, 64 bp, Artificial
  oligonucleotide probe
ttcgccgtttgcgctgttcgccgtttgcgctggggattcgcgcaaacgaagccgtgcgcaacga

SEQ ID NO: 4625 - DNA, 64 bp, Artificial
  oligonucleotide probe
atggcgcagcacgctgatggcgcagcacgctgttcgccgtttgcgctgttgcatggcgtgggga

SEQ ID NO: 4626 - DNA, 64 bp, Artificial
  oligonucleotide probe
gcaccgcagctgcgtggcaccgcagctgcgtgccgtcgcaaagcgcacggctgcacggtcccgt

SEQ ID NO: 4627 - DNA, 64 bp, Artificial
  oligonucleotide probe
aacgcgatttgccgcaaacgcgatttgccgcattgcatggcgtggggattgcaagcgtccggga

SEQ ID NO: 4628 - DNA, 64 bp, Artificial
  oligonucleotide probe
ccgtcgcaaagcgcacccgtcgcaaagcgcacgggattcgcgcaaacgaacgcgatttgccgca

SEQ ID NO: 4629 - DNA, 64 bp, Artificial
  oligonucleotide probe
ccgtcgcaaagcgcacccgtcgcaaagcgcacgcacgggaaagcggctggctttgcgcaccgtg

SEQ ID NO: 4630 - DNA, 64 bp, Artificial
  oligonucleotide probe
ttgcaagcgtccgggattgcaagcgtccgggagggattcgcgcaaacgcgcattgcggctttcg

SEQ ID NO: 4631 - DNA, 64 bp, Artificial
  oligonucleotide probe
ccgtcgcaaagcgcacccgtcgcaaagcgcacgcaccgcagctgcgtgttcggggaaacgccgt

SEQ ID NO: 4632 - DNA, 64 bp, Artificial
  oligonucleotide probe
ttgcatggcgtggggattgcatggcgtggggaggctttgcgcaccgtgggctgcacggtcccgt

SEQ ID NO: 4633 - DNA, 64 bp, Artificial
  oligonucleotide probe
aacggctgcaagcgcaaacggctgcaagcgcattcgccgtttgcgctggcacgggaaagcggct

SEQ ID NO: 4634 - DNA, 64 bp, Artificial
  oligonucleotide probe
gcacgggaaagcggctgcacgggaaagcggctggctttgcgcaccgtgatggcgcagcacgctg

SEQ ID NO: 4635 - DNA, 64 bp, Artificial
  oligonucleotide probe
ttgcatggcgtggggattgcatggcgtggggagcacgggaaagcggctgggattcgcgcaaacg

SEQ ID NO: 4636 - DNA, 64 bp, Artificial
  oligonucleotide probe
ttgcaagcgtccgggattgcaagcgtccgggaatggcgcagcacgctggcaccgcagctgcgtg

SEQ ID NO: 4637 - DNA, 64 bp, Artificial
  oligonucleotide probe
gcaccgcagctgcgtggcaccgcagctgcgtgaacgcgatttgccgcaccgtcgcaaagcgcac

SEQ ID NO: 4638 - DNA, 64 bp, Artificial
  oligonucleotide probe
gggattcgcgcaaacggggattcgcgcaaacggcacgggaaagcggctggctttgcgcaccgtg

SEQ ID NO: 4639 - DNA, 64 bp, Artificial
  oligonucleotide probe
ttgcatggcgtggggattgcatggcgtggggacgcattgcggctttcgatggcgcagcacgctg

SEQ ID NO: 4640 - DNA, 64 bp, Artificial
  oligonucleotide probe
ttcgccgtttgcgctgttcgccgtttgcgctggcaccgcagctgcgtgcgcattgcggctttcg

SEQ ID NO: 4641 - DNA, 64 bp, Artificial
  oligonucleotide probe
gcaccgcagctgcgtggcaccgcagctgcgtgttcggggaaacgccgtttcgccgtttgcgctg

SEQ ID NO: 4642 - DNA, 64 bp, Artificial
  oligonucleotide probe
ttgcatggcgtggggattgcatggcgtggggaggctttgcgcaccgtgttcggggaaacgccgt

SEQ ID NO: 4643 - DNA, 64 bp, Artificial
  oligonucleotide probe
aagccgtgcgcaacgaaagccgtgcgcaacgaaacgcgatttgccgcagggattcgcgcaaacg

SEQ ID NO: 4644 - DNA, 64 bp, Artificial
  oligonucleotide probe
aagccgtgcgcaacgaaagccgtgcgcaacgaccgtttcggctgggctttgcatggcgtgggga

SEQ ID NO: 4645 - DNA, 64 bp, Artificial
  oligonucleotide probe
ttcggggaaacgccgtttcggggaaacgccgtgcacgggaaagcggctttgcaagcgtccggga

SEQ ID NO: 4646 - DNA, 64 bp, Artificial
  oligonucleotide probe
aacggctgcaagcgcaaacggctgcaagcgcagcacgggaaagcggctcgcattgcggctttcg

SEQ ID NO: 4647 - DNA, 64 bp, Artificial
  oligonucleotide probe
aagccgtgcgcaacgaaagccgtgcgcaacgaccgtttcggctgggctgggattcgcgcaaacg

SEQ ID NO: 4648 - DNA, 64 bp, Artificial
  oligonucleotide probe
gggattcgcgcaaacggggattcgcgcaaacgcgcattgcggctttcgttcggggaaacgccgt

SEQ ID NO: 4649 - DNA, 64 bp, Artificial
  oligonucleotide probe
gggattcgcgcaaacggggattcgcgcaaacggcaccgcagctgcgtgcgcattgcggctttcg

SEQ ID NO: 4650 - DNA, 64 bp, Artificial
  oligonucleotide probe
ttcggggaaacgccgtttcggggaaacgccgtggctgcacggtcccgtgggattcgcgcaaacg

SEQ ID NO: 4651 - DNA, 64 bp, Artificial
  oligonucleotide probe
gggattcgcgcaaacggggattcgcgcaaacgttgcatggcgtggggaaagccgtgcgcaacga

SEQ ID NO: 4652 - DNA, 64 bp, Artificial
  oligonucleotide probe
gggattcgcgcaaacggggattcgcgcaaacgaacggctgcaagcgcattcgccgtttgcgctg

SEQ ID NO: 4653 - DNA, 64 bp, Artificial
  oligonucleotide probe
gggattcgcgcaaacggggattcgcgcaaacgttgcatggcgtggggattgcaagcgtccggga

SEQ ID NO: 4654 - DNA, 64 bp, Artificial
  oligonucleotide probe
gcacgggaaagcggctgcacgggaaagcggctccgtcgcaaagcgcacgcaccgcagctgcgtg

SEQ ID NO: 4655 - DNA, 64 bp, Artificial
  oligonucleotide probe
ccgtttcggctgggctccgtttcggctgggctaacgcgatttgccgcagcaccgcagctgcgtg

SEQ ID NO: 4656 - DNA, 64 bp, Artificial
  oligonucleotide probe
gcacgggaaagcggctgcacgggaaagcggctcgcattgcggctttcgttgcatggcgtgggga

SEQ ID NO: 4657 - DNA, 64 bp, Artificial
  oligonucleotide probe
aacgcgatttgccgcaaacgcgatttgccgcattgcatggcgtggggaaacggctgcaagcgca

SEQ ID NO: 4658 - DNA, 64 bp, Artificial
  oligonucleotide probe
gggattcgcgcaaacggggattcgcgcaaacgcgcattgcggctttcgccgtttcggctgggct

SEQ ID NO: 4659 - DNA, 64 bp, Artificial
  oligonucleotide probe
ggctgcacggtcccgtggctgcacggtcccgtgcaccgcagctgcgtgccgtcgcaaagcgcac

SEQ ID NO: 4660 - DNA, 64 bp, Artificial
  oligonucleotide probe
cgcattgcggctttcgcgcattgcggctttcgggctgcacggtcccgtttgcatggcgtgggga

SEQ ID NO: 4661 - DNA, 64 bp, Artificial
  oligonucleotide probe
ttcgccgtttgcgctgttcgccgtttgcgctggcaccgcagctgcgtggcacgggaaagcggct

SEQ ID NO: 4662 - DNA, 64 bp, Artificial
  oligonucleotide probe
ccgtttcggctgggctccgtttcggctgggctggctgcacggtcccgtttgcatggcgtgggga

SEQ ID NO: 4663 - DNA, 64 bp, Artificial
  oligonucleotide probe
gcacgggaaagcggctgcacgggaaagcggctggctttgcgcaccgtgttgcatggcgtgggga

SEQ ID NO: 4664 - DNA, 64 bp, Artificial
  oligonucleotide probe
gcaccgcagctgcgtggcaccgcagctgcgtggggattcgcgcaaacgttgcatggcgtgggga

SEQ ID NO: 4665 - DNA, 64 bp, Artificial
  oligonucleotide probe
atggcgcagcacgctgatggcgcagcacgctggcacgggaaagcggctggctttgcgcaccgtg

SEQ ID NO: 4666 - DNA, 64 bp, Artificial
  oligonucleotide probe
ggctgcacggtcccgtggctgcacggtcccgtttgcatggcgtggggaccgtcgcaaagcgcac

SEQ ID NO: 4667 - DNA, 64 bp, Artificial
  oligonucleotide probe
ttcggggaaacgccgtttcggggaaacgccgtggctgcacggtcccgtgcacgggaaagcggct

SEQ ID NO: 4668 - DNA, 64 bp, Artificial
  oligonucleotide probe
ttgcatggcgtggggattgcatggcgtggggagcacgggaaagcggctaagccgtgcgcaacga

SEQ ID NO: 4669 - DNA, 64 bp, Artificial
  oligonucleotide probe
gcaccgcagctgcgtggcaccgcagctgcgtgttcggggaaacgccgtccgtcgcaaagcgcac

SEQ ID NO: 4670 - DNA, 64 bp, Artificial
  oligonucleotide probe
ttcgccgtttgcgctgttcgccgtttgcgctgggctgcacggtcccgtttgcatggcgtgggga

SEQ ID NO: 4671 - DNA, 64 bp, Artificial
  oligonucleotide probe
ggctttgcgcaccgtgggctttgcgcaccgtgccgtcgcaaagcgcacgcaccgcagctgcgtg

SEQ ID NO: 4672 - DNA, 64 bp, Artificial
  oligonucleotide probe
ttcgccgtttgcgctgttcgccgtttgcgctggcaccgcagctgcgtgggctttgcgcaccgtg

SEQ ID NO: 4673 - DNA, 64 bp, Artificial
  oligonucleotide probe
ccgtcgcaaagcgcacccgtcgcaaagcgcacgcaccgcagctgcgtgccgtttcggctgggct

SEQ ID NO: 4674 - DNA, 64 bp, Artificial
  oligonucleotide probe
gcacgggaaagcggctgcacgggaaagcggctaacggctgcaagcgcagggattcgcgcaaacg

SEQ ID NO: 4675 - DNA, 64 bp, Artificial
  oligonucleotide probe
aacgcgatttgccgcaaacgcgatttgccgcattgcatggcgtggggaccgtttcggctgggct

SEQ ID NO: 4676 - DNA, 64 bp, Artificial
  oligonucleotide probe
ttgcatggcgtggggattgcatggcgtggggattcgccgtttgcgctgggctgcacggtcccgt

SEQ ID NO: 4677 - DNA, 64 bp, Artificial
  oligonucleotide probe
gggattcgcgcaaacggggattcgcgcaaacgttcggggaaacgccgtaacgcgatttgccgca

SEQ ID NO: 4678 - DNA, 64 bp, Artificial
  oligonucleotide probe
gcaccgcagctgcgtggcaccgcagctgcgtggcacgggaaagcggctttgcatggcgtgggga

SEQ ID NO: 4679 - DNA, 64 bp, Artificial
  oligonucleotide probe
cgcattgcggctttcgcgcattgcggctttcgaacggctgcaagcgcagggattcgcgcaaacg

SEQ ID NO: 4680 - DNA, 64 bp, Artificial
  oligonucleotide probe
ttcggggaaacgccgtttcggggaaacgccgtgggattcgcgcaaacgatggcgcagcacgctg

SEQ ID NO: 4681 - DNA, 64 bp, Artificial
  oligonucleotide probe
aacgcgatttgccgcaaacgcgatttgccgcagggattcgcgcaaacggcaccgcagctgcgtg

SEQ ID NO: 4682 - DNA, 64 bp, Artificial
  oligonucleotide probe
gggattcgcgcaaacggggattcgcgcaaacgatggcgcagcacgctgaacgcgatttgccgca

SEQ ID NO: 4683 - DNA, 64 bp, Artificial
  oligonucleotide probe
ttgcaagcgtccgggattgcaagcgtccgggattcggggaaacgccgtgggattcgcgcaaacg

SEQ ID NO: 4684 - DNA, 64 bp, Artificial
  oligonucleotide probe
ttgcaagcgtccgggattgcaagcgtccgggaccgtcgcaaagcgcacgcacgggaaagcggct

SEQ ID NO: 4685 - DNA, 64 bp, Artificial
  oligonucleotide probe
gcacgggaaagcggctgcacgggaaagcggctatggcgcagcacgctgggctgcacggtcccgt

SEQ ID NO: 4686 - DNA, 64 bp, Artificial
  oligonucleotide probe
ttgcaagcgtccgggattgcaagcgtccgggagggattcgcgcaaacgaagccgtgcgcaacga

SEQ ID NO: 4687 - DNA, 64 bp, Artificial
  oligonucleotide probe
ttgcatggcgtggggattgcatggcgtggggagcaccgcagctgcgtgccgtttcggctgggct

SEQ ID NO: 4688 - DNA, 64 bp, Artificial
  oligonucleotide probe
gcaccgcagctgcgtggcaccgcagctgcgtgatggcgcagcacgctgttcgccgtttgcgctg

SEQ ID NO: 4689 - DNA, 64 bp, Artificial
  oligonucleotide probe
gcacgggaaagcggctgcacgggaaagcggctccgtttcggctgggctccgtcgcaaagcgcac

SEQ ID NO: 4690 - DNA, 64 bp, Artificial
  oligonucleotide probe
cgcattgcggctttcgcgcattgcggctttcgggctttgcgcaccgtggggattcgcgcaaacg

SEQ ID NO: 4691 - DNA, 64 bp, Artificial
  oligonucleotide probe
gcaccgcagctgcgtggcaccgcagctgcgtggcacgggaaagcggctaagccgtgcgcaacga

SEQ ID NO: 4692 - DNA, 64 bp, Artificial
  oligonucleotide probe
gcacgggaaagcggctgcacgggaaagcggctcgcattgcggctttcgggctttgcgcaccgtg

SEQ ID NO: 4693 - DNA, 64 bp, Artificial
  oligonucleotide probe
cgcattgcggctttcgcgcattgcggctttcgggctttgcgcaccgtggcacgggaaagcggct

SEQ ID NO: 4694 - DNA, 64 bp, Artificial
  oligonucleotide probe
aacggctgcaagcgcaaacggctgcaagcgcaccgtttcggctgggctgcaccgcagctgcgtg

SEQ ID NO: 4695 - DNA, 64 bp, Artificial
  oligonucleotide probe
ttgcaagcgtccgggattgcaagcgtccgggaaacgcgatttgccgcattgcatggcgtgggga

SEQ ID NO: 4696 - DNA, 64 bp, Artificial
  oligonucleotide probe
ccgtcgcaaagcgcacccgtcgcaaagcgcacgcaccgcagctgcgtggcacgggaaagcggct

SEQ ID NO: 4697 - DNA, 64 bp, Artificial
  oligonucleotide probe
gcaccgcagctgcgtggcaccgcagctgcgtgccgtttcggctgggctttgcatggcgtgggga

SEQ ID NO: 4698 - DNA, 64 bp, Artificial
  oligonucleotide probe
aacgcgatttgccgcaaacgcgatttgccgcagcacgggaaagcggctttgcaagcgtccggga

SEQ ID NO: 4699 - DNA, 64 bp, Artificial
  oligonucleotide probe
ttcggggaaacgccgtttcggggaaacgccgtgcaccgcagctgcgtgttgcaagcgtccggga

SEQ ID NO: 4700 - DNA, 64 bp, Artificial
  oligonucleotide probe
gcacgggaaagcggctgcacgggaaagcggctaacggctgcaagcgcaggctgcacggtcccgt

SEQ ID NO: 4701 - DNA, 64 bp, Artificial
  oligonucleotide probe
gggattcgcgcaaacggggattcgcgcaaacggcaccgcagctgcgtgttcgccgtttgcgctg

SEQ ID NO: 4702 - DNA, 64 bp, Artificial
  oligonucleotide probe
ttgcatggcgtggggattgcatggcgtggggaaacggctgcaagcgcaaacgcgatttgccgca

SEQ ID NO: 4703 - DNA, 64 bp, Artificial
  oligonucleotide probe
atggcgcagcacgctgatggcgcagcacgctgggctgcacggtcccgtttgcatggcgtgggga

SEQ ID NO: 4704 - DNA, 64 bp, Artificial
  oligonucleotide probe
gggattcgcgcaaacggggattcgcgcaaacggcaccgcagctgcgtgccgtttcggctgggct

SEQ ID NO: 4705 - DNA, 64 bp, Artificial
  oligonucleotide probe
ttcgccgtttgcgctgttcgccgtttgcgctgttgcatggcgtggggagcaccgcagctgcgtg

SEQ ID NO: 4706 - DNA, 64 bp, Artificial
  oligonucleotide probe
gcacgggaaagcggctgcacgggaaagcggctttcgccgtttgcgctgttgcatggcgtgggga

SEQ ID NO: 4707 - DNA, 64 bp, Artificial
  oligonucleotide probe
cgcattgcggctttcgcgcattgcggctttcgatggcgcagcacgctggggattcgcgcaaacg

SEQ ID NO: 4708 - DNA, 64 bp, Artificial
  oligonucleotide probe
ttgcaagcgtccgggattgcaagcgtccgggagcacgggaaagcggctcgcattgcggctttcg

SEQ ID NO: 4709 - DNA, 64 bp, Artificial
  oligonucleotide probe
gcaccgcagctgcgtggcaccgcagctgcgtgttcgccgtttgcgctgttgcatggcgtgggga

SEQ ID NO: 4710 - DNA, 64 bp, Artificial
  oligonucleotide probe
gcacgggaaagcggctgcacgggaaagcggctcgcattgcggctttcgggctgcacggtcccgt

SEQ ID NO: 4711 - DNA, 64 bp, Artificial
  oligonucleotide probe
ttcgccgtttgcgctgttcgccgtttgcgctggcacgggaaagcggctatggcgcagcacgctg

SEQ ID NO: 4712 - DNA, 64 bp, Artificial
  oligonucleotide probe
ccgtttcggctgggctccgtttcggctgggctgggattcgcgcaaacgttcggggaaacgccgt

SEQ ID NO: 4713 - DNA, 64 bp, Artificial
  oligonucleotide probe
ccgtttcggctgggctccgtttcggctgggctaacgcgatttgccgcagggattcgcgcaaacg

SEQ ID NO: 4714 - DNA, 64 bp, Artificial
  oligonucleotide probe
ttgcatggcgtggggattgcatggcgtggggaggctttgcgcaccgtgaacgcgatttgccgca

SEQ ID NO: 4715 - DNA, 64 bp, Artificial
  oligonucleotide probe
ggctgcacggtcccgtggctgcacggtcccgtgcaccgcagctgcgtgggctttgcgcaccgtg

SEQ ID NO: 4716 - DNA, 64 bp, Artificial
  oligonucleotide probe
atggcgcagcacgctgatggcgcagcacgctgccgtttcggctgggctgcaccgcagctgcgtg

SEQ ID NO: 4717 - DNA, 64 bp, Artificial
  oligonucleotide probe
ttgcatggcgtggggattgcatggcgtggggaaacggctgcaagcgcaggctgcacggtcccgt

SEQ ID NO: 4718 - DNA, 64 bp, Artificial
  oligonucleotide probe
cgcattgcggctttcgcgcattgcggctttcgggctttgcgcaccgtgttgcatggcgtgggga

SEQ ID NO: 4719 - DNA, 64 bp, Artificial
  oligonucleotide probe
ggctttgcgcaccgtgggctttgcgcaccgtggggattcgcgcaaacgttgcatggcgtgggga

SEQ ID NO: 4720 - DNA, 64 bp, Artificial
  oligonucleotide probe
ttcggggaaacgccgtttcggggaaacgccgtgggattcgcgcaaacgttgcatggcgtgggga

SEQ ID NO: 4721 - DNA, 64 bp, Artificial
  oligonucleotide probe
ggctttgcgcaccgtgggctttgcgcaccgtgttcggggaaacgccgtttgcatggcgtgggga

SEQ ID NO: 4722 - DNA, 64 bp, Artificial
  oligonucleotide probe
ttgcatggcgtggggattgcatggcgtggggagcaccgcagctgcgtgaacgcgatttgccgca

SEQ ID NO: 4723 - DNA, 64 bp, Artificial
  oligonucleotide probe
ttgcaagcgtccgggattgcaagcgtccgggagcacgggaaagcggctaagccgtgcgcaacga

SEQ ID NO: 4724 - DNA, 64 bp, Artificial
  oligonucleotide probe
gggattcgcgcaaacggggattcgcgcaaacgaagccgtgcgcaacgaaacgcgatttgccgca

SEQ ID NO: 4725 - DNA, 64 bp, Artificial
  oligonucleotide probe
ttcggggaaacgccgtttcggggaaacgccgtgcacgggaaagcggctcgcattgcggctttcg

SEQ ID NO: 4726 - DNA, 64 bp, Artificial
  oligonucleotide probe
ggctttgcgcaccgtgggctttgcgcaccgtgttgcatggcgtggggacgcattgcggctttcg

SEQ ID NO: 4727 - DNA, 64 bp, Artificial
  oligonucleotide probe
ttcgccgtttgcgctgttcgccgtttgcgctgggctgcacggtcccgtgggattcgcgcaaacg

SEQ ID NO: 4728 - DNA, 64 bp, Artificial
  oligonucleotide probe
atggcgcagcacgctgatggcgcagcacgctgaacgcgatttgccgcagcacgggaaagcggct

SEQ ID NO: 4729 - DNA, 64 bp, Artificial
  oligonucleotide probe
ggctgcacggtcccgtggctgcacggtcccgtttgcatggcgtggggacgcattgcggctttcg

SEQ ID NO: 4730 - DNA, 64 bp, Artificial
  oligonucleotide probe
ggctttgcgcaccgtgggctttgcgcaccgtggcaccgcagctgcgtgaagccgtgcgcaacga

SEQ ID NO: 4731 - DNA, 64 bp, Artificial
  oligonucleotide probe
gcaccgcagctgcgtggcaccgcagctgcgtggcacgggaaagcggctccgtcgcaaagcgcac

SEQ ID NO: 4732 - DNA, 64 bp, Artificial
  oligonucleotide probe
ttcggggaaacgccgtttcggggaaacgccgtgcaccgcagctgcgtgaacggctgcaagcgca

SEQ ID NO: 4733 - DNA, 64 bp, Artificial
  oligonucleotide probe
ggctgcacggtcccgtggctgcacggtcccgtttgcatggcgtggggaaacgcgatttgccgca

SEQ ID NO: 4734 - DNA, 64 bp, Artificial
  oligonucleotide probe
gcaccgcagctgcgtggcaccgcagctgcgtgcgcattgcggctttcgttgcatggcgtgggga

SEQ ID NO: 4735 - DNA, 64 bp, Artificial
  oligonucleotide probe
ccgtcgcaaagcgcacccgtcgcaaagcgcacgggattcgcgcaaacgccgtttcggctgggct

SEQ ID NO: 4736 - DNA, 64 bp, Artificial
  oligonucleotide probe
ttgcatggcgtggggattgcatggcgtggggacgcattgcggctttcgccgtttcggctgggct

SEQ ID NO: 4737 - DNA, 64 bp, Artificial
  oligonucleotide probe
ttcggggaaacgccgtttcggggaaacgccgtaacgcgatttgccgcagcaccgcagctgcgtg

SEQ ID NO: 4738 - DNA, 64 bp, Artificial
  oligonucleotide probe
ttgcatggcgtggggattgcatggcgtggggaaagccgtgcgcaacgaggctgcacggtcccgt

SEQ ID NO: 4739 - DNA, 64 bp, Artificial
  oligonucleotide probe
gggattcgcgcaaacggggattcgcgcaaacggcaccgcagctgcgtggcacgggaaagcggct

SEQ ID NO: 4740 - DNA, 64 bp, Artificial
  oligonucleotide probe
ccgtcgcaaagcgcacccgtcgcaaagcgcacttgcatggcgtggggattcggggaaacgccgt

SEQ ID NO: 4741 - DNA, 64 bp, Artificial
  oligonucleotide probe
gcaccgcagctgcgtggcaccgcagctgcgtgccgtttcggctgggctttcgccgtttgcgctg

SEQ ID NO: 4742 - DNA, 64 bp, Artificial
  oligonucleotide probe
ttcggggaaacgccgtttcggggaaacgccgtgcaccgcagctgcgtggcacgggaaagcggct

SEQ ID NO: 4743 - DNA, 64 bp, Artificial
  oligonucleotide probe
ggctgcacggtcccgtggctgcacggtcccgtgcaccgcagctgcgtgaagccgtgcgcaacga

SEQ ID NO: 4744 - DNA, 64 bp, Artificial
  oligonucleotide probe
ccgtcgcaaagcgcacccgtcgcaaagcgcacgggattcgcgcaaacggcacgggaaagcggct

SEQ ID NO: 4745 - DNA, 64 bp, Artificial
  oligonucleotide probe
gcacgggaaagcggctgcacgggaaagcggctttgcaagcgtccgggattcggggaaacgccgt

SEQ ID NO: 4746 - DNA, 64 bp, Artificial
  oligonucleotide probe
gcacgggaaagcggctgcacgggaaagcggctaacgcgatttgccgcattgcatggcgtgggga

SEQ ID NO: 4747 - DNA, 64 bp, Artificial
  oligonucleotide probe
ggctttgcgcaccgtgggctttgcgcaccgtgaacgcgatttgccgcattgcatggcgtgggga

SEQ ID NO: 4748 - DNA, 64 bp, Artificial
  oligonucleotide probe
ttgcaagcgtccgggattgcaagcgtccgggaccgtttcggctgggctgggattcgcgcaaacg

SEQ ID NO: 4749 - DNA, 64 bp, Artificial
  oligonucleotide probe
gcacgggaaagcggctgcacgggaaagcggctttgcaagcgtccgggaccgtcgcaaagcgcac

SEQ ID NO: 4750 - DNA, 64 bp, Artificial
  oligonucleotide probe
ttcggggaaacgccgtttcggggaaacgccgtccgtcgcaaagcgcacgcaccgcagctgcgtg

SEQ ID NO: 4751 - DNA, 64 bp, Artificial
  oligonucleotide probe
ttgcatggcgtggggattgcatggcgtggggattgcaagcgtccgggaaacgcgatttgccgca

SEQ ID NO: 4752 - DNA, 64 bp, Artificial
  oligonucleotide probe
ttcgccgtttgcgctgttcgccgtttgcgctggcaccgcagctgcgtgaagccgtgcgcaacga

SEQ ID NO: 4753 - DNA, 64 bp, Artificial
  oligonucleotide probe
cgcattgcggctttcgcgcattgcggctttcgttgcatggcgtggggaaagccgtgcgcaacga

SEQ ID NO: 4754 - DNA, 64 bp, Artificial
  oligonucleotide probe
ccgtttcggctgggctccgtttcggctgggctttgcatggcgtggggaatggcgcagcacgctg

SEQ ID NO: 4755 - DNA, 64 bp, Artificial
  oligonucleotide probe
atggcgcagcacgctgatggcgcagcacgctgttcgccgtttgcgctggcaccgcagctgcgtg

SEQ ID NO: 4756 - DNA, 64 bp, Artificial
  oligonucleotide probe
ttcgccgtttgcgctgttcgccgtttgcgctggcaccgcagctgcgtgaacgcgatttgccgca

SEQ ID NO: 4757 - DNA, 64 bp, Artificial
  oligonucleotide probe
cgcattgcggctttcgcgcattgcggctttcgatggcgcagcacgctggcacgggaaagcggct

SEQ ID NO: 4758 - DNA, 64 bp, Artificial
  oligonucleotide probe
atggcgcagcacgctgatggcgcagcacgctggcacgggaaagcggctcgcattgcggctttcg

SEQ ID NO: 4759 - DNA, 64 bp, Artificial
  oligonucleotide probe
gcacgggaaagcggctgcacgggaaagcggctttcggggaaacgccgtccgtcgcaaagcgcac

SEQ ID NO: 4760 - DNA, 64 bp, Artificial
  oligonucleotide probe
aacgcgatttgccgcaaacgcgatttgccgcagggattcgcgcaaacgggctttgcgcaccgtg

SEQ ID NO: 4761 - DNA, 64 bp, Artificial
  oligonucleotide probe
aacggctgcaagcgcaaacggctgcaagcgcattgcatggcgtggggaaagccgtgcgcaacga

SEQ ID NO: 4762 - DNA, 64 bp, Artificial
  oligonucleotide probe
ttcgccgtttgcgctgttcgccgtttgcgctgttgcatggcgtggggaaagccgtgcgcaacga

SEQ ID NO: 4763 - DNA, 64 bp, Artificial
  oligonucleotide probe
ggctttgcgcaccgtgggctttgcgcaccgtgttcggggaaacgccgtgggattcgcgcaaacg

SEQ ID NO: 4764 - DNA, 64 bp, Artificial
  oligonucleotide probe
gggattcgcgcaaacggggattcgcgcaaacggcacgggaaagcggctccgtcgcaaagcgcac

SEQ ID NO: 4765 - DNA, 64 bp, Artificial
  oligonucleotide probe
gcaccgcagctgcgtggcaccgcagctgcgtgaacggctgcaagcgcattgcatggcgtgggga

SEQ ID NO: 4766 - DNA, 64 bp, Artificial
  oligonucleotide probe
ccgtttcggctgggctccgtttcggctgggctttgcatggcgtggggacgcattgcggctttcg

SEQ ID NO: 4767 - DNA, 64 bp, Artificial
  oligonucleotide probe
gcaccgcagctgcgtggcaccgcagctgcgtgggctttgcgcaccgtgaacgcgatttgccgca

SEQ ID NO: 4768 - DNA, 64 bp, Artificial
  oligonucleotide probe
cgcattgcggctttcgcgcattgcggctttcgaacggctgcaagcgcattgcatggcgtgggga

SEQ ID NO: 4769 - DNA, 64 bp, Artificial
  oligonucleotide probe
aacgcgatttgccgcaaacgcgatttgccgcattgcatggcgtggggacgcattgcggctttcg

SEQ ID NO: 4770 - DNA, 64 bp, Artificial
  oligonucleotide probe
aacgcgatttgccgcaaacgcgatttgccgcagcacgggaaagcggctaacggctgcaagcgca

SEQ ID NO: 4771 - DNA, 64 bp, Artificial
  oligonucleotide probe
ttgcatggcgtggggattgcatggcgtggggattgcaagcgtccgggaccgtttcggctgggct

SEQ ID NO: 4772 - DNA, 64 bp, Artificial
  oligonucleotide probe
aagccgtgcgcaacgaaagccgtgcgcaacgaggctttgcgcaccgtggcaccgcagctgcgtg

SEQ ID NO: 4773 - DNA, 64 bp, Artificial
  oligonucleotide probe
ggctttgcgcaccgtgggctttgcgcaccgtgttgcatggcgtggggattgcaagcgtccggga

SEQ ID NO: 4774 - DNA, 64 bp, Artificial
  oligonucleotide probe
aacgcgatttgccgcaaacgcgatttgccgcaggctgcacggtcccgtgcaccgcagctgcgtg

SEQ ID NO: 4775 - DNA, 64 bp, Artificial
  oligonucleotide probe
ttcgccgtttgcgctgttcgccgtttgcgctggcacgggaaagcggctttcggggaaacgccgt

SEQ ID NO: 4776 - DNA, 64 bp, Artificial
  oligonucleotide probe
gcaccgcagctgcgtggcaccgcagctgcgtgatggcgcagcacgctgttcggggaaacgccgt

SEQ ID NO: 4777 - DNA, 64 bp, Artificial
  oligonucleotide probe
ggctgcacggtcccgtggctgcacggtcccgtgcacgggaaagcggctttgcaagcgtccggga

SEQ ID NO: 4778 - DNA, 64 bp, Artificial
  oligonucleotide probe
ggctttgcgcaccgtgggctttgcgcaccgtggcaccgcagctgcgtgttgcaagcgtccggga

SEQ ID NO: 4779 - DNA, 64 bp, Artificial
  oligonucleotide probe
gcacgggaaagcggctgcacgggaaagcggctaagccgtgcgcaacgaccgtttcggctgggct

SEQ ID NO: 4780 - DNA, 64 bp, Artificial
  oligonucleotide probe
gggattcgcgcaaacggggattcgcgcaaacggcacgggaaagcggctaacggctgcaagcgca

SEQ ID NO: 4781 - DNA, 64 bp, Artificial
  oligonucleotide probe
gcaccgcagctgcgtggcaccgcagctgcgtgatggcgcagcacgctgttgcatggcgtgggga

SEQ ID NO: 4782 - DNA, 64 bp, Artificial
  oligonucleotide probe
gcacgggaaagcggctgcacgggaaagcggctggctttgcgcaccgtgccgtttcggctgggct

SEQ ID NO: 4783 - DNA, 64 bp, Artificial
  oligonucleotide probe
aacggctgcaagcgcaaacggctgcaagcgcattcgccgtttgcgctggcaccgcagctgcgtg

SEQ ID NO: 4784 - DNA, 64 bp, Artificial
  oligonucleotide probe
ttgcatggcgtggggattgcatggcgtggggaggctttgcgcaccgtgccgtttcggctgggct

SEQ ID NO: 4785 - DNA, 64 bp, Artificial
  oligonucleotide probe
gggattcgcgcaaacggggattcgcgcaaacgaagccgtgcgcaacgaggctgcacggtcccgt

SEQ ID NO: 4786 - DNA, 64 bp, Artificial
  oligonucleotide probe
cgcattgcggctttcgcgcattgcggctttcgaacgcgatttgccgcagggattcgcgcaaacg

SEQ ID NO: 4787 - DNA, 64 bp, Artificial
  oligonucleotide probe
ccgtcgcaaagcgcacccgtcgcaaagcgcacgggattcgcgcaaacgcgcattgcggctttcg

SEQ ID NO: 4788 - DNA, 64 bp, Artificial
  oligonucleotide probe
ttgcatggcgtggggattgcatggcgtggggattcgccgtttgcgctgccgtcgcaaagcgcac

SEQ ID NO: 4789 - DNA, 64 bp, Artificial
  oligonucleotide probe
ttgcatggcgtggggattgcatggcgtggggattgcaagcgtccgggattcgccgtttgcgctg

SEQ ID NO: 4790 - DNA, 64 bp, Artificial
  oligonucleotide probe
ccgtttcggctgggctccgtttcggctgggctgcaccgcagctgcgtgaagccgtgcgcaacga

SEQ ID NO: 4791 - DNA, 64 bp, Artificial
  oligonucleotide probe
gcacgggaaagcggctgcacgggaaagcggctttcgccgtttgcgctgggctgcacggtcccgt

SEQ ID NO: 4792 - DNA, 64 bp, Artificial
  oligonucleotide probe
ccgtttcggctgggctccgtttcggctgggctgcacgggaaagcggctcgcattgcggctttcg

SEQ ID NO: 4793 - DNA, 64 bp, Artificial
  oligonucleotide probe
gggattcgcgcaaacggggattcgcgcaaacggcacgggaaagcggctatggcgcagcacgctg

SEQ ID NO: 4794 - DNA, 64 bp, Artificial
  oligonucleotide probe
aagccgtgcgcaacgaaagccgtgcgcaacgaccgtttcggctgggctgcacgggaaagcggct

SEQ ID NO: 4795 - DNA, 64 bp, Artificial
  oligonucleotide probe
ttgcatggcgtggggattgcatggcgtggggaaagccgtgcgcaacgaatggcgcagcacgctg

SEQ ID NO: 4796 - DNA, 64 bp, Artificial
  oligonucleotide probe
gggattcgcgcaaacggggattcgcgcaaacgttgcaagcgtccgggaatggcgcagcacgctg

SEQ ID NO: 4797 - DNA, 64 bp, Artificial
  oligonucleotide probe
cgcattgcggctttcgcgcattgcggctttcgttgcaagcgtccgggagcaccgcagctgcgtg

SEQ ID NO: 4798 - DNA, 64 bp, Artificial
  oligonucleotide probe
gcaccgcagctgcgtggcaccgcagctgcgtgttgcaagcgtccgggattcgccgtttgcgctg

SEQ ID NO: 4799 - DNA, 64 bp, Artificial
  oligonucleotide probe
aagccgtgcgcaacgaaagccgtgcgcaacgagggattcgcgcaaacgttgcatggcgtgggga

SEQ ID NO: 4800 - DNA, 64 bp, Artificial
  oligonucleotide probe
aagccgtgcgcaacgaaagccgtgcgcaacgacgcattgcggctttcggcacgggaaagcggct

SEQ ID NO: 4801 - DNA, 64 bp, Artificial
  oligonucleotide probe
gggattcgcgcaaacggggattcgcgcaaacgcgcattgcggctttcgttgcaagcgtccggga

SEQ ID NO: 4802 - DNA, 64 bp, Artificial
  oligonucleotide probe
ttcgccgtttgcgctgttcgccgtttgcgctggggattcgcgcaaacgttgcaagcgtccggga

SEQ ID NO: 4803 - DNA, 64 bp, Artificial
  oligonucleotide probe
gcaccgcagctgcgtggcaccgcagctgcgtgaacggctgcaagcgcaaacgcgatttgccgca

SEQ ID NO: 4804 - DNA, 64 bp, Artificial
  oligonucleotide probe
gcaccgcagctgcgtggcaccgcagctgcgtgcgcattgcggctttcgggctttgcgcaccgtg

SEQ ID NO: 4805 - DNA, 64 bp, Artificial
  oligonucleotide probe
ttgcaagcgtccgggattgcaagcgtccgggaatggcgcagcacgctggcacgggaaagcggct

SEQ ID NO: 4806 - DNA, 64 bp, Artificial
  oligonucleotide probe
ttcggggaaacgccgtttcggggaaacgccgtccgtcgcaaagcgcacttgcatggcgtgggga

SEQ ID NO: 4807 - DNA, 64 bp, Artificial
  oligonucleotide probe
gggattcgcgcaaacggggattcgcgcaaacgaacggctgcaagcgcaccgtttcggctgggct

SEQ ID NO: 4808 - DNA, 64 bp, Artificial
  oligonucleotide probe
atggcgcagcacgctgatggcgcagcacgctgccgtttcggctgggctttgcatggcgtgggga

SEQ ID NO: 4809 - DNA, 64 bp, Artificial
  oligonucleotide probe
ttcgccgtttgcgctgttcgccgtttgcgctgttgcatggcgtggggaaacggctgcaagcgca

SEQ ID NO: 4810 - DNA, 64 bp, Artificial
  oligonucleotide probe
gcacgggaaagcggctgcacgggaaagcggctcgcattgcggctttcgccgtcgcaaagcgcac

SEQ ID NO: 4811 - DNA, 64 bp, Artificial
  oligonucleotide probe
ttcgccgtttgcgctgttcgccgtttgcgctgttgcatggcgtggggattgcaagcgtccggga

SEQ ID NO: 4812 - DNA, 64 bp, Artificial
  oligonucleotide probe
aacggctgcaagcgcaaacggctgcaagcgcaccgtttcggctgggctgcacgggaaagcggct

SEQ ID NO: 4813 - DNA, 64 bp, Artificial
  oligonucleotide probe
ccgtttcggctgggctccgtttcggctgggctggctgcacggtcccgtgggattcgcgcaaacg

SEQ ID NO: 4814 - DNA, 64 bp, Artificial
  oligonucleotide probe
gcacgggaaagcggctgcacgggaaagcggctaagccgtgcgcaacgaggctttgcgcaccgtg

SEQ ID NO: 4815 - DNA, 64 bp, Artificial
  oligonucleotide probe
ttcggggaaacgccgtttcggggaaacgccgtccgtttcggctgggctgcacgggaaagcggct

SEQ ID NO: 4816 - DNA, 64 bp, Artificial
  oligonucleotide probe
gcaccgcagctgcgtggcaccgcagctgcgtggcacgggaaagcggctaacgcgatttgccgca

SEQ ID NO: 4817 - DNA, 64 bp, Artificial
  oligonucleotide probe
atggcgcagcacgctgatggcgcagcacgctggcacgggaaagcggctaagccgtgcgcaacga

SEQ ID NO: 4818 - DNA, 64 bp, Artificial
  oligonucleotide probe
ttgcaagcgtccgggattgcaagcgtccgggaggctttgcgcaccgtggggattcgcgcaaacg

SEQ ID NO: 4819 - DNA, 64 bp, Artificial
  oligonucleotide probe
gcaccgcagctgcgtggcaccgcagctgcgtgaacggctgcaagcgcattcggggaaacgccgt

SEQ ID NO: 4820 - DNA, 64 bp, Artificial
  oligonucleotide probe
gggattcgcgcaaacggggattcgcgcaaacgttgcaagcgtccgggaggctgcacggtcccgt

SEQ ID NO: 4821 - DNA, 64 bp, Artificial
  oligonucleotide probe
gcaccgcagctgcgtggcaccgcagctgcgtgttgcaagcgtccgggattgcatggcgtgggga

SEQ ID NO: 4822 - DNA, 64 bp, Artificial
  oligonucleotide probe
gcacgggaaagcggctgcacgggaaagcggctcgcattgcggctttcggcaccgcagctgcgtg

SEQ ID NO: 4823 - DNA, 64 bp, Artificial
  oligonucleotide probe
ccgtcgcaaagcgcacccgtcgcaaagcgcacgggattcgcgcaaacggcaccgcagctgcgtg

SEQ ID NO: 4824 - DNA, 64 bp, Artificial
  oligonucleotide probe
gggattcgcgcaaacggggattcgcgcaaacgccgtttcggctgggctttcgccgtttgcgctg

SEQ ID NO: 4825 - DNA, 64 bp, Artificial
  oligonucleotide probe
aagccgtgcgcaacgaaagccgtgcgcaacgaatggcgcagcacgctggcacgggaaagcggct

SEQ ID NO: 4826 - DNA, 64 bp, Artificial
  oligonucleotide probe
ttgcatggcgtggggattgcatggcgtggggattcggggaaacgccgtccgtcgcaaagcgcac

SEQ ID NO: 4827 - DNA, 64 bp, Artificial
  oligonucleotide probe
gcacgggaaagcggctgcacgggaaagcggctaacgcgatttgccgcattcgccgtttgcgctg

SEQ ID NO: 4828 - DNA, 64 bp, Artificial
  oligonucleotide probe
cgcattgcggctttcgcgcattgcggctttcgttcggggaaacgccgtttgcatggcgtgggga

SEQ ID NO: 4829 - DNA, 64 bp, Artificial
  oligonucleotide probe
aacggctgcaagcgcaaacggctgcaagcgcaccgtttcggctgggctttgcatggcgtgggga

SEQ ID NO: 4830 - DNA, 64 bp, Artificial
  oligonucleotide probe
ggctgcacggtcccgtggctgcacggtcccgtgcacgggaaagcggctccgtttcggctgggct

SEQ ID NO: 4831 - DNA, 64 bp, Artificial
  oligonucleotide probe
ttgcaagcgtccgggattgcaagcgtccgggaaacggctgcaagcgcagcacgggaaagcggct

SEQ ID NO: 4832 - DNA, 64 bp, Artificial
  oligonucleotide probe
gcaccgcagctgcgtggcaccgcagctgcgtgaagccgtgcgcaacgaatggcgcagcacgctg

SEQ ID NO: 4833 - DNA, 64 bp, Artificial
  oligonucleotide probe
aacgcgatttgccgcaaacgcgatttgccgcagcaccgcagctgcgtgggctttgcgcaccgtg

SEQ ID NO: 4834 - DNA, 64 bp, Artificial
  oligonucleotide probe
aagccgtgcgcaacgaaagccgtgcgcaacgaccgtcgcaaagcgcacgggattcgcgcaaacg

SEQ ID NO: 4835 - DNA, 64 bp, Artificial
  oligonucleotide probe
ttcgccgtttgcgctgttcgccgtttgcgctggcaccgcagctgcgtgttcggggaaacgccgt

SEQ ID NO: 4836 - DNA, 64 bp, Artificial
  oligonucleotide probe
ttgcaagcgtccgggattgcaagcgtccgggaaacggctgcaagcgcagcaccgcagctgcgtg

SEQ ID NO: 4837 - DNA, 64 bp, Artificial
  oligonucleotide probe
gggattcgcgcaaacggggattcgcgcaaacgaacggctgcaagcgcaatggcgcagcacgctg

SEQ ID NO: 4838 - DNA, 64 bp, Artificial
  oligonucleotide probe
ttgcatggcgtggggattgcatggcgtggggaatggcgcagcacgctgttcgccgtttgcgctg

SEQ ID NO: 4839 - DNA, 64 bp, Artificial
  oligonucleotide probe
gcaccgcagctgcgtggcaccgcagctgcgtgcgcattgcggctttcgttcggggaaacgccgt

SEQ ID NO: 4840 - DNA, 64 bp, Artificial
  oligonucleotide probe
aagccgtgcgcaacgaaagccgtgcgcaacgaaacggctgcaagcgcagggattcgcgcaaacg

SEQ ID NO: 4841 - DNA, 64 bp, Artificial
  oligonucleotide probe
ttcggggaaacgccgtttcggggaaacgccgtttgcatggcgtggggagcacgggaaagcggct

SEQ ID NO: 4842 - DNA, 64 bp, Artificial
  oligonucleotide probe
ttcgccgtttgcgctgttcgccgtttgcgctggcaccgcagctgcgtgttgcaagcgtccggga

SEQ ID NO: 4843 - DNA, 64 bp, Artificial
  oligonucleotide probe
ttgcatggcgtggggattgcatggcgtggggattcggggaaacgccgtaacgcgatttgccgca

SEQ ID NO: 4844 - DNA, 64 bp, Artificial
  oligonucleotide probe
atggcgcagcacgctgatggcgcagcacgctgccgtcgcaaagcgcacgcacgggaaagcggct

SEQ ID NO: 4845 - DNA, 64 bp, Artificial
  oligonucleotide probe
ggctttgcgcaccgtgggctttgcgcaccgtgccgtttcggctgggctttgcatggcgtgggga

SEQ ID NO: 4846 - DNA, 64 bp, Artificial
  oligonucleotide probe
gggattcgcgcaaacggggattcgcgcaaacgcgcattgcggctttcgccgtcgcaaagcgcac

SEQ ID NO: 4847 - DNA, 64 bp, Artificial
  oligonucleotide probe
gcaccgcagctgcgtggcaccgcagctgcgtgcgcattgcggctttcgaacggctgcaagcgca

SEQ ID NO: 4848 - DNA, 64 bp, Artificial
  oligonucleotide probe
ttgcatggcgtggggattgcatggcgtggggaatggcgcagcacgctgccgtttcggctgggct

SEQ ID NO: 4849 - DNA, 64 bp, Artificial
  oligonucleotide probe
ggctttgcgcaccgtgggctttgcgcaccgtgccgtcgcaaagcgcacgggattcgcgcaaacg

SEQ ID NO: 4850 - DNA, 64 bp, Artificial
  oligonucleotide probe
aagccgtgcgcaacgaaagccgtgcgcaacgacgcattgcggctttcggggattcgcgcaaacg

SEQ ID NO: 4851 - DNA, 64 bp, Artificial
  oligonucleotide probe
ggctgcacggtcccgtggctgcacggtcccgtttgcatggcgtggggaaagccgtgcgcaacga

SEQ ID NO: 4852 - DNA, 64 bp, Artificial
  oligonucleotide probe
gcaccgcagctgcgtggcaccgcagctgcgtgaagccgtgcgcaacgaggctgcacggtcccgt

SEQ ID NO: 4853 - DNA, 64 bp, Artificial
  oligonucleotide probe
aacgcgatttgccgcaaacgcgatttgccgcagggattcgcgcaaacgttgcatggcgtgggga

SEQ ID NO: 4854 - DNA, 64 bp, Artificial
  oligonucleotide probe
ggctgcacggtcccgtggctgcacggtcccgtgcacgggaaagcggctggctttgcgcaccgtg

SEQ ID NO: 4855 - DNA, 64 bp, Artificial
  oligonucleotide probe
ttgcatggcgtggggattgcatggcgtggggaccgtttcggctgggctaacgcgatttgccgca

SEQ ID NO: 4856 - DNA, 64 bp, Artificial
  oligonucleotide probe
gcacgggaaagcggctgcacgggaaagcggctcgcattgcggctttcgttcggggaaacgccgt

SEQ ID NO: 4857 - DNA, 64 bp, Artificial
  oligonucleotide probe
aacgcgatttgccgcaaacgcgatttgccgcagggattcgcgcaaacgatggcgcagcacgctg

SEQ ID NO: 4858 - DNA, 64 bp, Artificial
  oligonucleotide probe
ttgcaagcgtccgggattgcaagcgtccgggaaacgcgatttgccgcagcaccgcagctgcgtg

SEQ ID NO: 4859 - DNA, 64 bp, Artificial
  oligonucleotide probe
ttgcatggcgtggggattgcatggcgtggggattgcaagcgtccgggaccgtcgcaaagcgcac

SEQ ID NO: 4860 - DNA, 64 bp, Artificial
  oligonucleotide probe
gggattcgcgcaaacggggattcgcgcaaacgaagccgtgcgcaacgaccgtcgcaaagcgcac

SEQ ID NO: 4861 - DNA, 64 bp, Artificial
  oligonucleotide probe
ttgcatggcgtggggattgcatggcgtggggaatggcgcagcacgctgccgtcgcaaagcgcac

SEQ ID NO: 4862 - DNA, 64 bp, Artificial
  oligonucleotide probe
aacggctgcaagcgcaaacggctgcaagcgcaaacgcgatttgccgcagggattcgcgcaaacg

SEQ ID NO: 4863 - DNA, 64 bp, Artificial
  oligonucleotide probe
ggctgcacggtcccgtggctgcacggtcccgtgggattcgcgcaaacgatggcgcagcacgctg

SEQ ID NO: 4864 - DNA, 64 bp, Artificial
  oligonucleotide probe
ttgcatggcgtggggattgcatggcgtggggaaacggctgcaagcgcagggattcgcgcaaacg

SEQ ID NO: 4865 - DNA, 64 bp, Artificial
  oligonucleotide probe
ttcgccgtttgcgctgttcgccgtttgcgctggggattcgcgcaaacgaacggctgcaagcgca

SEQ ID NO: 4866 - DNA, 64 bp, Artificial
  oligonucleotide probe
ttcggggaaacgccgtttcggggaaacgccgtggctgcacggtcccgtttgcatggcgtgggga

SEQ ID NO: 4867 - DNA, 64 bp, Artificial
  oligonucleotide probe
aagccgtgcgcaacgaaagccgtgcgcaacgaggctgcacggtcccgtgcacgggaaagcggct

SEQ ID NO: 4868 - DNA, 64 bp, Artificial
  oligonucleotide probe
cgcattgcggctttcgcgcattgcggctttcgccgtcgcaaagcgcacgggattcgcgcaaacg

SEQ ID NO: 4869 - DNA, 64 bp, Artificial
  oligonucleotide probe
gggattcgcgcaaacggggattcgcgcaaacggcacgggaaagcggctaagccgtgcgcaacga

SEQ ID NO: 4870 - DNA, 64 bp, Artificial
  oligonucleotide probe
ccgtcgcaaagcgcacccgtcgcaaagcgcacgcacgggaaagcggctaacgcgatttgccgca

SEQ ID NO: 4871 - DNA, 64 bp, Artificial
  oligonucleotide probe
ggctttgcgcaccgtgggctttgcgcaccgtggcaccgcagctgcgtgcgcattgcggctttcg

SEQ ID NO: 4872 - DNA, 64 bp, Artificial
  oligonucleotide probe
aacggctgcaagcgcaaacggctgcaagcgcaccgtttcggctgggctgggattcgcgcaaacg

SEQ ID NO: 4873 - DNA, 64 bp, Artificial
  oligonucleotide probe
gcaccgcagctgcgtggcaccgcagctgcgtgccgtttcggctgggctccgtcgcaaagcgcac

SEQ ID NO: 4874 - DNA, 64 bp, Artificial
  oligonucleotide probe
aacgcgatttgccgcaaacgcgatttgccgcaggctgcacggtcccgtttgcatggcgtgggga

SEQ ID NO: 4875 - DNA, 64 bp, Artificial
  oligonucleotide probe
ggctgcacggtcccgtggctgcacggtcccgtgcacgggaaagcggctcgcattgcggctttcg

SEQ ID NO: 4876 - DNA, 64 bp, Artificial
  oligonucleotide probe
aacgcgatttgccgcaaacgcgatttgccgcagcacgggaaagcggctttcggggaaacgccgt

SEQ ID NO: 4877 - DNA, 64 bp, Artificial
  oligonucleotide probe
ccgtttcggctgggctccgtttcggctgggctttgcatggcgtggggagcacgggaaagcggct

SEQ ID NO: 4878 - DNA, 64 bp, Artificial
  oligonucleotide probe
gcacgggaaagcggctgcacgggaaagcggctaacggctgcaagcgcaggctttgcgcaccgtg

SEQ ID NO: 4879 - DNA, 64 bp, Artificial
  oligonucleotide probe
ttgcatggcgtggggattgcatggcgtggggacgcattgcggctttcgggctttgcgcaccgtg

SEQ ID NO: 4880 - DNA, 64 bp, Artificial
  oligonucleotide probe
aacgcgatttgccgcaaacgcgatttgccgcattgcatggcgtggggaaagccgtgcgcaacga

SEQ ID NO: 4881 - DNA, 64 bp, Artificial
  oligonucleotide probe
ccgtcgcaaagcgcacccgtcgcaaagcgcacgggattcgcgcaaacgaagccgtgcgcaacga

SEQ ID NO: 4882 - DNA, 64 bp, Artificial
  oligonucleotide probe
aacgcgatttgccgcaaacgcgatttgccgcattgcatggcgtggggagcaccgcagctgcgtg

SEQ ID NO: 4883 - DNA, 64 bp, Artificial
  oligonucleotide probe
atggcgcagcacgctgatggcgcagcacgctgccgtcgcaaagcgcacgcaccgcagctgcgtg

SEQ ID NO: 4884 - DNA, 64 bp, Artificial
  oligonucleotide probe
gcaccgcagctgcgtggcaccgcagctgcgtgggctttgcgcaccgtgttgcatggcgtgggga

SEQ ID NO: 4885 - DNA, 64 bp, Artificial
  oligonucleotide probe
ttgcatggcgtggggattgcatggcgtggggaaacgcgatttgccgcaccgtcgcaaagcgcac

SEQ ID NO: 4886 - DNA, 64 bp, Artificial
  oligonucleotide probe
atggcgcagcacgctgatggcgcagcacgctgggctgcacggtcccgtgcaccgcagctgcgtg

SEQ ID NO: 4887 - DNA, 64 bp, Artificial
  oligonucleotide probe
ccgtttcggctgggctccgtttcggctgggctgcacgggaaagcggctatggcgcagcacgctg

SEQ ID NO: 4888 - DNA, 64 bp, Artificial
  oligonucleotide probe
atggcgcagcacgctgatggcgcagcacgctgttcgccgtttgcgctggcacgggaaagcggct

SEQ ID NO: 4889 - DNA, 64 bp, Artificial
  oligonucleotide probe
gggattcgcgcaaacggggattcgcgcaaacgcgcattgcggctttcgaacgcgatttgccgca

SEQ ID NO: 4890 - DNA, 64 bp, Artificial
  oligonucleotide probe
aagccgtgcgcaacgaaagccgtgcgcaacgaccgtcgcaaagcgcacttgcatggcgtgggga

SEQ ID NO: 4891 - DNA, 64 bp, Artificial
  oligonucleotide probe
ttcgccgtttgcgctgttcgccgtttgcgctggcacgggaaagcggctaagccgtgcgcaacga

SEQ ID NO: 4892 - DNA, 64 bp, Artificial
  oligonucleotide probe
ccgtcgcaaagcgcacccgtcgcaaagcgcacggctgcacggtcccgtttgcatggcgtgggga

SEQ ID NO: 4893 - DNA, 64 bp, Artificial
  oligonucleotide probe
ccgtttcggctgggctccgtttcggctgggctttcgccgtttgcgctggcaccgcagctgcgtg

SEQ ID NO: 4894 - DNA, 64 bp, Artificial
  oligonucleotide probe
ccgtcgcaaagcgcacccgtcgcaaagcgcacgcaccgcagctgcgtgaagccgtgcgcaacga

SEQ ID NO: 4895 - DNA, 64 bp, Artificial
  oligonucleotide probe
aagccgtgcgcaacgaaagccgtgcgcaacgattcgccgtttgcgctgttgcatggcgtgggga

SEQ ID NO: 4896 - DNA, 64 bp, Artificial
  oligonucleotide probe
ttgcatggcgtggggattgcatggcgtggggaaagccgtgcgcaacgaggctttgcgcaccgtg

SEQ ID NO: 4897 - DNA, 64 bp, Artificial
  oligonucleotide probe
ttgcaagcgtccgggattgcaagcgtccgggaatggcgcagcacgctggggattcgcgcaaacg

SEQ ID NO: 4898 - DNA, 64 bp, Artificial
  oligonucleotide probe
ttcggggaaacgccgtttcggggaaacgccgtgggattcgcgcaaacgaacggctgcaagcgca

SEQ ID NO: 4899 - DNA, 64 bp, Artificial
  oligonucleotide probe
ttgcatggcgtggggattgcatggcgtggggaggctttgcgcaccgtgttcgccgtttgcgctg

SEQ ID NO: 4900 - DNA, 64 bp, Artificial
  oligonucleotide probe
ccgtcgcaaagcgcacccgtcgcaaagcgcacttgcatggcgtggggaaacggctgcaagcgca

SEQ ID NO: 4901 - DNA, 64 bp, Artificial
  oligonucleotide probe
ccgtcgcaaagcgcacccgtcgcaaagcgcacggctgcacggtcccgtgcaccgcagctgcgtg

SEQ ID NO: 4902 - DNA, 64 bp, Artificial
  oligonucleotide probe
gcacgggaaagcggctgcacgggaaagcggctggctttgcgcaccgtgttcgccgtttgcgctg

SEQ ID NO: 4903 - DNA, 64 bp, Artificial
  oligonucleotide probe
atggcgcagcacgctgatggcgcagcacgctgggctgcacggtcccgtgggattcgcgcaaacg

SEQ ID NO: 4904 - DNA, 64 bp, Artificial
  oligonucleotide probe
aacggctgcaagcgcaaacggctgcaagcgcaggctgcacggtcccgtgcacgggaaagcggct

SEQ ID NO: 4905 - DNA, 64 bp, Artificial
  oligonucleotide probe
ggctttgcgcaccgtgggctttgcgcaccgtgggctgcacggtcccgtgcaccgcagctgcgtg

SEQ ID NO: 4906 - DNA, 64 bp, Artificial
  oligonucleotide probe
gggattcgcgcaaacggggattcgcgcaaacgatggcgcagcacgctgttcgccgtttgcgctg

SEQ ID NO: 4907 - DNA, 64 bp, Artificial
  oligonucleotide probe
ttgcaagcgtccgggattgcaagcgtccgggagcaccgcagctgcgtgcgcattgcggctttcg

SEQ ID NO: 4908 - DNA, 64 bp, Artificial
  oligonucleotide probe
ttgcatggcgtggggattgcatggcgtggggaccgtttcggctgggctggctgcacggtcccgt

SEQ ID NO: 4909 - DNA, 64 bp, Artificial
  oligonucleotide probe
atggcgcagcacgctgatggcgcagcacgctgccgtcgcaaagcgcacttgcatggcgtgggga

SEQ ID NO: 4910 - DNA, 64 bp, Artificial
  oligonucleotide probe
gcacgggaaagcggctgcacgggaaagcggctccgtttcggctgggctgcaccgcagctgcgtg

SEQ ID NO: 4911 - DNA, 64 bp, Artificial
  oligonucleotide probe
aacggctgcaagcgcaaacggctgcaagcgcagggattcgcgcaaacgttgcaagcgtccggga

SEQ ID NO: 4912 - DNA, 64 bp, Artificial
  oligonucleotide probe
aacgcgatttgccgcaaacgcgatttgccgcagggattcgcgcaaacggcacgggaaagcggct

SEQ ID NO: 4913 - DNA, 64 bp, Artificial
  oligonucleotide probe
gcacgggaaagcggctgcacgggaaagcggctggctttgcgcaccgtggggattcgcgcaaacg

SEQ ID NO: 4914 - DNA, 64 bp, Artificial
  oligonucleotide probe
cgcattgcggctttcgcgcattgcggctttcgggctttgcgcaccgtggcaccgcagctgcgtg

SEQ ID NO: 4915 - DNA, 64 bp, Artificial
  oligonucleotide probe
ttgcatggcgtggggattgcatggcgtggggagcacgggaaagcggctaacggctgcaagcgca

SEQ ID NO: 4916 - DNA, 64 bp, Artificial
  oligonucleotide probe
ttgcaagcgtccgggattgcaagcgtccgggaatggcgcagcacgctgttgcatggcgtgggga

SEQ ID NO: 4917 - DNA, 64 bp, Artificial
  oligonucleotide probe
ttcggggaaacgccgtttcggggaaacgccgtaacgcgatttgccgcagggattcgcgcaaacg

SEQ ID NO: 4918 - DNA, 64 bp, Artificial
  oligonucleotide probe
gcacgggaaagcggctgcacgggaaagcggctaacggctgcaagcgcaaacgcgatttgccgca

SEQ ID NO: 4919 - DNA, 64 bp, Artificial
  oligonucleotide probe
aacggctgcaagcgcaaacggctgcaagcgcaggctttgcgcaccgtgttgcatggcgtgggga

SEQ ID NO: 4920 - DNA, 64 bp, Artificial
  oligonucleotide probe
gggattcgcgcaaacggggattcgcgcaaacgttcgccgtttgcgctgccgtcgcaaagcgcac

SEQ ID NO: 4921 - DNA, 64 bp, Artificial
  oligonucleotide probe
ggctttgcgcaccgtgggctttgcgcaccgtggggattcgcgcaaacgcgcattgcggctttcg

SEQ ID NO: 4922 - DNA, 64 bp, Artificial
  oligonucleotide probe
aagccgtgcgcaacgaaagccgtgcgcaacgaggctgcacggtcccgtgggattcgcgcaaacg

SEQ ID NO: 4923 - DNA, 64 bp, Artificial
  oligonucleotide probe
gggattcgcgcaaacggggattcgcgcaaacgggctttgcgcaccgtgccgtttcggctgggct

SEQ ID NO: 4924 - DNA, 64 bp, Artificial
  oligonucleotide probe
ttgcatggcgtggggattgcatggcgtggggaatggcgcagcacgctgttcggggaaacgccgt

SEQ ID NO: 4925 - DNA, 64 bp, Artificial
  oligonucleotide probe
ccgtcgcaaagcgcacccgtcgcaaagcgcacttgcatggcgtggggattgcaagcgtccggga

SEQ ID NO: 4926 - DNA, 64 bp, Artificial
  oligonucleotide probe
ttcgccgtttgcgctgttcgccgtttgcgctgttgcatggcgtggggaatggcgcagcacgctg

SEQ ID NO: 4927 - DNA, 64 bp, Artificial
  oligonucleotide probe
gcaccgcagctgcgtggcaccgcagctgcgtgaagccgtgcgcaacgaaacgcgatttgccgca

SEQ ID NO: 4928 - DNA, 64 bp, Artificial
  oligonucleotide probe
cgcattgcggctttcgcgcattgcggctttcgggctgcacggtcccgtgcacgggaaagcggct

SEQ ID NO: 4929 - DNA, 64 bp, Artificial
  oligonucleotide probe
ccgtcgcaaagcgcacccgtcgcaaagcgcacgcacgggaaagcggctcgcattgcggctttcg

SEQ ID NO: 4930 - DNA, 64 bp, Artificial
  oligonucleotide probe
aacgcgatttgccgcaaacgcgatttgccgcagcacgggaaagcggctggctttgcgcaccgtg

SEQ ID NO: 4931 - DNA, 64 bp, Artificial
  oligonucleotide probe
aagccgtgcgcaacgaaagccgtgcgcaacgaaacggctgcaagcgcagcacgggaaagcggct

SEQ ID NO: 4932 - DNA, 64 bp, Artificial
  oligonucleotide probe
ggctgcacggtcccgtggctgcacggtcccgtttgcatggcgtggggattgcaagcgtccggga

SEQ ID NO: 4933 - DNA, 64 bp, Artificial
  oligonucleotide probe
ttcggggaaacgccgtttcggggaaacgccgtgggattcgcgcaaacgaagccgtgcgcaacga

SEQ ID NO: 4934 - DNA, 64 bp, Artificial
  oligonucleotide probe
gggattcgcgcaaacggggattcgcgcaaacgaacggctgcaagcgcaccgtcgcaaagcgcac

SEQ ID NO: 4935 - DNA, 64 bp, Artificial
  oligonucleotide probe
ttgcatggcgtggggattgcatggcgtggggaaagccgtgcgcaacgagggattcgcgcaaacg

SEQ ID NO: 4936 - DNA, 64 bp, Artificial
  oligonucleotide probe
aacggctgcaagcgcaaacggctgcaagcgcaatggcgcagcacgctggggattcgcgcaaacg

SEQ ID NO: 4937 - DNA, 64 bp, Artificial
  oligonucleotide probe
ccgtttcggctgggctccgtttcggctgggctttgcatggcgtggggaaagccgtgcgcaacga

SEQ ID NO: 4938 - DNA, 64 bp, Artificial
  oligonucleotide probe
aagccgtgcgcaacgaaagccgtgcgcaacgaaacggctgcaagcgcattgcatggcgtgggga

SEQ ID NO: 4939 - DNA, 64 bp, Artificial
  oligonucleotide probe
aagccgtgcgcaacgaaagccgtgcgcaacgattcgccgtttgcgctggggattcgcgcaaacg

SEQ ID NO: 4940 - DNA, 64 bp, Artificial
  oligonucleotide probe
aagccgtgcgcaacgaaagccgtgcgcaacgattcgccgtttgcgctggcacgggaaagcggct

SEQ ID NO: 4941 - DNA, 64 bp, Artificial
  oligonucleotide probe
gggattcgcgcaaacggggattcgcgcaaacggcacgggaaagcggctttcgccgtttgcgctg

SEQ ID NO: 4942 - DNA, 64 bp, Artificial
  oligonucleotide probe
aagccgtgcgcaacgaaagccgtgcgcaacgaccgtcgcaaagcgcacgcaccgcagctgcgtg

SEQ ID NO: 4943 - DNA, 64 bp, Artificial
  oligonucleotide probe
gcacgggaaagcggctgcacgggaaagcggctccgtttcggctgggctttcgccgtttgcgctg

SEQ ID NO: 4944 - DNA, 64 bp, Artificial
  oligonucleotide probe
gcacgggaaagcggctgcacgggaaagcggctccgtcgcaaagcgcacttgcatggcgtgggga

SEQ ID NO: 4945 - DNA, 64 bp, Artificial
  oligonucleotide probe
aacgcgatttgccgcaaacgcgatttgccgcattcgccgtttgcgctggcaccgcagctgcgtg

SEQ ID NO: 4946 - DNA, 64 bp, Artificial
  oligonucleotide probe
aacgcgatttgccgcaaacgcgatttgccgcagcacgggaaagcggctaagccgtgcgcaacga

SEQ ID NO: 4947 - DNA, 64 bp, Artificial
  oligonucleotide probe
ggctgcacggtcccgtggctgcacggtcccgtgggattcgcgcaaacggcaccgcagctgcgtg

SEQ ID NO: 4948 - DNA, 64 bp, Artificial
  oligonucleotide probe
ttcgccgtttgcgctgttcgccgtttgcgctgccgtcgcaaagcgcacgcaccgcagctgcgtg

SEQ ID NO: 4949 - DNA, 64 bp, Artificial
  oligonucleotide probe
ttgcatggcgtggggattgcatggcgtggggagcaccgcagctgcgtgccgtcgcaaagcgcac

SEQ ID NO: 4950 - DNA, 64 bp, Artificial
  oligonucleotide probe
ttgcatggcgtggggattgcatggcgtggggaaagccgtgcgcaacgattgcaagcgtccggga

SEQ ID NO: 4951 - DNA, 64 bp, Artificial
  oligonucleotide probe
gcaccgcagctgcgtggcaccgcagctgcgtgttgcaagcgtccgggagggattcgcgcaaacg

SEQ ID NO: 4952 - DNA, 64 bp, Artificial
  oligonucleotide probe
ttcggggaaacgccgtttcggggaaacgccgtttgcatggcgtggggaaacggctgcaagcgca

SEQ ID NO: 4953 - DNA, 64 bp, Artificial
  oligonucleotide probe
aagccgtgcgcaacgaaagccgtgcgcaacgagcaccgcagctgcgtggcacgggaaagcggct

SEQ ID NO: 4954 - DNA, 64 bp, Artificial
  oligonucleotide probe
aagccgtgcgcaacgaaagccgtgcgcaacgattcggggaaacgccgtgcacgggaaagcggct

SEQ ID NO: 4955 - DNA, 64 bp, Artificial
  oligonucleotide probe
ccgtcgcaaagcgcacccgtcgcaaagcgcacgcaccgcagctgcgtgaacgcgatttgccgca

SEQ ID NO: 4956 - DNA, 64 bp, Artificial
  oligonucleotide probe
ttcggggaaacgccgtttcggggaaacgccgtgcacgggaaagcggctggctttgcgcaccgtg

SEQ ID NO: 4957 - DNA, 64 bp, Artificial
  oligonucleotide probe
ttcgccgtttgcgctgttcgccgtttgcgctgggctgcacggtcccgtgcaccgcagctgcgtg

SEQ ID NO: 4958 - DNA, 64 bp, Artificial
  oligonucleotide probe
gcaccgcagctgcgtggcaccgcagctgcgtgaagccgtgcgcaacgaccgtttcggctgggct

SEQ ID NO: 4959 - DNA, 64 bp, Artificial
  oligonucleotide probe
gcaccgcagctgcgtggcaccgcagctgcgtggcacgggaaagcggctttcgccgtttgcgctg

SEQ ID NO: 4960 - DNA, 64 bp, Artificial
  oligonucleotide probe
ttcgccgtttgcgctgttcgccgtttgcgctggcacgggaaagcggctaacgcgatttgccgca

SEQ ID NO: 4961 - DNA, 64 bp, Artificial
  oligonucleotide probe
ggctgcacggtcccgtggctgcacggtcccgtgcacgggaaagcggctttcgccgtttgcgctg

SEQ ID NO: 4962 - DNA, 64 bp, Artificial
  oligonucleotide probe
gcacgggaaagcggctgcacgggaaagcggctaagccgtgcgcaacgattcgccgtttgcgctg

SEQ ID NO: 4963 - DNA, 64 bp, Artificial
  oligonucleotide probe
aacgcgatttgccgcaaacgcgatttgccgcattcgccgtttgcgctggcacgggaaagcggct

SEQ ID NO: 4964 - DNA, 64 bp, Artificial
  oligonucleotide probe
ttgcaagcgtccgggattgcaagcgtccgggattgcatggcgtggggaaagccgtgcgcaacga

SEQ ID NO: 4965 - DNA, 64 bp, Artificial
  oligonucleotide probe
gggattcgcgcaaacggggattcgcgcaaacgttgcatggcgtggggaggctttgcgcaccgtg

SEQ ID NO: 4966 - DNA, 64 bp, Artificial
  oligonucleotide probe
aacggctgcaagcgcaaacggctgcaagcgcagggattcgcgcaaacgttgcatggcgtgggga

SEQ ID NO: 4967 - DNA, 64 bp, Artificial
  oligonucleotide probe
atggcgcagcacgctgatggcgcagcacgctggggattcgcgcaaacgaagccgtgcgcaacga

SEQ ID NO: 4968 - DNA, 64 bp, Artificial
  oligonucleotide probe
ttcggggaaacgccgtttcggggaaacgccgtaacgcgatttgccgcattgcatggcgtgggga

SEQ ID NO: 4969 - DNA, 64 bp, Artificial
  oligonucleotide probe
ccgtcgcaaagcgcacccgtcgcaaagcgcacgggattcgcgcaaacgttcggggaaacgccgt

SEQ ID NO: 4970 - DNA, 64 bp, Artificial
  oligonucleotide probe
aacgcgatttgccgcaaacgcgatttgccgcagcaccgcagctgcgtgttgcaagcgtccggga

SEQ ID NO: 4971 - DNA, 64 bp, Artificial
  oligonucleotide probe
aacggctgcaagcgcaaacggctgcaagcgcaatggcgcagcacgctggcaccgcagctgcgtg

SEQ ID NO: 4972 - DNA, 64 bp, Artificial
  oligonucleotide probe
ttgcaagcgtccgggattgcaagcgtccgggaggctgcacggtcccgtgggattcgcgcaaacg

SEQ ID NO: 4973 - DNA, 64 bp, Artificial
  oligonucleotide probe
ccgtcgcaaagcgcacccgtcgcaaagcgcacgcacgggaaagcggctaacggctgcaagcgca

SEQ ID NO: 4974 - DNA, 64 bp, Artificial
  oligonucleotide probe
ggctttgcgcaccgtgggctttgcgcaccgtggcaccgcagctgcgtggcacgggaaagcggct

SEQ ID NO: 4975 - DNA, 64 bp, Artificial
  oligonucleotide probe
atggcgcagcacgctgatggcgcagcacgctggcaccgcagctgcgtgaagccgtgcgcaacga

SEQ ID NO: 4976 - DNA, 64 bp, Artificial
  oligonucleotide probe
ttgcatggcgtggggattgcatggcgtggggagcacgggaaagcggctggctttgcgcaccgtg

SEQ ID NO: 4977 - DNA, 64 bp, Artificial
  oligonucleotide probe
aacgcgatttgccgcaaacgcgatttgccgcaccgtcgcaaagcgcacttgcatggcgtgggga

SEQ ID NO: 4978 - DNA, 64 bp, Artificial
  oligonucleotide probe
gggattcgcgcaaacggggattcgcgcaaacggcaccgcagctgcgtgggctttgcgcaccgtg

SEQ ID NO: 4979 - DNA, 64 bp, Artificial
  oligonucleotide probe
ggctgcacggtcccgtggctgcacggtcccgtgggattcgcgcaaacgaacggctgcaagcgca

SEQ ID NO: 4980 - DNA, 64 bp, Artificial
  oligonucleotide probe
gggattcgcgcaaacggggattcgcgcaaacgttgcatggcgtggggaggctgcacggtcccgt

SEQ ID NO: 4981 - DNA, 64 bp, Artificial
  oligonucleotide probe
gcacgggaaagcggctgcacgggaaagcggctatggcgcagcacgctgccgtttcggctgggct

SEQ ID NO: 4982 - DNA, 64 bp, Artificial
  oligonucleotide probe
aacggctgcaagcgcaaacggctgcaagcgcaccgtcgcaaagcgcacgcaccgcagctgcgtg

SEQ ID NO: 4983 - DNA, 64 bp, Artificial
  oligonucleotide probe
ttgcatggcgtggggattgcatggcgtggggaatggcgcagcacgctggggattcgcgcaaacg

SEQ ID NO: 4984 - DNA, 64 bp, Artificial
  oligonucleotide probe
atggcgcagcacgctgatggcgcagcacgctggcacgggaaagcggctaacggctgcaagcgca

SEQ ID NO: 4985 - DNA, 64 bp, Artificial
  oligonucleotide probe
ccgtttcggctgggctccgtttcggctgggctgcacgggaaagcggctggctttgcgcaccgtg

SEQ ID NO: 4986 - DNA, 64 bp, Artificial
  oligonucleotide probe
ggctgcacggtcccgtggctgcacggtcccgtgcaccgcagctgcgtgttcggggaaacgccgt

SEQ ID NO: 4987 - DNA, 64 bp, Artificial
  oligonucleotide probe
gcaccgcagctgcgtggcaccgcagctgcgtggcacgggaaagcggctttcggggaaacgccgt

SEQ ID NO: 4988 - DNA, 64 bp, Artificial
  oligonucleotide probe
atggcgcagcacgctgatggcgcagcacgctggcacgggaaagcggctttgcaagcgtccggga

SEQ ID NO: 4989 - DNA, 64 bp, Artificial
  oligonucleotide probe
gcaccgcagctgcgtggcaccgcagctgcgtgttgcaagcgtccgggaggctttgcgcaccgtg

SEQ ID NO: 4990 - DNA, 64 bp, Artificial
  oligonucleotide probe
gggattcgcgcaaacggggattcgcgcaaacgaagccgtgcgcaacgattgcaagcgtccggga

SEQ ID NO: 4991 - DNA, 64 bp, Artificial
  oligonucleotide probe
aacgcgatttgccgcaaacgcgatttgccgcagggattcgcgcaaacgccgtttcggctgggct

SEQ ID NO: 4992 - DNA, 64 bp, Artificial
  oligonucleotide probe
gggattcgcgcaaacggggattcgcgcaaacgttgcaagcgtccgggattcggggaaacgccgt

SEQ ID NO: 4993 - DNA, 64 bp, Artificial
  oligonucleotide probe
aacggctgcaagcgcaaacggctgcaagcgcaggctgcacggtcccgtttgcatggcgtgggga

SEQ ID NO: 4994 - DNA, 64 bp, Artificial
  oligonucleotide probe
gcaccgcagctgcgtggcaccgcagctgcgtggcacgggaaagcggctgggattcgcgcaaacg

SEQ ID NO: 4995 - DNA, 64 bp, Artificial
  oligonucleotide probe
ttgcaagcgtccgggattgcaagcgtccgggattcgccgtttgcgctggggattcgcgcaaacg

SEQ ID NO: 4996 - DNA, 64 bp, Artificial
  oligonucleotide probe
ggctgcacggtcccgtggctgcacggtcccgtttgcatggcgtggggaatggcgcagcacgctg

SEQ ID NO: 4997 - DNA, 64 bp, Artificial
  oligonucleotide probe
aacggctgcaagcgcaaacggctgcaagcgcattgcatggcgtggggattgcaagcgtccggga

SEQ ID NO: 4998 - DNA, 64 bp, Artificial
  oligonucleotide probe
gggattcgcgcaaacggggattcgcgcaaacgccgtttcggctgggctccgtcgcaaagcgcac

SEQ ID NO: 4999 - DNA, 64 bp, Artificial
  oligonucleotide probe
gcacgggaaagcggctgcacgggaaagcggctggctttgcgcaccgtgccgtcgcaaagcgcac

SEQ ID NO: 5000 - DNA, 64 bp, Artificial
  oligonucleotide probe
ggctgcacggtcccgtggctgcacggtcccgtgcacgggaaagcggctccgtcgcaaagcgcac

SEQ ID NO: 5001 - DNA, 64 bp, Artificial
  oligonucleotide probe
gcaccgcagctgcgtggcaccgcagctgcgtgaacgcgatttgccgcaggctgcacggtcccgt

SEQ ID NO: 5002 - DNA, 64 bp, Artificial
  oligonucleotide probe
atggcgcagcacgctgatggcgcagcacgctggggattcgcgcaaacgaacggctgcaagcgca

SEQ ID NO: 5003 - DNA, 64 bp, Artificial
  oligonucleotide probe
aacggctgcaagcgcaaacggctgcaagcgcagcacgggaaagcggctaagccgtgcgcaacga

SEQ ID NO: 5004 - DNA, 64 bp, Artificial
  oligonucleotide probe
gcacgggaaagcggctgcacgggaaagcggctccgtttcggctgggctggctgcacggtcccgt

SEQ ID NO: 5005 - DNA, 64 bp, Artificial
  oligonucleotide probe
gcaccgcagctgcgtggcaccgcagctgcgtgatggcgcagcacgctgggctgcacggtcccgt

SEQ ID NO: 5006 - DNA, 64 bp, Artificial
  oligonucleotide probe
gcaccgcagctgcgtggcaccgcagctgcgtgttgcaagcgtccgggattcggggaaacgccgt

SEQ ID NO: 5007 - DNA, 64 bp, Artificial
  oligonucleotide probe
ggctgcacggtcccgtggctgcacggtcccgtgggattcgcgcaaacgccgtttcggctgggct

SEQ ID NO: 5008 - DNA, 64 bp, Artificial
  oligonucleotide probe
gcacgggaaagcggctgcacgggaaagcggctaagccgtgcgcaacgaatggcgcagcacgctg

SEQ ID NO: 5009 - DNA, 64 bp, Artificial
  oligonucleotide probe
aagccgtgcgcaacgaaagccgtgcgcaacgattgcaagcgtccgggagcaccgcagctgcgtg

SEQ ID NO: 5010 - DNA, 64 bp, Artificial
  oligonucleotide probe
gcaccgcagctgcgtggcaccgcagctgcgtggcacgggaaagcggctggctgcacggtcccgt

SEQ ID NO: 5011 - DNA, 64 bp, Artificial
  oligonucleotide probe
gcaccgcagctgcgtggcaccgcagctgcgtgggctttgcgcaccgtgttcgccgtttgcgctg

SEQ ID NO: 5012 - DNA, 64 bp, Artificial
  oligonucleotide probe
gcacgggaaagcggctgcacgggaaagcggctaagccgtgcgcaacgagggattcgcgcaaacg

SEQ ID NO: 5013 - DNA, 64 bp, Artificial
  oligonucleotide probe
ttcgccgtttgcgctgttcgccgtttgcgctgttgcatggcgtggggaccgtttcggctgggct

SEQ ID NO: 5014 - DNA, 64 bp, Artificial
  oligonucleotide probe
gggattcgcgcaaacggggattcgcgcaaacggcaccgcagctgcgtgttcggggaaacgccgt

SEQ ID NO: 5015 - DNA, 64 bp, Artificial
  oligonucleotide probe
ggctttgcgcaccgtgggctttgcgcaccgtggggattcgcgcaaacggcaccgcagctgcgtg

SEQ ID NO: 5016 - DNA, 64 bp, Artificial
  oligonucleotide probe
gcacgggaaagcggctgcacgggaaagcggctcgcattgcggctttcgttgcaagcgtccggga

SEQ ID NO: 5017 - DNA, 64 bp, Artificial
  oligonucleotide probe
ccgtcgcaaagcgcacccgtcgcaaagcgcacgcaccgcagctgcgtgatggcgcagcacgctg

SEQ ID NO: 5018 - DNA, 64 bp, Artificial
  oligonucleotide probe
aacgcgatttgccgcaaacgcgatttgccgcagcaccgcagctgcgtggcacgggaaagcggct

SEQ ID NO: 5019 - DNA, 64 bp, Artificial
  oligonucleotide probe
gggattcgcgcaaacggggattcgcgcaaacggcaccgcagctgcgtgggctgcacggtcccgt

SEQ ID NO: 5020 - DNA, 64 bp, Artificial
  oligonucleotide probe
gcacgggaaagcggctgcacgggaaagcggctcgcattgcggctttcggggattcgcgcaaacg

SEQ ID NO: 5021 - DNA, 64 bp, Artificial
  oligonucleotide probe
gcacgggaaagcggctgcacgggaaagcggctaagccgtgcgcaacgattcggggaaacgccgt

SEQ ID NO: 5022 - DNA, 64 bp, Artificial
  oligonucleotide probe
ttcggggaaacgccgtttcggggaaacgccgtttgcatggcgtggggattgcaagcgtccggga

SEQ ID NO: 5023 - DNA, 64 bp, Artificial
  oligonucleotide probe
gcacgggaaagcggctgcacgggaaagcggctttcggggaaacgccgtccgtttcggctgggct

SEQ ID NO: 5024 - DNA, 64 bp, Artificial
  oligonucleotide probe
aacgcgatttgccgcaaacgcgatttgccgcattgcatggcgtggggagcacgggaaagcggct

SEQ ID NO: 5025 - DNA, 64 bp, Artificial
  oligonucleotide probe
aacgcgatttgccgcaaacgcgatttgccgcaccgtcgcaaagcgcacgcacgggaaagcggct

SEQ ID NO: 5026 - DNA, 64 bp, Artificial
  oligonucleotide probe
aagccgtgcgcaacgaaagccgtgcgcaacgaggctttgcgcaccgtggggattcgcgcaaacg

SEQ ID NO: 5027 - DNA, 64 bp, Artificial
  oligonucleotide probe
ttgcatggcgtggggattgcatggcgtggggaaacggctgcaagcgcaccgtttcggctgggct

SEQ ID NO: 5028 - DNA, 64 bp, Artificial
  oligonucleotide probe
gcaccgcagctgcgtggcaccgcagctgcgtgttcggggaaacgccgtggctgcacggtcccgt

SEQ ID NO: 5029 - DNA, 64 bp, Artificial
  oligonucleotide probe
gcaccgcagctgcgtggcaccgcagctgcgtgcgcattgcggctttcgaacgcgatttgccgca

SEQ ID NO: 5030 - DNA, 64 bp, Artificial
  oligonucleotide probe
ttcgccgtttgcgctgttcgccgtttgcgctggcaccgcagctgcgtgaacggctgcaagcgca

SEQ ID NO: 5031 - DNA, 64 bp, Artificial
  oligonucleotide probe
gcaccgcagctgcgtggcaccgcagctgcgtgaagccgtgcgcaacgaggctttgcgcaccgtg

SEQ ID NO: 5032 - DNA, 64 bp, Artificial
  oligonucleotide probe
ttcggggaaacgccgtttcggggaaacgccgtccgtcgcaaagcgcacgcacgggaaagcggct

SEQ ID NO: 5033 - DNA, 64 bp, Artificial
  oligonucleotide probe
ggctttgcgcaccgtgggctttgcgcaccgtgccgtttcggctgggctgcacgggaaagcggct

SEQ ID NO: 5034 - DNA, 64 bp, Artificial
  oligonucleotide probe
ttcgccgtttgcgctgttcgccgtttgcgctggggattcgcgcaaacgggctttgcgcaccgtg

SEQ ID NO: 5035 - DNA, 64 bp, Artificial
  oligonucleotide probe
ccgtttcggctgggctccgtttcggctgggctccgtcgcaaagcgcacgggattcgcgcaaacg

SEQ ID NO: 5036 - DNA, 64 bp, Artificial
  oligonucleotide probe
gggattcgcgcaaacggggattcgcgcaaacgaagccgtgcgcaacgattcgccgtttgcgctg

SEQ ID NO: 5037 - DNA, 64 bp, Artificial
  oligonucleotide probe
ggctttgcgcaccgtgggctttgcgcaccgtgccgtcgcaaagcgcacttgcatggcgtgggga

SEQ ID NO: 5038 - DNA, 64 bp, Artificial
  oligonucleotide probe
ttgcatggcgtggggattgcatggcgtggggaaacggctgcaagcgcattcgccgtttgcgctg

SEQ ID NO: 5039 - DNA, 64 bp, Artificial
  oligonucleotide probe
aacggctgcaagcgcaaacggctgcaagcgcaccgtcgcaaagcgcacttgcatggcgtgggga

SEQ ID NO: 5040 - DNA, 64 bp, Artificial
  oligonucleotide probe
ttcgccgtttgcgctgttcgccgtttgcgctggcaccgcagctgcgtgccgtttcggctgggct

SEQ ID NO: 5041 - DNA, 64 bp, Artificial
  oligonucleotide probe
gcaccgcagctgcgtggcaccgcagctgcgtgttcgccgtttgcgctgggctgcacggtcccgt

SEQ ID NO: 5042 - DNA, 64 bp, Artificial
  oligonucleotide probe
ggctgcacggtcccgtggctgcacggtcccgtgggattcgcgcaaacgttgcaagcgtccggga

SEQ ID NO: 5043 - DNA, 64 bp, Artificial
  oligonucleotide probe
ggctgcacggtcccgtggctgcacggtcccgtgcaccgcagctgcgtgatggcgcagcacgctg

SEQ ID NO: 5044 - DNA, 64 bp, Artificial
  oligonucleotide probe
ttcggggaaacgccgtttcggggaaacgccgtttgcatggcgtggggagcaccgcagctgcgtg

SEQ ID NO: 5045 - DNA, 64 bp, Artificial
  oligonucleotide probe
ttcgccgtttgcgctgttcgccgtttgcgctgttgcatggcgtggggaaacgcgatttgccgca

SEQ ID NO: 5046 - DNA, 64 bp, Artificial
  oligonucleotide probe
gcacgggaaagcggctgcacgggaaagcggctatggcgcagcacgctggcaccgcagctgcgtg

SEQ ID NO: 5047 - DNA, 64 bp, Artificial
  oligonucleotide probe
aacggctgcaagcgcaaacggctgcaagcgcaaacgcgatttgccgcagcaccgcagctgcgtg

SEQ ID NO: 5048 - DNA, 64 bp, Artificial
  oligonucleotide probe
gcacgggaaagcggctgcacgggaaagcggctttgcaagcgtccgggaccgtttcggctgggct

SEQ ID NO: 5049 - DNA, 64 bp, Artificial
  oligonucleotide probe
ttgcatggcgtggggattgcatggcgtggggagcacgggaaagcggctatggcgcagcacgctg

SEQ ID NO: 5050 - DNA, 64 bp, Artificial
  oligonucleotide probe
gcaccgcagctgcgtggcaccgcagctgcgtgaagccgtgcgcaacgagggattcgcgcaaacg

SEQ ID NO: 5051 - DNA, 64 bp, Artificial
  oligonucleotide probe
aacgcgatttgccgcaaacgcgatttgccgcaggctgcacggtcccgtgcacgggaaagcggct

SEQ ID NO: 5052 - DNA, 64 bp, Artificial
  oligonucleotide probe
gcaccgcagctgcgtggcaccgcagctgcgtggcacgggaaagcggctaacggctgcaagcgca

SEQ ID NO: 5053 - DNA, 64 bp, Artificial
  oligonucleotide probe
gcacgggaaagcggctgcacgggaaagcggctaacgcgatttgccgcaggctgcacggtcccgt

SEQ ID NO: 5054 - DNA, 64 bp, Artificial
  oligonucleotide probe
ggctgcacggtcccgtggctgcacggtcccgtgcaccgcagctgcgtgaacgcgatttgccgca

SEQ ID NO: 5055 - DNA, 64 bp, Artificial
  oligonucleotide probe
atggcgcagcacgctgatggcgcagcacgctggggattcgcgcaaacgggctttgcgcaccgtg

SEQ ID NO: 5056 - DNA, 64 bp, Artificial
  oligonucleotide probe
ggctttgcgcaccgtgggctttgcgcaccgtgggctgcacggtcccgtttgcatggcgtgggga

SEQ ID NO: 5057 - DNA, 64 bp, Artificial
  oligonucleotide probe
atggcgcagcacgctgatggcgcagcacgctgttcggggaaacgccgtttgcatggcgtgggga

SEQ ID NO: 5058 - DNA, 64 bp, Artificial
  oligonucleotide probe
gggattcgcgcaaacggggattcgcgcaaacgaacgcgatttgccgcaggctgcacggtcccgt

SEQ ID NO: 5059 - DNA, 64 bp, Artificial
  oligonucleotide probe
gcaccgcagctgcgtggcaccgcagctgcgtgggctttgcgcaccgtggggattcgcgcaaacg

SEQ ID NO: 5060 - DNA, 64 bp, Artificial
  oligonucleotide probe
atggcgcagcacgctgatggcgcagcacgctgttgcatggcgtggggattgcaagcgtccggga

SEQ ID NO: 5061 - DNA, 64 bp, Artificial
  oligonucleotide probe
ggctttgcgcaccgtgggctttgcgcaccgtgccgtcgcaaagcgcacgcacgggaaagcggct

SEQ ID NO: 5062 - DNA, 64 bp, Artificial
  oligonucleotide probe
aagccgtgcgcaacgaaagccgtgcgcaacgaggctgcacggtcccgtgcaccgcagctgcgtg

SEQ ID NO: 5063 - DNA, 64 bp, Artificial
  oligonucleotide probe
ggctgcacggtcccgtggctgcacggtcccgtgggattcgcgcaaacgcgcattgcggctttcg

SEQ ID NO: 5064 - DNA, 64 bp, Artificial
  oligonucleotide probe
atggcgcagcacgctgatggcgcagcacgctgttgcatggcgtggggacgcattgcggctttcg

SEQ ID NO: 5065 - DNA, 64 bp, Artificial
  oligonucleotide probe
gggattcgcgcaaacggggattcgcgcaaacgatggcgcagcacgctgccgtcgcaaagcgcac

SEQ ID NO: 5066 - DNA, 64 bp, Artificial
  oligonucleotide probe
ttgcatggcgtggggattgcatggcgtggggaggctttgcgcaccgtggggattcgcgcaaacg

SEQ ID NO: 5067 - DNA, 64 bp, Artificial
  oligonucleotide probe
ccgtcgcaaagcgcacccgtcgcaaagcgcacgcacgggaaagcggctttgcaagcgtccggga

SEQ ID NO: 5068 - DNA, 64 bp, Artificial
  oligonucleotide probe
gcacgggaaagcggctgcacgggaaagcggctttgcaagcgtccgggaatggcgcagcacgctg

SEQ ID NO: 5069 - DNA, 64 bp, Artificial
  oligonucleotide probe
aacgcgatttgccgcaaacgcgatttgccgcagcaccgcagctgcgtgttcggggaaacgccgt

SEQ ID NO: 5070 - DNA, 64 bp, Artificial
  oligonucleotide probe
aacgcgatttgccgcaaacgcgatttgccgcattcgccgtttgcgctgttgcatggcgtgggga

SEQ ID NO: 5071 - DNA, 64 bp, Artificial
  oligonucleotide probe
gggattcgcgcaaacggggattcgcgcaaacgttcggggaaacgccgtggctgcacggtcccgt

SEQ ID NO: 5072 - DNA, 64 bp, Artificial
  oligonucleotide probe
cgcattgcggctttcgcgcattgcggctttcgccgtttcggctgggctgcaccgcagctgcgtg

SEQ ID NO: 5073 - DNA, 64 bp, Artificial
  oligonucleotide probe
gcaccgcagctgcgtggcaccgcagctgcgtgatggcgcagcacgctggggattcgcgcaaacg

SEQ ID NO: 5074 - DNA, 64 bp, Artificial
  oligonucleotide probe
ccgtcgcaaagcgcacccgtcgcaaagcgcacgggattcgcgcaaacgggctttgcgcaccgtg

SEQ ID NO: 5075 - DNA, 64 bp, Artificial
  oligonucleotide probe
gcacgggaaagcggctgcacgggaaagcggctatggcgcagcacgctggggattcgcgcaaacg

SEQ ID NO: 5076 - DNA, 64 bp, Artificial
  oligonucleotide probe
gcacgggaaagcggctgcacgggaaagcggctggctttgcgcaccgtgttcggggaaacgccgt

SEQ ID NO: 5077 - DNA, 64 bp, Artificial
  oligonucleotide probe
cgcattgcggctttcgcgcattgcggctttcgttgcatggcgtggggagcacgggaaagcggct

SEQ ID NO: 5078 - DNA, 64 bp, Artificial
  oligonucleotide probe
gcaccgcagctgcgtggcaccgcagctgcgtgaagccgtgcgcaacgaccgtcgcaaagcgcac

SEQ ID NO: 5079 - DNA, 64 bp, Artificial
  oligonucleotide probe
gcaccgcagctgcgtggcaccgcagctgcgtgaacggctgcaagcgcaccgtcgcaaagcgcac

SEQ ID NO: 5080 - DNA, 64 bp, Artificial
  oligonucleotide probe
ccgtcgcaaagcgcacccgtcgcaaagcgcacggctgcacggtcccgtgggattcgcgcaaacg

SEQ ID NO: 5081 - DNA, 64 bp, Artificial
  oligonucleotide probe
gcaccgcagctgcgtggcaccgcagctgcgtgaacggctgcaagcgcaggctgcacggtcccgt

SEQ ID NO: 5082 - DNA, 64 bp, Artificial
  oligonucleotide probe
aacgcgatttgccgcaaacgcgatttgccgcattgcatggcgtggggaatggcgcagcacgctg

SEQ ID NO: 5083 - DNA, 64 bp, Artificial
  oligonucleotide probe
ggctttgcgcaccgtgggctttgcgcaccgtgttgcatggcgtggggaaagccgtgcgcaacga

SEQ ID NO: 5084 - DNA, 64 bp, Artificial
  oligonucleotide probe
ttgcatggcgtggggattgcatggcgtggggaccgtttcggctgggctgggattcgcgcaaacg

SEQ ID NO: 5085 - DNA, 64 bp, Artificial
  oligonucleotide probe
gcaccgcagctgcgtggcaccgcagctgcgtgggctttgcgcaccgtgttcggggaaacgccgt

SEQ ID NO: 5086 - DNA, 64 bp, Artificial
  oligonucleotide probe
ggctttgcgcaccgtgggctttgcgcaccgtgatggcgcagcacgctggcaccgcagctgcgtg

SEQ ID NO: 5087 - DNA, 64 bp, Artificial
  oligonucleotide probe
aagccgtgcgcaacgaaagccgtgcgcaacgaatggcgcagcacgctgttgcatggcgtgggga

SEQ ID NO: 5088 - DNA, 64 bp, Artificial
  oligonucleotide probe
cgcattgcggctttcgcgcattgcggctttcggcaccgcagctgcgtgaagccgtgcgcaacga

SEQ ID NO: 5089 - DNA, 64 bp, Artificial
  oligonucleotide probe
ggctgcacggtcccgtggctgcacggtcccgtgggattcgcgcaaacgaagccgtgcgcaacga

SEQ ID NO: 5090 - DNA, 64 bp, Artificial
  oligonucleotide probe
aacggctgcaagcgcaaacggctgcaagcgcagggattcgcgcaaacgaagccgtgcgcaacga

SEQ ID NO: 5091 - DNA, 64 bp, Artificial
  oligonucleotide probe
ttgcaagcgtccgggattgcaagcgtccgggaaacggctgcaagcgcattgcatggcgtgggga

SEQ ID NO: 5092 - DNA, 64 bp, Artificial
  oligonucleotide probe
ttcggggaaacgccgtttcggggaaacgccgtgggattcgcgcaaacgttgcaagcgtccggga

SEQ ID NO: 5093 - DNA, 64 bp, Artificial
  oligonucleotide probe
gcacgggaaagcggctgcacgggaaagcggctccgtttcggctgggctgggattcgcgcaaacg

SEQ ID NO: 5094 - DNA, 64 bp, Artificial
  oligonucleotide probe
gcacgggaaagcggctgcacgggaaagcggctgggattcgcgcaaacggcaccgcagctgcgtg

SEQ ID NO: 5095 - DNA, 64 bp, Artificial
  oligonucleotide probe
ccgtttcggctgggctccgtttcggctgggctttcgccgtttgcgctggcacgggaaagcggct

SEQ ID NO: 5096 - DNA, 64 bp, Artificial
  oligonucleotide probe
aacgcgatttgccgcaaacgcgatttgccgcagggattcgcgcaaacgaagccgtgcgcaacga

SEQ ID NO: 5097 - DNA, 64 bp, Artificial
  oligonucleotide probe
aagccgtgcgcaacgaaagccgtgcgcaacgaatggcgcagcacgctggggattcgcgcaaacg

SEQ ID NO: 5098 - DNA, 64 bp, Artificial
  oligonucleotide probe
ttgcatggcgtggggattgcatggcgtggggaccgtttcggctgggctttcgccgtttgcgctg

SEQ ID NO: 5099 - DNA, 64 bp, Artificial
  oligonucleotide probe
atggcgcagcacgctgatggcgcagcacgctgttgcatggcgtggggagcaccgcagctgcgtg

SEQ ID NO: 5100 - DNA, 64 bp, Artificial
  oligonucleotide probe
gcaccgcagctgcgtggcaccgcagctgcgtgccgtcgcaaagcgcacttgcatggcgtgggga

SEQ ID NO: 5101 - DNA, 64 bp, Artificial
  oligonucleotide probe
ttgcaagcgtccgggattgcaagcgtccgggattcggggaaacgccgtttgcatggcgtgggga

SEQ ID NO: 5102 - DNA, 64 bp, Artificial
  oligonucleotide probe
gcacgggaaagcggctgcacgggaaagcggctcgcattgcggctttcgccgtttcggctgggct

SEQ ID NO: 5103 - DNA, 64 bp, Artificial
  oligonucleotide probe
aacggctgcaagcgcaaacggctgcaagcgcattgcatggcgtggggacgcattgcggctttcg

SEQ ID NO: 5104 - DNA, 64 bp, Artificial
  oligonucleotide probe
ccgtttcggctgggctccgtttcggctgggctgggattcgcgcaaacgatggcgcagcacgctg

SEQ ID NO: 5105 - DNA, 64 bp, Artificial
  oligonucleotide probe
aacggctgcaagcgcaaacggctgcaagcgcaccgtcgcaaagcgcacgggattcgcgcaaacg

SEQ ID NO: 5106 - DNA, 64 bp, Artificial
  oligonucleotide probe
ccgtcgcaaagcgcacccgtcgcaaagcgcacgcaccgcagctgcgtgaacggctgcaagcgca

SEQ ID NO: 5107 - DNA, 64 bp, Artificial
  oligonucleotide probe
cgcattgcggctttcgcgcattgcggctttcggggattcgcgcaaacgaagccgtgcgcaacga

SEQ ID NO: 5108 - DNA, 64 bp, Artificial
  oligonucleotide probe
aagccgtgcgcaacgaaagccgtgcgcaacgattgcaagcgtccgggagggattcgcgcaaacg

SEQ ID NO: 5109 - DNA, 64 bp, Artificial
  oligonucleotide probe
ttgcatggcgtggggattgcatggcgtggggacgcattgcggctttcgaacgcgatttgccgca

SEQ ID NO: 5110 - DNA, 64 bp, Artificial
  oligonucleotide probe
ccgtttcggctgggctccgtttcggctgggctccgtcgcaaagcgcacgcaccgcagctgcgtg

SEQ ID NO: 5111 - DNA, 64 bp, Artificial
  oligonucleotide probe
ttcggggaaacgccgtttcggggaaacgccgtggctgcacggtcccgtgcaccgcagctgcgtg

SEQ ID NO: 5112 - DNA, 64 bp, Artificial
  oligonucleotide probe
gggattcgcgcaaacggggattcgcgcaaacgttgcatggcgtggggaccgtttcggctgggct

SEQ ID NO: 5113 - DNA, 64 bp, Artificial
  oligonucleotide probe
ttcggggaaacgccgtttcggggaaacgccgtgcaccgcagctgcgtgatggcgcagcacgctg

SEQ ID NO: 5114 - DNA, 64 bp, Artificial
  oligonucleotide probe
gggattcgcgcaaacggggattcgcgcaaacgttcggggaaacgccgtccgtcgcaaagcgcac

SEQ ID NO: 5115 - DNA, 64 bp, Artificial
  oligonucleotide probe
gcaccgcagctgcgtggcaccgcagctgcgtgcgcattgcggctttcgttgcaagcgtccggga

SEQ ID NO: 5116 - DNA, 64 bp, Artificial
  oligonucleotide probe
aacgcgatttgccgcaaacgcgatttgccgcagcacgggaaagcggctccgtttcggctgggct

SEQ ID NO: 5117 - DNA, 64 bp, Artificial
  oligonucleotide probe
ccgtttcggctgggctccgtttcggctgggctttgcatggcgtggggattcggggaaacgccgt

SEQ ID NO: 5118 - DNA, 64 bp, Artificial
  oligonucleotide probe
gcaccgcagctgcgtggcaccgcagctgcgtgaacgcgatttgccgcattcgccgtttgcgctg

SEQ ID NO: 5119 - DNA, 64 bp, Artificial
  oligonucleotide probe
ttcgccgtttgcgctgttcgccgtttgcgctgttgcatggcgtggggattcggggaaacgccgt

SEQ ID NO: 5120 - DNA, 64 bp, Artificial
  oligonucleotide probe
aacggctgcaagcgcaaacggctgcaagcgcaggctgcacggtcccgtgcaccgcagctgcgtg

SEQ ID NO: 5121 - DNA, 64 bp, Artificial
  oligonucleotide probe
ttcggggaaacgccgtttcggggaaacgccgtgcaccgcagctgcgtgcgcattgcggctttcg

SEQ ID NO: 5122 - DNA, 64 bp, Artificial
  oligonucleotide probe
gcacgggaaagcggctgcacgggaaagcggctaacggctgcaagcgcaatggcgcagcacgctg

SEQ ID NO: 5123 - DNA, 64 bp, Artificial
  oligonucleotide probe
gcacgggaaagcggctgcacgggaaagcggctaacggctgcaagcgcattcggggaaacgccgt

SEQ ID NO: 5124 - DNA, 64 bp, Artificial
  oligonucleotide probe
ggctgcacggtcccgtggctgcacggtcccgtgcacgggaaagcggctaagccgtgcgcaacga

SEQ ID NO: 5125 - DNA, 64 bp, Artificial
  oligonucleotide probe
gcaccgcagctgcgtggcaccgcagctgcgtgcgcattgcggctttcgccgtttcggctgggct

SEQ ID NO: 5126 - DNA, 64 bp, Artificial
  oligonucleotide probe
gcacgggaaagcggctgcacgggaaagcggctaacgcgatttgccgcagcaccgcagctgcgtg

SEQ ID NO: 5127 - DNA, 64 bp, Artificial
  oligonucleotide probe
ttgcatggcgtggggattgcatggcgtggggaaacgcgatttgccgcattcgccgtttgcgctg

SEQ ID NO: 5128 - DNA, 64 bp, Artificial
  oligonucleotide probe
atggcgcagcacgctgatggcgcagcacgctgttgcatggcgtggggagcacgggaaagcggct

SEQ ID NO: 5129 - DNA, 64 bp, Artificial
  oligonucleotide probe
ggctgcacggtcccgtggctgcacggtcccgtttgcatggcgtggggattcgccgtttgcgctg

SEQ ID NO: 5130 - DNA, 64 bp, Artificial
  oligonucleotide probe
ttgcaagcgtccgggattgcaagcgtccgggaccgtttcggctgggctgcaccgcagctgcgtg

SEQ ID NO: 5131 - DNA, 64 bp, Artificial
  oligonucleotide probe
aagccgtgcgcaacgaaagccgtgcgcaacgaaacggctgcaagcgcagcaccgcagctgcgtg

SEQ ID NO: 5132 - DNA, 64 bp, Artificial
  oligonucleotide probe
atggcgcagcacgctgatggcgcagcacgctgttcggggaaacgccgtgcacgggaaagcggct

SEQ ID NO: 5133 - DNA, 32 bp, Artificial
  oligonucleotide probe
ggctttgcgcaccgtgatggcgcagcacgctg

SEQ ID NO: 5134 - DNA, 32 bp, Artificial
  oligonucleotide probe
ggctttgcgcaccgtgccgtttcggctgggct

SEQ ID NO: 5135 - DNA, 32 bp, Artificial
  oligonucleotide probe
ttcggggaaacgccgtatggcgcagcacgctg

SEQ ID NO: 5136 - DNA, 32 bp, Artificial
  oligonucleotide probe
ttcggggaaacgccgtccgtttcggctgggct

SEQ ID NO: 5137 - DNA, 32 bp, Artificial
  oligonucleotide probe
ggctttgcgcaccgtgaacggctgcaagcgca

SEQ ID NO: 5138 - DNA, 32 bp, Artificial
  oligonucleotide probe
ttcggggaaacgccgtaacggctgcaagcgca

SEQ ID NO: 5139 - DNA, 32 bp, Artificial; identical to SEQ ID NO: 5137
  oligonucleotide probe

SEQ ID NO: 5140 - DNA, 32 bp, Artificial
  oligonucleotide probe
ttgcaagcgtccgggaccgtttcggctgggct

SEQ ID NO: 5141 - DNA, 32 bp, Artificial
  oligonucleotide probe
ttgcaagcgtccgggaatggcgcagcacgctg

SEQ ID NO: 5142 - DNA, 32 bp, Artificial; identical to SEQ ID NO: 5133
  oligonucleotide probe

SEQ ID NO: 5143 - DNA, 32 bp, Artificial; identical to SEQ ID NO: 5135
  oligonucleotide probe

SEQ ID NO: 5144 - DNA, 32 bp, Artificial; identical to SEQ ID NO: 5136
  oligonucleotide probe

SEQ ID NO: 5145 - DNA, 32 bp, Artificial; identical to SEQ ID NO: 5133
  oligonucleotide probe

SEQ ID NO: 5146 - DNA, 32 bp, Artificial; identical to SEQ ID NO: 5134
  oligonucleotide probe

SEQ ID NO: 5147 - DNA, 32 bp, Artificial; identical to SEQ ID NO: 5135
  oligonucleotide probe

SEQ ID NO: 5148 - DNA, 32 bp, Artificial; identical to SEQ ID NO: 5134
  oligonucleotide probe

SEQ ID NO: 5149 - DNA, 32 bp, Artificial; identical to SEQ ID NO: 5135
  oligonucleotide probe

SEQ ID NO: 5150 - DNA, 32 bp, Artificial; identical to SEQ ID NO: 5136
  oligonucleotide probe

SEQ ID NO: 5151 - DNA, 32 bp, Artificial; identical to SEQ ID NO: 5141
  oligonucleotide probe

SEQ ID NO: 5152 - DNA, 32 bp, Artificial; identical to SEQ ID NO: 5133
  oligonucleotide probe

SEQ ID NO: 5153 - DNA, 32 bp, Artificial; identical to SEQ ID NO: 5138
  oligonucleotide probe

SEQ ID NO: 5154 - DNA, 32 bp, Artificial; identical to SEQ ID NO: 5133
  oligonucleotide probe

SEQ ID NO: 5155 - DNA, 32 bp, Artificial; identical to SEQ ID NO: 5133
  oligonucleotide probe

SEQ ID NO: 5156 - DNA, 32 bp, Artificial; identical to SEQ ID NO: 5134
  oligonucleotide probe

SEQ ID NO: 5157 - DNA, 32 bp, Artificial; identical to SEQ ID NO: 5135
  oligonucleotide probe

SEQ ID NO: 5158 - DNA, 32 bp, Artificial; identical to SEQ ID NO: 5136
  oligonucleotide probe

SEQ ID NO: 5159 - DNA, 32 bp, Artificial
  oligonucleotide probe
aagccgtgcgcaacgaatggcgcagcacgctg

SEQ ID NO: 5160 - DNA, 32 bp, Artificial
  oligonucleotide probe
aagccgtgcgcaacgaccgtttcggctgggct

SEQ ID NO: 5161 - DNA, 32 bp, Artificial
  oligonucleotide probe
ttcggggaaacgccgtcgcattgcggctttcg

SEQ ID NO: 5162 - DNA, 32 bp, Artificial; identical to SEQ ID NO: 5135
  oligonucleotide probe

SEQ ID NO: 5163 - DNA, 32 bp, Artificial
  oligonucleotide probe
ttgcaagcgtccgggaaacggctgcaagcgca

SEQ ID NO: 5164 - DNA, 32 bp, Artificial; identical to SEQ ID NO: 5141
  oligonucleotide probe

SEQ ID NO: 5165 - DNA, 32 bp, Artificial; identical to SEQ ID NO: 5135
  oligonucleotide probe

SEQ ID NO: 5166 - DNA, 32 bp, Artificial; identical to SEQ ID NO: 5136
  oligonucleotide probe

SEQ ID NO: 5167 - DNA, 32 bp, Artificial; identical to SEQ ID NO: 5134
  oligonucleotide probe

SEQ ID NO: 5168 - DNA, 32 bp, Artificial; identical to SEQ ID NO: 5138
  oligonucleotide probe

SEQ ID NO: 5169 - DNA, 32 bp, Artificial; identical to SEQ ID NO: 5138
  oligonucleotide probe

SEQ ID NO: 5170 - DNA, 32 bp, Artificial; identical to SEQ ID NO: 5136
  oligonucleotide probe

SEQ ID NO: 5171 - DNA, 32 bp, Artificial
  oligonucleotide probe
aagccgtgcgcaacgacgcattgcggctttcg

SEQ ID NO: 5172 - DNA, 32 bp, Artificial; identical to SEQ ID NO: 5161
  oligonucleotide probe

SEQ ID NO: 5173 - DNA, 32 bp, Artificial; identical to SEQ ID NO: 5163
  oligonucleotide probe

SEQ ID NO: 5174 - DNA, 32 bp, Artificial; identical to SEQ ID NO: 5138
  oligonucleotide probe

SEQ ID NO: 5175 - DNA, 32 bp, Artificial; identical to SEQ ID NO: 5140
  oligonucleotide probe

SEQ ID NO: 5176 - DNA, 32 bp, Artificial; identical to SEQ ID NO: 5134
  oligonucleotide probe

SEQ ID NO: 5177 - DNA, 32 bp, Artificial
  oligonucleotide probe
ggctttgcgcaccgtgcgcattgcggctttcg

SEQ ID NO: 5178 - DNA, 32 bp, Artificial; identical to SEQ ID NO: 5137
  oligonucleotide probe

SEQ ID NO: 5179 - DNA, 32 bp, Artificial; identical to SEQ ID NO: 5171
  oligonucleotide probe

SEQ ID NO: 5180 - DNA, 32 bp, Artificial; identical to SEQ ID NO: 5159
  oligonucleotide probe

SEQ ID NO: 5181 - DNA, 32 bp, Artificial; identical to SEQ ID NO: 5141
  oligonucleotide probe

SEQ ID NO: 5182 - DNA, 32 bp, Artificial; identical to SEQ ID NO: 5135
  oligonucleotide probe

SEQ ID NO: 5183 - DNA, 32 bp, Artificial; identical to SEQ ID NO: 5138
  oligonucleotide probe

SEQ ID NO: 5184 - DNA, 32 bp, Artificial; identical to SEQ ID NO: 5135
  oligonucleotide probe

SEQ ID NO: 5185 - DNA, 32 bp, Artificial
  oligonucleotide probe
aagccgtgcgcaacgaaacggctgcaagcgca

SEQ ID NO: 5186 - DNA, 32 bp, Artificial; identical to SEQ ID NO: 5159
  oligonucleotide probe

SEQ ID NO: 5187 - DNA, 32 bp, Artificial; identical to SEQ ID NO: 5137
  oligonucleotide probe

SEQ ID NO: 5188 - DNA, 32 bp, Artificial; identical to SEQ ID NO: 5134
  oligonucleotide probe

SEQ ID NO: 5189 - DNA, 32 bp, Artificial; identical to SEQ ID NO: 5185
  oligonucleotide probe

SEQ ID NO: 5190 - DNA, 32 bp, Artificial; identical to SEQ ID NO: 5163
  oligonucleotide probe

SEQ ID NO: 5191 - DNA, 32 bp, Artificial; identical to SEQ ID NO: 5171
  oligonucleotide probe

SEQ ID NO: 5192 - DNA, 32 bp, Artificial; identical to SEQ ID NO: 5177
  oligonucleotide probe

SEQ ID NO: 5193 - DNA, 32 bp, Artificial; identical to SEQ ID NO: 5134
  oligonucleotide probe

SEQ ID NO: 5194 - DNA, 32 bp, Artificial; identical to SEQ ID NO: 5136
  oligonucleotide probe

SEQ ID NO: 5195 - DNA, 32 bp, Artificial
  oligonucleotide probe
ttgcaagcgtccgggacgcattgcggctttcg

SEQ ID NO: 5196 - DNA, 32 bp, Artificial; identical to SEQ ID NO: 5171
  oligonucleotide probe

SEQ ID NO: 5197 - DNA, 32 bp, Artificial; identical to SEQ ID NO: 5159
  oligonucleotide probe

SEQ ID NO: 5198 - DNA, 32 bp, Artificial; identical to SEQ ID NO: 5160
  oligonucleotide probe

SEQ ID NO: 5199 - DNA, 32 bp, Artificial; identical to SEQ ID NO: 5163
  oligonucleotide probe

SEQ ID NO: 5200 - DNA, 32 bp, Artificial; identical to SEQ ID NO: 5195
  oligonucleotide probe

SEQ ID NO: 5201 - DNA, 32 bp, Artificial; identical to SEQ ID NO: 5163
  oligonucleotide probe

SEQ ID NO: 5202 - DNA, 32 bp, Artificial; identical to SEQ ID NO: 5137
  oligonucleotide probe

SEQ ID NO: 5203 - DNA, 32 bp, Artificial; identical to SEQ ID NO: 5195
  oligonucleotide probe

SEQ ID NO: 5204 - DNA, 32 bp, Artificial; identical to SEQ ID NO: 5141
  oligonucleotide probe

SEQ ID NO: 5205 - DNA, 32 bp, Artificial; identical to SEQ ID NO: 5141
  oligonucleotide probe

SEQ ID NO: 5206 - DNA, 32 bp, Artificial; identical to SEQ ID NO: 5133
  oligonucleotide probe

SEQ ID NO: 5207 - DNA, 32 bp, Artificial; identical to SEQ ID NO: 5161
  oligonucleotide probe

SEQ ID NO: 5208 - DNA, 32 bp, Artificial; identical to SEQ ID NO: 5138
  oligonucleotide probe

SEQ ID NO: 5209 - DNA, 32 bp, Artificial; identical to SEQ ID NO: 5195
  oligonucleotide probe

SEQ ID NO: 5210 - DNA, 32 bp, Artificial; identical to SEQ ID NO: 5140
  oligonucleotide probe

SEQ ID NO: 5211 - DNA, 32 bp, Artificial; identical to SEQ ID NO: 5159
  oligonucleotide probe

SEQ ID NO: 5212 - DNA, 32 bp, Artificial; identical to SEQ ID NO: 5141
  oligonucleotide probe

SEQ ID NO: 5213 - DNA, 32 bp, Artificial; identical to SEQ ID NO: 5137
  oligonucleotide probe

SEQ ID NO: 5214 - DNA, 32 bp, Artificial; identical to SEQ ID NO: 5133
  oligonucleotide probe

SEQ ID NO: 5215 - DNA, 32 bp, Artificial; identical to SEQ ID NO: 5160
  oligonucleotide probe

SEQ ID NO: 5216 - DNA, 32 bp, Artificial; identical to SEQ ID NO: 5134
  oligonucleotide probe

SEQ ID NO: 5217 - DNA, 32 bp, Artificial
  oligonucleotide probe
ttcggggaaacgccgtttcgccgtttgcgctg

SEQ ID NO: 5218 - DNA, 32 bp, Artificial
  oligonucleotide probe
ttcggggaaacgccgtggctgcacggtcccgt

SEQ ID NO: 5219 - DNA, 32 bp, Artificial
  oligonucleotide probe
ccgtcgcaaagcgcacttcgccgtttgcgctg

SEQ ID NO: 5220 - DNA, 32 bp, Artificial
  oligonucleotide probe
ccgtcgcaaagcgcacggctgcacggtcccgt

SEQ ID NO: 5221 - DNA, 32 bp, Artificial
  oligonucleotide probe
ccgtcgcaaagcgcacatggcgcagcacgctg

SEQ ID NO: 5222 - DNA, 32 bp, Artificial
  oligonucleotide probe
ccgtcgcaaagcgcacccgtttcggctgggct

SEQ ID NO: 5223 - DNA, 32 bp, Artificial
  oligonucleotide probe
aacgcgatttgccgcattcgccgtttgcgctg

SEQ ID NO: 5224 - DNA, 32 bp, Artificial
  oligonucleotide probe
aacgcgatttgccgcaggctgcacggtcccgt

SEQ ID NO: 5225 - DNA, 32 bp, Artificial; identical to SEQ ID NO: 5219
  oligonucleotide probe

SEQ ID NO: 5226 - DNA, 32 bp, Artificial; identical to SEQ ID NO: 5220
  oligonucleotide probe

SEQ ID NO: 5227 - DNA, 32 bp, Artificial; identical to SEQ ID NO: 5219
  oligonucleotide probe

SEQ ID NO: 5228 - DNA, 32 bp, Artificial; identical to SEQ ID NO: 5220
  oligonucleotide probe

SEQ ID NO: 5229 - DNA, 32 bp, Artificial
  oligonucleotide probe
aacgcgatttgccgcaatggcgcagcacgctg

SEQ ID NO: 5230 - DNA, 32 bp, Artificial; identical to SEQ ID NO: 5221
  oligonucleotide probe

SEQ ID NO: 5231 - DNA, 32 bp, Artificial
  oligonucleotide probe
ggctttgcgcaccgtgttcgccgtttgcgctg

SEQ ID NO: 5232 - DNA, 32 bp, Artificial
  oligonucleotide probe
ggctttgcgcaccgtgggctgcacggtcccgt

SEQ ID NO: 5233 - DNA, 32 bp, Artificial; identical to SEQ ID NO: 5229
  oligonucleotide probe

SEQ ID NO: 5234 - DNA, 32 bp, Artificial; identical to SEQ ID NO: 5221
  oligonucleotide probe

SEQ ID NO: 5235 - DNA, 32 bp, Artificial; identical to SEQ ID NO: 5219
  oligonucleotide probe

SEQ ID NO: 5236 - DNA, 32 bp, Artificial; identical to SEQ ID NO: 5220
  oligonucleotide probe

SEQ ID NO: 5237 - DNA, 32 bp, Artificial; identical to SEQ ID NO: 5217
  oligonucleotide probe

SEQ ID NO: 5238 - DNA, 32 bp, Artificial; identical to SEQ ID NO: 5218
  oligonucleotide probe

SEQ ID NO: 5239 - DNA, 32 bp, Artificial
  oligonucleotide probe
ttgcaagcgtccgggattcgccgtttgcgctg

SEQ ID NO: 5240 - DNA, 32 bp, Artificial
  oligonucleotide probe
ttgcaagcgtccgggaggctgcacggtcccgt

SEQ ID NO: 5241 - DNA, 32 bp, Artificial
  oligonucleotide probe
aacgcgatttgccgcaaacggctgcaagcgca

SEQ ID NO: 5242 - DNA, 32 bp, Artificial
  oligonucleotide probe
ccgtcgcaaagcgcacaacggctgcaagcgca

SEQ ID NO: 5243 - DNA, 32 bp, Artificial; identical to SEQ ID NO: 5223
  oligonucleotide probe

SEQ ID NO: 5244 - DNA, 32 bp, Artificial; identical to SEQ ID NO: 5224
  oligonucleotide probe

SEQ ID NO: 5245 - DNA, 32 bp, Artificial; identical to SEQ ID NO: 5217
  oligonucleotide probe

SEQ ID NO: 5246 - DNA, 32 bp, Artificial; identical to SEQ ID NO: 5218
  oligonucleotide probe

SEQ ID NO: 5247 - DNA, 32 bp, Artificial; identical to SEQ ID NO: 5219
  oligonucleotide probe

SEQ ID NO: 5248 - DNA, 32 bp, Artificial; identical to SEQ ID NO: 5220
  oligonucleotide probe

SEQ ID NO: 5249 - DNA, 32 bp, Artificial; identical to SEQ ID NO: 5217
  oligonucleotide probe

SEQ ID NO: 5250 - DNA, 32 bp, Artificial; identical to SEQ ID NO: 5218
  oligonucleotide probe

SEQ ID NO: 5251 - DNA, 32 bp, Artificial; identical to SEQ ID NO: 5239
  oligonucleotide probe

SEQ ID NO: 5252 - DNA, 32 bp, Artificial; identical to SEQ ID NO: 5240
  oligonucleotide probe

SEQ ID NO: 5253 - DNA, 32 bp, Artificial
  oligonucleotide probe
aacgcgatttgccgcaccgtttcggctgggct

SEQ ID NO: 5254 - DNA, 32 bp, Artificial; identical to SEQ ID NO: 5222
  oligonucleotide probe

SEQ ID NO: 5255 - DNA, 32 bp, Artificial; identical to SEQ ID NO: 5223
  oligonucleotide probe

SEQ ID NO: 5256 - DNA, 32 bp, Artificial; identical to SEQ ID NO: 5224
  oligonucleotide probe

SEQ ID NO: 5257 - DNA, 32 bp, Artificial; identical to SEQ ID NO: 5219
  oligonucleotide probe

SEQ ID NO: 5258 - DNA, 32 bp, Artificial; identical to SEQ ID NO: 5220
  oligonucleotide probe

SEQ ID NO: 5259 - DNA, 32 bp, Artificial; identical to SEQ ID NO: 5223
  oligonucleotide probe

SEQ ID NO: 5260 - DNA, 32 bp, Artificial; identical to SEQ ID NO: 5224
  oligonucleotide probe

SEQ ID NO: 5261 - DNA, 32 bp, Artificial; identical to SEQ ID NO: 5223
  oligonucleotide probe

SEQ ID NO: 5262 - DNA, 32 bp, Artificial; identical to SEQ ID NO: 5224
  oligonucleotide probe

SEQ ID NO: 5263 - DNA, 32 bp, Artificial; identical to SEQ ID NO: 5219
  oligonucleotide probe

SEQ ID NO: 5264 - DNA, 32 bp, Artificial; identical to SEQ ID NO: 5220
  oligonucleotide probe

SEQ ID NO: 5265 - DNA, 32 bp, Artificial; identical to SEQ ID NO: 5218
  oligonucleotide probe

SEQ ID NO: 5266 - DNA, 32 bp, Artificial; identical to SEQ ID NO: 5224
  oligonucleotide probe

SEQ ID NO: 5267 - DNA, 32 bp, Artificial; identical to SEQ ID NO: 5223
  oligonucleotide probe

SEQ ID NO: 5268 - DNA, 32 bp, Artificial; identical to SEQ ID NO: 5224
  oligonucleotide probe

SEQ ID NO: 5269 - DNA, 32 bp, Artificial; identical to SEQ ID NO: 5219
  oligonucleotide probe

SEQ ID NO: 5270 - DNA, 32 bp, Artificial; identical to SEQ ID NO: 5220
  oligonucleotide probe

SEQ ID NO: 5271 - DNA, 32 bp, Artificial; identical to SEQ ID NO: 5231
  oligonucleotide probe

SEQ ID NO: 5272 - DNA, 32 bp, Artificial; identical to SEQ ID NO: 5232
  oligonucleotide probe

SEQ ID NO: 5273 - DNA, 32 bp, Artificial; identical to SEQ ID NO: 5253
  oligonucleotide probe

SEQ ID NO: 5274 - DNA, 32 bp, Artificial; identical to SEQ ID NO: 5222
  oligonucleotide probe

SEQ ID NO: 5275 - DNA, 32 bp, Artificial; identical to SEQ ID NO: 5218
  oligonucleotide probe

SEQ ID NO: 5276 - DNA, 32 bp, Artificial; identical to SEQ ID NO: 5224
  oligonucleotide probe

SEQ ID NO: 5277 - DNA, 32 bp, Artificial; identical to SEQ ID NO: 5223
  oligonucleotide probe

SEQ ID NO: 5278 - DNA, 32 bp, Artificial; identical to SEQ ID NO: 5224
  oligonucleotide probe

SEQ ID NO: 5279 - DNA, 32 bp, Artificial; identical to SEQ ID NO: 5219
  oligonucleotide probe

SEQ ID NO: 5280 - DNA, 32 bp, Artificial; identical to SEQ ID NO: 5220
  oligonucleotide probe

SEQ ID NO: 5281 - DNA, 32 bp, Artificial; identical to SEQ ID NO: 5253
  oligonucleotide probe

SEQ ID NO: 5282 - DNA, 32 bp, Artificial; identical to SEQ ID NO: 5222
  oligonucleotide probe

SEQ ID NO: 5283 - DNA, 32 bp, Artificial; identical to SEQ ID NO: 5253
  oligonucleotide probe

SEQ ID NO: 5284 - DNA, 32 bp, Artificial; identical to SEQ ID NO: 5222
  oligonucleotide probe

SEQ ID NO: 5285 - DNA, 32 bp, Artificial; identical to SEQ ID NO: 5253
  oligonucleotide probe

SEQ ID NO: 5286 - DNA, 32 bp, Artificial; identical to SEQ ID NO: 5222
  oligonucleotide probe

SEQ ID NO: 5287 - DNA, 32 bp, Artificial; identical to SEQ ID NO: 5219
  oligonucleotide probe

SEQ ID NO: 5288 - DNA, 32 bp, Artificial; identical to SEQ ID NO: 5220
  oligonucleotide probe

SEQ ID NO: 5289 - DNA, 32 bp, Artificial; identical to SEQ ID NO: 5253
  oligonucleotide probe

SEQ ID NO: 5290 - DNA, 32 bp, Artificial; identical to SEQ ID NO: 5222
  oligonucleotide probe

SEQ ID NO: 5291 - DNA, 32 bp, Artificial; identical to SEQ ID NO: 5229
  oligonucleotide probe

SEQ ID NO: 5292 - DNA, 32 bp, Artificial; identical to SEQ ID NO: 5221
  oligonucleotide probe

SEQ ID NO: 5293 - DNA, 32 bp, Artificial; identical to SEQ ID NO: 5229
  oligonucleotide probe

SEQ ID NO: 5294 - DNA, 32 bp, Artificial; identical to SEQ ID NO: 5221
  oligonucleotide probe

SEQ ID NO: 5295 - DNA, 32 bp, Artificial; identical to SEQ ID NO: 5219
  oligonucleotide probe

SEQ ID NO: 5296 - DNA, 32 bp, Artificial; identical to SEQ ID NO: 5220
  oligonucleotide probe

SEQ ID NO: 5297 - DNA, 32 bp, Artificial; identical to SEQ ID NO: 5229
  oligonucleotide probe

SEQ ID NO: 5298 - DNA, 32 bp, Artificial; identical to SEQ ID NO: 5221
  oligonucleotide probe

SEQ ID NO: 5299 - DNA, 32 bp, Artificial; identical to SEQ ID NO: 5217
  oligonucleotide probe

SEQ ID NO: 5300 - DNA, 32 bp, Artificial; identical to SEQ ID NO: 5218
  oligonucleotide probe

SEQ ID NO: 5301 - DNA, 32 bp, Artificial; identical to SEQ ID NO: 5229
  oligonucleotide probe

SEQ ID NO: 5302 - DNA, 32 bp, Artificial; identical to SEQ ID NO: 5221
  oligonucleotide probe

SEQ ID NO: 5303 - DNA, 32 bp, Artificial; identical to SEQ ID NO: 5219
  oligonucleotide probe

SEQ ID NO: 5304 - DNA, 32 bp, Artificial; identical to SEQ ID NO: 5220
  oligonucleotide probe

SEQ ID NO: 5305 - DNA, 32 bp, Artificial; identical to SEQ ID NO: 5219
  oligonucleotide probe

SEQ ID NO: 5306 - DNA, 32 bp, Artificial; identical to SEQ ID NO: 5220
  oligonucleotide probe

SEQ ID NO: 5307 - DNA, 32 bp, Artificial; identical to SEQ ID NO: 5219
  oligonucleotide probe

SEQ ID NO: 5308 - DNA, 32 bp, Artificial; identical to SEQ ID NO: 5220
  oligonucleotide probe

SEQ ID NO: 5309 - DNA, 32 bp, Artificial; identical to SEQ ID NO: 5223
  oligonucleotide probe

SEQ ID NO: 5310 - DNA, 32 bp, Artificial; identical to SEQ ID NO: 5224
  oligonucleotide probe

SEQ ID NO: 5311 - DNA, 32 bp, Artificial; identical to SEQ ID NO: 5217
  oligonucleotide probe

SEQ ID NO: 5312 - DNA, 32 bp, Artificial; identical to SEQ ID NO: 5218
  oligonucleotide probe

SEQ ID NO: 5313 - DNA, 32 bp, Artificial; identical to SEQ ID NO: 5239
  oligonucleotide probe

SEQ ID NO: 5314 - DNA, 32 bp, Artificial; identical to SEQ ID NO: 5240
  oligonucleotide probe

SEQ ID NO: 5315 - DNA, 32 bp, Artificial; identical to SEQ ID NO: 5219
  oligonucleotide probe

SEQ ID NO: 5316 - DNA, 32 bp, Artificial; identical to SEQ ID NO: 5220
  oligonucleotide probe

SEQ ID NO: 5317 - DNA, 32 bp, Artificial; identical to SEQ ID NO: 5221
  oligonucleotide probe

SEQ ID NO: 5318 - DNA, 32 bp, Artificial; identical to SEQ ID NO: 5222
  oligonucleotide probe

SEQ ID NO: 5319 - DNA, 32 bp, Artificial; identical to SEQ ID NO: 5231
  oligonucleotide probe

SEQ ID NO: 5320 - DNA, 32 bp, Artificial; identical to SEQ ID NO: 5232
  oligonucleotide probe

SEQ ID NO: 5321 - DNA, 32 bp, Artificial; identical to SEQ ID NO: 5218
  oligonucleotide probe

SEQ ID NO: 5322 - DNA, 32 bp, Artificial; identical to SEQ ID NO: 5224
  oligonucleotide probe

SEQ ID NO: 5323 - DNA, 32 bp, Artificial; identical to SEQ ID NO: 5219
  oligonucleotide probe

SEQ ID NO: 5324 - DNA, 32 bp, Artificial; identical to SEQ ID NO: 5220
  oligonucleotide probe

SEQ ID NO: 5325 - DNA, 32 bp, Artificial; identical to SEQ ID NO: 5253
  oligonucleotide probe

SEQ ID NO: 5326 - DNA, 32 bp, Artificial; identical to SEQ ID NO: 5222
  oligonucleotide probe

SEQ ID NO: 5327 - DNA, 32 bp, Artificial; identical to SEQ ID NO: 5223
  oligonucleotide probe

SEQ ID NO: 5328 - DNA, 32 bp, Artificial; identical to SEQ ID NO: 5224
  oligonucleotide probe

SEQ ID NO: 5329 - DNA, 32 bp, Artificial; identical to SEQ ID NO: 5217
  oligonucleotide probe

SEQ ID NO: 5330 - DNA, 32 bp, Artificial; identical to SEQ ID NO: 5218
  oligonucleotide probe

SEQ ID NO: 5331 - DNA, 32 bp, Artificial; identical to SEQ ID NO: 5241
  oligonucleotide probe

SEQ ID NO: 5332 - DNA, 32 bp, Artificial; identical to SEQ ID NO: 5242
  oligonucleotide probe

SEQ ID NO: 5333 - DNA, 32 bp, Artificial; identical to SEQ ID NO: 5253
  oligonucleotide probe

SEQ ID NO: 5334 - DNA, 32 bp, Artificial; identical to SEQ ID NO: 5222
  oligonucleotide probe

SEQ ID NO: 5335 - DNA, 32 bp, Artificial; identical to SEQ ID NO: 5217
  oligonucleotide probe

SEQ ID NO: 5336 - DNA, 32 bp, Artificial; identical to SEQ ID NO: 5218
  oligonucleotide probe

SEQ ID NO: 5337 - DNA, 32 bp, Artificial; identical to SEQ ID NO: 5253
  oligonucleotide probe

SEQ ID NO: 5338 - DNA, 32 bp, Artificial; identical to SEQ ID NO: 5222
  oligonucleotide probe

SEQ ID NO: 5339 - DNA, 32 bp, Artificial; identical to SEQ ID NO: 5217
  oligonucleotide probe

SEQ ID NO: 5340 - DNA, 32 bp, Artificial; identical to SEQ ID NO: 5218
  oligonucleotide probe

SEQ ID NO: 5341 - DNA, 32 bp, Artificial; identical to SEQ ID NO: 5217
  oligonucleotide probe

SEQ ID NO: 5342 - DNA, 32 bp, Artificial; identical to SEQ ID NO: 5218
  oligonucleotide probe

SEQ ID NO: 5343 - DNA, 32 bp, Artificial; identical to SEQ ID NO: 5231
  oligonucleotide probe

SEQ ID NO: 5344 - DNA, 32 bp, Artificial; identical to SEQ ID NO: 5232
  oligonucleotide probe

SEQ ID NO: 5345 - DNA, 32 bp, Artificial; identical to SEQ ID NO: 5231
  oligonucleotide probe

SEQ ID NO: 5346 - DNA, 32 bp, Artificial; identical to SEQ ID NO: 5232
  oligonucleotide probe

SEQ ID NO: 5347 - DNA, 32 bp, Artificial; identical to SEQ ID NO: 5231
  oligonucleotide probe

SEQ ID NO: 5348 - DNA, 32 bp, Artificial; identical to SEQ ID NO: 5232
  oligonucleotide probe

SEQ ID NO: 5349 - DNA, 32 bp, Artificial; identical to SEQ ID NO: 5223
  oligonucleotide probe

SEQ ID NO: 5350 - DNA, 32 bp, Artificial; identical to SEQ ID NO: 5224
  oligonucleotide probe

SEQ ID NO: 5351 - DNA, 32 bp, Artificial; identical to SEQ ID NO: 5219
  oligonucleotide probe

SEQ ID NO: 5352 - DNA, 32 bp, Artificial; identical to SEQ ID NO: 5220
  oligonucleotide probe

SEQ ID NO: 5353 - DNA, 32 bp, Artificial; identical to SEQ ID NO: 5229
  oligonucleotide probe

SEQ ID NO: 5354 - DNA, 32 bp, Artificial; identical to SEQ ID NO: 5221
  oligonucleotide probe

SEQ ID NO: 5355 - DNA, 32 bp, Artificial; identical to SEQ ID NO: 5223
  oligonucleotide probe

SEQ ID NO: 5356 - DNA, 32 bp, Artificial; identical to SEQ ID NO: 5224
  oligonucleotide probe

SEQ ID NO: 5357 - DNA, 32 bp, Artificial; identical to SEQ ID NO: 5223
  oligonucleotide probe

SEQ ID NO: 5358 - DNA, 32 bp, Artificial; identical to SEQ ID NO: 5224
  oligonucleotide probe

SEQ ID NO: 5359 - DNA, 32 bp, Artificial; identical to SEQ ID NO: 5223
  oligonucleotide probe

SEQ ID NO: 5360 - DNA, 32 bp, Artificial; identical to SEQ ID NO: 5224
  oligonucleotide probe

SEQ ID NO: 5361 - DNA, 32 bp, Artificial; identical to SEQ ID NO: 5231
  oligonucleotide probe

SEQ ID NO: 5362 - DNA, 32 bp, Artificial; identical to SEQ ID NO: 5232
  oligonucleotide probe

SEQ ID NO: 5363 - DNA, 32 bp, Artificial; identical to SEQ ID NO: 5223
  oligonucleotide probe

SEQ ID NO: 5364 - DNA, 32 bp, Artificial; identical to SEQ ID NO: 5224
  oligonucleotide probe

SEQ ID NO: 5365 - DNA, 32 bp, Artificial; identical to SEQ ID NO: 5239
  oligonucleotide probe

SEQ ID NO: 5366 - DNA, 32 bp, Artificial; identical to SEQ ID NO: 5240
  oligonucleotide probe

SEQ ID NO: 5367 - DNA, 32 bp, Artificial; identical to SEQ ID NO: 5219
  oligonucleotide probe

SEQ ID NO: 5368 - DNA, 32 bp, Artificial; identical to SEQ ID NO: 5220
  oligonucleotide probe

SEQ ID NO: 5369 - DNA, 32 bp, Artificial; identical to SEQ ID NO: 5223
  oligonucleotide probe

SEQ ID NO: 5370 - DNA, 32 bp, Artificial; identical to SEQ ID NO: 5224
  oligonucleotide probe

SEQ ID NO: 5371 - DNA, 32 bp, Artificial; identical to SEQ ID NO: 5223
  oligonucleotide probe

SEQ ID NO: 5372 - DNA, 32 bp, Artificial; identical to SEQ ID NO: 5224
  oligonucleotide probe

SEQ ID NO: 5373 - DNA, 32 bp, Artificial; identical to SEQ ID NO: 5219
  oligonucleotide probe

SEQ ID NO: 5374 - DNA, 32 bp, Artificial; identical to SEQ ID NO: 5220
  oligonucleotide probe

SEQ ID NO: 5375 - DNA, 32 bp, Artificial; identical to SEQ ID NO: 5241
  oligonucleotide probe

SEQ ID NO: 5376 - DNA, 32 bp, Artificial; identical to SEQ ID NO: 5242
  oligonucleotide probe

SEQ ID NO: 5377 - DNA, 32 bp, Artificial; identical to SEQ ID NO: 5231
  oligonucleotide probe

SEQ ID NO: 5378 - DNA, 32 bp, Artificial; identical to SEQ ID NO: 5232
  oligonucleotide probe

SEQ ID NO: 5379 - DNA, 32 bp, Artificial; identical to SEQ ID NO: 5219
  oligonucleotide probe

SEQ ID NO: 5380 - DNA, 32 bp, Artificial; identical to SEQ ID NO: 5220
  oligonucleotide probe

SEQ ID NO: 5381 - DNA, 32 bp, Artificial; identical to SEQ ID NO: 5253
  oligonucleotide probe

SEQ ID NO: 5382 - DNA, 32 bp, Artificial; identical to SEQ ID NO: 5222
  oligonucleotide probe

SEQ ID NO: 5383 - DNA, 32 bp, Artificial; identical to SEQ ID NO: 5229
  oligonucleotide probe

SEQ ID NO: 5384 - DNA, 32 bp, Artificial; identical to SEQ ID NO: 5221
  oligonucleotide probe

SEQ ID NO: 5385 - DNA, 32 bp, Artificial; identical to SEQ ID NO: 5253
  oligonucleotide probe

SEQ ID NO: 5386 - DNA, 32 bp, Artificial; identical to SEQ ID NO: 5222
  oligonucleotide probe

SEQ ID NO: 5387 - DNA, 32 bp, Artificial; identical to SEQ ID NO: 5253
  oligonucleotide probe

SEQ ID NO: 5388 - DNA, 32 bp, Artificial; identical to SEQ ID NO: 5222
  oligonucleotide probe

SEQ ID NO: 5389 - DNA, 32 bp, Artificial; identical to SEQ ID NO: 5217
  oligonucleotide probe

SEQ ID NO: 5390 - DNA, 32 bp, Artificial; identical to SEQ ID NO: 5218
  oligonucleotide probe

SEQ ID NO: 5391 - DNA, 32 bp, Artificial; identical to SEQ ID NO: 5217
  oligonucleotide probe

SEQ ID NO: 5392 - DNA, 32 bp, Artificial; identical to SEQ ID NO: 5218
  oligonucleotide probe

SEQ ID NO: 5393 - DNA, 32 bp, Artificial; identical to SEQ ID NO: 5241
  oligonucleotide probe

SEQ ID NO: 5394 - DNA, 32 bp, Artificial; identical to SEQ ID NO: 5242
  oligonucleotide probe

SEQ ID NO: 5395 - DNA, 32 bp, Artificial; identical to SEQ ID NO: 5240
  oligonucleotide probe

SEQ ID NO: 5396 - DNA, 32 bp, Artificial; identical to SEQ ID NO: 5232
  oligonucleotide probe

SEQ ID NO: 5397 - DNA, 32 bp, Artificial; identical to SEQ ID NO: 5232
  oligonucleotide probe

SEQ ID NO: 5398 - DNA, 32 bp, Artificial; identical to SEQ ID NO: 5218
  oligonucleotide probe

SEQ ID NO: 5399 - DNA, 32 bp, Artificial
  oligonucleotide probe
aagccgtgcgcaacgaggctgcacggtcccgt

SEQ ID NO: 5400 - DNA, 32 bp, Artificial; identical to SEQ ID NO: 5240
  oligonucleotide probe

SEQ ID NO: 5401 - DNA, 32 bp, Artificial; identical to SEQ ID NO: 5242
  oligonucleotide probe

SEQ ID NO: 5402 - DNA, 32 bp, Artificial; identical to SEQ ID NO: 5222
  oligonucleotide probe

SEQ ID NO: 5403 - DNA, 32 bp, Artificial; identical to SEQ ID NO: 5232
  oligonucleotide probe

SEQ ID NO: 5404 - DNA, 32 bp, Artificial; identical to SEQ ID NO: 5220
  oligonucleotide probe

SEQ ID NO: 5405 - DNA, 32 bp, Artificial; identical to SEQ ID NO: 5224
  oligonucleotide probe

SEQ ID NO: 5406 - DNA, 32 bp, Artificial; identical to SEQ ID NO: 5161
  oligonucleotide probe

SEQ ID NO: 5407 - DNA, 32 bp, Artificial; identical to SEQ ID NO: 5138
  oligonucleotide probe

SEQ ID NO: 5408 - DNA, 32 bp, Artificial; identical to SEQ ID NO: 5160
  oligonucleotide probe

SEQ ID NO: 5409 - DNA, 32 bp, Artificial; identical to SEQ ID NO: 5140
  oligonucleotide probe

SEQ ID NO: 5410 - DNA, 32 bp, Artificial
  oligonucleotide probe
aacgcgatttgccgcacgcattgcggctttcg

SEQ ID NO: 5411 - DNA, 32 bp, Artificial
  oligonucleotide probe
ccgtcgcaaagcgcaccgcattgcggctttcg

SEQ ID NO: 5412 - DNA, 32 bp, Artificial; identical to SEQ ID NO: 5231
  oligonucleotide probe

SEQ ID NO: 5413 - DNA, 32 bp, Artificial; identical to SEQ ID NO: 5232
  oligonucleotide probe

SEQ ID NO: 5414 - DNA, 32 bp, Artificial; identical to SEQ ID NO: 5240
  oligonucleotide probe

SEQ ID NO: 5415 - DNA, 32 bp, Artificial; identical to SEQ ID NO: 5232
  oligonucleotide probe

SEQ ID NO: 5416 - DNA, 32 bp, Artificial
  oligonucleotide probe
aagccgtgcgcaacgattcgccgtttgcgctg

SEQ ID NO: 5417 - DNA, 32 bp, Artificial; identical to SEQ ID NO: 5399
  oligonucleotide probe

SEQ ID NO: 5418 - DNA, 32 bp, Artificial; identical to SEQ ID NO: 5177
  oligonucleotide probe

SEQ ID NO: 5419 - DNA, 32 bp, Artificial; identical to SEQ ID NO: 5137
  oligonucleotide probe

SEQ ID NO: 5420 - DNA, 32 bp, Artificial; identical to SEQ ID NO: 5217
  oligonucleotide probe

SEQ ID NO: 5421 - DNA, 32 bp, Artificial; identical to SEQ ID NO: 5218
  oligonucleotide probe

SEQ ID NO: 5422 - DNA, 32 bp, Artificial; identical to SEQ ID NO: 5159
  oligonucleotide probe

SEQ ID NO: 5423 - DNA, 32 bp, Artificial; identical to SEQ ID NO: 5141
  oligonucleotide probe

SEQ ID NO: 5424 - DNA, 32 bp, Artificial; identical to SEQ ID NO: 5410
  oligonucleotide probe

SEQ ID NO: 5425 - DNA, 32 bp, Artificial; identical to SEQ ID NO: 5411
  oligonucleotide probe

SEQ ID NO: 5426 - DNA, 32 bp, Artificial; identical to SEQ ID NO: 5217
  oligonucleotide probe

SEQ ID NO: 5427 - DNA, 32 bp, Artificial; identical to SEQ ID NO: 5223
  oligonucleotide probe

SEQ ID NO: 5428 - DNA, 32 bp, Artificial; identical to SEQ ID NO: 5185
  oligonucleotide probe

SEQ ID NO: 5429 - DNA, 32 bp, Artificial; identical to SEQ ID NO: 5163
  oligonucleotide probe

SEQ ID NO: 5430 - DNA, 32 bp, Artificial; identical to SEQ ID NO: 5195
  oligonucleotide probe

SEQ ID NO: 5431 - DNA, 32 bp, Artificial; identical to SEQ ID NO: 5240
  oligonucleotide probe

SEQ ID NO: 5432 - DNA, 32 bp, Artificial; identical to SEQ ID NO: 5140
  oligonucleotide probe

SEQ ID NO: 5433 - DNA, 32 bp, Artificial; identical to SEQ ID NO: 5134
  oligonucleotide probe

SEQ ID NO: 5434 - DNA, 32 bp, Artificial; identical to SEQ ID NO: 5229
  oligonucleotide probe

SEQ ID NO: 5435 - DNA, 32 bp, Artificial; identical to SEQ ID NO: 5221
  oligonucleotide probe

SEQ ID NO: 5436 - DNA, 32 bp, Artificial; identical to SEQ ID NO: 5133
  oligonucleotide probe

SEQ ID NO: 5437 - DNA, 32 bp, Artificial; identical to SEQ ID NO: 5221
  oligonucleotide probe

SEQ ID NO: 5438 - DNA, 32 bp, Artificial; identical to SEQ ID NO: 5135
  oligonucleotide probe

SEQ ID NO: 5439 - DNA, 32 bp, Artificial; identical to SEQ ID NO: 5218
  oligonucleotide probe

SEQ ID NO: 5440 - DNA, 32 bp, Artificial; identical to SEQ ID NO: 5410
  oligonucleotide probe

SEQ ID NO: 5441 - DNA, 32 bp, Artificial; identical to SEQ ID NO: 5241
  oligonucleotide probe

SEQ ID NO: 5442 - DNA, 32 bp, Artificial; identical to SEQ ID NO: 5134
  oligonucleotide probe

SEQ ID NO: 5443 - DNA, 32 bp, Artificial; identical to SEQ ID NO: 5136
  oligonucleotide probe

SEQ ID NO: 5444 - DNA, 32 bp, Artificial; identical to SEQ ID NO: 5218
  oligonucleotide probe

SEQ ID NO: 5445 - DNA, 32 bp, Artificial; identical to SEQ ID NO: 5224
  oligonucleotide probe

SEQ ID NO: 5446 - DNA, 32 bp, Artificial; identical to SEQ ID NO: 5242
  oligonucleotide probe

SEQ ID NO: 5447 - DNA, 32 bp, Artificial; identical to SEQ ID NO: 5221
  oligonucleotide probe

SEQ ID NO: 5448 - DNA, 32 bp, Artificial; identical to SEQ ID NO: 5231
  oligonucleotide probe

SEQ ID NO: 5449 - DNA, 32 bp, Artificial; identical to SEQ ID NO: 5232
  oligonucleotide probe

SEQ ID NO: 5450 - DNA, 32 bp, Artificial; identical to SEQ ID NO: 5221
  oligonucleotide probe

SEQ ID NO: 5451 - DNA, 32 bp, Artificial; identical to SEQ ID NO: 5222
  oligonucleotide probe

SEQ ID NO: 5452 - DNA, 32 bp, Artificial; identical to SEQ ID NO: 5222
  oligonucleotide probe

SEQ ID NO: 5453 - DNA, 32 bp, Artificial; identical to SEQ ID NO: 5219
  oligonucleotide probe

SEQ ID NO: 5454 - DNA, 32 bp, Artificial; identical to SEQ ID NO: 5239
  oligonucleotide probe

SEQ ID NO: 5455 - DNA, 32 bp, Artificial; identical to SEQ ID NO: 5240
  oligonucleotide probe

SEQ ID NO: 5456 - DNA, 32 bp, Artificial; identical to SEQ ID NO: 5222
  oligonucleotide probe

SEQ ID NO: 5457 - DNA, 32 bp, Artificial; identical to SEQ ID NO: 5219
  oligonucleotide probe

SEQ ID NO: 5458 - DNA, 32 bp, Artificial; identical to SEQ ID NO: 5239
  oligonucleotide probe

SEQ ID NO: 5459 - DNA, 32 bp, Artificial; identical to SEQ ID NO: 5240
  oligonucleotide probe

SEQ ID NO: 5460 - DNA, 32 bp, Artificial; identical to SEQ ID NO: 5222
  oligonucleotide probe

SEQ ID NO: 5461 - DNA, 32 bp, Artificial; identical to SEQ ID NO: 5160
  oligonucleotide probe

SEQ ID NO: 5462 - DNA, 32 bp, Artificial; identical to SEQ ID NO: 5218
  oligonucleotide probe

SEQ ID NO: 5463 - DNA, 32 bp, Artificial; identical to SEQ ID NO: 5224
  oligonucleotide probe

SEQ ID NO: 5464 - DNA, 32 bp, Artificial; identical to SEQ ID NO: 5416
  oligonucleotide probe

SEQ ID NO: 5465 - DNA, 32 bp, Artificial; identical to SEQ ID NO: 5399
  oligonucleotide probe

SEQ ID NO: 5466 - DNA, 32 bp, Artificial; identical to SEQ ID NO: 5224
  oligonucleotide probe

SEQ ID NO: 5467 - DNA, 32 bp, Artificial; identical to SEQ ID NO: 5220
  oligonucleotide probe

SEQ ID NO: 5468 - DNA, 32 bp, Artificial; identical to SEQ ID NO: 5232
  oligonucleotide probe

SEQ ID NO: 5469 - DNA, 32 bp, Artificial; identical to SEQ ID NO: 5218
  oligonucleotide probe

SEQ ID NO: 5470 - DNA, 32 bp, Artificial; identical to SEQ ID NO: 5217
  oligonucleotide probe

SEQ ID NO: 5471 - DNA, 32 bp, Artificial; identical to SEQ ID NO: 5223
  oligonucleotide probe

SEQ ID NO: 5472 - DNA, 32 bp, Artificial; identical to SEQ ID NO: 5161
  oligonucleotide probe

SEQ ID NO: 5473 - DNA, 32 bp, Artificial; identical to SEQ ID NO: 5138
  oligonucleotide probe

SEQ ID NO: 5474 - DNA, 32 bp, Artificial; identical to SEQ ID NO: 5224
  oligonucleotide probe

SEQ ID NO: 5475 - DNA, 32 bp, Artificial; identical to SEQ ID NO: 5220
  oligonucleotide probe

SEQ ID NO: 5476 - DNA, 32 bp, Artificial; identical to SEQ ID NO: 5239
  oligonucleotide probe

SEQ ID NO: 5477 - DNA, 32 bp, Artificial; identical to SEQ ID NO: 5231
  oligonucleotide probe

SEQ ID NO: 5478 - DNA, 32 bp, Artificial; identical to SEQ ID NO: 5241
  oligonucleotide probe

SEQ ID NO: 5479 - DNA, 32 bp, Artificial; identical to SEQ ID NO: 5242
  oligonucleotide probe

SEQ ID NO: 5480 - DNA, 32 bp, Artificial; identical to SEQ ID NO: 5231
  oligonucleotide probe

SEQ ID NO: 5481 - DNA, 32 bp, Artificial; identical to SEQ ID NO: 5217
  oligonucleotide probe

SEQ ID NO: 5482 - DNA, 32 bp, Artificial; identical to SEQ ID NO: 5241
  oligonucleotide probe

SEQ ID NO: 5483 - DNA, 32 bp, Artificial; identical to SEQ ID NO: 5242
  oligonucleotide probe

SEQ ID NO: 5484 - DNA, 32 bp, Artificial; identical to SEQ ID NO: 5177
  oligonucleotide probe

SEQ ID NO: 5485 - DNA, 32 bp, Artificial; identical to SEQ ID NO: 5137
  oligonucleotide probe

SEQ ID NO: 5486 - DNA, 32 bp, Artificial; identical to SEQ ID NO: 5221
  oligonucleotide probe

SEQ ID NO: 5487 - DNA, 32 bp, Artificial; identical to SEQ ID NO: 5222
  oligonucleotide probe

SEQ ID NO: 5488 - DNA, 32 bp, Artificial; identical to SEQ ID NO: 5231
  oligonucleotide probe

SEQ ID NO: 5489 - DNA, 32 bp, Artificial; identical to SEQ ID NO: 5217
  oligonucleotide probe

SEQ ID NO: 5490 - DNA, 32 bp, Artificial; identical to SEQ ID NO: 5416
  oligonucleotide probe

SEQ ID NO: 5491 - DNA, 32 bp, Artificial; identical to SEQ ID NO: 5399
  oligonucleotide probe

SEQ ID NO: 5492 - DNA, 32 bp, Artificial; identical to SEQ ID NO: 5229
  oligonucleotide probe

SEQ ID NO: 5493 - DNA, 32 bp, Artificial; identical to SEQ ID NO: 5253
  oligonucleotide probe

SEQ ID NO: 5494 - DNA, 32 bp, Artificial; identical to SEQ ID NO: 5410
  oligonucleotide probe

SEQ ID NO: 5495 - DNA, 32 bp, Artificial; identical to SEQ ID NO: 5411
  oligonucleotide probe

SEQ ID NO: 5496 - DNA, 32 bp, Artificial; identical to SEQ ID NO: 5229
  oligonucleotide probe

SEQ ID NO: 5497 - DNA, 32 bp, Artificial; identical to SEQ ID NO: 5253
  oligonucleotide probe

SEQ ID NO: 5498 - DNA, 32 bp, Artificial; identical to SEQ ID NO: 5229
  oligonucleotide probe

SEQ ID NO: 5499 - DNA, 32 bp, Artificial; identical to SEQ ID NO: 5253
  oligonucleotide probe

SEQ ID NO: 5500 - DNA, 32 bp, Artificial; identical to SEQ ID NO: 5185
  oligonucleotide probe

SEQ ID NO: 5501 - DNA, 32 bp, Artificial; identical to SEQ ID NO: 5163
  oligonucleotide probe

SEQ ID NO: 5502 - DNA, 32 bp, Artificial; identical to SEQ ID NO: 5159
  oligonucleotide probe

SEQ ID NO: 5503 - DNA, 32 bp, Artificial; identical to SEQ ID NO: 5141
  oligonucleotide probe

SEQ ID NO: 5504 - DNA, 32 bp, Artificial; identical to SEQ ID NO: 5410
  oligonucleotide probe

SEQ ID NO: 5505 - DNA, 32 bp, Artificial; identical to SEQ ID NO: 5241
  oligonucleotide probe

SEQ ID NO: 5506 - DNA, 32 bp, Artificial; identical to SEQ ID NO: 5241
  oligonucleotide probe

SEQ ID NO: 5507 - DNA, 32 bp, Artificial; identical to SEQ ID NO: 5229
  oligonucleotide probe

SEQ ID NO: 5508 - DNA, 32 bp, Artificial; identical to SEQ ID NO: 5239
  oligonucleotide probe

SEQ ID NO: 5509 - DNA, 32 bp, Artificial; identical to SEQ ID NO: 5240
  oligonucleotide probe

SEQ ID NO: 5510 - DNA, 32 bp, Artificial; identical to SEQ ID NO: 5411
  oligonucleotide probe

SEQ ID NO: 5511 - DNA, 32 bp, Artificial; identical to SEQ ID NO: 5242
  oligonucleotide probe

SEQ ID NO: 5512 - DNA, 32 bp, Artificial; identical to SEQ ID NO: 5416
  oligonucleotide probe

SEQ ID NO: 5513 - DNA, 32 bp, Artificial; identical to SEQ ID NO: 5239
  oligonucleotide probe

SEQ ID NO: 5514 - DNA, 32 bp, Artificial; identical to SEQ ID NO: 5410
  oligonucleotide probe

SEQ ID NO: 5515 - DNA, 32 bp, Artificial; identical to SEQ ID NO: 5229
  oligonucleotide probe

SEQ ID NO: 5516 - DNA, 32 bp, Artificial; identical to SEQ ID NO: 5171
  oligonucleotide probe

SEQ ID NO: 5517 - DNA, 32 bp, Artificial; identical to SEQ ID NO: 5416
  oligonucleotide probe

SEQ ID NO: 5518 - DNA, 32 bp, Artificial; identical to SEQ ID NO: 5242
  oligonucleotide probe

SEQ ID NO: 5519 - DNA, 32 bp, Artificial; identical to SEQ ID NO: 5222
  oligonucleotide probe

SEQ ID NO: 5520 - DNA, 32 bp, Artificial; identical to SEQ ID NO: 5399
  oligonucleotide probe

SEQ ID NO: 5521 - DNA, 32 bp, Artificial; identical to SEQ ID NO: 5232
  oligonucleotide probe

SEQ ID NO: 5522 - DNA, 32 bp, Artificial; identical to SEQ ID NO: 5410
  oligonucleotide probe

SEQ ID NO: 5523 - DNA, 32 bp, Artificial; identical to SEQ ID NO: 5171
  oligonucleotide probe

SEQ ID NO: 5524 - DNA, 32 bp, Artificial; identical to SEQ ID NO: 5239
  oligonucleotide probe

SEQ ID NO: 5525 - DNA, 32 bp, Artificial; identical to SEQ ID NO: 5217
  oligonucleotide probe

SEQ ID NO: 5526 - DNA, 32 bp, Artificial; identical to SEQ ID NO: 5135
  oligonucleotide probe

SEQ ID NO: 5527 - DNA, 32 bp, Artificial; identical to SEQ ID NO: 5195
  oligonucleotide probe

SEQ ID NO: 5528 - DNA, 32 bp, Artificial; identical to SEQ ID NO: 5133
  oligonucleotide probe

SEQ ID NO: 5529 - DNA, 32 bp, Artificial; identical to SEQ ID NO: 5242
  oligonucleotide probe

SEQ ID NO: 5530 - DNA, 32 bp, Artificial; identical to SEQ ID NO: 5136
  oligonucleotide probe

SEQ ID NO: 5531 - DNA, 32 bp, Artificial; identical to SEQ ID NO: 5224
  oligonucleotide probe

SEQ ID NO: 5532 - DNA, 32 bp, Artificial; identical to SEQ ID NO: 5220
  oligonucleotide probe

SEQ ID NO: 5533 - DNA, 32 bp, Artificial; identical to SEQ ID NO: 5232
  oligonucleotide probe

SEQ ID NO: 5534 - DNA, 32 bp, Artificial; identical to SEQ ID NO: 5219
  oligonucleotide probe

SEQ ID NO: 5535 - DNA, 32 bp, Artificial; identical to SEQ ID NO: 5223
  oligonucleotide probe

SEQ ID NO: 5536 - DNA, 32 bp, Artificial
  oligonucleotide probe
gcaccgcagctgcgtgttgcatggcgtgggga

SEQ ID NO: 5537 - DNA, 32 bp, Artificial
  oligonucleotide probe
gcaccgcagctgcgtggcacgggaaagcggct

SEQ ID NO: 5538 - DNA, 32 bp, Artificial
  oligonucleotide probe
aacgcgatttgccgcattgcatggcgtgggga

SEQ ID NO: 5539 - DNA, 32 bp, Artificial
  oligonucleotide probe
aacgcgatttgccgcagcacgggaaagcggct

SEQ ID NO: 5540 - DNA, 32 bp, Artificial
  oligonucleotide probe
gggattcgcgcaaacgttcgccgtttgcgctg

SEQ ID NO: 5541 - DNA, 32 bp, Artificial
  oligonucleotide probe
gcaccgcagctgcgtgttcgccgtttgcgctg

SEQ ID NO: 5542 - DNA, 32 bp, Artificial; identical to SEQ ID NO: 5540
  oligonucleotide probe

SEQ ID NO: 5543 - DNA, 32 bp, Artificial; identical to SEQ ID NO: 5541
  oligonucleotide probe

SEQ ID NO: 5544 - DNA, 32 bp, Artificial
  oligonucleotide probe
gggattcgcgcaaacgggctgcacggtcccgt

SEQ ID NO: 5545 - DNA, 32 bp, Artificial
  oligonucleotide probe
gcaccgcagctgcgtgggctgcacggtcccgt

SEQ ID NO: 5546 - DNA, 32 bp, Artificial
  oligonucleotide probe
gggattcgcgcaaacgttgcatggcgtgggga

SEQ ID NO: 5547 - DNA, 32 bp, Artificial
  oligonucleotide probe
gggattcgcgcaaacggcacgggaaagcggct

SEQ ID NO: 5548 - DNA, 32 bp, Artificial; identical to SEQ ID NO: 5546
  oligonucleotide probe

SEQ ID NO: 5549 - DNA, 32 bp, Artificial; identical to SEQ ID NO: 5547
  oligonucleotide probe

SEQ ID NO: 5550 - DNA, 32 bp, Artificial
  oligonucleotide probe
gggattcgcgcaaacgccgtttcggctgggct

SEQ ID NO: 5551 - DNA, 32 bp, Artificial
  oligonucleotide probe
gcaccgcagctgcgtgccgtttcggctgggct

SEQ ID NO: 5552 - DNA, 32 bp, Artificial; identical to SEQ ID NO: 5540
  oligonucleotide probe

SEQ ID NO: 5553 - DNA, 32 bp, Artificial; identical to SEQ ID NO: 5541
  oligonucleotide probe

SEQ ID NO: 5554 - DNA, 32 bp, Artificial
  oligonucleotide probe
gggattcgcgcaaacgatggcgcagcacgctg

SEQ ID NO: 5555 - DNA, 32 bp, Artificial
  oligonucleotide probe
gcaccgcagctgcgtgatggcgcagcacgctg

SEQ ID NO: 5556 - DNA, 32 bp, Artificial; identical to SEQ ID NO: 5538
  oligonucleotide probe

SEQ ID NO: 5557 - DNA, 32 bp, Artificial; identical to SEQ ID NO: 5539
  oligonucleotide probe

SEQ ID NO: 5558 - DNA, 32 bp, Artificial; identical to SEQ ID NO: 5538
  oligonucleotide probe

SEQ ID NO: 5559 - DNA, 32 bp, Artificial; identical to SEQ ID NO: 5539
  oligonucleotide probe

SEQ ID NO: 5560 - DNA, 32 bp, Artificial; identical to SEQ ID NO: 5544
  oligonucleotide probe

SEQ ID NO: 5561 - DNA, 32 bp, Artificial; identical to SEQ ID NO: 5545
  oligonucleotide probe

SEQ ID NO: 5562 - DNA, 32 bp, Artificial; identical to SEQ ID NO: 5546
  oligonucleotide probe

SEQ ID NO: 5563 - DNA, 32 bp, Artificial; identical to SEQ ID NO: 5547
  oligonucleotide probe

SEQ ID NO: 5564 - DNA, 32 bp, Artificial
  oligonucleotide probe
ccgtcgcaaagcgcacttgcatggcgtgggga

SEQ ID NO: 5565 - DNA, 32 bp, Artificial
  oligonucleotide probe
ccgtcgcaaagcgcacgcacgggaaagcggct

SEQ ID NO: 5566 - DNA, 32 bp, Artificial; identical to SEQ ID NO: 5538
  oligonucleotide probe

SEQ ID NO: 5567 - DNA, 32 bp, Artificial; identical to SEQ ID NO: 5539
  oligonucleotide probe

SEQ ID NO: 5568 - DNA, 32 bp, Artificial; identical to SEQ ID NO: 5546
  oligonucleotide probe

SEQ ID NO: 5569 - DNA, 32 bp, Artificial; identical to SEQ ID NO: 5547
  oligonucleotide probe

SEQ ID NO: 5570 - DNA, 32 bp, Artificial; identical to SEQ ID NO: 5544
  oligonucleotide probe

SEQ ID NO: 5571 - DNA, 32 bp, Artificial; identical to SEQ ID NO: 5545
  oligonucleotide probe

SEQ ID NO: 5572 - DNA, 32 bp, Artificial; identical to SEQ ID NO: 5546
  oligonucleotide probe

SEQ ID NO: 5573 - DNA, 32 bp, Artificial; identical to SEQ ID NO: 5547
  oligonucleotide probe

SEQ ID NO: 5574 - DNA, 32 bp, Artificial; identical to SEQ ID NO: 5546
  oligonucleotide probe

SEQ ID NO: 5575 - DNA, 32 bp, Artificial; identical to SEQ ID NO: 5547
  oligonucleotide probe

SEQ ID NO: 5576 - DNA, 32 bp, Artificial; identical to SEQ ID NO: 5564
  oligonucleotide probe

SEQ ID NO: 5577 - DNA, 32 bp, Artificial; identical to SEQ ID NO: 5565
  oligonucleotide probe

SEQ ID NO: 5578 - DNA, 32 bp, Artificial; identical to SEQ ID NO: 5546
  oligonucleotide probe

SEQ ID NO: 5579 - DNA, 32 bp, Artificial; identical to SEQ ID NO: 5547
  oligonucleotide probe

SEQ ID NO: 5580 - DNA, 32 bp, Artificial; identical to SEQ ID NO: 5544
  oligonucleotide probe

SEQ ID NO: 5581 - DNA, 32 bp, Artificial; identical to SEQ ID NO: 5545
  oligonucleotide probe

SEQ ID NO: 5582 - DNA, 32 bp, Artificial; identical to SEQ ID NO: 5540
  oligonucleotide probe

SEQ ID NO: 5583 - DNA, 32 bp, Artificial; identical to SEQ ID NO: 5541
  oligonucleotide probe

SEQ ID NO: 5584 - DNA, 32 bp, Artificial
  oligonucleotide probe
ttcggggaaacgccgtttgcatggcgtgggga

SEQ ID NO: 5585 - DNA, 32 bp, Artificial
  oligonucleotide probe
ttcggggaaacgccgtgcacgggaaagcggct

SEQ ID NO: 5586 - DNA, 32 bp, Artificial; identical to SEQ ID NO: 5540
  oligonucleotide probe

SEQ ID NO: 5587 - DNA, 32 bp, Artificial; identical to SEQ ID NO: 5541
  oligonucleotide probe

SEQ ID NO: 5588 - DNA, 32 bp, Artificial; identical to SEQ ID NO: 5544
  oligonucleotide probe

SEQ ID NO: 5589 - DNA, 32 bp, Artificial; identical to SEQ ID NO: 5545
  oligonucleotide probe

SEQ ID NO: 5590 - DNA, 32 bp, Artificial; identical to SEQ ID NO: 5565
  oligonucleotide probe

SEQ ID NO: 5591 - DNA, 32 bp, Artificial; identical to SEQ ID NO: 5547
  oligonucleotide probe

SEQ ID NO: 5592 - DNA, 32 bp, Artificial; identical to SEQ ID NO: 5536
  oligonucleotide probe

SEQ ID NO: 5593 - DNA, 32 bp, Artificial; identical to SEQ ID NO: 5537
  oligonucleotide probe

SEQ ID NO: 5594 - DNA, 32 bp, Artificial
  oligonucleotide probe
ggctttgcgcaccgtgttgcatggcgtgggga

SEQ ID NO: 5595 - DNA, 32 bp, Artificial
  oligonucleotide probe
ggctttgcgcaccgtggcacgggaaagcggct

SEQ ID NO: 5596 - DNA, 32 bp, Artificial; identical to SEQ ID NO: 5550
  oligonucleotide probe

SEQ ID NO: 5597 - DNA, 32 bp, Artificial; identical to SEQ ID NO: 5551
  oligonucleotide probe

SEQ ID NO: 5598 - DNA, 32 bp, Artificial; identical to SEQ ID NO: 5550
  oligonucleotide probe

SEQ ID NO: 5599 - DNA, 32 bp, Artificial; identical to SEQ ID NO: 5551
  oligonucleotide probe

SEQ ID NO: 5600 - DNA, 32 bp, Artificial; identical to SEQ ID NO: 5564
  oligonucleotide probe

SEQ ID NO: 5601 - DNA, 32 bp, Artificial; identical to SEQ ID NO: 5565
  oligonucleotide probe

SEQ ID NO: 5602 - DNA, 32 bp, Artificial; identical to SEQ ID NO: 5564
  oligonucleotide probe

SEQ ID NO: 5603 - DNA, 32 bp, Artificial; identical to SEQ ID NO: 5565
  oligonucleotide probe

SEQ ID NO: 5604 - DNA, 32 bp, Artificial; identical to SEQ ID NO: 5550
  oligonucleotide probe

SEQ ID NO: 5605 - DNA, 32 bp, Artificial; identical to SEQ ID NO: 5551
  oligonucleotide probe

SEQ ID NO: 5606 - DNA, 32 bp, Artificial; identical to SEQ ID NO: 5544
  oligonucleotide probe

SEQ ID NO: 5607 - DNA, 32 bp, Artificial; identical to SEQ ID NO: 5545
  oligonucleotide probe

SEQ ID NO: 5608 - DNA, 32 bp, Artificial; identical to SEQ ID NO: 5536
  oligonucleotide probe

SEQ ID NO: 5609 - DNA, 32 bp, Artificial; identical to SEQ ID NO: 5537
  oligonucleotide probe

SEQ ID NO: 5610 - DNA, 32 bp, Artificial
  oligonucleotide probe
ttgcaagcgtccgggattgcatggcgtgggga

SEQ ID NO: 5611 - DNA, 32 bp, Artificial
  oligonucleotide probe
ttgcaagcgtccgggagcacgggaaagcggct

SEQ ID NO: 5612 - DNA, 32 bp, Artificial; identical to SEQ ID NO: 5610
  oligonucleotide probe

SEQ ID NO: 5613 - DNA, 32 bp, Artificial; identical to SEQ ID NO: 5611
  oligonucleotide probe

SEQ ID NO: 5614 - DNA, 32 bp, Artificial; identical to SEQ ID NO: 5564
  oligonucleotide probe

SEQ ID NO: 5615 - DNA, 32 bp, Artificial; identical to SEQ ID NO: 5565
  oligonucleotide probe

SEQ ID NO: 5616 - DNA, 32 bp, Artificial; identical to SEQ ID NO: 5594
  oligonucleotide probe

SEQ ID NO: 5617 - DNA, 32 bp, Artificial; identical to SEQ ID NO: 5595
  oligonucleotide probe

SEQ ID NO: 5618 - DNA, 32 bp, Artificial; identical to SEQ ID NO: 5536
  oligonucleotide probe

SEQ ID NO: 5619 - DNA, 32 bp, Artificial; identical to SEQ ID NO: 5537
  oligonucleotide probe

SEQ ID NO: 5620 - DNA, 32 bp, Artificial; identical to SEQ ID NO: 5584
  oligonucleotide probe

SEQ ID NO: 5621 - DNA, 32 bp, Artificial; identical to SEQ ID NO: 5585
  oligonucleotide probe

SEQ ID NO: 5622 - DNA, 32 bp, Artificial; identical to SEQ ID NO: 5584
  oligonucleotide probe

SEQ ID NO: 5623 - DNA, 32 bp, Artificial; identical to SEQ ID NO: 5585
  oligonucleotide probe

SEQ ID NO: 5624 - DNA, 32 bp, Artificial; identical to SEQ ID NO: 5584
  oligonucleotide probe

SEQ ID NO: 5625 - DNA, 32 bp, Artificial; identical to SEQ ID NO: 5585
  oligonucleotide probe

SEQ ID NO: 5626 - DNA, 32 bp, Artificial; identical to SEQ ID NO: 5550
  oligonucleotide probe

SEQ ID NO: 5627 - DNA, 32 bp, Artificial; identical to SEQ ID NO: 5551
  oligonucleotide probe

SEQ ID NO: 5628 - DNA, 32 bp, Artificial; identical to SEQ ID NO: 5544
  oligonucleotide probe

SEQ ID NO: 5629 - DNA, 32 bp, Artificial; identical to SEQ ID NO: 5545
  oligonucleotide probe

SEQ ID NO: 5630 - DNA, 32 bp, Artificial; identical to SEQ ID NO: 5540
  oligonucleotide probe

SEQ ID NO: 5631 - DNA, 32 bp, Artificial; identical to SEQ ID NO: 5541
  oligonucleotide probe

SEQ ID NO: 5632 - DNA, 32 bp, Artificial; identical to SEQ ID NO: 5538
  oligonucleotide probe

SEQ ID NO: 5633 - DNA, 32 bp, Artificial; identical to SEQ ID NO: 5539
  oligonucleotide probe

SEQ ID NO: 5634 - DNA, 32 bp, Artificial; identical to SEQ ID NO: 5546
  oligonucleotide probe

SEQ ID NO: 5635 - DNA, 32 bp, Artificial; identical to SEQ ID NO: 5547
  oligonucleotide probe

SEQ ID NO: 5636 - DNA, 32 bp, Artificial; identical to SEQ ID NO: 5536
  oligonucleotide probe

SEQ ID NO: 5637 - DNA, 32 bp, Artificial; identical to SEQ ID NO: 5537
  oligonucleotide probe

SEQ ID NO: 5638 - DNA, 32 bp, Artificial; identical to SEQ ID NO: 5544
  oligonucleotide probe

SEQ ID NO: 5639 - DNA, 32 bp, Artificial; identical to SEQ ID NO: 5545
  oligonucleotide probe

SEQ ID NO: 5640 - DNA, 32 bp, Artificial; identical to SEQ ID NO: 5536
  oligonucleotide probe

SEQ ID NO: 5641 - DNA, 32 bp, Artificial; identical to SEQ ID NO: 5537
  oligonucleotide probe

SEQ ID NO: 5642 - DNA, 32 bp, Artificial; identical to SEQ ID NO: 5536
  oligonucleotide probe

SEQ ID NO: 5643 - DNA, 32 bp, Artificial; identical to SEQ ID NO: 5537
  oligonucleotide probe

SEQ ID NO: 5644 - DNA, 32 bp, Artificial; identical to SEQ ID NO: 5536
  oligonucleotide probe

SEQ ID NO: 5645 - DNA, 32 bp, Artificial; identical to SEQ ID NO: 5537
  oligonucleotide probe

SEQ ID NO: 5646 - DNA, 32 bp, Artificial; identical to SEQ ID NO: 5540
  oligonucleotide probe

SEQ ID NO: 5647 - DNA, 32 bp, Artificial; identical to SEQ ID NO: 5541
  oligonucleotide probe

SEQ ID NO: 5648 - DNA, 32 bp, Artificial; identical to SEQ ID NO: 5544
  oligonucleotide probe

SEQ ID NO: 5649 - DNA, 32 bp, Artificial; identical to SEQ ID NO: 5545
  oligonucleotide probe

SEQ ID NO: 5650 - DNA, 32 bp, Artificial; identical to SEQ ID NO: 5550
  oligonucleotide probe

SEQ ID NO: 5651 - DNA, 32 bp, Artificial; identical to SEQ ID NO: 5551
  oligonucleotide probe

SEQ ID NO: 5652 - DNA, 32 bp, Artificial; identical to SEQ ID NO: 5536
  oligonucleotide probe

SEQ ID NO: 5653 - DNA, 32 bp, Artificial; identical to SEQ ID NO: 5537
  oligonucleotide probe

SEQ ID NO: 5654 - DNA, 32 bp, Artificial; identical to SEQ ID NO: 5536
  oligonucleotide probe

SEQ ID NO: 5655 - DNA, 32 bp, Artificial; identical to SEQ ID NO: 5537
  oligonucleotide probe

SEQ ID NO: 5656 - DNA, 32 bp, Artificial; identical to SEQ ID NO: 5546
  oligonucleotide probe

SEQ ID NO: 5657 - DNA, 32 bp, Artificial; identical to SEQ ID NO: 5547
  oligonucleotide probe

SEQ ID NO: 5658 - DNA, 32 bp, Artificial; identical to SEQ ID NO: 5540
  oligonucleotide probe

SEQ ID NO: 5659 - DNA, 32 bp, Artificial; identical to SEQ ID NO: 5541
  oligonucleotide probe

SEQ ID NO: 5660 - DNA, 32 bp, Artificial; identical to SEQ ID NO: 5564
  oligonucleotide probe

SEQ ID NO: 5661 - DNA, 32 bp, Artificial; identical to SEQ ID NO: 5565
  oligonucleotide probe

SEQ ID NO: 5662 - DNA, 32 bp, Artificial; identical to SEQ ID NO: 5546
  oligonucleotide probe

SEQ ID NO: 5663 - DNA, 32 bp, Artificial; identical to SEQ ID NO: 5547
  oligonucleotide probe

SEQ ID NO: 5664 - DNA, 32 bp, Artificial; identical to SEQ ID NO: 5544
  oligonucleotide probe

SEQ ID NO: 5665 - DNA, 32 bp, Artificial; identical to SEQ ID NO: 5545
  oligonucleotide probe

SEQ ID NO: 5666 - DNA, 32 bp, Artificial; identical to SEQ ID NO: 5544
  oligonucleotide probe

SEQ ID NO: 5667 - DNA, 32 bp, Artificial; identical to SEQ ID NO: 5545
  oligonucleotide probe

SEQ ID NO: 5668 - DNA, 32 bp, Artificial; identical to SEQ ID NO: 5536
  oligonucleotide probe

SEQ ID NO: 5669 - DNA, 32 bp, Artificial; identical to SEQ ID NO: 5537
  oligonucleotide probe

SEQ ID NO: 5670 - DNA, 32 bp, Artificial; identical to SEQ ID NO: 5565
  oligonucleotide probe

SEQ ID NO: 5671 - DNA, 32 bp, Artificial; identical to SEQ ID NO: 5547
  oligonucleotide probe

SEQ ID NO: 5672 - DNA, 32 bp, Artificial; identical to SEQ ID NO: 5550
  oligonucleotide probe

SEQ ID NO: 5673 - DNA, 32 bp, Artificial; identical to SEQ ID NO: 5551
  oligonucleotide probe

SEQ ID NO: 5674 - DNA, 32 bp, Artificial; identical to SEQ ID NO: 5546
  oligonucleotide probe

SEQ ID NO: 5675 - DNA, 32 bp, Artificial; identical to SEQ ID NO: 5547
  oligonucleotide probe

SEQ ID NO: 5676 - DNA, 32 bp, Artificial; identical to SEQ ID NO: 5550
  oligonucleotide probe

SEQ ID NO: 5677 - DNA, 32 bp, Artificial; identical to SEQ ID NO: 5551
  oligonucleotide probe

SEQ ID NO: 5678 - DNA, 32 bp, Artificial; identical to SEQ ID NO: 5536
  oligonucleotide probe

SEQ ID NO: 5679 - DNA, 32 bp, Artificial; identical to SEQ ID NO: 5537
  oligonucleotide probe

SEQ ID NO: 5680 - DNA, 32 bp, Artificial; identical to SEQ ID NO: 5540
  oligonucleotide probe

SEQ ID NO: 5681 - DNA, 32 bp, Artificial; identical to SEQ ID NO: 5541
  oligonucleotide probe

SEQ ID NO: 5682 - DNA, 32 bp, Artificial; identical to SEQ ID NO: 5564
  oligonucleotide probe

SEQ ID NO: 5683 - DNA, 32 bp, Artificial; identical to SEQ ID NO: 5565
  oligonucleotide probe

SEQ ID NO: 5684 - DNA, 32 bp, Artificial; identical to SEQ ID NO: 5544
  oligonucleotide probe

SEQ ID NO: 5685 - DNA, 32 bp, Artificial; identical to SEQ ID NO: 5545
  oligonucleotide probe

SEQ ID NO: 5686 - DNA, 32 bp, Artificial; identical to SEQ ID NO: 5564
  oligonucleotide probe

SEQ ID NO: 5687 - DNA, 32 bp, Artificial; identical to SEQ ID NO: 5565
  oligonucleotide probe

SEQ ID NO: 5688 - DNA, 32 bp, Artificial; identical to SEQ ID NO: 5546
  oligonucleotide probe

SEQ ID NO: 5689 - DNA, 32 bp, Artificial; identical to SEQ ID NO: 5547
  oligonucleotide probe

SEQ ID NO: 5690 - DNA, 32 bp, Artificial; identical to SEQ ID NO: 5550
  oligonucleotide probe

SEQ ID NO: 5691 - DNA, 32 bp, Artificial; identical to SEQ ID NO: 5551
  oligonucleotide probe

SEQ ID NO: 5692 - DNA, 32 bp, Artificial; identical to SEQ ID NO: 5564
  oligonucleotide probe

SEQ ID NO: 5693 - DNA, 32 bp, Artificial; identical to SEQ ID NO: 5565
  oligonucleotide probe

SEQ ID NO: 5694 - DNA, 32 bp, Artificial; identical to SEQ ID NO: 5536
  oligonucleotide probe

SEQ ID NO: 5695 - DNA, 32 bp, Artificial; identical to SEQ ID NO: 5537
  oligonucleotide probe

SEQ ID NO: 5696 - DNA, 32 bp, Artificial; identical to SEQ ID NO: 5546
  oligonucleotide probe

SEQ ID NO: 5697 - DNA, 32 bp, Artificial; identical to SEQ ID NO: 5547
  oligonucleotide probe

SEQ ID NO: 5698 - DNA, 32 bp, Artificial; identical to SEQ ID NO: 5584
  oligonucleotide probe

SEQ ID NO: 5699 - DNA, 32 bp, Artificial; identical to SEQ ID NO: 5585
  oligonucleotide probe

SEQ ID NO: 5700 - DNA, 32 bp, Artificial; identical to SEQ ID NO: 5540
  oligonucleotide probe

SEQ ID NO: 5701 - DNA, 32 bp, Artificial; identical to SEQ ID NO: 5541
  oligonucleotide probe

SEQ ID NO: 5702 - DNA, 32 bp, Artificial; identical to SEQ ID NO: 5564
  oligonucleotide probe

SEQ ID NO: 5703 - DNA, 32 bp, Artificial; identical to SEQ ID NO: 5565
  oligonucleotide probe

SEQ ID NO: 5704 - DNA, 32 bp, Artificial; identical to SEQ ID NO: 5536
  oligonucleotide probe

SEQ ID NO: 5705 - DNA, 32 bp, Artificial; identical to SEQ ID NO: 5537
  oligonucleotide probe

SEQ ID NO: 5706 - DNA, 32 bp, Artificial; identical to SEQ ID NO: 5584
  oligonucleotide probe

SEQ ID NO: 5707 - DNA, 32 bp, Artificial; identical to SEQ ID NO: 5585
  oligonucleotide probe

SEQ ID NO: 5708 - DNA, 32 bp, Artificial
  oligonucleotide probe
gggattcgcgcaaacgaacggctgcaagcgca

SEQ ID NO: 5709 - DNA, 32 bp, Artificial
  oligonucleotide probe
gcaccgcagctgcgtgaacggctgcaagcgca

SEQ ID NO: 5710 - DNA, 32 bp, Artificial; identical to SEQ ID NO: 5538
  oligonucleotide probe

SEQ ID NO: 5711 - DNA, 32 bp, Artificial; identical to SEQ ID NO: 5539
  oligonucleotide probe

SEQ ID NO: 5712 - DNA, 32 bp, Artificial; identical to SEQ ID NO: 5610
  oligonucleotide probe

SEQ ID NO: 5713 - DNA, 32 bp, Artificial; identical to SEQ ID NO: 5611
  oligonucleotide probe

SEQ ID NO: 5714 - DNA, 32 bp, Artificial; identical to SEQ ID NO: 5564
  oligonucleotide probe

SEQ ID NO: 5715 - DNA, 32 bp, Artificial; identical to SEQ ID NO: 5565
  oligonucleotide probe

SEQ ID NO: 5716 - DNA, 32 bp, Artificial; identical to SEQ ID NO: 5594
  oligonucleotide probe

SEQ ID NO: 5717 - DNA, 32 bp, Artificial; identical to SEQ ID NO: 5595
  oligonucleotide probe

SEQ ID NO: 5718 - DNA, 32 bp, Artificial; identical to SEQ ID NO: 5610
  oligonucleotide probe

SEQ ID NO: 5719 - DNA, 32 bp, Artificial; identical to SEQ ID NO: 5611
  oligonucleotide probe

SEQ ID NO: 5720 - DNA, 32 bp, Artificial; identical to SEQ ID NO: 5538
  oligonucleotide probe

SEQ ID NO: 5721 - DNA, 32 bp, Artificial; identical to SEQ ID NO: 5539
  oligonucleotide probe

SEQ ID NO: 5722 - DNA, 32 bp, Artificial; identical to SEQ ID NO: 5584
  oligonucleotide probe

SEQ ID NO: 5723 - DNA, 32 bp, Artificial; identical to SEQ ID NO: 5585
  oligonucleotide probe

SEQ ID NO: 5724 - DNA, 32 bp, Artificial; identical to SEQ ID NO: 5546
  oligonucleotide probe

SEQ ID NO: 5725 - DNA, 32 bp, Artificial; identical to SEQ ID NO: 5547
  oligonucleotide probe

SEQ ID NO: 5726 - DNA, 32 bp, Artificial; identical to SEQ ID NO: 5564
  oligonucleotide probe

SEQ ID NO: 5727 - DNA, 32 bp, Artificial; identical to SEQ ID NO: 5565
  oligonucleotide probe

SEQ ID NO: 5728 - DNA, 32 bp, Artificial; identical to SEQ ID NO: 5564
  oligonucleotide probe

SEQ ID NO: 5729 - DNA, 32 bp, Artificial; identical to SEQ ID NO: 5565
  oligonucleotide probe

SEQ ID NO: 5730 - DNA, 32 bp, Artificial; identical to SEQ ID NO: 5544
  oligonucleotide probe

SEQ ID NO: 5731 - DNA, 32 bp, Artificial; identical to SEQ ID NO: 5545
  oligonucleotide probe

SEQ ID NO: 5732 - DNA, 32 bp, Artificial; identical to SEQ ID NO: 5536
  oligonucleotide probe

SEQ ID NO: 5733 - DNA, 32 bp, Artificial; identical to SEQ ID NO: 5537
  oligonucleotide probe

SEQ ID NO: 5734 - DNA, 32 bp, Artificial; identical to SEQ ID NO: 5536
  oligonucleotide probe

SEQ ID NO: 5735 - DNA, 32 bp, Artificial; identical to SEQ ID NO: 5537
  oligonucleotide probe

SEQ ID NO: 5736 - DNA, 32 bp, Artificial; identical to SEQ ID NO: 5554
  oligonucleotide probe

SEQ ID NO: 5737 - DNA, 32 bp, Artificial; identical to SEQ ID NO: 5555
  oligonucleotide probe

SEQ ID NO: 5738 - DNA, 32 bp, Artificial; identical to SEQ ID NO: 5564
  oligonucleotide probe

SEQ ID NO: 5739 - DNA, 32 bp, Artificial; identical to SEQ ID NO: 5565
  oligonucleotide probe

SEQ ID NO: 5740 - DNA, 32 bp, Artificial; identical to SEQ ID NO: 5550
  oligonucleotide probe

SEQ ID NO: 5741 - DNA, 32 bp, Artificial; identical to SEQ ID NO: 5551
  oligonucleotide probe

SEQ ID NO: 5742 - DNA, 32 bp, Artificial; identical to SEQ ID NO: 5554
  oligonucleotide probe

SEQ ID NO: 5743 - DNA, 32 bp, Artificial; identical to SEQ ID NO: 5555
  oligonucleotide probe

SEQ ID NO: 5744 - DNA, 32 bp, Artificial; identical to SEQ ID NO: 5594
  oligonucleotide probe

SEQ ID NO: 5745 - DNA, 32 bp, Artificial; identical to SEQ ID NO: 5595
  oligonucleotide probe

SEQ ID NO: 5746 - DNA, 32 bp, Artificial; identical to SEQ ID NO: 5550
  oligonucleotide probe

SEQ ID NO: 5747 - DNA, 32 bp, Artificial; identical to SEQ ID NO: 5551
  oligonucleotide probe

SEQ ID NO: 5748 - DNA, 32 bp, Artificial; identical to SEQ ID NO: 5536
  oligonucleotide probe

SEQ ID NO: 5749 - DNA, 32 bp, Artificial; identical to SEQ ID NO: 5537
  oligonucleotide probe

SEQ ID NO: 5750 - DNA, 32 bp, Artificial; identical to SEQ ID NO: 5564
  oligonucleotide probe

SEQ ID NO: 5751 - DNA, 32 bp, Artificial; identical to SEQ ID NO: 5565
  oligonucleotide probe

SEQ ID NO: 5752 - DNA, 32 bp, Artificial; identical to SEQ ID NO: 5540
  oligonucleotide probe

SEQ ID NO: 5753 - DNA, 32 bp, Artificial; identical to SEQ ID NO: 5541
  oligonucleotide probe

SEQ ID NO: 5754 - DNA, 32 bp, Artificial; identical to SEQ ID NO: 5540
  oligonucleotide probe

SEQ ID NO: 5755 - DNA, 32 bp, Artificial; identical to SEQ ID NO: 5541
  oligonucleotide probe

SEQ ID NO: 5756 - DNA, 32 bp, Artificial; identical to SEQ ID NO: 5550
  oligonucleotide probe

SEQ ID NO: 5757 - DNA, 32 bp, Artificial; identical to SEQ ID NO: 5551
  oligonucleotide probe

SEQ ID NO: 5758 - DNA, 32 bp, Artificial; identical to SEQ ID NO: 5538
  oligonucleotide probe

SEQ ID NO: 5759 - DNA, 32 bp, Artificial; identical to SEQ ID NO: 5539
  oligonucleotide probe

SEQ ID NO: 5760 - DNA, 32 bp, Artificial; identical to SEQ ID NO: 5594
  oligonucleotide probe

SEQ ID NO: 5761 - DNA, 32 bp, Artificial; identical to SEQ ID NO: 5595
  oligonucleotide probe

SEQ ID NO: 5762 - DNA, 32 bp, Artificial; identical to SEQ ID NO: 5536
  oligonucleotide probe

SEQ ID NO: 5763 - DNA, 32 bp, Artificial; identical to SEQ ID NO: 5537
  oligonucleotide probe

SEQ ID NO: 5764 - DNA, 32 bp, Artificial; identical to SEQ ID NO: 5554
  oligonucleotide probe

SEQ ID NO: 5765 - DNA, 32 bp, Artificial; identical to SEQ ID NO: 5555
  oligonucleotide probe

SEQ ID NO: 5766 - DNA, 32 bp, Artificial; identical to SEQ ID NO: 5536
  oligonucleotide probe

SEQ ID NO: 5767 - DNA, 32 bp, Artificial; identical to SEQ ID NO: 5537
  oligonucleotide probe

SEQ ID NO: 5768 - DNA, 32 bp, Artificial; identical to SEQ ID NO: 5540
  oligonucleotide probe

SEQ ID NO: 5769 - DNA, 32 bp, Artificial; identical to SEQ ID NO: 5541
  oligonucleotide probe

SEQ ID NO: 5770 - DNA, 32 bp, Artificial; identical to SEQ ID NO: 5546
  oligonucleotide probe

SEQ ID NO: 5771 - DNA, 32 bp, Artificial; identical to SEQ ID NO: 5547
  oligonucleotide probe

SEQ ID NO: 5772 - DNA, 32 bp, Artificial; identical to SEQ ID NO: 5546
  oligonucleotide probe

SEQ ID NO: 5773 - DNA, 32 bp, Artificial; identical to SEQ ID NO: 5547
  oligonucleotide probe

SEQ ID NO: 5774 - DNA, 32 bp, Artificial; identical to SEQ ID NO: 5538
  oligonucleotide probe

SEQ ID NO: 5775 - DNA, 32 bp, Artificial; identical to SEQ ID NO: 5539
  oligonucleotide probe

SEQ ID NO: 5776 - DNA, 32 bp, Artificial; identical to SEQ ID NO: 5538
  oligonucleotide probe

SEQ ID NO: 5777 - DNA, 32 bp, Artificial; identical to SEQ ID NO: 5539
  oligonucleotide probe

SEQ ID NO: 5778 - DNA, 32 bp, Artificial; identical to SEQ ID NO: 5594
  oligonucleotide probe

SEQ ID NO: 5779 - DNA, 32 bp, Artificial; identical to SEQ ID NO: 5595
  oligonucleotide probe

SEQ ID NO: 5780 - DNA, 32 bp, Artificial; identical to SEQ ID NO: 5540
  oligonucleotide probe

SEQ ID NO: 5781 - DNA, 32 bp, Artificial; identical to SEQ ID NO: 5541
  oligonucleotide probe

SEQ ID NO: 5782 - DNA, 32 bp, Artificial; identical to SEQ ID NO: 5540
  oligonucleotide probe

SEQ ID NO: 5783 - DNA, 32 bp, Artificial; identical to SEQ ID NO: 5541
  oligonucleotide probe

SEQ ID NO: 5784 - DNA, 32 bp, Artificial; identical to SEQ ID NO: 5564
  oligonucleotide probe

SEQ ID NO: 5785 - DNA, 32 bp, Artificial; identical to SEQ ID NO: 5565
  oligonucleotide probe

SEQ ID NO: 5786 - DNA, 32 bp, Artificial; identical to SEQ ID NO: 5536
  oligonucleotide probe

SEQ ID NO: 5787 - DNA, 32 bp, Artificial; identical to SEQ ID NO: 5537
  oligonucleotide probe

SEQ ID NO: 5788 - DNA, 32 bp, Artificial; identical to SEQ ID NO: 5546
  oligonucleotide probe

SEQ ID NO: 5789 - DNA, 32 bp, Artificial; identical to SEQ ID NO: 5547
  oligonucleotide probe

SEQ ID NO: 5790 - DNA, 32 bp, Artificial; identical to SEQ ID NO: 5564
  oligonucleotide probe

SEQ ID NO: 5791 - DNA, 32 bp, Artificial; identical to SEQ ID NO: 5565
  oligonucleotide probe

SEQ ID NO: 5792 - DNA, 32 bp, Artificial; identical to SEQ ID NO: 5564
  oligonucleotide probe

SEQ ID NO: 5793 - DNA, 32 bp, Artificial; identical to SEQ ID NO: 5565
  oligonucleotide probe

SEQ ID NO: 5794 - DNA, 32 bp, Artificial; identical to SEQ ID NO: 5708
  oligonucleotide probe

SEQ ID NO: 5795 - DNA, 32 bp, Artificial; identical to SEQ ID NO: 5709
  oligonucleotide probe

SEQ ID NO: 5796 - DNA, 32 bp, Artificial; identical to SEQ ID NO: 5584
  oligonucleotide probe

SEQ ID NO: 5797 - DNA, 32 bp, Artificial; identical to SEQ ID NO: 5585
  oligonucleotide probe

SEQ ID NO: 5798 - DNA, 32 bp, Artificial; identical to SEQ ID NO: 5554
  oligonucleotide probe

SEQ ID NO: 5799 - DNA, 32 bp, Artificial; identical to SEQ ID NO: 5555
  oligonucleotide probe

SEQ ID NO: 5800 - DNA, 32 bp, Artificial; identical to SEQ ID NO: 5554
  oligonucleotide probe

SEQ ID NO: 5801 - DNA, 32 bp, Artificial; identical to SEQ ID NO: 5555
  oligonucleotide probe

SEQ ID NO: 5802 - DNA, 32 bp, Artificial; identical to SEQ ID NO: 5544
  oligonucleotide probe

SEQ ID NO: 5803 - DNA, 32 bp, Artificial; identical to SEQ ID NO: 5545
  oligonucleotide probe

SEQ ID NO: 5804 - DNA, 32 bp, Artificial; identical to SEQ ID NO: 5546
  oligonucleotide probe

SEQ ID NO: 5805 - DNA, 32 bp, Artificial; identical to SEQ ID NO: 5547
  oligonucleotide probe

SEQ ID NO: 5806 - DNA, 32 bp, Artificial; identical to SEQ ID NO: 5536
  oligonucleotide probe

SEQ ID NO: 5807 - DNA, 32 bp, Artificial; identical to SEQ ID NO: 5537
  oligonucleotide probe

SEQ ID NO: 5808 - DNA, 32 bp, Artificial; identical to SEQ ID NO: 5565
  oligonucleotide probe

SEQ ID NO: 5809 - DNA, 32 bp, Artificial; identical to SEQ ID NO: 5547
  oligonucleotide probe

SEQ ID NO: 5810 - DNA, 32 bp, Artificial; identical to SEQ ID NO: 5544
  oligonucleotide probe

SEQ ID NO: 5811 - DNA, 32 bp, Artificial; identical to SEQ ID NO: 5545
  oligonucleotide probe

SEQ ID NO: 5812 - DNA, 32 bp, Artificial; identical to SEQ ID NO: 5536
  oligonucleotide probe

SEQ ID NO: 5813 - DNA, 32 bp, Artificial; identical to SEQ ID NO: 5537
  oligonucleotide probe

SEQ ID NO: 5814 - DNA, 32 bp, Artificial; identical to SEQ ID NO: 5550
  oligonucleotide probe

SEQ ID NO: 5815 - DNA, 32 bp, Artificial; identical to SEQ ID NO: 5551
  oligonucleotide probe

SEQ ID NO: 5816 - DNA, 32 bp, Artificial; identical to SEQ ID NO: 5544
  oligonucleotide probe

SEQ ID NO: 5817 - DNA, 32 bp, Artificial; identical to SEQ ID NO: 5545
  oligonucleotide probe

SEQ ID NO: 5818 - DNA, 32 bp, Artificial; identical to SEQ ID NO: 5554
  oligonucleotide probe

SEQ ID NO: 5819 - DNA, 32 bp, Artificial; identical to SEQ ID NO: 5555
  oligonucleotide probe

SEQ ID NO: 5820 - DNA, 32 bp, Artificial; identical to SEQ ID NO: 5540
  oligonucleotide probe

SEQ ID NO: 5821 - DNA, 32 bp, Artificial; identical to SEQ ID NO: 5541
  oligonucleotide probe

SEQ ID NO: 5822 - DNA, 32 bp, Artificial; identical to SEQ ID NO: 5564
  oligonucleotide probe

SEQ ID NO: 5823 - DNA, 32 bp, Artificial; identical to SEQ ID NO: 5565
  oligonucleotide probe

SEQ ID NO: 5824 - DNA, 32 bp, Artificial; identical to SEQ ID NO: 5546
  oligonucleotide probe

SEQ ID NO: 5825 - DNA, 32 bp, Artificial; identical to SEQ ID NO: 5547
  oligonucleotide probe

SEQ ID NO: 5826 - DNA, 32 bp, Artificial; identical to SEQ ID NO: 5554
  oligonucleotide probe

SEQ ID NO: 5827 - DNA, 32 bp, Artificial; identical to SEQ ID NO: 5555
  oligonucleotide probe

SEQ ID NO: 5828 - DNA, 32 bp, Artificial; identical to SEQ ID NO: 5584
  oligonucleotide probe

SEQ ID NO: 5829 - DNA, 32 bp, Artificial; identical to SEQ ID NO: 5585
  oligonucleotide probe

SEQ ID NO: 5830 - DNA, 32 bp, Artificial; identical to SEQ ID NO: 5546
  oligonucleotide probe

SEQ ID NO: 5831 - DNA, 32 bp, Artificial; identical to SEQ ID NO: 5547
  oligonucleotide probe

SEQ ID NO: 5832 - DNA, 32 bp, Artificial; identical to SEQ ID NO: 5544
  oligonucleotide probe

SEQ ID NO: 5833 - DNA, 32 bp, Artificial; identical to SEQ ID NO: 5545
  oligonucleotide probe

SEQ ID NO: 5834 - DNA, 32 bp, Artificial; identical to SEQ ID NO: 5565
  oligonucleotide probe

SEQ ID NO: 5835 - DNA, 32 bp, Artificial; identical to SEQ ID NO: 5547
  oligonucleotide probe

SEQ ID NO: 5836 - DNA, 32 bp, Artificial; identical to SEQ ID NO: 5584
  oligonucleotide probe

SEQ ID NO: 5837 - DNA, 32 bp, Artificial; identical to SEQ ID NO: 5585
  oligonucleotide probe

SEQ ID NO: 5838 - DNA, 32 bp, Artificial; identical to SEQ ID NO: 5538
  oligonucleotide probe

SEQ ID NO: 5839 - DNA, 32 bp, Artificial; identical to SEQ ID NO: 5539
  oligonucleotide probe

SEQ ID NO: 5840 - DNA, 32 bp, Artificial; identical to SEQ ID NO: 5544
  oligonucleotide probe

SEQ ID NO: 5841 - DNA, 32 bp, Artificial; identical to SEQ ID NO: 5545
  oligonucleotide probe

SEQ ID NO: 5842 - DNA, 32 bp, Artificial; identical to SEQ ID NO: 5550
  oligonucleotide probe

SEQ ID NO: 5843 - DNA, 32 bp, Artificial; identical to SEQ ID NO: 5551
  oligonucleotide probe

SEQ ID NO: 5844 - DNA, 32 bp, Artificial; identical to SEQ ID NO: 5564
  oligonucleotide probe

SEQ ID NO: 5845 - DNA, 32 bp, Artificial; identical to SEQ ID NO: 5565
  oligonucleotide probe

SEQ ID NO: 5846 - DNA, 32 bp, Artificial; identical to SEQ ID NO: 5536
  oligonucleotide probe

SEQ ID NO: 5847 - DNA, 32 bp, Artificial; identical to SEQ ID NO: 5537
  oligonucleotide probe

SEQ ID NO: 5848 - DNA, 32 bp, Artificial; identical to SEQ ID NO: 5584
  oligonucleotide probe

SEQ ID NO: 5849 - DNA, 32 bp, Artificial; identical to SEQ ID NO: 5585
  oligonucleotide probe

SEQ ID NO: 5850 - DNA, 32 bp, Artificial; identical to SEQ ID NO: 5708
  oligonucleotide probe

SEQ ID NO: 5851 - DNA, 32 bp, Artificial; identical to SEQ ID NO: 5709
  oligonucleotide probe

SEQ ID NO: 5852 - DNA, 32 bp, Artificial; identical to SEQ ID NO: 5554
  oligonucleotide probe

SEQ ID NO: 5853 - DNA, 32 bp, Artificial; identical to SEQ ID NO: 5555
  oligonucleotide probe

SEQ ID NO: 5854 - DNA, 32 bp, Artificial; identical to SEQ ID NO: 5594
  oligonucleotide probe

SEQ ID NO: 5855 - DNA, 32 bp, Artificial; identical to SEQ ID NO: 5595
  oligonucleotide probe

SEQ ID NO: 5856 - DNA, 32 bp, Artificial; identical to SEQ ID NO: 5536
  oligonucleotide probe

SEQ ID NO: 5857 - DNA, 32 bp, Artificial; identical to SEQ ID NO: 5537
  oligonucleotide probe

SEQ ID NO: 5858 - DNA, 32 bp, Artificial; identical to SEQ ID NO: 5541
  oligonucleotide probe

SEQ ID NO: 5859 - DNA, 32 bp, Artificial; identical to SEQ ID NO: 5545
  oligonucleotide probe

SEQ ID NO: 5860 - DNA, 32 bp, Artificial; identical to SEQ ID NO: 5594
  oligonucleotide probe

SEQ ID NO: 5861 - DNA, 32 bp, Artificial; identical to SEQ ID NO: 5595
  oligonucleotide probe

SEQ ID NO: 5862 - DNA, 32 bp, Artificial; identical to SEQ ID NO: 5536
  oligonucleotide probe

SEQ ID NO: 5863 - DNA, 32 bp, Artificial; identical to SEQ ID NO: 5537
  oligonucleotide probe

SEQ ID NO: 5864 - DNA, 32 bp, Artificial; identical to SEQ ID NO: 5546
  oligonucleotide probe

SEQ ID NO: 5865 - DNA, 32 bp, Artificial; identical to SEQ ID NO: 5547
  oligonucleotide probe

SEQ ID NO: 5866 - DNA, 32 bp, Artificial; identical to SEQ ID NO: 5564
  oligonucleotide probe

SEQ ID NO: 5867 - DNA, 32 bp, Artificial; identical to SEQ ID NO: 5565
  oligonucleotide probe

SEQ ID NO: 5868 - DNA, 32 bp, Artificial; identical to SEQ ID NO: 5544
  oligonucleotide probe

SEQ ID NO: 5869 - DNA, 32 bp, Artificial; identical to SEQ ID NO: 5545
  oligonucleotide probe

SEQ ID NO: 5870 - DNA, 32 bp, Artificial; identical to SEQ ID NO: 5584
  oligonucleotide probe

SEQ ID NO: 5871 - DNA, 32 bp, Artificial; identical to SEQ ID NO: 5585
  oligonucleotide probe

SEQ ID NO: 5872 - DNA, 32 bp, Artificial; identical to SEQ ID NO: 5550
  oligonucleotide probe

SEQ ID NO: 5873 - DNA, 32 bp, Artificial; identical to SEQ ID NO: 5551
  oligonucleotide probe

SEQ ID NO: 5874 - DNA, 32 bp, Artificial; identical to SEQ ID NO: 5538
  oligonucleotide probe

SEQ ID NO: 5875 - DNA, 32 bp, Artificial; identical to SEQ ID NO: 5539
  oligonucleotide probe

SEQ ID NO: 5876 - DNA, 32 bp, Artificial; identical to SEQ ID NO: 5546
  oligonucleotide probe

SEQ ID NO: 5877 - DNA, 32 bp, Artificial; identical to SEQ ID NO: 5547
  oligonucleotide probe

SEQ ID NO: 5878 - DNA, 32 bp, Artificial; identical to SEQ ID NO: 5540
  oligonucleotide probe

SEQ ID NO: 5879 - DNA, 32 bp, Artificial; identical to SEQ ID NO: 5541
  oligonucleotide probe

SEQ ID NO: 5880 - DNA, 32 bp, Artificial; identical to SEQ ID NO: 5546
  oligonucleotide probe

SEQ ID NO: 5881 - DNA, 32 bp, Artificial; identical to SEQ ID NO: 5547
  oligonucleotide probe

SEQ ID NO: 5882 - DNA, 32 bp, Artificial; identical to SEQ ID NO: 5546
  oligonucleotide probe

SEQ ID NO: 5883 - DNA, 32 bp, Artificial; identical to SEQ ID NO: 5547
  oligonucleotide probe

SEQ ID NO: 5884 - DNA, 32 bp, Artificial; identical to SEQ ID NO: 5550
  oligonucleotide probe

SEQ ID NO: 5885 - DNA, 32 bp, Artificial; identical to SEQ ID NO: 5551
  oligonucleotide probe

SEQ ID NO: 5886 - DNA, 32 bp, Artificial; identical to SEQ ID NO: 5594
  oligonucleotide probe

SEQ ID NO: 5887 - DNA, 32 bp, Artificial; identical to SEQ ID NO: 5595
  oligonucleotide probe

SEQ ID NO: 5888 - DNA, 32 bp, Artificial; identical to SEQ ID NO: 5538
  oligonucleotide probe

SEQ ID NO: 5889 - DNA, 32 bp, Artificial; identical to SEQ ID NO: 5539
  oligonucleotide probe

SEQ ID NO: 5890 - DNA, 32 bp, Artificial; identical to SEQ ID NO: 5544
  oligonucleotide probe

SEQ ID NO: 5891 - DNA, 32 bp, Artificial; identical to SEQ ID NO: 5545
  oligonucleotide probe

SEQ ID NO: 5892 - DNA, 32 bp, Artificial; identical to SEQ ID NO: 5536
  oligonucleotide probe

SEQ ID NO: 5893 - DNA, 32 bp, Artificial; identical to SEQ ID NO: 5537
  oligonucleotide probe

SEQ ID NO: 5894 - DNA, 32 bp, Artificial; identical to SEQ ID NO: 5564
  oligonucleotide probe

SEQ ID NO: 5895 - DNA, 32 bp, Artificial; identical to SEQ ID NO: 5565
  oligonucleotide probe

SEQ ID NO: 5896 - DNA, 32 bp, Artificial; identical to SEQ ID NO: 5565
  oligonucleotide probe

SEQ ID NO: 5897 - DNA, 32 bp, Artificial; identical to SEQ ID NO: 5547
  oligonucleotide probe

SEQ ID NO: 5898 - DNA, 32 bp, Artificial; identical to SEQ ID NO: 5541
  oligonucleotide probe

SEQ ID NO: 5899 - DNA, 32 bp, Artificial; identical to SEQ ID NO: 5545
  oligonucleotide probe

SEQ ID NO: 5900 - DNA, 32 bp, Artificial; identical to SEQ ID NO: 5538
  oligonucleotide probe

SEQ ID NO: 5901 - DNA, 32 bp, Artificial; identical to SEQ ID NO: 5539
  oligonucleotide probe

SEQ ID NO: 5902 - DNA, 32 bp, Artificial; identical to SEQ ID NO: 5538
  oligonucleotide probe

SEQ ID NO: 5903 - DNA, 32 bp, Artificial; identical to SEQ ID NO: 5539
  oligonucleotide probe

SEQ ID NO: 5904 - DNA, 32 bp, Artificial; identical to SEQ ID NO: 5610
  oligonucleotide probe

SEQ ID NO: 5905 - DNA, 32 bp, Artificial; identical to SEQ ID NO: 5611
  oligonucleotide probe

SEQ ID NO: 5906 - DNA, 32 bp, Artificial; identical to SEQ ID NO: 5540
  oligonucleotide probe

SEQ ID NO: 5907 - DNA, 32 bp, Artificial; identical to SEQ ID NO: 5541
  oligonucleotide probe

SEQ ID NO: 5908 - DNA, 32 bp, Artificial; identical to SEQ ID NO: 5708
  oligonucleotide probe

SEQ ID NO: 5909 - DNA, 32 bp, Artificial; identical to SEQ ID NO: 5709
  oligonucleotide probe

SEQ ID NO: 5910 - DNA, 32 bp, Artificial; identical to SEQ ID NO: 5540
  oligonucleotide probe

SEQ ID NO: 5911 - DNA, 32 bp, Artificial; identical to SEQ ID NO: 5541
  oligonucleotide probe

SEQ ID NO: 5912 - DNA, 32 bp, Artificial; identical to SEQ ID NO: 5541
  oligonucleotide probe

SEQ ID NO: 5913 - DNA, 32 bp, Artificial; identical to SEQ ID NO: 5545
  oligonucleotide probe

SEQ ID NO: 5914 - DNA, 32 bp, Artificial; identical to SEQ ID NO: 5708
  oligonucleotide probe

SEQ ID NO: 5915 - DNA, 32 bp, Artificial; identical to SEQ ID NO: 5709
  oligonucleotide probe

SEQ ID NO: 5916 - DNA, 32 bp, Artificial; identical to SEQ ID NO: 5564
  oligonucleotide probe

SEQ ID NO: 5917 - DNA, 32 bp, Artificial; identical to SEQ ID NO: 5565
  oligonucleotide probe

SEQ ID NO: 5918 - DNA, 32 bp, Artificial; identical to SEQ ID NO: 5544
  oligonucleotide probe

SEQ ID NO: 5919 - DNA, 32 bp, Artificial; identical to SEQ ID NO: 5545
  oligonucleotide probe

SEQ ID NO: 5920 - DNA, 32 bp, Artificial; identical to SEQ ID NO: 5584
  oligonucleotide probe

SEQ ID NO: 5921 - DNA, 32 bp, Artificial; identical to SEQ ID NO: 5585
  oligonucleotide probe

SEQ ID NO: 5922 - DNA, 32 bp, Artificial; identical to SEQ ID NO: 5550
  oligonucleotide probe

SEQ ID NO: 5923 - DNA, 32 bp, Artificial; identical to SEQ ID NO: 5551
  oligonucleotide probe

SEQ ID NO: 5924 - DNA, 32 bp, Artificial; identical to SEQ ID NO: 5546
  oligonucleotide probe

SEQ ID NO: 5925 - DNA, 32 bp, Artificial; identical to SEQ ID NO: 5547
  oligonucleotide probe

SEQ ID NO: 5926 - DNA, 32 bp, Artificial; identical to SEQ ID NO: 5546
  oligonucleotide probe

SEQ ID NO: 5927 - DNA, 32 bp, Artificial; identical to SEQ ID NO: 5547
  oligonucleotide probe

SEQ ID NO: 5928 - DNA, 32 bp, Artificial; identical to SEQ ID NO: 5544
  oligonucleotide probe

SEQ ID NO: 5929 - DNA, 32 bp, Artificial; identical to SEQ ID NO: 5545
  oligonucleotide probe

SEQ ID NO: 5930 - DNA, 32 bp, Artificial; identical to SEQ ID NO: 5536
  oligonucleotide probe

SEQ ID NO: 5931 - DNA, 32 bp, Artificial; identical to SEQ ID NO: 5537
  oligonucleotide probe

SEQ ID NO: 5932 - DNA, 32 bp, Artificial; identical to SEQ ID NO: 5538
  oligonucleotide probe

SEQ ID NO: 5933 - DNA, 32 bp, Artificial; identical to SEQ ID NO: 5539
  oligonucleotide probe

SEQ ID NO: 5934 - DNA, 32 bp, Artificial; identical to SEQ ID NO: 5564
  oligonucleotide probe

SEQ ID NO: 5935 - DNA, 32 bp, Artificial; identical to SEQ ID NO: 5565
  oligonucleotide probe

SEQ ID NO: 5936 - DNA, 32 bp, Artificial; identical to SEQ ID NO: 5538
  oligonucleotide probe

SEQ ID NO: 5937 - DNA, 32 bp, Artificial; identical to SEQ ID NO: 5539
  oligonucleotide probe

SEQ ID NO: 5938 - DNA, 32 bp, Artificial; identical to SEQ ID NO: 5536
  oligonucleotide probe

SEQ ID NO: 5939 - DNA, 32 bp, Artificial; identical to SEQ ID NO: 5537
  oligonucleotide probe

SEQ ID NO: 5940 - DNA, 32 bp, Artificial; identical to SEQ ID NO: 5538
  oligonucleotide probe

SEQ ID NO: 5941 - DNA, 32 bp, Artificial; identical to SEQ ID NO: 5539
  oligonucleotide probe

SEQ ID NO: 5942 - DNA, 32 bp, Artificial; identical to SEQ ID NO: 5544
  oligonucleotide probe

SEQ ID NO: 5943 - DNA, 32 bp, Artificial; identical to SEQ ID NO: 5545
  oligonucleotide probe

SEQ ID NO: 5944 - DNA, 32 bp, Artificial; identical to SEQ ID NO: 5540
  oligonucleotide probe

SEQ ID NO: 5945 - DNA, 32 bp, Artificial; identical to SEQ ID NO: 5541
  oligonucleotide probe

SEQ ID NO: 5946 - DNA, 32 bp, Artificial; identical to SEQ ID NO: 5536
  oligonucleotide probe

SEQ ID NO: 5947 - DNA, 32 bp, Artificial; identical to SEQ ID NO: 5537
  oligonucleotide probe

SEQ ID NO: 5948 - DNA, 32 bp, Artificial; identical to SEQ ID NO: 5540
  oligonucleotide probe

SEQ ID NO: 5949 - DNA, 32 bp, Artificial; identical to SEQ ID NO: 5541
  oligonucleotide probe

SEQ ID NO: 5950 - DNA, 32 bp, Artificial; identical to SEQ ID NO: 5564
  oligonucleotide probe

SEQ ID NO: 5951 - DNA, 32 bp, Artificial; identical to SEQ ID NO: 5565
  oligonucleotide probe

SEQ ID NO: 5952 - DNA, 32 bp, Artificial; identical to SEQ ID NO: 5538
  oligonucleotide probe

SEQ ID NO: 5953 - DNA, 32 bp, Artificial; identical to SEQ ID NO: 5539
  oligonucleotide probe

SEQ ID NO: 5954 - DNA, 32 bp, Artificial; identical to SEQ ID NO: 5544
  oligonucleotide probe

SEQ ID NO: 5955 - DNA, 32 bp, Artificial; identical to SEQ ID NO: 5545
  oligonucleotide probe

SEQ ID NO: 5956 - DNA, 32 bp, Artificial; identical to SEQ ID NO: 5546
  oligonucleotide probe

SEQ ID NO: 5957 - DNA, 32 bp, Artificial; identical to SEQ ID NO: 5547
  oligonucleotide probe

SEQ ID NO: 5958 - DNA, 32 bp, Artificial; identical to SEQ ID NO: 5584
  oligonucleotide probe

SEQ ID NO: 5959 - DNA, 32 bp, Artificial; identical to SEQ ID NO: 5585
  oligonucleotide probe

SEQ ID NO: 5960 - DNA, 32 bp, Artificial; identical to SEQ ID NO: 5546
  oligonucleotide probe

SEQ ID NO: 5961 - DNA, 32 bp, Artificial; identical to SEQ ID NO: 5547
  oligonucleotide probe

SEQ ID NO: 5962 - DNA, 32 bp, Artificial; identical to SEQ ID NO: 5544
  oligonucleotide probe

SEQ ID NO: 5963 - DNA, 32 bp, Artificial; identical to SEQ ID NO: 5545
  oligonucleotide probe

SEQ ID NO: 5964 - DNA, 32 bp, Artificial; identical to SEQ ID NO: 5584
  oligonucleotide probe

SEQ ID NO: 5965 - DNA, 32 bp, Artificial; identical to SEQ ID NO: 5585
  oligonucleotide probe

SEQ ID NO: 5966 - DNA, 32 bp, Artificial; identical to SEQ ID NO: 5564
  oligonucleotide probe

SEQ ID NO: 5967 - DNA, 32 bp, Artificial; identical to SEQ ID NO: 5565
  oligonucleotide probe

SEQ ID NO: 5968 - DNA, 32 bp, Artificial; identical to SEQ ID NO: 5594
  oligonucleotide probe

SEQ ID NO: 5969 - DNA, 32 bp, Artificial; identical to SEQ ID NO: 5595
  oligonucleotide probe

SEQ ID NO: 5970 - DNA, 32 bp, Artificial; identical to SEQ ID NO: 5536
  oligonucleotide probe

SEQ ID NO: 5971 - DNA, 32 bp, Artificial; identical to SEQ ID NO: 5537
  oligonucleotide probe

SEQ ID NO: 5972 - DNA, 32 bp, Artificial; identical to SEQ ID NO: 5564
  oligonucleotide probe

SEQ ID NO: 5973 - DNA, 32 bp, Artificial; identical to SEQ ID NO: 5565
  oligonucleotide probe

SEQ ID NO: 5974 - DNA, 32 bp, Artificial; identical to SEQ ID NO: 5564
  oligonucleotide probe

SEQ ID NO: 5975 - DNA, 32 bp, Artificial; identical to SEQ ID NO: 5565
  oligonucleotide probe

SEQ ID NO: 5976 - DNA, 32 bp, Artificial; identical to SEQ ID NO: 5546
  oligonucleotide probe

SEQ ID NO: 5977 - DNA, 32 bp, Artificial; identical to SEQ ID NO: 5547
  oligonucleotide probe

SEQ ID NO: 5978 - DNA, 32 bp, Artificial; identical to SEQ ID NO: 5708
  oligonucleotide probe

SEQ ID NO: 5979 - DNA, 32 bp, Artificial; identical to SEQ ID NO: 5709
  oligonucleotide probe

SEQ ID NO: 5980 - DNA, 32 bp, Artificial; identical to SEQ ID NO: 5536
  oligonucleotide probe

SEQ ID NO: 5981 - DNA, 32 bp, Artificial; identical to SEQ ID NO: 5537
  oligonucleotide probe

SEQ ID NO: 5982 - DNA, 32 bp, Artificial; identical to SEQ ID NO: 5544
  oligonucleotide probe

SEQ ID NO: 5983 - DNA, 32 bp, Artificial; identical to SEQ ID NO: 5545
  oligonucleotide probe

SEQ ID NO: 5984 - DNA, 32 bp, Artificial; identical to SEQ ID NO: 5536
  oligonucleotide probe

SEQ ID NO: 5985 - DNA, 32 bp, Artificial; identical to SEQ ID NO: 5537
  oligonucleotide probe

SEQ ID NO: 5986 - DNA, 32 bp, Artificial; identical to SEQ ID NO: 5540
  oligonucleotide probe

SEQ ID NO: 5987 - DNA, 32 bp, Artificial; identical to SEQ ID NO: 5541
  oligonucleotide probe

SEQ ID NO: 5988 - DNA, 32 bp, Artificial; identical to SEQ ID NO: 5536
  oligonucleotide probe

SEQ ID NO: 5989 - DNA, 32 bp, Artificial; identical to SEQ ID NO: 5537
  oligonucleotide probe

SEQ ID NO: 5990 - DNA, 32 bp, Artificial; identical to SEQ ID NO: 5538
  oligonucleotide probe

SEQ ID NO: 5991 - DNA, 32 bp, Artificial; identical to SEQ ID NO: 5539
  oligonucleotide probe

SEQ ID NO: 5992 - DNA, 32 bp, Artificial; identical to SEQ ID NO: 5538
  oligonucleotide probe

SEQ ID NO: 5993 - DNA, 32 bp, Artificial; identical to SEQ ID NO: 5539
  oligonucleotide probe

SEQ ID NO: 5994 - DNA, 32 bp, Artificial; identical to SEQ ID NO: 5546
  oligonucleotide probe

SEQ ID NO: 5995 - DNA, 32 bp, Artificial; identical to SEQ ID NO: 5547
  oligonucleotide probe

SEQ ID NO: 5996 - DNA, 32 bp, Artificial; identical to SEQ ID NO: 5546
  oligonucleotide probe

SEQ ID NO: 5997 - DNA, 32 bp, Artificial; identical to SEQ ID NO: 5547
  oligonucleotide probe

SEQ ID NO: 5998 - DNA, 32 bp, Artificial; identical to SEQ ID NO: 5544
  oligonucleotide probe

SEQ ID NO: 5999 - DNA, 32 bp, Artificial; identical to SEQ ID NO: 5545
  oligonucleotide probe

SEQ ID NO: 6000 - DNA, 32 bp, Artificial; identical to SEQ ID NO: 5546
  oligonucleotide probe

SEQ ID NO: 6001 - DNA, 32 bp, Artificial; identical to SEQ ID NO: 5547
  oligonucleotide probe

SEQ ID NO: 6002 - DNA, 32 bp, Artificial; identical to SEQ ID NO: 5536
  oligonucleotide probe

SEQ ID NO: 6003 - DNA, 32 bp, Artificial; identical to SEQ ID NO: 5537
  oligonucleotide probe

SEQ ID NO: 6004 - DNA, 32 bp, Artificial; identical to SEQ ID NO: 5564
  oligonucleotide probe

SEQ ID NO: 6005 - DNA, 32 bp, Artificial; identical to SEQ ID NO: 5565
  oligonucleotide probe

SEQ ID NO: 6006 - DNA, 32 bp, Artificial; identical to SEQ ID NO: 5540
  oligonucleotide probe

SEQ ID NO: 6007 - DNA, 32 bp, Artificial; identical to SEQ ID NO: 5541
  oligonucleotide probe

SEQ ID NO: 6008 - DNA, 32 bp, Artificial; identical to SEQ ID NO: 5544
  oligonucleotide probe

SEQ ID NO: 6009 - DNA, 32 bp, Artificial; identical to SEQ ID NO: 5545
  oligonucleotide probe

SEQ ID NO: 6010 - DNA, 32 bp, Artificial; identical to SEQ ID NO: 5538
  oligonucleotide probe

SEQ ID NO: 6011 - DNA, 32 bp, Artificial; identical to SEQ ID NO: 5539
  oligonucleotide probe

SEQ ID NO: 6012 - DNA, 32 bp, Artificial; identical to SEQ ID NO: 5536
  oligonucleotide probe

SEQ ID NO: 6013 - DNA, 32 bp, Artificial; identical to SEQ ID NO: 5537
  oligonucleotide probe

SEQ ID NO: 6014 - DNA, 32 bp, Artificial; identical to SEQ ID NO: 5584
  oligonucleotide probe

SEQ ID NO: 6015 - DNA, 32 bp, Artificial; identical to SEQ ID NO: 5585
  oligonucleotide probe

SEQ ID NO: 6016 - DNA, 32 bp, Artificial; identical to SEQ ID NO: 5546
  oligonucleotide probe

SEQ ID NO: 6017 - DNA, 32 bp, Artificial; identical to SEQ ID NO: 5547
  oligonucleotide probe

SEQ ID NO: 6018 - DNA, 32 bp, Artificial; identical to SEQ ID NO: 5546
  oligonucleotide probe

SEQ ID NO: 6019 - DNA, 32 bp, Artificial; identical to SEQ ID NO: 5547
  oligonucleotide probe

SEQ ID NO: 6020 - DNA, 32 bp, Artificial; identical to SEQ ID NO: 5536
  oligonucleotide probe

SEQ ID NO: 6021 - DNA, 32 bp, Artificial; identical to SEQ ID NO: 5537
  oligonucleotide probe

SEQ ID NO: 6022 - DNA, 32 bp, Artificial; identical to SEQ ID NO: 5554
  oligonucleotide probe

SEQ ID NO: 6023 - DNA, 32 bp, Artificial; identical to SEQ ID NO: 5555
  oligonucleotide probe

SEQ ID NO: 6024 - DNA, 32 bp, Artificial; identical to SEQ ID NO: 5594
  oligonucleotide probe

SEQ ID NO: 6025 - DNA, 32 bp, Artificial; identical to SEQ ID NO: 5595
  oligonucleotide probe

SEQ ID NO: 6026 - DNA, 32 bp, Artificial; identical to SEQ ID NO: 5564
  oligonucleotide probe

SEQ ID NO: 6027 - DNA, 32 bp, Artificial; identical to SEQ ID NO: 5565
  oligonucleotide probe

SEQ ID NO: 6028 - DNA, 32 bp, Artificial; identical to SEQ ID NO: 5536
  oligonucleotide probe

SEQ ID NO: 6029 - DNA, 32 bp, Artificial; identical to SEQ ID NO: 5537
  oligonucleotide probe

SEQ ID NO: 6030 - DNA, 32 bp, Artificial; identical to SEQ ID NO: 5546
  oligonucleotide probe

SEQ ID NO: 6031 - DNA, 32 bp, Artificial; identical to SEQ ID NO: 5547
  oligonucleotide probe

SEQ ID NO: 6032 - DNA, 32 bp, Artificial; identical to SEQ ID NO: 5554
  oligonucleotide probe

SEQ ID NO: 6033 - DNA, 32 bp, Artificial; identical to SEQ ID NO: 5555
  oligonucleotide probe

SEQ ID NO: 6034 - DNA, 32 bp, Artificial; identical to SEQ ID NO: 5540
  oligonucleotide probe

SEQ ID NO: 6035 - DNA, 32 bp, Artificial; identical to SEQ ID NO: 5541
  oligonucleotide probe

SEQ ID NO: 6036 - DNA, 32 bp, Artificial; identical to SEQ ID NO: 5544
  oligonucleotide probe

SEQ ID NO: 6037 - DNA, 32 bp, Artificial; identical to SEQ ID NO: 5545
  oligonucleotide probe

SEQ ID NO: 6038 - DNA, 32 bp, Artificial; identical to SEQ ID NO: 5536
  oligonucleotide probe

SEQ ID NO: 6039 - DNA, 32 bp, Artificial; identical to SEQ ID NO: 5537
  oligonucleotide probe

SEQ ID NO: 6040 - DNA, 32 bp, Artificial; identical to SEQ ID NO: 5536
  oligonucleotide probe

SEQ ID NO: 6041 - DNA, 32 bp, Artificial; identical to SEQ ID NO: 5537
  oligonucleotide probe

SEQ ID NO: 6042 - DNA, 32 bp, Artificial; identical to SEQ ID NO: 5584
  oligonucleotide probe

SEQ ID NO: 6043 - DNA, 32 bp, Artificial; identical to SEQ ID NO: 5585
  oligonucleotide probe

SEQ ID NO: 6044 - DNA, 32 bp, Artificial; identical to SEQ ID NO: 5538
  oligonucleotide probe

SEQ ID NO: 6045 - DNA, 32 bp, Artificial; identical to SEQ ID NO: 5539
  oligonucleotide probe

SEQ ID NO: 6046 - DNA, 32 bp, Artificial; identical to SEQ ID NO: 5546
  oligonucleotide probe

SEQ ID NO: 6047 - DNA, 32 bp, Artificial; identical to SEQ ID NO: 5547
  oligonucleotide probe

SEQ ID NO: 6048 - DNA, 32 bp, Artificial; identical to SEQ ID NO: 5544
  oligonucleotide probe

SEQ ID NO: 6049 - DNA, 32 bp, Artificial; identical to SEQ ID NO: 5545
  oligonucleotide probe

SEQ ID NO: 6050 - DNA, 32 bp, Artificial; identical to SEQ ID NO: 5536
  oligonucleotide probe

SEQ ID NO: 6051 - DNA, 32 bp, Artificial; identical to SEQ ID NO: 5537
  oligonucleotide probe

SEQ ID NO: 6052 - DNA, 32 bp, Artificial; identical to SEQ ID NO: 5554
  oligonucleotide probe

SEQ ID NO: 6053 - DNA, 32 bp, Artificial; identical to SEQ ID NO: 5555
  oligonucleotide probe

SEQ ID NO: 6054 - DNA, 32 bp, Artificial; identical to SEQ ID NO: 5584
  oligonucleotide probe

SEQ ID NO: 6055 - DNA, 32 bp, Artificial; identical to SEQ ID NO: 5585
  oligonucleotide probe

SEQ ID NO: 6056 - DNA, 32 bp, Artificial; identical to SEQ ID NO: 5610
  oligonucleotide probe

SEQ ID NO: 6057 - DNA, 32 bp, Artificial; identical to SEQ ID NO: 5611
  oligonucleotide probe

SEQ ID NO: 6058 - DNA, 32 bp, Artificial; identical to SEQ ID NO: 5594
  oligonucleotide probe

SEQ ID NO: 6059 - DNA, 32 bp, Artificial; identical to SEQ ID NO: 5595
  oligonucleotide probe

SEQ ID NO: 6060 - DNA, 32 bp, Artificial; identical to SEQ ID NO: 5550
  oligonucleotide probe

SEQ ID NO: 6061 - DNA, 32 bp, Artificial; identical to SEQ ID NO: 5551
  oligonucleotide probe

SEQ ID NO: 6062 - DNA, 32 bp, Artificial; identical to SEQ ID NO: 5536
  oligonucleotide probe

SEQ ID NO: 6063 - DNA, 32 bp, Artificial; identical to SEQ ID NO: 5537
  oligonucleotide probe

SEQ ID NO: 6064 - DNA, 32 bp, Artificial; identical to SEQ ID NO: 5541
  oligonucleotide probe

SEQ ID NO: 6065 - DNA, 32 bp, Artificial; identical to SEQ ID NO: 5545
  oligonucleotide probe

SEQ ID NO: 6066 - DNA, 32 bp, Artificial; identical to SEQ ID NO: 5538
  oligonucleotide probe

SEQ ID NO: 6067 - DNA, 32 bp, Artificial; identical to SEQ ID NO: 5539
  oligonucleotide probe

SEQ ID NO: 6068 - DNA, 32 bp, Artificial; identical to SEQ ID NO: 5536
  oligonucleotide probe

SEQ ID NO: 6069 - DNA, 32 bp, Artificial; identical to SEQ ID NO: 5537
  oligonucleotide probe

SEQ ID NO: 6070 - DNA, 32 bp, Artificial
  oligonucleotide probe
aagccgtgcgcaacgagcacgggaaagcggct

SEQ ID NO: 6071 - DNA, 32 bp, Artificial; identical to SEQ ID NO: 5611
  oligonucleotide probe

SEQ ID NO: 6072 - DNA, 32 bp, Artificial; identical to SEQ ID NO: 5709
  oligonucleotide probe

SEQ ID NO: 6073 - DNA, 32 bp, Artificial; identical to SEQ ID NO: 5555
  oligonucleotide probe

SEQ ID NO: 6074 - DNA, 32 bp, Artificial
  oligonucleotide probe
gcaccgcagctgcgtgcgcattgcggctttcg

SEQ ID NO: 6075 - DNA, 32 bp, Artificial; identical to SEQ ID NO: 5555
  oligonucleotide probe

SEQ ID NO: 6076 - DNA, 32 bp, Artificial; identical to SEQ ID NO: 5539
  oligonucleotide probe

SEQ ID NO: 6077 - DNA, 32 bp, Artificial; identical to SEQ ID NO: 5565
  oligonucleotide probe

SEQ ID NO: 6078 - DNA, 32 bp, Artificial; identical to SEQ ID NO: 5585
  oligonucleotide probe

SEQ ID NO: 6079 - DNA, 32 bp, Artificial; identical to SEQ ID NO: 5539
  oligonucleotide probe

SEQ ID NO: 6080 - DNA, 32 bp, Artificial; identical to SEQ ID NO: 5611
  oligonucleotide probe

SEQ ID NO: 6081 - DNA, 32 bp, Artificial; identical to SEQ ID NO: 5595
  oligonucleotide probe

SEQ ID NO: 6082 - DNA, 32 bp, Artificial; identical to SEQ ID NO: 5555
  oligonucleotide probe

SEQ ID NO: 6083 - DNA, 32 bp, Artificial; identical to SEQ ID NO: 5551
  oligonucleotide probe

SEQ ID NO: 6084 - DNA, 32 bp, Artificial; identical to SEQ ID NO: 5585
  oligonucleotide probe

SEQ ID NO: 6085 - DNA, 32 bp, Artificial; identical to SEQ ID NO: 5539
  oligonucleotide probe

SEQ ID NO: 6086 - DNA, 32 bp, Artificial; identical to SEQ ID NO: 5595
  oligonucleotide probe

SEQ ID NO: 6087 - DNA, 32 bp, Artificial; identical to SEQ ID NO: 5585
  oligonucleotide probe

SEQ ID NO: 6088 - DNA, 32 bp, Artificial; identical to SEQ ID NO: 5595
  oligonucleotide probe

SEQ ID NO: 6089 - DNA, 32 bp, Artificial; identical to SEQ ID NO: 5585
  oligonucleotide probe

SEQ ID NO: 6090 - DNA, 32 bp, Artificial; identical to SEQ ID NO: 5611
  oligonucleotide probe

SEQ ID NO: 6091 - DNA, 32 bp, Artificial; identical to SEQ ID NO: 5585
  oligonucleotide probe

SEQ ID NO: 6092 - DNA, 32 bp, Artificial; identical to SEQ ID NO: 5547
  oligonucleotide probe

SEQ ID NO: 6093 - DNA, 32 bp, Artificial; identical to SEQ ID NO: 5545
  oligonucleotide probe

SEQ ID NO: 6094 - DNA, 32 bp, Artificial; identical to SEQ ID NO: 5537
  oligonucleotide probe

SEQ ID NO: 6095 - DNA, 32 bp, Artificial; identical to SEQ ID NO: 5554
  oligonucleotide probe

SEQ ID NO: 6096 - DNA, 32 bp, Artificial; identical to SEQ ID NO: 5550
  oligonucleotide probe

SEQ ID NO: 6097 - DNA, 32 bp, Artificial; identical to SEQ ID NO: 5565
  oligonucleotide probe

SEQ ID NO: 6098 - DNA, 32 bp, Artificial; identical to SEQ ID NO: 5547
  oligonucleotide probe

SEQ ID NO: 6099 - DNA, 32 bp, Artificial; identical to SEQ ID NO: 5610
  oligonucleotide probe

SEQ ID NO: 6100 - DNA, 32 bp, Artificial; identical to SEQ ID NO: 5611
  oligonucleotide probe

SEQ ID NO: 6101 - DNA, 32 bp, Artificial; identical to SEQ ID NO: 5239
  oligonucleotide probe

SEQ ID NO: 6102 - DNA, 32 bp, Artificial; identical to SEQ ID NO: 5231
  oligonucleotide probe

SEQ ID NO: 6103 - DNA, 32 bp, Artificial; identical to SEQ ID NO: 5595
  oligonucleotide probe

SEQ ID NO: 6104 - DNA, 32 bp, Artificial; identical to SEQ ID NO: 5585
  oligonucleotide probe

SEQ ID NO: 6105 - DNA, 32 bp, Artificial; identical to SEQ ID NO: 5554
  oligonucleotide probe

SEQ ID NO: 6106 - DNA, 32 bp, Artificial; identical to SEQ ID NO: 5555
  oligonucleotide probe

SEQ ID NO: 6107 - DNA, 32 bp, Artificial; identical to SEQ ID NO: 5585
  oligonucleotide probe

SEQ ID NO: 6108 - DNA, 32 bp, Artificial; identical to SEQ ID NO: 5161
  oligonucleotide probe

SEQ ID NO: 6109 - DNA, 32 bp, Artificial; identical to SEQ ID NO: 5540
  oligonucleotide probe

SEQ ID NO: 6110 - DNA, 32 bp, Artificial; identical to SEQ ID NO: 5544
  oligonucleotide probe

SEQ ID NO: 6111 - DNA, 32 bp, Artificial; identical to SEQ ID NO: 5538
  oligonucleotide probe

SEQ ID NO: 6112 - DNA, 32 bp, Artificial; identical to SEQ ID NO: 5539
  oligonucleotide probe

SEQ ID NO: 6113 - DNA, 32 bp, Artificial; identical to SEQ ID NO: 5541
  oligonucleotide probe

SEQ ID NO: 6114 - DNA, 32 bp, Artificial; identical to SEQ ID NO: 5416
  oligonucleotide probe

SEQ ID NO: 6115 - DNA, 32 bp, Artificial; identical to SEQ ID NO: 5224
  oligonucleotide probe

SEQ ID NO: 6116 - DNA, 32 bp, Artificial; identical to SEQ ID NO: 5220
  oligonucleotide probe

SEQ ID NO: 6117 - DNA, 32 bp, Artificial; identical to SEQ ID NO: 5611
  oligonucleotide probe

SEQ ID NO: 6118 - DNA, 32 bp, Artificial; identical to SEQ ID NO: 5195
  oligonucleotide probe

SEQ ID NO: 6119 - DNA, 32 bp, Artificial; identical to SEQ ID NO: 5222
  oligonucleotide probe

SEQ ID NO: 6120 - DNA, 32 bp, Artificial; identical to SEQ ID NO: 5219
  oligonucleotide probe

SEQ ID NO: 6121 - DNA, 32 bp, Artificial; identical to SEQ ID NO: 5545
  oligonucleotide probe

SEQ ID NO: 6122 - DNA, 32 bp, Artificial; identical to SEQ ID NO: 5536
  oligonucleotide probe

SEQ ID NO: 6123 - DNA, 32 bp, Artificial; identical to SEQ ID NO: 5539
  oligonucleotide probe

SEQ ID NO: 6124 - DNA, 32 bp, Artificial; identical to SEQ ID NO: 5565
  oligonucleotide probe

SEQ ID NO: 6125 - DNA, 32 bp, Artificial; identical to SEQ ID NO: 5410
  oligonucleotide probe

SEQ ID NO: 6126 - DNA, 32 bp, Artificial; identical to SEQ ID NO: 5241
  oligonucleotide probe

SEQ ID NO: 6127 - DNA, 32 bp, Artificial; identical to SEQ ID NO: 5231
  oligonucleotide probe

SEQ ID NO: 6128 - DNA, 32 bp, Artificial; identical to SEQ ID NO: 5217
  oligonucleotide probe

SEQ ID NO: 6129 - DNA, 32 bp, Artificial; identical to SEQ ID NO: 5564
  oligonucleotide probe

SEQ ID NO: 6130 - DNA, 32 bp, Artificial; identical to SEQ ID NO: 5546
  oligonucleotide probe

SEQ ID NO: 6131 - DNA, 32 bp, Artificial
  oligonucleotide probe
gggattcgcgcaaacgcgcattgcggctttcg

SEQ ID NO: 6132 - DNA, 32 bp, Artificial; identical to SEQ ID NO: 6074
  oligonucleotide probe

SEQ ID NO: 6133 - DNA, 32 bp, Artificial; identical to SEQ ID NO: 5564
  oligonucleotide probe

SEQ ID NO: 6134 - DNA, 32 bp, Artificial; identical to SEQ ID NO: 5546
  oligonucleotide probe

SEQ ID NO: 6135 - DNA, 32 bp, Artificial; identical to SEQ ID NO: 5594
  oligonucleotide probe

SEQ ID NO: 6136 - DNA, 32 bp, Artificial; identical to SEQ ID NO: 5595
  oligonucleotide probe

SEQ ID NO: 6137 - DNA, 32 bp, Artificial; identical to SEQ ID NO: 5708
  oligonucleotide probe

SEQ ID NO: 6138 - DNA, 32 bp, Artificial; identical to SEQ ID NO: 5709
  oligonucleotide probe

SEQ ID NO: 6139 - DNA, 32 bp, Artificial; identical to SEQ ID NO: 5141
  oligonucleotide probe

SEQ ID NO: 6140 - DNA, 32 bp, Artificial; identical to SEQ ID NO: 5133
  oligonucleotide probe

SEQ ID NO: 6141 - DNA, 32 bp, Artificial; identical to SEQ ID NO: 5564
  oligonucleotide probe

SEQ ID NO: 6142 - DNA, 32 bp, Artificial; identical to SEQ ID NO: 5546
  oligonucleotide probe

SEQ ID NO: 6143 - DNA, 32 bp, Artificial; identical to SEQ ID NO: 5584
  oligonucleotide probe

SEQ ID NO: 6144 - DNA, 32 bp, Artificial; identical to SEQ ID NO: 5538
  oligonucleotide probe

SEQ ID NO: 6145 - DNA, 32 bp, Artificial
  oligonucleotide probe
aagccgtgcgcaacgattgcatggcgtgggga

SEQ ID NO: 6146 - DNA, 32 bp, Artificial; identical to SEQ ID NO: 6070
  oligonucleotide probe

SEQ ID NO: 6147 - DNA, 32 bp, Artificial; identical to SEQ ID NO: 5551
  oligonucleotide probe

SEQ ID NO: 6148 - DNA, 32 bp, Artificial; identical to SEQ ID NO: 5160
  oligonucleotide probe

SEQ ID NO: 6149 - DNA, 32 bp, Artificial; identical to SEQ ID NO: 5538
  oligonucleotide probe

SEQ ID NO: 6150 - DNA, 32 bp, Artificial; identical to SEQ ID NO: 5564
  oligonucleotide probe

SEQ ID NO: 6151 - DNA, 32 bp, Artificial; identical to SEQ ID NO: 5240
  oligonucleotide probe

SEQ ID NO: 6152 - DNA, 32 bp, Artificial; identical to SEQ ID NO: 5232
  oligonucleotide probe

SEQ ID NO: 6153 - DNA, 32 bp, Artificial; identical to SEQ ID NO: 5547
  oligonucleotide probe

SEQ ID NO: 6154 - DNA, 32 bp, Artificial; identical to SEQ ID NO: 5537
  oligonucleotide probe

SEQ ID NO: 6155 - DNA, 32 bp, Artificial; identical to SEQ ID NO: 5551
  oligonucleotide probe

SEQ ID NO: 6156 - DNA, 32 bp, Artificial; identical to SEQ ID NO: 5541
  oligonucleotide probe

SEQ ID NO: 6157 - DNA, 32 bp, Artificial; identical to SEQ ID NO: 6074
  oligonucleotide probe

SEQ ID NO: 6158 - DNA, 32 bp, Artificial; identical to SEQ ID NO: 5709
  oligonucleotide probe

SEQ ID NO: 6159 - DNA, 32 bp, Artificial; identical to SEQ ID NO: 5584
  oligonucleotide probe

SEQ ID NO: 6160 - DNA, 32 bp, Artificial; identical to SEQ ID NO: 5585
  oligonucleotide probe

SEQ ID NO: 6161 - DNA, 32 bp, Artificial; identical to SEQ ID NO: 5229
  oligonucleotide probe

SEQ ID NO: 6162 - DNA, 32 bp, Artificial; identical to SEQ ID NO: 5253
  oligonucleotide probe

SEQ ID NO: 6163 - DNA, 32 bp, Artificial; identical to SEQ ID NO: 5218
  oligonucleotide probe

SEQ ID NO: 6164 - DNA, 32 bp, Artificial; identical to SEQ ID NO: 5224
  oligonucleotide probe

SEQ ID NO: 6165 - DNA, 32 bp, Artificial; identical to SEQ ID NO: 6145
  oligonucleotide probe

SEQ ID NO: 6166 - DNA, 32 bp, Artificial; identical to SEQ ID NO: 6070
  oligonucleotide probe

SEQ ID NO: 6167 - DNA, 32 bp, Artificial; identical to SEQ ID NO: 5138
  oligonucleotide probe

SEQ ID NO: 6168 - DNA, 32 bp, Artificial; identical to SEQ ID NO: 5135
  oligonucleotide probe

SEQ ID NO: 6169 - DNA, 32 bp, Artificial; identical to SEQ ID NO: 5185
  oligonucleotide probe

SEQ ID NO: 6170 - DNA, 32 bp, Artificial; identical to SEQ ID NO: 5163
  oligonucleotide probe

SEQ ID NO: 6171 - DNA, 32 bp, Artificial; identical to SEQ ID NO: 5545
  oligonucleotide probe

SEQ ID NO: 6172 - DNA, 32 bp, Artificial; identical to SEQ ID NO: 5399
  oligonucleotide probe

SEQ ID NO: 6173 - DNA, 32 bp, Artificial; identical to SEQ ID NO: 5610
  oligonucleotide probe

SEQ ID NO: 6174 - DNA, 32 bp, Artificial; identical to SEQ ID NO: 5611
  oligonucleotide probe

SEQ ID NO: 6175 - DNA, 32 bp, Artificial; identical to SEQ ID NO: 5541
  oligonucleotide probe

SEQ ID NO: 6176 - DNA, 32 bp, Artificial; identical to SEQ ID NO: 5545
  oligonucleotide probe

SEQ ID NO: 6177 - DNA, 32 bp, Artificial; identical to SEQ ID NO: 5594
  oligonucleotide probe

SEQ ID NO: 6178 - DNA, 32 bp, Artificial; identical to SEQ ID NO: 5595
  oligonucleotide probe

SEQ ID NO: 6179 - DNA, 32 bp, Artificial; identical to SEQ ID NO: 6145
  oligonucleotide probe

SEQ ID NO: 6180 - DNA, 32 bp, Artificial; identical to SEQ ID NO: 6070
  oligonucleotide probe

SEQ ID NO: 6181 - DNA, 32 bp, Artificial; identical to SEQ ID NO: 5538
  oligonucleotide probe

SEQ ID NO: 6182 - DNA, 32 bp, Artificial; identical to SEQ ID NO: 5564
  oligonucleotide probe

SEQ ID NO: 6183 - DNA, 32 bp, Artificial; identical to SEQ ID NO: 5177
  oligonucleotide probe

SEQ ID NO: 6184 - DNA, 32 bp, Artificial; identical to SEQ ID NO: 5137
  oligonucleotide probe

SEQ ID NO: 6185 - DNA, 32 bp, Artificial; identical to SEQ ID NO: 5550
  oligonucleotide probe

SEQ ID NO: 6186 - DNA, 32 bp, Artificial; identical to SEQ ID NO: 5551
  oligonucleotide probe

SEQ ID NO: 6187 - DNA, 32 bp, Artificial; identical to SEQ ID NO: 5708
  oligonucleotide probe

SEQ ID NO: 6188 - DNA, 32 bp, Artificial; identical to SEQ ID NO: 5709
  oligonucleotide probe

SEQ ID NO: 6189 - DNA, 32 bp, Artificial; identical to SEQ ID NO: 5585
  oligonucleotide probe

SEQ ID NO: 6190 - DNA, 32 bp, Artificial; identical to SEQ ID NO: 5539
  oligonucleotide probe

SEQ ID NO: 6191 - DNA, 32 bp, Artificial; identical to SEQ ID NO: 5547
  oligonucleotide probe

SEQ ID NO: 6192 - DNA, 32 bp, Artificial; identical to SEQ ID NO: 5537
  oligonucleotide probe

SEQ ID NO: 6193 - DNA, 32 bp, Artificial; identical to SEQ ID NO: 6131
  oligonucleotide probe

SEQ ID NO: 6194 - DNA, 32 bp, Artificial; identical to SEQ ID NO: 6074
  oligonucleotide probe

SEQ ID NO: 6195 - DNA, 32 bp, Artificial; identical to SEQ ID NO: 5554
  oligonucleotide probe

SEQ ID NO: 6196 - DNA, 32 bp, Artificial; identical to SEQ ID NO: 5555
  oligonucleotide probe

SEQ ID NO: 6197 - DNA, 32 bp, Artificial; identical to SEQ ID NO: 5547
  oligonucleotide probe

SEQ ID NO: 6198 - DNA, 32 bp, Artificial; identical to SEQ ID NO: 6131
  oligonucleotide probe

SEQ ID NO: 6199 - DNA, 32 bp, Artificial; identical to SEQ ID NO: 5565
  oligonucleotide probe

SEQ ID NO: 6200 - DNA, 32 bp, Artificial; identical to SEQ ID NO: 5547
  oligonucleotide probe

SEQ ID NO: 6201 - DNA, 32 bp, Artificial; identical to SEQ ID NO: 5541
  oligonucleotide probe

SEQ ID NO: 6202 - DNA, 32 bp, Artificial; identical to SEQ ID NO: 5545
  oligonucleotide probe

SEQ ID NO: 6203 - DNA, 32 bp, Artificial; identical to SEQ ID NO: 6131
  oligonucleotide probe

SEQ ID NO: 6204 - DNA, 32 bp, Artificial; identical to SEQ ID NO: 5708
  oligonucleotide probe

SEQ ID NO: 6205 - DNA, 32 bp, Artificial; identical to SEQ ID NO: 5565
  oligonucleotide probe

SEQ ID NO: 6206 - DNA, 32 bp, Artificial; identical to SEQ ID NO: 5547
  oligonucleotide probe

SEQ ID NO: 6207 - DNA, 32 bp, Artificial; identical to SEQ ID NO: 5540
  oligonucleotide probe

SEQ ID NO: 6208 - DNA, 32 bp, Artificial; identical to SEQ ID NO: 5544
  oligonucleotide probe

SEQ ID NO: 6209 - DNA, 32 bp, Artificial; identical to SEQ ID NO: 5708
  oligonucleotide probe

SEQ ID NO: 6210 - DNA, 32 bp, Artificial; identical to SEQ ID NO: 5554
  oligonucleotide probe

SEQ ID NO: 6211 - DNA, 32 bp, Artificial; identical to SEQ ID NO: 5565
  oligonucleotide probe

SEQ ID NO: 6212 - DNA, 32 bp, Artificial; identical to SEQ ID NO: 5411
  oligonucleotide probe

SEQ ID NO: 6213 - DNA, 32 bp, Artificial; identical to SEQ ID NO: 6074
  oligonucleotide probe

SEQ ID NO: 6214 - DNA, 32 bp, Artificial; identical to SEQ ID NO: 5171
  oligonucleotide probe

SEQ ID NO: 6215 - DNA, 32 bp, Artificial; identical to SEQ ID NO: 5708
  oligonucleotide probe

SEQ ID NO: 6216 - DNA, 32 bp, Artificial; identical to SEQ ID NO: 5554
  oligonucleotide probe

SEQ ID NO: 6217 - DNA, 32 bp, Artificial; identical to SEQ ID NO: 5595
  oligonucleotide probe

SEQ ID NO: 6218 - DNA, 32 bp, Artificial; identical to SEQ ID NO: 5177
  oligonucleotide probe

SEQ ID NO: 6219 - DNA, 32 bp, Artificial; identical to SEQ ID NO: 6131
  oligonucleotide probe

SEQ ID NO: 6220 - DNA, 32 bp, Artificial; identical to SEQ ID NO: 6074
  oligonucleotide probe

SEQ ID NO: 6221 - DNA, 32 bp, Artificial; identical to SEQ ID NO: 5159
  oligonucleotide probe

SEQ ID NO: 6222 - DNA, 32 bp, Artificial; identical to SEQ ID NO: 5141
  oligonucleotide probe

SEQ ID NO: 6223 - DNA, 32 bp, Artificial; identical to SEQ ID NO: 6145
  oligonucleotide probe

SEQ ID NO: 6224 - DNA, 32 bp, Artificial; identical to SEQ ID NO: 6070
  oligonucleotide probe

SEQ ID NO: 6225 - DNA, 32 bp, Artificial; identical to SEQ ID NO: 5134
  oligonucleotide probe

SEQ ID NO: 6226 - DNA, 32 bp, Artificial; identical to SEQ ID NO: 5136
  oligonucleotide probe

SEQ ID NO: 6227 - DNA, 32 bp, Artificial; identical to SEQ ID NO: 5538
  oligonucleotide probe

SEQ ID NO: 6228 - DNA, 32 bp, Artificial; identical to SEQ ID NO: 5564
  oligonucleotide probe

SEQ ID NO: 6229 - DNA, 32 bp, Artificial; identical to SEQ ID NO: 5709
  oligonucleotide probe

SEQ ID NO: 6230 - DNA, 32 bp, Artificial; identical to SEQ ID NO: 5185
  oligonucleotide probe

SEQ ID NO: 6231 - DNA, 32 bp, Artificial; identical to SEQ ID NO: 5584
  oligonucleotide probe

SEQ ID NO: 6232 - DNA, 32 bp, Artificial; identical to SEQ ID NO: 5538
  oligonucleotide probe

SEQ ID NO: 6233 - DNA, 32 bp, Artificial; identical to SEQ ID NO: 5611
  oligonucleotide probe

SEQ ID NO: 6234 - DNA, 32 bp, Artificial; identical to SEQ ID NO: 5595
  oligonucleotide probe

SEQ ID NO: 6235 - DNA, 32 bp, Artificial; identical to SEQ ID NO: 5547
  oligonucleotide probe

SEQ ID NO: 6236 - DNA, 32 bp, Artificial; identical to SEQ ID NO: 5537
  oligonucleotide probe

SEQ ID NO: 6237 - DNA, 32 bp, Artificial; identical to SEQ ID NO: 5538
  oligonucleotide probe

SEQ ID NO: 6238 - DNA, 32 bp, Artificial; identical to SEQ ID NO: 5539
  oligonucleotide probe

SEQ ID NO: 6239 - DNA, 32 bp, Artificial; identical to SEQ ID NO: 5541
  oligonucleotide probe

SEQ ID NO: 6240 - DNA, 32 bp, Artificial; identical to SEQ ID NO: 5545
  oligonucleotide probe

SEQ ID NO: 6241 - DNA, 32 bp, Artificial; identical to SEQ ID NO: 5610
  oligonucleotide probe

SEQ ID NO: 6242 - DNA, 32 bp, Artificial; identical to SEQ ID NO: 5611
  oligonucleotide probe

SEQ ID NO: 6243 - DNA, 32 bp, Artificial; identical to SEQ ID NO: 5555
  oligonucleotide probe

SEQ ID NO: 6244 - DNA, 32 bp, Artificial; identical to SEQ ID NO: 5159
  oligonucleotide probe

SEQ ID NO: 6245 - DNA, 32 bp, Artificial; identical to SEQ ID NO: 5585
  oligonucleotide probe

SEQ ID NO: 6246 - DNA, 32 bp, Artificial; identical to SEQ ID NO: 5539
  oligonucleotide probe

SEQ ID NO: 6247 - DNA, 32 bp, Artificial; identical to SEQ ID NO: 5550
  oligonucleotide probe

SEQ ID NO: 6248 - DNA, 32 bp, Artificial; identical to SEQ ID NO: 5540
  oligonucleotide probe

SEQ ID NO: 6249 - DNA, 32 bp, Artificial; identical to SEQ ID NO: 5416
  oligonucleotide probe

SEQ ID NO: 6250 - DNA, 32 bp, Artificial; identical to SEQ ID NO: 5239
  oligonucleotide probe

SEQ ID NO: 6251 - DNA, 32 bp, Artificial; identical to SEQ ID NO: 5539
  oligonucleotide probe

SEQ ID NO: 6252 - DNA, 32 bp, Artificial; identical to SEQ ID NO: 5410
  oligonucleotide probe

SEQ ID NO: 6253 - DNA, 32 bp, Artificial; identical to SEQ ID NO: 5584
  oligonucleotide probe

SEQ ID NO: 6254 - DNA, 32 bp, Artificial; identical to SEQ ID NO: 5585
  oligonucleotide probe

SEQ ID NO: 6255 - DNA, 32 bp, Artificial; identical to SEQ ID NO: 5594
  oligonucleotide probe

SEQ ID NO: 6256 - DNA, 32 bp, Artificial; identical to SEQ ID NO: 5595
  oligonucleotide probe

SEQ ID NO: 6257 - DNA, 32 bp, Artificial; identical to SEQ ID NO: 5594
  oligonucleotide probe

SEQ ID NO: 6258 - DNA, 32 bp, Artificial; identical to SEQ ID NO: 5595
  oligonucleotide probe

SEQ ID NO: 6259 - DNA, 32 bp, Artificial; identical to SEQ ID NO: 5594
  oligonucleotide probe

SEQ ID NO: 6260 - DNA, 32 bp, Artificial; identical to SEQ ID NO: 5584
  oligonucleotide probe

SEQ ID NO: 6261 - DNA, 32 bp, Artificial; identical to SEQ ID NO: 5545
  oligonucleotide probe

SEQ ID NO: 6262 - DNA, 32 bp, Artificial; identical to SEQ ID NO: 5536
  oligonucleotide probe

SEQ ID NO: 6263 - DNA, 32 bp, Artificial; identical to SEQ ID NO: 5140
  oligonucleotide probe

SEQ ID NO: 6264 - DNA, 32 bp, Artificial; identical to SEQ ID NO: 5134
  oligonucleotide probe

SEQ ID NO: 6265 - DNA, 32 bp, Artificial; identical to SEQ ID NO: 5564
  oligonucleotide probe

SEQ ID NO: 6266 - DNA, 32 bp, Artificial; identical to SEQ ID NO: 5565
  oligonucleotide probe

SEQ ID NO: 6267 - DNA, 32 bp, Artificial; identical to SEQ ID NO: 5221
  oligonucleotide probe

SEQ ID NO: 6268 - DNA, 32 bp, Artificial; identical to SEQ ID NO: 5222
  oligonucleotide probe

SEQ ID NO: 6269 - DNA, 32 bp, Artificial; identical to SEQ ID NO: 5161
  oligonucleotide probe

SEQ ID NO: 6270 - DNA, 32 bp, Artificial; identical to SEQ ID NO: 5138
  oligonucleotide probe

SEQ ID NO: 6271 - DNA, 32 bp, Artificial; identical to SEQ ID NO: 5160
  oligonucleotide probe

SEQ ID NO: 6272 - DNA, 32 bp, Artificial; identical to SEQ ID NO: 5140
  oligonucleotide probe

SEQ ID NO: 6273 - DNA, 32 bp, Artificial; identical to SEQ ID NO: 6145
  oligonucleotide probe

SEQ ID NO: 6274 - DNA, 32 bp, Artificial; identical to SEQ ID NO: 5610
  oligonucleotide probe

SEQ ID NO: 6275 - DNA, 32 bp, Artificial; identical to SEQ ID NO: 5708
  oligonucleotide probe

SEQ ID NO: 6276 - DNA, 32 bp, Artificial; identical to SEQ ID NO: 5709
  oligonucleotide probe

SEQ ID NO: 6277 - DNA, 32 bp, Artificial; identical to SEQ ID NO: 5555
  oligonucleotide probe

SEQ ID NO: 6278 - DNA, 32 bp, Artificial; identical to SEQ ID NO: 5551
  oligonucleotide probe

SEQ ID NO: 6279 - DNA, 32 bp, Artificial; identical to SEQ ID NO: 5411
  oligonucleotide probe

SEQ ID NO: 6280 - DNA, 32 bp, Artificial; identical to SEQ ID NO: 5242
  oligonucleotide probe

SEQ ID NO: 6281 - DNA, 32 bp, Artificial; identical to SEQ ID NO: 5610
  oligonucleotide probe

SEQ ID NO: 6282 - DNA, 32 bp, Artificial; identical to SEQ ID NO: 5611
  oligonucleotide probe

SEQ ID NO: 6283 - DNA, 32 bp, Artificial; identical to SEQ ID NO: 5554
  oligonucleotide probe

SEQ ID NO: 6284 - DNA, 32 bp, Artificial; identical to SEQ ID NO: 5555
  oligonucleotide probe

SEQ ID NO: 6285 - DNA, 32 bp, Artificial; identical to SEQ ID NO: 5555
  oligonucleotide probe

SEQ ID NO: 6286 - DNA, 32 bp, Artificial; identical to SEQ ID NO: 5551
  oligonucleotide probe

SEQ ID NO: 6287 - DNA, 32 bp, Artificial; identical to SEQ ID NO: 5217
  oligonucleotide probe

SEQ ID NO: 6288 - DNA, 32 bp, Artificial; identical to SEQ ID NO: 5223
  oligonucleotide probe

SEQ ID NO: 6289 - DNA, 32 bp, Artificial; identical to SEQ ID NO: 5540
  oligonucleotide probe

SEQ ID NO: 6290 - DNA, 32 bp, Artificial; identical to SEQ ID NO: 5544
  oligonucleotide probe

SEQ ID NO: 6291 - DNA, 32 bp, Artificial; identical to SEQ ID NO: 5550
  oligonucleotide probe

SEQ ID NO: 6292 - DNA, 32 bp, Artificial; identical to SEQ ID NO: 5551
  oligonucleotide probe

SEQ ID NO: 6293 - DNA, 32 bp, Artificial; identical to SEQ ID NO: 5540
  oligonucleotide probe

SEQ ID NO: 6294 - DNA, 32 bp, Artificial; identical to SEQ ID NO: 5541
  oligonucleotide probe

SEQ ID NO: 6295 - DNA, 32 bp, Artificial; identical to SEQ ID NO: 5550
  oligonucleotide probe

SEQ ID NO: 6296 - DNA, 32 bp, Artificial; identical to SEQ ID NO: 5540
  oligonucleotide probe

SEQ ID NO: 6297 - DNA, 32 bp, Artificial; identical to SEQ ID NO: 5399
  oligonucleotide probe

SEQ ID NO: 6298 - DNA, 32 bp, Artificial; identical to SEQ ID NO: 5240
  oligonucleotide probe

SEQ ID NO: 6299 - DNA, 32 bp, Artificial; identical to SEQ ID NO: 6131
  oligonucleotide probe

SEQ ID NO: 6300 - DNA, 32 bp, Artificial; identical to SEQ ID NO: 6074
  oligonucleotide probe

SEQ ID NO: 6301 - DNA, 32 bp, Artificial; identical to SEQ ID NO: 5610
  oligonucleotide probe

SEQ ID NO: 6302 - DNA, 32 bp, Artificial; identical to SEQ ID NO: 5594
  oligonucleotide probe

SEQ ID NO: 6303 - DNA, 32 bp, Artificial; identical to SEQ ID NO: 5708
  oligonucleotide probe

SEQ ID NO: 6304 - DNA, 32 bp, Artificial; identical to SEQ ID NO: 5709
  oligonucleotide probe

SEQ ID NO: 6305 - DNA, 32 bp, Artificial; identical to SEQ ID NO: 5545
  oligonucleotide probe

SEQ ID NO: 6306 - DNA, 32 bp, Artificial; identical to SEQ ID NO: 5536
  oligonucleotide probe

SEQ ID NO: 6307 - DNA, 32 bp, Artificial; identical to SEQ ID NO: 5709
  oligonucleotide probe

SEQ ID NO: 6308 - DNA, 32 bp, Artificial; identical to SEQ ID NO: 5555
  oligonucleotide probe

SEQ ID NO: 6309 - DNA, 32 bp, Artificial; identical to SEQ ID NO: 5584
  oligonucleotide probe

SEQ ID NO: 6310 - DNA, 32 bp, Artificial; identical to SEQ ID NO: 5585
  oligonucleotide probe

SEQ ID NO: 6311 - DNA, 32 bp, Artificial; identical to SEQ ID NO: 5550
  oligonucleotide probe

SEQ ID NO: 6312 - DNA, 32 bp, Artificial; identical to SEQ ID NO: 5540
  oligonucleotide probe

SEQ ID NO: 6313 - DNA, 32 bp, Artificial; identical to SEQ ID NO: 5242
  oligonucleotide probe

SEQ ID NO: 6314 - DNA, 32 bp, Artificial; identical to SEQ ID NO: 5221
  oligonucleotide probe

SEQ ID NO: 6315 - DNA, 32 bp, Artificial; identical to SEQ ID NO: 5232
  oligonucleotide probe

SEQ ID NO: 6316 - DNA, 32 bp, Artificial; identical to SEQ ID NO: 5218
  oligonucleotide probe

SEQ ID NO: 6317 - DNA, 32 bp, Artificial; identical to SEQ ID NO: 6131
  oligonucleotide probe

SEQ ID NO: 6318 - DNA, 32 bp, Artificial; identical to SEQ ID NO: 6074
  oligonucleotide probe

SEQ ID NO: 6319 - DNA, 32 bp, Artificial; identical to SEQ ID NO: 6145
  oligonucleotide probe

SEQ ID NO: 6320 - DNA, 32 bp, Artificial; identical to SEQ ID NO: 6070
  oligonucleotide probe

SEQ ID NO: 6321 - DNA, 32 bp, Artificial; identical to SEQ ID NO: 6145
  oligonucleotide probe

SEQ ID NO: 6322 - DNA, 32 bp, Artificial; identical to SEQ ID NO: 6070
  oligonucleotide probe

SEQ ID NO: 6323 - DNA, 32 bp, Artificial; identical to SEQ ID NO: 5610
  oligonucleotide probe

SEQ ID NO: 6324 - DNA, 32 bp, Artificial; identical to SEQ ID NO: 5611
  oligonucleotide probe

SEQ ID NO: 6325 - DNA, 32 bp, Artificial; identical to SEQ ID NO: 5594
  oligonucleotide probe

SEQ ID NO: 6326 - DNA, 32 bp, Artificial; identical to SEQ ID NO: 5584
  oligonucleotide probe

SEQ ID NO: 6327 - DNA, 32 bp, Artificial; identical to SEQ ID NO: 5551
  oligonucleotide probe

SEQ ID NO: 6328 - DNA, 32 bp, Artificial; identical to SEQ ID NO: 5541
  oligonucleotide probe

SEQ ID NO: 6329 - DNA, 32 bp, Artificial; identical to SEQ ID NO: 5241
  oligonucleotide probe

SEQ ID NO: 6330 - DNA, 32 bp, Artificial; identical to SEQ ID NO: 5229
  oligonucleotide probe

SEQ ID NO: 6331 - DNA, 32 bp, Artificial; identical to SEQ ID NO: 5539
  oligonucleotide probe

SEQ ID NO: 6332 - DNA, 32 bp, Artificial; identical to SEQ ID NO: 5565
  oligonucleotide probe

SEQ ID NO: 6333 - DNA, 32 bp, Artificial; identical to SEQ ID NO: 5554
  oligonucleotide probe

SEQ ID NO: 6334 - DNA, 32 bp, Artificial; identical to SEQ ID NO: 5550
  oligonucleotide probe

SEQ ID NO: 6335 - DNA, 32 bp, Artificial; identical to SEQ ID NO: 5610
  oligonucleotide probe

SEQ ID NO: 6336 - DNA, 32 bp, Artificial; identical to SEQ ID NO: 5584
  oligonucleotide probe

SEQ ID NO: 6337 - DNA, 32 bp, Artificial; identical to SEQ ID NO: 6131
  oligonucleotide probe

SEQ ID NO: 6338 - DNA, 32 bp, Artificial; identical to SEQ ID NO: 5554
  oligonucleotide probe

SEQ ID NO: 6339 - DNA, 32 bp, Artificial; identical to SEQ ID NO: 5540
  oligonucleotide probe

SEQ ID NO: 6340 - DNA, 32 bp, Artificial; identical to SEQ ID NO: 5546
  oligonucleotide probe

SEQ ID NO: 6341 - DNA, 32 bp, Artificial; identical to SEQ ID NO: 5564
  oligonucleotide probe

SEQ ID NO: 6342 - DNA, 32 bp, Artificial; identical to SEQ ID NO: 5536
  oligonucleotide probe

SEQ ID NO: 6343 - DNA, 32 bp, Artificial; identical to SEQ ID NO: 5545
  oligonucleotide probe

SEQ ID NO: 6344 - DNA, 32 bp, Artificial; identical to SEQ ID NO: 5537
  oligonucleotide probe

SEQ ID NO: 6345 - DNA, 32 bp, Artificial; identical to SEQ ID NO: 5539
  oligonucleotide probe

SEQ ID NO: 6346 - DNA, 32 bp, Artificial; identical to SEQ ID NO: 5547
  oligonucleotide probe

SEQ ID NO: 6347 - DNA, 32 bp, Artificial; identical to SEQ ID NO: 6070
  oligonucleotide probe

SEQ ID NO: 6348 - DNA, 32 bp, Artificial; identical to SEQ ID NO: 5595
  oligonucleotide probe

SEQ ID NO: 6349 - DNA, 32 bp, Artificial; identical to SEQ ID NO: 5709
  oligonucleotide probe

SEQ ID NO: 6350 - DNA, 32 bp, Artificial; identical to SEQ ID NO: 5551
  oligonucleotide probe

SEQ ID NO: 6351 - DNA, 32 bp, Artificial; identical to SEQ ID NO: 5135
  oligonucleotide probe

SEQ ID NO: 6352 - DNA, 32 bp, Artificial; identical to SEQ ID NO: 5136
  oligonucleotide probe

SEQ ID NO: 6353 - DNA, 32 bp, Artificial; identical to SEQ ID NO: 5195
  oligonucleotide probe

SEQ ID NO: 6354 - DNA, 32 bp, Artificial; identical to SEQ ID NO: 5133
  oligonucleotide probe

SEQ ID NO: 6355 - DNA, 32 bp, Artificial; identical to SEQ ID NO: 5171
  oligonucleotide probe

SEQ ID NO: 6356 - DNA, 32 bp, Artificial; identical to SEQ ID NO: 5163
  oligonucleotide probe

SEQ ID NO: 6357 - DNA, 32 bp, Artificial; identical to SEQ ID NO: 5223
  oligonucleotide probe

SEQ ID NO: 6358 - DNA, 32 bp, Artificial; identical to SEQ ID NO: 6070
  oligonucleotide probe

SEQ ID NO: 6359 - DNA, 32 bp, Artificial; identical to SEQ ID NO: 5220
  oligonucleotide probe

SEQ ID NO: 6360 - DNA, 32 bp, Artificial; identical to SEQ ID NO: 5219
  oligonucleotide probe

SEQ ID NO: 6361 - DNA, 32 bp, Artificial; identical to SEQ ID NO: 5253
  oligonucleotide probe

SEQ ID NO: 6362 - DNA, 32 bp, Artificial; identical to SEQ ID NO: 5137
  oligonucleotide probe

SEQ ID NO: 6363 - DNA, 32 bp, Artificial; identical to SEQ ID NO: 5163
  oligonucleotide probe

SEQ ID NO: 6364 - DNA, 32 bp, Artificial; identical to SEQ ID NO: 5163
  oligonucleotide probe

SEQ ID NO: 6365 - DNA, 32 bp, Artificial; identical to SEQ ID NO: 5185
  oligonucleotide probe

SEQ ID NO: 6366 - DNA, 32 bp, Artificial; identical to SEQ ID NO: 5185
  oligonucleotide probe

SEQ ID NO: 6367 - DNA, 32 bp, Artificial; identical to SEQ ID NO: 5195
  oligonucleotide probe

SEQ ID NO: 6368 - DNA, 32 bp, Artificial; identical to SEQ ID NO: 5195
  oligonucleotide probe

SEQ ID NO: 6369 - DNA, 32 bp, Artificial; identical to SEQ ID NO: 5171
  oligonucleotide probe

SEQ ID NO: 6370 - DNA, 32 bp, Artificial; identical to SEQ ID NO: 5171
  oligonucleotide probe

SEQ ID NO: 6371 - DNA, 32 bp, Artificial; identical to SEQ ID NO: 5160
  oligonucleotide probe

SEQ ID NO: 6372 - DNA, 32 bp, Artificial; identical to SEQ ID NO: 5160
  oligonucleotide probe

SEQ ID NO: 6373 - DNA, 32 bp, Artificial; identical to SEQ ID NO: 5195
  oligonucleotide probe

SEQ ID NO: 6374 - DNA, 32 bp, Artificial; identical to SEQ ID NO: 5195
  oligonucleotide probe

SEQ ID NO: 6375 - DNA, 32 bp, Artificial; identical to SEQ ID NO: 5185
  oligonucleotide probe

SEQ ID NO: 6376 - DNA, 32 bp, Artificial; identical to SEQ ID NO: 5185
  oligonucleotide probe

SEQ ID NO: 6377 - DNA, 32 bp, Artificial; identical to SEQ ID NO: 5171
  oligonucleotide probe

SEQ ID NO: 6378 - DNA, 32 bp, Artificial; identical to SEQ ID NO: 5171
  oligonucleotide probe

SEQ ID NO: 6379 - DNA, 32 bp, Artificial; identical to SEQ ID NO: 5137
  oligonucleotide probe

SEQ ID NO: 6380 - DNA, 32 bp, Artificial; identical to SEQ ID NO: 5137
  oligonucleotide probe

SEQ ID NO: 6381 - DNA, 32 bp, Artificial; identical to SEQ ID NO: 5136
  oligonucleotide probe

SEQ ID NO: 6382 - DNA, 32 bp, Artificial; identical to SEQ ID NO: 5136
  oligonucleotide probe

SEQ ID NO: 6383 - DNA, 32 bp, Artificial; identical to SEQ ID NO: 5171
  oligonucleotide probe

SEQ ID NO: 6384 - DNA, 32 bp, Artificial; identical to SEQ ID NO: 5171
  oligonucleotide probe

SEQ ID NO: 6385 - DNA, 32 bp, Artificial; identical to SEQ ID NO: 5195
  oligonucleotide probe

SEQ ID NO: 6386 - DNA, 32 bp, Artificial; identical to SEQ ID NO: 5195
  oligonucleotide probe

SEQ ID NO: 6387 - DNA, 32 bp, Artificial; identical to SEQ ID NO: 5163
  oligonucleotide probe

SEQ ID NO: 6388 - DNA, 32 bp, Artificial; identical to SEQ ID NO: 5163
  oligonucleotide probe

SEQ ID NO: 6389 - DNA, 32 bp, Artificial; identical to SEQ ID NO: 5163
  oligonucleotide probe

SEQ ID NO: 6390 - DNA, 32 bp, Artificial; identical to SEQ ID NO: 5163
  oligonucleotide probe

SEQ ID NO: 6391 - DNA, 32 bp, Artificial; identical to SEQ ID NO: 5160
  oligonucleotide probe

SEQ ID NO: 6392 - DNA, 32 bp, Artificial; identical to SEQ ID NO: 5160
  oligonucleotide probe

SEQ ID NO: 6393 - DNA, 32 bp, Artificial; identical to SEQ ID NO: 5171
  oligonucleotide probe

SEQ ID NO: 6394 - DNA, 32 bp, Artificial; identical to SEQ ID NO: 5171
  oligonucleotide probe

SEQ ID NO: 6395 - DNA, 32 bp, Artificial; identical to SEQ ID NO: 5177
  oligonucleotide probe

SEQ ID NO: 6396 - DNA, 32 bp, Artificial; identical to SEQ ID NO: 5177
  oligonucleotide probe

SEQ ID NO: 6397 - DNA, 32 bp, Artificial; identical to SEQ ID NO: 5141
  oligonucleotide probe

SEQ ID NO: 6398 - DNA, 32 bp, Artificial; identical to SEQ ID NO: 5177
  oligonucleotide probe

SEQ ID NO: 6399 - DNA, 32 bp, Artificial; identical to SEQ ID NO: 5135
  oligonucleotide probe

SEQ ID NO: 6400 - DNA, 32 bp, Artificial; identical to SEQ ID NO: 5135
  oligonucleotide probe

SEQ ID NO: 6401 - DNA, 32 bp, Artificial; identical to SEQ ID NO: 5177
  oligonucleotide probe

SEQ ID NO: 6402 - DNA, 32 bp, Artificial; identical to SEQ ID NO: 5177
  oligonucleotide probe

SEQ ID NO: 6403 - DNA, 32 bp, Artificial; identical to SEQ ID NO: 5137
  oligonucleotide probe

SEQ ID NO: 6404 - DNA, 32 bp, Artificial; identical to SEQ ID NO: 5137
  oligonucleotide probe

SEQ ID NO: 6405 - DNA, 32 bp, Artificial; identical to SEQ ID NO: 5160
  oligonucleotide probe

SEQ ID NO: 6406 - DNA, 32 bp, Artificial; identical to SEQ ID NO: 5160
  oligonucleotide probe

SEQ ID NO: 6407 - DNA, 32 bp, Artificial; identical to SEQ ID NO: 5134
  oligonucleotide probe

SEQ ID NO: 6408 - DNA, 32 bp, Artificial; identical to SEQ ID NO: 5134
  oligonucleotide probe

SEQ ID NO: 6409 - DNA, 32 bp, Artificial; identical to SEQ ID NO: 5160
  oligonucleotide probe

SEQ ID NO: 6410 - DNA, 32 bp, Artificial; identical to SEQ ID NO: 5160
  oligonucleotide probe

SEQ ID NO: 6411 - DNA, 32 bp, Artificial; identical to SEQ ID NO: 5133
  oligonucleotide probe

SEQ ID NO: 6412 - DNA, 32 bp, Artificial; identical to SEQ ID NO: 5133
  oligonucleotide probe

SEQ ID NO: 6413 - DNA, 32 bp, Artificial; identical to SEQ ID NO: 5161
  oligonucleotide probe

SEQ ID NO: 6414 - DNA, 32 bp, Artificial; identical to SEQ ID NO: 5161
  oligonucleotide probe

SEQ ID NO: 6415 - DNA, 32 bp, Artificial; identical to SEQ ID NO: 5171
  oligonucleotide probe

SEQ ID NO: 6416 - DNA, 32 bp, Artificial; identical to SEQ ID NO: 5171
  oligonucleotide probe

SEQ ID NO: 6417 - DNA, 32 bp, Artificial; identical to SEQ ID NO: 5133
  oligonucleotide probe

SEQ ID NO: 6418 - DNA, 32 bp, Artificial; identical to SEQ ID NO: 5133
  oligonucleotide probe

SEQ ID NO: 6419 - DNA, 32 bp, Artificial; identical to SEQ ID NO: 5138
  oligonucleotide probe

SEQ ID NO: 6420 - DNA, 32 bp, Artificial; identical to SEQ ID NO: 5138
  oligonucleotide probe

SEQ ID NO: 6421 - DNA, 32 bp, Artificial; identical to SEQ ID NO: 5195
  oligonucleotide probe

SEQ ID NO: 6422 - DNA, 32 bp, Artificial; identical to SEQ ID NO: 5195
  oligonucleotide probe

SEQ ID NO: 6423 - DNA, 32 bp, Artificial; identical to SEQ ID NO: 5140
  oligonucleotide probe

SEQ ID NO: 6424 - DNA, 32 bp, Artificial; identical to SEQ ID NO: 5140
  oligonucleotide probe

SEQ ID NO: 6425 - DNA, 32 bp, Artificial; identical to SEQ ID NO: 5161
  oligonucleotide probe

SEQ ID NO: 6426 - DNA, 32 bp, Artificial; identical to SEQ ID NO: 5161
  oligonucleotide probe

SEQ ID NO: 6427 - DNA, 32 bp, Artificial; identical to SEQ ID NO: 5185
  oligonucleotide probe

SEQ ID NO: 6428 - DNA, 32 bp, Artificial; identical to SEQ ID NO: 5185
  oligonucleotide probe

SEQ ID NO: 6429 - DNA, 32 bp, Artificial; identical to SEQ ID NO: 5140
  oligonucleotide probe

SEQ ID NO: 6430 - DNA, 32 bp, Artificial; identical to SEQ ID NO: 5140
  oligonucleotide probe

SEQ ID NO: 6431 - DNA, 32 bp, Artificial; identical to SEQ ID NO: 5185
  oligonucleotide probe

SEQ ID NO: 6432 - DNA, 32 bp, Artificial; identical to SEQ ID NO: 5185
  oligonucleotide probe

SEQ ID NO: 6433 - DNA, 32 bp, Artificial; identical to SEQ ID NO: 5163
  oligonucleotide probe

SEQ ID NO: 6434 - DNA, 32 bp, Artificial; identical to SEQ ID NO: 5163
  oligonucleotide probe

SEQ ID NO: 6435 - DNA, 32 bp, Artificial; identical to SEQ ID NO: 5159
  oligonucleotide probe

SEQ ID NO: 6436 - DNA, 32 bp, Artificial; identical to SEQ ID NO: 5159
  oligonucleotide probe

SEQ ID NO: 6437 - DNA, 32 bp, Artificial; identical to SEQ ID NO: 5136
  oligonucleotide probe

SEQ ID NO: 6438 - DNA, 32 bp, Artificial; identical to SEQ ID NO: 5136
  oligonucleotide probe

SEQ ID NO: 6439 - DNA, 32 bp, Artificial; identical to SEQ ID NO: 5141
  oligonucleotide probe

SEQ ID NO: 6440 - DNA, 32 bp, Artificial; identical to SEQ ID NO: 5141
  oligonucleotide probe

SEQ ID NO: 6441 - DNA, 32 bp, Artificial; identical to SEQ ID NO: 5135
  oligonucleotide probe

SEQ ID NO: 6442 - DNA, 32 bp, Artificial; identical to SEQ ID NO: 5135
  oligonucleotide probe

SEQ ID NO: 6443 - DNA, 32 bp, Artificial; identical to SEQ ID NO: 5177
  oligonucleotide probe

SEQ ID NO: 6444 - DNA, 32 bp, Artificial; identical to SEQ ID NO: 5177
  oligonucleotide probe

SEQ ID NO: 6445 - DNA, 32 bp, Artificial; identical to SEQ ID NO: 5136
  oligonucleotide probe

SEQ ID NO: 6446 - DNA, 32 bp, Artificial; identical to SEQ ID NO: 5136
  oligonucleotide probe

SEQ ID NO: 6447 - DNA, 32 bp, Artificial; identical to SEQ ID NO: 5141
  oligonucleotide probe

SEQ ID NO: 6448 - DNA, 32 bp, Artificial; identical to SEQ ID NO: 5141
  oligonucleotide probe

SEQ ID NO: 6449 - DNA, 32 bp, Artificial; identical to SEQ ID NO: 5159
  oligonucleotide probe

SEQ ID NO: 6450 - DNA, 32 bp, Artificial; identical to SEQ ID NO: 5159
  oligonucleotide probe

SEQ ID NO: 6451 - DNA, 32 bp, Artificial; identical to SEQ ID NO: 5241
  oligonucleotide probe

SEQ ID NO: 6452 - DNA, 32 bp, Artificial; identical to SEQ ID NO: 5241
  oligonucleotide probe

SEQ ID NO: 6453 - DNA, 32 bp, Artificial; identical to SEQ ID NO: 5133
  oligonucleotide probe

SEQ ID NO: 6454 - DNA, 32 bp, Artificial; identical to SEQ ID NO: 5133
  oligonucleotide probe

SEQ ID NO: 6455 - DNA, 32 bp, Artificial; identical to SEQ ID NO: 5163
  oligonucleotide probe

SEQ ID NO: 6456 - DNA, 32 bp, Artificial; identical to SEQ ID NO: 5163
  oligonucleotide probe

SEQ ID NO: 6457 - DNA, 32 bp, Artificial; identical to SEQ ID NO: 5141
  oligonucleotide probe

SEQ ID NO: 6458 - DNA, 32 bp, Artificial; identical to SEQ ID NO: 5141
  oligonucleotide probe

SEQ ID NO: 6459 - DNA, 32 bp, Artificial; identical to SEQ ID NO: 5161
  oligonucleotide probe

SEQ ID NO: 6460 - DNA, 32 bp, Artificial; identical to SEQ ID NO: 5161
  oligonucleotide probe

SEQ ID NO: 6461 - DNA, 32 bp, Artificial; identical to SEQ ID NO: 5160
  oligonucleotide probe

SEQ ID NO: 6462 - DNA, 32 bp, Artificial; identical to SEQ ID NO: 5160
  oligonucleotide probe

SEQ ID NO: 6463 - DNA, 32 bp, Artificial; identical to SEQ ID NO: 5137
  oligonucleotide probe

SEQ ID NO: 6464 - DNA, 32 bp, Artificial; identical to SEQ ID NO: 5137
  oligonucleotide probe

SEQ ID NO: 6465 - DNA, 32 bp, Artificial; identical to SEQ ID NO: 5138
  oligonucleotide probe

SEQ ID NO: 6466 - DNA, 32 bp, Artificial; identical to SEQ ID NO: 5138
  oligonucleotide probe

SEQ ID NO: 6467 - DNA, 32 bp, Artificial; identical to SEQ ID NO: 5159
  oligonucleotide probe

SEQ ID NO: 6468 - DNA, 32 bp, Artificial; identical to SEQ ID NO: 5159
  oligonucleotide probe

SEQ ID NO: 6469 - DNA, 32 bp, Artificial; identical to SEQ ID NO: 5185
  oligonucleotide probe

SEQ ID NO: 6470 - DNA, 32 bp, Artificial; identical to SEQ ID NO: 5185
  oligonucleotide probe

SEQ ID NO: 6471 - DNA, 32 bp, Artificial; identical to SEQ ID NO: 5195
  oligonucleotide probe

SEQ ID NO: 6472 - DNA, 32 bp, Artificial; identical to SEQ ID NO: 5195
  oligonucleotide probe

SEQ ID NO: 6473 - DNA, 32 bp, Artificial; identical to SEQ ID NO: 5171
  oligonucleotide probe

SEQ ID NO: 6474 - DNA, 32 bp, Artificial; identical to SEQ ID NO: 5171
  oligonucleotide probe

SEQ ID NO: 6475 - DNA, 32 bp, Artificial; identical to SEQ ID NO: 5160
  oligonucleotide probe

SEQ ID NO: 6476 - DNA, 32 bp, Artificial; identical to SEQ ID NO: 5160
  oligonucleotide probe

SEQ ID NO: 6477 - DNA, 32 bp, Artificial; identical to SEQ ID NO: 5160
  oligonucleotide probe

SEQ ID NO: 6478 - DNA, 32 bp, Artificial; identical to SEQ ID NO: 5160
  oligonucleotide probe

SEQ ID NO: 6479 - DNA, 32 bp, Artificial; identical to SEQ ID NO: 5133
  oligonucleotide probe

SEQ ID NO: 6480 - DNA, 32 bp, Artificial; identical to SEQ ID NO: 5133
  oligonucleotide probe

SEQ ID NO: 6481 - DNA, 32 bp, Artificial; identical to SEQ ID NO: 5159
  oligonucleotide probe

SEQ ID NO: 6482 - DNA, 32 bp, Artificial; identical to SEQ ID NO: 5159
  oligonucleotide probe

SEQ ID NO: 6483 - DNA, 32 bp, Artificial; identical to SEQ ID NO: 5138
  oligonucleotide probe

SEQ ID NO: 6484 - DNA, 32 bp, Artificial; identical to SEQ ID NO: 5138
  oligonucleotide probe

SEQ ID NO: 6485 - DNA, 32 bp, Artificial; identical to SEQ ID NO: 5161
  oligonucleotide probe

SEQ ID NO: 6486 - DNA, 32 bp, Artificial; identical to SEQ ID NO: 5161
  oligonucleotide probe

SEQ ID NO: 6487 - DNA, 32 bp, Artificial; identical to SEQ ID NO: 5140
  oligonucleotide probe

SEQ ID NO: 6488 - DNA, 32 bp, Artificial; identical to SEQ ID NO: 5140
  oligonucleotide probe

SEQ ID NO: 6489 - DNA, 32 bp, Artificial; identical to SEQ ID NO: 5163
  oligonucleotide probe

SEQ ID NO: 6490 - DNA, 32 bp, Artificial; identical to SEQ ID NO: 5163
  oligonucleotide probe

SEQ ID NO: 6491 - DNA, 32 bp, Artificial; identical to SEQ ID NO: 5141
  oligonucleotide probe

SEQ ID NO: 6492 - DNA, 32 bp, Artificial; identical to SEQ ID NO: 5141
  oligonucleotide probe

SEQ ID NO: 6493 - DNA, 32 bp, Artificial; identical to SEQ ID NO: 5136
  oligonucleotide probe

SEQ ID NO: 6494 - DNA, 32 bp, Artificial; identical to SEQ ID NO: 5136
  oligonucleotide probe

SEQ ID NO: 6495 - DNA, 32 bp, Artificial; identical to SEQ ID NO: 5239
  oligonucleotide probe

SEQ ID NO: 6496 - DNA, 32 bp, Artificial; identical to SEQ ID NO: 5239
  oligonucleotide probe

SEQ ID NO: 6497 - DNA, 32 bp, Artificial; identical to SEQ ID NO: 5138
  oligonucleotide probe

SEQ ID NO: 6498 - DNA, 32 bp, Artificial; identical to SEQ ID NO: 5138
  oligonucleotide probe

SEQ ID NO: 6499 - DNA, 32 bp, Artificial; identical to SEQ ID NO: 5241
  oligonucleotide probe

SEQ ID NO: 6500 - DNA, 32 bp, Artificial; identical to SEQ ID NO: 5241
  oligonucleotide probe

SEQ ID NO: 6501 - DNA, 32 bp, Artificial; identical to SEQ ID NO: 5195
  oligonucleotide probe

SEQ ID NO: 6502 - DNA, 32 bp, Artificial; identical to SEQ ID NO: 5195
  oligonucleotide probe

SEQ ID NO: 6503 - DNA, 32 bp, Artificial; identical to SEQ ID NO: 5185
  oligonucleotide probe

SEQ ID NO: 6504 - DNA, 32 bp, Artificial; identical to SEQ ID NO: 5185
  oligonucleotide probe

SEQ ID NO: 6505 - DNA, 32 bp, Artificial; identical to SEQ ID NO: 5231
  oligonucleotide probe

SEQ ID NO: 6506 - DNA, 32 bp, Artificial; identical to SEQ ID NO: 5231
  oligonucleotide probe

SEQ ID NO: 6507 - DNA, 32 bp, Artificial; identical to SEQ ID NO: 5140
  oligonucleotide probe

SEQ ID NO: 6508 - DNA, 32 bp, Artificial; identical to SEQ ID NO: 5140
  oligonucleotide probe

SEQ ID NO: 6509 - DNA, 32 bp, Artificial; identical to SEQ ID NO: 5229
  oligonucleotide probe

SEQ ID NO: 6510 - DNA, 32 bp, Artificial; identical to SEQ ID NO: 5229
  oligonucleotide probe

SEQ ID NO: 6511 - DNA, 32 bp, Artificial; identical to SEQ ID NO: 5177
  oligonucleotide probe

SEQ ID NO: 6512 - DNA, 32 bp, Artificial; identical to SEQ ID NO: 5177
  oligonucleotide probe

SEQ ID NO: 6513 - DNA, 32 bp, Artificial; identical to SEQ ID NO: 5163
  oligonucleotide probe

SEQ ID NO: 6514 - DNA, 32 bp, Artificial; identical to SEQ ID NO: 5163
  oligonucleotide probe

SEQ ID NO: 6515 - DNA, 32 bp, Artificial; identical to SEQ ID NO: 5137
  oligonucleotide probe

SEQ ID NO: 6516 - DNA, 32 bp, Artificial; identical to SEQ ID NO: 5137
  oligonucleotide probe

SEQ ID NO: 6517 - DNA, 32 bp, Artificial; identical to SEQ ID NO: 5134
  oligonucleotide probe

SEQ ID NO: 6518 - DNA, 32 bp, Artificial; identical to SEQ ID NO: 5134
  oligonucleotide probe

SEQ ID NO: 6519 - DNA, 32 bp, Artificial; identical to SEQ ID NO: 5171
  oligonucleotide probe

SEQ ID NO: 6520 - DNA, 32 bp, Artificial; identical to SEQ ID NO: 5171
  oligonucleotide probe

SEQ ID NO: 6521 - DNA, 32 bp, Artificial; identical to SEQ ID NO: 5138
  oligonucleotide probe

SEQ ID NO: 6522 - DNA, 32 bp, Artificial; identical to SEQ ID NO: 5138
  oligonucleotide probe

SEQ ID NO: 6523 - DNA, 32 bp, Artificial; identical to SEQ ID NO: 5177
  oligonucleotide probe

SEQ ID NO: 6524 - DNA, 32 bp, Artificial; identical to SEQ ID NO: 5177
  oligonucleotide probe

SEQ ID NO: 6525 - DNA, 32 bp, Artificial; identical to SEQ ID NO: 5135
  oligonucleotide probe

SEQ ID NO: 6526 - DNA, 32 bp, Artificial; identical to SEQ ID NO: 5135
  oligonucleotide probe

SEQ ID NO: 6527 - DNA, 32 bp, Artificial; identical to SEQ ID NO: 5171
  oligonucleotide probe

SEQ ID NO: 6528 - DNA, 32 bp, Artificial; identical to SEQ ID NO: 5171
  oligonucleotide probe

SEQ ID NO: 6529 - DNA, 32 bp, Artificial; identical to SEQ ID NO: 5171
  oligonucleotide probe

SEQ ID NO: 6530 - DNA, 32 bp, Artificial; identical to SEQ ID NO: 5171
  oligonucleotide probe

SEQ ID NO: 6531 - DNA, 32 bp, Artificial; identical to SEQ ID NO: 5185
  oligonucleotide probe

SEQ ID NO: 6532 - DNA, 32 bp, Artificial; identical to SEQ ID NO: 5185
  oligonucleotide probe

SEQ ID NO: 6533 - DNA, 32 bp, Artificial; identical to SEQ ID NO: 5195
  oligonucleotide probe

SEQ ID NO: 6534 - DNA, 32 bp, Artificial; identical to SEQ ID NO: 5195
  oligonucleotide probe

SEQ ID NO: 6535 - DNA, 32 bp, Artificial; identical to SEQ ID NO: 5177
  oligonucleotide probe

SEQ ID NO: 6536 - DNA, 32 bp, Artificial; identical to SEQ ID NO: 5177
  oligonucleotide probe

SEQ ID NO: 6537 - DNA, 32 bp, Artificial; identical to SEQ ID NO: 5171
  oligonucleotide probe

SEQ ID NO: 6538 - DNA, 32 bp, Artificial; identical to SEQ ID NO: 5171
  oligonucleotide probe

SEQ ID NO: 6539 - DNA, 32 bp, Artificial; identical to SEQ ID NO: 5134
  oligonucleotide probe

SEQ ID NO: 6540 - DNA, 32 bp, Artificial; identical to SEQ ID NO: 5134
  oligonucleotide probe

SEQ ID NO: 6541 - DNA, 32 bp, Artificial; identical to SEQ ID NO: 5137
  oligonucleotide probe

SEQ ID NO: 6542 - DNA, 32 bp, Artificial; identical to SEQ ID NO: 5137
  oligonucleotide probe

SEQ ID NO: 6543 - DNA, 32 bp, Artificial; identical to SEQ ID NO: 5160
  oligonucleotide probe

SEQ ID NO: 6544 - DNA, 32 bp, Artificial; identical to SEQ ID NO: 5160
  oligonucleotide probe

SEQ ID NO: 6545 - DNA, 32 bp, Artificial; identical to SEQ ID NO: 5410
  oligonucleotide probe

SEQ ID NO: 6546 - DNA, 32 bp, Artificial; identical to SEQ ID NO: 5410
  oligonucleotide probe

SEQ ID NO: 6547 - DNA, 32 bp, Artificial; identical to SEQ ID NO: 5410
  oligonucleotide probe

SEQ ID NO: 6548 - DNA, 32 bp, Artificial; identical to SEQ ID NO: 5410
  oligonucleotide probe

SEQ ID NO: 6549 - DNA, 32 bp, Artificial; identical to SEQ ID NO: 5140
  oligonucleotide probe

SEQ ID NO: 6550 - DNA, 32 bp, Artificial; identical to SEQ ID NO: 5140
  oligonucleotide probe

SEQ ID NO: 6551 - DNA, 32 bp, Artificial; identical to SEQ ID NO: 5416
  oligonucleotide probe

SEQ ID NO: 6552 - DNA, 32 bp, Artificial; identical to SEQ ID NO: 5416
  oligonucleotide probe

SEQ ID NO: 6553 - DNA, 32 bp, Artificial; identical to SEQ ID NO: 5133
  oligonucleotide probe

SEQ ID NO: 6554 - DNA, 32 bp, Artificial; identical to SEQ ID NO: 5133
  oligonucleotide probe

SEQ ID NO: 6555 - DNA, 32 bp, Artificial; identical to SEQ ID NO: 5159
  oligonucleotide probe

SEQ ID NO: 6556 - DNA, 32 bp, Artificial; identical to SEQ ID NO: 5159
  oligonucleotide probe

SEQ ID NO: 6557 - DNA, 32 bp, Artificial; identical to SEQ ID NO: 5136
  oligonucleotide probe

SEQ ID NO: 6558 - DNA, 32 bp, Artificial; identical to SEQ ID NO: 5136
  oligonucleotide probe

SEQ ID NO: 6559 - DNA, 32 bp, Artificial; identical to SEQ ID NO: 5185
  oligonucleotide probe

SEQ ID NO: 6560 - DNA, 32 bp, Artificial; identical to SEQ ID NO: 5185
  oligonucleotide probe

SEQ ID NO: 6561 - DNA, 32 bp, Artificial; identical to SEQ ID NO: 5177
  oligonucleotide probe

SEQ ID NO: 6562 - DNA, 32 bp, Artificial; identical to SEQ ID NO: 5177
  oligonucleotide probe

SEQ ID NO: 6563 - DNA, 32 bp, Artificial; identical to SEQ ID NO: 5141
  oligonucleotide probe

SEQ ID NO: 6564 - DNA, 32 bp, Artificial; identical to SEQ ID NO: 5141
  oligonucleotide probe

SEQ ID NO: 6565 - DNA, 32 bp, Artificial; identical to SEQ ID NO: 5140
  oligonucleotide probe

SEQ ID NO: 6566 - DNA, 32 bp, Artificial; identical to SEQ ID NO: 5140
  oligonucleotide probe

SEQ ID NO: 6567 - DNA, 32 bp, Artificial; identical to SEQ ID NO: 5135
  oligonucleotide probe

SEQ ID NO: 6568 - DNA, 32 bp, Artificial; identical to SEQ ID NO: 5135
  oligonucleotide probe

SEQ ID NO: 6569 - DNA, 32 bp, Artificial; identical to SEQ ID NO: 5163
  oligonucleotide probe

SEQ ID NO: 6570 - DNA, 32 bp, Artificial; identical to SEQ ID NO: 5163
  oligonucleotide probe

SEQ ID NO: 6571 - DNA, 32 bp, Artificial; identical to SEQ ID NO: 5177
  oligonucleotide probe

SEQ ID NO: 6572 - DNA, 32 bp, Artificial; identical to SEQ ID NO: 5177
  oligonucleotide probe

SEQ ID NO: 6573 - DNA, 32 bp, Artificial; identical to SEQ ID NO: 5185
  oligonucleotide probe

SEQ ID NO: 6574 - DNA, 32 bp, Artificial; identical to SEQ ID NO: 5185
  oligonucleotide probe

SEQ ID NO: 6575 - DNA, 32 bp, Artificial; identical to SEQ ID NO: 5171
  oligonucleotide probe

SEQ ID NO: 6576 - DNA, 32 bp, Artificial; identical to SEQ ID NO: 5171
  oligonucleotide probe

SEQ ID NO: 6577 - DNA, 32 bp, Artificial; identical to SEQ ID NO: 5163
  oligonucleotide probe

SEQ ID NO: 6578 - DNA, 32 bp, Artificial; identical to SEQ ID NO: 5163
  oligonucleotide probe

SEQ ID NO: 6579 - DNA, 32 bp, Artificial; identical to SEQ ID NO: 5177
  oligonucleotide probe

SEQ ID NO: 6580 - DNA, 32 bp, Artificial; identical to SEQ ID NO: 5177
  oligonucleotide probe

SEQ ID NO: 6581 - DNA, 32 bp, Artificial; identical to SEQ ID NO: 5137
  oligonucleotide probe

SEQ ID NO: 6582 - DNA, 32 bp, Artificial; identical to SEQ ID NO: 5137
  oligonucleotide probe

SEQ ID NO: 6583 - DNA, 32 bp, Artificial; identical to SEQ ID NO: 5195
  oligonucleotide probe

SEQ ID NO: 6584 - DNA, 32 bp, Artificial; identical to SEQ ID NO: 5195
  oligonucleotide probe

SEQ ID NO: 6585 - DNA, 32 bp, Artificial; identical to SEQ ID NO: 5160
  oligonucleotide probe

SEQ ID NO: 6586 - DNA, 32 bp, Artificial; identical to SEQ ID NO: 5160
  oligonucleotide probe

SEQ ID NO: 6587 - DNA, 32 bp, Artificial; identical to SEQ ID NO: 5135
  oligonucleotide probe

SEQ ID NO: 6588 - DNA, 32 bp, Artificial; identical to SEQ ID NO: 5135
  oligonucleotide probe

SEQ ID NO: 6589 - DNA, 32 bp, Artificial; identical to SEQ ID NO: 5137
  oligonucleotide probe

SEQ ID NO: 6590 - DNA, 32 bp, Artificial; identical to SEQ ID NO: 5137
  oligonucleotide probe

SEQ ID NO: 6591 - DNA, 32 bp, Artificial; identical to SEQ ID NO: 5159
  oligonucleotide probe

SEQ ID NO: 6592 - DNA, 32 bp, Artificial; identical to SEQ ID NO: 5159
  oligonucleotide probe

SEQ ID NO: 6593 - DNA, 32 bp, Artificial; identical to SEQ ID NO: 5185
  oligonucleotide probe

SEQ ID NO: 6594 - DNA, 32 bp, Artificial; identical to SEQ ID NO: 5185
  oligonucleotide probe

SEQ ID NO: 6595 - DNA, 32 bp, Artificial; identical to SEQ ID NO: 5171
  oligonucleotide probe

SEQ ID NO: 6596 - DNA, 32 bp, Artificial; identical to SEQ ID NO: 5171
  oligonucleotide probe

SEQ ID NO: 6597 - DNA, 32 bp, Artificial; identical to SEQ ID NO: 5253
  oligonucleotide probe

SEQ ID NO: 6598 - DNA, 32 bp, Artificial; identical to SEQ ID NO: 5253
  oligonucleotide probe

SEQ ID NO: 6599 - DNA, 32 bp, Artificial; identical to SEQ ID NO: 5195
  oligonucleotide probe

SEQ ID NO: 6600 - DNA, 32 bp, Artificial; identical to SEQ ID NO: 5195
  oligonucleotide probe

SEQ ID NO: 6601 - DNA, 32 bp, Artificial; identical to SEQ ID NO: 5159
  oligonucleotide probe

SEQ ID NO: 6602 - DNA, 32 bp, Artificial; identical to SEQ ID NO: 5159
  oligonucleotide probe

SEQ ID NO: 6603 - DNA, 32 bp, Artificial; identical to SEQ ID NO: 5161
  oligonucleotide probe

SEQ ID NO: 6604 - DNA, 32 bp, Artificial; identical to SEQ ID NO: 5161
  oligonucleotide probe

SEQ ID NO: 6605 - DNA, 32 bp, Artificial; identical to SEQ ID NO: 5171
  oligonucleotide probe

SEQ ID NO: 6606 - DNA, 32 bp, Artificial; identical to SEQ ID NO: 5171
  oligonucleotide probe

SEQ ID NO: 6607 - DNA, 32 bp, Artificial; identical to SEQ ID NO: 5141
  oligonucleotide probe

SEQ ID NO: 6608 - DNA, 32 bp, Artificial; identical to SEQ ID NO: 5141
  oligonucleotide probe

SEQ ID NO: 6609 - DNA, 32 bp, Artificial; identical to SEQ ID NO: 5185
  oligonucleotide probe

SEQ ID NO: 6610 - DNA, 32 bp, Artificial; identical to SEQ ID NO: 5185
  oligonucleotide probe

SEQ ID NO: 6611 - DNA, 32 bp, Artificial; identical to SEQ ID NO: 5133
  oligonucleotide probe

SEQ ID NO: 6612 - DNA, 32 bp, Artificial; identical to SEQ ID NO: 5133
  oligonucleotide probe

SEQ ID NO: 6613 - DNA, 32 bp, Artificial; identical to SEQ ID NO: 5163
  oligonucleotide probe

SEQ ID NO: 6614 - DNA, 32 bp, Artificial; identical to SEQ ID NO: 5163
  oligonucleotide probe

SEQ ID NO: 6615 - DNA, 32 bp, Artificial; identical to SEQ ID NO: 5161
  oligonucleotide probe

SEQ ID NO: 6616 - DNA, 32 bp, Artificial; identical to SEQ ID NO: 5161
  oligonucleotide probe

SEQ ID NO: 6617 - DNA, 32 bp, Artificial; identical to SEQ ID NO: 5195
  oligonucleotide probe

SEQ ID NO: 6618 - DNA, 32 bp, Artificial; identical to SEQ ID NO: 5195
  oligonucleotide probe

SEQ ID NO: 6619 - DNA, 32 bp, Artificial; identical to SEQ ID NO: 5134
  oligonucleotide probe

SEQ ID NO: 6620 - DNA, 32 bp, Artificial; identical to SEQ ID NO: 5134
  oligonucleotide probe

SEQ ID NO: 6621 - DNA, 32 bp, Artificial; identical to SEQ ID NO: 5195
  oligonucleotide probe

SEQ ID NO: 6622 - DNA, 32 bp, Artificial; identical to SEQ ID NO: 5195
  oligonucleotide probe

SEQ ID NO: 6623 - DNA, 32 bp, Artificial; identical to SEQ ID NO: 5161
  oligonucleotide probe

SEQ ID NO: 6624 - DNA, 32 bp, Artificial; identical to SEQ ID NO: 5161
  oligonucleotide probe

SEQ ID NO: 6625 - DNA, 32 bp, Artificial; identical to SEQ ID NO: 5416
  oligonucleotide probe

SEQ ID NO: 6626 - DNA, 32 bp, Artificial; identical to SEQ ID NO: 5416
  oligonucleotide probe

SEQ ID NO: 6627 - DNA, 32 bp, Artificial; identical to SEQ ID NO: 5219
  oligonucleotide probe

SEQ ID NO: 6628 - DNA, 32 bp, Artificial; identical to SEQ ID NO: 5219
  oligonucleotide probe

SEQ ID NO: 6629 - DNA, 32 bp, Artificial; identical to SEQ ID NO: 5219
  oligonucleotide probe

SEQ ID NO: 6630 - DNA, 32 bp, Artificial; identical to SEQ ID NO: 5219
  oligonucleotide probe

SEQ ID NO: 6631 - DNA, 32 bp, Artificial; identical to SEQ ID NO: 5410
  oligonucleotide probe

SEQ ID NO: 6632 - DNA, 32 bp, Artificial; identical to SEQ ID NO: 5229
  oligonucleotide probe

SEQ ID NO: 6633 - DNA, 32 bp, Artificial; identical to SEQ ID NO: 5239
  oligonucleotide probe

SEQ ID NO: 6634 - DNA, 32 bp, Artificial; identical to SEQ ID NO: 5223
  oligonucleotide probe

SEQ ID NO: 6635 - DNA, 32 bp, Artificial; identical to SEQ ID NO: 5217
  oligonucleotide probe

SEQ ID NO: 6636 - DNA, 32 bp, Artificial; identical to SEQ ID NO: 5218
  oligonucleotide probe

SEQ ID NO: 6637 - DNA, 32 bp, Artificial; identical to SEQ ID NO: 5218
  oligonucleotide probe

SEQ ID NO: 6638 - DNA, 32 bp, Artificial; identical to SEQ ID NO: 5253
  oligonucleotide probe

SEQ ID NO: 6639 - DNA, 32 bp, Artificial; identical to SEQ ID NO: 5253
  oligonucleotide probe

SEQ ID NO: 6640 - DNA, 32 bp, Artificial; identical to SEQ ID NO: 5161
  oligonucleotide probe

SEQ ID NO: 6641 - DNA, 32 bp, Artificial; identical to SEQ ID NO: 5161
  oligonucleotide probe

SEQ ID NO: 6642 - DNA, 32 bp, Artificial; identical to SEQ ID NO: 5133
  oligonucleotide probe

SEQ ID NO: 6643 - DNA, 32 bp, Artificial; identical to SEQ ID NO: 5133
  oligonucleotide probe

SEQ ID NO: 6644 - DNA, 32 bp, Artificial; identical to SEQ ID NO: 5399
  oligonucleotide probe

SEQ ID NO: 6645 - DNA, 32 bp, Artificial; identical to SEQ ID NO: 5399
  oligonucleotide probe

SEQ ID NO: 6646 - DNA, 32 bp, Artificial; identical to SEQ ID NO: 5185
  oligonucleotide probe

SEQ ID NO: 6647 - DNA, 32 bp, Artificial; identical to SEQ ID NO: 5185
  oligonucleotide probe

SEQ ID NO: 6648 - DNA, 32 bp, Artificial; identical to SEQ ID NO: 5232
  oligonucleotide probe

SEQ ID NO: 6649 - DNA, 32 bp, Artificial; identical to SEQ ID NO: 5232
  oligonucleotide probe

SEQ ID NO: 6650 - DNA, 32 bp, Artificial; identical to SEQ ID NO: 5136
  oligonucleotide probe

SEQ ID NO: 6651 - DNA, 32 bp, Artificial; identical to SEQ ID NO: 5136
  oligonucleotide probe

SEQ ID NO: 6652 - DNA, 32 bp, Artificial; identical to SEQ ID NO: 5221
  oligonucleotide probe

SEQ ID NO: 6653 - DNA, 32 bp, Artificial; identical to SEQ ID NO: 5221
  oligonucleotide probe

SEQ ID NO: 6654 - DNA, 32 bp, Artificial; identical to SEQ ID NO: 5195
  oligonucleotide probe

SEQ ID NO: 6655 - DNA, 32 bp, Artificial; identical to SEQ ID NO: 5195
  oligonucleotide probe

SEQ ID NO: 6656 - DNA, 32 bp, Artificial; identical to SEQ ID NO: 5416
  oligonucleotide probe

SEQ ID NO: 6657 - DNA, 32 bp, Artificial; identical to SEQ ID NO: 5416
  oligonucleotide probe

SEQ ID NO: 6658 - DNA, 32 bp, Artificial; identical to SEQ ID NO: 5241
  oligonucleotide probe

SEQ ID NO: 6659 - DNA, 32 bp, Artificial; identical to SEQ ID NO: 5241
  oligonucleotide probe

SEQ ID NO: 6660 - DNA, 32 bp, Artificial; identical to SEQ ID NO: 5239
  oligonucleotide probe

SEQ ID NO: 6661 - DNA, 32 bp, Artificial; identical to SEQ ID NO: 5239
  oligonucleotide probe

SEQ ID NO: 6662 - DNA, 32 bp, Artificial; identical to SEQ ID NO: 5222
  oligonucleotide probe

SEQ ID NO: 6663 - DNA, 32 bp, Artificial; identical to SEQ ID NO: 5222
  oligonucleotide probe

SEQ ID NO: 6664 - DNA, 32 bp, Artificial; identical to SEQ ID NO: 5135
  oligonucleotide probe

SEQ ID NO: 6665 - DNA, 32 bp, Artificial; identical to SEQ ID NO: 5135
  oligonucleotide probe

SEQ ID NO: 6666 - DNA, 32 bp, Artificial; identical to SEQ ID NO: 5229
  oligonucleotide probe

SEQ ID NO: 6667 - DNA, 32 bp, Artificial; identical to SEQ ID NO: 5229
  oligonucleotide probe

SEQ ID NO: 6668 - DNA, 32 bp, Artificial; identical to SEQ ID NO: 5217
  oligonucleotide probe

SEQ ID NO: 6669 - DNA, 32 bp, Artificial; identical to SEQ ID NO: 5217
  oligonucleotide probe

SEQ ID NO: 6670 - DNA, 32 bp, Artificial; identical to SEQ ID NO: 5224
  oligonucleotide probe

SEQ ID NO: 6671 - DNA, 32 bp, Artificial; identical to SEQ ID NO: 5224
  oligonucleotide probe

SEQ ID NO: 6672 - DNA, 32 bp, Artificial; identical to SEQ ID NO: 5253
  oligonucleotide probe

SEQ ID NO: 6673 - DNA, 32 bp, Artificial; identical to SEQ ID NO: 5253
  oligonucleotide probe

SEQ ID NO: 6674 - DNA, 32 bp, Artificial; identical to SEQ ID NO: 5399
  oligonucleotide probe

SEQ ID NO: 6675 - DNA, 32 bp, Artificial; identical to SEQ ID NO: 5399
  oligonucleotide probe

SEQ ID NO: 6676 - DNA, 32 bp, Artificial; identical to SEQ ID NO: 5411
  oligonucleotide probe

SEQ ID NO: 6677 - DNA, 32 bp, Artificial; identical to SEQ ID NO: 5411
  oligonucleotide probe

SEQ ID NO: 6678 - DNA, 32 bp, Artificial; identical to SEQ ID NO: 5134
  oligonucleotide probe

SEQ ID NO: 6679 - DNA, 32 bp, Artificial; identical to SEQ ID NO: 5134
  oligonucleotide probe

SEQ ID NO: 6680 - DNA, 32 bp, Artificial; identical to SEQ ID NO: 5242
  oligonucleotide probe

SEQ ID NO: 6681 - DNA, 32 bp, Artificial; identical to SEQ ID NO: 5242
  oligonucleotide probe

SEQ ID NO: 6682 - DNA, 32 bp, Artificial; identical to SEQ ID NO: 5221
  oligonucleotide probe

SEQ ID NO: 6683 - DNA, 32 bp, Artificial; identical to SEQ ID NO: 5221
  oligonucleotide probe

SEQ ID NO: 6684 - DNA, 32 bp, Artificial; identical to SEQ ID NO: 5141
  oligonucleotide probe

SEQ ID NO: 6685 - DNA, 32 bp, Artificial; identical to SEQ ID NO: 5141
  oligonucleotide probe

SEQ ID NO: 6686 - DNA, 32 bp, Artificial; identical to SEQ ID NO: 5411
  oligonucleotide probe

SEQ ID NO: 6687 - DNA, 32 bp, Artificial; identical to SEQ ID NO: 5411
  oligonucleotide probe

SEQ ID NO: 6688 - DNA, 32 bp, Artificial; identical to SEQ ID NO: 5163
  oligonucleotide probe

SEQ ID NO: 6689 - DNA, 32 bp, Artificial; identical to SEQ ID NO: 5163
  oligonucleotide probe

SEQ ID NO: 6690 - DNA, 32 bp, Artificial; identical to SEQ ID NO: 5253
  oligonucleotide probe

SEQ ID NO: 6691 - DNA, 32 bp, Artificial; identical to SEQ ID NO: 5222
  oligonucleotide probe

SEQ ID NO: 6692 - DNA, 32 bp, Artificial; identical to SEQ ID NO: 5232
  oligonucleotide probe

SEQ ID NO: 6693 - DNA, 32 bp, Artificial; identical to SEQ ID NO: 5232
  oligonucleotide probe

SEQ ID NO: 6694 - DNA, 32 bp, Artificial; identical to SEQ ID NO: 5160
  oligonucleotide probe

SEQ ID NO: 6695 - DNA, 32 bp, Artificial; identical to SEQ ID NO: 5160
  oligonucleotide probe

SEQ ID NO: 6696 - DNA, 32 bp, Artificial; identical to SEQ ID NO: 5218
  oligonucleotide probe

SEQ ID NO: 6697 - DNA, 32 bp, Artificial; identical to SEQ ID NO: 5218
  oligonucleotide probe

SEQ ID NO: 6698 - DNA, 32 bp, Artificial; identical to SEQ ID NO: 5240
  oligonucleotide probe

SEQ ID NO: 6699 - DNA, 32 bp, Artificial; identical to SEQ ID NO: 5240
  oligonucleotide probe

SEQ ID NO: 6700 - DNA, 32 bp, Artificial; identical to SEQ ID NO: 5231
  oligonucleotide probe

SEQ ID NO: 6701 - DNA, 32 bp, Artificial; identical to SEQ ID NO: 5231
  oligonucleotide probe

SEQ ID NO: 6702 - DNA, 32 bp, Artificial; identical to SEQ ID NO: 5217
  oligonucleotide probe

SEQ ID NO: 6703 - DNA, 32 bp, Artificial; identical to SEQ ID NO: 5217
  oligonucleotide probe

SEQ ID NO: 6704 - DNA, 32 bp, Artificial; identical to SEQ ID NO: 5240
  oligonucleotide probe

SEQ ID NO: 6705 - DNA, 32 bp, Artificial; identical to SEQ ID NO: 5240
  oligonucleotide probe

SEQ ID NO: 6706 - DNA, 32 bp, Artificial; identical to SEQ ID NO: 5416
  oligonucleotide probe

SEQ ID NO: 6707 - DNA, 32 bp, Artificial; identical to SEQ ID NO: 5416
  oligonucleotide probe

SEQ ID NO: 6708 - DNA, 32 bp, Artificial; identical to SEQ ID NO: 5137
  oligonucleotide probe

SEQ ID NO: 6709 - DNA, 32 bp, Artificial; identical to SEQ ID NO: 5137
  oligonucleotide probe

SEQ ID NO: 6710 - DNA, 32 bp, Artificial; identical to SEQ ID NO: 5219
  oligonucleotide probe

SEQ ID NO: 6711 - DNA, 32 bp, Artificial; identical to SEQ ID NO: 5219
  oligonucleotide probe

SEQ ID NO: 6712 - DNA, 32 bp, Artificial; identical to SEQ ID NO: 5138
  oligonucleotide probe

SEQ ID NO: 6713 - DNA, 32 bp, Artificial; identical to SEQ ID NO: 5138
  oligonucleotide probe

SEQ ID NO: 6714 - DNA, 32 bp, Artificial; identical to SEQ ID NO: 5231
  oligonucleotide probe

SEQ ID NO: 6715 - DNA, 32 bp, Artificial; identical to SEQ ID NO: 5231
  oligonucleotide probe

SEQ ID NO: 6716 - DNA, 32 bp, Artificial; identical to SEQ ID NO: 5220
  oligonucleotide probe

SEQ ID NO: 6717 - DNA, 32 bp, Artificial; identical to SEQ ID NO: 5220
  oligonucleotide probe

SEQ ID NO: 6718 - DNA, 32 bp, Artificial; identical to SEQ ID NO: 5239
  oligonucleotide probe

SEQ ID NO: 6719 - DNA, 32 bp, Artificial; identical to SEQ ID NO: 5239
  oligonucleotide probe

SEQ ID NO: 6720 - DNA, 32 bp, Artificial; identical to SEQ ID NO: 5159
  oligonucleotide probe

SEQ ID NO: 6721 - DNA, 32 bp, Artificial; identical to SEQ ID NO: 5159
  oligonucleotide probe

SEQ ID NO: 6722 - DNA, 32 bp, Artificial; identical to SEQ ID NO: 5241
  oligonucleotide probe

SEQ ID NO: 6723 - DNA, 32 bp, Artificial; identical to SEQ ID NO: 5241
  oligonucleotide probe

SEQ ID NO: 6724 - DNA, 32 bp, Artificial; identical to SEQ ID NO: 5177
  oligonucleotide probe

SEQ ID NO: 6725 - DNA, 32 bp, Artificial; identical to SEQ ID NO: 5177
  oligonucleotide probe

SEQ ID NO: 6726 - DNA, 32 bp, Artificial; identical to SEQ ID NO: 5223
  oligonucleotide probe

SEQ ID NO: 6727 - DNA, 32 bp, Artificial; identical to SEQ ID NO: 5223
  oligonucleotide probe

SEQ ID NO: 6728 - DNA, 32 bp, Artificial; identical to SEQ ID NO: 5224
  oligonucleotide probe

SEQ ID NO: 6729 - DNA, 32 bp, Artificial; identical to SEQ ID NO: 5224
  oligonucleotide probe

SEQ ID NO: 6730 - DNA, 32 bp, Artificial; identical to SEQ ID NO: 5242
  oligonucleotide probe

SEQ ID NO: 6731 - DNA, 32 bp, Artificial; identical to SEQ ID NO: 5242
  oligonucleotide probe

SEQ ID NO: 6732 - DNA, 32 bp, Artificial; identical to SEQ ID NO: 5229
  oligonucleotide probe

SEQ ID NO: 6733 - DNA, 32 bp, Artificial; identical to SEQ ID NO: 5229
  oligonucleotide probe

SEQ ID NO: 6734 - DNA, 32 bp, Artificial; identical to SEQ ID NO: 5223
  oligonucleotide probe

SEQ ID NO: 6735 - DNA, 32 bp, Artificial; identical to SEQ ID NO: 5223
  oligonucleotide probe

SEQ ID NO: 6736 - DNA, 32 bp, Artificial; identical to SEQ ID NO: 5410
  oligonucleotide probe

SEQ ID NO: 6737 - DNA, 32 bp, Artificial; identical to SEQ ID NO: 5410
  oligonucleotide probe

SEQ ID NO: 6738 - DNA, 32 bp, Artificial; identical to SEQ ID NO: 5140
  oligonucleotide probe

SEQ ID NO: 6739 - DNA, 32 bp, Artificial; identical to SEQ ID NO: 5140
  oligonucleotide probe

SEQ ID NO: 6740 - DNA, 32 bp, Artificial; identical to SEQ ID NO: 5220
  oligonucleotide probe

SEQ ID NO: 6741 - DNA, 32 bp, Artificial; identical to SEQ ID NO: 5220
  oligonucleotide probe

SEQ ID NO: 6742 - DNA, 32 bp, Artificial; identical to SEQ ID NO: 5219
  oligonucleotide probe

SEQ ID NO: 6743 - DNA, 32 bp, Artificial; identical to SEQ ID NO: 5219
  oligonucleotide probe

SEQ ID NO: 6744 - DNA, 32 bp, Artificial; identical to SEQ ID NO: 5253
  oligonucleotide probe

SEQ ID NO: 6745 - DNA, 32 bp, Artificial; identical to SEQ ID NO: 5253
  oligonucleotide probe

SEQ ID NO: 6746 - DNA, 32 bp, Artificial; identical to SEQ ID NO: 5399
  oligonucleotide probe

SEQ ID NO: 6747 - DNA, 32 bp, Artificial; identical to SEQ ID NO: 5399
  oligonucleotide probe

SEQ ID NO: 6748 - DNA, 32 bp, Artificial; identical to SEQ ID NO: 5219
  oligonucleotide probe

SEQ ID NO: 6749 - DNA, 32 bp, Artificial; identical to SEQ ID NO: 5219
  oligonucleotide probe

SEQ ID NO: 6750 - DNA, 32 bp, Artificial; identical to SEQ ID NO: 5220
  oligonucleotide probe

SEQ ID NO: 6751 - DNA, 32 bp, Artificial; identical to SEQ ID NO: 5220
  oligonucleotide probe

SEQ ID NO: 6752 - DNA, 32 bp, Artificial; identical to SEQ ID NO: 5411
  oligonucleotide probe

SEQ ID NO: 6753 - DNA, 32 bp, Artificial; identical to SEQ ID NO: 5411
  oligonucleotide probe

SEQ ID NO: 6754 - DNA, 32 bp, Artificial; identical to SEQ ID NO: 5223
  oligonucleotide probe

SEQ ID NO: 6755 - DNA, 32 bp, Artificial; identical to SEQ ID NO: 5223
  oligonucleotide probe

SEQ ID NO: 6756 - DNA, 32 bp, Artificial; identical to SEQ ID NO: 5218
  oligonucleotide probe

SEQ ID NO: 6757 - DNA, 32 bp, Artificial; identical to SEQ ID NO: 5240
  oligonucleotide probe

SEQ ID NO: 6758 - DNA, 32 bp, Artificial; identical to SEQ ID NO: 5221
  oligonucleotide probe

SEQ ID NO: 6759 - DNA, 32 bp, Artificial; identical to SEQ ID NO: 5241
  oligonucleotide probe

SEQ ID NO: 6760 - DNA, 32 bp, Artificial; identical to SEQ ID NO: 5222
  oligonucleotide probe

SEQ ID NO: 6761 - DNA, 32 bp, Artificial; identical to SEQ ID NO: 5223
  oligonucleotide probe

SEQ ID NO: 6762 - DNA, 32 bp, Artificial; identical to SEQ ID NO: 5224
  oligonucleotide probe

SEQ ID NO: 6763 - DNA, 32 bp, Artificial; identical to SEQ ID NO: 5231
  oligonucleotide probe

SEQ ID NO: 6764 - DNA, 32 bp, Artificial; identical to SEQ ID NO: 5220
  oligonucleotide probe

SEQ ID NO: 6765 - DNA, 32 bp, Artificial; identical to SEQ ID NO: 5219
  oligonucleotide probe

SEQ ID NO: 6766 - DNA, 32 bp, Artificial; identical to SEQ ID NO: 5221
  oligonucleotide probe

SEQ ID NO: 6767 - DNA, 32 bp, Artificial; identical to SEQ ID NO: 5221
  oligonucleotide probe

SEQ ID NO: 6768 - DNA, 32 bp, Artificial; identical to SEQ ID NO: 5218
  oligonucleotide probe

SEQ ID NO: 6769 - DNA, 32 bp, Artificial; identical to SEQ ID NO: 5218
  oligonucleotide probe

SEQ ID NO: 6770 - DNA, 32 bp, Artificial; identical to SEQ ID NO: 5253
  oligonucleotide probe

SEQ ID NO: 6771 - DNA, 32 bp, Artificial; identical to SEQ ID NO: 5253
  oligonucleotide probe

SEQ ID NO: 6772 - DNA, 32 bp, Artificial; identical to SEQ ID NO: 5140
  oligonucleotide probe

SEQ ID NO: 6773 - DNA, 32 bp, Artificial; identical to SEQ ID NO: 5140
  oligonucleotide probe

SEQ ID NO: 6774 - DNA, 32 bp, Artificial; identical to SEQ ID NO: 5177
  oligonucleotide probe

SEQ ID NO: 6775 - DNA, 32 bp, Artificial; identical to SEQ ID NO: 5177
  oligonucleotide probe

SEQ ID NO: 6776 - DNA, 32 bp, Artificial; identical to SEQ ID NO: 5399
  oligonucleotide probe

SEQ ID NO: 6777 - DNA, 32 bp, Artificial; identical to SEQ ID NO: 5399
  oligonucleotide probe

SEQ ID NO: 6778 - DNA, 32 bp, Artificial; identical to SEQ ID NO: 5229
  oligonucleotide probe

SEQ ID NO: 6779 - DNA, 32 bp, Artificial; identical to SEQ ID NO: 5229
  oligonucleotide probe

SEQ ID NO: 6780 - DNA, 32 bp, Artificial; identical to SEQ ID NO: 5133
  oligonucleotide probe

SEQ ID NO: 6781 - DNA, 32 bp, Artificial; identical to SEQ ID NO: 5133
  oligonucleotide probe

SEQ ID NO: 6782 - DNA, 32 bp, Artificial; identical to SEQ ID NO: 5222
  oligonucleotide probe

SEQ ID NO: 6783 - DNA, 32 bp, Artificial; identical to SEQ ID NO: 5222
  oligonucleotide probe

SEQ ID NO: 6784 - DNA, 32 bp, Artificial; identical to SEQ ID NO: 5195
  oligonucleotide probe

SEQ ID NO: 6785 - DNA, 32 bp, Artificial; identical to SEQ ID NO: 5195
  oligonucleotide probe

SEQ ID NO: 6786 - DNA, 32 bp, Artificial; identical to SEQ ID NO: 5399
  oligonucleotide probe

SEQ ID NO: 6787 - DNA, 32 bp, Artificial; identical to SEQ ID NO: 5399
  oligonucleotide probe

SEQ ID NO: 6788 - DNA, 32 bp, Artificial; identical to SEQ ID NO: 5137
  oligonucleotide probe

SEQ ID NO: 6789 - DNA, 32 bp, Artificial; identical to SEQ ID NO: 5137
  oligonucleotide probe

SEQ ID NO: 6790 - DNA, 32 bp, Artificial; identical to SEQ ID NO: 5141
  oligonucleotide probe

SEQ ID NO: 6791 - DNA, 32 bp, Artificial; identical to SEQ ID NO: 5141
  oligonucleotide probe

SEQ ID NO: 6792 - DNA, 32 bp, Artificial; identical to SEQ ID NO: 5135
  oligonucleotide probe

SEQ ID NO: 6793 - DNA, 32 bp, Artificial; identical to SEQ ID NO: 5135
  oligonucleotide probe

SEQ ID NO: 6794 - DNA, 32 bp, Artificial; identical to SEQ ID NO: 5133
  oligonucleotide probe

SEQ ID NO: 6795 - DNA, 32 bp, Artificial; identical to SEQ ID NO: 5133
  oligonucleotide probe

SEQ ID NO: 6796 - DNA, 32 bp, Artificial; identical to SEQ ID NO: 5231
  oligonucleotide probe

SEQ ID NO: 6797 - DNA, 32 bp, Artificial; identical to SEQ ID NO: 5231
  oligonucleotide probe

SEQ ID NO: 6798 - DNA, 32 bp, Artificial; identical to SEQ ID NO: 5242
  oligonucleotide probe

SEQ ID NO: 6799 - DNA, 32 bp, Artificial; identical to SEQ ID NO: 5242
  oligonucleotide probe

SEQ ID NO: 6800 - DNA, 32 bp, Artificial; identical to SEQ ID NO: 5410
  oligonucleotide probe

SEQ ID NO: 6801 - DNA, 32 bp, Artificial; identical to SEQ ID NO: 5410
  oligonucleotide probe

SEQ ID NO: 6802 - DNA, 32 bp, Artificial; identical to SEQ ID NO: 5239
  oligonucleotide probe

SEQ ID NO: 6803 - DNA, 32 bp, Artificial; identical to SEQ ID NO: 5239
  oligonucleotide probe

SEQ ID NO: 6804 - DNA, 32 bp, Artificial; identical to SEQ ID NO: 5416
  oligonucleotide probe

SEQ ID NO: 6805 - DNA, 32 bp, Artificial; identical to SEQ ID NO: 5416
  oligonucleotide probe

SEQ ID NO: 6806 - DNA, 32 bp, Artificial; identical to SEQ ID NO: 5138
  oligonucleotide probe

SEQ ID NO: 6807 - DNA, 32 bp, Artificial; identical to SEQ ID NO: 5138
  oligonucleotide probe

SEQ ID NO: 6808 - DNA, 32 bp, Artificial; identical to SEQ ID NO: 5133
  oligonucleotide probe

SEQ ID NO: 6809 - DNA, 32 bp, Artificial; identical to SEQ ID NO: 5133
  oligonucleotide probe

SEQ ID NO: 6810 - DNA, 32 bp, Artificial; identical to SEQ ID NO: 5161
  oligonucleotide probe

SEQ ID NO: 6811 - DNA, 32 bp, Artificial; identical to SEQ ID NO: 5161
  oligonucleotide probe

SEQ ID NO: 6812 - DNA, 32 bp, Artificial; identical to SEQ ID NO: 5134
  oligonucleotide probe

SEQ ID NO: 6813 - DNA, 32 bp, Artificial; identical to SEQ ID NO: 5134
  oligonucleotide probe

SEQ ID NO: 6814 - DNA, 32 bp, Artificial; identical to SEQ ID NO: 5240
  oligonucleotide probe

SEQ ID NO: 6815 - DNA, 32 bp, Artificial; identical to SEQ ID NO: 5240
  oligonucleotide probe

SEQ ID NO: 6816 - DNA, 32 bp, Artificial; identical to SEQ ID NO: 5241
  oligonucleotide probe

SEQ ID NO: 6817 - DNA, 32 bp, Artificial; identical to SEQ ID NO: 5241
  oligonucleotide probe

SEQ ID NO: 6818 - DNA, 32 bp, Artificial; identical to SEQ ID NO: 5217
  oligonucleotide probe

SEQ ID NO: 6819 - DNA, 32 bp, Artificial; identical to SEQ ID NO: 5217
  oligonucleotide probe

SEQ ID NO: 6820 - DNA, 32 bp, Artificial; identical to SEQ ID NO: 5584
  oligonucleotide probe

SEQ ID NO: 6821 - DNA, 32 bp, Artificial; identical to SEQ ID NO: 5584
  oligonucleotide probe

SEQ ID NO: 6822 - DNA, 32 bp, Artificial; identical to SEQ ID NO: 5135
  oligonucleotide probe

SEQ ID NO: 6823 - DNA, 32 bp, Artificial; identical to SEQ ID NO: 5135
  oligonucleotide probe

SEQ ID NO: 6824 - DNA, 32 bp, Artificial; identical to SEQ ID NO: 5399
  oligonucleotide probe

SEQ ID NO: 6825 - DNA, 32 bp, Artificial; identical to SEQ ID NO: 5399
  oligonucleotide probe

SEQ ID NO: 6826 - DNA, 32 bp, Artificial; identical to SEQ ID NO: 5141
  oligonucleotide probe

SEQ ID NO: 6827 - DNA, 32 bp, Artificial; identical to SEQ ID NO: 5141
  oligonucleotide probe

SEQ ID NO: 6828 - DNA, 32 bp, Artificial; identical to SEQ ID NO: 5163
  oligonucleotide probe

SEQ ID NO: 6829 - DNA, 32 bp, Artificial; identical to SEQ ID NO: 5163
  oligonucleotide probe

SEQ ID NO: 6830 - DNA, 32 bp, Artificial; identical to SEQ ID NO: 5171
  oligonucleotide probe

SEQ ID NO: 6831 - DNA, 32 bp, Artificial; identical to SEQ ID NO: 5171
  oligonucleotide probe

SEQ ID NO: 6832 - DNA, 32 bp, Artificial; identical to SEQ ID NO: 5136
  oligonucleotide probe

SEQ ID NO: 6833 - DNA, 32 bp, Artificial; identical to SEQ ID NO: 5136
  oligonucleotide probe

SEQ ID NO: 6834 - DNA, 32 bp, Artificial; identical to SEQ ID NO: 5137
  oligonucleotide probe

SEQ ID NO: 6835 - DNA, 32 bp, Artificial; identical to SEQ ID NO: 5137
  oligonucleotide probe

SEQ ID NO: 6836 - DNA, 32 bp, Artificial; identical to SEQ ID NO: 5241
  oligonucleotide probe

SEQ ID NO: 6837 - DNA, 32 bp, Artificial; identical to SEQ ID NO: 5241
  oligonucleotide probe

SEQ ID NO: 6838 - DNA, 32 bp, Artificial; identical to SEQ ID NO: 5242
  oligonucleotide probe

SEQ ID NO: 6839 - DNA, 32 bp, Artificial; identical to SEQ ID NO: 5242
  oligonucleotide probe

SEQ ID NO: 6840 - DNA, 32 bp, Artificial; identical to SEQ ID NO: 5399
  oligonucleotide probe

SEQ ID NO: 6841 - DNA, 32 bp, Artificial; identical to SEQ ID NO: 5399
  oligonucleotide probe

SEQ ID NO: 6842 - DNA, 32 bp, Artificial; identical to SEQ ID NO: 5416
  oligonucleotide probe

SEQ ID NO: 6843 - DNA, 32 bp, Artificial; identical to SEQ ID NO: 5416
  oligonucleotide probe

SEQ ID NO: 6844 - DNA, 32 bp, Artificial; identical to SEQ ID NO: 5177
  oligonucleotide probe

SEQ ID NO: 6845 - DNA, 32 bp, Artificial; identical to SEQ ID NO: 5177
  oligonucleotide probe

SEQ ID NO: 6846 - DNA, 32 bp, Artificial; identical to SEQ ID NO: 5239
  oligonucleotide probe

SEQ ID NO: 6847 - DNA, 32 bp, Artificial; identical to SEQ ID NO: 5239
  oligonucleotide probe

SEQ ID NO: 6848 - DNA, 32 bp, Artificial; identical to SEQ ID NO: 6131
  oligonucleotide probe

SEQ ID NO: 6849 - DNA, 32 bp, Artificial; identical to SEQ ID NO: 6131
  oligonucleotide probe

SEQ ID NO: 6850 - DNA, 32 bp, Artificial; identical to SEQ ID NO: 5239
  oligonucleotide probe

SEQ ID NO: 6851 - DNA, 32 bp, Artificial; identical to SEQ ID NO: 5239
  oligonucleotide probe

SEQ ID NO: 6852 - DNA, 32 bp, Artificial; identical to SEQ ID NO: 5133
  oligonucleotide probe

SEQ ID NO: 6853 - DNA, 32 bp, Artificial; identical to SEQ ID NO: 5133
  oligonucleotide probe

SEQ ID NO: 6854 - DNA, 32 bp, Artificial; identical to SEQ ID NO: 5163
  oligonucleotide probe

SEQ ID NO: 6855 - DNA, 32 bp, Artificial; identical to SEQ ID NO: 5163
  oligonucleotide probe

SEQ ID NO: 6856 - DNA, 32 bp, Artificial; identical to SEQ ID NO: 5171
  oligonucleotide probe

SEQ ID NO: 6857 - DNA, 32 bp, Artificial; identical to SEQ ID NO: 5171
  oligonucleotide probe

SEQ ID NO: 6858 - DNA, 32 bp, Artificial; identical to SEQ ID NO: 5138
  oligonucleotide probe

SEQ ID NO: 6859 - DNA, 32 bp, Artificial; identical to SEQ ID NO: 5138
  oligonucleotide probe

SEQ ID NO: 6860 - DNA, 32 bp, Artificial; identical to SEQ ID NO: 5133
  oligonucleotide probe

SEQ ID NO: 6861 - DNA, 32 bp, Artificial; identical to SEQ ID NO: 5133
  oligonucleotide probe

SEQ ID NO: 6862 - DNA, 32 bp, Artificial; identical to SEQ ID NO: 5195
  oligonucleotide probe

SEQ ID NO: 6863 - DNA, 32 bp, Artificial; identical to SEQ ID NO: 5195
  oligonucleotide probe

SEQ ID NO: 6864 - DNA, 32 bp, Artificial; identical to SEQ ID NO: 5159
  oligonucleotide probe

SEQ ID NO: 6865 - DNA, 32 bp, Artificial; identical to SEQ ID NO: 5159
  oligonucleotide probe

SEQ ID NO: 6866 - DNA, 32 bp, Artificial; identical to SEQ ID NO: 5160
  oligonucleotide probe

SEQ ID NO: 6867 - DNA, 32 bp, Artificial; identical to SEQ ID NO: 5160
  oligonucleotide probe

SEQ ID NO: 6868 - DNA, 32 bp, Artificial; identical to SEQ ID NO: 5253
  oligonucleotide probe

SEQ ID NO: 6869 - DNA, 32 bp, Artificial; identical to SEQ ID NO: 5253
  oligonucleotide probe

SEQ ID NO: 6870 - DNA, 32 bp, Artificial; identical to SEQ ID NO: 5195
  oligonucleotide probe

SEQ ID NO: 6871 - DNA, 32 bp, Artificial; identical to SEQ ID NO: 5195
  oligonucleotide probe

SEQ ID NO: 6872 - DNA, 32 bp, Artificial; identical to SEQ ID NO: 5540
  oligonucleotide probe

SEQ ID NO: 6873 - DNA, 32 bp, Artificial; identical to SEQ ID NO: 5540
  oligonucleotide probe

SEQ ID NO: 6874 - DNA, 32 bp, Artificial; identical to SEQ ID NO: 5411
  oligonucleotide probe

SEQ ID NO: 6875 - DNA, 32 bp, Artificial; identical to SEQ ID NO: 5411
  oligonucleotide probe

SEQ ID NO: 6876 - DNA, 32 bp, Artificial; identical to SEQ ID NO: 5159
  oligonucleotide probe

SEQ ID NO: 6877 - DNA, 32 bp, Artificial; identical to SEQ ID NO: 5159
  oligonucleotide probe

SEQ ID NO: 6878 - DNA, 32 bp, Artificial; identical to SEQ ID NO: 5239
  oligonucleotide probe

SEQ ID NO: 6879 - DNA, 32 bp, Artificial; identical to SEQ ID NO: 5239
  oligonucleotide probe

SEQ ID NO: 6880 - DNA, 32 bp, Artificial; identical to SEQ ID NO: 5410
  oligonucleotide probe

SEQ ID NO: 6881 - DNA, 32 bp, Artificial; identical to SEQ ID NO: 5410
  oligonucleotide probe

SEQ ID NO: 6882 - DNA, 32 bp, Artificial; identical to SEQ ID NO: 5136
  oligonucleotide probe

SEQ ID NO: 6883 - DNA, 32 bp, Artificial; identical to SEQ ID NO: 5136
  oligonucleotide probe

SEQ ID NO: 6884 - DNA, 32 bp, Artificial; identical to SEQ ID NO: 5218
  oligonucleotide probe

SEQ ID NO: 6885 - DNA, 32 bp, Artificial; identical to SEQ ID NO: 5218
  oligonucleotide probe

SEQ ID NO: 6886 - DNA, 32 bp, Artificial; identical to SEQ ID NO: 5220
  oligonucleotide probe

SEQ ID NO: 6887 - DNA, 32 bp, Artificial; identical to SEQ ID NO: 5220
  oligonucleotide probe

SEQ ID NO: 6888 - DNA, 32 bp, Artificial; identical to SEQ ID NO: 5195
  oligonucleotide probe

SEQ ID NO: 6889 - DNA, 32 bp, Artificial; identical to SEQ ID NO: 5195
  oligonucleotide probe

SEQ ID NO: 6890 - DNA, 32 bp, Artificial; identical to SEQ ID NO: 5140
  oligonucleotide probe

SEQ ID NO: 6891 - DNA, 32 bp, Artificial; identical to SEQ ID NO: 5140
  oligonucleotide probe

SEQ ID NO: 6892 - DNA, 32 bp, Artificial; identical to SEQ ID NO: 5171
  oligonucleotide probe

SEQ ID NO: 6893 - DNA, 32 bp, Artificial; identical to SEQ ID NO: 5171
  oligonucleotide probe

SEQ ID NO: 6894 - DNA, 32 bp, Artificial; identical to SEQ ID NO: 5135
  oligonucleotide probe

SEQ ID NO: 6895 - DNA, 32 bp, Artificial; identical to SEQ ID NO: 5135
  oligonucleotide probe

SEQ ID NO: 6896 - DNA, 32 bp, Artificial; identical to SEQ ID NO: 5242
  oligonucleotide probe

SEQ ID NO: 6897 - DNA, 32 bp, Artificial; identical to SEQ ID NO: 5242
  oligonucleotide probe

SEQ ID NO: 6898 - DNA, 32 bp, Artificial; identical to SEQ ID NO: 5220
  oligonucleotide probe

SEQ ID NO: 6899 - DNA, 32 bp, Artificial; identical to SEQ ID NO: 5220
  oligonucleotide probe

SEQ ID NO: 6900 - DNA, 32 bp, Artificial; identical to SEQ ID NO: 5610
  oligonucleotide probe

SEQ ID NO: 6901 - DNA, 32 bp, Artificial; identical to SEQ ID NO: 5610
  oligonucleotide probe

SEQ ID NO: 6902 - DNA, 32 bp, Artificial; identical to SEQ ID NO: 5242
  oligonucleotide probe

SEQ ID NO: 6903 - DNA, 32 bp, Artificial; identical to SEQ ID NO: 5242
  oligonucleotide probe

SEQ ID NO: 6904 - DNA, 32 bp, Artificial; identical to SEQ ID NO: 5223
  oligonucleotide probe

SEQ ID NO: 6905 - DNA, 32 bp, Artificial; identical to SEQ ID NO: 5223
  oligonucleotide probe

SEQ ID NO: 6906 - DNA, 32 bp, Artificial; identical to SEQ ID NO: 5185
  oligonucleotide probe

SEQ ID NO: 6907 - DNA, 32 bp, Artificial; identical to SEQ ID NO: 5185
  oligonucleotide probe

SEQ ID NO: 6908 - DNA, 32 bp, Artificial; identical to SEQ ID NO: 5550
  oligonucleotide probe

SEQ ID NO: 6909 - DNA, 32 bp, Artificial; identical to SEQ ID NO: 5550
  oligonucleotide probe

SEQ ID NO: 6910 - DNA, 32 bp, Artificial; identical to SEQ ID NO: 5141
  oligonucleotide probe

SEQ ID NO: 6911 - DNA, 32 bp, Artificial; identical to SEQ ID NO: 5141
  oligonucleotide probe

SEQ ID NO: 6912 - DNA, 32 bp, Artificial; identical to SEQ ID NO: 5416
  oligonucleotide probe

SEQ ID NO: 6913 - DNA, 32 bp, Artificial; identical to SEQ ID NO: 5416
  oligonucleotide probe

SEQ ID NO: 6914 - DNA, 32 bp, Artificial; identical to SEQ ID NO: 5159
  oligonucleotide probe

SEQ ID NO: 6915 - DNA, 32 bp, Artificial; identical to SEQ ID NO: 5159
  oligonucleotide probe

SEQ ID NO: 6916 - DNA, 32 bp, Artificial; identical to SEQ ID NO: 5161
  oligonucleotide probe

SEQ ID NO: 6917 - DNA, 32 bp, Artificial; identical to SEQ ID NO: 5161
  oligonucleotide probe

SEQ ID NO: 6918 - DNA, 32 bp, Artificial; identical to SEQ ID NO: 5410
  oligonucleotide probe

SEQ ID NO: 6919 - DNA, 32 bp, Artificial; identical to SEQ ID NO: 5410
  oligonucleotide probe

SEQ ID NO: 6920 - DNA, 32 bp, Artificial; identical to SEQ ID NO: 5241
  oligonucleotide probe

SEQ ID NO: 6921 - DNA, 32 bp, Artificial; identical to SEQ ID NO: 5241
  oligonucleotide probe

SEQ ID NO: 6922 - DNA, 32 bp, Artificial; identical to SEQ ID NO: 5240
  oligonucleotide probe

SEQ ID NO: 6923 - DNA, 32 bp, Artificial; identical to SEQ ID NO: 5240
  oligonucleotide probe

SEQ ID NO: 6924 - DNA, 32 bp, Artificial; identical to SEQ ID NO: 5253
  oligonucleotide probe

SEQ ID NO: 6925 - DNA, 32 bp, Artificial; identical to SEQ ID NO: 5253
  oligonucleotide probe

SEQ ID NO: 6926 - DNA, 32 bp, Artificial; identical to SEQ ID NO: 5231
  oligonucleotide probe

SEQ ID NO: 6927 - DNA, 32 bp, Artificial; identical to SEQ ID NO: 5231
  oligonucleotide probe

SEQ ID NO: 6928 - DNA, 32 bp, Artificial; identical to SEQ ID NO: 5232
  oligonucleotide probe

SEQ ID NO: 6929 - DNA, 32 bp, Artificial; identical to SEQ ID NO: 5232
  oligonucleotide probe

SEQ ID NO: 6930 - DNA, 32 bp, Artificial; identical to SEQ ID NO: 5137
  oligonucleotide probe

SEQ ID NO: 6931 - DNA, 32 bp, Artificial; identical to SEQ ID NO: 5137
  oligonucleotide probe

SEQ ID NO: 6932 - DNA, 32 bp, Artificial; identical to SEQ ID NO: 5232
  oligonucleotide probe

SEQ ID NO: 6933 - DNA, 32 bp, Artificial; identical to SEQ ID NO: 5232
  oligonucleotide probe

SEQ ID NO: 6934 - DNA, 32 bp, Artificial; identical to SEQ ID NO: 5138
  oligonucleotide probe

SEQ ID NO: 6935 - DNA, 32 bp, Artificial; identical to SEQ ID NO: 5138
  oligonucleotide probe

SEQ ID NO: 6936 - DNA, 32 bp, Artificial; identical to SEQ ID NO: 5185
  oligonucleotide probe

SEQ ID NO: 6937 - DNA, 32 bp, Artificial; identical to SEQ ID NO: 5185
  oligonucleotide probe

SEQ ID NO: 6938 - DNA, 32 bp, Artificial; identical to SEQ ID NO: 5171
  oligonucleotide probe

SEQ ID NO: 6939 - DNA, 32 bp, Artificial; identical to SEQ ID NO: 5171
  oligonucleotide probe

SEQ ID NO: 6940 - DNA, 32 bp, Artificial; identical to SEQ ID NO: 5136
  oligonucleotide probe

SEQ ID NO: 6941 - DNA, 32 bp, Artificial; identical to SEQ ID NO: 5136
  oligonucleotide probe

SEQ ID NO: 6942 - DNA, 32 bp, Artificial; identical to SEQ ID NO: 5160
  oligonucleotide probe

SEQ ID NO: 6943 - DNA, 32 bp, Artificial; identical to SEQ ID NO: 5160
  oligonucleotide probe

SEQ ID NO: 6944 - DNA, 32 bp, Artificial; identical to SEQ ID NO: 5195
  oligonucleotide probe

SEQ ID NO: 6945 - DNA, 32 bp, Artificial; identical to SEQ ID NO: 5195
  oligonucleotide probe

SEQ ID NO: 6946 - DNA, 32 bp, Artificial; identical to SEQ ID NO: 5140
  oligonucleotide probe

SEQ ID NO: 6947 - DNA, 32 bp, Artificial; identical to SEQ ID NO: 5140
  oligonucleotide probe

SEQ ID NO: 6948 - DNA, 32 bp, Artificial; identical to SEQ ID NO: 5171
  oligonucleotide probe

SEQ ID NO: 6949 - DNA, 32 bp, Artificial; identical to SEQ ID NO: 5171
  oligonucleotide probe

SEQ ID NO: 6950 - DNA, 32 bp, Artificial; identical to SEQ ID NO: 5171
  oligonucleotide probe

SEQ ID NO: 6951 - DNA, 32 bp, Artificial; identical to SEQ ID NO: 5171
  oligonucleotide probe

SEQ ID NO: 6952 - DNA, 32 bp, Artificial; identical to SEQ ID NO: 5399
  oligonucleotide probe

SEQ ID NO: 6953 - DNA, 32 bp, Artificial; identical to SEQ ID NO: 5399
  oligonucleotide probe

SEQ ID NO: 6954 - DNA, 32 bp, Artificial; identical to SEQ ID NO: 5253
  oligonucleotide probe

SEQ ID NO: 6955 - DNA, 32 bp, Artificial; identical to SEQ ID NO: 5253
  oligonucleotide probe

SEQ ID NO: 6956 - DNA, 32 bp, Artificial; identical to SEQ ID NO: 5229
  oligonucleotide probe

SEQ ID NO: 6957 - DNA, 32 bp, Artificial; identical to SEQ ID NO: 5229
  oligonucleotide probe

SEQ ID NO: 6958 - DNA, 32 bp, Artificial; identical to SEQ ID NO: 5218
  oligonucleotide probe

SEQ ID NO: 6959 - DNA, 32 bp, Artificial; identical to SEQ ID NO: 5218
  oligonucleotide probe

SEQ ID NO: 6960 - DNA, 32 bp, Artificial; identical to SEQ ID NO: 5219
  oligonucleotide probe

SEQ ID NO: 6961 - DNA, 32 bp, Artificial; identical to SEQ ID NO: 5219
  oligonucleotide probe

SEQ ID NO: 6962 - DNA, 32 bp, Artificial; identical to SEQ ID NO: 5140
  oligonucleotide probe

SEQ ID NO: 6963 - DNA, 32 bp, Artificial; identical to SEQ ID NO: 5140
  oligonucleotide probe

SEQ ID NO: 6964 - DNA, 32 bp, Artificial; identical to SEQ ID NO: 5544
  oligonucleotide probe

SEQ ID NO: 6965 - DNA, 32 bp, Artificial; identical to SEQ ID NO: 5544
  oligonucleotide probe

SEQ ID NO: 6966 - DNA, 32 bp, Artificial; identical to SEQ ID NO: 5185
  oligonucleotide probe

SEQ ID NO: 6967 - DNA, 32 bp, Artificial; identical to SEQ ID NO: 5185
  oligonucleotide probe

SEQ ID NO: 6968 - DNA, 32 bp, Artificial; identical to SEQ ID NO: 5224
  oligonucleotide probe

SEQ ID NO: 6969 - DNA, 32 bp, Artificial; identical to SEQ ID NO: 5224
  oligonucleotide probe

SEQ ID NO: 6970 - DNA, 32 bp, Artificial; identical to SEQ ID NO: 5159
  oligonucleotide probe

SEQ ID NO: 6971 - DNA, 32 bp, Artificial; identical to SEQ ID NO: 5159
  oligonucleotide probe

SEQ ID NO: 6972 - DNA, 32 bp, Artificial; identical to SEQ ID NO: 5410
  oligonucleotide probe

SEQ ID NO: 6973 - DNA, 32 bp, Artificial; identical to SEQ ID NO: 5410
  oligonucleotide probe

SEQ ID NO: 6974 - DNA, 32 bp, Artificial; identical to SEQ ID NO: 5160
  oligonucleotide probe

SEQ ID NO: 6975 - DNA, 32 bp, Artificial; identical to SEQ ID NO: 5160
  oligonucleotide probe

SEQ ID NO: 6976 - DNA, 32 bp, Artificial; identical to SEQ ID NO: 5195
  oligonucleotide probe

SEQ ID NO: 6977 - DNA, 32 bp, Artificial; identical to SEQ ID NO: 5195
  oligonucleotide probe

SEQ ID NO: 6978 - DNA, 32 bp, Artificial; identical to SEQ ID NO: 5229
  oligonucleotide probe

SEQ ID NO: 6979 - DNA, 32 bp, Artificial; identical to SEQ ID NO: 5229
  oligonucleotide probe

SEQ ID NO: 6980 - DNA, 32 bp, Artificial; identical to SEQ ID NO: 5134
  oligonucleotide probe

SEQ ID NO: 6981 - DNA, 32 bp, Artificial; identical to SEQ ID NO: 5134
  oligonucleotide probe

SEQ ID NO: 6982 - DNA, 32 bp, Artificial; identical to SEQ ID NO: 5177
  oligonucleotide probe

SEQ ID NO: 6983 - DNA, 32 bp, Artificial; identical to SEQ ID NO: 5177
  oligonucleotide probe

SEQ ID NO: 6984 - DNA, 32 bp, Artificial; identical to SEQ ID NO: 5163
  oligonucleotide probe

SEQ ID NO: 6985 - DNA, 32 bp, Artificial; identical to SEQ ID NO: 5163
  oligonucleotide probe

SEQ ID NO: 6986 - DNA, 32 bp, Artificial; identical to SEQ ID NO: 5177
  oligonucleotide probe

SEQ ID NO: 6987 - DNA, 32 bp, Artificial; identical to SEQ ID NO: 5177
  oligonucleotide probe

SEQ ID NO: 6988 - DNA, 32 bp, Artificial; identical to SEQ ID NO: 5141
  oligonucleotide probe

SEQ ID NO: 6989 - DNA, 32 bp, Artificial; identical to SEQ ID NO: 5141
  oligonucleotide probe

SEQ ID NO: 6990 - DNA, 32 bp, Artificial; identical to SEQ ID NO: 5185
  oligonucleotide probe

SEQ ID NO: 6991 - DNA, 32 bp, Artificial; identical to SEQ ID NO: 5185
  oligonucleotide probe

SEQ ID NO: 6992 - DNA, 32 bp, Artificial; identical to SEQ ID NO: 5240
  oligonucleotide probe

SEQ ID NO: 6993 - DNA, 32 bp, Artificial; identical to SEQ ID NO: 5240
  oligonucleotide probe

SEQ ID NO: 6994 - DNA, 32 bp, Artificial; identical to SEQ ID NO: 5137
  oligonucleotide probe

SEQ ID NO: 6995 - DNA, 32 bp, Artificial; identical to SEQ ID NO: 5137
  oligonucleotide probe

SEQ ID NO: 6996 - DNA, 32 bp, Artificial; identical to SEQ ID NO: 5222
  oligonucleotide probe

SEQ ID NO: 6997 - DNA, 32 bp, Artificial; identical to SEQ ID NO: 5222
  oligonucleotide probe

SEQ ID NO: 6998 - DNA, 32 bp, Artificial; identical to SEQ ID NO: 5229
  oligonucleotide probe

SEQ ID NO: 6999 - DNA, 32 bp, Artificial; identical to SEQ ID NO: 5229
  oligonucleotide probe

SEQ ID NO: 7000 - DNA, 32 bp, Artificial; identical to SEQ ID NO: 5240
  oligonucleotide probe

SEQ ID NO: 7001 - DNA, 32 bp, Artificial; identical to SEQ ID NO: 5240
  oligonucleotide probe

SEQ ID NO: 7002 - DNA, 32 bp, Artificial; identical to SEQ ID NO: 5177
  oligonucleotide probe

SEQ ID NO: 7003 - DNA, 32 bp, Artificial; identical to SEQ ID NO: 5177
  oligonucleotide probe

SEQ ID NO: 7004 - DNA, 32 bp, Artificial; identical to SEQ ID NO: 5240
  oligonucleotide probe

SEQ ID NO: 7005 - DNA, 32 bp, Artificial; identical to SEQ ID NO: 5240
  oligonucleotide probe

SEQ ID NO: 7006 - DNA, 32 bp, Artificial; identical to SEQ ID NO: 5138
  oligonucleotide probe

SEQ ID NO: 7007 - DNA, 32 bp, Artificial; identical to SEQ ID NO: 5138
  oligonucleotide probe

SEQ ID NO: 7008 - DNA, 32 bp, Artificial; identical to SEQ ID NO: 5240
  oligonucleotide probe

SEQ ID NO: 7009 - DNA, 32 bp, Artificial; identical to SEQ ID NO: 5240
  oligonucleotide probe

SEQ ID NO: 7010 - DNA, 32 bp, Artificial; identical to SEQ ID NO: 5138
  oligonucleotide probe

SEQ ID NO: 7011 - DNA, 32 bp, Artificial; identical to SEQ ID NO: 5138
  oligonucleotide probe

SEQ ID NO: 7012 - DNA, 32 bp, Artificial; identical to SEQ ID NO: 5221
  oligonucleotide probe

SEQ ID NO: 7013 - DNA, 32 bp, Artificial; identical to SEQ ID NO: 5221
  oligonucleotide probe

SEQ ID NO: 7014 - DNA, 32 bp, Artificial; identical to SEQ ID NO: 5135
  oligonucleotide probe

SEQ ID NO: 7015 - DNA, 32 bp, Artificial; identical to SEQ ID NO: 5135
  oligonucleotide probe

SEQ ID NO: 7016 - DNA, 32 bp, Artificial; identical to SEQ ID NO: 5241
  oligonucleotide probe

SEQ ID NO: 7017 - DNA, 32 bp, Artificial; identical to SEQ ID NO: 5241
  oligonucleotide probe

SEQ ID NO: 7018 - DNA, 32 bp, Artificial; identical to SEQ ID NO: 5411
  oligonucleotide probe

SEQ ID NO: 7019 - DNA, 32 bp, Artificial; identical to SEQ ID NO: 5411
  oligonucleotide probe

SEQ ID NO: 7020 - DNA, 32 bp, Artificial; identical to SEQ ID NO: 5163
  oligonucleotide probe

SEQ ID NO: 7021 - DNA, 32 bp, Artificial; identical to SEQ ID NO: 5163
  oligonucleotide probe

SEQ ID NO: 7022 - DNA, 32 bp, Artificial; identical to SEQ ID NO: 5231
  oligonucleotide probe

SEQ ID NO: 7023 - DNA, 32 bp, Artificial; identical to SEQ ID NO: 5231
  oligonucleotide probe

SEQ ID NO: 7024 - DNA, 32 bp, Artificial; identical to SEQ ID NO: 5177
  oligonucleotide probe

SEQ ID NO: 7025 - DNA, 32 bp, Artificial; identical to SEQ ID NO: 5177
  oligonucleotide probe

SEQ ID NO: 7026 - DNA, 32 bp, Artificial; identical to SEQ ID NO: 5159
  oligonucleotide probe

SEQ ID NO: 7027 - DNA, 32 bp, Artificial; identical to SEQ ID NO: 5159
  oligonucleotide probe

SEQ ID NO: 7028 - DNA, 32 bp, Artificial; identical to SEQ ID NO: 5163
  oligonucleotide probe

SEQ ID NO: 7029 - DNA, 32 bp, Artificial; identical to SEQ ID NO: 5163
  oligonucleotide probe

SEQ ID NO: 7030 - DNA, 32 bp, Artificial; identical to SEQ ID NO: 5161
  oligonucleotide probe

SEQ ID NO: 7031 - DNA, 32 bp, Artificial; identical to SEQ ID NO: 5161
  oligonucleotide probe

SEQ ID NO: 7032 - DNA, 32 bp, Artificial; identical to SEQ ID NO: 5221
  oligonucleotide probe

SEQ ID NO: 7033 - DNA, 32 bp, Artificial; identical to SEQ ID NO: 5221
  oligonucleotide probe

SEQ ID NO: 7034 - DNA, 32 bp, Artificial; identical to SEQ ID NO: 5232
  oligonucleotide probe

SEQ ID NO: 7035 - DNA, 32 bp, Artificial; identical to SEQ ID NO: 5232
  oligonucleotide probe

SEQ ID NO: 7036 - DNA, 32 bp, Artificial; identical to SEQ ID NO: 5133
  oligonucleotide probe

SEQ ID NO: 7037 - DNA, 32 bp, Artificial; identical to SEQ ID NO: 5133
  oligonucleotide probe

SEQ ID NO: 7038 - DNA, 32 bp, Artificial; identical to SEQ ID NO: 5538
  oligonucleotide probe

SEQ ID NO: 7039 - DNA, 32 bp, Artificial; identical to SEQ ID NO: 5538
  oligonucleotide probe

SEQ ID NO: 7040 - DNA, 32 bp, Artificial; identical to SEQ ID NO: 5229
  oligonucleotide probe

SEQ ID NO: 7041 - DNA, 32 bp, Artificial; identical to SEQ ID NO: 5229
  oligonucleotide probe

SEQ ID NO: 7042 - DNA, 32 bp, Artificial; identical to SEQ ID NO: 5161
  oligonucleotide probe

SEQ ID NO: 7043 - DNA, 32 bp, Artificial; identical to SEQ ID NO: 5161
  oligonucleotide probe

SEQ ID NO: 7044 - DNA, 32 bp, Artificial; identical to SEQ ID NO: 5221
  oligonucleotide probe

SEQ ID NO: 7045 - DNA, 32 bp, Artificial; identical to SEQ ID NO: 5221
  oligonucleotide probe

SEQ ID NO: 7046 - DNA, 32 bp, Artificial; identical to SEQ ID NO: 5222
  oligonucleotide probe

SEQ ID NO: 7047 - DNA, 32 bp, Artificial; identical to SEQ ID NO: 5222
  oligonucleotide probe

SEQ ID NO: 7048 - DNA, 32 bp, Artificial; identical to SEQ ID NO: 5177
  oligonucleotide probe

SEQ ID NO: 7049 - DNA, 32 bp, Artificial; identical to SEQ ID NO: 5177
  oligonucleotide probe

SEQ ID NO: 7050 - DNA, 32 bp, Artificial; identical to SEQ ID NO: 5242
  oligonucleotide probe

SEQ ID NO: 7051 - DNA, 32 bp, Artificial; identical to SEQ ID NO: 5242
  oligonucleotide probe

SEQ ID NO: 7052 - DNA, 32 bp, Artificial; identical to SEQ ID NO: 5241
  oligonucleotide probe

SEQ ID NO: 7053 - DNA, 32 bp, Artificial; identical to SEQ ID NO: 5241
  oligonucleotide probe

SEQ ID NO: 7054 - DNA, 32 bp, Artificial; identical to SEQ ID NO: 5217
  oligonucleotide probe

SEQ ID NO: 7055 - DNA, 32 bp, Artificial; identical to SEQ ID NO: 5217
  oligonucleotide probe

SEQ ID NO: 7056 - DNA, 32 bp, Artificial; identical to SEQ ID NO: 5411
  oligonucleotide probe

SEQ ID NO: 7057 - DNA, 32 bp, Artificial; identical to SEQ ID NO: 5411
  oligonucleotide probe

SEQ ID NO: 7058 - DNA, 32 bp, Artificial; identical to SEQ ID NO: 5195
  oligonucleotide probe

SEQ ID NO: 7059 - DNA, 32 bp, Artificial; identical to SEQ ID NO: 5195
  oligonucleotide probe

SEQ ID NO: 7060 - DNA, 32 bp, Artificial; identical to SEQ ID NO: 5218
  oligonucleotide probe

SEQ ID NO: 7061 - DNA, 32 bp, Artificial; identical to SEQ ID NO: 5218
  oligonucleotide probe

SEQ ID NO: 7062 - DNA, 32 bp, Artificial; identical to SEQ ID NO: 5231
  oligonucleotide probe

SEQ ID NO: 7063 - DNA, 32 bp, Artificial; identical to SEQ ID NO: 5231
  oligonucleotide probe

SEQ ID NO: 7064 - DNA, 32 bp, Artificial; identical to SEQ ID NO: 6145
  oligonucleotide probe

SEQ ID NO: 7065 - DNA, 32 bp, Artificial; identical to SEQ ID NO: 6145
  oligonucleotide probe

SEQ ID NO: 7066 - DNA, 32 bp, Artificial; identical to SEQ ID NO: 5171
  oligonucleotide probe

SEQ ID NO: 7067 - DNA, 32 bp, Artificial; identical to SEQ ID NO: 5171
  oligonucleotide probe

SEQ ID NO: 7068 - DNA, 32 bp, Artificial; identical to SEQ ID NO: 5163
  oligonucleotide probe

SEQ ID NO: 7069 - DNA, 32 bp, Artificial; identical to SEQ ID NO: 5163
  oligonucleotide probe

SEQ ID NO: 7070 - DNA, 32 bp, Artificial; identical to SEQ ID NO: 5163
  oligonucleotide probe

SEQ ID NO: 7071 - DNA, 32 bp, Artificial; identical to SEQ ID NO: 5163
  oligonucleotide probe

SEQ ID NO: 7072 - DNA, 32 bp, Artificial; identical to SEQ ID NO: 5229
  oligonucleotide probe

SEQ ID NO: 7073 - DNA, 32 bp, Artificial; identical to SEQ ID NO: 5229
  oligonucleotide probe

SEQ ID NO: 7074 - DNA, 32 bp, Artificial; identical to SEQ ID NO: 5223
  oligonucleotide probe

SEQ ID NO: 7075 - DNA, 32 bp, Artificial; identical to SEQ ID NO: 5223
  oligonucleotide probe

SEQ ID NO: 7076 - DNA, 32 bp, Artificial; identical to SEQ ID NO: 5141
  oligonucleotide probe

SEQ ID NO: 7077 - DNA, 32 bp, Artificial; identical to SEQ ID NO: 5141
  oligonucleotide probe

SEQ ID NO: 7078 - DNA, 32 bp, Artificial; identical to SEQ ID NO: 5231
  oligonucleotide probe

SEQ ID NO: 7079 - DNA, 32 bp, Artificial; identical to SEQ ID NO: 5231
  oligonucleotide probe

SEQ ID NO: 7080 - DNA, 32 bp, Artificial; identical to SEQ ID NO: 5195
  oligonucleotide probe

SEQ ID NO: 7081 - DNA, 32 bp, Artificial; identical to SEQ ID NO: 5195
  oligonucleotide probe

SEQ ID NO: 7082 - DNA, 32 bp, Artificial; identical to SEQ ID NO: 5241
  oligonucleotide probe

SEQ ID NO: 7083 - DNA, 32 bp, Artificial; identical to SEQ ID NO: 5241
  oligonucleotide probe

SEQ ID NO: 7084 - DNA, 32 bp, Artificial; identical to SEQ ID NO: 5159
  oligonucleotide probe

SEQ ID NO: 7085 - DNA, 32 bp, Artificial; identical to SEQ ID NO: 5159
  oligonucleotide probe

SEQ ID NO: 7086 - DNA, 32 bp, Artificial; identical to SEQ ID NO: 5134
  oligonucleotide probe

SEQ ID NO: 7087 - DNA, 32 bp, Artificial; identical to SEQ ID NO: 5134
  oligonucleotide probe

SEQ ID NO: 7088 - DNA, 32 bp, Artificial; identical to SEQ ID NO: 5550
  oligonucleotide probe

SEQ ID NO: 7089 - DNA, 32 bp, Artificial; identical to SEQ ID NO: 5550
  oligonucleotide probe

SEQ ID NO: 7090 - DNA, 32 bp, Artificial; identical to SEQ ID NO: 5141
  oligonucleotide probe

SEQ ID NO: 7091 - DNA, 32 bp, Artificial; identical to SEQ ID NO: 5141
  oligonucleotide probe

SEQ ID NO: 7092 - DNA, 32 bp, Artificial; identical to SEQ ID NO: 5708
  oligonucleotide probe

SEQ ID NO: 7093 - DNA, 32 bp, Artificial; identical to SEQ ID NO: 5708
  oligonucleotide probe

SEQ ID NO: 7094 - DNA, 32 bp, Artificial; identical to SEQ ID NO: 5219
  oligonucleotide probe

SEQ ID NO: 7095 - DNA, 32 bp, Artificial; identical to SEQ ID NO: 5219
  oligonucleotide probe

SEQ ID NO: 7096 - DNA, 32 bp, Artificial; identical to SEQ ID NO: 5217
  oligonucleotide probe

SEQ ID NO: 7097 - DNA, 32 bp, Artificial; identical to SEQ ID NO: 5217
  oligonucleotide probe

SEQ ID NO: 7098 - DNA, 32 bp, Artificial; identical to SEQ ID NO: 5136
  oligonucleotide probe

SEQ ID NO: 7099 - DNA, 32 bp, Artificial; identical to SEQ ID NO: 5136
  oligonucleotide probe

SEQ ID NO: 7100 - DNA, 32 bp, Artificial; identical to SEQ ID NO: 5140
  oligonucleotide probe

SEQ ID NO: 7101 - DNA, 32 bp, Artificial; identical to SEQ ID NO: 5140
  oligonucleotide probe

SEQ ID NO: 7102 - DNA, 32 bp, Artificial; identical to SEQ ID NO: 5135
  oligonucleotide probe

SEQ ID NO: 7103 - DNA, 32 bp, Artificial; identical to SEQ ID NO: 5135
  oligonucleotide probe

SEQ ID NO: 7104 - DNA, 32 bp, Artificial; identical to SEQ ID NO: 5160
  oligonucleotide probe

SEQ ID NO: 7105 - DNA, 32 bp, Artificial; identical to SEQ ID NO: 5160
  oligonucleotide probe

SEQ ID NO: 7106 - DNA, 32 bp, Artificial; identical to SEQ ID NO: 5241
  oligonucleotide probe

SEQ ID NO: 7107 - DNA, 32 bp, Artificial; identical to SEQ ID NO: 5241
  oligonucleotide probe

SEQ ID NO: 7108 - DNA, 32 bp, Artificial; identical to SEQ ID NO: 5161
  oligonucleotide probe

SEQ ID NO: 7109 - DNA, 32 bp, Artificial; identical to SEQ ID NO: 5161
  oligonucleotide probe

SEQ ID NO: 7110 - DNA, 32 bp, Artificial; identical to SEQ ID NO: 5136
  oligonucleotide probe

SEQ ID NO: 7111 - DNA, 32 bp, Artificial; identical to SEQ ID NO: 5136
  oligonucleotide probe

SEQ ID NO: 7112 - DNA, 32 bp, Artificial; identical to SEQ ID NO: 5160
  oligonucleotide probe

SEQ ID NO: 7113 - DNA, 32 bp, Artificial; identical to SEQ ID NO: 5160
  oligonucleotide probe

SEQ ID NO: 7114 - DNA, 32 bp, Artificial; identical to SEQ ID NO: 5138
  oligonucleotide probe

SEQ ID NO: 7115 - DNA, 32 bp, Artificial; identical to SEQ ID NO: 5138
  oligonucleotide probe

SEQ ID NO: 7116 - DNA, 32 bp, Artificial; identical to SEQ ID NO: 5416
  oligonucleotide probe

SEQ ID NO: 7117 - DNA, 32 bp, Artificial; identical to SEQ ID NO: 5416
  oligonucleotide probe

SEQ ID NO: 7118 - DNA, 32 bp, Artificial; identical to SEQ ID NO: 5217
  oligonucleotide probe

SEQ ID NO: 7119 - DNA, 32 bp, Artificial; identical to SEQ ID NO: 5217
  oligonucleotide probe

SEQ ID NO: 7120 - DNA, 32 bp, Artificial; identical to SEQ ID NO: 5171
  oligonucleotide probe

SEQ ID NO: 7121 - DNA, 32 bp, Artificial; identical to SEQ ID NO: 5171
  oligonucleotide probe

SEQ ID NO: 7122 - DNA, 32 bp, Artificial; identical to SEQ ID NO: 5399
  oligonucleotide probe

SEQ ID NO: 7123 - DNA, 32 bp, Artificial; identical to SEQ ID NO: 5399
  oligonucleotide probe

SEQ ID NO: 7124 - DNA, 32 bp, Artificial; identical to SEQ ID NO: 5410
  oligonucleotide probe

SEQ ID NO: 7125 - DNA, 32 bp, Artificial; identical to SEQ ID NO: 5410
  oligonucleotide probe

SEQ ID NO: 7126 - DNA, 32 bp, Artificial; identical to SEQ ID NO: 5594
  oligonucleotide probe

SEQ ID NO: 7127 - DNA, 32 bp, Artificial; identical to SEQ ID NO: 5594
  oligonucleotide probe

SEQ ID NO: 7128 - DNA, 32 bp, Artificial; identical to SEQ ID NO: 6131
  oligonucleotide probe

SEQ ID NO: 7129 - DNA, 32 bp, Artificial; identical to SEQ ID NO: 6131
  oligonucleotide probe

SEQ ID NO: 7130 - DNA, 32 bp, Artificial; identical to SEQ ID NO: 5133
  oligonucleotide probe

SEQ ID NO: 7131 - DNA, 32 bp, Artificial; identical to SEQ ID NO: 5133
  oligonucleotide probe

SEQ ID NO: 7132 - DNA, 32 bp, Artificial; identical to SEQ ID NO: 5232
  oligonucleotide probe

SEQ ID NO: 7133 - DNA, 32 bp, Artificial; identical to SEQ ID NO: 5232
  oligonucleotide probe

SEQ ID NO: 7134 - DNA, 32 bp, Artificial; identical to SEQ ID NO: 5185
  oligonucleotide probe

SEQ ID NO: 7135 - DNA, 32 bp, Artificial; identical to SEQ ID NO: 5185
  oligonucleotide probe

SEQ ID NO: 7136 - DNA, 32 bp, Artificial; identical to SEQ ID NO: 5160
  oligonucleotide probe

SEQ ID NO: 7137 - DNA, 32 bp, Artificial; identical to SEQ ID NO: 5160
  oligonucleotide probe

SEQ ID NO: 7138 - DNA, 32 bp, Artificial; identical to SEQ ID NO: 5161
  oligonucleotide probe

SEQ ID NO: 7139 - DNA, 32 bp, Artificial; identical to SEQ ID NO: 5161
  oligonucleotide probe

SEQ ID NO: 7140 - DNA, 32 bp, Artificial; identical to SEQ ID NO: 5411
  oligonucleotide probe

SEQ ID NO: 7141 - DNA, 32 bp, Artificial; identical to SEQ ID NO: 5411
  oligonucleotide probe

SEQ ID NO: 7142 - DNA, 32 bp, Artificial; identical to SEQ ID NO: 5554
  oligonucleotide probe

SEQ ID NO: 7143 - DNA, 32 bp, Artificial; identical to SEQ ID NO: 5554
  oligonucleotide probe

SEQ ID NO: 7144 - DNA, 32 bp, Artificial; identical to SEQ ID NO: 5411
  oligonucleotide probe

SEQ ID NO: 7145 - DNA, 32 bp, Artificial; identical to SEQ ID NO: 5411
  oligonucleotide probe

SEQ ID NO: 7146 - DNA, 32 bp, Artificial; identical to SEQ ID NO: 5253
  oligonucleotide probe

SEQ ID NO: 7147 - DNA, 32 bp, Artificial; identical to SEQ ID NO: 5253
  oligonucleotide probe

SEQ ID NO: 7148 - DNA, 32 bp, Artificial; identical to SEQ ID NO: 5411
  oligonucleotide probe

SEQ ID NO: 7149 - DNA, 32 bp, Artificial; identical to SEQ ID NO: 5411
  oligonucleotide probe

SEQ ID NO: 7150 - DNA, 32 bp, Artificial; identical to SEQ ID NO: 5141
  oligonucleotide probe

SEQ ID NO: 7151 - DNA, 32 bp, Artificial; identical to SEQ ID NO: 5141
  oligonucleotide probe

SEQ ID NO: 7152 - DNA, 32 bp, Artificial; identical to SEQ ID NO: 5161
  oligonucleotide probe

SEQ ID NO: 7153 - DNA, 32 bp, Artificial; identical to SEQ ID NO: 5161
  oligonucleotide probe

SEQ ID NO: 7154 - DNA, 32 bp, Artificial; identical to SEQ ID NO: 5222
  oligonucleotide probe

SEQ ID NO: 7155 - DNA, 32 bp, Artificial; identical to SEQ ID NO: 5222
  oligonucleotide probe

SEQ ID NO: 7156 - DNA, 32 bp, Artificial; identical to SEQ ID NO: 5224
  oligonucleotide probe

SEQ ID NO: 7157 - DNA, 32 bp, Artificial; identical to SEQ ID NO: 5224
  oligonucleotide probe

SEQ ID NO: 7158 - DNA, 32 bp, Artificial; identical to SEQ ID NO: 5195
  oligonucleotide probe

SEQ ID NO: 7159 - DNA, 32 bp, Artificial; identical to SEQ ID NO: 5195
  oligonucleotide probe

SEQ ID NO: 7160 - DNA, 32 bp, Artificial; identical to SEQ ID NO: 5217
  oligonucleotide probe

SEQ ID NO: 7161 - DNA, 32 bp, Artificial; identical to SEQ ID NO: 5217
  oligonucleotide probe

SEQ ID NO: 7162 - DNA, 32 bp, Artificial; identical to SEQ ID NO: 5185
  oligonucleotide probe

SEQ ID NO: 7163 - DNA, 32 bp, Artificial; identical to SEQ ID NO: 5185
  oligonucleotide probe

SEQ ID NO: 7164 - DNA, 32 bp, Artificial; identical to SEQ ID NO: 5137
  oligonucleotide probe

SEQ ID NO: 7165 - DNA, 32 bp, Artificial; identical to SEQ ID NO: 5137
  oligonucleotide probe

SEQ ID NO: 7166 - DNA, 32 bp, Artificial; identical to SEQ ID NO: 5239
  oligonucleotide probe

SEQ ID NO: 7167 - DNA, 32 bp, Artificial; identical to SEQ ID NO: 5239
  oligonucleotide probe

SEQ ID NO: 7168 - DNA, 32 bp, Artificial; identical to SEQ ID NO: 5177
  oligonucleotide probe

SEQ ID NO: 7169 - DNA, 32 bp, Artificial; identical to SEQ ID NO: 5177
  oligonucleotide probe

SEQ ID NO: 7170 - DNA, 32 bp, Artificial; identical to SEQ ID NO: 5135
  oligonucleotide probe

SEQ ID NO: 7171 - DNA, 32 bp, Artificial; identical to SEQ ID NO: 5135
  oligonucleotide probe

SEQ ID NO: 7172 - DNA, 32 bp, Artificial; identical to SEQ ID NO: 5223
  oligonucleotide probe

SEQ ID NO: 7173 - DNA, 32 bp, Artificial; identical to SEQ ID NO: 5223
  oligonucleotide probe

SEQ ID NO: 7174 - DNA, 32 bp, Artificial; identical to SEQ ID NO: 5135
  oligonucleotide probe

SEQ ID NO: 7175 - DNA, 32 bp, Artificial; identical to SEQ ID NO: 5135
  oligonucleotide probe

SEQ ID NO: 7176 - DNA, 32 bp, Artificial; identical to SEQ ID NO: 5219
  oligonucleotide probe

SEQ ID NO: 7177 - DNA, 32 bp, Artificial; identical to SEQ ID NO: 5219
  oligonucleotide probe

SEQ ID NO: 7178 - DNA, 32 bp, Artificial; identical to SEQ ID NO: 5410
  oligonucleotide probe

SEQ ID NO: 7179 - DNA, 32 bp, Artificial; identical to SEQ ID NO: 5410
  oligonucleotide probe

SEQ ID NO: 7180 - DNA, 32 bp, Artificial; identical to SEQ ID NO: 5141
  oligonucleotide probe

SEQ ID NO: 7181 - DNA, 32 bp, Artificial; identical to SEQ ID NO: 5141
  oligonucleotide probe

SEQ ID NO: 7182 - DNA, 32 bp, Artificial; identical to SEQ ID NO: 5159
  oligonucleotide probe

SEQ ID NO: 7183 - DNA, 32 bp, Artificial; identical to SEQ ID NO: 5159
  oligonucleotide probe

SEQ ID NO: 7184 - DNA, 32 bp, Artificial; identical to SEQ ID NO: 5134
  oligonucleotide probe

SEQ ID NO: 7185 - DNA, 32 bp, Artificial; identical to SEQ ID NO: 5134
  oligonucleotide probe

SEQ ID NO: 7186 - DNA, 32 bp, Artificial; identical to SEQ ID NO: 5185
  oligonucleotide probe

SEQ ID NO: 7187 - DNA, 32 bp, Artificial; identical to SEQ ID NO: 5185
  oligonucleotide probe

SEQ ID NO: 7188 - DNA, 32 bp, Artificial; identical to SEQ ID NO: 5134
  oligonucleotide probe

SEQ ID NO: 7189 - DNA, 32 bp, Artificial; identical to SEQ ID NO: 5134
  oligonucleotide probe

SEQ ID NO: 7190 - DNA, 32 bp, Artificial; identical to SEQ ID NO: 5138
  oligonucleotide probe

SEQ ID NO: 7191 - DNA, 32 bp, Artificial; identical to SEQ ID NO: 5138
  oligonucleotide probe

SEQ ID NO: 7192 - DNA, 32 bp, Artificial; identical to SEQ ID NO: 5133
  oligonucleotide probe

SEQ ID NO: 7193 - DNA, 32 bp, Artificial; identical to SEQ ID NO: 5133
  oligonucleotide probe

SEQ ID NO: 7194 - DNA, 32 bp, Artificial; identical to SEQ ID NO: 5137
  oligonucleotide probe

SEQ ID NO: 7195 - DNA, 32 bp, Artificial; identical to SEQ ID NO: 5137
  oligonucleotide probe

SEQ ID NO: 7196 - DNA, 32 bp, Artificial; identical to SEQ ID NO: 5159
  oligonucleotide probe

SEQ ID NO: 7197 - DNA, 32 bp, Artificial; identical to SEQ ID NO: 5159
  oligonucleotide probe

SEQ ID NO: 7198 - DNA, 32 bp, Artificial; identical to SEQ ID NO: 5163
  oligonucleotide probe

SEQ ID NO: 7199 - DNA, 32 bp, Artificial; identical to SEQ ID NO: 5163
  oligonucleotide probe

SEQ ID NO: 7200 - DNA, 32 bp, Artificial; identical to SEQ ID NO: 5171
  oligonucleotide probe

SEQ ID NO: 7201 - DNA, 32 bp, Artificial; identical to SEQ ID NO: 5171
  oligonucleotide probe

SEQ ID NO: 7202 - DNA, 32 bp, Artificial; identical to SEQ ID NO: 5399
  oligonucleotide probe

SEQ ID NO: 7203 - DNA, 32 bp, Artificial; identical to SEQ ID NO: 5399
  oligonucleotide probe

SEQ ID NO: 7204 - DNA, 32 bp, Artificial; identical to SEQ ID NO: 5239
  oligonucleotide probe

SEQ ID NO: 7205 - DNA, 32 bp, Artificial; identical to SEQ ID NO: 5239
  oligonucleotide probe

SEQ ID NO: 7206 - DNA, 32 bp, Artificial; identical to SEQ ID NO: 5163
  oligonucleotide probe

SEQ ID NO: 7207 - DNA, 32 bp, Artificial; identical to SEQ ID NO: 5163
  oligonucleotide probe

SEQ ID NO: 7208 - DNA, 32 bp, Artificial; identical to SEQ ID NO: 5410
  oligonucleotide probe

SEQ ID NO: 7209 - DNA, 32 bp, Artificial; identical to SEQ ID NO: 5410
  oligonucleotide probe

SEQ ID NO: 7210 - DNA, 32 bp, Artificial; identical to SEQ ID NO: 5163
  oligonucleotide probe

SEQ ID NO: 7211 - DNA, 32 bp, Artificial; identical to SEQ ID NO: 5163
  oligonucleotide probe

SEQ ID NO: 7212 - DNA, 32 bp, Artificial; identical to SEQ ID NO: 5137
  oligonucleotide probe

SEQ ID NO: 7213 - DNA, 32 bp, Artificial; identical to SEQ ID NO: 5137
  oligonucleotide probe

SEQ ID NO: 7214 - DNA, 32 bp, Artificial; identical to SEQ ID NO: 5232
  oligonucleotide probe

SEQ ID NO: 7215 - DNA, 32 bp, Artificial; identical to SEQ ID NO: 5232
  oligonucleotide probe

SEQ ID NO: 7216 - DNA, 32 bp, Artificial; identical to SEQ ID NO: 5171
  oligonucleotide probe

SEQ ID NO: 7217 - DNA, 32 bp, Artificial; identical to SEQ ID NO: 5171
  oligonucleotide probe

SEQ ID NO: 7218 - DNA, 32 bp, Artificial; identical to SEQ ID NO: 5554
  oligonucleotide probe

SEQ ID NO: 7219 - DNA, 32 bp, Artificial; identical to SEQ ID NO: 5554
  oligonucleotide probe

SEQ ID NO: 7220 - DNA, 32 bp, Artificial; identical to SEQ ID NO: 5416
  oligonucleotide probe

SEQ ID NO: 7221 - DNA, 32 bp, Artificial; identical to SEQ ID NO: 5416
  oligonucleotide probe

SEQ ID NO: 7222 - DNA, 32 bp, Artificial; identical to SEQ ID NO: 5140
  oligonucleotide probe

SEQ ID NO: 7223 - DNA, 32 bp, Artificial; identical to SEQ ID NO: 5140
  oligonucleotide probe

SEQ ID NO: 7224 - DNA, 32 bp, Artificial; identical to SEQ ID NO: 5141
  oligonucleotide probe

SEQ ID NO: 7225 - DNA, 32 bp, Artificial; identical to SEQ ID NO: 5141
  oligonucleotide probe

SEQ ID NO: 7226 - DNA, 32 bp, Artificial; identical to SEQ ID NO: 5195
  oligonucleotide probe

SEQ ID NO: 7227 - DNA, 32 bp, Artificial; identical to SEQ ID NO: 5195
  oligonucleotide probe

SEQ ID NO: 7228 - DNA, 32 bp, Artificial; identical to SEQ ID NO: 5416
  oligonucleotide probe

SEQ ID NO: 7229 - DNA, 32 bp, Artificial; identical to SEQ ID NO: 5416
  oligonucleotide probe

SEQ ID NO: 7230 - DNA, 32 bp, Artificial; identical to SEQ ID NO: 5161
  oligonucleotide probe

SEQ ID NO: 7231 - DNA, 32 bp, Artificial; identical to SEQ ID NO: 5161
  oligonucleotide probe

SEQ ID NO: 7232 - DNA, 32 bp, Artificial; identical to SEQ ID NO: 5137
  oligonucleotide probe

SEQ ID NO: 7233 - DNA, 32 bp, Artificial; identical to SEQ ID NO: 5137
  oligonucleotide probe

SEQ ID NO: 7234 - DNA, 32 bp, Artificial; identical to SEQ ID NO: 5160
  oligonucleotide probe

SEQ ID NO: 7235 - DNA, 32 bp, Artificial; identical to SEQ ID NO: 5160
  oligonucleotide probe

SEQ ID NO: 7236 - DNA, 32 bp, Artificial; identical to SEQ ID NO: 5185
  oligonucleotide probe

SEQ ID NO: 7237 - DNA, 32 bp, Artificial; identical to SEQ ID NO: 5185
  oligonucleotide probe

SEQ ID NO: 7238 - DNA, 32 bp, Artificial; identical to SEQ ID NO: 5140
  oligonucleotide probe

SEQ ID NO: 7239 - DNA, 32 bp, Artificial; identical to SEQ ID NO: 5140
  oligonucleotide probe

SEQ ID NO: 7240 - DNA, 32 bp, Artificial; identical to SEQ ID NO: 5177
  oligonucleotide probe

SEQ ID NO: 7241 - DNA, 32 bp, Artificial; identical to SEQ ID NO: 5177
  oligonucleotide probe

SEQ ID NO: 7242 - DNA, 32 bp, Artificial; identical to SEQ ID NO: 5224
  oligonucleotide probe

SEQ ID NO: 7243 - DNA, 32 bp, Artificial; identical to SEQ ID NO: 5224
  oligonucleotide probe

SEQ ID NO: 7244 - DNA, 32 bp, Artificial; identical to SEQ ID NO: 5177
  oligonucleotide probe

SEQ ID NO: 7245 - DNA, 32 bp, Artificial; identical to SEQ ID NO: 5177
  oligonucleotide probe

SEQ ID NO: 7246 - DNA, 32 bp, Artificial; identical to SEQ ID NO: 5140
  oligonucleotide probe

SEQ ID NO: 7247 - DNA, 32 bp, Artificial; identical to SEQ ID NO: 5140
  oligonucleotide probe

SEQ ID NO: 7248 - DNA, 32 bp, Artificial; identical to SEQ ID NO: 5221
  oligonucleotide probe

SEQ ID NO: 7249 - DNA, 32 bp, Artificial; identical to SEQ ID NO: 5221
  oligonucleotide probe

SEQ ID NO: 7250 - DNA, 32 bp, Artificial; identical to SEQ ID NO: 5239
  oligonucleotide probe

SEQ ID NO: 7251 - DNA, 32 bp, Artificial; identical to SEQ ID NO: 5239
  oligonucleotide probe

SEQ ID NO: 7252 - DNA, 32 bp, Artificial; identical to SEQ ID NO: 5171
  oligonucleotide probe

SEQ ID NO: 7253 - DNA, 32 bp, Artificial; identical to SEQ ID NO: 5171
  oligonucleotide probe

SEQ ID NO: 7254 - DNA, 32 bp, Artificial; identical to SEQ ID NO: 5195
  oligonucleotide probe

SEQ ID NO: 7255 - DNA, 32 bp, Artificial; identical to SEQ ID NO: 5195
  oligonucleotide probe

SEQ ID NO: 7256 - DNA, 32 bp, Artificial; identical to SEQ ID NO: 5185
  oligonucleotide probe

SEQ ID NO: 7257 - DNA, 32 bp, Artificial; identical to SEQ ID NO: 5185
  oligonucleotide probe

SEQ ID NO: 7258 - DNA, 32 bp, Artificial; identical to SEQ ID NO: 5185
  oligonucleotide probe

SEQ ID NO: 7259 - DNA, 32 bp, Artificial; identical to SEQ ID NO: 5185
  oligonucleotide probe

SEQ ID NO: 7260 - DNA, 32 bp, Artificial; identical to SEQ ID NO: 5134
  oligonucleotide probe

SEQ ID NO: 7261 - DNA, 32 bp, Artificial; identical to SEQ ID NO: 5134
  oligonucleotide probe

SEQ ID NO: 7262 - DNA, 32 bp, Artificial; identical to SEQ ID NO: 5242
  oligonucleotide probe

SEQ ID NO: 7263 - DNA, 32 bp, Artificial; identical to SEQ ID NO: 5242
  oligonucleotide probe

SEQ ID NO: 7264 - DNA, 32 bp, Artificial; identical to SEQ ID NO: 5136
  oligonucleotide probe

SEQ ID NO: 7265 - DNA, 32 bp, Artificial; identical to SEQ ID NO: 5136
  oligonucleotide probe

SEQ ID NO: 7266 - DNA, 32 bp, Artificial; identical to SEQ ID NO: 5160
  oligonucleotide probe

SEQ ID NO: 7267 - DNA, 32 bp, Artificial; identical to SEQ ID NO: 5160
  oligonucleotide probe

SEQ ID NO: 7268 - DNA, 32 bp, Artificial; identical to SEQ ID NO: 5231
  oligonucleotide probe

SEQ ID NO: 7269 - DNA, 32 bp, Artificial; identical to SEQ ID NO: 5231
  oligonucleotide probe

SEQ ID NO: 7270 - DNA, 32 bp, Artificial; identical to SEQ ID NO: 5223
  oligonucleotide probe

SEQ ID NO: 7271 - DNA, 32 bp, Artificial; identical to SEQ ID NO: 5223
  oligonucleotide probe

SEQ ID NO: 7272 - DNA, 32 bp, Artificial; identical to SEQ ID NO: 5416
  oligonucleotide probe

SEQ ID NO: 7273 - DNA, 32 bp, Artificial; identical to SEQ ID NO: 5416
  oligonucleotide probe

SEQ ID NO: 7274 - DNA, 32 bp, Artificial; identical to SEQ ID NO: 5134
  oligonucleotide probe

SEQ ID NO: 7275 - DNA, 32 bp, Artificial; identical to SEQ ID NO: 5134
  oligonucleotide probe

SEQ ID NO: 7276 - DNA, 32 bp, Artificial; identical to SEQ ID NO: 5137
  oligonucleotide probe

SEQ ID NO: 7277 - DNA, 32 bp, Artificial; identical to SEQ ID NO: 5137
  oligonucleotide probe

SEQ ID NO: 7278 - DNA, 32 bp, Artificial; identical to SEQ ID NO: 5185
  oligonucleotide probe

SEQ ID NO: 7279 - DNA, 32 bp, Artificial; identical to SEQ ID NO: 5185
  oligonucleotide probe

SEQ ID NO: 7280 - DNA, 32 bp, Artificial; identical to SEQ ID NO: 5159
  oligonucleotide probe

SEQ ID NO: 7281 - DNA, 32 bp, Artificial; identical to SEQ ID NO: 5159
  oligonucleotide probe

SEQ ID NO: 7282 - DNA, 32 bp, Artificial; identical to SEQ ID NO: 5138
  oligonucleotide probe

SEQ ID NO: 7283 - DNA, 32 bp, Artificial; identical to SEQ ID NO: 5138
  oligonucleotide probe

SEQ ID NO: 7284 - DNA, 32 bp, Artificial; identical to SEQ ID NO: 5160
  oligonucleotide probe

SEQ ID NO: 7285 - DNA, 32 bp, Artificial; identical to SEQ ID NO: 5160
  oligonucleotide probe

SEQ ID NO: 7286 - DNA, 32 bp, Artificial; identical to SEQ ID NO: 5159
  oligonucleotide probe

SEQ ID NO: 7287 - DNA, 32 bp, Artificial; identical to SEQ ID NO: 5159
  oligonucleotide probe

SEQ ID NO: 7288 - DNA, 32 bp, Artificial; identical to SEQ ID NO: 5171
  oligonucleotide probe

SEQ ID NO: 7289 - DNA, 32 bp, Artificial; identical to SEQ ID NO: 5171
  oligonucleotide probe

SEQ ID NO: 7290 - DNA, 32 bp, Artificial; identical to SEQ ID NO: 5411
  oligonucleotide probe

SEQ ID NO: 7291 - DNA, 32 bp, Artificial; identical to SEQ ID NO: 5411
  oligonucleotide probe

SEQ ID NO: 7292 - DNA, 32 bp, Artificial; identical to SEQ ID NO: 5416
  oligonucleotide probe

SEQ ID NO: 7293 - DNA, 32 bp, Artificial; identical to SEQ ID NO: 5416
  oligonucleotide probe

SEQ ID NO: 7294 - DNA, 32 bp, Artificial; identical to SEQ ID NO: 5708
  oligonucleotide probe

SEQ ID NO: 7295 - DNA, 32 bp, Artificial; identical to SEQ ID NO: 5708
  oligonucleotide probe

SEQ ID NO: 7296 - DNA, 32 bp, Artificial; identical to SEQ ID NO: 5161
  oligonucleotide probe

SEQ ID NO: 7297 - DNA, 32 bp, Artificial; identical to SEQ ID NO: 5161
  oligonucleotide probe

SEQ ID NO: 7298 - DNA, 32 bp, Artificial; identical to SEQ ID NO: 5410
  oligonucleotide probe

SEQ ID NO: 7299 - DNA, 32 bp, Artificial; identical to SEQ ID NO: 5410
  oligonucleotide probe

SEQ ID NO: 7300 - DNA, 32 bp, Artificial; identical to SEQ ID NO: 5536
  oligonucleotide probe

SEQ ID NO: 7301 - DNA, 32 bp, Artificial; identical to SEQ ID NO: 5536
  oligonucleotide probe

SEQ ID NO: 7302 - DNA, 32 bp, Artificial; identical to SEQ ID NO: 6131
  oligonucleotide probe

SEQ ID NO: 7303 - DNA, 32 bp, Artificial; identical to SEQ ID NO: 6131
  oligonucleotide probe

SEQ ID NO: 7304 - DNA, 32 bp, Artificial; identical to SEQ ID NO: 5550
  oligonucleotide probe

SEQ ID NO: 7305 - DNA, 32 bp, Artificial; identical to SEQ ID NO: 5550
  oligonucleotide probe

SEQ ID NO: 7306 - DNA, 32 bp, Artificial; identical to SEQ ID NO: 5536
  oligonucleotide probe

SEQ ID NO: 7307 - DNA, 32 bp, Artificial; identical to SEQ ID NO: 5536
  oligonucleotide probe

SEQ ID NO: 7308 - DNA, 32 bp, Artificial; identical to SEQ ID NO: 6145
  oligonucleotide probe

SEQ ID NO: 7309 - DNA, 32 bp, Artificial; identical to SEQ ID NO: 6145
  oligonucleotide probe

SEQ ID NO: 7310 - DNA, 32 bp, Artificial; identical to SEQ ID NO: 6145
  oligonucleotide probe

SEQ ID NO: 7311 - DNA, 32 bp, Artificial; identical to SEQ ID NO: 6145
  oligonucleotide probe

SEQ ID NO: 7312 - DNA, 32 bp, Artificial; identical to SEQ ID NO: 5708
  oligonucleotide probe

SEQ ID NO: 7313 - DNA, 32 bp, Artificial; identical to SEQ ID NO: 5708
  oligonucleotide probe

SEQ ID NO: 7314 - DNA, 32 bp, Artificial; identical to SEQ ID NO: 5594
  oligonucleotide probe

SEQ ID NO: 7315 - DNA, 32 bp, Artificial; identical to SEQ ID NO: 5594
  oligonucleotide probe

SEQ ID NO: 7316 - DNA, 32 bp, Artificial; identical to SEQ ID NO: 5610
  oligonucleotide probe

SEQ ID NO: 7317 - DNA, 32 bp, Artificial; identical to SEQ ID NO: 5610
  oligonucleotide probe

SEQ ID NO: 7318 - DNA, 32 bp, Artificial; identical to SEQ ID NO: 5536
  oligonucleotide probe

SEQ ID NO: 7319 - DNA, 32 bp, Artificial; identical to SEQ ID NO: 5536
  oligonucleotide probe

SEQ ID NO: 7320 - DNA, 32 bp, Artificial; identical to SEQ ID NO: 5538
  oligonucleotide probe

SEQ ID NO: 7321 - DNA, 32 bp, Artificial; identical to SEQ ID NO: 5538
  oligonucleotide probe

SEQ ID NO: 7322 - DNA, 32 bp, Artificial; identical to SEQ ID NO: 5564
  oligonucleotide probe

SEQ ID NO: 7323 - DNA, 32 bp, Artificial; identical to SEQ ID NO: 5540
  oligonucleotide probe

SEQ ID NO: 7324 - DNA, 32 bp, Artificial; identical to SEQ ID NO: 5546
  oligonucleotide probe

SEQ ID NO: 7325 - DNA, 32 bp, Artificial; identical to SEQ ID NO: 5547
  oligonucleotide probe

SEQ ID NO: 7326 - DNA, 32 bp, Artificial; identical to SEQ ID NO: 5547
  oligonucleotide probe

SEQ ID NO: 7327 - DNA, 32 bp, Artificial; identical to SEQ ID NO: 5595
  oligonucleotide probe

SEQ ID NO: 7328 - DNA, 32 bp, Artificial; identical to SEQ ID NO: 5595
  oligonucleotide probe

SEQ ID NO: 7329 - DNA, 32 bp, Artificial; identical to SEQ ID NO: 5141
  oligonucleotide probe

SEQ ID NO: 7330 - DNA, 32 bp, Artificial; identical to SEQ ID NO: 5141
  oligonucleotide probe

SEQ ID NO: 7331 - DNA, 32 bp, Artificial; identical to SEQ ID NO: 5540
  oligonucleotide probe

SEQ ID NO: 7332 - DNA, 32 bp, Artificial; identical to SEQ ID NO: 5540
  oligonucleotide probe

SEQ ID NO: 7333 - DNA, 32 bp, Artificial; identical to SEQ ID NO: 5611
  oligonucleotide probe

SEQ ID NO: 7334 - DNA, 32 bp, Artificial; identical to SEQ ID NO: 5611
  oligonucleotide probe

SEQ ID NO: 7335 - DNA, 32 bp, Artificial; identical to SEQ ID NO: 5221
  oligonucleotide probe

SEQ ID NO: 7336 - DNA, 32 bp, Artificial; identical to SEQ ID NO: 5221
  oligonucleotide probe

SEQ ID NO: 7337 - DNA, 32 bp, Artificial; identical to SEQ ID NO: 5584
  oligonucleotide probe

SEQ ID NO: 7338 - DNA, 32 bp, Artificial; identical to SEQ ID NO: 5584
  oligonucleotide probe

SEQ ID NO: 7339 - DNA, 32 bp, Artificial; identical to SEQ ID NO: 5550
  oligonucleotide probe

SEQ ID NO: 7340 - DNA, 32 bp, Artificial; identical to SEQ ID NO: 5550
  oligonucleotide probe

SEQ ID NO: 7341 - DNA, 32 bp, Artificial; identical to SEQ ID NO: 5224
  oligonucleotide probe

SEQ ID NO: 7342 - DNA, 32 bp, Artificial; identical to SEQ ID NO: 5224
  oligonucleotide probe

SEQ ID NO: 7343 - DNA, 32 bp, Artificial; identical to SEQ ID NO: 5540
  oligonucleotide probe

SEQ ID NO: 7344 - DNA, 32 bp, Artificial; identical to SEQ ID NO: 5540
  oligonucleotide probe

SEQ ID NO: 7345 - DNA, 32 bp, Artificial; identical to SEQ ID NO: 5545
  oligonucleotide probe

SEQ ID NO: 7346 - DNA, 32 bp, Artificial; identical to SEQ ID NO: 5545
  oligonucleotide probe

SEQ ID NO: 7347 - DNA, 32 bp, Artificial; identical to SEQ ID NO: 5610
  oligonucleotide probe

SEQ ID NO: 7348 - DNA, 32 bp, Artificial; identical to SEQ ID NO: 5610
  oligonucleotide probe

SEQ ID NO: 7349 - DNA, 32 bp, Artificial; identical to SEQ ID NO: 5564
  oligonucleotide probe

SEQ ID NO: 7350 - DNA, 32 bp, Artificial; identical to SEQ ID NO: 5564
  oligonucleotide probe

SEQ ID NO: 7351 - DNA, 32 bp, Artificial; identical to SEQ ID NO: 5555
  oligonucleotide probe

SEQ ID NO: 7352 - DNA, 32 bp, Artificial; identical to SEQ ID NO: 5555
  oligonucleotide probe

SEQ ID NO: 7353 - DNA, 32 bp, Artificial; identical to SEQ ID NO: 5585
  oligonucleotide probe

SEQ ID NO: 7354 - DNA, 32 bp, Artificial; identical to SEQ ID NO: 5585
  oligonucleotide probe

SEQ ID NO: 7355 - DNA, 32 bp, Artificial; identical to SEQ ID NO: 5539
  oligonucleotide probe

SEQ ID NO: 7356 - DNA, 32 bp, Artificial; identical to SEQ ID NO: 5539
  oligonucleotide probe

SEQ ID NO: 7357 - DNA, 32 bp, Artificial; identical to SEQ ID NO: 5541
  oligonucleotide probe

SEQ ID NO: 7358 - DNA, 32 bp, Artificial; identical to SEQ ID NO: 5541
  oligonucleotide probe

SEQ ID NO: 7359 - DNA, 32 bp, Artificial; identical to SEQ ID NO: 5538
  oligonucleotide probe

SEQ ID NO: 7360 - DNA, 32 bp, Artificial; identical to SEQ ID NO: 5538
  oligonucleotide probe

SEQ ID NO: 7361 - DNA, 32 bp, Artificial; identical to SEQ ID NO: 5411
  oligonucleotide probe

SEQ ID NO: 7362 - DNA, 32 bp, Artificial; identical to SEQ ID NO: 5411
  oligonucleotide probe

SEQ ID NO: 7363 - DNA, 32 bp, Artificial; identical to SEQ ID NO: 6145
  oligonucleotide probe

SEQ ID NO: 7364 - DNA, 32 bp, Artificial; identical to SEQ ID NO: 6145
  oligonucleotide probe

SEQ ID NO: 7365 - DNA, 32 bp, Artificial; identical to SEQ ID NO: 5232
  oligonucleotide probe

SEQ ID NO: 7366 - DNA, 32 bp, Artificial; identical to SEQ ID NO: 5232
  oligonucleotide probe

SEQ ID NO: 7367 - DNA, 32 bp, Artificial; identical to SEQ ID NO: 5242
  oligonucleotide probe

SEQ ID NO: 7368 - DNA, 32 bp, Artificial; identical to SEQ ID NO: 5242
  oligonucleotide probe

SEQ ID NO: 7369 - DNA, 32 bp, Artificial; identical to SEQ ID NO: 5554
  oligonucleotide probe

SEQ ID NO: 7370 - DNA, 32 bp, Artificial; identical to SEQ ID NO: 5554
  oligonucleotide probe

SEQ ID NO: 7371 - DNA, 32 bp, Artificial; identical to SEQ ID NO: 5594
  oligonucleotide probe

SEQ ID NO: 7372 - DNA, 32 bp, Artificial; identical to SEQ ID NO: 5594
  oligonucleotide probe

SEQ ID NO: 7373 - DNA, 32 bp, Artificial; identical to SEQ ID NO: 5594
  oligonucleotide probe

SEQ ID NO: 7374 - DNA, 32 bp, Artificial; identical to SEQ ID NO: 5594
  oligonucleotide probe

SEQ ID NO: 7375 - DNA, 32 bp, Artificial; identical to SEQ ID NO: 5160
  oligonucleotide probe

SEQ ID NO: 7376 - DNA, 32 bp, Artificial; identical to SEQ ID NO: 5160
  oligonucleotide probe

SEQ ID NO: 7377 - DNA, 32 bp, Artificial; identical to SEQ ID NO: 5550
  oligonucleotide probe

SEQ ID NO: 7378 - DNA, 32 bp, Artificial; identical to SEQ ID NO: 5550
  oligonucleotide probe

SEQ ID NO: 7379 - DNA, 32 bp, Artificial; identical to SEQ ID NO: 5536
  oligonucleotide probe

SEQ ID NO: 7380 - DNA, 32 bp, Artificial; identical to SEQ ID NO: 5536
  oligonucleotide probe

SEQ ID NO: 7381 - DNA, 32 bp, Artificial; identical to SEQ ID NO: 5544
  oligonucleotide probe

SEQ ID NO: 7382 - DNA, 32 bp, Artificial; identical to SEQ ID NO: 5544
  oligonucleotide probe

SEQ ID NO: 7383 - DNA, 32 bp, Artificial; identical to SEQ ID NO: 5611
  oligonucleotide probe

SEQ ID NO: 7384 - DNA, 32 bp, Artificial; identical to SEQ ID NO: 5611
  oligonucleotide probe

SEQ ID NO: 7385 - DNA, 32 bp, Artificial; identical to SEQ ID NO: 6074
  oligonucleotide probe

SEQ ID NO: 7386 - DNA, 32 bp, Artificial; identical to SEQ ID NO: 6074
  oligonucleotide probe

SEQ ID NO: 7387 - DNA, 32 bp, Artificial; identical to SEQ ID NO: 5537
  oligonucleotide probe

SEQ ID NO: 7388 - DNA, 32 bp, Artificial; identical to SEQ ID NO: 5537
  oligonucleotide probe

SEQ ID NO: 7389 - DNA, 32 bp, Artificial; identical to SEQ ID NO: 5136
  oligonucleotide probe

SEQ ID NO: 7390 - DNA, 32 bp, Artificial; identical to SEQ ID NO: 5136
  oligonucleotide probe

SEQ ID NO: 7391 - DNA, 32 bp, Artificial; identical to SEQ ID NO: 5539
  oligonucleotide probe

SEQ ID NO: 7392 - DNA, 32 bp, Artificial; identical to SEQ ID NO: 5539
  oligonucleotide probe

SEQ ID NO: 7393 - DNA, 32 bp, Artificial; identical to SEQ ID NO: 5544
  oligonucleotide probe

SEQ ID NO: 7394 - DNA, 32 bp, Artificial; identical to SEQ ID NO: 5544
  oligonucleotide probe

SEQ ID NO: 7395 - DNA, 32 bp, Artificial; identical to SEQ ID NO: 5171
  oligonucleotide probe

SEQ ID NO: 7396 - DNA, 32 bp, Artificial; identical to SEQ ID NO: 5171
  oligonucleotide probe

SEQ ID NO: 7397 - DNA, 32 bp, Artificial; identical to SEQ ID NO: 5584
  oligonucleotide probe

SEQ ID NO: 7398 - DNA, 32 bp, Artificial; identical to SEQ ID NO: 5584
  oligonucleotide probe

SEQ ID NO: 7399 - DNA, 32 bp, Artificial; identical to SEQ ID NO: 5709
  oligonucleotide probe

SEQ ID NO: 7400 - DNA, 32 bp, Artificial; identical to SEQ ID NO: 5709
  oligonucleotide probe

SEQ ID NO: 7401 - DNA, 32 bp, Artificial; identical to SEQ ID NO: 5544
  oligonucleotide probe

SEQ ID NO: 7402 - DNA, 32 bp, Artificial; identical to SEQ ID NO: 5544
  oligonucleotide probe

SEQ ID NO: 7403 - DNA, 32 bp, Artificial; identical to SEQ ID NO: 5240
  oligonucleotide probe

SEQ ID NO: 7404 - DNA, 32 bp, Artificial; identical to SEQ ID NO: 5240
  oligonucleotide probe

SEQ ID NO: 7405 - DNA, 32 bp, Artificial; identical to SEQ ID NO: 5709
  oligonucleotide probe

SEQ ID NO: 7406 - DNA, 32 bp, Artificial; identical to SEQ ID NO: 5709
  oligonucleotide probe

SEQ ID NO: 7407 - DNA, 32 bp, Artificial; identical to SEQ ID NO: 5231
  oligonucleotide probe

SEQ ID NO: 7408 - DNA, 32 bp, Artificial; identical to SEQ ID NO: 5231
  oligonucleotide probe

SEQ ID NO: 7409 - DNA, 32 bp, Artificial; identical to SEQ ID NO: 5416
  oligonucleotide probe

SEQ ID NO: 7410 - DNA, 32 bp, Artificial; identical to SEQ ID NO: 5416
  oligonucleotide probe

SEQ ID NO: 7411 - DNA, 32 bp, Artificial; identical to SEQ ID NO: 5584
  oligonucleotide probe

SEQ ID NO: 7412 - DNA, 32 bp, Artificial; identical to SEQ ID NO: 5584
  oligonucleotide probe

SEQ ID NO: 7413 - DNA, 32 bp, Artificial; identical to SEQ ID NO: 5595
  oligonucleotide probe

SEQ ID NO: 7414 - DNA, 32 bp, Artificial; identical to SEQ ID NO: 5595
  oligonucleotide probe

SEQ ID NO: 7415 - DNA, 32 bp, Artificial; identical to SEQ ID NO: 5253
  oligonucleotide probe

SEQ ID NO: 7416 - DNA, 32 bp, Artificial; identical to SEQ ID NO: 5253
  oligonucleotide probe

SEQ ID NO: 7417 - DNA, 32 bp, Artificial; identical to SEQ ID NO: 5138
  oligonucleotide probe

SEQ ID NO: 7418 - DNA, 32 bp, Artificial; identical to SEQ ID NO: 5138
  oligonucleotide probe

SEQ ID NO: 7419 - DNA, 32 bp, Artificial; identical to SEQ ID NO: 6070
  oligonucleotide probe

SEQ ID NO: 7420 - DNA, 32 bp, Artificial; identical to SEQ ID NO: 6070
  oligonucleotide probe

SEQ ID NO: 7421 - DNA, 32 bp, Artificial; identical to SEQ ID NO: 5565
  oligonucleotide probe

SEQ ID NO: 7422 - DNA, 32 bp, Artificial; identical to SEQ ID NO: 5565
  oligonucleotide probe

SEQ ID NO: 7423 - DNA, 32 bp, Artificial; identical to SEQ ID NO: 5410
  oligonucleotide probe

SEQ ID NO: 7424 - DNA, 32 bp, Artificial; identical to SEQ ID NO: 5410
  oligonucleotide probe

SEQ ID NO: 7425 - DNA, 32 bp, Artificial; identical to SEQ ID NO: 5135
  oligonucleotide probe

SEQ ID NO: 7426 - DNA, 32 bp, Artificial; identical to SEQ ID NO: 5135
  oligonucleotide probe

SEQ ID NO: 7427 - DNA, 32 bp, Artificial; identical to SEQ ID NO: 5546
  oligonucleotide probe

SEQ ID NO: 7428 - DNA, 32 bp, Artificial; identical to SEQ ID NO: 5546
  oligonucleotide probe

SEQ ID NO: 7429 - DNA, 32 bp, Artificial; identical to SEQ ID NO: 5539
  oligonucleotide probe

SEQ ID NO: 7430 - DNA, 32 bp, Artificial; identical to SEQ ID NO: 5539
  oligonucleotide probe

SEQ ID NO: 7431 - DNA, 32 bp, Artificial; identical to SEQ ID NO: 5537
  oligonucleotide probe

SEQ ID NO: 7432 - DNA, 32 bp, Artificial; identical to SEQ ID NO: 5537
  oligonucleotide probe

SEQ ID NO: 7433 - DNA, 32 bp, Artificial; identical to SEQ ID NO: 5547
  oligonucleotide probe

SEQ ID NO: 7434 - DNA, 32 bp, Artificial; identical to SEQ ID NO: 5547
  oligonucleotide probe

SEQ ID NO: 7435 - DNA, 32 bp, Artificial; identical to SEQ ID NO: 6070
  oligonucleotide probe

SEQ ID NO: 7436 - DNA, 32 bp, Artificial; identical to SEQ ID NO: 6070
  oligonucleotide probe

SEQ ID NO: 7437 - DNA, 32 bp, Artificial; identical to SEQ ID NO: 5547
  oligonucleotide probe

SEQ ID NO: 7438 - DNA, 32 bp, Artificial; identical to SEQ ID NO: 5547
  oligonucleotide probe

SEQ ID NO: 7439 - DNA, 32 bp, Artificial; identical to SEQ ID NO: 6131
  oligonucleotide probe

SEQ ID NO: 7440 - DNA, 32 bp, Artificial; identical to SEQ ID NO: 6131
  oligonucleotide probe

SEQ ID NO: 7441 - DNA, 32 bp, Artificial; identical to SEQ ID NO: 5564
  oligonucleotide probe

SEQ ID NO: 7442 - DNA, 32 bp, Artificial; identical to SEQ ID NO: 5564
  oligonucleotide probe

SEQ ID NO: 7443 - DNA, 32 bp, Artificial; identical to SEQ ID NO: 6131
  oligonucleotide probe

SEQ ID NO: 7444 - DNA, 32 bp, Artificial; identical to SEQ ID NO: 6131
  oligonucleotide probe

SEQ ID NO: 7445 - DNA, 32 bp, Artificial; identical to SEQ ID NO: 5546
  oligonucleotide probe

SEQ ID NO: 7446 - DNA, 32 bp, Artificial; identical to SEQ ID NO: 5546
  oligonucleotide probe

SEQ ID NO: 7447 - DNA, 32 bp, Artificial; identical to SEQ ID NO: 5594
  oligonucleotide probe

SEQ ID NO: 7448 - DNA, 32 bp, Artificial; identical to SEQ ID NO: 5594
  oligonucleotide probe

SEQ ID NO: 7449 - DNA, 32 bp, Artificial; identical to SEQ ID NO: 5177
  oligonucleotide probe

SEQ ID NO: 7450 - DNA, 32 bp, Artificial; identical to SEQ ID NO: 5177
  oligonucleotide probe

SEQ ID NO: 7451 - DNA, 32 bp, Artificial; identical to SEQ ID NO: 5555
  oligonucleotide probe

SEQ ID NO: 7452 - DNA, 32 bp, Artificial; identical to SEQ ID NO: 5555
  oligonucleotide probe

SEQ ID NO: 7453 - DNA, 32 bp, Artificial; identical to SEQ ID NO: 5159
  oligonucleotide probe

SEQ ID NO: 7454 - DNA, 32 bp, Artificial; identical to SEQ ID NO: 5159
  oligonucleotide probe

SEQ ID NO: 7455 - DNA, 32 bp, Artificial; identical to SEQ ID NO: 5551
  oligonucleotide probe

SEQ ID NO: 7456 - DNA, 32 bp, Artificial; identical to SEQ ID NO: 5551
  oligonucleotide probe

SEQ ID NO: 7457 - DNA, 32 bp, Artificial; identical to SEQ ID NO: 5610
  oligonucleotide probe

SEQ ID NO: 7458 - DNA, 32 bp, Artificial; identical to SEQ ID NO: 5610
  oligonucleotide probe

SEQ ID NO: 7459 - DNA, 32 bp, Artificial; identical to SEQ ID NO: 5708
  oligonucleotide probe

SEQ ID NO: 7460 - DNA, 32 bp, Artificial; identical to SEQ ID NO: 5708
  oligonucleotide probe

SEQ ID NO: 7461 - DNA, 32 bp, Artificial; identical to SEQ ID NO: 6145
  oligonucleotide probe

SEQ ID NO: 7462 - DNA, 32 bp, Artificial; identical to SEQ ID NO: 6145
  oligonucleotide probe

SEQ ID NO: 7463 - DNA, 32 bp, Artificial; identical to SEQ ID NO: 6070
  oligonucleotide probe

SEQ ID NO: 7464 - DNA, 32 bp, Artificial; identical to SEQ ID NO: 6070
  oligonucleotide probe

SEQ ID NO: 7465 - DNA, 32 bp, Artificial; identical to SEQ ID NO: 5585
  oligonucleotide probe

SEQ ID NO: 7466 - DNA, 32 bp, Artificial; identical to SEQ ID NO: 5585
  oligonucleotide probe

SEQ ID NO: 7467 - DNA, 32 bp, Artificial; identical to SEQ ID NO: 5223
  oligonucleotide probe

SEQ ID NO: 7468 - DNA, 32 bp, Artificial; identical to SEQ ID NO: 5223
  oligonucleotide probe

SEQ ID NO: 7469 - DNA, 32 bp, Artificial; identical to SEQ ID NO: 5551
  oligonucleotide probe

SEQ ID NO: 7470 - DNA, 32 bp, Artificial; identical to SEQ ID NO: 5551
  oligonucleotide probe

SEQ ID NO: 7471 - DNA, 32 bp, Artificial; identical to SEQ ID NO: 5163
  oligonucleotide probe

SEQ ID NO: 7472 - DNA, 32 bp, Artificial; identical to SEQ ID NO: 5163
  oligonucleotide probe

SEQ ID NO: 7473 - DNA, 32 bp, Artificial; identical to SEQ ID NO: 5554
  oligonucleotide probe

SEQ ID NO: 7474 - DNA, 32 bp, Artificial; identical to SEQ ID NO: 5554
  oligonucleotide probe

SEQ ID NO: 7475 - DNA, 32 bp, Artificial; identical to SEQ ID NO: 5595
  oligonucleotide probe

SEQ ID NO: 7476 - DNA, 32 bp, Artificial; identical to SEQ ID NO: 5595
  oligonucleotide probe

SEQ ID NO: 7477 - DNA, 32 bp, Artificial; identical to SEQ ID NO: 5554
  oligonucleotide probe

SEQ ID NO: 7478 - DNA, 32 bp, Artificial; identical to SEQ ID NO: 5554
  oligonucleotide probe

SEQ ID NO: 7479 - DNA, 32 bp, Artificial; identical to SEQ ID NO: 5541
  oligonucleotide probe

SEQ ID NO: 7480 - DNA, 32 bp, Artificial; identical to SEQ ID NO: 5541
  oligonucleotide probe

SEQ ID NO: 7481 - DNA, 32 bp, Artificial; identical to SEQ ID NO: 5538
  oligonucleotide probe

SEQ ID NO: 7482 - DNA, 32 bp, Artificial; identical to SEQ ID NO: 5538
  oligonucleotide probe

SEQ ID NO: 7483 - DNA, 32 bp, Artificial; identical to SEQ ID NO: 5218
  oligonucleotide probe

SEQ ID NO: 7484 - DNA, 32 bp, Artificial; identical to SEQ ID NO: 5218
  oligonucleotide probe

SEQ ID NO: 7485 - DNA, 32 bp, Artificial; identical to SEQ ID NO: 5133
  oligonucleotide probe

SEQ ID NO: 7486 - DNA, 32 bp, Artificial; identical to SEQ ID NO: 5133
  oligonucleotide probe

SEQ ID NO: 7487 - DNA, 32 bp, Artificial; identical to SEQ ID NO: 5134
  oligonucleotide probe

SEQ ID NO: 7488 - DNA, 32 bp, Artificial; identical to SEQ ID NO: 5134
  oligonucleotide probe

SEQ ID NO: 7489 - DNA, 32 bp, Artificial; identical to SEQ ID NO: 5536
  oligonucleotide probe

SEQ ID NO: 7490 - DNA, 32 bp, Artificial; identical to SEQ ID NO: 5536
  oligonucleotide probe

SEQ ID NO: 7491 - DNA, 32 bp, Artificial; identical to SEQ ID NO: 5541
  oligonucleotide probe

SEQ ID NO: 7492 - DNA, 32 bp, Artificial; identical to SEQ ID NO: 5541
  oligonucleotide probe

SEQ ID NO: 7493 - DNA, 32 bp, Artificial; identical to SEQ ID NO: 5550
  oligonucleotide probe

SEQ ID NO: 7494 - DNA, 32 bp, Artificial; identical to SEQ ID NO: 5550
  oligonucleotide probe

SEQ ID NO: 7495 - DNA, 32 bp, Artificial; identical to SEQ ID NO: 5220
  oligonucleotide probe

SEQ ID NO: 7496 - DNA, 32 bp, Artificial; identical to SEQ ID NO: 5220
  oligonucleotide probe

SEQ ID NO: 7497 - DNA, 32 bp, Artificial; identical to SEQ ID NO: 5565
  oligonucleotide probe

SEQ ID NO: 7498 - DNA, 32 bp, Artificial; identical to SEQ ID NO: 5565
  oligonucleotide probe

SEQ ID NO: 7499 - DNA, 32 bp, Artificial; identical to SEQ ID NO: 5585
  oligonucleotide probe

SEQ ID NO: 7500 - DNA, 32 bp, Artificial; identical to SEQ ID NO: 5585
  oligonucleotide probe

SEQ ID NO: 7501 - DNA, 32 bp, Artificial; identical to SEQ ID NO: 5551
  oligonucleotide probe

SEQ ID NO: 7502 - DNA, 32 bp, Artificial; identical to SEQ ID NO: 5551
  oligonucleotide probe

SEQ ID NO: 7503 - DNA, 32 bp, Artificial; identical to SEQ ID NO: 5536
  oligonucleotide probe

SEQ ID NO: 7504 - DNA, 32 bp, Artificial; identical to SEQ ID NO: 5536
  oligonucleotide probe

SEQ ID NO: 7505 - DNA, 32 bp, Artificial; identical to SEQ ID NO: 5241
  oligonucleotide probe

SEQ ID NO: 7506 - DNA, 32 bp, Artificial; identical to SEQ ID NO: 5241
  oligonucleotide probe

SEQ ID NO: 7507 - DNA, 32 bp, Artificial; identical to SEQ ID NO: 5537
  oligonucleotide probe

SEQ ID NO: 7508 - DNA, 32 bp, Artificial; identical to SEQ ID NO: 5537
  oligonucleotide probe

SEQ ID NO: 7509 - DNA, 32 bp, Artificial; identical to SEQ ID NO: 5565
  oligonucleotide probe

SEQ ID NO: 7510 - DNA, 32 bp, Artificial; identical to SEQ ID NO: 5565
  oligonucleotide probe

SEQ ID NO: 7511 - DNA, 32 bp, Artificial; identical to SEQ ID NO: 5140
  oligonucleotide probe

SEQ ID NO: 7512 - DNA, 32 bp, Artificial; identical to SEQ ID NO: 5140
  oligonucleotide probe

SEQ ID NO: 7513 - DNA, 32 bp, Artificial; identical to SEQ ID NO: 5229
  oligonucleotide probe

SEQ ID NO: 7514 - DNA, 32 bp, Artificial; identical to SEQ ID NO: 5229
  oligonucleotide probe

SEQ ID NO: 7515 - DNA, 32 bp, Artificial; identical to SEQ ID NO: 5709
  oligonucleotide probe

SEQ ID NO: 7516 - DNA, 32 bp, Artificial; identical to SEQ ID NO: 5709
  oligonucleotide probe

SEQ ID NO: 7517 - DNA, 32 bp, Artificial; identical to SEQ ID NO: 5540
  oligonucleotide probe

SEQ ID NO: 7518 - DNA, 32 bp, Artificial; identical to SEQ ID NO: 5540
  oligonucleotide probe

SEQ ID NO: 7519 - DNA, 32 bp, Artificial; identical to SEQ ID NO: 5708
  oligonucleotide probe

SEQ ID NO: 7520 - DNA, 32 bp, Artificial; identical to SEQ ID NO: 5708
  oligonucleotide probe

SEQ ID NO: 7521 - DNA, 32 bp, Artificial; identical to SEQ ID NO: 5222
  oligonucleotide probe

SEQ ID NO: 7522 - DNA, 32 bp, Artificial; identical to SEQ ID NO: 5222
  oligonucleotide probe

SEQ ID NO: 7523 - DNA, 32 bp, Artificial; identical to SEQ ID NO: 5219
  oligonucleotide probe

SEQ ID NO: 7524 - DNA, 32 bp, Artificial; identical to SEQ ID NO: 5219
  oligonucleotide probe

SEQ ID NO: 7525 - DNA, 32 bp, Artificial; identical to SEQ ID NO: 6131
  oligonucleotide probe

SEQ ID NO: 7526 - DNA, 32 bp, Artificial; identical to SEQ ID NO: 6131
  oligonucleotide probe

SEQ ID NO: 7527 - DNA, 32 bp, Artificial; identical to SEQ ID NO: 5545
  oligonucleotide probe

SEQ ID NO: 7528 - DNA, 32 bp, Artificial; identical to SEQ ID NO: 5545
  oligonucleotide probe

SEQ ID NO: 7529 - DNA, 32 bp, Artificial; identical to SEQ ID NO: 5161
  oligonucleotide probe

SEQ ID NO: 7530 - DNA, 32 bp, Artificial; identical to SEQ ID NO: 5161
  oligonucleotide probe

SEQ ID NO: 7531 - DNA, 32 bp, Artificial; identical to SEQ ID NO: 6145
  oligonucleotide probe

SEQ ID NO: 7532 - DNA, 32 bp, Artificial; identical to SEQ ID NO: 6145
  oligonucleotide probe

SEQ ID NO: 7533 - DNA, 32 bp, Artificial; identical to SEQ ID NO: 5137
  oligonucleotide probe

SEQ ID NO: 7534 - DNA, 32 bp, Artificial; identical to SEQ ID NO: 5137
  oligonucleotide probe

SEQ ID NO: 7535 - DNA, 32 bp, Artificial; identical to SEQ ID NO: 6074
  oligonucleotide probe

SEQ ID NO: 7536 - DNA, 32 bp, Artificial; identical to SEQ ID NO: 6074
  oligonucleotide probe

SEQ ID NO: 7537 - DNA, 32 bp, Artificial; identical to SEQ ID NO: 6074
  oligonucleotide probe

SEQ ID NO: 7538 - DNA, 32 bp, Artificial; identical to SEQ ID NO: 6074
  oligonucleotide probe

SEQ ID NO: 7539 - DNA, 32 bp, Artificial; identical to SEQ ID NO: 5217
  oligonucleotide probe

SEQ ID NO: 7540 - DNA, 32 bp, Artificial; identical to SEQ ID NO: 5217
  oligonucleotide probe

SEQ ID NO: 7541 - DNA, 32 bp, Artificial; identical to SEQ ID NO: 5546
  oligonucleotide probe

SEQ ID NO: 7542 - DNA, 32 bp, Artificial; identical to SEQ ID NO: 5546
  oligonucleotide probe

SEQ ID NO: 7543 - DNA, 32 bp, Artificial; identical to SEQ ID NO: 5564
  oligonucleotide probe

SEQ ID NO: 7544 - DNA, 32 bp, Artificial; identical to SEQ ID NO: 5564
  oligonucleotide probe

SEQ ID NO: 7545 - DNA, 32 bp, Artificial; identical to SEQ ID NO: 5545
  oligonucleotide probe

SEQ ID NO: 7546 - DNA, 32 bp, Artificial; identical to SEQ ID NO: 5545
  oligonucleotide probe

SEQ ID NO: 7547 - DNA, 32 bp, Artificial; identical to SEQ ID NO: 5195
  oligonucleotide probe

SEQ ID NO: 7548 - DNA, 32 bp, Artificial; identical to SEQ ID NO: 5195
  oligonucleotide probe

SEQ ID NO: 7549 - DNA, 32 bp, Artificial; identical to SEQ ID NO: 5185
  oligonucleotide probe

SEQ ID NO: 7550 - DNA, 32 bp, Artificial; identical to SEQ ID NO: 5185
  oligonucleotide probe

SEQ ID NO: 7551 - DNA, 32 bp, Artificial; identical to SEQ ID NO: 5399
  oligonucleotide probe

SEQ ID NO: 7552 - DNA, 32 bp, Artificial; identical to SEQ ID NO: 5399
  oligonucleotide probe

SEQ ID NO: 7553 - DNA, 32 bp, Artificial; identical to SEQ ID NO: 5239
  oligonucleotide probe

SEQ ID NO: 7554 - DNA, 32 bp, Artificial; identical to SEQ ID NO: 5239
  oligonucleotide probe

SEQ ID NO: 7555 - DNA, 32 bp, Artificial; identical to SEQ ID NO: 5610
  oligonucleotide probe

SEQ ID NO: 7556 - DNA, 32 bp, Artificial; identical to SEQ ID NO: 5610
  oligonucleotide probe

SEQ ID NO: 7557 - DNA, 32 bp, Artificial; identical to SEQ ID NO: 5555
  oligonucleotide probe

SEQ ID NO: 7558 - DNA, 32 bp, Artificial; identical to SEQ ID NO: 5555
  oligonucleotide probe

SEQ ID NO: 7559 - DNA, 32 bp, Artificial; identical to SEQ ID NO: 5538
  oligonucleotide probe

SEQ ID NO: 7560 - DNA, 32 bp, Artificial; identical to SEQ ID NO: 5538
  oligonucleotide probe

SEQ ID NO: 7561 - DNA, 32 bp, Artificial; identical to SEQ ID NO: 5611
  oligonucleotide probe

SEQ ID NO: 7562 - DNA, 32 bp, Artificial; identical to SEQ ID NO: 5611
  oligonucleotide probe

SEQ ID NO: 7563 - DNA, 32 bp, Artificial; identical to SEQ ID NO: 5708
  oligonucleotide probe

SEQ ID NO: 7564 - DNA, 32 bp, Artificial; identical to SEQ ID NO: 5708
  oligonucleotide probe

SEQ ID NO: 7565 - DNA, 32 bp, Artificial; identical to SEQ ID NO: 5546
  oligonucleotide probe

SEQ ID NO: 7566 - DNA, 32 bp, Artificial; identical to SEQ ID NO: 5546
  oligonucleotide probe

SEQ ID NO: 7567 - DNA, 32 bp, Artificial; identical to SEQ ID NO: 5544
  oligonucleotide probe

SEQ ID NO: 7568 - DNA, 32 bp, Artificial; identical to SEQ ID NO: 5544
  oligonucleotide probe

SEQ ID NO: 7569 - DNA, 32 bp, Artificial; identical to SEQ ID NO: 5544
  oligonucleotide probe

SEQ ID NO: 7570 - DNA, 32 bp, Artificial; identical to SEQ ID NO: 5544
  oligonucleotide probe

SEQ ID NO: 7571 - DNA, 32 bp, Artificial; identical to SEQ ID NO: 5546
  oligonucleotide probe

SEQ ID NO: 7572 - DNA, 32 bp, Artificial; identical to SEQ ID NO: 5546
  oligonucleotide probe

SEQ ID NO: 7573 - DNA, 32 bp, Artificial; identical to SEQ ID NO: 5536
  oligonucleotide probe

SEQ ID NO: 7574 - DNA, 32 bp, Artificial; identical to SEQ ID NO: 5536
  oligonucleotide probe

SEQ ID NO: 7575 - DNA, 32 bp, Artificial; identical to SEQ ID NO: 5537
  oligonucleotide probe

SEQ ID NO: 7576 - DNA, 32 bp, Artificial; identical to SEQ ID NO: 5537
  oligonucleotide probe

SEQ ID NO: 7577 - DNA, 32 bp, Artificial; identical to SEQ ID NO: 5537
  oligonucleotide probe

SEQ ID NO: 7578 - DNA, 32 bp, Artificial; identical to SEQ ID NO: 5537
  oligonucleotide probe

SEQ ID NO: 7579 - DNA, 32 bp, Artificial; identical to SEQ ID NO: 5536
  oligonucleotide probe

SEQ ID NO: 7580 - DNA, 32 bp, Artificial; identical to SEQ ID NO: 5536
  oligonucleotide probe

SEQ ID NO: 7581 - DNA, 32 bp, Artificial; identical to SEQ ID NO: 5585
  oligonucleotide probe

SEQ ID NO: 7582 - DNA, 32 bp, Artificial; identical to SEQ ID NO: 5550
  oligonucleotide probe

SEQ ID NO: 7583 - DNA, 32 bp, Artificial; identical to SEQ ID NO: 5611
  oligonucleotide probe

SEQ ID NO: 7584 - DNA, 32 bp, Artificial; identical to SEQ ID NO: 5555
  oligonucleotide probe

SEQ ID NO: 7585 - DNA, 32 bp, Artificial; identical to SEQ ID NO: 6074
  oligonucleotide probe

SEQ ID NO: 7586 - DNA, 32 bp, Artificial; identical to SEQ ID NO: 5708
  oligonucleotide probe

SEQ ID NO: 7587 - DNA, 32 bp, Artificial; identical to SEQ ID NO: 5541
  oligonucleotide probe

SEQ ID NO: 7588 - DNA, 32 bp, Artificial; identical to SEQ ID NO: 6145
  oligonucleotide probe

SEQ ID NO: 7589 - DNA, 32 bp, Artificial; identical to SEQ ID NO: 5544
  oligonucleotide probe

SEQ ID NO: 7590 - DNA, 32 bp, Artificial; identical to SEQ ID NO: 5565
  oligonucleotide probe

SEQ ID NO: 7591 - DNA, 32 bp, Artificial; identical to SEQ ID NO: 5538
  oligonucleotide probe

SEQ ID NO: 7592 - DNA, 32 bp, Artificial; identical to SEQ ID NO: 5594
  oligonucleotide probe

SEQ ID NO: 7593 - DNA, 32 bp, Artificial; identical to SEQ ID NO: 5133
  oligonucleotide probe

SEQ ID NO: 7594 - DNA, 32 bp, Artificial
  oligonucleotide probe
ggctttgcgcaccgtgttcggggaaacgccgt

SEQ ID NO: 7595 - DNA, 32 bp, Artificial; identical to SEQ ID NO: 5141
  oligonucleotide probe

SEQ ID NO: 7596 - DNA, 32 bp, Artificial
  oligonucleotide probe
ttgcaagcgtccgggattcggggaaacgccgt

SEQ ID NO: 7597 - DNA, 32 bp, Artificial
  oligonucleotide probe
atggcgcagcacgctgttcggggaaacgccgt

SEQ ID NO: 7598 - DNA, 32 bp, Artificial
  oligonucleotide probe
atggcgcagcacgctgccgtttcggctgggct

SEQ ID NO: 7599 - DNA, 32 bp, Artificial; identical to SEQ ID NO: 5133
  oligonucleotide probe

SEQ ID NO: 7600 - DNA, 32 bp, Artificial; identical to SEQ ID NO: 7594
  oligonucleotide probe

SEQ ID NO: 7601 - DNA, 32 bp, Artificial; identical to SEQ ID NO: 7597
  oligonucleotide probe

SEQ ID NO: 7602 - DNA, 32 bp, Artificial; identical to SEQ ID NO: 7598
  oligonucleotide probe

SEQ ID NO: 7603 - DNA, 32 bp, Artificial; identical to SEQ ID NO: 7597
  oligonucleotide probe

SEQ ID NO: 7604 - DNA, 32 bp, Artificial; identical to SEQ ID NO: 7598
  oligonucleotide probe

SEQ ID NO: 7605 - DNA, 32 bp, Artificial
  oligonucleotide probe
aacggctgcaagcgcattcggggaaacgccgt

SEQ ID NO: 7606 - DNA, 32 bp, Artificial
  oligonucleotide probe
aacggctgcaagcgcaccgtttcggctgggct

SEQ ID NO: 7607 - DNA, 32 bp, Artificial; identical to SEQ ID NO: 5134
  oligonucleotide probe

SEQ ID NO: 7608 - DNA, 32 bp, Artificial; identical to SEQ ID NO: 7597
  oligonucleotide probe

SEQ ID NO: 7609 - DNA, 32 bp, Artificial; identical to SEQ ID NO: 7598
  oligonucleotide probe

SEQ ID NO: 7610 - DNA, 32 bp, Artificial; identical to SEQ ID NO: 5136
  oligonucleotide probe

SEQ ID NO: 7611 - DNA, 32 bp, Artificial; identical to SEQ ID NO: 5134
  oligonucleotide probe

SEQ ID NO: 7612 - DNA, 32 bp, Artificial; identical to SEQ ID NO: 7597
  oligonucleotide probe

SEQ ID NO: 7613 - DNA, 32 bp, Artificial; identical to SEQ ID NO: 5133
  oligonucleotide probe

SEQ ID NO: 7614 - DNA, 32 bp, Artificial; identical to SEQ ID NO: 7594
  oligonucleotide probe

SEQ ID NO: 7615 - DNA, 32 bp, Artificial; identical to SEQ ID NO: 7598
  oligonucleotide probe

SEQ ID NO: 7616 - DNA, 32 bp, Artificial; identical to SEQ ID NO: 5136
  oligonucleotide probe

SEQ ID NO: 7617 - DNA, 32 bp, Artificial; identical to SEQ ID NO: 7598
  oligonucleotide probe

SEQ ID NO: 7618 - DNA, 32 bp, Artificial; identical to SEQ ID NO: 5136
  oligonucleotide probe

SEQ ID NO: 7619 - DNA, 32 bp, Artificial; identical to SEQ ID NO: 5133
  oligonucleotide probe

SEQ ID NO: 7620 - DNA, 32 bp, Artificial; identical to SEQ ID NO: 7594
  oligonucleotide probe

SEQ ID NO: 7621 - DNA, 32 bp, Artificial; identical to SEQ ID NO: 7606
  oligonucleotide probe

SEQ ID NO: 7622 - DNA, 32 bp, Artificial; identical to SEQ ID NO: 5133
  oligonucleotide probe

SEQ ID NO: 7623 - DNA, 32 bp, Artificial
  oligonucleotide probe
aacggctgcaagcgcaggctttgcgcaccgtg

SEQ ID NO: 7624 - DNA, 32 bp, Artificial
  oligonucleotide probe
aacggctgcaagcgcaatggcgcagcacgctg

SEQ ID NO: 7625 - DNA, 32 bp, Artificial; identical to SEQ ID NO: 7597
  oligonucleotide probe

SEQ ID NO: 7626 - DNA, 32 bp, Artificial; identical to SEQ ID NO: 7598
  oligonucleotide probe

SEQ ID NO: 7627 - DNA, 32 bp, Artificial; identical to SEQ ID NO: 5133
  oligonucleotide probe

SEQ ID NO: 7628 - DNA, 32 bp, Artificial; identical to SEQ ID NO: 7594
  oligonucleotide probe

SEQ ID NO: 7629 - DNA, 32 bp, Artificial; identical to SEQ ID NO: 5134
  oligonucleotide probe

SEQ ID NO: 7630 - DNA, 32 bp, Artificial; identical to SEQ ID NO: 7597
  oligonucleotide probe

SEQ ID NO: 7631 - DNA, 32 bp, Artificial; identical to SEQ ID NO: 5134
  oligonucleotide probe

SEQ ID NO: 7632 - DNA, 32 bp, Artificial; identical to SEQ ID NO: 7597
  oligonucleotide probe

SEQ ID NO: 7633 - DNA, 32 bp, Artificial; identical to SEQ ID NO: 7594
  oligonucleotide probe

SEQ ID NO: 7634 - DNA, 32 bp, Artificial; identical to SEQ ID NO: 5134
  oligonucleotide probe

SEQ ID NO: 7635 - DNA, 32 bp, Artificial; identical to SEQ ID NO: 7598
  oligonucleotide probe

SEQ ID NO: 7636 - DNA, 32 bp, Artificial; identical to SEQ ID NO: 5136
  oligonucleotide probe

SEQ ID NO: 7637 - DNA, 32 bp, Artificial; identical to SEQ ID NO: 7605
  oligonucleotide probe

SEQ ID NO: 7638 - DNA, 32 bp, Artificial; identical to SEQ ID NO: 7606
  oligonucleotide probe

SEQ ID NO: 7639 - DNA, 32 bp, Artificial; identical to SEQ ID NO: 7597
  oligonucleotide probe

SEQ ID NO: 7640 - DNA, 32 bp, Artificial; identical to SEQ ID NO: 7598
  oligonucleotide probe

SEQ ID NO: 7641 - DNA, 32 bp, Artificial; identical to SEQ ID NO: 5140
  oligonucleotide probe

SEQ ID NO: 7642 - DNA, 32 bp, Artificial; identical to SEQ ID NO: 7623
  oligonucleotide probe

SEQ ID NO: 7643 - DNA, 32 bp, Artificial; identical to SEQ ID NO: 5163
  oligonucleotide probe

SEQ ID NO: 7644 - DNA, 32 bp, Artificial
  oligonucleotide probe
ttgcaagcgtccgggaggctttgcgcaccgtg

SEQ ID NO: 7645 - DNA, 32 bp, Artificial; identical to SEQ ID NO: 5134
  oligonucleotide probe

SEQ ID NO: 7646 - DNA, 32 bp, Artificial; identical to SEQ ID NO: 7597
  oligonucleotide probe

SEQ ID NO: 7647 - DNA, 32 bp, Artificial; identical to SEQ ID NO: 7624
  oligonucleotide probe

SEQ ID NO: 7648 - DNA, 32 bp, Artificial; identical to SEQ ID NO: 7605
  oligonucleotide probe

SEQ ID NO: 7649 - DNA, 32 bp, Artificial; identical to SEQ ID NO: 7598
  oligonucleotide probe

SEQ ID NO: 7650 - DNA, 32 bp, Artificial; identical to SEQ ID NO: 5136
  oligonucleotide probe

SEQ ID NO: 7651 - DNA, 32 bp, Artificial; identical to SEQ ID NO: 7623
  oligonucleotide probe

SEQ ID NO: 7652 - DNA, 32 bp, Artificial; identical to SEQ ID NO: 7624
  oligonucleotide probe

SEQ ID NO: 7653 - DNA, 32 bp, Artificial; identical to SEQ ID NO: 7644
  oligonucleotide probe

SEQ ID NO: 7654 - DNA, 32 bp, Artificial; identical to SEQ ID NO: 7624
  oligonucleotide probe

SEQ ID NO: 7655 - DNA, 32 bp, Artificial
  oligonucleotide probe
aagccgtgcgcaacgaggctttgcgcaccgtg

SEQ ID NO: 7656 - DNA, 32 bp, Artificial; identical to SEQ ID NO: 7623
  oligonucleotide probe

SEQ ID NO: 7657 - DNA, 32 bp, Artificial; identical to SEQ ID NO: 5159
  oligonucleotide probe

SEQ ID NO: 7658 - DNA, 32 bp, Artificial; identical to SEQ ID NO: 5141
  oligonucleotide probe

SEQ ID NO: 7659 - DNA, 32 bp, Artificial
  oligonucleotide probe
cgcattgcggctttcgatggcgcagcacgctg

SEQ ID NO: 7660 - DNA, 32 bp, Artificial; identical to SEQ ID NO: 5171
  oligonucleotide probe

SEQ ID NO: 7661 - DNA, 32 bp, Artificial; identical to SEQ ID NO: 5133
  oligonucleotide probe

SEQ ID NO: 7662 - DNA, 32 bp, Artificial
  oligonucleotide probe
cgcattgcggctttcgggctttgcgcaccgtg

SEQ ID NO: 7663 - DNA, 32 bp, Artificial; identical to SEQ ID NO: 7644
  oligonucleotide probe

SEQ ID NO: 7664 - DNA, 32 bp, Artificial; identical to SEQ ID NO: 5141
  oligonucleotide probe

SEQ ID NO: 7665 - DNA, 32 bp, Artificial; identical to SEQ ID NO: 5141
  oligonucleotide probe

SEQ ID NO: 7666 - DNA, 32 bp, Artificial; identical to SEQ ID NO: 7596
  oligonucleotide probe

SEQ ID NO: 7667 - DNA, 32 bp, Artificial; identical to SEQ ID NO: 5133
  oligonucleotide probe

SEQ ID NO: 7668 - DNA, 32 bp, Artificial
  oligonucleotide probe
ccgtttcggctgggctaagccgtgcgcaacga

SEQ ID NO: 7669 - DNA, 32 bp, Artificial; identical to SEQ ID NO: 5133
  oligonucleotide probe

SEQ ID NO: 7670 - DNA, 32 bp, Artificial; identical to SEQ ID NO: 7594
  oligonucleotide probe

SEQ ID NO: 7671 - DNA, 32 bp, Artificial; identical to SEQ ID NO: 5133
  oligonucleotide probe

SEQ ID NO: 7672 - DNA, 32 bp, Artificial; identical to SEQ ID NO: 7594
  oligonucleotide probe

SEQ ID NO: 7673 - DNA, 32 bp, Artificial
  oligonucleotide probe
cgcattgcggctttcgttgcaagcgtccggga

SEQ ID NO: 7674 - DNA, 32 bp, Artificial
  oligonucleotide probe
ggctttgcgcaccgtgaagccgtgcgcaacga

SEQ ID NO: 7675 - DNA, 32 bp, Artificial; identical to SEQ ID NO: 5171
  oligonucleotide probe

SEQ ID NO: 7676 - DNA, 32 bp, Artificial
  oligonucleotide probe
aagccgtgcgcaacgattgcaagcgtccggga

SEQ ID NO: 7677 - DNA, 32 bp, Artificial
  oligonucleotide probe
atggcgcagcacgctgttgcaagcgtccggga

SEQ ID NO: 7678 - DNA, 32 bp, Artificial
  oligonucleotide probe
atggcgcagcacgctgaacggctgcaagcgca

SEQ ID NO: 7679 - DNA, 32 bp, Artificial; identical to SEQ ID NO: 7597
  oligonucleotide probe

SEQ ID NO: 7680 - DNA, 32 bp, Artificial; identical to SEQ ID NO: 7598
  oligonucleotide probe

SEQ ID NO: 7681 - DNA, 32 bp, Artificial; identical to SEQ ID NO: 7662
  oligonucleotide probe

SEQ ID NO: 7682 - DNA, 32 bp, Artificial; identical to SEQ ID NO: 5163
  oligonucleotide probe

SEQ ID NO: 7683 - DNA, 32 bp, Artificial; identical to SEQ ID NO: 7594
  oligonucleotide probe

SEQ ID NO: 7684 - DNA, 32 bp, Artificial; identical to SEQ ID NO: 5134
  oligonucleotide probe

SEQ ID NO: 7685 - DNA, 32 bp, Artificial; identical to SEQ ID NO: 5171
  oligonucleotide probe

SEQ ID NO: 7686 - DNA, 32 bp, Artificial
  oligonucleotide probe
aacggctgcaagcgcaaagccgtgcgcaacga

SEQ ID NO: 7687 - DNA, 32 bp, Artificial
  oligonucleotide probe
ttcggggaaacgccgtaagccgtgcgcaacga

SEQ ID NO: 7688 - DNA, 32 bp, Artificial; identical to SEQ ID NO: 5161
  oligonucleotide probe

SEQ ID NO: 7689 - DNA, 32 bp, Artificial; identical to SEQ ID NO: 7673
  oligonucleotide probe

SEQ ID NO: 7690 - DNA, 32 bp, Artificial
  oligonucleotide probe
cgcattgcggctttcgaacggctgcaagcgca

SEQ ID NO: 7691 - DNA, 32 bp, Artificial; identical to SEQ ID NO: 7686
  oligonucleotide probe

SEQ ID NO: 7692 - DNA, 32 bp, Artificial; identical to SEQ ID NO: 7623
  oligonucleotide probe

SEQ ID NO: 7693 - DNA, 32 bp, Artificial; identical to SEQ ID NO: 5159
  oligonucleotide probe

SEQ ID NO: 7694 - DNA, 32 bp, Artificial
  oligonucleotide probe
aagccgtgcgcaacgattcggggaaacgccgt

SEQ ID NO: 7695 - DNA, 32 bp, Artificial; identical to SEQ ID NO: 7624
  oligonucleotide probe

SEQ ID NO: 7696 - DNA, 32 bp, Artificial; identical to SEQ ID NO: 7605
  oligonucleotide probe

SEQ ID NO: 7697 - DNA, 32 bp, Artificial; identical to SEQ ID NO: 7687
  oligonucleotide probe

SEQ ID NO: 7698 - DNA, 32 bp, Artificial; identical to SEQ ID NO: 5161
  oligonucleotide probe

SEQ ID NO: 7699 - DNA, 32 bp, Artificial
  oligonucleotide probe
ttcggggaaacgccgtggctttgcgcaccgtg

SEQ ID NO: 7700 - DNA, 32 bp, Artificial; identical to SEQ ID NO: 5136
  oligonucleotide probe

SEQ ID NO: 7701 - DNA, 32 bp, Artificial; identical to SEQ ID NO: 5185
  oligonucleotide probe

SEQ ID NO: 7702 - DNA, 32 bp, Artificial; identical to SEQ ID NO: 7655
  oligonucleotide probe

SEQ ID NO: 7703 - DNA, 32 bp, Artificial
  oligonucleotide probe
ccgtttcggctgggctcgcattgcggctttcg

SEQ ID NO: 7704 - DNA, 32 bp, Artificial
  oligonucleotide probe
ccgtttcggctgggctttgcaagcgtccggga

SEQ ID NO: 7705 - DNA, 32 bp, Artificial; identical to SEQ ID NO: 7644
  oligonucleotide probe

SEQ ID NO: 7706 - DNA, 32 bp, Artificial; identical to SEQ ID NO: 5141
  oligonucleotide probe

SEQ ID NO: 7707 - DNA, 32 bp, Artificial; identical to SEQ ID NO: 7690
  oligonucleotide probe

SEQ ID NO: 7708 - DNA, 32 bp, Artificial; identical to SEQ ID NO: 7662
  oligonucleotide probe

SEQ ID NO: 7709 - DNA, 32 bp, Artificial; identical to SEQ ID NO: 5171
  oligonucleotide probe

SEQ ID NO: 7710 - DNA, 32 bp, Artificial; identical to SEQ ID NO: 7676
  oligonucleotide probe

SEQ ID NO: 7711 - DNA, 32 bp, Artificial; identical to SEQ ID NO: 7690
  oligonucleotide probe

SEQ ID NO: 7712 - DNA, 32 bp, Artificial; identical to SEQ ID NO: 5163
  oligonucleotide probe

SEQ ID NO: 7713 - DNA, 32 bp, Artificial; identical to SEQ ID NO: 5171
  oligonucleotide probe

SEQ ID NO: 7714 - DNA, 32 bp, Artificial; identical to SEQ ID NO: 7676
  oligonucleotide probe

SEQ ID NO: 7715 - DNA, 32 bp, Artificial; identical to SEQ ID NO: 7624
  oligonucleotide probe

SEQ ID NO: 7716 - DNA, 32 bp, Artificial; identical to SEQ ID NO: 7605
  oligonucleotide probe

SEQ ID NO: 7717 - DNA, 32 bp, Artificial; identical to SEQ ID NO: 7596
  oligonucleotide probe

SEQ ID NO: 7718 - DNA, 32 bp, Artificial; identical to SEQ ID NO: 7623
  oligonucleotide probe

SEQ ID NO: 7719 - DNA, 32 bp, Artificial; identical to SEQ ID NO: 5177
  oligonucleotide probe

SEQ ID NO: 7720 - DNA, 32 bp, Artificial
  oligonucleotide probe
ggctttgcgcaccgtgttgcaagcgtccggga

SEQ ID NO: 7721 - DNA, 32 bp, Artificial
  oligonucleotide probe
atggcgcagcacgctgaagccgtgcgcaacga

SEQ ID NO: 7722 - DNA, 32 bp, Artificial
  oligonucleotide probe
atggcgcagcacgctgcgcattgcggctttcg

SEQ ID NO: 7723 - DNA, 32 bp, Artificial; identical to SEQ ID NO: 7668
  oligonucleotide probe

SEQ ID NO: 7724 - DNA, 32 bp, Artificial; identical to SEQ ID NO: 7703
  oligonucleotide probe

SEQ ID NO: 7725 - DNA, 32 bp, Artificial; identical to SEQ ID NO: 5136
  oligonucleotide probe

SEQ ID NO: 7726 - DNA, 32 bp, Artificial; identical to SEQ ID NO: 7668
  oligonucleotide probe

SEQ ID NO: 7727 - DNA, 32 bp, Artificial; identical to SEQ ID NO: 7597
  oligonucleotide probe

SEQ ID NO: 7728 - DNA, 32 bp, Artificial; identical to SEQ ID NO: 7598
  oligonucleotide probe

SEQ ID NO: 7729 - DNA, 32 bp, Artificial; identical to SEQ ID NO: 5185
  oligonucleotide probe

SEQ ID NO: 7730 - DNA, 32 bp, Artificial; identical to SEQ ID NO: 7673
  oligonucleotide probe

SEQ ID NO: 7731 - DNA, 32 bp, Artificial; identical to SEQ ID NO: 7623
  oligonucleotide probe

SEQ ID NO: 7732 - DNA, 32 bp, Artificial; identical to SEQ ID NO: 7624
  oligonucleotide probe

SEQ ID NO: 7733 - DNA, 32 bp, Artificial; identical to SEQ ID NO: 5171
  oligonucleotide probe

SEQ ID NO: 7734 - DNA, 32 bp, Artificial; identical to SEQ ID NO: 7676
  oligonucleotide probe

SEQ ID NO: 7735 - DNA, 32 bp, Artificial; identical to SEQ ID NO: 7662
  oligonucleotide probe

SEQ ID NO: 7736 - DNA, 32 bp, Artificial; identical to SEQ ID NO: 7659
  oligonucleotide probe

SEQ ID NO: 7737 - DNA, 32 bp, Artificial; identical to SEQ ID NO: 7597
  oligonucleotide probe

SEQ ID NO: 7738 - DNA, 32 bp, Artificial; identical to SEQ ID NO: 7598
  oligonucleotide probe

SEQ ID NO: 7739 - DNA, 32 bp, Artificial; identical to SEQ ID NO: 7644
  oligonucleotide probe

SEQ ID NO: 7740 - DNA, 32 bp, Artificial; identical to SEQ ID NO: 7623
  oligonucleotide probe

SEQ ID NO: 7741 - DNA, 32 bp, Artificial; identical to SEQ ID NO: 7703
  oligonucleotide probe

SEQ ID NO: 7742 - DNA, 32 bp, Artificial; identical to SEQ ID NO: 7704
  oligonucleotide probe

SEQ ID NO: 7743 - DNA, 32 bp, Artificial; identical to SEQ ID NO: 7606
  oligonucleotide probe

SEQ ID NO: 7744 - DNA, 32 bp, Artificial; identical to SEQ ID NO: 7674
  oligonucleotide probe

SEQ ID NO: 7745 - DNA, 32 bp, Artificial
  oligonucleotide probe
ccgtttcggctgggctaacggctgcaagcgca

SEQ ID NO: 7746 - DNA, 32 bp, Artificial
  oligonucleotide probe
ccgtttcggctgggctggctttgcgcaccgtg

SEQ ID NO: 7747 - DNA, 32 bp, Artificial
  oligonucleotide probe
ttcggggaaacgccgtttgcaagcgtccggga

SEQ ID NO: 7748 - DNA, 32 bp, Artificial; identical to SEQ ID NO: 5138
  oligonucleotide probe

SEQ ID NO: 7749 - DNA, 32 bp, Artificial; identical to SEQ ID NO: 7747
  oligonucleotide probe

SEQ ID NO: 7750 - DNA, 32 bp, Artificial; identical to SEQ ID NO: 5138
  oligonucleotide probe

SEQ ID NO: 7751 - DNA, 32 bp, Artificial; identical to SEQ ID NO: 7673
  oligonucleotide probe

SEQ ID NO: 7752 - DNA, 32 bp, Artificial; identical to SEQ ID NO: 7690
  oligonucleotide probe

SEQ ID NO: 7753 - DNA, 32 bp, Artificial; identical to SEQ ID NO: 7596
  oligonucleotide probe

SEQ ID NO: 7754 - DNA, 32 bp, Artificial; identical to SEQ ID NO: 5140
  oligonucleotide probe

SEQ ID NO: 7755 - DNA, 32 bp, Artificial; identical to SEQ ID NO: 5134
  oligonucleotide probe

SEQ ID NO: 7756 - DNA, 32 bp, Artificial; identical to SEQ ID NO: 7721
  oligonucleotide probe

SEQ ID NO: 7757 - DNA, 32 bp, Artificial; identical to SEQ ID NO: 5133
  oligonucleotide probe

SEQ ID NO: 7758 - DNA, 32 bp, Artificial; identical to SEQ ID NO: 7594
  oligonucleotide probe

SEQ ID NO: 7759 - DNA, 32 bp, Artificial; identical to SEQ ID NO: 7722
  oligonucleotide probe

SEQ ID NO: 7760 - DNA, 32 bp, Artificial; identical to SEQ ID NO: 7677
  oligonucleotide probe

SEQ ID NO: 7761 - DNA, 32 bp, Artificial; identical to SEQ ID NO: 5136
  oligonucleotide probe

SEQ ID NO: 7762 - DNA, 32 bp, Artificial; identical to SEQ ID NO: 7668
  oligonucleotide probe

SEQ ID NO: 7763 - DNA, 32 bp, Artificial; identical to SEQ ID NO: 7624
  oligonucleotide probe

SEQ ID NO: 7764 - DNA, 32 bp, Artificial; identical to SEQ ID NO: 7605
  oligonucleotide probe

SEQ ID NO: 7765 - DNA, 32 bp, Artificial; identical to SEQ ID NO: 7606
  oligonucleotide probe

SEQ ID NO: 7766 - DNA, 32 bp, Artificial; identical to SEQ ID NO: 7674
  oligonucleotide probe

SEQ ID NO: 7767 - DNA, 32 bp, Artificial; identical to SEQ ID NO: 7668
  oligonucleotide probe

SEQ ID NO: 7768 - DNA, 32 bp, Artificial; identical to SEQ ID NO: 7703
  oligonucleotide probe

SEQ ID NO: 7769 - DNA, 32 bp, Artificial; identical to SEQ ID NO: 7673
  oligonucleotide probe

SEQ ID NO: 7770 - DNA, 32 bp, Artificial; identical to SEQ ID NO: 7690
  oligonucleotide probe

SEQ ID NO: 7771 - DNA, 32 bp, Artificial; identical to SEQ ID NO: 7721
  oligonucleotide probe

SEQ ID NO: 7772 - DNA, 32 bp, Artificial; identical to SEQ ID NO: 7722
  oligonucleotide probe

SEQ ID NO: 7773 - DNA, 32 bp, Artificial; identical to SEQ ID NO: 5140
  oligonucleotide probe

SEQ ID NO: 7774 - DNA, 32 bp, Artificial; identical to SEQ ID NO: 7623
  oligonucleotide probe

SEQ ID NO: 7775 - DNA, 32 bp, Artificial; identical to SEQ ID NO: 7659
  oligonucleotide probe

SEQ ID NO: 7776 - DNA, 32 bp, Artificial; identical to SEQ ID NO: 5163
  oligonucleotide probe

SEQ ID NO: 7777 - DNA, 32 bp, Artificial; identical to SEQ ID NO: 5177
  oligonucleotide probe

SEQ ID NO: 7778 - DNA, 32 bp, Artificial; identical to SEQ ID NO: 5133
  oligonucleotide probe

SEQ ID NO: 7779 - DNA, 32 bp, Artificial
  oligonucleotide probe
ttgcaagcgtccgggaaagccgtgcgcaacga

SEQ ID NO: 7780 - DNA, 32 bp, Artificial; identical to SEQ ID NO: 5163
  oligonucleotide probe

SEQ ID NO: 7781 - DNA, 32 bp, Artificial; identical to SEQ ID NO: 5159
  oligonucleotide probe

SEQ ID NO: 7782 - DNA, 32 bp, Artificial; identical to SEQ ID NO: 7673
  oligonucleotide probe

SEQ ID NO: 7783 - DNA, 32 bp, Artificial
  oligonucleotide probe
cgcattgcggctttcgttcggggaaacgccgt

SEQ ID NO: 7784 - DNA, 32 bp, Artificial; identical to SEQ ID NO: 5163
  oligonucleotide probe

SEQ ID NO: 7785 - DNA, 32 bp, Artificial; identical to SEQ ID NO: 5171
  oligonucleotide probe

SEQ ID NO: 7786 - DNA, 32 bp, Artificial; identical to SEQ ID NO: 7676
  oligonucleotide probe

SEQ ID NO: 7787 - DNA, 32 bp, Artificial
  oligonucleotide probe
aacggctgcaagcgcacgcattgcggctttcg

SEQ ID NO: 7788 - DNA, 32 bp, Artificial; identical to SEQ ID NO: 7623
  oligonucleotide probe

SEQ ID NO: 7789 - DNA, 32 bp, Artificial; identical to SEQ ID NO: 7644
  oligonucleotide probe

SEQ ID NO: 7790 - DNA, 32 bp, Artificial; identical to SEQ ID NO: 5141
  oligonucleotide probe

SEQ ID NO: 7791 - DNA, 32 bp, Artificial; identical to SEQ ID NO: 7624
  oligonucleotide probe

SEQ ID NO: 7792 - DNA, 32 bp, Artificial; identical to SEQ ID NO: 7605
  oligonucleotide probe

SEQ ID NO: 7793 - DNA, 32 bp, Artificial; identical to SEQ ID NO: 7687
  oligonucleotide probe

SEQ ID NO: 7794 - DNA, 32 bp, Artificial; identical to SEQ ID NO: 5161
  oligonucleotide probe

SEQ ID NO: 7795 - DNA, 32 bp, Artificial; identical to SEQ ID NO: 7704
  oligonucleotide probe

SEQ ID NO: 7796 - DNA, 32 bp, Artificial; identical to SEQ ID NO: 7745
  oligonucleotide probe

SEQ ID NO: 7797 - DNA, 32 bp, Artificial; identical to SEQ ID NO: 7597
  oligonucleotide probe

SEQ ID NO: 7798 - DNA, 32 bp, Artificial; identical to SEQ ID NO: 7598
  oligonucleotide probe

SEQ ID NO: 7799 - DNA, 32 bp, Artificial; identical to SEQ ID NO: 7747
  oligonucleotide probe

SEQ ID NO: 7800 - DNA, 32 bp, Artificial; identical to SEQ ID NO: 5136
  oligonucleotide probe

SEQ ID NO: 7801 - DNA, 32 bp, Artificial; identical to SEQ ID NO: 7687
  oligonucleotide probe

SEQ ID NO: 7802 - DNA, 32 bp, Artificial; identical to SEQ ID NO: 5161
  oligonucleotide probe

SEQ ID NO: 7803 - DNA, 32 bp, Artificial; identical to SEQ ID NO: 5163
  oligonucleotide probe

SEQ ID NO: 7804 - DNA, 32 bp, Artificial; identical to SEQ ID NO: 7644
  oligonucleotide probe

SEQ ID NO: 7805 - DNA, 32 bp, Artificial; identical to SEQ ID NO: 7597
  oligonucleotide probe

SEQ ID NO: 7806 - DNA, 32 bp, Artificial; identical to SEQ ID NO: 7598
  oligonucleotide probe

SEQ ID NO: 7807 - DNA, 32 bp, Artificial; identical to SEQ ID NO: 7594
  oligonucleotide probe

SEQ ID NO: 7808 - DNA, 32 bp, Artificial; identical to SEQ ID NO: 5134
  oligonucleotide probe

SEQ ID NO: 7809 - DNA, 32 bp, Artificial; identical to SEQ ID NO: 5185
  oligonucleotide probe

SEQ ID NO: 7810 - DNA, 32 bp, Artificial; identical to SEQ ID NO: 7655
  oligonucleotide probe

SEQ ID NO: 7811 - DNA, 32 bp, Artificial; identical to SEQ ID NO: 7783
  oligonucleotide probe

SEQ ID NO: 7812 - DNA, 32 bp, Artificial
  oligonucleotide probe
cgcattgcggctttcgccgtttcggctgggct

SEQ ID NO: 7813 - DNA, 32 bp, Artificial; identical to SEQ ID NO: 7606
  oligonucleotide probe

SEQ ID NO: 7814 - DNA, 32 bp, Artificial; identical to SEQ ID NO: 5133
  oligonucleotide probe

SEQ ID NO: 7815 - DNA, 32 bp, Artificial; identical to SEQ ID NO: 5185
  oligonucleotide probe

SEQ ID NO: 7816 - DNA, 32 bp, Artificial; identical to SEQ ID NO: 7655
  oligonucleotide probe

SEQ ID NO: 7817 - DNA, 32 bp, Artificial; identical to SEQ ID NO: 5134
  oligonucleotide probe

SEQ ID NO: 7818 - DNA, 32 bp, Artificial; identical to SEQ ID NO: 7721
  oligonucleotide probe

SEQ ID NO: 7819 - DNA, 32 bp, Artificial; identical to SEQ ID NO: 7687
  oligonucleotide probe

SEQ ID NO: 7820 - DNA, 32 bp, Artificial; identical to SEQ ID NO: 5136
  oligonucleotide probe

SEQ ID NO: 7821 - DNA, 32 bp, Artificial; identical to SEQ ID NO: 7662
  oligonucleotide probe

SEQ ID NO: 7822 - DNA, 32 bp, Artificial; identical to SEQ ID NO: 7659
  oligonucleotide probe

SEQ ID NO: 7823 - DNA, 32 bp, Artificial; identical to SEQ ID NO: 5136
  oligonucleotide probe

SEQ ID NO: 7824 - DNA, 32 bp, Artificial; identical to SEQ ID NO: 7703
  oligonucleotide probe

SEQ ID NO: 7825 - DNA, 32 bp, Artificial; identical to SEQ ID NO: 7704
  oligonucleotide probe

SEQ ID NO: 7826 - DNA, 32 bp, Artificial; identical to SEQ ID NO: 7597
  oligonucleotide probe

SEQ ID NO: 7827 - DNA, 32 bp, Artificial; identical to SEQ ID NO: 7745
  oligonucleotide probe

SEQ ID NO: 7828 - DNA, 32 bp, Artificial
  oligonucleotide probe
ccgtttcggctgggctatggcgcagcacgctg

SEQ ID NO: 7829 - DNA, 32 bp, Artificial; identical to SEQ ID NO: 7668
  oligonucleotide probe

SEQ ID NO: 7830 - DNA, 32 bp, Artificial; identical to SEQ ID NO: 7746
  oligonucleotide probe

SEQ ID NO: 7831 - DNA, 32 bp, Artificial
  oligonucleotide probe
ccgtttcggctgggctccgtcgcaaagcgcac

SEQ ID NO: 7832 - DNA, 32 bp, Artificial
  oligonucleotide probe
ccgtttcggctgggctggctgcacggtcccgt

SEQ ID NO: 7833 - DNA, 32 bp, Artificial
  oligonucleotide probe
ccgtttcggctgggctaacgcgatttgccgca

SEQ ID NO: 7834 - DNA, 32 bp, Artificial
  oligonucleotide probe
ccgtttcggctgggctttcgccgtttgcgctg

SEQ ID NO: 7835 - DNA, 32 bp, Artificial
  oligonucleotide probe
ggctttgcgcaccgtgccgtcgcaaagcgcac

SEQ ID NO: 7836 - DNA, 32 bp, Artificial; identical to SEQ ID NO: 5232
  oligonucleotide probe

SEQ ID NO: 7837 - DNA, 32 bp, Artificial; identical to SEQ ID NO: 5223
  oligonucleotide probe

SEQ ID NO: 7838 - DNA, 32 bp, Artificial
  oligonucleotide probe
aacgcgatttgccgcaccgtcgcaaagcgcac

SEQ ID NO: 7839 - DNA, 32 bp, Artificial; identical to SEQ ID NO: 5224
  oligonucleotide probe

SEQ ID NO: 7840 - DNA, 32 bp, Artificial
  oligonucleotide probe
ttcgccgtttgcgctgccgtcgcaaagcgcac

SEQ ID NO: 7841 - DNA, 32 bp, Artificial
  oligonucleotide probe
aacggctgcaagcgcaccgtcgcaaagcgcac

SEQ ID NO: 7842 - DNA, 32 bp, Artificial
  oligonucleotide probe
aacggctgcaagcgcaggctgcacggtcccgt

SEQ ID NO: 7843 - DNA, 32 bp, Artificial; identical to SEQ ID NO: 5224
  oligonucleotide probe

SEQ ID NO: 7844 - DNA, 32 bp, Artificial; identical to SEQ ID NO: 7840
  oligonucleotide probe

SEQ ID NO: 7845 - DNA, 32 bp, Artificial; identical to SEQ ID NO: 7833
  oligonucleotide probe

SEQ ID NO: 7846 - DNA, 32 bp, Artificial; identical to SEQ ID NO: 7834
  oligonucleotide probe

SEQ ID NO: 7847 - DNA, 32 bp, Artificial; identical to SEQ ID NO: 7833
  oligonucleotide probe

SEQ ID NO: 7848 - DNA, 32 bp, Artificial; identical to SEQ ID NO: 7834
  oligonucleotide probe

SEQ ID NO: 7849 - DNA, 32 bp, Artificial; identical to SEQ ID NO: 5224
  oligonucleotide probe

SEQ ID NO: 7850 - DNA, 32 bp, Artificial; identical to SEQ ID NO: 7840
  oligonucleotide probe

SEQ ID NO: 7851 - DNA, 32 bp, Artificial; identical to SEQ ID NO: 5223
  oligonucleotide probe

SEQ ID NO: 7852 - DNA, 32 bp, Artificial; identical to SEQ ID NO: 7838
  oligonucleotide probe

SEQ ID NO: 7853 - DNA, 32 bp, Artificial
  oligonucleotide probe
ttcgccgtttgcgctgggctgcacggtcccgt

SEQ ID NO: 7854 - DNA, 32 bp, Artificial; identical to SEQ ID NO: 5220
  oligonucleotide probe

SEQ ID NO: 7855 - DNA, 32 bp, Artificial
  oligonucleotide probe
atggcgcagcacgctgaacgcgatttgccgca

SEQ ID NO: 7856 - DNA, 32 bp, Artificial
  oligonucleotide probe
atggcgcagcacgctgttcgccgtttgcgctg

SEQ ID NO: 7857 - DNA, 32 bp, Artificial; identical to SEQ ID NO: 5224
  oligonucleotide probe

SEQ ID NO: 7858 - DNA, 32 bp, Artificial; identical to SEQ ID NO: 7840
  oligonucleotide probe

SEQ ID NO: 7859 - DNA, 32 bp, Artificial; identical to SEQ ID NO: 7855
  oligonucleotide probe

SEQ ID NO: 7860 - DNA, 32 bp, Artificial; identical to SEQ ID NO: 7856
  oligonucleotide probe

SEQ ID NO: 7861 - DNA, 32 bp, Artificial; identical to SEQ ID NO: 5224
  oligonucleotide probe

SEQ ID NO: 7862 - DNA, 32 bp, Artificial; identical to SEQ ID NO: 7840
  oligonucleotide probe

SEQ ID NO: 7863 - DNA, 32 bp, Artificial
  oligonucleotide probe
ttcggggaaacgccgtaacgcgatttgccgca

SEQ ID NO: 7864 - DNA, 32 bp, Artificial; identical to SEQ ID NO: 5217
  oligonucleotide probe

SEQ ID NO: 7865 - DNA, 32 bp, Artificial
  oligonucleotide probe
atggcgcagcacgctgccgtcgcaaagcgcac

SEQ ID NO: 7866 - DNA, 32 bp, Artificial
  oligonucleotide probe
atggcgcagcacgctgggctgcacggtcccgt

SEQ ID NO: 7867 - DNA, 32 bp, Artificial; identical to SEQ ID NO: 7865
  oligonucleotide probe

SEQ ID NO: 7868 - DNA, 32 bp, Artificial; identical to SEQ ID NO: 7866
  oligonucleotide probe

SEQ ID NO: 7869 - DNA, 32 bp, Artificial; identical to SEQ ID NO: 5223
  oligonucleotide probe

SEQ ID NO: 7870 - DNA, 32 bp, Artificial; identical to SEQ ID NO: 7838
  oligonucleotide probe

SEQ ID NO: 7871 - DNA, 32 bp, Artificial; identical to SEQ ID NO: 5224
  oligonucleotide probe

SEQ ID NO: 7872 - DNA, 32 bp, Artificial; identical to SEQ ID NO: 7840
  oligonucleotide probe

SEQ ID NO: 7873 - DNA, 32 bp, Artificial; identical to SEQ ID NO: 7853
  oligonucleotide probe

SEQ ID NO: 7874 - DNA, 32 bp, Artificial; identical to SEQ ID NO: 5220
  oligonucleotide probe

SEQ ID NO: 7875 - DNA, 32 bp, Artificial; identical to SEQ ID NO: 7853
  oligonucleotide probe

SEQ ID NO: 7876 - DNA, 32 bp, Artificial; identical to SEQ ID NO: 5220
  oligonucleotide probe

SEQ ID NO: 7877 - DNA, 32 bp, Artificial; identical to SEQ ID NO: 7853
  oligonucleotide probe

SEQ ID NO: 7878 - DNA, 32 bp, Artificial; identical to SEQ ID NO: 5220
  oligonucleotide probe

SEQ ID NO: 7879 - DNA, 32 bp, Artificial; identical to SEQ ID NO: 7833
  oligonucleotide probe

SEQ ID NO: 7880 - DNA, 32 bp, Artificial; identical to SEQ ID NO: 7834
  oligonucleotide probe

SEQ ID NO: 7881 - DNA, 32 bp, Artificial; identical to SEQ ID NO: 7855
  oligonucleotide probe

SEQ ID NO: 7882 - DNA, 32 bp, Artificial; identical to SEQ ID NO: 7856
  oligonucleotide probe

SEQ ID NO: 7883 - DNA, 32 bp, Artificial; identical to SEQ ID NO: 7863
  oligonucleotide probe

SEQ ID NO: 7884 - DNA, 32 bp, Artificial; identical to SEQ ID NO: 5217
  oligonucleotide probe

SEQ ID NO: 7885 - DNA, 32 bp, Artificial; identical to SEQ ID NO: 7831
  oligonucleotide probe

SEQ ID NO: 7886 - DNA, 32 bp, Artificial; identical to SEQ ID NO: 7832
  oligonucleotide probe

SEQ ID NO: 7887 - DNA, 32 bp, Artificial; identical to SEQ ID NO: 7835
  oligonucleotide probe

SEQ ID NO: 7888 - DNA, 32 bp, Artificial; identical to SEQ ID NO: 5232
  oligonucleotide probe

SEQ ID NO: 7889 - DNA, 32 bp, Artificial; identical to SEQ ID NO: 7855
  oligonucleotide probe

SEQ ID NO: 7890 - DNA, 32 bp, Artificial; identical to SEQ ID NO: 7856
  oligonucleotide probe

SEQ ID NO: 7891 - DNA, 32 bp, Artificial
  oligonucleotide probe
ttcggggaaacgccgtccgtcgcaaagcgcac

SEQ ID NO: 7892 - DNA, 32 bp, Artificial; identical to SEQ ID NO: 5218
  oligonucleotide probe

SEQ ID NO: 7893 - DNA, 32 bp, Artificial; identical to SEQ ID NO: 7835
  oligonucleotide probe

SEQ ID NO: 7894 - DNA, 32 bp, Artificial; identical to SEQ ID NO: 5232
  oligonucleotide probe

SEQ ID NO: 7895 - DNA, 32 bp, Artificial; identical to SEQ ID NO: 7840
  oligonucleotide probe

SEQ ID NO: 7896 - DNA, 32 bp, Artificial; identical to SEQ ID NO: 7853
  oligonucleotide probe

SEQ ID NO: 7897 - DNA, 32 bp, Artificial; identical to SEQ ID NO: 7831
  oligonucleotide probe

SEQ ID NO: 7898 - DNA, 32 bp, Artificial; identical to SEQ ID NO: 7832
  oligonucleotide probe

SEQ ID NO: 7899 - DNA, 32 bp, Artificial; identical to SEQ ID NO: 7865
  oligonucleotide probe

SEQ ID NO: 7900 - DNA, 32 bp, Artificial; identical to SEQ ID NO: 7866
  oligonucleotide probe

SEQ ID NO: 7901 - DNA, 32 bp, Artificial; identical to SEQ ID NO: 7855
  oligonucleotide probe

SEQ ID NO: 7902 - DNA, 32 bp, Artificial; identical to SEQ ID NO: 7856
  oligonucleotide probe

SEQ ID NO: 7903 - DNA, 32 bp, Artificial; identical to SEQ ID NO: 7853
  oligonucleotide probe

SEQ ID NO: 7904 - DNA, 32 bp, Artificial; identical to SEQ ID NO: 5220
  oligonucleotide probe

SEQ ID NO: 7905 - DNA, 32 bp, Artificial
  oligonucleotide probe
ggctttgcgcaccgtgaacgcgatttgccgca

SEQ ID NO: 7906 - DNA, 32 bp, Artificial; identical to SEQ ID NO: 5231
  oligonucleotide probe

SEQ ID NO: 7907 - DNA, 32 bp, Artificial; identical to SEQ ID NO: 7863
  oligonucleotide probe

SEQ ID NO: 7908 - DNA, 32 bp, Artificial; identical to SEQ ID NO: 5217
  oligonucleotide probe

SEQ ID NO: 7909 - DNA, 32 bp, Artificial; identical to SEQ ID NO: 7853
  oligonucleotide probe

SEQ ID NO: 7910 - DNA, 32 bp, Artificial; identical to SEQ ID NO: 5220
  oligonucleotide probe

SEQ ID NO: 7911 - DNA, 32 bp, Artificial; identical to SEQ ID NO: 5224
  oligonucleotide probe

SEQ ID NO: 7912 - DNA, 32 bp, Artificial; identical to SEQ ID NO: 7840
  oligonucleotide probe

SEQ ID NO: 7913 - DNA, 32 bp, Artificial; identical to SEQ ID NO: 7891
  oligonucleotide probe

SEQ ID NO: 7914 - DNA, 32 bp, Artificial; identical to SEQ ID NO: 5218
  oligonucleotide probe

SEQ ID NO: 7915 - DNA, 32 bp, Artificial; identical to SEQ ID NO: 7831
  oligonucleotide probe

SEQ ID NO: 7916 - DNA, 32 bp, Artificial; identical to SEQ ID NO: 7832
  oligonucleotide probe

SEQ ID NO: 7917 - DNA, 32 bp, Artificial; identical to SEQ ID NO: 5224
  oligonucleotide probe

SEQ ID NO: 7918 - DNA, 32 bp, Artificial; identical to SEQ ID NO: 7840
  oligonucleotide probe

SEQ ID NO: 7919 - DNA, 32 bp, Artificial; identical to SEQ ID NO: 5223
  oligonucleotide probe

SEQ ID NO: 7920 - DNA, 32 bp, Artificial; identical to SEQ ID NO: 7838
  oligonucleotide probe

SEQ ID NO: 7921 - DNA, 32 bp, Artificial; identical to SEQ ID NO: 7863
  oligonucleotide probe

SEQ ID NO: 7922 - DNA, 32 bp, Artificial; identical to SEQ ID NO: 5217
  oligonucleotide probe

SEQ ID NO: 7923 - DNA, 32 bp, Artificial; identical to SEQ ID NO: 7853
  oligonucleotide probe

SEQ ID NO: 7924 - DNA, 32 bp, Artificial; identical to SEQ ID NO: 5220
  oligonucleotide probe

SEQ ID NO: 7925 - DNA, 32 bp, Artificial; identical to SEQ ID NO: 7833
  oligonucleotide probe

SEQ ID NO: 7926 - DNA, 32 bp, Artificial; identical to SEQ ID NO: 7834
  oligonucleotide probe

SEQ ID NO: 7927 - DNA, 32 bp, Artificial; identical to SEQ ID NO: 7835
  oligonucleotide probe

SEQ ID NO: 7928 - DNA, 32 bp, Artificial; identical to SEQ ID NO: 5232
  oligonucleotide probe

SEQ ID NO: 7929 - DNA, 32 bp, Artificial; identical to SEQ ID NO: 7831
  oligonucleotide probe

SEQ ID NO: 7930 - DNA, 32 bp, Artificial; identical to SEQ ID NO: 7832
  oligonucleotide probe

SEQ ID NO: 7931 - DNA, 32 bp, Artificial; identical to SEQ ID NO: 7865
  oligonucleotide probe

SEQ ID NO: 7932 - DNA, 32 bp, Artificial; identical to SEQ ID NO: 7866
  oligonucleotide probe

SEQ ID NO: 7933 - DNA, 32 bp, Artificial; identical to SEQ ID NO: 5224
  oligonucleotide probe

SEQ ID NO: 7934 - DNA, 32 bp, Artificial; identical to SEQ ID NO: 7840
  oligonucleotide probe

SEQ ID NO: 7935 - DNA, 32 bp, Artificial; identical to SEQ ID NO: 7831
  oligonucleotide probe

SEQ ID NO: 7936 - DNA, 32 bp, Artificial; identical to SEQ ID NO: 7832
  oligonucleotide probe

SEQ ID NO: 7937 - DNA, 32 bp, Artificial; identical to SEQ ID NO: 5224
  oligonucleotide probe

SEQ ID NO: 7938 - DNA, 32 bp, Artificial; identical to SEQ ID NO: 7840
  oligonucleotide probe

SEQ ID NO: 7939 - DNA, 32 bp, Artificial; identical to SEQ ID NO: 5223
  oligonucleotide probe

SEQ ID NO: 7940 - DNA, 32 bp, Artificial; identical to SEQ ID NO: 7838
  oligonucleotide probe

SEQ ID NO: 7941 - DNA, 32 bp, Artificial; identical to SEQ ID NO: 7833
  oligonucleotide probe

SEQ ID NO: 7942 - DNA, 32 bp, Artificial; identical to SEQ ID NO: 7834
  oligonucleotide probe

SEQ ID NO: 7943 - DNA, 32 bp, Artificial; identical to SEQ ID NO: 5223
  oligonucleotide probe

SEQ ID NO: 7944 - DNA, 32 bp, Artificial; identical to SEQ ID NO: 7838
  oligonucleotide probe

SEQ ID NO: 7945 - DNA, 32 bp, Artificial; identical to SEQ ID NO: 5224
  oligonucleotide probe

SEQ ID NO: 7946 - DNA, 32 bp, Artificial; identical to SEQ ID NO: 7840
  oligonucleotide probe

SEQ ID NO: 7947 - DNA, 32 bp, Artificial
  oligonucleotide probe
aacggctgcaagcgcaaacgcgatttgccgca

SEQ ID NO: 7948 - DNA, 32 bp, Artificial
  oligonucleotide probe
aacggctgcaagcgcattcgccgtttgcgctg

SEQ ID NO: 7949 - DNA, 32 bp, Artificial; identical to SEQ ID NO: 5223
  oligonucleotide probe

SEQ ID NO: 7950 - DNA, 32 bp, Artificial; identical to SEQ ID NO: 7838
  oligonucleotide probe

SEQ ID NO: 7951 - DNA, 32 bp, Artificial; identical to SEQ ID NO: 7891
  oligonucleotide probe

SEQ ID NO: 7952 - DNA, 32 bp, Artificial; identical to SEQ ID NO: 5218
  oligonucleotide probe

SEQ ID NO: 7953 - DNA, 32 bp, Artificial; identical to SEQ ID NO: 5224
  oligonucleotide probe

SEQ ID NO: 7954 - DNA, 32 bp, Artificial; identical to SEQ ID NO: 7840
  oligonucleotide probe

SEQ ID NO: 7955 - DNA, 32 bp, Artificial; identical to SEQ ID NO: 7891
  oligonucleotide probe

SEQ ID NO: 7956 - DNA, 32 bp, Artificial; identical to SEQ ID NO: 5218
  oligonucleotide probe

SEQ ID NO: 7957 - DNA, 32 bp, Artificial; identical to SEQ ID NO: 7863
  oligonucleotide probe

SEQ ID NO: 7958 - DNA, 32 bp, Artificial; identical to SEQ ID NO: 5217
  oligonucleotide probe

SEQ ID NO: 7959 - DNA, 32 bp, Artificial; identical to SEQ ID NO: 7891
  oligonucleotide probe

SEQ ID NO: 7960 - DNA, 32 bp, Artificial; identical to SEQ ID NO: 5218
  oligonucleotide probe

SEQ ID NO: 7961 - DNA, 32 bp, Artificial; identical to SEQ ID NO: 7833
  oligonucleotide probe

SEQ ID NO: 7962 - DNA, 32 bp, Artificial; identical to SEQ ID NO: 7834
  oligonucleotide probe

SEQ ID NO: 7963 - DNA, 32 bp, Artificial; identical to SEQ ID NO: 7865
  oligonucleotide probe

SEQ ID NO: 7964 - DNA, 32 bp, Artificial; identical to SEQ ID NO: 7866
  oligonucleotide probe

SEQ ID NO: 7965 - DNA, 32 bp, Artificial; identical to SEQ ID NO: 7865
  oligonucleotide probe

SEQ ID NO: 7966 - DNA, 32 bp, Artificial; identical to SEQ ID NO: 7866
  oligonucleotide probe

SEQ ID NO: 7967 - DNA, 32 bp, Artificial; identical to SEQ ID NO: 5223
  oligonucleotide probe

SEQ ID NO: 7968 - DNA, 32 bp, Artificial; identical to SEQ ID NO: 7838
  oligonucleotide probe

SEQ ID NO: 7969 - DNA, 32 bp, Artificial; identical to SEQ ID NO: 5224
  oligonucleotide probe

SEQ ID NO: 7970 - DNA, 32 bp, Artificial; identical to SEQ ID NO: 7840
  oligonucleotide probe

SEQ ID NO: 7971 - DNA, 32 bp, Artificial; identical to SEQ ID NO: 7840
  oligonucleotide probe

SEQ ID NO: 7972 - DNA, 32 bp, Artificial; identical to SEQ ID NO: 7853
  oligonucleotide probe

SEQ ID NO: 7973 - DNA, 32 bp, Artificial; identical to SEQ ID NO: 7863
  oligonucleotide probe

SEQ ID NO: 7974 - DNA, 32 bp, Artificial; identical to SEQ ID NO: 5217
  oligonucleotide probe

SEQ ID NO: 7975 - DNA, 32 bp, Artificial; identical to SEQ ID NO: 5223
  oligonucleotide probe

SEQ ID NO: 7976 - DNA, 32 bp, Artificial; identical to SEQ ID NO: 7838
  oligonucleotide probe

SEQ ID NO: 7977 - DNA, 32 bp, Artificial; identical to SEQ ID NO: 7855
  oligonucleotide probe

SEQ ID NO: 7978 - DNA, 32 bp, Artificial; identical to SEQ ID NO: 7856
  oligonucleotide probe

SEQ ID NO: 7979 - DNA, 32 bp, Artificial; identical to SEQ ID NO: 5224
  oligonucleotide probe

SEQ ID NO: 7980 - DNA, 32 bp, Artificial; identical to SEQ ID NO: 7840
  oligonucleotide probe

SEQ ID NO: 7981 - DNA, 32 bp, Artificial; identical to SEQ ID NO: 7853
  oligonucleotide probe

SEQ ID NO: 7982 - DNA, 32 bp, Artificial; identical to SEQ ID NO: 5220
  oligonucleotide probe

SEQ ID NO: 7983 - DNA, 32 bp, Artificial; identical to SEQ ID NO: 5223
  oligonucleotide probe

SEQ ID NO: 7984 - DNA, 32 bp, Artificial; identical to SEQ ID NO: 7838
  oligonucleotide probe

SEQ ID NO: 7985 - DNA, 32 bp, Artificial; identical to SEQ ID NO: 5224
  oligonucleotide probe

SEQ ID NO: 7986 - DNA, 32 bp, Artificial; identical to SEQ ID NO: 7840
  oligonucleotide probe

SEQ ID NO: 7987 - DNA, 32 bp, Artificial; identical to SEQ ID NO: 5224
  oligonucleotide probe

SEQ ID NO: 7988 - DNA, 32 bp, Artificial; identical to SEQ ID NO: 7840
  oligonucleotide probe

SEQ ID NO: 7989 - DNA, 32 bp, Artificial; identical to SEQ ID NO: 7891
  oligonucleotide probe

SEQ ID NO: 7990 - DNA, 32 bp, Artificial; identical to SEQ ID NO: 5218
  oligonucleotide probe

SEQ ID NO: 7991 - DNA, 32 bp, Artificial; identical to SEQ ID NO: 7833
  oligonucleotide probe

SEQ ID NO: 7992 - DNA, 32 bp, Artificial; identical to SEQ ID NO: 7834
  oligonucleotide probe

SEQ ID NO: 7993 - DNA, 32 bp, Artificial; identical to SEQ ID NO: 7865
  oligonucleotide probe

SEQ ID NO: 7994 - DNA, 32 bp, Artificial; identical to SEQ ID NO: 7866
  oligonucleotide probe

SEQ ID NO: 7995 - DNA, 32 bp, Artificial; identical to SEQ ID NO: 7840
  oligonucleotide probe

SEQ ID NO: 7996 - DNA, 32 bp, Artificial; identical to SEQ ID NO: 7853
  oligonucleotide probe

SEQ ID NO: 7997 - DNA, 32 bp, Artificial; identical to SEQ ID NO: 5223
  oligonucleotide probe

SEQ ID NO: 7998 - DNA, 32 bp, Artificial; identical to SEQ ID NO: 7838
  oligonucleotide probe

SEQ ID NO: 7999 - DNA, 32 bp, Artificial; identical to SEQ ID NO: 7853
  oligonucleotide probe

SEQ ID NO: 8000 - DNA, 32 bp, Artificial; identical to SEQ ID NO: 5220
  oligonucleotide probe

SEQ ID NO: 8001 - DNA, 32 bp, Artificial
  oligonucleotide probe
ttgcaagcgtccgggaaacgcgatttgccgca

SEQ ID NO: 8002 - DNA, 32 bp, Artificial; identical to SEQ ID NO: 5239
  oligonucleotide probe

SEQ ID NO: 8003 - DNA, 32 bp, Artificial; identical to SEQ ID NO: 7835
  oligonucleotide probe

SEQ ID NO: 8004 - DNA, 32 bp, Artificial; identical to SEQ ID NO: 5232
  oligonucleotide probe

SEQ ID NO: 8005 - DNA, 32 bp, Artificial; identical to SEQ ID NO: 7853
  oligonucleotide probe

SEQ ID NO: 8006 - DNA, 32 bp, Artificial; identical to SEQ ID NO: 5220
  oligonucleotide probe

SEQ ID NO: 8007 - DNA, 32 bp, Artificial; identical to SEQ ID NO: 7905
  oligonucleotide probe

SEQ ID NO: 8008 - DNA, 32 bp, Artificial; identical to SEQ ID NO: 5231
  oligonucleotide probe

SEQ ID NO: 8009 - DNA, 32 bp, Artificial; identical to SEQ ID NO: 7840
  oligonucleotide probe

SEQ ID NO: 8010 - DNA, 32 bp, Artificial; identical to SEQ ID NO: 7853
  oligonucleotide probe

SEQ ID NO: 8011 - DNA, 32 bp, Artificial; identical to SEQ ID NO: 7853
  oligonucleotide probe

SEQ ID NO: 8012 - DNA, 32 bp, Artificial; identical to SEQ ID NO: 5220
  oligonucleotide probe

SEQ ID NO: 8013 - DNA, 32 bp, Artificial; identical to SEQ ID NO: 7853
  oligonucleotide probe

SEQ ID NO: 8014 - DNA, 32 bp, Artificial; identical to SEQ ID NO: 5220
  oligonucleotide probe

SEQ ID NO: 8015 - DNA, 32 bp, Artificial; identical to SEQ ID NO: 7863
  oligonucleotide probe

SEQ ID NO: 8016 - DNA, 32 bp, Artificial; identical to SEQ ID NO: 5217
  oligonucleotide probe

SEQ ID NO: 8017 - DNA, 32 bp, Artificial; identical to SEQ ID NO: 7853
  oligonucleotide probe

SEQ ID NO: 8018 - DNA, 32 bp, Artificial; identical to SEQ ID NO: 5220
  oligonucleotide probe

SEQ ID NO: 8019 - DNA, 32 bp, Artificial; identical to SEQ ID NO: 7833
  oligonucleotide probe

SEQ ID NO: 8020 - DNA, 32 bp, Artificial; identical to SEQ ID NO: 7834
  oligonucleotide probe

SEQ ID NO: 8021 - DNA, 32 bp, Artificial; identical to SEQ ID NO: 5224
  oligonucleotide probe

SEQ ID NO: 8022 - DNA, 32 bp, Artificial; identical to SEQ ID NO: 7840
  oligonucleotide probe

SEQ ID NO: 8023 - DNA, 32 bp, Artificial; identical to SEQ ID NO: 7833
  oligonucleotide probe

SEQ ID NO: 8024 - DNA, 32 bp, Artificial; identical to SEQ ID NO: 7834
  oligonucleotide probe

SEQ ID NO: 8025 - DNA, 32 bp, Artificial; identical to SEQ ID NO: 7891
  oligonucleotide probe

SEQ ID NO: 8026 - DNA, 32 bp, Artificial; identical to SEQ ID NO: 5218
  oligonucleotide probe

SEQ ID NO: 8027 - DNA, 32 bp, Artificial; identical to SEQ ID NO: 5223
  oligonucleotide probe

SEQ ID NO: 8028 - DNA, 32 bp, Artificial; identical to SEQ ID NO: 7838
  oligonucleotide probe

SEQ ID NO: 8029 - DNA, 32 bp, Artificial; identical to SEQ ID NO: 5223
  oligonucleotide probe

SEQ ID NO: 8030 - DNA, 32 bp, Artificial; identical to SEQ ID NO: 7838
  oligonucleotide probe

SEQ ID NO: 8031 - DNA, 32 bp, Artificial; identical to SEQ ID NO: 5224
  oligonucleotide probe

SEQ ID NO: 8032 - DNA, 32 bp, Artificial; identical to SEQ ID NO: 7840
  oligonucleotide probe

SEQ ID NO: 8033 - DNA, 32 bp, Artificial; identical to SEQ ID NO: 7853
  oligonucleotide probe

SEQ ID NO: 8034 - DNA, 32 bp, Artificial; identical to SEQ ID NO: 5220
  oligonucleotide probe

SEQ ID NO: 8035 - DNA, 32 bp, Artificial; identical to SEQ ID NO: 5223
  oligonucleotide probe

SEQ ID NO: 8036 - DNA, 32 bp, Artificial; identical to SEQ ID NO: 7838
  oligonucleotide probe

SEQ ID NO: 8037 - DNA, 32 bp, Artificial; identical to SEQ ID NO: 7833
  oligonucleotide probe

SEQ ID NO: 8038 - DNA, 32 bp, Artificial; identical to SEQ ID NO: 7834
  oligonucleotide probe

SEQ ID NO: 8039 - DNA, 32 bp, Artificial; identical to SEQ ID NO: 7831
  oligonucleotide probe

SEQ ID NO: 8040 - DNA, 32 bp, Artificial; identical to SEQ ID NO: 7832
  oligonucleotide probe

SEQ ID NO: 8041 - DNA, 32 bp, Artificial; identical to SEQ ID NO: 5223
  oligonucleotide probe

SEQ ID NO: 8042 - DNA, 32 bp, Artificial; identical to SEQ ID NO: 7838
  oligonucleotide probe

SEQ ID NO: 8043 - DNA, 32 bp, Artificial; identical to SEQ ID NO: 5223
  oligonucleotide probe

SEQ ID NO: 8044 - DNA, 32 bp, Artificial; identical to SEQ ID NO: 7838
  oligonucleotide probe

SEQ ID NO: 8045 - DNA, 32 bp, Artificial; identical to SEQ ID NO: 5223
  oligonucleotide probe

SEQ ID NO: 8046 - DNA, 32 bp, Artificial; identical to SEQ ID NO: 7838
  oligonucleotide probe

SEQ ID NO: 8047 - DNA, 32 bp, Artificial
  oligonucleotide probe
ttgcaagcgtccgggaccgtcgcaaagcgcac

SEQ ID NO: 8048 - DNA, 32 bp, Artificial; identical to SEQ ID NO: 5240
  oligonucleotide probe

SEQ ID NO: 8049 - DNA, 32 bp, Artificial; identical to SEQ ID NO: 7833
  oligonucleotide probe

SEQ ID NO: 8050 - DNA, 32 bp, Artificial; identical to SEQ ID NO: 7834
  oligonucleotide probe

SEQ ID NO: 8051 - DNA, 32 bp, Artificial; identical to SEQ ID NO: 7833
  oligonucleotide probe

SEQ ID NO: 8052 - DNA, 32 bp, Artificial; identical to SEQ ID NO: 7834
  oligonucleotide probe

SEQ ID NO: 8053 - DNA, 32 bp, Artificial; identical to SEQ ID NO: 7853
  oligonucleotide probe

SEQ ID NO: 8054 - DNA, 32 bp, Artificial; identical to SEQ ID NO: 5220
  oligonucleotide probe

SEQ ID NO: 8055 - DNA, 32 bp, Artificial; identical to SEQ ID NO: 7891
  oligonucleotide probe

SEQ ID NO: 8056 - DNA, 32 bp, Artificial; identical to SEQ ID NO: 5218
  oligonucleotide probe

SEQ ID NO: 8057 - DNA, 32 bp, Artificial; identical to SEQ ID NO: 5224
  oligonucleotide probe

SEQ ID NO: 8058 - DNA, 32 bp, Artificial; identical to SEQ ID NO: 7840
  oligonucleotide probe

SEQ ID NO: 8059 - DNA, 32 bp, Artificial; identical to SEQ ID NO: 7905
  oligonucleotide probe

SEQ ID NO: 8060 - DNA, 32 bp, Artificial; identical to SEQ ID NO: 5231
  oligonucleotide probe

SEQ ID NO: 8061 - DNA, 32 bp, Artificial; identical to SEQ ID NO: 7853
  oligonucleotide probe

SEQ ID NO: 8062 - DNA, 32 bp, Artificial; identical to SEQ ID NO: 5220
  oligonucleotide probe

SEQ ID NO: 8063 - DNA, 32 bp, Artificial; identical to SEQ ID NO: 5223
  oligonucleotide probe

SEQ ID NO: 8064 - DNA, 32 bp, Artificial; identical to SEQ ID NO: 7838
  oligonucleotide probe

SEQ ID NO: 8065 - DNA, 32 bp, Artificial; identical to SEQ ID NO: 7831
  oligonucleotide probe

SEQ ID NO: 8066 - DNA, 32 bp, Artificial; identical to SEQ ID NO: 7832
  oligonucleotide probe

SEQ ID NO: 8067 - DNA, 32 bp, Artificial; identical to SEQ ID NO: 5223
  oligonucleotide probe

SEQ ID NO: 8068 - DNA, 32 bp, Artificial; identical to SEQ ID NO: 7838
  oligonucleotide probe

SEQ ID NO: 8069 - DNA, 32 bp, Artificial; identical to SEQ ID NO: 7865
  oligonucleotide probe

SEQ ID NO: 8070 - DNA, 32 bp, Artificial; identical to SEQ ID NO: 7866
  oligonucleotide probe

SEQ ID NO: 8071 - DNA, 32 bp, Artificial; identical to SEQ ID NO: 5223
  oligonucleotide probe

SEQ ID NO: 8072 - DNA, 32 bp, Artificial; identical to SEQ ID NO: 7838
  oligonucleotide probe

SEQ ID NO: 8073 - DNA, 32 bp, Artificial; identical to SEQ ID NO: 7891
  oligonucleotide probe

SEQ ID NO: 8074 - DNA, 32 bp, Artificial; identical to SEQ ID NO: 5218
  oligonucleotide probe

SEQ ID NO: 8075 - DNA, 32 bp, Artificial; identical to SEQ ID NO: 7831
  oligonucleotide probe

SEQ ID NO: 8076 - DNA, 32 bp, Artificial; identical to SEQ ID NO: 7832
  oligonucleotide probe

SEQ ID NO: 8077 - DNA, 32 bp, Artificial; identical to SEQ ID NO: 7863
  oligonucleotide probe

SEQ ID NO: 8078 - DNA, 32 bp, Artificial; identical to SEQ ID NO: 5217
  oligonucleotide probe

SEQ ID NO: 8079 - DNA, 32 bp, Artificial; identical to SEQ ID NO: 7891
  oligonucleotide probe

SEQ ID NO: 8080 - DNA, 32 bp, Artificial; identical to SEQ ID NO: 5218
  oligonucleotide probe

SEQ ID NO: 8081 - DNA, 32 bp, Artificial; identical to SEQ ID NO: 7853
  oligonucleotide probe

SEQ ID NO: 8082 - DNA, 32 bp, Artificial; identical to SEQ ID NO: 5220
  oligonucleotide probe

SEQ ID NO: 8083 - DNA, 32 bp, Artificial; identical to SEQ ID NO: 7905
  oligonucleotide probe

SEQ ID NO: 8084 - DNA, 32 bp, Artificial; identical to SEQ ID NO: 5231
  oligonucleotide probe

SEQ ID NO: 8085 - DNA, 32 bp, Artificial; identical to SEQ ID NO: 7831
  oligonucleotide probe

SEQ ID NO: 8086 - DNA, 32 bp, Artificial; identical to SEQ ID NO: 7832
  oligonucleotide probe

SEQ ID NO: 8087 - DNA, 32 bp, Artificial; identical to SEQ ID NO: 7840
  oligonucleotide probe

SEQ ID NO: 8088 - DNA, 32 bp, Artificial; identical to SEQ ID NO: 7853
  oligonucleotide probe

SEQ ID NO: 8089 - DNA, 32 bp, Artificial; identical to SEQ ID NO: 5223
  oligonucleotide probe

SEQ ID NO: 8090 - DNA, 32 bp, Artificial; identical to SEQ ID NO: 7838
  oligonucleotide probe

SEQ ID NO: 8091 - DNA, 32 bp, Artificial; identical to SEQ ID NO: 7855
  oligonucleotide probe

SEQ ID NO: 8092 - DNA, 32 bp, Artificial; identical to SEQ ID NO: 7856
  oligonucleotide probe

SEQ ID NO: 8093 - DNA, 32 bp, Artificial; identical to SEQ ID NO: 7853
  oligonucleotide probe

SEQ ID NO: 8094 - DNA, 32 bp, Artificial; identical to SEQ ID NO: 5220
  oligonucleotide probe

SEQ ID NO: 8095 - DNA, 32 bp, Artificial; identical to SEQ ID NO: 5224
  oligonucleotide probe

SEQ ID NO: 8096 - DNA, 32 bp, Artificial; identical to SEQ ID NO: 7840
  oligonucleotide probe

SEQ ID NO: 8097 - DNA, 32 bp, Artificial; identical to SEQ ID NO: 7853
  oligonucleotide probe

SEQ ID NO: 8098 - DNA, 32 bp, Artificial; identical to SEQ ID NO: 5220
  oligonucleotide probe

SEQ ID NO: 8099 - DNA, 32 bp, Artificial; identical to SEQ ID NO: 7863
  oligonucleotide probe

SEQ ID NO: 8100 - DNA, 32 bp, Artificial; identical to SEQ ID NO: 5217
  oligonucleotide probe

SEQ ID NO: 8101 - DNA, 32 bp, Artificial; identical to SEQ ID NO: 7865
  oligonucleotide probe

SEQ ID NO: 8102 - DNA, 32 bp, Artificial; identical to SEQ ID NO: 7866
  oligonucleotide probe

SEQ ID NO: 8103 - DNA, 32 bp, Artificial; identical to SEQ ID NO: 7905
  oligonucleotide probe

SEQ ID NO: 8104 - DNA, 32 bp, Artificial; identical to SEQ ID NO: 5231
  oligonucleotide probe

SEQ ID NO: 8105 - DNA, 32 bp, Artificial; identical to SEQ ID NO: 7891
  oligonucleotide probe

SEQ ID NO: 8106 - DNA, 32 bp, Artificial; identical to SEQ ID NO: 5218
  oligonucleotide probe

SEQ ID NO: 8107 - DNA, 32 bp, Artificial; identical to SEQ ID NO: 5224
  oligonucleotide probe

SEQ ID NO: 8108 - DNA, 32 bp, Artificial; identical to SEQ ID NO: 7840
  oligonucleotide probe

SEQ ID NO: 8109 - DNA, 32 bp, Artificial; identical to SEQ ID NO: 7831
  oligonucleotide probe

SEQ ID NO: 8110 - DNA, 32 bp, Artificial; identical to SEQ ID NO: 7832
  oligonucleotide probe

SEQ ID NO: 8111 - DNA, 32 bp, Artificial; identical to SEQ ID NO: 7831
  oligonucleotide probe

SEQ ID NO: 8112 - DNA, 32 bp, Artificial; identical to SEQ ID NO: 7832
  oligonucleotide probe

SEQ ID NO: 8113 - DNA, 32 bp, Artificial; identical to SEQ ID NO: 5224
  oligonucleotide probe

SEQ ID NO: 8114 - DNA, 32 bp, Artificial; identical to SEQ ID NO: 7840
  oligonucleotide probe

SEQ ID NO: 8115 - DNA, 32 bp, Artificial; identical to SEQ ID NO: 7841
  oligonucleotide probe

SEQ ID NO: 8116 - DNA, 32 bp, Artificial; identical to SEQ ID NO: 7842
  oligonucleotide probe

SEQ ID NO: 8117 - DNA, 32 bp, Artificial; identical to SEQ ID NO: 7831
  oligonucleotide probe

SEQ ID NO: 8118 - DNA, 32 bp, Artificial; identical to SEQ ID NO: 7832
  oligonucleotide probe

SEQ ID NO: 8119 - DNA, 32 bp, Artificial; identical to SEQ ID NO: 5223
  oligonucleotide probe

SEQ ID NO: 8120 - DNA, 32 bp, Artificial; identical to SEQ ID NO: 7838
  oligonucleotide probe

SEQ ID NO: 8121 - DNA, 32 bp, Artificial; identical to SEQ ID NO: 5223
  oligonucleotide probe

SEQ ID NO: 8122 - DNA, 32 bp, Artificial; identical to SEQ ID NO: 7838
  oligonucleotide probe

SEQ ID NO: 8123 - DNA, 32 bp, Artificial; identical to SEQ ID NO: 7853
  oligonucleotide probe

SEQ ID NO: 8124 - DNA, 32 bp, Artificial; identical to SEQ ID NO: 5220
  oligonucleotide probe

SEQ ID NO: 8125 - DNA, 32 bp, Artificial; identical to SEQ ID NO: 7833
  oligonucleotide probe

SEQ ID NO: 8126 - DNA, 32 bp, Artificial; identical to SEQ ID NO: 7834
  oligonucleotide probe

SEQ ID NO: 8127 - DNA, 32 bp, Artificial; identical to SEQ ID NO: 7833
  oligonucleotide probe

SEQ ID NO: 8128 - DNA, 32 bp, Artificial; identical to SEQ ID NO: 7834
  oligonucleotide probe

SEQ ID NO: 8129 - DNA, 32 bp, Artificial; identical to SEQ ID NO: 7831
  oligonucleotide probe

SEQ ID NO: 8130 - DNA, 32 bp, Artificial; identical to SEQ ID NO: 7832
  oligonucleotide probe

SEQ ID NO: 8131 - DNA, 32 bp, Artificial; identical to SEQ ID NO: 7855
  oligonucleotide probe

SEQ ID NO: 8132 - DNA, 32 bp, Artificial; identical to SEQ ID NO: 7856
  oligonucleotide probe

SEQ ID NO: 8133 - DNA, 32 bp, Artificial; identical to SEQ ID NO: 5224
  oligonucleotide probe

SEQ ID NO: 8134 - DNA, 32 bp, Artificial; identical to SEQ ID NO: 7840
  oligonucleotide probe

SEQ ID NO: 8135 - DNA, 32 bp, Artificial; identical to SEQ ID NO: 7863
  oligonucleotide probe

SEQ ID NO: 8136 - DNA, 32 bp, Artificial; identical to SEQ ID NO: 5217
  oligonucleotide probe

SEQ ID NO: 8137 - DNA, 32 bp, Artificial; identical to SEQ ID NO: 5224
  oligonucleotide probe

SEQ ID NO: 8138 - DNA, 32 bp, Artificial; identical to SEQ ID NO: 7840
  oligonucleotide probe

SEQ ID NO: 8139 - DNA, 32 bp, Artificial; identical to SEQ ID NO: 7833
  oligonucleotide probe

SEQ ID NO: 8140 - DNA, 32 bp, Artificial; identical to SEQ ID NO: 7834
  oligonucleotide probe

SEQ ID NO: 8141 - DNA, 32 bp, Artificial; identical to SEQ ID NO: 7863
  oligonucleotide probe

SEQ ID NO: 8142 - DNA, 32 bp, Artificial; identical to SEQ ID NO: 5217
  oligonucleotide probe

SEQ ID NO: 8143 - DNA, 32 bp, Artificial; identical to SEQ ID NO: 5223
  oligonucleotide probe

SEQ ID NO: 8144 - DNA, 32 bp, Artificial; identical to SEQ ID NO: 7838
  oligonucleotide probe

SEQ ID NO: 8145 - DNA, 32 bp, Artificial; identical to SEQ ID NO: 7853
  oligonucleotide probe

SEQ ID NO: 8146 - DNA, 32 bp, Artificial; identical to SEQ ID NO: 5220
  oligonucleotide probe

SEQ ID NO: 8147 - DNA, 32 bp, Artificial; identical to SEQ ID NO: 7853
  oligonucleotide probe

SEQ ID NO: 8148 - DNA, 32 bp, Artificial; identical to SEQ ID NO: 5220
  oligonucleotide probe

SEQ ID NO: 8149 - DNA, 32 bp, Artificial; identical to SEQ ID NO: 7840
  oligonucleotide probe

SEQ ID NO: 8150 - DNA, 32 bp, Artificial; identical to SEQ ID NO: 7853
  oligonucleotide probe

SEQ ID NO: 8151 - DNA, 32 bp, Artificial; identical to SEQ ID NO: 7853
  oligonucleotide probe

SEQ ID NO: 8152 - DNA, 32 bp, Artificial; identical to SEQ ID NO: 5220
  oligonucleotide probe

SEQ ID NO: 8153 - DNA, 32 bp, Artificial; identical to SEQ ID NO: 7863
  oligonucleotide probe

SEQ ID NO: 8154 - DNA, 32 bp, Artificial; identical to SEQ ID NO: 5217
  oligonucleotide probe

SEQ ID NO: 8155 - DNA, 32 bp, Artificial; identical to SEQ ID NO: 7831
  oligonucleotide probe

SEQ ID NO: 8156 - DNA, 32 bp, Artificial; identical to SEQ ID NO: 7832
  oligonucleotide probe

SEQ ID NO: 8157 - DNA, 32 bp, Artificial; identical to SEQ ID NO: 7853
  oligonucleotide probe

SEQ ID NO: 8158 - DNA, 32 bp, Artificial; identical to SEQ ID NO: 5220
  oligonucleotide probe

SEQ ID NO: 8159 - DNA, 32 bp, Artificial; identical to SEQ ID NO: 7831
  oligonucleotide probe

SEQ ID NO: 8160 - DNA, 32 bp, Artificial; identical to SEQ ID NO: 7832
  oligonucleotide probe

SEQ ID NO: 8161 - DNA, 32 bp, Artificial; identical to SEQ ID NO: 7840
  oligonucleotide probe

SEQ ID NO: 8162 - DNA, 32 bp, Artificial; identical to SEQ ID NO: 7853
  oligonucleotide probe

SEQ ID NO: 8163 - DNA, 32 bp, Artificial; identical to SEQ ID NO: 7835
  oligonucleotide probe

SEQ ID NO: 8164 - DNA, 32 bp, Artificial; identical to SEQ ID NO: 5232
  oligonucleotide probe

SEQ ID NO: 8165 - DNA, 32 bp, Artificial; identical to SEQ ID NO: 7891
  oligonucleotide probe

SEQ ID NO: 8166 - DNA, 32 bp, Artificial; identical to SEQ ID NO: 5218
  oligonucleotide probe

SEQ ID NO: 8167 - DNA, 32 bp, Artificial; identical to SEQ ID NO: 5223
  oligonucleotide probe

SEQ ID NO: 8168 - DNA, 32 bp, Artificial; identical to SEQ ID NO: 7838
  oligonucleotide probe

SEQ ID NO: 8169 - DNA, 32 bp, Artificial; identical to SEQ ID NO: 7947
  oligonucleotide probe

SEQ ID NO: 8170 - DNA, 32 bp, Artificial; identical to SEQ ID NO: 7948
  oligonucleotide probe

SEQ ID NO: 8171 - DNA, 32 bp, Artificial; identical to SEQ ID NO: 5224
  oligonucleotide probe

SEQ ID NO: 8172 - DNA, 32 bp, Artificial; identical to SEQ ID NO: 7840
  oligonucleotide probe

SEQ ID NO: 8173 - DNA, 32 bp, Artificial; identical to SEQ ID NO: 7853
  oligonucleotide probe

SEQ ID NO: 8174 - DNA, 32 bp, Artificial; identical to SEQ ID NO: 5220
  oligonucleotide probe

SEQ ID NO: 8175 - DNA, 32 bp, Artificial; identical to SEQ ID NO: 7831
  oligonucleotide probe

SEQ ID NO: 8176 - DNA, 32 bp, Artificial; identical to SEQ ID NO: 7832
  oligonucleotide probe

SEQ ID NO: 8177 - DNA, 32 bp, Artificial; identical to SEQ ID NO: 7833
  oligonucleotide probe

SEQ ID NO: 8178 - DNA, 32 bp, Artificial; identical to SEQ ID NO: 7834
  oligonucleotide probe

SEQ ID NO: 8179 - DNA, 32 bp, Artificial; identical to SEQ ID NO: 7891
  oligonucleotide probe

SEQ ID NO: 8180 - DNA, 32 bp, Artificial; identical to SEQ ID NO: 5218
  oligonucleotide probe

SEQ ID NO: 8181 - DNA, 32 bp, Artificial; identical to SEQ ID NO: 7855
  oligonucleotide probe

SEQ ID NO: 8182 - DNA, 32 bp, Artificial; identical to SEQ ID NO: 7856
  oligonucleotide probe

SEQ ID NO: 8183 - DNA, 32 bp, Artificial; identical to SEQ ID NO: 5223
  oligonucleotide probe

SEQ ID NO: 8184 - DNA, 32 bp, Artificial; identical to SEQ ID NO: 7838
  oligonucleotide probe

SEQ ID NO: 8185 - DNA, 32 bp, Artificial; identical to SEQ ID NO: 7853
  oligonucleotide probe

SEQ ID NO: 8186 - DNA, 32 bp, Artificial; identical to SEQ ID NO: 5220
  oligonucleotide probe

SEQ ID NO: 8187 - DNA, 32 bp, Artificial; identical to SEQ ID NO: 5223
  oligonucleotide probe

SEQ ID NO: 8188 - DNA, 32 bp, Artificial; identical to SEQ ID NO: 7838
  oligonucleotide probe

SEQ ID NO: 8189 - DNA, 32 bp, Artificial; identical to SEQ ID NO: 5224
  oligonucleotide probe

SEQ ID NO: 8190 - DNA, 32 bp, Artificial; identical to SEQ ID NO: 7840
  oligonucleotide probe

SEQ ID NO: 8191 - DNA, 32 bp, Artificial; identical to SEQ ID NO: 7833
  oligonucleotide probe

SEQ ID NO: 8192 - DNA, 32 bp, Artificial; identical to SEQ ID NO: 7834
  oligonucleotide probe

SEQ ID NO: 8193 - DNA, 32 bp, Artificial; identical to SEQ ID NO: 7891
  oligonucleotide probe

SEQ ID NO: 8194 - DNA, 32 bp, Artificial; identical to SEQ ID NO: 5218
  oligonucleotide probe

SEQ ID NO: 8195 - DNA, 32 bp, Artificial; identical to SEQ ID NO: 7865
  oligonucleotide probe

SEQ ID NO: 8196 - DNA, 32 bp, Artificial; identical to SEQ ID NO: 7866
  oligonucleotide probe

SEQ ID NO: 8197 - DNA, 32 bp, Artificial; identical to SEQ ID NO: 7831
  oligonucleotide probe

SEQ ID NO: 8198 - DNA, 32 bp, Artificial; identical to SEQ ID NO: 7832
  oligonucleotide probe

SEQ ID NO: 8199 - DNA, 32 bp, Artificial; identical to SEQ ID NO: 7855
  oligonucleotide probe

SEQ ID NO: 8200 - DNA, 32 bp, Artificial; identical to SEQ ID NO: 7856
  oligonucleotide probe

SEQ ID NO: 8201 - DNA, 32 bp, Artificial; identical to SEQ ID NO: 7863
  oligonucleotide probe

SEQ ID NO: 8202 - DNA, 32 bp, Artificial; identical to SEQ ID NO: 5217
  oligonucleotide probe

SEQ ID NO: 8203 - DNA, 32 bp, Artificial; identical to SEQ ID NO: 7947
  oligonucleotide probe

SEQ ID NO: 8204 - DNA, 32 bp, Artificial; identical to SEQ ID NO: 7948
  oligonucleotide probe

SEQ ID NO: 8205 - DNA, 32 bp, Artificial; identical to SEQ ID NO: 5223
  oligonucleotide probe

SEQ ID NO: 8206 - DNA, 32 bp, Artificial; identical to SEQ ID NO: 7838
  oligonucleotide probe

SEQ ID NO: 8207 - DNA, 32 bp, Artificial; identical to SEQ ID NO: 5224
  oligonucleotide probe

SEQ ID NO: 8208 - DNA, 32 bp, Artificial; identical to SEQ ID NO: 7840
  oligonucleotide probe

SEQ ID NO: 8209 - DNA, 32 bp, Artificial; identical to SEQ ID NO: 7905
  oligonucleotide probe

SEQ ID NO: 8210 - DNA, 32 bp, Artificial; identical to SEQ ID NO: 5231
  oligonucleotide probe

SEQ ID NO: 8211 - DNA, 32 bp, Artificial; identical to SEQ ID NO: 7833
  oligonucleotide probe

SEQ ID NO: 8212 - DNA, 32 bp, Artificial; identical to SEQ ID NO: 7834
  oligonucleotide probe

SEQ ID NO: 8213 - DNA, 32 bp, Artificial; identical to SEQ ID NO: 5224
  oligonucleotide probe

SEQ ID NO: 8214 - DNA, 32 bp, Artificial; identical to SEQ ID NO: 7840
  oligonucleotide probe

SEQ ID NO: 8215 - DNA, 32 bp, Artificial; identical to SEQ ID NO: 7833
  oligonucleotide probe

SEQ ID NO: 8216 - DNA, 32 bp, Artificial; identical to SEQ ID NO: 7834
  oligonucleotide probe

SEQ ID NO: 8217 - DNA, 32 bp, Artificial; identical to SEQ ID NO: 7853
  oligonucleotide probe

SEQ ID NO: 8218 - DNA, 32 bp, Artificial; identical to SEQ ID NO: 5220
  oligonucleotide probe

SEQ ID NO: 8219 - DNA, 32 bp, Artificial; identical to SEQ ID NO: 7891
  oligonucleotide probe

SEQ ID NO: 8220 - DNA, 32 bp, Artificial; identical to SEQ ID NO: 5218
  oligonucleotide probe

SEQ ID NO: 8221 - DNA, 32 bp, Artificial; identical to SEQ ID NO: 7863
  oligonucleotide probe

SEQ ID NO: 8222 - DNA, 32 bp, Artificial; identical to SEQ ID NO: 5217
  oligonucleotide probe

SEQ ID NO: 8223 - DNA, 32 bp, Artificial; identical to SEQ ID NO: 7841
  oligonucleotide probe

SEQ ID NO: 8224 - DNA, 32 bp, Artificial; identical to SEQ ID NO: 7842
  oligonucleotide probe

SEQ ID NO: 8225 - DNA, 32 bp, Artificial; identical to SEQ ID NO: 7863
  oligonucleotide probe

SEQ ID NO: 8226 - DNA, 32 bp, Artificial; identical to SEQ ID NO: 5217
  oligonucleotide probe

SEQ ID NO: 8227 - DNA, 32 bp, Artificial; identical to SEQ ID NO: 7831
  oligonucleotide probe

SEQ ID NO: 8228 - DNA, 32 bp, Artificial; identical to SEQ ID NO: 7832
  oligonucleotide probe

SEQ ID NO: 8229 - DNA, 32 bp, Artificial; identical to SEQ ID NO: 7853
  oligonucleotide probe

SEQ ID NO: 8230 - DNA, 32 bp, Artificial; identical to SEQ ID NO: 5220
  oligonucleotide probe

SEQ ID NO: 8231 - DNA, 32 bp, Artificial; identical to SEQ ID NO: 7833
  oligonucleotide probe

SEQ ID NO: 8232 - DNA, 32 bp, Artificial; identical to SEQ ID NO: 7834
  oligonucleotide probe

SEQ ID NO: 8233 - DNA, 32 bp, Artificial; identical to SEQ ID NO: 7840
  oligonucleotide probe

SEQ ID NO: 8234 - DNA, 32 bp, Artificial; identical to SEQ ID NO: 7853
  oligonucleotide probe

SEQ ID NO: 8235 - DNA, 32 bp, Artificial; identical to SEQ ID NO: 7831
  oligonucleotide probe

SEQ ID NO: 8236 - DNA, 32 bp, Artificial; identical to SEQ ID NO: 7832
  oligonucleotide probe

SEQ ID NO: 8237 - DNA, 32 bp, Artificial; identical to SEQ ID NO: 7831
  oligonucleotide probe

SEQ ID NO: 8238 - DNA, 32 bp, Artificial; identical to SEQ ID NO: 7832
  oligonucleotide probe

SEQ ID NO: 8239 - DNA, 32 bp, Artificial; identical to SEQ ID NO: 7905
  oligonucleotide probe

SEQ ID NO: 8240 - DNA, 32 bp, Artificial
  oligonucleotide probe
cgcattgcggctttcgttcgccgtttgcgctg

SEQ ID NO: 8241 - DNA, 32 bp, Artificial; identical to SEQ ID NO: 5217
  oligonucleotide probe

SEQ ID NO: 8242 - DNA, 32 bp, Artificial; identical to SEQ ID NO: 7855
  oligonucleotide probe

SEQ ID NO: 8243 - DNA, 32 bp, Artificial; identical to SEQ ID NO: 7833
  oligonucleotide probe

SEQ ID NO: 8244 - DNA, 32 bp, Artificial
  oligonucleotide probe
aagccgtgcgcaacgaaacgcgatttgccgca

SEQ ID NO: 8245 - DNA, 32 bp, Artificial; identical to SEQ ID NO: 5239
  oligonucleotide probe

SEQ ID NO: 8246 - DNA, 32 bp, Artificial; identical to SEQ ID NO: 7856
  oligonucleotide probe

SEQ ID NO: 8247 - DNA, 32 bp, Artificial
  oligonucleotide probe
cgcattgcggctttcgaacgcgatttgccgca

SEQ ID NO: 8248 - DNA, 32 bp, Artificial; identical to SEQ ID NO: 5416
  oligonucleotide probe

SEQ ID NO: 8249 - DNA, 32 bp, Artificial; identical to SEQ ID NO: 7948
  oligonucleotide probe

SEQ ID NO: 8250 - DNA, 32 bp, Artificial; identical to SEQ ID NO: 5223
  oligonucleotide probe

SEQ ID NO: 8251 - DNA, 32 bp, Artificial; identical to SEQ ID NO: 5231
  oligonucleotide probe

SEQ ID NO: 8252 - DNA, 32 bp, Artificial; identical to SEQ ID NO: 7947
  oligonucleotide probe

SEQ ID NO: 8253 - DNA, 32 bp, Artificial; identical to SEQ ID NO: 8001
  oligonucleotide probe

SEQ ID NO: 8254 - DNA, 32 bp, Artificial; identical to SEQ ID NO: 7863
  oligonucleotide probe

SEQ ID NO: 8255 - DNA, 32 bp, Artificial; identical to SEQ ID NO: 5220
  oligonucleotide probe

SEQ ID NO: 8256 - DNA, 32 bp, Artificial; identical to SEQ ID NO: 5416
  oligonucleotide probe

SEQ ID NO: 8257 - DNA, 32 bp, Artificial; identical to SEQ ID NO: 7673
  oligonucleotide probe

SEQ ID NO: 8258 - DNA, 32 bp, Artificial
  oligonucleotide probe
ttcgccgtttgcgctgcgcattgcggctttcg

SEQ ID NO: 8259 - DNA, 32 bp, Artificial; identical to SEQ ID NO: 7840
  oligonucleotide probe

SEQ ID NO: 8260 - DNA, 32 bp, Artificial; identical to SEQ ID NO: 7833
  oligonucleotide probe

SEQ ID NO: 8261 - DNA, 32 bp, Artificial; identical to SEQ ID NO: 7834
  oligonucleotide probe

SEQ ID NO: 8262 - DNA, 32 bp, Artificial; identical to SEQ ID NO: 7606
  oligonucleotide probe

SEQ ID NO: 8263 - DNA, 32 bp, Artificial; identical to SEQ ID NO: 7947
  oligonucleotide probe

SEQ ID NO: 8264 - DNA, 32 bp, Artificial; identical to SEQ ID NO: 5160
  oligonucleotide probe

SEQ ID NO: 8265 - DNA, 32 bp, Artificial; identical to SEQ ID NO: 7673
  oligonucleotide probe

SEQ ID NO: 8266 - DNA, 32 bp, Artificial; identical to SEQ ID NO: 7863
  oligonucleotide probe

SEQ ID NO: 8267 - DNA, 32 bp, Artificial; identical to SEQ ID NO: 5217
  oligonucleotide probe

SEQ ID NO: 8268 - DNA, 32 bp, Artificial
  oligonucleotide probe
ttcgccgtttgcgctgttgcaagcgtccggga

SEQ ID NO: 8269 - DNA, 32 bp, Artificial
  oligonucleotide probe
ttcgccgtttgcgctgaacggctgcaagcgca

SEQ ID NO: 8270 - DNA, 32 bp, Artificial; identical to SEQ ID NO: 5160
  oligonucleotide probe

SEQ ID NO: 8271 - DNA, 32 bp, Artificial; identical to SEQ ID NO: 8244
  oligonucleotide probe

SEQ ID NO: 8272 - DNA, 32 bp, Artificial; identical to SEQ ID NO: 7831
  oligonucleotide probe

SEQ ID NO: 8273 - DNA, 32 bp, Artificial; identical to SEQ ID NO: 7832
  oligonucleotide probe

SEQ ID NO: 8274 - DNA, 32 bp, Artificial; identical to SEQ ID NO: 7838
  oligonucleotide probe

SEQ ID NO: 8275 - DNA, 32 bp, Artificial; identical to SEQ ID NO: 5224
  oligonucleotide probe

SEQ ID NO: 8276 - DNA, 32 bp, Artificial; identical to SEQ ID NO: 7863
  oligonucleotide probe

SEQ ID NO: 8277 - DNA, 32 bp, Artificial; identical to SEQ ID NO: 5217
  oligonucleotide probe

SEQ ID NO: 8278 - DNA, 32 bp, Artificial; identical to SEQ ID NO: 7605
  oligonucleotide probe

SEQ ID NO: 8279 - DNA, 32 bp, Artificial; identical to SEQ ID NO: 7606
  oligonucleotide probe

SEQ ID NO: 8280 - DNA, 32 bp, Artificial; identical to SEQ ID NO: 8240
  oligonucleotide probe

SEQ ID NO: 8281 - DNA, 32 bp, Artificial; identical to SEQ ID NO: 5163
  oligonucleotide probe

SEQ ID NO: 8282 - DNA, 32 bp, Artificial; identical to SEQ ID NO: 7812
  oligonucleotide probe

SEQ ID NO: 8283 - DNA, 32 bp, Artificial; identical to SEQ ID NO: 5163
  oligonucleotide probe

SEQ ID NO: 8284 - DNA, 32 bp, Artificial; identical to SEQ ID NO: 5171
  oligonucleotide probe

SEQ ID NO: 8285 - DNA, 32 bp, Artificial; identical to SEQ ID NO: 7676
  oligonucleotide probe

SEQ ID NO: 8286 - DNA, 32 bp, Artificial; identical to SEQ ID NO: 5220
  oligonucleotide probe

SEQ ID NO: 8287 - DNA, 32 bp, Artificial
  oligonucleotide probe
ggctgcacggtcccgtaagccgtgcgcaacga

SEQ ID NO: 8288 - DNA, 32 bp, Artificial
  oligonucleotide probe
aacgcgatttgccgcaggctttgcgcaccgtg

SEQ ID NO: 8289 - DNA, 32 bp, Artificial; identical to SEQ ID NO: 5223
  oligonucleotide probe

SEQ ID NO: 8290 - DNA, 32 bp, Artificial; identical to SEQ ID NO: 8287
  oligonucleotide probe

SEQ ID NO: 8291 - DNA, 32 bp, Artificial
  oligonucleotide probe
ggctgcacggtcccgtcgcattgcggctttcg

SEQ ID NO: 8292 - DNA, 32 bp, Artificial
  oligonucleotide probe
aacgcgatttgccgcaaagccgtgcgcaacga

SEQ ID NO: 8293 - DNA, 32 bp, Artificial; identical to SEQ ID NO: 5223
  oligonucleotide probe

SEQ ID NO: 8294 - DNA, 32 bp, Artificial; identical to SEQ ID NO: 7833
  oligonucleotide probe

SEQ ID NO: 8295 - DNA, 32 bp, Artificial; identical to SEQ ID NO: 7834
  oligonucleotide probe

SEQ ID NO: 8296 - DNA, 32 bp, Artificial
  oligonucleotide probe
ttcgccgtttgcgctgaagccgtgcgcaacga

SEQ ID NO: 8297 - DNA, 32 bp, Artificial; identical to SEQ ID NO: 8258
  oligonucleotide probe

SEQ ID NO: 8298 - DNA, 32 bp, Artificial
  oligonucleotide probe
ggctgcacggtcccgtggctttgcgcaccgtg

SEQ ID NO: 8299 - DNA, 32 bp, Artificial
  oligonucleotide probe
ggctgcacggtcccgtatggcgcagcacgctg

SEQ ID NO: 8300 - DNA, 32 bp, Artificial; identical to SEQ ID NO: 7662
  oligonucleotide probe

SEQ ID NO: 8301 - DNA, 32 bp, Artificial; identical to SEQ ID NO: 7659
  oligonucleotide probe

SEQ ID NO: 8302 - DNA, 32 bp, Artificial; identical to SEQ ID NO: 7598
  oligonucleotide probe

SEQ ID NO: 8303 - DNA, 32 bp, Artificial; identical to SEQ ID NO: 5136
  oligonucleotide probe

SEQ ID NO: 8304 - DNA, 32 bp, Artificial; identical to SEQ ID NO: 5411
  oligonucleotide probe

SEQ ID NO: 8305 - DNA, 32 bp, Artificial
  oligonucleotide probe
ccgtcgcaaagcgcacttgcaagcgtccggga

SEQ ID NO: 8306 - DNA, 32 bp, Artificial; identical to SEQ ID NO: 8296
  oligonucleotide probe

SEQ ID NO: 8307 - DNA, 32 bp, Artificial; identical to SEQ ID NO: 8258
  oligonucleotide probe

SEQ ID NO: 8308 - DNA, 32 bp, Artificial
  oligonucleotide probe
ggctgcacggtcccgtttcggggaaacgccgt

SEQ ID NO: 8309 - DNA, 32 bp, Artificial
  oligonucleotide probe
ggctgcacggtcccgtccgtttcggctgggct

SEQ ID NO: 8310 - DNA, 32 bp, Artificial; identical to SEQ ID NO: 7865
  oligonucleotide probe

SEQ ID NO: 8311 - DNA, 32 bp, Artificial; identical to SEQ ID NO: 7866
  oligonucleotide probe

SEQ ID NO: 8312 - DNA, 32 bp, Artificial; identical to SEQ ID NO: 7853
  oligonucleotide probe

SEQ ID NO: 8313 - DNA, 32 bp, Artificial
  oligonucleotide probe
ccgtcgcaaagcgcacaagccgtgcgcaacga

SEQ ID NO: 8314 - DNA, 32 bp, Artificial; identical to SEQ ID NO: 8298
  oligonucleotide probe

SEQ ID NO: 8315 - DNA, 32 bp, Artificial; identical to SEQ ID NO: 8299
  oligonucleotide probe

SEQ ID NO: 8316 - DNA, 32 bp, Artificial; identical to SEQ ID NO: 7863
  oligonucleotide probe

SEQ ID NO: 8317 - DNA, 32 bp, Artificial; identical to SEQ ID NO: 5217
  oligonucleotide probe

SEQ ID NO: 8318 - DNA, 32 bp, Artificial; identical to SEQ ID NO: 5159
  oligonucleotide probe

SEQ ID NO: 8319 - DNA, 32 bp, Artificial; identical to SEQ ID NO: 7694
  oligonucleotide probe

SEQ ID NO: 8320 - DNA, 32 bp, Artificial; identical to SEQ ID NO: 7831
  oligonucleotide probe

SEQ ID NO: 8321 - DNA, 32 bp, Artificial; identical to SEQ ID NO: 7832
  oligonucleotide probe

SEQ ID NO: 8322 - DNA, 32 bp, Artificial; identical to SEQ ID NO: 7863
  oligonucleotide probe

SEQ ID NO: 8323 - DNA, 32 bp, Artificial; identical to SEQ ID NO: 5217
  oligonucleotide probe

SEQ ID NO: 8324 - DNA, 32 bp, Artificial; identical to SEQ ID NO: 7673
  oligonucleotide probe

SEQ ID NO: 8325 - DNA, 32 bp, Artificial; identical to SEQ ID NO: 7690
  oligonucleotide probe

SEQ ID NO: 8326 - DNA, 32 bp, Artificial
  oligonucleotide probe
ccgtcgcaaagcgcacttcggggaaacgccgt

SEQ ID NO: 8327 - DNA, 32 bp, Artificial; identical to SEQ ID NO: 5222
  oligonucleotide probe

SEQ ID NO: 8328 - DNA, 32 bp, Artificial; identical to SEQ ID NO: 5159
  oligonucleotide probe

SEQ ID NO: 8329 - DNA, 32 bp, Artificial; identical to SEQ ID NO: 7694
  oligonucleotide probe

SEQ ID NO: 8330 - DNA, 32 bp, Artificial; identical to SEQ ID NO: 7833
  oligonucleotide probe

SEQ ID NO: 8331 - DNA, 32 bp, Artificial; identical to SEQ ID NO: 7834
  oligonucleotide probe

SEQ ID NO: 8332 - DNA, 32 bp, Artificial; identical to SEQ ID NO: 8287
  oligonucleotide probe

SEQ ID NO: 8333 - DNA, 32 bp, Artificial; identical to SEQ ID NO: 8291
  oligonucleotide probe

SEQ ID NO: 8334 - DNA, 32 bp, Artificial; identical to SEQ ID NO: 5223
  oligonucleotide probe

SEQ ID NO: 8335 - DNA, 32 bp, Artificial; identical to SEQ ID NO: 7838
  oligonucleotide probe

SEQ ID NO: 8336 - DNA, 32 bp, Artificial
  oligonucleotide probe
ggctgcacggtcccgtaacggctgcaagcgca

SEQ ID NO: 8337 - DNA, 32 bp, Artificial; identical to SEQ ID NO: 8298
  oligonucleotide probe

SEQ ID NO: 8338 - DNA, 32 bp, Artificial; identical to SEQ ID NO: 7623
  oligonucleotide probe

SEQ ID NO: 8339 - DNA, 32 bp, Artificial; identical to SEQ ID NO: 7624
  oligonucleotide probe

SEQ ID NO: 8340 - DNA, 32 bp, Artificial; identical to SEQ ID NO: 5133
  oligonucleotide probe

SEQ ID NO: 8341 - DNA, 32 bp, Artificial; identical to SEQ ID NO: 7594
  oligonucleotide probe

SEQ ID NO: 8342 - DNA, 32 bp, Artificial; identical to SEQ ID NO: 5242
  oligonucleotide probe

SEQ ID NO: 8343 - DNA, 32 bp, Artificial
  oligonucleotide probe
ccgtcgcaaagcgcacggctttgcgcaccgtg

SEQ ID NO: 8344 - DNA, 32 bp, Artificial; identical to SEQ ID NO: 8292
  oligonucleotide probe

SEQ ID NO: 8345 - DNA, 32 bp, Artificial; identical to SEQ ID NO: 5410
  oligonucleotide probe

SEQ ID NO: 8346 - DNA, 32 bp, Artificial; identical to SEQ ID NO: 5171
  oligonucleotide probe

SEQ ID NO: 8347 - DNA, 32 bp, Artificial; identical to SEQ ID NO: 7676
  oligonucleotide probe

SEQ ID NO: 8348 - DNA, 32 bp, Artificial; identical to SEQ ID NO: 5223
  oligonucleotide probe

SEQ ID NO: 8349 - DNA, 32 bp, Artificial; identical to SEQ ID NO: 7838
  oligonucleotide probe

SEQ ID NO: 8350 - DNA, 32 bp, Artificial; identical to SEQ ID NO: 7853
  oligonucleotide probe

SEQ ID NO: 8351 - DNA, 32 bp, Artificial; identical to SEQ ID NO: 8313
  oligonucleotide probe

SEQ ID NO: 8352 - DNA, 32 bp, Artificial; identical to SEQ ID NO: 7835
  oligonucleotide probe

SEQ ID NO: 8353 - DNA, 32 bp, Artificial; identical to SEQ ID NO: 5232
  oligonucleotide probe

SEQ ID NO: 8354 - DNA, 32 bp, Artificial; identical to SEQ ID NO: 7624
  oligonucleotide probe

SEQ ID NO: 8355 - DNA, 32 bp, Artificial; identical to SEQ ID NO: 7605
  oligonucleotide probe

SEQ ID NO: 8356 - DNA, 32 bp, Artificial; identical to SEQ ID NO: 8336
  oligonucleotide probe

SEQ ID NO: 8357 - DNA, 32 bp, Artificial; identical to SEQ ID NO: 8298
  oligonucleotide probe

SEQ ID NO: 8358 - DNA, 32 bp, Artificial
  oligonucleotide probe
aacgcgatttgccgcattcggggaaacgccgt

SEQ ID NO: 8359 - DNA, 32 bp, Artificial; identical to SEQ ID NO: 5223
  oligonucleotide probe

SEQ ID NO: 8360 - DNA, 32 bp, Artificial
  oligonucleotide probe
ttcgccgtttgcgctgggctttgcgcaccgtg

SEQ ID NO: 8361 - DNA, 32 bp, Artificial
  oligonucleotide probe
ttcgccgtttgcgctgatggcgcagcacgctg

SEQ ID NO: 8362 - DNA, 32 bp, Artificial; identical to SEQ ID NO: 7856
  oligonucleotide probe

SEQ ID NO: 8363 - DNA, 32 bp, Artificial; identical to SEQ ID NO: 5136
  oligonucleotide probe

SEQ ID NO: 8364 - DNA, 32 bp, Artificial; identical to SEQ ID NO: 7905
  oligonucleotide probe

SEQ ID NO: 8365 - DNA, 32 bp, Artificial; identical to SEQ ID NO: 5231
  oligonucleotide probe

SEQ ID NO: 8366 - DNA, 32 bp, Artificial; identical to SEQ ID NO: 7690
  oligonucleotide probe

SEQ ID NO: 8367 - DNA, 32 bp, Artificial; identical to SEQ ID NO: 7662
  oligonucleotide probe

SEQ ID NO: 8368 - DNA, 32 bp, Artificial; identical to SEQ ID NO: 7662
  oligonucleotide probe

SEQ ID NO: 8369 - DNA, 32 bp, Artificial; identical to SEQ ID NO: 7659
  oligonucleotide probe

SEQ ID NO: 8370 - DNA, 32 bp, Artificial; identical to SEQ ID NO: 7841
  oligonucleotide probe

SEQ ID NO: 8371 - DNA, 32 bp, Artificial; identical to SEQ ID NO: 7842
  oligonucleotide probe

SEQ ID NO: 8372 - DNA, 32 bp, Artificial; identical to SEQ ID NO: 7841
  oligonucleotide probe

SEQ ID NO: 8373 - DNA, 32 bp, Artificial; identical to SEQ ID NO: 7842
  oligonucleotide probe

SEQ ID NO: 8374 - DNA, 32 bp, Artificial; identical to SEQ ID NO: 7831
  oligonucleotide probe

SEQ ID NO: 8375 - DNA, 32 bp, Artificial; identical to SEQ ID NO: 7832
  oligonucleotide probe

SEQ ID NO: 8376 - DNA, 32 bp, Artificial; identical to SEQ ID NO: 5224
  oligonucleotide probe

SEQ ID NO: 8377 - DNA, 32 bp, Artificial; identical to SEQ ID NO: 7840
  oligonucleotide probe

SEQ ID NO: 8378 - DNA, 32 bp, Artificial; identical to SEQ ID NO: 7838
  oligonucleotide probe

SEQ ID NO: 8379 - DNA, 32 bp, Artificial; identical to SEQ ID NO: 5224
  oligonucleotide probe

SEQ ID NO: 8380 - DNA, 32 bp, Artificial; identical to SEQ ID NO: 7834
  oligonucleotide probe

SEQ ID NO: 8381 - DNA, 32 bp, Artificial; identical to SEQ ID NO: 7831
  oligonucleotide probe

SEQ ID NO: 8382 - DNA, 32 bp, Artificial; identical to SEQ ID NO: 7835
  oligonucleotide probe

SEQ ID NO: 8383 - DNA, 32 bp, Artificial; identical to SEQ ID NO: 5232
  oligonucleotide probe

SEQ ID NO: 8384 - DNA, 32 bp, Artificial; identical to SEQ ID NO: 7863
  oligonucleotide probe

SEQ ID NO: 8385 - DNA, 32 bp, Artificial; identical to SEQ ID NO: 5217
  oligonucleotide probe

SEQ ID NO: 8386 - DNA, 32 bp, Artificial; identical to SEQ ID NO: 7597
  oligonucleotide probe

SEQ ID NO: 8387 - DNA, 32 bp, Artificial; identical to SEQ ID NO: 7598
  oligonucleotide probe

SEQ ID NO: 8388 - DNA, 32 bp, Artificial; identical to SEQ ID NO: 7891
  oligonucleotide probe

SEQ ID NO: 8389 - DNA, 32 bp, Artificial; identical to SEQ ID NO: 5218
  oligonucleotide probe

SEQ ID NO: 8390 - DNA, 32 bp, Artificial; identical to SEQ ID NO: 7831
  oligonucleotide probe

SEQ ID NO: 8391 - DNA, 32 bp, Artificial; identical to SEQ ID NO: 7832
  oligonucleotide probe

SEQ ID NO: 8392 - DNA, 32 bp, Artificial; identical to SEQ ID NO: 8305
  oligonucleotide probe

SEQ ID NO: 8393 - DNA, 32 bp, Artificial; identical to SEQ ID NO: 5242
  oligonucleotide probe

SEQ ID NO: 8394 - DNA, 32 bp, Artificial
  oligonucleotide probe
ggctgcacggtcccgtttgcaagcgtccggga

SEQ ID NO: 8395 - DNA, 32 bp, Artificial; identical to SEQ ID NO: 8336
  oligonucleotide probe

SEQ ID NO: 8396 - DNA, 32 bp, Artificial; identical to SEQ ID NO: 7891
  oligonucleotide probe

SEQ ID NO: 8397 - DNA, 32 bp, Artificial; identical to SEQ ID NO: 5218
  oligonucleotide probe

SEQ ID NO: 8398 - DNA, 32 bp, Artificial; identical to SEQ ID NO: 7605
  oligonucleotide probe

SEQ ID NO: 8399 - DNA, 32 bp, Artificial; identical to SEQ ID NO: 7606
  oligonucleotide probe

SEQ ID NO: 8400 - DNA, 32 bp, Artificial; identical to SEQ ID NO: 5185
  oligonucleotide probe

SEQ ID NO: 8401 - DNA, 32 bp, Artificial; identical to SEQ ID NO: 7655
  oligonucleotide probe

SEQ ID NO: 8402 - DNA, 32 bp, Artificial
  oligonucleotide probe
ttcgccgtttgcgctgttcggggaaacgccgt

SEQ ID NO: 8403 - DNA, 32 bp, Artificial; identical to SEQ ID NO: 7840
  oligonucleotide probe

SEQ ID NO: 8404 - DNA, 32 bp, Artificial; identical to SEQ ID NO: 8001
  oligonucleotide probe

SEQ ID NO: 8405 - DNA, 32 bp, Artificial; identical to SEQ ID NO: 5239
  oligonucleotide probe

SEQ ID NO: 8406 - DNA, 32 bp, Artificial; identical to SEQ ID NO: 7690
  oligonucleotide probe

SEQ ID NO: 8407 - DNA, 32 bp, Artificial; identical to SEQ ID NO: 7662
  oligonucleotide probe

SEQ ID NO: 8408 - DNA, 32 bp, Artificial; identical to SEQ ID NO: 5159
  oligonucleotide probe

SEQ ID NO: 8409 - DNA, 32 bp, Artificial; identical to SEQ ID NO: 7694
  oligonucleotide probe

SEQ ID NO: 8410 - DNA, 32 bp, Artificial; identical to SEQ ID NO: 7853
  oligonucleotide probe

SEQ ID NO: 8411 - DNA, 32 bp, Artificial; identical to SEQ ID NO: 8313
  oligonucleotide probe

SEQ ID NO: 8412 - DNA, 32 bp, Artificial; identical to SEQ ID NO: 8291
  oligonucleotide probe

SEQ ID NO: 8413 - DNA, 32 bp, Artificial; identical to SEQ ID NO: 8394
  oligonucleotide probe

SEQ ID NO: 8414 - DNA, 32 bp, Artificial; identical to SEQ ID NO: 7865
  oligonucleotide probe

SEQ ID NO: 8415 - DNA, 32 bp, Artificial; identical to SEQ ID NO: 5136
  oligonucleotide probe

SEQ ID NO: 8416 - DNA, 32 bp, Artificial; identical to SEQ ID NO: 5231
  oligonucleotide probe

SEQ ID NO: 8417 - DNA, 32 bp, Artificial; identical to SEQ ID NO: 7597
  oligonucleotide probe

SEQ ID NO: 8418 - DNA, 32 bp, Artificial; identical to SEQ ID NO: 7831
  oligonucleotide probe

SEQ ID NO: 8419 - DNA, 32 bp, Artificial; identical to SEQ ID NO: 7832
  oligonucleotide probe

SEQ ID NO: 8420 - DNA, 32 bp, Artificial; identical to SEQ ID NO: 8001
  oligonucleotide probe

SEQ ID NO: 8421 - DNA, 32 bp, Artificial; identical to SEQ ID NO: 7623
  oligonucleotide probe

SEQ ID NO: 8422 - DNA, 32 bp, Artificial; identical to SEQ ID NO: 8336
  oligonucleotide probe

SEQ ID NO: 8423 - DNA, 32 bp, Artificial; identical to SEQ ID NO: 8298
  oligonucleotide probe

SEQ ID NO: 8424 - DNA, 32 bp, Artificial; identical to SEQ ID NO: 5134
  oligonucleotide probe

SEQ ID NO: 8425 - DNA, 32 bp, Artificial; identical to SEQ ID NO: 7905
  oligonucleotide probe

SEQ ID NO: 8426 - DNA, 32 bp, Artificial; identical to SEQ ID NO: 5185
  oligonucleotide probe

SEQ ID NO: 8427 - DNA, 32 bp, Artificial; identical to SEQ ID NO: 7655
  oligonucleotide probe

SEQ ID NO: 8428 - DNA, 32 bp, Artificial; identical to SEQ ID NO: 7865
  oligonucleotide probe

SEQ ID NO: 8429 - DNA, 32 bp, Artificial; identical to SEQ ID NO: 7866
  oligonucleotide probe

SEQ ID NO: 8430 - DNA, 32 bp, Artificial; identical to SEQ ID NO: 8247
  oligonucleotide probe

SEQ ID NO: 8431 - DNA, 32 bp, Artificial; identical to SEQ ID NO: 5163
  oligonucleotide probe

SEQ ID NO: 8432 - DNA, 32 bp, Artificial; identical to SEQ ID NO: 5221
  oligonucleotide probe

SEQ ID NO: 8433 - DNA, 32 bp, Artificial; identical to SEQ ID NO: 8326
  oligonucleotide probe

SEQ ID NO: 8434 - DNA, 32 bp, Artificial; identical to SEQ ID NO: 7841
  oligonucleotide probe

SEQ ID NO: 8435 - DNA, 32 bp, Artificial; identical to SEQ ID NO: 7842
  oligonucleotide probe

SEQ ID NO: 8436 - DNA, 32 bp, Artificial; identical to SEQ ID NO: 5133
  oligonucleotide probe

SEQ ID NO: 8437 - DNA, 32 bp, Artificial; identical to SEQ ID NO: 7594
  oligonucleotide probe

SEQ ID NO: 8438 - DNA, 32 bp, Artificial; identical to SEQ ID NO: 7833
  oligonucleotide probe

SEQ ID NO: 8439 - DNA, 32 bp, Artificial; identical to SEQ ID NO: 7834
  oligonucleotide probe

SEQ ID NO: 8440 - DNA, 32 bp, Artificial; identical to SEQ ID NO: 7853
  oligonucleotide probe

SEQ ID NO: 8441 - DNA, 32 bp, Artificial; identical to SEQ ID NO: 8313
  oligonucleotide probe

SEQ ID NO: 8442 - DNA, 32 bp, Artificial
  oligonucleotide probe
cgcattgcggctttcgccgtcgcaaagcgcac

SEQ ID NO: 8443 - DNA, 32 bp, Artificial; identical to SEQ ID NO: 5163
  oligonucleotide probe

SEQ ID NO: 8444 - DNA, 32 bp, Artificial; identical to SEQ ID NO: 7838
  oligonucleotide probe

SEQ ID NO: 8445 - DNA, 32 bp, Artificial; identical to SEQ ID NO: 5224
  oligonucleotide probe

SEQ ID NO: 8446 - DNA, 32 bp, Artificial; identical to SEQ ID NO: 7833
  oligonucleotide probe

SEQ ID NO: 8447 - DNA, 32 bp, Artificial; identical to SEQ ID NO: 7834
  oligonucleotide probe

SEQ ID NO: 8448 - DNA, 32 bp, Artificial; identical to SEQ ID NO: 5242
  oligonucleotide probe

SEQ ID NO: 8449 - DNA, 32 bp, Artificial; identical to SEQ ID NO: 8343
  oligonucleotide probe

SEQ ID NO: 8450 - DNA, 32 bp, Artificial; identical to SEQ ID NO: 7833
  oligonucleotide probe

SEQ ID NO: 8451 - DNA, 32 bp, Artificial; identical to SEQ ID NO: 7834
  oligonucleotide probe

SEQ ID NO: 8452 - DNA, 32 bp, Artificial; identical to SEQ ID NO: 5220
  oligonucleotide probe

SEQ ID NO: 8453 - DNA, 32 bp, Artificial; identical to SEQ ID NO: 8287
  oligonucleotide probe

SEQ ID NO: 8454 - DNA, 32 bp, Artificial; identical to SEQ ID NO: 8001
  oligonucleotide probe

SEQ ID NO: 8455 - DNA, 32 bp, Artificial; identical to SEQ ID NO: 5239
  oligonucleotide probe

SEQ ID NO: 8456 - DNA, 32 bp, Artificial
  oligonucleotide probe
aacgcgatttgccgcattgcaagcgtccggga

SEQ ID NO: 8457 - DNA, 32 bp, Artificial; identical to SEQ ID NO: 5223
  oligonucleotide probe

SEQ ID NO: 8458 - DNA, 32 bp, Artificial; identical to SEQ ID NO: 8336
  oligonucleotide probe

SEQ ID NO: 8459 - DNA, 32 bp, Artificial; identical to SEQ ID NO: 8298
  oligonucleotide probe

SEQ ID NO: 8460 - DNA, 32 bp, Artificial; identical to SEQ ID NO: 8394
  oligonucleotide probe

SEQ ID NO: 8461 - DNA, 32 bp, Artificial; identical to SEQ ID NO: 8336
  oligonucleotide probe

SEQ ID NO: 8462 - DNA, 32 bp, Artificial; identical to SEQ ID NO: 5185
  oligonucleotide probe

SEQ ID NO: 8463 - DNA, 32 bp, Artificial; identical to SEQ ID NO: 7655
  oligonucleotide probe

SEQ ID NO: 8464 - DNA, 32 bp, Artificial; identical to SEQ ID NO: 5223
  oligonucleotide probe

SEQ ID NO: 8465 - DNA, 32 bp, Artificial; identical to SEQ ID NO: 7838
  oligonucleotide probe

SEQ ID NO: 8466 - DNA, 32 bp, Artificial; identical to SEQ ID NO: 5416
  oligonucleotide probe

SEQ ID NO: 8467 - DNA, 32 bp, Artificial
  oligonucleotide probe
aagccgtgcgcaacgaccgtcgcaaagcgcac

SEQ ID NO: 8468 - DNA, 32 bp, Artificial; identical to SEQ ID NO: 7623
  oligonucleotide probe

SEQ ID NO: 8469 - DNA, 32 bp, Artificial; identical to SEQ ID NO: 7624
  oligonucleotide probe

SEQ ID NO: 8470 - DNA, 32 bp, Artificial; identical to SEQ ID NO: 8360
  oligonucleotide probe

SEQ ID NO: 8471 - DNA, 32 bp, Artificial; identical to SEQ ID NO: 7840
  oligonucleotide probe

SEQ ID NO: 8472 - DNA, 32 bp, Artificial; identical to SEQ ID NO: 5231
  oligonucleotide probe

SEQ ID NO: 8473 - DNA, 32 bp, Artificial; identical to SEQ ID NO: 7835
  oligonucleotide probe

SEQ ID NO: 8474 - DNA, 32 bp, Artificial; identical to SEQ ID NO: 5134
  oligonucleotide probe

SEQ ID NO: 8475 - DNA, 32 bp, Artificial; identical to SEQ ID NO: 7905
  oligonucleotide probe

SEQ ID NO: 8476 - DNA, 32 bp, Artificial; identical to SEQ ID NO: 7644
  oligonucleotide probe

SEQ ID NO: 8477 - DNA, 32 bp, Artificial; identical to SEQ ID NO: 5141
  oligonucleotide probe

SEQ ID NO: 8478 - DNA, 32 bp, Artificial; identical to SEQ ID NO: 7855
  oligonucleotide probe

SEQ ID NO: 8479 - DNA, 32 bp, Artificial; identical to SEQ ID NO: 5136
  oligonucleotide probe

SEQ ID NO: 8480 - DNA, 32 bp, Artificial; identical to SEQ ID NO: 7905
  oligonucleotide probe

SEQ ID NO: 8481 - DNA, 32 bp, Artificial; identical to SEQ ID NO: 5231
  oligonucleotide probe

SEQ ID NO: 8482 - DNA, 32 bp, Artificial; identical to SEQ ID NO: 8299
  oligonucleotide probe

SEQ ID NO: 8483 - DNA, 32 bp, Artificial; identical to SEQ ID NO: 8308
  oligonucleotide probe

SEQ ID NO: 8484 - DNA, 32 bp, Artificial; identical to SEQ ID NO: 5223
  oligonucleotide probe

SEQ ID NO: 8485 - DNA, 32 bp, Artificial; identical to SEQ ID NO: 8287
  oligonucleotide probe

SEQ ID NO: 8486 - DNA, 32 bp, Artificial; identical to SEQ ID NO: 8402
  oligonucleotide probe

SEQ ID NO: 8487 - DNA, 32 bp, Artificial
  oligonucleotide probe
ttcgccgtttgcgctgccgtttcggctgggct

SEQ ID NO: 8488 - DNA, 32 bp, Artificial; identical to SEQ ID NO: 7812
  oligonucleotide probe

SEQ ID NO: 8489 - DNA, 32 bp, Artificial; identical to SEQ ID NO: 8247
  oligonucleotide probe

SEQ ID NO: 8490 - DNA, 32 bp, Artificial; identical to SEQ ID NO: 8292
  oligonucleotide probe

SEQ ID NO: 8491 - DNA, 32 bp, Artificial; identical to SEQ ID NO: 5410
  oligonucleotide probe

SEQ ID NO: 8492 - DNA, 32 bp, Artificial; identical to SEQ ID NO: 8258
  oligonucleotide probe

SEQ ID NO: 8493 - DNA, 32 bp, Artificial; identical to SEQ ID NO: 8268
  oligonucleotide probe

SEQ ID NO: 8494 - DNA, 32 bp, Artificial; identical to SEQ ID NO: 5411
  oligonucleotide probe

SEQ ID NO: 8495 - DNA, 32 bp, Artificial; identical to SEQ ID NO: 8305
  oligonucleotide probe

SEQ ID NO: 8496 - DNA, 32 bp, Artificial; identical to SEQ ID NO: 8360
  oligonucleotide probe

SEQ ID NO: 8497 - DNA, 32 bp, Artificial; identical to SEQ ID NO: 8361
  oligonucleotide probe

SEQ ID NO: 8498 - DNA, 32 bp, Artificial; identical to SEQ ID NO: 7840
  oligonucleotide probe

SEQ ID NO: 8499 - DNA, 32 bp, Artificial; identical to SEQ ID NO: 7853
  oligonucleotide probe

SEQ ID NO: 8500 - DNA, 32 bp, Artificial; identical to SEQ ID NO: 8313
  oligonucleotide probe

SEQ ID NO: 8501 - DNA, 32 bp, Artificial; identical to SEQ ID NO: 5411
  oligonucleotide probe

SEQ ID NO: 8502 - DNA, 32 bp, Artificial; identical to SEQ ID NO: 7891
  oligonucleotide probe

SEQ ID NO: 8503 - DNA, 32 bp, Artificial; identical to SEQ ID NO: 5218
  oligonucleotide probe

SEQ ID NO: 8504 - DNA, 32 bp, Artificial; identical to SEQ ID NO: 8001
  oligonucleotide probe

SEQ ID NO: 8505 - DNA, 32 bp, Artificial; identical to SEQ ID NO: 5239
  oligonucleotide probe

SEQ ID NO: 8506 - DNA, 32 bp, Artificial; identical to SEQ ID NO: 7831
  oligonucleotide probe

SEQ ID NO: 8507 - DNA, 32 bp, Artificial; identical to SEQ ID NO: 7832
  oligonucleotide probe

SEQ ID NO: 8508 - DNA, 32 bp, Artificial; identical to SEQ ID NO: 8309
  oligonucleotide probe

SEQ ID NO: 8509 - DNA, 32 bp, Artificial
  oligonucleotide probe
ggctgcacggtcccgtaacgcgatttgccgca

SEQ ID NO: 8510 - DNA, 32 bp, Artificial; identical to SEQ ID NO: 8247
  oligonucleotide probe

SEQ ID NO: 8511 - DNA, 32 bp, Artificial; identical to SEQ ID NO: 8240
  oligonucleotide probe

SEQ ID NO: 8512 - DNA, 32 bp, Artificial; identical to SEQ ID NO: 8287
  oligonucleotide probe

SEQ ID NO: 8513 - DNA, 32 bp, Artificial; identical to SEQ ID NO: 8291
  oligonucleotide probe

SEQ ID NO: 8514 - DNA, 32 bp, Artificial; identical to SEQ ID NO: 5411
  oligonucleotide probe

SEQ ID NO: 8515 - DNA, 32 bp, Artificial; identical to SEQ ID NO: 5220
  oligonucleotide probe

SEQ ID NO: 8516 - DNA, 32 bp, Artificial; identical to SEQ ID NO: 5185
  oligonucleotide probe

SEQ ID NO: 8517 - DNA, 32 bp, Artificial; identical to SEQ ID NO: 7655
  oligonucleotide probe

SEQ ID NO: 8518 - DNA, 32 bp, Artificial; identical to SEQ ID NO: 8292
  oligonucleotide probe

SEQ ID NO: 8519 - DNA, 32 bp, Artificial; identical to SEQ ID NO: 5410
  oligonucleotide probe

SEQ ID NO: 8520 - DNA, 32 bp, Artificial; identical to SEQ ID NO: 8456
  oligonucleotide probe

SEQ ID NO: 8521 - DNA, 32 bp, Artificial; identical to SEQ ID NO: 5241
  oligonucleotide probe

SEQ ID NO: 8522 - DNA, 32 bp, Artificial; identical to SEQ ID NO: 7596
  oligonucleotide probe

SEQ ID NO: 8523 - DNA, 32 bp, Artificial; identical to SEQ ID NO: 5140
  oligonucleotide probe

SEQ ID NO: 8524 - DNA, 32 bp, Artificial; identical to SEQ ID NO: 8394
  oligonucleotide probe

SEQ ID NO: 8525 - DNA, 32 bp, Artificial; identical to SEQ ID NO: 8336
  oligonucleotide probe

SEQ ID NO: 8526 - DNA, 32 bp, Artificial; identical to SEQ ID NO: 5242
  oligonucleotide probe

SEQ ID NO: 8527 - DNA, 32 bp, Artificial; identical to SEQ ID NO: 5220
  oligonucleotide probe

SEQ ID NO: 8528 - DNA, 32 bp, Artificial; identical to SEQ ID NO: 5220
  oligonucleotide probe

SEQ ID NO: 8529 - DNA, 32 bp, Artificial; identical to SEQ ID NO: 8287
  oligonucleotide probe

SEQ ID NO: 8530 - DNA, 32 bp, Artificial; identical to SEQ ID NO: 7891
  oligonucleotide probe

SEQ ID NO: 8531 - DNA, 32 bp, Artificial; identical to SEQ ID NO: 5218
  oligonucleotide probe

SEQ ID NO: 8532 - DNA, 32 bp, Artificial; identical to SEQ ID NO: 5134
  oligonucleotide probe

SEQ ID NO: 8533 - DNA, 32 bp, Artificial; identical to SEQ ID NO: 7905
  oligonucleotide probe

SEQ ID NO: 8534 - DNA, 32 bp, Artificial; identical to SEQ ID NO: 7598
  oligonucleotide probe

SEQ ID NO: 8535 - DNA, 32 bp, Artificial; identical to SEQ ID NO: 7855
  oligonucleotide probe

SEQ ID NO: 8536 - DNA, 32 bp, Artificial; identical to SEQ ID NO: 5411
  oligonucleotide probe

SEQ ID NO: 8537 - DNA, 32 bp, Artificial; identical to SEQ ID NO: 8305
  oligonucleotide probe

SEQ ID NO: 8538 - DNA, 32 bp, Artificial; identical to SEQ ID NO: 5133
  oligonucleotide probe

SEQ ID NO: 8539 - DNA, 32 bp, Artificial; identical to SEQ ID NO: 7594
  oligonucleotide probe

SEQ ID NO: 8540 - DNA, 32 bp, Artificial; identical to SEQ ID NO: 7863
  oligonucleotide probe

SEQ ID NO: 8541 - DNA, 32 bp, Artificial; identical to SEQ ID NO: 5217
  oligonucleotide probe

SEQ ID NO: 8542 - DNA, 32 bp, Artificial; identical to SEQ ID NO: 7855
  oligonucleotide probe

SEQ ID NO: 8543 - DNA, 32 bp, Artificial; identical to SEQ ID NO: 7856
  oligonucleotide probe

SEQ ID NO: 8544 - DNA, 32 bp, Artificial; identical to SEQ ID NO: 8456
  oligonucleotide probe

SEQ ID NO: 8545 - DNA, 32 bp, Artificial; identical to SEQ ID NO: 5241
  oligonucleotide probe

SEQ ID NO: 8546 - DNA, 32 bp, Artificial; identical to SEQ ID NO: 7853
  oligonucleotide probe

SEQ ID NO: 8547 - DNA, 32 bp, Artificial; identical to SEQ ID NO: 8313
  oligonucleotide probe

SEQ ID NO: 8548 - DNA, 32 bp, Artificial; identical to SEQ ID NO: 7891
  oligonucleotide probe

SEQ ID NO: 8549 - DNA, 32 bp, Artificial; identical to SEQ ID NO: 5218
  oligonucleotide probe

SEQ ID NO: 8550 - DNA, 32 bp, Artificial; identical to SEQ ID NO: 5134
  oligonucleotide probe

SEQ ID NO: 8551 - DNA, 32 bp, Artificial; identical to SEQ ID NO: 7597
  oligonucleotide probe

SEQ ID NO: 8552 - DNA, 32 bp, Artificial; identical to SEQ ID NO: 5411
  oligonucleotide probe

SEQ ID NO: 8553 - DNA, 32 bp, Artificial; identical to SEQ ID NO: 8305
  oligonucleotide probe

SEQ ID NO: 8554 - DNA, 32 bp, Artificial; identical to SEQ ID NO: 7644
  oligonucleotide probe

SEQ ID NO: 8555 - DNA, 32 bp, Artificial; identical to SEQ ID NO: 5141
  oligonucleotide probe

SEQ ID NO: 8556 - DNA, 32 bp, Artificial; identical to SEQ ID NO: 5411
  oligonucleotide probe

SEQ ID NO: 8557 - DNA, 32 bp, Artificial; identical to SEQ ID NO: 8305
  oligonucleotide probe

SEQ ID NO: 8558 - DNA, 32 bp, Artificial; identical to SEQ ID NO: 7838
  oligonucleotide probe

SEQ ID NO: 8559 - DNA, 32 bp, Artificial; identical to SEQ ID NO: 5224
  oligonucleotide probe

SEQ ID NO: 8560 - DNA, 32 bp, Artificial; identical to SEQ ID NO: 8343
  oligonucleotide probe

SEQ ID NO: 8561 - DNA, 32 bp, Artificial; identical to SEQ ID NO: 5221
  oligonucleotide probe

SEQ ID NO: 8562 - DNA, 32 bp, Artificial; identical to SEQ ID NO: 8296
  oligonucleotide probe

SEQ ID NO: 8563 - DNA, 32 bp, Artificial; identical to SEQ ID NO: 7840
  oligonucleotide probe

SEQ ID NO: 8564 - DNA, 32 bp, Artificial; identical to SEQ ID NO: 5171
  oligonucleotide probe

SEQ ID NO: 8565 - DNA, 32 bp, Artificial; identical to SEQ ID NO: 7676
  oligonucleotide probe

SEQ ID NO: 8566 - DNA, 32 bp, Artificial; identical to SEQ ID NO: 7855
  oligonucleotide probe

SEQ ID NO: 8567 - DNA, 32 bp, Artificial; identical to SEQ ID NO: 7856
  oligonucleotide probe

SEQ ID NO: 8568 - DNA, 32 bp, Artificial; identical to SEQ ID NO: 7835
  oligonucleotide probe

SEQ ID NO: 8569 - DNA, 32 bp, Artificial; identical to SEQ ID NO: 5232
  oligonucleotide probe

SEQ ID NO: 8570 - DNA, 32 bp, Artificial; identical to SEQ ID NO: 8442
  oligonucleotide probe

SEQ ID NO: 8571 - DNA, 32 bp, Artificial
  oligonucleotide probe
cgcattgcggctttcgggctgcacggtcccgt

SEQ ID NO: 8572 - DNA, 32 bp, Artificial; identical to SEQ ID NO: 8291
  oligonucleotide probe

SEQ ID NO: 8573 - DNA, 32 bp, Artificial; identical to SEQ ID NO: 8394
  oligonucleotide probe

SEQ ID NO: 8574 - DNA, 32 bp, Artificial; identical to SEQ ID NO: 8287
  oligonucleotide probe

SEQ ID NO: 8575 - DNA, 32 bp, Artificial; identical to SEQ ID NO: 8291
  oligonucleotide probe

SEQ ID NO: 8576 - DNA, 32 bp, Artificial; identical to SEQ ID NO: 5221
  oligonucleotide probe

SEQ ID NO: 8577 - DNA, 32 bp, Artificial; identical to SEQ ID NO: 5220
  oligonucleotide probe

SEQ ID NO: 8578 - DNA, 32 bp, Artificial; identical to SEQ ID NO: 7835
  oligonucleotide probe

SEQ ID NO: 8579 - DNA, 32 bp, Artificial; identical to SEQ ID NO: 5232
  oligonucleotide probe

SEQ ID NO: 8580 - DNA, 32 bp, Artificial; identical to SEQ ID NO: 7831
  oligonucleotide probe

SEQ ID NO: 8581 - DNA, 32 bp, Artificial; identical to SEQ ID NO: 7832
  oligonucleotide probe

SEQ ID NO: 8582 - DNA, 32 bp, Artificial; identical to SEQ ID NO: 8269
  oligonucleotide probe

SEQ ID NO: 8583 - DNA, 32 bp, Artificial; identical to SEQ ID NO: 7840
  oligonucleotide probe

SEQ ID NO: 8584 - DNA, 32 bp, Artificial; identical to SEQ ID NO: 8456
  oligonucleotide probe

SEQ ID NO: 8585 - DNA, 32 bp, Artificial; identical to SEQ ID NO: 5241
  oligonucleotide probe

SEQ ID NO: 8586 - DNA, 32 bp, Artificial; identical to SEQ ID NO: 7863
  oligonucleotide probe

SEQ ID NO: 8587 - DNA, 32 bp, Artificial; identical to SEQ ID NO: 5217
  oligonucleotide probe

SEQ ID NO: 8588 - DNA, 32 bp, Artificial; identical to SEQ ID NO: 7947
  oligonucleotide probe

SEQ ID NO: 8589 - DNA, 32 bp, Artificial; identical to SEQ ID NO: 7948
  oligonucleotide probe

SEQ ID NO: 8590 - DNA, 32 bp, Artificial; identical to SEQ ID NO: 5171
  oligonucleotide probe

SEQ ID NO: 8591 - DNA, 32 bp, Artificial; identical to SEQ ID NO: 7676
  oligonucleotide probe

SEQ ID NO: 8592 - DNA, 32 bp, Artificial; identical to SEQ ID NO: 7644
  oligonucleotide probe

SEQ ID NO: 8593 - DNA, 32 bp, Artificial; identical to SEQ ID NO: 5141
  oligonucleotide probe

SEQ ID NO: 8594 - DNA, 32 bp, Artificial; identical to SEQ ID NO: 7855
  oligonucleotide probe

SEQ ID NO: 8595 - DNA, 32 bp, Artificial; identical to SEQ ID NO: 7856
  oligonucleotide probe

SEQ ID NO: 8596 - DNA, 32 bp, Artificial; identical to SEQ ID NO: 7833
  oligonucleotide probe

SEQ ID NO: 8597 - DNA, 32 bp, Artificial; identical to SEQ ID NO: 7834
  oligonucleotide probe

SEQ ID NO: 8598 - DNA, 32 bp, Artificial
  oligonucleotide probe
ccgtcgcaaagcgcacaacgcgatttgccgca

SEQ ID NO: 8599 - DNA, 32 bp, Artificial; identical to SEQ ID NO: 5220
  oligonucleotide probe

SEQ ID NO: 8600 - DNA, 32 bp, Artificial; identical to SEQ ID NO: 7891
  oligonucleotide probe

SEQ ID NO: 8601 - DNA, 32 bp, Artificial; identical to SEQ ID NO: 5218
  oligonucleotide probe

SEQ ID NO: 8602 - DNA, 32 bp, Artificial; identical to SEQ ID NO: 7673
  oligonucleotide probe

SEQ ID NO: 8603 - DNA, 32 bp, Artificial; identical to SEQ ID NO: 7690
  oligonucleotide probe

SEQ ID NO: 8604 - DNA, 32 bp, Artificial; identical to SEQ ID NO: 7597
  oligonucleotide probe

SEQ ID NO: 8605 - DNA, 32 bp, Artificial; identical to SEQ ID NO: 7598
  oligonucleotide probe

SEQ ID NO: 8606 - DNA, 32 bp, Artificial; identical to SEQ ID NO: 8291
  oligonucleotide probe

SEQ ID NO: 8607 - DNA, 32 bp, Artificial; identical to SEQ ID NO: 8394
  oligonucleotide probe

SEQ ID NO: 8608 - DNA, 32 bp, Artificial; identical to SEQ ID NO: 5224
  oligonucleotide probe

SEQ ID NO: 8609 - DNA, 32 bp, Artificial; identical to SEQ ID NO: 8296
  oligonucleotide probe

SEQ ID NO: 8610 - DNA, 32 bp, Artificial; identical to SEQ ID NO: 7624
  oligonucleotide probe

SEQ ID NO: 8611 - DNA, 32 bp, Artificial; identical to SEQ ID NO: 7605
  oligonucleotide probe

SEQ ID NO: 8612 - DNA, 32 bp, Artificial; identical to SEQ ID NO: 8291
  oligonucleotide probe

SEQ ID NO: 8613 - DNA, 32 bp, Artificial; identical to SEQ ID NO: 8394
  oligonucleotide probe

SEQ ID NO: 8614 - DNA, 32 bp, Artificial; identical to SEQ ID NO: 7947
  oligonucleotide probe

SEQ ID NO: 8615 - DNA, 32 bp, Artificial; identical to SEQ ID NO: 7948
  oligonucleotide probe

SEQ ID NO: 8616 - DNA, 32 bp, Artificial; identical to SEQ ID NO: 7596
  oligonucleotide probe

SEQ ID NO: 8617 - DNA, 32 bp, Artificial; identical to SEQ ID NO: 5140
  oligonucleotide probe

SEQ ID NO: 8618 - DNA, 32 bp, Artificial; identical to SEQ ID NO: 8326
  oligonucleotide probe

SEQ ID NO: 8619 - DNA, 32 bp, Artificial; identical to SEQ ID NO: 5222
  oligonucleotide probe

SEQ ID NO: 8620 - DNA, 32 bp, Artificial; identical to SEQ ID NO: 7606
  oligonucleotide probe

SEQ ID NO: 8621 - DNA, 32 bp, Artificial; identical to SEQ ID NO: 7947
  oligonucleotide probe

SEQ ID NO: 8622 - DNA, 32 bp, Artificial; identical to SEQ ID NO: 8047
  oligonucleotide probe

SEQ ID NO: 8623 - DNA, 32 bp, Artificial; identical to SEQ ID NO: 5240
  oligonucleotide probe

SEQ ID NO: 8624 - DNA, 32 bp, Artificial; identical to SEQ ID NO: 7644
  oligonucleotide probe

SEQ ID NO: 8625 - DNA, 32 bp, Artificial; identical to SEQ ID NO: 5141
  oligonucleotide probe

SEQ ID NO: 8626 - DNA, 32 bp, Artificial; identical to SEQ ID NO: 8247
  oligonucleotide probe

SEQ ID NO: 8627 - DNA, 32 bp, Artificial; identical to SEQ ID NO: 8240
  oligonucleotide probe

SEQ ID NO: 8628 - DNA, 32 bp, Artificial; identical to SEQ ID NO: 8292
  oligonucleotide probe

SEQ ID NO: 8629 - DNA, 32 bp, Artificial; identical to SEQ ID NO: 5410
  oligonucleotide probe

SEQ ID NO: 8630 - DNA, 32 bp, Artificial; identical to SEQ ID NO: 7947
  oligonucleotide probe

SEQ ID NO: 8631 - DNA, 32 bp, Artificial; identical to SEQ ID NO: 7948
  oligonucleotide probe

SEQ ID NO: 8632 - DNA, 32 bp, Artificial; identical to SEQ ID NO: 8268
  oligonucleotide probe

SEQ ID NO: 8633 - DNA, 32 bp, Artificial; identical to SEQ ID NO: 7840
  oligonucleotide probe

SEQ ID NO: 8634 - DNA, 32 bp, Artificial; identical to SEQ ID NO: 7833
  oligonucleotide probe

SEQ ID NO: 8635 - DNA, 32 bp, Artificial; identical to SEQ ID NO: 7834
  oligonucleotide probe

SEQ ID NO: 8636 - DNA, 32 bp, Artificial; identical to SEQ ID NO: 8288
  oligonucleotide probe

SEQ ID NO: 8637 - DNA, 32 bp, Artificial; identical to SEQ ID NO: 5229
  oligonucleotide probe

SEQ ID NO: 8638 - DNA, 32 bp, Artificial; identical to SEQ ID NO: 7596
  oligonucleotide probe

SEQ ID NO: 8639 - DNA, 32 bp, Artificial; identical to SEQ ID NO: 5140
  oligonucleotide probe

SEQ ID NO: 8640 - DNA, 32 bp, Artificial; identical to SEQ ID NO: 8258
  oligonucleotide probe

SEQ ID NO: 8641 - DNA, 32 bp, Artificial; identical to SEQ ID NO: 8268
  oligonucleotide probe

SEQ ID NO: 8642 - DNA, 32 bp, Artificial; identical to SEQ ID NO: 7865
  oligonucleotide probe

SEQ ID NO: 8643 - DNA, 32 bp, Artificial; identical to SEQ ID NO: 7866
  oligonucleotide probe

SEQ ID NO: 8644 - DNA, 32 bp, Artificial; identical to SEQ ID NO: 7905
  oligonucleotide probe

SEQ ID NO: 8645 - DNA, 32 bp, Artificial; identical to SEQ ID NO: 5231
  oligonucleotide probe

SEQ ID NO: 8646 - DNA, 32 bp, Artificial; identical to SEQ ID NO: 8361
  oligonucleotide probe

SEQ ID NO: 8647 - DNA, 32 bp, Artificial; identical to SEQ ID NO: 7840
  oligonucleotide probe

SEQ ID NO: 8648 - DNA, 32 bp, Artificial; identical to SEQ ID NO: 7947
  oligonucleotide probe

SEQ ID NO: 8649 - DNA, 32 bp, Artificial; identical to SEQ ID NO: 7948
  oligonucleotide probe

SEQ ID NO: 8650 - DNA, 32 bp, Artificial; identical to SEQ ID NO: 7865
  oligonucleotide probe

SEQ ID NO: 8651 - DNA, 32 bp, Artificial; identical to SEQ ID NO: 7866
  oligonucleotide probe

SEQ ID NO: 8652 - DNA, 32 bp, Artificial; identical to SEQ ID NO: 5220
  oligonucleotide probe

SEQ ID NO: 8653 - DNA, 32 bp, Artificial; identical to SEQ ID NO: 8287
  oligonucleotide probe

SEQ ID NO: 8654 - DNA, 32 bp, Artificial; identical to SEQ ID NO: 8288
  oligonucleotide probe

SEQ ID NO: 8655 - DNA, 32 bp, Artificial; identical to SEQ ID NO: 5229
  oligonucleotide probe

SEQ ID NO: 8656 - DNA, 32 bp, Artificial; identical to SEQ ID NO: 8269
  oligonucleotide probe

SEQ ID NO: 8657 - DNA, 32 bp, Artificial; identical to SEQ ID NO: 8360
  oligonucleotide probe

SEQ ID NO: 8658 - DNA, 32 bp, Artificial; identical to SEQ ID NO: 7891
  oligonucleotide probe

SEQ ID NO: 8659 - DNA, 32 bp, Artificial; identical to SEQ ID NO: 7833
  oligonucleotide probe

SEQ ID NO: 8660 - DNA, 32 bp, Artificial; identical to SEQ ID NO: 5223
  oligonucleotide probe

SEQ ID NO: 8661 - DNA, 32 bp, Artificial; identical to SEQ ID NO: 7838
  oligonucleotide probe

SEQ ID NO: 8662 - DNA, 32 bp, Artificial; identical to SEQ ID NO: 5133
  oligonucleotide probe

SEQ ID NO: 8663 - DNA, 32 bp, Artificial; identical to SEQ ID NO: 7594
  oligonucleotide probe

SEQ ID NO: 8664 - DNA, 32 bp, Artificial; identical to SEQ ID NO: 7948
  oligonucleotide probe

SEQ ID NO: 8665 - DNA, 32 bp, Artificial; identical to SEQ ID NO: 7841
  oligonucleotide probe

SEQ ID NO: 8666 - DNA, 32 bp, Artificial; identical to SEQ ID NO: 8292
  oligonucleotide probe

SEQ ID NO: 8667 - DNA, 32 bp, Artificial; identical to SEQ ID NO: 5410
  oligonucleotide probe

SEQ ID NO: 8668 - DNA, 32 bp, Artificial; identical to SEQ ID NO: 8313
  oligonucleotide probe

SEQ ID NO: 8669 - DNA, 32 bp, Artificial; identical to SEQ ID NO: 5411
  oligonucleotide probe

SEQ ID NO: 8670 - DNA, 32 bp, Artificial; identical to SEQ ID NO: 8268
  oligonucleotide probe

SEQ ID NO: 8671 - DNA, 32 bp, Artificial; identical to SEQ ID NO: 8269
  oligonucleotide probe

SEQ ID NO: 8672 - DNA, 32 bp, Artificial; identical to SEQ ID NO: 5242
  oligonucleotide probe

SEQ ID NO: 8673 - DNA, 32 bp, Artificial; identical to SEQ ID NO: 8343
  oligonucleotide probe

SEQ ID NO: 8674 - DNA, 32 bp, Artificial; identical to SEQ ID NO: 7855
  oligonucleotide probe

SEQ ID NO: 8675 - DNA, 32 bp, Artificial; identical to SEQ ID NO: 7856
  oligonucleotide probe

SEQ ID NO: 8676 - DNA, 32 bp, Artificial; identical to SEQ ID NO: 5160
  oligonucleotide probe

SEQ ID NO: 8677 - DNA, 32 bp, Artificial; identical to SEQ ID NO: 8244
  oligonucleotide probe

SEQ ID NO: 8678 - DNA, 32 bp, Artificial; identical to SEQ ID NO: 5224
  oligonucleotide probe

SEQ ID NO: 8679 - DNA, 32 bp, Artificial; identical to SEQ ID NO: 8296
  oligonucleotide probe

SEQ ID NO: 8680 - DNA, 32 bp, Artificial; identical to SEQ ID NO: 7853
  oligonucleotide probe

SEQ ID NO: 8681 - DNA, 32 bp, Artificial; identical to SEQ ID NO: 8313
  oligonucleotide probe

SEQ ID NO: 8682 - DNA, 32 bp, Artificial; identical to SEQ ID NO: 8299
  oligonucleotide probe

SEQ ID NO: 8683 - DNA, 32 bp, Artificial; identical to SEQ ID NO: 8308
  oligonucleotide probe

SEQ ID NO: 8684 - DNA, 32 bp, Artificial; identical to SEQ ID NO: 8001
  oligonucleotide probe

SEQ ID NO: 8685 - DNA, 32 bp, Artificial; identical to SEQ ID NO: 5239
  oligonucleotide probe

SEQ ID NO: 8686 - DNA, 32 bp, Artificial; identical to SEQ ID NO: 5224
  oligonucleotide probe

SEQ ID NO: 8687 - DNA, 32 bp, Artificial; identical to SEQ ID NO: 8296
  oligonucleotide probe

SEQ ID NO: 8688 - DNA, 32 bp, Artificial; identical to SEQ ID NO: 8343
  oligonucleotide probe

SEQ ID NO: 8689 - DNA, 32 bp, Artificial; identical to SEQ ID NO: 5221
  oligonucleotide probe

SEQ ID NO: 8690 - DNA, 32 bp, Artificial; identical to SEQ ID NO: 8299
  oligonucleotide probe

SEQ ID NO: 8691 - DNA, 32 bp, Artificial; identical to SEQ ID NO: 8308
  oligonucleotide probe

SEQ ID NO: 8692 - DNA, 32 bp, Artificial; identical to SEQ ID NO: 8456
  oligonucleotide probe

SEQ ID NO: 8693 - DNA, 32 bp, Artificial; identical to SEQ ID NO: 5241
  oligonucleotide probe

SEQ ID NO: 8694 - DNA, 32 bp, Artificial; identical to SEQ ID NO: 8047
  oligonucleotide probe

SEQ ID NO: 8695 - DNA, 32 bp, Artificial; identical to SEQ ID NO: 7623
  oligonucleotide probe

SEQ ID NO: 8696 - DNA, 32 bp, Artificial; identical to SEQ ID NO: 8292
  oligonucleotide probe

SEQ ID NO: 8697 - DNA, 32 bp, Artificial; identical to SEQ ID NO: 5410
  oligonucleotide probe

SEQ ID NO: 8698 - DNA, 32 bp, Artificial; identical to SEQ ID NO: 7905
  oligonucleotide probe

SEQ ID NO: 8699 - DNA, 32 bp, Artificial; identical to SEQ ID NO: 5231
  oligonucleotide probe

SEQ ID NO: 8700 - DNA, 32 bp, Artificial; identical to SEQ ID NO: 7659
  oligonucleotide probe

SEQ ID NO: 8701 - DNA, 32 bp, Artificial; identical to SEQ ID NO: 7783
  oligonucleotide probe

SEQ ID NO: 8702 - DNA, 32 bp, Artificial; identical to SEQ ID NO: 7865
  oligonucleotide probe

SEQ ID NO: 8703 - DNA, 32 bp, Artificial; identical to SEQ ID NO: 7866
  oligonucleotide probe

SEQ ID NO: 8704 - DNA, 32 bp, Artificial; identical to SEQ ID NO: 7853
  oligonucleotide probe

SEQ ID NO: 8705 - DNA, 32 bp, Artificial; identical to SEQ ID NO: 5220
  oligonucleotide probe

SEQ ID NO: 8706 - DNA, 32 bp, Artificial; identical to SEQ ID NO: 7853
  oligonucleotide probe

SEQ ID NO: 8707 - DNA, 32 bp, Artificial; identical to SEQ ID NO: 8313
  oligonucleotide probe

SEQ ID NO: 8708 - DNA, 32 bp, Artificial; identical to SEQ ID NO: 7855
  oligonucleotide probe

SEQ ID NO: 8709 - DNA, 32 bp, Artificial; identical to SEQ ID NO: 7856
  oligonucleotide probe

SEQ ID NO: 8710 - DNA, 32 bp, Artificial; identical to SEQ ID NO: 5159
  oligonucleotide probe

SEQ ID NO: 8711 - DNA, 32 bp, Artificial; identical to SEQ ID NO: 7694
  oligonucleotide probe

SEQ ID NO: 8712 - DNA, 32 bp, Artificial; identical to SEQ ID NO: 8047
  oligonucleotide probe

SEQ ID NO: 8713 - DNA, 32 bp, Artificial; identical to SEQ ID NO: 5240
  oligonucleotide probe

SEQ ID NO: 8714 - DNA, 32 bp, Artificial; identical to SEQ ID NO: 5223
  oligonucleotide probe

SEQ ID NO: 8715 - DNA, 32 bp, Artificial; identical to SEQ ID NO: 7838
  oligonucleotide probe

SEQ ID NO: 8716 - DNA, 32 bp, Artificial; identical to SEQ ID NO: 7855
  oligonucleotide probe

SEQ ID NO: 8717 - DNA, 32 bp, Artificial; identical to SEQ ID NO: 7856
  oligonucleotide probe

SEQ ID NO: 8718 - DNA, 32 bp, Artificial; identical to SEQ ID NO: 5160
  oligonucleotide probe

SEQ ID NO: 8719 - DNA, 32 bp, Artificial; identical to SEQ ID NO: 8244
  oligonucleotide probe

SEQ ID NO: 8720 - DNA, 32 bp, Artificial; identical to SEQ ID NO: 7863
  oligonucleotide probe

SEQ ID NO: 8721 - DNA, 32 bp, Artificial; identical to SEQ ID NO: 5217
  oligonucleotide probe

SEQ ID NO: 8722 - DNA, 32 bp, Artificial; identical to SEQ ID NO: 8296
  oligonucleotide probe

SEQ ID NO: 8723 - DNA, 32 bp, Artificial; identical to SEQ ID NO: 8258
  oligonucleotide probe

SEQ ID NO: 8724 - DNA, 32 bp, Artificial; identical to SEQ ID NO: 7659
  oligonucleotide probe

SEQ ID NO: 8725 - DNA, 32 bp, Artificial; identical to SEQ ID NO: 7783
  oligonucleotide probe

SEQ ID NO: 8726 - DNA, 32 bp, Artificial; identical to SEQ ID NO: 8296
  oligonucleotide probe

SEQ ID NO: 8727 - DNA, 32 bp, Artificial; identical to SEQ ID NO: 8258
  oligonucleotide probe

SEQ ID NO: 8728 - DNA, 32 bp, Artificial; identical to SEQ ID NO: 7783
  oligonucleotide probe

SEQ ID NO: 8729 - DNA, 32 bp, Artificial; identical to SEQ ID NO: 7812
  oligonucleotide probe

SEQ ID NO: 8730 - DNA, 32 bp, Artificial; identical to SEQ ID NO: 5220
  oligonucleotide probe

SEQ ID NO: 8731 - DNA, 32 bp, Artificial; identical to SEQ ID NO: 8287
  oligonucleotide probe

SEQ ID NO: 8732 - DNA, 32 bp, Artificial; identical to SEQ ID NO: 8291
  oligonucleotide probe

SEQ ID NO: 8733 - DNA, 32 bp, Artificial; identical to SEQ ID NO: 8394
  oligonucleotide probe

SEQ ID NO: 8734 - DNA, 32 bp, Artificial; identical to SEQ ID NO: 8268
  oligonucleotide probe

SEQ ID NO: 8735 - DNA, 32 bp, Artificial; identical to SEQ ID NO: 8269
  oligonucleotide probe

SEQ ID NO: 8736 - DNA, 32 bp, Artificial; identical to SEQ ID NO: 7783
  oligonucleotide probe

SEQ ID NO: 8737 - DNA, 32 bp, Artificial; identical to SEQ ID NO: 7812
  oligonucleotide probe

SEQ ID NO: 8738 - DNA, 32 bp, Artificial; identical to SEQ ID NO: 8305
  oligonucleotide probe

SEQ ID NO: 8739 - DNA, 32 bp, Artificial; identical to SEQ ID NO: 5242
  oligonucleotide probe

SEQ ID NO: 8740 - DNA, 32 bp, Artificial; identical to SEQ ID NO: 7863
  oligonucleotide probe

SEQ ID NO: 8741 - DNA, 32 bp, Artificial; identical to SEQ ID NO: 7833
  oligonucleotide probe

SEQ ID NO: 8742 - DNA, 32 bp, Artificial; identical to SEQ ID NO: 7596
  oligonucleotide probe

SEQ ID NO: 8743 - DNA, 32 bp, Artificial; identical to SEQ ID NO: 5140
  oligonucleotide probe

SEQ ID NO: 8744 - DNA, 32 bp, Artificial; identical to SEQ ID NO: 8509
  oligonucleotide probe

SEQ ID NO: 8745 - DNA, 32 bp, Artificial
  oligonucleotide probe
ggctgcacggtcccgtttcgccgtttgcgctg

SEQ ID NO: 8746 - DNA, 32 bp, Artificial; identical to SEQ ID NO: 8309
  oligonucleotide probe

SEQ ID NO: 8747 - DNA, 32 bp, Artificial; identical to SEQ ID NO: 7840
  oligonucleotide probe

SEQ ID NO: 8748 - DNA, 32 bp, Artificial
  oligonucleotide probe
ccgtttcggctgggctgcaccgcagctgcgtg

SEQ ID NO: 8749 - DNA, 32 bp, Artificial
  oligonucleotide probe
ccgtttcggctgggctgcacgggaaagcggct

SEQ ID NO: 8750 - DNA, 32 bp, Artificial
  oligonucleotide probe
ttcgccgtttgcgctggcaccgcagctgcgtg

SEQ ID NO: 8751 - DNA, 32 bp, Artificial
  oligonucleotide probe
ttcgccgtttgcgctggcacgggaaagcggct

SEQ ID NO: 8752 - DNA, 32 bp, Artificial; identical to SEQ ID NO: 5547
  oligonucleotide probe

SEQ ID NO: 8753 - DNA, 32 bp, Artificial
  oligonucleotide probe
ttgcatggcgtggggagcaccgcagctgcgtg

SEQ ID NO: 8754 - DNA, 32 bp, Artificial; identical to SEQ ID NO: 5547
  oligonucleotide probe

SEQ ID NO: 8755 - DNA, 32 bp, Artificial; identical to SEQ ID NO: 8753
  oligonucleotide probe

SEQ ID NO: 8756 - DNA, 32 bp, Artificial; identical to SEQ ID NO: 5546
  oligonucleotide probe

SEQ ID NO: 8757 - DNA, 32 bp, Artificial
  oligonucleotide probe
gggattcgcgcaaacggcaccgcagctgcgtg

SEQ ID NO: 8758 - DNA, 32 bp, Artificial; identical to SEQ ID NO: 5546
  oligonucleotide probe

SEQ ID NO: 8759 - DNA, 32 bp, Artificial; identical to SEQ ID NO: 8757
  oligonucleotide probe

SEQ ID NO: 8760 - DNA, 32 bp, Artificial
  oligonucleotide probe
ttgcatggcgtggggagcacgggaaagcggct

SEQ ID NO: 8761 - DNA, 32 bp, Artificial; identical to SEQ ID NO: 5537
  oligonucleotide probe

SEQ ID NO: 8762 - DNA, 32 bp, Artificial
  oligonucleotide probe
aacgcgatttgccgcagcaccgcagctgcgtg

SEQ ID NO: 8763 - DNA, 32 bp, Artificial; identical to SEQ ID NO: 5539
  oligonucleotide probe

SEQ ID NO: 8764 - DNA, 32 bp, Artificial; identical to SEQ ID NO: 8750
  oligonucleotide probe

SEQ ID NO: 8765 - DNA, 32 bp, Artificial; identical to SEQ ID NO: 8751
  oligonucleotide probe

SEQ ID NO: 8766 - DNA, 32 bp, Artificial
  oligonucleotide probe
atggcgcagcacgctggcaccgcagctgcgtg

SEQ ID NO: 8767 - DNA, 32 bp, Artificial
  oligonucleotide probe
atggcgcagcacgctggcacgggaaagcggct

SEQ ID NO: 8768 - DNA, 32 bp, Artificial; identical to SEQ ID NO: 5546
  oligonucleotide probe

SEQ ID NO: 8769 - DNA, 32 bp, Artificial; identical to SEQ ID NO: 8757
  oligonucleotide probe

SEQ ID NO: 8770 - DNA, 32 bp, Artificial; identical to SEQ ID NO: 8760
  oligonucleotide probe

SEQ ID NO: 8771 - DNA, 32 bp, Artificial; identical to SEQ ID NO: 5537
  oligonucleotide probe

SEQ ID NO: 8772 - DNA, 32 bp, Artificial; identical to SEQ ID NO: 8753
  oligonucleotide probe

SEQ ID NO: 8773 - DNA, 32 bp, Artificial; identical to SEQ ID NO: 8760
  oligonucleotide probe

SEQ ID NO: 8774 - DNA, 32 bp, Artificial; identical to SEQ ID NO: 8760
  oligonucleotide probe

SEQ ID NO: 8775 - DNA, 32 bp, Artificial; identical to SEQ ID NO: 5537
  oligonucleotide probe

SEQ ID NO: 8776 - DNA, 32 bp, Artificial
  oligonucleotide probe
ttcgccgtttgcgctggggattcgcgcaaacg

SEQ ID NO: 8777 - DNA, 32 bp, Artificial
  oligonucleotide probe
ttcgccgtttgcgctgttgcatggcgtgggga

SEQ ID NO: 8778 - DNA, 32 bp, Artificial
  oligonucleotide probe
ccgtcgcaaagcgcacgggattcgcgcaaacg

SEQ ID NO: 8779 - DNA, 32 bp, Artificial; identical to SEQ ID NO: 5564
  oligonucleotide probe

SEQ ID NO: 8780 - DNA, 32 bp, Artificial
  oligonucleotide probe
ggctgcacggtcccgtgggattcgcgcaaacg

SEQ ID NO: 8781 - DNA, 32 bp, Artificial
  oligonucleotide probe
ggctgcacggtcccgtttgcatggcgtgggga

SEQ ID NO: 8782 - DNA, 32 bp, Artificial; identical to SEQ ID NO: 8778
  oligonucleotide probe

SEQ ID NO: 8783 - DNA, 32 bp, Artificial; identical to SEQ ID NO: 5564
  oligonucleotide probe

SEQ ID NO: 8784 - DNA, 32 bp, Artificial
  oligonucleotide probe
ggctgcacggtcccgtgcaccgcagctgcgtg

SEQ ID NO: 8785 - DNA, 32 bp, Artificial
  oligonucleotide probe
ggctgcacggtcccgtgcacgggaaagcggct

SEQ ID NO: 8786 - DNA, 32 bp, Artificial
  oligonucleotide probe
ttcggggaaacgccgtgcaccgcagctgcgtg

SEQ ID NO: 8787 - DNA, 32 bp, Artificial; identical to SEQ ID NO: 5585
  oligonucleotide probe

SEQ ID NO: 8788 - DNA, 32 bp, Artificial; identical to SEQ ID NO: 5547
  oligonucleotide probe

SEQ ID NO: 8789 - DNA, 32 bp, Artificial; identical to SEQ ID NO: 8753
  oligonucleotide probe

SEQ ID NO: 8790 - DNA, 32 bp, Artificial; identical to SEQ ID NO: 5547
  oligonucleotide probe

SEQ ID NO: 8791 - DNA, 32 bp, Artificial; identical to SEQ ID NO: 8753
  oligonucleotide probe

SEQ ID NO: 8792 - DNA, 32 bp, Artificial; identical to SEQ ID NO: 8778
  oligonucleotide probe

SEQ ID NO: 8793 - DNA, 32 bp, Artificial; identical to SEQ ID NO: 5564
  oligonucleotide probe

SEQ ID NO: 8794 - DNA, 32 bp, Artificial; identical to SEQ ID NO: 8780
  oligonucleotide probe

SEQ ID NO: 8795 - DNA, 32 bp, Artificial; identical to SEQ ID NO: 8781
  oligonucleotide probe

SEQ ID NO: 8796 - DNA, 32 bp, Artificial
  oligonucleotide probe
aacgcgatttgccgcagggattcgcgcaaacg

SEQ ID NO: 8797 - DNA, 32 bp, Artificial; identical to SEQ ID NO: 5538
  oligonucleotide probe

SEQ ID NO: 8798 - DNA, 32 bp, Artificial; identical to SEQ ID NO: 8760
  oligonucleotide probe

SEQ ID NO: 8799 - DNA, 32 bp, Artificial; identical to SEQ ID NO: 5537
  oligonucleotide probe

SEQ ID NO: 8800 - DNA, 32 bp, Artificial; identical to SEQ ID NO: 8762
  oligonucleotide probe

SEQ ID NO: 8801 - DNA, 32 bp, Artificial; identical to SEQ ID NO: 5539
  oligonucleotide probe

SEQ ID NO: 8802 - DNA, 32 bp, Artificial; identical to SEQ ID NO: 8778
  oligonucleotide probe

SEQ ID NO: 8803 - DNA, 32 bp, Artificial; identical to SEQ ID NO: 5564
  oligonucleotide probe

SEQ ID NO: 8804 - DNA, 32 bp, Artificial
  oligonucleotide probe
ccgtcgcaaagcgcacgcaccgcagctgcgtg

SEQ ID NO: 8805 - DNA, 32 bp, Artificial; identical to SEQ ID NO: 5565
  oligonucleotide probe

SEQ ID NO: 8806 - DNA, 32 bp, Artificial; identical to SEQ ID NO: 8762
  oligonucleotide probe

SEQ ID NO: 8807 - DNA, 32 bp, Artificial; identical to SEQ ID NO: 5539
  oligonucleotide probe

SEQ ID NO: 8808 - DNA, 32 bp, Artificial; identical to SEQ ID NO: 8778
  oligonucleotide probe

SEQ ID NO: 8809 - DNA, 32 bp, Artificial; identical to SEQ ID NO: 5564
  oligonucleotide probe

SEQ ID NO: 8810 - DNA, 32 bp, Artificial; identical to SEQ ID NO: 8780
  oligonucleotide probe

SEQ ID NO: 8811 - DNA, 32 bp, Artificial; identical to SEQ ID NO: 8781
  oligonucleotide probe

SEQ ID NO: 8812 - DNA, 32 bp, Artificial; identical to SEQ ID NO: 8778
  oligonucleotide probe

SEQ ID NO: 8813 - DNA, 32 bp, Artificial; identical to SEQ ID NO: 5564
  oligonucleotide probe

SEQ ID NO: 8814 - DNA, 32 bp, Artificial; identical to SEQ ID NO: 5547
  oligonucleotide probe

SEQ ID NO: 8815 - DNA, 32 bp, Artificial; identical to SEQ ID NO: 8753
  oligonucleotide probe

SEQ ID NO: 8816 - DNA, 32 bp, Artificial; identical to SEQ ID NO: 8778
  oligonucleotide probe

SEQ ID NO: 8817 - DNA, 32 bp, Artificial; identical to SEQ ID NO: 5564
  oligonucleotide probe

SEQ ID NO: 8818 - DNA, 32 bp, Artificial; identical to SEQ ID NO: 8780
  oligonucleotide probe

SEQ ID NO: 8819 - DNA, 32 bp, Artificial; identical to SEQ ID NO: 8781
  oligonucleotide probe

SEQ ID NO: 8820 - DNA, 32 bp, Artificial; identical to SEQ ID NO: 8778
  oligonucleotide probe

SEQ ID NO: 8821 - DNA, 32 bp, Artificial; identical to SEQ ID NO: 5564
  oligonucleotide probe

SEQ ID NO: 8822 - DNA, 32 bp, Artificial; identical to SEQ ID NO: 8778
  oligonucleotide probe

SEQ ID NO: 8823 - DNA, 32 bp, Artificial; identical to SEQ ID NO: 5564
  oligonucleotide probe

SEQ ID NO: 8824 - DNA, 32 bp, Artificial; identical to SEQ ID NO: 8760
  oligonucleotide probe

SEQ ID NO: 8825 - DNA, 32 bp, Artificial; identical to SEQ ID NO: 5537
  oligonucleotide probe

SEQ ID NO: 8826 - DNA, 32 bp, Artificial; identical to SEQ ID NO: 8760
  oligonucleotide probe

SEQ ID NO: 8827 - DNA, 32 bp, Artificial; identical to SEQ ID NO: 5537
  oligonucleotide probe

SEQ ID NO: 8828 - DNA, 32 bp, Artificial; identical to SEQ ID NO: 8780
  oligonucleotide probe

SEQ ID NO: 8829 - DNA, 32 bp, Artificial; identical to SEQ ID NO: 8781
  oligonucleotide probe

SEQ ID NO: 8830 - DNA, 32 bp, Artificial; identical to SEQ ID NO: 8804
  oligonucleotide probe

SEQ ID NO: 8831 - DNA, 32 bp, Artificial; identical to SEQ ID NO: 5565
  oligonucleotide probe

SEQ ID NO: 8832 - DNA, 32 bp, Artificial; identical to SEQ ID NO: 8804
  oligonucleotide probe

SEQ ID NO: 8833 - DNA, 32 bp, Artificial; identical to SEQ ID NO: 5565
  oligonucleotide probe

SEQ ID NO: 8834 - DNA, 32 bp, Artificial
  oligonucleotide probe
atggcgcagcacgctggggattcgcgcaaacg

SEQ ID NO: 8835 - DNA, 32 bp, Artificial
  oligonucleotide probe
atggcgcagcacgctgttgcatggcgtgggga

SEQ ID NO: 8836 - DNA, 32 bp, Artificial; identical to SEQ ID NO: 8750
  oligonucleotide probe

SEQ ID NO: 8837 - DNA, 32 bp, Artificial; identical to SEQ ID NO: 8751
  oligonucleotide probe

SEQ ID NO: 8838 - DNA, 32 bp, Artificial; identical to SEQ ID NO: 5547
  oligonucleotide probe

SEQ ID NO: 8839 - DNA, 32 bp, Artificial; identical to SEQ ID NO: 8753
  oligonucleotide probe

SEQ ID NO: 8840 - DNA, 32 bp, Artificial; identical to SEQ ID NO: 5547
  oligonucleotide probe

SEQ ID NO: 8841 - DNA, 32 bp, Artificial; identical to SEQ ID NO: 8753
  oligonucleotide probe

SEQ ID NO: 8842 - DNA, 32 bp, Artificial; identical to SEQ ID NO: 8748
  oligonucleotide probe

SEQ ID NO: 8843 - DNA, 32 bp, Artificial; identical to SEQ ID NO: 8749
  oligonucleotide probe

SEQ ID NO: 8844 - DNA, 32 bp, Artificial; identical to SEQ ID NO: 8784
  oligonucleotide probe

SEQ ID NO: 8845 - DNA, 32 bp, Artificial; identical to SEQ ID NO: 8785
  oligonucleotide probe

SEQ ID NO: 8846 - DNA, 32 bp, Artificial; identical to SEQ ID NO: 8780
  oligonucleotide probe

SEQ ID NO: 8847 - DNA, 32 bp, Artificial; identical to SEQ ID NO: 8781
  oligonucleotide probe

SEQ ID NO: 8848 - DNA, 32 bp, Artificial; identical to SEQ ID NO: 8784
  oligonucleotide probe

SEQ ID NO: 8849 - DNA, 32 bp, Artificial; identical to SEQ ID NO: 8785
  oligonucleotide probe

SEQ ID NO: 8850 - DNA, 32 bp, Artificial; identical to SEQ ID NO: 8760
  oligonucleotide probe

SEQ ID NO: 8851 - DNA, 32 bp, Artificial; identical to SEQ ID NO: 5537
  oligonucleotide probe

SEQ ID NO: 8852 - DNA, 32 bp, Artificial; identical to SEQ ID NO: 8784
  oligonucleotide probe

SEQ ID NO: 8853 - DNA, 32 bp, Artificial; identical to SEQ ID NO: 8785
  oligonucleotide probe

SEQ ID NO: 8854 - DNA, 32 bp, Artificial; identical to SEQ ID NO: 5547
  oligonucleotide probe

SEQ ID NO: 8855 - DNA, 32 bp, Artificial; identical to SEQ ID NO: 8753
  oligonucleotide probe

SEQ ID NO: 8856 - DNA, 32 bp, Artificial; identical to SEQ ID NO: 8750
  oligonucleotide probe

SEQ ID NO: 8857 - DNA, 32 bp, Artificial; identical to SEQ ID NO: 8751
  oligonucleotide probe

SEQ ID NO: 8858 - DNA, 32 bp, Artificial; identical to SEQ ID NO: 8778
  oligonucleotide probe

SEQ ID NO: 8859 - DNA, 32 bp, Artificial; identical to SEQ ID NO: 5564
  oligonucleotide probe

SEQ ID NO: 8860 - DNA, 32 bp, Artificial; identical to SEQ ID NO: 8750
  oligonucleotide probe

SEQ ID NO: 8861 - DNA, 32 bp, Artificial; identical to SEQ ID NO: 8751
  oligonucleotide probe

SEQ ID NO: 8862 - DNA, 32 bp, Artificial; identical to SEQ ID NO: 5547
  oligonucleotide probe

SEQ ID NO: 8863 - DNA, 32 bp, Artificial; identical to SEQ ID NO: 8753
  oligonucleotide probe

SEQ ID NO: 8864 - DNA, 32 bp, Artificial; identical to SEQ ID NO: 8760
  oligonucleotide probe

SEQ ID NO: 8865 - DNA, 32 bp, Artificial; identical to SEQ ID NO: 5537
  oligonucleotide probe

SEQ ID NO: 8866 - DNA, 32 bp, Artificial; identical to SEQ ID NO: 5547
  oligonucleotide probe

SEQ ID NO: 8867 - DNA, 32 bp, Artificial; identical to SEQ ID NO: 8753
  oligonucleotide probe

SEQ ID NO: 8868 - DNA, 32 bp, Artificial
  oligonucleotide probe
ttcggggaaacgccgtgggattcgcgcaaacg

SEQ ID NO: 8869 - DNA, 32 bp, Artificial; identical to SEQ ID NO: 5584
  oligonucleotide probe

SEQ ID NO: 8870 - DNA, 32 bp, Artificial; identical to SEQ ID NO: 8796
  oligonucleotide probe

SEQ ID NO: 8871 - DNA, 32 bp, Artificial; identical to SEQ ID NO: 5538
  oligonucleotide probe

SEQ ID NO: 8872 - DNA, 32 bp, Artificial; identical to SEQ ID NO: 5547
  oligonucleotide probe

SEQ ID NO: 8873 - DNA, 32 bp, Artificial; identical to SEQ ID NO: 8753
  oligonucleotide probe

SEQ ID NO: 8874 - DNA, 32 bp, Artificial; identical to SEQ ID NO: 8778
  oligonucleotide probe

SEQ ID NO: 8875 - DNA, 32 bp, Artificial; identical to SEQ ID NO: 5564
  oligonucleotide probe

SEQ ID NO: 8876 - DNA, 32 bp, Artificial; identical to SEQ ID NO: 8780
  oligonucleotide probe

SEQ ID NO: 8877 - DNA, 32 bp, Artificial; identical to SEQ ID NO: 8781
  oligonucleotide probe

SEQ ID NO: 8878 - DNA, 32 bp, Artificial; identical to SEQ ID NO: 8778
  oligonucleotide probe

SEQ ID NO: 8879 - DNA, 32 bp, Artificial; identical to SEQ ID NO: 5564
  oligonucleotide probe

SEQ ID NO: 8880 - DNA, 32 bp, Artificial; identical to SEQ ID NO: 8834
  oligonucleotide probe

SEQ ID NO: 8881 - DNA, 32 bp, Artificial; identical to SEQ ID NO: 8835
  oligonucleotide probe

SEQ ID NO: 8882 - DNA, 32 bp, Artificial; identical to SEQ ID NO: 8868
  oligonucleotide probe

SEQ ID NO: 8883 - DNA, 32 bp, Artificial; identical to SEQ ID NO: 5584
  oligonucleotide probe

SEQ ID NO: 8884 - DNA, 32 bp, Artificial; identical to SEQ ID NO: 8750
  oligonucleotide probe

SEQ ID NO: 8885 - DNA, 32 bp, Artificial; identical to SEQ ID NO: 8751
  oligonucleotide probe

SEQ ID NO: 8886 - DNA, 32 bp, Artificial; identical to SEQ ID NO: 8784
  oligonucleotide probe

SEQ ID NO: 8887 - DNA, 32 bp, Artificial; identical to SEQ ID NO: 8785
  oligonucleotide probe

SEQ ID NO: 8888 - DNA, 32 bp, Artificial; identical to SEQ ID NO: 8748
  oligonucleotide probe

SEQ ID NO: 8889 - DNA, 32 bp, Artificial; identical to SEQ ID NO: 8749
  oligonucleotide probe

SEQ ID NO: 8890 - DNA, 32 bp, Artificial; identical to SEQ ID NO: 8804
  oligonucleotide probe

SEQ ID NO: 8891 - DNA, 32 bp, Artificial; identical to SEQ ID NO: 5565
  oligonucleotide probe

SEQ ID NO: 8892 - DNA, 32 bp, Artificial; identical to SEQ ID NO: 8778
  oligonucleotide probe

SEQ ID NO: 8893 - DNA, 32 bp, Artificial; identical to SEQ ID NO: 5564
  oligonucleotide probe

SEQ ID NO: 8894 - DNA, 32 bp, Artificial; identical to SEQ ID NO: 5547
  oligonucleotide probe

SEQ ID NO: 8895 - DNA, 32 bp, Artificial; identical to SEQ ID NO: 8753
  oligonucleotide probe

SEQ ID NO: 8896 - DNA, 32 bp, Artificial; identical to SEQ ID NO: 8780
  oligonucleotide probe

SEQ ID NO: 8897 - DNA, 32 bp, Artificial; identical to SEQ ID NO: 8781
  oligonucleotide probe

SEQ ID NO: 8898 - DNA, 32 bp, Artificial; identical to SEQ ID NO: 8784
  oligonucleotide probe

SEQ ID NO: 8899 - DNA, 32 bp, Artificial; identical to SEQ ID NO: 8785
  oligonucleotide probe

SEQ ID NO: 8900 - DNA, 32 bp, Artificial; identical to SEQ ID NO: 8868
  oligonucleotide probe

SEQ ID NO: 8901 - DNA, 32 bp, Artificial; identical to SEQ ID NO: 5584
  oligonucleotide probe

SEQ ID NO: 8902 - DNA, 32 bp, Artificial; identical to SEQ ID NO: 8766
  oligonucleotide probe

SEQ ID NO: 8903 - DNA, 32 bp, Artificial; identical to SEQ ID NO: 8767
  oligonucleotide probe

SEQ ID NO: 8904 - DNA, 32 bp, Artificial; identical to SEQ ID NO: 8796
  oligonucleotide probe

SEQ ID NO: 8905 - DNA, 32 bp, Artificial; identical to SEQ ID NO: 5538
  oligonucleotide probe

SEQ ID NO: 8906 - DNA, 32 bp, Artificial; identical to SEQ ID NO: 5547
  oligonucleotide probe

SEQ ID NO: 8907 - DNA, 32 bp, Artificial; identical to SEQ ID NO: 8753
  oligonucleotide probe

SEQ ID NO: 8908 - DNA, 32 bp, Artificial; identical to SEQ ID NO: 5547
  oligonucleotide probe

SEQ ID NO: 8909 - DNA, 32 bp, Artificial; identical to SEQ ID NO: 8753
  oligonucleotide probe

SEQ ID NO: 8910 - DNA, 32 bp, Artificial; identical to SEQ ID NO: 8760
  oligonucleotide probe

SEQ ID NO: 8911 - DNA, 32 bp, Artificial; identical to SEQ ID NO: 5537
  oligonucleotide probe

SEQ ID NO: 8912 - DNA, 32 bp, Artificial; identical to SEQ ID NO: 8778
  oligonucleotide probe

SEQ ID NO: 8913 - DNA, 32 bp, Artificial; identical to SEQ ID NO: 5564
  oligonucleotide probe

SEQ ID NO: 8914 - DNA, 32 bp, Artificial; identical to SEQ ID NO: 8750
  oligonucleotide probe

SEQ ID NO: 8915 - DNA, 32 bp, Artificial; identical to SEQ ID NO: 8751
  oligonucleotide probe

SEQ ID NO: 8916 - DNA, 32 bp, Artificial; identical to SEQ ID NO: 8750
  oligonucleotide probe

SEQ ID NO: 8917 - DNA, 32 bp, Artificial; identical to SEQ ID NO: 8751
  oligonucleotide probe

SEQ ID NO: 8918 - DNA, 32 bp, Artificial; identical to SEQ ID NO: 5546
  oligonucleotide probe

SEQ ID NO: 8919 - DNA, 32 bp, Artificial; identical to SEQ ID NO: 8757
  oligonucleotide probe

SEQ ID NO: 8920 - DNA, 32 bp, Artificial; identical to SEQ ID NO: 5547
  oligonucleotide probe

SEQ ID NO: 8921 - DNA, 32 bp, Artificial; identical to SEQ ID NO: 8753
  oligonucleotide probe

SEQ ID NO: 8922 - DNA, 32 bp, Artificial; identical to SEQ ID NO: 8760
  oligonucleotide probe

SEQ ID NO: 8923 - DNA, 32 bp, Artificial; identical to SEQ ID NO: 5537
  oligonucleotide probe

SEQ ID NO: 8924 - DNA, 32 bp, Artificial; identical to SEQ ID NO: 8762
  oligonucleotide probe

SEQ ID NO: 8925 - DNA, 32 bp, Artificial; identical to SEQ ID NO: 5539
  oligonucleotide probe

SEQ ID NO: 8926 - DNA, 32 bp, Artificial; identical to SEQ ID NO: 8760
  oligonucleotide probe

SEQ ID NO: 8927 - DNA, 32 bp, Artificial; identical to SEQ ID NO: 5537
  oligonucleotide probe

SEQ ID NO: 8928 - DNA, 32 bp, Artificial; identical to SEQ ID NO: 8762
  oligonucleotide probe

SEQ ID NO: 8929 - DNA, 32 bp, Artificial; identical to SEQ ID NO: 5539
  oligonucleotide probe

SEQ ID NO: 8930 - DNA, 32 bp, Artificial; identical to SEQ ID NO: 8804
  oligonucleotide probe

SEQ ID NO: 8931 - DNA, 32 bp, Artificial; identical to SEQ ID NO: 5565
  oligonucleotide probe

SEQ ID NO: 8932 - DNA, 32 bp, Artificial; identical to SEQ ID NO: 8760
  oligonucleotide probe

SEQ ID NO: 8933 - DNA, 32 bp, Artificial; identical to SEQ ID NO: 5537
  oligonucleotide probe

SEQ ID NO: 8934 - DNA, 32 bp, Artificial; identical to SEQ ID NO: 8760
  oligonucleotide probe

SEQ ID NO: 8935 - DNA, 32 bp, Artificial; identical to SEQ ID NO: 5537
  oligonucleotide probe

SEQ ID NO: 8936 - DNA, 32 bp, Artificial
  oligonucleotide probe
ggctttgcgcaccgtggcaccgcagctgcgtg

SEQ ID NO: 8937 - DNA, 32 bp, Artificial; identical to SEQ ID NO: 5595
  oligonucleotide probe

SEQ ID NO: 8938 - DNA, 32 bp, Artificial; identical to SEQ ID NO: 8760
  oligonucleotide probe

SEQ ID NO: 8939 - DNA, 32 bp, Artificial; identical to SEQ ID NO: 5537
  oligonucleotide probe

SEQ ID NO: 8940 - DNA, 32 bp, Artificial; identical to SEQ ID NO: 8780
  oligonucleotide probe

SEQ ID NO: 8941 - DNA, 32 bp, Artificial; identical to SEQ ID NO: 8781
  oligonucleotide probe

SEQ ID NO: 8942 - DNA, 32 bp, Artificial; identical to SEQ ID NO: 8778
  oligonucleotide probe

SEQ ID NO: 8943 - DNA, 32 bp, Artificial; identical to SEQ ID NO: 5564
  oligonucleotide probe

SEQ ID NO: 8944 - DNA, 32 bp, Artificial; identical to SEQ ID NO: 8776
  oligonucleotide probe

SEQ ID NO: 8945 - DNA, 32 bp, Artificial; identical to SEQ ID NO: 8777
  oligonucleotide probe

SEQ ID NO: 8946 - DNA, 32 bp, Artificial; identical to SEQ ID NO: 5546
  oligonucleotide probe

SEQ ID NO: 8947 - DNA, 32 bp, Artificial; identical to SEQ ID NO: 8757
  oligonucleotide probe

SEQ ID NO: 8948 - DNA, 32 bp, Artificial; identical to SEQ ID NO: 5546
  oligonucleotide probe

SEQ ID NO: 8949 - DNA, 32 bp, Artificial; identical to SEQ ID NO: 8757
  oligonucleotide probe

SEQ ID NO: 8950 - DNA, 32 bp, Artificial; identical to SEQ ID NO: 8868
  oligonucleotide probe

SEQ ID NO: 8951 - DNA, 32 bp, Artificial; identical to SEQ ID NO: 5584
  oligonucleotide probe

SEQ ID NO: 8952 - DNA, 32 bp, Artificial; identical to SEQ ID NO: 8750
  oligonucleotide probe

SEQ ID NO: 8953 - DNA, 32 bp, Artificial; identical to SEQ ID NO: 8751
  oligonucleotide probe

SEQ ID NO: 8954 - DNA, 32 bp, Artificial; identical to SEQ ID NO: 5547
  oligonucleotide probe

SEQ ID NO: 8955 - DNA, 32 bp, Artificial; identical to SEQ ID NO: 8753
  oligonucleotide probe

SEQ ID NO: 8956 - DNA, 32 bp, Artificial; identical to SEQ ID NO: 8786
  oligonucleotide probe

SEQ ID NO: 8957 - DNA, 32 bp, Artificial; identical to SEQ ID NO: 5585
  oligonucleotide probe

SEQ ID NO: 8958 - DNA, 32 bp, Artificial; identical to SEQ ID NO: 5547
  oligonucleotide probe

SEQ ID NO: 8959 - DNA, 32 bp, Artificial; identical to SEQ ID NO: 8753
  oligonucleotide probe

SEQ ID NO: 8960 - DNA, 32 bp, Artificial; identical to SEQ ID NO: 8868
  oligonucleotide probe

SEQ ID NO: 8961 - DNA, 32 bp, Artificial; identical to SEQ ID NO: 5584
  oligonucleotide probe

SEQ ID NO: 8962 - DNA, 32 bp, Artificial; identical to SEQ ID NO: 8784
  oligonucleotide probe

SEQ ID NO: 8963 - DNA, 32 bp, Artificial; identical to SEQ ID NO: 8785
  oligonucleotide probe

SEQ ID NO: 8964 - DNA, 32 bp, Artificial; identical to SEQ ID NO: 8762
  oligonucleotide probe

SEQ ID NO: 8965 - DNA, 32 bp, Artificial; identical to SEQ ID NO: 5539
  oligonucleotide probe

SEQ ID NO: 8966 - DNA, 32 bp, Artificial; identical to SEQ ID NO: 8750
  oligonucleotide probe

SEQ ID NO: 8967 - DNA, 32 bp, Artificial; identical to SEQ ID NO: 8751
  oligonucleotide probe

SEQ ID NO: 8968 - DNA, 32 bp, Artificial; identical to SEQ ID NO: 5547
  oligonucleotide probe

SEQ ID NO: 8969 - DNA, 32 bp, Artificial; identical to SEQ ID NO: 8753
  oligonucleotide probe

SEQ ID NO: 8970 - DNA, 32 bp, Artificial; identical to SEQ ID NO: 8766
  oligonucleotide probe

SEQ ID NO: 8971 - DNA, 32 bp, Artificial; identical to SEQ ID NO: 8767
  oligonucleotide probe

SEQ ID NO: 8972 - DNA, 32 bp, Artificial; identical to SEQ ID NO: 8760
  oligonucleotide probe

SEQ ID NO: 8973 - DNA, 32 bp, Artificial; identical to SEQ ID NO: 5537
  oligonucleotide probe

SEQ ID NO: 8974 - DNA, 32 bp, Artificial; identical to SEQ ID NO: 5547
  oligonucleotide probe

SEQ ID NO: 8975 - DNA, 32 bp, Artificial; identical to SEQ ID NO: 8753
  oligonucleotide probe

SEQ ID NO: 8976 - DNA, 32 bp, Artificial; identical to SEQ ID NO: 8786
  oligonucleotide probe

SEQ ID NO: 8977 - DNA, 32 bp, Artificial; identical to SEQ ID NO: 5585
  oligonucleotide probe

SEQ ID NO: 8978 - DNA, 32 bp, Artificial; identical to SEQ ID NO: 8784
  oligonucleotide probe

SEQ ID NO: 8979 - DNA, 32 bp, Artificial; identical to SEQ ID NO: 8785
  oligonucleotide probe

SEQ ID NO: 8980 - DNA, 32 bp, Artificial; identical to SEQ ID NO: 8780
  oligonucleotide probe

SEQ ID NO: 8981 - DNA, 32 bp, Artificial; identical to SEQ ID NO: 8781
  oligonucleotide probe

SEQ ID NO: 8982 - DNA, 32 bp, Artificial; identical to SEQ ID NO: 8762
  oligonucleotide probe

SEQ ID NO: 8983 - DNA, 32 bp, Artificial; identical to SEQ ID NO: 5539
  oligonucleotide probe

SEQ ID NO: 8984 - DNA, 32 bp, Artificial; identical to SEQ ID NO: 8776
  oligonucleotide probe

SEQ ID NO: 8985 - DNA, 32 bp, Artificial; identical to SEQ ID NO: 8777
  oligonucleotide probe

SEQ ID NO: 8986 - DNA, 32 bp, Artificial; identical to SEQ ID NO: 8748
  oligonucleotide probe

SEQ ID NO: 8987 - DNA, 32 bp, Artificial; identical to SEQ ID NO: 8749
  oligonucleotide probe

SEQ ID NO: 8988 - DNA, 32 bp, Artificial; identical to SEQ ID NO: 8780
  oligonucleotide probe

SEQ ID NO: 8989 - DNA, 32 bp, Artificial; identical to SEQ ID NO: 8781
  oligonucleotide probe

SEQ ID NO: 8990 - DNA, 32 bp, Artificial; identical to SEQ ID NO: 8750
  oligonucleotide probe

SEQ ID NO: 8991 - DNA, 32 bp, Artificial; identical to SEQ ID NO: 8751
  oligonucleotide probe

SEQ ID NO: 8992 - DNA, 32 bp, Artificial; identical to SEQ ID NO: 8748
  oligonucleotide probe

SEQ ID NO: 8993 - DNA, 32 bp, Artificial; identical to SEQ ID NO: 8749
  oligonucleotide probe

SEQ ID NO: 8994 - DNA, 32 bp, Artificial; identical to SEQ ID NO: 8784
  oligonucleotide probe

SEQ ID NO: 8995 - DNA, 32 bp, Artificial; identical to SEQ ID NO: 8785
  oligonucleotide probe

SEQ ID NO: 8996 - DNA, 32 bp, Artificial; identical to SEQ ID NO: 8750
  oligonucleotide probe

SEQ ID NO: 8997 - DNA, 32 bp, Artificial; identical to SEQ ID NO: 8751
  oligonucleotide probe

SEQ ID NO: 8998 - DNA, 32 bp, Artificial; identical to SEQ ID NO: 8748
  oligonucleotide probe

SEQ ID NO: 8999 - DNA, 32 bp, Artificial; identical to SEQ ID NO: 8749
  oligonucleotide probe

SEQ ID NO: 9000 - DNA, 32 bp, Artificial; identical to SEQ ID NO: 8760
  oligonucleotide probe

SEQ ID NO: 9001 - DNA, 32 bp, Artificial; identical to SEQ ID NO: 5537
  oligonucleotide probe

SEQ ID NO: 9002 - DNA, 32 bp, Artificial; identical to SEQ ID NO: 8760
  oligonucleotide probe

SEQ ID NO: 9003 - DNA, 32 bp, Artificial; identical to SEQ ID NO: 5537
  oligonucleotide probe

SEQ ID NO: 9004 - DNA, 32 bp, Artificial; identical to SEQ ID NO: 8784
  oligonucleotide probe

SEQ ID NO: 9005 - DNA, 32 bp, Artificial; identical to SEQ ID NO: 8785
  oligonucleotide probe

SEQ ID NO: 9006 - DNA, 32 bp, Artificial; identical to SEQ ID NO: 5546
  oligonucleotide probe

SEQ ID NO: 9007 - DNA, 32 bp, Artificial; identical to SEQ ID NO: 8757
  oligonucleotide probe

SEQ ID NO: 9008 - DNA, 32 bp, Artificial; identical to SEQ ID NO: 8778
  oligonucleotide probe

SEQ ID NO: 9009 - DNA, 32 bp, Artificial; identical to SEQ ID NO: 5564
  oligonucleotide probe

SEQ ID NO: 9010 - DNA, 32 bp, Artificial; identical to SEQ ID NO: 8780
  oligonucleotide probe

SEQ ID NO: 9011 - DNA, 32 bp, Artificial; identical to SEQ ID NO: 8781
  oligonucleotide probe

SEQ ID NO: 9012 - DNA, 32 bp, Artificial; identical to SEQ ID NO: 8750
  oligonucleotide probe

SEQ ID NO: 9013 - DNA, 32 bp, Artificial; identical to SEQ ID NO: 8751
  oligonucleotide probe

SEQ ID NO: 9014 - DNA, 32 bp, Artificial; identical to SEQ ID NO: 8750
  oligonucleotide probe

SEQ ID NO: 9015 - DNA, 32 bp, Artificial; identical to SEQ ID NO: 8751
  oligonucleotide probe

SEQ ID NO: 9016 - DNA, 32 bp, Artificial; identical to SEQ ID NO: 5547
  oligonucleotide probe

SEQ ID NO: 9017 - DNA, 32 bp, Artificial; identical to SEQ ID NO: 8753
  oligonucleotide probe

SEQ ID NO: 9018 - DNA, 32 bp, Artificial; identical to SEQ ID NO: 8784
  oligonucleotide probe

SEQ ID NO: 9019 - DNA, 32 bp, Artificial; identical to SEQ ID NO: 8785
  oligonucleotide probe

SEQ ID NO: 9020 - DNA, 32 bp, Artificial
  oligonucleotide probe
ccgtttcggctgggctgggattcgcgcaaacg

SEQ ID NO: 9021 - DNA, 32 bp, Artificial
  oligonucleotide probe
ccgtttcggctgggctttgcatggcgtgggga

SEQ ID NO: 9022 - DNA, 32 bp, Artificial; identical to SEQ ID NO: 8796
  oligonucleotide probe

SEQ ID NO: 9023 - DNA, 32 bp, Artificial; identical to SEQ ID NO: 5538
  oligonucleotide probe

SEQ ID NO: 9024 - DNA, 32 bp, Artificial; identical to SEQ ID NO: 8786
  oligonucleotide probe

SEQ ID NO: 9025 - DNA, 32 bp, Artificial; identical to SEQ ID NO: 5585
  oligonucleotide probe

SEQ ID NO: 9026 - DNA, 32 bp, Artificial; identical to SEQ ID NO: 8780
  oligonucleotide probe

SEQ ID NO: 9027 - DNA, 32 bp, Artificial; identical to SEQ ID NO: 8781
  oligonucleotide probe

SEQ ID NO: 9028 - DNA, 32 bp, Artificial; identical to SEQ ID NO: 8780
  oligonucleotide probe

SEQ ID NO: 9029 - DNA, 32 bp, Artificial; identical to SEQ ID NO: 8781
  oligonucleotide probe

SEQ ID NO: 9030 - DNA, 32 bp, Artificial; identical to SEQ ID NO: 8750
  oligonucleotide probe

SEQ ID NO: 9031 - DNA, 32 bp, Artificial; identical to SEQ ID NO: 8751
  oligonucleotide probe

SEQ ID NO: 9032 - DNA, 32 bp, Artificial; identical to SEQ ID NO: 8784
  oligonucleotide probe

SEQ ID NO: 9033 - DNA, 32 bp, Artificial; identical to SEQ ID NO: 8785
  oligonucleotide probe

SEQ ID NO: 9034 - DNA, 32 bp, Artificial; identical to SEQ ID NO: 8804
  oligonucleotide probe

SEQ ID NO: 9035 - DNA, 32 bp, Artificial; identical to SEQ ID NO: 5565
  oligonucleotide probe

SEQ ID NO: 9036 - DNA, 32 bp, Artificial; identical to SEQ ID NO: 8804
  oligonucleotide probe

SEQ ID NO: 9037 - DNA, 32 bp, Artificial; identical to SEQ ID NO: 5565
  oligonucleotide probe

SEQ ID NO: 9038 - DNA, 32 bp, Artificial
  oligonucleotide probe
ggctttgcgcaccgtggggattcgcgcaaacg

SEQ ID NO: 9039 - DNA, 32 bp, Artificial; identical to SEQ ID NO: 5594
  oligonucleotide probe

SEQ ID NO: 9040 - DNA, 32 bp, Artificial; identical to SEQ ID NO: 8760
  oligonucleotide probe

SEQ ID NO: 9041 - DNA, 32 bp, Artificial; identical to SEQ ID NO: 5537
  oligonucleotide probe

SEQ ID NO: 9042 - DNA, 32 bp, Artificial; identical to SEQ ID NO: 8778
  oligonucleotide probe

SEQ ID NO: 9043 - DNA, 32 bp, Artificial; identical to SEQ ID NO: 5564
  oligonucleotide probe

SEQ ID NO: 9044 - DNA, 32 bp, Artificial; identical to SEQ ID NO: 8760
  oligonucleotide probe

SEQ ID NO: 9045 - DNA, 32 bp, Artificial; identical to SEQ ID NO: 5537
  oligonucleotide probe

SEQ ID NO: 9046 - DNA, 32 bp, Artificial; identical to SEQ ID NO: 8776
  oligonucleotide probe

SEQ ID NO: 9047 - DNA, 32 bp, Artificial; identical to SEQ ID NO: 8777
  oligonucleotide probe

SEQ ID NO: 9048 - DNA, 32 bp, Artificial; identical to SEQ ID NO: 8776
  oligonucleotide probe

SEQ ID NO: 9049 - DNA, 32 bp, Artificial; identical to SEQ ID NO: 8777
  oligonucleotide probe

SEQ ID NO: 9050 - DNA, 32 bp, Artificial; identical to SEQ ID NO: 8780
  oligonucleotide probe

SEQ ID NO: 9051 - DNA, 32 bp, Artificial; identical to SEQ ID NO: 8781
  oligonucleotide probe

SEQ ID NO: 9052 - DNA, 32 bp, Artificial; identical to SEQ ID NO: 8753
  oligonucleotide probe

SEQ ID NO: 9053 - DNA, 32 bp, Artificial; identical to SEQ ID NO: 8760
  oligonucleotide probe

SEQ ID NO: 9054 - DNA, 32 bp, Artificial; identical to SEQ ID NO: 8762
  oligonucleotide probe

SEQ ID NO: 9055 - DNA, 32 bp, Artificial; identical to SEQ ID NO: 5539
  oligonucleotide probe

SEQ ID NO: 9056 - DNA, 32 bp, Artificial; identical to SEQ ID NO: 8760
  oligonucleotide probe

SEQ ID NO: 9057 - DNA, 32 bp, Artificial; identical to SEQ ID NO: 5537
  oligonucleotide probe

SEQ ID NO: 9058 - DNA, 32 bp, Artificial; identical to SEQ ID NO: 8784
  oligonucleotide probe

SEQ ID NO: 9059 - DNA, 32 bp, Artificial; identical to SEQ ID NO: 8785
  oligonucleotide probe

SEQ ID NO: 9060 - DNA, 32 bp, Artificial; identical to SEQ ID NO: 8796
  oligonucleotide probe

SEQ ID NO: 9061 - DNA, 32 bp, Artificial; identical to SEQ ID NO: 5538
  oligonucleotide probe

SEQ ID NO: 9062 - DNA, 32 bp, Artificial; identical to SEQ ID NO: 8753
  oligonucleotide probe

SEQ ID NO: 9063 - DNA, 32 bp, Artificial; identical to SEQ ID NO: 8760
  oligonucleotide probe

SEQ ID NO: 9064 - DNA, 32 bp, Artificial; identical to SEQ ID NO: 8750
  oligonucleotide probe

SEQ ID NO: 9065 - DNA, 32 bp, Artificial; identical to SEQ ID NO: 8751
  oligonucleotide probe

SEQ ID NO: 9066 - DNA, 32 bp, Artificial; identical to SEQ ID NO: 8778
  oligonucleotide probe

SEQ ID NO: 9067 - DNA, 32 bp, Artificial; identical to SEQ ID NO: 5564
  oligonucleotide probe

SEQ ID NO: 9068 - DNA, 32 bp, Artificial; identical to SEQ ID NO: 8748
  oligonucleotide probe

SEQ ID NO: 9069 - DNA, 32 bp, Artificial; identical to SEQ ID NO: 8749
  oligonucleotide probe

SEQ ID NO: 9070 - DNA, 32 bp, Artificial; identical to SEQ ID NO: 8776
  oligonucleotide probe

SEQ ID NO: 9071 - DNA, 32 bp, Artificial; identical to SEQ ID NO: 8777
  oligonucleotide probe

SEQ ID NO: 9072 - DNA, 32 bp, Artificial; identical to SEQ ID NO: 8796
  oligonucleotide probe

SEQ ID NO: 9073 - DNA, 32 bp, Artificial; identical to SEQ ID NO: 5538
  oligonucleotide probe

SEQ ID NO: 9074 - DNA, 32 bp, Artificial; identical to SEQ ID NO: 9020
  oligonucleotide probe

SEQ ID NO: 9075 - DNA, 32 bp, Artificial; identical to SEQ ID NO: 9021
  oligonucleotide probe

SEQ ID NO: 9076 - DNA, 32 bp, Artificial; identical to SEQ ID NO: 8796
  oligonucleotide probe

SEQ ID NO: 9077 - DNA, 32 bp, Artificial; identical to SEQ ID NO: 5538
  oligonucleotide probe

SEQ ID NO: 9078 - DNA, 32 bp, Artificial; identical to SEQ ID NO: 5546
  oligonucleotide probe

SEQ ID NO: 9079 - DNA, 32 bp, Artificial; identical to SEQ ID NO: 8757
  oligonucleotide probe

SEQ ID NO: 9080 - DNA, 32 bp, Artificial; identical to SEQ ID NO: 8762
  oligonucleotide probe

SEQ ID NO: 9081 - DNA, 32 bp, Artificial; identical to SEQ ID NO: 5539
  oligonucleotide probe

SEQ ID NO: 9082 - DNA, 32 bp, Artificial; identical to SEQ ID NO: 5547
  oligonucleotide probe

SEQ ID NO: 9083 - DNA, 32 bp, Artificial; identical to SEQ ID NO: 8753
  oligonucleotide probe

SEQ ID NO: 9084 - DNA, 32 bp, Artificial; identical to SEQ ID NO: 8778
  oligonucleotide probe

SEQ ID NO: 9085 - DNA, 32 bp, Artificial; identical to SEQ ID NO: 5564
  oligonucleotide probe

SEQ ID NO: 9086 - DNA, 32 bp, Artificial; identical to SEQ ID NO: 8760
  oligonucleotide probe

SEQ ID NO: 9087 - DNA, 32 bp, Artificial; identical to SEQ ID NO: 5537
  oligonucleotide probe

SEQ ID NO: 9088 - DNA, 32 bp, Artificial; identical to SEQ ID NO: 5547
  oligonucleotide probe

SEQ ID NO: 9089 - DNA, 32 bp, Artificial; identical to SEQ ID NO: 8753
  oligonucleotide probe

SEQ ID NO: 9090 - DNA, 32 bp, Artificial; identical to SEQ ID NO: 5546
  oligonucleotide probe

SEQ ID NO: 9091 - DNA, 32 bp, Artificial; identical to SEQ ID NO: 8757
  oligonucleotide probe

SEQ ID NO: 9092 - DNA, 32 bp, Artificial; identical to SEQ ID NO: 8760
  oligonucleotide probe

SEQ ID NO: 9093 - DNA, 32 bp, Artificial; identical to SEQ ID NO: 5537
  oligonucleotide probe

SEQ ID NO: 9094 - DNA, 32 bp, Artificial; identical to SEQ ID NO: 8780
  oligonucleotide probe

SEQ ID NO: 9095 - DNA, 32 bp, Artificial; identical to SEQ ID NO: 8781
  oligonucleotide probe

SEQ ID NO: 9096 - DNA, 32 bp, Artificial; identical to SEQ ID NO: 9020
  oligonucleotide probe

SEQ ID NO: 9097 - DNA, 32 bp, Artificial; identical to SEQ ID NO: 9021
  oligonucleotide probe

SEQ ID NO: 9098 - DNA, 32 bp, Artificial; identical to SEQ ID NO: 8780
  oligonucleotide probe

SEQ ID NO: 9099 - DNA, 32 bp, Artificial; identical to SEQ ID NO: 8781
  oligonucleotide probe

SEQ ID NO: 9100 - DNA, 32 bp, Artificial; identical to SEQ ID NO: 5547
  oligonucleotide probe

SEQ ID NO: 9101 - DNA, 32 bp, Artificial; identical to SEQ ID NO: 8753
  oligonucleotide probe

SEQ ID NO: 9102 - DNA, 32 bp, Artificial; identical to SEQ ID NO: 8778
  oligonucleotide probe

SEQ ID NO: 9103 - DNA, 32 bp, Artificial; identical to SEQ ID NO: 5564
  oligonucleotide probe

SEQ ID NO: 9104 - DNA, 32 bp, Artificial; identical to SEQ ID NO: 8748
  oligonucleotide probe

SEQ ID NO: 9105 - DNA, 32 bp, Artificial; identical to SEQ ID NO: 8749
  oligonucleotide probe

SEQ ID NO: 9106 - DNA, 32 bp, Artificial; identical to SEQ ID NO: 9038
  oligonucleotide probe

SEQ ID NO: 9107 - DNA, 32 bp, Artificial; identical to SEQ ID NO: 5594
  oligonucleotide probe

SEQ ID NO: 9108 - DNA, 32 bp, Artificial; identical to SEQ ID NO: 8762
  oligonucleotide probe

SEQ ID NO: 9109 - DNA, 32 bp, Artificial; identical to SEQ ID NO: 5539
  oligonucleotide probe

SEQ ID NO: 9110 - DNA, 32 bp, Artificial; identical to SEQ ID NO: 8834
  oligonucleotide probe

SEQ ID NO: 9111 - DNA, 32 bp, Artificial; identical to SEQ ID NO: 8835
  oligonucleotide probe

SEQ ID NO: 9112 - DNA, 32 bp, Artificial; identical to SEQ ID NO: 8786
  oligonucleotide probe

SEQ ID NO: 9113 - DNA, 32 bp, Artificial; identical to SEQ ID NO: 5585
  oligonucleotide probe

SEQ ID NO: 9114 - DNA, 32 bp, Artificial; identical to SEQ ID NO: 5546
  oligonucleotide probe

SEQ ID NO: 9115 - DNA, 32 bp, Artificial; identical to SEQ ID NO: 8757
  oligonucleotide probe

SEQ ID NO: 9116 - DNA, 32 bp, Artificial; identical to SEQ ID NO: 8760
  oligonucleotide probe

SEQ ID NO: 9117 - DNA, 32 bp, Artificial; identical to SEQ ID NO: 5537
  oligonucleotide probe

SEQ ID NO: 9118 - DNA, 32 bp, Artificial; identical to SEQ ID NO: 8762
  oligonucleotide probe

SEQ ID NO: 9119 - DNA, 32 bp, Artificial; identical to SEQ ID NO: 5539
  oligonucleotide probe

SEQ ID NO: 9120 - DNA, 32 bp, Artificial; identical to SEQ ID NO: 8780
  oligonucleotide probe

SEQ ID NO: 9121 - DNA, 32 bp, Artificial; identical to SEQ ID NO: 8781
  oligonucleotide probe

SEQ ID NO: 9122 - DNA, 32 bp, Artificial; identical to SEQ ID NO: 8753
  oligonucleotide probe

SEQ ID NO: 9123 - DNA, 32 bp, Artificial; identical to SEQ ID NO: 8760
  oligonucleotide probe

SEQ ID NO: 9124 - DNA, 32 bp, Artificial; identical to SEQ ID NO: 9020
  oligonucleotide probe

SEQ ID NO: 9125 - DNA, 32 bp, Artificial; identical to SEQ ID NO: 9021
  oligonucleotide probe

SEQ ID NO: 9126 - DNA, 32 bp, Artificial; identical to SEQ ID NO: 8750
  oligonucleotide probe

SEQ ID NO: 9127 - DNA, 32 bp, Artificial; identical to SEQ ID NO: 8751
  oligonucleotide probe

SEQ ID NO: 9128 - DNA, 32 bp, Artificial; identical to SEQ ID NO: 8776
  oligonucleotide probe

SEQ ID NO: 9129 - DNA, 32 bp, Artificial; identical to SEQ ID NO: 8777
  oligonucleotide probe

SEQ ID NO: 9130 - DNA, 32 bp, Artificial; identical to SEQ ID NO: 5547
  oligonucleotide probe

SEQ ID NO: 9131 - DNA, 32 bp, Artificial; identical to SEQ ID NO: 8753
  oligonucleotide probe

SEQ ID NO: 9132 - DNA, 32 bp, Artificial; identical to SEQ ID NO: 8750
  oligonucleotide probe

SEQ ID NO: 9133 - DNA, 32 bp, Artificial; identical to SEQ ID NO: 8751
  oligonucleotide probe

SEQ ID NO: 9134 - DNA, 32 bp, Artificial; identical to SEQ ID NO: 8780
  oligonucleotide probe

SEQ ID NO: 9135 - DNA, 32 bp, Artificial; identical to SEQ ID NO: 8781
  oligonucleotide probe

SEQ ID NO: 9136 - DNA, 32 bp, Artificial; identical to SEQ ID NO: 8784
  oligonucleotide probe

SEQ ID NO: 9137 - DNA, 32 bp, Artificial; identical to SEQ ID NO: 8785
  oligonucleotide probe

SEQ ID NO: 9138 - DNA, 32 bp, Artificial; identical to SEQ ID NO: 8778
  oligonucleotide probe

SEQ ID NO: 9139 - DNA, 32 bp, Artificial; identical to SEQ ID NO: 5564
  oligonucleotide probe

SEQ ID NO: 9140 - DNA, 32 bp, Artificial; identical to SEQ ID NO: 8784
  oligonucleotide probe

SEQ ID NO: 9141 - DNA, 32 bp, Artificial; identical to SEQ ID NO: 8785
  oligonucleotide probe

SEQ ID NO: 9142 - DNA, 32 bp, Artificial; identical to SEQ ID NO: 8760
  oligonucleotide probe

SEQ ID NO: 9143 - DNA, 32 bp, Artificial; identical to SEQ ID NO: 5537
  oligonucleotide probe

SEQ ID NO: 9144 - DNA, 32 bp, Artificial; identical to SEQ ID NO: 8786
  oligonucleotide probe

SEQ ID NO: 9145 - DNA, 32 bp, Artificial; identical to SEQ ID NO: 5585
  oligonucleotide probe

SEQ ID NO: 9146 - DNA, 32 bp, Artificial; identical to SEQ ID NO: 8760
  oligonucleotide probe

SEQ ID NO: 9147 - DNA, 32 bp, Artificial; identical to SEQ ID NO: 5537
  oligonucleotide probe

SEQ ID NO: 9148 - DNA, 32 bp, Artificial; identical to SEQ ID NO: 8804
  oligonucleotide probe

SEQ ID NO: 9149 - DNA, 32 bp, Artificial; identical to SEQ ID NO: 5565
  oligonucleotide probe

SEQ ID NO: 9150 - DNA, 32 bp, Artificial; identical to SEQ ID NO: 5546
  oligonucleotide probe

SEQ ID NO: 9151 - DNA, 32 bp, Artificial; identical to SEQ ID NO: 8757
  oligonucleotide probe

SEQ ID NO: 9152 - DNA, 32 bp, Artificial; identical to SEQ ID NO: 8804
  oligonucleotide probe

SEQ ID NO: 9153 - DNA, 32 bp, Artificial; identical to SEQ ID NO: 5565
  oligonucleotide probe

SEQ ID NO: 9154 - DNA, 32 bp, Artificial; identical to SEQ ID NO: 5546
  oligonucleotide probe

SEQ ID NO: 9155 - DNA, 32 bp, Artificial; identical to SEQ ID NO: 8757
  oligonucleotide probe

SEQ ID NO: 9156 - DNA, 32 bp, Artificial; identical to SEQ ID NO: 8796
  oligonucleotide probe

SEQ ID NO: 9157 - DNA, 32 bp, Artificial; identical to SEQ ID NO: 5538
  oligonucleotide probe

SEQ ID NO: 9158 - DNA, 32 bp, Artificial; identical to SEQ ID NO: 8753
  oligonucleotide probe

SEQ ID NO: 9159 - DNA, 32 bp, Artificial; identical to SEQ ID NO: 8760
  oligonucleotide probe

SEQ ID NO: 9160 - DNA, 32 bp, Artificial; identical to SEQ ID NO: 8834
  oligonucleotide probe

SEQ ID NO: 9161 - DNA, 32 bp, Artificial; identical to SEQ ID NO: 8835
  oligonucleotide probe

SEQ ID NO: 9162 - DNA, 32 bp, Artificial; identical to SEQ ID NO: 8776
  oligonucleotide probe

SEQ ID NO: 9163 - DNA, 32 bp, Artificial; identical to SEQ ID NO: 8777
  oligonucleotide probe

SEQ ID NO: 9164 - DNA, 32 bp, Artificial; identical to SEQ ID NO: 8750
  oligonucleotide probe

SEQ ID NO: 9165 - DNA, 32 bp, Artificial; identical to SEQ ID NO: 8751
  oligonucleotide probe

SEQ ID NO: 9166 - DNA, 32 bp, Artificial; identical to SEQ ID NO: 5547
  oligonucleotide probe

SEQ ID NO: 9167 - DNA, 32 bp, Artificial; identical to SEQ ID NO: 8753
  oligonucleotide probe

SEQ ID NO: 9168 - DNA, 32 bp, Artificial; identical to SEQ ID NO: 9020
  oligonucleotide probe

SEQ ID NO: 9169 - DNA, 32 bp, Artificial; identical to SEQ ID NO: 9021
  oligonucleotide probe

SEQ ID NO: 9170 - DNA, 32 bp, Artificial; identical to SEQ ID NO: 8796
  oligonucleotide probe

SEQ ID NO: 9171 - DNA, 32 bp, Artificial; identical to SEQ ID NO: 5538
  oligonucleotide probe

SEQ ID NO: 9172 - DNA, 32 bp, Artificial; identical to SEQ ID NO: 9020
  oligonucleotide probe

SEQ ID NO: 9173 - DNA, 32 bp, Artificial; identical to SEQ ID NO: 9021
  oligonucleotide probe

SEQ ID NO: 9174 - DNA, 32 bp, Artificial; identical to SEQ ID NO: 5546
  oligonucleotide probe

SEQ ID NO: 9175 - DNA, 32 bp, Artificial; identical to SEQ ID NO: 8757
  oligonucleotide probe

SEQ ID NO: 9176 - DNA, 32 bp, Artificial; identical to SEQ ID NO: 8760
  oligonucleotide probe

SEQ ID NO: 9177 - DNA, 32 bp, Artificial; identical to SEQ ID NO: 5537
  oligonucleotide probe

SEQ ID NO: 9178 - DNA, 32 bp, Artificial; identical to SEQ ID NO: 5546
  oligonucleotide probe

SEQ ID NO: 9179 - DNA, 32 bp, Artificial; identical to SEQ ID NO: 8757
  oligonucleotide probe

SEQ ID NO: 9180 - DNA, 32 bp, Artificial; identical to SEQ ID NO: 8766
  oligonucleotide probe

SEQ ID NO: 9181 - DNA, 32 bp, Artificial; identical to SEQ ID NO: 8767
  oligonucleotide probe

SEQ ID NO: 9182 - DNA, 32 bp, Artificial; identical to SEQ ID NO: 9020
  oligonucleotide probe

SEQ ID NO: 9183 - DNA, 32 bp, Artificial; identical to SEQ ID NO: 9021
  oligonucleotide probe

SEQ ID NO: 9184 - DNA, 32 bp, Artificial; identical to SEQ ID NO: 8780
  oligonucleotide probe

SEQ ID NO: 9185 - DNA, 32 bp, Artificial; identical to SEQ ID NO: 8781
  oligonucleotide probe

SEQ ID NO: 9186 - DNA, 32 bp, Artificial; identical to SEQ ID NO: 8780
  oligonucleotide probe

SEQ ID NO: 9187 - DNA, 32 bp, Artificial; identical to SEQ ID NO: 8781
  oligonucleotide probe

SEQ ID NO: 9188 - DNA, 32 bp, Artificial; identical to SEQ ID NO: 8778
  oligonucleotide probe

SEQ ID NO: 9189 - DNA, 32 bp, Artificial; identical to SEQ ID NO: 5564
  oligonucleotide probe

SEQ ID NO: 9190 - DNA, 32 bp, Artificial; identical to SEQ ID NO: 9020
  oligonucleotide probe

SEQ ID NO: 9191 - DNA, 32 bp, Artificial; identical to SEQ ID NO: 9021
  oligonucleotide probe

SEQ ID NO: 9192 - DNA, 32 bp, Artificial; identical to SEQ ID NO: 8784
  oligonucleotide probe

SEQ ID NO: 9193 - DNA, 32 bp, Artificial; identical to SEQ ID NO: 8785
  oligonucleotide probe

SEQ ID NO: 9194 - DNA, 32 bp, Artificial; identical to SEQ ID NO: 8804
  oligonucleotide probe

SEQ ID NO: 9195 - DNA, 32 bp, Artificial; identical to SEQ ID NO: 5565
  oligonucleotide probe

SEQ ID NO: 9196 - DNA, 32 bp, Artificial; identical to SEQ ID NO: 8786
  oligonucleotide probe

SEQ ID NO: 9197 - DNA, 32 bp, Artificial; identical to SEQ ID NO: 5585
  oligonucleotide probe

SEQ ID NO: 9198 - DNA, 32 bp, Artificial; identical to SEQ ID NO: 8762
  oligonucleotide probe

SEQ ID NO: 9199 - DNA, 32 bp, Artificial; identical to SEQ ID NO: 5539
  oligonucleotide probe

SEQ ID NO: 9200 - DNA, 32 bp, Artificial; identical to SEQ ID NO: 8750
  oligonucleotide probe

SEQ ID NO: 9201 - DNA, 32 bp, Artificial; identical to SEQ ID NO: 8751
  oligonucleotide probe

SEQ ID NO: 9202 - DNA, 32 bp, Artificial; identical to SEQ ID NO: 8750
  oligonucleotide probe

SEQ ID NO: 9203 - DNA, 32 bp, Artificial; identical to SEQ ID NO: 8751
  oligonucleotide probe

SEQ ID NO: 9204 - DNA, 32 bp, Artificial; identical to SEQ ID NO: 8796
  oligonucleotide probe

SEQ ID NO: 9205 - DNA, 32 bp, Artificial; identical to SEQ ID NO: 5538
  oligonucleotide probe

SEQ ID NO: 9206 - DNA, 32 bp, Artificial; identical to SEQ ID NO: 8804
  oligonucleotide probe

SEQ ID NO: 9207 - DNA, 32 bp, Artificial; identical to SEQ ID NO: 5565
  oligonucleotide probe

SEQ ID NO: 9208 - DNA, 32 bp, Artificial; identical to SEQ ID NO: 8762
  oligonucleotide probe

SEQ ID NO: 9209 - DNA, 32 bp, Artificial; identical to SEQ ID NO: 5539
  oligonucleotide probe

SEQ ID NO: 9210 - DNA, 32 bp, Artificial; identical to SEQ ID NO: 8778
  oligonucleotide probe

SEQ ID NO: 9211 - DNA, 32 bp, Artificial; identical to SEQ ID NO: 5564
  oligonucleotide probe

SEQ ID NO: 9212 - DNA, 32 bp, Artificial; identical to SEQ ID NO: 8780
  oligonucleotide probe

SEQ ID NO: 9213 - DNA, 32 bp, Artificial; identical to SEQ ID NO: 8781
  oligonucleotide probe

SEQ ID NO: 9214 - DNA, 32 bp, Artificial; identical to SEQ ID NO: 8762
  oligonucleotide probe

SEQ ID NO: 9215 - DNA, 32 bp, Artificial; identical to SEQ ID NO: 5539
  oligonucleotide probe

SEQ ID NO: 9216 - DNA, 32 bp, Artificial; identical to SEQ ID NO: 5547
  oligonucleotide probe

SEQ ID NO: 9217 - DNA, 32 bp, Artificial; identical to SEQ ID NO: 8753
  oligonucleotide probe

SEQ ID NO: 9218 - DNA, 32 bp, Artificial; identical to SEQ ID NO: 8778
  oligonucleotide probe

SEQ ID NO: 9219 - DNA, 32 bp, Artificial; identical to SEQ ID NO: 5564
  oligonucleotide probe

SEQ ID NO: 9220 - DNA, 32 bp, Artificial; identical to SEQ ID NO: 8804
  oligonucleotide probe

SEQ ID NO: 9221 - DNA, 32 bp, Artificial; identical to SEQ ID NO: 5565
  oligonucleotide probe

SEQ ID NO: 9222 - DNA, 32 bp, Artificial; identical to SEQ ID NO: 8804
  oligonucleotide probe

SEQ ID NO: 9223 - DNA, 32 bp, Artificial; identical to SEQ ID NO: 5565
  oligonucleotide probe

SEQ ID NO: 9224 - DNA, 32 bp, Artificial; identical to SEQ ID NO: 5547
  oligonucleotide probe

SEQ ID NO: 9225 - DNA, 32 bp, Artificial; identical to SEQ ID NO: 8753
  oligonucleotide probe

SEQ ID NO: 9226 - DNA, 32 bp, Artificial; identical to SEQ ID NO: 8804
  oligonucleotide probe

SEQ ID NO: 9227 - DNA, 32 bp, Artificial; identical to SEQ ID NO: 5565
  oligonucleotide probe

SEQ ID NO: 9228 - DNA, 32 bp, Artificial; identical to SEQ ID NO: 8748
  oligonucleotide probe

SEQ ID NO: 9229 - DNA, 32 bp, Artificial; identical to SEQ ID NO: 8749
  oligonucleotide probe

SEQ ID NO: 9230 - DNA, 32 bp, Artificial; identical to SEQ ID NO: 8778
  oligonucleotide probe

SEQ ID NO: 9231 - DNA, 32 bp, Artificial; identical to SEQ ID NO: 5564
  oligonucleotide probe

SEQ ID NO: 9232 - DNA, 32 bp, Artificial; identical to SEQ ID NO: 8786
  oligonucleotide probe

SEQ ID NO: 9233 - DNA, 32 bp, Artificial; identical to SEQ ID NO: 5585
  oligonucleotide probe

SEQ ID NO: 9234 - DNA, 32 bp, Artificial; identical to SEQ ID NO: 5547
  oligonucleotide probe

SEQ ID NO: 9235 - DNA, 32 bp, Artificial; identical to SEQ ID NO: 8753
  oligonucleotide probe

SEQ ID NO: 9236 - DNA, 32 bp, Artificial; identical to SEQ ID NO: 8804
  oligonucleotide probe

SEQ ID NO: 9237 - DNA, 32 bp, Artificial; identical to SEQ ID NO: 5565
  oligonucleotide probe

SEQ ID NO: 9238 - DNA, 32 bp, Artificial; identical to SEQ ID NO: 8784
  oligonucleotide probe

SEQ ID NO: 9239 - DNA, 32 bp, Artificial; identical to SEQ ID NO: 8785
  oligonucleotide probe

SEQ ID NO: 9240 - DNA, 32 bp, Artificial; identical to SEQ ID NO: 8760
  oligonucleotide probe

SEQ ID NO: 9241 - DNA, 32 bp, Artificial; identical to SEQ ID NO: 5537
  oligonucleotide probe

SEQ ID NO: 9242 - DNA, 32 bp, Artificial; identical to SEQ ID NO: 9020
  oligonucleotide probe

SEQ ID NO: 9243 - DNA, 32 bp, Artificial; identical to SEQ ID NO: 9021
  oligonucleotide probe

SEQ ID NO: 9244 - DNA, 32 bp, Artificial; identical to SEQ ID NO: 8753
  oligonucleotide probe

SEQ ID NO: 9245 - DNA, 32 bp, Artificial; identical to SEQ ID NO: 8760
  oligonucleotide probe

SEQ ID NO: 9246 - DNA, 32 bp, Artificial; identical to SEQ ID NO: 8748
  oligonucleotide probe

SEQ ID NO: 9247 - DNA, 32 bp, Artificial; identical to SEQ ID NO: 8749
  oligonucleotide probe

SEQ ID NO: 9248 - DNA, 32 bp, Artificial; identical to SEQ ID NO: 8780
  oligonucleotide probe

SEQ ID NO: 9249 - DNA, 32 bp, Artificial; identical to SEQ ID NO: 8781
  oligonucleotide probe

SEQ ID NO: 9250 - DNA, 32 bp, Artificial; identical to SEQ ID NO: 8784
  oligonucleotide probe

SEQ ID NO: 9251 - DNA, 32 bp, Artificial; identical to SEQ ID NO: 8785
  oligonucleotide probe

SEQ ID NO: 9252 - DNA, 32 bp, Artificial
  oligonucleotide probe
aacggctgcaagcgcagggattcgcgcaaacg

SEQ ID NO: 9253 - DNA, 32 bp, Artificial
  oligonucleotide probe
aacggctgcaagcgcattgcatggcgtgggga

SEQ ID NO: 9254 - DNA, 32 bp, Artificial; identical to SEQ ID NO: 8762
  oligonucleotide probe

SEQ ID NO: 9255 - DNA, 32 bp, Artificial; identical to SEQ ID NO: 5539
  oligonucleotide probe

SEQ ID NO: 9256 - DNA, 32 bp, Artificial; identical to SEQ ID NO: 8804
  oligonucleotide probe

SEQ ID NO: 9257 - DNA, 32 bp, Artificial; identical to SEQ ID NO: 5565
  oligonucleotide probe

SEQ ID NO: 9258 - DNA, 32 bp, Artificial; identical to SEQ ID NO: 8834
  oligonucleotide probe

SEQ ID NO: 9259 - DNA, 32 bp, Artificial; identical to SEQ ID NO: 8835
  oligonucleotide probe

SEQ ID NO: 9260 - DNA, 32 bp, Artificial; identical to SEQ ID NO: 9252
  oligonucleotide probe

SEQ ID NO: 9261 - DNA, 32 bp, Artificial; identical to SEQ ID NO: 9253
  oligonucleotide probe

SEQ ID NO: 9262 - DNA, 32 bp, Artificial; identical to SEQ ID NO: 5546
  oligonucleotide probe

SEQ ID NO: 9263 - DNA, 32 bp, Artificial; identical to SEQ ID NO: 8757
  oligonucleotide probe

SEQ ID NO: 9264 - DNA, 32 bp, Artificial; identical to SEQ ID NO: 8784
  oligonucleotide probe

SEQ ID NO: 9265 - DNA, 32 bp, Artificial; identical to SEQ ID NO: 8785
  oligonucleotide probe

SEQ ID NO: 9266 - DNA, 32 bp, Artificial; identical to SEQ ID NO: 8753
  oligonucleotide probe

SEQ ID NO: 9267 - DNA, 32 bp, Artificial; identical to SEQ ID NO: 8760
  oligonucleotide probe

SEQ ID NO: 9268 - DNA, 32 bp, Artificial; identical to SEQ ID NO: 8780
  oligonucleotide probe

SEQ ID NO: 9269 - DNA, 32 bp, Artificial; identical to SEQ ID NO: 8781
  oligonucleotide probe

SEQ ID NO: 9270 - DNA, 32 bp, Artificial; identical to SEQ ID NO: 8760
  oligonucleotide probe

SEQ ID NO: 9271 - DNA, 32 bp, Artificial; identical to SEQ ID NO: 5537
  oligonucleotide probe

SEQ ID NO: 9272 - DNA, 32 bp, Artificial; identical to SEQ ID NO: 5547
  oligonucleotide probe

SEQ ID NO: 9273 - DNA, 32 bp, Artificial; identical to SEQ ID NO: 8753
  oligonucleotide probe

SEQ ID NO: 9274 - DNA, 32 bp, Artificial; identical to SEQ ID NO: 8776
  oligonucleotide probe

SEQ ID NO: 9275 - DNA, 32 bp, Artificial; identical to SEQ ID NO: 8777
  oligonucleotide probe

SEQ ID NO: 9276 - DNA, 32 bp, Artificial; identical to SEQ ID NO: 8778
  oligonucleotide probe

SEQ ID NO: 9277 - DNA, 32 bp, Artificial; identical to SEQ ID NO: 5564
  oligonucleotide probe

SEQ ID NO: 9278 - DNA, 32 bp, Artificial; identical to SEQ ID NO: 8780
  oligonucleotide probe

SEQ ID NO: 9279 - DNA, 32 bp, Artificial; identical to SEQ ID NO: 8781
  oligonucleotide probe

SEQ ID NO: 9280 - DNA, 32 bp, Artificial; identical to SEQ ID NO: 8796
  oligonucleotide probe

SEQ ID NO: 9281 - DNA, 32 bp, Artificial; identical to SEQ ID NO: 5538
  oligonucleotide probe

SEQ ID NO: 9282 - DNA, 32 bp, Artificial; identical to SEQ ID NO: 8780
  oligonucleotide probe

SEQ ID NO: 9283 - DNA, 32 bp, Artificial; identical to SEQ ID NO: 8781
  oligonucleotide probe

SEQ ID NO: 9284 - DNA, 32 bp, Artificial; identical to SEQ ID NO: 8868
  oligonucleotide probe

SEQ ID NO: 9285 - DNA, 32 bp, Artificial; identical to SEQ ID NO: 5584
  oligonucleotide probe

SEQ ID NO: 9286 - DNA, 32 bp, Artificial; identical to SEQ ID NO: 5546
  oligonucleotide probe

SEQ ID NO: 9287 - DNA, 32 bp, Artificial; identical to SEQ ID NO: 8757
  oligonucleotide probe

SEQ ID NO: 9288 - DNA, 32 bp, Artificial; identical to SEQ ID NO: 8776
  oligonucleotide probe

SEQ ID NO: 9289 - DNA, 32 bp, Artificial; identical to SEQ ID NO: 8777
  oligonucleotide probe

SEQ ID NO: 9290 - DNA, 32 bp, Artificial; identical to SEQ ID NO: 8780
  oligonucleotide probe

SEQ ID NO: 9291 - DNA, 32 bp, Artificial; identical to SEQ ID NO: 8781
  oligonucleotide probe

SEQ ID NO: 9292 - DNA, 32 bp, Artificial; identical to SEQ ID NO: 8750
  oligonucleotide probe

SEQ ID NO: 9293 - DNA, 32 bp, Artificial; identical to SEQ ID NO: 8751
  oligonucleotide probe

SEQ ID NO: 9294 - DNA, 32 bp, Artificial; identical to SEQ ID NO: 8780
  oligonucleotide probe

SEQ ID NO: 9295 - DNA, 32 bp, Artificial; identical to SEQ ID NO: 8781
  oligonucleotide probe

SEQ ID NO: 9296 - DNA, 32 bp, Artificial; identical to SEQ ID NO: 8753
  oligonucleotide probe

SEQ ID NO: 9297 - DNA, 32 bp, Artificial; identical to SEQ ID NO: 8760
  oligonucleotide probe

SEQ ID NO: 9298 - DNA, 32 bp, Artificial; identical to SEQ ID NO: 8784
  oligonucleotide probe

SEQ ID NO: 9299 - DNA, 32 bp, Artificial; identical to SEQ ID NO: 8785
  oligonucleotide probe

SEQ ID NO: 9300 - DNA, 32 bp, Artificial; identical to SEQ ID NO: 8784
  oligonucleotide probe

SEQ ID NO: 9301 - DNA, 32 bp, Artificial; identical to SEQ ID NO: 8785
  oligonucleotide probe

SEQ ID NO: 9302 - DNA, 32 bp, Artificial; identical to SEQ ID NO: 8834
  oligonucleotide probe

SEQ ID NO: 9303 - DNA, 32 bp, Artificial; identical to SEQ ID NO: 8835
  oligonucleotide probe

SEQ ID NO: 9304 - DNA, 32 bp, Artificial; identical to SEQ ID NO: 8780
  oligonucleotide probe

SEQ ID NO: 9305 - DNA, 32 bp, Artificial; identical to SEQ ID NO: 8781
  oligonucleotide probe

SEQ ID NO: 9306 - DNA, 32 bp, Artificial; identical to SEQ ID NO: 8762
  oligonucleotide probe

SEQ ID NO: 9307 - DNA, 32 bp, Artificial; identical to SEQ ID NO: 5539
  oligonucleotide probe

SEQ ID NO: 9308 - DNA, 32 bp, Artificial; identical to SEQ ID NO: 8753
  oligonucleotide probe

SEQ ID NO: 9309 - DNA, 32 bp, Artificial; identical to SEQ ID NO: 8760
  oligonucleotide probe

SEQ ID NO: 9310 - DNA, 32 bp, Artificial; identical to SEQ ID NO: 8776
  oligonucleotide probe

SEQ ID NO: 9311 - DNA, 32 bp, Artificial; identical to SEQ ID NO: 8777
  oligonucleotide probe

SEQ ID NO: 9312 - DNA, 32 bp, Artificial; identical to SEQ ID NO: 5547
  oligonucleotide probe

SEQ ID NO: 9313 - DNA, 32 bp, Artificial; identical to SEQ ID NO: 8753
  oligonucleotide probe

SEQ ID NO: 9314 - DNA, 32 bp, Artificial
  oligonucleotide probe
aacggctgcaagcgcagcaccgcagctgcgtg

SEQ ID NO: 9315 - DNA, 32 bp, Artificial
  oligonucleotide probe
aacggctgcaagcgcagcacgggaaagcggct

SEQ ID NO: 9316 - DNA, 32 bp, Artificial; identical to SEQ ID NO: 8804
  oligonucleotide probe

SEQ ID NO: 9317 - DNA, 32 bp, Artificial; identical to SEQ ID NO: 5565
  oligonucleotide probe

SEQ ID NO: 9318 - DNA, 32 bp, Artificial; identical to SEQ ID NO: 5546
  oligonucleotide probe

SEQ ID NO: 9319 - DNA, 32 bp, Artificial; identical to SEQ ID NO: 8757
  oligonucleotide probe

SEQ ID NO: 9320 - DNA, 32 bp, Artificial; identical to SEQ ID NO: 8804
  oligonucleotide probe

SEQ ID NO: 9321 - DNA, 32 bp, Artificial; identical to SEQ ID NO: 5565
  oligonucleotide probe

SEQ ID NO: 9322 - DNA, 32 bp, Artificial; identical to SEQ ID NO: 5546
  oligonucleotide probe

SEQ ID NO: 9323 - DNA, 32 bp, Artificial; identical to SEQ ID NO: 8757
  oligonucleotide probe

SEQ ID NO: 9324 - DNA, 32 bp, Artificial; identical to SEQ ID NO: 5547
  oligonucleotide probe

SEQ ID NO: 9325 - DNA, 32 bp, Artificial; identical to SEQ ID NO: 8753
  oligonucleotide probe

SEQ ID NO: 9326 - DNA, 32 bp, Artificial; identical to SEQ ID NO: 8776
  oligonucleotide probe

SEQ ID NO: 9327 - DNA, 32 bp, Artificial; identical to SEQ ID NO: 8777
  oligonucleotide probe

SEQ ID NO: 9328 - DNA, 32 bp, Artificial; identical to SEQ ID NO: 8762
  oligonucleotide probe

SEQ ID NO: 9329 - DNA, 32 bp, Artificial; identical to SEQ ID NO: 5539
  oligonucleotide probe

SEQ ID NO: 9330 - DNA, 32 bp, Artificial; identical to SEQ ID NO: 9020
  oligonucleotide probe

SEQ ID NO: 9331 - DNA, 32 bp, Artificial; identical to SEQ ID NO: 9021
  oligonucleotide probe

SEQ ID NO: 9332 - DNA, 32 bp, Artificial; identical to SEQ ID NO: 5546
  oligonucleotide probe

SEQ ID NO: 9333 - DNA, 32 bp, Artificial; identical to SEQ ID NO: 8757
  oligonucleotide probe

SEQ ID NO: 9334 - DNA, 32 bp, Artificial; identical to SEQ ID NO: 8776
  oligonucleotide probe

SEQ ID NO: 9335 - DNA, 32 bp, Artificial; identical to SEQ ID NO: 8777
  oligonucleotide probe

SEQ ID NO: 9336 - DNA, 32 bp, Artificial; identical to SEQ ID NO: 8804
  oligonucleotide probe

SEQ ID NO: 9337 - DNA, 32 bp, Artificial; identical to SEQ ID NO: 5565
  oligonucleotide probe

SEQ ID NO: 9338 - DNA, 32 bp, Artificial; identical to SEQ ID NO: 5547
  oligonucleotide probe

SEQ ID NO: 9339 - DNA, 32 bp, Artificial; identical to SEQ ID NO: 8753
  oligonucleotide probe

SEQ ID NO: 9340 - DNA, 32 bp, Artificial; identical to SEQ ID NO: 5546
  oligonucleotide probe

SEQ ID NO: 9341 - DNA, 32 bp, Artificial; identical to SEQ ID NO: 8757
  oligonucleotide probe

SEQ ID NO: 9342 - DNA, 32 bp, Artificial; identical to SEQ ID NO: 8780
  oligonucleotide probe

SEQ ID NO: 9343 - DNA, 32 bp, Artificial; identical to SEQ ID NO: 8781
  oligonucleotide probe

SEQ ID NO: 9344 - DNA, 32 bp, Artificial; identical to SEQ ID NO: 8778
  oligonucleotide probe

SEQ ID NO: 9345 - DNA, 32 bp, Artificial; identical to SEQ ID NO: 5564
  oligonucleotide probe

SEQ ID NO: 9346 - DNA, 32 bp, Artificial; identical to SEQ ID NO: 5546
  oligonucleotide probe

SEQ ID NO: 9347 - DNA, 32 bp, Artificial; identical to SEQ ID NO: 8757
  oligonucleotide probe

SEQ ID NO: 9348 - DNA, 32 bp, Artificial; identical to SEQ ID NO: 5546
  oligonucleotide probe

SEQ ID NO: 9349 - DNA, 32 bp, Artificial; identical to SEQ ID NO: 8757
  oligonucleotide probe

SEQ ID NO: 9350 - DNA, 32 bp, Artificial; identical to SEQ ID NO: 5547
  oligonucleotide probe

SEQ ID NO: 9351 - DNA, 32 bp, Artificial; identical to SEQ ID NO: 8753
  oligonucleotide probe

SEQ ID NO: 9352 - DNA, 32 bp, Artificial; identical to SEQ ID NO: 8780
  oligonucleotide probe

SEQ ID NO: 9353 - DNA, 32 bp, Artificial; identical to SEQ ID NO: 8781
  oligonucleotide probe

SEQ ID NO: 9354 - DNA, 32 bp, Artificial; identical to SEQ ID NO: 8760
  oligonucleotide probe

SEQ ID NO: 9355 - DNA, 32 bp, Artificial; identical to SEQ ID NO: 5537
  oligonucleotide probe

SEQ ID NO: 9356 - DNA, 32 bp, Artificial; identical to SEQ ID NO: 8804
  oligonucleotide probe

SEQ ID NO: 9357 - DNA, 32 bp, Artificial; identical to SEQ ID NO: 5565
  oligonucleotide probe

SEQ ID NO: 9358 - DNA, 32 bp, Artificial; identical to SEQ ID NO: 8780
  oligonucleotide probe

SEQ ID NO: 9359 - DNA, 32 bp, Artificial; identical to SEQ ID NO: 8781
  oligonucleotide probe

SEQ ID NO: 9360 - DNA, 32 bp, Artificial; identical to SEQ ID NO: 5546
  oligonucleotide probe

SEQ ID NO: 9361 - DNA, 32 bp, Artificial; identical to SEQ ID NO: 8757
  oligonucleotide probe

SEQ ID NO: 9362 - DNA, 32 bp, Artificial; identical to SEQ ID NO: 8780
  oligonucleotide probe

SEQ ID NO: 9363 - DNA, 32 bp, Artificial; identical to SEQ ID NO: 8781
  oligonucleotide probe

SEQ ID NO: 9364 - DNA, 32 bp, Artificial; identical to SEQ ID NO: 8776
  oligonucleotide probe

SEQ ID NO: 9365 - DNA, 32 bp, Artificial; identical to SEQ ID NO: 8777
  oligonucleotide probe

SEQ ID NO: 9366 - DNA, 32 bp, Artificial; identical to SEQ ID NO: 8796
  oligonucleotide probe

SEQ ID NO: 9367 - DNA, 32 bp, Artificial; identical to SEQ ID NO: 5538
  oligonucleotide probe

SEQ ID NO: 9368 - DNA, 32 bp, Artificial; identical to SEQ ID NO: 8786
  oligonucleotide probe

SEQ ID NO: 9369 - DNA, 32 bp, Artificial; identical to SEQ ID NO: 5585
  oligonucleotide probe

SEQ ID NO: 9370 - DNA, 32 bp, Artificial; identical to SEQ ID NO: 5546
  oligonucleotide probe

SEQ ID NO: 9371 - DNA, 32 bp, Artificial; identical to SEQ ID NO: 8757
  oligonucleotide probe

SEQ ID NO: 9372 - DNA, 32 bp, Artificial; identical to SEQ ID NO: 5546
  oligonucleotide probe

SEQ ID NO: 9373 - DNA, 32 bp, Artificial; identical to SEQ ID NO: 8757
  oligonucleotide probe

SEQ ID NO: 9374 - DNA, 32 bp, Artificial; identical to SEQ ID NO: 5547
  oligonucleotide probe

SEQ ID NO: 9375 - DNA, 32 bp, Artificial; identical to SEQ ID NO: 8753
  oligonucleotide probe

SEQ ID NO: 9376 - DNA, 32 bp, Artificial; identical to SEQ ID NO: 5547
  oligonucleotide probe

SEQ ID NO: 9377 - DNA, 32 bp, Artificial; identical to SEQ ID NO: 8753
  oligonucleotide probe

SEQ ID NO: 9378 - DNA, 32 bp, Artificial; identical to SEQ ID NO: 8760
  oligonucleotide probe

SEQ ID NO: 9379 - DNA, 32 bp, Artificial; identical to SEQ ID NO: 5537
  oligonucleotide probe

SEQ ID NO: 9380 - DNA, 32 bp, Artificial; identical to SEQ ID NO: 8804
  oligonucleotide probe

SEQ ID NO: 9381 - DNA, 32 bp, Artificial; identical to SEQ ID NO: 5565
  oligonucleotide probe

SEQ ID NO: 9382 - DNA, 32 bp, Artificial; identical to SEQ ID NO: 8778
  oligonucleotide probe

SEQ ID NO: 9383 - DNA, 32 bp, Artificial; identical to SEQ ID NO: 5564
  oligonucleotide probe

SEQ ID NO: 9384 - DNA, 32 bp, Artificial; identical to SEQ ID NO: 8760
  oligonucleotide probe

SEQ ID NO: 9385 - DNA, 32 bp, Artificial; identical to SEQ ID NO: 5537
  oligonucleotide probe

SEQ ID NO: 9386 - DNA, 32 bp, Artificial; identical to SEQ ID NO: 5546
  oligonucleotide probe

SEQ ID NO: 9387 - DNA, 32 bp, Artificial; identical to SEQ ID NO: 8757
  oligonucleotide probe

SEQ ID NO: 9388 - DNA, 32 bp, Artificial; identical to SEQ ID NO: 8784
  oligonucleotide probe

SEQ ID NO: 9389 - DNA, 32 bp, Artificial; identical to SEQ ID NO: 8785
  oligonucleotide probe

SEQ ID NO: 9390 - DNA, 32 bp, Artificial; identical to SEQ ID NO: 8784
  oligonucleotide probe

SEQ ID NO: 9391 - DNA, 32 bp, Artificial; identical to SEQ ID NO: 8785
  oligonucleotide probe

SEQ ID NO: 9392 - DNA, 32 bp, Artificial; identical to SEQ ID NO: 8760
  oligonucleotide probe

SEQ ID NO: 9393 - DNA, 32 bp, Artificial; identical to SEQ ID NO: 5537
  oligonucleotide probe

SEQ ID NO: 9394 - DNA, 32 bp, Artificial; identical to SEQ ID NO: 8796
  oligonucleotide probe

SEQ ID NO: 9395 - DNA, 32 bp, Artificial; identical to SEQ ID NO: 5538
  oligonucleotide probe

SEQ ID NO: 9396 - DNA, 32 bp, Artificial; identical to SEQ ID NO: 5547
  oligonucleotide probe

SEQ ID NO: 9397 - DNA, 32 bp, Artificial; identical to SEQ ID NO: 8753
  oligonucleotide probe

SEQ ID NO: 9398 - DNA, 32 bp, Artificial; identical to SEQ ID NO: 8748
  oligonucleotide probe

SEQ ID NO: 9399 - DNA, 32 bp, Artificial; identical to SEQ ID NO: 8749
  oligonucleotide probe

SEQ ID NO: 9400 - DNA, 32 bp, Artificial; identical to SEQ ID NO: 5546
  oligonucleotide probe

SEQ ID NO: 9401 - DNA, 32 bp, Artificial; identical to SEQ ID NO: 8757
  oligonucleotide probe

SEQ ID NO: 9402 - DNA, 32 bp, Artificial; identical to SEQ ID NO: 8762
  oligonucleotide probe

SEQ ID NO: 9403 - DNA, 32 bp, Artificial; identical to SEQ ID NO: 5539
  oligonucleotide probe

SEQ ID NO: 9404 - DNA, 32 bp, Artificial; identical to SEQ ID NO: 5547
  oligonucleotide probe

SEQ ID NO: 9405 - DNA, 32 bp, Artificial; identical to SEQ ID NO: 8753
  oligonucleotide probe

SEQ ID NO: 9406 - DNA, 32 bp, Artificial; identical to SEQ ID NO: 8776
  oligonucleotide probe

SEQ ID NO: 9407 - DNA, 32 bp, Artificial; identical to SEQ ID NO: 8777
  oligonucleotide probe

SEQ ID NO: 9408 - DNA, 32 bp, Artificial; identical to SEQ ID NO: 8750
  oligonucleotide probe

SEQ ID NO: 9409 - DNA, 32 bp, Artificial; identical to SEQ ID NO: 8751
  oligonucleotide probe

SEQ ID NO: 9410 - DNA, 32 bp, Artificial; identical to SEQ ID NO: 8766
  oligonucleotide probe

SEQ ID NO: 9411 - DNA, 32 bp, Artificial; identical to SEQ ID NO: 8767
  oligonucleotide probe

SEQ ID NO: 9412 - DNA, 32 bp, Artificial; identical to SEQ ID NO: 8776
  oligonucleotide probe

SEQ ID NO: 9413 - DNA, 32 bp, Artificial; identical to SEQ ID NO: 8777
  oligonucleotide probe

SEQ ID NO: 9414 - DNA, 32 bp, Artificial; identical to SEQ ID NO: 5547
  oligonucleotide probe

SEQ ID NO: 9415 - DNA, 32 bp, Artificial; identical to SEQ ID NO: 8753
  oligonucleotide probe

SEQ ID NO: 9416 - DNA, 32 bp, Artificial; identical to SEQ ID NO: 8796
  oligonucleotide probe

SEQ ID NO: 9417 - DNA, 32 bp, Artificial; identical to SEQ ID NO: 5538
  oligonucleotide probe

SEQ ID NO: 9418 - DNA, 32 bp, Artificial; identical to SEQ ID NO: 8784
  oligonucleotide probe

SEQ ID NO: 9419 - DNA, 32 bp, Artificial; identical to SEQ ID NO: 8785
  oligonucleotide probe

SEQ ID NO: 9420 - DNA, 32 bp, Artificial; identical to SEQ ID NO: 8748
  oligonucleotide probe

SEQ ID NO: 9421 - DNA, 32 bp, Artificial; identical to SEQ ID NO: 8749
  oligonucleotide probe

SEQ ID NO: 9422 - DNA, 32 bp, Artificial; identical to SEQ ID NO: 8748
  oligonucleotide probe

SEQ ID NO: 9423 - DNA, 32 bp, Artificial; identical to SEQ ID NO: 8749
  oligonucleotide probe

SEQ ID NO: 9424 - DNA, 32 bp, Artificial; identical to SEQ ID NO: 8760
  oligonucleotide probe

SEQ ID NO: 9425 - DNA, 32 bp, Artificial; identical to SEQ ID NO: 5537
  oligonucleotide probe

SEQ ID NO: 9426 - DNA, 32 bp, Artificial; identical to SEQ ID NO: 8762
  oligonucleotide probe

SEQ ID NO: 9427 - DNA, 32 bp, Artificial; identical to SEQ ID NO: 5539
  oligonucleotide probe

SEQ ID NO: 9428 - DNA, 32 bp, Artificial; identical to SEQ ID NO: 8776
  oligonucleotide probe

SEQ ID NO: 9429 - DNA, 32 bp, Artificial; identical to SEQ ID NO: 8777
  oligonucleotide probe

SEQ ID NO: 9430 - DNA, 32 bp, Artificial; identical to SEQ ID NO: 8868
  oligonucleotide probe

SEQ ID NO: 9431 - DNA, 32 bp, Artificial; identical to SEQ ID NO: 5584
  oligonucleotide probe

SEQ ID NO: 9432 - DNA, 32 bp, Artificial; identical to SEQ ID NO: 8786
  oligonucleotide probe

SEQ ID NO: 9433 - DNA, 32 bp, Artificial; identical to SEQ ID NO: 5585
  oligonucleotide probe

SEQ ID NO: 9434 - DNA, 32 bp, Artificial; identical to SEQ ID NO: 8784
  oligonucleotide probe

SEQ ID NO: 9435 - DNA, 32 bp, Artificial; identical to SEQ ID NO: 8785
  oligonucleotide probe

SEQ ID NO: 9436 - DNA, 32 bp, Artificial; identical to SEQ ID NO: 8786
  oligonucleotide probe

SEQ ID NO: 9437 - DNA, 32 bp, Artificial; identical to SEQ ID NO: 5585
  oligonucleotide probe

SEQ ID NO: 9438 - DNA, 32 bp, Artificial; identical to SEQ ID NO: 8936
  oligonucleotide probe

SEQ ID NO: 9439 - DNA, 32 bp, Artificial; identical to SEQ ID NO: 5595
  oligonucleotide probe

SEQ ID NO: 9440 - DNA, 32 bp, Artificial; identical to SEQ ID NO: 8776
  oligonucleotide probe

SEQ ID NO: 9441 - DNA, 32 bp, Artificial; identical to SEQ ID NO: 8777
  oligonucleotide probe

SEQ ID NO: 9442 - DNA, 32 bp, Artificial; identical to SEQ ID NO: 8784
  oligonucleotide probe

SEQ ID NO: 9443 - DNA, 32 bp, Artificial; identical to SEQ ID NO: 8785
  oligonucleotide probe

SEQ ID NO: 9444 - DNA, 32 bp, Artificial; identical to SEQ ID NO: 8868
  oligonucleotide probe

SEQ ID NO: 9445 - DNA, 32 bp, Artificial; identical to SEQ ID NO: 5584
  oligonucleotide probe

SEQ ID NO: 9446 - DNA, 32 bp, Artificial; identical to SEQ ID NO: 8778
  oligonucleotide probe

SEQ ID NO: 9447 - DNA, 32 bp, Artificial; identical to SEQ ID NO: 5564
  oligonucleotide probe

SEQ ID NO: 9448 - DNA, 32 bp, Artificial; identical to SEQ ID NO: 8766
  oligonucleotide probe

SEQ ID NO: 9449 - DNA, 32 bp, Artificial; identical to SEQ ID NO: 8767
  oligonucleotide probe

SEQ ID NO: 9450 - DNA, 32 bp, Artificial; identical to SEQ ID NO: 8804
  oligonucleotide probe

SEQ ID NO: 9451 - DNA, 32 bp, Artificial; identical to SEQ ID NO: 5565
  oligonucleotide probe

SEQ ID NO: 9452 - DNA, 32 bp, Artificial; identical to SEQ ID NO: 8762
  oligonucleotide probe

SEQ ID NO: 9453 - DNA, 32 bp, Artificial; identical to SEQ ID NO: 5539
  oligonucleotide probe

SEQ ID NO: 9454 - DNA, 32 bp, Artificial; identical to SEQ ID NO: 5547
  oligonucleotide probe

SEQ ID NO: 9455 - DNA, 32 bp, Artificial; identical to SEQ ID NO: 8753
  oligonucleotide probe

SEQ ID NO: 9456 - DNA, 32 bp, Artificial; identical to SEQ ID NO: 5546
  oligonucleotide probe

SEQ ID NO: 9457 - DNA, 32 bp, Artificial; identical to SEQ ID NO: 8757
  oligonucleotide probe

SEQ ID NO: 9458 - DNA, 32 bp, Artificial; identical to SEQ ID NO: 8778
  oligonucleotide probe

SEQ ID NO: 9459 - DNA, 32 bp, Artificial; identical to SEQ ID NO: 5564
  oligonucleotide probe

SEQ ID NO: 9460 - DNA, 32 bp, Artificial; identical to SEQ ID NO: 5546
  oligonucleotide probe

SEQ ID NO: 9461 - DNA, 32 bp, Artificial; identical to SEQ ID NO: 8757
  oligonucleotide probe

SEQ ID NO: 9462 - DNA, 32 bp, Artificial; identical to SEQ ID NO: 9020
  oligonucleotide probe

SEQ ID NO: 9463 - DNA, 32 bp, Artificial; identical to SEQ ID NO: 9021
  oligonucleotide probe

SEQ ID NO: 9464 - DNA, 32 bp, Artificial; identical to SEQ ID NO: 8776
  oligonucleotide probe

SEQ ID NO: 9465 - DNA, 32 bp, Artificial; identical to SEQ ID NO: 8777
  oligonucleotide probe

SEQ ID NO: 9466 - DNA, 32 bp, Artificial; identical to SEQ ID NO: 9038
  oligonucleotide probe

SEQ ID NO: 9467 - DNA, 32 bp, Artificial; identical to SEQ ID NO: 5594
  oligonucleotide probe

SEQ ID NO: 9468 - DNA, 32 bp, Artificial; identical to SEQ ID NO: 9020
  oligonucleotide probe

SEQ ID NO: 9469 - DNA, 32 bp, Artificial; identical to SEQ ID NO: 9021
  oligonucleotide probe

SEQ ID NO: 9470 - DNA, 32 bp, Artificial; identical to SEQ ID NO: 5547
  oligonucleotide probe

SEQ ID NO: 9471 - DNA, 32 bp, Artificial; identical to SEQ ID NO: 8753
  oligonucleotide probe

SEQ ID NO: 9472 - DNA, 32 bp, Artificial; identical to SEQ ID NO: 5547
  oligonucleotide probe

SEQ ID NO: 9473 - DNA, 32 bp, Artificial; identical to SEQ ID NO: 8753
  oligonucleotide probe

SEQ ID NO: 9474 - DNA, 32 bp, Artificial; identical to SEQ ID NO: 8776
  oligonucleotide probe

SEQ ID NO: 9475 - DNA, 32 bp, Artificial; identical to SEQ ID NO: 8777
  oligonucleotide probe

SEQ ID NO: 9476 - DNA, 32 bp, Artificial; identical to SEQ ID NO: 8804
  oligonucleotide probe

SEQ ID NO: 9477 - DNA, 32 bp, Artificial; identical to SEQ ID NO: 5565
  oligonucleotide probe

SEQ ID NO: 9478 - DNA, 32 bp, Artificial; identical to SEQ ID NO: 8762
  oligonucleotide probe

SEQ ID NO: 9479 - DNA, 32 bp, Artificial; identical to SEQ ID NO: 5539
  oligonucleotide probe

SEQ ID NO: 9480 - DNA, 32 bp, Artificial; identical to SEQ ID NO: 5546
  oligonucleotide probe

SEQ ID NO: 9481 - DNA, 32 bp, Artificial; identical to SEQ ID NO: 8757
  oligonucleotide probe

SEQ ID NO: 9482 - DNA, 32 bp, Artificial; identical to SEQ ID NO: 8804
  oligonucleotide probe

SEQ ID NO: 9483 - DNA, 32 bp, Artificial; identical to SEQ ID NO: 5565
  oligonucleotide probe

SEQ ID NO: 9484 - DNA, 32 bp, Artificial; identical to SEQ ID NO: 8760
  oligonucleotide probe

SEQ ID NO: 9485 - DNA, 32 bp, Artificial; identical to SEQ ID NO: 5537
  oligonucleotide probe

SEQ ID NO: 9486 - DNA, 32 bp, Artificial; identical to SEQ ID NO: 8750
  oligonucleotide probe

SEQ ID NO: 9487 - DNA, 32 bp, Artificial; identical to SEQ ID NO: 8751
  oligonucleotide probe

SEQ ID NO: 9488 - DNA, 32 bp, Artificial; identical to SEQ ID NO: 8776
  oligonucleotide probe

SEQ ID NO: 9489 - DNA, 32 bp, Artificial; identical to SEQ ID NO: 8777
  oligonucleotide probe

SEQ ID NO: 9490 - DNA, 32 bp, Artificial; identical to SEQ ID NO: 8760
  oligonucleotide probe

SEQ ID NO: 9491 - DNA, 32 bp, Artificial; identical to SEQ ID NO: 5537
  oligonucleotide probe

SEQ ID NO: 9492 - DNA, 32 bp, Artificial; identical to SEQ ID NO: 8868
  oligonucleotide probe

SEQ ID NO: 9493 - DNA, 32 bp, Artificial; identical to SEQ ID NO: 5584
  oligonucleotide probe

SEQ ID NO: 9494 - DNA, 32 bp, Artificial; identical to SEQ ID NO: 8780
  oligonucleotide probe

SEQ ID NO: 9495 - DNA, 32 bp, Artificial; identical to SEQ ID NO: 8781
  oligonucleotide probe

SEQ ID NO: 9496 - DNA, 32 bp, Artificial; identical to SEQ ID NO: 5546
  oligonucleotide probe

SEQ ID NO: 9497 - DNA, 32 bp, Artificial; identical to SEQ ID NO: 8757
  oligonucleotide probe

SEQ ID NO: 9498 - DNA, 32 bp, Artificial; identical to SEQ ID NO: 5546
  oligonucleotide probe

SEQ ID NO: 9499 - DNA, 32 bp, Artificial; identical to SEQ ID NO: 8757
  oligonucleotide probe

SEQ ID NO: 9500 - DNA, 32 bp, Artificial; identical to SEQ ID NO: 8780
  oligonucleotide probe

SEQ ID NO: 9501 - DNA, 32 bp, Artificial; identical to SEQ ID NO: 8781
  oligonucleotide probe

SEQ ID NO: 9502 - DNA, 32 bp, Artificial; identical to SEQ ID NO: 8780
  oligonucleotide probe

SEQ ID NO: 9503 - DNA, 32 bp, Artificial; identical to SEQ ID NO: 8781
  oligonucleotide probe

SEQ ID NO: 9504 - DNA, 32 bp, Artificial; identical to SEQ ID NO: 8760
  oligonucleotide probe

SEQ ID NO: 9505 - DNA, 32 bp, Artificial; identical to SEQ ID NO: 5537
  oligonucleotide probe

SEQ ID NO: 9506 - DNA, 32 bp, Artificial; identical to SEQ ID NO: 8778
  oligonucleotide probe

SEQ ID NO: 9507 - DNA, 32 bp, Artificial; identical to SEQ ID NO: 5564
  oligonucleotide probe

SEQ ID NO: 9508 - DNA, 32 bp, Artificial; identical to SEQ ID NO: 5546
  oligonucleotide probe

SEQ ID NO: 9509 - DNA, 32 bp, Artificial; identical to SEQ ID NO: 8757
  oligonucleotide probe

SEQ ID NO: 9510 - DNA, 32 bp, Artificial; identical to SEQ ID NO: 5546
  oligonucleotide probe

SEQ ID NO: 9511 - DNA, 32 bp, Artificial; identical to SEQ ID NO: 8757
  oligonucleotide probe

SEQ ID NO: 9512 - DNA, 32 bp, Artificial; identical to SEQ ID NO: 5547
  oligonucleotide probe

SEQ ID NO: 9513 - DNA, 32 bp, Artificial; identical to SEQ ID NO: 8753
  oligonucleotide probe

SEQ ID NO: 9514 - DNA, 32 bp, Artificial; identical to SEQ ID NO: 8776
  oligonucleotide probe

SEQ ID NO: 9515 - DNA, 32 bp, Artificial; identical to SEQ ID NO: 8777
  oligonucleotide probe

SEQ ID NO: 9516 - DNA, 32 bp, Artificial; identical to SEQ ID NO: 8804
  oligonucleotide probe

SEQ ID NO: 9517 - DNA, 32 bp, Artificial; identical to SEQ ID NO: 5565
  oligonucleotide probe

SEQ ID NO: 9518 - DNA, 32 bp, Artificial; identical to SEQ ID NO: 8784
  oligonucleotide probe

SEQ ID NO: 9519 - DNA, 32 bp, Artificial; identical to SEQ ID NO: 8785
  oligonucleotide probe

SEQ ID NO: 9520 - DNA, 32 bp, Artificial; identical to SEQ ID NO: 9252
  oligonucleotide probe

SEQ ID NO: 9521 - DNA, 32 bp, Artificial; identical to SEQ ID NO: 9253
  oligonucleotide probe

SEQ ID NO: 9522 - DNA, 32 bp, Artificial; identical to SEQ ID NO: 5547
  oligonucleotide probe

SEQ ID NO: 9523 - DNA, 32 bp, Artificial; identical to SEQ ID NO: 8753
  oligonucleotide probe

SEQ ID NO: 9524 - DNA, 32 bp, Artificial; identical to SEQ ID NO: 9020
  oligonucleotide probe

SEQ ID NO: 9525 - DNA, 32 bp, Artificial; identical to SEQ ID NO: 9021
  oligonucleotide probe

SEQ ID NO: 9526 - DNA, 32 bp, Artificial; identical to SEQ ID NO: 8750
  oligonucleotide probe

SEQ ID NO: 9527 - DNA, 32 bp, Artificial; identical to SEQ ID NO: 8751
  oligonucleotide probe

SEQ ID NO: 9528 - DNA, 32 bp, Artificial; identical to SEQ ID NO: 5546
  oligonucleotide probe

SEQ ID NO: 9529 - DNA, 32 bp, Artificial; identical to SEQ ID NO: 8757
  oligonucleotide probe

SEQ ID NO: 9530 - DNA, 32 bp, Artificial; identical to SEQ ID NO: 8750
  oligonucleotide probe

SEQ ID NO: 9531 - DNA, 32 bp, Artificial; identical to SEQ ID NO: 8751
  oligonucleotide probe

SEQ ID NO: 9532 - DNA, 32 bp, Artificial; identical to SEQ ID NO: 8760
  oligonucleotide probe

SEQ ID NO: 9533 - DNA, 32 bp, Artificial; identical to SEQ ID NO: 5537
  oligonucleotide probe

SEQ ID NO: 9534 - DNA, 32 bp, Artificial; identical to SEQ ID NO: 8936
  oligonucleotide probe

SEQ ID NO: 9535 - DNA, 32 bp, Artificial; identical to SEQ ID NO: 5595
  oligonucleotide probe

SEQ ID NO: 9536 - DNA, 32 bp, Artificial; identical to SEQ ID NO: 8776
  oligonucleotide probe

SEQ ID NO: 9537 - DNA, 32 bp, Artificial; identical to SEQ ID NO: 8777
  oligonucleotide probe

SEQ ID NO: 9538 - DNA, 32 bp, Artificial; identical to SEQ ID NO: 8784
  oligonucleotide probe

SEQ ID NO: 9539 - DNA, 32 bp, Artificial; identical to SEQ ID NO: 8785
  oligonucleotide probe

SEQ ID NO: 9540 - DNA, 32 bp, Artificial; identical to SEQ ID NO: 8778
  oligonucleotide probe

SEQ ID NO: 9541 - DNA, 32 bp, Artificial; identical to SEQ ID NO: 5564
  oligonucleotide probe

SEQ ID NO: 9542 - DNA, 32 bp, Artificial; identical to SEQ ID NO: 8784
  oligonucleotide probe

SEQ ID NO: 9543 - DNA, 32 bp, Artificial; identical to SEQ ID NO: 8785
  oligonucleotide probe

SEQ ID NO: 9544 - DNA, 32 bp, Artificial; identical to SEQ ID NO: 8760
  oligonucleotide probe

SEQ ID NO: 9545 - DNA, 32 bp, Artificial; identical to SEQ ID NO: 5537
  oligonucleotide probe

SEQ ID NO: 9546 - DNA, 32 bp, Artificial; identical to SEQ ID NO: 8804
  oligonucleotide probe

SEQ ID NO: 9547 - DNA, 32 bp, Artificial; identical to SEQ ID NO: 5565
  oligonucleotide probe

SEQ ID NO: 9548 - DNA, 32 bp, Artificial; identical to SEQ ID NO: 9020
  oligonucleotide probe

SEQ ID NO: 9549 - DNA, 32 bp, Artificial; identical to SEQ ID NO: 9021
  oligonucleotide probe

SEQ ID NO: 9550 - DNA, 32 bp, Artificial; identical to SEQ ID NO: 8780
  oligonucleotide probe

SEQ ID NO: 9551 - DNA, 32 bp, Artificial; identical to SEQ ID NO: 8781
  oligonucleotide probe

SEQ ID NO: 9552 - DNA, 32 bp, Artificial; identical to SEQ ID NO: 8804
  oligonucleotide probe

SEQ ID NO: 9553 - DNA, 32 bp, Artificial; identical to SEQ ID NO: 5565
  oligonucleotide probe

SEQ ID NO: 9554 - DNA, 32 bp, Artificial; identical to SEQ ID NO: 8778
  oligonucleotide probe

SEQ ID NO: 9555 - DNA, 32 bp, Artificial; identical to SEQ ID NO: 5564
  oligonucleotide probe

SEQ ID NO: 9556 - DNA, 32 bp, Artificial; identical to SEQ ID NO: 8760
  oligonucleotide probe

SEQ ID NO: 9557 - DNA, 32 bp, Artificial; identical to SEQ ID NO: 5537
  oligonucleotide probe

SEQ ID NO: 9558 - DNA, 32 bp, Artificial; identical to SEQ ID NO: 8804
  oligonucleotide probe

SEQ ID NO: 9559 - DNA, 32 bp, Artificial; identical to SEQ ID NO: 5565
  oligonucleotide probe

SEQ ID NO: 9560 - DNA, 32 bp, Artificial; identical to SEQ ID NO: 5547
  oligonucleotide probe

SEQ ID NO: 9561 - DNA, 32 bp, Artificial; identical to SEQ ID NO: 8753
  oligonucleotide probe

SEQ ID NO: 9562 - DNA, 32 bp, Artificial; identical to SEQ ID NO: 8748
  oligonucleotide probe

SEQ ID NO: 9563 - DNA, 32 bp, Artificial; identical to SEQ ID NO: 8749
  oligonucleotide probe

SEQ ID NO: 9564 - DNA, 32 bp, Artificial; identical to SEQ ID NO: 8778
  oligonucleotide probe

SEQ ID NO: 9565 - DNA, 32 bp, Artificial; identical to SEQ ID NO: 5564
  oligonucleotide probe

SEQ ID NO: 9566 - DNA, 32 bp, Artificial; identical to SEQ ID NO: 5546
  oligonucleotide probe

SEQ ID NO: 9567 - DNA, 32 bp, Artificial; identical to SEQ ID NO: 8757
  oligonucleotide probe

SEQ ID NO: 9568 - DNA, 32 bp, Artificial; identical to SEQ ID NO: 8750
  oligonucleotide probe

SEQ ID NO: 9569 - DNA, 32 bp, Artificial; identical to SEQ ID NO: 8751
  oligonucleotide probe

SEQ ID NO: 9570 - DNA, 32 bp, Artificial; identical to SEQ ID NO: 8760
  oligonucleotide probe

SEQ ID NO: 9571 - DNA, 32 bp, Artificial; identical to SEQ ID NO: 5537
  oligonucleotide probe

SEQ ID NO: 9572 - DNA, 32 bp, Artificial; identical to SEQ ID NO: 5546
  oligonucleotide probe

SEQ ID NO: 9573 - DNA, 32 bp, Artificial; identical to SEQ ID NO: 8757
  oligonucleotide probe

SEQ ID NO: 9574 - DNA, 32 bp, Artificial; identical to SEQ ID NO: 5546
  oligonucleotide probe

SEQ ID NO: 9575 - DNA, 32 bp, Artificial; identical to SEQ ID NO: 8757
  oligonucleotide probe

SEQ ID NO: 9576 - DNA, 32 bp, Artificial; identical to SEQ ID NO: 5546
  oligonucleotide probe

SEQ ID NO: 9577 - DNA, 32 bp, Artificial; identical to SEQ ID NO: 8757
  oligonucleotide probe

SEQ ID NO: 9578 - DNA, 32 bp, Artificial; identical to SEQ ID NO: 5546
  oligonucleotide probe

SEQ ID NO: 9579 - DNA, 32 bp, Artificial; identical to SEQ ID NO: 8757
  oligonucleotide probe

SEQ ID NO: 9580 - DNA, 32 bp, Artificial; identical to SEQ ID NO: 8834
  oligonucleotide probe

SEQ ID NO: 9581 - DNA, 32 bp, Artificial; identical to SEQ ID NO: 8835
  oligonucleotide probe

SEQ ID NO: 9582 - DNA, 32 bp, Artificial; identical to SEQ ID NO: 5546
  oligonucleotide probe

SEQ ID NO: 9583 - DNA, 32 bp, Artificial; identical to SEQ ID NO: 8757
  oligonucleotide probe

SEQ ID NO: 9584 - DNA, 32 bp, Artificial; identical to SEQ ID NO: 8778
  oligonucleotide probe

SEQ ID NO: 9585 - DNA, 32 bp, Artificial; identical to SEQ ID NO: 5564
  oligonucleotide probe

SEQ ID NO: 9586 - DNA, 32 bp, Artificial; identical to SEQ ID NO: 8776
  oligonucleotide probe

SEQ ID NO: 9587 - DNA, 32 bp, Artificial; identical to SEQ ID NO: 8777
  oligonucleotide probe

SEQ ID NO: 9588 - DNA, 32 bp, Artificial; identical to SEQ ID NO: 5546
  oligonucleotide probe

SEQ ID NO: 9589 - DNA, 32 bp, Artificial; identical to SEQ ID NO: 8757
  oligonucleotide probe

SEQ ID NO: 9590 - DNA, 32 bp, Artificial; identical to SEQ ID NO: 8868
  oligonucleotide probe

SEQ ID NO: 9591 - DNA, 32 bp, Artificial; identical to SEQ ID NO: 5584
  oligonucleotide probe

SEQ ID NO: 9592 - DNA, 32 bp, Artificial; identical to SEQ ID NO: 8804
  oligonucleotide probe

SEQ ID NO: 9593 - DNA, 32 bp, Artificial; identical to SEQ ID NO: 5565
  oligonucleotide probe

SEQ ID NO: 9594 - DNA, 32 bp, Artificial; identical to SEQ ID NO: 8753
  oligonucleotide probe

SEQ ID NO: 9595 - DNA, 32 bp, Artificial; identical to SEQ ID NO: 8760
  oligonucleotide probe

SEQ ID NO: 9596 - DNA, 32 bp, Artificial; identical to SEQ ID NO: 8778
  oligonucleotide probe

SEQ ID NO: 9597 - DNA, 32 bp, Artificial; identical to SEQ ID NO: 5564
  oligonucleotide probe

SEQ ID NO: 9598 - DNA, 32 bp, Artificial; identical to SEQ ID NO: 5546
  oligonucleotide probe

SEQ ID NO: 9599 - DNA, 32 bp, Artificial; identical to SEQ ID NO: 8757
  oligonucleotide probe

SEQ ID NO: 9600 - DNA, 32 bp, Artificial; identical to SEQ ID NO: 5546
  oligonucleotide probe

SEQ ID NO: 9601 - DNA, 32 bp, Artificial; identical to SEQ ID NO: 8757
  oligonucleotide probe

SEQ ID NO: 9602 - DNA, 32 bp, Artificial; identical to SEQ ID NO: 8750
  oligonucleotide probe

SEQ ID NO: 9603 - DNA, 32 bp, Artificial; identical to SEQ ID NO: 8751
  oligonucleotide probe

SEQ ID NO: 9604 - DNA, 32 bp, Artificial; identical to SEQ ID NO: 8760
  oligonucleotide probe

SEQ ID NO: 9605 - DNA, 32 bp, Artificial; identical to SEQ ID NO: 5537
  oligonucleotide probe

SEQ ID NO: 9606 - DNA, 32 bp, Artificial; identical to SEQ ID NO: 8804
  oligonucleotide probe

SEQ ID NO: 9607 - DNA, 32 bp, Artificial; identical to SEQ ID NO: 5565
  oligonucleotide probe

SEQ ID NO: 9608 - DNA, 32 bp, Artificial; identical to SEQ ID NO: 8776
  oligonucleotide probe

SEQ ID NO: 9609 - DNA, 32 bp, Artificial; identical to SEQ ID NO: 8777
  oligonucleotide probe

SEQ ID NO: 9610 - DNA, 32 bp, Artificial; identical to SEQ ID NO: 8776
  oligonucleotide probe

SEQ ID NO: 9611 - DNA, 32 bp, Artificial; identical to SEQ ID NO: 8777
  oligonucleotide probe

SEQ ID NO: 9612 - DNA, 32 bp, Artificial; identical to SEQ ID NO: 8762
  oligonucleotide probe

SEQ ID NO: 9613 - DNA, 32 bp, Artificial; identical to SEQ ID NO: 5539
  oligonucleotide probe

SEQ ID NO: 9614 - DNA, 32 bp, Artificial; identical to SEQ ID NO: 8778
  oligonucleotide probe

SEQ ID NO: 9615 - DNA, 32 bp, Artificial; identical to SEQ ID NO: 5564
  oligonucleotide probe

SEQ ID NO: 9616 - DNA, 32 bp, Artificial; identical to SEQ ID NO: 8784
  oligonucleotide probe

SEQ ID NO: 9617 - DNA, 32 bp, Artificial; identical to SEQ ID NO: 8785
  oligonucleotide probe

SEQ ID NO: 9618 - DNA, 32 bp, Artificial; identical to SEQ ID NO: 5546
  oligonucleotide probe

SEQ ID NO: 9619 - DNA, 32 bp, Artificial; identical to SEQ ID NO: 8757
  oligonucleotide probe

SEQ ID NO: 9620 - DNA, 32 bp, Artificial; identical to SEQ ID NO: 8804
  oligonucleotide probe

SEQ ID NO: 9621 - DNA, 32 bp, Artificial; identical to SEQ ID NO: 5565
  oligonucleotide probe

SEQ ID NO: 9622 - DNA, 32 bp, Artificial; identical to SEQ ID NO: 8780
  oligonucleotide probe

SEQ ID NO: 9623 - DNA, 32 bp, Artificial; identical to SEQ ID NO: 8781
  oligonucleotide probe

SEQ ID NO: 9624 - DNA, 32 bp, Artificial; identical to SEQ ID NO: 8760
  oligonucleotide probe

SEQ ID NO: 9625 - DNA, 32 bp, Artificial; identical to SEQ ID NO: 5537
  oligonucleotide probe

SEQ ID NO: 9626 - DNA, 32 bp, Artificial; identical to SEQ ID NO: 8776
  oligonucleotide probe

SEQ ID NO: 9627 - DNA, 32 bp, Artificial; identical to SEQ ID NO: 8777
  oligonucleotide probe

SEQ ID NO: 9628 - DNA, 32 bp, Artificial; identical to SEQ ID NO: 8796
  oligonucleotide probe

SEQ ID NO: 9629 - DNA, 32 bp, Artificial; identical to SEQ ID NO: 5538
  oligonucleotide probe

SEQ ID NO: 9630 - DNA, 32 bp, Artificial; identical to SEQ ID NO: 8796
  oligonucleotide probe

SEQ ID NO: 9631 - DNA, 32 bp, Artificial; identical to SEQ ID NO: 5538
  oligonucleotide probe

SEQ ID NO: 9632 - DNA, 32 bp, Artificial; identical to SEQ ID NO: 8760
  oligonucleotide probe

SEQ ID NO: 9633 - DNA, 32 bp, Artificial; identical to SEQ ID NO: 5537
  oligonucleotide probe

SEQ ID NO: 9634 - DNA, 32 bp, Artificial; identical to SEQ ID NO: 5546
  oligonucleotide probe

SEQ ID NO: 9635 - DNA, 32 bp, Artificial; identical to SEQ ID NO: 8757
  oligonucleotide probe

SEQ ID NO: 9636 - DNA, 32 bp, Artificial; identical to SEQ ID NO: 8766
  oligonucleotide probe

SEQ ID NO: 9637 - DNA, 32 bp, Artificial; identical to SEQ ID NO: 8767
  oligonucleotide probe

SEQ ID NO: 9638 - DNA, 32 bp, Artificial; identical to SEQ ID NO: 8778
  oligonucleotide probe

SEQ ID NO: 9639 - DNA, 32 bp, Artificial; identical to SEQ ID NO: 5564
  oligonucleotide probe

SEQ ID NO: 9640 - DNA, 32 bp, Artificial; identical to SEQ ID NO: 8834
  oligonucleotide probe

SEQ ID NO: 9641 - DNA, 32 bp, Artificial; identical to SEQ ID NO: 8835
  oligonucleotide probe

SEQ ID NO: 9642 - DNA, 32 bp, Artificial; identical to SEQ ID NO: 8786
  oligonucleotide probe

SEQ ID NO: 9643 - DNA, 32 bp, Artificial; identical to SEQ ID NO: 5585
  oligonucleotide probe

SEQ ID NO: 9644 - DNA, 32 bp, Artificial; identical to SEQ ID NO: 8796
  oligonucleotide probe

SEQ ID NO: 9645 - DNA, 32 bp, Artificial; identical to SEQ ID NO: 5538
  oligonucleotide probe

SEQ ID NO: 9646 - DNA, 32 bp, Artificial; identical to SEQ ID NO: 8834
  oligonucleotide probe

SEQ ID NO: 9647 - DNA, 32 bp, Artificial; identical to SEQ ID NO: 8835
  oligonucleotide probe

SEQ ID NO: 9648 - DNA, 32 bp, Artificial; identical to SEQ ID NO: 8760
  oligonucleotide probe

SEQ ID NO: 9649 - DNA, 32 bp, Artificial; identical to SEQ ID NO: 5537
  oligonucleotide probe

SEQ ID NO: 9650 - DNA, 32 bp, Artificial; identical to SEQ ID NO: 8776
  oligonucleotide probe

SEQ ID NO: 9651 - DNA, 32 bp, Artificial; identical to SEQ ID NO: 8777
  oligonucleotide probe

SEQ ID NO: 9652 - DNA, 32 bp, Artificial; identical to SEQ ID NO: 8784
  oligonucleotide probe

SEQ ID NO: 9653 - DNA, 32 bp, Artificial; identical to SEQ ID NO: 8785
  oligonucleotide probe

SEQ ID NO: 9654 - DNA, 32 bp, Artificial; identical to SEQ ID NO: 8804
  oligonucleotide probe

SEQ ID NO: 9655 - DNA, 32 bp, Artificial; identical to SEQ ID NO: 5565
  oligonucleotide probe

SEQ ID NO: 9656 - DNA, 32 bp, Artificial; identical to SEQ ID NO: 5547
  oligonucleotide probe

SEQ ID NO: 9657 - DNA, 32 bp, Artificial; identical to SEQ ID NO: 8753
  oligonucleotide probe

SEQ ID NO: 9658 - DNA, 32 bp, Artificial; identical to SEQ ID NO: 9020
  oligonucleotide probe

SEQ ID NO: 9659 - DNA, 32 bp, Artificial; identical to SEQ ID NO: 9021
  oligonucleotide probe

SEQ ID NO: 9660 - DNA, 32 bp, Artificial; identical to SEQ ID NO: 8796
  oligonucleotide probe

SEQ ID NO: 9661 - DNA, 32 bp, Artificial; identical to SEQ ID NO: 5538
  oligonucleotide probe

SEQ ID NO: 9662 - DNA, 32 bp, Artificial; identical to SEQ ID NO: 5546
  oligonucleotide probe

SEQ ID NO: 9663 - DNA, 32 bp, Artificial; identical to SEQ ID NO: 8757
  oligonucleotide probe

SEQ ID NO: 9664 - DNA, 32 bp, Artificial; identical to SEQ ID NO: 8868
  oligonucleotide probe

SEQ ID NO: 9665 - DNA, 32 bp, Artificial; identical to SEQ ID NO: 5584
  oligonucleotide probe

SEQ ID NO: 9666 - DNA, 32 bp, Artificial; identical to SEQ ID NO: 8760
  oligonucleotide probe

SEQ ID NO: 9667 - DNA, 32 bp, Artificial; identical to SEQ ID NO: 5537
  oligonucleotide probe

SEQ ID NO: 9668 - DNA, 32 bp, Artificial; identical to SEQ ID NO: 8760
  oligonucleotide probe

SEQ ID NO: 9669 - DNA, 32 bp, Artificial; identical to SEQ ID NO: 5537
  oligonucleotide probe

SEQ ID NO: 9670 - DNA, 32 bp, Artificial; identical to SEQ ID NO: 5547
  oligonucleotide probe

SEQ ID NO: 9671 - DNA, 32 bp, Artificial; identical to SEQ ID NO: 8753
  oligonucleotide probe

SEQ ID NO: 9672 - DNA, 32 bp, Artificial; identical to SEQ ID NO: 8766
  oligonucleotide probe

SEQ ID NO: 9673 - DNA, 32 bp, Artificial; identical to SEQ ID NO: 8767
  oligonucleotide probe

SEQ ID NO: 9674 - DNA, 32 bp, Artificial; identical to SEQ ID NO: 8804
  oligonucleotide probe

SEQ ID NO: 9675 - DNA, 32 bp, Artificial; identical to SEQ ID NO: 5565
  oligonucleotide probe

SEQ ID NO: 9676 - DNA, 32 bp, Artificial; identical to SEQ ID NO: 8753
  oligonucleotide probe

SEQ ID NO: 9677 - DNA, 32 bp, Artificial; identical to SEQ ID NO: 8760
  oligonucleotide probe

SEQ ID NO: 9678 - DNA, 32 bp, Artificial; identical to SEQ ID NO: 8762
  oligonucleotide probe

SEQ ID NO: 9679 - DNA, 32 bp, Artificial; identical to SEQ ID NO: 5539
  oligonucleotide probe

SEQ ID NO: 9680 - DNA, 32 bp, Artificial; identical to SEQ ID NO: 8936
  oligonucleotide probe

SEQ ID NO: 9681 - DNA, 32 bp, Artificial; identical to SEQ ID NO: 5595
  oligonucleotide probe

SEQ ID NO: 9682 - DNA, 32 bp, Artificial; identical to SEQ ID NO: 5546
  oligonucleotide probe

SEQ ID NO: 9683 - DNA, 32 bp, Artificial; identical to SEQ ID NO: 8757
  oligonucleotide probe

SEQ ID NO: 9684 - DNA, 32 bp, Artificial; identical to SEQ ID NO: 8804
  oligonucleotide probe

SEQ ID NO: 9685 - DNA, 32 bp, Artificial; identical to SEQ ID NO: 5565
  oligonucleotide probe

SEQ ID NO: 9686 - DNA, 32 bp, Artificial; identical to SEQ ID NO: 8804
  oligonucleotide probe

SEQ ID NO: 9687 - DNA, 32 bp, Artificial; identical to SEQ ID NO: 5565
  oligonucleotide probe

SEQ ID NO: 9688 - DNA, 32 bp, Artificial; identical to SEQ ID NO: 8780
  oligonucleotide probe

SEQ ID NO: 9689 - DNA, 32 bp, Artificial; identical to SEQ ID NO: 8781
  oligonucleotide probe

SEQ ID NO: 9690 - DNA, 32 bp, Artificial; identical to SEQ ID NO: 8748
  oligonucleotide probe

SEQ ID NO: 9691 - DNA, 32 bp, Artificial; identical to SEQ ID NO: 8749
  oligonucleotide probe

SEQ ID NO: 9692 - DNA, 32 bp, Artificial; identical to SEQ ID NO: 8784
  oligonucleotide probe

SEQ ID NO: 9693 - DNA, 32 bp, Artificial; identical to SEQ ID NO: 8785
  oligonucleotide probe

SEQ ID NO: 9694 - DNA, 32 bp, Artificial; identical to SEQ ID NO: 5547
  oligonucleotide probe

SEQ ID NO: 9695 - DNA, 32 bp, Artificial; identical to SEQ ID NO: 8753
  oligonucleotide probe

SEQ ID NO: 9696 - DNA, 32 bp, Artificial; identical to SEQ ID NO: 8868
  oligonucleotide probe

SEQ ID NO: 9697 - DNA, 32 bp, Artificial; identical to SEQ ID NO: 5584
  oligonucleotide probe

SEQ ID NO: 9698 - DNA, 32 bp, Artificial; identical to SEQ ID NO: 8784
  oligonucleotide probe

SEQ ID NO: 9699 - DNA, 32 bp, Artificial; identical to SEQ ID NO: 8785
  oligonucleotide probe

SEQ ID NO: 9700 - DNA, 32 bp, Artificial; identical to SEQ ID NO: 8786
  oligonucleotide probe

SEQ ID NO: 9701 - DNA, 32 bp, Artificial; identical to SEQ ID NO: 5585
  oligonucleotide probe

SEQ ID NO: 9702 - DNA, 32 bp, Artificial; identical to SEQ ID NO: 8748
  oligonucleotide probe

SEQ ID NO: 9703 - DNA, 32 bp, Artificial; identical to SEQ ID NO: 8749
  oligonucleotide probe

SEQ ID NO: 9704 - DNA, 32 bp, Artificial; identical to SEQ ID NO: 9038
  oligonucleotide probe

SEQ ID NO: 9705 - DNA, 32 bp, Artificial; identical to SEQ ID NO: 5594
  oligonucleotide probe

SEQ ID NO: 9706 - DNA, 32 bp, Artificial; identical to SEQ ID NO: 5547
  oligonucleotide probe

SEQ ID NO: 9707 - DNA, 32 bp, Artificial; identical to SEQ ID NO: 8753
  oligonucleotide probe

SEQ ID NO: 9708 - DNA, 32 bp, Artificial; identical to SEQ ID NO: 8804
  oligonucleotide probe

SEQ ID NO: 9709 - DNA, 32 bp, Artificial; identical to SEQ ID NO: 5565
  oligonucleotide probe

SEQ ID NO: 9710 - DNA, 32 bp, Artificial; identical to SEQ ID NO: 5546
  oligonucleotide probe

SEQ ID NO: 9711 - DNA, 32 bp, Artificial; identical to SEQ ID NO: 8757
  oligonucleotide probe

SEQ ID NO: 9712 - DNA, 32 bp, Artificial; identical to SEQ ID NO: 8776
  oligonucleotide probe

SEQ ID NO: 9713 - DNA, 32 bp, Artificial; identical to SEQ ID NO: 8777
  oligonucleotide probe

SEQ ID NO: 9714 - DNA, 32 bp, Artificial; identical to SEQ ID NO: 8784
  oligonucleotide probe

SEQ ID NO: 9715 - DNA, 32 bp, Artificial; identical to SEQ ID NO: 8785
  oligonucleotide probe

SEQ ID NO: 9716 - DNA, 32 bp, Artificial; identical to SEQ ID NO: 5546
  oligonucleotide probe

SEQ ID NO: 9717 - DNA, 32 bp, Artificial; identical to SEQ ID NO: 8757
  oligonucleotide probe

SEQ ID NO: 9718 - DNA, 32 bp, Artificial; identical to SEQ ID NO: 8796
  oligonucleotide probe

SEQ ID NO: 9719 - DNA, 32 bp, Artificial; identical to SEQ ID NO: 5538
  oligonucleotide probe

SEQ ID NO: 9720 - DNA, 32 bp, Artificial; identical to SEQ ID NO: 5547
  oligonucleotide probe

SEQ ID NO: 9721 - DNA, 32 bp, Artificial; identical to SEQ ID NO: 8753
  oligonucleotide probe

SEQ ID NO: 9722 - DNA, 32 bp, Artificial; identical to SEQ ID NO: 8784
  oligonucleotide probe

SEQ ID NO: 9723 - DNA, 32 bp, Artificial; identical to SEQ ID NO: 8785
  oligonucleotide probe

SEQ ID NO: 9724 - DNA, 32 bp, Artificial; identical to SEQ ID NO: 8784
  oligonucleotide probe

SEQ ID NO: 9725 - DNA, 32 bp, Artificial; identical to SEQ ID NO: 8785
  oligonucleotide probe

SEQ ID NO: 9726 - DNA, 32 bp, Artificial; identical to SEQ ID NO: 5547
  oligonucleotide probe

SEQ ID NO: 9727 - DNA, 32 bp, Artificial; identical to SEQ ID NO: 8753
  oligonucleotide probe

SEQ ID NO: 9728 - DNA, 32 bp, Artificial; identical to SEQ ID NO: 8780
  oligonucleotide probe

SEQ ID NO: 9729 - DNA, 32 bp, Artificial; identical to SEQ ID NO: 8781
  oligonucleotide probe

SEQ ID NO: 9730 - DNA, 32 bp, Artificial; identical to SEQ ID NO: 8760
  oligonucleotide probe

SEQ ID NO: 9731 - DNA, 32 bp, Artificial; identical to SEQ ID NO: 5537
  oligonucleotide probe

SEQ ID NO: 9732 - DNA, 32 bp, Artificial; identical to SEQ ID NO: 5546
  oligonucleotide probe

SEQ ID NO: 9733 - DNA, 32 bp, Artificial; identical to SEQ ID NO: 8757
  oligonucleotide probe

SEQ ID NO: 9734 - DNA, 32 bp, Artificial; identical to SEQ ID NO: 8796
  oligonucleotide probe

SEQ ID NO: 9735 - DNA, 32 bp, Artificial; identical to SEQ ID NO: 5538
  oligonucleotide probe

SEQ ID NO: 9736 - DNA, 32 bp, Artificial; identical to SEQ ID NO: 5547
  oligonucleotide probe

SEQ ID NO: 9737 - DNA, 32 bp, Artificial; identical to SEQ ID NO: 8753
  oligonucleotide probe

SEQ ID NO: 9738 - DNA, 32 bp, Artificial; identical to SEQ ID NO: 5546
  oligonucleotide probe

SEQ ID NO: 9739 - DNA, 32 bp, Artificial; identical to SEQ ID NO: 8757
  oligonucleotide probe

SEQ ID NO: 9740 - DNA, 32 bp, Artificial; identical to SEQ ID NO: 8868
  oligonucleotide probe

SEQ ID NO: 9741 - DNA, 32 bp, Artificial; identical to SEQ ID NO: 5584
  oligonucleotide probe

SEQ ID NO: 9742 - DNA, 32 bp, Artificial; identical to SEQ ID NO: 8760
  oligonucleotide probe

SEQ ID NO: 9743 - DNA, 32 bp, Artificial; identical to SEQ ID NO: 5537
  oligonucleotide probe

SEQ ID NO: 9744 - DNA, 32 bp, Artificial; identical to SEQ ID NO: 8762
  oligonucleotide probe

SEQ ID NO: 9745 - DNA, 32 bp, Artificial; identical to SEQ ID NO: 5539
  oligonucleotide probe

SEQ ID NO: 9746 - DNA, 32 bp, Artificial; identical to SEQ ID NO: 5547
  oligonucleotide probe

SEQ ID NO: 9747 - DNA, 32 bp, Artificial; identical to SEQ ID NO: 8753
  oligonucleotide probe

SEQ ID NO: 9748 - DNA, 32 bp, Artificial; identical to SEQ ID NO: 8748
  oligonucleotide probe

SEQ ID NO: 9749 - DNA, 32 bp, Artificial; identical to SEQ ID NO: 8749
  oligonucleotide probe

SEQ ID NO: 9750 - DNA, 32 bp, Artificial; identical to SEQ ID NO: 8778
  oligonucleotide probe

SEQ ID NO: 9751 - DNA, 32 bp, Artificial; identical to SEQ ID NO: 5564
  oligonucleotide probe

SEQ ID NO: 9752 - DNA, 32 bp, Artificial; identical to SEQ ID NO: 8784
  oligonucleotide probe

SEQ ID NO: 9753 - DNA, 32 bp, Artificial; identical to SEQ ID NO: 8785
  oligonucleotide probe

SEQ ID NO: 9754 - DNA, 32 bp, Artificial; identical to SEQ ID NO: 8750
  oligonucleotide probe

SEQ ID NO: 9755 - DNA, 32 bp, Artificial; identical to SEQ ID NO: 8751
  oligonucleotide probe

SEQ ID NO: 9756 - DNA, 32 bp, Artificial; identical to SEQ ID NO: 5546
  oligonucleotide probe

SEQ ID NO: 9757 - DNA, 32 bp, Artificial; identical to SEQ ID NO: 8757
  oligonucleotide probe

SEQ ID NO: 9758 - DNA, 32 bp, Artificial; identical to SEQ ID NO: 5537
  oligonucleotide probe

SEQ ID NO: 9759 - DNA, 32 bp, Artificial; identical to SEQ ID NO: 5537
  oligonucleotide probe

SEQ ID NO: 9760 - DNA, 32 bp, Artificial; identical to SEQ ID NO: 8748
  oligonucleotide probe

SEQ ID NO: 9761 - DNA, 32 bp, Artificial; identical to SEQ ID NO: 8749
  oligonucleotide probe

SEQ ID NO: 9762 - DNA, 32 bp, Artificial; identical to SEQ ID NO: 8760
  oligonucleotide probe

SEQ ID NO: 9763 - DNA, 32 bp, Artificial; identical to SEQ ID NO: 5537
  oligonucleotide probe

SEQ ID NO: 9764 - DNA, 32 bp, Artificial; identical to SEQ ID NO: 8760
  oligonucleotide probe

SEQ ID NO: 9765 - DNA, 32 bp, Artificial; identical to SEQ ID NO: 5537
  oligonucleotide probe

SEQ ID NO: 9766 - DNA, 32 bp, Artificial; identical to SEQ ID NO: 8750
  oligonucleotide probe

SEQ ID NO: 9767 - DNA, 32 bp, Artificial; identical to SEQ ID NO: 8751
  oligonucleotide probe

SEQ ID NO: 9768 - DNA, 32 bp, Artificial; identical to SEQ ID NO: 8760
  oligonucleotide probe

SEQ ID NO: 9769 - DNA, 32 bp, Artificial; identical to SEQ ID NO: 5537
  oligonucleotide probe

SEQ ID NO: 9770 - DNA, 32 bp, Artificial; identical to SEQ ID NO: 8784
  oligonucleotide probe

SEQ ID NO: 9771 - DNA, 32 bp, Artificial; identical to SEQ ID NO: 8785
  oligonucleotide probe

SEQ ID NO: 9772 - DNA, 32 bp, Artificial; identical to SEQ ID NO: 8780
  oligonucleotide probe

SEQ ID NO: 9773 - DNA, 32 bp, Artificial; identical to SEQ ID NO: 8781
  oligonucleotide probe

SEQ ID NO: 9774 - DNA, 32 bp, Artificial; identical to SEQ ID NO: 8796
  oligonucleotide probe

SEQ ID NO: 9775 - DNA, 32 bp, Artificial; identical to SEQ ID NO: 5538
  oligonucleotide probe

SEQ ID NO: 9776 - DNA, 32 bp, Artificial; identical to SEQ ID NO: 9038
  oligonucleotide probe

SEQ ID NO: 9777 - DNA, 32 bp, Artificial; identical to SEQ ID NO: 5594
  oligonucleotide probe

SEQ ID NO: 9778 - DNA, 32 bp, Artificial; identical to SEQ ID NO: 8796
  oligonucleotide probe

SEQ ID NO: 9779 - DNA, 32 bp, Artificial; identical to SEQ ID NO: 5538
  oligonucleotide probe

SEQ ID NO: 9780 - DNA, 32 bp, Artificial; identical to SEQ ID NO: 5547
  oligonucleotide probe

SEQ ID NO: 9781 - DNA, 32 bp, Artificial; identical to SEQ ID NO: 8753
  oligonucleotide probe

SEQ ID NO: 9782 - DNA, 32 bp, Artificial; identical to SEQ ID NO: 5547
  oligonucleotide probe

SEQ ID NO: 9783 - DNA, 32 bp, Artificial; identical to SEQ ID NO: 8753
  oligonucleotide probe

SEQ ID NO: 9784 - DNA, 32 bp, Artificial; identical to SEQ ID NO: 8762
  oligonucleotide probe

SEQ ID NO: 9785 - DNA, 32 bp, Artificial; identical to SEQ ID NO: 5539
  oligonucleotide probe

SEQ ID NO: 9786 - DNA, 32 bp, Artificial; identical to SEQ ID NO: 8776
  oligonucleotide probe

SEQ ID NO: 9787 - DNA, 32 bp, Artificial; identical to SEQ ID NO: 8777
  oligonucleotide probe

SEQ ID NO: 9788 - DNA, 32 bp, Artificial; identical to SEQ ID NO: 8760
  oligonucleotide probe

SEQ ID NO: 9789 - DNA, 32 bp, Artificial; identical to SEQ ID NO: 5537
  oligonucleotide probe

SEQ ID NO: 9790 - DNA, 32 bp, Artificial; identical to SEQ ID NO: 8786
  oligonucleotide probe

SEQ ID NO: 9791 - DNA, 32 bp, Artificial; identical to SEQ ID NO: 5585
  oligonucleotide probe

SEQ ID NO: 9792 - DNA, 32 bp, Artificial; identical to SEQ ID NO: 5546
  oligonucleotide probe

SEQ ID NO: 9793 - DNA, 32 bp, Artificial; identical to SEQ ID NO: 8757
  oligonucleotide probe

SEQ ID NO: 9794 - DNA, 32 bp, Artificial; identical to SEQ ID NO: 8796
  oligonucleotide probe

SEQ ID NO: 9795 - DNA, 32 bp, Artificial; identical to SEQ ID NO: 5538
  oligonucleotide probe

SEQ ID NO: 9796 - DNA, 32 bp, Artificial; identical to SEQ ID NO: 8784
  oligonucleotide probe

SEQ ID NO: 9797 - DNA, 32 bp, Artificial; identical to SEQ ID NO: 8785
  oligonucleotide probe

SEQ ID NO: 9798 - DNA, 32 bp, Artificial; identical to SEQ ID NO: 5546
  oligonucleotide probe

SEQ ID NO: 9799 - DNA, 32 bp, Artificial; identical to SEQ ID NO: 8757
  oligonucleotide probe

SEQ ID NO: 9800 - DNA, 32 bp, Artificial; identical to SEQ ID NO: 8804
  oligonucleotide probe

SEQ ID NO: 9801 - DNA, 32 bp, Artificial; identical to SEQ ID NO: 5565
  oligonucleotide probe

SEQ ID NO: 9802 - DNA, 32 bp, Artificial; identical to SEQ ID NO: 8750
  oligonucleotide probe

SEQ ID NO: 9803 - DNA, 32 bp, Artificial; identical to SEQ ID NO: 8751
  oligonucleotide probe

SEQ ID NO: 9804 - DNA, 32 bp, Artificial; identical to SEQ ID NO: 5547
  oligonucleotide probe

SEQ ID NO: 9805 - DNA, 32 bp, Artificial; identical to SEQ ID NO: 8753
  oligonucleotide probe

SEQ ID NO: 9806 - DNA, 32 bp, Artificial; identical to SEQ ID NO: 8748
  oligonucleotide probe

SEQ ID NO: 9807 - DNA, 32 bp, Artificial; identical to SEQ ID NO: 8749
  oligonucleotide probe

SEQ ID NO: 9808 - DNA, 32 bp, Artificial; identical to SEQ ID NO: 8784
  oligonucleotide probe

SEQ ID NO: 9809 - DNA, 32 bp, Artificial; identical to SEQ ID NO: 8785
  oligonucleotide probe

SEQ ID NO: 9810 - DNA, 32 bp, Artificial; identical to SEQ ID NO: 5546
  oligonucleotide probe

SEQ ID NO: 9811 - DNA, 32 bp, Artificial; identical to SEQ ID NO: 8757
  oligonucleotide probe

SEQ ID NO: 9812 - DNA, 32 bp, Artificial; identical to SEQ ID NO: 8780
  oligonucleotide probe

SEQ ID NO: 9813 - DNA, 32 bp, Artificial; identical to SEQ ID NO: 8781
  oligonucleotide probe

SEQ ID NO: 9814 - DNA, 32 bp, Artificial; identical to SEQ ID NO: 8780
  oligonucleotide probe

SEQ ID NO: 9815 - DNA, 32 bp, Artificial; identical to SEQ ID NO: 8781
  oligonucleotide probe

SEQ ID NO: 9816 - DNA, 32 bp, Artificial; identical to SEQ ID NO: 8776
  oligonucleotide probe

SEQ ID NO: 9817 - DNA, 32 bp, Artificial; identical to SEQ ID NO: 8777
  oligonucleotide probe

SEQ ID NO: 9818 - DNA, 32 bp, Artificial; identical to SEQ ID NO: 8780
  oligonucleotide probe

SEQ ID NO: 9819 - DNA, 32 bp, Artificial; identical to SEQ ID NO: 8781
  oligonucleotide probe

SEQ ID NO: 9820 - DNA, 32 bp, Artificial; identical to SEQ ID NO: 9020
  oligonucleotide probe

SEQ ID NO: 9821 - DNA, 32 bp, Artificial; identical to SEQ ID NO: 9021
  oligonucleotide probe

SEQ ID NO: 9822 - DNA, 32 bp, Artificial; identical to SEQ ID NO: 8868
  oligonucleotide probe

SEQ ID NO: 9823 - DNA, 32 bp, Artificial; identical to SEQ ID NO: 5584
  oligonucleotide probe

SEQ ID NO: 9824 - DNA, 32 bp, Artificial; identical to SEQ ID NO: 8776
  oligonucleotide probe

SEQ ID NO: 9825 - DNA, 32 bp, Artificial; identical to SEQ ID NO: 8777
  oligonucleotide probe

SEQ ID NO: 9826 - DNA, 32 bp, Artificial
  oligonucleotide probe
ttgcaagcgtccgggagggattcgcgcaaacg

SEQ ID NO: 9827 - DNA, 32 bp, Artificial; identical to SEQ ID NO: 5610
  oligonucleotide probe

SEQ ID NO: 9828 - DNA, 32 bp, Artificial; identical to SEQ ID NO: 8748
  oligonucleotide probe

SEQ ID NO: 9829 - DNA, 32 bp, Artificial; identical to SEQ ID NO: 8749
  oligonucleotide probe

SEQ ID NO: 9830 - DNA, 32 bp, Artificial; identical to SEQ ID NO: 8784
  oligonucleotide probe

SEQ ID NO: 9831 - DNA, 32 bp, Artificial; identical to SEQ ID NO: 8785
  oligonucleotide probe

SEQ ID NO: 9832 - DNA, 32 bp, Artificial; identical to SEQ ID NO: 5546
  oligonucleotide probe

SEQ ID NO: 9833 - DNA, 32 bp, Artificial; identical to SEQ ID NO: 8757
  oligonucleotide probe

SEQ ID NO: 9834 - DNA, 32 bp, Artificial; identical to SEQ ID NO: 8776
  oligonucleotide probe

SEQ ID NO: 9835 - DNA, 32 bp, Artificial; identical to SEQ ID NO: 8777
  oligonucleotide probe

SEQ ID NO: 9836 - DNA, 32 bp, Artificial; identical to SEQ ID NO: 5547
  oligonucleotide probe

SEQ ID NO: 9837 - DNA, 32 bp, Artificial; identical to SEQ ID NO: 8753
  oligonucleotide probe

SEQ ID NO: 9838 - DNA, 32 bp, Artificial; identical to SEQ ID NO: 8760
  oligonucleotide probe

SEQ ID NO: 9839 - DNA, 32 bp, Artificial; identical to SEQ ID NO: 5537
  oligonucleotide probe

SEQ ID NO: 9840 - DNA, 32 bp, Artificial; identical to SEQ ID NO: 8760
  oligonucleotide probe

SEQ ID NO: 9841 - DNA, 32 bp, Artificial; identical to SEQ ID NO: 5537
  oligonucleotide probe

SEQ ID NO: 9842 - DNA, 32 bp, Artificial; identical to SEQ ID NO: 8776
  oligonucleotide probe

SEQ ID NO: 9843 - DNA, 32 bp, Artificial; identical to SEQ ID NO: 8777
  oligonucleotide probe

SEQ ID NO: 9844 - DNA, 32 bp, Artificial; identical to SEQ ID NO: 8804
  oligonucleotide probe

SEQ ID NO: 9845 - DNA, 32 bp, Artificial; identical to SEQ ID NO: 5565
  oligonucleotide probe

SEQ ID NO: 9846 - DNA, 32 bp, Artificial; identical to SEQ ID NO: 5547
  oligonucleotide probe

SEQ ID NO: 9847 - DNA, 32 bp, Artificial; identical to SEQ ID NO: 8753
  oligonucleotide probe

SEQ ID NO: 9848 - DNA, 32 bp, Artificial; identical to SEQ ID NO: 8804
  oligonucleotide probe

SEQ ID NO: 9849 - DNA, 32 bp, Artificial; identical to SEQ ID NO: 5565
  oligonucleotide probe

SEQ ID NO: 9850 - DNA, 32 bp, Artificial; identical to SEQ ID NO: 9314
  oligonucleotide probe

SEQ ID NO: 9851 - DNA, 32 bp, Artificial; identical to SEQ ID NO: 9315
  oligonucleotide probe

SEQ ID NO: 9852 - DNA, 32 bp, Artificial; identical to SEQ ID NO: 8780
  oligonucleotide probe

SEQ ID NO: 9853 - DNA, 32 bp, Artificial; identical to SEQ ID NO: 8781
  oligonucleotide probe

SEQ ID NO: 9854 - DNA, 32 bp, Artificial; identical to SEQ ID NO: 5546
  oligonucleotide probe

SEQ ID NO: 9855 - DNA, 32 bp, Artificial; identical to SEQ ID NO: 8757
  oligonucleotide probe

SEQ ID NO: 9856 - DNA, 32 bp, Artificial; identical to SEQ ID NO: 8784
  oligonucleotide probe

SEQ ID NO: 9857 - DNA, 32 bp, Artificial; identical to SEQ ID NO: 8785
  oligonucleotide probe

SEQ ID NO: 9858 - DNA, 32 bp, Artificial; identical to SEQ ID NO: 8760
  oligonucleotide probe

SEQ ID NO: 9859 - DNA, 32 bp, Artificial; identical to SEQ ID NO: 5537
  oligonucleotide probe

SEQ ID NO: 9860 - DNA, 32 bp, Artificial; identical to SEQ ID NO: 8936
  oligonucleotide probe

SEQ ID NO: 9861 - DNA, 32 bp, Artificial; identical to SEQ ID NO: 5595
  oligonucleotide probe

SEQ ID NO: 9862 - DNA, 32 bp, Artificial; identical to SEQ ID NO: 5547
  oligonucleotide probe

SEQ ID NO: 9863 - DNA, 32 bp, Artificial; identical to SEQ ID NO: 8753
  oligonucleotide probe

SEQ ID NO: 9864 - DNA, 32 bp, Artificial; identical to SEQ ID NO: 8784
  oligonucleotide probe

SEQ ID NO: 9865 - DNA, 32 bp, Artificial; identical to SEQ ID NO: 8785
  oligonucleotide probe

SEQ ID NO: 9866 - DNA, 32 bp, Artificial; identical to SEQ ID NO: 8778
  oligonucleotide probe

SEQ ID NO: 9867 - DNA, 32 bp, Artificial; identical to SEQ ID NO: 5564
  oligonucleotide probe

SEQ ID NO: 9868 - DNA, 32 bp, Artificial; identical to SEQ ID NO: 8760
  oligonucleotide probe

SEQ ID NO: 9869 - DNA, 32 bp, Artificial; identical to SEQ ID NO: 5537
  oligonucleotide probe

SEQ ID NO: 9870 - DNA, 32 bp, Artificial; identical to SEQ ID NO: 8760
  oligonucleotide probe

SEQ ID NO: 9871 - DNA, 32 bp, Artificial; identical to SEQ ID NO: 5537
  oligonucleotide probe

SEQ ID NO: 9872 - DNA, 32 bp, Artificial; identical to SEQ ID NO: 8804
  oligonucleotide probe

SEQ ID NO: 9873 - DNA, 32 bp, Artificial; identical to SEQ ID NO: 5565
  oligonucleotide probe

SEQ ID NO: 9874 - DNA, 32 bp, Artificial; identical to SEQ ID NO: 9020
  oligonucleotide probe

SEQ ID NO: 9875 - DNA, 32 bp, Artificial; identical to SEQ ID NO: 9021
  oligonucleotide probe

SEQ ID NO: 9876 - DNA, 32 bp, Artificial; identical to SEQ ID NO: 8776
  oligonucleotide probe

SEQ ID NO: 9877 - DNA, 32 bp, Artificial; identical to SEQ ID NO: 8777
  oligonucleotide probe

SEQ ID NO: 9878 - DNA, 32 bp, Artificial; identical to SEQ ID NO: 8766
  oligonucleotide probe

SEQ ID NO: 9879 - DNA, 32 bp, Artificial; identical to SEQ ID NO: 8767
  oligonucleotide probe

SEQ ID NO: 9880 - DNA, 32 bp, Artificial; identical to SEQ ID NO: 8780
  oligonucleotide probe

SEQ ID NO: 9881 - DNA, 32 bp, Artificial; identical to SEQ ID NO: 8781
  oligonucleotide probe

SEQ ID NO: 9882 - DNA, 32 bp, Artificial; identical to SEQ ID NO: 8784
  oligonucleotide probe

SEQ ID NO: 9883 - DNA, 32 bp, Artificial; identical to SEQ ID NO: 8785
  oligonucleotide probe

SEQ ID NO: 9884 - DNA, 32 bp, Artificial; identical to SEQ ID NO: 8750
  oligonucleotide probe

SEQ ID NO: 9885 - DNA, 32 bp, Artificial; identical to SEQ ID NO: 8751
  oligonucleotide probe

SEQ ID NO: 9886 - DNA, 32 bp, Artificial; identical to SEQ ID NO: 5547
  oligonucleotide probe

SEQ ID NO: 9887 - DNA, 32 bp, Artificial; identical to SEQ ID NO: 8753
  oligonucleotide probe

SEQ ID NO: 9888 - DNA, 32 bp, Artificial; identical to SEQ ID NO: 8784
  oligonucleotide probe

SEQ ID NO: 9889 - DNA, 32 bp, Artificial; identical to SEQ ID NO: 8785
  oligonucleotide probe

SEQ ID NO: 9890 - DNA, 32 bp, Artificial; identical to SEQ ID NO: 9020
  oligonucleotide probe

SEQ ID NO: 9891 - DNA, 32 bp, Artificial; identical to SEQ ID NO: 9021
  oligonucleotide probe

SEQ ID NO: 9892 - DNA, 32 bp, Artificial; identical to SEQ ID NO: 8780
  oligonucleotide probe

SEQ ID NO: 9893 - DNA, 32 bp, Artificial; identical to SEQ ID NO: 8781
  oligonucleotide probe

SEQ ID NO: 9894 - DNA, 32 bp, Artificial; identical to SEQ ID NO: 8868
  oligonucleotide probe

SEQ ID NO: 9895 - DNA, 32 bp, Artificial; identical to SEQ ID NO: 5584
  oligonucleotide probe

SEQ ID NO: 9896 - DNA, 32 bp, Artificial; identical to SEQ ID NO: 8936
  oligonucleotide probe

SEQ ID NO: 9897 - DNA, 32 bp, Artificial; identical to SEQ ID NO: 5595
  oligonucleotide probe

SEQ ID NO: 9898 - DNA, 32 bp, Artificial; identical to SEQ ID NO: 8750
  oligonucleotide probe

SEQ ID NO: 9899 - DNA, 32 bp, Artificial; identical to SEQ ID NO: 8751
  oligonucleotide probe

SEQ ID NO: 9900 - DNA, 32 bp, Artificial; identical to SEQ ID NO: 8778
  oligonucleotide probe

SEQ ID NO: 9901 - DNA, 32 bp, Artificial; identical to SEQ ID NO: 5564
  oligonucleotide probe

SEQ ID NO: 9902 - DNA, 32 bp, Artificial; identical to SEQ ID NO: 8796
  oligonucleotide probe

SEQ ID NO: 9903 - DNA, 32 bp, Artificial; identical to SEQ ID NO: 5538
  oligonucleotide probe

SEQ ID NO: 9904 - DNA, 32 bp, Artificial; identical to SEQ ID NO: 8784
  oligonucleotide probe

SEQ ID NO: 9905 - DNA, 32 bp, Artificial; identical to SEQ ID NO: 8785
  oligonucleotide probe

SEQ ID NO: 9906 - DNA, 32 bp, Artificial; identical to SEQ ID NO: 8750
  oligonucleotide probe

SEQ ID NO: 9907 - DNA, 32 bp, Artificial; identical to SEQ ID NO: 8751
  oligonucleotide probe

SEQ ID NO: 9908 - DNA, 32 bp, Artificial; identical to SEQ ID NO: 5547
  oligonucleotide probe

SEQ ID NO: 9909 - DNA, 32 bp, Artificial; identical to SEQ ID NO: 8753
  oligonucleotide probe

SEQ ID NO: 9910 - DNA, 32 bp, Artificial; identical to SEQ ID NO: 8760
  oligonucleotide probe

SEQ ID NO: 9911 - DNA, 32 bp, Artificial; identical to SEQ ID NO: 5537
  oligonucleotide probe

SEQ ID NO: 9912 - DNA, 32 bp, Artificial; identical to SEQ ID NO: 8778
  oligonucleotide probe

SEQ ID NO: 9913 - DNA, 32 bp, Artificial; identical to SEQ ID NO: 5564
  oligonucleotide probe

SEQ ID NO: 9914 - DNA, 32 bp, Artificial; identical to SEQ ID NO: 8784
  oligonucleotide probe

SEQ ID NO: 9915 - DNA, 32 bp, Artificial; identical to SEQ ID NO: 8785
  oligonucleotide probe

SEQ ID NO: 9916 - DNA, 32 bp, Artificial; identical to SEQ ID NO: 8760
  oligonucleotide probe

SEQ ID NO: 9917 - DNA, 32 bp, Artificial; identical to SEQ ID NO: 5537
  oligonucleotide probe

SEQ ID NO: 9918 - DNA, 32 bp, Artificial; identical to SEQ ID NO: 8784
  oligonucleotide probe

SEQ ID NO: 9919 - DNA, 32 bp, Artificial; identical to SEQ ID NO: 8785
  oligonucleotide probe

SEQ ID NO: 9920 - DNA, 32 bp, Artificial; identical to SEQ ID NO: 5546
  oligonucleotide probe

SEQ ID NO: 9921 - DNA, 32 bp, Artificial; identical to SEQ ID NO: 8757
  oligonucleotide probe

SEQ ID NO: 9922 - DNA, 32 bp, Artificial
  oligonucleotide probe
ttgcaagcgtccgggagcaccgcagctgcgtg

SEQ ID NO: 9923 - DNA, 32 bp, Artificial; identical to SEQ ID NO: 5611
  oligonucleotide probe

SEQ ID NO: 9924 - DNA, 32 bp, Artificial; identical to SEQ ID NO: 8778
  oligonucleotide probe

SEQ ID NO: 9925 - DNA, 32 bp, Artificial; identical to SEQ ID NO: 5564
  oligonucleotide probe

SEQ ID NO: 9926 - DNA, 32 bp, Artificial; identical to SEQ ID NO: 8748
  oligonucleotide probe

SEQ ID NO: 9927 - DNA, 32 bp, Artificial; identical to SEQ ID NO: 8749
  oligonucleotide probe

SEQ ID NO: 9928 - DNA, 32 bp, Artificial; identical to SEQ ID NO: 8784
  oligonucleotide probe

SEQ ID NO: 9929 - DNA, 32 bp, Artificial; identical to SEQ ID NO: 8785
  oligonucleotide probe

SEQ ID NO: 9930 - DNA, 32 bp, Artificial; identical to SEQ ID NO: 8750
  oligonucleotide probe

SEQ ID NO: 9931 - DNA, 32 bp, Artificial; identical to SEQ ID NO: 8751
  oligonucleotide probe

SEQ ID NO: 9932 - DNA, 32 bp, Artificial; identical to SEQ ID NO: 9038
  oligonucleotide probe

SEQ ID NO: 9933 - DNA, 32 bp, Artificial; identical to SEQ ID NO: 5594
  oligonucleotide probe

SEQ ID NO: 9934 - DNA, 32 bp, Artificial; identical to SEQ ID NO: 8762
  oligonucleotide probe

SEQ ID NO: 9935 - DNA, 32 bp, Artificial; identical to SEQ ID NO: 5539
  oligonucleotide probe

SEQ ID NO: 9936 - DNA, 32 bp, Artificial; identical to SEQ ID NO: 9020
  oligonucleotide probe

SEQ ID NO: 9937 - DNA, 32 bp, Artificial; identical to SEQ ID NO: 9021
  oligonucleotide probe

SEQ ID NO: 9938 - DNA, 32 bp, Artificial; identical to SEQ ID NO: 8776
  oligonucleotide probe

SEQ ID NO: 9939 - DNA, 32 bp, Artificial; identical to SEQ ID NO: 8777
  oligonucleotide probe

SEQ ID NO: 9940 - DNA, 32 bp, Artificial; identical to SEQ ID NO: 8766
  oligonucleotide probe

SEQ ID NO: 9941 - DNA, 32 bp, Artificial; identical to SEQ ID NO: 8767
  oligonucleotide probe

SEQ ID NO: 9942 - DNA, 32 bp, Artificial; identical to SEQ ID NO: 8778
  oligonucleotide probe

SEQ ID NO: 9943 - DNA, 32 bp, Artificial; identical to SEQ ID NO: 5564
  oligonucleotide probe

SEQ ID NO: 9944 - DNA, 32 bp, Artificial; identical to SEQ ID NO: 8784
  oligonucleotide probe

SEQ ID NO: 9945 - DNA, 32 bp, Artificial; identical to SEQ ID NO: 8785
  oligonucleotide probe

SEQ ID NO: 9946 - DNA, 32 bp, Artificial; identical to SEQ ID NO: 8780
  oligonucleotide probe

SEQ ID NO: 9947 - DNA, 32 bp, Artificial; identical to SEQ ID NO: 8781
  oligonucleotide probe

SEQ ID NO: 9948 - DNA, 32 bp, Artificial; identical to SEQ ID NO: 8796
  oligonucleotide probe

SEQ ID NO: 9949 - DNA, 32 bp, Artificial; identical to SEQ ID NO: 5538
  oligonucleotide probe

SEQ ID NO: 9950 - DNA, 32 bp, Artificial; identical to SEQ ID NO: 8760
  oligonucleotide probe

SEQ ID NO: 9951 - DNA, 32 bp, Artificial; identical to SEQ ID NO: 5537
  oligonucleotide probe

SEQ ID NO: 9952 - DNA, 32 bp, Artificial; identical to SEQ ID NO: 5546
  oligonucleotide probe

SEQ ID NO: 9953 - DNA, 32 bp, Artificial; identical to SEQ ID NO: 8757
  oligonucleotide probe

SEQ ID NO: 9954 - DNA, 32 bp, Artificial; identical to SEQ ID NO: 8784
  oligonucleotide probe

SEQ ID NO: 9955 - DNA, 32 bp, Artificial; identical to SEQ ID NO: 8785
  oligonucleotide probe

SEQ ID NO: 9956 - DNA, 32 bp, Artificial; identical to SEQ ID NO: 8780
  oligonucleotide probe

SEQ ID NO: 9957 - DNA, 32 bp, Artificial; identical to SEQ ID NO: 8781
  oligonucleotide probe

SEQ ID NO: 9958 - DNA, 32 bp, Artificial; identical to SEQ ID NO: 5547
  oligonucleotide probe

SEQ ID NO: 9959 - DNA, 32 bp, Artificial; identical to SEQ ID NO: 8753
  oligonucleotide probe

SEQ ID NO: 9960 - DNA, 32 bp, Artificial; identical to SEQ ID NO: 8780
  oligonucleotide probe

SEQ ID NO: 9961 - DNA, 32 bp, Artificial; identical to SEQ ID NO: 8781
  oligonucleotide probe

SEQ ID NO: 9962 - DNA, 32 bp, Artificial; identical to SEQ ID NO: 8796
  oligonucleotide probe

SEQ ID NO: 9963 - DNA, 32 bp, Artificial; identical to SEQ ID NO: 5538
  oligonucleotide probe

SEQ ID NO: 9964 - DNA, 32 bp, Artificial; identical to SEQ ID NO: 9314
  oligonucleotide probe

SEQ ID NO: 9965 - DNA, 32 bp, Artificial; identical to SEQ ID NO: 9315
  oligonucleotide probe

SEQ ID NO: 9966 - DNA, 32 bp, Artificial; identical to SEQ ID NO: 8780
  oligonucleotide probe

SEQ ID NO: 9967 - DNA, 32 bp, Artificial; identical to SEQ ID NO: 8781
  oligonucleotide probe

SEQ ID NO: 9968 - DNA, 32 bp, Artificial; identical to SEQ ID NO: 8780
  oligonucleotide probe

SEQ ID NO: 9969 - DNA, 32 bp, Artificial; identical to SEQ ID NO: 8781
  oligonucleotide probe

SEQ ID NO: 9970 - DNA, 32 bp, Artificial; identical to SEQ ID NO: 8762
  oligonucleotide probe

SEQ ID NO: 9971 - DNA, 32 bp, Artificial; identical to SEQ ID NO: 5539
  oligonucleotide probe

SEQ ID NO: 9972 - DNA, 32 bp, Artificial; identical to SEQ ID NO: 8780
  oligonucleotide probe

SEQ ID NO: 9973 - DNA, 32 bp, Artificial; identical to SEQ ID NO: 8781
  oligonucleotide probe

SEQ ID NO: 9974 - DNA, 32 bp, Artificial; identical to SEQ ID NO: 8796
  oligonucleotide probe

SEQ ID NO: 9975 - DNA, 32 bp, Artificial; identical to SEQ ID NO: 5538
  oligonucleotide probe

SEQ ID NO: 9976 - DNA, 32 bp, Artificial; identical to SEQ ID NO: 5547
  oligonucleotide probe

SEQ ID NO: 9977 - DNA, 32 bp, Artificial; identical to SEQ ID NO: 8753
  oligonucleotide probe

SEQ ID NO: 9978 - DNA, 32 bp, Artificial; identical to SEQ ID NO: 8780
  oligonucleotide probe

SEQ ID NO: 9979 - DNA, 32 bp, Artificial; identical to SEQ ID NO: 8781
  oligonucleotide probe

SEQ ID NO: 9980 - DNA, 32 bp, Artificial; identical to SEQ ID NO: 5547
  oligonucleotide probe

SEQ ID NO: 9981 - DNA, 32 bp, Artificial; identical to SEQ ID NO: 8753
  oligonucleotide probe

SEQ ID NO: 9982 - DNA, 32 bp, Artificial; identical to SEQ ID NO: 5546
  oligonucleotide probe

SEQ ID NO: 9983 - DNA, 32 bp, Artificial; identical to SEQ ID NO: 8757
  oligonucleotide probe

SEQ ID NO: 9984 - DNA, 32 bp, Artificial; identical to SEQ ID NO: 8750
  oligonucleotide probe

SEQ ID NO: 9985 - DNA, 32 bp, Artificial; identical to SEQ ID NO: 8751
  oligonucleotide probe

SEQ ID NO: 9986 - DNA, 32 bp, Artificial; identical to SEQ ID NO: 8804
  oligonucleotide probe

SEQ ID NO: 9987 - DNA, 32 bp, Artificial; identical to SEQ ID NO: 5565
  oligonucleotide probe

SEQ ID NO: 9988 - DNA, 32 bp, Artificial; identical to SEQ ID NO: 5547
  oligonucleotide probe

SEQ ID NO: 9989 - DNA, 32 bp, Artificial; identical to SEQ ID NO: 8753
  oligonucleotide probe

SEQ ID NO: 9990 - DNA, 32 bp, Artificial; identical to SEQ ID NO: 8804
  oligonucleotide probe

SEQ ID NO: 9991 - DNA, 32 bp, Artificial; identical to SEQ ID NO: 5565
  oligonucleotide probe

SEQ ID NO: 9992 - DNA, 32 bp, Artificial; identical to SEQ ID NO: 8804
  oligonucleotide probe

SEQ ID NO: 9993 - DNA, 32 bp, Artificial; identical to SEQ ID NO: 5565
  oligonucleotide probe

SEQ ID NO: 9994 - DNA, 32 bp, Artificial; identical to SEQ ID NO: 8784
  oligonucleotide probe

SEQ ID NO: 9995 - DNA, 32 bp, Artificial; identical to SEQ ID NO: 8785
  oligonucleotide probe

SEQ ID NO: 9996 - DNA, 32 bp, Artificial; identical to SEQ ID NO: 8760
  oligonucleotide probe

SEQ ID NO: 9997 - DNA, 32 bp, Artificial; identical to SEQ ID NO: 5537
  oligonucleotide probe

SEQ ID NO: 9998 - DNA, 32 bp, Artificial; identical to SEQ ID NO: 5546
  oligonucleotide probe

SEQ ID NO: 9999 - DNA, 32 bp, Artificial; identical to SEQ ID NO: 8757
  oligonucleotide probe

SEQ ID NO: 10000 - DNA, 32 bp, Artificial; identical to SEQ ID NO: 8780
  oligonucleotide probe

SEQ ID NO: 10001 - DNA, 32 bp, Artificial; identical to SEQ ID NO: 8781
  oligonucleotide probe

SEQ ID NO: 10002 - DNA, 32 bp, Artificial; identical to SEQ ID NO: 8753
  oligonucleotide probe

SEQ ID NO: 10003 - DNA, 32 bp, Artificial; identical to SEQ ID NO: 8760
  oligonucleotide probe

SEQ ID NO: 10004 - DNA, 32 bp, Artificial; identical to SEQ ID NO: 8804
  oligonucleotide probe

SEQ ID NO: 10005 - DNA, 32 bp, Artificial; identical to SEQ ID NO: 5565
  oligonucleotide probe

SEQ ID NO: 10006 - DNA, 32 bp, Artificial; identical to SEQ ID NO: 8760
  oligonucleotide probe

SEQ ID NO: 10007 - DNA, 32 bp, Artificial; identical to SEQ ID NO: 5537
  oligonucleotide probe

SEQ ID NO: 10008 - DNA, 32 bp, Artificial; identical to SEQ ID NO: 8760
  oligonucleotide probe

SEQ ID NO: 10009 - DNA, 32 bp, Artificial; identical to SEQ ID NO: 5537
  oligonucleotide probe

SEQ ID NO: 10010 - DNA, 32 bp, Artificial; identical to SEQ ID NO: 8784
  oligonucleotide probe

SEQ ID NO: 10011 - DNA, 32 bp, Artificial; identical to SEQ ID NO: 8785
  oligonucleotide probe

SEQ ID NO: 10012 - DNA, 32 bp, Artificial; identical to SEQ ID NO: 5546
  oligonucleotide probe

SEQ ID NO: 10013 - DNA, 32 bp, Artificial; identical to SEQ ID NO: 8757
  oligonucleotide probe

SEQ ID NO: 10014 - DNA, 32 bp, Artificial; identical to SEQ ID NO: 8786
  oligonucleotide probe

SEQ ID NO: 10015 - DNA, 32 bp, Artificial; identical to SEQ ID NO: 5585
  oligonucleotide probe

SEQ ID NO: 10016 - DNA, 32 bp, Artificial; identical to SEQ ID NO: 8784
  oligonucleotide probe

SEQ ID NO: 10017 - DNA, 32 bp, Artificial; identical to SEQ ID NO: 8785
  oligonucleotide probe

SEQ ID NO: 10018 - DNA, 32 bp, Artificial; identical to SEQ ID NO: 8760
  oligonucleotide probe

SEQ ID NO: 10019 - DNA, 32 bp, Artificial; identical to SEQ ID NO: 5537
  oligonucleotide probe

SEQ ID NO: 10020 - DNA, 32 bp, Artificial; identical to SEQ ID NO: 5546
  oligonucleotide probe

SEQ ID NO: 10021 - DNA, 32 bp, Artificial; identical to SEQ ID NO: 8757
  oligonucleotide probe

SEQ ID NO: 10022 - DNA, 32 bp, Artificial; identical to SEQ ID NO: 8796
  oligonucleotide probe

SEQ ID NO: 10023 - DNA, 32 bp, Artificial; identical to SEQ ID NO: 5538
  oligonucleotide probe

SEQ ID NO: 10024 - DNA, 32 bp, Artificial; identical to SEQ ID NO: 8834
  oligonucleotide probe

SEQ ID NO: 10025 - DNA, 32 bp, Artificial; identical to SEQ ID NO: 8835
  oligonucleotide probe

SEQ ID NO: 10026 - DNA, 32 bp, Artificial; identical to SEQ ID NO: 5546
  oligonucleotide probe

SEQ ID NO: 10027 - DNA, 32 bp, Artificial; identical to SEQ ID NO: 8757
  oligonucleotide probe

SEQ ID NO: 10028 - DNA, 32 bp, Artificial; identical to SEQ ID NO: 8760
  oligonucleotide probe

SEQ ID NO: 10029 - DNA, 32 bp, Artificial; identical to SEQ ID NO: 5537
  oligonucleotide probe

SEQ ID NO: 10030 - DNA, 32 bp, Artificial; identical to SEQ ID NO: 5547
  oligonucleotide probe

SEQ ID NO: 10031 - DNA, 32 bp, Artificial; identical to SEQ ID NO: 8753
  oligonucleotide probe

SEQ ID NO: 10032 - DNA, 32 bp, Artificial; identical to SEQ ID NO: 8778
  oligonucleotide probe

SEQ ID NO: 10033 - DNA, 32 bp, Artificial; identical to SEQ ID NO: 5564
  oligonucleotide probe

SEQ ID NO: 10034 - DNA, 32 bp, Artificial; identical to SEQ ID NO: 9020
  oligonucleotide probe

SEQ ID NO: 10035 - DNA, 32 bp, Artificial; identical to SEQ ID NO: 9021
  oligonucleotide probe

SEQ ID NO: 10036 - DNA, 32 bp, Artificial; identical to SEQ ID NO: 8804
  oligonucleotide probe

SEQ ID NO: 10037 - DNA, 32 bp, Artificial; identical to SEQ ID NO: 5565
  oligonucleotide probe

SEQ ID NO: 10038 - DNA, 32 bp, Artificial; identical to SEQ ID NO: 8784
  oligonucleotide probe

SEQ ID NO: 10039 - DNA, 32 bp, Artificial; identical to SEQ ID NO: 8785
  oligonucleotide probe

SEQ ID NO: 10040 - DNA, 32 bp, Artificial; identical to SEQ ID NO: 5547
  oligonucleotide probe

SEQ ID NO: 10041 - DNA, 32 bp, Artificial; identical to SEQ ID NO: 8753
  oligonucleotide probe

SEQ ID NO: 10042 - DNA, 32 bp, Artificial; identical to SEQ ID NO: 9020
  oligonucleotide probe

SEQ ID NO: 10043 - DNA, 32 bp, Artificial; identical to SEQ ID NO: 9021
  oligonucleotide probe

SEQ ID NO: 10044 - DNA, 32 bp, Artificial; identical to SEQ ID NO: 5546
  oligonucleotide probe

SEQ ID NO: 10045 - DNA, 32 bp, Artificial; identical to SEQ ID NO: 8757
  oligonucleotide probe

SEQ ID NO: 10046 - DNA, 32 bp, Artificial; identical to SEQ ID NO: 8762
  oligonucleotide probe

SEQ ID NO: 10047 - DNA, 32 bp, Artificial; identical to SEQ ID NO: 5539
  oligonucleotide probe

SEQ ID NO: 10048 - DNA, 32 bp, Artificial; identical to SEQ ID NO: 8760
  oligonucleotide probe

SEQ ID NO: 10049 - DNA, 32 bp, Artificial; identical to SEQ ID NO: 5537
  oligonucleotide probe

SEQ ID NO: 10050 - DNA, 32 bp, Artificial; identical to SEQ ID NO: 5610
  oligonucleotide probe

SEQ ID NO: 10051 - DNA, 32 bp, Artificial; identical to SEQ ID NO: 8834
  oligonucleotide probe

SEQ ID NO: 10052 - DNA, 32 bp, Artificial
  oligonucleotide probe
cgcattgcggctttcgttgcatggcgtgggga

SEQ ID NO: 10053 - DNA, 32 bp, Artificial
  oligonucleotide probe
aagccgtgcgcaacgagggattcgcgcaaacg

SEQ ID NO: 10054 - DNA, 32 bp, Artificial; identical to SEQ ID NO: 5546
  oligonucleotide probe

SEQ ID NO: 10055 - DNA, 32 bp, Artificial; identical to SEQ ID NO: 5538
  oligonucleotide probe

SEQ ID NO: 10056 - DNA, 32 bp, Artificial; identical to SEQ ID NO: 9021
  oligonucleotide probe

SEQ ID NO: 10057 - DNA, 32 bp, Artificial; identical to SEQ ID NO: 8796
  oligonucleotide probe

SEQ ID NO: 10058 - DNA, 32 bp, Artificial; identical to SEQ ID NO: 8780
  oligonucleotide probe

SEQ ID NO: 10059 - DNA, 32 bp, Artificial; identical to SEQ ID NO: 9038
  oligonucleotide probe

SEQ ID NO: 10060 - DNA, 32 bp, Artificial; identical to SEQ ID NO: 8781
  oligonucleotide probe

SEQ ID NO: 10061 - DNA, 32 bp, Artificial; identical to SEQ ID NO: 9252
  oligonucleotide probe

SEQ ID NO: 10062 - DNA, 32 bp, Artificial; identical to SEQ ID NO: 8835
  oligonucleotide probe

SEQ ID NO: 10063 - DNA, 32 bp, Artificial; identical to SEQ ID NO: 5594
  oligonucleotide probe

SEQ ID NO: 10064 - DNA, 32 bp, Artificial
  oligonucleotide probe
cgcattgcggctttcggggattcgcgcaaacg

SEQ ID NO: 10065 - DNA, 32 bp, Artificial; identical to SEQ ID NO: 5564
  oligonucleotide probe

SEQ ID NO: 10066 - DNA, 32 bp, Artificial; identical to SEQ ID NO: 8868
  oligonucleotide probe

SEQ ID NO: 10067 - DNA, 32 bp, Artificial; identical to SEQ ID NO: 9020
  oligonucleotide probe

SEQ ID NO: 10068 - DNA, 32 bp, Artificial; identical to SEQ ID NO: 5584
  oligonucleotide probe

SEQ ID NO: 10069 - DNA, 32 bp, Artificial; identical to SEQ ID NO: 8778
  oligonucleotide probe

SEQ ID NO: 10070 - DNA, 32 bp, Artificial; identical to SEQ ID NO: 9253
  oligonucleotide probe

SEQ ID NO: 10071 - DNA, 32 bp, Artificial; identical to SEQ ID NO: 6145
  oligonucleotide probe

SEQ ID NO: 10072 - DNA, 32 bp, Artificial; identical to SEQ ID NO: 5537
  oligonucleotide probe

SEQ ID NO: 10073 - DNA, 32 bp, Artificial; identical to SEQ ID NO: 7644
  oligonucleotide probe

SEQ ID NO: 10074 - DNA, 32 bp, Artificial; identical to SEQ ID NO: 5141
  oligonucleotide probe

SEQ ID NO: 10075 - DNA, 32 bp, Artificial; identical to SEQ ID NO: 5537
  oligonucleotide probe

SEQ ID NO: 10076 - DNA, 32 bp, Artificial
  oligonucleotide probe
gcaccgcagctgcgtgaagccgtgcgcaacga

SEQ ID NO: 10077 - DNA, 32 bp, Artificial; identical to SEQ ID NO: 5709
  oligonucleotide probe

SEQ ID NO: 10078 - DNA, 32 bp, Artificial
  oligonucleotide probe
gcaccgcagctgcgtgggctttgcgcaccgtg

SEQ ID NO: 10079 - DNA, 32 bp, Artificial; identical to SEQ ID NO: 7855
  oligonucleotide probe

SEQ ID NO: 10080 - DNA, 32 bp, Artificial; identical to SEQ ID NO: 7856
  oligonucleotide probe

SEQ ID NO: 10081 - DNA, 32 bp, Artificial; identical to SEQ ID NO: 6131
  oligonucleotide probe

SEQ ID NO: 10082 - DNA, 32 bp, Artificial
  oligonucleotide probe
gggattcgcgcaaacgttgcaagcgtccggga

SEQ ID NO: 10083 - DNA, 32 bp, Artificial; identical to SEQ ID NO: 8786
  oligonucleotide probe

SEQ ID NO: 10084 - DNA, 32 bp, Artificial; identical to SEQ ID NO: 5585
  oligonucleotide probe

SEQ ID NO: 10085 - DNA, 32 bp, Artificial
  oligonucleotide probe
gcaccgcagctgcgtgccgtcgcaaagcgcac

SEQ ID NO: 10086 - DNA, 32 bp, Artificial
  oligonucleotide probe
gcacgggaaagcggctaagccgtgcgcaacga

SEQ ID NO: 10087 - DNA, 32 bp, Artificial; identical to SEQ ID NO: 5224
  oligonucleotide probe

SEQ ID NO: 10088 - DNA, 32 bp, Artificial; identical to SEQ ID NO: 7840
  oligonucleotide probe

SEQ ID NO: 10089 - DNA, 32 bp, Artificial; identical to SEQ ID NO: 7597
  oligonucleotide probe

SEQ ID NO: 10090 - DNA, 32 bp, Artificial; identical to SEQ ID NO: 7598
  oligonucleotide probe

SEQ ID NO: 10091 - DNA, 32 bp, Artificial; identical to SEQ ID NO: 8868
  oligonucleotide probe

SEQ ID NO: 10092 - DNA, 32 bp, Artificial; identical to SEQ ID NO: 7833
  oligonucleotide probe

SEQ ID NO: 10093 - DNA, 32 bp, Artificial; identical to SEQ ID NO: 8786
  oligonucleotide probe

SEQ ID NO: 10094 - DNA, 32 bp, Artificial; identical to SEQ ID NO: 5585
  oligonucleotide probe

SEQ ID NO: 10095 - DNA, 32 bp, Artificial; identical to SEQ ID NO: 8750
  oligonucleotide probe

SEQ ID NO: 10096 - DNA, 32 bp, Artificial; identical to SEQ ID NO: 8751
  oligonucleotide probe

SEQ ID NO: 10097 - DNA, 32 bp, Artificial
  oligonucleotide probe
gcaccgcagctgcgtgttgcaagcgtccggga

SEQ ID NO: 10098 - DNA, 32 bp, Artificial; identical to SEQ ID NO: 5709
  oligonucleotide probe

SEQ ID NO: 10099 - DNA, 32 bp, Artificial; identical to SEQ ID NO: 8834
  oligonucleotide probe

SEQ ID NO: 10100 - DNA, 32 bp, Artificial; identical to SEQ ID NO: 8835
  oligonucleotide probe

SEQ ID NO: 10101 - DNA, 32 bp, Artificial; identical to SEQ ID NO: 8804
  oligonucleotide probe

SEQ ID NO: 10102 - DNA, 32 bp, Artificial; identical to SEQ ID NO: 5565
  oligonucleotide probe

SEQ ID NO: 10103 - DNA, 32 bp, Artificial; identical to SEQ ID NO: 5416
  oligonucleotide probe

SEQ ID NO: 10104 - DNA, 32 bp, Artificial; identical to SEQ ID NO: 8467
  oligonucleotide probe

SEQ ID NO: 10105 - DNA, 32 bp, Artificial; identical to SEQ ID NO: 8868
  oligonucleotide probe

SEQ ID NO: 10106 - DNA, 32 bp, Artificial; identical to SEQ ID NO: 5584
  oligonucleotide probe

SEQ ID NO: 10107 - DNA, 32 bp, Artificial; identical to SEQ ID NO: 7856
  oligonucleotide probe

SEQ ID NO: 10108 - DNA, 32 bp, Artificial; identical to SEQ ID NO: 7865
  oligonucleotide probe

SEQ ID NO: 10109 - DNA, 32 bp, Artificial; identical to SEQ ID NO: 8778
  oligonucleotide probe

SEQ ID NO: 10110 - DNA, 32 bp, Artificial; identical to SEQ ID NO: 5564
  oligonucleotide probe

SEQ ID NO: 10111 - DNA, 32 bp, Artificial; identical to SEQ ID NO: 10097
  oligonucleotide probe

SEQ ID NO: 10112 - DNA, 32 bp, Artificial; identical to SEQ ID NO: 5709
  oligonucleotide probe

SEQ ID NO: 10113 - DNA, 32 bp, Artificial
  oligonucleotide probe
ttgcatggcgtggggaatggcgcagcacgctg

SEQ ID NO: 10114 - DNA, 32 bp, Artificial
  oligonucleotide probe
ttgcatggcgtggggattcggggaaacgccgt

SEQ ID NO: 10115 - DNA, 32 bp, Artificial
  oligonucleotide probe
gcacgggaaagcggctcgcattgcggctttcg

SEQ ID NO: 10116 - DNA, 32 bp, Artificial
  oligonucleotide probe
gcacgggaaagcggctttgcaagcgtccggga

SEQ ID NO: 10117 - DNA, 32 bp, Artificial; identical to SEQ ID NO: 6131
  oligonucleotide probe

SEQ ID NO: 10118 - DNA, 32 bp, Artificial; identical to SEQ ID NO: 10082
  oligonucleotide probe

SEQ ID NO: 10119 - DNA, 32 bp, Artificial; identical to SEQ ID NO: 5133
  oligonucleotide probe

SEQ ID NO: 10120 - DNA, 32 bp, Artificial; identical to SEQ ID NO: 7594
  oligonucleotide probe

SEQ ID NO: 10121 - DNA, 32 bp, Artificial; identical to SEQ ID NO: 7606
  oligonucleotide probe

SEQ ID NO: 10122 - DNA, 32 bp, Artificial; identical to SEQ ID NO: 7947
  oligonucleotide probe

SEQ ID NO: 10123 - DNA, 32 bp, Artificial
  oligonucleotide probe
ttgcatggcgtggggaggctttgcgcaccgtg

SEQ ID NO: 10124 - DNA, 32 bp, Artificial; identical to SEQ ID NO: 5537
  oligonucleotide probe

SEQ ID NO: 10125 - DNA, 32 bp, Artificial; identical to SEQ ID NO: 7831
  oligonucleotide probe

SEQ ID NO: 10126 - DNA, 32 bp, Artificial; identical to SEQ ID NO: 7832
  oligonucleotide probe

SEQ ID NO: 10127 - DNA, 32 bp, Artificial; identical to SEQ ID NO: 6145
  oligonucleotide probe

SEQ ID NO: 10128 - DNA, 32 bp, Artificial; identical to SEQ ID NO: 7673
  oligonucleotide probe

SEQ ID NO: 10129 - DNA, 32 bp, Artificial; identical to SEQ ID NO: 5133
  oligonucleotide probe

SEQ ID NO: 10130 - DNA, 32 bp, Artificial; identical to SEQ ID NO: 7594
  oligonucleotide probe

SEQ ID NO: 10131 - DNA, 32 bp, Artificial; identical to SEQ ID NO: 7690
  oligonucleotide probe

SEQ ID NO: 10132 - DNA, 32 bp, Artificial; identical to SEQ ID NO: 7662
  oligonucleotide probe

SEQ ID NO: 10133 - DNA, 32 bp, Artificial; identical to SEQ ID NO: 8047
  oligonucleotide probe

SEQ ID NO: 10134 - DNA, 32 bp, Artificial; identical to SEQ ID NO: 5240
  oligonucleotide probe

SEQ ID NO: 10135 - DNA, 32 bp, Artificial; identical to SEQ ID NO: 8750
  oligonucleotide probe

SEQ ID NO: 10136 - DNA, 32 bp, Artificial; identical to SEQ ID NO: 8751
  oligonucleotide probe

SEQ ID NO: 10137 - DNA, 32 bp, Artificial; identical to SEQ ID NO: 10097
  oligonucleotide probe

SEQ ID NO: 10138 - DNA, 32 bp, Artificial; identical to SEQ ID NO: 5709
  oligonucleotide probe

SEQ ID NO: 10139 - DNA, 32 bp, Artificial
  oligonucleotide probe
ttgcatggcgtggggacgcattgcggctttcg

SEQ ID NO: 10140 - DNA, 32 bp, Artificial
  oligonucleotide probe
ttgcatggcgtggggattgcaagcgtccggga

SEQ ID NO: 10141 - DNA, 32 bp, Artificial; identical to SEQ ID NO: 6131
  oligonucleotide probe

SEQ ID NO: 10142 - DNA, 32 bp, Artificial; identical to SEQ ID NO: 10082
  oligonucleotide probe

SEQ ID NO: 10143 - DNA, 32 bp, Artificial; identical to SEQ ID NO: 8778
  oligonucleotide probe

SEQ ID NO: 10144 - DNA, 32 bp, Artificial; identical to SEQ ID NO: 5564
  oligonucleotide probe

SEQ ID NO: 10145 - DNA, 32 bp, Artificial; identical to SEQ ID NO: 7866
  oligonucleotide probe

SEQ ID NO: 10146 - DNA, 32 bp, Artificial; identical to SEQ ID NO: 5136
  oligonucleotide probe

SEQ ID NO: 10147 - DNA, 32 bp, Artificial
  oligonucleotide probe
gcacgggaaagcggctaacggctgcaagcgca

SEQ ID NO: 10148 - DNA, 32 bp, Artificial
  oligonucleotide probe
gcacgggaaagcggctggctttgcgcaccgtg

SEQ ID NO: 10149 - DNA, 32 bp, Artificial; identical to SEQ ID NO: 7659
  oligonucleotide probe

SEQ ID NO: 10150 - DNA, 32 bp, Artificial; identical to SEQ ID NO: 7783
  oligonucleotide probe

SEQ ID NO: 10151 - DNA, 32 bp, Artificial; identical to SEQ ID NO: 8748
  oligonucleotide probe

SEQ ID NO: 10152 - DNA, 32 bp, Artificial; identical to SEQ ID NO: 8749
  oligonucleotide probe

SEQ ID NO: 10153 - DNA, 32 bp, Artificial; identical to SEQ ID NO: 5224
  oligonucleotide probe

SEQ ID NO: 10154 - DNA, 32 bp, Artificial; identical to SEQ ID NO: 8796
  oligonucleotide probe

SEQ ID NO: 10155 - DNA, 32 bp, Artificial; identical to SEQ ID NO: 9252
  oligonucleotide probe

SEQ ID NO: 10156 - DNA, 32 bp, Artificial; identical to SEQ ID NO: 9253
  oligonucleotide probe

SEQ ID NO: 10157 - DNA, 32 bp, Artificial; identical to SEQ ID NO: 8776
  oligonucleotide probe

SEQ ID NO: 10158 - DNA, 32 bp, Artificial; identical to SEQ ID NO: 8777
  oligonucleotide probe

SEQ ID NO: 10159 - DNA, 32 bp, Artificial; identical to SEQ ID NO: 5231
  oligonucleotide probe

SEQ ID NO: 10160 - DNA, 32 bp, Artificial; identical to SEQ ID NO: 7835
  oligonucleotide probe

SEQ ID NO: 10161 - DNA, 32 bp, Artificial; identical to SEQ ID NO: 7853
  oligonucleotide probe

SEQ ID NO: 10162 - DNA, 32 bp, Artificial; identical to SEQ ID NO: 8776
  oligonucleotide probe

SEQ ID NO: 10163 - DNA, 32 bp, Artificial; identical to SEQ ID NO: 8760
  oligonucleotide probe

SEQ ID NO: 10164 - DNA, 32 bp, Artificial
  oligonucleotide probe
ttgcatggcgtggggaaagccgtgcgcaacga

SEQ ID NO: 10165 - DNA, 32 bp, Artificial; identical to SEQ ID NO: 8786
  oligonucleotide probe

SEQ ID NO: 10166 - DNA, 32 bp, Artificial; identical to SEQ ID NO: 7833
  oligonucleotide probe

SEQ ID NO: 10167 - DNA, 32 bp, Artificial; identical to SEQ ID NO: 8750
  oligonucleotide probe

SEQ ID NO: 10168 - DNA, 32 bp, Artificial; identical to SEQ ID NO: 8751
  oligonucleotide probe

SEQ ID NO: 10169 - DNA, 32 bp, Artificial; identical to SEQ ID NO: 8796
  oligonucleotide probe

SEQ ID NO: 10170 - DNA, 32 bp, Artificial; identical to SEQ ID NO: 5538
  oligonucleotide probe

SEQ ID NO: 10171 - DNA, 32 bp, Artificial; identical to SEQ ID NO: 5231
  oligonucleotide probe

SEQ ID NO: 10172 - DNA, 32 bp, Artificial; identical to SEQ ID NO: 7835
  oligonucleotide probe

SEQ ID NO: 10173 - DNA, 32 bp, Artificial; identical to SEQ ID NO: 7834
  oligonucleotide probe

SEQ ID NO: 10174 - DNA, 32 bp, Artificial; identical to SEQ ID NO: 7831
  oligonucleotide probe

SEQ ID NO: 10175 - DNA, 32 bp, Artificial; identical to SEQ ID NO: 10164
  oligonucleotide probe

SEQ ID NO: 10176 - DNA, 32 bp, Artificial; identical to SEQ ID NO: 10139
  oligonucleotide probe

SEQ ID NO: 10177 - DNA, 32 bp, Artificial; identical to SEQ ID NO: 8784
  oligonucleotide probe

SEQ ID NO: 10178 - DNA, 32 bp, Artificial; identical to SEQ ID NO: 8785
  oligonucleotide probe

SEQ ID NO: 10179 - DNA, 32 bp, Artificial; identical to SEQ ID NO: 7947
  oligonucleotide probe

SEQ ID NO: 10180 - DNA, 32 bp, Artificial; identical to SEQ ID NO: 7948
  oligonucleotide probe

SEQ ID NO: 10181 - DNA, 32 bp, Artificial; identical to SEQ ID NO: 7842
  oligonucleotide probe

SEQ ID NO: 10182 - DNA, 32 bp, Artificial; identical to SEQ ID NO: 9252
  oligonucleotide probe

SEQ ID NO: 10183 - DNA, 32 bp, Artificial; identical to SEQ ID NO: 5416
  oligonucleotide probe

SEQ ID NO: 10184 - DNA, 32 bp, Artificial; identical to SEQ ID NO: 8467
  oligonucleotide probe

SEQ ID NO: 10185 - DNA, 32 bp, Artificial
  oligonucleotide probe
gcacgggaaagcggctccgtttcggctgggct

SEQ ID NO: 10186 - DNA, 32 bp, Artificial
  oligonucleotide probe
gcacgggaaagcggctaacgcgatttgccgca

SEQ ID NO: 10187 - DNA, 32 bp, Artificial; identical to SEQ ID NO: 7597
  oligonucleotide probe

SEQ ID NO: 10188 - DNA, 32 bp, Artificial; identical to SEQ ID NO: 7598
  oligonucleotide probe

SEQ ID NO: 10189 - DNA, 32 bp, Artificial
  oligonucleotide probe
gcaccgcagctgcgtgttcggggaaacgccgt

SEQ ID NO: 10190 - DNA, 32 bp, Artificial; identical to SEQ ID NO: 5551
  oligonucleotide probe

SEQ ID NO: 10191 - DNA, 32 bp, Artificial; identical to SEQ ID NO: 7856
  oligonucleotide probe

SEQ ID NO: 10192 - DNA, 32 bp, Artificial; identical to SEQ ID NO: 7865
  oligonucleotide probe

SEQ ID NO: 10193 - DNA, 32 bp, Artificial; identical to SEQ ID NO: 10076
  oligonucleotide probe

SEQ ID NO: 10194 - DNA, 32 bp, Artificial; identical to SEQ ID NO: 10086
  oligonucleotide probe

SEQ ID NO: 10195 - DNA, 32 bp, Artificial; identical to SEQ ID NO: 8784
  oligonucleotide probe

SEQ ID NO: 10196 - DNA, 32 bp, Artificial; identical to SEQ ID NO: 8785
  oligonucleotide probe

SEQ ID NO: 10197 - DNA, 32 bp, Artificial; identical to SEQ ID NO: 10097
  oligonucleotide probe

SEQ ID NO: 10198 - DNA, 32 bp, Artificial; identical to SEQ ID NO: 5709
  oligonucleotide probe

SEQ ID NO: 10199 - DNA, 32 bp, Artificial; identical to SEQ ID NO: 7644
  oligonucleotide probe

SEQ ID NO: 10200 - DNA, 32 bp, Artificial; identical to SEQ ID NO: 5141
  oligonucleotide probe

SEQ ID NO: 10201 - DNA, 32 bp, Artificial; identical to SEQ ID NO: 9020
  oligonucleotide probe

SEQ ID NO: 10202 - DNA, 32 bp, Artificial; identical to SEQ ID NO: 9021
  oligonucleotide probe

SEQ ID NO: 10203 - DNA, 32 bp, Artificial; identical to SEQ ID NO: 10185
  oligonucleotide probe

SEQ ID NO: 10204 - DNA, 32 bp, Artificial; identical to SEQ ID NO: 10186
  oligonucleotide probe

SEQ ID NO: 10205 - DNA, 32 bp, Artificial; identical to SEQ ID NO: 8750
  oligonucleotide probe

SEQ ID NO: 10206 - DNA, 32 bp, Artificial; identical to SEQ ID NO: 8751
  oligonucleotide probe

SEQ ID NO: 10207 - DNA, 32 bp, Artificial; identical to SEQ ID NO: 7832
  oligonucleotide probe

SEQ ID NO: 10208 - DNA, 32 bp, Artificial; identical to SEQ ID NO: 9020
  oligonucleotide probe

SEQ ID NO: 10209 - DNA, 32 bp, Artificial; identical to SEQ ID NO: 8247
  oligonucleotide probe

SEQ ID NO: 10210 - DNA, 32 bp, Artificial; identical to SEQ ID NO: 8240
  oligonucleotide probe

SEQ ID NO: 10211 - DNA, 32 bp, Artificial; identical to SEQ ID NO: 10097
  oligonucleotide probe

SEQ ID NO: 10212 - DNA, 32 bp, Artificial; identical to SEQ ID NO: 10086
  oligonucleotide probe

SEQ ID NO: 10213 - DNA, 32 bp, Artificial; identical to SEQ ID NO: 10139
  oligonucleotide probe

SEQ ID NO: 10214 - DNA, 32 bp, Artificial; identical to SEQ ID NO: 10140
  oligonucleotide probe

SEQ ID NO: 10215 - DNA, 32 bp, Artificial; identical to SEQ ID NO: 7673
  oligonucleotide probe

SEQ ID NO: 10216 - DNA, 32 bp, Artificial; identical to SEQ ID NO: 7690
  oligonucleotide probe

SEQ ID NO: 10217 - DNA, 32 bp, Artificial; identical to SEQ ID NO: 5232
  oligonucleotide probe

SEQ ID NO: 10218 - DNA, 32 bp, Artificial; identical to SEQ ID NO: 9038
  oligonucleotide probe

SEQ ID NO: 10219 - DNA, 32 bp, Artificial; identical to SEQ ID NO: 5709
  oligonucleotide probe

SEQ ID NO: 10220 - DNA, 32 bp, Artificial; identical to SEQ ID NO: 10078
  oligonucleotide probe

SEQ ID NO: 10221 - DNA, 32 bp, Artificial; identical to SEQ ID NO: 10086
  oligonucleotide probe

SEQ ID NO: 10222 - DNA, 32 bp, Artificial; identical to SEQ ID NO: 10115
  oligonucleotide probe

SEQ ID NO: 10223 - DNA, 32 bp, Artificial; identical to SEQ ID NO: 5134
  oligonucleotide probe

SEQ ID NO: 10224 - DNA, 32 bp, Artificial; identical to SEQ ID NO: 7905
  oligonucleotide probe

SEQ ID NO: 10225 - DNA, 32 bp, Artificial; identical to SEQ ID NO: 5554
  oligonucleotide probe

SEQ ID NO: 10226 - DNA, 32 bp, Artificial
  oligonucleotide probe
gggattcgcgcaaacgttcggggaaacgccgt

SEQ ID NO: 10227 - DNA, 32 bp, Artificial; identical to SEQ ID NO: 5160
  oligonucleotide probe

SEQ ID NO: 10228 - DNA, 32 bp, Artificial; identical to SEQ ID NO: 8244
  oligonucleotide probe

SEQ ID NO: 10229 - DNA, 32 bp, Artificial; identical to SEQ ID NO: 5550
  oligonucleotide probe

SEQ ID NO: 10230 - DNA, 32 bp, Artificial; identical to SEQ ID NO: 8753
  oligonucleotide probe

SEQ ID NO: 10231 - DNA, 32 bp, Artificial; identical to SEQ ID NO: 8753
  oligonucleotide probe

SEQ ID NO: 10232 - DNA, 32 bp, Artificial; identical to SEQ ID NO: 8760
  oligonucleotide probe

SEQ ID NO: 10233 - DNA, 32 bp, Artificial; identical to SEQ ID NO: 10078
  oligonucleotide probe

SEQ ID NO: 10234 - DNA, 32 bp, Artificial; identical to SEQ ID NO: 5555
  oligonucleotide probe

SEQ ID NO: 10235 - DNA, 32 bp, Artificial; identical to SEQ ID NO: 8753
  oligonucleotide probe

SEQ ID NO: 10236 - DNA, 32 bp, Artificial; identical to SEQ ID NO: 8760
  oligonucleotide probe

SEQ ID NO: 10237 - DNA, 32 bp, Artificial; identical to SEQ ID NO: 9020
  oligonucleotide probe

SEQ ID NO: 10238 - DNA, 32 bp, Artificial; identical to SEQ ID NO: 9021
  oligonucleotide probe

SEQ ID NO: 10239 - DNA, 32 bp, Artificial; identical to SEQ ID NO: 8804
  oligonucleotide probe

SEQ ID NO: 10240 - DNA, 32 bp, Artificial; identical to SEQ ID NO: 5565
  oligonucleotide probe

SEQ ID NO: 10241 - DNA, 32 bp, Artificial; identical to SEQ ID NO: 5399
  oligonucleotide probe

SEQ ID NO: 10242 - DNA, 32 bp, Artificial; identical to SEQ ID NO: 7673
  oligonucleotide probe

SEQ ID NO: 10243 - DNA, 32 bp, Artificial; identical to SEQ ID NO: 8760
  oligonucleotide probe

SEQ ID NO: 10244 - DNA, 32 bp, Artificial; identical to SEQ ID NO: 10164
  oligonucleotide probe

SEQ ID NO: 10245 - DNA, 32 bp, Artificial; identical to SEQ ID NO: 8748
  oligonucleotide probe

SEQ ID NO: 10246 - DNA, 32 bp, Artificial; identical to SEQ ID NO: 8749
  oligonucleotide probe

SEQ ID NO: 10247 - DNA, 32 bp, Artificial; identical to SEQ ID NO: 8762
  oligonucleotide probe

SEQ ID NO: 10248 - DNA, 32 bp, Artificial; identical to SEQ ID NO: 5539
  oligonucleotide probe

SEQ ID NO: 10249 - DNA, 32 bp, Artificial; identical to SEQ ID NO: 8781
  oligonucleotide probe

SEQ ID NO: 10250 - DNA, 32 bp, Artificial; identical to SEQ ID NO: 8784
  oligonucleotide probe

SEQ ID NO: 10251 - DNA, 32 bp, Artificial; identical to SEQ ID NO: 10139
  oligonucleotide probe

SEQ ID NO: 10252 - DNA, 32 bp, Artificial; identical to SEQ ID NO: 10140
  oligonucleotide probe

SEQ ID NO: 10253 - DNA, 32 bp, Artificial; identical to SEQ ID NO: 5399
  oligonucleotide probe

SEQ ID NO: 10254 - DNA, 32 bp, Artificial; identical to SEQ ID NO: 10053
  oligonucleotide probe

SEQ ID NO: 10255 - DNA, 32 bp, Artificial; identical to SEQ ID NO: 8760
  oligonucleotide probe

SEQ ID NO: 10256 - DNA, 32 bp, Artificial; identical to SEQ ID NO: 10164
  oligonucleotide probe

SEQ ID NO: 10257 - DNA, 32 bp, Artificial; identical to SEQ ID NO: 10086
  oligonucleotide probe

SEQ ID NO: 10258 - DNA, 32 bp, Artificial; identical to SEQ ID NO: 10115
  oligonucleotide probe

SEQ ID NO: 10259 - DNA, 32 bp, Artificial; identical to SEQ ID NO: 5232
  oligonucleotide probe

SEQ ID NO: 10260 - DNA, 32 bp, Artificial; identical to SEQ ID NO: 7597
  oligonucleotide probe

SEQ ID NO: 10261 - DNA, 32 bp, Artificial; identical to SEQ ID NO: 8442
  oligonucleotide probe

SEQ ID NO: 10262 - DNA, 32 bp, Artificial; identical to SEQ ID NO: 8571
  oligonucleotide probe

SEQ ID NO: 10263 - DNA, 32 bp, Artificial; identical to SEQ ID NO: 5545
  oligonucleotide probe

SEQ ID NO: 10264 - DNA, 32 bp, Artificial
  oligonucleotide probe
gcaccgcagctgcgtggggattcgcgcaaacg

SEQ ID NO: 10265 - DNA, 32 bp, Artificial; identical to SEQ ID NO: 7948
  oligonucleotide probe

SEQ ID NO: 10266 - DNA, 32 bp, Artificial; identical to SEQ ID NO: 7841
  oligonucleotide probe

SEQ ID NO: 10267 - DNA, 32 bp, Artificial; identical to SEQ ID NO: 8776
  oligonucleotide probe

SEQ ID NO: 10268 - DNA, 32 bp, Artificial; identical to SEQ ID NO: 8777
  oligonucleotide probe

SEQ ID NO: 10269 - DNA, 32 bp, Artificial; identical to SEQ ID NO: 7833
  oligonucleotide probe

SEQ ID NO: 10270 - DNA, 32 bp, Artificial; identical to SEQ ID NO: 7834
  oligonucleotide probe

SEQ ID NO: 10271 - DNA, 32 bp, Artificial; identical to SEQ ID NO: 5547
  oligonucleotide probe

SEQ ID NO: 10272 - DNA, 32 bp, Artificial
  oligonucleotide probe
gggattcgcgcaaacgaagccgtgcgcaacga

SEQ ID NO: 10273 - DNA, 32 bp, Artificial; identical to SEQ ID NO: 8776
  oligonucleotide probe

SEQ ID NO: 10274 - DNA, 32 bp, Artificial; identical to SEQ ID NO: 8777
  oligonucleotide probe

SEQ ID NO: 10275 - DNA, 32 bp, Artificial; identical to SEQ ID NO: 9826
  oligonucleotide probe

SEQ ID NO: 10276 - DNA, 32 bp, Artificial; identical to SEQ ID NO: 7623
  oligonucleotide probe

SEQ ID NO: 10277 - DNA, 32 bp, Artificial; identical to SEQ ID NO: 8804
  oligonucleotide probe

SEQ ID NO: 10278 - DNA, 32 bp, Artificial; identical to SEQ ID NO: 5565
  oligonucleotide probe

SEQ ID NO: 10279 - DNA, 32 bp, Artificial; identical to SEQ ID NO: 5554
  oligonucleotide probe

SEQ ID NO: 10280 - DNA, 32 bp, Artificial; identical to SEQ ID NO: 10226
  oligonucleotide probe

SEQ ID NO: 10281 - DNA, 32 bp, Artificial; identical to SEQ ID NO: 5550
  oligonucleotide probe

SEQ ID NO: 10282 - DNA, 32 bp, Artificial
  oligonucleotide probe
gggattcgcgcaaacgaacgcgatttgccgca

SEQ ID NO: 10283 - DNA, 32 bp, Artificial
  oligonucleotide probe
ttgcatggcgtggggaccgtcgcaaagcgcac

SEQ ID NO: 10284 - DNA, 32 bp, Artificial
  oligonucleotide probe
ttgcatggcgtggggaggctgcacggtcccgt

SEQ ID NO: 10285 - DNA, 32 bp, Artificial; identical to SEQ ID NO: 9314
  oligonucleotide probe

SEQ ID NO: 10286 - DNA, 32 bp, Artificial; identical to SEQ ID NO: 9315
  oligonucleotide probe

SEQ ID NO: 10287 - DNA, 32 bp, Artificial; identical to SEQ ID NO: 5185
  oligonucleotide probe

SEQ ID NO: 10288 - DNA, 32 bp, Artificial; identical to SEQ ID NO: 7655
  oligonucleotide probe

SEQ ID NO: 10289 - DNA, 32 bp, Artificial; identical to SEQ ID NO: 5547
  oligonucleotide probe

SEQ ID NO: 10290 - DNA, 32 bp, Artificial; identical to SEQ ID NO: 10272
  oligonucleotide probe

SEQ ID NO: 10291 - DNA, 32 bp, Artificial; identical to SEQ ID NO: 5160
  oligonucleotide probe

SEQ ID NO: 10292 - DNA, 32 bp, Artificial; identical to SEQ ID NO: 8244
  oligonucleotide probe

SEQ ID NO: 10293 - DNA, 32 bp, Artificial; identical to SEQ ID NO: 5185
  oligonucleotide probe

SEQ ID NO: 10294 - DNA, 32 bp, Artificial; identical to SEQ ID NO: 7655
  oligonucleotide probe

SEQ ID NO: 10295 - DNA, 32 bp, Artificial; identical to SEQ ID NO: 10164
  oligonucleotide probe

SEQ ID NO: 10296 - DNA, 32 bp, Artificial; identical to SEQ ID NO: 10139
  oligonucleotide probe

SEQ ID NO: 10297 - DNA, 32 bp, Artificial; identical to SEQ ID NO: 8778
  oligonucleotide probe

SEQ ID NO: 10298 - DNA, 32 bp, Artificial; identical to SEQ ID NO: 5564
  oligonucleotide probe

SEQ ID NO: 10299 - DNA, 32 bp, Artificial; identical to SEQ ID NO: 8247
  oligonucleotide probe

SEQ ID NO: 10300 - DNA, 32 bp, Artificial; identical to SEQ ID NO: 8240
  oligonucleotide probe

SEQ ID NO: 10301 - DNA, 32 bp, Artificial; identical to SEQ ID NO: 10076
  oligonucleotide probe

SEQ ID NO: 10302 - DNA, 32 bp, Artificial; identical to SEQ ID NO: 6074
  oligonucleotide probe

SEQ ID NO: 10303 - DNA, 32 bp, Artificial; identical to SEQ ID NO: 10185
  oligonucleotide probe

SEQ ID NO: 10304 - DNA, 32 bp, Artificial; identical to SEQ ID NO: 10186
  oligonucleotide probe

SEQ ID NO: 10305 - DNA, 32 bp, Artificial; identical to SEQ ID NO: 8796
  oligonucleotide probe

SEQ ID NO: 10306 - DNA, 32 bp, Artificial; identical to SEQ ID NO: 5538
  oligonucleotide probe

SEQ ID NO: 10307 - DNA, 32 bp, Artificial; identical to SEQ ID NO: 5594
  oligonucleotide probe

SEQ ID NO: 10308 - DNA, 32 bp, Artificial; identical to SEQ ID NO: 8936
  oligonucleotide probe

SEQ ID NO: 10309 - DNA, 32 bp, Artificial; identical to SEQ ID NO: 10116
  oligonucleotide probe

SEQ ID NO: 10310 - DNA, 32 bp, Artificial; identical to SEQ ID NO: 10147
  oligonucleotide probe

SEQ ID NO: 10311 - DNA, 32 bp, Artificial; identical to SEQ ID NO: 8766
  oligonucleotide probe

SEQ ID NO: 10312 - DNA, 32 bp, Artificial; identical to SEQ ID NO: 8767
  oligonucleotide probe

SEQ ID NO: 10313 - DNA, 32 bp, Artificial; identical to SEQ ID NO: 8780
  oligonucleotide probe

SEQ ID NO: 10314 - DNA, 32 bp, Artificial; identical to SEQ ID NO: 8781
  oligonucleotide probe

SEQ ID NO: 10315 - DNA, 32 bp, Artificial; identical to SEQ ID NO: 5547
  oligonucleotide probe

SEQ ID NO: 10316 - DNA, 32 bp, Artificial; identical to SEQ ID NO: 10272
  oligonucleotide probe

SEQ ID NO: 10317 - DNA, 32 bp, Artificial; identical to SEQ ID NO: 10148
  oligonucleotide probe

SEQ ID NO: 10318 - DNA, 32 bp, Artificial
  oligonucleotide probe
gcacgggaaagcggctatggcgcagcacgctg

SEQ ID NO: 10319 - DNA, 32 bp, Artificial; identical to SEQ ID NO: 10078
  oligonucleotide probe

SEQ ID NO: 10320 - DNA, 32 bp, Artificial; identical to SEQ ID NO: 5555
  oligonucleotide probe

SEQ ID NO: 10321 - DNA, 32 bp, Artificial; identical to SEQ ID NO: 5134
  oligonucleotide probe

SEQ ID NO: 10322 - DNA, 32 bp, Artificial; identical to SEQ ID NO: 7905
  oligonucleotide probe

SEQ ID NO: 10323 - DNA, 32 bp, Artificial; identical to SEQ ID NO: 10283
  oligonucleotide probe

SEQ ID NO: 10324 - DNA, 32 bp, Artificial; identical to SEQ ID NO: 5537
  oligonucleotide probe

SEQ ID NO: 10325 - DNA, 32 bp, Artificial; identical to SEQ ID NO: 10116
  oligonucleotide probe

SEQ ID NO: 10326 - DNA, 32 bp, Artificial; identical to SEQ ID NO: 10147
  oligonucleotide probe

SEQ ID NO: 10327 - DNA, 32 bp, Artificial; identical to SEQ ID NO: 8936
  oligonucleotide probe

SEQ ID NO: 10328 - DNA, 32 bp, Artificial; identical to SEQ ID NO: 5595
  oligonucleotide probe

SEQ ID NO: 10329 - DNA, 32 bp, Artificial; identical to SEQ ID NO: 7842
  oligonucleotide probe

SEQ ID NO: 10330 - DNA, 32 bp, Artificial; identical to SEQ ID NO: 9252
  oligonucleotide probe

SEQ ID NO: 10331 - DNA, 32 bp, Artificial
  oligonucleotide probe
ttgcatggcgtggggaaacgcgatttgccgca

SEQ ID NO: 10332 - DNA, 32 bp, Artificial
  oligonucleotide probe
ttgcatggcgtggggattcgccgtttgcgctg

SEQ ID NO: 10333 - DNA, 32 bp, Artificial; identical to SEQ ID NO: 8780
  oligonucleotide probe

SEQ ID NO: 10334 - DNA, 32 bp, Artificial; identical to SEQ ID NO: 8781
  oligonucleotide probe

SEQ ID NO: 10335 - DNA, 32 bp, Artificial; identical to SEQ ID NO: 5540
  oligonucleotide probe

SEQ ID NO: 10336 - DNA, 32 bp, Artificial
  oligonucleotide probe
gggattcgcgcaaacgccgtcgcaaagcgcac

SEQ ID NO: 10337 - DNA, 32 bp, Artificial; identical to SEQ ID NO: 8762
  oligonucleotide probe

SEQ ID NO: 10338 - DNA, 32 bp, Artificial; identical to SEQ ID NO: 5539
  oligonucleotide probe

SEQ ID NO: 10339 - DNA, 32 bp, Artificial; identical to SEQ ID NO: 8766
  oligonucleotide probe

SEQ ID NO: 10340 - DNA, 32 bp, Artificial; identical to SEQ ID NO: 5136
  oligonucleotide probe

SEQ ID NO: 10341 - DNA, 32 bp, Artificial; identical to SEQ ID NO: 8784
  oligonucleotide probe

SEQ ID NO: 10342 - DNA, 32 bp, Artificial; identical to SEQ ID NO: 8785
  oligonucleotide probe

SEQ ID NO: 10343 - DNA, 32 bp, Artificial; identical to SEQ ID NO: 10076
  oligonucleotide probe

SEQ ID NO: 10344 - DNA, 32 bp, Artificial; identical to SEQ ID NO: 6074
  oligonucleotide probe

SEQ ID NO: 10345 - DNA, 32 bp, Artificial; identical to SEQ ID NO: 10189
  oligonucleotide probe

SEQ ID NO: 10346 - DNA, 32 bp, Artificial; identical to SEQ ID NO: 5551
  oligonucleotide probe

SEQ ID NO: 10347 - DNA, 32 bp, Artificial; identical to SEQ ID NO: 8834
  oligonucleotide probe

SEQ ID NO: 10348 - DNA, 32 bp, Artificial; identical to SEQ ID NO: 8835
  oligonucleotide probe

SEQ ID NO: 10349 - DNA, 32 bp, Artificial; identical to SEQ ID NO: 9020
  oligonucleotide probe

SEQ ID NO: 10350 - DNA, 32 bp, Artificial; identical to SEQ ID NO: 9021
  oligonucleotide probe

SEQ ID NO: 10351 - DNA, 32 bp, Artificial; identical to SEQ ID NO: 5546
  oligonucleotide probe

SEQ ID NO: 10352 - DNA, 32 bp, Artificial; identical to SEQ ID NO: 8757
  oligonucleotide probe

SEQ ID NO: 10353 - DNA, 32 bp, Artificial; identical to SEQ ID NO: 7624
  oligonucleotide probe

SEQ ID NO: 10354 - DNA, 32 bp, Artificial; identical to SEQ ID NO: 7605
  oligonucleotide probe

SEQ ID NO: 10355 - DNA, 32 bp, Artificial; identical to SEQ ID NO: 5546
  oligonucleotide probe

SEQ ID NO: 10356 - DNA, 32 bp, Artificial; identical to SEQ ID NO: 8757
  oligonucleotide probe

SEQ ID NO: 10357 - DNA, 32 bp, Artificial; identical to SEQ ID NO: 5554
  oligonucleotide probe

SEQ ID NO: 10358 - DNA, 32 bp, Artificial; identical to SEQ ID NO: 8753
  oligonucleotide probe

SEQ ID NO: 10359 - DNA, 32 bp, Artificial; identical to SEQ ID NO: 7948
  oligonucleotide probe

SEQ ID NO: 10360 - DNA, 32 bp, Artificial; identical to SEQ ID NO: 7841
  oligonucleotide probe

SEQ ID NO: 10361 - DNA, 32 bp, Artificial; identical to SEQ ID NO: 9253
  oligonucleotide probe

SEQ ID NO: 10362 - DNA, 32 bp, Artificial; identical to SEQ ID NO: 9314
  oligonucleotide probe

SEQ ID NO: 10363 - DNA, 32 bp, Artificial; identical to SEQ ID NO: 8778
  oligonucleotide probe

SEQ ID NO: 10364 - DNA, 32 bp, Artificial; identical to SEQ ID NO: 5564
  oligonucleotide probe

SEQ ID NO: 10365 - DNA, 32 bp, Artificial; identical to SEQ ID NO: 10078
  oligonucleotide probe

SEQ ID NO: 10366 - DNA, 32 bp, Artificial; identical to SEQ ID NO: 5555
  oligonucleotide probe

SEQ ID NO: 10367 - DNA, 32 bp, Artificial; identical to SEQ ID NO: 8868
  oligonucleotide probe

SEQ ID NO: 10368 - DNA, 32 bp, Artificial; identical to SEQ ID NO: 5584
  oligonucleotide probe

SEQ ID NO: 10369 - DNA, 32 bp, Artificial; identical to SEQ ID NO: 8760
  oligonucleotide probe

SEQ ID NO: 10370 - DNA, 32 bp, Artificial; identical to SEQ ID NO: 5537
  oligonucleotide probe

SEQ ID NO: 10371 - DNA, 32 bp, Artificial; identical to SEQ ID NO: 5708
  oligonucleotide probe

SEQ ID NO: 10372 - DNA, 32 bp, Artificial
  oligonucleotide probe
gggattcgcgcaaacgggctttgcgcaccgtg

SEQ ID NO: 10373 - DNA, 32 bp, Artificial; identical to SEQ ID NO: 8784
  oligonucleotide probe

SEQ ID NO: 10374 - DNA, 32 bp, Artificial; identical to SEQ ID NO: 8785
  oligonucleotide probe

SEQ ID NO: 10375 - DNA, 32 bp, Artificial; identical to SEQ ID NO: 10114
  oligonucleotide probe

SEQ ID NO: 10376 - DNA, 32 bp, Artificial; identical to SEQ ID NO: 5537
  oligonucleotide probe

SEQ ID NO: 10377 - DNA, 32 bp, Artificial; identical to SEQ ID NO: 5159
  oligonucleotide probe

SEQ ID NO: 10378 - DNA, 32 bp, Artificial; identical to SEQ ID NO: 7694
  oligonucleotide probe

SEQ ID NO: 10379 - DNA, 32 bp, Artificial; identical to SEQ ID NO: 10076
  oligonucleotide probe

SEQ ID NO: 10380 - DNA, 32 bp, Artificial; identical to SEQ ID NO: 6074
  oligonucleotide probe

SEQ ID NO: 10381 - DNA, 32 bp, Artificial; identical to SEQ ID NO: 5133
  oligonucleotide probe

SEQ ID NO: 10382 - DNA, 32 bp, Artificial; identical to SEQ ID NO: 7594
  oligonucleotide probe

SEQ ID NO: 10383 - DNA, 32 bp, Artificial; identical to SEQ ID NO: 8784
  oligonucleotide probe

SEQ ID NO: 10384 - DNA, 32 bp, Artificial; identical to SEQ ID NO: 8785
  oligonucleotide probe

SEQ ID NO: 10385 - DNA, 32 bp, Artificial; identical to SEQ ID NO: 10148
  oligonucleotide probe

SEQ ID NO: 10386 - DNA, 32 bp, Artificial; identical to SEQ ID NO: 10318
  oligonucleotide probe

SEQ ID NO: 10387 - DNA, 32 bp, Artificial; identical to SEQ ID NO: 7623
  oligonucleotide probe

SEQ ID NO: 10388 - DNA, 32 bp, Artificial; identical to SEQ ID NO: 7624
  oligonucleotide probe

SEQ ID NO: 10389 - DNA, 32 bp, Artificial; identical to SEQ ID NO: 8804
  oligonucleotide probe

SEQ ID NO: 10390 - DNA, 32 bp, Artificial; identical to SEQ ID NO: 5565
  oligonucleotide probe

SEQ ID NO: 10391 - DNA, 32 bp, Artificial; identical to SEQ ID NO: 7947
  oligonucleotide probe

SEQ ID NO: 10392 - DNA, 32 bp, Artificial; identical to SEQ ID NO: 7948
  oligonucleotide probe

SEQ ID NO: 10393 - DNA, 32 bp, Artificial; identical to SEQ ID NO: 10064
  oligonucleotide probe

SEQ ID NO: 10394 - DNA, 32 bp, Artificial; identical to SEQ ID NO: 5163
  oligonucleotide probe

SEQ ID NO: 10395 - DNA, 32 bp, Artificial; identical to SEQ ID NO: 10086
  oligonucleotide probe

SEQ ID NO: 10396 - DNA, 32 bp, Artificial; identical to SEQ ID NO: 10115
  oligonucleotide probe

SEQ ID NO: 10397 - DNA, 32 bp, Artificial
  oligonucleotide probe
gcaccgcagctgcgtgaacgcgatttgccgca

SEQ ID NO: 10398 - DNA, 32 bp, Artificial; identical to SEQ ID NO: 5541
  oligonucleotide probe

SEQ ID NO: 10399 - DNA, 32 bp, Artificial; identical to SEQ ID NO: 10148
  oligonucleotide probe

SEQ ID NO: 10400 - DNA, 32 bp, Artificial; identical to SEQ ID NO: 10318
  oligonucleotide probe

SEQ ID NO: 10401 - DNA, 32 bp, Artificial; identical to SEQ ID NO: 8784
  oligonucleotide probe

SEQ ID NO: 10402 - DNA, 32 bp, Artificial; identical to SEQ ID NO: 8785
  oligonucleotide probe

SEQ ID NO: 10403 - DNA, 32 bp, Artificial; identical to SEQ ID NO: 7783
  oligonucleotide probe

SEQ ID NO: 10404 - DNA, 32 bp, Artificial; identical to SEQ ID NO: 7812
  oligonucleotide probe

SEQ ID NO: 10405 - DNA, 32 bp, Artificial
  oligonucleotide probe
gcacgggaaagcggctttcggggaaacgccgt

SEQ ID NO: 10406 - DNA, 32 bp, Artificial; identical to SEQ ID NO: 10185
  oligonucleotide probe

SEQ ID NO: 10407 - DNA, 32 bp, Artificial; identical to SEQ ID NO: 8766
  oligonucleotide probe

SEQ ID NO: 10408 - DNA, 32 bp, Artificial; identical to SEQ ID NO: 8767
  oligonucleotide probe

SEQ ID NO: 10409 - DNA, 32 bp, Artificial
  oligonucleotide probe
gcacgggaaagcggctttcgccgtttgcgctg

SEQ ID NO: 10410 - DNA, 32 bp, Artificial
  oligonucleotide probe
gcacgggaaagcggctccgtcgcaaagcgcac

SEQ ID NO: 10411 - DNA, 32 bp, Artificial; identical to SEQ ID NO: 8240
  oligonucleotide probe

SEQ ID NO: 10412 - DNA, 32 bp, Artificial; identical to SEQ ID NO: 8442
  oligonucleotide probe

SEQ ID NO: 10413 - DNA, 32 bp, Artificial; identical to SEQ ID NO: 10078
  oligonucleotide probe

SEQ ID NO: 10414 - DNA, 32 bp, Artificial; identical to SEQ ID NO: 5555
  oligonucleotide probe

SEQ ID NO: 10415 - DNA, 32 bp, Artificial; identical to SEQ ID NO: 10405
  oligonucleotide probe

SEQ ID NO: 10416 - DNA, 32 bp, Artificial; identical to SEQ ID NO: 10185
  oligonucleotide probe

SEQ ID NO: 10417 - DNA, 32 bp, Artificial; identical to SEQ ID NO: 8748
  oligonucleotide probe

SEQ ID NO: 10418 - DNA, 32 bp, Artificial; identical to SEQ ID NO: 8749
  oligonucleotide probe

SEQ ID NO: 10419 - DNA, 32 bp, Artificial; identical to SEQ ID NO: 8804
  oligonucleotide probe

SEQ ID NO: 10420 - DNA, 32 bp, Artificial; identical to SEQ ID NO: 5565
  oligonucleotide probe

SEQ ID NO: 10421 - DNA, 32 bp, Artificial; identical to SEQ ID NO: 9252
  oligonucleotide probe

SEQ ID NO: 10422 - DNA, 32 bp, Artificial; identical to SEQ ID NO: 9253
  oligonucleotide probe

SEQ ID NO: 10423 - DNA, 32 bp, Artificial; identical to SEQ ID NO: 5708
  oligonucleotide probe

SEQ ID NO: 10424 - DNA, 32 bp, Artificial; identical to SEQ ID NO: 10372
  oligonucleotide probe

SEQ ID NO: 10425 - DNA, 32 bp, Artificial; identical to SEQ ID NO: 10185
  oligonucleotide probe

SEQ ID NO: 10426 - DNA, 32 bp, Artificial; identical to SEQ ID NO: 10186
  oligonucleotide probe

SEQ ID NO: 10427 - DNA, 32 bp, Artificial; identical to SEQ ID NO: 8784
  oligonucleotide probe

SEQ ID NO: 10428 - DNA, 32 bp, Artificial; identical to SEQ ID NO: 8785
  oligonucleotide probe

SEQ ID NO: 10429 - DNA, 32 bp, Artificial; identical to SEQ ID NO: 10076
  oligonucleotide probe

SEQ ID NO: 10430 - DNA, 32 bp, Artificial; identical to SEQ ID NO: 6074
  oligonucleotide probe

SEQ ID NO: 10431 - DNA, 32 bp, Artificial; identical to SEQ ID NO: 10076
  oligonucleotide probe

SEQ ID NO: 10432 - DNA, 32 bp, Artificial; identical to SEQ ID NO: 6074
  oligonucleotide probe

SEQ ID NO: 10433 - DNA, 32 bp, Artificial; identical to SEQ ID NO: 10076
  oligonucleotide probe

SEQ ID NO: 10434 - DNA, 32 bp, Artificial; identical to SEQ ID NO: 6074
  oligonucleotide probe

SEQ ID NO: 10435 - DNA, 32 bp, Artificial; identical to SEQ ID NO: 10164
  oligonucleotide probe

SEQ ID NO: 10436 - DNA, 32 bp, Artificial; identical to SEQ ID NO: 10139
  oligonucleotide probe

SEQ ID NO: 10437 - DNA, 32 bp, Artificial; identical to SEQ ID NO: 10318
  oligonucleotide probe

SEQ ID NO: 10438 - DNA, 32 bp, Artificial; identical to SEQ ID NO: 10405
  oligonucleotide probe

SEQ ID NO: 10439 - DNA, 32 bp, Artificial; identical to SEQ ID NO: 5546
  oligonucleotide probe

SEQ ID NO: 10440 - DNA, 32 bp, Artificial; identical to SEQ ID NO: 8757
  oligonucleotide probe

SEQ ID NO: 10441 - DNA, 32 bp, Artificial; identical to SEQ ID NO: 5185
  oligonucleotide probe

SEQ ID NO: 10442 - DNA, 32 bp, Artificial; identical to SEQ ID NO: 7655
  oligonucleotide probe

SEQ ID NO: 10443 - DNA, 32 bp, Artificial; identical to SEQ ID NO: 9020
  oligonucleotide probe

SEQ ID NO: 10444 - DNA, 32 bp, Artificial; identical to SEQ ID NO: 9021
  oligonucleotide probe

SEQ ID NO: 10445 - DNA, 32 bp, Artificial; identical to SEQ ID NO: 7863
  oligonucleotide probe

SEQ ID NO: 10446 - DNA, 32 bp, Artificial; identical to SEQ ID NO: 5217
  oligonucleotide probe

SEQ ID NO: 10447 - DNA, 32 bp, Artificial; identical to SEQ ID NO: 10052
  oligonucleotide probe

SEQ ID NO: 10448 - DNA, 32 bp, Artificial; identical to SEQ ID NO: 5163
  oligonucleotide probe

SEQ ID NO: 10449 - DNA, 32 bp, Artificial; identical to SEQ ID NO: 8753
  oligonucleotide probe

SEQ ID NO: 10450 - DNA, 32 bp, Artificial; identical to SEQ ID NO: 8760
  oligonucleotide probe

SEQ ID NO: 10451 - DNA, 32 bp, Artificial; identical to SEQ ID NO: 5547
  oligonucleotide probe

SEQ ID NO: 10452 - DNA, 32 bp, Artificial; identical to SEQ ID NO: 10272
  oligonucleotide probe

SEQ ID NO: 10453 - DNA, 32 bp, Artificial; identical to SEQ ID NO: 10115
  oligonucleotide probe

SEQ ID NO: 10454 - DNA, 32 bp, Artificial; identical to SEQ ID NO: 10116
  oligonucleotide probe

SEQ ID NO: 10455 - DNA, 32 bp, Artificial; identical to SEQ ID NO: 5224
  oligonucleotide probe

SEQ ID NO: 10456 - DNA, 32 bp, Artificial; identical to SEQ ID NO: 8796
  oligonucleotide probe

SEQ ID NO: 10457 - DNA, 32 bp, Artificial; identical to SEQ ID NO: 9314
  oligonucleotide probe

SEQ ID NO: 10458 - DNA, 32 bp, Artificial; identical to SEQ ID NO: 9315
  oligonucleotide probe

SEQ ID NO: 10459 - DNA, 32 bp, Artificial; identical to SEQ ID NO: 6131
  oligonucleotide probe

SEQ ID NO: 10460 - DNA, 32 bp, Artificial; identical to SEQ ID NO: 10082
  oligonucleotide probe

SEQ ID NO: 10461 - DNA, 32 bp, Artificial; identical to SEQ ID NO: 5159
  oligonucleotide probe

SEQ ID NO: 10462 - DNA, 32 bp, Artificial; identical to SEQ ID NO: 7694
  oligonucleotide probe

SEQ ID NO: 10463 - DNA, 32 bp, Artificial; identical to SEQ ID NO: 5708
  oligonucleotide probe

SEQ ID NO: 10464 - DNA, 32 bp, Artificial; identical to SEQ ID NO: 10372
  oligonucleotide probe

SEQ ID NO: 10465 - DNA, 32 bp, Artificial; identical to SEQ ID NO: 5546
  oligonucleotide probe

SEQ ID NO: 10466 - DNA, 32 bp, Artificial; identical to SEQ ID NO: 8757
  oligonucleotide probe

SEQ ID NO: 10467 - DNA, 32 bp, Artificial; identical to SEQ ID NO: 8762
  oligonucleotide probe

SEQ ID NO: 10468 - DNA, 32 bp, Artificial; identical to SEQ ID NO: 5539
  oligonucleotide probe

SEQ ID NO: 10469 - DNA, 32 bp, Artificial; identical to SEQ ID NO: 7832
  oligonucleotide probe

SEQ ID NO: 10470 - DNA, 32 bp, Artificial; identical to SEQ ID NO: 9020
  oligonucleotide probe

SEQ ID NO: 10471 - DNA, 32 bp, Artificial; identical to SEQ ID NO: 7834
  oligonucleotide probe

SEQ ID NO: 10472 - DNA, 32 bp, Artificial; identical to SEQ ID NO: 7831
  oligonucleotide probe

SEQ ID NO: 10473 - DNA, 32 bp, Artificial; identical to SEQ ID NO: 9252
  oligonucleotide probe

SEQ ID NO: 10474 - DNA, 32 bp, Artificial; identical to SEQ ID NO: 9253
  oligonucleotide probe

SEQ ID NO: 10475 - DNA, 32 bp, Artificial; identical to SEQ ID NO: 8868
  oligonucleotide probe

SEQ ID NO: 10476 - DNA, 32 bp, Artificial; identical to SEQ ID NO: 5584
  oligonucleotide probe

SEQ ID NO: 10477 - DNA, 32 bp, Artificial; identical to SEQ ID NO: 8776
  oligonucleotide probe

SEQ ID NO: 10478 - DNA, 32 bp, Artificial; identical to SEQ ID NO: 8777
  oligonucleotide probe

SEQ ID NO: 10479 - DNA, 32 bp, Artificial; identical to SEQ ID NO: 8804
  oligonucleotide probe

SEQ ID NO: 10480 - DNA, 32 bp, Artificial; identical to SEQ ID NO: 5565
  oligonucleotide probe

SEQ ID NO: 10481 - DNA, 32 bp, Artificial; identical to SEQ ID NO: 8778
  oligonucleotide probe

SEQ ID NO: 10482 - DNA, 32 bp, Artificial; identical to SEQ ID NO: 5564
  oligonucleotide probe

SEQ ID NO: 10483 - DNA, 32 bp, Artificial; identical to SEQ ID NO: 8047
  oligonucleotide probe

SEQ ID NO: 10484 - DNA, 32 bp, Artificial; identical to SEQ ID NO: 5240
  oligonucleotide probe

SEQ ID NO: 10485 - DNA, 32 bp, Artificial; identical to SEQ ID NO: 5171
  oligonucleotide probe

SEQ ID NO: 10486 - DNA, 32 bp, Artificial; identical to SEQ ID NO: 7676
  oligonucleotide probe

SEQ ID NO: 10487 - DNA, 32 bp, Artificial; identical to SEQ ID NO: 10164
  oligonucleotide probe

SEQ ID NO: 10488 - DNA, 32 bp, Artificial; identical to SEQ ID NO: 10139
  oligonucleotide probe

SEQ ID NO: 10489 - DNA, 32 bp, Artificial; identical to SEQ ID NO: 8753
  oligonucleotide probe

SEQ ID NO: 10490 - DNA, 32 bp, Artificial; identical to SEQ ID NO: 8760
  oligonucleotide probe

SEQ ID NO: 10491 - DNA, 32 bp, Artificial; identical to SEQ ID NO: 9020
  oligonucleotide probe

SEQ ID NO: 10492 - DNA, 32 bp, Artificial; identical to SEQ ID NO: 9021
  oligonucleotide probe

SEQ ID NO: 10493 - DNA, 32 bp, Artificial; identical to SEQ ID NO: 5547
  oligonucleotide probe

SEQ ID NO: 10494 - DNA, 32 bp, Artificial; identical to SEQ ID NO: 10272
  oligonucleotide probe

SEQ ID NO: 10495 - DNA, 32 bp, Artificial; identical to SEQ ID NO: 9922
  oligonucleotide probe

SEQ ID NO: 10496 - DNA, 32 bp, Artificial; identical to SEQ ID NO: 7623
  oligonucleotide probe

SEQ ID NO: 10497 - DNA, 32 bp, Artificial; identical to SEQ ID NO: 8776
  oligonucleotide probe

SEQ ID NO: 10498 - DNA, 32 bp, Artificial; identical to SEQ ID NO: 8777
  oligonucleotide probe

SEQ ID NO: 10499 - DNA, 32 bp, Artificial; identical to SEQ ID NO: 8804
  oligonucleotide probe

SEQ ID NO: 10500 - DNA, 32 bp, Artificial; identical to SEQ ID NO: 5565
  oligonucleotide probe

SEQ ID NO: 10501 - DNA, 32 bp, Artificial
  oligonucleotide probe
ttgcatggcgtggggaaacggctgcaagcgca

SEQ ID NO: 10502 - DNA, 32 bp, Artificial; identical to SEQ ID NO: 10123
  oligonucleotide probe

SEQ ID NO: 10503 - DNA, 32 bp, Artificial; identical to SEQ ID NO: 5555
  oligonucleotide probe

SEQ ID NO: 10504 - DNA, 32 bp, Artificial; identical to SEQ ID NO: 10189
  oligonucleotide probe

SEQ ID NO: 10505 - DNA, 32 bp, Artificial; identical to SEQ ID NO: 10114
  oligonucleotide probe

SEQ ID NO: 10506 - DNA, 32 bp, Artificial
  oligonucleotide probe
ttgcatggcgtggggaccgtttcggctgggct

SEQ ID NO: 10507 - DNA, 32 bp, Artificial; identical to SEQ ID NO: 5546
  oligonucleotide probe

SEQ ID NO: 10508 - DNA, 32 bp, Artificial; identical to SEQ ID NO: 8757
  oligonucleotide probe

SEQ ID NO: 10509 - DNA, 32 bp, Artificial; identical to SEQ ID NO: 8748
  oligonucleotide probe

SEQ ID NO: 10510 - DNA, 32 bp, Artificial; identical to SEQ ID NO: 8749
  oligonucleotide probe

SEQ ID NO: 10511 - DNA, 32 bp, Artificial; identical to SEQ ID NO: 7863
  oligonucleotide probe

SEQ ID NO: 10512 - DNA, 32 bp, Artificial; identical to SEQ ID NO: 5217
  oligonucleotide probe

SEQ ID NO: 10513 - DNA, 32 bp, Artificial; identical to SEQ ID NO: 10078
  oligonucleotide probe

SEQ ID NO: 10514 - DNA, 32 bp, Artificial; identical to SEQ ID NO: 5555
  oligonucleotide probe

SEQ ID NO: 10515 - DNA, 32 bp, Artificial; identical to SEQ ID NO: 10139
  oligonucleotide probe

SEQ ID NO: 10516 - DNA, 32 bp, Artificial; identical to SEQ ID NO: 5537
  oligonucleotide probe

SEQ ID NO: 10517 - DNA, 32 bp, Artificial; identical to SEQ ID NO: 8750
  oligonucleotide probe

SEQ ID NO: 10518 - DNA, 32 bp, Artificial; identical to SEQ ID NO: 8751
  oligonucleotide probe

SEQ ID NO: 10519 - DNA, 32 bp, Artificial; identical to SEQ ID NO: 5185
  oligonucleotide probe

SEQ ID NO: 10520 - DNA, 32 bp, Artificial; identical to SEQ ID NO: 7655
  oligonucleotide probe

SEQ ID NO: 10521 - DNA, 32 bp, Artificial; identical to SEQ ID NO: 8762
  oligonucleotide probe

SEQ ID NO: 10522 - DNA, 32 bp, Artificial; identical to SEQ ID NO: 5539
  oligonucleotide probe

SEQ ID NO: 10523 - DNA, 32 bp, Artificial; identical to SEQ ID NO: 10140
  oligonucleotide probe

SEQ ID NO: 10524 - DNA, 32 bp, Artificial; identical to SEQ ID NO: 10501
  oligonucleotide probe

SEQ ID NO: 10525 - DNA, 32 bp, Artificial; identical to SEQ ID NO: 8766
  oligonucleotide probe

SEQ ID NO: 10526 - DNA, 32 bp, Artificial; identical to SEQ ID NO: 8767
  oligonucleotide probe

SEQ ID NO: 10527 - DNA, 32 bp, Artificial; identical to SEQ ID NO: 5708
  oligonucleotide probe

SEQ ID NO: 10528 - DNA, 32 bp, Artificial; identical to SEQ ID NO: 8753
  oligonucleotide probe

SEQ ID NO: 10529 - DNA, 32 bp, Artificial; identical to SEQ ID NO: 10189
  oligonucleotide probe

SEQ ID NO: 10530 - DNA, 32 bp, Artificial; identical to SEQ ID NO: 5551
  oligonucleotide probe

SEQ ID NO: 10531 - DNA, 32 bp, Artificial; identical to SEQ ID NO: 10147
  oligonucleotide probe

SEQ ID NO: 10532 - DNA, 32 bp, Artificial; identical to SEQ ID NO: 10148
  oligonucleotide probe

SEQ ID NO: 10533 - DNA, 32 bp, Artificial
  oligonucleotide probe
cgcattgcggctttcggcaccgcagctgcgtg

SEQ ID NO: 10534 - DNA, 32 bp, Artificial; identical to SEQ ID NO: 5163
  oligonucleotide probe

SEQ ID NO: 10535 - DNA, 32 bp, Artificial; identical to SEQ ID NO: 5550
  oligonucleotide probe

SEQ ID NO: 10536 - DNA, 32 bp, Artificial; identical to SEQ ID NO: 10282
  oligonucleotide probe

SEQ ID NO: 10537 - DNA, 32 bp, Artificial; identical to SEQ ID NO: 5171
  oligonucleotide probe

SEQ ID NO: 10538 - DNA, 32 bp, Artificial; identical to SEQ ID NO: 7676
  oligonucleotide probe

SEQ ID NO: 10539 - DNA, 32 bp, Artificial; identical to SEQ ID NO: 10147
  oligonucleotide probe

SEQ ID NO: 10540 - DNA, 32 bp, Artificial; identical to SEQ ID NO: 10148
  oligonucleotide probe

SEQ ID NO: 10541 - DNA, 32 bp, Artificial; identical to SEQ ID NO: 10078
  oligonucleotide probe

SEQ ID NO: 10542 - DNA, 32 bp, Artificial; identical to SEQ ID NO: 10086
  oligonucleotide probe

SEQ ID NO: 10543 - DNA, 32 bp, Artificial; identical to SEQ ID NO: 7891
  oligonucleotide probe

SEQ ID NO: 10544 - DNA, 32 bp, Artificial; identical to SEQ ID NO: 5218
  oligonucleotide probe

SEQ ID NO: 10545 - DNA, 32 bp, Artificial; identical to SEQ ID NO: 8780
  oligonucleotide probe

SEQ ID NO: 10546 - DNA, 32 bp, Artificial; identical to SEQ ID NO: 8781
  oligonucleotide probe

SEQ ID NO: 10547 - DNA, 32 bp, Artificial; identical to SEQ ID NO: 8786
  oligonucleotide probe

SEQ ID NO: 10548 - DNA, 32 bp, Artificial; identical to SEQ ID NO: 5585
  oligonucleotide probe

SEQ ID NO: 10549 - DNA, 32 bp, Artificial; identical to SEQ ID NO: 8001
  oligonucleotide probe

SEQ ID NO: 10550 - DNA, 32 bp, Artificial; identical to SEQ ID NO: 5239
  oligonucleotide probe

SEQ ID NO: 10551 - DNA, 32 bp, Artificial; identical to SEQ ID NO: 10115
  oligonucleotide probe

SEQ ID NO: 10552 - DNA, 32 bp, Artificial; identical to SEQ ID NO: 10116
  oligonucleotide probe

SEQ ID NO: 10553 - DNA, 32 bp, Artificial; identical to SEQ ID NO: 5546
  oligonucleotide probe

SEQ ID NO: 10554 - DNA, 32 bp, Artificial; identical to SEQ ID NO: 8757
  oligonucleotide probe

SEQ ID NO: 10555 - DNA, 32 bp, Artificial; identical to SEQ ID NO: 10318
  oligonucleotide probe

SEQ ID NO: 10556 - DNA, 32 bp, Artificial; identical to SEQ ID NO: 10405
  oligonucleotide probe

SEQ ID NO: 10557 - DNA, 32 bp, Artificial; identical to SEQ ID NO: 7662
  oligonucleotide probe

SEQ ID NO: 10558 - DNA, 32 bp, Artificial; identical to SEQ ID NO: 7659
  oligonucleotide probe

SEQ ID NO: 10559 - DNA, 32 bp, Artificial; identical to SEQ ID NO: 8796
  oligonucleotide probe

SEQ ID NO: 10560 - DNA, 32 bp, Artificial; identical to SEQ ID NO: 5538
  oligonucleotide probe

SEQ ID NO: 10561 - DNA, 32 bp, Artificial; identical to SEQ ID NO: 8240
  oligonucleotide probe

SEQ ID NO: 10562 - DNA, 32 bp, Artificial; identical to SEQ ID NO: 8442
  oligonucleotide probe

SEQ ID NO: 10563 - DNA, 32 bp, Artificial; identical to SEQ ID NO: 5223
  oligonucleotide probe

SEQ ID NO: 10564 - DNA, 32 bp, Artificial; identical to SEQ ID NO: 7838
  oligonucleotide probe

SEQ ID NO: 10565 - DNA, 32 bp, Artificial; identical to SEQ ID NO: 7840
  oligonucleotide probe

SEQ ID NO: 10566 - DNA, 32 bp, Artificial; identical to SEQ ID NO: 7853
  oligonucleotide probe

SEQ ID NO: 10567 - DNA, 32 bp, Artificial; identical to SEQ ID NO: 5594
  oligonucleotide probe

SEQ ID NO: 10568 - DNA, 32 bp, Artificial; identical to SEQ ID NO: 7597
  oligonucleotide probe

SEQ ID NO: 10569 - DNA, 32 bp, Artificial; identical to SEQ ID NO: 7659
  oligonucleotide probe

SEQ ID NO: 10570 - DNA, 32 bp, Artificial; identical to SEQ ID NO: 7783
  oligonucleotide probe

SEQ ID NO: 10571 - DNA, 32 bp, Artificial; identical to SEQ ID NO: 7863
  oligonucleotide probe

SEQ ID NO: 10572 - DNA, 32 bp, Artificial; identical to SEQ ID NO: 5217
  oligonucleotide probe

SEQ ID NO: 10573 - DNA, 32 bp, Artificial; identical to SEQ ID NO: 5551
  oligonucleotide probe

SEQ ID NO: 10574 - DNA, 32 bp, Artificial; identical to SEQ ID NO: 10397
  oligonucleotide probe

SEQ ID NO: 10575 - DNA, 32 bp, Artificial; identical to SEQ ID NO: 10123
  oligonucleotide probe

SEQ ID NO: 10576 - DNA, 32 bp, Artificial; identical to SEQ ID NO: 10113
  oligonucleotide probe

SEQ ID NO: 10577 - DNA, 32 bp, Artificial; identical to SEQ ID NO: 10189
  oligonucleotide probe

SEQ ID NO: 10578 - DNA, 32 bp, Artificial; identical to SEQ ID NO: 5551
  oligonucleotide probe

SEQ ID NO: 10579 - DNA, 32 bp, Artificial; identical to SEQ ID NO: 5545
  oligonucleotide probe

SEQ ID NO: 10580 - DNA, 32 bp, Artificial; identical to SEQ ID NO: 10086
  oligonucleotide probe

SEQ ID NO: 10581 - DNA, 32 bp, Artificial; identical to SEQ ID NO: 8001
  oligonucleotide probe

SEQ ID NO: 10582 - DNA, 32 bp, Artificial; identical to SEQ ID NO: 5239
  oligonucleotide probe

SEQ ID NO: 10583 - DNA, 32 bp, Artificial; identical to SEQ ID NO: 10501
  oligonucleotide probe

SEQ ID NO: 10584 - DNA, 32 bp, Artificial; identical to SEQ ID NO: 5537
  oligonucleotide probe

SEQ ID NO: 10585 - DNA, 32 bp, Artificial; identical to SEQ ID NO: 8777
  oligonucleotide probe

SEQ ID NO: 10586 - DNA, 32 bp, Artificial; identical to SEQ ID NO: 5220
  oligonucleotide probe

SEQ ID NO: 10587 - DNA, 32 bp, Artificial; identical to SEQ ID NO: 10147
  oligonucleotide probe

SEQ ID NO: 10588 - DNA, 32 bp, Artificial; identical to SEQ ID NO: 10148
  oligonucleotide probe

SEQ ID NO: 10589 - DNA, 32 bp, Artificial; identical to SEQ ID NO: 8780
  oligonucleotide probe

SEQ ID NO: 10590 - DNA, 32 bp, Artificial; identical to SEQ ID NO: 8781
  oligonucleotide probe

SEQ ID NO: 10591 - DNA, 32 bp, Artificial; identical to SEQ ID NO: 7853
  oligonucleotide probe

SEQ ID NO: 10592 - DNA, 32 bp, Artificial; identical to SEQ ID NO: 5220
  oligonucleotide probe

SEQ ID NO: 10593 - DNA, 32 bp, Artificial; identical to SEQ ID NO: 5554
  oligonucleotide probe

SEQ ID NO: 10594 - DNA, 32 bp, Artificial; identical to SEQ ID NO: 10226
  oligonucleotide probe

SEQ ID NO: 10595 - DNA, 32 bp, Artificial; identical to SEQ ID NO: 10114
  oligonucleotide probe

SEQ ID NO: 10596 - DNA, 32 bp, Artificial; identical to SEQ ID NO: 10506
  oligonucleotide probe

SEQ ID NO: 10597 - DNA, 32 bp, Artificial; identical to SEQ ID NO: 10123
  oligonucleotide probe

SEQ ID NO: 10598 - DNA, 32 bp, Artificial; identical to SEQ ID NO: 10113
  oligonucleotide probe

SEQ ID NO: 10599 - DNA, 32 bp, Artificial; identical to SEQ ID NO: 7855
  oligonucleotide probe

SEQ ID NO: 10600 - DNA, 32 bp, Artificial; identical to SEQ ID NO: 7856
  oligonucleotide probe

SEQ ID NO: 10601 - DNA, 32 bp, Artificial; identical to SEQ ID NO: 5708
  oligonucleotide probe

SEQ ID NO: 10602 - DNA, 32 bp, Artificial; identical to SEQ ID NO: 10372
  oligonucleotide probe

SEQ ID NO: 10603 - DNA, 32 bp, Artificial; identical to SEQ ID NO: 5541
  oligonucleotide probe

SEQ ID NO: 10604 - DNA, 32 bp, Artificial; identical to SEQ ID NO: 10085
  oligonucleotide probe

SEQ ID NO: 10605 - DNA, 32 bp, Artificial; identical to SEQ ID NO: 7596
  oligonucleotide probe

SEQ ID NO: 10606 - DNA, 32 bp, Artificial; identical to SEQ ID NO: 5140
  oligonucleotide probe

SEQ ID NO: 10607 - DNA, 32 bp, Artificial; identical to SEQ ID NO: 8748
  oligonucleotide probe

SEQ ID NO: 10608 - DNA, 32 bp, Artificial; identical to SEQ ID NO: 8749
  oligonucleotide probe

SEQ ID NO: 10609 - DNA, 32 bp, Artificial; identical to SEQ ID NO: 10318
  oligonucleotide probe

SEQ ID NO: 10610 - DNA, 32 bp, Artificial; identical to SEQ ID NO: 10405
  oligonucleotide probe

SEQ ID NO: 10611 - DNA, 32 bp, Artificial; identical to SEQ ID NO: 8571
  oligonucleotide probe

SEQ ID NO: 10612 - DNA, 32 bp, Artificial; identical to SEQ ID NO: 10064
  oligonucleotide probe

SEQ ID NO: 10613 - DNA, 32 bp, Artificial; identical to SEQ ID NO: 8780
  oligonucleotide probe

SEQ ID NO: 10614 - DNA, 32 bp, Artificial; identical to SEQ ID NO: 8781
  oligonucleotide probe

SEQ ID NO: 10615 - DNA, 32 bp, Artificial; identical to SEQ ID NO: 8834
  oligonucleotide probe

SEQ ID NO: 10616 - DNA, 32 bp, Artificial; identical to SEQ ID NO: 5136
  oligonucleotide probe

SEQ ID NO: 10617 - DNA, 32 bp, Artificial; identical to SEQ ID NO: 8796
  oligonucleotide probe

SEQ ID NO: 10618 - DNA, 32 bp, Artificial; identical to SEQ ID NO: 5538
  oligonucleotide probe

SEQ ID NO: 10619 - DNA, 32 bp, Artificial; identical to SEQ ID NO: 5550
  oligonucleotide probe

SEQ ID NO: 10620 - DNA, 32 bp, Artificial; identical to SEQ ID NO: 10282
  oligonucleotide probe

SEQ ID NO: 10621 - DNA, 32 bp, Artificial; identical to SEQ ID NO: 8834
  oligonucleotide probe

SEQ ID NO: 10622 - DNA, 32 bp, Artificial; identical to SEQ ID NO: 8835
  oligonucleotide probe

SEQ ID NO: 10623 - DNA, 32 bp, Artificial; identical to SEQ ID NO: 9314
  oligonucleotide probe

SEQ ID NO: 10624 - DNA, 32 bp, Artificial; identical to SEQ ID NO: 9315
  oligonucleotide probe

SEQ ID NO: 10625 - DNA, 32 bp, Artificial; identical to SEQ ID NO: 10318
  oligonucleotide probe

SEQ ID NO: 10626 - DNA, 32 bp, Artificial; identical to SEQ ID NO: 10405
  oligonucleotide probe

SEQ ID NO: 10627 - DNA, 32 bp, Artificial; identical to SEQ ID NO: 5159
  oligonucleotide probe

SEQ ID NO: 10628 - DNA, 32 bp, Artificial; identical to SEQ ID NO: 7694
  oligonucleotide probe

SEQ ID NO: 10629 - DNA, 32 bp, Artificial; identical to SEQ ID NO: 5232
  oligonucleotide probe

SEQ ID NO: 10630 - DNA, 32 bp, Artificial; identical to SEQ ID NO: 9038
  oligonucleotide probe

SEQ ID NO: 10631 - DNA, 32 bp, Artificial; identical to SEQ ID NO: 10501
  oligonucleotide probe

SEQ ID NO: 10632 - DNA, 32 bp, Artificial; identical to SEQ ID NO: 10123
  oligonucleotide probe

SEQ ID NO: 10633 - DNA, 32 bp, Artificial; identical to SEQ ID NO: 8868
  oligonucleotide probe

SEQ ID NO: 10634 - DNA, 32 bp, Artificial; identical to SEQ ID NO: 5584
  oligonucleotide probe

SEQ ID NO: 10635 - DNA, 32 bp, Artificial; identical to SEQ ID NO: 5555
  oligonucleotide probe

SEQ ID NO: 10636 - DNA, 32 bp, Artificial; identical to SEQ ID NO: 10189
  oligonucleotide probe

SEQ ID NO: 10637 - DNA, 32 bp, Artificial; identical to SEQ ID NO: 8762
  oligonucleotide probe

SEQ ID NO: 10638 - DNA, 32 bp, Artificial; identical to SEQ ID NO: 5539
  oligonucleotide probe

SEQ ID NO: 10639 - DNA, 32 bp, Artificial; identical to SEQ ID NO: 8804
  oligonucleotide probe

SEQ ID NO: 10640 - DNA, 32 bp, Artificial; identical to SEQ ID NO: 8780
  oligonucleotide probe

SEQ ID NO: 10641 - DNA, 32 bp, Artificial; identical to SEQ ID NO: 7644
  oligonucleotide probe

SEQ ID NO: 10642 - DNA, 32 bp, Artificial; identical to SEQ ID NO: 5141
  oligonucleotide probe

SEQ ID NO: 10643 - DNA, 32 bp, Artificial; identical to SEQ ID NO: 10410
  oligonucleotide probe

SEQ ID NO: 10644 - DNA, 32 bp, Artificial
  oligonucleotide probe
gcacgggaaagcggctggctgcacggtcccgt

SEQ ID NO: 10645 - DNA, 32 bp, Artificial; identical to SEQ ID NO: 5546
  oligonucleotide probe

SEQ ID NO: 10646 - DNA, 32 bp, Artificial; identical to SEQ ID NO: 8757
  oligonucleotide probe

SEQ ID NO: 10647 - DNA, 32 bp, Artificial; identical to SEQ ID NO: 8804
  oligonucleotide probe

SEQ ID NO: 10648 - DNA, 32 bp, Artificial; identical to SEQ ID NO: 5565
  oligonucleotide probe

SEQ ID NO: 10649 - DNA, 32 bp, Artificial; identical to SEQ ID NO: 5547
  oligonucleotide probe

SEQ ID NO: 10650 - DNA, 32 bp, Artificial; identical to SEQ ID NO: 10272
  oligonucleotide probe

SEQ ID NO: 10651 - DNA, 32 bp, Artificial; identical to SEQ ID NO: 7690
  oligonucleotide probe

SEQ ID NO: 10652 - DNA, 32 bp, Artificial; identical to SEQ ID NO: 7662
  oligonucleotide probe

SEQ ID NO: 10653 - DNA, 32 bp, Artificial; identical to SEQ ID NO: 8047
  oligonucleotide probe

SEQ ID NO: 10654 - DNA, 32 bp, Artificial; identical to SEQ ID NO: 5240
  oligonucleotide probe

SEQ ID NO: 10655 - DNA, 32 bp, Artificial; identical to SEQ ID NO: 7840
  oligonucleotide probe

SEQ ID NO: 10656 - DNA, 32 bp, Artificial; identical to SEQ ID NO: 7853
  oligonucleotide probe

SEQ ID NO: 10657 - DNA, 32 bp, Artificial; identical to SEQ ID NO: 10140
  oligonucleotide probe

SEQ ID NO: 10658 - DNA, 32 bp, Artificial; identical to SEQ ID NO: 10501
  oligonucleotide probe

SEQ ID NO: 10659 - DNA, 32 bp, Artificial; identical to SEQ ID NO: 10086
  oligonucleotide probe

SEQ ID NO: 10660 - DNA, 32 bp, Artificial; identical to SEQ ID NO: 10115
  oligonucleotide probe

SEQ ID NO: 10661 - DNA, 32 bp, Artificial; identical to SEQ ID NO: 10140
  oligonucleotide probe

SEQ ID NO: 10662 - DNA, 32 bp, Artificial; identical to SEQ ID NO: 10501
  oligonucleotide probe

SEQ ID NO: 10663 - DNA, 32 bp, Artificial; identical to SEQ ID NO: 8784
  oligonucleotide probe

SEQ ID NO: 10664 - DNA, 32 bp, Artificial; identical to SEQ ID NO: 8785
  oligonucleotide probe

SEQ ID NO: 10665 - DNA, 32 bp, Artificial; identical to SEQ ID NO: 5223
  oligonucleotide probe

SEQ ID NO: 10666 - DNA, 32 bp, Artificial; identical to SEQ ID NO: 7838
  oligonucleotide probe

SEQ ID NO: 10667 - DNA, 32 bp, Artificial; identical to SEQ ID NO: 8786
  oligonucleotide probe

SEQ ID NO: 10668 - DNA, 32 bp, Artificial; identical to SEQ ID NO: 5585
  oligonucleotide probe

SEQ ID NO: 10669 - DNA, 32 bp, Artificial; identical to SEQ ID NO: 7841
  oligonucleotide probe

SEQ ID NO: 10670 - DNA, 32 bp, Artificial; identical to SEQ ID NO: 7842
  oligonucleotide probe

SEQ ID NO: 10671 - DNA, 32 bp, Artificial; identical to SEQ ID NO: 8760
  oligonucleotide probe

SEQ ID NO: 10672 - DNA, 32 bp, Artificial; identical to SEQ ID NO: 10164
  oligonucleotide probe

SEQ ID NO: 10673 - DNA, 32 bp, Artificial; identical to SEQ ID NO: 7605
  oligonucleotide probe

SEQ ID NO: 10674 - DNA, 32 bp, Artificial; identical to SEQ ID NO: 7606
  oligonucleotide probe

SEQ ID NO: 10675 - DNA, 32 bp, Artificial; identical to SEQ ID NO: 5546
  oligonucleotide probe

SEQ ID NO: 10676 - DNA, 32 bp, Artificial; identical to SEQ ID NO: 8757
  oligonucleotide probe

SEQ ID NO: 10677 - DNA, 32 bp, Artificial; identical to SEQ ID NO: 7662
  oligonucleotide probe

SEQ ID NO: 10678 - DNA, 32 bp, Artificial; identical to SEQ ID NO: 7659
  oligonucleotide probe

SEQ ID NO: 10679 - DNA, 32 bp, Artificial; identical to SEQ ID NO: 10116
  oligonucleotide probe

SEQ ID NO: 10680 - DNA, 32 bp, Artificial; identical to SEQ ID NO: 10147
  oligonucleotide probe

SEQ ID NO: 10681 - DNA, 32 bp, Artificial; identical to SEQ ID NO: 5708
  oligonucleotide probe

SEQ ID NO: 10682 - DNA, 32 bp, Artificial; identical to SEQ ID NO: 10372
  oligonucleotide probe

SEQ ID NO: 10683 - DNA, 32 bp, Artificial; identical to SEQ ID NO: 5231
  oligonucleotide probe

SEQ ID NO: 10684 - DNA, 32 bp, Artificial; identical to SEQ ID NO: 7835
  oligonucleotide probe

SEQ ID NO: 10685 - DNA, 32 bp, Artificial; identical to SEQ ID NO: 8780
  oligonucleotide probe

SEQ ID NO: 10686 - DNA, 32 bp, Artificial; identical to SEQ ID NO: 8781
  oligonucleotide probe

SEQ ID NO: 10687 - DNA, 32 bp, Artificial; identical to SEQ ID NO: 8784
  oligonucleotide probe

SEQ ID NO: 10688 - DNA, 32 bp, Artificial; identical to SEQ ID NO: 8785
  oligonucleotide probe

SEQ ID NO: 10689 - DNA, 32 bp, Artificial; identical to SEQ ID NO: 8571
  oligonucleotide probe

SEQ ID NO: 10690 - DNA, 32 bp, Artificial; identical to SEQ ID NO: 5163
  oligonucleotide probe

SEQ ID NO: 10691 - DNA, 32 bp, Artificial; identical to SEQ ID NO: 5133
  oligonucleotide probe

SEQ ID NO: 10692 - DNA, 32 bp, Artificial; identical to SEQ ID NO: 7594
  oligonucleotide probe

SEQ ID NO: 10693 - DNA, 32 bp, Artificial; identical to SEQ ID NO: 10409
  oligonucleotide probe

SEQ ID NO: 10694 - DNA, 32 bp, Artificial; identical to SEQ ID NO: 10410
  oligonucleotide probe

SEQ ID NO: 10695 - DNA, 32 bp, Artificial; identical to SEQ ID NO: 7812
  oligonucleotide probe

SEQ ID NO: 10696 - DNA, 32 bp, Artificial; identical to SEQ ID NO: 8247
  oligonucleotide probe

SEQ ID NO: 10697 - DNA, 32 bp, Artificial; identical to SEQ ID NO: 5231
  oligonucleotide probe

SEQ ID NO: 10698 - DNA, 32 bp, Artificial; identical to SEQ ID NO: 7835
  oligonucleotide probe

SEQ ID NO: 10699 - DNA, 32 bp, Artificial; identical to SEQ ID NO: 5546
  oligonucleotide probe

SEQ ID NO: 10700 - DNA, 32 bp, Artificial; identical to SEQ ID NO: 8757
  oligonucleotide probe

SEQ ID NO: 10701 - DNA, 32 bp, Artificial; identical to SEQ ID NO: 7812
  oligonucleotide probe

SEQ ID NO: 10702 - DNA, 32 bp, Artificial; identical to SEQ ID NO: 8247
  oligonucleotide probe

SEQ ID NO: 10703 - DNA, 32 bp, Artificial; identical to SEQ ID NO: 8936
  oligonucleotide probe

SEQ ID NO: 10704 - DNA, 32 bp, Artificial; identical to SEQ ID NO: 5595
  oligonucleotide probe

SEQ ID NO: 10705 - DNA, 32 bp, Artificial; identical to SEQ ID NO: 8001
  oligonucleotide probe

SEQ ID NO: 10706 - DNA, 32 bp, Artificial; identical to SEQ ID NO: 5239
  oligonucleotide probe

SEQ ID NO: 10707 - DNA, 32 bp, Artificial; identical to SEQ ID NO: 10078
  oligonucleotide probe

SEQ ID NO: 10708 - DNA, 32 bp, Artificial; identical to SEQ ID NO: 5555
  oligonucleotide probe

SEQ ID NO: 10709 - DNA, 32 bp, Artificial; identical to SEQ ID NO: 10189
  oligonucleotide probe

SEQ ID NO: 10710 - DNA, 32 bp, Artificial; identical to SEQ ID NO: 10086
  oligonucleotide probe

SEQ ID NO: 10711 - DNA, 32 bp, Artificial; identical to SEQ ID NO: 8834
  oligonucleotide probe

SEQ ID NO: 10712 - DNA, 32 bp, Artificial; identical to SEQ ID NO: 8835
  oligonucleotide probe

SEQ ID NO: 10713 - DNA, 32 bp, Artificial; identical to SEQ ID NO: 10139
  oligonucleotide probe

SEQ ID NO: 10714 - DNA, 32 bp, Artificial; identical to SEQ ID NO: 10140
  oligonucleotide probe

SEQ ID NO: 10715 - DNA, 32 bp, Artificial; identical to SEQ ID NO: 5541
  oligonucleotide probe

SEQ ID NO: 10716 - DNA, 32 bp, Artificial; identical to SEQ ID NO: 10085
  oligonucleotide probe

SEQ ID NO: 10717 - DNA, 32 bp, Artificial; identical to SEQ ID NO: 6131
  oligonucleotide probe

SEQ ID NO: 10718 - DNA, 32 bp, Artificial; identical to SEQ ID NO: 10082
  oligonucleotide probe

SEQ ID NO: 10719 - DNA, 32 bp, Artificial; identical to SEQ ID NO: 10115
  oligonucleotide probe

SEQ ID NO: 10720 - DNA, 32 bp, Artificial; identical to SEQ ID NO: 10116
  oligonucleotide probe

SEQ ID NO: 10721 - DNA, 32 bp, Artificial; identical to SEQ ID NO: 8780
  oligonucleotide probe

SEQ ID NO: 10722 - DNA, 32 bp, Artificial; identical to SEQ ID NO: 8781
  oligonucleotide probe

SEQ ID NO: 10723 - DNA, 32 bp, Artificial; identical to SEQ ID NO: 8780
  oligonucleotide probe

SEQ ID NO: 10724 - DNA, 32 bp, Artificial; identical to SEQ ID NO: 8781
  oligonucleotide probe

SEQ ID NO: 10725 - DNA, 32 bp, Artificial; identical to SEQ ID NO: 8936
  oligonucleotide probe

SEQ ID NO: 10726 - DNA, 32 bp, Artificial; identical to SEQ ID NO: 5595
  oligonucleotide probe

SEQ ID NO: 10727 - DNA, 32 bp, Artificial; identical to SEQ ID NO: 9038
  oligonucleotide probe

SEQ ID NO: 10728 - DNA, 32 bp, Artificial; identical to SEQ ID NO: 5594
  oligonucleotide probe

SEQ ID NO: 10729 - DNA, 32 bp, Artificial; identical to SEQ ID NO: 10506
  oligonucleotide probe

SEQ ID NO: 10730 - DNA, 32 bp, Artificial; identical to SEQ ID NO: 10331
  oligonucleotide probe

SEQ ID NO: 10731 - DNA, 32 bp, Artificial; identical to SEQ ID NO: 7624
  oligonucleotide probe

SEQ ID NO: 10732 - DNA, 32 bp, Artificial; identical to SEQ ID NO: 7605
  oligonucleotide probe

SEQ ID NO: 10733 - DNA, 32 bp, Artificial; identical to SEQ ID NO: 10113
  oligonucleotide probe

SEQ ID NO: 10734 - DNA, 32 bp, Artificial; identical to SEQ ID NO: 10114
  oligonucleotide probe

SEQ ID NO: 10735 - DNA, 32 bp, Artificial; identical to SEQ ID NO: 5160
  oligonucleotide probe

SEQ ID NO: 10736 - DNA, 32 bp, Artificial; identical to SEQ ID NO: 8244
  oligonucleotide probe

SEQ ID NO: 10737 - DNA, 32 bp, Artificial; identical to SEQ ID NO: 5546
  oligonucleotide probe

SEQ ID NO: 10738 - DNA, 32 bp, Artificial; identical to SEQ ID NO: 8757
  oligonucleotide probe

SEQ ID NO: 10739 - DNA, 32 bp, Artificial; identical to SEQ ID NO: 5223
  oligonucleotide probe

SEQ ID NO: 10740 - DNA, 32 bp, Artificial; identical to SEQ ID NO: 7838
  oligonucleotide probe

SEQ ID NO: 10741 - DNA, 32 bp, Artificial; identical to SEQ ID NO: 5537
  oligonucleotide probe

SEQ ID NO: 10742 - DNA, 32 bp, Artificial; identical to SEQ ID NO: 10076
  oligonucleotide probe

SEQ ID NO: 10743 - DNA, 32 bp, Artificial; identical to SEQ ID NO: 8778
  oligonucleotide probe

SEQ ID NO: 10744 - DNA, 32 bp, Artificial; identical to SEQ ID NO: 8780
  oligonucleotide probe

SEQ ID NO: 10745 - DNA, 32 bp, Artificial; identical to SEQ ID NO: 8804
  oligonucleotide probe

SEQ ID NO: 10746 - DNA, 32 bp, Artificial; identical to SEQ ID NO: 5565
  oligonucleotide probe

SEQ ID NO: 10747 - DNA, 32 bp, Artificial; identical to SEQ ID NO: 8762
  oligonucleotide probe

SEQ ID NO: 10748 - DNA, 32 bp, Artificial; identical to SEQ ID NO: 5539
  oligonucleotide probe

SEQ ID NO: 10749 - DNA, 32 bp, Artificial; identical to SEQ ID NO: 9922
  oligonucleotide probe

SEQ ID NO: 10750 - DNA, 32 bp, Artificial; identical to SEQ ID NO: 5611
  oligonucleotide probe

SEQ ID NO: 10751 - DNA, 32 bp, Artificial; identical to SEQ ID NO: 9038
  oligonucleotide probe

SEQ ID NO: 10752 - DNA, 32 bp, Artificial; identical to SEQ ID NO: 5594
  oligonucleotide probe

SEQ ID NO: 10753 - DNA, 32 bp, Artificial; identical to SEQ ID NO: 10186
  oligonucleotide probe

SEQ ID NO: 10754 - DNA, 32 bp, Artificial; identical to SEQ ID NO: 10409
  oligonucleotide probe

SEQ ID NO: 10755 - DNA, 32 bp, Artificial; identical to SEQ ID NO: 6131
  oligonucleotide probe

SEQ ID NO: 10756 - DNA, 32 bp, Artificial; identical to SEQ ID NO: 10082
  oligonucleotide probe

SEQ ID NO: 10757 - DNA, 32 bp, Artificial; identical to SEQ ID NO: 8796
  oligonucleotide probe

SEQ ID NO: 10758 - DNA, 32 bp, Artificial; identical to SEQ ID NO: 5538
  oligonucleotide probe

SEQ ID NO: 10759 - DNA, 32 bp, Artificial; identical to SEQ ID NO: 10115
  oligonucleotide probe

SEQ ID NO: 10760 - DNA, 32 bp, Artificial; identical to SEQ ID NO: 10116
  oligonucleotide probe

SEQ ID NO: 10761 - DNA, 32 bp, Artificial; identical to SEQ ID NO: 10097
  oligonucleotide probe

SEQ ID NO: 10762 - DNA, 32 bp, Artificial; identical to SEQ ID NO: 5709
  oligonucleotide probe

SEQ ID NO: 10763 - DNA, 32 bp, Artificial; identical to SEQ ID NO: 5399
  oligonucleotide probe

SEQ ID NO: 10764 - DNA, 32 bp, Artificial; identical to SEQ ID NO: 10053
  oligonucleotide probe

SEQ ID NO: 10765 - DNA, 32 bp, Artificial; identical to SEQ ID NO: 10409
  oligonucleotide probe

SEQ ID NO: 10766 - DNA, 32 bp, Artificial; identical to SEQ ID NO: 10410
  oligonucleotide probe

SEQ ID NO: 10767 - DNA, 32 bp, Artificial; identical to SEQ ID NO: 10123
  oligonucleotide probe

SEQ ID NO: 10768 - DNA, 32 bp, Artificial; identical to SEQ ID NO: 10113
  oligonucleotide probe

SEQ ID NO: 10769 - DNA, 32 bp, Artificial; identical to SEQ ID NO: 10115
  oligonucleotide probe

SEQ ID NO: 10770 - DNA, 32 bp, Artificial; identical to SEQ ID NO: 10116
  oligonucleotide probe

SEQ ID NO: 10771 - DNA, 32 bp, Artificial; identical to SEQ ID NO: 7865
  oligonucleotide probe

SEQ ID NO: 10772 - DNA, 32 bp, Artificial; identical to SEQ ID NO: 7866
  oligonucleotide probe

SEQ ID NO: 10773 - DNA, 32 bp, Artificial; identical to SEQ ID NO: 8750
  oligonucleotide probe

SEQ ID NO: 10774 - DNA, 32 bp, Artificial; identical to SEQ ID NO: 5220
  oligonucleotide probe

SEQ ID NO: 10775 - DNA, 32 bp, Artificial; identical to SEQ ID NO: 8780
  oligonucleotide probe

SEQ ID NO: 10776 - DNA, 32 bp, Artificial; identical to SEQ ID NO: 8781
  oligonucleotide probe

SEQ ID NO: 10777 - DNA, 32 bp, Artificial; identical to SEQ ID NO: 9021
  oligonucleotide probe

SEQ ID NO: 10778 - DNA, 32 bp, Artificial; identical to SEQ ID NO: 8748
  oligonucleotide probe

SEQ ID NO: 10779 - DNA, 32 bp, Artificial; identical to SEQ ID NO: 7644
  oligonucleotide probe

SEQ ID NO: 10780 - DNA, 32 bp, Artificial; identical to SEQ ID NO: 5141
  oligonucleotide probe

SEQ ID NO: 10781 - DNA, 32 bp, Artificial; identical to SEQ ID NO: 10113
  oligonucleotide probe

SEQ ID NO: 10782 - DNA, 32 bp, Artificial; identical to SEQ ID NO: 5537
  oligonucleotide probe

SEQ ID NO: 10783 - DNA, 32 bp, Artificial; identical to SEQ ID NO: 7833
  oligonucleotide probe

SEQ ID NO: 10784 - DNA, 32 bp, Artificial; identical to SEQ ID NO: 7834
  oligonucleotide probe

SEQ ID NO: 10785 - DNA, 32 bp, Artificial; identical to SEQ ID NO: 7596
  oligonucleotide probe

SEQ ID NO: 10786 - DNA, 32 bp, Artificial; identical to SEQ ID NO: 5140
  oligonucleotide probe

SEQ ID NO: 10787 - DNA, 32 bp, Artificial; identical to SEQ ID NO: 8778
  oligonucleotide probe

SEQ ID NO: 10788 - DNA, 32 bp, Artificial; identical to SEQ ID NO: 5564
  oligonucleotide probe

SEQ ID NO: 10789 - DNA, 32 bp, Artificial; identical to SEQ ID NO: 5708
  oligonucleotide probe

SEQ ID NO: 10790 - DNA, 32 bp, Artificial; identical to SEQ ID NO: 10372
  oligonucleotide probe

SEQ ID NO: 10791 - DNA, 32 bp, Artificial; identical to SEQ ID NO: 7866
  oligonucleotide probe

SEQ ID NO: 10792 - DNA, 32 bp, Artificial; identical to SEQ ID NO: 8834
  oligonucleotide probe

SEQ ID NO: 10793 - DNA, 32 bp, Artificial; identical to SEQ ID NO: 10064
  oligonucleotide probe

SEQ ID NO: 10794 - DNA, 32 bp, Artificial; identical to SEQ ID NO: 10052
  oligonucleotide probe

SEQ ID NO: 10795 - DNA, 32 bp, Artificial; identical to SEQ ID NO: 9826
  oligonucleotide probe

SEQ ID NO: 10796 - DNA, 32 bp, Artificial; identical to SEQ ID NO: 5610
  oligonucleotide probe

SEQ ID NO: 10797 - DNA, 32 bp, Artificial; identical to SEQ ID NO: 10397
  oligonucleotide probe

SEQ ID NO: 10798 - DNA, 32 bp, Artificial; identical to SEQ ID NO: 5541
  oligonucleotide probe

SEQ ID NO: 10799 - DNA, 32 bp, Artificial; identical to SEQ ID NO: 8868
  oligonucleotide probe

SEQ ID NO: 10800 - DNA, 32 bp, Artificial; identical to SEQ ID NO: 5584
  oligonucleotide probe

SEQ ID NO: 10801 - DNA, 32 bp, Artificial; identical to SEQ ID NO: 5546
  oligonucleotide probe

SEQ ID NO: 10802 - DNA, 32 bp, Artificial; identical to SEQ ID NO: 8757
  oligonucleotide probe

SEQ ID NO: 10803 - DNA, 32 bp, Artificial; identical to SEQ ID NO: 10164
  oligonucleotide probe

SEQ ID NO: 10804 - DNA, 32 bp, Artificial; identical to SEQ ID NO: 5537
  oligonucleotide probe

SEQ ID NO: 10805 - DNA, 32 bp, Artificial; identical to SEQ ID NO: 7783
  oligonucleotide probe

SEQ ID NO: 10806 - DNA, 32 bp, Artificial; identical to SEQ ID NO: 7812
  oligonucleotide probe

SEQ ID NO: 10807 - DNA, 32 bp, Artificial; identical to SEQ ID NO: 5171
  oligonucleotide probe

SEQ ID NO: 10808 - DNA, 32 bp, Artificial; identical to SEQ ID NO: 7676
  oligonucleotide probe

SEQ ID NO: 10809 - DNA, 32 bp, Artificial; identical to SEQ ID NO: 5547
  oligonucleotide probe

SEQ ID NO: 10810 - DNA, 32 bp, Artificial; identical to SEQ ID NO: 10272
  oligonucleotide probe

SEQ ID NO: 10811 - DNA, 32 bp, Artificial; identical to SEQ ID NO: 8784
  oligonucleotide probe

SEQ ID NO: 10812 - DNA, 32 bp, Artificial; identical to SEQ ID NO: 8785
  oligonucleotide probe

SEQ ID NO: 10813 - DNA, 32 bp, Artificial; identical to SEQ ID NO: 5159
  oligonucleotide probe

SEQ ID NO: 10814 - DNA, 32 bp, Artificial; identical to SEQ ID NO: 7694
  oligonucleotide probe

SEQ ID NO: 10815 - DNA, 32 bp, Artificial; identical to SEQ ID NO: 8753
  oligonucleotide probe

SEQ ID NO: 10816 - DNA, 32 bp, Artificial; identical to SEQ ID NO: 8760
  oligonucleotide probe

SEQ ID NO: 10817 - DNA, 32 bp, Artificial; identical to SEQ ID NO: 5554
  oligonucleotide probe

SEQ ID NO: 10818 - DNA, 32 bp, Artificial; identical to SEQ ID NO: 10226
  oligonucleotide probe

SEQ ID NO: 10819 - DNA, 32 bp, Artificial; identical to SEQ ID NO: 7605
  oligonucleotide probe

SEQ ID NO: 10820 - DNA, 32 bp, Artificial; identical to SEQ ID NO: 7606
  oligonucleotide probe

SEQ ID NO: 10821 - DNA, 32 bp, Artificial; identical to SEQ ID NO: 7623
  oligonucleotide probe

SEQ ID NO: 10822 - DNA, 32 bp, Artificial; identical to SEQ ID NO: 7624
  oligonucleotide probe

SEQ ID NO: 10823 - DNA, 32 bp, Artificial; identical to SEQ ID NO: 6074
  oligonucleotide probe

SEQ ID NO: 10824 - DNA, 32 bp, Artificial; identical to SEQ ID NO: 10097
  oligonucleotide probe

SEQ ID NO: 10825 - DNA, 32 bp, Artificial; identical to SEQ ID NO: 5538
  oligonucleotide probe

SEQ ID NO: 10826 - DNA, 32 bp, Artificial; identical to SEQ ID NO: 7840
  oligonucleotide probe

SEQ ID NO: 10827 - DNA, 32 bp, Artificial; identical to SEQ ID NO: 8835
  oligonucleotide probe

SEQ ID NO: 10828 - DNA, 32 bp, Artificial; identical to SEQ ID NO: 5136
  oligonucleotide probe

SEQ ID NO: 10829 - DNA, 32 bp, Artificial; identical to SEQ ID NO: 8776
  oligonucleotide probe

SEQ ID NO: 10830 - DNA, 32 bp, Artificial; identical to SEQ ID NO: 8777
  oligonucleotide probe

SEQ ID NO: 10831 - DNA, 32 bp, Artificial; identical to SEQ ID NO: 10318
  oligonucleotide probe

SEQ ID NO: 10832 - DNA, 32 bp, Artificial; identical to SEQ ID NO: 10405
  oligonucleotide probe

SEQ ID NO: 10833 - DNA, 32 bp, Artificial; identical to SEQ ID NO: 8778
  oligonucleotide probe

SEQ ID NO: 10834 - DNA, 32 bp, Artificial; identical to SEQ ID NO: 5564
  oligonucleotide probe

SEQ ID NO: 10835 - DNA, 32 bp, Artificial; identical to SEQ ID NO: 7841
  oligonucleotide probe

SEQ ID NO: 10836 - DNA, 32 bp, Artificial; identical to SEQ ID NO: 7842
  oligonucleotide probe

SEQ ID NO: 10837 - DNA, 32 bp, Artificial; identical to SEQ ID NO: 10164
  oligonucleotide probe

SEQ ID NO: 10838 - DNA, 32 bp, Artificial; identical to SEQ ID NO: 10139
  oligonucleotide probe

SEQ ID NO: 10839 - DNA, 32 bp, Artificial; identical to SEQ ID NO: 5547
  oligonucleotide probe

SEQ ID NO: 10840 - DNA, 32 bp, Artificial; identical to SEQ ID NO: 10272
  oligonucleotide probe

SEQ ID NO: 10841 - DNA, 32 bp, Artificial; identical to SEQ ID NO: 8796
  oligonucleotide probe

SEQ ID NO: 10842 - DNA, 32 bp, Artificial; identical to SEQ ID NO: 5538
  oligonucleotide probe

SEQ ID NO: 10843 - DNA, 32 bp, Artificial; identical to SEQ ID NO: 8784
  oligonucleotide probe

SEQ ID NO: 10844 - DNA, 32 bp, Artificial; identical to SEQ ID NO: 8785
  oligonucleotide probe

SEQ ID NO: 10845 - DNA, 32 bp, Artificial; identical to SEQ ID NO: 5708
  oligonucleotide probe

SEQ ID NO: 10846 - DNA, 32 bp, Artificial; identical to SEQ ID NO: 10372
  oligonucleotide probe

SEQ ID NO: 10847 - DNA, 32 bp, Artificial; identical to SEQ ID NO: 10064
  oligonucleotide probe

SEQ ID NO: 10848 - DNA, 32 bp, Artificial; identical to SEQ ID NO: 10052
  oligonucleotide probe

SEQ ID NO: 10849 - DNA, 32 bp, Artificial; identical to SEQ ID NO: 10148
  oligonucleotide probe

SEQ ID NO: 10850 - DNA, 32 bp, Artificial; identical to SEQ ID NO: 10318
  oligonucleotide probe

SEQ ID NO: 10851 - DNA, 32 bp, Artificial; identical to SEQ ID NO: 6131
  oligonucleotide probe

SEQ ID NO: 10852 - DNA, 32 bp, Artificial; identical to SEQ ID NO: 10082
  oligonucleotide probe

SEQ ID NO: 10853 - DNA, 32 bp, Artificial; identical to SEQ ID NO: 5547
  oligonucleotide probe

SEQ ID NO: 10854 - DNA, 32 bp, Artificial; identical to SEQ ID NO: 10272
  oligonucleotide probe

SEQ ID NO: 10855 - DNA, 32 bp, Artificial; identical to SEQ ID NO: 7598
  oligonucleotide probe

SEQ ID NO: 10856 - DNA, 32 bp, Artificial; identical to SEQ ID NO: 7855
  oligonucleotide probe

SEQ ID NO: 10857 - DNA, 32 bp, Artificial; identical to SEQ ID NO: 9826
  oligonucleotide probe

SEQ ID NO: 10858 - DNA, 32 bp, Artificial; identical to SEQ ID NO: 5610
  oligonucleotide probe

SEQ ID NO: 10859 - DNA, 32 bp, Artificial; identical to SEQ ID NO: 7865
  oligonucleotide probe

SEQ ID NO: 10860 - DNA, 32 bp, Artificial; identical to SEQ ID NO: 7866
  oligonucleotide probe

SEQ ID NO: 10861 - DNA, 32 bp, Artificial; identical to SEQ ID NO: 6131
  oligonucleotide probe

SEQ ID NO: 10862 - DNA, 32 bp, Artificial; identical to SEQ ID NO: 8753
  oligonucleotide probe

SEQ ID NO: 10863 - DNA, 32 bp, Artificial; identical to SEQ ID NO: 5416
  oligonucleotide probe

SEQ ID NO: 10864 - DNA, 32 bp, Artificial; identical to SEQ ID NO: 8467
  oligonucleotide probe

SEQ ID NO: 10865 - DNA, 32 bp, Artificial; identical to SEQ ID NO: 10331
  oligonucleotide probe

SEQ ID NO: 10866 - DNA, 32 bp, Artificial; identical to SEQ ID NO: 10332
  oligonucleotide probe

SEQ ID NO: 10867 - DNA, 32 bp, Artificial; identical to SEQ ID NO: 5538
  oligonucleotide probe

SEQ ID NO: 10868 - DNA, 32 bp, Artificial; identical to SEQ ID NO: 8762
  oligonucleotide probe

SEQ ID NO: 10869 - DNA, 32 bp, Artificial; identical to SEQ ID NO: 5551
  oligonucleotide probe

SEQ ID NO: 10870 - DNA, 32 bp, Artificial; identical to SEQ ID NO: 10397
  oligonucleotide probe

SEQ ID NO: 10871 - DNA, 32 bp, Artificial; identical to SEQ ID NO: 10086
  oligonucleotide probe

SEQ ID NO: 10872 - DNA, 32 bp, Artificial; identical to SEQ ID NO: 10115
  oligonucleotide probe

SEQ ID NO: 10873 - DNA, 32 bp, Artificial; identical to SEQ ID NO: 8780
  oligonucleotide probe

SEQ ID NO: 10874 - DNA, 32 bp, Artificial; identical to SEQ ID NO: 8781
  oligonucleotide probe

SEQ ID NO: 10875 - DNA, 32 bp, Artificial; identical to SEQ ID NO: 9826
  oligonucleotide probe

SEQ ID NO: 10876 - DNA, 32 bp, Artificial; identical to SEQ ID NO: 5610
  oligonucleotide probe

SEQ ID NO: 10877 - DNA, 32 bp, Artificial; identical to SEQ ID NO: 5232
  oligonucleotide probe

SEQ ID NO: 10878 - DNA, 32 bp, Artificial; identical to SEQ ID NO: 9038
  oligonucleotide probe

SEQ ID NO: 10879 - DNA, 32 bp, Artificial; identical to SEQ ID NO: 8001
  oligonucleotide probe

SEQ ID NO: 10880 - DNA, 32 bp, Artificial; identical to SEQ ID NO: 5239
  oligonucleotide probe

SEQ ID NO: 10881 - DNA, 32 bp, Artificial; identical to SEQ ID NO: 8776
  oligonucleotide probe

SEQ ID NO: 10882 - DNA, 32 bp, Artificial; identical to SEQ ID NO: 8777
  oligonucleotide probe

SEQ ID NO: 10883 - DNA, 32 bp, Artificial; identical to SEQ ID NO: 5547
  oligonucleotide probe

SEQ ID NO: 10884 - DNA, 32 bp, Artificial; identical to SEQ ID NO: 8753
  oligonucleotide probe

SEQ ID NO: 10885 - DNA, 32 bp, Artificial; identical to SEQ ID NO: 10332
  oligonucleotide probe

SEQ ID NO: 10886 - DNA, 32 bp, Artificial; identical to SEQ ID NO: 5537
  oligonucleotide probe

SEQ ID NO: 10887 - DNA, 32 bp, Artificial; identical to SEQ ID NO: 8778
  oligonucleotide probe

SEQ ID NO: 10888 - DNA, 32 bp, Artificial; identical to SEQ ID NO: 5564
  oligonucleotide probe

SEQ ID NO: 10889 - DNA, 32 bp, Artificial; identical to SEQ ID NO: 7891
  oligonucleotide probe

SEQ ID NO: 10890 - DNA, 32 bp, Artificial; identical to SEQ ID NO: 5218
  oligonucleotide probe

SEQ ID NO: 10891 - DNA, 32 bp, Artificial; identical to SEQ ID NO: 8748
  oligonucleotide probe

SEQ ID NO: 10892 - DNA, 32 bp, Artificial; identical to SEQ ID NO: 8749
  oligonucleotide probe

SEQ ID NO: 10893 - DNA, 32 bp, Artificial; identical to SEQ ID NO: 10114
  oligonucleotide probe

SEQ ID NO: 10894 - DNA, 32 bp, Artificial; identical to SEQ ID NO: 10506
  oligonucleotide probe

SEQ ID NO: 10895 - DNA, 32 bp, Artificial; identical to SEQ ID NO: 6145
  oligonucleotide probe

SEQ ID NO: 10896 - DNA, 32 bp, Artificial
  oligonucleotide probe
aagccgtgcgcaacgagcaccgcagctgcgtg

SEQ ID NO: 10897 - DNA, 32 bp, Artificial; identical to SEQ ID NO: 7891
  oligonucleotide probe

SEQ ID NO: 10898 - DNA, 32 bp, Artificial; identical to SEQ ID NO: 5218
  oligonucleotide probe

SEQ ID NO: 10899 - DNA, 32 bp, Artificial; identical to SEQ ID NO: 8796
  oligonucleotide probe

SEQ ID NO: 10900 - DNA, 32 bp, Artificial; identical to SEQ ID NO: 5538
  oligonucleotide probe

SEQ ID NO: 10901 - DNA, 32 bp, Artificial; identical to SEQ ID NO: 8047
  oligonucleotide probe

SEQ ID NO: 10902 - DNA, 32 bp, Artificial; identical to SEQ ID NO: 5240
  oligonucleotide probe

SEQ ID NO: 10903 - DNA, 32 bp, Artificial; identical to SEQ ID NO: 6131
  oligonucleotide probe

SEQ ID NO: 10904 - DNA, 32 bp, Artificial; identical to SEQ ID NO: 10082
  oligonucleotide probe

SEQ ID NO: 10905 - DNA, 32 bp, Artificial; identical to SEQ ID NO: 8750
  oligonucleotide probe

SEQ ID NO: 10906 - DNA, 32 bp, Artificial; identical to SEQ ID NO: 8751
  oligonucleotide probe

SEQ ID NO: 10907 - DNA, 32 bp, Artificial; identical to SEQ ID NO: 6131
  oligonucleotide probe

SEQ ID NO: 10908 - DNA, 32 bp, Artificial; identical to SEQ ID NO: 10082
  oligonucleotide probe

SEQ ID NO: 10909 - DNA, 32 bp, Artificial; identical to SEQ ID NO: 8776
  oligonucleotide probe

SEQ ID NO: 10910 - DNA, 32 bp, Artificial; identical to SEQ ID NO: 8777
  oligonucleotide probe

SEQ ID NO: 10911 - DNA, 32 bp, Artificial; identical to SEQ ID NO: 5399
  oligonucleotide probe

SEQ ID NO: 10912 - DNA, 32 bp, Artificial; identical to SEQ ID NO: 10053
  oligonucleotide probe

SEQ ID NO: 10913 - DNA, 32 bp, Artificial; identical to SEQ ID NO: 10405
  oligonucleotide probe

SEQ ID NO: 10914 - DNA, 32 bp, Artificial; identical to SEQ ID NO: 10185
  oligonucleotide probe

SEQ ID NO: 10915 - DNA, 32 bp, Artificial; identical to SEQ ID NO: 8868
  oligonucleotide probe

SEQ ID NO: 10916 - DNA, 32 bp, Artificial; identical to SEQ ID NO: 5584
  oligonucleotide probe

SEQ ID NO: 10917 - DNA, 32 bp, Artificial; identical to SEQ ID NO: 10533
  oligonucleotide probe

SEQ ID NO: 10918 - DNA, 32 bp, Artificial
  oligonucleotide probe
cgcattgcggctttcggcacgggaaagcggct

SEQ ID NO: 10919 - DNA, 32 bp, Artificial; identical to SEQ ID NO: 8753
  oligonucleotide probe

SEQ ID NO: 10920 - DNA, 32 bp, Artificial; identical to SEQ ID NO: 8760
  oligonucleotide probe

SEQ ID NO: 10921 - DNA, 32 bp, Artificial; identical to SEQ ID NO: 9826
  oligonucleotide probe

SEQ ID NO: 10922 - DNA, 32 bp, Artificial; identical to SEQ ID NO: 5610
  oligonucleotide probe

SEQ ID NO: 10923 - DNA, 32 bp, Artificial; identical to SEQ ID NO: 10140
  oligonucleotide probe

SEQ ID NO: 10924 - DNA, 32 bp, Artificial; identical to SEQ ID NO: 10501
  oligonucleotide probe

SEQ ID NO: 10925 - DNA, 32 bp, Artificial; identical to SEQ ID NO: 9252
  oligonucleotide probe

SEQ ID NO: 10926 - DNA, 32 bp, Artificial; identical to SEQ ID NO: 9253
  oligonucleotide probe

SEQ ID NO: 10927 - DNA, 32 bp, Artificial; identical to SEQ ID NO: 8786
  oligonucleotide probe

SEQ ID NO: 10928 - DNA, 32 bp, Artificial; identical to SEQ ID NO: 5585
  oligonucleotide probe

SEQ ID NO: 10929 - DNA, 32 bp, Artificial; identical to SEQ ID NO: 5540
  oligonucleotide probe

SEQ ID NO: 10930 - DNA, 32 bp, Artificial; identical to SEQ ID NO: 8753
  oligonucleotide probe

SEQ ID NO: 10931 - DNA, 32 bp, Artificial; identical to SEQ ID NO: 7673
  oligonucleotide probe

SEQ ID NO: 10932 - DNA, 32 bp, Artificial; identical to SEQ ID NO: 7690
  oligonucleotide probe

SEQ ID NO: 10933 - DNA, 32 bp, Artificial; identical to SEQ ID NO: 8780
  oligonucleotide probe

SEQ ID NO: 10934 - DNA, 32 bp, Artificial; identical to SEQ ID NO: 8781
  oligonucleotide probe

SEQ ID NO: 10935 - DNA, 32 bp, Artificial; identical to SEQ ID NO: 7598
  oligonucleotide probe

SEQ ID NO: 10936 - DNA, 32 bp, Artificial; identical to SEQ ID NO: 7855
  oligonucleotide probe

SEQ ID NO: 10937 - DNA, 32 bp, Artificial; identical to SEQ ID NO: 5171
  oligonucleotide probe

SEQ ID NO: 10938 - DNA, 32 bp, Artificial; identical to SEQ ID NO: 7676
  oligonucleotide probe

SEQ ID NO: 10939 - DNA, 32 bp, Artificial; identical to SEQ ID NO: 6074
  oligonucleotide probe

SEQ ID NO: 10940 - DNA, 32 bp, Artificial; identical to SEQ ID NO: 10097
  oligonucleotide probe

SEQ ID NO: 10941 - DNA, 32 bp, Artificial; identical to SEQ ID NO: 8796
  oligonucleotide probe

SEQ ID NO: 10942 - DNA, 32 bp, Artificial; identical to SEQ ID NO: 5538
  oligonucleotide probe

SEQ ID NO: 10943 - DNA, 32 bp, Artificial; identical to SEQ ID NO: 8776
  oligonucleotide probe

SEQ ID NO: 10944 - DNA, 32 bp, Artificial; identical to SEQ ID NO: 5220
  oligonucleotide probe

SEQ ID NO: 10945 - DNA, 32 bp, Artificial; identical to SEQ ID NO: 8766
  oligonucleotide probe

SEQ ID NO: 10946 - DNA, 32 bp, Artificial; identical to SEQ ID NO: 8767
  oligonucleotide probe

SEQ ID NO: 10947 - DNA, 32 bp, Artificial; identical to SEQ ID NO: 10140
  oligonucleotide probe

SEQ ID NO: 10948 - DNA, 32 bp, Artificial; identical to SEQ ID NO: 5537
  oligonucleotide probe

SEQ ID NO: 10949 - DNA, 32 bp, Artificial; identical to SEQ ID NO: 10076
  oligonucleotide probe

SEQ ID NO: 10950 - DNA, 32 bp, Artificial; identical to SEQ ID NO: 6074
  oligonucleotide probe

SEQ ID NO: 10951 - DNA, 32 bp, Artificial; identical to SEQ ID NO: 8750
  oligonucleotide probe

SEQ ID NO: 10952 - DNA, 32 bp, Artificial; identical to SEQ ID NO: 8751
  oligonucleotide probe

SEQ ID NO: 10953 - DNA, 32 bp, Artificial; identical to SEQ ID NO: 10115
  oligonucleotide probe

SEQ ID NO: 10954 - DNA, 32 bp, Artificial; identical to SEQ ID NO: 10116
  oligonucleotide probe

SEQ ID NO: 10955 - DNA, 32 bp, Artificial; identical to SEQ ID NO: 10076
  oligonucleotide probe

SEQ ID NO: 10956 - DNA, 32 bp, Artificial; identical to SEQ ID NO: 6074
  oligonucleotide probe

SEQ ID NO: 10957 - DNA, 32 bp, Artificial; identical to SEQ ID NO: 10331
  oligonucleotide probe

SEQ ID NO: 10958 - DNA, 32 bp, Artificial; identical to SEQ ID NO: 5537
  oligonucleotide probe

SEQ ID NO: 10959 - DNA, 32 bp, Artificial; identical to SEQ ID NO: 8868
  oligonucleotide probe

SEQ ID NO: 10960 - DNA, 32 bp, Artificial; identical to SEQ ID NO: 5584
  oligonucleotide probe

SEQ ID NO: 10961 - DNA, 32 bp, Artificial; identical to SEQ ID NO: 8753
  oligonucleotide probe

SEQ ID NO: 10962 - DNA, 32 bp, Artificial; identical to SEQ ID NO: 8760
  oligonucleotide probe

SEQ ID NO: 10963 - DNA, 32 bp, Artificial; identical to SEQ ID NO: 10506
  oligonucleotide probe

SEQ ID NO: 10964 - DNA, 32 bp, Artificial; identical to SEQ ID NO: 5537
  oligonucleotide probe

SEQ ID NO: 10965 - DNA, 32 bp, Artificial; identical to SEQ ID NO: 8778
  oligonucleotide probe

SEQ ID NO: 10966 - DNA, 32 bp, Artificial; identical to SEQ ID NO: 5564
  oligonucleotide probe

SEQ ID NO: 10967 - DNA, 32 bp, Artificial; identical to SEQ ID NO: 8936
  oligonucleotide probe

SEQ ID NO: 10968 - DNA, 32 bp, Artificial; identical to SEQ ID NO: 5595
  oligonucleotide probe

SEQ ID NO: 10969 - DNA, 32 bp, Artificial; identical to SEQ ID NO: 10076
  oligonucleotide probe

SEQ ID NO: 10970 - DNA, 32 bp, Artificial; identical to SEQ ID NO: 6074
  oligonucleotide probe

SEQ ID NO: 10971 - DNA, 32 bp, Artificial; identical to SEQ ID NO: 9922
  oligonucleotide probe

SEQ ID NO: 10972 - DNA, 32 bp, Artificial; identical to SEQ ID NO: 5611
  oligonucleotide probe

SEQ ID NO: 10973 - DNA, 32 bp, Artificial; identical to SEQ ID NO: 10123
  oligonucleotide probe

SEQ ID NO: 10974 - DNA, 32 bp, Artificial; identical to SEQ ID NO: 10113
  oligonucleotide probe

SEQ ID NO: 10975 - DNA, 32 bp, Artificial; identical to SEQ ID NO: 10097
  oligonucleotide probe

SEQ ID NO: 10976 - DNA, 32 bp, Artificial; identical to SEQ ID NO: 5709
  oligonucleotide probe

SEQ ID NO: 10977 - DNA, 32 bp, Artificial; identical to SEQ ID NO: 5160
  oligonucleotide probe

SEQ ID NO: 10978 - DNA, 32 bp, Artificial; identical to SEQ ID NO: 8244
  oligonucleotide probe

SEQ ID NO: 10979 - DNA, 32 bp, Artificial; identical to SEQ ID NO: 8834
  oligonucleotide probe

SEQ ID NO: 10980 - DNA, 32 bp, Artificial; identical to SEQ ID NO: 8835
  oligonucleotide probe

SEQ ID NO: 10981 - DNA, 32 bp, Artificial; identical to SEQ ID NO: 8780
  oligonucleotide probe

SEQ ID NO: 10982 - DNA, 32 bp, Artificial; identical to SEQ ID NO: 8781
  oligonucleotide probe

SEQ ID NO: 10983 - DNA, 32 bp, Artificial; identical to SEQ ID NO: 7596
  oligonucleotide probe

SEQ ID NO: 10984 - DNA, 32 bp, Artificial; identical to SEQ ID NO: 5140
  oligonucleotide probe

SEQ ID NO: 10985 - DNA, 32 bp, Artificial; identical to SEQ ID NO: 7863
  oligonucleotide probe

SEQ ID NO: 10986 - DNA, 32 bp, Artificial; identical to SEQ ID NO: 5217
  oligonucleotide probe

SEQ ID NO: 10987 - DNA, 32 bp, Artificial; identical to SEQ ID NO: 8750
  oligonucleotide probe

SEQ ID NO: 10988 - DNA, 32 bp, Artificial; identical to SEQ ID NO: 8751
  oligonucleotide probe

SEQ ID NO: 10989 - DNA, 32 bp, Artificial; identical to SEQ ID NO: 10501
  oligonucleotide probe

SEQ ID NO: 10990 - DNA, 32 bp, Artificial; identical to SEQ ID NO: 10123
  oligonucleotide probe

SEQ ID NO: 10991 - DNA, 32 bp, Artificial; identical to SEQ ID NO: 5223
  oligonucleotide probe

SEQ ID NO: 10992 - DNA, 32 bp, Artificial; identical to SEQ ID NO: 7838
  oligonucleotide probe

SEQ ID NO: 10993 - DNA, 32 bp, Artificial; identical to SEQ ID NO: 10147
  oligonucleotide probe

SEQ ID NO: 10994 - DNA, 32 bp, Artificial; identical to SEQ ID NO: 10148
  oligonucleotide probe

SEQ ID NO: 10995 - DNA, 32 bp, Artificial; identical to SEQ ID NO: 5547
  oligonucleotide probe

SEQ ID NO: 10996 - DNA, 32 bp, Artificial; identical to SEQ ID NO: 10272
  oligonucleotide probe

SEQ ID NO: 10997 - DNA, 32 bp, Artificial; identical to SEQ ID NO: 5224
  oligonucleotide probe

SEQ ID NO: 10998 - DNA, 32 bp, Artificial; identical to SEQ ID NO: 8796
  oligonucleotide probe

SEQ ID NO: 10999 - DNA, 32 bp, Artificial; identical to SEQ ID NO: 10097
  oligonucleotide probe

SEQ ID NO: 11000 - DNA, 32 bp, Artificial; identical to SEQ ID NO: 5709
  oligonucleotide probe

SEQ ID NO: 11001 - DNA, 32 bp, Artificial; identical to SEQ ID NO: 10164
  oligonucleotide probe

SEQ ID NO: 11002 - DNA, 32 bp, Artificial; identical to SEQ ID NO: 10139
  oligonucleotide probe

SEQ ID NO: 11003 - DNA, 32 bp, Artificial; identical to SEQ ID NO: 8748
  oligonucleotide probe

SEQ ID NO: 11004 - DNA, 32 bp, Artificial; identical to SEQ ID NO: 8749
  oligonucleotide probe

SEQ ID NO: 11005 - DNA, 32 bp, Artificial; identical to SEQ ID NO: 8786
  oligonucleotide probe

SEQ ID NO: 11006 - DNA, 32 bp, Artificial; identical to SEQ ID NO: 5585
  oligonucleotide probe

SEQ ID NO: 11007 - DNA, 32 bp, Artificial; identical to SEQ ID NO: 5416
  oligonucleotide probe

SEQ ID NO: 11008 - DNA, 32 bp, Artificial; identical to SEQ ID NO: 8467
  oligonucleotide probe

SEQ ID NO: 11009 - DNA, 32 bp, Artificial; identical to SEQ ID NO: 10116
  oligonucleotide probe

SEQ ID NO: 11010 - DNA, 32 bp, Artificial; identical to SEQ ID NO: 10147
  oligonucleotide probe

SEQ ID NO: 11011 - DNA, 32 bp, Artificial; identical to SEQ ID NO: 8778
  oligonucleotide probe

SEQ ID NO: 11012 - DNA, 32 bp, Artificial; identical to SEQ ID NO: 5564
  oligonucleotide probe

SEQ ID NO: 11013 - DNA, 32 bp, Artificial; identical to SEQ ID NO: 10147
  oligonucleotide probe

SEQ ID NO: 11014 - DNA, 32 bp, Artificial; identical to SEQ ID NO: 10148
  oligonucleotide probe

SEQ ID NO: 11015 - DNA, 32 bp, Artificial; identical to SEQ ID NO: 8834
  oligonucleotide probe

SEQ ID NO: 11016 - DNA, 32 bp, Artificial; identical to SEQ ID NO: 8835
  oligonucleotide probe

SEQ ID NO: 11017 - DNA, 32 bp, Artificial; identical to SEQ ID NO: 9020
  oligonucleotide probe

SEQ ID NO: 11018 - DNA, 32 bp, Artificial; identical to SEQ ID NO: 9021
  oligonucleotide probe

SEQ ID NO: 11019 - DNA, 32 bp, Artificial; identical to SEQ ID NO: 5134
  oligonucleotide probe

SEQ ID NO: 11020 - DNA, 32 bp, Artificial; identical to SEQ ID NO: 7905
  oligonucleotide probe

SEQ ID NO: 11021 - DNA, 32 bp, Artificial; identical to SEQ ID NO: 10097
  oligonucleotide probe

SEQ ID NO: 11022 - DNA, 32 bp, Artificial; identical to SEQ ID NO: 5709
  oligonucleotide probe

SEQ ID NO: 11023 - DNA, 32 bp, Artificial; identical to SEQ ID NO: 8762
  oligonucleotide probe

SEQ ID NO: 11024 - DNA, 32 bp, Artificial; identical to SEQ ID NO: 5539
  oligonucleotide probe

SEQ ID NO: 11025 - DNA, 32 bp, Artificial; identical to SEQ ID NO: 8750
  oligonucleotide probe

SEQ ID NO: 11026 - DNA, 32 bp, Artificial; identical to SEQ ID NO: 8751
  oligonucleotide probe

SEQ ID NO: 11027 - DNA, 32 bp, Artificial; identical to SEQ ID NO: 7891
  oligonucleotide probe

SEQ ID NO: 11028 - DNA, 32 bp, Artificial; identical to SEQ ID NO: 5218
  oligonucleotide probe

SEQ ID NO: 11029 - DNA, 32 bp, Artificial; identical to SEQ ID NO: 7606
  oligonucleotide probe

SEQ ID NO: 11030 - DNA, 32 bp, Artificial; identical to SEQ ID NO: 7947
  oligonucleotide probe

SEQ ID NO: 11031 - DNA, 32 bp, Artificial; identical to SEQ ID NO: 8760
  oligonucleotide probe

SEQ ID NO: 11032 - DNA, 32 bp, Artificial; identical to SEQ ID NO: 10164
  oligonucleotide probe

SEQ ID NO: 11033 - DNA, 32 bp, Artificial; identical to SEQ ID NO: 8766
  oligonucleotide probe

SEQ ID NO: 11034 - DNA, 32 bp, Artificial; identical to SEQ ID NO: 8767
  oligonucleotide probe

SEQ ID NO: 11035 - DNA, 32 bp, Artificial; identical to SEQ ID NO: 10086
  oligonucleotide probe

SEQ ID NO: 11036 - DNA, 32 bp, Artificial; identical to SEQ ID NO: 10115
  oligonucleotide probe

SEQ ID NO: 11037 - DNA, 32 bp, Artificial; identical to SEQ ID NO: 8442
  oligonucleotide probe

SEQ ID NO: 11038 - DNA, 32 bp, Artificial; identical to SEQ ID NO: 8571
  oligonucleotide probe

SEQ ID NO: 11039 - DNA, 32 bp, Artificial; identical to SEQ ID NO: 10397
  oligonucleotide probe

SEQ ID NO: 11040 - DNA, 32 bp, Artificial; identical to SEQ ID NO: 10086
  oligonucleotide probe

SEQ ID NO: 11041 - DNA, 32 bp, Artificial; identical to SEQ ID NO: 5546
  oligonucleotide probe

SEQ ID NO: 11042 - DNA, 32 bp, Artificial; identical to SEQ ID NO: 8757
  oligonucleotide probe

SEQ ID NO: 11043 - DNA, 32 bp, Artificial; identical to SEQ ID NO: 5554
  oligonucleotide probe

SEQ ID NO: 11044 - DNA, 32 bp, Artificial; identical to SEQ ID NO: 10226
  oligonucleotide probe

SEQ ID NO: 11045 - DNA, 32 bp, Artificial; identical to SEQ ID NO: 8868
  oligonucleotide probe

SEQ ID NO: 11046 - DNA, 32 bp, Artificial; identical to SEQ ID NO: 5584
  oligonucleotide probe

SEQ ID NO: 11047 - DNA, 32 bp, Artificial; identical to SEQ ID NO: 7831
  oligonucleotide probe

SEQ ID NO: 11048 - DNA, 32 bp, Artificial; identical to SEQ ID NO: 7832
  oligonucleotide probe

SEQ ID NO: 11049 - DNA, 32 bp, Artificial; identical to SEQ ID NO: 10644
  oligonucleotide probe

SEQ ID NO: 11050 - DNA, 32 bp, Artificial
  oligonucleotide probe
gcacgggaaagcggctgggattcgcgcaaacg

SEQ ID NO: 11051 - DNA, 32 bp, Artificial; identical to SEQ ID NO: 8778
  oligonucleotide probe

SEQ ID NO: 11052 - DNA, 32 bp, Artificial; identical to SEQ ID NO: 5564
  oligonucleotide probe

SEQ ID NO: 11053 - DNA, 32 bp, Artificial; identical to SEQ ID NO: 8776
  oligonucleotide probe

SEQ ID NO: 11054 - DNA, 32 bp, Artificial; identical to SEQ ID NO: 8777
  oligonucleotide probe

SEQ ID NO: 11055 - DNA, 32 bp, Artificial; identical to SEQ ID NO: 5546
  oligonucleotide probe

SEQ ID NO: 11056 - DNA, 32 bp, Artificial; identical to SEQ ID NO: 10086
  oligonucleotide probe

SEQ ID NO: 11057 - DNA, 32 bp, Artificial; identical to SEQ ID NO: 10076
  oligonucleotide probe

SEQ ID NO: 11058 - DNA, 32 bp, Artificial; identical to SEQ ID NO: 6074
  oligonucleotide probe

SEQ ID NO: 11059 - DNA, 32 bp, Artificial; identical to SEQ ID NO: 9038
  oligonucleotide probe

SEQ ID NO: 11060 - DNA, 32 bp, Artificial; identical to SEQ ID NO: 5594
  oligonucleotide probe

SEQ ID NO: 11061 - DNA, 32 bp, Artificial; identical to SEQ ID NO: 5547
  oligonucleotide probe

SEQ ID NO: 11062 - DNA, 32 bp, Artificial; identical to SEQ ID NO: 10272
  oligonucleotide probe

SEQ ID NO: 11063 - DNA, 32 bp, Artificial; identical to SEQ ID NO: 5546
  oligonucleotide probe

SEQ ID NO: 11064 - DNA, 32 bp, Artificial; identical to SEQ ID NO: 8757
  oligonucleotide probe

SEQ ID NO: 11065 - DNA, 32 bp, Artificial; identical to SEQ ID NO: 9020
  oligonucleotide probe

SEQ ID NO: 11066 - DNA, 32 bp, Artificial; identical to SEQ ID NO: 9021
  oligonucleotide probe

SEQ ID NO: 11067 - DNA, 32 bp, Artificial; identical to SEQ ID NO: 8762
  oligonucleotide probe

SEQ ID NO: 11068 - DNA, 32 bp, Artificial; identical to SEQ ID NO: 5539
  oligonucleotide probe

SEQ ID NO: 11069 - DNA, 32 bp, Artificial; identical to SEQ ID NO: 10116
  oligonucleotide probe

SEQ ID NO: 11070 - DNA, 32 bp, Artificial; identical to SEQ ID NO: 10147
  oligonucleotide probe

SEQ ID NO: 11071 - DNA, 32 bp, Artificial; identical to SEQ ID NO: 8804
  oligonucleotide probe

SEQ ID NO: 11072 - DNA, 32 bp, Artificial; identical to SEQ ID NO: 5565
  oligonucleotide probe

SEQ ID NO: 11073 - DNA, 32 bp, Artificial; identical to SEQ ID NO: 7596
  oligonucleotide probe

SEQ ID NO: 11074 - DNA, 32 bp, Artificial; identical to SEQ ID NO: 5140
  oligonucleotide probe

SEQ ID NO: 11075 - DNA, 32 bp, Artificial; identical to SEQ ID NO: 8778
  oligonucleotide probe

SEQ ID NO: 11076 - DNA, 32 bp, Artificial; identical to SEQ ID NO: 5564
  oligonucleotide probe

SEQ ID NO: 11077 - DNA, 32 bp, Artificial; identical to SEQ ID NO: 9038
  oligonucleotide probe

SEQ ID NO: 11078 - DNA, 32 bp, Artificial; identical to SEQ ID NO: 5594
  oligonucleotide probe

SEQ ID NO: 11079 - DNA, 32 bp, Artificial; identical to SEQ ID NO: 10186
  oligonucleotide probe

SEQ ID NO: 11080 - DNA, 32 bp, Artificial; identical to SEQ ID NO: 10409
  oligonucleotide probe

SEQ ID NO: 11081 - DNA, 32 bp, Artificial; identical to SEQ ID NO: 5134
  oligonucleotide probe

SEQ ID NO: 11082 - DNA, 32 bp, Artificial; identical to SEQ ID NO: 7905
  oligonucleotide probe

SEQ ID NO: 11083 - DNA, 32 bp, Artificial; identical to SEQ ID NO: 8776
  oligonucleotide probe

SEQ ID NO: 11084 - DNA, 32 bp, Artificial; identical to SEQ ID NO: 8777
  oligonucleotide probe

SEQ ID NO: 11085 - DNA, 32 bp, Artificial; identical to SEQ ID NO: 9020
  oligonucleotide probe

SEQ ID NO: 11086 - DNA, 32 bp, Artificial; identical to SEQ ID NO: 9021
  oligonucleotide probe

SEQ ID NO: 11087 - DNA, 32 bp, Artificial; identical to SEQ ID NO: 10140
  oligonucleotide probe

SEQ ID NO: 11088 - DNA, 32 bp, Artificial; identical to SEQ ID NO: 10501
  oligonucleotide probe

SEQ ID NO: 11089 - DNA, 32 bp, Artificial; identical to SEQ ID NO: 8753
  oligonucleotide probe

SEQ ID NO: 11090 - DNA, 32 bp, Artificial
  oligonucleotide probe
gcacgggaaagcggctttgcatggcgtgggga

SEQ ID NO: 11091 - DNA, 32 bp, Artificial; identical to SEQ ID NO: 11050
  oligonucleotide probe

SEQ ID NO: 11092 - DNA, 32 bp, Artificial; identical to SEQ ID NO: 10644
  oligonucleotide probe

SEQ ID NO: 11093 - DNA, 32 bp, Artificial; identical to SEQ ID NO: 7673
  oligonucleotide probe

SEQ ID NO: 11094 - DNA, 32 bp, Artificial; identical to SEQ ID NO: 7673
  oligonucleotide probe

SEQ ID NO: 11095 - DNA, 32 bp, Artificial; identical to SEQ ID NO: 5171
  oligonucleotide probe

SEQ ID NO: 11096 - DNA, 32 bp, Artificial; identical to SEQ ID NO: 5171
  oligonucleotide probe

SEQ ID NO: 11097 - DNA, 32 bp, Artificial; identical to SEQ ID NO: 7655
  oligonucleotide probe

SEQ ID NO: 11098 - DNA, 32 bp, Artificial; identical to SEQ ID NO: 7655
  oligonucleotide probe

SEQ ID NO: 11099 - DNA, 32 bp, Artificial; identical to SEQ ID NO: 7690
  oligonucleotide probe

SEQ ID NO: 11100 - DNA, 32 bp, Artificial; identical to SEQ ID NO: 7690
  oligonucleotide probe

SEQ ID NO: 11101 - DNA, 32 bp, Artificial; identical to SEQ ID NO: 5171
  oligonucleotide probe

SEQ ID NO: 11102 - DNA, 32 bp, Artificial; identical to SEQ ID NO: 5171
  oligonucleotide probe

SEQ ID NO: 11103 - DNA, 32 bp, Artificial; identical to SEQ ID NO: 7623
  oligonucleotide probe

SEQ ID NO: 11104 - DNA, 32 bp, Artificial; identical to SEQ ID NO: 7623
  oligonucleotide probe

SEQ ID NO: 11105 - DNA, 32 bp, Artificial; identical to SEQ ID NO: 7673
  oligonucleotide probe

SEQ ID NO: 11106 - DNA, 32 bp, Artificial; identical to SEQ ID NO: 7673
  oligonucleotide probe

SEQ ID NO: 11107 - DNA, 32 bp, Artificial; identical to SEQ ID NO: 7690
  oligonucleotide probe

SEQ ID NO: 11108 - DNA, 32 bp, Artificial; identical to SEQ ID NO: 7690
  oligonucleotide probe

SEQ ID NO: 11109 - DNA, 32 bp, Artificial; identical to SEQ ID NO: 5163
  oligonucleotide probe

SEQ ID NO: 11110 - DNA, 32 bp, Artificial; identical to SEQ ID NO: 5163
  oligonucleotide probe

SEQ ID NO: 11111 - DNA, 32 bp, Artificial; identical to SEQ ID NO: 5163
  oligonucleotide probe

SEQ ID NO: 11112 - DNA, 32 bp, Artificial; identical to SEQ ID NO: 5163
  oligonucleotide probe

SEQ ID NO: 11113 - DNA, 32 bp, Artificial; identical to SEQ ID NO: 7676
  oligonucleotide probe

SEQ ID NO: 11114 - DNA, 32 bp, Artificial; identical to SEQ ID NO: 7676
  oligonucleotide probe

SEQ ID NO: 11115 - DNA, 32 bp, Artificial; identical to SEQ ID NO: 5185
  oligonucleotide probe

SEQ ID NO: 11116 - DNA, 32 bp, Artificial; identical to SEQ ID NO: 5185
  oligonucleotide probe

SEQ ID NO: 11117 - DNA, 32 bp, Artificial; identical to SEQ ID NO: 7690
  oligonucleotide probe

SEQ ID NO: 11118 - DNA, 32 bp, Artificial; identical to SEQ ID NO: 7690
  oligonucleotide probe

SEQ ID NO: 11119 - DNA, 32 bp, Artificial; identical to SEQ ID NO: 5163
  oligonucleotide probe

SEQ ID NO: 11120 - DNA, 32 bp, Artificial; identical to SEQ ID NO: 5163
  oligonucleotide probe

SEQ ID NO: 11121 - DNA, 32 bp, Artificial; identical to SEQ ID NO: 5171
  oligonucleotide probe

SEQ ID NO: 11122 - DNA, 32 bp, Artificial; identical to SEQ ID NO: 5171
  oligonucleotide probe

SEQ ID NO: 11123 - DNA, 32 bp, Artificial; identical to SEQ ID NO: 7676
  oligonucleotide probe

SEQ ID NO: 11124 - DNA, 32 bp, Artificial; identical to SEQ ID NO: 7676
  oligonucleotide probe

SEQ ID NO: 11125 - DNA, 32 bp, Artificial; identical to SEQ ID NO: 7662
  oligonucleotide probe

SEQ ID NO: 11126 - DNA, 32 bp, Artificial; identical to SEQ ID NO: 7662
  oligonucleotide probe

SEQ ID NO: 11127 - DNA, 32 bp, Artificial; identical to SEQ ID NO: 5185
  oligonucleotide probe

SEQ ID NO: 11128 - DNA, 32 bp, Artificial; identical to SEQ ID NO: 5185
  oligonucleotide probe

SEQ ID NO: 11129 - DNA, 32 bp, Artificial; identical to SEQ ID NO: 7676
  oligonucleotide probe

SEQ ID NO: 11130 - DNA, 32 bp, Artificial; identical to SEQ ID NO: 7676
  oligonucleotide probe

SEQ ID NO: 11131 - DNA, 32 bp, Artificial; identical to SEQ ID NO: 7673
  oligonucleotide probe

SEQ ID NO: 11132 - DNA, 32 bp, Artificial; identical to SEQ ID NO: 7673
  oligonucleotide probe

SEQ ID NO: 11133 - DNA, 32 bp, Artificial; identical to SEQ ID NO: 5171
  oligonucleotide probe

SEQ ID NO: 11134 - DNA, 32 bp, Artificial; identical to SEQ ID NO: 5171
  oligonucleotide probe

SEQ ID NO: 11135 - DNA, 32 bp, Artificial; identical to SEQ ID NO: 7673
  oligonucleotide probe

SEQ ID NO: 11136 - DNA, 32 bp, Artificial; identical to SEQ ID NO: 7673
  oligonucleotide probe

SEQ ID NO: 11137 - DNA, 32 bp, Artificial; identical to SEQ ID NO: 7676
  oligonucleotide probe

SEQ ID NO: 11138 - DNA, 32 bp, Artificial; identical to SEQ ID NO: 7676
  oligonucleotide probe

SEQ ID NO: 11139 - DNA, 32 bp, Artificial; identical to SEQ ID NO: 7644
  oligonucleotide probe

SEQ ID NO: 11140 - DNA, 32 bp, Artificial; identical to SEQ ID NO: 7644
  oligonucleotide probe

SEQ ID NO: 11141 - DNA, 32 bp, Artificial; identical to SEQ ID NO: 5171
  oligonucleotide probe

SEQ ID NO: 11142 - DNA, 32 bp, Artificial; identical to SEQ ID NO: 5171
  oligonucleotide probe

SEQ ID NO: 11143 - DNA, 32 bp, Artificial; identical to SEQ ID NO: 5171
  oligonucleotide probe

SEQ ID NO: 11144 - DNA, 32 bp, Artificial; identical to SEQ ID NO: 5171
  oligonucleotide probe

SEQ ID NO: 11145 - DNA, 32 bp, Artificial; identical to SEQ ID NO: 5185
  oligonucleotide probe

SEQ ID NO: 11146 - DNA, 32 bp, Artificial; identical to SEQ ID NO: 5185
  oligonucleotide probe

SEQ ID NO: 11147 - DNA, 32 bp, Artificial; identical to SEQ ID NO: 5171
  oligonucleotide probe

SEQ ID NO: 11148 - DNA, 32 bp, Artificial; identical to SEQ ID NO: 5171
  oligonucleotide probe

SEQ ID NO: 11149 - DNA, 32 bp, Artificial; identical to SEQ ID NO: 7676
  oligonucleotide probe

SEQ ID NO: 11150 - DNA, 32 bp, Artificial; identical to SEQ ID NO: 7676
  oligonucleotide probe

SEQ ID NO: 11151 - DNA, 32 bp, Artificial; identical to SEQ ID NO: 7673
  oligonucleotide probe

SEQ ID NO: 11152 - DNA, 32 bp, Artificial; identical to SEQ ID NO: 7673
  oligonucleotide probe

SEQ ID NO: 11153 - DNA, 32 bp, Artificial; identical to SEQ ID NO: 5136
  oligonucleotide probe

SEQ ID NO: 11154 - DNA, 32 bp, Artificial; identical to SEQ ID NO: 5136
  oligonucleotide probe

SEQ ID NO: 11155 - DNA, 32 bp, Artificial; identical to SEQ ID NO: 5136
  oligonucleotide probe

SEQ ID NO: 11156 - DNA, 32 bp, Artificial; identical to SEQ ID NO: 5136
  oligonucleotide probe

SEQ ID NO: 11157 - DNA, 32 bp, Artificial; identical to SEQ ID NO: 5136
  oligonucleotide probe

SEQ ID NO: 11158 - DNA, 32 bp, Artificial; identical to SEQ ID NO: 5136
  oligonucleotide probe

SEQ ID NO: 11159 - DNA, 32 bp, Artificial; identical to SEQ ID NO: 5136
  oligonucleotide probe

SEQ ID NO: 11160 - DNA, 32 bp, Artificial; identical to SEQ ID NO: 5136
  oligonucleotide probe

SEQ ID NO: 11161 - DNA, 32 bp, Artificial; identical to SEQ ID NO: 5136
  oligonucleotide probe

SEQ ID NO: 11162 - DNA, 32 bp, Artificial; identical to SEQ ID NO: 5136
  oligonucleotide probe

SEQ ID NO: 11163 - DNA, 32 bp, Artificial
  oligonucleotide probe
ccgtttcggctgggctccgtttcggctgggct

SEQ ID NO: 11164 - DNA, 32 bp, Artificial; identical to SEQ ID NO: 11163
  oligonucleotide probe

SEQ ID NO: 11165 - DNA, 32 bp, Artificial
  oligonucleotide probe
aagccgtgcgcaacgaaagccgtgcgcaacga

SEQ ID NO: 11166 - DNA, 32 bp, Artificial; identical to SEQ ID NO: 11165
  oligonucleotide probe

SEQ ID NO: 11167 - DNA, 32 bp, Artificial
  oligonucleotide probe
ttcggggaaacgccgtttcggggaaacgccgt

SEQ ID NO: 11168 - DNA, 32 bp, Artificial; identical to SEQ ID NO: 11167
  oligonucleotide probe

SEQ ID NO: 11169 - DNA, 32 bp, Artificial; identical to SEQ ID NO: 11163
  oligonucleotide probe

SEQ ID NO: 11170 - DNA, 32 bp, Artificial; identical to SEQ ID NO: 11163
  oligonucleotide probe

SEQ ID NO: 11171 - DNA, 32 bp, Artificial
  oligonucleotide probe
cgcattgcggctttcgcgcattgcggctttcg

SEQ ID NO: 11172 - DNA, 32 bp, Artificial; identical to SEQ ID NO: 11171
  oligonucleotide probe

SEQ ID NO: 11173 - DNA, 32 bp, Artificial
  oligonucleotide probe
aacggctgcaagcgcaaacggctgcaagcgca

SEQ ID NO: 11174 - DNA, 32 bp, Artificial; identical to SEQ ID NO: 11173
  oligonucleotide probe

SEQ ID NO: 11175 - DNA, 32 bp, Artificial; identical to SEQ ID NO: 11163
  oligonucleotide probe

SEQ ID NO: 11176 - DNA, 32 bp, Artificial; identical to SEQ ID NO: 11163
  oligonucleotide probe

SEQ ID NO: 11177 - DNA, 32 bp, Artificial
  oligonucleotide probe
ggctttgcgcaccgtgggctttgcgcaccgtg

SEQ ID NO: 11178 - DNA, 32 bp, Artificial; identical to SEQ ID NO: 11177
  oligonucleotide probe

SEQ ID NO: 11179 - DNA, 32 bp, Artificial; identical to SEQ ID NO: 11165
  oligonucleotide probe

SEQ ID NO: 11180 - DNA, 32 bp, Artificial; identical to SEQ ID NO: 11165
  oligonucleotide probe

SEQ ID NO: 11181 - DNA, 32 bp, Artificial
  oligonucleotide probe
atggcgcagcacgctgatggcgcagcacgctg

SEQ ID NO: 11182 - DNA, 32 bp, Artificial; identical to SEQ ID NO: 11181
  oligonucleotide probe

SEQ ID NO: 11183 - DNA, 32 bp, Artificial; identical to SEQ ID NO: 11165
  oligonucleotide probe

SEQ ID NO: 11184 - DNA, 32 bp, Artificial; identical to SEQ ID NO: 11165
  oligonucleotide probe

SEQ ID NO: 11185 - DNA, 32 bp, Artificial
  oligonucleotide probe
ttgcaagcgtccgggattgcaagcgtccggga

SEQ ID NO: 11186 - DNA, 32 bp, Artificial; identical to SEQ ID NO: 11185
  oligonucleotide probe

SEQ ID NO: 11187 - DNA, 32 bp, Artificial; identical to SEQ ID NO: 11173
  oligonucleotide probe

SEQ ID NO: 11188 - DNA, 32 bp, Artificial; identical to SEQ ID NO: 11173
  oligonucleotide probe

SEQ ID NO: 11189 - DNA, 32 bp, Artificial; identical to SEQ ID NO: 11165
  oligonucleotide probe

SEQ ID NO: 11190 - DNA, 32 bp, Artificial; identical to SEQ ID NO: 11165
  oligonucleotide probe

SEQ ID NO: 11191 - DNA, 32 bp, Artificial; identical to SEQ ID NO: 11171
  oligonucleotide probe

SEQ ID NO: 11192 - DNA, 32 bp, Artificial; identical to SEQ ID NO: 11171
  oligonucleotide probe

SEQ ID NO: 11193 - DNA, 32 bp, Artificial; identical to SEQ ID NO: 11163
  oligonucleotide probe

SEQ ID NO: 11194 - DNA, 32 bp, Artificial; identical to SEQ ID NO: 11163
  oligonucleotide probe

SEQ ID NO: 11195 - DNA, 32 bp, Artificial; identical to SEQ ID NO: 11163
  oligonucleotide probe

SEQ ID NO: 11196 - DNA, 32 bp, Artificial; identical to SEQ ID NO: 11163
  oligonucleotide probe

SEQ ID NO: 11197 - DNA, 32 bp, Artificial; identical to SEQ ID NO: 11177
  oligonucleotide probe

SEQ ID NO: 11198 - DNA, 32 bp, Artificial; identical to SEQ ID NO: 11177
  oligonucleotide probe

SEQ ID NO: 11199 - DNA, 32 bp, Artificial; identical to SEQ ID NO: 11181
  oligonucleotide probe

SEQ ID NO: 11200 - DNA, 32 bp, Artificial; identical to SEQ ID NO: 11181
  oligonucleotide probe

SEQ ID NO: 11201 - DNA, 32 bp, Artificial; identical to SEQ ID NO: 11181
  oligonucleotide probe

SEQ ID NO: 11202 - DNA, 32 bp, Artificial; identical to SEQ ID NO: 11181
  oligonucleotide probe

SEQ ID NO: 11203 - DNA, 32 bp, Artificial; identical to SEQ ID NO: 11177
  oligonucleotide probe

SEQ ID NO: 11204 - DNA, 32 bp, Artificial; identical to SEQ ID NO: 11177
  oligonucleotide probe

SEQ ID NO: 11205 - DNA, 32 bp, Artificial; identical to SEQ ID NO: 11171
  oligonucleotide probe

SEQ ID NO: 11206 - DNA, 32 bp, Artificial; identical to SEQ ID NO: 11171
  oligonucleotide probe

SEQ ID NO: 11207 - DNA, 32 bp, Artificial; identical to SEQ ID NO: 11167
  oligonucleotide probe

SEQ ID NO: 11208 - DNA, 32 bp, Artificial; identical to SEQ ID NO: 11167
  oligonucleotide probe

SEQ ID NO: 11209 - DNA, 32 bp, Artificial; identical to SEQ ID NO: 11167
  oligonucleotide probe

SEQ ID NO: 11210 - DNA, 32 bp, Artificial; identical to SEQ ID NO: 11167
  oligonucleotide probe

SEQ ID NO: 11211 - DNA, 32 bp, Artificial; identical to SEQ ID NO: 11177
  oligonucleotide probe

SEQ ID NO: 11212 - DNA, 32 bp, Artificial; identical to SEQ ID NO: 11177
  oligonucleotide probe

SEQ ID NO: 11213 - DNA, 32 bp, Artificial; identical to SEQ ID NO: 11177
  oligonucleotide probe

SEQ ID NO: 11214 - DNA, 32 bp, Artificial; identical to SEQ ID NO: 11177
  oligonucleotide probe

SEQ ID NO: 11215 - DNA, 32 bp, Artificial; identical to SEQ ID NO: 11165
  oligonucleotide probe

SEQ ID NO: 11216 - DNA, 32 bp, Artificial; identical to SEQ ID NO: 11165
  oligonucleotide probe

SEQ ID NO: 11217 - DNA, 32 bp, Artificial; identical to SEQ ID NO: 11163
  oligonucleotide probe

SEQ ID NO: 11218 - DNA, 32 bp, Artificial; identical to SEQ ID NO: 11163
  oligonucleotide probe

SEQ ID NO: 11219 - DNA, 32 bp, Artificial; identical to SEQ ID NO: 11173
  oligonucleotide probe

SEQ ID NO: 11220 - DNA, 32 bp, Artificial; identical to SEQ ID NO: 11173
  oligonucleotide probe

SEQ ID NO: 11221 - DNA, 32 bp, Artificial; identical to SEQ ID NO: 11177
  oligonucleotide probe

SEQ ID NO: 11222 - DNA, 32 bp, Artificial; identical to SEQ ID NO: 11177
  oligonucleotide probe

SEQ ID NO: 11223 - DNA, 32 bp, Artificial; identical to SEQ ID NO: 11181
  oligonucleotide probe

SEQ ID NO: 11224 - DNA, 32 bp, Artificial; identical to SEQ ID NO: 11181
  oligonucleotide probe

SEQ ID NO: 11225 - DNA, 32 bp, Artificial; identical to SEQ ID NO: 11185
  oligonucleotide probe

SEQ ID NO: 11226 - DNA, 32 bp, Artificial; identical to SEQ ID NO: 11185
  oligonucleotide probe

SEQ ID NO: 11227 - DNA, 32 bp, Artificial; identical to SEQ ID NO: 11171
  oligonucleotide probe

SEQ ID NO: 11228 - DNA, 32 bp, Artificial; identical to SEQ ID NO: 11171
  oligonucleotide probe

SEQ ID NO: 11229 - DNA, 32 bp, Artificial; identical to SEQ ID NO: 11177
  oligonucleotide probe

SEQ ID NO: 11230 - DNA, 32 bp, Artificial; identical to SEQ ID NO: 11177
  oligonucleotide probe

SEQ ID NO: 11231 - DNA, 32 bp, Artificial; identical to SEQ ID NO: 11167
  oligonucleotide probe

SEQ ID NO: 11232 - DNA, 32 bp, Artificial; identical to SEQ ID NO: 11167
  oligonucleotide probe

SEQ ID NO: 11233 - DNA, 32 bp, Artificial; identical to SEQ ID NO: 11181
  oligonucleotide probe

SEQ ID NO: 11234 - DNA, 32 bp, Artificial; identical to SEQ ID NO: 11181
  oligonucleotide probe

SEQ ID NO: 11235 - DNA, 32 bp, Artificial; identical to SEQ ID NO: 11163
  oligonucleotide probe

SEQ ID NO: 11236 - DNA, 32 bp, Artificial; identical to SEQ ID NO: 11163
  oligonucleotide probe

SEQ ID NO: 11237 - DNA, 32 bp, Artificial; identical to SEQ ID NO: 11185
  oligonucleotide probe

SEQ ID NO: 11238 - DNA, 32 bp, Artificial; identical to SEQ ID NO: 11185
  oligonucleotide probe

SEQ ID NO: 11239 - DNA, 32 bp, Artificial; identical to SEQ ID NO: 11181
  oligonucleotide probe

SEQ ID NO: 11240 - DNA, 32 bp, Artificial; identical to SEQ ID NO: 11181
  oligonucleotide probe

SEQ ID NO: 11241 - DNA, 32 bp, Artificial; identical to SEQ ID NO: 11167
  oligonucleotide probe

SEQ ID NO: 11242 - DNA, 32 bp, Artificial; identical to SEQ ID NO: 11167
  oligonucleotide probe

SEQ ID NO: 11243 - DNA, 32 bp, Artificial; identical to SEQ ID NO: 11171
  oligonucleotide probe

SEQ ID NO: 11244 - DNA, 32 bp, Artificial; identical to SEQ ID NO: 11171
  oligonucleotide probe

SEQ ID NO: 11245 - DNA, 32 bp, Artificial; identical to SEQ ID NO: 11167
  oligonucleotide probe

SEQ ID NO: 11246 - DNA, 32 bp, Artificial; identical to SEQ ID NO: 11167
  oligonucleotide probe

SEQ ID NO: 11247 - DNA, 32 bp, Artificial; identical to SEQ ID NO: 11181
  oligonucleotide probe

SEQ ID NO: 11248 - DNA, 32 bp, Artificial; identical to SEQ ID NO: 11181
  oligonucleotide probe

SEQ ID NO: 11249 - DNA, 32 bp, Artificial; identical to SEQ ID NO: 11177
  oligonucleotide probe

SEQ ID NO: 11250 - DNA, 32 bp, Artificial; identical to SEQ ID NO: 11177
  oligonucleotide probe

SEQ ID NO: 11251 - DNA, 32 bp, Artificial; identical to SEQ ID NO: 11163
  oligonucleotide probe

SEQ ID NO: 11252 - DNA, 32 bp, Artificial; identical to SEQ ID NO: 11163
  oligonucleotide probe

SEQ ID NO: 11253 - DNA, 32 bp, Artificial; identical to SEQ ID NO: 11171
  oligonucleotide probe

SEQ ID NO: 11254 - DNA, 32 bp, Artificial; identical to SEQ ID NO: 11171
  oligonucleotide probe

SEQ ID NO: 11255 - DNA, 32 bp, Artificial; identical to SEQ ID NO: 11173
  oligonucleotide probe

SEQ ID NO: 11256 - DNA, 32 bp, Artificial; identical to SEQ ID NO: 11173
  oligonucleotide probe

SEQ ID NO: 11257 - DNA, 32 bp, Artificial; identical to SEQ ID NO: 11173
  oligonucleotide probe

SEQ ID NO: 11258 - DNA, 32 bp, Artificial; identical to SEQ ID NO: 11173
  oligonucleotide probe

SEQ ID NO: 11259 - DNA, 32 bp, Artificial; identical to SEQ ID NO: 11173
  oligonucleotide probe

SEQ ID NO: 11260 - DNA, 32 bp, Artificial; identical to SEQ ID NO: 11173
  oligonucleotide probe

SEQ ID NO: 11261 - DNA, 32 bp, Artificial; identical to SEQ ID NO: 11177
  oligonucleotide probe

SEQ ID NO: 11262 - DNA, 32 bp, Artificial; identical to SEQ ID NO: 11177
  oligonucleotide probe

SEQ ID NO: 11263 - DNA, 32 bp, Artificial; identical to SEQ ID NO: 11171
  oligonucleotide probe

SEQ ID NO: 11264 - DNA, 32 bp, Artificial; identical to SEQ ID NO: 11171
  oligonucleotide probe

SEQ ID NO: 11265 - DNA, 32 bp, Artificial; identical to SEQ ID NO: 11185
  oligonucleotide probe

SEQ ID NO: 11266 - DNA, 32 bp, Artificial; identical to SEQ ID NO: 11185
  oligonucleotide probe

SEQ ID NO: 11267 - DNA, 32 bp, Artificial; identical to SEQ ID NO: 11173
  oligonucleotide probe

SEQ ID NO: 11268 - DNA, 32 bp, Artificial; identical to SEQ ID NO: 11173
  oligonucleotide probe

SEQ ID NO: 11269 - DNA, 32 bp, Artificial; identical to SEQ ID NO: 11181
  oligonucleotide probe

SEQ ID NO: 11270 - DNA, 32 bp, Artificial; identical to SEQ ID NO: 11181
  oligonucleotide probe

SEQ ID NO: 11271 - DNA, 32 bp, Artificial; identical to SEQ ID NO: 11185
  oligonucleotide probe

SEQ ID NO: 11272 - DNA, 32 bp, Artificial; identical to SEQ ID NO: 11185
  oligonucleotide probe

SEQ ID NO: 11273 - DNA, 32 bp, Artificial; identical to SEQ ID NO: 11165
  oligonucleotide probe

SEQ ID NO: 11274 - DNA, 32 bp, Artificial; identical to SEQ ID NO: 11165
  oligonucleotide probe

SEQ ID NO: 11275 - DNA, 32 bp, Artificial; identical to SEQ ID NO: 11167
  oligonucleotide probe

SEQ ID NO: 11276 - DNA, 32 bp, Artificial; identical to SEQ ID NO: 11167
  oligonucleotide probe

SEQ ID NO: 11277 - DNA, 32 bp, Artificial; identical to SEQ ID NO: 11185
  oligonucleotide probe

SEQ ID NO: 11278 - DNA, 32 bp, Artificial; identical to SEQ ID NO: 11185
  oligonucleotide probe

SEQ ID NO: 11279 - DNA, 32 bp, Artificial; identical to SEQ ID NO: 11171
  oligonucleotide probe

SEQ ID NO: 11280 - DNA, 32 bp, Artificial; identical to SEQ ID NO: 11171
  oligonucleotide probe

SEQ ID NO: 11281 - DNA, 32 bp, Artificial; identical to SEQ ID NO: 11167
  oligonucleotide probe

SEQ ID NO: 11282 - DNA, 32 bp, Artificial; identical to SEQ ID NO: 11167
  oligonucleotide probe

SEQ ID NO: 11283 - DNA, 32 bp, Artificial; identical to SEQ ID NO: 11163
  oligonucleotide probe

SEQ ID NO: 11284 - DNA, 32 bp, Artificial; identical to SEQ ID NO: 11163
  oligonucleotide probe

SEQ ID NO: 11285 - DNA, 32 bp, Artificial; identical to SEQ ID NO: 11173
  oligonucleotide probe

SEQ ID NO: 11286 - DNA, 32 bp, Artificial; identical to SEQ ID NO: 11173
  oligonucleotide probe

SEQ ID NO: 11287 - DNA, 32 bp, Artificial; identical to SEQ ID NO: 11185
  oligonucleotide probe

SEQ ID NO: 11288 - DNA, 32 bp, Artificial; identical to SEQ ID NO: 11185
  oligonucleotide probe

SEQ ID NO: 11289 - DNA, 32 bp, Artificial; identical to SEQ ID NO: 11167
  oligonucleotide probe

SEQ ID NO: 11290 - DNA, 32 bp, Artificial; identical to SEQ ID NO: 11167
  oligonucleotide probe

SEQ ID NO: 11291 - DNA, 32 bp, Artificial; identical to SEQ ID NO: 11185
  oligonucleotide probe

SEQ ID NO: 11292 - DNA, 32 bp, Artificial; identical to SEQ ID NO: 11185
  oligonucleotide probe

SEQ ID NO: 11293 - DNA, 32 bp, Artificial; identical to SEQ ID NO: 11185
  oligonucleotide probe

SEQ ID NO: 11294 - DNA, 32 bp, Artificial; identical to SEQ ID NO: 11185
  oligonucleotide probe

SEQ ID NO: 11295 - DNA, 32 bp, Artificial; identical to SEQ ID NO: 11181
  oligonucleotide probe

SEQ ID NO: 11296 - DNA, 32 bp, Artificial; identical to SEQ ID NO: 11181
  oligonucleotide probe

SEQ ID NO: 11297 - DNA, 32 bp, Artificial; identical to SEQ ID NO: 11177
  oligonucleotide probe

SEQ ID NO: 11298 - DNA, 32 bp, Artificial; identical to SEQ ID NO: 11177
  oligonucleotide probe

SEQ ID NO: 11299 - DNA, 32 bp, Artificial; identical to SEQ ID NO: 11173
  oligonucleotide probe

SEQ ID NO: 11300 - DNA, 32 bp, Artificial; identical to SEQ ID NO: 11173
  oligonucleotide probe

SEQ ID NO: 11301 - DNA, 32 bp, Artificial; identical to SEQ ID NO: 11181
  oligonucleotide probe

SEQ ID NO: 11302 - DNA, 32 bp, Artificial; identical to SEQ ID NO: 11181
  oligonucleotide probe

SEQ ID NO: 11303 - DNA, 32 bp, Artificial; identical to SEQ ID NO: 11165
  oligonucleotide probe

SEQ ID NO: 11304 - DNA, 32 bp, Artificial; identical to SEQ ID NO: 11165
  oligonucleotide probe

SEQ ID NO: 11305 - DNA, 32 bp, Artificial; identical to SEQ ID NO: 11173
  oligonucleotide probe

SEQ ID NO: 11306 - DNA, 32 bp, Artificial; identical to SEQ ID NO: 11173
  oligonucleotide probe

SEQ ID NO: 11307 - DNA, 32 bp, Artificial; identical to SEQ ID NO: 11185
  oligonucleotide probe

SEQ ID NO: 11308 - DNA, 32 bp, Artificial; identical to SEQ ID NO: 11185
  oligonucleotide probe

SEQ ID NO: 11309 - DNA, 32 bp, Artificial; identical to SEQ ID NO: 11167
  oligonucleotide probe

SEQ ID NO: 11310 - DNA, 32 bp, Artificial; identical to SEQ ID NO: 11167
  oligonucleotide probe

SEQ ID NO: 11311 - DNA, 32 bp, Artificial; identical to SEQ ID NO: 11165
  oligonucleotide probe

SEQ ID NO: 11312 - DNA, 32 bp, Artificial; identical to SEQ ID NO: 11165
  oligonucleotide probe

SEQ ID NO: 11313 - DNA, 32 bp, Artificial; identical to SEQ ID NO: 11165
  oligonucleotide probe

SEQ ID NO: 11314 - DNA, 32 bp, Artificial; identical to SEQ ID NO: 11165
  oligonucleotide probe

SEQ ID NO: 11315 - DNA, 32 bp, Artificial; identical to SEQ ID NO: 11163
  oligonucleotide probe

SEQ ID NO: 11316 - DNA, 32 bp, Artificial; identical to SEQ ID NO: 11163
  oligonucleotide probe

SEQ ID NO: 11317 - DNA, 32 bp, Artificial; identical to SEQ ID NO: 11171
  oligonucleotide probe

SEQ ID NO: 11318 - DNA, 32 bp, Artificial; identical to SEQ ID NO: 11171
  oligonucleotide probe

SEQ ID NO: 11319 - DNA, 32 bp, Artificial; identical to SEQ ID NO: 11171
  oligonucleotide probe

SEQ ID NO: 11320 - DNA, 32 bp, Artificial; identical to SEQ ID NO: 11171
  oligonucleotide probe

SEQ ID NO: 11321 - DNA, 32 bp, Artificial; identical to SEQ ID NO: 11165
  oligonucleotide probe

SEQ ID NO: 11322 - DNA, 32 bp, Artificial; identical to SEQ ID NO: 11165
  oligonucleotide probe

SEQ ID NO: 11323 - DNA, 32 bp, Artificial; identical to SEQ ID NO: 11165
  oligonucleotide probe

SEQ ID NO: 11324 - DNA, 32 bp, Artificial; identical to SEQ ID NO: 11185
  oligonucleotide probe

SEQ ID NO: 11325 - DNA, 32 bp, Artificial; identical to SEQ ID NO: 11173
  oligonucleotide probe

SEQ ID NO: 11326 - DNA, 32 bp, Artificial; identical to SEQ ID NO: 11163
  oligonucleotide probe

SEQ ID NO: 11327 - DNA, 32 bp, Artificial; identical to SEQ ID NO: 11177
  oligonucleotide probe

SEQ ID NO: 11328 - DNA, 32 bp, Artificial; identical to SEQ ID NO: 11167
  oligonucleotide probe

SEQ ID NO: 11329 - DNA, 32 bp, Artificial; identical to SEQ ID NO: 11171
  oligonucleotide probe

SEQ ID NO: 11330 - DNA, 32 bp, Artificial; identical to SEQ ID NO: 11181
  oligonucleotide probe

SEQ ID NO: 11331 - DNA, 32 bp, Artificial; identical to SEQ ID NO: 7644
  oligonucleotide probe

SEQ ID NO: 11332 - DNA, 32 bp, Artificial; identical to SEQ ID NO: 7644
  oligonucleotide probe

SEQ ID NO: 11333 - DNA, 32 bp, Artificial; identical to SEQ ID NO: 5171
  oligonucleotide probe

SEQ ID NO: 11334 - DNA, 32 bp, Artificial; identical to SEQ ID NO: 5171
  oligonucleotide probe

SEQ ID NO: 11335 - DNA, 32 bp, Artificial; identical to SEQ ID NO: 7673
  oligonucleotide probe

SEQ ID NO: 11336 - DNA, 32 bp, Artificial; identical to SEQ ID NO: 7673
  oligonucleotide probe

SEQ ID NO: 11337 - DNA, 32 bp, Artificial; identical to SEQ ID NO: 5134
  oligonucleotide probe

SEQ ID NO: 11338 - DNA, 32 bp, Artificial; identical to SEQ ID NO: 5134
  oligonucleotide probe

SEQ ID NO: 11339 - DNA, 32 bp, Artificial; identical to SEQ ID NO: 7597
  oligonucleotide probe

SEQ ID NO: 11340 - DNA, 32 bp, Artificial; identical to SEQ ID NO: 7597
  oligonucleotide probe

SEQ ID NO: 11341 - DNA, 32 bp, Artificial; identical to SEQ ID NO: 7673
  oligonucleotide probe

SEQ ID NO: 11342 - DNA, 32 bp, Artificial; identical to SEQ ID NO: 7673
  oligonucleotide probe

SEQ ID NO: 11343 - DNA, 32 bp, Artificial; identical to SEQ ID NO: 7623
  oligonucleotide probe

SEQ ID NO: 11344 - DNA, 32 bp, Artificial; identical to SEQ ID NO: 7623
  oligonucleotide probe

SEQ ID NO: 11345 - DNA, 32 bp, Artificial; identical to SEQ ID NO: 5163
  oligonucleotide probe

SEQ ID NO: 11346 - DNA, 32 bp, Artificial; identical to SEQ ID NO: 5163
  oligonucleotide probe

SEQ ID NO: 11347 - DNA, 32 bp, Artificial; identical to SEQ ID NO: 7597
  oligonucleotide probe

SEQ ID NO: 11348 - DNA, 32 bp, Artificial; identical to SEQ ID NO: 7597
  oligonucleotide probe

SEQ ID NO: 11349 - DNA, 32 bp, Artificial; identical to SEQ ID NO: 7673
  oligonucleotide probe

SEQ ID NO: 11350 - DNA, 32 bp, Artificial; identical to SEQ ID NO: 7673
  oligonucleotide probe

SEQ ID NO: 11351 - DNA, 32 bp, Artificial; identical to SEQ ID NO: 7597
  oligonucleotide probe

SEQ ID NO: 11352 - DNA, 32 bp, Artificial; identical to SEQ ID NO: 7597
  oligonucleotide probe

SEQ ID NO: 11353 - DNA, 32 bp, Artificial; identical to SEQ ID NO: 7644
  oligonucleotide probe

SEQ ID NO: 11354 - DNA, 32 bp, Artificial; identical to SEQ ID NO: 7644
  oligonucleotide probe

SEQ ID NO: 11355 - DNA, 32 bp, Artificial; identical to SEQ ID NO: 7655
  oligonucleotide probe

SEQ ID NO: 11356 - DNA, 32 bp, Artificial; identical to SEQ ID NO: 7655
  oligonucleotide probe

SEQ ID NO: 11357 - DNA, 32 bp, Artificial; identical to SEQ ID NO: 7598
  oligonucleotide probe

SEQ ID NO: 11358 - DNA, 32 bp, Artificial; identical to SEQ ID NO: 7598
  oligonucleotide probe

SEQ ID NO: 11359 - DNA, 32 bp, Artificial; identical to SEQ ID NO: 5185
  oligonucleotide probe

SEQ ID NO: 11360 - DNA, 32 bp, Artificial; identical to SEQ ID NO: 5185
  oligonucleotide probe

SEQ ID NO: 11361 - DNA, 32 bp, Artificial; identical to SEQ ID NO: 7783
  oligonucleotide probe

SEQ ID NO: 11362 - DNA, 32 bp, Artificial; identical to SEQ ID NO: 7783
  oligonucleotide probe

SEQ ID NO: 11363 - DNA, 32 bp, Artificial; identical to SEQ ID NO: 7659
  oligonucleotide probe

SEQ ID NO: 11364 - DNA, 32 bp, Artificial; identical to SEQ ID NO: 7659
  oligonucleotide probe

SEQ ID NO: 11365 - DNA, 32 bp, Artificial; identical to SEQ ID NO: 7623
  oligonucleotide probe

SEQ ID NO: 11366 - DNA, 32 bp, Artificial; identical to SEQ ID NO: 7623
  oligonucleotide probe

SEQ ID NO: 11367 - DNA, 32 bp, Artificial; identical to SEQ ID NO: 5163
  oligonucleotide probe

SEQ ID NO: 11368 - DNA, 32 bp, Artificial; identical to SEQ ID NO: 5163
  oligonucleotide probe

SEQ ID NO: 11369 - DNA, 32 bp, Artificial; identical to SEQ ID NO: 5133
  oligonucleotide probe

SEQ ID NO: 11370 - DNA, 32 bp, Artificial; identical to SEQ ID NO: 5133
  oligonucleotide probe

SEQ ID NO: 11371 - DNA, 32 bp, Artificial; identical to SEQ ID NO: 7655
  oligonucleotide probe

SEQ ID NO: 11372 - DNA, 32 bp, Artificial; identical to SEQ ID NO: 7655
  oligonucleotide probe

SEQ ID NO: 11373 - DNA, 32 bp, Artificial; identical to SEQ ID NO: 7812
  oligonucleotide probe

SEQ ID NO: 11374 - DNA, 32 bp, Artificial; identical to SEQ ID NO: 7812
  oligonucleotide probe

SEQ ID NO: 11375 - DNA, 32 bp, Artificial; identical to SEQ ID NO: 5136
  oligonucleotide probe

SEQ ID NO: 11376 - DNA, 32 bp, Artificial; identical to SEQ ID NO: 5136
  oligonucleotide probe

SEQ ID NO: 11377 - DNA, 32 bp, Artificial; identical to SEQ ID NO: 7594
  oligonucleotide probe

SEQ ID NO: 11378 - DNA, 32 bp, Artificial; identical to SEQ ID NO: 7594
  oligonucleotide probe

SEQ ID NO: 11379 - DNA, 32 bp, Artificial; identical to SEQ ID NO: 5133
  oligonucleotide probe

SEQ ID NO: 11380 - DNA, 32 bp, Artificial; identical to SEQ ID NO: 5133
  oligonucleotide probe

SEQ ID NO: 11381 - DNA, 32 bp, Artificial; identical to SEQ ID NO: 5163
  oligonucleotide probe

SEQ ID NO: 11382 - DNA, 32 bp, Artificial; identical to SEQ ID NO: 5163
  oligonucleotide probe

SEQ ID NO: 11383 - DNA, 32 bp, Artificial; identical to SEQ ID NO: 7676
  oligonucleotide probe

SEQ ID NO: 11384 - DNA, 32 bp, Artificial; identical to SEQ ID NO: 7676
  oligonucleotide probe

SEQ ID NO: 11385 - DNA, 32 bp, Artificial; identical to SEQ ID NO: 5171
  oligonucleotide probe

SEQ ID NO: 11386 - DNA, 32 bp, Artificial; identical to SEQ ID NO: 5171
  oligonucleotide probe

SEQ ID NO: 11387 - DNA, 32 bp, Artificial; identical to SEQ ID NO: 5185
  oligonucleotide probe

SEQ ID NO: 11388 - DNA, 32 bp, Artificial; identical to SEQ ID NO: 5185
  oligonucleotide probe

SEQ ID NO: 11389 - DNA, 32 bp, Artificial; identical to SEQ ID NO: 7676
  oligonucleotide probe

SEQ ID NO: 11390 - DNA, 32 bp, Artificial; identical to SEQ ID NO: 7676
  oligonucleotide probe

SEQ ID NO: 11391 - DNA, 32 bp, Artificial; identical to SEQ ID NO: 7644
  oligonucleotide probe

SEQ ID NO: 11392 - DNA, 32 bp, Artificial; identical to SEQ ID NO: 7644
  oligonucleotide probe

SEQ ID NO: 11393 - DNA, 32 bp, Artificial; identical to SEQ ID NO: 5171
  oligonucleotide probe

SEQ ID NO: 11394 - DNA, 32 bp, Artificial; identical to SEQ ID NO: 5171
  oligonucleotide probe

SEQ ID NO: 11395 - DNA, 32 bp, Artificial; identical to SEQ ID NO: 7863
  oligonucleotide probe

SEQ ID NO: 11396 - DNA, 32 bp, Artificial; identical to SEQ ID NO: 7863
  oligonucleotide probe

SEQ ID NO: 11397 - DNA, 32 bp, Artificial; identical to SEQ ID NO: 7594
  oligonucleotide probe

SEQ ID NO: 11398 - DNA, 32 bp, Artificial; identical to SEQ ID NO: 7594
  oligonucleotide probe

SEQ ID NO: 11399 - DNA, 32 bp, Artificial; identical to SEQ ID NO: 7673
  oligonucleotide probe

SEQ ID NO: 11400 - DNA, 32 bp, Artificial; identical to SEQ ID NO: 7673
  oligonucleotide probe

SEQ ID NO: 11401 - DNA, 32 bp, Artificial; identical to SEQ ID NO: 7673
  oligonucleotide probe

SEQ ID NO: 11402 - DNA, 32 bp, Artificial; identical to SEQ ID NO: 7673
  oligonucleotide probe

SEQ ID NO: 11403 - DNA, 32 bp, Artificial; identical to SEQ ID NO: 5160
  oligonucleotide probe

SEQ ID NO: 11404 - DNA, 32 bp, Artificial; identical to SEQ ID NO: 5160
  oligonucleotide probe

SEQ ID NO: 11405 - DNA, 32 bp, Artificial; identical to SEQ ID NO: 7676
  oligonucleotide probe

SEQ ID NO: 11406 - DNA, 32 bp, Artificial; identical to SEQ ID NO: 7676
  oligonucleotide probe

SEQ ID NO: 11407 - DNA, 32 bp, Artificial; identical to SEQ ID NO: 5171
  oligonucleotide probe

SEQ ID NO: 11408 - DNA, 32 bp, Artificial; identical to SEQ ID NO: 5171
  oligonucleotide probe

SEQ ID NO: 11409 - DNA, 32 bp, Artificial; identical to SEQ ID NO: 7624
  oligonucleotide probe

SEQ ID NO: 11410 - DNA, 32 bp, Artificial; identical to SEQ ID NO: 7624
  oligonucleotide probe

SEQ ID NO: 11411 - DNA, 32 bp, Artificial; identical to SEQ ID NO: 7812
  oligonucleotide probe

SEQ ID NO: 11412 - DNA, 32 bp, Artificial; identical to SEQ ID NO: 7812
  oligonucleotide probe

SEQ ID NO: 11413 - DNA, 32 bp, Artificial; identical to SEQ ID NO: 7676
  oligonucleotide probe

SEQ ID NO: 11414 - DNA, 32 bp, Artificial; identical to SEQ ID NO: 7676
  oligonucleotide probe

SEQ ID NO: 11415 - DNA, 32 bp, Artificial; identical to SEQ ID NO: 7605
  oligonucleotide probe

SEQ ID NO: 11416 - DNA, 32 bp, Artificial; identical to SEQ ID NO: 7605
  oligonucleotide probe

SEQ ID NO: 11417 - DNA, 32 bp, Artificial; identical to SEQ ID NO: 5163
  oligonucleotide probe

SEQ ID NO: 11418 - DNA, 32 bp, Artificial; identical to SEQ ID NO: 5163
  oligonucleotide probe

SEQ ID NO: 11419 - DNA, 32 bp, Artificial; identical to SEQ ID NO: 7655
  oligonucleotide probe

SEQ ID NO: 11420 - DNA, 32 bp, Artificial; identical to SEQ ID NO: 7655
  oligonucleotide probe

SEQ ID NO: 11421 - DNA, 32 bp, Artificial; identical to SEQ ID NO: 5163
  oligonucleotide probe

SEQ ID NO: 11422 - DNA, 32 bp, Artificial; identical to SEQ ID NO: 5163
  oligonucleotide probe

SEQ ID NO: 11423 - DNA, 32 bp, Artificial; identical to SEQ ID NO: 7694
  oligonucleotide probe

SEQ ID NO: 11424 - DNA, 32 bp, Artificial; identical to SEQ ID NO: 7694
  oligonucleotide probe

SEQ ID NO: 11425 - DNA, 32 bp, Artificial; identical to SEQ ID NO: 7694
  oligonucleotide probe

SEQ ID NO: 11426 - DNA, 32 bp, Artificial; identical to SEQ ID NO: 7694
  oligonucleotide probe

SEQ ID NO: 11427 - DNA, 32 bp, Artificial; identical to SEQ ID NO: 7690
  oligonucleotide probe

SEQ ID NO: 11428 - DNA, 32 bp, Artificial; identical to SEQ ID NO: 7690
  oligonucleotide probe

SEQ ID NO: 11429 - DNA, 32 bp, Artificial; identical to SEQ ID NO: 7673
  oligonucleotide probe

SEQ ID NO: 11430 - DNA, 32 bp, Artificial; identical to SEQ ID NO: 7673
  oligonucleotide probe

SEQ ID NO: 11431 - DNA, 32 bp, Artificial; identical to SEQ ID NO: 7676
  oligonucleotide probe

SEQ ID NO: 11432 - DNA, 32 bp, Artificial; identical to SEQ ID NO: 7676
  oligonucleotide probe

SEQ ID NO: 11433 - DNA, 32 bp, Artificial; identical to SEQ ID NO: 7676
  oligonucleotide probe

SEQ ID NO: 11434 - DNA, 32 bp, Artificial; identical to SEQ ID NO: 7676
  oligonucleotide probe

SEQ ID NO: 11435 - DNA, 32 bp, Artificial; identical to SEQ ID NO: 7596
  oligonucleotide probe

SEQ ID NO: 11436 - DNA, 32 bp, Artificial; identical to SEQ ID NO: 7596
  oligonucleotide probe

SEQ ID NO: 11437 - DNA, 32 bp, Artificial; identical to SEQ ID NO: 5141
  oligonucleotide probe

SEQ ID NO: 11438 - DNA, 32 bp, Artificial; identical to SEQ ID NO: 5141
  oligonucleotide probe

SEQ ID NO: 11439 - DNA, 32 bp, Artificial; identical to SEQ ID NO: 7676
  oligonucleotide probe

SEQ ID NO: 11440 - DNA, 32 bp, Artificial; identical to SEQ ID NO: 7676
  oligonucleotide probe

SEQ ID NO: 11441 - DNA, 32 bp, Artificial; identical to SEQ ID NO: 7673
  oligonucleotide probe

SEQ ID NO: 11442 - DNA, 32 bp, Artificial; identical to SEQ ID NO: 7673
  oligonucleotide probe

SEQ ID NO: 11443 - DNA, 32 bp, Artificial; identical to SEQ ID NO: 7659
  oligonucleotide probe

SEQ ID NO: 11444 - DNA, 32 bp, Artificial; identical to SEQ ID NO: 7659
  oligonucleotide probe

SEQ ID NO: 11445 - DNA, 32 bp, Artificial; identical to SEQ ID NO: 7644
  oligonucleotide probe

SEQ ID NO: 11446 - DNA, 32 bp, Artificial; identical to SEQ ID NO: 7644
  oligonucleotide probe

SEQ ID NO: 11447 - DNA, 32 bp, Artificial; identical to SEQ ID NO: 5171
  oligonucleotide probe

SEQ ID NO: 11448 - DNA, 32 bp, Artificial; identical to SEQ ID NO: 5171
  oligonucleotide probe

SEQ ID NO: 11449 - DNA, 32 bp, Artificial; identical to SEQ ID NO: 7624
  oligonucleotide probe

SEQ ID NO: 11450 - DNA, 32 bp, Artificial; identical to SEQ ID NO: 7624
  oligonucleotide probe

SEQ ID NO: 11451 - DNA, 32 bp, Artificial; identical to SEQ ID NO: 7659
  oligonucleotide probe

SEQ ID NO: 11452 - DNA, 32 bp, Artificial; identical to SEQ ID NO: 7659
  oligonucleotide probe

SEQ ID NO: 11453 - DNA, 32 bp, Artificial; identical to SEQ ID NO: 7594
  oligonucleotide probe

SEQ ID NO: 11454 - DNA, 32 bp, Artificial; identical to SEQ ID NO: 7594
  oligonucleotide probe

SEQ ID NO: 11455 - DNA, 32 bp, Artificial; identical to SEQ ID NO: 7662
  oligonucleotide probe

SEQ ID NO: 11456 - DNA, 32 bp, Artificial; identical to SEQ ID NO: 7662
  oligonucleotide probe

SEQ ID NO: 11457 - DNA, 32 bp, Artificial; identical to SEQ ID NO: 5185
  oligonucleotide probe

SEQ ID NO: 11458 - DNA, 32 bp, Artificial; identical to SEQ ID NO: 5185
  oligonucleotide probe

SEQ ID NO: 11459 - DNA, 32 bp, Artificial; identical to SEQ ID NO: 5185
  oligonucleotide probe

SEQ ID NO: 11460 - DNA, 32 bp, Artificial; identical to SEQ ID NO: 5185
  oligonucleotide probe

SEQ ID NO: 11461 - DNA, 32 bp, Artificial; identical to SEQ ID NO: 7655
  oligonucleotide probe

SEQ ID NO: 11462 - DNA, 32 bp, Artificial; identical to SEQ ID NO: 7655
  oligonucleotide probe

SEQ ID NO: 11463 - DNA, 32 bp, Artificial; identical to SEQ ID NO: 5171
  oligonucleotide probe

SEQ ID NO: 11464 - DNA, 32 bp, Artificial; identical to SEQ ID NO: 5171
  oligonucleotide probe

SEQ ID NO: 11465 - DNA, 32 bp, Artificial; identical to SEQ ID NO: 7690
  oligonucleotide probe

SEQ ID NO: 11466 - DNA, 32 bp, Artificial; identical to SEQ ID NO: 7690
  oligonucleotide probe

SEQ ID NO: 11467 - DNA, 32 bp, Artificial; identical to SEQ ID NO: 5163
  oligonucleotide probe

SEQ ID NO: 11468 - DNA, 32 bp, Artificial; identical to SEQ ID NO: 5163
  oligonucleotide probe

SEQ ID NO: 11469 - DNA, 32 bp, Artificial; identical to SEQ ID NO: 5159
  oligonucleotide probe

SEQ ID NO: 11470 - DNA, 32 bp, Artificial; identical to SEQ ID NO: 5159
  oligonucleotide probe

SEQ ID NO: 11471 - DNA, 32 bp, Artificial; identical to SEQ ID NO: 8247
  oligonucleotide probe

SEQ ID NO: 11472 - DNA, 32 bp, Artificial; identical to SEQ ID NO: 8247
  oligonucleotide probe

SEQ ID NO: 11473 - DNA, 32 bp, Artificial; identical to SEQ ID NO: 5141
  oligonucleotide probe

SEQ ID NO: 11474 - DNA, 32 bp, Artificial; identical to SEQ ID NO: 5141
  oligonucleotide probe

SEQ ID NO: 11475 - DNA, 32 bp, Artificial; identical to SEQ ID NO: 5160
  oligonucleotide probe

SEQ ID NO: 11476 - DNA, 32 bp, Artificial; identical to SEQ ID NO: 5160
  oligonucleotide probe

SEQ ID NO: 11477 - DNA, 32 bp, Artificial; identical to SEQ ID NO: 7644
  oligonucleotide probe

SEQ ID NO: 11478 - DNA, 32 bp, Artificial; identical to SEQ ID NO: 7644
  oligonucleotide probe

SEQ ID NO: 11479 - DNA, 32 bp, Artificial; identical to SEQ ID NO: 5134
  oligonucleotide probe

SEQ ID NO: 11480 - DNA, 32 bp, Artificial; identical to SEQ ID NO: 5134
  oligonucleotide probe

SEQ ID NO: 11481 - DNA, 32 bp, Artificial; identical to SEQ ID NO: 5185
  oligonucleotide probe

SEQ ID NO: 11482 - DNA, 32 bp, Artificial; identical to SEQ ID NO: 5185
  oligonucleotide probe

SEQ ID NO: 11483 - DNA, 32 bp, Artificial; identical to SEQ ID NO: 7623
  oligonucleotide probe

SEQ ID NO: 11484 - DNA, 32 bp, Artificial; identical to SEQ ID NO: 7623
  oligonucleotide probe

SEQ ID NO: 11485 - DNA, 32 bp, Artificial; identical to SEQ ID NO: 5160
  oligonucleotide probe

SEQ ID NO: 11486 - DNA, 32 bp, Artificial; identical to SEQ ID NO: 5160
  oligonucleotide probe

SEQ ID NO: 11487 - DNA, 32 bp, Artificial; identical to SEQ ID NO: 7606
  oligonucleotide probe

SEQ ID NO: 11488 - DNA, 32 bp, Artificial; identical to SEQ ID NO: 7606
  oligonucleotide probe

SEQ ID NO: 11489 - DNA, 32 bp, Artificial; identical to SEQ ID NO: 7690
  oligonucleotide probe

SEQ ID NO: 11490 - DNA, 32 bp, Artificial; identical to SEQ ID NO: 7690
  oligonucleotide probe

SEQ ID NO: 11491 - DNA, 32 bp, Artificial; identical to SEQ ID NO: 7676
  oligonucleotide probe

SEQ ID NO: 11492 - DNA, 32 bp, Artificial; identical to SEQ ID NO: 7676
  oligonucleotide probe

SEQ ID NO: 11493 - DNA, 32 bp, Artificial; identical to SEQ ID NO: 7662
  oligonucleotide probe

SEQ ID NO: 11494 - DNA, 32 bp, Artificial; identical to SEQ ID NO: 7662
  oligonucleotide probe

SEQ ID NO: 11495 - DNA, 32 bp, Artificial; identical to SEQ ID NO: 8001
  oligonucleotide probe

SEQ ID NO: 11496 - DNA, 32 bp, Artificial; identical to SEQ ID NO: 8001
  oligonucleotide probe

SEQ ID NO: 11497 - DNA, 32 bp, Artificial; identical to SEQ ID NO: 7596
  oligonucleotide probe

SEQ ID NO: 11498 - DNA, 32 bp, Artificial; identical to SEQ ID NO: 7596
  oligonucleotide probe

SEQ ID NO: 11499 - DNA, 32 bp, Artificial; identical to SEQ ID NO: 7596
  oligonucleotide probe

SEQ ID NO: 11500 - DNA, 32 bp, Artificial; identical to SEQ ID NO: 7596
  oligonucleotide probe

SEQ ID NO: 11501 - DNA, 32 bp, Artificial; identical to SEQ ID NO: 5171
  oligonucleotide probe

SEQ ID NO: 11502 - DNA, 32 bp, Artificial; identical to SEQ ID NO: 5171
  oligonucleotide probe

SEQ ID NO: 11503 - DNA, 32 bp, Artificial; identical to SEQ ID NO: 7676
  oligonucleotide probe

SEQ ID NO: 11504 - DNA, 32 bp, Artificial; identical to SEQ ID NO: 7676
  oligonucleotide probe

SEQ ID NO: 11505 - DNA, 32 bp, Artificial; identical to SEQ ID NO: 5163
  oligonucleotide probe

SEQ ID NO: 11506 - DNA, 32 bp, Artificial; identical to SEQ ID NO: 5163
  oligonucleotide probe

SEQ ID NO: 11507 - DNA, 32 bp, Artificial; identical to SEQ ID NO: 5185
  oligonucleotide probe

SEQ ID NO: 11508 - DNA, 32 bp, Artificial; identical to SEQ ID NO: 5185
  oligonucleotide probe

SEQ ID NO: 11509 - DNA, 32 bp, Artificial; identical to SEQ ID NO: 7905
  oligonucleotide probe

SEQ ID NO: 11510 - DNA, 32 bp, Artificial; identical to SEQ ID NO: 7905
  oligonucleotide probe

SEQ ID NO: 11511 - DNA, 32 bp, Artificial; identical to SEQ ID NO: 7783
  oligonucleotide probe

SEQ ID NO: 11512 - DNA, 32 bp, Artificial; identical to SEQ ID NO: 7783
  oligonucleotide probe

SEQ ID NO: 11513 - DNA, 32 bp, Artificial; identical to SEQ ID NO: 5159
  oligonucleotide probe

SEQ ID NO: 11514 - DNA, 32 bp, Artificial; identical to SEQ ID NO: 5159
  oligonucleotide probe

SEQ ID NO: 11515 - DNA, 32 bp, Artificial; identical to SEQ ID NO: 7690
  oligonucleotide probe

SEQ ID NO: 11516 - DNA, 32 bp, Artificial; identical to SEQ ID NO: 7690
  oligonucleotide probe

SEQ ID NO: 11517 - DNA, 32 bp, Artificial; identical to SEQ ID NO: 7662
  oligonucleotide probe

SEQ ID NO: 11518 - DNA, 32 bp, Artificial; identical to SEQ ID NO: 7662
  oligonucleotide probe

SEQ ID NO: 11519 - DNA, 32 bp, Artificial; identical to SEQ ID NO: 5185
  oligonucleotide probe

SEQ ID NO: 11520 - DNA, 32 bp, Artificial; identical to SEQ ID NO: 5185
  oligonucleotide probe

SEQ ID NO: 11521 - DNA, 32 bp, Artificial; identical to SEQ ID NO: 5171
  oligonucleotide probe

SEQ ID NO: 11522 - DNA, 32 bp, Artificial; identical to SEQ ID NO: 5171
  oligonucleotide probe

SEQ ID NO: 11523 - DNA, 32 bp, Artificial; identical to SEQ ID NO: 7594
  oligonucleotide probe

SEQ ID NO: 11524 - DNA, 32 bp, Artificial; identical to SEQ ID NO: 7594
  oligonucleotide probe

SEQ ID NO: 11525 - DNA, 32 bp, Artificial; identical to SEQ ID NO: 5163
  oligonucleotide probe

SEQ ID NO: 11526 - DNA, 32 bp, Artificial; identical to SEQ ID NO: 5163
  oligonucleotide probe

SEQ ID NO: 11527 - DNA, 32 bp, Artificial; identical to SEQ ID NO: 7812
  oligonucleotide probe

SEQ ID NO: 11528 - DNA, 32 bp, Artificial; identical to SEQ ID NO: 7812
  oligonucleotide probe

SEQ ID NO: 11529 - DNA, 32 bp, Artificial; identical to SEQ ID NO: 5185
  oligonucleotide probe

SEQ ID NO: 11530 - DNA, 32 bp, Artificial; identical to SEQ ID NO: 5185
  oligonucleotide probe

SEQ ID NO: 11531 - DNA, 32 bp, Artificial; identical to SEQ ID NO: 5185
  oligonucleotide probe

SEQ ID NO: 11532 - DNA, 32 bp, Artificial; identical to SEQ ID NO: 5185
  oligonucleotide probe

SEQ ID NO: 11533 - DNA, 32 bp, Artificial; identical to SEQ ID NO: 7676
  oligonucleotide probe

SEQ ID NO: 11534 - DNA, 32 bp, Artificial; identical to SEQ ID NO: 7676
  oligonucleotide probe

SEQ ID NO: 11535 - DNA, 32 bp, Artificial; identical to SEQ ID NO: 5159
  oligonucleotide probe

SEQ ID NO: 11536 - DNA, 32 bp, Artificial; identical to SEQ ID NO: 5159
  oligonucleotide probe

SEQ ID NO: 11537 - DNA, 32 bp, Artificial; identical to SEQ ID NO: 7623
  oligonucleotide probe

SEQ ID NO: 11538 - DNA, 32 bp, Artificial; identical to SEQ ID NO: 7623
  oligonucleotide probe

SEQ ID NO: 11539 - DNA, 32 bp, Artificial; identical to SEQ ID NO: 7690
  oligonucleotide probe

SEQ ID NO: 11540 - DNA, 32 bp, Artificial; identical to SEQ ID NO: 7690
  oligonucleotide probe

SEQ ID NO: 11541 - DNA, 32 bp, Artificial; identical to SEQ ID NO: 7694
  oligonucleotide probe

SEQ ID NO: 11542 - DNA, 32 bp, Artificial; identical to SEQ ID NO: 7694
  oligonucleotide probe

SEQ ID NO: 11543 - DNA, 32 bp, Artificial; identical to SEQ ID NO: 7673
  oligonucleotide probe

SEQ ID NO: 11544 - DNA, 32 bp, Artificial; identical to SEQ ID NO: 7673
  oligonucleotide probe

SEQ ID NO: 11545 - DNA, 32 bp, Artificial; identical to SEQ ID NO: 7605
  oligonucleotide probe

SEQ ID NO: 11546 - DNA, 32 bp, Artificial; identical to SEQ ID NO: 7605
  oligonucleotide probe

SEQ ID NO: 11547 - DNA, 32 bp, Artificial; identical to SEQ ID NO: 5171
  oligonucleotide probe

SEQ ID NO: 11548 - DNA, 32 bp, Artificial; identical to SEQ ID NO: 5171
  oligonucleotide probe

SEQ ID NO: 11549 - DNA, 32 bp, Artificial; identical to SEQ ID NO: 7596
  oligonucleotide probe

SEQ ID NO: 11550 - DNA, 32 bp, Artificial; identical to SEQ ID NO: 7596
  oligonucleotide probe

SEQ ID NO: 11551 - DNA, 32 bp, Artificial; identical to SEQ ID NO: 5159
  oligonucleotide probe

SEQ ID NO: 11552 - DNA, 32 bp, Artificial; identical to SEQ ID NO: 5159
  oligonucleotide probe

SEQ ID NO: 11553 - DNA, 32 bp, Artificial; identical to SEQ ID NO: 5134
  oligonucleotide probe

SEQ ID NO: 11554 - DNA, 32 bp, Artificial; identical to SEQ ID NO: 5134
  oligonucleotide probe

SEQ ID NO: 11555 - DNA, 32 bp, Artificial; identical to SEQ ID NO: 7673
  oligonucleotide probe

SEQ ID NO: 11556 - DNA, 32 bp, Artificial; identical to SEQ ID NO: 7673
  oligonucleotide probe

SEQ ID NO: 11557 - DNA, 32 bp, Artificial; identical to SEQ ID NO: 7596
  oligonucleotide probe

SEQ ID NO: 11558 - DNA, 32 bp, Artificial; identical to SEQ ID NO: 7596
  oligonucleotide probe

SEQ ID NO: 11559 - DNA, 32 bp, Artificial; identical to SEQ ID NO: 5163
  oligonucleotide probe

SEQ ID NO: 11560 - DNA, 32 bp, Artificial; identical to SEQ ID NO: 5163
  oligonucleotide probe

SEQ ID NO: 11561 - DNA, 32 bp, Artificial; identical to SEQ ID NO: 7623
  oligonucleotide probe

SEQ ID NO: 11562 - DNA, 32 bp, Artificial; identical to SEQ ID NO: 7623
  oligonucleotide probe

SEQ ID NO: 11563 - DNA, 32 bp, Artificial; identical to SEQ ID NO: 5140
  oligonucleotide probe

SEQ ID NO: 11564 - DNA, 32 bp, Artificial; identical to SEQ ID NO: 5140
  oligonucleotide probe

SEQ ID NO: 11565 - DNA, 32 bp, Artificial; identical to SEQ ID NO: 7624
  oligonucleotide probe

SEQ ID NO: 11566 - DNA, 32 bp, Artificial; identical to SEQ ID NO: 7624
  oligonucleotide probe

SEQ ID NO: 11567 - DNA, 32 bp, Artificial; identical to SEQ ID NO: 7644
  oligonucleotide probe

SEQ ID NO: 11568 - DNA, 32 bp, Artificial; identical to SEQ ID NO: 7644
  oligonucleotide probe

SEQ ID NO: 11569 - DNA, 32 bp, Artificial; identical to SEQ ID NO: 5185
  oligonucleotide probe

SEQ ID NO: 11570 - DNA, 32 bp, Artificial; identical to SEQ ID NO: 5185
  oligonucleotide probe

SEQ ID NO: 11571 - DNA, 32 bp, Artificial; identical to SEQ ID NO: 7606
  oligonucleotide probe

SEQ ID NO: 11572 - DNA, 32 bp, Artificial; identical to SEQ ID NO: 7606
  oligonucleotide probe

SEQ ID NO: 11573 - DNA, 32 bp, Artificial; identical to SEQ ID NO: 5141
  oligonucleotide probe

SEQ ID NO: 11574 - DNA, 32 bp, Artificial; identical to SEQ ID NO: 5141
  oligonucleotide probe

SEQ ID NO: 11575 - DNA, 32 bp, Artificial; identical to SEQ ID NO: 7597
  oligonucleotide probe

SEQ ID NO: 11576 - DNA, 32 bp, Artificial; identical to SEQ ID NO: 7597
  oligonucleotide probe

SEQ ID NO: 11577 - DNA, 32 bp, Artificial; identical to SEQ ID NO: 7655
  oligonucleotide probe

SEQ ID NO: 11578 - DNA, 32 bp, Artificial; identical to SEQ ID NO: 7655
  oligonucleotide probe

SEQ ID NO: 11579 - DNA, 32 bp, Artificial; identical to SEQ ID NO: 7623
  oligonucleotide probe

SEQ ID NO: 11580 - DNA, 32 bp, Artificial; identical to SEQ ID NO: 7623
  oligonucleotide probe

SEQ ID NO: 11581 - DNA, 32 bp, Artificial; identical to SEQ ID NO: 7690
  oligonucleotide probe

SEQ ID NO: 11582 - DNA, 32 bp, Artificial; identical to SEQ ID NO: 7690
  oligonucleotide probe

SEQ ID NO: 11583 - DNA, 32 bp, Artificial; identical to SEQ ID NO: 5171
  oligonucleotide probe

SEQ ID NO: 11584 - DNA, 32 bp, Artificial; identical to SEQ ID NO: 5171
  oligonucleotide probe

SEQ ID NO: 11585 - DNA, 32 bp, Artificial; identical to SEQ ID NO: 5133
  oligonucleotide probe

SEQ ID NO: 11586 - DNA, 32 bp, Artificial; identical to SEQ ID NO: 5133
  oligonucleotide probe

SEQ ID NO: 11587 - DNA, 32 bp, Artificial; identical to SEQ ID NO: 7855
  oligonucleotide probe

SEQ ID NO: 11588 - DNA, 32 bp, Artificial; identical to SEQ ID NO: 7855
  oligonucleotide probe

SEQ ID NO: 11589 - DNA, 32 bp, Artificial; identical to SEQ ID NO: 7598
  oligonucleotide probe

SEQ ID NO: 11590 - DNA, 32 bp, Artificial; identical to SEQ ID NO: 7598
  oligonucleotide probe

SEQ ID NO: 11591 - DNA, 32 bp, Artificial; identical to SEQ ID NO: 7623
  oligonucleotide probe

SEQ ID NO: 11592 - DNA, 32 bp, Artificial; identical to SEQ ID NO: 7623
  oligonucleotide probe

SEQ ID NO: 11593 - DNA, 32 bp, Artificial; identical to SEQ ID NO: 7597
  oligonucleotide probe

SEQ ID NO: 11594 - DNA, 32 bp, Artificial; identical to SEQ ID NO: 7597
  oligonucleotide probe

SEQ ID NO: 11595 - DNA, 32 bp, Artificial; identical to SEQ ID NO: 5133
  oligonucleotide probe

SEQ ID NO: 11596 - DNA, 32 bp, Artificial; identical to SEQ ID NO: 5133
  oligonucleotide probe

SEQ ID NO: 11597 - DNA, 32 bp, Artificial; identical to SEQ ID NO: 7659
  oligonucleotide probe

SEQ ID NO: 11598 - DNA, 32 bp, Artificial; identical to SEQ ID NO: 7659
  oligonucleotide probe

SEQ ID NO: 11599 - DNA, 32 bp, Artificial; identical to SEQ ID NO: 5133
  oligonucleotide probe

SEQ ID NO: 11600 - DNA, 32 bp, Artificial; identical to SEQ ID NO: 5133
  oligonucleotide probe

SEQ ID NO: 11601 - DNA, 32 bp, Artificial; identical to SEQ ID NO: 7644
  oligonucleotide probe

SEQ ID NO: 11602 - DNA, 32 bp, Artificial; identical to SEQ ID NO: 7644
  oligonucleotide probe

SEQ ID NO: 11603 - DNA, 32 bp, Artificial; identical to SEQ ID NO: 7690
  oligonucleotide probe

SEQ ID NO: 11604 - DNA, 32 bp, Artificial; identical to SEQ ID NO: 7690
  oligonucleotide probe

SEQ ID NO: 11605 - DNA, 32 bp, Artificial; identical to SEQ ID NO: 7655
  oligonucleotide probe

SEQ ID NO: 11606 - DNA, 32 bp, Artificial; identical to SEQ ID NO: 7655
  oligonucleotide probe

SEQ ID NO: 11607 - DNA, 32 bp, Artificial; identical to SEQ ID NO: 5140
  oligonucleotide probe

SEQ ID NO: 11608 - DNA, 32 bp, Artificial; identical to SEQ ID NO: 5140
  oligonucleotide probe

SEQ ID NO: 11609 - DNA, 32 bp, Artificial; identical to SEQ ID NO: 7676
  oligonucleotide probe

SEQ ID NO: 11610 - DNA, 32 bp, Artificial; identical to SEQ ID NO: 7676
  oligonucleotide probe

SEQ ID NO: 11611 - DNA, 32 bp, Artificial; identical to SEQ ID NO: 7659
  oligonucleotide probe

SEQ ID NO: 11612 - DNA, 32 bp, Artificial; identical to SEQ ID NO: 7659
  oligonucleotide probe

SEQ ID NO: 11613 - DNA, 32 bp, Artificial; identical to SEQ ID NO: 7690
  oligonucleotide probe

SEQ ID NO: 11614 - DNA, 32 bp, Artificial; identical to SEQ ID NO: 7690
  oligonucleotide probe

SEQ ID NO: 11615 - DNA, 32 bp, Artificial; identical to SEQ ID NO: 5171
  oligonucleotide probe

SEQ ID NO: 11616 - DNA, 32 bp, Artificial; identical to SEQ ID NO: 5171
  oligonucleotide probe

SEQ ID NO: 11617 - DNA, 32 bp, Artificial; identical to SEQ ID NO: 5185
  oligonucleotide probe

SEQ ID NO: 11618 - DNA, 32 bp, Artificial; identical to SEQ ID NO: 5185
  oligonucleotide probe

SEQ ID NO: 11619 - DNA, 32 bp, Artificial; identical to SEQ ID NO: 7783
  oligonucleotide probe

SEQ ID NO: 11620 - DNA, 32 bp, Artificial; identical to SEQ ID NO: 7783
  oligonucleotide probe

SEQ ID NO: 11621 - DNA, 32 bp, Artificial; identical to SEQ ID NO: 5171
  oligonucleotide probe

SEQ ID NO: 11622 - DNA, 32 bp, Artificial; identical to SEQ ID NO: 5171
  oligonucleotide probe

SEQ ID NO: 11623 - DNA, 32 bp, Artificial; identical to SEQ ID NO: 7673
  oligonucleotide probe

SEQ ID NO: 11624 - DNA, 32 bp, Artificial; identical to SEQ ID NO: 7673
  oligonucleotide probe

SEQ ID NO: 11625 - DNA, 32 bp, Artificial; identical to SEQ ID NO: 5141
  oligonucleotide probe

SEQ ID NO: 11626 - DNA, 32 bp, Artificial; identical to SEQ ID NO: 5141
  oligonucleotide probe

SEQ ID NO: 11627 - DNA, 32 bp, Artificial; identical to SEQ ID NO: 7605
  oligonucleotide probe

SEQ ID NO: 11628 - DNA, 32 bp, Artificial; identical to SEQ ID NO: 7605
  oligonucleotide probe

SEQ ID NO: 11629 - DNA, 32 bp, Artificial; identical to SEQ ID NO: 5163
  oligonucleotide probe

SEQ ID NO: 11630 - DNA, 32 bp, Artificial; identical to SEQ ID NO: 5163
  oligonucleotide probe

SEQ ID NO: 11631 - DNA, 32 bp, Artificial; identical to SEQ ID NO: 7662
  oligonucleotide probe

SEQ ID NO: 11632 - DNA, 32 bp, Artificial; identical to SEQ ID NO: 7662
  oligonucleotide probe

SEQ ID NO: 11633 - DNA, 32 bp, Artificial; identical to SEQ ID NO: 7694
  oligonucleotide probe

SEQ ID NO: 11634 - DNA, 32 bp, Artificial; identical to SEQ ID NO: 7694
  oligonucleotide probe

SEQ ID NO: 11635 - DNA, 32 bp, Artificial; identical to SEQ ID NO: 7644
  oligonucleotide probe

SEQ ID NO: 11636 - DNA, 32 bp, Artificial; identical to SEQ ID NO: 7644
  oligonucleotide probe

SEQ ID NO: 11637 - DNA, 32 bp, Artificial; identical to SEQ ID NO: 7659
  oligonucleotide probe

SEQ ID NO: 11638 - DNA, 32 bp, Artificial; identical to SEQ ID NO: 7659
  oligonucleotide probe

SEQ ID NO: 11639 - DNA, 32 bp, Artificial; identical to SEQ ID NO: 7690
  oligonucleotide probe

SEQ ID NO: 11640 - DNA, 32 bp, Artificial; identical to SEQ ID NO: 7690
  oligonucleotide probe

SEQ ID NO: 11641 - DNA, 32 bp, Artificial; identical to SEQ ID NO: 7673
  oligonucleotide probe

SEQ ID NO: 11642 - DNA, 32 bp, Artificial; identical to SEQ ID NO: 7673
  oligonucleotide probe

SEQ ID NO: 11643 - DNA, 32 bp, Artificial; identical to SEQ ID NO: 7690
  oligonucleotide probe

SEQ ID NO: 11644 - DNA, 32 bp, Artificial; identical to SEQ ID NO: 7690
  oligonucleotide probe

SEQ ID NO: 11645 - DNA, 32 bp, Artificial; identical to SEQ ID NO: 7598
  oligonucleotide probe

SEQ ID NO: 11646 - DNA, 32 bp, Artificial; identical to SEQ ID NO: 7598
  oligonucleotide probe

SEQ ID NO: 11647 - DNA, 32 bp, Artificial; identical to SEQ ID NO: 7606
  oligonucleotide probe

SEQ ID NO: 11648 - DNA, 32 bp, Artificial; identical to SEQ ID NO: 7606
  oligonucleotide probe

SEQ ID NO: 11649 - DNA, 32 bp, Artificial; identical to SEQ ID NO: 8244
  oligonucleotide probe

SEQ ID NO: 11650 - DNA, 32 bp, Artificial; identical to SEQ ID NO: 8244
  oligonucleotide probe

SEQ ID NO: 11651 - DNA, 32 bp, Artificial; identical to SEQ ID NO: 7605
  oligonucleotide probe

SEQ ID NO: 11652 - DNA, 32 bp, Artificial; identical to SEQ ID NO: 7605
  oligonucleotide probe

SEQ ID NO: 11653 - DNA, 32 bp, Artificial; identical to SEQ ID NO: 7662
  oligonucleotide probe

SEQ ID NO: 11654 - DNA, 32 bp, Artificial; identical to SEQ ID NO: 7662
  oligonucleotide probe

SEQ ID NO: 11655 - DNA, 32 bp, Artificial; identical to SEQ ID NO: 7655
  oligonucleotide probe

SEQ ID NO: 11656 - DNA, 32 bp, Artificial; identical to SEQ ID NO: 7655
  oligonucleotide probe

SEQ ID NO: 11657 - DNA, 32 bp, Artificial; identical to SEQ ID NO: 5171
  oligonucleotide probe

SEQ ID NO: 11658 - DNA, 32 bp, Artificial; identical to SEQ ID NO: 5171
  oligonucleotide probe

SEQ ID NO: 11659 - DNA, 32 bp, Artificial; identical to SEQ ID NO: 7623
  oligonucleotide probe

SEQ ID NO: 11660 - DNA, 32 bp, Artificial; identical to SEQ ID NO: 7623
  oligonucleotide probe

SEQ ID NO: 11661 - DNA, 32 bp, Artificial; identical to SEQ ID NO: 7947
  oligonucleotide probe

SEQ ID NO: 11662 - DNA, 32 bp, Artificial; identical to SEQ ID NO: 7947
  oligonucleotide probe

SEQ ID NO: 11663 - DNA, 32 bp, Artificial; identical to SEQ ID NO: 5163
  oligonucleotide probe

SEQ ID NO: 11664 - DNA, 32 bp, Artificial; identical to SEQ ID NO: 5163
  oligonucleotide probe

SEQ ID NO: 11665 - DNA, 32 bp, Artificial; identical to SEQ ID NO: 5159
  oligonucleotide probe

SEQ ID NO: 11666 - DNA, 32 bp, Artificial; identical to SEQ ID NO: 5159
  oligonucleotide probe

SEQ ID NO: 11667 - DNA, 32 bp, Artificial; identical to SEQ ID NO: 5136
  oligonucleotide probe

SEQ ID NO: 11668 - DNA, 32 bp, Artificial; identical to SEQ ID NO: 5136
  oligonucleotide probe

SEQ ID NO: 11669 - DNA, 32 bp, Artificial; identical to SEQ ID NO: 7673
  oligonucleotide probe

SEQ ID NO: 11670 - DNA, 32 bp, Artificial; identical to SEQ ID NO: 7673
  oligonucleotide probe

SEQ ID NO: 11671 - DNA, 32 bp, Artificial; identical to SEQ ID NO: 7662
  oligonucleotide probe

SEQ ID NO: 11672 - DNA, 32 bp, Artificial; identical to SEQ ID NO: 7662
  oligonucleotide probe

SEQ ID NO: 11673 - DNA, 32 bp, Artificial; identical to SEQ ID NO: 5133
  oligonucleotide probe

SEQ ID NO: 11674 - DNA, 32 bp, Artificial; identical to SEQ ID NO: 5133
  oligonucleotide probe

SEQ ID NO: 11675 - DNA, 32 bp, Artificial; identical to SEQ ID NO: 7694
  oligonucleotide probe

SEQ ID NO: 11676 - DNA, 32 bp, Artificial; identical to SEQ ID NO: 7694
  oligonucleotide probe

SEQ ID NO: 11677 - DNA, 32 bp, Artificial; identical to SEQ ID NO: 7624
  oligonucleotide probe

SEQ ID NO: 11678 - DNA, 32 bp, Artificial; identical to SEQ ID NO: 7624
  oligonucleotide probe

SEQ ID NO: 11679 - DNA, 32 bp, Artificial; identical to SEQ ID NO: 5171
  oligonucleotide probe

SEQ ID NO: 11680 - DNA, 32 bp, Artificial; identical to SEQ ID NO: 5171
  oligonucleotide probe

SEQ ID NO: 11681 - DNA, 32 bp, Artificial; identical to SEQ ID NO: 7690
  oligonucleotide probe

SEQ ID NO: 11682 - DNA, 32 bp, Artificial; identical to SEQ ID NO: 7690
  oligonucleotide probe

SEQ ID NO: 11683 - DNA, 32 bp, Artificial; identical to SEQ ID NO: 5141
  oligonucleotide probe

SEQ ID NO: 11684 - DNA, 32 bp, Artificial; identical to SEQ ID NO: 5141
  oligonucleotide probe

SEQ ID NO: 11685 - DNA, 32 bp, Artificial; identical to SEQ ID NO: 5140
  oligonucleotide probe

SEQ ID NO: 11686 - DNA, 32 bp, Artificial; identical to SEQ ID NO: 5140
  oligonucleotide probe

SEQ ID NO: 11687 - DNA, 32 bp, Artificial; identical to SEQ ID NO: 7662
  oligonucleotide probe

SEQ ID NO: 11688 - DNA, 32 bp, Artificial; identical to SEQ ID NO: 7662
  oligonucleotide probe

SEQ ID NO: 11689 - DNA, 32 bp, Artificial; identical to SEQ ID NO: 7624
  oligonucleotide probe

SEQ ID NO: 11690 - DNA, 32 bp, Artificial; identical to SEQ ID NO: 7624
  oligonucleotide probe

SEQ ID NO: 11691 - DNA, 32 bp, Artificial; identical to SEQ ID NO: 7659
  oligonucleotide probe

SEQ ID NO: 11692 - DNA, 32 bp, Artificial; identical to SEQ ID NO: 7659
  oligonucleotide probe

SEQ ID NO: 11693 - DNA, 32 bp, Artificial; identical to SEQ ID NO: 7624
  oligonucleotide probe

SEQ ID NO: 11694 - DNA, 32 bp, Artificial; identical to SEQ ID NO: 7624
  oligonucleotide probe

SEQ ID NO: 11695 - DNA, 32 bp, Artificial; identical to SEQ ID NO: 7655
  oligonucleotide probe

SEQ ID NO: 11696 - DNA, 32 bp, Artificial; identical to SEQ ID NO: 7655
  oligonucleotide probe

SEQ ID NO: 11697 - DNA, 32 bp, Artificial; identical to SEQ ID NO: 7783
  oligonucleotide probe

SEQ ID NO: 11698 - DNA, 32 bp, Artificial; identical to SEQ ID NO: 7783
  oligonucleotide probe

SEQ ID NO: 11699 - DNA, 32 bp, Artificial; identical to SEQ ID NO: 5171
  oligonucleotide probe

SEQ ID NO: 11700 - DNA, 32 bp, Artificial; identical to SEQ ID NO: 5171
  oligonucleotide probe

SEQ ID NO: 11701 - DNA, 32 bp, Artificial; identical to SEQ ID NO: 5159
  oligonucleotide probe

SEQ ID NO: 11702 - DNA, 32 bp, Artificial; identical to SEQ ID NO: 5159
  oligonucleotide probe

SEQ ID NO: 11703 - DNA, 32 bp, Artificial; identical to SEQ ID NO: 7676
  oligonucleotide probe

SEQ ID NO: 11704 - DNA, 32 bp, Artificial; identical to SEQ ID NO: 7676
  oligonucleotide probe

SEQ ID NO: 11705 - DNA, 32 bp, Artificial; identical to SEQ ID NO: 7594
  oligonucleotide probe

SEQ ID NO: 11706 - DNA, 32 bp, Artificial; identical to SEQ ID NO: 7594
  oligonucleotide probe

SEQ ID NO: 11707 - DNA, 32 bp, Artificial; identical to SEQ ID NO: 7605
  oligonucleotide probe

SEQ ID NO: 11708 - DNA, 32 bp, Artificial; identical to SEQ ID NO: 7605
  oligonucleotide probe

SEQ ID NO: 11709 - DNA, 32 bp, Artificial; identical to SEQ ID NO: 7673
  oligonucleotide probe

SEQ ID NO: 11710 - DNA, 32 bp, Artificial; identical to SEQ ID NO: 7673
  oligonucleotide probe

SEQ ID NO: 11711 - DNA, 32 bp, Artificial; identical to SEQ ID NO: 7783
  oligonucleotide probe

SEQ ID NO: 11712 - DNA, 32 bp, Artificial; identical to SEQ ID NO: 7783
  oligonucleotide probe

SEQ ID NO: 11713 - DNA, 32 bp, Artificial; identical to SEQ ID NO: 5136
  oligonucleotide probe

SEQ ID NO: 11714 - DNA, 32 bp, Artificial; identical to SEQ ID NO: 5136
  oligonucleotide probe

SEQ ID NO: 11715 - DNA, 32 bp, Artificial; identical to SEQ ID NO: 7644
  oligonucleotide probe

SEQ ID NO: 11716 - DNA, 32 bp, Artificial; identical to SEQ ID NO: 7644
  oligonucleotide probe

SEQ ID NO: 11717 - DNA, 32 bp, Artificial; identical to SEQ ID NO: 7655
  oligonucleotide probe

SEQ ID NO: 11718 - DNA, 32 bp, Artificial; identical to SEQ ID NO: 7655
  oligonucleotide probe

SEQ ID NO: 11719 - DNA, 32 bp, Artificial; identical to SEQ ID NO: 5133
  oligonucleotide probe

SEQ ID NO: 11720 - DNA, 32 bp, Artificial; identical to SEQ ID NO: 5133
  oligonucleotide probe

SEQ ID NO: 11721 - DNA, 32 bp, Artificial; identical to SEQ ID NO: 7624
  oligonucleotide probe

SEQ ID NO: 11722 - DNA, 32 bp, Artificial; identical to SEQ ID NO: 7624
  oligonucleotide probe

SEQ ID NO: 11723 - DNA, 32 bp, Artificial; identical to SEQ ID NO: 7676
  oligonucleotide probe

SEQ ID NO: 11724 - DNA, 32 bp, Artificial; identical to SEQ ID NO: 7676
  oligonucleotide probe

SEQ ID NO: 11725 - DNA, 32 bp, Artificial; identical to SEQ ID NO: 7623
  oligonucleotide probe

SEQ ID NO: 11726 - DNA, 32 bp, Artificial; identical to SEQ ID NO: 7623
  oligonucleotide probe

SEQ ID NO: 11727 - DNA, 32 bp, Artificial; identical to SEQ ID NO: 5159
  oligonucleotide probe

SEQ ID NO: 11728 - DNA, 32 bp, Artificial; identical to SEQ ID NO: 5159
  oligonucleotide probe

SEQ ID NO: 11729 - DNA, 32 bp, Artificial; identical to SEQ ID NO: 5141
  oligonucleotide probe

SEQ ID NO: 11730 - DNA, 32 bp, Artificial; identical to SEQ ID NO: 5141
  oligonucleotide probe

SEQ ID NO: 11731 - DNA, 32 bp, Artificial; identical to SEQ ID NO: 7662
  oligonucleotide probe

SEQ ID NO: 11732 - DNA, 32 bp, Artificial; identical to SEQ ID NO: 7662
  oligonucleotide probe

SEQ ID NO: 11733 - DNA, 32 bp, Artificial; identical to SEQ ID NO: 7833
  oligonucleotide probe

SEQ ID NO: 11734 - DNA, 32 bp, Artificial; identical to SEQ ID NO: 7833
  oligonucleotide probe

SEQ ID NO: 11735 - DNA, 32 bp, Artificial; identical to SEQ ID NO: 7662
  oligonucleotide probe

SEQ ID NO: 11736 - DNA, 32 bp, Artificial; identical to SEQ ID NO: 7662
  oligonucleotide probe

SEQ ID NO: 11737 - DNA, 32 bp, Artificial; identical to SEQ ID NO: 5141
  oligonucleotide probe

SEQ ID NO: 11738 - DNA, 32 bp, Artificial; identical to SEQ ID NO: 5141
  oligonucleotide probe

SEQ ID NO: 11739 - DNA, 32 bp, Artificial; identical to SEQ ID NO: 5220
  oligonucleotide probe

SEQ ID NO: 11740 - DNA, 32 bp, Artificial; identical to SEQ ID NO: 5220
  oligonucleotide probe

SEQ ID NO: 11741 - DNA, 32 bp, Artificial; identical to SEQ ID NO: 5220
  oligonucleotide probe

SEQ ID NO: 11742 - DNA, 32 bp, Artificial; identical to SEQ ID NO: 5220
  oligonucleotide probe

SEQ ID NO: 11743 - DNA, 32 bp, Artificial; identical to SEQ ID NO: 5220
  oligonucleotide probe

SEQ ID NO: 11744 - DNA, 32 bp, Artificial; identical to SEQ ID NO: 5220
  oligonucleotide probe

SEQ ID NO: 11745 - DNA, 32 bp, Artificial; identical to SEQ ID NO: 5220
  oligonucleotide probe

SEQ ID NO: 11746 - DNA, 32 bp, Artificial; identical to SEQ ID NO: 5220
  oligonucleotide probe

SEQ ID NO: 11747 - DNA, 32 bp, Artificial; identical to SEQ ID NO: 5220
  oligonucleotide probe

SEQ ID NO: 11748 - DNA, 32 bp, Artificial; identical to SEQ ID NO: 5220
  oligonucleotide probe

SEQ ID NO: 11749 - DNA, 32 bp, Artificial; identical to SEQ ID NO: 5220
  oligonucleotide probe

SEQ ID NO: 11750 - DNA, 32 bp, Artificial; identical to SEQ ID NO: 5220
  oligonucleotide probe

SEQ ID NO: 11751 - DNA, 32 bp, Artificial; identical to SEQ ID NO: 5220
  oligonucleotide probe

SEQ ID NO: 11752 - DNA, 32 bp, Artificial; identical to SEQ ID NO: 5220
  oligonucleotide probe

SEQ ID NO: 11753 - DNA, 32 bp, Artificial; identical to SEQ ID NO: 5220
  oligonucleotide probe

SEQ ID NO: 11754 - DNA, 32 bp, Artificial; identical to SEQ ID NO: 5220
  oligonucleotide probe

SEQ ID NO: 11755 - DNA, 32 bp, Artificial; identical to SEQ ID NO: 7834
  oligonucleotide probe

SEQ ID NO: 11756 - DNA, 32 bp, Artificial
  oligonucleotide probe
ccgtcgcaaagcgcacccgtcgcaaagcgcac

SEQ ID NO: 11757 - DNA, 32 bp, Artificial; identical to SEQ ID NO: 11756
  oligonucleotide probe

SEQ ID NO: 11758 - DNA, 32 bp, Artificial; identical to SEQ ID NO: 11185
  oligonucleotide probe

SEQ ID NO: 11759 - DNA, 32 bp, Artificial; identical to SEQ ID NO: 11185
  oligonucleotide probe

SEQ ID NO: 11760 - DNA, 32 bp, Artificial; identical to SEQ ID NO: 11171
  oligonucleotide probe

SEQ ID NO: 11761 - DNA, 32 bp, Artificial; identical to SEQ ID NO: 11171
  oligonucleotide probe

SEQ ID NO: 11762 - DNA, 32 bp, Artificial
  oligonucleotide probe
ggctgcacggtcccgtggctgcacggtcccgt

SEQ ID NO: 11763 - DNA, 32 bp, Artificial; identical to SEQ ID NO: 11762
  oligonucleotide probe

SEQ ID NO: 11764 - DNA, 32 bp, Artificial
  oligonucleotide probe
aacgcgatttgccgcaaacgcgatttgccgca

SEQ ID NO: 11765 - DNA, 32 bp, Artificial; identical to SEQ ID NO: 11764
  oligonucleotide probe

SEQ ID NO: 11766 - DNA, 32 bp, Artificial; identical to SEQ ID NO: 11181
  oligonucleotide probe

SEQ ID NO: 11767 - DNA, 32 bp, Artificial; identical to SEQ ID NO: 11181
  oligonucleotide probe

SEQ ID NO: 11768 - DNA, 32 bp, Artificial; identical to SEQ ID NO: 11163
  oligonucleotide probe

SEQ ID NO: 11769 - DNA, 32 bp, Artificial; identical to SEQ ID NO: 11163
  oligonucleotide probe

SEQ ID NO: 11770 - DNA, 32 bp, Artificial
  oligonucleotide probe
ttcgccgtttgcgctgttcgccgtttgcgctg

SEQ ID NO: 11771 - DNA, 32 bp, Artificial; identical to SEQ ID NO: 11770
  oligonucleotide probe

SEQ ID NO: 11772 - DNA, 32 bp, Artificial; identical to SEQ ID NO: 11165
  oligonucleotide probe

SEQ ID NO: 11773 - DNA, 32 bp, Artificial; identical to SEQ ID NO: 11165
  oligonucleotide probe

SEQ ID NO: 11774 - DNA, 32 bp, Artificial; identical to SEQ ID NO: 11181
  oligonucleotide probe

SEQ ID NO: 11775 - DNA, 32 bp, Artificial; identical to SEQ ID NO: 11181
  oligonucleotide probe

SEQ ID NO: 11776 - DNA, 32 bp, Artificial; identical to SEQ ID NO: 11177
  oligonucleotide probe

SEQ ID NO: 11777 - DNA, 32 bp, Artificial; identical to SEQ ID NO: 11177
  oligonucleotide probe

SEQ ID NO: 11778 - DNA, 32 bp, Artificial; identical to SEQ ID NO: 11764
  oligonucleotide probe

SEQ ID NO: 11779 - DNA, 32 bp, Artificial; identical to SEQ ID NO: 11764
  oligonucleotide probe

SEQ ID NO: 11780 - DNA, 32 bp, Artificial; identical to SEQ ID NO: 11756
  oligonucleotide probe

SEQ ID NO: 11781 - DNA, 32 bp, Artificial; identical to SEQ ID NO: 11756
  oligonucleotide probe

SEQ ID NO: 11782 - DNA, 32 bp, Artificial; identical to SEQ ID NO: 11764
  oligonucleotide probe

SEQ ID NO: 11783 - DNA, 32 bp, Artificial; identical to SEQ ID NO: 11764
  oligonucleotide probe

SEQ ID NO: 11784 - DNA, 32 bp, Artificial; identical to SEQ ID NO: 11764
  oligonucleotide probe

SEQ ID NO: 11785 - DNA, 32 bp, Artificial; identical to SEQ ID NO: 11764
  oligonucleotide probe

SEQ ID NO: 11786 - DNA, 32 bp, Artificial; identical to SEQ ID NO: 11181
  oligonucleotide probe

SEQ ID NO: 11787 - DNA, 32 bp, Artificial; identical to SEQ ID NO: 11181
  oligonucleotide probe

SEQ ID NO: 11788 - DNA, 32 bp, Artificial; identical to SEQ ID NO: 11181
  oligonucleotide probe

SEQ ID NO: 11789 - DNA, 32 bp, Artificial; identical to SEQ ID NO: 11181
  oligonucleotide probe

SEQ ID NO: 11790 - DNA, 32 bp, Artificial; identical to SEQ ID NO: 11177
  oligonucleotide probe

SEQ ID NO: 11791 - DNA, 32 bp, Artificial; identical to SEQ ID NO: 11177
  oligonucleotide probe

SEQ ID NO: 11792 - DNA, 32 bp, Artificial; identical to SEQ ID NO: 11171
  oligonucleotide probe

SEQ ID NO: 11793 - DNA, 32 bp, Artificial; identical to SEQ ID NO: 11171
  oligonucleotide probe

SEQ ID NO: 11794 - DNA, 32 bp, Artificial; identical to SEQ ID NO: 11165
  oligonucleotide probe

SEQ ID NO: 11795 - DNA, 32 bp, Artificial; identical to SEQ ID NO: 11165
  oligonucleotide probe

SEQ ID NO: 11796 - DNA, 32 bp, Artificial; identical to SEQ ID NO: 11181
  oligonucleotide probe

SEQ ID NO: 11797 - DNA, 32 bp, Artificial; identical to SEQ ID NO: 11181
  oligonucleotide probe

SEQ ID NO: 11798 - DNA, 32 bp, Artificial; identical to SEQ ID NO: 11770
  oligonucleotide probe

SEQ ID NO: 11799 - DNA, 32 bp, Artificial; identical to SEQ ID NO: 11770
  oligonucleotide probe

SEQ ID NO: 11800 - DNA, 32 bp, Artificial; identical to SEQ ID NO: 11762
  oligonucleotide probe

SEQ ID NO: 11801 - DNA, 32 bp, Artificial; identical to SEQ ID NO: 11762
  oligonucleotide probe

SEQ ID NO: 11802 - DNA, 32 bp, Artificial; identical to SEQ ID NO: 11764
  oligonucleotide probe

SEQ ID NO: 11803 - DNA, 32 bp, Artificial; identical to SEQ ID NO: 11764
  oligonucleotide probe

SEQ ID NO: 11804 - DNA, 32 bp, Artificial; identical to SEQ ID NO: 11167
  oligonucleotide probe

SEQ ID NO: 11805 - DNA, 32 bp, Artificial; identical to SEQ ID NO: 11167
  oligonucleotide probe

SEQ ID NO: 11806 - DNA, 32 bp, Artificial; identical to SEQ ID NO: 11173
  oligonucleotide probe

SEQ ID NO: 11807 - DNA, 32 bp, Artificial; identical to SEQ ID NO: 11173
  oligonucleotide probe

SEQ ID NO: 11808 - DNA, 32 bp, Artificial; identical to SEQ ID NO: 11770
  oligonucleotide probe

SEQ ID NO: 11809 - DNA, 32 bp, Artificial; identical to SEQ ID NO: 11770
  oligonucleotide probe

SEQ ID NO: 11810 - DNA, 32 bp, Artificial; identical to SEQ ID NO: 11173
  oligonucleotide probe

SEQ ID NO: 11811 - DNA, 32 bp, Artificial; identical to SEQ ID NO: 11173
  oligonucleotide probe

SEQ ID NO: 11812 - DNA, 32 bp, Artificial; identical to SEQ ID NO: 11163
  oligonucleotide probe

SEQ ID NO: 11813 - DNA, 32 bp, Artificial; identical to SEQ ID NO: 11163
  oligonucleotide probe

SEQ ID NO: 11814 - DNA, 32 bp, Artificial; identical to SEQ ID NO: 11167
  oligonucleotide probe

SEQ ID NO: 11815 - DNA, 32 bp, Artificial; identical to SEQ ID NO: 11167
  oligonucleotide probe

SEQ ID NO: 11816 - DNA, 32 bp, Artificial; identical to SEQ ID NO: 11762
  oligonucleotide probe

SEQ ID NO: 11817 - DNA, 32 bp, Artificial; identical to SEQ ID NO: 11762
  oligonucleotide probe

SEQ ID NO: 11818 - DNA, 32 bp, Artificial; identical to SEQ ID NO: 11764
  oligonucleotide probe

SEQ ID NO: 11819 - DNA, 32 bp, Artificial; identical to SEQ ID NO: 11764
  oligonucleotide probe

SEQ ID NO: 11820 - DNA, 32 bp, Artificial; identical to SEQ ID NO: 11173
  oligonucleotide probe

SEQ ID NO: 11821 - DNA, 32 bp, Artificial; identical to SEQ ID NO: 11173
  oligonucleotide probe

SEQ ID NO: 11822 - DNA, 32 bp, Artificial; identical to SEQ ID NO: 11173
  oligonucleotide probe

SEQ ID NO: 11823 - DNA, 32 bp, Artificial; identical to SEQ ID NO: 11173
  oligonucleotide probe

SEQ ID NO: 11824 - DNA, 32 bp, Artificial; identical to SEQ ID NO: 11762
  oligonucleotide probe

SEQ ID NO: 11825 - DNA, 32 bp, Artificial; identical to SEQ ID NO: 11762
  oligonucleotide probe

SEQ ID NO: 11826 - DNA, 32 bp, Artificial; identical to SEQ ID NO: 11764
  oligonucleotide probe

SEQ ID NO: 11827 - DNA, 32 bp, Artificial; identical to SEQ ID NO: 11764
  oligonucleotide probe

SEQ ID NO: 11828 - DNA, 32 bp, Artificial; identical to SEQ ID NO: 11762
  oligonucleotide probe

SEQ ID NO: 11829 - DNA, 32 bp, Artificial; identical to SEQ ID NO: 11762
  oligonucleotide probe

SEQ ID NO: 11830 - DNA, 32 bp, Artificial; identical to SEQ ID NO: 11181
  oligonucleotide probe

SEQ ID NO: 11831 - DNA, 32 bp, Artificial; identical to SEQ ID NO: 11181
  oligonucleotide probe

SEQ ID NO: 11832 - DNA, 32 bp, Artificial; identical to SEQ ID NO: 11167
  oligonucleotide probe

SEQ ID NO: 11833 - DNA, 32 bp, Artificial; identical to SEQ ID NO: 11167
  oligonucleotide probe

SEQ ID NO: 11834 - DNA, 32 bp, Artificial; identical to SEQ ID NO: 11167
  oligonucleotide probe

SEQ ID NO: 11835 - DNA, 32 bp, Artificial; identical to SEQ ID NO: 11167
  oligonucleotide probe

SEQ ID NO: 11836 - DNA, 32 bp, Artificial; identical to SEQ ID NO: 11756
  oligonucleotide probe

SEQ ID NO: 11837 - DNA, 32 bp, Artificial; identical to SEQ ID NO: 11756
  oligonucleotide probe

SEQ ID NO: 11838 - DNA, 32 bp, Artificial; identical to SEQ ID NO: 11764
  oligonucleotide probe

SEQ ID NO: 11839 - DNA, 32 bp, Artificial; identical to SEQ ID NO: 11764
  oligonucleotide probe

SEQ ID NO: 11840 - DNA, 32 bp, Artificial; identical to SEQ ID NO: 11756
  oligonucleotide probe

SEQ ID NO: 11841 - DNA, 32 bp, Artificial; identical to SEQ ID NO: 11756
  oligonucleotide probe

SEQ ID NO: 11842 - DNA, 32 bp, Artificial; identical to SEQ ID NO: 11167
  oligonucleotide probe

SEQ ID NO: 11843 - DNA, 32 bp, Artificial; identical to SEQ ID NO: 11167
  oligonucleotide probe

SEQ ID NO: 11844 - DNA, 32 bp, Artificial; identical to SEQ ID NO: 11185
  oligonucleotide probe

SEQ ID NO: 11845 - DNA, 32 bp, Artificial; identical to SEQ ID NO: 11185
  oligonucleotide probe

SEQ ID NO: 11846 - DNA, 32 bp, Artificial; identical to SEQ ID NO: 11762
  oligonucleotide probe

SEQ ID NO: 11847 - DNA, 32 bp, Artificial; identical to SEQ ID NO: 11762
  oligonucleotide probe

SEQ ID NO: 11848 - DNA, 32 bp, Artificial; identical to SEQ ID NO: 11165
  oligonucleotide probe

SEQ ID NO: 11849 - DNA, 32 bp, Artificial; identical to SEQ ID NO: 11165
  oligonucleotide probe

SEQ ID NO: 11850 - DNA, 32 bp, Artificial; identical to SEQ ID NO: 11181
  oligonucleotide probe

SEQ ID NO: 11851 - DNA, 32 bp, Artificial; identical to SEQ ID NO: 11181
  oligonucleotide probe

SEQ ID NO: 11852 - DNA, 32 bp, Artificial; identical to SEQ ID NO: 11171
  oligonucleotide probe

SEQ ID NO: 11853 - DNA, 32 bp, Artificial; identical to SEQ ID NO: 11171
  oligonucleotide probe

SEQ ID NO: 11854 - DNA, 32 bp, Artificial; identical to SEQ ID NO: 11770
  oligonucleotide probe

SEQ ID NO: 11855 - DNA, 32 bp, Artificial; identical to SEQ ID NO: 11770
  oligonucleotide probe

SEQ ID NO: 11856 - DNA, 32 bp, Artificial; identical to SEQ ID NO: 11181
  oligonucleotide probe

SEQ ID NO: 11857 - DNA, 32 bp, Artificial; identical to SEQ ID NO: 11181
  oligonucleotide probe

SEQ ID NO: 11858 - DNA, 32 bp, Artificial; identical to SEQ ID NO: 11163
  oligonucleotide probe

SEQ ID NO: 11859 - DNA, 32 bp, Artificial; identical to SEQ ID NO: 11163
  oligonucleotide probe

SEQ ID NO: 11860 - DNA, 32 bp, Artificial; identical to SEQ ID NO: 11163
  oligonucleotide probe

SEQ ID NO: 11861 - DNA, 32 bp, Artificial; identical to SEQ ID NO: 11163
  oligonucleotide probe

SEQ ID NO: 11862 - DNA, 32 bp, Artificial; identical to SEQ ID NO: 11756
  oligonucleotide probe

SEQ ID NO: 11863 - DNA, 32 bp, Artificial; identical to SEQ ID NO: 11756
  oligonucleotide probe

SEQ ID NO: 11864 - DNA, 32 bp, Artificial; identical to SEQ ID NO: 11185
  oligonucleotide probe

SEQ ID NO: 11865 - DNA, 32 bp, Artificial; identical to SEQ ID NO: 11185
  oligonucleotide probe

SEQ ID NO: 11866 - DNA, 32 bp, Artificial; identical to SEQ ID NO: 11764
  oligonucleotide probe

SEQ ID NO: 11867 - DNA, 32 bp, Artificial; identical to SEQ ID NO: 11764
  oligonucleotide probe

SEQ ID NO: 11868 - DNA, 32 bp, Artificial; identical to SEQ ID NO: 11770
  oligonucleotide probe

SEQ ID NO: 11869 - DNA, 32 bp, Artificial; identical to SEQ ID NO: 11770
  oligonucleotide probe

SEQ ID NO: 11870 - DNA, 32 bp, Artificial; identical to SEQ ID NO: 11165
  oligonucleotide probe

SEQ ID NO: 11871 - DNA, 32 bp, Artificial; identical to SEQ ID NO: 11165
  oligonucleotide probe

SEQ ID NO: 11872 - DNA, 32 bp, Artificial; identical to SEQ ID NO: 11185
  oligonucleotide probe

SEQ ID NO: 11873 - DNA, 32 bp, Artificial; identical to SEQ ID NO: 11185
  oligonucleotide probe

SEQ ID NO: 11874 - DNA, 32 bp, Artificial; identical to SEQ ID NO: 11177
  oligonucleotide probe

SEQ ID NO: 11875 - DNA, 32 bp, Artificial; identical to SEQ ID NO: 11177
  oligonucleotide probe

SEQ ID NO: 11876 - DNA, 32 bp, Artificial; identical to SEQ ID NO: 11165
  oligonucleotide probe

SEQ ID NO: 11877 - DNA, 32 bp, Artificial; identical to SEQ ID NO: 11165
  oligonucleotide probe

SEQ ID NO: 11878 - DNA, 32 bp, Artificial; identical to SEQ ID NO: 11163
  oligonucleotide probe

SEQ ID NO: 11879 - DNA, 32 bp, Artificial; identical to SEQ ID NO: 11163
  oligonucleotide probe

SEQ ID NO: 11880 - DNA, 32 bp, Artificial; identical to SEQ ID NO: 11762
  oligonucleotide probe

SEQ ID NO: 11881 - DNA, 32 bp, Artificial; identical to SEQ ID NO: 11762
  oligonucleotide probe

SEQ ID NO: 11882 - DNA, 32 bp, Artificial; identical to SEQ ID NO: 11173
  oligonucleotide probe

SEQ ID NO: 11883 - DNA, 32 bp, Artificial; identical to SEQ ID NO: 11173
  oligonucleotide probe

SEQ ID NO: 11884 - DNA, 32 bp, Artificial; identical to SEQ ID NO: 11185
  oligonucleotide probe

SEQ ID NO: 11885 - DNA, 32 bp, Artificial; identical to SEQ ID NO: 11185
  oligonucleotide probe

SEQ ID NO: 11886 - DNA, 32 bp, Artificial; identical to SEQ ID NO: 11762
  oligonucleotide probe

SEQ ID NO: 11887 - DNA, 32 bp, Artificial; identical to SEQ ID NO: 11762
  oligonucleotide probe

SEQ ID NO: 11888 - DNA, 32 bp, Artificial; identical to SEQ ID NO: 11177
  oligonucleotide probe

SEQ ID NO: 11889 - DNA, 32 bp, Artificial; identical to SEQ ID NO: 11177
  oligonucleotide probe

SEQ ID NO: 11890 - DNA, 32 bp, Artificial; identical to SEQ ID NO: 11167
  oligonucleotide probe

SEQ ID NO: 11891 - DNA, 32 bp, Artificial; identical to SEQ ID NO: 11167
  oligonucleotide probe

SEQ ID NO: 11892 - DNA, 32 bp, Artificial; identical to SEQ ID NO: 11764
  oligonucleotide probe

SEQ ID NO: 11893 - DNA, 32 bp, Artificial; identical to SEQ ID NO: 11764
  oligonucleotide probe

SEQ ID NO: 11894 - DNA, 32 bp, Artificial; identical to SEQ ID NO: 11167
  oligonucleotide probe

SEQ ID NO: 11895 - DNA, 32 bp, Artificial; identical to SEQ ID NO: 11167
  oligonucleotide probe

SEQ ID NO: 11896 - DNA, 32 bp, Artificial; identical to SEQ ID NO: 11185
  oligonucleotide probe

SEQ ID NO: 11897 - DNA, 32 bp, Artificial; identical to SEQ ID NO: 11185
  oligonucleotide probe

SEQ ID NO: 11898 - DNA, 32 bp, Artificial; identical to SEQ ID NO: 11756
  oligonucleotide probe

SEQ ID NO: 11899 - DNA, 32 bp, Artificial; identical to SEQ ID NO: 11756
  oligonucleotide probe

SEQ ID NO: 11900 - DNA, 32 bp, Artificial; identical to SEQ ID NO: 11764
  oligonucleotide probe

SEQ ID NO: 11901 - DNA, 32 bp, Artificial; identical to SEQ ID NO: 11764
  oligonucleotide probe

SEQ ID NO: 11902 - DNA, 32 bp, Artificial; identical to SEQ ID NO: 11163
  oligonucleotide probe

SEQ ID NO: 11903 - DNA, 32 bp, Artificial; identical to SEQ ID NO: 11163
  oligonucleotide probe

SEQ ID NO: 11904 - DNA, 32 bp, Artificial; identical to SEQ ID NO: 11165
  oligonucleotide probe

SEQ ID NO: 11905 - DNA, 32 bp, Artificial; identical to SEQ ID NO: 11165
  oligonucleotide probe

SEQ ID NO: 11906 - DNA, 32 bp, Artificial; identical to SEQ ID NO: 11756
  oligonucleotide probe

SEQ ID NO: 11907 - DNA, 32 bp, Artificial; identical to SEQ ID NO: 11756
  oligonucleotide probe

SEQ ID NO: 11908 - DNA, 32 bp, Artificial; identical to SEQ ID NO: 11770
  oligonucleotide probe

SEQ ID NO: 11909 - DNA, 32 bp, Artificial; identical to SEQ ID NO: 11770
  oligonucleotide probe

SEQ ID NO: 11910 - DNA, 32 bp, Artificial; identical to SEQ ID NO: 11171
  oligonucleotide probe

SEQ ID NO: 11911 - DNA, 32 bp, Artificial; identical to SEQ ID NO: 11171
  oligonucleotide probe

SEQ ID NO: 11912 - DNA, 32 bp, Artificial; identical to SEQ ID NO: 11756
  oligonucleotide probe

SEQ ID NO: 11913 - DNA, 32 bp, Artificial; identical to SEQ ID NO: 11756
  oligonucleotide probe

SEQ ID NO: 11914 - DNA, 32 bp, Artificial; identical to SEQ ID NO: 11762
  oligonucleotide probe

SEQ ID NO: 11915 - DNA, 32 bp, Artificial; identical to SEQ ID NO: 11762
  oligonucleotide probe

SEQ ID NO: 11916 - DNA, 32 bp, Artificial; identical to SEQ ID NO: 11756
  oligonucleotide probe

SEQ ID NO: 11917 - DNA, 32 bp, Artificial; identical to SEQ ID NO: 11756
  oligonucleotide probe

SEQ ID NO: 11918 - DNA, 32 bp, Artificial; identical to SEQ ID NO: 11181
  oligonucleotide probe

SEQ ID NO: 11919 - DNA, 32 bp, Artificial; identical to SEQ ID NO: 11181
  oligonucleotide probe

SEQ ID NO: 11920 - DNA, 32 bp, Artificial; identical to SEQ ID NO: 11770
  oligonucleotide probe

SEQ ID NO: 11921 - DNA, 32 bp, Artificial; identical to SEQ ID NO: 11770
  oligonucleotide probe

SEQ ID NO: 11922 - DNA, 32 bp, Artificial; identical to SEQ ID NO: 11163
  oligonucleotide probe

SEQ ID NO: 11923 - DNA, 32 bp, Artificial; identical to SEQ ID NO: 11163
  oligonucleotide probe

SEQ ID NO: 11924 - DNA, 32 bp, Artificial; identical to SEQ ID NO: 11770
  oligonucleotide probe

SEQ ID NO: 11925 - DNA, 32 bp, Artificial; identical to SEQ ID NO: 11770
  oligonucleotide probe

SEQ ID NO: 11926 - DNA, 32 bp, Artificial; identical to SEQ ID NO: 11756
  oligonucleotide probe

SEQ ID NO: 11927 - DNA, 32 bp, Artificial; identical to SEQ ID NO: 11756
  oligonucleotide probe

SEQ ID NO: 11928 - DNA, 32 bp, Artificial; identical to SEQ ID NO: 11165
  oligonucleotide probe

SEQ ID NO: 11929 - DNA, 32 bp, Artificial; identical to SEQ ID NO: 11165
  oligonucleotide probe

SEQ ID NO: 11930 - DNA, 32 bp, Artificial; identical to SEQ ID NO: 11770
  oligonucleotide probe

SEQ ID NO: 11931 - DNA, 32 bp, Artificial; identical to SEQ ID NO: 11770
  oligonucleotide probe

SEQ ID NO: 11932 - DNA, 32 bp, Artificial; identical to SEQ ID NO: 11163
  oligonucleotide probe

SEQ ID NO: 11933 - DNA, 32 bp, Artificial; identical to SEQ ID NO: 11163
  oligonucleotide probe

SEQ ID NO: 11934 - DNA, 32 bp, Artificial; identical to SEQ ID NO: 11171
  oligonucleotide probe

SEQ ID NO: 11935 - DNA, 32 bp, Artificial; identical to SEQ ID NO: 11171
  oligonucleotide probe

SEQ ID NO: 11936 - DNA, 32 bp, Artificial; identical to SEQ ID NO: 11762
  oligonucleotide probe

SEQ ID NO: 11937 - DNA, 32 bp, Artificial; identical to SEQ ID NO: 11762
  oligonucleotide probe

SEQ ID NO: 11938 - DNA, 32 bp, Artificial; identical to SEQ ID NO: 11173
  oligonucleotide probe

SEQ ID NO: 11939 - DNA, 32 bp, Artificial; identical to SEQ ID NO: 11173
  oligonucleotide probe

SEQ ID NO: 11940 - DNA, 32 bp, Artificial; identical to SEQ ID NO: 11185
  oligonucleotide probe

SEQ ID NO: 11941 - DNA, 32 bp, Artificial; identical to SEQ ID NO: 11185
  oligonucleotide probe

SEQ ID NO: 11942 - DNA, 32 bp, Artificial; identical to SEQ ID NO: 11762
  oligonucleotide probe

SEQ ID NO: 11943 - DNA, 32 bp, Artificial; identical to SEQ ID NO: 11762
  oligonucleotide probe

SEQ ID NO: 11944 - DNA, 32 bp, Artificial; identical to SEQ ID NO: 11171
  oligonucleotide probe

SEQ ID NO: 11945 - DNA, 32 bp, Artificial; identical to SEQ ID NO: 11171
  oligonucleotide probe

SEQ ID NO: 11946 - DNA, 32 bp, Artificial; identical to SEQ ID NO: 11177
  oligonucleotide probe

SEQ ID NO: 11947 - DNA, 32 bp, Artificial; identical to SEQ ID NO: 11177
  oligonucleotide probe

SEQ ID NO: 11948 - DNA, 32 bp, Artificial; identical to SEQ ID NO: 11181
  oligonucleotide probe

SEQ ID NO: 11949 - DNA, 32 bp, Artificial; identical to SEQ ID NO: 11181
  oligonucleotide probe

SEQ ID NO: 11950 - DNA, 32 bp, Artificial; identical to SEQ ID NO: 11167
  oligonucleotide probe

SEQ ID NO: 11951 - DNA, 32 bp, Artificial; identical to SEQ ID NO: 11167
  oligonucleotide probe

SEQ ID NO: 11952 - DNA, 32 bp, Artificial; identical to SEQ ID NO: 11171
  oligonucleotide probe

SEQ ID NO: 11953 - DNA, 32 bp, Artificial; identical to SEQ ID NO: 11171
  oligonucleotide probe

SEQ ID NO: 11954 - DNA, 32 bp, Artificial; identical to SEQ ID NO: 11762
  oligonucleotide probe

SEQ ID NO: 11955 - DNA, 32 bp, Artificial; identical to SEQ ID NO: 11762
  oligonucleotide probe

SEQ ID NO: 11956 - DNA, 32 bp, Artificial; identical to SEQ ID NO: 11173
  oligonucleotide probe

SEQ ID NO: 11957 - DNA, 32 bp, Artificial; identical to SEQ ID NO: 11173
  oligonucleotide probe

SEQ ID NO: 11958 - DNA, 32 bp, Artificial; identical to SEQ ID NO: 11764
  oligonucleotide probe

SEQ ID NO: 11959 - DNA, 32 bp, Artificial; identical to SEQ ID NO: 11764
  oligonucleotide probe

SEQ ID NO: 11960 - DNA, 32 bp, Artificial; identical to SEQ ID NO: 11770
  oligonucleotide probe

SEQ ID NO: 11961 - DNA, 32 bp, Artificial; identical to SEQ ID NO: 11770
  oligonucleotide probe

SEQ ID NO: 11962 - DNA, 32 bp, Artificial; identical to SEQ ID NO: 11770
  oligonucleotide probe

SEQ ID NO: 11963 - DNA, 32 bp, Artificial; identical to SEQ ID NO: 11770
  oligonucleotide probe

SEQ ID NO: 11964 - DNA, 32 bp, Artificial; identical to SEQ ID NO: 11762
  oligonucleotide probe

SEQ ID NO: 11965 - DNA, 32 bp, Artificial; identical to SEQ ID NO: 11762
  oligonucleotide probe

SEQ ID NO: 11966 - DNA, 32 bp, Artificial; identical to SEQ ID NO: 11762
  oligonucleotide probe

SEQ ID NO: 11967 - DNA, 32 bp, Artificial; identical to SEQ ID NO: 11762
  oligonucleotide probe

SEQ ID NO: 11968 - DNA, 32 bp, Artificial; identical to SEQ ID NO: 11756
  oligonucleotide probe

SEQ ID NO: 11969 - DNA, 32 bp, Artificial; identical to SEQ ID NO: 11756
  oligonucleotide probe

SEQ ID NO: 11970 - DNA, 32 bp, Artificial; identical to SEQ ID NO: 11181
  oligonucleotide probe

SEQ ID NO: 11971 - DNA, 32 bp, Artificial; identical to SEQ ID NO: 11181
  oligonucleotide probe

SEQ ID NO: 11972 - DNA, 32 bp, Artificial; identical to SEQ ID NO: 11762
  oligonucleotide probe

SEQ ID NO: 11973 - DNA, 32 bp, Artificial; identical to SEQ ID NO: 11762
  oligonucleotide probe

SEQ ID NO: 11974 - DNA, 32 bp, Artificial; identical to SEQ ID NO: 11762
  oligonucleotide probe

SEQ ID NO: 11975 - DNA, 32 bp, Artificial; identical to SEQ ID NO: 11762
  oligonucleotide probe

SEQ ID NO: 11976 - DNA, 32 bp, Artificial; identical to SEQ ID NO: 11764
  oligonucleotide probe

SEQ ID NO: 11977 - DNA, 32 bp, Artificial; identical to SEQ ID NO: 11764
  oligonucleotide probe

SEQ ID NO: 11978 - DNA, 32 bp, Artificial; identical to SEQ ID NO: 11770
  oligonucleotide probe

SEQ ID NO: 11979 - DNA, 32 bp, Artificial; identical to SEQ ID NO: 11770
  oligonucleotide probe

SEQ ID NO: 11980 - DNA, 32 bp, Artificial; identical to SEQ ID NO: 11165
  oligonucleotide probe

SEQ ID NO: 11981 - DNA, 32 bp, Artificial; identical to SEQ ID NO: 11165
  oligonucleotide probe

SEQ ID NO: 11982 - DNA, 32 bp, Artificial; identical to SEQ ID NO: 11756
  oligonucleotide probe

SEQ ID NO: 11983 - DNA, 32 bp, Artificial; identical to SEQ ID NO: 11756
  oligonucleotide probe

SEQ ID NO: 11984 - DNA, 32 bp, Artificial; identical to SEQ ID NO: 11756
  oligonucleotide probe

SEQ ID NO: 11985 - DNA, 32 bp, Artificial; identical to SEQ ID NO: 11756
  oligonucleotide probe

SEQ ID NO: 11986 - DNA, 32 bp, Artificial; identical to SEQ ID NO: 11764
  oligonucleotide probe

SEQ ID NO: 11987 - DNA, 32 bp, Artificial; identical to SEQ ID NO: 11764
  oligonucleotide probe

SEQ ID NO: 11988 - DNA, 32 bp, Artificial; identical to SEQ ID NO: 11756
  oligonucleotide probe

SEQ ID NO: 11989 - DNA, 32 bp, Artificial; identical to SEQ ID NO: 11756
  oligonucleotide probe

SEQ ID NO: 11990 - DNA, 32 bp, Artificial; identical to SEQ ID NO: 11177
  oligonucleotide probe

SEQ ID NO: 11991 - DNA, 32 bp, Artificial; identical to SEQ ID NO: 11177
  oligonucleotide probe

SEQ ID NO: 11992 - DNA, 32 bp, Artificial; identical to SEQ ID NO: 11177
  oligonucleotide probe

SEQ ID NO: 11993 - DNA, 32 bp, Artificial; identical to SEQ ID NO: 11177
  oligonucleotide probe

SEQ ID NO: 11994 - DNA, 32 bp, Artificial; identical to SEQ ID NO: 11177
  oligonucleotide probe

SEQ ID NO: 11995 - DNA, 32 bp, Artificial; identical to SEQ ID NO: 11177
  oligonucleotide probe

SEQ ID NO: 11996 - DNA, 32 bp, Artificial; identical to SEQ ID NO: 11764
  oligonucleotide probe

SEQ ID NO: 11997 - DNA, 32 bp, Artificial; identical to SEQ ID NO: 11764
  oligonucleotide probe

SEQ ID NO: 11998 - DNA, 32 bp, Artificial; identical to SEQ ID NO: 11764
  oligonucleotide probe

SEQ ID NO: 11999 - DNA, 32 bp, Artificial; identical to SEQ ID NO: 11764
  oligonucleotide probe

SEQ ID NO: 12000 - DNA, 32 bp, Artificial; identical to SEQ ID NO: 11770
  oligonucleotide probe

SEQ ID NO: 12001 - DNA, 32 bp, Artificial; identical to SEQ ID NO: 11770
  oligonucleotide probe

SEQ ID NO: 12002 - DNA, 32 bp, Artificial; identical to SEQ ID NO: 11171
  oligonucleotide probe

SEQ ID NO: 12003 - DNA, 32 bp, Artificial; identical to SEQ ID NO: 11171
  oligonucleotide probe

SEQ ID NO: 12004 - DNA, 32 bp, Artificial; identical to SEQ ID NO: 11171
  oligonucleotide probe

SEQ ID NO: 12005 - DNA, 32 bp, Artificial; identical to SEQ ID NO: 11171
  oligonucleotide probe

SEQ ID NO: 12006 - DNA, 32 bp, Artificial; identical to SEQ ID NO: 11171
  oligonucleotide probe

SEQ ID NO: 12007 - DNA, 32 bp, Artificial; identical to SEQ ID NO: 11171
  oligonucleotide probe

SEQ ID NO: 12008 - DNA, 32 bp, Artificial; identical to SEQ ID NO: 11756
  oligonucleotide probe

SEQ ID NO: 12009 - DNA, 32 bp, Artificial; identical to SEQ ID NO: 11756
  oligonucleotide probe

SEQ ID NO: 12010 - DNA, 32 bp, Artificial; identical to SEQ ID NO: 11165
  oligonucleotide probe

SEQ ID NO: 12011 - DNA, 32 bp, Artificial; identical to SEQ ID NO: 11165
  oligonucleotide probe

SEQ ID NO: 12012 - DNA, 32 bp, Artificial; identical to SEQ ID NO: 11770
  oligonucleotide probe

SEQ ID NO: 12013 - DNA, 32 bp, Artificial; identical to SEQ ID NO: 11770
  oligonucleotide probe

SEQ ID NO: 12014 - DNA, 32 bp, Artificial; identical to SEQ ID NO: 11185
  oligonucleotide probe

SEQ ID NO: 12015 - DNA, 32 bp, Artificial; identical to SEQ ID NO: 11185
  oligonucleotide probe

SEQ ID NO: 12016 - DNA, 32 bp, Artificial; identical to SEQ ID NO: 11762
  oligonucleotide probe

SEQ ID NO: 12017 - DNA, 32 bp, Artificial; identical to SEQ ID NO: 11762
  oligonucleotide probe

SEQ ID NO: 12018 - DNA, 32 bp, Artificial; identical to SEQ ID NO: 11167
  oligonucleotide probe

SEQ ID NO: 12019 - DNA, 32 bp, Artificial; identical to SEQ ID NO: 11167
  oligonucleotide probe

SEQ ID NO: 12020 - DNA, 32 bp, Artificial; identical to SEQ ID NO: 11177
  oligonucleotide probe

SEQ ID NO: 12021 - DNA, 32 bp, Artificial; identical to SEQ ID NO: 11177
  oligonucleotide probe

SEQ ID NO: 12022 - DNA, 32 bp, Artificial; identical to SEQ ID NO: 11770
  oligonucleotide probe

SEQ ID NO: 12023 - DNA, 32 bp, Artificial; identical to SEQ ID NO: 11770
  oligonucleotide probe

SEQ ID NO: 12024 - DNA, 32 bp, Artificial; identical to SEQ ID NO: 11177
  oligonucleotide probe

SEQ ID NO: 12025 - DNA, 32 bp, Artificial; identical to SEQ ID NO: 11177
  oligonucleotide probe

SEQ ID NO: 12026 - DNA, 32 bp, Artificial; identical to SEQ ID NO: 11177
  oligonucleotide probe

SEQ ID NO: 12027 - DNA, 32 bp, Artificial; identical to SEQ ID NO: 11177
  oligonucleotide probe

SEQ ID NO: 12028 - DNA, 32 bp, Artificial; identical to SEQ ID NO: 11173
  oligonucleotide probe

SEQ ID NO: 12029 - DNA, 32 bp, Artificial; identical to SEQ ID NO: 11173
  oligonucleotide probe

SEQ ID NO: 12030 - DNA, 32 bp, Artificial; identical to SEQ ID NO: 11173
  oligonucleotide probe

SEQ ID NO: 12031 - DNA, 32 bp, Artificial; identical to SEQ ID NO: 11173
  oligonucleotide probe

SEQ ID NO: 12032 - DNA, 32 bp, Artificial; identical to SEQ ID NO: 11756
  oligonucleotide probe

SEQ ID NO: 12033 - DNA, 32 bp, Artificial; identical to SEQ ID NO: 11756
  oligonucleotide probe

SEQ ID NO: 12034 - DNA, 32 bp, Artificial; identical to SEQ ID NO: 11756
  oligonucleotide probe

SEQ ID NO: 12035 - DNA, 32 bp, Artificial; identical to SEQ ID NO: 11756
  oligonucleotide probe

SEQ ID NO: 12036 - DNA, 32 bp, Artificial; identical to SEQ ID NO: 11181
  oligonucleotide probe

SEQ ID NO: 12037 - DNA, 32 bp, Artificial; identical to SEQ ID NO: 11181
  oligonucleotide probe

SEQ ID NO: 12038 - DNA, 32 bp, Artificial; identical to SEQ ID NO: 11770
  oligonucleotide probe

SEQ ID NO: 12039 - DNA, 32 bp, Artificial; identical to SEQ ID NO: 11770
  oligonucleotide probe

SEQ ID NO: 12040 - DNA, 32 bp, Artificial; identical to SEQ ID NO: 11165
  oligonucleotide probe

SEQ ID NO: 12041 - DNA, 32 bp, Artificial; identical to SEQ ID NO: 11165
  oligonucleotide probe

SEQ ID NO: 12042 - DNA, 32 bp, Artificial; identical to SEQ ID NO: 11177
  oligonucleotide probe

SEQ ID NO: 12043 - DNA, 32 bp, Artificial; identical to SEQ ID NO: 11177
  oligonucleotide probe

SEQ ID NO: 12044 - DNA, 32 bp, Artificial; identical to SEQ ID NO: 11167
  oligonucleotide probe

SEQ ID NO: 12045 - DNA, 32 bp, Artificial; identical to SEQ ID NO: 11167
  oligonucleotide probe

SEQ ID NO: 12046 - DNA, 32 bp, Artificial; identical to SEQ ID NO: 11177
  oligonucleotide probe

SEQ ID NO: 12047 - DNA, 32 bp, Artificial; identical to SEQ ID NO: 11177
  oligonucleotide probe

SEQ ID NO: 12048 - DNA, 32 bp, Artificial; identical to SEQ ID NO: 11165
  oligonucleotide probe

SEQ ID NO: 12049 - DNA, 32 bp, Artificial; identical to SEQ ID NO: 11165
  oligonucleotide probe

SEQ ID NO: 12050 - DNA, 32 bp, Artificial; identical to SEQ ID NO: 11764
  oligonucleotide probe

SEQ ID NO: 12051 - DNA, 32 bp, Artificial; identical to SEQ ID NO: 11764
  oligonucleotide probe

SEQ ID NO: 12052 - DNA, 32 bp, Artificial; identical to SEQ ID NO: 11173
  oligonucleotide probe

SEQ ID NO: 12053 - DNA, 32 bp, Artificial; identical to SEQ ID NO: 11173
  oligonucleotide probe

SEQ ID NO: 12054 - DNA, 32 bp, Artificial; identical to SEQ ID NO: 11756
  oligonucleotide probe

SEQ ID NO: 12055 - DNA, 32 bp, Artificial; identical to SEQ ID NO: 11756
  oligonucleotide probe

SEQ ID NO: 12056 - DNA, 32 bp, Artificial; identical to SEQ ID NO: 11163
  oligonucleotide probe

SEQ ID NO: 12057 - DNA, 32 bp, Artificial; identical to SEQ ID NO: 11163
  oligonucleotide probe

SEQ ID NO: 12058 - DNA, 32 bp, Artificial; identical to SEQ ID NO: 11173
  oligonucleotide probe

SEQ ID NO: 12059 - DNA, 32 bp, Artificial; identical to SEQ ID NO: 11173
  oligonucleotide probe

SEQ ID NO: 12060 - DNA, 32 bp, Artificial; identical to SEQ ID NO: 11770
  oligonucleotide probe

SEQ ID NO: 12061 - DNA, 32 bp, Artificial; identical to SEQ ID NO: 11770
  oligonucleotide probe

SEQ ID NO: 12062 - DNA, 32 bp, Artificial; identical to SEQ ID NO: 11171
  oligonucleotide probe

SEQ ID NO: 12063 - DNA, 32 bp, Artificial; identical to SEQ ID NO: 11171
  oligonucleotide probe

SEQ ID NO: 12064 - DNA, 32 bp, Artificial; identical to SEQ ID NO: 11770
  oligonucleotide probe

SEQ ID NO: 12065 - DNA, 32 bp, Artificial; identical to SEQ ID NO: 11770
  oligonucleotide probe

SEQ ID NO: 12066 - DNA, 32 bp, Artificial; identical to SEQ ID NO: 11171
  oligonucleotide probe

SEQ ID NO: 12067 - DNA, 32 bp, Artificial; identical to SEQ ID NO: 11171
  oligonucleotide probe

SEQ ID NO: 12068 - DNA, 32 bp, Artificial; identical to SEQ ID NO: 11185
  oligonucleotide probe

SEQ ID NO: 12069 - DNA, 32 bp, Artificial; identical to SEQ ID NO: 11185
  oligonucleotide probe

SEQ ID NO: 12070 - DNA, 32 bp, Artificial; identical to SEQ ID NO: 11165
  oligonucleotide probe

SEQ ID NO: 12071 - DNA, 32 bp, Artificial; identical to SEQ ID NO: 11165
  oligonucleotide probe

SEQ ID NO: 12072 - DNA, 32 bp, Artificial; identical to SEQ ID NO: 11173
  oligonucleotide probe

SEQ ID NO: 12073 - DNA, 32 bp, Artificial; identical to SEQ ID NO: 11173
  oligonucleotide probe

SEQ ID NO: 12074 - DNA, 32 bp, Artificial; identical to SEQ ID NO: 11185
  oligonucleotide probe

SEQ ID NO: 12075 - DNA, 32 bp, Artificial; identical to SEQ ID NO: 11185
  oligonucleotide probe

SEQ ID NO: 12076 - DNA, 32 bp, Artificial; identical to SEQ ID NO: 11167
  oligonucleotide probe

SEQ ID NO: 12077 - DNA, 32 bp, Artificial; identical to SEQ ID NO: 11167
  oligonucleotide probe

SEQ ID NO: 12078 - DNA, 32 bp, Artificial; identical to SEQ ID NO: 11165
  oligonucleotide probe

SEQ ID NO: 12079 - DNA, 32 bp, Artificial; identical to SEQ ID NO: 11165
  oligonucleotide probe

SEQ ID NO: 12080 - DNA, 32 bp, Artificial; identical to SEQ ID NO: 11185
  oligonucleotide probe

SEQ ID NO: 12081 - DNA, 32 bp, Artificial; identical to SEQ ID NO: 11185
  oligonucleotide probe

SEQ ID NO: 12082 - DNA, 32 bp, Artificial; identical to SEQ ID NO: 11177
  oligonucleotide probe

SEQ ID NO: 12083 - DNA, 32 bp, Artificial; identical to SEQ ID NO: 11177
  oligonucleotide probe

SEQ ID NO: 12084 - DNA, 32 bp, Artificial; identical to SEQ ID NO: 11163
  oligonucleotide probe

SEQ ID NO: 12085 - DNA, 32 bp, Artificial; identical to SEQ ID NO: 11163
  oligonucleotide probe

SEQ ID NO: 12086 - DNA, 32 bp, Artificial; identical to SEQ ID NO: 11171
  oligonucleotide probe

SEQ ID NO: 12087 - DNA, 32 bp, Artificial; identical to SEQ ID NO: 11171
  oligonucleotide probe

SEQ ID NO: 12088 - DNA, 32 bp, Artificial; identical to SEQ ID NO: 11185
  oligonucleotide probe

SEQ ID NO: 12089 - DNA, 32 bp, Artificial; identical to SEQ ID NO: 11185
  oligonucleotide probe

SEQ ID NO: 12090 - DNA, 32 bp, Artificial; identical to SEQ ID NO: 11756
  oligonucleotide probe

SEQ ID NO: 12091 - DNA, 32 bp, Artificial; identical to SEQ ID NO: 11756
  oligonucleotide probe

SEQ ID NO: 12092 - DNA, 32 bp, Artificial; identical to SEQ ID NO: 11770
  oligonucleotide probe

SEQ ID NO: 12093 - DNA, 32 bp, Artificial; identical to SEQ ID NO: 11770
  oligonucleotide probe

SEQ ID NO: 12094 - DNA, 32 bp, Artificial; identical to SEQ ID NO: 11165
  oligonucleotide probe

SEQ ID NO: 12095 - DNA, 32 bp, Artificial; identical to SEQ ID NO: 11165
  oligonucleotide probe

SEQ ID NO: 12096 - DNA, 32 bp, Artificial; identical to SEQ ID NO: 11756
  oligonucleotide probe

SEQ ID NO: 12097 - DNA, 32 bp, Artificial; identical to SEQ ID NO: 11756
  oligonucleotide probe

SEQ ID NO: 12098 - DNA, 32 bp, Artificial; identical to SEQ ID NO: 11770
  oligonucleotide probe

SEQ ID NO: 12099 - DNA, 32 bp, Artificial; identical to SEQ ID NO: 11770
  oligonucleotide probe

SEQ ID NO: 12100 - DNA, 32 bp, Artificial; identical to SEQ ID NO: 11181
  oligonucleotide probe

SEQ ID NO: 12101 - DNA, 32 bp, Artificial; identical to SEQ ID NO: 11181
  oligonucleotide probe

SEQ ID NO: 12102 - DNA, 32 bp, Artificial; identical to SEQ ID NO: 11770
  oligonucleotide probe

SEQ ID NO: 12103 - DNA, 32 bp, Artificial; identical to SEQ ID NO: 11770
  oligonucleotide probe

SEQ ID NO: 12104 - DNA, 32 bp, Artificial; identical to SEQ ID NO: 11770
  oligonucleotide probe

SEQ ID NO: 12105 - DNA, 32 bp, Artificial; identical to SEQ ID NO: 11770
  oligonucleotide probe

SEQ ID NO: 12106 - DNA, 32 bp, Artificial; identical to SEQ ID NO: 11181
  oligonucleotide probe

SEQ ID NO: 12107 - DNA, 32 bp, Artificial; identical to SEQ ID NO: 11181
  oligonucleotide probe

SEQ ID NO: 12108 - DNA, 32 bp, Artificial; identical to SEQ ID NO: 11167
  oligonucleotide probe

SEQ ID NO: 12109 - DNA, 32 bp, Artificial; identical to SEQ ID NO: 11167
  oligonucleotide probe

SEQ ID NO: 12110 - DNA, 32 bp, Artificial; identical to SEQ ID NO: 11762
  oligonucleotide probe

SEQ ID NO: 12111 - DNA, 32 bp, Artificial; identical to SEQ ID NO: 11762
  oligonucleotide probe

SEQ ID NO: 12112 - DNA, 32 bp, Artificial; identical to SEQ ID NO: 11764
  oligonucleotide probe

SEQ ID NO: 12113 - DNA, 32 bp, Artificial; identical to SEQ ID NO: 11764
  oligonucleotide probe

SEQ ID NO: 12114 - DNA, 32 bp, Artificial; identical to SEQ ID NO: 11756
  oligonucleotide probe

SEQ ID NO: 12115 - DNA, 32 bp, Artificial; identical to SEQ ID NO: 11756
  oligonucleotide probe

SEQ ID NO: 12116 - DNA, 32 bp, Artificial; identical to SEQ ID NO: 11762
  oligonucleotide probe

SEQ ID NO: 12117 - DNA, 32 bp, Artificial; identical to SEQ ID NO: 11762
  oligonucleotide probe

SEQ ID NO: 12118 - DNA, 32 bp, Artificial; identical to SEQ ID NO: 11770
  oligonucleotide probe

SEQ ID NO: 12119 - DNA, 32 bp, Artificial; identical to SEQ ID NO: 11770
  oligonucleotide probe

SEQ ID NO: 12120 - DNA, 32 bp, Artificial; identical to SEQ ID NO: 11770
  oligonucleotide probe

SEQ ID NO: 12121 - DNA, 32 bp, Artificial; identical to SEQ ID NO: 11770
  oligonucleotide probe

SEQ ID NO: 12122 - DNA, 32 bp, Artificial; identical to SEQ ID NO: 11171
  oligonucleotide probe

SEQ ID NO: 12123 - DNA, 32 bp, Artificial; identical to SEQ ID NO: 11171
  oligonucleotide probe

SEQ ID NO: 12124 - DNA, 32 bp, Artificial; identical to SEQ ID NO: 11762
  oligonucleotide probe

SEQ ID NO: 12125 - DNA, 32 bp, Artificial; identical to SEQ ID NO: 11762
  oligonucleotide probe

SEQ ID NO: 12126 - DNA, 32 bp, Artificial; identical to SEQ ID NO: 11762
  oligonucleotide probe

SEQ ID NO: 12127 - DNA, 32 bp, Artificial; identical to SEQ ID NO: 11762
  oligonucleotide probe

SEQ ID NO: 12128 - DNA, 32 bp, Artificial; identical to SEQ ID NO: 11173
  oligonucleotide probe

SEQ ID NO: 12129 - DNA, 32 bp, Artificial; identical to SEQ ID NO: 11173
  oligonucleotide probe

SEQ ID NO: 12130 - DNA, 32 bp, Artificial; identical to SEQ ID NO: 11171
  oligonucleotide probe

SEQ ID NO: 12131 - DNA, 32 bp, Artificial; identical to SEQ ID NO: 11171
  oligonucleotide probe

SEQ ID NO: 12132 - DNA, 32 bp, Artificial; identical to SEQ ID NO: 11173
  oligonucleotide probe

SEQ ID NO: 12133 - DNA, 32 bp, Artificial; identical to SEQ ID NO: 11173
  oligonucleotide probe

SEQ ID NO: 12134 - DNA, 32 bp, Artificial; identical to SEQ ID NO: 11185
  oligonucleotide probe

SEQ ID NO: 12135 - DNA, 32 bp, Artificial; identical to SEQ ID NO: 11185
  oligonucleotide probe

SEQ ID NO: 12136 - DNA, 32 bp, Artificial; identical to SEQ ID NO: 11163
  oligonucleotide probe

SEQ ID NO: 12137 - DNA, 32 bp, Artificial; identical to SEQ ID NO: 11163
  oligonucleotide probe

SEQ ID NO: 12138 - DNA, 32 bp, Artificial; identical to SEQ ID NO: 11756
  oligonucleotide probe

SEQ ID NO: 12139 - DNA, 32 bp, Artificial; identical to SEQ ID NO: 11756
  oligonucleotide probe

SEQ ID NO: 12140 - DNA, 32 bp, Artificial; identical to SEQ ID NO: 11167
  oligonucleotide probe

SEQ ID NO: 12141 - DNA, 32 bp, Artificial; identical to SEQ ID NO: 11167
  oligonucleotide probe

SEQ ID NO: 12142 - DNA, 32 bp, Artificial; identical to SEQ ID NO: 11185
  oligonucleotide probe

SEQ ID NO: 12143 - DNA, 32 bp, Artificial; identical to SEQ ID NO: 11185
  oligonucleotide probe

SEQ ID NO: 12144 - DNA, 32 bp, Artificial; identical to SEQ ID NO: 11173
  oligonucleotide probe

SEQ ID NO: 12145 - DNA, 32 bp, Artificial; identical to SEQ ID NO: 11173
  oligonucleotide probe

SEQ ID NO: 12146 - DNA, 32 bp, Artificial; identical to SEQ ID NO: 11167
  oligonucleotide probe

SEQ ID NO: 12147 - DNA, 32 bp, Artificial; identical to SEQ ID NO: 11167
  oligonucleotide probe

SEQ ID NO: 12148 - DNA, 32 bp, Artificial; identical to SEQ ID NO: 11165
  oligonucleotide probe

SEQ ID NO: 12149 - DNA, 32 bp, Artificial; identical to SEQ ID NO: 11165
  oligonucleotide probe

SEQ ID NO: 12150 - DNA, 32 bp, Artificial; identical to SEQ ID NO: 11171
  oligonucleotide probe

SEQ ID NO: 12151 - DNA, 32 bp, Artificial; identical to SEQ ID NO: 11171
  oligonucleotide probe

SEQ ID NO: 12152 - DNA, 32 bp, Artificial; identical to SEQ ID NO: 11764
  oligonucleotide probe

SEQ ID NO: 12153 - DNA, 32 bp, Artificial; identical to SEQ ID NO: 11764
  oligonucleotide probe

SEQ ID NO: 12154 - DNA, 32 bp, Artificial; identical to SEQ ID NO: 11167
  oligonucleotide probe

SEQ ID NO: 12155 - DNA, 32 bp, Artificial; identical to SEQ ID NO: 11167
  oligonucleotide probe

SEQ ID NO: 12156 - DNA, 32 bp, Artificial; identical to SEQ ID NO: 11167
  oligonucleotide probe

SEQ ID NO: 12157 - DNA, 32 bp, Artificial; identical to SEQ ID NO: 11167
  oligonucleotide probe

SEQ ID NO: 12158 - DNA, 32 bp, Artificial; identical to SEQ ID NO: 11762
  oligonucleotide probe

SEQ ID NO: 12159 - DNA, 32 bp, Artificial; identical to SEQ ID NO: 11762
  oligonucleotide probe

SEQ ID NO: 12160 - DNA, 32 bp, Artificial; identical to SEQ ID NO: 11177
  oligonucleotide probe

SEQ ID NO: 12161 - DNA, 32 bp, Artificial; identical to SEQ ID NO: 11177
  oligonucleotide probe

SEQ ID NO: 12162 - DNA, 32 bp, Artificial; identical to SEQ ID NO: 11764
  oligonucleotide probe

SEQ ID NO: 12163 - DNA, 32 bp, Artificial; identical to SEQ ID NO: 11764
  oligonucleotide probe

SEQ ID NO: 12164 - DNA, 32 bp, Artificial; identical to SEQ ID NO: 11762
  oligonucleotide probe

SEQ ID NO: 12165 - DNA, 32 bp, Artificial; identical to SEQ ID NO: 11762
  oligonucleotide probe

SEQ ID NO: 12166 - DNA, 32 bp, Artificial; identical to SEQ ID NO: 11181
  oligonucleotide probe

SEQ ID NO: 12167 - DNA, 32 bp, Artificial; identical to SEQ ID NO: 11181
  oligonucleotide probe

SEQ ID NO: 12168 - DNA, 32 bp, Artificial; identical to SEQ ID NO: 11764
  oligonucleotide probe

SEQ ID NO: 12169 - DNA, 32 bp, Artificial; identical to SEQ ID NO: 11764
  oligonucleotide probe

SEQ ID NO: 12170 - DNA, 32 bp, Artificial; identical to SEQ ID NO: 11181
  oligonucleotide probe

SEQ ID NO: 12171 - DNA, 32 bp, Artificial; identical to SEQ ID NO: 11181
  oligonucleotide probe

SEQ ID NO: 12172 - DNA, 32 bp, Artificial; identical to SEQ ID NO: 11163
  oligonucleotide probe

SEQ ID NO: 12173 - DNA, 32 bp, Artificial; identical to SEQ ID NO: 11163
  oligonucleotide probe

SEQ ID NO: 12174 - DNA, 32 bp, Artificial; identical to SEQ ID NO: 11173
  oligonucleotide probe

SEQ ID NO: 12175 - DNA, 32 bp, Artificial; identical to SEQ ID NO: 11173
  oligonucleotide probe

SEQ ID NO: 12176 - DNA, 32 bp, Artificial; identical to SEQ ID NO: 11762
  oligonucleotide probe

SEQ ID NO: 12177 - DNA, 32 bp, Artificial; identical to SEQ ID NO: 11762
  oligonucleotide probe

SEQ ID NO: 12178 - DNA, 32 bp, Artificial; identical to SEQ ID NO: 11177
  oligonucleotide probe

SEQ ID NO: 12179 - DNA, 32 bp, Artificial; identical to SEQ ID NO: 11177
  oligonucleotide probe

SEQ ID NO: 12180 - DNA, 32 bp, Artificial; identical to SEQ ID NO: 11167
  oligonucleotide probe

SEQ ID NO: 12181 - DNA, 32 bp, Artificial; identical to SEQ ID NO: 11167
  oligonucleotide probe

SEQ ID NO: 12182 - DNA, 32 bp, Artificial; identical to SEQ ID NO: 11764
  oligonucleotide probe

SEQ ID NO: 12183 - DNA, 32 bp, Artificial; identical to SEQ ID NO: 11764
  oligonucleotide probe

SEQ ID NO: 12184 - DNA, 32 bp, Artificial; identical to SEQ ID NO: 11756
  oligonucleotide probe

SEQ ID NO: 12185 - DNA, 32 bp, Artificial; identical to SEQ ID NO: 11756
  oligonucleotide probe

SEQ ID NO: 12186 - DNA, 32 bp, Artificial; identical to SEQ ID NO: 11185
  oligonucleotide probe

SEQ ID NO: 12187 - DNA, 32 bp, Artificial; identical to SEQ ID NO: 11185
  oligonucleotide probe

SEQ ID NO: 12188 - DNA, 32 bp, Artificial; identical to SEQ ID NO: 11764
  oligonucleotide probe

SEQ ID NO: 12189 - DNA, 32 bp, Artificial; identical to SEQ ID NO: 11764
  oligonucleotide probe

SEQ ID NO: 12190 - DNA, 32 bp, Artificial; identical to SEQ ID NO: 11163
  oligonucleotide probe

SEQ ID NO: 12191 - DNA, 32 bp, Artificial; identical to SEQ ID NO: 11163
  oligonucleotide probe

SEQ ID NO: 12192 - DNA, 32 bp, Artificial; identical to SEQ ID NO: 11181
  oligonucleotide probe

SEQ ID NO: 12193 - DNA, 32 bp, Artificial; identical to SEQ ID NO: 11181
  oligonucleotide probe

SEQ ID NO: 12194 - DNA, 32 bp, Artificial; identical to SEQ ID NO: 11762
  oligonucleotide probe

SEQ ID NO: 12195 - DNA, 32 bp, Artificial; identical to SEQ ID NO: 11762
  oligonucleotide probe

SEQ ID NO: 12196 - DNA, 32 bp, Artificial; identical to SEQ ID NO: 11163
  oligonucleotide probe

SEQ ID NO: 12197 - DNA, 32 bp, Artificial; identical to SEQ ID NO: 11163
  oligonucleotide probe

SEQ ID NO: 12198 - DNA, 32 bp, Artificial; identical to SEQ ID NO: 11171
  oligonucleotide probe

SEQ ID NO: 12199 - DNA, 32 bp, Artificial; identical to SEQ ID NO: 11171
  oligonucleotide probe

SEQ ID NO: 12200 - DNA, 32 bp, Artificial; identical to SEQ ID NO: 11764
  oligonucleotide probe

SEQ ID NO: 12201 - DNA, 32 bp, Artificial; identical to SEQ ID NO: 11764
  oligonucleotide probe

SEQ ID NO: 12202 - DNA, 32 bp, Artificial; identical to SEQ ID NO: 11177
  oligonucleotide probe

SEQ ID NO: 12203 - DNA, 32 bp, Artificial; identical to SEQ ID NO: 11177
  oligonucleotide probe

SEQ ID NO: 12204 - DNA, 32 bp, Artificial; identical to SEQ ID NO: 11165
  oligonucleotide probe

SEQ ID NO: 12205 - DNA, 32 bp, Artificial; identical to SEQ ID NO: 11165
  oligonucleotide probe

SEQ ID NO: 12206 - DNA, 32 bp, Artificial; identical to SEQ ID NO: 11173
  oligonucleotide probe

SEQ ID NO: 12207 - DNA, 32 bp, Artificial; identical to SEQ ID NO: 11173
  oligonucleotide probe

SEQ ID NO: 12208 - DNA, 32 bp, Artificial; identical to SEQ ID NO: 11762
  oligonucleotide probe

SEQ ID NO: 12209 - DNA, 32 bp, Artificial; identical to SEQ ID NO: 11762
  oligonucleotide probe

SEQ ID NO: 12210 - DNA, 32 bp, Artificial; identical to SEQ ID NO: 11756
  oligonucleotide probe

SEQ ID NO: 12211 - DNA, 32 bp, Artificial; identical to SEQ ID NO: 11756
  oligonucleotide probe

SEQ ID NO: 12212 - DNA, 32 bp, Artificial; identical to SEQ ID NO: 11165
  oligonucleotide probe

SEQ ID NO: 12213 - DNA, 32 bp, Artificial; identical to SEQ ID NO: 11165
  oligonucleotide probe

SEQ ID NO: 12214 - DNA, 32 bp, Artificial; identical to SEQ ID NO: 11185
  oligonucleotide probe

SEQ ID NO: 12215 - DNA, 32 bp, Artificial; identical to SEQ ID NO: 11185
  oligonucleotide probe

SEQ ID NO: 12216 - DNA, 32 bp, Artificial; identical to SEQ ID NO: 11185
  oligonucleotide probe

SEQ ID NO: 12217 - DNA, 32 bp, Artificial; identical to SEQ ID NO: 11185
  oligonucleotide probe

SEQ ID NO: 12218 - DNA, 32 bp, Artificial; identical to SEQ ID NO: 11756
  oligonucleotide probe

SEQ ID NO: 12219 - DNA, 32 bp, Artificial; identical to SEQ ID NO: 11756
  oligonucleotide probe

SEQ ID NO: 12220 - DNA, 32 bp, Artificial; identical to SEQ ID NO: 11756
  oligonucleotide probe

SEQ ID NO: 12221 - DNA, 32 bp, Artificial; identical to SEQ ID NO: 11756
  oligonucleotide probe

SEQ ID NO: 12222 - DNA, 32 bp, Artificial; identical to SEQ ID NO: 11163
  oligonucleotide probe

SEQ ID NO: 12223 - DNA, 32 bp, Artificial; identical to SEQ ID NO: 11163
  oligonucleotide probe

SEQ ID NO: 12224 - DNA, 32 bp, Artificial; identical to SEQ ID NO: 11756
  oligonucleotide probe

SEQ ID NO: 12225 - DNA, 32 bp, Artificial; identical to SEQ ID NO: 11756
  oligonucleotide probe

SEQ ID NO: 12226 - DNA, 32 bp, Artificial; identical to SEQ ID NO: 11764
  oligonucleotide probe

SEQ ID NO: 12227 - DNA, 32 bp, Artificial; identical to SEQ ID NO: 11764
  oligonucleotide probe

SEQ ID NO: 12228 - DNA, 32 bp, Artificial; identical to SEQ ID NO: 11770
  oligonucleotide probe

SEQ ID NO: 12229 - DNA, 32 bp, Artificial; identical to SEQ ID NO: 11770
  oligonucleotide probe

SEQ ID NO: 12230 - DNA, 32 bp, Artificial; identical to SEQ ID NO: 11163
  oligonucleotide probe

SEQ ID NO: 12231 - DNA, 32 bp, Artificial; identical to SEQ ID NO: 11163
  oligonucleotide probe

SEQ ID NO: 12232 - DNA, 32 bp, Artificial; identical to SEQ ID NO: 11163
  oligonucleotide probe

SEQ ID NO: 12233 - DNA, 32 bp, Artificial; identical to SEQ ID NO: 11163
  oligonucleotide probe

SEQ ID NO: 12234 - DNA, 32 bp, Artificial; identical to SEQ ID NO: 11764
  oligonucleotide probe

SEQ ID NO: 12235 - DNA, 32 bp, Artificial; identical to SEQ ID NO: 11764
  oligonucleotide probe

SEQ ID NO: 12236 - DNA, 32 bp, Artificial; identical to SEQ ID NO: 11762
  oligonucleotide probe

SEQ ID NO: 12237 - DNA, 32 bp, Artificial; identical to SEQ ID NO: 11762
  oligonucleotide probe

SEQ ID NO: 12238 - DNA, 32 bp, Artificial; identical to SEQ ID NO: 11770
  oligonucleotide probe

SEQ ID NO: 12239 - DNA, 32 bp, Artificial; identical to SEQ ID NO: 11770
  oligonucleotide probe

SEQ ID NO: 12240 - DNA, 32 bp, Artificial; identical to SEQ ID NO: 11770
  oligonucleotide probe

SEQ ID NO: 12241 - DNA, 32 bp, Artificial; identical to SEQ ID NO: 11770
  oligonucleotide probe

SEQ ID NO: 12242 - DNA, 32 bp, Artificial; identical to SEQ ID NO: 11764
  oligonucleotide probe

SEQ ID NO: 12243 - DNA, 32 bp, Artificial; identical to SEQ ID NO: 11764
  oligonucleotide probe

SEQ ID NO: 12244 - DNA, 32 bp, Artificial; identical to SEQ ID NO: 11770
  oligonucleotide probe

SEQ ID NO: 12245 - DNA, 32 bp, Artificial; identical to SEQ ID NO: 11756
  oligonucleotide probe

SEQ ID NO: 12246 - DNA, 32 bp, Artificial; identical to SEQ ID NO: 11764
  oligonucleotide probe

SEQ ID NO: 12247 - DNA, 32 bp, Artificial; identical to SEQ ID NO: 11762
  oligonucleotide probe

SEQ ID NO: 12248 - DNA, 32 bp, Artificial; identical to SEQ ID NO: 7659
  oligonucleotide probe

SEQ ID NO: 12249 - DNA, 32 bp, Artificial; identical to SEQ ID NO: 7659
  oligonucleotide probe

SEQ ID NO: 12250 - DNA, 32 bp, Artificial; identical to SEQ ID NO: 5185
  oligonucleotide probe

SEQ ID NO: 12251 - DNA, 32 bp, Artificial; identical to SEQ ID NO: 5185
  oligonucleotide probe

SEQ ID NO: 12252 - DNA, 32 bp, Artificial; identical to SEQ ID NO: 7605
  oligonucleotide probe

SEQ ID NO: 12253 - DNA, 32 bp, Artificial; identical to SEQ ID NO: 7605
  oligonucleotide probe

SEQ ID NO: 12254 - DNA, 32 bp, Artificial; identical to SEQ ID NO: 7833
  oligonucleotide probe

SEQ ID NO: 12255 - DNA, 32 bp, Artificial; identical to SEQ ID NO: 7833
  oligonucleotide probe

SEQ ID NO: 12256 - DNA, 32 bp, Artificial; identical to SEQ ID NO: 5239
  oligonucleotide probe

SEQ ID NO: 12257 - DNA, 32 bp, Artificial; identical to SEQ ID NO: 5239
  oligonucleotide probe

SEQ ID NO: 12258 - DNA, 32 bp, Artificial; identical to SEQ ID NO: 5141
  oligonucleotide probe

SEQ ID NO: 12259 - DNA, 32 bp, Artificial; identical to SEQ ID NO: 5141
  oligonucleotide probe

SEQ ID NO: 12260 - DNA, 32 bp, Artificial; identical to SEQ ID NO: 5217
  oligonucleotide probe

SEQ ID NO: 12261 - DNA, 32 bp, Artificial; identical to SEQ ID NO: 5217
  oligonucleotide probe

SEQ ID NO: 12262 - DNA, 32 bp, Artificial; identical to SEQ ID NO: 7812
  oligonucleotide probe

SEQ ID NO: 12263 - DNA, 32 bp, Artificial; identical to SEQ ID NO: 7812
  oligonucleotide probe

SEQ ID NO: 12264 - DNA, 32 bp, Artificial; identical to SEQ ID NO: 7596
  oligonucleotide probe

SEQ ID NO: 12265 - DNA, 32 bp, Artificial; identical to SEQ ID NO: 7596
  oligonucleotide probe

SEQ ID NO: 12266 - DNA, 32 bp, Artificial; identical to SEQ ID NO: 7676
  oligonucleotide probe

SEQ ID NO: 12267 - DNA, 32 bp, Artificial; identical to SEQ ID NO: 7676
  oligonucleotide probe

SEQ ID NO: 12268 - DNA, 32 bp, Artificial; identical to SEQ ID NO: 7676
  oligonucleotide probe

SEQ ID NO: 12269 - DNA, 32 bp, Artificial; identical to SEQ ID NO: 7676
  oligonucleotide probe

SEQ ID NO: 12270 - DNA, 32 bp, Artificial; identical to SEQ ID NO: 8467
  oligonucleotide probe

SEQ ID NO: 12271 - DNA, 32 bp, Artificial; identical to SEQ ID NO: 8467
  oligonucleotide probe

SEQ ID NO: 12272 - DNA, 32 bp, Artificial; identical to SEQ ID NO: 8796
  oligonucleotide probe

SEQ ID NO: 12273 - DNA, 32 bp, Artificial; identical to SEQ ID NO: 8796
  oligonucleotide probe

SEQ ID NO: 12274 - DNA, 32 bp, Artificial; identical to SEQ ID NO: 7891
  oligonucleotide probe

SEQ ID NO: 12275 - DNA, 32 bp, Artificial; identical to SEQ ID NO: 7891
  oligonucleotide probe

SEQ ID NO: 12276 - DNA, 32 bp, Artificial; identical to SEQ ID NO: 7605
  oligonucleotide probe

SEQ ID NO: 12277 - DNA, 32 bp, Artificial; identical to SEQ ID NO: 7605
  oligonucleotide probe

SEQ ID NO: 12278 - DNA, 32 bp, Artificial; identical to SEQ ID NO: 7596
  oligonucleotide probe

SEQ ID NO: 12279 - DNA, 32 bp, Artificial; identical to SEQ ID NO: 7596
  oligonucleotide probe

SEQ ID NO: 12280 - DNA, 32 bp, Artificial; identical to SEQ ID NO: 5163
  oligonucleotide probe

SEQ ID NO: 12281 - DNA, 32 bp, Artificial; identical to SEQ ID NO: 5163
  oligonucleotide probe

SEQ ID NO: 12282 - DNA, 32 bp, Artificial; identical to SEQ ID NO: 7863
  oligonucleotide probe

SEQ ID NO: 12283 - DNA, 32 bp, Artificial; identical to SEQ ID NO: 7863
  oligonucleotide probe

SEQ ID NO: 12284 - DNA, 32 bp, Artificial; identical to SEQ ID NO: 7891
  oligonucleotide probe

SEQ ID NO: 12285 - DNA, 32 bp, Artificial; identical to SEQ ID NO: 7891
  oligonucleotide probe

SEQ ID NO: 12286 - DNA, 32 bp, Artificial; identical to SEQ ID NO: 5163
  oligonucleotide probe

SEQ ID NO: 12287 - DNA, 32 bp, Artificial; identical to SEQ ID NO: 5163
  oligonucleotide probe

SEQ ID NO: 12288 - DNA, 32 bp, Artificial; identical to SEQ ID NO: 7596
  oligonucleotide probe

SEQ ID NO: 12289 - DNA, 32 bp, Artificial; identical to SEQ ID NO: 7596
  oligonucleotide probe

SEQ ID NO: 12290 - DNA, 32 bp, Artificial; identical to SEQ ID NO: 7863
  oligonucleotide probe

SEQ ID NO: 12291 - DNA, 32 bp, Artificial; identical to SEQ ID NO: 7863
  oligonucleotide probe

SEQ ID NO: 12292 - DNA, 32 bp, Artificial; identical to SEQ ID NO: 7856
  oligonucleotide probe

SEQ ID NO: 12293 - DNA, 32 bp, Artificial; identical to SEQ ID NO: 7856
  oligonucleotide probe

SEQ ID NO: 12294 - DNA, 32 bp, Artificial; identical to SEQ ID NO: 7676
  oligonucleotide probe

SEQ ID NO: 12295 - DNA, 32 bp, Artificial; identical to SEQ ID NO: 7676
  oligonucleotide probe

SEQ ID NO: 12296 - DNA, 32 bp, Artificial; identical to SEQ ID NO: 5163
  oligonucleotide probe

SEQ ID NO: 12297 - DNA, 32 bp, Artificial; identical to SEQ ID NO: 5163
  oligonucleotide probe

SEQ ID NO: 12298 - DNA, 32 bp, Artificial; identical to SEQ ID NO: 8047
  oligonucleotide probe

SEQ ID NO: 12299 - DNA, 32 bp, Artificial; identical to SEQ ID NO: 8047
  oligonucleotide probe

SEQ ID NO: 12300 - DNA, 32 bp, Artificial; identical to SEQ ID NO: 7655
  oligonucleotide probe

SEQ ID NO: 12301 - DNA, 32 bp, Artificial; identical to SEQ ID NO: 7655
  oligonucleotide probe

SEQ ID NO: 12302 - DNA, 32 bp, Artificial; identical to SEQ ID NO: 5160
  oligonucleotide probe

SEQ ID NO: 12303 - DNA, 32 bp, Artificial; identical to SEQ ID NO: 5160
  oligonucleotide probe

SEQ ID NO: 12304 - DNA, 32 bp, Artificial; identical to SEQ ID NO: 7673
  oligonucleotide probe

SEQ ID NO: 12305 - DNA, 32 bp, Artificial; identical to SEQ ID NO: 7673
  oligonucleotide probe

SEQ ID NO: 12306 - DNA, 32 bp, Artificial; identical to SEQ ID NO: 7605
  oligonucleotide probe

SEQ ID NO: 12307 - DNA, 32 bp, Artificial; identical to SEQ ID NO: 7605
  oligonucleotide probe

SEQ ID NO: 12308 - DNA, 32 bp, Artificial; identical to SEQ ID NO: 5133
  oligonucleotide probe

SEQ ID NO: 12309 - DNA, 32 bp, Artificial; identical to SEQ ID NO: 5133
  oligonucleotide probe

SEQ ID NO: 12310 - DNA, 32 bp, Artificial; identical to SEQ ID NO: 5141
  oligonucleotide probe

SEQ ID NO: 12311 - DNA, 32 bp, Artificial; identical to SEQ ID NO: 5141
  oligonucleotide probe

SEQ ID NO: 12312 - DNA, 32 bp, Artificial; identical to SEQ ID NO: 5185
  oligonucleotide probe

SEQ ID NO: 12313 - DNA, 32 bp, Artificial; identical to SEQ ID NO: 5185
  oligonucleotide probe

SEQ ID NO: 12314 - DNA, 32 bp, Artificial; identical to SEQ ID NO: 8467
  oligonucleotide probe

SEQ ID NO: 12315 - DNA, 32 bp, Artificial; identical to SEQ ID NO: 8467
  oligonucleotide probe

SEQ ID NO: 12316 - DNA, 32 bp, Artificial; identical to SEQ ID NO: 5217
  oligonucleotide probe

SEQ ID NO: 12317 - DNA, 32 bp, Artificial; identical to SEQ ID NO: 5217
  oligonucleotide probe

SEQ ID NO: 12318 - DNA, 32 bp, Artificial; identical to SEQ ID NO: 7947
  oligonucleotide probe

SEQ ID NO: 12319 - DNA, 32 bp, Artificial; identical to SEQ ID NO: 7947
  oligonucleotide probe

SEQ ID NO: 12320 - DNA, 32 bp, Artificial; identical to SEQ ID NO: 8247
  oligonucleotide probe

SEQ ID NO: 12321 - DNA, 32 bp, Artificial; identical to SEQ ID NO: 8247
  oligonucleotide probe

SEQ ID NO: 12322 - DNA, 32 bp, Artificial; identical to SEQ ID NO: 5223
  oligonucleotide probe

SEQ ID NO: 12323 - DNA, 32 bp, Artificial; identical to SEQ ID NO: 5223
  oligonucleotide probe

SEQ ID NO: 12324 - DNA, 32 bp, Artificial; identical to SEQ ID NO: 8240
  oligonucleotide probe

SEQ ID NO: 12325 - DNA, 32 bp, Artificial; identical to SEQ ID NO: 8240
  oligonucleotide probe

SEQ ID NO: 12326 - DNA, 32 bp, Artificial; identical to SEQ ID NO: 7694
  oligonucleotide probe

SEQ ID NO: 12327 - DNA, 32 bp, Artificial; identical to SEQ ID NO: 7694
  oligonucleotide probe

SEQ ID NO: 12328 - DNA, 32 bp, Artificial; identical to SEQ ID NO: 7948
  oligonucleotide probe

SEQ ID NO: 12329 - DNA, 32 bp, Artificial; identical to SEQ ID NO: 7948
  oligonucleotide probe

SEQ ID NO: 12330 - DNA, 32 bp, Artificial; identical to SEQ ID NO: 7856
  oligonucleotide probe

SEQ ID NO: 12331 - DNA, 32 bp, Artificial; identical to SEQ ID NO: 7856
  oligonucleotide probe

SEQ ID NO: 12332 - DNA, 32 bp, Artificial; identical to SEQ ID NO: 5136
  oligonucleotide probe

SEQ ID NO: 12333 - DNA, 32 bp, Artificial; identical to SEQ ID NO: 5136
  oligonucleotide probe

SEQ ID NO: 12334 - DNA, 32 bp, Artificial; identical to SEQ ID NO: 7655
  oligonucleotide probe

SEQ ID NO: 12335 - DNA, 32 bp, Artificial; identical to SEQ ID NO: 7655
  oligonucleotide probe

SEQ ID NO: 12336 - DNA, 32 bp, Artificial; identical to SEQ ID NO: 7855
  oligonucleotide probe

SEQ ID NO: 12337 - DNA, 32 bp, Artificial; identical to SEQ ID NO: 7855
  oligonucleotide probe

SEQ ID NO: 12338 - DNA, 32 bp, Artificial; identical to SEQ ID NO: 7856
  oligonucleotide probe

SEQ ID NO: 12339 - DNA, 32 bp, Artificial; identical to SEQ ID NO: 7856
  oligonucleotide probe

SEQ ID NO: 12340 - DNA, 32 bp, Artificial; identical to SEQ ID NO: 5240
  oligonucleotide probe

SEQ ID NO: 12341 - DNA, 32 bp, Artificial; identical to SEQ ID NO: 5240
  oligonucleotide probe

SEQ ID NO: 12342 - DNA, 32 bp, Artificial; identical to SEQ ID NO: 7662
  oligonucleotide probe

SEQ ID NO: 12343 - DNA, 32 bp, Artificial; identical to SEQ ID NO: 7662
  oligonucleotide probe

SEQ ID NO: 12344 - DNA, 32 bp, Artificial; identical to SEQ ID NO: 7835
  oligonucleotide probe

SEQ ID NO: 12345 - DNA, 32 bp, Artificial; identical to SEQ ID NO: 7835
  oligonucleotide probe

SEQ ID NO: 12346 - DNA, 32 bp, Artificial; identical to SEQ ID NO: 7594
  oligonucleotide probe

SEQ ID NO: 12347 - DNA, 32 bp, Artificial; identical to SEQ ID NO: 7594
  oligonucleotide probe

SEQ ID NO: 12348 - DNA, 32 bp, Artificial; identical to SEQ ID NO: 7812
  oligonucleotide probe

SEQ ID NO: 12349 - DNA, 32 bp, Artificial; identical to SEQ ID NO: 7812
  oligonucleotide probe

SEQ ID NO: 12350 - DNA, 32 bp, Artificial; identical to SEQ ID NO: 7594
  oligonucleotide probe

SEQ ID NO: 12351 - DNA, 32 bp, Artificial; identical to SEQ ID NO: 7594
  oligonucleotide probe

SEQ ID NO: 12352 - DNA, 32 bp, Artificial; identical to SEQ ID NO: 7605
  oligonucleotide probe

SEQ ID NO: 12353 - DNA, 32 bp, Artificial; identical to SEQ ID NO: 7605
  oligonucleotide probe

SEQ ID NO: 12354 - DNA, 32 bp, Artificial; identical to SEQ ID NO: 7594
  oligonucleotide probe

SEQ ID NO: 12355 - DNA, 32 bp, Artificial; identical to SEQ ID NO: 7594
  oligonucleotide probe

SEQ ID NO: 12356 - DNA, 32 bp, Artificial; identical to SEQ ID NO: 7863
  oligonucleotide probe

SEQ ID NO: 12357 - DNA, 32 bp, Artificial; identical to SEQ ID NO: 7863
  oligonucleotide probe

SEQ ID NO: 12358 - DNA, 32 bp, Artificial; identical to SEQ ID NO: 7812
  oligonucleotide probe

SEQ ID NO: 12359 - DNA, 32 bp, Artificial; identical to SEQ ID NO: 7812
  oligonucleotide probe

SEQ ID NO: 12360 - DNA, 32 bp, Artificial; identical to SEQ ID NO: 7676
  oligonucleotide probe

SEQ ID NO: 12361 - DNA, 32 bp, Artificial; identical to SEQ ID NO: 7676
  oligonucleotide probe

SEQ ID NO: 12362 - DNA, 32 bp, Artificial; identical to SEQ ID NO: 7840
  oligonucleotide probe

SEQ ID NO: 12363 - DNA, 32 bp, Artificial; identical to SEQ ID NO: 7840
  oligonucleotide probe

SEQ ID NO: 12364 - DNA, 32 bp, Artificial; identical to SEQ ID NO: 5232
  oligonucleotide probe

SEQ ID NO: 12365 - DNA, 32 bp, Artificial; identical to SEQ ID NO: 5232
  oligonucleotide probe

SEQ ID NO: 12366 - DNA, 32 bp, Artificial; identical to SEQ ID NO: 5163
  oligonucleotide probe

SEQ ID NO: 12367 - DNA, 32 bp, Artificial; identical to SEQ ID NO: 5163
  oligonucleotide probe

SEQ ID NO: 12368 - DNA, 32 bp, Artificial; identical to SEQ ID NO: 5185
  oligonucleotide probe

SEQ ID NO: 12369 - DNA, 32 bp, Artificial; identical to SEQ ID NO: 5185
  oligonucleotide probe

SEQ ID NO: 12370 - DNA, 32 bp, Artificial; identical to SEQ ID NO: 7812
  oligonucleotide probe

SEQ ID NO: 12371 - DNA, 32 bp, Artificial; identical to SEQ ID NO: 7812
  oligonucleotide probe

SEQ ID NO: 12372 - DNA, 32 bp, Artificial; identical to SEQ ID NO: 8240
  oligonucleotide probe

SEQ ID NO: 12373 - DNA, 32 bp, Artificial; identical to SEQ ID NO: 8240
  oligonucleotide probe

SEQ ID NO: 12374 - DNA, 32 bp, Artificial; identical to SEQ ID NO: 7624
  oligonucleotide probe

SEQ ID NO: 12375 - DNA, 32 bp, Artificial; identical to SEQ ID NO: 7624
  oligonucleotide probe

SEQ ID NO: 12376 - DNA, 32 bp, Artificial; identical to SEQ ID NO: 7623
  oligonucleotide probe

SEQ ID NO: 12377 - DNA, 32 bp, Artificial; identical to SEQ ID NO: 7623
  oligonucleotide probe

SEQ ID NO: 12378 - DNA, 32 bp, Artificial; identical to SEQ ID NO: 7598
  oligonucleotide probe

SEQ ID NO: 12379 - DNA, 32 bp, Artificial; identical to SEQ ID NO: 7598
  oligonucleotide probe

SEQ ID NO: 12380 - DNA, 32 bp, Artificial; identical to SEQ ID NO: 7623
  oligonucleotide probe

SEQ ID NO: 12381 - DNA, 32 bp, Artificial; identical to SEQ ID NO: 7623
  oligonucleotide probe

SEQ ID NO: 12382 - DNA, 32 bp, Artificial; identical to SEQ ID NO: 7655
  oligonucleotide probe

SEQ ID NO: 12383 - DNA, 32 bp, Artificial; identical to SEQ ID NO: 7655
  oligonucleotide probe

SEQ ID NO: 12384 - DNA, 32 bp, Artificial; identical to SEQ ID NO: 7644
  oligonucleotide probe

SEQ ID NO: 12385 - DNA, 32 bp, Artificial; identical to SEQ ID NO: 7644
  oligonucleotide probe

SEQ ID NO: 12386 - DNA, 32 bp, Artificial; identical to SEQ ID NO: 7598
  oligonucleotide probe

SEQ ID NO: 12387 - DNA, 32 bp, Artificial; identical to SEQ ID NO: 7598
  oligonucleotide probe

SEQ ID NO: 12388 - DNA, 32 bp, Artificial; identical to SEQ ID NO: 7673
  oligonucleotide probe

SEQ ID NO: 12389 - DNA, 32 bp, Artificial; identical to SEQ ID NO: 7673
  oligonucleotide probe

SEQ ID NO: 12390 - DNA, 32 bp, Artificial; identical to SEQ ID NO: 7947
  oligonucleotide probe

SEQ ID NO: 12391 - DNA, 32 bp, Artificial; identical to SEQ ID NO: 7947
  oligonucleotide probe

SEQ ID NO: 12392 - DNA, 32 bp, Artificial; identical to SEQ ID NO: 7676
  oligonucleotide probe

SEQ ID NO: 12393 - DNA, 32 bp, Artificial; identical to SEQ ID NO: 7676
  oligonucleotide probe

SEQ ID NO: 12394 - DNA, 32 bp, Artificial; identical to SEQ ID NO: 7842
  oligonucleotide probe

SEQ ID NO: 12395 - DNA, 32 bp, Artificial; identical to SEQ ID NO: 7842
  oligonucleotide probe

SEQ ID NO: 12396 - DNA, 32 bp, Artificial; identical to SEQ ID NO: 7644
  oligonucleotide probe

SEQ ID NO: 12397 - DNA, 32 bp, Artificial; identical to SEQ ID NO: 7644
  oligonucleotide probe

SEQ ID NO: 12398 - DNA, 32 bp, Artificial; identical to SEQ ID NO: 8442
  oligonucleotide probe

SEQ ID NO: 12399 - DNA, 32 bp, Artificial; identical to SEQ ID NO: 8442
  oligonucleotide probe

SEQ ID NO: 12400 - DNA, 32 bp, Artificial; identical to SEQ ID NO: 5171
  oligonucleotide probe

SEQ ID NO: 12401 - DNA, 32 bp, Artificial; identical to SEQ ID NO: 5171
  oligonucleotide probe

SEQ ID NO: 12402 - DNA, 32 bp, Artificial; identical to SEQ ID NO: 7623
  oligonucleotide probe

SEQ ID NO: 12403 - DNA, 32 bp, Artificial; identical to SEQ ID NO: 7623
  oligonucleotide probe

SEQ ID NO: 12404 - DNA, 32 bp, Artificial; identical to SEQ ID NO: 7662
  oligonucleotide probe

SEQ ID NO: 12405 - DNA, 32 bp, Artificial; identical to SEQ ID NO: 7662
  oligonucleotide probe

SEQ ID NO: 12406 - DNA, 32 bp, Artificial; identical to SEQ ID NO: 7676
  oligonucleotide probe

SEQ ID NO: 12407 - DNA, 32 bp, Artificial; identical to SEQ ID NO: 7676
  oligonucleotide probe

SEQ ID NO: 12408 - DNA, 32 bp, Artificial; identical to SEQ ID NO: 5217
  oligonucleotide probe

SEQ ID NO: 12409 - DNA, 32 bp, Artificial; identical to SEQ ID NO: 5217
  oligonucleotide probe

SEQ ID NO: 12410 - DNA, 32 bp, Artificial; identical to SEQ ID NO: 7948
  oligonucleotide probe

SEQ ID NO: 12411 - DNA, 32 bp, Artificial; identical to SEQ ID NO: 7948
  oligonucleotide probe

SEQ ID NO: 12412 - DNA, 32 bp, Artificial; identical to SEQ ID NO: 7855
  oligonucleotide probe

SEQ ID NO: 12413 - DNA, 32 bp, Artificial; identical to SEQ ID NO: 7855
  oligonucleotide probe

SEQ ID NO: 12414 - DNA, 32 bp, Artificial; identical to SEQ ID NO: 5136
  oligonucleotide probe

SEQ ID NO: 12415 - DNA, 32 bp, Artificial; identical to SEQ ID NO: 5136
  oligonucleotide probe

SEQ ID NO: 12416 - DNA, 32 bp, Artificial; identical to SEQ ID NO: 7594
  oligonucleotide probe

SEQ ID NO: 12417 - DNA, 32 bp, Artificial; identical to SEQ ID NO: 7594
  oligonucleotide probe

SEQ ID NO: 12418 - DNA, 32 bp, Artificial; identical to SEQ ID NO: 7673
  oligonucleotide probe

SEQ ID NO: 12419 - DNA, 32 bp, Artificial; identical to SEQ ID NO: 7673
  oligonucleotide probe

SEQ ID NO: 12420 - DNA, 32 bp, Artificial; identical to SEQ ID NO: 5224
  oligonucleotide probe

SEQ ID NO: 12421 - DNA, 32 bp, Artificial; identical to SEQ ID NO: 5224
  oligonucleotide probe

SEQ ID NO: 12422 - DNA, 32 bp, Artificial; identical to SEQ ID NO: 8247
  oligonucleotide probe

SEQ ID NO: 12423 - DNA, 32 bp, Artificial; identical to SEQ ID NO: 8247
  oligonucleotide probe

SEQ ID NO: 12424 - DNA, 32 bp, Artificial; identical to SEQ ID NO: 7676
  oligonucleotide probe

SEQ ID NO: 12425 - DNA, 32 bp, Artificial; identical to SEQ ID NO: 7676
  oligonucleotide probe

SEQ ID NO: 12426 - DNA, 32 bp, Artificial; identical to SEQ ID NO: 7866
  oligonucleotide probe

SEQ ID NO: 12427 - DNA, 32 bp, Artificial; identical to SEQ ID NO: 7866
  oligonucleotide probe

SEQ ID NO: 12428 - DNA, 32 bp, Artificial; identical to SEQ ID NO: 7596
  oligonucleotide probe

SEQ ID NO: 12429 - DNA, 32 bp, Artificial; identical to SEQ ID NO: 7596
  oligonucleotide probe

SEQ ID NO: 12430 - DNA, 32 bp, Artificial; identical to SEQ ID NO: 7783
  oligonucleotide probe

SEQ ID NO: 12431 - DNA, 32 bp, Artificial; identical to SEQ ID NO: 7783
  oligonucleotide probe

SEQ ID NO: 12432 - DNA, 32 bp, Artificial; identical to SEQ ID NO: 7855
  oligonucleotide probe

SEQ ID NO: 12433 - DNA, 32 bp, Artificial; identical to SEQ ID NO: 7855
  oligonucleotide probe

SEQ ID NO: 12434 - DNA, 32 bp, Artificial; identical to SEQ ID NO: 5163
  oligonucleotide probe

SEQ ID NO: 12435 - DNA, 32 bp, Artificial; identical to SEQ ID NO: 5163
  oligonucleotide probe

SEQ ID NO: 12436 - DNA, 32 bp, Artificial; identical to SEQ ID NO: 5163
  oligonucleotide probe

SEQ ID NO: 12437 - DNA, 32 bp, Artificial; identical to SEQ ID NO: 5163
  oligonucleotide probe

SEQ ID NO: 12438 - DNA, 32 bp, Artificial; identical to SEQ ID NO: 7623
  oligonucleotide probe

SEQ ID NO: 12439 - DNA, 32 bp, Artificial; identical to SEQ ID NO: 7623
  oligonucleotide probe

SEQ ID NO: 12440 - DNA, 32 bp, Artificial; identical to SEQ ID NO: 7605
  oligonucleotide probe

SEQ ID NO: 12441 - DNA, 32 bp, Artificial; identical to SEQ ID NO: 7605
  oligonucleotide probe

SEQ ID NO: 12442 - DNA, 32 bp, Artificial; identical to SEQ ID NO: 8244
  oligonucleotide probe

SEQ ID NO: 12443 - DNA, 32 bp, Artificial; identical to SEQ ID NO: 8244
  oligonucleotide probe

SEQ ID NO: 12444 - DNA, 32 bp, Artificial; identical to SEQ ID NO: 5133
  oligonucleotide probe

SEQ ID NO: 12445 - DNA, 32 bp, Artificial; identical to SEQ ID NO: 5133
  oligonucleotide probe

SEQ ID NO: 12446 - DNA, 32 bp, Artificial; identical to SEQ ID NO: 5240
  oligonucleotide probe

SEQ ID NO: 12447 - DNA, 32 bp, Artificial; identical to SEQ ID NO: 5240
  oligonucleotide probe

SEQ ID NO: 12448 - DNA, 32 bp, Artificial; identical to SEQ ID NO: 7598
  oligonucleotide probe

SEQ ID NO: 12449 - DNA, 32 bp, Artificial; identical to SEQ ID NO: 7598
  oligonucleotide probe

SEQ ID NO: 12450 - DNA, 32 bp, Artificial; identical to SEQ ID NO: 7676
  oligonucleotide probe

SEQ ID NO: 12451 - DNA, 32 bp, Artificial; identical to SEQ ID NO: 7676
  oligonucleotide probe

SEQ ID NO: 12452 - DNA, 32 bp, Artificial; identical to SEQ ID NO: 5140
  oligonucleotide probe

SEQ ID NO: 12453 - DNA, 32 bp, Artificial; identical to SEQ ID NO: 5140
  oligonucleotide probe

SEQ ID NO: 12454 - DNA, 32 bp, Artificial; identical to SEQ ID NO: 8244
  oligonucleotide probe

SEQ ID NO: 12455 - DNA, 32 bp, Artificial; identical to SEQ ID NO: 8244
  oligonucleotide probe

SEQ ID NO: 12456 - DNA, 32 bp, Artificial; identical to SEQ ID NO: 5159
  oligonucleotide probe

SEQ ID NO: 12457 - DNA, 32 bp, Artificial; identical to SEQ ID NO: 5159
  oligonucleotide probe

SEQ ID NO: 12458 - DNA, 32 bp, Artificial; identical to SEQ ID NO: 7855
  oligonucleotide probe

SEQ ID NO: 12459 - DNA, 32 bp, Artificial; identical to SEQ ID NO: 7855
  oligonucleotide probe

SEQ ID NO: 12460 - DNA, 32 bp, Artificial; identical to SEQ ID NO: 7690
  oligonucleotide probe

SEQ ID NO: 12461 - DNA, 32 bp, Artificial; identical to SEQ ID NO: 7690
  oligonucleotide probe

SEQ ID NO: 12462 - DNA, 32 bp, Artificial; identical to SEQ ID NO: 5159
  oligonucleotide probe

SEQ ID NO: 12463 - DNA, 32 bp, Artificial; identical to SEQ ID NO: 5159
  oligonucleotide probe

SEQ ID NO: 12464 - DNA, 32 bp, Artificial; identical to SEQ ID NO: 5185
  oligonucleotide probe

SEQ ID NO: 12465 - DNA, 32 bp, Artificial; identical to SEQ ID NO: 5185
  oligonucleotide probe

SEQ ID NO: 12466 - DNA, 32 bp, Artificial; identical to SEQ ID NO: 7598
  oligonucleotide probe

SEQ ID NO: 12467 - DNA, 32 bp, Artificial; identical to SEQ ID NO: 7598
  oligonucleotide probe

SEQ ID NO: 12468 - DNA, 32 bp, Artificial; identical to SEQ ID NO: 7841
  oligonucleotide probe

SEQ ID NO: 12469 - DNA, 32 bp, Artificial; identical to SEQ ID NO: 7841
  oligonucleotide probe

SEQ ID NO: 12470 - DNA, 32 bp, Artificial; identical to SEQ ID NO: 7690
  oligonucleotide probe

SEQ ID NO: 12471 - DNA, 32 bp, Artificial; identical to SEQ ID NO: 7690
  oligonucleotide probe

SEQ ID NO: 12472 - DNA, 32 bp, Artificial; identical to SEQ ID NO: 5239
  oligonucleotide probe

SEQ ID NO: 12473 - DNA, 32 bp, Artificial; identical to SEQ ID NO: 5239
  oligonucleotide probe

SEQ ID NO: 12474 - DNA, 32 bp, Artificial; identical to SEQ ID NO: 7659
  oligonucleotide probe

SEQ ID NO: 12475 - DNA, 32 bp, Artificial; identical to SEQ ID NO: 7659
  oligonucleotide probe

SEQ ID NO: 12476 - DNA, 32 bp, Artificial; identical to SEQ ID NO: 7659
  oligonucleotide probe

SEQ ID NO: 12477 - DNA, 32 bp, Artificial; identical to SEQ ID NO: 7659
  oligonucleotide probe

SEQ ID NO: 12478 - DNA, 32 bp, Artificial; identical to SEQ ID NO: 7783
  oligonucleotide probe

SEQ ID NO: 12479 - DNA, 32 bp, Artificial; identical to SEQ ID NO: 7783
  oligonucleotide probe

SEQ ID NO: 12480 - DNA, 32 bp, Artificial; identical to SEQ ID NO: 7690
  oligonucleotide probe

SEQ ID NO: 12481 - DNA, 32 bp, Artificial; identical to SEQ ID NO: 7690
  oligonucleotide probe

SEQ ID NO: 12482 - DNA, 32 bp, Artificial; identical to SEQ ID NO: 7659
  oligonucleotide probe

SEQ ID NO: 12483 - DNA, 32 bp, Artificial; identical to SEQ ID NO: 7659
  oligonucleotide probe

SEQ ID NO: 12484 - DNA, 32 bp, Artificial; identical to SEQ ID NO: 7606
  oligonucleotide probe

SEQ ID NO: 12485 - DNA, 32 bp, Artificial; identical to SEQ ID NO: 7606
  oligonucleotide probe

SEQ ID NO: 12486 - DNA, 32 bp, Artificial; identical to SEQ ID NO: 7623
  oligonucleotide probe

SEQ ID NO: 12487 - DNA, 32 bp, Artificial; identical to SEQ ID NO: 7623
  oligonucleotide probe

SEQ ID NO: 12488 - DNA, 32 bp, Artificial; identical to SEQ ID NO: 7596
  oligonucleotide probe

SEQ ID NO: 12489 - DNA, 32 bp, Artificial; identical to SEQ ID NO: 7596
  oligonucleotide probe

SEQ ID NO: 12490 - DNA, 32 bp, Artificial; identical to SEQ ID NO: 7905
  oligonucleotide probe

SEQ ID NO: 12491 - DNA, 32 bp, Artificial; identical to SEQ ID NO: 7905
  oligonucleotide probe

SEQ ID NO: 12492 - DNA, 32 bp, Artificial; identical to SEQ ID NO: 7783
  oligonucleotide probe

SEQ ID NO: 12493 - DNA, 32 bp, Artificial; identical to SEQ ID NO: 7783
  oligonucleotide probe

SEQ ID NO: 12494 - DNA, 32 bp, Artificial; identical to SEQ ID NO: 7838
  oligonucleotide probe

SEQ ID NO: 12495 - DNA, 32 bp, Artificial; identical to SEQ ID NO: 7838
  oligonucleotide probe

SEQ ID NO: 12496 - DNA, 32 bp, Artificial; identical to SEQ ID NO: 7606
  oligonucleotide probe

SEQ ID NO: 12497 - DNA, 32 bp, Artificial; identical to SEQ ID NO: 7606
  oligonucleotide probe

SEQ ID NO: 12498 - DNA, 32 bp, Artificial; identical to SEQ ID NO: 7624
  oligonucleotide probe

SEQ ID NO: 12499 - DNA, 32 bp, Artificial; identical to SEQ ID NO: 7624
  oligonucleotide probe

SEQ ID NO: 12500 - DNA, 32 bp, Artificial; identical to SEQ ID NO: 5240
  oligonucleotide probe

SEQ ID NO: 12501 - DNA, 32 bp, Artificial; identical to SEQ ID NO: 5240
  oligonucleotide probe

SEQ ID NO: 12502 - DNA, 32 bp, Artificial; identical to SEQ ID NO: 7606
  oligonucleotide probe

SEQ ID NO: 12503 - DNA, 32 bp, Artificial; identical to SEQ ID NO: 7606
  oligonucleotide probe

SEQ ID NO: 12504 - DNA, 32 bp, Artificial; identical to SEQ ID NO: 5160
  oligonucleotide probe

SEQ ID NO: 12505 - DNA, 32 bp, Artificial; identical to SEQ ID NO: 5160
  oligonucleotide probe

SEQ ID NO: 12506 - DNA, 32 bp, Artificial; identical to SEQ ID NO: 7856
  oligonucleotide probe

SEQ ID NO: 12507 - DNA, 32 bp, Artificial; identical to SEQ ID NO: 7856
  oligonucleotide probe

SEQ ID NO: 12508 - DNA, 32 bp, Artificial; identical to SEQ ID NO: 7834
  oligonucleotide probe

SEQ ID NO: 12509 - DNA, 32 bp, Artificial; identical to SEQ ID NO: 7834
  oligonucleotide probe

SEQ ID NO: 12510 - DNA, 32 bp, Artificial; identical to SEQ ID NO: 5217
  oligonucleotide probe

SEQ ID NO: 12511 - DNA, 32 bp, Artificial; identical to SEQ ID NO: 5217
  oligonucleotide probe

SEQ ID NO: 12512 - DNA, 32 bp, Artificial; identical to SEQ ID NO: 5163
  oligonucleotide probe

SEQ ID NO: 12513 - DNA, 32 bp, Artificial; identical to SEQ ID NO: 5163
  oligonucleotide probe

SEQ ID NO: 12514 - DNA, 32 bp, Artificial; identical to SEQ ID NO: 5160
  oligonucleotide probe

SEQ ID NO: 12515 - DNA, 32 bp, Artificial; identical to SEQ ID NO: 5160
  oligonucleotide probe

SEQ ID NO: 12516 - DNA, 32 bp, Artificial; identical to SEQ ID NO: 7834
  oligonucleotide probe

SEQ ID NO: 12517 - DNA, 32 bp, Artificial; identical to SEQ ID NO: 7834
  oligonucleotide probe

SEQ ID NO: 12518 - DNA, 32 bp, Artificial; identical to SEQ ID NO: 5416
  oligonucleotide probe

SEQ ID NO: 12519 - DNA, 32 bp, Artificial; identical to SEQ ID NO: 5416
  oligonucleotide probe

SEQ ID NO: 12520 - DNA, 32 bp, Artificial; identical to SEQ ID NO: 7690
  oligonucleotide probe

SEQ ID NO: 12521 - DNA, 32 bp, Artificial; identical to SEQ ID NO: 7690
  oligonucleotide probe

SEQ ID NO: 12522 - DNA, 32 bp, Artificial; identical to SEQ ID NO: 7605
  oligonucleotide probe

SEQ ID NO: 12523 - DNA, 32 bp, Artificial; identical to SEQ ID NO: 7605
  oligonucleotide probe

SEQ ID NO: 12524 - DNA, 32 bp, Artificial; identical to SEQ ID NO: 5185
  oligonucleotide probe

SEQ ID NO: 12525 - DNA, 32 bp, Artificial; identical to SEQ ID NO: 5185
  oligonucleotide probe

SEQ ID NO: 12526 - DNA, 32 bp, Artificial; identical to SEQ ID NO: 5159
  oligonucleotide probe

SEQ ID NO: 12527 - DNA, 32 bp, Artificial; identical to SEQ ID NO: 5159
  oligonucleotide probe

SEQ ID NO: 12528 - DNA, 32 bp, Artificial; identical to SEQ ID NO: 5140
  oligonucleotide probe

SEQ ID NO: 12529 - DNA, 32 bp, Artificial; identical to SEQ ID NO: 5140
  oligonucleotide probe

SEQ ID NO: 12530 - DNA, 32 bp, Artificial; identical to SEQ ID NO: 7662
  oligonucleotide probe

SEQ ID NO: 12531 - DNA, 32 bp, Artificial; identical to SEQ ID NO: 7662
  oligonucleotide probe

SEQ ID NO: 12532 - DNA, 32 bp, Artificial; identical to SEQ ID NO: 5133
  oligonucleotide probe

SEQ ID NO: 12533 - DNA, 32 bp, Artificial; identical to SEQ ID NO: 5133
  oligonucleotide probe

SEQ ID NO: 12534 - DNA, 32 bp, Artificial; identical to SEQ ID NO: 7812
  oligonucleotide probe

SEQ ID NO: 12535 - DNA, 32 bp, Artificial; identical to SEQ ID NO: 7812
  oligonucleotide probe

SEQ ID NO: 12536 - DNA, 32 bp, Artificial; identical to SEQ ID NO: 5133
  oligonucleotide probe

SEQ ID NO: 12537 - DNA, 32 bp, Artificial; identical to SEQ ID NO: 5133
  oligonucleotide probe

SEQ ID NO: 12538 - DNA, 32 bp, Artificial; identical to SEQ ID NO: 5171
  oligonucleotide probe

SEQ ID NO: 12539 - DNA, 32 bp, Artificial; identical to SEQ ID NO: 5171
  oligonucleotide probe

SEQ ID NO: 12540 - DNA, 32 bp, Artificial; identical to SEQ ID NO: 7842
  oligonucleotide probe

SEQ ID NO: 12541 - DNA, 32 bp, Artificial; identical to SEQ ID NO: 7842
  oligonucleotide probe

SEQ ID NO: 12542 - DNA, 32 bp, Artificial; identical to SEQ ID NO: 7644
  oligonucleotide probe

SEQ ID NO: 12543 - DNA, 32 bp, Artificial; identical to SEQ ID NO: 7644
  oligonucleotide probe

SEQ ID NO: 12544 - DNA, 32 bp, Artificial; identical to SEQ ID NO: 7690
  oligonucleotide probe

SEQ ID NO: 12545 - DNA, 32 bp, Artificial; identical to SEQ ID NO: 7690
  oligonucleotide probe

SEQ ID NO: 12546 - DNA, 32 bp, Artificial; identical to SEQ ID NO: 7855
  oligonucleotide probe

SEQ ID NO: 12547 - DNA, 32 bp, Artificial; identical to SEQ ID NO: 7855
  oligonucleotide probe

SEQ ID NO: 12548 - DNA, 32 bp, Artificial; identical to SEQ ID NO: 5140
  oligonucleotide probe

SEQ ID NO: 12549 - DNA, 32 bp, Artificial; identical to SEQ ID NO: 5140
  oligonucleotide probe

SEQ ID NO: 12550 - DNA, 32 bp, Artificial; identical to SEQ ID NO: 7655
  oligonucleotide probe

SEQ ID NO: 12551 - DNA, 32 bp, Artificial; identical to SEQ ID NO: 7655
  oligonucleotide probe

SEQ ID NO: 12552 - DNA, 32 bp, Artificial; identical to SEQ ID NO: 10064
  oligonucleotide probe

SEQ ID NO: 12553 - DNA, 32 bp, Artificial; identical to SEQ ID NO: 10064
  oligonucleotide probe

SEQ ID NO: 12554 - DNA, 32 bp, Artificial; identical to SEQ ID NO: 7606
  oligonucleotide probe

SEQ ID NO: 12555 - DNA, 32 bp, Artificial; identical to SEQ ID NO: 7606
  oligonucleotide probe

SEQ ID NO: 12556 - DNA, 32 bp, Artificial; identical to SEQ ID NO: 7835
  oligonucleotide probe

SEQ ID NO: 12557 - DNA, 32 bp, Artificial; identical to SEQ ID NO: 7835
  oligonucleotide probe

SEQ ID NO: 12558 - DNA, 32 bp, Artificial; identical to SEQ ID NO: 7834
  oligonucleotide probe

SEQ ID NO: 12559 - DNA, 32 bp, Artificial; identical to SEQ ID NO: 7834
  oligonucleotide probe

SEQ ID NO: 12560 - DNA, 32 bp, Artificial; identical to SEQ ID NO: 7659
  oligonucleotide probe

SEQ ID NO: 12561 - DNA, 32 bp, Artificial; identical to SEQ ID NO: 7659
  oligonucleotide probe

SEQ ID NO: 12562 - DNA, 32 bp, Artificial; identical to SEQ ID NO: 8778
  oligonucleotide probe

SEQ ID NO: 12563 - DNA, 32 bp, Artificial; identical to SEQ ID NO: 8778
  oligonucleotide probe

SEQ ID NO: 12564 - DNA, 32 bp, Artificial; identical to SEQ ID NO: 7597
  oligonucleotide probe

SEQ ID NO: 12565 - DNA, 32 bp, Artificial; identical to SEQ ID NO: 7597
  oligonucleotide probe

SEQ ID NO: 12566 - DNA, 32 bp, Artificial; identical to SEQ ID NO: 7947
  oligonucleotide probe

SEQ ID NO: 12567 - DNA, 32 bp, Artificial; identical to SEQ ID NO: 7947
  oligonucleotide probe

SEQ ID NO: 12568 - DNA, 32 bp, Artificial; identical to SEQ ID NO: 5163
  oligonucleotide probe

SEQ ID NO: 12569 - DNA, 32 bp, Artificial; identical to SEQ ID NO: 5163
  oligonucleotide probe

SEQ ID NO: 12570 - DNA, 32 bp, Artificial; identical to SEQ ID NO: 7655
  oligonucleotide probe

SEQ ID NO: 12571 - DNA, 32 bp, Artificial; identical to SEQ ID NO: 7655
  oligonucleotide probe

SEQ ID NO: 12572 - DNA, 32 bp, Artificial; identical to SEQ ID NO: 5133
  oligonucleotide probe

SEQ ID NO: 12573 - DNA, 32 bp, Artificial; identical to SEQ ID NO: 5133
  oligonucleotide probe

SEQ ID NO: 12574 - DNA, 32 bp, Artificial; identical to SEQ ID NO: 7655
  oligonucleotide probe

SEQ ID NO: 12575 - DNA, 32 bp, Artificial; identical to SEQ ID NO: 7655
  oligonucleotide probe

SEQ ID NO: 12576 - DNA, 32 bp, Artificial; identical to SEQ ID NO: 7597
  oligonucleotide probe

SEQ ID NO: 12577 - DNA, 32 bp, Artificial; identical to SEQ ID NO: 7597
  oligonucleotide probe

SEQ ID NO: 12578 - DNA, 32 bp, Artificial; identical to SEQ ID NO: 5220
  oligonucleotide probe

SEQ ID NO: 12579 - DNA, 32 bp, Artificial; identical to SEQ ID NO: 5220
  oligonucleotide probe

SEQ ID NO: 12580 - DNA, 32 bp, Artificial; identical to SEQ ID NO: 7783
  oligonucleotide probe

SEQ ID NO: 12581 - DNA, 32 bp, Artificial; identical to SEQ ID NO: 7783
  oligonucleotide probe

SEQ ID NO: 12582 - DNA, 32 bp, Artificial; identical to SEQ ID NO: 5171
  oligonucleotide probe

SEQ ID NO: 12583 - DNA, 32 bp, Artificial; identical to SEQ ID NO: 5171
  oligonucleotide probe

SEQ ID NO: 12584 - DNA, 32 bp, Artificial; identical to SEQ ID NO: 7594
  oligonucleotide probe

SEQ ID NO: 12585 - DNA, 32 bp, Artificial; identical to SEQ ID NO: 7594
  oligonucleotide probe

SEQ ID NO: 12586 - DNA, 32 bp, Artificial; identical to SEQ ID NO: 7676
  oligonucleotide probe

SEQ ID NO: 12587 - DNA, 32 bp, Artificial; identical to SEQ ID NO: 7676
  oligonucleotide probe

SEQ ID NO: 12588 - DNA, 32 bp, Artificial; identical to SEQ ID NO: 7865
  oligonucleotide probe

SEQ ID NO: 12589 - DNA, 32 bp, Artificial; identical to SEQ ID NO: 7865
  oligonucleotide probe

SEQ ID NO: 12590 - DNA, 32 bp, Artificial; identical to SEQ ID NO: 5136
  oligonucleotide probe

SEQ ID NO: 12591 - DNA, 32 bp, Artificial; identical to SEQ ID NO: 5136
  oligonucleotide probe

SEQ ID NO: 12592 - DNA, 32 bp, Artificial; identical to SEQ ID NO: 5220
  oligonucleotide probe

SEQ ID NO: 12593 - DNA, 32 bp, Artificial; identical to SEQ ID NO: 5220
  oligonucleotide probe

SEQ ID NO: 12594 - DNA, 32 bp, Artificial; identical to SEQ ID NO: 5231
  oligonucleotide probe

SEQ ID NO: 12595 - DNA, 32 bp, Artificial; identical to SEQ ID NO: 5231
  oligonucleotide probe

SEQ ID NO: 12596 - DNA, 32 bp, Artificial; identical to SEQ ID NO: 7597
  oligonucleotide probe

SEQ ID NO: 12597 - DNA, 32 bp, Artificial; identical to SEQ ID NO: 7597
  oligonucleotide probe

SEQ ID NO: 12598 - DNA, 32 bp, Artificial; identical to SEQ ID NO: 7624
  oligonucleotide probe

SEQ ID NO: 12599 - DNA, 32 bp, Artificial; identical to SEQ ID NO: 7624
  oligonucleotide probe

SEQ ID NO: 12600 - DNA, 32 bp, Artificial; identical to SEQ ID NO: 5223
  oligonucleotide probe

SEQ ID NO: 12601 - DNA, 32 bp, Artificial; identical to SEQ ID NO: 5223
  oligonucleotide probe

SEQ ID NO: 12602 - DNA, 32 bp, Artificial; identical to SEQ ID NO: 7783
  oligonucleotide probe

SEQ ID NO: 12603 - DNA, 32 bp, Artificial; identical to SEQ ID NO: 7783
  oligonucleotide probe

SEQ ID NO: 12604 - DNA, 32 bp, Artificial; identical to SEQ ID NO: 5171
  oligonucleotide probe

SEQ ID NO: 12605 - DNA, 32 bp, Artificial; identical to SEQ ID NO: 5171
  oligonucleotide probe

SEQ ID NO: 12606 - DNA, 32 bp, Artificial; identical to SEQ ID NO: 7676
  oligonucleotide probe

SEQ ID NO: 12607 - DNA, 32 bp, Artificial; identical to SEQ ID NO: 7676
  oligonucleotide probe

SEQ ID NO: 12608 - DNA, 32 bp, Artificial; identical to SEQ ID NO: 7690
  oligonucleotide probe

SEQ ID NO: 12609 - DNA, 32 bp, Artificial; identical to SEQ ID NO: 7690
  oligonucleotide probe

SEQ ID NO: 12610 - DNA, 32 bp, Artificial; identical to SEQ ID NO: 5163
  oligonucleotide probe

SEQ ID NO: 12611 - DNA, 32 bp, Artificial; identical to SEQ ID NO: 5163
  oligonucleotide probe

SEQ ID NO: 12612 - DNA, 32 bp, Artificial; identical to SEQ ID NO: 5133
  oligonucleotide probe

SEQ ID NO: 12613 - DNA, 32 bp, Artificial; identical to SEQ ID NO: 5133
  oligonucleotide probe

SEQ ID NO: 12614 - DNA, 32 bp, Artificial; identical to SEQ ID NO: 7832
  oligonucleotide probe

SEQ ID NO: 12615 - DNA, 32 bp, Artificial; identical to SEQ ID NO: 7832
  oligonucleotide probe

SEQ ID NO: 12616 - DNA, 32 bp, Artificial; identical to SEQ ID NO: 5140
  oligonucleotide probe

SEQ ID NO: 12617 - DNA, 32 bp, Artificial; identical to SEQ ID NO: 5140
  oligonucleotide probe

SEQ ID NO: 12618 - DNA, 32 bp, Artificial; identical to SEQ ID NO: 5141
  oligonucleotide probe

SEQ ID NO: 12619 - DNA, 32 bp, Artificial; identical to SEQ ID NO: 5141
  oligonucleotide probe

SEQ ID NO: 12620 - DNA, 32 bp, Artificial; identical to SEQ ID NO: 7835
  oligonucleotide probe

SEQ ID NO: 12621 - DNA, 32 bp, Artificial; identical to SEQ ID NO: 7835
  oligonucleotide probe

SEQ ID NO: 12622 - DNA, 32 bp, Artificial; identical to SEQ ID NO: 8776
  oligonucleotide probe

SEQ ID NO: 12623 - DNA, 32 bp, Artificial; identical to SEQ ID NO: 8776
  oligonucleotide probe

SEQ ID NO: 12624 - DNA, 32 bp, Artificial; identical to SEQ ID NO: 7605
  oligonucleotide probe

SEQ ID NO: 12625 - DNA, 32 bp, Artificial; identical to SEQ ID NO: 7605
  oligonucleotide probe

SEQ ID NO: 12626 - DNA, 32 bp, Artificial; identical to SEQ ID NO: 7605
  oligonucleotide probe

SEQ ID NO: 12627 - DNA, 32 bp, Artificial; identical to SEQ ID NO: 7605
  oligonucleotide probe

SEQ ID NO: 12628 - DNA, 32 bp, Artificial; identical to SEQ ID NO: 7905
  oligonucleotide probe

SEQ ID NO: 12629 - DNA, 32 bp, Artificial; identical to SEQ ID NO: 7905
  oligonucleotide probe

SEQ ID NO: 12630 - DNA, 32 bp, Artificial; identical to SEQ ID NO: 7623
  oligonucleotide probe

SEQ ID NO: 12631 - DNA, 32 bp, Artificial; identical to SEQ ID NO: 7623
  oligonucleotide probe

SEQ ID NO: 12632 - DNA, 32 bp, Artificial; identical to SEQ ID NO: 5134
  oligonucleotide probe

SEQ ID NO: 12633 - DNA, 32 bp, Artificial; identical to SEQ ID NO: 5134
  oligonucleotide probe

SEQ ID NO: 12634 - DNA, 32 bp, Artificial; identical to SEQ ID NO: 7841
  oligonucleotide probe

SEQ ID NO: 12635 - DNA, 32 bp, Artificial; identical to SEQ ID NO: 7841
  oligonucleotide probe

SEQ ID NO: 12636 - DNA, 32 bp, Artificial; identical to SEQ ID NO: 5185
  oligonucleotide probe

SEQ ID NO: 12637 - DNA, 32 bp, Artificial; identical to SEQ ID NO: 5185
  oligonucleotide probe

SEQ ID NO: 12638 - DNA, 32 bp, Artificial; identical to SEQ ID NO: 5141
  oligonucleotide probe

SEQ ID NO: 12639 - DNA, 32 bp, Artificial; identical to SEQ ID NO: 5141
  oligonucleotide probe

SEQ ID NO: 12640 - DNA, 32 bp, Artificial; identical to SEQ ID NO: 5223
  oligonucleotide probe

SEQ ID NO: 12641 - DNA, 32 bp, Artificial; identical to SEQ ID NO: 5223
  oligonucleotide probe

SEQ ID NO: 12642 - DNA, 32 bp, Artificial; identical to SEQ ID NO: 7838
  oligonucleotide probe

SEQ ID NO: 12643 - DNA, 32 bp, Artificial; identical to SEQ ID NO: 7838
  oligonucleotide probe

SEQ ID NO: 12644 - DNA, 32 bp, Artificial; identical to SEQ ID NO: 7676
  oligonucleotide probe

SEQ ID NO: 12645 - DNA, 32 bp, Artificial; identical to SEQ ID NO: 7676
  oligonucleotide probe

SEQ ID NO: 12646 - DNA, 32 bp, Artificial; identical to SEQ ID NO: 7596
  oligonucleotide probe

SEQ ID NO: 12647 - DNA, 32 bp, Artificial; identical to SEQ ID NO: 7596
  oligonucleotide probe

SEQ ID NO: 12648 - DNA, 32 bp, Artificial; identical to SEQ ID NO: 5134
  oligonucleotide probe

SEQ ID NO: 12649 - DNA, 32 bp, Artificial; identical to SEQ ID NO: 5134
  oligonucleotide probe

SEQ ID NO: 12650 - DNA, 32 bp, Artificial; identical to SEQ ID NO: 7855
  oligonucleotide probe

SEQ ID NO: 12651 - DNA, 32 bp, Artificial; identical to SEQ ID NO: 7855
  oligonucleotide probe

SEQ ID NO: 12652 - DNA, 32 bp, Artificial; identical to SEQ ID NO: 7606
  oligonucleotide probe

SEQ ID NO: 12653 - DNA, 32 bp, Artificial; identical to SEQ ID NO: 7606
  oligonucleotide probe

SEQ ID NO: 12654 - DNA, 32 bp, Artificial; identical to SEQ ID NO: 5224
  oligonucleotide probe

SEQ ID NO: 12655 - DNA, 32 bp, Artificial; identical to SEQ ID NO: 5224
  oligonucleotide probe

SEQ ID NO: 12656 - DNA, 32 bp, Artificial; identical to SEQ ID NO: 7606
  oligonucleotide probe

SEQ ID NO: 12657 - DNA, 32 bp, Artificial; identical to SEQ ID NO: 7606
  oligonucleotide probe

SEQ ID NO: 12658 - DNA, 32 bp, Artificial; identical to SEQ ID NO: 9038
  oligonucleotide probe

SEQ ID NO: 12659 - DNA, 32 bp, Artificial; identical to SEQ ID NO: 9038
  oligonucleotide probe

SEQ ID NO: 12660 - DNA, 32 bp, Artificial; identical to SEQ ID NO: 5171
  oligonucleotide probe

SEQ ID NO: 12661 - DNA, 32 bp, Artificial; identical to SEQ ID NO: 5171
  oligonucleotide probe

SEQ ID NO: 12662 - DNA, 32 bp, Artificial; identical to SEQ ID NO: 7863
  oligonucleotide probe

SEQ ID NO: 12663 - DNA, 32 bp, Artificial; identical to SEQ ID NO: 7863
  oligonucleotide probe

SEQ ID NO: 12664 - DNA, 32 bp, Artificial; identical to SEQ ID NO: 5159
  oligonucleotide probe

SEQ ID NO: 12665 - DNA, 32 bp, Artificial; identical to SEQ ID NO: 5159
  oligonucleotide probe

SEQ ID NO: 12666 - DNA, 32 bp, Artificial; identical to SEQ ID NO: 7832
  oligonucleotide probe

SEQ ID NO: 12667 - DNA, 32 bp, Artificial; identical to SEQ ID NO: 7832
  oligonucleotide probe

SEQ ID NO: 12668 - DNA, 32 bp, Artificial; identical to SEQ ID NO: 5185
  oligonucleotide probe

SEQ ID NO: 12669 - DNA, 32 bp, Artificial; identical to SEQ ID NO: 5185
  oligonucleotide probe

SEQ ID NO: 12670 - DNA, 32 bp, Artificial; identical to SEQ ID NO: 7673
  oligonucleotide probe

SEQ ID NO: 12671 - DNA, 32 bp, Artificial; identical to SEQ ID NO: 7673
  oligonucleotide probe

SEQ ID NO: 12672 - DNA, 32 bp, Artificial; identical to SEQ ID NO: 5133
  oligonucleotide probe

SEQ ID NO: 12673 - DNA, 32 bp, Artificial; identical to SEQ ID NO: 5133
  oligonucleotide probe

SEQ ID NO: 12674 - DNA, 32 bp, Artificial; identical to SEQ ID NO: 7866
  oligonucleotide probe

SEQ ID NO: 12675 - DNA, 32 bp, Artificial; identical to SEQ ID NO: 7866
  oligonucleotide probe

SEQ ID NO: 12676 - DNA, 32 bp, Artificial; identical to SEQ ID NO: 5171
  oligonucleotide probe

SEQ ID NO: 12677 - DNA, 32 bp, Artificial; identical to SEQ ID NO: 5171
  oligonucleotide probe

SEQ ID NO: 12678 - DNA, 32 bp, Artificial; identical to SEQ ID NO: 7948
  oligonucleotide probe

SEQ ID NO: 12679 - DNA, 32 bp, Artificial; identical to SEQ ID NO: 7948
  oligonucleotide probe

SEQ ID NO: 12680 - DNA, 32 bp, Artificial; identical to SEQ ID NO: 5185
  oligonucleotide probe

SEQ ID NO: 12681 - DNA, 32 bp, Artificial; identical to SEQ ID NO: 5185
  oligonucleotide probe

SEQ ID NO: 12682 - DNA, 32 bp, Artificial; identical to SEQ ID NO: 7673
  oligonucleotide probe

SEQ ID NO: 12683 - DNA, 32 bp, Artificial; identical to SEQ ID NO: 7673
  oligonucleotide probe

SEQ ID NO: 12684 - DNA, 32 bp, Artificial; identical to SEQ ID NO: 7863
  oligonucleotide probe

SEQ ID NO: 12685 - DNA, 32 bp, Artificial; identical to SEQ ID NO: 7863
  oligonucleotide probe

SEQ ID NO: 12686 - DNA, 32 bp, Artificial; identical to SEQ ID NO: 7662
  oligonucleotide probe

SEQ ID NO: 12687 - DNA, 32 bp, Artificial; identical to SEQ ID NO: 7662
  oligonucleotide probe

SEQ ID NO: 12688 - DNA, 32 bp, Artificial; identical to SEQ ID NO: 7833
  oligonucleotide probe

SEQ ID NO: 12689 - DNA, 32 bp, Artificial; identical to SEQ ID NO: 7833
  oligonucleotide probe

SEQ ID NO: 12690 - DNA, 32 bp, Artificial; identical to SEQ ID NO: 7594
  oligonucleotide probe

SEQ ID NO: 12691 - DNA, 32 bp, Artificial; identical to SEQ ID NO: 7594
  oligonucleotide probe

SEQ ID NO: 12692 - DNA, 32 bp, Artificial; identical to SEQ ID NO: 7676
  oligonucleotide probe

SEQ ID NO: 12693 - DNA, 32 bp, Artificial; identical to SEQ ID NO: 7676
  oligonucleotide probe

SEQ ID NO: 12694 - DNA, 32 bp, Artificial; identical to SEQ ID NO: 7623
  oligonucleotide probe

SEQ ID NO: 12695 - DNA, 32 bp, Artificial; identical to SEQ ID NO: 7623
  oligonucleotide probe

SEQ ID NO: 12696 - DNA, 32 bp, Artificial; identical to SEQ ID NO: 5171
  oligonucleotide probe

SEQ ID NO: 12697 - DNA, 32 bp, Artificial; identical to SEQ ID NO: 5171
  oligonucleotide probe

SEQ ID NO: 12698 - DNA, 32 bp, Artificial; identical to SEQ ID NO: 5136
  oligonucleotide probe

SEQ ID NO: 12699 - DNA, 32 bp, Artificial; identical to SEQ ID NO: 5136
  oligonucleotide probe

SEQ ID NO: 12700 - DNA, 32 bp, Artificial; identical to SEQ ID NO: 8247
  oligonucleotide probe

SEQ ID NO: 12701 - DNA, 32 bp, Artificial; identical to SEQ ID NO: 8247
  oligonucleotide probe

SEQ ID NO: 12702 - DNA, 32 bp, Artificial; identical to SEQ ID NO: 7833
  oligonucleotide probe

SEQ ID NO: 12703 - DNA, 32 bp, Artificial; identical to SEQ ID NO: 7833
  oligonucleotide probe

SEQ ID NO: 12704 - DNA, 32 bp, Artificial; identical to SEQ ID NO: 5159
  oligonucleotide probe

SEQ ID NO: 12705 - DNA, 32 bp, Artificial; identical to SEQ ID NO: 5159
  oligonucleotide probe

SEQ ID NO: 12706 - DNA, 32 bp, Artificial; identical to SEQ ID NO: 7596
  oligonucleotide probe

SEQ ID NO: 12707 - DNA, 32 bp, Artificial; identical to SEQ ID NO: 7596
  oligonucleotide probe

SEQ ID NO: 12708 - DNA, 32 bp, Artificial; identical to SEQ ID NO: 7623
  oligonucleotide probe

SEQ ID NO: 12709 - DNA, 32 bp, Artificial; identical to SEQ ID NO: 7623
  oligonucleotide probe

SEQ ID NO: 12710 - DNA, 32 bp, Artificial; identical to SEQ ID NO: 7655
  oligonucleotide probe

SEQ ID NO: 12711 - DNA, 32 bp, Artificial; identical to SEQ ID NO: 7655
  oligonucleotide probe

SEQ ID NO: 12712 - DNA, 32 bp, Artificial; identical to SEQ ID NO: 7838
  oligonucleotide probe

SEQ ID NO: 12713 - DNA, 32 bp, Artificial; identical to SEQ ID NO: 7838
  oligonucleotide probe

SEQ ID NO: 12714 - DNA, 32 bp, Artificial; identical to SEQ ID NO: 5159
  oligonucleotide probe

SEQ ID NO: 12715 - DNA, 32 bp, Artificial; identical to SEQ ID NO: 5159
  oligonucleotide probe

SEQ ID NO: 12716 - DNA, 32 bp, Artificial; identical to SEQ ID NO: 7891
  oligonucleotide probe

SEQ ID NO: 12717 - DNA, 32 bp, Artificial; identical to SEQ ID NO: 7891
  oligonucleotide probe

SEQ ID NO: 12718 - DNA, 32 bp, Artificial; identical to SEQ ID NO: 7948
  oligonucleotide probe

SEQ ID NO: 12719 - DNA, 32 bp, Artificial; identical to SEQ ID NO: 7948
  oligonucleotide probe

SEQ ID NO: 12720 - DNA, 32 bp, Artificial; identical to SEQ ID NO: 7655
  oligonucleotide probe

SEQ ID NO: 12721 - DNA, 32 bp, Artificial; identical to SEQ ID NO: 7655
  oligonucleotide probe

SEQ ID NO: 12722 - DNA, 32 bp, Artificial; identical to SEQ ID NO: 7676
  oligonucleotide probe

SEQ ID NO: 12723 - DNA, 32 bp, Artificial; identical to SEQ ID NO: 7676
  oligonucleotide probe

SEQ ID NO: 12724 - DNA, 32 bp, Artificial; identical to SEQ ID NO: 5136
  oligonucleotide probe

SEQ ID NO: 12725 - DNA, 32 bp, Artificial; identical to SEQ ID NO: 5136
  oligonucleotide probe

SEQ ID NO: 12726 - DNA, 32 bp, Artificial; identical to SEQ ID NO: 7662
  oligonucleotide probe

SEQ ID NO: 12727 - DNA, 32 bp, Artificial; identical to SEQ ID NO: 7662
  oligonucleotide probe

SEQ ID NO: 12728 - DNA, 32 bp, Artificial; identical to SEQ ID NO: 7596
  oligonucleotide probe

SEQ ID NO: 12729 - DNA, 32 bp, Artificial; identical to SEQ ID NO: 7596
  oligonucleotide probe

SEQ ID NO: 12730 - DNA, 32 bp, Artificial; identical to SEQ ID NO: 7606
  oligonucleotide probe

SEQ ID NO: 12731 - DNA, 32 bp, Artificial; identical to SEQ ID NO: 7606
  oligonucleotide probe

SEQ ID NO: 12732 - DNA, 32 bp, Artificial; identical to SEQ ID NO: 7655
  oligonucleotide probe

SEQ ID NO: 12733 - DNA, 32 bp, Artificial; identical to SEQ ID NO: 7655
  oligonucleotide probe

SEQ ID NO: 12734 - DNA, 32 bp, Artificial; identical to SEQ ID NO: 7606
  oligonucleotide probe

SEQ ID NO: 12735 - DNA, 32 bp, Artificial; identical to SEQ ID NO: 7606
  oligonucleotide probe

SEQ ID NO: 12736 - DNA, 32 bp, Artificial; identical to SEQ ID NO: 7948
  oligonucleotide probe

SEQ ID NO: 12737 - DNA, 32 bp, Artificial; identical to SEQ ID NO: 7948
  oligonucleotide probe

SEQ ID NO: 12738 - DNA, 32 bp, Artificial; identical to SEQ ID NO: 5136
  oligonucleotide probe

SEQ ID NO: 12739 - DNA, 32 bp, Artificial; identical to SEQ ID NO: 5136
  oligonucleotide probe

SEQ ID NO: 12740 - DNA, 32 bp, Artificial; identical to SEQ ID NO: 5399
  oligonucleotide probe

SEQ ID NO: 12741 - DNA, 32 bp, Artificial; identical to SEQ ID NO: 5399
  oligonucleotide probe

SEQ ID NO: 12742 - DNA, 32 bp, Artificial; identical to SEQ ID NO: 7624
  oligonucleotide probe

SEQ ID NO: 12743 - DNA, 32 bp, Artificial; identical to SEQ ID NO: 7624
  oligonucleotide probe

SEQ ID NO: 12744 - DNA, 32 bp, Artificial; identical to SEQ ID NO: 10053
  oligonucleotide probe

SEQ ID NO: 12745 - DNA, 32 bp, Artificial; identical to SEQ ID NO: 10053
  oligonucleotide probe

SEQ ID NO: 12746 - DNA, 32 bp, Artificial; identical to SEQ ID NO: 7676
  oligonucleotide probe

SEQ ID NO: 12747 - DNA, 32 bp, Artificial; identical to SEQ ID NO: 7676
  oligonucleotide probe

SEQ ID NO: 12748 - DNA, 32 bp, Artificial; identical to SEQ ID NO: 7694
  oligonucleotide probe

SEQ ID NO: 12749 - DNA, 32 bp, Artificial; identical to SEQ ID NO: 7694
  oligonucleotide probe

SEQ ID NO: 12750 - DNA, 32 bp, Artificial; identical to SEQ ID NO: 8240
  oligonucleotide probe

SEQ ID NO: 12751 - DNA, 32 bp, Artificial; identical to SEQ ID NO: 8240
  oligonucleotide probe

SEQ ID NO: 12752 - DNA, 32 bp, Artificial; identical to SEQ ID NO: 5171
  oligonucleotide probe

SEQ ID NO: 12753 - DNA, 32 bp, Artificial; identical to SEQ ID NO: 5171
  oligonucleotide probe

SEQ ID NO: 12754 - DNA, 32 bp, Artificial; identical to SEQ ID NO: 7644
  oligonucleotide probe

SEQ ID NO: 12755 - DNA, 32 bp, Artificial; identical to SEQ ID NO: 7644
  oligonucleotide probe

SEQ ID NO: 12756 - DNA, 32 bp, Artificial; identical to SEQ ID NO: 8001
  oligonucleotide probe

SEQ ID NO: 12757 - DNA, 32 bp, Artificial; identical to SEQ ID NO: 8001
  oligonucleotide probe

SEQ ID NO: 12758 - DNA, 32 bp, Artificial; identical to SEQ ID NO: 7676
  oligonucleotide probe

SEQ ID NO: 12759 - DNA, 32 bp, Artificial; identical to SEQ ID NO: 7676
  oligonucleotide probe

SEQ ID NO: 12760 - DNA, 32 bp, Artificial; identical to SEQ ID NO: 7673
  oligonucleotide probe

SEQ ID NO: 12761 - DNA, 32 bp, Artificial; identical to SEQ ID NO: 7673
  oligonucleotide probe

SEQ ID NO: 12762 - DNA, 32 bp, Artificial; identical to SEQ ID NO: 5134
  oligonucleotide probe

SEQ ID NO: 12763 - DNA, 32 bp, Artificial; identical to SEQ ID NO: 5134
  oligonucleotide probe

SEQ ID NO: 12764 - DNA, 32 bp, Artificial; identical to SEQ ID NO: 7856
  oligonucleotide probe

SEQ ID NO: 12765 - DNA, 32 bp, Artificial; identical to SEQ ID NO: 7856
  oligonucleotide probe

SEQ ID NO: 12766 - DNA, 32 bp, Artificial; identical to SEQ ID NO: 9826
  oligonucleotide probe

SEQ ID NO: 12767 - DNA, 32 bp, Artificial; identical to SEQ ID NO: 9826
  oligonucleotide probe

SEQ ID NO: 12768 - DNA, 32 bp, Artificial; identical to SEQ ID NO: 5133
  oligonucleotide probe

SEQ ID NO: 12769 - DNA, 32 bp, Artificial; identical to SEQ ID NO: 5133
  oligonucleotide probe

SEQ ID NO: 12770 - DNA, 32 bp, Artificial; identical to SEQ ID NO: 5159
  oligonucleotide probe

SEQ ID NO: 12771 - DNA, 32 bp, Artificial; identical to SEQ ID NO: 5159
  oligonucleotide probe

SEQ ID NO: 12772 - DNA, 32 bp, Artificial; identical to SEQ ID NO: 7673
  oligonucleotide probe

SEQ ID NO: 12773 - DNA, 32 bp, Artificial; identical to SEQ ID NO: 7673
  oligonucleotide probe

SEQ ID NO: 12774 - DNA, 32 bp, Artificial; identical to SEQ ID NO: 5134
  oligonucleotide probe

SEQ ID NO: 12775 - DNA, 32 bp, Artificial; identical to SEQ ID NO: 5134
  oligonucleotide probe

SEQ ID NO: 12776 - DNA, 32 bp, Artificial; identical to SEQ ID NO: 8240
  oligonucleotide probe

SEQ ID NO: 12777 - DNA, 32 bp, Artificial; identical to SEQ ID NO: 8240
  oligonucleotide probe

SEQ ID NO: 12778 - DNA, 32 bp, Artificial; identical to SEQ ID NO: 7597
  oligonucleotide probe

SEQ ID NO: 12779 - DNA, 32 bp, Artificial; identical to SEQ ID NO: 7597
  oligonucleotide probe

SEQ ID NO: 12780 - DNA, 32 bp, Artificial; identical to SEQ ID NO: 7598
  oligonucleotide probe

SEQ ID NO: 12781 - DNA, 32 bp, Artificial; identical to SEQ ID NO: 7598
  oligonucleotide probe

SEQ ID NO: 12782 - DNA, 32 bp, Artificial; identical to SEQ ID NO: 7673
  oligonucleotide probe

SEQ ID NO: 12783 - DNA, 32 bp, Artificial; identical to SEQ ID NO: 7673
  oligonucleotide probe

SEQ ID NO: 12784 - DNA, 32 bp, Artificial; identical to SEQ ID NO: 5133
  oligonucleotide probe

SEQ ID NO: 12785 - DNA, 32 bp, Artificial; identical to SEQ ID NO: 5133
  oligonucleotide probe

SEQ ID NO: 12786 - DNA, 32 bp, Artificial; identical to SEQ ID NO: 8244
  oligonucleotide probe

SEQ ID NO: 12787 - DNA, 32 bp, Artificial; identical to SEQ ID NO: 8244
  oligonucleotide probe

SEQ ID NO: 12788 - DNA, 32 bp, Artificial; identical to SEQ ID NO: 7594
  oligonucleotide probe

SEQ ID NO: 12789 - DNA, 32 bp, Artificial; identical to SEQ ID NO: 7594
  oligonucleotide probe

SEQ ID NO: 12790 - DNA, 32 bp, Artificial; identical to SEQ ID NO: 7834
  oligonucleotide probe

SEQ ID NO: 12791 - DNA, 32 bp, Artificial; identical to SEQ ID NO: 7834
  oligonucleotide probe

SEQ ID NO: 12792 - DNA, 32 bp, Artificial; identical to SEQ ID NO: 5133
  oligonucleotide probe

SEQ ID NO: 12793 - DNA, 32 bp, Artificial; identical to SEQ ID NO: 5133
  oligonucleotide probe

SEQ ID NO: 12794 - DNA, 32 bp, Artificial; identical to SEQ ID NO: 7856
  oligonucleotide probe

SEQ ID NO: 12795 - DNA, 32 bp, Artificial; identical to SEQ ID NO: 7856
  oligonucleotide probe

SEQ ID NO: 12796 - DNA, 32 bp, Artificial; identical to SEQ ID NO: 8780
  oligonucleotide probe

SEQ ID NO: 12797 - DNA, 32 bp, Artificial; identical to SEQ ID NO: 8780
  oligonucleotide probe

SEQ ID NO: 12798 - DNA, 32 bp, Artificial; identical to SEQ ID NO: 7624
  oligonucleotide probe

SEQ ID NO: 12799 - DNA, 32 bp, Artificial; identical to SEQ ID NO: 7624
  oligonucleotide probe

SEQ ID NO: 12800 - DNA, 32 bp, Artificial; identical to SEQ ID NO: 5140
  oligonucleotide probe

SEQ ID NO: 12801 - DNA, 32 bp, Artificial; identical to SEQ ID NO: 5140
  oligonucleotide probe

SEQ ID NO: 12802 - DNA, 32 bp, Artificial; identical to SEQ ID NO: 5185
  oligonucleotide probe

SEQ ID NO: 12803 - DNA, 32 bp, Artificial; identical to SEQ ID NO: 5185
  oligonucleotide probe

SEQ ID NO: 12804 - DNA, 32 bp, Artificial; identical to SEQ ID NO: 7891
  oligonucleotide probe

SEQ ID NO: 12805 - DNA, 32 bp, Artificial; identical to SEQ ID NO: 7891
  oligonucleotide probe

SEQ ID NO: 12806 - DNA, 32 bp, Artificial; identical to SEQ ID NO: 7598
  oligonucleotide probe

SEQ ID NO: 12807 - DNA, 32 bp, Artificial; identical to SEQ ID NO: 7598
  oligonucleotide probe

SEQ ID NO: 12808 - DNA, 32 bp, Artificial; identical to SEQ ID NO: 9020
  oligonucleotide probe

SEQ ID NO: 12809 - DNA, 32 bp, Artificial; identical to SEQ ID NO: 9020
  oligonucleotide probe

SEQ ID NO: 12810 - DNA, 32 bp, Artificial; identical to SEQ ID NO: 7676
  oligonucleotide probe

SEQ ID NO: 12811 - DNA, 32 bp, Artificial; identical to SEQ ID NO: 7676
  oligonucleotide probe

SEQ ID NO: 12812 - DNA, 32 bp, Artificial; identical to SEQ ID NO: 5416
  oligonucleotide probe

SEQ ID NO: 12813 - DNA, 32 bp, Artificial; identical to SEQ ID NO: 5416
  oligonucleotide probe

SEQ ID NO: 12814 - DNA, 32 bp, Artificial; identical to SEQ ID NO: 7676
  oligonucleotide probe

SEQ ID NO: 12815 - DNA, 32 bp, Artificial; identical to SEQ ID NO: 7676
  oligonucleotide probe

SEQ ID NO: 12816 - DNA, 32 bp, Artificial; identical to SEQ ID NO: 7834
  oligonucleotide probe

SEQ ID NO: 12817 - DNA, 32 bp, Artificial; identical to SEQ ID NO: 7834
  oligonucleotide probe

SEQ ID NO: 12818 - DNA, 32 bp, Artificial; identical to SEQ ID NO: 7905
  oligonucleotide probe

SEQ ID NO: 12819 - DNA, 32 bp, Artificial; identical to SEQ ID NO: 7905
  oligonucleotide probe

SEQ ID NO: 12820 - DNA, 32 bp, Artificial; identical to SEQ ID NO: 7833
  oligonucleotide probe

SEQ ID NO: 12821 - DNA, 32 bp, Artificial; identical to SEQ ID NO: 7833
  oligonucleotide probe

SEQ ID NO: 12822 - DNA, 32 bp, Artificial; identical to SEQ ID NO: 7865
  oligonucleotide probe

SEQ ID NO: 12823 - DNA, 32 bp, Artificial; identical to SEQ ID NO: 7865
  oligonucleotide probe

SEQ ID NO: 12824 - DNA, 32 bp, Artificial; identical to SEQ ID NO: 7947
  oligonucleotide probe

SEQ ID NO: 12825 - DNA, 32 bp, Artificial; identical to SEQ ID NO: 7947
  oligonucleotide probe

SEQ ID NO: 12826 - DNA, 32 bp, Artificial; identical to SEQ ID NO: 7624
  oligonucleotide probe

SEQ ID NO: 12827 - DNA, 32 bp, Artificial; identical to SEQ ID NO: 7624
  oligonucleotide probe

SEQ ID NO: 12828 - DNA, 32 bp, Artificial; identical to SEQ ID NO: 5160
  oligonucleotide probe

SEQ ID NO: 12829 - DNA, 32 bp, Artificial; identical to SEQ ID NO: 5160
  oligonucleotide probe

SEQ ID NO: 12830 - DNA, 32 bp, Artificial; identical to SEQ ID NO: 5141
  oligonucleotide probe

SEQ ID NO: 12831 - DNA, 32 bp, Artificial; identical to SEQ ID NO: 5141
  oligonucleotide probe

SEQ ID NO: 12832 - DNA, 32 bp, Artificial; identical to SEQ ID NO: 5232
  oligonucleotide probe

SEQ ID NO: 12833 - DNA, 32 bp, Artificial; identical to SEQ ID NO: 5232
  oligonucleotide probe

SEQ ID NO: 12834 - DNA, 32 bp, Artificial; identical to SEQ ID NO: 5136
  oligonucleotide probe

SEQ ID NO: 12835 - DNA, 32 bp, Artificial; identical to SEQ ID NO: 5136
  oligonucleotide probe

SEQ ID NO: 12836 - DNA, 32 bp, Artificial; identical to SEQ ID NO: 7597
  oligonucleotide probe

SEQ ID NO: 12837 - DNA, 32 bp, Artificial; identical to SEQ ID NO: 7597
  oligonucleotide probe

SEQ ID NO: 12838 - DNA, 32 bp, Artificial; identical to SEQ ID NO: 8047
  oligonucleotide probe

SEQ ID NO: 12839 - DNA, 32 bp, Artificial; identical to SEQ ID NO: 8047
  oligonucleotide probe

SEQ ID NO: 12840 - DNA, 32 bp, Artificial; identical to SEQ ID NO: 8047
  oligonucleotide probe

SEQ ID NO: 12841 - DNA, 32 bp, Artificial; identical to SEQ ID NO: 8047
  oligonucleotide probe

SEQ ID NO: 12842 - DNA, 32 bp, Artificial; identical to SEQ ID NO: 5160
  oligonucleotide probe

SEQ ID NO: 12843 - DNA, 32 bp, Artificial; identical to SEQ ID NO: 5160
  oligonucleotide probe

SEQ ID NO: 12844 - DNA, 32 bp, Artificial; identical to SEQ ID NO: 5140
  oligonucleotide probe

SEQ ID NO: 12845 - DNA, 32 bp, Artificial; identical to SEQ ID NO: 5140
  oligonucleotide probe

SEQ ID NO: 12846 - DNA, 32 bp, Artificial; identical to SEQ ID NO: 7690
  oligonucleotide probe

SEQ ID NO: 12847 - DNA, 32 bp, Artificial; identical to SEQ ID NO: 7690
  oligonucleotide probe

SEQ ID NO: 12848 - DNA, 32 bp, Artificial; identical to SEQ ID NO: 7655
  oligonucleotide probe

SEQ ID NO: 12849 - DNA, 32 bp, Artificial; identical to SEQ ID NO: 7655
  oligonucleotide probe

SEQ ID NO: 12850 - DNA, 32 bp, Artificial; identical to SEQ ID NO: 5232
  oligonucleotide probe

SEQ ID NO: 12851 - DNA, 32 bp, Artificial; identical to SEQ ID NO: 5232
  oligonucleotide probe

SEQ ID NO: 12852 - DNA, 32 bp, Artificial; identical to SEQ ID NO: 7855
  oligonucleotide probe

SEQ ID NO: 12853 - DNA, 32 bp, Artificial; identical to SEQ ID NO: 7855
  oligonucleotide probe

SEQ ID NO: 12854 - DNA, 32 bp, Artificial; identical to SEQ ID NO: 7865
  oligonucleotide probe

SEQ ID NO: 12855 - DNA, 32 bp, Artificial; identical to SEQ ID NO: 7865
  oligonucleotide probe

SEQ ID NO: 12856 - DNA, 32 bp, Artificial; identical to SEQ ID NO: 7905
  oligonucleotide probe

SEQ ID NO: 12857 - DNA, 32 bp, Artificial; identical to SEQ ID NO: 7905
  oligonucleotide probe

SEQ ID NO: 12858 - DNA, 32 bp, Artificial; identical to SEQ ID NO: 7812
  oligonucleotide probe

SEQ ID NO: 12859 - DNA, 32 bp, Artificial; identical to SEQ ID NO: 7812
  oligonucleotide probe

SEQ ID NO: 12860 - DNA, 32 bp, Artificial; identical to SEQ ID NO: 7594
  oligonucleotide probe

SEQ ID NO: 12861 - DNA, 32 bp, Artificial; identical to SEQ ID NO: 7594
  oligonucleotide probe

SEQ ID NO: 12862 - DNA, 32 bp, Artificial; identical to SEQ ID NO: 7865
  oligonucleotide probe

SEQ ID NO: 12863 - DNA, 32 bp, Artificial; identical to SEQ ID NO: 7865
  oligonucleotide probe

SEQ ID NO: 12864 - DNA, 32 bp, Artificial; identical to SEQ ID NO: 7783
  oligonucleotide probe

SEQ ID NO: 12865 - DNA, 32 bp, Artificial; identical to SEQ ID NO: 7783
  oligonucleotide probe

SEQ ID NO: 12866 - DNA, 32 bp, Artificial; identical to SEQ ID NO: 5141
  oligonucleotide probe

SEQ ID NO: 12867 - DNA, 32 bp, Artificial; identical to SEQ ID NO: 5141
  oligonucleotide probe

SEQ ID NO: 12868 - DNA, 32 bp, Artificial; identical to SEQ ID NO: 7644
  oligonucleotide probe

SEQ ID NO: 12869 - DNA, 32 bp, Artificial; identical to SEQ ID NO: 7644
  oligonucleotide probe

SEQ ID NO: 12870 - DNA, 32 bp, Artificial; identical to SEQ ID NO: 7840
  oligonucleotide probe

SEQ ID NO: 12871 - DNA, 32 bp, Artificial; identical to SEQ ID NO: 7840
  oligonucleotide probe

SEQ ID NO: 12872 - DNA, 32 bp, Artificial; identical to SEQ ID NO: 5223
  oligonucleotide probe

SEQ ID NO: 12873 - DNA, 32 bp, Artificial; identical to SEQ ID NO: 5223
  oligonucleotide probe

SEQ ID NO: 12874 - DNA, 32 bp, Artificial; identical to SEQ ID NO: 8247
  oligonucleotide probe

SEQ ID NO: 12875 - DNA, 32 bp, Artificial; identical to SEQ ID NO: 8247
  oligonucleotide probe

SEQ ID NO: 12876 - DNA, 32 bp, Artificial; identical to SEQ ID NO: 5218
  oligonucleotide probe

SEQ ID NO: 12877 - DNA, 32 bp, Artificial; identical to SEQ ID NO: 5218
  oligonucleotide probe

SEQ ID NO: 12878 - DNA, 32 bp, Artificial; identical to SEQ ID NO: 5416
  oligonucleotide probe

SEQ ID NO: 12879 - DNA, 32 bp, Artificial; identical to SEQ ID NO: 5416
  oligonucleotide probe

SEQ ID NO: 12880 - DNA, 32 bp, Artificial; identical to SEQ ID NO: 7624
  oligonucleotide probe

SEQ ID NO: 12881 - DNA, 32 bp, Artificial; identical to SEQ ID NO: 7624
  oligonucleotide probe

SEQ ID NO: 12882 - DNA, 32 bp, Artificial; identical to SEQ ID NO: 8001
  oligonucleotide probe

SEQ ID NO: 12883 - DNA, 32 bp, Artificial; identical to SEQ ID NO: 8001
  oligonucleotide probe

SEQ ID NO: 12884 - DNA, 32 bp, Artificial; identical to SEQ ID NO: 7856
  oligonucleotide probe

SEQ ID NO: 12885 - DNA, 32 bp, Artificial; identical to SEQ ID NO: 7856
  oligonucleotide probe

SEQ ID NO: 12886 - DNA, 32 bp, Artificial; identical to SEQ ID NO: 7891
  oligonucleotide probe

SEQ ID NO: 12887 - DNA, 32 bp, Artificial; identical to SEQ ID NO: 7891
  oligonucleotide probe

SEQ ID NO: 12888 - DNA, 32 bp, Artificial; identical to SEQ ID NO: 7623
  oligonucleotide probe

SEQ ID NO: 12889 - DNA, 32 bp, Artificial; identical to SEQ ID NO: 7623
  oligonucleotide probe

SEQ ID NO: 12890 - DNA, 32 bp, Artificial; identical to SEQ ID NO: 7662
  oligonucleotide probe

SEQ ID NO: 12891 - DNA, 32 bp, Artificial; identical to SEQ ID NO: 7662
  oligonucleotide probe

SEQ ID NO: 12892 - DNA, 32 bp, Artificial; identical to SEQ ID NO: 8571
  oligonucleotide probe

SEQ ID NO: 12893 - DNA, 32 bp, Artificial; identical to SEQ ID NO: 8571
  oligonucleotide probe

SEQ ID NO: 12894 - DNA, 32 bp, Artificial; identical to SEQ ID NO: 7694
  oligonucleotide probe

SEQ ID NO: 12895 - DNA, 32 bp, Artificial; identical to SEQ ID NO: 7694
  oligonucleotide probe

SEQ ID NO: 12896 - DNA, 32 bp, Artificial; identical to SEQ ID NO: 7853
  oligonucleotide probe

SEQ ID NO: 12897 - DNA, 32 bp, Artificial; identical to SEQ ID NO: 7853
  oligonucleotide probe

SEQ ID NO: 12898 - DNA, 32 bp, Artificial; identical to SEQ ID NO: 5159
  oligonucleotide probe

SEQ ID NO: 12899 - DNA, 32 bp, Artificial; identical to SEQ ID NO: 5159
  oligonucleotide probe

SEQ ID NO: 12900 - DNA, 32 bp, Artificial; identical to SEQ ID NO: 8240
  oligonucleotide probe

SEQ ID NO: 12901 - DNA, 32 bp, Artificial; identical to SEQ ID NO: 8240
  oligonucleotide probe

SEQ ID NO: 12902 - DNA, 32 bp, Artificial; identical to SEQ ID NO: 7624
  oligonucleotide probe

SEQ ID NO: 12903 - DNA, 32 bp, Artificial; identical to SEQ ID NO: 7624
  oligonucleotide probe

SEQ ID NO: 12904 - DNA, 32 bp, Artificial; identical to SEQ ID NO: 5185
  oligonucleotide probe

SEQ ID NO: 12905 - DNA, 32 bp, Artificial; identical to SEQ ID NO: 5185
  oligonucleotide probe

SEQ ID NO: 12906 - DNA, 32 bp, Artificial; identical to SEQ ID NO: 7644
  oligonucleotide probe

SEQ ID NO: 12907 - DNA, 32 bp, Artificial; identical to SEQ ID NO: 7644
  oligonucleotide probe

SEQ ID NO: 12908 - DNA, 32 bp, Artificial; identical to SEQ ID NO: 8001
  oligonucleotide probe

SEQ ID NO: 12909 - DNA, 32 bp, Artificial; identical to SEQ ID NO: 8001
  oligonucleotide probe

SEQ ID NO: 12910 - DNA, 32 bp, Artificial; identical to SEQ ID NO: 7655
  oligonucleotide probe

SEQ ID NO: 12911 - DNA, 32 bp, Artificial; identical to SEQ ID NO: 7655
  oligonucleotide probe

SEQ ID NO: 12912 - DNA, 32 bp, Artificial; identical to SEQ ID NO: 7694
  oligonucleotide probe

SEQ ID NO: 12913 - DNA, 32 bp, Artificial; identical to SEQ ID NO: 7694
  oligonucleotide probe

SEQ ID NO: 12914 - DNA, 32 bp, Artificial; identical to SEQ ID NO: 5239
  oligonucleotide probe

SEQ ID NO: 12915 - DNA, 32 bp, Artificial; identical to SEQ ID NO: 5239
  oligonucleotide probe

SEQ ID NO: 12916 - DNA, 32 bp, Artificial; identical to SEQ ID NO: 7676
  oligonucleotide probe

SEQ ID NO: 12917 - DNA, 32 bp, Artificial; identical to SEQ ID NO: 7676
  oligonucleotide probe

SEQ ID NO: 12918 - DNA, 32 bp, Artificial; identical to SEQ ID NO: 7833
  oligonucleotide probe

SEQ ID NO: 12919 - DNA, 32 bp, Artificial; identical to SEQ ID NO: 7833
  oligonucleotide probe

SEQ ID NO: 12920 - DNA, 32 bp, Artificial; identical to SEQ ID NO: 7597
  oligonucleotide probe

SEQ ID NO: 12921 - DNA, 32 bp, Artificial; identical to SEQ ID NO: 7597
  oligonucleotide probe

SEQ ID NO: 12922 - DNA, 32 bp, Artificial; identical to SEQ ID NO: 7655
  oligonucleotide probe

SEQ ID NO: 12923 - DNA, 32 bp, Artificial; identical to SEQ ID NO: 7655
  oligonucleotide probe

SEQ ID NO: 12924 - DNA, 32 bp, Artificial; identical to SEQ ID NO: 7832
  oligonucleotide probe

SEQ ID NO: 12925 - DNA, 32 bp, Artificial; identical to SEQ ID NO: 7832
  oligonucleotide probe

SEQ ID NO: 12926 - DNA, 32 bp, Artificial; identical to SEQ ID NO: 5140
  oligonucleotide probe

SEQ ID NO: 12927 - DNA, 32 bp, Artificial; identical to SEQ ID NO: 5140
  oligonucleotide probe

SEQ ID NO: 12928 - DNA, 32 bp, Artificial; identical to SEQ ID NO: 7812
  oligonucleotide probe

SEQ ID NO: 12929 - DNA, 32 bp, Artificial; identical to SEQ ID NO: 7812
  oligonucleotide probe

SEQ ID NO: 12930 - DNA, 32 bp, Artificial; identical to SEQ ID NO: 7644
  oligonucleotide probe

SEQ ID NO: 12931 - DNA, 32 bp, Artificial; identical to SEQ ID NO: 7644
  oligonucleotide probe

SEQ ID NO: 12932 - DNA, 32 bp, Artificial; identical to SEQ ID NO: 7662
  oligonucleotide probe

SEQ ID NO: 12933 - DNA, 32 bp, Artificial; identical to SEQ ID NO: 7662
  oligonucleotide probe

SEQ ID NO: 12934 - DNA, 32 bp, Artificial; identical to SEQ ID NO: 8047
  oligonucleotide probe

SEQ ID NO: 12935 - DNA, 32 bp, Artificial; identical to SEQ ID NO: 8047
  oligonucleotide probe

SEQ ID NO: 12936 - DNA, 32 bp, Artificial; identical to SEQ ID NO: 7623
  oligonucleotide probe

SEQ ID NO: 12937 - DNA, 32 bp, Artificial; identical to SEQ ID NO: 7623
  oligonucleotide probe

SEQ ID NO: 12938 - DNA, 32 bp, Artificial; identical to SEQ ID NO: 7676
  oligonucleotide probe

SEQ ID NO: 12939 - DNA, 32 bp, Artificial; identical to SEQ ID NO: 7676
  oligonucleotide probe

SEQ ID NO: 12940 - DNA, 32 bp, Artificial; identical to SEQ ID NO: 7623
  oligonucleotide probe

SEQ ID NO: 12941 - DNA, 32 bp, Artificial; identical to SEQ ID NO: 7623
  oligonucleotide probe

SEQ ID NO: 12942 - DNA, 32 bp, Artificial; identical to SEQ ID NO: 7659
  oligonucleotide probe

SEQ ID NO: 12943 - DNA, 32 bp, Artificial; identical to SEQ ID NO: 7659
  oligonucleotide probe

SEQ ID NO: 12944 - DNA, 32 bp, Artificial; identical to SEQ ID NO: 7662
  oligonucleotide probe

SEQ ID NO: 12945 - DNA, 32 bp, Artificial; identical to SEQ ID NO: 7662
  oligonucleotide probe

SEQ ID NO: 12946 - DNA, 32 bp, Artificial; identical to SEQ ID NO: 7623
  oligonucleotide probe

SEQ ID NO: 12947 - DNA, 32 bp, Artificial; identical to SEQ ID NO: 7623
  oligonucleotide probe

SEQ ID NO: 12948 - DNA, 32 bp, Artificial; identical to SEQ ID NO: 7644
  oligonucleotide probe

SEQ ID NO: 12949 - DNA, 32 bp, Artificial; identical to SEQ ID NO: 7644
  oligonucleotide probe

SEQ ID NO: 12950 - DNA, 32 bp, Artificial; identical to SEQ ID NO: 8244
  oligonucleotide probe

SEQ ID NO: 12951 - DNA, 32 bp, Artificial; identical to SEQ ID NO: 8244
  oligonucleotide probe

SEQ ID NO: 12952 - DNA, 32 bp, Artificial; identical to SEQ ID NO: 7662
  oligonucleotide probe

SEQ ID NO: 12953 - DNA, 32 bp, Artificial; identical to SEQ ID NO: 7662
  oligonucleotide probe

SEQ ID NO: 12954 - DNA, 32 bp, Artificial; identical to SEQ ID NO: 5399
  oligonucleotide probe

SEQ ID NO: 12955 - DNA, 32 bp, Artificial; identical to SEQ ID NO: 5399
  oligonucleotide probe

SEQ ID NO: 12956 - DNA, 32 bp, Artificial; identical to SEQ ID NO: 8001
  oligonucleotide probe

SEQ ID NO: 12957 - DNA, 32 bp, Artificial; identical to SEQ ID NO: 8001
  oligonucleotide probe

SEQ ID NO: 12958 - DNA, 32 bp, Artificial; identical to SEQ ID NO: 5416
  oligonucleotide probe

SEQ ID NO: 12959 - DNA, 32 bp, Artificial; identical to SEQ ID NO: 5416
  oligonucleotide probe

SEQ ID NO: 12960 - DNA, 32 bp, Artificial; identical to SEQ ID NO: 7853
  oligonucleotide probe

SEQ ID NO: 12961 - DNA, 32 bp, Artificial; identical to SEQ ID NO: 7853
  oligonucleotide probe

SEQ ID NO: 12962 - DNA, 32 bp, Artificial; identical to SEQ ID NO: 7644
  oligonucleotide probe

SEQ ID NO: 12963 - DNA, 32 bp, Artificial; identical to SEQ ID NO: 7644
  oligonucleotide probe

SEQ ID NO: 12964 - DNA, 32 bp, Artificial; identical to SEQ ID NO: 7947
  oligonucleotide probe

SEQ ID NO: 12965 - DNA, 32 bp, Artificial; identical to SEQ ID NO: 7947
  oligonucleotide probe

SEQ ID NO: 12966 - DNA, 32 bp, Artificial; identical to SEQ ID NO: 5185
  oligonucleotide probe

SEQ ID NO: 12967 - DNA, 32 bp, Artificial; identical to SEQ ID NO: 5185
  oligonucleotide probe

SEQ ID NO: 12968 - DNA, 32 bp, Artificial; identical to SEQ ID NO: 7662
  oligonucleotide probe

SEQ ID NO: 12969 - DNA, 32 bp, Artificial; identical to SEQ ID NO: 7662
  oligonucleotide probe

SEQ ID NO: 12970 - DNA, 32 bp, Artificial; identical to SEQ ID NO: 5160
  oligonucleotide probe

SEQ ID NO: 12971 - DNA, 32 bp, Artificial; identical to SEQ ID NO: 5160
  oligonucleotide probe

SEQ ID NO: 12972 - DNA, 32 bp, Artificial; identical to SEQ ID NO: 5231
  oligonucleotide probe

SEQ ID NO: 12973 - DNA, 32 bp, Artificial; identical to SEQ ID NO: 5231
  oligonucleotide probe

SEQ ID NO: 12974 - DNA, 32 bp, Artificial; identical to SEQ ID NO: 7659
  oligonucleotide probe

SEQ ID NO: 12975 - DNA, 32 bp, Artificial; identical to SEQ ID NO: 7659
  oligonucleotide probe

SEQ ID NO: 12976 - DNA, 32 bp, Artificial; identical to SEQ ID NO: 5217
  oligonucleotide probe

SEQ ID NO: 12977 - DNA, 32 bp, Artificial; identical to SEQ ID NO: 5217
  oligonucleotide probe

SEQ ID NO: 12978 - DNA, 32 bp, Artificial; identical to SEQ ID NO: 7597
  oligonucleotide probe

SEQ ID NO: 12979 - DNA, 32 bp, Artificial; identical to SEQ ID NO: 7597
  oligonucleotide probe

SEQ ID NO: 12980 - DNA, 32 bp, Artificial; identical to SEQ ID NO: 5185
  oligonucleotide probe

SEQ ID NO: 12981 - DNA, 32 bp, Artificial; identical to SEQ ID NO: 5185
  oligonucleotide probe

SEQ ID NO: 12982 - DNA, 32 bp, Artificial; identical to SEQ ID NO: 5416
  oligonucleotide probe

SEQ ID NO: 12983 - DNA, 32 bp, Artificial; identical to SEQ ID NO: 5416
  oligonucleotide probe

SEQ ID NO: 12984 - DNA, 32 bp, Artificial; identical to SEQ ID NO: 7947
  oligonucleotide probe

SEQ ID NO: 12985 - DNA, 32 bp, Artificial; identical to SEQ ID NO: 7947
  oligonucleotide probe

SEQ ID NO: 12986 - DNA, 32 bp, Artificial; identical to SEQ ID NO: 5171
  oligonucleotide probe

SEQ ID NO: 12987 - DNA, 32 bp, Artificial; identical to SEQ ID NO: 5171
  oligonucleotide probe

SEQ ID NO: 12988 - DNA, 32 bp, Artificial; identical to SEQ ID NO: 7833
  oligonucleotide probe

SEQ ID NO: 12989 - DNA, 32 bp, Artificial; identical to SEQ ID NO: 7833
  oligonucleotide probe

SEQ ID NO: 12990 - DNA, 32 bp, Artificial; identical to SEQ ID NO: 5133
  oligonucleotide probe

SEQ ID NO: 12991 - DNA, 32 bp, Artificial; identical to SEQ ID NO: 5133
  oligonucleotide probe

SEQ ID NO: 12992 - DNA, 32 bp, Artificial; identical to SEQ ID NO: 7623
  oligonucleotide probe

SEQ ID NO: 12993 - DNA, 32 bp, Artificial; identical to SEQ ID NO: 7623
  oligonucleotide probe

SEQ ID NO: 12994 - DNA, 32 bp, Artificial; identical to SEQ ID NO: 5134
  oligonucleotide probe

SEQ ID NO: 12995 - DNA, 32 bp, Artificial; identical to SEQ ID NO: 5134
  oligonucleotide probe

SEQ ID NO: 12996 - DNA, 32 bp, Artificial; identical to SEQ ID NO: 8571
  oligonucleotide probe

SEQ ID NO: 12997 - DNA, 32 bp, Artificial; identical to SEQ ID NO: 8571
  oligonucleotide probe

SEQ ID NO: 12998 - DNA, 32 bp, Artificial; identical to SEQ ID NO: 7623
  oligonucleotide probe

SEQ ID NO: 12999 - DNA, 32 bp, Artificial; identical to SEQ ID NO: 7623
  oligonucleotide probe

SEQ ID NO: 13000 - DNA, 32 bp, Artificial; identical to SEQ ID NO: 7833
  oligonucleotide probe

SEQ ID NO: 13001 - DNA, 32 bp, Artificial; identical to SEQ ID NO: 7833
  oligonucleotide probe

SEQ ID NO: 13002 - DNA, 32 bp, Artificial; identical to SEQ ID NO: 8001
  oligonucleotide probe

SEQ ID NO: 13003 - DNA, 32 bp, Artificial; identical to SEQ ID NO: 8001
  oligonucleotide probe

SEQ ID NO: 13004 - DNA, 32 bp, Artificial; identical to SEQ ID NO: 5218
  oligonucleotide probe

SEQ ID NO: 13005 - DNA, 32 bp, Artificial; identical to SEQ ID NO: 5218
  oligonucleotide probe

SEQ ID NO: 13006 - DNA, 32 bp, Artificial; identical to SEQ ID NO: 5136
  oligonucleotide probe

SEQ ID NO: 13007 - DNA, 32 bp, Artificial; identical to SEQ ID NO: 5136
  oligonucleotide probe

SEQ ID NO: 13008 - DNA, 32 bp, Artificial; identical to SEQ ID NO: 7596
  oligonucleotide probe

SEQ ID NO: 13009 - DNA, 32 bp, Artificial; identical to SEQ ID NO: 7596
  oligonucleotide probe

SEQ ID NO: 13010 - DNA, 32 bp, Artificial; identical to SEQ ID NO: 7597
  oligonucleotide probe

SEQ ID NO: 13011 - DNA, 32 bp, Artificial; identical to SEQ ID NO: 7597
  oligonucleotide probe

SEQ ID NO: 13012 - DNA, 32 bp, Artificial; identical to SEQ ID NO: 7598
  oligonucleotide probe

SEQ ID NO: 13013 - DNA, 32 bp, Artificial; identical to SEQ ID NO: 7598
  oligonucleotide probe

SEQ ID NO: 13014 - DNA, 32 bp, Artificial; identical to SEQ ID NO: 5171
  oligonucleotide probe

SEQ ID NO: 13015 - DNA, 32 bp, Artificial; identical to SEQ ID NO: 5171
  oligonucleotide probe

SEQ ID NO: 13016 - DNA, 32 bp, Artificial; identical to SEQ ID NO: 7598
  oligonucleotide probe

SEQ ID NO: 13017 - DNA, 32 bp, Artificial; identical to SEQ ID NO: 7598
  oligonucleotide probe

SEQ ID NO: 13018 - DNA, 32 bp, Artificial; identical to SEQ ID NO: 7840
  oligonucleotide probe

SEQ ID NO: 13019 - DNA, 32 bp, Artificial; identical to SEQ ID NO: 7840
  oligonucleotide probe

SEQ ID NO: 13020 - DNA, 32 bp, Artificial; identical to SEQ ID NO: 7676
  oligonucleotide probe

SEQ ID NO: 13021 - DNA, 32 bp, Artificial; identical to SEQ ID NO: 7676
  oligonucleotide probe

SEQ ID NO: 13022 - DNA, 32 bp, Artificial; identical to SEQ ID NO: 5140
  oligonucleotide probe

SEQ ID NO: 13023 - DNA, 32 bp, Artificial; identical to SEQ ID NO: 5140
  oligonucleotide probe

SEQ ID NO: 13024 - DNA, 32 bp, Artificial; identical to SEQ ID NO: 7676
  oligonucleotide probe

SEQ ID NO: 13025 - DNA, 32 bp, Artificial; identical to SEQ ID NO: 7676
  oligonucleotide probe

SEQ ID NO: 13026 - DNA, 32 bp, Artificial; identical to SEQ ID NO: 8244
  oligonucleotide probe

SEQ ID NO: 13027 - DNA, 32 bp, Artificial; identical to SEQ ID NO: 8244
  oligonucleotide probe

SEQ ID NO: 13028 - DNA, 32 bp, Artificial; identical to SEQ ID NO: 5218
  oligonucleotide probe

SEQ ID NO: 13029 - DNA, 32 bp, Artificial; identical to SEQ ID NO: 5218
  oligonucleotide probe

SEQ ID NO: 13030 - DNA, 32 bp, Artificial; identical to SEQ ID NO: 7947
  oligonucleotide probe

SEQ ID NO: 13031 - DNA, 32 bp, Artificial; identical to SEQ ID NO: 7947
  oligonucleotide probe

SEQ ID NO: 13032 - DNA, 32 bp, Artificial; identical to SEQ ID NO: 5136
  oligonucleotide probe

SEQ ID NO: 13033 - DNA, 32 bp, Artificial; identical to SEQ ID NO: 5136
  oligonucleotide probe

SEQ ID NO: 13034 - DNA, 32 bp, Artificial; identical to SEQ ID NO: 5171
  oligonucleotide probe

SEQ ID NO: 13035 - DNA, 32 bp, Artificial; identical to SEQ ID NO: 5171
  oligonucleotide probe

SEQ ID NO: 13036 - DNA, 32 bp, Artificial; identical to SEQ ID NO: 7597
  oligonucleotide probe

SEQ ID NO: 13037 - DNA, 32 bp, Artificial; identical to SEQ ID NO: 7597
  oligonucleotide probe

SEQ ID NO: 13038 - DNA, 32 bp, Artificial; identical to SEQ ID NO: 7905
  oligonucleotide probe

SEQ ID NO: 13039 - DNA, 32 bp, Artificial; identical to SEQ ID NO: 7905
  oligonucleotide probe

SEQ ID NO: 13040 - DNA, 32 bp, Artificial; identical to SEQ ID NO: 5239
  oligonucleotide probe

SEQ ID NO: 13041 - DNA, 32 bp, Artificial; identical to SEQ ID NO: 5239
  oligonucleotide probe

SEQ ID NO: 13042 - DNA, 32 bp, Artificial; identical to SEQ ID NO: 5231
  oligonucleotide probe

SEQ ID NO: 13043 - DNA, 32 bp, Artificial; identical to SEQ ID NO: 5231
  oligonucleotide probe

SEQ ID NO: 13044 - DNA, 32 bp, Artificial; identical to SEQ ID NO: 8244
  oligonucleotide probe

SEQ ID NO: 13045 - DNA, 32 bp, Artificial; identical to SEQ ID NO: 8244
  oligonucleotide probe

SEQ ID NO: 13046 - DNA, 32 bp, Artificial; identical to SEQ ID NO: 7594
  oligonucleotide probe

SEQ ID NO: 13047 - DNA, 32 bp, Artificial; identical to SEQ ID NO: 7594
  oligonucleotide probe

SEQ ID NO: 13048 - DNA, 32 bp, Artificial; identical to SEQ ID NO: 7783
  oligonucleotide probe

SEQ ID NO: 13049 - DNA, 32 bp, Artificial; identical to SEQ ID NO: 7783
  oligonucleotide probe

SEQ ID NO: 13050 - DNA, 32 bp, Artificial; identical to SEQ ID NO: 8467
  oligonucleotide probe

SEQ ID NO: 13051 - DNA, 32 bp, Artificial; identical to SEQ ID NO: 8467
  oligonucleotide probe

SEQ ID NO: 13052 - DNA, 32 bp, Artificial; identical to SEQ ID NO: 7659
  oligonucleotide probe

SEQ ID NO: 13053 - DNA, 32 bp, Artificial; identical to SEQ ID NO: 7659
  oligonucleotide probe

SEQ ID NO: 13054 - DNA, 32 bp, Artificial; identical to SEQ ID NO: 7605
  oligonucleotide probe

SEQ ID NO: 13055 - DNA, 32 bp, Artificial; identical to SEQ ID NO: 7605
  oligonucleotide probe

SEQ ID NO: 13056 - DNA, 32 bp, Artificial; identical to SEQ ID NO: 7644
  oligonucleotide probe

SEQ ID NO: 13057 - DNA, 32 bp, Artificial; identical to SEQ ID NO: 7644
  oligonucleotide probe

SEQ ID NO: 13058 - DNA, 32 bp, Artificial; identical to SEQ ID NO: 5141
  oligonucleotide probe

SEQ ID NO: 13059 - DNA, 32 bp, Artificial; identical to SEQ ID NO: 5141
  oligonucleotide probe

SEQ ID NO: 13060 - DNA, 32 bp, Artificial; identical to SEQ ID NO: 7690
  oligonucleotide probe

SEQ ID NO: 13061 - DNA, 32 bp, Artificial; identical to SEQ ID NO: 7690
  oligonucleotide probe

SEQ ID NO: 13062 - DNA, 32 bp, Artificial; identical to SEQ ID NO: 7694
  oligonucleotide probe

SEQ ID NO: 13063 - DNA, 32 bp, Artificial; identical to SEQ ID NO: 7694
  oligonucleotide probe

SEQ ID NO: 13064 - DNA, 32 bp, Artificial; identical to SEQ ID NO: 5134
  oligonucleotide probe

SEQ ID NO: 13065 - DNA, 32 bp, Artificial; identical to SEQ ID NO: 5134
  oligonucleotide probe

SEQ ID NO: 13066 - DNA, 32 bp, Artificial; identical to SEQ ID NO: 5163
  oligonucleotide probe

SEQ ID NO: 13067 - DNA, 32 bp, Artificial; identical to SEQ ID NO: 5163
  oligonucleotide probe

SEQ ID NO: 13068 - DNA, 32 bp, Artificial; identical to SEQ ID NO: 7655
  oligonucleotide probe

SEQ ID NO: 13069 - DNA, 32 bp, Artificial; identical to SEQ ID NO: 7655
  oligonucleotide probe

SEQ ID NO: 13070 - DNA, 32 bp, Artificial; identical to SEQ ID NO: 5231
  oligonucleotide probe

SEQ ID NO: 13071 - DNA, 32 bp, Artificial; identical to SEQ ID NO: 5231
  oligonucleotide probe

SEQ ID NO: 13072 - DNA, 32 bp, Artificial; identical to SEQ ID NO: 5416
  oligonucleotide probe

SEQ ID NO: 13073 - DNA, 32 bp, Artificial; identical to SEQ ID NO: 5416
  oligonucleotide probe

SEQ ID NO: 13074 - DNA, 32 bp, Artificial; identical to SEQ ID NO: 7644
  oligonucleotide probe

SEQ ID NO: 13075 - DNA, 32 bp, Artificial; identical to SEQ ID NO: 7644
  oligonucleotide probe

SEQ ID NO: 13076 - DNA, 32 bp, Artificial; identical to SEQ ID NO: 7863
  oligonucleotide probe

SEQ ID NO: 13077 - DNA, 32 bp, Artificial; identical to SEQ ID NO: 7863
  oligonucleotide probe

SEQ ID NO: 13078 - DNA, 32 bp, Artificial; identical to SEQ ID NO: 7834
  oligonucleotide probe

SEQ ID NO: 13079 - DNA, 32 bp, Artificial; identical to SEQ ID NO: 7834
  oligonucleotide probe

SEQ ID NO: 13080 - DNA, 32 bp, Artificial; identical to SEQ ID NO: 7673
  oligonucleotide probe

SEQ ID NO: 13081 - DNA, 32 bp, Artificial; identical to SEQ ID NO: 7673
  oligonucleotide probe

SEQ ID NO: 13082 - DNA, 32 bp, Artificial; identical to SEQ ID NO: 5160
  oligonucleotide probe

SEQ ID NO: 13083 - DNA, 32 bp, Artificial; identical to SEQ ID NO: 5160
  oligonucleotide probe

SEQ ID NO: 13084 - DNA, 32 bp, Artificial; identical to SEQ ID NO: 5159
  oligonucleotide probe

SEQ ID NO: 13085 - DNA, 32 bp, Artificial; identical to SEQ ID NO: 5159
  oligonucleotide probe

SEQ ID NO: 13086 - DNA, 32 bp, Artificial; identical to SEQ ID NO: 5160
  oligonucleotide probe

SEQ ID NO: 13087 - DNA, 32 bp, Artificial; identical to SEQ ID NO: 5160
  oligonucleotide probe

SEQ ID NO: 13088 - DNA, 32 bp, Artificial; identical to SEQ ID NO: 5399
  oligonucleotide probe

SEQ ID NO: 13089 - DNA, 32 bp, Artificial; identical to SEQ ID NO: 5399
  oligonucleotide probe

SEQ ID NO: 13090 - DNA, 32 bp, Artificial; identical to SEQ ID NO: 7659
  oligonucleotide probe

SEQ ID NO: 13091 - DNA, 32 bp, Artificial; identical to SEQ ID NO: 7659
  oligonucleotide probe

SEQ ID NO: 13092 - DNA, 32 bp, Artificial; identical to SEQ ID NO: 5163
  oligonucleotide probe

SEQ ID NO: 13093 - DNA, 32 bp, Artificial; identical to SEQ ID NO: 5163
  oligonucleotide probe

SEQ ID NO: 13094 - DNA, 32 bp, Artificial; identical to SEQ ID NO: 8834
  oligonucleotide probe

SEQ ID NO: 13095 - DNA, 32 bp, Artificial; identical to SEQ ID NO: 8834
  oligonucleotide probe

SEQ ID NO: 13096 - DNA, 32 bp, Artificial; identical to SEQ ID NO: 7597
  oligonucleotide probe

SEQ ID NO: 13097 - DNA, 32 bp, Artificial; identical to SEQ ID NO: 7597
  oligonucleotide probe

SEQ ID NO: 13098 - DNA, 32 bp, Artificial; identical to SEQ ID NO: 7841
  oligonucleotide probe

SEQ ID NO: 13099 - DNA, 32 bp, Artificial; identical to SEQ ID NO: 7841
  oligonucleotide probe

SEQ ID NO: 13100 - DNA, 32 bp, Artificial; identical to SEQ ID NO: 7838
  oligonucleotide probe

SEQ ID NO: 13101 - DNA, 32 bp, Artificial; identical to SEQ ID NO: 7838
  oligonucleotide probe

SEQ ID NO: 13102 - DNA, 32 bp, Artificial; identical to SEQ ID NO: 7694
  oligonucleotide probe

SEQ ID NO: 13103 - DNA, 32 bp, Artificial; identical to SEQ ID NO: 7694
  oligonucleotide probe

SEQ ID NO: 13104 - DNA, 32 bp, Artificial; identical to SEQ ID NO: 5134
  oligonucleotide probe

SEQ ID NO: 13105 - DNA, 32 bp, Artificial; identical to SEQ ID NO: 5134
  oligonucleotide probe

SEQ ID NO: 13106 - DNA, 32 bp, Artificial; identical to SEQ ID NO: 7605
  oligonucleotide probe

SEQ ID NO: 13107 - DNA, 32 bp, Artificial; identical to SEQ ID NO: 7605
  oligonucleotide probe

SEQ ID NO: 13108 - DNA, 32 bp, Artificial; identical to SEQ ID NO: 7598
  oligonucleotide probe

SEQ ID NO: 13109 - DNA, 32 bp, Artificial; identical to SEQ ID NO: 7598
  oligonucleotide probe

SEQ ID NO: 13110 - DNA, 32 bp, Artificial; identical to SEQ ID NO: 5159
  oligonucleotide probe

SEQ ID NO: 13111 - DNA, 32 bp, Artificial; identical to SEQ ID NO: 5159
  oligonucleotide probe

SEQ ID NO: 13112 - DNA, 32 bp, Artificial; identical to SEQ ID NO: 7594
  oligonucleotide probe

SEQ ID NO: 13113 - DNA, 32 bp, Artificial; identical to SEQ ID NO: 7594
  oligonucleotide probe

SEQ ID NO: 13114 - DNA, 32 bp, Artificial; identical to SEQ ID NO: 5171
  oligonucleotide probe

SEQ ID NO: 13115 - DNA, 32 bp, Artificial; identical to SEQ ID NO: 5171
  oligonucleotide probe

SEQ ID NO: 13116 - DNA, 32 bp, Artificial; identical to SEQ ID NO: 8001
  oligonucleotide probe

SEQ ID NO: 13117 - DNA, 32 bp, Artificial; identical to SEQ ID NO: 8001
  oligonucleotide probe

SEQ ID NO: 13118 - DNA, 32 bp, Artificial; identical to SEQ ID NO: 7694
  oligonucleotide probe

SEQ ID NO: 13119 - DNA, 32 bp, Artificial; identical to SEQ ID NO: 7694
  oligonucleotide probe

SEQ ID NO: 13120 - DNA, 32 bp, Artificial; identical to SEQ ID NO: 5140
  oligonucleotide probe

SEQ ID NO: 13121 - DNA, 32 bp, Artificial; identical to SEQ ID NO: 5140
  oligonucleotide probe

SEQ ID NO: 13122 - DNA, 32 bp, Artificial; identical to SEQ ID NO: 7831
  oligonucleotide probe

SEQ ID NO: 13123 - DNA, 32 bp, Artificial; identical to SEQ ID NO: 7831
  oligonucleotide probe

SEQ ID NO: 13124 - DNA, 32 bp, Artificial; identical to SEQ ID NO: 5141
  oligonucleotide probe

SEQ ID NO: 13125 - DNA, 32 bp, Artificial; identical to SEQ ID NO: 5141
  oligonucleotide probe

SEQ ID NO: 13126 - DNA, 32 bp, Artificial; identical to SEQ ID NO: 5163
  oligonucleotide probe

SEQ ID NO: 13127 - DNA, 32 bp, Artificial; identical to SEQ ID NO: 5163
  oligonucleotide probe

SEQ ID NO: 13128 - DNA, 32 bp, Artificial; identical to SEQ ID NO: 7596
  oligonucleotide probe

SEQ ID NO: 13129 - DNA, 32 bp, Artificial; identical to SEQ ID NO: 7596
  oligonucleotide probe

SEQ ID NO: 13130 - DNA, 32 bp, Artificial; identical to SEQ ID NO: 5185
  oligonucleotide probe

SEQ ID NO: 13131 - DNA, 32 bp, Artificial; identical to SEQ ID NO: 5185
  oligonucleotide probe

SEQ ID NO: 13132 - DNA, 32 bp, Artificial; identical to SEQ ID NO: 8442
  oligonucleotide probe

SEQ ID NO: 13133 - DNA, 32 bp, Artificial; identical to SEQ ID NO: 8442
  oligonucleotide probe

SEQ ID NO: 13134 - DNA, 32 bp, Artificial; identical to SEQ ID NO: 8247
  oligonucleotide probe

SEQ ID NO: 13135 - DNA, 32 bp, Artificial; identical to SEQ ID NO: 8247
  oligonucleotide probe

SEQ ID NO: 13136 - DNA, 32 bp, Artificial; identical to SEQ ID NO: 7673
  oligonucleotide probe

SEQ ID NO: 13137 - DNA, 32 bp, Artificial; identical to SEQ ID NO: 7673
  oligonucleotide probe

SEQ ID NO: 13138 - DNA, 32 bp, Artificial; identical to SEQ ID NO: 7905
  oligonucleotide probe

SEQ ID NO: 13139 - DNA, 32 bp, Artificial; identical to SEQ ID NO: 7905
  oligonucleotide probe

SEQ ID NO: 13140 - DNA, 32 bp, Artificial; identical to SEQ ID NO: 7662
  oligonucleotide probe

SEQ ID NO: 13141 - DNA, 32 bp, Artificial; identical to SEQ ID NO: 7662
  oligonucleotide probe

SEQ ID NO: 13142 - DNA, 32 bp, Artificial; identical to SEQ ID NO: 7690
  oligonucleotide probe

SEQ ID NO: 13143 - DNA, 32 bp, Artificial; identical to SEQ ID NO: 7690
  oligonucleotide probe

SEQ ID NO: 13144 - DNA, 32 bp, Artificial; identical to SEQ ID NO: 5160
  oligonucleotide probe

SEQ ID NO: 13145 - DNA, 32 bp, Artificial; identical to SEQ ID NO: 5160
  oligonucleotide probe

SEQ ID NO: 13146 - DNA, 32 bp, Artificial; identical to SEQ ID NO: 7690
  oligonucleotide probe

SEQ ID NO: 13147 - DNA, 32 bp, Artificial; identical to SEQ ID NO: 7690
  oligonucleotide probe

SEQ ID NO: 13148 - DNA, 32 bp, Artificial; identical to SEQ ID NO: 5223
  oligonucleotide probe

SEQ ID NO: 13149 - DNA, 32 bp, Artificial; identical to SEQ ID NO: 5223
  oligonucleotide probe

SEQ ID NO: 13150 - DNA, 32 bp, Artificial; identical to SEQ ID NO: 5185
  oligonucleotide probe

SEQ ID NO: 13151 - DNA, 32 bp, Artificial; identical to SEQ ID NO: 5185
  oligonucleotide probe

SEQ ID NO: 13152 - DNA, 32 bp, Artificial; identical to SEQ ID NO: 5217
  oligonucleotide probe

SEQ ID NO: 13153 - DNA, 32 bp, Artificial; identical to SEQ ID NO: 5217
  oligonucleotide probe

SEQ ID NO: 13154 - DNA, 32 bp, Artificial; identical to SEQ ID NO: 5231
  oligonucleotide probe

SEQ ID NO: 13155 - DNA, 32 bp, Artificial; identical to SEQ ID NO: 5231
  oligonucleotide probe

SEQ ID NO: 13156 - DNA, 32 bp, Artificial; identical to SEQ ID NO: 7655
  oligonucleotide probe

SEQ ID NO: 13157 - DNA, 32 bp, Artificial; identical to SEQ ID NO: 7655
  oligonucleotide probe

SEQ ID NO: 13158 - DNA, 32 bp, Artificial; identical to SEQ ID NO: 5171
  oligonucleotide probe

SEQ ID NO: 13159 - DNA, 32 bp, Artificial; identical to SEQ ID NO: 5171
  oligonucleotide probe

SEQ ID NO: 13160 - DNA, 32 bp, Artificial; identical to SEQ ID NO: 5134
  oligonucleotide probe

SEQ ID NO: 13161 - DNA, 32 bp, Artificial; identical to SEQ ID NO: 5134
  oligonucleotide probe

SEQ ID NO: 13162 - DNA, 32 bp, Artificial; identical to SEQ ID NO: 7812
  oligonucleotide probe

SEQ ID NO: 13163 - DNA, 32 bp, Artificial; identical to SEQ ID NO: 7812
  oligonucleotide probe

SEQ ID NO: 13164 - DNA, 32 bp, Artificial; identical to SEQ ID NO: 5159
  oligonucleotide probe

SEQ ID NO: 13165 - DNA, 32 bp, Artificial; identical to SEQ ID NO: 5159
  oligonucleotide probe

SEQ ID NO: 13166 - DNA, 32 bp, Artificial; identical to SEQ ID NO: 7598
  oligonucleotide probe

SEQ ID NO: 13167 - DNA, 32 bp, Artificial; identical to SEQ ID NO: 7598
  oligonucleotide probe

SEQ ID NO: 13168 - DNA, 32 bp, Artificial; identical to SEQ ID NO: 7905
  oligonucleotide probe

SEQ ID NO: 13169 - DNA, 32 bp, Artificial; identical to SEQ ID NO: 7905
  oligonucleotide probe

SEQ ID NO: 13170 - DNA, 32 bp, Artificial; identical to SEQ ID NO: 7835
  oligonucleotide probe

SEQ ID NO: 13171 - DNA, 32 bp, Artificial; identical to SEQ ID NO: 7835
  oligonucleotide probe

SEQ ID NO: 13172 - DNA, 32 bp, Artificial; identical to SEQ ID NO: 5171
  oligonucleotide probe

SEQ ID NO: 13173 - DNA, 32 bp, Artificial; identical to SEQ ID NO: 5171
  oligonucleotide probe

SEQ ID NO: 13174 - DNA, 32 bp, Artificial; identical to SEQ ID NO: 8247
  oligonucleotide probe

SEQ ID NO: 13175 - DNA, 32 bp, Artificial; identical to SEQ ID NO: 8247
  oligonucleotide probe

SEQ ID NO: 13176 - DNA, 32 bp, Artificial; identical to SEQ ID NO: 8868
  oligonucleotide probe

SEQ ID NO: 13177 - DNA, 32 bp, Artificial; identical to SEQ ID NO: 8868
  oligonucleotide probe

SEQ ID NO: 13178 - DNA, 32 bp, Artificial; identical to SEQ ID NO: 5134
  oligonucleotide probe

SEQ ID NO: 13179 - DNA, 32 bp, Artificial; identical to SEQ ID NO: 5134
  oligonucleotide probe

SEQ ID NO: 13180 - DNA, 32 bp, Artificial; identical to SEQ ID NO: 7690
  oligonucleotide probe

SEQ ID NO: 13181 - DNA, 32 bp, Artificial; identical to SEQ ID NO: 7690
  oligonucleotide probe

SEQ ID NO: 13182 - DNA, 32 bp, Artificial; identical to SEQ ID NO: 5159
  oligonucleotide probe

SEQ ID NO: 13183 - DNA, 32 bp, Artificial; identical to SEQ ID NO: 5159
  oligonucleotide probe

SEQ ID NO: 13184 - DNA, 32 bp, Artificial; identical to SEQ ID NO: 5239
  oligonucleotide probe

SEQ ID NO: 13185 - DNA, 32 bp, Artificial; identical to SEQ ID NO: 5239
  oligonucleotide probe

SEQ ID NO: 13186 - DNA, 32 bp, Artificial; identical to SEQ ID NO: 7855
  oligonucleotide probe

SEQ ID NO: 13187 - DNA, 32 bp, Artificial; identical to SEQ ID NO: 7855
  oligonucleotide probe

SEQ ID NO: 13188 - DNA, 32 bp, Artificial; identical to SEQ ID NO: 8240
  oligonucleotide probe

SEQ ID NO: 13189 - DNA, 32 bp, Artificial; identical to SEQ ID NO: 8240
  oligonucleotide probe

SEQ ID NO: 13190 - DNA, 32 bp, Artificial; identical to SEQ ID NO: 7690
  oligonucleotide probe

SEQ ID NO: 13191 - DNA, 32 bp, Artificial; identical to SEQ ID NO: 7690
  oligonucleotide probe

SEQ ID NO: 13192 - DNA, 32 bp, Artificial; identical to SEQ ID NO: 5163
  oligonucleotide probe

SEQ ID NO: 13193 - DNA, 32 bp, Artificial; identical to SEQ ID NO: 5163
  oligonucleotide probe

SEQ ID NO: 13194 - DNA, 32 bp, Artificial; identical to SEQ ID NO: 7624
  oligonucleotide probe

SEQ ID NO: 13195 - DNA, 32 bp, Artificial; identical to SEQ ID NO: 7624
  oligonucleotide probe

SEQ ID NO: 13196 - DNA, 32 bp, Artificial; identical to SEQ ID NO: 5141
  oligonucleotide probe

SEQ ID NO: 13197 - DNA, 32 bp, Artificial; identical to SEQ ID NO: 5141
  oligonucleotide probe

SEQ ID NO: 13198 - DNA, 32 bp, Artificial; identical to SEQ ID NO: 7673
  oligonucleotide probe

SEQ ID NO: 13199 - DNA, 32 bp, Artificial; identical to SEQ ID NO: 7673
  oligonucleotide probe

SEQ ID NO: 13200 - DNA, 32 bp, Artificial; identical to SEQ ID NO: 7673
  oligonucleotide probe

SEQ ID NO: 13201 - DNA, 32 bp, Artificial; identical to SEQ ID NO: 7673
  oligonucleotide probe

SEQ ID NO: 13202 - DNA, 32 bp, Artificial; identical to SEQ ID NO: 5185
  oligonucleotide probe

SEQ ID NO: 13203 - DNA, 32 bp, Artificial; identical to SEQ ID NO: 5185
  oligonucleotide probe

SEQ ID NO: 13204 - DNA, 32 bp, Artificial; identical to SEQ ID NO: 7690
  oligonucleotide probe

SEQ ID NO: 13205 - DNA, 32 bp, Artificial; identical to SEQ ID NO: 7690
  oligonucleotide probe

SEQ ID NO: 13206 - DNA, 32 bp, Artificial; identical to SEQ ID NO: 7866
  oligonucleotide probe

SEQ ID NO: 13207 - DNA, 32 bp, Artificial; identical to SEQ ID NO: 7866
  oligonucleotide probe

SEQ ID NO: 13208 - DNA, 32 bp, Artificial; identical to SEQ ID NO: 5160
  oligonucleotide probe

SEQ ID NO: 13209 - DNA, 32 bp, Artificial; identical to SEQ ID NO: 5160
  oligonucleotide probe

SEQ ID NO: 13210 - DNA, 32 bp, Artificial; identical to SEQ ID NO: 7605
  oligonucleotide probe

SEQ ID NO: 13211 - DNA, 32 bp, Artificial; identical to SEQ ID NO: 7605
  oligonucleotide probe

SEQ ID NO: 13212 - DNA, 32 bp, Artificial; identical to SEQ ID NO: 7662
  oligonucleotide probe

SEQ ID NO: 13213 - DNA, 32 bp, Artificial; identical to SEQ ID NO: 7662
  oligonucleotide probe

SEQ ID NO: 13214 - DNA, 32 bp, Artificial; identical to SEQ ID NO: 7947
  oligonucleotide probe

SEQ ID NO: 13215 - DNA, 32 bp, Artificial; identical to SEQ ID NO: 7947
  oligonucleotide probe

SEQ ID NO: 13216 - DNA, 32 bp, Artificial; identical to SEQ ID NO: 7831
  oligonucleotide probe

SEQ ID NO: 13217 - DNA, 32 bp, Artificial; identical to SEQ ID NO: 7831
  oligonucleotide probe

SEQ ID NO: 13218 - DNA, 32 bp, Artificial; identical to SEQ ID NO: 5140
  oligonucleotide probe

SEQ ID NO: 13219 - DNA, 32 bp, Artificial; identical to SEQ ID NO: 5140
  oligonucleotide probe

SEQ ID NO: 13220 - DNA, 32 bp, Artificial; identical to SEQ ID NO: 7838
  oligonucleotide probe

SEQ ID NO: 13221 - DNA, 32 bp, Artificial; identical to SEQ ID NO: 7838
  oligonucleotide probe

SEQ ID NO: 13222 - DNA, 32 bp, Artificial; identical to SEQ ID NO: 7655
  oligonucleotide probe

SEQ ID NO: 13223 - DNA, 32 bp, Artificial; identical to SEQ ID NO: 7655
  oligonucleotide probe

SEQ ID NO: 13224 - DNA, 32 bp, Artificial; identical to SEQ ID NO: 8467
  oligonucleotide probe

SEQ ID NO: 13225 - DNA, 32 bp, Artificial; identical to SEQ ID NO: 8467
  oligonucleotide probe

SEQ ID NO: 13226 - DNA, 32 bp, Artificial; identical to SEQ ID NO: 7694
  oligonucleotide probe

SEQ ID NO: 13227 - DNA, 32 bp, Artificial; identical to SEQ ID NO: 7694
  oligonucleotide probe

SEQ ID NO: 13228 - DNA, 32 bp, Artificial; identical to SEQ ID NO: 8047
  oligonucleotide probe

SEQ ID NO: 13229 - DNA, 32 bp, Artificial; identical to SEQ ID NO: 8047
  oligonucleotide probe

SEQ ID NO: 13230 - DNA, 32 bp, Artificial; identical to SEQ ID NO: 5160
  oligonucleotide probe

SEQ ID NO: 13231 - DNA, 32 bp, Artificial; identical to SEQ ID NO: 5160
  oligonucleotide probe

SEQ ID NO: 13232 - DNA, 32 bp, Artificial; identical to SEQ ID NO: 7783
  oligonucleotide probe

SEQ ID NO: 13233 - DNA, 32 bp, Artificial; identical to SEQ ID NO: 7783
  oligonucleotide probe

SEQ ID NO: 13234 - DNA, 32 bp, Artificial; identical to SEQ ID NO: 7623
  oligonucleotide probe

SEQ ID NO: 13235 - DNA, 32 bp, Artificial; identical to SEQ ID NO: 7623
  oligonucleotide probe

SEQ ID NO: 13236 - DNA, 32 bp, Artificial; identical to SEQ ID NO: 5141
  oligonucleotide probe

SEQ ID NO: 13237 - DNA, 32 bp, Artificial; identical to SEQ ID NO: 5141
  oligonucleotide probe

SEQ ID NO: 13238 - DNA, 32 bp, Artificial; identical to SEQ ID NO: 7947
  oligonucleotide probe

SEQ ID NO: 13239 - DNA, 32 bp, Artificial; identical to SEQ ID NO: 7947
  oligonucleotide probe

SEQ ID NO: 13240 - DNA, 32 bp, Artificial; identical to SEQ ID NO: 7673
  oligonucleotide probe

SEQ ID NO: 13241 - DNA, 32 bp, Artificial; identical to SEQ ID NO: 7673
  oligonucleotide probe

SEQ ID NO: 13242 - DNA, 32 bp, Artificial; identical to SEQ ID NO: 7659
  oligonucleotide probe

SEQ ID NO: 13243 - DNA, 32 bp, Artificial; identical to SEQ ID NO: 7659
  oligonucleotide probe

SEQ ID NO: 13244 - DNA, 32 bp, Artificial; identical to SEQ ID NO: 5171
  oligonucleotide probe

SEQ ID NO: 13245 - DNA, 32 bp, Artificial; identical to SEQ ID NO: 5171
  oligonucleotide probe

SEQ ID NO: 13246 - DNA, 32 bp, Artificial; identical to SEQ ID NO: 5159
  oligonucleotide probe

SEQ ID NO: 13247 - DNA, 32 bp, Artificial; identical to SEQ ID NO: 5159
  oligonucleotide probe

SEQ ID NO: 13248 - DNA, 32 bp, Artificial; identical to SEQ ID NO: 7594
  oligonucleotide probe

SEQ ID NO: 13249 - DNA, 32 bp, Artificial; identical to SEQ ID NO: 7594
  oligonucleotide probe

SEQ ID NO: 13250 - DNA, 32 bp, Artificial; identical to SEQ ID NO: 7662
  oligonucleotide probe

SEQ ID NO: 13251 - DNA, 32 bp, Artificial; identical to SEQ ID NO: 7662
  oligonucleotide probe

SEQ ID NO: 13252 - DNA, 32 bp, Artificial; identical to SEQ ID NO: 7865
  oligonucleotide probe

SEQ ID NO: 13253 - DNA, 32 bp, Artificial; identical to SEQ ID NO: 7865
  oligonucleotide probe

SEQ ID NO: 13254 - DNA, 32 bp, Artificial; identical to SEQ ID NO: 7690
  oligonucleotide probe

SEQ ID NO: 13255 - DNA, 32 bp, Artificial; identical to SEQ ID NO: 7690
  oligonucleotide probe

SEQ ID NO: 13256 - DNA, 32 bp, Artificial; identical to SEQ ID NO: 7835
  oligonucleotide probe

SEQ ID NO: 13257 - DNA, 32 bp, Artificial; identical to SEQ ID NO: 7835
  oligonucleotide probe

SEQ ID NO: 13258 - DNA, 32 bp, Artificial; identical to SEQ ID NO: 8776
  oligonucleotide probe

SEQ ID NO: 13259 - DNA, 32 bp, Artificial; identical to SEQ ID NO: 8777
  oligonucleotide probe

SEQ ID NO: 13260 - DNA, 32 bp, Artificial; identical to SEQ ID NO: 5133
  oligonucleotide probe

SEQ ID NO: 13261 - DNA, 32 bp, Artificial; identical to SEQ ID NO: 5133
  oligonucleotide probe

SEQ ID NO: 13262 - DNA, 32 bp, Artificial; identical to SEQ ID NO: 7853
  oligonucleotide probe

SEQ ID NO: 13263 - DNA, 32 bp, Artificial; identical to SEQ ID NO: 7853
  oligonucleotide probe

SEQ ID NO: 13264 - DNA, 32 bp, Artificial; identical to SEQ ID NO: 7605
  oligonucleotide probe

SEQ ID NO: 13265 - DNA, 32 bp, Artificial; identical to SEQ ID NO: 7605
  oligonucleotide probe

SEQ ID NO: 13266 - DNA, 32 bp, Artificial; identical to SEQ ID NO: 7783
  oligonucleotide probe

SEQ ID NO: 13267 - DNA, 32 bp, Artificial; identical to SEQ ID NO: 7783
  oligonucleotide probe

SEQ ID NO: 13268 - DNA, 32 bp, Artificial; identical to SEQ ID NO: 7662
  oligonucleotide probe

SEQ ID NO: 13269 - DNA, 32 bp, Artificial; identical to SEQ ID NO: 7662
  oligonucleotide probe

SEQ ID NO: 13270 - DNA, 32 bp, Artificial; identical to SEQ ID NO: 5171
  oligonucleotide probe

SEQ ID NO: 13271 - DNA, 32 bp, Artificial; identical to SEQ ID NO: 5171
  oligonucleotide probe

SEQ ID NO: 13272 - DNA, 32 bp, Artificial; identical to SEQ ID NO: 5185
  oligonucleotide probe

SEQ ID NO: 13273 - DNA, 32 bp, Artificial; identical to SEQ ID NO: 5185
  oligonucleotide probe

SEQ ID NO: 13274 - DNA, 32 bp, Artificial; identical to SEQ ID NO: 5136
  oligonucleotide probe

SEQ ID NO: 13275 - DNA, 32 bp, Artificial; identical to SEQ ID NO: 5136
  oligonucleotide probe

SEQ ID NO: 13276 - DNA, 32 bp, Artificial; identical to SEQ ID NO: 7673
  oligonucleotide probe

SEQ ID NO: 13277 - DNA, 32 bp, Artificial; identical to SEQ ID NO: 7673
  oligonucleotide probe

SEQ ID NO: 13278 - DNA, 32 bp, Artificial; identical to SEQ ID NO: 7655
  oligonucleotide probe

SEQ ID NO: 13279 - DNA, 32 bp, Artificial; identical to SEQ ID NO: 7655
  oligonucleotide probe

SEQ ID NO: 13280 - DNA, 32 bp, Artificial; identical to SEQ ID NO: 8442
  oligonucleotide probe

SEQ ID NO: 13281 - DNA, 32 bp, Artificial; identical to SEQ ID NO: 8442
  oligonucleotide probe

SEQ ID NO: 13282 - DNA, 32 bp, Artificial; identical to SEQ ID NO: 7783
  oligonucleotide probe

SEQ ID NO: 13283 - DNA, 32 bp, Artificial; identical to SEQ ID NO: 7783
  oligonucleotide probe

SEQ ID NO: 13284 - DNA, 32 bp, Artificial; identical to SEQ ID NO: 7673
  oligonucleotide probe

SEQ ID NO: 13285 - DNA, 32 bp, Artificial; identical to SEQ ID NO: 7673
  oligonucleotide probe

SEQ ID NO: 13286 - DNA, 32 bp, Artificial; identical to SEQ ID NO: 7596
  oligonucleotide probe

SEQ ID NO: 13287 - DNA, 32 bp, Artificial; identical to SEQ ID NO: 7596
  oligonucleotide probe

SEQ ID NO: 13288 - DNA, 32 bp, Artificial; identical to SEQ ID NO: 7841
  oligonucleotide probe

SEQ ID NO: 13289 - DNA, 32 bp, Artificial; identical to SEQ ID NO: 7841
  oligonucleotide probe

SEQ ID NO: 13290 - DNA, 32 bp, Artificial; identical to SEQ ID NO: 5141
  oligonucleotide probe

SEQ ID NO: 13291 - DNA, 32 bp, Artificial; identical to SEQ ID NO: 5141
  oligonucleotide probe

SEQ ID NO: 13292 - DNA, 32 bp, Artificial; identical to SEQ ID NO: 7833
  oligonucleotide probe

SEQ ID NO: 13293 - DNA, 32 bp, Artificial; identical to SEQ ID NO: 7833
  oligonucleotide probe

SEQ ID NO: 13294 - DNA, 32 bp, Artificial; identical to SEQ ID NO: 5171
  oligonucleotide probe

SEQ ID NO: 13295 - DNA, 32 bp, Artificial; identical to SEQ ID NO: 5171
  oligonucleotide probe

SEQ ID NO: 13296 - DNA, 32 bp, Artificial; identical to SEQ ID NO: 7594
  oligonucleotide probe

SEQ ID NO: 13297 - DNA, 32 bp, Artificial; identical to SEQ ID NO: 7594
  oligonucleotide probe

SEQ ID NO: 13298 - DNA, 32 bp, Artificial; identical to SEQ ID NO: 7624
  oligonucleotide probe

SEQ ID NO: 13299 - DNA, 32 bp, Artificial; identical to SEQ ID NO: 7624
  oligonucleotide probe

SEQ ID NO: 13300 - DNA, 32 bp, Artificial; identical to SEQ ID NO: 5223
  oligonucleotide probe

SEQ ID NO: 13301 - DNA, 32 bp, Artificial; identical to SEQ ID NO: 5223
  oligonucleotide probe

SEQ ID NO: 13302 - DNA, 32 bp, Artificial; identical to SEQ ID NO: 5141
  oligonucleotide probe

SEQ ID NO: 13303 - DNA, 32 bp, Artificial; identical to SEQ ID NO: 5141
  oligonucleotide probe

SEQ ID NO: 13304 - DNA, 32 bp, Artificial; identical to SEQ ID NO: 7905
  oligonucleotide probe

SEQ ID NO: 13305 - DNA, 32 bp, Artificial; identical to SEQ ID NO: 7905
  oligonucleotide probe

SEQ ID NO: 13306 - DNA, 32 bp, Artificial; identical to SEQ ID NO: 7605
  oligonucleotide probe

SEQ ID NO: 13307 - DNA, 32 bp, Artificial; identical to SEQ ID NO: 7605
  oligonucleotide probe

SEQ ID NO: 13308 - DNA, 32 bp, Artificial; identical to SEQ ID NO: 7855
  oligonucleotide probe

SEQ ID NO: 13309 - DNA, 32 bp, Artificial; identical to SEQ ID NO: 7855
  oligonucleotide probe

SEQ ID NO: 13310 - DNA, 32 bp, Artificial; identical to SEQ ID NO: 7842
  oligonucleotide probe

SEQ ID NO: 13311 - DNA, 32 bp, Artificial; identical to SEQ ID NO: 7842
  oligonucleotide probe

SEQ ID NO: 13312 - DNA, 32 bp, Artificial; identical to SEQ ID NO: 7840
  oligonucleotide probe

SEQ ID NO: 13313 - DNA, 32 bp, Artificial; identical to SEQ ID NO: 7840
  oligonucleotide probe

SEQ ID NO: 13314 - DNA, 32 bp, Artificial; identical to SEQ ID NO: 5136
  oligonucleotide probe

SEQ ID NO: 13315 - DNA, 32 bp, Artificial; identical to SEQ ID NO: 5136
  oligonucleotide probe

SEQ ID NO: 13316 - DNA, 32 bp, Artificial; identical to SEQ ID NO: 8247
  oligonucleotide probe

SEQ ID NO: 13317 - DNA, 32 bp, Artificial; identical to SEQ ID NO: 8247
  oligonucleotide probe

SEQ ID NO: 13318 - DNA, 32 bp, Artificial; identical to SEQ ID NO: 5239
  oligonucleotide probe

SEQ ID NO: 13319 - DNA, 32 bp, Artificial; identical to SEQ ID NO: 5239
  oligonucleotide probe

SEQ ID NO: 13320 - DNA, 32 bp, Artificial; identical to SEQ ID NO: 5159
  oligonucleotide probe

SEQ ID NO: 13321 - DNA, 32 bp, Artificial; identical to SEQ ID NO: 5159
  oligonucleotide probe

SEQ ID NO: 13322 - DNA, 32 bp, Artificial; identical to SEQ ID NO: 7624
  oligonucleotide probe

SEQ ID NO: 13323 - DNA, 32 bp, Artificial; identical to SEQ ID NO: 7624
  oligonucleotide probe

SEQ ID NO: 13324 - DNA, 32 bp, Artificial; identical to SEQ ID NO: 7673
  oligonucleotide probe

SEQ ID NO: 13325 - DNA, 32 bp, Artificial; identical to SEQ ID NO: 7673
  oligonucleotide probe

SEQ ID NO: 13326 - DNA, 32 bp, Artificial; identical to SEQ ID NO: 5171
  oligonucleotide probe

SEQ ID NO: 13327 - DNA, 32 bp, Artificial; identical to SEQ ID NO: 5171
  oligonucleotide probe

SEQ ID NO: 13328 - DNA, 32 bp, Artificial; identical to SEQ ID NO: 7644
  oligonucleotide probe

SEQ ID NO: 13329 - DNA, 32 bp, Artificial; identical to SEQ ID NO: 7644
  oligonucleotide probe

SEQ ID NO: 13330 - DNA, 32 bp, Artificial; identical to SEQ ID NO: 7841
  oligonucleotide probe

SEQ ID NO: 13331 - DNA, 32 bp, Artificial; identical to SEQ ID NO: 7841
  oligonucleotide probe

SEQ ID NO: 13332 - DNA, 32 bp, Artificial; identical to SEQ ID NO: 8467
  oligonucleotide probe

SEQ ID NO: 13333 - DNA, 32 bp, Artificial; identical to SEQ ID NO: 8467
  oligonucleotide probe

SEQ ID NO: 13334 - DNA, 32 bp, Artificial; identical to SEQ ID NO: 8244
  oligonucleotide probe

SEQ ID NO: 13335 - DNA, 32 bp, Artificial; identical to SEQ ID NO: 8244
  oligonucleotide probe

SEQ ID NO: 13336 - DNA, 32 bp, Artificial; identical to SEQ ID NO: 5134
  oligonucleotide probe

SEQ ID NO: 13337 - DNA, 32 bp, Artificial; identical to SEQ ID NO: 5134
  oligonucleotide probe

SEQ ID NO: 13338 - DNA, 32 bp, Artificial; identical to SEQ ID NO: 5185
  oligonucleotide probe

SEQ ID NO: 13339 - DNA, 32 bp, Artificial; identical to SEQ ID NO: 5185
  oligonucleotide probe

SEQ ID NO: 13340 - DNA, 32 bp, Artificial; identical to SEQ ID NO: 7812
  oligonucleotide probe

SEQ ID NO: 13341 - DNA, 32 bp, Artificial; identical to SEQ ID NO: 7812
  oligonucleotide probe

SEQ ID NO: 13342 - DNA, 32 bp, Artificial; identical to SEQ ID NO: 7690
  oligonucleotide probe

SEQ ID NO: 13343 - DNA, 32 bp, Artificial; identical to SEQ ID NO: 7690
  oligonucleotide probe

SEQ ID NO: 13344 - DNA, 32 bp, Artificial; identical to SEQ ID NO: 5159
  oligonucleotide probe

SEQ ID NO: 13345 - DNA, 32 bp, Artificial; identical to SEQ ID NO: 5159
  oligonucleotide probe

SEQ ID NO: 13346 - DNA, 32 bp, Artificial; identical to SEQ ID NO: 5133
  oligonucleotide probe

SEQ ID NO: 13347 - DNA, 32 bp, Artificial; identical to SEQ ID NO: 5133
  oligonucleotide probe

SEQ ID NO: 13348 - DNA, 32 bp, Artificial; identical to SEQ ID NO: 5171
  oligonucleotide probe

SEQ ID NO: 13349 - DNA, 32 bp, Artificial; identical to SEQ ID NO: 5171
  oligonucleotide probe

SEQ ID NO: 13350 - DNA, 32 bp, Artificial; identical to SEQ ID NO: 7673
  oligonucleotide probe

SEQ ID NO: 13351 - DNA, 32 bp, Artificial; identical to SEQ ID NO: 7673
  oligonucleotide probe

SEQ ID NO: 13352 - DNA, 32 bp, Artificial; identical to SEQ ID NO: 7598
  oligonucleotide probe

SEQ ID NO: 13353 - DNA, 32 bp, Artificial; identical to SEQ ID NO: 7598
  oligonucleotide probe

SEQ ID NO: 13354 - DNA, 32 bp, Artificial; identical to SEQ ID NO: 5140
  oligonucleotide probe

SEQ ID NO: 13355 - DNA, 32 bp, Artificial; identical to SEQ ID NO: 5140
  oligonucleotide probe

SEQ ID NO: 13356 - DNA, 32 bp, Artificial; identical to SEQ ID NO: 8244
  oligonucleotide probe

SEQ ID NO: 13357 - DNA, 32 bp, Artificial; identical to SEQ ID NO: 8244
  oligonucleotide probe

SEQ ID NO: 13358 - DNA, 32 bp, Artificial; identical to SEQ ID NO: 8001
  oligonucleotide probe

SEQ ID NO: 13359 - DNA, 32 bp, Artificial; identical to SEQ ID NO: 8001
  oligonucleotide probe

SEQ ID NO: 13360 - DNA, 32 bp, Artificial; identical to SEQ ID NO: 7673
  oligonucleotide probe

SEQ ID NO: 13361 - DNA, 32 bp, Artificial; identical to SEQ ID NO: 7673
  oligonucleotide probe

SEQ ID NO: 13362 - DNA, 32 bp, Artificial; identical to SEQ ID NO: 8571
  oligonucleotide probe

SEQ ID NO: 13363 - DNA, 32 bp, Artificial; identical to SEQ ID NO: 8571
  oligonucleotide probe

SEQ ID NO: 13364 - DNA, 32 bp, Artificial; identical to SEQ ID NO: 7690
  oligonucleotide probe

SEQ ID NO: 13365 - DNA, 32 bp, Artificial; identical to SEQ ID NO: 7690
  oligonucleotide probe

SEQ ID NO: 13366 - DNA, 32 bp, Artificial; identical to SEQ ID NO: 5231
  oligonucleotide probe

SEQ ID NO: 13367 - DNA, 32 bp, Artificial; identical to SEQ ID NO: 5231
  oligonucleotide probe

SEQ ID NO: 13368 - DNA, 32 bp, Artificial; identical to SEQ ID NO: 7673
  oligonucleotide probe

SEQ ID NO: 13369 - DNA, 32 bp, Artificial; identical to SEQ ID NO: 7673
  oligonucleotide probe

SEQ ID NO: 13370 - DNA, 32 bp, Artificial; identical to SEQ ID NO: 7655
  oligonucleotide probe

SEQ ID NO: 13371 - DNA, 32 bp, Artificial; identical to SEQ ID NO: 7655
  oligonucleotide probe

SEQ ID NO: 13372 - DNA, 32 bp, Artificial; identical to SEQ ID NO: 8240
  oligonucleotide probe

SEQ ID NO: 13373 - DNA, 32 bp, Artificial; identical to SEQ ID NO: 8240
  oligonucleotide probe

SEQ ID NO: 13374 - DNA, 32 bp, Artificial; identical to SEQ ID NO: 7596
  oligonucleotide probe

SEQ ID NO: 13375 - DNA, 32 bp, Artificial; identical to SEQ ID NO: 7596
  oligonucleotide probe

SEQ ID NO: 13376 - DNA, 32 bp, Artificial; identical to SEQ ID NO: 5141
  oligonucleotide probe

SEQ ID NO: 13377 - DNA, 32 bp, Artificial; identical to SEQ ID NO: 5141
  oligonucleotide probe

SEQ ID NO: 13378 - DNA, 32 bp, Artificial; identical to SEQ ID NO: 5163
  oligonucleotide probe

SEQ ID NO: 13379 - DNA, 32 bp, Artificial; identical to SEQ ID NO: 5163
  oligonucleotide probe

SEQ ID NO: 13380 - DNA, 32 bp, Artificial; identical to SEQ ID NO: 7783
  oligonucleotide probe

SEQ ID NO: 13381 - DNA, 32 bp, Artificial; identical to SEQ ID NO: 7783
  oligonucleotide probe

SEQ ID NO: 13382 - DNA, 32 bp, Artificial; identical to SEQ ID NO: 5239
  oligonucleotide probe

SEQ ID NO: 13383 - DNA, 32 bp, Artificial; identical to SEQ ID NO: 5239
  oligonucleotide probe

SEQ ID NO: 13384 - DNA, 32 bp, Artificial; identical to SEQ ID NO: 7812
  oligonucleotide probe

SEQ ID NO: 13385 - DNA, 32 bp, Artificial; identical to SEQ ID NO: 7812
  oligonucleotide probe

SEQ ID NO: 13386 - DNA, 32 bp, Artificial; identical to SEQ ID NO: 7662
  oligonucleotide probe

SEQ ID NO: 13387 - DNA, 32 bp, Artificial; identical to SEQ ID NO: 7662
  oligonucleotide probe

SEQ ID NO: 13388 - DNA, 32 bp, Artificial; identical to SEQ ID NO: 7596
  oligonucleotide probe

SEQ ID NO: 13389 - DNA, 32 bp, Artificial; identical to SEQ ID NO: 7596
  oligonucleotide probe

SEQ ID NO: 13390 - DNA, 32 bp, Artificial; identical to SEQ ID NO: 7623
  oligonucleotide probe

SEQ ID NO: 13391 - DNA, 32 bp, Artificial; identical to SEQ ID NO: 7623
  oligonucleotide probe

SEQ ID NO: 13392 - DNA, 32 bp, Artificial; identical to SEQ ID NO: 7606
  oligonucleotide probe

SEQ ID NO: 13393 - DNA, 32 bp, Artificial; identical to SEQ ID NO: 7606
  oligonucleotide probe

SEQ ID NO: 13394 - DNA, 32 bp, Artificial; identical to SEQ ID NO: 5163
  oligonucleotide probe

SEQ ID NO: 13395 - DNA, 32 bp, Artificial; identical to SEQ ID NO: 5163
  oligonucleotide probe

SEQ ID NO: 13396 - DNA, 32 bp, Artificial; identical to SEQ ID NO: 5185
  oligonucleotide probe

SEQ ID NO: 13397 - DNA, 32 bp, Artificial; identical to SEQ ID NO: 5185
  oligonucleotide probe

SEQ ID NO: 13398 - DNA, 32 bp, Artificial; identical to SEQ ID NO: 7659
  oligonucleotide probe

SEQ ID NO: 13399 - DNA, 32 bp, Artificial; identical to SEQ ID NO: 7659
  oligonucleotide probe

SEQ ID NO: 13400 - DNA, 32 bp, Artificial; identical to SEQ ID NO: 7694
  oligonucleotide probe

SEQ ID NO: 13401 - DNA, 32 bp, Artificial; identical to SEQ ID NO: 7694
  oligonucleotide probe

SEQ ID NO: 13402 - DNA, 32 bp, Artificial; identical to SEQ ID NO: 7783
  oligonucleotide probe

SEQ ID NO: 13403 - DNA, 32 bp, Artificial; identical to SEQ ID NO: 7783
  oligonucleotide probe

SEQ ID NO: 13404 - DNA, 32 bp, Artificial; identical to SEQ ID NO: 7694
  oligonucleotide probe

SEQ ID NO: 13405 - DNA, 32 bp, Artificial; identical to SEQ ID NO: 7694
  oligonucleotide probe

SEQ ID NO: 13406 - DNA, 32 bp, Artificial; identical to SEQ ID NO: 7673
  oligonucleotide probe

SEQ ID NO: 13407 - DNA, 32 bp, Artificial; identical to SEQ ID NO: 7673
  oligonucleotide probe

SEQ ID NO: 13408 - DNA, 32 bp, Artificial; identical to SEQ ID NO: 7597
  oligonucleotide probe

SEQ ID NO: 13409 - DNA, 32 bp, Artificial; identical to SEQ ID NO: 7597
  oligonucleotide probe

SEQ ID NO: 13410 - DNA, 32 bp, Artificial; identical to SEQ ID NO: 7831
  oligonucleotide probe

SEQ ID NO: 13411 - DNA, 32 bp, Artificial; identical to SEQ ID NO: 7831
  oligonucleotide probe

SEQ ID NO: 13412 - DNA, 32 bp, Artificial; identical to SEQ ID NO: 7659
  oligonucleotide probe

SEQ ID NO: 13413 - DNA, 32 bp, Artificial; identical to SEQ ID NO: 7659
  oligonucleotide probe

SEQ ID NO: 13414 - DNA, 32 bp, Artificial; identical to SEQ ID NO: 7863
  oligonucleotide probe

SEQ ID NO: 13415 - DNA, 32 bp, Artificial; identical to SEQ ID NO: 7863
  oligonucleotide probe

SEQ ID NO: 13416 - DNA, 32 bp, Artificial; identical to SEQ ID NO: 7863
  oligonucleotide probe

SEQ ID NO: 13417 - DNA, 32 bp, Artificial; identical to SEQ ID NO: 7863
  oligonucleotide probe

SEQ ID NO: 13418 - DNA, 32 bp, Artificial; identical to SEQ ID NO: 8247
  oligonucleotide probe

SEQ ID NO: 13419 - DNA, 32 bp, Artificial; identical to SEQ ID NO: 8247
  oligonucleotide probe

SEQ ID NO: 13420 - DNA, 32 bp, Artificial; identical to SEQ ID NO: 7659
  oligonucleotide probe

SEQ ID NO: 13421 - DNA, 32 bp, Artificial; identical to SEQ ID NO: 7659
  oligonucleotide probe

SEQ ID NO: 13422 - DNA, 32 bp, Artificial; identical to SEQ ID NO: 5171
  oligonucleotide probe

SEQ ID NO: 13423 - DNA, 32 bp, Artificial; identical to SEQ ID NO: 5171
  oligonucleotide probe

SEQ ID NO: 13424 - DNA, 32 bp, Artificial; identical to SEQ ID NO: 7673
  oligonucleotide probe

SEQ ID NO: 13425 - DNA, 32 bp, Artificial; identical to SEQ ID NO: 7673
  oligonucleotide probe

SEQ ID NO: 13426 - DNA, 32 bp, Artificial; identical to SEQ ID NO: 5141
  oligonucleotide probe

SEQ ID NO: 13427 - DNA, 32 bp, Artificial; identical to SEQ ID NO: 5141
  oligonucleotide probe

SEQ ID NO: 13428 - DNA, 32 bp, Artificial; identical to SEQ ID NO: 5134
  oligonucleotide probe

SEQ ID NO: 13429 - DNA, 32 bp, Artificial; identical to SEQ ID NO: 5134
  oligonucleotide probe

SEQ ID NO: 13430 - DNA, 32 bp, Artificial; identical to SEQ ID NO: 7623
  oligonucleotide probe

SEQ ID NO: 13431 - DNA, 32 bp, Artificial; identical to SEQ ID NO: 7623
  oligonucleotide probe

SEQ ID NO: 13432 - DNA, 32 bp, Artificial; identical to SEQ ID NO: 5163
  oligonucleotide probe

SEQ ID NO: 13433 - DNA, 32 bp, Artificial; identical to SEQ ID NO: 5163
  oligonucleotide probe

SEQ ID NO: 13434 - DNA, 32 bp, Artificial; identical to SEQ ID NO: 5133
  oligonucleotide probe

SEQ ID NO: 13435 - DNA, 32 bp, Artificial; identical to SEQ ID NO: 5133
  oligonucleotide probe

SEQ ID NO: 13436 - DNA, 32 bp, Artificial; identical to SEQ ID NO: 7694
  oligonucleotide probe

SEQ ID NO: 13437 - DNA, 32 bp, Artificial; identical to SEQ ID NO: 7694
  oligonucleotide probe

SEQ ID NO: 13438 - DNA, 32 bp, Artificial; identical to SEQ ID NO: 8001
  oligonucleotide probe

SEQ ID NO: 13439 - DNA, 32 bp, Artificial; identical to SEQ ID NO: 8001
  oligonucleotide probe

SEQ ID NO: 13440 - DNA, 32 bp, Artificial; identical to SEQ ID NO: 7662
  oligonucleotide probe

SEQ ID NO: 13441 - DNA, 32 bp, Artificial; identical to SEQ ID NO: 7662
  oligonucleotide probe

SEQ ID NO: 13442 - DNA, 32 bp, Artificial; identical to SEQ ID NO: 5163
  oligonucleotide probe

SEQ ID NO: 13443 - DNA, 32 bp, Artificial; identical to SEQ ID NO: 5163
  oligonucleotide probe

SEQ ID NO: 13444 - DNA, 32 bp, Artificial; identical to SEQ ID NO: 7948
  oligonucleotide probe

SEQ ID NO: 13445 - DNA, 32 bp, Artificial; identical to SEQ ID NO: 7948
  oligonucleotide probe

SEQ ID NO: 13446 - DNA, 32 bp, Artificial; identical to SEQ ID NO: 5171
  oligonucleotide probe

SEQ ID NO: 13447 - DNA, 32 bp, Artificial; identical to SEQ ID NO: 5171
  oligonucleotide probe

SEQ ID NO: 13448 - DNA, 32 bp, Artificial; identical to SEQ ID NO: 7644
  oligonucleotide probe

SEQ ID NO: 13449 - DNA, 32 bp, Artificial; identical to SEQ ID NO: 7644
  oligonucleotide probe

SEQ ID NO: 13450 - DNA, 32 bp, Artificial; identical to SEQ ID NO: 7834
  oligonucleotide probe

SEQ ID NO: 13451 - DNA, 32 bp, Artificial; identical to SEQ ID NO: 7834
  oligonucleotide probe

SEQ ID NO: 13452 - DNA, 32 bp, Artificial; identical to SEQ ID NO: 7662
  oligonucleotide probe

SEQ ID NO: 13453 - DNA, 32 bp, Artificial; identical to SEQ ID NO: 7662
  oligonucleotide probe

SEQ ID NO: 13454 - DNA, 32 bp, Artificial; identical to SEQ ID NO: 5141
  oligonucleotide probe

SEQ ID NO: 13455 - DNA, 32 bp, Artificial; identical to SEQ ID NO: 5141
  oligonucleotide probe

SEQ ID NO: 13456 - DNA, 32 bp, Artificial; identical to SEQ ID NO: 7659
  oligonucleotide probe

SEQ ID NO: 13457 - DNA, 32 bp, Artificial; identical to SEQ ID NO: 7659
  oligonucleotide probe

SEQ ID NO: 13458 - DNA, 32 bp, Artificial; identical to SEQ ID NO: 7948
  oligonucleotide probe

SEQ ID NO: 13459 - DNA, 32 bp, Artificial; identical to SEQ ID NO: 7948
  oligonucleotide probe

SEQ ID NO: 13460 - DNA, 32 bp, Artificial; identical to SEQ ID NO: 5416
  oligonucleotide probe

SEQ ID NO: 13461 - DNA, 32 bp, Artificial; identical to SEQ ID NO: 5416
  oligonucleotide probe

SEQ ID NO: 13462 - DNA, 32 bp, Artificial; identical to SEQ ID NO: 7594
  oligonucleotide probe

SEQ ID NO: 13463 - DNA, 32 bp, Artificial; identical to SEQ ID NO: 7594
  oligonucleotide probe

SEQ ID NO: 13464 - DNA, 32 bp, Artificial; identical to SEQ ID NO: 5171
  oligonucleotide probe

SEQ ID NO: 13465 - DNA, 32 bp, Artificial; identical to SEQ ID NO: 5171
  oligonucleotide probe

SEQ ID NO: 13466 - DNA, 32 bp, Artificial; identical to SEQ ID NO: 8244
  oligonucleotide probe

SEQ ID NO: 13467 - DNA, 32 bp, Artificial; identical to SEQ ID NO: 8244
  oligonucleotide probe

SEQ ID NO: 13468 - DNA, 32 bp, Artificial; identical to SEQ ID NO: 7905
  oligonucleotide probe

SEQ ID NO: 13469 - DNA, 32 bp, Artificial; identical to SEQ ID NO: 7905
  oligonucleotide probe

SEQ ID NO: 13470 - DNA, 32 bp, Artificial; identical to SEQ ID NO: 7694
  oligonucleotide probe

SEQ ID NO: 13471 - DNA, 32 bp, Artificial; identical to SEQ ID NO: 7694
  oligonucleotide probe

SEQ ID NO: 13472 - DNA, 32 bp, Artificial; identical to SEQ ID NO: 8442
  oligonucleotide probe

SEQ ID NO: 13473 - DNA, 32 bp, Artificial; identical to SEQ ID NO: 8442
  oligonucleotide probe

SEQ ID NO: 13474 - DNA, 32 bp, Artificial; identical to SEQ ID NO: 7690
  oligonucleotide probe

SEQ ID NO: 13475 - DNA, 32 bp, Artificial; identical to SEQ ID NO: 7690
  oligonucleotide probe

SEQ ID NO: 13476 - DNA, 32 bp, Artificial; identical to SEQ ID NO: 7644
  oligonucleotide probe

SEQ ID NO: 13477 - DNA, 32 bp, Artificial; identical to SEQ ID NO: 7644
  oligonucleotide probe

SEQ ID NO: 13478 - DNA, 32 bp, Artificial; identical to SEQ ID NO: 8247
  oligonucleotide probe

SEQ ID NO: 13479 - DNA, 32 bp, Artificial; identical to SEQ ID NO: 8247
  oligonucleotide probe

SEQ ID NO: 13480 - DNA, 32 bp, Artificial; identical to SEQ ID NO: 7831
  oligonucleotide probe

SEQ ID NO: 13481 - DNA, 32 bp, Artificial; identical to SEQ ID NO: 7831
  oligonucleotide probe

SEQ ID NO: 13482 - DNA, 32 bp, Artificial; identical to SEQ ID NO: 5133
  oligonucleotide probe

SEQ ID NO: 13483 - DNA, 32 bp, Artificial; identical to SEQ ID NO: 5133
  oligonucleotide probe

SEQ ID NO: 13484 - DNA, 32 bp, Artificial; identical to SEQ ID NO: 7624
  oligonucleotide probe

SEQ ID NO: 13485 - DNA, 32 bp, Artificial; identical to SEQ ID NO: 7624
  oligonucleotide probe

SEQ ID NO: 13486 - DNA, 32 bp, Artificial; identical to SEQ ID NO: 7644
  oligonucleotide probe

SEQ ID NO: 13487 - DNA, 32 bp, Artificial; identical to SEQ ID NO: 7644
  oligonucleotide probe

SEQ ID NO: 13488 - DNA, 32 bp, Artificial; identical to SEQ ID NO: 5220
  oligonucleotide probe

SEQ ID NO: 13489 - DNA, 32 bp, Artificial; identical to SEQ ID NO: 5220
  oligonucleotide probe

SEQ ID NO: 13490 - DNA, 32 bp, Artificial; identical to SEQ ID NO: 7690
  oligonucleotide probe

SEQ ID NO: 13491 - DNA, 32 bp, Artificial; identical to SEQ ID NO: 7690
  oligonucleotide probe

SEQ ID NO: 13492 - DNA, 32 bp, Artificial; identical to SEQ ID NO: 5185
  oligonucleotide probe

SEQ ID NO: 13493 - DNA, 32 bp, Artificial; identical to SEQ ID NO: 5185
  oligonucleotide probe

SEQ ID NO: 13494 - DNA, 32 bp, Artificial; identical to SEQ ID NO: 7597
  oligonucleotide probe

SEQ ID NO: 13495 - DNA, 32 bp, Artificial; identical to SEQ ID NO: 7597
  oligonucleotide probe

SEQ ID NO: 13496 - DNA, 32 bp, Artificial; identical to SEQ ID NO: 7833
  oligonucleotide probe

SEQ ID NO: 13497 - DNA, 32 bp, Artificial; identical to SEQ ID NO: 7833
  oligonucleotide probe

SEQ ID NO: 13498 - DNA, 32 bp, Artificial; identical to SEQ ID NO: 7606
  oligonucleotide probe

SEQ ID NO: 13499 - DNA, 32 bp, Artificial; identical to SEQ ID NO: 7606
  oligonucleotide probe

SEQ ID NO: 13500 - DNA, 32 bp, Artificial; identical to SEQ ID NO: 5223
  oligonucleotide probe

SEQ ID NO: 13501 - DNA, 32 bp, Artificial; identical to SEQ ID NO: 5223
  oligonucleotide probe

SEQ ID NO: 13502 - DNA, 32 bp, Artificial; identical to SEQ ID NO: 9252
  oligonucleotide probe

SEQ ID NO: 13503 - DNA, 32 bp, Artificial; identical to SEQ ID NO: 9252
  oligonucleotide probe

SEQ ID NO: 13504 - DNA, 32 bp, Artificial; identical to SEQ ID NO: 7863
  oligonucleotide probe

SEQ ID NO: 13505 - DNA, 32 bp, Artificial; identical to SEQ ID NO: 7863
  oligonucleotide probe

SEQ ID NO: 13506 - DNA, 32 bp, Artificial; identical to SEQ ID NO: 5224
  oligonucleotide probe

SEQ ID NO: 13507 - DNA, 32 bp, Artificial; identical to SEQ ID NO: 5224
  oligonucleotide probe

SEQ ID NO: 13508 - DNA, 32 bp, Artificial; identical to SEQ ID NO: 7840
  oligonucleotide probe

SEQ ID NO: 13509 - DNA, 32 bp, Artificial; identical to SEQ ID NO: 7840
  oligonucleotide probe

SEQ ID NO: 13510 - DNA, 32 bp, Artificial; identical to SEQ ID NO: 7644
  oligonucleotide probe

SEQ ID NO: 13511 - DNA, 32 bp, Artificial; identical to SEQ ID NO: 7644
  oligonucleotide probe

SEQ ID NO: 13512 - DNA, 32 bp, Artificial; identical to SEQ ID NO: 5231
  oligonucleotide probe

SEQ ID NO: 13513 - DNA, 32 bp, Artificial; identical to SEQ ID NO: 5231
  oligonucleotide probe

SEQ ID NO: 13514 - DNA, 32 bp, Artificial; identical to SEQ ID NO: 7624
  oligonucleotide probe

SEQ ID NO: 13515 - DNA, 32 bp, Artificial; identical to SEQ ID NO: 7624
  oligonucleotide probe

SEQ ID NO: 13516 - DNA, 32 bp, Artificial; identical to SEQ ID NO: 7831
  oligonucleotide probe

SEQ ID NO: 13517 - DNA, 32 bp, Artificial; identical to SEQ ID NO: 7831
  oligonucleotide probe

SEQ ID NO: 13518 - DNA, 32 bp, Artificial; identical to SEQ ID NO: 7597
  oligonucleotide probe

SEQ ID NO: 13519 - DNA, 32 bp, Artificial; identical to SEQ ID NO: 7597
  oligonucleotide probe

SEQ ID NO: 13520 - DNA, 32 bp, Artificial; identical to SEQ ID NO: 5217
  oligonucleotide probe

SEQ ID NO: 13521 - DNA, 32 bp, Artificial; identical to SEQ ID NO: 5217
  oligonucleotide probe

SEQ ID NO: 13522 - DNA, 32 bp, Artificial; identical to SEQ ID NO: 7624
  oligonucleotide probe

SEQ ID NO: 13523 - DNA, 32 bp, Artificial; identical to SEQ ID NO: 7624
  oligonucleotide probe

SEQ ID NO: 13524 - DNA, 32 bp, Artificial; identical to SEQ ID NO: 7644
  oligonucleotide probe

SEQ ID NO: 13525 - DNA, 32 bp, Artificial; identical to SEQ ID NO: 7644
  oligonucleotide probe

SEQ ID NO: 13526 - DNA, 32 bp, Artificial; identical to SEQ ID NO: 5171
  oligonucleotide probe

SEQ ID NO: 13527 - DNA, 32 bp, Artificial; identical to SEQ ID NO: 5171
  oligonucleotide probe

SEQ ID NO: 13528 - DNA, 32 bp, Artificial; identical to SEQ ID NO: 7783
  oligonucleotide probe

SEQ ID NO: 13529 - DNA, 32 bp, Artificial; identical to SEQ ID NO: 7783
  oligonucleotide probe

SEQ ID NO: 13530 - DNA, 32 bp, Artificial; identical to SEQ ID NO: 8001
  oligonucleotide probe

SEQ ID NO: 13531 - DNA, 32 bp, Artificial; identical to SEQ ID NO: 8001
  oligonucleotide probe

SEQ ID NO: 13532 - DNA, 32 bp, Artificial; identical to SEQ ID NO: 7690
  oligonucleotide probe

SEQ ID NO: 13533 - DNA, 32 bp, Artificial; identical to SEQ ID NO: 7690
  oligonucleotide probe

SEQ ID NO: 13534 - DNA, 32 bp, Artificial; identical to SEQ ID NO: 5163
  oligonucleotide probe

SEQ ID NO: 13535 - DNA, 32 bp, Artificial; identical to SEQ ID NO: 5163
  oligonucleotide probe

SEQ ID NO: 13536 - DNA, 32 bp, Artificial; identical to SEQ ID NO: 7694
  oligonucleotide probe

SEQ ID NO: 13537 - DNA, 32 bp, Artificial; identical to SEQ ID NO: 7694
  oligonucleotide probe

SEQ ID NO: 13538 - DNA, 32 bp, Artificial; identical to SEQ ID NO: 7606
  oligonucleotide probe

SEQ ID NO: 13539 - DNA, 32 bp, Artificial; identical to SEQ ID NO: 7606
  oligonucleotide probe

SEQ ID NO: 13540 - DNA, 32 bp, Artificial; identical to SEQ ID NO: 7812
  oligonucleotide probe

SEQ ID NO: 13541 - DNA, 32 bp, Artificial; identical to SEQ ID NO: 7812
  oligonucleotide probe

SEQ ID NO: 13542 - DNA, 32 bp, Artificial; identical to SEQ ID NO: 7659
  oligonucleotide probe

SEQ ID NO: 13543 - DNA, 32 bp, Artificial; identical to SEQ ID NO: 7659
  oligonucleotide probe

SEQ ID NO: 13544 - DNA, 32 bp, Artificial; identical to SEQ ID NO: 8442
  oligonucleotide probe

SEQ ID NO: 13545 - DNA, 32 bp, Artificial; identical to SEQ ID NO: 8442
  oligonucleotide probe

SEQ ID NO: 13546 - DNA, 32 bp, Artificial; identical to SEQ ID NO: 5163
  oligonucleotide probe

SEQ ID NO: 13547 - DNA, 32 bp, Artificial; identical to SEQ ID NO: 5163
  oligonucleotide probe

SEQ ID NO: 13548 - DNA, 32 bp, Artificial; identical to SEQ ID NO: 7624
  oligonucleotide probe

SEQ ID NO: 13549 - DNA, 32 bp, Artificial; identical to SEQ ID NO: 7624
  oligonucleotide probe

SEQ ID NO: 13550 - DNA, 32 bp, Artificial; identical to SEQ ID NO: 5537
  oligonucleotide probe

SEQ ID NO: 13551 - DNA, 32 bp, Artificial; identical to SEQ ID NO: 5537
  oligonucleotide probe

SEQ ID NO: 13552 - DNA, 32 bp, Artificial; identical to SEQ ID NO: 5537
  oligonucleotide probe

SEQ ID NO: 13553 - DNA, 32 bp, Artificial; identical to SEQ ID NO: 5537
  oligonucleotide probe

SEQ ID NO: 13554 - DNA, 32 bp, Artificial; identical to SEQ ID NO: 5537
  oligonucleotide probe

SEQ ID NO: 13555 - DNA, 32 bp, Artificial; identical to SEQ ID NO: 5537
  oligonucleotide probe

SEQ ID NO: 13556 - DNA, 32 bp, Artificial; identical to SEQ ID NO: 5537
  oligonucleotide probe

SEQ ID NO: 13557 - DNA, 32 bp, Artificial; identical to SEQ ID NO: 5537
  oligonucleotide probe

SEQ ID NO: 13558 - DNA, 32 bp, Artificial; identical to SEQ ID NO: 5537
  oligonucleotide probe

SEQ ID NO: 13559 - DNA, 32 bp, Artificial; identical to SEQ ID NO: 5537
  oligonucleotide probe

SEQ ID NO: 13560 - DNA, 32 bp, Artificial; identical to SEQ ID NO: 5537
  oligonucleotide probe

SEQ ID NO: 13561 - DNA, 32 bp, Artificial; identical to SEQ ID NO: 5537
  oligonucleotide probe

SEQ ID NO: 13562 - DNA, 32 bp, Artificial; identical to SEQ ID NO: 5537
  oligonucleotide probe

SEQ ID NO: 13563 - DNA, 32 bp, Artificial; identical to SEQ ID NO: 5537
  oligonucleotide probe

SEQ ID NO: 13564 - DNA, 32 bp, Artificial; identical to SEQ ID NO: 5537
  oligonucleotide probe

SEQ ID NO: 13565 - DNA, 32 bp, Artificial; identical to SEQ ID NO: 5537
  oligonucleotide probe

SEQ ID NO: 13566 - DNA, 32 bp, Artificial; identical to SEQ ID NO: 5537
  oligonucleotide probe

SEQ ID NO: 13567 - DNA, 32 bp, Artificial; identical to SEQ ID NO: 5537
  oligonucleotide probe

SEQ ID NO: 13568 - DNA, 32 bp, Artificial; identical to SEQ ID NO: 5537
  oligonucleotide probe

SEQ ID NO: 13569 - DNA, 32 bp, Artificial; identical to SEQ ID NO: 5537
  oligonucleotide probe

SEQ ID NO: 13570 - DNA, 32 bp, Artificial; identical to SEQ ID NO: 5537
  oligonucleotide probe

SEQ ID NO: 13571 - DNA, 32 bp, Artificial; identical to SEQ ID NO: 5537
  oligonucleotide probe

SEQ ID NO: 13572 - DNA, 32 bp, Artificial; identical to SEQ ID NO: 9826
  oligonucleotide probe

SEQ ID NO: 13573 - DNA, 32 bp, Artificial
  oligonucleotide probe
ttgcatggcgtggggattgcatggcgtgggga

SEQ ID NO: 13574 - DNA, 32 bp, Artificial; identical to SEQ ID NO: 13573
  oligonucleotide probe

SEQ ID NO: 13575 - DNA, 32 bp, Artificial; identical to SEQ ID NO: 13573
  oligonucleotide probe

SEQ ID NO: 13576 - DNA, 32 bp, Artificial; identical to SEQ ID NO: 13573
  oligonucleotide probe

SEQ ID NO: 13577 - DNA, 32 bp, Artificial; identical to SEQ ID NO: 13573
  oligonucleotide probe

SEQ ID NO: 13578 - DNA, 32 bp, Artificial; identical to SEQ ID NO: 13573
  oligonucleotide probe

SEQ ID NO: 13579 - DNA, 32 bp, Artificial; identical to SEQ ID NO: 13573
  oligonucleotide probe

SEQ ID NO: 13580 - DNA, 32 bp, Artificial; identical to SEQ ID NO: 13573
  oligonucleotide probe

SEQ ID NO: 13581 - DNA, 32 bp, Artificial; identical to SEQ ID NO: 11181
  oligonucleotide probe

SEQ ID NO: 13582 - DNA, 32 bp, Artificial; identical to SEQ ID NO: 11181
  oligonucleotide probe

SEQ ID NO: 13583 - DNA, 32 bp, Artificial; identical to SEQ ID NO: 11181
  oligonucleotide probe

SEQ ID NO: 13584 - DNA, 32 bp, Artificial; identical to SEQ ID NO: 11181
  oligonucleotide probe

SEQ ID NO: 13585 - DNA, 32 bp, Artificial; identical to SEQ ID NO: 11762
  oligonucleotide probe

SEQ ID NO: 13586 - DNA, 32 bp, Artificial; identical to SEQ ID NO: 11762
  oligonucleotide probe

SEQ ID NO: 13587 - DNA, 32 bp, Artificial
  oligonucleotide probe
gggattcgcgcaaacggggattcgcgcaaacg

SEQ ID NO: 13588 - DNA, 32 bp, Artificial; identical to SEQ ID NO: 13587
  oligonucleotide probe

SEQ ID NO: 13589 - DNA, 32 bp, Artificial; identical to SEQ ID NO: 13573
  oligonucleotide probe

SEQ ID NO: 13590 - DNA, 32 bp, Artificial; identical to SEQ ID NO: 13573
  oligonucleotide probe

SEQ ID NO: 13591 - DNA, 32 bp, Artificial; identical to SEQ ID NO: 13573
  oligonucleotide probe

SEQ ID NO: 13592 - DNA, 32 bp, Artificial; identical to SEQ ID NO: 13573
  oligonucleotide probe

SEQ ID NO: 13593 - DNA, 32 bp, Artificial; identical to SEQ ID NO: 11185
  oligonucleotide probe

SEQ ID NO: 13594 - DNA, 32 bp, Artificial; identical to SEQ ID NO: 11185
  oligonucleotide probe

SEQ ID NO: 13595 - DNA, 32 bp, Artificial; identical to SEQ ID NO: 11177
  oligonucleotide probe

SEQ ID NO: 13596 - DNA, 32 bp, Artificial; identical to SEQ ID NO: 11177
  oligonucleotide probe

SEQ ID NO: 13597 - DNA, 32 bp, Artificial; identical to SEQ ID NO: 11764
  oligonucleotide probe

SEQ ID NO: 13598 - DNA, 32 bp, Artificial; identical to SEQ ID NO: 11764
  oligonucleotide probe

SEQ ID NO: 13599 - DNA, 32 bp, Artificial; identical to SEQ ID NO: 11173
  oligonucleotide probe

SEQ ID NO: 13600 - DNA, 32 bp, Artificial; identical to SEQ ID NO: 11173
  oligonucleotide probe

SEQ ID NO: 13601 - DNA, 32 bp, Artificial; identical to SEQ ID NO: 11177
  oligonucleotide probe

SEQ ID NO: 13602 - DNA, 32 bp, Artificial; identical to SEQ ID NO: 11177
  oligonucleotide probe

SEQ ID NO: 13603 - DNA, 32 bp, Artificial
  oligonucleotide probe
gcaccgcagctgcgtggcaccgcagctgcgtg

SEQ ID NO: 13604 - DNA, 32 bp, Artificial; identical to SEQ ID NO: 13603
  oligonucleotide probe

SEQ ID NO: 13605 - DNA, 32 bp, Artificial; identical to SEQ ID NO: 11177
  oligonucleotide probe

SEQ ID NO: 13606 - DNA, 32 bp, Artificial; identical to SEQ ID NO: 11177
  oligonucleotide probe

SEQ ID NO: 13607 - DNA, 32 bp, Artificial; identical to SEQ ID NO: 13587
  oligonucleotide probe

SEQ ID NO: 13608 - DNA, 32 bp, Artificial; identical to SEQ ID NO: 13587
  oligonucleotide probe

SEQ ID NO: 13609 - DNA, 32 bp, Artificial; identical to SEQ ID NO: 11177
  oligonucleotide probe

SEQ ID NO: 13610 - DNA, 32 bp, Artificial; identical to SEQ ID NO: 11177
  oligonucleotide probe

SEQ ID NO: 13611 - DNA, 32 bp, Artificial; identical to SEQ ID NO: 11181
  oligonucleotide probe

SEQ ID NO: 13612 - DNA, 32 bp, Artificial; identical to SEQ ID NO: 11181
  oligonucleotide probe

SEQ ID NO: 13613 - DNA, 32 bp, Artificial; identical to SEQ ID NO: 11756
  oligonucleotide probe

SEQ ID NO: 13614 - DNA, 32 bp, Artificial; identical to SEQ ID NO: 11756
  oligonucleotide probe

SEQ ID NO: 13615 - DNA, 32 bp, Artificial; identical to SEQ ID NO: 11770
  oligonucleotide probe

SEQ ID NO: 13616 - DNA, 32 bp, Artificial; identical to SEQ ID NO: 11770
  oligonucleotide probe

SEQ ID NO: 13617 - DNA, 32 bp, Artificial; identical to SEQ ID NO: 11770
  oligonucleotide probe

SEQ ID NO: 13618 - DNA, 32 bp, Artificial; identical to SEQ ID NO: 11770
  oligonucleotide probe

SEQ ID NO: 13619 - DNA, 32 bp, Artificial
  oligonucleotide probe
gcacgggaaagcggctgcacgggaaagcggct

SEQ ID NO: 13620 - DNA, 32 bp, Artificial; identical to SEQ ID NO: 13619
  oligonucleotide probe

SEQ ID NO: 13621 - DNA, 32 bp, Artificial; identical to SEQ ID NO: 13573
  oligonucleotide probe

SEQ ID NO: 13622 - DNA, 32 bp, Artificial; identical to SEQ ID NO: 13573
  oligonucleotide probe

SEQ ID NO: 13623 - DNA, 32 bp, Artificial; identical to SEQ ID NO: 11181
  oligonucleotide probe

SEQ ID NO: 13624 - DNA, 32 bp, Artificial; identical to SEQ ID NO: 11181
  oligonucleotide probe

SEQ ID NO: 13625 - DNA, 32 bp, Artificial; identical to SEQ ID NO: 13603
  oligonucleotide probe

SEQ ID NO: 13626 - DNA, 32 bp, Artificial; identical to SEQ ID NO: 13603
  oligonucleotide probe

SEQ ID NO: 13627 - DNA, 32 bp, Artificial; identical to SEQ ID NO: 13603
  oligonucleotide probe

SEQ ID NO: 13628 - DNA, 32 bp, Artificial; identical to SEQ ID NO: 13603
  oligonucleotide probe

SEQ ID NO: 13629 - DNA, 32 bp, Artificial; identical to SEQ ID NO: 13603
  oligonucleotide probe

SEQ ID NO: 13630 - DNA, 32 bp, Artificial; identical to SEQ ID NO: 13603
  oligonucleotide probe

SEQ ID NO: 13631 - DNA, 32 bp, Artificial; identical to SEQ ID NO: 13603
  oligonucleotide probe

SEQ ID NO: 13632 - DNA, 32 bp, Artificial; identical to SEQ ID NO: 13603
  oligonucleotide probe

SEQ ID NO: 13633 - DNA, 32 bp, Artificial; identical to SEQ ID NO: 13619
  oligonucleotide probe

SEQ ID NO: 13634 - DNA, 32 bp, Artificial; identical to SEQ ID NO: 13619
  oligonucleotide probe

SEQ ID NO: 13635 - DNA, 32 bp, Artificial; identical to SEQ ID NO: 11173
  oligonucleotide probe

SEQ ID NO: 13636 - DNA, 32 bp, Artificial; identical to SEQ ID NO: 11173
  oligonucleotide probe

SEQ ID NO: 13637 - DNA, 32 bp, Artificial; identical to SEQ ID NO: 11163
  oligonucleotide probe

SEQ ID NO: 13638 - DNA, 32 bp, Artificial; identical to SEQ ID NO: 11163
  oligonucleotide probe

SEQ ID NO: 13639 - DNA, 32 bp, Artificial; identical to SEQ ID NO: 11167
  oligonucleotide probe

SEQ ID NO: 13640 - DNA, 32 bp, Artificial; identical to SEQ ID NO: 11167
  oligonucleotide probe

SEQ ID NO: 13641 - DNA, 32 bp, Artificial; identical to SEQ ID NO: 11764
  oligonucleotide probe

SEQ ID NO: 13642 - DNA, 32 bp, Artificial; identical to SEQ ID NO: 11764
  oligonucleotide probe

SEQ ID NO: 13643 - DNA, 32 bp, Artificial; identical to SEQ ID NO: 11185
  oligonucleotide probe

SEQ ID NO: 13644 - DNA, 32 bp, Artificial; identical to SEQ ID NO: 11185
  oligonucleotide probe

SEQ ID NO: 13645 - DNA, 32 bp, Artificial; identical to SEQ ID NO: 13587
  oligonucleotide probe

SEQ ID NO: 13646 - DNA, 32 bp, Artificial; identical to SEQ ID NO: 13587
  oligonucleotide probe

SEQ ID NO: 13647 - DNA, 32 bp, Artificial; identical to SEQ ID NO: 13603
  oligonucleotide probe

SEQ ID NO: 13648 - DNA, 32 bp, Artificial; identical to SEQ ID NO: 13603
  oligonucleotide probe

SEQ ID NO: 13649 - DNA, 32 bp, Artificial; identical to SEQ ID NO: 13587
  oligonucleotide probe

SEQ ID NO: 13650 - DNA, 32 bp, Artificial; identical to SEQ ID NO: 13587
  oligonucleotide probe

SEQ ID NO: 13651 - DNA, 32 bp, Artificial; identical to SEQ ID NO: 11173
  oligonucleotide probe

SEQ ID NO: 13652 - DNA, 32 bp, Artificial; identical to SEQ ID NO: 11173
  oligonucleotide probe

SEQ ID NO: 13653 - DNA, 32 bp, Artificial; identical to SEQ ID NO: 13573
  oligonucleotide probe

SEQ ID NO: 13654 - DNA, 32 bp, Artificial; identical to SEQ ID NO: 13573
  oligonucleotide probe

SEQ ID NO: 13655 - DNA, 32 bp, Artificial; identical to SEQ ID NO: 11171
  oligonucleotide probe

SEQ ID NO: 13656 - DNA, 32 bp, Artificial; identical to SEQ ID NO: 11171
  oligonucleotide probe

SEQ ID NO: 13657 - DNA, 32 bp, Artificial; identical to SEQ ID NO: 13619
  oligonucleotide probe

SEQ ID NO: 13658 - DNA, 32 bp, Artificial; identical to SEQ ID NO: 13619
  oligonucleotide probe

SEQ ID NO: 13659 - DNA, 32 bp, Artificial; identical to SEQ ID NO: 13587
  oligonucleotide probe

SEQ ID NO: 13660 - DNA, 32 bp, Artificial; identical to SEQ ID NO: 13587
  oligonucleotide probe

SEQ ID NO: 13661 - DNA, 32 bp, Artificial; identical to SEQ ID NO: 13603
  oligonucleotide probe

SEQ ID NO: 13662 - DNA, 32 bp, Artificial; identical to SEQ ID NO: 13603
  oligonucleotide probe

SEQ ID NO: 13663 - DNA, 32 bp, Artificial; identical to SEQ ID NO: 11764
  oligonucleotide probe

SEQ ID NO: 13664 - DNA, 32 bp, Artificial; identical to SEQ ID NO: 11764
  oligonucleotide probe

SEQ ID NO: 13665 - DNA, 32 bp, Artificial; identical to SEQ ID NO: 13619
  oligonucleotide probe

SEQ ID NO: 13666 - DNA, 32 bp, Artificial; identical to SEQ ID NO: 13619
  oligonucleotide probe

SEQ ID NO: 13667 - DNA, 32 bp, Artificial; identical to SEQ ID NO: 11181
  oligonucleotide probe

SEQ ID NO: 13668 - DNA, 32 bp, Artificial; identical to SEQ ID NO: 11181
  oligonucleotide probe

SEQ ID NO: 13669 - DNA, 32 bp, Artificial; identical to SEQ ID NO: 11181
  oligonucleotide probe

SEQ ID NO: 13670 - DNA, 32 bp, Artificial; identical to SEQ ID NO: 11181
  oligonucleotide probe

SEQ ID NO: 13671 - DNA, 32 bp, Artificial; identical to SEQ ID NO: 13619
  oligonucleotide probe

SEQ ID NO: 13672 - DNA, 32 bp, Artificial; identical to SEQ ID NO: 13619
  oligonucleotide probe

SEQ ID NO: 13673 - DNA, 32 bp, Artificial; identical to SEQ ID NO: 13619
  oligonucleotide probe

SEQ ID NO: 13674 - DNA, 32 bp, Artificial; identical to SEQ ID NO: 13619
  oligonucleotide probe

SEQ ID NO: 13675 - DNA, 32 bp, Artificial; identical to SEQ ID NO: 11770
  oligonucleotide probe

SEQ ID NO: 13676 - DNA, 32 bp, Artificial; identical to SEQ ID NO: 11770
  oligonucleotide probe

SEQ ID NO: 13677 - DNA, 32 bp, Artificial; identical to SEQ ID NO: 11770
  oligonucleotide probe

SEQ ID NO: 13678 - DNA, 32 bp, Artificial; identical to SEQ ID NO: 11770
  oligonucleotide probe

SEQ ID NO: 13679 - DNA, 32 bp, Artificial; identical to SEQ ID NO: 13587
  oligonucleotide probe

SEQ ID NO: 13680 - DNA, 32 bp, Artificial; identical to SEQ ID NO: 13587
  oligonucleotide probe

SEQ ID NO: 13681 - DNA, 32 bp, Artificial; identical to SEQ ID NO: 13573
  oligonucleotide probe

SEQ ID NO: 13682 - DNA, 32 bp, Artificial; identical to SEQ ID NO: 13573
  oligonucleotide probe

SEQ ID NO: 13683 - DNA, 32 bp, Artificial; identical to SEQ ID NO: 13619
  oligonucleotide probe

SEQ ID NO: 13684 - DNA, 32 bp, Artificial; identical to SEQ ID NO: 13619
  oligonucleotide probe

SEQ ID NO: 13685 - DNA, 32 bp, Artificial; identical to SEQ ID NO: 11762
  oligonucleotide probe

SEQ ID NO: 13686 - DNA, 32 bp, Artificial; identical to SEQ ID NO: 11762
  oligonucleotide probe

SEQ ID NO: 13687 - DNA, 32 bp, Artificial; identical to SEQ ID NO: 13619
  oligonucleotide probe

SEQ ID NO: 13688 - DNA, 32 bp, Artificial; identical to SEQ ID NO: 13619
  oligonucleotide probe

SEQ ID NO: 13689 - DNA, 32 bp, Artificial; identical to SEQ ID NO: 11764
  oligonucleotide probe

SEQ ID NO: 13690 - DNA, 32 bp, Artificial; identical to SEQ ID NO: 11764
  oligonucleotide probe

SEQ ID NO: 13691 - DNA, 32 bp, Artificial; identical to SEQ ID NO: 13603
  oligonucleotide probe

SEQ ID NO: 13692 - DNA, 32 bp, Artificial; identical to SEQ ID NO: 13603
  oligonucleotide probe

SEQ ID NO: 13693 - DNA, 32 bp, Artificial; identical to SEQ ID NO: 11171
  oligonucleotide probe

SEQ ID NO: 13694 - DNA, 32 bp, Artificial; identical to SEQ ID NO: 11171
  oligonucleotide probe

SEQ ID NO: 13695 - DNA, 32 bp, Artificial; identical to SEQ ID NO: 11163
  oligonucleotide probe

SEQ ID NO: 13696 - DNA, 32 bp, Artificial; identical to SEQ ID NO: 11163
  oligonucleotide probe

SEQ ID NO: 13697 - DNA, 32 bp, Artificial; identical to SEQ ID NO: 11756
  oligonucleotide probe

SEQ ID NO: 13698 - DNA, 32 bp, Artificial; identical to SEQ ID NO: 11756
  oligonucleotide probe

SEQ ID NO: 13699 - DNA, 32 bp, Artificial; identical to SEQ ID NO: 13603
  oligonucleotide probe

SEQ ID NO: 13700 - DNA, 32 bp, Artificial; identical to SEQ ID NO: 13603
  oligonucleotide probe

SEQ ID NO: 13701 - DNA, 32 bp, Artificial; identical to SEQ ID NO: 11185
  oligonucleotide probe

SEQ ID NO: 13702 - DNA, 32 bp, Artificial; identical to SEQ ID NO: 11185
  oligonucleotide probe

SEQ ID NO: 13703 - DNA, 32 bp, Artificial; identical to SEQ ID NO: 13603
  oligonucleotide probe

SEQ ID NO: 13704 - DNA, 32 bp, Artificial; identical to SEQ ID NO: 13603
  oligonucleotide probe

SEQ ID NO: 13705 - DNA, 32 bp, Artificial; identical to SEQ ID NO: 11165
  oligonucleotide probe

SEQ ID NO: 13706 - DNA, 32 bp, Artificial; identical to SEQ ID NO: 11165
  oligonucleotide probe

SEQ ID NO: 13707 - DNA, 32 bp, Artificial; identical to SEQ ID NO: 13573
  oligonucleotide probe

SEQ ID NO: 13708 - DNA, 32 bp, Artificial; identical to SEQ ID NO: 13573
  oligonucleotide probe

SEQ ID NO: 13709 - DNA, 32 bp, Artificial; identical to SEQ ID NO: 13573
  oligonucleotide probe

SEQ ID NO: 13710 - DNA, 32 bp, Artificial; identical to SEQ ID NO: 13573
  oligonucleotide probe

SEQ ID NO: 13711 - DNA, 32 bp, Artificial; identical to SEQ ID NO: 11173
  oligonucleotide probe

SEQ ID NO: 13712 - DNA, 32 bp, Artificial; identical to SEQ ID NO: 11173
  oligonucleotide probe

SEQ ID NO: 13713 - DNA, 32 bp, Artificial; identical to SEQ ID NO: 11177
  oligonucleotide probe

SEQ ID NO: 13714 - DNA, 32 bp, Artificial; identical to SEQ ID NO: 11177
  oligonucleotide probe

SEQ ID NO: 13715 - DNA, 32 bp, Artificial; identical to SEQ ID NO: 13573
  oligonucleotide probe

SEQ ID NO: 13716 - DNA, 32 bp, Artificial; identical to SEQ ID NO: 13573
  oligonucleotide probe

SEQ ID NO: 13717 - DNA, 32 bp, Artificial; identical to SEQ ID NO: 13603
  oligonucleotide probe

SEQ ID NO: 13718 - DNA, 32 bp, Artificial; identical to SEQ ID NO: 13603
  oligonucleotide probe

SEQ ID NO: 13719 - DNA, 32 bp, Artificial; identical to SEQ ID NO: 13587
  oligonucleotide probe

SEQ ID NO: 13720 - DNA, 32 bp, Artificial; identical to SEQ ID NO: 13587
  oligonucleotide probe

SEQ ID NO: 13721 - DNA, 32 bp, Artificial; identical to SEQ ID NO: 11756
  oligonucleotide probe

SEQ ID NO: 13722 - DNA, 32 bp, Artificial; identical to SEQ ID NO: 11756
  oligonucleotide probe

SEQ ID NO: 13723 - DNA, 32 bp, Artificial; identical to SEQ ID NO: 13619
  oligonucleotide probe

SEQ ID NO: 13724 - DNA, 32 bp, Artificial; identical to SEQ ID NO: 13619
  oligonucleotide probe

SEQ ID NO: 13725 - DNA, 32 bp, Artificial; identical to SEQ ID NO: 11770
  oligonucleotide probe

SEQ ID NO: 13726 - DNA, 32 bp, Artificial; identical to SEQ ID NO: 11770
  oligonucleotide probe

SEQ ID NO: 13727 - DNA, 32 bp, Artificial; identical to SEQ ID NO: 13619
  oligonucleotide probe

SEQ ID NO: 13728 - DNA, 32 bp, Artificial; identical to SEQ ID NO: 13619
  oligonucleotide probe

SEQ ID NO: 13729 - DNA, 32 bp, Artificial; identical to SEQ ID NO: 11764
  oligonucleotide probe

SEQ ID NO: 13730 - DNA, 32 bp, Artificial; identical to SEQ ID NO: 11764
  oligonucleotide probe

SEQ ID NO: 13731 - DNA, 32 bp, Artificial; identical to SEQ ID NO: 13587
  oligonucleotide probe

SEQ ID NO: 13732 - DNA, 32 bp, Artificial; identical to SEQ ID NO: 13587
  oligonucleotide probe

SEQ ID NO: 13733 - DNA, 32 bp, Artificial; identical to SEQ ID NO: 11167
  oligonucleotide probe

SEQ ID NO: 13734 - DNA, 32 bp, Artificial; identical to SEQ ID NO: 11167
  oligonucleotide probe

SEQ ID NO: 13735 - DNA, 32 bp, Artificial; identical to SEQ ID NO: 11181
  oligonucleotide probe

SEQ ID NO: 13736 - DNA, 32 bp, Artificial; identical to SEQ ID NO: 11181
  oligonucleotide probe

SEQ ID NO: 13737 - DNA, 32 bp, Artificial; identical to SEQ ID NO: 13603
  oligonucleotide probe

SEQ ID NO: 13738 - DNA, 32 bp, Artificial; identical to SEQ ID NO: 13603
  oligonucleotide probe

SEQ ID NO: 13739 - DNA, 32 bp, Artificial; identical to SEQ ID NO: 11770
  oligonucleotide probe

SEQ ID NO: 13740 - DNA, 32 bp, Artificial; identical to SEQ ID NO: 11770
  oligonucleotide probe

SEQ ID NO: 13741 - DNA, 32 bp, Artificial; identical to SEQ ID NO: 13587
  oligonucleotide probe

SEQ ID NO: 13742 - DNA, 32 bp, Artificial; identical to SEQ ID NO: 13587
  oligonucleotide probe

SEQ ID NO: 13743 - DNA, 32 bp, Artificial; identical to SEQ ID NO: 11756
  oligonucleotide probe

SEQ ID NO: 13744 - DNA, 32 bp, Artificial; identical to SEQ ID NO: 11756
  oligonucleotide probe

SEQ ID NO: 13745 - DNA, 32 bp, Artificial; identical to SEQ ID NO: 11165
  oligonucleotide probe

SEQ ID NO: 13746 - DNA, 32 bp, Artificial; identical to SEQ ID NO: 11165
  oligonucleotide probe

SEQ ID NO: 13747 - DNA, 32 bp, Artificial; identical to SEQ ID NO: 11171
  oligonucleotide probe

SEQ ID NO: 13748 - DNA, 32 bp, Artificial; identical to SEQ ID NO: 11171
  oligonucleotide probe

SEQ ID NO: 13749 - DNA, 32 bp, Artificial; identical to SEQ ID NO: 13619
  oligonucleotide probe

SEQ ID NO: 13750 - DNA, 32 bp, Artificial; identical to SEQ ID NO: 13619
  oligonucleotide probe

SEQ ID NO: 13751 - DNA, 32 bp, Artificial; identical to SEQ ID NO: 11756
  oligonucleotide probe

SEQ ID NO: 13752 - DNA, 32 bp, Artificial; identical to SEQ ID NO: 11756
  oligonucleotide probe

SEQ ID NO: 13753 - DNA, 32 bp, Artificial; identical to SEQ ID NO: 13603
  oligonucleotide probe

SEQ ID NO: 13754 - DNA, 32 bp, Artificial; identical to SEQ ID NO: 13603
  oligonucleotide probe

SEQ ID NO: 13755 - DNA, 32 bp, Artificial; identical to SEQ ID NO: 11167
  oligonucleotide probe

SEQ ID NO: 13756 - DNA, 32 bp, Artificial; identical to SEQ ID NO: 11167
  oligonucleotide probe

SEQ ID NO: 13757 - DNA, 32 bp, Artificial; identical to SEQ ID NO: 11764
  oligonucleotide probe

SEQ ID NO: 13758 - DNA, 32 bp, Artificial; identical to SEQ ID NO: 11764
  oligonucleotide probe

SEQ ID NO: 13759 - DNA, 32 bp, Artificial; identical to SEQ ID NO: 13587
  oligonucleotide probe

SEQ ID NO: 13760 - DNA, 32 bp, Artificial; identical to SEQ ID NO: 13587
  oligonucleotide probe

SEQ ID NO: 13761 - DNA, 32 bp, Artificial; identical to SEQ ID NO: 13573
  oligonucleotide probe

SEQ ID NO: 13762 - DNA, 32 bp, Artificial; identical to SEQ ID NO: 13573
  oligonucleotide probe

SEQ ID NO: 13763 - DNA, 32 bp, Artificial; identical to SEQ ID NO: 13573
  oligonucleotide probe

SEQ ID NO: 13764 - DNA, 32 bp, Artificial; identical to SEQ ID NO: 13573
  oligonucleotide probe

SEQ ID NO: 13765 - DNA, 32 bp, Artificial; identical to SEQ ID NO: 13573
  oligonucleotide probe

SEQ ID NO: 13766 - DNA, 32 bp, Artificial; identical to SEQ ID NO: 13573
  oligonucleotide probe

SEQ ID NO: 13767 - DNA, 32 bp, Artificial; identical to SEQ ID NO: 11173
  oligonucleotide probe

SEQ ID NO: 13768 - DNA, 32 bp, Artificial; identical to SEQ ID NO: 11173
  oligonucleotide probe

SEQ ID NO: 13769 - DNA, 32 bp, Artificial; identical to SEQ ID NO: 13603
  oligonucleotide probe

SEQ ID NO: 13770 - DNA, 32 bp, Artificial; identical to SEQ ID NO: 13603
  oligonucleotide probe

SEQ ID NO: 13771 - DNA, 32 bp, Artificial; identical to SEQ ID NO: 11185
  oligonucleotide probe

SEQ ID NO: 13772 - DNA, 32 bp, Artificial; identical to SEQ ID NO: 11185
  oligonucleotide probe

SEQ ID NO: 13773 - DNA, 32 bp, Artificial; identical to SEQ ID NO: 11764
  oligonucleotide probe

SEQ ID NO: 13774 - DNA, 32 bp, Artificial; identical to SEQ ID NO: 11764
  oligonucleotide probe

SEQ ID NO: 13775 - DNA, 32 bp, Artificial; identical to SEQ ID NO: 13573
  oligonucleotide probe

SEQ ID NO: 13776 - DNA, 32 bp, Artificial; identical to SEQ ID NO: 13573
  oligonucleotide probe

SEQ ID NO: 13777 - DNA, 32 bp, Artificial; identical to SEQ ID NO: 11185
  oligonucleotide probe

SEQ ID NO: 13778 - DNA, 32 bp, Artificial; identical to SEQ ID NO: 11185
  oligonucleotide probe

SEQ ID NO: 13779 - DNA, 32 bp, Artificial; identical to SEQ ID NO: 11762
  oligonucleotide probe

SEQ ID NO: 13780 - DNA, 32 bp, Artificial; identical to SEQ ID NO: 11762
  oligonucleotide probe

SEQ ID NO: 13781 - DNA, 32 bp, Artificial; identical to SEQ ID NO: 11756
  oligonucleotide probe

SEQ ID NO: 13782 - DNA, 32 bp, Artificial; identical to SEQ ID NO: 11756
  oligonucleotide probe

SEQ ID NO: 13783 - DNA, 32 bp, Artificial; identical to SEQ ID NO: 13587
  oligonucleotide probe

SEQ ID NO: 13784 - DNA, 32 bp, Artificial; identical to SEQ ID NO: 13587
  oligonucleotide probe

SEQ ID NO: 13785 - DNA, 32 bp, Artificial; identical to SEQ ID NO: 11165
  oligonucleotide probe

SEQ ID NO: 13786 - DNA, 32 bp, Artificial; identical to SEQ ID NO: 11165
  oligonucleotide probe

SEQ ID NO: 13787 - DNA, 32 bp, Artificial; identical to SEQ ID NO: 13587
  oligonucleotide probe

SEQ ID NO: 13788 - DNA, 32 bp, Artificial; identical to SEQ ID NO: 13587
  oligonucleotide probe

SEQ ID NO: 13789 - DNA, 32 bp, Artificial; identical to SEQ ID NO: 11762
  oligonucleotide probe

SEQ ID NO: 13790 - DNA, 32 bp, Artificial; identical to SEQ ID NO: 11762
  oligonucleotide probe

SEQ ID NO: 13791 - DNA, 32 bp, Artificial; identical to SEQ ID NO: 13573
  oligonucleotide probe

SEQ ID NO: 13792 - DNA, 32 bp, Artificial; identical to SEQ ID NO: 13573
  oligonucleotide probe

SEQ ID NO: 13793 - DNA, 32 bp, Artificial; identical to SEQ ID NO: 13603
  oligonucleotide probe

SEQ ID NO: 13794 - DNA, 32 bp, Artificial; identical to SEQ ID NO: 13603
  oligonucleotide probe

SEQ ID NO: 13795 - DNA, 32 bp, Artificial; identical to SEQ ID NO: 11181
  oligonucleotide probe

SEQ ID NO: 13796 - DNA, 32 bp, Artificial; identical to SEQ ID NO: 11181
  oligonucleotide probe

SEQ ID NO: 13797 - DNA, 32 bp, Artificial; identical to SEQ ID NO: 11165
  oligonucleotide probe

SEQ ID NO: 13798 - DNA, 32 bp, Artificial; identical to SEQ ID NO: 11165
  oligonucleotide probe

SEQ ID NO: 13799 - DNA, 32 bp, Artificial; identical to SEQ ID NO: 13619
  oligonucleotide probe

SEQ ID NO: 13800 - DNA, 32 bp, Artificial; identical to SEQ ID NO: 13619
  oligonucleotide probe

SEQ ID NO: 13801 - DNA, 32 bp, Artificial; identical to SEQ ID NO: 11177
  oligonucleotide probe

SEQ ID NO: 13802 - DNA, 32 bp, Artificial; identical to SEQ ID NO: 11177
  oligonucleotide probe

SEQ ID NO: 13803 - DNA, 32 bp, Artificial; identical to SEQ ID NO: 11770
  oligonucleotide probe

SEQ ID NO: 13804 - DNA, 32 bp, Artificial; identical to SEQ ID NO: 11770
  oligonucleotide probe

SEQ ID NO: 13805 - DNA, 32 bp, Artificial; identical to SEQ ID NO: 11171
  oligonucleotide probe

SEQ ID NO: 13806 - DNA, 32 bp, Artificial; identical to SEQ ID NO: 11171
  oligonucleotide probe

SEQ ID NO: 13807 - DNA, 32 bp, Artificial; identical to SEQ ID NO: 13619
  oligonucleotide probe

SEQ ID NO: 13808 - DNA, 32 bp, Artificial; identical to SEQ ID NO: 13619
  oligonucleotide probe

SEQ ID NO: 13809 - DNA, 32 bp, Artificial; identical to SEQ ID NO: 11177
  oligonucleotide probe

SEQ ID NO: 13810 - DNA, 32 bp, Artificial; identical to SEQ ID NO: 11177
  oligonucleotide probe

SEQ ID NO: 13811 - DNA, 32 bp, Artificial; identical to SEQ ID NO: 11165
  oligonucleotide probe

SEQ ID NO: 13812 - DNA, 32 bp, Artificial; identical to SEQ ID NO: 11165
  oligonucleotide probe

SEQ ID NO: 13813 - DNA, 32 bp, Artificial; identical to SEQ ID NO: 11173
  oligonucleotide probe

SEQ ID NO: 13814 - DNA, 32 bp, Artificial; identical to SEQ ID NO: 11173
  oligonucleotide probe

SEQ ID NO: 13815 - DNA, 32 bp, Artificial; identical to SEQ ID NO: 11764
  oligonucleotide probe

SEQ ID NO: 13816 - DNA, 32 bp, Artificial; identical to SEQ ID NO: 11764
  oligonucleotide probe

SEQ ID NO: 13817 - DNA, 32 bp, Artificial; identical to SEQ ID NO: 11756
  oligonucleotide probe

SEQ ID NO: 13818 - DNA, 32 bp, Artificial; identical to SEQ ID NO: 11756
  oligonucleotide probe

SEQ ID NO: 13819 - DNA, 32 bp, Artificial; identical to SEQ ID NO: 11756
  oligonucleotide probe

SEQ ID NO: 13820 - DNA, 32 bp, Artificial; identical to SEQ ID NO: 11756
  oligonucleotide probe

SEQ ID NO: 13821 - DNA, 32 bp, Artificial; identical to SEQ ID NO: 13587
  oligonucleotide probe

SEQ ID NO: 13822 - DNA, 32 bp, Artificial; identical to SEQ ID NO: 13587
  oligonucleotide probe

SEQ ID NO: 13823 - DNA, 32 bp, Artificial; identical to SEQ ID NO: 11762
  oligonucleotide probe

SEQ ID NO: 13824 - DNA, 32 bp, Artificial; identical to SEQ ID NO: 11762
  oligonucleotide probe

SEQ ID NO: 13825 - DNA, 32 bp, Artificial; identical to SEQ ID NO: 11764
  oligonucleotide probe

SEQ ID NO: 13826 - DNA, 32 bp, Artificial; identical to SEQ ID NO: 11764
  oligonucleotide probe

SEQ ID NO: 13827 - DNA, 32 bp, Artificial; identical to SEQ ID NO: 11185
  oligonucleotide probe

SEQ ID NO: 13828 - DNA, 32 bp, Artificial; identical to SEQ ID NO: 11185
  oligonucleotide probe

SEQ ID NO: 13829 - DNA, 32 bp, Artificial; identical to SEQ ID NO: 13619
  oligonucleotide probe

SEQ ID NO: 13830 - DNA, 32 bp, Artificial; identical to SEQ ID NO: 13619
  oligonucleotide probe

SEQ ID NO: 13831 - DNA, 32 bp, Artificial; identical to SEQ ID NO: 11762
  oligonucleotide probe

SEQ ID NO: 13832 - DNA, 32 bp, Artificial; identical to SEQ ID NO: 11762
  oligonucleotide probe

SEQ ID NO: 13833 - DNA, 32 bp, Artificial; identical to SEQ ID NO: 11165
  oligonucleotide probe

SEQ ID NO: 13834 - DNA, 32 bp, Artificial; identical to SEQ ID NO: 11165
  oligonucleotide probe

SEQ ID NO: 13835 - DNA, 32 bp, Artificial; identical to SEQ ID NO: 11762
  oligonucleotide probe

SEQ ID NO: 13836 - DNA, 32 bp, Artificial; identical to SEQ ID NO: 11762
  oligonucleotide probe

SEQ ID NO: 13837 - DNA, 32 bp, Artificial; identical to SEQ ID NO: 11185
  oligonucleotide probe

SEQ ID NO: 13838 - DNA, 32 bp, Artificial; identical to SEQ ID NO: 11185
  oligonucleotide probe

SEQ ID NO: 13839 - DNA, 32 bp, Artificial; identical to SEQ ID NO: 13619
  oligonucleotide probe

SEQ ID NO: 13840 - DNA, 32 bp, Artificial; identical to SEQ ID NO: 13619
  oligonucleotide probe

SEQ ID NO: 13841 - DNA, 32 bp, Artificial; identical to SEQ ID NO: 11165
  oligonucleotide probe

SEQ ID NO: 13842 - DNA, 32 bp, Artificial; identical to SEQ ID NO: 11165
  oligonucleotide probe

SEQ ID NO: 13843 - DNA, 32 bp, Artificial; identical to SEQ ID NO: 11173
  oligonucleotide probe

SEQ ID NO: 13844 - DNA, 32 bp, Artificial; identical to SEQ ID NO: 11173
  oligonucleotide probe

SEQ ID NO: 13845 - DNA, 32 bp, Artificial; identical to SEQ ID NO: 11770
  oligonucleotide probe

SEQ ID NO: 13846 - DNA, 32 bp, Artificial; identical to SEQ ID NO: 11770
  oligonucleotide probe

SEQ ID NO: 13847 - DNA, 32 bp, Artificial; identical to SEQ ID NO: 11185
  oligonucleotide probe

SEQ ID NO: 13848 - DNA, 32 bp, Artificial; identical to SEQ ID NO: 11185
  oligonucleotide probe

SEQ ID NO: 13849 - DNA, 32 bp, Artificial; identical to SEQ ID NO: 11165
  oligonucleotide probe

SEQ ID NO: 13850 - DNA, 32 bp, Artificial; identical to SEQ ID NO: 11165
  oligonucleotide probe

SEQ ID NO: 13851 - DNA, 32 bp, Artificial; identical to SEQ ID NO: 11756
  oligonucleotide probe

SEQ ID NO: 13852 - DNA, 32 bp, Artificial; identical to SEQ ID NO: 11756
  oligonucleotide probe

SEQ ID NO: 13853 - DNA, 32 bp, Artificial; identical to SEQ ID NO: 13619
  oligonucleotide probe

SEQ ID NO: 13854 - DNA, 32 bp, Artificial; identical to SEQ ID NO: 13619
  oligonucleotide probe

SEQ ID NO: 13855 - DNA, 32 bp, Artificial; identical to SEQ ID NO: 11762
  oligonucleotide probe

SEQ ID NO: 13856 - DNA, 32 bp, Artificial; identical to SEQ ID NO: 11762
  oligonucleotide probe

SEQ ID NO: 13857 - DNA, 32 bp, Artificial; identical to SEQ ID NO: 11167
  oligonucleotide probe

SEQ ID NO: 13858 - DNA, 32 bp, Artificial; identical to SEQ ID NO: 11167
  oligonucleotide probe

SEQ ID NO: 13859 - DNA, 32 bp, Artificial; identical to SEQ ID NO: 13619
  oligonucleotide probe

SEQ ID NO: 13860 - DNA, 32 bp, Artificial; identical to SEQ ID NO: 13619
  oligonucleotide probe

SEQ ID NO: 13861 - DNA, 32 bp, Artificial; identical to SEQ ID NO: 13619
  oligonucleotide probe

SEQ ID NO: 13862 - DNA, 32 bp, Artificial; identical to SEQ ID NO: 13619
  oligonucleotide probe

SEQ ID NO: 13863 - DNA, 32 bp, Artificial; identical to SEQ ID NO: 13619
  oligonucleotide probe

SEQ ID NO: 13864 - DNA, 32 bp, Artificial; identical to SEQ ID NO: 13619
  oligonucleotide probe

SEQ ID NO: 13865 - DNA, 32 bp, Artificial; identical to SEQ ID NO: 11764
  oligonucleotide probe

SEQ ID NO: 13866 - DNA, 32 bp, Artificial; identical to SEQ ID NO: 11764
  oligonucleotide probe

SEQ ID NO: 13867 - DNA, 32 bp, Artificial; identical to SEQ ID NO: 11165
  oligonucleotide probe

SEQ ID NO: 13868 - DNA, 32 bp, Artificial; identical to SEQ ID NO: 11165
  oligonucleotide probe

SEQ ID NO: 13869 - DNA, 32 bp, Artificial; identical to SEQ ID NO: 11165
  oligonucleotide probe

SEQ ID NO: 13870 - DNA, 32 bp, Artificial; identical to SEQ ID NO: 11165
  oligonucleotide probe

SEQ ID NO: 13871 - DNA, 32 bp, Artificial; identical to SEQ ID NO: 11764
  oligonucleotide probe

SEQ ID NO: 13872 - DNA, 32 bp, Artificial; identical to SEQ ID NO: 11764
  oligonucleotide probe

SEQ ID NO: 13873 - DNA, 32 bp, Artificial; identical to SEQ ID NO: 11756
  oligonucleotide probe

SEQ ID NO: 13874 - DNA, 32 bp, Artificial; identical to SEQ ID NO: 11756
  oligonucleotide probe

SEQ ID NO: 13875 - DNA, 32 bp, Artificial; identical to SEQ ID NO: 11163
  oligonucleotide probe

SEQ ID NO: 13876 - DNA, 32 bp, Artificial; identical to SEQ ID NO: 11163
  oligonucleotide probe

SEQ ID NO: 13877 - DNA, 32 bp, Artificial; identical to SEQ ID NO: 13573
  oligonucleotide probe

SEQ ID NO: 13878 - DNA, 32 bp, Artificial; identical to SEQ ID NO: 13573
  oligonucleotide probe

SEQ ID NO: 13879 - DNA, 32 bp, Artificial; identical to SEQ ID NO: 11185
  oligonucleotide probe

SEQ ID NO: 13880 - DNA, 32 bp, Artificial; identical to SEQ ID NO: 11185
  oligonucleotide probe

SEQ ID NO: 13881 - DNA, 32 bp, Artificial; identical to SEQ ID NO: 13587
  oligonucleotide probe

SEQ ID NO: 13882 - DNA, 32 bp, Artificial; identical to SEQ ID NO: 13587
  oligonucleotide probe

SEQ ID NO: 13883 - DNA, 32 bp, Artificial; identical to SEQ ID NO: 11764
  oligonucleotide probe

SEQ ID NO: 13884 - DNA, 32 bp, Artificial; identical to SEQ ID NO: 11764
  oligonucleotide probe

SEQ ID NO: 13885 - DNA, 32 bp, Artificial; identical to SEQ ID NO: 13573
  oligonucleotide probe

SEQ ID NO: 13886 - DNA, 32 bp, Artificial; identical to SEQ ID NO: 13573
  oligonucleotide probe

SEQ ID NO: 13887 - DNA, 32 bp, Artificial; identical to SEQ ID NO: 13587
  oligonucleotide probe

SEQ ID NO: 13888 - DNA, 32 bp, Artificial; identical to SEQ ID NO: 13587
  oligonucleotide probe

SEQ ID NO: 13889 - DNA, 32 bp, Artificial; identical to SEQ ID NO: 11167
  oligonucleotide probe

SEQ ID NO: 13890 - DNA, 32 bp, Artificial; identical to SEQ ID NO: 11167
  oligonucleotide probe

SEQ ID NO: 13891 - DNA, 32 bp, Artificial; identical to SEQ ID NO: 13603
  oligonucleotide probe

SEQ ID NO: 13892 - DNA, 32 bp, Artificial; identical to SEQ ID NO: 13603
  oligonucleotide probe

SEQ ID NO: 13893 - DNA, 32 bp, Artificial; identical to SEQ ID NO: 13573
  oligonucleotide probe

SEQ ID NO: 13894 - DNA, 32 bp, Artificial; identical to SEQ ID NO: 13573
  oligonucleotide probe

SEQ ID NO: 13895 - DNA, 32 bp, Artificial; identical to SEQ ID NO: 11185
  oligonucleotide probe

SEQ ID NO: 13896 - DNA, 32 bp, Artificial; identical to SEQ ID NO: 11185
  oligonucleotide probe

SEQ ID NO: 13897 - DNA, 32 bp, Artificial; identical to SEQ ID NO: 11762
  oligonucleotide probe

SEQ ID NO: 13898 - DNA, 32 bp, Artificial; identical to SEQ ID NO: 11762
  oligonucleotide probe

SEQ ID NO: 13899 - DNA, 32 bp, Artificial; identical to SEQ ID NO: 11764
  oligonucleotide probe

SEQ ID NO: 13900 - DNA, 32 bp, Artificial; identical to SEQ ID NO: 11764
  oligonucleotide probe

SEQ ID NO: 13901 - DNA, 32 bp, Artificial; identical to SEQ ID NO: 11173
  oligonucleotide probe

SEQ ID NO: 13902 - DNA, 32 bp, Artificial; identical to SEQ ID NO: 11173
  oligonucleotide probe

SEQ ID NO: 13903 - DNA, 32 bp, Artificial; identical to SEQ ID NO: 13573
  oligonucleotide probe

SEQ ID NO: 13904 - DNA, 32 bp, Artificial; identical to SEQ ID NO: 13573
  oligonucleotide probe

SEQ ID NO: 13905 - DNA, 32 bp, Artificial; identical to SEQ ID NO: 11764
  oligonucleotide probe

SEQ ID NO: 13906 - DNA, 32 bp, Artificial; identical to SEQ ID NO: 11764
  oligonucleotide probe

SEQ ID NO: 13907 - DNA, 32 bp, Artificial; identical to SEQ ID NO: 11173
  oligonucleotide probe

SEQ ID NO: 13908 - DNA, 32 bp, Artificial; identical to SEQ ID NO: 11173
  oligonucleotide probe

SEQ ID NO: 13909 - DNA, 32 bp, Artificial; identical to SEQ ID NO: 13603
  oligonucleotide probe

SEQ ID NO: 13910 - DNA, 32 bp, Artificial; identical to SEQ ID NO: 13603
  oligonucleotide probe

SEQ ID NO: 13911 - DNA, 32 bp, Artificial; identical to SEQ ID NO: 13603
  oligonucleotide probe

SEQ ID NO: 13912 - DNA, 32 bp, Artificial; identical to SEQ ID NO: 13603
  oligonucleotide probe

SEQ ID NO: 13913 - DNA, 32 bp, Artificial; identical to SEQ ID NO: 11762
  oligonucleotide probe

SEQ ID NO: 13914 - DNA, 32 bp, Artificial; identical to SEQ ID NO: 11762
  oligonucleotide probe

SEQ ID NO: 13915 - DNA, 32 bp, Artificial; identical to SEQ ID NO: 11756
  oligonucleotide probe

SEQ ID NO: 13916 - DNA, 32 bp, Artificial; identical to SEQ ID NO: 11756
  oligonucleotide probe

SEQ ID NO: 13917 - DNA, 32 bp, Artificial; identical to SEQ ID NO: 11167
  oligonucleotide probe

SEQ ID NO: 13918 - DNA, 32 bp, Artificial; identical to SEQ ID NO: 11167
  oligonucleotide probe

SEQ ID NO: 13919 - DNA, 32 bp, Artificial; identical to SEQ ID NO: 11171
  oligonucleotide probe

SEQ ID NO: 13920 - DNA, 32 bp, Artificial; identical to SEQ ID NO: 11171
  oligonucleotide probe

SEQ ID NO: 13921 - DNA, 32 bp, Artificial; identical to SEQ ID NO: 11165
  oligonucleotide probe

SEQ ID NO: 13922 - DNA, 32 bp, Artificial; identical to SEQ ID NO: 11165
  oligonucleotide probe

SEQ ID NO: 13923 - DNA, 32 bp, Artificial; identical to SEQ ID NO: 11167
  oligonucleotide probe

SEQ ID NO: 13924 - DNA, 32 bp, Artificial; identical to SEQ ID NO: 11167
  oligonucleotide probe

SEQ ID NO: 13925 - DNA, 32 bp, Artificial; identical to SEQ ID NO: 13587
  oligonucleotide probe

SEQ ID NO: 13926 - DNA, 32 bp, Artificial; identical to SEQ ID NO: 13587
  oligonucleotide probe

SEQ ID NO: 13927 - DNA, 32 bp, Artificial; identical to SEQ ID NO: 11185
  oligonucleotide probe

SEQ ID NO: 13928 - DNA, 32 bp, Artificial; identical to SEQ ID NO: 11185
  oligonucleotide probe

SEQ ID NO: 13929 - DNA, 32 bp, Artificial; identical to SEQ ID NO: 11756
  oligonucleotide probe

SEQ ID NO: 13930 - DNA, 32 bp, Artificial; identical to SEQ ID NO: 11756
  oligonucleotide probe

SEQ ID NO: 13931 - DNA, 32 bp, Artificial; identical to SEQ ID NO: 11764
  oligonucleotide probe

SEQ ID NO: 13932 - DNA, 32 bp, Artificial; identical to SEQ ID NO: 11764
  oligonucleotide probe

SEQ ID NO: 13933 - DNA, 32 bp, Artificial; identical to SEQ ID NO: 11167
  oligonucleotide probe

SEQ ID NO: 13934 - DNA, 32 bp, Artificial; identical to SEQ ID NO: 11167
  oligonucleotide probe

SEQ ID NO: 13935 - DNA, 32 bp, Artificial; identical to SEQ ID NO: 13587
  oligonucleotide probe

SEQ ID NO: 13936 - DNA, 32 bp, Artificial; identical to SEQ ID NO: 13587
  oligonucleotide probe

SEQ ID NO: 13937 - DNA, 32 bp, Artificial; identical to SEQ ID NO: 11770
  oligonucleotide probe

SEQ ID NO: 13938 - DNA, 32 bp, Artificial; identical to SEQ ID NO: 11770
  oligonucleotide probe

SEQ ID NO: 13939 - DNA, 32 bp, Artificial; identical to SEQ ID NO: 11764
  oligonucleotide probe

SEQ ID NO: 13940 - DNA, 32 bp, Artificial; identical to SEQ ID NO: 11764
  oligonucleotide probe

SEQ ID NO: 13941 - DNA, 32 bp, Artificial; identical to SEQ ID NO: 13619
  oligonucleotide probe

SEQ ID NO: 13942 - DNA, 32 bp, Artificial; identical to SEQ ID NO: 13619
  oligonucleotide probe

SEQ ID NO: 13943 - DNA, 32 bp, Artificial; identical to SEQ ID NO: 11171
  oligonucleotide probe

SEQ ID NO: 13944 - DNA, 32 bp, Artificial; identical to SEQ ID NO: 11171
  oligonucleotide probe

SEQ ID NO: 13945 - DNA, 32 bp, Artificial; identical to SEQ ID NO: 13619
  oligonucleotide probe

SEQ ID NO: 13946 - DNA, 32 bp, Artificial; identical to SEQ ID NO: 13619
  oligonucleotide probe

SEQ ID NO: 13947 - DNA, 32 bp, Artificial; identical to SEQ ID NO: 13603
  oligonucleotide probe

SEQ ID NO: 13948 - DNA, 32 bp, Artificial; identical to SEQ ID NO: 13603
  oligonucleotide probe

SEQ ID NO: 13949 - DNA, 32 bp, Artificial; identical to SEQ ID NO: 11770
  oligonucleotide probe

SEQ ID NO: 13950 - DNA, 32 bp, Artificial; identical to SEQ ID NO: 11770
  oligonucleotide probe

SEQ ID NO: 13951 - DNA, 32 bp, Artificial; identical to SEQ ID NO: 11756
  oligonucleotide probe

SEQ ID NO: 13952 - DNA, 32 bp, Artificial; identical to SEQ ID NO: 11756
  oligonucleotide probe

SEQ ID NO: 13953 - DNA, 32 bp, Artificial; identical to SEQ ID NO: 11181
  oligonucleotide probe

SEQ ID NO: 13954 - DNA, 32 bp, Artificial; identical to SEQ ID NO: 11181
  oligonucleotide probe

SEQ ID NO: 13955 - DNA, 32 bp, Artificial; identical to SEQ ID NO: 13603
  oligonucleotide probe

SEQ ID NO: 13956 - DNA, 32 bp, Artificial; identical to SEQ ID NO: 13603
  oligonucleotide probe

SEQ ID NO: 13957 - DNA, 32 bp, Artificial; identical to SEQ ID NO: 11185
  oligonucleotide probe

SEQ ID NO: 13958 - DNA, 32 bp, Artificial; identical to SEQ ID NO: 11185
  oligonucleotide probe

SEQ ID NO: 13959 - DNA, 32 bp, Artificial; identical to SEQ ID NO: 11173
  oligonucleotide probe

SEQ ID NO: 13960 - DNA, 32 bp, Artificial; identical to SEQ ID NO: 11173
  oligonucleotide probe

SEQ ID NO: 13961 - DNA, 32 bp, Artificial; identical to SEQ ID NO: 13587
  oligonucleotide probe

SEQ ID NO: 13962 - DNA, 32 bp, Artificial; identical to SEQ ID NO: 13587
  oligonucleotide probe

SEQ ID NO: 13963 - DNA, 32 bp, Artificial; identical to SEQ ID NO: 11770
  oligonucleotide probe

SEQ ID NO: 13964 - DNA, 32 bp, Artificial; identical to SEQ ID NO: 11770
  oligonucleotide probe

SEQ ID NO: 13965 - DNA, 32 bp, Artificial; identical to SEQ ID NO: 11165
  oligonucleotide probe

SEQ ID NO: 13966 - DNA, 32 bp, Artificial; identical to SEQ ID NO: 11165
  oligonucleotide probe

SEQ ID NO: 13967 - DNA, 32 bp, Artificial; identical to SEQ ID NO: 11177
  oligonucleotide probe

SEQ ID NO: 13968 - DNA, 32 bp, Artificial; identical to SEQ ID NO: 11177
  oligonucleotide probe

SEQ ID NO: 13969 - DNA, 32 bp, Artificial; identical to SEQ ID NO: 13619
  oligonucleotide probe

SEQ ID NO: 13970 - DNA, 32 bp, Artificial; identical to SEQ ID NO: 13619
  oligonucleotide probe

SEQ ID NO: 13971 - DNA, 32 bp, Artificial; identical to SEQ ID NO: 13573
  oligonucleotide probe

SEQ ID NO: 13972 - DNA, 32 bp, Artificial; identical to SEQ ID NO: 13573
  oligonucleotide probe

SEQ ID NO: 13973 - DNA, 32 bp, Artificial; identical to SEQ ID NO: 13603
  oligonucleotide probe

SEQ ID NO: 13974 - DNA, 32 bp, Artificial; identical to SEQ ID NO: 13603
  oligonucleotide probe

SEQ ID NO: 13975 - DNA, 32 bp, Artificial; identical to SEQ ID NO: 11173
  oligonucleotide probe

SEQ ID NO: 13976 - DNA, 32 bp, Artificial; identical to SEQ ID NO: 11173
  oligonucleotide probe

SEQ ID NO: 13977 - DNA, 32 bp, Artificial; identical to SEQ ID NO: 11185
  oligonucleotide probe

SEQ ID NO: 13978 - DNA, 32 bp, Artificial; identical to SEQ ID NO: 11185
  oligonucleotide probe

SEQ ID NO: 13979 - DNA, 32 bp, Artificial; identical to SEQ ID NO: 11764
  oligonucleotide probe

SEQ ID NO: 13980 - DNA, 32 bp, Artificial; identical to SEQ ID NO: 11764
  oligonucleotide probe

SEQ ID NO: 13981 - DNA, 32 bp, Artificial; identical to SEQ ID NO: 11163
  oligonucleotide probe

SEQ ID NO: 13982 - DNA, 32 bp, Artificial; identical to SEQ ID NO: 11163
  oligonucleotide probe

SEQ ID NO: 13983 - DNA, 32 bp, Artificial; identical to SEQ ID NO: 13573
  oligonucleotide probe

SEQ ID NO: 13984 - DNA, 32 bp, Artificial; identical to SEQ ID NO: 13573
  oligonucleotide probe

SEQ ID NO: 13985 - DNA, 32 bp, Artificial; identical to SEQ ID NO: 13619
  oligonucleotide probe

SEQ ID NO: 13986 - DNA, 32 bp, Artificial; identical to SEQ ID NO: 13619
  oligonucleotide probe

SEQ ID NO: 13987 - DNA, 32 bp, Artificial; identical to SEQ ID NO: 11173
  oligonucleotide probe

SEQ ID NO: 13988 - DNA, 32 bp, Artificial; identical to SEQ ID NO: 11173
  oligonucleotide probe

SEQ ID NO: 13989 - DNA, 32 bp, Artificial; identical to SEQ ID NO: 11163
  oligonucleotide probe

SEQ ID NO: 13990 - DNA, 32 bp, Artificial; identical to SEQ ID NO: 11163
  oligonucleotide probe

SEQ ID NO: 13991 - DNA, 32 bp, Artificial; identical to SEQ ID NO: 11167
  oligonucleotide probe

SEQ ID NO: 13992 - DNA, 32 bp, Artificial; identical to SEQ ID NO: 11167
  oligonucleotide probe

SEQ ID NO: 13993 - DNA, 32 bp, Artificial; identical to SEQ ID NO: 11173
  oligonucleotide probe

SEQ ID NO: 13994 - DNA, 32 bp, Artificial; identical to SEQ ID NO: 11173
  oligonucleotide probe

SEQ ID NO: 13995 - DNA, 32 bp, Artificial; identical to SEQ ID NO: 13619
  oligonucleotide probe

SEQ ID NO: 13996 - DNA, 32 bp, Artificial; identical to SEQ ID NO: 13619
  oligonucleotide probe

SEQ ID NO: 13997 - DNA, 32 bp, Artificial; identical to SEQ ID NO: 11165
  oligonucleotide probe

SEQ ID NO: 13998 - DNA, 32 bp, Artificial; identical to SEQ ID NO: 11165
  oligonucleotide probe

SEQ ID NO: 13999 - DNA, 32 bp, Artificial; identical to SEQ ID NO: 11173
  oligonucleotide probe

SEQ ID NO: 14000 - DNA, 32 bp, Artificial; identical to SEQ ID NO: 11173
  oligonucleotide probe

SEQ ID NO: 14001 - DNA, 32 bp, Artificial; identical to SEQ ID NO: 11764
  oligonucleotide probe

SEQ ID NO: 14002 - DNA, 32 bp, Artificial; identical to SEQ ID NO: 11764
  oligonucleotide probe

SEQ ID NO: 14003 - DNA, 32 bp, Artificial; identical to SEQ ID NO: 13573
  oligonucleotide probe

SEQ ID NO: 14004 - DNA, 32 bp, Artificial; identical to SEQ ID NO: 13573
  oligonucleotide probe

SEQ ID NO: 14005 - DNA, 32 bp, Artificial; identical to SEQ ID NO: 13587
  oligonucleotide probe

SEQ ID NO: 14006 - DNA, 32 bp, Artificial; identical to SEQ ID NO: 13587
  oligonucleotide probe

SEQ ID NO: 14007 - DNA, 32 bp, Artificial; identical to SEQ ID NO: 11181
  oligonucleotide probe

SEQ ID NO: 14008 - DNA, 32 bp, Artificial; identical to SEQ ID NO: 11181
  oligonucleotide probe

SEQ ID NO: 14009 - DNA, 32 bp, Artificial; identical to SEQ ID NO: 11171
  oligonucleotide probe

SEQ ID NO: 14010 - DNA, 32 bp, Artificial; identical to SEQ ID NO: 11171
  oligonucleotide probe

SEQ ID NO: 14011 - DNA, 32 bp, Artificial; identical to SEQ ID NO: 13573
  oligonucleotide probe

SEQ ID NO: 14012 - DNA, 32 bp, Artificial; identical to SEQ ID NO: 13573
  oligonucleotide probe

SEQ ID NO: 14013 - DNA, 32 bp, Artificial; identical to SEQ ID NO: 11770
  oligonucleotide probe

SEQ ID NO: 14014 - DNA, 32 bp, Artificial; identical to SEQ ID NO: 11770
  oligonucleotide probe

SEQ ID NO: 14015 - DNA, 32 bp, Artificial; identical to SEQ ID NO: 11185
  oligonucleotide probe

SEQ ID NO: 14016 - DNA, 32 bp, Artificial; identical to SEQ ID NO: 11185
  oligonucleotide probe

SEQ ID NO: 14017 - DNA, 32 bp, Artificial; identical to SEQ ID NO: 11764
  oligonucleotide probe

SEQ ID NO: 14018 - DNA, 32 bp, Artificial; identical to SEQ ID NO: 11764
  oligonucleotide probe

SEQ ID NO: 14019 - DNA, 32 bp, Artificial; identical to SEQ ID NO: 13573
  oligonucleotide probe

SEQ ID NO: 14020 - DNA, 32 bp, Artificial; identical to SEQ ID NO: 13573
  oligonucleotide probe

SEQ ID NO: 14021 - DNA, 32 bp, Artificial; identical to SEQ ID NO: 11181
  oligonucleotide probe

SEQ ID NO: 14022 - DNA, 32 bp, Artificial; identical to SEQ ID NO: 11181
  oligonucleotide probe

SEQ ID NO: 14023 - DNA, 32 bp, Artificial; identical to SEQ ID NO: 11770
  oligonucleotide probe

SEQ ID NO: 14024 - DNA, 32 bp, Artificial; identical to SEQ ID NO: 11770
  oligonucleotide probe

SEQ ID NO: 14025 - DNA, 32 bp, Artificial; identical to SEQ ID NO: 11177
  oligonucleotide probe

SEQ ID NO: 14026 - DNA, 32 bp, Artificial; identical to SEQ ID NO: 11177
  oligonucleotide probe

SEQ ID NO: 14027 - DNA, 32 bp, Artificial; identical to SEQ ID NO: 11177
  oligonucleotide probe

SEQ ID NO: 14028 - DNA, 32 bp, Artificial; identical to SEQ ID NO: 11177
  oligonucleotide probe

SEQ ID NO: 14029 - DNA, 32 bp, Artificial; identical to SEQ ID NO: 11762
  oligonucleotide probe

SEQ ID NO: 14030 - DNA, 32 bp, Artificial; identical to SEQ ID NO: 11762
  oligonucleotide probe

SEQ ID NO: 14031 - DNA, 32 bp, Artificial; identical to SEQ ID NO: 11762
  oligonucleotide probe

SEQ ID NO: 14032 - DNA, 32 bp, Artificial; identical to SEQ ID NO: 11762
  oligonucleotide probe

SEQ ID NO: 14033 - DNA, 32 bp, Artificial; identical to SEQ ID NO: 13619
  oligonucleotide probe

SEQ ID NO: 14034 - DNA, 32 bp, Artificial; identical to SEQ ID NO: 13619
  oligonucleotide probe

SEQ ID NO: 14035 - DNA, 32 bp, Artificial; identical to SEQ ID NO: 11770
  oligonucleotide probe

SEQ ID NO: 14036 - DNA, 32 bp, Artificial; identical to SEQ ID NO: 11770
  oligonucleotide probe

SEQ ID NO: 14037 - DNA, 32 bp, Artificial; identical to SEQ ID NO: 13603
  oligonucleotide probe

SEQ ID NO: 14038 - DNA, 32 bp, Artificial; identical to SEQ ID NO: 13603
  oligonucleotide probe

SEQ ID NO: 14039 - DNA, 32 bp, Artificial; identical to SEQ ID NO: 11770
  oligonucleotide probe

SEQ ID NO: 14040 - DNA, 32 bp, Artificial; identical to SEQ ID NO: 11770
  oligonucleotide probe

SEQ ID NO: 14041 - DNA, 32 bp, Artificial; identical to SEQ ID NO: 11181
  oligonucleotide probe

SEQ ID NO: 14042 - DNA, 32 bp, Artificial; identical to SEQ ID NO: 11181
  oligonucleotide probe

SEQ ID NO: 14043 - DNA, 32 bp, Artificial; identical to SEQ ID NO: 13619
  oligonucleotide probe

SEQ ID NO: 14044 - DNA, 32 bp, Artificial; identical to SEQ ID NO: 13619
  oligonucleotide probe

SEQ ID NO: 14045 - DNA, 32 bp, Artificial; identical to SEQ ID NO: 11181
  oligonucleotide probe

SEQ ID NO: 14046 - DNA, 32 bp, Artificial; identical to SEQ ID NO: 11181
  oligonucleotide probe

SEQ ID NO: 14047 - DNA, 32 bp, Artificial; identical to SEQ ID NO: 11171
  oligonucleotide probe

SEQ ID NO: 14048 - DNA, 32 bp, Artificial; identical to SEQ ID NO: 11171
  oligonucleotide probe

SEQ ID NO: 14049 - DNA, 32 bp, Artificial; identical to SEQ ID NO: 13603
  oligonucleotide probe

SEQ ID NO: 14050 - DNA, 32 bp, Artificial; identical to SEQ ID NO: 13603
  oligonucleotide probe

SEQ ID NO: 14051 - DNA, 32 bp, Artificial; identical to SEQ ID NO: 13587
  oligonucleotide probe

SEQ ID NO: 14052 - DNA, 32 bp, Artificial; identical to SEQ ID NO: 13587
  oligonucleotide probe

SEQ ID NO: 14053 - DNA, 32 bp, Artificial; identical to SEQ ID NO: 11770
  oligonucleotide probe

SEQ ID NO: 14054 - DNA, 32 bp, Artificial; identical to SEQ ID NO: 11770
  oligonucleotide probe

SEQ ID NO: 14055 - DNA, 32 bp, Artificial; identical to SEQ ID NO: 11762
  oligonucleotide probe

SEQ ID NO: 14056 - DNA, 32 bp, Artificial; identical to SEQ ID NO: 11762
  oligonucleotide probe

SEQ ID NO: 14057 - DNA, 32 bp, Artificial; identical to SEQ ID NO: 13573
  oligonucleotide probe

SEQ ID NO: 14058 - DNA, 32 bp, Artificial; identical to SEQ ID NO: 13573
  oligonucleotide probe

SEQ ID NO: 14059 - DNA, 32 bp, Artificial; identical to SEQ ID NO: 11173
  oligonucleotide probe

SEQ ID NO: 14060 - DNA, 32 bp, Artificial; identical to SEQ ID NO: 11173
  oligonucleotide probe

SEQ ID NO: 14061 - DNA, 32 bp, Artificial; identical to SEQ ID NO: 13587
  oligonucleotide probe

SEQ ID NO: 14062 - DNA, 32 bp, Artificial; identical to SEQ ID NO: 13587
  oligonucleotide probe

SEQ ID NO: 14063 - DNA, 32 bp, Artificial; identical to SEQ ID NO: 13619
  oligonucleotide probe

SEQ ID NO: 14064 - DNA, 32 bp, Artificial; identical to SEQ ID NO: 13619
  oligonucleotide probe

SEQ ID NO: 14065 - DNA, 32 bp, Artificial; identical to SEQ ID NO: 13619
  oligonucleotide probe

SEQ ID NO: 14066 - DNA, 32 bp, Artificial; identical to SEQ ID NO: 13619
  oligonucleotide probe

SEQ ID NO: 14067 - DNA, 32 bp, Artificial; identical to SEQ ID NO: 13603
  oligonucleotide probe

SEQ ID NO: 14068 - DNA, 32 bp, Artificial; identical to SEQ ID NO: 13603
  oligonucleotide probe

SEQ ID NO: 14069 - DNA, 32 bp, Artificial; identical to SEQ ID NO: 13603
  oligonucleotide probe

SEQ ID NO: 14070 - DNA, 32 bp, Artificial; identical to SEQ ID NO: 13603
  oligonucleotide probe

SEQ ID NO: 14071 - DNA, 32 bp, Artificial; identical to SEQ ID NO: 13587
  oligonucleotide probe

SEQ ID NO: 14072 - DNA, 32 bp, Artificial; identical to SEQ ID NO: 13587
  oligonucleotide probe

SEQ ID NO: 14073 - DNA, 32 bp, Artificial; identical to SEQ ID NO: 13587
  oligonucleotide probe

SEQ ID NO: 14074 - DNA, 32 bp, Artificial; identical to SEQ ID NO: 13587
  oligonucleotide probe

SEQ ID NO: 14075 - DNA, 32 bp, Artificial; identical to SEQ ID NO: 13587
  oligonucleotide probe

SEQ ID NO: 14076 - DNA, 32 bp, Artificial; identical to SEQ ID NO: 13587
  oligonucleotide probe

SEQ ID NO: 14077 - DNA, 32 bp, Artificial; identical to SEQ ID NO: 11756
  oligonucleotide probe

SEQ ID NO: 14078 - DNA, 32 bp, Artificial; identical to SEQ ID NO: 11756
  oligonucleotide probe

SEQ ID NO: 14079 - DNA, 32 bp, Artificial; identical to SEQ ID NO: 13587
  oligonucleotide probe

SEQ ID NO: 14080 - DNA, 32 bp, Artificial; identical to SEQ ID NO: 13587
  oligonucleotide probe

SEQ ID NO: 14081 - DNA, 32 bp, Artificial; identical to SEQ ID NO: 13573
  oligonucleotide probe

SEQ ID NO: 14082 - DNA, 32 bp, Artificial; identical to SEQ ID NO: 13573
  oligonucleotide probe

SEQ ID NO: 14083 - DNA, 32 bp, Artificial; identical to SEQ ID NO: 11177
  oligonucleotide probe

SEQ ID NO: 14084 - DNA, 32 bp, Artificial; identical to SEQ ID NO: 11177
  oligonucleotide probe

SEQ ID NO: 14085 - DNA, 32 bp, Artificial; identical to SEQ ID NO: 13603
  oligonucleotide probe

SEQ ID NO: 14086 - DNA, 32 bp, Artificial; identical to SEQ ID NO: 13603
  oligonucleotide probe

SEQ ID NO: 14087 - DNA, 32 bp, Artificial; identical to SEQ ID NO: 13587
  oligonucleotide probe

SEQ ID NO: 14088 - DNA, 32 bp, Artificial; identical to SEQ ID NO: 13587
  oligonucleotide probe

SEQ ID NO: 14089 - DNA, 32 bp, Artificial; identical to SEQ ID NO: 11764
  oligonucleotide probe

SEQ ID NO: 14090 - DNA, 32 bp, Artificial; identical to SEQ ID NO: 11764
  oligonucleotide probe

SEQ ID NO: 14091 - DNA, 32 bp, Artificial; identical to SEQ ID NO: 13587
  oligonucleotide probe

SEQ ID NO: 14092 - DNA, 32 bp, Artificial; identical to SEQ ID NO: 13587
  oligonucleotide probe

SEQ ID NO: 14093 - DNA, 32 bp, Artificial; identical to SEQ ID NO: 11163
  oligonucleotide probe

SEQ ID NO: 14094 - DNA, 32 bp, Artificial; identical to SEQ ID NO: 11163
  oligonucleotide probe

SEQ ID NO: 14095 - DNA, 32 bp, Artificial; identical to SEQ ID NO: 11770
  oligonucleotide probe

SEQ ID NO: 14096 - DNA, 32 bp, Artificial; identical to SEQ ID NO: 11770
  oligonucleotide probe

SEQ ID NO: 14097 - DNA, 32 bp, Artificial; identical to SEQ ID NO: 11163
  oligonucleotide probe

SEQ ID NO: 14098 - DNA, 32 bp, Artificial; identical to SEQ ID NO: 11163
  oligonucleotide probe

SEQ ID NO: 14099 - DNA, 32 bp, Artificial; identical to SEQ ID NO: 13619
  oligonucleotide probe

SEQ ID NO: 14100 - DNA, 32 bp, Artificial; identical to SEQ ID NO: 13619
  oligonucleotide probe

SEQ ID NO: 14101 - DNA, 32 bp, Artificial; identical to SEQ ID NO: 11762
  oligonucleotide probe

SEQ ID NO: 14102 - DNA, 32 bp, Artificial; identical to SEQ ID NO: 11762
  oligonucleotide probe

SEQ ID NO: 14103 - DNA, 32 bp, Artificial; identical to SEQ ID NO: 13573
  oligonucleotide probe

SEQ ID NO: 14104 - DNA, 32 bp, Artificial; identical to SEQ ID NO: 13573
  oligonucleotide probe

SEQ ID NO: 14105 - DNA, 32 bp, Artificial; identical to SEQ ID NO: 13573
  oligonucleotide probe

SEQ ID NO: 14106 - DNA, 32 bp, Artificial; identical to SEQ ID NO: 13573
  oligonucleotide probe

SEQ ID NO: 14107 - DNA, 32 bp, Artificial; identical to SEQ ID NO: 11177
  oligonucleotide probe

SEQ ID NO: 14108 - DNA, 32 bp, Artificial; identical to SEQ ID NO: 11177
  oligonucleotide probe

SEQ ID NO: 14109 - DNA, 32 bp, Artificial; identical to SEQ ID NO: 13603
  oligonucleotide probe

SEQ ID NO: 14110 - DNA, 32 bp, Artificial; identical to SEQ ID NO: 13603
  oligonucleotide probe

SEQ ID NO: 14111 - DNA, 32 bp, Artificial; identical to SEQ ID NO: 13603
  oligonucleotide probe

SEQ ID NO: 14112 - DNA, 32 bp, Artificial; identical to SEQ ID NO: 13603
  oligonucleotide probe

SEQ ID NO: 14113 - DNA, 32 bp, Artificial; identical to SEQ ID NO: 11163
  oligonucleotide probe

SEQ ID NO: 14114 - DNA, 32 bp, Artificial; identical to SEQ ID NO: 11163
  oligonucleotide probe

SEQ ID NO: 14115 - DNA, 32 bp, Artificial; identical to SEQ ID NO: 13573
  oligonucleotide probe

SEQ ID NO: 14116 - DNA, 32 bp, Artificial; identical to SEQ ID NO: 13573
  oligonucleotide probe

SEQ ID NO: 14117 - DNA, 32 bp, Artificial; identical to SEQ ID NO: 11163
  oligonucleotide probe

SEQ ID NO: 14118 - DNA, 32 bp, Artificial; identical to SEQ ID NO: 11163
  oligonucleotide probe

SEQ ID NO: 14119 - DNA, 32 bp, Artificial; identical to SEQ ID NO: 11762
  oligonucleotide probe

SEQ ID NO: 14120 - DNA, 32 bp, Artificial; identical to SEQ ID NO: 11762
  oligonucleotide probe

SEQ ID NO: 14121 - DNA, 32 bp, Artificial; identical to SEQ ID NO: 11165
  oligonucleotide probe

SEQ ID NO: 14122 - DNA, 32 bp, Artificial; identical to SEQ ID NO: 11165
  oligonucleotide probe

SEQ ID NO: 14123 - DNA, 32 bp, Artificial; identical to SEQ ID NO: 11171
  oligonucleotide probe

SEQ ID NO: 14124 - DNA, 32 bp, Artificial; identical to SEQ ID NO: 11171
  oligonucleotide probe

SEQ ID NO: 14125 - DNA, 32 bp, Artificial; identical to SEQ ID NO: 13587
  oligonucleotide probe

SEQ ID NO: 14126 - DNA, 32 bp, Artificial; identical to SEQ ID NO: 13587
  oligonucleotide probe

SEQ ID NO: 14127 - DNA, 32 bp, Artificial; identical to SEQ ID NO: 13603
  oligonucleotide probe

SEQ ID NO: 14128 - DNA, 32 bp, Artificial; identical to SEQ ID NO: 13603
  oligonucleotide probe

SEQ ID NO: 14129 - DNA, 32 bp, Artificial; identical to SEQ ID NO: 13573
  oligonucleotide probe

SEQ ID NO: 14130 - DNA, 32 bp, Artificial; identical to SEQ ID NO: 13573
  oligonucleotide probe

SEQ ID NO: 14131 - DNA, 32 bp, Artificial; identical to SEQ ID NO: 11756
  oligonucleotide probe

SEQ ID NO: 14132 - DNA, 32 bp, Artificial; identical to SEQ ID NO: 11756
  oligonucleotide probe

SEQ ID NO: 14133 - DNA, 32 bp, Artificial; identical to SEQ ID NO: 13603
  oligonucleotide probe

SEQ ID NO: 14134 - DNA, 32 bp, Artificial; identical to SEQ ID NO: 13603
  oligonucleotide probe

SEQ ID NO: 14135 - DNA, 32 bp, Artificial; identical to SEQ ID NO: 13587
  oligonucleotide probe

SEQ ID NO: 14136 - DNA, 32 bp, Artificial; identical to SEQ ID NO: 13587
  oligonucleotide probe

SEQ ID NO: 14137 - DNA, 32 bp, Artificial; identical to SEQ ID NO: 11167
  oligonucleotide probe

SEQ ID NO: 14138 - DNA, 32 bp, Artificial; identical to SEQ ID NO: 11167
  oligonucleotide probe

SEQ ID NO: 14139 - DNA, 32 bp, Artificial; identical to SEQ ID NO: 13619
  oligonucleotide probe

SEQ ID NO: 14140 - DNA, 32 bp, Artificial; identical to SEQ ID NO: 13619
  oligonucleotide probe

SEQ ID NO: 14141 - DNA, 32 bp, Artificial; identical to SEQ ID NO: 13587
  oligonucleotide probe

SEQ ID NO: 14142 - DNA, 32 bp, Artificial; identical to SEQ ID NO: 13587
  oligonucleotide probe

SEQ ID NO: 14143 - DNA, 32 bp, Artificial; identical to SEQ ID NO: 13573
  oligonucleotide probe

SEQ ID NO: 14144 - DNA, 32 bp, Artificial; identical to SEQ ID NO: 13573
  oligonucleotide probe

SEQ ID NO: 14145 - DNA, 32 bp, Artificial; identical to SEQ ID NO: 11171
  oligonucleotide probe

SEQ ID NO: 14146 - DNA, 32 bp, Artificial; identical to SEQ ID NO: 11171
  oligonucleotide probe

SEQ ID NO: 14147 - DNA, 32 bp, Artificial; identical to SEQ ID NO: 11165
  oligonucleotide probe

SEQ ID NO: 14148 - DNA, 32 bp, Artificial; identical to SEQ ID NO: 11165
  oligonucleotide probe

SEQ ID NO: 14149 - DNA, 32 bp, Artificial; identical to SEQ ID NO: 11770
  oligonucleotide probe

SEQ ID NO: 14150 - DNA, 32 bp, Artificial; identical to SEQ ID NO: 11770
  oligonucleotide probe

SEQ ID NO: 14151 - DNA, 32 bp, Artificial; identical to SEQ ID NO: 13587
  oligonucleotide probe

SEQ ID NO: 14152 - DNA, 32 bp, Artificial; identical to SEQ ID NO: 13587
  oligonucleotide probe

SEQ ID NO: 14153 - DNA, 32 bp, Artificial; identical to SEQ ID NO: 13603
  oligonucleotide probe

SEQ ID NO: 14154 - DNA, 32 bp, Artificial; identical to SEQ ID NO: 13603
  oligonucleotide probe

SEQ ID NO: 14155 - DNA, 32 bp, Artificial; identical to SEQ ID NO: 13573
  oligonucleotide probe

SEQ ID NO: 14156 - DNA, 32 bp, Artificial; identical to SEQ ID NO: 13573
  oligonucleotide probe

SEQ ID NO: 14157 - DNA, 32 bp, Artificial; identical to SEQ ID NO: 13587
  oligonucleotide probe

SEQ ID NO: 14158 - DNA, 32 bp, Artificial; identical to SEQ ID NO: 13587
  oligonucleotide probe

SEQ ID NO: 14159 - DNA, 32 bp, Artificial; identical to SEQ ID NO: 13573
  oligonucleotide probe

SEQ ID NO: 14160 - DNA, 32 bp, Artificial; identical to SEQ ID NO: 13573
  oligonucleotide probe

SEQ ID NO: 14161 - DNA, 32 bp, Artificial; identical to SEQ ID NO: 11181
  oligonucleotide probe

SEQ ID NO: 14162 - DNA, 32 bp, Artificial; identical to SEQ ID NO: 11181
  oligonucleotide probe

SEQ ID NO: 14163 - DNA, 32 bp, Artificial; identical to SEQ ID NO: 11181
  oligonucleotide probe

SEQ ID NO: 14164 - DNA, 32 bp, Artificial; identical to SEQ ID NO: 11181
  oligonucleotide probe

SEQ ID NO: 14165 - DNA, 32 bp, Artificial; identical to SEQ ID NO: 13587
  oligonucleotide probe

SEQ ID NO: 14166 - DNA, 32 bp, Artificial; identical to SEQ ID NO: 13587
  oligonucleotide probe

SEQ ID NO: 14167 - DNA, 32 bp, Artificial; identical to SEQ ID NO: 11173
  oligonucleotide probe

SEQ ID NO: 14168 - DNA, 32 bp, Artificial; identical to SEQ ID NO: 11173
  oligonucleotide probe

SEQ ID NO: 14169 - DNA, 32 bp, Artificial; identical to SEQ ID NO: 13587
  oligonucleotide probe

SEQ ID NO: 14170 - DNA, 32 bp, Artificial; identical to SEQ ID NO: 13587
  oligonucleotide probe

SEQ ID NO: 14171 - DNA, 32 bp, Artificial; identical to SEQ ID NO: 11177
  oligonucleotide probe

SEQ ID NO: 14172 - DNA, 32 bp, Artificial; identical to SEQ ID NO: 11177
  oligonucleotide probe

SEQ ID NO: 14173 - DNA, 32 bp, Artificial; identical to SEQ ID NO: 13587
  oligonucleotide probe

SEQ ID NO: 14174 - DNA, 32 bp, Artificial; identical to SEQ ID NO: 13587
  oligonucleotide probe

SEQ ID NO: 14175 - DNA, 32 bp, Artificial; identical to SEQ ID NO: 11185
  oligonucleotide probe

SEQ ID NO: 14176 - DNA, 32 bp, Artificial; identical to SEQ ID NO: 11185
  oligonucleotide probe

SEQ ID NO: 14177 - DNA, 32 bp, Artificial; identical to SEQ ID NO: 13619
  oligonucleotide probe

SEQ ID NO: 14178 - DNA, 32 bp, Artificial; identical to SEQ ID NO: 13619
  oligonucleotide probe

SEQ ID NO: 14179 - DNA, 32 bp, Artificial; identical to SEQ ID NO: 13573
  oligonucleotide probe

SEQ ID NO: 14180 - DNA, 32 bp, Artificial; identical to SEQ ID NO: 13573
  oligonucleotide probe

SEQ ID NO: 14181 - DNA, 32 bp, Artificial; identical to SEQ ID NO: 11181
  oligonucleotide probe

SEQ ID NO: 14182 - DNA, 32 bp, Artificial; identical to SEQ ID NO: 11181
  oligonucleotide probe

SEQ ID NO: 14183 - DNA, 32 bp, Artificial; identical to SEQ ID NO: 13603
  oligonucleotide probe

SEQ ID NO: 14184 - DNA, 32 bp, Artificial; identical to SEQ ID NO: 13603
  oligonucleotide probe

SEQ ID NO: 14185 - DNA, 32 bp, Artificial; identical to SEQ ID NO: 11756
  oligonucleotide probe

SEQ ID NO: 14186 - DNA, 32 bp, Artificial; identical to SEQ ID NO: 11756
  oligonucleotide probe

SEQ ID NO: 14187 - DNA, 32 bp, Artificial; identical to SEQ ID NO: 11167
  oligonucleotide probe

SEQ ID NO: 14188 - DNA, 32 bp, Artificial; identical to SEQ ID NO: 11167
  oligonucleotide probe

SEQ ID NO: 14189 - DNA, 32 bp, Artificial; identical to SEQ ID NO: 13587
  oligonucleotide probe

SEQ ID NO: 14190 - DNA, 32 bp, Artificial; identical to SEQ ID NO: 13587
  oligonucleotide probe

SEQ ID NO: 14191 - DNA, 32 bp, Artificial; identical to SEQ ID NO: 13573
  oligonucleotide probe

SEQ ID NO: 14192 - DNA, 32 bp, Artificial; identical to SEQ ID NO: 13573
  oligonucleotide probe

SEQ ID NO: 14193 - DNA, 32 bp, Artificial; identical to SEQ ID NO: 13587
  oligonucleotide probe

SEQ ID NO: 14194 - DNA, 32 bp, Artificial; identical to SEQ ID NO: 13587
  oligonucleotide probe

SEQ ID NO: 14195 - DNA, 32 bp, Artificial; identical to SEQ ID NO: 13587
  oligonucleotide probe

SEQ ID NO: 14196 - DNA, 32 bp, Artificial; identical to SEQ ID NO: 13587
  oligonucleotide probe

SEQ ID NO: 14197 - DNA, 32 bp, Artificial; identical to SEQ ID NO: 13573
  oligonucleotide probe

SEQ ID NO: 14198 - DNA, 32 bp, Artificial; identical to SEQ ID NO: 13573
  oligonucleotide probe

SEQ ID NO: 14199 - DNA, 32 bp, Artificial; identical to SEQ ID NO: 11173
  oligonucleotide probe

SEQ ID NO: 14200 - DNA, 32 bp, Artificial; identical to SEQ ID NO: 11173
  oligonucleotide probe

SEQ ID NO: 14201 - DNA, 32 bp, Artificial; identical to SEQ ID NO: 13603
  oligonucleotide probe

SEQ ID NO: 14202 - DNA, 32 bp, Artificial; identical to SEQ ID NO: 13603
  oligonucleotide probe

SEQ ID NO: 14203 - DNA, 32 bp, Artificial; identical to SEQ ID NO: 11171
  oligonucleotide probe

SEQ ID NO: 14204 - DNA, 32 bp, Artificial; identical to SEQ ID NO: 11171
  oligonucleotide probe

SEQ ID NO: 14205 - DNA, 32 bp, Artificial; identical to SEQ ID NO: 13619
  oligonucleotide probe

SEQ ID NO: 14206 - DNA, 32 bp, Artificial; identical to SEQ ID NO: 13619
  oligonucleotide probe

SEQ ID NO: 14207 - DNA, 32 bp, Artificial; identical to SEQ ID NO: 11163
  oligonucleotide probe

SEQ ID NO: 14208 - DNA, 32 bp, Artificial; identical to SEQ ID NO: 11163
  oligonucleotide probe

SEQ ID NO: 14209 - DNA, 32 bp, Artificial; identical to SEQ ID NO: 11163
  oligonucleotide probe

SEQ ID NO: 14210 - DNA, 32 bp, Artificial; identical to SEQ ID NO: 11163
  oligonucleotide probe

SEQ ID NO: 14211 - DNA, 32 bp, Artificial; identical to SEQ ID NO: 11171
  oligonucleotide probe

SEQ ID NO: 14212 - DNA, 32 bp, Artificial; identical to SEQ ID NO: 11171
  oligonucleotide probe

SEQ ID NO: 14213 - DNA, 32 bp, Artificial; identical to SEQ ID NO: 11764
  oligonucleotide probe

SEQ ID NO: 14214 - DNA, 32 bp, Artificial; identical to SEQ ID NO: 11764
  oligonucleotide probe

SEQ ID NO: 14215 - DNA, 32 bp, Artificial; identical to SEQ ID NO: 13587
  oligonucleotide probe

SEQ ID NO: 14216 - DNA, 32 bp, Artificial; identical to SEQ ID NO: 13587
  oligonucleotide probe

SEQ ID NO: 14217 - DNA, 32 bp, Artificial; identical to SEQ ID NO: 11167
  oligonucleotide probe

SEQ ID NO: 14218 - DNA, 32 bp, Artificial; identical to SEQ ID NO: 11167
  oligonucleotide probe

SEQ ID NO: 14219 - DNA, 32 bp, Artificial; identical to SEQ ID NO: 11163
  oligonucleotide probe

SEQ ID NO: 14220 - DNA, 32 bp, Artificial; identical to SEQ ID NO: 11163
  oligonucleotide probe

SEQ ID NO: 14221 - DNA, 32 bp, Artificial; identical to SEQ ID NO: 11185
  oligonucleotide probe

SEQ ID NO: 14222 - DNA, 32 bp, Artificial; identical to SEQ ID NO: 11185
  oligonucleotide probe

SEQ ID NO: 14223 - DNA, 32 bp, Artificial; identical to SEQ ID NO: 13603
  oligonucleotide probe

SEQ ID NO: 14224 - DNA, 32 bp, Artificial; identical to SEQ ID NO: 13603
  oligonucleotide probe

SEQ ID NO: 14225 - DNA, 32 bp, Artificial; identical to SEQ ID NO: 11173
  oligonucleotide probe

SEQ ID NO: 14226 - DNA, 32 bp, Artificial; identical to SEQ ID NO: 11173
  oligonucleotide probe

SEQ ID NO: 14227 - DNA, 32 bp, Artificial; identical to SEQ ID NO: 11185
  oligonucleotide probe

SEQ ID NO: 14228 - DNA, 32 bp, Artificial; identical to SEQ ID NO: 11185
  oligonucleotide probe

SEQ ID NO: 14229 - DNA, 32 bp, Artificial; identical to SEQ ID NO: 11756
  oligonucleotide probe

SEQ ID NO: 14230 - DNA, 32 bp, Artificial; identical to SEQ ID NO: 11756
  oligonucleotide probe

SEQ ID NO: 14231 - DNA, 32 bp, Artificial; identical to SEQ ID NO: 13573
  oligonucleotide probe

SEQ ID NO: 14232 - DNA, 32 bp, Artificial; identical to SEQ ID NO: 13573
  oligonucleotide probe

SEQ ID NO: 14233 - DNA, 32 bp, Artificial; identical to SEQ ID NO: 11764
  oligonucleotide probe

SEQ ID NO: 14234 - DNA, 32 bp, Artificial; identical to SEQ ID NO: 11764
  oligonucleotide probe

SEQ ID NO: 14235 - DNA, 32 bp, Artificial; identical to SEQ ID NO: 13603
  oligonucleotide probe

SEQ ID NO: 14236 - DNA, 32 bp, Artificial; identical to SEQ ID NO: 13603
  oligonucleotide probe

SEQ ID NO: 14237 - DNA, 32 bp, Artificial; identical to SEQ ID NO: 11177
  oligonucleotide probe

SEQ ID NO: 14238 - DNA, 32 bp, Artificial; identical to SEQ ID NO: 11177
  oligonucleotide probe

SEQ ID NO: 14239 - DNA, 32 bp, Artificial; identical to SEQ ID NO: 13603
  oligonucleotide probe

SEQ ID NO: 14240 - DNA, 32 bp, Artificial; identical to SEQ ID NO: 13603
  oligonucleotide probe

SEQ ID NO: 14241 - DNA, 32 bp, Artificial; identical to SEQ ID NO: 13587
  oligonucleotide probe

SEQ ID NO: 14242 - DNA, 32 bp, Artificial; identical to SEQ ID NO: 13587
  oligonucleotide probe

SEQ ID NO: 14243 - DNA, 32 bp, Artificial; identical to SEQ ID NO: 13573
  oligonucleotide probe

SEQ ID NO: 14244 - DNA, 32 bp, Artificial; identical to SEQ ID NO: 13573
  oligonucleotide probe

SEQ ID NO: 14245 - DNA, 32 bp, Artificial; identical to SEQ ID NO: 11163
  oligonucleotide probe

SEQ ID NO: 14246 - DNA, 32 bp, Artificial; identical to SEQ ID NO: 11163
  oligonucleotide probe

SEQ ID NO: 14247 - DNA, 32 bp, Artificial; identical to SEQ ID NO: 11173
  oligonucleotide probe

SEQ ID NO: 14248 - DNA, 32 bp, Artificial; identical to SEQ ID NO: 11173
  oligonucleotide probe

SEQ ID NO: 14249 - DNA, 32 bp, Artificial; identical to SEQ ID NO: 11165
  oligonucleotide probe

SEQ ID NO: 14250 - DNA, 32 bp, Artificial; identical to SEQ ID NO: 11165
  oligonucleotide probe

SEQ ID NO: 14251 - DNA, 32 bp, Artificial; identical to SEQ ID NO: 11173
  oligonucleotide probe

SEQ ID NO: 14252 - DNA, 32 bp, Artificial; identical to SEQ ID NO: 11173
  oligonucleotide probe

SEQ ID NO: 14253 - DNA, 32 bp, Artificial; identical to SEQ ID NO: 13573
  oligonucleotide probe

SEQ ID NO: 14254 - DNA, 32 bp, Artificial; identical to SEQ ID NO: 13573
  oligonucleotide probe

SEQ ID NO: 14255 - DNA, 32 bp, Artificial; identical to SEQ ID NO: 11756
  oligonucleotide probe

SEQ ID NO: 14256 - DNA, 32 bp, Artificial; identical to SEQ ID NO: 11756
  oligonucleotide probe

SEQ ID NO: 14257 - DNA, 32 bp, Artificial; identical to SEQ ID NO: 11167
  oligonucleotide probe

SEQ ID NO: 14258 - DNA, 32 bp, Artificial; identical to SEQ ID NO: 11167
  oligonucleotide probe

SEQ ID NO: 14259 - DNA, 32 bp, Artificial; identical to SEQ ID NO: 11173
  oligonucleotide probe

SEQ ID NO: 14260 - DNA, 32 bp, Artificial; identical to SEQ ID NO: 11173
  oligonucleotide probe

SEQ ID NO: 14261 - DNA, 32 bp, Artificial; identical to SEQ ID NO: 11177
  oligonucleotide probe

SEQ ID NO: 14262 - DNA, 32 bp, Artificial; identical to SEQ ID NO: 11177
  oligonucleotide probe

SEQ ID NO: 14263 - DNA, 32 bp, Artificial; identical to SEQ ID NO: 13573
  oligonucleotide probe

SEQ ID NO: 14264 - DNA, 32 bp, Artificial; identical to SEQ ID NO: 13573
  oligonucleotide probe

SEQ ID NO: 14265 - DNA, 32 bp, Artificial; identical to SEQ ID NO: 11762
  oligonucleotide probe

SEQ ID NO: 14266 - DNA, 32 bp, Artificial; identical to SEQ ID NO: 11762
  oligonucleotide probe

SEQ ID NO: 14267 - DNA, 32 bp, Artificial; identical to SEQ ID NO: 11762
  oligonucleotide probe

SEQ ID NO: 14268 - DNA, 32 bp, Artificial; identical to SEQ ID NO: 11762
  oligonucleotide probe

SEQ ID NO: 14269 - DNA, 32 bp, Artificial; identical to SEQ ID NO: 13603
  oligonucleotide probe

SEQ ID NO: 14270 - DNA, 32 bp, Artificial; identical to SEQ ID NO: 13603
  oligonucleotide probe

SEQ ID NO: 14271 - DNA, 32 bp, Artificial; identical to SEQ ID NO: 13573
  oligonucleotide probe

SEQ ID NO: 14272 - DNA, 32 bp, Artificial; identical to SEQ ID NO: 13573
  oligonucleotide probe

SEQ ID NO: 14273 - DNA, 32 bp, Artificial; identical to SEQ ID NO: 13619
  oligonucleotide probe

SEQ ID NO: 14274 - DNA, 32 bp, Artificial; identical to SEQ ID NO: 13619
  oligonucleotide probe

SEQ ID NO: 14275 - DNA, 32 bp, Artificial; identical to SEQ ID NO: 11171
  oligonucleotide probe

SEQ ID NO: 14276 - DNA, 32 bp, Artificial; identical to SEQ ID NO: 11171
  oligonucleotide probe

SEQ ID NO: 14277 - DNA, 32 bp, Artificial; identical to SEQ ID NO: 13619
  oligonucleotide probe

SEQ ID NO: 14278 - DNA, 32 bp, Artificial; identical to SEQ ID NO: 13619
  oligonucleotide probe

SEQ ID NO: 14279 - DNA, 32 bp, Artificial; identical to SEQ ID NO: 13619
  oligonucleotide probe

SEQ ID NO: 14280 - DNA, 32 bp, Artificial; identical to SEQ ID NO: 13619
  oligonucleotide probe

SEQ ID NO: 14281 - DNA, 32 bp, Artificial; identical to SEQ ID NO: 11167
  oligonucleotide probe

SEQ ID NO: 14282 - DNA, 32 bp, Artificial; identical to SEQ ID NO: 11167
  oligonucleotide probe

SEQ ID NO: 14283 - DNA, 32 bp, Artificial; identical to SEQ ID NO: 13587
  oligonucleotide probe

SEQ ID NO: 14284 - DNA, 32 bp, Artificial; identical to SEQ ID NO: 13587
  oligonucleotide probe

SEQ ID NO: 14285 - DNA, 32 bp, Artificial; identical to SEQ ID NO: 13603
  oligonucleotide probe

SEQ ID NO: 14286 - DNA, 32 bp, Artificial; identical to SEQ ID NO: 13603
  oligonucleotide probe

SEQ ID NO: 14287 - DNA, 32 bp, Artificial; identical to SEQ ID NO: 11181
  oligonucleotide probe

SEQ ID NO: 14288 - DNA, 32 bp, Artificial; identical to SEQ ID NO: 11181
  oligonucleotide probe

SEQ ID NO: 14289 - DNA, 32 bp, Artificial; identical to SEQ ID NO: 11756
  oligonucleotide probe

SEQ ID NO: 14290 - DNA, 32 bp, Artificial; identical to SEQ ID NO: 11756
  oligonucleotide probe

SEQ ID NO: 14291 - DNA, 32 bp, Artificial; identical to SEQ ID NO: 13603
  oligonucleotide probe

SEQ ID NO: 14292 - DNA, 32 bp, Artificial; identical to SEQ ID NO: 13603
  oligonucleotide probe

SEQ ID NO: 14293 - DNA, 32 bp, Artificial; identical to SEQ ID NO: 13619
  oligonucleotide probe

SEQ ID NO: 14294 - DNA, 32 bp, Artificial; identical to SEQ ID NO: 13619
  oligonucleotide probe

SEQ ID NO: 14295 - DNA, 32 bp, Artificial; identical to SEQ ID NO: 11171
  oligonucleotide probe

SEQ ID NO: 14296 - DNA, 32 bp, Artificial; identical to SEQ ID NO: 11171
  oligonucleotide probe

SEQ ID NO: 14297 - DNA, 32 bp, Artificial; identical to SEQ ID NO: 11756
  oligonucleotide probe

SEQ ID NO: 14298 - DNA, 32 bp, Artificial; identical to SEQ ID NO: 11756
  oligonucleotide probe

SEQ ID NO: 14299 - DNA, 32 bp, Artificial; identical to SEQ ID NO: 11185
  oligonucleotide probe

SEQ ID NO: 14300 - DNA, 32 bp, Artificial; identical to SEQ ID NO: 11185
  oligonucleotide probe

SEQ ID NO: 14301 - DNA, 32 bp, Artificial; identical to SEQ ID NO: 13619
  oligonucleotide probe

SEQ ID NO: 14302 - DNA, 32 bp, Artificial; identical to SEQ ID NO: 13619
  oligonucleotide probe

SEQ ID NO: 14303 - DNA, 32 bp, Artificial; identical to SEQ ID NO: 11171
  oligonucleotide probe

SEQ ID NO: 14304 - DNA, 32 bp, Artificial; identical to SEQ ID NO: 11171
  oligonucleotide probe

SEQ ID NO: 14305 - DNA, 32 bp, Artificial; identical to SEQ ID NO: 13619
  oligonucleotide probe

SEQ ID NO: 14306 - DNA, 32 bp, Artificial; identical to SEQ ID NO: 13619
  oligonucleotide probe

SEQ ID NO: 14307 - DNA, 32 bp, Artificial; identical to SEQ ID NO: 13573
  oligonucleotide probe

SEQ ID NO: 14308 - DNA, 32 bp, Artificial; identical to SEQ ID NO: 13573
  oligonucleotide probe

SEQ ID NO: 14309 - DNA, 32 bp, Artificial; identical to SEQ ID NO: 11177
  oligonucleotide probe

SEQ ID NO: 14310 - DNA, 32 bp, Artificial; identical to SEQ ID NO: 11177
  oligonucleotide probe

SEQ ID NO: 14311 - DNA, 32 bp, Artificial; identical to SEQ ID NO: 11171
  oligonucleotide probe

SEQ ID NO: 14312 - DNA, 32 bp, Artificial; identical to SEQ ID NO: 11171
  oligonucleotide probe

SEQ ID NO: 14313 - DNA, 32 bp, Artificial; identical to SEQ ID NO: 13619
  oligonucleotide probe

SEQ ID NO: 14314 - DNA, 32 bp, Artificial; identical to SEQ ID NO: 13619
  oligonucleotide probe

SEQ ID NO: 14315 - DNA, 32 bp, Artificial; identical to SEQ ID NO: 11173
  oligonucleotide probe

SEQ ID NO: 14316 - DNA, 32 bp, Artificial; identical to SEQ ID NO: 11173
  oligonucleotide probe

SEQ ID NO: 14317 - DNA, 32 bp, Artificial; identical to SEQ ID NO: 11756
  oligonucleotide probe

SEQ ID NO: 14318 - DNA, 32 bp, Artificial; identical to SEQ ID NO: 11756
  oligonucleotide probe

SEQ ID NO: 14319 - DNA, 32 bp, Artificial; identical to SEQ ID NO: 13603
  oligonucleotide probe

SEQ ID NO: 14320 - DNA, 32 bp, Artificial; identical to SEQ ID NO: 13603
  oligonucleotide probe

SEQ ID NO: 14321 - DNA, 32 bp, Artificial; identical to SEQ ID NO: 13603
  oligonucleotide probe

SEQ ID NO: 14322 - DNA, 32 bp, Artificial; identical to SEQ ID NO: 13603
  oligonucleotide probe

SEQ ID NO: 14323 - DNA, 32 bp, Artificial; identical to SEQ ID NO: 13573
  oligonucleotide probe

SEQ ID NO: 14324 - DNA, 32 bp, Artificial; identical to SEQ ID NO: 13573
  oligonucleotide probe

SEQ ID NO: 14325 - DNA, 32 bp, Artificial; identical to SEQ ID NO: 13603
  oligonucleotide probe

SEQ ID NO: 14326 - DNA, 32 bp, Artificial; identical to SEQ ID NO: 13603
  oligonucleotide probe

SEQ ID NO: 14327 - DNA, 32 bp, Artificial; identical to SEQ ID NO: 13603
  oligonucleotide probe

SEQ ID NO: 14328 - DNA, 32 bp, Artificial; identical to SEQ ID NO: 13603
  oligonucleotide probe

SEQ ID NO: 14329 - DNA, 32 bp, Artificial; identical to SEQ ID NO: 11181
  oligonucleotide probe

SEQ ID NO: 14330 - DNA, 32 bp, Artificial; identical to SEQ ID NO: 11181
  oligonucleotide probe

SEQ ID NO: 14331 - DNA, 32 bp, Artificial; identical to SEQ ID NO: 11163
  oligonucleotide probe

SEQ ID NO: 14332 - DNA, 32 bp, Artificial; identical to SEQ ID NO: 11163
  oligonucleotide probe

SEQ ID NO: 14333 - DNA, 32 bp, Artificial; identical to SEQ ID NO: 11764
  oligonucleotide probe

SEQ ID NO: 14334 - DNA, 32 bp, Artificial; identical to SEQ ID NO: 11764
  oligonucleotide probe

SEQ ID NO: 14335 - DNA, 32 bp, Artificial; identical to SEQ ID NO: 13603
  oligonucleotide probe

SEQ ID NO: 14336 - DNA, 32 bp, Artificial; identical to SEQ ID NO: 13603
  oligonucleotide probe

SEQ ID NO: 14337 - DNA, 32 bp, Artificial; identical to SEQ ID NO: 11762
  oligonucleotide probe

SEQ ID NO: 14338 - DNA, 32 bp, Artificial; identical to SEQ ID NO: 11762
  oligonucleotide probe

SEQ ID NO: 14339 - DNA, 32 bp, Artificial; identical to SEQ ID NO: 11163
  oligonucleotide probe

SEQ ID NO: 14340 - DNA, 32 bp, Artificial; identical to SEQ ID NO: 11163
  oligonucleotide probe

SEQ ID NO: 14341 - DNA, 32 bp, Artificial; identical to SEQ ID NO: 11185
  oligonucleotide probe

SEQ ID NO: 14342 - DNA, 32 bp, Artificial; identical to SEQ ID NO: 11185
  oligonucleotide probe

SEQ ID NO: 14343 - DNA, 32 bp, Artificial; identical to SEQ ID NO: 11177
  oligonucleotide probe

SEQ ID NO: 14344 - DNA, 32 bp, Artificial; identical to SEQ ID NO: 11177
  oligonucleotide probe

SEQ ID NO: 14345 - DNA, 32 bp, Artificial; identical to SEQ ID NO: 11163
  oligonucleotide probe

SEQ ID NO: 14346 - DNA, 32 bp, Artificial; identical to SEQ ID NO: 11163
  oligonucleotide probe

SEQ ID NO: 14347 - DNA, 32 bp, Artificial; identical to SEQ ID NO: 11165
  oligonucleotide probe

SEQ ID NO: 14348 - DNA, 32 bp, Artificial; identical to SEQ ID NO: 11165
  oligonucleotide probe

SEQ ID NO: 14349 - DNA, 32 bp, Artificial; identical to SEQ ID NO: 11167
  oligonucleotide probe

SEQ ID NO: 14350 - DNA, 32 bp, Artificial; identical to SEQ ID NO: 11167
  oligonucleotide probe

SEQ ID NO: 14351 - DNA, 32 bp, Artificial; identical to SEQ ID NO: 11762
  oligonucleotide probe

SEQ ID NO: 14352 - DNA, 32 bp, Artificial; identical to SEQ ID NO: 11762
  oligonucleotide probe

SEQ ID NO: 14353 - DNA, 32 bp, Artificial; identical to SEQ ID NO: 11181
  oligonucleotide probe

SEQ ID NO: 14354 - DNA, 32 bp, Artificial; identical to SEQ ID NO: 11181
  oligonucleotide probe

SEQ ID NO: 14355 - DNA, 32 bp, Artificial; identical to SEQ ID NO: 13603
  oligonucleotide probe

SEQ ID NO: 14356 - DNA, 32 bp, Artificial; identical to SEQ ID NO: 13603
  oligonucleotide probe

SEQ ID NO: 14357 - DNA, 32 bp, Artificial; identical to SEQ ID NO: 11165
  oligonucleotide probe

SEQ ID NO: 14358 - DNA, 32 bp, Artificial; identical to SEQ ID NO: 11165
  oligonucleotide probe

SEQ ID NO: 14359 - DNA, 32 bp, Artificial; identical to SEQ ID NO: 13619
  oligonucleotide probe

SEQ ID NO: 14360 - DNA, 32 bp, Artificial; identical to SEQ ID NO: 13619
  oligonucleotide probe

SEQ ID NO: 14361 - DNA, 32 bp, Artificial; identical to SEQ ID NO: 11185
  oligonucleotide probe

SEQ ID NO: 14362 - DNA, 32 bp, Artificial; identical to SEQ ID NO: 11185
  oligonucleotide probe

SEQ ID NO: 14363 - DNA, 32 bp, Artificial; identical to SEQ ID NO: 13573
  oligonucleotide probe

SEQ ID NO: 14364 - DNA, 32 bp, Artificial; identical to SEQ ID NO: 13573
  oligonucleotide probe

SEQ ID NO: 14365 - DNA, 32 bp, Artificial; identical to SEQ ID NO: 13587
  oligonucleotide probe

SEQ ID NO: 14366 - DNA, 32 bp, Artificial; identical to SEQ ID NO: 13587
  oligonucleotide probe

SEQ ID NO: 14367 - DNA, 32 bp, Artificial; identical to SEQ ID NO: 13619
  oligonucleotide probe

SEQ ID NO: 14368 - DNA, 32 bp, Artificial; identical to SEQ ID NO: 13619
  oligonucleotide probe

SEQ ID NO: 14369 - DNA, 32 bp, Artificial; identical to SEQ ID NO: 13573
  oligonucleotide probe

SEQ ID NO: 14370 - DNA, 32 bp, Artificial; identical to SEQ ID NO: 13573
  oligonucleotide probe

SEQ ID NO: 14371 - DNA, 32 bp, Artificial; identical to SEQ ID NO: 11177
  oligonucleotide probe

SEQ ID NO: 14372 - DNA, 32 bp, Artificial; identical to SEQ ID NO: 11177
  oligonucleotide probe

SEQ ID NO: 14373 - DNA, 32 bp, Artificial; identical to SEQ ID NO: 11770
  oligonucleotide probe

SEQ ID NO: 14374 - DNA, 32 bp, Artificial; identical to SEQ ID NO: 11770
  oligonucleotide probe

SEQ ID NO: 14375 - DNA, 32 bp, Artificial; identical to SEQ ID NO: 13619
  oligonucleotide probe

SEQ ID NO: 14376 - DNA, 32 bp, Artificial; identical to SEQ ID NO: 13619
  oligonucleotide probe

SEQ ID NO: 14377 - DNA, 32 bp, Artificial; identical to SEQ ID NO: 13619
  oligonucleotide probe

SEQ ID NO: 14378 - DNA, 32 bp, Artificial; identical to SEQ ID NO: 13619
  oligonucleotide probe

SEQ ID NO: 14379 - DNA, 32 bp, Artificial; identical to SEQ ID NO: 13587
  oligonucleotide probe

SEQ ID NO: 14380 - DNA, 32 bp, Artificial; identical to SEQ ID NO: 13587
  oligonucleotide probe

SEQ ID NO: 14381 - DNA, 32 bp, Artificial; identical to SEQ ID NO: 11163
  oligonucleotide probe

SEQ ID NO: 14382 - DNA, 32 bp, Artificial; identical to SEQ ID NO: 11163
  oligonucleotide probe

SEQ ID NO: 14383 - DNA, 32 bp, Artificial; identical to SEQ ID NO: 11165
  oligonucleotide probe

SEQ ID NO: 14384 - DNA, 32 bp, Artificial; identical to SEQ ID NO: 11165
  oligonucleotide probe

SEQ ID NO: 14385 - DNA, 32 bp, Artificial; identical to SEQ ID NO: 11756
  oligonucleotide probe

SEQ ID NO: 14386 - DNA, 32 bp, Artificial; identical to SEQ ID NO: 11756
  oligonucleotide probe

SEQ ID NO: 14387 - DNA, 32 bp, Artificial; identical to SEQ ID NO: 11173
  oligonucleotide probe

SEQ ID NO: 14388 - DNA, 32 bp, Artificial; identical to SEQ ID NO: 11173
  oligonucleotide probe

SEQ ID NO: 14389 - DNA, 32 bp, Artificial; identical to SEQ ID NO: 13603
  oligonucleotide probe

SEQ ID NO: 14390 - DNA, 32 bp, Artificial; identical to SEQ ID NO: 13603
  oligonucleotide probe

SEQ ID NO: 14391 - DNA, 32 bp, Artificial; identical to SEQ ID NO: 11181
  oligonucleotide probe

SEQ ID NO: 14392 - DNA, 32 bp, Artificial; identical to SEQ ID NO: 11181
  oligonucleotide probe

SEQ ID NO: 14393 - DNA, 32 bp, Artificial; identical to SEQ ID NO: 11762
  oligonucleotide probe

SEQ ID NO: 14394 - DNA, 32 bp, Artificial; identical to SEQ ID NO: 11762
  oligonucleotide probe

SEQ ID NO: 14395 - DNA, 32 bp, Artificial; identical to SEQ ID NO: 13619
  oligonucleotide probe

SEQ ID NO: 14396 - DNA, 32 bp, Artificial; identical to SEQ ID NO: 13619
  oligonucleotide probe

SEQ ID NO: 14397 - DNA, 32 bp, Artificial; identical to SEQ ID NO: 13573
  oligonucleotide probe

SEQ ID NO: 14398 - DNA, 32 bp, Artificial; identical to SEQ ID NO: 13573
  oligonucleotide probe

SEQ ID NO: 14399 - DNA, 32 bp, Artificial; identical to SEQ ID NO: 11165
  oligonucleotide probe

SEQ ID NO: 14400 - DNA, 32 bp, Artificial; identical to SEQ ID NO: 11165
  oligonucleotide probe

SEQ ID NO: 14401 - DNA, 32 bp, Artificial; identical to SEQ ID NO: 13587
  oligonucleotide probe

SEQ ID NO: 14402 - DNA, 32 bp, Artificial; identical to SEQ ID NO: 13587
  oligonucleotide probe

SEQ ID NO: 14403 - DNA, 32 bp, Artificial; identical to SEQ ID NO: 11177
  oligonucleotide probe

SEQ ID NO: 14404 - DNA, 32 bp, Artificial; identical to SEQ ID NO: 11177
  oligonucleotide probe

SEQ ID NO: 14405 - DNA, 32 bp, Artificial; identical to SEQ ID NO: 11185
  oligonucleotide probe

SEQ ID NO: 14406 - DNA, 32 bp, Artificial; identical to SEQ ID NO: 11185
  oligonucleotide probe

SEQ ID NO: 14407 - DNA, 32 bp, Artificial; identical to SEQ ID NO: 11163
  oligonucleotide probe

SEQ ID NO: 14408 - DNA, 32 bp, Artificial; identical to SEQ ID NO: 11163
  oligonucleotide probe

SEQ ID NO: 14409 - DNA, 32 bp, Artificial; identical to SEQ ID NO: 11171
  oligonucleotide probe

SEQ ID NO: 14410 - DNA, 32 bp, Artificial; identical to SEQ ID NO: 11171
  oligonucleotide probe

SEQ ID NO: 14411 - DNA, 32 bp, Artificial; identical to SEQ ID NO: 13619
  oligonucleotide probe

SEQ ID NO: 14412 - DNA, 32 bp, Artificial; identical to SEQ ID NO: 13619
  oligonucleotide probe

SEQ ID NO: 14413 - DNA, 32 bp, Artificial; identical to SEQ ID NO: 13573
  oligonucleotide probe

SEQ ID NO: 14414 - DNA, 32 bp, Artificial; identical to SEQ ID NO: 13573
  oligonucleotide probe

SEQ ID NO: 14415 - DNA, 32 bp, Artificial; identical to SEQ ID NO: 11181
  oligonucleotide probe

SEQ ID NO: 14416 - DNA, 32 bp, Artificial; identical to SEQ ID NO: 11181
  oligonucleotide probe

SEQ ID NO: 14417 - DNA, 32 bp, Artificial; identical to SEQ ID NO: 11165
  oligonucleotide probe

SEQ ID NO: 14418 - DNA, 32 bp, Artificial; identical to SEQ ID NO: 11165
  oligonucleotide probe

SEQ ID NO: 14419 - DNA, 32 bp, Artificial; identical to SEQ ID NO: 11171
  oligonucleotide probe

SEQ ID NO: 14420 - DNA, 32 bp, Artificial; identical to SEQ ID NO: 11171
  oligonucleotide probe

SEQ ID NO: 14421 - DNA, 32 bp, Artificial; identical to SEQ ID NO: 13603
  oligonucleotide probe

SEQ ID NO: 14422 - DNA, 32 bp, Artificial; identical to SEQ ID NO: 13603
  oligonucleotide probe

SEQ ID NO: 14423 - DNA, 32 bp, Artificial; identical to SEQ ID NO: 11163
  oligonucleotide probe

SEQ ID NO: 14424 - DNA, 32 bp, Artificial; identical to SEQ ID NO: 11163
  oligonucleotide probe

SEQ ID NO: 14425 - DNA, 32 bp, Artificial; identical to SEQ ID NO: 11185
  oligonucleotide probe

SEQ ID NO: 14426 - DNA, 32 bp, Artificial; identical to SEQ ID NO: 11185
  oligonucleotide probe

SEQ ID NO: 14427 - DNA, 32 bp, Artificial; identical to SEQ ID NO: 11177
  oligonucleotide probe

SEQ ID NO: 14428 - DNA, 32 bp, Artificial; identical to SEQ ID NO: 11177
  oligonucleotide probe

SEQ ID NO: 14429 - DNA, 32 bp, Artificial; identical to SEQ ID NO: 11756
  oligonucleotide probe

SEQ ID NO: 14430 - DNA, 32 bp, Artificial; identical to SEQ ID NO: 11756
  oligonucleotide probe

SEQ ID NO: 14431 - DNA, 32 bp, Artificial; identical to SEQ ID NO: 13619
  oligonucleotide probe

SEQ ID NO: 14432 - DNA, 32 bp, Artificial; identical to SEQ ID NO: 13619
  oligonucleotide probe

SEQ ID NO: 14433 - DNA, 32 bp, Artificial; identical to SEQ ID NO: 11177
  oligonucleotide probe

SEQ ID NO: 14434 - DNA, 32 bp, Artificial; identical to SEQ ID NO: 11177
  oligonucleotide probe

SEQ ID NO: 14435 - DNA, 32 bp, Artificial; identical to SEQ ID NO: 13587
  oligonucleotide probe

SEQ ID NO: 14436 - DNA, 32 bp, Artificial; identical to SEQ ID NO: 13587
  oligonucleotide probe

SEQ ID NO: 14437 - DNA, 32 bp, Artificial; identical to SEQ ID NO: 13587
  oligonucleotide probe

SEQ ID NO: 14438 - DNA, 32 bp, Artificial; identical to SEQ ID NO: 13587
  oligonucleotide probe

SEQ ID NO: 14439 - DNA, 32 bp, Artificial; identical to SEQ ID NO: 13587
  oligonucleotide probe

SEQ ID NO: 14440 - DNA, 32 bp, Artificial; identical to SEQ ID NO: 13587
  oligonucleotide probe

SEQ ID NO: 14441 - DNA, 32 bp, Artificial; identical to SEQ ID NO: 11177
  oligonucleotide probe

SEQ ID NO: 14442 - DNA, 32 bp, Artificial; identical to SEQ ID NO: 11177
  oligonucleotide probe

SEQ ID NO: 14443 - DNA, 32 bp, Artificial; identical to SEQ ID NO: 13573
  oligonucleotide probe

SEQ ID NO: 14444 - DNA, 32 bp, Artificial; identical to SEQ ID NO: 13573
  oligonucleotide probe

SEQ ID NO: 14445 - DNA, 32 bp, Artificial; identical to SEQ ID NO: 11185
  oligonucleotide probe

SEQ ID NO: 14446 - DNA, 32 bp, Artificial; identical to SEQ ID NO: 11185
  oligonucleotide probe

SEQ ID NO: 14447 - DNA, 32 bp, Artificial; identical to SEQ ID NO: 11173
  oligonucleotide probe

SEQ ID NO: 14448 - DNA, 32 bp, Artificial; identical to SEQ ID NO: 11173
  oligonucleotide probe

SEQ ID NO: 14449 - DNA, 32 bp, Artificial; identical to SEQ ID NO: 11762
  oligonucleotide probe

SEQ ID NO: 14450 - DNA, 32 bp, Artificial; identical to SEQ ID NO: 11762
  oligonucleotide probe

SEQ ID NO: 14451 - DNA, 32 bp, Artificial; identical to SEQ ID NO: 11163
  oligonucleotide probe

SEQ ID NO: 14452 - DNA, 32 bp, Artificial; identical to SEQ ID NO: 11163
  oligonucleotide probe

SEQ ID NO: 14453 - DNA, 32 bp, Artificial; identical to SEQ ID NO: 11762
  oligonucleotide probe

SEQ ID NO: 14454 - DNA, 32 bp, Artificial; identical to SEQ ID NO: 11762
  oligonucleotide probe

SEQ ID NO: 14455 - DNA, 32 bp, Artificial; identical to SEQ ID NO: 11181
  oligonucleotide probe

SEQ ID NO: 14456 - DNA, 32 bp, Artificial; identical to SEQ ID NO: 11181
  oligonucleotide probe

SEQ ID NO: 14457 - DNA, 32 bp, Artificial; identical to SEQ ID NO: 11770
  oligonucleotide probe

SEQ ID NO: 14458 - DNA, 32 bp, Artificial; identical to SEQ ID NO: 11770
  oligonucleotide probe

SEQ ID NO: 14459 - DNA, 32 bp, Artificial; identical to SEQ ID NO: 13619
  oligonucleotide probe

SEQ ID NO: 14460 - DNA, 32 bp, Artificial; identical to SEQ ID NO: 13619
  oligonucleotide probe

SEQ ID NO: 14461 - DNA, 32 bp, Artificial; identical to SEQ ID NO: 11762
  oligonucleotide probe

SEQ ID NO: 14462 - DNA, 32 bp, Artificial; identical to SEQ ID NO: 11762
  oligonucleotide probe

SEQ ID NO: 14463 - DNA, 32 bp, Artificial; identical to SEQ ID NO: 11764
  oligonucleotide probe

SEQ ID NO: 14464 - DNA, 32 bp, Artificial; identical to SEQ ID NO: 11764
  oligonucleotide probe

SEQ ID NO: 14465 - DNA, 32 bp, Artificial; identical to SEQ ID NO: 11770
  oligonucleotide probe

SEQ ID NO: 14466 - DNA, 32 bp, Artificial; identical to SEQ ID NO: 11770
  oligonucleotide probe

SEQ ID NO: 14467 - DNA, 32 bp, Artificial; identical to SEQ ID NO: 11165
  oligonucleotide probe

SEQ ID NO: 14468 - DNA, 32 bp, Artificial; identical to SEQ ID NO: 11165
  oligonucleotide probe

SEQ ID NO: 14469 - DNA, 32 bp, Artificial; identical to SEQ ID NO: 11770
  oligonucleotide probe

SEQ ID NO: 14470 - DNA, 32 bp, Artificial; identical to SEQ ID NO: 11770
  oligonucleotide probe

SEQ ID NO: 14471 - DNA, 32 bp, Artificial; identical to SEQ ID NO: 11171
  oligonucleotide probe

SEQ ID NO: 14472 - DNA, 32 bp, Artificial; identical to SEQ ID NO: 11171
  oligonucleotide probe

SEQ ID NO: 14473 - DNA, 32 bp, Artificial; identical to SEQ ID NO: 11770
  oligonucleotide probe

SEQ ID NO: 14474 - DNA, 32 bp, Artificial; identical to SEQ ID NO: 11770
  oligonucleotide probe

SEQ ID NO: 14475 - DNA, 32 bp, Artificial; identical to SEQ ID NO: 11762
  oligonucleotide probe

SEQ ID NO: 14476 - DNA, 32 bp, Artificial; identical to SEQ ID NO: 11762
  oligonucleotide probe

SEQ ID NO: 14477 - DNA, 32 bp, Artificial; identical to SEQ ID NO: 13587
  oligonucleotide probe

SEQ ID NO: 14478 - DNA, 32 bp, Artificial; identical to SEQ ID NO: 13587
  oligonucleotide probe

SEQ ID NO: 14479 - DNA, 32 bp, Artificial; identical to SEQ ID NO: 13619
  oligonucleotide probe

SEQ ID NO: 14480 - DNA, 32 bp, Artificial; identical to SEQ ID NO: 13619
  oligonucleotide probe

SEQ ID NO: 14481 - DNA, 32 bp, Artificial; identical to SEQ ID NO: 11167
  oligonucleotide probe

SEQ ID NO: 14482 - DNA, 32 bp, Artificial; identical to SEQ ID NO: 11167
  oligonucleotide probe

SEQ ID NO: 14483 - DNA, 32 bp, Artificial; identical to SEQ ID NO: 13619
  oligonucleotide probe

SEQ ID NO: 14484 - DNA, 32 bp, Artificial; identical to SEQ ID NO: 13619
  oligonucleotide probe

SEQ ID NO: 14485 - DNA, 32 bp, Artificial; identical to SEQ ID NO: 13603
  oligonucleotide probe

SEQ ID NO: 14486 - DNA, 32 bp, Artificial; identical to SEQ ID NO: 13603
  oligonucleotide probe

SEQ ID NO: 14487 - DNA, 32 bp, Artificial; identical to SEQ ID NO: 11167
  oligonucleotide probe

SEQ ID NO: 14488 - DNA, 32 bp, Artificial; identical to SEQ ID NO: 11167
  oligonucleotide probe

SEQ ID NO: 14489 - DNA, 32 bp, Artificial; identical to SEQ ID NO: 11167
  oligonucleotide probe

SEQ ID NO: 14490 - DNA, 32 bp, Artificial; identical to SEQ ID NO: 11167
  oligonucleotide probe

SEQ ID NO: 14491 - DNA, 32 bp, Artificial; identical to SEQ ID NO: 13573
  oligonucleotide probe

SEQ ID NO: 14492 - DNA, 32 bp, Artificial; identical to SEQ ID NO: 13573
  oligonucleotide probe

SEQ ID NO: 14493 - DNA, 32 bp, Artificial; identical to SEQ ID NO: 11163
  oligonucleotide probe

SEQ ID NO: 14494 - DNA, 32 bp, Artificial; identical to SEQ ID NO: 11163
  oligonucleotide probe

SEQ ID NO: 14495 - DNA, 32 bp, Artificial; identical to SEQ ID NO: 11171
  oligonucleotide probe

SEQ ID NO: 14496 - DNA, 32 bp, Artificial; identical to SEQ ID NO: 11171
  oligonucleotide probe

SEQ ID NO: 14497 - DNA, 32 bp, Artificial; identical to SEQ ID NO: 13619
  oligonucleotide probe

SEQ ID NO: 14498 - DNA, 32 bp, Artificial; identical to SEQ ID NO: 13619
  oligonucleotide probe

SEQ ID NO: 14499 - DNA, 32 bp, Artificial; identical to SEQ ID NO: 11770
  oligonucleotide probe

SEQ ID NO: 14500 - DNA, 32 bp, Artificial; identical to SEQ ID NO: 11770
  oligonucleotide probe

SEQ ID NO: 14501 - DNA, 32 bp, Artificial; identical to SEQ ID NO: 11163
  oligonucleotide probe

SEQ ID NO: 14502 - DNA, 32 bp, Artificial; identical to SEQ ID NO: 11163
  oligonucleotide probe

SEQ ID NO: 14503 - DNA, 32 bp, Artificial; identical to SEQ ID NO: 11185
  oligonucleotide probe

SEQ ID NO: 14504 - DNA, 32 bp, Artificial; identical to SEQ ID NO: 11185
  oligonucleotide probe

SEQ ID NO: 14505 - DNA, 32 bp, Artificial; identical to SEQ ID NO: 11165
  oligonucleotide probe

SEQ ID NO: 14506 - DNA, 32 bp, Artificial; identical to SEQ ID NO: 11165
  oligonucleotide probe

SEQ ID NO: 14507 - DNA, 32 bp, Artificial; identical to SEQ ID NO: 13587
  oligonucleotide probe

SEQ ID NO: 14508 - DNA, 32 bp, Artificial; identical to SEQ ID NO: 13587
  oligonucleotide probe

SEQ ID NO: 14509 - DNA, 32 bp, Artificial; identical to SEQ ID NO: 11167
  oligonucleotide probe

SEQ ID NO: 14510 - DNA, 32 bp, Artificial; identical to SEQ ID NO: 11167
  oligonucleotide probe

SEQ ID NO: 14511 - DNA, 32 bp, Artificial; identical to SEQ ID NO: 11167
  oligonucleotide probe

SEQ ID NO: 14512 - DNA, 32 bp, Artificial; identical to SEQ ID NO: 11167
  oligonucleotide probe

SEQ ID NO: 14513 - DNA, 32 bp, Artificial; identical to SEQ ID NO: 11181
  oligonucleotide probe

SEQ ID NO: 14514 - DNA, 32 bp, Artificial; identical to SEQ ID NO: 11181
  oligonucleotide probe

SEQ ID NO: 14515 - DNA, 32 bp, Artificial; identical to SEQ ID NO: 11177
  oligonucleotide probe

SEQ ID NO: 14516 - DNA, 32 bp, Artificial; identical to SEQ ID NO: 11177
  oligonucleotide probe

SEQ ID NO: 14517 - DNA, 32 bp, Artificial; identical to SEQ ID NO: 11181
  oligonucleotide probe

SEQ ID NO: 14518 - DNA, 32 bp, Artificial; identical to SEQ ID NO: 11181
  oligonucleotide probe

SEQ ID NO: 14519 - DNA, 32 bp, Artificial; identical to SEQ ID NO: 13573
  oligonucleotide probe

SEQ ID NO: 14520 - DNA, 32 bp, Artificial; identical to SEQ ID NO: 13573
  oligonucleotide probe

SEQ ID NO: 14521 - DNA, 32 bp, Artificial; identical to SEQ ID NO: 11167
  oligonucleotide probe

SEQ ID NO: 14522 - DNA, 32 bp, Artificial; identical to SEQ ID NO: 11167
  oligonucleotide probe

SEQ ID NO: 14523 - DNA, 32 bp, Artificial; identical to SEQ ID NO: 11165
  oligonucleotide probe

SEQ ID NO: 14524 - DNA, 32 bp, Artificial; identical to SEQ ID NO: 11165
  oligonucleotide probe

SEQ ID NO: 14525 - DNA, 32 bp, Artificial; identical to SEQ ID NO: 11171
  oligonucleotide probe

SEQ ID NO: 14526 - DNA, 32 bp, Artificial; identical to SEQ ID NO: 11171
  oligonucleotide probe

SEQ ID NO: 14527 - DNA, 32 bp, Artificial; identical to SEQ ID NO: 13587
  oligonucleotide probe

SEQ ID NO: 14528 - DNA, 32 bp, Artificial; identical to SEQ ID NO: 13587
  oligonucleotide probe

SEQ ID NO: 14529 - DNA, 32 bp, Artificial; identical to SEQ ID NO: 13619
  oligonucleotide probe

SEQ ID NO: 14530 - DNA, 32 bp, Artificial; identical to SEQ ID NO: 13619
  oligonucleotide probe

SEQ ID NO: 14531 - DNA, 32 bp, Artificial; identical to SEQ ID NO: 11185
  oligonucleotide probe

SEQ ID NO: 14532 - DNA, 32 bp, Artificial; identical to SEQ ID NO: 11185
  oligonucleotide probe

SEQ ID NO: 14533 - DNA, 32 bp, Artificial; identical to SEQ ID NO: 11171
  oligonucleotide probe

SEQ ID NO: 14534 - DNA, 32 bp, Artificial; identical to SEQ ID NO: 11171
  oligonucleotide probe

SEQ ID NO: 14535 - DNA, 32 bp, Artificial; identical to SEQ ID NO: 11167
  oligonucleotide probe

SEQ ID NO: 14536 - DNA, 32 bp, Artificial; identical to SEQ ID NO: 11167
  oligonucleotide probe

SEQ ID NO: 14537 - DNA, 32 bp, Artificial; identical to SEQ ID NO: 13619
  oligonucleotide probe

SEQ ID NO: 14538 - DNA, 32 bp, Artificial; identical to SEQ ID NO: 13619
  oligonucleotide probe

SEQ ID NO: 14539 - DNA, 32 bp, Artificial; identical to SEQ ID NO: 11770
  oligonucleotide probe

SEQ ID NO: 14540 - DNA, 32 bp, Artificial; identical to SEQ ID NO: 11770
  oligonucleotide probe

SEQ ID NO: 14541 - DNA, 32 bp, Artificial; identical to SEQ ID NO: 11163
  oligonucleotide probe

SEQ ID NO: 14542 - DNA, 32 bp, Artificial; identical to SEQ ID NO: 11163
  oligonucleotide probe

SEQ ID NO: 14543 - DNA, 32 bp, Artificial; identical to SEQ ID NO: 11764
  oligonucleotide probe

SEQ ID NO: 14544 - DNA, 32 bp, Artificial; identical to SEQ ID NO: 11764
  oligonucleotide probe

SEQ ID NO: 14545 - DNA, 32 bp, Artificial; identical to SEQ ID NO: 11171
  oligonucleotide probe

SEQ ID NO: 14546 - DNA, 32 bp, Artificial; identical to SEQ ID NO: 11171
  oligonucleotide probe

SEQ ID NO: 14547 - DNA, 32 bp, Artificial; identical to SEQ ID NO: 13587
  oligonucleotide probe

SEQ ID NO: 14548 - DNA, 32 bp, Artificial; identical to SEQ ID NO: 13587
  oligonucleotide probe

SEQ ID NO: 14549 - DNA, 32 bp, Artificial; identical to SEQ ID NO: 13603
  oligonucleotide probe

SEQ ID NO: 14550 - DNA, 32 bp, Artificial; identical to SEQ ID NO: 13603
  oligonucleotide probe

SEQ ID NO: 14551 - DNA, 32 bp, Artificial; identical to SEQ ID NO: 13603
  oligonucleotide probe

SEQ ID NO: 14552 - DNA, 32 bp, Artificial; identical to SEQ ID NO: 13603
  oligonucleotide probe

SEQ ID NO: 14553 - DNA, 32 bp, Artificial; identical to SEQ ID NO: 11177
  oligonucleotide probe

SEQ ID NO: 14554 - DNA, 32 bp, Artificial; identical to SEQ ID NO: 11177
  oligonucleotide probe

SEQ ID NO: 14555 - DNA, 32 bp, Artificial; identical to SEQ ID NO: 13603
  oligonucleotide probe

SEQ ID NO: 14556 - DNA, 32 bp, Artificial; identical to SEQ ID NO: 13603
  oligonucleotide probe

SEQ ID NO: 14557 - DNA, 32 bp, Artificial; identical to SEQ ID NO: 11163
  oligonucleotide probe

SEQ ID NO: 14558 - DNA, 32 bp, Artificial; identical to SEQ ID NO: 11163
  oligonucleotide probe

SEQ ID NO: 14559 - DNA, 32 bp, Artificial; identical to SEQ ID NO: 11171
  oligonucleotide probe

SEQ ID NO: 14560 - DNA, 32 bp, Artificial; identical to SEQ ID NO: 11171
  oligonucleotide probe

SEQ ID NO: 14561 - DNA, 32 bp, Artificial; identical to SEQ ID NO: 11167
  oligonucleotide probe

SEQ ID NO: 14562 - DNA, 32 bp, Artificial; identical to SEQ ID NO: 11167
  oligonucleotide probe

SEQ ID NO: 14563 - DNA, 32 bp, Artificial; identical to SEQ ID NO: 11167
  oligonucleotide probe

SEQ ID NO: 14564 - DNA, 32 bp, Artificial; identical to SEQ ID NO: 11167
  oligonucleotide probe

SEQ ID NO: 14565 - DNA, 32 bp, Artificial; identical to SEQ ID NO: 11173
  oligonucleotide probe

SEQ ID NO: 14566 - DNA, 32 bp, Artificial; identical to SEQ ID NO: 11173
  oligonucleotide probe

SEQ ID NO: 14567 - DNA, 32 bp, Artificial; identical to SEQ ID NO: 11163
  oligonucleotide probe

SEQ ID NO: 14568 - DNA, 32 bp, Artificial; identical to SEQ ID NO: 11163
  oligonucleotide probe

SEQ ID NO: 14569 - DNA, 32 bp, Artificial; identical to SEQ ID NO: 11756
  oligonucleotide probe

SEQ ID NO: 14570 - DNA, 32 bp, Artificial; identical to SEQ ID NO: 11756
  oligonucleotide probe

SEQ ID NO: 14571 - DNA, 32 bp, Artificial; identical to SEQ ID NO: 11181
  oligonucleotide probe

SEQ ID NO: 14572 - DNA, 32 bp, Artificial; identical to SEQ ID NO: 11181
  oligonucleotide probe

SEQ ID NO: 14573 - DNA, 32 bp, Artificial; identical to SEQ ID NO: 13587
  oligonucleotide probe

SEQ ID NO: 14574 - DNA, 32 bp, Artificial; identical to SEQ ID NO: 13587
  oligonucleotide probe

SEQ ID NO: 14575 - DNA, 32 bp, Artificial; identical to SEQ ID NO: 11171
  oligonucleotide probe

SEQ ID NO: 14576 - DNA, 32 bp, Artificial; identical to SEQ ID NO: 11171
  oligonucleotide probe

SEQ ID NO: 14577 - DNA, 32 bp, Artificial; identical to SEQ ID NO: 11165
  oligonucleotide probe

SEQ ID NO: 14578 - DNA, 32 bp, Artificial; identical to SEQ ID NO: 11165
  oligonucleotide probe

SEQ ID NO: 14579 - DNA, 32 bp, Artificial; identical to SEQ ID NO: 11756
  oligonucleotide probe

SEQ ID NO: 14580 - DNA, 32 bp, Artificial; identical to SEQ ID NO: 11756
  oligonucleotide probe

SEQ ID NO: 14581 - DNA, 32 bp, Artificial; identical to SEQ ID NO: 13603
  oligonucleotide probe

SEQ ID NO: 14582 - DNA, 32 bp, Artificial; identical to SEQ ID NO: 13603
  oligonucleotide probe

SEQ ID NO: 14583 - DNA, 32 bp, Artificial; identical to SEQ ID NO: 11167
  oligonucleotide probe

SEQ ID NO: 14584 - DNA, 32 bp, Artificial; identical to SEQ ID NO: 11167
  oligonucleotide probe

SEQ ID NO: 14585 - DNA, 32 bp, Artificial; identical to SEQ ID NO: 11177
  oligonucleotide probe

SEQ ID NO: 14586 - DNA, 32 bp, Artificial; identical to SEQ ID NO: 11177
  oligonucleotide probe

SEQ ID NO: 14587 - DNA, 32 bp, Artificial; identical to SEQ ID NO: 11762
  oligonucleotide probe

SEQ ID NO: 14588 - DNA, 32 bp, Artificial; identical to SEQ ID NO: 11762
  oligonucleotide probe

SEQ ID NO: 14589 - DNA, 32 bp, Artificial; identical to SEQ ID NO: 13619
  oligonucleotide probe

SEQ ID NO: 14590 - DNA, 32 bp, Artificial; identical to SEQ ID NO: 13603
  oligonucleotide probe

SEQ ID NO: 14591 - DNA, 32 bp, Artificial; identical to SEQ ID NO: 13573
  oligonucleotide probe

SEQ ID NO: 14592 - DNA, 32 bp, Artificial; identical to SEQ ID NO: 13587
  oligonucleotide probe

SEQ ID NO: 14593 - DNA, 32 bp, Artificial; identical to SEQ ID NO: 5171
  oligonucleotide probe

SEQ ID NO: 14594 - DNA, 32 bp, Artificial; identical to SEQ ID NO: 5163
  oligonucleotide probe

SEQ ID NO: 14595 - DNA, 32 bp, Artificial; identical to SEQ ID NO: 5185
  oligonucleotide probe

SEQ ID NO: 14596 - DNA, 32 bp, Artificial; identical to SEQ ID NO: 7690
  oligonucleotide probe

SEQ ID NO: 14597 - DNA, 32 bp, Artificial; identical to SEQ ID NO: 7676
  oligonucleotide probe

SEQ ID NO: 14598 - DNA, 32 bp, Artificial; identical to SEQ ID NO: 7673
  oligonucleotide probe

SEQ ID NO: 14599 - DNA, 32 bp, Artificial; identical to SEQ ID NO: 5140
  oligonucleotide probe

SEQ ID NO: 14600 - DNA, 32 bp, Artificial; identical to SEQ ID NO: 7783
  oligonucleotide probe

SEQ ID NO: 14601 - DNA, 32 bp, Artificial; identical to SEQ ID NO: 5136
  oligonucleotide probe

SEQ ID NO: 14602 - DNA, 32 bp, Artificial; identical to SEQ ID NO: 7812
  oligonucleotide probe

SEQ ID NO: 14603 - DNA, 32 bp, Artificial; identical to SEQ ID NO: 5134
  oligonucleotide probe

SEQ ID NO: 14604 - DNA, 32 bp, Artificial; identical to SEQ ID NO: 7623
  oligonucleotide probe

SEQ ID NO: 14605 - DNA, 32 bp, Artificial; identical to SEQ ID NO: 7597
  oligonucleotide probe

SEQ ID NO: 14606 - DNA, 32 bp, Artificial; identical to SEQ ID NO: 7644
  oligonucleotide probe

SEQ ID NO: 14607 - DNA, 32 bp, Artificial; identical to SEQ ID NO: 7605
  oligonucleotide probe

SEQ ID NO: 14608 - DNA, 32 bp, Artificial; identical to SEQ ID NO: 5141
  oligonucleotide probe

SEQ ID NO: 14609 - DNA, 32 bp, Artificial; identical to SEQ ID NO: 7594
  oligonucleotide probe

SEQ ID NO: 14610 - DNA, 32 bp, Artificial; identical to SEQ ID NO: 5133
  oligonucleotide probe

SEQ ID NO: 14611 - DNA, 32 bp, Artificial; identical to SEQ ID NO: 7694
  oligonucleotide probe

SEQ ID NO: 14612 - DNA, 32 bp, Artificial; identical to SEQ ID NO: 7659
  oligonucleotide probe

SEQ ID NO: 14613 - DNA, 32 bp, Artificial; identical to SEQ ID NO: 7624
  oligonucleotide probe

SEQ ID NO: 14614 - DNA, 32 bp, Artificial; identical to SEQ ID NO: 5159
  oligonucleotide probe

SEQ ID NO: 14615 - DNA, 32 bp, Artificial; identical to SEQ ID NO: 7598
  oligonucleotide probe

SEQ ID NO: 14616 - DNA, 32 bp, Artificial; identical to SEQ ID NO: 5160
  oligonucleotide probe

SEQ ID NO: 14617 - DNA, 32 bp, Artificial; identical to SEQ ID NO: 7596
  oligonucleotide probe

SEQ ID NO: 14618 - DNA, 32 bp, Artificial; identical to SEQ ID NO: 7655
  oligonucleotide probe

SEQ ID NO: 14619 - DNA, 32 bp, Artificial; identical to SEQ ID NO: 7662
  oligonucleotide probe

SEQ ID NO: 14620 - DNA, 32 bp, Artificial; identical to SEQ ID NO: 7606
  oligonucleotide probe

SEQ ID NO: 14621 - DNA, 32 bp, Artificial; identical to SEQ ID NO: 5218
  oligonucleotide probe

SEQ ID NO: 14622 - DNA, 32 bp, Artificial; identical to SEQ ID NO: 5232
  oligonucleotide probe

SEQ ID NO: 14623 - DNA, 32 bp, Artificial; identical to SEQ ID NO: 8442
  oligonucleotide probe

SEQ ID NO: 14624 - DNA, 32 bp, Artificial; identical to SEQ ID NO: 7842
  oligonucleotide probe

SEQ ID NO: 14625 - DNA, 32 bp, Artificial; identical to SEQ ID NO: 5224
  oligonucleotide probe

SEQ ID NO: 14626 - DNA, 32 bp, Artificial; identical to SEQ ID NO: 7841
  oligonucleotide probe

SEQ ID NO: 14627 - DNA, 32 bp, Artificial; identical to SEQ ID NO: 8247
  oligonucleotide probe

SEQ ID NO: 14628 - DNA, 32 bp, Artificial; identical to SEQ ID NO: 8467
  oligonucleotide probe

SEQ ID NO: 14629 - DNA, 32 bp, Artificial; identical to SEQ ID NO: 7863
  oligonucleotide probe

SEQ ID NO: 14630 - DNA, 32 bp, Artificial; identical to SEQ ID NO: 5231
  oligonucleotide probe

SEQ ID NO: 14631 - DNA, 32 bp, Artificial; identical to SEQ ID NO: 5217
  oligonucleotide probe

SEQ ID NO: 14632 - DNA, 32 bp, Artificial; identical to SEQ ID NO: 5399
  oligonucleotide probe

SEQ ID NO: 14633 - DNA, 32 bp, Artificial; identical to SEQ ID NO: 7840
  oligonucleotide probe

SEQ ID NO: 14634 - DNA, 32 bp, Artificial; identical to SEQ ID NO: 7838
  oligonucleotide probe

SEQ ID NO: 14635 - DNA, 32 bp, Artificial; identical to SEQ ID NO: 7834
  oligonucleotide probe

SEQ ID NO: 14636 - DNA, 32 bp, Artificial; identical to SEQ ID NO: 7853
  oligonucleotide probe

SEQ ID NO: 14637 - DNA, 32 bp, Artificial; identical to SEQ ID NO: 8047
  oligonucleotide probe

SEQ ID NO: 14638 - DNA, 32 bp, Artificial; identical to SEQ ID NO: 8001
  oligonucleotide probe

SEQ ID NO: 14639 - DNA, 32 bp, Artificial; identical to SEQ ID NO: 7835
  oligonucleotide probe

SEQ ID NO: 14640 - DNA, 32 bp, Artificial; identical to SEQ ID NO: 7866
  oligonucleotide probe

SEQ ID NO: 14641 - DNA, 32 bp, Artificial; identical to SEQ ID NO: 5223
  oligonucleotide probe

SEQ ID NO: 14642 - DNA, 32 bp, Artificial; identical to SEQ ID NO: 7856
  oligonucleotide probe

SEQ ID NO: 14643 - DNA, 32 bp, Artificial; identical to SEQ ID NO: 5240
  oligonucleotide probe

SEQ ID NO: 14644 - DNA, 32 bp, Artificial; identical to SEQ ID NO: 7891
  oligonucleotide probe

SEQ ID NO: 14645 - DNA, 32 bp, Artificial; identical to SEQ ID NO: 5416
  oligonucleotide probe

SEQ ID NO: 14646 - DNA, 32 bp, Artificial; identical to SEQ ID NO: 7831
  oligonucleotide probe

SEQ ID NO: 14647 - DNA, 32 bp, Artificial; identical to SEQ ID NO: 7865
  oligonucleotide probe

SEQ ID NO: 14648 - DNA, 32 bp, Artificial; identical to SEQ ID NO: 7947
  oligonucleotide probe

SEQ ID NO: 14649 - DNA, 32 bp, Artificial; identical to SEQ ID NO: 7832
  oligonucleotide probe

SEQ ID NO: 14650 - DNA, 32 bp, Artificial; identical to SEQ ID NO: 5239
  oligonucleotide probe

SEQ ID NO: 14651 - DNA, 32 bp, Artificial; identical to SEQ ID NO: 7855
  oligonucleotide probe

SEQ ID NO: 14652 - DNA, 32 bp, Artificial; identical to SEQ ID NO: 5220
  oligonucleotide probe

SEQ ID NO: 14653 - DNA, 32 bp, Artificial; identical to SEQ ID NO: 8244
  oligonucleotide probe

SEQ ID NO: 14654 - DNA, 32 bp, Artificial; identical to SEQ ID NO: 8571
  oligonucleotide probe

SEQ ID NO: 14655 - DNA, 32 bp, Artificial; identical to SEQ ID NO: 7833
  oligonucleotide probe

SEQ ID NO: 14656 - DNA, 32 bp, Artificial; identical to SEQ ID NO: 7905
  oligonucleotide probe

SEQ ID NO: 14657 - DNA, 32 bp, Artificial; identical to SEQ ID NO: 8240
  oligonucleotide probe

SEQ ID NO: 14658 - DNA, 32 bp, Artificial; identical to SEQ ID NO: 7948
  oligonucleotide probe

SEQ ID NO: 14659 - DNA, 32 bp, Artificial; identical to SEQ ID NO: 8776
  oligonucleotide probe

SEQ ID NO: 14660 - DNA, 32 bp, Artificial; identical to SEQ ID NO: 10064
  oligonucleotide probe

SEQ ID NO: 14661 - DNA, 32 bp, Artificial; identical to SEQ ID NO: 8767
  oligonucleotide probe

SEQ ID NO: 14662 - DNA, 32 bp, Artificial; identical to SEQ ID NO: 5594
  oligonucleotide probe

SEQ ID NO: 14663 - DNA, 32 bp, Artificial; identical to SEQ ID NO: 8766
  oligonucleotide probe

SEQ ID NO: 14664 - DNA, 32 bp, Artificial; identical to SEQ ID NO: 10052
  oligonucleotide probe

SEQ ID NO: 14665 - DNA, 32 bp, Artificial; identical to SEQ ID NO: 8762
  oligonucleotide probe

SEQ ID NO: 14666 - DNA, 32 bp, Artificial; identical to SEQ ID NO: 5584
  oligonucleotide probe

SEQ ID NO: 14667 - DNA, 32 bp, Artificial; identical to SEQ ID NO: 8781
  oligonucleotide probe

SEQ ID NO: 14668 - DNA, 32 bp, Artificial; identical to SEQ ID NO: 8936
  oligonucleotide probe

SEQ ID NO: 14669 - DNA, 32 bp, Artificial; identical to SEQ ID NO: 10053
  oligonucleotide probe

SEQ ID NO: 14670 - DNA, 32 bp, Artificial; identical to SEQ ID NO: 8834
  oligonucleotide probe

SEQ ID NO: 14671 - DNA, 32 bp, Artificial; identical to SEQ ID NO: 8780
  oligonucleotide probe

SEQ ID NO: 14672 - DNA, 32 bp, Artificial; identical to SEQ ID NO: 5611
  oligonucleotide probe

SEQ ID NO: 14673 - DNA, 32 bp, Artificial; identical to SEQ ID NO: 8784
  oligonucleotide probe

SEQ ID NO: 14674 - DNA, 32 bp, Artificial; identical to SEQ ID NO: 9922
  oligonucleotide probe

SEQ ID NO: 14675 - DNA, 32 bp, Artificial; identical to SEQ ID NO: 8868
  oligonucleotide probe

SEQ ID NO: 14676 - DNA, 32 bp, Artificial; identical to SEQ ID NO: 5547
  oligonucleotide probe

SEQ ID NO: 14677 - DNA, 32 bp, Artificial; identical to SEQ ID NO: 5565
  oligonucleotide probe

SEQ ID NO: 14678 - DNA, 32 bp, Artificial; identical to SEQ ID NO: 6145
  oligonucleotide probe

SEQ ID NO: 14679 - DNA, 32 bp, Artificial; identical to SEQ ID NO: 10918
  oligonucleotide probe

SEQ ID NO: 14680 - DNA, 32 bp, Artificial; identical to SEQ ID NO: 5610
  oligonucleotide probe

SEQ ID NO: 14681 - DNA, 32 bp, Artificial; identical to SEQ ID NO: 8751
  oligonucleotide probe

SEQ ID NO: 14682 - DNA, 32 bp, Artificial; identical to SEQ ID NO: 9314
  oligonucleotide probe

SEQ ID NO: 14683 - DNA, 32 bp, Artificial; identical to SEQ ID NO: 9021
  oligonucleotide probe

SEQ ID NO: 14684 - DNA, 32 bp, Artificial; identical to SEQ ID NO: 8785
  oligonucleotide probe

SEQ ID NO: 14685 - DNA, 32 bp, Artificial; identical to SEQ ID NO: 8778
  oligonucleotide probe

SEQ ID NO: 14686 - DNA, 32 bp, Artificial; identical to SEQ ID NO: 8748
  oligonucleotide probe

SEQ ID NO: 14687 - DNA, 32 bp, Artificial; identical to SEQ ID NO: 8760
  oligonucleotide probe

SEQ ID NO: 14688 - DNA, 32 bp, Artificial; identical to SEQ ID NO: 8750
  oligonucleotide probe

SEQ ID NO: 14689 - DNA, 32 bp, Artificial; identical to SEQ ID NO: 5546
  oligonucleotide probe

SEQ ID NO: 14690 - DNA, 32 bp, Artificial; identical to SEQ ID NO: 8757
  oligonucleotide probe

SEQ ID NO: 14691 - DNA, 32 bp, Artificial; identical to SEQ ID NO: 5585
  oligonucleotide probe

SEQ ID NO: 14692 - DNA, 32 bp, Artificial; identical to SEQ ID NO: 8753
  oligonucleotide probe

SEQ ID NO: 14693 - DNA, 32 bp, Artificial; identical to SEQ ID NO: 8786
  oligonucleotide probe

SEQ ID NO: 14694 - DNA, 32 bp, Artificial; identical to SEQ ID NO: 8749
  oligonucleotide probe

SEQ ID NO: 14695 - DNA, 32 bp, Artificial; identical to SEQ ID NO: 9252
  oligonucleotide probe

SEQ ID NO: 14696 - DNA, 32 bp, Artificial; identical to SEQ ID NO: 5564
  oligonucleotide probe

SEQ ID NO: 14697 - DNA, 32 bp, Artificial; identical to SEQ ID NO: 5595
  oligonucleotide probe

SEQ ID NO: 14698 - DNA, 32 bp, Artificial; identical to SEQ ID NO: 9826
  oligonucleotide probe

SEQ ID NO: 14699 - DNA, 32 bp, Artificial; identical to SEQ ID NO: 6070
  oligonucleotide probe

SEQ ID NO: 14700 - DNA, 32 bp, Artificial; identical to SEQ ID NO: 8796
  oligonucleotide probe

SEQ ID NO: 14701 - DNA, 32 bp, Artificial; identical to SEQ ID NO: 8777
  oligonucleotide probe

SEQ ID NO: 14702 - DNA, 32 bp, Artificial; identical to SEQ ID NO: 8835
  oligonucleotide probe

SEQ ID NO: 14703 - DNA, 32 bp, Artificial; identical to SEQ ID NO: 9315
  oligonucleotide probe

SEQ ID NO: 14704 - DNA, 32 bp, Artificial; identical to SEQ ID NO: 10533
  oligonucleotide probe

SEQ ID NO: 14705 - DNA, 32 bp, Artificial; identical to SEQ ID NO: 5537
  oligonucleotide probe

SEQ ID NO: 14706 - DNA, 32 bp, Artificial; identical to SEQ ID NO: 9253
  oligonucleotide probe

SEQ ID NO: 14707 - DNA, 32 bp, Artificial; identical to SEQ ID NO: 5538
  oligonucleotide probe

SEQ ID NO: 14708 - DNA, 32 bp, Artificial; identical to SEQ ID NO: 9038
  oligonucleotide probe

SEQ ID NO: 14709 - DNA, 32 bp, Artificial; identical to SEQ ID NO: 5539
  oligonucleotide probe

SEQ ID NO: 14710 - DNA, 32 bp, Artificial; identical to SEQ ID NO: 9020
  oligonucleotide probe

SEQ ID NO: 14711 - DNA, 32 bp, Artificial; identical to SEQ ID NO: 10896
  oligonucleotide probe

SEQ ID NO: 14712 - DNA, 32 bp, Artificial; identical to SEQ ID NO: 8804
  oligonucleotide probe

SEQ ID NO: 14713 - DNA, 32 bp, Artificial
  oligonucleotide probe
tcgttgcgcacggcttcgtttgcgcgaatccc

SEQ ID NO: 14714 - DNA, 32 bp, Artificial
  oligonucleotide probe
cgaaagccgcaatgcgtccccacgccatgcaa

SEQ ID NO: 14715 - DNA, 32 bp, Artificial
  oligonucleotide probe
tcgttgcgcacggctttccccacgccatgcaa

SEQ ID NO: 14716 - DNA, 32 bp, Artificial
  oligonucleotide probe
cgtttgcgcgaatccctccccacgccatgcaa

SEQ ID NO: 14717 - DNA, 32 bp, Artificial
  oligonucleotide probe
tcgttgcgcacggcttcgaaagccgcaatgcg

SEQ ID NO: 14718 - DNA, 32 bp, Artificial
  oligonucleotide probe
cgtttgcgcgaatccccgaaagccgcaatgcg

SEQ ID NO: 14719 - DNA, 32 bp, Artificial
  oligonucleotide probe
cgaaagccgcaatgcgcacgcagctgcggtgc

SEQ ID NO: 14720 - DNA, 32 bp, Artificial
  oligonucleotide probe
cgtttgcgcgaatccctgcggcaaatcgcgtt

SEQ ID NO: 14721 - DNA, 32 bp, Artificial
  oligonucleotide probe
tgcggcaaatcgcgttcacgcagctgcggtgc

SEQ ID NO: 14722 - DNA, 32 bp, Artificial
  oligonucleotide probe
cgtttgcgcgaatccccacgcagctgcggtgc

SEQ ID NO: 14723 - DNA, 32 bp, Artificial
  oligonucleotide probe
tcccggacgcttgcaacacgcagctgcggtgc

SEQ ID NO: 14724 - DNA, 32 bp, Artificial
  oligonucleotide probe
tccccacgccatgcaatcccggacgcttgcaa

SEQ ID NO: 14725 - DNA, 32 bp, Artificial
  oligonucleotide probe
tgcgcttgcagccgtttgcggcaaatcgcgtt

SEQ ID NO: 14726 - DNA, 32 bp, Artificial
  oligonucleotide probe
cgaaagccgcaatgcgtcccggacgcttgcaa

SEQ ID NO: 14727 - DNA, 32 bp, Artificial
  oligonucleotide probe
tccccacgccatgcaatgcggcaaatcgcgtt

SEQ ID NO: 14728 - DNA, 32 bp, Artificial
  oligonucleotide probe
cgaaagccgcaatgcgtgcgcttgcagccgtt

SEQ ID NO: 14729 - DNA, 32 bp, Artificial
  oligonucleotide probe
tcccggacgcttgcaatgcggcaaatcgcgtt

SEQ ID NO: 14730 - DNA, 32 bp, Artificial
  oligonucleotide probe
tcccggacgcttgcaatgcgcttgcagccgtt

SEQ ID NO: 14731 - DNA, 32 bp, Artificial
  oligonucleotide probe
tcgttgcgcacggctttgcggcaaatcgcgtt

SEQ ID NO: 14732 - DNA, 32 bp, Artificial
  oligonucleotide probe
cgtttgcgcgaatccctgcgcttgcagccgtt

SEQ ID NO: 14733 - DNA, 32 bp, Artificial
  oligonucleotide probe
tccccacgccatgcaatgcgcttgcagccgtt

SEQ ID NO: 14734 - DNA, 32 bp, Artificial
  oligonucleotide probe
tcgttgcgcacggctttgcgcttgcagccgtt

SEQ ID NO: 14735 - DNA, 32 bp, Artificial
  oligonucleotide probe
tgcgcttgcagccgttcacgcagctgcggtgc

SEQ ID NO: 14736 - DNA, 32 bp, Artificial
  oligonucleotide probe
tcgttgcgcacggcttcacgcagctgcggtgc

SEQ ID NO: 14737 - DNA, 32 bp, Artificial
  oligonucleotide probe
cgaaagccgcaatgcgtgcggcaaatcgcgtt

SEQ ID NO: 14738 - DNA, 32 bp, Artificial
  oligonucleotide probe
tcgttgcgcacggctttcccggacgcttgcaa

SEQ ID NO: 14739 - DNA, 32 bp, Artificial
  oligonucleotide probe
cgtttgcgcgaatccctcccggacgcttgcaa

SEQ ID NO: 14740 - DNA, 32 bp, Artificial
  oligonucleotide probe
tccccacgccatgcaacacgcagctgcggtgc

SEQ ID NO: 14741 - DNA, 32 bp, Artificial
  oligonucleotide probe
tgcggcaaatcgcgttgtgcgctttgcgacgg

SEQ ID NO: 14742 - DNA, 32 bp, Artificial
  oligonucleotide probe
tcccggacgcttgcaagtgcgctttgcgacgg

SEQ ID NO: 14743 - DNA, 32 bp, Artificial
  oligonucleotide probe
cgtttgcgcgaatccccagcgtgctgcgccat

SEQ ID NO: 14744 - DNA, 32 bp, Artificial
  oligonucleotide probe
tccccacgccatgcaagtgcgctttgcgacgg

SEQ ID NO: 14745 - DNA, 32 bp, Artificial
  oligonucleotide probe
cacggtgcgcaaagccgtgcgctttgcgacgg

SEQ ID NO: 14746 - DNA, 32 bp, Artificial
  oligonucleotide probe
tccccacgccatgcaacagcgtgctgcgccat

SEQ ID NO: 14747 - DNA, 32 bp, Artificial
  oligonucleotide probe
cgtttgcgcgaatccccacggtgcgcaaagcc

SEQ ID NO: 14748 - DNA, 32 bp, Artificial
  oligonucleotide probe
tcgttgcgcacggcttcagcgtgctgcgccat

SEQ ID NO: 14749 - DNA, 32 bp, Artificial
  oligonucleotide probe
tgcggcaaatcgcgttcacggtgcgcaaagcc

SEQ ID NO: 14750 - DNA, 32 bp, Artificial
  oligonucleotide probe
tcccggacgcttgcaacagcgcaaacggcgaa

SEQ ID NO: 14751 - DNA, 32 bp, Artificial
  oligonucleotide probe
tgcggcaaatcgcgttcagcgcaaacggcgaa

SEQ ID NO: 14752 - DNA, 32 bp, Artificial
  oligonucleotide probe
tcgttgcgcacggcttgtgcgctttgcgacgg

SEQ ID NO: 14753 - DNA, 32 bp, Artificial
  oligonucleotide probe
cagcgcaaacggcgaacagcgtgctgcgccat

SEQ ID NO: 14754 - DNA, 32 bp, Artificial
  oligonucleotide probe
cacggtgcgcaaagcccagcgtgctgcgccat

SEQ ID NO: 14755 - DNA, 32 bp, Artificial
  oligonucleotide probe
cacgcagctgcggtgccagcgcaaacggcgaa

SEQ ID NO: 14756 - DNA, 32 bp, Artificial
  oligonucleotide probe
cagcgcaaacggcgaagtgcgctttgcgacgg

SEQ ID NO: 14757 - DNA, 32 bp, Artificial
  oligonucleotide probe
cgaaagccgcaatgcgcagcgtgctgcgccat

SEQ ID NO: 14758 - DNA, 32 bp, Artificial
  oligonucleotide probe
cgaaagccgcaatgcgcacggtgcgcaaagcc

SEQ ID NO: 14759 - DNA, 32 bp, Artificial
  oligonucleotide probe
tcccggacgcttgcaacagcgtgctgcgccat

SEQ ID NO: 14760 - DNA, 32 bp, Artificial
  oligonucleotide probe
tgcgcttgcagccgttgtgcgctttgcgacgg

SEQ ID NO: 14761 - DNA, 32 bp, Artificial
  oligonucleotide probe
cacggtgcgcaaagcccagcgcaaacggcgaa

SEQ ID NO: 14762 - DNA, 32 bp, Artificial
  oligonucleotide probe
tgcgcttgcagccgttcagcgcaaacggcgaa

SEQ ID NO: 14763 - DNA, 32 bp, Artificial
  oligonucleotide probe
cgaaagccgcaatgcggtgcgctttgcgacgg

SEQ ID NO: 14764 - DNA, 32 bp, Artificial
  oligonucleotide probe
tgcggcaaatcgcgttcagcgtgctgcgccat

SEQ ID NO: 14765 - DNA, 32 bp, Artificial
  oligonucleotide probe
tcgttgcgcacggcttcagcgcaaacggcgaa

SEQ ID NO: 14766 - DNA, 32 bp, Artificial
  oligonucleotide probe
cacgcagctgcggtgccagcgtgctgcgccat

SEQ ID NO: 14767 - DNA, 32 bp, Artificial
  oligonucleotide probe
tgcgcttgcagccgttcagcgtgctgcgccat

SEQ ID NO: 14768 - DNA, 32 bp, Artificial
  oligonucleotide probe
tccccacgccatgcaacacggtgcgcaaagcc

SEQ ID NO: 14769 - DNA, 32 bp, Artificial
  oligonucleotide probe
cacgcagctgcggtgcgtgcgctttgcgacgg

SEQ ID NO: 14770 - DNA, 32 bp, Artificial
  oligonucleotide probe
cgaaagccgcaatgcgcagcgcaaacggcgaa

SEQ ID NO: 14771 - DNA, 32 bp, Artificial
  oligonucleotide probe
tgcgcttgcagccgttcacggtgcgcaaagcc

SEQ ID NO: 14772 - DNA, 32 bp, Artificial
  oligonucleotide probe
cagcgtgctgcgccatgtgcgctttgcgacgg

SEQ ID NO: 14773 - DNA, 32 bp, Artificial
  oligonucleotide probe
tcgttgcgcacggcttcacggtgcgcaaagcc

SEQ ID NO: 14774 - DNA, 32 bp, Artificial
  oligonucleotide probe
cgtttgcgcgaatcccgtgcgctttgcgacgg

SEQ ID NO: 14775 - DNA, 32 bp, Artificial
  oligonucleotide probe
cacgcagctgcggtgccacggtgcgcaaagcc

SEQ ID NO: 14776 - DNA, 32 bp, Artificial
  oligonucleotide probe
tcccggacgcttgcaacacggtgcgcaaagcc

SEQ ID NO: 14777 - DNA, 32 bp, Artificial
  oligonucleotide probe
cgtttgcgcgaatccccagcgcaaacggcgaa

SEQ ID NO: 14778 - DNA, 32 bp, Artificial
  oligonucleotide probe
tccccacgccatgcaacagcgcaaacggcgaa

SEQ ID NO: 14779 - DNA, 32 bp, Artificial
  oligonucleotide probe
cagcgcaaacggcgaaacggcgtttccccgaa

SEQ ID NO: 14780 - DNA, 32 bp, Artificial
  oligonucleotide probe
cgtttgcgcgaatcccacggcgtttccccgaa

SEQ ID NO: 14781 - DNA, 32 bp, Artificial
  oligonucleotide probe
tgcgcttgcagccgttagcccagccgaaacgg

SEQ ID NO: 14782 - DNA, 32 bp, Artificial
  oligonucleotide probe
tcccggacgcttgcaaacgggaccgtgcagcc

SEQ ID NO: 14783 - DNA, 32 bp, Artificial
  oligonucleotide probe
tgcgcttgcagccgttagccgctttcccgtgc

SEQ ID NO: 14784 - DNA, 32 bp, Artificial
  oligonucleotide probe
cgtttgcgcgaatcccacgggaccgtgcagcc

SEQ ID NO: 14785 - DNA, 32 bp, Artificial
  oligonucleotide probe
cacggtgcgcaaagccagccgctttcccgtgc

SEQ ID NO: 14786 - DNA, 32 bp, Artificial
  oligonucleotide probe
tgcggcaaatcgcgttacgggaccgtgcagcc

SEQ ID NO: 14787 - DNA, 32 bp, Artificial
  oligonucleotide probe
gtgcgctttgcgacggacgggaccgtgcagcc

SEQ ID NO: 14788 - DNA, 32 bp, Artificial
  oligonucleotide probe
tcccggacgcttgcaaagccgctttcccgtgc

SEQ ID NO: 14789 - DNA, 32 bp, Artificial
  oligonucleotide probe
tcgttgcgcacggcttacggcgtttccccgaa

SEQ ID NO: 14790 - DNA, 32 bp, Artificial
  oligonucleotide probe
tgcgcttgcagccgttacggcgtttccccgaa

SEQ ID NO: 14791 - DNA, 32 bp, Artificial
  oligonucleotide probe
gtgcgctttgcgacggacggcgtttccccgaa

SEQ ID NO: 14792 - DNA, 32 bp, Artificial
  oligonucleotide probe
cgaaagccgcaatgcgagcccagccgaaacgg

SEQ ID NO: 14793 - DNA, 32 bp, Artificial
  oligonucleotide probe
gtgcgctttgcgacggagccgctttcccgtgc

SEQ ID NO: 14794 - DNA, 32 bp, Artificial
  oligonucleotide probe
cgaaagccgcaatgcgagccgctttcccgtgc

SEQ ID NO: 14795 - DNA, 32 bp, Artificial
  oligonucleotide probe
tgcggcaaatcgcgttacggcgtttccccgaa

SEQ ID NO: 14796 - DNA, 32 bp, Artificial
  oligonucleotide probe
acggcgtttccccgaaagcccagccgaaacgg

SEQ ID NO: 14797 - DNA, 32 bp, Artificial
  oligonucleotide probe
cagcgtgctgcgccatagcccagccgaaacgg

SEQ ID NO: 14798 - DNA, 32 bp, Artificial
  oligonucleotide probe
tcgttgcgcacggcttacgggaccgtgcagcc

SEQ ID NO: 14799 - DNA, 32 bp, Artificial
  oligonucleotide probe
cgtttgcgcgaatcccagcccagccgaaacgg

SEQ ID NO: 14800 - DNA, 32 bp, Artificial
  oligonucleotide probe
cgaaagccgcaatgcgacgggaccgtgcagcc

SEQ ID NO: 14801 - DNA, 32 bp, Artificial
  oligonucleotide probe
cagcgcaaacggcgaaagcccagccgaaacgg

SEQ ID NO: 14802 - DNA, 32 bp, Artificial
  oligonucleotide probe
tccccacgccatgcaaagccgctttcccgtgc

SEQ ID NO: 14803 - DNA, 32 bp, Artificial
  oligonucleotide probe
cacgcagctgcggtgcacgggaccgtgcagcc

SEQ ID NO: 14804 - DNA, 32 bp, Artificial
  oligonucleotide probe
gtgcgctttgcgacggagcccagccgaaacgg

SEQ ID NO: 14805 - DNA, 32 bp, Artificial
  oligonucleotide probe
cagcgtgctgcgccatacggcgtttccccgaa

SEQ ID NO: 14806 - DNA, 32 bp, Artificial
  oligonucleotide probe
cacgcagctgcggtgcagccgctttcccgtgc

SEQ ID NO: 14807 - DNA, 32 bp, Artificial
  oligonucleotide probe
acgggaccgtgcagccagcccagccgaaacgg

SEQ ID NO: 14808 - DNA, 32 bp, Artificial
  oligonucleotide probe
cagcgcaaacggcgaaagccgctttcccgtgc

SEQ ID NO: 14809 - DNA, 32 bp, Artificial
  oligonucleotide probe
acggcgtttccccgaaacgggaccgtgcagcc

SEQ ID NO: 14810 - DNA, 32 bp, Artificial
  oligonucleotide probe
acggcgtttccccgaaagccgctttcccgtgc

SEQ ID NO: 14811 - DNA, 32 bp, Artificial
  oligonucleotide probe
tgcggcaaatcgcgttagcccagccgaaacgg

SEQ ID NO: 14812 - DNA, 32 bp, Artificial
  oligonucleotide probe
acgggaccgtgcagccagccgctttcccgtgc

SEQ ID NO: 14813 - DNA, 32 bp, Artificial
  oligonucleotide probe
tgcggcaaatcgcgttagccgctttcccgtgc

SEQ ID NO: 14814 - DNA, 32 bp, Artificial
  oligonucleotide probe
cacgcagctgcggtgcagcccagccgaaacgg

SEQ ID NO: 14815 - DNA, 32 bp, Artificial
  oligonucleotide probe
tccccacgccatgcaaacggcgtttccccgaa

SEQ ID NO: 14816 - DNA, 32 bp, Artificial
  oligonucleotide probe
cagcgtgctgcgccatacgggaccgtgcagcc

SEQ ID NO: 14817 - DNA, 32 bp, Artificial
  oligonucleotide probe
tcccggacgcttgcaaagcccagccgaaacgg

SEQ ID NO: 14818 - DNA, 32 bp, Artificial
  oligonucleotide probe
cgaaagccgcaatgcgacggcgtttccccgaa

SEQ ID NO: 14819 - DNA, 32 bp, Artificial
  oligonucleotide probe
tcgttgcgcacggcttagcccagccgaaacgg

SEQ ID NO: 14820 - DNA, 32 bp, Artificial
  oligonucleotide probe
cacggtgcgcaaagccacggcgtttccccgaa

SEQ ID NO: 14821 - DNA, 32 bp, Artificial
  oligonucleotide probe
cagcgcaaacggcgaaacgggaccgtgcagcc

SEQ ID NO: 14822 - DNA, 32 bp, Artificial
  oligonucleotide probe
tgcgcttgcagccgttacgggaccgtgcagcc

SEQ ID NO: 14823 - DNA, 32 bp, Artificial
  oligonucleotide probe
tccccacgccatgcaaagcccagccgaaacgg

SEQ ID NO: 14824 - DNA, 32 bp, Artificial
  oligonucleotide probe
cgtttgcgcgaatcccagccgctttcccgtgc

SEQ ID NO: 14825 - DNA, 32 bp, Artificial
  oligonucleotide probe
agccgctttcccgtgcagcccagccgaaacgg

SEQ ID NO: 14826 - DNA, 32 bp, Artificial
  oligonucleotide probe
tccccacgccatgcaaacgggaccgtgcagcc

SEQ ID NO: 14827 - DNA, 32 bp, Artificial
  oligonucleotide probe
cacggtgcgcaaagccacgggaccgtgcagcc

SEQ ID NO: 14828 - DNA, 32 bp, Artificial
  oligonucleotide probe
tcccggacgcttgcaaacggcgtttccccgaa

SEQ ID NO: 14829 - DNA, 32 bp, Artificial
  oligonucleotide probe
cacggtgcgcaaagccagcccagccgaaacgg

SEQ ID NO: 14830 - DNA, 32 bp, Artificial
  oligonucleotide probe
cacgcagctgcggtgcacggcgtttccccgaa

SEQ ID NO: 14831 - DNA, 32 bp, Artificial
  oligonucleotide probe
tcgttgcgcacggcttagccgctttcccgtgc

SEQ ID NO: 14832 - DNA, 32 bp, Artificial
  oligonucleotide probe
cagcgtgctgcgccatagccgctttcccgtgc

SEQ ID NO: 14833 - DNA, 32 bp, Artificial; identical to SEQ ID NO: 5195
  oligonucleotide probe

SEQ ID NO: 14834 - DNA, 32 bp, Artificial; identical to SEQ ID NO: 5171
  oligonucleotide probe

SEQ ID NO: 14835 - DNA, 32 bp, Artificial; identical to SEQ ID NO: 5163
  oligonucleotide probe

SEQ ID NO: 14836 - DNA, 32 bp, Artificial; identical to SEQ ID NO: 5185
  oligonucleotide probe

SEQ ID NO: 14837 - DNA, 32 bp, Artificial; identical to SEQ ID NO: 5141
  oligonucleotide probe

SEQ ID NO: 14838 - DNA, 32 bp, Artificial; identical to SEQ ID NO: 5138
  oligonucleotide probe

SEQ ID NO: 14839 - DNA, 32 bp, Artificial; identical to SEQ ID NO: 5159
  oligonucleotide probe

SEQ ID NO: 14840 - DNA, 32 bp, Artificial; identical to SEQ ID NO: 5177
  oligonucleotide probe

SEQ ID NO: 14841 - DNA, 32 bp, Artificial; identical to SEQ ID NO: 5161
  oligonucleotide probe

SEQ ID NO: 14842 - DNA, 32 bp, Artificial; identical to SEQ ID NO: 5136
  oligonucleotide probe

SEQ ID NO: 14843 - DNA, 32 bp, Artificial; identical to SEQ ID NO: 5135
  oligonucleotide probe

SEQ ID NO: 14844 - DNA, 32 bp, Artificial; identical to SEQ ID NO: 5140
  oligonucleotide probe

SEQ ID NO: 14845 - DNA, 32 bp, Artificial; identical to SEQ ID NO: 5134
  oligonucleotide probe

SEQ ID NO: 14846 - DNA, 32 bp, Artificial; identical to SEQ ID NO: 5137
  oligonucleotide probe

SEQ ID NO: 14847 - DNA, 32 bp, Artificial; identical to SEQ ID NO: 5160
  oligonucleotide probe

SEQ ID NO: 14848 - DNA, 32 bp, Artificial; identical to SEQ ID NO: 5133
  oligonucleotide probe

SEQ ID NO: 14849 - DNA, 32 bp, Artificial; identical to SEQ ID NO: 5410
  oligonucleotide probe

SEQ ID NO: 14850 - DNA, 32 bp, Artificial; identical to SEQ ID NO: 5217
  oligonucleotide probe

SEQ ID NO: 14851 - DNA, 32 bp, Artificial; identical to SEQ ID NO: 5411
  oligonucleotide probe

SEQ ID NO: 14852 - DNA, 32 bp, Artificial; identical to SEQ ID NO: 5224
  oligonucleotide probe

SEQ ID NO: 14853 - DNA, 32 bp, Artificial; identical to SEQ ID NO: 5222
  oligonucleotide probe

SEQ ID NO: 14854 - DNA, 32 bp, Artificial; identical to SEQ ID NO: 5229
  oligonucleotide probe

SEQ ID NO: 14855 - DNA, 32 bp, Artificial; identical to SEQ ID NO: 5221
  oligonucleotide probe

SEQ ID NO: 14856 - DNA, 32 bp, Artificial; identical to SEQ ID NO: 5242
  oligonucleotide probe

SEQ ID NO: 14857 - DNA, 32 bp, Artificial; identical to SEQ ID NO: 5239
  oligonucleotide probe

SEQ ID NO: 14858 - DNA, 32 bp, Artificial; identical to SEQ ID NO: 5241
  oligonucleotide probe

SEQ ID NO: 14859 - DNA, 32 bp, Artificial; identical to SEQ ID NO: 5399
  oligonucleotide probe

SEQ ID NO: 14860 - DNA, 32 bp, Artificial; identical to SEQ ID NO: 5240
  oligonucleotide probe

SEQ ID NO: 14861 - DNA, 32 bp, Artificial; identical to SEQ ID NO: 5218
  oligonucleotide probe

SEQ ID NO: 14862 - DNA, 32 bp, Artificial; identical to SEQ ID NO: 5223
  oligonucleotide probe

SEQ ID NO: 14863 - DNA, 32 bp, Artificial; identical to SEQ ID NO: 5253
  oligonucleotide probe

SEQ ID NO: 14864 - DNA, 32 bp, Artificial; identical to SEQ ID NO: 5232
  oligonucleotide probe

SEQ ID NO: 14865 - DNA, 32 bp, Artificial; identical to SEQ ID NO: 5231
  oligonucleotide probe

SEQ ID NO: 14866 - DNA, 32 bp, Artificial; identical to SEQ ID NO: 5220
  oligonucleotide probe

SEQ ID NO: 14867 - DNA, 32 bp, Artificial; identical to SEQ ID NO: 5219
  oligonucleotide probe

SEQ ID NO: 14868 - DNA, 32 bp, Artificial; identical to SEQ ID NO: 5416
  oligonucleotide probe

SEQ ID NO: 14869 - DNA, 32 bp, Artificial; identical to SEQ ID NO: 5564
  oligonucleotide probe

SEQ ID NO: 14870 - DNA, 32 bp, Artificial; identical to SEQ ID NO: 5565
  oligonucleotide probe

SEQ ID NO: 14871 - DNA, 32 bp, Artificial; identical to SEQ ID NO: 5539
  oligonucleotide probe

SEQ ID NO: 14872 - DNA, 32 bp, Artificial; identical to SEQ ID NO: 5536
  oligonucleotide probe

SEQ ID NO: 14873 - DNA, 32 bp, Artificial; identical to SEQ ID NO: 5554
  oligonucleotide probe

SEQ ID NO: 14874 - DNA, 32 bp, Artificial; identical to SEQ ID NO: 5537
  oligonucleotide probe

SEQ ID NO: 14875 - DNA, 32 bp, Artificial; identical to SEQ ID NO: 5547
  oligonucleotide probe

SEQ ID NO: 14876 - DNA, 32 bp, Artificial; identical to SEQ ID NO: 5550
  oligonucleotide probe

SEQ ID NO: 14877 - DNA, 32 bp, Artificial; identical to SEQ ID NO: 5708
  oligonucleotide probe

SEQ ID NO: 14878 - DNA, 32 bp, Artificial; identical to SEQ ID NO: 5546
  oligonucleotide probe

SEQ ID NO: 14879 - DNA, 32 bp, Artificial; identical to SEQ ID NO: 5594
  oligonucleotide probe

SEQ ID NO: 14880 - DNA, 32 bp, Artificial; identical to SEQ ID NO: 5545
  oligonucleotide probe

SEQ ID NO: 14881 - DNA, 32 bp, Artificial; identical to SEQ ID NO: 6074
  oligonucleotide probe

SEQ ID NO: 14882 - DNA, 32 bp, Artificial; identical to SEQ ID NO: 6145
  oligonucleotide probe

SEQ ID NO: 14883 - DNA, 32 bp, Artificial; identical to SEQ ID NO: 5555
  oligonucleotide probe

SEQ ID NO: 14884 - DNA, 32 bp, Artificial; identical to SEQ ID NO: 5610
  oligonucleotide probe

SEQ ID NO: 14885 - DNA, 32 bp, Artificial; identical to SEQ ID NO: 5544
  oligonucleotide probe

SEQ ID NO: 14886 - DNA, 32 bp, Artificial; identical to SEQ ID NO: 5551
  oligonucleotide probe

SEQ ID NO: 14887 - DNA, 32 bp, Artificial; identical to SEQ ID NO: 5541
  oligonucleotide probe

SEQ ID NO: 14888 - DNA, 32 bp, Artificial; identical to SEQ ID NO: 5709
  oligonucleotide probe

SEQ ID NO: 14889 - DNA, 32 bp, Artificial; identical to SEQ ID NO: 6131
  oligonucleotide probe

SEQ ID NO: 14890 - DNA, 32 bp, Artificial; identical to SEQ ID NO: 5585
  oligonucleotide probe

SEQ ID NO: 14891 - DNA, 32 bp, Artificial; identical to SEQ ID NO: 5540
  oligonucleotide probe

SEQ ID NO: 14892 - DNA, 32 bp, Artificial; identical to SEQ ID NO: 6070
  oligonucleotide probe

SEQ ID NO: 14893 - DNA, 32 bp, Artificial; identical to SEQ ID NO: 5595
  oligonucleotide probe

SEQ ID NO: 14894 - DNA, 32 bp, Artificial; identical to SEQ ID NO: 5611
  oligonucleotide probe

SEQ ID NO: 14895 - DNA, 32 bp, Artificial; identical to SEQ ID NO: 5538
  oligonucleotide probe

SEQ ID NO: 14896 - DNA, 32 bp, Artificial; identical to SEQ ID NO: 5584
  oligonucleotide probe

SEQ ID NO: 14897 - DNA, 32 bp, Artificial
  oligonucleotide probe
cgaaagccgcaatgcgcgtttgcgcgaatccc

SEQ ID NO: 14898 - DNA, 32 bp, Artificial; identical to SEQ ID NO: 14713
  oligonucleotide probe

SEQ ID NO: 14899 - DNA, 32 bp, Artificial; identical to SEQ ID NO: 14714
  oligonucleotide probe

SEQ ID NO: 14900 - DNA, 32 bp, Artificial; identical to SEQ ID NO: 14715
  oligonucleotide probe

SEQ ID NO: 14901 - DNA, 32 bp, Artificial; identical to SEQ ID NO: 14728
  oligonucleotide probe

SEQ ID NO: 14902 - DNA, 32 bp, Artificial
  oligonucleotide probe
tgcggcaaatcgcgtttccccacgccatgcaa

SEQ ID NO: 14903 - DNA, 32 bp, Artificial; identical to SEQ ID NO: 14734
  oligonucleotide probe

SEQ ID NO: 14904 - DNA, 32 bp, Artificial
  oligonucleotide probe
tcccggacgcttgcaacgtttgcgcgaatccc

SEQ ID NO: 14905 - DNA, 32 bp, Artificial
  oligonucleotide probe
tgcggcaaatcgcgttcgtttgcgcgaatccc

SEQ ID NO: 14906 - DNA, 32 bp, Artificial; identical to SEQ ID NO: 14721
  oligonucleotide probe

SEQ ID NO: 14907 - DNA, 32 bp, Artificial
  oligonucleotide probe
tgcggcaaatcgcgtttgcgcttgcagccgtt

SEQ ID NO: 14908 - DNA, 32 bp, Artificial; identical to SEQ ID NO: 14719
  oligonucleotide probe

SEQ ID NO: 14909 - DNA, 32 bp, Artificial; identical to SEQ ID NO: 14723
  oligonucleotide probe

SEQ ID NO: 14910 - DNA, 32 bp, Artificial
  oligonucleotide probe
tcccggacgcttgcaatccccacgccatgcaa

SEQ ID NO: 14911 - DNA, 32 bp, Artificial; identical to SEQ ID NO: 14736
  oligonucleotide probe

SEQ ID NO: 14912 - DNA, 32 bp, Artificial; identical to SEQ ID NO: 14730
  oligonucleotide probe

SEQ ID NO: 14913 - DNA, 32 bp, Artificial
  oligonucleotide probe
cacggtgcgcaaagcccgtttgcgcgaatccc

SEQ ID NO: 14914 - DNA, 32 bp, Artificial; identical to SEQ ID NO: 14751
  oligonucleotide probe

SEQ ID NO: 14915 - DNA, 32 bp, Artificial
  oligonucleotide probe
cagcgtgctgcgccatcgtttgcgcgaatccc

SEQ ID NO: 14916 - DNA, 32 bp, Artificial; identical to SEQ ID NO: 14745
  oligonucleotide probe

SEQ ID NO: 14917 - DNA, 32 bp, Artificial
  oligonucleotide probe
cagcgtgctgcgccatcacgcagctgcggtgc

SEQ ID NO: 14918 - DNA, 32 bp, Artificial
  oligonucleotide probe
cacggtgcgcaaagcctgcgcttgcagccgtt

SEQ ID NO: 14919 - DNA, 32 bp, Artificial
  oligonucleotide probe
cagcgtgctgcgccattgcgcttgcagccgtt

SEQ ID NO: 14920 - DNA, 32 bp, Artificial
  oligonucleotide probe
cagcgtgctgcgccattccccacgccatgcaa

SEQ ID NO: 14921 - DNA, 32 bp, Artificial; identical to SEQ ID NO: 14770
  oligonucleotide probe

SEQ ID NO: 14922 - DNA, 32 bp, Artificial
  oligonucleotide probe
cacggtgcgcaaagcctccccacgccatgcaa

SEQ ID NO: 14923 - DNA, 32 bp, Artificial; identical to SEQ ID NO: 14752
  oligonucleotide probe

SEQ ID NO: 14924 - DNA, 32 bp, Artificial; identical to SEQ ID NO: 14763
  oligonucleotide probe

SEQ ID NO: 14925 - DNA, 32 bp, Artificial; identical to SEQ ID NO: 14741
  oligonucleotide probe

SEQ ID NO: 14926 - DNA, 32 bp, Artificial; identical to SEQ ID NO: 14761
  oligonucleotide probe

SEQ ID NO: 14927 - DNA, 32 bp, Artificial
  oligonucleotide probe
cacggtgcgcaaagcccacgcagctgcggtgc

SEQ ID NO: 14928 - DNA, 32 bp, Artificial; identical to SEQ ID NO: 14742
  oligonucleotide probe

SEQ ID NO: 14929 - DNA, 32 bp, Artificial; identical to SEQ ID NO: 14750
  oligonucleotide probe

SEQ ID NO: 14930 - DNA, 32 bp, Artificial; identical to SEQ ID NO: 14772
  oligonucleotide probe

SEQ ID NO: 14931 - DNA, 32 bp, Artificial
  oligonucleotide probe
cagcgtgctgcgccatcagcgcaaacggcgaa

SEQ ID NO: 14932 - DNA, 32 bp, Artificial; identical to SEQ ID NO: 14765
  oligonucleotide probe

SEQ ID NO: 14933 - DNA, 32 bp, Artificial; identical to SEQ ID NO: 14816
  oligonucleotide probe

SEQ ID NO: 14934 - DNA, 32 bp, Artificial; identical to SEQ ID NO: 14797
  oligonucleotide probe

SEQ ID NO: 14935 - DNA, 32 bp, Artificial; identical to SEQ ID NO: 14829
  oligonucleotide probe

SEQ ID NO: 14936 - DNA, 32 bp, Artificial
  oligonucleotide probe
agccgctttcccgtgcacgggaccgtgcagcc

SEQ ID NO: 14937 - DNA, 32 bp, Artificial
  oligonucleotide probe
acggcgtttccccgaatgcgcttgcagccgtt

SEQ ID NO: 14938 - DNA, 32 bp, Artificial; identical to SEQ ID NO: 14825
  oligonucleotide probe

SEQ ID NO: 14939 - DNA, 32 bp, Artificial; identical to SEQ ID NO: 14796
  oligonucleotide probe

SEQ ID NO: 14940 - DNA, 32 bp, Artificial
  oligonucleotide probe
acggcgtttccccgaacacgcagctgcggtgc

SEQ ID NO: 14941 - DNA, 32 bp, Artificial
  oligonucleotide probe
acggcgtttccccgaatccccacgccatgcaa

SEQ ID NO: 14942 - DNA, 32 bp, Artificial; identical to SEQ ID NO: 14809
  oligonucleotide probe

SEQ ID NO: 14943 - DNA, 32 bp, Artificial; identical to SEQ ID NO: 14782
  oligonucleotide probe

SEQ ID NO: 14944 - DNA, 32 bp, Artificial
  oligonucleotide probe
agccgctttcccgtgcgtgcgctttgcgacgg

SEQ ID NO: 14945 - DNA, 32 bp, Artificial
  oligonucleotide probe
agccgctttcccgtgccgtttgcgcgaatccc

SEQ ID NO: 14946 - DNA, 32 bp, Artificial; identical to SEQ ID NO: 14798
  oligonucleotide probe

SEQ ID NO: 14947 - DNA, 32 bp, Artificial
  oligonucleotide probe
agccgctttcccgtgctgcgcttgcagccgtt

SEQ ID NO: 14948 - DNA, 32 bp, Artificial; identical to SEQ ID NO: 14800
  oligonucleotide probe

SEQ ID NO: 14949 - DNA, 32 bp, Artificial
  oligonucleotide probe
acggcgtttccccgaagtgcgctttgcgacgg

SEQ ID NO: 14950 - DNA, 32 bp, Artificial
  oligonucleotide probe
agccgctttcccgtgccacgcagctgcggtgc

SEQ ID NO: 14951 - DNA, 32 bp, Artificial
  oligonucleotide probe
agccgctttcccgtgccagcgcaaacggcgaa

SEQ ID NO: 14952 - DNA, 32 bp, Artificial
  oligonucleotide probe
agccgctttcccgtgctccccacgccatgcaa

SEQ ID NO: 14953 - DNA, 32 bp, Artificial
  oligonucleotide probe
acggcgtttccccgaacgtttgcgcgaatccc

SEQ ID NO: 14954 - DNA, 32 bp, Artificial; identical to SEQ ID NO: 14811
  oligonucleotide probe

SEQ ID NO: 14955 - DNA, 32 bp, Artificial
  oligonucleotide probe
acggcgtttccccgaacagcgcaaacggcgaa

SEQ ID NO: 14956 - DNA, 32 bp, Artificial; identical to SEQ ID NO: 14819
  oligonucleotide probe

SEQ ID NO: 14957 - DNA, 32 bp, Artificial; identical to SEQ ID NO: 14817
  oligonucleotide probe

SEQ ID NO: 14958 - DNA, 32 bp, Artificial; identical to SEQ ID NO: 14792
  oligonucleotide probe

SEQ ID NO: 14959 - DNA, 32 bp, Artificial; identical to SEQ ID NO: 14827
  oligonucleotide probe

SEQ ID NO: 14960 - DNA, 32 bp, Artificial; identical to SEQ ID NO: 14786
  oligonucleotide probe

SEQ ID NO: 14961 - DNA, 16 bp, Artificial
  oligonucleotide probe
agcgcaggagacgcct

SEQ ID NO: 14962 - DNA, 16 bp, Artificial
  oligonucleotide probe
gacggcgagtgggcag

SEQ ID NO: 14963 - DNA, 16 bp, Artificial
  oligonucleotide probe
acgcgcctgacgcctc

SEQ ID NO: 14964 - DNA, 16 bp, Artificial
  oligonucleotide probe
gcctagcgcctcgacg

SEQ ID NO: 14965 - DNA, 16 bp, Artificial
  oligonucleotide probe
gtccgcaggtccgcct

SEQ ID NO: 14966 - DNA, 16 bp, Artificial
  oligonucleotide probe
gacgcaggcggagggt

SEQ ID NO: 14967 - DNA, 16 bp, Artificial
  oligonucleotide probe
acgcggtccaccgtgg

SEQ ID NO: 14968 - DNA, 16 bp, Artificial
  oligonucleotide probe
gacgagcgcaccgcag

SEQ ID NO: 14969 - DNA, 16 bp, Artificial
  oligonucleotide probe
gcctcggagacggcag

SEQ ID NO: 14970 - DNA, 16 bp, Artificial
  oligonucleotide probe
gtgggcctcctcccaa

SEQ ID NO: 14971 - DNA, 16 bp, Artificial
  oligonucleotide probe
ggaagcctgcgacgga

SEQ ID NO: 14972 - DNA, 16 bp, Artificial
  oligonucleotide probe
caccgggtggtcagcg

SEQ ID NO: 14973 - DNA, 16 bp, Artificial
  oligonucleotide probe
ggtcgacgacgccgag

SEQ ID NO: 14974 - DNA, 16 bp, Artificial
  oligonucleotide probe
gtggcggaggtcggaa

SEQ ID NO: 14975 - DNA, 16 bp, Artificial
  oligonucleotide probe
tggcgtgggggtccaa

SEQ ID NO: 14976 - DNA, 16 bp, Artificial
  oligonucleotide probe
tgctgggtgcaggcga

SEQ ID NO: 14977 - DNA, 16 bp, Artificial
  oligonucleotide probe
agcggtccgcgagagc

SEQ ID NO: 14978 - DNA, 16 bp, Artificial
  oligonucleotide probe
acgcggaagacgtggc

SEQ ID NO: 14979 - DNA, 16 bp, Artificial
  oligonucleotide probe
gcagcggagcctgagc

SEQ ID NO: 14980 - DNA, 16 bp, Artificial
  oligonucleotide probe
acgcaccagtcccgga

SEQ ID NO: 14981 - DNA, 16 bp, Artificial
  oligonucleotide probe
tcacgccttggccacc

SEQ ID NO: 14982 - DNA, 16 bp, Artificial
  oligonucleotide probe
caccgcgaggtcacgc

SEQ ID NO: 14983 - DNA, 16 bp, Artificial
  oligonucleotide probe
accatggcacgcgacg

SEQ ID NO: 14984 - DNA, 16 bp, Artificial
  oligonucleotide probe
acgccaggcgaggtgg

SEQ ID NO: 14985 - DNA, 16 bp, Artificial
  oligonucleotide probe
caggggaagggtcgga

SEQ ID NO: 14986 - DNA, 16 bp, Artificial
  oligonucleotide probe
gtccgagcagcggcct

SEQ ID NO: 14987 - DNA, 16 bp, Artificial
  oligonucleotide probe
cggagacgcagggggt

SEQ ID NO: 14988 - DNA, 16 bp, Artificial
  oligonucleotide probe
caccgacgggaaacgc

SEQ ID NO: 14989 - DNA, 16 bp, Artificial
  oligonucleotide probe
gtccggaagtgggcga

SEQ ID NO: 14990 - DNA, 16 bp, Artificial
  oligonucleotide probe
gtccacgctggcgacg

SEQ ID NO: 14991 - DNA, 16 bp, Artificial
  oligonucleotide probe
tcaccggagccttggc

SEQ ID NO: 14992 - DNA, 16 bp, Artificial
  oligonucleotide probe
gagcgcgacacccagg

SEQ ID NO: 14993 - DNA, 16 bp, Artificial
  oligonucleotide probe
cggacaggacgctggc

SEQ ID NO: 14994 - DNA, 16 bp, Artificial
  oligonucleotide probe
cggatgctgcgagcag

SEQ ID NO: 14995 - DNA, 16 bp, Artificial
  oligonucleotide probe
gcaggcagccaatggc

SEQ ID NO: 14996 - DNA, 16 bp, Artificial
  oligonucleotide probe
gagcgggtgtggagcg

SEQ ID NO: 14997 - DNA, 16 bp, Artificial
  oligonucleotide probe
cctctggctggcccaa

SEQ ID NO: 14998 - DNA, 16 bp, Artificial
  oligonucleotide probe
agcgccaatcacgggt

SEQ ID NO: 14999 - DNA, 16 bp, Artificial
  oligonucleotide probe
caggcacccaggcgga

SEQ ID NO: 15000 - DNA, 16 bp, Artificial
  oligonucleotide probe
tggcggtcgcctcgag

SEQ ID NO: 15001 - DNA, 16 bp, Artificial
  oligonucleotide probe
gcgacgagcgagccaa

SEQ ID NO: 15002 - DNA, 16 bp, Artificial
  oligonucleotide probe
acgcgggtcaccgtcc

SEQ ID NO: 15003 - DNA, 16 bp, Artificial
  oligonucleotide probe
gcgaagcggcgaggtc

SEQ ID NO: 15004 - DNA, 16 bp, Artificial
  oligonucleotide probe
agcgagcggtggacgc

SEQ ID NO: 15005 - DNA, 16 bp, Artificial
  oligonucleotide probe
gggtggaacgaggcga

SEQ ID NO: 15006 - DNA, 16 bp, Artificial
  oligonucleotide probe
gcaggtggtggcgagc

SEQ ID NO: 15007 - DNA, 16 bp, Artificial
  oligonucleotide probe
gggttggccgagtggc

SEQ ID NO: 15008 - DNA, 16 bp, Artificial
  oligonucleotide probe
tggcgggtgacggtgg

SEQ ID NO: 15009 - DNA, 16 bp, Artificial
  oligonucleotide probe
caggagcgggaagcga

SEQ ID NO: 15010 - DNA, 16 bp, Artificial
  oligonucleotide probe
tggccaggcggagtgg

SEQ ID NO: 15011 - DNA, 16 bp, Artificial
  oligonucleotide probe
gcctgtgggtccgcga

SEQ ID NO: 15012 - DNA, 16 bp, Artificial
  oligonucleotide probe
cctcgcctcgaggagc

SEQ ID NO: 15013 - DNA, 16 bp, Artificial
  oligonucleotide probe
cctcagcgcggaacca

SEQ ID NO: 15014 - DNA, 16 bp, Artificial
  oligonucleotide probe
gacggacgacgcgtgg

SEQ ID NO: 15015 - DNA, 16 bp, Artificial
  oligonucleotide probe
gacggggtcggacgag

SEQ ID NO: 15016 - DNA, 16 bp, Artificial
  oligonucleotide probe
gtggcaggagcgacgc

SEQ ID NO: 15017 - DNA, 16 bp, Artificial
  oligonucleotide probe
acgcgagcgggtgcag

SEQ ID NO: 15018 - DNA, 16 bp, Artificial
  oligonucleotide probe
gcgatggccaggtggc

SEQ ID NO: 15019 - DNA, 16 bp, Artificial
  oligonucleotide probe
accacggaagcgcgga

SEQ ID NO: 15020 - DNA, 16 bp, Artificial
  oligonucleotide probe
gtgggacgacgcgcga

SEQ ID NO: 15021 - DNA, 16 bp, Artificial
  oligonucleotide probe
tggcagcgggtcgtgg

SEQ ID NO: 15022 - DNA, 16 bp, Artificial
  oligonucleotide probe
gcctgggtcaccacgc

SEQ ID NO: 15023 - DNA, 16 bp, Artificial
  oligonucleotide probe
ccaaagcgggaatggc

SEQ ID NO: 15024 - DNA, 16 bp, Artificial
  oligonucleotide probe
cctccgaggacgcgga

SEQ ID NO: 15025 - DNA, 16 bp, Artificial
  oligonucleotide probe
gcagcctctggccgag

SEQ ID NO: 15026 - DNA, 16 bp, Artificial
  oligonucleotide probe
gcagcaccagcgtggc

SEQ ID NO: 15027 - DNA, 16 bp, Artificial
  oligonucleotide probe
ggtccggagcagacgc

SEQ ID NO: 15028 - DNA, 16 bp, Artificial
  oligonucleotide probe
gcctgcgagagctggc

SEQ ID NO: 15029 - DNA, 16 bp, Artificial
  oligonucleotide probe
gtccccaaagcggcag

SEQ ID NO: 15030 - DNA, 16 bp, Artificial
  oligonucleotide probe
ggaaagcggcctggaa

SEQ ID NO: 15031 - DNA, 16 bp, Artificial
  oligonucleotide probe
gagcggtctggcggaa

SEQ ID NO: 15032 - DNA, 16 bp, Artificial
  oligonucleotide probe
gagcgcctcctcgagc

SEQ ID NO: 15033 - DNA, 16 bp, Artificial
  oligonucleotide probe
ggtcgagctggcgcag

SEQ ID NO: 15034 - DNA, 16 bp, Artificial
  oligonucleotide probe
gcgagtggcagggcct

SEQ ID NO: 15035 - DNA, 16 bp, Artificial
  oligonucleotide probe
caccgagccacccgga

SEQ ID NO: 15036 - DNA, 16 bp, Artificial
  oligonucleotide probe
gcgaacgccctccagg

SEQ ID NO: 15037 - DNA, 16 bp, Artificial
  oligonucleotide probe
tggcacgcgagccagg

SEQ ID NO: 15038 - DNA, 16 bp, Artificial
  oligonucleotide probe
acgctgctgcgaacca

SEQ ID NO: 15039 - DNA, 16 bp, Artificial
  oligonucleotide probe
cggagcgagtggggaa

SEQ ID NO: 15040 - DNA, 16 bp, Artificial
  oligonucleotide probe
acgccaccgcctgacg

SEQ ID NO: 15041 - DNA, 16 bp, Artificial
  oligonucleotide probe
gagcacgcgggtgcct

SEQ ID NO: 15042 - DNA, 16 bp, Artificial
  oligonucleotide probe
gggtagcggcgagacg

SEQ ID NO: 15043 - DNA, 16 bp, Artificial
  oligonucleotide probe
cgagcggaggtcccaa

SEQ ID NO: 15044 - DNA, 16 bp, Artificial
  oligonucleotide probe
cggatggcccaagggt

SEQ ID NO: 15045 - DNA, 16 bp, Artificial
  oligonucleotide probe
ggaacggaagcggagc

SEQ ID NO: 15046 - DNA, 16 bp, Artificial
  oligonucleotide probe
cagggcgagtccgacg

SEQ ID NO: 15047 - DNA, 16 bp, Artificial
  oligonucleotide probe
cgaggacgccaaacgc

SEQ ID NO: 15048 - DNA, 16 bp, Artificial
  oligonucleotide probe
gggtacgcgacgcgag

SEQ ID NO: 15049 - DNA, 16 bp, Artificial
  oligonucleotide probe
cggacacctggccgga

SEQ ID NO: 15050 - DNA, 16 bp, Artificial
  oligonucleotide probe
gagcgacgcgagagcg

SEQ ID NO: 15051 - DNA, 16 bp, Artificial
  oligonucleotide probe
cagggcagggtcgggt

SEQ ID NO: 15052 - DNA, 16 bp, Artificial
  oligonucleotide probe
agcggacggcaggagc

SEQ ID NO: 15053 - DNA, 16 bp, Artificial
  oligonucleotide probe
ggtcgcgacacctggc

SEQ ID NO: 15054 - DNA, 16 bp, Artificial
  oligonucleotide probe
cgagcctcgggtgcga

SEQ ID NO: 15055 - DNA, 16 bp, Artificial
  oligonucleotide probe
gacggagcacgccgga

SEQ ID NO: 15056 - DNA, 16 bp, Artificial
  oligonucleotide probe
cggagcctgagcgtgg

SEQ ID NO: 15057 - DNA, 16 bp, Artificial
  oligonucleotide probe
caccggtcagcggggt

SEQ ID NO: 15058 - DNA, 16 bp, Artificial
  oligonucleotide probe
actgcggacgaggcct

SEQ ID NO: 15059 - DNA, 16 bp, Artificial
  oligonucleotide probe
gtccgggtcaggcagg

SEQ ID NO: 15060 - DNA, 16 bp, Artificial
  oligonucleotide probe
cggagagcgcgagcct

SEQ ID NO: 15061 - DNA, 16 bp, Artificial
  oligonucleotide probe
acgcagcggggtgacg

SEQ ID NO: 15062 - DNA, 16 bp, Artificial
  oligonucleotide probe
caccgcctcagggacg

SEQ ID NO: 15063 - DNA, 16 bp, Artificial
  oligonucleotide probe
cgagcaggcgaggcag

SEQ ID NO: 15064 - DNA, 16 bp, Artificial
  oligonucleotide probe
gcctcaggacgcacgc

SEQ ID NO: 15065 - DNA, 16 bp, Artificial
  oligonucleotide probe
gcaggacggacggcct

SEQ ID NO: 15066 - DNA, 16 bp, Artificial
  oligonucleotide probe
gcgacctcacgcgcag

SEQ ID NO: 15067 - DNA, 16 bp, Artificial
  oligonucleotide probe
caggcctccctcgcga

SEQ ID NO: 15068 - DNA, 16 bp, Artificial
  oligonucleotide probe
caccagcgagacgcga

SEQ ID NO: 15069 - DNA, 16 bp, Artificial
  oligonucleotide probe
cggagcaggagcggaa

SEQ ID NO: 15070 - DNA, 16 bp, Artificial
  oligonucleotide probe
ggtcgcctgtccagcg

SEQ ID NO: 15071 - DNA, 16 bp, Artificial
  oligonucleotide probe
gtggccaatcacgcga

SEQ ID NO: 15072 - DNA, 16 bp, Artificial
  oligonucleotide probe
agcgcaccgacgacgc

SEQ ID NO: 15073 - DNA, 16 bp, Artificial
  oligonucleotide probe
cagggtgggcgagcga

SEQ ID NO: 15074 - DNA, 16 bp, Artificial
  oligonucleotide probe
acgcccaacagggagc

SEQ ID NO: 15075 - DNA, 16 bp, Artificial
  oligonucleotide probe
tgctcggatgctgcga

SEQ ID NO: 15076 - DNA, 16 bp, Artificial
  oligonucleotide probe
gagcgcagccaagcct

SEQ ID NO: 15077 - DNA, 16 bp, Artificial
  oligonucleotide probe
gagcgagcagcgggtc

SEQ ID NO: 15078 - DNA, 16 bp, Artificial
  oligonucleotide probe
acgccctcaccagcga

SEQ ID NO: 15079 - DNA, 16 bp, Artificial
  oligonucleotide probe
tggcgcctgtccgtgg

SEQ ID NO: 15080 - DNA, 16 bp, Artificial
  oligonucleotide probe
gtggcgagcctcgggt

SEQ ID NO: 15081 - DNA, 16 bp, Artificial
  oligonucleotide probe
caggacgctggccctc

SEQ ID NO: 15082 - DNA, 16 bp, Artificial
  oligonucleotide probe
cctcgtggcggacgga

SEQ ID NO: 15083 - DNA, 16 bp, Artificial
  oligonucleotide probe
gtgggggtgcagggaa

SEQ ID NO: 15084 - DNA, 16 bp, Artificial
  oligonucleotide probe
ggtcgcaggcgagggt

SEQ ID NO: 15085 - DNA, 16 bp, Artificial
  oligonucleotide probe
cacccgagagcggtgg

SEQ ID NO: 15086 - DNA, 16 bp, Artificial
  oligonucleotide probe
gcgagtcccggaagcg

SEQ ID NO: 15087 - DNA, 16 bp, Artificial
  oligonucleotide probe
gagccgagtggcgtcc

SEQ ID NO: 15088 - DNA, 16 bp, Artificial
  oligonucleotide probe
cgagcaccgagccgga

SEQ ID NO: 15089 - DNA, 16 bp, Artificial
  oligonucleotide probe
cctccggacctcacgc

SEQ ID NO: 15090 - DNA, 16 bp, Artificial
  oligonucleotide probe
gcgacagggcctgcct

SEQ ID NO: 15091 - DNA, 16 bp, Artificial
  oligonucleotide probe
gcgacacccggaacgc

SEQ ID NO: 15092 - DNA, 16 bp, Artificial
  oligonucleotide probe
agcggcgagagcgtcc

SEQ ID NO: 15093 - DNA, 16 bp, Artificial
  oligonucleotide probe
gacgcaccagcgcgag

SEQ ID NO: 15094 - DNA, 16 bp, Artificial
  oligonucleotide probe
agcgcctcgacgggaa

SEQ ID NO: 15095 - DNA, 16 bp, Artificial
  oligonucleotide probe
tggcaccagcaggggt

SEQ ID NO: 15096 - DNA, 16 bp, Artificial
  oligonucleotide probe
gcagcgagcgagggaa

SEQ ID NO: 15097 - DNA, 16 bp, Artificial
  oligonucleotide probe
cgctcctggtctaggc

SEQ ID NO: 15098 - DNA, 16 bp, Artificial
  oligonucleotide probe
cgtctcgcccacctgc

SEQ ID NO: 15099 - DNA, 16 bp, Artificial
  oligonucleotide probe
gcgtaggccgtcgagg

SEQ ID NO: 15100 - DNA, 16 bp, Artificial
  oligonucleotide probe
aggccgctgaggcgtc

SEQ ID NO: 15101 - DNA, 16 bp, Artificial
  oligonucleotide probe
ggacctgcggacaggc

SEQ ID NO: 15102 - DNA, 16 bp, Artificial
  oligonucleotide probe
cgtccctgtccgaccc

SEQ ID NO: 15103 - DNA, 16 bp, Artificial
  oligonucleotide probe
gcgtgaccggtgccac

SEQ ID NO: 15104 - DNA, 16 bp, Artificial
  oligonucleotide probe
cgtccgctggtgctgc

SEQ ID NO: 15105 - DNA, 16 bp, Artificial
  oligonucleotide probe
aggctccgcgtcctgc

SEQ ID NO: 15106 - DNA, 16 bp, Artificial
  oligonucleotide probe
ccacaggcgaggttgg

SEQ ID NO: 15107 - DNA, 16 bp, Artificial
  oligonucleotide probe
ttccaggctcgctccg

SEQ ID NO: 15108 - DNA, 16 bp, Artificial
  oligonucleotide probe
ggtgacccgacccgct

SEQ ID NO: 15109 - DNA, 16 bp, Artificial
  oligonucleotide probe
gacccgtcgcgtctcg

SEQ ID NO: 15110 - DNA, 16 bp, Artificial
  oligonucleotide probe
ccactccggaccttcc

SEQ ID NO: 15111 - DNA, 16 bp, Artificial
  oligonucleotide probe
gccaccacacccttgg

SEQ ID NO: 15112 - DNA, 16 bp, Artificial
  oligonucleotide probe
agcaacccctgctcgc

SEQ ID NO: 15113 - DNA, 16 bp, Artificial
  oligonucleotide probe
cgctggactcgcgctc

SEQ ID NO: 15114 - DNA, 16 bp, Artificial
  oligonucleotide probe
gcgtttcccgtcgcca

SEQ ID NO: 15115 - DNA, 16 bp, Artificial
  oligonucleotide probe
ctgctccgaggcgctc

SEQ ID NO: 15116 - DNA, 16 bp, Artificial
  oligonucleotide probe
gcgttggtggactccg

SEQ ID NO: 15117 - DNA, 16 bp, Artificial
  oligonucleotide probe
gtgaaggcgccaggtg

SEQ ID NO: 15118 - DNA, 16 bp, Artificial
  oligonucleotide probe
ggtgtcgcgaccgcgt

SEQ ID NO: 15119 - DNA, 16 bp, Artificial
  oligonucleotide probe
tggtgccagcgtcgtc

SEQ ID NO: 15120 - DNA, 16 bp, Artificial
  oligonucleotide probe
gcgtcctgctcgccac

SEQ ID NO: 15121 - DNA, 16 bp, Artificial
  oligonucleotide probe
cctgttccaccctccg

SEQ ID NO: 15122 - DNA, 16 bp, Artificial
  oligonucleotide probe
ggacgctccgctaggc

SEQ ID NO: 15123 - DNA, 16 bp, Artificial
  oligonucleotide probe
tccgcgtccctgaccc

SEQ ID NO: 15124 - DNA, 16 bp, Artificial
  oligonucleotide probe
ggtgcgtcttccgcgt

SEQ ID NO: 15125 - DNA, 16 bp, Artificial
  oligonucleotide probe
ggacttccccactcgc

SEQ ID NO: 15126 - DNA, 16 bp, Artificial
  oligonucleotide probe
ggacgcgtgccacgtc

SEQ ID NO: 15127 - DNA, 16 bp, Artificial
  oligonucleotide probe
gtgatccgaggcgcca

SEQ ID NO: 15128 - DNA, 16 bp, Artificial
  oligonucleotide probe
gctctcgcggtgcctg

SEQ ID NO: 15129 - DNA, 16 bp, Artificial
  oligonucleotide probe
tccgcctggcgtgcca

SEQ ID NO: 15130 - DNA, 16 bp, Artificial
  oligonucleotide probe
tccgagcatcgcctgc

SEQ ID NO: 15131 - DNA, 16 bp, Artificial
  oligonucleotide probe
ctgcctgcttgggcca

SEQ ID NO: 15132 - DNA, 16 bp, Artificial
  oligonucleotide probe
gctcacccccaccgct

SEQ ID NO: 15133 - DNA, 16 bp, Artificial
  oligonucleotide probe
gagggccagccattgg

SEQ ID NO: 15134 - DNA, 16 bp, Artificial
  oligonucleotide probe
cgctttgggtgaaccc

SEQ ID NO: 15135 - DNA, 16 bp, Artificial
  oligonucleotide probe
cctgggtgcctgtccg

SEQ ID NO: 15136 - DNA, 16 bp, Artificial
  oligonucleotide probe
gccagaccaggcctcg

SEQ ID NO: 15137 - DNA, 16 bp, Artificial
  oligonucleotide probe
tcgcctcgctcgttgg

SEQ ID NO: 15138 - DNA, 16 bp, Artificial
  oligonucleotide probe
gcgtacccggtgggac

SEQ ID NO: 15139 - DNA, 16 bp, Artificial
  oligonucleotide probe
tcgccgcttcgcgacc

SEQ ID NO: 15140 - DNA, 16 bp, Artificial
  oligonucleotide probe
cgctcgctccacgcgt

SEQ ID NO: 15141 - DNA, 16 bp, Artificial
  oligonucleotide probe
acccttccctcgtcgc

SEQ ID NO: 15142 - DNA, 16 bp, Artificial
  oligonucleotide probe
ctgcccacgccagctc

SEQ ID NO: 15143 - DNA, 16 bp, Artificial
  oligonucleotide probe
acccgccactcggcca

SEQ ID NO: 15144 - DNA, 16 bp, Artificial
  oligonucleotide probe
gccaaccccgtcccac

SEQ ID NO: 15145 - DNA, 16 bp, Artificial
  oligonucleotide probe
cctgcgctttcctcgc

SEQ ID NO: 15146 - DNA, 16 bp, Artificial
  oligonucleotide probe
gccacctgtccgccac

SEQ ID NO: 15147 - DNA, 16 bp, Artificial
  oligonucleotide probe
aggcccacggactcgc

SEQ ID NO: 15148 - DNA, 16 bp, Artificial
  oligonucleotide probe
gaggaggcctcggctc

SEQ ID NO: 15149 - DNA, 16 bp, Artificial
  oligonucleotide probe
gaggcgcttccgtggt

SEQ ID NO: 15150 - DNA, 16 bp, Artificial
  oligonucleotide probe
cgtccgtcgcgtccac

SEQ ID NO: 15151 - DNA, 16 bp, Artificial
  oligonucleotide probe
cgtcaccctccgctcg

SEQ ID NO: 15152 - DNA, 16 bp, Artificial
  oligonucleotide probe
ccaccctgcgctgcgt

SEQ ID NO: 15153 - DNA, 16 bp, Artificial
  oligonucleotide probe
gcgtgctcacccctgc

SEQ ID NO: 15154 - DNA, 16 bp, Artificial
  oligonucleotide probe
tcgcgccacctggcca

SEQ ID NO: 15155 - DNA, 16 bp, Artificial
  oligonucleotide probe
tggttccgcgcttccg

SEQ ID NO: 15156 - DNA, 16 bp, Artificial
  oligonucleotide probe
ccaccgtcgcgttcgc

SEQ ID NO: 15157 - DNA, 16 bp, Artificial
  oligonucleotide probe
gccacgctgaccccac

SEQ ID NO: 15158 - DNA, 16 bp, Artificial
  oligonucleotide probe
aggcacccggtggcgt

SEQ ID NO: 15159 - DNA, 16 bp, Artificial
  oligonucleotide probe
ttggcgctttccgcca

SEQ ID NO: 15160 - DNA, 16 bp, Artificial
  oligonucleotide probe
gaggctcgcgtctccg

SEQ ID NO: 15161 - DNA, 16 bp, Artificial
  oligonucleotide probe
ctgcgagggccactcg

SEQ ID NO: 15162 - DNA, 16 bp, Artificial
  oligonucleotide probe
ctgcggtgcgctgcca

SEQ ID NO: 15163 - DNA, 16 bp, Artificial
  oligonucleotide probe
gacctccgctgcgcgt

SEQ ID NO: 15164 - DNA, 16 bp, Artificial
  oligonucleotide probe
aggctcgcgctcgcca

SEQ ID NO: 15165 - DNA, 16 bp, Artificial
  oligonucleotide probe
ggacttggcgctctgc

SEQ ID NO: 15166 - DNA, 16 bp, Artificial
  oligonucleotide probe
ttcccgctaggcttcc

SEQ ID NO: 15167 - DNA, 16 bp, Artificial
  oligonucleotide probe
gctcgaccgccattcc

SEQ ID NO: 15168 - DNA, 16 bp, Artificial
  oligonucleotide probe
gctcaggcgagggctc

SEQ ID NO: 15169 - DNA, 16 bp, Artificial
  oligonucleotide probe
gaccgctcgccactgc

SEQ ID NO: 15170 - DNA, 16 bp, Artificial
  oligonucleotide probe
tcgcccaccctgaggc

SEQ ID NO: 15171 - DNA, 16 bp, Artificial
  oligonucleotide probe
ggtggctcggtgtccg

SEQ ID NO: 15172 - DNA, 16 bp, Artificial
  oligonucleotide probe
tcgcgcgtgaggcctg

SEQ ID NO: 15173 - DNA, 16 bp, Artificial
  oligonucleotide probe
gccagcgtgctccctg

SEQ ID NO: 15174 - DNA, 16 bp, Artificial
  oligonucleotide probe
gcgtagcatcgctggt

SEQ ID NO: 15175 - DNA, 16 bp, Artificial
  oligonucleotide probe
tccgtcgcccacttcc

SEQ ID NO: 15176 - DNA, 16 bp, Artificial
  oligonucleotide probe
gcgtggtgaggccgtc

SEQ ID NO: 15177 - DNA, 16 bp, Artificial
  oligonucleotide probe
gctcgcgtacccaggc

SEQ ID NO: 15178 - DNA, 16 bp, Artificial
  oligonucleotide probe
accccgcttcgccgtc

SEQ ID NO: 15179 - DNA, 16 bp, Artificial
  oligonucleotide probe
ctcgtccggaccttgg

SEQ ID NO: 15180 - DNA, 16 bp, Artificial
  oligonucleotide probe
tccggccattggaccc

SEQ ID NO: 15181 - DNA, 16 bp, Artificial
  oligonucleotide probe
ttcctccgcgctgctc

SEQ ID NO: 15182 - DNA, 16 bp, Artificial
  oligonucleotide probe
cctgtcgcggaccgtc

SEQ ID NO: 15183 - DNA, 16 bp, Artificial
  oligonucleotide probe
ctcgcgtcttgggcgt

SEQ ID NO: 15184 - DNA, 16 bp, Artificial
  oligonucleotide probe
acccgcgtcgtcctcg

SEQ ID NO: 15185 - DNA, 16 bp, Artificial
  oligonucleotide probe
tccgggtggccatccg

SEQ ID NO: 15186 - DNA, 16 bp, Artificial
  oligonucleotide probe
gctccgtcctcgcgct

SEQ ID NO: 15187 - DNA, 16 bp, Artificial
  oligonucleotide probe
cctgctgcgaccaccc

SEQ ID NO: 15188 - DNA, 16 bp, Artificial
  oligonucleotide probe
cgctcgtcctgcgctc

SEQ ID NO: 15189 - DNA, 16 bp, Artificial
  oligonucleotide probe
gacctcgcggtggcca

SEQ ID NO: 15190 - DNA, 16 bp, Artificial
  oligonucleotide probe
ctcggaggaccctcgc

SEQ ID NO: 15191 - DNA, 16 bp, Artificial
  oligonucleotide probe
cgtcgctcgcgttccg

SEQ ID NO: 15192 - DNA, 16 bp, Artificial
  oligonucleotide probe
tccgaggcgctcccac

SEQ ID NO: 15193 - DNA, 16 bp, Artificial
  oligonucleotide probe
ggtggacccgctaccc

SEQ ID NO: 15194 - DNA, 16 bp, Artificial
  oligonucleotide probe
cagttccgctcgaggc

SEQ ID NO: 15195 - DNA, 16 bp, Artificial
  oligonucleotide probe
ggacaccccctgcctg

SEQ ID NO: 15196 - DNA, 16 bp, Artificial
  oligonucleotide probe
tccggctctcgcaggc

SEQ ID NO: 15197 - DNA, 16 bp, Artificial
  oligonucleotide probe
gcgtcgctaccccgtc

SEQ ID NO: 15198 - DNA, 16 bp, Artificial
  oligonucleotide probe
ggtgaggccctgcgtc

SEQ ID NO: 15199 - DNA, 16 bp, Artificial
  oligonucleotide probe
ctcgcctgctcgctgc

SEQ ID NO: 15200 - DNA, 16 bp, Artificial
  oligonucleotide probe
aggccctggcgtgcgt

SEQ ID NO: 15201 - DNA, 16 bp, Artificial
  oligonucleotide probe
ctgccgtccgtcaggc

SEQ ID NO: 15202 - DNA, 16 bp, Artificial
  oligonucleotide probe
tcgcgagggcgtctgc

SEQ ID NO: 15203 - DNA, 16 bp, Artificial
  oligonucleotide probe
cctggagggaggtcgc

SEQ ID NO: 15204 - DNA, 16 bp, Artificial
  oligonucleotide probe
ggtgcgctgtcttcgc

SEQ ID NO: 15205 - DNA, 16 bp, Artificial
  oligonucleotide probe
tccgctgcgctcttcc

SEQ ID NO: 15206 - DNA, 16 bp, Artificial
  oligonucleotide probe
gaccaggcggaccgct

SEQ ID NO: 15207 - DNA, 16 bp, Artificial
  oligonucleotide probe
ccacttgggtgatcgc

SEQ ID NO: 15208 - DNA, 16 bp, Artificial
  oligonucleotide probe
cgctggtgcgtcgcgt

SEQ ID NO: 15209 - DNA, 16 bp, Artificial
  oligonucleotide probe
cctgccactcgctcgc

SEQ ID NO: 15210 - DNA, 16 bp, Artificial
  oligonucleotide probe
gcgtttggcctggctc

SEQ ID NO: 15211 - DNA, 16 bp, Artificial
  oligonucleotide probe
agcatccgagcatcgc

SEQ ID NO: 15212 - DNA, 16 bp, Artificial
  oligonucleotide probe
gctcctgcttggaggc

SEQ ID NO: 15213 - DNA, 16 bp, Artificial
  oligonucleotide probe
gctcgctccgctgacc

SEQ ID NO: 15214 - DNA, 16 bp, Artificial
  oligonucleotide probe
gcgtgaggtggttcgc

SEQ ID NO: 15215 - DNA, 16 bp, Artificial
  oligonucleotide probe
gccaaggcggacccac

SEQ ID NO: 15216 - DNA, 16 bp, Artificial
  oligonucleotide probe
ccacctcggaggaccc

SEQ ID NO: 15217 - DNA, 16 bp, Artificial
  oligonucleotide probe
cctggcgtgccagagg

SEQ ID NO: 15218 - DNA, 16 bp, Artificial
  oligonucleotide probe
gaggccactccgtccg

SEQ ID NO: 15219 - DNA, 16 bp, Artificial
  oligonucleotide probe
ccacacccctgcttcc

SEQ ID NO: 15220 - DNA, 16 bp, Artificial
  oligonucleotide probe
gaccctgctcgcaccc

SEQ ID NO: 15221 - DNA, 16 bp, Artificial
  oligonucleotide probe
ggtgctcgcgctccac

SEQ ID NO: 15222 - DNA, 16 bp, Artificial
  oligonucleotide probe
tcgcggactccgcgct

SEQ ID NO: 15223 - DNA, 16 bp, Artificial
  oligonucleotide probe
gctcctcggccaggac

SEQ ID NO: 15224 - DNA, 16 bp, Artificial
  oligonucleotide probe
ctcgggtggctctccg

SEQ ID NO: 15225 - DNA, 16 bp, Artificial
  oligonucleotide probe
gaggtccggagggcgt

SEQ ID NO: 15226 - DNA, 16 bp, Artificial
  oligonucleotide probe
tcgccctgaggcaggc

SEQ ID NO: 15227 - DNA, 16 bp, Artificial
  oligonucleotide probe
tcgcggtgtccggcgt

SEQ ID NO: 15228 - DNA, 16 bp, Artificial
  oligonucleotide probe
cgcttcgcgctcggac

SEQ ID NO: 15229 - DNA, 16 bp, Artificial
  oligonucleotide probe
cgtcggtgcgctctcg

SEQ ID NO: 15230 - DNA, 16 bp, Artificial
  oligonucleotide probe
cgctgaggcgtcttcc

SEQ ID NO: 15231 - DNA, 16 bp, Artificial
  oligonucleotide probe
gccatggtctgcaccc

SEQ ID NO: 15232 - DNA, 16 bp, Artificial
  oligonucleotide probe
ctgcctcgctcgttcc

SEQ ID NO: 15233 - DNA, 32 bp, Artificial
  oligonucleotide probe
caccgacgggaaacgcgacgcaggcggagggt

SEQ ID NO: 15234 - DNA, 32 bp, Artificial
  oligonucleotide probe
gtccggaagtgggcgagacgcaggcggagggt

SEQ ID NO: 15235 - DNA, 32 bp, Artificial
  oligonucleotide probe
acgcaccagtcccggagacggcgagtgggcag

SEQ ID NO: 15236 - DNA, 32 bp, Artificial
  oligonucleotide probe
tcacgccttggccaccgacggcgagtgggcag

SEQ ID NO: 15237 - DNA, 32 bp, Artificial
  oligonucleotide probe
gagcgcgacacccaggggaagcctgcgacgga

SEQ ID NO: 15238 - DNA, 32 bp, Artificial
  oligonucleotide probe
cggacaggacgctggcggaagcctgcgacgga

SEQ ID NO: 15239 - DNA, 32 bp, Artificial
  oligonucleotide probe
caccgacgggaaacgcacgcggtccaccgtgg

SEQ ID NO: 15240 - DNA, 32 bp, Artificial
  oligonucleotide probe
gtccggaagtgggcgaacgcggtccaccgtgg

SEQ ID NO: 15241 - DNA, 32 bp, Artificial
  oligonucleotide probe
gagcgcgacacccagggacggcgagtgggcag

SEQ ID NO: 15242 - DNA, 32 bp, Artificial
  oligonucleotide probe
cggacaggacgctggcgacggcgagtgggcag

SEQ ID NO: 15243 - DNA, 32 bp, Artificial
  oligonucleotide probe
gagcgcgacacccaggaccatggcacgcgacg

SEQ ID NO: 15244 - DNA, 32 bp, Artificial
  oligonucleotide probe
cggacaggacgctggcaccatggcacgcgacg

SEQ ID NO: 15245 - DNA, 32 bp, Artificial
  oligonucleotide probe
caggggaagggtcggagacgcaggcggagggt

SEQ ID NO: 15246 - DNA, 32 bp, Artificial
  oligonucleotide probe
gtccgagcagcggcctgacgcaggcggagggt

SEQ ID NO: 15247 - DNA, 32 bp, Artificial
  oligonucleotide probe
gtccacgctggcgacgacgcggtccaccgtgg

SEQ ID NO: 15248 - DNA, 32 bp, Artificial
  oligonucleotide probe
gagcgcgacacccaggacgcggtccaccgtgg

SEQ ID NO: 15249 - DNA, 32 bp, Artificial
  oligonucleotide probe
cggacaggacgctggcgcctcggagacggcag

SEQ ID NO: 15250 - DNA, 32 bp, Artificial
  oligonucleotide probe
gcaggcagccaatggcgcctcggagacggcag

SEQ ID NO: 15251 - DNA, 32 bp, Artificial
  oligonucleotide probe
gtccacgctggcgacggcctcggagacggcag

SEQ ID NO: 15252 - DNA, 32 bp, Artificial
  oligonucleotide probe
gagcgcgacacccagggcctcggagacggcag

SEQ ID NO: 15253 - DNA, 32 bp, Artificial
  oligonucleotide probe
caccgacgggaaacgcacgcgcctgacgcctc

SEQ ID NO: 15254 - DNA, 32 bp, Artificial
  oligonucleotide probe
gtccggaagtgggcgaacgcgcctgacgcctc

SEQ ID NO: 15255 - DNA, 32 bp, Artificial
  oligonucleotide probe
cggacaggacgctggcgcctagcgcctcgacg

SEQ ID NO: 15256 - DNA, 32 bp, Artificial
  oligonucleotide probe
gcaggcagccaatggcgcctagcgcctcgacg

SEQ ID NO: 15257 - DNA, 32 bp, Artificial
  oligonucleotide probe
cggacaggacgctggcacgcggtccaccgtgg

SEQ ID NO: 15258 - DNA, 32 bp, Artificial
  oligonucleotide probe
gcaggcagccaatggcacgcggtccaccgtgg

SEQ ID NO: 15259 - DNA, 32 bp, Artificial
  oligonucleotide probe
caccgacgggaaacgcgcctcggagacggcag

SEQ ID NO: 15260 - DNA, 32 bp, Artificial
  oligonucleotide probe
gtccggaagtgggcgagcctcggagacggcag

SEQ ID NO: 15261 - DNA, 32 bp, Artificial
  oligonucleotide probe
gtccgagcagcggcctgacggcgagtgggcag

SEQ ID NO: 15262 - DNA, 32 bp, Artificial
  oligonucleotide probe
caccgacgggaaacgcgacggcgagtgggcag

SEQ ID NO: 15263 - DNA, 32 bp, Artificial
  oligonucleotide probe
accatggcacgcgacgacgcgcctgacgcctc

SEQ ID NO: 15264 - DNA, 32 bp, Artificial
  oligonucleotide probe
acgccaggcgaggtggacgcgcctgacgcctc

SEQ ID NO: 15265 - DNA, 32 bp, Artificial
  oligonucleotide probe
gagcgcgacacccaggtggcgtgggggtccaa

SEQ ID NO: 15266 - DNA, 32 bp, Artificial
  oligonucleotide probe
cggacaggacgctggctggcgtgggggtccaa

SEQ ID NO: 15267 - DNA, 32 bp, Artificial
  oligonucleotide probe
caccgacgggaaacgcgcctagcgcctcgacg

SEQ ID NO: 15268 - DNA, 32 bp, Artificial
  oligonucleotide probe
gtccggaagtgggcgagcctagcgcctcgacg

SEQ ID NO: 15269 - DNA, 32 bp, Artificial
  oligonucleotide probe
gtccacgctggcgacgacgcgcctgacgcctc

SEQ ID NO: 15270 - DNA, 32 bp, Artificial
  oligonucleotide probe
gagcgcgacacccaggacgcgcctgacgcctc

SEQ ID NO: 15271 - DNA, 32 bp, Artificial
  oligonucleotide probe
gtccacgctggcgacggacgcaggcggagggt

SEQ ID NO: 15272 - DNA, 32 bp, Artificial
  oligonucleotide probe
gagcgcgacacccagggacgcaggcggagggt

SEQ ID NO: 15273 - DNA, 32 bp, Artificial
  oligonucleotide probe
gtccggaagtgggcgagacggcgagtgggcag

SEQ ID NO: 15274 - DNA, 32 bp, Artificial
  oligonucleotide probe
gtccacgctggcgacggacggcgagtgggcag

SEQ ID NO: 15275 - DNA, 32 bp, Artificial
  oligonucleotide probe
cggacaggacgctggcgacgcaggcggagggt

SEQ ID NO: 15276 - DNA, 32 bp, Artificial
  oligonucleotide probe
gcaggcagccaatggcgacgcaggcggagggt

SEQ ID NO: 15277 - DNA, 32 bp, Artificial
  oligonucleotide probe
caggggaagggtcggaacgcgcctgacgcctc

SEQ ID NO: 15278 - DNA, 32 bp, Artificial
  oligonucleotide probe
gtccgagcagcggcctacgcgcctgacgcctc

SEQ ID NO: 15279 - DNA, 32 bp, Artificial
  oligonucleotide probe
gagcgcgacacccagggcagcggagcctgagc

SEQ ID NO: 15280 - DNA, 32 bp, Artificial
  oligonucleotide probe
cggacaggacgctggcgcagcggagcctgagc

SEQ ID NO: 15281 - DNA, 32 bp, Artificial
  oligonucleotide probe
caccgcgaggtcacgcgacggcgagtgggcag

SEQ ID NO: 15282 - DNA, 32 bp, Artificial
  oligonucleotide probe
accatggcacgcgacggacggcgagtgggcag

SEQ ID NO: 15283 - DNA, 32 bp, Artificial
  oligonucleotide probe
gcctcggagacggcaggacggcgagtgggcag

SEQ ID NO: 15284 - DNA, 32 bp, Artificial
  oligonucleotide probe
gcagcggagcctgagcgacggcgagtgggcag

SEQ ID NO: 15285 - DNA, 32 bp, Artificial
  oligonucleotide probe
gtccacgctggcgacggcctagcgcctcgacg

SEQ ID NO: 15286 - DNA, 32 bp, Artificial
  oligonucleotide probe
gagcgcgacacccagggcctagcgcctcgacg

SEQ ID NO: 15287 - DNA, 32 bp, Artificial
  oligonucleotide probe
acgccaggcgaggtgggacggcgagtgggcag

SEQ ID NO: 15288 - DNA, 32 bp, Artificial
  oligonucleotide probe
caggggaagggtcggagacggcgagtgggcag

SEQ ID NO: 15289 - DNA, 32 bp, Artificial
  oligonucleotide probe
cggacaggacgctggcacgcgcctgacgcctc

SEQ ID NO: 15290 - DNA, 32 bp, Artificial
  oligonucleotide probe
gcaggcagccaatggcacgcgcctgacgcctc

SEQ ID NO: 15291 - DNA, 32 bp, Artificial
  oligonucleotide probe
accatggcacgcgacggacgcaggcggagggt

SEQ ID NO: 15292 - DNA, 32 bp, Artificial
  oligonucleotide probe
acgccaggcgaggtgggacgcaggcggagggt

SEQ ID NO: 15293 - DNA, 32 bp, Artificial
  oligonucleotide probe
gcaggcagccaatggcgcagcggagcctgagc

SEQ ID NO: 15294 - DNA, 32 bp, Artificial
  oligonucleotide probe
gcaggcagccaatggcacgccaggcgaggtgg

SEQ ID NO: 15295 - DNA, 32 bp, Artificial
  oligonucleotide probe
gcaggcagccaatggcggaagcctgcgacgga

SEQ ID NO: 15296 - DNA, 32 bp, Artificial
  oligonucleotide probe
gcaggcagccaatggcaccatggcacgcgacg

SEQ ID NO: 15297 - DNA, 32 bp, Artificial
  oligonucleotide probe
gcaggcagccaatggccaccgggtggtcagcg

SEQ ID NO: 15298 - DNA, 32 bp, Artificial
  oligonucleotide probe
gcaggcagccaatggcacgcaccagtcccgga

SEQ ID NO: 15299 - DNA, 32 bp, Artificial
  oligonucleotide probe
gcaggcagccaatggctgctgggtgcaggcga

SEQ ID NO: 15300 - DNA, 32 bp, Artificial
  oligonucleotide probe
gcaggcagccaatggcgacggcgagtgggcag

SEQ ID NO: 15301 - DNA, 32 bp, Artificial
  oligonucleotide probe
gcaggcagccaatggccaccgacgggaaacgc

SEQ ID NO: 15302 - DNA, 32 bp, Artificial
  oligonucleotide probe
gcaggcagccaatggctggcgtgggggtccaa

SEQ ID NO: 15303 - DNA, 32 bp, Artificial
  oligonucleotide probe
gcagcggagcctgagcgagcgggtgtggagcg

SEQ ID NO: 15304 - DNA, 32 bp, Artificial
  oligonucleotide probe
acgcaccagtcccggagagcgggtgtggagcg

SEQ ID NO: 15305 - DNA, 32 bp, Artificial
  oligonucleotide probe
acgcaccagtcccggaagcgcaggagacgcct

SEQ ID NO: 15306 - DNA, 32 bp, Artificial
  oligonucleotide probe
tcacgccttggccaccagcgcaggagacgcct

SEQ ID NO: 15307 - DNA, 32 bp, Artificial
  oligonucleotide probe
caccgacgggaaacgccggatgctgcgagcag

SEQ ID NO: 15308 - DNA, 32 bp, Artificial
  oligonucleotide probe
gtggcggaggtcggaacggatgctgcgagcag

SEQ ID NO: 15309 - DNA, 32 bp, Artificial
  oligonucleotide probe
caccgacgggaaacgcgagcgggtgtggagcg

SEQ ID NO: 15310 - DNA, 32 bp, Artificial
  oligonucleotide probe
gtccggaagtgggcgagagcgggtgtggagcg

SEQ ID NO: 15311 - DNA, 32 bp, Artificial
  oligonucleotide probe
caccgacgggaaacgcgtccgcaggtccgcct

SEQ ID NO: 15312 - DNA, 32 bp, Artificial
  oligonucleotide probe
gtccggaagtgggcgagtccgcaggtccgcct

SEQ ID NO: 15313 - DNA, 32 bp, Artificial
  oligonucleotide probe
gacgcaggcggagggtgtgggcctcctcccaa

SEQ ID NO: 15314 - DNA, 32 bp, Artificial
  oligonucleotide probe
ggaagcctgcgacggagtgggcctcctcccaa

SEQ ID NO: 15315 - DNA, 32 bp, Artificial
  oligonucleotide probe
gacggcgagtgggcaggagcgggtgtggagcg

SEQ ID NO: 15316 - DNA, 32 bp, Artificial
  oligonucleotide probe
acgcgcctgacgcctcgagcgggtgtggagcg

SEQ ID NO: 15317 - DNA, 32 bp, Artificial
  oligonucleotide probe
acgcaccagtcccggacggagacgcagggggt

SEQ ID NO: 15318 - DNA, 32 bp, Artificial
  oligonucleotide probe
acgccaggcgaggtggcggagacgcagggggt

SEQ ID NO: 15319 - DNA, 32 bp, Artificial
  oligonucleotide probe
gagcgcgacacccaggagcgcaggagacgcct

SEQ ID NO: 15320 - DNA, 32 bp, Artificial
  oligonucleotide probe
cggacaggacgctggcagcgcaggagacgcct

SEQ ID NO: 15321 - DNA, 32 bp, Artificial
  oligonucleotide probe
tggcgtgggggtccaatcaccggagccttggc

SEQ ID NO: 15322 - DNA, 32 bp, Artificial
  oligonucleotide probe
gcctcggagacggcagtcaccggagccttggc

SEQ ID NO: 15323 - DNA, 32 bp, Artificial
  oligonucleotide probe
gtccggaagtgggcgaagcgcaggagacgcct

SEQ ID NO: 15324 - DNA, 32 bp, Artificial
  oligonucleotide probe
gtccacgctggcgacgagcgcaggagacgcct

SEQ ID NO: 15325 - DNA, 32 bp, Artificial
  oligonucleotide probe
gacggcgagtgggcaggacgagcgcaccgcag

SEQ ID NO: 15326 - DNA, 32 bp, Artificial
  oligonucleotide probe
gcctagcgcctcgacggacgagcgcaccgcag

SEQ ID NO: 15327 - DNA, 32 bp, Artificial
  oligonucleotide probe
ggtcgacgacgccgaggtgggcctcctcccaa

SEQ ID NO: 15328 - DNA, 32 bp, Artificial
  oligonucleotide probe
agcggtccgcgagagcgtgggcctcctcccaa

SEQ ID NO: 15329 - DNA, 32 bp, Artificial
  oligonucleotide probe
gacgcaggcggagggtagcgcaggagacgcct

SEQ ID NO: 15330 - DNA, 32 bp, Artificial
  oligonucleotide probe
acgcggtccaccgtggagcgcaggagacgcct

SEQ ID NO: 15331 - DNA, 32 bp, Artificial
  oligonucleotide probe
gcctagcgcctcgacggtccgcaggtccgcct

SEQ ID NO: 15332 - DNA, 32 bp, Artificial
  oligonucleotide probe
accatggcacgcgacggtccgcaggtccgcct

SEQ ID NO: 15333 - DNA, 32 bp, Artificial
  oligonucleotide probe
caccgggtggtcagcggagcgggtgtggagcg

SEQ ID NO: 15334 - DNA, 32 bp, Artificial
  oligonucleotide probe
ggtcgacgacgccgaggagcgggtgtggagcg

SEQ ID NO: 15335 - DNA, 32 bp, Artificial
  oligonucleotide probe
acgccaggcgaggtgggagcgggtgtggagcg

SEQ ID NO: 15336 - DNA, 32 bp, Artificial
  oligonucleotide probe
caggggaagggtcggagagcgggtgtggagcg

SEQ ID NO: 15337 - DNA, 32 bp, Artificial
  oligonucleotide probe
ggtcgacgacgccgagcggagacgcagggggt

SEQ ID NO: 15338 - DNA, 32 bp, Artificial
  oligonucleotide probe
agcggtccgcgagagccggagacgcagggggt

SEQ ID NO: 15339 - DNA, 32 bp, Artificial
  oligonucleotide probe
gtccggaagtgggcgatcaccggagccttggc

SEQ ID NO: 15340 - DNA, 32 bp, Artificial
  oligonucleotide probe
gcaggcagccaatggctcaccggagccttggc

SEQ ID NO: 15341 - DNA, 32 bp, Artificial
  oligonucleotide probe
gcctagcgcctcgacgtcaccggagccttggc

SEQ ID NO: 15342 - DNA, 32 bp, Artificial
  oligonucleotide probe
ggaagcctgcgacggatcaccggagccttggc

SEQ ID NO: 15343 - DNA, 32 bp, Artificial
  oligonucleotide probe
acgcggaagacgtggccggagacgcagggggt

SEQ ID NO: 15344 - DNA, 32 bp, Artificial
  oligonucleotide probe
caccgcgaggtcacgccggagacgcagggggt

SEQ ID NO: 15345 - DNA, 32 bp, Artificial
  oligonucleotide probe
gcagcggagcctgagcgtccgcaggtccgcct

SEQ ID NO: 15346 - DNA, 32 bp, Artificial
  oligonucleotide probe
acgcaccagtcccggagtccgcaggtccgcct

SEQ ID NO: 15347 - DNA, 32 bp, Artificial
  oligonucleotide probe
acgcggtccaccgtggcggatgctgcgagcag

SEQ ID NO: 15348 - DNA, 32 bp, Artificial
  oligonucleotide probe
tggcgtgggggtccaacggatgctgcgagcag

SEQ ID NO: 15349 - DNA, 32 bp, Artificial
  oligonucleotide probe
gacggcgagtgggcagcggatgctgcgagcag

SEQ ID NO: 15350 - DNA, 32 bp, Artificial
  oligonucleotide probe
acgcgcctgacgcctccggatgctgcgagcag

SEQ ID NO: 15351 - DNA, 32 bp, Artificial
  oligonucleotide probe
acgcggtccaccgtggcggagacgcagggggt

SEQ ID NO: 15352 - DNA, 32 bp, Artificial
  oligonucleotide probe
gcctcggagacggcagcggagacgcagggggt

SEQ ID NO: 15353 - DNA, 32 bp, Artificial
  oligonucleotide probe
gacggcgagtgggcagcggagacgcagggggt

SEQ ID NO: 15354 - DNA, 32 bp, Artificial
  oligonucleotide probe
acgcgcctgacgcctccggagacgcagggggt

SEQ ID NO: 15355 - DNA, 32 bp, Artificial
  oligonucleotide probe
acgccaggcgaggtggagcgcaggagacgcct

SEQ ID NO: 15356 - DNA, 32 bp, Artificial
  oligonucleotide probe
caggggaagggtcggaagcgcaggagacgcct

SEQ ID NO: 15357 - DNA, 32 bp, Artificial
  oligonucleotide probe
tcacgccttggccaccgagcgggtgtggagcg

SEQ ID NO: 15358 - DNA, 32 bp, Artificial
  oligonucleotide probe
accatggcacgcgacggagcgggtgtggagcg

SEQ ID NO: 15359 - DNA, 32 bp, Artificial
  oligonucleotide probe
tggcgtgggggtccaagtgggcctcctcccaa

SEQ ID NO: 15360 - DNA, 32 bp, Artificial
  oligonucleotide probe
gcagcggagcctgagcgtgggcctcctcccaa

SEQ ID NO: 15361 - DNA, 32 bp, Artificial
  oligonucleotide probe
caccgggtggtcagcgcggagacgcagggggt

SEQ ID NO: 15362 - DNA, 32 bp, Artificial
  oligonucleotide probe
tgctgggtgcaggcgacggagacgcagggggt

SEQ ID NO: 15363 - DNA, 32 bp, Artificial
  oligonucleotide probe
gtggcggaggtcggaatcaccggagccttggc

SEQ ID NO: 15364 - DNA, 32 bp, Artificial
  oligonucleotide probe
acgcggaagacgtggctcaccggagccttggc

SEQ ID NO: 15365 - DNA, 32 bp, Artificial
  oligonucleotide probe
gcaggcagccaatggcgacgagcgcaccgcag

SEQ ID NO: 15366 - DNA, 32 bp, Artificial
  oligonucleotide probe
gtggcggaggtcggaagacgagcgcaccgcag

SEQ ID NO: 15367 - DNA, 32 bp, Artificial
  oligonucleotide probe
gagcgcgacacccagggtccgcaggtccgcct

SEQ ID NO: 15368 - DNA, 32 bp, Artificial
  oligonucleotide probe
cggacaggacgctggcgtccgcaggtccgcct

SEQ ID NO: 15369 - DNA, 32 bp, Artificial
  oligonucleotide probe
gcctagcgcctcgacgcggagacgcagggggt

SEQ ID NO: 15370 - DNA, 32 bp, Artificial
  oligonucleotide probe
gacgcaggcggagggtcggagacgcagggggt

SEQ ID NO: 15371 - DNA, 32 bp, Artificial
  oligonucleotide probe
accatggcacgcgacgcggatgctgcgagcag

SEQ ID NO: 15372 - DNA, 32 bp, Artificial
  oligonucleotide probe
acgccaggcgaggtggcggatgctgcgagcag

SEQ ID NO: 15373 - DNA, 32 bp, Artificial
  oligonucleotide probe
gacggcgagtgggcagtcaccggagccttggc

SEQ ID NO: 15374 - DNA, 32 bp, Artificial
  oligonucleotide probe
acgcgcctgacgcctctcaccggagccttggc

SEQ ID NO: 15375 - DNA, 32 bp, Artificial
  oligonucleotide probe
tggcgtgggggtccaagagcgggtgtggagcg

SEQ ID NO: 15376 - DNA, 32 bp, Artificial
  oligonucleotide probe
tgctgggtgcaggcgagagcgggtgtggagcg

SEQ ID NO: 15377 - DNA, 32 bp, Artificial
  oligonucleotide probe
gagcgcgacacccagggacgagcgcaccgcag

SEQ ID NO: 15378 - DNA, 32 bp, Artificial
  oligonucleotide probe
cggacaggacgctggcgacgagcgcaccgcag

SEQ ID NO: 15379 - DNA, 32 bp, Artificial
  oligonucleotide probe
gcagcggagcctgagctcaccggagccttggc

SEQ ID NO: 15380 - DNA, 32 bp, Artificial
  oligonucleotide probe
accatggcacgcgacgtcaccggagccttggc

SEQ ID NO: 15381 - DNA, 32 bp, Artificial
  oligonucleotide probe
acgcggaagacgtggccggatgctgcgagcag

SEQ ID NO: 15382 - DNA, 32 bp, Artificial
  oligonucleotide probe
caccgcgaggtcacgccggatgctgcgagcag

SEQ ID NO: 15383 - DNA, 32 bp, Artificial
  oligonucleotide probe
gtccgagcagcggcctgtccgcaggtccgcct

SEQ ID NO: 15384 - DNA, 32 bp, Artificial
  oligonucleotide probe
ggaagcctgcgacggagtccgcaggtccgcct

SEQ ID NO: 15385 - DNA, 32 bp, Artificial
  oligonucleotide probe
gtccgagcagcggcctcggatgctgcgagcag

SEQ ID NO: 15386 - DNA, 32 bp, Artificial
  oligonucleotide probe
gtccacgctggcgacgcggatgctgcgagcag

SEQ ID NO: 15387 - DNA, 32 bp, Artificial
  oligonucleotide probe
tcacgccttggccacctcaccggagccttggc

SEQ ID NO: 15388 - DNA, 32 bp, Artificial
  oligonucleotide probe
caggggaagggtcggatcaccggagccttggc

SEQ ID NO: 15389 - DNA, 32 bp, Artificial
  oligonucleotide probe
tcacgccttggccacccggagacgcagggggt

SEQ ID NO: 15390 - DNA, 32 bp, Artificial
  oligonucleotide probe
caggggaagggtcggacggagacgcagggggt

SEQ ID NO: 15391 - DNA, 32 bp, Artificial
  oligonucleotide probe
gacgcaggcggagggtgagcgggtgtggagcg

SEQ ID NO: 15392 - DNA, 32 bp, Artificial
  oligonucleotide probe
acgcggtccaccgtgggagcgggtgtggagcg

SEQ ID NO: 15393 - DNA, 32 bp, Artificial
  oligonucleotide probe
tcacgccttggccaccgtccgcaggtccgcct

SEQ ID NO: 15394 - DNA, 32 bp, Artificial
  oligonucleotide probe
caccgcgaggtcacgcgtccgcaggtccgcct

SEQ ID NO: 15395 - DNA, 32 bp, Artificial
  oligonucleotide probe
gtccacgctggcgacggtgggcctcctcccaa

SEQ ID NO: 15396 - DNA, 32 bp, Artificial
  oligonucleotide probe
caccgggtggtcagcggtgggcctcctcccaa

SEQ ID NO: 15397 - DNA, 32 bp, Artificial
  oligonucleotide probe
caccgacgggaaacgcgtgggcctcctcccaa

SEQ ID NO: 15398 - DNA, 32 bp, Artificial
  oligonucleotide probe
gtccggaagtgggcgagtgggcctcctcccaa

SEQ ID NO: 15399 - DNA, 32 bp, Artificial
  oligonucleotide probe
tgctgggtgcaggcgagtgggcctcctcccaa

SEQ ID NO: 15400 - DNA, 32 bp, Artificial
  oligonucleotide probe
acgcaccagtcccggagtgggcctcctcccaa

SEQ ID NO: 15401 - DNA, 32 bp, Artificial
  oligonucleotide probe
gcaggcagccaatggccggagacgcagggggt

SEQ ID NO: 15402 - DNA, 32 bp, Artificial
  oligonucleotide probe
gtggcggaggtcggaacggagacgcagggggt

SEQ ID NO: 15403 - DNA, 32 bp, Artificial
  oligonucleotide probe
acgccaggcgaggtgggtccgcaggtccgcct

SEQ ID NO: 15404 - DNA, 32 bp, Artificial
  oligonucleotide probe
caggggaagggtcggagtccgcaggtccgcct

SEQ ID NO: 15405 - DNA, 32 bp, Artificial
  oligonucleotide probe
gtccgagcagcggcctgacgagcgcaccgcag

SEQ ID NO: 15406 - DNA, 32 bp, Artificial
  oligonucleotide probe
ggaagcctgcgacggagacgagcgcaccgcag

SEQ ID NO: 15407 - DNA, 32 bp, Artificial
  oligonucleotide probe
gtggcggaggtcggaagtgggcctcctcccaa

SEQ ID NO: 15408 - DNA, 32 bp, Artificial
  oligonucleotide probe
acgcggaagacgtggcgtgggcctcctcccaa

SEQ ID NO: 15409 - DNA, 32 bp, Artificial
  oligonucleotide probe
gacgcaggcggagggttcaccggagccttggc

SEQ ID NO: 15410 - DNA, 32 bp, Artificial
  oligonucleotide probe
acgcggtccaccgtggtcaccggagccttggc

SEQ ID NO: 15411 - DNA, 32 bp, Artificial
  oligonucleotide probe
caccgggtggtcagcggacgagcgcaccgcag

SEQ ID NO: 15412 - DNA, 32 bp, Artificial
  oligonucleotide probe
tgctgggtgcaggcgagacgagcgcaccgcag

SEQ ID NO: 15413 - DNA, 32 bp, Artificial
  oligonucleotide probe
caccgcgaggtcacgcagcgcaggagacgcct

SEQ ID NO: 15414 - DNA, 32 bp, Artificial
  oligonucleotide probe
accatggcacgcgacgagcgcaggagacgcct

SEQ ID NO: 15415 - DNA, 32 bp, Artificial
  oligonucleotide probe
tgctgggtgcaggcgacggatgctgcgagcag

SEQ ID NO: 15416 - DNA, 32 bp, Artificial
  oligonucleotide probe
gcctcggagacggcagcggatgctgcgagcag

SEQ ID NO: 15417 - DNA, 32 bp, Artificial
  oligonucleotide probe
tggcgtgggggtccaagacgagcgcaccgcag

SEQ ID NO: 15418 - DNA, 32 bp, Artificial
  oligonucleotide probe
caccgacgggaaacgcgacgagcgcaccgcag

SEQ ID NO: 15419 - DNA, 32 bp, Artificial
  oligonucleotide probe
acgcgcctgacgcctcgtccgcaggtccgcct

SEQ ID NO: 15420 - DNA, 32 bp, Artificial
  oligonucleotide probe
gcctcggagacggcaggtccgcaggtccgcct

SEQ ID NO: 15421 - DNA, 32 bp, Artificial
  oligonucleotide probe
caccgggtggtcagcgcggatgctgcgagcag

SEQ ID NO: 15422 - DNA, 32 bp, Artificial
  oligonucleotide probe
gacgcaggcggagggtcggatgctgcgagcag

SEQ ID NO: 15423 - DNA, 32 bp, Artificial
  oligonucleotide probe
agcggtccgcgagagcgagcgggtgtggagcg

SEQ ID NO: 15424 - DNA, 32 bp, Artificial
  oligonucleotide probe
gcctcggagacggcaggagcgggtgtggagcg

SEQ ID NO: 15425 - DNA, 32 bp, Artificial
  oligonucleotide probe
gacggcgagtgggcaggtgggcctcctcccaa

SEQ ID NO: 15426 - DNA, 32 bp, Artificial
  oligonucleotide probe
acgcgcctgacgcctcgtgggcctcctcccaa

SEQ ID NO: 15427 - DNA, 32 bp, Artificial
  oligonucleotide probe
acgcggtccaccgtgggacgagcgcaccgcag

SEQ ID NO: 15428 - DNA, 32 bp, Artificial
  oligonucleotide probe
accatggcacgcgacggacgagcgcaccgcag

SEQ ID NO: 15429 - DNA, 32 bp, Artificial
  oligonucleotide probe
gcagcggagcctgagccggatgctgcgagcag

SEQ ID NO: 15430 - DNA, 32 bp, Artificial
  oligonucleotide probe
acgcaccagtcccggacggatgctgcgagcag

SEQ ID NO: 15431 - DNA, 32 bp, Artificial
  oligonucleotide probe
acgccaggcgaggtgggacgagcgcaccgcag

SEQ ID NO: 15432 - DNA, 32 bp, Artificial
  oligonucleotide probe
caggggaagggtcggagacgagcgcaccgcag

SEQ ID NO: 15433 - DNA, 32 bp, Artificial
  oligonucleotide probe
ggtcgacgacgccgaggacgagcgcaccgcag

SEQ ID NO: 15434 - DNA, 32 bp, Artificial
  oligonucleotide probe
agcggtccgcgagagcgacgagcgcaccgcag

SEQ ID NO: 15435 - DNA, 32 bp, Artificial
  oligonucleotide probe
caccgcgaggtcacgctcaccggagccttggc

SEQ ID NO: 15436 - DNA, 32 bp, Artificial
  oligonucleotide probe
gtccgagcagcggccttcaccggagccttggc

SEQ ID NO: 15437 - DNA, 32 bp, Artificial
  oligonucleotide probe
gagcgcgacacccaggcggagacgcagggggt

SEQ ID NO: 15438 - DNA, 32 bp, Artificial
  oligonucleotide probe
cggacaggacgctggccggagacgcagggggt

SEQ ID NO: 15439 - DNA, 32 bp, Artificial
  oligonucleotide probe
tcacgccttggccaccgtgggcctcctcccaa

SEQ ID NO: 15440 - DNA, 32 bp, Artificial
  oligonucleotide probe
gcaggcagccaatggcgtgggcctcctcccaa

SEQ ID NO: 15441 - DNA, 32 bp, Artificial
  oligonucleotide probe
ggtcgacgacgccgagtcaccggagccttggc

SEQ ID NO: 15442 - DNA, 32 bp, Artificial
  oligonucleotide probe
agcggtccgcgagagctcaccggagccttggc

SEQ ID NO: 15443 - DNA, 32 bp, Artificial
  oligonucleotide probe
gcctcggagacggcagagcgcaggagacgcct

SEQ ID NO: 15444 - DNA, 32 bp, Artificial
  oligonucleotide probe
gcagcggagcctgagcagcgcaggagacgcct

SEQ ID NO: 15445 - DNA, 32 bp, Artificial
  oligonucleotide probe
gagcgcgacacccagggtgggcctcctcccaa

SEQ ID NO: 15446 - DNA, 32 bp, Artificial
  oligonucleotide probe
cggacaggacgctggcgtgggcctcctcccaa

SEQ ID NO: 15447 - DNA, 32 bp, Artificial
  oligonucleotide probe
gtccggaagtgggcgagacgagcgcaccgcag

SEQ ID NO: 15448 - DNA, 32 bp, Artificial
  oligonucleotide probe
gtccacgctggcgacggacgagcgcaccgcag

SEQ ID NO: 15449 - DNA, 32 bp, Artificial
  oligonucleotide probe
gcctagcgcctcgacgcggatgctgcgagcag

SEQ ID NO: 15450 - DNA, 32 bp, Artificial
  oligonucleotide probe
ggaagcctgcgacggacggatgctgcgagcag

SEQ ID NO: 15451 - DNA, 32 bp, Artificial
  oligonucleotide probe
agcggtccgcgagagcagcgcaggagacgcct

SEQ ID NO: 15452 - DNA, 32 bp, Artificial
  oligonucleotide probe
acgcggaagacgtggcagcgcaggagacgcct

SEQ ID NO: 15453 - DNA, 32 bp, Artificial
  oligonucleotide probe
gtccgagcagcggcctagcgcaggagacgcct

SEQ ID NO: 15454 - DNA, 32 bp, Artificial
  oligonucleotide probe
caccgacgggaaacgcagcgcaggagacgcct

SEQ ID NO: 15455 - DNA, 32 bp, Artificial
  oligonucleotide probe
gcctagcgcctcgacggagcgggtgtggagcg

SEQ ID NO: 15456 - DNA, 32 bp, Artificial
  oligonucleotide probe
ggaagcctgcgacggagagcgggtgtggagcg

SEQ ID NO: 15457 - DNA, 32 bp, Artificial
  oligonucleotide probe
gtccacgctggcgacggtccgcaggtccgcct

SEQ ID NO: 15458 - DNA, 32 bp, Artificial
  oligonucleotide probe
caccgggtggtcagcggtccgcaggtccgcct

SEQ ID NO: 15459 - DNA, 32 bp, Artificial
  oligonucleotide probe
ggtcgacgacgccgaggtccgcaggtccgcct

SEQ ID NO: 15460 - DNA, 32 bp, Artificial
  oligonucleotide probe
gcaggcagccaatggcgtccgcaggtccgcct

SEQ ID NO: 15461 - DNA, 32 bp, Artificial
  oligonucleotide probe
tggcgtgggggtccaaagcgcaggagacgcct

SEQ ID NO: 15462 - DNA, 32 bp, Artificial
  oligonucleotide probe
tgctgggtgcaggcgaagcgcaggagacgcct

SEQ ID NO: 15463 - DNA, 32 bp, Artificial
  oligonucleotide probe
gcaggcagccaatggcagcgcaggagacgcct

SEQ ID NO: 15464 - DNA, 32 bp, Artificial
  oligonucleotide probe
acgcggaagacgtggcgacgagcgcaccgcag

SEQ ID NO: 15465 - DNA, 32 bp, Artificial
  oligonucleotide probe
caccgcgaggtcacgcgtgggcctcctcccaa

SEQ ID NO: 15466 - DNA, 32 bp, Artificial
  oligonucleotide probe
gagcgcgacacccagggagcgggtgtggagcg

SEQ ID NO: 15467 - DNA, 32 bp, Artificial
  oligonucleotide probe
gtccgagcagcggcctcggagacgcagggggt

SEQ ID NO: 15468 - DNA, 32 bp, Artificial
  oligonucleotide probe
cggacaggacgctggccggatgctgcgagcag

SEQ ID NO: 15469 - DNA, 32 bp, Artificial
  oligonucleotide probe
gtggcggaggtcggaagtccgcaggtccgcct

SEQ ID NO: 15470 - DNA, 32 bp, Artificial
  oligonucleotide probe
gtccacgctggcgacgtcaccggagccttggc

SEQ ID NO: 15471 - DNA, 32 bp, Artificial
  oligonucleotide probe
ggtccggagcagacgcgcagcggagcctgagc

SEQ ID NO: 15472 - DNA, 32 bp, Artificial
  oligonucleotide probe
gcctgcgagagctggcgcagcggagcctgagc

SEQ ID NO: 15473 - DNA, 32 bp, Artificial
  oligonucleotide probe
gcagcctctggccgaggacggcgagtgggcag

SEQ ID NO: 15474 - DNA, 32 bp, Artificial
  oligonucleotide probe
gcagcaccagcgtggcgacggcgagtgggcag

SEQ ID NO: 15475 - DNA, 32 bp, Artificial
  oligonucleotide probe
gacggggtcggacgaggacgcaggcggagggt

SEQ ID NO: 15476 - DNA, 32 bp, Artificial
  oligonucleotide probe
gtggcaggagcgacgcgacgcaggcggagggt

SEQ ID NO: 15477 - DNA, 32 bp, Artificial
  oligonucleotide probe
ggaaagcggcctggaagtccacgctggcgacg

SEQ ID NO: 15478 - DNA, 32 bp, Artificial
  oligonucleotide probe
gagcggtctggcggaagtccacgctggcgacg

SEQ ID NO: 15479 - DNA, 32 bp, Artificial
  oligonucleotide probe
gagcgcctcctcgagcgagcgcgacacccagg

SEQ ID NO: 15480 - DNA, 32 bp, Artificial
  oligonucleotide probe
gcgagtggcagggcctgagcgcgacacccagg

SEQ ID NO: 15481 - DNA, 32 bp, Artificial
  oligonucleotide probe
gcctgtgggtccgcgagacgcaggcggagggt

SEQ ID NO: 15482 - DNA, 32 bp, Artificial
  oligonucleotide probe
cctcgcctcgaggagcgacgcaggcggagggt

SEQ ID NO: 15483 - DNA, 32 bp, Artificial
  oligonucleotide probe
gagcgcctcctcgagcaccatggcacgcgacg

SEQ ID NO: 15484 - DNA, 32 bp, Artificial
  oligonucleotide probe
gcgagtggcagggcctaccatggcacgcgacg

SEQ ID NO: 15485 - DNA, 32 bp, Artificial
  oligonucleotide probe
gcagcctctggccgaggcctcggagacggcag

SEQ ID NO: 15486 - DNA, 32 bp, Artificial
  oligonucleotide probe
gcagcaccagcgtggcgcctcggagacggcag

SEQ ID NO: 15487 - DNA, 32 bp, Artificial
  oligonucleotide probe
gcagcctctggccgaggagcgcgacacccagg

SEQ ID NO: 15488 - DNA, 32 bp, Artificial
  oligonucleotide probe
gcagcaccagcgtggcgagcgcgacacccagg

SEQ ID NO: 15489 - DNA, 32 bp, Artificial
  oligonucleotide probe
gagcgcctcctcgagcgacgcaggcggagggt

SEQ ID NO: 15490 - DNA, 32 bp, Artificial
  oligonucleotide probe
gcgagtggcagggcctgacgcaggcggagggt

SEQ ID NO: 15491 - DNA, 32 bp, Artificial
  oligonucleotide probe
ggaaagcggcctggaagagcgcgacacccagg

SEQ ID NO: 15492 - DNA, 32 bp, Artificial
  oligonucleotide probe
gagcggtctggcggaagagcgcgacacccagg

SEQ ID NO: 15493 - DNA, 32 bp, Artificial
  oligonucleotide probe
caccgagccacccggagcagcggagcctgagc

SEQ ID NO: 15494 - DNA, 32 bp, Artificial
  oligonucleotide probe
tggcacgcgagccagggcagcggagcctgagc

SEQ ID NO: 15495 - DNA, 32 bp, Artificial
  oligonucleotide probe
acgcgagcgggtgcagggaagcctgcgacgga

SEQ ID NO: 15496 - DNA, 32 bp, Artificial
  oligonucleotide probe
gcgatggccaggtggcggaagcctgcgacgga

SEQ ID NO: 15497 - DNA, 32 bp, Artificial
  oligonucleotide probe
gagcgcctcctcgagccggacaggacgctggc

SEQ ID NO: 15498 - DNA, 32 bp, Artificial
  oligonucleotide probe
gcgagtggcagggcctcggacaggacgctggc

SEQ ID NO: 15499 - DNA, 32 bp, Artificial
  oligonucleotide probe
acgcgagcgggtgcaggcctagcgcctcgacg

SEQ ID NO: 15500 - DNA, 32 bp, Artificial
  oligonucleotide probe
gcgatggccaggtggcgcctagcgcctcgacg

SEQ ID NO: 15501 - DNA, 32 bp, Artificial
  oligonucleotide probe
gagcgcctcctcgagcagcggtccgcgagagc

SEQ ID NO: 15502 - DNA, 32 bp, Artificial
  oligonucleotide probe
gcgagtggcagggcctagcggtccgcgagagc

SEQ ID NO: 15503 - DNA, 32 bp, Artificial
  oligonucleotide probe
tggcagcgggtcgtggtgctgggtgcaggcga

SEQ ID NO: 15504 - DNA, 32 bp, Artificial
  oligonucleotide probe
gcctgggtcaccacgctgctgggtgcaggcga

SEQ ID NO: 15505 - DNA, 32 bp, Artificial
  oligonucleotide probe
accacggaagcgcggaaccatggcacgcgacg

SEQ ID NO: 15506 - DNA, 32 bp, Artificial
  oligonucleotide probe
gtgggacgacgcgcgaaccatggcacgcgacg

SEQ ID NO: 15507 - DNA, 32 bp, Artificial
  oligonucleotide probe
accacggaagcgcggagcctcggagacggcag

SEQ ID NO: 15508 - DNA, 32 bp, Artificial
  oligonucleotide probe
gtgggacgacgcgcgagcctcggagacggcag

SEQ ID NO: 15509 - DNA, 32 bp, Artificial
  oligonucleotide probe
ggaaagcggcctggaacaccgacgggaaacgc

SEQ ID NO: 15510 - DNA, 32 bp, Artificial
  oligonucleotide probe
gagcggtctggcggaacaccgacgggaaacgc

SEQ ID NO: 15511 - DNA, 32 bp, Artificial
  oligonucleotide probe
gagcgcctcctcgagcggaagcctgcgacgga

SEQ ID NO: 15512 - DNA, 32 bp, Artificial
  oligonucleotide probe
gcgagtggcagggcctggaagcctgcgacgga

SEQ ID NO: 15513 - DNA, 32 bp, Artificial
  oligonucleotide probe
caccgagccacccggaacgcggaagacgtggc

SEQ ID NO: 15514 - DNA, 32 bp, Artificial
  oligonucleotide probe
tggcacgcgagccaggacgcggaagacgtggc

SEQ ID NO: 15515 - DNA, 32 bp, Artificial
  oligonucleotide probe
caccgagccacccggagcaggcagccaatggc

SEQ ID NO: 15516 - DNA, 32 bp, Artificial
  oligonucleotide probe
tggcacgcgagccagggcaggcagccaatggc

SEQ ID NO: 15517 - DNA, 32 bp, Artificial
  oligonucleotide probe
caccgagccacccggagtccggaagtgggcga

SEQ ID NO: 15518 - DNA, 32 bp, Artificial
  oligonucleotide probe
tggcacgcgagccagggtccggaagtgggcga

SEQ ID NO: 15519 - DNA, 32 bp, Artificial
  oligonucleotide probe
gcagcctctggccgagcaccgacgggaaacgc

SEQ ID NO: 15520 - DNA, 32 bp, Artificial
  oligonucleotide probe
gcagcaccagcgtggccaccgacgggaaacgc

SEQ ID NO: 15521 - DNA, 32 bp, Artificial
  oligonucleotide probe
acgcgagcgggtgcaggcctcggagacggcag

SEQ ID NO: 15522 - DNA, 32 bp, Artificial
  oligonucleotide probe
gcgatggccaggtggcgcctcggagacggcag

SEQ ID NO: 15523 - DNA, 32 bp, Artificial
  oligonucleotide probe
tggcagcgggtcgtggacgcgcctgacgcctc

SEQ ID NO: 15524 - DNA, 32 bp, Artificial
  oligonucleotide probe
gcctgggtcaccacgcacgcgcctgacgcctc

SEQ ID NO: 15525 - DNA, 32 bp, Artificial
  oligonucleotide probe
ggtccggagcagacgcgacggcgagtgggcag

SEQ ID NO: 15526 - DNA, 32 bp, Artificial
  oligonucleotide probe
gcctgcgagagctggcgacggcgagtgggcag

SEQ ID NO: 15527 - DNA, 32 bp, Artificial
  oligonucleotide probe
gacggggtcggacgaggcctagcgcctcgacg

SEQ ID NO: 15528 - DNA, 32 bp, Artificial
  oligonucleotide probe
gtggcaggagcgacgcgcctagcgcctcgacg

SEQ ID NO: 15529 - DNA, 32 bp, Artificial
  oligonucleotide probe
acgcgagcgggtgcagacgcgcctgacgcctc

SEQ ID NO: 15530 - DNA, 32 bp, Artificial
  oligonucleotide probe
gcgatggccaggtggcacgcgcctgacgcctc

SEQ ID NO: 15531 - DNA, 32 bp, Artificial
  oligonucleotide probe
ccaaagcgggaatggcgcagcggagcctgagc

SEQ ID NO: 15532 - DNA, 32 bp, Artificial
  oligonucleotide probe
cctccgaggacgcggagcagcggagcctgagc

SEQ ID NO: 15533 - DNA, 32 bp, Artificial
  oligonucleotide probe
gacggggtcggacgaggacggcgagtgggcag

SEQ ID NO: 15534 - DNA, 32 bp, Artificial
  oligonucleotide probe
gtggcaggagcgacgcgacggcgagtgggcag

SEQ ID NO: 15535 - DNA, 32 bp, Artificial
  oligonucleotide probe
gcgagtggcagggccttggcagcgggtcgtgg

SEQ ID NO: 15536 - DNA, 32 bp, Artificial
  oligonucleotide probe
caccgagccacccggatggcagcgggtcgtgg

SEQ ID NO: 15537 - DNA, 32 bp, Artificial
  oligonucleotide probe
ggtccggagcagacgcgtccggaagtgggcga

SEQ ID NO: 15538 - DNA, 32 bp, Artificial
  oligonucleotide probe
gcctgcgagagctggcgtccggaagtgggcga

SEQ ID NO: 15539 - DNA, 32 bp, Artificial
  oligonucleotide probe
accacggaagcgcggagacgcaggcggagggt

SEQ ID NO: 15540 - DNA, 32 bp, Artificial
  oligonucleotide probe
gtgggacgacgcgcgagacgcaggcggagggt

SEQ ID NO: 15541 - DNA, 32 bp, Artificial
  oligonucleotide probe
acgcgagcgggtgcaggacgcaggcggagggt

SEQ ID NO: 15542 - DNA, 32 bp, Artificial
  oligonucleotide probe
gcgatggccaggtggcgacgcaggcggagggt

SEQ ID NO: 15543 - DNA, 32 bp, Artificial
  oligonucleotide probe
caccgagccacccggagtggcggaggtcggaa

SEQ ID NO: 15544 - DNA, 32 bp, Artificial
  oligonucleotide probe
tggcacgcgagccagggtggcggaggtcggaa

SEQ ID NO: 15545 - DNA, 32 bp, Artificial
  oligonucleotide probe
cctcagcgcggaaccaacgcgcctgacgcctc

SEQ ID NO: 15546 - DNA, 32 bp, Artificial
  oligonucleotide probe
gacggacgacgcgtggacgcgcctgacgcctc

SEQ ID NO: 15547 - DNA, 32 bp, Artificial
  oligonucleotide probe
tggcagcgggtcgtgggacggcgagtgggcag

SEQ ID NO: 15548 - DNA, 32 bp, Artificial
  oligonucleotide probe
gcctgggtcaccacgcgacggcgagtgggcag

SEQ ID NO: 15549 - DNA, 32 bp, Artificial
  oligonucleotide probe
caccgagccacccggaacgccaggcgaggtgg

SEQ ID NO: 15550 - DNA, 32 bp, Artificial
  oligonucleotide probe
tggcacgcgagccaggacgccaggcgaggtgg

SEQ ID NO: 15551 - DNA, 32 bp, Artificial
  oligonucleotide probe
gagcgcctcctcgagcacgcggaagacgtggc

SEQ ID NO: 15552 - DNA, 32 bp, Artificial
  oligonucleotide probe
gcgagtggcagggcctacgcggaagacgtggc

SEQ ID NO: 15553 - DNA, 32 bp, Artificial
  oligonucleotide probe
ccaaagcgggaatggcacgcgcctgacgcctc

SEQ ID NO: 15554 - DNA, 32 bp, Artificial
  oligonucleotide probe
cctccgaggacgcggaacgcgcctgacgcctc

SEQ ID NO: 15555 - DNA, 32 bp, Artificial
  oligonucleotide probe
ggtccggagcagacgccaggggaagggtcgga

SEQ ID NO: 15556 - DNA, 32 bp, Artificial
  oligonucleotide probe
gcctgcgagagctggccaggggaagggtcgga

SEQ ID NO: 15557 - DNA, 32 bp, Artificial
  oligonucleotide probe
gagcgcctcctcgagcgcctcggagacggcag

SEQ ID NO: 15558 - DNA, 32 bp, Artificial
  oligonucleotide probe
gcgagtggcagggcctgcctcggagacggcag

SEQ ID NO: 15559 - DNA, 32 bp, Artificial
  oligonucleotide probe
ggaaagcggcctggaaggaagcctgcgacgga

SEQ ID NO: 15560 - DNA, 32 bp, Artificial
  oligonucleotide probe
gagcggtctggcggaaggaagcctgcgacgga

SEQ ID NO: 15561 - DNA, 32 bp, Artificial
  oligonucleotide probe
tggcagcgggtcgtgggcctcggagacggcag

SEQ ID NO: 15562 - DNA, 32 bp, Artificial
  oligonucleotide probe
gcctgggtcaccacgcgcctcggagacggcag

SEQ ID NO: 15563 - DNA, 32 bp, Artificial
  oligonucleotide probe
caccgagccacccggaggtcgacgacgccgag

SEQ ID NO: 15564 - DNA, 32 bp, Artificial
  oligonucleotide probe
tggcacgcgagccaggggtcgacgacgccgag

SEQ ID NO: 15565 - DNA, 32 bp, Artificial
  oligonucleotide probe
gcagcctctggccgagggtcgacgacgccgag

SEQ ID NO: 15566 - DNA, 32 bp, Artificial
  oligonucleotide probe
gcagcaccagcgtggcggtcgacgacgccgag

SEQ ID NO: 15567 - DNA, 32 bp, Artificial
  oligonucleotide probe
gacggggtcggacgagacgcggtccaccgtgg

SEQ ID NO: 15568 - DNA, 32 bp, Artificial
  oligonucleotide probe
gtggcaggagcgacgcacgcggtccaccgtgg

SEQ ID NO: 15569 - DNA, 32 bp, Artificial
  oligonucleotide probe
ggtccggagcagacgcgacgcaggcggagggt

SEQ ID NO: 15570 - DNA, 32 bp, Artificial
  oligonucleotide probe
gcctgcgagagctggcgacgcaggcggagggt

SEQ ID NO: 15571 - DNA, 32 bp, Artificial
  oligonucleotide probe
accacggaagcgcggaacgcgcctgacgcctc

SEQ ID NO: 15572 - DNA, 32 bp, Artificial
  oligonucleotide probe
gtgggacgacgcgcgaacgcgcctgacgcctc

SEQ ID NO: 15573 - DNA, 32 bp, Artificial
  oligonucleotide probe
gagcgcctcctcgagcacgcgcctgacgcctc

SEQ ID NO: 15574 - DNA, 32 bp, Artificial
  oligonucleotide probe
gcgagtggcagggcctacgcgcctgacgcctc

SEQ ID NO: 15575 - DNA, 32 bp, Artificial
  oligonucleotide probe
ggtccggagcagacgctcacgccttggccacc

SEQ ID NO: 15576 - DNA, 32 bp, Artificial
  oligonucleotide probe
gcctgcgagagctggctcacgccttggccacc

SEQ ID NO: 15577 - DNA, 32 bp, Artificial
  oligonucleotide probe
gagcgcctcctcgagcacgcaccagtcccgga

SEQ ID NO: 15578 - DNA, 32 bp, Artificial
  oligonucleotide probe
gcgagtggcagggcctacgcaccagtcccgga

SEQ ID NO: 15579 - DNA, 32 bp, Artificial
  oligonucleotide probe
ggaaagcggcctggaaacgcgcctgacgcctc

SEQ ID NO: 15580 - DNA, 32 bp, Artificial
  oligonucleotide probe
gagcggtctggcggaaacgcgcctgacgcctc

SEQ ID NO: 15581 - DNA, 32 bp, Artificial
  oligonucleotide probe
gcagcctctggccgaggacgcaggcggagggt

SEQ ID NO: 15582 - DNA, 32 bp, Artificial
  oligonucleotide probe
gcagcaccagcgtggcgacgcaggcggagggt

SEQ ID NO: 15583 - DNA, 32 bp, Artificial
  oligonucleotide probe
ggaaagcggcctggaatgctgggtgcaggcga

SEQ ID NO: 15584 - DNA, 32 bp, Artificial
  oligonucleotide probe
gagcggtctggcggaatgctgggtgcaggcga

SEQ ID NO: 15585 - DNA, 32 bp, Artificial
  oligonucleotide probe
gagcgcctcctcgagcgcagcggagcctgagc

SEQ ID NO: 15586 - DNA, 32 bp, Artificial
  oligonucleotide probe
gcgagtggcagggcctgcagcggagcctgagc

SEQ ID NO: 15587 - DNA, 32 bp, Artificial
  oligonucleotide probe
caggagcgggaagcgagacggcgagtgggcag

SEQ ID NO: 15588 - DNA, 32 bp, Artificial
  oligonucleotide probe
tggccaggcggagtgggacggcgagtgggcag

SEQ ID NO: 15589 - DNA, 32 bp, Artificial
  oligonucleotide probe
ggaaagcggcctggaaacgccaggcgaggtgg

SEQ ID NO: 15590 - DNA, 32 bp, Artificial
  oligonucleotide probe
gagcggtctggcggaaacgccaggcgaggtgg

SEQ ID NO: 15591 - DNA, 32 bp, Artificial
  oligonucleotide probe
ccaaagcgggaatggctgctgggtgcaggcga

SEQ ID NO: 15592 - DNA, 32 bp, Artificial
  oligonucleotide probe
cctccgaggacgcggatgctgggtgcaggcga

SEQ ID NO: 15593 - DNA, 32 bp, Artificial
  oligonucleotide probe
gagcgcctcctcgagcgtccggaagtgggcga

SEQ ID NO: 15594 - DNA, 32 bp, Artificial
  oligonucleotide probe
gcgagtggcagggcctgtccggaagtgggcga

SEQ ID NO: 15595 - DNA, 32 bp, Artificial
  oligonucleotide probe
ccaaagcgggaatggctggcgtgggggtccaa

SEQ ID NO: 15596 - DNA, 32 bp, Artificial
  oligonucleotide probe
cctccgaggacgcggatggcgtgggggtccaa

SEQ ID NO: 15597 - DNA, 32 bp, Artificial
  oligonucleotide probe
tggcagcgggtcgtgggcctagcgcctcgacg

SEQ ID NO: 15598 - DNA, 32 bp, Artificial
  oligonucleotide probe
gcctgggtcaccacgcgcctagcgcctcgacg

SEQ ID NO: 15599 - DNA, 32 bp, Artificial
  oligonucleotide probe
ccaaagcgggaatggcgcctagcgcctcgacg

SEQ ID NO: 15600 - DNA, 32 bp, Artificial
  oligonucleotide probe
cctccgaggacgcggagcctagcgcctcgacg

SEQ ID NO: 15601 - DNA, 32 bp, Artificial
  oligonucleotide probe
gcagcctctggccgagggaagcctgcgacgga

SEQ ID NO: 15602 - DNA, 32 bp, Artificial
  oligonucleotide probe
gcagcaccagcgtggcggaagcctgcgacgga

SEQ ID NO: 15603 - DNA, 32 bp, Artificial
  oligonucleotide probe
accacggaagcgcggagacggcgagtgggcag

SEQ ID NO: 15604 - DNA, 32 bp, Artificial
  oligonucleotide probe
gtgggacgacgcgcgagacggcgagtgggcag

SEQ ID NO: 15605 - DNA, 32 bp, Artificial
  oligonucleotide probe
accacggaagcgcggaacgcggtccaccgtgg

SEQ ID NO: 15606 - DNA, 32 bp, Artificial
  oligonucleotide probe
gtgggacgacgcgcgaacgcggtccaccgtgg

SEQ ID NO: 15607 - DNA, 32 bp, Artificial
  oligonucleotide probe
ggaaagcggcctggaagcctcggagacggcag

SEQ ID NO: 15608 - DNA, 32 bp, Artificial
  oligonucleotide probe
gagcggtctggcggaagcctcggagacggcag

SEQ ID NO: 15609 - DNA, 32 bp, Artificial
  oligonucleotide probe
gagcgcctcctcgagccaccgggtggtcagcg

SEQ ID NO: 15610 - DNA, 32 bp, Artificial
  oligonucleotide probe
gcgagtggcagggcctcaccgggtggtcagcg

SEQ ID NO: 15611 - DNA, 32 bp, Artificial
  oligonucleotide probe
gcgagtggcagggcctgcgacgagcgagccaa

SEQ ID NO: 15612 - DNA, 32 bp, Artificial
  oligonucleotide probe
caccgagccacccggagcgacgagcgagccaa

SEQ ID NO: 15613 - DNA, 32 bp, Artificial
  oligonucleotide probe
tggcagcgggtcgtggacgcaccagtcccgga

SEQ ID NO: 15614 - DNA, 32 bp, Artificial
  oligonucleotide probe
gcctgggtcaccacgcacgcaccagtcccgga

SEQ ID NO: 15615 - DNA, 32 bp, Artificial
  oligonucleotide probe
ggaaagcggcctggaagtggcggaggtcggaa

SEQ ID NO: 15616 - DNA, 32 bp, Artificial
  oligonucleotide probe
gagcggtctggcggaagtggcggaggtcggaa

SEQ ID NO: 15617 - DNA, 32 bp, Artificial
  oligonucleotide probe
acgcgagcgggtgcaggcagcggagcctgagc

SEQ ID NO: 15618 - DNA, 32 bp, Artificial
  oligonucleotide probe
gcgatggccaggtggcgcagcggagcctgagc

SEQ ID NO: 15619 - DNA, 32 bp, Artificial
  oligonucleotide probe
gagcgcctcctcgagcgtccacgctggcgacg

SEQ ID NO: 15620 - DNA, 32 bp, Artificial
  oligonucleotide probe
gcgagtggcagggcctgtccacgctggcgacg

SEQ ID NO: 15621 - DNA, 32 bp, Artificial
  oligonucleotide probe
caccgagccacccggagcctagcgcctcgacg

SEQ ID NO: 15622 - DNA, 32 bp, Artificial
  oligonucleotide probe
tggcacgcgagccagggcctagcgcctcgacg

SEQ ID NO: 15623 - DNA, 32 bp, Artificial
  oligonucleotide probe
ggaaagcggcctggaaaccatggcacgcgacg

SEQ ID NO: 15624 - DNA, 32 bp, Artificial
  oligonucleotide probe
gagcggtctggcggaaaccatggcacgcgacg

SEQ ID NO: 15625 - DNA, 32 bp, Artificial
  oligonucleotide probe
gagcgcctcctcgagcgtggcggaggtcggaa

SEQ ID NO: 15626 - DNA, 32 bp, Artificial
  oligonucleotide probe
gcgagtggcagggcctgtggcggaggtcggaa

SEQ ID NO: 15627 - DNA, 32 bp, Artificial
  oligonucleotide probe
gagcgcctcctcgagcgtccgagcagcggcct

SEQ ID NO: 15628 - DNA, 32 bp, Artificial
  oligonucleotide probe
gcgagtggcagggcctgtccgagcagcggcct

SEQ ID NO: 15629 - DNA, 32 bp, Artificial
  oligonucleotide probe
ccaaagcgggaatggcacgcggtccaccgtgg

SEQ ID NO: 15630 - DNA, 32 bp, Artificial
  oligonucleotide probe
cctccgaggacgcggaacgcggtccaccgtgg

SEQ ID NO: 15631 - DNA, 32 bp, Artificial
  oligonucleotide probe
gcagcctctggccgagacgcgcctgacgcctc

SEQ ID NO: 15632 - DNA, 32 bp, Artificial
  oligonucleotide probe
gcagcaccagcgtggcacgcgcctgacgcctc

SEQ ID NO: 15633 - DNA, 32 bp, Artificial
  oligonucleotide probe
accacggaagcgcggatggcgtgggggtccaa

SEQ ID NO: 15634 - DNA, 32 bp, Artificial
  oligonucleotide probe
gtgggacgacgcgcgatggcgtgggggtccaa

SEQ ID NO: 15635 - DNA, 32 bp, Artificial
  oligonucleotide probe
gcgagtggcagggcctgggtggaacgaggcga

SEQ ID NO: 15636 - DNA, 32 bp, Artificial
  oligonucleotide probe
caccgagccacccggagggtggaacgaggcga

SEQ ID NO: 15637 - DNA, 32 bp, Artificial
  oligonucleotide probe
ggaaagcggcctggaatcacgccttggccacc

SEQ ID NO: 15638 - DNA, 32 bp, Artificial
  oligonucleotide probe
gagcggtctggcggaatcacgccttggccacc

SEQ ID NO: 15639 - DNA, 32 bp, Artificial
  oligonucleotide probe
caccgagccacccggatcacgccttggccacc

SEQ ID NO: 15640 - DNA, 32 bp, Artificial
  oligonucleotide probe
tggcacgcgagccaggtcacgccttggccacc

SEQ ID NO: 15641 - DNA, 32 bp, Artificial
  oligonucleotide probe
gggtggaacgaggcgagacggcgagtgggcag

SEQ ID NO: 15642 - DNA, 32 bp, Artificial
  oligonucleotide probe
gcaggtggtggcgagcgacggcgagtgggcag

SEQ ID NO: 15643 - DNA, 32 bp, Artificial
  oligonucleotide probe
gacggggtcggacgagacgcgcctgacgcctc

SEQ ID NO: 15644 - DNA, 32 bp, Artificial
  oligonucleotide probe
gtggcaggagcgacgcacgcgcctgacgcctc

SEQ ID NO: 15645 - DNA, 32 bp, Artificial
  oligonucleotide probe
caccgagccacccggagcctcggagacggcag

SEQ ID NO: 15646 - DNA, 32 bp, Artificial
  oligonucleotide probe
tggcacgcgagccagggcctcggagacggcag

SEQ ID NO: 15647 - DNA, 32 bp, Artificial
  oligonucleotide probe
cctcagcgcggaaccagcctagcgcctcgacg

SEQ ID NO: 15648 - DNA, 32 bp, Artificial
  oligonucleotide probe
gacggacgacgcgtgggcctagcgcctcgacg

SEQ ID NO: 15649 - DNA, 32 bp, Artificial
  oligonucleotide probe
gcgagtggcagggcctcctcagcgcggaacca

SEQ ID NO: 15650 - DNA, 32 bp, Artificial
  oligonucleotide probe
caccgagccacccggacctcagcgcggaacca

SEQ ID NO: 15651 - DNA, 32 bp, Artificial
  oligonucleotide probe
caccgagccacccggaagcggtccgcgagagc

SEQ ID NO: 15652 - DNA, 32 bp, Artificial
  oligonucleotide probe
tggcacgcgagccaggagcggtccgcgagagc

SEQ ID NO: 15653 - DNA, 32 bp, Artificial
  oligonucleotide probe
caccgagccacccggacaccgggtggtcagcg

SEQ ID NO: 15654 - DNA, 32 bp, Artificial
  oligonucleotide probe
tggcacgcgagccaggcaccgggtggtcagcg

SEQ ID NO: 15655 - DNA, 32 bp, Artificial
  oligonucleotide probe
tggcagcgggtcgtggacgcggtccaccgtgg

SEQ ID NO: 15656 - DNA, 32 bp, Artificial
  oligonucleotide probe
gcctgggtcaccacgcacgcggtccaccgtgg

SEQ ID NO: 15657 - DNA, 32 bp, Artificial
  oligonucleotide probe
caccgagccacccggatggcgtgggggtccaa

SEQ ID NO: 15658 - DNA, 32 bp, Artificial
  oligonucleotide probe
tggcacgcgagccaggtggcgtgggggtccaa

SEQ ID NO: 15659 - DNA, 32 bp, Artificial
  oligonucleotide probe
gcagcctctggccgaggcctagcgcctcgacg

SEQ ID NO: 15660 - DNA, 32 bp, Artificial
  oligonucleotide probe
gcagcaccagcgtggcgcctagcgcctcgacg

SEQ ID NO: 15661 - DNA, 32 bp, Artificial
  oligonucleotide probe
gagcgcctcctcgagcgacggcgagtgggcag

SEQ ID NO: 15662 - DNA, 32 bp, Artificial
  oligonucleotide probe
gcgagtggcagggcctgacggcgagtgggcag

SEQ ID NO: 15663 - DNA, 32 bp, Artificial
  oligonucleotide probe
gcagcctctggccgaggtccggaagtgggcga

SEQ ID NO: 15664 - DNA, 32 bp, Artificial
  oligonucleotide probe
gcagcaccagcgtggcgtccggaagtgggcga

SEQ ID NO: 15665 - DNA, 32 bp, Artificial
  oligonucleotide probe
ccaaagcgggaatggcgcctcggagacggcag

SEQ ID NO: 15666 - DNA, 32 bp, Artificial
  oligonucleotide probe
cctccgaggacgcggagcctcggagacggcag

SEQ ID NO: 15667 - DNA, 32 bp, Artificial
  oligonucleotide probe
ggaaagcggcctggaaacgcggaagacgtggc

SEQ ID NO: 15668 - DNA, 32 bp, Artificial
  oligonucleotide probe
gagcggtctggcggaaacgcggaagacgtggc

SEQ ID NO: 15669 - DNA, 32 bp, Artificial
  oligonucleotide probe
ggaaagcggcctggaagcctagcgcctcgacg

SEQ ID NO: 15670 - DNA, 32 bp, Artificial
  oligonucleotide probe
gagcggtctggcggaagcctagcgcctcgacg

SEQ ID NO: 15671 - DNA, 32 bp, Artificial
  oligonucleotide probe
gagcgcctcctcgagcgcctagcgcctcgacg

SEQ ID NO: 15672 - DNA, 32 bp, Artificial
  oligonucleotide probe
gcgagtggcagggcctgcctagcgcctcgacg

SEQ ID NO: 15673 - DNA, 32 bp, Artificial
  oligonucleotide probe
caccgagccacccggaacgcgcctgacgcctc

SEQ ID NO: 15674 - DNA, 32 bp, Artificial
  oligonucleotide probe
tggcacgcgagccaggacgcgcctgacgcctc

SEQ ID NO: 15675 - DNA, 32 bp, Artificial
  oligonucleotide probe
ggaaagcggcctggaacaccgggtggtcagcg

SEQ ID NO: 15676 - DNA, 32 bp, Artificial
  oligonucleotide probe
gagcggtctggcggaacaccgggtggtcagcg

SEQ ID NO: 15677 - DNA, 32 bp, Artificial
  oligonucleotide probe
gcagcctctggccgagaccatggcacgcgacg

SEQ ID NO: 15678 - DNA, 32 bp, Artificial
  oligonucleotide probe
gcagcaccagcgtggcaccatggcacgcgacg

SEQ ID NO: 15679 - DNA, 32 bp, Artificial
  oligonucleotide probe
ggtccggagcagacgcacgcggtccaccgtgg

SEQ ID NO: 15680 - DNA, 32 bp, Artificial
  oligonucleotide probe
gcctgcgagagctggcacgcggtccaccgtgg

SEQ ID NO: 15681 - DNA, 32 bp, Artificial
  oligonucleotide probe
ggaaagcggcctggaaggtcgacgacgccgag

SEQ ID NO: 15682 - DNA, 32 bp, Artificial
  oligonucleotide probe
gagcggtctggcggaaggtcgacgacgccgag

SEQ ID NO: 15683 - DNA, 32 bp, Artificial
  oligonucleotide probe
ggaaagcggcctggaagacgcaggcggagggt

SEQ ID NO: 15684 - DNA, 32 bp, Artificial
  oligonucleotide probe
gagcggtctggcggaagacgcaggcggagggt

SEQ ID NO: 15685 - DNA, 32 bp, Artificial
  oligonucleotide probe
ggaaagcggcctggaacaggggaagggtcgga

SEQ ID NO: 15686 - DNA, 32 bp, Artificial
  oligonucleotide probe
gagcggtctggcggaacaggggaagggtcgga

SEQ ID NO: 15687 - DNA, 32 bp, Artificial
  oligonucleotide probe
gggttggccgagtggcgacggcgagtgggcag

SEQ ID NO: 15688 - DNA, 32 bp, Artificial
  oligonucleotide probe
tggcgggtgacggtgggacggcgagtgggcag

SEQ ID NO: 15689 - DNA, 32 bp, Artificial
  oligonucleotide probe
gcagcctctggccgagtcacgccttggccacc

SEQ ID NO: 15690 - DNA, 32 bp, Artificial
  oligonucleotide probe
gcagcaccagcgtggctcacgccttggccacc

SEQ ID NO: 15691 - DNA, 32 bp, Artificial
  oligonucleotide probe
gcagcctctggccgagcaccgggtggtcagcg

SEQ ID NO: 15692 - DNA, 32 bp, Artificial
  oligonucleotide probe
gcagcaccagcgtggccaccgggtggtcagcg

SEQ ID NO: 15693 - DNA, 32 bp, Artificial
  oligonucleotide probe
caccgagccacccggagtccacgctggcgacg

SEQ ID NO: 15694 - DNA, 32 bp, Artificial
  oligonucleotide probe
tggcacgcgagccagggtccacgctggcgacg

SEQ ID NO: 15695 - DNA, 32 bp, Artificial
  oligonucleotide probe
ccaaagcgggaatggcgacgcaggcggagggt

SEQ ID NO: 15696 - DNA, 32 bp, Artificial
  oligonucleotide probe
cctccgaggacgcggagacgcaggcggagggt

SEQ ID NO: 15697 - DNA, 32 bp, Artificial
  oligonucleotide probe
gagcgcctcctcgagctcacgccttggccacc

SEQ ID NO: 15698 - DNA, 32 bp, Artificial
  oligonucleotide probe
gcgagtggcagggccttcacgccttggccacc

SEQ ID NO: 15699 - DNA, 32 bp, Artificial
  oligonucleotide probe
cctcagcgcggaaccagcctcggagacggcag

SEQ ID NO: 15700 - DNA, 32 bp, Artificial
  oligonucleotide probe
gacggacgacgcgtgggcctcggagacggcag

SEQ ID NO: 15701 - DNA, 32 bp, Artificial
  oligonucleotide probe
caccgagccacccggaaccatggcacgcgacg

SEQ ID NO: 15702 - DNA, 32 bp, Artificial
  oligonucleotide probe
tggcacgcgagccaggaccatggcacgcgacg

SEQ ID NO: 15703 - DNA, 32 bp, Artificial
  oligonucleotide probe
ggaaagcggcctggaacaccgcgaggtcacgc

SEQ ID NO: 15704 - DNA, 32 bp, Artificial
  oligonucleotide probe
gagcggtctggcggaacaccgcgaggtcacgc

SEQ ID NO: 15705 - DNA, 32 bp, Artificial
  oligonucleotide probe
ggtccggagcagacgcacgccaggcgaggtgg

SEQ ID NO: 15706 - DNA, 32 bp, Artificial
  oligonucleotide probe
gcctgcgagagctggcacgccaggcgaggtgg

SEQ ID NO: 15707 - DNA, 32 bp, Artificial
  oligonucleotide probe
ggaaagcggcctggaagcagcggagcctgagc

SEQ ID NO: 15708 - DNA, 32 bp, Artificial
  oligonucleotide probe
gagcggtctggcggaagcagcggagcctgagc

SEQ ID NO: 15709 - DNA, 32 bp, Artificial
  oligonucleotide probe
accacggaagcgcggagcctagcgcctcgacg

SEQ ID NO: 15710 - DNA, 32 bp, Artificial
  oligonucleotide probe
gtgggacgacgcgcgagcctagcgcctcgacg

SEQ ID NO: 15711 - DNA, 32 bp, Artificial
  oligonucleotide probe
ggaaagcggcctggaagtccgagcagcggcct

SEQ ID NO: 15712 - DNA, 32 bp, Artificial
  oligonucleotide probe
gagcggtctggcggaagtccgagcagcggcct

SEQ ID NO: 15713 - DNA, 32 bp, Artificial
  oligonucleotide probe
ccaaagcgggaatggcacgcaccagtcccgga

SEQ ID NO: 15714 - DNA, 32 bp, Artificial
  oligonucleotide probe
cctccgaggacgcggaacgcaccagtcccgga

SEQ ID NO: 15715 - DNA, 32 bp, Artificial
  oligonucleotide probe
ggtccggagcagacgcgagcgcgacacccagg

SEQ ID NO: 15716 - DNA, 32 bp, Artificial
  oligonucleotide probe
gcctgcgagagctggcgagcgcgacacccagg

SEQ ID NO: 15717 - DNA, 32 bp, Artificial
  oligonucleotide probe
tggcagcgggtcgtggggaagcctgcgacgga

SEQ ID NO: 15718 - DNA, 32 bp, Artificial
  oligonucleotide probe
gcctgggtcaccacgcggaagcctgcgacgga

SEQ ID NO: 15719 - DNA, 32 bp, Artificial
  oligonucleotide probe
ccaaagcgggaatggcaccatggcacgcgacg

SEQ ID NO: 15720 - DNA, 32 bp, Artificial
  oligonucleotide probe
cctccgaggacgcggaaccatggcacgcgacg

SEQ ID NO: 15721 - DNA, 32 bp, Artificial
  oligonucleotide probe
caccgagccacccggaacgcggtccaccgtgg

SEQ ID NO: 15722 - DNA, 32 bp, Artificial
  oligonucleotide probe
tggcacgcgagccaggacgcggtccaccgtgg

SEQ ID NO: 15723 - DNA, 32 bp, Artificial
  oligonucleotide probe
cctcagcgcggaaccagacggcgagtgggcag

SEQ ID NO: 15724 - DNA, 32 bp, Artificial
  oligonucleotide probe
gacggacgacgcgtgggacggcgagtgggcag

SEQ ID NO: 15725 - DNA, 32 bp, Artificial
  oligonucleotide probe
ggtccggagcagacgccaccgacgggaaacgc

SEQ ID NO: 15726 - DNA, 32 bp, Artificial
  oligonucleotide probe
gcctgcgagagctggccaccgacgggaaacgc

SEQ ID NO: 15727 - DNA, 32 bp, Artificial
  oligonucleotide probe
gcgagtggcagggcctacgcgagcgggtgcag

SEQ ID NO: 15728 - DNA, 32 bp, Artificial
  oligonucleotide probe
caccgagccacccggaacgcgagcgggtgcag

SEQ ID NO: 15729 - DNA, 32 bp, Artificial
  oligonucleotide probe
ggaaagcggcctggaacggacaggacgctggc

SEQ ID NO: 15730 - DNA, 32 bp, Artificial
  oligonucleotide probe
gagcggtctggcggaacggacaggacgctggc

SEQ ID NO: 15731 - DNA, 32 bp, Artificial
  oligonucleotide probe
acgcgagcgggtgcagaccatggcacgcgacg

SEQ ID NO: 15732 - DNA, 32 bp, Artificial
  oligonucleotide probe
gcgatggccaggtggcaccatggcacgcgacg

SEQ ID NO: 15733 - DNA, 32 bp, Artificial
  oligonucleotide probe
caccgagccacccggagagcgcgacacccagg

SEQ ID NO: 15734 - DNA, 32 bp, Artificial
  oligonucleotide probe
tggcacgcgagccagggagcgcgacacccagg

SEQ ID NO: 15735 - DNA, 32 bp, Artificial
  oligonucleotide probe
gagcgcctcctcgagccaccgacgggaaacgc

SEQ ID NO: 15736 - DNA, 32 bp, Artificial
  oligonucleotide probe
gcgagtggcagggcctcaccgacgggaaacgc

SEQ ID NO: 15737 - DNA, 32 bp, Artificial
  oligonucleotide probe
caccgagccacccggatgctgggtgcaggcga

SEQ ID NO: 15738 - DNA, 32 bp, Artificial
  oligonucleotide probe
tggcacgcgagccaggtgctgggtgcaggcga

SEQ ID NO: 15739 - DNA, 32 bp, Artificial
  oligonucleotide probe
tggcagcgggtcgtggcaccgacgggaaacgc

SEQ ID NO: 15740 - DNA, 32 bp, Artificial
  oligonucleotide probe
gcctgggtcaccacgccaccgacgggaaacgc

SEQ ID NO: 15741 - DNA, 32 bp, Artificial
  oligonucleotide probe
accacggaagcgcggagcagcggagcctgagc

SEQ ID NO: 15742 - DNA, 32 bp, Artificial
  oligonucleotide probe
gtgggacgacgcgcgagcagcggagcctgagc

SEQ ID NO: 15743 - DNA, 32 bp, Artificial
  oligonucleotide probe
cctcagcgcggaaccaacgcggtccaccgtgg

SEQ ID NO: 15744 - DNA, 32 bp, Artificial
  oligonucleotide probe
gacggacgacgcgtggacgcggtccaccgtgg

SEQ ID NO: 15745 - DNA, 32 bp, Artificial
  oligonucleotide probe
ccaaagcgggaatggcggaagcctgcgacgga

SEQ ID NO: 15746 - DNA, 32 bp, Artificial
  oligonucleotide probe
cctccgaggacgcggaggaagcctgcgacgga

SEQ ID NO: 15747 - DNA, 32 bp, Artificial
  oligonucleotide probe
gagcgcctcctcgagccaccgcgaggtcacgc

SEQ ID NO: 15748 - DNA, 32 bp, Artificial
  oligonucleotide probe
gcgagtggcagggcctcaccgcgaggtcacgc

SEQ ID NO: 15749 - DNA, 32 bp, Artificial
  oligonucleotide probe
ggtccggagcagacgcacgcgcctgacgcctc

SEQ ID NO: 15750 - DNA, 32 bp, Artificial
  oligonucleotide probe
gcctgcgagagctggcacgcgcctgacgcctc

SEQ ID NO: 15751 - DNA, 32 bp, Artificial
  oligonucleotide probe
ggtccggagcagacgctgctgggtgcaggcga

SEQ ID NO: 15752 - DNA, 32 bp, Artificial
  oligonucleotide probe
gcctgcgagagctggctgctgggtgcaggcga

SEQ ID NO: 15753 - DNA, 32 bp, Artificial
  oligonucleotide probe
gagcgcctcctcgagcacgcggtccaccgtgg

SEQ ID NO: 15754 - DNA, 32 bp, Artificial
  oligonucleotide probe
gcgagtggcagggcctacgcggtccaccgtgg

SEQ ID NO: 15755 - DNA, 32 bp, Artificial
  oligonucleotide probe
gcctgtgggtccgcgagacggcgagtgggcag

SEQ ID NO: 15756 - DNA, 32 bp, Artificial
  oligonucleotide probe
cctcgcctcgaggagcgacggcgagtgggcag

SEQ ID NO: 15757 - DNA, 32 bp, Artificial
  oligonucleotide probe
ggtccggagcagacgcgcctagcgcctcgacg

SEQ ID NO: 15758 - DNA, 32 bp, Artificial
  oligonucleotide probe
gcctgcgagagctggcgcctagcgcctcgacg

SEQ ID NO: 15759 - DNA, 32 bp, Artificial
  oligonucleotide probe
ggaaagcggcctggaaagcggtccgcgagagc

SEQ ID NO: 15760 - DNA, 32 bp, Artificial
  oligonucleotide probe
gagcggtctggcggaaagcggtccgcgagagc

SEQ ID NO: 15761 - DNA, 32 bp, Artificial
  oligonucleotide probe
ggaaagcggcctggaagacggcgagtgggcag

SEQ ID NO: 15762 - DNA, 32 bp, Artificial
  oligonucleotide probe
gagcggtctggcggaagacggcgagtgggcag

SEQ ID NO: 15763 - DNA, 32 bp, Artificial
  oligonucleotide probe
caccgagccacccggagacgcaggcggagggt

SEQ ID NO: 15764 - DNA, 32 bp, Artificial
  oligonucleotide probe
tggcacgcgagccagggacgcaggcggagggt

SEQ ID NO: 15765 - DNA, 32 bp, Artificial
  oligonucleotide probe
gcagcctctggccgagacgcaccagtcccgga

SEQ ID NO: 15766 - DNA, 32 bp, Artificial
  oligonucleotide probe
gcagcaccagcgtggcacgcaccagtcccgga

SEQ ID NO: 15767 - DNA, 32 bp, Artificial
  oligonucleotide probe
gcagcctctggccgagcaggggaagggtcgga

SEQ ID NO: 15768 - DNA, 32 bp, Artificial
  oligonucleotide probe
gcagcaccagcgtggccaggggaagggtcgga

SEQ ID NO: 15769 - DNA, 32 bp, Artificial
  oligonucleotide probe
ggtccggagcagacgcgcctcggagacggcag

SEQ ID NO: 15770 - DNA, 32 bp, Artificial
  oligonucleotide probe
gcctgcgagagctggcgcctcggagacggcag

SEQ ID NO: 15771 - DNA, 32 bp, Artificial
  oligonucleotide probe
acgcgagcgggtgcagtggcgtgggggtccaa

SEQ ID NO: 15772 - DNA, 32 bp, Artificial
  oligonucleotide probe
gcgatggccaggtggctggcgtgggggtccaa

SEQ ID NO: 15773 - DNA, 32 bp, Artificial
  oligonucleotide probe
gagcgcctcctcgagcggtcgacgacgccgag

SEQ ID NO: 15774 - DNA, 32 bp, Artificial
  oligonucleotide probe
gcgagtggcagggcctggtcgacgacgccgag

SEQ ID NO: 15775 - DNA, 32 bp, Artificial
  oligonucleotide probe
tggcagcgggtcgtgggcagcggagcctgagc

SEQ ID NO: 15776 - DNA, 32 bp, Artificial
  oligonucleotide probe
gcctgggtcaccacgcgcagcggagcctgagc

SEQ ID NO: 15777 - DNA, 32 bp, Artificial
  oligonucleotide probe
gagcgcctcctcgagctgctgggtgcaggcga

SEQ ID NO: 15778 - DNA, 32 bp, Artificial
  oligonucleotide probe
gcgagtggcagggccttgctgggtgcaggcga

SEQ ID NO: 15779 - DNA, 32 bp, Artificial
  oligonucleotide probe
gcagcctctggccgagacgcggtccaccgtgg

SEQ ID NO: 15780 - DNA, 32 bp, Artificial
  oligonucleotide probe
gcagcaccagcgtggcacgcggtccaccgtgg

SEQ ID NO: 15781 - DNA, 32 bp, Artificial
  oligonucleotide probe
tggcagcgggtcgtgggacgcaggcggagggt

SEQ ID NO: 15782 - DNA, 32 bp, Artificial
  oligonucleotide probe
gcctgggtcaccacgcgacgcaggcggagggt

SEQ ID NO: 15783 - DNA, 32 bp, Artificial
  oligonucleotide probe
ggaaagcggcctggaaacgcggtccaccgtgg

SEQ ID NO: 15784 - DNA, 32 bp, Artificial
  oligonucleotide probe
gagcggtctggcggaaacgcggtccaccgtgg

SEQ ID NO: 15785 - DNA, 32 bp, Artificial
  oligonucleotide probe
caccgagccacccggacggacaggacgctggc

SEQ ID NO: 15786 - DNA, 32 bp, Artificial
  oligonucleotide probe
tggcacgcgagccaggcggacaggacgctggc

SEQ ID NO: 15787 - DNA, 32 bp, Artificial
  oligonucleotide probe
caccgagccacccggagtccgagcagcggcct

SEQ ID NO: 15788 - DNA, 32 bp, Artificial
  oligonucleotide probe
tggcacgcgagccagggtccgagcagcggcct

SEQ ID NO: 15789 - DNA, 32 bp, Artificial
  oligonucleotide probe
gcgagtggcagggcctcctctggctggcccaa

SEQ ID NO: 15790 - DNA, 32 bp, Artificial
  oligonucleotide probe
caccgagccacccggacctctggctggcccaa

SEQ ID NO: 15791 - DNA, 32 bp, Artificial
  oligonucleotide probe
caccgagccacccggacaggggaagggtcgga

SEQ ID NO: 15792 - DNA, 32 bp, Artificial
  oligonucleotide probe
tggcacgcgagccaggcaggggaagggtcgga

SEQ ID NO: 15793 - DNA, 32 bp, Artificial
  oligonucleotide probe
tggcagcgggtcgtggtggcgtgggggtccaa

SEQ ID NO: 15794 - DNA, 32 bp, Artificial
  oligonucleotide probe
gcctgggtcaccacgctggcgtgggggtccaa

SEQ ID NO: 15795 - DNA, 32 bp, Artificial
  oligonucleotide probe
ggtccggagcagacgcggaagcctgcgacgga

SEQ ID NO: 15796 - DNA, 32 bp, Artificial
  oligonucleotide probe
gcctgcgagagctggcggaagcctgcgacgga

SEQ ID NO: 15797 - DNA, 32 bp, Artificial
  oligonucleotide probe
caccgagccacccggagacggcgagtgggcag

SEQ ID NO: 15798 - DNA, 32 bp, Artificial
  oligonucleotide probe
tggcacgcgagccagggacggcgagtgggcag

SEQ ID NO: 15799 - DNA, 32 bp, Artificial
  oligonucleotide probe
ggtccggagcagacgcaccatggcacgcgacg

SEQ ID NO: 15800 - DNA, 32 bp, Artificial
  oligonucleotide probe
gcctgcgagagctggcaccatggcacgcgacg

SEQ ID NO: 15801 - DNA, 32 bp, Artificial
  oligonucleotide probe
gcgagtggcagggcctcaggagcgggaagcga

SEQ ID NO: 15802 - DNA, 32 bp, Artificial
  oligonucleotide probe
caccgagccacccggacaggagcgggaagcga

SEQ ID NO: 15803 - DNA, 32 bp, Artificial
  oligonucleotide probe
gacggggtcggacgaggcctcggagacggcag

SEQ ID NO: 15804 - DNA, 32 bp, Artificial
  oligonucleotide probe
gtggcaggagcgacgcgcctcggagacggcag

SEQ ID NO: 15805 - DNA, 32 bp, Artificial
  oligonucleotide probe
ccaaagcgggaatggccaccgggtggtcagcg

SEQ ID NO: 15806 - DNA, 32 bp, Artificial
  oligonucleotide probe
cctccgaggacgcggacaccgggtggtcagcg

SEQ ID NO: 15807 - DNA, 32 bp, Artificial
  oligonucleotide probe
ggaaagcggcctggaagcaggcagccaatggc

SEQ ID NO: 15808 - DNA, 32 bp, Artificial
  oligonucleotide probe
gagcggtctggcggaagcaggcagccaatggc

SEQ ID NO: 15809 - DNA, 32 bp, Artificial
  oligonucleotide probe
caggagcgggaagcgagacgcaggcggagggt

SEQ ID NO: 15810 - DNA, 32 bp, Artificial
  oligonucleotide probe
tggccaggcggagtgggacgcaggcggagggt

SEQ ID NO: 15811 - DNA, 32 bp, Artificial
  oligonucleotide probe
gagcgcctcctcgagctggcgtgggggtccaa

SEQ ID NO: 15812 - DNA, 32 bp, Artificial
  oligonucleotide probe
gcgagtggcagggccttggcgtgggggtccaa

SEQ ID NO: 15813 - DNA, 32 bp, Artificial
  oligonucleotide probe
caccgagccacccggacaccgacgggaaacgc

SEQ ID NO: 15814 - DNA, 32 bp, Artificial
  oligonucleotide probe
tggcacgcgagccaggcaccgacgggaaacgc

SEQ ID NO: 15815 - DNA, 32 bp, Artificial
  oligonucleotide probe
ggtccggagcagacgcggtcgacgacgccgag

SEQ ID NO: 15816 - DNA, 32 bp, Artificial
  oligonucleotide probe
gcctgcgagagctggcggtcgacgacgccgag

SEQ ID NO: 15817 - DNA, 32 bp, Artificial
  oligonucleotide probe
gcagcctctggccgagacgccaggcgaggtgg

SEQ ID NO: 15818 - DNA, 32 bp, Artificial
  oligonucleotide probe
gcagcaccagcgtggcacgccaggcgaggtgg

SEQ ID NO: 15819 - DNA, 32 bp, Artificial
  oligonucleotide probe
ccaaagcgggaatggcgacggcgagtgggcag

SEQ ID NO: 15820 - DNA, 32 bp, Artificial
  oligonucleotide probe
cctccgaggacgcggagacggcgagtgggcag

SEQ ID NO: 15821 - DNA, 32 bp, Artificial
  oligonucleotide probe
acgcgagcgggtgcagacgcggtccaccgtgg

SEQ ID NO: 15822 - DNA, 32 bp, Artificial
  oligonucleotide probe
gcgatggccaggtggcacgcggtccaccgtgg

SEQ ID NO: 15823 - DNA, 32 bp, Artificial
  oligonucleotide probe
ggaaagcggcctggaaacgcaccagtcccgga

SEQ ID NO: 15824 - DNA, 32 bp, Artificial
  oligonucleotide probe
gagcggtctggcggaaacgcaccagtcccgga

SEQ ID NO: 15825 - DNA, 32 bp, Artificial
  oligonucleotide probe
caccgagccacccggacaccgcgaggtcacgc

SEQ ID NO: 15826 - DNA, 32 bp, Artificial
  oligonucleotide probe
tggcacgcgagccaggcaccgcgaggtcacgc

SEQ ID NO: 15827 - DNA, 32 bp, Artificial
  oligonucleotide probe
ggaaagcggcctggaatggcgtgggggtccaa

SEQ ID NO: 15828 - DNA, 32 bp, Artificial
  oligonucleotide probe
gagcggtctggcggaatggcgtgggggtccaa

SEQ ID NO: 15829 - DNA, 32 bp, Artificial
  oligonucleotide probe
gagcgcctcctcgagcacgccaggcgaggtgg

SEQ ID NO: 15830 - DNA, 32 bp, Artificial
  oligonucleotide probe
gcgagtggcagggcctacgccaggcgaggtgg

SEQ ID NO: 15831 - DNA, 32 bp, Artificial
  oligonucleotide probe
gcagcctctggccgagtgctgggtgcaggcga

SEQ ID NO: 15832 - DNA, 32 bp, Artificial
  oligonucleotide probe
gcagcaccagcgtggctgctgggtgcaggcga

SEQ ID NO: 15833 - DNA, 32 bp, Artificial
  oligonucleotide probe
ccaaagcgggaatggcacgccaggcgaggtgg

SEQ ID NO: 15834 - DNA, 32 bp, Artificial
  oligonucleotide probe
cctccgaggacgcggaacgccaggcgaggtgg

SEQ ID NO: 15835 - DNA, 32 bp, Artificial
  oligonucleotide probe
accacggaagcgcggaggaagcctgcgacgga

SEQ ID NO: 15836 - DNA, 32 bp, Artificial
  oligonucleotide probe
gtgggacgacgcgcgaggaagcctgcgacgga

SEQ ID NO: 15837 - DNA, 32 bp, Artificial
  oligonucleotide probe
ggtccggagcagacgcagcggtccgcgagagc

SEQ ID NO: 15838 - DNA, 32 bp, Artificial
  oligonucleotide probe
gcctgcgagagctggcagcggtccgcgagagc

SEQ ID NO: 15839 - DNA, 32 bp, Artificial
  oligonucleotide probe
acgcgagcgggtgcaggacggcgagtgggcag

SEQ ID NO: 15840 - DNA, 32 bp, Artificial
  oligonucleotide probe
gcgatggccaggtggcgacggcgagtgggcag

SEQ ID NO: 15841 - DNA, 32 bp, Artificial
  oligonucleotide probe
tggcagcgggtcgtggcaccgggtggtcagcg

SEQ ID NO: 15842 - DNA, 32 bp, Artificial
  oligonucleotide probe
gcctgggtcaccacgccaccgggtggtcagcg

SEQ ID NO: 15843 - DNA, 32 bp, Artificial
  oligonucleotide probe
caggagcgggaagcgaacgcgcctgacgcctc

SEQ ID NO: 15844 - DNA, 32 bp, Artificial
  oligonucleotide probe
tggccaggcggagtggacgcgcctgacgcctc

SEQ ID NO: 15845 - DNA, 32 bp, Artificial
  oligonucleotide probe
ggaaagcggcctggaagtccggaagtgggcga

SEQ ID NO: 15846 - DNA, 32 bp, Artificial
  oligonucleotide probe
gagcggtctggcggaagtccggaagtgggcga

SEQ ID NO: 15847 - DNA, 32 bp, Artificial
  oligonucleotide probe
gagcgcctcctcgagccaggggaagggtcgga

SEQ ID NO: 15848 - DNA, 32 bp, Artificial
  oligonucleotide probe
gcgagtggcagggcctcaggggaagggtcgga

SEQ ID NO: 15849 - DNA, 32 bp, Artificial
  oligonucleotide probe
cctcagcgcggaaccagacgcaggcggagggt

SEQ ID NO: 15850 - DNA, 32 bp, Artificial
  oligonucleotide probe
gacggacgacgcgtgggacgcaggcggagggt

SEQ ID NO: 15851 - DNA, 32 bp, Artificial
  oligonucleotide probe
gcagcctctggccgagagcggtccgcgagagc

SEQ ID NO: 15852 - DNA, 32 bp, Artificial
  oligonucleotide probe
gcagcaccagcgtggcagcggtccgcgagagc

SEQ ID NO: 15853 - DNA, 32 bp, Artificial
  oligonucleotide probe
gagcgcctcctcgagcgcaggcagccaatggc

SEQ ID NO: 15854 - DNA, 32 bp, Artificial
  oligonucleotide probe
gcgagtggcagggcctgcaggcagccaatggc

SEQ ID NO: 15855 - DNA, 32 bp, Artificial
  oligonucleotide probe
gcagcctctggccgaggcagcggagcctgagc

SEQ ID NO: 15856 - DNA, 32 bp, Artificial
  oligonucleotide probe
gcagcaccagcgtggcgcagcggagcctgagc

SEQ ID NO: 15857 - DNA, 32 bp, Artificial
  oligonucleotide probe
caccgagccacccggaggaagcctgcgacgga

SEQ ID NO: 15858 - DNA, 32 bp, Artificial
  oligonucleotide probe
tggcacgcgagccaggggaagcctgcgacgga

SEQ ID NO: 15859 - DNA, 32 bp, Artificial
  oligonucleotide probe
ccaaagcgggaatggccaccgacgggaaacgc

SEQ ID NO: 15860 - DNA, 32 bp, Artificial
  oligonucleotide probe
cctccgaggacgcggacaccgacgggaaacgc

SEQ ID NO: 15861 - DNA, 32 bp, Artificial
  oligonucleotide probe
tggcagcgggtcgtggacgccaggcgaggtgg

SEQ ID NO: 15862 - DNA, 32 bp, Artificial
  oligonucleotide probe
gcctgggtcaccacgcacgccaggcgaggtgg

SEQ ID NO: 15863 - DNA, 32 bp, Artificial
  oligonucleotide probe
gcctgtgggtccgcgaacgcgcctgacgcctc

SEQ ID NO: 15864 - DNA, 32 bp, Artificial
  oligonucleotide probe
cctcgcctcgaggagcacgcgcctgacgcctc

SEQ ID NO: 15865 - DNA, 32 bp, Artificial
  oligonucleotide probe
tggcagcgggtcgtggaccatggcacgcgacg

SEQ ID NO: 15866 - DNA, 32 bp, Artificial
  oligonucleotide probe
gcctgggtcaccacgcaccatggcacgcgacg

SEQ ID NO: 15867 - DNA, 32 bp, Artificial
  oligonucleotide probe
ggtccggagcagacgccaccgggtggtcagcg

SEQ ID NO: 15868 - DNA, 32 bp, Artificial
  oligonucleotide probe
gcctgcgagagctggccaccgggtggtcagcg

SEQ ID NO: 15869 - DNA, 32 bp, Artificial
  oligonucleotide probe
caccgagccacccggaacgcaccagtcccgga

SEQ ID NO: 15870 - DNA, 32 bp, Artificial
  oligonucleotide probe
tggcacgcgagccaggacgcaccagtcccgga

SEQ ID NO: 15871 - DNA, 32 bp, Artificial
  oligonucleotide probe
gcagcctctggccgagtggcgtgggggtccaa

SEQ ID NO: 15872 - DNA, 32 bp, Artificial
  oligonucleotide probe
gcagcaccagcgtggctggcgtgggggtccaa

SEQ ID NO: 15873 - DNA, 32 bp, Artificial
  oligonucleotide probe
gcgagtggcagggcctgcagcctctggccgag

SEQ ID NO: 15874 - DNA, 32 bp, Artificial
  oligonucleotide probe
caccgagccacccggagcagcctctggccgag

SEQ ID NO: 15875 - DNA, 32 bp, Artificial
  oligonucleotide probe
ggtccggagcagacgctggcgtgggggtccaa

SEQ ID NO: 15876 - DNA, 32 bp, Artificial
  oligonucleotide probe
gcctgcgagagctggctggcgtgggggtccaa

SEQ ID NO: 15877 - DNA, 32 bp, Artificial
  oligonucleotide probe
ggtccggagcagacgcacgcaccagtcccgga

SEQ ID NO: 15878 - DNA, 32 bp, Artificial
  oligonucleotide probe
gcctgcgagagctggcacgcaccagtcccgga

SEQ ID NO: 15879 - DNA, 32 bp, Artificial
  oligonucleotide probe
tggcacgcgagccaggcctcagcgcggaacca

SEQ ID NO: 15880 - DNA, 32 bp, Artificial
  oligonucleotide probe
tggcacgcgagccaggacgcgggtcaccgtcc

SEQ ID NO: 15881 - DNA, 32 bp, Artificial
  oligonucleotide probe
tggcacgcgagccagggcctgggtcaccacgc

SEQ ID NO: 15882 - DNA, 32 bp, Artificial
  oligonucleotide probe
tggcacgcgagccaggacgcgagcgggtgcag

SEQ ID NO: 15883 - DNA, 32 bp, Artificial
  oligonucleotide probe
tggcacgcgagccagggcagcctctggccgag

SEQ ID NO: 15884 - DNA, 32 bp, Artificial
  oligonucleotide probe
tggcacgcgagccaggcctctggctggcccaa

SEQ ID NO: 15885 - DNA, 32 bp, Artificial
  oligonucleotide probe
tggcacgcgagccagggcaggtggtggcgagc

SEQ ID NO: 15886 - DNA, 32 bp, Artificial
  oligonucleotide probe
tggcacgcgagccagggcgatggccaggtggc

SEQ ID NO: 15887 - DNA, 32 bp, Artificial
  oligonucleotide probe
tggcacgcgagccagggcgacgagcgagccaa

SEQ ID NO: 15888 - DNA, 32 bp, Artificial
  oligonucleotide probe
tggcacgcgagccaggagcgccaatcacgggt

SEQ ID NO: 15889 - DNA, 32 bp, Artificial
  oligonucleotide probe
tggcacgcgagccaggtggccaggcggagtgg

SEQ ID NO: 15890 - DNA, 32 bp, Artificial
  oligonucleotide probe
tggcacgcgagccaggggaaagcggcctggaa

SEQ ID NO: 15891 - DNA, 32 bp, Artificial
  oligonucleotide probe
tggcacgcgagccagggacggacgacgcgtgg

SEQ ID NO: 15892 - DNA, 32 bp, Artificial
  oligonucleotide probe
tggcacgcgagccaggcaggagcgggaagcga

SEQ ID NO: 15893 - DNA, 32 bp, Artificial
  oligonucleotide probe
tggcacgcgagccagggggtggaacgaggcga

SEQ ID NO: 15894 - DNA, 32 bp, Artificial
  oligonucleotide probe
tggcacgcgagccaggtggcagcgggtcgtgg

SEQ ID NO: 15895 - DNA, 32 bp, Artificial
  oligonucleotide probe
tggcacgcgagccagggcagcaccagcgtggc

SEQ ID NO: 15896 - DNA, 32 bp, Artificial
  oligonucleotide probe
agcgccaatcacgggtgcgaacgccctccagg

SEQ ID NO: 15897 - DNA, 32 bp, Artificial
  oligonucleotide probe
gacgcaggcggagggtgcgaacgccctccagg

SEQ ID NO: 15898 - DNA, 32 bp, Artificial
  oligonucleotide probe
acgcgggtcaccgtccgacgagcgcaccgcag

SEQ ID NO: 15899 - DNA, 32 bp, Artificial
  oligonucleotide probe
gcgagtggcagggcctgacgagcgcaccgcag

SEQ ID NO: 15900 - DNA, 32 bp, Artificial
  oligonucleotide probe
gcagcctctggccgaggtccgcaggtccgcct

SEQ ID NO: 15901 - DNA, 32 bp, Artificial
  oligonucleotide probe
gcagcaccagcgtggcgtccgcaggtccgcct

SEQ ID NO: 15902 - DNA, 32 bp, Artificial
  oligonucleotide probe
gtccgagcagcggcctacgctgctgcgaacca

SEQ ID NO: 15903 - DNA, 32 bp, Artificial
  oligonucleotide probe
caggagcgggaagcgaacgctgctgcgaacca

SEQ ID NO: 15904 - DNA, 32 bp, Artificial
  oligonucleotide probe
gtggcggaggtcggaagtccccaaagcggcag

SEQ ID NO: 15905 - DNA, 32 bp, Artificial
  oligonucleotide probe
gacgcaggcggagggtgtccccaaagcggcag

SEQ ID NO: 15906 - DNA, 32 bp, Artificial
  oligonucleotide probe
tggcagcgggtcgtggtcaccggagccttggc

SEQ ID NO: 15907 - DNA, 32 bp, Artificial
  oligonucleotide probe
gcctgggtcaccacgctcaccggagccttggc

SEQ ID NO: 15908 - DNA, 32 bp, Artificial
  oligonucleotide probe
gcaggtggtggcgagcgagcgggtgtggagcg

SEQ ID NO: 15909 - DNA, 32 bp, Artificial
  oligonucleotide probe
tggccaggcggagtgggagcgggtgtggagcg

SEQ ID NO: 15910 - DNA, 32 bp, Artificial
  oligonucleotide probe
gtggcggaggtcggaaggtcgagctggcgcag

SEQ ID NO: 15911 - DNA, 32 bp, Artificial
  oligonucleotide probe
cctctggctggcccaaggtcgagctggcgcag

SEQ ID NO: 15912 - DNA, 32 bp, Artificial
  oligonucleotide probe
ggtccggagcagacgcagcgcaggagacgcct

SEQ ID NO: 15913 - DNA, 32 bp, Artificial
  oligonucleotide probe
gcctgcgagagctggcagcgcaggagacgcct

SEQ ID NO: 15914 - DNA, 32 bp, Artificial
  oligonucleotide probe
gagcggtctggcggaatcaccggagccttggc

SEQ ID NO: 15915 - DNA, 32 bp, Artificial
  oligonucleotide probe
gagcgcctcctcgagctcaccggagccttggc

SEQ ID NO: 15916 - DNA, 32 bp, Artificial
  oligonucleotide probe
tggcagcgggtcgtggcggagacgcagggggt

SEQ ID NO: 15917 - DNA, 32 bp, Artificial
  oligonucleotide probe
gcctgggtcaccacgccggagacgcagggggt

SEQ ID NO: 15918 - DNA, 32 bp, Artificial
  oligonucleotide probe
caggggaagggtcggagtccccaaagcggcag

SEQ ID NO: 15919 - DNA, 32 bp, Artificial
  oligonucleotide probe
gtccgagcagcggcctgtccccaaagcggcag

SEQ ID NO: 15920 - DNA, 32 bp, Artificial
  oligonucleotide probe
acgcgggtcaccgtccgcgaacgccctccagg

SEQ ID NO: 15921 - DNA, 32 bp, Artificial
  oligonucleotide probe
gcctcggagacggcaggcgaacgccctccagg

SEQ ID NO: 15922 - DNA, 32 bp, Artificial
  oligonucleotide probe
acgcggaagacgtggcgtccccaaagcggcag

SEQ ID NO: 15923 - DNA, 32 bp, Artificial
  oligonucleotide probe
gcctcggagacggcaggtccccaaagcggcag

SEQ ID NO: 15924 - DNA, 32 bp, Artificial
  oligonucleotide probe
gacggcgagtgggcaggtccccaaagcggcag

SEQ ID NO: 15925 - DNA, 32 bp, Artificial
  oligonucleotide probe
acgcgcctgacgcctcgtccccaaagcggcag

SEQ ID NO: 15926 - DNA, 32 bp, Artificial
  oligonucleotide probe
tggcacgcgagccaggtcaccggagccttggc

SEQ ID NO: 15927 - DNA, 32 bp, Artificial
  oligonucleotide probe
tggcggtcgcctcgagtcaccggagccttggc

SEQ ID NO: 15928 - DNA, 32 bp, Artificial
  oligonucleotide probe
cctcagcgcggaaccatcaccggagccttggc

SEQ ID NO: 15929 - DNA, 32 bp, Artificial
  oligonucleotide probe
ggaaagcggcctggaatcaccggagccttggc

SEQ ID NO: 15930 - DNA, 32 bp, Artificial
  oligonucleotide probe
tggcggtcgcctcgagcggagacgcagggggt

SEQ ID NO: 15931 - DNA, 32 bp, Artificial
  oligonucleotide probe
agcgagcggtggacgccggagacgcagggggt

SEQ ID NO: 15932 - DNA, 32 bp, Artificial
  oligonucleotide probe
cctctggctggcccaagtccgcaggtccgcct

SEQ ID NO: 15933 - DNA, 32 bp, Artificial
  oligonucleotide probe
ggaaagcggcctggaagtccgcaggtccgcct

SEQ ID NO: 15934 - DNA, 32 bp, Artificial
  oligonucleotide probe
gcagcctctggccgagagcgcaggagacgcct

SEQ ID NO: 15935 - DNA, 32 bp, Artificial
  oligonucleotide probe
gcagcaccagcgtggcagcgcaggagacgcct

SEQ ID NO: 15936 - DNA, 32 bp, Artificial
  oligonucleotide probe
agcgccaatcacgggttcaccggagccttggc

SEQ ID NO: 15937 - DNA, 32 bp, Artificial
  oligonucleotide probe
acgcgggtcaccgtcctcaccggagccttggc

SEQ ID NO: 15938 - DNA, 32 bp, Artificial
  oligonucleotide probe
gtggcaggagcgacgcggtcgagctggcgcag

SEQ ID NO: 15939 - DNA, 32 bp, Artificial
  oligonucleotide probe
gtgggacgacgcgcgaggtcgagctggcgcag

SEQ ID NO: 15940 - DNA, 32 bp, Artificial
  oligonucleotide probe
tggcgtgggggtccaaacgctgctgcgaacca

SEQ ID NO: 15941 - DNA, 32 bp, Artificial
  oligonucleotide probe
tgctgggtgcaggcgaacgctgctgcgaacca

SEQ ID NO: 15942 - DNA, 32 bp, Artificial
  oligonucleotide probe
cggacaggacgctggcgtccccaaagcggcag

SEQ ID NO: 15943 - DNA, 32 bp, Artificial
  oligonucleotide probe
gcaggcagccaatggcgtccccaaagcggcag

SEQ ID NO: 15944 - DNA, 32 bp, Artificial
  oligonucleotide probe
gcgaagcggcgaggtccggatgctgcgagcag

SEQ ID NO: 15945 - DNA, 32 bp, Artificial
  oligonucleotide probe
gggttggccgagtggccggatgctgcgagcag

SEQ ID NO: 15946 - DNA, 32 bp, Artificial
  oligonucleotide probe
agcgccaatcacgggtgtgggcctcctcccaa

SEQ ID NO: 15947 - DNA, 32 bp, Artificial
  oligonucleotide probe
acgcgggtcaccgtccgtgggcctcctcccaa

SEQ ID NO: 15948 - DNA, 32 bp, Artificial
  oligonucleotide probe
cctccgaggacgcggaggtcgagctggcgcag

SEQ ID NO: 15949 - DNA, 32 bp, Artificial
  oligonucleotide probe
gcctgcgagagctggcggtcgagctggcgcag

SEQ ID NO: 15950 - DNA, 32 bp, Artificial
  oligonucleotide probe
accacggaagcgcggagtgggcctcctcccaa

SEQ ID NO: 15951 - DNA, 32 bp, Artificial
  oligonucleotide probe
gtgggacgacgcgcgagtgggcctcctcccaa

SEQ ID NO: 15952 - DNA, 32 bp, Artificial
  oligonucleotide probe
caccgagccacccggagagcgggtgtggagcg

SEQ ID NO: 15953 - DNA, 32 bp, Artificial
  oligonucleotide probe
caggcacccaggcggagagcgggtgtggagcg

SEQ ID NO: 15954 - DNA, 32 bp, Artificial
  oligonucleotide probe
gtggcaggagcgacgccggatgctgcgagcag

SEQ ID NO: 15955 - DNA, 32 bp, Artificial
  oligonucleotide probe
gtgggacgacgcgcgacggatgctgcgagcag

SEQ ID NO: 15956 - DNA, 32 bp, Artificial
  oligonucleotide probe
tggcagcgggtcgtggacgctgctgcgaacca

SEQ ID NO: 15957 - DNA, 32 bp, Artificial
  oligonucleotide probe
gcctgggtcaccacgcacgctgctgcgaacca

SEQ ID NO: 15958 - DNA, 32 bp, Artificial
  oligonucleotide probe
caccgggtggtcagcggtccccaaagcggcag

SEQ ID NO: 15959 - DNA, 32 bp, Artificial
  oligonucleotide probe
ggtcgacgacgccgaggtccccaaagcggcag

SEQ ID NO: 15960 - DNA, 32 bp, Artificial
  oligonucleotide probe
ggtccggagcagacgcgtgggcctcctcccaa

SEQ ID NO: 15961 - DNA, 32 bp, Artificial
  oligonucleotide probe
gcctgcgagagctggcgtgggcctcctcccaa

SEQ ID NO: 15962 - DNA, 32 bp, Artificial
  oligonucleotide probe
tggcagcgggtcgtgggtgggcctcctcccaa

SEQ ID NO: 15963 - DNA, 32 bp, Artificial
  oligonucleotide probe
gcctgggtcaccacgcgtgggcctcctcccaa

SEQ ID NO: 15964 - DNA, 32 bp, Artificial
  oligonucleotide probe
gacgcaggcggagggtacgctgctgcgaacca

SEQ ID NO: 15965 - DNA, 32 bp, Artificial
  oligonucleotide probe
acgcggtccaccgtggacgctgctgcgaacca

SEQ ID NO: 15966 - DNA, 32 bp, Artificial
  oligonucleotide probe
ccaaagcgggaatggcgtccccaaagcggcag

SEQ ID NO: 15967 - DNA, 32 bp, Artificial
  oligonucleotide probe
ggtccggagcagacgcgtccccaaagcggcag

SEQ ID NO: 15968 - DNA, 32 bp, Artificial
  oligonucleotide probe
caccgggtggtcagcgacgctgctgcgaacca

SEQ ID NO: 15969 - DNA, 32 bp, Artificial
  oligonucleotide probe
ggtcgacgacgccgagacgctgctgcgaacca

SEQ ID NO: 15970 - DNA, 32 bp, Artificial
  oligonucleotide probe
gcagcctctggccgagtcaccggagccttggc

SEQ ID NO: 15971 - DNA, 32 bp, Artificial
  oligonucleotide probe
gcagcaccagcgtggctcaccggagccttggc

SEQ ID NO: 15972 - DNA, 32 bp, Artificial
  oligonucleotide probe
tggcggtcgcctcgagcggatgctgcgagcag

SEQ ID NO: 15973 - DNA, 32 bp, Artificial
  oligonucleotide probe
agcgagcggtggacgccggatgctgcgagcag

SEQ ID NO: 15974 - DNA, 32 bp, Artificial
  oligonucleotide probe
ggaaagcggcctggaacggatgctgcgagcag

SEQ ID NO: 15975 - DNA, 32 bp, Artificial
  oligonucleotide probe
gagcggtctggcggaacggatgctgcgagcag

SEQ ID NO: 15976 - DNA, 32 bp, Artificial
  oligonucleotide probe
cctcgcctcgaggagcgcgaacgccctccagg

SEQ ID NO: 15977 - DNA, 32 bp, Artificial
  oligonucleotide probe
gtggcaggagcgacgcgcgaacgccctccagg

SEQ ID NO: 15978 - DNA, 32 bp, Artificial
  oligonucleotide probe
accatggcacgcgacggtccccaaagcggcag

SEQ ID NO: 15979 - DNA, 32 bp, Artificial
  oligonucleotide probe
acgccaggcgaggtgggtccccaaagcggcag

SEQ ID NO: 15980 - DNA, 32 bp, Artificial
  oligonucleotide probe
caccgacgggaaacgcgcgaacgccctccagg

SEQ ID NO: 15981 - DNA, 32 bp, Artificial
  oligonucleotide probe
gtccggaagtgggcgagcgaacgccctccagg

SEQ ID NO: 15982 - DNA, 32 bp, Artificial
  oligonucleotide probe
gcctgtgggtccgcgacggatgctgcgagcag

SEQ ID NO: 15983 - DNA, 32 bp, Artificial
  oligonucleotide probe
gacggggtcggacgagcggatgctgcgagcag

SEQ ID NO: 15984 - DNA, 32 bp, Artificial
  oligonucleotide probe
cctctggctggcccaagacgagcgcaccgcag

SEQ ID NO: 15985 - DNA, 32 bp, Artificial
  oligonucleotide probe
gcgacgagcgagccaagacgagcgcaccgcag

SEQ ID NO: 15986 - DNA, 32 bp, Artificial
  oligonucleotide probe
gacggcgagtgggcagacgctgctgcgaacca

SEQ ID NO: 15987 - DNA, 32 bp, Artificial
  oligonucleotide probe
acgcgcctgacgcctcacgctgctgcgaacca

SEQ ID NO: 15988 - DNA, 32 bp, Artificial
  oligonucleotide probe
ggaaagcggcctggaaagcgcaggagacgcct

SEQ ID NO: 15989 - DNA, 32 bp, Artificial
  oligonucleotide probe
gagcggtctggcggaaagcgcaggagacgcct

SEQ ID NO: 15990 - DNA, 32 bp, Artificial
  oligonucleotide probe
caccgagccacccggatcaccggagccttggc

SEQ ID NO: 15991 - DNA, 32 bp, Artificial
  oligonucleotide probe
caggcacccaggcggatcaccggagccttggc

SEQ ID NO: 15992 - DNA, 32 bp, Artificial
  oligonucleotide probe
gacggggtcggacgaggtccgcaggtccgcct

SEQ ID NO: 15993 - DNA, 32 bp, Artificial
  oligonucleotide probe
gtggcaggagcgacgcgtccgcaggtccgcct

SEQ ID NO: 15994 - DNA, 32 bp, Artificial
  oligonucleotide probe
acgccaggcgaggtggggtcgagctggcgcag

SEQ ID NO: 15995 - DNA, 32 bp, Artificial
  oligonucleotide probe
caggggaagggtcggaggtcgagctggcgcag

SEQ ID NO: 15996 - DNA, 32 bp, Artificial
  oligonucleotide probe
cctcgcctcgaggagctcaccggagccttggc

SEQ ID NO: 15997 - DNA, 32 bp, Artificial
  oligonucleotide probe
gtggcaggagcgacgctcaccggagccttggc

SEQ ID NO: 15998 - DNA, 32 bp, Artificial
  oligonucleotide probe
tggcagcgggtcgtgggagcgggtgtggagcg

SEQ ID NO: 15999 - DNA, 32 bp, Artificial
  oligonucleotide probe
ggaaagcggcctggaagagcgggtgtggagcg

SEQ ID NO: 16000 - DNA, 32 bp, Artificial
  oligonucleotide probe
gacggacgacgcgtgggagcgggtgtggagcg

SEQ ID NO: 16001 - DNA, 32 bp, Artificial
  oligonucleotide probe
gcgatggccaggtggcgagcgggtgtggagcg

SEQ ID NO: 16002 - DNA, 32 bp, Artificial
  oligonucleotide probe
gcgatggccaggtggcgcgaacgccctccagg

SEQ ID NO: 16003 - DNA, 32 bp, Artificial
  oligonucleotide probe
gcaggcagccaatggcgcgaacgccctccagg

SEQ ID NO: 16004 - DNA, 32 bp, Artificial
  oligonucleotide probe
cctcagcgcggaaccagacgagcgcaccgcag

SEQ ID NO: 16005 - DNA, 32 bp, Artificial
  oligonucleotide probe
gacggacgacgcgtgggacgagcgcaccgcag

SEQ ID NO: 16006 - DNA, 32 bp, Artificial
  oligonucleotide probe
acgcggtccaccgtgggtccccaaagcggcag

SEQ ID NO: 16007 - DNA, 32 bp, Artificial
  oligonucleotide probe
tggcgtgggggtccaagtccccaaagcggcag

SEQ ID NO: 16008 - DNA, 32 bp, Artificial
  oligonucleotide probe
tggcgtgggggtccaaggtcgagctggcgcag

SEQ ID NO: 16009 - DNA, 32 bp, Artificial
  oligonucleotide probe
tgctgggtgcaggcgaggtcgagctggcgcag

SEQ ID NO: 16010 - DNA, 32 bp, Artificial
  oligonucleotide probe
gcctgtgggtccgcgaagcgcaggagacgcct

SEQ ID NO: 16011 - DNA, 32 bp, Artificial
  oligonucleotide probe
cctcgcctcgaggagcagcgcaggagacgcct

SEQ ID NO: 16012 - DNA, 32 bp, Artificial
  oligonucleotide probe
gcctgtgggtccgcgagacgagcgcaccgcag

SEQ ID NO: 16013 - DNA, 32 bp, Artificial
  oligonucleotide probe
cctcgcctcgaggagcgacgagcgcaccgcag

SEQ ID NO: 16014 - DNA, 32 bp, Artificial
  oligonucleotide probe
ggtccggagcagacgccggagacgcagggggt

SEQ ID NO: 16015 - DNA, 32 bp, Artificial
  oligonucleotide probe
gcctgcgagagctggccggagacgcagggggt

SEQ ID NO: 16016 - DNA, 32 bp, Artificial
  oligonucleotide probe
gagcgcctcctcgagcagcgcaggagacgcct

SEQ ID NO: 16017 - DNA, 32 bp, Artificial
  oligonucleotide probe
gcgagtggcagggcctagcgcaggagacgcct

SEQ ID NO: 16018 - DNA, 32 bp, Artificial
  oligonucleotide probe
gagcggtctggcggaagagcgggtgtggagcg

SEQ ID NO: 16019 - DNA, 32 bp, Artificial
  oligonucleotide probe
gagcgcctcctcgagcgagcgggtgtggagcg

SEQ ID NO: 16020 - DNA, 32 bp, Artificial
  oligonucleotide probe
gcagcaccagcgtggcacgctgctgcgaacca

SEQ ID NO: 16021 - DNA, 32 bp, Artificial
  oligonucleotide probe
ggtccggagcagacgcacgctgctgcgaacca

SEQ ID NO: 16022 - DNA, 32 bp, Artificial
  oligonucleotide probe
gacggggtcggacgaggtgggcctcctcccaa

SEQ ID NO: 16023 - DNA, 32 bp, Artificial
  oligonucleotide probe
gtggcaggagcgacgcgtgggcctcctcccaa

SEQ ID NO: 16024 - DNA, 32 bp, Artificial
  oligonucleotide probe
tggcagcgggtcgtgggacgagcgcaccgcag

SEQ ID NO: 16025 - DNA, 32 bp, Artificial
  oligonucleotide probe
gcctgggtcaccacgcgacgagcgcaccgcag

SEQ ID NO: 16026 - DNA, 32 bp, Artificial
  oligonucleotide probe
gagcgcgacacccaggacgctgctgcgaacca

SEQ ID NO: 16027 - DNA, 32 bp, Artificial
  oligonucleotide probe
cggacaggacgctggcacgctgctgcgaacca

SEQ ID NO: 16028 - DNA, 32 bp, Artificial
  oligonucleotide probe
ccaaagcgggaatggccggagacgcagggggt

SEQ ID NO: 16029 - DNA, 32 bp, Artificial
  oligonucleotide probe
cctccgaggacgcggacggagacgcagggggt

SEQ ID NO: 16030 - DNA, 32 bp, Artificial
  oligonucleotide probe
ggtccggagcagacgccggatgctgcgagcag

SEQ ID NO: 16031 - DNA, 32 bp, Artificial
  oligonucleotide probe
gcctgcgagagctggccggatgctgcgagcag

SEQ ID NO: 16032 - DNA, 32 bp, Artificial
  oligonucleotide probe
gggttggccgagtggcgtccccaaagcggcag

SEQ ID NO: 16033 - DNA, 32 bp, Artificial
  oligonucleotide probe
gcctgtgggtccgcgagtccccaaagcggcag

SEQ ID NO: 16034 - DNA, 32 bp, Artificial
  oligonucleotide probe
tggcgggtgacggtggcggatgctgcgagcag

SEQ ID NO: 16035 - DNA, 32 bp, Artificial
  oligonucleotide probe
cctcgcctcgaggagccggatgctgcgagcag

SEQ ID NO: 16036 - DNA, 32 bp, Artificial
  oligonucleotide probe
ccaaagcgggaatggcgacgagcgcaccgcag

SEQ ID NO: 16037 - DNA, 32 bp, Artificial
  oligonucleotide probe
cctccgaggacgcggagacgagcgcaccgcag

SEQ ID NO: 16038 - DNA, 32 bp, Artificial
  oligonucleotide probe
caggggaagggtcggagcgaacgccctccagg

SEQ ID NO: 16039 - DNA, 32 bp, Artificial
  oligonucleotide probe
gtccgagcagcggcctgcgaacgccctccagg

SEQ ID NO: 16040 - DNA, 32 bp, Artificial
  oligonucleotide probe
gcctagcgcctcgacggtccccaaagcggcag

SEQ ID NO: 16041 - DNA, 32 bp, Artificial
  oligonucleotide probe
ggaagcctgcgacggagtccccaaagcggcag

SEQ ID NO: 16042 - DNA, 32 bp, Artificial
  oligonucleotide probe
gcctgggtcaccacgcgagcgggtgtggagcg

SEQ ID NO: 16043 - DNA, 32 bp, Artificial
  oligonucleotide probe
gcgagtggcagggcctgagcgggtgtggagcg

SEQ ID NO: 16044 - DNA, 32 bp, Artificial
  oligonucleotide probe
gggtggaacgaggcgaagcgcaggagacgcct

SEQ ID NO: 16045 - DNA, 32 bp, Artificial
  oligonucleotide probe
gcaggtggtggcgagcagcgcaggagacgcct

SEQ ID NO: 16046 - DNA, 32 bp, Artificial
  oligonucleotide probe
acgcggtccaccgtgggcgaacgccctccagg

SEQ ID NO: 16047 - DNA, 32 bp, Artificial
  oligonucleotide probe
tggcgtgggggtccaagcgaacgccctccagg

SEQ ID NO: 16048 - DNA, 32 bp, Artificial
  oligonucleotide probe
caccgggtggtcagcgggtcgagctggcgcag

SEQ ID NO: 16049 - DNA, 32 bp, Artificial
  oligonucleotide probe
ggtcgacgacgccgagggtcgagctggcgcag

SEQ ID NO: 16050 - DNA, 32 bp, Artificial
  oligonucleotide probe
caccgagccacccggagtccgcaggtccgcct

SEQ ID NO: 16051 - DNA, 32 bp, Artificial
  oligonucleotide probe
caggcacccaggcggagtccgcaggtccgcct

SEQ ID NO: 16052 - DNA, 32 bp, Artificial
  oligonucleotide probe
agcgagcggtggacgcgcgaacgccctccagg

SEQ ID NO: 16053 - DNA, 32 bp, Artificial
  oligonucleotide probe
tggcgggtgacggtgggcgaacgccctccagg

SEQ ID NO: 16054 - DNA, 32 bp, Artificial
  oligonucleotide probe
accacggaagcgcggaacgctgctgcgaacca

SEQ ID NO: 16055 - DNA, 32 bp, Artificial
  oligonucleotide probe
gcaggcagccaatggcacgctgctgcgaacca

SEQ ID NO: 16056 - DNA, 32 bp, Artificial
  oligonucleotide probe
gacggacgacgcgtgggcgaacgccctccagg

SEQ ID NO: 16057 - DNA, 32 bp, Artificial
  oligonucleotide probe
gagcgcgacacccagggcgaacgccctccagg

SEQ ID NO: 16058 - DNA, 32 bp, Artificial
  oligonucleotide probe
ggtccggagcagacgctcaccggagccttggc

SEQ ID NO: 16059 - DNA, 32 bp, Artificial
  oligonucleotide probe
gcctgcgagagctggctcaccggagccttggc

SEQ ID NO: 16060 - DNA, 32 bp, Artificial
  oligonucleotide probe
gggtggaacgaggcgaggtcgagctggcgcag

SEQ ID NO: 16061 - DNA, 32 bp, Artificial
  oligonucleotide probe
accatggcacgcgacgggtcgagctggcgcag

SEQ ID NO: 16062 - DNA, 32 bp, Artificial
  oligonucleotide probe
cctcgcctcgaggagcgagcgggtgtggagcg

SEQ ID NO: 16063 - DNA, 32 bp, Artificial
  oligonucleotide probe
gtggcaggagcgacgcgagcgggtgtggagcg

SEQ ID NO: 16064 - DNA, 32 bp, Artificial
  oligonucleotide probe
gtccacgctggcgacgggtcgagctggcgcag

SEQ ID NO: 16065 - DNA, 32 bp, Artificial
  oligonucleotide probe
cctcagcgcggaaccaggtcgagctggcgcag

SEQ ID NO: 16066 - DNA, 32 bp, Artificial
  oligonucleotide probe
gcctagcgcctcgacggcgaacgccctccagg

SEQ ID NO: 16067 - DNA, 32 bp, Artificial
  oligonucleotide probe
ggaagcctgcgacggagcgaacgccctccagg

SEQ ID NO: 16068 - DNA, 32 bp, Artificial
  oligonucleotide probe
accacggaagcgcggaagcgcaggagacgcct

SEQ ID NO: 16069 - DNA, 32 bp, Artificial
  oligonucleotide probe
gtgggacgacgcgcgaagcgcaggagacgcct

SEQ ID NO: 16070 - DNA, 32 bp, Artificial
  oligonucleotide probe
gcgacgagcgagccaaggtcgagctggcgcag

SEQ ID NO: 16071 - DNA, 32 bp, Artificial
  oligonucleotide probe
gcctcggagacggcagggtcgagctggcgcag

SEQ ID NO: 16072 - DNA, 32 bp, Artificial
  oligonucleotide probe
accacggaagcgcggagagcgggtgtggagcg

SEQ ID NO: 16073 - DNA, 32 bp, Artificial
  oligonucleotide probe
ccaaagcgggaatggcgagcgggtgtggagcg

SEQ ID NO: 16074 - DNA, 32 bp, Artificial
  oligonucleotide probe
gcctgtgggtccgcgagtccgcaggtccgcct

SEQ ID NO: 16075 - DNA, 32 bp, Artificial
  oligonucleotide probe
cctcgcctcgaggagcgtccgcaggtccgcct

SEQ ID NO: 16076 - DNA, 32 bp, Artificial
  oligonucleotide probe
caccgacgggaaacgcacgctgctgcgaacca

SEQ ID NO: 16077 - DNA, 32 bp, Artificial
  oligonucleotide probe
gtccggaagtgggcgaacgctgctgcgaacca

SEQ ID NO: 16078 - DNA, 32 bp, Artificial
  oligonucleotide probe
gcagcctctggccgaggtgggcctcctcccaa

SEQ ID NO: 16079 - DNA, 32 bp, Artificial
  oligonucleotide probe
gcagcaccagcgtggcgtgggcctcctcccaa

SEQ ID NO: 16080 - DNA, 32 bp, Artificial
  oligonucleotide probe
caccgagccacccggagacgagcgcaccgcag

SEQ ID NO: 16081 - DNA, 32 bp, Artificial
  oligonucleotide probe
caggcacccaggcggagacgagcgcaccgcag

SEQ ID NO: 16082 - DNA, 32 bp, Artificial
  oligonucleotide probe
gcgaagcggcgaggtcacgctgctgcgaacca

SEQ ID NO: 16083 - DNA, 32 bp, Artificial
  oligonucleotide probe
gcctcggagacggcagacgctgctgcgaacca

SEQ ID NO: 16084 - DNA, 32 bp, Artificial
  oligonucleotide probe
gagcggtctggcggaagtccgcaggtccgcct

SEQ ID NO: 16085 - DNA, 32 bp, Artificial
  oligonucleotide probe
gagcgcctcctcgagcgtccgcaggtccgcct

SEQ ID NO: 16086 - DNA, 32 bp, Artificial
  oligonucleotide probe
gcagcctctggccgagcggagacgcagggggt

SEQ ID NO: 16087 - DNA, 32 bp, Artificial
  oligonucleotide probe
gcagcaccagcgtggccggagacgcagggggt

SEQ ID NO: 16088 - DNA, 32 bp, Artificial
  oligonucleotide probe
gcctgtgggtccgcgatcaccggagccttggc

SEQ ID NO: 16089 - DNA, 32 bp, Artificial
  oligonucleotide probe
gacggggtcggacgagtcaccggagccttggc

SEQ ID NO: 16090 - DNA, 32 bp, Artificial
  oligonucleotide probe
gcagcctctggccgagcggatgctgcgagcag

SEQ ID NO: 16091 - DNA, 32 bp, Artificial
  oligonucleotide probe
gcagcaccagcgtggccggatgctgcgagcag

SEQ ID NO: 16092 - DNA, 32 bp, Artificial
  oligonucleotide probe
tggcacgcgagccagggtccgcaggtccgcct

SEQ ID NO: 16093 - DNA, 32 bp, Artificial
  oligonucleotide probe
tggcggtcgcctcgaggtccgcaggtccgcct

SEQ ID NO: 16094 - DNA, 32 bp, Artificial
  oligonucleotide probe
gggtggaacgaggcgaacgctgctgcgaacca

SEQ ID NO: 16095 - DNA, 32 bp, Artificial
  oligonucleotide probe
gcaggtggtggcgagcacgctgctgcgaacca

SEQ ID NO: 16096 - DNA, 32 bp, Artificial
  oligonucleotide probe
gggtggaacgaggcgagtgggcctcctcccaa

SEQ ID NO: 16097 - DNA, 32 bp, Artificial
  oligonucleotide probe
ggaaagcggcctggaagtgggcctcctcccaa

SEQ ID NO: 16098 - DNA, 32 bp, Artificial
  oligonucleotide probe
cctcgcctcgaggagcgtccccaaagcggcag

SEQ ID NO: 16099 - DNA, 32 bp, Artificial
  oligonucleotide probe
gtggcaggagcgacgcgtccccaaagcggcag

SEQ ID NO: 16100 - DNA, 32 bp, Artificial
  oligonucleotide probe
tggcgggtgacggtggggtcgagctggcgcag

SEQ ID NO: 16101 - DNA, 32 bp, Artificial
  oligonucleotide probe
cctcgcctcgaggagcggtcgagctggcgcag

SEQ ID NO: 16102 - DNA, 32 bp, Artificial
  oligonucleotide probe
gcctagcgcctcgacgggtcgagctggcgcag

SEQ ID NO: 16103 - DNA, 32 bp, Artificial
  oligonucleotide probe
ggaagcctgcgacggaggtcgagctggcgcag

SEQ ID NO: 16104 - DNA, 32 bp, Artificial
  oligonucleotide probe
ggaaagcggcctggaaacgctgctgcgaacca

SEQ ID NO: 16105 - DNA, 32 bp, Artificial
  oligonucleotide probe
gagcggtctggcggaaacgctgctgcgaacca

SEQ ID NO: 16106 - DNA, 32 bp, Artificial
  oligonucleotide probe
agcgccaatcacgggtacgctgctgcgaacca

SEQ ID NO: 16107 - DNA, 32 bp, Artificial
  oligonucleotide probe
caggcacccaggcggaacgctgctgcgaacca

SEQ ID NO: 16108 - DNA, 32 bp, Artificial
  oligonucleotide probe
accatggcacgcgacggcgaacgccctccagg

SEQ ID NO: 16109 - DNA, 32 bp, Artificial
  oligonucleotide probe
acgccaggcgaggtgggcgaacgccctccagg

SEQ ID NO: 16110 - DNA, 32 bp, Artificial
  oligonucleotide probe
gacggacgacgcgtggtcaccggagccttggc

SEQ ID NO: 16111 - DNA, 32 bp, Artificial
  oligonucleotide probe
gcgagtggcagggccttcaccggagccttggc

SEQ ID NO: 16112 - DNA, 32 bp, Artificial
  oligonucleotide probe
gacggacgacgcgtggacgctgctgcgaacca

SEQ ID NO: 16113 - DNA, 32 bp, Artificial
  oligonucleotide probe
gacggggtcggacgagacgctgctgcgaacca

SEQ ID NO: 16114 - DNA, 32 bp, Artificial
  oligonucleotide probe
gtccacgctggcgacgacgctgctgcgaacca

SEQ ID NO: 16115 - DNA, 32 bp, Artificial
  oligonucleotide probe
cctcagcgcggaaccaacgctgctgcgaacca

SEQ ID NO: 16116 - DNA, 32 bp, Artificial
  oligonucleotide probe
gcagcggagcctgagcgtccccaaagcggcag

SEQ ID NO: 16117 - DNA, 32 bp, Artificial
  oligonucleotide probe
acgcaccagtcccggagtccccaaagcggcag

SEQ ID NO: 16118 - DNA, 32 bp, Artificial
  oligonucleotide probe
acgcgagcgggtgcagggtcgagctggcgcag

SEQ ID NO: 16119 - DNA, 32 bp, Artificial
  oligonucleotide probe
gcaggcagccaatggcggtcgagctggcgcag

SEQ ID NO: 16120 - DNA, 32 bp, Artificial
  oligonucleotide probe
cctcagcgcggaaccaagcgcaggagacgcct

SEQ ID NO: 16121 - DNA, 32 bp, Artificial
  oligonucleotide probe
gacggacgacgcgtggagcgcaggagacgcct

SEQ ID NO: 16122 - DNA, 32 bp, Artificial
  oligonucleotide probe
gtgggacgacgcgcgagcgaacgccctccagg

SEQ ID NO: 16123 - DNA, 32 bp, Artificial
  oligonucleotide probe
cctccgaggacgcggagcgaacgccctccagg

SEQ ID NO: 16124 - DNA, 32 bp, Artificial
  oligonucleotide probe
ggaaagcggcctggaagcgaacgccctccagg

SEQ ID NO: 16125 - DNA, 32 bp, Artificial
  oligonucleotide probe
tggcggtcgcctcgaggcgaacgccctccagg

SEQ ID NO: 16126 - DNA, 32 bp, Artificial
  oligonucleotide probe
gcctgggtcaccacgcgtccccaaagcggcag

SEQ ID NO: 16127 - DNA, 32 bp, Artificial
  oligonucleotide probe
gcagcaccagcgtggcgtccccaaagcggcag

SEQ ID NO: 16128 - DNA, 32 bp, Artificial
  oligonucleotide probe
acgcggaagacgtggcgcgaacgccctccagg

SEQ ID NO: 16129 - DNA, 32 bp, Artificial
  oligonucleotide probe
gcgacgagcgagccaagcgaacgccctccagg

SEQ ID NO: 16130 - DNA, 32 bp, Artificial
  oligonucleotide probe
cctctggctggcccaacggagacgcagggggt

SEQ ID NO: 16131 - DNA, 32 bp, Artificial
  oligonucleotide probe
gcgacgagcgagccaacggagacgcagggggt

SEQ ID NO: 16132 - DNA, 32 bp, Artificial
  oligonucleotide probe
acgcgggtcaccgtcccggagacgcagggggt

SEQ ID NO: 16133 - DNA, 32 bp, Artificial
  oligonucleotide probe
gcaggtggtggcgagccggagacgcagggggt

SEQ ID NO: 16134 - DNA, 32 bp, Artificial
  oligonucleotide probe
gcgaagcggcgaggtccggagacgcagggggt

SEQ ID NO: 16135 - DNA, 32 bp, Artificial
  oligonucleotide probe
gggttggccgagtggccggagacgcagggggt

SEQ ID NO: 16136 - DNA, 32 bp, Artificial
  oligonucleotide probe
gacggacgacgcgtgggtccccaaagcggcag

SEQ ID NO: 16137 - DNA, 32 bp, Artificial
  oligonucleotide probe
gcgatggccaggtggcgtccccaaagcggcag

SEQ ID NO: 16138 - DNA, 32 bp, Artificial
  oligonucleotide probe
gcgagtggcagggcctgtccccaaagcggcag

SEQ ID NO: 16139 - DNA, 32 bp, Artificial
  oligonucleotide probe
caccgagccacccggagtccccaaagcggcag

SEQ ID NO: 16140 - DNA, 32 bp, Artificial
  oligonucleotide probe
caggcacccaggcggaggtcgagctggcgcag

SEQ ID NO: 16141 - DNA, 32 bp, Artificial
  oligonucleotide probe
gcgaagcggcgaggtcggtcgagctggcgcag

SEQ ID NO: 16142 - DNA, 32 bp, Artificial
  oligonucleotide probe
ccaaagcgggaatggcgtccgcaggtccgcct

SEQ ID NO: 16143 - DNA, 32 bp, Artificial
  oligonucleotide probe
cctccgaggacgcggagtccgcaggtccgcct

SEQ ID NO: 16144 - DNA, 32 bp, Artificial
  oligonucleotide probe
gggtggaacgaggcgagtccgcaggtccgcct

SEQ ID NO: 16145 - DNA, 32 bp, Artificial
  oligonucleotide probe
gcaggtggtggcgagcgtccgcaggtccgcct

SEQ ID NO: 16146 - DNA, 32 bp, Artificial
  oligonucleotide probe
ggtccggagcagacgcgtccgcaggtccgcct

SEQ ID NO: 16147 - DNA, 32 bp, Artificial
  oligonucleotide probe
gcctgcgagagctggcgtccgcaggtccgcct

SEQ ID NO: 16148 - DNA, 32 bp, Artificial
  oligonucleotide probe
gcctgcgagagctggcgcgaacgccctccagg

SEQ ID NO: 16149 - DNA, 32 bp, Artificial
  oligonucleotide probe
gagcgcctcctcgagcgcgaacgccctccagg

SEQ ID NO: 16150 - DNA, 32 bp, Artificial
  oligonucleotide probe
gcgacgagcgagccaaagcgcaggagacgcct

SEQ ID NO: 16151 - DNA, 32 bp, Artificial
  oligonucleotide probe
acgcgggtcaccgtccagcgcaggagacgcct

SEQ ID NO: 16152 - DNA, 32 bp, Artificial
  oligonucleotide probe
tggcggtcgcctcgagggtcgagctggcgcag

SEQ ID NO: 16153 - DNA, 32 bp, Artificial
  oligonucleotide probe
agcgagcggtggacgcggtcgagctggcgcag

SEQ ID NO: 16154 - DNA, 32 bp, Artificial
  oligonucleotide probe
gcgaagcggcgaggtcgacgagcgcaccgcag

SEQ ID NO: 16155 - DNA, 32 bp, Artificial
  oligonucleotide probe
tggcacgcgagccagggacgagcgcaccgcag

SEQ ID NO: 16156 - DNA, 32 bp, Artificial
  oligonucleotide probe
gcctagcgcctcgacgacgctgctgcgaacca

SEQ ID NO: 16157 - DNA, 32 bp, Artificial
  oligonucleotide probe
ggaagcctgcgacggaacgctgctgcgaacca

SEQ ID NO: 16158 - DNA, 32 bp, Artificial
  oligonucleotide probe
cctctggctggcccaacggatgctgcgagcag

SEQ ID NO: 16159 - DNA, 32 bp, Artificial
  oligonucleotide probe
gcgacgagcgagccaacggatgctgcgagcag

SEQ ID NO: 16160 - DNA, 32 bp, Artificial
  oligonucleotide probe
gggtggaacgaggcgacggagacgcagggggt

SEQ ID NO: 16161 - DNA, 32 bp, Artificial
  oligonucleotide probe
caggagcgggaagcgacggagacgcagggggt

SEQ ID NO: 16162 - DNA, 32 bp, Artificial
  oligonucleotide probe
tcacgccttggccaccggtcgagctggcgcag

SEQ ID NO: 16163 - DNA, 32 bp, Artificial
  oligonucleotide probe
caccgcgaggtcacgcggtcgagctggcgcag

SEQ ID NO: 16164 - DNA, 32 bp, Artificial
  oligonucleotide probe
tggcgggtgacggtggcggagacgcagggggt

SEQ ID NO: 16165 - DNA, 32 bp, Artificial
  oligonucleotide probe
cctcgcctcgaggagccggagacgcagggggt

SEQ ID NO: 16166 - DNA, 32 bp, Artificial
  oligonucleotide probe
gcctgtgggtccgcgacggagacgcagggggt

SEQ ID NO: 16167 - DNA, 32 bp, Artificial
  oligonucleotide probe
tggcacgcgagccaggcggagacgcagggggt

SEQ ID NO: 16168 - DNA, 32 bp, Artificial
  oligonucleotide probe
tggcacgcgagccagggtgggcctcctcccaa

SEQ ID NO: 16169 - DNA, 32 bp, Artificial
  oligonucleotide probe
tggcggtcgcctcgaggtgggcctcctcccaa

SEQ ID NO: 16170 - DNA, 32 bp, Artificial
  oligonucleotide probe
ccaaagcgggaatggcgtgggcctcctcccaa

SEQ ID NO: 16171 - DNA, 32 bp, Artificial
  oligonucleotide probe
cctccgaggacgcggagtgggcctcctcccaa

SEQ ID NO: 16172 - DNA, 32 bp, Artificial
  oligonucleotide probe
gtccacgctggcgacggcgaacgccctccagg

SEQ ID NO: 16173 - DNA, 32 bp, Artificial
  oligonucleotide probe
cctcagcgcggaaccagcgaacgccctccagg

SEQ ID NO: 16174 - DNA, 32 bp, Artificial
  oligonucleotide probe
cggacaggacgctggcgcgaacgccctccagg

SEQ ID NO: 16175 - DNA, 32 bp, Artificial
  oligonucleotide probe
acgcgagcgggtgcaggcgaacgccctccagg

SEQ ID NO: 16176 - DNA, 32 bp, Artificial
  oligonucleotide probe
gcgaagcggcgaggtctcaccggagccttggc

SEQ ID NO: 16177 - DNA, 32 bp, Artificial
  oligonucleotide probe
gggttggccgagtggctcaccggagccttggc

SEQ ID NO: 16178 - DNA, 32 bp, Artificial
  oligonucleotide probe
caccgacgggaaacgcggtcgagctggcgcag

SEQ ID NO: 16179 - DNA, 32 bp, Artificial
  oligonucleotide probe
gtccggaagtgggcgaggtcgagctggcgcag

SEQ ID NO: 16180 - DNA, 32 bp, Artificial
  oligonucleotide probe
tggcagcgggtcgtggagcgcaggagacgcct

SEQ ID NO: 16181 - DNA, 32 bp, Artificial
  oligonucleotide probe
gcctgggtcaccacgcagcgcaggagacgcct

SEQ ID NO: 16182 - DNA, 32 bp, Artificial
  oligonucleotide probe
acgcgagcgggtgcagcggagacgcagggggt

SEQ ID NO: 16183 - DNA, 32 bp, Artificial
  oligonucleotide probe
gcgatggccaggtggccggagacgcagggggt

SEQ ID NO: 16184 - DNA, 32 bp, Artificial
  oligonucleotide probe
gggtggaacgaggcgacggatgctgcgagcag

SEQ ID NO: 16185 - DNA, 32 bp, Artificial
  oligonucleotide probe
caggagcgggaagcgacggatgctgcgagcag

SEQ ID NO: 16186 - DNA, 32 bp, Artificial
  oligonucleotide probe
caccgagccacccggacggagacgcagggggt

SEQ ID NO: 16187 - DNA, 32 bp, Artificial
  oligonucleotide probe
caggcacccaggcggacggagacgcagggggt

SEQ ID NO: 16188 - DNA, 32 bp, Artificial
  oligonucleotide probe
ccaaagcgggaatggcagcgcaggagacgcct

SEQ ID NO: 16189 - DNA, 32 bp, Artificial
  oligonucleotide probe
cctccgaggacgcggaagcgcaggagacgcct

SEQ ID NO: 16190 - DNA, 32 bp, Artificial
  oligonucleotide probe
gtccacgctggcgacggtccccaaagcggcag

SEQ ID NO: 16191 - DNA, 32 bp, Artificial
  oligonucleotide probe
gagcgcgacacccagggtccccaaagcggcag

SEQ ID NO: 16192 - DNA, 32 bp, Artificial
  oligonucleotide probe
gcgaagcggcgaggtcgtgggcctcctcccaa

SEQ ID NO: 16193 - DNA, 32 bp, Artificial
  oligonucleotide probe
gggttggccgagtggcgtgggcctcctcccaa

SEQ ID NO: 16194 - DNA, 32 bp, Artificial
  oligonucleotide probe
gcagcggagcctgagcgcgaacgccctccagg

SEQ ID NO: 16195 - DNA, 32 bp, Artificial
  oligonucleotide probe
acgcaccagtcccggagcgaacgccctccagg

SEQ ID NO: 16196 - DNA, 32 bp, Artificial
  oligonucleotide probe
gcgaagcggcgaggtcgagcgggtgtggagcg

SEQ ID NO: 16197 - DNA, 32 bp, Artificial
  oligonucleotide probe
gggttggccgagtggcgagcgggtgtggagcg

SEQ ID NO: 16198 - DNA, 32 bp, Artificial
  oligonucleotide probe
gagcggtctggcggaagtgggcctcctcccaa

SEQ ID NO: 16199 - DNA, 32 bp, Artificial
  oligonucleotide probe
gagcgcctcctcgagcgtgggcctcctcccaa

SEQ ID NO: 16200 - DNA, 32 bp, Artificial
  oligonucleotide probe
gacggggtcggacgagggtcgagctggcgcag

SEQ ID NO: 16201 - DNA, 32 bp, Artificial
  oligonucleotide probe
accacggaagcgcggaggtcgagctggcgcag

SEQ ID NO: 16202 - DNA, 32 bp, Artificial
  oligonucleotide probe
agcgccaatcacgggtgtccgcaggtccgcct

SEQ ID NO: 16203 - DNA, 32 bp, Artificial
  oligonucleotide probe
gcgagtggcagggcctgtccgcaggtccgcct

SEQ ID NO: 16204 - DNA, 32 bp, Artificial
  oligonucleotide probe
gacggcgagtgggcagggtcgagctggcgcag

SEQ ID NO: 16205 - DNA, 32 bp, Artificial
  oligonucleotide probe
acgcgcctgacgcctcggtcgagctggcgcag

SEQ ID NO: 16206 - DNA, 32 bp, Artificial
  oligonucleotide probe
acgcgagcgggtgcaggtccgcaggtccgcct

SEQ ID NO: 16207 - DNA, 32 bp, Artificial
  oligonucleotide probe
gcgatggccaggtggcgtccgcaggtccgcct

SEQ ID NO: 16208 - DNA, 32 bp, Artificial
  oligonucleotide probe
gacggggtcggacgaggacgagcgcaccgcag

SEQ ID NO: 16209 - DNA, 32 bp, Artificial
  oligonucleotide probe
gtggcaggagcgacgcgacgagcgcaccgcag

SEQ ID NO: 16210 - DNA, 32 bp, Artificial
  oligonucleotide probe
gcgaagcggcgaggtcagcgcaggagacgcct

SEQ ID NO: 16211 - DNA, 32 bp, Artificial
  oligonucleotide probe
agcgagcggtggacgcagcgcaggagacgcct

SEQ ID NO: 16212 - DNA, 32 bp, Artificial
  oligonucleotide probe
agcgagcggtggacgcgtgggcctcctcccaa

SEQ ID NO: 16213 - DNA, 32 bp, Artificial
  oligonucleotide probe
tggcgggtgacggtgggtgggcctcctcccaa

SEQ ID NO: 16214 - DNA, 32 bp, Artificial
  oligonucleotide probe
tggcggtcgcctcgaggacgagcgcaccgcag

SEQ ID NO: 16215 - DNA, 32 bp, Artificial
  oligonucleotide probe
agcgagcggtggacgcgacgagcgcaccgcag

SEQ ID NO: 16216 - DNA, 32 bp, Artificial
  oligonucleotide probe
accacggaagcgcggacggatgctgcgagcag

SEQ ID NO: 16217 - DNA, 32 bp, Artificial
  oligonucleotide probe
tggcacgcgagccaggcggatgctgcgagcag

SEQ ID NO: 16218 - DNA, 32 bp, Artificial
  oligonucleotide probe
gacggggtcggacgagagcgcaggagacgcct

SEQ ID NO: 16219 - DNA, 32 bp, Artificial
  oligonucleotide probe
gtggcaggagcgacgcagcgcaggagacgcct

SEQ ID NO: 16220 - DNA, 32 bp, Artificial
  oligonucleotide probe
ggtccggagcagacgcgacgagcgcaccgcag

SEQ ID NO: 16221 - DNA, 32 bp, Artificial
  oligonucleotide probe
gcctgcgagagctggcgacgagcgcaccgcag

SEQ ID NO: 16222 - DNA, 32 bp, Artificial
  oligonucleotide probe
tggccaggcggagtggcggagacgcagggggt

SEQ ID NO: 16223 - DNA, 32 bp, Artificial
  oligonucleotide probe
gcgagtggcagggcctcggagacgcagggggt

SEQ ID NO: 16224 - DNA, 32 bp, Artificial
  oligonucleotide probe
gggtggaacgaggcgagagcgggtgtggagcg

SEQ ID NO: 16225 - DNA, 32 bp, Artificial
  oligonucleotide probe
caggagcgggaagcgagagcgggtgtggagcg

SEQ ID NO: 16226 - DNA, 32 bp, Artificial
  oligonucleotide probe
tggcagcgggtcgtgggtccgcaggtccgcct

SEQ ID NO: 16227 - DNA, 32 bp, Artificial
  oligonucleotide probe
gcctgggtcaccacgcgtccgcaggtccgcct

SEQ ID NO: 16228 - DNA, 32 bp, Artificial
  oligonucleotide probe
caggagcgggaagcgagacgagcgcaccgcag

SEQ ID NO: 16229 - DNA, 32 bp, Artificial
  oligonucleotide probe
tggccaggcggagtgggacgagcgcaccgcag

SEQ ID NO: 16230 - DNA, 32 bp, Artificial
  oligonucleotide probe
gacggcgagtgggcaggcgaacgccctccagg

SEQ ID NO: 16231 - DNA, 32 bp, Artificial
  oligonucleotide probe
acgcgcctgacgcctcgcgaacgccctccagg

SEQ ID NO: 16232 - DNA, 32 bp, Artificial
  oligonucleotide probe
gcagcggagcctgagcggtcgagctggcgcag

SEQ ID NO: 16233 - DNA, 32 bp, Artificial
  oligonucleotide probe
acgcaccagtcccggaggtcgagctggcgcag

SEQ ID NO: 16234 - DNA, 32 bp, Artificial
  oligonucleotide probe
acgcgagcgggtgcagagcgcaggagacgcct

SEQ ID NO: 16235 - DNA, 32 bp, Artificial
  oligonucleotide probe
gcgatggccaggtggcagcgcaggagacgcct

SEQ ID NO: 16236 - DNA, 32 bp, Artificial
  oligonucleotide probe
gcagcctctggccgaggcgaacgccctccagg

SEQ ID NO: 16237 - DNA, 32 bp, Artificial
  oligonucleotide probe
gcagcaccagcgtggcgcgaacgccctccagg

SEQ ID NO: 16238 - DNA, 32 bp, Artificial
  oligonucleotide probe
gagcggtctggcggaaggtcgagctggcgcag

SEQ ID NO: 16239 - DNA, 32 bp, Artificial
  oligonucleotide probe
tggcacgcgagccaggggtcgagctggcgcag

SEQ ID NO: 16240 - DNA, 32 bp, Artificial
  oligonucleotide probe
ccaaagcgggaatggctcaccggagccttggc

SEQ ID NO: 16241 - DNA, 32 bp, Artificial
  oligonucleotide probe
cctccgaggacgcggatcaccggagccttggc

SEQ ID NO: 16242 - DNA, 32 bp, Artificial
  oligonucleotide probe
gacgcaggcggagggtggtcgagctggcgcag

SEQ ID NO: 16243 - DNA, 32 bp, Artificial
  oligonucleotide probe
acgcggtccaccgtggggtcgagctggcgcag

SEQ ID NO: 16244 - DNA, 32 bp, Artificial
  oligonucleotide probe
gagcgcgacacccaggggtcgagctggcgcag

SEQ ID NO: 16245 - DNA, 32 bp, Artificial
  oligonucleotide probe
cggacaggacgctggcggtcgagctggcgcag

SEQ ID NO: 16246 - DNA, 32 bp, Artificial
  oligonucleotide probe
agcgagcggtggacgctcaccggagccttggc

SEQ ID NO: 16247 - DNA, 32 bp, Artificial
  oligonucleotide probe
tggcgggtgacggtggtcaccggagccttggc

SEQ ID NO: 16248 - DNA, 32 bp, Artificial
  oligonucleotide probe
gagcgcctcctcgagccggatgctgcgagcag

SEQ ID NO: 16249 - DNA, 32 bp, Artificial
  oligonucleotide probe
agcgccaatcacgggtcggatgctgcgagcag

SEQ ID NO: 16250 - DNA, 32 bp, Artificial
  oligonucleotide probe
acgccaggcgaggtggacgctgctgcgaacca

SEQ ID NO: 16251 - DNA, 32 bp, Artificial
  oligonucleotide probe
caggggaagggtcggaacgctgctgcgaacca

SEQ ID NO: 16252 - DNA, 32 bp, Artificial
  oligonucleotide probe
agcgagcggtggacgcgtccccaaagcggcag

SEQ ID NO: 16253 - DNA, 32 bp, Artificial
  oligonucleotide probe
tggcgggtgacggtgggtccccaaagcggcag

SEQ ID NO: 16254 - DNA, 32 bp, Artificial
  oligonucleotide probe
caggagcgggaagcgagcgaacgccctccagg

SEQ ID NO: 16255 - DNA, 32 bp, Artificial
  oligonucleotide probe
tggccaggcggagtgggcgaacgccctccagg

SEQ ID NO: 16256 - DNA, 32 bp, Artificial
  oligonucleotide probe
tcacgccttggccaccacgctgctgcgaacca

SEQ ID NO: 16257 - DNA, 32 bp, Artificial
  oligonucleotide probe
caccgcgaggtcacgcacgctgctgcgaacca

SEQ ID NO: 16258 - DNA, 32 bp, Artificial
  oligonucleotide probe
ccaaagcgggaatggcggtcgagctggcgcag

SEQ ID NO: 16259 - DNA, 32 bp, Artificial
  oligonucleotide probe
ggtccggagcagacgcggtcgagctggcgcag

SEQ ID NO: 16260 - DNA, 32 bp, Artificial
  oligonucleotide probe
gtccgagcagcggcctggtcgagctggcgcag

SEQ ID NO: 16261 - DNA, 32 bp, Artificial
  oligonucleotide probe
caggagcgggaagcgaggtcgagctggcgcag

SEQ ID NO: 16262 - DNA, 32 bp, Artificial
  oligonucleotide probe
gggttggccgagtggcgtccgcaggtccgcct

SEQ ID NO: 16263 - DNA, 32 bp, Artificial
  oligonucleotide probe
tggcgggtgacggtgggtccgcaggtccgcct

SEQ ID NO: 16264 - DNA, 32 bp, Artificial
  oligonucleotide probe
gcagcggagcctgagcacgctgctgcgaacca

SEQ ID NO: 16265 - DNA, 32 bp, Artificial
  oligonucleotide probe
acgcaccagtcccggaacgctgctgcgaacca

SEQ ID NO: 16266 - DNA, 32 bp, Artificial
  oligonucleotide probe
gcgacgagcgagccaaacgctgctgcgaacca

SEQ ID NO: 16267 - DNA, 32 bp, Artificial
  oligonucleotide probe
acgcgggtcaccgtccacgctgctgcgaacca

SEQ ID NO: 16268 - DNA, 32 bp, Artificial
  oligonucleotide probe
cctctggctggcccaagtgggcctcctcccaa

SEQ ID NO: 16269 - DNA, 32 bp, Artificial
  oligonucleotide probe
gcgacgagcgagccaagtgggcctcctcccaa

SEQ ID NO: 16270 - DNA, 32 bp, Artificial
  oligonucleotide probe
caggagcgggaagcgagtccgcaggtccgcct

SEQ ID NO: 16271 - DNA, 32 bp, Artificial
  oligonucleotide probe
tggccaggcggagtgggtccgcaggtccgcct

SEQ ID NO: 16272 - DNA, 32 bp, Artificial
  oligonucleotide probe
gcaggtggtggcgagcgtgggcctcctcccaa

SEQ ID NO: 16273 - DNA, 32 bp, Artificial
  oligonucleotide probe
gcgagtggcagggcctgtgggcctcctcccaa

SEQ ID NO: 16274 - DNA, 32 bp, Artificial
  oligonucleotide probe
gcagcctctggccgaggacgagcgcaccgcag

SEQ ID NO: 16275 - DNA, 32 bp, Artificial
  oligonucleotide probe
gcagcaccagcgtggcgacgagcgcaccgcag

SEQ ID NO: 16276 - DNA, 32 bp, Artificial
  oligonucleotide probe
cctcagcgcggaaccagagcgggtgtggagcg

SEQ ID NO: 16277 - DNA, 32 bp, Artificial
  oligonucleotide probe
acgcgagcgggtgcaggagcgggtgtggagcg

SEQ ID NO: 16278 - DNA, 32 bp, Artificial
  oligonucleotide probe
tcacgccttggccaccgcgaacgccctccagg

SEQ ID NO: 16279 - DNA, 32 bp, Artificial
  oligonucleotide probe
caccgcgaggtcacgcgcgaacgccctccagg

SEQ ID NO: 16280 - DNA, 32 bp, Artificial
  oligonucleotide probe
acgcgggtcaccgtcccggatgctgcgagcag

SEQ ID NO: 16281 - DNA, 32 bp, Artificial
  oligonucleotide probe
gcaggtggtggcgagccggatgctgcgagcag

SEQ ID NO: 16282 - DNA, 32 bp, Artificial
  oligonucleotide probe
accacggaagcgcggagacgagcgcaccgcag

SEQ ID NO: 16283 - DNA, 32 bp, Artificial
  oligonucleotide probe
gtgggacgacgcgcgagacgagcgcaccgcag

SEQ ID NO: 16284 - DNA, 32 bp, Artificial
  oligonucleotide probe
cctcagcgcggaaccagtgggcctcctcccaa

SEQ ID NO: 16285 - DNA, 32 bp, Artificial
  oligonucleotide probe
gacggacgacgcgtgggtgggcctcctcccaa

SEQ ID NO: 16286 - DNA, 32 bp, Artificial
  oligonucleotide probe
gcgatggccaggtggccggatgctgcgagcag

SEQ ID NO: 16287 - DNA, 32 bp, Artificial
  oligonucleotide probe
gcgagtggcagggcctcggatgctgcgagcag

SEQ ID NO: 16288 - DNA, 32 bp, Artificial
  oligonucleotide probe
caggagcgggaagcgaagcgcaggagacgcct

SEQ ID NO: 16289 - DNA, 32 bp, Artificial
  oligonucleotide probe
tggccaggcggagtggagcgcaggagacgcct

SEQ ID NO: 16290 - DNA, 32 bp, Artificial
  oligonucleotide probe
accacggaagcgcggagtccgcaggtccgcct

SEQ ID NO: 16291 - DNA, 32 bp, Artificial
  oligonucleotide probe
gtgggacgacgcgcgagtccgcaggtccgcct

SEQ ID NO: 16292 - DNA, 32 bp, Artificial
  oligonucleotide probe
tggcacgcgagccagggtccccaaagcggcag

SEQ ID NO: 16293 - DNA, 32 bp, Artificial
  oligonucleotide probe
tggcggtcgcctcgaggtccccaaagcggcag

SEQ ID NO: 16294 - DNA, 32 bp, Artificial
  oligonucleotide probe
cctcagcgcggaaccacggatgctgcgagcag

SEQ ID NO: 16295 - DNA, 32 bp, Artificial
  oligonucleotide probe
acgcgagcgggtgcagcggatgctgcgagcag

SEQ ID NO: 16296 - DNA, 32 bp, Artificial
  oligonucleotide probe
tggccaggcggagtggcggatgctgcgagcag

SEQ ID NO: 16297 - DNA, 32 bp, Artificial
  oligonucleotide probe
gacggacgacgcgtggcggatgctgcgagcag

SEQ ID NO: 16298 - DNA, 32 bp, Artificial
  oligonucleotide probe
ccaaagcgggaatggcacgctgctgcgaacca

SEQ ID NO: 16299 - DNA, 32 bp, Artificial
  oligonucleotide probe
gcagcctctggccgagacgctgctgcgaacca

SEQ ID NO: 16300 - DNA, 32 bp, Artificial
  oligonucleotide probe
ggaaagcggcctggaacggagacgcagggggt

SEQ ID NO: 16301 - DNA, 32 bp, Artificial
  oligonucleotide probe
gagcggtctggcggaacggagacgcagggggt

SEQ ID NO: 16302 - DNA, 32 bp, Artificial
  oligonucleotide probe
caccgacgggaaacgcgtccccaaagcggcag

SEQ ID NO: 16303 - DNA, 32 bp, Artificial
  oligonucleotide probe
gtccggaagtgggcgagtccccaaagcggcag

SEQ ID NO: 16304 - DNA, 32 bp, Artificial
  oligonucleotide probe
tggccaggcggagtggacgctgctgcgaacca

SEQ ID NO: 16305 - DNA, 32 bp, Artificial
  oligonucleotide probe
gcctgtgggtccgcgaacgctgctgcgaacca

SEQ ID NO: 16306 - DNA, 32 bp, Artificial
  oligonucleotide probe
cctctggctggcccaatcaccggagccttggc

SEQ ID NO: 16307 - DNA, 32 bp, Artificial
  oligonucleotide probe
gcgacgagcgagccaatcaccggagccttggc

SEQ ID NO: 16308 - DNA, 32 bp, Artificial
  oligonucleotide probe
caggcacccaggcggagtccccaaagcggcag

SEQ ID NO: 16309 - DNA, 32 bp, Artificial
  oligonucleotide probe
gcgaagcggcgaggtcgtccccaaagcggcag

SEQ ID NO: 16310 - DNA, 32 bp, Artificial
  oligonucleotide probe
gcaggtggtggcgagctcaccggagccttggc

SEQ ID NO: 16311 - DNA, 32 bp, Artificial
  oligonucleotide probe
tggccaggcggagtggtcaccggagccttggc

SEQ ID NO: 16312 - DNA, 32 bp, Artificial
  oligonucleotide probe
gcctgtgggtccgcgagagcgggtgtggagcg

SEQ ID NO: 16313 - DNA, 32 bp, Artificial
  oligonucleotide probe
gacggggtcggacgaggagcgggtgtggagcg

SEQ ID NO: 16314 - DNA, 32 bp, Artificial
  oligonucleotide probe
acgcgagcgggtgcaggtgggcctcctcccaa

SEQ ID NO: 16315 - DNA, 32 bp, Artificial
  oligonucleotide probe
gcgatggccaggtggcgtgggcctcctcccaa

SEQ ID NO: 16316 - DNA, 32 bp, Artificial
  oligonucleotide probe
gtggcggaggtcggaaacgctgctgcgaacca

SEQ ID NO: 16317 - DNA, 32 bp, Artificial
  oligonucleotide probe
cctctggctggcccaaacgctgctgcgaacca

SEQ ID NO: 16318 - DNA, 32 bp, Artificial
  oligonucleotide probe
gagcgcctcctcgagccggagacgcagggggt

SEQ ID NO: 16319 - DNA, 32 bp, Artificial
  oligonucleotide probe
agcgccaatcacgggtcggagacgcagggggt

SEQ ID NO: 16320 - DNA, 32 bp, Artificial
  oligonucleotide probe
caccgagccacccggacggatgctgcgagcag

SEQ ID NO: 16321 - DNA, 32 bp, Artificial
  oligonucleotide probe
caggcacccaggcggacggatgctgcgagcag

SEQ ID NO: 16322 - DNA, 32 bp, Artificial
  oligonucleotide probe
gtgggacgacgcgcgagtccccaaagcggcag

SEQ ID NO: 16323 - DNA, 32 bp, Artificial
  oligonucleotide probe
cctccgaggacgcggagtccccaaagcggcag

SEQ ID NO: 16324 - DNA, 32 bp, Artificial
  oligonucleotide probe
gggtggaacgaggcgagcgaacgccctccagg

SEQ ID NO: 16325 - DNA, 32 bp, Artificial
  oligonucleotide probe
gcaggtggtggcgagcgcgaacgccctccagg

SEQ ID NO: 16326 - DNA, 32 bp, Artificial
  oligonucleotide probe
gagcgcctcctcgagcgacgagcgcaccgcag

SEQ ID NO: 16327 - DNA, 32 bp, Artificial
  oligonucleotide probe
agcgccaatcacgggtgacgagcgcaccgcag

SEQ ID NO: 16328 - DNA, 32 bp, Artificial
  oligonucleotide probe
gacggggtcggacgaggtccccaaagcggcag

SEQ ID NO: 16329 - DNA, 32 bp, Artificial
  oligonucleotide probe
accacggaagcgcggagtccccaaagcggcag

SEQ ID NO: 16330 - DNA, 32 bp, Artificial
  oligonucleotide probe
gtgggacgacgcgcgagagcgggtgtggagcg

SEQ ID NO: 16331 - DNA, 32 bp, Artificial
  oligonucleotide probe
cctccgaggacgcggagagcgggtgtggagcg

SEQ ID NO: 16332 - DNA, 32 bp, Artificial
  oligonucleotide probe
gggtggaacgaggcgatcaccggagccttggc

SEQ ID NO: 16333 - DNA, 32 bp, Artificial
  oligonucleotide probe
caggagcgggaagcgatcaccggagccttggc

SEQ ID NO: 16334 - DNA, 32 bp, Artificial
  oligonucleotide probe
gggttggccgagtggcacgctgctgcgaacca

SEQ ID NO: 16335 - DNA, 32 bp, Artificial
  oligonucleotide probe
accatggcacgcgacgacgctgctgcgaacca

SEQ ID NO: 16336 - DNA, 32 bp, Artificial
  oligonucleotide probe
cctctggctggcccaagagcgggtgtggagcg

SEQ ID NO: 16337 - DNA, 32 bp, Artificial
  oligonucleotide probe
gcgacgagcgagccaagagcgggtgtggagcg

SEQ ID NO: 16338 - DNA, 32 bp, Artificial
  oligonucleotide probe
cctcagcgcggaaccagtccgcaggtccgcct

SEQ ID NO: 16339 - DNA, 32 bp, Artificial
  oligonucleotide probe
gacggacgacgcgtgggtccgcaggtccgcct

SEQ ID NO: 16340 - DNA, 32 bp, Artificial
  oligonucleotide probe
tgctgggtgcaggcgagtccccaaagcggcag

SEQ ID NO: 16341 - DNA, 32 bp, Artificial
  oligonucleotide probe
agcggtccgcgagagcgtccccaaagcggcag

SEQ ID NO: 16342 - DNA, 32 bp, Artificial
  oligonucleotide probe
accacggaagcgcggacggagacgcagggggt

SEQ ID NO: 16343 - DNA, 32 bp, Artificial
  oligonucleotide probe
gtgggacgacgcgcgacggagacgcagggggt

SEQ ID NO: 16344 - DNA, 32 bp, Artificial
  oligonucleotide probe
caccgagccacccggaagcgcaggagacgcct

SEQ ID NO: 16345 - DNA, 32 bp, Artificial
  oligonucleotide probe
tggcacgcgagccaggagcgcaggagacgcct

SEQ ID NO: 16346 - DNA, 32 bp, Artificial
  oligonucleotide probe
caccgagccacccggagtgggcctcctcccaa

SEQ ID NO: 16347 - DNA, 32 bp, Artificial
  oligonucleotide probe
caggcacccaggcggagtgggcctcctcccaa

SEQ ID NO: 16348 - DNA, 32 bp, Artificial
  oligonucleotide probe
acgcgagcgggtgcagacgctgctgcgaacca

SEQ ID NO: 16349 - DNA, 32 bp, Artificial
  oligonucleotide probe
gcgatggccaggtggcacgctgctgcgaacca

SEQ ID NO: 16350 - DNA, 32 bp, Artificial
  oligonucleotide probe
caccgggtggtcagcggcgaacgccctccagg

SEQ ID NO: 16351 - DNA, 32 bp, Artificial
  oligonucleotide probe
ggtcgacgacgccgaggcgaacgccctccagg

SEQ ID NO: 16352 - DNA, 32 bp, Artificial
  oligonucleotide probe
gggttggccgagtggcagcgcaggagacgcct

SEQ ID NO: 16353 - DNA, 32 bp, Artificial
  oligonucleotide probe
tggcgggtgacggtggagcgcaggagacgcct

SEQ ID NO: 16354 - DNA, 32 bp, Artificial
  oligonucleotide probe
ggaaagcggcctggaagacgagcgcaccgcag

SEQ ID NO: 16355 - DNA, 32 bp, Artificial
  oligonucleotide probe
gagcggtctggcggaagacgagcgcaccgcag

SEQ ID NO: 16356 - DNA, 32 bp, Artificial
  oligonucleotide probe
acgcgagcgggtgcaggacgagcgcaccgcag

SEQ ID NO: 16357 - DNA, 32 bp, Artificial
  oligonucleotide probe
gcgatggccaggtggcgacgagcgcaccgcag

SEQ ID NO: 16358 - DNA, 32 bp, Artificial
  oligonucleotide probe
gtggcggaggtcggaagcgaacgccctccagg

SEQ ID NO: 16359 - DNA, 32 bp, Artificial
  oligonucleotide probe
cctctggctggcccaagcgaacgccctccagg

SEQ ID NO: 16360 - DNA, 32 bp, Artificial
  oligonucleotide probe
tggcagcgggtcgtgggcgaacgccctccagg

SEQ ID NO: 16361 - DNA, 32 bp, Artificial
  oligonucleotide probe
gcctgggtcaccacgcgcgaacgccctccagg

SEQ ID NO: 16362 - DNA, 32 bp, Artificial
  oligonucleotide probe
agcgccaatcacgggtgagcgggtgtggagcg

SEQ ID NO: 16363 - DNA, 32 bp, Artificial
  oligonucleotide probe
acgcgggtcaccgtccgagcgggtgtggagcg

SEQ ID NO: 16364 - DNA, 32 bp, Artificial
  oligonucleotide probe
tgctgggtgcaggcgagcgaacgccctccagg

SEQ ID NO: 16365 - DNA, 32 bp, Artificial
  oligonucleotide probe
agcggtccgcgagagcgcgaacgccctccagg

SEQ ID NO: 16366 - DNA, 32 bp, Artificial
  oligonucleotide probe
agcgccaatcacgggtgtccccaaagcggcag

SEQ ID NO: 16367 - DNA, 32 bp, Artificial
  oligonucleotide probe
acgcgggtcaccgtccgtccccaaagcggcag

SEQ ID NO: 16368 - DNA, 32 bp, Artificial
  oligonucleotide probe
agcggtccgcgagagcggtcgagctggcgcag

SEQ ID NO: 16369 - DNA, 32 bp, Artificial
  oligonucleotide probe
acgcggaagacgtggcggtcgagctggcgcag

SEQ ID NO: 16370 - DNA, 32 bp, Artificial
  oligonucleotide probe
tggcacgcgagccagggagcgggtgtggagcg

SEQ ID NO: 16371 - DNA, 32 bp, Artificial
  oligonucleotide probe
tggcggtcgcctcgaggagcgggtgtggagcg

SEQ ID NO: 16372 - DNA, 32 bp, Artificial
  oligonucleotide probe
agcgagcggtggacgcgagcgggtgtggagcg

SEQ ID NO: 16373 - DNA, 32 bp, Artificial
  oligonucleotide probe
tggcgggtgacggtgggagcgggtgtggagcg

SEQ ID NO: 16374 - DNA, 32 bp, Artificial
  oligonucleotide probe
gcaggtggtggcgagcgtccccaaagcggcag

SEQ ID NO: 16375 - DNA, 32 bp, Artificial
  oligonucleotide probe
tggccaggcggagtgggtccccaaagcggcag

SEQ ID NO: 16376 - DNA, 32 bp, Artificial
  oligonucleotide probe
agcggtccgcgagagcacgctgctgcgaacca

SEQ ID NO: 16377 - DNA, 32 bp, Artificial
  oligonucleotide probe
acgcggaagacgtggcacgctgctgcgaacca

SEQ ID NO: 16378 - DNA, 32 bp, Artificial
  oligonucleotide probe
gggttggccgagtggcggtcgagctggcgcag

SEQ ID NO: 16379 - DNA, 32 bp, Artificial
  oligonucleotide probe
gcctgtgggtccgcgaggtcgagctggcgcag

SEQ ID NO: 16380 - DNA, 32 bp, Artificial
  oligonucleotide probe
tggcagcgggtcgtggggtcgagctggcgcag

SEQ ID NO: 16381 - DNA, 32 bp, Artificial
  oligonucleotide probe
gcagcctctggccgagggtcgagctggcgcag

SEQ ID NO: 16382 - DNA, 32 bp, Artificial
  oligonucleotide probe
tcacgccttggccaccgtccccaaagcggcag

SEQ ID NO: 16383 - DNA, 32 bp, Artificial
  oligonucleotide probe
caccgcgaggtcacgcgtccccaaagcggcag

SEQ ID NO: 16384 - DNA, 32 bp, Artificial
  oligonucleotide probe
gagcgcctcctcgagcggtcgagctggcgcag

SEQ ID NO: 16385 - DNA, 32 bp, Artificial
  oligonucleotide probe
caccgagccacccggagcgaacgccctccagg

SEQ ID NO: 16386 - DNA, 32 bp, Artificial
  oligonucleotide probe
gcctgcgagagctggcgtccccaaagcggcag

SEQ ID NO: 16387 - DNA, 32 bp, Artificial
  oligonucleotide probe
gcgagtggcagggcctacgctgctgcgaacca

SEQ ID NO: 16388 - DNA, 32 bp, Artificial
  oligonucleotide probe
cggagcaggagcggaatgctgggtgcaggcga

SEQ ID NO: 16389 - DNA, 32 bp, Artificial
  oligonucleotide probe
ggtcgcctgtccagcgtgctgggtgcaggcga

SEQ ID NO: 16390 - DNA, 32 bp, Artificial
  oligonucleotide probe
gagcgagcagcgggtcgcctagcgcctcgacg

SEQ ID NO: 16391 - DNA, 32 bp, Artificial
  oligonucleotide probe
acgccctcaccagcgagcctagcgcctcgacg

SEQ ID NO: 16392 - DNA, 32 bp, Artificial
  oligonucleotide probe
gcgacagggcctgcctcaggggaagggtcgga

SEQ ID NO: 16393 - DNA, 32 bp, Artificial
  oligonucleotide probe
agcggcgagagcgtcccaggggaagggtcgga

SEQ ID NO: 16394 - DNA, 32 bp, Artificial
  oligonucleotide probe
gcgacagggcctgcctgcagcctctggccgag

SEQ ID NO: 16395 - DNA, 32 bp, Artificial
  oligonucleotide probe
agcggcgagagcgtccgcagcctctggccgag

SEQ ID NO: 16396 - DNA, 32 bp, Artificial
  oligonucleotide probe
cgagcaccgagccggagcaggtggtggcgagc

SEQ ID NO: 16397 - DNA, 32 bp, Artificial
  oligonucleotide probe
cctccggacctcacgcgcaggtggtggcgagc

SEQ ID NO: 16398 - DNA, 32 bp, Artificial
  oligonucleotide probe
cgagcaccgagccggaacgcaccagtcccgga

SEQ ID NO: 16399 - DNA, 32 bp, Artificial
  oligonucleotide probe
cctccggacctcacgcacgcaccagtcccgga

SEQ ID NO: 16400 - DNA, 32 bp, Artificial
  oligonucleotide probe
gacgcaccagcgcgaggcctgggtcaccacgc

SEQ ID NO: 16401 - DNA, 32 bp, Artificial
  oligonucleotide probe
tggcaccagcaggggtgcctgggtcaccacgc

SEQ ID NO: 16402 - DNA, 32 bp, Artificial
  oligonucleotide probe
cagggtgggcgagcgaacgcggaagacgtggc

SEQ ID NO: 16403 - DNA, 32 bp, Artificial
  oligonucleotide probe
acgcccaacagggagcacgcggaagacgtggc

SEQ ID NO: 16404 - DNA, 32 bp, Artificial
  oligonucleotide probe
gagcgagcagcgggtctcacgccttggccacc

SEQ ID NO: 16405 - DNA, 32 bp, Artificial
  oligonucleotide probe
acgccctcaccagcgatcacgccttggccacc

SEQ ID NO: 16406 - DNA, 32 bp, Artificial
  oligonucleotide probe
acgcagcggggtgacgacgcgcctgacgcctc

SEQ ID NO: 16407 - DNA, 32 bp, Artificial
  oligonucleotide probe
caccgcctcagggacgacgcgcctgacgcctc

SEQ ID NO: 16408 - DNA, 32 bp, Artificial
  oligonucleotide probe
cgagcaccgagccggaacgcgcctgacgcctc

SEQ ID NO: 16409 - DNA, 32 bp, Artificial
  oligonucleotide probe
cctccggacctcacgcacgcgcctgacgcctc

SEQ ID NO: 16410 - DNA, 32 bp, Artificial
  oligonucleotide probe
gacgcaccagcgcgagcaggcacccaggcgga

SEQ ID NO: 16411 - DNA, 32 bp, Artificial
  oligonucleotide probe
tggcaccagcaggggtcaggcacccaggcgga

SEQ ID NO: 16412 - DNA, 32 bp, Artificial
  oligonucleotide probe
agcggcgagagcgtccgtggccaatcacgcga

SEQ ID NO: 16413 - DNA, 32 bp, Artificial
  oligonucleotide probe
gacgcaccagcgcgaggtggccaatcacgcga

SEQ ID NO: 16414 - DNA, 32 bp, Artificial
  oligonucleotide probe
gacgcaccagcgcgagccaaagcgggaatggc

SEQ ID NO: 16415 - DNA, 32 bp, Artificial
  oligonucleotide probe
tggcaccagcaggggtccaaagcgggaatggc

SEQ ID NO: 16416 - DNA, 32 bp, Artificial
  oligonucleotide probe
tgctcggatgctgcgacaggggaagggtcgga

SEQ ID NO: 16417 - DNA, 32 bp, Artificial
  oligonucleotide probe
gagcgcagccaagcctcaggggaagggtcgga

SEQ ID NO: 16418 - DNA, 32 bp, Artificial
  oligonucleotide probe
tggcgcctgtccgtggtcacgccttggccacc

SEQ ID NO: 16419 - DNA, 32 bp, Artificial
  oligonucleotide probe
gtggcgagcctcgggttcacgccttggccacc

SEQ ID NO: 16420 - DNA, 32 bp, Artificial
  oligonucleotide probe
gtgggggtgcagggaagcctcggagacggcag

SEQ ID NO: 16421 - DNA, 32 bp, Artificial
  oligonucleotide probe
ggtcgcaggcgagggtgcctcggagacggcag

SEQ ID NO: 16422 - DNA, 32 bp, Artificial
  oligonucleotide probe
tggcgcctgtccgtggtggcagcgggtcgtgg

SEQ ID NO: 16423 - DNA, 32 bp, Artificial
  oligonucleotide probe
gtggcgagcctcgggttggcagcgggtcgtgg

SEQ ID NO: 16424 - DNA, 32 bp, Artificial
  oligonucleotide probe
cacccgagagcggtggccaaagcgggaatggc

SEQ ID NO: 16425 - DNA, 32 bp, Artificial
  oligonucleotide probe
gcgagtcccggaagcgccaaagcgggaatggc

SEQ ID NO: 16426 - DNA, 32 bp, Artificial
  oligonucleotide probe
gcaggacggacggcctgcctcggagacggcag

SEQ ID NO: 16427 - DNA, 32 bp, Artificial
  oligonucleotide probe
gcgacctcacgcgcaggcctcggagacggcag

SEQ ID NO: 16428 - DNA, 32 bp, Artificial
  oligonucleotide probe
gcgacagggcctgccttcacgccttggccacc

SEQ ID NO: 16429 - DNA, 32 bp, Artificial
  oligonucleotide probe
agcggcgagagcgtcctcacgccttggccacc

SEQ ID NO: 16430 - DNA, 32 bp, Artificial
  oligonucleotide probe
gcgacagggcctgccttggcagcgggtcgtgg

SEQ ID NO: 16431 - DNA, 32 bp, Artificial
  oligonucleotide probe
agcggcgagagcgtcctggcagcgggtcgtgg

SEQ ID NO: 16432 - DNA, 32 bp, Artificial
  oligonucleotide probe
tggcgcctgtccgtgggcgatggccaggtggc

SEQ ID NO: 16433 - DNA, 32 bp, Artificial
  oligonucleotide probe
gtggcgagcctcgggtgcgatggccaggtggc

SEQ ID NO: 16434 - DNA, 32 bp, Artificial
  oligonucleotide probe
gtgggggtgcagggaaacgcgcctgacgcctc

SEQ ID NO: 16435 - DNA, 32 bp, Artificial
  oligonucleotide probe
ggtcgcaggcgagggtacgcgcctgacgcctc

SEQ ID NO: 16436 - DNA, 32 bp, Artificial
  oligonucleotide probe
gtggccaatcacgcgagcctcggagacggcag

SEQ ID NO: 16437 - DNA, 32 bp, Artificial
  oligonucleotide probe
agcgcaccgacgacgcgcctcggagacggcag

SEQ ID NO: 16438 - DNA, 32 bp, Artificial
  oligonucleotide probe
gacgcaccagcgcgaggggttggccgagtggc

SEQ ID NO: 16439 - DNA, 32 bp, Artificial
  oligonucleotide probe
tggcaccagcaggggtgggttggccgagtggc

SEQ ID NO: 16440 - DNA, 32 bp, Artificial
  oligonucleotide probe
cagggtgggcgagcgaggaagcctgcgacgga

SEQ ID NO: 16441 - DNA, 32 bp, Artificial
  oligonucleotide probe
acgcccaacagggagcggaagcctgcgacgga

SEQ ID NO: 16442 - DNA, 32 bp, Artificial
  oligonucleotide probe
tggcgcctgtccgtgggtggcggaggtcggaa

SEQ ID NO: 16443 - DNA, 32 bp, Artificial
  oligonucleotide probe
gtggcgagcctcgggtgtggcggaggtcggaa

SEQ ID NO: 16444 - DNA, 32 bp, Artificial
  oligonucleotide probe
caggacgctggccctcgacgcaggcggagggt

SEQ ID NO: 16445 - DNA, 32 bp, Artificial
  oligonucleotide probe
cctcgtggcggacggagacgcaggcggagggt

SEQ ID NO: 16446 - DNA, 32 bp, Artificial
  oligonucleotide probe
cagggtgggcgagcgacaggggaagggtcgga

SEQ ID NO: 16447 - DNA, 32 bp, Artificial
  oligonucleotide probe
acgcccaacagggagccaggggaagggtcgga

SEQ ID NO: 16448 - DNA, 32 bp, Artificial
  oligonucleotide probe
tggcgcctgtccgtggcaccgacgggaaacgc

SEQ ID NO: 16449 - DNA, 32 bp, Artificial
  oligonucleotide probe
gtggcgagcctcgggtcaccgacgggaaacgc

SEQ ID NO: 16450 - DNA, 32 bp, Artificial
  oligonucleotide probe
gtgggggtgcagggaaacgcaccagtcccgga

SEQ ID NO: 16451 - DNA, 32 bp, Artificial
  oligonucleotide probe
ggtcgcaggcgagggtacgcaccagtcccgga

SEQ ID NO: 16452 - DNA, 32 bp, Artificial
  oligonucleotide probe
tggcgcctgtccgtgggcctagcgcctcgacg

SEQ ID NO: 16453 - DNA, 32 bp, Artificial
  oligonucleotide probe
gtggcgagcctcgggtgcctagcgcctcgacg

SEQ ID NO: 16454 - DNA, 32 bp, Artificial
  oligonucleotide probe
gcgacagggcctgcctcaggcacccaggcgga

SEQ ID NO: 16455 - DNA, 32 bp, Artificial
  oligonucleotide probe
agcggcgagagcgtcccaggcacccaggcgga

SEQ ID NO: 16456 - DNA, 32 bp, Artificial
  oligonucleotide probe
tggcgcctgtccgtgggcctgggtcaccacgc

SEQ ID NO: 16457 - DNA, 32 bp, Artificial
  oligonucleotide probe
gtggcgagcctcgggtgcctgggtcaccacgc

SEQ ID NO: 16458 - DNA, 32 bp, Artificial
  oligonucleotide probe
gtgggggtgcagggaacaggagcgggaagcga

SEQ ID NO: 16459 - DNA, 32 bp, Artificial
  oligonucleotide probe
ggtcgcaggcgagggtcaggagcgggaagcga

SEQ ID NO: 16460 - DNA, 32 bp, Artificial
  oligonucleotide probe
tggcgcctgtccgtgggcgacgagcgagccaa

SEQ ID NO: 16461 - DNA, 32 bp, Artificial
  oligonucleotide probe
gtggcgagcctcgggtgcgacgagcgagccaa

SEQ ID NO: 16462 - DNA, 32 bp, Artificial
  oligonucleotide probe
tggcgcctgtccgtggggaaagcggcctggaa

SEQ ID NO: 16463 - DNA, 32 bp, Artificial
  oligonucleotide probe
gtggcgagcctcgggtggaaagcggcctggaa

SEQ ID NO: 16464 - DNA, 32 bp, Artificial
  oligonucleotide probe
gacgcaccagcgcgagacgcgggtcaccgtcc

SEQ ID NO: 16465 - DNA, 32 bp, Artificial
  oligonucleotide probe
tggcaccagcaggggtacgcgggtcaccgtcc

SEQ ID NO: 16466 - DNA, 32 bp, Artificial
  oligonucleotide probe
gacgcaccagcgcgagggtcgacgacgccgag

SEQ ID NO: 16467 - DNA, 32 bp, Artificial
  oligonucleotide probe
tggcaccagcaggggtggtcgacgacgccgag

SEQ ID NO: 16468 - DNA, 32 bp, Artificial
  oligonucleotide probe
gtgggggtgcagggaatggccaggcggagtgg

SEQ ID NO: 16469 - DNA, 32 bp, Artificial
  oligonucleotide probe
ggtcgcaggcgagggttggccaggcggagtgg

SEQ ID NO: 16470 - DNA, 32 bp, Artificial
  oligonucleotide probe
caggacgctggccctcgcgatggccaggtggc

SEQ ID NO: 16471 - DNA, 32 bp, Artificial
  oligonucleotide probe
cctcgtggcggacggagcgatggccaggtggc

SEQ ID NO: 16472 - DNA, 32 bp, Artificial
  oligonucleotide probe
caggacgctggccctcgcaggcagccaatggc

SEQ ID NO: 16473 - DNA, 32 bp, Artificial
  oligonucleotide probe
cctcgtggcggacggagcaggcagccaatggc

SEQ ID NO: 16474 - DNA, 32 bp, Artificial
  oligonucleotide probe
gtccgggtcaggcaggggaagcctgcgacgga

SEQ ID NO: 16475 - DNA, 32 bp, Artificial
  oligonucleotide probe
cggagagcgcgagcctggaagcctgcgacgga

SEQ ID NO: 16476 - DNA, 32 bp, Artificial
  oligonucleotide probe
gagcgagcagcgggtcacgcgagcgggtgcag

SEQ ID NO: 16477 - DNA, 32 bp, Artificial
  oligonucleotide probe
acgccctcaccagcgaacgcgagcgggtgcag

SEQ ID NO: 16478 - DNA, 32 bp, Artificial
  oligonucleotide probe
gcgacagggcctgcctgcgatggccaggtggc

SEQ ID NO: 16479 - DNA, 32 bp, Artificial
  oligonucleotide probe
agcggcgagagcgtccgcgatggccaggtggc

SEQ ID NO: 16480 - DNA, 32 bp, Artificial
  oligonucleotide probe
gcgacagggcctgccttggcgggtgacggtgg

SEQ ID NO: 16481 - DNA, 32 bp, Artificial
  oligonucleotide probe
agcggcgagagcgtcctggcgggtgacggtgg

SEQ ID NO: 16482 - DNA, 32 bp, Artificial
  oligonucleotide probe
cggagcaggagcggaatggcgtgggggtccaa

SEQ ID NO: 16483 - DNA, 32 bp, Artificial
  oligonucleotide probe
ggtcgcctgtccagcgtggcgtgggggtccaa

SEQ ID NO: 16484 - DNA, 32 bp, Artificial
  oligonucleotide probe
cacccgagagcggtgggacggggtcggacgag

SEQ ID NO: 16485 - DNA, 32 bp, Artificial
  oligonucleotide probe
gcgagtcccggaagcggacggggtcggacgag

SEQ ID NO: 16486 - DNA, 32 bp, Artificial
  oligonucleotide probe
gtgggggtgcagggaagtccggaagtgggcga

SEQ ID NO: 16487 - DNA, 32 bp, Artificial
  oligonucleotide probe
ggtcgcaggcgagggtgtccggaagtgggcga

SEQ ID NO: 16488 - DNA, 32 bp, Artificial
  oligonucleotide probe
cacccgagagcggtggacgcggaagacgtggc

SEQ ID NO: 16489 - DNA, 32 bp, Artificial
  oligonucleotide probe
gcgagtcccggaagcgacgcggaagacgtggc

SEQ ID NO: 16490 - DNA, 32 bp, Artificial
  oligonucleotide probe
gacgcaccagcgcgaggtccggaagtgggcga

SEQ ID NO: 16491 - DNA, 32 bp, Artificial
  oligonucleotide probe
tggcaccagcaggggtgtccggaagtgggcga

SEQ ID NO: 16492 - DNA, 32 bp, Artificial
  oligonucleotide probe
cacccgagagcggtggcaggggaagggtcgga

SEQ ID NO: 16493 - DNA, 32 bp, Artificial
  oligonucleotide probe
gcgagtcccggaagcgcaggggaagggtcgga

SEQ ID NO: 16494 - DNA, 32 bp, Artificial
  oligonucleotide probe
gcgacagggcctgcctgtccggaagtgggcga

SEQ ID NO: 16495 - DNA, 32 bp, Artificial
  oligonucleotide probe
agcggcgagagcgtccgtccggaagtgggcga

SEQ ID NO: 16496 - DNA, 32 bp, Artificial
  oligonucleotide probe
gagcgagcagcgggtctggcagcgggtcgtgg

SEQ ID NO: 16497 - DNA, 32 bp, Artificial
  oligonucleotide probe
acgccctcaccagcgatggcagcgggtcgtgg

SEQ ID NO: 16498 - DNA, 32 bp, Artificial
  oligonucleotide probe
tggcgcctgtccgtggacgcggaagacgtggc

SEQ ID NO: 16499 - DNA, 32 bp, Artificial
  oligonucleotide probe
gtggcgagcctcgggtacgcggaagacgtggc

SEQ ID NO: 16500 - DNA, 32 bp, Artificial
  oligonucleotide probe
gagcgagcagcgggtcacgcgcctgacgcctc

SEQ ID NO: 16501 - DNA, 32 bp, Artificial
  oligonucleotide probe
acgccctcaccagcgaacgcgcctgacgcctc

SEQ ID NO: 16502 - DNA, 32 bp, Artificial
  oligonucleotide probe
gcgacagggcctgcctgcgagtggcagggcct

SEQ ID NO: 16503 - DNA, 32 bp, Artificial
  oligonucleotide probe
agcggcgagagcgtccgcgagtggcagggcct

SEQ ID NO: 16504 - DNA, 32 bp, Artificial
  oligonucleotide probe
gacgcaccagcgcgaggtggcaggagcgacgc

SEQ ID NO: 16505 - DNA, 32 bp, Artificial
  oligonucleotide probe
tggcaccagcaggggtgtggcaggagcgacgc

SEQ ID NO: 16506 - DNA, 32 bp, Artificial
  oligonucleotide probe
gcgacagggcctgcctgcctcggagacggcag

SEQ ID NO: 16507 - DNA, 32 bp, Artificial
  oligonucleotide probe
agcggcgagagcgtccgcctcggagacggcag

SEQ ID NO: 16508 - DNA, 32 bp, Artificial
  oligonucleotide probe
cgagcaggcgaggcaggcctagcgcctcgacg

SEQ ID NO: 16509 - DNA, 32 bp, Artificial
  oligonucleotide probe
gcctcaggacgcacgcgcctagcgcctcgacg

SEQ ID NO: 16510 - DNA, 32 bp, Artificial
  oligonucleotide probe
gtggccaatcacgcgaacgcggaagacgtggc

SEQ ID NO: 16511 - DNA, 32 bp, Artificial
  oligonucleotide probe
agcgcaccgacgacgcacgcggaagacgtggc

SEQ ID NO: 16512 - DNA, 32 bp, Artificial
  oligonucleotide probe
gcgacagggcctgcctacgcgggtcaccgtcc

SEQ ID NO: 16513 - DNA, 32 bp, Artificial
  oligonucleotide probe
agcggcgagagcgtccacgcgggtcaccgtcc

SEQ ID NO: 16514 - DNA, 32 bp, Artificial
  oligonucleotide probe
tggcgcctgtccgtggacgccaggcgaggtgg

SEQ ID NO: 16515 - DNA, 32 bp, Artificial
  oligonucleotide probe
gtggcgagcctcgggtacgccaggcgaggtgg

SEQ ID NO: 16516 - DNA, 32 bp, Artificial
  oligonucleotide probe
gtgggggtgcagggaaaccatggcacgcgacg

SEQ ID NO: 16517 - DNA, 32 bp, Artificial
  oligonucleotide probe
ggtcgcaggcgagggtaccatggcacgcgacg

SEQ ID NO: 16518 - DNA, 32 bp, Artificial
  oligonucleotide probe
tggcgcctgtccgtggcggacaggacgctggc

SEQ ID NO: 16519 - DNA, 32 bp, Artificial
  oligonucleotide probe
gtggcgagcctcgggtcggacaggacgctggc

SEQ ID NO: 16520 - DNA, 32 bp, Artificial
  oligonucleotide probe
gtccgggtcaggcaggaccatggcacgcgacg

SEQ ID NO: 16521 - DNA, 32 bp, Artificial
  oligonucleotide probe
cggagagcgcgagcctaccatggcacgcgacg

SEQ ID NO: 16522 - DNA, 32 bp, Artificial
  oligonucleotide probe
cgagcaggcgaggcagggaagcctgcgacgga

SEQ ID NO: 16523 - DNA, 32 bp, Artificial
  oligonucleotide probe
gcctcaggacgcacgcggaagcctgcgacgga

SEQ ID NO: 16524 - DNA, 32 bp, Artificial
  oligonucleotide probe
gagcgagcagcgggtcgcagcggagcctgagc

SEQ ID NO: 16525 - DNA, 32 bp, Artificial
  oligonucleotide probe
acgccctcaccagcgagcagcggagcctgagc

SEQ ID NO: 16526 - DNA, 32 bp, Artificial
  oligonucleotide probe
cacccgagagcggtggcggacaggacgctggc

SEQ ID NO: 16527 - DNA, 32 bp, Artificial
  oligonucleotide probe
gcgagtcccggaagcgcggacaggacgctggc

SEQ ID NO: 16528 - DNA, 32 bp, Artificial
  oligonucleotide probe
cggagcaggagcggaagacgcaggcggagggt

SEQ ID NO: 16529 - DNA, 32 bp, Artificial
  oligonucleotide probe
ggtcgcctgtccagcggacgcaggcggagggt

SEQ ID NO: 16530 - DNA, 32 bp, Artificial
  oligonucleotide probe
caggacgctggccctccaggagcgggaagcga

SEQ ID NO: 16531 - DNA, 32 bp, Artificial
  oligonucleotide probe
cctcgtggcggacggacaggagcgggaagcga

SEQ ID NO: 16532 - DNA, 32 bp, Artificial
  oligonucleotide probe
tggcgcctgtccgtggacgcgcctgacgcctc

SEQ ID NO: 16533 - DNA, 32 bp, Artificial
  oligonucleotide probe
gtggcgagcctcgggtacgcgcctgacgcctc

SEQ ID NO: 16534 - DNA, 32 bp, Artificial
  oligonucleotide probe
gcgacagggcctgcctcctcgcctcgaggagc

SEQ ID NO: 16535 - DNA, 32 bp, Artificial
  oligonucleotide probe
agcggcgagagcgtcccctcgcctcgaggagc

SEQ ID NO: 16536 - DNA, 32 bp, Artificial
  oligonucleotide probe
gtgggggtgcagggaagcagcggagcctgagc

SEQ ID NO: 16537 - DNA, 32 bp, Artificial
  oligonucleotide probe
ggtcgcaggcgagggtgcagcggagcctgagc

SEQ ID NO: 16538 - DNA, 32 bp, Artificial
  oligonucleotide probe
cacccgagagcggtgggcgaagcggcgaggtc

SEQ ID NO: 16539 - DNA, 32 bp, Artificial
  oligonucleotide probe
gcgagtcccggaagcggcgaagcggcgaggtc

SEQ ID NO: 16540 - DNA, 32 bp, Artificial
  oligonucleotide probe
cgagcaggcgaggcaggacggcgagtgggcag

SEQ ID NO: 16541 - DNA, 32 bp, Artificial
  oligonucleotide probe
gcctcaggacgcacgcgacggcgagtgggcag

SEQ ID NO: 16542 - DNA, 32 bp, Artificial
  oligonucleotide probe
acgcagcggggtgacgaccatggcacgcgacg

SEQ ID NO: 16543 - DNA, 32 bp, Artificial
  oligonucleotide probe
caccgcctcagggacgaccatggcacgcgacg

SEQ ID NO: 16544 - DNA, 32 bp, Artificial
  oligonucleotide probe
gtggccaatcacgcgatggcgtgggggtccaa

SEQ ID NO: 16545 - DNA, 32 bp, Artificial
  oligonucleotide probe
agcgcaccgacgacgctggcgtgggggtccaa

SEQ ID NO: 16546 - DNA, 32 bp, Artificial
  oligonucleotide probe
gcgacagggcctgcctacgcgcctgacgcctc

SEQ ID NO: 16547 - DNA, 32 bp, Artificial
  oligonucleotide probe
agcggcgagagcgtccacgcgcctgacgcctc

SEQ ID NO: 16548 - DNA, 32 bp, Artificial
  oligonucleotide probe
gcgacagggcctgcctgcctgggtcaccacgc

SEQ ID NO: 16549 - DNA, 32 bp, Artificial
  oligonucleotide probe
agcggcgagagcgtccgcctgggtcaccacgc

SEQ ID NO: 16550 - DNA, 32 bp, Artificial
  oligonucleotide probe
gacgcaccagcgcgagtggccaggcggagtgg

SEQ ID NO: 16551 - DNA, 32 bp, Artificial
  oligonucleotide probe
tggcaccagcaggggttggccaggcggagtgg

SEQ ID NO: 16552 - DNA, 32 bp, Artificial
  oligonucleotide probe
tggcgcctgtccgtggacgcgagcgggtgcag

SEQ ID NO: 16553 - DNA, 32 bp, Artificial
  oligonucleotide probe
gtggcgagcctcgggtacgcgagcgggtgcag

SEQ ID NO: 16554 - DNA, 32 bp, Artificial
  oligonucleotide probe
gagcgagcagcgggtcgcaggcagccaatggc

SEQ ID NO: 16555 - DNA, 32 bp, Artificial
  oligonucleotide probe
acgccctcaccagcgagcaggcagccaatggc

SEQ ID NO: 16556 - DNA, 32 bp, Artificial
  oligonucleotide probe
gagcgagcagcgggtcgtccggaagtgggcga

SEQ ID NO: 16557 - DNA, 32 bp, Artificial
  oligonucleotide probe
acgccctcaccagcgagtccggaagtgggcga

SEQ ID NO: 16558 - DNA, 32 bp, Artificial
  oligonucleotide probe
cgagcaccgagccggagacgcaggcggagggt

SEQ ID NO: 16559 - DNA, 32 bp, Artificial
  oligonucleotide probe
cctccggacctcacgcgacgcaggcggagggt

SEQ ID NO: 16560 - DNA, 32 bp, Artificial
  oligonucleotide probe
gcgacagggcctgcctgagcgcctcctcgagc

SEQ ID NO: 16561 - DNA, 32 bp, Artificial
  oligonucleotide probe
agcggcgagagcgtccgagcgcctcctcgagc

SEQ ID NO: 16562 - DNA, 32 bp, Artificial
  oligonucleotide probe
gacgcaccagcgcgaggcgacgagcgagccaa

SEQ ID NO: 16563 - DNA, 32 bp, Artificial
  oligonucleotide probe
tggcaccagcaggggtgcgacgagcgagccaa

SEQ ID NO: 16564 - DNA, 32 bp, Artificial
  oligonucleotide probe
cagggtgggcgagcgaacgcgcctgacgcctc

SEQ ID NO: 16565 - DNA, 32 bp, Artificial
  oligonucleotide probe
acgcccaacagggagcacgcgcctgacgcctc

SEQ ID NO: 16566 - DNA, 32 bp, Artificial
  oligonucleotide probe
gacgcaccagcgcgaggtgggacgacgcgcga

SEQ ID NO: 16567 - DNA, 32 bp, Artificial
  oligonucleotide probe
tggcaccagcaggggtgtgggacgacgcgcga

SEQ ID NO: 16568 - DNA, 32 bp, Artificial
  oligonucleotide probe
cagggtgggcgagcgatcacgccttggccacc

SEQ ID NO: 16569 - DNA, 32 bp, Artificial
  oligonucleotide probe
acgcccaacagggagctcacgccttggccacc

SEQ ID NO: 16570 - DNA, 32 bp, Artificial
  oligonucleotide probe
caggacgctggccctcagcggtccgcgagagc

SEQ ID NO: 16571 - DNA, 32 bp, Artificial
  oligonucleotide probe
cctcgtggcggacggaagcggtccgcgagagc

SEQ ID NO: 16572 - DNA, 32 bp, Artificial
  oligonucleotide probe
gacgcaccagcgcgagacgcgagcgggtgcag

SEQ ID NO: 16573 - DNA, 32 bp, Artificial
  oligonucleotide probe
tggcaccagcaggggtacgcgagcgggtgcag

SEQ ID NO: 16574 - DNA, 32 bp, Artificial
  oligonucleotide probe
gacgcaccagcgcgaggcctcggagacggcag

SEQ ID NO: 16575 - DNA, 32 bp, Artificial
  oligonucleotide probe
tggcaccagcaggggtgcctcggagacggcag

SEQ ID NO: 16576 - DNA, 32 bp, Artificial
  oligonucleotide probe
caccggtcagcggggtgcctcggagacggcag

SEQ ID NO: 16577 - DNA, 32 bp, Artificial
  oligonucleotide probe
actgcggacgaggcctgcctcggagacggcag

SEQ ID NO: 16578 - DNA, 32 bp, Artificial
  oligonucleotide probe
gacgcaccagcgcgagaccatggcacgcgacg

SEQ ID NO: 16579 - DNA, 32 bp, Artificial
  oligonucleotide probe
tggcaccagcaggggtaccatggcacgcgacg

SEQ ID NO: 16580 - DNA, 32 bp, Artificial
  oligonucleotide probe
gtgggggtgcagggaacaggggaagggtcgga

SEQ ID NO: 16581 - DNA, 32 bp, Artificial
  oligonucleotide probe
ggtcgcaggcgagggtcaggggaagggtcgga

SEQ ID NO: 16582 - DNA, 32 bp, Artificial
  oligonucleotide probe
tggcgcctgtccgtggcctctggctggcccaa

SEQ ID NO: 16583 - DNA, 32 bp, Artificial
  oligonucleotide probe
gtggcgagcctcgggtcctctggctggcccaa

SEQ ID NO: 16584 - DNA, 32 bp, Artificial
  oligonucleotide probe
tgctcggatgctgcgacaccgacgggaaacgc

SEQ ID NO: 16585 - DNA, 32 bp, Artificial
  oligonucleotide probe
gagcgcagccaagcctcaccgacgggaaacgc

SEQ ID NO: 16586 - DNA, 32 bp, Artificial
  oligonucleotide probe
cgagcaccgagccggatggcgggtgacggtgg

SEQ ID NO: 16587 - DNA, 32 bp, Artificial
  oligonucleotide probe
cctccggacctcacgctggcgggtgacggtgg

SEQ ID NO: 16588 - DNA, 32 bp, Artificial
  oligonucleotide probe
cgagcaccgagccggacggacaggacgctggc

SEQ ID NO: 16589 - DNA, 32 bp, Artificial
  oligonucleotide probe
cctccggacctcacgccggacaggacgctggc

SEQ ID NO: 16590 - DNA, 32 bp, Artificial
  oligonucleotide probe
cgagcaggcgaggcagacgcgcctgacgcctc

SEQ ID NO: 16591 - DNA, 32 bp, Artificial
  oligonucleotide probe
gcctcaggacgcacgcacgcgcctgacgcctc

SEQ ID NO: 16592 - DNA, 32 bp, Artificial
  oligonucleotide probe
gagcgagcagcgggtccaccgcgaggtcacgc

SEQ ID NO: 16593 - DNA, 32 bp, Artificial
  oligonucleotide probe
acgccctcaccagcgacaccgcgaggtcacgc

SEQ ID NO: 16594 - DNA, 32 bp, Artificial
  oligonucleotide probe
gcgacagggcctgcctcctctggctggcccaa

SEQ ID NO: 16595 - DNA, 32 bp, Artificial
  oligonucleotide probe
agcggcgagagcgtcccctctggctggcccaa

SEQ ID NO: 16596 - DNA, 32 bp, Artificial
  oligonucleotide probe
gcaggacggacggcctcaccgggtggtcagcg

SEQ ID NO: 16597 - DNA, 32 bp, Artificial
  oligonucleotide probe
gcgacctcacgcgcagcaccgggtggtcagcg

SEQ ID NO: 16598 - DNA, 32 bp, Artificial
  oligonucleotide probe
gcgacagggcctgcctacgcgagcgggtgcag

SEQ ID NO: 16599 - DNA, 32 bp, Artificial
  oligonucleotide probe
agcggcgagagcgtccacgcgagcgggtgcag

SEQ ID NO: 16600 - DNA, 32 bp, Artificial
  oligonucleotide probe
cgagcaggcgaggcagacgcggtccaccgtgg

SEQ ID NO: 16601 - DNA, 32 bp, Artificial
  oligonucleotide probe
gcctcaggacgcacgcacgcggtccaccgtgg

SEQ ID NO: 16602 - DNA, 32 bp, Artificial
  oligonucleotide probe
cacccgagagcggtggcaccgggtggtcagcg

SEQ ID NO: 16603 - DNA, 32 bp, Artificial
  oligonucleotide probe
gcgagtcccggaagcgcaccgggtggtcagcg

SEQ ID NO: 16604 - DNA, 32 bp, Artificial
  oligonucleotide probe
cagggtgggcgagcgagcctagcgcctcgacg

SEQ ID NO: 16605 - DNA, 32 bp, Artificial
  oligonucleotide probe
acgcccaacagggagcgcctagcgcctcgacg

SEQ ID NO: 16606 - DNA, 32 bp, Artificial
  oligonucleotide probe
gagcgagcagcgggtccggacaggacgctggc

SEQ ID NO: 16607 - DNA, 32 bp, Artificial
  oligonucleotide probe
acgccctcaccagcgacggacaggacgctggc

SEQ ID NO: 16608 - DNA, 32 bp, Artificial
  oligonucleotide probe
gcgacagggcctgcctgcctgtgggtccgcga

SEQ ID NO: 16609 - DNA, 32 bp, Artificial
  oligonucleotide probe
agcggcgagagcgtccgcctgtgggtccgcga

SEQ ID NO: 16610 - DNA, 32 bp, Artificial
  oligonucleotide probe
acgcagcggggtgacgacgcggtccaccgtgg

SEQ ID NO: 16611 - DNA, 32 bp, Artificial
  oligonucleotide probe
caccgcctcagggacgacgcggtccaccgtgg

SEQ ID NO: 16612 - DNA, 32 bp, Artificial
  oligonucleotide probe
gacgcaccagcgcgaggcaggtggtggcgagc

SEQ ID NO: 16613 - DNA, 32 bp, Artificial
  oligonucleotide probe
tggcaccagcaggggtgcaggtggtggcgagc

SEQ ID NO: 16614 - DNA, 32 bp, Artificial
  oligonucleotide probe
gcgacagggcctgccttgctgggtgcaggcga

SEQ ID NO: 16615 - DNA, 32 bp, Artificial
  oligonucleotide probe
agcggcgagagcgtcctgctgggtgcaggcga

SEQ ID NO: 16616 - DNA, 32 bp, Artificial
  oligonucleotide probe
gcaggacggacggccttgctgggtgcaggcga

SEQ ID NO: 16617 - DNA, 32 bp, Artificial
  oligonucleotide probe
gcgacctcacgcgcagtgctgggtgcaggcga

SEQ ID NO: 16618 - DNA, 32 bp, Artificial
  oligonucleotide probe
cacccgagagcggtggagcggtccgcgagagc

SEQ ID NO: 16619 - DNA, 32 bp, Artificial
  oligonucleotide probe
gcgagtcccggaagcgagcggtccgcgagagc

SEQ ID NO: 16620 - DNA, 32 bp, Artificial
  oligonucleotide probe
gtgggggtgcagggaaacgcggtccaccgtgg

SEQ ID NO: 16621 - DNA, 32 bp, Artificial
  oligonucleotide probe
ggtcgcaggcgagggtacgcggtccaccgtgg

SEQ ID NO: 16622 - DNA, 32 bp, Artificial
  oligonucleotide probe
cagggtgggcgagcgatgctgggtgcaggcga

SEQ ID NO: 16623 - DNA, 32 bp, Artificial
  oligonucleotide probe
acgcccaacagggagctgctgggtgcaggcga

SEQ ID NO: 16624 - DNA, 32 bp, Artificial
  oligonucleotide probe
tgctcggatgctgcgagtccgagcagcggcct

SEQ ID NO: 16625 - DNA, 32 bp, Artificial
  oligonucleotide probe
gagcgcagccaagcctgtccgagcagcggcct

SEQ ID NO: 16626 - DNA, 32 bp, Artificial
  oligonucleotide probe
cggagcaggagcggaaaccatggcacgcgacg

SEQ ID NO: 16627 - DNA, 32 bp, Artificial
  oligonucleotide probe
ggtcgcctgtccagcgaccatggcacgcgacg

SEQ ID NO: 16628 - DNA, 32 bp, Artificial
  oligonucleotide probe
gtgggggtgcagggaatcacgccttggccacc

SEQ ID NO: 16629 - DNA, 32 bp, Artificial
  oligonucleotide probe
ggtcgcaggcgagggttcacgccttggccacc

SEQ ID NO: 16630 - DNA, 32 bp, Artificial
  oligonucleotide probe
gagcgagcagcgggtccctcagcgcggaacca

SEQ ID NO: 16631 - DNA, 32 bp, Artificial
  oligonucleotide probe
acgccctcaccagcgacctcagcgcggaacca

SEQ ID NO: 16632 - DNA, 32 bp, Artificial
  oligonucleotide probe
cggagcaggagcggaaagcggtccgcgagagc

SEQ ID NO: 16633 - DNA, 32 bp, Artificial
  oligonucleotide probe
ggtcgcctgtccagcgagcggtccgcgagagc

SEQ ID NO: 16634 - DNA, 32 bp, Artificial
  oligonucleotide probe
cacccgagagcggtgggagcggtctggcggaa

SEQ ID NO: 16635 - DNA, 32 bp, Artificial
  oligonucleotide probe
gcgagtcccggaagcggagcggtctggcggaa

SEQ ID NO: 16636 - DNA, 32 bp, Artificial
  oligonucleotide probe
gagcgagcagcgggtcgtccgagcagcggcct

SEQ ID NO: 16637 - DNA, 32 bp, Artificial
  oligonucleotide probe
acgccctcaccagcgagtccgagcagcggcct

SEQ ID NO: 16638 - DNA, 32 bp, Artificial
  oligonucleotide probe
cggagcaggagcggaaacgccaggcgaggtgg

SEQ ID NO: 16639 - DNA, 32 bp, Artificial
  oligonucleotide probe
ggtcgcctgtccagcgacgccaggcgaggtgg

SEQ ID NO: 16640 - DNA, 32 bp, Artificial
  oligonucleotide probe
gacgcaccagcgcgagtggcgggtgacggtgg

SEQ ID NO: 16641 - DNA, 32 bp, Artificial
  oligonucleotide probe
tggcaccagcaggggttggcgggtgacggtgg

SEQ ID NO: 16642 - DNA, 32 bp, Artificial
  oligonucleotide probe
gacgcaccagcgcgaggtccgagcagcggcct

SEQ ID NO: 16643 - DNA, 32 bp, Artificial
  oligonucleotide probe
tggcaccagcaggggtgtccgagcagcggcct

SEQ ID NO: 16644 - DNA, 32 bp, Artificial
  oligonucleotide probe
cacccgagagcggtgggtggcggaggtcggaa

SEQ ID NO: 16645 - DNA, 32 bp, Artificial
  oligonucleotide probe
gcgagtcccggaagcggtggcggaggtcggaa

SEQ ID NO: 16646 - DNA, 32 bp, Artificial
  oligonucleotide probe
cgagcaccgagccggagcgatggccaggtggc

SEQ ID NO: 16647 - DNA, 32 bp, Artificial
  oligonucleotide probe
cctccggacctcacgcgcgatggccaggtggc

SEQ ID NO: 16648 - DNA, 32 bp, Artificial
  oligonucleotide probe
tggcgcctgtccgtgggcagcaccagcgtggc

SEQ ID NO: 16649 - DNA, 32 bp, Artificial
  oligonucleotide probe
gtggcgagcctcgggtgcagcaccagcgtggc

SEQ ID NO: 16650 - DNA, 32 bp, Artificial
  oligonucleotide probe
gtgggggtgcagggaagcctgggtcaccacgc

SEQ ID NO: 16651 - DNA, 32 bp, Artificial
  oligonucleotide probe
ggtcgcaggcgagggtgcctgggtcaccacgc

SEQ ID NO: 16652 - DNA, 32 bp, Artificial
  oligonucleotide probe
gagcgagcagcgggtcgcctcggagacggcag

SEQ ID NO: 16653 - DNA, 32 bp, Artificial
  oligonucleotide probe
acgccctcaccagcgagcctcggagacggcag

SEQ ID NO: 16654 - DNA, 32 bp, Artificial
  oligonucleotide probe
gagcgagcagcgggtcgtggcggaggtcggaa

SEQ ID NO: 16655 - DNA, 32 bp, Artificial
  oligonucleotide probe
acgccctcaccagcgagtggcggaggtcggaa

SEQ ID NO: 16656 - DNA, 32 bp, Artificial
  oligonucleotide probe
gcgacagggcctgcctgcagcaccagcgtggc

SEQ ID NO: 16657 - DNA, 32 bp, Artificial
  oligonucleotide probe
agcggcgagagcgtccgcagcaccagcgtggc

SEQ ID NO: 16658 - DNA, 32 bp, Artificial
  oligonucleotide probe
cacccgagagcggtggagcgccaatcacgggt

SEQ ID NO: 16659 - DNA, 32 bp, Artificial
  oligonucleotide probe
gcgagtcccggaagcgagcgccaatcacgggt

SEQ ID NO: 16660 - DNA, 32 bp, Artificial
  oligonucleotide probe
caggcctccctcgcgaacgcggtccaccgtgg

SEQ ID NO: 16661 - DNA, 32 bp, Artificial
  oligonucleotide probe
caccagcgagacgcgaacgcggtccaccgtgg

SEQ ID NO: 16662 - DNA, 32 bp, Artificial
  oligonucleotide probe
gtggccaatcacgcgacaggggaagggtcgga

SEQ ID NO: 16663 - DNA, 32 bp, Artificial
  oligonucleotide probe
agcgcaccgacgacgccaggggaagggtcgga

SEQ ID NO: 16664 - DNA, 32 bp, Artificial
  oligonucleotide probe
gcaggacggacggcctgcctagcgcctcgacg

SEQ ID NO: 16665 - DNA, 32 bp, Artificial
  oligonucleotide probe
gcgacctcacgcgcaggcctagcgcctcgacg

SEQ ID NO: 16666 - DNA, 32 bp, Artificial
  oligonucleotide probe
gtgggggtgcagggaacaccgggtggtcagcg

SEQ ID NO: 16667 - DNA, 32 bp, Artificial
  oligonucleotide probe
ggtcgcaggcgagggtcaccgggtggtcagcg

SEQ ID NO: 16668 - DNA, 32 bp, Artificial
  oligonucleotide probe
gtgggggtgcagggaacaccgcgaggtcacgc

SEQ ID NO: 16669 - DNA, 32 bp, Artificial
  oligonucleotide probe
ggtcgcaggcgagggtcaccgcgaggtcacgc

SEQ ID NO: 16670 - DNA, 32 bp, Artificial
  oligonucleotide probe
gagcgagcagcgggtctggcgtgggggtccaa

SEQ ID NO: 16671 - DNA, 32 bp, Artificial
  oligonucleotide probe
acgccctcaccagcgatggcgtgggggtccaa

SEQ ID NO: 16672 - DNA, 32 bp, Artificial
  oligonucleotide probe
cacccgagagcggtggcaccgacgggaaacgc

SEQ ID NO: 16673 - DNA, 32 bp, Artificial
  oligonucleotide probe
gcgagtcccggaagcgcaccgacgggaaacgc

SEQ ID NO: 16674 - DNA, 32 bp, Artificial
  oligonucleotide probe
caggacgctggccctcacgcggaagacgtggc

SEQ ID NO: 16675 - DNA, 32 bp, Artificial
  oligonucleotide probe
cctcgtggcggacggaacgcggaagacgtggc

SEQ ID NO: 16676 - DNA, 32 bp, Artificial
  oligonucleotide probe
caggacgctggccctccaccgacgggaaacgc

SEQ ID NO: 16677 - DNA, 32 bp, Artificial
  oligonucleotide probe
cctcgtggcggacggacaccgacgggaaacgc

SEQ ID NO: 16678 - DNA, 32 bp, Artificial
  oligonucleotide probe
gacggagcacgccggagacggcgagtgggcag

SEQ ID NO: 16679 - DNA, 32 bp, Artificial
  oligonucleotide probe
cggagcctgagcgtgggacggcgagtgggcag

SEQ ID NO: 16680 - DNA, 32 bp, Artificial
  oligonucleotide probe
gacgcaccagcgcgagcctcgcctcgaggagc

SEQ ID NO: 16681 - DNA, 32 bp, Artificial
  oligonucleotide probe
tggcaccagcaggggtcctcgcctcgaggagc

SEQ ID NO: 16682 - DNA, 32 bp, Artificial
  oligonucleotide probe
tggcgcctgtccgtgggcagcggagcctgagc

SEQ ID NO: 16683 - DNA, 32 bp, Artificial
  oligonucleotide probe
gtggcgagcctcgggtgcagcggagcctgagc

SEQ ID NO: 16684 - DNA, 32 bp, Artificial
  oligonucleotide probe
gacgcaccagcgcgagacgcggtccaccgtgg

SEQ ID NO: 16685 - DNA, 32 bp, Artificial
  oligonucleotide probe
tggcaccagcaggggtacgcggtccaccgtgg

SEQ ID NO: 16686 - DNA, 32 bp, Artificial
  oligonucleotide probe
tgctcggatgctgcgaacgcgagcgggtgcag

SEQ ID NO: 16687 - DNA, 32 bp, Artificial
  oligonucleotide probe
gagcgcagccaagcctacgcgagcgggtgcag

SEQ ID NO: 16688 - DNA, 32 bp, Artificial
  oligonucleotide probe
tgctcggatgctgcgacaccgcgaggtcacgc

SEQ ID NO: 16689 - DNA, 32 bp, Artificial
  oligonucleotide probe
gagcgcagccaagcctcaccgcgaggtcacgc

SEQ ID NO: 16690 - DNA, 32 bp, Artificial
  oligonucleotide probe
gtgggggtgcagggaaggaagcctgcgacgga

SEQ ID NO: 16691 - DNA, 32 bp, Artificial
  oligonucleotide probe
ggtcgcaggcgagggtggaagcctgcgacgga

SEQ ID NO: 16692 - DNA, 32 bp, Artificial
  oligonucleotide probe
agcggcgagagcgtcccgagcggaggtcccaa

SEQ ID NO: 16693 - DNA, 32 bp, Artificial
  oligonucleotide probe
gacgcaccagcgcgagcgagcggaggtcccaa

SEQ ID NO: 16694 - DNA, 32 bp, Artificial
  oligonucleotide probe
cagggtgggcgagcgagtccgagcagcggcct

SEQ ID NO: 16695 - DNA, 32 bp, Artificial
  oligonucleotide probe
acgcccaacagggagcgtccgagcagcggcct

SEQ ID NO: 16696 - DNA, 32 bp, Artificial
  oligonucleotide probe
gacgcaccagcgcgaggacggggtcggacgag

SEQ ID NO: 16697 - DNA, 32 bp, Artificial
  oligonucleotide probe
tggcaccagcaggggtgacggggtcggacgag

SEQ ID NO: 16698 - DNA, 32 bp, Artificial
  oligonucleotide probe
cacccgagagcggtgggcagcaccagcgtggc

SEQ ID NO: 16699 - DNA, 32 bp, Artificial
  oligonucleotide probe
gcgagtcccggaagcggcagcaccagcgtggc

SEQ ID NO: 16700 - DNA, 32 bp, Artificial
  oligonucleotide probe
gtggccaatcacgcgatgctgggtgcaggcga

SEQ ID NO: 16701 - DNA, 32 bp, Artificial
  oligonucleotide probe
agcgcaccgacgacgctgctgggtgcaggcga

SEQ ID NO: 16702 - DNA, 32 bp, Artificial
  oligonucleotide probe
agcggcgagagcgtcctggcgcctgtccgtgg

SEQ ID NO: 16703 - DNA, 32 bp, Artificial
  oligonucleotide probe
gacgcaccagcgcgagtggcgcctgtccgtgg

SEQ ID NO: 16704 - DNA, 32 bp, Artificial
  oligonucleotide probe
gagcgagcagcgggtcgagcgcgacacccagg

SEQ ID NO: 16705 - DNA, 32 bp, Artificial
  oligonucleotide probe
acgccctcaccagcgagagcgcgacacccagg

SEQ ID NO: 16706 - DNA, 32 bp, Artificial
  oligonucleotide probe
tggcgcctgtccgtggcaggagcgggaagcga

SEQ ID NO: 16707 - DNA, 32 bp, Artificial
  oligonucleotide probe
gtggcgagcctcgggtcaggagcgggaagcga

SEQ ID NO: 16708 - DNA, 32 bp, Artificial
  oligonucleotide probe
cggagcaggagcggaagcctcggagacggcag

SEQ ID NO: 16709 - DNA, 32 bp, Artificial
  oligonucleotide probe
ggtcgcctgtccagcggcctcggagacggcag

SEQ ID NO: 16710 - DNA, 32 bp, Artificial
  oligonucleotide probe
tgctcggatgctgcgaggaagcctgcgacgga

SEQ ID NO: 16711 - DNA, 32 bp, Artificial
  oligonucleotide probe
gagcgcagccaagcctggaagcctgcgacgga

SEQ ID NO: 16712 - DNA, 32 bp, Artificial
  oligonucleotide probe
gtggccaatcacgcgacaccgacgggaaacgc

SEQ ID NO: 16713 - DNA, 32 bp, Artificial
  oligonucleotide probe
agcgcaccgacgacgccaccgacgggaaacgc

SEQ ID NO: 16714 - DNA, 32 bp, Artificial
  oligonucleotide probe
caggcctccctcgcgaggaagcctgcgacgga

SEQ ID NO: 16715 - DNA, 32 bp, Artificial
  oligonucleotide probe
caccagcgagacgcgaggaagcctgcgacgga

SEQ ID NO: 16716 - DNA, 32 bp, Artificial
  oligonucleotide probe
gtggccaatcacgcgagagcgcgacacccagg

SEQ ID NO: 16717 - DNA, 32 bp, Artificial
  oligonucleotide probe
agcgcaccgacgacgcgagcgcgacacccagg

SEQ ID NO: 16718 - DNA, 32 bp, Artificial
  oligonucleotide probe
cgagcaccgagccggatggcacgcgagccagg

SEQ ID NO: 16719 - DNA, 32 bp, Artificial
  oligonucleotide probe
cctccggacctcacgctggcacgcgagccagg

SEQ ID NO: 16720 - DNA, 32 bp, Artificial
  oligonucleotide probe
cagggtgggcgagcgaagcggtccgcgagagc

SEQ ID NO: 16721 - DNA, 32 bp, Artificial
  oligonucleotide probe
acgcccaacagggagcagcggtccgcgagagc

SEQ ID NO: 16722 - DNA, 32 bp, Artificial
  oligonucleotide probe
gcgacagggcctgcctgacggcgagtgggcag

SEQ ID NO: 16723 - DNA, 32 bp, Artificial
  oligonucleotide probe
agcggcgagagcgtccgacggcgagtgggcag

SEQ ID NO: 16724 - DNA, 32 bp, Artificial
  oligonucleotide probe
tggcgcctgtccgtgggtccggaagtgggcga

SEQ ID NO: 16725 - DNA, 32 bp, Artificial
  oligonucleotide probe
gtggcgagcctcgggtgtccggaagtgggcga

SEQ ID NO: 16726 - DNA, 32 bp, Artificial
  oligonucleotide probe
gacgcaccagcgcgagacgcgcctgacgcctc

SEQ ID NO: 16727 - DNA, 32 bp, Artificial
  oligonucleotide probe
tggcaccagcaggggtacgcgcctgacgcctc

SEQ ID NO: 16728 - DNA, 32 bp, Artificial
  oligonucleotide probe
gcgacagggcctgcctaccacggaagcgcgga

SEQ ID NO: 16729 - DNA, 32 bp, Artificial
  oligonucleotide probe
agcggcgagagcgtccaccacggaagcgcgga

SEQ ID NO: 16730 - DNA, 32 bp, Artificial
  oligonucleotide probe
cgagcaccgagccggagcaggcagccaatggc

SEQ ID NO: 16731 - DNA, 32 bp, Artificial
  oligonucleotide probe
cctccggacctcacgcgcaggcagccaatggc

SEQ ID NO: 16732 - DNA, 32 bp, Artificial
  oligonucleotide probe
gacgcaccagcgcgagtggcacgcgagccagg

SEQ ID NO: 16733 - DNA, 32 bp, Artificial
  oligonucleotide probe
tggcaccagcaggggttggcacgcgagccagg

SEQ ID NO: 16734 - DNA, 32 bp, Artificial
  oligonucleotide probe
gtgggggtgcagggaagacggacgacgcgtgg

SEQ ID NO: 16735 - DNA, 32 bp, Artificial
  oligonucleotide probe
ggtcgcaggcgagggtgacggacgacgcgtgg

SEQ ID NO: 16736 - DNA, 32 bp, Artificial
  oligonucleotide probe
caggcctccctcgcgagagcgcgacacccagg

SEQ ID NO: 16737 - DNA, 32 bp, Artificial
  oligonucleotide probe
caccagcgagacgcgagagcgcgacacccagg

SEQ ID NO: 16738 - DNA, 32 bp, Artificial
  oligonucleotide probe
gtgggggtgcagggaaacgccaggcgaggtgg

SEQ ID NO: 16739 - DNA, 32 bp, Artificial
  oligonucleotide probe
ggtcgcaggcgagggtacgccaggcgaggtgg

SEQ ID NO: 16740 - DNA, 32 bp, Artificial
  oligonucleotide probe
gcgacagggcctgcctggaaagcggcctggaa

SEQ ID NO: 16741 - DNA, 32 bp, Artificial
  oligonucleotide probe
agcggcgagagcgtccggaaagcggcctggaa

SEQ ID NO: 16742 - DNA, 32 bp, Artificial
  oligonucleotide probe
tggcgcctgtccgtggagcggtccgcgagagc

SEQ ID NO: 16743 - DNA, 32 bp, Artificial
  oligonucleotide probe
gtggcgagcctcgggtagcggtccgcgagagc

SEQ ID NO: 16744 - DNA, 32 bp, Artificial
  oligonucleotide probe
cggagcaggagcggaagacggcgagtgggcag

SEQ ID NO: 16745 - DNA, 32 bp, Artificial
  oligonucleotide probe
ggtcgcctgtccagcggacggcgagtgggcag

SEQ ID NO: 16746 - DNA, 32 bp, Artificial
  oligonucleotide probe
gacggagcacgccggaacgcgcctgacgcctc

SEQ ID NO: 16747 - DNA, 32 bp, Artificial
  oligonucleotide probe
cggagcctgagcgtggacgcgcctgacgcctc

SEQ ID NO: 16748 - DNA, 32 bp, Artificial
  oligonucleotide probe
cagggtgggcgagcgaacgcggtccaccgtgg

SEQ ID NO: 16749 - DNA, 32 bp, Artificial
  oligonucleotide probe
acgcccaacagggagcacgcggtccaccgtgg

SEQ ID NO: 16750 - DNA, 32 bp, Artificial
  oligonucleotide probe
gtccgggtcaggcagggcctcggagacggcag

SEQ ID NO: 16751 - DNA, 32 bp, Artificial
  oligonucleotide probe
cggagagcgcgagcctgcctcggagacggcag

SEQ ID NO: 16752 - DNA, 32 bp, Artificial
  oligonucleotide probe
gcaggacggacggcctcaccgacgggaaacgc

SEQ ID NO: 16753 - DNA, 32 bp, Artificial
  oligonucleotide probe
gcgacctcacgcgcagcaccgacgggaaacgc

SEQ ID NO: 16754 - DNA, 32 bp, Artificial
  oligonucleotide probe
cgagcaccgagccggagcctgcgagagctggc

SEQ ID NO: 16755 - DNA, 32 bp, Artificial
  oligonucleotide probe
cctccggacctcacgcgcctgcgagagctggc

SEQ ID NO: 16756 - DNA, 32 bp, Artificial
  oligonucleotide probe
gacgcaccagcgcgagcaccgcgaggtcacgc

SEQ ID NO: 16757 - DNA, 32 bp, Artificial
  oligonucleotide probe
tggcaccagcaggggtcaccgcgaggtcacgc

SEQ ID NO: 16758 - DNA, 32 bp, Artificial
  oligonucleotide probe
cagggtgggcgagcgaacgcaccagtcccgga

SEQ ID NO: 16759 - DNA, 32 bp, Artificial
  oligonucleotide probe
acgcccaacagggagcacgcaccagtcccgga

SEQ ID NO: 16760 - DNA, 32 bp, Artificial
  oligonucleotide probe
gtgggggtgcagggaagacggggtcggacgag

SEQ ID NO: 16761 - DNA, 32 bp, Artificial
  oligonucleotide probe
ggtcgcaggcgagggtgacggggtcggacgag

SEQ ID NO: 16762 - DNA, 32 bp, Artificial
  oligonucleotide probe
agcggcgagagcgtcctgctcggatgctgcga

SEQ ID NO: 16763 - DNA, 32 bp, Artificial
  oligonucleotide probe
gacgcaccagcgcgagtgctcggatgctgcga

SEQ ID NO: 16764 - DNA, 32 bp, Artificial
  oligonucleotide probe
caggcctccctcgcgacaggggaagggtcgga

SEQ ID NO: 16765 - DNA, 32 bp, Artificial
  oligonucleotide probe
caccagcgagacgcgacaggggaagggtcgga

SEQ ID NO: 16766 - DNA, 32 bp, Artificial
  oligonucleotide probe
gagcgagcagcgggtccaggggaagggtcgga

SEQ ID NO: 16767 - DNA, 32 bp, Artificial
  oligonucleotide probe
acgccctcaccagcgacaggggaagggtcgga

SEQ ID NO: 16768 - DNA, 32 bp, Artificial
  oligonucleotide probe
tgctcggatgctgcgacctcagcgcggaacca

SEQ ID NO: 16769 - DNA, 32 bp, Artificial
  oligonucleotide probe
gagcgcagccaagcctcctcagcgcggaacca

SEQ ID NO: 16770 - DNA, 32 bp, Artificial
  oligonucleotide probe
gcgacagggcctgcctaccatggcacgcgacg

SEQ ID NO: 16771 - DNA, 32 bp, Artificial
  oligonucleotide probe
agcggcgagagcgtccaccatggcacgcgacg

SEQ ID NO: 16772 - DNA, 32 bp, Artificial
  oligonucleotide probe
gagcgagcagcgggtcgtccacgctggcgacg

SEQ ID NO: 16773 - DNA, 32 bp, Artificial
  oligonucleotide probe
acgccctcaccagcgagtccacgctggcgacg

SEQ ID NO: 16774 - DNA, 32 bp, Artificial
  oligonucleotide probe
gtgggggtgcagggaagcctgtgggtccgcga

SEQ ID NO: 16775 - DNA, 32 bp, Artificial
  oligonucleotide probe
ggtcgcaggcgagggtgcctgtgggtccgcga

SEQ ID NO: 16776 - DNA, 32 bp, Artificial
  oligonucleotide probe
cacccgagagcggtgggcctagcgcctcgacg

SEQ ID NO: 16777 - DNA, 32 bp, Artificial
  oligonucleotide probe
gcgagtcccggaagcggcctagcgcctcgacg

SEQ ID NO: 16778 - DNA, 32 bp, Artificial
  oligonucleotide probe
tggcgcctgtccgtggacgcaccagtcccgga

SEQ ID NO: 16779 - DNA, 32 bp, Artificial
  oligonucleotide probe
gtggcgagcctcgggtacgcaccagtcccgga

SEQ ID NO: 16780 - DNA, 32 bp, Artificial
  oligonucleotide probe
cacccgagagcggtggggaaagcggcctggaa

SEQ ID NO: 16781 - DNA, 32 bp, Artificial
  oligonucleotide probe
gcgagtcccggaagcgggaaagcggcctggaa

SEQ ID NO: 16782 - DNA, 32 bp, Artificial
  oligonucleotide probe
gacgcaccagcgcgaggagcggtctggcggaa

SEQ ID NO: 16783 - DNA, 32 bp, Artificial
  oligonucleotide probe
tggcaccagcaggggtgagcggtctggcggaa

SEQ ID NO: 16784 - DNA, 32 bp, Artificial
  oligonucleotide probe
gcaggacggacggcctacgcgcctgacgcctc

SEQ ID NO: 16785 - DNA, 32 bp, Artificial
  oligonucleotide probe
gcgacctcacgcgcagacgcgcctgacgcctc

SEQ ID NO: 16786 - DNA, 32 bp, Artificial
  oligonucleotide probe
gacgcaccagcgcgagtcacgccttggccacc

SEQ ID NO: 16787 - DNA, 32 bp, Artificial
  oligonucleotide probe
tggcaccagcaggggttcacgccttggccacc

SEQ ID NO: 16788 - DNA, 32 bp, Artificial
  oligonucleotide probe
caggacgctggccctcgtccacgctggcgacg

SEQ ID NO: 16789 - DNA, 32 bp, Artificial
  oligonucleotide probe
cctcgtggcggacggagtccacgctggcgacg

SEQ ID NO: 16790 - DNA, 32 bp, Artificial
  oligonucleotide probe
cgagcaccgagccggaacgcgagcgggtgcag

SEQ ID NO: 16791 - DNA, 32 bp, Artificial
  oligonucleotide probe
cctccggacctcacgcacgcgagcgggtgcag

SEQ ID NO: 16792 - DNA, 32 bp, Artificial
  oligonucleotide probe
caggacgctggccctcgtccgagcagcggcct

SEQ ID NO: 16793 - DNA, 32 bp, Artificial
  oligonucleotide probe
cctcgtggcggacggagtccgagcagcggcct

SEQ ID NO: 16794 - DNA, 32 bp, Artificial
  oligonucleotide probe
cgagcaccgagccggagagcgcctcctcgagc

SEQ ID NO: 16795 - DNA, 32 bp, Artificial
  oligonucleotide probe
cctccggacctcacgcgagcgcctcctcgagc

SEQ ID NO: 16796 - DNA, 32 bp, Artificial
  oligonucleotide probe
gtggccaatcacgcgagtccgagcagcggcct

SEQ ID NO: 16797 - DNA, 32 bp, Artificial
  oligonucleotide probe
agcgcaccgacgacgcgtccgagcagcggcct

SEQ ID NO: 16798 - DNA, 32 bp, Artificial
  oligonucleotide probe
agcggcgagagcgtccgacggagcacgccgga

SEQ ID NO: 16799 - DNA, 32 bp, Artificial
  oligonucleotide probe
gacgcaccagcgcgaggacggagcacgccgga

SEQ ID NO: 16800 - DNA, 32 bp, Artificial
  oligonucleotide probe
gtccgggtcaggcagggacggcgagtgggcag

SEQ ID NO: 16801 - DNA, 32 bp, Artificial
  oligonucleotide probe
cggagagcgcgagcctgacggcgagtgggcag

SEQ ID NO: 16802 - DNA, 32 bp, Artificial
  oligonucleotide probe
tgctcggatgctgcgatggcagcgggtcgtgg

SEQ ID NO: 16803 - DNA, 32 bp, Artificial
  oligonucleotide probe
gagcgcagccaagccttggcagcgggtcgtgg

SEQ ID NO: 16804 - DNA, 32 bp, Artificial
  oligonucleotide probe
gagcgagcagcgggtccaccgggtggtcagcg

SEQ ID NO: 16805 - DNA, 32 bp, Artificial
  oligonucleotide probe
acgccctcaccagcgacaccgggtggtcagcg

SEQ ID NO: 16806 - DNA, 32 bp, Artificial
  oligonucleotide probe
gcgacagggcctgcctgcctgcgagagctggc

SEQ ID NO: 16807 - DNA, 32 bp, Artificial
  oligonucleotide probe
agcggcgagagcgtccgcctgcgagagctggc

SEQ ID NO: 16808 - DNA, 32 bp, Artificial
  oligonucleotide probe
caggcctccctcgcgagcctagcgcctcgacg

SEQ ID NO: 16809 - DNA, 32 bp, Artificial
  oligonucleotide probe
caccagcgagacgcgagcctagcgcctcgacg

SEQ ID NO: 16810 - DNA, 32 bp, Artificial
  oligonucleotide probe
gtggccaatcacgcgagacgcaggcggagggt

SEQ ID NO: 16811 - DNA, 32 bp, Artificial
  oligonucleotide probe
agcgcaccgacgacgcgacgcaggcggagggt

SEQ ID NO: 16812 - DNA, 32 bp, Artificial
  oligonucleotide probe
caggcctccctcgcgacaccgacgggaaacgc

SEQ ID NO: 16813 - DNA, 32 bp, Artificial
  oligonucleotide probe
caccagcgagacgcgacaccgacgggaaacgc

SEQ ID NO: 16814 - DNA, 32 bp, Artificial
  oligonucleotide probe
cgagcaccgagccggagtgggacgacgcgcga

SEQ ID NO: 16815 - DNA, 32 bp, Artificial
  oligonucleotide probe
cctccggacctcacgcgtgggacgacgcgcga

SEQ ID NO: 16816 - DNA, 32 bp, Artificial
  oligonucleotide probe
gacgcaccagcgcgaggacggcgagtgggcag

SEQ ID NO: 16817 - DNA, 32 bp, Artificial
  oligonucleotide probe
tggcaccagcaggggtgacggcgagtgggcag

SEQ ID NO: 16818 - DNA, 32 bp, Artificial
  oligonucleotide probe
cgagcaccgagccggatggccaggcggagtgg

SEQ ID NO: 16819 - DNA, 32 bp, Artificial
  oligonucleotide probe
cctccggacctcacgctggccaggcggagtgg

SEQ ID NO: 16820 - DNA, 32 bp, Artificial
  oligonucleotide probe
acgcagcggggtgacggcctagcgcctcgacg

SEQ ID NO: 16821 - DNA, 32 bp, Artificial
  oligonucleotide probe
caccgcctcagggacggcctagcgcctcgacg

SEQ ID NO: 16822 - DNA, 32 bp, Artificial
  oligonucleotide probe
caggcctccctcgcgagacgcaggcggagggt

SEQ ID NO: 16823 - DNA, 32 bp, Artificial
  oligonucleotide probe
caccagcgagacgcgagacgcaggcggagggt

SEQ ID NO: 16824 - DNA, 32 bp, Artificial
  oligonucleotide probe
gtgggggtgcagggaatggcagcgggtcgtgg

SEQ ID NO: 16825 - DNA, 32 bp, Artificial
  oligonucleotide probe
ggtcgcaggcgagggttggcagcgggtcgtgg

SEQ ID NO: 16826 - DNA, 32 bp, Artificial
  oligonucleotide probe
gtgggggtgcagggaatggcgtgggggtccaa

SEQ ID NO: 16827 - DNA, 32 bp, Artificial
  oligonucleotide probe
ggtcgcaggcgagggttggcgtgggggtccaa

SEQ ID NO: 16828 - DNA, 32 bp, Artificial
  oligonucleotide probe
tggcgcctgtccgtgggcagcctctggccgag

SEQ ID NO: 16829 - DNA, 32 bp, Artificial
  oligonucleotide probe
gtggcgagcctcgggtgcagcctctggccgag

SEQ ID NO: 16830 - DNA, 32 bp, Artificial
  oligonucleotide probe
caggcctccctcgcgagtccggaagtgggcga

SEQ ID NO: 16831 - DNA, 32 bp, Artificial
  oligonucleotide probe
caccagcgagacgcgagtccggaagtgggcga

SEQ ID NO: 16832 - DNA, 32 bp, Artificial
  oligonucleotide probe
cacccgagagcggtggacgcgcctgacgcctc

SEQ ID NO: 16833 - DNA, 32 bp, Artificial
  oligonucleotide probe
gcgagtcccggaagcgacgcgcctgacgcctc

SEQ ID NO: 16834 - DNA, 32 bp, Artificial
  oligonucleotide probe
caggacgctggccctcaccatggcacgcgacg

SEQ ID NO: 16835 - DNA, 32 bp, Artificial
  oligonucleotide probe
cctcgtggcggacggaaccatggcacgcgacg

SEQ ID NO: 16836 - DNA, 32 bp, Artificial
  oligonucleotide probe
gcaggacggacggcctgacggcgagtgggcag

SEQ ID NO: 16837 - DNA, 32 bp, Artificial
  oligonucleotide probe
gcgacctcacgcgcaggacggcgagtgggcag

SEQ ID NO: 16838 - DNA, 32 bp, Artificial
  oligonucleotide probe
cagggtgggcgagcgagcaggcagccaatggc

SEQ ID NO: 16839 - DNA, 32 bp, Artificial
  oligonucleotide probe
acgcccaacagggagcgcaggcagccaatggc

SEQ ID NO: 16840 - DNA, 32 bp, Artificial
  oligonucleotide probe
gagcgagcagcgggtcgcgacgagcgagccaa

SEQ ID NO: 16841 - DNA, 32 bp, Artificial
  oligonucleotide probe
acgccctcaccagcgagcgacgagcgagccaa

SEQ ID NO: 16842 - DNA, 32 bp, Artificial
  oligonucleotide probe
gagcgagcagcgggtcgcagcctctggccgag

SEQ ID NO: 16843 - DNA, 32 bp, Artificial
  oligonucleotide probe
acgccctcaccagcgagcagcctctggccgag

SEQ ID NO: 16844 - DNA, 32 bp, Artificial
  oligonucleotide probe
gtggccaatcacgcgacaccgggtggtcagcg

SEQ ID NO: 16845 - DNA, 32 bp, Artificial
  oligonucleotide probe
agcgcaccgacgacgccaccgggtggtcagcg

SEQ ID NO: 16846 - DNA, 32 bp, Artificial
  oligonucleotide probe
caggacgctggccctctcacgccttggccacc

SEQ ID NO: 16847 - DNA, 32 bp, Artificial
  oligonucleotide probe
cctcgtggcggacggatcacgccttggccacc

SEQ ID NO: 16848 - DNA, 32 bp, Artificial
  oligonucleotide probe
cagggtgggcgagcgaaccatggcacgcgacg

SEQ ID NO: 16849 - DNA, 32 bp, Artificial
  oligonucleotide probe
acgcccaacagggagcaccatggcacgcgacg

SEQ ID NO: 16850 - DNA, 32 bp, Artificial
  oligonucleotide probe
tggcgcctgtccgtggggaagcctgcgacgga

SEQ ID NO: 16851 - DNA, 32 bp, Artificial
  oligonucleotide probe
gtggcgagcctcgggtggaagcctgcgacgga

SEQ ID NO: 16852 - DNA, 32 bp, Artificial
  oligonucleotide probe
gtgggggtgcagggaagagcggtctggcggaa

SEQ ID NO: 16853 - DNA, 32 bp, Artificial
  oligonucleotide probe
ggtcgcaggcgagggtgagcggtctggcggaa

SEQ ID NO: 16854 - DNA, 32 bp, Artificial
  oligonucleotide probe
cagggtgggcgagcgacaccgggtggtcagcg

SEQ ID NO: 16855 - DNA, 32 bp, Artificial
  oligonucleotide probe
acgcccaacagggagccaccgggtggtcagcg

SEQ ID NO: 16856 - DNA, 32 bp, Artificial
  oligonucleotide probe
gcgacagggcctgcctccaaagcgggaatggc

SEQ ID NO: 16857 - DNA, 32 bp, Artificial
  oligonucleotide probe
agcggcgagagcgtccccaaagcgggaatggc

SEQ ID NO: 16858 - DNA, 32 bp, Artificial
  oligonucleotide probe
tggcgcctgtccgtggtggccaggcggagtgg

SEQ ID NO: 16859 - DNA, 32 bp, Artificial
  oligonucleotide probe
gtggcgagcctcgggttggccaggcggagtgg

SEQ ID NO: 16860 - DNA, 32 bp, Artificial
  oligonucleotide probe
caggacgctggccctcggaagcctgcgacgga

SEQ ID NO: 16861 - DNA, 32 bp, Artificial
  oligonucleotide probe
cctcgtggcggacggaggaagcctgcgacgga

SEQ ID NO: 16862 - DNA, 32 bp, Artificial
  oligonucleotide probe
caggacgctggccctcacgcgcctgacgcctc

SEQ ID NO: 16863 - DNA, 32 bp, Artificial
  oligonucleotide probe
cctcgtggcggacggaacgcgcctgacgcctc

SEQ ID NO: 16864 - DNA, 32 bp, Artificial
  oligonucleotide probe
gcgacagggcctgcctgcaggcagccaatggc

SEQ ID NO: 16865 - DNA, 32 bp, Artificial
  oligonucleotide probe
agcggcgagagcgtccgcaggcagccaatggc

SEQ ID NO: 16866 - DNA, 32 bp, Artificial
  oligonucleotide probe
caggacgctggccctctggcgtgggggtccaa

SEQ ID NO: 16867 - DNA, 32 bp, Artificial
  oligonucleotide probe
cctcgtggcggacggatggcgtgggggtccaa

SEQ ID NO: 16868 - DNA, 32 bp, Artificial
  oligonucleotide probe
cggagcaggagcggaatcacgccttggccacc

SEQ ID NO: 16869 - DNA, 32 bp, Artificial
  oligonucleotide probe
ggtcgcctgtccagcgtcacgccttggccacc

SEQ ID NO: 16870 - DNA, 32 bp, Artificial
  oligonucleotide probe
tggcgcctgtccgtgggtccgagcagcggcct

SEQ ID NO: 16871 - DNA, 32 bp, Artificial
  oligonucleotide probe
gtggcgagcctcgggtgtccgagcagcggcct

SEQ ID NO: 16872 - DNA, 32 bp, Artificial
  oligonucleotide probe
gcaggacggacggcctggaagcctgcgacgga

SEQ ID NO: 16873 - DNA, 32 bp, Artificial
  oligonucleotide probe
gcgacctcacgcgcagggaagcctgcgacgga

SEQ ID NO: 16874 - DNA, 32 bp, Artificial
  oligonucleotide probe
gcgacagggcctgcctgtccgagcagcggcct

SEQ ID NO: 16875 - DNA, 32 bp, Artificial
  oligonucleotide probe
agcggcgagagcgtccgtccgagcagcggcct

SEQ ID NO: 16876 - DNA, 32 bp, Artificial
  oligonucleotide probe
caggacgctggccctctggccaggcggagtgg

SEQ ID NO: 16877 - DNA, 32 bp, Artificial
  oligonucleotide probe
cctcgtggcggacggatggccaggcggagtgg

SEQ ID NO: 16878 - DNA, 32 bp, Artificial
  oligonucleotide probe
cacccgagagcggtgggcaggcagccaatggc

SEQ ID NO: 16879 - DNA, 32 bp, Artificial
  oligonucleotide probe
gcgagtcccggaagcggcaggcagccaatggc

SEQ ID NO: 16880 - DNA, 32 bp, Artificial
  oligonucleotide probe
gacgcaccagcgcgagtggcggtcgcctcgag

SEQ ID NO: 16881 - DNA, 32 bp, Artificial
  oligonucleotide probe
tggcaccagcaggggttggcggtcgcctcgag

SEQ ID NO: 16882 - DNA, 32 bp, Artificial
  oligonucleotide probe
caggcctccctcgcgaacgccaggcgaggtgg

SEQ ID NO: 16883 - DNA, 32 bp, Artificial
  oligonucleotide probe
caccagcgagacgcgaacgccaggcgaggtgg

SEQ ID NO: 16884 - DNA, 32 bp, Artificial
  oligonucleotide probe
agcggcgagagcgtcccggagcgagtggggaa

SEQ ID NO: 16885 - DNA, 32 bp, Artificial
  oligonucleotide probe
gacgcaccagcgcgagcggagcgagtggggaa

SEQ ID NO: 16886 - DNA, 32 bp, Artificial
  oligonucleotide probe
cggagcaggagcggaaacgcgcctgacgcctc

SEQ ID NO: 16887 - DNA, 32 bp, Artificial
  oligonucleotide probe
ggtcgcctgtccagcgacgcgcctgacgcctc

SEQ ID NO: 16888 - DNA, 32 bp, Artificial
  oligonucleotide probe
gtgggggtgcagggaaggtcgacgacgccgag

SEQ ID NO: 16889 - DNA, 32 bp, Artificial
  oligonucleotide probe
ggtcgcaggcgagggtggtcgacgacgccgag

SEQ ID NO: 16890 - DNA, 32 bp, Artificial
  oligonucleotide probe
cacccgagagcggtggacgcgggtcaccgtcc

SEQ ID NO: 16891 - DNA, 32 bp, Artificial
  oligonucleotide probe
gcgagtcccggaagcgacgcgggtcaccgtcc

SEQ ID NO: 16892 - DNA, 32 bp, Artificial
  oligonucleotide probe
cagggcagggtcgggtgacggcgagtgggcag

SEQ ID NO: 16893 - DNA, 32 bp, Artificial
  oligonucleotide probe
agcggacggcaggagcgacggcgagtgggcag

SEQ ID NO: 16894 - DNA, 32 bp, Artificial
  oligonucleotide probe
cagggtgggcgagcgagcagcggagcctgagc

SEQ ID NO: 16895 - DNA, 32 bp, Artificial
  oligonucleotide probe
acgcccaacagggagcgcagcggagcctgagc

SEQ ID NO: 16896 - DNA, 32 bp, Artificial
  oligonucleotide probe
caggacgctggccctcgggtggaacgaggcga

SEQ ID NO: 16897 - DNA, 32 bp, Artificial
  oligonucleotide probe
cctcgtggcggacggagggtggaacgaggcga

SEQ ID NO: 16898 - DNA, 32 bp, Artificial
  oligonucleotide probe
gtccgggtcaggcaggacgcgcctgacgcctc

SEQ ID NO: 16899 - DNA, 32 bp, Artificial
  oligonucleotide probe
cggagagcgcgagcctacgcgcctgacgcctc

SEQ ID NO: 16900 - DNA, 32 bp, Artificial
  oligonucleotide probe
cagggcagggtcgggtgacgcaggcggagggt

SEQ ID NO: 16901 - DNA, 32 bp, Artificial
  oligonucleotide probe
agcggacggcaggagcgacgcaggcggagggt

SEQ ID NO: 16902 - DNA, 32 bp, Artificial
  oligonucleotide probe
cgagcaccgagccggagtccacgctggcgacg

SEQ ID NO: 16903 - DNA, 32 bp, Artificial
  oligonucleotide probe
cctccggacctcacgcgtccacgctggcgacg

SEQ ID NO: 16904 - DNA, 32 bp, Artificial
  oligonucleotide probe
cacccgagagcggtgggcgatggccaggtggc

SEQ ID NO: 16905 - DNA, 32 bp, Artificial
  oligonucleotide probe
gcgagtcccggaagcggcgatggccaggtggc

SEQ ID NO: 16906 - DNA, 32 bp, Artificial
  oligonucleotide probe
agcggcgagagcgtcccgaggacgccaaacgc

SEQ ID NO: 16907 - DNA, 32 bp, Artificial
  oligonucleotide probe
gacgcaccagcgcgagcgaggacgccaaacgc

SEQ ID NO: 16908 - DNA, 32 bp, Artificial
  oligonucleotide probe
gtgggggtgcagggaacaccgacgggaaacgc

SEQ ID NO: 16909 - DNA, 32 bp, Artificial
  oligonucleotide probe
ggtcgcaggcgagggtcaccgacgggaaacgc

SEQ ID NO: 16910 - DNA, 32 bp, Artificial
  oligonucleotide probe
gacgcaccagcgcgagcaccgggtggtcagcg

SEQ ID NO: 16911 - DNA, 32 bp, Artificial
  oligonucleotide probe
tggcaccagcaggggtcaccgggtggtcagcg

SEQ ID NO: 16912 - DNA, 32 bp, Artificial
  oligonucleotide probe
gcgacagggcctgcctgacgcaggcggagggt

SEQ ID NO: 16913 - DNA, 32 bp, Artificial
  oligonucleotide probe
agcggcgagagcgtccgacgcaggcggagggt

SEQ ID NO: 16914 - DNA, 32 bp, Artificial
  oligonucleotide probe
tgctcggatgctgcgagtccacgctggcgacg

SEQ ID NO: 16915 - DNA, 32 bp, Artificial
  oligonucleotide probe
gagcgcagccaagcctgtccacgctggcgacg

SEQ ID NO: 16916 - DNA, 32 bp, Artificial
  oligonucleotide probe
tggcgcctgtccgtggacgcgggtcaccgtcc

SEQ ID NO: 16917 - DNA, 32 bp, Artificial
  oligonucleotide probe
gtggcgagcctcgggtacgcgggtcaccgtcc

SEQ ID NO: 16918 - DNA, 32 bp, Artificial
  oligonucleotide probe
gtgggggtgcagggaagagcgcgacacccagg

SEQ ID NO: 16919 - DNA, 32 bp, Artificial
  oligonucleotide probe
ggtcgcaggcgagggtgagcgcgacacccagg

SEQ ID NO: 16920 - DNA, 32 bp, Artificial
  oligonucleotide probe
gtggccaatcacgcgacggacaggacgctggc

SEQ ID NO: 16921 - DNA, 32 bp, Artificial
  oligonucleotide probe
agcgcaccgacgacgccggacaggacgctggc

SEQ ID NO: 16922 - DNA, 32 bp, Artificial
  oligonucleotide probe
gtgggggtgcagggaagacgcaggcggagggt

SEQ ID NO: 16923 - DNA, 32 bp, Artificial
  oligonucleotide probe
ggtcgcaggcgagggtgacgcaggcggagggt

SEQ ID NO: 16924 - DNA, 32 bp, Artificial
  oligonucleotide probe
cgagcaggcgaggcagcaccgacgggaaacgc

SEQ ID NO: 16925 - DNA, 32 bp, Artificial
  oligonucleotide probe
gcctcaggacgcacgccaccgacgggaaacgc

SEQ ID NO: 16926 - DNA, 32 bp, Artificial
  oligonucleotide probe
cgagcaccgagccggacctctggctggcccaa

SEQ ID NO: 16927 - DNA, 32 bp, Artificial
  oligonucleotide probe
cctccggacctcacgccctctggctggcccaa

SEQ ID NO: 16928 - DNA, 32 bp, Artificial
  oligonucleotide probe
tgctcggatgctgcgagtccggaagtgggcga

SEQ ID NO: 16929 - DNA, 32 bp, Artificial
  oligonucleotide probe
gagcgcagccaagcctgtccggaagtgggcga

SEQ ID NO: 16930 - DNA, 32 bp, Artificial
  oligonucleotide probe
gtgggggtgcagggaagcagcaccagcgtggc

SEQ ID NO: 16931 - DNA, 32 bp, Artificial
  oligonucleotide probe
ggtcgcaggcgagggtgcagcaccagcgtggc

SEQ ID NO: 16932 - DNA, 32 bp, Artificial
  oligonucleotide probe
gagcgagcagcgggtccaccgacgggaaacgc

SEQ ID NO: 16933 - DNA, 32 bp, Artificial
  oligonucleotide probe
acgccctcaccagcgacaccgacgggaaacgc

SEQ ID NO: 16934 - DNA, 32 bp, Artificial
  oligonucleotide probe
gtgggggtgcagggaagcgatggccaggtggc

SEQ ID NO: 16935 - DNA, 32 bp, Artificial
  oligonucleotide probe
ggtcgcaggcgagggtgcgatggccaggtggc

SEQ ID NO: 16936 - DNA, 32 bp, Artificial
  oligonucleotide probe
agcggcgagagcgtccgtgggggtgcagggaa

SEQ ID NO: 16937 - DNA, 32 bp, Artificial
  oligonucleotide probe
gacgcaccagcgcgaggtgggggtgcagggaa

SEQ ID NO: 16938 - DNA, 32 bp, Artificial
  oligonucleotide probe
cacccgagagcggtggacgccaggcgaggtgg

SEQ ID NO: 16939 - DNA, 32 bp, Artificial
  oligonucleotide probe
gcgagtcccggaagcgacgccaggcgaggtgg

SEQ ID NO: 16940 - DNA, 32 bp, Artificial
  oligonucleotide probe
cacccgagagcggtggcaccgcgaggtcacgc

SEQ ID NO: 16941 - DNA, 32 bp, Artificial
  oligonucleotide probe
gcgagtcccggaagcgcaccgcgaggtcacgc

SEQ ID NO: 16942 - DNA, 32 bp, Artificial
  oligonucleotide probe
gtccgggtcaggcagggcctagcgcctcgacg

SEQ ID NO: 16943 - DNA, 32 bp, Artificial
  oligonucleotide probe
cggagagcgcgagcctgcctagcgcctcgacg

SEQ ID NO: 16944 - DNA, 32 bp, Artificial
  oligonucleotide probe
gtgggggtgcagggaaccaaagcgggaatggc

SEQ ID NO: 16945 - DNA, 32 bp, Artificial
  oligonucleotide probe
ggtcgcaggcgagggtccaaagcgggaatggc

SEQ ID NO: 16946 - DNA, 32 bp, Artificial
  oligonucleotide probe
cagggtgggcgagcgacggacaggacgctggc

SEQ ID NO: 16947 - DNA, 32 bp, Artificial
  oligonucleotide probe
acgcccaacagggagccggacaggacgctggc

SEQ ID NO: 16948 - DNA, 32 bp, Artificial
  oligonucleotide probe
agcggcgagagcgtcccaggcctccctcgcga

SEQ ID NO: 16949 - DNA, 32 bp, Artificial
  oligonucleotide probe
gacgcaccagcgcgagcaggcctccctcgcga

SEQ ID NO: 16950 - DNA, 32 bp, Artificial
  oligonucleotide probe
tgctcggatgctgcgaacgcgcctgacgcctc

SEQ ID NO: 16951 - DNA, 32 bp, Artificial
  oligonucleotide probe
gagcgcagccaagcctacgcgcctgacgcctc

SEQ ID NO: 16952 - DNA, 32 bp, Artificial
  oligonucleotide probe
gcgacagggcctgcctagcgccaatcacgggt

SEQ ID NO: 16953 - DNA, 32 bp, Artificial
  oligonucleotide probe
agcggcgagagcgtccagcgccaatcacgggt

SEQ ID NO: 16954 - DNA, 32 bp, Artificial
  oligonucleotide probe
ggtcgcgacacctggcacgcgcctgacgcctc

SEQ ID NO: 16955 - DNA, 32 bp, Artificial
  oligonucleotide probe
cgagcctcgggtgcgaacgcgcctgacgcctc

SEQ ID NO: 16956 - DNA, 32 bp, Artificial
  oligonucleotide probe
caggacgctggccctcgcagcaccagcgtggc

SEQ ID NO: 16957 - DNA, 32 bp, Artificial
  oligonucleotide probe
cctcgtggcggacggagcagcaccagcgtggc

SEQ ID NO: 16958 - DNA, 32 bp, Artificial
  oligonucleotide probe
cgagcaccgagccggacctcagcgcggaacca

SEQ ID NO: 16959 - DNA, 32 bp, Artificial
  oligonucleotide probe
cctccggacctcacgccctcagcgcggaacca

SEQ ID NO: 16960 - DNA, 32 bp, Artificial
  oligonucleotide probe
caggacgctggccctcgcagcctctggccgag

SEQ ID NO: 16961 - DNA, 32 bp, Artificial
  oligonucleotide probe
cctcgtggcggacggagcagcctctggccgag

SEQ ID NO: 16962 - DNA, 32 bp, Artificial
  oligonucleotide probe
cgagcaccgagccggaaccacggaagcgcgga

SEQ ID NO: 16963 - DNA, 32 bp, Artificial
  oligonucleotide probe
cctccggacctcacgcaccacggaagcgcgga

SEQ ID NO: 16964 - DNA, 32 bp, Artificial
  oligonucleotide probe
gcgacagggcctgcctcaggagcgggaagcga

SEQ ID NO: 16965 - DNA, 32 bp, Artificial
  oligonucleotide probe
agcggcgagagcgtcccaggagcgggaagcga

SEQ ID NO: 16966 - DNA, 32 bp, Artificial
  oligonucleotide probe
tgctcggatgctgcgaacgccaggcgaggtgg

SEQ ID NO: 16967 - DNA, 32 bp, Artificial
  oligonucleotide probe
gagcgcagccaagcctacgccaggcgaggtgg

SEQ ID NO: 16968 - DNA, 32 bp, Artificial
  oligonucleotide probe
cagggtgggcgagcgagtggcggaggtcggaa

SEQ ID NO: 16969 - DNA, 32 bp, Artificial
  oligonucleotide probe
acgcccaacagggagcgtggcggaggtcggaa

SEQ ID NO: 16970 - DNA, 32 bp, Artificial
  oligonucleotide probe
caggcctccctcgcgaacgcaccagtcccgga

SEQ ID NO: 16971 - DNA, 32 bp, Artificial
  oligonucleotide probe
caccagcgagacgcgaacgcaccagtcccgga

SEQ ID NO: 16972 - DNA, 32 bp, Artificial
  oligonucleotide probe
cgagcaccgagccggagtggcaggagcgacgc

SEQ ID NO: 16973 - DNA, 32 bp, Artificial
  oligonucleotide probe
cctccggacctcacgcgtggcaggagcgacgc

SEQ ID NO: 16974 - DNA, 32 bp, Artificial
  oligonucleotide probe
tgctcggatgctgcgagcaggcagccaatggc

SEQ ID NO: 16975 - DNA, 32 bp, Artificial
  oligonucleotide probe
gagcgcagccaagcctgcaggcagccaatggc

SEQ ID NO: 16976 - DNA, 32 bp, Artificial
  oligonucleotide probe
caggacgctggccctcgagcgcgacacccagg

SEQ ID NO: 16977 - DNA, 32 bp, Artificial
  oligonucleotide probe
cctcgtggcggacggagagcgcgacacccagg

SEQ ID NO: 16978 - DNA, 32 bp, Artificial
  oligonucleotide probe
gcgacagggcctgcctgggttggccgagtggc

SEQ ID NO: 16979 - DNA, 32 bp, Artificial
  oligonucleotide probe
agcggcgagagcgtccgggttggccgagtggc

SEQ ID NO: 16980 - DNA, 32 bp, Artificial
  oligonucleotide probe
cgagcaccgagccggagggttggccgagtggc

SEQ ID NO: 16981 - DNA, 32 bp, Artificial
  oligonucleotide probe
cctccggacctcacgcgggttggccgagtggc

SEQ ID NO: 16982 - DNA, 32 bp, Artificial
  oligonucleotide probe
gtgggggtgcagggaagtggcggaggtcggaa

SEQ ID NO: 16983 - DNA, 32 bp, Artificial
  oligonucleotide probe
ggtcgcaggcgagggtgtggcggaggtcggaa

SEQ ID NO: 16984 - DNA, 32 bp, Artificial
  oligonucleotide probe
tggcgcctgtccgtggcaccgcgaggtcacgc

SEQ ID NO: 16985 - DNA, 32 bp, Artificial
  oligonucleotide probe
gtggcgagcctcgggtcaccgcgaggtcacgc

SEQ ID NO: 16986 - DNA, 32 bp, Artificial
  oligonucleotide probe
cgagcaccgagccggaacgcggtccaccgtgg

SEQ ID NO: 16987 - DNA, 32 bp, Artificial
  oligonucleotide probe
cctccggacctcacgcacgcggtccaccgtgg

SEQ ID NO: 16988 - DNA, 32 bp, Artificial
  oligonucleotide probe
cgagcaccgagccggaggaagcctgcgacgga

SEQ ID NO: 16989 - DNA, 32 bp, Artificial
  oligonucleotide probe
cctccggacctcacgcggaagcctgcgacgga

SEQ ID NO: 16990 - DNA, 32 bp, Artificial
  oligonucleotide probe
gcgacagggcctgcctgtggcaggagcgacgc

SEQ ID NO: 16991 - DNA, 32 bp, Artificial
  oligonucleotide probe
agcggcgagagcgtccgtggcaggagcgacgc

SEQ ID NO: 16992 - DNA, 32 bp, Artificial
  oligonucleotide probe
gtgggggtgcagggaaacgcgagcgggtgcag

SEQ ID NO: 16993 - DNA, 32 bp, Artificial
  oligonucleotide probe
ggtcgcaggcgagggtacgcgagcgggtgcag

SEQ ID NO: 16994 - DNA, 32 bp, Artificial
  oligonucleotide probe
gacgcaccagcgcgagaccacggaagcgcgga

SEQ ID NO: 16995 - DNA, 32 bp, Artificial
  oligonucleotide probe
tggcaccagcaggggtaccacggaagcgcgga

SEQ ID NO: 16996 - DNA, 32 bp, Artificial
  oligonucleotide probe
caggacgctggccctccctcagcgcggaacca

SEQ ID NO: 16997 - DNA, 32 bp, Artificial
  oligonucleotide probe
cctcgtggcggacggacctcagcgcggaacca

SEQ ID NO: 16998 - DNA, 32 bp, Artificial
  oligonucleotide probe
gtgggggtgcagggaaacgcggaagacgtggc

SEQ ID NO: 16999 - DNA, 32 bp, Artificial
  oligonucleotide probe
ggtcgcaggcgagggtacgcggaagacgtggc

SEQ ID NO: 17000 - DNA, 32 bp, Artificial
  oligonucleotide probe
cgagcaccgagccggagtccggaagtgggcga

SEQ ID NO: 17001 - DNA, 32 bp, Artificial
  oligonucleotide probe
cctccggacctcacgcgtccggaagtgggcga

SEQ ID NO: 17002 - DNA, 32 bp, Artificial
  oligonucleotide probe
gtgggggtgcagggaaaccacggaagcgcgga

SEQ ID NO: 17003 - DNA, 32 bp, Artificial
  oligonucleotide probe
ggtcgcaggcgagggtaccacggaagcgcgga

SEQ ID NO: 17004 - DNA, 32 bp, Artificial
  oligonucleotide probe
tgctcggatgctgcgaagcggtccgcgagagc

SEQ ID NO: 17005 - DNA, 32 bp, Artificial
  oligonucleotide probe
gagcgcagccaagcctagcggtccgcgagagc

SEQ ID NO: 17006 - DNA, 32 bp, Artificial
  oligonucleotide probe
gtggccaatcacgcgaacgcaccagtcccgga

SEQ ID NO: 17007 - DNA, 32 bp, Artificial
  oligonucleotide probe
agcgcaccgacgacgcacgcaccagtcccgga

SEQ ID NO: 17008 - DNA, 32 bp, Artificial
  oligonucleotide probe
gcaggacggacggcctgcagcggagcctgagc

SEQ ID NO: 17009 - DNA, 32 bp, Artificial
  oligonucleotide probe
gcgacctcacgcgcaggcagcggagcctgagc

SEQ ID NO: 17010 - DNA, 32 bp, Artificial
  oligonucleotide probe
cgagcaccgagccggagcgagtggcagggcct

SEQ ID NO: 17011 - DNA, 32 bp, Artificial
  oligonucleotide probe
cctccggacctcacgcgcgagtggcagggcct

SEQ ID NO: 17012 - DNA, 32 bp, Artificial
  oligonucleotide probe
cgagcaccgagccggaggaaagcggcctggaa

SEQ ID NO: 17013 - DNA, 32 bp, Artificial
  oligonucleotide probe
cctccggacctcacgcggaaagcggcctggaa

SEQ ID NO: 17014 - DNA, 32 bp, Artificial
  oligonucleotide probe
gcgacagggcctgcctgcgacgagcgagccaa

SEQ ID NO: 17015 - DNA, 32 bp, Artificial
  oligonucleotide probe
agcggcgagagcgtccgcgacgagcgagccaa

SEQ ID NO: 17016 - DNA, 32 bp, Artificial
  oligonucleotide probe
gcgacagggcctgcctcctccgaggacgcgga

SEQ ID NO: 17017 - DNA, 32 bp, Artificial
  oligonucleotide probe
agcggcgagagcgtcccctccgaggacgcgga

SEQ ID NO: 17018 - DNA, 32 bp, Artificial
  oligonucleotide probe
gacgcaccagcgcgagagcgccaatcacgggt

SEQ ID NO: 17019 - DNA, 32 bp, Artificial
  oligonucleotide probe
tggcaccagcaggggtagcgccaatcacgggt

SEQ ID NO: 17020 - DNA, 32 bp, Artificial
  oligonucleotide probe
caggacgctggccctcacgccaggcgaggtgg

SEQ ID NO: 17021 - DNA, 32 bp, Artificial
  oligonucleotide probe
cctcgtggcggacggaacgccaggcgaggtgg

SEQ ID NO: 17022 - DNA, 32 bp, Artificial
  oligonucleotide probe
tggcgcctgtccgtgggggtggaacgaggcga

SEQ ID NO: 17023 - DNA, 32 bp, Artificial
  oligonucleotide probe
gtggcgagcctcgggtgggtggaacgaggcga

SEQ ID NO: 17024 - DNA, 32 bp, Artificial
  oligonucleotide probe
gacgcaccagcgcgaggcgatggccaggtggc

SEQ ID NO: 17025 - DNA, 32 bp, Artificial
  oligonucleotide probe
tggcaccagcaggggtgcgatggccaggtggc

SEQ ID NO: 17026 - DNA, 32 bp, Artificial
  oligonucleotide probe
cgagcaccgagccggaccaaagcgggaatggc

SEQ ID NO: 17027 - DNA, 32 bp, Artificial
  oligonucleotide probe
cctccggacctcacgcccaaagcgggaatggc

SEQ ID NO: 17028 - DNA, 32 bp, Artificial
  oligonucleotide probe
cacccgagagcggtggaccatggcacgcgacg

SEQ ID NO: 17029 - DNA, 32 bp, Artificial
  oligonucleotide probe
gcgagtcccggaagcgaccatggcacgcgacg

SEQ ID NO: 17030 - DNA, 32 bp, Artificial
  oligonucleotide probe
cacccgagagcggtggtggcgtgggggtccaa

SEQ ID NO: 17031 - DNA, 32 bp, Artificial
  oligonucleotide probe
gcgagtcccggaagcgtggcgtgggggtccaa

SEQ ID NO: 17032 - DNA, 32 bp, Artificial
  oligonucleotide probe
gacgcaccagcgcgagagcgagcggtggacgc

SEQ ID NO: 17033 - DNA, 32 bp, Artificial
  oligonucleotide probe
tggcaccagcaggggtagcgagcggtggacgc

SEQ ID NO: 17034 - DNA, 32 bp, Artificial
  oligonucleotide probe
gtggccaatcacgcgaggtcgacgacgccgag

SEQ ID NO: 17035 - DNA, 32 bp, Artificial
  oligonucleotide probe
agcgcaccgacgacgcggtcgacgacgccgag

SEQ ID NO: 17036 - DNA, 32 bp, Artificial
  oligonucleotide probe
gcgacagggcctgcctcaccgagccacccgga

SEQ ID NO: 17037 - DNA, 32 bp, Artificial
  oligonucleotide probe
agcggcgagagcgtcccaccgagccacccgga

SEQ ID NO: 17038 - DNA, 32 bp, Artificial
  oligonucleotide probe
cggagcaggagcggaacaccgggtggtcagcg

SEQ ID NO: 17039 - DNA, 32 bp, Artificial
  oligonucleotide probe
ggtcgcctgtccagcgcaccgggtggtcagcg

SEQ ID NO: 17040 - DNA, 32 bp, Artificial
  oligonucleotide probe
cgagcaccgagccggaacgcgggtcaccgtcc

SEQ ID NO: 17041 - DNA, 32 bp, Artificial
  oligonucleotide probe
cctccggacctcacgcacgcgggtcaccgtcc

SEQ ID NO: 17042 - DNA, 32 bp, Artificial
  oligonucleotide probe
cagggtgggcgagcgaacgccaggcgaggtgg

SEQ ID NO: 17043 - DNA, 32 bp, Artificial
  oligonucleotide probe
acgcccaacagggagcacgccaggcgaggtgg

SEQ ID NO: 17044 - DNA, 32 bp, Artificial
  oligonucleotide probe
gcgacagggcctgcctgcctagcgcctcgacg

SEQ ID NO: 17045 - DNA, 32 bp, Artificial
  oligonucleotide probe
agcggcgagagcgtccgcctagcgcctcgacg

SEQ ID NO: 17046 - DNA, 32 bp, Artificial
  oligonucleotide probe
tgctcggatgctgcgagcagcggagcctgagc

SEQ ID NO: 17047 - DNA, 32 bp, Artificial
  oligonucleotide probe
gagcgcagccaagcctgcagcggagcctgagc

SEQ ID NO: 17048 - DNA, 32 bp, Artificial
  oligonucleotide probe
gagcgagcagcgggtcgggtggaacgaggcga

SEQ ID NO: 17049 - DNA, 32 bp, Artificial
  oligonucleotide probe
acgccctcaccagcgagggtggaacgaggcga

SEQ ID NO: 17050 - DNA, 32 bp, Artificial
  oligonucleotide probe
acgcagcggggtgacgggaagcctgcgacgga

SEQ ID NO: 17051 - DNA, 32 bp, Artificial
  oligonucleotide probe
caccgcctcagggacgggaagcctgcgacgga

SEQ ID NO: 17052 - DNA, 32 bp, Artificial
  oligonucleotide probe
tgctcggatgctgcgaggtcgacgacgccgag

SEQ ID NO: 17053 - DNA, 32 bp, Artificial
  oligonucleotide probe
gagcgcagccaagcctggtcgacgacgccgag

SEQ ID NO: 17054 - DNA, 32 bp, Artificial
  oligonucleotide probe
gcgacagggcctgcctgcaggtggtggcgagc

SEQ ID NO: 17055 - DNA, 32 bp, Artificial
  oligonucleotide probe
agcggcgagagcgtccgcaggtggtggcgagc

SEQ ID NO: 17056 - DNA, 32 bp, Artificial
  oligonucleotide probe
gtggccaatcacgcgaacgcgcctgacgcctc

SEQ ID NO: 17057 - DNA, 32 bp, Artificial
  oligonucleotide probe
agcgcaccgacgacgcacgcgcctgacgcctc

SEQ ID NO: 17058 - DNA, 32 bp, Artificial
  oligonucleotide probe
cacccgagagcggtgggcagcctctggccgag

SEQ ID NO: 17059 - DNA, 32 bp, Artificial
  oligonucleotide probe
gcgagtcccggaagcggcagcctctggccgag

SEQ ID NO: 17060 - DNA, 32 bp, Artificial
  oligonucleotide probe
cggagcaggagcggaagagcgcgacacccagg

SEQ ID NO: 17061 - DNA, 32 bp, Artificial
  oligonucleotide probe
ggtcgcctgtccagcggagcgcgacacccagg

SEQ ID NO: 17062 - DNA, 32 bp, Artificial
  oligonucleotide probe
cggagcaggagcggaaggaagcctgcgacgga

SEQ ID NO: 17063 - DNA, 32 bp, Artificial
  oligonucleotide probe
ggtcgcctgtccagcgggaagcctgcgacgga

SEQ ID NO: 17064 - DNA, 32 bp, Artificial
  oligonucleotide probe
gacgcaccagcgcgaggcctgcgagagctggc

SEQ ID NO: 17065 - DNA, 32 bp, Artificial
  oligonucleotide probe
tggcaccagcaggggtgcctgcgagagctggc

SEQ ID NO: 17066 - DNA, 32 bp, Artificial
  oligonucleotide probe
cagggtgggcgagcgacaccgcgaggtcacgc

SEQ ID NO: 17067 - DNA, 32 bp, Artificial
  oligonucleotide probe
acgcccaacagggagccaccgcgaggtcacgc

SEQ ID NO: 17068 - DNA, 32 bp, Artificial
  oligonucleotide probe
tgctcggatgctgcgaacgcggaagacgtggc

SEQ ID NO: 17069 - DNA, 32 bp, Artificial
  oligonucleotide probe
gagcgcagccaagcctacgcggaagacgtggc

SEQ ID NO: 17070 - DNA, 32 bp, Artificial
  oligonucleotide probe
cgagcaggcgaggcaggcagcggagcctgagc

SEQ ID NO: 17071 - DNA, 32 bp, Artificial
  oligonucleotide probe
gcctcaggacgcacgcgcagcggagcctgagc

SEQ ID NO: 17072 - DNA, 32 bp, Artificial
  oligonucleotide probe
gcaggacggacggccttggcgtgggggtccaa

SEQ ID NO: 17073 - DNA, 32 bp, Artificial
  oligonucleotide probe
gcgacctcacgcgcagtggcgtgggggtccaa

SEQ ID NO: 17074 - DNA, 32 bp, Artificial
  oligonucleotide probe
cacccgagagcggtgggggttggccgagtggc

SEQ ID NO: 17075 - DNA, 32 bp, Artificial
  oligonucleotide probe
gcgagtcccggaagcggggttggccgagtggc

SEQ ID NO: 17076 - DNA, 32 bp, Artificial
  oligonucleotide probe
gcaggacggacggcctaccatggcacgcgacg

SEQ ID NO: 17077 - DNA, 32 bp, Artificial
  oligonucleotide probe
gcgacctcacgcgcagaccatggcacgcgacg

SEQ ID NO: 17078 - DNA, 32 bp, Artificial
  oligonucleotide probe
caccggtcagcggggtacgcgcctgacgcctc

SEQ ID NO: 17079 - DNA, 32 bp, Artificial
  oligonucleotide probe
actgcggacgaggcctacgcgcctgacgcctc

SEQ ID NO: 17080 - DNA, 32 bp, Artificial
  oligonucleotide probe
tgctcggatgctgcgaaccatggcacgcgacg

SEQ ID NO: 17081 - DNA, 32 bp, Artificial
  oligonucleotide probe
gagcgcagccaagcctaccatggcacgcgacg

SEQ ID NO: 17082 - DNA, 32 bp, Artificial
  oligonucleotide probe
cacccgagagcggtggtgctgggtgcaggcga

SEQ ID NO: 17083 - DNA, 32 bp, Artificial
  oligonucleotide probe
gcgagtcccggaagcgtgctgggtgcaggcga

SEQ ID NO: 17084 - DNA, 32 bp, Artificial
  oligonucleotide probe
cgagcaggcgaggcagtggcgtgggggtccaa

SEQ ID NO: 17085 - DNA, 32 bp, Artificial
  oligonucleotide probe
gcctcaggacgcacgctggcgtgggggtccaa

SEQ ID NO: 17086 - DNA, 32 bp, Artificial
  oligonucleotide probe
tggcgcctgtccgtggaccatggcacgcgacg

SEQ ID NO: 17087 - DNA, 32 bp, Artificial
  oligonucleotide probe
gtggcgagcctcgggtaccatggcacgcgacg

SEQ ID NO: 17088 - DNA, 32 bp, Artificial
  oligonucleotide probe
acgcagcggggtgacggcagcggagcctgagc

SEQ ID NO: 17089 - DNA, 32 bp, Artificial
  oligonucleotide probe
caccgcctcagggacggcagcggagcctgagc

SEQ ID NO: 17090 - DNA, 32 bp, Artificial
  oligonucleotide probe
caggacgctggccctccctctggctggcccaa

SEQ ID NO: 17091 - DNA, 32 bp, Artificial
  oligonucleotide probe
cctcgtggcggacggacctctggctggcccaa

SEQ ID NO: 17092 - DNA, 32 bp, Artificial
  oligonucleotide probe
cagggtgggcgagcgatggcgtgggggtccaa

SEQ ID NO: 17093 - DNA, 32 bp, Artificial
  oligonucleotide probe
acgcccaacagggagctggcgtgggggtccaa

SEQ ID NO: 17094 - DNA, 32 bp, Artificial
  oligonucleotide probe
gcgacagggcctgccttggcggtcgcctcgag

SEQ ID NO: 17095 - DNA, 32 bp, Artificial
  oligonucleotide probe
agcggcgagagcgtcctggcggtcgcctcgag

SEQ ID NO: 17096 - DNA, 32 bp, Artificial
  oligonucleotide probe
cgagcaccgagccggagggtggaacgaggcga

SEQ ID NO: 17097 - DNA, 32 bp, Artificial
  oligonucleotide probe
cctccggacctcacgcgggtggaacgaggcga

SEQ ID NO: 17098 - DNA, 32 bp, Artificial
  oligonucleotide probe
tggcgcctgtccgtggagcgccaatcacgggt

SEQ ID NO: 17099 - DNA, 32 bp, Artificial
  oligonucleotide probe
gtggcgagcctcgggtagcgccaatcacgggt

SEQ ID NO: 17100 - DNA, 32 bp, Artificial
  oligonucleotide probe
cgagcaccgagccggacaccgagccacccgga

SEQ ID NO: 17101 - DNA, 32 bp, Artificial
  oligonucleotide probe
cctccggacctcacgccaccgagccacccgga

SEQ ID NO: 17102 - DNA, 32 bp, Artificial
  oligonucleotide probe
caggcctccctcgcgagcagcggagcctgagc

SEQ ID NO: 17103 - DNA, 32 bp, Artificial
  oligonucleotide probe
caccagcgagacgcgagcagcggagcctgagc

SEQ ID NO: 17104 - DNA, 32 bp, Artificial
  oligonucleotide probe
tgctcggatgctgcgacaggagcgggaagcga

SEQ ID NO: 17105 - DNA, 32 bp, Artificial
  oligonucleotide probe
gagcgcagccaagcctcaggagcgggaagcga

SEQ ID NO: 17106 - DNA, 32 bp, Artificial
  oligonucleotide probe
gacggagcacgccggagcctagcgcctcgacg

SEQ ID NO: 17107 - DNA, 32 bp, Artificial
  oligonucleotide probe
cggagcctgagcgtgggcctagcgcctcgacg

SEQ ID NO: 17108 - DNA, 32 bp, Artificial
  oligonucleotide probe
caggcctccctcgcgatggcgtgggggtccaa

SEQ ID NO: 17109 - DNA, 32 bp, Artificial
  oligonucleotide probe
caccagcgagacgcgatggcgtgggggtccaa

SEQ ID NO: 17110 - DNA, 32 bp, Artificial
  oligonucleotide probe
gcgacagggcctgcctgtggcggaggtcggaa

SEQ ID NO: 17111 - DNA, 32 bp, Artificial
  oligonucleotide probe
agcggcgagagcgtccgtggcggaggtcggaa

SEQ ID NO: 17112 - DNA, 32 bp, Artificial
  oligonucleotide probe
gcgacagggcctgcctgacggacgacgcgtgg

SEQ ID NO: 17113 - DNA, 32 bp, Artificial
  oligonucleotide probe
agcggcgagagcgtccgacggacgacgcgtgg

SEQ ID NO: 17114 - DNA, 32 bp, Artificial
  oligonucleotide probe
tgctcggatgctgcgatgctgggtgcaggcga

SEQ ID NO: 17115 - DNA, 32 bp, Artificial
  oligonucleotide probe
gagcgcagccaagccttgctgggtgcaggcga

SEQ ID NO: 17116 - DNA, 32 bp, Artificial
  oligonucleotide probe
caggacgctggccctcgcctgggtcaccacgc

SEQ ID NO: 17117 - DNA, 32 bp, Artificial
  oligonucleotide probe
cctcgtggcggacggagcctgggtcaccacgc

SEQ ID NO: 17118 - DNA, 32 bp, Artificial
  oligonucleotide probe
cagggtgggcgagcgagagcgcgacacccagg

SEQ ID NO: 17119 - DNA, 32 bp, Artificial
  oligonucleotide probe
acgcccaacagggagcgagcgcgacacccagg

SEQ ID NO: 17120 - DNA, 32 bp, Artificial
  oligonucleotide probe
cgagcaccgagccggagcctagcgcctcgacg

SEQ ID NO: 17121 - DNA, 32 bp, Artificial
  oligonucleotide probe
cctccggacctcacgcgcctagcgcctcgacg

SEQ ID NO: 17122 - DNA, 32 bp, Artificial
  oligonucleotide probe
caggacgctggccctcagcgccaatcacgggt

SEQ ID NO: 17123 - DNA, 32 bp, Artificial
  oligonucleotide probe
cctcgtggcggacggaagcgccaatcacgggt

SEQ ID NO: 17124 - DNA, 32 bp, Artificial
  oligonucleotide probe
gacgcaccagcgcgagcaggagcgggaagcga

SEQ ID NO: 17125 - DNA, 32 bp, Artificial
  oligonucleotide probe
tggcaccagcaggggtcaggagcgggaagcga

SEQ ID NO: 17126 - DNA, 32 bp, Artificial
  oligonucleotide probe
gagcgagcagcgggtcgacggcgagtgggcag

SEQ ID NO: 17127 - DNA, 32 bp, Artificial
  oligonucleotide probe
acgccctcaccagcgagacggcgagtgggcag

SEQ ID NO: 17128 - DNA, 32 bp, Artificial
  oligonucleotide probe
tgctcggatgctgcgagcagcctctggccgag

SEQ ID NO: 17129 - DNA, 32 bp, Artificial
  oligonucleotide probe
gagcgcagccaagcctgcagcctctggccgag

SEQ ID NO: 17130 - DNA, 32 bp, Artificial
  oligonucleotide probe
gacgcaccagcgcgagcaccgacgggaaacgc

SEQ ID NO: 17131 - DNA, 32 bp, Artificial
  oligonucleotide probe
tggcaccagcaggggtcaccgacgggaaacgc

SEQ ID NO: 17132 - DNA, 32 bp, Artificial
  oligonucleotide probe
cgagcaggcgaggcagaccatggcacgcgacg

SEQ ID NO: 17133 - DNA, 32 bp, Artificial
  oligonucleotide probe
gcctcaggacgcacgcaccatggcacgcgacg

SEQ ID NO: 17134 - DNA, 32 bp, Artificial
  oligonucleotide probe
gtgggggtgcagggaagtccacgctggcgacg

SEQ ID NO: 17135 - DNA, 32 bp, Artificial
  oligonucleotide probe
ggtcgcaggcgagggtgtccacgctggcgacg

SEQ ID NO: 17136 - DNA, 32 bp, Artificial
  oligonucleotide probe
cgagcaccgagccggaagcgagcggtggacgc

SEQ ID NO: 17137 - DNA, 32 bp, Artificial
  oligonucleotide probe
cctccggacctcacgcagcgagcggtggacgc

SEQ ID NO: 17138 - DNA, 32 bp, Artificial
  oligonucleotide probe
cgagcaccgagccggaaccatggcacgcgacg

SEQ ID NO: 17139 - DNA, 32 bp, Artificial
  oligonucleotide probe
cctccggacctcacgcaccatggcacgcgacg

SEQ ID NO: 17140 - DNA, 32 bp, Artificial
  oligonucleotide probe
gtgggggtgcagggaagcagcctctggccgag

SEQ ID NO: 17141 - DNA, 32 bp, Artificial
  oligonucleotide probe
ggtcgcaggcgagggtgcagcctctggccgag

SEQ ID NO: 17142 - DNA, 32 bp, Artificial
  oligonucleotide probe
gtgggggtgcagggaagggtggaacgaggcga

SEQ ID NO: 17143 - DNA, 32 bp, Artificial
  oligonucleotide probe
ggtcgcaggcgagggtgggtggaacgaggcga

SEQ ID NO: 17144 - DNA, 32 bp, Artificial
  oligonucleotide probe
gacgcaccagcgcgagcctccgaggacgcgga

SEQ ID NO: 17145 - DNA, 32 bp, Artificial
  oligonucleotide probe
tggcaccagcaggggtcctccgaggacgcgga

SEQ ID NO: 17146 - DNA, 32 bp, Artificial
  oligonucleotide probe
tggcgcctgtccgtgggcaggcagccaatggc

SEQ ID NO: 17147 - DNA, 32 bp, Artificial
  oligonucleotide probe
gtggcgagcctcgggtgcaggcagccaatggc

SEQ ID NO: 17148 - DNA, 32 bp, Artificial
  oligonucleotide probe
cgagcaccgagccggatcacgccttggccacc

SEQ ID NO: 17149 - DNA, 32 bp, Artificial
  oligonucleotide probe
cctccggacctcacgctcacgccttggccacc

SEQ ID NO: 17150 - DNA, 32 bp, Artificial
  oligonucleotide probe
cgagcaccgagccggagagcgcgacacccagg

SEQ ID NO: 17151 - DNA, 32 bp, Artificial
  oligonucleotide probe
cctccggacctcacgcgagcgcgacacccagg

SEQ ID NO: 17152 - DNA, 32 bp, Artificial
  oligonucleotide probe
gcgacagggcctgcctcggacaggacgctggc

SEQ ID NO: 17153 - DNA, 32 bp, Artificial
  oligonucleotide probe
agcggcgagagcgtcccggacaggacgctggc

SEQ ID NO: 17154 - DNA, 32 bp, Artificial
  oligonucleotide probe
tgctcggatgctgcgagacggcgagtgggcag

SEQ ID NO: 17155 - DNA, 32 bp, Artificial
  oligonucleotide probe
gagcgcagccaagcctgacggcgagtgggcag

SEQ ID NO: 17156 - DNA, 32 bp, Artificial
  oligonucleotide probe
caggacgctggccctccggacaggacgctggc

SEQ ID NO: 17157 - DNA, 32 bp, Artificial
  oligonucleotide probe
cctcgtggcggacggacggacaggacgctggc

SEQ ID NO: 17158 - DNA, 32 bp, Artificial
  oligonucleotide probe
cacccgagagcggtgggcgagtggcagggcct

SEQ ID NO: 17159 - DNA, 32 bp, Artificial
  oligonucleotide probe
gcgagtcccggaagcggcgagtggcagggcct

SEQ ID NO: 17160 - DNA, 32 bp, Artificial
  oligonucleotide probe
cagggcagggtcgggtacgcgcctgacgcctc

SEQ ID NO: 17161 - DNA, 32 bp, Artificial
  oligonucleotide probe
agcggacggcaggagcacgcgcctgacgcctc

SEQ ID NO: 17162 - DNA, 32 bp, Artificial
  oligonucleotide probe
gcgacagggcctgcctcaccgcgaggtcacgc

SEQ ID NO: 17163 - DNA, 32 bp, Artificial
  oligonucleotide probe
agcggcgagagcgtcccaccgcgaggtcacgc

SEQ ID NO: 17164 - DNA, 32 bp, Artificial
  oligonucleotide probe
caggcctccctcgcgaacgcgcctgacgcctc

SEQ ID NO: 17165 - DNA, 32 bp, Artificial
  oligonucleotide probe
caccagcgagacgcgaacgcgcctgacgcctc

SEQ ID NO: 17166 - DNA, 32 bp, Artificial
  oligonucleotide probe
gagcgagcagcgggtccctctggctggcccaa

SEQ ID NO: 17167 - DNA, 32 bp, Artificial
  oligonucleotide probe
acgccctcaccagcgacctctggctggcccaa

SEQ ID NO: 17168 - DNA, 32 bp, Artificial
  oligonucleotide probe
cgagcaccgagccggacctccgaggacgcgga

SEQ ID NO: 17169 - DNA, 32 bp, Artificial
  oligonucleotide probe
cctccggacctcacgccctccgaggacgcgga

SEQ ID NO: 17170 - DNA, 32 bp, Artificial
  oligonucleotide probe
gagcgagcagcgggtccaggagcgggaagcga

SEQ ID NO: 17171 - DNA, 32 bp, Artificial
  oligonucleotide probe
acgccctcaccagcgacaggagcgggaagcga

SEQ ID NO: 17172 - DNA, 32 bp, Artificial
  oligonucleotide probe
gacgcaccagcgcgaggcaggcagccaatggc

SEQ ID NO: 17173 - DNA, 32 bp, Artificial
  oligonucleotide probe
tggcaccagcaggggtgcaggcagccaatggc

SEQ ID NO: 17174 - DNA, 32 bp, Artificial
  oligonucleotide probe
caccggtcagcggggtgacggcgagtgggcag

SEQ ID NO: 17175 - DNA, 32 bp, Artificial
  oligonucleotide probe
actgcggacgaggcctgacggcgagtgggcag

SEQ ID NO: 17176 - DNA, 32 bp, Artificial
  oligonucleotide probe
tgctcggatgctgcgagagcgcgacacccagg

SEQ ID NO: 17177 - DNA, 32 bp, Artificial
  oligonucleotide probe
gagcgcagccaagcctgagcgcgacacccagg

SEQ ID NO: 17178 - DNA, 32 bp, Artificial
  oligonucleotide probe
cacccgagagcggtggcctcagcgcggaacca

SEQ ID NO: 17179 - DNA, 32 bp, Artificial
  oligonucleotide probe
gcgagtcccggaagcgcctcagcgcggaacca

SEQ ID NO: 17180 - DNA, 32 bp, Artificial
  oligonucleotide probe
tggcgcctgtccgtgggcaggtggtggcgagc

SEQ ID NO: 17181 - DNA, 32 bp, Artificial
  oligonucleotide probe
gtggcgagcctcgggtgcaggtggtggcgagc

SEQ ID NO: 17182 - DNA, 32 bp, Artificial
  oligonucleotide probe
cacccgagagcggtgggacggacgacgcgtgg

SEQ ID NO: 17183 - DNA, 32 bp, Artificial
  oligonucleotide probe
gcgagtcccggaagcggacggacgacgcgtgg

SEQ ID NO: 17184 - DNA, 32 bp, Artificial
  oligonucleotide probe
gacgcaccagcgcgagcctctggctggcccaa

SEQ ID NO: 17185 - DNA, 32 bp, Artificial
  oligonucleotide probe
tggcaccagcaggggtcctctggctggcccaa

SEQ ID NO: 17186 - DNA, 32 bp, Artificial
  oligonucleotide probe
caggacgctggccctcgtccggaagtgggcga

SEQ ID NO: 17187 - DNA, 32 bp, Artificial
  oligonucleotide probe
cctcgtggcggacggagtccggaagtgggcga

SEQ ID NO: 17188 - DNA, 32 bp, Artificial
  oligonucleotide probe
caggcctccctcgcgaagcggtccgcgagagc

SEQ ID NO: 17189 - DNA, 32 bp, Artificial
  oligonucleotide probe
caccagcgagacgcgaagcggtccgcgagagc

SEQ ID NO: 17190 - DNA, 32 bp, Artificial
  oligonucleotide probe
gtgggggtgcagggaacaggcacccaggcgga

SEQ ID NO: 17191 - DNA, 32 bp, Artificial
  oligonucleotide probe
ggtcgcaggcgagggtcaggcacccaggcgga

SEQ ID NO: 17192 - DNA, 32 bp, Artificial
  oligonucleotide probe
caggacgctggccctctgctgggtgcaggcga

SEQ ID NO: 17193 - DNA, 32 bp, Artificial
  oligonucleotide probe
cctcgtggcggacggatgctgggtgcaggcga

SEQ ID NO: 17194 - DNA, 32 bp, Artificial
  oligonucleotide probe
tggcgcctgtccgtggcaggggaagggtcgga

SEQ ID NO: 17195 - DNA, 32 bp, Artificial
  oligonucleotide probe
gtggcgagcctcgggtcaggggaagggtcgga

SEQ ID NO: 17196 - DNA, 32 bp, Artificial
  oligonucleotide probe
gacgcaccagcgcgaggcagcggagcctgagc

SEQ ID NO: 17197 - DNA, 32 bp, Artificial
  oligonucleotide probe
tggcaccagcaggggtgcagcggagcctgagc

SEQ ID NO: 17198 - DNA, 32 bp, Artificial
  oligonucleotide probe
caggacgctggccctcacgcaccagtcccgga

SEQ ID NO: 17199 - DNA, 32 bp, Artificial
  oligonucleotide probe
cctcgtggcggacggaacgcaccagtcccgga

SEQ ID NO: 17200 - DNA, 32 bp, Artificial
  oligonucleotide probe
gcgacagggcctgcctacgcggtccaccgtgg

SEQ ID NO: 17201 - DNA, 32 bp, Artificial
  oligonucleotide probe
agcggcgagagcgtccacgcggtccaccgtgg

SEQ ID NO: 17202 - DNA, 32 bp, Artificial
  oligonucleotide probe
cggagcaggagcggaaggtcgacgacgccgag

SEQ ID NO: 17203 - DNA, 32 bp, Artificial
  oligonucleotide probe
ggtcgcctgtccagcgggtcgacgacgccgag

SEQ ID NO: 17204 - DNA, 32 bp, Artificial
  oligonucleotide probe
tggcgcctgtccgtgggtccacgctggcgacg

SEQ ID NO: 17205 - DNA, 32 bp, Artificial
  oligonucleotide probe
gtggcgagcctcgggtgtccacgctggcgacg

SEQ ID NO: 17206 - DNA, 32 bp, Artificial
  oligonucleotide probe
cgagcaccgagccggagcctcggagacggcag

SEQ ID NO: 17207 - DNA, 32 bp, Artificial
  oligonucleotide probe
cctccggacctcacgcgcctcggagacggcag

SEQ ID NO: 17208 - DNA, 32 bp, Artificial
  oligonucleotide probe
gagcgagcagcgggtcggaagcctgcgacgga

SEQ ID NO: 17209 - DNA, 32 bp, Artificial
  oligonucleotide probe
acgccctcaccagcgaggaagcctgcgacgga

SEQ ID NO: 17210 - DNA, 32 bp, Artificial
  oligonucleotide probe
gacgcaccagcgcgaggacggacgacgcgtgg

SEQ ID NO: 17211 - DNA, 32 bp, Artificial
  oligonucleotide probe
tggcaccagcaggggtgacggacgacgcgtgg

SEQ ID NO: 17212 - DNA, 32 bp, Artificial
  oligonucleotide probe
cgagcaccgagccggaagcgccaatcacgggt

SEQ ID NO: 17213 - DNA, 32 bp, Artificial
  oligonucleotide probe
cctccggacctcacgcagcgccaatcacgggt

SEQ ID NO: 17214 - DNA, 32 bp, Artificial
  oligonucleotide probe
cgagcaccgagccggagcagcggagcctgagc

SEQ ID NO: 17215 - DNA, 32 bp, Artificial
  oligonucleotide probe
cctccggacctcacgcgcagcggagcctgagc

SEQ ID NO: 17216 - DNA, 32 bp, Artificial
  oligonucleotide probe
cgagcaccgagccggatggcagcgggtcgtgg

SEQ ID NO: 17217 - DNA, 32 bp, Artificial
  oligonucleotide probe
cctccggacctcacgctggcagcgggtcgtgg

SEQ ID NO: 17218 - DNA, 32 bp, Artificial
  oligonucleotide probe
cgagcaccgagccggagcagcaccagcgtggc

SEQ ID NO: 17219 - DNA, 32 bp, Artificial
  oligonucleotide probe
cctccggacctcacgcgcagcaccagcgtggc

SEQ ID NO: 17220 - DNA, 32 bp, Artificial
  oligonucleotide probe
gtccgggtcaggcagggacgcaggcggagggt

SEQ ID NO: 17221 - DNA, 32 bp, Artificial
  oligonucleotide probe
cggagagcgcgagcctgacgcaggcggagggt

SEQ ID NO: 17222 - DNA, 32 bp, Artificial
  oligonucleotide probe
cgagcaccgagccggagtggcggaggtcggaa

SEQ ID NO: 17223 - DNA, 32 bp, Artificial
  oligonucleotide probe
cctccggacctcacgcgtggcggaggtcggaa

SEQ ID NO: 17224 - DNA, 32 bp, Artificial
  oligonucleotide probe
tggcgcctgtccgtggcaccgggtggtcagcg

SEQ ID NO: 17225 - DNA, 32 bp, Artificial
  oligonucleotide probe
gtggcgagcctcgggtcaccgggtggtcagcg

SEQ ID NO: 17226 - DNA, 32 bp, Artificial
  oligonucleotide probe
tgctcggatgctgcgagtggcggaggtcggaa

SEQ ID NO: 17227 - DNA, 32 bp, Artificial
  oligonucleotide probe
gagcgcagccaagcctgtggcggaggtcggaa

SEQ ID NO: 17228 - DNA, 32 bp, Artificial
  oligonucleotide probe
cgagcaccgagccggatggcggtcgcctcgag

SEQ ID NO: 17229 - DNA, 32 bp, Artificial
  oligonucleotide probe
cctccggacctcacgctggcggtcgcctcgag

SEQ ID NO: 17230 - DNA, 32 bp, Artificial
  oligonucleotide probe
cgagcaggcgaggcagtgctgggtgcaggcga

SEQ ID NO: 17231 - DNA, 32 bp, Artificial
  oligonucleotide probe
gcctcaggacgcacgctgctgggtgcaggcga

SEQ ID NO: 17232 - DNA, 32 bp, Artificial
  oligonucleotide probe
caggacgctggccctcgcctcggagacggcag

SEQ ID NO: 17233 - DNA, 32 bp, Artificial
  oligonucleotide probe
cctcgtggcggacggagcctcggagacggcag

SEQ ID NO: 17234 - DNA, 32 bp, Artificial
  oligonucleotide probe
agcggcgagagcgtccgtccgggtcaggcagg

SEQ ID NO: 17235 - DNA, 32 bp, Artificial
  oligonucleotide probe
gacgcaccagcgcgaggtccgggtcaggcagg

SEQ ID NO: 17236 - DNA, 32 bp, Artificial
  oligonucleotide probe
tggcgcctgtccgtgggagcgcgacacccagg

SEQ ID NO: 17237 - DNA, 32 bp, Artificial
  oligonucleotide probe
gtggcgagcctcgggtgagcgcgacacccagg

SEQ ID NO: 17238 - DNA, 32 bp, Artificial
  oligonucleotide probe
cgagcaccgagccggagcctgtgggtccgcga

SEQ ID NO: 17239 - DNA, 32 bp, Artificial
  oligonucleotide probe
cctccggacctcacgcgcctgtgggtccgcga

SEQ ID NO: 17240 - DNA, 32 bp, Artificial
  oligonucleotide probe
cgagcaccgagccggagagcggtctggcggaa

SEQ ID NO: 17241 - DNA, 32 bp, Artificial
  oligonucleotide probe
cctccggacctcacgcgagcggtctggcggaa

SEQ ID NO: 17242 - DNA, 32 bp, Artificial
  oligonucleotide probe
gagcgagcagcgggtcggtcgacgacgccgag

SEQ ID NO: 17243 - DNA, 32 bp, Artificial
  oligonucleotide probe
acgccctcaccagcgaggtcgacgacgccgag

SEQ ID NO: 17244 - DNA, 32 bp, Artificial
  oligonucleotide probe
gacgcaccagcgcgaggtccacgctggcgacg

SEQ ID NO: 17245 - DNA, 32 bp, Artificial
  oligonucleotide probe
tggcaccagcaggggtgtccacgctggcgacg

SEQ ID NO: 17246 - DNA, 32 bp, Artificial
  oligonucleotide probe
caggacgctggccctccaggggaagggtcgga

SEQ ID NO: 17247 - DNA, 32 bp, Artificial
  oligonucleotide probe
cctcgtggcggacggacaggggaagggtcgga

SEQ ID NO: 17248 - DNA, 32 bp, Artificial
  oligonucleotide probe
tgctcggatgctgcgacggacaggacgctggc

SEQ ID NO: 17249 - DNA, 32 bp, Artificial
  oligonucleotide probe
gagcgcagccaagcctcggacaggacgctggc

SEQ ID NO: 17250 - DNA, 32 bp, Artificial
  oligonucleotide probe
tgctcggatgctgcgacaccgggtggtcagcg

SEQ ID NO: 17251 - DNA, 32 bp, Artificial
  oligonucleotide probe
gagcgcagccaagcctcaccgggtggtcagcg

SEQ ID NO: 17252 - DNA, 32 bp, Artificial
  oligonucleotide probe
cagggtgggcgagcgagtccggaagtgggcga

SEQ ID NO: 17253 - DNA, 32 bp, Artificial
  oligonucleotide probe
acgcccaacagggagcgtccggaagtgggcga

SEQ ID NO: 17254 - DNA, 32 bp, Artificial
  oligonucleotide probe
tggcgcctgtccgtgggacggcgagtgggcag

SEQ ID NO: 17255 - DNA, 32 bp, Artificial
  oligonucleotide probe
gtggcgagcctcgggtgacggcgagtgggcag

SEQ ID NO: 17256 - DNA, 32 bp, Artificial
  oligonucleotide probe
cacccgagagcggtgggggtggaacgaggcga

SEQ ID NO: 17257 - DNA, 32 bp, Artificial
  oligonucleotide probe
gcgagtcccggaagcggggtggaacgaggcga

SEQ ID NO: 17258 - DNA, 32 bp, Artificial
  oligonucleotide probe
cgagcaccgagccggaggtcgacgacgccgag

SEQ ID NO: 17259 - DNA, 32 bp, Artificial
  oligonucleotide probe
cctccggacctcacgcggtcgacgacgccgag

SEQ ID NO: 17260 - DNA, 32 bp, Artificial
  oligonucleotide probe
caggacgctggccctccaccgcgaggtcacgc

SEQ ID NO: 17261 - DNA, 32 bp, Artificial
  oligonucleotide probe
cctcgtggcggacggacaccgcgaggtcacgc

SEQ ID NO: 17262 - DNA, 32 bp, Artificial
  oligonucleotide probe
gtgggggtgcagggaaggtccggagcagacgc

SEQ ID NO: 17263 - DNA, 32 bp, Artificial
  oligonucleotide probe
ggtcgcaggcgagggtggtccggagcagacgc

SEQ ID NO: 17264 - DNA, 32 bp, Artificial
  oligonucleotide probe
gacgcaccagcgcgagacgcaccagtcccgga

SEQ ID NO: 17265 - DNA, 32 bp, Artificial
  oligonucleotide probe
tggcaccagcaggggtacgcaccagtcccgga

SEQ ID NO: 17266 - DNA, 32 bp, Artificial
  oligonucleotide probe
tgctcggatgctgcgagcctcggagacggcag

SEQ ID NO: 17267 - DNA, 32 bp, Artificial
  oligonucleotide probe
gagcgcagccaagcctgcctcggagacggcag

SEQ ID NO: 17268 - DNA, 32 bp, Artificial
  oligonucleotide probe
gtggccaatcacgcgatcacgccttggccacc

SEQ ID NO: 17269 - DNA, 32 bp, Artificial
  oligonucleotide probe
agcgcaccgacgacgctcacgccttggccacc

SEQ ID NO: 17270 - DNA, 32 bp, Artificial
  oligonucleotide probe
gtggccaatcacgcgagcctagcgcctcgacg

SEQ ID NO: 17271 - DNA, 32 bp, Artificial
  oligonucleotide probe
agcgcaccgacgacgcgcctagcgcctcgacg

SEQ ID NO: 17272 - DNA, 32 bp, Artificial
  oligonucleotide probe
gacgcaccagcgcgaggcgaagcggcgaggtc

SEQ ID NO: 17273 - DNA, 32 bp, Artificial
  oligonucleotide probe
tggcaccagcaggggtgcgaagcggcgaggtc

SEQ ID NO: 17274 - DNA, 32 bp, Artificial
  oligonucleotide probe
cgagcaccgagccggagcgacgagcgagccaa

SEQ ID NO: 17275 - DNA, 32 bp, Artificial
  oligonucleotide probe
cctccggacctcacgcgcgacgagcgagccaa

SEQ ID NO: 17276 - DNA, 32 bp, Artificial
  oligonucleotide probe
acgcagcggggtgacggacgcaggcggagggt

SEQ ID NO: 17277 - DNA, 32 bp, Artificial
  oligonucleotide probe
caccgcctcagggacggacgcaggcggagggt

SEQ ID NO: 17278 - DNA, 32 bp, Artificial
  oligonucleotide probe
tggcgcctgtccgtggcctcagcgcggaacca

SEQ ID NO: 17279 - DNA, 32 bp, Artificial
  oligonucleotide probe
gtggcgagcctcgggtcctcagcgcggaacca

SEQ ID NO: 17280 - DNA, 32 bp, Artificial
  oligonucleotide probe
gtccgggtcaggcaggtggcgtgggggtccaa

SEQ ID NO: 17281 - DNA, 32 bp, Artificial
  oligonucleotide probe
cggagagcgcgagccttggcgtgggggtccaa

SEQ ID NO: 17282 - DNA, 32 bp, Artificial
  oligonucleotide probe
gcaggacggacggcctacgcggtccaccgtgg

SEQ ID NO: 17283 - DNA, 32 bp, Artificial
  oligonucleotide probe
gcgacctcacgcgcagacgcggtccaccgtgg

SEQ ID NO: 17284 - DNA, 32 bp, Artificial
  oligonucleotide probe
gtggccaatcacgcgagtggcggaggtcggaa

SEQ ID NO: 17285 - DNA, 32 bp, Artificial
  oligonucleotide probe
agcgcaccgacgacgcgtggcggaggtcggaa

SEQ ID NO: 17286 - DNA, 32 bp, Artificial
  oligonucleotide probe
gtccgggtcaggcaggacgcggtccaccgtgg

SEQ ID NO: 17287 - DNA, 32 bp, Artificial
  oligonucleotide probe
cggagagcgcgagcctacgcggtccaccgtgg

SEQ ID NO: 17288 - DNA, 32 bp, Artificial
  oligonucleotide probe
gacgcaccagcgcgagggaaagcggcctggaa

SEQ ID NO: 17289 - DNA, 32 bp, Artificial
  oligonucleotide probe
tggcaccagcaggggtggaaagcggcctggaa

SEQ ID NO: 17290 - DNA, 32 bp, Artificial
  oligonucleotide probe
tgctcggatgctgcgagcctagcgcctcgacg

SEQ ID NO: 17291 - DNA, 32 bp, Artificial
  oligonucleotide probe
gagcgcagccaagcctgcctagcgcctcgacg

SEQ ID NO: 17292 - DNA, 32 bp, Artificial
  oligonucleotide probe
cacccgagagcggtgggcctgggtcaccacgc

SEQ ID NO: 17293 - DNA, 32 bp, Artificial
  oligonucleotide probe
gcgagtcccggaagcggcctgggtcaccacgc

SEQ ID NO: 17294 - DNA, 32 bp, Artificial
  oligonucleotide probe
caggacgctggccctcgacggacgacgcgtgg

SEQ ID NO: 17295 - DNA, 32 bp, Artificial
  oligonucleotide probe
cctcgtggcggacggagacggacgacgcgtgg

SEQ ID NO: 17296 - DNA, 32 bp, Artificial
  oligonucleotide probe
gcgacagggcctgcctggaagcctgcgacgga

SEQ ID NO: 17297 - DNA, 32 bp, Artificial
  oligonucleotide probe
agcggcgagagcgtccggaagcctgcgacgga

SEQ ID NO: 17298 - DNA, 32 bp, Artificial
  oligonucleotide probe
caggcctccctcgcgagacggcgagtgggcag

SEQ ID NO: 17299 - DNA, 32 bp, Artificial
  oligonucleotide probe
caccagcgagacgcgagacggcgagtgggcag

SEQ ID NO: 17300 - DNA, 32 bp, Artificial
  oligonucleotide probe
gtggccaatcacgcgagtccacgctggcgacg

SEQ ID NO: 17301 - DNA, 32 bp, Artificial
  oligonucleotide probe
agcgcaccgacgacgcgtccacgctggcgacg

SEQ ID NO: 17302 - DNA, 32 bp, Artificial
  oligonucleotide probe
cgagcaccgagccggaacgcggaagacgtggc

SEQ ID NO: 17303 - DNA, 32 bp, Artificial
  oligonucleotide probe
cctccggacctcacgcacgcggaagacgtggc

SEQ ID NO: 17304 - DNA, 32 bp, Artificial
  oligonucleotide probe
cgagcaggcgaggcagcaccgggtggtcagcg

SEQ ID NO: 17305 - DNA, 32 bp, Artificial
  oligonucleotide probe
gcctcaggacgcacgccaccgggtggtcagcg

SEQ ID NO: 17306 - DNA, 32 bp, Artificial
  oligonucleotide probe
gacgcaccagcgcgagcggacaggacgctggc

SEQ ID NO: 17307 - DNA, 32 bp, Artificial
  oligonucleotide probe
tggcaccagcaggggtcggacaggacgctggc

SEQ ID NO: 17308 - DNA, 32 bp, Artificial
  oligonucleotide probe
gacgcaccagcgcgagcctcagcgcggaacca

SEQ ID NO: 17309 - DNA, 32 bp, Artificial
  oligonucleotide probe
tggcaccagcaggggtcctcagcgcggaacca

SEQ ID NO: 17310 - DNA, 32 bp, Artificial
  oligonucleotide probe
gcgacagggcctgcctgacggggtcggacgag

SEQ ID NO: 17311 - DNA, 32 bp, Artificial
  oligonucleotide probe
agcggcgagagcgtccgacggggtcggacgag

SEQ ID NO: 17312 - DNA, 32 bp, Artificial
  oligonucleotide probe
acgcagcggggtgacggacggcgagtgggcag

SEQ ID NO: 17313 - DNA, 32 bp, Artificial
  oligonucleotide probe
caccgcctcagggacggacggcgagtgggcag

SEQ ID NO: 17314 - DNA, 32 bp, Artificial
  oligonucleotide probe
caggacgctggccctcgcgacgagcgagccaa

SEQ ID NO: 17315 - DNA, 32 bp, Artificial
  oligonucleotide probe
cctcgtggcggacggagcgacgagcgagccaa

SEQ ID NO: 17316 - DNA, 32 bp, Artificial
  oligonucleotide probe
agcggcgagagcgtcccgagcaggcgaggcag

SEQ ID NO: 17317 - DNA, 32 bp, Artificial
  oligonucleotide probe
gacgcaccagcgcgagcgagcaggcgaggcag

SEQ ID NO: 17318 - DNA, 32 bp, Artificial
  oligonucleotide probe
cagggtgggcgagcgagtccacgctggcgacg

SEQ ID NO: 17319 - DNA, 32 bp, Artificial
  oligonucleotide probe
acgcccaacagggagcgtccacgctggcgacg

SEQ ID NO: 17320 - DNA, 32 bp, Artificial
  oligonucleotide probe
caccggtcagcggggtacgcggtccaccgtgg

SEQ ID NO: 17321 - DNA, 32 bp, Artificial
  oligonucleotide probe
actgcggacgaggcctacgcggtccaccgtgg

SEQ ID NO: 17322 - DNA, 32 bp, Artificial
  oligonucleotide probe
cgagcaccgagccggacaccgggtggtcagcg

SEQ ID NO: 17323 - DNA, 32 bp, Artificial
  oligonucleotide probe
cctccggacctcacgccaccgggtggtcagcg

SEQ ID NO: 17324 - DNA, 32 bp, Artificial
  oligonucleotide probe
caggacgctggccctcgcaggtggtggcgagc

SEQ ID NO: 17325 - DNA, 32 bp, Artificial
  oligonucleotide probe
cctcgtggcggacggagcaggtggtggcgagc

SEQ ID NO: 17326 - DNA, 32 bp, Artificial
  oligonucleotide probe
caggacgctggccctcacgcgagcgggtgcag

SEQ ID NO: 17327 - DNA, 32 bp, Artificial
  oligonucleotide probe
cctcgtggcggacggaacgcgagcgggtgcag

SEQ ID NO: 17328 - DNA, 32 bp, Artificial
  oligonucleotide probe
gtgggggtgcagggaaacgcgggtcaccgtcc

SEQ ID NO: 17329 - DNA, 32 bp, Artificial
  oligonucleotide probe
ggtcgcaggcgagggtacgcgggtcaccgtcc

SEQ ID NO: 17330 - DNA, 32 bp, Artificial
  oligonucleotide probe
cggagcaggagcggaaacgcggtccaccgtgg

SEQ ID NO: 17331 - DNA, 32 bp, Artificial
  oligonucleotide probe
ggtcgcctgtccagcgacgcggtccaccgtgg

SEQ ID NO: 17332 - DNA, 32 bp, Artificial
  oligonucleotide probe
cacccgagagcggtgggcctcggagacggcag

SEQ ID NO: 17333 - DNA, 32 bp, Artificial
  oligonucleotide probe
gcgagtcccggaagcggcctcggagacggcag

SEQ ID NO: 17334 - DNA, 32 bp, Artificial
  oligonucleotide probe
gcgacagggcctgcctacgccaggcgaggtgg

SEQ ID NO: 17335 - DNA, 32 bp, Artificial
  oligonucleotide probe
agcggcgagagcgtccacgccaggcgaggtgg

SEQ ID NO: 17336 - DNA, 32 bp, Artificial
  oligonucleotide probe
cgagcaggcgaggcagacgcaccagtcccgga

SEQ ID NO: 17337 - DNA, 32 bp, Artificial
  oligonucleotide probe
gcctcaggacgcacgcacgcaccagtcccgga

SEQ ID NO: 17338 - DNA, 32 bp, Artificial
  oligonucleotide probe
cacccgagagcggtgggacgcaggcggagggt

SEQ ID NO: 17339 - DNA, 32 bp, Artificial
  oligonucleotide probe
gcgagtcccggaagcggacgcaggcggagggt

SEQ ID NO: 17340 - DNA, 32 bp, Artificial
  oligonucleotide probe
gcaggacggacggcctgacgcaggcggagggt

SEQ ID NO: 17341 - DNA, 32 bp, Artificial
  oligonucleotide probe
gcgacctcacgcgcaggacgcaggcggagggt

SEQ ID NO: 17342 - DNA, 32 bp, Artificial
  oligonucleotide probe
cggagcaggagcggaagcctagcgcctcgacg

SEQ ID NO: 17343 - DNA, 32 bp, Artificial
  oligonucleotide probe
ggtcgcctgtccagcggcctagcgcctcgacg

SEQ ID NO: 17344 - DNA, 32 bp, Artificial
  oligonucleotide probe
gacggagcacgccggaacgcggtccaccgtgg

SEQ ID NO: 17345 - DNA, 32 bp, Artificial
  oligonucleotide probe
cggagcctgagcgtggacgcggtccaccgtgg

SEQ ID NO: 17346 - DNA, 32 bp, Artificial
  oligonucleotide probe
gcgacagggcctgcctgtgggacgacgcgcga

SEQ ID NO: 17347 - DNA, 32 bp, Artificial
  oligonucleotide probe
agcggcgagagcgtccgtgggacgacgcgcga

SEQ ID NO: 17348 - DNA, 32 bp, Artificial
  oligonucleotide probe
caggacgctggccctcgtggcggaggtcggaa

SEQ ID NO: 17349 - DNA, 32 bp, Artificial
  oligonucleotide probe
cctcgtggcggacggagtggcggaggtcggaa

SEQ ID NO: 17350 - DNA, 32 bp, Artificial
  oligonucleotide probe
cgagcaccgagccggacaggggaagggtcgga

SEQ ID NO: 17351 - DNA, 32 bp, Artificial
  oligonucleotide probe
cctccggacctcacgccaggggaagggtcgga

SEQ ID NO: 17352 - DNA, 32 bp, Artificial
  oligonucleotide probe
tgctcggatgctgcgatggcgtgggggtccaa

SEQ ID NO: 17353 - DNA, 32 bp, Artificial
  oligonucleotide probe
gagcgcagccaagccttggcgtgggggtccaa

SEQ ID NO: 17354 - DNA, 32 bp, Artificial
  oligonucleotide probe
cacccgagagcggtggcaggagcgggaagcga

SEQ ID NO: 17355 - DNA, 32 bp, Artificial
  oligonucleotide probe
gcgagtcccggaagcgcaggagcgggaagcga

SEQ ID NO: 17356 - DNA, 32 bp, Artificial
  oligonucleotide probe
cgagcaccgagccggaggtccggagcagacgc

SEQ ID NO: 17357 - DNA, 32 bp, Artificial
  oligonucleotide probe
cctccggacctcacgcggtccggagcagacgc

SEQ ID NO: 17358 - DNA, 32 bp, Artificial
  oligonucleotide probe
gtggccaatcacgcgacaccgcgaggtcacgc

SEQ ID NO: 17359 - DNA, 32 bp, Artificial
  oligonucleotide probe
agcgcaccgacgacgccaccgcgaggtcacgc

SEQ ID NO: 17360 - DNA, 32 bp, Artificial
  oligonucleotide probe
gcgacagggcctgcctgagcggtctggcggaa

SEQ ID NO: 17361 - DNA, 32 bp, Artificial
  oligonucleotide probe
agcggcgagagcgtccgagcggtctggcggaa

SEQ ID NO: 17362 - DNA, 32 bp, Artificial
  oligonucleotide probe
cacccgagagcggtggggaagcctgcgacgga

SEQ ID NO: 17363 - DNA, 32 bp, Artificial
  oligonucleotide probe
gcgagtcccggaagcgggaagcctgcgacgga

SEQ ID NO: 17364 - DNA, 32 bp, Artificial
  oligonucleotide probe
cacccgagagcggtggcaggcacccaggcgga

SEQ ID NO: 17365 - DNA, 32 bp, Artificial
  oligonucleotide probe
gcgagtcccggaagcgcaggcacccaggcgga

SEQ ID NO: 17366 - DNA, 32 bp, Artificial
  oligonucleotide probe
gcgacagggcctgcctggtcgacgacgccgag

SEQ ID NO: 17367 - DNA, 32 bp, Artificial
  oligonucleotide probe
agcggcgagagcgtccggtcgacgacgccgag

SEQ ID NO: 17368 - DNA, 32 bp, Artificial
  oligonucleotide probe
gtgggggtgcagggaagggttggccgagtggc

SEQ ID NO: 17369 - DNA, 32 bp, Artificial
  oligonucleotide probe
ggtcgcaggcgagggtgggttggccgagtggc

SEQ ID NO: 17370 - DNA, 32 bp, Artificial
  oligonucleotide probe
gacgcaccagcgcgaggtggcggaggtcggaa

SEQ ID NO: 17371 - DNA, 32 bp, Artificial
  oligonucleotide probe
tggcaccagcaggggtgtggcggaggtcggaa

SEQ ID NO: 17372 - DNA, 32 bp, Artificial
  oligonucleotide probe
cgagcaccgagccggaagcggtccgcgagagc

SEQ ID NO: 17373 - DNA, 32 bp, Artificial
  oligonucleotide probe
cctccggacctcacgcagcggtccgcgagagc

SEQ ID NO: 17374 - DNA, 32 bp, Artificial
  oligonucleotide probe
gtggccaatcacgcgaaccatggcacgcgacg

SEQ ID NO: 17375 - DNA, 32 bp, Artificial
  oligonucleotide probe
agcgcaccgacgacgcaccatggcacgcgacg

SEQ ID NO: 17376 - DNA, 32 bp, Artificial
  oligonucleotide probe
gcgacagggcctgcctacgcaccagtcccgga

SEQ ID NO: 17377 - DNA, 32 bp, Artificial
  oligonucleotide probe
agcggcgagagcgtccacgcaccagtcccgga

SEQ ID NO: 17378 - DNA, 32 bp, Artificial
  oligonucleotide probe
cgagcaccgagccggacaggagcgggaagcga

SEQ ID NO: 17379 - DNA, 32 bp, Artificial
  oligonucleotide probe
cctccggacctcacgccaggagcgggaagcga

SEQ ID NO: 17380 - DNA, 32 bp, Artificial
  oligonucleotide probe
cgagcaggcgaggcaggacgcaggcggagggt

SEQ ID NO: 17381 - DNA, 32 bp, Artificial
  oligonucleotide probe
gcctcaggacgcacgcgacgcaggcggagggt

SEQ ID NO: 17382 - DNA, 32 bp, Artificial
  oligonucleotide probe
gacgcaccagcgcgagtgctgggtgcaggcga

SEQ ID NO: 17383 - DNA, 32 bp, Artificial
  oligonucleotide probe
tggcaccagcaggggttgctgggtgcaggcga

SEQ ID NO: 17384 - DNA, 32 bp, Artificial
  oligonucleotide probe
cagggtgggcgagcgagacggcgagtgggcag

SEQ ID NO: 17385 - DNA, 32 bp, Artificial
  oligonucleotide probe
acgcccaacagggagcgacggcgagtgggcag

SEQ ID NO: 17386 - DNA, 32 bp, Artificial
  oligonucleotide probe
gcgacagggcctgcctcaccgggtggtcagcg

SEQ ID NO: 17387 - DNA, 32 bp, Artificial
  oligonucleotide probe
agcggcgagagcgtcccaccgggtggtcagcg

SEQ ID NO: 17388 - DNA, 32 bp, Artificial
  oligonucleotide probe
cggagcaggagcggaagtccggaagtgggcga

SEQ ID NO: 17389 - DNA, 32 bp, Artificial
  oligonucleotide probe
ggtcgcctgtccagcggtccggaagtgggcga

SEQ ID NO: 17390 - DNA, 32 bp, Artificial
  oligonucleotide probe
tggcgcctgtccgtggtggcgtgggggtccaa

SEQ ID NO: 17391 - DNA, 32 bp, Artificial
  oligonucleotide probe
gtggcgagcctcgggttggcgtgggggtccaa

SEQ ID NO: 17392 - DNA, 32 bp, Artificial
  oligonucleotide probe
cacccgagagcggtggaccacggaagcgcgga

SEQ ID NO: 17393 - DNA, 32 bp, Artificial
  oligonucleotide probe
gcgagtcccggaagcgaccacggaagcgcgga

SEQ ID NO: 17394 - DNA, 32 bp, Artificial
  oligonucleotide probe
gagcgagcagcgggtcacgcggtccaccgtgg

SEQ ID NO: 17395 - DNA, 32 bp, Artificial
  oligonucleotide probe
acgccctcaccagcgaacgcggtccaccgtgg

SEQ ID NO: 17396 - DNA, 32 bp, Artificial
  oligonucleotide probe
cgagcaccgagccggagacggggtcggacgag

SEQ ID NO: 17397 - DNA, 32 bp, Artificial
  oligonucleotide probe
cctccggacctcacgcgacggggtcggacgag

SEQ ID NO: 17398 - DNA, 32 bp, Artificial
  oligonucleotide probe
tggcaccagcaggggttgctcggatgctgcga

SEQ ID NO: 17399 - DNA, 32 bp, Artificial
  oligonucleotide probe
tggcaccagcaggggtgagcgcagccaagcct

SEQ ID NO: 17400 - DNA, 32 bp, Artificial
  oligonucleotide probe
cggagcaggagcggaacaccgacgggaaacgc

SEQ ID NO: 17401 - DNA, 32 bp, Artificial
  oligonucleotide probe
ggtcgcctgtccagcgcaccgacgggaaacgc

SEQ ID NO: 17402 - DNA, 32 bp, Artificial
  oligonucleotide probe
gacgcaccagcgcgagcaccgagccacccgga

SEQ ID NO: 17403 - DNA, 32 bp, Artificial
  oligonucleotide probe
tggcaccagcaggggtcaccgagccacccgga

SEQ ID NO: 17404 - DNA, 32 bp, Artificial
  oligonucleotide probe
gacgcaccagcgcgagcaggggaagggtcgga

SEQ ID NO: 17405 - DNA, 32 bp, Artificial
  oligonucleotide probe
tggcaccagcaggggtcaggggaagggtcgga

SEQ ID NO: 17406 - DNA, 32 bp, Artificial
  oligonucleotide probe
gagcgagcagcgggtcagcggtccgcgagagc

SEQ ID NO: 17407 - DNA, 32 bp, Artificial
  oligonucleotide probe
acgccctcaccagcgaagcggtccgcgagagc

SEQ ID NO: 17408 - DNA, 32 bp, Artificial
  oligonucleotide probe
gacgcaccagcgcgagtggcgtgggggtccaa

SEQ ID NO: 17409 - DNA, 32 bp, Artificial
  oligonucleotide probe
tggcaccagcaggggttggcgtgggggtccaa

SEQ ID NO: 17410 - DNA, 32 bp, Artificial
  oligonucleotide probe
cacccgagagcggtgggacggcgagtgggcag

SEQ ID NO: 17411 - DNA, 32 bp, Artificial
  oligonucleotide probe
gcgagtcccggaagcggacggcgagtgggcag

SEQ ID NO: 17412 - DNA, 32 bp, Artificial
  oligonucleotide probe
gtgggggtgcagggaagcctagcgcctcgacg

SEQ ID NO: 17413 - DNA, 32 bp, Artificial
  oligonucleotide probe
ggtcgcaggcgagggtgcctagcgcctcgacg

SEQ ID NO: 17414 - DNA, 32 bp, Artificial
  oligonucleotide probe
gtggccaatcacgcgagcaggcagccaatggc

SEQ ID NO: 17415 - DNA, 32 bp, Artificial
  oligonucleotide probe
agcgcaccgacgacgcgcaggcagccaatggc

SEQ ID NO: 17416 - DNA, 32 bp, Artificial
  oligonucleotide probe
gacggagcacgccggagacgcaggcggagggt

SEQ ID NO: 17417 - DNA, 32 bp, Artificial
  oligonucleotide probe
cggagcctgagcgtgggacgcaggcggagggt

SEQ ID NO: 17418 - DNA, 32 bp, Artificial
  oligonucleotide probe
gtggccaatcacgcgaggaagcctgcgacgga

SEQ ID NO: 17419 - DNA, 32 bp, Artificial
  oligonucleotide probe
agcgcaccgacgacgcggaagcctgcgacgga

SEQ ID NO: 17420 - DNA, 32 bp, Artificial
  oligonucleotide probe
gcgacagggcctgcctgcgaagcggcgaggtc

SEQ ID NO: 17421 - DNA, 32 bp, Artificial
  oligonucleotide probe
agcggcgagagcgtccgcgaagcggcgaggtc

SEQ ID NO: 17422 - DNA, 32 bp, Artificial
  oligonucleotide probe
gcgacagggcctgcctagcggtccgcgagagc

SEQ ID NO: 17423 - DNA, 32 bp, Artificial
  oligonucleotide probe
agcggcgagagcgtccagcggtccgcgagagc

SEQ ID NO: 17424 - DNA, 32 bp, Artificial
  oligonucleotide probe
cagggtgggcgagcgagacgcaggcggagggt

SEQ ID NO: 17425 - DNA, 32 bp, Artificial
  oligonucleotide probe
acgcccaacagggagcgacgcaggcggagggt

SEQ ID NO: 17426 - DNA, 32 bp, Artificial
  oligonucleotide probe
tgctcggatgctgcgatcacgccttggccacc

SEQ ID NO: 17427 - DNA, 32 bp, Artificial
  oligonucleotide probe
gagcgcagccaagccttcacgccttggccacc

SEQ ID NO: 17428 - DNA, 32 bp, Artificial
  oligonucleotide probe
gacgcaccagcgcgaggcctgtgggtccgcga

SEQ ID NO: 17429 - DNA, 32 bp, Artificial
  oligonucleotide probe
tggcaccagcaggggtgcctgtgggtccgcga

SEQ ID NO: 17430 - DNA, 32 bp, Artificial
  oligonucleotide probe
gcaggacggacggcctacgcaccagtcccgga

SEQ ID NO: 17431 - DNA, 32 bp, Artificial
  oligonucleotide probe
gcgacctcacgcgcagacgcaccagtcccgga

SEQ ID NO: 17432 - DNA, 32 bp, Artificial
  oligonucleotide probe
cgagcaccgagccggagcagcctctggccgag

SEQ ID NO: 17433 - DNA, 32 bp, Artificial
  oligonucleotide probe
cctccggacctcacgcgcagcctctggccgag

SEQ ID NO: 17434 - DNA, 32 bp, Artificial
  oligonucleotide probe
gtggccaatcacgcgagacggcgagtgggcag

SEQ ID NO: 17435 - DNA, 32 bp, Artificial
  oligonucleotide probe
agcgcaccgacgacgcgacggcgagtgggcag

SEQ ID NO: 17436 - DNA, 32 bp, Artificial
  oligonucleotide probe
cacccgagagcggtgggtccggaagtgggcga

SEQ ID NO: 17437 - DNA, 32 bp, Artificial
  oligonucleotide probe
gcgagtcccggaagcggtccggaagtgggcga

SEQ ID NO: 17438 - DNA, 32 bp, Artificial
  oligonucleotide probe
cgagcaccgagccggaacgccaggcgaggtgg

SEQ ID NO: 17439 - DNA, 32 bp, Artificial
  oligonucleotide probe
cctccggacctcacgcacgccaggcgaggtgg

SEQ ID NO: 17440 - DNA, 32 bp, Artificial
  oligonucleotide probe
caggacgctggccctcggaaagcggcctggaa

SEQ ID NO: 17441 - DNA, 32 bp, Artificial
  oligonucleotide probe
cctcgtggcggacggaggaaagcggcctggaa

SEQ ID NO: 17442 - DNA, 32 bp, Artificial
  oligonucleotide probe
gagcgagcagcgggtcacgcaccagtcccgga

SEQ ID NO: 17443 - DNA, 32 bp, Artificial
  oligonucleotide probe
acgccctcaccagcgaacgcaccagtcccgga

SEQ ID NO: 17444 - DNA, 32 bp, Artificial
  oligonucleotide probe
gcgacagggcctgcctcctcagcgcggaacca

SEQ ID NO: 17445 - DNA, 32 bp, Artificial
  oligonucleotide probe
agcggcgagagcgtcccctcagcgcggaacca

SEQ ID NO: 17446 - DNA, 32 bp, Artificial
  oligonucleotide probe
cggagcaggagcggaacaggggaagggtcgga

SEQ ID NO: 17447 - DNA, 32 bp, Artificial
  oligonucleotide probe
ggtcgcctgtccagcgcaggggaagggtcgga

SEQ ID NO: 17448 - DNA, 32 bp, Artificial
  oligonucleotide probe
cacccgagagcggtggacgcgagcgggtgcag

SEQ ID NO: 17449 - DNA, 32 bp, Artificial
  oligonucleotide probe
gcgagtcccggaagcgacgcgagcgggtgcag

SEQ ID NO: 17450 - DNA, 32 bp, Artificial
  oligonucleotide probe
cgagcaccgagccggacctcgcctcgaggagc

SEQ ID NO: 17451 - DNA, 32 bp, Artificial
  oligonucleotide probe
cctccggacctcacgccctcgcctcgaggagc

SEQ ID NO: 17452 - DNA, 32 bp, Artificial
  oligonucleotide probe
gtgggggtgcagggaagcgagtggcagggcct

SEQ ID NO: 17453 - DNA, 32 bp, Artificial
  oligonucleotide probe
ggtcgcaggcgagggtgcgagtggcagggcct

SEQ ID NO: 17454 - DNA, 32 bp, Artificial
  oligonucleotide probe
gtgggggtgcagggaagcaggcagccaatggc

SEQ ID NO: 17455 - DNA, 32 bp, Artificial
  oligonucleotide probe
ggtcgcaggcgagggtgcaggcagccaatggc

SEQ ID NO: 17456 - DNA, 32 bp, Artificial
  oligonucleotide probe
tgctcggatgctgcgagcgacgagcgagccaa

SEQ ID NO: 17457 - DNA, 32 bp, Artificial
  oligonucleotide probe
gagcgcagccaagcctgcgacgagcgagccaa

SEQ ID NO: 17458 - DNA, 32 bp, Artificial
  oligonucleotide probe
gtgggggtgcagggaagcaggtggtggcgagc

SEQ ID NO: 17459 - DNA, 32 bp, Artificial
  oligonucleotide probe
ggtcgcaggcgagggtgcaggtggtggcgagc

SEQ ID NO: 17460 - DNA, 32 bp, Artificial
  oligonucleotide probe
caggcctccctcgcgacaccgggtggtcagcg

SEQ ID NO: 17461 - DNA, 32 bp, Artificial
  oligonucleotide probe
caccagcgagacgcgacaccgggtggtcagcg

SEQ ID NO: 17462 - DNA, 32 bp, Artificial
  oligonucleotide probe
cgagcaggcgaggcagacgccaggcgaggtgg

SEQ ID NO: 17463 - DNA, 32 bp, Artificial
  oligonucleotide probe
gcctcaggacgcacgcacgccaggcgaggtgg

SEQ ID NO: 17464 - DNA, 32 bp, Artificial
  oligonucleotide probe
tgctcggatgctgcgagacgcaggcggagggt

SEQ ID NO: 17465 - DNA, 32 bp, Artificial
  oligonucleotide probe
gagcgcagccaagcctgacgcaggcggagggt

SEQ ID NO: 17466 - DNA, 32 bp, Artificial
  oligonucleotide probe
cgaggacgccaaacgcgacggcgagtgggcag

SEQ ID NO: 17467 - DNA, 32 bp, Artificial
  oligonucleotide probe
gggtacgcgacgcgaggacggcgagtgggcag

SEQ ID NO: 17468 - DNA, 32 bp, Artificial
  oligonucleotide probe
cggagcaggagcggaagcagcggagcctgagc

SEQ ID NO: 17469 - DNA, 32 bp, Artificial
  oligonucleotide probe
ggtcgcctgtccagcggcagcggagcctgagc

SEQ ID NO: 17470 - DNA, 32 bp, Artificial
  oligonucleotide probe
cacccgagagcggtgggcctgtgggtccgcga

SEQ ID NO: 17471 - DNA, 32 bp, Artificial
  oligonucleotide probe
gcgagtcccggaagcggcctgtgggtccgcga

SEQ ID NO: 17472 - DNA, 32 bp, Artificial
  oligonucleotide probe
cgagcaccgagccggacaggcacccaggcgga

SEQ ID NO: 17473 - DNA, 32 bp, Artificial
  oligonucleotide probe
cctccggacctcacgccaggcacccaggcgga

SEQ ID NO: 17474 - DNA, 32 bp, Artificial
  oligonucleotide probe
tgctcggatgctgcgacctctggctggcccaa

SEQ ID NO: 17475 - DNA, 32 bp, Artificial
  oligonucleotide probe
gagcgcagccaagcctcctctggctggcccaa

SEQ ID NO: 17476 - DNA, 32 bp, Artificial
  oligonucleotide probe
gcgacagggcctgcctgtccacgctggcgacg

SEQ ID NO: 17477 - DNA, 32 bp, Artificial
  oligonucleotide probe
agcggcgagagcgtccgtccacgctggcgacg

SEQ ID NO: 17478 - DNA, 32 bp, Artificial
  oligonucleotide probe
gacgcaccagcgcgaggcctagcgcctcgacg

SEQ ID NO: 17479 - DNA, 32 bp, Artificial
  oligonucleotide probe
tggcaccagcaggggtgcctagcgcctcgacg

SEQ ID NO: 17480 - DNA, 32 bp, Artificial
  oligonucleotide probe
gacgcaccagcgcgagacgcggaagacgtggc

SEQ ID NO: 17481 - DNA, 32 bp, Artificial
  oligonucleotide probe
tggcaccagcaggggtacgcggaagacgtggc

SEQ ID NO: 17482 - DNA, 32 bp, Artificial
  oligonucleotide probe
tgctcggatgctgcgaacgcggtccaccgtgg

SEQ ID NO: 17483 - DNA, 32 bp, Artificial
  oligonucleotide probe
gagcgcagccaagcctacgcggtccaccgtgg

SEQ ID NO: 17484 - DNA, 32 bp, Artificial
  oligonucleotide probe
caggacgctggccctccaccgggtggtcagcg

SEQ ID NO: 17485 - DNA, 32 bp, Artificial
  oligonucleotide probe
cctcgtggcggacggacaccgggtggtcagcg

SEQ ID NO: 17486 - DNA, 32 bp, Artificial
  oligonucleotide probe
gcgacagggcctgcctcaccgacgggaaacgc

SEQ ID NO: 17487 - DNA, 32 bp, Artificial
  oligonucleotide probe
agcggcgagagcgtcccaccgacgggaaacgc

SEQ ID NO: 17488 - DNA, 32 bp, Artificial
  oligonucleotide probe
caggacgctggccctcgacggcgagtgggcag

SEQ ID NO: 17489 - DNA, 32 bp, Artificial
  oligonucleotide probe
cctcgtggcggacggagacggcgagtgggcag

SEQ ID NO: 17490 - DNA, 32 bp, Artificial
  oligonucleotide probe
ggtcgcgacacctggcgacgcaggcggagggt

SEQ ID NO: 17491 - DNA, 32 bp, Artificial
  oligonucleotide probe
cgagcctcgggtgcgagacgcaggcggagggt

SEQ ID NO: 17492 - DNA, 32 bp, Artificial
  oligonucleotide probe
gtgggggtgcagggaacggacaggacgctggc

SEQ ID NO: 17493 - DNA, 32 bp, Artificial
  oligonucleotide probe
ggtcgcaggcgagggtcggacaggacgctggc

SEQ ID NO: 17494 - DNA, 32 bp, Artificial
  oligonucleotide probe
cgagcaccgagccggacaccgcgaggtcacgc

SEQ ID NO: 17495 - DNA, 32 bp, Artificial
  oligonucleotide probe
cctccggacctcacgccaccgcgaggtcacgc

SEQ ID NO: 17496 - DNA, 32 bp, Artificial
  oligonucleotide probe
cacccgagagcggtggcctctggctggcccaa

SEQ ID NO: 17497 - DNA, 32 bp, Artificial
  oligonucleotide probe
gcgagtcccggaagcgcctctggctggcccaa

SEQ ID NO: 17498 - DNA, 32 bp, Artificial
  oligonucleotide probe
gacgcaccagcgcgaggggtggaacgaggcga

SEQ ID NO: 17499 - DNA, 32 bp, Artificial
  oligonucleotide probe
tggcaccagcaggggtgggtggaacgaggcga

SEQ ID NO: 17500 - DNA, 32 bp, Artificial
  oligonucleotide probe
caccggtcagcggggtgacgcaggcggagggt

SEQ ID NO: 17501 - DNA, 32 bp, Artificial
  oligonucleotide probe
actgcggacgaggcctgacgcaggcggagggt

SEQ ID NO: 17502 - DNA, 32 bp, Artificial
  oligonucleotide probe
gcgacagggcctgcctagcgagcggtggacgc

SEQ ID NO: 17503 - DNA, 32 bp, Artificial
  oligonucleotide probe
agcggcgagagcgtccagcgagcggtggacgc

SEQ ID NO: 17504 - DNA, 32 bp, Artificial
  oligonucleotide probe
cacccgagagcggtggacgcggtccaccgtgg

SEQ ID NO: 17505 - DNA, 32 bp, Artificial
  oligonucleotide probe
gcgagtcccggaagcgacgcggtccaccgtgg

SEQ ID NO: 17506 - DNA, 32 bp, Artificial
  oligonucleotide probe
tggcgcctgtccgtgggacggacgacgcgtgg

SEQ ID NO: 17507 - DNA, 32 bp, Artificial
  oligonucleotide probe
gtggcgagcctcgggtgacggacgacgcgtgg

SEQ ID NO: 17508 - DNA, 32 bp, Artificial
  oligonucleotide probe
gacgcaccagcgcgaggacgcaggcggagggt

SEQ ID NO: 17509 - DNA, 32 bp, Artificial
  oligonucleotide probe
tggcaccagcaggggtgacgcaggcggagggt

SEQ ID NO: 17510 - DNA, 32 bp, Artificial
  oligonucleotide probe
gacgcaccagcgcgagggaagcctgcgacgga

SEQ ID NO: 17511 - DNA, 32 bp, Artificial
  oligonucleotide probe
tggcaccagcaggggtggaagcctgcgacgga

SEQ ID NO: 17512 - DNA, 32 bp, Artificial
  oligonucleotide probe
caggacgctggccctcacgcgggtcaccgtcc

SEQ ID NO: 17513 - DNA, 32 bp, Artificial
  oligonucleotide probe
cctcgtggcggacggaacgcgggtcaccgtcc

SEQ ID NO: 17514 - DNA, 32 bp, Artificial
  oligonucleotide probe
caggcctccctcgcgatcacgccttggccacc

SEQ ID NO: 17515 - DNA, 32 bp, Artificial
  oligonucleotide probe
caccagcgagacgcgatcacgccttggccacc

SEQ ID NO: 17516 - DNA, 32 bp, Artificial
  oligonucleotide probe
tgctcggatgctgcgaacgcaccagtcccgga

SEQ ID NO: 17517 - DNA, 32 bp, Artificial
  oligonucleotide probe
gagcgcagccaagcctacgcaccagtcccgga

SEQ ID NO: 17518 - DNA, 32 bp, Artificial
  oligonucleotide probe
acgcagcggggtgacggcctcggagacggcag

SEQ ID NO: 17519 - DNA, 32 bp, Artificial
  oligonucleotide probe
caccgcctcagggacggcctcggagacggcag

SEQ ID NO: 17520 - DNA, 32 bp, Artificial
  oligonucleotide probe
gtgggggtgcagggaaagcggtccgcgagagc

SEQ ID NO: 17521 - DNA, 32 bp, Artificial
  oligonucleotide probe
ggtcgcaggcgagggtagcggtccgcgagagc

SEQ ID NO: 17522 - DNA, 32 bp, Artificial
  oligonucleotide probe
cacccgagagcggtgggcaggtggtggcgagc

SEQ ID NO: 17523 - DNA, 32 bp, Artificial
  oligonucleotide probe
gcgagtcccggaagcggcaggtggtggcgagc

SEQ ID NO: 17524 - DNA, 32 bp, Artificial
  oligonucleotide probe
gagcgagcagcgggtcacgcggaagacgtggc

SEQ ID NO: 17525 - DNA, 32 bp, Artificial
  oligonucleotide probe
acgccctcaccagcgaacgcggaagacgtggc

SEQ ID NO: 17526 - DNA, 32 bp, Artificial
  oligonucleotide probe
gcgacagggcctgccttggcgtgggggtccaa

SEQ ID NO: 17527 - DNA, 32 bp, Artificial
  oligonucleotide probe
agcggcgagagcgtcctggcgtgggggtccaa

SEQ ID NO: 17528 - DNA, 32 bp, Artificial
  oligonucleotide probe
cacccgagagcggtggtcacgccttggccacc

SEQ ID NO: 17529 - DNA, 32 bp, Artificial
  oligonucleotide probe
gcgagtcccggaagcgtcacgccttggccacc

SEQ ID NO: 17530 - DNA, 32 bp, Artificial
  oligonucleotide probe
caggcctccctcgcgaaccatggcacgcgacg

SEQ ID NO: 17531 - DNA, 32 bp, Artificial
  oligonucleotide probe
caccagcgagacgcgaaccatggcacgcgacg

SEQ ID NO: 17532 - DNA, 32 bp, Artificial
  oligonucleotide probe
gtgggggtgcagggaagtccgagcagcggcct

SEQ ID NO: 17533 - DNA, 32 bp, Artificial
  oligonucleotide probe
ggtcgcaggcgagggtgtccgagcagcggcct

SEQ ID NO: 17534 - DNA, 32 bp, Artificial
  oligonucleotide probe
cgagcaggcgaggcaggcctcggagacggcag

SEQ ID NO: 17535 - DNA, 32 bp, Artificial
  oligonucleotide probe
gcctcaggacgcacgcgcctcggagacggcag

SEQ ID NO: 17536 - DNA, 32 bp, Artificial
  oligonucleotide probe
caccggtcagcggggtgcctagcgcctcgacg

SEQ ID NO: 17537 - DNA, 32 bp, Artificial
  oligonucleotide probe
actgcggacgaggcctgcctagcgcctcgacg

SEQ ID NO: 17538 - DNA, 32 bp, Artificial
  oligonucleotide probe
gagcgagcagcgggtctgctgggtgcaggcga

SEQ ID NO: 17539 - DNA, 32 bp, Artificial
  oligonucleotide probe
acgccctcaccagcgatgctgggtgcaggcga

SEQ ID NO: 17540 - DNA, 32 bp, Artificial
  oligonucleotide probe
tggcgcctgtccgtggggtcgacgacgccgag

SEQ ID NO: 17541 - DNA, 32 bp, Artificial
  oligonucleotide probe
gtggcgagcctcgggtggtcgacgacgccgag

SEQ ID NO: 17542 - DNA, 32 bp, Artificial
  oligonucleotide probe
gtggccaatcacgcgaagcggtccgcgagagc

SEQ ID NO: 17543 - DNA, 32 bp, Artificial
  oligonucleotide probe
agcgcaccgacgacgcagcggtccgcgagagc

SEQ ID NO: 17544 - DNA, 32 bp, Artificial
  oligonucleotide probe
cacccgagagcggtggggtcgacgacgccgag

SEQ ID NO: 17545 - DNA, 32 bp, Artificial
  oligonucleotide probe
gcgagtcccggaagcgggtcgacgacgccgag

SEQ ID NO: 17546 - DNA, 32 bp, Artificial
  oligonucleotide probe
gagcgagcagcgggtcgacgcaggcggagggt

SEQ ID NO: 17547 - DNA, 32 bp, Artificial
  oligonucleotide probe
acgccctcaccagcgagacgcaggcggagggt

SEQ ID NO: 17548 - DNA, 32 bp, Artificial
  oligonucleotide probe
gcgacagggcctgcctgagcgcgacacccagg

SEQ ID NO: 17549 - DNA, 32 bp, Artificial
  oligonucleotide probe
agcggcgagagcgtccgagcgcgacacccagg

SEQ ID NO: 17550 - DNA, 32 bp, Artificial
  oligonucleotide probe
gacgcaccagcgcgagggtccggagcagacgc

SEQ ID NO: 17551 - DNA, 32 bp, Artificial
  oligonucleotide probe
tggcaccagcaggggtggtccggagcagacgc

SEQ ID NO: 17552 - DNA, 32 bp, Artificial
  oligonucleotide probe
tggcgcctgtccgtggtgctgggtgcaggcga

SEQ ID NO: 17553 - DNA, 32 bp, Artificial
  oligonucleotide probe
gtggcgagcctcgggttgctgggtgcaggcga

SEQ ID NO: 17554 - DNA, 32 bp, Artificial
  oligonucleotide probe
cacccgagagcggtggtggcagcgggtcgtgg

SEQ ID NO: 17555 - DNA, 32 bp, Artificial
  oligonucleotide probe
gcgagtcccggaagcgtggcagcgggtcgtgg

SEQ ID NO: 17556 - DNA, 32 bp, Artificial
  oligonucleotide probe
gacgcaccagcgcgagtggcagcgggtcgtgg

SEQ ID NO: 17557 - DNA, 32 bp, Artificial
  oligonucleotide probe
tggcaccagcaggggttggcagcgggtcgtgg

SEQ ID NO: 17558 - DNA, 32 bp, Artificial
  oligonucleotide probe
cacccgagagcggtgggcgacgagcgagccaa

SEQ ID NO: 17559 - DNA, 32 bp, Artificial
  oligonucleotide probe
gcgagtcccggaagcggcgacgagcgagccaa

SEQ ID NO: 17560 - DNA, 32 bp, Artificial
  oligonucleotide probe
cgagcaccgagccggatgctgggtgcaggcga

SEQ ID NO: 17561 - DNA, 32 bp, Artificial
  oligonucleotide probe
cctccggacctcacgctgctgggtgcaggcga

SEQ ID NO: 17562 - DNA, 32 bp, Artificial
  oligonucleotide probe
cggacacctggccggagacggcgagtgggcag

SEQ ID NO: 17563 - DNA, 32 bp, Artificial
  oligonucleotide probe
gagcgacgcgagagcggacggcgagtgggcag

SEQ ID NO: 17564 - DNA, 32 bp, Artificial
  oligonucleotide probe
tggcgcctgtccgtgggacgcaggcggagggt

SEQ ID NO: 17565 - DNA, 32 bp, Artificial
  oligonucleotide probe
gtggcgagcctcgggtgacgcaggcggagggt

SEQ ID NO: 17566 - DNA, 32 bp, Artificial
  oligonucleotide probe
cggagcaggagcggaaacgcaccagtcccgga

SEQ ID NO: 17567 - DNA, 32 bp, Artificial
  oligonucleotide probe
ggtcgcctgtccagcgacgcaccagtcccgga

SEQ ID NO: 17568 - DNA, 32 bp, Artificial
  oligonucleotide probe
cacccgagagcggtgggtccacgctggcgacg

SEQ ID NO: 17569 - DNA, 32 bp, Artificial
  oligonucleotide probe
gcgagtcccggaagcggtccacgctggcgacg

SEQ ID NO: 17570 - DNA, 32 bp, Artificial
  oligonucleotide probe
gagcgagcagcgggtcaccatggcacgcgacg

SEQ ID NO: 17571 - DNA, 32 bp, Artificial
  oligonucleotide probe
acgccctcaccagcgaaccatggcacgcgacg

SEQ ID NO: 17572 - DNA, 32 bp, Artificial
  oligonucleotide probe
gacggagcacgccggagcctcggagacggcag

SEQ ID NO: 17573 - DNA, 32 bp, Artificial
  oligonucleotide probe
cggagcctgagcgtgggcctcggagacggcag

SEQ ID NO: 17574 - DNA, 32 bp, Artificial
  oligonucleotide probe
cagggtgggcgagcgacaccgacgggaaacgc

SEQ ID NO: 17575 - DNA, 32 bp, Artificial
  oligonucleotide probe
acgcccaacagggagccaccgacgggaaacgc

SEQ ID NO: 17576 - DNA, 32 bp, Artificial
  oligonucleotide probe
caggcctccctcgcgaggtcgacgacgccgag

SEQ ID NO: 17577 - DNA, 32 bp, Artificial
  oligonucleotide probe
caccagcgagacgcgaggtcgacgacgccgag

SEQ ID NO: 17578 - DNA, 32 bp, Artificial
  oligonucleotide probe
tgctcggatgctgcgagggtggaacgaggcga

SEQ ID NO: 17579 - DNA, 32 bp, Artificial
  oligonucleotide probe
gagcgcagccaagcctgggtggaacgaggcga

SEQ ID NO: 17580 - DNA, 32 bp, Artificial
  oligonucleotide probe
acgcagcggggtgacgtggcgtgggggtccaa

SEQ ID NO: 17581 - DNA, 32 bp, Artificial
  oligonucleotide probe
caccgcctcagggacgtggcgtgggggtccaa

SEQ ID NO: 17582 - DNA, 32 bp, Artificial
  oligonucleotide probe
tggcgcctgtccgtgggcctcggagacggcag

SEQ ID NO: 17583 - DNA, 32 bp, Artificial
  oligonucleotide probe
gtggcgagcctcgggtgcctcggagacggcag

SEQ ID NO: 17584 - DNA, 32 bp, Artificial
  oligonucleotide probe
cacccgagagcggtggtggccaggcggagtgg

SEQ ID NO: 17585 - DNA, 32 bp, Artificial
  oligonucleotide probe
gcgagtcccggaagcgtggccaggcggagtgg

SEQ ID NO: 17586 - DNA, 32 bp, Artificial
  oligonucleotide probe
gtgggggtgcagggaagacggcgagtgggcag

SEQ ID NO: 17587 - DNA, 32 bp, Artificial
  oligonucleotide probe
ggtcgcaggcgagggtgacggcgagtgggcag

SEQ ID NO: 17588 - DNA, 32 bp, Artificial
  oligonucleotide probe
gtggccaatcacgcgagcagcggagcctgagc

SEQ ID NO: 17589 - DNA, 32 bp, Artificial
  oligonucleotide probe
agcgcaccgacgacgcgcagcggagcctgagc

SEQ ID NO: 17590 - DNA, 32 bp, Artificial
  oligonucleotide probe
gacgcaccagcgcgaggcagcaccagcgtggc

SEQ ID NO: 17591 - DNA, 32 bp, Artificial
  oligonucleotide probe
tggcaccagcaggggtgcagcaccagcgtggc

SEQ ID NO: 17592 - DNA, 32 bp, Artificial
  oligonucleotide probe
cgagcaccgagccggatggcgtgggggtccaa

SEQ ID NO: 17593 - DNA, 32 bp, Artificial
  oligonucleotide probe
cctccggacctcacgctggcgtgggggtccaa

SEQ ID NO: 17594 - DNA, 32 bp, Artificial
  oligonucleotide probe
cacccgagagcggtggacgcaccagtcccgga

SEQ ID NO: 17595 - DNA, 32 bp, Artificial
  oligonucleotide probe
gcgagtcccggaagcgacgcaccagtcccgga

SEQ ID NO: 17596 - DNA, 32 bp, Artificial
  oligonucleotide probe
gtgggggtgcagggaatgctgggtgcaggcga

SEQ ID NO: 17597 - DNA, 32 bp, Artificial
  oligonucleotide probe
ggtcgcaggcgagggttgctgggtgcaggcga

SEQ ID NO: 17598 - DNA, 32 bp, Artificial
  oligonucleotide probe
gcgacagggcctgccttggccaggcggagtgg

SEQ ID NO: 17599 - DNA, 32 bp, Artificial
  oligonucleotide probe
agcggcgagagcgtcctggccaggcggagtgg

SEQ ID NO: 17600 - DNA, 32 bp, Artificial
  oligonucleotide probe
gtgggggtgcagggaaagcgccaatcacgggt

SEQ ID NO: 17601 - DNA, 32 bp, Artificial
  oligonucleotide probe
ggtcgcaggcgagggtagcgccaatcacgggt

SEQ ID NO: 17602 - DNA, 32 bp, Artificial
  oligonucleotide probe
gtggccaatcacgcgagtccggaagtgggcga

SEQ ID NO: 17603 - DNA, 32 bp, Artificial
  oligonucleotide probe
agcgcaccgacgacgcgtccggaagtgggcga

SEQ ID NO: 17604 - DNA, 32 bp, Artificial
  oligonucleotide probe
ggtcgcgacacctggcgacggcgagtgggcag

SEQ ID NO: 17605 - DNA, 32 bp, Artificial
  oligonucleotide probe
cgagcctcgggtgcgagacggcgagtgggcag

SEQ ID NO: 17606 - DNA, 32 bp, Artificial
  oligonucleotide probe
gtgggggtgcagggaacctctggctggcccaa

SEQ ID NO: 17607 - DNA, 32 bp, Artificial
  oligonucleotide probe
ggtcgcaggcgagggtcctctggctggcccaa

SEQ ID NO: 17608 - DNA, 32 bp, Artificial
  oligonucleotide probe
gtgggggtgcagggaacctcagcgcggaacca

SEQ ID NO: 17609 - DNA, 32 bp, Artificial
  oligonucleotide probe
ggtcgcaggcgagggtcctcagcgcggaacca

SEQ ID NO: 17610 - DNA, 32 bp, Artificial
  oligonucleotide probe
cagggtgggcgagcgaggtcgacgacgccgag

SEQ ID NO: 17611 - DNA, 32 bp, Artificial
  oligonucleotide probe
acgcccaacagggagcggtcgacgacgccgag

SEQ ID NO: 17612 - DNA, 32 bp, Artificial
  oligonucleotide probe
gtgggggtgcagggaagcgaagcggcgaggtc

SEQ ID NO: 17613 - DNA, 32 bp, Artificial
  oligonucleotide probe
ggtcgcaggcgagggtgcgaagcggcgaggtc

SEQ ID NO: 17614 - DNA, 32 bp, Artificial
  oligonucleotide probe
gtggccaatcacgcgaacgcggtccaccgtgg

SEQ ID NO: 17615 - DNA, 32 bp, Artificial
  oligonucleotide probe
agcgcaccgacgacgcacgcggtccaccgtgg

SEQ ID NO: 17616 - DNA, 32 bp, Artificial
  oligonucleotide probe
gcgacagggcctgcctgcagcggagcctgagc

SEQ ID NO: 17617 - DNA, 32 bp, Artificial
  oligonucleotide probe
agcggcgagagcgtccgcagcggagcctgagc

SEQ ID NO: 17618 - DNA, 32 bp, Artificial
  oligonucleotide probe
gtgggggtgcagggaagcgacgagcgagccaa

SEQ ID NO: 17619 - DNA, 32 bp, Artificial
  oligonucleotide probe
ggtcgcaggcgagggtgcgacgagcgagccaa

SEQ ID NO: 17620 - DNA, 32 bp, Artificial
  oligonucleotide probe
gcgacagggcctgcctggtccggagcagacgc

SEQ ID NO: 17621 - DNA, 32 bp, Artificial
  oligonucleotide probe
agcggcgagagcgtccggtccggagcagacgc

SEQ ID NO: 17622 - DNA, 32 bp, Artificial
  oligonucleotide probe
cgagcaccgagccggacaccgacgggaaacgc

SEQ ID NO: 17623 - DNA, 32 bp, Artificial
  oligonucleotide probe
cctccggacctcacgccaccgacgggaaacgc

SEQ ID NO: 17624 - DNA, 32 bp, Artificial
  oligonucleotide probe
gagcgagcagcgggtcacgccaggcgaggtgg

SEQ ID NO: 17625 - DNA, 32 bp, Artificial
  oligonucleotide probe
acgccctcaccagcgaacgccaggcgaggtgg

SEQ ID NO: 17626 - DNA, 32 bp, Artificial
  oligonucleotide probe
caggacgctggccctcgcagcggagcctgagc

SEQ ID NO: 17627 - DNA, 32 bp, Artificial
  oligonucleotide probe
cctcgtggcggacggagcagcggagcctgagc

SEQ ID NO: 17628 - DNA, 32 bp, Artificial
  oligonucleotide probe
gcgacagggcctgccttggcacgcgagccagg

SEQ ID NO: 17629 - DNA, 32 bp, Artificial
  oligonucleotide probe
agcggcgagagcgtcctggcacgcgagccagg

SEQ ID NO: 17630 - DNA, 32 bp, Artificial
  oligonucleotide probe
caggacgctggccctcacgcggtccaccgtgg

SEQ ID NO: 17631 - DNA, 32 bp, Artificial
  oligonucleotide probe
cctcgtggcggacggaacgcggtccaccgtgg

SEQ ID NO: 17632 - DNA, 32 bp, Artificial
  oligonucleotide probe
caggacgctggccctcgcctagcgcctcgacg

SEQ ID NO: 17633 - DNA, 32 bp, Artificial
  oligonucleotide probe
cctcgtggcggacggagcctagcgcctcgacg

SEQ ID NO: 17634 - DNA, 32 bp, Artificial
  oligonucleotide probe
cacccgagagcggtgggagcgcgacacccagg

SEQ ID NO: 17635 - DNA, 32 bp, Artificial
  oligonucleotide probe
gcgagtcccggaagcggagcgcgacacccagg

SEQ ID NO: 17636 - DNA, 32 bp, Artificial
  oligonucleotide probe
gacgcaccagcgcgaggcagcctctggccgag

SEQ ID NO: 17637 - DNA, 32 bp, Artificial
  oligonucleotide probe
tggcaccagcaggggtgcagcctctggccgag

SEQ ID NO: 17638 - DNA, 32 bp, Artificial
  oligonucleotide probe
cgagcaccgagccggagtccgagcagcggcct

SEQ ID NO: 17639 - DNA, 32 bp, Artificial
  oligonucleotide probe
cctccggacctcacgcgtccgagcagcggcct

SEQ ID NO: 17640 - DNA, 32 bp, Artificial
  oligonucleotide probe
gtgggggtgcagggaaggaaagcggcctggaa

SEQ ID NO: 17641 - DNA, 32 bp, Artificial
  oligonucleotide probe
ggtcgcaggcgagggtggaaagcggcctggaa

SEQ ID NO: 17642 - DNA, 32 bp, Artificial
  oligonucleotide probe
agcggcgagagcgtcccagggcagggtcgggt

SEQ ID NO: 17643 - DNA, 32 bp, Artificial
  oligonucleotide probe
gacgcaccagcgcgagcagggcagggtcgggt

SEQ ID NO: 17644 - DNA, 32 bp, Artificial
  oligonucleotide probe
caggacgctggccctctggcagcgggtcgtgg

SEQ ID NO: 17645 - DNA, 32 bp, Artificial
  oligonucleotide probe
cctcgtggcggacggatggcagcgggtcgtgg

SEQ ID NO: 17646 - DNA, 32 bp, Artificial
  oligonucleotide probe
gacgcaccagcgcgaggagcgcctcctcgagc

SEQ ID NO: 17647 - DNA, 32 bp, Artificial
  oligonucleotide probe
tggcaccagcaggggtgagcgcctcctcgagc

SEQ ID NO: 17648 - DNA, 32 bp, Artificial
  oligonucleotide probe
gacgcaccagcgcgaggcgagtggcagggcct

SEQ ID NO: 17649 - DNA, 32 bp, Artificial
  oligonucleotide probe
tggcaccagcaggggtgcgagtggcagggcct

SEQ ID NO: 17650 - DNA, 32 bp, Artificial
  oligonucleotide probe
cacccgagagcggtgggcagcggagcctgagc

SEQ ID NO: 17651 - DNA, 32 bp, Artificial
  oligonucleotide probe
gcgagtcccggaagcggcagcggagcctgagc

SEQ ID NO: 17652 - DNA, 32 bp, Artificial
  oligonucleotide probe
cgagcaccgagccggagacggacgacgcgtgg

SEQ ID NO: 17653 - DNA, 32 bp, Artificial
  oligonucleotide probe
cctccggacctcacgcgacggacgacgcgtgg

SEQ ID NO: 17654 - DNA, 32 bp, Artificial
  oligonucleotide probe
gcaggacggacggcctacgccaggcgaggtgg

SEQ ID NO: 17655 - DNA, 32 bp, Artificial
  oligonucleotide probe
gcgacctcacgcgcagacgccaggcgaggtgg

SEQ ID NO: 17656 - DNA, 32 bp, Artificial
  oligonucleotide probe
cacccgagagcggtggggtccggagcagacgc

SEQ ID NO: 17657 - DNA, 32 bp, Artificial
  oligonucleotide probe
gcgagtcccggaagcgggtccggagcagacgc

SEQ ID NO: 17658 - DNA, 32 bp, Artificial
  oligonucleotide probe
gacgcaccagcgcgaggagcgcgacacccagg

SEQ ID NO: 17659 - DNA, 32 bp, Artificial
  oligonucleotide probe
tggcaccagcaggggtgagcgcgacacccagg

SEQ ID NO: 17660 - DNA, 32 bp, Artificial
  oligonucleotide probe
cgagcaccgagccggagcctgggtcaccacgc

SEQ ID NO: 17661 - DNA, 32 bp, Artificial
  oligonucleotide probe
cctccggacctcacgcgcctgggtcaccacgc

SEQ ID NO: 17662 - DNA, 32 bp, Artificial
  oligonucleotide probe
gtggccaatcacgcgaacgccaggcgaggtgg

SEQ ID NO: 17663 - DNA, 32 bp, Artificial
  oligonucleotide probe
agcgcaccgacgacgcacgccaggcgaggtgg

SEQ ID NO: 17664 - DNA, 32 bp, Artificial
  oligonucleotide probe
gtccgggtcaggcagggcagcggagcctgagc

SEQ ID NO: 17665 - DNA, 32 bp, Artificial
  oligonucleotide probe
cggagagcgcgagcctgcagcggagcctgagc

SEQ ID NO: 17666 - DNA, 32 bp, Artificial
  oligonucleotide probe
cgagcaccgagccggagacggcgagtgggcag

SEQ ID NO: 17667 - DNA, 32 bp, Artificial
  oligonucleotide probe
cctccggacctcacgcgacggcgagtgggcag

SEQ ID NO: 17668 - DNA, 32 bp, Artificial
  oligonucleotide probe
gacgcaccagcgcgagagcggtccgcgagagc

SEQ ID NO: 17669 - DNA, 32 bp, Artificial
  oligonucleotide probe
tggcaccagcaggggtagcggtccgcgagagc

SEQ ID NO: 17670 - DNA, 32 bp, Artificial
  oligonucleotide probe
gcgacagggcctgcctgggtggaacgaggcga

SEQ ID NO: 17671 - DNA, 32 bp, Artificial
  oligonucleotide probe
agcggcgagagcgtccgggtggaacgaggcga

SEQ ID NO: 17672 - DNA, 32 bp, Artificial
  oligonucleotide probe
tggcgcctgtccgtggacgcggtccaccgtgg

SEQ ID NO: 17673 - DNA, 32 bp, Artificial
  oligonucleotide probe
gtggcgagcctcgggtacgcggtccaccgtgg

SEQ ID NO: 17674 - DNA, 32 bp, Artificial
  oligonucleotide probe
caggcctccctcgcgagcctcggagacggcag

SEQ ID NO: 17675 - DNA, 32 bp, Artificial
  oligonucleotide probe
caccagcgagacgcgagcctcggagacggcag

SEQ ID NO: 17676 - DNA, 32 bp, Artificial
  oligonucleotide probe
caggacgctggccctcggtcgacgacgccgag

SEQ ID NO: 17677 - DNA, 32 bp, Artificial
  oligonucleotide probe
cctcgtggcggacggaggtcgacgacgccgag

SEQ ID NO: 17678 - DNA, 32 bp, Artificial
  oligonucleotide probe
cacccgagagcggtgggtccgagcagcggcct

SEQ ID NO: 17679 - DNA, 32 bp, Artificial
  oligonucleotide probe
gcgagtcccggaagcggtccgagcagcggcct

SEQ ID NO: 17680 - DNA, 32 bp, Artificial
  oligonucleotide probe
gcgacagggcctgcctacgcggaagacgtggc

SEQ ID NO: 17681 - DNA, 32 bp, Artificial
  oligonucleotide probe
agcggcgagagcgtccacgcggaagacgtggc

SEQ ID NO: 17682 - DNA, 32 bp, Artificial
  oligonucleotide probe
caggcctccctcgcgatgctgggtgcaggcga

SEQ ID NO: 17683 - DNA, 32 bp, Artificial
  oligonucleotide probe
caccagcgagacgcgatgctgggtgcaggcga

SEQ ID NO: 17684 - DNA, 32 bp, Artificial
  oligonucleotide probe
cgagcaccgagccggagcgaagcggcgaggtc

SEQ ID NO: 17685 - DNA, 32 bp, Artificial
  oligonucleotide probe
cctccggacctcacgcgcgaagcggcgaggtc

SEQ ID NO: 17686 - DNA, 32 bp, Artificial
  oligonucleotide probe
cagggtgggcgagcgagcctcggagacggcag

SEQ ID NO: 17687 - DNA, 32 bp, Artificial
  oligonucleotide probe
acgcccaacagggagcgcctcggagacggcag

SEQ ID NO: 17688 - DNA, 32 bp, Artificial
  oligonucleotide probe
gacgcaccagcgcgagacgccaggcgaggtgg

SEQ ID NO: 17689 - DNA, 32 bp, Artificial
  oligonucleotide probe
tggcaccagcaggggtacgccaggcgaggtgg

SEQ ID NO: 17690 - DNA, 32 bp, Artificial
  oligonucleotide probe
tggcaccagcaggggtgggtacgcgacgcgag

SEQ ID NO: 17691 - DNA, 32 bp, Artificial
  oligonucleotide probe
tggcaccagcaggggtgtccgggtcaggcagg

SEQ ID NO: 17692 - DNA, 32 bp, Artificial
  oligonucleotide probe
tggcaccagcaggggtcggatggcccaagggt

SEQ ID NO: 17693 - DNA, 32 bp, Artificial
  oligonucleotide probe
tggcaccagcaggggtcggagcgagtggggaa

SEQ ID NO: 17694 - DNA, 32 bp, Artificial
  oligonucleotide probe
tggcaccagcaggggtcgagcaccgagccgga

SEQ ID NO: 17695 - DNA, 32 bp, Artificial
  oligonucleotide probe
tggcaccagcaggggtagcgcaccgacgacgc

SEQ ID NO: 17696 - DNA, 32 bp, Artificial
  oligonucleotide probe
tggcaccagcaggggtcaccagcgagacgcga

SEQ ID NO: 17697 - DNA, 32 bp, Artificial
  oligonucleotide probe
tggcaccagcaggggtgtggccaatcacgcga

SEQ ID NO: 17698 - DNA, 32 bp, Artificial
  oligonucleotide probe
tggcaccagcaggggtgtgggggtgcagggaa

SEQ ID NO: 17699 - DNA, 32 bp, Artificial
  oligonucleotide probe
tggcaccagcaggggtgacggagcacgccgga

SEQ ID NO: 17700 - DNA, 32 bp, Artificial
  oligonucleotide probe
tggcaccagcaggggtggtcgcaggcgagggt

SEQ ID NO: 17701 - DNA, 32 bp, Artificial
  oligonucleotide probe
tggcaccagcaggggtcagggcagggtcgggt

SEQ ID NO: 17702 - DNA, 32 bp, Artificial
  oligonucleotide probe
tggcaccagcaggggtcggagagcgcgagcct

SEQ ID NO: 17703 - DNA, 32 bp, Artificial
  oligonucleotide probe
tggcaccagcaggggtcggagcctgagcgtgg

SEQ ID NO: 17704 - DNA, 32 bp, Artificial
  oligonucleotide probe
tggcaccagcaggggtcgagcggaggtcccaa

SEQ ID NO: 17705 - DNA, 32 bp, Artificial
  oligonucleotide probe
tggcaccagcaggggtgtggcgagcctcgggt

SEQ ID NO: 17706 - DNA, 32 bp, Artificial
  oligonucleotide probe
tggcaccagcaggggtcgagcaggcgaggcag

SEQ ID NO: 17707 - DNA, 32 bp, Artificial
  oligonucleotide probe
tggcaccagcaggggtcaggcctccctcgcga

SEQ ID NO: 17708 - DNA, 32 bp, Artificial
  oligonucleotide probe
tggcaccagcaggggtgcctcaggacgcacgc

SEQ ID NO: 17709 - DNA, 32 bp, Artificial
  oligonucleotide probe
tggcaccagcaggggttggcgcctgtccgtgg

SEQ ID NO: 17710 - DNA, 32 bp, Artificial
  oligonucleotide probe
tggcaccagcaggggtagcggacggcaggagc

SEQ ID NO: 17711 - DNA, 32 bp, Artificial
  oligonucleotide probe
tggcaccagcaggggtacgccaccgcctgacg

SEQ ID NO: 17712 - DNA, 32 bp, Artificial
  oligonucleotide probe
tggcaccagcaggggtcgaggacgccaaacgc

SEQ ID NO: 17713 - DNA, 32 bp, Artificial
  oligonucleotide probe
gcagcggagcctgagcgcgacacccggaacgc

SEQ ID NO: 17714 - DNA, 32 bp, Artificial
  oligonucleotide probe
acgcaccagtcccggagcgacacccggaacgc

SEQ ID NO: 17715 - DNA, 32 bp, Artificial
  oligonucleotide probe
tggcaccagcaggggtgcgacacccggaacgc

SEQ ID NO: 17716 - DNA, 32 bp, Artificial
  oligonucleotide probe
gagcacgcgggtgcctgcgacacccggaacgc

SEQ ID NO: 17717 - DNA, 32 bp, Artificial
  oligonucleotide probe
ggtcgcgacacctggcgcgacacccggaacgc

SEQ ID NO: 17718 - DNA, 32 bp, Artificial
  oligonucleotide probe
caccggtcagcggggtgcgacacccggaacgc

SEQ ID NO: 17719 - DNA, 32 bp, Artificial
  oligonucleotide probe
acgcgagcgggtgcaggcgacacccggaacgc

SEQ ID NO: 17720 - DNA, 32 bp, Artificial
  oligonucleotide probe
gcgatggccaggtggcgcgacacccggaacgc

SEQ ID NO: 17721 - DNA, 32 bp, Artificial
  oligonucleotide probe
cgagcggaggtcccaatcaccggagccttggc

SEQ ID NO: 17722 - DNA, 32 bp, Artificial
  oligonucleotide probe
cgaggacgccaaacgctcaccggagccttggc

SEQ ID NO: 17723 - DNA, 32 bp, Artificial
  oligonucleotide probe
gcaggacggacggccttcaccggagccttggc

SEQ ID NO: 17724 - DNA, 32 bp, Artificial
  oligonucleotide probe
gcgacctcacgcgcagtcaccggagccttggc

SEQ ID NO: 17725 - DNA, 32 bp, Artificial
  oligonucleotide probe
caggacgctggccctcacgctgctgcgaacca

SEQ ID NO: 17726 - DNA, 32 bp, Artificial
  oligonucleotide probe
gggtagcggcgagacgacgctgctgcgaacca

SEQ ID NO: 17727 - DNA, 32 bp, Artificial
  oligonucleotide probe
gagcgcctcctcgagcgagccgagtggcgtcc

SEQ ID NO: 17728 - DNA, 32 bp, Artificial
  oligonucleotide probe
gcgagtggcagggcctgagccgagtggcgtcc

SEQ ID NO: 17729 - DNA, 32 bp, Artificial
  oligonucleotide probe
gagcgcgacacccagggcgacacccggaacgc

SEQ ID NO: 17730 - DNA, 32 bp, Artificial
  oligonucleotide probe
cggacaggacgctggcgcgacacccggaacgc

SEQ ID NO: 17731 - DNA, 32 bp, Artificial
  oligonucleotide probe
cgagcaggcgaggcaggcgacacccggaacgc

SEQ ID NO: 17732 - DNA, 32 bp, Artificial
  oligonucleotide probe
gcagcctctggccgaggcgacacccggaacgc

SEQ ID NO: 17733 - DNA, 32 bp, Artificial
  oligonucleotide probe
gcaggacggacggcctgacgagcgcaccgcag

SEQ ID NO: 17734 - DNA, 32 bp, Artificial
  oligonucleotide probe
gcgacctcacgcgcaggacgagcgcaccgcag

SEQ ID NO: 17735 - DNA, 32 bp, Artificial
  oligonucleotide probe
gagcgagcagcgggtccggagacgcagggggt

SEQ ID NO: 17736 - DNA, 32 bp, Artificial
  oligonucleotide probe
acgccctcaccagcgacggagacgcagggggt

SEQ ID NO: 17737 - DNA, 32 bp, Artificial
  oligonucleotide probe
cggacacctggccggagtccccaaagcggcag

SEQ ID NO: 17738 - DNA, 32 bp, Artificial
  oligonucleotide probe
ggtcgcgacacctggcgtccccaaagcggcag

SEQ ID NO: 17739 - DNA, 32 bp, Artificial
  oligonucleotide probe
gtccgggtcaggcagggtgggcctcctcccaa

SEQ ID NO: 17740 - DNA, 32 bp, Artificial
  oligonucleotide probe
cggagagcgcgagcctgtgggcctcctcccaa

SEQ ID NO: 17741 - DNA, 32 bp, Artificial
  oligonucleotide probe
caggacgctggccctccggagacgcagggggt

SEQ ID NO: 17742 - DNA, 32 bp, Artificial
  oligonucleotide probe
cctcgtggcggacggacggagacgcagggggt

SEQ ID NO: 17743 - DNA, 32 bp, Artificial
  oligonucleotide probe
agcgccaatcacgggtagcgcctcgacgggaa

SEQ ID NO: 17744 - DNA, 32 bp, Artificial
  oligonucleotide probe
caggcacccaggcggaagcgcctcgacgggaa

SEQ ID NO: 17745 - DNA, 32 bp, Artificial
  oligonucleotide probe
cgagcaggcgaggcagcggagacgcagggggt

SEQ ID NO: 17746 - DNA, 32 bp, Artificial
  oligonucleotide probe
gcctcaggacgcacgccggagacgcagggggt

SEQ ID NO: 17747 - DNA, 32 bp, Artificial
  oligonucleotide probe
gcgatggccaggtggcgagccgagtggcgtcc

SEQ ID NO: 17748 - DNA, 32 bp, Artificial
  oligonucleotide probe
accacggaagcgcggagagccgagtggcgtcc

SEQ ID NO: 17749 - DNA, 32 bp, Artificial
  oligonucleotide probe
tggcgcctgtccgtggcggagacgcagggggt

SEQ ID NO: 17750 - DNA, 32 bp, Artificial
  oligonucleotide probe
gtggcgagcctcgggtcggagacgcagggggt

SEQ ID NO: 17751 - DNA, 32 bp, Artificial
  oligonucleotide probe
cggacacctggccggatcaccggagccttggc

SEQ ID NO: 17752 - DNA, 32 bp, Artificial
  oligonucleotide probe
ggtcgcgacacctggctcaccggagccttggc

SEQ ID NO: 17753 - DNA, 32 bp, Artificial
  oligonucleotide probe
cggagagcgcgagcctgcgaacgccctccagg

SEQ ID NO: 17754 - DNA, 32 bp, Artificial
  oligonucleotide probe
gcctcaggacgcacgcgcgaacgccctccagg

SEQ ID NO: 17755 - DNA, 32 bp, Artificial
  oligonucleotide probe
cagggcgagtccgacgggtcgagctggcgcag

SEQ ID NO: 17756 - DNA, 32 bp, Artificial
  oligonucleotide probe
gagcgacgcgagagcgggtcgagctggcgcag

SEQ ID NO: 17757 - DNA, 32 bp, Artificial
  oligonucleotide probe
cgagcggaggtcccaaggtcgagctggcgcag

SEQ ID NO: 17758 - DNA, 32 bp, Artificial
  oligonucleotide probe
cgaggacgccaaacgcggtcgagctggcgcag

SEQ ID NO: 17759 - DNA, 32 bp, Artificial
  oligonucleotide probe
caccgacgggaaacgcgcagcgagcgagggaa

SEQ ID NO: 17760 - DNA, 32 bp, Artificial
  oligonucleotide probe
gtccggaagtgggcgagcagcgagcgagggaa

SEQ ID NO: 17761 - DNA, 32 bp, Artificial
  oligonucleotide probe
gtccgagcagcggcctgcgacacccggaacgc

SEQ ID NO: 17762 - DNA, 32 bp, Artificial
  oligonucleotide probe
caggagcgggaagcgagcgacacccggaacgc

SEQ ID NO: 17763 - DNA, 32 bp, Artificial
  oligonucleotide probe
cggagcctgagcgtggtcaccggagccttggc

SEQ ID NO: 17764 - DNA, 32 bp, Artificial
  oligonucleotide probe
tggcaccagcaggggttcaccggagccttggc

SEQ ID NO: 17765 - DNA, 32 bp, Artificial
  oligonucleotide probe
ggtccggagcagacgcagcgcctcgacgggaa

SEQ ID NO: 17766 - DNA, 32 bp, Artificial
  oligonucleotide probe
gcctgcgagagctggcagcgcctcgacgggaa

SEQ ID NO: 17767 - DNA, 32 bp, Artificial
  oligonucleotide probe
acgccaccgcctgacgagcgcctcgacgggaa

SEQ ID NO: 17768 - DNA, 32 bp, Artificial
  oligonucleotide probe
gacgcaggcggagggtagcgcctcgacgggaa

SEQ ID NO: 17769 - DNA, 32 bp, Artificial
  oligonucleotide probe
caccgacgggaaacgcagcgcctcgacgggaa

SEQ ID NO: 17770 - DNA, 32 bp, Artificial
  oligonucleotide probe
gtccggaagtgggcgaagcgcctcgacgggaa

SEQ ID NO: 17771 - DNA, 32 bp, Artificial
  oligonucleotide probe
acgcggtccaccgtggagcgcctcgacgggaa

SEQ ID NO: 17772 - DNA, 32 bp, Artificial
  oligonucleotide probe
tggcgtgggggtccaaagcgcctcgacgggaa

SEQ ID NO: 17773 - DNA, 32 bp, Artificial
  oligonucleotide probe
gggttggccgagtggcgcagcgagcgagggaa

SEQ ID NO: 17774 - DNA, 32 bp, Artificial
  oligonucleotide probe
tggcgggtgacggtgggcagcgagcgagggaa

SEQ ID NO: 17775 - DNA, 32 bp, Artificial
  oligonucleotide probe
gagcgagcagcgggtcgtgggcctcctcccaa

SEQ ID NO: 17776 - DNA, 32 bp, Artificial
  oligonucleotide probe
acgccctcaccagcgagtgggcctcctcccaa

SEQ ID NO: 17777 - DNA, 32 bp, Artificial
  oligonucleotide probe
cggacacctggccggagagcgggtgtggagcg

SEQ ID NO: 17778 - DNA, 32 bp, Artificial
  oligonucleotide probe
ggtcgcgacacctggcgagcgggtgtggagcg

SEQ ID NO: 17779 - DNA, 32 bp, Artificial
  oligonucleotide probe
cggatggcccaagggtcggatgctgcgagcag

SEQ ID NO: 17780 - DNA, 32 bp, Artificial
  oligonucleotide probe
gggtacgcgacgcgagcggatgctgcgagcag

SEQ ID NO: 17781 - DNA, 32 bp, Artificial
  oligonucleotide probe
cgagcggaggtcccaagtccccaaagcggcag

SEQ ID NO: 17782 - DNA, 32 bp, Artificial
  oligonucleotide probe
cgaggacgccaaacgcgtccccaaagcggcag

SEQ ID NO: 17783 - DNA, 32 bp, Artificial
  oligonucleotide probe
tggcgcctgtccgtgggacgagcgcaccgcag

SEQ ID NO: 17784 - DNA, 32 bp, Artificial
  oligonucleotide probe
gtggcgagcctcgggtgacgagcgcaccgcag

SEQ ID NO: 17785 - DNA, 32 bp, Artificial
  oligonucleotide probe
gtgggacgacgcgcgagagccgagtggcgtcc

SEQ ID NO: 17786 - DNA, 32 bp, Artificial
  oligonucleotide probe
gcaggcagccaatggcgagccgagtggcgtcc

SEQ ID NO: 17787 - DNA, 32 bp, Artificial
  oligonucleotide probe
cgagcctcgggtgcgaagcgcctcgacgggaa

SEQ ID NO: 17788 - DNA, 32 bp, Artificial
  oligonucleotide probe
actgcggacgaggcctagcgcctcgacgggaa

SEQ ID NO: 17789 - DNA, 32 bp, Artificial
  oligonucleotide probe
tgctgggtgcaggcgagagccgagtggcgtcc

SEQ ID NO: 17790 - DNA, 32 bp, Artificial
  oligonucleotide probe
agcggtccgcgagagcgagccgagtggcgtcc

SEQ ID NO: 17791 - DNA, 32 bp, Artificial
  oligonucleotide probe
cggagcaggagcggaagtgggcctcctcccaa

SEQ ID NO: 17792 - DNA, 32 bp, Artificial
  oligonucleotide probe
ggtcgcctgtccagcggtgggcctcctcccaa

SEQ ID NO: 17793 - DNA, 32 bp, Artificial
  oligonucleotide probe
gagcgcctcctcgagcgcgacacccggaacgc

SEQ ID NO: 17794 - DNA, 32 bp, Artificial
  oligonucleotide probe
gtggccaatcacgcgagcgacacccggaacgc

SEQ ID NO: 17795 - DNA, 32 bp, Artificial
  oligonucleotide probe
cagggcagggtcgggtgtccgcaggtccgcct

SEQ ID NO: 17796 - DNA, 32 bp, Artificial
  oligonucleotide probe
agcggacggcaggagcgtccgcaggtccgcct

SEQ ID NO: 17797 - DNA, 32 bp, Artificial
  oligonucleotide probe
tgctcggatgctgcgagcagcgagcgagggaa

SEQ ID NO: 17798 - DNA, 32 bp, Artificial
  oligonucleotide probe
gagcgcagccaagcctgcagcgagcgagggaa

SEQ ID NO: 17799 - DNA, 32 bp, Artificial
  oligonucleotide probe
gacggacgacgcgtgggagccgagtggcgtcc

SEQ ID NO: 17800 - DNA, 32 bp, Artificial
  oligonucleotide probe
gacggggtcggacgaggagccgagtggcgtcc

SEQ ID NO: 17801 - DNA, 32 bp, Artificial
  oligonucleotide probe
caccgagccacccggaagcgcctcgacgggaa

SEQ ID NO: 17802 - DNA, 32 bp, Artificial
  oligonucleotide probe
tgctcggatgctgcgaagcgcctcgacgggaa

SEQ ID NO: 17803 - DNA, 32 bp, Artificial
  oligonucleotide probe
gacgcaccagcgcgaggtccccaaagcggcag

SEQ ID NO: 17804 - DNA, 32 bp, Artificial
  oligonucleotide probe
acgccaccgcctgacggtccccaaagcggcag

SEQ ID NO: 17805 - DNA, 32 bp, Artificial
  oligonucleotide probe
gcaggacggacggcctgcagcgagcgagggaa

SEQ ID NO: 17806 - DNA, 32 bp, Artificial
  oligonucleotide probe
gcagcctctggccgaggcagcgagcgagggaa

SEQ ID NO: 17807 - DNA, 32 bp, Artificial
  oligonucleotide probe
gagcgagcagcgggtctcaccggagccttggc

SEQ ID NO: 17808 - DNA, 32 bp, Artificial
  oligonucleotide probe
acgccctcaccagcgatcaccggagccttggc

SEQ ID NO: 17809 - DNA, 32 bp, Artificial
  oligonucleotide probe
gtggccaatcacgcgatcaccggagccttggc

SEQ ID NO: 17810 - DNA, 32 bp, Artificial
  oligonucleotide probe
agcgcaccgacgacgctcaccggagccttggc

SEQ ID NO: 17811 - DNA, 32 bp, Artificial
  oligonucleotide probe
gacggacgacgcgtgggcagcgagcgagggaa

SEQ ID NO: 17812 - DNA, 32 bp, Artificial
  oligonucleotide probe
gacggggtcggacgaggcagcgagcgagggaa

SEQ ID NO: 17813 - DNA, 32 bp, Artificial
  oligonucleotide probe
gcagcaccagcgtggcgcagcgagcgagggaa

SEQ ID NO: 17814 - DNA, 32 bp, Artificial
  oligonucleotide probe
ggtccggagcagacgcgcagcgagcgagggaa

SEQ ID NO: 17815 - DNA, 32 bp, Artificial
  oligonucleotide probe
acgccaccgcctgacgggtcgagctggcgcag

SEQ ID NO: 17816 - DNA, 32 bp, Artificial
  oligonucleotide probe
cggatggcccaagggtggtcgagctggcgcag

SEQ ID NO: 17817 - DNA, 32 bp, Artificial
  oligonucleotide probe
cacccgagagcggtggggtcgagctggcgcag

SEQ ID NO: 17818 - DNA, 32 bp, Artificial
  oligonucleotide probe
gcgagtcccggaagcgggtcgagctggcgcag

SEQ ID NO: 17819 - DNA, 32 bp, Artificial
  oligonucleotide probe
caggagcgggaagcgagagccgagtggcgtcc

SEQ ID NO: 17820 - DNA, 32 bp, Artificial
  oligonucleotide probe
tggccaggcggagtgggagccgagtggcgtcc

SEQ ID NO: 17821 - DNA, 32 bp, Artificial
  oligonucleotide probe
cctcgcctcgaggagcgcgacacccggaacgc

SEQ ID NO: 17822 - DNA, 32 bp, Artificial
  oligonucleotide probe
cagggcagggtcgggtgcgacacccggaacgc

SEQ ID NO: 17823 - DNA, 32 bp, Artificial
  oligonucleotide probe
agcgccaatcacgggtgcagcgagcgagggaa

SEQ ID NO: 17824 - DNA, 32 bp, Artificial
  oligonucleotide probe
caggcacccaggcggagcagcgagcgagggaa

SEQ ID NO: 17825 - DNA, 32 bp, Artificial
  oligonucleotide probe
ggtcgcctgtccagcgacgctgctgcgaacca

SEQ ID NO: 17826 - DNA, 32 bp, Artificial
  oligonucleotide probe
acgcccaacagggagcacgctgctgcgaacca

SEQ ID NO: 17827 - DNA, 32 bp, Artificial
  oligonucleotide probe
gagcgcgacacccagggcagcgagcgagggaa

SEQ ID NO: 17828 - DNA, 32 bp, Artificial
  oligonucleotide probe
cggacaggacgctggcgcagcgagcgagggaa

SEQ ID NO: 17829 - DNA, 32 bp, Artificial
  oligonucleotide probe
gcaggacggacggcctgtccccaaagcggcag

SEQ ID NO: 17830 - DNA, 32 bp, Artificial
  oligonucleotide probe
cggagcaggagcggaagtccccaaagcggcag

SEQ ID NO: 17831 - DNA, 32 bp, Artificial
  oligonucleotide probe
gcgatggccaggtggcagcgcctcgacgggaa

SEQ ID NO: 17832 - DNA, 32 bp, Artificial
  oligonucleotide probe
accacggaagcgcggaagcgcctcgacgggaa

SEQ ID NO: 17833 - DNA, 32 bp, Artificial
  oligonucleotide probe
gagcacgcgggtgcctgtccgcaggtccgcct

SEQ ID NO: 17834 - DNA, 32 bp, Artificial
  oligonucleotide probe
gggtagcggcgagacggtccgcaggtccgcct

SEQ ID NO: 17835 - DNA, 32 bp, Artificial
  oligonucleotide probe
cacccgagagcggtgggagcgggtgtggagcg

SEQ ID NO: 17836 - DNA, 32 bp, Artificial
  oligonucleotide probe
gcgagtcccggaagcggagcgggtgtggagcg

SEQ ID NO: 17837 - DNA, 32 bp, Artificial
  oligonucleotide probe
cggacacctggccggagcgaacgccctccagg

SEQ ID NO: 17838 - DNA, 32 bp, Artificial
  oligonucleotide probe
ggtcgcgacacctggcgcgaacgccctccagg

SEQ ID NO: 17839 - DNA, 32 bp, Artificial
  oligonucleotide probe
gcagcggagcctgagcagcgcctcgacgggaa

SEQ ID NO: 17840 - DNA, 32 bp, Artificial
  oligonucleotide probe
acgcaccagtcccggaagcgcctcgacgggaa

SEQ ID NO: 17841 - DNA, 32 bp, Artificial
  oligonucleotide probe
caggcctccctcgcgagacgagcgcaccgcag

SEQ ID NO: 17842 - DNA, 32 bp, Artificial
  oligonucleotide probe
caccagcgagacgcgagacgagcgcaccgcag

SEQ ID NO: 17843 - DNA, 32 bp, Artificial
  oligonucleotide probe
ggtcgcctgtccagcgagcgcctcgacgggaa

SEQ ID NO: 17844 - DNA, 32 bp, Artificial
  oligonucleotide probe
acgcccaacagggagcagcgcctcgacgggaa

SEQ ID NO: 17845 - DNA, 32 bp, Artificial
  oligonucleotide probe
gagcgagcagcgggtcagcgcaggagacgcct

SEQ ID NO: 17846 - DNA, 32 bp, Artificial
  oligonucleotide probe
acgccctcaccagcgaagcgcaggagacgcct

SEQ ID NO: 17847 - DNA, 32 bp, Artificial
  oligonucleotide probe
gcctgcgagagctggcgcgacacccggaacgc

SEQ ID NO: 17848 - DNA, 32 bp, Artificial
  oligonucleotide probe
caggcctccctcgcgagcgacacccggaacgc

SEQ ID NO: 17849 - DNA, 32 bp, Artificial
  oligonucleotide probe
gcgacgagcgagccaagcgacacccggaacgc

SEQ ID NO: 17850 - DNA, 32 bp, Artificial
  oligonucleotide probe
acgcgggtcaccgtccgcgacacccggaacgc

SEQ ID NO: 17851 - DNA, 32 bp, Artificial
  oligonucleotide probe
cggacacctggccggagtgggcctcctcccaa

SEQ ID NO: 17852 - DNA, 32 bp, Artificial
  oligonucleotide probe
gggtagcggcgagacggtgggcctcctcccaa

SEQ ID NO: 17853 - DNA, 32 bp, Artificial
  oligonucleotide probe
cggatggcccaagggtcggagacgcagggggt

SEQ ID NO: 17854 - DNA, 32 bp, Artificial
  oligonucleotide probe
gggtacgcgacgcgagcggagacgcagggggt

SEQ ID NO: 17855 - DNA, 32 bp, Artificial
  oligonucleotide probe
gacgcaggcggagggtgcgacacccggaacgc

SEQ ID NO: 17856 - DNA, 32 bp, Artificial
  oligonucleotide probe
acgcggtccaccgtgggcgacacccggaacgc

SEQ ID NO: 17857 - DNA, 32 bp, Artificial
  oligonucleotide probe
gtggcaggagcgacgcagcgcctcgacgggaa

SEQ ID NO: 17858 - DNA, 32 bp, Artificial
  oligonucleotide probe
gacggagcacgccggaagcgcctcgacgggaa

SEQ ID NO: 17859 - DNA, 32 bp, Artificial
  oligonucleotide probe
ggtcgcgacacctggcgagccgagtggcgtcc

SEQ ID NO: 17860 - DNA, 32 bp, Artificial
  oligonucleotide probe
caccggtcagcggggtgagccgagtggcgtcc

SEQ ID NO: 17861 - DNA, 32 bp, Artificial
  oligonucleotide probe
gggtagcggcgagacggcgaacgccctccagg

SEQ ID NO: 17862 - DNA, 32 bp, Artificial
  oligonucleotide probe
cagggcgagtccgacggcgaacgccctccagg

SEQ ID NO: 17863 - DNA, 32 bp, Artificial
  oligonucleotide probe
gtccacgctggcgacggcagcgagcgagggaa

SEQ ID NO: 17864 - DNA, 32 bp, Artificial
  oligonucleotide probe
cctcagcgcggaaccagcagcgagcgagggaa

SEQ ID NO: 17865 - DNA, 32 bp, Artificial
  oligonucleotide probe
gtccgggtcaggcaggggtcgagctggcgcag

SEQ ID NO: 17866 - DNA, 32 bp, Artificial
  oligonucleotide probe
cgagcaggcgaggcagggtcgagctggcgcag

SEQ ID NO: 17867 - DNA, 32 bp, Artificial
  oligonucleotide probe
gtggcggaggtcggaagcagcgagcgagggaa

SEQ ID NO: 17868 - DNA, 32 bp, Artificial
  oligonucleotide probe
cctctggctggcccaagcagcgagcgagggaa

SEQ ID NO: 17869 - DNA, 32 bp, Artificial
  oligonucleotide probe
caggcctccctcgcgagtccccaaagcggcag

SEQ ID NO: 17870 - DNA, 32 bp, Artificial
  oligonucleotide probe
agcggcgagagcgtccgtccccaaagcggcag

SEQ ID NO: 17871 - DNA, 32 bp, Artificial
  oligonucleotide probe
agcggcgagagcgtccgagccgagtggcgtcc

SEQ ID NO: 17872 - DNA, 32 bp, Artificial
  oligonucleotide probe
gacgcaccagcgcgaggagccgagtggcgtcc

SEQ ID NO: 17873 - DNA, 32 bp, Artificial
  oligonucleotide probe
caccggtcagcggggtcggatgctgcgagcag

SEQ ID NO: 17874 - DNA, 32 bp, Artificial
  oligonucleotide probe
acgcagcggggtgacgcggatgctgcgagcag

SEQ ID NO: 17875 - DNA, 32 bp, Artificial
  oligonucleotide probe
agcggcgagagcgtcctcaccggagccttggc

SEQ ID NO: 17876 - DNA, 32 bp, Artificial
  oligonucleotide probe
gacgcaccagcgcgagtcaccggagccttggc

SEQ ID NO: 17877 - DNA, 32 bp, Artificial
  oligonucleotide probe
caggcctccctcgcgaagcgcctcgacgggaa

SEQ ID NO: 17878 - DNA, 32 bp, Artificial
  oligonucleotide probe
caccagcgagacgcgaagcgcctcgacgggaa

SEQ ID NO: 17879 - DNA, 32 bp, Artificial
  oligonucleotide probe
caggacgctggccctcggtcgagctggcgcag

SEQ ID NO: 17880 - DNA, 32 bp, Artificial
  oligonucleotide probe
cctcgtggcggacggaggtcgagctggcgcag

SEQ ID NO: 17881 - DNA, 32 bp, Artificial
  oligonucleotide probe
tggcggtcgcctcgaggagccgagtggcgtcc

SEQ ID NO: 17882 - DNA, 32 bp, Artificial
  oligonucleotide probe
gacgcaggcggagggtgagccgagtggcgtcc

SEQ ID NO: 17883 - DNA, 32 bp, Artificial
  oligonucleotide probe
gacgcaccagcgcgaggcgaacgccctccagg

SEQ ID NO: 17884 - DNA, 32 bp, Artificial
  oligonucleotide probe
acgccaccgcctgacggcgaacgccctccagg

SEQ ID NO: 17885 - DNA, 32 bp, Artificial
  oligonucleotide probe
cggagcaggagcggaaagcgcaggagacgcct

SEQ ID NO: 17886 - DNA, 32 bp, Artificial
  oligonucleotide probe
ggtcgcctgtccagcgagcgcaggagacgcct

SEQ ID NO: 17887 - DNA, 32 bp, Artificial
  oligonucleotide probe
cagggtgggcgagcgagtccgcaggtccgcct

SEQ ID NO: 17888 - DNA, 32 bp, Artificial
  oligonucleotide probe
acgcccaacagggagcgtccgcaggtccgcct

SEQ ID NO: 17889 - DNA, 32 bp, Artificial
  oligonucleotide probe
ggtcgcaggcgagggtgcagcgagcgagggaa

SEQ ID NO: 17890 - DNA, 32 bp, Artificial
  oligonucleotide probe
cacccgagagcggtgggcagcgagcgagggaa

SEQ ID NO: 17891 - DNA, 32 bp, Artificial
  oligonucleotide probe
cggatggcccaagggtgcgaacgccctccagg

SEQ ID NO: 17892 - DNA, 32 bp, Artificial
  oligonucleotide probe
gggtacgcgacgcgaggcgaacgccctccagg

SEQ ID NO: 17893 - DNA, 32 bp, Artificial
  oligonucleotide probe
tggcggtcgcctcgagagcgcctcgacgggaa

SEQ ID NO: 17894 - DNA, 32 bp, Artificial
  oligonucleotide probe
cggagcgagtggggaaagcgcctcgacgggaa

SEQ ID NO: 17895 - DNA, 32 bp, Artificial
  oligonucleotide probe
gacgcaccagcgcgagcggatgctgcgagcag

SEQ ID NO: 17896 - DNA, 32 bp, Artificial
  oligonucleotide probe
acgccaccgcctgacgcggatgctgcgagcag

SEQ ID NO: 17897 - DNA, 32 bp, Artificial
  oligonucleotide probe
gggtagcggcgagacggtccccaaagcggcag

SEQ ID NO: 17898 - DNA, 32 bp, Artificial
  oligonucleotide probe
cagggcgagtccgacggtccccaaagcggcag

SEQ ID NO: 17899 - DNA, 32 bp, Artificial
  oligonucleotide probe
gtggcaggagcgacgcgagccgagtggcgtcc

SEQ ID NO: 17900 - DNA, 32 bp, Artificial
  oligonucleotide probe
gagcgcgacacccagggagccgagtggcgtcc

SEQ ID NO: 17901 - DNA, 32 bp, Artificial
  oligonucleotide probe
gcgaagcggcgaggtcgcgacacccggaacgc

SEQ ID NO: 17902 - DNA, 32 bp, Artificial
  oligonucleotide probe
agcgagcggtggacgcgcgacacccggaacgc

SEQ ID NO: 17903 - DNA, 32 bp, Artificial
  oligonucleotide probe
cacccgagagcggtgggcgacacccggaacgc

SEQ ID NO: 17904 - DNA, 32 bp, Artificial
  oligonucleotide probe
cctccggacctcacgcgcgacacccggaacgc

SEQ ID NO: 17905 - DNA, 32 bp, Artificial
  oligonucleotide probe
tggccaggcggagtgggcgacacccggaacgc

SEQ ID NO: 17906 - DNA, 32 bp, Artificial
  oligonucleotide probe
gcctgtgggtccgcgagcgacacccggaacgc

SEQ ID NO: 17907 - DNA, 32 bp, Artificial
  oligonucleotide probe
tgctcggatgctgcgagtgggcctcctcccaa

SEQ ID NO: 17908 - DNA, 32 bp, Artificial
  oligonucleotide probe
gagcgcagccaagcctgtgggcctcctcccaa

SEQ ID NO: 17909 - DNA, 32 bp, Artificial
  oligonucleotide probe
gcagcctctggccgagagcgcctcgacgggaa

SEQ ID NO: 17910 - DNA, 32 bp, Artificial
  oligonucleotide probe
gcagcaccagcgtggcagcgcctcgacgggaa

SEQ ID NO: 17911 - DNA, 32 bp, Artificial
  oligonucleotide probe
gcgacagggcctgcctgacgagcgcaccgcag

SEQ ID NO: 17912 - DNA, 32 bp, Artificial
  oligonucleotide probe
cggagcgagtggggaagacgagcgcaccgcag

SEQ ID NO: 17913 - DNA, 32 bp, Artificial
  oligonucleotide probe
tgctcggatgctgcgagtccccaaagcggcag

SEQ ID NO: 17914 - DNA, 32 bp, Artificial
  oligonucleotide probe
gagcgcagccaagcctgtccccaaagcggcag

SEQ ID NO: 17915 - DNA, 32 bp, Artificial
  oligonucleotide probe
cgaggacgccaaacgcgcgacacccggaacgc

SEQ ID NO: 17916 - DNA, 32 bp, Artificial
  oligonucleotide probe
accatggcacgcgacggcgacacccggaacgc

SEQ ID NO: 17917 - DNA, 32 bp, Artificial
  oligonucleotide probe
caggacgctggccctcgacgagcgcaccgcag

SEQ ID NO: 17918 - DNA, 32 bp, Artificial
  oligonucleotide probe
cctcgtggcggacggagacgagcgcaccgcag

SEQ ID NO: 17919 - DNA, 32 bp, Artificial
  oligonucleotide probe
gtccgggtcaggcaggacgctgctgcgaacca

SEQ ID NO: 17920 - DNA, 32 bp, Artificial
  oligonucleotide probe
cgagcaggcgaggcagacgctgctgcgaacca

SEQ ID NO: 17921 - DNA, 32 bp, Artificial
  oligonucleotide probe
caggcctccctcgcgagcgaacgccctccagg

SEQ ID NO: 17922 - DNA, 32 bp, Artificial
  oligonucleotide probe
gtggccaatcacgcgagcgaacgccctccagg

SEQ ID NO: 17923 - DNA, 32 bp, Artificial
  oligonucleotide probe
gtggcgagcctcgggtgagccgagtggcgtcc

SEQ ID NO: 17924 - DNA, 32 bp, Artificial
  oligonucleotide probe
ggtcgcaggcgagggtgagccgagtggcgtcc

SEQ ID NO: 17925 - DNA, 32 bp, Artificial
  oligonucleotide probe
ggtcgcgacacctggcagcgcaggagacgcct

SEQ ID NO: 17926 - DNA, 32 bp, Artificial
  oligonucleotide probe
cgagcctcgggtgcgaagcgcaggagacgcct

SEQ ID NO: 17927 - DNA, 32 bp, Artificial
  oligonucleotide probe
gcctagcgcctcgacggagccgagtggcgtcc

SEQ ID NO: 17928 - DNA, 32 bp, Artificial
  oligonucleotide probe
ggaagcctgcgacggagagccgagtggcgtcc

SEQ ID NO: 17929 - DNA, 32 bp, Artificial
  oligonucleotide probe
gcgacagggcctgcctacgctgctgcgaacca

SEQ ID NO: 17930 - DNA, 32 bp, Artificial
  oligonucleotide probe
cggagcgagtggggaaacgctgctgcgaacca

SEQ ID NO: 17931 - DNA, 32 bp, Artificial
  oligonucleotide probe
gtggcggaggtcggaagcgacacccggaacgc

SEQ ID NO: 17932 - DNA, 32 bp, Artificial
  oligonucleotide probe
cctctggctggcccaagcgacacccggaacgc

SEQ ID NO: 17933 - DNA, 32 bp, Artificial
  oligonucleotide probe
gcctagcgcctcgacgagcgcctcgacgggaa

SEQ ID NO: 17934 - DNA, 32 bp, Artificial
  oligonucleotide probe
ggaagcctgcgacggaagcgcctcgacgggaa

SEQ ID NO: 17935 - DNA, 32 bp, Artificial
  oligonucleotide probe
acgccaccgcctgacgtcaccggagccttggc

SEQ ID NO: 17936 - DNA, 32 bp, Artificial
  oligonucleotide probe
cggatggcccaagggttcaccggagccttggc

SEQ ID NO: 17937 - DNA, 32 bp, Artificial
  oligonucleotide probe
tggcgcctgtccgtggagcgcaggagacgcct

SEQ ID NO: 17938 - DNA, 32 bp, Artificial
  oligonucleotide probe
gtggcgagcctcgggtagcgcaggagacgcct

SEQ ID NO: 17939 - DNA, 32 bp, Artificial
  oligonucleotide probe
gcgacgagcgagccaagcagcgagcgagggaa

SEQ ID NO: 17940 - DNA, 32 bp, Artificial
  oligonucleotide probe
acgcgggtcaccgtccgcagcgagcgagggaa

SEQ ID NO: 17941 - DNA, 32 bp, Artificial
  oligonucleotide probe
gagcacgcgggtgcctcggagacgcagggggt

SEQ ID NO: 17942 - DNA, 32 bp, Artificial
  oligonucleotide probe
ggaacggaagcggagccggagacgcagggggt

SEQ ID NO: 17943 - DNA, 32 bp, Artificial
  oligonucleotide probe
ggtcgcctgtccagcgggtcgagctggcgcag

SEQ ID NO: 17944 - DNA, 32 bp, Artificial
  oligonucleotide probe
acgcccaacagggagcggtcgagctggcgcag

SEQ ID NO: 17945 - DNA, 32 bp, Artificial
  oligonucleotide probe
gtggccaatcacgcgagtccgcaggtccgcct

SEQ ID NO: 17946 - DNA, 32 bp, Artificial
  oligonucleotide probe
agcgcaccgacgacgcgtccgcaggtccgcct

SEQ ID NO: 17947 - DNA, 32 bp, Artificial
  oligonucleotide probe
cggagcctgagcgtgggcagcgagcgagggaa

SEQ ID NO: 17948 - DNA, 32 bp, Artificial
  oligonucleotide probe
caccggtcagcggggtgcagcgagcgagggaa

SEQ ID NO: 17949 - DNA, 32 bp, Artificial
  oligonucleotide probe
gagcgacgcgagagcgcggagacgcagggggt

SEQ ID NO: 17950 - DNA, 32 bp, Artificial
  oligonucleotide probe
cgagcctcgggtgcgacggagacgcagggggt

SEQ ID NO: 17951 - DNA, 32 bp, Artificial
  oligonucleotide probe
acgcagcggggtgacgagcgcaggagacgcct

SEQ ID NO: 17952 - DNA, 32 bp, Artificial
  oligonucleotide probe
caccgcctcagggacgagcgcaggagacgcct

SEQ ID NO: 17953 - DNA, 32 bp, Artificial
  oligonucleotide probe
gtgggggtgcagggaagtgggcctcctcccaa

SEQ ID NO: 17954 - DNA, 32 bp, Artificial
  oligonucleotide probe
ggtcgcaggcgagggtgtgggcctcctcccaa

SEQ ID NO: 17955 - DNA, 32 bp, Artificial
  oligonucleotide probe
gcgacagggcctgcctgtccccaaagcggcag

SEQ ID NO: 17956 - DNA, 32 bp, Artificial
  oligonucleotide probe
cggagcgagtggggaagtccccaaagcggcag

SEQ ID NO: 17957 - DNA, 32 bp, Artificial
  oligonucleotide probe
actgcggacgaggcctgcgaacgccctccagg

SEQ ID NO: 17958 - DNA, 32 bp, Artificial
  oligonucleotide probe
caccgcctcagggacggcgaacgccctccagg

SEQ ID NO: 17959 - DNA, 32 bp, Artificial
  oligonucleotide probe
caccggtcagcggggtgcgaacgccctccagg

SEQ ID NO: 17960 - DNA, 32 bp, Artificial
  oligonucleotide probe
acgcagcggggtgacggcgaacgccctccagg

SEQ ID NO: 17961 - DNA, 32 bp, Artificial
  oligonucleotide probe
gtccacgctggcgacggagccgagtggcgtcc

SEQ ID NO: 17962 - DNA, 32 bp, Artificial
  oligonucleotide probe
cctcagcgcggaaccagagccgagtggcgtcc

SEQ ID NO: 17963 - DNA, 32 bp, Artificial
  oligonucleotide probe
gtggcgagcctcgggtacgctgctgcgaacca

SEQ ID NO: 17964 - DNA, 32 bp, Artificial
  oligonucleotide probe
tggcaccagcaggggtacgctgctgcgaacca

SEQ ID NO: 17965 - DNA, 32 bp, Artificial
  oligonucleotide probe
gagcgacgcgagagcggtccccaaagcggcag

SEQ ID NO: 17966 - DNA, 32 bp, Artificial
  oligonucleotide probe
cgagcctcgggtgcgagtccccaaagcggcag

SEQ ID NO: 17967 - DNA, 32 bp, Artificial
  oligonucleotide probe
caccggtcagcggggtgacgagcgcaccgcag

SEQ ID NO: 17968 - DNA, 32 bp, Artificial
  oligonucleotide probe
actgcggacgaggcctgacgagcgcaccgcag

SEQ ID NO: 17969 - DNA, 32 bp, Artificial
  oligonucleotide probe
cctcgcctcgaggagcgcagcgagcgagggaa

SEQ ID NO: 17970 - DNA, 32 bp, Artificial
  oligonucleotide probe
cagggcagggtcgggtgcagcgagcgagggaa

SEQ ID NO: 17971 - DNA, 32 bp, Artificial
  oligonucleotide probe
agcgcaccgacgacgcacgctgctgcgaacca

SEQ ID NO: 17972 - DNA, 32 bp, Artificial
  oligonucleotide probe
gagcgcagccaagcctacgctgctgcgaacca

SEQ ID NO: 17973 - DNA, 32 bp, Artificial
  oligonucleotide probe
gtgggggtgcagggaaagcgcaggagacgcct

SEQ ID NO: 17974 - DNA, 32 bp, Artificial
  oligonucleotide probe
ggtcgcaggcgagggtagcgcaggagacgcct

SEQ ID NO: 17975 - DNA, 32 bp, Artificial
  oligonucleotide probe
tgctcggatgctgcgaacgctgctgcgaacca

SEQ ID NO: 17976 - DNA, 32 bp, Artificial
  oligonucleotide probe
tggcgcctgtccgtggacgctgctgcgaacca

SEQ ID NO: 17977 - DNA, 32 bp, Artificial
  oligonucleotide probe
cagggtgggcgagcgagacgagcgcaccgcag

SEQ ID NO: 17978 - DNA, 32 bp, Artificial
  oligonucleotide probe
acgcccaacagggagcgacgagcgcaccgcag

SEQ ID NO: 17979 - DNA, 32 bp, Artificial
  oligonucleotide probe
acgcagcggggtgacggcagcgagcgagggaa

SEQ ID NO: 17980 - DNA, 32 bp, Artificial
  oligonucleotide probe
gcaggcagccaatggcgcagcgagcgagggaa

SEQ ID NO: 17981 - DNA, 32 bp, Artificial
  oligonucleotide probe
cacccgagagcggtggagcgcaggagacgcct

SEQ ID NO: 17982 - DNA, 32 bp, Artificial
  oligonucleotide probe
gcgagtcccggaagcgagcgcaggagacgcct

SEQ ID NO: 17983 - DNA, 32 bp, Artificial
  oligonucleotide probe
gagcacgcgggtgcctgtgggcctcctcccaa

SEQ ID NO: 17984 - DNA, 32 bp, Artificial
  oligonucleotide probe
ggaacggaagcggagcgtgggcctcctcccaa

SEQ ID NO: 17985 - DNA, 32 bp, Artificial
  oligonucleotide probe
gcaggacggacggcctggtcgagctggcgcag

SEQ ID NO: 17986 - DNA, 32 bp, Artificial
  oligonucleotide probe
cggagcaggagcggaaggtcgagctggcgcag

SEQ ID NO: 17987 - DNA, 32 bp, Artificial
  oligonucleotide probe
gtccgggtcaggcagggacgagcgcaccgcag

SEQ ID NO: 17988 - DNA, 32 bp, Artificial
  oligonucleotide probe
cggagagcgcgagcctgacgagcgcaccgcag

SEQ ID NO: 17989 - DNA, 32 bp, Artificial
  oligonucleotide probe
caggcctccctcgcgaagcgcaggagacgcct

SEQ ID NO: 17990 - DNA, 32 bp, Artificial
  oligonucleotide probe
caccagcgagacgcgaagcgcaggagacgcct

SEQ ID NO: 17991 - DNA, 32 bp, Artificial
  oligonucleotide probe
cgagcaccgagccggagcgaacgccctccagg

SEQ ID NO: 17992 - DNA, 32 bp, Artificial
  oligonucleotide probe
cctccggacctcacgcgcgaacgccctccagg

SEQ ID NO: 17993 - DNA, 32 bp, Artificial
  oligonucleotide probe
acgccaggcgaggtgggcagcgagcgagggaa

SEQ ID NO: 17994 - DNA, 32 bp, Artificial
  oligonucleotide probe
caggggaagggtcggagcagcgagcgagggaa

SEQ ID NO: 17995 - DNA, 32 bp, Artificial
  oligonucleotide probe
cgagcaccgagccggaacgctgctgcgaacca

SEQ ID NO: 17996 - DNA, 32 bp, Artificial
  oligonucleotide probe
cctccggacctcacgcacgctgctgcgaacca

SEQ ID NO: 17997 - DNA, 32 bp, Artificial
  oligonucleotide probe
gtccgggtcaggcaggcggatgctgcgagcag

SEQ ID NO: 17998 - DNA, 32 bp, Artificial
  oligonucleotide probe
agcggcgagagcgtcccggatgctgcgagcag

SEQ ID NO: 17999 - DNA, 32 bp, Artificial
  oligonucleotide probe
tggccaggcggagtgggcagcgagcgagggaa

SEQ ID NO: 18000 - DNA, 32 bp, Artificial
  oligonucleotide probe
gcctgtgggtccgcgagcagcgagcgagggaa

SEQ ID NO: 18001 - DNA, 32 bp, Artificial
  oligonucleotide probe
agcggacggcaggagcgcagcgagcgagggaa

SEQ ID NO: 18002 - DNA, 32 bp, Artificial
  oligonucleotide probe
ggtcgcgacacctggcgcagcgagcgagggaa

SEQ ID NO: 18003 - DNA, 32 bp, Artificial
  oligonucleotide probe
tggcgcctgtccgtgggcagcgagcgagggaa

SEQ ID NO: 18004 - DNA, 32 bp, Artificial
  oligonucleotide probe
gtggcgagcctcgggtgcagcgagcgagggaa

SEQ ID NO: 18005 - DNA, 32 bp, Artificial
  oligonucleotide probe
caccggtcagcggggtgtccccaaagcggcag

SEQ ID NO: 18006 - DNA, 32 bp, Artificial
  oligonucleotide probe
acgcagcggggtgacggtccccaaagcggcag

SEQ ID NO: 18007 - DNA, 32 bp, Artificial
  oligonucleotide probe
cgagcaggcgaggcagagcgcaggagacgcct

SEQ ID NO: 18008 - DNA, 32 bp, Artificial
  oligonucleotide probe
gcctcaggacgcacgcagcgcaggagacgcct

SEQ ID NO: 18009 - DNA, 32 bp, Artificial
  oligonucleotide probe
gacgcaccagcgcgagagcgcaggagacgcct

SEQ ID NO: 18010 - DNA, 32 bp, Artificial
  oligonucleotide probe
tggcaccagcaggggtagcgcaggagacgcct

SEQ ID NO: 18011 - DNA, 32 bp, Artificial
  oligonucleotide probe
cagggcagggtcgggtgtccccaaagcggcag

SEQ ID NO: 18012 - DNA, 32 bp, Artificial
  oligonucleotide probe
gacggagcacgccggagtccccaaagcggcag

SEQ ID NO: 18013 - DNA, 32 bp, Artificial
  oligonucleotide probe
cacccgagagcggtgggcgaacgccctccagg

SEQ ID NO: 18014 - DNA, 32 bp, Artificial
  oligonucleotide probe
gcgagtcccggaagcggcgaacgccctccagg

SEQ ID NO: 18015 - DNA, 32 bp, Artificial
  oligonucleotide probe
gcctcaggacgcacgcgagcgggtgtggagcg

SEQ ID NO: 18016 - DNA, 32 bp, Artificial
  oligonucleotide probe
tggcaccagcaggggtgagcgggtgtggagcg

SEQ ID NO: 18017 - DNA, 32 bp, Artificial
  oligonucleotide probe
caccgggtggtcagcggcgacacccggaacgc

SEQ ID NO: 18018 - DNA, 32 bp, Artificial
  oligonucleotide probe
ggtcgacgacgccgaggcgacacccggaacgc

SEQ ID NO: 18019 - DNA, 32 bp, Artificial
  oligonucleotide probe
gagcacgcgggtgcctgacgagcgcaccgcag

SEQ ID NO: 18020 - DNA, 32 bp, Artificial
  oligonucleotide probe
ggaacggaagcggagcgacgagcgcaccgcag

SEQ ID NO: 18021 - DNA, 32 bp, Artificial
  oligonucleotide probe
caccgacgggaaacgcgagccgagtggcgtcc

SEQ ID NO: 18022 - DNA, 32 bp, Artificial
  oligonucleotide probe
gtccggaagtgggcgagagccgagtggcgtcc

SEQ ID NO: 18023 - DNA, 32 bp, Artificial
  oligonucleotide probe
cacccgagagcggtgggtccccaaagcggcag

SEQ ID NO: 18024 - DNA, 32 bp, Artificial
  oligonucleotide probe
gcgagtcccggaagcggtccccaaagcggcag

SEQ ID NO: 18025 - DNA, 32 bp, Artificial
  oligonucleotide probe
actgcggacgaggcctgcgacacccggaacgc

SEQ ID NO: 18026 - DNA, 32 bp, Artificial
  oligonucleotide probe
caccgcctcagggacggcgacacccggaacgc

SEQ ID NO: 18027 - DNA, 32 bp, Artificial
  oligonucleotide probe
accatggcacgcgacggagccgagtggcgtcc

SEQ ID NO: 18028 - DNA, 32 bp, Artificial
  oligonucleotide probe
acgccaggcgaggtgggagccgagtggcgtcc

SEQ ID NO: 18029 - DNA, 32 bp, Artificial
  oligonucleotide probe
caggacgctggccctccggatgctgcgagcag

SEQ ID NO: 18030 - DNA, 32 bp, Artificial
  oligonucleotide probe
cctcgtggcggacggacggatgctgcgagcag

SEQ ID NO: 18031 - DNA, 32 bp, Artificial
  oligonucleotide probe
caggagcgggaagcgaagcgcctcgacgggaa

SEQ ID NO: 18032 - DNA, 32 bp, Artificial
  oligonucleotide probe
tggccaggcggagtggagcgcctcgacgggaa

SEQ ID NO: 18033 - DNA, 32 bp, Artificial
  oligonucleotide probe
cgagcggaggtcccaagcgacacccggaacgc

SEQ ID NO: 18034 - DNA, 32 bp, Artificial
  oligonucleotide probe
gcctcggagacggcaggcgacacccggaacgc

SEQ ID NO: 18035 - DNA, 32 bp, Artificial
  oligonucleotide probe
gggtagcggcgagacggacgagcgcaccgcag

SEQ ID NO: 18036 - DNA, 32 bp, Artificial
  oligonucleotide probe
cagggcgagtccgacggacgagcgcaccgcag

SEQ ID NO: 18037 - DNA, 32 bp, Artificial
  oligonucleotide probe
cagggtgggcgagcgaacgctgctgcgaacca

SEQ ID NO: 18038 - DNA, 32 bp, Artificial
  oligonucleotide probe
gagcgagcagcgggtcacgctgctgcgaacca

SEQ ID NO: 18039 - DNA, 32 bp, Artificial
  oligonucleotide probe
actgcggacgaggcctgtccccaaagcggcag

SEQ ID NO: 18040 - DNA, 32 bp, Artificial
  oligonucleotide probe
caccgcctcagggacggtccccaaagcggcag

SEQ ID NO: 18041 - DNA, 32 bp, Artificial
  oligonucleotide probe
cacccgagagcggtgggtgggcctcctcccaa

SEQ ID NO: 18042 - DNA, 32 bp, Artificial
  oligonucleotide probe
gcgagtcccggaagcggtgggcctcctcccaa

SEQ ID NO: 18043 - DNA, 32 bp, Artificial
  oligonucleotide probe
agcggtccgcgagagcgcgacacccggaacgc

SEQ ID NO: 18044 - DNA, 32 bp, Artificial
  oligonucleotide probe
acgcggaagacgtggcgcgacacccggaacgc

SEQ ID NO: 18045 - DNA, 32 bp, Artificial
  oligonucleotide probe
gcgacctcacgcgcaggtccccaaagcggcag

SEQ ID NO: 18046 - DNA, 32 bp, Artificial
  oligonucleotide probe
ggtcgcctgtccagcggtccccaaagcggcag

SEQ ID NO: 18047 - DNA, 32 bp, Artificial
  oligonucleotide probe
acgcagcggggtgacggtgggcctcctcccaa

SEQ ID NO: 18048 - DNA, 32 bp, Artificial
  oligonucleotide probe
caccgcctcagggacggtgggcctcctcccaa

SEQ ID NO: 18049 - DNA, 32 bp, Artificial
  oligonucleotide probe
acgccctcaccagcgaagcgcctcgacgggaa

SEQ ID NO: 18050 - DNA, 32 bp, Artificial
  oligonucleotide probe
cctcgtggcggacggaagcgcctcgacgggaa

SEQ ID NO: 18051 - DNA, 32 bp, Artificial
  oligonucleotide probe
acgcgggtcaccgtccagcgcctcgacgggaa

SEQ ID NO: 18052 - DNA, 32 bp, Artificial
  oligonucleotide probe
gcgaagcggcgaggtcagcgcctcgacgggaa

SEQ ID NO: 18053 - DNA, 32 bp, Artificial
  oligonucleotide probe
caccggtcagcggggtacgctgctgcgaacca

SEQ ID NO: 18054 - DNA, 32 bp, Artificial
  oligonucleotide probe
acgcagcggggtgacgacgctgctgcgaacca

SEQ ID NO: 18055 - DNA, 32 bp, Artificial
  oligonucleotide probe
gcgacctcacgcgcaggcgaacgccctccagg

SEQ ID NO: 18056 - DNA, 32 bp, Artificial
  oligonucleotide probe
ggtcgcctgtccagcggcgaacgccctccagg

SEQ ID NO: 18057 - DNA, 32 bp, Artificial
  oligonucleotide probe
cggagcaggagcggaacggatgctgcgagcag

SEQ ID NO: 18058 - DNA, 32 bp, Artificial
  oligonucleotide probe
ggtcgcctgtccagcgcggatgctgcgagcag

SEQ ID NO: 18059 - DNA, 32 bp, Artificial
  oligonucleotide probe
caggacgctggccctcgtccgcaggtccgcct

SEQ ID NO: 18060 - DNA, 32 bp, Artificial
  oligonucleotide probe
cctcgtggcggacggagtccgcaggtccgcct

SEQ ID NO: 18061 - DNA, 32 bp, Artificial
  oligonucleotide probe
cagggcagggtcgggtagcgcaggagacgcct

SEQ ID NO: 18062 - DNA, 32 bp, Artificial
  oligonucleotide probe
agcggacggcaggagcagcgcaggagacgcct

SEQ ID NO: 18063 - DNA, 32 bp, Artificial
  oligonucleotide probe
cagggcagggtcgggtcggatgctgcgagcag

SEQ ID NO: 18064 - DNA, 32 bp, Artificial
  oligonucleotide probe
gacggagcacgccggacggatgctgcgagcag

SEQ ID NO: 18065 - DNA, 32 bp, Artificial
  oligonucleotide probe
ggtcgcctgtccagcggagccgagtggcgtcc

SEQ ID NO: 18066 - DNA, 32 bp, Artificial
  oligonucleotide probe
acgcccaacagggagcgagccgagtggcgtcc

SEQ ID NO: 18067 - DNA, 32 bp, Artificial
  oligonucleotide probe
cacccgagagcggtgggacgagcgcaccgcag

SEQ ID NO: 18068 - DNA, 32 bp, Artificial
  oligonucleotide probe
gcgagtcccggaagcggacgagcgcaccgcag

SEQ ID NO: 18069 - DNA, 32 bp, Artificial
  oligonucleotide probe
gagcacgcgggtgcctgcgaacgccctccagg

SEQ ID NO: 18070 - DNA, 32 bp, Artificial
  oligonucleotide probe
ggaacggaagcggagcgcgaacgccctccagg

SEQ ID NO: 18071 - DNA, 32 bp, Artificial
  oligonucleotide probe
gagcacgcgggtgcctgtccccaaagcggcag

SEQ ID NO: 18072 - DNA, 32 bp, Artificial
  oligonucleotide probe
ggaacggaagcggagcgtccccaaagcggcag

SEQ ID NO: 18073 - DNA, 32 bp, Artificial
  oligonucleotide probe
gagcacgcgggtgcctcggatgctgcgagcag

SEQ ID NO: 18074 - DNA, 32 bp, Artificial
  oligonucleotide probe
ggaacggaagcggagccggatgctgcgagcag

SEQ ID NO: 18075 - DNA, 32 bp, Artificial
  oligonucleotide probe
acgccaccgcctgacggagccgagtggcgtcc

SEQ ID NO: 18076 - DNA, 32 bp, Artificial
  oligonucleotide probe
cggatggcccaagggtgagccgagtggcgtcc

SEQ ID NO: 18077 - DNA, 32 bp, Artificial
  oligonucleotide probe
caccgcctcagggacgggtcgagctggcgcag

SEQ ID NO: 18078 - DNA, 32 bp, Artificial
  oligonucleotide probe
gcgacctcacgcgcagggtcgagctggcgcag

SEQ ID NO: 18079 - DNA, 32 bp, Artificial
  oligonucleotide probe
cgagcaccgagccggagtccccaaagcggcag

SEQ ID NO: 18080 - DNA, 32 bp, Artificial
  oligonucleotide probe
cctccggacctcacgcgtccccaaagcggcag

SEQ ID NO: 18081 - DNA, 32 bp, Artificial
  oligonucleotide probe
gcctagcgcctcgacggcagcgagcgagggaa

SEQ ID NO: 18082 - DNA, 32 bp, Artificial
  oligonucleotide probe
ggaagcctgcgacggagcagcgagcgagggaa

SEQ ID NO: 18083 - DNA, 32 bp, Artificial
  oligonucleotide probe
caggcctccctcgcgagtccgcaggtccgcct

SEQ ID NO: 18084 - DNA, 32 bp, Artificial
  oligonucleotide probe
caccagcgagacgcgagtccgcaggtccgcct

SEQ ID NO: 18085 - DNA, 32 bp, Artificial
  oligonucleotide probe
tggcagcgggtcgtgggcagcgagcgagggaa

SEQ ID NO: 18086 - DNA, 32 bp, Artificial
  oligonucleotide probe
gcctgggtcaccacgcgcagcgagcgagggaa

SEQ ID NO: 18087 - DNA, 32 bp, Artificial
  oligonucleotide probe
cggatggcccaagggtagcgcctcgacgggaa

SEQ ID NO: 18088 - DNA, 32 bp, Artificial
  oligonucleotide probe
gcctcggagacggcagagcgcctcgacgggaa

SEQ ID NO: 18089 - DNA, 32 bp, Artificial
  oligonucleotide probe
agcggcgagagcgtccggtcgagctggcgcag

SEQ ID NO: 18090 - DNA, 32 bp, Artificial
  oligonucleotide probe
gacgcaccagcgcgagggtcgagctggcgcag

SEQ ID NO: 18091 - DNA, 32 bp, Artificial
  oligonucleotide probe
gcgacagggcctgcctgcgaacgccctccagg

SEQ ID NO: 18092 - DNA, 32 bp, Artificial
  oligonucleotide probe
cggagcgagtggggaagcgaacgccctccagg

SEQ ID NO: 18093 - DNA, 32 bp, Artificial
  oligonucleotide probe
cagggcgagtccgacgtcaccggagccttggc

SEQ ID NO: 18094 - DNA, 32 bp, Artificial
  oligonucleotide probe
gagcgacgcgagagcgtcaccggagccttggc

SEQ ID NO: 18095 - DNA, 32 bp, Artificial
  oligonucleotide probe
gagcgcctcctcgagcagcgcctcgacgggaa

SEQ ID NO: 18096 - DNA, 32 bp, Artificial
  oligonucleotide probe
gtggccaatcacgcgaagcgcctcgacgggaa

SEQ ID NO: 18097 - DNA, 32 bp, Artificial
  oligonucleotide probe
ggtcgcgacacctggcgacgagcgcaccgcag

SEQ ID NO: 18098 - DNA, 32 bp, Artificial
  oligonucleotide probe
cgagcctcgggtgcgagacgagcgcaccgcag

SEQ ID NO: 18099 - DNA, 32 bp, Artificial
  oligonucleotide probe
cgagcggaggtcccaagtgggcctcctcccaa

SEQ ID NO: 18100 - DNA, 32 bp, Artificial
  oligonucleotide probe
cgaggacgccaaacgcgtgggcctcctcccaa

SEQ ID NO: 18101 - DNA, 32 bp, Artificial
  oligonucleotide probe
caccgggtggtcagcggagccgagtggcgtcc

SEQ ID NO: 18102 - DNA, 32 bp, Artificial
  oligonucleotide probe
ggtcgacgacgccgaggagccgagtggcgtcc

SEQ ID NO: 18103 - DNA, 32 bp, Artificial
  oligonucleotide probe
cagggcagggtcgggtggtcgagctggcgcag

SEQ ID NO: 18104 - DNA, 32 bp, Artificial
  oligonucleotide probe
gacggagcacgccggaggtcgagctggcgcag

SEQ ID NO: 18105 - DNA, 32 bp, Artificial
  oligonucleotide probe
cgagcaccgagccggaagcgcaggagacgcct

SEQ ID NO: 18106 - DNA, 32 bp, Artificial
  oligonucleotide probe
cctccggacctcacgcagcgcaggagacgcct

SEQ ID NO: 18107 - DNA, 32 bp, Artificial
  oligonucleotide probe
cagggtgggcgagcgacggagacgcagggggt

SEQ ID NO: 18108 - DNA, 32 bp, Artificial
  oligonucleotide probe
acgcccaacagggagccggagacgcagggggt

SEQ ID NO: 18109 - DNA, 32 bp, Artificial
  oligonucleotide probe
gcctgcgagagctggcgcagcgagcgagggaa

SEQ ID NO: 18110 - DNA, 32 bp, Artificial
  oligonucleotide probe
caggcctccctcgcgagcagcgagcgagggaa

SEQ ID NO: 18111 - DNA, 32 bp, Artificial
  oligonucleotide probe
gcagcaccagcgtggcgcgacacccggaacgc

SEQ ID NO: 18112 - DNA, 32 bp, Artificial
  oligonucleotide probe
ggtccggagcagacgcgcgacacccggaacgc

SEQ ID NO: 18113 - DNA, 32 bp, Artificial
  oligonucleotide probe
cagggcagggtcgggtagcgcctcgacgggaa

SEQ ID NO: 18114 - DNA, 32 bp, Artificial
  oligonucleotide probe
agcggacggcaggagcagcgcctcgacgggaa

SEQ ID NO: 18115 - DNA, 32 bp, Artificial
  oligonucleotide probe
cgagcaggcgaggcaggtgggcctcctcccaa

SEQ ID NO: 18116 - DNA, 32 bp, Artificial
  oligonucleotide probe
gcctcaggacgcacgcgtgggcctcctcccaa

SEQ ID NO: 18117 - DNA, 32 bp, Artificial
  oligonucleotide probe
tgctcggatgctgcgagacgagcgcaccgcag

SEQ ID NO: 18118 - DNA, 32 bp, Artificial
  oligonucleotide probe
gagcgcagccaagcctgacgagcgcaccgcag

SEQ ID NO: 18119 - DNA, 32 bp, Artificial
  oligonucleotide probe
caggacgctggccctcgtccccaaagcggcag

SEQ ID NO: 18120 - DNA, 32 bp, Artificial
  oligonucleotide probe
cctcgtggcggacggagtccccaaagcggcag

SEQ ID NO: 18121 - DNA, 32 bp, Artificial
  oligonucleotide probe
tggcgcctgtccgtgggagcgggtgtggagcg

SEQ ID NO: 18122 - DNA, 32 bp, Artificial
  oligonucleotide probe
gtggcgagcctcgggtgagcgggtgtggagcg

SEQ ID NO: 18123 - DNA, 32 bp, Artificial
  oligonucleotide probe
gggttggccgagtggcgcgacacccggaacgc

SEQ ID NO: 18124 - DNA, 32 bp, Artificial
  oligonucleotide probe
tggcgggtgacggtgggcgacacccggaacgc

SEQ ID NO: 18125 - DNA, 32 bp, Artificial
  oligonucleotide probe
gacggcgagtgggcaggcagcgagcgagggaa

SEQ ID NO: 18126 - DNA, 32 bp, Artificial
  oligonucleotide probe
acgcgcctgacgcctcgcagcgagcgagggaa

SEQ ID NO: 18127 - DNA, 32 bp, Artificial
  oligonucleotide probe
acgccaccgcctgacggtgggcctcctcccaa

SEQ ID NO: 18128 - DNA, 32 bp, Artificial
  oligonucleotide probe
cggatggcccaagggtgtgggcctcctcccaa

SEQ ID NO: 18129 - DNA, 32 bp, Artificial
  oligonucleotide probe
agcggcgagagcgtccgagcgggtgtggagcg

SEQ ID NO: 18130 - DNA, 32 bp, Artificial
  oligonucleotide probe
gacgcaccagcgcgaggagcgggtgtggagcg

SEQ ID NO: 18131 - DNA, 32 bp, Artificial
  oligonucleotide probe
caggcctccctcgcgacggatgctgcgagcag

SEQ ID NO: 18132 - DNA, 32 bp, Artificial
  oligonucleotide probe
caccagcgagacgcgacggatgctgcgagcag

SEQ ID NO: 18133 - DNA, 32 bp, Artificial
  oligonucleotide probe
gcgacagggcctgcctgtgggcctcctcccaa

SEQ ID NO: 18134 - DNA, 32 bp, Artificial
  oligonucleotide probe
cggagcgagtggggaagtgggcctcctcccaa

SEQ ID NO: 18135 - DNA, 32 bp, Artificial
  oligonucleotide probe
cggacacctggccggagcagcgagcgagggaa

SEQ ID NO: 18136 - DNA, 32 bp, Artificial
  oligonucleotide probe
accatggcacgcgacggcagcgagcgagggaa

SEQ ID NO: 18137 - DNA, 32 bp, Artificial
  oligonucleotide probe
tgctcggatgctgcgaagcgcaggagacgcct

SEQ ID NO: 18138 - DNA, 32 bp, Artificial
  oligonucleotide probe
gagcgcagccaagcctagcgcaggagacgcct

SEQ ID NO: 18139 - DNA, 32 bp, Artificial
  oligonucleotide probe
caggacgctggccctcgtgggcctcctcccaa

SEQ ID NO: 18140 - DNA, 32 bp, Artificial
  oligonucleotide probe
cctcgtggcggacggagtgggcctcctcccaa

SEQ ID NO: 18141 - DNA, 32 bp, Artificial
  oligonucleotide probe
agcggacggcaggagcgtccccaaagcggcag

SEQ ID NO: 18142 - DNA, 32 bp, Artificial
  oligonucleotide probe
cggagcctgagcgtgggtccccaaagcggcag

SEQ ID NO: 18143 - DNA, 32 bp, Artificial
  oligonucleotide probe
acgcagcggggtgacggcgacacccggaacgc

SEQ ID NO: 18144 - DNA, 32 bp, Artificial
  oligonucleotide probe
gcaggacggacggcctgcgacacccggaacgc

SEQ ID NO: 18145 - DNA, 32 bp, Artificial
  oligonucleotide probe
gcctcaggacgcacgcgagccgagtggcgtcc

SEQ ID NO: 18146 - DNA, 32 bp, Artificial
  oligonucleotide probe
caccagcgagacgcgagagccgagtggcgtcc

SEQ ID NO: 18147 - DNA, 32 bp, Artificial
  oligonucleotide probe
cgagcaccgagccggatcaccggagccttggc

SEQ ID NO: 18148 - DNA, 32 bp, Artificial
  oligonucleotide probe
cctccggacctcacgctcaccggagccttggc

SEQ ID NO: 18149 - DNA, 32 bp, Artificial
  oligonucleotide probe
cggagcaggagcggaagtccgcaggtccgcct

SEQ ID NO: 18150 - DNA, 32 bp, Artificial
  oligonucleotide probe
ggtcgcctgtccagcggtccgcaggtccgcct

SEQ ID NO: 18151 - DNA, 32 bp, Artificial
  oligonucleotide probe
tggcagcgggtcgtgggcgacacccggaacgc

SEQ ID NO: 18152 - DNA, 32 bp, Artificial
  oligonucleotide probe
gcctgggtcaccacgcgcgacacccggaacgc

SEQ ID NO: 18153 - DNA, 32 bp, Artificial
  oligonucleotide probe
caccggtcagcggggtggtcgagctggcgcag

SEQ ID NO: 18154 - DNA, 32 bp, Artificial
  oligonucleotide probe
acgcagcggggtgacgggtcgagctggcgcag

SEQ ID NO: 18155 - DNA, 32 bp, Artificial
  oligonucleotide probe
cggatggcccaagggtgacgagcgcaccgcag

SEQ ID NO: 18156 - DNA, 32 bp, Artificial
  oligonucleotide probe
tggcaccagcaggggtgacgagcgcaccgcag

SEQ ID NO: 18157 - DNA, 32 bp, Artificial
  oligonucleotide probe
gagcgagcagcgggtcgtccccaaagcggcag

SEQ ID NO: 18158 - DNA, 32 bp, Artificial
  oligonucleotide probe
acgccctcaccagcgagtccccaaagcggcag

SEQ ID NO: 18159 - DNA, 32 bp, Artificial
  oligonucleotide probe
gcctagcgcctcgacggcgacacccggaacgc

SEQ ID NO: 18160 - DNA, 32 bp, Artificial
  oligonucleotide probe
ggaagcctgcgacggagcgacacccggaacgc

SEQ ID NO: 18161 - DNA, 32 bp, Artificial
  oligonucleotide probe
cagggtgggcgagcgatcaccggagccttggc

SEQ ID NO: 18162 - DNA, 32 bp, Artificial
  oligonucleotide probe
acgcccaacagggagctcaccggagccttggc

SEQ ID NO: 18163 - DNA, 32 bp, Artificial
  oligonucleotide probe
gggtacgcgacgcgagggtcgagctggcgcag

SEQ ID NO: 18164 - DNA, 32 bp, Artificial
  oligonucleotide probe
agcggacggcaggagcggtcgagctggcgcag

SEQ ID NO: 18165 - DNA, 32 bp, Artificial
  oligonucleotide probe
acgcagcggggtgacgcggagacgcagggggt

SEQ ID NO: 18166 - DNA, 32 bp, Artificial
  oligonucleotide probe
caccgcctcagggacgcggagacgcagggggt

SEQ ID NO: 18167 - DNA, 32 bp, Artificial
  oligonucleotide probe
cagggcagggtcgggtcggagacgcagggggt

SEQ ID NO: 18168 - DNA, 32 bp, Artificial
  oligonucleotide probe
agcggcgagagcgtcccggagacgcagggggt

SEQ ID NO: 18169 - DNA, 32 bp, Artificial
  oligonucleotide probe
gcaggacggacggcctacgctgctgcgaacca

SEQ ID NO: 18170 - DNA, 32 bp, Artificial
  oligonucleotide probe
cggagcaggagcggaaacgctgctgcgaacca

SEQ ID NO: 18171 - DNA, 32 bp, Artificial
  oligonucleotide probe
cgagcctcgggtgcgaacgctgctgcgaacca

SEQ ID NO: 18172 - DNA, 32 bp, Artificial
  oligonucleotide probe
actgcggacgaggcctacgctgctgcgaacca

SEQ ID NO: 18173 - DNA, 32 bp, Artificial
  oligonucleotide probe
ggaacggaagcggagcgcagcgagcgagggaa

SEQ ID NO: 18174 - DNA, 32 bp, Artificial
  oligonucleotide probe
gcctcggagacggcaggcagcgagcgagggaa

SEQ ID NO: 18175 - DNA, 32 bp, Artificial
  oligonucleotide probe
caggcctccctcgcgaggtcgagctggcgcag

SEQ ID NO: 18176 - DNA, 32 bp, Artificial
  oligonucleotide probe
gtggccaatcacgcgaggtcgagctggcgcag

SEQ ID NO: 18177 - DNA, 32 bp, Artificial
  oligonucleotide probe
gacggcgagtgggcagagcgcctcgacgggaa

SEQ ID NO: 18178 - DNA, 32 bp, Artificial
  oligonucleotide probe
acgcgcctgacgcctcagcgcctcgacgggaa

SEQ ID NO: 18179 - DNA, 32 bp, Artificial
  oligonucleotide probe
cgagcctcgggtgcgaggtcgagctggcgcag

SEQ ID NO: 18180 - DNA, 32 bp, Artificial
  oligonucleotide probe
actgcggacgaggcctggtcgagctggcgcag

SEQ ID NO: 18181 - DNA, 32 bp, Artificial
  oligonucleotide probe
caccggtcagcggggttcaccggagccttggc

SEQ ID NO: 18182 - DNA, 32 bp, Artificial
  oligonucleotide probe
gggtagcggcgagacgtcaccggagccttggc

SEQ ID NO: 18183 - DNA, 32 bp, Artificial
  oligonucleotide probe
ccaaagcgggaatggcgcagcgagcgagggaa

SEQ ID NO: 18184 - DNA, 32 bp, Artificial
  oligonucleotide probe
cctccgaggacgcggagcagcgagcgagggaa

SEQ ID NO: 18185 - DNA, 32 bp, Artificial
  oligonucleotide probe
gtgggggtgcagggaatcaccggagccttggc

SEQ ID NO: 18186 - DNA, 32 bp, Artificial
  oligonucleotide probe
ggtcgcaggcgagggttcaccggagccttggc

SEQ ID NO: 18187 - DNA, 32 bp, Artificial
  oligonucleotide probe
gcaggacggacggcctgtccgcaggtccgcct

SEQ ID NO: 18188 - DNA, 32 bp, Artificial
  oligonucleotide probe
gcgacctcacgcgcaggtccgcaggtccgcct

SEQ ID NO: 18189 - DNA, 32 bp, Artificial
  oligonucleotide probe
gggtggaacgaggcgaagcgcctcgacgggaa

SEQ ID NO: 18190 - DNA, 32 bp, Artificial
  oligonucleotide probe
gcaggtggtggcgagcagcgcctcgacgggaa

SEQ ID NO: 18191 - DNA, 32 bp, Artificial
  oligonucleotide probe
cagggcgagtccgacggagccgagtggcgtcc

SEQ ID NO: 18192 - DNA, 32 bp, Artificial
  oligonucleotide probe
gagcgacgcgagagcggagccgagtggcgtcc

SEQ ID NO: 18193 - DNA, 32 bp, Artificial
  oligonucleotide probe
cgagcaccgagccggaggtcgagctggcgcag

SEQ ID NO: 18194 - DNA, 32 bp, Artificial
  oligonucleotide probe
cctccggacctcacgcggtcgagctggcgcag

SEQ ID NO: 18195 - DNA, 32 bp, Artificial
  oligonucleotide probe
caccgcctcagggacgacgctgctgcgaacca

SEQ ID NO: 18196 - DNA, 32 bp, Artificial
  oligonucleotide probe
gcgacctcacgcgcagacgctgctgcgaacca

SEQ ID NO: 18197 - DNA, 32 bp, Artificial
  oligonucleotide probe
tggcgtgggggtccaagcgacacccggaacgc

SEQ ID NO: 18198 - DNA, 32 bp, Artificial
  oligonucleotide probe
tgctgggtgcaggcgagcgacacccggaacgc

SEQ ID NO: 18199 - DNA, 32 bp, Artificial
  oligonucleotide probe
gtggccaatcacgcgagtgggcctcctcccaa

SEQ ID NO: 18200 - DNA, 32 bp, Artificial
  oligonucleotide probe
agcgcaccgacgacgcgtgggcctcctcccaa

SEQ ID NO: 18201 - DNA, 32 bp, Artificial
  oligonucleotide probe
acgcgggtcaccgtccgagccgagtggcgtcc

SEQ ID NO: 18202 - DNA, 32 bp, Artificial
  oligonucleotide probe
gcgaagcggcgaggtcgagccgagtggcgtcc

SEQ ID NO: 18203 - DNA, 32 bp, Artificial
  oligonucleotide probe
ggaaagcggcctggaagcagcgagcgagggaa

SEQ ID NO: 18204 - DNA, 32 bp, Artificial
  oligonucleotide probe
gagcggtctggcggaagcagcgagcgagggaa

SEQ ID NO: 18205 - DNA, 32 bp, Artificial
  oligonucleotide probe
gcgagtggcagggcctgcagcgagcgagggaa

SEQ ID NO: 18206 - DNA, 32 bp, Artificial
  oligonucleotide probe
caccgagccacccggagcagcgagcgagggaa

SEQ ID NO: 18207 - DNA, 32 bp, Artificial
  oligonucleotide probe
cggagcctgagcgtggagcgcctcgacgggaa

SEQ ID NO: 18208 - DNA, 32 bp, Artificial
  oligonucleotide probe
gagcgcgacacccaggagcgcctcgacgggaa

SEQ ID NO: 18209 - DNA, 32 bp, Artificial
  oligonucleotide probe
tgctgggtgcaggcgaagcgcctcgacgggaa

SEQ ID NO: 18210 - DNA, 32 bp, Artificial
  oligonucleotide probe
agcggtccgcgagagcagcgcctcgacgggaa

SEQ ID NO: 18211 - DNA, 32 bp, Artificial
  oligonucleotide probe
tggcagcgggtcgtgggagccgagtggcgtcc

SEQ ID NO: 18212 - DNA, 32 bp, Artificial
  oligonucleotide probe
gcctgggtcaccacgcgagccgagtggcgtcc

SEQ ID NO: 18213 - DNA, 32 bp, Artificial
  oligonucleotide probe
cggagcaggagcggaagagccgagtggcgtcc

SEQ ID NO: 18214 - DNA, 32 bp, Artificial
  oligonucleotide probe
cagggtgggcgagcgagagccgagtggcgtcc

SEQ ID NO: 18215 - DNA, 32 bp, Artificial
  oligonucleotide probe
cggagcctgagcgtgggagccgagtggcgtcc

SEQ ID NO: 18216 - DNA, 32 bp, Artificial
  oligonucleotide probe
cggagagcgcgagcctgagccgagtggcgtcc

SEQ ID NO: 18217 - DNA, 32 bp, Artificial
  oligonucleotide probe
gcaggacggacggcctgcgaacgccctccagg

SEQ ID NO: 18218 - DNA, 32 bp, Artificial
  oligonucleotide probe
cggagcaggagcggaagcgaacgccctccagg

SEQ ID NO: 18219 - DNA, 32 bp, Artificial
  oligonucleotide probe
cacccgagagcggtgggagccgagtggcgtcc

SEQ ID NO: 18220 - DNA, 32 bp, Artificial
  oligonucleotide probe
gggtagcggcgagacggagccgagtggcgtcc

SEQ ID NO: 18221 - DNA, 32 bp, Artificial
  oligonucleotide probe
gggtggaacgaggcgagcgacacccggaacgc

SEQ ID NO: 18222 - DNA, 32 bp, Artificial
  oligonucleotide probe
gcaggtggtggcgagcgcgacacccggaacgc

SEQ ID NO: 18223 - DNA, 32 bp, Artificial
  oligonucleotide probe
agcggacggcaggagccggagacgcagggggt

SEQ ID NO: 18224 - DNA, 32 bp, Artificial
  oligonucleotide probe
tggcaccagcaggggtcggagacgcagggggt

SEQ ID NO: 18225 - DNA, 32 bp, Artificial
  oligonucleotide probe
gagcgcagccaagcctagcgcctcgacgggaa

SEQ ID NO: 18226 - DNA, 32 bp, Artificial
  oligonucleotide probe
tggcacgcgagccaggagcgcctcgacgggaa

SEQ ID NO: 18227 - DNA, 32 bp, Artificial
  oligonucleotide probe
cgagcctcgggtgcgagagccgagtggcgtcc

SEQ ID NO: 18228 - DNA, 32 bp, Artificial
  oligonucleotide probe
actgcggacgaggcctgagccgagtggcgtcc

SEQ ID NO: 18229 - DNA, 32 bp, Artificial
  oligonucleotide probe
gtgggggtgcagggaagtccccaaagcggcag

SEQ ID NO: 18230 - DNA, 32 bp, Artificial
  oligonucleotide probe
ggtcgcaggcgagggtgtccccaaagcggcag

SEQ ID NO: 18231 - DNA, 32 bp, Artificial
  oligonucleotide probe
caccgagccacccggagagccgagtggcgtcc

SEQ ID NO: 18232 - DNA, 32 bp, Artificial
  oligonucleotide probe
tggcacgcgagccagggagccgagtggcgtcc

SEQ ID NO: 18233 - DNA, 32 bp, Artificial
  oligonucleotide probe
gtccgggtcaggcagggagcgggtgtggagcg

SEQ ID NO: 18234 - DNA, 32 bp, Artificial
  oligonucleotide probe
cgagcaggcgaggcaggagcgggtgtggagcg

SEQ ID NO: 18235 - DNA, 32 bp, Artificial
  oligonucleotide probe
gcctcaggacgcacgcggtcgagctggcgcag

SEQ ID NO: 18236 - DNA, 32 bp, Artificial
  oligonucleotide probe
caccagcgagacgcgaggtcgagctggcgcag

SEQ ID NO: 18237 - DNA, 32 bp, Artificial
  oligonucleotide probe
cggagcctgagcgtgggagcgggtgtggagcg

SEQ ID NO: 18238 - DNA, 32 bp, Artificial
  oligonucleotide probe
cggagagcgcgagcctgagcgggtgtggagcg

SEQ ID NO: 18239 - DNA, 32 bp, Artificial
  oligonucleotide probe
acgcgagcgggtgcaggcagcgagcgagggaa

SEQ ID NO: 18240 - DNA, 32 bp, Artificial
  oligonucleotide probe
gcgatggccaggtggcgcagcgagcgagggaa

SEQ ID NO: 18241 - DNA, 32 bp, Artificial
  oligonucleotide probe
cagggcagggtcgggtacgctgctgcgaacca

SEQ ID NO: 18242 - DNA, 32 bp, Artificial
  oligonucleotide probe
gacggagcacgccggaacgctgctgcgaacca

SEQ ID NO: 18243 - DNA, 32 bp, Artificial
  oligonucleotide probe
gagcgagcagcgggtcgcgacacccggaacgc

SEQ ID NO: 18244 - DNA, 32 bp, Artificial
  oligonucleotide probe
caggacgctggccctcgcgacacccggaacgc

SEQ ID NO: 18245 - DNA, 32 bp, Artificial
  oligonucleotide probe
tcacgccttggccaccgcgacacccggaacgc

SEQ ID NO: 18246 - DNA, 32 bp, Artificial
  oligonucleotide probe
caccgcgaggtcacgcgcgacacccggaacgc

SEQ ID NO: 18247 - DNA, 32 bp, Artificial
  oligonucleotide probe
cggagcaggagcggaacggagacgcagggggt

SEQ ID NO: 18248 - DNA, 32 bp, Artificial
  oligonucleotide probe
ggtcgcctgtccagcgcggagacgcagggggt

SEQ ID NO: 18249 - DNA, 32 bp, Artificial
  oligonucleotide probe
caccgcctcagggacgagcgcctcgacgggaa

SEQ ID NO: 18250 - DNA, 32 bp, Artificial
  oligonucleotide probe
gcgacctcacgcgcagagcgcctcgacgggaa

SEQ ID NO: 18251 - DNA, 32 bp, Artificial
  oligonucleotide probe
agcgagcggtggacgcagcgcctcgacgggaa

SEQ ID NO: 18252 - DNA, 32 bp, Artificial
  oligonucleotide probe
cgagcggaggtcccaaagcgcctcgacgggaa

SEQ ID NO: 18253 - DNA, 32 bp, Artificial
  oligonucleotide probe
gtgggggtgcagggaagagcgggtgtggagcg

SEQ ID NO: 18254 - DNA, 32 bp, Artificial
  oligonucleotide probe
ggtcgcaggcgagggtgagcgggtgtggagcg

SEQ ID NO: 18255 - DNA, 32 bp, Artificial
  oligonucleotide probe
gtccgggtcaggcagggcgacacccggaacgc

SEQ ID NO: 18256 - DNA, 32 bp, Artificial
  oligonucleotide probe
gcaggcagccaatggcgcgacacccggaacgc

SEQ ID NO: 18257 - DNA, 32 bp, Artificial
  oligonucleotide probe
gtggccaatcacgcgagagcgggtgtggagcg

SEQ ID NO: 18258 - DNA, 32 bp, Artificial
  oligonucleotide probe
agcgcaccgacgacgcgagcgggtgtggagcg

SEQ ID NO: 18259 - DNA, 32 bp, Artificial
  oligonucleotide probe
caggcctccctcgcgaacgctgctgcgaacca

SEQ ID NO: 18260 - DNA, 32 bp, Artificial
  oligonucleotide probe
gtggccaatcacgcgaacgctgctgcgaacca

SEQ ID NO: 18261 - DNA, 32 bp, Artificial
  oligonucleotide probe
gtccgggtcaggcaggagcgcaggagacgcct

SEQ ID NO: 18262 - DNA, 32 bp, Artificial
  oligonucleotide probe
cggagagcgcgagcctagcgcaggagacgcct

SEQ ID NO: 18263 - DNA, 32 bp, Artificial
  oligonucleotide probe
ggtcgcgacacctggcgtccgcaggtccgcct

SEQ ID NO: 18264 - DNA, 32 bp, Artificial
  oligonucleotide probe
cgagcctcgggtgcgagtccgcaggtccgcct

SEQ ID NO: 18265 - DNA, 32 bp, Artificial
  oligonucleotide probe
caccgcctcagggacggagccgagtggcgtcc

SEQ ID NO: 18266 - DNA, 32 bp, Artificial
  oligonucleotide probe
gcgacctcacgcgcaggagccgagtggcgtcc

SEQ ID NO: 18267 - DNA, 32 bp, Artificial
  oligonucleotide probe
caccgggtggtcagcgagcgcctcgacgggaa

SEQ ID NO: 18268 - DNA, 32 bp, Artificial
  oligonucleotide probe
ggtcgacgacgccgagagcgcctcgacgggaa

SEQ ID NO: 18269 - DNA, 32 bp, Artificial
  oligonucleotide probe
gtggcaggagcgacgcgcgacacccggaacgc

SEQ ID NO: 18270 - DNA, 32 bp, Artificial
  oligonucleotide probe
gacggagcacgccggagcgacacccggaacgc

SEQ ID NO: 18271 - DNA, 32 bp, Artificial
  oligonucleotide probe
agcggacggcaggagcgcgaacgccctccagg

SEQ ID NO: 18272 - DNA, 32 bp, Artificial
  oligonucleotide probe
cggagcctgagcgtgggcgaacgccctccagg

SEQ ID NO: 18273 - DNA, 32 bp, Artificial
  oligonucleotide probe
cgagcaggcgaggcagagcgcctcgacgggaa

SEQ ID NO: 18274 - DNA, 32 bp, Artificial
  oligonucleotide probe
gcctcaggacgcacgcagcgcctcgacgggaa

SEQ ID NO: 18275 - DNA, 32 bp, Artificial
  oligonucleotide probe
acgcagcggggtgacggagccgagtggcgtcc

SEQ ID NO: 18276 - DNA, 32 bp, Artificial
  oligonucleotide probe
gcaggacggacggcctgagccgagtggcgtcc

SEQ ID NO: 18277 - DNA, 32 bp, Artificial
  oligonucleotide probe
cagggtgggcgagcgacggatgctgcgagcag

SEQ ID NO: 18278 - DNA, 32 bp, Artificial
  oligonucleotide probe
acgcccaacagggagccggatgctgcgagcag

SEQ ID NO: 18279 - DNA, 32 bp, Artificial
  oligonucleotide probe
caggacgctggccctcgcagcgagcgagggaa

SEQ ID NO: 18280 - DNA, 32 bp, Artificial
  oligonucleotide probe
gtgggggtgcagggaagcagcgagcgagggaa

SEQ ID NO: 18281 - DNA, 32 bp, Artificial
  oligonucleotide probe
gcagcggagcctgagcgagccgagtggcgtcc

SEQ ID NO: 18282 - DNA, 32 bp, Artificial
  oligonucleotide probe
acgcaccagtcccggagagccgagtggcgtcc

SEQ ID NO: 18283 - DNA, 32 bp, Artificial
  oligonucleotide probe
cctcgtggcggacggagcgacacccggaacgc

SEQ ID NO: 18284 - DNA, 32 bp, Artificial
  oligonucleotide probe
gcgagtcccggaagcggcgacacccggaacgc

SEQ ID NO: 18285 - DNA, 32 bp, Artificial
  oligonucleotide probe
cgagcaccgagccggagtccgcaggtccgcct

SEQ ID NO: 18286 - DNA, 32 bp, Artificial
  oligonucleotide probe
cctccggacctcacgcgtccgcaggtccgcct

SEQ ID NO: 18287 - DNA, 32 bp, Artificial
  oligonucleotide probe
caggacgctggccctcagcgcaggagacgcct

SEQ ID NO: 18288 - DNA, 32 bp, Artificial
  oligonucleotide probe
cctcgtggcggacggaagcgcaggagacgcct

SEQ ID NO: 18289 - DNA, 32 bp, Artificial
  oligonucleotide probe
gcgacagggcctgcctggtcgagctggcgcag

SEQ ID NO: 18290 - DNA, 32 bp, Artificial
  oligonucleotide probe
cggagcgagtggggaaggtcgagctggcgcag

SEQ ID NO: 18291 - DNA, 32 bp, Artificial
  oligonucleotide probe
acgcggtccaccgtgggagccgagtggcgtcc

SEQ ID NO: 18292 - DNA, 32 bp, Artificial
  oligonucleotide probe
tggcgtgggggtccaagagccgagtggcgtcc

SEQ ID NO: 18293 - DNA, 32 bp, Artificial
  oligonucleotide probe
gggttggccgagtggcagcgcctcgacgggaa

SEQ ID NO: 18294 - DNA, 32 bp, Artificial
  oligonucleotide probe
tggcgggtgacggtggagcgcctcgacgggaa

SEQ ID NO: 18295 - DNA, 32 bp, Artificial
  oligonucleotide probe
gcgagtggcagggcctgcgacacccggaacgc

SEQ ID NO: 18296 - DNA, 32 bp, Artificial
  oligonucleotide probe
caccgagccacccggagcgacacccggaacgc

SEQ ID NO: 18297 - DNA, 32 bp, Artificial
  oligonucleotide probe
gggtacgcgacgcgaggagccgagtggcgtcc

SEQ ID NO: 18298 - DNA, 32 bp, Artificial
  oligonucleotide probe
agcggacggcaggagcgagccgagtggcgtcc

SEQ ID NO: 18299 - DNA, 32 bp, Artificial
  oligonucleotide probe
gggtagcggcgagacggcgacacccggaacgc

SEQ ID NO: 18300 - DNA, 32 bp, Artificial
  oligonucleotide probe
cagggcgagtccgacggcgacacccggaacgc

SEQ ID NO: 18301 - DNA, 32 bp, Artificial
  oligonucleotide probe
gggtacgcgacgcgagtcaccggagccttggc

SEQ ID NO: 18302 - DNA, 32 bp, Artificial
  oligonucleotide probe
agcggacggcaggagctcaccggagccttggc

SEQ ID NO: 18303 - DNA, 32 bp, Artificial
  oligonucleotide probe
cacccgagagcggtggtcaccggagccttggc

SEQ ID NO: 18304 - DNA, 32 bp, Artificial
  oligonucleotide probe
gcgagtcccggaagcgtcaccggagccttggc

SEQ ID NO: 18305 - DNA, 32 bp, Artificial
  oligonucleotide probe
ggaaagcggcctggaagagccgagtggcgtcc

SEQ ID NO: 18306 - DNA, 32 bp, Artificial
  oligonucleotide probe
gagcggtctggcggaagagccgagtggcgtcc

SEQ ID NO: 18307 - DNA, 32 bp, Artificial
  oligonucleotide probe
gcaggacggacggcctgtgggcctcctcccaa

SEQ ID NO: 18308 - DNA, 32 bp, Artificial
  oligonucleotide probe
gcgacctcacgcgcaggtgggcctcctcccaa

SEQ ID NO: 18309 - DNA, 32 bp, Artificial
  oligonucleotide probe
gcctgtgggtccgcgagagccgagtggcgtcc

SEQ ID NO: 18310 - DNA, 32 bp, Artificial
  oligonucleotide probe
cctcgcctcgaggagcgagccgagtggcgtcc

SEQ ID NO: 18311 - DNA, 32 bp, Artificial
  oligonucleotide probe
gacgcaccagcgcgagcggagacgcagggggt

SEQ ID NO: 18312 - DNA, 32 bp, Artificial
  oligonucleotide probe
acgccaccgcctgacgcggagacgcagggggt

SEQ ID NO: 18313 - DNA, 32 bp, Artificial
  oligonucleotide probe
caggggaagggtcggagagccgagtggcgtcc

SEQ ID NO: 18314 - DNA, 32 bp, Artificial
  oligonucleotide probe
gtccgagcagcggcctgagccgagtggcgtcc

SEQ ID NO: 18315 - DNA, 32 bp, Artificial
  oligonucleotide probe
cgagcaccgagccggagacgagcgcaccgcag

SEQ ID NO: 18316 - DNA, 32 bp, Artificial
  oligonucleotide probe
cctccggacctcacgcgacgagcgcaccgcag

SEQ ID NO: 18317 - DNA, 32 bp, Artificial
  oligonucleotide probe
tggcgtgggggtccaagcagcgagcgagggaa

SEQ ID NO: 18318 - DNA, 32 bp, Artificial
  oligonucleotide probe
tgctgggtgcaggcgagcagcgagcgagggaa

SEQ ID NO: 18319 - DNA, 32 bp, Artificial
  oligonucleotide probe
gagcgacgcgagagcggcgacacccggaacgc

SEQ ID NO: 18320 - DNA, 32 bp, Artificial
  oligonucleotide probe
cgagcctcgggtgcgagcgacacccggaacgc

SEQ ID NO: 18321 - DNA, 32 bp, Artificial
  oligonucleotide probe
cagggcagggtcgggttcaccggagccttggc

SEQ ID NO: 18322 - DNA, 32 bp, Artificial
  oligonucleotide probe
gacggagcacgccggatcaccggagccttggc

SEQ ID NO: 18323 - DNA, 32 bp, Artificial
  oligonucleotide probe
gacggacgacgcgtggagcgcctcgacgggaa

SEQ ID NO: 18324 - DNA, 32 bp, Artificial
  oligonucleotide probe
gacggggtcggacgagagcgcctcgacgggaa

SEQ ID NO: 18325 - DNA, 32 bp, Artificial
  oligonucleotide probe
gtgggggtgcagggaagcgaacgccctccagg

SEQ ID NO: 18326 - DNA, 32 bp, Artificial
  oligonucleotide probe
ggtcgcaggcgagggtgcgaacgccctccagg

SEQ ID NO: 18327 - DNA, 32 bp, Artificial
  oligonucleotide probe
cacccgagagcggtggcggatgctgcgagcag

SEQ ID NO: 18328 - DNA, 32 bp, Artificial
  oligonucleotide probe
gcgagtcccggaagcgcggatgctgcgagcag

SEQ ID NO: 18329 - DNA, 32 bp, Artificial
  oligonucleotide probe
agcgagcggtggacgcgagccgagtggcgtcc

SEQ ID NO: 18330 - DNA, 32 bp, Artificial
  oligonucleotide probe
gcctcggagacggcaggagccgagtggcgtcc

SEQ ID NO: 18331 - DNA, 32 bp, Artificial
  oligonucleotide probe
caccgacgggaaacgcgcgacacccggaacgc

SEQ ID NO: 18332 - DNA, 32 bp, Artificial
  oligonucleotide probe
gtccggaagtgggcgagcgacacccggaacgc

SEQ ID NO: 18333 - DNA, 32 bp, Artificial
  oligonucleotide probe
acgccctcaccagcgagagccgagtggcgtcc

SEQ ID NO: 18334 - DNA, 32 bp, Artificial
  oligonucleotide probe
cctcgtggcggacggagagccgagtggcgtcc

SEQ ID NO: 18335 - DNA, 32 bp, Artificial
  oligonucleotide probe
acgcggaagacgtggcgagccgagtggcgtcc

SEQ ID NO: 18336 - DNA, 32 bp, Artificial
  oligonucleotide probe
gcgacgagcgagccaagagccgagtggcgtcc

SEQ ID NO: 18337 - DNA, 32 bp, Artificial
  oligonucleotide probe
gacggacgacgcgtgggcgacacccggaacgc

SEQ ID NO: 18338 - DNA, 32 bp, Artificial
  oligonucleotide probe
gacggggtcggacgaggcgacacccggaacgc

SEQ ID NO: 18339 - DNA, 32 bp, Artificial
  oligonucleotide probe
cgagcaccgagccggagtgggcctcctcccaa

SEQ ID NO: 18340 - DNA, 32 bp, Artificial
  oligonucleotide probe
cctccggacctcacgcgtgggcctcctcccaa

SEQ ID NO: 18341 - DNA, 32 bp, Artificial
  oligonucleotide probe
acgcggaagacgtggcagcgcctcgacgggaa

SEQ ID NO: 18342 - DNA, 32 bp, Artificial
  oligonucleotide probe
gcgacgagcgagccaaagcgcctcgacgggaa

SEQ ID NO: 18343 - DNA, 32 bp, Artificial
  oligonucleotide probe
caccggtcagcggggtgtccgcaggtccgcct

SEQ ID NO: 18344 - DNA, 32 bp, Artificial
  oligonucleotide probe
actgcggacgaggcctgtccgcaggtccgcct

SEQ ID NO: 18345 - DNA, 32 bp, Artificial
  oligonucleotide probe
gggtggaacgaggcgagcagcgagcgagggaa

SEQ ID NO: 18346 - DNA, 32 bp, Artificial
  oligonucleotide probe
gcaggtggtggcgagcgcagcgagcgagggaa

SEQ ID NO: 18347 - DNA, 32 bp, Artificial
  oligonucleotide probe
caccggtcagcggggtgagcgggtgtggagcg

SEQ ID NO: 18348 - DNA, 32 bp, Artificial
  oligonucleotide probe
acgcagcggggtgacggagcgggtgtggagcg

SEQ ID NO: 18349 - DNA, 32 bp, Artificial
  oligonucleotide probe
gcaggacggacggcctgagcgggtgtggagcg

SEQ ID NO: 18350 - DNA, 32 bp, Artificial
  oligonucleotide probe
gggtagcggcgagacggagcgggtgtggagcg

SEQ ID NO: 18351 - DNA, 32 bp, Artificial
  oligonucleotide probe
gtccgggtcaggcagggtccgcaggtccgcct

SEQ ID NO: 18352 - DNA, 32 bp, Artificial
  oligonucleotide probe
cggagagcgcgagcctgtccgcaggtccgcct

SEQ ID NO: 18353 - DNA, 32 bp, Artificial
  oligonucleotide probe
cggatggcccaagggtgtccccaaagcggcag

SEQ ID NO: 18354 - DNA, 32 bp, Artificial
  oligonucleotide probe
gggtacgcgacgcgaggtccccaaagcggcag

SEQ ID NO: 18355 - DNA, 32 bp, Artificial
  oligonucleotide probe
gagcgagcagcgggtcgagccgagtggcgtcc

SEQ ID NO: 18356 - DNA, 32 bp, Artificial
  oligonucleotide probe
caggacgctggccctcgagccgagtggcgtcc

SEQ ID NO: 18357 - DNA, 32 bp, Artificial
  oligonucleotide probe
cgagcggaggtcccaacggatgctgcgagcag

SEQ ID NO: 18358 - DNA, 32 bp, Artificial
  oligonucleotide probe
cgaggacgccaaacgccggatgctgcgagcag

SEQ ID NO: 18359 - DNA, 32 bp, Artificial
  oligonucleotide probe
cagggcgagtccgacggagcgggtgtggagcg

SEQ ID NO: 18360 - DNA, 32 bp, Artificial
  oligonucleotide probe
gagcgacgcgagagcggagcgggtgtggagcg

SEQ ID NO: 18361 - DNA, 32 bp, Artificial
  oligonucleotide probe
gtgggggtgcagggaagacgagcgcaccgcag

SEQ ID NO: 18362 - DNA, 32 bp, Artificial
  oligonucleotide probe
ggtcgcaggcgagggtgacgagcgcaccgcag

SEQ ID NO: 18363 - DNA, 32 bp, Artificial
  oligonucleotide probe
gtgggggtgcagggaaagcgcctcgacgggaa

SEQ ID NO: 18364 - DNA, 32 bp, Artificial
  oligonucleotide probe
ggtcgcaggcgagggtagcgcctcgacgggaa

SEQ ID NO: 18365 - DNA, 32 bp, Artificial
  oligonucleotide probe
caccggtcagcggggtgtgggcctcctcccaa

SEQ ID NO: 18366 - DNA, 32 bp, Artificial
  oligonucleotide probe
actgcggacgaggcctgtgggcctcctcccaa

SEQ ID NO: 18367 - DNA, 32 bp, Artificial
  oligonucleotide probe
gacggagcacgccggagacgagcgcaccgcag

SEQ ID NO: 18368 - DNA, 32 bp, Artificial
  oligonucleotide probe
cggagcctgagcgtgggacgagcgcaccgcag

SEQ ID NO: 18369 - DNA, 32 bp, Artificial
  oligonucleotide probe
caccagcgagacgcgagcgaacgccctccagg

SEQ ID NO: 18370 - DNA, 32 bp, Artificial
  oligonucleotide probe
agcgcaccgacgacgcgcgaacgccctccagg

SEQ ID NO: 18371 - DNA, 32 bp, Artificial
  oligonucleotide probe
acgccaggcgaggtgggcgacacccggaacgc

SEQ ID NO: 18372 - DNA, 32 bp, Artificial
  oligonucleotide probe
caggggaagggtcggagcgacacccggaacgc

SEQ ID NO: 18373 - DNA, 32 bp, Artificial
  oligonucleotide probe
cggagagcgcgagcctgtccccaaagcggcag

SEQ ID NO: 18374 - DNA, 32 bp, Artificial
  oligonucleotide probe
gcctcaggacgcacgcgtccccaaagcggcag

SEQ ID NO: 18375 - DNA, 32 bp, Artificial
  oligonucleotide probe
gtggcggaggtcggaaagcgcctcgacgggaa

SEQ ID NO: 18376 - DNA, 32 bp, Artificial
  oligonucleotide probe
cctctggctggcccaaagcgcctcgacgggaa

SEQ ID NO: 18377 - DNA, 32 bp, Artificial
  oligonucleotide probe
cgagcaccgagccggacggagacgcagggggt

SEQ ID NO: 18378 - DNA, 32 bp, Artificial
  oligonucleotide probe
cctccggacctcacgccggagacgcagggggt

SEQ ID NO: 18379 - DNA, 32 bp, Artificial
  oligonucleotide probe
ggaaagcggcctggaaagcgcctcgacgggaa

SEQ ID NO: 18380 - DNA, 32 bp, Artificial
  oligonucleotide probe
gagcggtctggcggaaagcgcctcgacgggaa

SEQ ID NO: 18381 - DNA, 32 bp, Artificial
  oligonucleotide probe
tggcaccagcaggggtgagccgagtggcgtcc

SEQ ID NO: 18382 - DNA, 32 bp, Artificial
  oligonucleotide probe
gagcacgcgggtgcctgagccgagtggcgtcc

SEQ ID NO: 18383 - DNA, 32 bp, Artificial
  oligonucleotide probe
tggcgcctgtccgtgggcgacacccggaacgc

SEQ ID NO: 18384 - DNA, 32 bp, Artificial
  oligonucleotide probe
gtgggggtgcagggaagcgacacccggaacgc

SEQ ID NO: 18385 - DNA, 32 bp, Artificial
  oligonucleotide probe
caggacgctggccctcgagcgggtgtggagcg

SEQ ID NO: 18386 - DNA, 32 bp, Artificial
  oligonucleotide probe
cctcgtggcggacggagagcgggtgtggagcg

SEQ ID NO: 18387 - DNA, 32 bp, Artificial
  oligonucleotide probe
cagggtgggcgagcgagtgggcctcctcccaa

SEQ ID NO: 18388 - DNA, 32 bp, Artificial
  oligonucleotide probe
acgcccaacagggagcgtgggcctcctcccaa

SEQ ID NO: 18389 - DNA, 32 bp, Artificial
  oligonucleotide probe
cggacacctggccggaagcgcaggagacgcct

SEQ ID NO: 18390 - DNA, 32 bp, Artificial
  oligonucleotide probe
gagcgacgcgagagcgagcgcaggagacgcct

SEQ ID NO: 18391 - DNA, 32 bp, Artificial
  oligonucleotide probe
gacggagcacgccggagtgggcctcctcccaa

SEQ ID NO: 18392 - DNA, 32 bp, Artificial
  oligonucleotide probe
cggagcctgagcgtgggtgggcctcctcccaa

SEQ ID NO: 18393 - DNA, 32 bp, Artificial
  oligonucleotide probe
acgcccaacagggagcgcgacacccggaacgc

SEQ ID NO: 18394 - DNA, 32 bp, Artificial
  oligonucleotide probe
acgccctcaccagcgagcgacacccggaacgc

SEQ ID NO: 18395 - DNA, 32 bp, Artificial
  oligonucleotide probe
cgagcggaggtcccaagcgaacgccctccagg

SEQ ID NO: 18396 - DNA, 32 bp, Artificial
  oligonucleotide probe
cgaggacgccaaacgcgcgaacgccctccagg

SEQ ID NO: 18397 - DNA, 32 bp, Artificial
  oligonucleotide probe
gtggccaatcacgcgacggatgctgcgagcag

SEQ ID NO: 18398 - DNA, 32 bp, Artificial
  oligonucleotide probe
agcgcaccgacgacgccggatgctgcgagcag

SEQ ID NO: 18399 - DNA, 32 bp, Artificial
  oligonucleotide probe
cagggcgagtccgacggtgggcctcctcccaa

SEQ ID NO: 18400 - DNA, 32 bp, Artificial
  oligonucleotide probe
gagcgacgcgagagcggtgggcctcctcccaa

SEQ ID NO: 18401 - DNA, 32 bp, Artificial
  oligonucleotide probe
cggacacctggccggacggagacgcagggggt

SEQ ID NO: 18402 - DNA, 32 bp, Artificial
  oligonucleotide probe
ggtcgcgacacctggccggagacgcagggggt

SEQ ID NO: 18403 - DNA, 32 bp, Artificial
  oligonucleotide probe
tggcggtcgcctcgaggcgacacccggaacgc

SEQ ID NO: 18404 - DNA, 32 bp, Artificial
  oligonucleotide probe
cggagcgagtggggaagcgacacccggaacgc

SEQ ID NO: 18405 - DNA, 32 bp, Artificial
  oligonucleotide probe
acgccctcaccagcgaacgctgctgcgaacca

SEQ ID NO: 18406 - DNA, 32 bp, Artificial
  oligonucleotide probe
cctcgtggcggacggaacgctgctgcgaacca

SEQ ID NO: 18407 - DNA, 32 bp, Artificial
  oligonucleotide probe
cggagcctgagcgtggacgctgctgcgaacca

SEQ ID NO: 18408 - DNA, 32 bp, Artificial
  oligonucleotide probe
cggagagcgcgagcctacgctgctgcgaacca

SEQ ID NO: 18409 - DNA, 32 bp, Artificial
  oligonucleotide probe
cagggcgagtccgacgagcgcctcgacgggaa

SEQ ID NO: 18410 - DNA, 32 bp, Artificial
  oligonucleotide probe
gagcgacgcgagagcgagcgcctcgacgggaa

SEQ ID NO: 18411 - DNA, 32 bp, Artificial
  oligonucleotide probe
accacggaagcgcggagcgacacccggaacgc

SEQ ID NO: 18412 - DNA, 32 bp, Artificial
  oligonucleotide probe
gtgggacgacgcgcgagcgacacccggaacgc

SEQ ID NO: 18413 - DNA, 32 bp, Artificial
  oligonucleotide probe
gagcgagcagcgggtcgcagcgagcgagggaa

SEQ ID NO: 18414 - DNA, 32 bp, Artificial
  oligonucleotide probe
tggcacgcgagccagggcagcgagcgagggaa

SEQ ID NO: 18415 - DNA, 32 bp, Artificial
  oligonucleotide probe
gtgggggtgcagggaagtccgcaggtccgcct

SEQ ID NO: 18416 - DNA, 32 bp, Artificial
  oligonucleotide probe
ggtcgcaggcgagggtgtccgcaggtccgcct

SEQ ID NO: 18417 - DNA, 32 bp, Artificial
  oligonucleotide probe
caccagcgagacgcgagcagcgagcgagggaa

SEQ ID NO: 18418 - DNA, 32 bp, Artificial
  oligonucleotide probe
cggagcaggagcggaagcagcgagcgagggaa

SEQ ID NO: 18419 - DNA, 32 bp, Artificial
  oligonucleotide probe
gcagcggagcctgagcgcagcgagcgagggaa

SEQ ID NO: 18420 - DNA, 32 bp, Artificial
  oligonucleotide probe
acgcaccagtcccggagcagcgagcgagggaa

SEQ ID NO: 18421 - DNA, 32 bp, Artificial
  oligonucleotide probe
cggagagcgcgagcctcggatgctgcgagcag

SEQ ID NO: 18422 - DNA, 32 bp, Artificial
  oligonucleotide probe
tggcaccagcaggggtcggatgctgcgagcag

SEQ ID NO: 18423 - DNA, 32 bp, Artificial
  oligonucleotide probe
gcagcctctggccgaggagccgagtggcgtcc

SEQ ID NO: 18424 - DNA, 32 bp, Artificial
  oligonucleotide probe
gcagcaccagcgtggcgagccgagtggcgtcc

SEQ ID NO: 18425 - DNA, 32 bp, Artificial
  oligonucleotide probe
tcacgccttggccaccagcgcctcgacgggaa

SEQ ID NO: 18426 - DNA, 32 bp, Artificial
  oligonucleotide probe
caccgcgaggtcacgcagcgcctcgacgggaa

SEQ ID NO: 18427 - DNA, 32 bp, Artificial
  oligonucleotide probe
tggcgcctgtccgtggtcaccggagccttggc

SEQ ID NO: 18428 - DNA, 32 bp, Artificial
  oligonucleotide probe
gtggcgagcctcgggttcaccggagccttggc

SEQ ID NO: 18429 - DNA, 32 bp, Artificial
  oligonucleotide probe
cagggcagggtcgggtgcgaacgccctccagg

SEQ ID NO: 18430 - DNA, 32 bp, Artificial
  oligonucleotide probe
gacggagcacgccggagcgaacgccctccagg

SEQ ID NO: 18431 - DNA, 32 bp, Artificial
  oligonucleotide probe
gtgggacgacgcgcgaagcgcctcgacgggaa

SEQ ID NO: 18432 - DNA, 32 bp, Artificial
  oligonucleotide probe
gtccgggtcaggcaggagcgcctcgacgggaa

SEQ ID NO: 18433 - DNA, 32 bp, Artificial
  oligonucleotide probe
cgagcggaggtcccaagcagcgagcgagggaa

SEQ ID NO: 18434 - DNA, 32 bp, Artificial
  oligonucleotide probe
cggatggcccaagggtgcagcgagcgagggaa

SEQ ID NO: 18435 - DNA, 32 bp, Artificial
  oligonucleotide probe
cgaggacgccaaacgcgtccgcaggtccgcct

SEQ ID NO: 18436 - DNA, 32 bp, Artificial
  oligonucleotide probe
gggtacgcgacgcgaggtccgcaggtccgcct

SEQ ID NO: 18437 - DNA, 32 bp, Artificial
  oligonucleotide probe
cagggtgggcgagcgagcgaacgccctccagg

SEQ ID NO: 18438 - DNA, 32 bp, Artificial
  oligonucleotide probe
gagcgagcagcgggtcgcgaacgccctccagg

SEQ ID NO: 18439 - DNA, 32 bp, Artificial
  oligonucleotide probe
cgagcaggcgaggcaggacgagcgcaccgcag

SEQ ID NO: 18440 - DNA, 32 bp, Artificial
  oligonucleotide probe
gcctcaggacgcacgcgacgagcgcaccgcag

SEQ ID NO: 18441 - DNA, 32 bp, Artificial
  oligonucleotide probe
cgagcaccgagccggagcagcgagcgagggaa

SEQ ID NO: 18442 - DNA, 32 bp, Artificial
  oligonucleotide probe
cctccggacctcacgcgcagcgagcgagggaa

SEQ ID NO: 18443 - DNA, 32 bp, Artificial
  oligonucleotide probe
acgccaccgcctgacggtccgcaggtccgcct

SEQ ID NO: 18444 - DNA, 32 bp, Artificial
  oligonucleotide probe
tggcaccagcaggggtgtccgcaggtccgcct

SEQ ID NO: 18445 - DNA, 32 bp, Artificial
  oligonucleotide probe
agcggtccgcgagagcgcagcgagcgagggaa

SEQ ID NO: 18446 - DNA, 32 bp, Artificial
  oligonucleotide probe
acgcggaagacgtggcgcagcgagcgagggaa

SEQ ID NO: 18447 - DNA, 32 bp, Artificial
  oligonucleotide probe
gacggcgagtgggcaggcgacacccggaacgc

SEQ ID NO: 18448 - DNA, 32 bp, Artificial
  oligonucleotide probe
acgcgcctgacgcctcgcgacacccggaacgc

SEQ ID NO: 18449 - DNA, 32 bp, Artificial
  oligonucleotide probe
gcgacagggcctgcctcggagacgcagggggt

SEQ ID NO: 18450 - DNA, 32 bp, Artificial
  oligonucleotide probe
cggagcgagtggggaacggagacgcagggggt

SEQ ID NO: 18451 - DNA, 32 bp, Artificial
  oligonucleotide probe
cacccgagagcggtgggtccgcaggtccgcct

SEQ ID NO: 18452 - DNA, 32 bp, Artificial
  oligonucleotide probe
gcgagtcccggaagcggtccgcaggtccgcct

SEQ ID NO: 18453 - DNA, 32 bp, Artificial
  oligonucleotide probe
caccgggtggtcagcggcagcgagcgagggaa

SEQ ID NO: 18454 - DNA, 32 bp, Artificial
  oligonucleotide probe
ggtcgacgacgccgaggcagcgagcgagggaa

SEQ ID NO: 18455 - DNA, 32 bp, Artificial
  oligonucleotide probe
agcggcgagagcgtccgtgggcctcctcccaa

SEQ ID NO: 18456 - DNA, 32 bp, Artificial
  oligonucleotide probe
gacgcaccagcgcgaggtgggcctcctcccaa

SEQ ID NO: 18457 - DNA, 32 bp, Artificial
  oligonucleotide probe
gtccgggtcaggcagggcgaacgccctccagg

SEQ ID NO: 18458 - DNA, 32 bp, Artificial
  oligonucleotide probe
cgagcaggcgaggcaggcgaacgccctccagg

SEQ ID NO: 18459 - DNA, 32 bp, Artificial
  oligonucleotide probe
caggggaagggtcggaagcgcctcgacgggaa

SEQ ID NO: 18460 - DNA, 32 bp, Artificial
  oligonucleotide probe
gtccgagcagcggcctagcgcctcgacgggaa

SEQ ID NO: 18461 - DNA, 32 bp, Artificial
  oligonucleotide probe
accatggcacgcgacgagcgcctcgacgggaa

SEQ ID NO: 18462 - DNA, 32 bp, Artificial
  oligonucleotide probe
acgccaggcgaggtggagcgcctcgacgggaa

SEQ ID NO: 18463 - DNA, 32 bp, Artificial
  oligonucleotide probe
ggaacggaagcggagcgcgacacccggaacgc

SEQ ID NO: 18464 - DNA, 32 bp, Artificial
  oligonucleotide probe
cggacacctggccggagcgacacccggaacgc

SEQ ID NO: 18465 - DNA, 32 bp, Artificial
  oligonucleotide probe
agcgcaccgacgacgcagcgcctcgacgggaa

SEQ ID NO: 18466 - DNA, 32 bp, Artificial
  oligonucleotide probe
gcgagtggcagggcctagcgcctcgacgggaa

SEQ ID NO: 18467 - DNA, 32 bp, Artificial
  oligonucleotide probe
cggagagcgcgagcctagcgcctcgacgggaa

SEQ ID NO: 18468 - DNA, 32 bp, Artificial
  oligonucleotide probe
gcaggcagccaatggcagcgcctcgacgggaa

SEQ ID NO: 18469 - DNA, 32 bp, Artificial
  oligonucleotide probe
tgctcggatgctgcgatcaccggagccttggc

SEQ ID NO: 18470 - DNA, 32 bp, Artificial
  oligonucleotide probe
gagcgcagccaagccttcaccggagccttggc

SEQ ID NO: 18471 - DNA, 32 bp, Artificial
  oligonucleotide probe
caccgcctcagggacggagcgggtgtggagcg

SEQ ID NO: 18472 - DNA, 32 bp, Artificial
  oligonucleotide probe
gcgacctcacgcgcaggagcgggtgtggagcg

SEQ ID NO: 18473 - DNA, 32 bp, Artificial
  oligonucleotide probe
tggcgcctgtccgtgggtccccaaagcggcag

SEQ ID NO: 18474 - DNA, 32 bp, Artificial
  oligonucleotide probe
gtggcgagcctcgggtgtccccaaagcggcag

SEQ ID NO: 18475 - DNA, 32 bp, Artificial
  oligonucleotide probe
gcctgtgggtccgcgaagcgcctcgacgggaa

SEQ ID NO: 18476 - DNA, 32 bp, Artificial
  oligonucleotide probe
cctcgcctcgaggagcagcgcctcgacgggaa

SEQ ID NO: 18477 - DNA, 32 bp, Artificial
  oligonucleotide probe
acgccaccgcctgacgacgctgctgcgaacca

SEQ ID NO: 18478 - DNA, 32 bp, Artificial
  oligonucleotide probe
cggatggcccaagggtacgctgctgcgaacca

SEQ ID NO: 18479 - DNA, 32 bp, Artificial
  oligonucleotide probe
gcgacagggcctgcctgagcgggtgtggagcg

SEQ ID NO: 18480 - DNA, 32 bp, Artificial
  oligonucleotide probe
cggagcgagtggggaagagcgggtgtggagcg

SEQ ID NO: 18481 - DNA, 32 bp, Artificial
  oligonucleotide probe
gtggccaatcacgcgagacgagcgcaccgcag

SEQ ID NO: 18482 - DNA, 32 bp, Artificial
  oligonucleotide probe
agcgcaccgacgacgcgacgagcgcaccgcag

SEQ ID NO: 18483 - DNA, 32 bp, Artificial
  oligonucleotide probe
cacccgagagcggtggcggagacgcagggggt

SEQ ID NO: 18484 - DNA, 32 bp, Artificial
  oligonucleotide probe
gcgagtcccggaagcgcggagacgcagggggt

SEQ ID NO: 18485 - DNA, 32 bp, Artificial
  oligonucleotide probe
cagggcagggtcgggtgagcgggtgtggagcg

SEQ ID NO: 18486 - DNA, 32 bp, Artificial
  oligonucleotide probe
gacggagcacgccggagagcgggtgtggagcg

SEQ ID NO: 18487 - DNA, 32 bp, Artificial
  oligonucleotide probe
cgagcggaggtcccaaagcgcaggagacgcct

SEQ ID NO: 18488 - DNA, 32 bp, Artificial
  oligonucleotide probe
cggatggcccaagggtagcgcaggagacgcct

SEQ ID NO: 18489 - DNA, 32 bp, Artificial
  oligonucleotide probe
actgcggacgaggcctcggatgctgcgagcag

SEQ ID NO: 18490 - DNA, 32 bp, Artificial
  oligonucleotide probe
caccgcctcagggacgcggatgctgcgagcag

SEQ ID NO: 18491 - DNA, 32 bp, Artificial
  oligonucleotide probe
cgagcggaggtcccaaacgctgctgcgaacca

SEQ ID NO: 18492 - DNA, 32 bp, Artificial
  oligonucleotide probe
cgaggacgccaaacgcacgctgctgcgaacca

SEQ ID NO: 18493 - DNA, 32 bp, Artificial
  oligonucleotide probe
gcgacagggcctgccttcaccggagccttggc

SEQ ID NO: 18494 - DNA, 32 bp, Artificial
  oligonucleotide probe
cggagcgagtggggaatcaccggagccttggc

SEQ ID NO: 18495 - DNA, 32 bp, Artificial
  oligonucleotide probe
cggacaggacgctggcagcgcctcgacgggaa

SEQ ID NO: 18496 - DNA, 32 bp, Artificial
  oligonucleotide probe
acgcgagcgggtgcagagcgcctcgacgggaa

SEQ ID NO: 18497 - DNA, 32 bp, Artificial
  oligonucleotide probe
cgaggacgccaaacgcagcgcaggagacgcct

SEQ ID NO: 18498 - DNA, 32 bp, Artificial
  oligonucleotide probe
gggtacgcgacgcgagagcgcaggagacgcct

SEQ ID NO: 18499 - DNA, 32 bp, Artificial
  oligonucleotide probe
accacggaagcgcggagcagcgagcgagggaa

SEQ ID NO: 18500 - DNA, 32 bp, Artificial
  oligonucleotide probe
gtgggacgacgcgcgagcagcgagcgagggaa

SEQ ID NO: 18501 - DNA, 32 bp, Artificial
  oligonucleotide probe
cgagcggaggtcccaagacgagcgcaccgcag

SEQ ID NO: 18502 - DNA, 32 bp, Artificial
  oligonucleotide probe
agcggcgagagcgtccgacgagcgcaccgcag

SEQ ID NO: 18503 - DNA, 32 bp, Artificial
  oligonucleotide probe
agcgccaatcacgggtgcgacacccggaacgc

SEQ ID NO: 18504 - DNA, 32 bp, Artificial
  oligonucleotide probe
caggcacccaggcggagcgacacccggaacgc

SEQ ID NO: 18505 - DNA, 32 bp, Artificial
  oligonucleotide probe
agcgcaccgacgacgcgagccgagtggcgtcc

SEQ ID NO: 18506 - DNA, 32 bp, Artificial
  oligonucleotide probe
gagcgcagccaagcctgagccgagtggcgtcc

SEQ ID NO: 18507 - DNA, 32 bp, Artificial
  oligonucleotide probe
agcgcaccgacgacgcgcagcgagcgagggaa

SEQ ID NO: 18508 - DNA, 32 bp, Artificial
  oligonucleotide probe
cagggtgggcgagcgagcagcgagcgagggaa

SEQ ID NO: 18509 - DNA, 32 bp, Artificial
  oligonucleotide probe
cggagcaggagcggaagcgacacccggaacgc

SEQ ID NO: 18510 - DNA, 32 bp, Artificial
  oligonucleotide probe
cagggtgggcgagcgagcgacacccggaacgc

SEQ ID NO: 18511 - DNA, 32 bp, Artificial
  oligonucleotide probe
gggtagcggcgagacgcggagacgcagggggt

SEQ ID NO: 18512 - DNA, 32 bp, Artificial
  oligonucleotide probe
cagggcgagtccgacgcggagacgcagggggt

SEQ ID NO: 18513 - DNA, 32 bp, Artificial
  oligonucleotide probe
gtgggggtgcagggaaggtcgagctggcgcag

SEQ ID NO: 18514 - DNA, 32 bp, Artificial
  oligonucleotide probe
ggtcgcaggcgagggtggtcgagctggcgcag

SEQ ID NO: 18515 - DNA, 32 bp, Artificial
  oligonucleotide probe
cgaggacgccaaacgcgcagcgagcgagggaa

SEQ ID NO: 18516 - DNA, 32 bp, Artificial
  oligonucleotide probe
gggtacgcgacgcgaggcagcgagcgagggaa

SEQ ID NO: 18517 - DNA, 32 bp, Artificial
  oligonucleotide probe
gtggcaggagcgacgcgcagcgagcgagggaa

SEQ ID NO: 18518 - DNA, 32 bp, Artificial
  oligonucleotide probe
gacggagcacgccggagcagcgagcgagggaa

SEQ ID NO: 18519 - DNA, 32 bp, Artificial
  oligonucleotide probe
gggtggaacgaggcgagagccgagtggcgtcc

SEQ ID NO: 18520 - DNA, 32 bp, Artificial
  oligonucleotide probe
gcaggtggtggcgagcgagccgagtggcgtcc

SEQ ID NO: 18521 - DNA, 32 bp, Artificial
  oligonucleotide probe
tgctcggatgctgcgagagcgggtgtggagcg

SEQ ID NO: 18522 - DNA, 32 bp, Artificial
  oligonucleotide probe
gagcgcagccaagcctgagcgggtgtggagcg

SEQ ID NO: 18523 - DNA, 32 bp, Artificial
  oligonucleotide probe
gcgacagggcctgcctagcgcaggagacgcct

SEQ ID NO: 18524 - DNA, 32 bp, Artificial
  oligonucleotide probe
agcggcgagagcgtccagcgcaggagacgcct

SEQ ID NO: 18525 - DNA, 32 bp, Artificial
  oligonucleotide probe
gagcgcagccaagcctgcgaacgccctccagg

SEQ ID NO: 18526 - DNA, 32 bp, Artificial
  oligonucleotide probe
tggcaccagcaggggtgcgaacgccctccagg

SEQ ID NO: 18527 - DNA, 32 bp, Artificial
  oligonucleotide probe
tggcgcctgtccgtgggtgggcctcctcccaa

SEQ ID NO: 18528 - DNA, 32 bp, Artificial
  oligonucleotide probe
gtggcgagcctcgggtgtgggcctcctcccaa

SEQ ID NO: 18529 - DNA, 32 bp, Artificial
  oligonucleotide probe
ccaaagcgggaatggcagcgcctcgacgggaa

SEQ ID NO: 18530 - DNA, 32 bp, Artificial
  oligonucleotide probe
cctccgaggacgcggaagcgcctcgacgggaa

SEQ ID NO: 18531 - DNA, 32 bp, Artificial
  oligonucleotide probe
cggagcaggagcggaatcaccggagccttggc

SEQ ID NO: 18532 - DNA, 32 bp, Artificial
  oligonucleotide probe
ggtcgcctgtccagcgtcaccggagccttggc

SEQ ID NO: 18533 - DNA, 32 bp, Artificial
  oligonucleotide probe
gcctcaggacgcacgcacgctgctgcgaacca

SEQ ID NO: 18534 - DNA, 32 bp, Artificial
  oligonucleotide probe
caccagcgagacgcgaacgctgctgcgaacca

SEQ ID NO: 18535 - DNA, 32 bp, Artificial
  oligonucleotide probe
acgccaccgcctgacggcagcgagcgagggaa

SEQ ID NO: 18536 - DNA, 32 bp, Artificial
  oligonucleotide probe
gagcacgcgggtgcctgcagcgagcgagggaa

SEQ ID NO: 18537 - DNA, 32 bp, Artificial
  oligonucleotide probe
ccaaagcgggaatggcgcgacacccggaacgc

SEQ ID NO: 18538 - DNA, 32 bp, Artificial
  oligonucleotide probe
cctccgaggacgcggagcgacacccggaacgc

SEQ ID NO: 18539 - DNA, 32 bp, Artificial
  oligonucleotide probe
gtggccaatcacgcgaagcgcaggagacgcct

SEQ ID NO: 18540 - DNA, 32 bp, Artificial
  oligonucleotide probe
agcgcaccgacgacgcagcgcaggagacgcct

SEQ ID NO: 18541 - DNA, 32 bp, Artificial
  oligonucleotide probe
gggttggccgagtggcgagccgagtggcgtcc

SEQ ID NO: 18542 - DNA, 32 bp, Artificial
  oligonucleotide probe
tggcgggtgacggtgggagccgagtggcgtcc

SEQ ID NO: 18543 - DNA, 32 bp, Artificial
  oligonucleotide probe
cgagcggaggtcccaacggagacgcagggggt

SEQ ID NO: 18544 - DNA, 32 bp, Artificial
  oligonucleotide probe
cgaggacgccaaacgccggagacgcagggggt

SEQ ID NO: 18545 - DNA, 32 bp, Artificial
  oligonucleotide probe
gagcgagcagcgggtcgacgagcgcaccgcag

SEQ ID NO: 18546 - DNA, 32 bp, Artificial
  oligonucleotide probe
acgccctcaccagcgagacgagcgcaccgcag

SEQ ID NO: 18547 - DNA, 32 bp, Artificial
  oligonucleotide probe
cgagcggaggtcccaagagcgggtgtggagcg

SEQ ID NO: 18548 - DNA, 32 bp, Artificial
  oligonucleotide probe
cgaggacgccaaacgcgagcgggtgtggagcg

SEQ ID NO: 18549 - DNA, 32 bp, Artificial
  oligonucleotide probe
tgctcggatgctgcgagtccgcaggtccgcct

SEQ ID NO: 18550 - DNA, 32 bp, Artificial
  oligonucleotide probe
gagcgcagccaagcctgtccgcaggtccgcct

SEQ ID NO: 18551 - DNA, 32 bp, Artificial
  oligonucleotide probe
tggcggtcgcctcgaggcagcgagcgagggaa

SEQ ID NO: 18552 - DNA, 32 bp, Artificial
  oligonucleotide probe
cggagcgagtggggaagcagcgagcgagggaa

SEQ ID NO: 18553 - DNA, 32 bp, Artificial
  oligonucleotide probe
gcgacctcacgcgcaggcgacacccggaacgc

SEQ ID NO: 18554 - DNA, 32 bp, Artificial
  oligonucleotide probe
ggtcgcctgtccagcggcgacacccggaacgc

SEQ ID NO: 18555 - DNA, 32 bp, Artificial
  oligonucleotide probe
cgagcaggcgaggcagtcaccggagccttggc

SEQ ID NO: 18556 - DNA, 32 bp, Artificial
  oligonucleotide probe
gcctcaggacgcacgctcaccggagccttggc

SEQ ID NO: 18557 - DNA, 32 bp, Artificial
  oligonucleotide probe
ggaacggaagcggagcagcgcaggagacgcct

SEQ ID NO: 18558 - DNA, 32 bp, Artificial
  oligonucleotide probe
cagggcgagtccgacgagcgcaggagacgcct

SEQ ID NO: 18559 - DNA, 32 bp, Artificial
  oligonucleotide probe
agcggcgagagcgtccgtccgcaggtccgcct

SEQ ID NO: 18560 - DNA, 32 bp, Artificial
  oligonucleotide probe
gacgcaccagcgcgaggtccgcaggtccgcct

SEQ ID NO: 18561 - DNA, 32 bp, Artificial
  oligonucleotide probe
cgaggacgccaaacgcagcgcctcgacgggaa

SEQ ID NO: 18562 - DNA, 32 bp, Artificial
  oligonucleotide probe
gggtacgcgacgcgagagcgcctcgacgggaa

SEQ ID NO: 18563 - DNA, 32 bp, Artificial
  oligonucleotide probe
gggtacgcgacgcgaggagcgggtgtggagcg

SEQ ID NO: 18564 - DNA, 32 bp, Artificial
  oligonucleotide probe
agcggacggcaggagcgagcgggtgtggagcg

SEQ ID NO: 18565 - DNA, 32 bp, Artificial
  oligonucleotide probe
cagggcagggtcgggtgacgagcgcaccgcag

SEQ ID NO: 18566 - DNA, 32 bp, Artificial
  oligonucleotide probe
agcggacggcaggagcgacgagcgcaccgcag

SEQ ID NO: 18567 - DNA, 32 bp, Artificial
  oligonucleotide probe
gcaggacggacggcctcggagacgcagggggt

SEQ ID NO: 18568 - DNA, 32 bp, Artificial
  oligonucleotide probe
gcgacctcacgcgcagcggagacgcagggggt

SEQ ID NO: 18569 - DNA, 32 bp, Artificial
  oligonucleotide probe
tgctcggatgctgcgagcgaacgccctccagg

SEQ ID NO: 18570 - DNA, 32 bp, Artificial
  oligonucleotide probe
agcggcgagagcgtccgcgaacgccctccagg

SEQ ID NO: 18571 - DNA, 32 bp, Artificial
  oligonucleotide probe
gacgcaggcggagggtgcagcgagcgagggaa

SEQ ID NO: 18572 - DNA, 32 bp, Artificial
  oligonucleotide probe
acgcggtccaccgtgggcagcgagcgagggaa

SEQ ID NO: 18573 - DNA, 32 bp, Artificial
  oligonucleotide probe
gtgggggtgcagggaacggagacgcagggggt

SEQ ID NO: 18574 - DNA, 32 bp, Artificial
  oligonucleotide probe
ggtcgcaggcgagggtcggagacgcagggggt

SEQ ID NO: 18575 - DNA, 32 bp, Artificial
  oligonucleotide probe
cggacaggacgctggcgagccgagtggcgtcc

SEQ ID NO: 18576 - DNA, 32 bp, Artificial
  oligonucleotide probe
acgcgagcgggtgcaggagccgagtggcgtcc

SEQ ID NO: 18577 - DNA, 32 bp, Artificial
  oligonucleotide probe
gacggcgagtgggcaggagccgagtggcgtcc

SEQ ID NO: 18578 - DNA, 32 bp, Artificial
  oligonucleotide probe
acgcgcctgacgcctcgagccgagtggcgtcc

SEQ ID NO: 18579 - DNA, 32 bp, Artificial
  oligonucleotide probe
ggaacggaagcggagcgagccgagtggcgtcc

SEQ ID NO: 18580 - DNA, 32 bp, Artificial
  oligonucleotide probe
cggacacctggccggagagccgagtggcgtcc

SEQ ID NO: 18581 - DNA, 32 bp, Artificial
  oligonucleotide probe
gtggccaatcacgcgacggagacgcagggggt

SEQ ID NO: 18582 - DNA, 32 bp, Artificial
  oligonucleotide probe
agcgcaccgacgacgccggagacgcagggggt

SEQ ID NO: 18583 - DNA, 32 bp, Artificial
  oligonucleotide probe
tgctcggatgctgcgagcgacacccggaacgc

SEQ ID NO: 18584 - DNA, 32 bp, Artificial
  oligonucleotide probe
tggcacgcgagccagggcgacacccggaacgc

SEQ ID NO: 18585 - DNA, 32 bp, Artificial
  oligonucleotide probe
acgcagcggggtgacggacgagcgcaccgcag

SEQ ID NO: 18586 - DNA, 32 bp, Artificial
  oligonucleotide probe
caccgcctcagggacggacgagcgcaccgcag

SEQ ID NO: 18587 - DNA, 32 bp, Artificial
  oligonucleotide probe
gggtacgcgacgcgaggtgggcctcctcccaa

SEQ ID NO: 18588 - DNA, 32 bp, Artificial
  oligonucleotide probe
tggcaccagcaggggtgtgggcctcctcccaa

SEQ ID NO: 18589 - DNA, 32 bp, Artificial
  oligonucleotide probe
gagcacgcgggtgcctacgctgctgcgaacca

SEQ ID NO: 18590 - DNA, 32 bp, Artificial
  oligonucleotide probe
ggaacggaagcggagcacgctgctgcgaacca

SEQ ID NO: 18591 - DNA, 32 bp, Artificial
  oligonucleotide probe
gagcgagcagcgggtcgagcgggtgtggagcg

SEQ ID NO: 18592 - DNA, 32 bp, Artificial
  oligonucleotide probe
acgccctcaccagcgagagcgggtgtggagcg

SEQ ID NO: 18593 - DNA, 32 bp, Artificial
  oligonucleotide probe
cagggcgagtccgacgacgctgctgcgaacca

SEQ ID NO: 18594 - DNA, 32 bp, Artificial
  oligonucleotide probe
gagcgacgcgagagcgacgctgctgcgaacca

SEQ ID NO: 18595 - DNA, 32 bp, Artificial
  oligonucleotide probe
gagcacgcgggtgccttcaccggagccttggc

SEQ ID NO: 18596 - DNA, 32 bp, Artificial
  oligonucleotide probe
ggaacggaagcggagctcaccggagccttggc

SEQ ID NO: 18597 - DNA, 32 bp, Artificial
  oligonucleotide probe
agcgcaccgacgacgcggtcgagctggcgcag

SEQ ID NO: 18598 - DNA, 32 bp, Artificial
  oligonucleotide probe
tggcaccagcaggggtggtcgagctggcgcag

SEQ ID NO: 18599 - DNA, 32 bp, Artificial
  oligonucleotide probe
cgagcaggcgaggcaggcagcgagcgagggaa

SEQ ID NO: 18600 - DNA, 32 bp, Artificial
  oligonucleotide probe
gcctcaggacgcacgcgcagcgagcgagggaa

SEQ ID NO: 18601 - DNA, 32 bp, Artificial
  oligonucleotide probe
agcggcgagagcgtccacgctgctgcgaacca

SEQ ID NO: 18602 - DNA, 32 bp, Artificial
  oligonucleotide probe
gacgcaccagcgcgagacgctgctgcgaacca

SEQ ID NO: 18603 - DNA, 32 bp, Artificial
  oligonucleotide probe
caccagcgagacgcgagtccccaaagcggcag

SEQ ID NO: 18604 - DNA, 32 bp, Artificial
  oligonucleotide probe
tggcaccagcaggggtgtccccaaagcggcag

SEQ ID NO: 18605 - DNA, 32 bp, Artificial
  oligonucleotide probe
tggcgcctgtccgtggggtcgagctggcgcag

SEQ ID NO: 18606 - DNA, 32 bp, Artificial
  oligonucleotide probe
gtggcgagcctcgggtggtcgagctggcgcag

SEQ ID NO: 18607 - DNA, 32 bp, Artificial
  oligonucleotide probe
caccggtcagcggggtagcgcaggagacgcct

SEQ ID NO: 18608 - DNA, 32 bp, Artificial
  oligonucleotide probe
actgcggacgaggcctagcgcaggagacgcct

SEQ ID NO: 18609 - DNA, 32 bp, Artificial
  oligonucleotide probe
gagcacgcgggtgcctggtcgagctggcgcag

SEQ ID NO: 18610 - DNA, 32 bp, Artificial
  oligonucleotide probe
ggaacggaagcggagcggtcgagctggcgcag

SEQ ID NO: 18611 - DNA, 32 bp, Artificial
  oligonucleotide probe
cggacacctggccggagtccgcaggtccgcct

SEQ ID NO: 18612 - DNA, 32 bp, Artificial
  oligonucleotide probe
gagcgacgcgagagcggtccgcaggtccgcct

SEQ ID NO: 18613 - DNA, 32 bp, Artificial
  oligonucleotide probe
cggagcctgagcgtggggtcgagctggcgcag

SEQ ID NO: 18614 - DNA, 32 bp, Artificial
  oligonucleotide probe
cggagagcgcgagcctggtcgagctggcgcag

SEQ ID NO: 18615 - DNA, 32 bp, Artificial
  oligonucleotide probe
cggacacctggccggaacgctgctgcgaacca

SEQ ID NO: 18616 - DNA, 32 bp, Artificial
  oligonucleotide probe
ggtcgcgacacctggcacgctgctgcgaacca

SEQ ID NO: 18617 - DNA, 32 bp, Artificial
  oligonucleotide probe
gtggcggaggtcggaagagccgagtggcgtcc

SEQ ID NO: 18618 - DNA, 32 bp, Artificial
  oligonucleotide probe
cctctggctggcccaagagccgagtggcgtcc

SEQ ID NO: 18619 - DNA, 32 bp, Artificial
  oligonucleotide probe
gtccgggtcaggcagggcagcgagcgagggaa

SEQ ID NO: 18620 - DNA, 32 bp, Artificial
  oligonucleotide probe
cggagagcgcgagcctgcagcgagcgagggaa

SEQ ID NO: 18621 - DNA, 32 bp, Artificial
  oligonucleotide probe
gtgggggtgcagggaacggatgctgcgagcag

SEQ ID NO: 18622 - DNA, 32 bp, Artificial
  oligonucleotide probe
ggtcgcaggcgagggtcggatgctgcgagcag

SEQ ID NO: 18623 - DNA, 32 bp, Artificial
  oligonucleotide probe
tcacgccttggccaccgcagcgagcgagggaa

SEQ ID NO: 18624 - DNA, 32 bp, Artificial
  oligonucleotide probe
caccgcgaggtcacgcgcagcgagcgagggaa

SEQ ID NO: 18625 - DNA, 32 bp, Artificial
  oligonucleotide probe
tggcagcgggtcgtggagcgcctcgacgggaa

SEQ ID NO: 18626 - DNA, 32 bp, Artificial
  oligonucleotide probe
gcctgggtcaccacgcagcgcctcgacgggaa

SEQ ID NO: 18627 - DNA, 32 bp, Artificial
  oligonucleotide probe
gagcgagcagcgggtccggatgctgcgagcag

SEQ ID NO: 18628 - DNA, 32 bp, Artificial
  oligonucleotide probe
acgccctcaccagcgacggatgctgcgagcag

SEQ ID NO: 18629 - DNA, 32 bp, Artificial
  oligonucleotide probe
agcggacggcaggagccggatgctgcgagcag

SEQ ID NO: 18630 - DNA, 32 bp, Artificial
  oligonucleotide probe
cggagcctgagcgtggcggatgctgcgagcag

SEQ ID NO: 18631 - DNA, 32 bp, Artificial
  oligonucleotide probe
ggaaagcggcctggaagcgacacccggaacgc

SEQ ID NO: 18632 - DNA, 32 bp, Artificial
  oligonucleotide probe
gagcggtctggcggaagcgacacccggaacgc

SEQ ID NO: 18633 - DNA, 32 bp, Artificial
  oligonucleotide probe
cgagcctcgggtgcgagagcgggtgtggagcg

SEQ ID NO: 18634 - DNA, 32 bp, Artificial
  oligonucleotide probe
actgcggacgaggcctgagcgggtgtggagcg

SEQ ID NO: 18635 - DNA, 32 bp, Artificial
  oligonucleotide probe
gcgacagggcctgcctgtccgcaggtccgcct

SEQ ID NO: 18636 - DNA, 32 bp, Artificial
  oligonucleotide probe
cggagcgagtggggaagtccgcaggtccgcct

SEQ ID NO: 18637 - DNA, 32 bp, Artificial
  oligonucleotide probe
gagcgcctcctcgagcgcagcgagcgagggaa

SEQ ID NO: 18638 - DNA, 32 bp, Artificial
  oligonucleotide probe
gtggccaatcacgcgagcagcgagcgagggaa

SEQ ID NO: 18639 - DNA, 32 bp, Artificial
  oligonucleotide probe
cggacacctggccggaggtcgagctggcgcag

SEQ ID NO: 18640 - DNA, 32 bp, Artificial
  oligonucleotide probe
ggtcgcgacacctggcggtcgagctggcgcag

SEQ ID NO: 18641 - DNA, 32 bp, Artificial
  oligonucleotide probe
acgccaccgcctgacggagcgggtgtggagcg

SEQ ID NO: 18642 - DNA, 32 bp, Artificial
  oligonucleotide probe
cggatggcccaagggtgagcgggtgtggagcg

SEQ ID NO: 18643 - DNA, 32 bp, Artificial
  oligonucleotide probe
cggagcaggagcggaagacgagcgcaccgcag

SEQ ID NO: 18644 - DNA, 32 bp, Artificial
  oligonucleotide probe
ggtcgcctgtccagcggacgagcgcaccgcag

SEQ ID NO: 18645 - DNA, 32 bp, Artificial
  oligonucleotide probe
gcaggacggacggcctagcgcaggagacgcct

SEQ ID NO: 18646 - DNA, 32 bp, Artificial
  oligonucleotide probe
gcgacctcacgcgcagagcgcaggagacgcct

SEQ ID NO: 18647 - DNA, 32 bp, Artificial
  oligonucleotide probe
agcgccaatcacgggtgagccgagtggcgtcc

SEQ ID NO: 18648 - DNA, 32 bp, Artificial
  oligonucleotide probe
caggcacccaggcggagagccgagtggcgtcc

SEQ ID NO: 18649 - DNA, 32 bp, Artificial
  oligonucleotide probe
gagcgacgcgagagcgcggatgctgcgagcag

SEQ ID NO: 18650 - DNA, 32 bp, Artificial
  oligonucleotide probe
cgagcctcgggtgcgacggatgctgcgagcag

SEQ ID NO: 18651 - DNA, 32 bp, Artificial
  oligonucleotide probe
tggcgcctgtccgtggcggatgctgcgagcag

SEQ ID NO: 18652 - DNA, 32 bp, Artificial
  oligonucleotide probe
gtggcgagcctcgggtcggatgctgcgagcag

SEQ ID NO: 18653 - DNA, 32 bp, Artificial
  oligonucleotide probe
cgagcctcgggtgcgatcaccggagccttggc

SEQ ID NO: 18654 - DNA, 32 bp, Artificial
  oligonucleotide probe
actgcggacgaggccttcaccggagccttggc

SEQ ID NO: 18655 - DNA, 32 bp, Artificial
  oligonucleotide probe
gtccgggtcaggcaggcggagacgcagggggt

SEQ ID NO: 18656 - DNA, 32 bp, Artificial
  oligonucleotide probe
cggagagcgcgagcctcggagacgcagggggt

SEQ ID NO: 18657 - DNA, 32 bp, Artificial
  oligonucleotide probe
caggcctccctcgcgatcaccggagccttggc

SEQ ID NO: 18658 - DNA, 32 bp, Artificial
  oligonucleotide probe
caccagcgagacgcgatcaccggagccttggc

SEQ ID NO: 18659 - DNA, 32 bp, Artificial
  oligonucleotide probe
gtccacgctggcgacggcgacacccggaacgc

SEQ ID NO: 18660 - DNA, 32 bp, Artificial
  oligonucleotide probe
cctcagcgcggaaccagcgacacccggaacgc

SEQ ID NO: 18661 - DNA, 32 bp, Artificial
  oligonucleotide probe
cggacacctggccggacggatgctgcgagcag

SEQ ID NO: 18662 - DNA, 32 bp, Artificial
  oligonucleotide probe
ggtcgcgacacctggccggatgctgcgagcag

SEQ ID NO: 18663 - DNA, 32 bp, Artificial
  oligonucleotide probe
cagggtgggcgagcgaagcgcaggagacgcct

SEQ ID NO: 18664 - DNA, 32 bp, Artificial
  oligonucleotide probe
acgcccaacagggagcagcgcaggagacgcct

SEQ ID NO: 18665 - DNA, 32 bp, Artificial
  oligonucleotide probe
gagcgagcagcgggtcgtccgcaggtccgcct

SEQ ID NO: 18666 - DNA, 32 bp, Artificial
  oligonucleotide probe
acgccctcaccagcgagtccgcaggtccgcct

SEQ ID NO: 18667 - DNA, 32 bp, Artificial
  oligonucleotide probe
ccaaagcgggaatggcgagccgagtggcgtcc

SEQ ID NO: 18668 - DNA, 32 bp, Artificial
  oligonucleotide probe
cctccgaggacgcggagagccgagtggcgtcc

SEQ ID NO: 18669 - DNA, 32 bp, Artificial
  oligonucleotide probe
gtccgagcagcggcctgcagcgagcgagggaa

SEQ ID NO: 18670 - DNA, 32 bp, Artificial
  oligonucleotide probe
caggagcgggaagcgagcagcgagcgagggaa

SEQ ID NO: 18671 - DNA, 32 bp, Artificial
  oligonucleotide probe
gacgcaccagcgcgaggacgagcgcaccgcag

SEQ ID NO: 18672 - DNA, 32 bp, Artificial
  oligonucleotide probe
acgccaccgcctgacggacgagcgcaccgcag

SEQ ID NO: 18673 - DNA, 32 bp, Artificial
  oligonucleotide probe
acgcagcggggtgacggtccgcaggtccgcct

SEQ ID NO: 18674 - DNA, 32 bp, Artificial
  oligonucleotide probe
caccgcctcagggacggtccgcaggtccgcct

SEQ ID NO: 18675 - DNA, 32 bp, Artificial
  oligonucleotide probe
gggtagcggcgagacgcggatgctgcgagcag

SEQ ID NO: 18676 - DNA, 32 bp, Artificial
  oligonucleotide probe
cagggcgagtccgacgcggatgctgcgagcag

SEQ ID NO: 18677 - DNA, 32 bp, Artificial
  oligonucleotide probe
gcgaagcggcgaggtcgcagcgagcgagggaa

SEQ ID NO: 18678 - DNA, 32 bp, Artificial
  oligonucleotide probe
agcgagcggtggacgcgcagcgagcgagggaa

SEQ ID NO: 18679 - DNA, 32 bp, Artificial
  oligonucleotide probe
cagggtgggcgagcgaggtcgagctggcgcag

SEQ ID NO: 18680 - DNA, 32 bp, Artificial
  oligonucleotide probe
gggtagcggcgagacgggtcgagctggcgcag

SEQ ID NO: 18681 - DNA, 32 bp, Artificial
  oligonucleotide probe
cgagcaccgagccggagagcgggtgtggagcg

SEQ ID NO: 18682 - DNA, 32 bp, Artificial
  oligonucleotide probe
cctccggacctcacgcgagcgggtgtggagcg

SEQ ID NO: 18683 - DNA, 32 bp, Artificial
  oligonucleotide probe
gtccgggtcaggcagggtccccaaagcggcag

SEQ ID NO: 18684 - DNA, 32 bp, Artificial
  oligonucleotide probe
cgagcaggcgaggcaggtccccaaagcggcag

SEQ ID NO: 18685 - DNA, 32 bp, Artificial
  oligonucleotide probe
cgagcaggcgaggcaggtccgcaggtccgcct

SEQ ID NO: 18686 - DNA, 32 bp, Artificial
  oligonucleotide probe
gcctcaggacgcacgcgtccgcaggtccgcct

SEQ ID NO: 18687 - DNA, 32 bp, Artificial
  oligonucleotide probe
ggtccggagcagacgcgagccgagtggcgtcc

SEQ ID NO: 18688 - DNA, 32 bp, Artificial
  oligonucleotide probe
gcctgcgagagctggcgagccgagtggcgtcc

SEQ ID NO: 18689 - DNA, 32 bp, Artificial
  oligonucleotide probe
gcgagtcccggaagcgagcgcctcgacgggaa

SEQ ID NO: 18690 - DNA, 32 bp, Artificial
  oligonucleotide probe
gcgacagggcctgcctagcgcctcgacgggaa

SEQ ID NO: 18691 - DNA, 32 bp, Artificial
  oligonucleotide probe
tggcgcctgtccgtggagcgcctcgacgggaa

SEQ ID NO: 18692 - DNA, 32 bp, Artificial
  oligonucleotide probe
gtggcgagcctcgggtagcgcctcgacgggaa

SEQ ID NO: 18693 - DNA, 32 bp, Artificial
  oligonucleotide probe
tgctcggatgctgcgacggagacgcagggggt

SEQ ID NO: 18694 - DNA, 32 bp, Artificial
  oligonucleotide probe
gagcgcagccaagcctcggagacgcagggggt

SEQ ID NO: 18695 - DNA, 32 bp, Artificial
  oligonucleotide probe
cgagcaccgagccggaagcgcctcgacgggaa

SEQ ID NO: 18696 - DNA, 32 bp, Artificial
  oligonucleotide probe
gggtagcggcgagacgagcgcctcgacgggaa

SEQ ID NO: 18697 - DNA, 32 bp, Artificial
  oligonucleotide probe
gagcacgcgggtgcctgagcgggtgtggagcg

SEQ ID NO: 18698 - DNA, 32 bp, Artificial
  oligonucleotide probe
ggaacggaagcggagcgagcgggtgtggagcg

SEQ ID NO: 18699 - DNA, 32 bp, Artificial
  oligonucleotide probe
gacggagcacgccggagtccgcaggtccgcct

SEQ ID NO: 18700 - DNA, 32 bp, Artificial
  oligonucleotide probe
cggagcctgagcgtgggtccgcaggtccgcct

SEQ ID NO: 18701 - DNA, 32 bp, Artificial
  oligonucleotide probe
gcgacagggcctgcctcggatgctgcgagcag

SEQ ID NO: 18702 - DNA, 32 bp, Artificial
  oligonucleotide probe
cggagcgagtggggaacggatgctgcgagcag

SEQ ID NO: 18703 - DNA, 32 bp, Artificial
  oligonucleotide probe
cgagcaccgagccggacggatgctgcgagcag

SEQ ID NO: 18704 - DNA, 32 bp, Artificial
  oligonucleotide probe
cctccggacctcacgccggatgctgcgagcag

SEQ ID NO: 18705 - DNA, 32 bp, Artificial
  oligonucleotide probe
caggcctccctcgcgagtgggcctcctcccaa

SEQ ID NO: 18706 - DNA, 32 bp, Artificial
  oligonucleotide probe
caccagcgagacgcgagtgggcctcctcccaa

SEQ ID NO: 18707 - DNA, 32 bp, Artificial
  oligonucleotide probe
cagggtgggcgagcgagagcgggtgtggagcg

SEQ ID NO: 18708 - DNA, 32 bp, Artificial
  oligonucleotide probe
acgcccaacagggagcgagcgggtgtggagcg

SEQ ID NO: 18709 - DNA, 32 bp, Artificial
  oligonucleotide probe
gagcgacgcgagagcggcgaacgccctccagg

SEQ ID NO: 18710 - DNA, 32 bp, Artificial
  oligonucleotide probe
cgagcctcgggtgcgagcgaacgccctccagg

SEQ ID NO: 18711 - DNA, 32 bp, Artificial
  oligonucleotide probe
caggacgctggccctctcaccggagccttggc

SEQ ID NO: 18712 - DNA, 32 bp, Artificial
  oligonucleotide probe
cctcgtggcggacggatcaccggagccttggc

SEQ ID NO: 18713 - DNA, 32 bp, Artificial
  oligonucleotide probe
tcacgccttggccaccgagccgagtggcgtcc

SEQ ID NO: 18714 - DNA, 32 bp, Artificial
  oligonucleotide probe
caccgcgaggtcacgcgagccgagtggcgtcc

SEQ ID NO: 18715 - DNA, 32 bp, Artificial
  oligonucleotide probe
tggcgcctgtccgtgggtccgcaggtccgcct

SEQ ID NO: 18716 - DNA, 32 bp, Artificial
  oligonucleotide probe
gtggcgagcctcgggtgtccgcaggtccgcct

SEQ ID NO: 18717 - DNA, 32 bp, Artificial
  oligonucleotide probe
gacggagcacgccggaagcgcaggagacgcct

SEQ ID NO: 18718 - DNA, 32 bp, Artificial
  oligonucleotide probe
cggagcctgagcgtggagcgcaggagacgcct

SEQ ID NO: 18719 - DNA, 32 bp, Artificial
  oligonucleotide probe
acgcccaacagggagcgcgaacgccctccagg

SEQ ID NO: 18720 - DNA, 32 bp, Artificial
  oligonucleotide probe
acgccctcaccagcgagcgaacgccctccagg

SEQ ID NO: 18721 - DNA, 32 bp, Artificial
  oligonucleotide probe
gtccacgctggcgacgagcgcctcgacgggaa

SEQ ID NO: 18722 - DNA, 32 bp, Artificial
  oligonucleotide probe
cctcagcgcggaaccaagcgcctcgacgggaa

SEQ ID NO: 18723 - DNA, 32 bp, Artificial
  oligonucleotide probe
tgctcggatgctgcgacggatgctgcgagcag

SEQ ID NO: 18724 - DNA, 32 bp, Artificial
  oligonucleotide probe
gagcgcagccaagcctcggatgctgcgagcag

SEQ ID NO: 18725 - DNA, 32 bp, Artificial
  oligonucleotide probe
caggcctccctcgcgacggagacgcagggggt

SEQ ID NO: 18726 - DNA, 32 bp, Artificial
  oligonucleotide probe
caccagcgagacgcgacggagacgcagggggt

SEQ ID NO: 18727 - DNA, 32 bp, Artificial
  oligonucleotide probe
gggtacgcgacgcgagacgctgctgcgaacca

SEQ ID NO: 18728 - DNA, 32 bp, Artificial
  oligonucleotide probe
agcggacggcaggagcacgctgctgcgaacca

SEQ ID NO: 18729 - DNA, 32 bp, Artificial
  oligonucleotide probe
agcggcgagagcgtccgcagcgagcgagggaa

SEQ ID NO: 18730 - DNA, 32 bp, Artificial
  oligonucleotide probe
gacgcaccagcgcgagagcgcctcgacgggaa

SEQ ID NO: 18731 - DNA, 32 bp, Artificial
  oligonucleotide probe
gcgacagggcctgcctgcgacacccggaacgc

SEQ ID NO: 18732 - DNA, 32 bp, Artificial
  oligonucleotide probe
gcgagtcccggaagcggagccgagtggcgtcc

SEQ ID NO: 18733 - DNA, 32 bp, Artificial; identical to SEQ ID NO: 15259
  oligonucleotide probe

SEQ ID NO: 18734 - DNA, 32 bp, Artificial; identical to SEQ ID NO: 15251
  oligonucleotide probe

SEQ ID NO: 18735 - DNA, 32 bp, Artificial; identical to SEQ ID NO: 15286
  oligonucleotide probe

SEQ ID NO: 18736 - DNA, 32 bp, Artificial; identical to SEQ ID NO: 15256
  oligonucleotide probe

SEQ ID NO: 18737 - DNA, 32 bp, Artificial; identical to SEQ ID NO: 15291
  oligonucleotide probe

SEQ ID NO: 18738 - DNA, 32 bp, Artificial; identical to SEQ ID NO: 15245
  oligonucleotide probe

SEQ ID NO: 18739 - DNA, 32 bp, Artificial; identical to SEQ ID NO: 15282
  oligonucleotide probe

SEQ ID NO: 18740 - DNA, 32 bp, Artificial; identical to SEQ ID NO: 15281
  oligonucleotide probe

SEQ ID NO: 18741 - DNA, 32 bp, Artificial
  oligonucleotide probe
acgcaccagtcccggagtggcggaggtcggaa

SEQ ID NO: 18742 - DNA, 32 bp, Artificial
  oligonucleotide probe
caccgacgggaaacgcgtggcggaggtcggaa

SEQ ID NO: 18743 - DNA, 32 bp, Artificial; identical to SEQ ID NO: 15272
  oligonucleotide probe

SEQ ID NO: 18744 - DNA, 32 bp, Artificial; identical to SEQ ID NO: 15276
  oligonucleotide probe

SEQ ID NO: 18745 - DNA, 32 bp, Artificial; identical to SEQ ID NO: 15267
  oligonucleotide probe

SEQ ID NO: 18746 - DNA, 32 bp, Artificial; identical to SEQ ID NO: 15285
  oligonucleotide probe

SEQ ID NO: 18747 - DNA, 32 bp, Artificial; identical to SEQ ID NO: 15241
  oligonucleotide probe

SEQ ID NO: 18748 - DNA, 32 bp, Artificial; identical to SEQ ID NO: 15274
  oligonucleotide probe

SEQ ID NO: 18749 - DNA, 32 bp, Artificial; identical to SEQ ID NO: 15243
  oligonucleotide probe

SEQ ID NO: 18750 - DNA, 32 bp, Artificial; identical to SEQ ID NO: 15296
  oligonucleotide probe

SEQ ID NO: 18751 - DNA, 32 bp, Artificial
  oligonucleotide probe
acgcaccagtcccggagcaggcagccaatggc

SEQ ID NO: 18752 - DNA, 32 bp, Artificial
  oligonucleotide probe
caccgacgggaaacgcgcaggcagccaatggc

SEQ ID NO: 18753 - DNA, 32 bp, Artificial; identical to SEQ ID NO: 15288
  oligonucleotide probe

SEQ ID NO: 18754 - DNA, 32 bp, Artificial; identical to SEQ ID NO: 15262
  oligonucleotide probe

SEQ ID NO: 18755 - DNA, 32 bp, Artificial; identical to SEQ ID NO: 15233
  oligonucleotide probe

SEQ ID NO: 18756 - DNA, 32 bp, Artificial; identical to SEQ ID NO: 15271
  oligonucleotide probe

SEQ ID NO: 18757 - DNA, 32 bp, Artificial; identical to SEQ ID NO: 15252
  oligonucleotide probe

SEQ ID NO: 18758 - DNA, 32 bp, Artificial; identical to SEQ ID NO: 15250
  oligonucleotide probe

SEQ ID NO: 18759 - DNA, 32 bp, Artificial
  oligonucleotide probe
caccgggtggtcagcggcctcggagacggcag

SEQ ID NO: 18760 - DNA, 32 bp, Artificial
  oligonucleotide probe
gtggcggaggtcggaagcctcggagacggcag

SEQ ID NO: 18761 - DNA, 32 bp, Artificial
  oligonucleotide probe
agcggtccgcgagagcgtggcggaggtcggaa

SEQ ID NO: 18762 - DNA, 32 bp, Artificial
  oligonucleotide probe
gagcgcgacacccagggtggcggaggtcggaa

SEQ ID NO: 18763 - DNA, 32 bp, Artificial; identical to SEQ ID NO: 15283
  oligonucleotide probe

SEQ ID NO: 18764 - DNA, 32 bp, Artificial; identical to SEQ ID NO: 15235
  oligonucleotide probe

SEQ ID NO: 18765 - DNA, 32 bp, Artificial; identical to SEQ ID NO: 15265
  oligonucleotide probe

SEQ ID NO: 18766 - DNA, 32 bp, Artificial; identical to SEQ ID NO: 15302
  oligonucleotide probe

SEQ ID NO: 18767 - DNA, 32 bp, Artificial
  oligonucleotide probe
gtccacgctggcgacgacgcaccagtcccgga

SEQ ID NO: 18768 - DNA, 32 bp, Artificial
  oligonucleotide probe
caggggaagggtcggatggcgtgggggtccaa

SEQ ID NO: 18769 - DNA, 32 bp, Artificial
  oligonucleotide probe
caggggaagggtcggagagcgcgacacccagg

SEQ ID NO: 18770 - DNA, 32 bp, Artificial
  oligonucleotide probe
gcaggcagccaatggcgagcgcgacacccagg

SEQ ID NO: 18771 - DNA, 32 bp, Artificial
  oligonucleotide probe
gacggcgagtgggcagtggcgtgggggtccaa

SEQ ID NO: 18772 - DNA, 32 bp, Artificial
  oligonucleotide probe
agcggtccgcgagagctggcgtgggggtccaa

SEQ ID NO: 18773 - DNA, 32 bp, Artificial
  oligonucleotide probe
gcctcggagacggcagaccatggcacgcgacg

SEQ ID NO: 18774 - DNA, 32 bp, Artificial
  oligonucleotide probe
caggggaagggtcggaaccatggcacgcgacg

SEQ ID NO: 18775 - DNA, 32 bp, Artificial
  oligonucleotide probe
caccgcgaggtcacgcgtggcggaggtcggaa

SEQ ID NO: 18776 - DNA, 32 bp, Artificial
  oligonucleotide probe
gtccacgctggcgacggtggcggaggtcggaa

SEQ ID NO: 18777 - DNA, 32 bp, Artificial
  oligonucleotide probe
tggcgtgggggtccaagtccacgctggcgacg

SEQ ID NO: 18778 - DNA, 32 bp, Artificial
  oligonucleotide probe
accatggcacgcgacggtccacgctggcgacg

SEQ ID NO: 18779 - DNA, 32 bp, Artificial
  oligonucleotide probe
gacggcgagtgggcaggtggcggaggtcggaa

SEQ ID NO: 18780 - DNA, 32 bp, Artificial
  oligonucleotide probe
caccgggtggtcagcggtggcggaggtcggaa

SEQ ID NO: 18781 - DNA, 32 bp, Artificial
  oligonucleotide probe
acgcaccagtcccggacaccgacgggaaacgc

SEQ ID NO: 18782 - DNA, 32 bp, Artificial
  oligonucleotide probe
gagcgcgacacccaggcaccgacgggaaacgc

SEQ ID NO: 18783 - DNA, 32 bp, Artificial
  oligonucleotide probe
caggggaagggtcggaagcggtccgcgagagc

SEQ ID NO: 18784 - DNA, 32 bp, Artificial
  oligonucleotide probe
gagcgcgacacccaggagcggtccgcgagagc

SEQ ID NO: 18785 - DNA, 32 bp, Artificial
  oligonucleotide probe
gcctagcgcctcgacggacggcgagtgggcag

SEQ ID NO: 18786 - DNA, 32 bp, Artificial
  oligonucleotide probe
caccgggtggtcagcggacggcgagtgggcag

SEQ ID NO: 18787 - DNA, 32 bp, Artificial
  oligonucleotide probe
accatggcacgcgacgcaccgacgggaaacgc

SEQ ID NO: 18788 - DNA, 32 bp, Artificial
  oligonucleotide probe
gtccacgctggcgacgcaccgacgggaaacgc

SEQ ID NO: 18789 - DNA, 32 bp, Artificial
  oligonucleotide probe
gcctagcgcctcgacgcaggggaagggtcgga

SEQ ID NO: 18790 - DNA, 32 bp, Artificial
  oligonucleotide probe
gcctcggagacggcagcaggggaagggtcgga

SEQ ID NO: 18791 - DNA, 32 bp, Artificial
  oligonucleotide probe
gacggcgagtgggcaggacgcaggcggagggt

SEQ ID NO: 18792 - DNA, 32 bp, Artificial
  oligonucleotide probe
tggcgtgggggtccaagacgcaggcggagggt

SEQ ID NO: 18793 - DNA, 32 bp, Artificial
  oligonucleotide probe
gtccacgctggcgacgcaccgcgaggtcacgc

SEQ ID NO: 18794 - DNA, 32 bp, Artificial
  oligonucleotide probe
gcaggcagccaatggccaccgcgaggtcacgc

SEQ ID NO: 18795 - DNA, 32 bp, Artificial
  oligonucleotide probe
gacgcaggcggagggtagcggtccgcgagagc

SEQ ID NO: 18796 - DNA, 32 bp, Artificial
  oligonucleotide probe
gacggcgagtgggcagagcggtccgcgagagc

SEQ ID NO: 18797 - DNA, 32 bp, Artificial
  oligonucleotide probe
caccgggtggtcagcggcctagcgcctcgacg

SEQ ID NO: 18798 - DNA, 32 bp, Artificial
  oligonucleotide probe
gtggcggaggtcggaagcctagcgcctcgacg

SEQ ID NO: 18799 - DNA, 32 bp, Artificial
  oligonucleotide probe
gcctcggagacggcagcaccgcgaggtcacgc

SEQ ID NO: 18800 - DNA, 32 bp, Artificial
  oligonucleotide probe
gacgcaggcggagggtcaccgcgaggtcacgc

SEQ ID NO: 18801 - DNA, 32 bp, Artificial
  oligonucleotide probe
gcctcggagacggcaggcctagcgcctcgacg

SEQ ID NO: 18802 - DNA, 32 bp, Artificial
  oligonucleotide probe
accatggcacgcgacggcctagcgcctcgacg

SEQ ID NO: 18803 - DNA, 32 bp, Artificial
  oligonucleotide probe
gacgcaggcggagggtgcctcggagacggcag

SEQ ID NO: 18804 - DNA, 32 bp, Artificial
  oligonucleotide probe
acgcaccagtcccggagcctcggagacggcag

SEQ ID NO: 18805 - DNA, 32 bp, Artificial
  oligonucleotide probe
acgcaccagtcccggacaccgggtggtcagcg

SEQ ID NO: 18806 - DNA, 32 bp, Artificial
  oligonucleotide probe
caccgacgggaaacgccaccgggtggtcagcg

SEQ ID NO: 18807 - DNA, 32 bp, Artificial
  oligonucleotide probe
agcggtccgcgagagcgcaggcagccaatggc

SEQ ID NO: 18808 - DNA, 32 bp, Artificial
  oligonucleotide probe
caggggaagggtcggagcaggcagccaatggc

SEQ ID NO: 18809 - DNA, 32 bp, Artificial
  oligonucleotide probe
gacgcaggcggagggtacgcaccagtcccgga

SEQ ID NO: 18810 - DNA, 32 bp, Artificial
  oligonucleotide probe
caccgcgaggtcacgcacgcaccagtcccgga

SEQ ID NO: 18811 - DNA, 32 bp, Artificial
  oligonucleotide probe
caccgggtggtcagcggagcgcgacacccagg

SEQ ID NO: 18812 - DNA, 32 bp, Artificial
  oligonucleotide probe
acgcaccagtcccggagagcgcgacacccagg

SEQ ID NO: 18813 - DNA, 32 bp, Artificial
  oligonucleotide probe
accatggcacgcgacgtggcgtgggggtccaa

SEQ ID NO: 18814 - DNA, 32 bp, Artificial
  oligonucleotide probe
caccgacgggaaacgctggcgtgggggtccaa

SEQ ID NO: 18815 - DNA, 32 bp, Artificial
  oligonucleotide probe
gtggcggaggtcggaagcaggcagccaatggc

SEQ ID NO: 18816 - DNA, 32 bp, Artificial
  oligonucleotide probe
gtccacgctggcgacggcaggcagccaatggc

SEQ ID NO: 18817 - DNA, 32 bp, Artificial; identical to SEQ ID NO: 15614
  oligonucleotide probe

SEQ ID NO: 18818 - DNA, 32 bp, Artificial; identical to SEQ ID NO: 15714
  oligonucleotide probe

SEQ ID NO: 18819 - DNA, 32 bp, Artificial; identical to SEQ ID NO: 15610
  oligonucleotide probe

SEQ ID NO: 18820 - DNA, 32 bp, Artificial; identical to SEQ ID NO: 15654
  oligonucleotide probe

SEQ ID NO: 18821 - DNA, 32 bp, Artificial
  oligonucleotide probe
accacggaagcgcggacaggagcgggaagcga

SEQ ID NO: 18822 - DNA, 32 bp, Artificial
  oligonucleotide probe
ggtccggagcagacgccaggagcgggaagcga

SEQ ID NO: 18823 - DNA, 32 bp, Artificial; identical to SEQ ID NO: 15509
  oligonucleotide probe

SEQ ID NO: 18824 - DNA, 32 bp, Artificial; identical to SEQ ID NO: 15735
  oligonucleotide probe

SEQ ID NO: 18825 - DNA, 32 bp, Artificial; identical to SEQ ID NO: 15558
  oligonucleotide probe

SEQ ID NO: 18826 - DNA, 32 bp, Artificial; identical to SEQ ID NO: 15646
  oligonucleotide probe

SEQ ID NO: 18827 - DNA, 32 bp, Artificial; identical to SEQ ID NO: 15578
  oligonucleotide probe

SEQ ID NO: 18828 - DNA, 32 bp, Artificial; identical to SEQ ID NO: 15870
  oligonucleotide probe

SEQ ID NO: 18829 - DNA, 32 bp, Artificial
  oligonucleotide probe
acgcgagcgggtgcagagcggtccgcgagagc

SEQ ID NO: 18830 - DNA, 32 bp, Artificial
  oligonucleotide probe
accacggaagcgcggaagcggtccgcgagagc

SEQ ID NO: 18831 - DNA, 32 bp, Artificial
  oligonucleotide probe
gacggacgacgcgtgggtggcggaggtcggaa

SEQ ID NO: 18832 - DNA, 32 bp, Artificial
  oligonucleotide probe
gtggcaggagcgacgcgtggcggaggtcggaa

SEQ ID NO: 18833 - DNA, 32 bp, Artificial; identical to SEQ ID NO: 15731
  oligonucleotide probe

SEQ ID NO: 18834 - DNA, 32 bp, Artificial; identical to SEQ ID NO: 15505
  oligonucleotide probe

SEQ ID NO: 18835 - DNA, 32 bp, Artificial; identical to SEQ ID NO: 15848
  oligonucleotide probe

SEQ ID NO: 18836 - DNA, 32 bp, Artificial; identical to SEQ ID NO: 15792
  oligonucleotide probe

SEQ ID NO: 18837 - DNA, 32 bp, Artificial; identical to SEQ ID NO: 15842
  oligonucleotide probe

SEQ ID NO: 18838 - DNA, 32 bp, Artificial; identical to SEQ ID NO: 15806
  oligonucleotide probe

SEQ ID NO: 18839 - DNA, 32 bp, Artificial
  oligonucleotide probe
gcaggtggtggcgagcgcctagcgcctcgacg

SEQ ID NO: 18840 - DNA, 32 bp, Artificial
  oligonucleotide probe
tggcgggtgacggtgggcctagcgcctcgacg

SEQ ID NO: 18841 - DNA, 32 bp, Artificial; identical to SEQ ID NO: 15809
  oligonucleotide probe

SEQ ID NO: 18842 - DNA, 32 bp, Artificial; identical to SEQ ID NO: 15481
  oligonucleotide probe

SEQ ID NO: 18843 - DNA, 32 bp, Artificial; identical to SEQ ID NO: 15761
  oligonucleotide probe

SEQ ID NO: 18844 - DNA, 32 bp, Artificial; identical to SEQ ID NO: 15661
  oligonucleotide probe

SEQ ID NO: 18845 - DNA, 32 bp, Artificial
  oligonucleotide probe
gcctgggtcaccacgcgtggcggaggtcggaa

SEQ ID NO: 18846 - DNA, 32 bp, Artificial
  oligonucleotide probe
cctccgaggacgcggagtggcggaggtcggaa

SEQ ID NO: 18847 - DNA, 32 bp, Artificial; identical to SEQ ID NO: 15626
  oligonucleotide probe

SEQ ID NO: 18848 - DNA, 32 bp, Artificial; identical to SEQ ID NO: 15544
  oligonucleotide probe

SEQ ID NO: 18849 - DNA, 32 bp, Artificial; identical to SEQ ID NO: 15740
  oligonucleotide probe

SEQ ID NO: 18850 - DNA, 32 bp, Artificial; identical to SEQ ID NO: 15860
  oligonucleotide probe

SEQ ID NO: 18851 - DNA, 32 bp, Artificial
  oligonucleotide probe
gcaggtggtggcgagccaccgggtggtcagcg

SEQ ID NO: 18852 - DNA, 32 bp, Artificial
  oligonucleotide probe
tggcgggtgacggtggcaccgggtggtcagcg

SEQ ID NO: 18853 - DNA, 32 bp, Artificial; identical to SEQ ID NO: 15767
  oligonucleotide probe

SEQ ID NO: 18854 - DNA, 32 bp, Artificial; identical to SEQ ID NO: 15555
  oligonucleotide probe

SEQ ID NO: 18855 - DNA, 32 bp, Artificial; identical to SEQ ID NO: 15759
  oligonucleotide probe

SEQ ID NO: 18856 - DNA, 32 bp, Artificial; identical to SEQ ID NO: 15501
  oligonucleotide probe

SEQ ID NO: 18857 - DNA, 32 bp, Artificial; identical to SEQ ID NO: 15748
  oligonucleotide probe

SEQ ID NO: 18858 - DNA, 32 bp, Artificial; identical to SEQ ID NO: 15826
  oligonucleotide probe

SEQ ID NO: 18859 - DNA, 32 bp, Artificial; identical to SEQ ID NO: 15607
  oligonucleotide probe

SEQ ID NO: 18860 - DNA, 32 bp, Artificial; identical to SEQ ID NO: 15557
  oligonucleotide probe

SEQ ID NO: 18861 - DNA, 32 bp, Artificial; identical to SEQ ID NO: 15823
  oligonucleotide probe

SEQ ID NO: 18862 - DNA, 32 bp, Artificial; identical to SEQ ID NO: 15577
  oligonucleotide probe

SEQ ID NO: 18863 - DNA, 32 bp, Artificial; identical to SEQ ID NO: 15854
  oligonucleotide probe

SEQ ID NO: 18864 - DNA, 32 bp, Artificial; identical to SEQ ID NO: 15516
  oligonucleotide probe

SEQ ID NO: 18865 - DNA, 32 bp, Artificial
  oligonucleotide probe
cctccgaggacgcggagcaggtggtggcgagc

SEQ ID NO: 18866 - DNA, 32 bp, Artificial
  oligonucleotide probe
gagcgcctcctcgagcgcaggtggtggcgagc

SEQ ID NO: 18867 - DNA, 32 bp, Artificial; identical to SEQ ID NO: 15685
  oligonucleotide probe

SEQ ID NO: 18868 - DNA, 32 bp, Artificial; identical to SEQ ID NO: 15847
  oligonucleotide probe

SEQ ID NO: 18869 - DNA, 32 bp, Artificial; identical to SEQ ID NO: 15801
  oligonucleotide probe

SEQ ID NO: 18870 - DNA, 32 bp, Artificial; identical to SEQ ID NO: 15892
  oligonucleotide probe

SEQ ID NO: 18871 - DNA, 32 bp, Artificial; identical to SEQ ID NO: 15850
  oligonucleotide probe

SEQ ID NO: 18872 - DNA, 32 bp, Artificial; identical to SEQ ID NO: 15476
  oligonucleotide probe

SEQ ID NO: 18873 - DNA, 32 bp, Artificial; identical to SEQ ID NO: 15659
  oligonucleotide probe

SEQ ID NO: 18874 - DNA, 32 bp, Artificial; identical to SEQ ID NO: 15757
  oligonucleotide probe

SEQ ID NO: 18875 - DNA, 32 bp, Artificial
  oligonucleotide probe
cctccgaggacgcggagacggacgacgcgtgg

SEQ ID NO: 18876 - DNA, 32 bp, Artificial
  oligonucleotide probe
gagcgcctcctcgagcgacggacgacgcgtgg

SEQ ID NO: 18877 - DNA, 32 bp, Artificial; identical to SEQ ID NO: 15703
  oligonucleotide probe

SEQ ID NO: 18878 - DNA, 32 bp, Artificial; identical to SEQ ID NO: 15747
  oligonucleotide probe

SEQ ID NO: 18879 - DNA, 32 bp, Artificial; identical to SEQ ID NO: 15727
  oligonucleotide probe

SEQ ID NO: 18880 - DNA, 32 bp, Artificial; identical to SEQ ID NO: 15882
  oligonucleotide probe

SEQ ID NO: 18881 - DNA, 32 bp, Artificial; identical to SEQ ID NO: 15871
  oligonucleotide probe

SEQ ID NO: 18882 - DNA, 32 bp, Artificial; identical to SEQ ID NO: 15875
  oligonucleotide probe

SEQ ID NO: 18883 - DNA, 32 bp, Artificial; identical to SEQ ID NO: 15485
  oligonucleotide probe

SEQ ID NO: 18884 - DNA, 32 bp, Artificial; identical to SEQ ID NO: 15769
  oligonucleotide probe

SEQ ID NO: 18885 - DNA, 32 bp, Artificial; identical to SEQ ID NO: 15677
  oligonucleotide probe

SEQ ID NO: 18886 - DNA, 32 bp, Artificial; identical to SEQ ID NO: 15799
  oligonucleotide probe

SEQ ID NO: 18887 - DNA, 32 bp, Artificial; identical to SEQ ID NO: 15620
  oligonucleotide probe

SEQ ID NO: 18888 - DNA, 32 bp, Artificial; identical to SEQ ID NO: 15694
  oligonucleotide probe

SEQ ID NO: 18889 - DNA, 32 bp, Artificial; identical to SEQ ID NO: 15473
  oligonucleotide probe

SEQ ID NO: 18890 - DNA, 32 bp, Artificial; identical to SEQ ID NO: 15525
  oligonucleotide probe

SEQ ID NO: 18891 - DNA, 32 bp, Artificial
  oligonucleotide probe
acgcgagcgggtgcagcaggggaagggtcgga

SEQ ID NO: 18892 - DNA, 32 bp, Artificial
  oligonucleotide probe
accacggaagcgcggacaggggaagggtcgga

SEQ ID NO: 18893 - DNA, 32 bp, Artificial; identical to SEQ ID NO: 15771
  oligonucleotide probe

SEQ ID NO: 18894 - DNA, 32 bp, Artificial; identical to SEQ ID NO: 15633
  oligonucleotide probe

SEQ ID NO: 18895 - DNA, 32 bp, Artificial; identical to SEQ ID NO: 15480
  oligonucleotide probe

SEQ ID NO: 18896 - DNA, 32 bp, Artificial; identical to SEQ ID NO: 15734
  oligonucleotide probe

SEQ ID NO: 18897 - DNA, 32 bp, Artificial; identical to SEQ ID NO: 15839
  oligonucleotide probe

SEQ ID NO: 18898 - DNA, 32 bp, Artificial; identical to SEQ ID NO: 15603
  oligonucleotide probe

SEQ ID NO: 18899 - DNA, 32 bp, Artificial; identical to SEQ ID NO: 15548
  oligonucleotide probe

SEQ ID NO: 18900 - DNA, 32 bp, Artificial; identical to SEQ ID NO: 15820
  oligonucleotide probe

SEQ ID NO: 18901 - DNA, 32 bp, Artificial; identical to SEQ ID NO: 15499
  oligonucleotide probe

SEQ ID NO: 18902 - DNA, 32 bp, Artificial; identical to SEQ ID NO: 15709
  oligonucleotide probe

SEQ ID NO: 18903 - DNA, 32 bp, Artificial; identical to SEQ ID NO: 15490
  oligonucleotide probe

SEQ ID NO: 18904 - DNA, 32 bp, Artificial; identical to SEQ ID NO: 15764
  oligonucleotide probe

SEQ ID NO: 18905 - DNA, 32 bp, Artificial; identical to SEQ ID NO: 15812
  oligonucleotide probe

SEQ ID NO: 18906 - DNA, 32 bp, Artificial; identical to SEQ ID NO: 15658
  oligonucleotide probe

SEQ ID NO: 18907 - DNA, 32 bp, Artificial; identical to SEQ ID NO: 15662
  oligonucleotide probe

SEQ ID NO: 18908 - DNA, 32 bp, Artificial; identical to SEQ ID NO: 15798
  oligonucleotide probe

SEQ ID NO: 18909 - DNA, 32 bp, Artificial; identical to SEQ ID NO: 15477
  oligonucleotide probe

SEQ ID NO: 18910 - DNA, 32 bp, Artificial; identical to SEQ ID NO: 15619
  oligonucleotide probe

SEQ ID NO: 18911 - DNA, 32 bp, Artificial; identical to SEQ ID NO: 15866
  oligonucleotide probe

SEQ ID NO: 18912 - DNA, 32 bp, Artificial; identical to SEQ ID NO: 15720
  oligonucleotide probe

SEQ ID NO: 18913 - DNA, 32 bp, Artificial
  oligonucleotide probe
gcaggtggtggcgagcgtggcggaggtcggaa

SEQ ID NO: 18914 - DNA, 32 bp, Artificial
  oligonucleotide probe
tggcgggtgacggtgggtggcggaggtcggaa

SEQ ID NO: 18915 - DNA, 32 bp, Artificial; identical to SEQ ID NO: 15611
  oligonucleotide probe

SEQ ID NO: 18916 - DNA, 32 bp, Artificial; identical to SEQ ID NO: 15887
  oligonucleotide probe

SEQ ID NO: 18917 - DNA, 32 bp, Artificial
  oligonucleotide probe
accacggaagcgcggagcgacgagcgagccaa

SEQ ID NO: 18918 - DNA, 32 bp, Artificial
  oligonucleotide probe
ggtccggagcagacgcgcgacgagcgagccaa

SEQ ID NO: 18919 - DNA, 32 bp, Artificial
  oligonucleotide probe
gacggacgacgcgtggcaccgcgaggtcacgc

SEQ ID NO: 18920 - DNA, 32 bp, Artificial
  oligonucleotide probe
gtggcaggagcgacgccaccgcgaggtcacgc

SEQ ID NO: 18921 - DNA, 32 bp, Artificial
  oligonucleotide probe
cctccgaggacgcggaagcgccaatcacgggt

SEQ ID NO: 18922 - DNA, 32 bp, Artificial
  oligonucleotide probe
gagcgcctcctcgagcagcgccaatcacgggt

SEQ ID NO: 18923 - DNA, 32 bp, Artificial; identical to SEQ ID NO: 15736
  oligonucleotide probe

SEQ ID NO: 18924 - DNA, 32 bp, Artificial; identical to SEQ ID NO: 15814
  oligonucleotide probe

SEQ ID NO: 18925 - DNA, 32 bp, Artificial; identical to SEQ ID NO: 15691
  oligonucleotide probe

SEQ ID NO: 18926 - DNA, 32 bp, Artificial; identical to SEQ ID NO: 15867
  oligonucleotide probe

SEQ ID NO: 18927 - DNA, 32 bp, Artificial; identical to SEQ ID NO: 15807
  oligonucleotide probe

SEQ ID NO: 18928 - DNA, 32 bp, Artificial; identical to SEQ ID NO: 15853
  oligonucleotide probe

SEQ ID NO: 18929 - DNA, 32 bp, Artificial; identical to SEQ ID NO: 15598
  oligonucleotide probe

SEQ ID NO: 18930 - DNA, 32 bp, Artificial; identical to SEQ ID NO: 15600
  oligonucleotide probe

SEQ ID NO: 18931 - DNA, 32 bp, Artificial
  oligonucleotide probe
caggagcgggaagcgatggcgtgggggtccaa

SEQ ID NO: 18932 - DNA, 32 bp, Artificial
  oligonucleotide probe
gcctgtgggtccgcgatggcgtgggggtccaa

SEQ ID NO: 18933 - DNA, 32 bp, Artificial; identical to SEQ ID NO: 15765
  oligonucleotide probe

SEQ ID NO: 18934 - DNA, 32 bp, Artificial; identical to SEQ ID NO: 15877
  oligonucleotide probe

SEQ ID NO: 18935 - DNA, 32 bp, Artificial
  oligonucleotide probe
gcctgggtcaccacgccaccgcgaggtcacgc

SEQ ID NO: 18936 - DNA, 32 bp, Artificial
  oligonucleotide probe
cctccgaggacgcggacaccgcgaggtcacgc

SEQ ID NO: 18937 - DNA, 32 bp, Artificial; identical to SEQ ID NO: 15487
  oligonucleotide probe

SEQ ID NO: 18938 - DNA, 32 bp, Artificial; identical to SEQ ID NO: 15715
  oligonucleotide probe

SEQ ID NO: 18939 - DNA, 32 bp, Artificial; identical to SEQ ID NO: 15562
  oligonucleotide probe

SEQ ID NO: 18940 - DNA, 32 bp, Artificial; identical to SEQ ID NO: 15666
  oligonucleotide probe

SEQ ID NO: 18941 - DNA, 32 bp, Artificial; identical to SEQ ID NO: 15794
  oligonucleotide probe

SEQ ID NO: 18942 - DNA, 32 bp, Artificial; identical to SEQ ID NO: 15596
  oligonucleotide probe

SEQ ID NO: 18943 - DNA, 32 bp, Artificial; identical to SEQ ID NO: 15648
  oligonucleotide probe

SEQ ID NO: 18944 - DNA, 32 bp, Artificial; identical to SEQ ID NO: 15528
  oligonucleotide probe

SEQ ID NO: 18945 - DNA, 32 bp, Artificial; identical to SEQ ID NO: 15724
  oligonucleotide probe

SEQ ID NO: 18946 - DNA, 32 bp, Artificial; identical to SEQ ID NO: 15534
  oligonucleotide probe

SEQ ID NO: 18947 - DNA, 32 bp, Artificial; identical to SEQ ID NO: 15700
  oligonucleotide probe

SEQ ID NO: 18948 - DNA, 32 bp, Artificial; identical to SEQ ID NO: 15804
  oligonucleotide probe

SEQ ID NO: 18949 - DNA, 32 bp, Artificial; identical to SEQ ID NO: 15827
  oligonucleotide probe

SEQ ID NO: 18950 - DNA, 32 bp, Artificial; identical to SEQ ID NO: 15811
  oligonucleotide probe

SEQ ID NO: 18951 - DNA, 32 bp, Artificial; identical to SEQ ID NO: 15484
  oligonucleotide probe

SEQ ID NO: 18952 - DNA, 32 bp, Artificial; identical to SEQ ID NO: 15702
  oligonucleotide probe

SEQ ID NO: 18953 - DNA, 32 bp, Artificial; identical to SEQ ID NO: 15541
  oligonucleotide probe

SEQ ID NO: 18954 - DNA, 32 bp, Artificial; identical to SEQ ID NO: 15539
  oligonucleotide probe

SEQ ID NO: 18955 - DNA, 32 bp, Artificial; identical to SEQ ID NO: 15615
  oligonucleotide probe

SEQ ID NO: 18956 - DNA, 32 bp, Artificial; identical to SEQ ID NO: 15625
  oligonucleotide probe

SEQ ID NO: 18957 - DNA, 32 bp, Artificial; identical to SEQ ID NO: 15491
  oligonucleotide probe

SEQ ID NO: 18958 - DNA, 32 bp, Artificial; identical to SEQ ID NO: 15479
  oligonucleotide probe

SEQ ID NO: 18959 - DNA, 32 bp, Artificial; identical to SEQ ID NO: 15623
  oligonucleotide probe

SEQ ID NO: 18960 - DNA, 32 bp, Artificial; identical to SEQ ID NO: 15483
  oligonucleotide probe

SEQ ID NO: 18961 - DNA, 32 bp, Artificial
  oligonucleotide probe
gacggacgacgcgtggcaccgggtggtcagcg

SEQ ID NO: 18962 - DNA, 32 bp, Artificial
  oligonucleotide probe
gtggcaggagcgacgccaccgggtggtcagcg

SEQ ID NO: 18963 - DNA, 32 bp, Artificial; identical to SEQ ID NO: 15669
  oligonucleotide probe

SEQ ID NO: 18964 - DNA, 32 bp, Artificial; identical to SEQ ID NO: 15671
  oligonucleotide probe

SEQ ID NO: 18965 - DNA, 32 bp, Artificial; identical to SEQ ID NO: 15642
  oligonucleotide probe

SEQ ID NO: 18966 - DNA, 32 bp, Artificial; identical to SEQ ID NO: 15688
  oligonucleotide probe

SEQ ID NO: 18967 - DNA, 32 bp, Artificial; identical to SEQ ID NO: 15873
  oligonucleotide probe

SEQ ID NO: 18968 - DNA, 32 bp, Artificial; identical to SEQ ID NO: 15883
  oligonucleotide probe

SEQ ID NO: 18969 - DNA, 32 bp, Artificial; identical to SEQ ID NO: 15683
  oligonucleotide probe

SEQ ID NO: 18970 - DNA, 32 bp, Artificial; identical to SEQ ID NO: 15489
  oligonucleotide probe

SEQ ID NO: 18971 - DNA, 32 bp, Artificial; identical to SEQ ID NO: 15675
  oligonucleotide probe

SEQ ID NO: 18972 - DNA, 32 bp, Artificial; identical to SEQ ID NO: 15609
  oligonucleotide probe

SEQ ID NO: 18973 - DNA, 32 bp, Artificial; identical to SEQ ID NO: 15502
  oligonucleotide probe

SEQ ID NO: 18974 - DNA, 32 bp, Artificial; identical to SEQ ID NO: 15652
  oligonucleotide probe

SEQ ID NO: 18975 - DNA, 32 bp, Artificial; identical to SEQ ID NO: 15587
  oligonucleotide probe

SEQ ID NO: 18976 - DNA, 32 bp, Artificial; identical to SEQ ID NO: 15755
  oligonucleotide probe

SEQ ID NO: 18977 - DNA, 32 bp, Artificial
  oligonucleotide probe
gacggacgacgcgtggacgcaccagtcccgga

SEQ ID NO: 18978 - DNA, 32 bp, Artificial
  oligonucleotide probe
gtggcaggagcgacgcacgcaccagtcccgga

SEQ ID NO: 18979 - DNA, 32 bp, Artificial; identical to SEQ ID NO: 15672
  oligonucleotide probe

SEQ ID NO: 18980 - DNA, 32 bp, Artificial; identical to SEQ ID NO: 15622
  oligonucleotide probe

SEQ ID NO: 18981 - DNA, 32 bp, Artificial; identical to SEQ ID NO: 15519
  oligonucleotide probe

SEQ ID NO: 18982 - DNA, 32 bp, Artificial; identical to SEQ ID NO: 15725
  oligonucleotide probe

SEQ ID NO: 18983 - DNA, 32 bp, Artificial; identical to SEQ ID NO: 15521
  oligonucleotide probe

SEQ ID NO: 18984 - DNA, 32 bp, Artificial; identical to SEQ ID NO: 15507
  oligonucleotide probe

SEQ ID NO: 18985 - DNA, 32 bp, Artificial; identical to SEQ ID NO: 15851
  oligonucleotide probe

SEQ ID NO: 18986 - DNA, 32 bp, Artificial; identical to SEQ ID NO: 15837
  oligonucleotide probe

SEQ ID NO: 18987 - DNA, 32 bp, Artificial; identical to SEQ ID NO: 15581
  oligonucleotide probe

SEQ ID NO: 18988 - DNA, 32 bp, Artificial; identical to SEQ ID NO: 15569
  oligonucleotide probe

SEQ ID NO: 18989 - DNA, 32 bp, Artificial
  oligonucleotide probe
gcctgggtcaccacgcgtccacgctggcgacg

SEQ ID NO: 18990 - DNA, 32 bp, Artificial
  oligonucleotide probe
cctccgaggacgcggagtccacgctggcgacg

SEQ ID NO: 18991 - DNA, 32 bp, Artificial; identical to SEQ ID NO: 15782
  oligonucleotide probe

SEQ ID NO: 18992 - DNA, 32 bp, Artificial; identical to SEQ ID NO: 15696
  oligonucleotide probe

SEQ ID NO: 18993 - DNA, 32 bp, Artificial
  oligonucleotide probe
caggagcgggaagcgaagcggtccgcgagagc

SEQ ID NO: 18994 - DNA, 32 bp, Artificial
  oligonucleotide probe
gcctgtgggtccgcgaagcggtccgcgagagc

SEQ ID NO: 18995 - DNA, 32 bp, Artificial
  oligonucleotide probe
tggcgggtgacggtggagcgccaatcacgggt

SEQ ID NO: 18996 - DNA, 32 bp, Artificial
  oligonucleotide probe
gtggcaggagcgacgcagcgccaatcacgggt

SEQ ID NO: 18997 - DNA, 32 bp, Artificial
  oligonucleotide probe
gtggcaggagcgacgcgcgagtggcagggcct

SEQ ID NO: 18998 - DNA, 32 bp, Artificial
  oligonucleotide probe
cctccgaggacgcggagcgagtggcagggcct

SEQ ID NO: 18999 - DNA, 32 bp, Artificial
  oligonucleotide probe
tggcggtcgcctcgaggcgagtggcagggcct

SEQ ID NO: 19000 - DNA, 32 bp, Artificial
  oligonucleotide probe
tggcgggtgacggtgggcgagtggcagggcct

SEQ ID NO: 19001 - DNA, 32 bp, Artificial
  oligonucleotide probe
gcctgtgggtccgcgagcgacgagcgagccaa

SEQ ID NO: 19002 - DNA, 32 bp, Artificial
  oligonucleotide probe
ggtccggagcagacgcacgcgagcgggtgcag

SEQ ID NO: 19003 - DNA, 32 bp, Artificial
  oligonucleotide probe
gtggcaggagcgacgcgcaggtggtggcgagc

SEQ ID NO: 19004 - DNA, 32 bp, Artificial; identical to SEQ ID NO: 15890
  oligonucleotide probe

SEQ ID NO: 19005 - DNA, 32 bp, Artificial
  oligonucleotide probe
gagcgcctcctcgagcgcctgggtcaccacgc

SEQ ID NO: 19006 - DNA, 32 bp, Artificial
  oligonucleotide probe
agcggtccgcgagagccctccgaggacgcgga

SEQ ID NO: 19007 - DNA, 32 bp, Artificial
  oligonucleotide probe
caggggaagggtcggacctccgaggacgcgga

SEQ ID NO: 19008 - DNA, 32 bp, Artificial
  oligonucleotide probe
gtggcggaggtcggaagcagcctctggccgag

SEQ ID NO: 19009 - DNA, 32 bp, Artificial
  oligonucleotide probe
caccgcgaggtcacgcgcagcctctggccgag

SEQ ID NO: 19010 - DNA, 32 bp, Artificial
  oligonucleotide probe
gcgacgagcgagccaaagcggtccgcgagagc

SEQ ID NO: 19011 - DNA, 32 bp, Artificial
  oligonucleotide probe
gcgaagcggcgaggtcagcggtccgcgagagc

SEQ ID NO: 19012 - DNA, 32 bp, Artificial
  oligonucleotide probe
gacggacgacgcgtggcaccgacgggaaacgc

SEQ ID NO: 19013 - DNA, 32 bp, Artificial
  oligonucleotide probe
gtggcaggagcgacgccaccgacgggaaacgc

SEQ ID NO: 19014 - DNA, 32 bp, Artificial
  oligonucleotide probe
tggcgggtgacggtggtggcggtcgcctcgag

SEQ ID NO: 19015 - DNA, 32 bp, Artificial
  oligonucleotide probe
gtggcaggagcgacgctggcggtcgcctcgag

SEQ ID NO: 19016 - DNA, 32 bp, Artificial
  oligonucleotide probe
agcgccaatcacgggtgcctagcgcctcgacg

SEQ ID NO: 19017 - DNA, 32 bp, Artificial
  oligonucleotide probe
tggcggtcgcctcgaggcctagcgcctcgacg

SEQ ID NO: 19018 - DNA, 32 bp, Artificial
  oligonucleotide probe
tggcgtgggggtccaagtggcaggagcgacgc

SEQ ID NO: 19019 - DNA, 32 bp, Artificial
  oligonucleotide probe
accatggcacgcgacggtggcaggagcgacgc

SEQ ID NO: 19020 - DNA, 32 bp, Artificial
  oligonucleotide probe
gcctgggtcaccacgcgcaggcagccaatggc

SEQ ID NO: 19021 - DNA, 32 bp, Artificial
  oligonucleotide probe
cctccgaggacgcggagcaggcagccaatggc

SEQ ID NO: 19022 - DNA, 32 bp, Artificial
  oligonucleotide probe
caccgggtggtcagcgaccacggaagcgcgga

SEQ ID NO: 19023 - DNA, 32 bp, Artificial
  oligonucleotide probe
acgcaccagtcccggaaccacggaagcgcgga

SEQ ID NO: 19024 - DNA, 32 bp, Artificial
  oligonucleotide probe
gcgacgagcgagccaagacgcaggcggagggt

SEQ ID NO: 19025 - DNA, 32 bp, Artificial
  oligonucleotide probe
gcgaagcggcgaggtcgacgcaggcggagggt

SEQ ID NO: 19026 - DNA, 32 bp, Artificial
  oligonucleotide probe
gcctgggtcaccacgcagcgccaatcacgggt

SEQ ID NO: 19027 - DNA, 32 bp, Artificial
  oligonucleotide probe
ggaaagcggcctggaaagcgccaatcacgggt

SEQ ID NO: 19028 - DNA, 32 bp, Artificial
  oligonucleotide probe
gcctagcgcctcgacgcaggagcgggaagcga

SEQ ID NO: 19029 - DNA, 32 bp, Artificial
  oligonucleotide probe
gcctcggagacggcagcaggagcgggaagcga

SEQ ID NO: 19030 - DNA, 32 bp, Artificial
  oligonucleotide probe
gacgcaggcggagggtgcaggtggtggcgagc

SEQ ID NO: 19031 - DNA, 32 bp, Artificial
  oligonucleotide probe
tggcgggtgacggtgggcaggtggtggcgagc

SEQ ID NO: 19032 - DNA, 32 bp, Artificial
  oligonucleotide probe
caccgcgaggtcacgcggtccggagcagacgc

SEQ ID NO: 19033 - DNA, 32 bp, Artificial
  oligonucleotide probe
gtccacgctggcgacgggtccggagcagacgc

SEQ ID NO: 19034 - DNA, 32 bp, Artificial
  oligonucleotide probe
acgcgagcgggtgcaggagcgcgacacccagg

SEQ ID NO: 19035 - DNA, 32 bp, Artificial
  oligonucleotide probe
accacggaagcgcggagagcgcgacacccagg

SEQ ID NO: 19036 - DNA, 32 bp, Artificial
  oligonucleotide probe
caccgacgggaaacgcacgcgagcgggtgcag

SEQ ID NO: 19037 - DNA, 32 bp, Artificial
  oligonucleotide probe
accacggaagcgcggaacgcgagcgggtgcag

SEQ ID NO: 19038 - DNA, 32 bp, Artificial
  oligonucleotide probe
gagcgcgacacccagggcctgggtcaccacgc

SEQ ID NO: 19039 - DNA, 32 bp, Artificial
  oligonucleotide probe
cctccgaggacgcggagcctgggtcaccacgc

SEQ ID NO: 19040 - DNA, 32 bp, Artificial
  oligonucleotide probe
gcgacgagcgagccaagagcgcctcctcgagc

SEQ ID NO: 19041 - DNA, 32 bp, Artificial
  oligonucleotide probe
caggagcgggaagcgagagcgcctcctcgagc

SEQ ID NO: 19042 - DNA, 32 bp, Artificial
  oligonucleotide probe
gtccacgctggcgacggcagcctctggccgag

SEQ ID NO: 19043 - DNA, 32 bp, Artificial
  oligonucleotide probe
gcaggcagccaatggcgcagcctctggccgag

SEQ ID NO: 19044 - DNA, 32 bp, Artificial
  oligonucleotide probe
cctccgaggacgcggatggcggtcgcctcgag

SEQ ID NO: 19045 - DNA, 32 bp, Artificial
  oligonucleotide probe
gagcgcctcctcgagctggcggtcgcctcgag

SEQ ID NO: 19046 - DNA, 32 bp, Artificial
  oligonucleotide probe
gcctgtgggtccgcgagcgaagcggcgaggtc

SEQ ID NO: 19047 - DNA, 32 bp, Artificial
  oligonucleotide probe
accacggaagcgcggagcgaagcggcgaggtc

SEQ ID NO: 19048 - DNA, 32 bp, Artificial
  oligonucleotide probe
gacggacgacgcgtgggtccacgctggcgacg

SEQ ID NO: 19049 - DNA, 32 bp, Artificial
  oligonucleotide probe
gtggcaggagcgacgcgtccacgctggcgacg

SEQ ID NO: 19050 - DNA, 32 bp, Artificial
  oligonucleotide probe
accacggaagcgcggagcctgtgggtccgcga

SEQ ID NO: 19051 - DNA, 32 bp, Artificial
  oligonucleotide probe
ggtccggagcagacgcgcctgtgggtccgcga

SEQ ID NO: 19052 - DNA, 32 bp, Artificial
  oligonucleotide probe
ggtccggagcagacgcaccacggaagcgcgga

SEQ ID NO: 19053 - DNA, 32 bp, Artificial
  oligonucleotide probe
gcgagtggcagggcctaccacggaagcgcgga

SEQ ID NO: 19054 - DNA, 32 bp, Artificial
  oligonucleotide probe
gcaggtggtggcgagcacgcaccagtcccgga

SEQ ID NO: 19055 - DNA, 32 bp, Artificial
  oligonucleotide probe
tggcgggtgacggtggacgcaccagtcccgga

SEQ ID NO: 19056 - DNA, 32 bp, Artificial
  oligonucleotide probe
ggtccggagcagacgcgcgaagcggcgaggtc

SEQ ID NO: 19057 - DNA, 32 bp, Artificial
  oligonucleotide probe
gcgagtggcagggcctgcgaagcggcgaggtc

SEQ ID NO: 19058 - DNA, 32 bp, Artificial
  oligonucleotide probe
gcaggtggtggcgagcgcctcggagacggcag

SEQ ID NO: 19059 - DNA, 32 bp, Artificial
  oligonucleotide probe
tggcgggtgacggtgggcctcggagacggcag

SEQ ID NO: 19060 - DNA, 32 bp, Artificial
  oligonucleotide probe
ggtccggagcagacgcgcagcctctggccgag

SEQ ID NO: 19061 - DNA, 32 bp, Artificial
  oligonucleotide probe
gtggcggaggtcggaaggtccggagcagacgc

SEQ ID NO: 19062 - DNA, 32 bp, Artificial
  oligonucleotide probe
cctccgaggacgcggagtggcaggagcgacgc

SEQ ID NO: 19063 - DNA, 32 bp, Artificial
  oligonucleotide probe
gagcgcctcctcgagcgtggcaggagcgacgc

SEQ ID NO: 19064 - DNA, 32 bp, Artificial
  oligonucleotide probe
agcgccaatcacgggtgtggcggaggtcggaa

SEQ ID NO: 19065 - DNA, 32 bp, Artificial
  oligonucleotide probe
tggcggtcgcctcgaggtggcggaggtcggaa

SEQ ID NO: 19066 - DNA, 32 bp, Artificial
  oligonucleotide probe
gagcgcctcctcgagccctccgaggacgcgga

SEQ ID NO: 19067 - DNA, 32 bp, Artificial
  oligonucleotide probe
tggcacgcgagccaggcctccgaggacgcgga

SEQ ID NO: 19068 - DNA, 32 bp, Artificial
  oligonucleotide probe
gtggcaggagcgacgctggcgggtgacggtgg

SEQ ID NO: 19069 - DNA, 32 bp, Artificial
  oligonucleotide probe
cctccgaggacgcggatggcgggtgacggtgg

SEQ ID NO: 19070 - DNA, 32 bp, Artificial
  oligonucleotide probe
gcctgggtcaccacgcgacggacgacgcgtgg

SEQ ID NO: 19071 - DNA, 32 bp, Artificial
  oligonucleotide probe
ggaaagcggcctggaagacggacgacgcgtgg

SEQ ID NO: 19072 - DNA, 32 bp, Artificial
  oligonucleotide probe
agcggtccgcgagagcgcctgggtcaccacgc

SEQ ID NO: 19073 - DNA, 32 bp, Artificial
  oligonucleotide probe
caggggaagggtcggagcctgggtcaccacgc

SEQ ID NO: 19074 - DNA, 32 bp, Artificial
  oligonucleotide probe
gagcgcctcctcgagctggcgggtgacggtgg

SEQ ID NO: 19075 - DNA, 32 bp, Artificial
  oligonucleotide probe
tggcacgcgagccaggtggcgggtgacggtgg

SEQ ID NO: 19076 - DNA, 32 bp, Artificial
  oligonucleotide probe
gcaggtggtggcgagcagcgccaatcacgggt

SEQ ID NO: 19077 - DNA, 32 bp, Artificial
  oligonucleotide probe
gacggacgacgcgtggagcgccaatcacgggt

SEQ ID NO: 19078 - DNA, 32 bp, Artificial
  oligonucleotide probe
caggagcgggaagcgaaccatggcacgcgacg

SEQ ID NO: 19079 - DNA, 32 bp, Artificial
  oligonucleotide probe
gcctgtgggtccgcgaaccatggcacgcgacg

SEQ ID NO: 19080 - DNA, 32 bp, Artificial
  oligonucleotide probe
gacggacgacgcgtgggcgagtggcagggcct

SEQ ID NO: 19081 - DNA, 32 bp, Artificial
  oligonucleotide probe
gcctgggtcaccacgcgcgagtggcagggcct

SEQ ID NO: 19082 - DNA, 32 bp, Artificial
  oligonucleotide probe
caggagcgggaagcgacaggggaagggtcgga

SEQ ID NO: 19083 - DNA, 32 bp, Artificial
  oligonucleotide probe
gcctgtgggtccgcgacaggggaagggtcgga

SEQ ID NO: 19084 - DNA, 32 bp, Artificial
  oligonucleotide probe
tggcgtgggggtccaagacggacgacgcgtgg

SEQ ID NO: 19085 - DNA, 32 bp, Artificial
  oligonucleotide probe
accatggcacgcgacggacggacgacgcgtgg

SEQ ID NO: 19086 - DNA, 32 bp, Artificial
  oligonucleotide probe
accacggaagcgcggatggcacgcgagccagg

SEQ ID NO: 19087 - DNA, 32 bp, Artificial
  oligonucleotide probe
ggtccggagcagacgctggcacgcgagccagg

SEQ ID NO: 19088 - DNA, 32 bp, Artificial
  oligonucleotide probe
gacggacgacgcgtgggcaggtggtggcgagc

SEQ ID NO: 19089 - DNA, 32 bp, Artificial
  oligonucleotide probe
gcctgggtcaccacgcgcaggtggtggcgagc

SEQ ID NO: 19090 - DNA, 32 bp, Artificial
  oligonucleotide probe
agcgccaatcacgggtcaccgggtggtcagcg

SEQ ID NO: 19091 - DNA, 32 bp, Artificial
  oligonucleotide probe
tggcggtcgcctcgagcaccgggtggtcagcg

SEQ ID NO: 19092 - DNA, 32 bp, Artificial
  oligonucleotide probe
acgcgagcgggtgcagcaggagcgggaagcga

SEQ ID NO: 19093 - DNA, 32 bp, Artificial
  oligonucleotide probe
gcagcctctggccgagcaggagcgggaagcga

SEQ ID NO: 19094 - DNA, 32 bp, Artificial
  oligonucleotide probe
gcgacgagcgagccaatggcgtgggggtccaa

SEQ ID NO: 19095 - DNA, 32 bp, Artificial
  oligonucleotide probe
gcgaagcggcgaggtctggcgtgggggtccaa

SEQ ID NO: 19096 - DNA, 32 bp, Artificial
  oligonucleotide probe
acgcgagcgggtgcagggaaagcggcctggaa

SEQ ID NO: 19097 - DNA, 32 bp, Artificial
  oligonucleotide probe
gcagcctctggccgagggaaagcggcctggaa

SEQ ID NO: 19098 - DNA, 32 bp, Artificial
  oligonucleotide probe
acgcgagcgggtgcaggagcgcctcctcgagc

SEQ ID NO: 19099 - DNA, 32 bp, Artificial
  oligonucleotide probe
gcagcctctggccgaggagcgcctcctcgagc

SEQ ID NO: 19100 - DNA, 32 bp, Artificial
  oligonucleotide probe
gcctagcgcctcgacggcctgtgggtccgcga

SEQ ID NO: 19101 - DNA, 32 bp, Artificial
  oligonucleotide probe
gcctcggagacggcaggcctgtgggtccgcga

SEQ ID NO: 19102 - DNA, 32 bp, Artificial
  oligonucleotide probe
caccgggtggtcagcgacgcgagcgggtgcag

SEQ ID NO: 19103 - DNA, 32 bp, Artificial
  oligonucleotide probe
acgcaccagtcccggaacgcgagcgggtgcag

SEQ ID NO: 19104 - DNA, 32 bp, Artificial
  oligonucleotide probe
gcgacgagcgagccaaggaaagcggcctggaa

SEQ ID NO: 19105 - DNA, 32 bp, Artificial
  oligonucleotide probe
caggagcgggaagcgaggaaagcggcctggaa

SEQ ID NO: 19106 - DNA, 32 bp, Artificial
  oligonucleotide probe
caggagcgggaagcgagcgacgagcgagccaa

SEQ ID NO: 19107 - DNA, 32 bp, Artificial
  oligonucleotide probe
acgcgagcgggtgcaggcgacgagcgagccaa

SEQ ID NO: 19108 - DNA, 32 bp, Artificial
  oligonucleotide probe
gcaggtggtggcgagccaccgcgaggtcacgc

SEQ ID NO: 19109 - DNA, 32 bp, Artificial
  oligonucleotide probe
tggcgggtgacggtggcaccgcgaggtcacgc

SEQ ID NO: 19110 - DNA, 32 bp, Artificial
  oligonucleotide probe
gcgaagcggcgaggtctggcacgcgagccagg

SEQ ID NO: 19111 - DNA, 32 bp, Artificial
  oligonucleotide probe
gcctgtgggtccgcgatggcacgcgagccagg

SEQ ID NO: 19112 - DNA, 32 bp, Artificial
  oligonucleotide probe
agcgccaatcacgggtgcgagtggcagggcct

SEQ ID NO: 19113 - DNA, 32 bp, Artificial
  oligonucleotide probe
gcaggtggtggcgagcgcgagtggcagggcct

SEQ ID NO: 19114 - DNA, 32 bp, Artificial
  oligonucleotide probe
gcgacgagcgagccaagcagcctctggccgag

SEQ ID NO: 19115 - DNA, 32 bp, Artificial
  oligonucleotide probe
acgcgagcgggtgcaggcagcctctggccgag

SEQ ID NO: 19116 - DNA, 32 bp, Artificial
  oligonucleotide probe
gacggcgagtgggcagtggcggtcgcctcgag

SEQ ID NO: 19117 - DNA, 32 bp, Artificial
  oligonucleotide probe
agcgccaatcacgggttggcggtcgcctcgag

SEQ ID NO: 19118 - DNA, 32 bp, Artificial
  oligonucleotide probe
gcctgtgggtccgcgagcgagtggcagggcct

SEQ ID NO: 19119 - DNA, 32 bp, Artificial
  oligonucleotide probe
ggtccggagcagacgcgcgagtggcagggcct

SEQ ID NO: 19120 - DNA, 32 bp, Artificial
  oligonucleotide probe
tggcggtcgcctcgagtggcacgcgagccagg

SEQ ID NO: 19121 - DNA, 32 bp, Artificial
  oligonucleotide probe
gtggcaggagcgacgctggcacgcgagccagg

SEQ ID NO: 19122 - DNA, 32 bp, Artificial
  oligonucleotide probe
gcgacgagcgagccaagcgaagcggcgaggtc

SEQ ID NO: 19123 - DNA, 32 bp, Artificial
  oligonucleotide probe
gacggcgagtgggcaggcgaagcggcgaggtc

SEQ ID NO: 19124 - DNA, 32 bp, Artificial
  oligonucleotide probe
gcaggtggtggcgagcggaaagcggcctggaa

SEQ ID NO: 19125 - DNA, 32 bp, Artificial
  oligonucleotide probe
gcctgggtcaccacgcggaaagcggcctggaa

SEQ ID NO: 19126 - DNA, 32 bp, Artificial
  oligonucleotide probe
gagcgcgacacccaggcctccgaggacgcgga

SEQ ID NO: 19127 - DNA, 32 bp, Artificial
  oligonucleotide probe
gacgcaggcggagggttggcgggtgacggtgg

SEQ ID NO: 19128 - DNA, 32 bp, Artificial
  oligonucleotide probe
caccgacgggaaacgcaccacggaagcgcgga

SEQ ID NO: 19129 - DNA, 32 bp, Artificial
  oligonucleotide probe
gcctgtgggtccgcgacaggagcgggaagcga

SEQ ID NO: 19130 - DNA, 32 bp, Artificial
  oligonucleotide probe
gcaggcagccaatggcggtccggagcagacgc

SEQ ID NO: 19131 - DNA, 32 bp, Artificial
  oligonucleotide probe
gagcgcctcctcgagcggaaagcggcctggaa

SEQ ID NO: 19132 - DNA, 32 bp, Artificial
  oligonucleotide probe
tggcacgcgagccagggagcgcctcctcgagc

SEQ ID NO: 19133 - DNA, 32 bp, Artificial
  oligonucleotide probe
gtggcaggagcgacgcgacggacgacgcgtgg

SEQ ID NO: 19134 - DNA, 32 bp, Artificial
  oligonucleotide probe
gcgagtggcagggccttggcacgcgagccagg

SEQ ID NO: 19135 - DNA, 32 bp, Artificial
  oligonucleotide probe
ggaaagcggcctggaagcgagtggcagggcct

SEQ ID NO: 19136 - DNA, 32 bp, Artificial; identical to SEQ ID NO: 16729
  oligonucleotide probe

SEQ ID NO: 19137 - DNA, 32 bp, Artificial; identical to SEQ ID NO: 16995
  oligonucleotide probe

SEQ ID NO: 19138 - DNA, 32 bp, Artificial
  oligonucleotide probe
agcgcaccgacgacgccctccgaggacgcgga

SEQ ID NO: 19139 - DNA, 32 bp, Artificial
  oligonucleotide probe
acgcccaacagggagccctccgaggacgcgga

SEQ ID NO: 19140 - DNA, 32 bp, Artificial; identical to SEQ ID NO: 17128
  oligonucleotide probe

SEQ ID NO: 19141 - DNA, 32 bp, Artificial; identical to SEQ ID NO: 16842
  oligonucleotide probe

SEQ ID NO: 19142 - DNA, 32 bp, Artificial; identical to SEQ ID NO: 16688
  oligonucleotide probe

SEQ ID NO: 19143 - DNA, 32 bp, Artificial; identical to SEQ ID NO: 16592
  oligonucleotide probe

SEQ ID NO: 19144 - DNA, 32 bp, Artificial; identical to SEQ ID NO: 16826
  oligonucleotide probe

SEQ ID NO: 19145 - DNA, 32 bp, Artificial; identical to SEQ ID NO: 17030
  oligonucleotide probe

SEQ ID NO: 19146 - DNA, 32 bp, Artificial; identical to SEQ ID NO: 17228
  oligonucleotide probe

SEQ ID NO: 19147 - DNA, 32 bp, Artificial; identical to SEQ ID NO: 17094
  oligonucleotide probe

SEQ ID NO: 19148 - DNA, 32 bp, Artificial; identical to SEQ ID NO: 16790
  oligonucleotide probe

SEQ ID NO: 19149 - DNA, 32 bp, Artificial; identical to SEQ ID NO: 16598
  oligonucleotide probe

SEQ ID NO: 19150 - DNA, 32 bp, Artificial; identical to SEQ ID NO: 16812
  oligonucleotide probe

SEQ ID NO: 19151 - DNA, 32 bp, Artificial; identical to SEQ ID NO: 17400
  oligonucleotide probe

SEQ ID NO: 19152 - DNA, 32 bp, Artificial
  oligonucleotide probe
tgctcggatgctgcgaggtccggagcagacgc

SEQ ID NO: 19153 - DNA, 32 bp, Artificial
  oligonucleotide probe
gagcgagcagcgggtcggtccggagcagacgc

SEQ ID NO: 19154 - DNA, 32 bp, Artificial; identical to SEQ ID NO: 17220
  oligonucleotide probe

SEQ ID NO: 19155 - DNA, 32 bp, Artificial; identical to SEQ ID NO: 17276
  oligonucleotide probe

SEQ ID NO: 19156 - DNA, 32 bp, Artificial
  oligonucleotide probe
agcgcaccgacgacgctggcggtcgcctcgag

SEQ ID NO: 19157 - DNA, 32 bp, Artificial
  oligonucleotide probe
acgcccaacagggagctggcggtcgcctcgag

SEQ ID NO: 19158 - DNA, 32 bp, Artificial; identical to SEQ ID NO: 17375
  oligonucleotide probe

SEQ ID NO: 19159 - DNA, 32 bp, Artificial; identical to SEQ ID NO: 16849
  oligonucleotide probe

SEQ ID NO: 19160 - DNA, 32 bp, Artificial; identical to SEQ ID NO: 16450
  oligonucleotide probe

SEQ ID NO: 19161 - DNA, 32 bp, Artificial; identical to SEQ ID NO: 17594
  oligonucleotide probe

SEQ ID NO: 19162 - DNA, 32 bp, Artificial; identical to SEQ ID NO: 17150
  oligonucleotide probe

SEQ ID NO: 19163 - DNA, 32 bp, Artificial; identical to SEQ ID NO: 17548
  oligonucleotide probe

SEQ ID NO: 19164 - DNA, 32 bp, Artificial; identical to SEQ ID NO: 16449
  oligonucleotide probe

SEQ ID NO: 19165 - DNA, 32 bp, Artificial; identical to SEQ ID NO: 16677
  oligonucleotide probe

SEQ ID NO: 19166 - DNA, 32 bp, Artificial
  oligonucleotide probe
agcgcaccgacgacgcgacggacgacgcgtgg

SEQ ID NO: 19167 - DNA, 32 bp, Artificial
  oligonucleotide probe
acgcccaacagggagcgacggacgacgcgtgg

SEQ ID NO: 19168 - DNA, 32 bp, Artificial; identical to SEQ ID NO: 17238
  oligonucleotide probe

SEQ ID NO: 19169 - DNA, 32 bp, Artificial; identical to SEQ ID NO: 16608
  oligonucleotide probe

SEQ ID NO: 19170 - DNA, 32 bp, Artificial; identical to SEQ ID NO: 17618
  oligonucleotide probe

SEQ ID NO: 19171 - DNA, 32 bp, Artificial; identical to SEQ ID NO: 17558
  oligonucleotide probe

SEQ ID NO: 19172 - DNA, 32 bp, Artificial; identical to SEQ ID NO: 16396
  oligonucleotide probe

SEQ ID NO: 19173 - DNA, 32 bp, Artificial; identical to SEQ ID NO: 17054
  oligonucleotide probe

SEQ ID NO: 19174 - DNA, 32 bp, Artificial; identical to SEQ ID NO: 17212
  oligonucleotide probe

SEQ ID NO: 19175 - DNA, 32 bp, Artificial; identical to SEQ ID NO: 16952
  oligonucleotide probe

SEQ ID NO: 19176 - DNA, 32 bp, Artificial; identical to SEQ ID NO: 17195
  oligonucleotide probe

SEQ ID NO: 19177 - DNA, 32 bp, Artificial; identical to SEQ ID NO: 17247
  oligonucleotide probe

SEQ ID NO: 19178 - DNA, 32 bp, Artificial; identical to SEQ ID NO: 17622
  oligonucleotide probe

SEQ ID NO: 19179 - DNA, 32 bp, Artificial; identical to SEQ ID NO: 17486
  oligonucleotide probe

SEQ ID NO: 19180 - DNA, 32 bp, Artificial; identical to SEQ ID NO: 17520
  oligonucleotide probe

SEQ ID NO: 19181 - DNA, 32 bp, Artificial; identical to SEQ ID NO: 16618
  oligonucleotide probe

SEQ ID NO: 19182 - DNA, 32 bp, Artificial; identical to SEQ ID NO: 16914
  oligonucleotide probe

SEQ ID NO: 19183 - DNA, 32 bp, Artificial; identical to SEQ ID NO: 16772
  oligonucleotide probe

SEQ ID NO: 19184 - DNA, 32 bp, Artificial
  oligonucleotide probe
gcctcaggacgcacgctggcgggtgacggtgg

SEQ ID NO: 19185 - DNA, 32 bp, Artificial
  oligonucleotide probe
gcgacctcacgcgcagtggcgggtgacggtgg

SEQ ID NO: 19186 - DNA, 32 bp, Artificial; identical to SEQ ID NO: 17104
  oligonucleotide probe

SEQ ID NO: 19187 - DNA, 32 bp, Artificial; identical to SEQ ID NO: 17170
  oligonucleotide probe

SEQ ID NO: 19188 - DNA, 32 bp, Artificial; identical to SEQ ID NO: 16650
  oligonucleotide probe

SEQ ID NO: 19189 - DNA, 32 bp, Artificial; identical to SEQ ID NO: 17292
  oligonucleotide probe

SEQ ID NO: 19190 - DNA, 32 bp, Artificial
  oligonucleotide probe
cctcgtggcggacggagcctcaggacgcacgc

SEQ ID NO: 19191 - DNA, 32 bp, Artificial
  oligonucleotide probe
gcgacagggcctgcctgcctcaggacgcacgc

SEQ ID NO: 19192 - DNA, 32 bp, Artificial; identical to SEQ ID NO: 17549
  oligonucleotide probe

SEQ ID NO: 19193 - DNA, 32 bp, Artificial; identical to SEQ ID NO: 17659
  oligonucleotide probe

SEQ ID NO: 19194 - DNA, 32 bp, Artificial
  oligonucleotide probe
cggagcctgagcgtggtggcggtcgcctcgag

SEQ ID NO: 19195 - DNA, 32 bp, Artificial
  oligonucleotide probe
actgcggacgaggccttggcggtcgcctcgag

SEQ ID NO: 19196 - DNA, 32 bp, Artificial; identical to SEQ ID NO: 16970
  oligonucleotide probe

SEQ ID NO: 19197 - DNA, 32 bp, Artificial; identical to SEQ ID NO: 17566
  oligonucleotide probe

SEQ ID NO: 19198 - DNA, 32 bp, Artificial; identical to SEQ ID NO: 17674
  oligonucleotide probe

SEQ ID NO: 19199 - DNA, 32 bp, Artificial; identical to SEQ ID NO: 16708
  oligonucleotide probe

SEQ ID NO: 19200 - DNA, 32 bp, Artificial; identical to SEQ ID NO: 17255
  oligonucleotide probe

SEQ ID NO: 19201 - DNA, 32 bp, Artificial; identical to SEQ ID NO: 17489
  oligonucleotide probe

SEQ ID NO: 19202 - DNA, 32 bp, Artificial; identical to SEQ ID NO: 17147
  oligonucleotide probe

SEQ ID NO: 19203 - DNA, 32 bp, Artificial; identical to SEQ ID NO: 16473
  oligonucleotide probe

SEQ ID NO: 19204 - DNA, 32 bp, Artificial; identical to SEQ ID NO: 17530
  oligonucleotide probe

SEQ ID NO: 19205 - DNA, 32 bp, Artificial; identical to SEQ ID NO: 16626
  oligonucleotide probe

SEQ ID NO: 19206 - DNA, 32 bp, Artificial; identical to SEQ ID NO: 16458
  oligonucleotide probe

SEQ ID NO: 19207 - DNA, 32 bp, Artificial; identical to SEQ ID NO: 17354
  oligonucleotide probe

SEQ ID NO: 19208 - DNA, 32 bp, Artificial; identical to SEQ ID NO: 16609
  oligonucleotide probe

SEQ ID NO: 19209 - DNA, 32 bp, Artificial; identical to SEQ ID NO: 17429
  oligonucleotide probe

SEQ ID NO: 19210 - DNA, 32 bp, Artificial
  oligonucleotide probe
gggtacgcgacgcgagtggcggtcgcctcgag

SEQ ID NO: 19211 - DNA, 32 bp, Artificial
  oligonucleotide probe
gagcgacgcgagagcgtggcggtcgcctcgag

SEQ ID NO: 19212 - DNA, 32 bp, Artificial
  oligonucleotide probe
gggtacgcgacgcgagagcgccaatcacgggt

SEQ ID NO: 19213 - DNA, 32 bp, Artificial
  oligonucleotide probe
gagcgacgcgagagcgagcgccaatcacgggt

SEQ ID NO: 19214 - DNA, 32 bp, Artificial; identical to SEQ ID NO: 17391
  oligonucleotide probe

SEQ ID NO: 19215 - DNA, 32 bp, Artificial; identical to SEQ ID NO: 16867
  oligonucleotide probe

SEQ ID NO: 19216 - DNA, 32 bp, Artificial
  oligonucleotide probe
cggagcctgagcgtgggcaggtggtggcgagc

SEQ ID NO: 19217 - DNA, 32 bp, Artificial
  oligonucleotide probe
actgcggacgaggcctgcaggtggtggcgagc

SEQ ID NO: 19218 - DNA, 32 bp, Artificial; identical to SEQ ID NO: 16692
  oligonucleotide probe

SEQ ID NO: 19219 - DNA, 32 bp, Artificial; identical to SEQ ID NO: 17704
  oligonucleotide probe

SEQ ID NO: 19220 - DNA, 32 bp, Artificial
  oligonucleotide probe
gcctcaggacgcacgcgcaggtggtggcgagc

SEQ ID NO: 19221 - DNA, 32 bp, Artificial
  oligonucleotide probe
gcgacctcacgcgcaggcaggtggtggcgagc

SEQ ID NO: 19222 - DNA, 32 bp, Artificial; identical to SEQ ID NO: 16925
  oligonucleotide probe

SEQ ID NO: 19223 - DNA, 32 bp, Artificial; identical to SEQ ID NO: 16753
  oligonucleotide probe

SEQ ID NO: 19224 - DNA, 32 bp, Artificial; identical to SEQ ID NO: 17535
  oligonucleotide probe

SEQ ID NO: 19225 - DNA, 32 bp, Artificial; identical to SEQ ID NO: 16427
  oligonucleotide probe

SEQ ID NO: 19226 - DNA, 32 bp, Artificial; identical to SEQ ID NO: 17298
  oligonucleotide probe

SEQ ID NO: 19227 - DNA, 32 bp, Artificial; identical to SEQ ID NO: 16744
  oligonucleotide probe

SEQ ID NO: 19228 - DNA, 32 bp, Artificial; identical to SEQ ID NO: 16580
  oligonucleotide probe

SEQ ID NO: 19229 - DNA, 32 bp, Artificial; identical to SEQ ID NO: 16492
  oligonucleotide probe

SEQ ID NO: 19230 - DNA, 32 bp, Artificial; identical to SEQ ID NO: 16584
  oligonucleotide probe

SEQ ID NO: 19231 - DNA, 32 bp, Artificial; identical to SEQ ID NO: 16932
  oligonucleotide probe

SEQ ID NO: 19232 - DNA, 32 bp, Artificial; identical to SEQ ID NO: 16811
  oligonucleotide probe

SEQ ID NO: 19233 - DNA, 32 bp, Artificial; identical to SEQ ID NO: 17425
  oligonucleotide probe

SEQ ID NO: 19234 - DNA, 32 bp, Artificial; identical to SEQ ID NO: 17322
  oligonucleotide probe

SEQ ID NO: 19235 - DNA, 32 bp, Artificial; identical to SEQ ID NO: 17386
  oligonucleotide probe

SEQ ID NO: 19236 - DNA, 32 bp, Artificial; identical to SEQ ID NO: 17111
  oligonucleotide probe

SEQ ID NO: 19237 - DNA, 32 bp, Artificial; identical to SEQ ID NO: 17371
  oligonucleotide probe

SEQ ID NO: 19238 - DNA, 32 bp, Artificial; identical to SEQ ID NO: 17140
  oligonucleotide probe

SEQ ID NO: 19239 - DNA, 32 bp, Artificial; identical to SEQ ID NO: 17058
  oligonucleotide probe

SEQ ID NO: 19240 - DNA, 32 bp, Artificial; identical to SEQ ID NO: 16913
  oligonucleotide probe

SEQ ID NO: 19241 - DNA, 32 bp, Artificial; identical to SEQ ID NO: 17509
  oligonucleotide probe

SEQ ID NO: 19242 - DNA, 32 bp, Artificial; identical to SEQ ID NO: 16762
  oligonucleotide probe

SEQ ID NO: 19243 - DNA, 32 bp, Artificial; identical to SEQ ID NO: 17398
  oligonucleotide probe

SEQ ID NO: 19244 - DNA, 32 bp, Artificial; identical to SEQ ID NO: 17421
  oligonucleotide probe

SEQ ID NO: 19245 - DNA, 32 bp, Artificial; identical to SEQ ID NO: 17273
  oligonucleotide probe

SEQ ID NO: 19246 - DNA, 32 bp, Artificial; identical to SEQ ID NO: 17250
  oligonucleotide probe

SEQ ID NO: 19247 - DNA, 32 bp, Artificial; identical to SEQ ID NO: 16804
  oligonucleotide probe

SEQ ID NO: 19248 - DNA, 32 bp, Artificial; identical to SEQ ID NO: 17458
  oligonucleotide probe

SEQ ID NO: 19249 - DNA, 32 bp, Artificial; identical to SEQ ID NO: 17522
  oligonucleotide probe

SEQ ID NO: 19250 - DNA, 32 bp, Artificial
  oligonucleotide probe
caggcctccctcgcgagcgacgagcgagccaa

SEQ ID NO: 19251 - DNA, 32 bp, Artificial
  oligonucleotide probe
cggagcaggagcggaagcgacgagcgagccaa

SEQ ID NO: 19252 - DNA, 32 bp, Artificial; identical to SEQ ID NO: 16865
  oligonucleotide probe

SEQ ID NO: 19253 - DNA, 32 bp, Artificial; identical to SEQ ID NO: 17173
  oligonucleotide probe

SEQ ID NO: 19254 - DNA, 32 bp, Artificial; identical to SEQ ID NO: 17017
  oligonucleotide probe

SEQ ID NO: 19255 - DNA, 32 bp, Artificial; identical to SEQ ID NO: 17145
  oligonucleotide probe

SEQ ID NO: 19256 - DNA, 32 bp, Artificial; identical to SEQ ID NO: 16718
  oligonucleotide probe

SEQ ID NO: 19257 - DNA, 32 bp, Artificial; identical to SEQ ID NO: 17628
  oligonucleotide probe

SEQ ID NO: 19258 - DNA, 32 bp, Artificial; identical to SEQ ID NO: 17464
  oligonucleotide probe

SEQ ID NO: 19259 - DNA, 32 bp, Artificial; identical to SEQ ID NO: 17546
  oligonucleotide probe

SEQ ID NO: 19260 - DNA, 32 bp, Artificial; identical to SEQ ID NO: 16985
  oligonucleotide probe

SEQ ID NO: 19261 - DNA, 32 bp, Artificial; identical to SEQ ID NO: 17261
  oligonucleotide probe

SEQ ID NO: 19262 - DNA, 32 bp, Artificial; identical to SEQ ID NO: 17666
  oligonucleotide probe

SEQ ID NO: 19263 - DNA, 32 bp, Artificial; identical to SEQ ID NO: 16722
  oligonucleotide probe

SEQ ID NO: 19264 - DNA, 32 bp, Artificial; identical to SEQ ID NO: 16918
  oligonucleotide probe

SEQ ID NO: 19265 - DNA, 32 bp, Artificial; identical to SEQ ID NO: 17634
  oligonucleotide probe

SEQ ID NO: 19266 - DNA, 32 bp, Artificial; identical to SEQ ID NO: 16774
  oligonucleotide probe

SEQ ID NO: 19267 - DNA, 32 bp, Artificial; identical to SEQ ID NO: 17470
  oligonucleotide probe

SEQ ID NO: 19268 - DNA, 32 bp, Artificial; identical to SEQ ID NO: 17629
  oligonucleotide probe

SEQ ID NO: 19269 - DNA, 32 bp, Artificial; identical to SEQ ID NO: 16733
  oligonucleotide probe

SEQ ID NO: 19270 - DNA, 32 bp, Artificial
  oligonucleotide probe
cctcgtggcggacggagggtacgcgacgcgag

SEQ ID NO: 19271 - DNA, 32 bp, Artificial
  oligonucleotide probe
gcgacagggcctgcctgggtacgcgacgcgag

SEQ ID NO: 19272 - DNA, 32 bp, Artificial
  oligonucleotide probe
caggcctccctcgcgagcctgtgggtccgcga

SEQ ID NO: 19273 - DNA, 32 bp, Artificial
  oligonucleotide probe
cggagcaggagcggaagcctgtgggtccgcga

SEQ ID NO: 19274 - DNA, 32 bp, Artificial; identical to SEQ ID NO: 17012
  oligonucleotide probe

SEQ ID NO: 19275 - DNA, 32 bp, Artificial; identical to SEQ ID NO: 16740
  oligonucleotide probe

SEQ ID NO: 19276 - DNA, 32 bp, Artificial; identical to SEQ ID NO: 16808
  oligonucleotide probe

SEQ ID NO: 19277 - DNA, 32 bp, Artificial; identical to SEQ ID NO: 17342
  oligonucleotide probe

SEQ ID NO: 19278 - DNA, 32 bp, Artificial; identical to SEQ ID NO: 16948
  oligonucleotide probe

SEQ ID NO: 19279 - DNA, 32 bp, Artificial; identical to SEQ ID NO: 17707
  oligonucleotide probe

SEQ ID NO: 19280 - DNA, 32 bp, Artificial; identical to SEQ ID NO: 17516
  oligonucleotide probe

SEQ ID NO: 19281 - DNA, 32 bp, Artificial; identical to SEQ ID NO: 17442
  oligonucleotide probe

SEQ ID NO: 19282 - DNA, 32 bp, Artificial; identical to SEQ ID NO: 17099
  oligonucleotide probe

SEQ ID NO: 19283 - DNA, 32 bp, Artificial; identical to SEQ ID NO: 17123
  oligonucleotide probe

SEQ ID NO: 19284 - DNA, 32 bp, Artificial; identical to SEQ ID NO: 16666
  oligonucleotide probe

SEQ ID NO: 19285 - DNA, 32 bp, Artificial; identical to SEQ ID NO: 16602
  oligonucleotide probe

SEQ ID NO: 19286 - DNA, 32 bp, Artificial; identical to SEQ ID NO: 16743
  oligonucleotide probe

SEQ ID NO: 19287 - DNA, 32 bp, Artificial; identical to SEQ ID NO: 16571
  oligonucleotide probe

SEQ ID NO: 19288 - DNA, 32 bp, Artificial; identical to SEQ ID NO: 17274
  oligonucleotide probe

SEQ ID NO: 19289 - DNA, 32 bp, Artificial; identical to SEQ ID NO: 17014
  oligonucleotide probe

SEQ ID NO: 19290 - DNA, 32 bp, Artificial
  oligonucleotide probe
caggcctccctcgcgacaggagcgggaagcga

SEQ ID NO: 19291 - DNA, 32 bp, Artificial
  oligonucleotide probe
cggagcaggagcggaacaggagcgggaagcga

SEQ ID NO: 19292 - DNA, 32 bp, Artificial
  oligonucleotide probe
gtggcgagcctcgggttggcgggtgacggtgg

SEQ ID NO: 19293 - DNA, 32 bp, Artificial
  oligonucleotide probe
cctcgtggcggacggatggcgggtgacggtgg

SEQ ID NO: 19294 - DNA, 32 bp, Artificial; identical to SEQ ID NO: 16395
  oligonucleotide probe

SEQ ID NO: 19295 - DNA, 32 bp, Artificial; identical to SEQ ID NO: 17637
  oligonucleotide probe

SEQ ID NO: 19296 - DNA, 32 bp, Artificial; identical to SEQ ID NO: 17652
  oligonucleotide probe

SEQ ID NO: 19297 - DNA, 32 bp, Artificial; identical to SEQ ID NO: 17112
  oligonucleotide probe

SEQ ID NO: 19298 - DNA, 32 bp, Artificial
  oligonucleotide probe
gcctcaggacgcacgcgtggcaggagcgacgc

SEQ ID NO: 19299 - DNA, 32 bp, Artificial
  oligonucleotide probe
gcgacctcacgcgcaggtggcaggagcgacgc

SEQ ID NO: 19300 - DNA, 32 bp, Artificial; identical to SEQ ID NO: 17080
  oligonucleotide probe

SEQ ID NO: 19301 - DNA, 32 bp, Artificial; identical to SEQ ID NO: 17570
  oligonucleotide probe

SEQ ID NO: 19302 - DNA, 32 bp, Artificial
  oligonucleotide probe
gtggcgagcctcgggtgtggcaggagcgacgc

SEQ ID NO: 19303 - DNA, 32 bp, Artificial
  oligonucleotide probe
cctcgtggcggacggagtggcaggagcgacgc

SEQ ID NO: 19304 - DNA, 32 bp, Artificial; identical to SEQ ID NO: 16393
  oligonucleotide probe

SEQ ID NO: 19305 - DNA, 32 bp, Artificial; identical to SEQ ID NO: 17405
  oligonucleotide probe

SEQ ID NO: 19306 - DNA, 32 bp, Artificial; identical to SEQ ID NO: 16509
  oligonucleotide probe

SEQ ID NO: 19307 - DNA, 32 bp, Artificial; identical to SEQ ID NO: 16665
  oligonucleotide probe

SEQ ID NO: 19308 - DNA, 32 bp, Artificial; identical to SEQ ID NO: 16892
  oligonucleotide probe

SEQ ID NO: 19309 - DNA, 32 bp, Artificial; identical to SEQ ID NO: 17604
  oligonucleotide probe

SEQ ID NO: 19310 - DNA, 32 bp, Artificial; identical to SEQ ID NO: 17415
  oligonucleotide probe

SEQ ID NO: 19311 - DNA, 32 bp, Artificial; identical to SEQ ID NO: 16839
  oligonucleotide probe

SEQ ID NO: 19312 - DNA, 32 bp, Artificial
  oligonucleotide probe
gggtacgcgacgcgaggtggcggaggtcggaa

SEQ ID NO: 19313 - DNA, 32 bp, Artificial
  oligonucleotide probe
gagcgacgcgagagcggtggcggaggtcggaa

SEQ ID NO: 19314 - DNA, 32 bp, Artificial; identical to SEQ ID NO: 17565
  oligonucleotide probe

SEQ ID NO: 19315 - DNA, 32 bp, Artificial; identical to SEQ ID NO: 16445
  oligonucleotide probe

SEQ ID NO: 19316 - DNA, 32 bp, Artificial
  oligonucleotide probe
cggagcctgagcgtggcaccgcgaggtcacgc

SEQ ID NO: 19317 - DNA, 32 bp, Artificial
  oligonucleotide probe
actgcggacgaggcctcaccgcgaggtcacgc

SEQ ID NO: 19318 - DNA, 32 bp, Artificial; identical to SEQ ID NO: 17467
  oligonucleotide probe

SEQ ID NO: 19319 - DNA, 32 bp, Artificial; identical to SEQ ID NO: 17563
  oligonucleotide probe

SEQ ID NO: 19320 - DNA, 32 bp, Artificial; identical to SEQ ID NO: 17435
  oligonucleotide probe

SEQ ID NO: 19321 - DNA, 32 bp, Artificial; identical to SEQ ID NO: 17385
  oligonucleotide probe

SEQ ID NO: 19322 - DNA, 32 bp, Artificial
  oligonucleotide probe
gcctcaggacgcacgctggcggtcgcctcgag

SEQ ID NO: 19323 - DNA, 32 bp, Artificial
  oligonucleotide probe
gcgacctcacgcgcagtggcggtcgcctcgag

SEQ ID NO: 19324 - DNA, 32 bp, Artificial; identical to SEQ ID NO: 17432
  oligonucleotide probe

SEQ ID NO: 19325 - DNA, 32 bp, Artificial; identical to SEQ ID NO: 16394
  oligonucleotide probe

SEQ ID NO: 19326 - DNA, 32 bp, Artificial; identical to SEQ ID NO: 16553
  oligonucleotide probe

SEQ ID NO: 19327 - DNA, 32 bp, Artificial; identical to SEQ ID NO: 17327
  oligonucleotide probe

SEQ ID NO: 19328 - DNA, 32 bp, Artificial
  oligonucleotide probe
gtggcgagcctcgggtcctccgaggacgcgga

SEQ ID NO: 19329 - DNA, 32 bp, Artificial
  oligonucleotide probe
cctcgtggcggacggacctccgaggacgcgga

SEQ ID NO: 19330 - DNA, 32 bp, Artificial; identical to SEQ ID NO: 17452
  oligonucleotide probe

SEQ ID NO: 19331 - DNA, 32 bp, Artificial; identical to SEQ ID NO: 17158
  oligonucleotide probe

SEQ ID NO: 19332 - DNA, 32 bp, Artificial; identical to SEQ ID NO: 17163
  oligonucleotide probe

SEQ ID NO: 19333 - DNA, 32 bp, Artificial; identical to SEQ ID NO: 16757
  oligonucleotide probe

SEQ ID NO: 19334 - DNA, 32 bp, Artificial; identical to SEQ ID NO: 16936
  oligonucleotide probe

SEQ ID NO: 19335 - DNA, 32 bp, Artificial; identical to SEQ ID NO: 17698
  oligonucleotide probe

SEQ ID NO: 19336 - DNA, 32 bp, Artificial; identical to SEQ ID NO: 16942
  oligonucleotide probe

SEQ ID NO: 19337 - DNA, 32 bp, Artificial; identical to SEQ ID NO: 16820
  oligonucleotide probe

SEQ ID NO: 19338 - DNA, 32 bp, Artificial
  oligonucleotide probe
gtggcgagcctcgggtgagcgcctcctcgagc

SEQ ID NO: 19339 - DNA, 32 bp, Artificial
  oligonucleotide probe
cctcgtggcggacggagagcgcctcctcgagc

SEQ ID NO: 19340 - DNA, 32 bp, Artificial; identical to SEQ ID NO: 17460
  oligonucleotide probe

SEQ ID NO: 19341 - DNA, 32 bp, Artificial; identical to SEQ ID NO: 17038
  oligonucleotide probe

SEQ ID NO: 19342 - DNA, 32 bp, Artificial
  oligonucleotide probe
gtccgggtcaggcagggcgacgagcgagccaa

SEQ ID NO: 19343 - DNA, 32 bp, Artificial
  oligonucleotide probe
acgcagcggggtgacggcgacgagcgagccaa

SEQ ID NO: 19344 - DNA, 32 bp, Artificial
  oligonucleotide probe
cggagcctgagcgtgggtggcggaggtcggaa

SEQ ID NO: 19345 - DNA, 32 bp, Artificial
  oligonucleotide probe
actgcggacgaggcctgtggcggaggtcggaa

SEQ ID NO: 19346 - DNA, 32 bp, Artificial; identical to SEQ ID NO: 16822
  oligonucleotide probe

SEQ ID NO: 19347 - DNA, 32 bp, Artificial; identical to SEQ ID NO: 16528
  oligonucleotide probe

SEQ ID NO: 19348 - DNA, 32 bp, Artificial; identical to SEQ ID NO: 16599
  oligonucleotide probe

SEQ ID NO: 19349 - DNA, 32 bp, Artificial; identical to SEQ ID NO: 16573
  oligonucleotide probe

SEQ ID NO: 19350 - DNA, 32 bp, Artificial; identical to SEQ ID NO: 17205
  oligonucleotide probe

SEQ ID NO: 19351 - DNA, 32 bp, Artificial; identical to SEQ ID NO: 16789
  oligonucleotide probe

SEQ ID NO: 19352 - DNA, 32 bp, Artificial; identical to SEQ ID NO: 17352
  oligonucleotide probe

SEQ ID NO: 19353 - DNA, 32 bp, Artificial; identical to SEQ ID NO: 16670
  oligonucleotide probe

SEQ ID NO: 19354 - DNA, 32 bp, Artificial; identical to SEQ ID NO: 17266
  oligonucleotide probe

SEQ ID NO: 19355 - DNA, 32 bp, Artificial; identical to SEQ ID NO: 16652
  oligonucleotide probe

SEQ ID NO: 19356 - DNA, 32 bp, Artificial; identical to SEQ ID NO: 17108
  oligonucleotide probe

SEQ ID NO: 19357 - DNA, 32 bp, Artificial; identical to SEQ ID NO: 16482
  oligonucleotide probe

SEQ ID NO: 19358 - DNA, 32 bp, Artificial; identical to SEQ ID NO: 17007
  oligonucleotide probe

SEQ ID NO: 19359 - DNA, 32 bp, Artificial; identical to SEQ ID NO: 16759
  oligonucleotide probe

SEQ ID NO: 19360 - DNA, 32 bp, Artificial; identical to SEQ ID NO: 17107
  oligonucleotide probe

SEQ ID NO: 19361 - DNA, 32 bp, Artificial; identical to SEQ ID NO: 17537
  oligonucleotide probe

SEQ ID NO: 19362 - DNA, 32 bp, Artificial; identical to SEQ ID NO: 16481
  oligonucleotide probe

SEQ ID NO: 19363 - DNA, 32 bp, Artificial; identical to SEQ ID NO: 16641
  oligonucleotide probe

SEQ ID NO: 19364 - DNA, 32 bp, Artificial; identical to SEQ ID NO: 16520
  oligonucleotide probe

SEQ ID NO: 19365 - DNA, 32 bp, Artificial; identical to SEQ ID NO: 16542
  oligonucleotide probe

SEQ ID NO: 19366 - DNA, 32 bp, Artificial; identical to SEQ ID NO: 17621
  oligonucleotide probe

SEQ ID NO: 19367 - DNA, 32 bp, Artificial; identical to SEQ ID NO: 17551
  oligonucleotide probe

SEQ ID NO: 19368 - DNA, 32 bp, Artificial; identical to SEQ ID NO: 16686
  oligonucleotide probe

SEQ ID NO: 19369 - DNA, 32 bp, Artificial; identical to SEQ ID NO: 16476
  oligonucleotide probe

SEQ ID NO: 19370 - DNA, 32 bp, Artificial; identical to SEQ ID NO: 16586
  oligonucleotide probe

SEQ ID NO: 19371 - DNA, 32 bp, Artificial; identical to SEQ ID NO: 16480
  oligonucleotide probe

SEQ ID NO: 19372 - DNA, 32 bp, Artificial; identical to SEQ ID NO: 17592
  oligonucleotide probe

SEQ ID NO: 19373 - DNA, 32 bp, Artificial; identical to SEQ ID NO: 17526
  oligonucleotide probe

SEQ ID NO: 19374 - DNA, 32 bp, Artificial
  oligonucleotide probe
agcgcaccgacgacgctggcgggtgacggtgg

SEQ ID NO: 19375 - DNA, 32 bp, Artificial
  oligonucleotide probe
acgcccaacagggagctggcgggtgacggtgg

SEQ ID NO: 19376 - DNA, 32 bp, Artificial; identical to SEQ ID NO: 16663
  oligonucleotide probe

SEQ ID NO: 19377 - DNA, 32 bp, Artificial; identical to SEQ ID NO: 16447
  oligonucleotide probe

SEQ ID NO: 19378 - DNA, 32 bp, Artificial
  oligonucleotide probe
cggagcctgagcgtggtggcgggtgacggtgg

SEQ ID NO: 19379 - DNA, 32 bp, Artificial
  oligonucleotide probe
actgcggacgaggccttggcgggtgacggtgg

SEQ ID NO: 19380 - DNA, 32 bp, Artificial; identical to SEQ ID NO: 16416
  oligonucleotide probe

SEQ ID NO: 19381 - DNA, 32 bp, Artificial; identical to SEQ ID NO: 16766
  oligonucleotide probe

SEQ ID NO: 19382 - DNA, 32 bp, Artificial
  oligonucleotide probe
tgctcggatgctgcgaaccacggaagcgcgga

SEQ ID NO: 19383 - DNA, 32 bp, Artificial
  oligonucleotide probe
gagcgagcagcgggtcaccacggaagcgcgga

SEQ ID NO: 19384 - DNA, 32 bp, Artificial; identical to SEQ ID NO: 17237
  oligonucleotide probe

SEQ ID NO: 19385 - DNA, 32 bp, Artificial; identical to SEQ ID NO: 16977
  oligonucleotide probe

SEQ ID NO: 19386 - DNA, 32 bp, Artificial; identical to SEQ ID NO: 16965
  oligonucleotide probe

SEQ ID NO: 19387 - DNA, 32 bp, Artificial; identical to SEQ ID NO: 17125
  oligonucleotide probe

SEQ ID NO: 19388 - DNA, 32 bp, Artificial; identical to SEQ ID NO: 17684
  oligonucleotide probe

SEQ ID NO: 19389 - DNA, 32 bp, Artificial; identical to SEQ ID NO: 17420
  oligonucleotide probe

SEQ ID NO: 19390 - DNA, 32 bp, Artificial; identical to SEQ ID NO: 17583
  oligonucleotide probe

SEQ ID NO: 19391 - DNA, 32 bp, Artificial; identical to SEQ ID NO: 17233
  oligonucleotide probe

SEQ ID NO: 19392 - DNA, 32 bp, Artificial; identical to SEQ ID NO: 17507
  oligonucleotide probe

SEQ ID NO: 19393 - DNA, 32 bp, Artificial; identical to SEQ ID NO: 17295
  oligonucleotide probe

SEQ ID NO: 19394 - DNA, 32 bp, Artificial
  oligonucleotide probe
cagggcagggtcgggttggcgtgggggtccaa

SEQ ID NO: 19395 - DNA, 32 bp, Artificial
  oligonucleotide probe
ggtcgcgacacctggctggcgtgggggtccaa

SEQ ID NO: 19396 - DNA, 32 bp, Artificial; identical to SEQ ID NO: 17305
  oligonucleotide probe

SEQ ID NO: 19397 - DNA, 32 bp, Artificial; identical to SEQ ID NO: 16597
  oligonucleotide probe

SEQ ID NO: 19398 - DNA, 32 bp, Artificial; identical to SEQ ID NO: 16750
  oligonucleotide probe

SEQ ID NO: 19399 - DNA, 32 bp, Artificial; identical to SEQ ID NO: 17518
  oligonucleotide probe

SEQ ID NO: 19400 - DNA, 32 bp, Artificial
  oligonucleotide probe
gtccgggtcaggcaggagcggtccgcgagagc

SEQ ID NO: 19401 - DNA, 32 bp, Artificial
  oligonucleotide probe
acgcagcggggtgacgagcggtccgcgagagc

SEQ ID NO: 19402 - DNA, 32 bp, Artificial; identical to SEQ ID NO: 17002
  oligonucleotide probe

SEQ ID NO: 19403 - DNA, 32 bp, Artificial; identical to SEQ ID NO: 17392
  oligonucleotide probe

SEQ ID NO: 19404 - DNA, 32 bp, Artificial; identical to SEQ ID NO: 16972
  oligonucleotide probe

SEQ ID NO: 19405 - DNA, 32 bp, Artificial; identical to SEQ ID NO: 16990
  oligonucleotide probe

SEQ ID NO: 19406 - DNA, 32 bp, Artificial; identical to SEQ ID NO: 17487
  oligonucleotide probe

SEQ ID NO: 19407 - DNA, 32 bp, Artificial; identical to SEQ ID NO: 17131
  oligonucleotide probe

SEQ ID NO: 19408 - DNA, 32 bp, Artificial
  oligonucleotide probe
cctcgtggcggacggaagcgcaccgacgacgc

SEQ ID NO: 19409 - DNA, 32 bp, Artificial
  oligonucleotide probe
gcgacagggcctgcctagcgcaccgacgacgc

SEQ ID NO: 19410 - DNA, 32 bp, Artificial; identical to SEQ ID NO: 16992
  oligonucleotide probe

SEQ ID NO: 19411 - DNA, 32 bp, Artificial; identical to SEQ ID NO: 17448
  oligonucleotide probe

SEQ ID NO: 19412 - DNA, 32 bp, Artificial; identical to SEQ ID NO: 17423
  oligonucleotide probe

SEQ ID NO: 19413 - DNA, 32 bp, Artificial; identical to SEQ ID NO: 17669
  oligonucleotide probe

SEQ ID NO: 19414 - DNA, 32 bp, Artificial
  oligonucleotide probe
caggcctccctcgcgaaccacggaagcgcgga

SEQ ID NO: 19415 - DNA, 32 bp, Artificial
  oligonucleotide probe
cggagcaggagcggaaaccacggaagcgcgga

SEQ ID NO: 19416 - DNA, 32 bp, Artificial; identical to SEQ ID NO: 17262
  oligonucleotide probe

SEQ ID NO: 19417 - DNA, 32 bp, Artificial; identical to SEQ ID NO: 17656
  oligonucleotide probe

SEQ ID NO: 19418 - DNA, 32 bp, Artificial; identical to SEQ ID NO: 17280
  oligonucleotide probe

SEQ ID NO: 19419 - DNA, 32 bp, Artificial; identical to SEQ ID NO: 17580
  oligonucleotide probe

SEQ ID NO: 19420 - DNA, 32 bp, Artificial
  oligonucleotide probe
tgctcggatgctgcgagcctgtgggtccgcga

SEQ ID NO: 19421 - DNA, 32 bp, Artificial
  oligonucleotide probe
gagcgagcagcgggtcgcctgtgggtccgcga

SEQ ID NO: 19422 - DNA, 32 bp, Artificial; identical to SEQ ID NO: 16707
  oligonucleotide probe

SEQ ID NO: 19423 - DNA, 32 bp, Artificial; identical to SEQ ID NO: 16531
  oligonucleotide probe

SEQ ID NO: 19424 - DNA, 32 bp, Artificial; identical to SEQ ID NO: 17660
  oligonucleotide probe

SEQ ID NO: 19425 - DNA, 32 bp, Artificial; identical to SEQ ID NO: 16548
  oligonucleotide probe

SEQ ID NO: 19426 - DNA, 32 bp, Artificial
  oligonucleotide probe
gtccgggtcaggcagggcgaagcggcgaggtc

SEQ ID NO: 19427 - DNA, 32 bp, Artificial
  oligonucleotide probe
acgcagcggggtgacggcgaagcggcgaggtc

SEQ ID NO: 19428 - DNA, 32 bp, Artificial; identical to SEQ ID NO: 17381
  oligonucleotide probe

SEQ ID NO: 19429 - DNA, 32 bp, Artificial; identical to SEQ ID NO: 17341
  oligonucleotide probe

SEQ ID NO: 19430 - DNA, 32 bp, Artificial; identical to SEQ ID NO: 17168
  oligonucleotide probe

SEQ ID NO: 19431 - DNA, 32 bp, Artificial; identical to SEQ ID NO: 17016
  oligonucleotide probe

SEQ ID NO: 19432 - DNA, 32 bp, Artificial; identical to SEQ ID NO: 16734
  oligonucleotide probe

SEQ ID NO: 19433 - DNA, 32 bp, Artificial; identical to SEQ ID NO: 17182
  oligonucleotide probe

SEQ ID NO: 19434 - DNA, 32 bp, Artificial
  oligonucleotide probe
cctcgtggcggacggaacgccaccgcctgacg

SEQ ID NO: 19435 - DNA, 32 bp, Artificial
  oligonucleotide probe
gcgacagggcctgcctacgccaccgcctgacg

SEQ ID NO: 19436 - DNA, 32 bp, Artificial; identical to SEQ ID NO: 16541
  oligonucleotide probe

SEQ ID NO: 19437 - DNA, 32 bp, Artificial; identical to SEQ ID NO: 16837
  oligonucleotide probe

SEQ ID NO: 19438 - DNA, 32 bp, Artificial; identical to SEQ ID NO: 16437
  oligonucleotide probe

SEQ ID NO: 19439 - DNA, 32 bp, Artificial; identical to SEQ ID NO: 17687
  oligonucleotide probe

SEQ ID NO: 19440 - DNA, 32 bp, Artificial; identical to SEQ ID NO: 16420
  oligonucleotide probe

SEQ ID NO: 19441 - DNA, 32 bp, Artificial; identical to SEQ ID NO: 17332
  oligonucleotide probe

SEQ ID NO: 19442 - DNA, 32 bp, Artificial
  oligonucleotide probe
caggcctccctcgcgaacgcgagcgggtgcag

SEQ ID NO: 19443 - DNA, 32 bp, Artificial
  oligonucleotide probe
cggagcaggagcggaaacgcgagcgggtgcag

SEQ ID NO: 19444 - DNA, 32 bp, Artificial; identical to SEQ ID NO: 16463
  oligonucleotide probe

SEQ ID NO: 19445 - DNA, 32 bp, Artificial; identical to SEQ ID NO: 17441
  oligonucleotide probe

SEQ ID NO: 19446 - DNA, 32 bp, Artificial; identical to SEQ ID NO: 17377
  oligonucleotide probe

SEQ ID NO: 19447 - DNA, 32 bp, Artificial; identical to SEQ ID NO: 17265
  oligonucleotide probe

SEQ ID NO: 19448 - DNA, 32 bp, Artificial
  oligonucleotide probe
gcctcaggacgcacgcgacggacgacgcgtgg

SEQ ID NO: 19449 - DNA, 32 bp, Artificial
  oligonucleotide probe
gcgacctcacgcgcaggacggacgacgcgtgg

SEQ ID NO: 19450 - DNA, 32 bp, Artificial; identical to SEQ ID NO: 16900
  oligonucleotide probe

SEQ ID NO: 19451 - DNA, 32 bp, Artificial; identical to SEQ ID NO: 17490
  oligonucleotide probe

SEQ ID NO: 19452 - DNA, 32 bp, Artificial
  oligonucleotide probe
gtccgggtcaggcaggcaggagcgggaagcga

SEQ ID NO: 19453 - DNA, 32 bp, Artificial
  oligonucleotide probe
acgcagcggggtgacgcaggagcgggaagcga

SEQ ID NO: 19454 - DNA, 32 bp, Artificial
  oligonucleotide probe
cggagcctgagcgtggcaccgggtggtcagcg

SEQ ID NO: 19455 - DNA, 32 bp, Artificial
  oligonucleotide probe
actgcggacgaggcctcaccgggtggtcagcg

SEQ ID NO: 19456 - DNA, 32 bp, Artificial; identical to SEQ ID NO: 17477
  oligonucleotide probe

SEQ ID NO: 19457 - DNA, 32 bp, Artificial; identical to SEQ ID NO: 17245
  oligonucleotide probe

SEQ ID NO: 19458 - DNA, 32 bp, Artificial
  oligonucleotide probe
gagcgagcagcgggtccaggcctccctcgcga

SEQ ID NO: 19459 - DNA, 32 bp, Artificial
  oligonucleotide probe
cacccgagagcggtggcaggcctccctcgcga

SEQ ID NO: 19460 - DNA, 32 bp, Artificial
  oligonucleotide probe
cggagcctgagcgtggacgcaccagtcccgga

SEQ ID NO: 19461 - DNA, 32 bp, Artificial
  oligonucleotide probe
actgcggacgaggcctacgcaccagtcccgga

SEQ ID NO: 19462 - DNA, 32 bp, Artificial; identical to SEQ ID NO: 17642
  oligonucleotide probe

SEQ ID NO: 19463 - DNA, 32 bp, Artificial; identical to SEQ ID NO: 17701
  oligonucleotide probe

SEQ ID NO: 19464 - DNA, 32 bp, Artificial; identical to SEQ ID NO: 17010
  oligonucleotide probe

SEQ ID NO: 19465 - DNA, 32 bp, Artificial; identical to SEQ ID NO: 16502
  oligonucleotide probe

SEQ ID NO: 19466 - DNA, 32 bp, Artificial; identical to SEQ ID NO: 16457
  oligonucleotide probe

SEQ ID NO: 19467 - DNA, 32 bp, Artificial; identical to SEQ ID NO: 17117
  oligonucleotide probe

SEQ ID NO: 19468 - DNA, 32 bp, Artificial; identical to SEQ ID NO: 17454
  oligonucleotide probe

SEQ ID NO: 19469 - DNA, 32 bp, Artificial; identical to SEQ ID NO: 16878
  oligonucleotide probe

SEQ ID NO: 19470 - DNA, 32 bp, Artificial
  oligonucleotide probe
gcctcaggacgcacgccaccgcgaggtcacgc

SEQ ID NO: 19471 - DNA, 32 bp, Artificial
  oligonucleotide probe
gcgacctcacgcgcagcaccgcgaggtcacgc

SEQ ID NO: 19472 - DNA, 32 bp, Artificial; identical to SEQ ID NO: 16736
  oligonucleotide probe

SEQ ID NO: 19473 - DNA, 32 bp, Artificial; identical to SEQ ID NO: 17060
  oligonucleotide probe

SEQ ID NO: 19474 - DNA, 32 bp, Artificial; identical to SEQ ID NO: 17285
  oligonucleotide probe

SEQ ID NO: 19475 - DNA, 32 bp, Artificial; identical to SEQ ID NO: 16969
  oligonucleotide probe

SEQ ID NO: 19476 - DNA, 32 bp, Artificial; identical to SEQ ID NO: 17378
  oligonucleotide probe

SEQ ID NO: 19477 - DNA, 32 bp, Artificial; identical to SEQ ID NO: 16964
  oligonucleotide probe

SEQ ID NO: 19478 - DNA, 32 bp, Artificial; identical to SEQ ID NO: 17004
  oligonucleotide probe

SEQ ID NO: 19479 - DNA, 32 bp, Artificial; identical to SEQ ID NO: 17406
  oligonucleotide probe

SEQ ID NO: 19480 - DNA, 32 bp, Artificial; identical to SEQ ID NO: 16730
  oligonucleotide probe

SEQ ID NO: 19481 - DNA, 32 bp, Artificial; identical to SEQ ID NO: 16864
  oligonucleotide probe

SEQ ID NO: 19482 - DNA, 32 bp, Artificial; identical to SEQ ID NO: 17222
  oligonucleotide probe

SEQ ID NO: 19483 - DNA, 32 bp, Artificial; identical to SEQ ID NO: 17110
  oligonucleotide probe

SEQ ID NO: 19484 - DNA, 32 bp, Artificial; identical to SEQ ID NO: 16764
  oligonucleotide probe

SEQ ID NO: 19485 - DNA, 32 bp, Artificial; identical to SEQ ID NO: 17446
  oligonucleotide probe

SEQ ID NO: 19486 - DNA, 32 bp, Artificial
  oligonucleotide probe
cggagcctgagcgtggagcgccaatcacgggt

SEQ ID NO: 19487 - DNA, 32 bp, Artificial
  oligonucleotide probe
actgcggacgaggcctagcgccaatcacgggt

SEQ ID NO: 19488 - DNA, 32 bp, Artificial
  oligonucleotide probe
agcgcaccgacgacgcgcctgggtcaccacgc

SEQ ID NO: 19489 - DNA, 32 bp, Artificial
  oligonucleotide probe
acgcccaacagggagcgcctgggtcaccacgc

SEQ ID NO: 19490 - DNA, 32 bp, Artificial; identical to SEQ ID NO: 17586
  oligonucleotide probe

SEQ ID NO: 19491 - DNA, 32 bp, Artificial; identical to SEQ ID NO: 17410
  oligonucleotide probe

SEQ ID NO: 19492 - DNA, 32 bp, Artificial; identical to SEQ ID NO: 17095
  oligonucleotide probe

SEQ ID NO: 19493 - DNA, 32 bp, Artificial; identical to SEQ ID NO: 16881
  oligonucleotide probe

SEQ ID NO: 19494 - DNA, 32 bp, Artificial; identical to SEQ ID NO: 16461
  oligonucleotide probe

SEQ ID NO: 19495 - DNA, 32 bp, Artificial; identical to SEQ ID NO: 17315
  oligonucleotide probe

SEQ ID NO: 19496 - DNA, 32 bp, Artificial
  oligonucleotide probe
cctcgtggcggacggacggagcctgagcgtgg

SEQ ID NO: 19497 - DNA, 32 bp, Artificial
  oligonucleotide probe
gcgacagggcctgcctcggagcctgagcgtgg

SEQ ID NO: 19498 - DNA, 32 bp, Artificial
  oligonucleotide probe
gagcgagcagcgggtccgagcggaggtcccaa

SEQ ID NO: 19499 - DNA, 32 bp, Artificial
  oligonucleotide probe
cacccgagagcggtggcgagcggaggtcccaa

SEQ ID NO: 19500 - DNA, 32 bp, Artificial; identical to SEQ ID NO: 16713
  oligonucleotide probe

SEQ ID NO: 19501 - DNA, 32 bp, Artificial; identical to SEQ ID NO: 17575
  oligonucleotide probe

SEQ ID NO: 19502 - DNA, 32 bp, Artificial
  oligonucleotide probe
agcgcaccgacgacgcgtggcaggagcgacgc

SEQ ID NO: 19503 - DNA, 32 bp, Artificial
  oligonucleotide probe
acgcccaacagggagcgtggcaggagcgacgc

SEQ ID NO: 19504 - DNA, 32 bp, Artificial
  oligonucleotide probe
gggtacgcgacgcgaggcctagcgcctcgacg

SEQ ID NO: 19505 - DNA, 32 bp, Artificial
  oligonucleotide probe
gagcgacgcgagagcggcctagcgcctcgacg

SEQ ID NO: 19506 - DNA, 32 bp, Artificial; identical to SEQ ID NO: 17226
  oligonucleotide probe

SEQ ID NO: 19507 - DNA, 32 bp, Artificial; identical to SEQ ID NO: 16654
  oligonucleotide probe

SEQ ID NO: 19508 - DNA, 32 bp, Artificial
  oligonucleotide probe
cagggcagggtcgggtagcggtccgcgagagc

SEQ ID NO: 19509 - DNA, 32 bp, Artificial
  oligonucleotide probe
ggtcgcgacacctggcagcggtccgcgagagc

SEQ ID NO: 19510 - DNA, 32 bp, Artificial
  oligonucleotide probe
tgctcggatgctgcgagcgaagcggcgaggtc

SEQ ID NO: 19511 - DNA, 32 bp, Artificial
  oligonucleotide probe
gagcgagcagcgggtcgcgaagcggcgaggtc

SEQ ID NO: 19512 - DNA, 32 bp, Artificial
  oligonucleotide probe
gagcgagcagcgggtcgtccgggtcaggcagg

SEQ ID NO: 19513 - DNA, 32 bp, Artificial
  oligonucleotide probe
cacccgagagcggtgggtccgggtcaggcagg

SEQ ID NO: 19514 - DNA, 32 bp, Artificial
  oligonucleotide probe
cagggcagggtcgggtgcgaagcggcgaggtc

SEQ ID NO: 19515 - DNA, 32 bp, Artificial
  oligonucleotide probe
ggtcgcgacacctggcgcgaagcggcgaggtc

SEQ ID NO: 19516 - DNA, 32 bp, Artificial; identical to SEQ ID NO: 16829
  oligonucleotide probe

SEQ ID NO: 19517 - DNA, 32 bp, Artificial; identical to SEQ ID NO: 16961
  oligonucleotide probe

SEQ ID NO: 19518 - DNA, 32 bp, Artificial; identical to SEQ ID NO: 17612
  oligonucleotide probe

SEQ ID NO: 19519 - DNA, 32 bp, Artificial; identical to SEQ ID NO: 16538
  oligonucleotide probe

SEQ ID NO: 19520 - DNA, 32 bp, Artificial; identical to SEQ ID NO: 17337
  oligonucleotide probe

SEQ ID NO: 19521 - DNA, 32 bp, Artificial; identical to SEQ ID NO: 17431
  oligonucleotide probe

SEQ ID NO: 19522 - DNA, 32 bp, Artificial; identical to SEQ ID NO: 17188
  oligonucleotide probe

SEQ ID NO: 19523 - DNA, 32 bp, Artificial; identical to SEQ ID NO: 16632
  oligonucleotide probe

SEQ ID NO: 19524 - DNA, 32 bp, Artificial; identical to SEQ ID NO: 17356
  oligonucleotide probe

SEQ ID NO: 19525 - DNA, 32 bp, Artificial; identical to SEQ ID NO: 17620
  oligonucleotide probe

SEQ ID NO: 19526 - DNA, 32 bp, Artificial; identical to SEQ ID NO: 16794
  oligonucleotide probe

SEQ ID NO: 19527 - DNA, 32 bp, Artificial; identical to SEQ ID NO: 16560
  oligonucleotide probe

SEQ ID NO: 19528 - DNA, 32 bp, Artificial; identical to SEQ ID NO: 16922
  oligonucleotide probe

SEQ ID NO: 19529 - DNA, 32 bp, Artificial; identical to SEQ ID NO: 17338
  oligonucleotide probe

SEQ ID NO: 19530 - DNA, 32 bp, Artificial; identical to SEQ ID NO: 16549
  oligonucleotide probe

SEQ ID NO: 19531 - DNA, 32 bp, Artificial; identical to SEQ ID NO: 16401
  oligonucleotide probe

SEQ ID NO: 19532 - DNA, 32 bp, Artificial; identical to SEQ ID NO: 17271
  oligonucleotide probe

SEQ ID NO: 19533 - DNA, 32 bp, Artificial; identical to SEQ ID NO: 16605
  oligonucleotide probe

SEQ ID NO: 19534 - DNA, 32 bp, Artificial; identical to SEQ ID NO: 17087
  oligonucleotide probe

SEQ ID NO: 19535 - DNA, 32 bp, Artificial; identical to SEQ ID NO: 16835
  oligonucleotide probe

SEQ ID NO: 19536 - DNA, 32 bp, Artificial
  oligonucleotide probe
agcgcaccgacgacgcgcaggtggtggcgagc

SEQ ID NO: 19537 - DNA, 32 bp, Artificial
  oligonucleotide probe
acgcccaacagggagcgcaggtggtggcgagc

SEQ ID NO: 19538 - DNA, 32 bp, Artificial; identical to SEQ ID NO: 17527
  oligonucleotide probe

SEQ ID NO: 19539 - DNA, 32 bp, Artificial; identical to SEQ ID NO: 17409
  oligonucleotide probe

SEQ ID NO: 19540 - DNA, 32 bp, Artificial; identical to SEQ ID NO: 16717
  oligonucleotide probe

SEQ ID NO: 19541 - DNA, 32 bp, Artificial; identical to SEQ ID NO: 17119
  oligonucleotide probe

SEQ ID NO: 19542 - DNA, 32 bp, Artificial; identical to SEQ ID NO: 17640
  oligonucleotide probe

SEQ ID NO: 19543 - DNA, 32 bp, Artificial; identical to SEQ ID NO: 16780
  oligonucleotide probe

SEQ ID NO: 19544 - DNA, 32 bp, Artificial; identical to SEQ ID NO: 17176
  oligonucleotide probe

SEQ ID NO: 19545 - DNA, 32 bp, Artificial; identical to SEQ ID NO: 16704
  oligonucleotide probe

SEQ ID NO: 19546 - DNA, 32 bp, Artificial; identical to SEQ ID NO: 16503
  oligonucleotide probe

SEQ ID NO: 19547 - DNA, 32 bp, Artificial; identical to SEQ ID NO: 17649
  oligonucleotide probe

SEQ ID NO: 19548 - DNA, 32 bp, Artificial; identical to SEQ ID NO: 17456
  oligonucleotide probe

SEQ ID NO: 19549 - DNA, 32 bp, Artificial; identical to SEQ ID NO: 16840
  oligonucleotide probe

SEQ ID NO: 19550 - DNA, 32 bp, Artificial; identical to SEQ ID NO: 16779
  oligonucleotide probe

SEQ ID NO: 19551 - DNA, 32 bp, Artificial; identical to SEQ ID NO: 17199
  oligonucleotide probe

SEQ ID NO: 19552 - DNA, 32 bp, Artificial; identical to SEQ ID NO: 16845
  oligonucleotide probe

SEQ ID NO: 19553 - DNA, 32 bp, Artificial; identical to SEQ ID NO: 16855
  oligonucleotide probe

SEQ ID NO: 19554 - DNA, 32 bp, Artificial; identical to SEQ ID NO: 17134
  oligonucleotide probe

SEQ ID NO: 19555 - DNA, 32 bp, Artificial; identical to SEQ ID NO: 17568
  oligonucleotide probe

SEQ ID NO: 19556 - DNA, 32 bp, Artificial; identical to SEQ ID NO: 17120
  oligonucleotide probe

SEQ ID NO: 19557 - DNA, 32 bp, Artificial; identical to SEQ ID NO: 17044
  oligonucleotide probe

SEQ ID NO: 19558 - DNA, 32 bp, Artificial
  oligonucleotide probe
gcctcaggacgcacgcgtccacgctggcgacg

SEQ ID NO: 19559 - DNA, 32 bp, Artificial
  oligonucleotide probe
gcgacctcacgcgcaggtccacgctggcgacg

SEQ ID NO: 19560 - DNA, 32 bp, Artificial; identical to SEQ ID NO: 17350
  oligonucleotide probe

SEQ ID NO: 19561 - DNA, 32 bp, Artificial; identical to SEQ ID NO: 16392
  oligonucleotide probe

SEQ ID NO: 19562 - DNA, 32 bp, Artificial; identical to SEQ ID NO: 16908
  oligonucleotide probe

SEQ ID NO: 19563 - DNA, 32 bp, Artificial; identical to SEQ ID NO: 16672
  oligonucleotide probe

SEQ ID NO: 19564 - DNA, 32 bp, Artificial; identical to SEQ ID NO: 17133
  oligonucleotide probe

SEQ ID NO: 19565 - DNA, 32 bp, Artificial; identical to SEQ ID NO: 17077
  oligonucleotide probe

SEQ ID NO: 19566 - DNA, 32 bp, Artificial; identical to SEQ ID NO: 17225
  oligonucleotide probe

SEQ ID NO: 19567 - DNA, 32 bp, Artificial; identical to SEQ ID NO: 17485
  oligonucleotide probe

SEQ ID NO: 19568 - DNA, 32 bp, Artificial; identical to SEQ ID NO: 17573
  oligonucleotide probe

SEQ ID NO: 19569 - DNA, 32 bp, Artificial; identical to SEQ ID NO: 16577
  oligonucleotide probe

SEQ ID NO: 19570 - DNA, 32 bp, Artificial; identical to SEQ ID NO: 16723
  oligonucleotide probe

SEQ ID NO: 19571 - DNA, 32 bp, Artificial; identical to SEQ ID NO: 16817
  oligonucleotide probe

SEQ ID NO: 19572 - DNA, 32 bp, Artificial
  oligonucleotide probe
gtggcgagcctcgggttggcggtcgcctcgag

SEQ ID NO: 19573 - DNA, 32 bp, Artificial
  oligonucleotide probe
cctcgtggcggacggatggcggtcgcctcgag

SEQ ID NO: 19574 - DNA, 32 bp, Artificial; identical to SEQ ID NO: 17181
  oligonucleotide probe

SEQ ID NO: 19575 - DNA, 32 bp, Artificial; identical to SEQ ID NO: 17325
  oligonucleotide probe

SEQ ID NO: 19576 - DNA, 32 bp, Artificial; identical to SEQ ID NO: 17206
  oligonucleotide probe

SEQ ID NO: 19577 - DNA, 32 bp, Artificial; identical to SEQ ID NO: 16506
  oligonucleotide probe

SEQ ID NO: 19578 - DNA, 32 bp, Artificial
  oligonucleotide probe
cagggcagggtcgggtgcgacgagcgagccaa

SEQ ID NO: 19579 - DNA, 32 bp, Artificial
  oligonucleotide probe
ggtcgcgacacctggcgcgacgagcgagccaa

SEQ ID NO: 19580 - DNA, 32 bp, Artificial; identical to SEQ ID NO: 16507
  oligonucleotide probe

SEQ ID NO: 19581 - DNA, 32 bp, Artificial; identical to SEQ ID NO: 16575
  oligonucleotide probe

SEQ ID NO: 19582 - DNA, 32 bp, Artificial; identical to SEQ ID NO: 16516
  oligonucleotide probe

SEQ ID NO: 19583 - DNA, 32 bp, Artificial; identical to SEQ ID NO: 17028
  oligonucleotide probe

SEQ ID NO: 19584 - DNA, 32 bp, Artificial; identical to SEQ ID NO: 16991
  oligonucleotide probe

SEQ ID NO: 19585 - DNA, 32 bp, Artificial; identical to SEQ ID NO: 16505
  oligonucleotide probe

SEQ ID NO: 19586 - DNA, 32 bp, Artificial; identical to SEQ ID NO: 17154
  oligonucleotide probe

SEQ ID NO: 19587 - DNA, 32 bp, Artificial; identical to SEQ ID NO: 17126
  oligonucleotide probe

SEQ ID NO: 19588 - DNA, 32 bp, Artificial; identical to SEQ ID NO: 17234
  oligonucleotide probe

SEQ ID NO: 19589 - DNA, 32 bp, Artificial; identical to SEQ ID NO: 17691
  oligonucleotide probe

SEQ ID NO: 19590 - DNA, 32 bp, Artificial
  oligonucleotide probe
agcgcaccgacgacgcagcgccaatcacgggt

SEQ ID NO: 19591 - DNA, 32 bp, Artificial
  oligonucleotide probe
acgcccaacagggagcagcgccaatcacgggt

SEQ ID NO: 19592 - DNA, 32 bp, Artificial; identical to SEQ ID NO: 17359
  oligonucleotide probe

SEQ ID NO: 19593 - DNA, 32 bp, Artificial; identical to SEQ ID NO: 17067
  oligonucleotide probe

SEQ ID NO: 19594 - DNA, 32 bp, Artificial; identical to SEQ ID NO: 16398
  oligonucleotide probe

SEQ ID NO: 19595 - DNA, 32 bp, Artificial; identical to SEQ ID NO: 17376
  oligonucleotide probe

SEQ ID NO: 19596 - DNA, 32 bp, Artificial; identical to SEQ ID NO: 16558
  oligonucleotide probe

SEQ ID NO: 19597 - DNA, 32 bp, Artificial; identical to SEQ ID NO: 16912
  oligonucleotide probe

SEQ ID NO: 19598 - DNA, 32 bp, Artificial; identical to SEQ ID NO: 17600
  oligonucleotide probe

SEQ ID NO: 19599 - DNA, 32 bp, Artificial; identical to SEQ ID NO: 16658
  oligonucleotide probe

SEQ ID NO: 19600 - DNA, 32 bp, Artificial; identical to SEQ ID NO: 17372
  oligonucleotide probe

SEQ ID NO: 19601 - DNA, 32 bp, Artificial; identical to SEQ ID NO: 17422
  oligonucleotide probe

SEQ ID NO: 19602 - DNA, 32 bp, Artificial; identical to SEQ ID NO: 16771
  oligonucleotide probe

SEQ ID NO: 19603 - DNA, 32 bp, Artificial; identical to SEQ ID NO: 16579
  oligonucleotide probe

SEQ ID NO: 19604 - DNA, 32 bp, Artificial; identical to SEQ ID NO: 16443
  oligonucleotide probe

SEQ ID NO: 19605 - DNA, 32 bp, Artificial; identical to SEQ ID NO: 17349
  oligonucleotide probe

SEQ ID NO: 19606 - DNA, 32 bp, Artificial; identical to SEQ ID NO: 17290
  oligonucleotide probe

SEQ ID NO: 19607 - DNA, 32 bp, Artificial; identical to SEQ ID NO: 16390
  oligonucleotide probe

SEQ ID NO: 19608 - DNA, 32 bp, Artificial; identical to SEQ ID NO: 16668
  oligonucleotide probe

SEQ ID NO: 19609 - DNA, 32 bp, Artificial; identical to SEQ ID NO: 16940
  oligonucleotide probe

SEQ ID NO: 19610 - DNA, 32 bp, Artificial; identical to SEQ ID NO: 16545
  oligonucleotide probe

SEQ ID NO: 19611 - DNA, 32 bp, Artificial; identical to SEQ ID NO: 17093
  oligonucleotide probe

SEQ ID NO: 19612 - DNA, 32 bp, Artificial; identical to SEQ ID NO: 16561
  oligonucleotide probe

SEQ ID NO: 19613 - DNA, 32 bp, Artificial; identical to SEQ ID NO: 17647
  oligonucleotide probe

SEQ ID NO: 19614 - DNA, 32 bp, Artificial; identical to SEQ ID NO: 17085
  oligonucleotide probe

SEQ ID NO: 19615 - DNA, 32 bp, Artificial; identical to SEQ ID NO: 17073
  oligonucleotide probe

SEQ ID NO: 19616 - DNA, 32 bp, Artificial; identical to SEQ ID NO: 17494
  oligonucleotide probe

SEQ ID NO: 19617 - DNA, 32 bp, Artificial; identical to SEQ ID NO: 17162
  oligonucleotide probe

SEQ ID NO: 19618 - DNA, 32 bp, Artificial; identical to SEQ ID NO: 16962
  oligonucleotide probe

SEQ ID NO: 19619 - DNA, 32 bp, Artificial; identical to SEQ ID NO: 16728
  oligonucleotide probe

SEQ ID NO: 19620 - DNA, 32 bp, Artificial; identical to SEQ ID NO: 17055
  oligonucleotide probe

SEQ ID NO: 19621 - DNA, 32 bp, Artificial; identical to SEQ ID NO: 16613
  oligonucleotide probe

SEQ ID NO: 19622 - DNA, 32 bp, Artificial; identical to SEQ ID NO: 16800
  oligonucleotide probe

SEQ ID NO: 19623 - DNA, 32 bp, Artificial; identical to SEQ ID NO: 17312
  oligonucleotide probe

SEQ ID NO: 19624 - DNA, 32 bp, Artificial; identical to SEQ ID NO: 17417
  oligonucleotide probe

SEQ ID NO: 19625 - DNA, 32 bp, Artificial; identical to SEQ ID NO: 17501
  oligonucleotide probe

SEQ ID NO: 19626 - DNA, 32 bp, Artificial; identical to SEQ ID NO: 16453
  oligonucleotide probe

SEQ ID NO: 19627 - DNA, 32 bp, Artificial; identical to SEQ ID NO: 17633
  oligonucleotide probe

SEQ ID NO: 19628 - DNA, 32 bp, Artificial; identical to SEQ ID NO: 17045
  oligonucleotide probe

SEQ ID NO: 19629 - DNA, 32 bp, Artificial; identical to SEQ ID NO: 17479
  oligonucleotide probe

SEQ ID NO: 19630 - DNA, 32 bp, Artificial; identical to SEQ ID NO: 16902
  oligonucleotide probe

SEQ ID NO: 19631 - DNA, 32 bp, Artificial; identical to SEQ ID NO: 17476
  oligonucleotide probe

SEQ ID NO: 19632 - DNA, 32 bp, Artificial
  oligonucleotide probe
gtccgggtcaggcagggcctgtgggtccgcga

SEQ ID NO: 19633 - DNA, 32 bp, Artificial
  oligonucleotide probe
acgcagcggggtgacggcctgtgggtccgcga

SEQ ID NO: 19634 - DNA, 32 bp, Artificial; identical to SEQ ID NO: 16974
  oligonucleotide probe

SEQ ID NO: 19635 - DNA, 32 bp, Artificial; identical to SEQ ID NO: 16554
  oligonucleotide probe

SEQ ID NO: 19636 - DNA, 32 bp, Artificial; identical to SEQ ID NO: 16982
  oligonucleotide probe

SEQ ID NO: 19637 - DNA, 32 bp, Artificial; identical to SEQ ID NO: 16644
  oligonucleotide probe

SEQ ID NO: 19638 - DNA, 32 bp, Artificial; identical to SEQ ID NO: 17113
  oligonucleotide probe

SEQ ID NO: 19639 - DNA, 32 bp, Artificial; identical to SEQ ID NO: 17211
  oligonucleotide probe

SEQ ID NO: 19640 - DNA, 32 bp, Artificial; identical to SEQ ID NO: 16741
  oligonucleotide probe

SEQ ID NO: 19641 - DNA, 32 bp, Artificial; identical to SEQ ID NO: 17289
  oligonucleotide probe

SEQ ID NO: 19642 - DNA, 32 bp, Artificial
  oligonucleotide probe
gcctcaggacgcacgcagcgccaatcacgggt

SEQ ID NO: 19643 - DNA, 32 bp, Artificial
  oligonucleotide probe
gcgacctcacgcgcagagcgccaatcacgggt

SEQ ID NO: 19644 - DNA, 32 bp, Artificial; identical to SEQ ID NO: 17301
  oligonucleotide probe

SEQ ID NO: 19645 - DNA, 32 bp, Artificial; identical to SEQ ID NO: 17319
  oligonucleotide probe

SEQ ID NO: 19646 - DNA, 32 bp, Artificial; identical to SEQ ID NO: 17138
  oligonucleotide probe

SEQ ID NO: 19647 - DNA, 32 bp, Artificial; identical to SEQ ID NO: 16770
  oligonucleotide probe

SEQ ID NO: 19648 - DNA, 32 bp, Artificial; identical to SEQ ID NO: 17412
  oligonucleotide probe

SEQ ID NO: 19649 - DNA, 32 bp, Artificial; identical to SEQ ID NO: 16776
  oligonucleotide probe

SEQ ID NO: 19650 - DNA, 32 bp, Artificial; identical to SEQ ID NO: 17387
  oligonucleotide probe

SEQ ID NO: 19651 - DNA, 32 bp, Artificial; identical to SEQ ID NO: 16911
  oligonucleotide probe

SEQ ID NO: 19652 - DNA, 32 bp, Artificial
  oligonucleotide probe
gtccgggtcaggcaggcaggggaagggtcgga

SEQ ID NO: 19653 - DNA, 32 bp, Artificial
  oligonucleotide probe
acgcagcggggtgacgcaggggaagggtcgga

SEQ ID NO: 19654 - DNA, 32 bp, Artificial
  oligonucleotide probe
gcctcaggacgcacgcgtggcggaggtcggaa

SEQ ID NO: 19655 - DNA, 32 bp, Artificial
  oligonucleotide probe
gcgacctcacgcgcaggtggcggaggtcggaa

SEQ ID NO: 19656 - DNA, 32 bp, Artificial
  oligonucleotide probe
gggtacgcgacgcgagcaccgggtggtcagcg

SEQ ID NO: 19657 - DNA, 32 bp, Artificial
  oligonucleotide probe
gagcgacgcgagagcgcaccgggtggtcagcg

SEQ ID NO: 19658 - DNA, 32 bp, Artificial; identical to SEQ ID NO: 16679
  oligonucleotide probe

SEQ ID NO: 19659 - DNA, 32 bp, Artificial; identical to SEQ ID NO: 17175
  oligonucleotide probe

SEQ ID NO: 19660 - DNA, 32 bp, Artificial
  oligonucleotide probe
caggcctccctcgcgagcgaagcggcgaggtc

SEQ ID NO: 19661 - DNA, 32 bp, Artificial
  oligonucleotide probe
cggagcaggagcggaagcgaagcggcgaggtc

SEQ ID NO: 19662 - DNA, 32 bp, Artificial; identical to SEQ ID NO: 16953
  oligonucleotide probe

SEQ ID NO: 19663 - DNA, 32 bp, Artificial; identical to SEQ ID NO: 17019
  oligonucleotide probe

SEQ ID NO: 19664 - DNA, 32 bp, Artificial
  oligonucleotide probe
gagcgagcagcgggtccagggcagggtcgggt

SEQ ID NO: 19665 - DNA, 32 bp, Artificial
  oligonucleotide probe
cacccgagagcggtggcagggcagggtcgggt

SEQ ID NO: 19666 - DNA, 32 bp, Artificial; identical to SEQ ID NO: 17543
  oligonucleotide probe

SEQ ID NO: 19667 - DNA, 32 bp, Artificial; identical to SEQ ID NO: 16721
  oligonucleotide probe

SEQ ID NO: 19668 - DNA, 32 bp, Artificial; identical to SEQ ID NO: 17015
  oligonucleotide probe

SEQ ID NO: 19669 - DNA, 32 bp, Artificial; identical to SEQ ID NO: 16563
  oligonucleotide probe

SEQ ID NO: 19670 - DNA, 32 bp, Artificial
  oligonucleotide probe
gggtagcggcgagacgagcggcgagagcgtcc

SEQ ID NO: 19671 - DNA, 32 bp, Artificial
  oligonucleotide probe
gagcgacgcgagagcgagcggcgagagcgtcc

SEQ ID NO: 19672 - DNA, 32 bp, Artificial
  oligonucleotide probe
ggtcgcgacacctggccgagcggaggtcccaa

SEQ ID NO: 19673 - DNA, 32 bp, Artificial
  oligonucleotide probe
acgcagcggggtgacgcgagcggaggtcccaa

SEQ ID NO: 19674 - DNA, 32 bp, Artificial
  oligonucleotide probe
ggaacggaagcggagccaggcctccctcgcga

SEQ ID NO: 19675 - DNA, 32 bp, Artificial
  oligonucleotide probe
acgcagcggggtgacgcaggcctccctcgcga

SEQ ID NO: 19676 - DNA, 32 bp, Artificial
  oligonucleotide probe
acgcccaacagggagcagcggcgagagcgtcc

SEQ ID NO: 19677 - DNA, 32 bp, Artificial
  oligonucleotide probe
cctcgtggcggacggaagcggcgagagcgtcc

SEQ ID NO: 19678 - DNA, 32 bp, Artificial
  oligonucleotide probe
gcgacctcacgcgcagacgccaccgcctgacg

SEQ ID NO: 19679 - DNA, 32 bp, Artificial
  oligonucleotide probe
acgcccaacagggagcacgccaccgcctgacg

SEQ ID NO: 19680 - DNA, 32 bp, Artificial
  oligonucleotide probe
gagcgacgcgagagcgacgccaccgcctgacg

SEQ ID NO: 19681 - DNA, 32 bp, Artificial
  oligonucleotide probe
actgcggacgaggcctacgccaccgcctgacg

SEQ ID NO: 19682 - DNA, 32 bp, Artificial
  oligonucleotide probe
acgcagcggggtgacgcagggcagggtcgggt

SEQ ID NO: 19683 - DNA, 32 bp, Artificial
  oligonucleotide probe
cggagcaggagcggaacagggcagggtcgggt

SEQ ID NO: 19684 - DNA, 32 bp, Artificial
  oligonucleotide probe
gcgacctcacgcgcagcggagcctgagcgtgg

SEQ ID NO: 19685 - DNA, 32 bp, Artificial
  oligonucleotide probe
acgcccaacagggagccggagcctgagcgtgg

SEQ ID NO: 19686 - DNA, 32 bp, Artificial
  oligonucleotide probe
actgcggacgaggcctgggtacgcgacgcgag

SEQ ID NO: 19687 - DNA, 32 bp, Artificial
  oligonucleotide probe
gcgacctcacgcgcaggggtacgcgacgcgag

SEQ ID NO: 19688 - DNA, 32 bp, Artificial
  oligonucleotide probe
actgcggacgaggcctagcggcgagagcgtcc

SEQ ID NO: 19689 - DNA, 32 bp, Artificial
  oligonucleotide probe
gcgacctcacgcgcagagcggcgagagcgtcc

SEQ ID NO: 19690 - DNA, 32 bp, Artificial
  oligonucleotide probe
gagcgacgcgagagcgagcgcaccgacgacgc

SEQ ID NO: 19691 - DNA, 32 bp, Artificial
  oligonucleotide probe
gcgacctcacgcgcagagcgcaccgacgacgc

SEQ ID NO: 19692 - DNA, 32 bp, Artificial
  oligonucleotide probe
gcgacagggcctgcctgtggcgagcctcgggt

SEQ ID NO: 19693 - DNA, 32 bp, Artificial
  oligonucleotide probe
cacccgagagcggtggtgctcggatgctgcga

SEQ ID NO: 19694 - DNA, 32 bp, Artificial; identical to SEQ ID NO: 17694
  oligonucleotide probe

SEQ ID NO: 19695 - DNA, 32 bp, Artificial
  oligonucleotide probe
gtccgggtcaggcagggcgacagggcctgcct

SEQ ID NO: 19696 - DNA, 32 bp, Artificial
  oligonucleotide probe
caggcctccctcgcgagcgacagggcctgcct

SEQ ID NO: 19697 - DNA, 32 bp, Artificial
  oligonucleotide probe
cctcgtggcggacggaactgcggacgaggcct

SEQ ID NO: 19698 - DNA, 32 bp, Artificial
  oligonucleotide probe
gcgacagggcctgcctactgcggacgaggcct

SEQ ID NO: 19699 - DNA, 32 bp, Artificial
  oligonucleotide probe
gggtacgcgacgcgagacgcaccagtcccgga

SEQ ID NO: 19700 - DNA, 32 bp, Artificial
  oligonucleotide probe
gagcgacgcgagagcgacgcaccagtcccgga

SEQ ID NO: 19701 - DNA, 32 bp, Artificial
  oligonucleotide probe
gcaggtggtggcgagctgctcggatgctgcga

SEQ ID NO: 19702 - DNA, 32 bp, Artificial
  oligonucleotide probe
gacggacgacgcgtggtgctcggatgctgcga

SEQ ID NO: 19703 - DNA, 32 bp, Artificial
  oligonucleotide probe
actgcggacgaggcctgagcgacgcgagagcg

SEQ ID NO: 19704 - DNA, 32 bp, Artificial
  oligonucleotide probe
gcgacctcacgcgcaggagcgacgcgagagcg

SEQ ID NO: 19705 - DNA, 32 bp, Artificial
  oligonucleotide probe
gtccgggtcaggcaggaccacggaagcgcgga

SEQ ID NO: 19706 - DNA, 32 bp, Artificial
  oligonucleotide probe
acgcagcggggtgacgaccacggaagcgcgga

SEQ ID NO: 19707 - DNA, 32 bp, Artificial
  oligonucleotide probe
gcgacctcacgcgcaggcctcaggacgcacgc

SEQ ID NO: 19708 - DNA, 32 bp, Artificial
  oligonucleotide probe
agcggtccgcgagagcgcctcaggacgcacgc

SEQ ID NO: 19709 - DNA, 32 bp, Artificial
  oligonucleotide probe
tgctcggatgctgcgacaggcctccctcgcga

SEQ ID NO: 19710 - DNA, 32 bp, Artificial
  oligonucleotide probe
gtgggggtgcagggaacaggcctccctcgcga

SEQ ID NO: 19711 - DNA, 32 bp, Artificial
  oligonucleotide probe
agcgcaccgacgacgcgagcgcctcctcgagc

SEQ ID NO: 19712 - DNA, 32 bp, Artificial
  oligonucleotide probe
acgcccaacagggagcgagcgcctcctcgagc

SEQ ID NO: 19713 - DNA, 32 bp, Artificial
  oligonucleotide probe
gagcgagcagcgggtctgctcggatgctgcga

SEQ ID NO: 19714 - DNA, 32 bp, Artificial
  oligonucleotide probe
agcgccaatcacgggttgctcggatgctgcga

SEQ ID NO: 19715 - DNA, 32 bp, Artificial
  oligonucleotide probe
gagcgcctcctcgagccacccgagagcggtgg

SEQ ID NO: 19716 - DNA, 32 bp, Artificial
  oligonucleotide probe
tggcacgcgagccaggcacccgagagcggtgg

SEQ ID NO: 19717 - DNA, 32 bp, Artificial
  oligonucleotide probe
gagcgacgcgagagcggggtacgcgacgcgag

SEQ ID NO: 19718 - DNA, 32 bp, Artificial
  oligonucleotide probe
gacgcaggcggagggtgggtacgcgacgcgag

SEQ ID NO: 19719 - DNA, 32 bp, Artificial
  oligonucleotide probe
ggtccggagcagacgcgtggcgagcctcgggt

SEQ ID NO: 19720 - DNA, 32 bp, Artificial
  oligonucleotide probe
gcgagtggcagggcctgtggcgagcctcgggt

SEQ ID NO: 19721 - DNA, 32 bp, Artificial
  oligonucleotide probe
cacccgagagcggtggacgcagcggggtgacg

SEQ ID NO: 19722 - DNA, 32 bp, Artificial
  oligonucleotide probe
agcggcgagagcgtccacgcagcggggtgacg

SEQ ID NO: 19723 - DNA, 32 bp, Artificial
  oligonucleotide probe
acgcccaacagggagcgcgacctcacgcgcag

SEQ ID NO: 19724 - DNA, 32 bp, Artificial
  oligonucleotide probe
cctcgtggcggacggagcgacctcacgcgcag

SEQ ID NO: 19725 - DNA, 32 bp, Artificial
  oligonucleotide probe
gcgacgagcgagccaaacgcccaacagggagc

SEQ ID NO: 19726 - DNA, 32 bp, Artificial
  oligonucleotide probe
caggagcgggaagcgaacgcccaacagggagc

SEQ ID NO: 19727 - DNA, 32 bp, Artificial
  oligonucleotide probe
gacggacgacgcgtgggagcgagcagcgggtc

SEQ ID NO: 19728 - DNA, 32 bp, Artificial
  oligonucleotide probe
gcctgggtcaccacgcgagcgagcagcgggtc

SEQ ID NO: 19729 - DNA, 32 bp, Artificial
  oligonucleotide probe
gtggcgagcctcgggtagcgcaccgacgacgc

SEQ ID NO: 19730 - DNA, 32 bp, Artificial
  oligonucleotide probe
cgagcaccgagccggaagcgcaccgacgacgc

SEQ ID NO: 19731 - DNA, 32 bp, Artificial
  oligonucleotide probe
cgagcggaggtcccaagcgaagcggcgaggtc

SEQ ID NO: 19732 - DNA, 32 bp, Artificial
  oligonucleotide probe
ggaacggaagcggagcgcgaagcggcgaggtc

SEQ ID NO: 19733 - DNA, 32 bp, Artificial
  oligonucleotide probe
gtggcgagcctcgggtacgccaccgcctgacg

SEQ ID NO: 19734 - DNA, 32 bp, Artificial
  oligonucleotide probe
cgagcaccgagccggaacgccaccgcctgacg

SEQ ID NO: 19735 - DNA, 32 bp, Artificial
  oligonucleotide probe
cggagcctgagcgtgggtggcaggagcgacgc

SEQ ID NO: 19736 - DNA, 32 bp, Artificial
  oligonucleotide probe
actgcggacgaggcctgtggcaggagcgacgc

SEQ ID NO: 19737 - DNA, 32 bp, Artificial
  oligonucleotide probe
cagggcagggtcgggtgcctgtgggtccgcga

SEQ ID NO: 19738 - DNA, 32 bp, Artificial
  oligonucleotide probe
ggtcgcgacacctggcgcctgtgggtccgcga

SEQ ID NO: 19739 - DNA, 32 bp, Artificial
  oligonucleotide probe
acgcaccagtcccggagtccgggtcaggcagg

SEQ ID NO: 19740 - DNA, 32 bp, Artificial
  oligonucleotide probe
caccgacgggaaacgcgtccgggtcaggcagg

SEQ ID NO: 19741 - DNA, 32 bp, Artificial
  oligonucleotide probe
gtggcgagcctcgggtcggagcctgagcgtgg

SEQ ID NO: 19742 - DNA, 32 bp, Artificial
  oligonucleotide probe
cgagcaccgagccggacggagcctgagcgtgg

SEQ ID NO: 19743 - DNA, 32 bp, Artificial
  oligonucleotide probe
gcctcaggacgcacgccggagcctgagcgtgg

SEQ ID NO: 19744 - DNA, 32 bp, Artificial
  oligonucleotide probe
agcgcaccgacgacgccggagcctgagcgtgg

SEQ ID NO: 19745 - DNA, 32 bp, Artificial
  oligonucleotide probe
acgccaccgcctgacggtggcggaggtcggaa

SEQ ID NO: 19746 - DNA, 32 bp, Artificial
  oligonucleotide probe
gggtagcggcgagacggtggcggaggtcggaa

SEQ ID NO: 19747 - DNA, 32 bp, Artificial
  oligonucleotide probe
cggagcaggagcggaacaggcctccctcgcga

SEQ ID NO: 19748 - DNA, 32 bp, Artificial
  oligonucleotide probe
gtggcggaggtcggaacaggcctccctcgcga

SEQ ID NO: 19749 - DNA, 32 bp, Artificial
  oligonucleotide probe
agcgcaccgacgacgcagcggcgagagcgtcc

SEQ ID NO: 19750 - DNA, 32 bp, Artificial
  oligonucleotide probe
gtggcgagcctcgggtagcggcgagagcgtcc

SEQ ID NO: 19751 - DNA, 32 bp, Artificial
  oligonucleotide probe
tggcgggtgacggtgggtgggggtgcagggaa

SEQ ID NO: 19752 - DNA, 32 bp, Artificial
  oligonucleotide probe
gtggcaggagcgacgcgtgggggtgcagggaa

SEQ ID NO: 19753 - DNA, 32 bp, Artificial
  oligonucleotide probe
gcgacagggcctgcctgagcgacgcgagagcg

SEQ ID NO: 19754 - DNA, 32 bp, Artificial
  oligonucleotide probe
tggcaccagcaggggtgagcgacgcgagagcg

SEQ ID NO: 19755 - DNA, 32 bp, Artificial
  oligonucleotide probe
cggagcaggagcggaaggaacggaagcggagc

SEQ ID NO: 19756 - DNA, 32 bp, Artificial
  oligonucleotide probe
gagcgagcagcgggtcggaacggaagcggagc

SEQ ID NO: 19757 - DNA, 32 bp, Artificial
  oligonucleotide probe
ggaacggaagcggagctggcaccagcaggggt

SEQ ID NO: 19758 - DNA, 32 bp, Artificial
  oligonucleotide probe
ggtcgcgacacctggctggcaccagcaggggt

SEQ ID NO: 19759 - DNA, 32 bp, Artificial
  oligonucleotide probe
gcctcaggacgcacgcgcaggcagccaatggc

SEQ ID NO: 19760 - DNA, 32 bp, Artificial
  oligonucleotide probe
gcgacctcacgcgcaggcaggcagccaatggc

SEQ ID NO: 19761 - DNA, 32 bp, Artificial
  oligonucleotide probe
acgcgagcgggtgcagacgcccaacagggagc

SEQ ID NO: 19762 - DNA, 32 bp, Artificial
  oligonucleotide probe
gcagcctctggccgagacgcccaacagggagc

SEQ ID NO: 19763 - DNA, 32 bp, Artificial
  oligonucleotide probe
cctccgaggacgcggagtgggggtgcagggaa

SEQ ID NO: 19764 - DNA, 32 bp, Artificial
  oligonucleotide probe
gagcgcctcctcgagcgtgggggtgcagggaa

SEQ ID NO: 19765 - DNA, 32 bp, Artificial
  oligonucleotide probe
acgccaccgcctgacggacggcgagtgggcag

SEQ ID NO: 19766 - DNA, 32 bp, Artificial
  oligonucleotide probe
gggtagcggcgagacggacggcgagtgggcag

SEQ ID NO: 19767 - DNA, 32 bp, Artificial
  oligonucleotide probe
caggggaagggtcggagcctcaggacgcacgc

SEQ ID NO: 19768 - DNA, 32 bp, Artificial
  oligonucleotide probe
gagcgcgacacccagggcctcaggacgcacgc

SEQ ID NO: 19769 - DNA, 32 bp, Artificial
  oligonucleotide probe
gcctagcgcctcgacgggtcgcgacacctggc

SEQ ID NO: 19770 - DNA, 32 bp, Artificial
  oligonucleotide probe
gcctcggagacggcagggtcgcgacacctggc

SEQ ID NO: 19771 - DNA, 32 bp, Artificial
  oligonucleotide probe
cacccgagagcggtgggtgggggtgcagggaa

SEQ ID NO: 19772 - DNA, 32 bp, Artificial
  oligonucleotide probe
tggcggtcgcctcgaggtgggggtgcagggaa

SEQ ID NO: 19773 - DNA, 32 bp, Artificial
  oligonucleotide probe
gggtacgcgacgcgagtggcgggtgacggtgg

SEQ ID NO: 19774 - DNA, 32 bp, Artificial
  oligonucleotide probe
gagcgacgcgagagcgtggcgggtgacggtgg

SEQ ID NO: 19775 - DNA, 32 bp, Artificial
  oligonucleotide probe
gagcgagcagcgggtcggtcgcgacacctggc

SEQ ID NO: 19776 - DNA, 32 bp, Artificial
  oligonucleotide probe
cacccgagagcggtggggtcgcgacacctggc

SEQ ID NO: 19777 - DNA, 32 bp, Artificial
  oligonucleotide probe
cggagcctgagcgtgggacggacgacgcgtgg

SEQ ID NO: 19778 - DNA, 32 bp, Artificial
  oligonucleotide probe
actgcggacgaggcctgacggacgacgcgtgg

SEQ ID NO: 19779 - DNA, 32 bp, Artificial
  oligonucleotide probe
acgccaccgcctgacgagcgccaatcacgggt

SEQ ID NO: 19780 - DNA, 32 bp, Artificial
  oligonucleotide probe
gggtagcggcgagacgagcgccaatcacgggt

SEQ ID NO: 19781 - DNA, 32 bp, Artificial
  oligonucleotide probe
agcgcaccgacgacgcgcctcaggacgcacgc

SEQ ID NO: 19782 - DNA, 32 bp, Artificial
  oligonucleotide probe
gtggcgagcctcgggtgcctcaggacgcacgc

SEQ ID NO: 19783 - DNA, 32 bp, Artificial
  oligonucleotide probe
tggcgtgggggtccaaactgcggacgaggcct

SEQ ID NO: 19784 - DNA, 32 bp, Artificial
  oligonucleotide probe
accatggcacgcgacgactgcggacgaggcct

SEQ ID NO: 19785 - DNA, 32 bp, Artificial
  oligonucleotide probe
caggcctccctcgcgagcagcctctggccgag

SEQ ID NO: 19786 - DNA, 32 bp, Artificial
  oligonucleotide probe
cggagcaggagcggaagcagcctctggccgag

SEQ ID NO: 19787 - DNA, 32 bp, Artificial
  oligonucleotide probe
cagggcagggtcgggtcaggggaagggtcgga

SEQ ID NO: 19788 - DNA, 32 bp, Artificial
  oligonucleotide probe
ggtcgcgacacctggccaggggaagggtcgga

SEQ ID NO: 19789 - DNA, 32 bp, Artificial
  oligonucleotide probe
gcgacctcacgcgcaggggtagcggcgagacg

SEQ ID NO: 19790 - DNA, 32 bp, Artificial
  oligonucleotide probe
acgcccaacagggagcgggtagcggcgagacg

SEQ ID NO: 19791 - DNA, 32 bp, Artificial
  oligonucleotide probe
gcgacagggcctgcctcctcgtggcggacgga

SEQ ID NO: 19792 - DNA, 32 bp, Artificial
  oligonucleotide probe
tggcaccagcaggggtcctcgtggcggacgga

SEQ ID NO: 19793 - DNA, 32 bp, Artificial
  oligonucleotide probe
cgagcggaggtcccaagcgacgagcgagccaa

SEQ ID NO: 19794 - DNA, 32 bp, Artificial
  oligonucleotide probe
ggaacggaagcggagcgcgacgagcgagccaa

SEQ ID NO: 19795 - DNA, 32 bp, Artificial
  oligonucleotide probe
gtccgggtcaggcagggagcgcgacacccagg

SEQ ID NO: 19796 - DNA, 32 bp, Artificial
  oligonucleotide probe
acgcagcggggtgacggagcgcgacacccagg

SEQ ID NO: 19797 - DNA, 32 bp, Artificial
  oligonucleotide probe
gcgacagggcctgcctcgagcaccgagccgga

SEQ ID NO: 19798 - DNA, 32 bp, Artificial
  oligonucleotide probe
cgagcggaggtcccaacgagcaccgagccgga

SEQ ID NO: 19799 - DNA, 32 bp, Artificial
  oligonucleotide probe
cctcgtggcggacggaacgcccaacagggagc

SEQ ID NO: 19800 - DNA, 32 bp, Artificial
  oligonucleotide probe
gcgacagggcctgcctacgcccaacagggagc

SEQ ID NO: 19801 - DNA, 32 bp, Artificial
  oligonucleotide probe
gagcgagcagcgggtctggcaccagcaggggt

SEQ ID NO: 19802 - DNA, 32 bp, Artificial
  oligonucleotide probe
cacccgagagcggtggtggcaccagcaggggt

SEQ ID NO: 19803 - DNA, 32 bp, Artificial
  oligonucleotide probe
cgagcggaggtcccaagcgacagggcctgcct

SEQ ID NO: 19804 - DNA, 32 bp, Artificial
  oligonucleotide probe
cagggcagggtcgggtgcgacagggcctgcct

SEQ ID NO: 19805 - DNA, 32 bp, Artificial
  oligonucleotide probe
cctcgtggcggacggagggtagcggcgagacg

SEQ ID NO: 19806 - DNA, 32 bp, Artificial
  oligonucleotide probe
gcgacagggcctgcctgggtagcggcgagacg

SEQ ID NO: 19807 - DNA, 32 bp, Artificial
  oligonucleotide probe
tgctcggatgctgcgagcgacagggcctgcct

SEQ ID NO: 19808 - DNA, 32 bp, Artificial
  oligonucleotide probe
gtgggggtgcagggaagcgacagggcctgcct

SEQ ID NO: 19809 - DNA, 32 bp, Artificial
  oligonucleotide probe
cagggcagggtcgggtcgagcggaggtcccaa

SEQ ID NO: 19810 - DNA, 32 bp, Artificial
  oligonucleotide probe
gtccgggtcaggcaggcgagcggaggtcccaa

SEQ ID NO: 19811 - DNA, 32 bp, Artificial
  oligonucleotide probe
cctcgtggcggacggagtggcgagcctcgggt

SEQ ID NO: 19812 - DNA, 32 bp, Artificial
  oligonucleotide probe
gcgaagcggcgaggtcgtggcgagcctcgggt

SEQ ID NO: 19813 - DNA, 32 bp, Artificial
  oligonucleotide probe
ggaacggaagcggagccgagcggaggtcccaa

SEQ ID NO: 19814 - DNA, 32 bp, Artificial
  oligonucleotide probe
gacggcgagtgggcagcgagcggaggtcccaa

SEQ ID NO: 19815 - DNA, 32 bp, Artificial
  oligonucleotide probe
cagggcagggtcgggtcgagcaccgagccgga

SEQ ID NO: 19816 - DNA, 32 bp, Artificial
  oligonucleotide probe
gtccgggtcaggcaggcgagcaccgagccgga

SEQ ID NO: 19817 - DNA, 32 bp, Artificial
  oligonucleotide probe
actgcggacgaggcctcggagcctgagcgtgg

SEQ ID NO: 19818 - DNA, 32 bp, Artificial
  oligonucleotide probe
tggcgtgggggtccaacggagcctgagcgtgg

SEQ ID NO: 19819 - DNA, 32 bp, Artificial
  oligonucleotide probe
cgagcggaggtcccaatggcgtgggggtccaa

SEQ ID NO: 19820 - DNA, 32 bp, Artificial
  oligonucleotide probe
ggaacggaagcggagctggcgtgggggtccaa

SEQ ID NO: 19821 - DNA, 32 bp, Artificial
  oligonucleotide probe
caccgggtggtcagcgacgcagcggggtgacg

SEQ ID NO: 19822 - DNA, 32 bp, Artificial
  oligonucleotide probe
acgcaccagtcccggaacgcagcggggtgacg

SEQ ID NO: 19823 - DNA, 32 bp, Artificial
  oligonucleotide probe
acgccaccgcctgacgcaccgggtggtcagcg

SEQ ID NO: 19824 - DNA, 32 bp, Artificial
  oligonucleotide probe
gggtagcggcgagacgcaccgggtggtcagcg

SEQ ID NO: 19825 - DNA, 32 bp, Artificial
  oligonucleotide probe
gtccacgctggcgacgcggagcaggagcggaa

SEQ ID NO: 19826 - DNA, 32 bp, Artificial
  oligonucleotide probe
gcaggcagccaatggccggagcaggagcggaa

SEQ ID NO: 19827 - DNA, 32 bp, Artificial
  oligonucleotide probe
agcgcaccgacgacgcgggtacgcgacgcgag

SEQ ID NO: 19828 - DNA, 32 bp, Artificial
  oligonucleotide probe
gtggcgagcctcgggtgggtacgcgacgcgag

SEQ ID NO: 19829 - DNA, 32 bp, Artificial
  oligonucleotide probe
ggtcgcgacacctggccagggcagggtcgggt

SEQ ID NO: 19830 - DNA, 32 bp, Artificial
  oligonucleotide probe
gcctagcgcctcgacgcagggcagggtcgggt

SEQ ID NO: 19831 - DNA, 32 bp, Artificial
  oligonucleotide probe
gcctcaggacgcacgcacgccaccgcctgacg

SEQ ID NO: 19832 - DNA, 32 bp, Artificial
  oligonucleotide probe
agcgcaccgacgacgcacgccaccgcctgacg

SEQ ID NO: 19833 - DNA, 32 bp, Artificial
  oligonucleotide probe
gagcgacgcgagagcggggtagcggcgagacg

SEQ ID NO: 19834 - DNA, 32 bp, Artificial
  oligonucleotide probe
actgcggacgaggcctgggtagcggcgagacg

SEQ ID NO: 19835 - DNA, 32 bp, Artificial
  oligonucleotide probe
gcgacagggcctgcctgcgacctcacgcgcag

SEQ ID NO: 19836 - DNA, 32 bp, Artificial
  oligonucleotide probe
tggcaccagcaggggtgcgacctcacgcgcag

SEQ ID NO: 19837 - DNA, 32 bp, Artificial
  oligonucleotide probe
agcgcaccgacgacgcggaaagcggcctggaa

SEQ ID NO: 19838 - DNA, 32 bp, Artificial
  oligonucleotide probe
acgcccaacagggagcggaaagcggcctggaa

SEQ ID NO: 19839 - DNA, 32 bp, Artificial
  oligonucleotide probe
gagcgagcagcgggtccggagcaggagcggaa

SEQ ID NO: 19840 - DNA, 32 bp, Artificial
  oligonucleotide probe
cacccgagagcggtggcggagcaggagcggaa

SEQ ID NO: 19841 - DNA, 32 bp, Artificial
  oligonucleotide probe
gggtacgcgacgcgaggcctcggagacggcag

SEQ ID NO: 19842 - DNA, 32 bp, Artificial
  oligonucleotide probe
gagcgacgcgagagcggcctcggagacggcag

SEQ ID NO: 19843 - DNA, 32 bp, Artificial
  oligonucleotide probe
acgcagcggggtgacggtccgggtcaggcagg

SEQ ID NO: 19844 - DNA, 32 bp, Artificial
  oligonucleotide probe
caccgggtggtcagcggtccgggtcaggcagg

SEQ ID NO: 19845 - DNA, 32 bp, Artificial
  oligonucleotide probe
gcgacctcacgcgcagactgcggacgaggcct

SEQ ID NO: 19846 - DNA, 32 bp, Artificial
  oligonucleotide probe
acgcccaacagggagcactgcggacgaggcct

SEQ ID NO: 19847 - DNA, 32 bp, Artificial
  oligonucleotide probe
caggcctccctcgcgagtccgggtcaggcagg

SEQ ID NO: 19848 - DNA, 32 bp, Artificial
  oligonucleotide probe
tgctcggatgctgcgagtccgggtcaggcagg

SEQ ID NO: 19849 - DNA, 32 bp, Artificial
  oligonucleotide probe
agcgccaatcacgggtgagcgagcagcgggtc

SEQ ID NO: 19850 - DNA, 32 bp, Artificial
  oligonucleotide probe
gcaggtggtggcgagcgagcgagcagcgggtc

SEQ ID NO: 19851 - DNA, 32 bp, Artificial
  oligonucleotide probe
acgcccaacagggagcagcgcaccgacgacgc

SEQ ID NO: 19852 - DNA, 32 bp, Artificial
  oligonucleotide probe
gcgacgagcgagccaaagcgcaccgacgacgc

SEQ ID NO: 19853 - DNA, 32 bp, Artificial
  oligonucleotide probe
gcctcaggacgcacgccctccgaggacgcgga

SEQ ID NO: 19854 - DNA, 32 bp, Artificial
  oligonucleotide probe
gcgacctcacgcgcagcctccgaggacgcgga

SEQ ID NO: 19855 - DNA, 32 bp, Artificial
  oligonucleotide probe
cggagcctgagcgtggcaccgacgggaaacgc

SEQ ID NO: 19856 - DNA, 32 bp, Artificial
  oligonucleotide probe
actgcggacgaggcctcaccgacgggaaacgc

SEQ ID NO: 19857 - DNA, 32 bp, Artificial
  oligonucleotide probe
cggagcctgagcgtgggtccacgctggcgacg

SEQ ID NO: 19858 - DNA, 32 bp, Artificial
  oligonucleotide probe
actgcggacgaggcctgtccacgctggcgacg

SEQ ID NO: 19859 - DNA, 32 bp, Artificial
  oligonucleotide probe
cggagcctgagcgtggagcggcgagagcgtcc

SEQ ID NO: 19860 - DNA, 32 bp, Artificial
  oligonucleotide probe
gcctcaggacgcacgcagcggcgagagcgtcc

SEQ ID NO: 19861 - DNA, 32 bp, Artificial
  oligonucleotide probe
cacccgagagcggtgggagcgagcagcgggtc

SEQ ID NO: 19862 - DNA, 32 bp, Artificial
  oligonucleotide probe
agcggcgagagcgtccgagcgagcagcgggtc

SEQ ID NO: 19863 - DNA, 32 bp, Artificial
  oligonucleotide probe
caccgcgaggtcacgccaggcctccctcgcga

SEQ ID NO: 19864 - DNA, 32 bp, Artificial
  oligonucleotide probe
gtccacgctggcgacgcaggcctccctcgcga

SEQ ID NO: 19865 - DNA, 32 bp, Artificial
  oligonucleotide probe
gtggcgagcctcgggttggcacgcgagccagg

SEQ ID NO: 19866 - DNA, 32 bp, Artificial
  oligonucleotide probe
cctcgtggcggacggatggcacgcgagccagg

SEQ ID NO: 19867 - DNA, 32 bp, Artificial
  oligonucleotide probe
accacggaagcgcggacctcgtggcggacgga

SEQ ID NO: 19868 - DNA, 32 bp, Artificial
  oligonucleotide probe
ggtccggagcagacgccctcgtggcggacgga

SEQ ID NO: 19869 - DNA, 32 bp, Artificial
  oligonucleotide probe
agcggtccgcgagagcgcgacctcacgcgcag

SEQ ID NO: 19870 - DNA, 32 bp, Artificial
  oligonucleotide probe
caggggaagggtcggagcgacctcacgcgcag

SEQ ID NO: 19871 - DNA, 32 bp, Artificial
  oligonucleotide probe
gtggcggaggtcggaacggagcaggagcggaa

SEQ ID NO: 19872 - DNA, 32 bp, Artificial
  oligonucleotide probe
caccgcgaggtcacgccggagcaggagcggaa

SEQ ID NO: 19873 - DNA, 32 bp, Artificial
  oligonucleotide probe
acgccaccgcctgacgagcggcgagagcgtcc

SEQ ID NO: 19874 - DNA, 32 bp, Artificial
  oligonucleotide probe
gggtacgcgacgcgagagcggcgagagcgtcc

SEQ ID NO: 19875 - DNA, 32 bp, Artificial
  oligonucleotide probe
cagggcagggtcgggtcaggagcgggaagcga

SEQ ID NO: 19876 - DNA, 32 bp, Artificial
  oligonucleotide probe
ggtcgcgacacctggccaggagcgggaagcga

SEQ ID NO: 19877 - DNA, 32 bp, Artificial
  oligonucleotide probe
acgcagcggggtgacgtggcaccagcaggggt

SEQ ID NO: 19878 - DNA, 32 bp, Artificial
  oligonucleotide probe
cggagcaggagcggaatggcaccagcaggggt

SEQ ID NO: 19879 - DNA, 32 bp, Artificial
  oligonucleotide probe
gcgaagcggcgaggtccctcgtggcggacgga

SEQ ID NO: 19880 - DNA, 32 bp, Artificial
  oligonucleotide probe
gcctgtgggtccgcgacctcgtggcggacgga

SEQ ID NO: 19881 - DNA, 32 bp, Artificial
  oligonucleotide probe
gggtacgcgacgcgagcaccgcgaggtcacgc

SEQ ID NO: 19882 - DNA, 32 bp, Artificial
  oligonucleotide probe
gagcgacgcgagagcgcaccgcgaggtcacgc

SEQ ID NO: 19883 - DNA, 32 bp, Artificial
  oligonucleotide probe
gtccgggtcaggcaggacgcgagcgggtgcag

SEQ ID NO: 19884 - DNA, 32 bp, Artificial
  oligonucleotide probe
acgcagcggggtgacgacgcgagcgggtgcag

SEQ ID NO: 19885 - DNA, 32 bp, Artificial
  oligonucleotide probe
acgcagcggggtgacgggtcgcgacacctggc

SEQ ID NO: 19886 - DNA, 32 bp, Artificial
  oligonucleotide probe
cggagcaggagcggaaggtcgcgacacctggc

SEQ ID NO: 19887 - DNA, 32 bp, Artificial
  oligonucleotide probe
gcctgggtcaccacgctgctcggatgctgcga

SEQ ID NO: 19888 - DNA, 32 bp, Artificial
  oligonucleotide probe
ggaaagcggcctggaatgctcggatgctgcga

SEQ ID NO: 19889 - DNA, 32 bp, Artificial
  oligonucleotide probe
tgctcggatgctgcgacagggcagggtcgggt

SEQ ID NO: 19890 - DNA, 32 bp, Artificial
  oligonucleotide probe
gtgggggtgcagggaacagggcagggtcgggt

SEQ ID NO: 19891 - DNA, 32 bp, Artificial
  oligonucleotide probe
caggcctccctcgcgaggtccggagcagacgc

SEQ ID NO: 19892 - DNA, 32 bp, Artificial
  oligonucleotide probe
cggagcaggagcggaaggtccggagcagacgc

SEQ ID NO: 19893 - DNA, 32 bp, Artificial
  oligonucleotide probe
tgctcggatgctgcgagcgagtggcagggcct

SEQ ID NO: 19894 - DNA, 32 bp, Artificial
  oligonucleotide probe
gagcgagcagcgggtcgcgagtggcagggcct

SEQ ID NO: 19895 - DNA, 32 bp, Artificial
  oligonucleotide probe
caggcctccctcgcgacgagcggaggtcccaa

SEQ ID NO: 19896 - DNA, 32 bp, Artificial
  oligonucleotide probe
tgctcggatgctgcgacgagcggaggtcccaa

SEQ ID NO: 19897 - DNA, 32 bp, Artificial
  oligonucleotide probe
tggcggtcgcctcgagcacccgagagcggtgg

SEQ ID NO: 19898 - DNA, 32 bp, Artificial
  oligonucleotide probe
tggcgggtgacggtggcacccgagagcggtgg

SEQ ID NO: 19899 - DNA, 32 bp, Artificial
  oligonucleotide probe
cgagcggaggtcccaaagcggtccgcgagagc

SEQ ID NO: 19900 - DNA, 32 bp, Artificial
  oligonucleotide probe
ggaacggaagcggagcagcggtccgcgagagc

SEQ ID NO: 19901 - DNA, 32 bp, Artificial
  oligonucleotide probe
gggtacgcgacgcgagacgccaccgcctgacg

SEQ ID NO: 19902 - DNA, 32 bp, Artificial
  oligonucleotide probe
cggagcctgagcgtggacgccaccgcctgacg

SEQ ID NO: 19903 - DNA, 32 bp, Artificial
  oligonucleotide probe
cagggcagggtcgggtaccatggcacgcgacg

SEQ ID NO: 19904 - DNA, 32 bp, Artificial
  oligonucleotide probe
ggtcgcgacacctggcaccatggcacgcgacg

SEQ ID NO: 19905 - DNA, 32 bp, Artificial
  oligonucleotide probe
cacccgagagcggtggggaacggaagcggagc

SEQ ID NO: 19906 - DNA, 32 bp, Artificial
  oligonucleotide probe
agcggcgagagcgtccggaacggaagcggagc

SEQ ID NO: 19907 - DNA, 32 bp, Artificial
  oligonucleotide probe
ggtcgcgacacctggcggaacggaagcggagc

SEQ ID NO: 19908 - DNA, 32 bp, Artificial
  oligonucleotide probe
acgcagcggggtgacgggaacggaagcggagc

SEQ ID NO: 19909 - DNA, 32 bp, Artificial
  oligonucleotide probe
gcctcaggacgcacgcgcctgggtcaccacgc

SEQ ID NO: 19910 - DNA, 32 bp, Artificial
  oligonucleotide probe
gcgacctcacgcgcaggcctgggtcaccacgc

SEQ ID NO: 19911 - DNA, 32 bp, Artificial
  oligonucleotide probe
caggcctccctcgcgacgagcaccgagccgga

SEQ ID NO: 19912 - DNA, 32 bp, Artificial
  oligonucleotide probe
tgctcggatgctgcgacgagcaccgagccgga

SEQ ID NO: 19913 - DNA, 32 bp, Artificial
  oligonucleotide probe
gcctgtgggtccgcgagtggcgagcctcgggt

SEQ ID NO: 19914 - DNA, 32 bp, Artificial
  oligonucleotide probe
accacggaagcgcggagtggcgagcctcgggt

SEQ ID NO: 19915 - DNA, 32 bp, Artificial
  oligonucleotide probe
gtggcaggagcgacgccacccgagagcggtgg

SEQ ID NO: 19916 - DNA, 32 bp, Artificial
  oligonucleotide probe
cctccgaggacgcggacacccgagagcggtgg

SEQ ID NO: 19917 - DNA, 32 bp, Artificial
  oligonucleotide probe
cgagcggaggtcccaagacgcaggcggagggt

SEQ ID NO: 19918 - DNA, 32 bp, Artificial
  oligonucleotide probe
ggaacggaagcggagcgacgcaggcggagggt

SEQ ID NO: 19919 - DNA, 32 bp, Artificial
  oligonucleotide probe
acgccaccgcctgacggcctagcgcctcgacg

SEQ ID NO: 19920 - DNA, 32 bp, Artificial
  oligonucleotide probe
gggtagcggcgagacggcctagcgcctcgacg

SEQ ID NO: 19921 - DNA, 32 bp, Artificial
  oligonucleotide probe
acgccaccgcctgacgtggcggtcgcctcgag

SEQ ID NO: 19922 - DNA, 32 bp, Artificial
  oligonucleotide probe
gggtagcggcgagacgtggcggtcgcctcgag

SEQ ID NO: 19923 - DNA, 32 bp, Artificial
  oligonucleotide probe
gggtacgcgacgcgaggcaggtggtggcgagc

SEQ ID NO: 19924 - DNA, 32 bp, Artificial
  oligonucleotide probe
gagcgacgcgagagcggcaggtggtggcgagc

SEQ ID NO: 19925 - DNA, 32 bp, Artificial
  oligonucleotide probe
cggagcctgagcgtgggggtacgcgacgcgag

SEQ ID NO: 19926 - DNA, 32 bp, Artificial
  oligonucleotide probe
gcctcaggacgcacgcgggtacgcgacgcgag

SEQ ID NO: 19927 - DNA, 32 bp, Artificial
  oligonucleotide probe
cggagcaggagcggaaacgcagcggggtgacg

SEQ ID NO: 19928 - DNA, 32 bp, Artificial
  oligonucleotide probe
gagcgagcagcgggtcacgcagcggggtgacg

SEQ ID NO: 19929 - DNA, 32 bp, Artificial
  oligonucleotide probe
caggagcgggaagcgaagcgcaccgacgacgc

SEQ ID NO: 19930 - DNA, 32 bp, Artificial
  oligonucleotide probe
acgcgagcgggtgcagagcgcaccgacgacgc

SEQ ID NO: 19931 - DNA, 32 bp, Artificial
  oligonucleotide probe
acgcccaacagggagcgagcgacgcgagagcg

SEQ ID NO: 19932 - DNA, 32 bp, Artificial
  oligonucleotide probe
cctcgtggcggacggagagcgacgcgagagcg

SEQ ID NO: 19933 - DNA, 32 bp, Artificial
  oligonucleotide probe
gtccgggtcaggcaggcagggcagggtcgggt

SEQ ID NO: 19934 - DNA, 32 bp, Artificial
  oligonucleotide probe
caggcctccctcgcgacagggcagggtcgggt

SEQ ID NO: 19935 - DNA, 32 bp, Artificial
  oligonucleotide probe
gggtacgcgacgcgagcgagcaccgagccgga

SEQ ID NO: 19936 - DNA, 32 bp, Artificial
  oligonucleotide probe
gcctcaggacgcacgccgagcaccgagccgga

SEQ ID NO: 19937 - DNA, 32 bp, Artificial
  oligonucleotide probe
cgagcggaggtcccaagtgggggtgcagggaa

SEQ ID NO: 19938 - DNA, 32 bp, Artificial
  oligonucleotide probe
gtccgggtcaggcagggtgggggtgcagggaa

SEQ ID NO: 19939 - DNA, 32 bp, Artificial
  oligonucleotide probe
tgctcggatgctgcgagtgggggtgcagggaa

SEQ ID NO: 19940 - DNA, 32 bp, Artificial
  oligonucleotide probe
cgagcaccgagccggagtgggggtgcagggaa

SEQ ID NO: 19941 - DNA, 32 bp, Artificial
  oligonucleotide probe
gtggcgagcctcgggtcgagcaccgagccgga

SEQ ID NO: 19942 - DNA, 32 bp, Artificial
  oligonucleotide probe
agcggcgagagcgtcccgagcaccgagccgga

SEQ ID NO: 19943 - DNA, 32 bp, Artificial
  oligonucleotide probe
cacccgagagcggtggagcggcgagagcgtcc

SEQ ID NO: 19944 - DNA, 32 bp, Artificial
  oligonucleotide probe
tggcaccagcaggggtagcggcgagagcgtcc

SEQ ID NO: 19945 - DNA, 32 bp, Artificial
  oligonucleotide probe
acgcccaacagggagctggcaccagcaggggt

SEQ ID NO: 19946 - DNA, 32 bp, Artificial
  oligonucleotide probe
gcgacagggcctgccttggcaccagcaggggt

SEQ ID NO: 19947 - DNA, 32 bp, Artificial
  oligonucleotide probe
gggtagcggcgagacgtggcaccagcaggggt

SEQ ID NO: 19948 - DNA, 32 bp, Artificial
  oligonucleotide probe
actgcggacgaggccttggcaccagcaggggt

SEQ ID NO: 19949 - DNA, 32 bp, Artificial
  oligonucleotide probe
ggtcgcgacacctggcagcggcgagagcgtcc

SEQ ID NO: 19950 - DNA, 32 bp, Artificial
  oligonucleotide probe
cggagcaggagcggaaagcggcgagagcgtcc

SEQ ID NO: 19951 - DNA, 32 bp, Artificial
  oligonucleotide probe
gagcgcgacacccagggcgacctcacgcgcag

SEQ ID NO: 19952 - DNA, 32 bp, Artificial
  oligonucleotide probe
gcaggcagccaatggccaggcctccctcgcga

SEQ ID NO: 19953 - DNA, 32 bp, Artificial
  oligonucleotide probe
gacgcaggcggagggtgagcgacgcgagagcg

SEQ ID NO: 19954 - DNA, 32 bp, Artificial
  oligonucleotide probe
caccgacgggaaacgcacgcagcggggtgacg

SEQ ID NO: 19955 - DNA, 32 bp, Artificial
  oligonucleotide probe
gacggcgagtgggcagggaacggaagcggagc

SEQ ID NO: 19956 - DNA, 32 bp, Artificial
  oligonucleotide probe
gcctcggagacggcagcagggcagggtcgggt

SEQ ID NO: 19957 - DNA, 32 bp, Artificial
  oligonucleotide probe
ggaaagcggcctggaagagcgagcagcgggtc

SEQ ID NO: 19958 - DNA, 32 bp, Artificial
  oligonucleotide probe
gggtagcggcgagacgacgccaccgcctgacg

SEQ ID NO: 19959 - DNA, 32 bp, Artificial
  oligonucleotide probe
tggcacgcgagccagggtgggggtgcagggaa

SEQ ID NO: 19960 - DNA, 32 bp, Artificial
  oligonucleotide probe
gcgagtggcagggcctcctcgtggcggacgga

SEQ ID NO: 19961 - DNA, 32 bp, Artificial
  oligonucleotide probe
gcagcctctggccgagagcgcaccgacgacgc

SEQ ID NO: 19962 - DNA, 32 bp, Artificial
  oligonucleotide probe
accatggcacgcgacgcggagcctgagcgtgg

SEQ ID NO: 19963 - DNA, 32 bp, Artificial; identical to SEQ ID NO: 5133
  oligonucleotide probe

SEQ ID NO: 19964 - DNA, 32 bp, Artificial; identical to SEQ ID NO: 7594
  oligonucleotide probe

SEQ ID NO: 19965 - DNA, 32 bp, Artificial; identical to SEQ ID NO: 5141
  oligonucleotide probe

SEQ ID NO: 19966 - DNA, 32 bp, Artificial; identical to SEQ ID NO: 7596
  oligonucleotide probe

SEQ ID NO: 19967 - DNA, 32 bp, Artificial; identical to SEQ ID NO: 7597
  oligonucleotide probe

SEQ ID NO: 19968 - DNA, 32 bp, Artificial; identical to SEQ ID NO: 7598
  oligonucleotide probe

SEQ ID NO: 19969 - DNA, 32 bp, Artificial; identical to SEQ ID NO: 5133
  oligonucleotide probe

SEQ ID NO: 19970 - DNA, 32 bp, Artificial; identical to SEQ ID NO: 7594
  oligonucleotide probe

SEQ ID NO: 19971 - DNA, 32 bp, Artificial; identical to SEQ ID NO: 7597
  oligonucleotide probe

SEQ ID NO: 19972 - DNA, 32 bp, Artificial; identical to SEQ ID NO: 7598
  oligonucleotide probe

SEQ ID NO: 19973 - DNA, 32 bp, Artificial; identical to SEQ ID NO: 7597
  oligonucleotide probe

SEQ ID NO: 19974 - DNA, 32 bp, Artificial; identical to SEQ ID NO: 7598
  oligonucleotide probe

SEQ ID NO: 19975 - DNA, 32 bp, Artificial; identical to SEQ ID NO: 7605
  oligonucleotide probe

SEQ ID NO: 19976 - DNA, 32 bp, Artificial; identical to SEQ ID NO: 7606
  oligonucleotide probe

SEQ ID NO: 19977 - DNA, 32 bp, Artificial; identical to SEQ ID NO: 5134
  oligonucleotide probe

SEQ ID NO: 19978 - DNA, 32 bp, Artificial; identical to SEQ ID NO: 7597
  oligonucleotide probe

SEQ ID NO: 19979 - DNA, 32 bp, Artificial; identical to SEQ ID NO: 7598
  oligonucleotide probe

SEQ ID NO: 19980 - DNA, 32 bp, Artificial; identical to SEQ ID NO: 5136
  oligonucleotide probe

SEQ ID NO: 19981 - DNA, 32 bp, Artificial; identical to SEQ ID NO: 5134
  oligonucleotide probe

SEQ ID NO: 19982 - DNA, 32 bp, Artificial; identical to SEQ ID NO: 7597
  oligonucleotide probe

SEQ ID NO: 19983 - DNA, 32 bp, Artificial; identical to SEQ ID NO: 5133
  oligonucleotide probe

SEQ ID NO: 19984 - DNA, 32 bp, Artificial; identical to SEQ ID NO: 7594
  oligonucleotide probe

SEQ ID NO: 19985 - DNA, 32 bp, Artificial; identical to SEQ ID NO: 7598
  oligonucleotide probe

SEQ ID NO: 19986 - DNA, 32 bp, Artificial; identical to SEQ ID NO: 5136
  oligonucleotide probe

SEQ ID NO: 19987 - DNA, 32 bp, Artificial; identical to SEQ ID NO: 7598
  oligonucleotide probe

SEQ ID NO: 19988 - DNA, 32 bp, Artificial; identical to SEQ ID NO: 5136
  oligonucleotide probe

SEQ ID NO: 19989 - DNA, 32 bp, Artificial; identical to SEQ ID NO: 5133
  oligonucleotide probe

SEQ ID NO: 19990 - DNA, 32 bp, Artificial; identical to SEQ ID NO: 7594
  oligonucleotide probe

SEQ ID NO: 19991 - DNA, 32 bp, Artificial; identical to SEQ ID NO: 7606
  oligonucleotide probe

SEQ ID NO: 19992 - DNA, 32 bp, Artificial; identical to SEQ ID NO: 5133
  oligonucleotide probe

SEQ ID NO: 19993 - DNA, 32 bp, Artificial; identical to SEQ ID NO: 7623
  oligonucleotide probe

SEQ ID NO: 19994 - DNA, 32 bp, Artificial; identical to SEQ ID NO: 7624
  oligonucleotide probe

SEQ ID NO: 19995 - DNA, 32 bp, Artificial; identical to SEQ ID NO: 7597
  oligonucleotide probe

SEQ ID NO: 19996 - DNA, 32 bp, Artificial; identical to SEQ ID NO: 7598
  oligonucleotide probe

SEQ ID NO: 19997 - DNA, 32 bp, Artificial; identical to SEQ ID NO: 5133
  oligonucleotide probe

SEQ ID NO: 19998 - DNA, 32 bp, Artificial; identical to SEQ ID NO: 7594
  oligonucleotide probe

SEQ ID NO: 19999 - DNA, 32 bp, Artificial; identical to SEQ ID NO: 5134
  oligonucleotide probe

SEQ ID NO: 20000 - DNA, 32 bp, Artificial; identical to SEQ ID NO: 7597
  oligonucleotide probe

SEQ ID NO: 20001 - DNA, 32 bp, Artificial; identical to SEQ ID NO: 5134
  oligonucleotide probe

SEQ ID NO: 20002 - DNA, 32 bp, Artificial; identical to SEQ ID NO: 7597
  oligonucleotide probe

SEQ ID NO: 20003 - DNA, 32 bp, Artificial; identical to SEQ ID NO: 7594
  oligonucleotide probe

SEQ ID NO: 20004 - DNA, 32 bp, Artificial; identical to SEQ ID NO: 5134
  oligonucleotide probe

SEQ ID NO: 20005 - DNA, 32 bp, Artificial; identical to SEQ ID NO: 7598
  oligonucleotide probe

SEQ ID NO: 20006 - DNA, 32 bp, Artificial; identical to SEQ ID NO: 5136
  oligonucleotide probe

SEQ ID NO: 20007 - DNA, 32 bp, Artificial; identical to SEQ ID NO: 7605
  oligonucleotide probe

SEQ ID NO: 20008 - DNA, 32 bp, Artificial; identical to SEQ ID NO: 7606
  oligonucleotide probe

SEQ ID NO: 20009 - DNA, 32 bp, Artificial; identical to SEQ ID NO: 7597
  oligonucleotide probe

SEQ ID NO: 20010 - DNA, 32 bp, Artificial; identical to SEQ ID NO: 7598
  oligonucleotide probe

SEQ ID NO: 20011 - DNA, 32 bp, Artificial; identical to SEQ ID NO: 5140
  oligonucleotide probe

SEQ ID NO: 20012 - DNA, 32 bp, Artificial; identical to SEQ ID NO: 7623
  oligonucleotide probe

SEQ ID NO: 20013 - DNA, 32 bp, Artificial; identical to SEQ ID NO: 5163
  oligonucleotide probe

SEQ ID NO: 20014 - DNA, 32 bp, Artificial; identical to SEQ ID NO: 7644
  oligonucleotide probe

SEQ ID NO: 20015 - DNA, 32 bp, Artificial; identical to SEQ ID NO: 5134
  oligonucleotide probe

SEQ ID NO: 20016 - DNA, 32 bp, Artificial; identical to SEQ ID NO: 7597
  oligonucleotide probe

SEQ ID NO: 20017 - DNA, 32 bp, Artificial; identical to SEQ ID NO: 7624
  oligonucleotide probe

SEQ ID NO: 20018 - DNA, 32 bp, Artificial; identical to SEQ ID NO: 7605
  oligonucleotide probe

SEQ ID NO: 20019 - DNA, 32 bp, Artificial; identical to SEQ ID NO: 7598
  oligonucleotide probe

SEQ ID NO: 20020 - DNA, 32 bp, Artificial; identical to SEQ ID NO: 5136
  oligonucleotide probe

SEQ ID NO: 20021 - DNA, 32 bp, Artificial; identical to SEQ ID NO: 7623
  oligonucleotide probe

SEQ ID NO: 20022 - DNA, 32 bp, Artificial; identical to SEQ ID NO: 7624
  oligonucleotide probe

SEQ ID NO: 20023 - DNA, 32 bp, Artificial; identical to SEQ ID NO: 5136
  oligonucleotide probe

SEQ ID NO: 20024 - DNA, 32 bp, Artificial; identical to SEQ ID NO: 5136
  oligonucleotide probe

SEQ ID NO: 20025 - DNA, 32 bp, Artificial; identical to SEQ ID NO: 5136
  oligonucleotide probe

SEQ ID NO: 20026 - DNA, 32 bp, Artificial; identical to SEQ ID NO: 5136
  oligonucleotide probe

SEQ ID NO: 20027 - DNA, 32 bp, Artificial; identical to SEQ ID NO: 5136
  oligonucleotide probe

SEQ ID NO: 20028 - DNA, 32 bp, Artificial; identical to SEQ ID NO: 5136
  oligonucleotide probe

SEQ ID NO: 20029 - DNA, 32 bp, Artificial; identical to SEQ ID NO: 5136
  oligonucleotide probe

SEQ ID NO: 20030 - DNA, 32 bp, Artificial; identical to SEQ ID NO: 5136
  oligonucleotide probe

SEQ ID NO: 20031 - DNA, 32 bp, Artificial; identical to SEQ ID NO: 5136
  oligonucleotide probe

SEQ ID NO: 20032 - DNA, 32 bp, Artificial; identical to SEQ ID NO: 5136
  oligonucleotide probe

SEQ ID NO: 20033 - DNA, 32 bp, Artificial; identical to SEQ ID NO: 7644
  oligonucleotide probe

SEQ ID NO: 20034 - DNA, 32 bp, Artificial; identical to SEQ ID NO: 5141
  oligonucleotide probe

SEQ ID NO: 20035 - DNA, 32 bp, Artificial; identical to SEQ ID NO: 5141
  oligonucleotide probe

SEQ ID NO: 20036 - DNA, 32 bp, Artificial; identical to SEQ ID NO: 7596
  oligonucleotide probe

SEQ ID NO: 20037 - DNA, 32 bp, Artificial; identical to SEQ ID NO: 5133
  oligonucleotide probe

SEQ ID NO: 20038 - DNA, 32 bp, Artificial; identical to SEQ ID NO: 7668
  oligonucleotide probe

SEQ ID NO: 20039 - DNA, 32 bp, Artificial; identical to SEQ ID NO: 5133
  oligonucleotide probe

SEQ ID NO: 20040 - DNA, 32 bp, Artificial; identical to SEQ ID NO: 7594
  oligonucleotide probe

SEQ ID NO: 20041 - DNA, 32 bp, Artificial; identical to SEQ ID NO: 5133
  oligonucleotide probe

SEQ ID NO: 20042 - DNA, 32 bp, Artificial; identical to SEQ ID NO: 7594
  oligonucleotide probe

SEQ ID NO: 20043 - DNA, 32 bp, Artificial; identical to SEQ ID NO: 7673
  oligonucleotide probe

SEQ ID NO: 20044 - DNA, 32 bp, Artificial; identical to SEQ ID NO: 7674
  oligonucleotide probe

SEQ ID NO: 20045 - DNA, 32 bp, Artificial; identical to SEQ ID NO: 5171
  oligonucleotide probe

SEQ ID NO: 20046 - DNA, 32 bp, Artificial; identical to SEQ ID NO: 7676
  oligonucleotide probe

SEQ ID NO: 20047 - DNA, 32 bp, Artificial; identical to SEQ ID NO: 7677
  oligonucleotide probe

SEQ ID NO: 20048 - DNA, 32 bp, Artificial; identical to SEQ ID NO: 7678
  oligonucleotide probe

SEQ ID NO: 20049 - DNA, 32 bp, Artificial; identical to SEQ ID NO: 7597
  oligonucleotide probe

SEQ ID NO: 20050 - DNA, 32 bp, Artificial; identical to SEQ ID NO: 7598
  oligonucleotide probe

SEQ ID NO: 20051 - DNA, 32 bp, Artificial; identical to SEQ ID NO: 7662
  oligonucleotide probe

SEQ ID NO: 20052 - DNA, 32 bp, Artificial; identical to SEQ ID NO: 5163
  oligonucleotide probe

SEQ ID NO: 20053 - DNA, 32 bp, Artificial; identical to SEQ ID NO: 7594
  oligonucleotide probe

SEQ ID NO: 20054 - DNA, 32 bp, Artificial; identical to SEQ ID NO: 5134
  oligonucleotide probe

SEQ ID NO: 20055 - DNA, 32 bp, Artificial; identical to SEQ ID NO: 5171
  oligonucleotide probe

SEQ ID NO: 20056 - DNA, 32 bp, Artificial; identical to SEQ ID NO: 7686
  oligonucleotide probe

SEQ ID NO: 20057 - DNA, 32 bp, Artificial; identical to SEQ ID NO: 7687
  oligonucleotide probe

SEQ ID NO: 20058 - DNA, 32 bp, Artificial; identical to SEQ ID NO: 5161
  oligonucleotide probe

SEQ ID NO: 20059 - DNA, 32 bp, Artificial; identical to SEQ ID NO: 7673
  oligonucleotide probe

SEQ ID NO: 20060 - DNA, 32 bp, Artificial; identical to SEQ ID NO: 7690
  oligonucleotide probe

SEQ ID NO: 20061 - DNA, 32 bp, Artificial; identical to SEQ ID NO: 7686
  oligonucleotide probe

SEQ ID NO: 20062 - DNA, 32 bp, Artificial; identical to SEQ ID NO: 7623
  oligonucleotide probe

SEQ ID NO: 20063 - DNA, 32 bp, Artificial; identical to SEQ ID NO: 5159
  oligonucleotide probe

SEQ ID NO: 20064 - DNA, 32 bp, Artificial; identical to SEQ ID NO: 7694
  oligonucleotide probe

SEQ ID NO: 20065 - DNA, 32 bp, Artificial; identical to SEQ ID NO: 7624
  oligonucleotide probe

SEQ ID NO: 20066 - DNA, 32 bp, Artificial; identical to SEQ ID NO: 7605
  oligonucleotide probe

SEQ ID NO: 20067 - DNA, 32 bp, Artificial; identical to SEQ ID NO: 7687
  oligonucleotide probe

SEQ ID NO: 20068 - DNA, 32 bp, Artificial; identical to SEQ ID NO: 5161
  oligonucleotide probe

SEQ ID NO: 20069 - DNA, 32 bp, Artificial; identical to SEQ ID NO: 7699
  oligonucleotide probe

SEQ ID NO: 20070 - DNA, 32 bp, Artificial; identical to SEQ ID NO: 5136
  oligonucleotide probe

SEQ ID NO: 20071 - DNA, 32 bp, Artificial; identical to SEQ ID NO: 5185
  oligonucleotide probe

SEQ ID NO: 20072 - DNA, 32 bp, Artificial; identical to SEQ ID NO: 7655
  oligonucleotide probe

SEQ ID NO: 20073 - DNA, 32 bp, Artificial; identical to SEQ ID NO: 7703
  oligonucleotide probe

SEQ ID NO: 20074 - DNA, 32 bp, Artificial; identical to SEQ ID NO: 7704
  oligonucleotide probe

SEQ ID NO: 20075 - DNA, 32 bp, Artificial; identical to SEQ ID NO: 7644
  oligonucleotide probe

SEQ ID NO: 20076 - DNA, 32 bp, Artificial; identical to SEQ ID NO: 5141
  oligonucleotide probe

SEQ ID NO: 20077 - DNA, 32 bp, Artificial; identical to SEQ ID NO: 7690
  oligonucleotide probe

SEQ ID NO: 20078 - DNA, 32 bp, Artificial; identical to SEQ ID NO: 7662
  oligonucleotide probe

SEQ ID NO: 20079 - DNA, 32 bp, Artificial; identical to SEQ ID NO: 5171
  oligonucleotide probe

SEQ ID NO: 20080 - DNA, 32 bp, Artificial; identical to SEQ ID NO: 7676
  oligonucleotide probe

SEQ ID NO: 20081 - DNA, 32 bp, Artificial; identical to SEQ ID NO: 7690
  oligonucleotide probe

SEQ ID NO: 20082 - DNA, 32 bp, Artificial; identical to SEQ ID NO: 5163
  oligonucleotide probe

SEQ ID NO: 20083 - DNA, 32 bp, Artificial; identical to SEQ ID NO: 5171
  oligonucleotide probe

SEQ ID NO: 20084 - DNA, 32 bp, Artificial; identical to SEQ ID NO: 7676
  oligonucleotide probe

SEQ ID NO: 20085 - DNA, 32 bp, Artificial; identical to SEQ ID NO: 7624
  oligonucleotide probe

SEQ ID NO: 20086 - DNA, 32 bp, Artificial; identical to SEQ ID NO: 7605
  oligonucleotide probe

SEQ ID NO: 20087 - DNA, 32 bp, Artificial; identical to SEQ ID NO: 7596
  oligonucleotide probe

SEQ ID NO: 20088 - DNA, 32 bp, Artificial; identical to SEQ ID NO: 7623
  oligonucleotide probe

SEQ ID NO: 20089 - DNA, 32 bp, Artificial; identical to SEQ ID NO: 5177
  oligonucleotide probe

SEQ ID NO: 20090 - DNA, 32 bp, Artificial; identical to SEQ ID NO: 7720
  oligonucleotide probe

SEQ ID NO: 20091 - DNA, 32 bp, Artificial; identical to SEQ ID NO: 7721
  oligonucleotide probe

SEQ ID NO: 20092 - DNA, 32 bp, Artificial; identical to SEQ ID NO: 7722
  oligonucleotide probe

SEQ ID NO: 20093 - DNA, 32 bp, Artificial; identical to SEQ ID NO: 7668
  oligonucleotide probe

SEQ ID NO: 20094 - DNA, 32 bp, Artificial; identical to SEQ ID NO: 7703
  oligonucleotide probe

SEQ ID NO: 20095 - DNA, 32 bp, Artificial; identical to SEQ ID NO: 5136
  oligonucleotide probe

SEQ ID NO: 20096 - DNA, 32 bp, Artificial; identical to SEQ ID NO: 7668
  oligonucleotide probe

SEQ ID NO: 20097 - DNA, 32 bp, Artificial; identical to SEQ ID NO: 7597
  oligonucleotide probe

SEQ ID NO: 20098 - DNA, 32 bp, Artificial; identical to SEQ ID NO: 7598
  oligonucleotide probe

SEQ ID NO: 20099 - DNA, 32 bp, Artificial; identical to SEQ ID NO: 5185
  oligonucleotide probe

SEQ ID NO: 20100 - DNA, 32 bp, Artificial; identical to SEQ ID NO: 7673
  oligonucleotide probe

SEQ ID NO: 20101 - DNA, 32 bp, Artificial; identical to SEQ ID NO: 7623
  oligonucleotide probe

SEQ ID NO: 20102 - DNA, 32 bp, Artificial; identical to SEQ ID NO: 7624
  oligonucleotide probe

SEQ ID NO: 20103 - DNA, 32 bp, Artificial; identical to SEQ ID NO: 5171
  oligonucleotide probe

SEQ ID NO: 20104 - DNA, 32 bp, Artificial; identical to SEQ ID NO: 7676
  oligonucleotide probe

SEQ ID NO: 20105 - DNA, 32 bp, Artificial; identical to SEQ ID NO: 7662
  oligonucleotide probe

SEQ ID NO: 20106 - DNA, 32 bp, Artificial; identical to SEQ ID NO: 7659
  oligonucleotide probe

SEQ ID NO: 20107 - DNA, 32 bp, Artificial; identical to SEQ ID NO: 7597
  oligonucleotide probe

SEQ ID NO: 20108 - DNA, 32 bp, Artificial; identical to SEQ ID NO: 7598
  oligonucleotide probe

SEQ ID NO: 20109 - DNA, 32 bp, Artificial; identical to SEQ ID NO: 7644
  oligonucleotide probe

SEQ ID NO: 20110 - DNA, 32 bp, Artificial; identical to SEQ ID NO: 7623
  oligonucleotide probe

SEQ ID NO: 20111 - DNA, 32 bp, Artificial; identical to SEQ ID NO: 7703
  oligonucleotide probe

SEQ ID NO: 20112 - DNA, 32 bp, Artificial; identical to SEQ ID NO: 7704
  oligonucleotide probe

SEQ ID NO: 20113 - DNA, 32 bp, Artificial; identical to SEQ ID NO: 7606
  oligonucleotide probe

SEQ ID NO: 20114 - DNA, 32 bp, Artificial; identical to SEQ ID NO: 7674
  oligonucleotide probe

SEQ ID NO: 20115 - DNA, 32 bp, Artificial; identical to SEQ ID NO: 7745
  oligonucleotide probe

SEQ ID NO: 20116 - DNA, 32 bp, Artificial; identical to SEQ ID NO: 7746
  oligonucleotide probe

SEQ ID NO: 20117 - DNA, 32 bp, Artificial; identical to SEQ ID NO: 7747
  oligonucleotide probe

SEQ ID NO: 20118 - DNA, 32 bp, Artificial; identical to SEQ ID NO: 5138
  oligonucleotide probe

SEQ ID NO: 20119 - DNA, 32 bp, Artificial; identical to SEQ ID NO: 7747
  oligonucleotide probe

SEQ ID NO: 20120 - DNA, 32 bp, Artificial; identical to SEQ ID NO: 5138
  oligonucleotide probe

SEQ ID NO: 20121 - DNA, 32 bp, Artificial; identical to SEQ ID NO: 7673
  oligonucleotide probe

SEQ ID NO: 20122 - DNA, 32 bp, Artificial; identical to SEQ ID NO: 7690
  oligonucleotide probe

SEQ ID NO: 20123 - DNA, 32 bp, Artificial; identical to SEQ ID NO: 7596
  oligonucleotide probe

SEQ ID NO: 20124 - DNA, 32 bp, Artificial; identical to SEQ ID NO: 5140
  oligonucleotide probe

SEQ ID NO: 20125 - DNA, 32 bp, Artificial; identical to SEQ ID NO: 5134
  oligonucleotide probe

SEQ ID NO: 20126 - DNA, 32 bp, Artificial; identical to SEQ ID NO: 7721
  oligonucleotide probe

SEQ ID NO: 20127 - DNA, 32 bp, Artificial; identical to SEQ ID NO: 5133
  oligonucleotide probe

SEQ ID NO: 20128 - DNA, 32 bp, Artificial; identical to SEQ ID NO: 7594
  oligonucleotide probe

SEQ ID NO: 20129 - DNA, 32 bp, Artificial; identical to SEQ ID NO: 7722
  oligonucleotide probe

SEQ ID NO: 20130 - DNA, 32 bp, Artificial; identical to SEQ ID NO: 7677
  oligonucleotide probe

SEQ ID NO: 20131 - DNA, 32 bp, Artificial; identical to SEQ ID NO: 5136
  oligonucleotide probe

SEQ ID NO: 20132 - DNA, 32 bp, Artificial; identical to SEQ ID NO: 7668
  oligonucleotide probe

SEQ ID NO: 20133 - DNA, 32 bp, Artificial; identical to SEQ ID NO: 7624
  oligonucleotide probe

SEQ ID NO: 20134 - DNA, 32 bp, Artificial; identical to SEQ ID NO: 7605
  oligonucleotide probe

SEQ ID NO: 20135 - DNA, 32 bp, Artificial; identical to SEQ ID NO: 7606
  oligonucleotide probe

SEQ ID NO: 20136 - DNA, 32 bp, Artificial; identical to SEQ ID NO: 7674
  oligonucleotide probe

SEQ ID NO: 20137 - DNA, 32 bp, Artificial; identical to SEQ ID NO: 7668
  oligonucleotide probe

SEQ ID NO: 20138 - DNA, 32 bp, Artificial; identical to SEQ ID NO: 7703
  oligonucleotide probe

SEQ ID NO: 20139 - DNA, 32 bp, Artificial; identical to SEQ ID NO: 7673
  oligonucleotide probe

SEQ ID NO: 20140 - DNA, 32 bp, Artificial; identical to SEQ ID NO: 7690
  oligonucleotide probe

SEQ ID NO: 20141 - DNA, 32 bp, Artificial; identical to SEQ ID NO: 7721
  oligonucleotide probe

SEQ ID NO: 20142 - DNA, 32 bp, Artificial; identical to SEQ ID NO: 7722
  oligonucleotide probe

SEQ ID NO: 20143 - DNA, 32 bp, Artificial; identical to SEQ ID NO: 5140
  oligonucleotide probe

SEQ ID NO: 20144 - DNA, 32 bp, Artificial; identical to SEQ ID NO: 7623
  oligonucleotide probe

SEQ ID NO: 20145 - DNA, 32 bp, Artificial; identical to SEQ ID NO: 7659
  oligonucleotide probe

SEQ ID NO: 20146 - DNA, 32 bp, Artificial; identical to SEQ ID NO: 5163
  oligonucleotide probe

SEQ ID NO: 20147 - DNA, 32 bp, Artificial; identical to SEQ ID NO: 5177
  oligonucleotide probe

SEQ ID NO: 20148 - DNA, 32 bp, Artificial; identical to SEQ ID NO: 5133
  oligonucleotide probe

SEQ ID NO: 20149 - DNA, 32 bp, Artificial; identical to SEQ ID NO: 7779
  oligonucleotide probe

SEQ ID NO: 20150 - DNA, 32 bp, Artificial; identical to SEQ ID NO: 5163
  oligonucleotide probe

SEQ ID NO: 20151 - DNA, 32 bp, Artificial; identical to SEQ ID NO: 5159
  oligonucleotide probe

SEQ ID NO: 20152 - DNA, 32 bp, Artificial; identical to SEQ ID NO: 7673
  oligonucleotide probe

SEQ ID NO: 20153 - DNA, 32 bp, Artificial; identical to SEQ ID NO: 7783
  oligonucleotide probe

SEQ ID NO: 20154 - DNA, 32 bp, Artificial; identical to SEQ ID NO: 5163
  oligonucleotide probe

SEQ ID NO: 20155 - DNA, 32 bp, Artificial; identical to SEQ ID NO: 5171
  oligonucleotide probe

SEQ ID NO: 20156 - DNA, 32 bp, Artificial; identical to SEQ ID NO: 7676
  oligonucleotide probe

SEQ ID NO: 20157 - DNA, 32 bp, Artificial; identical to SEQ ID NO: 7787
  oligonucleotide probe

SEQ ID NO: 20158 - DNA, 32 bp, Artificial; identical to SEQ ID NO: 7623
  oligonucleotide probe

SEQ ID NO: 20159 - DNA, 32 bp, Artificial; identical to SEQ ID NO: 7644
  oligonucleotide probe

SEQ ID NO: 20160 - DNA, 32 bp, Artificial; identical to SEQ ID NO: 5141
  oligonucleotide probe

SEQ ID NO: 20161 - DNA, 32 bp, Artificial; identical to SEQ ID NO: 7624
  oligonucleotide probe

SEQ ID NO: 20162 - DNA, 32 bp, Artificial; identical to SEQ ID NO: 7605
  oligonucleotide probe

SEQ ID NO: 20163 - DNA, 32 bp, Artificial; identical to SEQ ID NO: 7687
  oligonucleotide probe

SEQ ID NO: 20164 - DNA, 32 bp, Artificial; identical to SEQ ID NO: 5161
  oligonucleotide probe

SEQ ID NO: 20165 - DNA, 32 bp, Artificial; identical to SEQ ID NO: 7704
  oligonucleotide probe

SEQ ID NO: 20166 - DNA, 32 bp, Artificial; identical to SEQ ID NO: 7745
  oligonucleotide probe

SEQ ID NO: 20167 - DNA, 32 bp, Artificial; identical to SEQ ID NO: 7597
  oligonucleotide probe

SEQ ID NO: 20168 - DNA, 32 bp, Artificial; identical to SEQ ID NO: 7598
  oligonucleotide probe

SEQ ID NO: 20169 - DNA, 32 bp, Artificial; identical to SEQ ID NO: 7747
  oligonucleotide probe

SEQ ID NO: 20170 - DNA, 32 bp, Artificial; identical to SEQ ID NO: 5136
  oligonucleotide probe

SEQ ID NO: 20171 - DNA, 32 bp, Artificial; identical to SEQ ID NO: 7687
  oligonucleotide probe

SEQ ID NO: 20172 - DNA, 32 bp, Artificial; identical to SEQ ID NO: 5161
  oligonucleotide probe

SEQ ID NO: 20173 - DNA, 32 bp, Artificial; identical to SEQ ID NO: 5163
  oligonucleotide probe

SEQ ID NO: 20174 - DNA, 32 bp, Artificial; identical to SEQ ID NO: 7644
  oligonucleotide probe

SEQ ID NO: 20175 - DNA, 32 bp, Artificial; identical to SEQ ID NO: 7597
  oligonucleotide probe

SEQ ID NO: 20176 - DNA, 32 bp, Artificial; identical to SEQ ID NO: 7598
  oligonucleotide probe

SEQ ID NO: 20177 - DNA, 32 bp, Artificial; identical to SEQ ID NO: 7594
  oligonucleotide probe

SEQ ID NO: 20178 - DNA, 32 bp, Artificial; identical to SEQ ID NO: 5134
  oligonucleotide probe

SEQ ID NO: 20179 - DNA, 32 bp, Artificial; identical to SEQ ID NO: 5185
  oligonucleotide probe

SEQ ID NO: 20180 - DNA, 32 bp, Artificial; identical to SEQ ID NO: 7655
  oligonucleotide probe

SEQ ID NO: 20181 - DNA, 32 bp, Artificial; identical to SEQ ID NO: 7783
  oligonucleotide probe

SEQ ID NO: 20182 - DNA, 32 bp, Artificial; identical to SEQ ID NO: 7812
  oligonucleotide probe

SEQ ID NO: 20183 - DNA, 32 bp, Artificial; identical to SEQ ID NO: 7606
  oligonucleotide probe

SEQ ID NO: 20184 - DNA, 32 bp, Artificial; identical to SEQ ID NO: 5133
  oligonucleotide probe

SEQ ID NO: 20185 - DNA, 32 bp, Artificial; identical to SEQ ID NO: 5185
  oligonucleotide probe

SEQ ID NO: 20186 - DNA, 32 bp, Artificial; identical to SEQ ID NO: 7655
  oligonucleotide probe

SEQ ID NO: 20187 - DNA, 32 bp, Artificial; identical to SEQ ID NO: 5134
  oligonucleotide probe

SEQ ID NO: 20188 - DNA, 32 bp, Artificial; identical to SEQ ID NO: 7721
  oligonucleotide probe

SEQ ID NO: 20189 - DNA, 32 bp, Artificial; identical to SEQ ID NO: 7687
  oligonucleotide probe

SEQ ID NO: 20190 - DNA, 32 bp, Artificial; identical to SEQ ID NO: 5136
  oligonucleotide probe

SEQ ID NO: 20191 - DNA, 32 bp, Artificial; identical to SEQ ID NO: 7662
  oligonucleotide probe

SEQ ID NO: 20192 - DNA, 32 bp, Artificial; identical to SEQ ID NO: 7659
  oligonucleotide probe

SEQ ID NO: 20193 - DNA, 32 bp, Artificial; identical to SEQ ID NO: 5136
  oligonucleotide probe

SEQ ID NO: 20194 - DNA, 32 bp, Artificial; identical to SEQ ID NO: 7703
  oligonucleotide probe

SEQ ID NO: 20195 - DNA, 32 bp, Artificial; identical to SEQ ID NO: 7704
  oligonucleotide probe

SEQ ID NO: 20196 - DNA, 32 bp, Artificial; identical to SEQ ID NO: 7597
  oligonucleotide probe

SEQ ID NO: 20197 - DNA, 32 bp, Artificial; identical to SEQ ID NO: 7745
  oligonucleotide probe

SEQ ID NO: 20198 - DNA, 32 bp, Artificial; identical to SEQ ID NO: 7828
  oligonucleotide probe

SEQ ID NO: 20199 - DNA, 32 bp, Artificial; identical to SEQ ID NO: 7668
  oligonucleotide probe

SEQ ID NO: 20200 - DNA, 32 bp, Artificial; identical to SEQ ID NO: 7746
  oligonucleotide probe

SEQ ID NO: 20201 - DNA, 32 bp, Artificial; identical to SEQ ID NO: 7831
  oligonucleotide probe

SEQ ID NO: 20202 - DNA, 32 bp, Artificial; identical to SEQ ID NO: 7832
  oligonucleotide probe

SEQ ID NO: 20203 - DNA, 32 bp, Artificial; identical to SEQ ID NO: 7833
  oligonucleotide probe

SEQ ID NO: 20204 - DNA, 32 bp, Artificial; identical to SEQ ID NO: 7834
  oligonucleotide probe

SEQ ID NO: 20205 - DNA, 32 bp, Artificial; identical to SEQ ID NO: 7835
  oligonucleotide probe

SEQ ID NO: 20206 - DNA, 32 bp, Artificial; identical to SEQ ID NO: 5232
  oligonucleotide probe

SEQ ID NO: 20207 - DNA, 32 bp, Artificial; identical to SEQ ID NO: 5223
  oligonucleotide probe

SEQ ID NO: 20208 - DNA, 32 bp, Artificial; identical to SEQ ID NO: 7838
  oligonucleotide probe

SEQ ID NO: 20209 - DNA, 32 bp, Artificial; identical to SEQ ID NO: 5224
  oligonucleotide probe

SEQ ID NO: 20210 - DNA, 32 bp, Artificial; identical to SEQ ID NO: 7840
  oligonucleotide probe

SEQ ID NO: 20211 - DNA, 32 bp, Artificial; identical to SEQ ID NO: 7841
  oligonucleotide probe

SEQ ID NO: 20212 - DNA, 32 bp, Artificial; identical to SEQ ID NO: 7842
  oligonucleotide probe

SEQ ID NO: 20213 - DNA, 32 bp, Artificial; identical to SEQ ID NO: 5224
  oligonucleotide probe

SEQ ID NO: 20214 - DNA, 32 bp, Artificial; identical to SEQ ID NO: 7840
  oligonucleotide probe

SEQ ID NO: 20215 - DNA, 32 bp, Artificial; identical to SEQ ID NO: 7833
  oligonucleotide probe

SEQ ID NO: 20216 - DNA, 32 bp, Artificial; identical to SEQ ID NO: 7834
  oligonucleotide probe

SEQ ID NO: 20217 - DNA, 32 bp, Artificial; identical to SEQ ID NO: 7833
  oligonucleotide probe

SEQ ID NO: 20218 - DNA, 32 bp, Artificial; identical to SEQ ID NO: 7834
  oligonucleotide probe

SEQ ID NO: 20219 - DNA, 32 bp, Artificial; identical to SEQ ID NO: 5224
  oligonucleotide probe

SEQ ID NO: 20220 - DNA, 32 bp, Artificial; identical to SEQ ID NO: 7840
  oligonucleotide probe

SEQ ID NO: 20221 - DNA, 32 bp, Artificial; identical to SEQ ID NO: 5223
  oligonucleotide probe

SEQ ID NO: 20222 - DNA, 32 bp, Artificial; identical to SEQ ID NO: 7838
  oligonucleotide probe

SEQ ID NO: 20223 - DNA, 32 bp, Artificial; identical to SEQ ID NO: 7853
  oligonucleotide probe

SEQ ID NO: 20224 - DNA, 32 bp, Artificial; identical to SEQ ID NO: 5220
  oligonucleotide probe

SEQ ID NO: 20225 - DNA, 32 bp, Artificial; identical to SEQ ID NO: 7855
  oligonucleotide probe

SEQ ID NO: 20226 - DNA, 32 bp, Artificial; identical to SEQ ID NO: 7856
  oligonucleotide probe

SEQ ID NO: 20227 - DNA, 32 bp, Artificial; identical to SEQ ID NO: 5224
  oligonucleotide probe

SEQ ID NO: 20228 - DNA, 32 bp, Artificial; identical to SEQ ID NO: 7840
  oligonucleotide probe

SEQ ID NO: 20229 - DNA, 32 bp, Artificial; identical to SEQ ID NO: 7855
  oligonucleotide probe

SEQ ID NO: 20230 - DNA, 32 bp, Artificial; identical to SEQ ID NO: 7856
  oligonucleotide probe

SEQ ID NO: 20231 - DNA, 32 bp, Artificial; identical to SEQ ID NO: 5224
  oligonucleotide probe

SEQ ID NO: 20232 - DNA, 32 bp, Artificial; identical to SEQ ID NO: 7840
  oligonucleotide probe

SEQ ID NO: 20233 - DNA, 32 bp, Artificial; identical to SEQ ID NO: 7863
  oligonucleotide probe

SEQ ID NO: 20234 - DNA, 32 bp, Artificial; identical to SEQ ID NO: 5217
  oligonucleotide probe

SEQ ID NO: 20235 - DNA, 32 bp, Artificial; identical to SEQ ID NO: 7865
  oligonucleotide probe

SEQ ID NO: 20236 - DNA, 32 bp, Artificial; identical to SEQ ID NO: 7866
  oligonucleotide probe

SEQ ID NO: 20237 - DNA, 32 bp, Artificial; identical to SEQ ID NO: 7865
  oligonucleotide probe

SEQ ID NO: 20238 - DNA, 32 bp, Artificial; identical to SEQ ID NO: 7866
  oligonucleotide probe

SEQ ID NO: 20239 - DNA, 32 bp, Artificial; identical to SEQ ID NO: 5223
  oligonucleotide probe

SEQ ID NO: 20240 - DNA, 32 bp, Artificial; identical to SEQ ID NO: 7838
  oligonucleotide probe

SEQ ID NO: 20241 - DNA, 32 bp, Artificial; identical to SEQ ID NO: 5224
  oligonucleotide probe

SEQ ID NO: 20242 - DNA, 32 bp, Artificial; identical to SEQ ID NO: 7840
  oligonucleotide probe

SEQ ID NO: 20243 - DNA, 32 bp, Artificial; identical to SEQ ID NO: 7853
  oligonucleotide probe

SEQ ID NO: 20244 - DNA, 32 bp, Artificial; identical to SEQ ID NO: 5220
  oligonucleotide probe

SEQ ID NO: 20245 - DNA, 32 bp, Artificial; identical to SEQ ID NO: 7853
  oligonucleotide probe

SEQ ID NO: 20246 - DNA, 32 bp, Artificial; identical to SEQ ID NO: 5220
  oligonucleotide probe

SEQ ID NO: 20247 - DNA, 32 bp, Artificial; identical to SEQ ID NO: 7853
  oligonucleotide probe

SEQ ID NO: 20248 - DNA, 32 bp, Artificial; identical to SEQ ID NO: 5220
  oligonucleotide probe

SEQ ID NO: 20249 - DNA, 32 bp, Artificial; identical to SEQ ID NO: 7833
  oligonucleotide probe

SEQ ID NO: 20250 - DNA, 32 bp, Artificial; identical to SEQ ID NO: 7834
  oligonucleotide probe

SEQ ID NO: 20251 - DNA, 32 bp, Artificial; identical to SEQ ID NO: 7855
  oligonucleotide probe

SEQ ID NO: 20252 - DNA, 32 bp, Artificial; identical to SEQ ID NO: 7856
  oligonucleotide probe

SEQ ID NO: 20253 - DNA, 32 bp, Artificial; identical to SEQ ID NO: 7863
  oligonucleotide probe

SEQ ID NO: 20254 - DNA, 32 bp, Artificial; identical to SEQ ID NO: 5217
  oligonucleotide probe

SEQ ID NO: 20255 - DNA, 32 bp, Artificial; identical to SEQ ID NO: 7831
  oligonucleotide probe

SEQ ID NO: 20256 - DNA, 32 bp, Artificial; identical to SEQ ID NO: 7832
  oligonucleotide probe

SEQ ID NO: 20257 - DNA, 32 bp, Artificial; identical to SEQ ID NO: 7835
  oligonucleotide probe

SEQ ID NO: 20258 - DNA, 32 bp, Artificial; identical to SEQ ID NO: 5232
  oligonucleotide probe

SEQ ID NO: 20259 - DNA, 32 bp, Artificial; identical to SEQ ID NO: 7855
  oligonucleotide probe

SEQ ID NO: 20260 - DNA, 32 bp, Artificial; identical to SEQ ID NO: 7856
  oligonucleotide probe

SEQ ID NO: 20261 - DNA, 32 bp, Artificial; identical to SEQ ID NO: 7891
  oligonucleotide probe

SEQ ID NO: 20262 - DNA, 32 bp, Artificial; identical to SEQ ID NO: 5218
  oligonucleotide probe

SEQ ID NO: 20263 - DNA, 32 bp, Artificial; identical to SEQ ID NO: 7835
  oligonucleotide probe

SEQ ID NO: 20264 - DNA, 32 bp, Artificial; identical to SEQ ID NO: 5232
  oligonucleotide probe

SEQ ID NO: 20265 - DNA, 32 bp, Artificial; identical to SEQ ID NO: 7840
  oligonucleotide probe

SEQ ID NO: 20266 - DNA, 32 bp, Artificial; identical to SEQ ID NO: 7853
  oligonucleotide probe

SEQ ID NO: 20267 - DNA, 32 bp, Artificial; identical to SEQ ID NO: 7831
  oligonucleotide probe

SEQ ID NO: 20268 - DNA, 32 bp, Artificial; identical to SEQ ID NO: 7832
  oligonucleotide probe

SEQ ID NO: 20269 - DNA, 32 bp, Artificial; identical to SEQ ID NO: 7865
  oligonucleotide probe

SEQ ID NO: 20270 - DNA, 32 bp, Artificial; identical to SEQ ID NO: 7866
  oligonucleotide probe

SEQ ID NO: 20271 - DNA, 32 bp, Artificial; identical to SEQ ID NO: 7855
  oligonucleotide probe

SEQ ID NO: 20272 - DNA, 32 bp, Artificial; identical to SEQ ID NO: 7856
  oligonucleotide probe

SEQ ID NO: 20273 - DNA, 32 bp, Artificial; identical to SEQ ID NO: 7853
  oligonucleotide probe

SEQ ID NO: 20274 - DNA, 32 bp, Artificial; identical to SEQ ID NO: 5220
  oligonucleotide probe

SEQ ID NO: 20275 - DNA, 32 bp, Artificial; identical to SEQ ID NO: 7905
  oligonucleotide probe

SEQ ID NO: 20276 - DNA, 32 bp, Artificial; identical to SEQ ID NO: 5231
  oligonucleotide probe

SEQ ID NO: 20277 - DNA, 32 bp, Artificial; identical to SEQ ID NO: 7863
  oligonucleotide probe

SEQ ID NO: 20278 - DNA, 32 bp, Artificial; identical to SEQ ID NO: 5217
  oligonucleotide probe

SEQ ID NO: 20279 - DNA, 32 bp, Artificial; identical to SEQ ID NO: 7853
  oligonucleotide probe

SEQ ID NO: 20280 - DNA, 32 bp, Artificial; identical to SEQ ID NO: 5220
  oligonucleotide probe

SEQ ID NO: 20281 - DNA, 32 bp, Artificial; identical to SEQ ID NO: 5224
  oligonucleotide probe

SEQ ID NO: 20282 - DNA, 32 bp, Artificial; identical to SEQ ID NO: 7840
  oligonucleotide probe

SEQ ID NO: 20283 - DNA, 32 bp, Artificial; identical to SEQ ID NO: 7891
  oligonucleotide probe

SEQ ID NO: 20284 - DNA, 32 bp, Artificial; identical to SEQ ID NO: 5218
  oligonucleotide probe

SEQ ID NO: 20285 - DNA, 32 bp, Artificial; identical to SEQ ID NO: 7831
  oligonucleotide probe

SEQ ID NO: 20286 - DNA, 32 bp, Artificial; identical to SEQ ID NO: 7832
  oligonucleotide probe

SEQ ID NO: 20287 - DNA, 32 bp, Artificial; identical to SEQ ID NO: 5224
  oligonucleotide probe

SEQ ID NO: 20288 - DNA, 32 bp, Artificial; identical to SEQ ID NO: 7840
  oligonucleotide probe

SEQ ID NO: 20289 - DNA, 32 bp, Artificial; identical to SEQ ID NO: 5223
  oligonucleotide probe

SEQ ID NO: 20290 - DNA, 32 bp, Artificial; identical to SEQ ID NO: 7838
  oligonucleotide probe

SEQ ID NO: 20291 - DNA, 32 bp, Artificial; identical to SEQ ID NO: 7863
  oligonucleotide probe

SEQ ID NO: 20292 - DNA, 32 bp, Artificial; identical to SEQ ID NO: 5217
  oligonucleotide probe

SEQ ID NO: 20293 - DNA, 32 bp, Artificial; identical to SEQ ID NO: 7853
  oligonucleotide probe

SEQ ID NO: 20294 - DNA, 32 bp, Artificial; identical to SEQ ID NO: 5220
  oligonucleotide probe

SEQ ID NO: 20295 - DNA, 32 bp, Artificial; identical to SEQ ID NO: 7833
  oligonucleotide probe

SEQ ID NO: 20296 - DNA, 32 bp, Artificial; identical to SEQ ID NO: 7834
  oligonucleotide probe

SEQ ID NO: 20297 - DNA, 32 bp, Artificial; identical to SEQ ID NO: 7835
  oligonucleotide probe

SEQ ID NO: 20298 - DNA, 32 bp, Artificial; identical to SEQ ID NO: 5232
  oligonucleotide probe

SEQ ID NO: 20299 - DNA, 32 bp, Artificial; identical to SEQ ID NO: 7831
  oligonucleotide probe

SEQ ID NO: 20300 - DNA, 32 bp, Artificial; identical to SEQ ID NO: 7832
  oligonucleotide probe

SEQ ID NO: 20301 - DNA, 32 bp, Artificial; identical to SEQ ID NO: 7865
  oligonucleotide probe

SEQ ID NO: 20302 - DNA, 32 bp, Artificial; identical to SEQ ID NO: 7866
  oligonucleotide probe

SEQ ID NO: 20303 - DNA, 32 bp, Artificial; identical to SEQ ID NO: 5224
  oligonucleotide probe

SEQ ID NO: 20304 - DNA, 32 bp, Artificial; identical to SEQ ID NO: 7840
  oligonucleotide probe

SEQ ID NO: 20305 - DNA, 32 bp, Artificial; identical to SEQ ID NO: 7831
  oligonucleotide probe

SEQ ID NO: 20306 - DNA, 32 bp, Artificial; identical to SEQ ID NO: 7832
  oligonucleotide probe

SEQ ID NO: 20307 - DNA, 32 bp, Artificial; identical to SEQ ID NO: 5224
  oligonucleotide probe

SEQ ID NO: 20308 - DNA, 32 bp, Artificial; identical to SEQ ID NO: 7840
  oligonucleotide probe

SEQ ID NO: 20309 - DNA, 32 bp, Artificial; identical to SEQ ID NO: 5223
  oligonucleotide probe

SEQ ID NO: 20310 - DNA, 32 bp, Artificial; identical to SEQ ID NO: 7838
  oligonucleotide probe

SEQ ID NO: 20311 - DNA, 32 bp, Artificial; identical to SEQ ID NO: 7833
  oligonucleotide probe

SEQ ID NO: 20312 - DNA, 32 bp, Artificial; identical to SEQ ID NO: 7834
  oligonucleotide probe

SEQ ID NO: 20313 - DNA, 32 bp, Artificial; identical to SEQ ID NO: 5223
  oligonucleotide probe

SEQ ID NO: 20314 - DNA, 32 bp, Artificial; identical to SEQ ID NO: 7838
  oligonucleotide probe

SEQ ID NO: 20315 - DNA, 32 bp, Artificial; identical to SEQ ID NO: 5224
  oligonucleotide probe

SEQ ID NO: 20316 - DNA, 32 bp, Artificial; identical to SEQ ID NO: 7840
  oligonucleotide probe

SEQ ID NO: 20317 - DNA, 32 bp, Artificial; identical to SEQ ID NO: 7947
  oligonucleotide probe

SEQ ID NO: 20318 - DNA, 32 bp, Artificial; identical to SEQ ID NO: 7948
  oligonucleotide probe

SEQ ID NO: 20319 - DNA, 32 bp, Artificial; identical to SEQ ID NO: 5223
  oligonucleotide probe

SEQ ID NO: 20320 - DNA, 32 bp, Artificial; identical to SEQ ID NO: 7838
  oligonucleotide probe

SEQ ID NO: 20321 - DNA, 32 bp, Artificial; identical to SEQ ID NO: 7891
  oligonucleotide probe

SEQ ID NO: 20322 - DNA, 32 bp, Artificial; identical to SEQ ID NO: 5218
  oligonucleotide probe

SEQ ID NO: 20323 - DNA, 32 bp, Artificial; identical to SEQ ID NO: 5224
  oligonucleotide probe

SEQ ID NO: 20324 - DNA, 32 bp, Artificial; identical to SEQ ID NO: 7840
  oligonucleotide probe

SEQ ID NO: 20325 - DNA, 32 bp, Artificial; identical to SEQ ID NO: 7891
  oligonucleotide probe

SEQ ID NO: 20326 - DNA, 32 bp, Artificial; identical to SEQ ID NO: 5218
  oligonucleotide probe

SEQ ID NO: 20327 - DNA, 32 bp, Artificial; identical to SEQ ID NO: 7863
  oligonucleotide probe

SEQ ID NO: 20328 - DNA, 32 bp, Artificial; identical to SEQ ID NO: 5217
  oligonucleotide probe

SEQ ID NO: 20329 - DNA, 32 bp, Artificial; identical to SEQ ID NO: 7891
  oligonucleotide probe

SEQ ID NO: 20330 - DNA, 32 bp, Artificial; identical to SEQ ID NO: 5218
  oligonucleotide probe

SEQ ID NO: 20331 - DNA, 32 bp, Artificial; identical to SEQ ID NO: 7833
  oligonucleotide probe

SEQ ID NO: 20332 - DNA, 32 bp, Artificial; identical to SEQ ID NO: 7834
  oligonucleotide probe

SEQ ID NO: 20333 - DNA, 32 bp, Artificial; identical to SEQ ID NO: 7865
  oligonucleotide probe

SEQ ID NO: 20334 - DNA, 32 bp, Artificial; identical to SEQ ID NO: 7866
  oligonucleotide probe

SEQ ID NO: 20335 - DNA, 32 bp, Artificial; identical to SEQ ID NO: 7865
  oligonucleotide probe

SEQ ID NO: 20336 - DNA, 32 bp, Artificial; identical to SEQ ID NO: 7866
  oligonucleotide probe

SEQ ID NO: 20337 - DNA, 32 bp, Artificial; identical to SEQ ID NO: 5223
  oligonucleotide probe

SEQ ID NO: 20338 - DNA, 32 bp, Artificial; identical to SEQ ID NO: 7838
  oligonucleotide probe

SEQ ID NO: 20339 - DNA, 32 bp, Artificial; identical to SEQ ID NO: 5224
  oligonucleotide probe

SEQ ID NO: 20340 - DNA, 32 bp, Artificial; identical to SEQ ID NO: 7840
  oligonucleotide probe

SEQ ID NO: 20341 - DNA, 32 bp, Artificial; identical to SEQ ID NO: 7840
  oligonucleotide probe

SEQ ID NO: 20342 - DNA, 32 bp, Artificial; identical to SEQ ID NO: 7853
  oligonucleotide probe

SEQ ID NO: 20343 - DNA, 32 bp, Artificial; identical to SEQ ID NO: 7863
  oligonucleotide probe

SEQ ID NO: 20344 - DNA, 32 bp, Artificial; identical to SEQ ID NO: 5217
  oligonucleotide probe

SEQ ID NO: 20345 - DNA, 32 bp, Artificial; identical to SEQ ID NO: 5223
  oligonucleotide probe

SEQ ID NO: 20346 - DNA, 32 bp, Artificial; identical to SEQ ID NO: 7838
  oligonucleotide probe

SEQ ID NO: 20347 - DNA, 32 bp, Artificial; identical to SEQ ID NO: 7855
  oligonucleotide probe

SEQ ID NO: 20348 - DNA, 32 bp, Artificial; identical to SEQ ID NO: 7856
  oligonucleotide probe

SEQ ID NO: 20349 - DNA, 32 bp, Artificial; identical to SEQ ID NO: 5224
  oligonucleotide probe

SEQ ID NO: 20350 - DNA, 32 bp, Artificial; identical to SEQ ID NO: 7840
  oligonucleotide probe

SEQ ID NO: 20351 - DNA, 32 bp, Artificial; identical to SEQ ID NO: 7853
  oligonucleotide probe

SEQ ID NO: 20352 - DNA, 32 bp, Artificial; identical to SEQ ID NO: 5220
  oligonucleotide probe

SEQ ID NO: 20353 - DNA, 32 bp, Artificial; identical to SEQ ID NO: 5223
  oligonucleotide probe

SEQ ID NO: 20354 - DNA, 32 bp, Artificial; identical to SEQ ID NO: 7838
  oligonucleotide probe

SEQ ID NO: 20355 - DNA, 32 bp, Artificial; identical to SEQ ID NO: 5224
  oligonucleotide probe

SEQ ID NO: 20356 - DNA, 32 bp, Artificial; identical to SEQ ID NO: 7840
  oligonucleotide probe

SEQ ID NO: 20357 - DNA, 32 bp, Artificial; identical to SEQ ID NO: 5224
  oligonucleotide probe

SEQ ID NO: 20358 - DNA, 32 bp, Artificial; identical to SEQ ID NO: 7840
  oligonucleotide probe

SEQ ID NO: 20359 - DNA, 32 bp, Artificial; identical to SEQ ID NO: 7891
  oligonucleotide probe

SEQ ID NO: 20360 - DNA, 32 bp, Artificial; identical to SEQ ID NO: 5218
  oligonucleotide probe

SEQ ID NO: 20361 - DNA, 32 bp, Artificial; identical to SEQ ID NO: 7833
  oligonucleotide probe

SEQ ID NO: 20362 - DNA, 32 bp, Artificial; identical to SEQ ID NO: 7834
  oligonucleotide probe

SEQ ID NO: 20363 - DNA, 32 bp, Artificial; identical to SEQ ID NO: 7865
  oligonucleotide probe

SEQ ID NO: 20364 - DNA, 32 bp, Artificial; identical to SEQ ID NO: 7866
  oligonucleotide probe

SEQ ID NO: 20365 - DNA, 32 bp, Artificial; identical to SEQ ID NO: 7840
  oligonucleotide probe

SEQ ID NO: 20366 - DNA, 32 bp, Artificial; identical to SEQ ID NO: 7853
  oligonucleotide probe

SEQ ID NO: 20367 - DNA, 32 bp, Artificial; identical to SEQ ID NO: 5223
  oligonucleotide probe

SEQ ID NO: 20368 - DNA, 32 bp, Artificial; identical to SEQ ID NO: 7838
  oligonucleotide probe

SEQ ID NO: 20369 - DNA, 32 bp, Artificial; identical to SEQ ID NO: 7853
  oligonucleotide probe

SEQ ID NO: 20370 - DNA, 32 bp, Artificial; identical to SEQ ID NO: 5220
  oligonucleotide probe

SEQ ID NO: 20371 - DNA, 32 bp, Artificial; identical to SEQ ID NO: 8001
  oligonucleotide probe

SEQ ID NO: 20372 - DNA, 32 bp, Artificial; identical to SEQ ID NO: 5239
  oligonucleotide probe

SEQ ID NO: 20373 - DNA, 32 bp, Artificial; identical to SEQ ID NO: 7835
  oligonucleotide probe

SEQ ID NO: 20374 - DNA, 32 bp, Artificial; identical to SEQ ID NO: 5232
  oligonucleotide probe

SEQ ID NO: 20375 - DNA, 32 bp, Artificial; identical to SEQ ID NO: 7853
  oligonucleotide probe

SEQ ID NO: 20376 - DNA, 32 bp, Artificial; identical to SEQ ID NO: 5220
  oligonucleotide probe

SEQ ID NO: 20377 - DNA, 32 bp, Artificial; identical to SEQ ID NO: 7905
  oligonucleotide probe

SEQ ID NO: 20378 - DNA, 32 bp, Artificial; identical to SEQ ID NO: 5231
  oligonucleotide probe

SEQ ID NO: 20379 - DNA, 32 bp, Artificial; identical to SEQ ID NO: 7840
  oligonucleotide probe

SEQ ID NO: 20380 - DNA, 32 bp, Artificial; identical to SEQ ID NO: 7853
  oligonucleotide probe

SEQ ID NO: 20381 - DNA, 32 bp, Artificial; identical to SEQ ID NO: 7853
  oligonucleotide probe

SEQ ID NO: 20382 - DNA, 32 bp, Artificial; identical to SEQ ID NO: 5220
  oligonucleotide probe

SEQ ID NO: 20383 - DNA, 32 bp, Artificial; identical to SEQ ID NO: 7853
  oligonucleotide probe

SEQ ID NO: 20384 - DNA, 32 bp, Artificial; identical to SEQ ID NO: 5220
  oligonucleotide probe

SEQ ID NO: 20385 - DNA, 32 bp, Artificial; identical to SEQ ID NO: 7863
  oligonucleotide probe

SEQ ID NO: 20386 - DNA, 32 bp, Artificial; identical to SEQ ID NO: 5217
  oligonucleotide probe

SEQ ID NO: 20387 - DNA, 32 bp, Artificial; identical to SEQ ID NO: 7853
  oligonucleotide probe

SEQ ID NO: 20388 - DNA, 32 bp, Artificial; identical to SEQ ID NO: 5220
  oligonucleotide probe

SEQ ID NO: 20389 - DNA, 32 bp, Artificial; identical to SEQ ID NO: 7833
  oligonucleotide probe

SEQ ID NO: 20390 - DNA, 32 bp, Artificial; identical to SEQ ID NO: 7834
  oligonucleotide probe

SEQ ID NO: 20391 - DNA, 32 bp, Artificial; identical to SEQ ID NO: 5224
  oligonucleotide probe

SEQ ID NO: 20392 - DNA, 32 bp, Artificial; identical to SEQ ID NO: 7840
  oligonucleotide probe

SEQ ID NO: 20393 - DNA, 32 bp, Artificial; identical to SEQ ID NO: 7833
  oligonucleotide probe

SEQ ID NO: 20394 - DNA, 32 bp, Artificial; identical to SEQ ID NO: 7834
  oligonucleotide probe

SEQ ID NO: 20395 - DNA, 32 bp, Artificial; identical to SEQ ID NO: 7891
  oligonucleotide probe

SEQ ID NO: 20396 - DNA, 32 bp, Artificial; identical to SEQ ID NO: 5218
  oligonucleotide probe

SEQ ID NO: 20397 - DNA, 32 bp, Artificial; identical to SEQ ID NO: 5223
  oligonucleotide probe

SEQ ID NO: 20398 - DNA, 32 bp, Artificial; identical to SEQ ID NO: 7838
  oligonucleotide probe

SEQ ID NO: 20399 - DNA, 32 bp, Artificial; identical to SEQ ID NO: 5223
  oligonucleotide probe

SEQ ID NO: 20400 - DNA, 32 bp, Artificial; identical to SEQ ID NO: 7838
  oligonucleotide probe

SEQ ID NO: 20401 - DNA, 32 bp, Artificial; identical to SEQ ID NO: 5224
  oligonucleotide probe

SEQ ID NO: 20402 - DNA, 32 bp, Artificial; identical to SEQ ID NO: 7840
  oligonucleotide probe

SEQ ID NO: 20403 - DNA, 32 bp, Artificial; identical to SEQ ID NO: 7853
  oligonucleotide probe

SEQ ID NO: 20404 - DNA, 32 bp, Artificial; identical to SEQ ID NO: 5220
  oligonucleotide probe

SEQ ID NO: 20405 - DNA, 32 bp, Artificial; identical to SEQ ID NO: 5223
  oligonucleotide probe

SEQ ID NO: 20406 - DNA, 32 bp, Artificial; identical to SEQ ID NO: 7838
  oligonucleotide probe

SEQ ID NO: 20407 - DNA, 32 bp, Artificial; identical to SEQ ID NO: 7833
  oligonucleotide probe

SEQ ID NO: 20408 - DNA, 32 bp, Artificial; identical to SEQ ID NO: 7834
  oligonucleotide probe

SEQ ID NO: 20409 - DNA, 32 bp, Artificial; identical to SEQ ID NO: 7831
  oligonucleotide probe

SEQ ID NO: 20410 - DNA, 32 bp, Artificial; identical to SEQ ID NO: 7832
  oligonucleotide probe

SEQ ID NO: 20411 - DNA, 32 bp, Artificial; identical to SEQ ID NO: 5223
  oligonucleotide probe

SEQ ID NO: 20412 - DNA, 32 bp, Artificial; identical to SEQ ID NO: 7838
  oligonucleotide probe

SEQ ID NO: 20413 - DNA, 32 bp, Artificial; identical to SEQ ID NO: 5223
  oligonucleotide probe

SEQ ID NO: 20414 - DNA, 32 bp, Artificial; identical to SEQ ID NO: 7838
  oligonucleotide probe

SEQ ID NO: 20415 - DNA, 32 bp, Artificial; identical to SEQ ID NO: 5223
  oligonucleotide probe

SEQ ID NO: 20416 - DNA, 32 bp, Artificial; identical to SEQ ID NO: 7838
  oligonucleotide probe

SEQ ID NO: 20417 - DNA, 32 bp, Artificial; identical to SEQ ID NO: 8047
  oligonucleotide probe

SEQ ID NO: 20418 - DNA, 32 bp, Artificial; identical to SEQ ID NO: 5240
  oligonucleotide probe

SEQ ID NO: 20419 - DNA, 32 bp, Artificial; identical to SEQ ID NO: 7833
  oligonucleotide probe

SEQ ID NO: 20420 - DNA, 32 bp, Artificial; identical to SEQ ID NO: 7834
  oligonucleotide probe

SEQ ID NO: 20421 - DNA, 32 bp, Artificial; identical to SEQ ID NO: 7833
  oligonucleotide probe

SEQ ID NO: 20422 - DNA, 32 bp, Artificial; identical to SEQ ID NO: 7834
  oligonucleotide probe

SEQ ID NO: 20423 - DNA, 32 bp, Artificial; identical to SEQ ID NO: 7853
  oligonucleotide probe

SEQ ID NO: 20424 - DNA, 32 bp, Artificial; identical to SEQ ID NO: 5220
  oligonucleotide probe

SEQ ID NO: 20425 - DNA, 32 bp, Artificial; identical to SEQ ID NO: 7891
  oligonucleotide probe

SEQ ID NO: 20426 - DNA, 32 bp, Artificial; identical to SEQ ID NO: 5218
  oligonucleotide probe

SEQ ID NO: 20427 - DNA, 32 bp, Artificial; identical to SEQ ID NO: 5224
  oligonucleotide probe

SEQ ID NO: 20428 - DNA, 32 bp, Artificial; identical to SEQ ID NO: 7840
  oligonucleotide probe

SEQ ID NO: 20429 - DNA, 32 bp, Artificial; identical to SEQ ID NO: 7905
  oligonucleotide probe

SEQ ID NO: 20430 - DNA, 32 bp, Artificial; identical to SEQ ID NO: 5231
  oligonucleotide probe

SEQ ID NO: 20431 - DNA, 32 bp, Artificial; identical to SEQ ID NO: 7853
  oligonucleotide probe

SEQ ID NO: 20432 - DNA, 32 bp, Artificial; identical to SEQ ID NO: 5220
  oligonucleotide probe

SEQ ID NO: 20433 - DNA, 32 bp, Artificial; identical to SEQ ID NO: 5223
  oligonucleotide probe

SEQ ID NO: 20434 - DNA, 32 bp, Artificial; identical to SEQ ID NO: 7838
  oligonucleotide probe

SEQ ID NO: 20435 - DNA, 32 bp, Artificial; identical to SEQ ID NO: 7831
  oligonucleotide probe

SEQ ID NO: 20436 - DNA, 32 bp, Artificial; identical to SEQ ID NO: 7832
  oligonucleotide probe

SEQ ID NO: 20437 - DNA, 32 bp, Artificial; identical to SEQ ID NO: 5223
  oligonucleotide probe

SEQ ID NO: 20438 - DNA, 32 bp, Artificial; identical to SEQ ID NO: 7838
  oligonucleotide probe

SEQ ID NO: 20439 - DNA, 32 bp, Artificial; identical to SEQ ID NO: 7865
  oligonucleotide probe

SEQ ID NO: 20440 - DNA, 32 bp, Artificial; identical to SEQ ID NO: 7866
  oligonucleotide probe

SEQ ID NO: 20441 - DNA, 32 bp, Artificial; identical to SEQ ID NO: 5223
  oligonucleotide probe

SEQ ID NO: 20442 - DNA, 32 bp, Artificial; identical to SEQ ID NO: 7838
  oligonucleotide probe

SEQ ID NO: 20443 - DNA, 32 bp, Artificial; identical to SEQ ID NO: 7891
  oligonucleotide probe

SEQ ID NO: 20444 - DNA, 32 bp, Artificial; identical to SEQ ID NO: 5218
  oligonucleotide probe

SEQ ID NO: 20445 - DNA, 32 bp, Artificial; identical to SEQ ID NO: 7831
  oligonucleotide probe

SEQ ID NO: 20446 - DNA, 32 bp, Artificial; identical to SEQ ID NO: 7832
  oligonucleotide probe

SEQ ID NO: 20447 - DNA, 32 bp, Artificial; identical to SEQ ID NO: 7863
  oligonucleotide probe

SEQ ID NO: 20448 - DNA, 32 bp, Artificial; identical to SEQ ID NO: 5217
  oligonucleotide probe

SEQ ID NO: 20449 - DNA, 32 bp, Artificial; identical to SEQ ID NO: 7891
  oligonucleotide probe

SEQ ID NO: 20450 - DNA, 32 bp, Artificial; identical to SEQ ID NO: 5218
  oligonucleotide probe

SEQ ID NO: 20451 - DNA, 32 bp, Artificial; identical to SEQ ID NO: 7853
  oligonucleotide probe

SEQ ID NO: 20452 - DNA, 32 bp, Artificial; identical to SEQ ID NO: 5220
  oligonucleotide probe

SEQ ID NO: 20453 - DNA, 32 bp, Artificial; identical to SEQ ID NO: 7905
  oligonucleotide probe

SEQ ID NO: 20454 - DNA, 32 bp, Artificial; identical to SEQ ID NO: 5231
  oligonucleotide probe

SEQ ID NO: 20455 - DNA, 32 bp, Artificial; identical to SEQ ID NO: 7831
  oligonucleotide probe

SEQ ID NO: 20456 - DNA, 32 bp, Artificial; identical to SEQ ID NO: 7832
  oligonucleotide probe

SEQ ID NO: 20457 - DNA, 32 bp, Artificial; identical to SEQ ID NO: 7840
  oligonucleotide probe

SEQ ID NO: 20458 - DNA, 32 bp, Artificial; identical to SEQ ID NO: 7853
  oligonucleotide probe

SEQ ID NO: 20459 - DNA, 32 bp, Artificial; identical to SEQ ID NO: 5223
  oligonucleotide probe

SEQ ID NO: 20460 - DNA, 32 bp, Artificial; identical to SEQ ID NO: 7838
  oligonucleotide probe

SEQ ID NO: 20461 - DNA, 32 bp, Artificial; identical to SEQ ID NO: 7855
  oligonucleotide probe

SEQ ID NO: 20462 - DNA, 32 bp, Artificial; identical to SEQ ID NO: 7856
  oligonucleotide probe

SEQ ID NO: 20463 - DNA, 32 bp, Artificial; identical to SEQ ID NO: 7853
  oligonucleotide probe

SEQ ID NO: 20464 - DNA, 32 bp, Artificial; identical to SEQ ID NO: 5220
  oligonucleotide probe

SEQ ID NO: 20465 - DNA, 32 bp, Artificial; identical to SEQ ID NO: 5224
  oligonucleotide probe

SEQ ID NO: 20466 - DNA, 32 bp, Artificial; identical to SEQ ID NO: 7840
  oligonucleotide probe

SEQ ID NO: 20467 - DNA, 32 bp, Artificial; identical to SEQ ID NO: 7853
  oligonucleotide probe

SEQ ID NO: 20468 - DNA, 32 bp, Artificial; identical to SEQ ID NO: 5220
  oligonucleotide probe

SEQ ID NO: 20469 - DNA, 32 bp, Artificial; identical to SEQ ID NO: 7863
  oligonucleotide probe

SEQ ID NO: 20470 - DNA, 32 bp, Artificial; identical to SEQ ID NO: 5217
  oligonucleotide probe

SEQ ID NO: 20471 - DNA, 32 bp, Artificial; identical to SEQ ID NO: 7865
  oligonucleotide probe

SEQ ID NO: 20472 - DNA, 32 bp, Artificial; identical to SEQ ID NO: 7866
  oligonucleotide probe

SEQ ID NO: 20473 - DNA, 32 bp, Artificial; identical to SEQ ID NO: 7905
  oligonucleotide probe

SEQ ID NO: 20474 - DNA, 32 bp, Artificial; identical to SEQ ID NO: 5231
  oligonucleotide probe

SEQ ID NO: 20475 - DNA, 32 bp, Artificial; identical to SEQ ID NO: 7891
  oligonucleotide probe

SEQ ID NO: 20476 - DNA, 32 bp, Artificial; identical to SEQ ID NO: 5218
  oligonucleotide probe

SEQ ID NO: 20477 - DNA, 32 bp, Artificial; identical to SEQ ID NO: 5224
  oligonucleotide probe

SEQ ID NO: 20478 - DNA, 32 bp, Artificial; identical to SEQ ID NO: 7840
  oligonucleotide probe

SEQ ID NO: 20479 - DNA, 32 bp, Artificial; identical to SEQ ID NO: 7831
  oligonucleotide probe

SEQ ID NO: 20480 - DNA, 32 bp, Artificial; identical to SEQ ID NO: 7832
  oligonucleotide probe

SEQ ID NO: 20481 - DNA, 32 bp, Artificial; identical to SEQ ID NO: 7831
  oligonucleotide probe

SEQ ID NO: 20482 - DNA, 32 bp, Artificial; identical to SEQ ID NO: 7832
  oligonucleotide probe

SEQ ID NO: 20483 - DNA, 32 bp, Artificial; identical to SEQ ID NO: 5224
  oligonucleotide probe

SEQ ID NO: 20484 - DNA, 32 bp, Artificial; identical to SEQ ID NO: 7840
  oligonucleotide probe

SEQ ID NO: 20485 - DNA, 32 bp, Artificial; identical to SEQ ID NO: 7841
  oligonucleotide probe

SEQ ID NO: 20486 - DNA, 32 bp, Artificial; identical to SEQ ID NO: 7842
  oligonucleotide probe

SEQ ID NO: 20487 - DNA, 32 bp, Artificial; identical to SEQ ID NO: 7831
  oligonucleotide probe

SEQ ID NO: 20488 - DNA, 32 bp, Artificial; identical to SEQ ID NO: 7832
  oligonucleotide probe

SEQ ID NO: 20489 - DNA, 32 bp, Artificial; identical to SEQ ID NO: 5223
  oligonucleotide probe

SEQ ID NO: 20490 - DNA, 32 bp, Artificial; identical to SEQ ID NO: 7838
  oligonucleotide probe

SEQ ID NO: 20491 - DNA, 32 bp, Artificial; identical to SEQ ID NO: 5223
  oligonucleotide probe

SEQ ID NO: 20492 - DNA, 32 bp, Artificial; identical to SEQ ID NO: 7838
  oligonucleotide probe

SEQ ID NO: 20493 - DNA, 32 bp, Artificial; identical to SEQ ID NO: 7853
  oligonucleotide probe

SEQ ID NO: 20494 - DNA, 32 bp, Artificial; identical to SEQ ID NO: 5220
  oligonucleotide probe

SEQ ID NO: 20495 - DNA, 32 bp, Artificial; identical to SEQ ID NO: 7833
  oligonucleotide probe

SEQ ID NO: 20496 - DNA, 32 bp, Artificial; identical to SEQ ID NO: 7834
  oligonucleotide probe

SEQ ID NO: 20497 - DNA, 32 bp, Artificial; identical to SEQ ID NO: 7833
  oligonucleotide probe

SEQ ID NO: 20498 - DNA, 32 bp, Artificial; identical to SEQ ID NO: 7834
  oligonucleotide probe

SEQ ID NO: 20499 - DNA, 32 bp, Artificial; identical to SEQ ID NO: 7831
  oligonucleotide probe

SEQ ID NO: 20500 - DNA, 32 bp, Artificial; identical to SEQ ID NO: 7832
  oligonucleotide probe

SEQ ID NO: 20501 - DNA, 32 bp, Artificial; identical to SEQ ID NO: 7855
  oligonucleotide probe

SEQ ID NO: 20502 - DNA, 32 bp, Artificial; identical to SEQ ID NO: 7856
  oligonucleotide probe

SEQ ID NO: 20503 - DNA, 32 bp, Artificial; identical to SEQ ID NO: 5224
  oligonucleotide probe

SEQ ID NO: 20504 - DNA, 32 bp, Artificial; identical to SEQ ID NO: 7840
  oligonucleotide probe

SEQ ID NO: 20505 - DNA, 32 bp, Artificial; identical to SEQ ID NO: 7863
  oligonucleotide probe

SEQ ID NO: 20506 - DNA, 32 bp, Artificial; identical to SEQ ID NO: 5217
  oligonucleotide probe

SEQ ID NO: 20507 - DNA, 32 bp, Artificial; identical to SEQ ID NO: 5224
  oligonucleotide probe

SEQ ID NO: 20508 - DNA, 32 bp, Artificial; identical to SEQ ID NO: 7840
  oligonucleotide probe

SEQ ID NO: 20509 - DNA, 32 bp, Artificial; identical to SEQ ID NO: 7833
  oligonucleotide probe

SEQ ID NO: 20510 - DNA, 32 bp, Artificial; identical to SEQ ID NO: 7834
  oligonucleotide probe

SEQ ID NO: 20511 - DNA, 32 bp, Artificial; identical to SEQ ID NO: 7863
  oligonucleotide probe

SEQ ID NO: 20512 - DNA, 32 bp, Artificial; identical to SEQ ID NO: 5217
  oligonucleotide probe

SEQ ID NO: 20513 - DNA, 32 bp, Artificial; identical to SEQ ID NO: 5223
  oligonucleotide probe

SEQ ID NO: 20514 - DNA, 32 bp, Artificial; identical to SEQ ID NO: 7838
  oligonucleotide probe

SEQ ID NO: 20515 - DNA, 32 bp, Artificial; identical to SEQ ID NO: 7853
  oligonucleotide probe

SEQ ID NO: 20516 - DNA, 32 bp, Artificial; identical to SEQ ID NO: 5220
  oligonucleotide probe

SEQ ID NO: 20517 - DNA, 32 bp, Artificial; identical to SEQ ID NO: 7853
  oligonucleotide probe

SEQ ID NO: 20518 - DNA, 32 bp, Artificial; identical to SEQ ID NO: 5220
  oligonucleotide probe

SEQ ID NO: 20519 - DNA, 32 bp, Artificial; identical to SEQ ID NO: 7840
  oligonucleotide probe

SEQ ID NO: 20520 - DNA, 32 bp, Artificial; identical to SEQ ID NO: 7853
  oligonucleotide probe

SEQ ID NO: 20521 - DNA, 32 bp, Artificial; identical to SEQ ID NO: 7853
  oligonucleotide probe

SEQ ID NO: 20522 - DNA, 32 bp, Artificial; identical to SEQ ID NO: 5220
  oligonucleotide probe

SEQ ID NO: 20523 - DNA, 32 bp, Artificial; identical to SEQ ID NO: 7863
  oligonucleotide probe

SEQ ID NO: 20524 - DNA, 32 bp, Artificial; identical to SEQ ID NO: 5217
  oligonucleotide probe

SEQ ID NO: 20525 - DNA, 32 bp, Artificial; identical to SEQ ID NO: 7831
  oligonucleotide probe

SEQ ID NO: 20526 - DNA, 32 bp, Artificial; identical to SEQ ID NO: 7832
  oligonucleotide probe

SEQ ID NO: 20527 - DNA, 32 bp, Artificial; identical to SEQ ID NO: 7853
  oligonucleotide probe

SEQ ID NO: 20528 - DNA, 32 bp, Artificial; identical to SEQ ID NO: 5220
  oligonucleotide probe

SEQ ID NO: 20529 - DNA, 32 bp, Artificial; identical to SEQ ID NO: 7831
  oligonucleotide probe

SEQ ID NO: 20530 - DNA, 32 bp, Artificial; identical to SEQ ID NO: 7832
  oligonucleotide probe

SEQ ID NO: 20531 - DNA, 32 bp, Artificial; identical to SEQ ID NO: 7840
  oligonucleotide probe

SEQ ID NO: 20532 - DNA, 32 bp, Artificial; identical to SEQ ID NO: 7853
  oligonucleotide probe

SEQ ID NO: 20533 - DNA, 32 bp, Artificial; identical to SEQ ID NO: 7835
  oligonucleotide probe

SEQ ID NO: 20534 - DNA, 32 bp, Artificial; identical to SEQ ID NO: 5232
  oligonucleotide probe

SEQ ID NO: 20535 - DNA, 32 bp, Artificial; identical to SEQ ID NO: 7891
  oligonucleotide probe

SEQ ID NO: 20536 - DNA, 32 bp, Artificial; identical to SEQ ID NO: 5218
  oligonucleotide probe

SEQ ID NO: 20537 - DNA, 32 bp, Artificial; identical to SEQ ID NO: 5223
  oligonucleotide probe

SEQ ID NO: 20538 - DNA, 32 bp, Artificial; identical to SEQ ID NO: 7838
  oligonucleotide probe

SEQ ID NO: 20539 - DNA, 32 bp, Artificial; identical to SEQ ID NO: 7947
  oligonucleotide probe

SEQ ID NO: 20540 - DNA, 32 bp, Artificial; identical to SEQ ID NO: 7948
  oligonucleotide probe

SEQ ID NO: 20541 - DNA, 32 bp, Artificial; identical to SEQ ID NO: 5224
  oligonucleotide probe

SEQ ID NO: 20542 - DNA, 32 bp, Artificial; identical to SEQ ID NO: 7840
  oligonucleotide probe

SEQ ID NO: 20543 - DNA, 32 bp, Artificial; identical to SEQ ID NO: 7853
  oligonucleotide probe

SEQ ID NO: 20544 - DNA, 32 bp, Artificial; identical to SEQ ID NO: 5220
  oligonucleotide probe

SEQ ID NO: 20545 - DNA, 32 bp, Artificial; identical to SEQ ID NO: 7831
  oligonucleotide probe

SEQ ID NO: 20546 - DNA, 32 bp, Artificial; identical to SEQ ID NO: 7832
  oligonucleotide probe

SEQ ID NO: 20547 - DNA, 32 bp, Artificial; identical to SEQ ID NO: 7833
  oligonucleotide probe

SEQ ID NO: 20548 - DNA, 32 bp, Artificial; identical to SEQ ID NO: 7834
  oligonucleotide probe

SEQ ID NO: 20549 - DNA, 32 bp, Artificial; identical to SEQ ID NO: 7891
  oligonucleotide probe

SEQ ID NO: 20550 - DNA, 32 bp, Artificial; identical to SEQ ID NO: 5218
  oligonucleotide probe

SEQ ID NO: 20551 - DNA, 32 bp, Artificial; identical to SEQ ID NO: 7855
  oligonucleotide probe

SEQ ID NO: 20552 - DNA, 32 bp, Artificial; identical to SEQ ID NO: 7856
  oligonucleotide probe

SEQ ID NO: 20553 - DNA, 32 bp, Artificial; identical to SEQ ID NO: 5223
  oligonucleotide probe

SEQ ID NO: 20554 - DNA, 32 bp, Artificial; identical to SEQ ID NO: 7838
  oligonucleotide probe

SEQ ID NO: 20555 - DNA, 32 bp, Artificial; identical to SEQ ID NO: 7853
  oligonucleotide probe

SEQ ID NO: 20556 - DNA, 32 bp, Artificial; identical to SEQ ID NO: 5220
  oligonucleotide probe

SEQ ID NO: 20557 - DNA, 32 bp, Artificial; identical to SEQ ID NO: 5223
  oligonucleotide probe

SEQ ID NO: 20558 - DNA, 32 bp, Artificial; identical to SEQ ID NO: 7838
  oligonucleotide probe

SEQ ID NO: 20559 - DNA, 32 bp, Artificial; identical to SEQ ID NO: 5224
  oligonucleotide probe

SEQ ID NO: 20560 - DNA, 32 bp, Artificial; identical to SEQ ID NO: 7840
  oligonucleotide probe

SEQ ID NO: 20561 - DNA, 32 bp, Artificial; identical to SEQ ID NO: 7833
  oligonucleotide probe

SEQ ID NO: 20562 - DNA, 32 bp, Artificial; identical to SEQ ID NO: 7834
  oligonucleotide probe

SEQ ID NO: 20563 - DNA, 32 bp, Artificial; identical to SEQ ID NO: 7891
  oligonucleotide probe

SEQ ID NO: 20564 - DNA, 32 bp, Artificial; identical to SEQ ID NO: 5218
  oligonucleotide probe

SEQ ID NO: 20565 - DNA, 32 bp, Artificial; identical to SEQ ID NO: 7865
  oligonucleotide probe

SEQ ID NO: 20566 - DNA, 32 bp, Artificial; identical to SEQ ID NO: 7866
  oligonucleotide probe

SEQ ID NO: 20567 - DNA, 32 bp, Artificial; identical to SEQ ID NO: 7831
  oligonucleotide probe

SEQ ID NO: 20568 - DNA, 32 bp, Artificial; identical to SEQ ID NO: 7832
  oligonucleotide probe

SEQ ID NO: 20569 - DNA, 32 bp, Artificial; identical to SEQ ID NO: 7855
  oligonucleotide probe

SEQ ID NO: 20570 - DNA, 32 bp, Artificial; identical to SEQ ID NO: 7856
  oligonucleotide probe

SEQ ID NO: 20571 - DNA, 32 bp, Artificial; identical to SEQ ID NO: 7863
  oligonucleotide probe

SEQ ID NO: 20572 - DNA, 32 bp, Artificial; identical to SEQ ID NO: 5217
  oligonucleotide probe

SEQ ID NO: 20573 - DNA, 32 bp, Artificial; identical to SEQ ID NO: 7947
  oligonucleotide probe

SEQ ID NO: 20574 - DNA, 32 bp, Artificial; identical to SEQ ID NO: 7948
  oligonucleotide probe

SEQ ID NO: 20575 - DNA, 32 bp, Artificial; identical to SEQ ID NO: 5223
  oligonucleotide probe

SEQ ID NO: 20576 - DNA, 32 bp, Artificial; identical to SEQ ID NO: 7838
  oligonucleotide probe

SEQ ID NO: 20577 - DNA, 32 bp, Artificial; identical to SEQ ID NO: 5224
  oligonucleotide probe

SEQ ID NO: 20578 - DNA, 32 bp, Artificial; identical to SEQ ID NO: 7840
  oligonucleotide probe

SEQ ID NO: 20579 - DNA, 32 bp, Artificial; identical to SEQ ID NO: 7905
  oligonucleotide probe

SEQ ID NO: 20580 - DNA, 32 bp, Artificial; identical to SEQ ID NO: 5231
  oligonucleotide probe

SEQ ID NO: 20581 - DNA, 32 bp, Artificial; identical to SEQ ID NO: 7833
  oligonucleotide probe

SEQ ID NO: 20582 - DNA, 32 bp, Artificial; identical to SEQ ID NO: 7834
  oligonucleotide probe

SEQ ID NO: 20583 - DNA, 32 bp, Artificial; identical to SEQ ID NO: 5224
  oligonucleotide probe

SEQ ID NO: 20584 - DNA, 32 bp, Artificial; identical to SEQ ID NO: 7840
  oligonucleotide probe

SEQ ID NO: 20585 - DNA, 32 bp, Artificial; identical to SEQ ID NO: 7833
  oligonucleotide probe

SEQ ID NO: 20586 - DNA, 32 bp, Artificial; identical to SEQ ID NO: 7834
  oligonucleotide probe

SEQ ID NO: 20587 - DNA, 32 bp, Artificial; identical to SEQ ID NO: 7853
  oligonucleotide probe

SEQ ID NO: 20588 - DNA, 32 bp, Artificial; identical to SEQ ID NO: 5220
  oligonucleotide probe

SEQ ID NO: 20589 - DNA, 32 bp, Artificial; identical to SEQ ID NO: 7891
  oligonucleotide probe

SEQ ID NO: 20590 - DNA, 32 bp, Artificial; identical to SEQ ID NO: 5218
  oligonucleotide probe

SEQ ID NO: 20591 - DNA, 32 bp, Artificial; identical to SEQ ID NO: 7863
  oligonucleotide probe

SEQ ID NO: 20592 - DNA, 32 bp, Artificial; identical to SEQ ID NO: 5217
  oligonucleotide probe

SEQ ID NO: 20593 - DNA, 32 bp, Artificial; identical to SEQ ID NO: 7841
  oligonucleotide probe

SEQ ID NO: 20594 - DNA, 32 bp, Artificial; identical to SEQ ID NO: 7842
  oligonucleotide probe

SEQ ID NO: 20595 - DNA, 32 bp, Artificial; identical to SEQ ID NO: 7863
  oligonucleotide probe

SEQ ID NO: 20596 - DNA, 32 bp, Artificial; identical to SEQ ID NO: 5217
  oligonucleotide probe

SEQ ID NO: 20597 - DNA, 32 bp, Artificial; identical to SEQ ID NO: 7831
  oligonucleotide probe

SEQ ID NO: 20598 - DNA, 32 bp, Artificial; identical to SEQ ID NO: 7832
  oligonucleotide probe

SEQ ID NO: 20599 - DNA, 32 bp, Artificial; identical to SEQ ID NO: 7853
  oligonucleotide probe

SEQ ID NO: 20600 - DNA, 32 bp, Artificial; identical to SEQ ID NO: 5220
  oligonucleotide probe

SEQ ID NO: 20601 - DNA, 32 bp, Artificial; identical to SEQ ID NO: 7833
  oligonucleotide probe

SEQ ID NO: 20602 - DNA, 32 bp, Artificial; identical to SEQ ID NO: 7834
  oligonucleotide probe

SEQ ID NO: 20603 - DNA, 32 bp, Artificial; identical to SEQ ID NO: 7840
  oligonucleotide probe

SEQ ID NO: 20604 - DNA, 32 bp, Artificial; identical to SEQ ID NO: 7853
  oligonucleotide probe

SEQ ID NO: 20605 - DNA, 32 bp, Artificial; identical to SEQ ID NO: 7831
  oligonucleotide probe

SEQ ID NO: 20606 - DNA, 32 bp, Artificial; identical to SEQ ID NO: 7832
  oligonucleotide probe

SEQ ID NO: 20607 - DNA, 32 bp, Artificial; identical to SEQ ID NO: 7831
  oligonucleotide probe

SEQ ID NO: 20608 - DNA, 32 bp, Artificial; identical to SEQ ID NO: 7832
  oligonucleotide probe

SEQ ID NO: 20609 - DNA, 32 bp, Artificial; identical to SEQ ID NO: 5220
  oligonucleotide probe

SEQ ID NO: 20610 - DNA, 32 bp, Artificial; identical to SEQ ID NO: 5220
  oligonucleotide probe

SEQ ID NO: 20611 - DNA, 32 bp, Artificial; identical to SEQ ID NO: 5220
  oligonucleotide probe

SEQ ID NO: 20612 - DNA, 32 bp, Artificial; identical to SEQ ID NO: 5220
  oligonucleotide probe

SEQ ID NO: 20613 - DNA, 32 bp, Artificial; identical to SEQ ID NO: 5220
  oligonucleotide probe

SEQ ID NO: 20614 - DNA, 32 bp, Artificial; identical to SEQ ID NO: 5220
  oligonucleotide probe

SEQ ID NO: 20615 - DNA, 32 bp, Artificial; identical to SEQ ID NO: 5220
  oligonucleotide probe

SEQ ID NO: 20616 - DNA, 32 bp, Artificial; identical to SEQ ID NO: 5220
  oligonucleotide probe

SEQ ID NO: 20617 - DNA, 32 bp, Artificial; identical to SEQ ID NO: 5220
  oligonucleotide probe

SEQ ID NO: 20618 - DNA, 32 bp, Artificial; identical to SEQ ID NO: 5220
  oligonucleotide probe

SEQ ID NO: 20619 - DNA, 32 bp, Artificial; identical to SEQ ID NO: 5220
  oligonucleotide probe

SEQ ID NO: 20620 - DNA, 32 bp, Artificial; identical to SEQ ID NO: 5220
  oligonucleotide probe

SEQ ID NO: 20621 - DNA, 32 bp, Artificial; identical to SEQ ID NO: 5220
  oligonucleotide probe

SEQ ID NO: 20622 - DNA, 32 bp, Artificial; identical to SEQ ID NO: 5220
  oligonucleotide probe

SEQ ID NO: 20623 - DNA, 32 bp, Artificial; identical to SEQ ID NO: 5220
  oligonucleotide probe

SEQ ID NO: 20624 - DNA, 32 bp, Artificial; identical to SEQ ID NO: 5220
  oligonucleotide probe

SEQ ID NO: 20625 - DNA, 32 bp, Artificial; identical to SEQ ID NO: 5220
  oligonucleotide probe

SEQ ID NO: 20626 - DNA, 32 bp, Artificial; identical to SEQ ID NO: 5416
  oligonucleotide probe

SEQ ID NO: 20627 - DNA, 32 bp, Artificial; identical to SEQ ID NO: 7673
  oligonucleotide probe

SEQ ID NO: 20628 - DNA, 32 bp, Artificial; identical to SEQ ID NO: 8258
  oligonucleotide probe

SEQ ID NO: 20629 - DNA, 32 bp, Artificial; identical to SEQ ID NO: 7840
  oligonucleotide probe

SEQ ID NO: 20630 - DNA, 32 bp, Artificial; identical to SEQ ID NO: 7833
  oligonucleotide probe

SEQ ID NO: 20631 - DNA, 32 bp, Artificial; identical to SEQ ID NO: 7834
  oligonucleotide probe

SEQ ID NO: 20632 - DNA, 32 bp, Artificial; identical to SEQ ID NO: 7606
  oligonucleotide probe

SEQ ID NO: 20633 - DNA, 32 bp, Artificial; identical to SEQ ID NO: 7947
  oligonucleotide probe

SEQ ID NO: 20634 - DNA, 32 bp, Artificial; identical to SEQ ID NO: 5160
  oligonucleotide probe

SEQ ID NO: 20635 - DNA, 32 bp, Artificial; identical to SEQ ID NO: 7673
  oligonucleotide probe

SEQ ID NO: 20636 - DNA, 32 bp, Artificial; identical to SEQ ID NO: 7863
  oligonucleotide probe

SEQ ID NO: 20637 - DNA, 32 bp, Artificial; identical to SEQ ID NO: 5217
  oligonucleotide probe

SEQ ID NO: 20638 - DNA, 32 bp, Artificial; identical to SEQ ID NO: 8268
  oligonucleotide probe

SEQ ID NO: 20639 - DNA, 32 bp, Artificial; identical to SEQ ID NO: 8269
  oligonucleotide probe

SEQ ID NO: 20640 - DNA, 32 bp, Artificial; identical to SEQ ID NO: 5160
  oligonucleotide probe

SEQ ID NO: 20641 - DNA, 32 bp, Artificial; identical to SEQ ID NO: 8244
  oligonucleotide probe

SEQ ID NO: 20642 - DNA, 32 bp, Artificial; identical to SEQ ID NO: 7831
  oligonucleotide probe

SEQ ID NO: 20643 - DNA, 32 bp, Artificial; identical to SEQ ID NO: 7832
  oligonucleotide probe

SEQ ID NO: 20644 - DNA, 32 bp, Artificial; identical to SEQ ID NO: 7838
  oligonucleotide probe

SEQ ID NO: 20645 - DNA, 32 bp, Artificial; identical to SEQ ID NO: 5224
  oligonucleotide probe

SEQ ID NO: 20646 - DNA, 32 bp, Artificial; identical to SEQ ID NO: 7863
  oligonucleotide probe

SEQ ID NO: 20647 - DNA, 32 bp, Artificial; identical to SEQ ID NO: 5217
  oligonucleotide probe

SEQ ID NO: 20648 - DNA, 32 bp, Artificial; identical to SEQ ID NO: 7605
  oligonucleotide probe

SEQ ID NO: 20649 - DNA, 32 bp, Artificial; identical to SEQ ID NO: 7606
  oligonucleotide probe

SEQ ID NO: 20650 - DNA, 32 bp, Artificial; identical to SEQ ID NO: 8240
  oligonucleotide probe

SEQ ID NO: 20651 - DNA, 32 bp, Artificial; identical to SEQ ID NO: 5163
  oligonucleotide probe

SEQ ID NO: 20652 - DNA, 32 bp, Artificial; identical to SEQ ID NO: 7812
  oligonucleotide probe

SEQ ID NO: 20653 - DNA, 32 bp, Artificial; identical to SEQ ID NO: 5163
  oligonucleotide probe

SEQ ID NO: 20654 - DNA, 32 bp, Artificial; identical to SEQ ID NO: 5171
  oligonucleotide probe

SEQ ID NO: 20655 - DNA, 32 bp, Artificial; identical to SEQ ID NO: 7676
  oligonucleotide probe

SEQ ID NO: 20656 - DNA, 32 bp, Artificial; identical to SEQ ID NO: 5220
  oligonucleotide probe

SEQ ID NO: 20657 - DNA, 32 bp, Artificial; identical to SEQ ID NO: 8287
  oligonucleotide probe

SEQ ID NO: 20658 - DNA, 32 bp, Artificial; identical to SEQ ID NO: 8288
  oligonucleotide probe

SEQ ID NO: 20659 - DNA, 32 bp, Artificial; identical to SEQ ID NO: 5223
  oligonucleotide probe

SEQ ID NO: 20660 - DNA, 32 bp, Artificial; identical to SEQ ID NO: 8287
  oligonucleotide probe

SEQ ID NO: 20661 - DNA, 32 bp, Artificial; identical to SEQ ID NO: 8291
  oligonucleotide probe

SEQ ID NO: 20662 - DNA, 32 bp, Artificial; identical to SEQ ID NO: 8292
  oligonucleotide probe

SEQ ID NO: 20663 - DNA, 32 bp, Artificial; identical to SEQ ID NO: 5223
  oligonucleotide probe

SEQ ID NO: 20664 - DNA, 32 bp, Artificial; identical to SEQ ID NO: 7833
  oligonucleotide probe

SEQ ID NO: 20665 - DNA, 32 bp, Artificial; identical to SEQ ID NO: 7834
  oligonucleotide probe

SEQ ID NO: 20666 - DNA, 32 bp, Artificial; identical to SEQ ID NO: 8296
  oligonucleotide probe

SEQ ID NO: 20667 - DNA, 32 bp, Artificial; identical to SEQ ID NO: 8258
  oligonucleotide probe

SEQ ID NO: 20668 - DNA, 32 bp, Artificial; identical to SEQ ID NO: 8298
  oligonucleotide probe

SEQ ID NO: 20669 - DNA, 32 bp, Artificial; identical to SEQ ID NO: 8299
  oligonucleotide probe

SEQ ID NO: 20670 - DNA, 32 bp, Artificial; identical to SEQ ID NO: 7662
  oligonucleotide probe

SEQ ID NO: 20671 - DNA, 32 bp, Artificial; identical to SEQ ID NO: 7659
  oligonucleotide probe

SEQ ID NO: 20672 - DNA, 32 bp, Artificial; identical to SEQ ID NO: 7598
  oligonucleotide probe

SEQ ID NO: 20673 - DNA, 32 bp, Artificial; identical to SEQ ID NO: 5136
  oligonucleotide probe

SEQ ID NO: 20674 - DNA, 32 bp, Artificial; identical to SEQ ID NO: 5411
  oligonucleotide probe

SEQ ID NO: 20675 - DNA, 32 bp, Artificial; identical to SEQ ID NO: 8305
  oligonucleotide probe

SEQ ID NO: 20676 - DNA, 32 bp, Artificial; identical to SEQ ID NO: 8296
  oligonucleotide probe

SEQ ID NO: 20677 - DNA, 32 bp, Artificial; identical to SEQ ID NO: 8258
  oligonucleotide probe

SEQ ID NO: 20678 - DNA, 32 bp, Artificial; identical to SEQ ID NO: 8308
  oligonucleotide probe

SEQ ID NO: 20679 - DNA, 32 bp, Artificial; identical to SEQ ID NO: 8309
  oligonucleotide probe

SEQ ID NO: 20680 - DNA, 32 bp, Artificial; identical to SEQ ID NO: 7865
  oligonucleotide probe

SEQ ID NO: 20681 - DNA, 32 bp, Artificial; identical to SEQ ID NO: 7866
  oligonucleotide probe

SEQ ID NO: 20682 - DNA, 32 bp, Artificial; identical to SEQ ID NO: 7853
  oligonucleotide probe

SEQ ID NO: 20683 - DNA, 32 bp, Artificial; identical to SEQ ID NO: 8313
  oligonucleotide probe

SEQ ID NO: 20684 - DNA, 32 bp, Artificial; identical to SEQ ID NO: 8298
  oligonucleotide probe

SEQ ID NO: 20685 - DNA, 32 bp, Artificial; identical to SEQ ID NO: 8299
  oligonucleotide probe

SEQ ID NO: 20686 - DNA, 32 bp, Artificial; identical to SEQ ID NO: 7863
  oligonucleotide probe

SEQ ID NO: 20687 - DNA, 32 bp, Artificial; identical to SEQ ID NO: 5217
  oligonucleotide probe

SEQ ID NO: 20688 - DNA, 32 bp, Artificial; identical to SEQ ID NO: 5159
  oligonucleotide probe

SEQ ID NO: 20689 - DNA, 32 bp, Artificial; identical to SEQ ID NO: 7694
  oligonucleotide probe

SEQ ID NO: 20690 - DNA, 32 bp, Artificial; identical to SEQ ID NO: 7831
  oligonucleotide probe

SEQ ID NO: 20691 - DNA, 32 bp, Artificial; identical to SEQ ID NO: 7832
  oligonucleotide probe

SEQ ID NO: 20692 - DNA, 32 bp, Artificial; identical to SEQ ID NO: 7863
  oligonucleotide probe

SEQ ID NO: 20693 - DNA, 32 bp, Artificial; identical to SEQ ID NO: 5217
  oligonucleotide probe

SEQ ID NO: 20694 - DNA, 32 bp, Artificial; identical to SEQ ID NO: 7673
  oligonucleotide probe

SEQ ID NO: 20695 - DNA, 32 bp, Artificial; identical to SEQ ID NO: 7690
  oligonucleotide probe

SEQ ID NO: 20696 - DNA, 32 bp, Artificial; identical to SEQ ID NO: 8326
  oligonucleotide probe

SEQ ID NO: 20697 - DNA, 32 bp, Artificial; identical to SEQ ID NO: 5222
  oligonucleotide probe

SEQ ID NO: 20698 - DNA, 32 bp, Artificial; identical to SEQ ID NO: 5159
  oligonucleotide probe

SEQ ID NO: 20699 - DNA, 32 bp, Artificial; identical to SEQ ID NO: 7694
  oligonucleotide probe

SEQ ID NO: 20700 - DNA, 32 bp, Artificial; identical to SEQ ID NO: 7833
  oligonucleotide probe

SEQ ID NO: 20701 - DNA, 32 bp, Artificial; identical to SEQ ID NO: 7834
  oligonucleotide probe

SEQ ID NO: 20702 - DNA, 32 bp, Artificial; identical to SEQ ID NO: 8287
  oligonucleotide probe

SEQ ID NO: 20703 - DNA, 32 bp, Artificial; identical to SEQ ID NO: 8291
  oligonucleotide probe

SEQ ID NO: 20704 - DNA, 32 bp, Artificial; identical to SEQ ID NO: 5223
  oligonucleotide probe

SEQ ID NO: 20705 - DNA, 32 bp, Artificial; identical to SEQ ID NO: 7838
  oligonucleotide probe

SEQ ID NO: 20706 - DNA, 32 bp, Artificial; identical to SEQ ID NO: 8336
  oligonucleotide probe

SEQ ID NO: 20707 - DNA, 32 bp, Artificial; identical to SEQ ID NO: 8298
  oligonucleotide probe

SEQ ID NO: 20708 - DNA, 32 bp, Artificial; identical to SEQ ID NO: 7623
  oligonucleotide probe

SEQ ID NO: 20709 - DNA, 32 bp, Artificial; identical to SEQ ID NO: 7624
  oligonucleotide probe

SEQ ID NO: 20710 - DNA, 32 bp, Artificial; identical to SEQ ID NO: 5133
  oligonucleotide probe

SEQ ID NO: 20711 - DNA, 32 bp, Artificial; identical to SEQ ID NO: 7594
  oligonucleotide probe

SEQ ID NO: 20712 - DNA, 32 bp, Artificial; identical to SEQ ID NO: 5242
  oligonucleotide probe

SEQ ID NO: 20713 - DNA, 32 bp, Artificial; identical to SEQ ID NO: 8343
  oligonucleotide probe

SEQ ID NO: 20714 - DNA, 32 bp, Artificial; identical to SEQ ID NO: 8292
  oligonucleotide probe

SEQ ID NO: 20715 - DNA, 32 bp, Artificial; identical to SEQ ID NO: 5410
  oligonucleotide probe

SEQ ID NO: 20716 - DNA, 32 bp, Artificial; identical to SEQ ID NO: 5171
  oligonucleotide probe

SEQ ID NO: 20717 - DNA, 32 bp, Artificial; identical to SEQ ID NO: 7676
  oligonucleotide probe

SEQ ID NO: 20718 - DNA, 32 bp, Artificial; identical to SEQ ID NO: 5223
  oligonucleotide probe

SEQ ID NO: 20719 - DNA, 32 bp, Artificial; identical to SEQ ID NO: 7838
  oligonucleotide probe

SEQ ID NO: 20720 - DNA, 32 bp, Artificial; identical to SEQ ID NO: 7853
  oligonucleotide probe

SEQ ID NO: 20721 - DNA, 32 bp, Artificial; identical to SEQ ID NO: 8313
  oligonucleotide probe

SEQ ID NO: 20722 - DNA, 32 bp, Artificial; identical to SEQ ID NO: 7835
  oligonucleotide probe

SEQ ID NO: 20723 - DNA, 32 bp, Artificial; identical to SEQ ID NO: 5232
  oligonucleotide probe

SEQ ID NO: 20724 - DNA, 32 bp, Artificial; identical to SEQ ID NO: 7624
  oligonucleotide probe

SEQ ID NO: 20725 - DNA, 32 bp, Artificial; identical to SEQ ID NO: 7605
  oligonucleotide probe

SEQ ID NO: 20726 - DNA, 32 bp, Artificial; identical to SEQ ID NO: 8336
  oligonucleotide probe

SEQ ID NO: 20727 - DNA, 32 bp, Artificial; identical to SEQ ID NO: 8298
  oligonucleotide probe

SEQ ID NO: 20728 - DNA, 32 bp, Artificial; identical to SEQ ID NO: 8358
  oligonucleotide probe

SEQ ID NO: 20729 - DNA, 32 bp, Artificial; identical to SEQ ID NO: 5223
  oligonucleotide probe

SEQ ID NO: 20730 - DNA, 32 bp, Artificial; identical to SEQ ID NO: 8360
  oligonucleotide probe

SEQ ID NO: 20731 - DNA, 32 bp, Artificial; identical to SEQ ID NO: 8361
  oligonucleotide probe

SEQ ID NO: 20732 - DNA, 32 bp, Artificial; identical to SEQ ID NO: 7856
  oligonucleotide probe

SEQ ID NO: 20733 - DNA, 32 bp, Artificial; identical to SEQ ID NO: 5136
  oligonucleotide probe

SEQ ID NO: 20734 - DNA, 32 bp, Artificial; identical to SEQ ID NO: 7905
  oligonucleotide probe

SEQ ID NO: 20735 - DNA, 32 bp, Artificial; identical to SEQ ID NO: 5231
  oligonucleotide probe

SEQ ID NO: 20736 - DNA, 32 bp, Artificial; identical to SEQ ID NO: 7690
  oligonucleotide probe

SEQ ID NO: 20737 - DNA, 32 bp, Artificial; identical to SEQ ID NO: 7662
  oligonucleotide probe

SEQ ID NO: 20738 - DNA, 32 bp, Artificial; identical to SEQ ID NO: 7662
  oligonucleotide probe

SEQ ID NO: 20739 - DNA, 32 bp, Artificial; identical to SEQ ID NO: 7659
  oligonucleotide probe

SEQ ID NO: 20740 - DNA, 32 bp, Artificial; identical to SEQ ID NO: 7841
  oligonucleotide probe

SEQ ID NO: 20741 - DNA, 32 bp, Artificial; identical to SEQ ID NO: 7842
  oligonucleotide probe

SEQ ID NO: 20742 - DNA, 32 bp, Artificial; identical to SEQ ID NO: 7841
  oligonucleotide probe

SEQ ID NO: 20743 - DNA, 32 bp, Artificial; identical to SEQ ID NO: 7842
  oligonucleotide probe

SEQ ID NO: 20744 - DNA, 32 bp, Artificial; identical to SEQ ID NO: 7831
  oligonucleotide probe

SEQ ID NO: 20745 - DNA, 32 bp, Artificial; identical to SEQ ID NO: 7832
  oligonucleotide probe

SEQ ID NO: 20746 - DNA, 32 bp, Artificial; identical to SEQ ID NO: 5224
  oligonucleotide probe

SEQ ID NO: 20747 - DNA, 32 bp, Artificial; identical to SEQ ID NO: 7840
  oligonucleotide probe

SEQ ID NO: 20748 - DNA, 32 bp, Artificial; identical to SEQ ID NO: 7838
  oligonucleotide probe

SEQ ID NO: 20749 - DNA, 32 bp, Artificial; identical to SEQ ID NO: 5224
  oligonucleotide probe

SEQ ID NO: 20750 - DNA, 32 bp, Artificial; identical to SEQ ID NO: 7834
  oligonucleotide probe

SEQ ID NO: 20751 - DNA, 32 bp, Artificial; identical to SEQ ID NO: 7831
  oligonucleotide probe

SEQ ID NO: 20752 - DNA, 32 bp, Artificial; identical to SEQ ID NO: 7835
  oligonucleotide probe

SEQ ID NO: 20753 - DNA, 32 bp, Artificial; identical to SEQ ID NO: 5232
  oligonucleotide probe

SEQ ID NO: 20754 - DNA, 32 bp, Artificial; identical to SEQ ID NO: 7863
  oligonucleotide probe

SEQ ID NO: 20755 - DNA, 32 bp, Artificial; identical to SEQ ID NO: 5217
  oligonucleotide probe

SEQ ID NO: 20756 - DNA, 32 bp, Artificial; identical to SEQ ID NO: 7597
  oligonucleotide probe

SEQ ID NO: 20757 - DNA, 32 bp, Artificial; identical to SEQ ID NO: 7598
  oligonucleotide probe

SEQ ID NO: 20758 - DNA, 32 bp, Artificial; identical to SEQ ID NO: 7891
  oligonucleotide probe

SEQ ID NO: 20759 - DNA, 32 bp, Artificial; identical to SEQ ID NO: 5218
  oligonucleotide probe

SEQ ID NO: 20760 - DNA, 32 bp, Artificial; identical to SEQ ID NO: 7831
  oligonucleotide probe

SEQ ID NO: 20761 - DNA, 32 bp, Artificial; identical to SEQ ID NO: 7832
  oligonucleotide probe

SEQ ID NO: 20762 - DNA, 32 bp, Artificial; identical to SEQ ID NO: 8305
  oligonucleotide probe

SEQ ID NO: 20763 - DNA, 32 bp, Artificial; identical to SEQ ID NO: 5242
  oligonucleotide probe

SEQ ID NO: 20764 - DNA, 32 bp, Artificial; identical to SEQ ID NO: 8394
  oligonucleotide probe

SEQ ID NO: 20765 - DNA, 32 bp, Artificial; identical to SEQ ID NO: 8336
  oligonucleotide probe

SEQ ID NO: 20766 - DNA, 32 bp, Artificial; identical to SEQ ID NO: 7891
  oligonucleotide probe

SEQ ID NO: 20767 - DNA, 32 bp, Artificial; identical to SEQ ID NO: 5218
  oligonucleotide probe

SEQ ID NO: 20768 - DNA, 32 bp, Artificial; identical to SEQ ID NO: 7605
  oligonucleotide probe

SEQ ID NO: 20769 - DNA, 32 bp, Artificial; identical to SEQ ID NO: 7606
  oligonucleotide probe

SEQ ID NO: 20770 - DNA, 32 bp, Artificial; identical to SEQ ID NO: 5185
  oligonucleotide probe

SEQ ID NO: 20771 - DNA, 32 bp, Artificial; identical to SEQ ID NO: 7655
  oligonucleotide probe

SEQ ID NO: 20772 - DNA, 32 bp, Artificial; identical to SEQ ID NO: 8402
  oligonucleotide probe

SEQ ID NO: 20773 - DNA, 32 bp, Artificial; identical to SEQ ID NO: 7840
  oligonucleotide probe

SEQ ID NO: 20774 - DNA, 32 bp, Artificial; identical to SEQ ID NO: 8001
  oligonucleotide probe

SEQ ID NO: 20775 - DNA, 32 bp, Artificial; identical to SEQ ID NO: 5239
  oligonucleotide probe

SEQ ID NO: 20776 - DNA, 32 bp, Artificial; identical to SEQ ID NO: 7690
  oligonucleotide probe

SEQ ID NO: 20777 - DNA, 32 bp, Artificial; identical to SEQ ID NO: 7662
  oligonucleotide probe

SEQ ID NO: 20778 - DNA, 32 bp, Artificial; identical to SEQ ID NO: 5159
  oligonucleotide probe

SEQ ID NO: 20779 - DNA, 32 bp, Artificial; identical to SEQ ID NO: 7694
  oligonucleotide probe

SEQ ID NO: 20780 - DNA, 32 bp, Artificial; identical to SEQ ID NO: 7853
  oligonucleotide probe

SEQ ID NO: 20781 - DNA, 32 bp, Artificial; identical to SEQ ID NO: 8313
  oligonucleotide probe

SEQ ID NO: 20782 - DNA, 32 bp, Artificial; identical to SEQ ID NO: 8291
  oligonucleotide probe

SEQ ID NO: 20783 - DNA, 32 bp, Artificial; identical to SEQ ID NO: 8394
  oligonucleotide probe

SEQ ID NO: 20784 - DNA, 32 bp, Artificial; identical to SEQ ID NO: 7865
  oligonucleotide probe

SEQ ID NO: 20785 - DNA, 32 bp, Artificial; identical to SEQ ID NO: 5136
  oligonucleotide probe

SEQ ID NO: 20786 - DNA, 32 bp, Artificial; identical to SEQ ID NO: 5231
  oligonucleotide probe

SEQ ID NO: 20787 - DNA, 32 bp, Artificial; identical to SEQ ID NO: 7597
  oligonucleotide probe

SEQ ID NO: 20788 - DNA, 32 bp, Artificial; identical to SEQ ID NO: 7831
  oligonucleotide probe

SEQ ID NO: 20789 - DNA, 32 bp, Artificial; identical to SEQ ID NO: 7832
  oligonucleotide probe

SEQ ID NO: 20790 - DNA, 32 bp, Artificial; identical to SEQ ID NO: 8001
  oligonucleotide probe

SEQ ID NO: 20791 - DNA, 32 bp, Artificial; identical to SEQ ID NO: 7623
  oligonucleotide probe

SEQ ID NO: 20792 - DNA, 32 bp, Artificial; identical to SEQ ID NO: 8336
  oligonucleotide probe

SEQ ID NO: 20793 - DNA, 32 bp, Artificial; identical to SEQ ID NO: 8298
  oligonucleotide probe

SEQ ID NO: 20794 - DNA, 32 bp, Artificial; identical to SEQ ID NO: 5134
  oligonucleotide probe

SEQ ID NO: 20795 - DNA, 32 bp, Artificial; identical to SEQ ID NO: 7905
  oligonucleotide probe

SEQ ID NO: 20796 - DNA, 32 bp, Artificial; identical to SEQ ID NO: 5185
  oligonucleotide probe

SEQ ID NO: 20797 - DNA, 32 bp, Artificial; identical to SEQ ID NO: 7655
  oligonucleotide probe

SEQ ID NO: 20798 - DNA, 32 bp, Artificial; identical to SEQ ID NO: 7865
  oligonucleotide probe

SEQ ID NO: 20799 - DNA, 32 bp, Artificial; identical to SEQ ID NO: 7866
  oligonucleotide probe

SEQ ID NO: 20800 - DNA, 32 bp, Artificial; identical to SEQ ID NO: 8247
  oligonucleotide probe

SEQ ID NO: 20801 - DNA, 32 bp, Artificial; identical to SEQ ID NO: 5163
  oligonucleotide probe

SEQ ID NO: 20802 - DNA, 32 bp, Artificial; identical to SEQ ID NO: 5221
  oligonucleotide probe

SEQ ID NO: 20803 - DNA, 32 bp, Artificial; identical to SEQ ID NO: 8326
  oligonucleotide probe

SEQ ID NO: 20804 - DNA, 32 bp, Artificial; identical to SEQ ID NO: 7841
  oligonucleotide probe

SEQ ID NO: 20805 - DNA, 32 bp, Artificial; identical to SEQ ID NO: 7842
  oligonucleotide probe

SEQ ID NO: 20806 - DNA, 32 bp, Artificial; identical to SEQ ID NO: 5133
  oligonucleotide probe

SEQ ID NO: 20807 - DNA, 32 bp, Artificial; identical to SEQ ID NO: 7594
  oligonucleotide probe

SEQ ID NO: 20808 - DNA, 32 bp, Artificial; identical to SEQ ID NO: 7833
  oligonucleotide probe

SEQ ID NO: 20809 - DNA, 32 bp, Artificial; identical to SEQ ID NO: 7834
  oligonucleotide probe

SEQ ID NO: 20810 - DNA, 32 bp, Artificial; identical to SEQ ID NO: 7853
  oligonucleotide probe

SEQ ID NO: 20811 - DNA, 32 bp, Artificial; identical to SEQ ID NO: 8313
  oligonucleotide probe

SEQ ID NO: 20812 - DNA, 32 bp, Artificial; identical to SEQ ID NO: 8442
  oligonucleotide probe

SEQ ID NO: 20813 - DNA, 32 bp, Artificial; identical to SEQ ID NO: 5163
  oligonucleotide probe

SEQ ID NO: 20814 - DNA, 32 bp, Artificial; identical to SEQ ID NO: 7838
  oligonucleotide probe

SEQ ID NO: 20815 - DNA, 32 bp, Artificial; identical to SEQ ID NO: 5224
  oligonucleotide probe

SEQ ID NO: 20816 - DNA, 32 bp, Artificial; identical to SEQ ID NO: 7833
  oligonucleotide probe

SEQ ID NO: 20817 - DNA, 32 bp, Artificial; identical to SEQ ID NO: 7834
  oligonucleotide probe

SEQ ID NO: 20818 - DNA, 32 bp, Artificial; identical to SEQ ID NO: 5242
  oligonucleotide probe

SEQ ID NO: 20819 - DNA, 32 bp, Artificial; identical to SEQ ID NO: 8343
  oligonucleotide probe

SEQ ID NO: 20820 - DNA, 32 bp, Artificial; identical to SEQ ID NO: 7833
  oligonucleotide probe

SEQ ID NO: 20821 - DNA, 32 bp, Artificial; identical to SEQ ID NO: 7834
  oligonucleotide probe

SEQ ID NO: 20822 - DNA, 32 bp, Artificial; identical to SEQ ID NO: 5220
  oligonucleotide probe

SEQ ID NO: 20823 - DNA, 32 bp, Artificial; identical to SEQ ID NO: 8287
  oligonucleotide probe

SEQ ID NO: 20824 - DNA, 32 bp, Artificial; identical to SEQ ID NO: 8001
  oligonucleotide probe

SEQ ID NO: 20825 - DNA, 32 bp, Artificial; identical to SEQ ID NO: 5239
  oligonucleotide probe

SEQ ID NO: 20826 - DNA, 32 bp, Artificial; identical to SEQ ID NO: 8456
  oligonucleotide probe

SEQ ID NO: 20827 - DNA, 32 bp, Artificial; identical to SEQ ID NO: 5223
  oligonucleotide probe

SEQ ID NO: 20828 - DNA, 32 bp, Artificial; identical to SEQ ID NO: 8336
  oligonucleotide probe

SEQ ID NO: 20829 - DNA, 32 bp, Artificial; identical to SEQ ID NO: 8298
  oligonucleotide probe

SEQ ID NO: 20830 - DNA, 32 bp, Artificial; identical to SEQ ID NO: 8394
  oligonucleotide probe

SEQ ID NO: 20831 - DNA, 32 bp, Artificial; identical to SEQ ID NO: 8336
  oligonucleotide probe

SEQ ID NO: 20832 - DNA, 32 bp, Artificial; identical to SEQ ID NO: 5185
  oligonucleotide probe

SEQ ID NO: 20833 - DNA, 32 bp, Artificial; identical to SEQ ID NO: 7655
  oligonucleotide probe

SEQ ID NO: 20834 - DNA, 32 bp, Artificial; identical to SEQ ID NO: 5223
  oligonucleotide probe

SEQ ID NO: 20835 - DNA, 32 bp, Artificial; identical to SEQ ID NO: 7838
  oligonucleotide probe

SEQ ID NO: 20836 - DNA, 32 bp, Artificial; identical to SEQ ID NO: 5416
  oligonucleotide probe

SEQ ID NO: 20837 - DNA, 32 bp, Artificial; identical to SEQ ID NO: 8467
  oligonucleotide probe

SEQ ID NO: 20838 - DNA, 32 bp, Artificial; identical to SEQ ID NO: 7623
  oligonucleotide probe

SEQ ID NO: 20839 - DNA, 32 bp, Artificial; identical to SEQ ID NO: 7624
  oligonucleotide probe

SEQ ID NO: 20840 - DNA, 32 bp, Artificial; identical to SEQ ID NO: 8360
  oligonucleotide probe

SEQ ID NO: 20841 - DNA, 32 bp, Artificial; identical to SEQ ID NO: 7840
  oligonucleotide probe

SEQ ID NO: 20842 - DNA, 32 bp, Artificial; identical to SEQ ID NO: 5231
  oligonucleotide probe

SEQ ID NO: 20843 - DNA, 32 bp, Artificial; identical to SEQ ID NO: 7835
  oligonucleotide probe

SEQ ID NO: 20844 - DNA, 32 bp, Artificial; identical to SEQ ID NO: 5134
  oligonucleotide probe

SEQ ID NO: 20845 - DNA, 32 bp, Artificial; identical to SEQ ID NO: 7905
  oligonucleotide probe

SEQ ID NO: 20846 - DNA, 32 bp, Artificial; identical to SEQ ID NO: 7644
  oligonucleotide probe

SEQ ID NO: 20847 - DNA, 32 bp, Artificial; identical to SEQ ID NO: 5141
  oligonucleotide probe

SEQ ID NO: 20848 - DNA, 32 bp, Artificial; identical to SEQ ID NO: 7855
  oligonucleotide probe

SEQ ID NO: 20849 - DNA, 32 bp, Artificial; identical to SEQ ID NO: 5136
  oligonucleotide probe

SEQ ID NO: 20850 - DNA, 32 bp, Artificial; identical to SEQ ID NO: 7905
  oligonucleotide probe

SEQ ID NO: 20851 - DNA, 32 bp, Artificial; identical to SEQ ID NO: 5231
  oligonucleotide probe

SEQ ID NO: 20852 - DNA, 32 bp, Artificial; identical to SEQ ID NO: 8299
  oligonucleotide probe

SEQ ID NO: 20853 - DNA, 32 bp, Artificial; identical to SEQ ID NO: 8308
  oligonucleotide probe

SEQ ID NO: 20854 - DNA, 32 bp, Artificial; identical to SEQ ID NO: 5223
  oligonucleotide probe

SEQ ID NO: 20855 - DNA, 32 bp, Artificial; identical to SEQ ID NO: 8287
  oligonucleotide probe

SEQ ID NO: 20856 - DNA, 32 bp, Artificial; identical to SEQ ID NO: 8402
  oligonucleotide probe

SEQ ID NO: 20857 - DNA, 32 bp, Artificial; identical to SEQ ID NO: 8487
  oligonucleotide probe

SEQ ID NO: 20858 - DNA, 32 bp, Artificial; identical to SEQ ID NO: 7812
  oligonucleotide probe

SEQ ID NO: 20859 - DNA, 32 bp, Artificial; identical to SEQ ID NO: 8247
  oligonucleotide probe

SEQ ID NO: 20860 - DNA, 32 bp, Artificial; identical to SEQ ID NO: 8292
  oligonucleotide probe

SEQ ID NO: 20861 - DNA, 32 bp, Artificial; identical to SEQ ID NO: 5410
  oligonucleotide probe

SEQ ID NO: 20862 - DNA, 32 bp, Artificial; identical to SEQ ID NO: 8258
  oligonucleotide probe

SEQ ID NO: 20863 - DNA, 32 bp, Artificial; identical to SEQ ID NO: 8268
  oligonucleotide probe

SEQ ID NO: 20864 - DNA, 32 bp, Artificial; identical to SEQ ID NO: 5411
  oligonucleotide probe

SEQ ID NO: 20865 - DNA, 32 bp, Artificial; identical to SEQ ID NO: 8305
  oligonucleotide probe

SEQ ID NO: 20866 - DNA, 32 bp, Artificial; identical to SEQ ID NO: 8360
  oligonucleotide probe

SEQ ID NO: 20867 - DNA, 32 bp, Artificial; identical to SEQ ID NO: 8361
  oligonucleotide probe

SEQ ID NO: 20868 - DNA, 32 bp, Artificial; identical to SEQ ID NO: 7840
  oligonucleotide probe

SEQ ID NO: 20869 - DNA, 32 bp, Artificial; identical to SEQ ID NO: 7853
  oligonucleotide probe

SEQ ID NO: 20870 - DNA, 32 bp, Artificial; identical to SEQ ID NO: 8313
  oligonucleotide probe

SEQ ID NO: 20871 - DNA, 32 bp, Artificial; identical to SEQ ID NO: 5411
  oligonucleotide probe

SEQ ID NO: 20872 - DNA, 32 bp, Artificial; identical to SEQ ID NO: 7891
  oligonucleotide probe

SEQ ID NO: 20873 - DNA, 32 bp, Artificial; identical to SEQ ID NO: 5218
  oligonucleotide probe

SEQ ID NO: 20874 - DNA, 32 bp, Artificial; identical to SEQ ID NO: 8001
  oligonucleotide probe

SEQ ID NO: 20875 - DNA, 32 bp, Artificial; identical to SEQ ID NO: 5239
  oligonucleotide probe

SEQ ID NO: 20876 - DNA, 32 bp, Artificial; identical to SEQ ID NO: 7831
  oligonucleotide probe

SEQ ID NO: 20877 - DNA, 32 bp, Artificial; identical to SEQ ID NO: 7832
  oligonucleotide probe

SEQ ID NO: 20878 - DNA, 32 bp, Artificial; identical to SEQ ID NO: 8309
  oligonucleotide probe

SEQ ID NO: 20879 - DNA, 32 bp, Artificial; identical to SEQ ID NO: 8509
  oligonucleotide probe

SEQ ID NO: 20880 - DNA, 32 bp, Artificial; identical to SEQ ID NO: 8247
  oligonucleotide probe

SEQ ID NO: 20881 - DNA, 32 bp, Artificial; identical to SEQ ID NO: 8240
  oligonucleotide probe

SEQ ID NO: 20882 - DNA, 32 bp, Artificial; identical to SEQ ID NO: 8287
  oligonucleotide probe

SEQ ID NO: 20883 - DNA, 32 bp, Artificial; identical to SEQ ID NO: 8291
  oligonucleotide probe

SEQ ID NO: 20884 - DNA, 32 bp, Artificial; identical to SEQ ID NO: 5411
  oligonucleotide probe

SEQ ID NO: 20885 - DNA, 32 bp, Artificial; identical to SEQ ID NO: 5220
  oligonucleotide probe

SEQ ID NO: 20886 - DNA, 32 bp, Artificial; identical to SEQ ID NO: 5185
  oligonucleotide probe

SEQ ID NO: 20887 - DNA, 32 bp, Artificial; identical to SEQ ID NO: 7655
  oligonucleotide probe

SEQ ID NO: 20888 - DNA, 32 bp, Artificial; identical to SEQ ID NO: 8292
  oligonucleotide probe

SEQ ID NO: 20889 - DNA, 32 bp, Artificial; identical to SEQ ID NO: 5410
  oligonucleotide probe

SEQ ID NO: 20890 - DNA, 32 bp, Artificial; identical to SEQ ID NO: 8456
  oligonucleotide probe

SEQ ID NO: 20891 - DNA, 32 bp, Artificial; identical to SEQ ID NO: 5241
  oligonucleotide probe

SEQ ID NO: 20892 - DNA, 32 bp, Artificial; identical to SEQ ID NO: 7596
  oligonucleotide probe

SEQ ID NO: 20893 - DNA, 32 bp, Artificial; identical to SEQ ID NO: 5140
  oligonucleotide probe

SEQ ID NO: 20894 - DNA, 32 bp, Artificial; identical to SEQ ID NO: 8394
  oligonucleotide probe

SEQ ID NO: 20895 - DNA, 32 bp, Artificial; identical to SEQ ID NO: 8336
  oligonucleotide probe

SEQ ID NO: 20896 - DNA, 32 bp, Artificial; identical to SEQ ID NO: 5242
  oligonucleotide probe

SEQ ID NO: 20897 - DNA, 32 bp, Artificial; identical to SEQ ID NO: 5220
  oligonucleotide probe

SEQ ID NO: 20898 - DNA, 32 bp, Artificial; identical to SEQ ID NO: 5220
  oligonucleotide probe

SEQ ID NO: 20899 - DNA, 32 bp, Artificial; identical to SEQ ID NO: 8287
  oligonucleotide probe

SEQ ID NO: 20900 - DNA, 32 bp, Artificial; identical to SEQ ID NO: 7891
  oligonucleotide probe

SEQ ID NO: 20901 - DNA, 32 bp, Artificial; identical to SEQ ID NO: 5218
  oligonucleotide probe

SEQ ID NO: 20902 - DNA, 32 bp, Artificial; identical to SEQ ID NO: 5134
  oligonucleotide probe

SEQ ID NO: 20903 - DNA, 32 bp, Artificial; identical to SEQ ID NO: 7905
  oligonucleotide probe

SEQ ID NO: 20904 - DNA, 32 bp, Artificial; identical to SEQ ID NO: 7598
  oligonucleotide probe

SEQ ID NO: 20905 - DNA, 32 bp, Artificial; identical to SEQ ID NO: 7855
  oligonucleotide probe

SEQ ID NO: 20906 - DNA, 32 bp, Artificial; identical to SEQ ID NO: 5411
  oligonucleotide probe

SEQ ID NO: 20907 - DNA, 32 bp, Artificial; identical to SEQ ID NO: 8305
  oligonucleotide probe

SEQ ID NO: 20908 - DNA, 32 bp, Artificial; identical to SEQ ID NO: 5133
  oligonucleotide probe

SEQ ID NO: 20909 - DNA, 32 bp, Artificial; identical to SEQ ID NO: 7594
  oligonucleotide probe

SEQ ID NO: 20910 - DNA, 32 bp, Artificial; identical to SEQ ID NO: 7863
  oligonucleotide probe

SEQ ID NO: 20911 - DNA, 32 bp, Artificial; identical to SEQ ID NO: 5217
  oligonucleotide probe

SEQ ID NO: 20912 - DNA, 32 bp, Artificial; identical to SEQ ID NO: 7855
  oligonucleotide probe

SEQ ID NO: 20913 - DNA, 32 bp, Artificial; identical to SEQ ID NO: 7856
  oligonucleotide probe

SEQ ID NO: 20914 - DNA, 32 bp, Artificial; identical to SEQ ID NO: 8456
  oligonucleotide probe

SEQ ID NO: 20915 - DNA, 32 bp, Artificial; identical to SEQ ID NO: 5241
  oligonucleotide probe

SEQ ID NO: 20916 - DNA, 32 bp, Artificial; identical to SEQ ID NO: 7853
  oligonucleotide probe

SEQ ID NO: 20917 - DNA, 32 bp, Artificial; identical to SEQ ID NO: 8313
  oligonucleotide probe

SEQ ID NO: 20918 - DNA, 32 bp, Artificial; identical to SEQ ID NO: 7891
  oligonucleotide probe

SEQ ID NO: 20919 - DNA, 32 bp, Artificial; identical to SEQ ID NO: 5218
  oligonucleotide probe

SEQ ID NO: 20920 - DNA, 32 bp, Artificial; identical to SEQ ID NO: 5134
  oligonucleotide probe

SEQ ID NO: 20921 - DNA, 32 bp, Artificial; identical to SEQ ID NO: 7597
  oligonucleotide probe

SEQ ID NO: 20922 - DNA, 32 bp, Artificial; identical to SEQ ID NO: 5411
  oligonucleotide probe

SEQ ID NO: 20923 - DNA, 32 bp, Artificial; identical to SEQ ID NO: 8305
  oligonucleotide probe

SEQ ID NO: 20924 - DNA, 32 bp, Artificial; identical to SEQ ID NO: 7644
  oligonucleotide probe

SEQ ID NO: 20925 - DNA, 32 bp, Artificial; identical to SEQ ID NO: 5141
  oligonucleotide probe

SEQ ID NO: 20926 - DNA, 32 bp, Artificial; identical to SEQ ID NO: 5411
  oligonucleotide probe

SEQ ID NO: 20927 - DNA, 32 bp, Artificial; identical to SEQ ID NO: 8305
  oligonucleotide probe

SEQ ID NO: 20928 - DNA, 32 bp, Artificial; identical to SEQ ID NO: 7838
  oligonucleotide probe

SEQ ID NO: 20929 - DNA, 32 bp, Artificial; identical to SEQ ID NO: 5224
  oligonucleotide probe

SEQ ID NO: 20930 - DNA, 32 bp, Artificial; identical to SEQ ID NO: 8343
  oligonucleotide probe

SEQ ID NO: 20931 - DNA, 32 bp, Artificial; identical to SEQ ID NO: 5221
  oligonucleotide probe

SEQ ID NO: 20932 - DNA, 32 bp, Artificial; identical to SEQ ID NO: 8296
  oligonucleotide probe

SEQ ID NO: 20933 - DNA, 32 bp, Artificial; identical to SEQ ID NO: 7840
  oligonucleotide probe

SEQ ID NO: 20934 - DNA, 32 bp, Artificial; identical to SEQ ID NO: 5171
  oligonucleotide probe

SEQ ID NO: 20935 - DNA, 32 bp, Artificial; identical to SEQ ID NO: 7676
  oligonucleotide probe

SEQ ID NO: 20936 - DNA, 32 bp, Artificial; identical to SEQ ID NO: 7855
  oligonucleotide probe

SEQ ID NO: 20937 - DNA, 32 bp, Artificial; identical to SEQ ID NO: 7856
  oligonucleotide probe

SEQ ID NO: 20938 - DNA, 32 bp, Artificial; identical to SEQ ID NO: 7835
  oligonucleotide probe

SEQ ID NO: 20939 - DNA, 32 bp, Artificial; identical to SEQ ID NO: 5232
  oligonucleotide probe

SEQ ID NO: 20940 - DNA, 32 bp, Artificial; identical to SEQ ID NO: 8442
  oligonucleotide probe

SEQ ID NO: 20941 - DNA, 32 bp, Artificial; identical to SEQ ID NO: 8571
  oligonucleotide probe

SEQ ID NO: 20942 - DNA, 32 bp, Artificial; identical to SEQ ID NO: 8291
  oligonucleotide probe

SEQ ID NO: 20943 - DNA, 32 bp, Artificial; identical to SEQ ID NO: 8394
  oligonucleotide probe

SEQ ID NO: 20944 - DNA, 32 bp, Artificial; identical to SEQ ID NO: 8287
  oligonucleotide probe

SEQ ID NO: 20945 - DNA, 32 bp, Artificial; identical to SEQ ID NO: 8291
  oligonucleotide probe

SEQ ID NO: 20946 - DNA, 32 bp, Artificial; identical to SEQ ID NO: 5221
  oligonucleotide probe

SEQ ID NO: 20947 - DNA, 32 bp, Artificial; identical to SEQ ID NO: 5220
  oligonucleotide probe

SEQ ID NO: 20948 - DNA, 32 bp, Artificial; identical to SEQ ID NO: 7835
  oligonucleotide probe

SEQ ID NO: 20949 - DNA, 32 bp, Artificial; identical to SEQ ID NO: 5232
  oligonucleotide probe

SEQ ID NO: 20950 - DNA, 32 bp, Artificial; identical to SEQ ID NO: 7831
  oligonucleotide probe

SEQ ID NO: 20951 - DNA, 32 bp, Artificial; identical to SEQ ID NO: 7832
  oligonucleotide probe

SEQ ID NO: 20952 - DNA, 32 bp, Artificial; identical to SEQ ID NO: 8269
  oligonucleotide probe

SEQ ID NO: 20953 - DNA, 32 bp, Artificial; identical to SEQ ID NO: 7840
  oligonucleotide probe

SEQ ID NO: 20954 - DNA, 32 bp, Artificial; identical to SEQ ID NO: 8456
  oligonucleotide probe

SEQ ID NO: 20955 - DNA, 32 bp, Artificial; identical to SEQ ID NO: 5241
  oligonucleotide probe

SEQ ID NO: 20956 - DNA, 32 bp, Artificial; identical to SEQ ID NO: 7863
  oligonucleotide probe

SEQ ID NO: 20957 - DNA, 32 bp, Artificial; identical to SEQ ID NO: 5217
  oligonucleotide probe

SEQ ID NO: 20958 - DNA, 32 bp, Artificial; identical to SEQ ID NO: 7947
  oligonucleotide probe

SEQ ID NO: 20959 - DNA, 32 bp, Artificial; identical to SEQ ID NO: 7948
  oligonucleotide probe

SEQ ID NO: 20960 - DNA, 32 bp, Artificial; identical to SEQ ID NO: 5171
  oligonucleotide probe

SEQ ID NO: 20961 - DNA, 32 bp, Artificial; identical to SEQ ID NO: 7676
  oligonucleotide probe

SEQ ID NO: 20962 - DNA, 32 bp, Artificial; identical to SEQ ID NO: 7644
  oligonucleotide probe

SEQ ID NO: 20963 - DNA, 32 bp, Artificial; identical to SEQ ID NO: 5141
  oligonucleotide probe

SEQ ID NO: 20964 - DNA, 32 bp, Artificial; identical to SEQ ID NO: 7855
  oligonucleotide probe

SEQ ID NO: 20965 - DNA, 32 bp, Artificial; identical to SEQ ID NO: 7856
  oligonucleotide probe

SEQ ID NO: 20966 - DNA, 32 bp, Artificial; identical to SEQ ID NO: 7833
  oligonucleotide probe

SEQ ID NO: 20967 - DNA, 32 bp, Artificial; identical to SEQ ID NO: 7834
  oligonucleotide probe

SEQ ID NO: 20968 - DNA, 32 bp, Artificial; identical to SEQ ID NO: 8598
  oligonucleotide probe

SEQ ID NO: 20969 - DNA, 32 bp, Artificial; identical to SEQ ID NO: 5220
  oligonucleotide probe

SEQ ID NO: 20970 - DNA, 32 bp, Artificial; identical to SEQ ID NO: 7891
  oligonucleotide probe

SEQ ID NO: 20971 - DNA, 32 bp, Artificial; identical to SEQ ID NO: 5218
  oligonucleotide probe

SEQ ID NO: 20972 - DNA, 32 bp, Artificial; identical to SEQ ID NO: 7673
  oligonucleotide probe

SEQ ID NO: 20973 - DNA, 32 bp, Artificial; identical to SEQ ID NO: 7690
  oligonucleotide probe

SEQ ID NO: 20974 - DNA, 32 bp, Artificial; identical to SEQ ID NO: 7597
  oligonucleotide probe

SEQ ID NO: 20975 - DNA, 32 bp, Artificial; identical to SEQ ID NO: 7598
  oligonucleotide probe

SEQ ID NO: 20976 - DNA, 32 bp, Artificial; identical to SEQ ID NO: 8291
  oligonucleotide probe

SEQ ID NO: 20977 - DNA, 32 bp, Artificial; identical to SEQ ID NO: 8394
  oligonucleotide probe

SEQ ID NO: 20978 - DNA, 32 bp, Artificial; identical to SEQ ID NO: 5224
  oligonucleotide probe

SEQ ID NO: 20979 - DNA, 32 bp, Artificial; identical to SEQ ID NO: 8296
  oligonucleotide probe

SEQ ID NO: 20980 - DNA, 32 bp, Artificial; identical to SEQ ID NO: 7624
  oligonucleotide probe

SEQ ID NO: 20981 - DNA, 32 bp, Artificial; identical to SEQ ID NO: 7605
  oligonucleotide probe

SEQ ID NO: 20982 - DNA, 32 bp, Artificial; identical to SEQ ID NO: 8291
  oligonucleotide probe

SEQ ID NO: 20983 - DNA, 32 bp, Artificial; identical to SEQ ID NO: 8394
  oligonucleotide probe

SEQ ID NO: 20984 - DNA, 32 bp, Artificial; identical to SEQ ID NO: 7947
  oligonucleotide probe

SEQ ID NO: 20985 - DNA, 32 bp, Artificial; identical to SEQ ID NO: 7948
  oligonucleotide probe

SEQ ID NO: 20986 - DNA, 32 bp, Artificial; identical to SEQ ID NO: 7596
  oligonucleotide probe

SEQ ID NO: 20987 - DNA, 32 bp, Artificial; identical to SEQ ID NO: 5140
  oligonucleotide probe

SEQ ID NO: 20988 - DNA, 32 bp, Artificial; identical to SEQ ID NO: 8326
  oligonucleotide probe

SEQ ID NO: 20989 - DNA, 32 bp, Artificial; identical to SEQ ID NO: 5222
  oligonucleotide probe

SEQ ID NO: 20990 - DNA, 32 bp, Artificial; identical to SEQ ID NO: 7606
  oligonucleotide probe

SEQ ID NO: 20991 - DNA, 32 bp, Artificial; identical to SEQ ID NO: 7947
  oligonucleotide probe

SEQ ID NO: 20992 - DNA, 32 bp, Artificial; identical to SEQ ID NO: 8047
  oligonucleotide probe

SEQ ID NO: 20993 - DNA, 32 bp, Artificial; identical to SEQ ID NO: 5240
  oligonucleotide probe

SEQ ID NO: 20994 - DNA, 32 bp, Artificial; identical to SEQ ID NO: 7644
  oligonucleotide probe

SEQ ID NO: 20995 - DNA, 32 bp, Artificial; identical to SEQ ID NO: 5141
  oligonucleotide probe

SEQ ID NO: 20996 - DNA, 32 bp, Artificial; identical to SEQ ID NO: 8247
  oligonucleotide probe

SEQ ID NO: 20997 - DNA, 32 bp, Artificial; identical to SEQ ID NO: 8240
  oligonucleotide probe

SEQ ID NO: 20998 - DNA, 32 bp, Artificial; identical to SEQ ID NO: 8292
  oligonucleotide probe

SEQ ID NO: 20999 - DNA, 32 bp, Artificial; identical to SEQ ID NO: 5410
  oligonucleotide probe

SEQ ID NO: 21000 - DNA, 32 bp, Artificial; identical to SEQ ID NO: 7947
  oligonucleotide probe

SEQ ID NO: 21001 - DNA, 32 bp, Artificial; identical to SEQ ID NO: 7948
  oligonucleotide probe

SEQ ID NO: 21002 - DNA, 32 bp, Artificial; identical to SEQ ID NO: 8268
  oligonucleotide probe

SEQ ID NO: 21003 - DNA, 32 bp, Artificial; identical to SEQ ID NO: 7840
  oligonucleotide probe

SEQ ID NO: 21004 - DNA, 32 bp, Artificial; identical to SEQ ID NO: 7833
  oligonucleotide probe

SEQ ID NO: 21005 - DNA, 32 bp, Artificial; identical to SEQ ID NO: 7834
  oligonucleotide probe

SEQ ID NO: 21006 - DNA, 32 bp, Artificial; identical to SEQ ID NO: 8288
  oligonucleotide probe

SEQ ID NO: 21007 - DNA, 32 bp, Artificial; identical to SEQ ID NO: 5229
  oligonucleotide probe

SEQ ID NO: 21008 - DNA, 32 bp, Artificial; identical to SEQ ID NO: 7596
  oligonucleotide probe

SEQ ID NO: 21009 - DNA, 32 bp, Artificial; identical to SEQ ID NO: 5140
  oligonucleotide probe

SEQ ID NO: 21010 - DNA, 32 bp, Artificial; identical to SEQ ID NO: 8258
  oligonucleotide probe

SEQ ID NO: 21011 - DNA, 32 bp, Artificial; identical to SEQ ID NO: 8268
  oligonucleotide probe

SEQ ID NO: 21012 - DNA, 32 bp, Artificial; identical to SEQ ID NO: 7865
  oligonucleotide probe

SEQ ID NO: 21013 - DNA, 32 bp, Artificial; identical to SEQ ID NO: 7866
  oligonucleotide probe

SEQ ID NO: 21014 - DNA, 32 bp, Artificial; identical to SEQ ID NO: 7905
  oligonucleotide probe

SEQ ID NO: 21015 - DNA, 32 bp, Artificial; identical to SEQ ID NO: 5231
  oligonucleotide probe

SEQ ID NO: 21016 - DNA, 32 bp, Artificial; identical to SEQ ID NO: 8361
  oligonucleotide probe

SEQ ID NO: 21017 - DNA, 32 bp, Artificial; identical to SEQ ID NO: 7840
  oligonucleotide probe

SEQ ID NO: 21018 - DNA, 32 bp, Artificial; identical to SEQ ID NO: 7947
  oligonucleotide probe

SEQ ID NO: 21019 - DNA, 32 bp, Artificial; identical to SEQ ID NO: 7948
  oligonucleotide probe

SEQ ID NO: 21020 - DNA, 32 bp, Artificial; identical to SEQ ID NO: 7865
  oligonucleotide probe

SEQ ID NO: 21021 - DNA, 32 bp, Artificial; identical to SEQ ID NO: 7866
  oligonucleotide probe

SEQ ID NO: 21022 - DNA, 32 bp, Artificial; identical to SEQ ID NO: 5220
  oligonucleotide probe

SEQ ID NO: 21023 - DNA, 32 bp, Artificial; identical to SEQ ID NO: 8287
  oligonucleotide probe

SEQ ID NO: 21024 - DNA, 32 bp, Artificial; identical to SEQ ID NO: 8288
  oligonucleotide probe

SEQ ID NO: 21025 - DNA, 32 bp, Artificial; identical to SEQ ID NO: 5229
  oligonucleotide probe

SEQ ID NO: 21026 - DNA, 32 bp, Artificial; identical to SEQ ID NO: 8269
  oligonucleotide probe

SEQ ID NO: 21027 - DNA, 32 bp, Artificial; identical to SEQ ID NO: 8360
  oligonucleotide probe

SEQ ID NO: 21028 - DNA, 32 bp, Artificial; identical to SEQ ID NO: 7891
  oligonucleotide probe

SEQ ID NO: 21029 - DNA, 32 bp, Artificial; identical to SEQ ID NO: 7833
  oligonucleotide probe

SEQ ID NO: 21030 - DNA, 32 bp, Artificial; identical to SEQ ID NO: 5223
  oligonucleotide probe

SEQ ID NO: 21031 - DNA, 32 bp, Artificial; identical to SEQ ID NO: 7838
  oligonucleotide probe

SEQ ID NO: 21032 - DNA, 32 bp, Artificial; identical to SEQ ID NO: 5133
  oligonucleotide probe

SEQ ID NO: 21033 - DNA, 32 bp, Artificial; identical to SEQ ID NO: 7594
  oligonucleotide probe

SEQ ID NO: 21034 - DNA, 32 bp, Artificial; identical to SEQ ID NO: 7948
  oligonucleotide probe

SEQ ID NO: 21035 - DNA, 32 bp, Artificial; identical to SEQ ID NO: 7841
  oligonucleotide probe

SEQ ID NO: 21036 - DNA, 32 bp, Artificial; identical to SEQ ID NO: 8292
  oligonucleotide probe

SEQ ID NO: 21037 - DNA, 32 bp, Artificial; identical to SEQ ID NO: 5410
  oligonucleotide probe

SEQ ID NO: 21038 - DNA, 32 bp, Artificial; identical to SEQ ID NO: 8313
  oligonucleotide probe

SEQ ID NO: 21039 - DNA, 32 bp, Artificial; identical to SEQ ID NO: 5411
  oligonucleotide probe

SEQ ID NO: 21040 - DNA, 32 bp, Artificial; identical to SEQ ID NO: 8268
  oligonucleotide probe

SEQ ID NO: 21041 - DNA, 32 bp, Artificial; identical to SEQ ID NO: 8269
  oligonucleotide probe

SEQ ID NO: 21042 - DNA, 32 bp, Artificial; identical to SEQ ID NO: 5242
  oligonucleotide probe

SEQ ID NO: 21043 - DNA, 32 bp, Artificial; identical to SEQ ID NO: 8343
  oligonucleotide probe

SEQ ID NO: 21044 - DNA, 32 bp, Artificial; identical to SEQ ID NO: 7855
  oligonucleotide probe

SEQ ID NO: 21045 - DNA, 32 bp, Artificial; identical to SEQ ID NO: 7856
  oligonucleotide probe

SEQ ID NO: 21046 - DNA, 32 bp, Artificial; identical to SEQ ID NO: 5160
  oligonucleotide probe

SEQ ID NO: 21047 - DNA, 32 bp, Artificial; identical to SEQ ID NO: 8244
  oligonucleotide probe

SEQ ID NO: 21048 - DNA, 32 bp, Artificial; identical to SEQ ID NO: 5224
  oligonucleotide probe

SEQ ID NO: 21049 - DNA, 32 bp, Artificial; identical to SEQ ID NO: 8296
  oligonucleotide probe

SEQ ID NO: 21050 - DNA, 32 bp, Artificial; identical to SEQ ID NO: 7853
  oligonucleotide probe

SEQ ID NO: 21051 - DNA, 32 bp, Artificial; identical to SEQ ID NO: 8313
  oligonucleotide probe

SEQ ID NO: 21052 - DNA, 32 bp, Artificial; identical to SEQ ID NO: 8299
  oligonucleotide probe

SEQ ID NO: 21053 - DNA, 32 bp, Artificial; identical to SEQ ID NO: 8308
  oligonucleotide probe

SEQ ID NO: 21054 - DNA, 32 bp, Artificial; identical to SEQ ID NO: 8001
  oligonucleotide probe

SEQ ID NO: 21055 - DNA, 32 bp, Artificial; identical to SEQ ID NO: 5239
  oligonucleotide probe

SEQ ID NO: 21056 - DNA, 32 bp, Artificial; identical to SEQ ID NO: 5224
  oligonucleotide probe

SEQ ID NO: 21057 - DNA, 32 bp, Artificial; identical to SEQ ID NO: 8296
  oligonucleotide probe

SEQ ID NO: 21058 - DNA, 32 bp, Artificial; identical to SEQ ID NO: 8343
  oligonucleotide probe

SEQ ID NO: 21059 - DNA, 32 bp, Artificial; identical to SEQ ID NO: 5221
  oligonucleotide probe

SEQ ID NO: 21060 - DNA, 32 bp, Artificial; identical to SEQ ID NO: 8299
  oligonucleotide probe

SEQ ID NO: 21061 - DNA, 32 bp, Artificial; identical to SEQ ID NO: 8308
  oligonucleotide probe

SEQ ID NO: 21062 - DNA, 32 bp, Artificial; identical to SEQ ID NO: 8456
  oligonucleotide probe

SEQ ID NO: 21063 - DNA, 32 bp, Artificial; identical to SEQ ID NO: 5241
  oligonucleotide probe

SEQ ID NO: 21064 - DNA, 32 bp, Artificial; identical to SEQ ID NO: 8047
  oligonucleotide probe

SEQ ID NO: 21065 - DNA, 32 bp, Artificial; identical to SEQ ID NO: 7623
  oligonucleotide probe

SEQ ID NO: 21066 - DNA, 32 bp, Artificial; identical to SEQ ID NO: 8292
  oligonucleotide probe

SEQ ID NO: 21067 - DNA, 32 bp, Artificial; identical to SEQ ID NO: 5410
  oligonucleotide probe

SEQ ID NO: 21068 - DNA, 32 bp, Artificial; identical to SEQ ID NO: 7905
  oligonucleotide probe

SEQ ID NO: 21069 - DNA, 32 bp, Artificial; identical to SEQ ID NO: 5231
  oligonucleotide probe

SEQ ID NO: 21070 - DNA, 32 bp, Artificial; identical to SEQ ID NO: 7659
  oligonucleotide probe

SEQ ID NO: 21071 - DNA, 32 bp, Artificial; identical to SEQ ID NO: 7783
  oligonucleotide probe

SEQ ID NO: 21072 - DNA, 32 bp, Artificial; identical to SEQ ID NO: 7865
  oligonucleotide probe

SEQ ID NO: 21073 - DNA, 32 bp, Artificial; identical to SEQ ID NO: 7866
  oligonucleotide probe

SEQ ID NO: 21074 - DNA, 32 bp, Artificial; identical to SEQ ID NO: 7853
  oligonucleotide probe

SEQ ID NO: 21075 - DNA, 32 bp, Artificial; identical to SEQ ID NO: 5220
  oligonucleotide probe

SEQ ID NO: 21076 - DNA, 32 bp, Artificial; identical to SEQ ID NO: 7853
  oligonucleotide probe

SEQ ID NO: 21077 - DNA, 32 bp, Artificial; identical to SEQ ID NO: 8313
  oligonucleotide probe

SEQ ID NO: 21078 - DNA, 32 bp, Artificial; identical to SEQ ID NO: 7855
  oligonucleotide probe

SEQ ID NO: 21079 - DNA, 32 bp, Artificial; identical to SEQ ID NO: 7856
  oligonucleotide probe

SEQ ID NO: 21080 - DNA, 32 bp, Artificial; identical to SEQ ID NO: 5159
  oligonucleotide probe

SEQ ID NO: 21081 - DNA, 32 bp, Artificial; identical to SEQ ID NO: 7694
  oligonucleotide probe

SEQ ID NO: 21082 - DNA, 32 bp, Artificial; identical to SEQ ID NO: 8047
  oligonucleotide probe

SEQ ID NO: 21083 - DNA, 32 bp, Artificial; identical to SEQ ID NO: 5240
  oligonucleotide probe

SEQ ID NO: 21084 - DNA, 32 bp, Artificial; identical to SEQ ID NO: 5223
  oligonucleotide probe

SEQ ID NO: 21085 - DNA, 32 bp, Artificial; identical to SEQ ID NO: 7838
  oligonucleotide probe

SEQ ID NO: 21086 - DNA, 32 bp, Artificial; identical to SEQ ID NO: 7855
  oligonucleotide probe

SEQ ID NO: 21087 - DNA, 32 bp, Artificial; identical to SEQ ID NO: 7856
  oligonucleotide probe

SEQ ID NO: 21088 - DNA, 32 bp, Artificial; identical to SEQ ID NO: 5160
  oligonucleotide probe

SEQ ID NO: 21089 - DNA, 32 bp, Artificial; identical to SEQ ID NO: 8244
  oligonucleotide probe

SEQ ID NO: 21090 - DNA, 32 bp, Artificial; identical to SEQ ID NO: 7863
  oligonucleotide probe

SEQ ID NO: 21091 - DNA, 32 bp, Artificial; identical to SEQ ID NO: 5217
  oligonucleotide probe

SEQ ID NO: 21092 - DNA, 32 bp, Artificial; identical to SEQ ID NO: 8296
  oligonucleotide probe

SEQ ID NO: 21093 - DNA, 32 bp, Artificial; identical to SEQ ID NO: 8258
  oligonucleotide probe

SEQ ID NO: 21094 - DNA, 32 bp, Artificial; identical to SEQ ID NO: 7659
  oligonucleotide probe

SEQ ID NO: 21095 - DNA, 32 bp, Artificial; identical to SEQ ID NO: 7783
  oligonucleotide probe

SEQ ID NO: 21096 - DNA, 32 bp, Artificial; identical to SEQ ID NO: 8296
  oligonucleotide probe

SEQ ID NO: 21097 - DNA, 32 bp, Artificial; identical to SEQ ID NO: 8258
  oligonucleotide probe

SEQ ID NO: 21098 - DNA, 32 bp, Artificial; identical to SEQ ID NO: 7783
  oligonucleotide probe

SEQ ID NO: 21099 - DNA, 32 bp, Artificial; identical to SEQ ID NO: 7812
  oligonucleotide probe

SEQ ID NO: 21100 - DNA, 32 bp, Artificial; identical to SEQ ID NO: 5220
  oligonucleotide probe

SEQ ID NO: 21101 - DNA, 32 bp, Artificial; identical to SEQ ID NO: 8287
  oligonucleotide probe

SEQ ID NO: 21102 - DNA, 32 bp, Artificial; identical to SEQ ID NO: 8291
  oligonucleotide probe

SEQ ID NO: 21103 - DNA, 32 bp, Artificial; identical to SEQ ID NO: 8394
  oligonucleotide probe

SEQ ID NO: 21104 - DNA, 32 bp, Artificial; identical to SEQ ID NO: 8268
  oligonucleotide probe

SEQ ID NO: 21105 - DNA, 32 bp, Artificial; identical to SEQ ID NO: 8269
  oligonucleotide probe

SEQ ID NO: 21106 - DNA, 32 bp, Artificial; identical to SEQ ID NO: 7783
  oligonucleotide probe

SEQ ID NO: 21107 - DNA, 32 bp, Artificial; identical to SEQ ID NO: 7812
  oligonucleotide probe

SEQ ID NO: 21108 - DNA, 32 bp, Artificial; identical to SEQ ID NO: 8305
  oligonucleotide probe

SEQ ID NO: 21109 - DNA, 32 bp, Artificial; identical to SEQ ID NO: 5242
  oligonucleotide probe

SEQ ID NO: 21110 - DNA, 32 bp, Artificial; identical to SEQ ID NO: 7863
  oligonucleotide probe

SEQ ID NO: 21111 - DNA, 32 bp, Artificial; identical to SEQ ID NO: 7833
  oligonucleotide probe

SEQ ID NO: 21112 - DNA, 32 bp, Artificial; identical to SEQ ID NO: 7596
  oligonucleotide probe

SEQ ID NO: 21113 - DNA, 32 bp, Artificial; identical to SEQ ID NO: 5140
  oligonucleotide probe

SEQ ID NO: 21114 - DNA, 32 bp, Artificial; identical to SEQ ID NO: 8509
  oligonucleotide probe

SEQ ID NO: 21115 - DNA, 32 bp, Artificial; identical to SEQ ID NO: 8745
  oligonucleotide probe

SEQ ID NO: 21116 - DNA, 32 bp, Artificial; identical to SEQ ID NO: 8309
  oligonucleotide probe

SEQ ID NO: 21117 - DNA, 32 bp, Artificial; identical to SEQ ID NO: 7840
  oligonucleotide probe

SEQ ID NO: 21118 - DNA, 32 bp, Artificial; identical to SEQ ID NO: 8748
  oligonucleotide probe

SEQ ID NO: 21119 - DNA, 32 bp, Artificial; identical to SEQ ID NO: 8749
  oligonucleotide probe

SEQ ID NO: 21120 - DNA, 32 bp, Artificial; identical to SEQ ID NO: 8750
  oligonucleotide probe

SEQ ID NO: 21121 - DNA, 32 bp, Artificial; identical to SEQ ID NO: 8751
  oligonucleotide probe

SEQ ID NO: 21122 - DNA, 32 bp, Artificial; identical to SEQ ID NO: 5547
  oligonucleotide probe

SEQ ID NO: 21123 - DNA, 32 bp, Artificial; identical to SEQ ID NO: 8753
  oligonucleotide probe

SEQ ID NO: 21124 - DNA, 32 bp, Artificial; identical to SEQ ID NO: 5547
  oligonucleotide probe

SEQ ID NO: 21125 - DNA, 32 bp, Artificial; identical to SEQ ID NO: 8753
  oligonucleotide probe

SEQ ID NO: 21126 - DNA, 32 bp, Artificial; identical to SEQ ID NO: 5546
  oligonucleotide probe

SEQ ID NO: 21127 - DNA, 32 bp, Artificial; identical to SEQ ID NO: 8757
  oligonucleotide probe

SEQ ID NO: 21128 - DNA, 32 bp, Artificial; identical to SEQ ID NO: 5546
  oligonucleotide probe

SEQ ID NO: 21129 - DNA, 32 bp, Artificial; identical to SEQ ID NO: 8757
  oligonucleotide probe

SEQ ID NO: 21130 - DNA, 32 bp, Artificial; identical to SEQ ID NO: 8760
  oligonucleotide probe

SEQ ID NO: 21131 - DNA, 32 bp, Artificial; identical to SEQ ID NO: 5537
  oligonucleotide probe

SEQ ID NO: 21132 - DNA, 32 bp, Artificial; identical to SEQ ID NO: 8762
  oligonucleotide probe

SEQ ID NO: 21133 - DNA, 32 bp, Artificial; identical to SEQ ID NO: 5539
  oligonucleotide probe

SEQ ID NO: 21134 - DNA, 32 bp, Artificial; identical to SEQ ID NO: 8750
  oligonucleotide probe

SEQ ID NO: 21135 - DNA, 32 bp, Artificial; identical to SEQ ID NO: 8751
  oligonucleotide probe

SEQ ID NO: 21136 - DNA, 32 bp, Artificial; identical to SEQ ID NO: 8766
  oligonucleotide probe

SEQ ID NO: 21137 - DNA, 32 bp, Artificial; identical to SEQ ID NO: 8767
  oligonucleotide probe

SEQ ID NO: 21138 - DNA, 32 bp, Artificial; identical to SEQ ID NO: 5546
  oligonucleotide probe

SEQ ID NO: 21139 - DNA, 32 bp, Artificial; identical to SEQ ID NO: 8757
  oligonucleotide probe

SEQ ID NO: 21140 - DNA, 32 bp, Artificial; identical to SEQ ID NO: 8760
  oligonucleotide probe

SEQ ID NO: 21141 - DNA, 32 bp, Artificial; identical to SEQ ID NO: 5537
  oligonucleotide probe

SEQ ID NO: 21142 - DNA, 32 bp, Artificial; identical to SEQ ID NO: 8753
  oligonucleotide probe

SEQ ID NO: 21143 - DNA, 32 bp, Artificial; identical to SEQ ID NO: 8760
  oligonucleotide probe

SEQ ID NO: 21144 - DNA, 32 bp, Artificial; identical to SEQ ID NO: 8760
  oligonucleotide probe

SEQ ID NO: 21145 - DNA, 32 bp, Artificial; identical to SEQ ID NO: 5537
  oligonucleotide probe

SEQ ID NO: 21146 - DNA, 32 bp, Artificial; identical to SEQ ID NO: 8776
  oligonucleotide probe

SEQ ID NO: 21147 - DNA, 32 bp, Artificial; identical to SEQ ID NO: 8777
  oligonucleotide probe

SEQ ID NO: 21148 - DNA, 32 bp, Artificial; identical to SEQ ID NO: 8778
  oligonucleotide probe

SEQ ID NO: 21149 - DNA, 32 bp, Artificial; identical to SEQ ID NO: 5564
  oligonucleotide probe

SEQ ID NO: 21150 - DNA, 32 bp, Artificial; identical to SEQ ID NO: 8780
  oligonucleotide probe

SEQ ID NO: 21151 - DNA, 32 bp, Artificial; identical to SEQ ID NO: 8781
  oligonucleotide probe

SEQ ID NO: 21152 - DNA, 32 bp, Artificial; identical to SEQ ID NO: 8778
  oligonucleotide probe

SEQ ID NO: 21153 - DNA, 32 bp, Artificial; identical to SEQ ID NO: 5564
  oligonucleotide probe

SEQ ID NO: 21154 - DNA, 32 bp, Artificial; identical to SEQ ID NO: 8784
  oligonucleotide probe

SEQ ID NO: 21155 - DNA, 32 bp, Artificial; identical to SEQ ID NO: 8785
  oligonucleotide probe

SEQ ID NO: 21156 - DNA, 32 bp, Artificial; identical to SEQ ID NO: 8786
  oligonucleotide probe

SEQ ID NO: 21157 - DNA, 32 bp, Artificial; identical to SEQ ID NO: 5585
  oligonucleotide probe

SEQ ID NO: 21158 - DNA, 32 bp, Artificial; identical to SEQ ID NO: 5547
  oligonucleotide probe

SEQ ID NO: 21159 - DNA, 32 bp, Artificial; identical to SEQ ID NO: 8753
  oligonucleotide probe

SEQ ID NO: 21160 - DNA, 32 bp, Artificial; identical to SEQ ID NO: 5547
  oligonucleotide probe

SEQ ID NO: 21161 - DNA, 32 bp, Artificial; identical to SEQ ID NO: 8753
  oligonucleotide probe

SEQ ID NO: 21162 - DNA, 32 bp, Artificial; identical to SEQ ID NO: 8778
  oligonucleotide probe

SEQ ID NO: 21163 - DNA, 32 bp, Artificial; identical to SEQ ID NO: 5564
  oligonucleotide probe

SEQ ID NO: 21164 - DNA, 32 bp, Artificial; identical to SEQ ID NO: 8780
  oligonucleotide probe

SEQ ID NO: 21165 - DNA, 32 bp, Artificial; identical to SEQ ID NO: 8781
  oligonucleotide probe

SEQ ID NO: 21166 - DNA, 32 bp, Artificial; identical to SEQ ID NO: 8796
  oligonucleotide probe

SEQ ID NO: 21167 - DNA, 32 bp, Artificial; identical to SEQ ID NO: 5538
  oligonucleotide probe

SEQ ID NO: 21168 - DNA, 32 bp, Artificial; identical to SEQ ID NO: 8760
  oligonucleotide probe

SEQ ID NO: 21169 - DNA, 32 bp, Artificial; identical to SEQ ID NO: 5537
  oligonucleotide probe

SEQ ID NO: 21170 - DNA, 32 bp, Artificial; identical to SEQ ID NO: 8762
  oligonucleotide probe

SEQ ID NO: 21171 - DNA, 32 bp, Artificial; identical to SEQ ID NO: 5539
  oligonucleotide probe

SEQ ID NO: 21172 - DNA, 32 bp, Artificial; identical to SEQ ID NO: 8778
  oligonucleotide probe

SEQ ID NO: 21173 - DNA, 32 bp, Artificial; identical to SEQ ID NO: 5564
  oligonucleotide probe

SEQ ID NO: 21174 - DNA, 32 bp, Artificial; identical to SEQ ID NO: 8804
  oligonucleotide probe

SEQ ID NO: 21175 - DNA, 32 bp, Artificial; identical to SEQ ID NO: 5565
  oligonucleotide probe

SEQ ID NO: 21176 - DNA, 32 bp, Artificial; identical to SEQ ID NO: 8762
  oligonucleotide probe

SEQ ID NO: 21177 - DNA, 32 bp, Artificial; identical to SEQ ID NO: 5539
  oligonucleotide probe

SEQ ID NO: 21178 - DNA, 32 bp, Artificial; identical to SEQ ID NO: 8778
  oligonucleotide probe

SEQ ID NO: 21179 - DNA, 32 bp, Artificial; identical to SEQ ID NO: 5564
  oligonucleotide probe

SEQ ID NO: 21180 - DNA, 32 bp, Artificial; identical to SEQ ID NO: 8780
  oligonucleotide probe

SEQ ID NO: 21181 - DNA, 32 bp, Artificial; identical to SEQ ID NO: 8781
  oligonucleotide probe

SEQ ID NO: 21182 - DNA, 32 bp, Artificial; identical to SEQ ID NO: 8778
  oligonucleotide probe

SEQ ID NO: 21183 - DNA, 32 bp, Artificial; identical to SEQ ID NO: 5564
  oligonucleotide probe

SEQ ID NO: 21184 - DNA, 32 bp, Artificial; identical to SEQ ID NO: 5547
  oligonucleotide probe

SEQ ID NO: 21185 - DNA, 32 bp, Artificial; identical to SEQ ID NO: 8753
  oligonucleotide probe

SEQ ID NO: 21186 - DNA, 32 bp, Artificial; identical to SEQ ID NO: 8778
  oligonucleotide probe

SEQ ID NO: 21187 - DNA, 32 bp, Artificial; identical to SEQ ID NO: 5564
  oligonucleotide probe

SEQ ID NO: 21188 - DNA, 32 bp, Artificial; identical to SEQ ID NO: 8780
  oligonucleotide probe

SEQ ID NO: 21189 - DNA, 32 bp, Artificial; identical to SEQ ID NO: 8781
  oligonucleotide probe

SEQ ID NO: 21190 - DNA, 32 bp, Artificial; identical to SEQ ID NO: 8778
  oligonucleotide probe

SEQ ID NO: 21191 - DNA, 32 bp, Artificial; identical to SEQ ID NO: 5564
  oligonucleotide probe

SEQ ID NO: 21192 - DNA, 32 bp, Artificial; identical to SEQ ID NO: 8778
  oligonucleotide probe

SEQ ID NO: 21193 - DNA, 32 bp, Artificial; identical to SEQ ID NO: 5564
  oligonucleotide probe

SEQ ID NO: 21194 - DNA, 32 bp, Artificial; identical to SEQ ID NO: 8760
  oligonucleotide probe

SEQ ID NO: 21195 - DNA, 32 bp, Artificial; identical to SEQ ID NO: 5537
  oligonucleotide probe

SEQ ID NO: 21196 - DNA, 32 bp, Artificial; identical to SEQ ID NO: 8760
  oligonucleotide probe

SEQ ID NO: 21197 - DNA, 32 bp, Artificial; identical to SEQ ID NO: 5537
  oligonucleotide probe

SEQ ID NO: 21198 - DNA, 32 bp, Artificial; identical to SEQ ID NO: 8780
  oligonucleotide probe

SEQ ID NO: 21199 - DNA, 32 bp, Artificial; identical to SEQ ID NO: 8781
  oligonucleotide probe

SEQ ID NO: 21200 - DNA, 32 bp, Artificial; identical to SEQ ID NO: 8804
  oligonucleotide probe

SEQ ID NO: 21201 - DNA, 32 bp, Artificial; identical to SEQ ID NO: 5565
  oligonucleotide probe

SEQ ID NO: 21202 - DNA, 32 bp, Artificial; identical to SEQ ID NO: 8804
  oligonucleotide probe

SEQ ID NO: 21203 - DNA, 32 bp, Artificial; identical to SEQ ID NO: 5565
  oligonucleotide probe

SEQ ID NO: 21204 - DNA, 32 bp, Artificial; identical to SEQ ID NO: 8834
  oligonucleotide probe

SEQ ID NO: 21205 - DNA, 32 bp, Artificial; identical to SEQ ID NO: 8835
  oligonucleotide probe

SEQ ID NO: 21206 - DNA, 32 bp, Artificial; identical to SEQ ID NO: 8750
  oligonucleotide probe

SEQ ID NO: 21207 - DNA, 32 bp, Artificial; identical to SEQ ID NO: 8751
  oligonucleotide probe

SEQ ID NO: 21208 - DNA, 32 bp, Artificial; identical to SEQ ID NO: 5547
  oligonucleotide probe

SEQ ID NO: 21209 - DNA, 32 bp, Artificial; identical to SEQ ID NO: 8753
  oligonucleotide probe

SEQ ID NO: 21210 - DNA, 32 bp, Artificial; identical to SEQ ID NO: 5547
  oligonucleotide probe

SEQ ID NO: 21211 - DNA, 32 bp, Artificial; identical to SEQ ID NO: 8753
  oligonucleotide probe

SEQ ID NO: 21212 - DNA, 32 bp, Artificial; identical to SEQ ID NO: 8748
  oligonucleotide probe

SEQ ID NO: 21213 - DNA, 32 bp, Artificial; identical to SEQ ID NO: 8749
  oligonucleotide probe

SEQ ID NO: 21214 - DNA, 32 bp, Artificial; identical to SEQ ID NO: 8784
  oligonucleotide probe

SEQ ID NO: 21215 - DNA, 32 bp, Artificial; identical to SEQ ID NO: 8785
  oligonucleotide probe

SEQ ID NO: 21216 - DNA, 32 bp, Artificial; identical to SEQ ID NO: 8780
  oligonucleotide probe

SEQ ID NO: 21217 - DNA, 32 bp, Artificial; identical to SEQ ID NO: 8781
  oligonucleotide probe

SEQ ID NO: 21218 - DNA, 32 bp, Artificial; identical to SEQ ID NO: 8784
  oligonucleotide probe

SEQ ID NO: 21219 - DNA, 32 bp, Artificial; identical to SEQ ID NO: 8785
  oligonucleotide probe

SEQ ID NO: 21220 - DNA, 32 bp, Artificial; identical to SEQ ID NO: 8760
  oligonucleotide probe

SEQ ID NO: 21221 - DNA, 32 bp, Artificial; identical to SEQ ID NO: 5537
  oligonucleotide probe

SEQ ID NO: 21222 - DNA, 32 bp, Artificial; identical to SEQ ID NO: 8784
  oligonucleotide probe

SEQ ID NO: 21223 - DNA, 32 bp, Artificial; identical to SEQ ID NO: 8785
  oligonucleotide probe

SEQ ID NO: 21224 - DNA, 32 bp, Artificial; identical to SEQ ID NO: 5547
  oligonucleotide probe

SEQ ID NO: 21225 - DNA, 32 bp, Artificial; identical to SEQ ID NO: 8753
  oligonucleotide probe

SEQ ID NO: 21226 - DNA, 32 bp, Artificial; identical to SEQ ID NO: 8750
  oligonucleotide probe

SEQ ID NO: 21227 - DNA, 32 bp, Artificial; identical to SEQ ID NO: 8751
  oligonucleotide probe

SEQ ID NO: 21228 - DNA, 32 bp, Artificial; identical to SEQ ID NO: 8778
  oligonucleotide probe

SEQ ID NO: 21229 - DNA, 32 bp, Artificial; identical to SEQ ID NO: 5564
  oligonucleotide probe

SEQ ID NO: 21230 - DNA, 32 bp, Artificial; identical to SEQ ID NO: 8750
  oligonucleotide probe

SEQ ID NO: 21231 - DNA, 32 bp, Artificial; identical to SEQ ID NO: 8751
  oligonucleotide probe

SEQ ID NO: 21232 - DNA, 32 bp, Artificial; identical to SEQ ID NO: 5547
  oligonucleotide probe

SEQ ID NO: 21233 - DNA, 32 bp, Artificial; identical to SEQ ID NO: 8753
  oligonucleotide probe

SEQ ID NO: 21234 - DNA, 32 bp, Artificial; identical to SEQ ID NO: 8760
  oligonucleotide probe

SEQ ID NO: 21235 - DNA, 32 bp, Artificial; identical to SEQ ID NO: 5537
  oligonucleotide probe

SEQ ID NO: 21236 - DNA, 32 bp, Artificial; identical to SEQ ID NO: 5547
  oligonucleotide probe

SEQ ID NO: 21237 - DNA, 32 bp, Artificial; identical to SEQ ID NO: 8753
  oligonucleotide probe

SEQ ID NO: 21238 - DNA, 32 bp, Artificial; identical to SEQ ID NO: 8868
  oligonucleotide probe

SEQ ID NO: 21239 - DNA, 32 bp, Artificial; identical to SEQ ID NO: 5584
  oligonucleotide probe

SEQ ID NO: 21240 - DNA, 32 bp, Artificial; identical to SEQ ID NO: 8796
  oligonucleotide probe

SEQ ID NO: 21241 - DNA, 32 bp, Artificial; identical to SEQ ID NO: 5538
  oligonucleotide probe

SEQ ID NO: 21242 - DNA, 32 bp, Artificial; identical to SEQ ID NO: 5547
  oligonucleotide probe

SEQ ID NO: 21243 - DNA, 32 bp, Artificial; identical to SEQ ID NO: 8753
  oligonucleotide probe

SEQ ID NO: 21244 - DNA, 32 bp, Artificial; identical to SEQ ID NO: 8778
  oligonucleotide probe

SEQ ID NO: 21245 - DNA, 32 bp, Artificial; identical to SEQ ID NO: 5564
  oligonucleotide probe

SEQ ID NO: 21246 - DNA, 32 bp, Artificial; identical to SEQ ID NO: 8780
  oligonucleotide probe

SEQ ID NO: 21247 - DNA, 32 bp, Artificial; identical to SEQ ID NO: 8781
  oligonucleotide probe

SEQ ID NO: 21248 - DNA, 32 bp, Artificial; identical to SEQ ID NO: 8778
  oligonucleotide probe

SEQ ID NO: 21249 - DNA, 32 bp, Artificial; identical to SEQ ID NO: 5564
  oligonucleotide probe

SEQ ID NO: 21250 - DNA, 32 bp, Artificial; identical to SEQ ID NO: 8834
  oligonucleotide probe

SEQ ID NO: 21251 - DNA, 32 bp, Artificial; identical to SEQ ID NO: 8835
  oligonucleotide probe

SEQ ID NO: 21252 - DNA, 32 bp, Artificial; identical to SEQ ID NO: 8868
  oligonucleotide probe

SEQ ID NO: 21253 - DNA, 32 bp, Artificial; identical to SEQ ID NO: 5584
  oligonucleotide probe

SEQ ID NO: 21254 - DNA, 32 bp, Artificial; identical to SEQ ID NO: 8750
  oligonucleotide probe

SEQ ID NO: 21255 - DNA, 32 bp, Artificial; identical to SEQ ID NO: 8751
  oligonucleotide probe

SEQ ID NO: 21256 - DNA, 32 bp, Artificial; identical to SEQ ID NO: 8784
  oligonucleotide probe

SEQ ID NO: 21257 - DNA, 32 bp, Artificial; identical to SEQ ID NO: 8785
  oligonucleotide probe

SEQ ID NO: 21258 - DNA, 32 bp, Artificial; identical to SEQ ID NO: 8748
  oligonucleotide probe

SEQ ID NO: 21259 - DNA, 32 bp, Artificial; identical to SEQ ID NO: 8749
  oligonucleotide probe

SEQ ID NO: 21260 - DNA, 32 bp, Artificial; identical to SEQ ID NO: 8804
  oligonucleotide probe

SEQ ID NO: 21261 - DNA, 32 bp, Artificial; identical to SEQ ID NO: 5565
  oligonucleotide probe

SEQ ID NO: 21262 - DNA, 32 bp, Artificial; identical to SEQ ID NO: 8778
  oligonucleotide probe

SEQ ID NO: 21263 - DNA, 32 bp, Artificial; identical to SEQ ID NO: 5564
  oligonucleotide probe

SEQ ID NO: 21264 - DNA, 32 bp, Artificial; identical to SEQ ID NO: 5547
  oligonucleotide probe

SEQ ID NO: 21265 - DNA, 32 bp, Artificial; identical to SEQ ID NO: 8753
  oligonucleotide probe

SEQ ID NO: 21266 - DNA, 32 bp, Artificial; identical to SEQ ID NO: 8780
  oligonucleotide probe

SEQ ID NO: 21267 - DNA, 32 bp, Artificial; identical to SEQ ID NO: 8781
  oligonucleotide probe

SEQ ID NO: 21268 - DNA, 32 bp, Artificial; identical to SEQ ID NO: 8784
  oligonucleotide probe

SEQ ID NO: 21269 - DNA, 32 bp, Artificial; identical to SEQ ID NO: 8785
  oligonucleotide probe

SEQ ID NO: 21270 - DNA, 32 bp, Artificial; identical to SEQ ID NO: 8868
  oligonucleotide probe

SEQ ID NO: 21271 - DNA, 32 bp, Artificial; identical to SEQ ID NO: 5584
  oligonucleotide probe

SEQ ID NO: 21272 - DNA, 32 bp, Artificial; identical to SEQ ID NO: 8766
  oligonucleotide probe

SEQ ID NO: 21273 - DNA, 32 bp, Artificial; identical to SEQ ID NO: 8767
  oligonucleotide probe

SEQ ID NO: 21274 - DNA, 32 bp, Artificial; identical to SEQ ID NO: 8796
  oligonucleotide probe

SEQ ID NO: 21275 - DNA, 32 bp, Artificial; identical to SEQ ID NO: 5538
  oligonucleotide probe

SEQ ID NO: 21276 - DNA, 32 bp, Artificial; identical to SEQ ID NO: 5547
  oligonucleotide probe

SEQ ID NO: 21277 - DNA, 32 bp, Artificial; identical to SEQ ID NO: 8753
  oligonucleotide probe

SEQ ID NO: 21278 - DNA, 32 bp, Artificial; identical to SEQ ID NO: 5547
  oligonucleotide probe

SEQ ID NO: 21279 - DNA, 32 bp, Artificial; identical to SEQ ID NO: 8753
  oligonucleotide probe

SEQ ID NO: 21280 - DNA, 32 bp, Artificial; identical to SEQ ID NO: 8760
  oligonucleotide probe

SEQ ID NO: 21281 - DNA, 32 bp, Artificial; identical to SEQ ID NO: 5537
  oligonucleotide probe

SEQ ID NO: 21282 - DNA, 32 bp, Artificial; identical to SEQ ID NO: 8778
  oligonucleotide probe

SEQ ID NO: 21283 - DNA, 32 bp, Artificial; identical to SEQ ID NO: 5564
  oligonucleotide probe

SEQ ID NO: 21284 - DNA, 32 bp, Artificial; identical to SEQ ID NO: 8750
  oligonucleotide probe

SEQ ID NO: 21285 - DNA, 32 bp, Artificial; identical to SEQ ID NO: 8751
  oligonucleotide probe

SEQ ID NO: 21286 - DNA, 32 bp, Artificial; identical to SEQ ID NO: 8750
  oligonucleotide probe

SEQ ID NO: 21287 - DNA, 32 bp, Artificial; identical to SEQ ID NO: 8751
  oligonucleotide probe

SEQ ID NO: 21288 - DNA, 32 bp, Artificial; identical to SEQ ID NO: 5546
  oligonucleotide probe

SEQ ID NO: 21289 - DNA, 32 bp, Artificial; identical to SEQ ID NO: 8757
  oligonucleotide probe

SEQ ID NO: 21290 - DNA, 32 bp, Artificial; identical to SEQ ID NO: 5547
  oligonucleotide probe

SEQ ID NO: 21291 - DNA, 32 bp, Artificial; identical to SEQ ID NO: 8753
  oligonucleotide probe

SEQ ID NO: 21292 - DNA, 32 bp, Artificial; identical to SEQ ID NO: 8760
  oligonucleotide probe

SEQ ID NO: 21293 - DNA, 32 bp, Artificial; identical to SEQ ID NO: 5537
  oligonucleotide probe

SEQ ID NO: 21294 - DNA, 32 bp, Artificial; identical to SEQ ID NO: 8762
  oligonucleotide probe

SEQ ID NO: 21295 - DNA, 32 bp, Artificial; identical to SEQ ID NO: 5539
  oligonucleotide probe

SEQ ID NO: 21296 - DNA, 32 bp, Artificial; identical to SEQ ID NO: 8760
  oligonucleotide probe

SEQ ID NO: 21297 - DNA, 32 bp, Artificial; identical to SEQ ID NO: 5537
  oligonucleotide probe

SEQ ID NO: 21298 - DNA, 32 bp, Artificial; identical to SEQ ID NO: 8762
  oligonucleotide probe

SEQ ID NO: 21299 - DNA, 32 bp, Artificial; identical to SEQ ID NO: 5539
  oligonucleotide probe

SEQ ID NO: 21300 - DNA, 32 bp, Artificial; identical to SEQ ID NO: 8804
  oligonucleotide probe

SEQ ID NO: 21301 - DNA, 32 bp, Artificial; identical to SEQ ID NO: 5565
  oligonucleotide probe

SEQ ID NO: 21302 - DNA, 32 bp, Artificial; identical to SEQ ID NO: 8760
  oligonucleotide probe

SEQ ID NO: 21303 - DNA, 32 bp, Artificial; identical to SEQ ID NO: 5537
  oligonucleotide probe

SEQ ID NO: 21304 - DNA, 32 bp, Artificial; identical to SEQ ID NO: 8760
  oligonucleotide probe

SEQ ID NO: 21305 - DNA, 32 bp, Artificial; identical to SEQ ID NO: 5537
  oligonucleotide probe

SEQ ID NO: 21306 - DNA, 32 bp, Artificial; identical to SEQ ID NO: 8936
  oligonucleotide probe

SEQ ID NO: 21307 - DNA, 32 bp, Artificial; identical to SEQ ID NO: 5595
  oligonucleotide probe

SEQ ID NO: 21308 - DNA, 32 bp, Artificial; identical to SEQ ID NO: 8760
  oligonucleotide probe

SEQ ID NO: 21309 - DNA, 32 bp, Artificial; identical to SEQ ID NO: 5537
  oligonucleotide probe

SEQ ID NO: 21310 - DNA, 32 bp, Artificial; identical to SEQ ID NO: 8780
  oligonucleotide probe

SEQ ID NO: 21311 - DNA, 32 bp, Artificial; identical to SEQ ID NO: 8781
  oligonucleotide probe

SEQ ID NO: 21312 - DNA, 32 bp, Artificial; identical to SEQ ID NO: 8778
  oligonucleotide probe

SEQ ID NO: 21313 - DNA, 32 bp, Artificial; identical to SEQ ID NO: 5564
  oligonucleotide probe

SEQ ID NO: 21314 - DNA, 32 bp, Artificial; identical to SEQ ID NO: 8776
  oligonucleotide probe

SEQ ID NO: 21315 - DNA, 32 bp, Artificial; identical to SEQ ID NO: 8777
  oligonucleotide probe

SEQ ID NO: 21316 - DNA, 32 bp, Artificial; identical to SEQ ID NO: 5546
  oligonucleotide probe

SEQ ID NO: 21317 - DNA, 32 bp, Artificial; identical to SEQ ID NO: 8757
  oligonucleotide probe

SEQ ID NO: 21318 - DNA, 32 bp, Artificial; identical to SEQ ID NO: 5546
  oligonucleotide probe

SEQ ID NO: 21319 - DNA, 32 bp, Artificial; identical to SEQ ID NO: 8757
  oligonucleotide probe

SEQ ID NO: 21320 - DNA, 32 bp, Artificial; identical to SEQ ID NO: 8868
  oligonucleotide probe

SEQ ID NO: 21321 - DNA, 32 bp, Artificial; identical to SEQ ID NO: 5584
  oligonucleotide probe

SEQ ID NO: 21322 - DNA, 32 bp, Artificial; identical to SEQ ID NO: 8750
  oligonucleotide probe

SEQ ID NO: 21323 - DNA, 32 bp, Artificial; identical to SEQ ID NO: 8751
  oligonucleotide probe

SEQ ID NO: 21324 - DNA, 32 bp, Artificial; identical to SEQ ID NO: 5547
  oligonucleotide probe

SEQ ID NO: 21325 - DNA, 32 bp, Artificial; identical to SEQ ID NO: 8753
  oligonucleotide probe

SEQ ID NO: 21326 - DNA, 32 bp, Artificial; identical to SEQ ID NO: 8786
  oligonucleotide probe

SEQ ID NO: 21327 - DNA, 32 bp, Artificial; identical to SEQ ID NO: 5585
  oligonucleotide probe

SEQ ID NO: 21328 - DNA, 32 bp, Artificial; identical to SEQ ID NO: 5547
  oligonucleotide probe

SEQ ID NO: 21329 - DNA, 32 bp, Artificial; identical to SEQ ID NO: 8753
  oligonucleotide probe

SEQ ID NO: 21330 - DNA, 32 bp, Artificial; identical to SEQ ID NO: 8868
  oligonucleotide probe

SEQ ID NO: 21331 - DNA, 32 bp, Artificial; identical to SEQ ID NO: 5584
  oligonucleotide probe

SEQ ID NO: 21332 - DNA, 32 bp, Artificial; identical to SEQ ID NO: 8784
  oligonucleotide probe

SEQ ID NO: 21333 - DNA, 32 bp, Artificial; identical to SEQ ID NO: 8785
  oligonucleotide probe

SEQ ID NO: 21334 - DNA, 32 bp, Artificial; identical to SEQ ID NO: 8762
  oligonucleotide probe

SEQ ID NO: 21335 - DNA, 32 bp, Artificial; identical to SEQ ID NO: 5539
  oligonucleotide probe

SEQ ID NO: 21336 - DNA, 32 bp, Artificial; identical to SEQ ID NO: 8750
  oligonucleotide probe

SEQ ID NO: 21337 - DNA, 32 bp, Artificial; identical to SEQ ID NO: 8751
  oligonucleotide probe

SEQ ID NO: 21338 - DNA, 32 bp, Artificial; identical to SEQ ID NO: 5547
  oligonucleotide probe

SEQ ID NO: 21339 - DNA, 32 bp, Artificial; identical to SEQ ID NO: 8753
  oligonucleotide probe

SEQ ID NO: 21340 - DNA, 32 bp, Artificial; identical to SEQ ID NO: 8766
  oligonucleotide probe

SEQ ID NO: 21341 - DNA, 32 bp, Artificial; identical to SEQ ID NO: 8767
  oligonucleotide probe

SEQ ID NO: 21342 - DNA, 32 bp, Artificial; identical to SEQ ID NO: 8760
  oligonucleotide probe

SEQ ID NO: 21343 - DNA, 32 bp, Artificial; identical to SEQ ID NO: 5537
  oligonucleotide probe

SEQ ID NO: 21344 - DNA, 32 bp, Artificial; identical to SEQ ID NO: 5547
  oligonucleotide probe

SEQ ID NO: 21345 - DNA, 32 bp, Artificial; identical to SEQ ID NO: 8753
  oligonucleotide probe

SEQ ID NO: 21346 - DNA, 32 bp, Artificial; identical to SEQ ID NO: 8786
  oligonucleotide probe

SEQ ID NO: 21347 - DNA, 32 bp, Artificial; identical to SEQ ID NO: 5585
  oligonucleotide probe

SEQ ID NO: 21348 - DNA, 32 bp, Artificial; identical to SEQ ID NO: 8784
  oligonucleotide probe

SEQ ID NO: 21349 - DNA, 32 bp, Artificial; identical to SEQ ID NO: 8785
  oligonucleotide probe

SEQ ID NO: 21350 - DNA, 32 bp, Artificial; identical to SEQ ID NO: 8780
  oligonucleotide probe

SEQ ID NO: 21351 - DNA, 32 bp, Artificial; identical to SEQ ID NO: 8781
  oligonucleotide probe

SEQ ID NO: 21352 - DNA, 32 bp, Artificial; identical to SEQ ID NO: 8762
  oligonucleotide probe

SEQ ID NO: 21353 - DNA, 32 bp, Artificial; identical to SEQ ID NO: 5539
  oligonucleotide probe

SEQ ID NO: 21354 - DNA, 32 bp, Artificial; identical to SEQ ID NO: 8776
  oligonucleotide probe

SEQ ID NO: 21355 - DNA, 32 bp, Artificial; identical to SEQ ID NO: 8777
  oligonucleotide probe

SEQ ID NO: 21356 - DNA, 32 bp, Artificial; identical to SEQ ID NO: 8748
  oligonucleotide probe

SEQ ID NO: 21357 - DNA, 32 bp, Artificial; identical to SEQ ID NO: 8749
  oligonucleotide probe

SEQ ID NO: 21358 - DNA, 32 bp, Artificial; identical to SEQ ID NO: 8780
  oligonucleotide probe

SEQ ID NO: 21359 - DNA, 32 bp, Artificial; identical to SEQ ID NO: 8781
  oligonucleotide probe

SEQ ID NO: 21360 - DNA, 32 bp, Artificial; identical to SEQ ID NO: 8750
  oligonucleotide probe

SEQ ID NO: 21361 - DNA, 32 bp, Artificial; identical to SEQ ID NO: 8751
  oligonucleotide probe

SEQ ID NO: 21362 - DNA, 32 bp, Artificial; identical to SEQ ID NO: 8748
  oligonucleotide probe

SEQ ID NO: 21363 - DNA, 32 bp, Artificial; identical to SEQ ID NO: 8749
  oligonucleotide probe

SEQ ID NO: 21364 - DNA, 32 bp, Artificial; identical to SEQ ID NO: 8784
  oligonucleotide probe

SEQ ID NO: 21365 - DNA, 32 bp, Artificial; identical to SEQ ID NO: 8785
  oligonucleotide probe

SEQ ID NO: 21366 - DNA, 32 bp, Artificial; identical to SEQ ID NO: 8750
  oligonucleotide probe

SEQ ID NO: 21367 - DNA, 32 bp, Artificial; identical to SEQ ID NO: 8751
  oligonucleotide probe

SEQ ID NO: 21368 - DNA, 32 bp, Artificial; identical to SEQ ID NO: 8748
  oligonucleotide probe

SEQ ID NO: 21369 - DNA, 32 bp, Artificial; identical to SEQ ID NO: 8749
  oligonucleotide probe

SEQ ID NO: 21370 - DNA, 32 bp, Artificial; identical to SEQ ID NO: 8760
  oligonucleotide probe

SEQ ID NO: 21371 - DNA, 32 bp, Artificial; identical to SEQ ID NO: 5537
  oligonucleotide probe

SEQ ID NO: 21372 - DNA, 32 bp, Artificial; identical to SEQ ID NO: 8760
  oligonucleotide probe

SEQ ID NO: 21373 - DNA, 32 bp, Artificial; identical to SEQ ID NO: 5537
  oligonucleotide probe

SEQ ID NO: 21374 - DNA, 32 bp, Artificial; identical to SEQ ID NO: 8784
  oligonucleotide probe

SEQ ID NO: 21375 - DNA, 32 bp, Artificial; identical to SEQ ID NO: 8785
  oligonucleotide probe

SEQ ID NO: 21376 - DNA, 32 bp, Artificial; identical to SEQ ID NO: 5546
  oligonucleotide probe

SEQ ID NO: 21377 - DNA, 32 bp, Artificial; identical to SEQ ID NO: 8757
  oligonucleotide probe

SEQ ID NO: 21378 - DNA, 32 bp, Artificial; identical to SEQ ID NO: 8778
  oligonucleotide probe

SEQ ID NO: 21379 - DNA, 32 bp, Artificial; identical to SEQ ID NO: 5564
  oligonucleotide probe

SEQ ID NO: 21380 - DNA, 32 bp, Artificial; identical to SEQ ID NO: 8780
  oligonucleotide probe

SEQ ID NO: 21381 - DNA, 32 bp, Artificial; identical to SEQ ID NO: 8781
  oligonucleotide probe

SEQ ID NO: 21382 - DNA, 32 bp, Artificial; identical to SEQ ID NO: 8750
  oligonucleotide probe

SEQ ID NO: 21383 - DNA, 32 bp, Artificial; identical to SEQ ID NO: 8751
  oligonucleotide probe

SEQ ID NO: 21384 - DNA, 32 bp, Artificial; identical to SEQ ID NO: 8750
  oligonucleotide probe

SEQ ID NO: 21385 - DNA, 32 bp, Artificial; identical to SEQ ID NO: 8751
  oligonucleotide probe

SEQ ID NO: 21386 - DNA, 32 bp, Artificial; identical to SEQ ID NO: 5547
  oligonucleotide probe

SEQ ID NO: 21387 - DNA, 32 bp, Artificial; identical to SEQ ID NO: 8753
  oligonucleotide probe

SEQ ID NO: 21388 - DNA, 32 bp, Artificial; identical to SEQ ID NO: 8784
  oligonucleotide probe

SEQ ID NO: 21389 - DNA, 32 bp, Artificial; identical to SEQ ID NO: 8785
  oligonucleotide probe

SEQ ID NO: 21390 - DNA, 32 bp, Artificial; identical to SEQ ID NO: 9020
  oligonucleotide probe

SEQ ID NO: 21391 - DNA, 32 bp, Artificial; identical to SEQ ID NO: 9021
  oligonucleotide probe

SEQ ID NO: 21392 - DNA, 32 bp, Artificial; identical to SEQ ID NO: 8796
  oligonucleotide probe

SEQ ID NO: 21393 - DNA, 32 bp, Artificial; identical to SEQ ID NO: 5538
  oligonucleotide probe

SEQ ID NO: 21394 - DNA, 32 bp, Artificial; identical to SEQ ID NO: 8786
  oligonucleotide probe

SEQ ID NO: 21395 - DNA, 32 bp, Artificial; identical to SEQ ID NO: 5585
  oligonucleotide probe

SEQ ID NO: 21396 - DNA, 32 bp, Artificial; identical to SEQ ID NO: 8780
  oligonucleotide probe

SEQ ID NO: 21397 - DNA, 32 bp, Artificial; identical to SEQ ID NO: 8781
  oligonucleotide probe

SEQ ID NO: 21398 - DNA, 32 bp, Artificial; identical to SEQ ID NO: 8780
  oligonucleotide probe

SEQ ID NO: 21399 - DNA, 32 bp, Artificial; identical to SEQ ID NO: 8781
  oligonucleotide probe

SEQ ID NO: 21400 - DNA, 32 bp, Artificial; identical to SEQ ID NO: 8750
  oligonucleotide probe

SEQ ID NO: 21401 - DNA, 32 bp, Artificial; identical to SEQ ID NO: 8751
  oligonucleotide probe

SEQ ID NO: 21402 - DNA, 32 bp, Artificial; identical to SEQ ID NO: 8784
  oligonucleotide probe

SEQ ID NO: 21403 - DNA, 32 bp, Artificial; identical to SEQ ID NO: 8785
  oligonucleotide probe

SEQ ID NO: 21404 - DNA, 32 bp, Artificial; identical to SEQ ID NO: 8804
  oligonucleotide probe

SEQ ID NO: 21405 - DNA, 32 bp, Artificial; identical to SEQ ID NO: 5565
  oligonucleotide probe

SEQ ID NO: 21406 - DNA, 32 bp, Artificial; identical to SEQ ID NO: 8804
  oligonucleotide probe

SEQ ID NO: 21407 - DNA, 32 bp, Artificial; identical to SEQ ID NO: 5565
  oligonucleotide probe

SEQ ID NO: 21408 - DNA, 32 bp, Artificial; identical to SEQ ID NO: 9038
  oligonucleotide probe

SEQ ID NO: 21409 - DNA, 32 bp, Artificial; identical to SEQ ID NO: 5594
  oligonucleotide probe

SEQ ID NO: 21410 - DNA, 32 bp, Artificial; identical to SEQ ID NO: 8760
  oligonucleotide probe

SEQ ID NO: 21411 - DNA, 32 bp, Artificial; identical to SEQ ID NO: 5537
  oligonucleotide probe

SEQ ID NO: 21412 - DNA, 32 bp, Artificial; identical to SEQ ID NO: 8778
  oligonucleotide probe

SEQ ID NO: 21413 - DNA, 32 bp, Artificial; identical to SEQ ID NO: 5564
  oligonucleotide probe

SEQ ID NO: 21414 - DNA, 32 bp, Artificial; identical to SEQ ID NO: 8760
  oligonucleotide probe

SEQ ID NO: 21415 - DNA, 32 bp, Artificial; identical to SEQ ID NO: 5537
  oligonucleotide probe

SEQ ID NO: 21416 - DNA, 32 bp, Artificial; identical to SEQ ID NO: 8776
  oligonucleotide probe

SEQ ID NO: 21417 - DNA, 32 bp, Artificial; identical to SEQ ID NO: 8777
  oligonucleotide probe

SEQ ID NO: 21418 - DNA, 32 bp, Artificial; identical to SEQ ID NO: 8776
  oligonucleotide probe

SEQ ID NO: 21419 - DNA, 32 bp, Artificial; identical to SEQ ID NO: 8777
  oligonucleotide probe

SEQ ID NO: 21420 - DNA, 32 bp, Artificial; identical to SEQ ID NO: 8780
  oligonucleotide probe

SEQ ID NO: 21421 - DNA, 32 bp, Artificial; identical to SEQ ID NO: 8781
  oligonucleotide probe

SEQ ID NO: 21422 - DNA, 32 bp, Artificial; identical to SEQ ID NO: 8753
  oligonucleotide probe

SEQ ID NO: 21423 - DNA, 32 bp, Artificial; identical to SEQ ID NO: 8760
  oligonucleotide probe

SEQ ID NO: 21424 - DNA, 32 bp, Artificial; identical to SEQ ID NO: 8762
  oligonucleotide probe

SEQ ID NO: 21425 - DNA, 32 bp, Artificial; identical to SEQ ID NO: 5539
  oligonucleotide probe

SEQ ID NO: 21426 - DNA, 32 bp, Artificial; identical to SEQ ID NO: 8760
  oligonucleotide probe

SEQ ID NO: 21427 - DNA, 32 bp, Artificial; identical to SEQ ID NO: 5537
  oligonucleotide probe

SEQ ID NO: 21428 - DNA, 32 bp, Artificial; identical to SEQ ID NO: 8784
  oligonucleotide probe

SEQ ID NO: 21429 - DNA, 32 bp, Artificial; identical to SEQ ID NO: 8785
  oligonucleotide probe

SEQ ID NO: 21430 - DNA, 32 bp, Artificial; identical to SEQ ID NO: 8796
  oligonucleotide probe

SEQ ID NO: 21431 - DNA, 32 bp, Artificial; identical to SEQ ID NO: 5538
  oligonucleotide probe

SEQ ID NO: 21432 - DNA, 32 bp, Artificial; identical to SEQ ID NO: 8753
  oligonucleotide probe

SEQ ID NO: 21433 - DNA, 32 bp, Artificial; identical to SEQ ID NO: 8760
  oligonucleotide probe

SEQ ID NO: 21434 - DNA, 32 bp, Artificial; identical to SEQ ID NO: 8750
  oligonucleotide probe

SEQ ID NO: 21435 - DNA, 32 bp, Artificial; identical to SEQ ID NO: 8751
  oligonucleotide probe

SEQ ID NO: 21436 - DNA, 32 bp, Artificial; identical to SEQ ID NO: 8778
  oligonucleotide probe

SEQ ID NO: 21437 - DNA, 32 bp, Artificial; identical to SEQ ID NO: 5564
  oligonucleotide probe

SEQ ID NO: 21438 - DNA, 32 bp, Artificial; identical to SEQ ID NO: 8748
  oligonucleotide probe

SEQ ID NO: 21439 - DNA, 32 bp, Artificial; identical to SEQ ID NO: 8749
  oligonucleotide probe

SEQ ID NO: 21440 - DNA, 32 bp, Artificial; identical to SEQ ID NO: 8776
  oligonucleotide probe

SEQ ID NO: 21441 - DNA, 32 bp, Artificial; identical to SEQ ID NO: 8777
  oligonucleotide probe

SEQ ID NO: 21442 - DNA, 32 bp, Artificial; identical to SEQ ID NO: 8796
  oligonucleotide probe

SEQ ID NO: 21443 - DNA, 32 bp, Artificial; identical to SEQ ID NO: 5538
  oligonucleotide probe

SEQ ID NO: 21444 - DNA, 32 bp, Artificial; identical to SEQ ID NO: 9020
  oligonucleotide probe

SEQ ID NO: 21445 - DNA, 32 bp, Artificial; identical to SEQ ID NO: 9021
  oligonucleotide probe

SEQ ID NO: 21446 - DNA, 32 bp, Artificial; identical to SEQ ID NO: 8796
  oligonucleotide probe

SEQ ID NO: 21447 - DNA, 32 bp, Artificial; identical to SEQ ID NO: 5538
  oligonucleotide probe

SEQ ID NO: 21448 - DNA, 32 bp, Artificial; identical to SEQ ID NO: 5546
  oligonucleotide probe

SEQ ID NO: 21449 - DNA, 32 bp, Artificial; identical to SEQ ID NO: 8757
  oligonucleotide probe

SEQ ID NO: 21450 - DNA, 32 bp, Artificial; identical to SEQ ID NO: 8762
  oligonucleotide probe

SEQ ID NO: 21451 - DNA, 32 bp, Artificial; identical to SEQ ID NO: 5539
  oligonucleotide probe

SEQ ID NO: 21452 - DNA, 32 bp, Artificial; identical to SEQ ID NO: 5547
  oligonucleotide probe

SEQ ID NO: 21453 - DNA, 32 bp, Artificial; identical to SEQ ID NO: 8753
  oligonucleotide probe

SEQ ID NO: 21454 - DNA, 32 bp, Artificial; identical to SEQ ID NO: 8778
  oligonucleotide probe

SEQ ID NO: 21455 - DNA, 32 bp, Artificial; identical to SEQ ID NO: 5564
  oligonucleotide probe

SEQ ID NO: 21456 - DNA, 32 bp, Artificial; identical to SEQ ID NO: 8760
  oligonucleotide probe

SEQ ID NO: 21457 - DNA, 32 bp, Artificial; identical to SEQ ID NO: 5537
  oligonucleotide probe

SEQ ID NO: 21458 - DNA, 32 bp, Artificial; identical to SEQ ID NO: 5547
  oligonucleotide probe

SEQ ID NO: 21459 - DNA, 32 bp, Artificial; identical to SEQ ID NO: 8753
  oligonucleotide probe

SEQ ID NO: 21460 - DNA, 32 bp, Artificial; identical to SEQ ID NO: 5546
  oligonucleotide probe

SEQ ID NO: 21461 - DNA, 32 bp, Artificial; identical to SEQ ID NO: 8757
  oligonucleotide probe

SEQ ID NO: 21462 - DNA, 32 bp, Artificial; identical to SEQ ID NO: 8760
  oligonucleotide probe

SEQ ID NO: 21463 - DNA, 32 bp, Artificial; identical to SEQ ID NO: 5537
  oligonucleotide probe

SEQ ID NO: 21464 - DNA, 32 bp, Artificial; identical to SEQ ID NO: 8780
  oligonucleotide probe

SEQ ID NO: 21465 - DNA, 32 bp, Artificial; identical to SEQ ID NO: 8781
  oligonucleotide probe

SEQ ID NO: 21466 - DNA, 32 bp, Artificial; identical to SEQ ID NO: 9020
  oligonucleotide probe

SEQ ID NO: 21467 - DNA, 32 bp, Artificial; identical to SEQ ID NO: 9021
  oligonucleotide probe

SEQ ID NO: 21468 - DNA, 32 bp, Artificial; identical to SEQ ID NO: 8780
  oligonucleotide probe

SEQ ID NO: 21469 - DNA, 32 bp, Artificial; identical to SEQ ID NO: 8781
  oligonucleotide probe

SEQ ID NO: 21470 - DNA, 32 bp, Artificial; identical to SEQ ID NO: 5547
  oligonucleotide probe

SEQ ID NO: 21471 - DNA, 32 bp, Artificial; identical to SEQ ID NO: 8753
  oligonucleotide probe

SEQ ID NO: 21472 - DNA, 32 bp, Artificial; identical to SEQ ID NO: 8778
  oligonucleotide probe

SEQ ID NO: 21473 - DNA, 32 bp, Artificial; identical to SEQ ID NO: 5564
  oligonucleotide probe

SEQ ID NO: 21474 - DNA, 32 bp, Artificial; identical to SEQ ID NO: 8748
  oligonucleotide probe

SEQ ID NO: 21475 - DNA, 32 bp, Artificial; identical to SEQ ID NO: 8749
  oligonucleotide probe

SEQ ID NO: 21476 - DNA, 32 bp, Artificial; identical to SEQ ID NO: 9038
  oligonucleotide probe

SEQ ID NO: 21477 - DNA, 32 bp, Artificial; identical to SEQ ID NO: 5594
  oligonucleotide probe

SEQ ID NO: 21478 - DNA, 32 bp, Artificial; identical to SEQ ID NO: 8762
  oligonucleotide probe

SEQ ID NO: 21479 - DNA, 32 bp, Artificial; identical to SEQ ID NO: 5539
  oligonucleotide probe

SEQ ID NO: 21480 - DNA, 32 bp, Artificial; identical to SEQ ID NO: 8834
  oligonucleotide probe

SEQ ID NO: 21481 - DNA, 32 bp, Artificial; identical to SEQ ID NO: 8835
  oligonucleotide probe

SEQ ID NO: 21482 - DNA, 32 bp, Artificial; identical to SEQ ID NO: 8786
  oligonucleotide probe

SEQ ID NO: 21483 - DNA, 32 bp, Artificial; identical to SEQ ID NO: 5585
  oligonucleotide probe

SEQ ID NO: 21484 - DNA, 32 bp, Artificial; identical to SEQ ID NO: 5546
  oligonucleotide probe

SEQ ID NO: 21485 - DNA, 32 bp, Artificial; identical to SEQ ID NO: 8757
  oligonucleotide probe

SEQ ID NO: 21486 - DNA, 32 bp, Artificial; identical to SEQ ID NO: 8760
  oligonucleotide probe

SEQ ID NO: 21487 - DNA, 32 bp, Artificial; identical to SEQ ID NO: 5537
  oligonucleotide probe

SEQ ID NO: 21488 - DNA, 32 bp, Artificial; identical to SEQ ID NO: 8762
  oligonucleotide probe

SEQ ID NO: 21489 - DNA, 32 bp, Artificial; identical to SEQ ID NO: 5539
  oligonucleotide probe

SEQ ID NO: 21490 - DNA, 32 bp, Artificial; identical to SEQ ID NO: 8780
  oligonucleotide probe

SEQ ID NO: 21491 - DNA, 32 bp, Artificial; identical to SEQ ID NO: 8781
  oligonucleotide probe

SEQ ID NO: 21492 - DNA, 32 bp, Artificial; identical to SEQ ID NO: 8753
  oligonucleotide probe

SEQ ID NO: 21493 - DNA, 32 bp, Artificial; identical to SEQ ID NO: 8760
  oligonucleotide probe

SEQ ID NO: 21494 - DNA, 32 bp, Artificial; identical to SEQ ID NO: 9020
  oligonucleotide probe

SEQ ID NO: 21495 - DNA, 32 bp, Artificial; identical to SEQ ID NO: 9021
  oligonucleotide probe

SEQ ID NO: 21496 - DNA, 32 bp, Artificial; identical to SEQ ID NO: 8750
  oligonucleotide probe

SEQ ID NO: 21497 - DNA, 32 bp, Artificial; identical to SEQ ID NO: 8751
  oligonucleotide probe

SEQ ID NO: 21498 - DNA, 32 bp, Artificial; identical to SEQ ID NO: 8776
  oligonucleotide probe

SEQ ID NO: 21499 - DNA, 32 bp, Artificial; identical to SEQ ID NO: 8777
  oligonucleotide probe

SEQ ID NO: 21500 - DNA, 32 bp, Artificial; identical to SEQ ID NO: 5547
  oligonucleotide probe

SEQ ID NO: 21501 - DNA, 32 bp, Artificial; identical to SEQ ID NO: 8753
  oligonucleotide probe

SEQ ID NO: 21502 - DNA, 32 bp, Artificial; identical to SEQ ID NO: 8750
  oligonucleotide probe

SEQ ID NO: 21503 - DNA, 32 bp, Artificial; identical to SEQ ID NO: 8751
  oligonucleotide probe

SEQ ID NO: 21504 - DNA, 32 bp, Artificial; identical to SEQ ID NO: 8780
  oligonucleotide probe

SEQ ID NO: 21505 - DNA, 32 bp, Artificial; identical to SEQ ID NO: 8781
  oligonucleotide probe

SEQ ID NO: 21506 - DNA, 32 bp, Artificial; identical to SEQ ID NO: 8784
  oligonucleotide probe

SEQ ID NO: 21507 - DNA, 32 bp, Artificial; identical to SEQ ID NO: 8785
  oligonucleotide probe

SEQ ID NO: 21508 - DNA, 32 bp, Artificial; identical to SEQ ID NO: 8778
  oligonucleotide probe

SEQ ID NO: 21509 - DNA, 32 bp, Artificial; identical to SEQ ID NO: 5564
  oligonucleotide probe

SEQ ID NO: 21510 - DNA, 32 bp, Artificial; identical to SEQ ID NO: 8784
  oligonucleotide probe

SEQ ID NO: 21511 - DNA, 32 bp, Artificial; identical to SEQ ID NO: 8785
  oligonucleotide probe

SEQ ID NO: 21512 - DNA, 32 bp, Artificial; identical to SEQ ID NO: 8760
  oligonucleotide probe

SEQ ID NO: 21513 - DNA, 32 bp, Artificial; identical to SEQ ID NO: 5537
  oligonucleotide probe

SEQ ID NO: 21514 - DNA, 32 bp, Artificial; identical to SEQ ID NO: 8786
  oligonucleotide probe

SEQ ID NO: 21515 - DNA, 32 bp, Artificial; identical to SEQ ID NO: 5585
  oligonucleotide probe

SEQ ID NO: 21516 - DNA, 32 bp, Artificial; identical to SEQ ID NO: 8760
  oligonucleotide probe

SEQ ID NO: 21517 - DNA, 32 bp, Artificial; identical to SEQ ID NO: 5537
  oligonucleotide probe

SEQ ID NO: 21518 - DNA, 32 bp, Artificial; identical to SEQ ID NO: 8804
  oligonucleotide probe

SEQ ID NO: 21519 - DNA, 32 bp, Artificial; identical to SEQ ID NO: 5565
  oligonucleotide probe

SEQ ID NO: 21520 - DNA, 32 bp, Artificial; identical to SEQ ID NO: 5546
  oligonucleotide probe

SEQ ID NO: 21521 - DNA, 32 bp, Artificial; identical to SEQ ID NO: 8757
  oligonucleotide probe

SEQ ID NO: 21522 - DNA, 32 bp, Artificial; identical to SEQ ID NO: 8804
  oligonucleotide probe

SEQ ID NO: 21523 - DNA, 32 bp, Artificial; identical to SEQ ID NO: 5565
  oligonucleotide probe

SEQ ID NO: 21524 - DNA, 32 bp, Artificial; identical to SEQ ID NO: 5546
  oligonucleotide probe

SEQ ID NO: 21525 - DNA, 32 bp, Artificial; identical to SEQ ID NO: 8757
  oligonucleotide probe

SEQ ID NO: 21526 - DNA, 32 bp, Artificial; identical to SEQ ID NO: 8796
  oligonucleotide probe

SEQ ID NO: 21527 - DNA, 32 bp, Artificial; identical to SEQ ID NO: 5538
  oligonucleotide probe

SEQ ID NO: 21528 - DNA, 32 bp, Artificial; identical to SEQ ID NO: 8753
  oligonucleotide probe

SEQ ID NO: 21529 - DNA, 32 bp, Artificial; identical to SEQ ID NO: 8760
  oligonucleotide probe

SEQ ID NO: 21530 - DNA, 32 bp, Artificial; identical to SEQ ID NO: 8834
  oligonucleotide probe

SEQ ID NO: 21531 - DNA, 32 bp, Artificial; identical to SEQ ID NO: 8835
  oligonucleotide probe

SEQ ID NO: 21532 - DNA, 32 bp, Artificial; identical to SEQ ID NO: 8776
  oligonucleotide probe

SEQ ID NO: 21533 - DNA, 32 bp, Artificial; identical to SEQ ID NO: 8777
  oligonucleotide probe

SEQ ID NO: 21534 - DNA, 32 bp, Artificial; identical to SEQ ID NO: 8750
  oligonucleotide probe

SEQ ID NO: 21535 - DNA, 32 bp, Artificial; identical to SEQ ID NO: 8751
  oligonucleotide probe

SEQ ID NO: 21536 - DNA, 32 bp, Artificial; identical to SEQ ID NO: 5547
  oligonucleotide probe

SEQ ID NO: 21537 - DNA, 32 bp, Artificial; identical to SEQ ID NO: 8753
  oligonucleotide probe

SEQ ID NO: 21538 - DNA, 32 bp, Artificial; identical to SEQ ID NO: 9020
  oligonucleotide probe

SEQ ID NO: 21539 - DNA, 32 bp, Artificial; identical to SEQ ID NO: 9021
  oligonucleotide probe

SEQ ID NO: 21540 - DNA, 32 bp, Artificial; identical to SEQ ID NO: 8796
  oligonucleotide probe

SEQ ID NO: 21541 - DNA, 32 bp, Artificial; identical to SEQ ID NO: 5538
  oligonucleotide probe

SEQ ID NO: 21542 - DNA, 32 bp, Artificial; identical to SEQ ID NO: 9020
  oligonucleotide probe

SEQ ID NO: 21543 - DNA, 32 bp, Artificial; identical to SEQ ID NO: 9021
  oligonucleotide probe

SEQ ID NO: 21544 - DNA, 32 bp, Artificial; identical to SEQ ID NO: 5546
  oligonucleotide probe

SEQ ID NO: 21545 - DNA, 32 bp, Artificial; identical to SEQ ID NO: 8757
  oligonucleotide probe

SEQ ID NO: 21546 - DNA, 32 bp, Artificial; identical to SEQ ID NO: 8760
  oligonucleotide probe

SEQ ID NO: 21547 - DNA, 32 bp, Artificial; identical to SEQ ID NO: 5537
  oligonucleotide probe

SEQ ID NO: 21548 - DNA, 32 bp, Artificial; identical to SEQ ID NO: 5546
  oligonucleotide probe

SEQ ID NO: 21549 - DNA, 32 bp, Artificial; identical to SEQ ID NO: 8757
  oligonucleotide probe

SEQ ID NO: 21550 - DNA, 32 bp, Artificial; identical to SEQ ID NO: 8766
  oligonucleotide probe

SEQ ID NO: 21551 - DNA, 32 bp, Artificial; identical to SEQ ID NO: 8767
  oligonucleotide probe

SEQ ID NO: 21552 - DNA, 32 bp, Artificial; identical to SEQ ID NO: 9020
  oligonucleotide probe

SEQ ID NO: 21553 - DNA, 32 bp, Artificial; identical to SEQ ID NO: 9021
  oligonucleotide probe

SEQ ID NO: 21554 - DNA, 32 bp, Artificial; identical to SEQ ID NO: 8780
  oligonucleotide probe

SEQ ID NO: 21555 - DNA, 32 bp, Artificial; identical to SEQ ID NO: 8781
  oligonucleotide probe

SEQ ID NO: 21556 - DNA, 32 bp, Artificial; identical to SEQ ID NO: 8780
  oligonucleotide probe

SEQ ID NO: 21557 - DNA, 32 bp, Artificial; identical to SEQ ID NO: 8781
  oligonucleotide probe

SEQ ID NO: 21558 - DNA, 32 bp, Artificial; identical to SEQ ID NO: 8778
  oligonucleotide probe

SEQ ID NO: 21559 - DNA, 32 bp, Artificial; identical to SEQ ID NO: 5564
  oligonucleotide probe

SEQ ID NO: 21560 - DNA, 32 bp, Artificial; identical to SEQ ID NO: 9020
  oligonucleotide probe

SEQ ID NO: 21561 - DNA, 32 bp, Artificial; identical to SEQ ID NO: 9021
  oligonucleotide probe

SEQ ID NO: 21562 - DNA, 32 bp, Artificial; identical to SEQ ID NO: 8784
  oligonucleotide probe

SEQ ID NO: 21563 - DNA, 32 bp, Artificial; identical to SEQ ID NO: 8785
  oligonucleotide probe

SEQ ID NO: 21564 - DNA, 32 bp, Artificial; identical to SEQ ID NO: 8804
  oligonucleotide probe

SEQ ID NO: 21565 - DNA, 32 bp, Artificial; identical to SEQ ID NO: 5565
  oligonucleotide probe

SEQ ID NO: 21566 - DNA, 32 bp, Artificial; identical to SEQ ID NO: 8786
  oligonucleotide probe

SEQ ID NO: 21567 - DNA, 32 bp, Artificial; identical to SEQ ID NO: 5585
  oligonucleotide probe

SEQ ID NO: 21568 - DNA, 32 bp, Artificial; identical to SEQ ID NO: 8762
  oligonucleotide probe

SEQ ID NO: 21569 - DNA, 32 bp, Artificial; identical to SEQ ID NO: 5539
  oligonucleotide probe

SEQ ID NO: 21570 - DNA, 32 bp, Artificial; identical to SEQ ID NO: 8750
  oligonucleotide probe

SEQ ID NO: 21571 - DNA, 32 bp, Artificial; identical to SEQ ID NO: 8751
  oligonucleotide probe

SEQ ID NO: 21572 - DNA, 32 bp, Artificial; identical to SEQ ID NO: 8750
  oligonucleotide probe

SEQ ID NO: 21573 - DNA, 32 bp, Artificial; identical to SEQ ID NO: 8751
  oligonucleotide probe

SEQ ID NO: 21574 - DNA, 32 bp, Artificial; identical to SEQ ID NO: 8796
  oligonucleotide probe

SEQ ID NO: 21575 - DNA, 32 bp, Artificial; identical to SEQ ID NO: 5538
  oligonucleotide probe

SEQ ID NO: 21576 - DNA, 32 bp, Artificial; identical to SEQ ID NO: 8804
  oligonucleotide probe

SEQ ID NO: 21577 - DNA, 32 bp, Artificial; identical to SEQ ID NO: 5565
  oligonucleotide probe

SEQ ID NO: 21578 - DNA, 32 bp, Artificial; identical to SEQ ID NO: 8762
  oligonucleotide probe

SEQ ID NO: 21579 - DNA, 32 bp, Artificial; identical to SEQ ID NO: 5539
  oligonucleotide probe

SEQ ID NO: 21580 - DNA, 32 bp, Artificial; identical to SEQ ID NO: 8778
  oligonucleotide probe

SEQ ID NO: 21581 - DNA, 32 bp, Artificial; identical to SEQ ID NO: 5564
  oligonucleotide probe

SEQ ID NO: 21582 - DNA, 32 bp, Artificial; identical to SEQ ID NO: 8780
  oligonucleotide probe

SEQ ID NO: 21583 - DNA, 32 bp, Artificial; identical to SEQ ID NO: 8781
  oligonucleotide probe

SEQ ID NO: 21584 - DNA, 32 bp, Artificial; identical to SEQ ID NO: 8762
  oligonucleotide probe

SEQ ID NO: 21585 - DNA, 32 bp, Artificial; identical to SEQ ID NO: 5539
  oligonucleotide probe

SEQ ID NO: 21586 - DNA, 32 bp, Artificial; identical to SEQ ID NO: 5547
  oligonucleotide probe

SEQ ID NO: 21587 - DNA, 32 bp, Artificial; identical to SEQ ID NO: 8753
  oligonucleotide probe

SEQ ID NO: 21588 - DNA, 32 bp, Artificial; identical to SEQ ID NO: 8778
  oligonucleotide probe

SEQ ID NO: 21589 - DNA, 32 bp, Artificial; identical to SEQ ID NO: 5564
  oligonucleotide probe

SEQ ID NO: 21590 - DNA, 32 bp, Artificial; identical to SEQ ID NO: 8804
  oligonucleotide probe

SEQ ID NO: 21591 - DNA, 32 bp, Artificial; identical to SEQ ID NO: 5565
  oligonucleotide probe

SEQ ID NO: 21592 - DNA, 32 bp, Artificial; identical to SEQ ID NO: 8804
  oligonucleotide probe

SEQ ID NO: 21593 - DNA, 32 bp, Artificial; identical to SEQ ID NO: 5565
  oligonucleotide probe

SEQ ID NO: 21594 - DNA, 32 bp, Artificial; identical to SEQ ID NO: 5547
  oligonucleotide probe

SEQ ID NO: 21595 - DNA, 32 bp, Artificial; identical to SEQ ID NO: 8753
  oligonucleotide probe

SEQ ID NO: 21596 - DNA, 32 bp, Artificial; identical to SEQ ID NO: 8804
  oligonucleotide probe

SEQ ID NO: 21597 - DNA, 32 bp, Artificial; identical to SEQ ID NO: 5565
  oligonucleotide probe

SEQ ID NO: 21598 - DNA, 32 bp, Artificial; identical to SEQ ID NO: 8748
  oligonucleotide probe

SEQ ID NO: 21599 - DNA, 32 bp, Artificial; identical to SEQ ID NO: 8749
  oligonucleotide probe

SEQ ID NO: 21600 - DNA, 32 bp, Artificial; identical to SEQ ID NO: 8778
  oligonucleotide probe

SEQ ID NO: 21601 - DNA, 32 bp, Artificial; identical to SEQ ID NO: 5564
  oligonucleotide probe

SEQ ID NO: 21602 - DNA, 32 bp, Artificial; identical to SEQ ID NO: 8786
  oligonucleotide probe

SEQ ID NO: 21603 - DNA, 32 bp, Artificial; identical to SEQ ID NO: 5585
  oligonucleotide probe

SEQ ID NO: 21604 - DNA, 32 bp, Artificial; identical to SEQ ID NO: 5547
  oligonucleotide probe

SEQ ID NO: 21605 - DNA, 32 bp, Artificial; identical to SEQ ID NO: 8753
  oligonucleotide probe

SEQ ID NO: 21606 - DNA, 32 bp, Artificial; identical to SEQ ID NO: 8804
  oligonucleotide probe

SEQ ID NO: 21607 - DNA, 32 bp, Artificial; identical to SEQ ID NO: 5565
  oligonucleotide probe

SEQ ID NO: 21608 - DNA, 32 bp, Artificial; identical to SEQ ID NO: 8784
  oligonucleotide probe

SEQ ID NO: 21609 - DNA, 32 bp, Artificial; identical to SEQ ID NO: 8785
  oligonucleotide probe

SEQ ID NO: 21610 - DNA, 32 bp, Artificial; identical to SEQ ID NO: 8760
  oligonucleotide probe

SEQ ID NO: 21611 - DNA, 32 bp, Artificial; identical to SEQ ID NO: 5537
  oligonucleotide probe

SEQ ID NO: 21612 - DNA, 32 bp, Artificial; identical to SEQ ID NO: 9020
  oligonucleotide probe

SEQ ID NO: 21613 - DNA, 32 bp, Artificial; identical to SEQ ID NO: 9021
  oligonucleotide probe

SEQ ID NO: 21614 - DNA, 32 bp, Artificial; identical to SEQ ID NO: 8753
  oligonucleotide probe

SEQ ID NO: 21615 - DNA, 32 bp, Artificial; identical to SEQ ID NO: 8760
  oligonucleotide probe

SEQ ID NO: 21616 - DNA, 32 bp, Artificial; identical to SEQ ID NO: 8748
  oligonucleotide probe

SEQ ID NO: 21617 - DNA, 32 bp, Artificial; identical to SEQ ID NO: 8749
  oligonucleotide probe

SEQ ID NO: 21618 - DNA, 32 bp, Artificial; identical to SEQ ID NO: 8780
  oligonucleotide probe

SEQ ID NO: 21619 - DNA, 32 bp, Artificial; identical to SEQ ID NO: 8781
  oligonucleotide probe

SEQ ID NO: 21620 - DNA, 32 bp, Artificial; identical to SEQ ID NO: 8784
  oligonucleotide probe

SEQ ID NO: 21621 - DNA, 32 bp, Artificial; identical to SEQ ID NO: 8785
  oligonucleotide probe

SEQ ID NO: 21622 - DNA, 32 bp, Artificial; identical to SEQ ID NO: 9252
  oligonucleotide probe

SEQ ID NO: 21623 - DNA, 32 bp, Artificial; identical to SEQ ID NO: 9253
  oligonucleotide probe

SEQ ID NO: 21624 - DNA, 32 bp, Artificial; identical to SEQ ID NO: 8762
  oligonucleotide probe

SEQ ID NO: 21625 - DNA, 32 bp, Artificial; identical to SEQ ID NO: 5539
  oligonucleotide probe

SEQ ID NO: 21626 - DNA, 32 bp, Artificial; identical to SEQ ID NO: 8804
  oligonucleotide probe

SEQ ID NO: 21627 - DNA, 32 bp, Artificial; identical to SEQ ID NO: 5565
  oligonucleotide probe

SEQ ID NO: 21628 - DNA, 32 bp, Artificial; identical to SEQ ID NO: 8834
  oligonucleotide probe

SEQ ID NO: 21629 - DNA, 32 bp, Artificial; identical to SEQ ID NO: 8835
  oligonucleotide probe

SEQ ID NO: 21630 - DNA, 32 bp, Artificial; identical to SEQ ID NO: 9252
  oligonucleotide probe

SEQ ID NO: 21631 - DNA, 32 bp, Artificial; identical to SEQ ID NO: 9253
  oligonucleotide probe

SEQ ID NO: 21632 - DNA, 32 bp, Artificial; identical to SEQ ID NO: 5546
  oligonucleotide probe

SEQ ID NO: 21633 - DNA, 32 bp, Artificial; identical to SEQ ID NO: 8757
  oligonucleotide probe

SEQ ID NO: 21634 - DNA, 32 bp, Artificial; identical to SEQ ID NO: 8784
  oligonucleotide probe

SEQ ID NO: 21635 - DNA, 32 bp, Artificial; identical to SEQ ID NO: 8785
  oligonucleotide probe

SEQ ID NO: 21636 - DNA, 32 bp, Artificial; identical to SEQ ID NO: 8753
  oligonucleotide probe

SEQ ID NO: 21637 - DNA, 32 bp, Artificial; identical to SEQ ID NO: 8760
  oligonucleotide probe

SEQ ID NO: 21638 - DNA, 32 bp, Artificial; identical to SEQ ID NO: 8780
  oligonucleotide probe

SEQ ID NO: 21639 - DNA, 32 bp, Artificial; identical to SEQ ID NO: 8781
  oligonucleotide probe

SEQ ID NO: 21640 - DNA, 32 bp, Artificial; identical to SEQ ID NO: 8760
  oligonucleotide probe

SEQ ID NO: 21641 - DNA, 32 bp, Artificial; identical to SEQ ID NO: 5537
  oligonucleotide probe

SEQ ID NO: 21642 - DNA, 32 bp, Artificial; identical to SEQ ID NO: 5547
  oligonucleotide probe

SEQ ID NO: 21643 - DNA, 32 bp, Artificial; identical to SEQ ID NO: 8753
  oligonucleotide probe

SEQ ID NO: 21644 - DNA, 32 bp, Artificial; identical to SEQ ID NO: 8776
  oligonucleotide probe

SEQ ID NO: 21645 - DNA, 32 bp, Artificial; identical to SEQ ID NO: 8777
  oligonucleotide probe

SEQ ID NO: 21646 - DNA, 32 bp, Artificial; identical to SEQ ID NO: 8778
  oligonucleotide probe

SEQ ID NO: 21647 - DNA, 32 bp, Artificial; identical to SEQ ID NO: 5564
  oligonucleotide probe

SEQ ID NO: 21648 - DNA, 32 bp, Artificial; identical to SEQ ID NO: 8780
  oligonucleotide probe

SEQ ID NO: 21649 - DNA, 32 bp, Artificial; identical to SEQ ID NO: 8781
  oligonucleotide probe

SEQ ID NO: 21650 - DNA, 32 bp, Artificial; identical to SEQ ID NO: 8796
  oligonucleotide probe

SEQ ID NO: 21651 - DNA, 32 bp, Artificial; identical to SEQ ID NO: 5538
  oligonucleotide probe

SEQ ID NO: 21652 - DNA, 32 bp, Artificial; identical to SEQ ID NO: 8780
  oligonucleotide probe

SEQ ID NO: 21653 - DNA, 32 bp, Artificial; identical to SEQ ID NO: 8781
  oligonucleotide probe

SEQ ID NO: 21654 - DNA, 32 bp, Artificial; identical to SEQ ID NO: 8868
  oligonucleotide probe

SEQ ID NO: 21655 - DNA, 32 bp, Artificial; identical to SEQ ID NO: 5584
  oligonucleotide probe

SEQ ID NO: 21656 - DNA, 32 bp, Artificial; identical to SEQ ID NO: 5546
  oligonucleotide probe

SEQ ID NO: 21657 - DNA, 32 bp, Artificial; identical to SEQ ID NO: 8757
  oligonucleotide probe

SEQ ID NO: 21658 - DNA, 32 bp, Artificial; identical to SEQ ID NO: 8776
  oligonucleotide probe

SEQ ID NO: 21659 - DNA, 32 bp, Artificial; identical to SEQ ID NO: 8777
  oligonucleotide probe

SEQ ID NO: 21660 - DNA, 32 bp, Artificial; identical to SEQ ID NO: 8780
  oligonucleotide probe

SEQ ID NO: 21661 - DNA, 32 bp, Artificial; identical to SEQ ID NO: 8781
  oligonucleotide probe

SEQ ID NO: 21662 - DNA, 32 bp, Artificial; identical to SEQ ID NO: 8750
  oligonucleotide probe

SEQ ID NO: 21663 - DNA, 32 bp, Artificial; identical to SEQ ID NO: 8751
  oligonucleotide probe

SEQ ID NO: 21664 - DNA, 32 bp, Artificial; identical to SEQ ID NO: 8780
  oligonucleotide probe

SEQ ID NO: 21665 - DNA, 32 bp, Artificial; identical to SEQ ID NO: 8781
  oligonucleotide probe

SEQ ID NO: 21666 - DNA, 32 bp, Artificial; identical to SEQ ID NO: 8753
  oligonucleotide probe

SEQ ID NO: 21667 - DNA, 32 bp, Artificial; identical to SEQ ID NO: 8760
  oligonucleotide probe

SEQ ID NO: 21668 - DNA, 32 bp, Artificial; identical to SEQ ID NO: 8784
  oligonucleotide probe

SEQ ID NO: 21669 - DNA, 32 bp, Artificial; identical to SEQ ID NO: 8785
  oligonucleotide probe

SEQ ID NO: 21670 - DNA, 32 bp, Artificial; identical to SEQ ID NO: 8784
  oligonucleotide probe

SEQ ID NO: 21671 - DNA, 32 bp, Artificial; identical to SEQ ID NO: 8785
  oligonucleotide probe

SEQ ID NO: 21672 - DNA, 32 bp, Artificial; identical to SEQ ID NO: 8834
  oligonucleotide probe

SEQ ID NO: 21673 - DNA, 32 bp, Artificial; identical to SEQ ID NO: 8835
  oligonucleotide probe

SEQ ID NO: 21674 - DNA, 32 bp, Artificial; identical to SEQ ID NO: 8780
  oligonucleotide probe

SEQ ID NO: 21675 - DNA, 32 bp, Artificial; identical to SEQ ID NO: 8781
  oligonucleotide probe

SEQ ID NO: 21676 - DNA, 32 bp, Artificial; identical to SEQ ID NO: 8762
  oligonucleotide probe

SEQ ID NO: 21677 - DNA, 32 bp, Artificial; identical to SEQ ID NO: 5539
  oligonucleotide probe

SEQ ID NO: 21678 - DNA, 32 bp, Artificial; identical to SEQ ID NO: 8753
  oligonucleotide probe

SEQ ID NO: 21679 - DNA, 32 bp, Artificial; identical to SEQ ID NO: 8760
  oligonucleotide probe

SEQ ID NO: 21680 - DNA, 32 bp, Artificial; identical to SEQ ID NO: 8776
  oligonucleotide probe

SEQ ID NO: 21681 - DNA, 32 bp, Artificial; identical to SEQ ID NO: 8777
  oligonucleotide probe

SEQ ID NO: 21682 - DNA, 32 bp, Artificial; identical to SEQ ID NO: 5547
  oligonucleotide probe

SEQ ID NO: 21683 - DNA, 32 bp, Artificial; identical to SEQ ID NO: 8753
  oligonucleotide probe

SEQ ID NO: 21684 - DNA, 32 bp, Artificial; identical to SEQ ID NO: 9314
  oligonucleotide probe

SEQ ID NO: 21685 - DNA, 32 bp, Artificial; identical to SEQ ID NO: 9315
  oligonucleotide probe

SEQ ID NO: 21686 - DNA, 32 bp, Artificial; identical to SEQ ID NO: 8804
  oligonucleotide probe

SEQ ID NO: 21687 - DNA, 32 bp, Artificial; identical to SEQ ID NO: 5565
  oligonucleotide probe

SEQ ID NO: 21688 - DNA, 32 bp, Artificial; identical to SEQ ID NO: 5546
  oligonucleotide probe

SEQ ID NO: 21689 - DNA, 32 bp, Artificial; identical to SEQ ID NO: 8757
  oligonucleotide probe

SEQ ID NO: 21690 - DNA, 32 bp, Artificial; identical to SEQ ID NO: 8804
  oligonucleotide probe

SEQ ID NO: 21691 - DNA, 32 bp, Artificial; identical to SEQ ID NO: 5565
  oligonucleotide probe

SEQ ID NO: 21692 - DNA, 32 bp, Artificial; identical to SEQ ID NO: 5546
  oligonucleotide probe

SEQ ID NO: 21693 - DNA, 32 bp, Artificial; identical to SEQ ID NO: 8757
  oligonucleotide probe

SEQ ID NO: 21694 - DNA, 32 bp, Artificial; identical to SEQ ID NO: 5547
  oligonucleotide probe

SEQ ID NO: 21695 - DNA, 32 bp, Artificial; identical to SEQ ID NO: 8753
  oligonucleotide probe

SEQ ID NO: 21696 - DNA, 32 bp, Artificial; identical to SEQ ID NO: 8776
  oligonucleotide probe

SEQ ID NO: 21697 - DNA, 32 bp, Artificial; identical to SEQ ID NO: 8777
  oligonucleotide probe

SEQ ID NO: 21698 - DNA, 32 bp, Artificial; identical to SEQ ID NO: 8762
  oligonucleotide probe

SEQ ID NO: 21699 - DNA, 32 bp, Artificial; identical to SEQ ID NO: 5539
  oligonucleotide probe

SEQ ID NO: 21700 - DNA, 32 bp, Artificial; identical to SEQ ID NO: 9020
  oligonucleotide probe

SEQ ID NO: 21701 - DNA, 32 bp, Artificial; identical to SEQ ID NO: 9021
  oligonucleotide probe

SEQ ID NO: 21702 - DNA, 32 bp, Artificial; identical to SEQ ID NO: 5546
  oligonucleotide probe

SEQ ID NO: 21703 - DNA, 32 bp, Artificial; identical to SEQ ID NO: 8757
  oligonucleotide probe

SEQ ID NO: 21704 - DNA, 32 bp, Artificial; identical to SEQ ID NO: 8776
  oligonucleotide probe

SEQ ID NO: 21705 - DNA, 32 bp, Artificial; identical to SEQ ID NO: 8777
  oligonucleotide probe

SEQ ID NO: 21706 - DNA, 32 bp, Artificial; identical to SEQ ID NO: 8804
  oligonucleotide probe

SEQ ID NO: 21707 - DNA, 32 bp, Artificial; identical to SEQ ID NO: 5565
  oligonucleotide probe

SEQ ID NO: 21708 - DNA, 32 bp, Artificial; identical to SEQ ID NO: 5547
  oligonucleotide probe

SEQ ID NO: 21709 - DNA, 32 bp, Artificial; identical to SEQ ID NO: 8753
  oligonucleotide probe

SEQ ID NO: 21710 - DNA, 32 bp, Artificial; identical to SEQ ID NO: 5546
  oligonucleotide probe

SEQ ID NO: 21711 - DNA, 32 bp, Artificial; identical to SEQ ID NO: 8757
  oligonucleotide probe

SEQ ID NO: 21712 - DNA, 32 bp, Artificial; identical to SEQ ID NO: 8780
  oligonucleotide probe

SEQ ID NO: 21713 - DNA, 32 bp, Artificial; identical to SEQ ID NO: 8781
  oligonucleotide probe

SEQ ID NO: 21714 - DNA, 32 bp, Artificial; identical to SEQ ID NO: 8778
  oligonucleotide probe

SEQ ID NO: 21715 - DNA, 32 bp, Artificial; identical to SEQ ID NO: 5564
  oligonucleotide probe

SEQ ID NO: 21716 - DNA, 32 bp, Artificial; identical to SEQ ID NO: 5546
  oligonucleotide probe

SEQ ID NO: 21717 - DNA, 32 bp, Artificial; identical to SEQ ID NO: 8757
  oligonucleotide probe

SEQ ID NO: 21718 - DNA, 32 bp, Artificial; identical to SEQ ID NO: 5546
  oligonucleotide probe

SEQ ID NO: 21719 - DNA, 32 bp, Artificial; identical to SEQ ID NO: 8757
  oligonucleotide probe

SEQ ID NO: 21720 - DNA, 32 bp, Artificial; identical to SEQ ID NO: 5547
  oligonucleotide probe

SEQ ID NO: 21721 - DNA, 32 bp, Artificial; identical to SEQ ID NO: 8753
  oligonucleotide probe

SEQ ID NO: 21722 - DNA, 32 bp, Artificial; identical to SEQ ID NO: 8780
  oligonucleotide probe

SEQ ID NO: 21723 - DNA, 32 bp, Artificial; identical to SEQ ID NO: 8781
  oligonucleotide probe

SEQ ID NO: 21724 - DNA, 32 bp, Artificial; identical to SEQ ID NO: 8760
  oligonucleotide probe

SEQ ID NO: 21725 - DNA, 32 bp, Artificial; identical to SEQ ID NO: 5537
  oligonucleotide probe

SEQ ID NO: 21726 - DNA, 32 bp, Artificial; identical to SEQ ID NO: 8804
  oligonucleotide probe

SEQ ID NO: 21727 - DNA, 32 bp, Artificial; identical to SEQ ID NO: 5565
  oligonucleotide probe

SEQ ID NO: 21728 - DNA, 32 bp, Artificial; identical to SEQ ID NO: 8780
  oligonucleotide probe

SEQ ID NO: 21729 - DNA, 32 bp, Artificial; identical to SEQ ID NO: 8781
  oligonucleotide probe

SEQ ID NO: 21730 - DNA, 32 bp, Artificial; identical to SEQ ID NO: 5546
  oligonucleotide probe

SEQ ID NO: 21731 - DNA, 32 bp, Artificial; identical to SEQ ID NO: 8757
  oligonucleotide probe

SEQ ID NO: 21732 - DNA, 32 bp, Artificial; identical to SEQ ID NO: 8780
  oligonucleotide probe

SEQ ID NO: 21733 - DNA, 32 bp, Artificial; identical to SEQ ID NO: 8781
  oligonucleotide probe

SEQ ID NO: 21734 - DNA, 32 bp, Artificial; identical to SEQ ID NO: 8776
  oligonucleotide probe

SEQ ID NO: 21735 - DNA, 32 bp, Artificial; identical to SEQ ID NO: 8777
  oligonucleotide probe

SEQ ID NO: 21736 - DNA, 32 bp, Artificial; identical to SEQ ID NO: 8796
  oligonucleotide probe

SEQ ID NO: 21737 - DNA, 32 bp, Artificial; identical to SEQ ID NO: 5538
  oligonucleotide probe

SEQ ID NO: 21738 - DNA, 32 bp, Artificial; identical to SEQ ID NO: 8786
  oligonucleotide probe

SEQ ID NO: 21739 - DNA, 32 bp, Artificial; identical to SEQ ID NO: 5585
  oligonucleotide probe

SEQ ID NO: 21740 - DNA, 32 bp, Artificial; identical to SEQ ID NO: 5546
  oligonucleotide probe

SEQ ID NO: 21741 - DNA, 32 bp, Artificial; identical to SEQ ID NO: 8757
  oligonucleotide probe

SEQ ID NO: 21742 - DNA, 32 bp, Artificial; identical to SEQ ID NO: 5546
  oligonucleotide probe

SEQ ID NO: 21743 - DNA, 32 bp, Artificial; identical to SEQ ID NO: 8757
  oligonucleotide probe

SEQ ID NO: 21744 - DNA, 32 bp, Artificial; identical to SEQ ID NO: 5547
  oligonucleotide probe

SEQ ID NO: 21745 - DNA, 32 bp, Artificial; identical to SEQ ID NO: 8753
  oligonucleotide probe

SEQ ID NO: 21746 - DNA, 32 bp, Artificial; identical to SEQ ID NO: 5547
  oligonucleotide probe

SEQ ID NO: 21747 - DNA, 32 bp, Artificial; identical to SEQ ID NO: 8753
  oligonucleotide probe

SEQ ID NO: 21748 - DNA, 32 bp, Artificial; identical to SEQ ID NO: 8760
  oligonucleotide probe

SEQ ID NO: 21749 - DNA, 32 bp, Artificial; identical to SEQ ID NO: 5537
  oligonucleotide probe

SEQ ID NO: 21750 - DNA, 32 bp, Artificial; identical to SEQ ID NO: 8804
  oligonucleotide probe

SEQ ID NO: 21751 - DNA, 32 bp, Artificial; identical to SEQ ID NO: 5565
  oligonucleotide probe

SEQ ID NO: 21752 - DNA, 32 bp, Artificial; identical to SEQ ID NO: 8778
  oligonucleotide probe

SEQ ID NO: 21753 - DNA, 32 bp, Artificial; identical to SEQ ID NO: 5564
  oligonucleotide probe

SEQ ID NO: 21754 - DNA, 32 bp, Artificial; identical to SEQ ID NO: 8760
  oligonucleotide probe

SEQ ID NO: 21755 - DNA, 32 bp, Artificial; identical to SEQ ID NO: 5537
  oligonucleotide probe

SEQ ID NO: 21756 - DNA, 32 bp, Artificial; identical to SEQ ID NO: 5546
  oligonucleotide probe

SEQ ID NO: 21757 - DNA, 32 bp, Artificial; identical to SEQ ID NO: 8757
  oligonucleotide probe

SEQ ID NO: 21758 - DNA, 32 bp, Artificial; identical to SEQ ID NO: 8784
  oligonucleotide probe

SEQ ID NO: 21759 - DNA, 32 bp, Artificial; identical to SEQ ID NO: 8785
  oligonucleotide probe

SEQ ID NO: 21760 - DNA, 32 bp, Artificial; identical to SEQ ID NO: 8784
  oligonucleotide probe

SEQ ID NO: 21761 - DNA, 32 bp, Artificial; identical to SEQ ID NO: 8785
  oligonucleotide probe

SEQ ID NO: 21762 - DNA, 32 bp, Artificial; identical to SEQ ID NO: 8760
  oligonucleotide probe

SEQ ID NO: 21763 - DNA, 32 bp, Artificial; identical to SEQ ID NO: 5537
  oligonucleotide probe

SEQ ID NO: 21764 - DNA, 32 bp, Artificial; identical to SEQ ID NO: 8796
  oligonucleotide probe

SEQ ID NO: 21765 - DNA, 32 bp, Artificial; identical to SEQ ID NO: 5538
  oligonucleotide probe

SEQ ID NO: 21766 - DNA, 32 bp, Artificial; identical to SEQ ID NO: 5547
  oligonucleotide probe

SEQ ID NO: 21767 - DNA, 32 bp, Artificial; identical to SEQ ID NO: 8753
  oligonucleotide probe

SEQ ID NO: 21768 - DNA, 32 bp, Artificial; identical to SEQ ID NO: 8748
  oligonucleotide probe

SEQ ID NO: 21769 - DNA, 32 bp, Artificial; identical to SEQ ID NO: 8749
  oligonucleotide probe

SEQ ID NO: 21770 - DNA, 32 bp, Artificial; identical to SEQ ID NO: 5546
  oligonucleotide probe

SEQ ID NO: 21771 - DNA, 32 bp, Artificial; identical to SEQ ID NO: 8757
  oligonucleotide probe

SEQ ID NO: 21772 - DNA, 32 bp, Artificial; identical to SEQ ID NO: 8762
  oligonucleotide probe

SEQ ID NO: 21773 - DNA, 32 bp, Artificial; identical to SEQ ID NO: 5539
  oligonucleotide probe

SEQ ID NO: 21774 - DNA, 32 bp, Artificial; identical to SEQ ID NO: 5547
  oligonucleotide probe

SEQ ID NO: 21775 - DNA, 32 bp, Artificial; identical to SEQ ID NO: 8753
  oligonucleotide probe

SEQ ID NO: 21776 - DNA, 32 bp, Artificial; identical to SEQ ID NO: 8776
  oligonucleotide probe

SEQ ID NO: 21777 - DNA, 32 bp, Artificial; identical to SEQ ID NO: 8777
  oligonucleotide probe

SEQ ID NO: 21778 - DNA, 32 bp, Artificial; identical to SEQ ID NO: 8750
  oligonucleotide probe

SEQ ID NO: 21779 - DNA, 32 bp, Artificial; identical to SEQ ID NO: 8751
  oligonucleotide probe

SEQ ID NO: 21780 - DNA, 32 bp, Artificial; identical to SEQ ID NO: 8766
  oligonucleotide probe

SEQ ID NO: 21781 - DNA, 32 bp, Artificial; identical to SEQ ID NO: 8767
  oligonucleotide probe

SEQ ID NO: 21782 - DNA, 32 bp, Artificial; identical to SEQ ID NO: 8776
  oligonucleotide probe

SEQ ID NO: 21783 - DNA, 32 bp, Artificial; identical to SEQ ID NO: 8777
  oligonucleotide probe

SEQ ID NO: 21784 - DNA, 32 bp, Artificial; identical to SEQ ID NO: 5547
  oligonucleotide probe

SEQ ID NO: 21785 - DNA, 32 bp, Artificial; identical to SEQ ID NO: 8753
  oligonucleotide probe

SEQ ID NO: 21786 - DNA, 32 bp, Artificial; identical to SEQ ID NO: 8796
  oligonucleotide probe

SEQ ID NO: 21787 - DNA, 32 bp, Artificial; identical to SEQ ID NO: 5538
  oligonucleotide probe

SEQ ID NO: 21788 - DNA, 32 bp, Artificial; identical to SEQ ID NO: 8784
  oligonucleotide probe

SEQ ID NO: 21789 - DNA, 32 bp, Artificial; identical to SEQ ID NO: 8785
  oligonucleotide probe

SEQ ID NO: 21790 - DNA, 32 bp, Artificial; identical to SEQ ID NO: 8748
  oligonucleotide probe

SEQ ID NO: 21791 - DNA, 32 bp, Artificial; identical to SEQ ID NO: 8749
  oligonucleotide probe

SEQ ID NO: 21792 - DNA, 32 bp, Artificial; identical to SEQ ID NO: 8748
  oligonucleotide probe

SEQ ID NO: 21793 - DNA, 32 bp, Artificial; identical to SEQ ID NO: 8749
  oligonucleotide probe

SEQ ID NO: 21794 - DNA, 32 bp, Artificial; identical to SEQ ID NO: 8760
  oligonucleotide probe

SEQ ID NO: 21795 - DNA, 32 bp, Artificial; identical to SEQ ID NO: 5537
  oligonucleotide probe

SEQ ID NO: 21796 - DNA, 32 bp, Artificial; identical to SEQ ID NO: 8762
  oligonucleotide probe

SEQ ID NO: 21797 - DNA, 32 bp, Artificial; identical to SEQ ID NO: 5539
  oligonucleotide probe

SEQ ID NO: 21798 - DNA, 32 bp, Artificial; identical to SEQ ID NO: 8776
  oligonucleotide probe

SEQ ID NO: 21799 - DNA, 32 bp, Artificial; identical to SEQ ID NO: 8777
  oligonucleotide probe

SEQ ID NO: 21800 - DNA, 32 bp, Artificial; identical to SEQ ID NO: 8868
  oligonucleotide probe

SEQ ID NO: 21801 - DNA, 32 bp, Artificial; identical to SEQ ID NO: 5584
  oligonucleotide probe

SEQ ID NO: 21802 - DNA, 32 bp, Artificial; identical to SEQ ID NO: 8786
  oligonucleotide probe

SEQ ID NO: 21803 - DNA, 32 bp, Artificial; identical to SEQ ID NO: 5585
  oligonucleotide probe

SEQ ID NO: 21804 - DNA, 32 bp, Artificial; identical to SEQ ID NO: 8784
  oligonucleotide probe

SEQ ID NO: 21805 - DNA, 32 bp, Artificial; identical to SEQ ID NO: 8785
  oligonucleotide probe

SEQ ID NO: 21806 - DNA, 32 bp, Artificial; identical to SEQ ID NO: 8786
  oligonucleotide probe

SEQ ID NO: 21807 - DNA, 32 bp, Artificial; identical to SEQ ID NO: 5585
  oligonucleotide probe

SEQ ID NO: 21808 - DNA, 32 bp, Artificial; identical to SEQ ID NO: 8936
  oligonucleotide probe

SEQ ID NO: 21809 - DNA, 32 bp, Artificial; identical to SEQ ID NO: 5595
  oligonucleotide probe

SEQ ID NO: 21810 - DNA, 32 bp, Artificial; identical to SEQ ID NO: 8776
  oligonucleotide probe

SEQ ID NO: 21811 - DNA, 32 bp, Artificial; identical to SEQ ID NO: 8777
  oligonucleotide probe

SEQ ID NO: 21812 - DNA, 32 bp, Artificial; identical to SEQ ID NO: 8784
  oligonucleotide probe

SEQ ID NO: 21813 - DNA, 32 bp, Artificial; identical to SEQ ID NO: 8785
  oligonucleotide probe

SEQ ID NO: 21814 - DNA, 32 bp, Artificial; identical to SEQ ID NO: 8868
  oligonucleotide probe

SEQ ID NO: 21815 - DNA, 32 bp, Artificial; identical to SEQ ID NO: 5584
  oligonucleotide probe

SEQ ID NO: 21816 - DNA, 32 bp, Artificial; identical to SEQ ID NO: 8778
  oligonucleotide probe

SEQ ID NO: 21817 - DNA, 32 bp, Artificial; identical to SEQ ID NO: 5564
  oligonucleotide probe

SEQ ID NO: 21818 - DNA, 32 bp, Artificial; identical to SEQ ID NO: 8766
  oligonucleotide probe

SEQ ID NO: 21819 - DNA, 32 bp, Artificial; identical to SEQ ID NO: 8767
  oligonucleotide probe

SEQ ID NO: 21820 - DNA, 32 bp, Artificial; identical to SEQ ID NO: 8804
  oligonucleotide probe

SEQ ID NO: 21821 - DNA, 32 bp, Artificial; identical to SEQ ID NO: 5565
  oligonucleotide probe

SEQ ID NO: 21822 - DNA, 32 bp, Artificial; identical to SEQ ID NO: 8762
  oligonucleotide probe

SEQ ID NO: 21823 - DNA, 32 bp, Artificial; identical to SEQ ID NO: 5539
  oligonucleotide probe

SEQ ID NO: 21824 - DNA, 32 bp, Artificial; identical to SEQ ID NO: 5547
  oligonucleotide probe

SEQ ID NO: 21825 - DNA, 32 bp, Artificial; identical to SEQ ID NO: 8753
  oligonucleotide probe

SEQ ID NO: 21826 - DNA, 32 bp, Artificial; identical to SEQ ID NO: 5546
  oligonucleotide probe

SEQ ID NO: 21827 - DNA, 32 bp, Artificial; identical to SEQ ID NO: 8757
  oligonucleotide probe

SEQ ID NO: 21828 - DNA, 32 bp, Artificial; identical to SEQ ID NO: 8778
  oligonucleotide probe

SEQ ID NO: 21829 - DNA, 32 bp, Artificial; identical to SEQ ID NO: 5564
  oligonucleotide probe

SEQ ID NO: 21830 - DNA, 32 bp, Artificial; identical to SEQ ID NO: 5546
  oligonucleotide probe

SEQ ID NO: 21831 - DNA, 32 bp, Artificial; identical to SEQ ID NO: 8757
  oligonucleotide probe

SEQ ID NO: 21832 - DNA, 32 bp, Artificial; identical to SEQ ID NO: 9020
  oligonucleotide probe

SEQ ID NO: 21833 - DNA, 32 bp, Artificial; identical to SEQ ID NO: 9021
  oligonucleotide probe

SEQ ID NO: 21834 - DNA, 32 bp, Artificial; identical to SEQ ID NO: 8776
  oligonucleotide probe

SEQ ID NO: 21835 - DNA, 32 bp, Artificial; identical to SEQ ID NO: 8777
  oligonucleotide probe

SEQ ID NO: 21836 - DNA, 32 bp, Artificial; identical to SEQ ID NO: 9038
  oligonucleotide probe

SEQ ID NO: 21837 - DNA, 32 bp, Artificial; identical to SEQ ID NO: 5594
  oligonucleotide probe

SEQ ID NO: 21838 - DNA, 32 bp, Artificial; identical to SEQ ID NO: 9020
  oligonucleotide probe

SEQ ID NO: 21839 - DNA, 32 bp, Artificial; identical to SEQ ID NO: 9021
  oligonucleotide probe

SEQ ID NO: 21840 - DNA, 32 bp, Artificial; identical to SEQ ID NO: 5547
  oligonucleotide probe

SEQ ID NO: 21841 - DNA, 32 bp, Artificial; identical to SEQ ID NO: 8753
  oligonucleotide probe

SEQ ID NO: 21842 - DNA, 32 bp, Artificial; identical to SEQ ID NO: 5547
  oligonucleotide probe

SEQ ID NO: 21843 - DNA, 32 bp, Artificial; identical to SEQ ID NO: 8753
  oligonucleotide probe

SEQ ID NO: 21844 - DNA, 32 bp, Artificial; identical to SEQ ID NO: 8776
  oligonucleotide probe

SEQ ID NO: 21845 - DNA, 32 bp, Artificial; identical to SEQ ID NO: 8777
  oligonucleotide probe

SEQ ID NO: 21846 - DNA, 32 bp, Artificial; identical to SEQ ID NO: 8804
  oligonucleotide probe

SEQ ID NO: 21847 - DNA, 32 bp, Artificial; identical to SEQ ID NO: 5565
  oligonucleotide probe

SEQ ID NO: 21848 - DNA, 32 bp, Artificial; identical to SEQ ID NO: 8762
  oligonucleotide probe

SEQ ID NO: 21849 - DNA, 32 bp, Artificial; identical to SEQ ID NO: 5539
  oligonucleotide probe

SEQ ID NO: 21850 - DNA, 32 bp, Artificial; identical to SEQ ID NO: 5546
  oligonucleotide probe

SEQ ID NO: 21851 - DNA, 32 bp, Artificial; identical to SEQ ID NO: 8757
  oligonucleotide probe

SEQ ID NO: 21852 - DNA, 32 bp, Artificial; identical to SEQ ID NO: 8804
  oligonucleotide probe

SEQ ID NO: 21853 - DNA, 32 bp, Artificial; identical to SEQ ID NO: 5565
  oligonucleotide probe

SEQ ID NO: 21854 - DNA, 32 bp, Artificial; identical to SEQ ID NO: 8760
  oligonucleotide probe

SEQ ID NO: 21855 - DNA, 32 bp, Artificial; identical to SEQ ID NO: 5537
  oligonucleotide probe

SEQ ID NO: 21856 - DNA, 32 bp, Artificial; identical to SEQ ID NO: 8750
  oligonucleotide probe

SEQ ID NO: 21857 - DNA, 32 bp, Artificial; identical to SEQ ID NO: 8751
  oligonucleotide probe

SEQ ID NO: 21858 - DNA, 32 bp, Artificial; identical to SEQ ID NO: 8776
  oligonucleotide probe

SEQ ID NO: 21859 - DNA, 32 bp, Artificial; identical to SEQ ID NO: 8777
  oligonucleotide probe

SEQ ID NO: 21860 - DNA, 32 bp, Artificial; identical to SEQ ID NO: 8760
  oligonucleotide probe

SEQ ID NO: 21861 - DNA, 32 bp, Artificial; identical to SEQ ID NO: 5537
  oligonucleotide probe

SEQ ID NO: 21862 - DNA, 32 bp, Artificial; identical to SEQ ID NO: 8868
  oligonucleotide probe

SEQ ID NO: 21863 - DNA, 32 bp, Artificial; identical to SEQ ID NO: 5584
  oligonucleotide probe

SEQ ID NO: 21864 - DNA, 32 bp, Artificial; identical to SEQ ID NO: 8780
  oligonucleotide probe

SEQ ID NO: 21865 - DNA, 32 bp, Artificial; identical to SEQ ID NO: 8781
  oligonucleotide probe

SEQ ID NO: 21866 - DNA, 32 bp, Artificial; identical to SEQ ID NO: 5546
  oligonucleotide probe

SEQ ID NO: 21867 - DNA, 32 bp, Artificial; identical to SEQ ID NO: 8757
  oligonucleotide probe

SEQ ID NO: 21868 - DNA, 32 bp, Artificial; identical to SEQ ID NO: 5546
  oligonucleotide probe

SEQ ID NO: 21869 - DNA, 32 bp, Artificial; identical to SEQ ID NO: 8757
  oligonucleotide probe

SEQ ID NO: 21870 - DNA, 32 bp, Artificial; identical to SEQ ID NO: 8780
  oligonucleotide probe

SEQ ID NO: 21871 - DNA, 32 bp, Artificial; identical to SEQ ID NO: 8781
  oligonucleotide probe

SEQ ID NO: 21872 - DNA, 32 bp, Artificial; identical to SEQ ID NO: 8780
  oligonucleotide probe

SEQ ID NO: 21873 - DNA, 32 bp, Artificial; identical to SEQ ID NO: 8781
  oligonucleotide probe

SEQ ID NO: 21874 - DNA, 32 bp, Artificial; identical to SEQ ID NO: 8760
  oligonucleotide probe

SEQ ID NO: 21875 - DNA, 32 bp, Artificial; identical to SEQ ID NO: 5537
  oligonucleotide probe

SEQ ID NO: 21876 - DNA, 32 bp, Artificial; identical to SEQ ID NO: 8778
  oligonucleotide probe

SEQ ID NO: 21877 - DNA, 32 bp, Artificial; identical to SEQ ID NO: 5564
  oligonucleotide probe

SEQ ID NO: 21878 - DNA, 32 bp, Artificial; identical to SEQ ID NO: 5546
  oligonucleotide probe

SEQ ID NO: 21879 - DNA, 32 bp, Artificial; identical to SEQ ID NO: 8757
  oligonucleotide probe

SEQ ID NO: 21880 - DNA, 32 bp, Artificial; identical to SEQ ID NO: 5546
  oligonucleotide probe

SEQ ID NO: 21881 - DNA, 32 bp, Artificial; identical to SEQ ID NO: 8757
  oligonucleotide probe

SEQ ID NO: 21882 - DNA, 32 bp, Artificial; identical to SEQ ID NO: 5547
  oligonucleotide probe

SEQ ID NO: 21883 - DNA, 32 bp, Artificial; identical to SEQ ID NO: 8753
  oligonucleotide probe

SEQ ID NO: 21884 - DNA, 32 bp, Artificial; identical to SEQ ID NO: 8776
  oligonucleotide probe

SEQ ID NO: 21885 - DNA, 32 bp, Artificial; identical to SEQ ID NO: 8777
  oligonucleotide probe

SEQ ID NO: 21886 - DNA, 32 bp, Artificial; identical to SEQ ID NO: 8804
  oligonucleotide probe

SEQ ID NO: 21887 - DNA, 32 bp, Artificial; identical to SEQ ID NO: 5565
  oligonucleotide probe

SEQ ID NO: 21888 - DNA, 32 bp, Artificial; identical to SEQ ID NO: 8784
  oligonucleotide probe

SEQ ID NO: 21889 - DNA, 32 bp, Artificial; identical to SEQ ID NO: 8785
  oligonucleotide probe

SEQ ID NO: 21890 - DNA, 32 bp, Artificial; identical to SEQ ID NO: 9252
  oligonucleotide probe

SEQ ID NO: 21891 - DNA, 32 bp, Artificial; identical to SEQ ID NO: 9253
  oligonucleotide probe

SEQ ID NO: 21892 - DNA, 32 bp, Artificial; identical to SEQ ID NO: 5547
  oligonucleotide probe

SEQ ID NO: 21893 - DNA, 32 bp, Artificial; identical to SEQ ID NO: 8753
  oligonucleotide probe

SEQ ID NO: 21894 - DNA, 32 bp, Artificial; identical to SEQ ID NO: 9020
  oligonucleotide probe

SEQ ID NO: 21895 - DNA, 32 bp, Artificial; identical to SEQ ID NO: 9021
  oligonucleotide probe

SEQ ID NO: 21896 - DNA, 32 bp, Artificial; identical to SEQ ID NO: 8750
  oligonucleotide probe

SEQ ID NO: 21897 - DNA, 32 bp, Artificial; identical to SEQ ID NO: 8751
  oligonucleotide probe

SEQ ID NO: 21898 - DNA, 32 bp, Artificial; identical to SEQ ID NO: 5546
  oligonucleotide probe

SEQ ID NO: 21899 - DNA, 32 bp, Artificial; identical to SEQ ID NO: 8757
  oligonucleotide probe

SEQ ID NO: 21900 - DNA, 32 bp, Artificial; identical to SEQ ID NO: 8750
  oligonucleotide probe

SEQ ID NO: 21901 - DNA, 32 bp, Artificial; identical to SEQ ID NO: 8751
  oligonucleotide probe

SEQ ID NO: 21902 - DNA, 32 bp, Artificial; identical to SEQ ID NO: 8760
  oligonucleotide probe

SEQ ID NO: 21903 - DNA, 32 bp, Artificial; identical to SEQ ID NO: 5537
  oligonucleotide probe

SEQ ID NO: 21904 - DNA, 32 bp, Artificial; identical to SEQ ID NO: 8936
  oligonucleotide probe

SEQ ID NO: 21905 - DNA, 32 bp, Artificial; identical to SEQ ID NO: 5595
  oligonucleotide probe

SEQ ID NO: 21906 - DNA, 32 bp, Artificial; identical to SEQ ID NO: 8776
  oligonucleotide probe

SEQ ID NO: 21907 - DNA, 32 bp, Artificial; identical to SEQ ID NO: 8777
  oligonucleotide probe

SEQ ID NO: 21908 - DNA, 32 bp, Artificial; identical to SEQ ID NO: 8784
  oligonucleotide probe

SEQ ID NO: 21909 - DNA, 32 bp, Artificial; identical to SEQ ID NO: 8785
  oligonucleotide probe

SEQ ID NO: 21910 - DNA, 32 bp, Artificial; identical to SEQ ID NO: 8778
  oligonucleotide probe

SEQ ID NO: 21911 - DNA, 32 bp, Artificial; identical to SEQ ID NO: 5564
  oligonucleotide probe

SEQ ID NO: 21912 - DNA, 32 bp, Artificial; identical to SEQ ID NO: 8784
  oligonucleotide probe

SEQ ID NO: 21913 - DNA, 32 bp, Artificial; identical to SEQ ID NO: 8785
  oligonucleotide probe

SEQ ID NO: 21914 - DNA, 32 bp, Artificial; identical to SEQ ID NO: 8760
  oligonucleotide probe

SEQ ID NO: 21915 - DNA, 32 bp, Artificial; identical to SEQ ID NO: 5537
  oligonucleotide probe

SEQ ID NO: 21916 - DNA, 32 bp, Artificial; identical to SEQ ID NO: 8804
  oligonucleotide probe

SEQ ID NO: 21917 - DNA, 32 bp, Artificial; identical to SEQ ID NO: 5565
  oligonucleotide probe

SEQ ID NO: 21918 - DNA, 32 bp, Artificial; identical to SEQ ID NO: 9020
  oligonucleotide probe

SEQ ID NO: 21919 - DNA, 32 bp, Artificial; identical to SEQ ID NO: 9021
  oligonucleotide probe

SEQ ID NO: 21920 - DNA, 32 bp, Artificial; identical to SEQ ID NO: 8780
  oligonucleotide probe

SEQ ID NO: 21921 - DNA, 32 bp, Artificial; identical to SEQ ID NO: 8781
  oligonucleotide probe

SEQ ID NO: 21922 - DNA, 32 bp, Artificial; identical to SEQ ID NO: 8804
  oligonucleotide probe

SEQ ID NO: 21923 - DNA, 32 bp, Artificial; identical to SEQ ID NO: 5565
  oligonucleotide probe

SEQ ID NO: 21924 - DNA, 32 bp, Artificial; identical to SEQ ID NO: 8778
  oligonucleotide probe

SEQ ID NO: 21925 - DNA, 32 bp, Artificial; identical to SEQ ID NO: 5564
  oligonucleotide probe

SEQ ID NO: 21926 - DNA, 32 bp, Artificial; identical to SEQ ID NO: 8760
  oligonucleotide probe

SEQ ID NO: 21927 - DNA, 32 bp, Artificial; identical to SEQ ID NO: 5537
  oligonucleotide probe

SEQ ID NO: 21928 - DNA, 32 bp, Artificial; identical to SEQ ID NO: 8804
  oligonucleotide probe

SEQ ID NO: 21929 - DNA, 32 bp, Artificial; identical to SEQ ID NO: 5565
  oligonucleotide probe

SEQ ID NO: 21930 - DNA, 32 bp, Artificial; identical to SEQ ID NO: 5547
  oligonucleotide probe

SEQ ID NO: 21931 - DNA, 32 bp, Artificial; identical to SEQ ID NO: 8753
  oligonucleotide probe

SEQ ID NO: 21932 - DNA, 32 bp, Artificial; identical to SEQ ID NO: 8748
  oligonucleotide probe

SEQ ID NO: 21933 - DNA, 32 bp, Artificial; identical to SEQ ID NO: 8749
  oligonucleotide probe

SEQ ID NO: 21934 - DNA, 32 bp, Artificial; identical to SEQ ID NO: 8778
  oligonucleotide probe

SEQ ID NO: 21935 - DNA, 32 bp, Artificial; identical to SEQ ID NO: 5564
  oligonucleotide probe

SEQ ID NO: 21936 - DNA, 32 bp, Artificial; identical to SEQ ID NO: 5546
  oligonucleotide probe

SEQ ID NO: 21937 - DNA, 32 bp, Artificial; identical to SEQ ID NO: 8757
  oligonucleotide probe

SEQ ID NO: 21938 - DNA, 32 bp, Artificial; identical to SEQ ID NO: 8750
  oligonucleotide probe

SEQ ID NO: 21939 - DNA, 32 bp, Artificial; identical to SEQ ID NO: 8751
  oligonucleotide probe

SEQ ID NO: 21940 - DNA, 32 bp, Artificial; identical to SEQ ID NO: 8760
  oligonucleotide probe

SEQ ID NO: 21941 - DNA, 32 bp, Artificial; identical to SEQ ID NO: 5537
  oligonucleotide probe

SEQ ID NO: 21942 - DNA, 32 bp, Artificial; identical to SEQ ID NO: 5546
  oligonucleotide probe

SEQ ID NO: 21943 - DNA, 32 bp, Artificial; identical to SEQ ID NO: 8757
  oligonucleotide probe

SEQ ID NO: 21944 - DNA, 32 bp, Artificial; identical to SEQ ID NO: 5546
  oligonucleotide probe

SEQ ID NO: 21945 - DNA, 32 bp, Artificial; identical to SEQ ID NO: 8757
  oligonucleotide probe

SEQ ID NO: 21946 - DNA, 32 bp, Artificial; identical to SEQ ID NO: 5546
  oligonucleotide probe

SEQ ID NO: 21947 - DNA, 32 bp, Artificial; identical to SEQ ID NO: 8757
  oligonucleotide probe

SEQ ID NO: 21948 - DNA, 32 bp, Artificial; identical to SEQ ID NO: 5546
  oligonucleotide probe

SEQ ID NO: 21949 - DNA, 32 bp, Artificial; identical to SEQ ID NO: 8757
  oligonucleotide probe

SEQ ID NO: 21950 - DNA, 32 bp, Artificial; identical to SEQ ID NO: 8834
  oligonucleotide probe

SEQ ID NO: 21951 - DNA, 32 bp, Artificial; identical to SEQ ID NO: 8835
  oligonucleotide probe

SEQ ID NO: 21952 - DNA, 32 bp, Artificial; identical to SEQ ID NO: 5546
  oligonucleotide probe

SEQ ID NO: 21953 - DNA, 32 bp, Artificial; identical to SEQ ID NO: 8757
  oligonucleotide probe

SEQ ID NO: 21954 - DNA, 32 bp, Artificial; identical to SEQ ID NO: 8778
  oligonucleotide probe

SEQ ID NO: 21955 - DNA, 32 bp, Artificial; identical to SEQ ID NO: 5564
  oligonucleotide probe

SEQ ID NO: 21956 - DNA, 32 bp, Artificial; identical to SEQ ID NO: 8776
  oligonucleotide probe

SEQ ID NO: 21957 - DNA, 32 bp, Artificial; identical to SEQ ID NO: 8777
  oligonucleotide probe

SEQ ID NO: 21958 - DNA, 32 bp, Artificial; identical to SEQ ID NO: 5546
  oligonucleotide probe

SEQ ID NO: 21959 - DNA, 32 bp, Artificial; identical to SEQ ID NO: 8757
  oligonucleotide probe

SEQ ID NO: 21960 - DNA, 32 bp, Artificial; identical to SEQ ID NO: 8868
  oligonucleotide probe

SEQ ID NO: 21961 - DNA, 32 bp, Artificial; identical to SEQ ID NO: 5584
  oligonucleotide probe

SEQ ID NO: 21962 - DNA, 32 bp, Artificial; identical to SEQ ID NO: 8804
  oligonucleotide probe

SEQ ID NO: 21963 - DNA, 32 bp, Artificial; identical to SEQ ID NO: 5565
  oligonucleotide probe

SEQ ID NO: 21964 - DNA, 32 bp, Artificial; identical to SEQ ID NO: 8753
  oligonucleotide probe

SEQ ID NO: 21965 - DNA, 32 bp, Artificial; identical to SEQ ID NO: 8760
  oligonucleotide probe

SEQ ID NO: 21966 - DNA, 32 bp, Artificial; identical to SEQ ID NO: 8778
  oligonucleotide probe

SEQ ID NO: 21967 - DNA, 32 bp, Artificial; identical to SEQ ID NO: 5564
  oligonucleotide probe

SEQ ID NO: 21968 - DNA, 32 bp, Artificial; identical to SEQ ID NO: 5546
  oligonucleotide probe

SEQ ID NO: 21969 - DNA, 32 bp, Artificial; identical to SEQ ID NO: 8757
  oligonucleotide probe

SEQ ID NO: 21970 - DNA, 32 bp, Artificial; identical to SEQ ID NO: 5546
  oligonucleotide probe

SEQ ID NO: 21971 - DNA, 32 bp, Artificial; identical to SEQ ID NO: 8757
  oligonucleotide probe

SEQ ID NO: 21972 - DNA, 32 bp, Artificial; identical to SEQ ID NO: 8750
  oligonucleotide probe

SEQ ID NO: 21973 - DNA, 32 bp, Artificial; identical to SEQ ID NO: 8751
  oligonucleotide probe

SEQ ID NO: 21974 - DNA, 32 bp, Artificial; identical to SEQ ID NO: 8760
  oligonucleotide probe

SEQ ID NO: 21975 - DNA, 32 bp, Artificial; identical to SEQ ID NO: 5537
  oligonucleotide probe

SEQ ID NO: 21976 - DNA, 32 bp, Artificial; identical to SEQ ID NO: 8804
  oligonucleotide probe

SEQ ID NO: 21977 - DNA, 32 bp, Artificial; identical to SEQ ID NO: 5565
  oligonucleotide probe

SEQ ID NO: 21978 - DNA, 32 bp, Artificial; identical to SEQ ID NO: 8776
  oligonucleotide probe

SEQ ID NO: 21979 - DNA, 32 bp, Artificial; identical to SEQ ID NO: 8777
  oligonucleotide probe

SEQ ID NO: 21980 - DNA, 32 bp, Artificial; identical to SEQ ID NO: 8776
  oligonucleotide probe

SEQ ID NO: 21981 - DNA, 32 bp, Artificial; identical to SEQ ID NO: 8777
  oligonucleotide probe

SEQ ID NO: 21982 - DNA, 32 bp, Artificial; identical to SEQ ID NO: 8762
  oligonucleotide probe

SEQ ID NO: 21983 - DNA, 32 bp, Artificial; identical to SEQ ID NO: 5539
  oligonucleotide probe

SEQ ID NO: 21984 - DNA, 32 bp, Artificial; identical to SEQ ID NO: 8778
  oligonucleotide probe

SEQ ID NO: 21985 - DNA, 32 bp, Artificial; identical to SEQ ID NO: 5564
  oligonucleotide probe

SEQ ID NO: 21986 - DNA, 32 bp, Artificial; identical to SEQ ID NO: 8784
  oligonucleotide probe

SEQ ID NO: 21987 - DNA, 32 bp, Artificial; identical to SEQ ID NO: 8785
  oligonucleotide probe

SEQ ID NO: 21988 - DNA, 32 bp, Artificial; identical to SEQ ID NO: 5546
  oligonucleotide probe

SEQ ID NO: 21989 - DNA, 32 bp, Artificial; identical to SEQ ID NO: 8757
  oligonucleotide probe

SEQ ID NO: 21990 - DNA, 32 bp, Artificial; identical to SEQ ID NO: 8804
  oligonucleotide probe

SEQ ID NO: 21991 - DNA, 32 bp, Artificial; identical to SEQ ID NO: 5565
  oligonucleotide probe

SEQ ID NO: 21992 - DNA, 32 bp, Artificial; identical to SEQ ID NO: 8780
  oligonucleotide probe

SEQ ID NO: 21993 - DNA, 32 bp, Artificial; identical to SEQ ID NO: 8781
  oligonucleotide probe

SEQ ID NO: 21994 - DNA, 32 bp, Artificial; identical to SEQ ID NO: 8760
  oligonucleotide probe

SEQ ID NO: 21995 - DNA, 32 bp, Artificial; identical to SEQ ID NO: 5537
  oligonucleotide probe

SEQ ID NO: 21996 - DNA, 32 bp, Artificial; identical to SEQ ID NO: 8776
  oligonucleotide probe

SEQ ID NO: 21997 - DNA, 32 bp, Artificial; identical to SEQ ID NO: 8777
  oligonucleotide probe

SEQ ID NO: 21998 - DNA, 32 bp, Artificial; identical to SEQ ID NO: 8796
  oligonucleotide probe

SEQ ID NO: 21999 - DNA, 32 bp, Artificial; identical to SEQ ID NO: 5538
  oligonucleotide probe

SEQ ID NO: 22000 - DNA, 32 bp, Artificial; identical to SEQ ID NO: 8796
  oligonucleotide probe

SEQ ID NO: 22001 - DNA, 32 bp, Artificial; identical to SEQ ID NO: 5538
  oligonucleotide probe

SEQ ID NO: 22002 - DNA, 32 bp, Artificial; identical to SEQ ID NO: 8760
  oligonucleotide probe

SEQ ID NO: 22003 - DNA, 32 bp, Artificial; identical to SEQ ID NO: 5537
  oligonucleotide probe

SEQ ID NO: 22004 - DNA, 32 bp, Artificial; identical to SEQ ID NO: 5546
  oligonucleotide probe

SEQ ID NO: 22005 - DNA, 32 bp, Artificial; identical to SEQ ID NO: 8757
  oligonucleotide probe

SEQ ID NO: 22006 - DNA, 32 bp, Artificial; identical to SEQ ID NO: 8766
  oligonucleotide probe

SEQ ID NO: 22007 - DNA, 32 bp, Artificial; identical to SEQ ID NO: 8767
  oligonucleotide probe

SEQ ID NO: 22008 - DNA, 32 bp, Artificial; identical to SEQ ID NO: 8778
  oligonucleotide probe

SEQ ID NO: 22009 - DNA, 32 bp, Artificial; identical to SEQ ID NO: 5564
  oligonucleotide probe

SEQ ID NO: 22010 - DNA, 32 bp, Artificial; identical to SEQ ID NO: 8834
  oligonucleotide probe

SEQ ID NO: 22011 - DNA, 32 bp, Artificial; identical to SEQ ID NO: 8835
  oligonucleotide probe

SEQ ID NO: 22012 - DNA, 32 bp, Artificial; identical to SEQ ID NO: 8786
  oligonucleotide probe

SEQ ID NO: 22013 - DNA, 32 bp, Artificial; identical to SEQ ID NO: 5585
  oligonucleotide probe

SEQ ID NO: 22014 - DNA, 32 bp, Artificial; identical to SEQ ID NO: 8796
  oligonucleotide probe

SEQ ID NO: 22015 - DNA, 32 bp, Artificial; identical to SEQ ID NO: 5538
  oligonucleotide probe

SEQ ID NO: 22016 - DNA, 32 bp, Artificial; identical to SEQ ID NO: 8834
  oligonucleotide probe

SEQ ID NO: 22017 - DNA, 32 bp, Artificial; identical to SEQ ID NO: 8835
  oligonucleotide probe

SEQ ID NO: 22018 - DNA, 32 bp, Artificial; identical to SEQ ID NO: 8760
  oligonucleotide probe

SEQ ID NO: 22019 - DNA, 32 bp, Artificial; identical to SEQ ID NO: 5537
  oligonucleotide probe

SEQ ID NO: 22020 - DNA, 32 bp, Artificial; identical to SEQ ID NO: 8776
  oligonucleotide probe

SEQ ID NO: 22021 - DNA, 32 bp, Artificial; identical to SEQ ID NO: 8777
  oligonucleotide probe

SEQ ID NO: 22022 - DNA, 32 bp, Artificial; identical to SEQ ID NO: 8784
  oligonucleotide probe

SEQ ID NO: 22023 - DNA, 32 bp, Artificial; identical to SEQ ID NO: 8785
  oligonucleotide probe

SEQ ID NO: 22024 - DNA, 32 bp, Artificial; identical to SEQ ID NO: 8804
  oligonucleotide probe

SEQ ID NO: 22025 - DNA, 32 bp, Artificial; identical to SEQ ID NO: 5565
  oligonucleotide probe

SEQ ID NO: 22026 - DNA, 32 bp, Artificial; identical to SEQ ID NO: 5547
  oligonucleotide probe

SEQ ID NO: 22027 - DNA, 32 bp, Artificial; identical to SEQ ID NO: 8753
  oligonucleotide probe

SEQ ID NO: 22028 - DNA, 32 bp, Artificial; identical to SEQ ID NO: 9020
  oligonucleotide probe

SEQ ID NO: 22029 - DNA, 32 bp, Artificial; identical to SEQ ID NO: 9021
  oligonucleotide probe

SEQ ID NO: 22030 - DNA, 32 bp, Artificial; identical to SEQ ID NO: 8796
  oligonucleotide probe

SEQ ID NO: 22031 - DNA, 32 bp, Artificial; identical to SEQ ID NO: 5538
  oligonucleotide probe

SEQ ID NO: 22032 - DNA, 32 bp, Artificial; identical to SEQ ID NO: 5546
  oligonucleotide probe

SEQ ID NO: 22033 - DNA, 32 bp, Artificial; identical to SEQ ID NO: 8757
  oligonucleotide probe

SEQ ID NO: 22034 - DNA, 32 bp, Artificial; identical to SEQ ID NO: 8868
  oligonucleotide probe

SEQ ID NO: 22035 - DNA, 32 bp, Artificial; identical to SEQ ID NO: 5584
  oligonucleotide probe

SEQ ID NO: 22036 - DNA, 32 bp, Artificial; identical to SEQ ID NO: 8760
  oligonucleotide probe

SEQ ID NO: 22037 - DNA, 32 bp, Artificial; identical to SEQ ID NO: 5537
  oligonucleotide probe

SEQ ID NO: 22038 - DNA, 32 bp, Artificial; identical to SEQ ID NO: 8760
  oligonucleotide probe

SEQ ID NO: 22039 - DNA, 32 bp, Artificial; identical to SEQ ID NO: 5537
  oligonucleotide probe

SEQ ID NO: 22040 - DNA, 32 bp, Artificial; identical to SEQ ID NO: 5547
  oligonucleotide probe

SEQ ID NO: 22041 - DNA, 32 bp, Artificial; identical to SEQ ID NO: 8753
  oligonucleotide probe

SEQ ID NO: 22042 - DNA, 32 bp, Artificial; identical to SEQ ID NO: 8766
  oligonucleotide probe

SEQ ID NO: 22043 - DNA, 32 bp, Artificial; identical to SEQ ID NO: 8767
  oligonucleotide probe

SEQ ID NO: 22044 - DNA, 32 bp, Artificial; identical to SEQ ID NO: 8804
  oligonucleotide probe

SEQ ID NO: 22045 - DNA, 32 bp, Artificial; identical to SEQ ID NO: 5565
  oligonucleotide probe

SEQ ID NO: 22046 - DNA, 32 bp, Artificial; identical to SEQ ID NO: 8753
  oligonucleotide probe

SEQ ID NO: 22047 - DNA, 32 bp, Artificial; identical to SEQ ID NO: 8760
  oligonucleotide probe

SEQ ID NO: 22048 - DNA, 32 bp, Artificial; identical to SEQ ID NO: 8762
  oligonucleotide probe

SEQ ID NO: 22049 - DNA, 32 bp, Artificial; identical to SEQ ID NO: 5539
  oligonucleotide probe

SEQ ID NO: 22050 - DNA, 32 bp, Artificial; identical to SEQ ID NO: 8936
  oligonucleotide probe

SEQ ID NO: 22051 - DNA, 32 bp, Artificial; identical to SEQ ID NO: 5595
  oligonucleotide probe

SEQ ID NO: 22052 - DNA, 32 bp, Artificial; identical to SEQ ID NO: 5546
  oligonucleotide probe

SEQ ID NO: 22053 - DNA, 32 bp, Artificial; identical to SEQ ID NO: 8757
  oligonucleotide probe

SEQ ID NO: 22054 - DNA, 32 bp, Artificial; identical to SEQ ID NO: 8804
  oligonucleotide probe

SEQ ID NO: 22055 - DNA, 32 bp, Artificial; identical to SEQ ID NO: 5565
  oligonucleotide probe

SEQ ID NO: 22056 - DNA, 32 bp, Artificial; identical to SEQ ID NO: 8804
  oligonucleotide probe

SEQ ID NO: 22057 - DNA, 32 bp, Artificial; identical to SEQ ID NO: 5565
  oligonucleotide probe

SEQ ID NO: 22058 - DNA, 32 bp, Artificial; identical to SEQ ID NO: 8780
  oligonucleotide probe

SEQ ID NO: 22059 - DNA, 32 bp, Artificial; identical to SEQ ID NO: 8781
  oligonucleotide probe

SEQ ID NO: 22060 - DNA, 32 bp, Artificial; identical to SEQ ID NO: 8748
  oligonucleotide probe

SEQ ID NO: 22061 - DNA, 32 bp, Artificial; identical to SEQ ID NO: 8749
  oligonucleotide probe

SEQ ID NO: 22062 - DNA, 32 bp, Artificial; identical to SEQ ID NO: 8784
  oligonucleotide probe

SEQ ID NO: 22063 - DNA, 32 bp, Artificial; identical to SEQ ID NO: 8785
  oligonucleotide probe

SEQ ID NO: 22064 - DNA, 32 bp, Artificial; identical to SEQ ID NO: 5547
  oligonucleotide probe

SEQ ID NO: 22065 - DNA, 32 bp, Artificial; identical to SEQ ID NO: 8753
  oligonucleotide probe

SEQ ID NO: 22066 - DNA, 32 bp, Artificial; identical to SEQ ID NO: 8868
  oligonucleotide probe

SEQ ID NO: 22067 - DNA, 32 bp, Artificial; identical to SEQ ID NO: 5584
  oligonucleotide probe

SEQ ID NO: 22068 - DNA, 32 bp, Artificial; identical to SEQ ID NO: 8784
  oligonucleotide probe

SEQ ID NO: 22069 - DNA, 32 bp, Artificial; identical to SEQ ID NO: 8785
  oligonucleotide probe

SEQ ID NO: 22070 - DNA, 32 bp, Artificial; identical to SEQ ID NO: 8786
  oligonucleotide probe

SEQ ID NO: 22071 - DNA, 32 bp, Artificial; identical to SEQ ID NO: 5585
  oligonucleotide probe

SEQ ID NO: 22072 - DNA, 32 bp, Artificial; identical to SEQ ID NO: 8748
  oligonucleotide probe

SEQ ID NO: 22073 - DNA, 32 bp, Artificial; identical to SEQ ID NO: 8749
  oligonucleotide probe

SEQ ID NO: 22074 - DNA, 32 bp, Artificial; identical to SEQ ID NO: 9038
  oligonucleotide probe

SEQ ID NO: 22075 - DNA, 32 bp, Artificial; identical to SEQ ID NO: 5594
  oligonucleotide probe

SEQ ID NO: 22076 - DNA, 32 bp, Artificial; identical to SEQ ID NO: 5547
  oligonucleotide probe

SEQ ID NO: 22077 - DNA, 32 bp, Artificial; identical to SEQ ID NO: 8753
  oligonucleotide probe

SEQ ID NO: 22078 - DNA, 32 bp, Artificial; identical to SEQ ID NO: 8804
  oligonucleotide probe

SEQ ID NO: 22079 - DNA, 32 bp, Artificial; identical to SEQ ID NO: 5565
  oligonucleotide probe

SEQ ID NO: 22080 - DNA, 32 bp, Artificial; identical to SEQ ID NO: 5546
  oligonucleotide probe

SEQ ID NO: 22081 - DNA, 32 bp, Artificial; identical to SEQ ID NO: 8757
  oligonucleotide probe

SEQ ID NO: 22082 - DNA, 32 bp, Artificial; identical to SEQ ID NO: 8776
  oligonucleotide probe

SEQ ID NO: 22083 - DNA, 32 bp, Artificial; identical to SEQ ID NO: 8777
  oligonucleotide probe

SEQ ID NO: 22084 - DNA, 32 bp, Artificial; identical to SEQ ID NO: 8784
  oligonucleotide probe

SEQ ID NO: 22085 - DNA, 32 bp, Artificial; identical to SEQ ID NO: 8785
  oligonucleotide probe

SEQ ID NO: 22086 - DNA, 32 bp, Artificial; identical to SEQ ID NO: 5546
  oligonucleotide probe

SEQ ID NO: 22087 - DNA, 32 bp, Artificial; identical to SEQ ID NO: 8757
  oligonucleotide probe

SEQ ID NO: 22088 - DNA, 32 bp, Artificial; identical to SEQ ID NO: 8796
  oligonucleotide probe

SEQ ID NO: 22089 - DNA, 32 bp, Artificial; identical to SEQ ID NO: 5538
  oligonucleotide probe

SEQ ID NO: 22090 - DNA, 32 bp, Artificial; identical to SEQ ID NO: 5547
  oligonucleotide probe

SEQ ID NO: 22091 - DNA, 32 bp, Artificial; identical to SEQ ID NO: 8753
  oligonucleotide probe

SEQ ID NO: 22092 - DNA, 32 bp, Artificial; identical to SEQ ID NO: 8784
  oligonucleotide probe

SEQ ID NO: 22093 - DNA, 32 bp, Artificial; identical to SEQ ID NO: 8785
  oligonucleotide probe

SEQ ID NO: 22094 - DNA, 32 bp, Artificial; identical to SEQ ID NO: 8784
  oligonucleotide probe

SEQ ID NO: 22095 - DNA, 32 bp, Artificial; identical to SEQ ID NO: 8785
  oligonucleotide probe

SEQ ID NO: 22096 - DNA, 32 bp, Artificial; identical to SEQ ID NO: 5547
  oligonucleotide probe

SEQ ID NO: 22097 - DNA, 32 bp, Artificial; identical to SEQ ID NO: 8753
  oligonucleotide probe

SEQ ID NO: 22098 - DNA, 32 bp, Artificial; identical to SEQ ID NO: 8780
  oligonucleotide probe

SEQ ID NO: 22099 - DNA, 32 bp, Artificial; identical to SEQ ID NO: 8781
  oligonucleotide probe

SEQ ID NO: 22100 - DNA, 32 bp, Artificial; identical to SEQ ID NO: 8760
  oligonucleotide probe

SEQ ID NO: 22101 - DNA, 32 bp, Artificial; identical to SEQ ID NO: 5537
  oligonucleotide probe

SEQ ID NO: 22102 - DNA, 32 bp, Artificial; identical to SEQ ID NO: 5546
  oligonucleotide probe

SEQ ID NO: 22103 - DNA, 32 bp, Artificial; identical to SEQ ID NO: 8757
  oligonucleotide probe

SEQ ID NO: 22104 - DNA, 32 bp, Artificial; identical to SEQ ID NO: 8796
  oligonucleotide probe

SEQ ID NO: 22105 - DNA, 32 bp, Artificial; identical to SEQ ID NO: 5538
  oligonucleotide probe

SEQ ID NO: 22106 - DNA, 32 bp, Artificial; identical to SEQ ID NO: 5547
  oligonucleotide probe

SEQ ID NO: 22107 - DNA, 32 bp, Artificial; identical to SEQ ID NO: 8753
  oligonucleotide probe

SEQ ID NO: 22108 - DNA, 32 bp, Artificial; identical to SEQ ID NO: 5546
  oligonucleotide probe

SEQ ID NO: 22109 - DNA, 32 bp, Artificial; identical to SEQ ID NO: 8757
  oligonucleotide probe

SEQ ID NO: 22110 - DNA, 32 bp, Artificial; identical to SEQ ID NO: 8868
  oligonucleotide probe

SEQ ID NO: 22111 - DNA, 32 bp, Artificial; identical to SEQ ID NO: 5584
  oligonucleotide probe

SEQ ID NO: 22112 - DNA, 32 bp, Artificial; identical to SEQ ID NO: 8760
  oligonucleotide probe

SEQ ID NO: 22113 - DNA, 32 bp, Artificial; identical to SEQ ID NO: 5537
  oligonucleotide probe

SEQ ID NO: 22114 - DNA, 32 bp, Artificial; identical to SEQ ID NO: 8762
  oligonucleotide probe

SEQ ID NO: 22115 - DNA, 32 bp, Artificial; identical to SEQ ID NO: 5539
  oligonucleotide probe

SEQ ID NO: 22116 - DNA, 32 bp, Artificial; identical to SEQ ID NO: 5547
  oligonucleotide probe

SEQ ID NO: 22117 - DNA, 32 bp, Artificial; identical to SEQ ID NO: 8753
  oligonucleotide probe

SEQ ID NO: 22118 - DNA, 32 bp, Artificial; identical to SEQ ID NO: 8748
  oligonucleotide probe

SEQ ID NO: 22119 - DNA, 32 bp, Artificial; identical to SEQ ID NO: 8749
  oligonucleotide probe

SEQ ID NO: 22120 - DNA, 32 bp, Artificial; identical to SEQ ID NO: 8778
  oligonucleotide probe

SEQ ID NO: 22121 - DNA, 32 bp, Artificial; identical to SEQ ID NO: 5564
  oligonucleotide probe

SEQ ID NO: 22122 - DNA, 32 bp, Artificial; identical to SEQ ID NO: 8784
  oligonucleotide probe

SEQ ID NO: 22123 - DNA, 32 bp, Artificial; identical to SEQ ID NO: 8785
  oligonucleotide probe

SEQ ID NO: 22124 - DNA, 32 bp, Artificial; identical to SEQ ID NO: 8750
  oligonucleotide probe

SEQ ID NO: 22125 - DNA, 32 bp, Artificial; identical to SEQ ID NO: 8751
  oligonucleotide probe

SEQ ID NO: 22126 - DNA, 32 bp, Artificial; identical to SEQ ID NO: 5546
  oligonucleotide probe

SEQ ID NO: 22127 - DNA, 32 bp, Artificial; identical to SEQ ID NO: 8757
  oligonucleotide probe

SEQ ID NO: 22128 - DNA, 32 bp, Artificial; identical to SEQ ID NO: 5537
  oligonucleotide probe

SEQ ID NO: 22129 - DNA, 32 bp, Artificial; identical to SEQ ID NO: 5537
  oligonucleotide probe

SEQ ID NO: 22130 - DNA, 32 bp, Artificial; identical to SEQ ID NO: 8748
  oligonucleotide probe

SEQ ID NO: 22131 - DNA, 32 bp, Artificial; identical to SEQ ID NO: 8749
  oligonucleotide probe

SEQ ID NO: 22132 - DNA, 32 bp, Artificial; identical to SEQ ID NO: 8760
  oligonucleotide probe

SEQ ID NO: 22133 - DNA, 32 bp, Artificial; identical to SEQ ID NO: 5537
  oligonucleotide probe

SEQ ID NO: 22134 - DNA, 32 bp, Artificial; identical to SEQ ID NO: 8760
  oligonucleotide probe

SEQ ID NO: 22135 - DNA, 32 bp, Artificial; identical to SEQ ID NO: 5537
  oligonucleotide probe

SEQ ID NO: 22136 - DNA, 32 bp, Artificial; identical to SEQ ID NO: 8750
  oligonucleotide probe

SEQ ID NO: 22137 - DNA, 32 bp, Artificial; identical to SEQ ID NO: 8751
  oligonucleotide probe

SEQ ID NO: 22138 - DNA, 32 bp, Artificial; identical to SEQ ID NO: 8760
  oligonucleotide probe

SEQ ID NO: 22139 - DNA, 32 bp, Artificial; identical to SEQ ID NO: 5537
  oligonucleotide probe

SEQ ID NO: 22140 - DNA, 32 bp, Artificial; identical to SEQ ID NO: 8784
  oligonucleotide probe

SEQ ID NO: 22141 - DNA, 32 bp, Artificial; identical to SEQ ID NO: 8785
  oligonucleotide probe

SEQ ID NO: 22142 - DNA, 32 bp, Artificial; identical to SEQ ID NO: 8780
  oligonucleotide probe

SEQ ID NO: 22143 - DNA, 32 bp, Artificial; identical to SEQ ID NO: 8781
  oligonucleotide probe

SEQ ID NO: 22144 - DNA, 32 bp, Artificial; identical to SEQ ID NO: 8796
  oligonucleotide probe

SEQ ID NO: 22145 - DNA, 32 bp, Artificial; identical to SEQ ID NO: 5538
  oligonucleotide probe

SEQ ID NO: 22146 - DNA, 32 bp, Artificial; identical to SEQ ID NO: 9038
  oligonucleotide probe

SEQ ID NO: 22147 - DNA, 32 bp, Artificial; identical to SEQ ID NO: 5594
  oligonucleotide probe

SEQ ID NO: 22148 - DNA, 32 bp, Artificial; identical to SEQ ID NO: 8796
  oligonucleotide probe

SEQ ID NO: 22149 - DNA, 32 bp, Artificial; identical to SEQ ID NO: 5538
  oligonucleotide probe

SEQ ID NO: 22150 - DNA, 32 bp, Artificial; identical to SEQ ID NO: 5547
  oligonucleotide probe

SEQ ID NO: 22151 - DNA, 32 bp, Artificial; identical to SEQ ID NO: 8753
  oligonucleotide probe

SEQ ID NO: 22152 - DNA, 32 bp, Artificial; identical to SEQ ID NO: 5547
  oligonucleotide probe

SEQ ID NO: 22153 - DNA, 32 bp, Artificial; identical to SEQ ID NO: 8753
  oligonucleotide probe

SEQ ID NO: 22154 - DNA, 32 bp, Artificial; identical to SEQ ID NO: 8762
  oligonucleotide probe

SEQ ID NO: 22155 - DNA, 32 bp, Artificial; identical to SEQ ID NO: 5539
  oligonucleotide probe

SEQ ID NO: 22156 - DNA, 32 bp, Artificial; identical to SEQ ID NO: 8776
  oligonucleotide probe

SEQ ID NO: 22157 - DNA, 32 bp, Artificial; identical to SEQ ID NO: 8777
  oligonucleotide probe

SEQ ID NO: 22158 - DNA, 32 bp, Artificial; identical to SEQ ID NO: 8760
  oligonucleotide probe

SEQ ID NO: 22159 - DNA, 32 bp, Artificial; identical to SEQ ID NO: 5537
  oligonucleotide probe

SEQ ID NO: 22160 - DNA, 32 bp, Artificial; identical to SEQ ID NO: 8786
  oligonucleotide probe

SEQ ID NO: 22161 - DNA, 32 bp, Artificial; identical to SEQ ID NO: 5585
  oligonucleotide probe

SEQ ID NO: 22162 - DNA, 32 bp, Artificial; identical to SEQ ID NO: 5546
  oligonucleotide probe

SEQ ID NO: 22163 - DNA, 32 bp, Artificial; identical to SEQ ID NO: 8757
  oligonucleotide probe

SEQ ID NO: 22164 - DNA, 32 bp, Artificial; identical to SEQ ID NO: 8796
  oligonucleotide probe

SEQ ID NO: 22165 - DNA, 32 bp, Artificial; identical to SEQ ID NO: 5538
  oligonucleotide probe

SEQ ID NO: 22166 - DNA, 32 bp, Artificial; identical to SEQ ID NO: 8784
  oligonucleotide probe

SEQ ID NO: 22167 - DNA, 32 bp, Artificial; identical to SEQ ID NO: 8785
  oligonucleotide probe

SEQ ID NO: 22168 - DNA, 32 bp, Artificial; identical to SEQ ID NO: 5546
  oligonucleotide probe

SEQ ID NO: 22169 - DNA, 32 bp, Artificial; identical to SEQ ID NO: 8757
  oligonucleotide probe

SEQ ID NO: 22170 - DNA, 32 bp, Artificial; identical to SEQ ID NO: 8804
  oligonucleotide probe

SEQ ID NO: 22171 - DNA, 32 bp, Artificial; identical to SEQ ID NO: 5565
  oligonucleotide probe

SEQ ID NO: 22172 - DNA, 32 bp, Artificial; identical to SEQ ID NO: 8750
  oligonucleotide probe

SEQ ID NO: 22173 - DNA, 32 bp, Artificial; identical to SEQ ID NO: 8751
  oligonucleotide probe

SEQ ID NO: 22174 - DNA, 32 bp, Artificial; identical to SEQ ID NO: 5547
  oligonucleotide probe

SEQ ID NO: 22175 - DNA, 32 bp, Artificial; identical to SEQ ID NO: 8753
  oligonucleotide probe

SEQ ID NO: 22176 - DNA, 32 bp, Artificial; identical to SEQ ID NO: 8748
  oligonucleotide probe

SEQ ID NO: 22177 - DNA, 32 bp, Artificial; identical to SEQ ID NO: 8749
  oligonucleotide probe

SEQ ID NO: 22178 - DNA, 32 bp, Artificial; identical to SEQ ID NO: 8784
  oligonucleotide probe

SEQ ID NO: 22179 - DNA, 32 bp, Artificial; identical to SEQ ID NO: 8785
  oligonucleotide probe

SEQ ID NO: 22180 - DNA, 32 bp, Artificial; identical to SEQ ID NO: 5546
  oligonucleotide probe

SEQ ID NO: 22181 - DNA, 32 bp, Artificial; identical to SEQ ID NO: 8757
  oligonucleotide probe

SEQ ID NO: 22182 - DNA, 32 bp, Artificial; identical to SEQ ID NO: 8780
  oligonucleotide probe

SEQ ID NO: 22183 - DNA, 32 bp, Artificial; identical to SEQ ID NO: 8781
  oligonucleotide probe

SEQ ID NO: 22184 - DNA, 32 bp, Artificial; identical to SEQ ID NO: 8780
  oligonucleotide probe

SEQ ID NO: 22185 - DNA, 32 bp, Artificial; identical to SEQ ID NO: 8781
  oligonucleotide probe

SEQ ID NO: 22186 - DNA, 32 bp, Artificial; identical to SEQ ID NO: 8776
  oligonucleotide probe

SEQ ID NO: 22187 - DNA, 32 bp, Artificial; identical to SEQ ID NO: 8777
  oligonucleotide probe

SEQ ID NO: 22188 - DNA, 32 bp, Artificial; identical to SEQ ID NO: 8780
  oligonucleotide probe

SEQ ID NO: 22189 - DNA, 32 bp, Artificial; identical to SEQ ID NO: 8781
  oligonucleotide probe

SEQ ID NO: 22190 - DNA, 32 bp, Artificial; identical to SEQ ID NO: 9020
  oligonucleotide probe

SEQ ID NO: 22191 - DNA, 32 bp, Artificial; identical to SEQ ID NO: 9021
  oligonucleotide probe

SEQ ID NO: 22192 - DNA, 32 bp, Artificial; identical to SEQ ID NO: 8868
  oligonucleotide probe

SEQ ID NO: 22193 - DNA, 32 bp, Artificial; identical to SEQ ID NO: 5584
  oligonucleotide probe

SEQ ID NO: 22194 - DNA, 32 bp, Artificial; identical to SEQ ID NO: 8776
  oligonucleotide probe

SEQ ID NO: 22195 - DNA, 32 bp, Artificial; identical to SEQ ID NO: 8777
  oligonucleotide probe

SEQ ID NO: 22196 - DNA, 32 bp, Artificial; identical to SEQ ID NO: 9826
  oligonucleotide probe

SEQ ID NO: 22197 - DNA, 32 bp, Artificial; identical to SEQ ID NO: 5610
  oligonucleotide probe

SEQ ID NO: 22198 - DNA, 32 bp, Artificial; identical to SEQ ID NO: 8748
  oligonucleotide probe

SEQ ID NO: 22199 - DNA, 32 bp, Artificial; identical to SEQ ID NO: 8749
  oligonucleotide probe

SEQ ID NO: 22200 - DNA, 32 bp, Artificial; identical to SEQ ID NO: 8784
  oligonucleotide probe

SEQ ID NO: 22201 - DNA, 32 bp, Artificial; identical to SEQ ID NO: 8785
  oligonucleotide probe

SEQ ID NO: 22202 - DNA, 32 bp, Artificial; identical to SEQ ID NO: 5546
  oligonucleotide probe

SEQ ID NO: 22203 - DNA, 32 bp, Artificial; identical to SEQ ID NO: 8757
  oligonucleotide probe

SEQ ID NO: 22204 - DNA, 32 bp, Artificial; identical to SEQ ID NO: 8776
  oligonucleotide probe

SEQ ID NO: 22205 - DNA, 32 bp, Artificial; identical to SEQ ID NO: 8777
  oligonucleotide probe

SEQ ID NO: 22206 - DNA, 32 bp, Artificial; identical to SEQ ID NO: 5547
  oligonucleotide probe

SEQ ID NO: 22207 - DNA, 32 bp, Artificial; identical to SEQ ID NO: 8753
  oligonucleotide probe

SEQ ID NO: 22208 - DNA, 32 bp, Artificial; identical to SEQ ID NO: 8760
  oligonucleotide probe

SEQ ID NO: 22209 - DNA, 32 bp, Artificial; identical to SEQ ID NO: 5537
  oligonucleotide probe

SEQ ID NO: 22210 - DNA, 32 bp, Artificial; identical to SEQ ID NO: 8760
  oligonucleotide probe

SEQ ID NO: 22211 - DNA, 32 bp, Artificial; identical to SEQ ID NO: 5537
  oligonucleotide probe

SEQ ID NO: 22212 - DNA, 32 bp, Artificial; identical to SEQ ID NO: 8776
  oligonucleotide probe

SEQ ID NO: 22213 - DNA, 32 bp, Artificial; identical to SEQ ID NO: 8777
  oligonucleotide probe

SEQ ID NO: 22214 - DNA, 32 bp, Artificial; identical to SEQ ID NO: 8804
  oligonucleotide probe

SEQ ID NO: 22215 - DNA, 32 bp, Artificial; identical to SEQ ID NO: 5565
  oligonucleotide probe

SEQ ID NO: 22216 - DNA, 32 bp, Artificial; identical to SEQ ID NO: 5547
  oligonucleotide probe

SEQ ID NO: 22217 - DNA, 32 bp, Artificial; identical to SEQ ID NO: 8753
  oligonucleotide probe

SEQ ID NO: 22218 - DNA, 32 bp, Artificial; identical to SEQ ID NO: 8804
  oligonucleotide probe

SEQ ID NO: 22219 - DNA, 32 bp, Artificial; identical to SEQ ID NO: 5565
  oligonucleotide probe

SEQ ID NO: 22220 - DNA, 32 bp, Artificial; identical to SEQ ID NO: 9314
  oligonucleotide probe

SEQ ID NO: 22221 - DNA, 32 bp, Artificial; identical to SEQ ID NO: 9315
  oligonucleotide probe

SEQ ID NO: 22222 - DNA, 32 bp, Artificial; identical to SEQ ID NO: 8780
  oligonucleotide probe

SEQ ID NO: 22223 - DNA, 32 bp, Artificial; identical to SEQ ID NO: 8781
  oligonucleotide probe

SEQ ID NO: 22224 - DNA, 32 bp, Artificial; identical to SEQ ID NO: 5546
  oligonucleotide probe

SEQ ID NO: 22225 - DNA, 32 bp, Artificial; identical to SEQ ID NO: 8757
  oligonucleotide probe

SEQ ID NO: 22226 - DNA, 32 bp, Artificial; identical to SEQ ID NO: 8784
  oligonucleotide probe

SEQ ID NO: 22227 - DNA, 32 bp, Artificial; identical to SEQ ID NO: 8785
  oligonucleotide probe

SEQ ID NO: 22228 - DNA, 32 bp, Artificial; identical to SEQ ID NO: 8760
  oligonucleotide probe

SEQ ID NO: 22229 - DNA, 32 bp, Artificial; identical to SEQ ID NO: 5537
  oligonucleotide probe

SEQ ID NO: 22230 - DNA, 32 bp, Artificial; identical to SEQ ID NO: 8936
  oligonucleotide probe

SEQ ID NO: 22231 - DNA, 32 bp, Artificial; identical to SEQ ID NO: 5595
  oligonucleotide probe

SEQ ID NO: 22232 - DNA, 32 bp, Artificial; identical to SEQ ID NO: 5547
  oligonucleotide probe

SEQ ID NO: 22233 - DNA, 32 bp, Artificial; identical to SEQ ID NO: 8753
  oligonucleotide probe

SEQ ID NO: 22234 - DNA, 32 bp, Artificial; identical to SEQ ID NO: 8784
  oligonucleotide probe

SEQ ID NO: 22235 - DNA, 32 bp, Artificial; identical to SEQ ID NO: 8785
  oligonucleotide probe

SEQ ID NO: 22236 - DNA, 32 bp, Artificial; identical to SEQ ID NO: 8778
  oligonucleotide probe

SEQ ID NO: 22237 - DNA, 32 bp, Artificial; identical to SEQ ID NO: 5564
  oligonucleotide probe

SEQ ID NO: 22238 - DNA, 32 bp, Artificial; identical to SEQ ID NO: 8760
  oligonucleotide probe

SEQ ID NO: 22239 - DNA, 32 bp, Artificial; identical to SEQ ID NO: 5537
  oligonucleotide probe

SEQ ID NO: 22240 - DNA, 32 bp, Artificial; identical to SEQ ID NO: 8760
  oligonucleotide probe

SEQ ID NO: 22241 - DNA, 32 bp, Artificial; identical to SEQ ID NO: 5537
  oligonucleotide probe

SEQ ID NO: 22242 - DNA, 32 bp, Artificial; identical to SEQ ID NO: 8804
  oligonucleotide probe

SEQ ID NO: 22243 - DNA, 32 bp, Artificial; identical to SEQ ID NO: 5565
  oligonucleotide probe

SEQ ID NO: 22244 - DNA, 32 bp, Artificial; identical to SEQ ID NO: 9020
  oligonucleotide probe

SEQ ID NO: 22245 - DNA, 32 bp, Artificial; identical to SEQ ID NO: 9021
  oligonucleotide probe

SEQ ID NO: 22246 - DNA, 32 bp, Artificial; identical to SEQ ID NO: 8776
  oligonucleotide probe

SEQ ID NO: 22247 - DNA, 32 bp, Artificial; identical to SEQ ID NO: 8777
  oligonucleotide probe

SEQ ID NO: 22248 - DNA, 32 bp, Artificial; identical to SEQ ID NO: 8766
  oligonucleotide probe

SEQ ID NO: 22249 - DNA, 32 bp, Artificial; identical to SEQ ID NO: 8767
  oligonucleotide probe

SEQ ID NO: 22250 - DNA, 32 bp, Artificial; identical to SEQ ID NO: 8780
  oligonucleotide probe

SEQ ID NO: 22251 - DNA, 32 bp, Artificial; identical to SEQ ID NO: 8781
  oligonucleotide probe

SEQ ID NO: 22252 - DNA, 32 bp, Artificial; identical to SEQ ID NO: 8784
  oligonucleotide probe

SEQ ID NO: 22253 - DNA, 32 bp, Artificial; identical to SEQ ID NO: 8785
  oligonucleotide probe

SEQ ID NO: 22254 - DNA, 32 bp, Artificial; identical to SEQ ID NO: 8750
  oligonucleotide probe

SEQ ID NO: 22255 - DNA, 32 bp, Artificial; identical to SEQ ID NO: 8751
  oligonucleotide probe

SEQ ID NO: 22256 - DNA, 32 bp, Artificial; identical to SEQ ID NO: 5547
  oligonucleotide probe

SEQ ID NO: 22257 - DNA, 32 bp, Artificial; identical to SEQ ID NO: 8753
  oligonucleotide probe

SEQ ID NO: 22258 - DNA, 32 bp, Artificial; identical to SEQ ID NO: 8784
  oligonucleotide probe

SEQ ID NO: 22259 - DNA, 32 bp, Artificial; identical to SEQ ID NO: 8785
  oligonucleotide probe

SEQ ID NO: 22260 - DNA, 32 bp, Artificial; identical to SEQ ID NO: 9020
  oligonucleotide probe

SEQ ID NO: 22261 - DNA, 32 bp, Artificial; identical to SEQ ID NO: 9021
  oligonucleotide probe

SEQ ID NO: 22262 - DNA, 32 bp, Artificial; identical to SEQ ID NO: 8780
  oligonucleotide probe

SEQ ID NO: 22263 - DNA, 32 bp, Artificial; identical to SEQ ID NO: 8781
  oligonucleotide probe

SEQ ID NO: 22264 - DNA, 32 bp, Artificial; identical to SEQ ID NO: 8868
  oligonucleotide probe

SEQ ID NO: 22265 - DNA, 32 bp, Artificial; identical to SEQ ID NO: 5584
  oligonucleotide probe

SEQ ID NO: 22266 - DNA, 32 bp, Artificial; identical to SEQ ID NO: 8936
  oligonucleotide probe

SEQ ID NO: 22267 - DNA, 32 bp, Artificial; identical to SEQ ID NO: 5595
  oligonucleotide probe

SEQ ID NO: 22268 - DNA, 32 bp, Artificial; identical to SEQ ID NO: 8750
  oligonucleotide probe

SEQ ID NO: 22269 - DNA, 32 bp, Artificial; identical to SEQ ID NO: 8751
  oligonucleotide probe

SEQ ID NO: 22270 - DNA, 32 bp, Artificial; identical to SEQ ID NO: 8778
  oligonucleotide probe

SEQ ID NO: 22271 - DNA, 32 bp, Artificial; identical to SEQ ID NO: 5564
  oligonucleotide probe

SEQ ID NO: 22272 - DNA, 32 bp, Artificial; identical to SEQ ID NO: 8796
  oligonucleotide probe

SEQ ID NO: 22273 - DNA, 32 bp, Artificial; identical to SEQ ID NO: 5538
  oligonucleotide probe

SEQ ID NO: 22274 - DNA, 32 bp, Artificial; identical to SEQ ID NO: 8784
  oligonucleotide probe

SEQ ID NO: 22275 - DNA, 32 bp, Artificial; identical to SEQ ID NO: 8785
  oligonucleotide probe

SEQ ID NO: 22276 - DNA, 32 bp, Artificial; identical to SEQ ID NO: 8750
  oligonucleotide probe

SEQ ID NO: 22277 - DNA, 32 bp, Artificial; identical to SEQ ID NO: 8751
  oligonucleotide probe

SEQ ID NO: 22278 - DNA, 32 bp, Artificial; identical to SEQ ID NO: 5547
  oligonucleotide probe

SEQ ID NO: 22279 - DNA, 32 bp, Artificial; identical to SEQ ID NO: 8753
  oligonucleotide probe

SEQ ID NO: 22280 - DNA, 32 bp, Artificial; identical to SEQ ID NO: 8760
  oligonucleotide probe

SEQ ID NO: 22281 - DNA, 32 bp, Artificial; identical to SEQ ID NO: 5537
  oligonucleotide probe

SEQ ID NO: 22282 - DNA, 32 bp, Artificial; identical to SEQ ID NO: 8778
  oligonucleotide probe

SEQ ID NO: 22283 - DNA, 32 bp, Artificial; identical to SEQ ID NO: 5564
  oligonucleotide probe

SEQ ID NO: 22284 - DNA, 32 bp, Artificial; identical to SEQ ID NO: 8784
  oligonucleotide probe

SEQ ID NO: 22285 - DNA, 32 bp, Artificial; identical to SEQ ID NO: 8785
  oligonucleotide probe

SEQ ID NO: 22286 - DNA, 32 bp, Artificial; identical to SEQ ID NO: 8760
  oligonucleotide probe

SEQ ID NO: 22287 - DNA, 32 bp, Artificial; identical to SEQ ID NO: 5537
  oligonucleotide probe

SEQ ID NO: 22288 - DNA, 32 bp, Artificial; identical to SEQ ID NO: 8784
  oligonucleotide probe

SEQ ID NO: 22289 - DNA, 32 bp, Artificial; identical to SEQ ID NO: 8785
  oligonucleotide probe

SEQ ID NO: 22290 - DNA, 32 bp, Artificial; identical to SEQ ID NO: 5546
  oligonucleotide probe

SEQ ID NO: 22291 - DNA, 32 bp, Artificial; identical to SEQ ID NO: 8757
  oligonucleotide probe

SEQ ID NO: 22292 - DNA, 32 bp, Artificial; identical to SEQ ID NO: 9922
  oligonucleotide probe

SEQ ID NO: 22293 - DNA, 32 bp, Artificial; identical to SEQ ID NO: 5611
  oligonucleotide probe

SEQ ID NO: 22294 - DNA, 32 bp, Artificial; identical to SEQ ID NO: 8778
  oligonucleotide probe

SEQ ID NO: 22295 - DNA, 32 bp, Artificial; identical to SEQ ID NO: 5564
  oligonucleotide probe

SEQ ID NO: 22296 - DNA, 32 bp, Artificial; identical to SEQ ID NO: 8748
  oligonucleotide probe

SEQ ID NO: 22297 - DNA, 32 bp, Artificial; identical to SEQ ID NO: 8749
  oligonucleotide probe

SEQ ID NO: 22298 - DNA, 32 bp, Artificial; identical to SEQ ID NO: 8784
  oligonucleotide probe

SEQ ID NO: 22299 - DNA, 32 bp, Artificial; identical to SEQ ID NO: 8785
  oligonucleotide probe

SEQ ID NO: 22300 - DNA, 32 bp, Artificial; identical to SEQ ID NO: 8750
  oligonucleotide probe

SEQ ID NO: 22301 - DNA, 32 bp, Artificial; identical to SEQ ID NO: 8751
  oligonucleotide probe

SEQ ID NO: 22302 - DNA, 32 bp, Artificial; identical to SEQ ID NO: 9038
  oligonucleotide probe

SEQ ID NO: 22303 - DNA, 32 bp, Artificial; identical to SEQ ID NO: 5594
  oligonucleotide probe

SEQ ID NO: 22304 - DNA, 32 bp, Artificial; identical to SEQ ID NO: 8762
  oligonucleotide probe

SEQ ID NO: 22305 - DNA, 32 bp, Artificial; identical to SEQ ID NO: 5539
  oligonucleotide probe

SEQ ID NO: 22306 - DNA, 32 bp, Artificial; identical to SEQ ID NO: 9020
  oligonucleotide probe

SEQ ID NO: 22307 - DNA, 32 bp, Artificial; identical to SEQ ID NO: 9021
  oligonucleotide probe

SEQ ID NO: 22308 - DNA, 32 bp, Artificial; identical to SEQ ID NO: 8776
  oligonucleotide probe

SEQ ID NO: 22309 - DNA, 32 bp, Artificial; identical to SEQ ID NO: 8777
  oligonucleotide probe

SEQ ID NO: 22310 - DNA, 32 bp, Artificial; identical to SEQ ID NO: 8766
  oligonucleotide probe

SEQ ID NO: 22311 - DNA, 32 bp, Artificial; identical to SEQ ID NO: 8767
  oligonucleotide probe

SEQ ID NO: 22312 - DNA, 32 bp, Artificial; identical to SEQ ID NO: 8778
  oligonucleotide probe

SEQ ID NO: 22313 - DNA, 32 bp, Artificial; identical to SEQ ID NO: 5564
  oligonucleotide probe

SEQ ID NO: 22314 - DNA, 32 bp, Artificial; identical to SEQ ID NO: 8784
  oligonucleotide probe

SEQ ID NO: 22315 - DNA, 32 bp, Artificial; identical to SEQ ID NO: 8785
  oligonucleotide probe

SEQ ID NO: 22316 - DNA, 32 bp, Artificial; identical to SEQ ID NO: 8780
  oligonucleotide probe

SEQ ID NO: 22317 - DNA, 32 bp, Artificial; identical to SEQ ID NO: 8781
  oligonucleotide probe

SEQ ID NO: 22318 - DNA, 32 bp, Artificial; identical to SEQ ID NO: 8796
  oligonucleotide probe

SEQ ID NO: 22319 - DNA, 32 bp, Artificial; identical to SEQ ID NO: 5538
  oligonucleotide probe

SEQ ID NO: 22320 - DNA, 32 bp, Artificial; identical to SEQ ID NO: 8760
  oligonucleotide probe

SEQ ID NO: 22321 - DNA, 32 bp, Artificial; identical to SEQ ID NO: 5537
  oligonucleotide probe

SEQ ID NO: 22322 - DNA, 32 bp, Artificial; identical to SEQ ID NO: 5546
  oligonucleotide probe

SEQ ID NO: 22323 - DNA, 32 bp, Artificial; identical to SEQ ID NO: 8757
  oligonucleotide probe

SEQ ID NO: 22324 - DNA, 32 bp, Artificial; identical to SEQ ID NO: 8784
  oligonucleotide probe

SEQ ID NO: 22325 - DNA, 32 bp, Artificial; identical to SEQ ID NO: 8785
  oligonucleotide probe

SEQ ID NO: 22326 - DNA, 32 bp, Artificial; identical to SEQ ID NO: 8780
  oligonucleotide probe

SEQ ID NO: 22327 - DNA, 32 bp, Artificial; identical to SEQ ID NO: 8781
  oligonucleotide probe

SEQ ID NO: 22328 - DNA, 32 bp, Artificial; identical to SEQ ID NO: 5547
  oligonucleotide probe

SEQ ID NO: 22329 - DNA, 32 bp, Artificial; identical to SEQ ID NO: 8753
  oligonucleotide probe

SEQ ID NO: 22330 - DNA, 32 bp, Artificial; identical to SEQ ID NO: 8780
  oligonucleotide probe

SEQ ID NO: 22331 - DNA, 32 bp, Artificial; identical to SEQ ID NO: 8781
  oligonucleotide probe

SEQ ID NO: 22332 - DNA, 32 bp, Artificial; identical to SEQ ID NO: 8796
  oligonucleotide probe

SEQ ID NO: 22333 - DNA, 32 bp, Artificial; identical to SEQ ID NO: 5538
  oligonucleotide probe

SEQ ID NO: 22334 - DNA, 32 bp, Artificial; identical to SEQ ID NO: 9314
  oligonucleotide probe

SEQ ID NO: 22335 - DNA, 32 bp, Artificial; identical to SEQ ID NO: 9315
  oligonucleotide probe

SEQ ID NO: 22336 - DNA, 32 bp, Artificial; identical to SEQ ID NO: 8780
  oligonucleotide probe

SEQ ID NO: 22337 - DNA, 32 bp, Artificial; identical to SEQ ID NO: 8781
  oligonucleotide probe

SEQ ID NO: 22338 - DNA, 32 bp, Artificial; identical to SEQ ID NO: 8780
  oligonucleotide probe

SEQ ID NO: 22339 - DNA, 32 bp, Artificial; identical to SEQ ID NO: 8781
  oligonucleotide probe

SEQ ID NO: 22340 - DNA, 32 bp, Artificial; identical to SEQ ID NO: 8762
  oligonucleotide probe

SEQ ID NO: 22341 - DNA, 32 bp, Artificial; identical to SEQ ID NO: 5539
  oligonucleotide probe

SEQ ID NO: 22342 - DNA, 32 bp, Artificial; identical to SEQ ID NO: 8780
  oligonucleotide probe

SEQ ID NO: 22343 - DNA, 32 bp, Artificial; identical to SEQ ID NO: 8781
  oligonucleotide probe

SEQ ID NO: 22344 - DNA, 32 bp, Artificial; identical to SEQ ID NO: 8796
  oligonucleotide probe

SEQ ID NO: 22345 - DNA, 32 bp, Artificial; identical to SEQ ID NO: 5538
  oligonucleotide probe

SEQ ID NO: 22346 - DNA, 32 bp, Artificial; identical to SEQ ID NO: 5547
  oligonucleotide probe

SEQ ID NO: 22347 - DNA, 32 bp, Artificial; identical to SEQ ID NO: 8753
  oligonucleotide probe

SEQ ID NO: 22348 - DNA, 32 bp, Artificial; identical to SEQ ID NO: 8780
  oligonucleotide probe

SEQ ID NO: 22349 - DNA, 32 bp, Artificial; identical to SEQ ID NO: 8781
  oligonucleotide probe

SEQ ID NO: 22350 - DNA, 32 bp, Artificial; identical to SEQ ID NO: 5547
  oligonucleotide probe

SEQ ID NO: 22351 - DNA, 32 bp, Artificial; identical to SEQ ID NO: 8753
  oligonucleotide probe

SEQ ID NO: 22352 - DNA, 32 bp, Artificial; identical to SEQ ID NO: 5546
  oligonucleotide probe

SEQ ID NO: 22353 - DNA, 32 bp, Artificial; identical to SEQ ID NO: 8757
  oligonucleotide probe

SEQ ID NO: 22354 - DNA, 32 bp, Artificial; identical to SEQ ID NO: 8750
  oligonucleotide probe

SEQ ID NO: 22355 - DNA, 32 bp, Artificial; identical to SEQ ID NO: 8751
  oligonucleotide probe

SEQ ID NO: 22356 - DNA, 32 bp, Artificial; identical to SEQ ID NO: 8804
  oligonucleotide probe

SEQ ID NO: 22357 - DNA, 32 bp, Artificial; identical to SEQ ID NO: 5565
  oligonucleotide probe

SEQ ID NO: 22358 - DNA, 32 bp, Artificial; identical to SEQ ID NO: 5547
  oligonucleotide probe

SEQ ID NO: 22359 - DNA, 32 bp, Artificial; identical to SEQ ID NO: 8753
  oligonucleotide probe

SEQ ID NO: 22360 - DNA, 32 bp, Artificial; identical to SEQ ID NO: 8804
  oligonucleotide probe

SEQ ID NO: 22361 - DNA, 32 bp, Artificial; identical to SEQ ID NO: 5565
  oligonucleotide probe

SEQ ID NO: 22362 - DNA, 32 bp, Artificial; identical to SEQ ID NO: 8804
  oligonucleotide probe

SEQ ID NO: 22363 - DNA, 32 bp, Artificial; identical to SEQ ID NO: 5565
  oligonucleotide probe

SEQ ID NO: 22364 - DNA, 32 bp, Artificial; identical to SEQ ID NO: 8784
  oligonucleotide probe

SEQ ID NO: 22365 - DNA, 32 bp, Artificial; identical to SEQ ID NO: 8785
  oligonucleotide probe

SEQ ID NO: 22366 - DNA, 32 bp, Artificial; identical to SEQ ID NO: 8760
  oligonucleotide probe

SEQ ID NO: 22367 - DNA, 32 bp, Artificial; identical to SEQ ID NO: 5537
  oligonucleotide probe

SEQ ID NO: 22368 - DNA, 32 bp, Artificial; identical to SEQ ID NO: 5546
  oligonucleotide probe

SEQ ID NO: 22369 - DNA, 32 bp, Artificial; identical to SEQ ID NO: 8757
  oligonucleotide probe

SEQ ID NO: 22370 - DNA, 32 bp, Artificial; identical to SEQ ID NO: 8780
  oligonucleotide probe

SEQ ID NO: 22371 - DNA, 32 bp, Artificial; identical to SEQ ID NO: 8781
  oligonucleotide probe

SEQ ID NO: 22372 - DNA, 32 bp, Artificial; identical to SEQ ID NO: 8753
  oligonucleotide probe

SEQ ID NO: 22373 - DNA, 32 bp, Artificial; identical to SEQ ID NO: 8760
  oligonucleotide probe

SEQ ID NO: 22374 - DNA, 32 bp, Artificial; identical to SEQ ID NO: 8804
  oligonucleotide probe

SEQ ID NO: 22375 - DNA, 32 bp, Artificial; identical to SEQ ID NO: 5565
  oligonucleotide probe

SEQ ID NO: 22376 - DNA, 32 bp, Artificial; identical to SEQ ID NO: 8760
  oligonucleotide probe

SEQ ID NO: 22377 - DNA, 32 bp, Artificial; identical to SEQ ID NO: 5537
  oligonucleotide probe

SEQ ID NO: 22378 - DNA, 32 bp, Artificial; identical to SEQ ID NO: 8760
  oligonucleotide probe

SEQ ID NO: 22379 - DNA, 32 bp, Artificial; identical to SEQ ID NO: 5537
  oligonucleotide probe

SEQ ID NO: 22380 - DNA, 32 bp, Artificial; identical to SEQ ID NO: 8784
  oligonucleotide probe

SEQ ID NO: 22381 - DNA, 32 bp, Artificial; identical to SEQ ID NO: 8785
  oligonucleotide probe

SEQ ID NO: 22382 - DNA, 32 bp, Artificial; identical to SEQ ID NO: 5546
  oligonucleotide probe

SEQ ID NO: 22383 - DNA, 32 bp, Artificial; identical to SEQ ID NO: 8757
  oligonucleotide probe

SEQ ID NO: 22384 - DNA, 32 bp, Artificial; identical to SEQ ID NO: 8786
  oligonucleotide probe

SEQ ID NO: 22385 - DNA, 32 bp, Artificial; identical to SEQ ID NO: 5585
  oligonucleotide probe

SEQ ID NO: 22386 - DNA, 32 bp, Artificial; identical to SEQ ID NO: 8784
  oligonucleotide probe

SEQ ID NO: 22387 - DNA, 32 bp, Artificial; identical to SEQ ID NO: 8785
  oligonucleotide probe

SEQ ID NO: 22388 - DNA, 32 bp, Artificial; identical to SEQ ID NO: 8760
  oligonucleotide probe

SEQ ID NO: 22389 - DNA, 32 bp, Artificial; identical to SEQ ID NO: 5537
  oligonucleotide probe

SEQ ID NO: 22390 - DNA, 32 bp, Artificial; identical to SEQ ID NO: 5546
  oligonucleotide probe

SEQ ID NO: 22391 - DNA, 32 bp, Artificial; identical to SEQ ID NO: 8757
  oligonucleotide probe

SEQ ID NO: 22392 - DNA, 32 bp, Artificial; identical to SEQ ID NO: 8796
  oligonucleotide probe

SEQ ID NO: 22393 - DNA, 32 bp, Artificial; identical to SEQ ID NO: 5538
  oligonucleotide probe

SEQ ID NO: 22394 - DNA, 32 bp, Artificial; identical to SEQ ID NO: 8834
  oligonucleotide probe

SEQ ID NO: 22395 - DNA, 32 bp, Artificial; identical to SEQ ID NO: 8835
  oligonucleotide probe

SEQ ID NO: 22396 - DNA, 32 bp, Artificial; identical to SEQ ID NO: 5546
  oligonucleotide probe

SEQ ID NO: 22397 - DNA, 32 bp, Artificial; identical to SEQ ID NO: 8757
  oligonucleotide probe

SEQ ID NO: 22398 - DNA, 32 bp, Artificial; identical to SEQ ID NO: 8760
  oligonucleotide probe

SEQ ID NO: 22399 - DNA, 32 bp, Artificial; identical to SEQ ID NO: 5537
  oligonucleotide probe

SEQ ID NO: 22400 - DNA, 32 bp, Artificial; identical to SEQ ID NO: 5547
  oligonucleotide probe

SEQ ID NO: 22401 - DNA, 32 bp, Artificial; identical to SEQ ID NO: 8753
  oligonucleotide probe

SEQ ID NO: 22402 - DNA, 32 bp, Artificial; identical to SEQ ID NO: 8778
  oligonucleotide probe

SEQ ID NO: 22403 - DNA, 32 bp, Artificial; identical to SEQ ID NO: 5564
  oligonucleotide probe

SEQ ID NO: 22404 - DNA, 32 bp, Artificial; identical to SEQ ID NO: 9020
  oligonucleotide probe

SEQ ID NO: 22405 - DNA, 32 bp, Artificial; identical to SEQ ID NO: 9021
  oligonucleotide probe

SEQ ID NO: 22406 - DNA, 32 bp, Artificial; identical to SEQ ID NO: 8804
  oligonucleotide probe

SEQ ID NO: 22407 - DNA, 32 bp, Artificial; identical to SEQ ID NO: 5565
  oligonucleotide probe

SEQ ID NO: 22408 - DNA, 32 bp, Artificial; identical to SEQ ID NO: 8784
  oligonucleotide probe

SEQ ID NO: 22409 - DNA, 32 bp, Artificial; identical to SEQ ID NO: 8785
  oligonucleotide probe

SEQ ID NO: 22410 - DNA, 32 bp, Artificial; identical to SEQ ID NO: 5547
  oligonucleotide probe

SEQ ID NO: 22411 - DNA, 32 bp, Artificial; identical to SEQ ID NO: 8753
  oligonucleotide probe

SEQ ID NO: 22412 - DNA, 32 bp, Artificial; identical to SEQ ID NO: 9020
  oligonucleotide probe

SEQ ID NO: 22413 - DNA, 32 bp, Artificial; identical to SEQ ID NO: 9021
  oligonucleotide probe

SEQ ID NO: 22414 - DNA, 32 bp, Artificial; identical to SEQ ID NO: 5546
  oligonucleotide probe

SEQ ID NO: 22415 - DNA, 32 bp, Artificial; identical to SEQ ID NO: 8757
  oligonucleotide probe

SEQ ID NO: 22416 - DNA, 32 bp, Artificial; identical to SEQ ID NO: 8762
  oligonucleotide probe

SEQ ID NO: 22417 - DNA, 32 bp, Artificial; identical to SEQ ID NO: 5539
  oligonucleotide probe

SEQ ID NO: 22418 - DNA, 32 bp, Artificial; identical to SEQ ID NO: 8760
  oligonucleotide probe

SEQ ID NO: 22419 - DNA, 32 bp, Artificial; identical to SEQ ID NO: 5537
  oligonucleotide probe

SEQ ID NO: 22420 - DNA, 32 bp, Artificial; identical to SEQ ID NO: 5537
  oligonucleotide probe

SEQ ID NO: 22421 - DNA, 32 bp, Artificial; identical to SEQ ID NO: 5537
  oligonucleotide probe

SEQ ID NO: 22422 - DNA, 32 bp, Artificial; identical to SEQ ID NO: 5537
  oligonucleotide probe

SEQ ID NO: 22423 - DNA, 32 bp, Artificial; identical to SEQ ID NO: 5537
  oligonucleotide probe

SEQ ID NO: 22424 - DNA, 32 bp, Artificial; identical to SEQ ID NO: 5537
  oligonucleotide probe

SEQ ID NO: 22425 - DNA, 32 bp, Artificial; identical to SEQ ID NO: 5537
  oligonucleotide probe

SEQ ID NO: 22426 - DNA, 32 bp, Artificial; identical to SEQ ID NO: 5537
  oligonucleotide probe

SEQ ID NO: 22427 - DNA, 32 bp, Artificial; identical to SEQ ID NO: 5537
  oligonucleotide probe

SEQ ID NO: 22428 - DNA, 32 bp, Artificial; identical to SEQ ID NO: 5537
  oligonucleotide probe

SEQ ID NO: 22429 - DNA, 32 bp, Artificial; identical to SEQ ID NO: 5537
  oligonucleotide probe

SEQ ID NO: 22430 - DNA, 32 bp, Artificial; identical to SEQ ID NO: 5537
  oligonucleotide probe

SEQ ID NO: 22431 - DNA, 32 bp, Artificial; identical to SEQ ID NO: 5537
  oligonucleotide probe

SEQ ID NO: 22432 - DNA, 32 bp, Artificial; identical to SEQ ID NO: 5537
  oligonucleotide probe

SEQ ID NO: 22433 - DNA, 32 bp, Artificial; identical to SEQ ID NO: 5537
  oligonucleotide probe

SEQ ID NO: 22434 - DNA, 32 bp, Artificial; identical to SEQ ID NO: 5537
  oligonucleotide probe

SEQ ID NO: 22435 - DNA, 32 bp, Artificial; identical to SEQ ID NO: 5537
  oligonucleotide probe

SEQ ID NO: 22436 - DNA, 32 bp, Artificial; identical to SEQ ID NO: 5537
  oligonucleotide probe

SEQ ID NO: 22437 - DNA, 32 bp, Artificial; identical to SEQ ID NO: 5537
  oligonucleotide probe

SEQ ID NO: 22438 - DNA, 32 bp, Artificial; identical to SEQ ID NO: 5537
  oligonucleotide probe

SEQ ID NO: 22439 - DNA, 32 bp, Artificial; identical to SEQ ID NO: 5537
  oligonucleotide probe

SEQ ID NO: 22440 - DNA, 32 bp, Artificial; identical to SEQ ID NO: 5537
  oligonucleotide probe

SEQ ID NO: 22441 - DNA, 32 bp, Artificial; identical to SEQ ID NO: 5537
  oligonucleotide probe

SEQ ID NO: 22442 - DNA, 32 bp, Artificial; identical to SEQ ID NO: 5537
  oligonucleotide probe

SEQ ID NO: 22443 - DNA, 32 bp, Artificial; identical to SEQ ID NO: 7644
  oligonucleotide probe

SEQ ID NO: 22444 - DNA, 32 bp, Artificial; identical to SEQ ID NO: 5141
  oligonucleotide probe

SEQ ID NO: 22445 - DNA, 32 bp, Artificial; identical to SEQ ID NO: 5537
  oligonucleotide probe

SEQ ID NO: 22446 - DNA, 32 bp, Artificial; identical to SEQ ID NO: 10076
  oligonucleotide probe

SEQ ID NO: 22447 - DNA, 32 bp, Artificial; identical to SEQ ID NO: 5709
  oligonucleotide probe

SEQ ID NO: 22448 - DNA, 32 bp, Artificial; identical to SEQ ID NO: 10078
  oligonucleotide probe

SEQ ID NO: 22449 - DNA, 32 bp, Artificial; identical to SEQ ID NO: 7855
  oligonucleotide probe

SEQ ID NO: 22450 - DNA, 32 bp, Artificial; identical to SEQ ID NO: 7856
  oligonucleotide probe

SEQ ID NO: 22451 - DNA, 32 bp, Artificial; identical to SEQ ID NO: 6131
  oligonucleotide probe

SEQ ID NO: 22452 - DNA, 32 bp, Artificial; identical to SEQ ID NO: 10082
  oligonucleotide probe

SEQ ID NO: 22453 - DNA, 32 bp, Artificial; identical to SEQ ID NO: 8786
  oligonucleotide probe

SEQ ID NO: 22454 - DNA, 32 bp, Artificial; identical to SEQ ID NO: 5585
  oligonucleotide probe

SEQ ID NO: 22455 - DNA, 32 bp, Artificial; identical to SEQ ID NO: 10085
  oligonucleotide probe

SEQ ID NO: 22456 - DNA, 32 bp, Artificial; identical to SEQ ID NO: 10086
  oligonucleotide probe

SEQ ID NO: 22457 - DNA, 32 bp, Artificial; identical to SEQ ID NO: 5224
  oligonucleotide probe

SEQ ID NO: 22458 - DNA, 32 bp, Artificial; identical to SEQ ID NO: 7840
  oligonucleotide probe

SEQ ID NO: 22459 - DNA, 32 bp, Artificial; identical to SEQ ID NO: 7597
  oligonucleotide probe

SEQ ID NO: 22460 - DNA, 32 bp, Artificial; identical to SEQ ID NO: 7598
  oligonucleotide probe

SEQ ID NO: 22461 - DNA, 32 bp, Artificial; identical to SEQ ID NO: 8868
  oligonucleotide probe

SEQ ID NO: 22462 - DNA, 32 bp, Artificial; identical to SEQ ID NO: 7833
  oligonucleotide probe

SEQ ID NO: 22463 - DNA, 32 bp, Artificial; identical to SEQ ID NO: 8786
  oligonucleotide probe

SEQ ID NO: 22464 - DNA, 32 bp, Artificial; identical to SEQ ID NO: 5585
  oligonucleotide probe

SEQ ID NO: 22465 - DNA, 32 bp, Artificial; identical to SEQ ID NO: 8750
  oligonucleotide probe

SEQ ID NO: 22466 - DNA, 32 bp, Artificial; identical to SEQ ID NO: 8751
  oligonucleotide probe

SEQ ID NO: 22467 - DNA, 32 bp, Artificial; identical to SEQ ID NO: 10097
  oligonucleotide probe

SEQ ID NO: 22468 - DNA, 32 bp, Artificial; identical to SEQ ID NO: 5709
  oligonucleotide probe

SEQ ID NO: 22469 - DNA, 32 bp, Artificial; identical to SEQ ID NO: 8834
  oligonucleotide probe

SEQ ID NO: 22470 - DNA, 32 bp, Artificial; identical to SEQ ID NO: 8835
  oligonucleotide probe

SEQ ID NO: 22471 - DNA, 32 bp, Artificial; identical to SEQ ID NO: 8804
  oligonucleotide probe

SEQ ID NO: 22472 - DNA, 32 bp, Artificial; identical to SEQ ID NO: 5565
  oligonucleotide probe

SEQ ID NO: 22473 - DNA, 32 bp, Artificial; identical to SEQ ID NO: 5416
  oligonucleotide probe

SEQ ID NO: 22474 - DNA, 32 bp, Artificial; identical to SEQ ID NO: 8467
  oligonucleotide probe

SEQ ID NO: 22475 - DNA, 32 bp, Artificial; identical to SEQ ID NO: 8868
  oligonucleotide probe

SEQ ID NO: 22476 - DNA, 32 bp, Artificial; identical to SEQ ID NO: 5584
  oligonucleotide probe

SEQ ID NO: 22477 - DNA, 32 bp, Artificial; identical to SEQ ID NO: 7856
  oligonucleotide probe

SEQ ID NO: 22478 - DNA, 32 bp, Artificial; identical to SEQ ID NO: 7865
  oligonucleotide probe

SEQ ID NO: 22479 - DNA, 32 bp, Artificial; identical to SEQ ID NO: 8778
  oligonucleotide probe

SEQ ID NO: 22480 - DNA, 32 bp, Artificial; identical to SEQ ID NO: 5564
  oligonucleotide probe

SEQ ID NO: 22481 - DNA, 32 bp, Artificial; identical to SEQ ID NO: 10097
  oligonucleotide probe

SEQ ID NO: 22482 - DNA, 32 bp, Artificial; identical to SEQ ID NO: 5709
  oligonucleotide probe

SEQ ID NO: 22483 - DNA, 32 bp, Artificial; identical to SEQ ID NO: 10113
  oligonucleotide probe

SEQ ID NO: 22484 - DNA, 32 bp, Artificial; identical to SEQ ID NO: 10114
  oligonucleotide probe

SEQ ID NO: 22485 - DNA, 32 bp, Artificial; identical to SEQ ID NO: 10115
  oligonucleotide probe

SEQ ID NO: 22486 - DNA, 32 bp, Artificial; identical to SEQ ID NO: 10116
  oligonucleotide probe

SEQ ID NO: 22487 - DNA, 32 bp, Artificial; identical to SEQ ID NO: 6131
  oligonucleotide probe

SEQ ID NO: 22488 - DNA, 32 bp, Artificial; identical to SEQ ID NO: 10082
  oligonucleotide probe

SEQ ID NO: 22489 - DNA, 32 bp, Artificial; identical to SEQ ID NO: 5133
  oligonucleotide probe

SEQ ID NO: 22490 - DNA, 32 bp, Artificial; identical to SEQ ID NO: 7594
  oligonucleotide probe

SEQ ID NO: 22491 - DNA, 32 bp, Artificial; identical to SEQ ID NO: 7606
  oligonucleotide probe

SEQ ID NO: 22492 - DNA, 32 bp, Artificial; identical to SEQ ID NO: 7947
  oligonucleotide probe

SEQ ID NO: 22493 - DNA, 32 bp, Artificial; identical to SEQ ID NO: 10123
  oligonucleotide probe

SEQ ID NO: 22494 - DNA, 32 bp, Artificial; identical to SEQ ID NO: 5537
  oligonucleotide probe

SEQ ID NO: 22495 - DNA, 32 bp, Artificial; identical to SEQ ID NO: 7831
  oligonucleotide probe

SEQ ID NO: 22496 - DNA, 32 bp, Artificial; identical to SEQ ID NO: 7832
  oligonucleotide probe

SEQ ID NO: 22497 - DNA, 32 bp, Artificial; identical to SEQ ID NO: 6145
  oligonucleotide probe

SEQ ID NO: 22498 - DNA, 32 bp, Artificial; identical to SEQ ID NO: 7673
  oligonucleotide probe

SEQ ID NO: 22499 - DNA, 32 bp, Artificial; identical to SEQ ID NO: 5133
  oligonucleotide probe

SEQ ID NO: 22500 - DNA, 32 bp, Artificial; identical to SEQ ID NO: 7594
  oligonucleotide probe

SEQ ID NO: 22501 - DNA, 32 bp, Artificial; identical to SEQ ID NO: 7690
  oligonucleotide probe

SEQ ID NO: 22502 - DNA, 32 bp, Artificial; identical to SEQ ID NO: 7662
  oligonucleotide probe

SEQ ID NO: 22503 - DNA, 32 bp, Artificial; identical to SEQ ID NO: 8047
  oligonucleotide probe

SEQ ID NO: 22504 - DNA, 32 bp, Artificial; identical to SEQ ID NO: 5240
  oligonucleotide probe

SEQ ID NO: 22505 - DNA, 32 bp, Artificial; identical to SEQ ID NO: 8750
  oligonucleotide probe

SEQ ID NO: 22506 - DNA, 32 bp, Artificial; identical to SEQ ID NO: 8751
  oligonucleotide probe

SEQ ID NO: 22507 - DNA, 32 bp, Artificial; identical to SEQ ID NO: 10097
  oligonucleotide probe

SEQ ID NO: 22508 - DNA, 32 bp, Artificial; identical to SEQ ID NO: 5709
  oligonucleotide probe

SEQ ID NO: 22509 - DNA, 32 bp, Artificial; identical to SEQ ID NO: 10139
  oligonucleotide probe

SEQ ID NO: 22510 - DNA, 32 bp, Artificial; identical to SEQ ID NO: 10140
  oligonucleotide probe

SEQ ID NO: 22511 - DNA, 32 bp, Artificial; identical to SEQ ID NO: 6131
  oligonucleotide probe

SEQ ID NO: 22512 - DNA, 32 bp, Artificial; identical to SEQ ID NO: 10082
  oligonucleotide probe

SEQ ID NO: 22513 - DNA, 32 bp, Artificial; identical to SEQ ID NO: 8778
  oligonucleotide probe

SEQ ID NO: 22514 - DNA, 32 bp, Artificial; identical to SEQ ID NO: 5564
  oligonucleotide probe

SEQ ID NO: 22515 - DNA, 32 bp, Artificial; identical to SEQ ID NO: 7866
  oligonucleotide probe

SEQ ID NO: 22516 - DNA, 32 bp, Artificial; identical to SEQ ID NO: 5136
  oligonucleotide probe

SEQ ID NO: 22517 - DNA, 32 bp, Artificial; identical to SEQ ID NO: 10147
  oligonucleotide probe

SEQ ID NO: 22518 - DNA, 32 bp, Artificial; identical to SEQ ID NO: 10148
  oligonucleotide probe

SEQ ID NO: 22519 - DNA, 32 bp, Artificial; identical to SEQ ID NO: 7659
  oligonucleotide probe

SEQ ID NO: 22520 - DNA, 32 bp, Artificial; identical to SEQ ID NO: 7783
  oligonucleotide probe

SEQ ID NO: 22521 - DNA, 32 bp, Artificial; identical to SEQ ID NO: 8748
  oligonucleotide probe

SEQ ID NO: 22522 - DNA, 32 bp, Artificial; identical to SEQ ID NO: 8749
  oligonucleotide probe

SEQ ID NO: 22523 - DNA, 32 bp, Artificial; identical to SEQ ID NO: 5224
  oligonucleotide probe

SEQ ID NO: 22524 - DNA, 32 bp, Artificial; identical to SEQ ID NO: 8796
  oligonucleotide probe

SEQ ID NO: 22525 - DNA, 32 bp, Artificial; identical to SEQ ID NO: 9252
  oligonucleotide probe

SEQ ID NO: 22526 - DNA, 32 bp, Artificial; identical to SEQ ID NO: 9253
  oligonucleotide probe

SEQ ID NO: 22527 - DNA, 32 bp, Artificial; identical to SEQ ID NO: 8776
  oligonucleotide probe

SEQ ID NO: 22528 - DNA, 32 bp, Artificial; identical to SEQ ID NO: 8777
  oligonucleotide probe

SEQ ID NO: 22529 - DNA, 32 bp, Artificial; identical to SEQ ID NO: 5231
  oligonucleotide probe

SEQ ID NO: 22530 - DNA, 32 bp, Artificial; identical to SEQ ID NO: 7835
  oligonucleotide probe

SEQ ID NO: 22531 - DNA, 32 bp, Artificial; identical to SEQ ID NO: 7853
  oligonucleotide probe

SEQ ID NO: 22532 - DNA, 32 bp, Artificial; identical to SEQ ID NO: 8776
  oligonucleotide probe

SEQ ID NO: 22533 - DNA, 32 bp, Artificial; identical to SEQ ID NO: 8760
  oligonucleotide probe

SEQ ID NO: 22534 - DNA, 32 bp, Artificial; identical to SEQ ID NO: 10164
  oligonucleotide probe

SEQ ID NO: 22535 - DNA, 32 bp, Artificial; identical to SEQ ID NO: 8786
  oligonucleotide probe

SEQ ID NO: 22536 - DNA, 32 bp, Artificial; identical to SEQ ID NO: 7833
  oligonucleotide probe

SEQ ID NO: 22537 - DNA, 32 bp, Artificial; identical to SEQ ID NO: 8750
  oligonucleotide probe

SEQ ID NO: 22538 - DNA, 32 bp, Artificial; identical to SEQ ID NO: 8751
  oligonucleotide probe

SEQ ID NO: 22539 - DNA, 32 bp, Artificial; identical to SEQ ID NO: 8796
  oligonucleotide probe

SEQ ID NO: 22540 - DNA, 32 bp, Artificial; identical to SEQ ID NO: 5538
  oligonucleotide probe

SEQ ID NO: 22541 - DNA, 32 bp, Artificial; identical to SEQ ID NO: 5231
  oligonucleotide probe

SEQ ID NO: 22542 - DNA, 32 bp, Artificial; identical to SEQ ID NO: 7835
  oligonucleotide probe

SEQ ID NO: 22543 - DNA, 32 bp, Artificial; identical to SEQ ID NO: 7834
  oligonucleotide probe

SEQ ID NO: 22544 - DNA, 32 bp, Artificial; identical to SEQ ID NO: 7831
  oligonucleotide probe

SEQ ID NO: 22545 - DNA, 32 bp, Artificial; identical to SEQ ID NO: 10164
  oligonucleotide probe

SEQ ID NO: 22546 - DNA, 32 bp, Artificial; identical to SEQ ID NO: 10139
  oligonucleotide probe

SEQ ID NO: 22547 - DNA, 32 bp, Artificial; identical to SEQ ID NO: 8784
  oligonucleotide probe

SEQ ID NO: 22548 - DNA, 32 bp, Artificial; identical to SEQ ID NO: 8785
  oligonucleotide probe

SEQ ID NO: 22549 - DNA, 32 bp, Artificial; identical to SEQ ID NO: 7947
  oligonucleotide probe

SEQ ID NO: 22550 - DNA, 32 bp, Artificial; identical to SEQ ID NO: 7948
  oligonucleotide probe

SEQ ID NO: 22551 - DNA, 32 bp, Artificial; identical to SEQ ID NO: 7842
  oligonucleotide probe

SEQ ID NO: 22552 - DNA, 32 bp, Artificial; identical to SEQ ID NO: 9252
  oligonucleotide probe

SEQ ID NO: 22553 - DNA, 32 bp, Artificial; identical to SEQ ID NO: 5416
  oligonucleotide probe

SEQ ID NO: 22554 - DNA, 32 bp, Artificial; identical to SEQ ID NO: 8467
  oligonucleotide probe

SEQ ID NO: 22555 - DNA, 32 bp, Artificial; identical to SEQ ID NO: 10185
  oligonucleotide probe

SEQ ID NO: 22556 - DNA, 32 bp, Artificial; identical to SEQ ID NO: 10186
  oligonucleotide probe

SEQ ID NO: 22557 - DNA, 32 bp, Artificial; identical to SEQ ID NO: 7597
  oligonucleotide probe

SEQ ID NO: 22558 - DNA, 32 bp, Artificial; identical to SEQ ID NO: 7598
  oligonucleotide probe

SEQ ID NO: 22559 - DNA, 32 bp, Artificial; identical to SEQ ID NO: 10189
  oligonucleotide probe

SEQ ID NO: 22560 - DNA, 32 bp, Artificial; identical to SEQ ID NO: 5551
  oligonucleotide probe

SEQ ID NO: 22561 - DNA, 32 bp, Artificial; identical to SEQ ID NO: 7856
  oligonucleotide probe

SEQ ID NO: 22562 - DNA, 32 bp, Artificial; identical to SEQ ID NO: 7865
  oligonucleotide probe

SEQ ID NO: 22563 - DNA, 32 bp, Artificial; identical to SEQ ID NO: 10076
  oligonucleotide probe

SEQ ID NO: 22564 - DNA, 32 bp, Artificial; identical to SEQ ID NO: 10086
  oligonucleotide probe

SEQ ID NO: 22565 - DNA, 32 bp, Artificial; identical to SEQ ID NO: 8784
  oligonucleotide probe

SEQ ID NO: 22566 - DNA, 32 bp, Artificial; identical to SEQ ID NO: 8785
  oligonucleotide probe

SEQ ID NO: 22567 - DNA, 32 bp, Artificial; identical to SEQ ID NO: 10097
  oligonucleotide probe

SEQ ID NO: 22568 - DNA, 32 bp, Artificial; identical to SEQ ID NO: 5709
  oligonucleotide probe

SEQ ID NO: 22569 - DNA, 32 bp, Artificial; identical to SEQ ID NO: 7644
  oligonucleotide probe

SEQ ID NO: 22570 - DNA, 32 bp, Artificial; identical to SEQ ID NO: 5141
  oligonucleotide probe

SEQ ID NO: 22571 - DNA, 32 bp, Artificial; identical to SEQ ID NO: 9020
  oligonucleotide probe

SEQ ID NO: 22572 - DNA, 32 bp, Artificial; identical to SEQ ID NO: 9021
  oligonucleotide probe

SEQ ID NO: 22573 - DNA, 32 bp, Artificial; identical to SEQ ID NO: 10185
  oligonucleotide probe

SEQ ID NO: 22574 - DNA, 32 bp, Artificial; identical to SEQ ID NO: 10186
  oligonucleotide probe

SEQ ID NO: 22575 - DNA, 32 bp, Artificial; identical to SEQ ID NO: 8750
  oligonucleotide probe

SEQ ID NO: 22576 - DNA, 32 bp, Artificial; identical to SEQ ID NO: 8751
  oligonucleotide probe

SEQ ID NO: 22577 - DNA, 32 bp, Artificial; identical to SEQ ID NO: 7832
  oligonucleotide probe

SEQ ID NO: 22578 - DNA, 32 bp, Artificial; identical to SEQ ID NO: 9020
  oligonucleotide probe

SEQ ID NO: 22579 - DNA, 32 bp, Artificial; identical to SEQ ID NO: 8247
  oligonucleotide probe

SEQ ID NO: 22580 - DNA, 32 bp, Artificial; identical to SEQ ID NO: 8240
  oligonucleotide probe

SEQ ID NO: 22581 - DNA, 32 bp, Artificial; identical to SEQ ID NO: 10097
  oligonucleotide probe

SEQ ID NO: 22582 - DNA, 32 bp, Artificial; identical to SEQ ID NO: 10086
  oligonucleotide probe

SEQ ID NO: 22583 - DNA, 32 bp, Artificial; identical to SEQ ID NO: 10139
  oligonucleotide probe

SEQ ID NO: 22584 - DNA, 32 bp, Artificial; identical to SEQ ID NO: 10140
  oligonucleotide probe

SEQ ID NO: 22585 - DNA, 32 bp, Artificial; identical to SEQ ID NO: 7673
  oligonucleotide probe

SEQ ID NO: 22586 - DNA, 32 bp, Artificial; identical to SEQ ID NO: 7690
  oligonucleotide probe

SEQ ID NO: 22587 - DNA, 32 bp, Artificial; identical to SEQ ID NO: 5232
  oligonucleotide probe

SEQ ID NO: 22588 - DNA, 32 bp, Artificial; identical to SEQ ID NO: 9038
  oligonucleotide probe

SEQ ID NO: 22589 - DNA, 32 bp, Artificial; identical to SEQ ID NO: 5709
  oligonucleotide probe

SEQ ID NO: 22590 - DNA, 32 bp, Artificial; identical to SEQ ID NO: 10078
  oligonucleotide probe

SEQ ID NO: 22591 - DNA, 32 bp, Artificial; identical to SEQ ID NO: 10086
  oligonucleotide probe

SEQ ID NO: 22592 - DNA, 32 bp, Artificial; identical to SEQ ID NO: 10115
  oligonucleotide probe

SEQ ID NO: 22593 - DNA, 32 bp, Artificial; identical to SEQ ID NO: 5134
  oligonucleotide probe

SEQ ID NO: 22594 - DNA, 32 bp, Artificial; identical to SEQ ID NO: 7905
  oligonucleotide probe

SEQ ID NO: 22595 - DNA, 32 bp, Artificial; identical to SEQ ID NO: 5554
  oligonucleotide probe

SEQ ID NO: 22596 - DNA, 32 bp, Artificial; identical to SEQ ID NO: 10226
  oligonucleotide probe

SEQ ID NO: 22597 - DNA, 32 bp, Artificial; identical to SEQ ID NO: 5160
  oligonucleotide probe

SEQ ID NO: 22598 - DNA, 32 bp, Artificial; identical to SEQ ID NO: 8244
  oligonucleotide probe

SEQ ID NO: 22599 - DNA, 32 bp, Artificial; identical to SEQ ID NO: 5550
  oligonucleotide probe

SEQ ID NO: 22600 - DNA, 32 bp, Artificial; identical to SEQ ID NO: 8753
  oligonucleotide probe

SEQ ID NO: 22601 - DNA, 32 bp, Artificial; identical to SEQ ID NO: 8753
  oligonucleotide probe

SEQ ID NO: 22602 - DNA, 32 bp, Artificial; identical to SEQ ID NO: 8760
  oligonucleotide probe

SEQ ID NO: 22603 - DNA, 32 bp, Artificial; identical to SEQ ID NO: 10078
  oligonucleotide probe

SEQ ID NO: 22604 - DNA, 32 bp, Artificial; identical to SEQ ID NO: 5555
  oligonucleotide probe

SEQ ID NO: 22605 - DNA, 32 bp, Artificial; identical to SEQ ID NO: 8753
  oligonucleotide probe

SEQ ID NO: 22606 - DNA, 32 bp, Artificial; identical to SEQ ID NO: 8760
  oligonucleotide probe

SEQ ID NO: 22607 - DNA, 32 bp, Artificial; identical to SEQ ID NO: 9020
  oligonucleotide probe

SEQ ID NO: 22608 - DNA, 32 bp, Artificial; identical to SEQ ID NO: 9021
  oligonucleotide probe

SEQ ID NO: 22609 - DNA, 32 bp, Artificial; identical to SEQ ID NO: 8804
  oligonucleotide probe

SEQ ID NO: 22610 - DNA, 32 bp, Artificial; identical to SEQ ID NO: 5565
  oligonucleotide probe

SEQ ID NO: 22611 - DNA, 32 bp, Artificial; identical to SEQ ID NO: 5399
  oligonucleotide probe

SEQ ID NO: 22612 - DNA, 32 bp, Artificial; identical to SEQ ID NO: 7673
  oligonucleotide probe

SEQ ID NO: 22613 - DNA, 32 bp, Artificial; identical to SEQ ID NO: 8760
  oligonucleotide probe

SEQ ID NO: 22614 - DNA, 32 bp, Artificial; identical to SEQ ID NO: 10164
  oligonucleotide probe

SEQ ID NO: 22615 - DNA, 32 bp, Artificial; identical to SEQ ID NO: 8748
  oligonucleotide probe

SEQ ID NO: 22616 - DNA, 32 bp, Artificial; identical to SEQ ID NO: 8749
  oligonucleotide probe

SEQ ID NO: 22617 - DNA, 32 bp, Artificial; identical to SEQ ID NO: 8762
  oligonucleotide probe

SEQ ID NO: 22618 - DNA, 32 bp, Artificial; identical to SEQ ID NO: 5539
  oligonucleotide probe

SEQ ID NO: 22619 - DNA, 32 bp, Artificial; identical to SEQ ID NO: 8781
  oligonucleotide probe

SEQ ID NO: 22620 - DNA, 32 bp, Artificial; identical to SEQ ID NO: 8784
  oligonucleotide probe

SEQ ID NO: 22621 - DNA, 32 bp, Artificial; identical to SEQ ID NO: 10139
  oligonucleotide probe

SEQ ID NO: 22622 - DNA, 32 bp, Artificial; identical to SEQ ID NO: 10140
  oligonucleotide probe

SEQ ID NO: 22623 - DNA, 32 bp, Artificial; identical to SEQ ID NO: 5399
  oligonucleotide probe

SEQ ID NO: 22624 - DNA, 32 bp, Artificial; identical to SEQ ID NO: 10053
  oligonucleotide probe

SEQ ID NO: 22625 - DNA, 32 bp, Artificial; identical to SEQ ID NO: 8760
  oligonucleotide probe

SEQ ID NO: 22626 - DNA, 32 bp, Artificial; identical to SEQ ID NO: 10164
  oligonucleotide probe

SEQ ID NO: 22627 - DNA, 32 bp, Artificial; identical to SEQ ID NO: 10086
  oligonucleotide probe

SEQ ID NO: 22628 - DNA, 32 bp, Artificial; identical to SEQ ID NO: 10115
  oligonucleotide probe

SEQ ID NO: 22629 - DNA, 32 bp, Artificial; identical to SEQ ID NO: 5232
  oligonucleotide probe

SEQ ID NO: 22630 - DNA, 32 bp, Artificial; identical to SEQ ID NO: 7597
  oligonucleotide probe

SEQ ID NO: 22631 - DNA, 32 bp, Artificial; identical to SEQ ID NO: 8442
  oligonucleotide probe

SEQ ID NO: 22632 - DNA, 32 bp, Artificial; identical to SEQ ID NO: 8571
  oligonucleotide probe

SEQ ID NO: 22633 - DNA, 32 bp, Artificial; identical to SEQ ID NO: 5545
  oligonucleotide probe

SEQ ID NO: 22634 - DNA, 32 bp, Artificial; identical to SEQ ID NO: 10264
  oligonucleotide probe

SEQ ID NO: 22635 - DNA, 32 bp, Artificial; identical to SEQ ID NO: 7948
  oligonucleotide probe

SEQ ID NO: 22636 - DNA, 32 bp, Artificial; identical to SEQ ID NO: 7841
  oligonucleotide probe

SEQ ID NO: 22637 - DNA, 32 bp, Artificial; identical to SEQ ID NO: 8776
  oligonucleotide probe

SEQ ID NO: 22638 - DNA, 32 bp, Artificial; identical to SEQ ID NO: 8777
  oligonucleotide probe

SEQ ID NO: 22639 - DNA, 32 bp, Artificial; identical to SEQ ID NO: 7833
  oligonucleotide probe

SEQ ID NO: 22640 - DNA, 32 bp, Artificial; identical to SEQ ID NO: 7834
  oligonucleotide probe

SEQ ID NO: 22641 - DNA, 32 bp, Artificial; identical to SEQ ID NO: 5547
  oligonucleotide probe

SEQ ID NO: 22642 - DNA, 32 bp, Artificial; identical to SEQ ID NO: 10272
  oligonucleotide probe

SEQ ID NO: 22643 - DNA, 32 bp, Artificial; identical to SEQ ID NO: 8776
  oligonucleotide probe

SEQ ID NO: 22644 - DNA, 32 bp, Artificial; identical to SEQ ID NO: 8777
  oligonucleotide probe

SEQ ID NO: 22645 - DNA, 32 bp, Artificial; identical to SEQ ID NO: 9826
  oligonucleotide probe

SEQ ID NO: 22646 - DNA, 32 bp, Artificial; identical to SEQ ID NO: 7623
  oligonucleotide probe

SEQ ID NO: 22647 - DNA, 32 bp, Artificial; identical to SEQ ID NO: 8804
  oligonucleotide probe

SEQ ID NO: 22648 - DNA, 32 bp, Artificial; identical to SEQ ID NO: 5565
  oligonucleotide probe

SEQ ID NO: 22649 - DNA, 32 bp, Artificial; identical to SEQ ID NO: 5554
  oligonucleotide probe

SEQ ID NO: 22650 - DNA, 32 bp, Artificial; identical to SEQ ID NO: 10226
  oligonucleotide probe

SEQ ID NO: 22651 - DNA, 32 bp, Artificial; identical to SEQ ID NO: 5550
  oligonucleotide probe

SEQ ID NO: 22652 - DNA, 32 bp, Artificial; identical to SEQ ID NO: 10282
  oligonucleotide probe

SEQ ID NO: 22653 - DNA, 32 bp, Artificial; identical to SEQ ID NO: 10283
  oligonucleotide probe

SEQ ID NO: 22654 - DNA, 32 bp, Artificial; identical to SEQ ID NO: 10284
  oligonucleotide probe

SEQ ID NO: 22655 - DNA, 32 bp, Artificial; identical to SEQ ID NO: 9314
  oligonucleotide probe

SEQ ID NO: 22656 - DNA, 32 bp, Artificial; identical to SEQ ID NO: 9315
  oligonucleotide probe

SEQ ID NO: 22657 - DNA, 32 bp, Artificial; identical to SEQ ID NO: 5185
  oligonucleotide probe

SEQ ID NO: 22658 - DNA, 32 bp, Artificial; identical to SEQ ID NO: 7655
  oligonucleotide probe

SEQ ID NO: 22659 - DNA, 32 bp, Artificial; identical to SEQ ID NO: 5547
  oligonucleotide probe

SEQ ID NO: 22660 - DNA, 32 bp, Artificial; identical to SEQ ID NO: 10272
  oligonucleotide probe

SEQ ID NO: 22661 - DNA, 32 bp, Artificial; identical to SEQ ID NO: 5160
  oligonucleotide probe

SEQ ID NO: 22662 - DNA, 32 bp, Artificial; identical to SEQ ID NO: 8244
  oligonucleotide probe

SEQ ID NO: 22663 - DNA, 32 bp, Artificial; identical to SEQ ID NO: 5185
  oligonucleotide probe

SEQ ID NO: 22664 - DNA, 32 bp, Artificial; identical to SEQ ID NO: 7655
  oligonucleotide probe

SEQ ID NO: 22665 - DNA, 32 bp, Artificial; identical to SEQ ID NO: 10164
  oligonucleotide probe

SEQ ID NO: 22666 - DNA, 32 bp, Artificial; identical to SEQ ID NO: 10139
  oligonucleotide probe

SEQ ID NO: 22667 - DNA, 32 bp, Artificial; identical to SEQ ID NO: 8778
  oligonucleotide probe

SEQ ID NO: 22668 - DNA, 32 bp, Artificial; identical to SEQ ID NO: 5564
  oligonucleotide probe

SEQ ID NO: 22669 - DNA, 32 bp, Artificial; identical to SEQ ID NO: 8247
  oligonucleotide probe

SEQ ID NO: 22670 - DNA, 32 bp, Artificial; identical to SEQ ID NO: 8240
  oligonucleotide probe

SEQ ID NO: 22671 - DNA, 32 bp, Artificial; identical to SEQ ID NO: 10076
  oligonucleotide probe

SEQ ID NO: 22672 - DNA, 32 bp, Artificial; identical to SEQ ID NO: 6074
  oligonucleotide probe

SEQ ID NO: 22673 - DNA, 32 bp, Artificial; identical to SEQ ID NO: 10185
  oligonucleotide probe

SEQ ID NO: 22674 - DNA, 32 bp, Artificial; identical to SEQ ID NO: 10186
  oligonucleotide probe

SEQ ID NO: 22675 - DNA, 32 bp, Artificial; identical to SEQ ID NO: 8796
  oligonucleotide probe

SEQ ID NO: 22676 - DNA, 32 bp, Artificial; identical to SEQ ID NO: 5538
  oligonucleotide probe

SEQ ID NO: 22677 - DNA, 32 bp, Artificial; identical to SEQ ID NO: 5594
  oligonucleotide probe

SEQ ID NO: 22678 - DNA, 32 bp, Artificial; identical to SEQ ID NO: 8936
  oligonucleotide probe

SEQ ID NO: 22679 - DNA, 32 bp, Artificial; identical to SEQ ID NO: 10116
  oligonucleotide probe

SEQ ID NO: 22680 - DNA, 32 bp, Artificial; identical to SEQ ID NO: 10147
  oligonucleotide probe

SEQ ID NO: 22681 - DNA, 32 bp, Artificial; identical to SEQ ID NO: 8766
  oligonucleotide probe

SEQ ID NO: 22682 - DNA, 32 bp, Artificial; identical to SEQ ID NO: 8767
  oligonucleotide probe

SEQ ID NO: 22683 - DNA, 32 bp, Artificial; identical to SEQ ID NO: 8780
  oligonucleotide probe

SEQ ID NO: 22684 - DNA, 32 bp, Artificial; identical to SEQ ID NO: 8781
  oligonucleotide probe

SEQ ID NO: 22685 - DNA, 32 bp, Artificial; identical to SEQ ID NO: 5547
  oligonucleotide probe

SEQ ID NO: 22686 - DNA, 32 bp, Artificial; identical to SEQ ID NO: 10272
  oligonucleotide probe

SEQ ID NO: 22687 - DNA, 32 bp, Artificial; identical to SEQ ID NO: 10148
  oligonucleotide probe

SEQ ID NO: 22688 - DNA, 32 bp, Artificial; identical to SEQ ID NO: 10318
  oligonucleotide probe

SEQ ID NO: 22689 - DNA, 32 bp, Artificial; identical to SEQ ID NO: 10078
  oligonucleotide probe

SEQ ID NO: 22690 - DNA, 32 bp, Artificial; identical to SEQ ID NO: 5555
  oligonucleotide probe

SEQ ID NO: 22691 - DNA, 32 bp, Artificial; identical to SEQ ID NO: 5134
  oligonucleotide probe

SEQ ID NO: 22692 - DNA, 32 bp, Artificial; identical to SEQ ID NO: 7905
  oligonucleotide probe

SEQ ID NO: 22693 - DNA, 32 bp, Artificial; identical to SEQ ID NO: 10283
  oligonucleotide probe

SEQ ID NO: 22694 - DNA, 32 bp, Artificial; identical to SEQ ID NO: 5537
  oligonucleotide probe

SEQ ID NO: 22695 - DNA, 32 bp, Artificial; identical to SEQ ID NO: 10116
  oligonucleotide probe

SEQ ID NO: 22696 - DNA, 32 bp, Artificial; identical to SEQ ID NO: 10147
  oligonucleotide probe

SEQ ID NO: 22697 - DNA, 32 bp, Artificial; identical to SEQ ID NO: 8936
  oligonucleotide probe

SEQ ID NO: 22698 - DNA, 32 bp, Artificial; identical to SEQ ID NO: 5595
  oligonucleotide probe

SEQ ID NO: 22699 - DNA, 32 bp, Artificial; identical to SEQ ID NO: 7842
  oligonucleotide probe

SEQ ID NO: 22700 - DNA, 32 bp, Artificial; identical to SEQ ID NO: 9252
  oligonucleotide probe

SEQ ID NO: 22701 - DNA, 32 bp, Artificial; identical to SEQ ID NO: 10331
  oligonucleotide probe

SEQ ID NO: 22702 - DNA, 32 bp, Artificial; identical to SEQ ID NO: 10332
  oligonucleotide probe

SEQ ID NO: 22703 - DNA, 32 bp, Artificial; identical to SEQ ID NO: 8780
  oligonucleotide probe

SEQ ID NO: 22704 - DNA, 32 bp, Artificial; identical to SEQ ID NO: 8781
  oligonucleotide probe

SEQ ID NO: 22705 - DNA, 32 bp, Artificial; identical to SEQ ID NO: 5540
  oligonucleotide probe

SEQ ID NO: 22706 - DNA, 32 bp, Artificial; identical to SEQ ID NO: 10336
  oligonucleotide probe

SEQ ID NO: 22707 - DNA, 32 bp, Artificial; identical to SEQ ID NO: 8762
  oligonucleotide probe

SEQ ID NO: 22708 - DNA, 32 bp, Artificial; identical to SEQ ID NO: 5539
  oligonucleotide probe

SEQ ID NO: 22709 - DNA, 32 bp, Artificial; identical to SEQ ID NO: 8766
  oligonucleotide probe

SEQ ID NO: 22710 - DNA, 32 bp, Artificial; identical to SEQ ID NO: 5136
  oligonucleotide probe

SEQ ID NO: 22711 - DNA, 32 bp, Artificial; identical to SEQ ID NO: 8784
  oligonucleotide probe

SEQ ID NO: 22712 - DNA, 32 bp, Artificial; identical to SEQ ID NO: 8785
  oligonucleotide probe

SEQ ID NO: 22713 - DNA, 32 bp, Artificial; identical to SEQ ID NO: 10076
  oligonucleotide probe

SEQ ID NO: 22714 - DNA, 32 bp, Artificial; identical to SEQ ID NO: 6074
  oligonucleotide probe

SEQ ID NO: 22715 - DNA, 32 bp, Artificial; identical to SEQ ID NO: 10189
  oligonucleotide probe

SEQ ID NO: 22716 - DNA, 32 bp, Artificial; identical to SEQ ID NO: 5551
  oligonucleotide probe

SEQ ID NO: 22717 - DNA, 32 bp, Artificial; identical to SEQ ID NO: 8834
  oligonucleotide probe

SEQ ID NO: 22718 - DNA, 32 bp, Artificial; identical to SEQ ID NO: 8835
  oligonucleotide probe

SEQ ID NO: 22719 - DNA, 32 bp, Artificial; identical to SEQ ID NO: 9020
  oligonucleotide probe

SEQ ID NO: 22720 - DNA, 32 bp, Artificial; identical to SEQ ID NO: 9021
  oligonucleotide probe

SEQ ID NO: 22721 - DNA, 32 bp, Artificial; identical to SEQ ID NO: 5546
  oligonucleotide probe

SEQ ID NO: 22722 - DNA, 32 bp, Artificial; identical to SEQ ID NO: 8757
  oligonucleotide probe

SEQ ID NO: 22723 - DNA, 32 bp, Artificial; identical to SEQ ID NO: 7624
  oligonucleotide probe

SEQ ID NO: 22724 - DNA, 32 bp, Artificial; identical to SEQ ID NO: 7605
  oligonucleotide probe

SEQ ID NO: 22725 - DNA, 32 bp, Artificial; identical to SEQ ID NO: 5546
  oligonucleotide probe

SEQ ID NO: 22726 - DNA, 32 bp, Artificial; identical to SEQ ID NO: 8757
  oligonucleotide probe

SEQ ID NO: 22727 - DNA, 32 bp, Artificial; identical to SEQ ID NO: 5554
  oligonucleotide probe

SEQ ID NO: 22728 - DNA, 32 bp, Artificial; identical to SEQ ID NO: 8753
  oligonucleotide probe

SEQ ID NO: 22729 - DNA, 32 bp, Artificial; identical to SEQ ID NO: 7948
  oligonucleotide probe

SEQ ID NO: 22730 - DNA, 32 bp, Artificial; identical to SEQ ID NO: 7841
  oligonucleotide probe

SEQ ID NO: 22731 - DNA, 32 bp, Artificial; identical to SEQ ID NO: 9253
  oligonucleotide probe

SEQ ID NO: 22732 - DNA, 32 bp, Artificial; identical to SEQ ID NO: 9314
  oligonucleotide probe

SEQ ID NO: 22733 - DNA, 32 bp, Artificial; identical to SEQ ID NO: 8778
  oligonucleotide probe

SEQ ID NO: 22734 - DNA, 32 bp, Artificial; identical to SEQ ID NO: 5564
  oligonucleotide probe

SEQ ID NO: 22735 - DNA, 32 bp, Artificial; identical to SEQ ID NO: 10078
  oligonucleotide probe

SEQ ID NO: 22736 - DNA, 32 bp, Artificial; identical to SEQ ID NO: 5555
  oligonucleotide probe

SEQ ID NO: 22737 - DNA, 32 bp, Artificial; identical to SEQ ID NO: 8868
  oligonucleotide probe

SEQ ID NO: 22738 - DNA, 32 bp, Artificial; identical to SEQ ID NO: 5584
  oligonucleotide probe

SEQ ID NO: 22739 - DNA, 32 bp, Artificial; identical to SEQ ID NO: 8760
  oligonucleotide probe

SEQ ID NO: 22740 - DNA, 32 bp, Artificial; identical to SEQ ID NO: 5537
  oligonucleotide probe

SEQ ID NO: 22741 - DNA, 32 bp, Artificial; identical to SEQ ID NO: 5708
  oligonucleotide probe

SEQ ID NO: 22742 - DNA, 32 bp, Artificial; identical to SEQ ID NO: 10372
  oligonucleotide probe

SEQ ID NO: 22743 - DNA, 32 bp, Artificial; identical to SEQ ID NO: 8784
  oligonucleotide probe

SEQ ID NO: 22744 - DNA, 32 bp, Artificial; identical to SEQ ID NO: 8785
  oligonucleotide probe

SEQ ID NO: 22745 - DNA, 32 bp, Artificial; identical to SEQ ID NO: 10114
  oligonucleotide probe

SEQ ID NO: 22746 - DNA, 32 bp, Artificial; identical to SEQ ID NO: 5537
  oligonucleotide probe

SEQ ID NO: 22747 - DNA, 32 bp, Artificial; identical to SEQ ID NO: 5159
  oligonucleotide probe

SEQ ID NO: 22748 - DNA, 32 bp, Artificial; identical to SEQ ID NO: 7694
  oligonucleotide probe

SEQ ID NO: 22749 - DNA, 32 bp, Artificial; identical to SEQ ID NO: 10076
  oligonucleotide probe

SEQ ID NO: 22750 - DNA, 32 bp, Artificial; identical to SEQ ID NO: 6074
  oligonucleotide probe

SEQ ID NO: 22751 - DNA, 32 bp, Artificial; identical to SEQ ID NO: 5133
  oligonucleotide probe

SEQ ID NO: 22752 - DNA, 32 bp, Artificial; identical to SEQ ID NO: 7594
  oligonucleotide probe

SEQ ID NO: 22753 - DNA, 32 bp, Artificial; identical to SEQ ID NO: 8784
  oligonucleotide probe

SEQ ID NO: 22754 - DNA, 32 bp, Artificial; identical to SEQ ID NO: 8785
  oligonucleotide probe

SEQ ID NO: 22755 - DNA, 32 bp, Artificial; identical to SEQ ID NO: 10148
  oligonucleotide probe

SEQ ID NO: 22756 - DNA, 32 bp, Artificial; identical to SEQ ID NO: 10318
  oligonucleotide probe

SEQ ID NO: 22757 - DNA, 32 bp, Artificial; identical to SEQ ID NO: 7623
  oligonucleotide probe

SEQ ID NO: 22758 - DNA, 32 bp, Artificial; identical to SEQ ID NO: 7624
  oligonucleotide probe

SEQ ID NO: 22759 - DNA, 32 bp, Artificial; identical to SEQ ID NO: 8804
  oligonucleotide probe

SEQ ID NO: 22760 - DNA, 32 bp, Artificial; identical to SEQ ID NO: 5565
  oligonucleotide probe

SEQ ID NO: 22761 - DNA, 32 bp, Artificial; identical to SEQ ID NO: 7947
  oligonucleotide probe

SEQ ID NO: 22762 - DNA, 32 bp, Artificial; identical to SEQ ID NO: 7948
  oligonucleotide probe

SEQ ID NO: 22763 - DNA, 32 bp, Artificial; identical to SEQ ID NO: 10064
  oligonucleotide probe

SEQ ID NO: 22764 - DNA, 32 bp, Artificial; identical to SEQ ID NO: 5163
  oligonucleotide probe

SEQ ID NO: 22765 - DNA, 32 bp, Artificial; identical to SEQ ID NO: 10086
  oligonucleotide probe

SEQ ID NO: 22766 - DNA, 32 bp, Artificial; identical to SEQ ID NO: 10115
  oligonucleotide probe

SEQ ID NO: 22767 - DNA, 32 bp, Artificial; identical to SEQ ID NO: 10397
  oligonucleotide probe

SEQ ID NO: 22768 - DNA, 32 bp, Artificial; identical to SEQ ID NO: 5541
  oligonucleotide probe

SEQ ID NO: 22769 - DNA, 32 bp, Artificial; identical to SEQ ID NO: 10148
  oligonucleotide probe

SEQ ID NO: 22770 - DNA, 32 bp, Artificial; identical to SEQ ID NO: 10318
  oligonucleotide probe

SEQ ID NO: 22771 - DNA, 32 bp, Artificial; identical to SEQ ID NO: 8784
  oligonucleotide probe

SEQ ID NO: 22772 - DNA, 32 bp, Artificial; identical to SEQ ID NO: 8785
  oligonucleotide probe

SEQ ID NO: 22773 - DNA, 32 bp, Artificial; identical to SEQ ID NO: 7783
  oligonucleotide probe

SEQ ID NO: 22774 - DNA, 32 bp, Artificial; identical to SEQ ID NO: 7812
  oligonucleotide probe

SEQ ID NO: 22775 - DNA, 32 bp, Artificial; identical to SEQ ID NO: 10405
  oligonucleotide probe

SEQ ID NO: 22776 - DNA, 32 bp, Artificial; identical to SEQ ID NO: 10185
  oligonucleotide probe

SEQ ID NO: 22777 - DNA, 32 bp, Artificial; identical to SEQ ID NO: 8766
  oligonucleotide probe

SEQ ID NO: 22778 - DNA, 32 bp, Artificial; identical to SEQ ID NO: 8767
  oligonucleotide probe

SEQ ID NO: 22779 - DNA, 32 bp, Artificial; identical to SEQ ID NO: 10409
  oligonucleotide probe

SEQ ID NO: 22780 - DNA, 32 bp, Artificial; identical to SEQ ID NO: 10410
  oligonucleotide probe

SEQ ID NO: 22781 - DNA, 32 bp, Artificial; identical to SEQ ID NO: 8240
  oligonucleotide probe

SEQ ID NO: 22782 - DNA, 32 bp, Artificial; identical to SEQ ID NO: 8442
  oligonucleotide probe

SEQ ID NO: 22783 - DNA, 32 bp, Artificial; identical to SEQ ID NO: 10078
  oligonucleotide probe

SEQ ID NO: 22784 - DNA, 32 bp, Artificial; identical to SEQ ID NO: 5555
  oligonucleotide probe

SEQ ID NO: 22785 - DNA, 32 bp, Artificial; identical to SEQ ID NO: 10405
  oligonucleotide probe

SEQ ID NO: 22786 - DNA, 32 bp, Artificial; identical to SEQ ID NO: 10185
  oligonucleotide probe

SEQ ID NO: 22787 - DNA, 32 bp, Artificial; identical to SEQ ID NO: 8748
  oligonucleotide probe

SEQ ID NO: 22788 - DNA, 32 bp, Artificial; identical to SEQ ID NO: 8749
  oligonucleotide probe

SEQ ID NO: 22789 - DNA, 32 bp, Artificial; identical to SEQ ID NO: 8804
  oligonucleotide probe

SEQ ID NO: 22790 - DNA, 32 bp, Artificial; identical to SEQ ID NO: 5565
  oligonucleotide probe

SEQ ID NO: 22791 - DNA, 32 bp, Artificial; identical to SEQ ID NO: 9252
  oligonucleotide probe

SEQ ID NO: 22792 - DNA, 32 bp, Artificial; identical to SEQ ID NO: 9253
  oligonucleotide probe

SEQ ID NO: 22793 - DNA, 32 bp, Artificial; identical to SEQ ID NO: 5708
  oligonucleotide probe

SEQ ID NO: 22794 - DNA, 32 bp, Artificial; identical to SEQ ID NO: 10372
  oligonucleotide probe

SEQ ID NO: 22795 - DNA, 32 bp, Artificial; identical to SEQ ID NO: 10185
  oligonucleotide probe

SEQ ID NO: 22796 - DNA, 32 bp, Artificial; identical to SEQ ID NO: 10186
  oligonucleotide probe

SEQ ID NO: 22797 - DNA, 32 bp, Artificial; identical to SEQ ID NO: 8784
  oligonucleotide probe

SEQ ID NO: 22798 - DNA, 32 bp, Artificial; identical to SEQ ID NO: 8785
  oligonucleotide probe

SEQ ID NO: 22799 - DNA, 32 bp, Artificial; identical to SEQ ID NO: 10076
  oligonucleotide probe

SEQ ID NO: 22800 - DNA, 32 bp, Artificial; identical to SEQ ID NO: 6074
  oligonucleotide probe

SEQ ID NO: 22801 - DNA, 32 bp, Artificial; identical to SEQ ID NO: 10076
  oligonucleotide probe

SEQ ID NO: 22802 - DNA, 32 bp, Artificial; identical to SEQ ID NO: 6074
  oligonucleotide probe

SEQ ID NO: 22803 - DNA, 32 bp, Artificial; identical to SEQ ID NO: 10076
  oligonucleotide probe

SEQ ID NO: 22804 - DNA, 32 bp, Artificial; identical to SEQ ID NO: 6074
  oligonucleotide probe

SEQ ID NO: 22805 - DNA, 32 bp, Artificial; identical to SEQ ID NO: 10164
  oligonucleotide probe

SEQ ID NO: 22806 - DNA, 32 bp, Artificial; identical to SEQ ID NO: 10139
  oligonucleotide probe

SEQ ID NO: 22807 - DNA, 32 bp, Artificial; identical to SEQ ID NO: 10318
  oligonucleotide probe

SEQ ID NO: 22808 - DNA, 32 bp, Artificial; identical to SEQ ID NO: 10405
  oligonucleotide probe

SEQ ID NO: 22809 - DNA, 32 bp, Artificial; identical to SEQ ID NO: 5546
  oligonucleotide probe

SEQ ID NO: 22810 - DNA, 32 bp, Artificial; identical to SEQ ID NO: 8757
  oligonucleotide probe

SEQ ID NO: 22811 - DNA, 32 bp, Artificial; identical to SEQ ID NO: 5185
  oligonucleotide probe

SEQ ID NO: 22812 - DNA, 32 bp, Artificial; identical to SEQ ID NO: 7655
  oligonucleotide probe

SEQ ID NO: 22813 - DNA, 32 bp, Artificial; identical to SEQ ID NO: 9020
  oligonucleotide probe

SEQ ID NO: 22814 - DNA, 32 bp, Artificial; identical to SEQ ID NO: 9021
  oligonucleotide probe

SEQ ID NO: 22815 - DNA, 32 bp, Artificial; identical to SEQ ID NO: 7863
  oligonucleotide probe

SEQ ID NO: 22816 - DNA, 32 bp, Artificial; identical to SEQ ID NO: 5217
  oligonucleotide probe

SEQ ID NO: 22817 - DNA, 32 bp, Artificial; identical to SEQ ID NO: 10052
  oligonucleotide probe

SEQ ID NO: 22818 - DNA, 32 bp, Artificial; identical to SEQ ID NO: 5163
  oligonucleotide probe

SEQ ID NO: 22819 - DNA, 32 bp, Artificial; identical to SEQ ID NO: 8753
  oligonucleotide probe

SEQ ID NO: 22820 - DNA, 32 bp, Artificial; identical to SEQ ID NO: 8760
  oligonucleotide probe

SEQ ID NO: 22821 - DNA, 32 bp, Artificial; identical to SEQ ID NO: 5547
  oligonucleotide probe

SEQ ID NO: 22822 - DNA, 32 bp, Artificial; identical to SEQ ID NO: 10272
  oligonucleotide probe

SEQ ID NO: 22823 - DNA, 32 bp, Artificial; identical to SEQ ID NO: 10115
  oligonucleotide probe

SEQ ID NO: 22824 - DNA, 32 bp, Artificial; identical to SEQ ID NO: 10116
  oligonucleotide probe

SEQ ID NO: 22825 - DNA, 32 bp, Artificial; identical to SEQ ID NO: 5224
  oligonucleotide probe

SEQ ID NO: 22826 - DNA, 32 bp, Artificial; identical to SEQ ID NO: 8796
  oligonucleotide probe

SEQ ID NO: 22827 - DNA, 32 bp, Artificial; identical to SEQ ID NO: 9314
  oligonucleotide probe

SEQ ID NO: 22828 - DNA, 32 bp, Artificial; identical to SEQ ID NO: 9315
  oligonucleotide probe

SEQ ID NO: 22829 - DNA, 32 bp, Artificial; identical to SEQ ID NO: 6131
  oligonucleotide probe

SEQ ID NO: 22830 - DNA, 32 bp, Artificial; identical to SEQ ID NO: 10082
  oligonucleotide probe

SEQ ID NO: 22831 - DNA, 32 bp, Artificial; identical to SEQ ID NO: 5159
  oligonucleotide probe

SEQ ID NO: 22832 - DNA, 32 bp, Artificial; identical to SEQ ID NO: 7694
  oligonucleotide probe

SEQ ID NO: 22833 - DNA, 32 bp, Artificial; identical to SEQ ID NO: 5708
  oligonucleotide probe

SEQ ID NO: 22834 - DNA, 32 bp, Artificial; identical to SEQ ID NO: 10372
  oligonucleotide probe

SEQ ID NO: 22835 - DNA, 32 bp, Artificial; identical to SEQ ID NO: 5546
  oligonucleotide probe

SEQ ID NO: 22836 - DNA, 32 bp, Artificial; identical to SEQ ID NO: 8757
  oligonucleotide probe

SEQ ID NO: 22837 - DNA, 32 bp, Artificial; identical to SEQ ID NO: 8762
  oligonucleotide probe

SEQ ID NO: 22838 - DNA, 32 bp, Artificial; identical to SEQ ID NO: 5539
  oligonucleotide probe

SEQ ID NO: 22839 - DNA, 32 bp, Artificial; identical to SEQ ID NO: 7832
  oligonucleotide probe

SEQ ID NO: 22840 - DNA, 32 bp, Artificial; identical to SEQ ID NO: 9020
  oligonucleotide probe

SEQ ID NO: 22841 - DNA, 32 bp, Artificial; identical to SEQ ID NO: 7834
  oligonucleotide probe

SEQ ID NO: 22842 - DNA, 32 bp, Artificial; identical to SEQ ID NO: 7831
  oligonucleotide probe

SEQ ID NO: 22843 - DNA, 32 bp, Artificial; identical to SEQ ID NO: 9252
  oligonucleotide probe

SEQ ID NO: 22844 - DNA, 32 bp, Artificial; identical to SEQ ID NO: 9253
  oligonucleotide probe

SEQ ID NO: 22845 - DNA, 32 bp, Artificial; identical to SEQ ID NO: 8868
  oligonucleotide probe

SEQ ID NO: 22846 - DNA, 32 bp, Artificial; identical to SEQ ID NO: 5584
  oligonucleotide probe

SEQ ID NO: 22847 - DNA, 32 bp, Artificial; identical to SEQ ID NO: 8776
  oligonucleotide probe

SEQ ID NO: 22848 - DNA, 32 bp, Artificial; identical to SEQ ID NO: 8777
  oligonucleotide probe

SEQ ID NO: 22849 - DNA, 32 bp, Artificial; identical to SEQ ID NO: 8804
  oligonucleotide probe

SEQ ID NO: 22850 - DNA, 32 bp, Artificial; identical to SEQ ID NO: 5565
  oligonucleotide probe

SEQ ID NO: 22851 - DNA, 32 bp, Artificial; identical to SEQ ID NO: 8778
  oligonucleotide probe

SEQ ID NO: 22852 - DNA, 32 bp, Artificial; identical to SEQ ID NO: 5564
  oligonucleotide probe

SEQ ID NO: 22853 - DNA, 32 bp, Artificial; identical to SEQ ID NO: 8047
  oligonucleotide probe

SEQ ID NO: 22854 - DNA, 32 bp, Artificial; identical to SEQ ID NO: 5240
  oligonucleotide probe

SEQ ID NO: 22855 - DNA, 32 bp, Artificial; identical to SEQ ID NO: 5171
  oligonucleotide probe

SEQ ID NO: 22856 - DNA, 32 bp, Artificial; identical to SEQ ID NO: 7676
  oligonucleotide probe

SEQ ID NO: 22857 - DNA, 32 bp, Artificial; identical to SEQ ID NO: 10164
  oligonucleotide probe

SEQ ID NO: 22858 - DNA, 32 bp, Artificial; identical to SEQ ID NO: 10139
  oligonucleotide probe

SEQ ID NO: 22859 - DNA, 32 bp, Artificial; identical to SEQ ID NO: 8753
  oligonucleotide probe

SEQ ID NO: 22860 - DNA, 32 bp, Artificial; identical to SEQ ID NO: 8760
  oligonucleotide probe

SEQ ID NO: 22861 - DNA, 32 bp, Artificial; identical to SEQ ID NO: 9020
  oligonucleotide probe

SEQ ID NO: 22862 - DNA, 32 bp, Artificial; identical to SEQ ID NO: 9021
  oligonucleotide probe

SEQ ID NO: 22863 - DNA, 32 bp, Artificial; identical to SEQ ID NO: 5547
  oligonucleotide probe

SEQ ID NO: 22864 - DNA, 32 bp, Artificial; identical to SEQ ID NO: 10272
  oligonucleotide probe

SEQ ID NO: 22865 - DNA, 32 bp, Artificial; identical to SEQ ID NO: 9922
  oligonucleotide probe

SEQ ID NO: 22866 - DNA, 32 bp, Artificial; identical to SEQ ID NO: 7623
  oligonucleotide probe

SEQ ID NO: 22867 - DNA, 32 bp, Artificial; identical to SEQ ID NO: 8776
  oligonucleotide probe

SEQ ID NO: 22868 - DNA, 32 bp, Artificial; identical to SEQ ID NO: 8777
  oligonucleotide probe

SEQ ID NO: 22869 - DNA, 32 bp, Artificial; identical to SEQ ID NO: 8804
  oligonucleotide probe

SEQ ID NO: 22870 - DNA, 32 bp, Artificial; identical to SEQ ID NO: 5565
  oligonucleotide probe

SEQ ID NO: 22871 - DNA, 32 bp, Artificial; identical to SEQ ID NO: 10501
  oligonucleotide probe

SEQ ID NO: 22872 - DNA, 32 bp, Artificial; identical to SEQ ID NO: 10123
  oligonucleotide probe

SEQ ID NO: 22873 - DNA, 32 bp, Artificial; identical to SEQ ID NO: 5555
  oligonucleotide probe

SEQ ID NO: 22874 - DNA, 32 bp, Artificial; identical to SEQ ID NO: 10189
  oligonucleotide probe

SEQ ID NO: 22875 - DNA, 32 bp, Artificial; identical to SEQ ID NO: 10114
  oligonucleotide probe

SEQ ID NO: 22876 - DNA, 32 bp, Artificial; identical to SEQ ID NO: 10506
  oligonucleotide probe

SEQ ID NO: 22877 - DNA, 32 bp, Artificial; identical to SEQ ID NO: 5546
  oligonucleotide probe

SEQ ID NO: 22878 - DNA, 32 bp, Artificial; identical to SEQ ID NO: 8757
  oligonucleotide probe

SEQ ID NO: 22879 - DNA, 32 bp, Artificial; identical to SEQ ID NO: 8748
  oligonucleotide probe

SEQ ID NO: 22880 - DNA, 32 bp, Artificial; identical to SEQ ID NO: 8749
  oligonucleotide probe

SEQ ID NO: 22881 - DNA, 32 bp, Artificial; identical to SEQ ID NO: 7863
  oligonucleotide probe

SEQ ID NO: 22882 - DNA, 32 bp, Artificial; identical to SEQ ID NO: 5217
  oligonucleotide probe

SEQ ID NO: 22883 - DNA, 32 bp, Artificial; identical to SEQ ID NO: 10078
  oligonucleotide probe

SEQ ID NO: 22884 - DNA, 32 bp, Artificial; identical to SEQ ID NO: 5555
  oligonucleotide probe

SEQ ID NO: 22885 - DNA, 32 bp, Artificial; identical to SEQ ID NO: 10139
  oligonucleotide probe

SEQ ID NO: 22886 - DNA, 32 bp, Artificial; identical to SEQ ID NO: 5537
  oligonucleotide probe

SEQ ID NO: 22887 - DNA, 32 bp, Artificial; identical to SEQ ID NO: 8750
  oligonucleotide probe

SEQ ID NO: 22888 - DNA, 32 bp, Artificial; identical to SEQ ID NO: 8751
  oligonucleotide probe

SEQ ID NO: 22889 - DNA, 32 bp, Artificial; identical to SEQ ID NO: 5185
  oligonucleotide probe

SEQ ID NO: 22890 - DNA, 32 bp, Artificial; identical to SEQ ID NO: 7655
  oligonucleotide probe

SEQ ID NO: 22891 - DNA, 32 bp, Artificial; identical to SEQ ID NO: 8762
  oligonucleotide probe

SEQ ID NO: 22892 - DNA, 32 bp, Artificial; identical to SEQ ID NO: 5539
  oligonucleotide probe

SEQ ID NO: 22893 - DNA, 32 bp, Artificial; identical to SEQ ID NO: 10140
  oligonucleotide probe

SEQ ID NO: 22894 - DNA, 32 bp, Artificial; identical to SEQ ID NO: 10501
  oligonucleotide probe

SEQ ID NO: 22895 - DNA, 32 bp, Artificial; identical to SEQ ID NO: 8766
  oligonucleotide probe

SEQ ID NO: 22896 - DNA, 32 bp, Artificial; identical to SEQ ID NO: 8767
  oligonucleotide probe

SEQ ID NO: 22897 - DNA, 32 bp, Artificial; identical to SEQ ID NO: 5708
  oligonucleotide probe

SEQ ID NO: 22898 - DNA, 32 bp, Artificial; identical to SEQ ID NO: 8753
  oligonucleotide probe

SEQ ID NO: 22899 - DNA, 32 bp, Artificial; identical to SEQ ID NO: 10189
  oligonucleotide probe

SEQ ID NO: 22900 - DNA, 32 bp, Artificial; identical to SEQ ID NO: 5551
  oligonucleotide probe

SEQ ID NO: 22901 - DNA, 32 bp, Artificial; identical to SEQ ID NO: 10147
  oligonucleotide probe

SEQ ID NO: 22902 - DNA, 32 bp, Artificial; identical to SEQ ID NO: 10148
  oligonucleotide probe

SEQ ID NO: 22903 - DNA, 32 bp, Artificial; identical to SEQ ID NO: 10533
  oligonucleotide probe

SEQ ID NO: 22904 - DNA, 32 bp, Artificial; identical to SEQ ID NO: 5163
  oligonucleotide probe

SEQ ID NO: 22905 - DNA, 32 bp, Artificial; identical to SEQ ID NO: 5550
  oligonucleotide probe

SEQ ID NO: 22906 - DNA, 32 bp, Artificial; identical to SEQ ID NO: 10282
  oligonucleotide probe

SEQ ID NO: 22907 - DNA, 32 bp, Artificial; identical to SEQ ID NO: 5171
  oligonucleotide probe

SEQ ID NO: 22908 - DNA, 32 bp, Artificial; identical to SEQ ID NO: 7676
  oligonucleotide probe

SEQ ID NO: 22909 - DNA, 32 bp, Artificial; identical to SEQ ID NO: 10147
  oligonucleotide probe

SEQ ID NO: 22910 - DNA, 32 bp, Artificial; identical to SEQ ID NO: 10148
  oligonucleotide probe

SEQ ID NO: 22911 - DNA, 32 bp, Artificial; identical to SEQ ID NO: 10078
  oligonucleotide probe

SEQ ID NO: 22912 - DNA, 32 bp, Artificial; identical to SEQ ID NO: 10086
  oligonucleotide probe

SEQ ID NO: 22913 - DNA, 32 bp, Artificial; identical to SEQ ID NO: 7891
  oligonucleotide probe

SEQ ID NO: 22914 - DNA, 32 bp, Artificial; identical to SEQ ID NO: 5218
  oligonucleotide probe

SEQ ID NO: 22915 - DNA, 32 bp, Artificial; identical to SEQ ID NO: 8780
  oligonucleotide probe

SEQ ID NO: 22916 - DNA, 32 bp, Artificial; identical to SEQ ID NO: 8781
  oligonucleotide probe

SEQ ID NO: 22917 - DNA, 32 bp, Artificial; identical to SEQ ID NO: 8786
  oligonucleotide probe

SEQ ID NO: 22918 - DNA, 32 bp, Artificial; identical to SEQ ID NO: 5585
  oligonucleotide probe

SEQ ID NO: 22919 - DNA, 32 bp, Artificial; identical to SEQ ID NO: 8001
  oligonucleotide probe

SEQ ID NO: 22920 - DNA, 32 bp, Artificial; identical to SEQ ID NO: 5239
  oligonucleotide probe

SEQ ID NO: 22921 - DNA, 32 bp, Artificial; identical to SEQ ID NO: 10115
  oligonucleotide probe

SEQ ID NO: 22922 - DNA, 32 bp, Artificial; identical to SEQ ID NO: 10116
  oligonucleotide probe

SEQ ID NO: 22923 - DNA, 32 bp, Artificial; identical to SEQ ID NO: 5546
  oligonucleotide probe

SEQ ID NO: 22924 - DNA, 32 bp, Artificial; identical to SEQ ID NO: 8757
  oligonucleotide probe

SEQ ID NO: 22925 - DNA, 32 bp, Artificial; identical to SEQ ID NO: 10318
  oligonucleotide probe

SEQ ID NO: 22926 - DNA, 32 bp, Artificial; identical to SEQ ID NO: 10405
  oligonucleotide probe

SEQ ID NO: 22927 - DNA, 32 bp, Artificial; identical to SEQ ID NO: 7662
  oligonucleotide probe

SEQ ID NO: 22928 - DNA, 32 bp, Artificial; identical to SEQ ID NO: 7659
  oligonucleotide probe

SEQ ID NO: 22929 - DNA, 32 bp, Artificial; identical to SEQ ID NO: 8796
  oligonucleotide probe

SEQ ID NO: 22930 - DNA, 32 bp, Artificial; identical to SEQ ID NO: 5538
  oligonucleotide probe

SEQ ID NO: 22931 - DNA, 32 bp, Artificial; identical to SEQ ID NO: 8240
  oligonucleotide probe

SEQ ID NO: 22932 - DNA, 32 bp, Artificial; identical to SEQ ID NO: 8442
  oligonucleotide probe

SEQ ID NO: 22933 - DNA, 32 bp, Artificial; identical to SEQ ID NO: 5223
  oligonucleotide probe

SEQ ID NO: 22934 - DNA, 32 bp, Artificial; identical to SEQ ID NO: 7838
  oligonucleotide probe

SEQ ID NO: 22935 - DNA, 32 bp, Artificial; identical to SEQ ID NO: 7840
  oligonucleotide probe

SEQ ID NO: 22936 - DNA, 32 bp, Artificial; identical to SEQ ID NO: 7853
  oligonucleotide probe

SEQ ID NO: 22937 - DNA, 32 bp, Artificial; identical to SEQ ID NO: 5594
  oligonucleotide probe

SEQ ID NO: 22938 - DNA, 32 bp, Artificial; identical to SEQ ID NO: 7597
  oligonucleotide probe

SEQ ID NO: 22939 - DNA, 32 bp, Artificial; identical to SEQ ID NO: 7659
  oligonucleotide probe

SEQ ID NO: 22940 - DNA, 32 bp, Artificial; identical to SEQ ID NO: 7783
  oligonucleotide probe

SEQ ID NO: 22941 - DNA, 32 bp, Artificial; identical to SEQ ID NO: 7863
  oligonucleotide probe

SEQ ID NO: 22942 - DNA, 32 bp, Artificial; identical to SEQ ID NO: 5217
  oligonucleotide probe

SEQ ID NO: 22943 - DNA, 32 bp, Artificial; identical to SEQ ID NO: 5551
  oligonucleotide probe

SEQ ID NO: 22944 - DNA, 32 bp, Artificial; identical to SEQ ID NO: 10397
  oligonucleotide probe

SEQ ID NO: 22945 - DNA, 32 bp, Artificial; identical to SEQ ID NO: 10123
  oligonucleotide probe

SEQ ID NO: 22946 - DNA, 32 bp, Artificial; identical to SEQ ID NO: 10113
  oligonucleotide probe

SEQ ID NO: 22947 - DNA, 32 bp, Artificial; identical to SEQ ID NO: 10189
  oligonucleotide probe

SEQ ID NO: 22948 - DNA, 32 bp, Artificial; identical to SEQ ID NO: 5551
  oligonucleotide probe

SEQ ID NO: 22949 - DNA, 32 bp, Artificial; identical to SEQ ID NO: 5545
  oligonucleotide probe

SEQ ID NO: 22950 - DNA, 32 bp, Artificial; identical to SEQ ID NO: 10086
  oligonucleotide probe

SEQ ID NO: 22951 - DNA, 32 bp, Artificial; identical to SEQ ID NO: 8001
  oligonucleotide probe

SEQ ID NO: 22952 - DNA, 32 bp, Artificial; identical to SEQ ID NO: 5239
  oligonucleotide probe

SEQ ID NO: 22953 - DNA, 32 bp, Artificial; identical to SEQ ID NO: 10501
  oligonucleotide probe

SEQ ID NO: 22954 - DNA, 32 bp, Artificial; identical to SEQ ID NO: 5537
  oligonucleotide probe

SEQ ID NO: 22955 - DNA, 32 bp, Artificial; identical to SEQ ID NO: 8777
  oligonucleotide probe

SEQ ID NO: 22956 - DNA, 32 bp, Artificial; identical to SEQ ID NO: 5220
  oligonucleotide probe

SEQ ID NO: 22957 - DNA, 32 bp, Artificial; identical to SEQ ID NO: 10147
  oligonucleotide probe

SEQ ID NO: 22958 - DNA, 32 bp, Artificial; identical to SEQ ID NO: 10148
  oligonucleotide probe

SEQ ID NO: 22959 - DNA, 32 bp, Artificial; identical to SEQ ID NO: 8780
  oligonucleotide probe

SEQ ID NO: 22960 - DNA, 32 bp, Artificial; identical to SEQ ID NO: 8781
  oligonucleotide probe

SEQ ID NO: 22961 - DNA, 32 bp, Artificial; identical to SEQ ID NO: 7853
  oligonucleotide probe

SEQ ID NO: 22962 - DNA, 32 bp, Artificial; identical to SEQ ID NO: 5220
  oligonucleotide probe

SEQ ID NO: 22963 - DNA, 32 bp, Artificial; identical to SEQ ID NO: 5554
  oligonucleotide probe

SEQ ID NO: 22964 - DNA, 32 bp, Artificial; identical to SEQ ID NO: 10226
  oligonucleotide probe

SEQ ID NO: 22965 - DNA, 32 bp, Artificial; identical to SEQ ID NO: 10114
  oligonucleotide probe

SEQ ID NO: 22966 - DNA, 32 bp, Artificial; identical to SEQ ID NO: 10506
  oligonucleotide probe

SEQ ID NO: 22967 - DNA, 32 bp, Artificial; identical to SEQ ID NO: 10123
  oligonucleotide probe

SEQ ID NO: 22968 - DNA, 32 bp, Artificial; identical to SEQ ID NO: 10113
  oligonucleotide probe

SEQ ID NO: 22969 - DNA, 32 bp, Artificial; identical to SEQ ID NO: 7855
  oligonucleotide probe

SEQ ID NO: 22970 - DNA, 32 bp, Artificial; identical to SEQ ID NO: 7856
  oligonucleotide probe

SEQ ID NO: 22971 - DNA, 32 bp, Artificial; identical to SEQ ID NO: 5708
  oligonucleotide probe

SEQ ID NO: 22972 - DNA, 32 bp, Artificial; identical to SEQ ID NO: 10372
  oligonucleotide probe

SEQ ID NO: 22973 - DNA, 32 bp, Artificial; identical to SEQ ID NO: 5541
  oligonucleotide probe

SEQ ID NO: 22974 - DNA, 32 bp, Artificial; identical to SEQ ID NO: 10085
  oligonucleotide probe

SEQ ID NO: 22975 - DNA, 32 bp, Artificial; identical to SEQ ID NO: 7596
  oligonucleotide probe

SEQ ID NO: 22976 - DNA, 32 bp, Artificial; identical to SEQ ID NO: 5140
  oligonucleotide probe

SEQ ID NO: 22977 - DNA, 32 bp, Artificial; identical to SEQ ID NO: 8748
  oligonucleotide probe

SEQ ID NO: 22978 - DNA, 32 bp, Artificial; identical to SEQ ID NO: 8749
  oligonucleotide probe

SEQ ID NO: 22979 - DNA, 32 bp, Artificial; identical to SEQ ID NO: 10318
  oligonucleotide probe

SEQ ID NO: 22980 - DNA, 32 bp, Artificial; identical to SEQ ID NO: 10405
  oligonucleotide probe

SEQ ID NO: 22981 - DNA, 32 bp, Artificial; identical to SEQ ID NO: 8571
  oligonucleotide probe

SEQ ID NO: 22982 - DNA, 32 bp, Artificial; identical to SEQ ID NO: 10064
  oligonucleotide probe

SEQ ID NO: 22983 - DNA, 32 bp, Artificial; identical to SEQ ID NO: 8780
  oligonucleotide probe

SEQ ID NO: 22984 - DNA, 32 bp, Artificial; identical to SEQ ID NO: 8781
  oligonucleotide probe

SEQ ID NO: 22985 - DNA, 32 bp, Artificial; identical to SEQ ID NO: 8834
  oligonucleotide probe

SEQ ID NO: 22986 - DNA, 32 bp, Artificial; identical to SEQ ID NO: 5136
  oligonucleotide probe

SEQ ID NO: 22987 - DNA, 32 bp, Artificial; identical to SEQ ID NO: 8796
  oligonucleotide probe

SEQ ID NO: 22988 - DNA, 32 bp, Artificial; identical to SEQ ID NO: 5538
  oligonucleotide probe

SEQ ID NO: 22989 - DNA, 32 bp, Artificial; identical to SEQ ID NO: 5550
  oligonucleotide probe

SEQ ID NO: 22990 - DNA, 32 bp, Artificial; identical to SEQ ID NO: 10282
  oligonucleotide probe

SEQ ID NO: 22991 - DNA, 32 bp, Artificial; identical to SEQ ID NO: 8834
  oligonucleotide probe

SEQ ID NO: 22992 - DNA, 32 bp, Artificial; identical to SEQ ID NO: 8835
  oligonucleotide probe

SEQ ID NO: 22993 - DNA, 32 bp, Artificial; identical to SEQ ID NO: 9314
  oligonucleotide probe

SEQ ID NO: 22994 - DNA, 32 bp, Artificial; identical to SEQ ID NO: 9315
  oligonucleotide probe

SEQ ID NO: 22995 - DNA, 32 bp, Artificial; identical to SEQ ID NO: 10318
  oligonucleotide probe

SEQ ID NO: 22996 - DNA, 32 bp, Artificial; identical to SEQ ID NO: 10405
  oligonucleotide probe

SEQ ID NO: 22997 - DNA, 32 bp, Artificial; identical to SEQ ID NO: 5159
  oligonucleotide probe

SEQ ID NO: 22998 - DNA, 32 bp, Artificial; identical to SEQ ID NO: 7694
  oligonucleotide probe

SEQ ID NO: 22999 - DNA, 32 bp, Artificial; identical to SEQ ID NO: 5232
  oligonucleotide probe

SEQ ID NO: 23000 - DNA, 32 bp, Artificial; identical to SEQ ID NO: 9038
  oligonucleotide probe

SEQ ID NO: 23001 - DNA, 32 bp, Artificial; identical to SEQ ID NO: 10501
  oligonucleotide probe

SEQ ID NO: 23002 - DNA, 32 bp, Artificial; identical to SEQ ID NO: 10123
  oligonucleotide probe

SEQ ID NO: 23003 - DNA, 32 bp, Artificial; identical to SEQ ID NO: 8868
  oligonucleotide probe

SEQ ID NO: 23004 - DNA, 32 bp, Artificial; identical to SEQ ID NO: 5584
  oligonucleotide probe

SEQ ID NO: 23005 - DNA, 32 bp, Artificial; identical to SEQ ID NO: 5555
  oligonucleotide probe

SEQ ID NO: 23006 - DNA, 32 bp, Artificial; identical to SEQ ID NO: 10189
  oligonucleotide probe

SEQ ID NO: 23007 - DNA, 32 bp, Artificial; identical to SEQ ID NO: 8762
  oligonucleotide probe

SEQ ID NO: 23008 - DNA, 32 bp, Artificial; identical to SEQ ID NO: 5539
  oligonucleotide probe

SEQ ID NO: 23009 - DNA, 32 bp, Artificial; identical to SEQ ID NO: 8804
  oligonucleotide probe

SEQ ID NO: 23010 - DNA, 32 bp, Artificial; identical to SEQ ID NO: 8780
  oligonucleotide probe

SEQ ID NO: 23011 - DNA, 32 bp, Artificial; identical to SEQ ID NO: 7644
  oligonucleotide probe

SEQ ID NO: 23012 - DNA, 32 bp, Artificial; identical to SEQ ID NO: 5141
  oligonucleotide probe

SEQ ID NO: 23013 - DNA, 32 bp, Artificial; identical to SEQ ID NO: 10410
  oligonucleotide probe

SEQ ID NO: 23014 - DNA, 32 bp, Artificial; identical to SEQ ID NO: 10644
  oligonucleotide probe

SEQ ID NO: 23015 - DNA, 32 bp, Artificial; identical to SEQ ID NO: 5546
  oligonucleotide probe

SEQ ID NO: 23016 - DNA, 32 bp, Artificial; identical to SEQ ID NO: 8757
  oligonucleotide probe

SEQ ID NO: 23017 - DNA, 32 bp, Artificial; identical to SEQ ID NO: 8804
  oligonucleotide probe

SEQ ID NO: 23018 - DNA, 32 bp, Artificial; identical to SEQ ID NO: 5565
  oligonucleotide probe

SEQ ID NO: 23019 - DNA, 32 bp, Artificial; identical to SEQ ID NO: 5547
  oligonucleotide probe

SEQ ID NO: 23020 - DNA, 32 bp, Artificial; identical to SEQ ID NO: 10272
  oligonucleotide probe

SEQ ID NO: 23021 - DNA, 32 bp, Artificial; identical to SEQ ID NO: 7690
  oligonucleotide probe

SEQ ID NO: 23022 - DNA, 32 bp, Artificial; identical to SEQ ID NO: 7662
  oligonucleotide probe

SEQ ID NO: 23023 - DNA, 32 bp, Artificial; identical to SEQ ID NO: 8047
  oligonucleotide probe

SEQ ID NO: 23024 - DNA, 32 bp, Artificial; identical to SEQ ID NO: 5240
  oligonucleotide probe

SEQ ID NO: 23025 - DNA, 32 bp, Artificial; identical to SEQ ID NO: 7840
  oligonucleotide probe

SEQ ID NO: 23026 - DNA, 32 bp, Artificial; identical to SEQ ID NO: 7853
  oligonucleotide probe

SEQ ID NO: 23027 - DNA, 32 bp, Artificial; identical to SEQ ID NO: 10140
  oligonucleotide probe

SEQ ID NO: 23028 - DNA, 32 bp, Artificial; identical to SEQ ID NO: 10501
  oligonucleotide probe

SEQ ID NO: 23029 - DNA, 32 bp, Artificial; identical to SEQ ID NO: 10086
  oligonucleotide probe

SEQ ID NO: 23030 - DNA, 32 bp, Artificial; identical to SEQ ID NO: 10115
  oligonucleotide probe

SEQ ID NO: 23031 - DNA, 32 bp, Artificial; identical to SEQ ID NO: 10140
  oligonucleotide probe

SEQ ID NO: 23032 - DNA, 32 bp, Artificial; identical to SEQ ID NO: 10501
  oligonucleotide probe

SEQ ID NO: 23033 - DNA, 32 bp, Artificial; identical to SEQ ID NO: 8784
  oligonucleotide probe

SEQ ID NO: 23034 - DNA, 32 bp, Artificial; identical to SEQ ID NO: 8785
  oligonucleotide probe

SEQ ID NO: 23035 - DNA, 32 bp, Artificial; identical to SEQ ID NO: 5223
  oligonucleotide probe

SEQ ID NO: 23036 - DNA, 32 bp, Artificial; identical to SEQ ID NO: 7838
  oligonucleotide probe

SEQ ID NO: 23037 - DNA, 32 bp, Artificial; identical to SEQ ID NO: 8786
  oligonucleotide probe

SEQ ID NO: 23038 - DNA, 32 bp, Artificial; identical to SEQ ID NO: 5585
  oligonucleotide probe

SEQ ID NO: 23039 - DNA, 32 bp, Artificial; identical to SEQ ID NO: 7841
  oligonucleotide probe

SEQ ID NO: 23040 - DNA, 32 bp, Artificial; identical to SEQ ID NO: 7842
  oligonucleotide probe

SEQ ID NO: 23041 - DNA, 32 bp, Artificial; identical to SEQ ID NO: 8760
  oligonucleotide probe

SEQ ID NO: 23042 - DNA, 32 bp, Artificial; identical to SEQ ID NO: 10164
  oligonucleotide probe

SEQ ID NO: 23043 - DNA, 32 bp, Artificial; identical to SEQ ID NO: 7605
  oligonucleotide probe

SEQ ID NO: 23044 - DNA, 32 bp, Artificial; identical to SEQ ID NO: 7606
  oligonucleotide probe

SEQ ID NO: 23045 - DNA, 32 bp, Artificial; identical to SEQ ID NO: 5546
  oligonucleotide probe

SEQ ID NO: 23046 - DNA, 32 bp, Artificial; identical to SEQ ID NO: 8757
  oligonucleotide probe

SEQ ID NO: 23047 - DNA, 32 bp, Artificial; identical to SEQ ID NO: 7662
  oligonucleotide probe

SEQ ID NO: 23048 - DNA, 32 bp, Artificial; identical to SEQ ID NO: 7659
  oligonucleotide probe

SEQ ID NO: 23049 - DNA, 32 bp, Artificial; identical to SEQ ID NO: 10116
  oligonucleotide probe

SEQ ID NO: 23050 - DNA, 32 bp, Artificial; identical to SEQ ID NO: 10147
  oligonucleotide probe

SEQ ID NO: 23051 - DNA, 32 bp, Artificial; identical to SEQ ID NO: 5708
  oligonucleotide probe

SEQ ID NO: 23052 - DNA, 32 bp, Artificial; identical to SEQ ID NO: 10372
  oligonucleotide probe

SEQ ID NO: 23053 - DNA, 32 bp, Artificial; identical to SEQ ID NO: 5231
  oligonucleotide probe

SEQ ID NO: 23054 - DNA, 32 bp, Artificial; identical to SEQ ID NO: 7835
  oligonucleotide probe

SEQ ID NO: 23055 - DNA, 32 bp, Artificial; identical to SEQ ID NO: 8780
  oligonucleotide probe

SEQ ID NO: 23056 - DNA, 32 bp, Artificial; identical to SEQ ID NO: 8781
  oligonucleotide probe

SEQ ID NO: 23057 - DNA, 32 bp, Artificial; identical to SEQ ID NO: 8784
  oligonucleotide probe

SEQ ID NO: 23058 - DNA, 32 bp, Artificial; identical to SEQ ID NO: 8785
  oligonucleotide probe

SEQ ID NO: 23059 - DNA, 32 bp, Artificial; identical to SEQ ID NO: 8571
  oligonucleotide probe

SEQ ID NO: 23060 - DNA, 32 bp, Artificial; identical to SEQ ID NO: 5163
  oligonucleotide probe

SEQ ID NO: 23061 - DNA, 32 bp, Artificial; identical to SEQ ID NO: 5133
  oligonucleotide probe

SEQ ID NO: 23062 - DNA, 32 bp, Artificial; identical to SEQ ID NO: 7594
  oligonucleotide probe

SEQ ID NO: 23063 - DNA, 32 bp, Artificial; identical to SEQ ID NO: 10409
  oligonucleotide probe

SEQ ID NO: 23064 - DNA, 32 bp, Artificial; identical to SEQ ID NO: 10410
  oligonucleotide probe

SEQ ID NO: 23065 - DNA, 32 bp, Artificial; identical to SEQ ID NO: 7812
  oligonucleotide probe

SEQ ID NO: 23066 - DNA, 32 bp, Artificial; identical to SEQ ID NO: 8247
  oligonucleotide probe

SEQ ID NO: 23067 - DNA, 32 bp, Artificial; identical to SEQ ID NO: 5231
  oligonucleotide probe

SEQ ID NO: 23068 - DNA, 32 bp, Artificial; identical to SEQ ID NO: 7835
  oligonucleotide probe

SEQ ID NO: 23069 - DNA, 32 bp, Artificial; identical to SEQ ID NO: 5546
  oligonucleotide probe

SEQ ID NO: 23070 - DNA, 32 bp, Artificial; identical to SEQ ID NO: 8757
  oligonucleotide probe

SEQ ID NO: 23071 - DNA, 32 bp, Artificial; identical to SEQ ID NO: 7812
  oligonucleotide probe

SEQ ID NO: 23072 - DNA, 32 bp, Artificial; identical to SEQ ID NO: 8247
  oligonucleotide probe

SEQ ID NO: 23073 - DNA, 32 bp, Artificial; identical to SEQ ID NO: 8936
  oligonucleotide probe

SEQ ID NO: 23074 - DNA, 32 bp, Artificial; identical to SEQ ID NO: 5595
  oligonucleotide probe

SEQ ID NO: 23075 - DNA, 32 bp, Artificial; identical to SEQ ID NO: 8001
  oligonucleotide probe

SEQ ID NO: 23076 - DNA, 32 bp, Artificial; identical to SEQ ID NO: 5239
  oligonucleotide probe

SEQ ID NO: 23077 - DNA, 32 bp, Artificial; identical to SEQ ID NO: 10078
  oligonucleotide probe

SEQ ID NO: 23078 - DNA, 32 bp, Artificial; identical to SEQ ID NO: 5555
  oligonucleotide probe

SEQ ID NO: 23079 - DNA, 32 bp, Artificial; identical to SEQ ID NO: 10189
  oligonucleotide probe

SEQ ID NO: 23080 - DNA, 32 bp, Artificial; identical to SEQ ID NO: 10086
  oligonucleotide probe

SEQ ID NO: 23081 - DNA, 32 bp, Artificial; identical to SEQ ID NO: 8834
  oligonucleotide probe

SEQ ID NO: 23082 - DNA, 32 bp, Artificial; identical to SEQ ID NO: 8835
  oligonucleotide probe

SEQ ID NO: 23083 - DNA, 32 bp, Artificial; identical to SEQ ID NO: 10139
  oligonucleotide probe

SEQ ID NO: 23084 - DNA, 32 bp, Artificial; identical to SEQ ID NO: 10140
  oligonucleotide probe

SEQ ID NO: 23085 - DNA, 32 bp, Artificial; identical to SEQ ID NO: 5541
  oligonucleotide probe

SEQ ID NO: 23086 - DNA, 32 bp, Artificial; identical to SEQ ID NO: 10085
  oligonucleotide probe

SEQ ID NO: 23087 - DNA, 32 bp, Artificial; identical to SEQ ID NO: 6131
  oligonucleotide probe

SEQ ID NO: 23088 - DNA, 32 bp, Artificial; identical to SEQ ID NO: 10082
  oligonucleotide probe

SEQ ID NO: 23089 - DNA, 32 bp, Artificial; identical to SEQ ID NO: 10115
  oligonucleotide probe

SEQ ID NO: 23090 - DNA, 32 bp, Artificial; identical to SEQ ID NO: 10116
  oligonucleotide probe

SEQ ID NO: 23091 - DNA, 32 bp, Artificial; identical to SEQ ID NO: 8780
  oligonucleotide probe

SEQ ID NO: 23092 - DNA, 32 bp, Artificial; identical to SEQ ID NO: 8781
  oligonucleotide probe

SEQ ID NO: 23093 - DNA, 32 bp, Artificial; identical to SEQ ID NO: 8780
  oligonucleotide probe

SEQ ID NO: 23094 - DNA, 32 bp, Artificial; identical to SEQ ID NO: 8781
  oligonucleotide probe

SEQ ID NO: 23095 - DNA, 32 bp, Artificial; identical to SEQ ID NO: 8936
  oligonucleotide probe

SEQ ID NO: 23096 - DNA, 32 bp, Artificial; identical to SEQ ID NO: 5595
  oligonucleotide probe

SEQ ID NO: 23097 - DNA, 32 bp, Artificial; identical to SEQ ID NO: 9038
  oligonucleotide probe

SEQ ID NO: 23098 - DNA, 32 bp, Artificial; identical to SEQ ID NO: 5594
  oligonucleotide probe

SEQ ID NO: 23099 - DNA, 32 bp, Artificial; identical to SEQ ID NO: 10506
  oligonucleotide probe

SEQ ID NO: 23100 - DNA, 32 bp, Artificial; identical to SEQ ID NO: 10331
  oligonucleotide probe

SEQ ID NO: 23101 - DNA, 32 bp, Artificial; identical to SEQ ID NO: 7624
  oligonucleotide probe

SEQ ID NO: 23102 - DNA, 32 bp, Artificial; identical to SEQ ID NO: 7605
  oligonucleotide probe

SEQ ID NO: 23103 - DNA, 32 bp, Artificial; identical to SEQ ID NO: 10113
  oligonucleotide probe

SEQ ID NO: 23104 - DNA, 32 bp, Artificial; identical to SEQ ID NO: 10114
  oligonucleotide probe

SEQ ID NO: 23105 - DNA, 32 bp, Artificial; identical to SEQ ID NO: 5160
  oligonucleotide probe

SEQ ID NO: 23106 - DNA, 32 bp, Artificial; identical to SEQ ID NO: 8244
  oligonucleotide probe

SEQ ID NO: 23107 - DNA, 32 bp, Artificial; identical to SEQ ID NO: 5546
  oligonucleotide probe

SEQ ID NO: 23108 - DNA, 32 bp, Artificial; identical to SEQ ID NO: 8757
  oligonucleotide probe

SEQ ID NO: 23109 - DNA, 32 bp, Artificial; identical to SEQ ID NO: 5223
  oligonucleotide probe

SEQ ID NO: 23110 - DNA, 32 bp, Artificial; identical to SEQ ID NO: 7838
  oligonucleotide probe

SEQ ID NO: 23111 - DNA, 32 bp, Artificial; identical to SEQ ID NO: 5537
  oligonucleotide probe

SEQ ID NO: 23112 - DNA, 32 bp, Artificial; identical to SEQ ID NO: 10076
  oligonucleotide probe

SEQ ID NO: 23113 - DNA, 32 bp, Artificial; identical to SEQ ID NO: 8778
  oligonucleotide probe

SEQ ID NO: 23114 - DNA, 32 bp, Artificial; identical to SEQ ID NO: 8780
  oligonucleotide probe

SEQ ID NO: 23115 - DNA, 32 bp, Artificial; identical to SEQ ID NO: 8804
  oligonucleotide probe

SEQ ID NO: 23116 - DNA, 32 bp, Artificial; identical to SEQ ID NO: 5565
  oligonucleotide probe

SEQ ID NO: 23117 - DNA, 32 bp, Artificial; identical to SEQ ID NO: 8762
  oligonucleotide probe

SEQ ID NO: 23118 - DNA, 32 bp, Artificial; identical to SEQ ID NO: 5539
  oligonucleotide probe

SEQ ID NO: 23119 - DNA, 32 bp, Artificial; identical to SEQ ID NO: 9922
  oligonucleotide probe

SEQ ID NO: 23120 - DNA, 32 bp, Artificial; identical to SEQ ID NO: 5611
  oligonucleotide probe

SEQ ID NO: 23121 - DNA, 32 bp, Artificial; identical to SEQ ID NO: 9038
  oligonucleotide probe

SEQ ID NO: 23122 - DNA, 32 bp, Artificial; identical to SEQ ID NO: 5594
  oligonucleotide probe

SEQ ID NO: 23123 - DNA, 32 bp, Artificial; identical to SEQ ID NO: 10186
  oligonucleotide probe

SEQ ID NO: 23124 - DNA, 32 bp, Artificial; identical to SEQ ID NO: 10409
  oligonucleotide probe

SEQ ID NO: 23125 - DNA, 32 bp, Artificial; identical to SEQ ID NO: 6131
  oligonucleotide probe

SEQ ID NO: 23126 - DNA, 32 bp, Artificial; identical to SEQ ID NO: 10082
  oligonucleotide probe

SEQ ID NO: 23127 - DNA, 32 bp, Artificial; identical to SEQ ID NO: 8796
  oligonucleotide probe

SEQ ID NO: 23128 - DNA, 32 bp, Artificial; identical to SEQ ID NO: 5538
  oligonucleotide probe

SEQ ID NO: 23129 - DNA, 32 bp, Artificial; identical to SEQ ID NO: 10115
  oligonucleotide probe

SEQ ID NO: 23130 - DNA, 32 bp, Artificial; identical to SEQ ID NO: 10116
  oligonucleotide probe

SEQ ID NO: 23131 - DNA, 32 bp, Artificial; identical to SEQ ID NO: 10097
  oligonucleotide probe

SEQ ID NO: 23132 - DNA, 32 bp, Artificial; identical to SEQ ID NO: 5709
  oligonucleotide probe

SEQ ID NO: 23133 - DNA, 32 bp, Artificial; identical to SEQ ID NO: 5399
  oligonucleotide probe

SEQ ID NO: 23134 - DNA, 32 bp, Artificial; identical to SEQ ID NO: 10053
  oligonucleotide probe

SEQ ID NO: 23135 - DNA, 32 bp, Artificial; identical to SEQ ID NO: 10409
  oligonucleotide probe

SEQ ID NO: 23136 - DNA, 32 bp, Artificial; identical to SEQ ID NO: 10410
  oligonucleotide probe

SEQ ID NO: 23137 - DNA, 32 bp, Artificial; identical to SEQ ID NO: 10123
  oligonucleotide probe

SEQ ID NO: 23138 - DNA, 32 bp, Artificial; identical to SEQ ID NO: 10113
  oligonucleotide probe

SEQ ID NO: 23139 - DNA, 32 bp, Artificial; identical to SEQ ID NO: 10115
  oligonucleotide probe

SEQ ID NO: 23140 - DNA, 32 bp, Artificial; identical to SEQ ID NO: 10116
  oligonucleotide probe

SEQ ID NO: 23141 - DNA, 32 bp, Artificial; identical to SEQ ID NO: 7865
  oligonucleotide probe

SEQ ID NO: 23142 - DNA, 32 bp, Artificial; identical to SEQ ID NO: 7866
  oligonucleotide probe

SEQ ID NO: 23143 - DNA, 32 bp, Artificial; identical to SEQ ID NO: 8750
  oligonucleotide probe

SEQ ID NO: 23144 - DNA, 32 bp, Artificial; identical to SEQ ID NO: 5220
  oligonucleotide probe

SEQ ID NO: 23145 - DNA, 32 bp, Artificial; identical to SEQ ID NO: 8780
  oligonucleotide probe

SEQ ID NO: 23146 - DNA, 32 bp, Artificial; identical to SEQ ID NO: 8781
  oligonucleotide probe

SEQ ID NO: 23147 - DNA, 32 bp, Artificial; identical to SEQ ID NO: 9021
  oligonucleotide probe

SEQ ID NO: 23148 - DNA, 32 bp, Artificial; identical to SEQ ID NO: 8748
  oligonucleotide probe

SEQ ID NO: 23149 - DNA, 32 bp, Artificial; identical to SEQ ID NO: 7644
  oligonucleotide probe

SEQ ID NO: 23150 - DNA, 32 bp, Artificial; identical to SEQ ID NO: 5141
  oligonucleotide probe

SEQ ID NO: 23151 - DNA, 32 bp, Artificial; identical to SEQ ID NO: 10113
  oligonucleotide probe

SEQ ID NO: 23152 - DNA, 32 bp, Artificial; identical to SEQ ID NO: 5537
  oligonucleotide probe

SEQ ID NO: 23153 - DNA, 32 bp, Artificial; identical to SEQ ID NO: 7833
  oligonucleotide probe

SEQ ID NO: 23154 - DNA, 32 bp, Artificial; identical to SEQ ID NO: 7834
  oligonucleotide probe

SEQ ID NO: 23155 - DNA, 32 bp, Artificial; identical to SEQ ID NO: 7596
  oligonucleotide probe

SEQ ID NO: 23156 - DNA, 32 bp, Artificial; identical to SEQ ID NO: 5140
  oligonucleotide probe

SEQ ID NO: 23157 - DNA, 32 bp, Artificial; identical to SEQ ID NO: 8778
  oligonucleotide probe

SEQ ID NO: 23158 - DNA, 32 bp, Artificial; identical to SEQ ID NO: 5564
  oligonucleotide probe

SEQ ID NO: 23159 - DNA, 32 bp, Artificial; identical to SEQ ID NO: 5708
  oligonucleotide probe

SEQ ID NO: 23160 - DNA, 32 bp, Artificial; identical to SEQ ID NO: 10372
  oligonucleotide probe

SEQ ID NO: 23161 - DNA, 32 bp, Artificial; identical to SEQ ID NO: 7866
  oligonucleotide probe

SEQ ID NO: 23162 - DNA, 32 bp, Artificial; identical to SEQ ID NO: 8834
  oligonucleotide probe

SEQ ID NO: 23163 - DNA, 32 bp, Artificial; identical to SEQ ID NO: 10064
  oligonucleotide probe

SEQ ID NO: 23164 - DNA, 32 bp, Artificial; identical to SEQ ID NO: 10052
  oligonucleotide probe

SEQ ID NO: 23165 - DNA, 32 bp, Artificial; identical to SEQ ID NO: 9826
  oligonucleotide probe

SEQ ID NO: 23166 - DNA, 32 bp, Artificial; identical to SEQ ID NO: 5610
  oligonucleotide probe

SEQ ID NO: 23167 - DNA, 32 bp, Artificial; identical to SEQ ID NO: 10397
  oligonucleotide probe

SEQ ID NO: 23168 - DNA, 32 bp, Artificial; identical to SEQ ID NO: 5541
  oligonucleotide probe

SEQ ID NO: 23169 - DNA, 32 bp, Artificial; identical to SEQ ID NO: 8868
  oligonucleotide probe

SEQ ID NO: 23170 - DNA, 32 bp, Artificial; identical to SEQ ID NO: 5584
  oligonucleotide probe

SEQ ID NO: 23171 - DNA, 32 bp, Artificial; identical to SEQ ID NO: 5546
  oligonucleotide probe

SEQ ID NO: 23172 - DNA, 32 bp, Artificial; identical to SEQ ID NO: 8757
  oligonucleotide probe

SEQ ID NO: 23173 - DNA, 32 bp, Artificial; identical to SEQ ID NO: 10164
  oligonucleotide probe

SEQ ID NO: 23174 - DNA, 32 bp, Artificial; identical to SEQ ID NO: 5537
  oligonucleotide probe

SEQ ID NO: 23175 - DNA, 32 bp, Artificial; identical to SEQ ID NO: 7783
  oligonucleotide probe

SEQ ID NO: 23176 - DNA, 32 bp, Artificial; identical to SEQ ID NO: 7812
  oligonucleotide probe

SEQ ID NO: 23177 - DNA, 32 bp, Artificial; identical to SEQ ID NO: 5171
  oligonucleotide probe

SEQ ID NO: 23178 - DNA, 32 bp, Artificial; identical to SEQ ID NO: 7676
  oligonucleotide probe

SEQ ID NO: 23179 - DNA, 32 bp, Artificial; identical to SEQ ID NO: 5547
  oligonucleotide probe

SEQ ID NO: 23180 - DNA, 32 bp, Artificial; identical to SEQ ID NO: 10272
  oligonucleotide probe

SEQ ID NO: 23181 - DNA, 32 bp, Artificial; identical to SEQ ID NO: 8784
  oligonucleotide probe

SEQ ID NO: 23182 - DNA, 32 bp, Artificial; identical to SEQ ID NO: 8785
  oligonucleotide probe

SEQ ID NO: 23183 - DNA, 32 bp, Artificial; identical to SEQ ID NO: 5159
  oligonucleotide probe

SEQ ID NO: 23184 - DNA, 32 bp, Artificial; identical to SEQ ID NO: 7694
  oligonucleotide probe

SEQ ID NO: 23185 - DNA, 32 bp, Artificial; identical to SEQ ID NO: 8753
  oligonucleotide probe

SEQ ID NO: 23186 - DNA, 32 bp, Artificial; identical to SEQ ID NO: 8760
  oligonucleotide probe

SEQ ID NO: 23187 - DNA, 32 bp, Artificial; identical to SEQ ID NO: 5554
  oligonucleotide probe

SEQ ID NO: 23188 - DNA, 32 bp, Artificial; identical to SEQ ID NO: 10226
  oligonucleotide probe

SEQ ID NO: 23189 - DNA, 32 bp, Artificial; identical to SEQ ID NO: 7605
  oligonucleotide probe

SEQ ID NO: 23190 - DNA, 32 bp, Artificial; identical to SEQ ID NO: 7606
  oligonucleotide probe

SEQ ID NO: 23191 - DNA, 32 bp, Artificial; identical to SEQ ID NO: 7623
  oligonucleotide probe

SEQ ID NO: 23192 - DNA, 32 bp, Artificial; identical to SEQ ID NO: 7624
  oligonucleotide probe

SEQ ID NO: 23193 - DNA, 32 bp, Artificial; identical to SEQ ID NO: 6074
  oligonucleotide probe

SEQ ID NO: 23194 - DNA, 32 bp, Artificial; identical to SEQ ID NO: 10097
  oligonucleotide probe

SEQ ID NO: 23195 - DNA, 32 bp, Artificial; identical to SEQ ID NO: 5538
  oligonucleotide probe

SEQ ID NO: 23196 - DNA, 32 bp, Artificial; identical to SEQ ID NO: 7840
  oligonucleotide probe

SEQ ID NO: 23197 - DNA, 32 bp, Artificial; identical to SEQ ID NO: 8835
  oligonucleotide probe

SEQ ID NO: 23198 - DNA, 32 bp, Artificial; identical to SEQ ID NO: 5136
  oligonucleotide probe

SEQ ID NO: 23199 - DNA, 32 bp, Artificial; identical to SEQ ID NO: 8776
  oligonucleotide probe

SEQ ID NO: 23200 - DNA, 32 bp, Artificial; identical to SEQ ID NO: 8777
  oligonucleotide probe

SEQ ID NO: 23201 - DNA, 32 bp, Artificial; identical to SEQ ID NO: 10318
  oligonucleotide probe

SEQ ID NO: 23202 - DNA, 32 bp, Artificial; identical to SEQ ID NO: 10405
  oligonucleotide probe

SEQ ID NO: 23203 - DNA, 32 bp, Artificial; identical to SEQ ID NO: 8778
  oligonucleotide probe

SEQ ID NO: 23204 - DNA, 32 bp, Artificial; identical to SEQ ID NO: 5564
  oligonucleotide probe

SEQ ID NO: 23205 - DNA, 32 bp, Artificial; identical to SEQ ID NO: 7841
  oligonucleotide probe

SEQ ID NO: 23206 - DNA, 32 bp, Artificial; identical to SEQ ID NO: 7842
  oligonucleotide probe

SEQ ID NO: 23207 - DNA, 32 bp, Artificial; identical to SEQ ID NO: 10164
  oligonucleotide probe

SEQ ID NO: 23208 - DNA, 32 bp, Artificial; identical to SEQ ID NO: 10139
  oligonucleotide probe

SEQ ID NO: 23209 - DNA, 32 bp, Artificial; identical to SEQ ID NO: 5547
  oligonucleotide probe

SEQ ID NO: 23210 - DNA, 32 bp, Artificial; identical to SEQ ID NO: 10272
  oligonucleotide probe

SEQ ID NO: 23211 - DNA, 32 bp, Artificial; identical to SEQ ID NO: 8796
  oligonucleotide probe

SEQ ID NO: 23212 - DNA, 32 bp, Artificial; identical to SEQ ID NO: 5538
  oligonucleotide probe

SEQ ID NO: 23213 - DNA, 32 bp, Artificial; identical to SEQ ID NO: 8784
  oligonucleotide probe

SEQ ID NO: 23214 - DNA, 32 bp, Artificial; identical to SEQ ID NO: 8785
  oligonucleotide probe

SEQ ID NO: 23215 - DNA, 32 bp, Artificial; identical to SEQ ID NO: 5708
  oligonucleotide probe

SEQ ID NO: 23216 - DNA, 32 bp, Artificial; identical to SEQ ID NO: 10372
  oligonucleotide probe

SEQ ID NO: 23217 - DNA, 32 bp, Artificial; identical to SEQ ID NO: 10064
  oligonucleotide probe

SEQ ID NO: 23218 - DNA, 32 bp, Artificial; identical to SEQ ID NO: 10052
  oligonucleotide probe

SEQ ID NO: 23219 - DNA, 32 bp, Artificial; identical to SEQ ID NO: 10148
  oligonucleotide probe

SEQ ID NO: 23220 - DNA, 32 bp, Artificial; identical to SEQ ID NO: 10318
  oligonucleotide probe

SEQ ID NO: 23221 - DNA, 32 bp, Artificial; identical to SEQ ID NO: 6131
  oligonucleotide probe

SEQ ID NO: 23222 - DNA, 32 bp, Artificial; identical to SEQ ID NO: 10082
  oligonucleotide probe

SEQ ID NO: 23223 - DNA, 32 bp, Artificial; identical to SEQ ID NO: 5547
  oligonucleotide probe

SEQ ID NO: 23224 - DNA, 32 bp, Artificial; identical to SEQ ID NO: 10272
  oligonucleotide probe

SEQ ID NO: 23225 - DNA, 32 bp, Artificial; identical to SEQ ID NO: 7598
  oligonucleotide probe

SEQ ID NO: 23226 - DNA, 32 bp, Artificial; identical to SEQ ID NO: 7855
  oligonucleotide probe

SEQ ID NO: 23227 - DNA, 32 bp, Artificial; identical to SEQ ID NO: 9826
  oligonucleotide probe

SEQ ID NO: 23228 - DNA, 32 bp, Artificial; identical to SEQ ID NO: 5610
  oligonucleotide probe

SEQ ID NO: 23229 - DNA, 32 bp, Artificial; identical to SEQ ID NO: 7865
  oligonucleotide probe

SEQ ID NO: 23230 - DNA, 32 bp, Artificial; identical to SEQ ID NO: 7866
  oligonucleotide probe

SEQ ID NO: 23231 - DNA, 32 bp, Artificial; identical to SEQ ID NO: 6131
  oligonucleotide probe

SEQ ID NO: 23232 - DNA, 32 bp, Artificial; identical to SEQ ID NO: 8753
  oligonucleotide probe

SEQ ID NO: 23233 - DNA, 32 bp, Artificial; identical to SEQ ID NO: 5416
  oligonucleotide probe

SEQ ID NO: 23234 - DNA, 32 bp, Artificial; identical to SEQ ID NO: 8467
  oligonucleotide probe

SEQ ID NO: 23235 - DNA, 32 bp, Artificial; identical to SEQ ID NO: 10331
  oligonucleotide probe

SEQ ID NO: 23236 - DNA, 32 bp, Artificial; identical to SEQ ID NO: 10332
  oligonucleotide probe

SEQ ID NO: 23237 - DNA, 32 bp, Artificial; identical to SEQ ID NO: 5538
  oligonucleotide probe

SEQ ID NO: 23238 - DNA, 32 bp, Artificial; identical to SEQ ID NO: 8762
  oligonucleotide probe

SEQ ID NO: 23239 - DNA, 32 bp, Artificial; identical to SEQ ID NO: 5551
  oligonucleotide probe

SEQ ID NO: 23240 - DNA, 32 bp, Artificial; identical to SEQ ID NO: 10397
  oligonucleotide probe

SEQ ID NO: 23241 - DNA, 32 bp, Artificial; identical to SEQ ID NO: 10086
  oligonucleotide probe

SEQ ID NO: 23242 - DNA, 32 bp, Artificial; identical to SEQ ID NO: 10115
  oligonucleotide probe

SEQ ID NO: 23243 - DNA, 32 bp, Artificial; identical to SEQ ID NO: 8780
  oligonucleotide probe

SEQ ID NO: 23244 - DNA, 32 bp, Artificial; identical to SEQ ID NO: 8781
  oligonucleotide probe

SEQ ID NO: 23245 - DNA, 32 bp, Artificial; identical to SEQ ID NO: 9826
  oligonucleotide probe

SEQ ID NO: 23246 - DNA, 32 bp, Artificial; identical to SEQ ID NO: 5610
  oligonucleotide probe

SEQ ID NO: 23247 - DNA, 32 bp, Artificial; identical to SEQ ID NO: 5232
  oligonucleotide probe

SEQ ID NO: 23248 - DNA, 32 bp, Artificial; identical to SEQ ID NO: 9038
  oligonucleotide probe

SEQ ID NO: 23249 - DNA, 32 bp, Artificial; identical to SEQ ID NO: 8001
  oligonucleotide probe

SEQ ID NO: 23250 - DNA, 32 bp, Artificial; identical to SEQ ID NO: 5239
  oligonucleotide probe

SEQ ID NO: 23251 - DNA, 32 bp, Artificial; identical to SEQ ID NO: 8776
  oligonucleotide probe

SEQ ID NO: 23252 - DNA, 32 bp, Artificial; identical to SEQ ID NO: 8777
  oligonucleotide probe

SEQ ID NO: 23253 - DNA, 32 bp, Artificial; identical to SEQ ID NO: 5547
  oligonucleotide probe

SEQ ID NO: 23254 - DNA, 32 bp, Artificial; identical to SEQ ID NO: 8753
  oligonucleotide probe

SEQ ID NO: 23255 - DNA, 32 bp, Artificial; identical to SEQ ID NO: 10332
  oligonucleotide probe

SEQ ID NO: 23256 - DNA, 32 bp, Artificial; identical to SEQ ID NO: 5537
  oligonucleotide probe

SEQ ID NO: 23257 - DNA, 32 bp, Artificial; identical to SEQ ID NO: 8778
  oligonucleotide probe

SEQ ID NO: 23258 - DNA, 32 bp, Artificial; identical to SEQ ID NO: 5564
  oligonucleotide probe

SEQ ID NO: 23259 - DNA, 32 bp, Artificial; identical to SEQ ID NO: 7891
  oligonucleotide probe

SEQ ID NO: 23260 - DNA, 32 bp, Artificial; identical to SEQ ID NO: 5218
  oligonucleotide probe

SEQ ID NO: 23261 - DNA, 32 bp, Artificial; identical to SEQ ID NO: 8748
  oligonucleotide probe

SEQ ID NO: 23262 - DNA, 32 bp, Artificial; identical to SEQ ID NO: 8749
  oligonucleotide probe

SEQ ID NO: 23263 - DNA, 32 bp, Artificial; identical to SEQ ID NO: 10114
  oligonucleotide probe

SEQ ID NO: 23264 - DNA, 32 bp, Artificial; identical to SEQ ID NO: 10506
  oligonucleotide probe

SEQ ID NO: 23265 - DNA, 32 bp, Artificial; identical to SEQ ID NO: 6145
  oligonucleotide probe

SEQ ID NO: 23266 - DNA, 32 bp, Artificial; identical to SEQ ID NO: 10896
  oligonucleotide probe

SEQ ID NO: 23267 - DNA, 32 bp, Artificial; identical to SEQ ID NO: 7891
  oligonucleotide probe

SEQ ID NO: 23268 - DNA, 32 bp, Artificial; identical to SEQ ID NO: 5218
  oligonucleotide probe

SEQ ID NO: 23269 - DNA, 32 bp, Artificial; identical to SEQ ID NO: 8796
  oligonucleotide probe

SEQ ID NO: 23270 - DNA, 32 bp, Artificial; identical to SEQ ID NO: 5538
  oligonucleotide probe

SEQ ID NO: 23271 - DNA, 32 bp, Artificial; identical to SEQ ID NO: 8047
  oligonucleotide probe

SEQ ID NO: 23272 - DNA, 32 bp, Artificial; identical to SEQ ID NO: 5240
  oligonucleotide probe

SEQ ID NO: 23273 - DNA, 32 bp, Artificial; identical to SEQ ID NO: 6131
  oligonucleotide probe

SEQ ID NO: 23274 - DNA, 32 bp, Artificial; identical to SEQ ID NO: 10082
  oligonucleotide probe

SEQ ID NO: 23275 - DNA, 32 bp, Artificial; identical to SEQ ID NO: 8750
  oligonucleotide probe

SEQ ID NO: 23276 - DNA, 32 bp, Artificial; identical to SEQ ID NO: 8751
  oligonucleotide probe

SEQ ID NO: 23277 - DNA, 32 bp, Artificial; identical to SEQ ID NO: 6131
  oligonucleotide probe

SEQ ID NO: 23278 - DNA, 32 bp, Artificial; identical to SEQ ID NO: 10082
  oligonucleotide probe

SEQ ID NO: 23279 - DNA, 32 bp, Artificial; identical to SEQ ID NO: 8776
  oligonucleotide probe

SEQ ID NO: 23280 - DNA, 32 bp, Artificial; identical to SEQ ID NO: 8777
  oligonucleotide probe

SEQ ID NO: 23281 - DNA, 32 bp, Artificial; identical to SEQ ID NO: 5399
  oligonucleotide probe

SEQ ID NO: 23282 - DNA, 32 bp, Artificial; identical to SEQ ID NO: 10053
  oligonucleotide probe

SEQ ID NO: 23283 - DNA, 32 bp, Artificial; identical to SEQ ID NO: 10405
  oligonucleotide probe

SEQ ID NO: 23284 - DNA, 32 bp, Artificial; identical to SEQ ID NO: 10185
  oligonucleotide probe

SEQ ID NO: 23285 - DNA, 32 bp, Artificial; identical to SEQ ID NO: 8868
  oligonucleotide probe

SEQ ID NO: 23286 - DNA, 32 bp, Artificial; identical to SEQ ID NO: 5584
  oligonucleotide probe

SEQ ID NO: 23287 - DNA, 32 bp, Artificial; identical to SEQ ID NO: 10533
  oligonucleotide probe

SEQ ID NO: 23288 - DNA, 32 bp, Artificial; identical to SEQ ID NO: 10918
  oligonucleotide probe

SEQ ID NO: 23289 - DNA, 32 bp, Artificial; identical to SEQ ID NO: 8753
  oligonucleotide probe

SEQ ID NO: 23290 - DNA, 32 bp, Artificial; identical to SEQ ID NO: 8760
  oligonucleotide probe

SEQ ID NO: 23291 - DNA, 32 bp, Artificial; identical to SEQ ID NO: 9826
  oligonucleotide probe

SEQ ID NO: 23292 - DNA, 32 bp, Artificial; identical to SEQ ID NO: 5610
  oligonucleotide probe

SEQ ID NO: 23293 - DNA, 32 bp, Artificial; identical to SEQ ID NO: 10140
  oligonucleotide probe

SEQ ID NO: 23294 - DNA, 32 bp, Artificial; identical to SEQ ID NO: 10501
  oligonucleotide probe

SEQ ID NO: 23295 - DNA, 32 bp, Artificial; identical to SEQ ID NO: 9252
  oligonucleotide probe

SEQ ID NO: 23296 - DNA, 32 bp, Artificial; identical to SEQ ID NO: 9253
  oligonucleotide probe

SEQ ID NO: 23297 - DNA, 32 bp, Artificial; identical to SEQ ID NO: 8786
  oligonucleotide probe

SEQ ID NO: 23298 - DNA, 32 bp, Artificial; identical to SEQ ID NO: 5585
  oligonucleotide probe

SEQ ID NO: 23299 - DNA, 32 bp, Artificial; identical to SEQ ID NO: 5540
  oligonucleotide probe

SEQ ID NO: 23300 - DNA, 32 bp, Artificial; identical to SEQ ID NO: 8753
  oligonucleotide probe

SEQ ID NO: 23301 - DNA, 32 bp, Artificial; identical to SEQ ID NO: 7673
  oligonucleotide probe

SEQ ID NO: 23302 - DNA, 32 bp, Artificial; identical to SEQ ID NO: 7690
  oligonucleotide probe

SEQ ID NO: 23303 - DNA, 32 bp, Artificial; identical to SEQ ID NO: 8780
  oligonucleotide probe

SEQ ID NO: 23304 - DNA, 32 bp, Artificial; identical to SEQ ID NO: 8781
  oligonucleotide probe

SEQ ID NO: 23305 - DNA, 32 bp, Artificial; identical to SEQ ID NO: 7598
  oligonucleotide probe

SEQ ID NO: 23306 - DNA, 32 bp, Artificial; identical to SEQ ID NO: 7855
  oligonucleotide probe

SEQ ID NO: 23307 - DNA, 32 bp, Artificial; identical to SEQ ID NO: 5171
  oligonucleotide probe

SEQ ID NO: 23308 - DNA, 32 bp, Artificial; identical to SEQ ID NO: 7676
  oligonucleotide probe

SEQ ID NO: 23309 - DNA, 32 bp, Artificial; identical to SEQ ID NO: 6074
  oligonucleotide probe

SEQ ID NO: 23310 - DNA, 32 bp, Artificial; identical to SEQ ID NO: 10097
  oligonucleotide probe

SEQ ID NO: 23311 - DNA, 32 bp, Artificial; identical to SEQ ID NO: 8796
  oligonucleotide probe

SEQ ID NO: 23312 - DNA, 32 bp, Artificial; identical to SEQ ID NO: 5538
  oligonucleotide probe

SEQ ID NO: 23313 - DNA, 32 bp, Artificial; identical to SEQ ID NO: 8776
  oligonucleotide probe

SEQ ID NO: 23314 - DNA, 32 bp, Artificial; identical to SEQ ID NO: 5220
  oligonucleotide probe

SEQ ID NO: 23315 - DNA, 32 bp, Artificial; identical to SEQ ID NO: 8766
  oligonucleotide probe

SEQ ID NO: 23316 - DNA, 32 bp, Artificial; identical to SEQ ID NO: 8767
  oligonucleotide probe

SEQ ID NO: 23317 - DNA, 32 bp, Artificial; identical to SEQ ID NO: 10140
  oligonucleotide probe

SEQ ID NO: 23318 - DNA, 32 bp, Artificial; identical to SEQ ID NO: 5537
  oligonucleotide probe

SEQ ID NO: 23319 - DNA, 32 bp, Artificial; identical to SEQ ID NO: 10076
  oligonucleotide probe

SEQ ID NO: 23320 - DNA, 32 bp, Artificial; identical to SEQ ID NO: 6074
  oligonucleotide probe

SEQ ID NO: 23321 - DNA, 32 bp, Artificial; identical to SEQ ID NO: 8750
  oligonucleotide probe

SEQ ID NO: 23322 - DNA, 32 bp, Artificial; identical to SEQ ID NO: 8751
  oligonucleotide probe

SEQ ID NO: 23323 - DNA, 32 bp, Artificial; identical to SEQ ID NO: 10115
  oligonucleotide probe

SEQ ID NO: 23324 - DNA, 32 bp, Artificial; identical to SEQ ID NO: 10116
  oligonucleotide probe

SEQ ID NO: 23325 - DNA, 32 bp, Artificial; identical to SEQ ID NO: 10076
  oligonucleotide probe

SEQ ID NO: 23326 - DNA, 32 bp, Artificial; identical to SEQ ID NO: 6074
  oligonucleotide probe

SEQ ID NO: 23327 - DNA, 32 bp, Artificial; identical to SEQ ID NO: 10331
  oligonucleotide probe

SEQ ID NO: 23328 - DNA, 32 bp, Artificial; identical to SEQ ID NO: 5537
  oligonucleotide probe

SEQ ID NO: 23329 - DNA, 32 bp, Artificial; identical to SEQ ID NO: 8868
  oligonucleotide probe

SEQ ID NO: 23330 - DNA, 32 bp, Artificial; identical to SEQ ID NO: 5584
  oligonucleotide probe

SEQ ID NO: 23331 - DNA, 32 bp, Artificial; identical to SEQ ID NO: 8753
  oligonucleotide probe

SEQ ID NO: 23332 - DNA, 32 bp, Artificial; identical to SEQ ID NO: 8760
  oligonucleotide probe

SEQ ID NO: 23333 - DNA, 32 bp, Artificial; identical to SEQ ID NO: 10506
  oligonucleotide probe

SEQ ID NO: 23334 - DNA, 32 bp, Artificial; identical to SEQ ID NO: 5537
  oligonucleotide probe

SEQ ID NO: 23335 - DNA, 32 bp, Artificial; identical to SEQ ID NO: 8778
  oligonucleotide probe

SEQ ID NO: 23336 - DNA, 32 bp, Artificial; identical to SEQ ID NO: 5564
  oligonucleotide probe

SEQ ID NO: 23337 - DNA, 32 bp, Artificial; identical to SEQ ID NO: 8936
  oligonucleotide probe

SEQ ID NO: 23338 - DNA, 32 bp, Artificial; identical to SEQ ID NO: 5595
  oligonucleotide probe

SEQ ID NO: 23339 - DNA, 32 bp, Artificial; identical to SEQ ID NO: 10076
  oligonucleotide probe

SEQ ID NO: 23340 - DNA, 32 bp, Artificial; identical to SEQ ID NO: 6074
  oligonucleotide probe

SEQ ID NO: 23341 - DNA, 32 bp, Artificial; identical to SEQ ID NO: 9922
  oligonucleotide probe

SEQ ID NO: 23342 - DNA, 32 bp, Artificial; identical to SEQ ID NO: 5611
  oligonucleotide probe

SEQ ID NO: 23343 - DNA, 32 bp, Artificial; identical to SEQ ID NO: 10123
  oligonucleotide probe

SEQ ID NO: 23344 - DNA, 32 bp, Artificial; identical to SEQ ID NO: 10113
  oligonucleotide probe

SEQ ID NO: 23345 - DNA, 32 bp, Artificial; identical to SEQ ID NO: 10097
  oligonucleotide probe

SEQ ID NO: 23346 - DNA, 32 bp, Artificial; identical to SEQ ID NO: 5709
  oligonucleotide probe

SEQ ID NO: 23347 - DNA, 32 bp, Artificial; identical to SEQ ID NO: 5160
  oligonucleotide probe

SEQ ID NO: 23348 - DNA, 32 bp, Artificial; identical to SEQ ID NO: 8244
  oligonucleotide probe

SEQ ID NO: 23349 - DNA, 32 bp, Artificial; identical to SEQ ID NO: 8834
  oligonucleotide probe

SEQ ID NO: 23350 - DNA, 32 bp, Artificial; identical to SEQ ID NO: 8835
  oligonucleotide probe

SEQ ID NO: 23351 - DNA, 32 bp, Artificial; identical to SEQ ID NO: 8780
  oligonucleotide probe

SEQ ID NO: 23352 - DNA, 32 bp, Artificial; identical to SEQ ID NO: 8781
  oligonucleotide probe

SEQ ID NO: 23353 - DNA, 32 bp, Artificial; identical to SEQ ID NO: 7596
  oligonucleotide probe

SEQ ID NO: 23354 - DNA, 32 bp, Artificial; identical to SEQ ID NO: 5140
  oligonucleotide probe

SEQ ID NO: 23355 - DNA, 32 bp, Artificial; identical to SEQ ID NO: 7863
  oligonucleotide probe

SEQ ID NO: 23356 - DNA, 32 bp, Artificial; identical to SEQ ID NO: 5217
  oligonucleotide probe

SEQ ID NO: 23357 - DNA, 32 bp, Artificial; identical to SEQ ID NO: 8750
  oligonucleotide probe

SEQ ID NO: 23358 - DNA, 32 bp, Artificial; identical to SEQ ID NO: 8751
  oligonucleotide probe

SEQ ID NO: 23359 - DNA, 32 bp, Artificial; identical to SEQ ID NO: 10501
  oligonucleotide probe

SEQ ID NO: 23360 - DNA, 32 bp, Artificial; identical to SEQ ID NO: 10123
  oligonucleotide probe

SEQ ID NO: 23361 - DNA, 32 bp, Artificial; identical to SEQ ID NO: 5223
  oligonucleotide probe

SEQ ID NO: 23362 - DNA, 32 bp, Artificial; identical to SEQ ID NO: 7838
  oligonucleotide probe

SEQ ID NO: 23363 - DNA, 32 bp, Artificial; identical to SEQ ID NO: 10147
  oligonucleotide probe

SEQ ID NO: 23364 - DNA, 32 bp, Artificial; identical to SEQ ID NO: 10148
  oligonucleotide probe

SEQ ID NO: 23365 - DNA, 32 bp, Artificial; identical to SEQ ID NO: 5547
  oligonucleotide probe

SEQ ID NO: 23366 - DNA, 32 bp, Artificial; identical to SEQ ID NO: 10272
  oligonucleotide probe

SEQ ID NO: 23367 - DNA, 32 bp, Artificial; identical to SEQ ID NO: 5224
  oligonucleotide probe

SEQ ID NO: 23368 - DNA, 32 bp, Artificial; identical to SEQ ID NO: 8796
  oligonucleotide probe

SEQ ID NO: 23369 - DNA, 32 bp, Artificial; identical to SEQ ID NO: 10097
  oligonucleotide probe

SEQ ID NO: 23370 - DNA, 32 bp, Artificial; identical to SEQ ID NO: 5709
  oligonucleotide probe

SEQ ID NO: 23371 - DNA, 32 bp, Artificial; identical to SEQ ID NO: 10164
  oligonucleotide probe

SEQ ID NO: 23372 - DNA, 32 bp, Artificial; identical to SEQ ID NO: 10139
  oligonucleotide probe

SEQ ID NO: 23373 - DNA, 32 bp, Artificial; identical to SEQ ID NO: 8748
  oligonucleotide probe

SEQ ID NO: 23374 - DNA, 32 bp, Artificial; identical to SEQ ID NO: 8749
  oligonucleotide probe

SEQ ID NO: 23375 - DNA, 32 bp, Artificial; identical to SEQ ID NO: 8786
  oligonucleotide probe

SEQ ID NO: 23376 - DNA, 32 bp, Artificial; identical to SEQ ID NO: 5585
  oligonucleotide probe

SEQ ID NO: 23377 - DNA, 32 bp, Artificial; identical to SEQ ID NO: 5416
  oligonucleotide probe

SEQ ID NO: 23378 - DNA, 32 bp, Artificial; identical to SEQ ID NO: 8467
  oligonucleotide probe

SEQ ID NO: 23379 - DNA, 32 bp, Artificial; identical to SEQ ID NO: 10116
  oligonucleotide probe

SEQ ID NO: 23380 - DNA, 32 bp, Artificial; identical to SEQ ID NO: 10147
  oligonucleotide probe

SEQ ID NO: 23381 - DNA, 32 bp, Artificial; identical to SEQ ID NO: 8778
  oligonucleotide probe

SEQ ID NO: 23382 - DNA, 32 bp, Artificial; identical to SEQ ID NO: 5564
  oligonucleotide probe

SEQ ID NO: 23383 - DNA, 32 bp, Artificial; identical to SEQ ID NO: 10147
  oligonucleotide probe

SEQ ID NO: 23384 - DNA, 32 bp, Artificial; identical to SEQ ID NO: 10148
  oligonucleotide probe

SEQ ID NO: 23385 - DNA, 32 bp, Artificial; identical to SEQ ID NO: 8834
  oligonucleotide probe

SEQ ID NO: 23386 - DNA, 32 bp, Artificial; identical to SEQ ID NO: 8835
  oligonucleotide probe

SEQ ID NO: 23387 - DNA, 32 bp, Artificial; identical to SEQ ID NO: 9020
  oligonucleotide probe

SEQ ID NO: 23388 - DNA, 32 bp, Artificial; identical to SEQ ID NO: 9021
  oligonucleotide probe

SEQ ID NO: 23389 - DNA, 32 bp, Artificial; identical to SEQ ID NO: 5134
  oligonucleotide probe

SEQ ID NO: 23390 - DNA, 32 bp, Artificial; identical to SEQ ID NO: 7905
  oligonucleotide probe

SEQ ID NO: 23391 - DNA, 32 bp, Artificial; identical to SEQ ID NO: 10097
  oligonucleotide probe

SEQ ID NO: 23392 - DNA, 32 bp, Artificial; identical to SEQ ID NO: 5709
  oligonucleotide probe

SEQ ID NO: 23393 - DNA, 32 bp, Artificial; identical to SEQ ID NO: 8762
  oligonucleotide probe

SEQ ID NO: 23394 - DNA, 32 bp, Artificial; identical to SEQ ID NO: 5539
  oligonucleotide probe

SEQ ID NO: 23395 - DNA, 32 bp, Artificial; identical to SEQ ID NO: 8750
  oligonucleotide probe

SEQ ID NO: 23396 - DNA, 32 bp, Artificial; identical to SEQ ID NO: 8751
  oligonucleotide probe

SEQ ID NO: 23397 - DNA, 32 bp, Artificial; identical to SEQ ID NO: 7891
  oligonucleotide probe

SEQ ID NO: 23398 - DNA, 32 bp, Artificial; identical to SEQ ID NO: 5218
  oligonucleotide probe

SEQ ID NO: 23399 - DNA, 32 bp, Artificial; identical to SEQ ID NO: 7606
  oligonucleotide probe

SEQ ID NO: 23400 - DNA, 32 bp, Artificial; identical to SEQ ID NO: 7947
  oligonucleotide probe

SEQ ID NO: 23401 - DNA, 32 bp, Artificial; identical to SEQ ID NO: 8760
  oligonucleotide probe

SEQ ID NO: 23402 - DNA, 32 bp, Artificial; identical to SEQ ID NO: 10164
  oligonucleotide probe

SEQ ID NO: 23403 - DNA, 32 bp, Artificial; identical to SEQ ID NO: 8766
  oligonucleotide probe

SEQ ID NO: 23404 - DNA, 32 bp, Artificial; identical to SEQ ID NO: 8767
  oligonucleotide probe

SEQ ID NO: 23405 - DNA, 32 bp, Artificial; identical to SEQ ID NO: 10086
  oligonucleotide probe

SEQ ID NO: 23406 - DNA, 32 bp, Artificial; identical to SEQ ID NO: 10115
  oligonucleotide probe

SEQ ID NO: 23407 - DNA, 32 bp, Artificial; identical to SEQ ID NO: 8442
  oligonucleotide probe

SEQ ID NO: 23408 - DNA, 32 bp, Artificial; identical to SEQ ID NO: 8571
  oligonucleotide probe

SEQ ID NO: 23409 - DNA, 32 bp, Artificial; identical to SEQ ID NO: 10397
  oligonucleotide probe

SEQ ID NO: 23410 - DNA, 32 bp, Artificial; identical to SEQ ID NO: 10086
  oligonucleotide probe

SEQ ID NO: 23411 - DNA, 32 bp, Artificial; identical to SEQ ID NO: 5546
  oligonucleotide probe

SEQ ID NO: 23412 - DNA, 32 bp, Artificial; identical to SEQ ID NO: 8757
  oligonucleotide probe

SEQ ID NO: 23413 - DNA, 32 bp, Artificial; identical to SEQ ID NO: 5554
  oligonucleotide probe

SEQ ID NO: 23414 - DNA, 32 bp, Artificial; identical to SEQ ID NO: 10226
  oligonucleotide probe

SEQ ID NO: 23415 - DNA, 32 bp, Artificial; identical to SEQ ID NO: 8868
  oligonucleotide probe

SEQ ID NO: 23416 - DNA, 32 bp, Artificial; identical to SEQ ID NO: 5584
  oligonucleotide probe

SEQ ID NO: 23417 - DNA, 32 bp, Artificial; identical to SEQ ID NO: 7831
  oligonucleotide probe

SEQ ID NO: 23418 - DNA, 32 bp, Artificial; identical to SEQ ID NO: 7832
  oligonucleotide probe

SEQ ID NO: 23419 - DNA, 32 bp, Artificial; identical to SEQ ID NO: 10644
  oligonucleotide probe

SEQ ID NO: 23420 - DNA, 32 bp, Artificial; identical to SEQ ID NO: 11050
  oligonucleotide probe

SEQ ID NO: 23421 - DNA, 32 bp, Artificial; identical to SEQ ID NO: 8778
  oligonucleotide probe

SEQ ID NO: 23422 - DNA, 32 bp, Artificial; identical to SEQ ID NO: 5564
  oligonucleotide probe

SEQ ID NO: 23423 - DNA, 32 bp, Artificial; identical to SEQ ID NO: 8776
  oligonucleotide probe

SEQ ID NO: 23424 - DNA, 32 bp, Artificial; identical to SEQ ID NO: 8777
  oligonucleotide probe

SEQ ID NO: 23425 - DNA, 32 bp, Artificial; identical to SEQ ID NO: 5546
  oligonucleotide probe

SEQ ID NO: 23426 - DNA, 32 bp, Artificial; identical to SEQ ID NO: 10086
  oligonucleotide probe

SEQ ID NO: 23427 - DNA, 32 bp, Artificial; identical to SEQ ID NO: 10076
  oligonucleotide probe

SEQ ID NO: 23428 - DNA, 32 bp, Artificial; identical to SEQ ID NO: 6074
  oligonucleotide probe

SEQ ID NO: 23429 - DNA, 32 bp, Artificial; identical to SEQ ID NO: 9038
  oligonucleotide probe

SEQ ID NO: 23430 - DNA, 32 bp, Artificial; identical to SEQ ID NO: 5594
  oligonucleotide probe

SEQ ID NO: 23431 - DNA, 32 bp, Artificial; identical to SEQ ID NO: 5547
  oligonucleotide probe

SEQ ID NO: 23432 - DNA, 32 bp, Artificial; identical to SEQ ID NO: 10272
  oligonucleotide probe

SEQ ID NO: 23433 - DNA, 32 bp, Artificial; identical to SEQ ID NO: 5546
  oligonucleotide probe

SEQ ID NO: 23434 - DNA, 32 bp, Artificial; identical to SEQ ID NO: 8757
  oligonucleotide probe

SEQ ID NO: 23435 - DNA, 32 bp, Artificial; identical to SEQ ID NO: 9020
  oligonucleotide probe

SEQ ID NO: 23436 - DNA, 32 bp, Artificial; identical to SEQ ID NO: 9021
  oligonucleotide probe

SEQ ID NO: 23437 - DNA, 32 bp, Artificial; identical to SEQ ID NO: 8762
  oligonucleotide probe

SEQ ID NO: 23438 - DNA, 32 bp, Artificial; identical to SEQ ID NO: 5539
  oligonucleotide probe

SEQ ID NO: 23439 - DNA, 32 bp, Artificial; identical to SEQ ID NO: 10116
  oligonucleotide probe

SEQ ID NO: 23440 - DNA, 32 bp, Artificial; identical to SEQ ID NO: 10147
  oligonucleotide probe

SEQ ID NO: 23441 - DNA, 32 bp, Artificial; identical to SEQ ID NO: 8804
  oligonucleotide probe

SEQ ID NO: 23442 - DNA, 32 bp, Artificial; identical to SEQ ID NO: 5565
  oligonucleotide probe

SEQ ID NO: 23443 - DNA, 32 bp, Artificial; identical to SEQ ID NO: 7596
  oligonucleotide probe

SEQ ID NO: 23444 - DNA, 32 bp, Artificial; identical to SEQ ID NO: 5140
  oligonucleotide probe

SEQ ID NO: 23445 - DNA, 32 bp, Artificial; identical to SEQ ID NO: 8778
  oligonucleotide probe

SEQ ID NO: 23446 - DNA, 32 bp, Artificial; identical to SEQ ID NO: 5564
  oligonucleotide probe

SEQ ID NO: 23447 - DNA, 32 bp, Artificial; identical to SEQ ID NO: 9038
  oligonucleotide probe

SEQ ID NO: 23448 - DNA, 32 bp, Artificial; identical to SEQ ID NO: 5594
  oligonucleotide probe

SEQ ID NO: 23449 - DNA, 32 bp, Artificial; identical to SEQ ID NO: 10186
  oligonucleotide probe

SEQ ID NO: 23450 - DNA, 32 bp, Artificial; identical to SEQ ID NO: 10409
  oligonucleotide probe

SEQ ID NO: 23451 - DNA, 32 bp, Artificial; identical to SEQ ID NO: 5134
  oligonucleotide probe

SEQ ID NO: 23452 - DNA, 32 bp, Artificial; identical to SEQ ID NO: 7905
  oligonucleotide probe

SEQ ID NO: 23453 - DNA, 32 bp, Artificial; identical to SEQ ID NO: 8776
  oligonucleotide probe

SEQ ID NO: 23454 - DNA, 32 bp, Artificial; identical to SEQ ID NO: 8777
  oligonucleotide probe

SEQ ID NO: 23455 - DNA, 32 bp, Artificial; identical to SEQ ID NO: 9020
  oligonucleotide probe

SEQ ID NO: 23456 - DNA, 32 bp, Artificial; identical to SEQ ID NO: 9021
  oligonucleotide probe

SEQ ID NO: 23457 - DNA, 32 bp, Artificial; identical to SEQ ID NO: 10140
  oligonucleotide probe

SEQ ID NO: 23458 - DNA, 32 bp, Artificial; identical to SEQ ID NO: 10501
  oligonucleotide probe

SEQ ID NO: 23459 - DNA, 32 bp, Artificial; identical to SEQ ID NO: 8753
  oligonucleotide probe

SEQ ID NO: 23460 - DNA, 32 bp, Artificial; identical to SEQ ID NO: 11090
  oligonucleotide probe

SEQ ID NO: 23461 - DNA, 32 bp, Artificial; identical to SEQ ID NO: 11050
  oligonucleotide probe

SEQ ID NO: 23462 - DNA, 32 bp, Artificial; identical to SEQ ID NO: 10644
  oligonucleotide probe

SEQ ID NO: 23463 - DNA, 16 bp, Artificial
  oligonucleotide probe
caccgacgggaaacgc

SEQ ID NO: 23464 - DNA, 16 bp, Artificial
  oligonucleotide probe
gtccggaagtgggcga

SEQ ID NO: 23465 - DNA, 16 bp, Artificial
  oligonucleotide probe
acgcaccagtcccgga

SEQ ID NO: 23466 - DNA, 16 bp, Artificial
  oligonucleotide probe
tcacgccttggccacc

SEQ ID NO: 23467 - DNA, 16 bp, Artificial
  oligonucleotide probe
gagcgcgacacccagg

SEQ ID NO: 23468 - DNA, 16 bp, Artificial
  oligonucleotide probe
cggacaggacgctggc

SEQ ID NO: 23469 - DNA, 16 bp, Artificial
  oligonucleotide probe
caccgacgggaaacgc

SEQ ID NO: 23470 - DNA, 16 bp, Artificial
  oligonucleotide probe
gtccggaagtgggcga

SEQ ID NO: 23471 - DNA, 16 bp, Artificial
  oligonucleotide probe
gagcgcgacacccagg

SEQ ID NO: 23472 - DNA, 16 bp, Artificial
  oligonucleotide probe
cggacaggacgctggc

SEQ ID NO: 23473 - DNA, 16 bp, Artificial
  oligonucleotide probe
gagcgcgacacccagg

SEQ ID NO: 23474 - DNA, 16 bp, Artificial
  oligonucleotide probe
cggacaggacgctggc

SEQ ID NO: 23475 - DNA, 16 bp, Artificial
  oligonucleotide probe
caggggaagggtcgga

SEQ ID NO: 23476 - DNA, 16 bp, Artificial
  oligonucleotide probe
gtccgagcagcggcct

SEQ ID NO: 23477 - DNA, 16 bp, Artificial
  oligonucleotide probe
gtccacgctggcgacg

SEQ ID NO: 23478 - DNA, 16 bp, Artificial
  oligonucleotide probe
gagcgcgacacccagg

SEQ ID NO: 23479 - DNA, 16 bp, Artificial
  oligonucleotide probe
cggacaggacgctggc

SEQ ID NO: 23480 - DNA, 16 bp, Artificial
  oligonucleotide probe
gcaggcagccaatggc

SEQ ID NO: 23481 - DNA, 16 bp, Artificial
  oligonucleotide probe
gtccacgctggcgacg

SEQ ID NO: 23482 - DNA, 16 bp, Artificial
  oligonucleotide probe
gagcgcgacacccagg

SEQ ID NO: 23483 - DNA, 16 bp, Artificial
  oligonucleotide probe
caccgacgggaaacgc

SEQ ID NO: 23484 - DNA, 16 bp, Artificial
  oligonucleotide probe
gtccggaagtgggcga

SEQ ID NO: 23485 - DNA, 16 bp, Artificial
  oligonucleotide probe
cggacaggacgctggc

SEQ ID NO: 23486 - DNA, 16 bp, Artificial
  oligonucleotide probe
gcaggcagccaatggc

SEQ ID NO: 23487 - DNA, 16 bp, Artificial
  oligonucleotide probe
cggacaggacgctggc

SEQ ID NO: 23488 - DNA, 16 bp, Artificial
  oligonucleotide probe
gcaggcagccaatggc

SEQ ID NO: 23489 - DNA, 16 bp, Artificial
  oligonucleotide probe
caccgacgggaaacgc

SEQ ID NO: 23490 - DNA, 16 bp, Artificial
  oligonucleotide probe
gtccggaagtgggcga

SEQ ID NO: 23491 - DNA, 16 bp, Artificial
  oligonucleotide probe
gtccgagcagcggcct

SEQ ID NO: 23492 - DNA, 16 bp, Artificial
  oligonucleotide probe
caccgacgggaaacgc

SEQ ID NO: 23493 - DNA, 16 bp, Artificial
  oligonucleotide probe
accatggcacgcgacg

SEQ ID NO: 23494 - DNA, 16 bp, Artificial
  oligonucleotide probe
acgccaggcgaggtgg

SEQ ID NO: 23495 - DNA, 16 bp, Artificial
  oligonucleotide probe
gagcgcgacacccagg

SEQ ID NO: 23496 - DNA, 16 bp, Artificial
  oligonucleotide probe
cggacaggacgctggc

SEQ ID NO: 23497 - DNA, 16 bp, Artificial
  oligonucleotide probe
caccgacgggaaacgc

SEQ ID NO: 23498 - DNA, 16 bp, Artificial
  oligonucleotide probe
gtccggaagtgggcga

SEQ ID NO: 23499 - DNA, 16 bp, Artificial
  oligonucleotide probe
gtccacgctggcgacg

SEQ ID NO: 23500 - DNA, 16 bp, Artificial
  oligonucleotide probe
gagcgcgacacccagg

SEQ ID NO: 23501 - DNA, 16 bp, Artificial
  oligonucleotide probe
gtccacgctggcgacg

SEQ ID NO: 23502 - DNA, 16 bp, Artificial
  oligonucleotide probe
gagcgcgacacccagg

SEQ ID NO: 23503 - DNA, 16 bp, Artificial
  oligonucleotide probe
gtccggaagtgggcga

SEQ ID NO: 23504 - DNA, 16 bp, Artificial
  oligonucleotide probe
gtccacgctggcgacg

SEQ ID NO: 23505 - DNA, 16 bp, Artificial
  oligonucleotide probe
cggacaggacgctggc

SEQ ID NO: 23506 - DNA, 16 bp, Artificial
  oligonucleotide probe
gcaggcagccaatggc

SEQ ID NO: 23507 - DNA, 16 bp, Artificial
  oligonucleotide probe
caggggaagggtcgga

SEQ ID NO: 23508 - DNA, 16 bp, Artificial
  oligonucleotide probe
gtccgagcagcggcct

SEQ ID NO: 23509 - DNA, 16 bp, Artificial
  oligonucleotide probe
gagcgcgacacccagg

SEQ ID NO: 23510 - DNA, 16 bp, Artificial
  oligonucleotide probe
cggacaggacgctggc

SEQ ID NO: 23511 - DNA, 16 bp, Artificial
  oligonucleotide probe
caccgcgaggtcacgc

SEQ ID NO: 23512 - DNA, 16 bp, Artificial
  oligonucleotide probe
accatggcacgcgacg

SEQ ID NO: 23513 - DNA, 16 bp, Artificial
  oligonucleotide probe
gcctcggagacggcag

SEQ ID NO: 23514 - DNA, 16 bp, Artificial
  oligonucleotide probe
gcagcggagcctgagc

SEQ ID NO: 23515 - DNA, 16 bp, Artificial
  oligonucleotide probe
gtccacgctggcgacg

SEQ ID NO: 23516 - DNA, 16 bp, Artificial
  oligonucleotide probe
gagcgcgacacccagg

SEQ ID NO: 23517 - DNA, 16 bp, Artificial
  oligonucleotide probe
acgccaggcgaggtgg

SEQ ID NO: 23518 - DNA, 16 bp, Artificial
  oligonucleotide probe
caggggaagggtcgga

SEQ ID NO: 23519 - DNA, 16 bp, Artificial
  oligonucleotide probe
cggacaggacgctggc

SEQ ID NO: 23520 - DNA, 16 bp, Artificial
  oligonucleotide probe
gcaggcagccaatggc

SEQ ID NO: 23521 - DNA, 16 bp, Artificial
  oligonucleotide probe
accatggcacgcgacg

SEQ ID NO: 23522 - DNA, 16 bp, Artificial
  oligonucleotide probe
acgccaggcgaggtgg

SEQ ID NO: 23523 - DNA, 16 bp, Artificial
  oligonucleotide probe
gcaggcagccaatggc

SEQ ID NO: 23524 - DNA, 16 bp, Artificial
  oligonucleotide probe
gcaggcagccaatggc

SEQ ID NO: 23525 - DNA, 16 bp, Artificial
  oligonucleotide probe
gcaggcagccaatggc

SEQ ID NO: 23526 - DNA, 16 bp, Artificial
  oligonucleotide probe
gcaggcagccaatggc

SEQ ID NO: 23527 - DNA, 16 bp, Artificial
  oligonucleotide probe
gcaggcagccaatggc

SEQ ID NO: 23528 - DNA, 16 bp, Artificial
  oligonucleotide probe
gcaggcagccaatggc

SEQ ID NO: 23529 - DNA, 16 bp, Artificial
  oligonucleotide probe
gcaggcagccaatggc

SEQ ID NO: 23530 - DNA, 16 bp, Artificial
  oligonucleotide probe
gcaggcagccaatggc

SEQ ID NO: 23531 - DNA, 16 bp, Artificial
  oligonucleotide probe
gcaggcagccaatggc

SEQ ID NO: 23532 - DNA, 16 bp, Artificial
  oligonucleotide probe
gcaggcagccaatggc

SEQ ID NO: 23533 - DNA, 16 bp, Artificial
  oligonucleotide probe
gcagcggagcctgagc

SEQ ID NO: 23534 - DNA, 16 bp, Artificial
  oligonucleotide probe
acgcaccagtcccgga

SEQ ID NO: 23535 - DNA, 16 bp, Artificial
  oligonucleotide probe
acgcaccagtcccgga

SEQ ID NO: 23536 - DNA, 16 bp, Artificial
  oligonucleotide probe
tcacgccttggccacc

SEQ ID NO: 23537 - DNA, 16 bp, Artificial
  oligonucleotide probe
caccgacgggaaacgc

SEQ ID NO: 23538 - DNA, 16 bp, Artificial
  oligonucleotide probe
gtggcggaggtcggaa

SEQ ID NO: 23539 - DNA, 16 bp, Artificial
  oligonucleotide probe
caccgacgggaaacgc

SEQ ID NO: 23540 - DNA, 16 bp, Artificial
  oligonucleotide probe
gtccggaagtgggcga

SEQ ID NO: 23541 - DNA, 16 bp, Artificial
  oligonucleotide probe
caccgacgggaaacgc

SEQ ID NO: 23542 - DNA, 16 bp, Artificial
  oligonucleotide probe
gtccggaagtgggcga

SEQ ID NO: 23543 - DNA, 16 bp, Artificial
  oligonucleotide probe
gacgcaggcggagggt

SEQ ID NO: 23544 - DNA, 16 bp, Artificial
  oligonucleotide probe
ggaagcctgcgacgga

SEQ ID NO: 23545 - DNA, 16 bp, Artificial
  oligonucleotide probe
gacggcgagtgggcag

SEQ ID NO: 23546 - DNA, 16 bp, Artificial
  oligonucleotide probe
acgcgcctgacgcctc

SEQ ID NO: 23547 - DNA, 16 bp, Artificial
  oligonucleotide probe
acgcaccagtcccgga

SEQ ID NO: 23548 - DNA, 16 bp, Artificial
  oligonucleotide probe
acgccaggcgaggtgg

SEQ ID NO: 23549 - DNA, 16 bp, Artificial
  oligonucleotide probe
gagcgcgacacccagg

SEQ ID NO: 23550 - DNA, 16 bp, Artificial
  oligonucleotide probe
cggacaggacgctggc

SEQ ID NO: 23551 - DNA, 16 bp, Artificial
  oligonucleotide probe
tggcgtgggggtccaa

SEQ ID NO: 23552 - DNA, 16 bp, Artificial
  oligonucleotide probe
gcctcggagacggcag

SEQ ID NO: 23553 - DNA, 16 bp, Artificial
  oligonucleotide probe
gtccggaagtgggcga

SEQ ID NO: 23554 - DNA, 16 bp, Artificial
  oligonucleotide probe
gtccacgctggcgacg

SEQ ID NO: 23555 - DNA, 16 bp, Artificial
  oligonucleotide probe
gacggcgagtgggcag

SEQ ID NO: 23556 - DNA, 16 bp, Artificial
  oligonucleotide probe
gcctagcgcctcgacg

SEQ ID NO: 23557 - DNA, 16 bp, Artificial
  oligonucleotide probe
ggtcgacgacgccgag

SEQ ID NO: 23558 - DNA, 16 bp, Artificial
  oligonucleotide probe
agcggtccgcgagagc

SEQ ID NO: 23559 - DNA, 16 bp, Artificial
  oligonucleotide probe
gacgcaggcggagggt

SEQ ID NO: 23560 - DNA, 16 bp, Artificial
  oligonucleotide probe
acgcggtccaccgtgg

SEQ ID NO: 23561 - DNA, 16 bp, Artificial
  oligonucleotide probe
gcctagcgcctcgacg

SEQ ID NO: 23562 - DNA, 16 bp, Artificial
  oligonucleotide probe
accatggcacgcgacg

SEQ ID NO: 23563 - DNA, 16 bp, Artificial
  oligonucleotide probe
caccgggtggtcagcg

SEQ ID NO: 23564 - DNA, 16 bp, Artificial
  oligonucleotide probe
ggtcgacgacgccgag

SEQ ID NO: 23565 - DNA, 16 bp, Artificial
  oligonucleotide probe
acgccaggcgaggtgg

SEQ ID NO: 23566 - DNA, 16 bp, Artificial
  oligonucleotide probe
caggggaagggtcgga

SEQ ID NO: 23567 - DNA, 16 bp, Artificial
  oligonucleotide probe
ggtcgacgacgccgag

SEQ ID NO: 23568 - DNA, 16 bp, Artificial
  oligonucleotide probe
agcggtccgcgagagc

SEQ ID NO: 23569 - DNA, 16 bp, Artificial
  oligonucleotide probe
gtccggaagtgggcga

SEQ ID NO: 23570 - DNA, 16 bp, Artificial
  oligonucleotide probe
gcaggcagccaatggc

SEQ ID NO: 23571 - DNA, 16 bp, Artificial
  oligonucleotide probe
gcctagcgcctcgacg

SEQ ID NO: 23572 - DNA, 16 bp, Artificial
  oligonucleotide probe
ggaagcctgcgacgga

SEQ ID NO: 23573 - DNA, 16 bp, Artificial
  oligonucleotide probe
acgcggaagacgtggc

SEQ ID NO: 23574 - DNA, 16 bp, Artificial
  oligonucleotide probe
caccgcgaggtcacgc

SEQ ID NO: 23575 - DNA, 16 bp, Artificial
  oligonucleotide probe
gcagcggagcctgagc

SEQ ID NO: 23576 - DNA, 16 bp, Artificial
  oligonucleotide probe
acgcaccagtcccgga

SEQ ID NO: 23577 - DNA, 16 bp, Artificial
  oligonucleotide probe
acgcggtccaccgtgg

SEQ ID NO: 23578 - DNA, 16 bp, Artificial
  oligonucleotide probe
tggcgtgggggtccaa

SEQ ID NO: 23579 - DNA, 16 bp, Artificial
  oligonucleotide probe
gacggcgagtgggcag

SEQ ID NO: 23580 - DNA, 16 bp, Artificial
  oligonucleotide probe
acgcgcctgacgcctc

SEQ ID NO: 23581 - DNA, 16 bp, Artificial
  oligonucleotide probe
acgcggtccaccgtgg

SEQ ID NO: 23582 - DNA, 16 bp, Artificial
  oligonucleotide probe
gcctcggagacggcag

SEQ ID NO: 23583 - DNA, 16 bp, Artificial
  oligonucleotide probe
gacggcgagtgggcag

SEQ ID NO: 23584 - DNA, 16 bp, Artificial
  oligonucleotide probe
acgcgcctgacgcctc

SEQ ID NO: 23585 - DNA, 16 bp, Artificial
  oligonucleotide probe
acgccaggcgaggtgg

SEQ ID NO: 23586 - DNA, 16 bp, Artificial
  oligonucleotide probe
caggggaagggtcgga

SEQ ID NO: 23587 - DNA, 16 bp, Artificial
  oligonucleotide probe
tcacgccttggccacc

SEQ ID NO: 23588 - DNA, 16 bp, Artificial
  oligonucleotide probe
accatggcacgcgacg

SEQ ID NO: 23589 - DNA, 16 bp, Artificial
  oligonucleotide probe
tggcgtgggggtccaa

SEQ ID NO: 23590 - DNA, 16 bp, Artificial
  oligonucleotide probe
gcagcggagcctgagc

SEQ ID NO: 23591 - DNA, 16 bp, Artificial
  oligonucleotide probe
caccgggtggtcagcg

SEQ ID NO: 23592 - DNA, 16 bp, Artificial
  oligonucleotide probe
tgctgggtgcaggcga

SEQ ID NO: 23593 - DNA, 16 bp, Artificial
  oligonucleotide probe
gtggcggaggtcggaa

SEQ ID NO: 23594 - DNA, 16 bp, Artificial
  oligonucleotide probe
acgcggaagacgtggc

SEQ ID NO: 23595 - DNA, 16 bp, Artificial
  oligonucleotide probe
gcaggcagccaatggc

SEQ ID NO: 23596 - DNA, 16 bp, Artificial
  oligonucleotide probe
gtggcggaggtcggaa

SEQ ID NO: 23597 - DNA, 16 bp, Artificial
  oligonucleotide probe
gagcgcgacacccagg

SEQ ID NO: 23598 - DNA, 16 bp, Artificial
  oligonucleotide probe
cggacaggacgctggc

SEQ ID NO: 23599 - DNA, 16 bp, Artificial
  oligonucleotide probe
gcctagcgcctcgacg

SEQ ID NO: 23600 - DNA, 16 bp, Artificial
  oligonucleotide probe
gacgcaggcggagggt

SEQ ID NO: 23601 - DNA, 16 bp, Artificial
  oligonucleotide probe
accatggcacgcgacg

SEQ ID NO: 23602 - DNA, 16 bp, Artificial
  oligonucleotide probe
acgccaggcgaggtgg

SEQ ID NO: 23603 - DNA, 16 bp, Artificial
  oligonucleotide probe
gacggcgagtgggcag

SEQ ID NO: 23604 - DNA, 16 bp, Artificial
  oligonucleotide probe
acgcgcctgacgcctc

SEQ ID NO: 23605 - DNA, 16 bp, Artificial
  oligonucleotide probe
tggcgtgggggtccaa

SEQ ID NO: 23606 - DNA, 16 bp, Artificial
  oligonucleotide probe
tgctgggtgcaggcga

SEQ ID NO: 23607 - DNA, 16 bp, Artificial
  oligonucleotide probe
gagcgcgacacccagg

SEQ ID NO: 23608 - DNA, 16 bp, Artificial
  oligonucleotide probe
cggacaggacgctggc

SEQ ID NO: 23609 - DNA, 16 bp, Artificial
  oligonucleotide probe
gcagcggagcctgagc

SEQ ID NO: 23610 - DNA, 16 bp, Artificial
  oligonucleotide probe
accatggcacgcgacg

SEQ ID NO: 23611 - DNA, 16 bp, Artificial
  oligonucleotide probe
acgcggaagacgtggc

SEQ ID NO: 23612 - DNA, 16 bp, Artificial
  oligonucleotide probe
caccgcgaggtcacgc

SEQ ID NO: 23613 - DNA, 16 bp, Artificial
  oligonucleotide probe
gtccgagcagcggcct

SEQ ID NO: 23614 - DNA, 16 bp, Artificial
  oligonucleotide probe
ggaagcctgcgacgga

SEQ ID NO: 23615 - DNA, 16 bp, Artificial
  oligonucleotide probe
gtccgagcagcggcct

SEQ ID NO: 23616 - DNA, 16 bp, Artificial
  oligonucleotide probe
gtccacgctggcgacg

SEQ ID NO: 23617 - DNA, 16 bp, Artificial
  oligonucleotide probe
tcacgccttggccacc

SEQ ID NO: 23618 - DNA, 16 bp, Artificial
  oligonucleotide probe
caggggaagggtcgga

SEQ ID NO: 23619 - DNA, 16 bp, Artificial
  oligonucleotide probe
tcacgccttggccacc

SEQ ID NO: 23620 - DNA, 16 bp, Artificial
  oligonucleotide probe
caggggaagggtcgga

SEQ ID NO: 23621 - DNA, 16 bp, Artificial
  oligonucleotide probe
gacgcaggcggagggt

SEQ ID NO: 23622 - DNA, 16 bp, Artificial
  oligonucleotide probe
acgcggtccaccgtgg

SEQ ID NO: 23623 - DNA, 16 bp, Artificial
  oligonucleotide probe
tcacgccttggccacc

SEQ ID NO: 23624 - DNA, 16 bp, Artificial
  oligonucleotide probe
caccgcgaggtcacgc

SEQ ID NO: 23625 - DNA, 16 bp, Artificial
  oligonucleotide probe
gtccacgctggcgacg

SEQ ID NO: 23626 - DNA, 16 bp, Artificial
  oligonucleotide probe
caccgggtggtcagcg

SEQ ID NO: 23627 - DNA, 16 bp, Artificial
  oligonucleotide probe
caccgacgggaaacgc

SEQ ID NO: 23628 - DNA, 16 bp, Artificial
  oligonucleotide probe
gtccggaagtgggcga

SEQ ID NO: 23629 - DNA, 16 bp, Artificial
  oligonucleotide probe
tgctgggtgcaggcga

SEQ ID NO: 23630 - DNA, 16 bp, Artificial
  oligonucleotide probe
acgcaccagtcccgga

SEQ ID NO: 23631 - DNA, 16 bp, Artificial
  oligonucleotide probe
gcaggcagccaatggc

SEQ ID NO: 23632 - DNA, 16 bp, Artificial
  oligonucleotide probe
gtggcggaggtcggaa

SEQ ID NO: 23633 - DNA, 16 bp, Artificial
  oligonucleotide probe
acgccaggcgaggtgg

SEQ ID NO: 23634 - DNA, 16 bp, Artificial
  oligonucleotide probe
caggggaagggtcgga

SEQ ID NO: 23635 - DNA, 16 bp, Artificial
  oligonucleotide probe
gtccgagcagcggcct

SEQ ID NO: 23636 - DNA, 16 bp, Artificial
  oligonucleotide probe
ggaagcctgcgacgga

SEQ ID NO: 23637 - DNA, 16 bp, Artificial
  oligonucleotide probe
gtggcggaggtcggaa

SEQ ID NO: 23638 - DNA, 16 bp, Artificial
  oligonucleotide probe
acgcggaagacgtggc

SEQ ID NO: 23639 - DNA, 16 bp, Artificial
  oligonucleotide probe
gacgcaggcggagggt

SEQ ID NO: 23640 - DNA, 16 bp, Artificial
  oligonucleotide probe
acgcggtccaccgtgg

SEQ ID NO: 23641 - DNA, 16 bp, Artificial
  oligonucleotide probe
caccgggtggtcagcg

SEQ ID NO: 23642 - DNA, 16 bp, Artificial
  oligonucleotide probe
tgctgggtgcaggcga

SEQ ID NO: 23643 - DNA, 16 bp, Artificial
  oligonucleotide probe
caccgcgaggtcacgc

SEQ ID NO: 23644 - DNA, 16 bp, Artificial
  oligonucleotide probe
accatggcacgcgacg

SEQ ID NO: 23645 - DNA, 16 bp, Artificial
  oligonucleotide probe
tgctgggtgcaggcga

SEQ ID NO: 23646 - DNA, 16 bp, Artificial
  oligonucleotide probe
gcctcggagacggcag

SEQ ID NO: 23647 - DNA, 16 bp, Artificial
  oligonucleotide probe
tggcgtgggggtccaa

SEQ ID NO: 23648 - DNA, 16 bp, Artificial
  oligonucleotide probe
caccgacgggaaacgc

SEQ ID NO: 23649 - DNA, 16 bp, Artificial
  oligonucleotide probe
acgcgcctgacgcctc

SEQ ID NO: 23650 - DNA, 16 bp, Artificial
  oligonucleotide probe
gcctcggagacggcag

SEQ ID NO: 23651 - DNA, 16 bp, Artificial
  oligonucleotide probe
caccgggtggtcagcg

SEQ ID NO: 23652 - DNA, 16 bp, Artificial
  oligonucleotide probe
gacgcaggcggagggt

SEQ ID NO: 23653 - DNA, 16 bp, Artificial
  oligonucleotide probe
agcggtccgcgagagc

SEQ ID NO: 23654 - DNA, 16 bp, Artificial
  oligonucleotide probe
gcctcggagacggcag

SEQ ID NO: 23655 - DNA, 16 bp, Artificial
  oligonucleotide probe
gacggcgagtgggcag

SEQ ID NO: 23656 - DNA, 16 bp, Artificial
  oligonucleotide probe
acgcgcctgacgcctc

SEQ ID NO: 23657 - DNA, 16 bp, Artificial
  oligonucleotide probe
acgcggtccaccgtgg

SEQ ID NO: 23658 - DNA, 16 bp, Artificial
  oligonucleotide probe
accatggcacgcgacg

SEQ ID NO: 23659 - DNA, 16 bp, Artificial
  oligonucleotide probe
gcagcggagcctgagc

SEQ ID NO: 23660 - DNA, 16 bp, Artificial
  oligonucleotide probe
acgcaccagtcccgga

SEQ ID NO: 23661 - DNA, 16 bp, Artificial
  oligonucleotide probe
acgccaggcgaggtgg

SEQ ID NO: 23662 - DNA, 16 bp, Artificial
  oligonucleotide probe
caggggaagggtcgga

SEQ ID NO: 23663 - DNA, 16 bp, Artificial
  oligonucleotide probe
ggtcgacgacgccgag

SEQ ID NO: 23664 - DNA, 16 bp, Artificial
  oligonucleotide probe
agcggtccgcgagagc

SEQ ID NO: 23665 - DNA, 16 bp, Artificial
  oligonucleotide probe
caccgcgaggtcacgc

SEQ ID NO: 23666 - DNA, 16 bp, Artificial
  oligonucleotide probe
gtccgagcagcggcct

SEQ ID NO: 23667 - DNA, 16 bp, Artificial
  oligonucleotide probe
gagcgcgacacccagg

SEQ ID NO: 23668 - DNA, 16 bp, Artificial
  oligonucleotide probe
cggacaggacgctggc

SEQ ID NO: 23669 - DNA, 16 bp, Artificial
  oligonucleotide probe
tcacgccttggccacc

SEQ ID NO: 23670 - DNA, 16 bp, Artificial
  oligonucleotide probe
gcaggcagccaatggc

SEQ ID NO: 23671 - DNA, 16 bp, Artificial
  oligonucleotide probe
ggtcgacgacgccgag

SEQ ID NO: 23672 - DNA, 16 bp, Artificial
  oligonucleotide probe
agcggtccgcgagagc

SEQ ID NO: 23673 - DNA, 16 bp, Artificial
  oligonucleotide probe
gcctcggagacggcag

SEQ ID NO: 23674 - DNA, 16 bp, Artificial
  oligonucleotide probe
gcagcggagcctgagc

SEQ ID NO: 23675 - DNA, 16 bp, Artificial
  oligonucleotide probe
gagcgcgacacccagg

SEQ ID NO: 23676 - DNA, 16 bp, Artificial
  oligonucleotide probe
cggacaggacgctggc

SEQ ID NO: 23677 - DNA, 16 bp, Artificial
  oligonucleotide probe
gtccggaagtgggcga

SEQ ID NO: 23678 - DNA, 16 bp, Artificial
  oligonucleotide probe
gtccacgctggcgacg

SEQ ID NO: 23679 - DNA, 16 bp, Artificial
  oligonucleotide probe
gcctagcgcctcgacg

SEQ ID NO: 23680 - DNA, 16 bp, Artificial
  oligonucleotide probe
ggaagcctgcgacgga

SEQ ID NO: 23681 - DNA, 16 bp, Artificial
  oligonucleotide probe
agcggtccgcgagagc

SEQ ID NO: 23682 - DNA, 16 bp, Artificial
  oligonucleotide probe
acgcggaagacgtggc

SEQ ID NO: 23683 - DNA, 16 bp, Artificial
  oligonucleotide probe
gtccgagcagcggcct

SEQ ID NO: 23684 - DNA, 16 bp, Artificial
  oligonucleotide probe
caccgacgggaaacgc

SEQ ID NO: 23685 - DNA, 16 bp, Artificial
  oligonucleotide probe
gcctagcgcctcgacg

SEQ ID NO: 23686 - DNA, 16 bp, Artificial
  oligonucleotide probe
ggaagcctgcgacgga

SEQ ID NO: 23687 - DNA, 16 bp, Artificial
  oligonucleotide probe
gtccacgctggcgacg

SEQ ID NO: 23688 - DNA, 16 bp, Artificial
  oligonucleotide probe
caccgggtggtcagcg

SEQ ID NO: 23689 - DNA, 16 bp, Artificial
  oligonucleotide probe
ggtcgacgacgccgag

SEQ ID NO: 23690 - DNA, 16 bp, Artificial
  oligonucleotide probe
gcaggcagccaatggc

SEQ ID NO: 23691 - DNA, 16 bp, Artificial
  oligonucleotide probe
tggcgtgggggtccaa

SEQ ID NO: 23692 - DNA, 16 bp, Artificial
  oligonucleotide probe
tgctgggtgcaggcga

SEQ ID NO: 23693 - DNA, 16 bp, Artificial
  oligonucleotide probe
gcaggcagccaatggc

SEQ ID NO: 23694 - DNA, 16 bp, Artificial
  oligonucleotide probe
acgcggaagacgtggc

SEQ ID NO: 23695 - DNA, 16 bp, Artificial
  oligonucleotide probe
caccgcgaggtcacgc

SEQ ID NO: 23696 - DNA, 16 bp, Artificial
  oligonucleotide probe
gagcgcgacacccagg

SEQ ID NO: 23697 - DNA, 16 bp, Artificial
  oligonucleotide probe
gtccgagcagcggcct

SEQ ID NO: 23698 - DNA, 16 bp, Artificial
  oligonucleotide probe
cggacaggacgctggc

SEQ ID NO: 23699 - DNA, 16 bp, Artificial
  oligonucleotide probe
gtggcggaggtcggaa

SEQ ID NO: 23700 - DNA, 16 bp, Artificial
  oligonucleotide probe
gtccacgctggcgacg

SEQ ID NO: 23701 - DNA, 16 bp, Artificial
  oligonucleotide probe
ggtccggagcagacgc

SEQ ID NO: 23702 - DNA, 16 bp, Artificial
  oligonucleotide probe
gcctgcgagagctggc

SEQ ID NO: 23703 - DNA, 16 bp, Artificial
  oligonucleotide probe
gcagcctctggccgag

SEQ ID NO: 23704 - DNA, 16 bp, Artificial
  oligonucleotide probe
gcagcaccagcgtggc

SEQ ID NO: 23705 - DNA, 16 bp, Artificial
  oligonucleotide probe
gacggggtcggacgag

SEQ ID NO: 23706 - DNA, 16 bp, Artificial
  oligonucleotide probe
gtggcaggagcgacgc

SEQ ID NO: 23707 - DNA, 16 bp, Artificial
  oligonucleotide probe
ggaaagcggcctggaa

SEQ ID NO: 23708 - DNA, 16 bp, Artificial
  oligonucleotide probe
gagcggtctggcggaa

SEQ ID NO: 23709 - DNA, 16 bp, Artificial
  oligonucleotide probe
gagcgcctcctcgagc

SEQ ID NO: 23710 - DNA, 16 bp, Artificial
  oligonucleotide probe
gcgagtggcagggcct

SEQ ID NO: 23711 - DNA, 16 bp, Artificial
  oligonucleotide probe
gcctgtgggtccgcga

SEQ ID NO: 23712 - DNA, 16 bp, Artificial
  oligonucleotide probe
cctcgcctcgaggagc

SEQ ID NO: 23713 - DNA, 16 bp, Artificial
  oligonucleotide probe
gagcgcctcctcgagc

SEQ ID NO: 23714 - DNA, 16 bp, Artificial
  oligonucleotide probe
gcgagtggcagggcct

SEQ ID NO: 23715 - DNA, 16 bp, Artificial
  oligonucleotide probe
gcagcctctggccgag

SEQ ID NO: 23716 - DNA, 16 bp, Artificial
  oligonucleotide probe
gcagcaccagcgtggc

SEQ ID NO: 23717 - DNA, 16 bp, Artificial
  oligonucleotide probe
gcagcctctggccgag

SEQ ID NO: 23718 - DNA, 16 bp, Artificial
  oligonucleotide probe
gcagcaccagcgtggc

SEQ ID NO: 23719 - DNA, 16 bp, Artificial
  oligonucleotide probe
gagcgcctcctcgagc

SEQ ID NO: 23720 - DNA, 16 bp, Artificial
  oligonucleotide probe
gcgagtggcagggcct

SEQ ID NO: 23721 - DNA, 16 bp, Artificial
  oligonucleotide probe
ggaaagcggcctggaa

SEQ ID NO: 23722 - DNA, 16 bp, Artificial
  oligonucleotide probe
gagcggtctggcggaa

SEQ ID NO: 23723 - DNA, 16 bp, Artificial
  oligonucleotide probe
caccgagccacccgga

SEQ ID NO: 23724 - DNA, 16 bp, Artificial
  oligonucleotide probe
tggcacgcgagccagg

SEQ ID NO: 23725 - DNA, 16 bp, Artificial
  oligonucleotide probe
acgcgagcgggtgcag

SEQ ID NO: 23726 - DNA, 16 bp, Artificial
  oligonucleotide probe
gcgatggccaggtggc

SEQ ID NO: 23727 - DNA, 16 bp, Artificial
  oligonucleotide probe
gagcgcctcctcgagc

SEQ ID NO: 23728 - DNA, 16 bp, Artificial
  oligonucleotide probe
gcgagtggcagggcct

SEQ ID NO: 23729 - DNA, 16 bp, Artificial
  oligonucleotide probe
acgcgagcgggtgcag

SEQ ID NO: 23730 - DNA, 16 bp, Artificial
  oligonucleotide probe
gcgatggccaggtggc

SEQ ID NO: 23731 - DNA, 16 bp, Artificial
  oligonucleotide probe
gagcgcctcctcgagc

SEQ ID NO: 23732 - DNA, 16 bp, Artificial
  oligonucleotide probe
gcgagtggcagggcct

SEQ ID NO: 23733 - DNA, 16 bp, Artificial
  oligonucleotide probe
tggcagcgggtcgtgg

SEQ ID NO: 23734 - DNA, 16 bp, Artificial
  oligonucleotide probe
gcctgggtcaccacgc

SEQ ID NO: 23735 - DNA, 16 bp, Artificial
  oligonucleotide probe
accacggaagcgcgga

SEQ ID NO: 23736 - DNA, 16 bp, Artificial
  oligonucleotide probe
gtgggacgacgcgcga

SEQ ID NO: 23737 - DNA, 16 bp, Artificial
  oligonucleotide probe
accacggaagcgcgga

SEQ ID NO: 23738 - DNA, 16 bp, Artificial
  oligonucleotide probe
gtgggacgacgcgcga

SEQ ID NO: 23739 - DNA, 16 bp, Artificial
  oligonucleotide probe
ggaaagcggcctggaa

SEQ ID NO: 23740 - DNA, 16 bp, Artificial
  oligonucleotide probe
gagcggtctggcggaa

SEQ ID NO: 23741 - DNA, 16 bp, Artificial
  oligonucleotide probe
gagcgcctcctcgagc

SEQ ID NO: 23742 - DNA, 16 bp, Artificial
  oligonucleotide probe
gcgagtggcagggcct

SEQ ID NO: 23743 - DNA, 16 bp, Artificial
  oligonucleotide probe
caccgagccacccgga

SEQ ID NO: 23744 - DNA, 16 bp, Artificial
  oligonucleotide probe
tggcacgcgagccagg

SEQ ID NO: 23745 - DNA, 16 bp, Artificial
  oligonucleotide probe
caccgagccacccgga

SEQ ID NO: 23746 - DNA, 16 bp, Artificial
  oligonucleotide probe
tggcacgcgagccagg

SEQ ID NO: 23747 - DNA, 16 bp, Artificial
  oligonucleotide probe
caccgagccacccgga

SEQ ID NO: 23748 - DNA, 16 bp, Artificial
  oligonucleotide probe
tggcacgcgagccagg

SEQ ID NO: 23749 - DNA, 16 bp, Artificial
  oligonucleotide probe
gcagcctctggccgag

SEQ ID NO: 23750 - DNA, 16 bp, Artificial
  oligonucleotide probe
gcagcaccagcgtggc

SEQ ID NO: 23751 - DNA, 16 bp, Artificial
  oligonucleotide probe
acgcgagcgggtgcag

SEQ ID NO: 23752 - DNA, 16 bp, Artificial
  oligonucleotide probe
gcgatggccaggtggc

SEQ ID NO: 23753 - DNA, 16 bp, Artificial
  oligonucleotide probe
tggcagcgggtcgtgg

SEQ ID NO: 23754 - DNA, 16 bp, Artificial
  oligonucleotide probe
gcctgggtcaccacgc

SEQ ID NO: 23755 - DNA, 16 bp, Artificial
  oligonucleotide probe
ggtccggagcagacgc

SEQ ID NO: 23756 - DNA, 16 bp, Artificial
  oligonucleotide probe
gcctgcgagagctggc

SEQ ID NO: 23757 - DNA, 16 bp, Artificial
  oligonucleotide probe
gacggggtcggacgag

SEQ ID NO: 23758 - DNA, 16 bp, Artificial
  oligonucleotide probe
gtggcaggagcgacgc

SEQ ID NO: 23759 - DNA, 16 bp, Artificial
  oligonucleotide probe
acgcgagcgggtgcag

SEQ ID NO: 23760 - DNA, 16 bp, Artificial
  oligonucleotide probe
gcgatggccaggtggc

SEQ ID NO: 23761 - DNA, 16 bp, Artificial
  oligonucleotide probe
ccaaagcgggaatggc

SEQ ID NO: 23762 - DNA, 16 bp, Artificial
  oligonucleotide probe
cctccgaggacgcgga

SEQ ID NO: 23763 - DNA, 16 bp, Artificial
  oligonucleotide probe
gacggggtcggacgag

SEQ ID NO: 23764 - DNA, 16 bp, Artificial
  oligonucleotide probe
gtggcaggagcgacgc

SEQ ID NO: 23765 - DNA, 16 bp, Artificial
  oligonucleotide probe
gcgagtggcagggcct

SEQ ID NO: 23766 - DNA, 16 bp, Artificial
  oligonucleotide probe
caccgagccacccgga

SEQ ID NO: 23767 - DNA, 16 bp, Artificial
  oligonucleotide probe
ggtccggagcagacgc

SEQ ID NO: 23768 - DNA, 16 bp, Artificial
  oligonucleotide probe
gcctgcgagagctggc

SEQ ID NO: 23769 - DNA, 16 bp, Artificial
  oligonucleotide probe
accacggaagcgcgga

SEQ ID NO: 23770 - DNA, 16 bp, Artificial
  oligonucleotide probe
gtgggacgacgcgcga

SEQ ID NO: 23771 - DNA, 16 bp, Artificial
  oligonucleotide probe
acgcgagcgggtgcag

SEQ ID NO: 23772 - DNA, 16 bp, Artificial
  oligonucleotide probe
gcgatggccaggtggc

SEQ ID NO: 23773 - DNA, 16 bp, Artificial
  oligonucleotide probe
caccgagccacccgga

SEQ ID NO: 23774 - DNA, 16 bp, Artificial
  oligonucleotide probe
tggcacgcgagccagg

SEQ ID NO: 23775 - DNA, 16 bp, Artificial
  oligonucleotide probe
cctcagcgcggaacca

SEQ ID NO: 23776 - DNA, 16 bp, Artificial
  oligonucleotide probe
gacggacgacgcgtgg

SEQ ID NO: 23777 - DNA, 16 bp, Artificial
  oligonucleotide probe
tggcagcgggtcgtgg

SEQ ID NO: 23778 - DNA, 16 bp, Artificial
  oligonucleotide probe
gcctgggtcaccacgc

SEQ ID NO: 23779 - DNA, 16 bp, Artificial
  oligonucleotide probe
caccgagccacccgga

SEQ ID NO: 23780 - DNA, 16 bp, Artificial
  oligonucleotide probe
tggcacgcgagccagg

SEQ ID NO: 23781 - DNA, 16 bp, Artificial
  oligonucleotide probe
gagcgcctcctcgagc

SEQ ID NO: 23782 - DNA, 16 bp, Artificial
  oligonucleotide probe
gcgagtggcagggcct

SEQ ID NO: 23783 - DNA, 16 bp, Artificial
  oligonucleotide probe
ccaaagcgggaatggc

SEQ ID NO: 23784 - DNA, 16 bp, Artificial
  oligonucleotide probe
cctccgaggacgcgga

SEQ ID NO: 23785 - DNA, 16 bp, Artificial
  oligonucleotide probe
ggtccggagcagacgc

SEQ ID NO: 23786 - DNA, 16 bp, Artificial
  oligonucleotide probe
gcctgcgagagctggc

SEQ ID NO: 23787 - DNA, 16 bp, Artificial
  oligonucleotide probe
gagcgcctcctcgagc

SEQ ID NO: 23788 - DNA, 16 bp, Artificial
  oligonucleotide probe
gcgagtggcagggcct

SEQ ID NO: 23789 - DNA, 16 bp, Artificial
  oligonucleotide probe
ggaaagcggcctggaa

SEQ ID NO: 23790 - DNA, 16 bp, Artificial
  oligonucleotide probe
gagcggtctggcggaa

SEQ ID NO: 23791 - DNA, 16 bp, Artificial
  oligonucleotide probe
tggcagcgggtcgtgg

SEQ ID NO: 23792 - DNA, 16 bp, Artificial
  oligonucleotide probe
gcctgggtcaccacgc

SEQ ID NO: 23793 - DNA, 16 bp, Artificial
  oligonucleotide probe
caccgagccacccgga

SEQ ID NO: 23794 - DNA, 16 bp, Artificial
  oligonucleotide probe
tggcacgcgagccagg

SEQ ID NO: 23795 - DNA, 16 bp, Artificial
  oligonucleotide probe
gcagcctctggccgag

SEQ ID NO: 23796 - DNA, 16 bp, Artificial
  oligonucleotide probe
gcagcaccagcgtggc

SEQ ID NO: 23797 - DNA, 16 bp, Artificial
  oligonucleotide probe
gacggggtcggacgag

SEQ ID NO: 23798 - DNA, 16 bp, Artificial
  oligonucleotide probe
gtggcaggagcgacgc

SEQ ID NO: 23799 - DNA, 16 bp, Artificial
  oligonucleotide probe
ggtccggagcagacgc

SEQ ID NO: 23800 - DNA, 16 bp, Artificial
  oligonucleotide probe
gcctgcgagagctggc

SEQ ID NO: 23801 - DNA, 16 bp, Artificial
  oligonucleotide probe
accacggaagcgcgga

SEQ ID NO: 23802 - DNA, 16 bp, Artificial
  oligonucleotide probe
gtgggacgacgcgcga

SEQ ID NO: 23803 - DNA, 16 bp, Artificial
  oligonucleotide probe
gagcgcctcctcgagc

SEQ ID NO: 23804 - DNA, 16 bp, Artificial
  oligonucleotide probe
gcgagtggcagggcct

SEQ ID NO: 23805 - DNA, 16 bp, Artificial
  oligonucleotide probe
ggtccggagcagacgc

SEQ ID NO: 23806 - DNA, 16 bp, Artificial
  oligonucleotide probe
gcctgcgagagctggc

SEQ ID NO: 23807 - DNA, 16 bp, Artificial
  oligonucleotide probe
gagcgcctcctcgagc

SEQ ID NO: 23808 - DNA, 16 bp, Artificial
  oligonucleotide probe
gcgagtggcagggcct

SEQ ID NO: 23809 - DNA, 16 bp, Artificial
  oligonucleotide probe
ggaaagcggcctggaa

SEQ ID NO: 23810 - DNA, 16 bp, Artificial
  oligonucleotide probe
gagcggtctggcggaa

SEQ ID NO: 23811 - DNA, 16 bp, Artificial
  oligonucleotide probe
gcagcctctggccgag

SEQ ID NO: 23812 - DNA, 16 bp, Artificial
  oligonucleotide probe
gcagcaccagcgtggc

SEQ ID NO: 23813 - DNA, 16 bp, Artificial
  oligonucleotide probe
ggaaagcggcctggaa

SEQ ID NO: 23814 - DNA, 16 bp, Artificial
  oligonucleotide probe
gagcggtctggcggaa

SEQ ID NO: 23815 - DNA, 16 bp, Artificial
  oligonucleotide probe
gagcgcctcctcgagc

SEQ ID NO: 23816 - DNA, 16 bp, Artificial
  oligonucleotide probe
gcgagtggcagggcct

SEQ ID NO: 23817 - DNA, 16 bp, Artificial
  oligonucleotide probe
caggagcgggaagcga

SEQ ID NO: 23818 - DNA, 16 bp, Artificial
  oligonucleotide probe
tggccaggcggagtgg

SEQ ID NO: 23819 - DNA, 16 bp, Artificial
  oligonucleotide probe
ggaaagcggcctggaa

SEQ ID NO: 23820 - DNA, 16 bp, Artificial
  oligonucleotide probe
gagcggtctggcggaa

SEQ ID NO: 23821 - DNA, 16 bp, Artificial
  oligonucleotide probe
ccaaagcgggaatggc

SEQ ID NO: 23822 - DNA, 16 bp, Artificial
  oligonucleotide probe
cctccgaggacgcgga

SEQ ID NO: 23823 - DNA, 16 bp, Artificial
  oligonucleotide probe
gagcgcctcctcgagc

SEQ ID NO: 23824 - DNA, 16 bp, Artificial
  oligonucleotide probe
gcgagtggcagggcct

SEQ ID NO: 23825 - DNA, 16 bp, Artificial
  oligonucleotide probe
ccaaagcgggaatggc

SEQ ID NO: 23826 - DNA, 16 bp, Artificial
  oligonucleotide probe
cctccgaggacgcgga

SEQ ID NO: 23827 - DNA, 16 bp, Artificial
  oligonucleotide probe
tggcagcgggtcgtgg

SEQ ID NO: 23828 - DNA, 16 bp, Artificial
  oligonucleotide probe
gcctgggtcaccacgc

SEQ ID NO: 23829 - DNA, 16 bp, Artificial
  oligonucleotide probe
ccaaagcgggaatggc

SEQ ID NO: 23830 - DNA, 16 bp, Artificial
  oligonucleotide probe
cctccgaggacgcgga

SEQ ID NO: 23831 - DNA, 16 bp, Artificial
  oligonucleotide probe
gcagcctctggccgag

SEQ ID NO: 23832 - DNA, 16 bp, Artificial
  oligonucleotide probe
gcagcaccagcgtggc

SEQ ID NO: 23833 - DNA, 16 bp, Artificial
  oligonucleotide probe
accacggaagcgcgga

SEQ ID NO: 23834 - DNA, 16 bp, Artificial
  oligonucleotide probe
gtgggacgacgcgcga

SEQ ID NO: 23835 - DNA, 16 bp, Artificial
  oligonucleotide probe
accacggaagcgcgga

SEQ ID NO: 23836 - DNA, 16 bp, Artificial
  oligonucleotide probe
gtgggacgacgcgcga

SEQ ID NO: 23837 - DNA, 16 bp, Artificial
  oligonucleotide probe
ggaaagcggcctggaa

SEQ ID NO: 23838 - DNA, 16 bp, Artificial
  oligonucleotide probe
gagcggtctggcggaa

SEQ ID NO: 23839 - DNA, 16 bp, Artificial
  oligonucleotide probe
gagcgcctcctcgagc

SEQ ID NO: 23840 - DNA, 16 bp, Artificial
  oligonucleotide probe
gcgagtggcagggcct

SEQ ID NO: 23841 - DNA, 16 bp, Artificial
  oligonucleotide probe
gcgagtggcagggcct

SEQ ID NO: 23842 - DNA, 16 bp, Artificial
  oligonucleotide probe
caccgagccacccgga

SEQ ID NO: 23843 - DNA, 16 bp, Artificial
  oligonucleotide probe
tggcagcgggtcgtgg

SEQ ID NO: 23844 - DNA, 16 bp, Artificial
  oligonucleotide probe
gcctgggtcaccacgc

SEQ ID NO: 23845 - DNA, 16 bp, Artificial
  oligonucleotide probe
ggaaagcggcctggaa

SEQ ID NO: 23846 - DNA, 16 bp, Artificial
  oligonucleotide probe
gagcggtctggcggaa

SEQ ID NO: 23847 - DNA, 16 bp, Artificial
  oligonucleotide probe
acgcgagcgggtgcag

SEQ ID NO: 23848 - DNA, 16 bp, Artificial
  oligonucleotide probe
gcgatggccaggtggc

SEQ ID NO: 23849 - DNA, 16 bp, Artificial
  oligonucleotide probe
gagcgcctcctcgagc

SEQ ID NO: 23850 - DNA, 16 bp, Artificial
  oligonucleotide probe
gcgagtggcagggcct

SEQ ID NO: 23851 - DNA, 16 bp, Artificial
  oligonucleotide probe
caccgagccacccgga

SEQ ID NO: 23852 - DNA, 16 bp, Artificial
  oligonucleotide probe
tggcacgcgagccagg

SEQ ID NO: 23853 - DNA, 16 bp, Artificial
  oligonucleotide probe
ggaaagcggcctggaa

SEQ ID NO: 23854 - DNA, 16 bp, Artificial
  oligonucleotide probe
gagcggtctggcggaa

SEQ ID NO: 23855 - DNA, 16 bp, Artificial
  oligonucleotide probe
gagcgcctcctcgagc

SEQ ID NO: 23856 - DNA, 16 bp, Artificial
  oligonucleotide probe
gcgagtggcagggcct

SEQ ID NO: 23857 - DNA, 16 bp, Artificial
  oligonucleotide probe
gagcgcctcctcgagc

SEQ ID NO: 23858 - DNA, 16 bp, Artificial
  oligonucleotide probe
gcgagtggcagggcct

SEQ ID NO: 23859 - DNA, 16 bp, Artificial
  oligonucleotide probe
ccaaagcgggaatggc

SEQ ID NO: 23860 - DNA, 16 bp, Artificial
  oligonucleotide probe
cctccgaggacgcgga

SEQ ID NO: 23861 - DNA, 16 bp, Artificial
  oligonucleotide probe
gcagcctctggccgag

SEQ ID NO: 23862 - DNA, 16 bp, Artificial
  oligonucleotide probe
gcagcaccagcgtggc

SEQ ID NO: 23863 - DNA, 16 bp, Artificial
  oligonucleotide probe
accacggaagcgcgga

SEQ ID NO: 23864 - DNA, 16 bp, Artificial
  oligonucleotide probe
gtgggacgacgcgcga

SEQ ID NO: 23865 - DNA, 16 bp, Artificial
  oligonucleotide probe
gcgagtggcagggcct

SEQ ID NO: 23866 - DNA, 16 bp, Artificial
  oligonucleotide probe
caccgagccacccgga

SEQ ID NO: 23867 - DNA, 16 bp, Artificial
  oligonucleotide probe
ggaaagcggcctggaa

SEQ ID NO: 23868 - DNA, 16 bp, Artificial
  oligonucleotide probe
gagcggtctggcggaa

SEQ ID NO: 23869 - DNA, 16 bp, Artificial
  oligonucleotide probe
caccgagccacccgga

SEQ ID NO: 23870 - DNA, 16 bp, Artificial
  oligonucleotide probe
tggcacgcgagccagg

SEQ ID NO: 23871 - DNA, 16 bp, Artificial
  oligonucleotide probe
gggtggaacgaggcga

SEQ ID NO: 23872 - DNA, 16 bp, Artificial
  oligonucleotide probe
gcaggtggtggcgagc

SEQ ID NO: 23873 - DNA, 16 bp, Artificial
  oligonucleotide probe
gacggggtcggacgag

SEQ ID NO: 23874 - DNA, 16 bp, Artificial
  oligonucleotide probe
gtggcaggagcgacgc

SEQ ID NO: 23875 - DNA, 16 bp, Artificial
  oligonucleotide probe
caccgagccacccgga

SEQ ID NO: 23876 - DNA, 16 bp, Artificial
  oligonucleotide probe
tggcacgcgagccagg

SEQ ID NO: 23877 - DNA, 16 bp, Artificial
  oligonucleotide probe
cctcagcgcggaacca

SEQ ID NO: 23878 - DNA, 16 bp, Artificial
  oligonucleotide probe
gacggacgacgcgtgg

SEQ ID NO: 23879 - DNA, 16 bp, Artificial
  oligonucleotide probe
gcgagtggcagggcct

SEQ ID NO: 23880 - DNA, 16 bp, Artificial
  oligonucleotide probe
caccgagccacccgga

SEQ ID NO: 23881 - DNA, 16 bp, Artificial
  oligonucleotide probe
caccgagccacccgga

SEQ ID NO: 23882 - DNA, 16 bp, Artificial
  oligonucleotide probe
tggcacgcgagccagg

SEQ ID NO: 23883 - DNA, 16 bp, Artificial
  oligonucleotide probe
caccgagccacccgga

SEQ ID NO: 23884 - DNA, 16 bp, Artificial
  oligonucleotide probe
tggcacgcgagccagg

SEQ ID NO: 23885 - DNA, 16 bp, Artificial
  oligonucleotide probe
tggcagcgggtcgtgg

SEQ ID NO: 23886 - DNA, 16 bp, Artificial
  oligonucleotide probe
gcctgggtcaccacgc

SEQ ID NO: 23887 - DNA, 16 bp, Artificial
  oligonucleotide probe
caccgagccacccgga

SEQ ID NO: 23888 - DNA, 16 bp, Artificial
  oligonucleotide probe
tggcacgcgagccagg

SEQ ID NO: 23889 - DNA, 16 bp, Artificial
  oligonucleotide probe
gcagcctctggccgag

SEQ ID NO: 23890 - DNA, 16 bp, Artificial
  oligonucleotide probe
gcagcaccagcgtggc

SEQ ID NO: 23891 - DNA, 16 bp, Artificial
  oligonucleotide probe
gagcgcctcctcgagc

SEQ ID NO: 23892 - DNA, 16 bp, Artificial
  oligonucleotide probe
gcgagtggcagggcct

SEQ ID NO: 23893 - DNA, 16 bp, Artificial
  oligonucleotide probe
gcagcctctggccgag

SEQ ID NO: 23894 - DNA, 16 bp, Artificial
  oligonucleotide probe
gcagcaccagcgtggc

SEQ ID NO: 23895 - DNA, 16 bp, Artificial
  oligonucleotide probe
ccaaagcgggaatggc

SEQ ID NO: 23896 - DNA, 16 bp, Artificial
  oligonucleotide probe
cctccgaggacgcgga

SEQ ID NO: 23897 - DNA, 16 bp, Artificial
  oligonucleotide probe
ggaaagcggcctggaa

SEQ ID NO: 23898 - DNA, 16 bp, Artificial
  oligonucleotide probe
gagcggtctggcggaa

SEQ ID NO: 23899 - DNA, 16 bp, Artificial
  oligonucleotide probe
ggaaagcggcctggaa

SEQ ID NO: 23900 - DNA, 16 bp, Artificial
  oligonucleotide probe
gagcggtctggcggaa

SEQ ID NO: 23901 - DNA, 16 bp, Artificial
  oligonucleotide probe
gagcgcctcctcgagc

SEQ ID NO: 23902 - DNA, 16 bp, Artificial
  oligonucleotide probe
gcgagtggcagggcct

SEQ ID NO: 23903 - DNA, 16 bp, Artificial
  oligonucleotide probe
caccgagccacccgga

SEQ ID NO: 23904 - DNA, 16 bp, Artificial
  oligonucleotide probe
tggcacgcgagccagg

SEQ ID NO: 23905 - DNA, 16 bp, Artificial
  oligonucleotide probe
ggaaagcggcctggaa

SEQ ID NO: 23906 - DNA, 16 bp, Artificial
  oligonucleotide probe
gagcggtctggcggaa

SEQ ID NO: 23907 - DNA, 16 bp, Artificial
  oligonucleotide probe
gcagcctctggccgag

SEQ ID NO: 23908 - DNA, 16 bp, Artificial
  oligonucleotide probe
gcagcaccagcgtggc

SEQ ID NO: 23909 - DNA, 16 bp, Artificial
  oligonucleotide probe
ggtccggagcagacgc

SEQ ID NO: 23910 - DNA, 16 bp, Artificial
  oligonucleotide probe
gcctgcgagagctggc

SEQ ID NO: 23911 - DNA, 16 bp, Artificial
  oligonucleotide probe
ggaaagcggcctggaa

SEQ ID NO: 23912 - DNA, 16 bp, Artificial
  oligonucleotide probe
gagcggtctggcggaa

SEQ ID NO: 23913 - DNA, 16 bp, Artificial
  oligonucleotide probe
ggaaagcggcctggaa

SEQ ID NO: 23914 - DNA, 16 bp, Artificial
  oligonucleotide probe
gagcggtctggcggaa

SEQ ID NO: 23915 - DNA, 16 bp, Artificial
  oligonucleotide probe
ggaaagcggcctggaa

SEQ ID NO: 23916 - DNA, 16 bp, Artificial
  oligonucleotide probe
gagcggtctggcggaa

SEQ ID NO: 23917 - DNA, 16 bp, Artificial
  oligonucleotide probe
gggttggccgagtggc

SEQ ID NO: 23918 - DNA, 16 bp, Artificial
  oligonucleotide probe
tggcgggtgacggtgg

SEQ ID NO: 23919 - DNA, 16 bp, Artificial
  oligonucleotide probe
gcagcctctggccgag

SEQ ID NO: 23920 - DNA, 16 bp, Artificial
  oligonucleotide probe
gcagcaccagcgtggc

SEQ ID NO: 23921 - DNA, 16 bp, Artificial
  oligonucleotide probe
gcagcctctggccgag

SEQ ID NO: 23922 - DNA, 16 bp, Artificial
  oligonucleotide probe
gcagcaccagcgtggc

SEQ ID NO: 23923 - DNA, 16 bp, Artificial
  oligonucleotide probe
caccgagccacccgga

SEQ ID NO: 23924 - DNA, 16 bp, Artificial
  oligonucleotide probe
tggcacgcgagccagg

SEQ ID NO: 23925 - DNA, 16 bp, Artificial
  oligonucleotide probe
ccaaagcgggaatggc

SEQ ID NO: 23926 - DNA, 16 bp, Artificial
  oligonucleotide probe
cctccgaggacgcgga

SEQ ID NO: 23927 - DNA, 16 bp, Artificial
  oligonucleotide probe
gagcgcctcctcgagc

SEQ ID NO: 23928 - DNA, 16 bp, Artificial
  oligonucleotide probe
gcgagtggcagggcct

SEQ ID NO: 23929 - DNA, 16 bp, Artificial
  oligonucleotide probe
cctcagcgcggaacca

SEQ ID NO: 23930 - DNA, 16 bp, Artificial
  oligonucleotide probe
gacggacgacgcgtgg

SEQ ID NO: 23931 - DNA, 16 bp, Artificial
  oligonucleotide probe
caccgagccacccgga

SEQ ID NO: 23932 - DNA, 16 bp, Artificial
  oligonucleotide probe
tggcacgcgagccagg

SEQ ID NO: 23933 - DNA, 16 bp, Artificial
  oligonucleotide probe
ggaaagcggcctggaa

SEQ ID NO: 23934 - DNA, 16 bp, Artificial
  oligonucleotide probe
gagcggtctggcggaa

SEQ ID NO: 23935 - DNA, 16 bp, Artificial
  oligonucleotide probe
ggtccggagcagacgc

SEQ ID NO: 23936 - DNA, 16 bp, Artificial
  oligonucleotide probe
gcctgcgagagctggc

SEQ ID NO: 23937 - DNA, 16 bp, Artificial
  oligonucleotide probe
ggaaagcggcctggaa

SEQ ID NO: 23938 - DNA, 16 bp, Artificial
  oligonucleotide probe
gagcggtctggcggaa

SEQ ID NO: 23939 - DNA, 16 bp, Artificial
  oligonucleotide probe
accacggaagcgcgga

SEQ ID NO: 23940 - DNA, 16 bp, Artificial
  oligonucleotide probe
gtgggacgacgcgcga

SEQ ID NO: 23941 - DNA, 16 bp, Artificial
  oligonucleotide probe
ggaaagcggcctggaa

SEQ ID NO: 23942 - DNA, 16 bp, Artificial
  oligonucleotide probe
gagcggtctggcggaa

SEQ ID NO: 23943 - DNA, 16 bp, Artificial
  oligonucleotide probe
ccaaagcgggaatggc

SEQ ID NO: 23944 - DNA, 16 bp, Artificial
  oligonucleotide probe
cctccgaggacgcgga

SEQ ID NO: 23945 - DNA, 16 bp, Artificial
  oligonucleotide probe
ggtccggagcagacgc

SEQ ID NO: 23946 - DNA, 16 bp, Artificial
  oligonucleotide probe
gcctgcgagagctggc

SEQ ID NO: 23947 - DNA, 16 bp, Artificial
  oligonucleotide probe
tggcagcgggtcgtgg

SEQ ID NO: 23948 - DNA, 16 bp, Artificial
  oligonucleotide probe
gcctgggtcaccacgc

SEQ ID NO: 23949 - DNA, 16 bp, Artificial
  oligonucleotide probe
ccaaagcgggaatggc

SEQ ID NO: 23950 - DNA, 16 bp, Artificial
  oligonucleotide probe
cctccgaggacgcgga

SEQ ID NO: 23951 - DNA, 16 bp, Artificial
  oligonucleotide probe
caccgagccacccgga

SEQ ID NO: 23952 - DNA, 16 bp, Artificial
  oligonucleotide probe
tggcacgcgagccagg

SEQ ID NO: 23953 - DNA, 16 bp, Artificial
  oligonucleotide probe
cctcagcgcggaacca

SEQ ID NO: 23954 - DNA, 16 bp, Artificial
  oligonucleotide probe
gacggacgacgcgtgg

SEQ ID NO: 23955 - DNA, 16 bp, Artificial
  oligonucleotide probe
ggtccggagcagacgc

SEQ ID NO: 23956 - DNA, 16 bp, Artificial
  oligonucleotide probe
gcctgcgagagctggc

SEQ ID NO: 23957 - DNA, 16 bp, Artificial
  oligonucleotide probe
gcgagtggcagggcct

SEQ ID NO: 23958 - DNA, 16 bp, Artificial
  oligonucleotide probe
caccgagccacccgga

SEQ ID NO: 23959 - DNA, 16 bp, Artificial
  oligonucleotide probe
ggaaagcggcctggaa

SEQ ID NO: 23960 - DNA, 16 bp, Artificial
  oligonucleotide probe
gagcggtctggcggaa

SEQ ID NO: 23961 - DNA, 16 bp, Artificial
  oligonucleotide probe
acgcgagcgggtgcag

SEQ ID NO: 23962 - DNA, 16 bp, Artificial
  oligonucleotide probe
gcgatggccaggtggc

SEQ ID NO: 23963 - DNA, 16 bp, Artificial
  oligonucleotide probe
caccgagccacccgga

SEQ ID NO: 23964 - DNA, 16 bp, Artificial
  oligonucleotide probe
tggcacgcgagccagg

SEQ ID NO: 23965 - DNA, 16 bp, Artificial
  oligonucleotide probe
gagcgcctcctcgagc

SEQ ID NO: 23966 - DNA, 16 bp, Artificial
  oligonucleotide probe
gcgagtggcagggcct

SEQ ID NO: 23967 - DNA, 16 bp, Artificial
  oligonucleotide probe
caccgagccacccgga

SEQ ID NO: 23968 - DNA, 16 bp, Artificial
  oligonucleotide probe
tggcacgcgagccagg

SEQ ID NO: 23969 - DNA, 16 bp, Artificial
  oligonucleotide probe
tggcagcgggtcgtgg

SEQ ID NO: 23970 - DNA, 16 bp, Artificial
  oligonucleotide probe
gcctgggtcaccacgc

SEQ ID NO: 23971 - DNA, 16 bp, Artificial
  oligonucleotide probe
accacggaagcgcgga

SEQ ID NO: 23972 - DNA, 16 bp, Artificial
  oligonucleotide probe
gtgggacgacgcgcga

SEQ ID NO: 23973 - DNA, 16 bp, Artificial
  oligonucleotide probe
cctcagcgcggaacca

SEQ ID NO: 23974 - DNA, 16 bp, Artificial
  oligonucleotide probe
gacggacgacgcgtgg

SEQ ID NO: 23975 - DNA, 16 bp, Artificial
  oligonucleotide probe
ccaaagcgggaatggc

SEQ ID NO: 23976 - DNA, 16 bp, Artificial
  oligonucleotide probe
cctccgaggacgcgga

SEQ ID NO: 23977 - DNA, 16 bp, Artificial
  oligonucleotide probe
gagcgcctcctcgagc

SEQ ID NO: 23978 - DNA, 16 bp, Artificial
  oligonucleotide probe
gcgagtggcagggcct

SEQ ID NO: 23979 - DNA, 16 bp, Artificial
  oligonucleotide probe
ggtccggagcagacgc

SEQ ID NO: 23980 - DNA, 16 bp, Artificial
  oligonucleotide probe
gcctgcgagagctggc

SEQ ID NO: 23981 - DNA, 16 bp, Artificial
  oligonucleotide probe
ggtccggagcagacgc

SEQ ID NO: 23982 - DNA, 16 bp, Artificial
  oligonucleotide probe
gcctgcgagagctggc

SEQ ID NO: 23983 - DNA, 16 bp, Artificial
  oligonucleotide probe
gagcgcctcctcgagc

SEQ ID NO: 23984 - DNA, 16 bp, Artificial
  oligonucleotide probe
gcgagtggcagggcct

SEQ ID NO: 23985 - DNA, 16 bp, Artificial
  oligonucleotide probe
gcctgtgggtccgcga

SEQ ID NO: 23986 - DNA, 16 bp, Artificial
  oligonucleotide probe
cctcgcctcgaggagc

SEQ ID NO: 23987 - DNA, 16 bp, Artificial
  oligonucleotide probe
ggtccggagcagacgc

SEQ ID NO: 23988 - DNA, 16 bp, Artificial
  oligonucleotide probe
gcctgcgagagctggc

SEQ ID NO: 23989 - DNA, 16 bp, Artificial
  oligonucleotide probe
ggaaagcggcctggaa

SEQ ID NO: 23990 - DNA, 16 bp, Artificial
  oligonucleotide probe
gagcggtctggcggaa

SEQ ID NO: 23991 - DNA, 16 bp, Artificial
  oligonucleotide probe
ggaaagcggcctggaa

SEQ ID NO: 23992 - DNA, 16 bp, Artificial
  oligonucleotide probe
gagcggtctggcggaa

SEQ ID NO: 23993 - DNA, 16 bp, Artificial
  oligonucleotide probe
caccgagccacccgga

SEQ ID NO: 23994 - DNA, 16 bp, Artificial
  oligonucleotide probe
tggcacgcgagccagg

SEQ ID NO: 23995 - DNA, 16 bp, Artificial
  oligonucleotide probe
gcagcctctggccgag

SEQ ID NO: 23996 - DNA, 16 bp, Artificial
  oligonucleotide probe
gcagcaccagcgtggc

SEQ ID NO: 23997 - DNA, 16 bp, Artificial
  oligonucleotide probe
gcagcctctggccgag

SEQ ID NO: 23998 - DNA, 16 bp, Artificial
  oligonucleotide probe
gcagcaccagcgtggc

SEQ ID NO: 23999 - DNA, 16 bp, Artificial
  oligonucleotide probe
ggtccggagcagacgc

SEQ ID NO: 24000 - DNA, 16 bp, Artificial
  oligonucleotide probe
gcctgcgagagctggc

SEQ ID NO: 24001 - DNA, 16 bp, Artificial
  oligonucleotide probe
acgcgagcgggtgcag

SEQ ID NO: 24002 - DNA, 16 bp, Artificial
  oligonucleotide probe
gcgatggccaggtggc

SEQ ID NO: 24003 - DNA, 16 bp, Artificial
  oligonucleotide probe
gagcgcctcctcgagc

SEQ ID NO: 24004 - DNA, 16 bp, Artificial
  oligonucleotide probe
gcgagtggcagggcct

SEQ ID NO: 24005 - DNA, 16 bp, Artificial
  oligonucleotide probe
tggcagcgggtcgtgg

SEQ ID NO: 24006 - DNA, 16 bp, Artificial
  oligonucleotide probe
gcctgggtcaccacgc

SEQ ID NO: 24007 - DNA, 16 bp, Artificial
  oligonucleotide probe
gagcgcctcctcgagc

SEQ ID NO: 24008 - DNA, 16 bp, Artificial
  oligonucleotide probe
gcgagtggcagggcct

SEQ ID NO: 24009 - DNA, 16 bp, Artificial
  oligonucleotide probe
gcagcctctggccgag

SEQ ID NO: 24010 - DNA, 16 bp, Artificial
  oligonucleotide probe
gcagcaccagcgtggc

SEQ ID NO: 24011 - DNA, 16 bp, Artificial
  oligonucleotide probe
tggcagcgggtcgtgg

SEQ ID NO: 24012 - DNA, 16 bp, Artificial
  oligonucleotide probe
gcctgggtcaccacgc

SEQ ID NO: 24013 - DNA, 16 bp, Artificial
  oligonucleotide probe
ggaaagcggcctggaa

SEQ ID NO: 24014 - DNA, 16 bp, Artificial
  oligonucleotide probe
gagcggtctggcggaa

SEQ ID NO: 24015 - DNA, 16 bp, Artificial
  oligonucleotide probe
caccgagccacccgga

SEQ ID NO: 24016 - DNA, 16 bp, Artificial
  oligonucleotide probe
tggcacgcgagccagg

SEQ ID NO: 24017 - DNA, 16 bp, Artificial
  oligonucleotide probe
caccgagccacccgga

SEQ ID NO: 24018 - DNA, 16 bp, Artificial
  oligonucleotide probe
tggcacgcgagccagg

SEQ ID NO: 24019 - DNA, 16 bp, Artificial
  oligonucleotide probe
gcgagtggcagggcct

SEQ ID NO: 24020 - DNA, 16 bp, Artificial
  oligonucleotide probe
caccgagccacccgga

SEQ ID NO: 24021 - DNA, 16 bp, Artificial
  oligonucleotide probe
caccgagccacccgga

SEQ ID NO: 24022 - DNA, 16 bp, Artificial
  oligonucleotide probe
tggcacgcgagccagg

SEQ ID NO: 24023 - DNA, 16 bp, Artificial
  oligonucleotide probe
tggcagcgggtcgtgg

SEQ ID NO: 24024 - DNA, 16 bp, Artificial
  oligonucleotide probe
gcctgggtcaccacgc

SEQ ID NO: 24025 - DNA, 16 bp, Artificial
  oligonucleotide probe
ggtccggagcagacgc

SEQ ID NO: 24026 - DNA, 16 bp, Artificial
  oligonucleotide probe
gcctgcgagagctggc

SEQ ID NO: 24027 - DNA, 16 bp, Artificial
  oligonucleotide probe
caccgagccacccgga

SEQ ID NO: 24028 - DNA, 16 bp, Artificial
  oligonucleotide probe
tggcacgcgagccagg

SEQ ID NO: 24029 - DNA, 16 bp, Artificial
  oligonucleotide probe
ggtccggagcagacgc

SEQ ID NO: 24030 - DNA, 16 bp, Artificial
  oligonucleotide probe
gcctgcgagagctggc

SEQ ID NO: 24031 - DNA, 16 bp, Artificial
  oligonucleotide probe
gcgagtggcagggcct

SEQ ID NO: 24032 - DNA, 16 bp, Artificial
  oligonucleotide probe
caccgagccacccgga

SEQ ID NO: 24033 - DNA, 16 bp, Artificial
  oligonucleotide probe
gacggggtcggacgag

SEQ ID NO: 24034 - DNA, 16 bp, Artificial
  oligonucleotide probe
gtggcaggagcgacgc

SEQ ID NO: 24035 - DNA, 16 bp, Artificial
  oligonucleotide probe
ccaaagcgggaatggc

SEQ ID NO: 24036 - DNA, 16 bp, Artificial
  oligonucleotide probe
cctccgaggacgcgga

SEQ ID NO: 24037 - DNA, 16 bp, Artificial
  oligonucleotide probe
ggaaagcggcctggaa

SEQ ID NO: 24038 - DNA, 16 bp, Artificial
  oligonucleotide probe
gagcggtctggcggaa

SEQ ID NO: 24039 - DNA, 16 bp, Artificial
  oligonucleotide probe
caggagcgggaagcga

SEQ ID NO: 24040 - DNA, 16 bp, Artificial
  oligonucleotide probe
tggccaggcggagtgg

SEQ ID NO: 24041 - DNA, 16 bp, Artificial
  oligonucleotide probe
gagcgcctcctcgagc

SEQ ID NO: 24042 - DNA, 16 bp, Artificial
  oligonucleotide probe
gcgagtggcagggcct

SEQ ID NO: 24043 - DNA, 16 bp, Artificial
  oligonucleotide probe
caccgagccacccgga

SEQ ID NO: 24044 - DNA, 16 bp, Artificial
  oligonucleotide probe
tggcacgcgagccagg

SEQ ID NO: 24045 - DNA, 16 bp, Artificial
  oligonucleotide probe
ggtccggagcagacgc

SEQ ID NO: 24046 - DNA, 16 bp, Artificial
  oligonucleotide probe
gcctgcgagagctggc

SEQ ID NO: 24047 - DNA, 16 bp, Artificial
  oligonucleotide probe
gcagcctctggccgag

SEQ ID NO: 24048 - DNA, 16 bp, Artificial
  oligonucleotide probe
gcagcaccagcgtggc

SEQ ID NO: 24049 - DNA, 16 bp, Artificial
  oligonucleotide probe
ccaaagcgggaatggc

SEQ ID NO: 24050 - DNA, 16 bp, Artificial
  oligonucleotide probe
cctccgaggacgcgga

SEQ ID NO: 24051 - DNA, 16 bp, Artificial
  oligonucleotide probe
acgcgagcgggtgcag

SEQ ID NO: 24052 - DNA, 16 bp, Artificial
  oligonucleotide probe
gcgatggccaggtggc

SEQ ID NO: 24053 - DNA, 16 bp, Artificial
  oligonucleotide probe
ggaaagcggcctggaa

SEQ ID NO: 24054 - DNA, 16 bp, Artificial
  oligonucleotide probe
gagcggtctggcggaa

SEQ ID NO: 24055 - DNA, 16 bp, Artificial
  oligonucleotide probe
caccgagccacccgga

SEQ ID NO: 24056 - DNA, 16 bp, Artificial
  oligonucleotide probe
tggcacgcgagccagg

SEQ ID NO: 24057 - DNA, 16 bp, Artificial
  oligonucleotide probe
ggaaagcggcctggaa

SEQ ID NO: 24058 - DNA, 16 bp, Artificial
  oligonucleotide probe
gagcggtctggcggaa

SEQ ID NO: 24059 - DNA, 16 bp, Artificial
  oligonucleotide probe
gagcgcctcctcgagc

SEQ ID NO: 24060 - DNA, 16 bp, Artificial
  oligonucleotide probe
gcgagtggcagggcct

SEQ ID NO: 24061 - DNA, 16 bp, Artificial
  oligonucleotide probe
gcagcctctggccgag

SEQ ID NO: 24062 - DNA, 16 bp, Artificial
  oligonucleotide probe
gcagcaccagcgtggc

SEQ ID NO: 24063 - DNA, 16 bp, Artificial
  oligonucleotide probe
ccaaagcgggaatggc

SEQ ID NO: 24064 - DNA, 16 bp, Artificial
  oligonucleotide probe
cctccgaggacgcgga

SEQ ID NO: 24065 - DNA, 16 bp, Artificial
  oligonucleotide probe
accacggaagcgcgga

SEQ ID NO: 24066 - DNA, 16 bp, Artificial
  oligonucleotide probe
gtgggacgacgcgcga

SEQ ID NO: 24067 - DNA, 16 bp, Artificial
  oligonucleotide probe
ggtccggagcagacgc

SEQ ID NO: 24068 - DNA, 16 bp, Artificial
  oligonucleotide probe
gcctgcgagagctggc

SEQ ID NO: 24069 - DNA, 16 bp, Artificial
  oligonucleotide probe
acgcgagcgggtgcag

SEQ ID NO: 24070 - DNA, 16 bp, Artificial
  oligonucleotide probe
gcgatggccaggtggc

SEQ ID NO: 24071 - DNA, 16 bp, Artificial
  oligonucleotide probe
tggcagcgggtcgtgg

SEQ ID NO: 24072 - DNA, 16 bp, Artificial
  oligonucleotide probe
gcctgggtcaccacgc

SEQ ID NO: 24073 - DNA, 16 bp, Artificial
  oligonucleotide probe
caggagcgggaagcga

SEQ ID NO: 24074 - DNA, 16 bp, Artificial
  oligonucleotide probe
tggccaggcggagtgg

SEQ ID NO: 24075 - DNA, 16 bp, Artificial
  oligonucleotide probe
ggaaagcggcctggaa

SEQ ID NO: 24076 - DNA, 16 bp, Artificial
  oligonucleotide probe
gagcggtctggcggaa

SEQ ID NO: 24077 - DNA, 16 bp, Artificial
  oligonucleotide probe
gagcgcctcctcgagc

SEQ ID NO: 24078 - DNA, 16 bp, Artificial
  oligonucleotide probe
gcgagtggcagggcct

SEQ ID NO: 24079 - DNA, 16 bp, Artificial
  oligonucleotide probe
cctcagcgcggaacca

SEQ ID NO: 24080 - DNA, 16 bp, Artificial
  oligonucleotide probe
gacggacgacgcgtgg

SEQ ID NO: 24081 - DNA, 16 bp, Artificial
  oligonucleotide probe
gcagcctctggccgag

SEQ ID NO: 24082 - DNA, 16 bp, Artificial
  oligonucleotide probe
gcagcaccagcgtggc

SEQ ID NO: 24083 - DNA, 16 bp, Artificial
  oligonucleotide probe
gagcgcctcctcgagc

SEQ ID NO: 24084 - DNA, 16 bp, Artificial
  oligonucleotide probe
gcgagtggcagggcct

SEQ ID NO: 24085 - DNA, 16 bp, Artificial
  oligonucleotide probe
gcagcctctggccgag

SEQ ID NO: 24086 - DNA, 16 bp, Artificial
  oligonucleotide probe
gcagcaccagcgtggc

SEQ ID NO: 24087 - DNA, 16 bp, Artificial
  oligonucleotide probe
caccgagccacccgga

SEQ ID NO: 24088 - DNA, 16 bp, Artificial
  oligonucleotide probe
tggcacgcgagccagg

SEQ ID NO: 24089 - DNA, 16 bp, Artificial
  oligonucleotide probe
ccaaagcgggaatggc

SEQ ID NO: 24090 - DNA, 16 bp, Artificial
  oligonucleotide probe
cctccgaggacgcgga

SEQ ID NO: 24091 - DNA, 16 bp, Artificial
  oligonucleotide probe
tggcagcgggtcgtgg

SEQ ID NO: 24092 - DNA, 16 bp, Artificial
  oligonucleotide probe
gcctgggtcaccacgc

SEQ ID NO: 24093 - DNA, 16 bp, Artificial
  oligonucleotide probe
gcctgtgggtccgcga

SEQ ID NO: 24094 - DNA, 16 bp, Artificial
  oligonucleotide probe
cctcgcctcgaggagc

SEQ ID NO: 24095 - DNA, 16 bp, Artificial
  oligonucleotide probe
tggcagcgggtcgtgg

SEQ ID NO: 24096 - DNA, 16 bp, Artificial
  oligonucleotide probe
gcctgggtcaccacgc

SEQ ID NO: 24097 - DNA, 16 bp, Artificial
  oligonucleotide probe
ggtccggagcagacgc

SEQ ID NO: 24098 - DNA, 16 bp, Artificial
  oligonucleotide probe
gcctgcgagagctggc

SEQ ID NO: 24099 - DNA, 16 bp, Artificial
  oligonucleotide probe
caccgagccacccgga

SEQ ID NO: 24100 - DNA, 16 bp, Artificial
  oligonucleotide probe
tggcacgcgagccagg

SEQ ID NO: 24101 - DNA, 16 bp, Artificial
  oligonucleotide probe
gcagcctctggccgag

SEQ ID NO: 24102 - DNA, 16 bp, Artificial
  oligonucleotide probe
gcagcaccagcgtggc

SEQ ID NO: 24103 - DNA, 16 bp, Artificial
  oligonucleotide probe
gcgagtggcagggcct

SEQ ID NO: 24104 - DNA, 16 bp, Artificial
  oligonucleotide probe
caccgagccacccgga

SEQ ID NO: 24105 - DNA, 16 bp, Artificial
  oligonucleotide probe
ggtccggagcagacgc

SEQ ID NO: 24106 - DNA, 16 bp, Artificial
  oligonucleotide probe
gcctgcgagagctggc

SEQ ID NO: 24107 - DNA, 16 bp, Artificial
  oligonucleotide probe
ggtccggagcagacgc

SEQ ID NO: 24108 - DNA, 16 bp, Artificial
  oligonucleotide probe
gcctgcgagagctggc

SEQ ID NO: 24109 - DNA, 16 bp, Artificial
  oligonucleotide probe
tggcacgcgagccagg

SEQ ID NO: 24110 - DNA, 16 bp, Artificial
  oligonucleotide probe
tggcacgcgagccagg

SEQ ID NO: 24111 - DNA, 16 bp, Artificial
  oligonucleotide probe
tggcacgcgagccagg

SEQ ID NO: 24112 - DNA, 16 bp, Artificial
  oligonucleotide probe
tggcacgcgagccagg

SEQ ID NO: 24113 - DNA, 16 bp, Artificial
  oligonucleotide probe
tggcacgcgagccagg

SEQ ID NO: 24114 - DNA, 16 bp, Artificial
  oligonucleotide probe
tggcacgcgagccagg

SEQ ID NO: 24115 - DNA, 16 bp, Artificial
  oligonucleotide probe
tggcacgcgagccagg

SEQ ID NO: 24116 - DNA, 16 bp, Artificial
  oligonucleotide probe
tggcacgcgagccagg

SEQ ID NO: 24117 - DNA, 16 bp, Artificial
  oligonucleotide probe
tggcacgcgagccagg

SEQ ID NO: 24118 - DNA, 16 bp, Artificial
  oligonucleotide probe
tggcacgcgagccagg

SEQ ID NO: 24119 - DNA, 16 bp, Artificial
  oligonucleotide probe
tggcacgcgagccagg

SEQ ID NO: 24120 - DNA, 16 bp, Artificial
  oligonucleotide probe
tggcacgcgagccagg

SEQ ID NO: 24121 - DNA, 16 bp, Artificial
  oligonucleotide probe
tggcacgcgagccagg

SEQ ID NO: 24122 - DNA, 16 bp, Artificial
  oligonucleotide probe
tggcacgcgagccagg

SEQ ID NO: 24123 - DNA, 16 bp, Artificial
  oligonucleotide probe
tggcacgcgagccagg

SEQ ID NO: 24124 - DNA, 16 bp, Artificial
  oligonucleotide probe
tggcacgcgagccagg

SEQ ID NO: 24125 - DNA, 16 bp, Artificial
  oligonucleotide probe
tggcacgcgagccagg

SEQ ID NO: 24126 - DNA, 16 bp, Artificial
  oligonucleotide probe
agcgccaatcacgggt

SEQ ID NO: 24127 - DNA, 16 bp, Artificial
  oligonucleotide probe
gacgcaggcggagggt

SEQ ID NO: 24128 - DNA, 16 bp, Artificial
  oligonucleotide probe
acgcgggtcaccgtcc

SEQ ID NO: 24129 - DNA, 16 bp, Artificial
  oligonucleotide probe
gcgagtggcagggcct

SEQ ID NO: 24130 - DNA, 16 bp, Artificial
  oligonucleotide probe
gcagcctctggccgag

SEQ ID NO: 24131 - DNA, 16 bp, Artificial
  oligonucleotide probe
gcagcaccagcgtggc

SEQ ID NO: 24132 - DNA, 16 bp, Artificial
  oligonucleotide probe
gtccgagcagcggcct

SEQ ID NO: 24133 - DNA, 16 bp, Artificial
  oligonucleotide probe
caggagcgggaagcga

SEQ ID NO: 24134 - DNA, 16 bp, Artificial
  oligonucleotide probe
gtggcggaggtcggaa

SEQ ID NO: 24135 - DNA, 16 bp, Artificial
  oligonucleotide probe
gacgcaggcggagggt

SEQ ID NO: 24136 - DNA, 16 bp, Artificial
  oligonucleotide probe
tggcagcgggtcgtgg

SEQ ID NO: 24137 - DNA, 16 bp, Artificial
  oligonucleotide probe
gcctgggtcaccacgc

SEQ ID NO: 24138 - DNA, 16 bp, Artificial
  oligonucleotide probe
gcaggtggtggcgagc

SEQ ID NO: 24139 - DNA, 16 bp, Artificial
  oligonucleotide probe
tggccaggcggagtgg

SEQ ID NO: 24140 - DNA, 16 bp, Artificial
  oligonucleotide probe
gtggcggaggtcggaa

SEQ ID NO: 24141 - DNA, 16 bp, Artificial
  oligonucleotide probe
cctctggctggcccaa

SEQ ID NO: 24142 - DNA, 16 bp, Artificial
  oligonucleotide probe
ggtccggagcagacgc

SEQ ID NO: 24143 - DNA, 16 bp, Artificial
  oligonucleotide probe
gcctgcgagagctggc

SEQ ID NO: 24144 - DNA, 16 bp, Artificial
  oligonucleotide probe
gagcggtctggcggaa

SEQ ID NO: 24145 - DNA, 16 bp, Artificial
  oligonucleotide probe
gagcgcctcctcgagc

SEQ ID NO: 24146 - DNA, 16 bp, Artificial
  oligonucleotide probe
tggcagcgggtcgtgg

SEQ ID NO: 24147 - DNA, 16 bp, Artificial
  oligonucleotide probe
gcctgggtcaccacgc

SEQ ID NO: 24148 - DNA, 16 bp, Artificial
  oligonucleotide probe
caggggaagggtcgga

SEQ ID NO: 24149 - DNA, 16 bp, Artificial
  oligonucleotide probe
gtccgagcagcggcct

SEQ ID NO: 24150 - DNA, 16 bp, Artificial
  oligonucleotide probe
acgcgggtcaccgtcc

SEQ ID NO: 24151 - DNA, 16 bp, Artificial
  oligonucleotide probe
gcctcggagacggcag

SEQ ID NO: 24152 - DNA, 16 bp, Artificial
  oligonucleotide probe
acgcggaagacgtggc

SEQ ID NO: 24153 - DNA, 16 bp, Artificial
  oligonucleotide probe
gcctcggagacggcag

SEQ ID NO: 24154 - DNA, 16 bp, Artificial
  oligonucleotide probe
gacggcgagtgggcag

SEQ ID NO: 24155 - DNA, 16 bp, Artificial
  oligonucleotide probe
acgcgcctgacgcctc

SEQ ID NO: 24156 - DNA, 16 bp, Artificial
  oligonucleotide probe
tggcacgcgagccagg

SEQ ID NO: 24157 - DNA, 16 bp, Artificial
  oligonucleotide probe
tggcggtcgcctcgag

SEQ ID NO: 24158 - DNA, 16 bp, Artificial
  oligonucleotide probe
cctcagcgcggaacca

SEQ ID NO: 24159 - DNA, 16 bp, Artificial
  oligonucleotide probe
ggaaagcggcctggaa

SEQ ID NO: 24160 - DNA, 16 bp, Artificial
  oligonucleotide probe
tggcggtcgcctcgag

SEQ ID NO: 24161 - DNA, 16 bp, Artificial
  oligonucleotide probe
agcgagcggtggacgc

SEQ ID NO: 24162 - DNA, 16 bp, Artificial
  oligonucleotide probe
cctctggctggcccaa

SEQ ID NO: 24163 - DNA, 16 bp, Artificial
  oligonucleotide probe
ggaaagcggcctggaa

SEQ ID NO: 24164 - DNA, 16 bp, Artificial
  oligonucleotide probe
gcagcctctggccgag

SEQ ID NO: 24165 - DNA, 16 bp, Artificial
  oligonucleotide probe
gcagcaccagcgtggc

SEQ ID NO: 24166 - DNA, 16 bp, Artificial
  oligonucleotide probe
agcgccaatcacgggt

SEQ ID NO: 24167 - DNA, 16 bp, Artificial
  oligonucleotide probe
acgcgggtcaccgtcc

SEQ ID NO: 24168 - DNA, 16 bp, Artificial
  oligonucleotide probe
gtggcaggagcgacgc

SEQ ID NO: 24169 - DNA, 16 bp, Artificial
  oligonucleotide probe
gtgggacgacgcgcga

SEQ ID NO: 24170 - DNA, 16 bp, Artificial
  oligonucleotide probe
tggcgtgggggtccaa

SEQ ID NO: 24171 - DNA, 16 bp, Artificial
  oligonucleotide probe
tgctgggtgcaggcga

SEQ ID NO: 24172 - DNA, 16 bp, Artificial
  oligonucleotide probe
cggacaggacgctggc

SEQ ID NO: 24173 - DNA, 16 bp, Artificial
  oligonucleotide probe
gcaggcagccaatggc

SEQ ID NO: 24174 - DNA, 16 bp, Artificial
  oligonucleotide probe
gcgaagcggcgaggtc

SEQ ID NO: 24175 - DNA, 16 bp, Artificial
  oligonucleotide probe
gggttggccgagtggc

SEQ ID NO: 24176 - DNA, 16 bp, Artificial
  oligonucleotide probe
agcgccaatcacgggt

SEQ ID NO: 24177 - DNA, 16 bp, Artificial
  oligonucleotide probe
acgcgggtcaccgtcc

SEQ ID NO: 24178 - DNA, 16 bp, Artificial
  oligonucleotide probe
cctccgaggacgcgga

SEQ ID NO: 24179 - DNA, 16 bp, Artificial
  oligonucleotide probe
gcctgcgagagctggc

SEQ ID NO: 24180 - DNA, 16 bp, Artificial
  oligonucleotide probe
accacggaagcgcgga

SEQ ID NO: 24181 - DNA, 16 bp, Artificial
  oligonucleotide probe
gtgggacgacgcgcga

SEQ ID NO: 24182 - DNA, 16 bp, Artificial
  oligonucleotide probe
caccgagccacccgga

SEQ ID NO: 24183 - DNA, 16 bp, Artificial
  oligonucleotide probe
caggcacccaggcgga

SEQ ID NO: 24184 - DNA, 16 bp, Artificial
  oligonucleotide probe
gtggcaggagcgacgc

SEQ ID NO: 24185 - DNA, 16 bp, Artificial
  oligonucleotide probe
gtgggacgacgcgcga

SEQ ID NO: 24186 - DNA, 16 bp, Artificial
  oligonucleotide probe
tggcagcgggtcgtgg

SEQ ID NO: 24187 - DNA, 16 bp, Artificial
  oligonucleotide probe
gcctgggtcaccacgc

SEQ ID NO: 24188 - DNA, 16 bp, Artificial
  oligonucleotide probe
caccgggtggtcagcg

SEQ ID NO: 24189 - DNA, 16 bp, Artificial
  oligonucleotide probe
ggtcgacgacgccgag

SEQ ID NO: 24190 - DNA, 16 bp, Artificial
  oligonucleotide probe
ggtccggagcagacgc

SEQ ID NO: 24191 - DNA, 16 bp, Artificial
  oligonucleotide probe
gcctgcgagagctggc

SEQ ID NO: 24192 - DNA, 16 bp, Artificial
  oligonucleotide probe
tggcagcgggtcgtgg

SEQ ID NO: 24193 - DNA, 16 bp, Artificial
  oligonucleotide probe
gcctgggtcaccacgc

SEQ ID NO: 24194 - DNA, 16 bp, Artificial
  oligonucleotide probe
gacgcaggcggagggt

SEQ ID NO: 24195 - DNA, 16 bp, Artificial
  oligonucleotide probe
acgcggtccaccgtgg

SEQ ID NO: 24196 - DNA, 16 bp, Artificial
  oligonucleotide probe
ccaaagcgggaatggc

SEQ ID NO: 24197 - DNA, 16 bp, Artificial
  oligonucleotide probe
ggtccggagcagacgc

SEQ ID NO: 24198 - DNA, 16 bp, Artificial
  oligonucleotide probe
caccgggtggtcagcg

SEQ ID NO: 24199 - DNA, 16 bp, Artificial
  oligonucleotide probe
ggtcgacgacgccgag

SEQ ID NO: 24200 - DNA, 16 bp, Artificial
  oligonucleotide probe
gcagcctctggccgag

SEQ ID NO: 24201 - DNA, 16 bp, Artificial
  oligonucleotide probe
gcagcaccagcgtggc

SEQ ID NO: 24202 - DNA, 16 bp, Artificial
  oligonucleotide probe
tggcggtcgcctcgag

SEQ ID NO: 24203 - DNA, 16 bp, Artificial
  oligonucleotide probe
agcgagcggtggacgc

SEQ ID NO: 24204 - DNA, 16 bp, Artificial
  oligonucleotide probe
ggaaagcggcctggaa

SEQ ID NO: 24205 - DNA, 16 bp, Artificial
  oligonucleotide probe
gagcggtctggcggaa

SEQ ID NO: 24206 - DNA, 16 bp, Artificial
  oligonucleotide probe
cctcgcctcgaggagc

SEQ ID NO: 24207 - DNA, 16 bp, Artificial
  oligonucleotide probe
gtggcaggagcgacgc

SEQ ID NO: 24208 - DNA, 16 bp, Artificial
  oligonucleotide probe
accatggcacgcgacg

SEQ ID NO: 24209 - DNA, 16 bp, Artificial
  oligonucleotide probe
acgccaggcgaggtgg

SEQ ID NO: 24210 - DNA, 16 bp, Artificial
  oligonucleotide probe
caccgacgggaaacgc

SEQ ID NO: 24211 - DNA, 16 bp, Artificial
  oligonucleotide probe
gtccggaagtgggcga

SEQ ID NO: 24212 - DNA, 16 bp, Artificial
  oligonucleotide probe
gcctgtgggtccgcga

SEQ ID NO: 24213 - DNA, 16 bp, Artificial
  oligonucleotide probe
gacggggtcggacgag

SEQ ID NO: 24214 - DNA, 16 bp, Artificial
  oligonucleotide probe
cctctggctggcccaa

SEQ ID NO: 24215 - DNA, 16 bp, Artificial
  oligonucleotide probe
gcgacgagcgagccaa

SEQ ID NO: 24216 - DNA, 16 bp, Artificial
  oligonucleotide probe
gacggcgagtgggcag

SEQ ID NO: 24217 - DNA, 16 bp, Artificial
  oligonucleotide probe
acgcgcctgacgcctc

SEQ ID NO: 24218 - DNA, 16 bp, Artificial
  oligonucleotide probe
ggaaagcggcctggaa

SEQ ID NO: 24219 - DNA, 16 bp, Artificial
  oligonucleotide probe
gagcggtctggcggaa

SEQ ID NO: 24220 - DNA, 16 bp, Artificial
  oligonucleotide probe
caccgagccacccgga

SEQ ID NO: 24221 - DNA, 16 bp, Artificial
  oligonucleotide probe
caggcacccaggcgga

SEQ ID NO: 24222 - DNA, 16 bp, Artificial
  oligonucleotide probe
gacggggtcggacgag

SEQ ID NO: 24223 - DNA, 16 bp, Artificial
  oligonucleotide probe
gtggcaggagcgacgc

SEQ ID NO: 24224 - DNA, 16 bp, Artificial
  oligonucleotide probe
acgccaggcgaggtgg

SEQ ID NO: 24225 - DNA, 16 bp, Artificial
  oligonucleotide probe
caggggaagggtcgga

SEQ ID NO: 24226 - DNA, 16 bp, Artificial
  oligonucleotide probe
cctcgcctcgaggagc

SEQ ID NO: 24227 - DNA, 16 bp, Artificial
  oligonucleotide probe
gtggcaggagcgacgc

SEQ ID NO: 24228 - DNA, 16 bp, Artificial
  oligonucleotide probe
tggcagcgggtcgtgg

SEQ ID NO: 24229 - DNA, 16 bp, Artificial
  oligonucleotide probe
ggaaagcggcctggaa

SEQ ID NO: 24230 - DNA, 16 bp, Artificial
  oligonucleotide probe
gacggacgacgcgtgg

SEQ ID NO: 24231 - DNA, 16 bp, Artificial
  oligonucleotide probe
gcgatggccaggtggc

SEQ ID NO: 24232 - DNA, 16 bp, Artificial
  oligonucleotide probe
gcgatggccaggtggc

SEQ ID NO: 24233 - DNA, 16 bp, Artificial
  oligonucleotide probe
gcaggcagccaatggc

SEQ ID NO: 24234 - DNA, 16 bp, Artificial
  oligonucleotide probe
cctcagcgcggaacca

SEQ ID NO: 24235 - DNA, 16 bp, Artificial
  oligonucleotide probe
gacggacgacgcgtgg

SEQ ID NO: 24236 - DNA, 16 bp, Artificial
  oligonucleotide probe
acgcggtccaccgtgg

SEQ ID NO: 24237 - DNA, 16 bp, Artificial
  oligonucleotide probe
tggcgtgggggtccaa

SEQ ID NO: 24238 - DNA, 16 bp, Artificial
  oligonucleotide probe
tggcgtgggggtccaa

SEQ ID NO: 24239 - DNA, 16 bp, Artificial
  oligonucleotide probe
tgctgggtgcaggcga

SEQ ID NO: 24240 - DNA, 16 bp, Artificial
  oligonucleotide probe
gcctgtgggtccgcga

SEQ ID NO: 24241 - DNA, 16 bp, Artificial
  oligonucleotide probe
cctcgcctcgaggagc

SEQ ID NO: 24242 - DNA, 16 bp, Artificial
  oligonucleotide probe
gcctgtgggtccgcga

SEQ ID NO: 24243 - DNA, 16 bp, Artificial
  oligonucleotide probe
cctcgcctcgaggagc

SEQ ID NO: 24244 - DNA, 16 bp, Artificial
  oligonucleotide probe
ggtccggagcagacgc

SEQ ID NO: 24245 - DNA, 16 bp, Artificial
  oligonucleotide probe
gcctgcgagagctggc

SEQ ID NO: 24246 - DNA, 16 bp, Artificial
  oligonucleotide probe
gagcgcctcctcgagc

SEQ ID NO: 24247 - DNA, 16 bp, Artificial
  oligonucleotide probe
gcgagtggcagggcct

SEQ ID NO: 24248 - DNA, 16 bp, Artificial
  oligonucleotide probe
gagcggtctggcggaa

SEQ ID NO: 24249 - DNA, 16 bp, Artificial
  oligonucleotide probe
gagcgcctcctcgagc

SEQ ID NO: 24250 - DNA, 16 bp, Artificial
  oligonucleotide probe
gcagcaccagcgtggc

SEQ ID NO: 24251 - DNA, 16 bp, Artificial
  oligonucleotide probe
ggtccggagcagacgc

SEQ ID NO: 24252 - DNA, 16 bp, Artificial
  oligonucleotide probe
gacggggtcggacgag

SEQ ID NO: 24253 - DNA, 16 bp, Artificial
  oligonucleotide probe
gtggcaggagcgacgc

SEQ ID NO: 24254 - DNA, 16 bp, Artificial
  oligonucleotide probe
tggcagcgggtcgtgg

SEQ ID NO: 24255 - DNA, 16 bp, Artificial
  oligonucleotide probe
gcctgggtcaccacgc

SEQ ID NO: 24256 - DNA, 16 bp, Artificial
  oligonucleotide probe
gagcgcgacacccagg

SEQ ID NO: 24257 - DNA, 16 bp, Artificial
  oligonucleotide probe
cggacaggacgctggc

SEQ ID NO: 24258 - DNA, 16 bp, Artificial
  oligonucleotide probe
ccaaagcgggaatggc

SEQ ID NO: 24259 - DNA, 16 bp, Artificial
  oligonucleotide probe
cctccgaggacgcgga

SEQ ID NO: 24260 - DNA, 16 bp, Artificial
  oligonucleotide probe
ggtccggagcagacgc

SEQ ID NO: 24261 - DNA, 16 bp, Artificial
  oligonucleotide probe
gcctgcgagagctggc

SEQ ID NO: 24262 - DNA, 16 bp, Artificial
  oligonucleotide probe
gggttggccgagtggc

SEQ ID NO: 24263 - DNA, 16 bp, Artificial
  oligonucleotide probe
gcctgtgggtccgcga

SEQ ID NO: 24264 - DNA, 16 bp, Artificial
  oligonucleotide probe
tggcgggtgacggtgg

SEQ ID NO: 24265 - DNA, 16 bp, Artificial
  oligonucleotide probe
cctcgcctcgaggagc

SEQ ID NO: 24266 - DNA, 16 bp, Artificial
  oligonucleotide probe
ccaaagcgggaatggc

SEQ ID NO: 24267 - DNA, 16 bp, Artificial
  oligonucleotide probe
cctccgaggacgcgga

SEQ ID NO: 24268 - DNA, 16 bp, Artificial
  oligonucleotide probe
caggggaagggtcgga

SEQ ID NO: 24269 - DNA, 16 bp, Artificial
  oligonucleotide probe
gtccgagcagcggcct

SEQ ID NO: 24270 - DNA, 16 bp, Artificial
  oligonucleotide probe
gcctagcgcctcgacg

SEQ ID NO: 24271 - DNA, 16 bp, Artificial
  oligonucleotide probe
ggaagcctgcgacgga

SEQ ID NO: 24272 - DNA, 16 bp, Artificial
  oligonucleotide probe
gcctgggtcaccacgc

SEQ ID NO: 24273 - DNA, 16 bp, Artificial
  oligonucleotide probe
gcgagtggcagggcct

SEQ ID NO: 24274 - DNA, 16 bp, Artificial
  oligonucleotide probe
gggtggaacgaggcga

SEQ ID NO: 24275 - DNA, 16 bp, Artificial
  oligonucleotide probe
gcaggtggtggcgagc

SEQ ID NO: 24276 - DNA, 16 bp, Artificial
  oligonucleotide probe
acgcggtccaccgtgg

SEQ ID NO: 24277 - DNA, 16 bp, Artificial
  oligonucleotide probe
tggcgtgggggtccaa

SEQ ID NO: 24278 - DNA, 16 bp, Artificial
  oligonucleotide probe
caccgggtggtcagcg

SEQ ID NO: 24279 - DNA, 16 bp, Artificial
  oligonucleotide probe
ggtcgacgacgccgag

SEQ ID NO: 24280 - DNA, 16 bp, Artificial
  oligonucleotide probe
caccgagccacccgga

SEQ ID NO: 24281 - DNA, 16 bp, Artificial
  oligonucleotide probe
caggcacccaggcgga

SEQ ID NO: 24282 - DNA, 16 bp, Artificial
  oligonucleotide probe
agcgagcggtggacgc

SEQ ID NO: 24283 - DNA, 16 bp, Artificial
  oligonucleotide probe
tggcgggtgacggtgg

SEQ ID NO: 24284 - DNA, 16 bp, Artificial
  oligonucleotide probe
accacggaagcgcgga

SEQ ID NO: 24285 - DNA, 16 bp, Artificial
  oligonucleotide probe
gcaggcagccaatggc

SEQ ID NO: 24286 - DNA, 16 bp, Artificial
  oligonucleotide probe
gacggacgacgcgtgg

SEQ ID NO: 24287 - DNA, 16 bp, Artificial
  oligonucleotide probe
gagcgcgacacccagg

SEQ ID NO: 24288 - DNA, 16 bp, Artificial
  oligonucleotide probe
ggtccggagcagacgc

SEQ ID NO: 24289 - DNA, 16 bp, Artificial
  oligonucleotide probe
gcctgcgagagctggc

SEQ ID NO: 24290 - DNA, 16 bp, Artificial
  oligonucleotide probe
gggtggaacgaggcga

SEQ ID NO: 24291 - DNA, 16 bp, Artificial
  oligonucleotide probe
accatggcacgcgacg

SEQ ID NO: 24292 - DNA, 16 bp, Artificial
  oligonucleotide probe
cctcgcctcgaggagc

SEQ ID NO: 24293 - DNA, 16 bp, Artificial
  oligonucleotide probe
gtggcaggagcgacgc

SEQ ID NO: 24294 - DNA, 16 bp, Artificial
  oligonucleotide probe
gtccacgctggcgacg

SEQ ID NO: 24295 - DNA, 16 bp, Artificial
  oligonucleotide probe
cctcagcgcggaacca

SEQ ID NO: 24296 - DNA, 16 bp, Artificial
  oligonucleotide probe
gcctagcgcctcgacg

SEQ ID NO: 24297 - DNA, 16 bp, Artificial
  oligonucleotide probe
ggaagcctgcgacgga

SEQ ID NO: 24298 - DNA, 16 bp, Artificial
  oligonucleotide probe
accacggaagcgcgga

SEQ ID NO: 24299 - DNA, 16 bp, Artificial
  oligonucleotide probe
gtgggacgacgcgcga

SEQ ID NO: 24300 - DNA, 16 bp, Artificial
  oligonucleotide probe
gcgacgagcgagccaa

SEQ ID NO: 24301 - DNA, 16 bp, Artificial
  oligonucleotide probe
gcctcggagacggcag

SEQ ID NO: 24302 - DNA, 16 bp, Artificial
  oligonucleotide probe
accacggaagcgcgga

SEQ ID NO: 24303 - DNA, 16 bp, Artificial
  oligonucleotide probe
ccaaagcgggaatggc

SEQ ID NO: 24304 - DNA, 16 bp, Artificial
  oligonucleotide probe
gcctgtgggtccgcga

SEQ ID NO: 24305 - DNA, 16 bp, Artificial
  oligonucleotide probe
cctcgcctcgaggagc

SEQ ID NO: 24306 - DNA, 16 bp, Artificial
  oligonucleotide probe
caccgacgggaaacgc

SEQ ID NO: 24307 - DNA, 16 bp, Artificial
  oligonucleotide probe
gtccggaagtgggcga

SEQ ID NO: 24308 - DNA, 16 bp, Artificial
  oligonucleotide probe
gcagcctctggccgag

SEQ ID NO: 24309 - DNA, 16 bp, Artificial
  oligonucleotide probe
gcagcaccagcgtggc

SEQ ID NO: 24310 - DNA, 16 bp, Artificial
  oligonucleotide probe
caccgagccacccgga

SEQ ID NO: 24311 - DNA, 16 bp, Artificial
  oligonucleotide probe
caggcacccaggcgga

SEQ ID NO: 24312 - DNA, 16 bp, Artificial
  oligonucleotide probe
gcgaagcggcgaggtc

SEQ ID NO: 24313 - DNA, 16 bp, Artificial
  oligonucleotide probe
gcctcggagacggcag

SEQ ID NO: 24314 - DNA, 16 bp, Artificial
  oligonucleotide probe
gagcggtctggcggaa

SEQ ID NO: 24315 - DNA, 16 bp, Artificial
  oligonucleotide probe
gagcgcctcctcgagc

SEQ ID NO: 24316 - DNA, 16 bp, Artificial
  oligonucleotide probe
gcagcctctggccgag

SEQ ID NO: 24317 - DNA, 16 bp, Artificial
  oligonucleotide probe
gcagcaccagcgtggc

SEQ ID NO: 24318 - DNA, 16 bp, Artificial
  oligonucleotide probe
gcctgtgggtccgcga

SEQ ID NO: 24319 - DNA, 16 bp, Artificial
  oligonucleotide probe
gacggggtcggacgag

SEQ ID NO: 24320 - DNA, 16 bp, Artificial
  oligonucleotide probe
gcagcctctggccgag

SEQ ID NO: 24321 - DNA, 16 bp, Artificial
  oligonucleotide probe
gcagcaccagcgtggc

SEQ ID NO: 24322 - DNA, 16 bp, Artificial
  oligonucleotide probe
tggcacgcgagccagg

SEQ ID NO: 24323 - DNA, 16 bp, Artificial
  oligonucleotide probe
tggcggtcgcctcgag

SEQ ID NO: 24324 - DNA, 16 bp, Artificial
  oligonucleotide probe
gggtggaacgaggcga

SEQ ID NO: 24325 - DNA, 16 bp, Artificial
  oligonucleotide probe
gcaggtggtggcgagc

SEQ ID NO: 24326 - DNA, 16 bp, Artificial
  oligonucleotide probe
gggtggaacgaggcga

SEQ ID NO: 24327 - DNA, 16 bp, Artificial
  oligonucleotide probe
ggaaagcggcctggaa

SEQ ID NO: 24328 - DNA, 16 bp, Artificial
  oligonucleotide probe
cctcgcctcgaggagc

SEQ ID NO: 24329 - DNA, 16 bp, Artificial
  oligonucleotide probe
gtggcaggagcgacgc

SEQ ID NO: 24330 - DNA, 16 bp, Artificial
  oligonucleotide probe
tggcgggtgacggtgg

SEQ ID NO: 24331 - DNA, 16 bp, Artificial
  oligonucleotide probe
cctcgcctcgaggagc

SEQ ID NO: 24332 - DNA, 16 bp, Artificial
  oligonucleotide probe
gcctagcgcctcgacg

SEQ ID NO: 24333 - DNA, 16 bp, Artificial
  oligonucleotide probe
ggaagcctgcgacgga

SEQ ID NO: 24334 - DNA, 16 bp, Artificial
  oligonucleotide probe
ggaaagcggcctggaa

SEQ ID NO: 24335 - DNA, 16 bp, Artificial
  oligonucleotide probe
gagcggtctggcggaa

SEQ ID NO: 24336 - DNA, 16 bp, Artificial
  oligonucleotide probe
agcgccaatcacgggt

SEQ ID NO: 24337 - DNA, 16 bp, Artificial
  oligonucleotide probe
caggcacccaggcgga

SEQ ID NO: 24338 - DNA, 16 bp, Artificial
  oligonucleotide probe
accatggcacgcgacg

SEQ ID NO: 24339 - DNA, 16 bp, Artificial
  oligonucleotide probe
acgccaggcgaggtgg

SEQ ID NO: 24340 - DNA, 16 bp, Artificial
  oligonucleotide probe
gacggacgacgcgtgg

SEQ ID NO: 24341 - DNA, 16 bp, Artificial
  oligonucleotide probe
gcgagtggcagggcct

SEQ ID NO: 24342 - DNA, 16 bp, Artificial
  oligonucleotide probe
gacggacgacgcgtgg

SEQ ID NO: 24343 - DNA, 16 bp, Artificial
  oligonucleotide probe
gacggggtcggacgag

SEQ ID NO: 24344 - DNA, 16 bp, Artificial
  oligonucleotide probe
gtccacgctggcgacg

SEQ ID NO: 24345 - DNA, 16 bp, Artificial
  oligonucleotide probe
cctcagcgcggaacca

SEQ ID NO: 24346 - DNA, 16 bp, Artificial
  oligonucleotide probe
gcagcggagcctgagc

SEQ ID NO: 24347 - DNA, 16 bp, Artificial
  oligonucleotide probe
acgcaccagtcccgga

SEQ ID NO: 24348 - DNA, 16 bp, Artificial
  oligonucleotide probe
acgcgagcgggtgcag

SEQ ID NO: 24349 - DNA, 16 bp, Artificial
  oligonucleotide probe
gcaggcagccaatggc

SEQ ID NO: 24350 - DNA, 16 bp, Artificial
  oligonucleotide probe
cctcagcgcggaacca

SEQ ID NO: 24351 - DNA, 16 bp, Artificial
  oligonucleotide probe
gacggacgacgcgtgg

SEQ ID NO: 24352 - DNA, 16 bp, Artificial
  oligonucleotide probe
gtgggacgacgcgcga

SEQ ID NO: 24353 - DNA, 16 bp, Artificial
  oligonucleotide probe
cctccgaggacgcgga

SEQ ID NO: 24354 - DNA, 16 bp, Artificial
  oligonucleotide probe
ggaaagcggcctggaa

SEQ ID NO: 24355 - DNA, 16 bp, Artificial
  oligonucleotide probe
tggcggtcgcctcgag

SEQ ID NO: 24356 - DNA, 16 bp, Artificial
  oligonucleotide probe
gcctgggtcaccacgc

SEQ ID NO: 24357 - DNA, 16 bp, Artificial
  oligonucleotide probe
gcagcaccagcgtggc

SEQ ID NO: 24358 - DNA, 16 bp, Artificial
  oligonucleotide probe
acgcggaagacgtggc

SEQ ID NO: 24359 - DNA, 16 bp, Artificial
  oligonucleotide probe
gcgacgagcgagccaa

SEQ ID NO: 24360 - DNA, 16 bp, Artificial
  oligonucleotide probe
cctctggctggcccaa

SEQ ID NO: 24361 - DNA, 16 bp, Artificial
  oligonucleotide probe
gcgacgagcgagccaa

SEQ ID NO: 24362 - DNA, 16 bp, Artificial
  oligonucleotide probe
acgcgggtcaccgtcc

SEQ ID NO: 24363 - DNA, 16 bp, Artificial
  oligonucleotide probe
gcaggtggtggcgagc

SEQ ID NO: 24364 - DNA, 16 bp, Artificial
  oligonucleotide probe
gcgaagcggcgaggtc

SEQ ID NO: 24365 - DNA, 16 bp, Artificial
  oligonucleotide probe
gggttggccgagtggc

SEQ ID NO: 24366 - DNA, 16 bp, Artificial
  oligonucleotide probe
gacggacgacgcgtgg

SEQ ID NO: 24367 - DNA, 16 bp, Artificial
  oligonucleotide probe
gcgatggccaggtggc

SEQ ID NO: 24368 - DNA, 16 bp, Artificial
  oligonucleotide probe
gcgagtggcagggcct

SEQ ID NO: 24369 - DNA, 16 bp, Artificial
  oligonucleotide probe
caccgagccacccgga

SEQ ID NO: 24370 - DNA, 16 bp, Artificial
  oligonucleotide probe
caggcacccaggcgga

SEQ ID NO: 24371 - DNA, 16 bp, Artificial
  oligonucleotide probe
gcgaagcggcgaggtc

SEQ ID NO: 24372 - DNA, 16 bp, Artificial
  oligonucleotide probe
ccaaagcgggaatggc

SEQ ID NO: 24373 - DNA, 16 bp, Artificial
  oligonucleotide probe
cctccgaggacgcgga

SEQ ID NO: 24374 - DNA, 16 bp, Artificial
  oligonucleotide probe
gggtggaacgaggcga

SEQ ID NO: 24375 - DNA, 16 bp, Artificial
  oligonucleotide probe
gcaggtggtggcgagc

SEQ ID NO: 24376 - DNA, 16 bp, Artificial
  oligonucleotide probe
ggtccggagcagacgc

SEQ ID NO: 24377 - DNA, 16 bp, Artificial
  oligonucleotide probe
gcctgcgagagctggc

SEQ ID NO: 24378 - DNA, 16 bp, Artificial
  oligonucleotide probe
gcctgcgagagctggc

SEQ ID NO: 24379 - DNA, 16 bp, Artificial
  oligonucleotide probe
gagcgcctcctcgagc

SEQ ID NO: 24380 - DNA, 16 bp, Artificial
  oligonucleotide probe
gcgacgagcgagccaa

SEQ ID NO: 24381 - DNA, 16 bp, Artificial
  oligonucleotide probe
acgcgggtcaccgtcc

SEQ ID NO: 24382 - DNA, 16 bp, Artificial
  oligonucleotide probe
tggcggtcgcctcgag

SEQ ID NO: 24383 - DNA, 16 bp, Artificial
  oligonucleotide probe
agcgagcggtggacgc

SEQ ID NO: 24384 - DNA, 16 bp, Artificial
  oligonucleotide probe
gcgaagcggcgaggtc

SEQ ID NO: 24385 - DNA, 16 bp, Artificial
  oligonucleotide probe
tggcacgcgagccagg

SEQ ID NO: 24386 - DNA, 16 bp, Artificial
  oligonucleotide probe
gcctagcgcctcgacg

SEQ ID NO: 24387 - DNA, 16 bp, Artificial
  oligonucleotide probe
ggaagcctgcgacgga

SEQ ID NO: 24388 - DNA, 16 bp, Artificial
  oligonucleotide probe
cctctggctggcccaa

SEQ ID NO: 24389 - DNA, 16 bp, Artificial
  oligonucleotide probe
gcgacgagcgagccaa

SEQ ID NO: 24390 - DNA, 16 bp, Artificial
  oligonucleotide probe
gggtggaacgaggcga

SEQ ID NO: 24391 - DNA, 16 bp, Artificial
  oligonucleotide probe
caggagcgggaagcga

SEQ ID NO: 24392 - DNA, 16 bp, Artificial
  oligonucleotide probe
tcacgccttggccacc

SEQ ID NO: 24393 - DNA, 16 bp, Artificial
  oligonucleotide probe
caccgcgaggtcacgc

SEQ ID NO: 24394 - DNA, 16 bp, Artificial
  oligonucleotide probe
tggcgggtgacggtgg

SEQ ID NO: 24395 - DNA, 16 bp, Artificial
  oligonucleotide probe
cctcgcctcgaggagc

SEQ ID NO: 24396 - DNA, 16 bp, Artificial
  oligonucleotide probe
gcctgtgggtccgcga

SEQ ID NO: 24397 - DNA, 16 bp, Artificial
  oligonucleotide probe
tggcacgcgagccagg

SEQ ID NO: 24398 - DNA, 16 bp, Artificial
  oligonucleotide probe
tggcacgcgagccagg

SEQ ID NO: 24399 - DNA, 16 bp, Artificial
  oligonucleotide probe
tggcggtcgcctcgag

SEQ ID NO: 24400 - DNA, 16 bp, Artificial
  oligonucleotide probe
ccaaagcgggaatggc

SEQ ID NO: 24401 - DNA, 16 bp, Artificial
  oligonucleotide probe
cctccgaggacgcgga

SEQ ID NO: 24402 - DNA, 16 bp, Artificial
  oligonucleotide probe
gtccacgctggcgacg

SEQ ID NO: 24403 - DNA, 16 bp, Artificial
  oligonucleotide probe
cctcagcgcggaacca

SEQ ID NO: 24404 - DNA, 16 bp, Artificial
  oligonucleotide probe
cggacaggacgctggc

SEQ ID NO: 24405 - DNA, 16 bp, Artificial
  oligonucleotide probe
acgcgagcgggtgcag

SEQ ID NO: 24406 - DNA, 16 bp, Artificial
  oligonucleotide probe
gcgaagcggcgaggtc

SEQ ID NO: 24407 - DNA, 16 bp, Artificial
  oligonucleotide probe
gggttggccgagtggc

SEQ ID NO: 24408 - DNA, 16 bp, Artificial
  oligonucleotide probe
caccgacgggaaacgc

SEQ ID NO: 24409 - DNA, 16 bp, Artificial
  oligonucleotide probe
gtccggaagtgggcga

SEQ ID NO: 24410 - DNA, 16 bp, Artificial
  oligonucleotide probe
tggcagcgggtcgtgg

SEQ ID NO: 24411 - DNA, 16 bp, Artificial
  oligonucleotide probe
gcctgggtcaccacgc

SEQ ID NO: 24412 - DNA, 16 bp, Artificial
  oligonucleotide probe
acgcgagcgggtgcag

SEQ ID NO: 24413 - DNA, 16 bp, Artificial
  oligonucleotide probe
gcgatggccaggtggc

SEQ ID NO: 24414 - DNA, 16 bp, Artificial
  oligonucleotide probe
gggtggaacgaggcga

SEQ ID NO: 24415 - DNA, 16 bp, Artificial
  oligonucleotide probe
caggagcgggaagcga

SEQ ID NO: 24416 - DNA, 16 bp, Artificial
  oligonucleotide probe
caccgagccacccgga

SEQ ID NO: 24417 - DNA, 16 bp, Artificial
  oligonucleotide probe
caggcacccaggcgga

SEQ ID NO: 24418 - DNA, 16 bp, Artificial
  oligonucleotide probe
ccaaagcgggaatggc

SEQ ID NO: 24419 - DNA, 16 bp, Artificial
  oligonucleotide probe
cctccgaggacgcgga

SEQ ID NO: 24420 - DNA, 16 bp, Artificial
  oligonucleotide probe
gtccacgctggcgacg

SEQ ID NO: 24421 - DNA, 16 bp, Artificial
  oligonucleotide probe
gagcgcgacacccagg

SEQ ID NO: 24422 - DNA, 16 bp, Artificial
  oligonucleotide probe
gcgaagcggcgaggtc

SEQ ID NO: 24423 - DNA, 16 bp, Artificial
  oligonucleotide probe
gggttggccgagtggc

SEQ ID NO: 24424 - DNA, 16 bp, Artificial
  oligonucleotide probe
gcagcggagcctgagc

SEQ ID NO: 24425 - DNA, 16 bp, Artificial
  oligonucleotide probe
acgcaccagtcccgga

SEQ ID NO: 24426 - DNA, 16 bp, Artificial
  oligonucleotide probe
gcgaagcggcgaggtc

SEQ ID NO: 24427 - DNA, 16 bp, Artificial
  oligonucleotide probe
gggttggccgagtggc

SEQ ID NO: 24428 - DNA, 16 bp, Artificial
  oligonucleotide probe
gagcggtctggcggaa

SEQ ID NO: 24429 - DNA, 16 bp, Artificial
  oligonucleotide probe
gagcgcctcctcgagc

SEQ ID NO: 24430 - DNA, 16 bp, Artificial
  oligonucleotide probe
gacggggtcggacgag

SEQ ID NO: 24431 - DNA, 16 bp, Artificial
  oligonucleotide probe
accacggaagcgcgga

SEQ ID NO: 24432 - DNA, 16 bp, Artificial
  oligonucleotide probe
agcgccaatcacgggt

SEQ ID NO: 24433 - DNA, 16 bp, Artificial
  oligonucleotide probe
gcgagtggcagggcct

SEQ ID NO: 24434 - DNA, 16 bp, Artificial
  oligonucleotide probe
gacggcgagtgggcag

SEQ ID NO: 24435 - DNA, 16 bp, Artificial
  oligonucleotide probe
acgcgcctgacgcctc

SEQ ID NO: 24436 - DNA, 16 bp, Artificial
  oligonucleotide probe
acgcgagcgggtgcag

SEQ ID NO: 24437 - DNA, 16 bp, Artificial
  oligonucleotide probe
gcgatggccaggtggc

SEQ ID NO: 24438 - DNA, 16 bp, Artificial
  oligonucleotide probe
gacggggtcggacgag

SEQ ID NO: 24439 - DNA, 16 bp, Artificial
  oligonucleotide probe
gtggcaggagcgacgc

SEQ ID NO: 24440 - DNA, 16 bp, Artificial
  oligonucleotide probe
gcgaagcggcgaggtc

SEQ ID NO: 24441 - DNA, 16 bp, Artificial
  oligonucleotide probe
agcgagcggtggacgc

SEQ ID NO: 24442 - DNA, 16 bp, Artificial
  oligonucleotide probe
agcgagcggtggacgc

SEQ ID NO: 24443 - DNA, 16 bp, Artificial
  oligonucleotide probe
tggcgggtgacggtgg

SEQ ID NO: 24444 - DNA, 16 bp, Artificial
  oligonucleotide probe
tggcggtcgcctcgag

SEQ ID NO: 24445 - DNA, 16 bp, Artificial
  oligonucleotide probe
agcgagcggtggacgc

SEQ ID NO: 24446 - DNA, 16 bp, Artificial
  oligonucleotide probe
accacggaagcgcgga

SEQ ID NO: 24447 - DNA, 16 bp, Artificial
  oligonucleotide probe
tggcacgcgagccagg

SEQ ID NO: 24448 - DNA, 16 bp, Artificial
  oligonucleotide probe
gacggggtcggacgag

SEQ ID NO: 24449 - DNA, 16 bp, Artificial
  oligonucleotide probe
gtggcaggagcgacgc

SEQ ID NO: 24450 - DNA, 16 bp, Artificial
  oligonucleotide probe
ggtccggagcagacgc

SEQ ID NO: 24451 - DNA, 16 bp, Artificial
  oligonucleotide probe
gcctgcgagagctggc

SEQ ID NO: 24452 - DNA, 16 bp, Artificial
  oligonucleotide probe
tggccaggcggagtgg

SEQ ID NO: 24453 - DNA, 16 bp, Artificial
  oligonucleotide probe
gcgagtggcagggcct

SEQ ID NO: 24454 - DNA, 16 bp, Artificial
  oligonucleotide probe
gggtggaacgaggcga

SEQ ID NO: 24455 - DNA, 16 bp, Artificial
  oligonucleotide probe
caggagcgggaagcga

SEQ ID NO: 24456 - DNA, 16 bp, Artificial
  oligonucleotide probe
tggcagcgggtcgtgg

SEQ ID NO: 24457 - DNA, 16 bp, Artificial
  oligonucleotide probe
gcctgggtcaccacgc

SEQ ID NO: 24458 - DNA, 16 bp, Artificial
  oligonucleotide probe
caggagcgggaagcga

SEQ ID NO: 24459 - DNA, 16 bp, Artificial
  oligonucleotide probe
tggccaggcggagtgg

SEQ ID NO: 24460 - DNA, 16 bp, Artificial
  oligonucleotide probe
gacggcgagtgggcag

SEQ ID NO: 24461 - DNA, 16 bp, Artificial
  oligonucleotide probe
acgcgcctgacgcctc

SEQ ID NO: 24462 - DNA, 16 bp, Artificial
  oligonucleotide probe
gcagcggagcctgagc

SEQ ID NO: 24463 - DNA, 16 bp, Artificial
  oligonucleotide probe
acgcaccagtcccgga

SEQ ID NO: 24464 - DNA, 16 bp, Artificial
  oligonucleotide probe
acgcgagcgggtgcag

SEQ ID NO: 24465 - DNA, 16 bp, Artificial
  oligonucleotide probe
gcgatggccaggtggc

SEQ ID NO: 24466 - DNA, 16 bp, Artificial
  oligonucleotide probe
gcagcctctggccgag

SEQ ID NO: 24467 - DNA, 16 bp, Artificial
  oligonucleotide probe
gcagcaccagcgtggc

SEQ ID NO: 24468 - DNA, 16 bp, Artificial
  oligonucleotide probe
gagcggtctggcggaa

SEQ ID NO: 24469 - DNA, 16 bp, Artificial
  oligonucleotide probe
tggcacgcgagccagg

SEQ ID NO: 24470 - DNA, 16 bp, Artificial
  oligonucleotide probe
ccaaagcgggaatggc

SEQ ID NO: 24471 - DNA, 16 bp, Artificial
  oligonucleotide probe
cctccgaggacgcgga

SEQ ID NO: 24472 - DNA, 16 bp, Artificial
  oligonucleotide probe
gacgcaggcggagggt

SEQ ID NO: 24473 - DNA, 16 bp, Artificial
  oligonucleotide probe
acgcggtccaccgtgg

SEQ ID NO: 24474 - DNA, 16 bp, Artificial
  oligonucleotide probe
gagcgcgacacccagg

SEQ ID NO: 24475 - DNA, 16 bp, Artificial
  oligonucleotide probe
cggacaggacgctggc

SEQ ID NO: 24476 - DNA, 16 bp, Artificial
  oligonucleotide probe
agcgagcggtggacgc

SEQ ID NO: 24477 - DNA, 16 bp, Artificial
  oligonucleotide probe
tggcgggtgacggtgg

SEQ ID NO: 24478 - DNA, 16 bp, Artificial
  oligonucleotide probe
gagcgcctcctcgagc

SEQ ID NO: 24479 - DNA, 16 bp, Artificial
  oligonucleotide probe
agcgccaatcacgggt

SEQ ID NO: 24480 - DNA, 16 bp, Artificial
  oligonucleotide probe
acgccaggcgaggtgg

SEQ ID NO: 24481 - DNA, 16 bp, Artificial
  oligonucleotide probe
caggggaagggtcgga

SEQ ID NO: 24482 - DNA, 16 bp, Artificial
  oligonucleotide probe
agcgagcggtggacgc

SEQ ID NO: 24483 - DNA, 16 bp, Artificial
  oligonucleotide probe
tggcgggtgacggtgg

SEQ ID NO: 24484 - DNA, 16 bp, Artificial
  oligonucleotide probe
caggagcgggaagcga

SEQ ID NO: 24485 - DNA, 16 bp, Artificial
  oligonucleotide probe
tggccaggcggagtgg

SEQ ID NO: 24486 - DNA, 16 bp, Artificial
  oligonucleotide probe
tcacgccttggccacc

SEQ ID NO: 24487 - DNA, 16 bp, Artificial
  oligonucleotide probe
caccgcgaggtcacgc

SEQ ID NO: 24488 - DNA, 16 bp, Artificial
  oligonucleotide probe
ccaaagcgggaatggc

SEQ ID NO: 24489 - DNA, 16 bp, Artificial
  oligonucleotide probe
ggtccggagcagacgc

SEQ ID NO: 24490 - DNA, 16 bp, Artificial
  oligonucleotide probe
gtccgagcagcggcct

SEQ ID NO: 24491 - DNA, 16 bp, Artificial
  oligonucleotide probe
caggagcgggaagcga

SEQ ID NO: 24492 - DNA, 16 bp, Artificial
  oligonucleotide probe
gggttggccgagtggc

SEQ ID NO: 24493 - DNA, 16 bp, Artificial
  oligonucleotide probe
tggcgggtgacggtgg

SEQ ID NO: 24494 - DNA, 16 bp, Artificial
  oligonucleotide probe
gcagcggagcctgagc

SEQ ID NO: 24495 - DNA, 16 bp, Artificial
  oligonucleotide probe
acgcaccagtcccgga

SEQ ID NO: 24496 - DNA, 16 bp, Artificial
  oligonucleotide probe
gcgacgagcgagccaa

SEQ ID NO: 24497 - DNA, 16 bp, Artificial
  oligonucleotide probe
acgcgggtcaccgtcc

SEQ ID NO: 24498 - DNA, 16 bp, Artificial
  oligonucleotide probe
cctctggctggcccaa

SEQ ID NO: 24499 - DNA, 16 bp, Artificial
  oligonucleotide probe
gcgacgagcgagccaa

SEQ ID NO: 24500 - DNA, 16 bp, Artificial
  oligonucleotide probe
caggagcgggaagcga

SEQ ID NO: 24501 - DNA, 16 bp, Artificial
  oligonucleotide probe
tggccaggcggagtgg

SEQ ID NO: 24502 - DNA, 16 bp, Artificial
  oligonucleotide probe
gcaggtggtggcgagc

SEQ ID NO: 24503 - DNA, 16 bp, Artificial
  oligonucleotide probe
gcgagtggcagggcct

SEQ ID NO: 24504 - DNA, 16 bp, Artificial
  oligonucleotide probe
gcagcctctggccgag

SEQ ID NO: 24505 - DNA, 16 bp, Artificial
  oligonucleotide probe
gcagcaccagcgtggc

SEQ ID NO: 24506 - DNA, 16 bp, Artificial
  oligonucleotide probe
cctcagcgcggaacca

SEQ ID NO: 24507 - DNA, 16 bp, Artificial
  oligonucleotide probe
acgcgagcgggtgcag

SEQ ID NO: 24508 - DNA, 16 bp, Artificial
  oligonucleotide probe
tcacgccttggccacc

SEQ ID NO: 24509 - DNA, 16 bp, Artificial
  oligonucleotide probe
caccgcgaggtcacgc

SEQ ID NO: 24510 - DNA, 16 bp, Artificial
  oligonucleotide probe
acgcgggtcaccgtcc

SEQ ID NO: 24511 - DNA, 16 bp, Artificial
  oligonucleotide probe
gcaggtggtggcgagc

SEQ ID NO: 24512 - DNA, 16 bp, Artificial
  oligonucleotide probe
accacggaagcgcgga

SEQ ID NO: 24513 - DNA, 16 bp, Artificial
  oligonucleotide probe
gtgggacgacgcgcga

SEQ ID NO: 24514 - DNA, 16 bp, Artificial
  oligonucleotide probe
cctcagcgcggaacca

SEQ ID NO: 24515 - DNA, 16 bp, Artificial
  oligonucleotide probe
gacggacgacgcgtgg

SEQ ID NO: 24516 - DNA, 16 bp, Artificial
  oligonucleotide probe
gcgatggccaggtggc

SEQ ID NO: 24517 - DNA, 16 bp, Artificial
  oligonucleotide probe
gcgagtggcagggcct

SEQ ID NO: 24518 - DNA, 16 bp, Artificial
  oligonucleotide probe
caggagcgggaagcga

SEQ ID NO: 24519 - DNA, 16 bp, Artificial
  oligonucleotide probe
tggccaggcggagtgg

SEQ ID NO: 24520 - DNA, 16 bp, Artificial
  oligonucleotide probe
accacggaagcgcgga

SEQ ID NO: 24521 - DNA, 16 bp, Artificial
  oligonucleotide probe
gtgggacgacgcgcga

SEQ ID NO: 24522 - DNA, 16 bp, Artificial
  oligonucleotide probe
tggcacgcgagccagg

SEQ ID NO: 24523 - DNA, 16 bp, Artificial
  oligonucleotide probe
tggcggtcgcctcgag

SEQ ID NO: 24524 - DNA, 16 bp, Artificial
  oligonucleotide probe
cctcagcgcggaacca

SEQ ID NO: 24525 - DNA, 16 bp, Artificial
  oligonucleotide probe
acgcgagcgggtgcag

SEQ ID NO: 24526 - DNA, 16 bp, Artificial
  oligonucleotide probe
tggccaggcggagtgg

SEQ ID NO: 24527 - DNA, 16 bp, Artificial
  oligonucleotide probe
gacggacgacgcgtgg

SEQ ID NO: 24528 - DNA, 16 bp, Artificial
  oligonucleotide probe
ccaaagcgggaatggc

SEQ ID NO: 24529 - DNA, 16 bp, Artificial
  oligonucleotide probe
gcagcctctggccgag

SEQ ID NO: 24530 - DNA, 16 bp, Artificial
  oligonucleotide probe
ggaaagcggcctggaa

SEQ ID NO: 24531 - DNA, 16 bp, Artificial
  oligonucleotide probe
gagcggtctggcggaa

SEQ ID NO: 24532 - DNA, 16 bp, Artificial
  oligonucleotide probe
caccgacgggaaacgc

SEQ ID NO: 24533 - DNA, 16 bp, Artificial
  oligonucleotide probe
gtccggaagtgggcga

SEQ ID NO: 24534 - DNA, 16 bp, Artificial
  oligonucleotide probe
tggccaggcggagtgg

SEQ ID NO: 24535 - DNA, 16 bp, Artificial
  oligonucleotide probe
gcctgtgggtccgcga

SEQ ID NO: 24536 - DNA, 16 bp, Artificial
  oligonucleotide probe
cctctggctggcccaa

SEQ ID NO: 24537 - DNA, 16 bp, Artificial
  oligonucleotide probe
gcgacgagcgagccaa

SEQ ID NO: 24538 - DNA, 16 bp, Artificial
  oligonucleotide probe
caggcacccaggcgga

SEQ ID NO: 24539 - DNA, 16 bp, Artificial
  oligonucleotide probe
gcgaagcggcgaggtc

SEQ ID NO: 24540 - DNA, 16 bp, Artificial
  oligonucleotide probe
gcaggtggtggcgagc

SEQ ID NO: 24541 - DNA, 16 bp, Artificial
  oligonucleotide probe
tggccaggcggagtgg

SEQ ID NO: 24542 - DNA, 16 bp, Artificial
  oligonucleotide probe
gcctgtgggtccgcga

SEQ ID NO: 24543 - DNA, 16 bp, Artificial
  oligonucleotide probe
gacggggtcggacgag

SEQ ID NO: 24544 - DNA, 16 bp, Artificial
  oligonucleotide probe
acgcgagcgggtgcag

SEQ ID NO: 24545 - DNA, 16 bp, Artificial
  oligonucleotide probe
gcgatggccaggtggc

SEQ ID NO: 24546 - DNA, 16 bp, Artificial
  oligonucleotide probe
gtggcggaggtcggaa

SEQ ID NO: 24547 - DNA, 16 bp, Artificial
  oligonucleotide probe
cctctggctggcccaa

SEQ ID NO: 24548 - DNA, 16 bp, Artificial
  oligonucleotide probe
gagcgcctcctcgagc

SEQ ID NO: 24549 - DNA, 16 bp, Artificial
  oligonucleotide probe
agcgccaatcacgggt

SEQ ID NO: 24550 - DNA, 16 bp, Artificial
  oligonucleotide probe
caccgagccacccgga

SEQ ID NO: 24551 - DNA, 16 bp, Artificial
  oligonucleotide probe
caggcacccaggcgga

SEQ ID NO: 24552 - DNA, 16 bp, Artificial
  oligonucleotide probe
gtgggacgacgcgcga

SEQ ID NO: 24553 - DNA, 16 bp, Artificial
  oligonucleotide probe
cctccgaggacgcgga

SEQ ID NO: 24554 - DNA, 16 bp, Artificial
  oligonucleotide probe
gggtggaacgaggcga

SEQ ID NO: 24555 - DNA, 16 bp, Artificial
  oligonucleotide probe
gcaggtggtggcgagc

SEQ ID NO: 24556 - DNA, 16 bp, Artificial
  oligonucleotide probe
gagcgcctcctcgagc

SEQ ID NO: 24557 - DNA, 16 bp, Artificial
  oligonucleotide probe
agcgccaatcacgggt

SEQ ID NO: 24558 - DNA, 16 bp, Artificial
  oligonucleotide probe
gacggggtcggacgag

SEQ ID NO: 24559 - DNA, 16 bp, Artificial
  oligonucleotide probe
accacggaagcgcgga

SEQ ID NO: 24560 - DNA, 16 bp, Artificial
  oligonucleotide probe
gtgggacgacgcgcga

SEQ ID NO: 24561 - DNA, 16 bp, Artificial
  oligonucleotide probe
cctccgaggacgcgga

SEQ ID NO: 24562 - DNA, 16 bp, Artificial
  oligonucleotide probe
gggtggaacgaggcga

SEQ ID NO: 24563 - DNA, 16 bp, Artificial
  oligonucleotide probe
caggagcgggaagcga

SEQ ID NO: 24564 - DNA, 16 bp, Artificial
  oligonucleotide probe
gggttggccgagtggc

SEQ ID NO: 24565 - DNA, 16 bp, Artificial
  oligonucleotide probe
accatggcacgcgacg

SEQ ID NO: 24566 - DNA, 16 bp, Artificial
  oligonucleotide probe
cctctggctggcccaa

SEQ ID NO: 24567 - DNA, 16 bp, Artificial
  oligonucleotide probe
gcgacgagcgagccaa

SEQ ID NO: 24568 - DNA, 16 bp, Artificial
  oligonucleotide probe
cctcagcgcggaacca

SEQ ID NO: 24569 - DNA, 16 bp, Artificial
  oligonucleotide probe
gacggacgacgcgtgg

SEQ ID NO: 24570 - DNA, 16 bp, Artificial
  oligonucleotide probe
tgctgggtgcaggcga

SEQ ID NO: 24571 - DNA, 16 bp, Artificial
  oligonucleotide probe
agcggtccgcgagagc

SEQ ID NO: 24572 - DNA, 16 bp, Artificial
  oligonucleotide probe
accacggaagcgcgga

SEQ ID NO: 24573 - DNA, 16 bp, Artificial
  oligonucleotide probe
gtgggacgacgcgcga

SEQ ID NO: 24574 - DNA, 16 bp, Artificial
  oligonucleotide probe
caccgagccacccgga

SEQ ID NO: 24575 - DNA, 16 bp, Artificial
  oligonucleotide probe
tggcacgcgagccagg

SEQ ID NO: 24576 - DNA, 16 bp, Artificial
  oligonucleotide probe
caccgagccacccgga

SEQ ID NO: 24577 - DNA, 16 bp, Artificial
  oligonucleotide probe
caggcacccaggcgga

SEQ ID NO: 24578 - DNA, 16 bp, Artificial
  oligonucleotide probe
acgcgagcgggtgcag

SEQ ID NO: 24579 - DNA, 16 bp, Artificial
  oligonucleotide probe
gcgatggccaggtggc

SEQ ID NO: 24580 - DNA, 16 bp, Artificial
  oligonucleotide probe
caccgggtggtcagcg

SEQ ID NO: 24581 - DNA, 16 bp, Artificial
  oligonucleotide probe
ggtcgacgacgccgag

SEQ ID NO: 24582 - DNA, 16 bp, Artificial
  oligonucleotide probe
gggttggccgagtggc

SEQ ID NO: 24583 - DNA, 16 bp, Artificial
  oligonucleotide probe
tggcgggtgacggtgg

SEQ ID NO: 24584 - DNA, 16 bp, Artificial
  oligonucleotide probe
ggaaagcggcctggaa

SEQ ID NO: 24585 - DNA, 16 bp, Artificial
  oligonucleotide probe
gagcggtctggcggaa

SEQ ID NO: 24586 - DNA, 16 bp, Artificial
  oligonucleotide probe
acgcgagcgggtgcag

SEQ ID NO: 24587 - DNA, 16 bp, Artificial
  oligonucleotide probe
gcgatggccaggtggc

SEQ ID NO: 24588 - DNA, 16 bp, Artificial
  oligonucleotide probe
gtggcggaggtcggaa

SEQ ID NO: 24589 - DNA, 16 bp, Artificial
  oligonucleotide probe
cctctggctggcccaa

SEQ ID NO: 24590 - DNA, 16 bp, Artificial
  oligonucleotide probe
tggcagcgggtcgtgg

SEQ ID NO: 24591 - DNA, 16 bp, Artificial
  oligonucleotide probe
gcctgggtcaccacgc

SEQ ID NO: 24592 - DNA, 16 bp, Artificial
  oligonucleotide probe
agcgccaatcacgggt

SEQ ID NO: 24593 - DNA, 16 bp, Artificial
  oligonucleotide probe
acgcgggtcaccgtcc

SEQ ID NO: 24594 - DNA, 16 bp, Artificial
  oligonucleotide probe
tgctgggtgcaggcga

SEQ ID NO: 24595 - DNA, 16 bp, Artificial
  oligonucleotide probe
agcggtccgcgagagc

SEQ ID NO: 24596 - DNA, 16 bp, Artificial
  oligonucleotide probe
agcgccaatcacgggt

SEQ ID NO: 24597 - DNA, 16 bp, Artificial
  oligonucleotide probe
acgcgggtcaccgtcc

SEQ ID NO: 24598 - DNA, 16 bp, Artificial
  oligonucleotide probe
agcggtccgcgagagc

SEQ ID NO: 24599 - DNA, 16 bp, Artificial
  oligonucleotide probe
acgcggaagacgtggc

SEQ ID NO: 24600 - DNA, 16 bp, Artificial
  oligonucleotide probe
tggcacgcgagccagg

SEQ ID NO: 24601 - DNA, 16 bp, Artificial
  oligonucleotide probe
tggcggtcgcctcgag

SEQ ID NO: 24602 - DNA, 16 bp, Artificial
  oligonucleotide probe
agcgagcggtggacgc

SEQ ID NO: 24603 - DNA, 16 bp, Artificial
  oligonucleotide probe
tggcgggtgacggtgg

SEQ ID NO: 24604 - DNA, 16 bp, Artificial
  oligonucleotide probe
gcaggtggtggcgagc

SEQ ID NO: 24605 - DNA, 16 bp, Artificial
  oligonucleotide probe
tggccaggcggagtgg

SEQ ID NO: 24606 - DNA, 16 bp, Artificial
  oligonucleotide probe
agcggtccgcgagagc

SEQ ID NO: 24607 - DNA, 16 bp, Artificial
  oligonucleotide probe
acgcggaagacgtggc

SEQ ID NO: 24608 - DNA, 16 bp, Artificial
  oligonucleotide probe
gggttggccgagtggc

SEQ ID NO: 24609 - DNA, 16 bp, Artificial
  oligonucleotide probe
gcctgtgggtccgcga

SEQ ID NO: 24610 - DNA, 16 bp, Artificial
  oligonucleotide probe
tggcagcgggtcgtgg

SEQ ID NO: 24611 - DNA, 16 bp, Artificial
  oligonucleotide probe
gcagcctctggccgag

SEQ ID NO: 24612 - DNA, 16 bp, Artificial
  oligonucleotide probe
tcacgccttggccacc

SEQ ID NO: 24613 - DNA, 16 bp, Artificial
  oligonucleotide probe
caccgcgaggtcacgc

SEQ ID NO: 24614 - DNA, 16 bp, Artificial
  oligonucleotide probe
gagcgcctcctcgagc

SEQ ID NO: 24615 - DNA, 16 bp, Artificial
  oligonucleotide probe
caccgagccacccgga

SEQ ID NO: 24616 - DNA, 16 bp, Artificial
  oligonucleotide probe
gcctgcgagagctggc

SEQ ID NO: 24617 - DNA, 16 bp, Artificial
  oligonucleotide probe
gcgagtggcagggcct

SEQ ID NO: 24618 - DNA, 16 bp, Artificial
  oligonucleotide probe
cggagcaggagcggaa

SEQ ID NO: 24619 - DNA, 16 bp, Artificial
  oligonucleotide probe
ggtcgcctgtccagcg

SEQ ID NO: 24620 - DNA, 16 bp, Artificial
  oligonucleotide probe
gagcgagcagcgggtc

SEQ ID NO: 24621 - DNA, 16 bp, Artificial
  oligonucleotide probe
acgccctcaccagcga

SEQ ID NO: 24622 - DNA, 16 bp, Artificial
  oligonucleotide probe
gcgacagggcctgcct

SEQ ID NO: 24623 - DNA, 16 bp, Artificial
  oligonucleotide probe
agcggcgagagcgtcc

SEQ ID NO: 24624 - DNA, 16 bp, Artificial
  oligonucleotide probe
gcgacagggcctgcct

SEQ ID NO: 24625 - DNA, 16 bp, Artificial
  oligonucleotide probe
agcggcgagagcgtcc

SEQ ID NO: 24626 - DNA, 16 bp, Artificial
  oligonucleotide probe
cgagcaccgagccgga

SEQ ID NO: 24627 - DNA, 16 bp, Artificial
  oligonucleotide probe
cctccggacctcacgc

SEQ ID NO: 24628 - DNA, 16 bp, Artificial
  oligonucleotide probe
cgagcaccgagccgga

SEQ ID NO: 24629 - DNA, 16 bp, Artificial
  oligonucleotide probe
cctccggacctcacgc

SEQ ID NO: 24630 - DNA, 16 bp, Artificial
  oligonucleotide probe
gacgcaccagcgcgag

SEQ ID NO: 24631 - DNA, 16 bp, Artificial
  oligonucleotide probe
tggcaccagcaggggt

SEQ ID NO: 24632 - DNA, 16 bp, Artificial
  oligonucleotide probe
cagggtgggcgagcga

SEQ ID NO: 24633 - DNA, 16 bp, Artificial
  oligonucleotide probe
acgcccaacagggagc

SEQ ID NO: 24634 - DNA, 16 bp, Artificial
  oligonucleotide probe
gagcgagcagcgggtc

SEQ ID NO: 24635 - DNA, 16 bp, Artificial
  oligonucleotide probe
acgccctcaccagcga

SEQ ID NO: 24636 - DNA, 16 bp, Artificial
  oligonucleotide probe
acgcagcggggtgacg

SEQ ID NO: 24637 - DNA, 16 bp, Artificial
  oligonucleotide probe
caccgcctcagggacg

SEQ ID NO: 24638 - DNA, 16 bp, Artificial
  oligonucleotide probe
cgagcaccgagccgga

SEQ ID NO: 24639 - DNA, 16 bp, Artificial
  oligonucleotide probe
cctccggacctcacgc

SEQ ID NO: 24640 - DNA, 16 bp, Artificial
  oligonucleotide probe
gacgcaccagcgcgag

SEQ ID NO: 24641 - DNA, 16 bp, Artificial
  oligonucleotide probe
tggcaccagcaggggt

SEQ ID NO: 24642 - DNA, 16 bp, Artificial
  oligonucleotide probe
agcggcgagagcgtcc

SEQ ID NO: 24643 - DNA, 16 bp, Artificial
  oligonucleotide probe
gacgcaccagcgcgag

SEQ ID NO: 24644 - DNA, 16 bp, Artificial
  oligonucleotide probe
gacgcaccagcgcgag

SEQ ID NO: 24645 - DNA, 16 bp, Artificial
  oligonucleotide probe
tggcaccagcaggggt

SEQ ID NO: 24646 - DNA, 16 bp, Artificial
  oligonucleotide probe
tgctcggatgctgcga

SEQ ID NO: 24647 - DNA, 16 bp, Artificial
  oligonucleotide probe
gagcgcagccaagcct

SEQ ID NO: 24648 - DNA, 16 bp, Artificial
  oligonucleotide probe
tggcgcctgtccgtgg

SEQ ID NO: 24649 - DNA, 16 bp, Artificial
  oligonucleotide probe
gtggcgagcctcgggt

SEQ ID NO: 24650 - DNA, 16 bp, Artificial
  oligonucleotide probe
gtgggggtgcagggaa

SEQ ID NO: 24651 - DNA, 16 bp, Artificial
  oligonucleotide probe
ggtcgcaggcgagggt

SEQ ID NO: 24652 - DNA, 16 bp, Artificial
  oligonucleotide probe
tggcgcctgtccgtgg

SEQ ID NO: 24653 - DNA, 16 bp, Artificial
  oligonucleotide probe
gtggcgagcctcgggt

SEQ ID NO: 24654 - DNA, 16 bp, Artificial
  oligonucleotide probe
cacccgagagcggtgg

SEQ ID NO: 24655 - DNA, 16 bp, Artificial
  oligonucleotide probe
gcgagtcccggaagcg

SEQ ID NO: 24656 - DNA, 16 bp, Artificial
  oligonucleotide probe
gcaggacggacggcct

SEQ ID NO: 24657 - DNA, 16 bp, Artificial
  oligonucleotide probe
gcgacctcacgcgcag

SEQ ID NO: 24658 - DNA, 16 bp, Artificial
  oligonucleotide probe
gcgacagggcctgcct

SEQ ID NO: 24659 - DNA, 16 bp, Artificial
  oligonucleotide probe
agcggcgagagcgtcc

SEQ ID NO: 24660 - DNA, 16 bp, Artificial
  oligonucleotide probe
gcgacagggcctgcct

SEQ ID NO: 24661 - DNA, 16 bp, Artificial
  oligonucleotide probe
agcggcgagagcgtcc

SEQ ID NO: 24662 - DNA, 16 bp, Artificial
  oligonucleotide probe
tggcgcctgtccgtgg

SEQ ID NO: 24663 - DNA, 16 bp, Artificial
  oligonucleotide probe
gtggcgagcctcgggt

SEQ ID NO: 24664 - DNA, 16 bp, Artificial
  oligonucleotide probe
gtgggggtgcagggaa

SEQ ID NO: 24665 - DNA, 16 bp, Artificial
  oligonucleotide probe
ggtcgcaggcgagggt

SEQ ID NO: 24666 - DNA, 16 bp, Artificial
  oligonucleotide probe
gtggccaatcacgcga

SEQ ID NO: 24667 - DNA, 16 bp, Artificial
  oligonucleotide probe
agcgcaccgacgacgc

SEQ ID NO: 24668 - DNA, 16 bp, Artificial
  oligonucleotide probe
gacgcaccagcgcgag

SEQ ID NO: 24669 - DNA, 16 bp, Artificial
  oligonucleotide probe
tggcaccagcaggggt

SEQ ID NO: 24670 - DNA, 16 bp, Artificial
  oligonucleotide probe
cagggtgggcgagcga

SEQ ID NO: 24671 - DNA, 16 bp, Artificial
  oligonucleotide probe
acgcccaacagggagc

SEQ ID NO: 24672 - DNA, 16 bp, Artificial
  oligonucleotide probe
tggcgcctgtccgtgg

SEQ ID NO: 24673 - DNA, 16 bp, Artificial
  oligonucleotide probe
gtggcgagcctcgggt

SEQ ID NO: 24674 - DNA, 16 bp, Artificial
  oligonucleotide probe
caggacgctggccctc

SEQ ID NO: 24675 - DNA, 16 bp, Artificial
  oligonucleotide probe
cctcgtggcggacgga

SEQ ID NO: 24676 - DNA, 16 bp, Artificial
  oligonucleotide probe
cagggtgggcgagcga

SEQ ID NO: 24677 - DNA, 16 bp, Artificial
  oligonucleotide probe
acgcccaacagggagc

SEQ ID NO: 24678 - DNA, 16 bp, Artificial
  oligonucleotide probe
tggcgcctgtccgtgg

SEQ ID NO: 24679 - DNA, 16 bp, Artificial
  oligonucleotide probe
gtggcgagcctcgggt

SEQ ID NO: 24680 - DNA, 16 bp, Artificial
  oligonucleotide probe
gtgggggtgcagggaa

SEQ ID NO: 24681 - DNA, 16 bp, Artificial
  oligonucleotide probe
ggtcgcaggcgagggt

SEQ ID NO: 24682 - DNA, 16 bp, Artificial
  oligonucleotide probe
tggcgcctgtccgtgg

SEQ ID NO: 24683 - DNA, 16 bp, Artificial
  oligonucleotide probe
gtggcgagcctcgggt

SEQ ID NO: 24684 - DNA, 16 bp, Artificial
  oligonucleotide probe
gcgacagggcctgcct

SEQ ID NO: 24685 - DNA, 16 bp, Artificial
  oligonucleotide probe
agcggcgagagcgtcc

SEQ ID NO: 24686 - DNA, 16 bp, Artificial
  oligonucleotide probe
tggcgcctgtccgtgg

SEQ ID NO: 24687 - DNA, 16 bp, Artificial
  oligonucleotide probe
gtggcgagcctcgggt

SEQ ID NO: 24688 - DNA, 16 bp, Artificial
  oligonucleotide probe
gtgggggtgcagggaa

SEQ ID NO: 24689 - DNA, 16 bp, Artificial
  oligonucleotide probe
ggtcgcaggcgagggt

SEQ ID NO: 24690 - DNA, 16 bp, Artificial
  oligonucleotide probe
tggcgcctgtccgtgg

SEQ ID NO: 24691 - DNA, 16 bp, Artificial
  oligonucleotide probe
gtggcgagcctcgggt

SEQ ID NO: 24692 - DNA, 16 bp, Artificial
  oligonucleotide probe
tggcgcctgtccgtgg

SEQ ID NO: 24693 - DNA, 16 bp, Artificial
  oligonucleotide probe
gtggcgagcctcgggt

SEQ ID NO: 24694 - DNA, 16 bp, Artificial
  oligonucleotide probe
gacgcaccagcgcgag

SEQ ID NO: 24695 - DNA, 16 bp, Artificial
  oligonucleotide probe
tggcaccagcaggggt

SEQ ID NO: 24696 - DNA, 16 bp, Artificial
  oligonucleotide probe
gacgcaccagcgcgag

SEQ ID NO: 24697 - DNA, 16 bp, Artificial
  oligonucleotide probe
tggcaccagcaggggt

SEQ ID NO: 24698 - DNA, 16 bp, Artificial
  oligonucleotide probe
gtgggggtgcagggaa

SEQ ID NO: 24699 - DNA, 16 bp, Artificial
  oligonucleotide probe
ggtcgcaggcgagggt

SEQ ID NO: 24700 - DNA, 16 bp, Artificial
  oligonucleotide probe
caggacgctggccctc

SEQ ID NO: 24701 - DNA, 16 bp, Artificial
  oligonucleotide probe
cctcgtggcggacgga

SEQ ID NO: 24702 - DNA, 16 bp, Artificial
  oligonucleotide probe
caggacgctggccctc

SEQ ID NO: 24703 - DNA, 16 bp, Artificial
  oligonucleotide probe
cctcgtggcggacgga

SEQ ID NO: 24704 - DNA, 16 bp, Artificial
  oligonucleotide probe
gtccgggtcaggcagg

SEQ ID NO: 24705 - DNA, 16 bp, Artificial
  oligonucleotide probe
cggagagcgcgagcct

SEQ ID NO: 24706 - DNA, 16 bp, Artificial
  oligonucleotide probe
gagcgagcagcgggtc

SEQ ID NO: 24707 - DNA, 16 bp, Artificial
  oligonucleotide probe
acgccctcaccagcga

SEQ ID NO: 24708 - DNA, 16 bp, Artificial
  oligonucleotide probe
gcgacagggcctgcct

SEQ ID NO: 24709 - DNA, 16 bp, Artificial
  oligonucleotide probe
agcggcgagagcgtcc

SEQ ID NO: 24710 - DNA, 16 bp, Artificial
  oligonucleotide probe
gcgacagggcctgcct

SEQ ID NO: 24711 - DNA, 16 bp, Artificial
  oligonucleotide probe
agcggcgagagcgtcc

SEQ ID NO: 24712 - DNA, 16 bp, Artificial
  oligonucleotide probe
cggagcaggagcggaa

SEQ ID NO: 24713 - DNA, 16 bp, Artificial
  oligonucleotide probe
ggtcgcctgtccagcg

SEQ ID NO: 24714 - DNA, 16 bp, Artificial
  oligonucleotide probe
cacccgagagcggtgg

SEQ ID NO: 24715 - DNA, 16 bp, Artificial
  oligonucleotide probe
gcgagtcccggaagcg

SEQ ID NO: 24716 - DNA, 16 bp, Artificial
  oligonucleotide probe
gtgggggtgcagggaa

SEQ ID NO: 24717 - DNA, 16 bp, Artificial
  oligonucleotide probe
ggtcgcaggcgagggt

SEQ ID NO: 24718 - DNA, 16 bp, Artificial
  oligonucleotide probe
cacccgagagcggtgg

SEQ ID NO: 24719 - DNA, 16 bp, Artificial
  oligonucleotide probe
gcgagtcccggaagcg

SEQ ID NO: 24720 - DNA, 16 bp, Artificial
  oligonucleotide probe
gacgcaccagcgcgag

SEQ ID NO: 24721 - DNA, 16 bp, Artificial
  oligonucleotide probe
tggcaccagcaggggt

SEQ ID NO: 24722 - DNA, 16 bp, Artificial
  oligonucleotide probe
cacccgagagcggtgg

SEQ ID NO: 24723 - DNA, 16 bp, Artificial
  oligonucleotide probe
gcgagtcccggaagcg

SEQ ID NO: 24724 - DNA, 16 bp, Artificial
  oligonucleotide probe
gcgacagggcctgcct

SEQ ID NO: 24725 - DNA, 16 bp, Artificial
  oligonucleotide probe
agcggcgagagcgtcc

SEQ ID NO: 24726 - DNA, 16 bp, Artificial
  oligonucleotide probe
gagcgagcagcgggtc

SEQ ID NO: 24727 - DNA, 16 bp, Artificial
  oligonucleotide probe
acgccctcaccagcga

SEQ ID NO: 24728 - DNA, 16 bp, Artificial
  oligonucleotide probe
tggcgcctgtccgtgg

SEQ ID NO: 24729 - DNA, 16 bp, Artificial
  oligonucleotide probe
gtggcgagcctcgggt

SEQ ID NO: 24730 - DNA, 16 bp, Artificial
  oligonucleotide probe
gagcgagcagcgggtc

SEQ ID NO: 24731 - DNA, 16 bp, Artificial
  oligonucleotide probe
acgccctcaccagcga

SEQ ID NO: 24732 - DNA, 16 bp, Artificial
  oligonucleotide probe
gcgacagggcctgcct

SEQ ID NO: 24733 - DNA, 16 bp, Artificial
  oligonucleotide probe
agcggcgagagcgtcc

SEQ ID NO: 24734 - DNA, 16 bp, Artificial
  oligonucleotide probe
gacgcaccagcgcgag

SEQ ID NO: 24735 - DNA, 16 bp, Artificial
  oligonucleotide probe
tggcaccagcaggggt

SEQ ID NO: 24736 - DNA, 16 bp, Artificial
  oligonucleotide probe
gcgacagggcctgcct

SEQ ID NO: 24737 - DNA, 16 bp, Artificial
  oligonucleotide probe
agcggcgagagcgtcc

SEQ ID NO: 24738 - DNA, 16 bp, Artificial
  oligonucleotide probe
cgagcaggcgaggcag

SEQ ID NO: 24739 - DNA, 16 bp, Artificial
  oligonucleotide probe
gcctcaggacgcacgc

SEQ ID NO: 24740 - DNA, 16 bp, Artificial
  oligonucleotide probe
gtggccaatcacgcga

SEQ ID NO: 24741 - DNA, 16 bp, Artificial
  oligonucleotide probe
agcgcaccgacgacgc

SEQ ID NO: 24742 - DNA, 16 bp, Artificial
  oligonucleotide probe
gcgacagggcctgcct

SEQ ID NO: 24743 - DNA, 16 bp, Artificial
  oligonucleotide probe
agcggcgagagcgtcc

SEQ ID NO: 24744 - DNA, 16 bp, Artificial
  oligonucleotide probe
tggcgcctgtccgtgg

SEQ ID NO: 24745 - DNA, 16 bp, Artificial
  oligonucleotide probe
gtggcgagcctcgggt

SEQ ID NO: 24746 - DNA, 16 bp, Artificial
  oligonucleotide probe
gtgggggtgcagggaa

SEQ ID NO: 24747 - DNA, 16 bp, Artificial
  oligonucleotide probe
ggtcgcaggcgagggt

SEQ ID NO: 24748 - DNA, 16 bp, Artificial
  oligonucleotide probe
tggcgcctgtccgtgg

SEQ ID NO: 24749 - DNA, 16 bp, Artificial
  oligonucleotide probe
gtggcgagcctcgggt

SEQ ID NO: 24750 - DNA, 16 bp, Artificial
  oligonucleotide probe
gtccgggtcaggcagg

SEQ ID NO: 24751 - DNA, 16 bp, Artificial
  oligonucleotide probe
cggagagcgcgagcct

SEQ ID NO: 24752 - DNA, 16 bp, Artificial
  oligonucleotide probe
cgagcaggcgaggcag

SEQ ID NO: 24753 - DNA, 16 bp, Artificial
  oligonucleotide probe
gcctcaggacgcacgc

SEQ ID NO: 24754 - DNA, 16 bp, Artificial
  oligonucleotide probe
gagcgagcagcgggtc

SEQ ID NO: 24755 - DNA, 16 bp, Artificial
  oligonucleotide probe
acgccctcaccagcga

SEQ ID NO: 24756 - DNA, 16 bp, Artificial
  oligonucleotide probe
cacccgagagcggtgg

SEQ ID NO: 24757 - DNA, 16 bp, Artificial
  oligonucleotide probe
gcgagtcccggaagcg

SEQ ID NO: 24758 - DNA, 16 bp, Artificial
  oligonucleotide probe
cggagcaggagcggaa

SEQ ID NO: 24759 - DNA, 16 bp, Artificial
  oligonucleotide probe
ggtcgcctgtccagcg

SEQ ID NO: 24760 - DNA, 16 bp, Artificial
  oligonucleotide probe
caggacgctggccctc

SEQ ID NO: 24761 - DNA, 16 bp, Artificial
  oligonucleotide probe
cctcgtggcggacgga

SEQ ID NO: 24762 - DNA, 16 bp, Artificial
  oligonucleotide probe
tggcgcctgtccgtgg

SEQ ID NO: 24763 - DNA, 16 bp, Artificial
  oligonucleotide probe
gtggcgagcctcgggt

SEQ ID NO: 24764 - DNA, 16 bp, Artificial
  oligonucleotide probe
gcgacagggcctgcct

SEQ ID NO: 24765 - DNA, 16 bp, Artificial
  oligonucleotide probe
agcggcgagagcgtcc

SEQ ID NO: 24766 - DNA, 16 bp, Artificial
  oligonucleotide probe
gtgggggtgcagggaa

SEQ ID NO: 24767 - DNA, 16 bp, Artificial
  oligonucleotide probe
ggtcgcaggcgagggt

SEQ ID NO: 24768 - DNA, 16 bp, Artificial
  oligonucleotide probe
cacccgagagcggtgg

SEQ ID NO: 24769 - DNA, 16 bp, Artificial
  oligonucleotide probe
gcgagtcccggaagcg

SEQ ID NO: 24770 - DNA, 16 bp, Artificial
  oligonucleotide probe
cgagcaggcgaggcag

SEQ ID NO: 24771 - DNA, 16 bp, Artificial
  oligonucleotide probe
gcctcaggacgcacgc

SEQ ID NO: 24772 - DNA, 16 bp, Artificial
  oligonucleotide probe
acgcagcggggtgacg

SEQ ID NO: 24773 - DNA, 16 bp, Artificial
  oligonucleotide probe
caccgcctcagggacg

SEQ ID NO: 24774 - DNA, 16 bp, Artificial
  oligonucleotide probe
gtggccaatcacgcga

SEQ ID NO: 24775 - DNA, 16 bp, Artificial
  oligonucleotide probe
agcgcaccgacgacgc

SEQ ID NO: 24776 - DNA, 16 bp, Artificial
  oligonucleotide probe
gcgacagggcctgcct

SEQ ID NO: 24777 - DNA, 16 bp, Artificial
  oligonucleotide probe
agcggcgagagcgtcc

SEQ ID NO: 24778 - DNA, 16 bp, Artificial
  oligonucleotide probe
gcgacagggcctgcct

SEQ ID NO: 24779 - DNA, 16 bp, Artificial
  oligonucleotide probe
agcggcgagagcgtcc

SEQ ID NO: 24780 - DNA, 16 bp, Artificial
  oligonucleotide probe
gacgcaccagcgcgag

SEQ ID NO: 24781 - DNA, 16 bp, Artificial
  oligonucleotide probe
tggcaccagcaggggt

SEQ ID NO: 24782 - DNA, 16 bp, Artificial
  oligonucleotide probe
tggcgcctgtccgtgg

SEQ ID NO: 24783 - DNA, 16 bp, Artificial
  oligonucleotide probe
gtggcgagcctcgggt

SEQ ID NO: 24784 - DNA, 16 bp, Artificial
  oligonucleotide probe
gagcgagcagcgggtc

SEQ ID NO: 24785 - DNA, 16 bp, Artificial
  oligonucleotide probe
acgccctcaccagcga

SEQ ID NO: 24786 - DNA, 16 bp, Artificial
  oligonucleotide probe
gagcgagcagcgggtc

SEQ ID NO: 24787 - DNA, 16 bp, Artificial
  oligonucleotide probe
acgccctcaccagcga

SEQ ID NO: 24788 - DNA, 16 bp, Artificial
  oligonucleotide probe
cgagcaccgagccgga

SEQ ID NO: 24789 - DNA, 16 bp, Artificial
  oligonucleotide probe
cctccggacctcacgc

SEQ ID NO: 24790 - DNA, 16 bp, Artificial
  oligonucleotide probe
gcgacagggcctgcct

SEQ ID NO: 24791 - DNA, 16 bp, Artificial
  oligonucleotide probe
agcggcgagagcgtcc

SEQ ID NO: 24792 - DNA, 16 bp, Artificial
  oligonucleotide probe
gacgcaccagcgcgag

SEQ ID NO: 24793 - DNA, 16 bp, Artificial
  oligonucleotide probe
tggcaccagcaggggt

SEQ ID NO: 24794 - DNA, 16 bp, Artificial
  oligonucleotide probe
cagggtgggcgagcga

SEQ ID NO: 24795 - DNA, 16 bp, Artificial
  oligonucleotide probe
acgcccaacagggagc

SEQ ID NO: 24796 - DNA, 16 bp, Artificial
  oligonucleotide probe
gacgcaccagcgcgag

SEQ ID NO: 24797 - DNA, 16 bp, Artificial
  oligonucleotide probe
tggcaccagcaggggt

SEQ ID NO: 24798 - DNA, 16 bp, Artificial
  oligonucleotide probe
cagggtgggcgagcga

SEQ ID NO: 24799 - DNA, 16 bp, Artificial
  oligonucleotide probe
acgcccaacagggagc

SEQ ID NO: 24800 - DNA, 16 bp, Artificial
  oligonucleotide probe
caggacgctggccctc

SEQ ID NO: 24801 - DNA, 16 bp, Artificial
  oligonucleotide probe
cctcgtggcggacgga

SEQ ID NO: 24802 - DNA, 16 bp, Artificial
  oligonucleotide probe
gacgcaccagcgcgag

SEQ ID NO: 24803 - DNA, 16 bp, Artificial
  oligonucleotide probe
tggcaccagcaggggt

SEQ ID NO: 24804 - DNA, 16 bp, Artificial
  oligonucleotide probe
gacgcaccagcgcgag

SEQ ID NO: 24805 - DNA, 16 bp, Artificial
  oligonucleotide probe
tggcaccagcaggggt

SEQ ID NO: 24806 - DNA, 16 bp, Artificial
  oligonucleotide probe
caccggtcagcggggt

SEQ ID NO: 24807 - DNA, 16 bp, Artificial
  oligonucleotide probe
actgcggacgaggcct

SEQ ID NO: 24808 - DNA, 16 bp, Artificial
  oligonucleotide probe
gacgcaccagcgcgag

SEQ ID NO: 24809 - DNA, 16 bp, Artificial
  oligonucleotide probe
tggcaccagcaggggt

SEQ ID NO: 24810 - DNA, 16 bp, Artificial
  oligonucleotide probe
gtgggggtgcagggaa

SEQ ID NO: 24811 - DNA, 16 bp, Artificial
  oligonucleotide probe
ggtcgcaggcgagggt

SEQ ID NO: 24812 - DNA, 16 bp, Artificial
  oligonucleotide probe
tggcgcctgtccgtgg

SEQ ID NO: 24813 - DNA, 16 bp, Artificial
  oligonucleotide probe
gtggcgagcctcgggt

SEQ ID NO: 24814 - DNA, 16 bp, Artificial
  oligonucleotide probe
tgctcggatgctgcga

SEQ ID NO: 24815 - DNA, 16 bp, Artificial
  oligonucleotide probe
gagcgcagccaagcct

SEQ ID NO: 24816 - DNA, 16 bp, Artificial
  oligonucleotide probe
cgagcaccgagccgga

SEQ ID NO: 24817 - DNA, 16 bp, Artificial
  oligonucleotide probe
cctccggacctcacgc

SEQ ID NO: 24818 - DNA, 16 bp, Artificial
  oligonucleotide probe
cgagcaccgagccgga

SEQ ID NO: 24819 - DNA, 16 bp, Artificial
  oligonucleotide probe
cctccggacctcacgc

SEQ ID NO: 24820 - DNA, 16 bp, Artificial
  oligonucleotide probe
cgagcaggcgaggcag

SEQ ID NO: 24821 - DNA, 16 bp, Artificial
  oligonucleotide probe
gcctcaggacgcacgc

SEQ ID NO: 24822 - DNA, 16 bp, Artificial
  oligonucleotide probe
gagcgagcagcgggtc

SEQ ID NO: 24823 - DNA, 16 bp, Artificial
  oligonucleotide probe
acgccctcaccagcga

SEQ ID NO: 24824 - DNA, 16 bp, Artificial
  oligonucleotide probe
gcgacagggcctgcct

SEQ ID NO: 24825 - DNA, 16 bp, Artificial
  oligonucleotide probe
agcggcgagagcgtcc

SEQ ID NO: 24826 - DNA, 16 bp, Artificial
  oligonucleotide probe
gcaggacggacggcct

SEQ ID NO: 24827 - DNA, 16 bp, Artificial
  oligonucleotide probe
gcgacctcacgcgcag

SEQ ID NO: 24828 - DNA, 16 bp, Artificial
  oligonucleotide probe
gcgacagggcctgcct

SEQ ID NO: 24829 - DNA, 16 bp, Artificial
  oligonucleotide probe
agcggcgagagcgtcc

SEQ ID NO: 24830 - DNA, 16 bp, Artificial
  oligonucleotide probe
cgagcaggcgaggcag

SEQ ID NO: 24831 - DNA, 16 bp, Artificial
  oligonucleotide probe
gcctcaggacgcacgc

SEQ ID NO: 24832 - DNA, 16 bp, Artificial
  oligonucleotide probe
cacccgagagcggtgg

SEQ ID NO: 24833 - DNA, 16 bp, Artificial
  oligonucleotide probe
gcgagtcccggaagcg

SEQ ID NO: 24834 - DNA, 16 bp, Artificial
  oligonucleotide probe
cagggtgggcgagcga

SEQ ID NO: 24835 - DNA, 16 bp, Artificial
  oligonucleotide probe
acgcccaacagggagc

SEQ ID NO: 24836 - DNA, 16 bp, Artificial
  oligonucleotide probe
gagcgagcagcgggtc

SEQ ID NO: 24837 - DNA, 16 bp, Artificial
  oligonucleotide probe
acgccctcaccagcga

SEQ ID NO: 24838 - DNA, 16 bp, Artificial
  oligonucleotide probe
gcgacagggcctgcct

SEQ ID NO: 24839 - DNA, 16 bp, Artificial
  oligonucleotide probe
agcggcgagagcgtcc

SEQ ID NO: 24840 - DNA, 16 bp, Artificial
  oligonucleotide probe
acgcagcggggtgacg

SEQ ID NO: 24841 - DNA, 16 bp, Artificial
  oligonucleotide probe
caccgcctcagggacg

SEQ ID NO: 24842 - DNA, 16 bp, Artificial
  oligonucleotide probe
gacgcaccagcgcgag

SEQ ID NO: 24843 - DNA, 16 bp, Artificial
  oligonucleotide probe
tggcaccagcaggggt

SEQ ID NO: 24844 - DNA, 16 bp, Artificial
  oligonucleotide probe
gcgacagggcctgcct

SEQ ID NO: 24845 - DNA, 16 bp, Artificial
  oligonucleotide probe
agcggcgagagcgtcc

SEQ ID NO: 24846 - DNA, 16 bp, Artificial
  oligonucleotide probe
gcaggacggacggcct

SEQ ID NO: 24847 - DNA, 16 bp, Artificial
  oligonucleotide probe
gcgacctcacgcgcag

SEQ ID NO: 24848 - DNA, 16 bp, Artificial
  oligonucleotide probe
cacccgagagcggtgg

SEQ ID NO: 24849 - DNA, 16 bp, Artificial
  oligonucleotide probe
gcgagtcccggaagcg

SEQ ID NO: 24850 - DNA, 16 bp, Artificial
  oligonucleotide probe
gtgggggtgcagggaa

SEQ ID NO: 24851 - DNA, 16 bp, Artificial
  oligonucleotide probe
ggtcgcaggcgagggt

SEQ ID NO: 24852 - DNA, 16 bp, Artificial
  oligonucleotide probe
cagggtgggcgagcga

SEQ ID NO: 24853 - DNA, 16 bp, Artificial
  oligonucleotide probe
acgcccaacagggagc

SEQ ID NO: 24854 - DNA, 16 bp, Artificial
  oligonucleotide probe
tgctcggatgctgcga

SEQ ID NO: 24855 - DNA, 16 bp, Artificial
  oligonucleotide probe
gagcgcagccaagcct

SEQ ID NO: 24856 - DNA, 16 bp, Artificial
  oligonucleotide probe
cggagcaggagcggaa

SEQ ID NO: 24857 - DNA, 16 bp, Artificial
  oligonucleotide probe
ggtcgcctgtccagcg

SEQ ID NO: 24858 - DNA, 16 bp, Artificial
  oligonucleotide probe
gtgggggtgcagggaa

SEQ ID NO: 24859 - DNA, 16 bp, Artificial
  oligonucleotide probe
ggtcgcaggcgagggt

SEQ ID NO: 24860 - DNA, 16 bp, Artificial
  oligonucleotide probe
gagcgagcagcgggtc

SEQ ID NO: 24861 - DNA, 16 bp, Artificial
  oligonucleotide probe
acgccctcaccagcga

SEQ ID NO: 24862 - DNA, 16 bp, Artificial
  oligonucleotide probe
cggagcaggagcggaa

SEQ ID NO: 24863 - DNA, 16 bp, Artificial
  oligonucleotide probe
ggtcgcctgtccagcg

SEQ ID NO: 24864 - DNA, 16 bp, Artificial
  oligonucleotide probe
cacccgagagcggtgg

SEQ ID NO: 24865 - DNA, 16 bp, Artificial
  oligonucleotide probe
gcgagtcccggaagcg

SEQ ID NO: 24866 - DNA, 16 bp, Artificial
  oligonucleotide probe
gagcgagcagcgggtc

SEQ ID NO: 24867 - DNA, 16 bp, Artificial
  oligonucleotide probe
acgccctcaccagcga

SEQ ID NO: 24868 - DNA, 16 bp, Artificial
  oligonucleotide probe
cggagcaggagcggaa

SEQ ID NO: 24869 - DNA, 16 bp, Artificial
  oligonucleotide probe
ggtcgcctgtccagcg

SEQ ID NO: 24870 - DNA, 16 bp, Artificial
  oligonucleotide probe
gacgcaccagcgcgag

SEQ ID NO: 24871 - DNA, 16 bp, Artificial
  oligonucleotide probe
tggcaccagcaggggt

SEQ ID NO: 24872 - DNA, 16 bp, Artificial
  oligonucleotide probe
gacgcaccagcgcgag

SEQ ID NO: 24873 - DNA, 16 bp, Artificial
  oligonucleotide probe
tggcaccagcaggggt

SEQ ID NO: 24874 - DNA, 16 bp, Artificial
  oligonucleotide probe
cacccgagagcggtgg

SEQ ID NO: 24875 - DNA, 16 bp, Artificial
  oligonucleotide probe
gcgagtcccggaagcg

SEQ ID NO: 24876 - DNA, 16 bp, Artificial
  oligonucleotide probe
cgagcaccgagccgga

SEQ ID NO: 24877 - DNA, 16 bp, Artificial
  oligonucleotide probe
cctccggacctcacgc

SEQ ID NO: 24878 - DNA, 16 bp, Artificial
  oligonucleotide probe
tggcgcctgtccgtgg

SEQ ID NO: 24879 - DNA, 16 bp, Artificial
  oligonucleotide probe
gtggcgagcctcgggt

SEQ ID NO: 24880 - DNA, 16 bp, Artificial
  oligonucleotide probe
gtgggggtgcagggaa

SEQ ID NO: 24881 - DNA, 16 bp, Artificial
  oligonucleotide probe
ggtcgcaggcgagggt

SEQ ID NO: 24882 - DNA, 16 bp, Artificial
  oligonucleotide probe
gagcgagcagcgggtc

SEQ ID NO: 24883 - DNA, 16 bp, Artificial
  oligonucleotide probe
acgccctcaccagcga

SEQ ID NO: 24884 - DNA, 16 bp, Artificial
  oligonucleotide probe
gagcgagcagcgggtc

SEQ ID NO: 24885 - DNA, 16 bp, Artificial
  oligonucleotide probe
acgccctcaccagcga

SEQ ID NO: 24886 - DNA, 16 bp, Artificial
  oligonucleotide probe
gcgacagggcctgcct

SEQ ID NO: 24887 - DNA, 16 bp, Artificial
  oligonucleotide probe
agcggcgagagcgtcc

SEQ ID NO: 24888 - DNA, 16 bp, Artificial
  oligonucleotide probe
cacccgagagcggtgg

SEQ ID NO: 24889 - DNA, 16 bp, Artificial
  oligonucleotide probe
gcgagtcccggaagcg

SEQ ID NO: 24890 - DNA, 16 bp, Artificial
  oligonucleotide probe
caggcctccctcgcga

SEQ ID NO: 24891 - DNA, 16 bp, Artificial
  oligonucleotide probe
caccagcgagacgcga

SEQ ID NO: 24892 - DNA, 16 bp, Artificial
  oligonucleotide probe
gtggccaatcacgcga

SEQ ID NO: 24893 - DNA, 16 bp, Artificial
  oligonucleotide probe
agcgcaccgacgacgc

SEQ ID NO: 24894 - DNA, 16 bp, Artificial
  oligonucleotide probe
gcaggacggacggcct

SEQ ID NO: 24895 - DNA, 16 bp, Artificial
  oligonucleotide probe
gcgacctcacgcgcag

SEQ ID NO: 24896 - DNA, 16 bp, Artificial
  oligonucleotide probe
gtgggggtgcagggaa

SEQ ID NO: 24897 - DNA, 16 bp, Artificial
  oligonucleotide probe
ggtcgcaggcgagggt

SEQ ID NO: 24898 - DNA, 16 bp, Artificial
  oligonucleotide probe
gtgggggtgcagggaa

SEQ ID NO: 24899 - DNA, 16 bp, Artificial
  oligonucleotide probe
ggtcgcaggcgagggt

SEQ ID NO: 24900 - DNA, 16 bp, Artificial
  oligonucleotide probe
gagcgagcagcgggtc

SEQ ID NO: 24901 - DNA, 16 bp, Artificial
  oligonucleotide probe
acgccctcaccagcga

SEQ ID NO: 24902 - DNA, 16 bp, Artificial
  oligonucleotide probe
cacccgagagcggtgg

SEQ ID NO: 24903 - DNA, 16 bp, Artificial
  oligonucleotide probe
gcgagtcccggaagcg

SEQ ID NO: 24904 - DNA, 16 bp, Artificial
  oligonucleotide probe
caggacgctggccctc

SEQ ID NO: 24905 - DNA, 16 bp, Artificial
  oligonucleotide probe
cctcgtggcggacgga

SEQ ID NO: 24906 - DNA, 16 bp, Artificial
  oligonucleotide probe
caggacgctggccctc

SEQ ID NO: 24907 - DNA, 16 bp, Artificial
  oligonucleotide probe
cctcgtggcggacgga

SEQ ID NO: 24908 - DNA, 16 bp, Artificial
  oligonucleotide probe
gacggagcacgccgga

SEQ ID NO: 24909 - DNA, 16 bp, Artificial
  oligonucleotide probe
cggagcctgagcgtgg

SEQ ID NO: 24910 - DNA, 16 bp, Artificial
  oligonucleotide probe
gacgcaccagcgcgag

SEQ ID NO: 24911 - DNA, 16 bp, Artificial
  oligonucleotide probe
tggcaccagcaggggt

SEQ ID NO: 24912 - DNA, 16 bp, Artificial
  oligonucleotide probe
tggcgcctgtccgtgg

SEQ ID NO: 24913 - DNA, 16 bp, Artificial
  oligonucleotide probe
gtggcgagcctcgggt

SEQ ID NO: 24914 - DNA, 16 bp, Artificial
  oligonucleotide probe
gacgcaccagcgcgag

SEQ ID NO: 24915 - DNA, 16 bp, Artificial
  oligonucleotide probe
tggcaccagcaggggt

SEQ ID NO: 24916 - DNA, 16 bp, Artificial
  oligonucleotide probe
tgctcggatgctgcga

SEQ ID NO: 24917 - DNA, 16 bp, Artificial
  oligonucleotide probe
gagcgcagccaagcct

SEQ ID NO: 24918 - DNA, 16 bp, Artificial
  oligonucleotide probe
tgctcggatgctgcga

SEQ ID NO: 24919 - DNA, 16 bp, Artificial
  oligonucleotide probe
gagcgcagccaagcct

SEQ ID NO: 24920 - DNA, 16 bp, Artificial
  oligonucleotide probe
gtgggggtgcagggaa

SEQ ID NO: 24921 - DNA, 16 bp, Artificial
  oligonucleotide probe
ggtcgcaggcgagggt

SEQ ID NO: 24922 - DNA, 16 bp, Artificial
  oligonucleotide probe
agcggcgagagcgtcc

SEQ ID NO: 24923 - DNA, 16 bp, Artificial
  oligonucleotide probe
gacgcaccagcgcgag

SEQ ID NO: 24924 - DNA, 16 bp, Artificial
  oligonucleotide probe
cagggtgggcgagcga

SEQ ID NO: 24925 - DNA, 16 bp, Artificial
  oligonucleotide probe
acgcccaacagggagc

SEQ ID NO: 24926 - DNA, 16 bp, Artificial
  oligonucleotide probe
gacgcaccagcgcgag

SEQ ID NO: 24927 - DNA, 16 bp, Artificial
  oligonucleotide probe
tggcaccagcaggggt

SEQ ID NO: 24928 - DNA, 16 bp, Artificial
  oligonucleotide probe
cacccgagagcggtgg

SEQ ID NO: 24929 - DNA, 16 bp, Artificial
  oligonucleotide probe
gcgagtcccggaagcg

SEQ ID NO: 24930 - DNA, 16 bp, Artificial
  oligonucleotide probe
gtggccaatcacgcga

SEQ ID NO: 24931 - DNA, 16 bp, Artificial
  oligonucleotide probe
agcgcaccgacgacgc

SEQ ID NO: 24932 - DNA, 16 bp, Artificial
  oligonucleotide probe
agcggcgagagcgtcc

SEQ ID NO: 24933 - DNA, 16 bp, Artificial
  oligonucleotide probe
gacgcaccagcgcgag

SEQ ID NO: 24934 - DNA, 16 bp, Artificial
  oligonucleotide probe
gagcgagcagcgggtc

SEQ ID NO: 24935 - DNA, 16 bp, Artificial
  oligonucleotide probe
acgccctcaccagcga

SEQ ID NO: 24936 - DNA, 16 bp, Artificial
  oligonucleotide probe
tggcgcctgtccgtgg

SEQ ID NO: 24937 - DNA, 16 bp, Artificial
  oligonucleotide probe
gtggcgagcctcgggt

SEQ ID NO: 24938 - DNA, 16 bp, Artificial
  oligonucleotide probe
cggagcaggagcggaa

SEQ ID NO: 24939 - DNA, 16 bp, Artificial
  oligonucleotide probe
ggtcgcctgtccagcg

SEQ ID NO: 24940 - DNA, 16 bp, Artificial
  oligonucleotide probe
tgctcggatgctgcga

SEQ ID NO: 24941 - DNA, 16 bp, Artificial
  oligonucleotide probe
gagcgcagccaagcct

SEQ ID NO: 24942 - DNA, 16 bp, Artificial
  oligonucleotide probe
gtggccaatcacgcga

SEQ ID NO: 24943 - DNA, 16 bp, Artificial
  oligonucleotide probe
agcgcaccgacgacgc

SEQ ID NO: 24944 - DNA, 16 bp, Artificial
  oligonucleotide probe
caggcctccctcgcga

SEQ ID NO: 24945 - DNA, 16 bp, Artificial
  oligonucleotide probe
caccagcgagacgcga

SEQ ID NO: 24946 - DNA, 16 bp, Artificial
  oligonucleotide probe
gtggccaatcacgcga

SEQ ID NO: 24947 - DNA, 16 bp, Artificial
  oligonucleotide probe
agcgcaccgacgacgc

SEQ ID NO: 24948 - DNA, 16 bp, Artificial
  oligonucleotide probe
cgagcaccgagccgga

SEQ ID NO: 24949 - DNA, 16 bp, Artificial
  oligonucleotide probe
cctccggacctcacgc

SEQ ID NO: 24950 - DNA, 16 bp, Artificial
  oligonucleotide probe
cagggtgggcgagcga

SEQ ID NO: 24951 - DNA, 16 bp, Artificial
  oligonucleotide probe
acgcccaacagggagc

SEQ ID NO: 24952 - DNA, 16 bp, Artificial
  oligonucleotide probe
gcgacagggcctgcct

SEQ ID NO: 24953 - DNA, 16 bp, Artificial
  oligonucleotide probe
agcggcgagagcgtcc

SEQ ID NO: 24954 - DNA, 16 bp, Artificial
  oligonucleotide probe
tggcgcctgtccgtgg

SEQ ID NO: 24955 - DNA, 16 bp, Artificial
  oligonucleotide probe
gtggcgagcctcgggt

SEQ ID NO: 24956 - DNA, 16 bp, Artificial
  oligonucleotide probe
gacgcaccagcgcgag

SEQ ID NO: 24957 - DNA, 16 bp, Artificial
  oligonucleotide probe
tggcaccagcaggggt

SEQ ID NO: 24958 - DNA, 16 bp, Artificial
  oligonucleotide probe
gcgacagggcctgcct

SEQ ID NO: 24959 - DNA, 16 bp, Artificial
  oligonucleotide probe
agcggcgagagcgtcc

SEQ ID NO: 24960 - DNA, 16 bp, Artificial
  oligonucleotide probe
cgagcaccgagccgga

SEQ ID NO: 24961 - DNA, 16 bp, Artificial
  oligonucleotide probe
cctccggacctcacgc

SEQ ID NO: 24962 - DNA, 16 bp, Artificial
  oligonucleotide probe
gacgcaccagcgcgag

SEQ ID NO: 24963 - DNA, 16 bp, Artificial
  oligonucleotide probe
tggcaccagcaggggt

SEQ ID NO: 24964 - DNA, 16 bp, Artificial
  oligonucleotide probe
gtgggggtgcagggaa

SEQ ID NO: 24965 - DNA, 16 bp, Artificial
  oligonucleotide probe
ggtcgcaggcgagggt

SEQ ID NO: 24966 - DNA, 16 bp, Artificial
  oligonucleotide probe
caggcctccctcgcga

SEQ ID NO: 24967 - DNA, 16 bp, Artificial
  oligonucleotide probe
caccagcgagacgcga

SEQ ID NO: 24968 - DNA, 16 bp, Artificial
  oligonucleotide probe
gtgggggtgcagggaa

SEQ ID NO: 24969 - DNA, 16 bp, Artificial
  oligonucleotide probe
ggtcgcaggcgagggt

SEQ ID NO: 24970 - DNA, 16 bp, Artificial
  oligonucleotide probe
gcgacagggcctgcct

SEQ ID NO: 24971 - DNA, 16 bp, Artificial
  oligonucleotide probe
agcggcgagagcgtcc

SEQ ID NO: 24972 - DNA, 16 bp, Artificial
  oligonucleotide probe
tggcgcctgtccgtgg

SEQ ID NO: 24973 - DNA, 16 bp, Artificial
  oligonucleotide probe
gtggcgagcctcgggt

SEQ ID NO: 24974 - DNA, 16 bp, Artificial
  oligonucleotide probe
cggagcaggagcggaa

SEQ ID NO: 24975 - DNA, 16 bp, Artificial
  oligonucleotide probe
ggtcgcctgtccagcg

SEQ ID NO: 24976 - DNA, 16 bp, Artificial
  oligonucleotide probe
gacggagcacgccgga

SEQ ID NO: 24977 - DNA, 16 bp, Artificial
  oligonucleotide probe
cggagcctgagcgtgg

SEQ ID NO: 24978 - DNA, 16 bp, Artificial
  oligonucleotide probe
cagggtgggcgagcga

SEQ ID NO: 24979 - DNA, 16 bp, Artificial
  oligonucleotide probe
acgcccaacagggagc

SEQ ID NO: 24980 - DNA, 16 bp, Artificial
  oligonucleotide probe
gtccgggtcaggcagg

SEQ ID NO: 24981 - DNA, 16 bp, Artificial
  oligonucleotide probe
cggagagcgcgagcct

SEQ ID NO: 24982 - DNA, 16 bp, Artificial
  oligonucleotide probe
gcaggacggacggcct

SEQ ID NO: 24983 - DNA, 16 bp, Artificial
  oligonucleotide probe
gcgacctcacgcgcag

SEQ ID NO: 24984 - DNA, 16 bp, Artificial
  oligonucleotide probe
cgagcaccgagccgga

SEQ ID NO: 24985 - DNA, 16 bp, Artificial
  oligonucleotide probe
cctccggacctcacgc

SEQ ID NO: 24986 - DNA, 16 bp, Artificial
  oligonucleotide probe
gacgcaccagcgcgag

SEQ ID NO: 24987 - DNA, 16 bp, Artificial
  oligonucleotide probe
tggcaccagcaggggt

SEQ ID NO: 24988 - DNA, 16 bp, Artificial
  oligonucleotide probe
cagggtgggcgagcga

SEQ ID NO: 24989 - DNA, 16 bp, Artificial
  oligonucleotide probe
acgcccaacagggagc

SEQ ID NO: 24990 - DNA, 16 bp, Artificial
  oligonucleotide probe
gtgggggtgcagggaa

SEQ ID NO: 24991 - DNA, 16 bp, Artificial
  oligonucleotide probe
ggtcgcaggcgagggt

SEQ ID NO: 24992 - DNA, 16 bp, Artificial
  oligonucleotide probe
agcggcgagagcgtcc

SEQ ID NO: 24993 - DNA, 16 bp, Artificial
  oligonucleotide probe
gacgcaccagcgcgag

SEQ ID NO: 24994 - DNA, 16 bp, Artificial
  oligonucleotide probe
caggcctccctcgcga

SEQ ID NO: 24995 - DNA, 16 bp, Artificial
  oligonucleotide probe
caccagcgagacgcga

SEQ ID NO: 24996 - DNA, 16 bp, Artificial
  oligonucleotide probe
gagcgagcagcgggtc

SEQ ID NO: 24997 - DNA, 16 bp, Artificial
  oligonucleotide probe
acgccctcaccagcga

SEQ ID NO: 24998 - DNA, 16 bp, Artificial
  oligonucleotide probe
tgctcggatgctgcga

SEQ ID NO: 24999 - DNA, 16 bp, Artificial
  oligonucleotide probe
gagcgcagccaagcct

SEQ ID NO: 25000 - DNA, 16 bp, Artificial
  oligonucleotide probe
gcgacagggcctgcct

SEQ ID NO: 25001 - DNA, 16 bp, Artificial
  oligonucleotide probe
agcggcgagagcgtcc

SEQ ID NO: 25002 - DNA, 16 bp, Artificial
  oligonucleotide probe
gagcgagcagcgggtc

SEQ ID NO: 25003 - DNA, 16 bp, Artificial
  oligonucleotide probe
acgccctcaccagcga

SEQ ID NO: 25004 - DNA, 16 bp, Artificial
  oligonucleotide probe
gtgggggtgcagggaa

SEQ ID NO: 25005 - DNA, 16 bp, Artificial
  oligonucleotide probe
ggtcgcaggcgagggt

SEQ ID NO: 25006 - DNA, 16 bp, Artificial
  oligonucleotide probe
cacccgagagcggtgg

SEQ ID NO: 25007 - DNA, 16 bp, Artificial
  oligonucleotide probe
gcgagtcccggaagcg

SEQ ID NO: 25008 - DNA, 16 bp, Artificial
  oligonucleotide probe
tggcgcctgtccgtgg

SEQ ID NO: 25009 - DNA, 16 bp, Artificial
  oligonucleotide probe
gtggcgagcctcgggt

SEQ ID NO: 25010 - DNA, 16 bp, Artificial
  oligonucleotide probe
cacccgagagcggtgg

SEQ ID NO: 25011 - DNA, 16 bp, Artificial
  oligonucleotide probe
gcgagtcccggaagcg

SEQ ID NO: 25012 - DNA, 16 bp, Artificial
  oligonucleotide probe
gacgcaccagcgcgag

SEQ ID NO: 25013 - DNA, 16 bp, Artificial
  oligonucleotide probe
tggcaccagcaggggt

SEQ ID NO: 25014 - DNA, 16 bp, Artificial
  oligonucleotide probe
gcaggacggacggcct

SEQ ID NO: 25015 - DNA, 16 bp, Artificial
  oligonucleotide probe
gcgacctcacgcgcag

SEQ ID NO: 25016 - DNA, 16 bp, Artificial
  oligonucleotide probe
gacgcaccagcgcgag

SEQ ID NO: 25017 - DNA, 16 bp, Artificial
  oligonucleotide probe
tggcaccagcaggggt

SEQ ID NO: 25018 - DNA, 16 bp, Artificial
  oligonucleotide probe
caggacgctggccctc

SEQ ID NO: 25019 - DNA, 16 bp, Artificial
  oligonucleotide probe
cctcgtggcggacgga

SEQ ID NO: 25020 - DNA, 16 bp, Artificial
  oligonucleotide probe
cgagcaccgagccgga

SEQ ID NO: 25021 - DNA, 16 bp, Artificial
  oligonucleotide probe
cctccggacctcacgc

SEQ ID NO: 25022 - DNA, 16 bp, Artificial
  oligonucleotide probe
caggacgctggccctc

SEQ ID NO: 25023 - DNA, 16 bp, Artificial
  oligonucleotide probe
cctcgtggcggacgga

SEQ ID NO: 25024 - DNA, 16 bp, Artificial
  oligonucleotide probe
cgagcaccgagccgga

SEQ ID NO: 25025 - DNA, 16 bp, Artificial
  oligonucleotide probe
cctccggacctcacgc

SEQ ID NO: 25026 - DNA, 16 bp, Artificial
  oligonucleotide probe
gtggccaatcacgcga

SEQ ID NO: 25027 - DNA, 16 bp, Artificial
  oligonucleotide probe
agcgcaccgacgacgc

SEQ ID NO: 25028 - DNA, 16 bp, Artificial
  oligonucleotide probe
agcggcgagagcgtcc

SEQ ID NO: 25029 - DNA, 16 bp, Artificial
  oligonucleotide probe
gacgcaccagcgcgag

SEQ ID NO: 25030 - DNA, 16 bp, Artificial
  oligonucleotide probe
gtccgggtcaggcagg

SEQ ID NO: 25031 - DNA, 16 bp, Artificial
  oligonucleotide probe
cggagagcgcgagcct

SEQ ID NO: 25032 - DNA, 16 bp, Artificial
  oligonucleotide probe
tgctcggatgctgcga

SEQ ID NO: 25033 - DNA, 16 bp, Artificial
  oligonucleotide probe
gagcgcagccaagcct

SEQ ID NO: 25034 - DNA, 16 bp, Artificial
  oligonucleotide probe
gagcgagcagcgggtc

SEQ ID NO: 25035 - DNA, 16 bp, Artificial
  oligonucleotide probe
acgccctcaccagcga

SEQ ID NO: 25036 - DNA, 16 bp, Artificial
  oligonucleotide probe
gcgacagggcctgcct

SEQ ID NO: 25037 - DNA, 16 bp, Artificial
  oligonucleotide probe
agcggcgagagcgtcc

SEQ ID NO: 25038 - DNA, 16 bp, Artificial
  oligonucleotide probe
caggcctccctcgcga

SEQ ID NO: 25039 - DNA, 16 bp, Artificial
  oligonucleotide probe
caccagcgagacgcga

SEQ ID NO: 25040 - DNA, 16 bp, Artificial
  oligonucleotide probe
gtggccaatcacgcga

SEQ ID NO: 25041 - DNA, 16 bp, Artificial
  oligonucleotide probe
agcgcaccgacgacgc

SEQ ID NO: 25042 - DNA, 16 bp, Artificial
  oligonucleotide probe
caggcctccctcgcga

SEQ ID NO: 25043 - DNA, 16 bp, Artificial
  oligonucleotide probe
caccagcgagacgcga

SEQ ID NO: 25044 - DNA, 16 bp, Artificial
  oligonucleotide probe
cgagcaccgagccgga

SEQ ID NO: 25045 - DNA, 16 bp, Artificial
  oligonucleotide probe
cctccggacctcacgc

SEQ ID NO: 25046 - DNA, 16 bp, Artificial
  oligonucleotide probe
gacgcaccagcgcgag

SEQ ID NO: 25047 - DNA, 16 bp, Artificial
  oligonucleotide probe
tggcaccagcaggggt

SEQ ID NO: 25048 - DNA, 16 bp, Artificial
  oligonucleotide probe
cgagcaccgagccgga

SEQ ID NO: 25049 - DNA, 16 bp, Artificial
  oligonucleotide probe
cctccggacctcacgc

SEQ ID NO: 25050 - DNA, 16 bp, Artificial
  oligonucleotide probe
acgcagcggggtgacg

SEQ ID NO: 25051 - DNA, 16 bp, Artificial
  oligonucleotide probe
caccgcctcagggacg

SEQ ID NO: 25052 - DNA, 16 bp, Artificial
  oligonucleotide probe
caggcctccctcgcga

SEQ ID NO: 25053 - DNA, 16 bp, Artificial
  oligonucleotide probe
caccagcgagacgcga

SEQ ID NO: 25054 - DNA, 16 bp, Artificial
  oligonucleotide probe
gtgggggtgcagggaa

SEQ ID NO: 25055 - DNA, 16 bp, Artificial
  oligonucleotide probe
ggtcgcaggcgagggt

SEQ ID NO: 25056 - DNA, 16 bp, Artificial
  oligonucleotide probe
gtgggggtgcagggaa

SEQ ID NO: 25057 - DNA, 16 bp, Artificial
  oligonucleotide probe
ggtcgcaggcgagggt

SEQ ID NO: 25058 - DNA, 16 bp, Artificial
  oligonucleotide probe
tggcgcctgtccgtgg

SEQ ID NO: 25059 - DNA, 16 bp, Artificial
  oligonucleotide probe
gtggcgagcctcgggt

SEQ ID NO: 25060 - DNA, 16 bp, Artificial
  oligonucleotide probe
caggcctccctcgcga

SEQ ID NO: 25061 - DNA, 16 bp, Artificial
  oligonucleotide probe
caccagcgagacgcga

SEQ ID NO: 25062 - DNA, 16 bp, Artificial
  oligonucleotide probe
cacccgagagcggtgg

SEQ ID NO: 25063 - DNA, 16 bp, Artificial
  oligonucleotide probe
gcgagtcccggaagcg

SEQ ID NO: 25064 - DNA, 16 bp, Artificial
  oligonucleotide probe
caggacgctggccctc

SEQ ID NO: 25065 - DNA, 16 bp, Artificial
  oligonucleotide probe
cctcgtggcggacgga

SEQ ID NO: 25066 - DNA, 16 bp, Artificial
  oligonucleotide probe
gcaggacggacggcct

SEQ ID NO: 25067 - DNA, 16 bp, Artificial
  oligonucleotide probe
gcgacctcacgcgcag

SEQ ID NO: 25068 - DNA, 16 bp, Artificial
  oligonucleotide probe
cagggtgggcgagcga

SEQ ID NO: 25069 - DNA, 16 bp, Artificial
  oligonucleotide probe
acgcccaacagggagc

SEQ ID NO: 25070 - DNA, 16 bp, Artificial
  oligonucleotide probe
gagcgagcagcgggtc

SEQ ID NO: 25071 - DNA, 16 bp, Artificial
  oligonucleotide probe
acgccctcaccagcga

SEQ ID NO: 25072 - DNA, 16 bp, Artificial
  oligonucleotide probe
gagcgagcagcgggtc

SEQ ID NO: 25073 - DNA, 16 bp, Artificial
  oligonucleotide probe
acgccctcaccagcga

SEQ ID NO: 25074 - DNA, 16 bp, Artificial
  oligonucleotide probe
gtggccaatcacgcga

SEQ ID NO: 25075 - DNA, 16 bp, Artificial
  oligonucleotide probe
agcgcaccgacgacgc

SEQ ID NO: 25076 - DNA, 16 bp, Artificial
  oligonucleotide probe
caggacgctggccctc

SEQ ID NO: 25077 - DNA, 16 bp, Artificial
  oligonucleotide probe
cctcgtggcggacgga

SEQ ID NO: 25078 - DNA, 16 bp, Artificial
  oligonucleotide probe
cagggtgggcgagcga

SEQ ID NO: 25079 - DNA, 16 bp, Artificial
  oligonucleotide probe
acgcccaacagggagc

SEQ ID NO: 25080 - DNA, 16 bp, Artificial
  oligonucleotide probe
tggcgcctgtccgtgg

SEQ ID NO: 25081 - DNA, 16 bp, Artificial
  oligonucleotide probe
gtggcgagcctcgggt

SEQ ID NO: 25082 - DNA, 16 bp, Artificial
  oligonucleotide probe
gtgggggtgcagggaa

SEQ ID NO: 25083 - DNA, 16 bp, Artificial
  oligonucleotide probe
ggtcgcaggcgagggt

SEQ ID NO: 25084 - DNA, 16 bp, Artificial
  oligonucleotide probe
cagggtgggcgagcga

SEQ ID NO: 25085 - DNA, 16 bp, Artificial
  oligonucleotide probe
acgcccaacagggagc

SEQ ID NO: 25086 - DNA, 16 bp, Artificial
  oligonucleotide probe
gcgacagggcctgcct

SEQ ID NO: 25087 - DNA, 16 bp, Artificial
  oligonucleotide probe
agcggcgagagcgtcc

SEQ ID NO: 25088 - DNA, 16 bp, Artificial
  oligonucleotide probe
tggcgcctgtccgtgg

SEQ ID NO: 25089 - DNA, 16 bp, Artificial
  oligonucleotide probe
gtggcgagcctcgggt

SEQ ID NO: 25090 - DNA, 16 bp, Artificial
  oligonucleotide probe
caggacgctggccctc

SEQ ID NO: 25091 - DNA, 16 bp, Artificial
  oligonucleotide probe
cctcgtggcggacgga

SEQ ID NO: 25092 - DNA, 16 bp, Artificial
  oligonucleotide probe
caggacgctggccctc

SEQ ID NO: 25093 - DNA, 16 bp, Artificial
  oligonucleotide probe
cctcgtggcggacgga

SEQ ID NO: 25094 - DNA, 16 bp, Artificial
  oligonucleotide probe
gcgacagggcctgcct

SEQ ID NO: 25095 - DNA, 16 bp, Artificial
  oligonucleotide probe
agcggcgagagcgtcc

SEQ ID NO: 25096 - DNA, 16 bp, Artificial
  oligonucleotide probe
caggacgctggccctc

SEQ ID NO: 25097 - DNA, 16 bp, Artificial
  oligonucleotide probe
cctcgtggcggacgga

SEQ ID NO: 25098 - DNA, 16 bp, Artificial
  oligonucleotide probe
cggagcaggagcggaa

SEQ ID NO: 25099 - DNA, 16 bp, Artificial
  oligonucleotide probe
ggtcgcctgtccagcg

SEQ ID NO: 25100 - DNA, 16 bp, Artificial
  oligonucleotide probe
tggcgcctgtccgtgg

SEQ ID NO: 25101 - DNA, 16 bp, Artificial
  oligonucleotide probe
gtggcgagcctcgggt

SEQ ID NO: 25102 - DNA, 16 bp, Artificial
  oligonucleotide probe
gcaggacggacggcct

SEQ ID NO: 25103 - DNA, 16 bp, Artificial
  oligonucleotide probe
gcgacctcacgcgcag

SEQ ID NO: 25104 - DNA, 16 bp, Artificial
  oligonucleotide probe
gcgacagggcctgcct

SEQ ID NO: 25105 - DNA, 16 bp, Artificial
  oligonucleotide probe
agcggcgagagcgtcc

SEQ ID NO: 25106 - DNA, 16 bp, Artificial
  oligonucleotide probe
caggacgctggccctc

SEQ ID NO: 25107 - DNA, 16 bp, Artificial
  oligonucleotide probe
cctcgtggcggacgga

SEQ ID NO: 25108 - DNA, 16 bp, Artificial
  oligonucleotide probe
cacccgagagcggtgg

SEQ ID NO: 25109 - DNA, 16 bp, Artificial
  oligonucleotide probe
gcgagtcccggaagcg

SEQ ID NO: 25110 - DNA, 16 bp, Artificial
  oligonucleotide probe
gacgcaccagcgcgag

SEQ ID NO: 25111 - DNA, 16 bp, Artificial
  oligonucleotide probe
tggcaccagcaggggt

SEQ ID NO: 25112 - DNA, 16 bp, Artificial
  oligonucleotide probe
caggcctccctcgcga

SEQ ID NO: 25113 - DNA, 16 bp, Artificial
  oligonucleotide probe
caccagcgagacgcga

SEQ ID NO: 25114 - DNA, 16 bp, Artificial
  oligonucleotide probe
agcggcgagagcgtcc

SEQ ID NO: 25115 - DNA, 16 bp, Artificial
  oligonucleotide probe
gacgcaccagcgcgag

SEQ ID NO: 25116 - DNA, 16 bp, Artificial
  oligonucleotide probe
cggagcaggagcggaa

SEQ ID NO: 25117 - DNA, 16 bp, Artificial
  oligonucleotide probe
ggtcgcctgtccagcg

SEQ ID NO: 25118 - DNA, 16 bp, Artificial
  oligonucleotide probe
gtgggggtgcagggaa

SEQ ID NO: 25119 - DNA, 16 bp, Artificial
  oligonucleotide probe
ggtcgcaggcgagggt

SEQ ID NO: 25120 - DNA, 16 bp, Artificial
  oligonucleotide probe
cacccgagagcggtgg

SEQ ID NO: 25121 - DNA, 16 bp, Artificial
  oligonucleotide probe
gcgagtcccggaagcg

SEQ ID NO: 25122 - DNA, 16 bp, Artificial
  oligonucleotide probe
cagggcagggtcgggt

SEQ ID NO: 25123 - DNA, 16 bp, Artificial
  oligonucleotide probe
agcggacggcaggagc

SEQ ID NO: 25124 - DNA, 16 bp, Artificial
  oligonucleotide probe
cagggtgggcgagcga

SEQ ID NO: 25125 - DNA, 16 bp, Artificial
  oligonucleotide probe
acgcccaacagggagc

SEQ ID NO: 25126 - DNA, 16 bp, Artificial
  oligonucleotide probe
caggacgctggccctc

SEQ ID NO: 25127 - DNA, 16 bp, Artificial
  oligonucleotide probe
cctcgtggcggacgga

SEQ ID NO: 25128 - DNA, 16 bp, Artificial
  oligonucleotide probe
gtccgggtcaggcagg

SEQ ID NO: 25129 - DNA, 16 bp, Artificial
  oligonucleotide probe
cggagagcgcgagcct

SEQ ID NO: 25130 - DNA, 16 bp, Artificial
  oligonucleotide probe
cagggcagggtcgggt

SEQ ID NO: 25131 - DNA, 16 bp, Artificial
  oligonucleotide probe
agcggacggcaggagc

SEQ ID NO: 25132 - DNA, 16 bp, Artificial
  oligonucleotide probe
cgagcaccgagccgga

SEQ ID NO: 25133 - DNA, 16 bp, Artificial
  oligonucleotide probe
cctccggacctcacgc

SEQ ID NO: 25134 - DNA, 16 bp, Artificial
  oligonucleotide probe
cacccgagagcggtgg

SEQ ID NO: 25135 - DNA, 16 bp, Artificial
  oligonucleotide probe
gcgagtcccggaagcg

SEQ ID NO: 25136 - DNA, 16 bp, Artificial
  oligonucleotide probe
agcggcgagagcgtcc

SEQ ID NO: 25137 - DNA, 16 bp, Artificial
  oligonucleotide probe
gacgcaccagcgcgag

SEQ ID NO: 25138 - DNA, 16 bp, Artificial
  oligonucleotide probe
gtgggggtgcagggaa

SEQ ID NO: 25139 - DNA, 16 bp, Artificial
  oligonucleotide probe
ggtcgcaggcgagggt

SEQ ID NO: 25140 - DNA, 16 bp, Artificial
  oligonucleotide probe
gacgcaccagcgcgag

SEQ ID NO: 25141 - DNA, 16 bp, Artificial
  oligonucleotide probe
tggcaccagcaggggt

SEQ ID NO: 25142 - DNA, 16 bp, Artificial
  oligonucleotide probe
gcgacagggcctgcct

SEQ ID NO: 25143 - DNA, 16 bp, Artificial
  oligonucleotide probe
agcggcgagagcgtcc

SEQ ID NO: 25144 - DNA, 16 bp, Artificial
  oligonucleotide probe
tgctcggatgctgcga

SEQ ID NO: 25145 - DNA, 16 bp, Artificial
  oligonucleotide probe
gagcgcagccaagcct

SEQ ID NO: 25146 - DNA, 16 bp, Artificial
  oligonucleotide probe
tggcgcctgtccgtgg

SEQ ID NO: 25147 - DNA, 16 bp, Artificial
  oligonucleotide probe
gtggcgagcctcgggt

SEQ ID NO: 25148 - DNA, 16 bp, Artificial
  oligonucleotide probe
gtgggggtgcagggaa

SEQ ID NO: 25149 - DNA, 16 bp, Artificial
  oligonucleotide probe
ggtcgcaggcgagggt

SEQ ID NO: 25150 - DNA, 16 bp, Artificial
  oligonucleotide probe
gtggccaatcacgcga

SEQ ID NO: 25151 - DNA, 16 bp, Artificial
  oligonucleotide probe
agcgcaccgacgacgc

SEQ ID NO: 25152 - DNA, 16 bp, Artificial
  oligonucleotide probe
gtgggggtgcagggaa

SEQ ID NO: 25153 - DNA, 16 bp, Artificial
  oligonucleotide probe
ggtcgcaggcgagggt

SEQ ID NO: 25154 - DNA, 16 bp, Artificial
  oligonucleotide probe
cgagcaggcgaggcag

SEQ ID NO: 25155 - DNA, 16 bp, Artificial
  oligonucleotide probe
gcctcaggacgcacgc

SEQ ID NO: 25156 - DNA, 16 bp, Artificial
  oligonucleotide probe
cgagcaccgagccgga

SEQ ID NO: 25157 - DNA, 16 bp, Artificial
  oligonucleotide probe
cctccggacctcacgc

SEQ ID NO: 25158 - DNA, 16 bp, Artificial
  oligonucleotide probe
tgctcggatgctgcga

SEQ ID NO: 25159 - DNA, 16 bp, Artificial
  oligonucleotide probe
gagcgcagccaagcct

SEQ ID NO: 25160 - DNA, 16 bp, Artificial
  oligonucleotide probe
gtgggggtgcagggaa

SEQ ID NO: 25161 - DNA, 16 bp, Artificial
  oligonucleotide probe
ggtcgcaggcgagggt

SEQ ID NO: 25162 - DNA, 16 bp, Artificial
  oligonucleotide probe
gagcgagcagcgggtc

SEQ ID NO: 25163 - DNA, 16 bp, Artificial
  oligonucleotide probe
acgccctcaccagcga

SEQ ID NO: 25164 - DNA, 16 bp, Artificial
  oligonucleotide probe
gtgggggtgcagggaa

SEQ ID NO: 25165 - DNA, 16 bp, Artificial
  oligonucleotide probe
ggtcgcaggcgagggt

SEQ ID NO: 25166 - DNA, 16 bp, Artificial
  oligonucleotide probe
agcggcgagagcgtcc

SEQ ID NO: 25167 - DNA, 16 bp, Artificial
  oligonucleotide probe
gacgcaccagcgcgag

SEQ ID NO: 25168 - DNA, 16 bp, Artificial
  oligonucleotide probe
cacccgagagcggtgg

SEQ ID NO: 25169 - DNA, 16 bp, Artificial
  oligonucleotide probe
gcgagtcccggaagcg

SEQ ID NO: 25170 - DNA, 16 bp, Artificial
  oligonucleotide probe
cacccgagagcggtgg

SEQ ID NO: 25171 - DNA, 16 bp, Artificial
  oligonucleotide probe
gcgagtcccggaagcg

SEQ ID NO: 25172 - DNA, 16 bp, Artificial
  oligonucleotide probe
gtccgggtcaggcagg

SEQ ID NO: 25173 - DNA, 16 bp, Artificial
  oligonucleotide probe
cggagagcgcgagcct

SEQ ID NO: 25174 - DNA, 16 bp, Artificial
  oligonucleotide probe
gtgggggtgcagggaa

SEQ ID NO: 25175 - DNA, 16 bp, Artificial
  oligonucleotide probe
ggtcgcaggcgagggt

SEQ ID NO: 25176 - DNA, 16 bp, Artificial
  oligonucleotide probe
cagggtgggcgagcga

SEQ ID NO: 25177 - DNA, 16 bp, Artificial
  oligonucleotide probe
acgcccaacagggagc

SEQ ID NO: 25178 - DNA, 16 bp, Artificial
  oligonucleotide probe
agcggcgagagcgtcc

SEQ ID NO: 25179 - DNA, 16 bp, Artificial
  oligonucleotide probe
gacgcaccagcgcgag

SEQ ID NO: 25180 - DNA, 16 bp, Artificial
  oligonucleotide probe
tgctcggatgctgcga

SEQ ID NO: 25181 - DNA, 16 bp, Artificial
  oligonucleotide probe
gagcgcagccaagcct

SEQ ID NO: 25182 - DNA, 16 bp, Artificial
  oligonucleotide probe
gcgacagggcctgcct

SEQ ID NO: 25183 - DNA, 16 bp, Artificial
  oligonucleotide probe
agcggcgagagcgtcc

SEQ ID NO: 25184 - DNA, 16 bp, Artificial
  oligonucleotide probe
ggtcgcgacacctggc

SEQ ID NO: 25185 - DNA, 16 bp, Artificial
  oligonucleotide probe
cgagcctcgggtgcga

SEQ ID NO: 25186 - DNA, 16 bp, Artificial
  oligonucleotide probe
caggacgctggccctc

SEQ ID NO: 25187 - DNA, 16 bp, Artificial
  oligonucleotide probe
cctcgtggcggacgga

SEQ ID NO: 25188 - DNA, 16 bp, Artificial
  oligonucleotide probe
cgagcaccgagccgga

SEQ ID NO: 25189 - DNA, 16 bp, Artificial
  oligonucleotide probe
cctccggacctcacgc

SEQ ID NO: 25190 - DNA, 16 bp, Artificial
  oligonucleotide probe
caggacgctggccctc

SEQ ID NO: 25191 - DNA, 16 bp, Artificial
  oligonucleotide probe
cctcgtggcggacgga

SEQ ID NO: 25192 - DNA, 16 bp, Artificial
  oligonucleotide probe
cgagcaccgagccgga

SEQ ID NO: 25193 - DNA, 16 bp, Artificial
  oligonucleotide probe
cctccggacctcacgc

SEQ ID NO: 25194 - DNA, 16 bp, Artificial
  oligonucleotide probe
gcgacagggcctgcct

SEQ ID NO: 25195 - DNA, 16 bp, Artificial
  oligonucleotide probe
agcggcgagagcgtcc

SEQ ID NO: 25196 - DNA, 16 bp, Artificial
  oligonucleotide probe
tgctcggatgctgcga

SEQ ID NO: 25197 - DNA, 16 bp, Artificial
  oligonucleotide probe
gagcgcagccaagcct

SEQ ID NO: 25198 - DNA, 16 bp, Artificial
  oligonucleotide probe
cagggtgggcgagcga

SEQ ID NO: 25199 - DNA, 16 bp, Artificial
  oligonucleotide probe
acgcccaacagggagc

SEQ ID NO: 25200 - DNA, 16 bp, Artificial
  oligonucleotide probe
caggcctccctcgcga

SEQ ID NO: 25201 - DNA, 16 bp, Artificial
  oligonucleotide probe
caccagcgagacgcga

SEQ ID NO: 25202 - DNA, 16 bp, Artificial
  oligonucleotide probe
cgagcaccgagccgga

SEQ ID NO: 25203 - DNA, 16 bp, Artificial
  oligonucleotide probe
cctccggacctcacgc

SEQ ID NO: 25204 - DNA, 16 bp, Artificial
  oligonucleotide probe
tgctcggatgctgcga

SEQ ID NO: 25205 - DNA, 16 bp, Artificial
  oligonucleotide probe
gagcgcagccaagcct

SEQ ID NO: 25206 - DNA, 16 bp, Artificial
  oligonucleotide probe
caggacgctggccctc

SEQ ID NO: 25207 - DNA, 16 bp, Artificial
  oligonucleotide probe
cctcgtggcggacgga

SEQ ID NO: 25208 - DNA, 16 bp, Artificial
  oligonucleotide probe
gcgacagggcctgcct

SEQ ID NO: 25209 - DNA, 16 bp, Artificial
  oligonucleotide probe
agcggcgagagcgtcc

SEQ ID NO: 25210 - DNA, 16 bp, Artificial
  oligonucleotide probe
cgagcaccgagccgga

SEQ ID NO: 25211 - DNA, 16 bp, Artificial
  oligonucleotide probe
cctccggacctcacgc

SEQ ID NO: 25212 - DNA, 16 bp, Artificial
  oligonucleotide probe
gtgggggtgcagggaa

SEQ ID NO: 25213 - DNA, 16 bp, Artificial
  oligonucleotide probe
ggtcgcaggcgagggt

SEQ ID NO: 25214 - DNA, 16 bp, Artificial
  oligonucleotide probe
tggcgcctgtccgtgg

SEQ ID NO: 25215 - DNA, 16 bp, Artificial
  oligonucleotide probe
gtggcgagcctcgggt

SEQ ID NO: 25216 - DNA, 16 bp, Artificial
  oligonucleotide probe
cgagcaccgagccgga

SEQ ID NO: 25217 - DNA, 16 bp, Artificial
  oligonucleotide probe
cctccggacctcacgc

SEQ ID NO: 25218 - DNA, 16 bp, Artificial
  oligonucleotide probe
cgagcaccgagccgga

SEQ ID NO: 25219 - DNA, 16 bp, Artificial
  oligonucleotide probe
cctccggacctcacgc

SEQ ID NO: 25220 - DNA, 16 bp, Artificial
  oligonucleotide probe
gcgacagggcctgcct

SEQ ID NO: 25221 - DNA, 16 bp, Artificial
  oligonucleotide probe
agcggcgagagcgtcc

SEQ ID NO: 25222 - DNA, 16 bp, Artificial
  oligonucleotide probe
gtgggggtgcagggaa

SEQ ID NO: 25223 - DNA, 16 bp, Artificial
  oligonucleotide probe
ggtcgcaggcgagggt

SEQ ID NO: 25224 - DNA, 16 bp, Artificial
  oligonucleotide probe
gacgcaccagcgcgag

SEQ ID NO: 25225 - DNA, 16 bp, Artificial
  oligonucleotide probe
tggcaccagcaggggt

SEQ ID NO: 25226 - DNA, 16 bp, Artificial
  oligonucleotide probe
caggacgctggccctc

SEQ ID NO: 25227 - DNA, 16 bp, Artificial
  oligonucleotide probe
cctcgtggcggacgga

SEQ ID NO: 25228 - DNA, 16 bp, Artificial
  oligonucleotide probe
gtgggggtgcagggaa

SEQ ID NO: 25229 - DNA, 16 bp, Artificial
  oligonucleotide probe
ggtcgcaggcgagggt

SEQ ID NO: 25230 - DNA, 16 bp, Artificial
  oligonucleotide probe
cgagcaccgagccgga

SEQ ID NO: 25231 - DNA, 16 bp, Artificial
  oligonucleotide probe
cctccggacctcacgc

SEQ ID NO: 25232 - DNA, 16 bp, Artificial
  oligonucleotide probe
gtgggggtgcagggaa

SEQ ID NO: 25233 - DNA, 16 bp, Artificial
  oligonucleotide probe
ggtcgcaggcgagggt

SEQ ID NO: 25234 - DNA, 16 bp, Artificial
  oligonucleotide probe
tgctcggatgctgcga

SEQ ID NO: 25235 - DNA, 16 bp, Artificial
  oligonucleotide probe
gagcgcagccaagcct

SEQ ID NO: 25236 - DNA, 16 bp, Artificial
  oligonucleotide probe
gtggccaatcacgcga

SEQ ID NO: 25237 - DNA, 16 bp, Artificial
  oligonucleotide probe
agcgcaccgacgacgc

SEQ ID NO: 25238 - DNA, 16 bp, Artificial
  oligonucleotide probe
gcaggacggacggcct

SEQ ID NO: 25239 - DNA, 16 bp, Artificial
  oligonucleotide probe
gcgacctcacgcgcag

SEQ ID NO: 25240 - DNA, 16 bp, Artificial
  oligonucleotide probe
cgagcaccgagccgga

SEQ ID NO: 25241 - DNA, 16 bp, Artificial
  oligonucleotide probe
cctccggacctcacgc

SEQ ID NO: 25242 - DNA, 16 bp, Artificial
  oligonucleotide probe
cgagcaccgagccgga

SEQ ID NO: 25243 - DNA, 16 bp, Artificial
  oligonucleotide probe
cctccggacctcacgc

SEQ ID NO: 25244 - DNA, 16 bp, Artificial
  oligonucleotide probe
gcgacagggcctgcct

SEQ ID NO: 25245 - DNA, 16 bp, Artificial
  oligonucleotide probe
agcggcgagagcgtcc

SEQ ID NO: 25246 - DNA, 16 bp, Artificial
  oligonucleotide probe
gcgacagggcctgcct

SEQ ID NO: 25247 - DNA, 16 bp, Artificial
  oligonucleotide probe
agcggcgagagcgtcc

SEQ ID NO: 25248 - DNA, 16 bp, Artificial
  oligonucleotide probe
gacgcaccagcgcgag

SEQ ID NO: 25249 - DNA, 16 bp, Artificial
  oligonucleotide probe
tggcaccagcaggggt

SEQ ID NO: 25250 - DNA, 16 bp, Artificial
  oligonucleotide probe
caggacgctggccctc

SEQ ID NO: 25251 - DNA, 16 bp, Artificial
  oligonucleotide probe
cctcgtggcggacgga

SEQ ID NO: 25252 - DNA, 16 bp, Artificial
  oligonucleotide probe
tggcgcctgtccgtgg

SEQ ID NO: 25253 - DNA, 16 bp, Artificial
  oligonucleotide probe
gtggcgagcctcgggt

SEQ ID NO: 25254 - DNA, 16 bp, Artificial
  oligonucleotide probe
gacgcaccagcgcgag

SEQ ID NO: 25255 - DNA, 16 bp, Artificial
  oligonucleotide probe
tggcaccagcaggggt

SEQ ID NO: 25256 - DNA, 16 bp, Artificial
  oligonucleotide probe
cgagcaccgagccgga

SEQ ID NO: 25257 - DNA, 16 bp, Artificial
  oligonucleotide probe
cctccggacctcacgc

SEQ ID NO: 25258 - DNA, 16 bp, Artificial
  oligonucleotide probe
cacccgagagcggtgg

SEQ ID NO: 25259 - DNA, 16 bp, Artificial
  oligonucleotide probe
gcgagtcccggaagcg

SEQ ID NO: 25260 - DNA, 16 bp, Artificial
  oligonucleotide probe
cacccgagagcggtgg

SEQ ID NO: 25261 - DNA, 16 bp, Artificial
  oligonucleotide probe
gcgagtcccggaagcg

SEQ ID NO: 25262 - DNA, 16 bp, Artificial
  oligonucleotide probe
gacgcaccagcgcgag

SEQ ID NO: 25263 - DNA, 16 bp, Artificial
  oligonucleotide probe
tggcaccagcaggggt

SEQ ID NO: 25264 - DNA, 16 bp, Artificial
  oligonucleotide probe
gtggccaatcacgcga

SEQ ID NO: 25265 - DNA, 16 bp, Artificial
  oligonucleotide probe
agcgcaccgacgacgc

SEQ ID NO: 25266 - DNA, 16 bp, Artificial
  oligonucleotide probe
gcgacagggcctgcct

SEQ ID NO: 25267 - DNA, 16 bp, Artificial
  oligonucleotide probe
agcggcgagagcgtcc

SEQ ID NO: 25268 - DNA, 16 bp, Artificial
  oligonucleotide probe
cggagcaggagcggaa

SEQ ID NO: 25269 - DNA, 16 bp, Artificial
  oligonucleotide probe
ggtcgcctgtccagcg

SEQ ID NO: 25270 - DNA, 16 bp, Artificial
  oligonucleotide probe
cgagcaccgagccgga

SEQ ID NO: 25271 - DNA, 16 bp, Artificial
  oligonucleotide probe
cctccggacctcacgc

SEQ ID NO: 25272 - DNA, 16 bp, Artificial
  oligonucleotide probe
cagggtgggcgagcga

SEQ ID NO: 25273 - DNA, 16 bp, Artificial
  oligonucleotide probe
acgcccaacagggagc

SEQ ID NO: 25274 - DNA, 16 bp, Artificial
  oligonucleotide probe
gcgacagggcctgcct

SEQ ID NO: 25275 - DNA, 16 bp, Artificial
  oligonucleotide probe
agcggcgagagcgtcc

SEQ ID NO: 25276 - DNA, 16 bp, Artificial
  oligonucleotide probe
tgctcggatgctgcga

SEQ ID NO: 25277 - DNA, 16 bp, Artificial
  oligonucleotide probe
gagcgcagccaagcct

SEQ ID NO: 25278 - DNA, 16 bp, Artificial
  oligonucleotide probe
gagcgagcagcgggtc

SEQ ID NO: 25279 - DNA, 16 bp, Artificial
  oligonucleotide probe
acgccctcaccagcga

SEQ ID NO: 25280 - DNA, 16 bp, Artificial
  oligonucleotide probe
acgcagcggggtgacg

SEQ ID NO: 25281 - DNA, 16 bp, Artificial
  oligonucleotide probe
caccgcctcagggacg

SEQ ID NO: 25282 - DNA, 16 bp, Artificial
  oligonucleotide probe
tgctcggatgctgcga

SEQ ID NO: 25283 - DNA, 16 bp, Artificial
  oligonucleotide probe
gagcgcagccaagcct

SEQ ID NO: 25284 - DNA, 16 bp, Artificial
  oligonucleotide probe
gcgacagggcctgcct

SEQ ID NO: 25285 - DNA, 16 bp, Artificial
  oligonucleotide probe
agcggcgagagcgtcc

SEQ ID NO: 25286 - DNA, 16 bp, Artificial
  oligonucleotide probe
gtggccaatcacgcga

SEQ ID NO: 25287 - DNA, 16 bp, Artificial
  oligonucleotide probe
agcgcaccgacgacgc

SEQ ID NO: 25288 - DNA, 16 bp, Artificial
  oligonucleotide probe
cacccgagagcggtgg

SEQ ID NO: 25289 - DNA, 16 bp, Artificial
  oligonucleotide probe
gcgagtcccggaagcg

SEQ ID NO: 25290 - DNA, 16 bp, Artificial
  oligonucleotide probe
cggagcaggagcggaa

SEQ ID NO: 25291 - DNA, 16 bp, Artificial
  oligonucleotide probe
ggtcgcctgtccagcg

SEQ ID NO: 25292 - DNA, 16 bp, Artificial
  oligonucleotide probe
cggagcaggagcggaa

SEQ ID NO: 25293 - DNA, 16 bp, Artificial
  oligonucleotide probe
ggtcgcctgtccagcg

SEQ ID NO: 25294 - DNA, 16 bp, Artificial
  oligonucleotide probe
gacgcaccagcgcgag

SEQ ID NO: 25295 - DNA, 16 bp, Artificial
  oligonucleotide probe
tggcaccagcaggggt

SEQ ID NO: 25296 - DNA, 16 bp, Artificial
  oligonucleotide probe
cagggtgggcgagcga

SEQ ID NO: 25297 - DNA, 16 bp, Artificial
  oligonucleotide probe
acgcccaacagggagc

SEQ ID NO: 25298 - DNA, 16 bp, Artificial
  oligonucleotide probe
tgctcggatgctgcga

SEQ ID NO: 25299 - DNA, 16 bp, Artificial
  oligonucleotide probe
gagcgcagccaagcct

SEQ ID NO: 25300 - DNA, 16 bp, Artificial
  oligonucleotide probe
cgagcaggcgaggcag

SEQ ID NO: 25301 - DNA, 16 bp, Artificial
  oligonucleotide probe
gcctcaggacgcacgc

SEQ ID NO: 25302 - DNA, 16 bp, Artificial
  oligonucleotide probe
gcaggacggacggcct

SEQ ID NO: 25303 - DNA, 16 bp, Artificial
  oligonucleotide probe
gcgacctcacgcgcag

SEQ ID NO: 25304 - DNA, 16 bp, Artificial
  oligonucleotide probe
cacccgagagcggtgg

SEQ ID NO: 25305 - DNA, 16 bp, Artificial
  oligonucleotide probe
gcgagtcccggaagcg

SEQ ID NO: 25306 - DNA, 16 bp, Artificial
  oligonucleotide probe
gcaggacggacggcct

SEQ ID NO: 25307 - DNA, 16 bp, Artificial
  oligonucleotide probe
gcgacctcacgcgcag

SEQ ID NO: 25308 - DNA, 16 bp, Artificial
  oligonucleotide probe
caccggtcagcggggt

SEQ ID NO: 25309 - DNA, 16 bp, Artificial
  oligonucleotide probe
actgcggacgaggcct

SEQ ID NO: 25310 - DNA, 16 bp, Artificial
  oligonucleotide probe
tgctcggatgctgcga

SEQ ID NO: 25311 - DNA, 16 bp, Artificial
  oligonucleotide probe
gagcgcagccaagcct

SEQ ID NO: 25312 - DNA, 16 bp, Artificial
  oligonucleotide probe
cacccgagagcggtgg

SEQ ID NO: 25313 - DNA, 16 bp, Artificial
  oligonucleotide probe
gcgagtcccggaagcg

SEQ ID NO: 25314 - DNA, 16 bp, Artificial
  oligonucleotide probe
cgagcaggcgaggcag

SEQ ID NO: 25315 - DNA, 16 bp, Artificial
  oligonucleotide probe
gcctcaggacgcacgc

SEQ ID NO: 25316 - DNA, 16 bp, Artificial
  oligonucleotide probe
tggcgcctgtccgtgg

SEQ ID NO: 25317 - DNA, 16 bp, Artificial
  oligonucleotide probe
gtggcgagcctcgggt

SEQ ID NO: 25318 - DNA, 16 bp, Artificial
  oligonucleotide probe
acgcagcggggtgacg

SEQ ID NO: 25319 - DNA, 16 bp, Artificial
  oligonucleotide probe
caccgcctcagggacg

SEQ ID NO: 25320 - DNA, 16 bp, Artificial
  oligonucleotide probe
caggacgctggccctc

SEQ ID NO: 25321 - DNA, 16 bp, Artificial
  oligonucleotide probe
cctcgtggcggacgga

SEQ ID NO: 25322 - DNA, 16 bp, Artificial
  oligonucleotide probe
cagggtgggcgagcga

SEQ ID NO: 25323 - DNA, 16 bp, Artificial
  oligonucleotide probe
acgcccaacagggagc

SEQ ID NO: 25324 - DNA, 16 bp, Artificial
  oligonucleotide probe
gcgacagggcctgcct

SEQ ID NO: 25325 - DNA, 16 bp, Artificial
  oligonucleotide probe
agcggcgagagcgtcc

SEQ ID NO: 25326 - DNA, 16 bp, Artificial
  oligonucleotide probe
cgagcaccgagccgga

SEQ ID NO: 25327 - DNA, 16 bp, Artificial
  oligonucleotide probe
cctccggacctcacgc

SEQ ID NO: 25328 - DNA, 16 bp, Artificial
  oligonucleotide probe
tggcgcctgtccgtgg

SEQ ID NO: 25329 - DNA, 16 bp, Artificial
  oligonucleotide probe
gtggcgagcctcgggt

SEQ ID NO: 25330 - DNA, 16 bp, Artificial
  oligonucleotide probe
cgagcaccgagccgga

SEQ ID NO: 25331 - DNA, 16 bp, Artificial
  oligonucleotide probe
cctccggacctcacgc

SEQ ID NO: 25332 - DNA, 16 bp, Artificial
  oligonucleotide probe
caggcctccctcgcga

SEQ ID NO: 25333 - DNA, 16 bp, Artificial
  oligonucleotide probe
caccagcgagacgcga

SEQ ID NO: 25334 - DNA, 16 bp, Artificial
  oligonucleotide probe
tgctcggatgctgcga

SEQ ID NO: 25335 - DNA, 16 bp, Artificial
  oligonucleotide probe
gagcgcagccaagcct

SEQ ID NO: 25336 - DNA, 16 bp, Artificial
  oligonucleotide probe
gacggagcacgccgga

SEQ ID NO: 25337 - DNA, 16 bp, Artificial
  oligonucleotide probe
cggagcctgagcgtgg

SEQ ID NO: 25338 - DNA, 16 bp, Artificial
  oligonucleotide probe
caggcctccctcgcga

SEQ ID NO: 25339 - DNA, 16 bp, Artificial
  oligonucleotide probe
caccagcgagacgcga

SEQ ID NO: 25340 - DNA, 16 bp, Artificial
  oligonucleotide probe
gcgacagggcctgcct

SEQ ID NO: 25341 - DNA, 16 bp, Artificial
  oligonucleotide probe
agcggcgagagcgtcc

SEQ ID NO: 25342 - DNA, 16 bp, Artificial
  oligonucleotide probe
gcgacagggcctgcct

SEQ ID NO: 25343 - DNA, 16 bp, Artificial
  oligonucleotide probe
agcggcgagagcgtcc

SEQ ID NO: 25344 - DNA, 16 bp, Artificial
  oligonucleotide probe
tgctcggatgctgcga

SEQ ID NO: 25345 - DNA, 16 bp, Artificial
  oligonucleotide probe
gagcgcagccaagcct

SEQ ID NO: 25346 - DNA, 16 bp, Artificial
  oligonucleotide probe
caggacgctggccctc

SEQ ID NO: 25347 - DNA, 16 bp, Artificial
  oligonucleotide probe
cctcgtggcggacgga

SEQ ID NO: 25348 - DNA, 16 bp, Artificial
  oligonucleotide probe
cagggtgggcgagcga

SEQ ID NO: 25349 - DNA, 16 bp, Artificial
  oligonucleotide probe
acgcccaacagggagc

SEQ ID NO: 25350 - DNA, 16 bp, Artificial
  oligonucleotide probe
cgagcaccgagccgga

SEQ ID NO: 25351 - DNA, 16 bp, Artificial
  oligonucleotide probe
cctccggacctcacgc

SEQ ID NO: 25352 - DNA, 16 bp, Artificial
  oligonucleotide probe
caggacgctggccctc

SEQ ID NO: 25353 - DNA, 16 bp, Artificial
  oligonucleotide probe
cctcgtggcggacgga

SEQ ID NO: 25354 - DNA, 16 bp, Artificial
  oligonucleotide probe
gacgcaccagcgcgag

SEQ ID NO: 25355 - DNA, 16 bp, Artificial
  oligonucleotide probe
tggcaccagcaggggt

SEQ ID NO: 25356 - DNA, 16 bp, Artificial
  oligonucleotide probe
gagcgagcagcgggtc

SEQ ID NO: 25357 - DNA, 16 bp, Artificial
  oligonucleotide probe
acgccctcaccagcga

SEQ ID NO: 25358 - DNA, 16 bp, Artificial
  oligonucleotide probe
tgctcggatgctgcga

SEQ ID NO: 25359 - DNA, 16 bp, Artificial
  oligonucleotide probe
gagcgcagccaagcct

SEQ ID NO: 25360 - DNA, 16 bp, Artificial
  oligonucleotide probe
gacgcaccagcgcgag

SEQ ID NO: 25361 - DNA, 16 bp, Artificial
  oligonucleotide probe
tggcaccagcaggggt

SEQ ID NO: 25362 - DNA, 16 bp, Artificial
  oligonucleotide probe
cgagcaggcgaggcag

SEQ ID NO: 25363 - DNA, 16 bp, Artificial
  oligonucleotide probe
gcctcaggacgcacgc

SEQ ID NO: 25364 - DNA, 16 bp, Artificial
  oligonucleotide probe
gtgggggtgcagggaa

SEQ ID NO: 25365 - DNA, 16 bp, Artificial
  oligonucleotide probe
ggtcgcaggcgagggt

SEQ ID NO: 25366 - DNA, 16 bp, Artificial
  oligonucleotide probe
cgagcaccgagccgga

SEQ ID NO: 25367 - DNA, 16 bp, Artificial
  oligonucleotide probe
cctccggacctcacgc

SEQ ID NO: 25368 - DNA, 16 bp, Artificial
  oligonucleotide probe
cgagcaccgagccgga

SEQ ID NO: 25369 - DNA, 16 bp, Artificial
  oligonucleotide probe
cctccggacctcacgc

SEQ ID NO: 25370 - DNA, 16 bp, Artificial
  oligonucleotide probe
gtgggggtgcagggaa

SEQ ID NO: 25371 - DNA, 16 bp, Artificial
  oligonucleotide probe
ggtcgcaggcgagggt

SEQ ID NO: 25372 - DNA, 16 bp, Artificial
  oligonucleotide probe
gtgggggtgcagggaa

SEQ ID NO: 25373 - DNA, 16 bp, Artificial
  oligonucleotide probe
ggtcgcaggcgagggt

SEQ ID NO: 25374 - DNA, 16 bp, Artificial
  oligonucleotide probe
gacgcaccagcgcgag

SEQ ID NO: 25375 - DNA, 16 bp, Artificial
  oligonucleotide probe
tggcaccagcaggggt

SEQ ID NO: 25376 - DNA, 16 bp, Artificial
  oligonucleotide probe
tggcgcctgtccgtgg

SEQ ID NO: 25377 - DNA, 16 bp, Artificial
  oligonucleotide probe
gtggcgagcctcgggt

SEQ ID NO: 25378 - DNA, 16 bp, Artificial
  oligonucleotide probe
cgagcaccgagccgga

SEQ ID NO: 25379 - DNA, 16 bp, Artificial
  oligonucleotide probe
cctccggacctcacgc

SEQ ID NO: 25380 - DNA, 16 bp, Artificial
  oligonucleotide probe
cgagcaccgagccgga

SEQ ID NO: 25381 - DNA, 16 bp, Artificial
  oligonucleotide probe
cctccggacctcacgc

SEQ ID NO: 25382 - DNA, 16 bp, Artificial
  oligonucleotide probe
gcgacagggcctgcct

SEQ ID NO: 25383 - DNA, 16 bp, Artificial
  oligonucleotide probe
agcggcgagagcgtcc

SEQ ID NO: 25384 - DNA, 16 bp, Artificial
  oligonucleotide probe
tgctcggatgctgcga

SEQ ID NO: 25385 - DNA, 16 bp, Artificial
  oligonucleotide probe
gagcgcagccaagcct

SEQ ID NO: 25386 - DNA, 16 bp, Artificial
  oligonucleotide probe
caggacgctggccctc

SEQ ID NO: 25387 - DNA, 16 bp, Artificial
  oligonucleotide probe
cctcgtggcggacgga

SEQ ID NO: 25388 - DNA, 16 bp, Artificial
  oligonucleotide probe
cacccgagagcggtgg

SEQ ID NO: 25389 - DNA, 16 bp, Artificial
  oligonucleotide probe
gcgagtcccggaagcg

SEQ ID NO: 25390 - DNA, 16 bp, Artificial
  oligonucleotide probe
cagggcagggtcgggt

SEQ ID NO: 25391 - DNA, 16 bp, Artificial
  oligonucleotide probe
agcggacggcaggagc

SEQ ID NO: 25392 - DNA, 16 bp, Artificial
  oligonucleotide probe
gcgacagggcctgcct

SEQ ID NO: 25393 - DNA, 16 bp, Artificial
  oligonucleotide probe
agcggcgagagcgtcc

SEQ ID NO: 25394 - DNA, 16 bp, Artificial
  oligonucleotide probe
caggcctccctcgcga

SEQ ID NO: 25395 - DNA, 16 bp, Artificial
  oligonucleotide probe
caccagcgagacgcga

SEQ ID NO: 25396 - DNA, 16 bp, Artificial
  oligonucleotide probe
gagcgagcagcgggtc

SEQ ID NO: 25397 - DNA, 16 bp, Artificial
  oligonucleotide probe
acgccctcaccagcga

SEQ ID NO: 25398 - DNA, 16 bp, Artificial
  oligonucleotide probe
cgagcaccgagccgga

SEQ ID NO: 25399 - DNA, 16 bp, Artificial
  oligonucleotide probe
cctccggacctcacgc

SEQ ID NO: 25400 - DNA, 16 bp, Artificial
  oligonucleotide probe
gagcgagcagcgggtc

SEQ ID NO: 25401 - DNA, 16 bp, Artificial
  oligonucleotide probe
acgccctcaccagcga

SEQ ID NO: 25402 - DNA, 16 bp, Artificial
  oligonucleotide probe
gacgcaccagcgcgag

SEQ ID NO: 25403 - DNA, 16 bp, Artificial
  oligonucleotide probe
tggcaccagcaggggt

SEQ ID NO: 25404 - DNA, 16 bp, Artificial
  oligonucleotide probe
caccggtcagcggggt

SEQ ID NO: 25405 - DNA, 16 bp, Artificial
  oligonucleotide probe
actgcggacgaggcct

SEQ ID NO: 25406 - DNA, 16 bp, Artificial
  oligonucleotide probe
tgctcggatgctgcga

SEQ ID NO: 25407 - DNA, 16 bp, Artificial
  oligonucleotide probe
gagcgcagccaagcct

SEQ ID NO: 25408 - DNA, 16 bp, Artificial
  oligonucleotide probe
cacccgagagcggtgg

SEQ ID NO: 25409 - DNA, 16 bp, Artificial
  oligonucleotide probe
gcgagtcccggaagcg

SEQ ID NO: 25410 - DNA, 16 bp, Artificial
  oligonucleotide probe
tggcgcctgtccgtgg

SEQ ID NO: 25411 - DNA, 16 bp, Artificial
  oligonucleotide probe
gtggcgagcctcgggt

SEQ ID NO: 25412 - DNA, 16 bp, Artificial
  oligonucleotide probe
cacccgagagcggtgg

SEQ ID NO: 25413 - DNA, 16 bp, Artificial
  oligonucleotide probe
gcgagtcccggaagcg

SEQ ID NO: 25414 - DNA, 16 bp, Artificial
  oligonucleotide probe
gacgcaccagcgcgag

SEQ ID NO: 25415 - DNA, 16 bp, Artificial
  oligonucleotide probe
tggcaccagcaggggt

SEQ ID NO: 25416 - DNA, 16 bp, Artificial
  oligonucleotide probe
caggacgctggccctc

SEQ ID NO: 25417 - DNA, 16 bp, Artificial
  oligonucleotide probe
cctcgtggcggacgga

SEQ ID NO: 25418 - DNA, 16 bp, Artificial
  oligonucleotide probe
caggcctccctcgcga

SEQ ID NO: 25419 - DNA, 16 bp, Artificial
  oligonucleotide probe
caccagcgagacgcga

SEQ ID NO: 25420 - DNA, 16 bp, Artificial
  oligonucleotide probe
gtgggggtgcagggaa

SEQ ID NO: 25421 - DNA, 16 bp, Artificial
  oligonucleotide probe
ggtcgcaggcgagggt

SEQ ID NO: 25422 - DNA, 16 bp, Artificial
  oligonucleotide probe
caggacgctggccctc

SEQ ID NO: 25423 - DNA, 16 bp, Artificial
  oligonucleotide probe
cctcgtggcggacgga

SEQ ID NO: 25424 - DNA, 16 bp, Artificial
  oligonucleotide probe
tggcgcctgtccgtgg

SEQ ID NO: 25425 - DNA, 16 bp, Artificial
  oligonucleotide probe
gtggcgagcctcgggt

SEQ ID NO: 25426 - DNA, 16 bp, Artificial
  oligonucleotide probe
gacgcaccagcgcgag

SEQ ID NO: 25427 - DNA, 16 bp, Artificial
  oligonucleotide probe
tggcaccagcaggggt

SEQ ID NO: 25428 - DNA, 16 bp, Artificial
  oligonucleotide probe
caggacgctggccctc

SEQ ID NO: 25429 - DNA, 16 bp, Artificial
  oligonucleotide probe
cctcgtggcggacgga

SEQ ID NO: 25430 - DNA, 16 bp, Artificial
  oligonucleotide probe
gcgacagggcctgcct

SEQ ID NO: 25431 - DNA, 16 bp, Artificial
  oligonucleotide probe
agcggcgagagcgtcc

SEQ ID NO: 25432 - DNA, 16 bp, Artificial
  oligonucleotide probe
cggagcaggagcggaa

SEQ ID NO: 25433 - DNA, 16 bp, Artificial
  oligonucleotide probe
ggtcgcctgtccagcg

SEQ ID NO: 25434 - DNA, 16 bp, Artificial
  oligonucleotide probe
tggcgcctgtccgtgg

SEQ ID NO: 25435 - DNA, 16 bp, Artificial
  oligonucleotide probe
gtggcgagcctcgggt

SEQ ID NO: 25436 - DNA, 16 bp, Artificial
  oligonucleotide probe
cgagcaccgagccgga

SEQ ID NO: 25437 - DNA, 16 bp, Artificial
  oligonucleotide probe
cctccggacctcacgc

SEQ ID NO: 25438 - DNA, 16 bp, Artificial
  oligonucleotide probe
gagcgagcagcgggtc

SEQ ID NO: 25439 - DNA, 16 bp, Artificial
  oligonucleotide probe
acgccctcaccagcga

SEQ ID NO: 25440 - DNA, 16 bp, Artificial
  oligonucleotide probe
gacgcaccagcgcgag

SEQ ID NO: 25441 - DNA, 16 bp, Artificial
  oligonucleotide probe
tggcaccagcaggggt

SEQ ID NO: 25442 - DNA, 16 bp, Artificial
  oligonucleotide probe
cgagcaccgagccgga

SEQ ID NO: 25443 - DNA, 16 bp, Artificial
  oligonucleotide probe
cctccggacctcacgc

SEQ ID NO: 25444 - DNA, 16 bp, Artificial
  oligonucleotide probe
cgagcaccgagccgga

SEQ ID NO: 25445 - DNA, 16 bp, Artificial
  oligonucleotide probe
cctccggacctcacgc

SEQ ID NO: 25446 - DNA, 16 bp, Artificial
  oligonucleotide probe
cgagcaccgagccgga

SEQ ID NO: 25447 - DNA, 16 bp, Artificial
  oligonucleotide probe
cctccggacctcacgc

SEQ ID NO: 25448 - DNA, 16 bp, Artificial
  oligonucleotide probe
cgagcaccgagccgga

SEQ ID NO: 25449 - DNA, 16 bp, Artificial
  oligonucleotide probe
cctccggacctcacgc

SEQ ID NO: 25450 - DNA, 16 bp, Artificial
  oligonucleotide probe
gtccgggtcaggcagg

SEQ ID NO: 25451 - DNA, 16 bp, Artificial
  oligonucleotide probe
cggagagcgcgagcct

SEQ ID NO: 25452 - DNA, 16 bp, Artificial
  oligonucleotide probe
cgagcaccgagccgga

SEQ ID NO: 25453 - DNA, 16 bp, Artificial
  oligonucleotide probe
cctccggacctcacgc

SEQ ID NO: 25454 - DNA, 16 bp, Artificial
  oligonucleotide probe
tggcgcctgtccgtgg

SEQ ID NO: 25455 - DNA, 16 bp, Artificial
  oligonucleotide probe
gtggcgagcctcgggt

SEQ ID NO: 25456 - DNA, 16 bp, Artificial
  oligonucleotide probe
tgctcggatgctgcga

SEQ ID NO: 25457 - DNA, 16 bp, Artificial
  oligonucleotide probe
gagcgcagccaagcct

SEQ ID NO: 25458 - DNA, 16 bp, Artificial
  oligonucleotide probe
cgagcaccgagccgga

SEQ ID NO: 25459 - DNA, 16 bp, Artificial
  oligonucleotide probe
cctccggacctcacgc

SEQ ID NO: 25460 - DNA, 16 bp, Artificial
  oligonucleotide probe
cgagcaggcgaggcag

SEQ ID NO: 25461 - DNA, 16 bp, Artificial
  oligonucleotide probe
gcctcaggacgcacgc

SEQ ID NO: 25462 - DNA, 16 bp, Artificial
  oligonucleotide probe
caggacgctggccctc

SEQ ID NO: 25463 - DNA, 16 bp, Artificial
  oligonucleotide probe
cctcgtggcggacgga

SEQ ID NO: 25464 - DNA, 16 bp, Artificial
  oligonucleotide probe
agcggcgagagcgtcc

SEQ ID NO: 25465 - DNA, 16 bp, Artificial
  oligonucleotide probe
gacgcaccagcgcgag

SEQ ID NO: 25466 - DNA, 16 bp, Artificial
  oligonucleotide probe
tggcgcctgtccgtgg

SEQ ID NO: 25467 - DNA, 16 bp, Artificial
  oligonucleotide probe
gtggcgagcctcgggt

SEQ ID NO: 25468 - DNA, 16 bp, Artificial
  oligonucleotide probe
cgagcaccgagccgga

SEQ ID NO: 25469 - DNA, 16 bp, Artificial
  oligonucleotide probe
cctccggacctcacgc

SEQ ID NO: 25470 - DNA, 16 bp, Artificial
  oligonucleotide probe
cgagcaccgagccgga

SEQ ID NO: 25471 - DNA, 16 bp, Artificial
  oligonucleotide probe
cctccggacctcacgc

SEQ ID NO: 25472 - DNA, 16 bp, Artificial
  oligonucleotide probe
gagcgagcagcgggtc

SEQ ID NO: 25473 - DNA, 16 bp, Artificial
  oligonucleotide probe
acgccctcaccagcga

SEQ ID NO: 25474 - DNA, 16 bp, Artificial
  oligonucleotide probe
gacgcaccagcgcgag

SEQ ID NO: 25475 - DNA, 16 bp, Artificial
  oligonucleotide probe
tggcaccagcaggggt

SEQ ID NO: 25476 - DNA, 16 bp, Artificial
  oligonucleotide probe
caggacgctggccctc

SEQ ID NO: 25477 - DNA, 16 bp, Artificial
  oligonucleotide probe
cctcgtggcggacgga

SEQ ID NO: 25478 - DNA, 16 bp, Artificial
  oligonucleotide probe
tgctcggatgctgcga

SEQ ID NO: 25479 - DNA, 16 bp, Artificial
  oligonucleotide probe
gagcgcagccaagcct

SEQ ID NO: 25480 - DNA, 16 bp, Artificial
  oligonucleotide probe
tgctcggatgctgcga

SEQ ID NO: 25481 - DNA, 16 bp, Artificial
  oligonucleotide probe
gagcgcagccaagcct

SEQ ID NO: 25482 - DNA, 16 bp, Artificial
  oligonucleotide probe
cagggtgggcgagcga

SEQ ID NO: 25483 - DNA, 16 bp, Artificial
  oligonucleotide probe
acgcccaacagggagc

SEQ ID NO: 25484 - DNA, 16 bp, Artificial
  oligonucleotide probe
tggcgcctgtccgtgg

SEQ ID NO: 25485 - DNA, 16 bp, Artificial
  oligonucleotide probe
gtggcgagcctcgggt

SEQ ID NO: 25486 - DNA, 16 bp, Artificial
  oligonucleotide probe
cacccgagagcggtgg

SEQ ID NO: 25487 - DNA, 16 bp, Artificial
  oligonucleotide probe
gcgagtcccggaagcg

SEQ ID NO: 25488 - DNA, 16 bp, Artificial
  oligonucleotide probe
cgagcaccgagccgga

SEQ ID NO: 25489 - DNA, 16 bp, Artificial
  oligonucleotide probe
cctccggacctcacgc

SEQ ID NO: 25490 - DNA, 16 bp, Artificial
  oligonucleotide probe
caggacgctggccctc

SEQ ID NO: 25491 - DNA, 16 bp, Artificial
  oligonucleotide probe
cctcgtggcggacgga

SEQ ID NO: 25492 - DNA, 16 bp, Artificial
  oligonucleotide probe
gtgggggtgcagggaa

SEQ ID NO: 25493 - DNA, 16 bp, Artificial
  oligonucleotide probe
ggtcgcaggcgagggt

SEQ ID NO: 25494 - DNA, 16 bp, Artificial
  oligonucleotide probe
gacgcaccagcgcgag

SEQ ID NO: 25495 - DNA, 16 bp, Artificial
  oligonucleotide probe
tggcaccagcaggggt

SEQ ID NO: 25496 - DNA, 16 bp, Artificial
  oligonucleotide probe
tgctcggatgctgcga

SEQ ID NO: 25497 - DNA, 16 bp, Artificial
  oligonucleotide probe
gagcgcagccaagcct

SEQ ID NO: 25498 - DNA, 16 bp, Artificial
  oligonucleotide probe
gtggccaatcacgcga

SEQ ID NO: 25499 - DNA, 16 bp, Artificial
  oligonucleotide probe
agcgcaccgacgacgc

SEQ ID NO: 25500 - DNA, 16 bp, Artificial
  oligonucleotide probe
gtggccaatcacgcga

SEQ ID NO: 25501 - DNA, 16 bp, Artificial
  oligonucleotide probe
agcgcaccgacgacgc

SEQ ID NO: 25502 - DNA, 16 bp, Artificial
  oligonucleotide probe
gacgcaccagcgcgag

SEQ ID NO: 25503 - DNA, 16 bp, Artificial
  oligonucleotide probe
tggcaccagcaggggt

SEQ ID NO: 25504 - DNA, 16 bp, Artificial
  oligonucleotide probe
cgagcaccgagccgga

SEQ ID NO: 25505 - DNA, 16 bp, Artificial
  oligonucleotide probe
cctccggacctcacgc

SEQ ID NO: 25506 - DNA, 16 bp, Artificial
  oligonucleotide probe
acgcagcggggtgacg

SEQ ID NO: 25507 - DNA, 16 bp, Artificial
  oligonucleotide probe
caccgcctcagggacg

SEQ ID NO: 25508 - DNA, 16 bp, Artificial
  oligonucleotide probe
tggcgcctgtccgtgg

SEQ ID NO: 25509 - DNA, 16 bp, Artificial
  oligonucleotide probe
gtggcgagcctcgggt

SEQ ID NO: 25510 - DNA, 16 bp, Artificial
  oligonucleotide probe
gtccgggtcaggcagg

SEQ ID NO: 25511 - DNA, 16 bp, Artificial
  oligonucleotide probe
cggagagcgcgagcct

SEQ ID NO: 25512 - DNA, 16 bp, Artificial
  oligonucleotide probe
gcaggacggacggcct

SEQ ID NO: 25513 - DNA, 16 bp, Artificial
  oligonucleotide probe
gcgacctcacgcgcag

SEQ ID NO: 25514 - DNA, 16 bp, Artificial
  oligonucleotide probe
gtggccaatcacgcga

SEQ ID NO: 25515 - DNA, 16 bp, Artificial
  oligonucleotide probe
agcgcaccgacgacgc

SEQ ID NO: 25516 - DNA, 16 bp, Artificial
  oligonucleotide probe
gtccgggtcaggcagg

SEQ ID NO: 25517 - DNA, 16 bp, Artificial
  oligonucleotide probe
cggagagcgcgagcct

SEQ ID NO: 25518 - DNA, 16 bp, Artificial
  oligonucleotide probe
gacgcaccagcgcgag

SEQ ID NO: 25519 - DNA, 16 bp, Artificial
  oligonucleotide probe
tggcaccagcaggggt

SEQ ID NO: 25520 - DNA, 16 bp, Artificial
  oligonucleotide probe
tgctcggatgctgcga

SEQ ID NO: 25521 - DNA, 16 bp, Artificial
  oligonucleotide probe
gagcgcagccaagcct

SEQ ID NO: 25522 - DNA, 16 bp, Artificial
  oligonucleotide probe
cacccgagagcggtgg

SEQ ID NO: 25523 - DNA, 16 bp, Artificial
  oligonucleotide probe
gcgagtcccggaagcg

SEQ ID NO: 25524 - DNA, 16 bp, Artificial
  oligonucleotide probe
caggacgctggccctc

SEQ ID NO: 25525 - DNA, 16 bp, Artificial
  oligonucleotide probe
cctcgtggcggacgga

SEQ ID NO: 25526 - DNA, 16 bp, Artificial
  oligonucleotide probe
gcgacagggcctgcct

SEQ ID NO: 25527 - DNA, 16 bp, Artificial
  oligonucleotide probe
agcggcgagagcgtcc

SEQ ID NO: 25528 - DNA, 16 bp, Artificial
  oligonucleotide probe
caggcctccctcgcga

SEQ ID NO: 25529 - DNA, 16 bp, Artificial
  oligonucleotide probe
caccagcgagacgcga

SEQ ID NO: 25530 - DNA, 16 bp, Artificial
  oligonucleotide probe
gtggccaatcacgcga

SEQ ID NO: 25531 - DNA, 16 bp, Artificial
  oligonucleotide probe
agcgcaccgacgacgc

SEQ ID NO: 25532 - DNA, 16 bp, Artificial
  oligonucleotide probe
cgagcaccgagccgga

SEQ ID NO: 25533 - DNA, 16 bp, Artificial
  oligonucleotide probe
cctccggacctcacgc

SEQ ID NO: 25534 - DNA, 16 bp, Artificial
  oligonucleotide probe
cgagcaggcgaggcag

SEQ ID NO: 25535 - DNA, 16 bp, Artificial
  oligonucleotide probe
gcctcaggacgcacgc

SEQ ID NO: 25536 - DNA, 16 bp, Artificial
  oligonucleotide probe
gacgcaccagcgcgag

SEQ ID NO: 25537 - DNA, 16 bp, Artificial
  oligonucleotide probe
tggcaccagcaggggt

SEQ ID NO: 25538 - DNA, 16 bp, Artificial
  oligonucleotide probe
gacgcaccagcgcgag

SEQ ID NO: 25539 - DNA, 16 bp, Artificial
  oligonucleotide probe
tggcaccagcaggggt

SEQ ID NO: 25540 - DNA, 16 bp, Artificial
  oligonucleotide probe
gcgacagggcctgcct

SEQ ID NO: 25541 - DNA, 16 bp, Artificial
  oligonucleotide probe
agcggcgagagcgtcc

SEQ ID NO: 25542 - DNA, 16 bp, Artificial
  oligonucleotide probe
acgcagcggggtgacg

SEQ ID NO: 25543 - DNA, 16 bp, Artificial
  oligonucleotide probe
caccgcctcagggacg

SEQ ID NO: 25544 - DNA, 16 bp, Artificial
  oligonucleotide probe
caggacgctggccctc

SEQ ID NO: 25545 - DNA, 16 bp, Artificial
  oligonucleotide probe
cctcgtggcggacgga

SEQ ID NO: 25546 - DNA, 16 bp, Artificial
  oligonucleotide probe
agcggcgagagcgtcc

SEQ ID NO: 25547 - DNA, 16 bp, Artificial
  oligonucleotide probe
gacgcaccagcgcgag

SEQ ID NO: 25548 - DNA, 16 bp, Artificial
  oligonucleotide probe
cagggtgggcgagcga

SEQ ID NO: 25549 - DNA, 16 bp, Artificial
  oligonucleotide probe
acgcccaacagggagc

SEQ ID NO: 25550 - DNA, 16 bp, Artificial
  oligonucleotide probe
caccggtcagcggggt

SEQ ID NO: 25551 - DNA, 16 bp, Artificial
  oligonucleotide probe
actgcggacgaggcct

SEQ ID NO: 25552 - DNA, 16 bp, Artificial
  oligonucleotide probe
cgagcaccgagccgga

SEQ ID NO: 25553 - DNA, 16 bp, Artificial
  oligonucleotide probe
cctccggacctcacgc

SEQ ID NO: 25554 - DNA, 16 bp, Artificial
  oligonucleotide probe
caggacgctggccctc

SEQ ID NO: 25555 - DNA, 16 bp, Artificial
  oligonucleotide probe
cctcgtggcggacgga

SEQ ID NO: 25556 - DNA, 16 bp, Artificial
  oligonucleotide probe
caggacgctggccctc

SEQ ID NO: 25557 - DNA, 16 bp, Artificial
  oligonucleotide probe
cctcgtggcggacgga

SEQ ID NO: 25558 - DNA, 16 bp, Artificial
  oligonucleotide probe
gtgggggtgcagggaa

SEQ ID NO: 25559 - DNA, 16 bp, Artificial
  oligonucleotide probe
ggtcgcaggcgagggt

SEQ ID NO: 25560 - DNA, 16 bp, Artificial
  oligonucleotide probe
cggagcaggagcggaa

SEQ ID NO: 25561 - DNA, 16 bp, Artificial
  oligonucleotide probe
ggtcgcctgtccagcg

SEQ ID NO: 25562 - DNA, 16 bp, Artificial
  oligonucleotide probe
cacccgagagcggtgg

SEQ ID NO: 25563 - DNA, 16 bp, Artificial
  oligonucleotide probe
gcgagtcccggaagcg

SEQ ID NO: 25564 - DNA, 16 bp, Artificial
  oligonucleotide probe
gcgacagggcctgcct

SEQ ID NO: 25565 - DNA, 16 bp, Artificial
  oligonucleotide probe
agcggcgagagcgtcc

SEQ ID NO: 25566 - DNA, 16 bp, Artificial
  oligonucleotide probe
cgagcaggcgaggcag

SEQ ID NO: 25567 - DNA, 16 bp, Artificial
  oligonucleotide probe
gcctcaggacgcacgc

SEQ ID NO: 25568 - DNA, 16 bp, Artificial
  oligonucleotide probe
cacccgagagcggtgg

SEQ ID NO: 25569 - DNA, 16 bp, Artificial
  oligonucleotide probe
gcgagtcccggaagcg

SEQ ID NO: 25570 - DNA, 16 bp, Artificial
  oligonucleotide probe
gcaggacggacggcct

SEQ ID NO: 25571 - DNA, 16 bp, Artificial
  oligonucleotide probe
gcgacctcacgcgcag

SEQ ID NO: 25572 - DNA, 16 bp, Artificial
  oligonucleotide probe
cggagcaggagcggaa

SEQ ID NO: 25573 - DNA, 16 bp, Artificial
  oligonucleotide probe
ggtcgcctgtccagcg

SEQ ID NO: 25574 - DNA, 16 bp, Artificial
  oligonucleotide probe
gacggagcacgccgga

SEQ ID NO: 25575 - DNA, 16 bp, Artificial
  oligonucleotide probe
cggagcctgagcgtgg

SEQ ID NO: 25576 - DNA, 16 bp, Artificial
  oligonucleotide probe
gcgacagggcctgcct

SEQ ID NO: 25577 - DNA, 16 bp, Artificial
  oligonucleotide probe
agcggcgagagcgtcc

SEQ ID NO: 25578 - DNA, 16 bp, Artificial
  oligonucleotide probe
caggacgctggccctc

SEQ ID NO: 25579 - DNA, 16 bp, Artificial
  oligonucleotide probe
cctcgtggcggacgga

SEQ ID NO: 25580 - DNA, 16 bp, Artificial
  oligonucleotide probe
cgagcaccgagccgga

SEQ ID NO: 25581 - DNA, 16 bp, Artificial
  oligonucleotide probe
cctccggacctcacgc

SEQ ID NO: 25582 - DNA, 16 bp, Artificial
  oligonucleotide probe
tgctcggatgctgcga

SEQ ID NO: 25583 - DNA, 16 bp, Artificial
  oligonucleotide probe
gagcgcagccaagcct

SEQ ID NO: 25584 - DNA, 16 bp, Artificial
  oligonucleotide probe
cacccgagagcggtgg

SEQ ID NO: 25585 - DNA, 16 bp, Artificial
  oligonucleotide probe
gcgagtcccggaagcg

SEQ ID NO: 25586 - DNA, 16 bp, Artificial
  oligonucleotide probe
cgagcaccgagccgga

SEQ ID NO: 25587 - DNA, 16 bp, Artificial
  oligonucleotide probe
cctccggacctcacgc

SEQ ID NO: 25588 - DNA, 16 bp, Artificial
  oligonucleotide probe
gtggccaatcacgcga

SEQ ID NO: 25589 - DNA, 16 bp, Artificial
  oligonucleotide probe
agcgcaccgacgacgc

SEQ ID NO: 25590 - DNA, 16 bp, Artificial
  oligonucleotide probe
gcgacagggcctgcct

SEQ ID NO: 25591 - DNA, 16 bp, Artificial
  oligonucleotide probe
agcggcgagagcgtcc

SEQ ID NO: 25592 - DNA, 16 bp, Artificial
  oligonucleotide probe
cacccgagagcggtgg

SEQ ID NO: 25593 - DNA, 16 bp, Artificial
  oligonucleotide probe
gcgagtcccggaagcg

SEQ ID NO: 25594 - DNA, 16 bp, Artificial
  oligonucleotide probe
cacccgagagcggtgg

SEQ ID NO: 25595 - DNA, 16 bp, Artificial
  oligonucleotide probe
gcgagtcccggaagcg

SEQ ID NO: 25596 - DNA, 16 bp, Artificial
  oligonucleotide probe
gcgacagggcctgcct

SEQ ID NO: 25597 - DNA, 16 bp, Artificial
  oligonucleotide probe
agcggcgagagcgtcc

SEQ ID NO: 25598 - DNA, 16 bp, Artificial
  oligonucleotide probe
gtgggggtgcagggaa

SEQ ID NO: 25599 - DNA, 16 bp, Artificial
  oligonucleotide probe
ggtcgcaggcgagggt

SEQ ID NO: 25600 - DNA, 16 bp, Artificial
  oligonucleotide probe
gacgcaccagcgcgag

SEQ ID NO: 25601 - DNA, 16 bp, Artificial
  oligonucleotide probe
tggcaccagcaggggt

SEQ ID NO: 25602 - DNA, 16 bp, Artificial
  oligonucleotide probe
cgagcaccgagccgga

SEQ ID NO: 25603 - DNA, 16 bp, Artificial
  oligonucleotide probe
cctccggacctcacgc

SEQ ID NO: 25604 - DNA, 16 bp, Artificial
  oligonucleotide probe
gtggccaatcacgcga

SEQ ID NO: 25605 - DNA, 16 bp, Artificial
  oligonucleotide probe
agcgcaccgacgacgc

SEQ ID NO: 25606 - DNA, 16 bp, Artificial
  oligonucleotide probe
gcgacagggcctgcct

SEQ ID NO: 25607 - DNA, 16 bp, Artificial
  oligonucleotide probe
agcggcgagagcgtcc

SEQ ID NO: 25608 - DNA, 16 bp, Artificial
  oligonucleotide probe
cgagcaccgagccgga

SEQ ID NO: 25609 - DNA, 16 bp, Artificial
  oligonucleotide probe
cctccggacctcacgc

SEQ ID NO: 25610 - DNA, 16 bp, Artificial
  oligonucleotide probe
cgagcaggcgaggcag

SEQ ID NO: 25611 - DNA, 16 bp, Artificial
  oligonucleotide probe
gcctcaggacgcacgc

SEQ ID NO: 25612 - DNA, 16 bp, Artificial
  oligonucleotide probe
gacgcaccagcgcgag

SEQ ID NO: 25613 - DNA, 16 bp, Artificial
  oligonucleotide probe
tggcaccagcaggggt

SEQ ID NO: 25614 - DNA, 16 bp, Artificial
  oligonucleotide probe
cagggtgggcgagcga

SEQ ID NO: 25615 - DNA, 16 bp, Artificial
  oligonucleotide probe
acgcccaacagggagc

SEQ ID NO: 25616 - DNA, 16 bp, Artificial
  oligonucleotide probe
gcgacagggcctgcct

SEQ ID NO: 25617 - DNA, 16 bp, Artificial
  oligonucleotide probe
agcggcgagagcgtcc

SEQ ID NO: 25618 - DNA, 16 bp, Artificial
  oligonucleotide probe
cggagcaggagcggaa

SEQ ID NO: 25619 - DNA, 16 bp, Artificial
  oligonucleotide probe
ggtcgcctgtccagcg

SEQ ID NO: 25620 - DNA, 16 bp, Artificial
  oligonucleotide probe
tggcgcctgtccgtgg

SEQ ID NO: 25621 - DNA, 16 bp, Artificial
  oligonucleotide probe
gtggcgagcctcgggt

SEQ ID NO: 25622 - DNA, 16 bp, Artificial
  oligonucleotide probe
cacccgagagcggtgg

SEQ ID NO: 25623 - DNA, 16 bp, Artificial
  oligonucleotide probe
gcgagtcccggaagcg

SEQ ID NO: 25624 - DNA, 16 bp, Artificial
  oligonucleotide probe
gagcgagcagcgggtc

SEQ ID NO: 25625 - DNA, 16 bp, Artificial
  oligonucleotide probe
acgccctcaccagcga

SEQ ID NO: 25626 - DNA, 16 bp, Artificial
  oligonucleotide probe
cgagcaccgagccgga

SEQ ID NO: 25627 - DNA, 16 bp, Artificial
  oligonucleotide probe
cctccggacctcacgc

SEQ ID NO: 25628 - DNA, 16 bp, Artificial
  oligonucleotide probe
tggcaccagcaggggt

SEQ ID NO: 25629 - DNA, 16 bp, Artificial
  oligonucleotide probe
tggcaccagcaggggt

SEQ ID NO: 25630 - DNA, 16 bp, Artificial
  oligonucleotide probe
cggagcaggagcggaa

SEQ ID NO: 25631 - DNA, 16 bp, Artificial
  oligonucleotide probe
ggtcgcctgtccagcg

SEQ ID NO: 25632 - DNA, 16 bp, Artificial
  oligonucleotide probe
gacgcaccagcgcgag

SEQ ID NO: 25633 - DNA, 16 bp, Artificial
  oligonucleotide probe
tggcaccagcaggggt

SEQ ID NO: 25634 - DNA, 16 bp, Artificial
  oligonucleotide probe
gacgcaccagcgcgag

SEQ ID NO: 25635 - DNA, 16 bp, Artificial
  oligonucleotide probe
tggcaccagcaggggt

SEQ ID NO: 25636 - DNA, 16 bp, Artificial
  oligonucleotide probe
gagcgagcagcgggtc

SEQ ID NO: 25637 - DNA, 16 bp, Artificial
  oligonucleotide probe
acgccctcaccagcga

SEQ ID NO: 25638 - DNA, 16 bp, Artificial
  oligonucleotide probe
gacgcaccagcgcgag

SEQ ID NO: 25639 - DNA, 16 bp, Artificial
  oligonucleotide probe
tggcaccagcaggggt

SEQ ID NO: 25640 - DNA, 16 bp, Artificial
  oligonucleotide probe
cacccgagagcggtgg

SEQ ID NO: 25641 - DNA, 16 bp, Artificial
  oligonucleotide probe
gcgagtcccggaagcg

SEQ ID NO: 25642 - DNA, 16 bp, Artificial
  oligonucleotide probe
gtgggggtgcagggaa

SEQ ID NO: 25643 - DNA, 16 bp, Artificial
  oligonucleotide probe
ggtcgcaggcgagggt

SEQ ID NO: 25644 - DNA, 16 bp, Artificial
  oligonucleotide probe
gtggccaatcacgcga

SEQ ID NO: 25645 - DNA, 16 bp, Artificial
  oligonucleotide probe
agcgcaccgacgacgc

SEQ ID NO: 25646 - DNA, 16 bp, Artificial
  oligonucleotide probe
gacggagcacgccgga

SEQ ID NO: 25647 - DNA, 16 bp, Artificial
  oligonucleotide probe
cggagcctgagcgtgg

SEQ ID NO: 25648 - DNA, 16 bp, Artificial
  oligonucleotide probe
gtggccaatcacgcga

SEQ ID NO: 25649 - DNA, 16 bp, Artificial
  oligonucleotide probe
agcgcaccgacgacgc

SEQ ID NO: 25650 - DNA, 16 bp, Artificial
  oligonucleotide probe
gcgacagggcctgcct

SEQ ID NO: 25651 - DNA, 16 bp, Artificial
  oligonucleotide probe
agcggcgagagcgtcc

SEQ ID NO: 25652 - DNA, 16 bp, Artificial
  oligonucleotide probe
gcgacagggcctgcct

SEQ ID NO: 25653 - DNA, 16 bp, Artificial
  oligonucleotide probe
agcggcgagagcgtcc

SEQ ID NO: 25654 - DNA, 16 bp, Artificial
  oligonucleotide probe
cagggtgggcgagcga

SEQ ID NO: 25655 - DNA, 16 bp, Artificial
  oligonucleotide probe
acgcccaacagggagc

SEQ ID NO: 25656 - DNA, 16 bp, Artificial
  oligonucleotide probe
tgctcggatgctgcga

SEQ ID NO: 25657 - DNA, 16 bp, Artificial
  oligonucleotide probe
gagcgcagccaagcct

SEQ ID NO: 25658 - DNA, 16 bp, Artificial
  oligonucleotide probe
gacgcaccagcgcgag

SEQ ID NO: 25659 - DNA, 16 bp, Artificial
  oligonucleotide probe
tggcaccagcaggggt

SEQ ID NO: 25660 - DNA, 16 bp, Artificial
  oligonucleotide probe
gcaggacggacggcct

SEQ ID NO: 25661 - DNA, 16 bp, Artificial
  oligonucleotide probe
gcgacctcacgcgcag

SEQ ID NO: 25662 - DNA, 16 bp, Artificial
  oligonucleotide probe
cgagcaccgagccgga

SEQ ID NO: 25663 - DNA, 16 bp, Artificial
  oligonucleotide probe
cctccggacctcacgc

SEQ ID NO: 25664 - DNA, 16 bp, Artificial
  oligonucleotide probe
gtggccaatcacgcga

SEQ ID NO: 25665 - DNA, 16 bp, Artificial
  oligonucleotide probe
agcgcaccgacgacgc

SEQ ID NO: 25666 - DNA, 16 bp, Artificial
  oligonucleotide probe
cacccgagagcggtgg

SEQ ID NO: 25667 - DNA, 16 bp, Artificial
  oligonucleotide probe
gcgagtcccggaagcg

SEQ ID NO: 25668 - DNA, 16 bp, Artificial
  oligonucleotide probe
cgagcaccgagccgga

SEQ ID NO: 25669 - DNA, 16 bp, Artificial
  oligonucleotide probe
cctccggacctcacgc

SEQ ID NO: 25670 - DNA, 16 bp, Artificial
  oligonucleotide probe
caggacgctggccctc

SEQ ID NO: 25671 - DNA, 16 bp, Artificial
  oligonucleotide probe
cctcgtggcggacgga

SEQ ID NO: 25672 - DNA, 16 bp, Artificial
  oligonucleotide probe
gagcgagcagcgggtc

SEQ ID NO: 25673 - DNA, 16 bp, Artificial
  oligonucleotide probe
acgccctcaccagcga

SEQ ID NO: 25674 - DNA, 16 bp, Artificial
  oligonucleotide probe
gcgacagggcctgcct

SEQ ID NO: 25675 - DNA, 16 bp, Artificial
  oligonucleotide probe
agcggcgagagcgtcc

SEQ ID NO: 25676 - DNA, 16 bp, Artificial
  oligonucleotide probe
cggagcaggagcggaa

SEQ ID NO: 25677 - DNA, 16 bp, Artificial
  oligonucleotide probe
ggtcgcctgtccagcg

SEQ ID NO: 25678 - DNA, 16 bp, Artificial
  oligonucleotide probe
cacccgagagcggtgg

SEQ ID NO: 25679 - DNA, 16 bp, Artificial
  oligonucleotide probe
gcgagtcccggaagcg

SEQ ID NO: 25680 - DNA, 16 bp, Artificial
  oligonucleotide probe
cgagcaccgagccgga

SEQ ID NO: 25681 - DNA, 16 bp, Artificial
  oligonucleotide probe
cctccggacctcacgc

SEQ ID NO: 25682 - DNA, 16 bp, Artificial
  oligonucleotide probe
gtgggggtgcagggaa

SEQ ID NO: 25683 - DNA, 16 bp, Artificial
  oligonucleotide probe
ggtcgcaggcgagggt

SEQ ID NO: 25684 - DNA, 16 bp, Artificial
  oligonucleotide probe
gtgggggtgcagggaa

SEQ ID NO: 25685 - DNA, 16 bp, Artificial
  oligonucleotide probe
ggtcgcaggcgagggt

SEQ ID NO: 25686 - DNA, 16 bp, Artificial
  oligonucleotide probe
tgctcggatgctgcga

SEQ ID NO: 25687 - DNA, 16 bp, Artificial
  oligonucleotide probe
gagcgcagccaagcct

SEQ ID NO: 25688 - DNA, 16 bp, Artificial
  oligonucleotide probe
gtgggggtgcagggaa

SEQ ID NO: 25689 - DNA, 16 bp, Artificial
  oligonucleotide probe
ggtcgcaggcgagggt

SEQ ID NO: 25690 - DNA, 16 bp, Artificial
  oligonucleotide probe
caggcctccctcgcga

SEQ ID NO: 25691 - DNA, 16 bp, Artificial
  oligonucleotide probe
caccagcgagacgcga

SEQ ID NO: 25692 - DNA, 16 bp, Artificial
  oligonucleotide probe
cgagcaggcgaggcag

SEQ ID NO: 25693 - DNA, 16 bp, Artificial
  oligonucleotide probe
gcctcaggacgcacgc

SEQ ID NO: 25694 - DNA, 16 bp, Artificial
  oligonucleotide probe
tgctcggatgctgcga

SEQ ID NO: 25695 - DNA, 16 bp, Artificial
  oligonucleotide probe
gagcgcagccaagcct

SEQ ID NO: 25696 - DNA, 16 bp, Artificial
  oligonucleotide probe
cgaggacgccaaacgc

SEQ ID NO: 25697 - DNA, 16 bp, Artificial
  oligonucleotide probe
gggtacgcgacgcgag

SEQ ID NO: 25698 - DNA, 16 bp, Artificial
  oligonucleotide probe
cggagcaggagcggaa

SEQ ID NO: 25699 - DNA, 16 bp, Artificial
  oligonucleotide probe
ggtcgcctgtccagcg

SEQ ID NO: 25700 - DNA, 16 bp, Artificial
  oligonucleotide probe
cacccgagagcggtgg

SEQ ID NO: 25701 - DNA, 16 bp, Artificial
  oligonucleotide probe
gcgagtcccggaagcg

SEQ ID NO: 25702 - DNA, 16 bp, Artificial
  oligonucleotide probe
cgagcaccgagccgga

SEQ ID NO: 25703 - DNA, 16 bp, Artificial
  oligonucleotide probe
cctccggacctcacgc

SEQ ID NO: 25704 - DNA, 16 bp, Artificial
  oligonucleotide probe
tgctcggatgctgcga

SEQ ID NO: 25705 - DNA, 16 bp, Artificial
  oligonucleotide probe
gagcgcagccaagcct

SEQ ID NO: 25706 - DNA, 16 bp, Artificial
  oligonucleotide probe
gcgacagggcctgcct

SEQ ID NO: 25707 - DNA, 16 bp, Artificial
  oligonucleotide probe
agcggcgagagcgtcc

SEQ ID NO: 25708 - DNA, 16 bp, Artificial
  oligonucleotide probe
gacgcaccagcgcgag

SEQ ID NO: 25709 - DNA, 16 bp, Artificial
  oligonucleotide probe
tggcaccagcaggggt

SEQ ID NO: 25710 - DNA, 16 bp, Artificial
  oligonucleotide probe
gacgcaccagcgcgag

SEQ ID NO: 25711 - DNA, 16 bp, Artificial
  oligonucleotide probe
tggcaccagcaggggt

SEQ ID NO: 25712 - DNA, 16 bp, Artificial
  oligonucleotide probe
tgctcggatgctgcga

SEQ ID NO: 25713 - DNA, 16 bp, Artificial
  oligonucleotide probe
gagcgcagccaagcct

SEQ ID NO: 25714 - DNA, 16 bp, Artificial
  oligonucleotide probe
caggacgctggccctc

SEQ ID NO: 25715 - DNA, 16 bp, Artificial
  oligonucleotide probe
cctcgtggcggacgga

SEQ ID NO: 25716 - DNA, 16 bp, Artificial
  oligonucleotide probe
gcgacagggcctgcct

SEQ ID NO: 25717 - DNA, 16 bp, Artificial
  oligonucleotide probe
agcggcgagagcgtcc

SEQ ID NO: 25718 - DNA, 16 bp, Artificial
  oligonucleotide probe
caggacgctggccctc

SEQ ID NO: 25719 - DNA, 16 bp, Artificial
  oligonucleotide probe
cctcgtggcggacgga

SEQ ID NO: 25720 - DNA, 16 bp, Artificial
  oligonucleotide probe
ggtcgcgacacctggc

SEQ ID NO: 25721 - DNA, 16 bp, Artificial
  oligonucleotide probe
cgagcctcgggtgcga

SEQ ID NO: 25722 - DNA, 16 bp, Artificial
  oligonucleotide probe
gtgggggtgcagggaa

SEQ ID NO: 25723 - DNA, 16 bp, Artificial
  oligonucleotide probe
ggtcgcaggcgagggt

SEQ ID NO: 25724 - DNA, 16 bp, Artificial
  oligonucleotide probe
cgagcaccgagccgga

SEQ ID NO: 25725 - DNA, 16 bp, Artificial
  oligonucleotide probe
cctccggacctcacgc

SEQ ID NO: 25726 - DNA, 16 bp, Artificial
  oligonucleotide probe
cacccgagagcggtgg

SEQ ID NO: 25727 - DNA, 16 bp, Artificial
  oligonucleotide probe
gcgagtcccggaagcg

SEQ ID NO: 25728 - DNA, 16 bp, Artificial
  oligonucleotide probe
gacgcaccagcgcgag

SEQ ID NO: 25729 - DNA, 16 bp, Artificial
  oligonucleotide probe
tggcaccagcaggggt

SEQ ID NO: 25730 - DNA, 16 bp, Artificial
  oligonucleotide probe
caccggtcagcggggt

SEQ ID NO: 25731 - DNA, 16 bp, Artificial
  oligonucleotide probe
actgcggacgaggcct

SEQ ID NO: 25732 - DNA, 16 bp, Artificial
  oligonucleotide probe
gcgacagggcctgcct

SEQ ID NO: 25733 - DNA, 16 bp, Artificial
  oligonucleotide probe
agcggcgagagcgtcc

SEQ ID NO: 25734 - DNA, 16 bp, Artificial
  oligonucleotide probe
cacccgagagcggtgg

SEQ ID NO: 25735 - DNA, 16 bp, Artificial
  oligonucleotide probe
gcgagtcccggaagcg

SEQ ID NO: 25736 - DNA, 16 bp, Artificial
  oligonucleotide probe
tggcgcctgtccgtgg

SEQ ID NO: 25737 - DNA, 16 bp, Artificial
  oligonucleotide probe
gtggcgagcctcgggt

SEQ ID NO: 25738 - DNA, 16 bp, Artificial
  oligonucleotide probe
gacgcaccagcgcgag

SEQ ID NO: 25739 - DNA, 16 bp, Artificial
  oligonucleotide probe
tggcaccagcaggggt

SEQ ID NO: 25740 - DNA, 16 bp, Artificial
  oligonucleotide probe
gacgcaccagcgcgag

SEQ ID NO: 25741 - DNA, 16 bp, Artificial
  oligonucleotide probe
tggcaccagcaggggt

SEQ ID NO: 25742 - DNA, 16 bp, Artificial
  oligonucleotide probe
caggacgctggccctc

SEQ ID NO: 25743 - DNA, 16 bp, Artificial
  oligonucleotide probe
cctcgtggcggacgga

SEQ ID NO: 25744 - DNA, 16 bp, Artificial
  oligonucleotide probe
caggcctccctcgcga

SEQ ID NO: 25745 - DNA, 16 bp, Artificial
  oligonucleotide probe
caccagcgagacgcga

SEQ ID NO: 25746 - DNA, 16 bp, Artificial
  oligonucleotide probe
tgctcggatgctgcga

SEQ ID NO: 25747 - DNA, 16 bp, Artificial
  oligonucleotide probe
gagcgcagccaagcct

SEQ ID NO: 25748 - DNA, 16 bp, Artificial
  oligonucleotide probe
acgcagcggggtgacg

SEQ ID NO: 25749 - DNA, 16 bp, Artificial
  oligonucleotide probe
caccgcctcagggacg

SEQ ID NO: 25750 - DNA, 16 bp, Artificial
  oligonucleotide probe
gtgggggtgcagggaa

SEQ ID NO: 25751 - DNA, 16 bp, Artificial
  oligonucleotide probe
ggtcgcaggcgagggt

SEQ ID NO: 25752 - DNA, 16 bp, Artificial
  oligonucleotide probe
cacccgagagcggtgg

SEQ ID NO: 25753 - DNA, 16 bp, Artificial
  oligonucleotide probe
gcgagtcccggaagcg

SEQ ID NO: 25754 - DNA, 16 bp, Artificial
  oligonucleotide probe
gagcgagcagcgggtc

SEQ ID NO: 25755 - DNA, 16 bp, Artificial
  oligonucleotide probe
acgccctcaccagcga

SEQ ID NO: 25756 - DNA, 16 bp, Artificial
  oligonucleotide probe
gcgacagggcctgcct

SEQ ID NO: 25757 - DNA, 16 bp, Artificial
  oligonucleotide probe
agcggcgagagcgtcc

SEQ ID NO: 25758 - DNA, 16 bp, Artificial
  oligonucleotide probe
cacccgagagcggtgg

SEQ ID NO: 25759 - DNA, 16 bp, Artificial
  oligonucleotide probe
gcgagtcccggaagcg

SEQ ID NO: 25760 - DNA, 16 bp, Artificial
  oligonucleotide probe
caggcctccctcgcga

SEQ ID NO: 25761 - DNA, 16 bp, Artificial
  oligonucleotide probe
caccagcgagacgcga

SEQ ID NO: 25762 - DNA, 16 bp, Artificial
  oligonucleotide probe
gtgggggtgcagggaa

SEQ ID NO: 25763 - DNA, 16 bp, Artificial
  oligonucleotide probe
ggtcgcaggcgagggt

SEQ ID NO: 25764 - DNA, 16 bp, Artificial
  oligonucleotide probe
cgagcaggcgaggcag

SEQ ID NO: 25765 - DNA, 16 bp, Artificial
  oligonucleotide probe
gcctcaggacgcacgc

SEQ ID NO: 25766 - DNA, 16 bp, Artificial
  oligonucleotide probe
caccggtcagcggggt

SEQ ID NO: 25767 - DNA, 16 bp, Artificial
  oligonucleotide probe
actgcggacgaggcct

SEQ ID NO: 25768 - DNA, 16 bp, Artificial
  oligonucleotide probe
gagcgagcagcgggtc

SEQ ID NO: 25769 - DNA, 16 bp, Artificial
  oligonucleotide probe
acgccctcaccagcga

SEQ ID NO: 25770 - DNA, 16 bp, Artificial
  oligonucleotide probe
tggcgcctgtccgtgg

SEQ ID NO: 25771 - DNA, 16 bp, Artificial
  oligonucleotide probe
gtggcgagcctcgggt

SEQ ID NO: 25772 - DNA, 16 bp, Artificial
  oligonucleotide probe
gtggccaatcacgcga

SEQ ID NO: 25773 - DNA, 16 bp, Artificial
  oligonucleotide probe
agcgcaccgacgacgc

SEQ ID NO: 25774 - DNA, 16 bp, Artificial
  oligonucleotide probe
cacccgagagcggtgg

SEQ ID NO: 25775 - DNA, 16 bp, Artificial
  oligonucleotide probe
gcgagtcccggaagcg

SEQ ID NO: 25776 - DNA, 16 bp, Artificial
  oligonucleotide probe
gagcgagcagcgggtc

SEQ ID NO: 25777 - DNA, 16 bp, Artificial
  oligonucleotide probe
acgccctcaccagcga

SEQ ID NO: 25778 - DNA, 16 bp, Artificial
  oligonucleotide probe
gcgacagggcctgcct

SEQ ID NO: 25779 - DNA, 16 bp, Artificial
  oligonucleotide probe
agcggcgagagcgtcc

SEQ ID NO: 25780 - DNA, 16 bp, Artificial
  oligonucleotide probe
gacgcaccagcgcgag

SEQ ID NO: 25781 - DNA, 16 bp, Artificial
  oligonucleotide probe
tggcaccagcaggggt

SEQ ID NO: 25782 - DNA, 16 bp, Artificial
  oligonucleotide probe
tggcgcctgtccgtgg

SEQ ID NO: 25783 - DNA, 16 bp, Artificial
  oligonucleotide probe
gtggcgagcctcgggt

SEQ ID NO: 25784 - DNA, 16 bp, Artificial
  oligonucleotide probe
cacccgagagcggtgg

SEQ ID NO: 25785 - DNA, 16 bp, Artificial
  oligonucleotide probe
gcgagtcccggaagcg

SEQ ID NO: 25786 - DNA, 16 bp, Artificial
  oligonucleotide probe
gacgcaccagcgcgag

SEQ ID NO: 25787 - DNA, 16 bp, Artificial
  oligonucleotide probe
tggcaccagcaggggt

SEQ ID NO: 25788 - DNA, 16 bp, Artificial
  oligonucleotide probe
cacccgagagcggtgg

SEQ ID NO: 25789 - DNA, 16 bp, Artificial
  oligonucleotide probe
gcgagtcccggaagcg

SEQ ID NO: 25790 - DNA, 16 bp, Artificial
  oligonucleotide probe
cgagcaccgagccgga

SEQ ID NO: 25791 - DNA, 16 bp, Artificial
  oligonucleotide probe
cctccggacctcacgc

SEQ ID NO: 25792 - DNA, 16 bp, Artificial
  oligonucleotide probe
cggacacctggccgga

SEQ ID NO: 25793 - DNA, 16 bp, Artificial
  oligonucleotide probe
gagcgacgcgagagcg

SEQ ID NO: 25794 - DNA, 16 bp, Artificial
  oligonucleotide probe
tggcgcctgtccgtgg

SEQ ID NO: 25795 - DNA, 16 bp, Artificial
  oligonucleotide probe
gtggcgagcctcgggt

SEQ ID NO: 25796 - DNA, 16 bp, Artificial
  oligonucleotide probe
cggagcaggagcggaa

SEQ ID NO: 25797 - DNA, 16 bp, Artificial
  oligonucleotide probe
ggtcgcctgtccagcg

SEQ ID NO: 25798 - DNA, 16 bp, Artificial
  oligonucleotide probe
cacccgagagcggtgg

SEQ ID NO: 25799 - DNA, 16 bp, Artificial
  oligonucleotide probe
gcgagtcccggaagcg

SEQ ID NO: 25800 - DNA, 16 bp, Artificial
  oligonucleotide probe
gagcgagcagcgggtc

SEQ ID NO: 25801 - DNA, 16 bp, Artificial
  oligonucleotide probe
acgccctcaccagcga

SEQ ID NO: 25802 - DNA, 16 bp, Artificial
  oligonucleotide probe
gacggagcacgccgga

SEQ ID NO: 25803 - DNA, 16 bp, Artificial
  oligonucleotide probe
cggagcctgagcgtgg

SEQ ID NO: 25804 - DNA, 16 bp, Artificial
  oligonucleotide probe
cagggtgggcgagcga

SEQ ID NO: 25805 - DNA, 16 bp, Artificial
  oligonucleotide probe
acgcccaacagggagc

SEQ ID NO: 25806 - DNA, 16 bp, Artificial
  oligonucleotide probe
caggcctccctcgcga

SEQ ID NO: 25807 - DNA, 16 bp, Artificial
  oligonucleotide probe
caccagcgagacgcga

SEQ ID NO: 25808 - DNA, 16 bp, Artificial
  oligonucleotide probe
tgctcggatgctgcga

SEQ ID NO: 25809 - DNA, 16 bp, Artificial
  oligonucleotide probe
gagcgcagccaagcct

SEQ ID NO: 25810 - DNA, 16 bp, Artificial
  oligonucleotide probe
acgcagcggggtgacg

SEQ ID NO: 25811 - DNA, 16 bp, Artificial
  oligonucleotide probe
caccgcctcagggacg

SEQ ID NO: 25812 - DNA, 16 bp, Artificial
  oligonucleotide probe
tggcgcctgtccgtgg

SEQ ID NO: 25813 - DNA, 16 bp, Artificial
  oligonucleotide probe
gtggcgagcctcgggt

SEQ ID NO: 25814 - DNA, 16 bp, Artificial
  oligonucleotide probe
cacccgagagcggtgg

SEQ ID NO: 25815 - DNA, 16 bp, Artificial
  oligonucleotide probe
gcgagtcccggaagcg

SEQ ID NO: 25816 - DNA, 16 bp, Artificial
  oligonucleotide probe
gtgggggtgcagggaa

SEQ ID NO: 25817 - DNA, 16 bp, Artificial
  oligonucleotide probe
ggtcgcaggcgagggt

SEQ ID NO: 25818 - DNA, 16 bp, Artificial
  oligonucleotide probe
gtggccaatcacgcga

SEQ ID NO: 25819 - DNA, 16 bp, Artificial
  oligonucleotide probe
agcgcaccgacgacgc

SEQ ID NO: 25820 - DNA, 16 bp, Artificial
  oligonucleotide probe
gacgcaccagcgcgag

SEQ ID NO: 25821 - DNA, 16 bp, Artificial
  oligonucleotide probe
tggcaccagcaggggt

SEQ ID NO: 25822 - DNA, 16 bp, Artificial
  oligonucleotide probe
cgagcaccgagccgga

SEQ ID NO: 25823 - DNA, 16 bp, Artificial
  oligonucleotide probe
cctccggacctcacgc

SEQ ID NO: 25824 - DNA, 16 bp, Artificial
  oligonucleotide probe
cacccgagagcggtgg

SEQ ID NO: 25825 - DNA, 16 bp, Artificial
  oligonucleotide probe
gcgagtcccggaagcg

SEQ ID NO: 25826 - DNA, 16 bp, Artificial
  oligonucleotide probe
gtgggggtgcagggaa

SEQ ID NO: 25827 - DNA, 16 bp, Artificial
  oligonucleotide probe
ggtcgcaggcgagggt

SEQ ID NO: 25828 - DNA, 16 bp, Artificial
  oligonucleotide probe
gcgacagggcctgcct

SEQ ID NO: 25829 - DNA, 16 bp, Artificial
  oligonucleotide probe
agcggcgagagcgtcc

SEQ ID NO: 25830 - DNA, 16 bp, Artificial
  oligonucleotide probe
gtgggggtgcagggaa

SEQ ID NO: 25831 - DNA, 16 bp, Artificial
  oligonucleotide probe
ggtcgcaggcgagggt

SEQ ID NO: 25832 - DNA, 16 bp, Artificial
  oligonucleotide probe
gtggccaatcacgcga

SEQ ID NO: 25833 - DNA, 16 bp, Artificial
  oligonucleotide probe
agcgcaccgacgacgc

SEQ ID NO: 25834 - DNA, 16 bp, Artificial
  oligonucleotide probe
ggtcgcgacacctggc

SEQ ID NO: 25835 - DNA, 16 bp, Artificial
  oligonucleotide probe
cgagcctcgggtgcga

SEQ ID NO: 25836 - DNA, 16 bp, Artificial
  oligonucleotide probe
gtgggggtgcagggaa

SEQ ID NO: 25837 - DNA, 16 bp, Artificial
  oligonucleotide probe
ggtcgcaggcgagggt

SEQ ID NO: 25838 - DNA, 16 bp, Artificial
  oligonucleotide probe
gtgggggtgcagggaa

SEQ ID NO: 25839 - DNA, 16 bp, Artificial
  oligonucleotide probe
ggtcgcaggcgagggt

SEQ ID NO: 25840 - DNA, 16 bp, Artificial
  oligonucleotide probe
cagggtgggcgagcga

SEQ ID NO: 25841 - DNA, 16 bp, Artificial
  oligonucleotide probe
acgcccaacagggagc

SEQ ID NO: 25842 - DNA, 16 bp, Artificial
  oligonucleotide probe
gtgggggtgcagggaa

SEQ ID NO: 25843 - DNA, 16 bp, Artificial
  oligonucleotide probe
ggtcgcaggcgagggt

SEQ ID NO: 25844 - DNA, 16 bp, Artificial
  oligonucleotide probe
gtggccaatcacgcga

SEQ ID NO: 25845 - DNA, 16 bp, Artificial
  oligonucleotide probe
agcgcaccgacgacgc

SEQ ID NO: 25846 - DNA, 16 bp, Artificial
  oligonucleotide probe
gcgacagggcctgcct

SEQ ID NO: 25847 - DNA, 16 bp, Artificial
  oligonucleotide probe
agcggcgagagcgtcc

SEQ ID NO: 25848 - DNA, 16 bp, Artificial
  oligonucleotide probe
gtgggggtgcagggaa

SEQ ID NO: 25849 - DNA, 16 bp, Artificial
  oligonucleotide probe
ggtcgcaggcgagggt

SEQ ID NO: 25850 - DNA, 16 bp, Artificial
  oligonucleotide probe
gcgacagggcctgcct

SEQ ID NO: 25851 - DNA, 16 bp, Artificial
  oligonucleotide probe
agcggcgagagcgtcc

SEQ ID NO: 25852 - DNA, 16 bp, Artificial
  oligonucleotide probe
cgagcaccgagccgga

SEQ ID NO: 25853 - DNA, 16 bp, Artificial
  oligonucleotide probe
cctccggacctcacgc

SEQ ID NO: 25854 - DNA, 16 bp, Artificial
  oligonucleotide probe
gagcgagcagcgggtc

SEQ ID NO: 25855 - DNA, 16 bp, Artificial
  oligonucleotide probe
acgccctcaccagcga

SEQ ID NO: 25856 - DNA, 16 bp, Artificial
  oligonucleotide probe
caggacgctggccctc

SEQ ID NO: 25857 - DNA, 16 bp, Artificial
  oligonucleotide probe
cctcgtggcggacgga

SEQ ID NO: 25858 - DNA, 16 bp, Artificial
  oligonucleotide probe
gcgacagggcctgcct

SEQ ID NO: 25859 - DNA, 16 bp, Artificial
  oligonucleotide probe
agcggcgagagcgtcc

SEQ ID NO: 25860 - DNA, 16 bp, Artificial
  oligonucleotide probe
caggacgctggccctc

SEQ ID NO: 25861 - DNA, 16 bp, Artificial
  oligonucleotide probe
cctcgtggcggacgga

SEQ ID NO: 25862 - DNA, 16 bp, Artificial
  oligonucleotide probe
caggacgctggccctc

SEQ ID NO: 25863 - DNA, 16 bp, Artificial
  oligonucleotide probe
cctcgtggcggacgga

SEQ ID NO: 25864 - DNA, 16 bp, Artificial
  oligonucleotide probe
cacccgagagcggtgg

SEQ ID NO: 25865 - DNA, 16 bp, Artificial
  oligonucleotide probe
gcgagtcccggaagcg

SEQ ID NO: 25866 - DNA, 16 bp, Artificial
  oligonucleotide probe
gacgcaccagcgcgag

SEQ ID NO: 25867 - DNA, 16 bp, Artificial
  oligonucleotide probe
tggcaccagcaggggt

SEQ ID NO: 25868 - DNA, 16 bp, Artificial
  oligonucleotide probe
cgagcaccgagccgga

SEQ ID NO: 25869 - DNA, 16 bp, Artificial
  oligonucleotide probe
cctccggacctcacgc

SEQ ID NO: 25870 - DNA, 16 bp, Artificial
  oligonucleotide probe
gtgggggtgcagggaa

SEQ ID NO: 25871 - DNA, 16 bp, Artificial
  oligonucleotide probe
ggtcgcaggcgagggt

SEQ ID NO: 25872 - DNA, 16 bp, Artificial
  oligonucleotide probe
agcggcgagagcgtcc

SEQ ID NO: 25873 - DNA, 16 bp, Artificial
  oligonucleotide probe
gacgcaccagcgcgag

SEQ ID NO: 25874 - DNA, 16 bp, Artificial
  oligonucleotide probe
caggacgctggccctc

SEQ ID NO: 25875 - DNA, 16 bp, Artificial
  oligonucleotide probe
cctcgtggcggacgga

SEQ ID NO: 25876 - DNA, 16 bp, Artificial
  oligonucleotide probe
gacgcaccagcgcgag

SEQ ID NO: 25877 - DNA, 16 bp, Artificial
  oligonucleotide probe
tggcaccagcaggggt

SEQ ID NO: 25878 - DNA, 16 bp, Artificial
  oligonucleotide probe
gacgcaccagcgcgag

SEQ ID NO: 25879 - DNA, 16 bp, Artificial
  oligonucleotide probe
tggcaccagcaggggt

SEQ ID NO: 25880 - DNA, 16 bp, Artificial
  oligonucleotide probe
cacccgagagcggtgg

SEQ ID NO: 25881 - DNA, 16 bp, Artificial
  oligonucleotide probe
gcgagtcccggaagcg

SEQ ID NO: 25882 - DNA, 16 bp, Artificial
  oligonucleotide probe
cgagcaccgagccgga

SEQ ID NO: 25883 - DNA, 16 bp, Artificial
  oligonucleotide probe
cctccggacctcacgc

SEQ ID NO: 25884 - DNA, 16 bp, Artificial
  oligonucleotide probe
gcaggacggacggcct

SEQ ID NO: 25885 - DNA, 16 bp, Artificial
  oligonucleotide probe
gcgacctcacgcgcag

SEQ ID NO: 25886 - DNA, 16 bp, Artificial
  oligonucleotide probe
cacccgagagcggtgg

SEQ ID NO: 25887 - DNA, 16 bp, Artificial
  oligonucleotide probe
gcgagtcccggaagcg

SEQ ID NO: 25888 - DNA, 16 bp, Artificial
  oligonucleotide probe
gacgcaccagcgcgag

SEQ ID NO: 25889 - DNA, 16 bp, Artificial
  oligonucleotide probe
tggcaccagcaggggt

SEQ ID NO: 25890 - DNA, 16 bp, Artificial
  oligonucleotide probe
cgagcaccgagccgga

SEQ ID NO: 25891 - DNA, 16 bp, Artificial
  oligonucleotide probe
cctccggacctcacgc

SEQ ID NO: 25892 - DNA, 16 bp, Artificial
  oligonucleotide probe
gtggccaatcacgcga

SEQ ID NO: 25893 - DNA, 16 bp, Artificial
  oligonucleotide probe
agcgcaccgacgacgc

SEQ ID NO: 25894 - DNA, 16 bp, Artificial
  oligonucleotide probe
gtccgggtcaggcagg

SEQ ID NO: 25895 - DNA, 16 bp, Artificial
  oligonucleotide probe
cggagagcgcgagcct

SEQ ID NO: 25896 - DNA, 16 bp, Artificial
  oligonucleotide probe
cgagcaccgagccgga

SEQ ID NO: 25897 - DNA, 16 bp, Artificial
  oligonucleotide probe
cctccggacctcacgc

SEQ ID NO: 25898 - DNA, 16 bp, Artificial
  oligonucleotide probe
gacgcaccagcgcgag

SEQ ID NO: 25899 - DNA, 16 bp, Artificial
  oligonucleotide probe
tggcaccagcaggggt

SEQ ID NO: 25900 - DNA, 16 bp, Artificial
  oligonucleotide probe
gcgacagggcctgcct

SEQ ID NO: 25901 - DNA, 16 bp, Artificial
  oligonucleotide probe
agcggcgagagcgtcc

SEQ ID NO: 25902 - DNA, 16 bp, Artificial
  oligonucleotide probe
tggcgcctgtccgtgg

SEQ ID NO: 25903 - DNA, 16 bp, Artificial
  oligonucleotide probe
gtggcgagcctcgggt

SEQ ID NO: 25904 - DNA, 16 bp, Artificial
  oligonucleotide probe
caggcctccctcgcga

SEQ ID NO: 25905 - DNA, 16 bp, Artificial
  oligonucleotide probe
caccagcgagacgcga

SEQ ID NO: 25906 - DNA, 16 bp, Artificial
  oligonucleotide probe
caggacgctggccctc

SEQ ID NO: 25907 - DNA, 16 bp, Artificial
  oligonucleotide probe
cctcgtggcggacgga

SEQ ID NO: 25908 - DNA, 16 bp, Artificial
  oligonucleotide probe
cacccgagagcggtgg

SEQ ID NO: 25909 - DNA, 16 bp, Artificial
  oligonucleotide probe
gcgagtcccggaagcg

SEQ ID NO: 25910 - DNA, 16 bp, Artificial
  oligonucleotide probe
gcgacagggcctgcct

SEQ ID NO: 25911 - DNA, 16 bp, Artificial
  oligonucleotide probe
agcggcgagagcgtcc

SEQ ID NO: 25912 - DNA, 16 bp, Artificial
  oligonucleotide probe
caggcctccctcgcga

SEQ ID NO: 25913 - DNA, 16 bp, Artificial
  oligonucleotide probe
caccagcgagacgcga

SEQ ID NO: 25914 - DNA, 16 bp, Artificial
  oligonucleotide probe
cgagcaccgagccgga

SEQ ID NO: 25915 - DNA, 16 bp, Artificial
  oligonucleotide probe
cctccggacctcacgc

SEQ ID NO: 25916 - DNA, 16 bp, Artificial
  oligonucleotide probe
cagggtgggcgagcga

SEQ ID NO: 25917 - DNA, 16 bp, Artificial
  oligonucleotide probe
acgcccaacagggagc

SEQ ID NO: 25918 - DNA, 16 bp, Artificial
  oligonucleotide probe
gacgcaccagcgcgag

SEQ ID NO: 25919 - DNA, 16 bp, Artificial
  oligonucleotide probe
tggcaccagcaggggt

SEQ ID NO: 25920 - DNA, 16 bp, Artificial
  oligonucleotide probe
tggcaccagcaggggt

SEQ ID NO: 25921 - DNA, 16 bp, Artificial
  oligonucleotide probe
tggcaccagcaggggt

SEQ ID NO: 25922 - DNA, 16 bp, Artificial
  oligonucleotide probe
tggcaccagcaggggt

SEQ ID NO: 25923 - DNA, 16 bp, Artificial
  oligonucleotide probe
tggcaccagcaggggt

SEQ ID NO: 25924 - DNA, 16 bp, Artificial
  oligonucleotide probe
tggcaccagcaggggt

SEQ ID NO: 25925 - DNA, 16 bp, Artificial
  oligonucleotide probe
tggcaccagcaggggt

SEQ ID NO: 25926 - DNA, 16 bp, Artificial
  oligonucleotide probe
tggcaccagcaggggt

SEQ ID NO: 25927 - DNA, 16 bp, Artificial
  oligonucleotide probe
tggcaccagcaggggt

SEQ ID NO: 25928 - DNA, 16 bp, Artificial
  oligonucleotide probe
tggcaccagcaggggt

SEQ ID NO: 25929 - DNA, 16 bp, Artificial
  oligonucleotide probe
tggcaccagcaggggt

SEQ ID NO: 25930 - DNA, 16 bp, Artificial
  oligonucleotide probe
tggcaccagcaggggt

SEQ ID NO: 25931 - DNA, 16 bp, Artificial
  oligonucleotide probe
tggcaccagcaggggt

SEQ ID NO: 25932 - DNA, 16 bp, Artificial
  oligonucleotide probe
tggcaccagcaggggt

SEQ ID NO: 25933 - DNA, 16 bp, Artificial
  oligonucleotide probe
tggcaccagcaggggt

SEQ ID NO: 25934 - DNA, 16 bp, Artificial
  oligonucleotide probe
tggcaccagcaggggt

SEQ ID NO: 25935 - DNA, 16 bp, Artificial
  oligonucleotide probe
tggcaccagcaggggt

SEQ ID NO: 25936 - DNA, 16 bp, Artificial
  oligonucleotide probe
tggcaccagcaggggt

SEQ ID NO: 25937 - DNA, 16 bp, Artificial
  oligonucleotide probe
tggcaccagcaggggt

SEQ ID NO: 25938 - DNA, 16 bp, Artificial
  oligonucleotide probe
tggcaccagcaggggt

SEQ ID NO: 25939 - DNA, 16 bp, Artificial
  oligonucleotide probe
tggcaccagcaggggt

SEQ ID NO: 25940 - DNA, 16 bp, Artificial
  oligonucleotide probe
tggcaccagcaggggt

SEQ ID NO: 25941 - DNA, 16 bp, Artificial
  oligonucleotide probe
tggcaccagcaggggt

SEQ ID NO: 25942 - DNA, 16 bp, Artificial
  oligonucleotide probe
tggcaccagcaggggt

SEQ ID NO: 25943 - DNA, 16 bp, Artificial
  oligonucleotide probe
gcagcggagcctgagc

SEQ ID NO: 25944 - DNA, 16 bp, Artificial
  oligonucleotide probe
acgcaccagtcccgga

SEQ ID NO: 25945 - DNA, 16 bp, Artificial
  oligonucleotide probe
tggcaccagcaggggt

SEQ ID NO: 25946 - DNA, 16 bp, Artificial
  oligonucleotide probe
gagcacgcgggtgcct

SEQ ID NO: 25947 - DNA, 16 bp, Artificial
  oligonucleotide probe
ggtcgcgacacctggc

SEQ ID NO: 25948 - DNA, 16 bp, Artificial
  oligonucleotide probe
caccggtcagcggggt

SEQ ID NO: 25949 - DNA, 16 bp, Artificial
  oligonucleotide probe
acgcgagcgggtgcag

SEQ ID NO: 25950 - DNA, 16 bp, Artificial
  oligonucleotide probe
gcgatggccaggtggc

SEQ ID NO: 25951 - DNA, 16 bp, Artificial
  oligonucleotide probe
cgagcggaggtcccaa

SEQ ID NO: 25952 - DNA, 16 bp, Artificial
  oligonucleotide probe
cgaggacgccaaacgc

SEQ ID NO: 25953 - DNA, 16 bp, Artificial
  oligonucleotide probe
gcaggacggacggcct

SEQ ID NO: 25954 - DNA, 16 bp, Artificial
  oligonucleotide probe
gcgacctcacgcgcag

SEQ ID NO: 25955 - DNA, 16 bp, Artificial
  oligonucleotide probe
caggacgctggccctc

SEQ ID NO: 25956 - DNA, 16 bp, Artificial
  oligonucleotide probe
gggtagcggcgagacg

SEQ ID NO: 25957 - DNA, 16 bp, Artificial
  oligonucleotide probe
gagcgcctcctcgagc

SEQ ID NO: 25958 - DNA, 16 bp, Artificial
  oligonucleotide probe
gcgagtggcagggcct

SEQ ID NO: 25959 - DNA, 16 bp, Artificial
  oligonucleotide probe
gagcgcgacacccagg

SEQ ID NO: 25960 - DNA, 16 bp, Artificial
  oligonucleotide probe
cggacaggacgctggc

SEQ ID NO: 25961 - DNA, 16 bp, Artificial
  oligonucleotide probe
cgagcaggcgaggcag

SEQ ID NO: 25962 - DNA, 16 bp, Artificial
  oligonucleotide probe
gcagcctctggccgag

SEQ ID NO: 25963 - DNA, 16 bp, Artificial
  oligonucleotide probe
gcaggacggacggcct

SEQ ID NO: 25964 - DNA, 16 bp, Artificial
  oligonucleotide probe
gcgacctcacgcgcag

SEQ ID NO: 25965 - DNA, 16 bp, Artificial
  oligonucleotide probe
gagcgagcagcgggtc

SEQ ID NO: 25966 - DNA, 16 bp, Artificial
  oligonucleotide probe
acgccctcaccagcga

SEQ ID NO: 25967 - DNA, 16 bp, Artificial
  oligonucleotide probe
cggacacctggccgga

SEQ ID NO: 25968 - DNA, 16 bp, Artificial
  oligonucleotide probe
ggtcgcgacacctggc

SEQ ID NO: 25969 - DNA, 16 bp, Artificial
  oligonucleotide probe
gtccgggtcaggcagg

SEQ ID NO: 25970 - DNA, 16 bp, Artificial
  oligonucleotide probe
cggagagcgcgagcct

SEQ ID NO: 25971 - DNA, 16 bp, Artificial
  oligonucleotide probe
caggacgctggccctc

SEQ ID NO: 25972 - DNA, 16 bp, Artificial
  oligonucleotide probe
cctcgtggcggacgga

SEQ ID NO: 25973 - DNA, 16 bp, Artificial
  oligonucleotide probe
agcgccaatcacgggt

SEQ ID NO: 25974 - DNA, 16 bp, Artificial
  oligonucleotide probe
caggcacccaggcgga

SEQ ID NO: 25975 - DNA, 16 bp, Artificial
  oligonucleotide probe
cgagcaggcgaggcag

SEQ ID NO: 25976 - DNA, 16 bp, Artificial
  oligonucleotide probe
gcctcaggacgcacgc

SEQ ID NO: 25977 - DNA, 16 bp, Artificial
  oligonucleotide probe
gcgatggccaggtggc

SEQ ID NO: 25978 - DNA, 16 bp, Artificial
  oligonucleotide probe
accacggaagcgcgga

SEQ ID NO: 25979 - DNA, 16 bp, Artificial
  oligonucleotide probe
tggcgcctgtccgtgg

SEQ ID NO: 25980 - DNA, 16 bp, Artificial
  oligonucleotide probe
gtggcgagcctcgggt

SEQ ID NO: 25981 - DNA, 16 bp, Artificial
  oligonucleotide probe
cggacacctggccgga

SEQ ID NO: 25982 - DNA, 16 bp, Artificial
  oligonucleotide probe
ggtcgcgacacctggc

SEQ ID NO: 25983 - DNA, 16 bp, Artificial
  oligonucleotide probe
cggagagcgcgagcct

SEQ ID NO: 25984 - DNA, 16 bp, Artificial
  oligonucleotide probe
gcctcaggacgcacgc

SEQ ID NO: 25985 - DNA, 16 bp, Artificial
  oligonucleotide probe
cagggcgagtccgacg

SEQ ID NO: 25986 - DNA, 16 bp, Artificial
  oligonucleotide probe
gagcgacgcgagagcg

SEQ ID NO: 25987 - DNA, 16 bp, Artificial
  oligonucleotide probe
cgagcggaggtcccaa

SEQ ID NO: 25988 - DNA, 16 bp, Artificial
  oligonucleotide probe
cgaggacgccaaacgc

SEQ ID NO: 25989 - DNA, 16 bp, Artificial
  oligonucleotide probe
caccgacgggaaacgc

SEQ ID NO: 25990 - DNA, 16 bp, Artificial
  oligonucleotide probe
gtccggaagtgggcga

SEQ ID NO: 25991 - DNA, 16 bp, Artificial
  oligonucleotide probe
gtccgagcagcggcct

SEQ ID NO: 25992 - DNA, 16 bp, Artificial
  oligonucleotide probe
caggagcgggaagcga

SEQ ID NO: 25993 - DNA, 16 bp, Artificial
  oligonucleotide probe
cggagcctgagcgtgg

SEQ ID NO: 25994 - DNA, 16 bp, Artificial
  oligonucleotide probe
tggcaccagcaggggt

SEQ ID NO: 25995 - DNA, 16 bp, Artificial
  oligonucleotide probe
ggtccggagcagacgc

SEQ ID NO: 25996 - DNA, 16 bp, Artificial
  oligonucleotide probe
gcctgcgagagctggc

SEQ ID NO: 25997 - DNA, 16 bp, Artificial
  oligonucleotide probe
acgccaccgcctgacg

SEQ ID NO: 25998 - DNA, 16 bp, Artificial
  oligonucleotide probe
gacgcaggcggagggt

SEQ ID NO: 25999 - DNA, 16 bp, Artificial
  oligonucleotide probe
caccgacgggaaacgc

SEQ ID NO: 26000 - DNA, 16 bp, Artificial
  oligonucleotide probe
gtccggaagtgggcga

SEQ ID NO: 26001 - DNA, 16 bp, Artificial
  oligonucleotide probe
acgcggtccaccgtgg

SEQ ID NO: 26002 - DNA, 16 bp, Artificial
  oligonucleotide probe
tggcgtgggggtccaa

SEQ ID NO: 26003 - DNA, 16 bp, Artificial
  oligonucleotide probe
gggttggccgagtggc

SEQ ID NO: 26004 - DNA, 16 bp, Artificial
  oligonucleotide probe
tggcgggtgacggtgg

SEQ ID NO: 26005 - DNA, 16 bp, Artificial
  oligonucleotide probe
gagcgagcagcgggtc

SEQ ID NO: 26006 - DNA, 16 bp, Artificial
  oligonucleotide probe
acgccctcaccagcga

SEQ ID NO: 26007 - DNA, 16 bp, Artificial
  oligonucleotide probe
cggacacctggccgga

SEQ ID NO: 26008 - DNA, 16 bp, Artificial
  oligonucleotide probe
ggtcgcgacacctggc

SEQ ID NO: 26009 - DNA, 16 bp, Artificial
  oligonucleotide probe
cggatggcccaagggt

SEQ ID NO: 26010 - DNA, 16 bp, Artificial
  oligonucleotide probe
gggtacgcgacgcgag

SEQ ID NO: 26011 - DNA, 16 bp, Artificial
  oligonucleotide probe
cgagcggaggtcccaa

SEQ ID NO: 26012 - DNA, 16 bp, Artificial
  oligonucleotide probe
cgaggacgccaaacgc

SEQ ID NO: 26013 - DNA, 16 bp, Artificial
  oligonucleotide probe
tggcgcctgtccgtgg

SEQ ID NO: 26014 - DNA, 16 bp, Artificial
  oligonucleotide probe
gtggcgagcctcgggt

SEQ ID NO: 26015 - DNA, 16 bp, Artificial
  oligonucleotide probe
gtgggacgacgcgcga

SEQ ID NO: 26016 - DNA, 16 bp, Artificial
  oligonucleotide probe
gcaggcagccaatggc

SEQ ID NO: 26017 - DNA, 16 bp, Artificial
  oligonucleotide probe
cgagcctcgggtgcga

SEQ ID NO: 26018 - DNA, 16 bp, Artificial
  oligonucleotide probe
actgcggacgaggcct

SEQ ID NO: 26019 - DNA, 16 bp, Artificial
  oligonucleotide probe
tgctgggtgcaggcga

SEQ ID NO: 26020 - DNA, 16 bp, Artificial
  oligonucleotide probe
agcggtccgcgagagc

SEQ ID NO: 26021 - DNA, 16 bp, Artificial
  oligonucleotide probe
cggagcaggagcggaa

SEQ ID NO: 26022 - DNA, 16 bp, Artificial
  oligonucleotide probe
ggtcgcctgtccagcg

SEQ ID NO: 26023 - DNA, 16 bp, Artificial
  oligonucleotide probe
gagcgcctcctcgagc

SEQ ID NO: 26024 - DNA, 16 bp, Artificial
  oligonucleotide probe
gtggccaatcacgcga

SEQ ID NO: 26025 - DNA, 16 bp, Artificial
  oligonucleotide probe
cagggcagggtcgggt

SEQ ID NO: 26026 - DNA, 16 bp, Artificial
  oligonucleotide probe
agcggacggcaggagc

SEQ ID NO: 26027 - DNA, 16 bp, Artificial
  oligonucleotide probe
tgctcggatgctgcga

SEQ ID NO: 26028 - DNA, 16 bp, Artificial
  oligonucleotide probe
gagcgcagccaagcct

SEQ ID NO: 26029 - DNA, 16 bp, Artificial
  oligonucleotide probe
gacggacgacgcgtgg

SEQ ID NO: 26030 - DNA, 16 bp, Artificial
  oligonucleotide probe
gacggggtcggacgag

SEQ ID NO: 26031 - DNA, 16 bp, Artificial
  oligonucleotide probe
caccgagccacccgga

SEQ ID NO: 26032 - DNA, 16 bp, Artificial
  oligonucleotide probe
tgctcggatgctgcga

SEQ ID NO: 26033 - DNA, 16 bp, Artificial
  oligonucleotide probe
gacgcaccagcgcgag

SEQ ID NO: 26034 - DNA, 16 bp, Artificial
  oligonucleotide probe
acgccaccgcctgacg

SEQ ID NO: 26035 - DNA, 16 bp, Artificial
  oligonucleotide probe
gcaggacggacggcct

SEQ ID NO: 26036 - DNA, 16 bp, Artificial
  oligonucleotide probe
gcagcctctggccgag

SEQ ID NO: 26037 - DNA, 16 bp, Artificial
  oligonucleotide probe
gagcgagcagcgggtc

SEQ ID NO: 26038 - DNA, 16 bp, Artificial
  oligonucleotide probe
acgccctcaccagcga

SEQ ID NO: 26039 - DNA, 16 bp, Artificial
  oligonucleotide probe
gtggccaatcacgcga

SEQ ID NO: 26040 - DNA, 16 bp, Artificial
  oligonucleotide probe
agcgcaccgacgacgc

SEQ ID NO: 26041 - DNA, 16 bp, Artificial
  oligonucleotide probe
gacggacgacgcgtgg

SEQ ID NO: 26042 - DNA, 16 bp, Artificial
  oligonucleotide probe
gacggggtcggacgag

SEQ ID NO: 26043 - DNA, 16 bp, Artificial
  oligonucleotide probe
gcagcaccagcgtggc

SEQ ID NO: 26044 - DNA, 16 bp, Artificial
  oligonucleotide probe
ggtccggagcagacgc

SEQ ID NO: 26045 - DNA, 16 bp, Artificial
  oligonucleotide probe
acgccaccgcctgacg

SEQ ID NO: 26046 - DNA, 16 bp, Artificial
  oligonucleotide probe
cggatggcccaagggt

SEQ ID NO: 26047 - DNA, 16 bp, Artificial
  oligonucleotide probe
cacccgagagcggtgg

SEQ ID NO: 26048 - DNA, 16 bp, Artificial
  oligonucleotide probe
gcgagtcccggaagcg

SEQ ID NO: 26049 - DNA, 16 bp, Artificial
  oligonucleotide probe
caggagcgggaagcga

SEQ ID NO: 26050 - DNA, 16 bp, Artificial
  oligonucleotide probe
tggccaggcggagtgg

SEQ ID NO: 26051 - DNA, 16 bp, Artificial
  oligonucleotide probe
cctcgcctcgaggagc

SEQ ID NO: 26052 - DNA, 16 bp, Artificial
  oligonucleotide probe
cagggcagggtcgggt

SEQ ID NO: 26053 - DNA, 16 bp, Artificial
  oligonucleotide probe
agcgccaatcacgggt

SEQ ID NO: 26054 - DNA, 16 bp, Artificial
  oligonucleotide probe
caggcacccaggcgga

SEQ ID NO: 26055 - DNA, 16 bp, Artificial
  oligonucleotide probe
ggtcgcctgtccagcg

SEQ ID NO: 26056 - DNA, 16 bp, Artificial
  oligonucleotide probe
acgcccaacagggagc

SEQ ID NO: 26057 - DNA, 16 bp, Artificial
  oligonucleotide probe
gagcgcgacacccagg

SEQ ID NO: 26058 - DNA, 16 bp, Artificial
  oligonucleotide probe
cggacaggacgctggc

SEQ ID NO: 26059 - DNA, 16 bp, Artificial
  oligonucleotide probe
gcaggacggacggcct

SEQ ID NO: 26060 - DNA, 16 bp, Artificial
  oligonucleotide probe
cggagcaggagcggaa

SEQ ID NO: 26061 - DNA, 16 bp, Artificial
  oligonucleotide probe
gcgatggccaggtggc

SEQ ID NO: 26062 - DNA, 16 bp, Artificial
  oligonucleotide probe
accacggaagcgcgga

SEQ ID NO: 26063 - DNA, 16 bp, Artificial
  oligonucleotide probe
gagcacgcgggtgcct

SEQ ID NO: 26064 - DNA, 16 bp, Artificial
  oligonucleotide probe
gggtagcggcgagacg

SEQ ID NO: 26065 - DNA, 16 bp, Artificial
  oligonucleotide probe
cacccgagagcggtgg

SEQ ID NO: 26066 - DNA, 16 bp, Artificial
  oligonucleotide probe
gcgagtcccggaagcg

SEQ ID NO: 26067 - DNA, 16 bp, Artificial
  oligonucleotide probe
cggacacctggccgga

SEQ ID NO: 26068 - DNA, 16 bp, Artificial
  oligonucleotide probe
ggtcgcgacacctggc

SEQ ID NO: 26069 - DNA, 16 bp, Artificial
  oligonucleotide probe
gcagcggagcctgagc

SEQ ID NO: 26070 - DNA, 16 bp, Artificial
  oligonucleotide probe
acgcaccagtcccgga

SEQ ID NO: 26071 - DNA, 16 bp, Artificial
  oligonucleotide probe
caggcctccctcgcga

SEQ ID NO: 26072 - DNA, 16 bp, Artificial
  oligonucleotide probe
caccagcgagacgcga

SEQ ID NO: 26073 - DNA, 16 bp, Artificial
  oligonucleotide probe
ggtcgcctgtccagcg

SEQ ID NO: 26074 - DNA, 16 bp, Artificial
  oligonucleotide probe
acgcccaacagggagc

SEQ ID NO: 26075 - DNA, 16 bp, Artificial
  oligonucleotide probe
gagcgagcagcgggtc

SEQ ID NO: 26076 - DNA, 16 bp, Artificial
  oligonucleotide probe
acgccctcaccagcga

SEQ ID NO: 26077 - DNA, 16 bp, Artificial
  oligonucleotide probe
gcctgcgagagctggc

SEQ ID NO: 26078 - DNA, 16 bp, Artificial
  oligonucleotide probe
caggcctccctcgcga

SEQ ID NO: 26079 - DNA, 16 bp, Artificial
  oligonucleotide probe
gcgacgagcgagccaa

SEQ ID NO: 26080 - DNA, 16 bp, Artificial
  oligonucleotide probe
acgcgggtcaccgtcc

SEQ ID NO: 26081 - DNA, 16 bp, Artificial
  oligonucleotide probe
cggacacctggccgga

SEQ ID NO: 26082 - DNA, 16 bp, Artificial
  oligonucleotide probe
gggtagcggcgagacg

SEQ ID NO: 26083 - DNA, 16 bp, Artificial
  oligonucleotide probe
cggatggcccaagggt

SEQ ID NO: 26084 - DNA, 16 bp, Artificial
  oligonucleotide probe
gggtacgcgacgcgag

SEQ ID NO: 26085 - DNA, 16 bp, Artificial
  oligonucleotide probe
gacgcaggcggagggt

SEQ ID NO: 26086 - DNA, 16 bp, Artificial
  oligonucleotide probe
acgcggtccaccgtgg

SEQ ID NO: 26087 - DNA, 16 bp, Artificial
  oligonucleotide probe
gtggcaggagcgacgc

SEQ ID NO: 26088 - DNA, 16 bp, Artificial
  oligonucleotide probe
gacggagcacgccgga

SEQ ID NO: 26089 - DNA, 16 bp, Artificial
  oligonucleotide probe
ggtcgcgacacctggc

SEQ ID NO: 26090 - DNA, 16 bp, Artificial
  oligonucleotide probe
caccggtcagcggggt

SEQ ID NO: 26091 - DNA, 16 bp, Artificial
  oligonucleotide probe
gggtagcggcgagacg

SEQ ID NO: 26092 - DNA, 16 bp, Artificial
  oligonucleotide probe
cagggcgagtccgacg

SEQ ID NO: 26093 - DNA, 16 bp, Artificial
  oligonucleotide probe
gtccacgctggcgacg

SEQ ID NO: 26094 - DNA, 16 bp, Artificial
  oligonucleotide probe
cctcagcgcggaacca

SEQ ID NO: 26095 - DNA, 16 bp, Artificial
  oligonucleotide probe
gtccgggtcaggcagg

SEQ ID NO: 26096 - DNA, 16 bp, Artificial
  oligonucleotide probe
cgagcaggcgaggcag

SEQ ID NO: 26097 - DNA, 16 bp, Artificial
  oligonucleotide probe
gtggcggaggtcggaa

SEQ ID NO: 26098 - DNA, 16 bp, Artificial
  oligonucleotide probe
cctctggctggcccaa

SEQ ID NO: 26099 - DNA, 16 bp, Artificial
  oligonucleotide probe
caggcctccctcgcga

SEQ ID NO: 26100 - DNA, 16 bp, Artificial
  oligonucleotide probe
agcggcgagagcgtcc

SEQ ID NO: 26101 - DNA, 16 bp, Artificial
  oligonucleotide probe
agcggcgagagcgtcc

SEQ ID NO: 26102 - DNA, 16 bp, Artificial
  oligonucleotide probe
gacgcaccagcgcgag

SEQ ID NO: 26103 - DNA, 16 bp, Artificial
  oligonucleotide probe
caccggtcagcggggt

SEQ ID NO: 26104 - DNA, 16 bp, Artificial
  oligonucleotide probe
acgcagcggggtgacg

SEQ ID NO: 26105 - DNA, 16 bp, Artificial
  oligonucleotide probe
agcggcgagagcgtcc

SEQ ID NO: 26106 - DNA, 16 bp, Artificial
  oligonucleotide probe
gacgcaccagcgcgag

SEQ ID NO: 26107 - DNA, 16 bp, Artificial
  oligonucleotide probe
caggcctccctcgcga

SEQ ID NO: 26108 - DNA, 16 bp, Artificial
  oligonucleotide probe
caccagcgagacgcga

SEQ ID NO: 26109 - DNA, 16 bp, Artificial
  oligonucleotide probe
caggacgctggccctc

SEQ ID NO: 26110 - DNA, 16 bp, Artificial
  oligonucleotide probe
cctcgtggcggacgga

SEQ ID NO: 26111 - DNA, 16 bp, Artificial
  oligonucleotide probe
tggcggtcgcctcgag

SEQ ID NO: 26112 - DNA, 16 bp, Artificial
  oligonucleotide probe
gacgcaggcggagggt

SEQ ID NO: 26113 - DNA, 16 bp, Artificial
  oligonucleotide probe
gacgcaccagcgcgag

SEQ ID NO: 26114 - DNA, 16 bp, Artificial
  oligonucleotide probe
acgccaccgcctgacg

SEQ ID NO: 26115 - DNA, 16 bp, Artificial
  oligonucleotide probe
cggagcaggagcggaa

SEQ ID NO: 26116 - DNA, 16 bp, Artificial
  oligonucleotide probe
ggtcgcctgtccagcg

SEQ ID NO: 26117 - DNA, 16 bp, Artificial
  oligonucleotide probe
cagggtgggcgagcga

SEQ ID NO: 26118 - DNA, 16 bp, Artificial
  oligonucleotide probe
acgcccaacagggagc

SEQ ID NO: 26119 - DNA, 16 bp, Artificial
  oligonucleotide probe
ggtcgcaggcgagggt

SEQ ID NO: 26120 - DNA, 16 bp, Artificial
  oligonucleotide probe
cacccgagagcggtgg

SEQ ID NO: 26121 - DNA, 16 bp, Artificial
  oligonucleotide probe
cggatggcccaagggt

SEQ ID NO: 26122 - DNA, 16 bp, Artificial
  oligonucleotide probe
gggtacgcgacgcgag

SEQ ID NO: 26123 - DNA, 16 bp, Artificial
  oligonucleotide probe
tggcggtcgcctcgag

SEQ ID NO: 26124 - DNA, 16 bp, Artificial
  oligonucleotide probe
cggagcgagtggggaa

SEQ ID NO: 26125 - DNA, 16 bp, Artificial
  oligonucleotide probe
gacgcaccagcgcgag

SEQ ID NO: 26126 - DNA, 16 bp, Artificial
  oligonucleotide probe
acgccaccgcctgacg

SEQ ID NO: 26127 - DNA, 16 bp, Artificial
  oligonucleotide probe
gggtagcggcgagacg

SEQ ID NO: 26128 - DNA, 16 bp, Artificial
  oligonucleotide probe
cagggcgagtccgacg

SEQ ID NO: 26129 - DNA, 16 bp, Artificial
  oligonucleotide probe
gtggcaggagcgacgc

SEQ ID NO: 26130 - DNA, 16 bp, Artificial
  oligonucleotide probe
gagcgcgacacccagg

SEQ ID NO: 26131 - DNA, 16 bp, Artificial
  oligonucleotide probe
gcgaagcggcgaggtc

SEQ ID NO: 26132 - DNA, 16 bp, Artificial
  oligonucleotide probe
agcgagcggtggacgc

SEQ ID NO: 26133 - DNA, 16 bp, Artificial
  oligonucleotide probe
cacccgagagcggtgg

SEQ ID NO: 26134 - DNA, 16 bp, Artificial
  oligonucleotide probe
cctccggacctcacgc

SEQ ID NO: 26135 - DNA, 16 bp, Artificial
  oligonucleotide probe
tggccaggcggagtgg

SEQ ID NO: 26136 - DNA, 16 bp, Artificial
  oligonucleotide probe
gcctgtgggtccgcga

SEQ ID NO: 26137 - DNA, 16 bp, Artificial
  oligonucleotide probe
tgctcggatgctgcga

SEQ ID NO: 26138 - DNA, 16 bp, Artificial
  oligonucleotide probe
gagcgcagccaagcct

SEQ ID NO: 26139 - DNA, 16 bp, Artificial
  oligonucleotide probe
gcagcctctggccgag

SEQ ID NO: 26140 - DNA, 16 bp, Artificial
  oligonucleotide probe
gcagcaccagcgtggc

SEQ ID NO: 26141 - DNA, 16 bp, Artificial
  oligonucleotide probe
gcgacagggcctgcct

SEQ ID NO: 26142 - DNA, 16 bp, Artificial
  oligonucleotide probe
cggagcgagtggggaa

SEQ ID NO: 26143 - DNA, 16 bp, Artificial
  oligonucleotide probe
tgctcggatgctgcga

SEQ ID NO: 26144 - DNA, 16 bp, Artificial
  oligonucleotide probe
gagcgcagccaagcct

SEQ ID NO: 26145 - DNA, 16 bp, Artificial
  oligonucleotide probe
cgaggacgccaaacgc

SEQ ID NO: 26146 - DNA, 16 bp, Artificial
  oligonucleotide probe
accatggcacgcgacg

SEQ ID NO: 26147 - DNA, 16 bp, Artificial
  oligonucleotide probe
caggacgctggccctc

SEQ ID NO: 26148 - DNA, 16 bp, Artificial
  oligonucleotide probe
cctcgtggcggacgga

SEQ ID NO: 26149 - DNA, 16 bp, Artificial
  oligonucleotide probe
gtccgggtcaggcagg

SEQ ID NO: 26150 - DNA, 16 bp, Artificial
  oligonucleotide probe
cgagcaggcgaggcag

SEQ ID NO: 26151 - DNA, 16 bp, Artificial
  oligonucleotide probe
caggcctccctcgcga

SEQ ID NO: 26152 - DNA, 16 bp, Artificial
  oligonucleotide probe
gtggccaatcacgcga

SEQ ID NO: 26153 - DNA, 16 bp, Artificial
  oligonucleotide probe
gtggcgagcctcgggt

SEQ ID NO: 26154 - DNA, 16 bp, Artificial
  oligonucleotide probe
ggtcgcaggcgagggt

SEQ ID NO: 26155 - DNA, 16 bp, Artificial
  oligonucleotide probe
ggtcgcgacacctggc

SEQ ID NO: 26156 - DNA, 16 bp, Artificial
  oligonucleotide probe
cgagcctcgggtgcga

SEQ ID NO: 26157 - DNA, 16 bp, Artificial
  oligonucleotide probe
gcctagcgcctcgacg

SEQ ID NO: 26158 - DNA, 16 bp, Artificial
  oligonucleotide probe
ggaagcctgcgacgga

SEQ ID NO: 26159 - DNA, 16 bp, Artificial
  oligonucleotide probe
gcgacagggcctgcct

SEQ ID NO: 26160 - DNA, 16 bp, Artificial
  oligonucleotide probe
cggagcgagtggggaa

SEQ ID NO: 26161 - DNA, 16 bp, Artificial
  oligonucleotide probe
gtggcggaggtcggaa

SEQ ID NO: 26162 - DNA, 16 bp, Artificial
  oligonucleotide probe
cctctggctggcccaa

SEQ ID NO: 26163 - DNA, 16 bp, Artificial
  oligonucleotide probe
gcctagcgcctcgacg

SEQ ID NO: 26164 - DNA, 16 bp, Artificial
  oligonucleotide probe
ggaagcctgcgacgga

SEQ ID NO: 26165 - DNA, 16 bp, Artificial
  oligonucleotide probe
acgccaccgcctgacg

SEQ ID NO: 26166 - DNA, 16 bp, Artificial
  oligonucleotide probe
cggatggcccaagggt

SEQ ID NO: 26167 - DNA, 16 bp, Artificial
  oligonucleotide probe
tggcgcctgtccgtgg

SEQ ID NO: 26168 - DNA, 16 bp, Artificial
  oligonucleotide probe
gtggcgagcctcgggt

SEQ ID NO: 26169 - DNA, 16 bp, Artificial
  oligonucleotide probe
gcgacgagcgagccaa

SEQ ID NO: 26170 - DNA, 16 bp, Artificial
  oligonucleotide probe
acgcgggtcaccgtcc

SEQ ID NO: 26171 - DNA, 16 bp, Artificial
  oligonucleotide probe
gagcacgcgggtgcct

SEQ ID NO: 26172 - DNA, 16 bp, Artificial
  oligonucleotide probe
ggaacggaagcggagc

SEQ ID NO: 26173 - DNA, 16 bp, Artificial
  oligonucleotide probe
ggtcgcctgtccagcg

SEQ ID NO: 26174 - DNA, 16 bp, Artificial
  oligonucleotide probe
acgcccaacagggagc

SEQ ID NO: 26175 - DNA, 16 bp, Artificial
  oligonucleotide probe
gtggccaatcacgcga

SEQ ID NO: 26176 - DNA, 16 bp, Artificial
  oligonucleotide probe
agcgcaccgacgacgc

SEQ ID NO: 26177 - DNA, 16 bp, Artificial
  oligonucleotide probe
cggagcctgagcgtgg

SEQ ID NO: 26178 - DNA, 16 bp, Artificial
  oligonucleotide probe
caccggtcagcggggt

SEQ ID NO: 26179 - DNA, 16 bp, Artificial
  oligonucleotide probe
gagcgacgcgagagcg

SEQ ID NO: 26180 - DNA, 16 bp, Artificial
  oligonucleotide probe
cgagcctcgggtgcga

SEQ ID NO: 26181 - DNA, 16 bp, Artificial
  oligonucleotide probe
acgcagcggggtgacg

SEQ ID NO: 26182 - DNA, 16 bp, Artificial
  oligonucleotide probe
caccgcctcagggacg

SEQ ID NO: 26183 - DNA, 16 bp, Artificial
  oligonucleotide probe
gtgggggtgcagggaa

SEQ ID NO: 26184 - DNA, 16 bp, Artificial
  oligonucleotide probe
ggtcgcaggcgagggt

SEQ ID NO: 26185 - DNA, 16 bp, Artificial
  oligonucleotide probe
gcgacagggcctgcct

SEQ ID NO: 26186 - DNA, 16 bp, Artificial
  oligonucleotide probe
cggagcgagtggggaa

SEQ ID NO: 26187 - DNA, 16 bp, Artificial
  oligonucleotide probe
actgcggacgaggcct

SEQ ID NO: 26188 - DNA, 16 bp, Artificial
  oligonucleotide probe
caccgcctcagggacg

SEQ ID NO: 26189 - DNA, 16 bp, Artificial
  oligonucleotide probe
caccggtcagcggggt

SEQ ID NO: 26190 - DNA, 16 bp, Artificial
  oligonucleotide probe
acgcagcggggtgacg

SEQ ID NO: 26191 - DNA, 16 bp, Artificial
  oligonucleotide probe
gtccacgctggcgacg

SEQ ID NO: 26192 - DNA, 16 bp, Artificial
  oligonucleotide probe
cctcagcgcggaacca

SEQ ID NO: 26193 - DNA, 16 bp, Artificial
  oligonucleotide probe
gtggcgagcctcgggt

SEQ ID NO: 26194 - DNA, 16 bp, Artificial
  oligonucleotide probe
tggcaccagcaggggt

SEQ ID NO: 26195 - DNA, 16 bp, Artificial
  oligonucleotide probe
gagcgacgcgagagcg

SEQ ID NO: 26196 - DNA, 16 bp, Artificial
  oligonucleotide probe
cgagcctcgggtgcga

SEQ ID NO: 26197 - DNA, 16 bp, Artificial
  oligonucleotide probe
caccggtcagcggggt

SEQ ID NO: 26198 - DNA, 16 bp, Artificial
  oligonucleotide probe
actgcggacgaggcct

SEQ ID NO: 26199 - DNA, 16 bp, Artificial
  oligonucleotide probe
cctcgcctcgaggagc

SEQ ID NO: 26200 - DNA, 16 bp, Artificial
  oligonucleotide probe
cagggcagggtcgggt

SEQ ID NO: 26201 - DNA, 16 bp, Artificial
  oligonucleotide probe
agcgcaccgacgacgc

SEQ ID NO: 26202 - DNA, 16 bp, Artificial
  oligonucleotide probe
gagcgcagccaagcct

SEQ ID NO: 26203 - DNA, 16 bp, Artificial
  oligonucleotide probe
gtgggggtgcagggaa

SEQ ID NO: 26204 - DNA, 16 bp, Artificial
  oligonucleotide probe
ggtcgcaggcgagggt

SEQ ID NO: 26205 - DNA, 16 bp, Artificial
  oligonucleotide probe
tgctcggatgctgcga

SEQ ID NO: 26206 - DNA, 16 bp, Artificial
  oligonucleotide probe
tggcgcctgtccgtgg

SEQ ID NO: 26207 - DNA, 16 bp, Artificial
  oligonucleotide probe
cagggtgggcgagcga

SEQ ID NO: 26208 - DNA, 16 bp, Artificial
  oligonucleotide probe
acgcccaacagggagc

SEQ ID NO: 26209 - DNA, 16 bp, Artificial
  oligonucleotide probe
acgcagcggggtgacg

SEQ ID NO: 26210 - DNA, 16 bp, Artificial
  oligonucleotide probe
gcaggcagccaatggc

SEQ ID NO: 26211 - DNA, 16 bp, Artificial
  oligonucleotide probe
cacccgagagcggtgg

SEQ ID NO: 26212 - DNA, 16 bp, Artificial
  oligonucleotide probe
gcgagtcccggaagcg

SEQ ID NO: 26213 - DNA, 16 bp, Artificial
  oligonucleotide probe
gagcacgcgggtgcct

SEQ ID NO: 26214 - DNA, 16 bp, Artificial
  oligonucleotide probe
ggaacggaagcggagc

SEQ ID NO: 26215 - DNA, 16 bp, Artificial
  oligonucleotide probe
gcaggacggacggcct

SEQ ID NO: 26216 - DNA, 16 bp, Artificial
  oligonucleotide probe
cggagcaggagcggaa

SEQ ID NO: 26217 - DNA, 16 bp, Artificial
  oligonucleotide probe
gtccgggtcaggcagg

SEQ ID NO: 26218 - DNA, 16 bp, Artificial
  oligonucleotide probe
cggagagcgcgagcct

SEQ ID NO: 26219 - DNA, 16 bp, Artificial
  oligonucleotide probe
caggcctccctcgcga

SEQ ID NO: 26220 - DNA, 16 bp, Artificial
  oligonucleotide probe
caccagcgagacgcga

SEQ ID NO: 26221 - DNA, 16 bp, Artificial
  oligonucleotide probe
cgagcaccgagccgga

SEQ ID NO: 26222 - DNA, 16 bp, Artificial
  oligonucleotide probe
cctccggacctcacgc

SEQ ID NO: 26223 - DNA, 16 bp, Artificial
  oligonucleotide probe
acgccaggcgaggtgg

SEQ ID NO: 26224 - DNA, 16 bp, Artificial
  oligonucleotide probe
caggggaagggtcgga

SEQ ID NO: 26225 - DNA, 16 bp, Artificial
  oligonucleotide probe
cgagcaccgagccgga

SEQ ID NO: 26226 - DNA, 16 bp, Artificial
  oligonucleotide probe
cctccggacctcacgc

SEQ ID NO: 26227 - DNA, 16 bp, Artificial
  oligonucleotide probe
gtccgggtcaggcagg

SEQ ID NO: 26228 - DNA, 16 bp, Artificial
  oligonucleotide probe
agcggcgagagcgtcc

SEQ ID NO: 26229 - DNA, 16 bp, Artificial
  oligonucleotide probe
tggccaggcggagtgg

SEQ ID NO: 26230 - DNA, 16 bp, Artificial
  oligonucleotide probe
gcctgtgggtccgcga

SEQ ID NO: 26231 - DNA, 16 bp, Artificial
  oligonucleotide probe
agcggacggcaggagc

SEQ ID NO: 26232 - DNA, 16 bp, Artificial
  oligonucleotide probe
ggtcgcgacacctggc

SEQ ID NO: 26233 - DNA, 16 bp, Artificial
  oligonucleotide probe
tggcgcctgtccgtgg

SEQ ID NO: 26234 - DNA, 16 bp, Artificial
  oligonucleotide probe
gtggcgagcctcgggt

SEQ ID NO: 26235 - DNA, 16 bp, Artificial
  oligonucleotide probe
caccggtcagcggggt

SEQ ID NO: 26236 - DNA, 16 bp, Artificial
  oligonucleotide probe
acgcagcggggtgacg

SEQ ID NO: 26237 - DNA, 16 bp, Artificial
  oligonucleotide probe
cgagcaggcgaggcag

SEQ ID NO: 26238 - DNA, 16 bp, Artificial
  oligonucleotide probe
gcctcaggacgcacgc

SEQ ID NO: 26239 - DNA, 16 bp, Artificial
  oligonucleotide probe
gacgcaccagcgcgag

SEQ ID NO: 26240 - DNA, 16 bp, Artificial
  oligonucleotide probe
tggcaccagcaggggt

SEQ ID NO: 26241 - DNA, 16 bp, Artificial
  oligonucleotide probe
cagggcagggtcgggt

SEQ ID NO: 26242 - DNA, 16 bp, Artificial
  oligonucleotide probe
gacggagcacgccgga

SEQ ID NO: 26243 - DNA, 16 bp, Artificial
  oligonucleotide probe
cacccgagagcggtgg

SEQ ID NO: 26244 - DNA, 16 bp, Artificial
  oligonucleotide probe
gcgagtcccggaagcg

SEQ ID NO: 26245 - DNA, 16 bp, Artificial
  oligonucleotide probe
gcctcaggacgcacgc

SEQ ID NO: 26246 - DNA, 16 bp, Artificial
  oligonucleotide probe
tggcaccagcaggggt

SEQ ID NO: 26247 - DNA, 16 bp, Artificial
  oligonucleotide probe
caccgggtggtcagcg

SEQ ID NO: 26248 - DNA, 16 bp, Artificial
  oligonucleotide probe
ggtcgacgacgccgag

SEQ ID NO: 26249 - DNA, 16 bp, Artificial
  oligonucleotide probe
gagcacgcgggtgcct

SEQ ID NO: 26250 - DNA, 16 bp, Artificial
  oligonucleotide probe
ggaacggaagcggagc

SEQ ID NO: 26251 - DNA, 16 bp, Artificial
  oligonucleotide probe
caccgacgggaaacgc

SEQ ID NO: 26252 - DNA, 16 bp, Artificial
  oligonucleotide probe
gtccggaagtgggcga

SEQ ID NO: 26253 - DNA, 16 bp, Artificial
  oligonucleotide probe
cacccgagagcggtgg

SEQ ID NO: 26254 - DNA, 16 bp, Artificial
  oligonucleotide probe
gcgagtcccggaagcg

SEQ ID NO: 26255 - DNA, 16 bp, Artificial
  oligonucleotide probe
actgcggacgaggcct

SEQ ID NO: 26256 - DNA, 16 bp, Artificial
  oligonucleotide probe
caccgcctcagggacg

SEQ ID NO: 26257 - DNA, 16 bp, Artificial
  oligonucleotide probe
accatggcacgcgacg

SEQ ID NO: 26258 - DNA, 16 bp, Artificial
  oligonucleotide probe
acgccaggcgaggtgg

SEQ ID NO: 26259 - DNA, 16 bp, Artificial
  oligonucleotide probe
caggacgctggccctc

SEQ ID NO: 26260 - DNA, 16 bp, Artificial
  oligonucleotide probe
cctcgtggcggacgga

SEQ ID NO: 26261 - DNA, 16 bp, Artificial
  oligonucleotide probe
caggagcgggaagcga

SEQ ID NO: 26262 - DNA, 16 bp, Artificial
  oligonucleotide probe
tggccaggcggagtgg

SEQ ID NO: 26263 - DNA, 16 bp, Artificial
  oligonucleotide probe
cgagcggaggtcccaa

SEQ ID NO: 26264 - DNA, 16 bp, Artificial
  oligonucleotide probe
gcctcggagacggcag

SEQ ID NO: 26265 - DNA, 16 bp, Artificial
  oligonucleotide probe
gggtagcggcgagacg

SEQ ID NO: 26266 - DNA, 16 bp, Artificial
  oligonucleotide probe
cagggcgagtccgacg

SEQ ID NO: 26267 - DNA, 16 bp, Artificial
  oligonucleotide probe
cagggtgggcgagcga

SEQ ID NO: 26268 - DNA, 16 bp, Artificial
  oligonucleotide probe
gagcgagcagcgggtc

SEQ ID NO: 26269 - DNA, 16 bp, Artificial
  oligonucleotide probe
actgcggacgaggcct

SEQ ID NO: 26270 - DNA, 16 bp, Artificial
  oligonucleotide probe
caccgcctcagggacg

SEQ ID NO: 26271 - DNA, 16 bp, Artificial
  oligonucleotide probe
cacccgagagcggtgg

SEQ ID NO: 26272 - DNA, 16 bp, Artificial
  oligonucleotide probe
gcgagtcccggaagcg

SEQ ID NO: 26273 - DNA, 16 bp, Artificial
  oligonucleotide probe
agcggtccgcgagagc

SEQ ID NO: 26274 - DNA, 16 bp, Artificial
  oligonucleotide probe
acgcggaagacgtggc

SEQ ID NO: 26275 - DNA, 16 bp, Artificial
  oligonucleotide probe
gcgacctcacgcgcag

SEQ ID NO: 26276 - DNA, 16 bp, Artificial
  oligonucleotide probe
ggtcgcctgtccagcg

SEQ ID NO: 26277 - DNA, 16 bp, Artificial
  oligonucleotide probe
acgcagcggggtgacg

SEQ ID NO: 26278 - DNA, 16 bp, Artificial
  oligonucleotide probe
caccgcctcagggacg

SEQ ID NO: 26279 - DNA, 16 bp, Artificial
  oligonucleotide probe
acgccctcaccagcga

SEQ ID NO: 26280 - DNA, 16 bp, Artificial
  oligonucleotide probe
cctcgtggcggacgga

SEQ ID NO: 26281 - DNA, 16 bp, Artificial
  oligonucleotide probe
acgcgggtcaccgtcc

SEQ ID NO: 26282 - DNA, 16 bp, Artificial
  oligonucleotide probe
gcgaagcggcgaggtc

SEQ ID NO: 26283 - DNA, 16 bp, Artificial
  oligonucleotide probe
caccggtcagcggggt

SEQ ID NO: 26284 - DNA, 16 bp, Artificial
  oligonucleotide probe
acgcagcggggtgacg

SEQ ID NO: 26285 - DNA, 16 bp, Artificial
  oligonucleotide probe
gcgacctcacgcgcag

SEQ ID NO: 26286 - DNA, 16 bp, Artificial
  oligonucleotide probe
ggtcgcctgtccagcg

SEQ ID NO: 26287 - DNA, 16 bp, Artificial
  oligonucleotide probe
cggagcaggagcggaa

SEQ ID NO: 26288 - DNA, 16 bp, Artificial
  oligonucleotide probe
ggtcgcctgtccagcg

SEQ ID NO: 26289 - DNA, 16 bp, Artificial
  oligonucleotide probe
caggacgctggccctc

SEQ ID NO: 26290 - DNA, 16 bp, Artificial
  oligonucleotide probe
cctcgtggcggacgga

SEQ ID NO: 26291 - DNA, 16 bp, Artificial
  oligonucleotide probe
cagggcagggtcgggt

SEQ ID NO: 26292 - DNA, 16 bp, Artificial
  oligonucleotide probe
agcggacggcaggagc

SEQ ID NO: 26293 - DNA, 16 bp, Artificial
  oligonucleotide probe
cagggcagggtcgggt

SEQ ID NO: 26294 - DNA, 16 bp, Artificial
  oligonucleotide probe
gacggagcacgccgga

SEQ ID NO: 26295 - DNA, 16 bp, Artificial
  oligonucleotide probe
ggtcgcctgtccagcg

SEQ ID NO: 26296 - DNA, 16 bp, Artificial
  oligonucleotide probe
acgcccaacagggagc

SEQ ID NO: 26297 - DNA, 16 bp, Artificial
  oligonucleotide probe
cacccgagagcggtgg

SEQ ID NO: 26298 - DNA, 16 bp, Artificial
  oligonucleotide probe
gcgagtcccggaagcg

SEQ ID NO: 26299 - DNA, 16 bp, Artificial
  oligonucleotide probe
gagcacgcgggtgcct

SEQ ID NO: 26300 - DNA, 16 bp, Artificial
  oligonucleotide probe
ggaacggaagcggagc

SEQ ID NO: 26301 - DNA, 16 bp, Artificial
  oligonucleotide probe
gagcacgcgggtgcct

SEQ ID NO: 26302 - DNA, 16 bp, Artificial
  oligonucleotide probe
ggaacggaagcggagc

SEQ ID NO: 26303 - DNA, 16 bp, Artificial
  oligonucleotide probe
gagcacgcgggtgcct

SEQ ID NO: 26304 - DNA, 16 bp, Artificial
  oligonucleotide probe
ggaacggaagcggagc

SEQ ID NO: 26305 - DNA, 16 bp, Artificial
  oligonucleotide probe
acgccaccgcctgacg

SEQ ID NO: 26306 - DNA, 16 bp, Artificial
  oligonucleotide probe
cggatggcccaagggt

SEQ ID NO: 26307 - DNA, 16 bp, Artificial
  oligonucleotide probe
caccgcctcagggacg

SEQ ID NO: 26308 - DNA, 16 bp, Artificial
  oligonucleotide probe
gcgacctcacgcgcag

SEQ ID NO: 26309 - DNA, 16 bp, Artificial
  oligonucleotide probe
cgagcaccgagccgga

SEQ ID NO: 26310 - DNA, 16 bp, Artificial
  oligonucleotide probe
cctccggacctcacgc

SEQ ID NO: 26311 - DNA, 16 bp, Artificial
  oligonucleotide probe
gcctagcgcctcgacg

SEQ ID NO: 26312 - DNA, 16 bp, Artificial
  oligonucleotide probe
ggaagcctgcgacgga

SEQ ID NO: 26313 - DNA, 16 bp, Artificial
  oligonucleotide probe
caggcctccctcgcga

SEQ ID NO: 26314 - DNA, 16 bp, Artificial
  oligonucleotide probe
caccagcgagacgcga

SEQ ID NO: 26315 - DNA, 16 bp, Artificial
  oligonucleotide probe
tggcagcgggtcgtgg

SEQ ID NO: 26316 - DNA, 16 bp, Artificial
  oligonucleotide probe
gcctgggtcaccacgc

SEQ ID NO: 26317 - DNA, 16 bp, Artificial
  oligonucleotide probe
cggatggcccaagggt

SEQ ID NO: 26318 - DNA, 16 bp, Artificial
  oligonucleotide probe
gcctcggagacggcag

SEQ ID NO: 26319 - DNA, 16 bp, Artificial
  oligonucleotide probe
agcggcgagagcgtcc

SEQ ID NO: 26320 - DNA, 16 bp, Artificial
  oligonucleotide probe
gacgcaccagcgcgag

SEQ ID NO: 26321 - DNA, 16 bp, Artificial
  oligonucleotide probe
gcgacagggcctgcct

SEQ ID NO: 26322 - DNA, 16 bp, Artificial
  oligonucleotide probe
cggagcgagtggggaa

SEQ ID NO: 26323 - DNA, 16 bp, Artificial
  oligonucleotide probe
cagggcgagtccgacg

SEQ ID NO: 26324 - DNA, 16 bp, Artificial
  oligonucleotide probe
gagcgacgcgagagcg

SEQ ID NO: 26325 - DNA, 16 bp, Artificial
  oligonucleotide probe
gagcgcctcctcgagc

SEQ ID NO: 26326 - DNA, 16 bp, Artificial
  oligonucleotide probe
gtggccaatcacgcga

SEQ ID NO: 26327 - DNA, 16 bp, Artificial
  oligonucleotide probe
ggtcgcgacacctggc

SEQ ID NO: 26328 - DNA, 16 bp, Artificial
  oligonucleotide probe
cgagcctcgggtgcga

SEQ ID NO: 26329 - DNA, 16 bp, Artificial
  oligonucleotide probe
cgagcggaggtcccaa

SEQ ID NO: 26330 - DNA, 16 bp, Artificial
  oligonucleotide probe
cgaggacgccaaacgc

SEQ ID NO: 26331 - DNA, 16 bp, Artificial
  oligonucleotide probe
caccgggtggtcagcg

SEQ ID NO: 26332 - DNA, 16 bp, Artificial
  oligonucleotide probe
ggtcgacgacgccgag

SEQ ID NO: 26333 - DNA, 16 bp, Artificial
  oligonucleotide probe
cagggcagggtcgggt

SEQ ID NO: 26334 - DNA, 16 bp, Artificial
  oligonucleotide probe
gacggagcacgccgga

SEQ ID NO: 26335 - DNA, 16 bp, Artificial
  oligonucleotide probe
cgagcaccgagccgga

SEQ ID NO: 26336 - DNA, 16 bp, Artificial
  oligonucleotide probe
cctccggacctcacgc

SEQ ID NO: 26337 - DNA, 16 bp, Artificial
  oligonucleotide probe
cagggtgggcgagcga

SEQ ID NO: 26338 - DNA, 16 bp, Artificial
  oligonucleotide probe
acgcccaacagggagc

SEQ ID NO: 26339 - DNA, 16 bp, Artificial
  oligonucleotide probe
gcctgcgagagctggc

SEQ ID NO: 26340 - DNA, 16 bp, Artificial
  oligonucleotide probe
caggcctccctcgcga

SEQ ID NO: 26341 - DNA, 16 bp, Artificial
  oligonucleotide probe
gcagcaccagcgtggc

SEQ ID NO: 26342 - DNA, 16 bp, Artificial
  oligonucleotide probe
ggtccggagcagacgc

SEQ ID NO: 26343 - DNA, 16 bp, Artificial
  oligonucleotide probe
cagggcagggtcgggt

SEQ ID NO: 26344 - DNA, 16 bp, Artificial
  oligonucleotide probe
agcggacggcaggagc

SEQ ID NO: 26345 - DNA, 16 bp, Artificial
  oligonucleotide probe
cgagcaggcgaggcag

SEQ ID NO: 26346 - DNA, 16 bp, Artificial
  oligonucleotide probe
gcctcaggacgcacgc

SEQ ID NO: 26347 - DNA, 16 bp, Artificial
  oligonucleotide probe
tgctcggatgctgcga

SEQ ID NO: 26348 - DNA, 16 bp, Artificial
  oligonucleotide probe
gagcgcagccaagcct

SEQ ID NO: 26349 - DNA, 16 bp, Artificial
  oligonucleotide probe
caggacgctggccctc

SEQ ID NO: 26350 - DNA, 16 bp, Artificial
  oligonucleotide probe
cctcgtggcggacgga

SEQ ID NO: 26351 - DNA, 16 bp, Artificial
  oligonucleotide probe
tggcgcctgtccgtgg

SEQ ID NO: 26352 - DNA, 16 bp, Artificial
  oligonucleotide probe
gtggcgagcctcgggt

SEQ ID NO: 26353 - DNA, 16 bp, Artificial
  oligonucleotide probe
gggttggccgagtggc

SEQ ID NO: 26354 - DNA, 16 bp, Artificial
  oligonucleotide probe
tggcgggtgacggtgg

SEQ ID NO: 26355 - DNA, 16 bp, Artificial
  oligonucleotide probe
gacggcgagtgggcag

SEQ ID NO: 26356 - DNA, 16 bp, Artificial
  oligonucleotide probe
acgcgcctgacgcctc

SEQ ID NO: 26357 - DNA, 16 bp, Artificial
  oligonucleotide probe
acgccaccgcctgacg

SEQ ID NO: 26358 - DNA, 16 bp, Artificial
  oligonucleotide probe
cggatggcccaagggt

SEQ ID NO: 26359 - DNA, 16 bp, Artificial
  oligonucleotide probe
agcggcgagagcgtcc

SEQ ID NO: 26360 - DNA, 16 bp, Artificial
  oligonucleotide probe
gacgcaccagcgcgag

SEQ ID NO: 26361 - DNA, 16 bp, Artificial
  oligonucleotide probe
caggcctccctcgcga

SEQ ID NO: 26362 - DNA, 16 bp, Artificial
  oligonucleotide probe
caccagcgagacgcga

SEQ ID NO: 26363 - DNA, 16 bp, Artificial
  oligonucleotide probe
gcgacagggcctgcct

SEQ ID NO: 26364 - DNA, 16 bp, Artificial
  oligonucleotide probe
cggagcgagtggggaa

SEQ ID NO: 26365 - DNA, 16 bp, Artificial
  oligonucleotide probe
cggacacctggccgga

SEQ ID NO: 26366 - DNA, 16 bp, Artificial
  oligonucleotide probe
accatggcacgcgacg

SEQ ID NO: 26367 - DNA, 16 bp, Artificial
  oligonucleotide probe
tgctcggatgctgcga

SEQ ID NO: 26368 - DNA, 16 bp, Artificial
  oligonucleotide probe
gagcgcagccaagcct

SEQ ID NO: 26369 - DNA, 16 bp, Artificial
  oligonucleotide probe
caggacgctggccctc

SEQ ID NO: 26370 - DNA, 16 bp, Artificial
  oligonucleotide probe
cctcgtggcggacgga

SEQ ID NO: 26371 - DNA, 16 bp, Artificial
  oligonucleotide probe
agcggacggcaggagc

SEQ ID NO: 26372 - DNA, 16 bp, Artificial
  oligonucleotide probe
cggagcctgagcgtgg

SEQ ID NO: 26373 - DNA, 16 bp, Artificial
  oligonucleotide probe
acgcagcggggtgacg

SEQ ID NO: 26374 - DNA, 16 bp, Artificial
  oligonucleotide probe
gcaggacggacggcct

SEQ ID NO: 26375 - DNA, 16 bp, Artificial
  oligonucleotide probe
gcctcaggacgcacgc

SEQ ID NO: 26376 - DNA, 16 bp, Artificial
  oligonucleotide probe
caccagcgagacgcga

SEQ ID NO: 26377 - DNA, 16 bp, Artificial
  oligonucleotide probe
cgagcaccgagccgga

SEQ ID NO: 26378 - DNA, 16 bp, Artificial
  oligonucleotide probe
cctccggacctcacgc

SEQ ID NO: 26379 - DNA, 16 bp, Artificial
  oligonucleotide probe
cggagcaggagcggaa

SEQ ID NO: 26380 - DNA, 16 bp, Artificial
  oligonucleotide probe
ggtcgcctgtccagcg

SEQ ID NO: 26381 - DNA, 16 bp, Artificial
  oligonucleotide probe
tggcagcgggtcgtgg

SEQ ID NO: 26382 - DNA, 16 bp, Artificial
  oligonucleotide probe
gcctgggtcaccacgc

SEQ ID NO: 26383 - DNA, 16 bp, Artificial
  oligonucleotide probe
caccggtcagcggggt

SEQ ID NO: 26384 - DNA, 16 bp, Artificial
  oligonucleotide probe
acgcagcggggtgacg

SEQ ID NO: 26385 - DNA, 16 bp, Artificial
  oligonucleotide probe
cggatggcccaagggt

SEQ ID NO: 26386 - DNA, 16 bp, Artificial
  oligonucleotide probe
tggcaccagcaggggt

SEQ ID NO: 26387 - DNA, 16 bp, Artificial
  oligonucleotide probe
gagcgagcagcgggtc

SEQ ID NO: 26388 - DNA, 16 bp, Artificial
  oligonucleotide probe
acgccctcaccagcga

SEQ ID NO: 26389 - DNA, 16 bp, Artificial
  oligonucleotide probe
gcctagcgcctcgacg

SEQ ID NO: 26390 - DNA, 16 bp, Artificial
  oligonucleotide probe
ggaagcctgcgacgga

SEQ ID NO: 26391 - DNA, 16 bp, Artificial
  oligonucleotide probe
cagggtgggcgagcga

SEQ ID NO: 26392 - DNA, 16 bp, Artificial
  oligonucleotide probe
acgcccaacagggagc

SEQ ID NO: 26393 - DNA, 16 bp, Artificial
  oligonucleotide probe
gggtacgcgacgcgag

SEQ ID NO: 26394 - DNA, 16 bp, Artificial
  oligonucleotide probe
agcggacggcaggagc

SEQ ID NO: 26395 - DNA, 16 bp, Artificial
  oligonucleotide probe
acgcagcggggtgacg

SEQ ID NO: 26396 - DNA, 16 bp, Artificial
  oligonucleotide probe
caccgcctcagggacg

SEQ ID NO: 26397 - DNA, 16 bp, Artificial
  oligonucleotide probe
cagggcagggtcgggt

SEQ ID NO: 26398 - DNA, 16 bp, Artificial
  oligonucleotide probe
agcggcgagagcgtcc

SEQ ID NO: 26399 - DNA, 16 bp, Artificial
  oligonucleotide probe
gcaggacggacggcct

SEQ ID NO: 26400 - DNA, 16 bp, Artificial
  oligonucleotide probe
cggagcaggagcggaa

SEQ ID NO: 26401 - DNA, 16 bp, Artificial
  oligonucleotide probe
cgagcctcgggtgcga

SEQ ID NO: 26402 - DNA, 16 bp, Artificial
  oligonucleotide probe
actgcggacgaggcct

SEQ ID NO: 26403 - DNA, 16 bp, Artificial
  oligonucleotide probe
ggaacggaagcggagc

SEQ ID NO: 26404 - DNA, 16 bp, Artificial
  oligonucleotide probe
gcctcggagacggcag

SEQ ID NO: 26405 - DNA, 16 bp, Artificial
  oligonucleotide probe
caggcctccctcgcga

SEQ ID NO: 26406 - DNA, 16 bp, Artificial
  oligonucleotide probe
gtggccaatcacgcga

SEQ ID NO: 26407 - DNA, 16 bp, Artificial
  oligonucleotide probe
gacggcgagtgggcag

SEQ ID NO: 26408 - DNA, 16 bp, Artificial
  oligonucleotide probe
acgcgcctgacgcctc

SEQ ID NO: 26409 - DNA, 16 bp, Artificial
  oligonucleotide probe
cgagcctcgggtgcga

SEQ ID NO: 26410 - DNA, 16 bp, Artificial
  oligonucleotide probe
actgcggacgaggcct

SEQ ID NO: 26411 - DNA, 16 bp, Artificial
  oligonucleotide probe
caccggtcagcggggt

SEQ ID NO: 26412 - DNA, 16 bp, Artificial
  oligonucleotide probe
gggtagcggcgagacg

SEQ ID NO: 26413 - DNA, 16 bp, Artificial
  oligonucleotide probe
ccaaagcgggaatggc

SEQ ID NO: 26414 - DNA, 16 bp, Artificial
  oligonucleotide probe
cctccgaggacgcgga

SEQ ID NO: 26415 - DNA, 16 bp, Artificial
  oligonucleotide probe
gtgggggtgcagggaa

SEQ ID NO: 26416 - DNA, 16 bp, Artificial
  oligonucleotide probe
ggtcgcaggcgagggt

SEQ ID NO: 26417 - DNA, 16 bp, Artificial
  oligonucleotide probe
gcaggacggacggcct

SEQ ID NO: 26418 - DNA, 16 bp, Artificial
  oligonucleotide probe
gcgacctcacgcgcag

SEQ ID NO: 26419 - DNA, 16 bp, Artificial
  oligonucleotide probe
gggtggaacgaggcga

SEQ ID NO: 26420 - DNA, 16 bp, Artificial
  oligonucleotide probe
gcaggtggtggcgagc

SEQ ID NO: 26421 - DNA, 16 bp, Artificial
  oligonucleotide probe
cagggcgagtccgacg

SEQ ID NO: 26422 - DNA, 16 bp, Artificial
  oligonucleotide probe
gagcgacgcgagagcg

SEQ ID NO: 26423 - DNA, 16 bp, Artificial
  oligonucleotide probe
cgagcaccgagccgga

SEQ ID NO: 26424 - DNA, 16 bp, Artificial
  oligonucleotide probe
cctccggacctcacgc

SEQ ID NO: 26425 - DNA, 16 bp, Artificial
  oligonucleotide probe
caccgcctcagggacg

SEQ ID NO: 26426 - DNA, 16 bp, Artificial
  oligonucleotide probe
gcgacctcacgcgcag

SEQ ID NO: 26427 - DNA, 16 bp, Artificial
  oligonucleotide probe
tggcgtgggggtccaa

SEQ ID NO: 26428 - DNA, 16 bp, Artificial
  oligonucleotide probe
tgctgggtgcaggcga

SEQ ID NO: 26429 - DNA, 16 bp, Artificial
  oligonucleotide probe
gtggccaatcacgcga

SEQ ID NO: 26430 - DNA, 16 bp, Artificial
  oligonucleotide probe
agcgcaccgacgacgc

SEQ ID NO: 26431 - DNA, 16 bp, Artificial
  oligonucleotide probe
acgcgggtcaccgtcc

SEQ ID NO: 26432 - DNA, 16 bp, Artificial
  oligonucleotide probe
gcgaagcggcgaggtc

SEQ ID NO: 26433 - DNA, 16 bp, Artificial
  oligonucleotide probe
ggaaagcggcctggaa

SEQ ID NO: 26434 - DNA, 16 bp, Artificial
  oligonucleotide probe
gagcggtctggcggaa

SEQ ID NO: 26435 - DNA, 16 bp, Artificial
  oligonucleotide probe
gcgagtggcagggcct

SEQ ID NO: 26436 - DNA, 16 bp, Artificial
  oligonucleotide probe
caccgagccacccgga

SEQ ID NO: 26437 - DNA, 16 bp, Artificial
  oligonucleotide probe
cggagcctgagcgtgg

SEQ ID NO: 26438 - DNA, 16 bp, Artificial
  oligonucleotide probe
gagcgcgacacccagg

SEQ ID NO: 26439 - DNA, 16 bp, Artificial
  oligonucleotide probe
tgctgggtgcaggcga

SEQ ID NO: 26440 - DNA, 16 bp, Artificial
  oligonucleotide probe
agcggtccgcgagagc

SEQ ID NO: 26441 - DNA, 16 bp, Artificial
  oligonucleotide probe
tggcagcgggtcgtgg

SEQ ID NO: 26442 - DNA, 16 bp, Artificial
  oligonucleotide probe
gcctgggtcaccacgc

SEQ ID NO: 26443 - DNA, 16 bp, Artificial
  oligonucleotide probe
cggagcaggagcggaa

SEQ ID NO: 26444 - DNA, 16 bp, Artificial
  oligonucleotide probe
cagggtgggcgagcga

SEQ ID NO: 26445 - DNA, 16 bp, Artificial
  oligonucleotide probe
cggagcctgagcgtgg

SEQ ID NO: 26446 - DNA, 16 bp, Artificial
  oligonucleotide probe
cggagagcgcgagcct

SEQ ID NO: 26447 - DNA, 16 bp, Artificial
  oligonucleotide probe
gcaggacggacggcct

SEQ ID NO: 26448 - DNA, 16 bp, Artificial
  oligonucleotide probe
cggagcaggagcggaa

SEQ ID NO: 26449 - DNA, 16 bp, Artificial
  oligonucleotide probe
cacccgagagcggtgg

SEQ ID NO: 26450 - DNA, 16 bp, Artificial
  oligonucleotide probe
gggtagcggcgagacg

SEQ ID NO: 26451 - DNA, 16 bp, Artificial
  oligonucleotide probe
gggtggaacgaggcga

SEQ ID NO: 26452 - DNA, 16 bp, Artificial
  oligonucleotide probe
gcaggtggtggcgagc

SEQ ID NO: 26453 - DNA, 16 bp, Artificial
  oligonucleotide probe
agcggacggcaggagc

SEQ ID NO: 26454 - DNA, 16 bp, Artificial
  oligonucleotide probe
tggcaccagcaggggt

SEQ ID NO: 26455 - DNA, 16 bp, Artificial
  oligonucleotide probe
gagcgcagccaagcct

SEQ ID NO: 26456 - DNA, 16 bp, Artificial
  oligonucleotide probe
tggcacgcgagccagg

SEQ ID NO: 26457 - DNA, 16 bp, Artificial
  oligonucleotide probe
cgagcctcgggtgcga

SEQ ID NO: 26458 - DNA, 16 bp, Artificial
  oligonucleotide probe
actgcggacgaggcct

SEQ ID NO: 26459 - DNA, 16 bp, Artificial
  oligonucleotide probe
gtgggggtgcagggaa

SEQ ID NO: 26460 - DNA, 16 bp, Artificial
  oligonucleotide probe
ggtcgcaggcgagggt

SEQ ID NO: 26461 - DNA, 16 bp, Artificial
  oligonucleotide probe
caccgagccacccgga

SEQ ID NO: 26462 - DNA, 16 bp, Artificial
  oligonucleotide probe
tggcacgcgagccagg

SEQ ID NO: 26463 - DNA, 16 bp, Artificial
  oligonucleotide probe
gtccgggtcaggcagg

SEQ ID NO: 26464 - DNA, 16 bp, Artificial
  oligonucleotide probe
cgagcaggcgaggcag

SEQ ID NO: 26465 - DNA, 16 bp, Artificial
  oligonucleotide probe
gcctcaggacgcacgc

SEQ ID NO: 26466 - DNA, 16 bp, Artificial
  oligonucleotide probe
caccagcgagacgcga

SEQ ID NO: 26467 - DNA, 16 bp, Artificial
  oligonucleotide probe
cggagcctgagcgtgg

SEQ ID NO: 26468 - DNA, 16 bp, Artificial
  oligonucleotide probe
cggagagcgcgagcct

SEQ ID NO: 26469 - DNA, 16 bp, Artificial
  oligonucleotide probe
acgcgagcgggtgcag

SEQ ID NO: 26470 - DNA, 16 bp, Artificial
  oligonucleotide probe
gcgatggccaggtggc

SEQ ID NO: 26471 - DNA, 16 bp, Artificial
  oligonucleotide probe
cagggcagggtcgggt

SEQ ID NO: 26472 - DNA, 16 bp, Artificial
  oligonucleotide probe
gacggagcacgccgga

SEQ ID NO: 26473 - DNA, 16 bp, Artificial
  oligonucleotide probe
gagcgagcagcgggtc

SEQ ID NO: 26474 - DNA, 16 bp, Artificial
  oligonucleotide probe
caggacgctggccctc

SEQ ID NO: 26475 - DNA, 16 bp, Artificial
  oligonucleotide probe
tcacgccttggccacc

SEQ ID NO: 26476 - DNA, 16 bp, Artificial
  oligonucleotide probe
caccgcgaggtcacgc

SEQ ID NO: 26477 - DNA, 16 bp, Artificial
  oligonucleotide probe
cggagcaggagcggaa

SEQ ID NO: 26478 - DNA, 16 bp, Artificial
  oligonucleotide probe
ggtcgcctgtccagcg

SEQ ID NO: 26479 - DNA, 16 bp, Artificial
  oligonucleotide probe
caccgcctcagggacg

SEQ ID NO: 26480 - DNA, 16 bp, Artificial
  oligonucleotide probe
gcgacctcacgcgcag

SEQ ID NO: 26481 - DNA, 16 bp, Artificial
  oligonucleotide probe
agcgagcggtggacgc

SEQ ID NO: 26482 - DNA, 16 bp, Artificial
  oligonucleotide probe
cgagcggaggtcccaa

SEQ ID NO: 26483 - DNA, 16 bp, Artificial
  oligonucleotide probe
gtgggggtgcagggaa

SEQ ID NO: 26484 - DNA, 16 bp, Artificial
  oligonucleotide probe
ggtcgcaggcgagggt

SEQ ID NO: 26485 - DNA, 16 bp, Artificial
  oligonucleotide probe
gtccgggtcaggcagg

SEQ ID NO: 26486 - DNA, 16 bp, Artificial
  oligonucleotide probe
gcaggcagccaatggc

SEQ ID NO: 26487 - DNA, 16 bp, Artificial
  oligonucleotide probe
gtggccaatcacgcga

SEQ ID NO: 26488 - DNA, 16 bp, Artificial
  oligonucleotide probe
agcgcaccgacgacgc

SEQ ID NO: 26489 - DNA, 16 bp, Artificial
  oligonucleotide probe
caggcctccctcgcga

SEQ ID NO: 26490 - DNA, 16 bp, Artificial
  oligonucleotide probe
gtggccaatcacgcga

SEQ ID NO: 26491 - DNA, 16 bp, Artificial
  oligonucleotide probe
gtccgggtcaggcagg

SEQ ID NO: 26492 - DNA, 16 bp, Artificial
  oligonucleotide probe
cggagagcgcgagcct

SEQ ID NO: 26493 - DNA, 16 bp, Artificial
  oligonucleotide probe
ggtcgcgacacctggc

SEQ ID NO: 26494 - DNA, 16 bp, Artificial
  oligonucleotide probe
cgagcctcgggtgcga

SEQ ID NO: 26495 - DNA, 16 bp, Artificial
  oligonucleotide probe
caccgcctcagggacg

SEQ ID NO: 26496 - DNA, 16 bp, Artificial
  oligonucleotide probe
gcgacctcacgcgcag

SEQ ID NO: 26497 - DNA, 16 bp, Artificial
  oligonucleotide probe
caccgggtggtcagcg

SEQ ID NO: 26498 - DNA, 16 bp, Artificial
  oligonucleotide probe
ggtcgacgacgccgag

SEQ ID NO: 26499 - DNA, 16 bp, Artificial
  oligonucleotide probe
gtggcaggagcgacgc

SEQ ID NO: 26500 - DNA, 16 bp, Artificial
  oligonucleotide probe
gacggagcacgccgga

SEQ ID NO: 26501 - DNA, 16 bp, Artificial
  oligonucleotide probe
agcggacggcaggagc

SEQ ID NO: 26502 - DNA, 16 bp, Artificial
  oligonucleotide probe
cggagcctgagcgtgg

SEQ ID NO: 26503 - DNA, 16 bp, Artificial
  oligonucleotide probe
cgagcaggcgaggcag

SEQ ID NO: 26504 - DNA, 16 bp, Artificial
  oligonucleotide probe
gcctcaggacgcacgc

SEQ ID NO: 26505 - DNA, 16 bp, Artificial
  oligonucleotide probe
acgcagcggggtgacg

SEQ ID NO: 26506 - DNA, 16 bp, Artificial
  oligonucleotide probe
gcaggacggacggcct

SEQ ID NO: 26507 - DNA, 16 bp, Artificial
  oligonucleotide probe
cagggtgggcgagcga

SEQ ID NO: 26508 - DNA, 16 bp, Artificial
  oligonucleotide probe
acgcccaacagggagc

SEQ ID NO: 26509 - DNA, 16 bp, Artificial
  oligonucleotide probe
caggacgctggccctc

SEQ ID NO: 26510 - DNA, 16 bp, Artificial
  oligonucleotide probe
gtgggggtgcagggaa

SEQ ID NO: 26511 - DNA, 16 bp, Artificial
  oligonucleotide probe
gcagcggagcctgagc

SEQ ID NO: 26512 - DNA, 16 bp, Artificial
  oligonucleotide probe
acgcaccagtcccgga

SEQ ID NO: 26513 - DNA, 16 bp, Artificial
  oligonucleotide probe
cctcgtggcggacgga

SEQ ID NO: 26514 - DNA, 16 bp, Artificial
  oligonucleotide probe
gcgagtcccggaagcg

SEQ ID NO: 26515 - DNA, 16 bp, Artificial
  oligonucleotide probe
cgagcaccgagccgga

SEQ ID NO: 26516 - DNA, 16 bp, Artificial
  oligonucleotide probe
cctccggacctcacgc

SEQ ID NO: 26517 - DNA, 16 bp, Artificial
  oligonucleotide probe
caggacgctggccctc

SEQ ID NO: 26518 - DNA, 16 bp, Artificial
  oligonucleotide probe
cctcgtggcggacgga

SEQ ID NO: 26519 - DNA, 16 bp, Artificial
  oligonucleotide probe
gcgacagggcctgcct

SEQ ID NO: 26520 - DNA, 16 bp, Artificial
  oligonucleotide probe
cggagcgagtggggaa

SEQ ID NO: 26521 - DNA, 16 bp, Artificial
  oligonucleotide probe
acgcggtccaccgtgg

SEQ ID NO: 26522 - DNA, 16 bp, Artificial
  oligonucleotide probe
tggcgtgggggtccaa

SEQ ID NO: 26523 - DNA, 16 bp, Artificial
  oligonucleotide probe
gggttggccgagtggc

SEQ ID NO: 26524 - DNA, 16 bp, Artificial
  oligonucleotide probe
tggcgggtgacggtgg

SEQ ID NO: 26525 - DNA, 16 bp, Artificial
  oligonucleotide probe
gcgagtggcagggcct

SEQ ID NO: 26526 - DNA, 16 bp, Artificial
  oligonucleotide probe
caccgagccacccgga

SEQ ID NO: 26527 - DNA, 16 bp, Artificial
  oligonucleotide probe
gggtacgcgacgcgag

SEQ ID NO: 26528 - DNA, 16 bp, Artificial
  oligonucleotide probe
agcggacggcaggagc

SEQ ID NO: 26529 - DNA, 16 bp, Artificial
  oligonucleotide probe
gggtagcggcgagacg

SEQ ID NO: 26530 - DNA, 16 bp, Artificial
  oligonucleotide probe
cagggcgagtccgacg

SEQ ID NO: 26531 - DNA, 16 bp, Artificial
  oligonucleotide probe
gggtacgcgacgcgag

SEQ ID NO: 26532 - DNA, 16 bp, Artificial
  oligonucleotide probe
agcggacggcaggagc

SEQ ID NO: 26533 - DNA, 16 bp, Artificial
  oligonucleotide probe
cacccgagagcggtgg

SEQ ID NO: 26534 - DNA, 16 bp, Artificial
  oligonucleotide probe
gcgagtcccggaagcg

SEQ ID NO: 26535 - DNA, 16 bp, Artificial
  oligonucleotide probe
ggaaagcggcctggaa

SEQ ID NO: 26536 - DNA, 16 bp, Artificial
  oligonucleotide probe
gagcggtctggcggaa

SEQ ID NO: 26537 - DNA, 16 bp, Artificial
  oligonucleotide probe
gcaggacggacggcct

SEQ ID NO: 26538 - DNA, 16 bp, Artificial
  oligonucleotide probe
gcgacctcacgcgcag

SEQ ID NO: 26539 - DNA, 16 bp, Artificial
  oligonucleotide probe
gcctgtgggtccgcga

SEQ ID NO: 26540 - DNA, 16 bp, Artificial
  oligonucleotide probe
cctcgcctcgaggagc

SEQ ID NO: 26541 - DNA, 16 bp, Artificial
  oligonucleotide probe
gacgcaccagcgcgag

SEQ ID NO: 26542 - DNA, 16 bp, Artificial
  oligonucleotide probe
acgccaccgcctgacg

SEQ ID NO: 26543 - DNA, 16 bp, Artificial
  oligonucleotide probe
caggggaagggtcgga

SEQ ID NO: 26544 - DNA, 16 bp, Artificial
  oligonucleotide probe
gtccgagcagcggcct

SEQ ID NO: 26545 - DNA, 16 bp, Artificial
  oligonucleotide probe
cgagcaccgagccgga

SEQ ID NO: 26546 - DNA, 16 bp, Artificial
  oligonucleotide probe
cctccggacctcacgc

SEQ ID NO: 26547 - DNA, 16 bp, Artificial
  oligonucleotide probe
tggcgtgggggtccaa

SEQ ID NO: 26548 - DNA, 16 bp, Artificial
  oligonucleotide probe
tgctgggtgcaggcga

SEQ ID NO: 26549 - DNA, 16 bp, Artificial
  oligonucleotide probe
gagcgacgcgagagcg

SEQ ID NO: 26550 - DNA, 16 bp, Artificial
  oligonucleotide probe
cgagcctcgggtgcga

SEQ ID NO: 26551 - DNA, 16 bp, Artificial
  oligonucleotide probe
cagggcagggtcgggt

SEQ ID NO: 26552 - DNA, 16 bp, Artificial
  oligonucleotide probe
gacggagcacgccgga

SEQ ID NO: 26553 - DNA, 16 bp, Artificial
  oligonucleotide probe
gacggacgacgcgtgg

SEQ ID NO: 26554 - DNA, 16 bp, Artificial
  oligonucleotide probe
gacggggtcggacgag

SEQ ID NO: 26555 - DNA, 16 bp, Artificial
  oligonucleotide probe
gtgggggtgcagggaa

SEQ ID NO: 26556 - DNA, 16 bp, Artificial
  oligonucleotide probe
ggtcgcaggcgagggt

SEQ ID NO: 26557 - DNA, 16 bp, Artificial
  oligonucleotide probe
cacccgagagcggtgg

SEQ ID NO: 26558 - DNA, 16 bp, Artificial
  oligonucleotide probe
gcgagtcccggaagcg

SEQ ID NO: 26559 - DNA, 16 bp, Artificial
  oligonucleotide probe
agcgagcggtggacgc

SEQ ID NO: 26560 - DNA, 16 bp, Artificial
  oligonucleotide probe
gcctcggagacggcag

SEQ ID NO: 26561 - DNA, 16 bp, Artificial
  oligonucleotide probe
caccgacgggaaacgc

SEQ ID NO: 26562 - DNA, 16 bp, Artificial
  oligonucleotide probe
gtccggaagtgggcga

SEQ ID NO: 26563 - DNA, 16 bp, Artificial
  oligonucleotide probe
acgccctcaccagcga

SEQ ID NO: 26564 - DNA, 16 bp, Artificial
  oligonucleotide probe
cctcgtggcggacgga

SEQ ID NO: 26565 - DNA, 16 bp, Artificial
  oligonucleotide probe
acgcggaagacgtggc

SEQ ID NO: 26566 - DNA, 16 bp, Artificial
  oligonucleotide probe
gcgacgagcgagccaa

SEQ ID NO: 26567 - DNA, 16 bp, Artificial
  oligonucleotide probe
gacggacgacgcgtgg

SEQ ID NO: 26568 - DNA, 16 bp, Artificial
  oligonucleotide probe
gacggggtcggacgag

SEQ ID NO: 26569 - DNA, 16 bp, Artificial
  oligonucleotide probe
cgagcaccgagccgga

SEQ ID NO: 26570 - DNA, 16 bp, Artificial
  oligonucleotide probe
cctccggacctcacgc

SEQ ID NO: 26571 - DNA, 16 bp, Artificial
  oligonucleotide probe
acgcggaagacgtggc

SEQ ID NO: 26572 - DNA, 16 bp, Artificial
  oligonucleotide probe
gcgacgagcgagccaa

SEQ ID NO: 26573 - DNA, 16 bp, Artificial
  oligonucleotide probe
caccggtcagcggggt

SEQ ID NO: 26574 - DNA, 16 bp, Artificial
  oligonucleotide probe
actgcggacgaggcct

SEQ ID NO: 26575 - DNA, 16 bp, Artificial
  oligonucleotide probe
gggtggaacgaggcga

SEQ ID NO: 26576 - DNA, 16 bp, Artificial
  oligonucleotide probe
gcaggtggtggcgagc

SEQ ID NO: 26577 - DNA, 16 bp, Artificial
  oligonucleotide probe
caccggtcagcggggt

SEQ ID NO: 26578 - DNA, 16 bp, Artificial
  oligonucleotide probe
acgcagcggggtgacg

SEQ ID NO: 26579 - DNA, 16 bp, Artificial
  oligonucleotide probe
gcaggacggacggcct

SEQ ID NO: 26580 - DNA, 16 bp, Artificial
  oligonucleotide probe
gggtagcggcgagacg

SEQ ID NO: 26581 - DNA, 16 bp, Artificial
  oligonucleotide probe
gtccgggtcaggcagg

SEQ ID NO: 26582 - DNA, 16 bp, Artificial
  oligonucleotide probe
cggagagcgcgagcct

SEQ ID NO: 26583 - DNA, 16 bp, Artificial
  oligonucleotide probe
cggatggcccaagggt

SEQ ID NO: 26584 - DNA, 16 bp, Artificial
  oligonucleotide probe
gggtacgcgacgcgag

SEQ ID NO: 26585 - DNA, 16 bp, Artificial
  oligonucleotide probe
gagcgagcagcgggtc

SEQ ID NO: 26586 - DNA, 16 bp, Artificial
  oligonucleotide probe
caggacgctggccctc

SEQ ID NO: 26587 - DNA, 16 bp, Artificial
  oligonucleotide probe
cgagcggaggtcccaa

SEQ ID NO: 26588 - DNA, 16 bp, Artificial
  oligonucleotide probe
cgaggacgccaaacgc

SEQ ID NO: 26589 - DNA, 16 bp, Artificial
  oligonucleotide probe
cagggcgagtccgacg

SEQ ID NO: 26590 - DNA, 16 bp, Artificial
  oligonucleotide probe
gagcgacgcgagagcg

SEQ ID NO: 26591 - DNA, 16 bp, Artificial
  oligonucleotide probe
gtgggggtgcagggaa

SEQ ID NO: 26592 - DNA, 16 bp, Artificial
  oligonucleotide probe
ggtcgcaggcgagggt

SEQ ID NO: 26593 - DNA, 16 bp, Artificial
  oligonucleotide probe
gtgggggtgcagggaa

SEQ ID NO: 26594 - DNA, 16 bp, Artificial
  oligonucleotide probe
ggtcgcaggcgagggt

SEQ ID NO: 26595 - DNA, 16 bp, Artificial
  oligonucleotide probe
caccggtcagcggggt

SEQ ID NO: 26596 - DNA, 16 bp, Artificial
  oligonucleotide probe
actgcggacgaggcct

SEQ ID NO: 26597 - DNA, 16 bp, Artificial
  oligonucleotide probe
gacggagcacgccgga

SEQ ID NO: 26598 - DNA, 16 bp, Artificial
  oligonucleotide probe
cggagcctgagcgtgg

SEQ ID NO: 26599 - DNA, 16 bp, Artificial
  oligonucleotide probe
caccagcgagacgcga

SEQ ID NO: 26600 - DNA, 16 bp, Artificial
  oligonucleotide probe
agcgcaccgacgacgc

SEQ ID NO: 26601 - DNA, 16 bp, Artificial
  oligonucleotide probe
acgccaggcgaggtgg

SEQ ID NO: 26602 - DNA, 16 bp, Artificial
  oligonucleotide probe
caggggaagggtcgga

SEQ ID NO: 26603 - DNA, 16 bp, Artificial
  oligonucleotide probe
cggagagcgcgagcct

SEQ ID NO: 26604 - DNA, 16 bp, Artificial
  oligonucleotide probe
gcctcaggacgcacgc

SEQ ID NO: 26605 - DNA, 16 bp, Artificial
  oligonucleotide probe
gtggcggaggtcggaa

SEQ ID NO: 26606 - DNA, 16 bp, Artificial
  oligonucleotide probe
cctctggctggcccaa

SEQ ID NO: 26607 - DNA, 16 bp, Artificial
  oligonucleotide probe
cgagcaccgagccgga

SEQ ID NO: 26608 - DNA, 16 bp, Artificial
  oligonucleotide probe
cctccggacctcacgc

SEQ ID NO: 26609 - DNA, 16 bp, Artificial
  oligonucleotide probe
ggaaagcggcctggaa

SEQ ID NO: 26610 - DNA, 16 bp, Artificial
  oligonucleotide probe
gagcggtctggcggaa

SEQ ID NO: 26611 - DNA, 16 bp, Artificial
  oligonucleotide probe
tggcaccagcaggggt

SEQ ID NO: 26612 - DNA, 16 bp, Artificial
  oligonucleotide probe
gagcacgcgggtgcct

SEQ ID NO: 26613 - DNA, 16 bp, Artificial
  oligonucleotide probe
tggcgcctgtccgtgg

SEQ ID NO: 26614 - DNA, 16 bp, Artificial
  oligonucleotide probe
gtgggggtgcagggaa

SEQ ID NO: 26615 - DNA, 16 bp, Artificial
  oligonucleotide probe
caggacgctggccctc

SEQ ID NO: 26616 - DNA, 16 bp, Artificial
  oligonucleotide probe
cctcgtggcggacgga

SEQ ID NO: 26617 - DNA, 16 bp, Artificial
  oligonucleotide probe
cagggtgggcgagcga

SEQ ID NO: 26618 - DNA, 16 bp, Artificial
  oligonucleotide probe
acgcccaacagggagc

SEQ ID NO: 26619 - DNA, 16 bp, Artificial
  oligonucleotide probe
cggacacctggccgga

SEQ ID NO: 26620 - DNA, 16 bp, Artificial
  oligonucleotide probe
gagcgacgcgagagcg

SEQ ID NO: 26621 - DNA, 16 bp, Artificial
  oligonucleotide probe
gacggagcacgccgga

SEQ ID NO: 26622 - DNA, 16 bp, Artificial
  oligonucleotide probe
cggagcctgagcgtgg

SEQ ID NO: 26623 - DNA, 16 bp, Artificial
  oligonucleotide probe
acgcccaacagggagc

SEQ ID NO: 26624 - DNA, 16 bp, Artificial
  oligonucleotide probe
acgccctcaccagcga

SEQ ID NO: 26625 - DNA, 16 bp, Artificial
  oligonucleotide probe
cgagcggaggtcccaa

SEQ ID NO: 26626 - DNA, 16 bp, Artificial
  oligonucleotide probe
cgaggacgccaaacgc

SEQ ID NO: 26627 - DNA, 16 bp, Artificial
  oligonucleotide probe
gtggccaatcacgcga

SEQ ID NO: 26628 - DNA, 16 bp, Artificial
  oligonucleotide probe
agcgcaccgacgacgc

SEQ ID NO: 26629 - DNA, 16 bp, Artificial
  oligonucleotide probe
cagggcgagtccgacg

SEQ ID NO: 26630 - DNA, 16 bp, Artificial
  oligonucleotide probe
gagcgacgcgagagcg

SEQ ID NO: 26631 - DNA, 16 bp, Artificial
  oligonucleotide probe
cggacacctggccgga

SEQ ID NO: 26632 - DNA, 16 bp, Artificial
  oligonucleotide probe
ggtcgcgacacctggc

SEQ ID NO: 26633 - DNA, 16 bp, Artificial
  oligonucleotide probe
tggcggtcgcctcgag

SEQ ID NO: 26634 - DNA, 16 bp, Artificial
  oligonucleotide probe
cggagcgagtggggaa

SEQ ID NO: 26635 - DNA, 16 bp, Artificial
  oligonucleotide probe
acgccctcaccagcga

SEQ ID NO: 26636 - DNA, 16 bp, Artificial
  oligonucleotide probe
cctcgtggcggacgga

SEQ ID NO: 26637 - DNA, 16 bp, Artificial
  oligonucleotide probe
cggagcctgagcgtgg

SEQ ID NO: 26638 - DNA, 16 bp, Artificial
  oligonucleotide probe
cggagagcgcgagcct

SEQ ID NO: 26639 - DNA, 16 bp, Artificial
  oligonucleotide probe
cagggcgagtccgacg

SEQ ID NO: 26640 - DNA, 16 bp, Artificial
  oligonucleotide probe
gagcgacgcgagagcg

SEQ ID NO: 26641 - DNA, 16 bp, Artificial
  oligonucleotide probe
accacggaagcgcgga

SEQ ID NO: 26642 - DNA, 16 bp, Artificial
  oligonucleotide probe
gtgggacgacgcgcga

SEQ ID NO: 26643 - DNA, 16 bp, Artificial
  oligonucleotide probe
gagcgagcagcgggtc

SEQ ID NO: 26644 - DNA, 16 bp, Artificial
  oligonucleotide probe
tggcacgcgagccagg

SEQ ID NO: 26645 - DNA, 16 bp, Artificial
  oligonucleotide probe
gtgggggtgcagggaa

SEQ ID NO: 26646 - DNA, 16 bp, Artificial
  oligonucleotide probe
ggtcgcaggcgagggt

SEQ ID NO: 26647 - DNA, 16 bp, Artificial
  oligonucleotide probe
caccagcgagacgcga

SEQ ID NO: 26648 - DNA, 16 bp, Artificial
  oligonucleotide probe
cggagcaggagcggaa

SEQ ID NO: 26649 - DNA, 16 bp, Artificial
  oligonucleotide probe
gcagcggagcctgagc

SEQ ID NO: 26650 - DNA, 16 bp, Artificial
  oligonucleotide probe
acgcaccagtcccgga

SEQ ID NO: 26651 - DNA, 16 bp, Artificial
  oligonucleotide probe
cggagagcgcgagcct

SEQ ID NO: 26652 - DNA, 16 bp, Artificial
  oligonucleotide probe
tggcaccagcaggggt

SEQ ID NO: 26653 - DNA, 16 bp, Artificial
  oligonucleotide probe
gcagcctctggccgag

SEQ ID NO: 26654 - DNA, 16 bp, Artificial
  oligonucleotide probe
gcagcaccagcgtggc

SEQ ID NO: 26655 - DNA, 16 bp, Artificial
  oligonucleotide probe
tcacgccttggccacc

SEQ ID NO: 26656 - DNA, 16 bp, Artificial
  oligonucleotide probe
caccgcgaggtcacgc

SEQ ID NO: 26657 - DNA, 16 bp, Artificial
  oligonucleotide probe
tggcgcctgtccgtgg

SEQ ID NO: 26658 - DNA, 16 bp, Artificial
  oligonucleotide probe
gtggcgagcctcgggt

SEQ ID NO: 26659 - DNA, 16 bp, Artificial
  oligonucleotide probe
cagggcagggtcgggt

SEQ ID NO: 26660 - DNA, 16 bp, Artificial
  oligonucleotide probe
gacggagcacgccgga

SEQ ID NO: 26661 - DNA, 16 bp, Artificial
  oligonucleotide probe
gtgggacgacgcgcga

SEQ ID NO: 26662 - DNA, 16 bp, Artificial
  oligonucleotide probe
gtccgggtcaggcagg

SEQ ID NO: 26663 - DNA, 16 bp, Artificial
  oligonucleotide probe
cgagcggaggtcccaa

SEQ ID NO: 26664 - DNA, 16 bp, Artificial
  oligonucleotide probe
cggatggcccaagggt

SEQ ID NO: 26665 - DNA, 16 bp, Artificial
  oligonucleotide probe
cgaggacgccaaacgc

SEQ ID NO: 26666 - DNA, 16 bp, Artificial
  oligonucleotide probe
gggtacgcgacgcgag

SEQ ID NO: 26667 - DNA, 16 bp, Artificial
  oligonucleotide probe
cagggtgggcgagcga

SEQ ID NO: 26668 - DNA, 16 bp, Artificial
  oligonucleotide probe
gagcgagcagcgggtc

SEQ ID NO: 26669 - DNA, 16 bp, Artificial
  oligonucleotide probe
cgagcaggcgaggcag

SEQ ID NO: 26670 - DNA, 16 bp, Artificial
  oligonucleotide probe
gcctcaggacgcacgc

SEQ ID NO: 26671 - DNA, 16 bp, Artificial
  oligonucleotide probe
cgagcaccgagccgga

SEQ ID NO: 26672 - DNA, 16 bp, Artificial
  oligonucleotide probe
cctccggacctcacgc

SEQ ID NO: 26673 - DNA, 16 bp, Artificial
  oligonucleotide probe
acgccaccgcctgacg

SEQ ID NO: 26674 - DNA, 16 bp, Artificial
  oligonucleotide probe
tggcaccagcaggggt

SEQ ID NO: 26675 - DNA, 16 bp, Artificial
  oligonucleotide probe
agcggtccgcgagagc

SEQ ID NO: 26676 - DNA, 16 bp, Artificial
  oligonucleotide probe
acgcggaagacgtggc

SEQ ID NO: 26677 - DNA, 16 bp, Artificial
  oligonucleotide probe
gacggcgagtgggcag

SEQ ID NO: 26678 - DNA, 16 bp, Artificial
  oligonucleotide probe
acgcgcctgacgcctc

SEQ ID NO: 26679 - DNA, 16 bp, Artificial
  oligonucleotide probe
gcgacagggcctgcct

SEQ ID NO: 26680 - DNA, 16 bp, Artificial
  oligonucleotide probe
cggagcgagtggggaa

SEQ ID NO: 26681 - DNA, 16 bp, Artificial
  oligonucleotide probe
cacccgagagcggtgg

SEQ ID NO: 26682 - DNA, 16 bp, Artificial
  oligonucleotide probe
gcgagtcccggaagcg

SEQ ID NO: 26683 - DNA, 16 bp, Artificial
  oligonucleotide probe
caccgggtggtcagcg

SEQ ID NO: 26684 - DNA, 16 bp, Artificial
  oligonucleotide probe
ggtcgacgacgccgag

SEQ ID NO: 26685 - DNA, 16 bp, Artificial
  oligonucleotide probe
agcggcgagagcgtcc

SEQ ID NO: 26686 - DNA, 16 bp, Artificial
  oligonucleotide probe
gacgcaccagcgcgag

SEQ ID NO: 26687 - DNA, 16 bp, Artificial
  oligonucleotide probe
gtccgggtcaggcagg

SEQ ID NO: 26688 - DNA, 16 bp, Artificial
  oligonucleotide probe
cgagcaggcgaggcag

SEQ ID NO: 26689 - DNA, 16 bp, Artificial
  oligonucleotide probe
caggggaagggtcgga

SEQ ID NO: 26690 - DNA, 16 bp, Artificial
  oligonucleotide probe
gtccgagcagcggcct

SEQ ID NO: 26691 - DNA, 16 bp, Artificial
  oligonucleotide probe
accatggcacgcgacg

SEQ ID NO: 26692 - DNA, 16 bp, Artificial
  oligonucleotide probe
acgccaggcgaggtgg

SEQ ID NO: 26693 - DNA, 16 bp, Artificial
  oligonucleotide probe
ggaacggaagcggagc

SEQ ID NO: 26694 - DNA, 16 bp, Artificial
  oligonucleotide probe
cggacacctggccgga

SEQ ID NO: 26695 - DNA, 16 bp, Artificial
  oligonucleotide probe
agcgcaccgacgacgc

SEQ ID NO: 26696 - DNA, 16 bp, Artificial
  oligonucleotide probe
gcgagtggcagggcct

SEQ ID NO: 26697 - DNA, 16 bp, Artificial
  oligonucleotide probe
cggagagcgcgagcct

SEQ ID NO: 26698 - DNA, 16 bp, Artificial
  oligonucleotide probe
gcaggcagccaatggc

SEQ ID NO: 26699 - DNA, 16 bp, Artificial
  oligonucleotide probe
tgctcggatgctgcga

SEQ ID NO: 26700 - DNA, 16 bp, Artificial
  oligonucleotide probe
gagcgcagccaagcct

SEQ ID NO: 26701 - DNA, 16 bp, Artificial
  oligonucleotide probe
caccgcctcagggacg

SEQ ID NO: 26702 - DNA, 16 bp, Artificial
  oligonucleotide probe
gcgacctcacgcgcag

SEQ ID NO: 26703 - DNA, 16 bp, Artificial
  oligonucleotide probe
tggcgcctgtccgtgg

SEQ ID NO: 26704 - DNA, 16 bp, Artificial
  oligonucleotide probe
gtggcgagcctcgggt

SEQ ID NO: 26705 - DNA, 16 bp, Artificial
  oligonucleotide probe
gcctgtgggtccgcga

SEQ ID NO: 26706 - DNA, 16 bp, Artificial
  oligonucleotide probe
cctcgcctcgaggagc

SEQ ID NO: 26707 - DNA, 16 bp, Artificial
  oligonucleotide probe
acgccaccgcctgacg

SEQ ID NO: 26708 - DNA, 16 bp, Artificial
  oligonucleotide probe
cggatggcccaagggt

SEQ ID NO: 26709 - DNA, 16 bp, Artificial
  oligonucleotide probe
gcgacagggcctgcct

SEQ ID NO: 26710 - DNA, 16 bp, Artificial
  oligonucleotide probe
cggagcgagtggggaa

SEQ ID NO: 26711 - DNA, 16 bp, Artificial
  oligonucleotide probe
gtggccaatcacgcga

SEQ ID NO: 26712 - DNA, 16 bp, Artificial
  oligonucleotide probe
agcgcaccgacgacgc

SEQ ID NO: 26713 - DNA, 16 bp, Artificial
  oligonucleotide probe
cacccgagagcggtgg

SEQ ID NO: 26714 - DNA, 16 bp, Artificial
  oligonucleotide probe
gcgagtcccggaagcg

SEQ ID NO: 26715 - DNA, 16 bp, Artificial
  oligonucleotide probe
cagggcagggtcgggt

SEQ ID NO: 26716 - DNA, 16 bp, Artificial
  oligonucleotide probe
gacggagcacgccgga

SEQ ID NO: 26717 - DNA, 16 bp, Artificial
  oligonucleotide probe
cgagcggaggtcccaa

SEQ ID NO: 26718 - DNA, 16 bp, Artificial
  oligonucleotide probe
cggatggcccaagggt

SEQ ID NO: 26719 - DNA, 16 bp, Artificial
  oligonucleotide probe
actgcggacgaggcct

SEQ ID NO: 26720 - DNA, 16 bp, Artificial
  oligonucleotide probe
caccgcctcagggacg

SEQ ID NO: 26721 - DNA, 16 bp, Artificial
  oligonucleotide probe
cgagcggaggtcccaa

SEQ ID NO: 26722 - DNA, 16 bp, Artificial
  oligonucleotide probe
cgaggacgccaaacgc

SEQ ID NO: 26723 - DNA, 16 bp, Artificial
  oligonucleotide probe
gcgacagggcctgcct

SEQ ID NO: 26724 - DNA, 16 bp, Artificial
  oligonucleotide probe
cggagcgagtggggaa

SEQ ID NO: 26725 - DNA, 16 bp, Artificial
  oligonucleotide probe
cggacaggacgctggc

SEQ ID NO: 26726 - DNA, 16 bp, Artificial
  oligonucleotide probe
acgcgagcgggtgcag

SEQ ID NO: 26727 - DNA, 16 bp, Artificial
  oligonucleotide probe
cgaggacgccaaacgc

SEQ ID NO: 26728 - DNA, 16 bp, Artificial
  oligonucleotide probe
gggtacgcgacgcgag

SEQ ID NO: 26729 - DNA, 16 bp, Artificial
  oligonucleotide probe
accacggaagcgcgga

SEQ ID NO: 26730 - DNA, 16 bp, Artificial
  oligonucleotide probe
gtgggacgacgcgcga

SEQ ID NO: 26731 - DNA, 16 bp, Artificial
  oligonucleotide probe
cgagcggaggtcccaa

SEQ ID NO: 26732 - DNA, 16 bp, Artificial
  oligonucleotide probe
agcggcgagagcgtcc

SEQ ID NO: 26733 - DNA, 16 bp, Artificial
  oligonucleotide probe
agcgccaatcacgggt

SEQ ID NO: 26734 - DNA, 16 bp, Artificial
  oligonucleotide probe
caggcacccaggcgga

SEQ ID NO: 26735 - DNA, 16 bp, Artificial
  oligonucleotide probe
agcgcaccgacgacgc

SEQ ID NO: 26736 - DNA, 16 bp, Artificial
  oligonucleotide probe
gagcgcagccaagcct

SEQ ID NO: 26737 - DNA, 16 bp, Artificial
  oligonucleotide probe
agcgcaccgacgacgc

SEQ ID NO: 26738 - DNA, 16 bp, Artificial
  oligonucleotide probe
cagggtgggcgagcga

SEQ ID NO: 26739 - DNA, 16 bp, Artificial
  oligonucleotide probe
cggagcaggagcggaa

SEQ ID NO: 26740 - DNA, 16 bp, Artificial
  oligonucleotide probe
cagggtgggcgagcga

SEQ ID NO: 26741 - DNA, 16 bp, Artificial
  oligonucleotide probe
gggtagcggcgagacg

SEQ ID NO: 26742 - DNA, 16 bp, Artificial
  oligonucleotide probe
cagggcgagtccgacg

SEQ ID NO: 26743 - DNA, 16 bp, Artificial
  oligonucleotide probe
gtgggggtgcagggaa

SEQ ID NO: 26744 - DNA, 16 bp, Artificial
  oligonucleotide probe
ggtcgcaggcgagggt

SEQ ID NO: 26745 - DNA, 16 bp, Artificial
  oligonucleotide probe
cgaggacgccaaacgc

SEQ ID NO: 26746 - DNA, 16 bp, Artificial
  oligonucleotide probe
gggtacgcgacgcgag

SEQ ID NO: 26747 - DNA, 16 bp, Artificial
  oligonucleotide probe
gtggcaggagcgacgc

SEQ ID NO: 26748 - DNA, 16 bp, Artificial
  oligonucleotide probe
gacggagcacgccgga

SEQ ID NO: 26749 - DNA, 16 bp, Artificial
  oligonucleotide probe
gggtggaacgaggcga

SEQ ID NO: 26750 - DNA, 16 bp, Artificial
  oligonucleotide probe
gcaggtggtggcgagc

SEQ ID NO: 26751 - DNA, 16 bp, Artificial
  oligonucleotide probe
tgctcggatgctgcga

SEQ ID NO: 26752 - DNA, 16 bp, Artificial
  oligonucleotide probe
gagcgcagccaagcct

SEQ ID NO: 26753 - DNA, 16 bp, Artificial
  oligonucleotide probe
gcgacagggcctgcct

SEQ ID NO: 26754 - DNA, 16 bp, Artificial
  oligonucleotide probe
agcggcgagagcgtcc

SEQ ID NO: 26755 - DNA, 16 bp, Artificial
  oligonucleotide probe
gagcgcagccaagcct

SEQ ID NO: 26756 - DNA, 16 bp, Artificial
  oligonucleotide probe
tggcaccagcaggggt

SEQ ID NO: 26757 - DNA, 16 bp, Artificial
  oligonucleotide probe
tggcgcctgtccgtgg

SEQ ID NO: 26758 - DNA, 16 bp, Artificial
  oligonucleotide probe
gtggcgagcctcgggt

SEQ ID NO: 26759 - DNA, 16 bp, Artificial
  oligonucleotide probe
ccaaagcgggaatggc

SEQ ID NO: 26760 - DNA, 16 bp, Artificial
  oligonucleotide probe
cctccgaggacgcgga

SEQ ID NO: 26761 - DNA, 16 bp, Artificial
  oligonucleotide probe
cggagcaggagcggaa

SEQ ID NO: 26762 - DNA, 16 bp, Artificial
  oligonucleotide probe
ggtcgcctgtccagcg

SEQ ID NO: 26763 - DNA, 16 bp, Artificial
  oligonucleotide probe
gcctcaggacgcacgc

SEQ ID NO: 26764 - DNA, 16 bp, Artificial
  oligonucleotide probe
caccagcgagacgcga

SEQ ID NO: 26765 - DNA, 16 bp, Artificial
  oligonucleotide probe
acgccaccgcctgacg

SEQ ID NO: 26766 - DNA, 16 bp, Artificial
  oligonucleotide probe
gagcacgcgggtgcct

SEQ ID NO: 26767 - DNA, 16 bp, Artificial
  oligonucleotide probe
ccaaagcgggaatggc

SEQ ID NO: 26768 - DNA, 16 bp, Artificial
  oligonucleotide probe
cctccgaggacgcgga

SEQ ID NO: 26769 - DNA, 16 bp, Artificial
  oligonucleotide probe
gtggccaatcacgcga

SEQ ID NO: 26770 - DNA, 16 bp, Artificial
  oligonucleotide probe
agcgcaccgacgacgc

SEQ ID NO: 26771 - DNA, 16 bp, Artificial
  oligonucleotide probe
gggttggccgagtggc

SEQ ID NO: 26772 - DNA, 16 bp, Artificial
  oligonucleotide probe
tggcgggtgacggtgg

SEQ ID NO: 26773 - DNA, 16 bp, Artificial
  oligonucleotide probe
cgagcggaggtcccaa

SEQ ID NO: 26774 - DNA, 16 bp, Artificial
  oligonucleotide probe
cgaggacgccaaacgc

SEQ ID NO: 26775 - DNA, 16 bp, Artificial
  oligonucleotide probe
gagcgagcagcgggtc

SEQ ID NO: 26776 - DNA, 16 bp, Artificial
  oligonucleotide probe
acgccctcaccagcga

SEQ ID NO: 26777 - DNA, 16 bp, Artificial
  oligonucleotide probe
cgagcggaggtcccaa

SEQ ID NO: 26778 - DNA, 16 bp, Artificial
  oligonucleotide probe
cgaggacgccaaacgc

SEQ ID NO: 26779 - DNA, 16 bp, Artificial
  oligonucleotide probe
tgctcggatgctgcga

SEQ ID NO: 26780 - DNA, 16 bp, Artificial
  oligonucleotide probe
gagcgcagccaagcct

SEQ ID NO: 26781 - DNA, 16 bp, Artificial
  oligonucleotide probe
tggcggtcgcctcgag

SEQ ID NO: 26782 - DNA, 16 bp, Artificial
  oligonucleotide probe
cggagcgagtggggaa

SEQ ID NO: 26783 - DNA, 16 bp, Artificial
  oligonucleotide probe
gcgacctcacgcgcag

SEQ ID NO: 26784 - DNA, 16 bp, Artificial
  oligonucleotide probe
ggtcgcctgtccagcg

SEQ ID NO: 26785 - DNA, 16 bp, Artificial
  oligonucleotide probe
cgagcaggcgaggcag

SEQ ID NO: 26786 - DNA, 16 bp, Artificial
  oligonucleotide probe
gcctcaggacgcacgc

SEQ ID NO: 26787 - DNA, 16 bp, Artificial
  oligonucleotide probe
ggaacggaagcggagc

SEQ ID NO: 26788 - DNA, 16 bp, Artificial
  oligonucleotide probe
cagggcgagtccgacg

SEQ ID NO: 26789 - DNA, 16 bp, Artificial
  oligonucleotide probe
agcggcgagagcgtcc

SEQ ID NO: 26790 - DNA, 16 bp, Artificial
  oligonucleotide probe
gacgcaccagcgcgag

SEQ ID NO: 26791 - DNA, 16 bp, Artificial
  oligonucleotide probe
cgaggacgccaaacgc

SEQ ID NO: 26792 - DNA, 16 bp, Artificial
  oligonucleotide probe
gggtacgcgacgcgag

SEQ ID NO: 26793 - DNA, 16 bp, Artificial
  oligonucleotide probe
gggtacgcgacgcgag

SEQ ID NO: 26794 - DNA, 16 bp, Artificial
  oligonucleotide probe
agcggacggcaggagc

SEQ ID NO: 26795 - DNA, 16 bp, Artificial
  oligonucleotide probe
cagggcagggtcgggt

SEQ ID NO: 26796 - DNA, 16 bp, Artificial
  oligonucleotide probe
agcggacggcaggagc

SEQ ID NO: 26797 - DNA, 16 bp, Artificial
  oligonucleotide probe
gcaggacggacggcct

SEQ ID NO: 26798 - DNA, 16 bp, Artificial
  oligonucleotide probe
gcgacctcacgcgcag

SEQ ID NO: 26799 - DNA, 16 bp, Artificial
  oligonucleotide probe
tgctcggatgctgcga

SEQ ID NO: 26800 - DNA, 16 bp, Artificial
  oligonucleotide probe
agcggcgagagcgtcc

SEQ ID NO: 26801 - DNA, 16 bp, Artificial
  oligonucleotide probe
gacgcaggcggagggt

SEQ ID NO: 26802 - DNA, 16 bp, Artificial
  oligonucleotide probe
acgcggtccaccgtgg

SEQ ID NO: 26803 - DNA, 16 bp, Artificial
  oligonucleotide probe
gtgggggtgcagggaa

SEQ ID NO: 26804 - DNA, 16 bp, Artificial
  oligonucleotide probe
ggtcgcaggcgagggt

SEQ ID NO: 26805 - DNA, 16 bp, Artificial
  oligonucleotide probe
cggacaggacgctggc

SEQ ID NO: 26806 - DNA, 16 bp, Artificial
  oligonucleotide probe
acgcgagcgggtgcag

SEQ ID NO: 26807 - DNA, 16 bp, Artificial
  oligonucleotide probe
gacggcgagtgggcag

SEQ ID NO: 26808 - DNA, 16 bp, Artificial
  oligonucleotide probe
acgcgcctgacgcctc

SEQ ID NO: 26809 - DNA, 16 bp, Artificial
  oligonucleotide probe
ggaacggaagcggagc

SEQ ID NO: 26810 - DNA, 16 bp, Artificial
  oligonucleotide probe
cggacacctggccgga

SEQ ID NO: 26811 - DNA, 16 bp, Artificial
  oligonucleotide probe
gtggccaatcacgcga

SEQ ID NO: 26812 - DNA, 16 bp, Artificial
  oligonucleotide probe
agcgcaccgacgacgc

SEQ ID NO: 26813 - DNA, 16 bp, Artificial
  oligonucleotide probe
tgctcggatgctgcga

SEQ ID NO: 26814 - DNA, 16 bp, Artificial
  oligonucleotide probe
tggcacgcgagccagg

SEQ ID NO: 26815 - DNA, 16 bp, Artificial
  oligonucleotide probe
acgcagcggggtgacg

SEQ ID NO: 26816 - DNA, 16 bp, Artificial
  oligonucleotide probe
caccgcctcagggacg

SEQ ID NO: 26817 - DNA, 16 bp, Artificial
  oligonucleotide probe
gggtacgcgacgcgag

SEQ ID NO: 26818 - DNA, 16 bp, Artificial
  oligonucleotide probe
tggcaccagcaggggt

SEQ ID NO: 26819 - DNA, 16 bp, Artificial
  oligonucleotide probe
gagcacgcgggtgcct

SEQ ID NO: 26820 - DNA, 16 bp, Artificial
  oligonucleotide probe
ggaacggaagcggagc

SEQ ID NO: 26821 - DNA, 16 bp, Artificial
  oligonucleotide probe
gagcgagcagcgggtc

SEQ ID NO: 26822 - DNA, 16 bp, Artificial
  oligonucleotide probe
acgccctcaccagcga

SEQ ID NO: 26823 - DNA, 16 bp, Artificial
  oligonucleotide probe
cagggcgagtccgacg

SEQ ID NO: 26824 - DNA, 16 bp, Artificial
  oligonucleotide probe
gagcgacgcgagagcg

SEQ ID NO: 26825 - DNA, 16 bp, Artificial
  oligonucleotide probe
gagcacgcgggtgcct

SEQ ID NO: 26826 - DNA, 16 bp, Artificial
  oligonucleotide probe
ggaacggaagcggagc

SEQ ID NO: 26827 - DNA, 16 bp, Artificial
  oligonucleotide probe
agcgcaccgacgacgc

SEQ ID NO: 26828 - DNA, 16 bp, Artificial
  oligonucleotide probe
tggcaccagcaggggt

SEQ ID NO: 26829 - DNA, 16 bp, Artificial
  oligonucleotide probe
cgagcaggcgaggcag

SEQ ID NO: 26830 - DNA, 16 bp, Artificial
  oligonucleotide probe
gcctcaggacgcacgc

SEQ ID NO: 26831 - DNA, 16 bp, Artificial
  oligonucleotide probe
agcggcgagagcgtcc

SEQ ID NO: 26832 - DNA, 16 bp, Artificial
  oligonucleotide probe
gacgcaccagcgcgag

SEQ ID NO: 26833 - DNA, 16 bp, Artificial
  oligonucleotide probe
caccagcgagacgcga

SEQ ID NO: 26834 - DNA, 16 bp, Artificial
  oligonucleotide probe
tggcaccagcaggggt

SEQ ID NO: 26835 - DNA, 16 bp, Artificial
  oligonucleotide probe
tggcgcctgtccgtgg

SEQ ID NO: 26836 - DNA, 16 bp, Artificial
  oligonucleotide probe
gtggcgagcctcgggt

SEQ ID NO: 26837 - DNA, 16 bp, Artificial
  oligonucleotide probe
caccggtcagcggggt

SEQ ID NO: 26838 - DNA, 16 bp, Artificial
  oligonucleotide probe
actgcggacgaggcct

SEQ ID NO: 26839 - DNA, 16 bp, Artificial
  oligonucleotide probe
gagcacgcgggtgcct

SEQ ID NO: 26840 - DNA, 16 bp, Artificial
  oligonucleotide probe
ggaacggaagcggagc

SEQ ID NO: 26841 - DNA, 16 bp, Artificial
  oligonucleotide probe
cggacacctggccgga

SEQ ID NO: 26842 - DNA, 16 bp, Artificial
  oligonucleotide probe
gagcgacgcgagagcg

SEQ ID NO: 26843 - DNA, 16 bp, Artificial
  oligonucleotide probe
cggagcctgagcgtgg

SEQ ID NO: 26844 - DNA, 16 bp, Artificial
  oligonucleotide probe
cggagagcgcgagcct

SEQ ID NO: 26845 - DNA, 16 bp, Artificial
  oligonucleotide probe
cggacacctggccgga

SEQ ID NO: 26846 - DNA, 16 bp, Artificial
  oligonucleotide probe
ggtcgcgacacctggc

SEQ ID NO: 26847 - DNA, 16 bp, Artificial
  oligonucleotide probe
gtggcggaggtcggaa

SEQ ID NO: 26848 - DNA, 16 bp, Artificial
  oligonucleotide probe
cctctggctggcccaa

SEQ ID NO: 26849 - DNA, 16 bp, Artificial
  oligonucleotide probe
gtccgggtcaggcagg

SEQ ID NO: 26850 - DNA, 16 bp, Artificial
  oligonucleotide probe
cggagagcgcgagcct

SEQ ID NO: 26851 - DNA, 16 bp, Artificial
  oligonucleotide probe
gtgggggtgcagggaa

SEQ ID NO: 26852 - DNA, 16 bp, Artificial
  oligonucleotide probe
ggtcgcaggcgagggt

SEQ ID NO: 26853 - DNA, 16 bp, Artificial
  oligonucleotide probe
tcacgccttggccacc

SEQ ID NO: 26854 - DNA, 16 bp, Artificial
  oligonucleotide probe
caccgcgaggtcacgc

SEQ ID NO: 26855 - DNA, 16 bp, Artificial
  oligonucleotide probe
tggcagcgggtcgtgg

SEQ ID NO: 26856 - DNA, 16 bp, Artificial
  oligonucleotide probe
gcctgggtcaccacgc

SEQ ID NO: 26857 - DNA, 16 bp, Artificial
  oligonucleotide probe
gagcgagcagcgggtc

SEQ ID NO: 26858 - DNA, 16 bp, Artificial
  oligonucleotide probe
acgccctcaccagcga

SEQ ID NO: 26859 - DNA, 16 bp, Artificial
  oligonucleotide probe
agcggacggcaggagc

SEQ ID NO: 26860 - DNA, 16 bp, Artificial
  oligonucleotide probe
cggagcctgagcgtgg

SEQ ID NO: 26861 - DNA, 16 bp, Artificial
  oligonucleotide probe
ggaaagcggcctggaa

SEQ ID NO: 26862 - DNA, 16 bp, Artificial
  oligonucleotide probe
gagcggtctggcggaa

SEQ ID NO: 26863 - DNA, 16 bp, Artificial
  oligonucleotide probe
cgagcctcgggtgcga

SEQ ID NO: 26864 - DNA, 16 bp, Artificial
  oligonucleotide probe
actgcggacgaggcct

SEQ ID NO: 26865 - DNA, 16 bp, Artificial
  oligonucleotide probe
gcgacagggcctgcct

SEQ ID NO: 26866 - DNA, 16 bp, Artificial
  oligonucleotide probe
cggagcgagtggggaa

SEQ ID NO: 26867 - DNA, 16 bp, Artificial
  oligonucleotide probe
gagcgcctcctcgagc

SEQ ID NO: 26868 - DNA, 16 bp, Artificial
  oligonucleotide probe
gtggccaatcacgcga

SEQ ID NO: 26869 - DNA, 16 bp, Artificial
  oligonucleotide probe
cggacacctggccgga

SEQ ID NO: 26870 - DNA, 16 bp, Artificial
  oligonucleotide probe
ggtcgcgacacctggc

SEQ ID NO: 26871 - DNA, 16 bp, Artificial
  oligonucleotide probe
acgccaccgcctgacg

SEQ ID NO: 26872 - DNA, 16 bp, Artificial
  oligonucleotide probe
cggatggcccaagggt

SEQ ID NO: 26873 - DNA, 16 bp, Artificial
  oligonucleotide probe
cggagcaggagcggaa

SEQ ID NO: 26874 - DNA, 16 bp, Artificial
  oligonucleotide probe
ggtcgcctgtccagcg

SEQ ID NO: 26875 - DNA, 16 bp, Artificial
  oligonucleotide probe
gcaggacggacggcct

SEQ ID NO: 26876 - DNA, 16 bp, Artificial
  oligonucleotide probe
gcgacctcacgcgcag

SEQ ID NO: 26877 - DNA, 16 bp, Artificial
  oligonucleotide probe
agcgccaatcacgggt

SEQ ID NO: 26878 - DNA, 16 bp, Artificial
  oligonucleotide probe
caggcacccaggcgga

SEQ ID NO: 26879 - DNA, 16 bp, Artificial
  oligonucleotide probe
gagcgacgcgagagcg

SEQ ID NO: 26880 - DNA, 16 bp, Artificial
  oligonucleotide probe
cgagcctcgggtgcga

SEQ ID NO: 26881 - DNA, 16 bp, Artificial
  oligonucleotide probe
tggcgcctgtccgtgg

SEQ ID NO: 26882 - DNA, 16 bp, Artificial
  oligonucleotide probe
gtggcgagcctcgggt

SEQ ID NO: 26883 - DNA, 16 bp, Artificial
  oligonucleotide probe
cgagcctcgggtgcga

SEQ ID NO: 26884 - DNA, 16 bp, Artificial
  oligonucleotide probe
actgcggacgaggcct

SEQ ID NO: 26885 - DNA, 16 bp, Artificial
  oligonucleotide probe
gtccgggtcaggcagg

SEQ ID NO: 26886 - DNA, 16 bp, Artificial
  oligonucleotide probe
cggagagcgcgagcct

SEQ ID NO: 26887 - DNA, 16 bp, Artificial
  oligonucleotide probe
caggcctccctcgcga

SEQ ID NO: 26888 - DNA, 16 bp, Artificial
  oligonucleotide probe
caccagcgagacgcga

SEQ ID NO: 26889 - DNA, 16 bp, Artificial
  oligonucleotide probe
gtccacgctggcgacg

SEQ ID NO: 26890 - DNA, 16 bp, Artificial
  oligonucleotide probe
cctcagcgcggaacca

SEQ ID NO: 26891 - DNA, 16 bp, Artificial
  oligonucleotide probe
cggacacctggccgga

SEQ ID NO: 26892 - DNA, 16 bp, Artificial
  oligonucleotide probe
ggtcgcgacacctggc

SEQ ID NO: 26893 - DNA, 16 bp, Artificial
  oligonucleotide probe
cagggtgggcgagcga

SEQ ID NO: 26894 - DNA, 16 bp, Artificial
  oligonucleotide probe
acgcccaacagggagc

SEQ ID NO: 26895 - DNA, 16 bp, Artificial
  oligonucleotide probe
gagcgagcagcgggtc

SEQ ID NO: 26896 - DNA, 16 bp, Artificial
  oligonucleotide probe
acgccctcaccagcga

SEQ ID NO: 26897 - DNA, 16 bp, Artificial
  oligonucleotide probe
ccaaagcgggaatggc

SEQ ID NO: 26898 - DNA, 16 bp, Artificial
  oligonucleotide probe
cctccgaggacgcgga

SEQ ID NO: 26899 - DNA, 16 bp, Artificial
  oligonucleotide probe
gtccgagcagcggcct

SEQ ID NO: 26900 - DNA, 16 bp, Artificial
  oligonucleotide probe
caggagcgggaagcga

SEQ ID NO: 26901 - DNA, 16 bp, Artificial
  oligonucleotide probe
gacgcaccagcgcgag

SEQ ID NO: 26902 - DNA, 16 bp, Artificial
  oligonucleotide probe
acgccaccgcctgacg

SEQ ID NO: 26903 - DNA, 16 bp, Artificial
  oligonucleotide probe
acgcagcggggtgacg

SEQ ID NO: 26904 - DNA, 16 bp, Artificial
  oligonucleotide probe
caccgcctcagggacg

SEQ ID NO: 26905 - DNA, 16 bp, Artificial
  oligonucleotide probe
gggtagcggcgagacg

SEQ ID NO: 26906 - DNA, 16 bp, Artificial
  oligonucleotide probe
cagggcgagtccgacg

SEQ ID NO: 26907 - DNA, 16 bp, Artificial
  oligonucleotide probe
gcgaagcggcgaggtc

SEQ ID NO: 26908 - DNA, 16 bp, Artificial
  oligonucleotide probe
agcgagcggtggacgc

SEQ ID NO: 26909 - DNA, 16 bp, Artificial
  oligonucleotide probe
cagggtgggcgagcga

SEQ ID NO: 26910 - DNA, 16 bp, Artificial
  oligonucleotide probe
gggtagcggcgagacg

SEQ ID NO: 26911 - DNA, 16 bp, Artificial
  oligonucleotide probe
cgagcaccgagccgga

SEQ ID NO: 26912 - DNA, 16 bp, Artificial
  oligonucleotide probe
cctccggacctcacgc

SEQ ID NO: 26913 - DNA, 16 bp, Artificial
  oligonucleotide probe
gtccgggtcaggcagg

SEQ ID NO: 26914 - DNA, 16 bp, Artificial
  oligonucleotide probe
cgagcaggcgaggcag

SEQ ID NO: 26915 - DNA, 16 bp, Artificial
  oligonucleotide probe
cgagcaggcgaggcag

SEQ ID NO: 26916 - DNA, 16 bp, Artificial
  oligonucleotide probe
gcctcaggacgcacgc

SEQ ID NO: 26917 - DNA, 16 bp, Artificial
  oligonucleotide probe
ggtccggagcagacgc

SEQ ID NO: 26918 - DNA, 16 bp, Artificial
  oligonucleotide probe
gcctgcgagagctggc

SEQ ID NO: 26919 - DNA, 16 bp, Artificial
  oligonucleotide probe
gcgagtcccggaagcg

SEQ ID NO: 26920 - DNA, 16 bp, Artificial
  oligonucleotide probe
gcgacagggcctgcct

SEQ ID NO: 26921 - DNA, 16 bp, Artificial
  oligonucleotide probe
tggcgcctgtccgtgg

SEQ ID NO: 26922 - DNA, 16 bp, Artificial
  oligonucleotide probe
gtggcgagcctcgggt

SEQ ID NO: 26923 - DNA, 16 bp, Artificial
  oligonucleotide probe
tgctcggatgctgcga

SEQ ID NO: 26924 - DNA, 16 bp, Artificial
  oligonucleotide probe
gagcgcagccaagcct

SEQ ID NO: 26925 - DNA, 16 bp, Artificial
  oligonucleotide probe
cgagcaccgagccgga

SEQ ID NO: 26926 - DNA, 16 bp, Artificial
  oligonucleotide probe
gggtagcggcgagacg

SEQ ID NO: 26927 - DNA, 16 bp, Artificial
  oligonucleotide probe
gagcacgcgggtgcct

SEQ ID NO: 26928 - DNA, 16 bp, Artificial
  oligonucleotide probe
ggaacggaagcggagc

SEQ ID NO: 26929 - DNA, 16 bp, Artificial
  oligonucleotide probe
gacggagcacgccgga

SEQ ID NO: 26930 - DNA, 16 bp, Artificial
  oligonucleotide probe
cggagcctgagcgtgg

SEQ ID NO: 26931 - DNA, 16 bp, Artificial
  oligonucleotide probe
gcgacagggcctgcct

SEQ ID NO: 26932 - DNA, 16 bp, Artificial
  oligonucleotide probe
cggagcgagtggggaa

SEQ ID NO: 26933 - DNA, 16 bp, Artificial
  oligonucleotide probe
cgagcaccgagccgga

SEQ ID NO: 26934 - DNA, 16 bp, Artificial
  oligonucleotide probe
cctccggacctcacgc

SEQ ID NO: 26935 - DNA, 16 bp, Artificial
  oligonucleotide probe
caggcctccctcgcga

SEQ ID NO: 26936 - DNA, 16 bp, Artificial
  oligonucleotide probe
caccagcgagacgcga

SEQ ID NO: 26937 - DNA, 16 bp, Artificial
  oligonucleotide probe
cagggtgggcgagcga

SEQ ID NO: 26938 - DNA, 16 bp, Artificial
  oligonucleotide probe
acgcccaacagggagc

SEQ ID NO: 26939 - DNA, 16 bp, Artificial
  oligonucleotide probe
gagcgacgcgagagcg

SEQ ID NO: 26940 - DNA, 16 bp, Artificial
  oligonucleotide probe
cgagcctcgggtgcga

SEQ ID NO: 26941 - DNA, 16 bp, Artificial
  oligonucleotide probe
caggacgctggccctc

SEQ ID NO: 26942 - DNA, 16 bp, Artificial
  oligonucleotide probe
cctcgtggcggacgga

SEQ ID NO: 26943 - DNA, 16 bp, Artificial
  oligonucleotide probe
tcacgccttggccacc

SEQ ID NO: 26944 - DNA, 16 bp, Artificial
  oligonucleotide probe
caccgcgaggtcacgc

SEQ ID NO: 26945 - DNA, 16 bp, Artificial
  oligonucleotide probe
tggcgcctgtccgtgg

SEQ ID NO: 26946 - DNA, 16 bp, Artificial
  oligonucleotide probe
gtggcgagcctcgggt

SEQ ID NO: 26947 - DNA, 16 bp, Artificial
  oligonucleotide probe
gacggagcacgccgga

SEQ ID NO: 26948 - DNA, 16 bp, Artificial
  oligonucleotide probe
cggagcctgagcgtgg

SEQ ID NO: 26949 - DNA, 16 bp, Artificial
  oligonucleotide probe
acgcccaacagggagc

SEQ ID NO: 26950 - DNA, 16 bp, Artificial
  oligonucleotide probe
acgccctcaccagcga

SEQ ID NO: 26951 - DNA, 16 bp, Artificial
  oligonucleotide probe
gtccacgctggcgacg

SEQ ID NO: 26952 - DNA, 16 bp, Artificial
  oligonucleotide probe
cctcagcgcggaacca

SEQ ID NO: 26953 - DNA, 16 bp, Artificial
  oligonucleotide probe
tgctcggatgctgcga

SEQ ID NO: 26954 - DNA, 16 bp, Artificial
  oligonucleotide probe
gagcgcagccaagcct

SEQ ID NO: 26955 - DNA, 16 bp, Artificial
  oligonucleotide probe
caggcctccctcgcga

SEQ ID NO: 26956 - DNA, 16 bp, Artificial
  oligonucleotide probe
caccagcgagacgcga

SEQ ID NO: 26957 - DNA, 16 bp, Artificial
  oligonucleotide probe
gggtacgcgacgcgag

SEQ ID NO: 26958 - DNA, 16 bp, Artificial
  oligonucleotide probe
agcggacggcaggagc

SEQ ID NO: 26959 - DNA, 16 bp, Artificial
  oligonucleotide probe
agcggcgagagcgtcc

SEQ ID NO: 26960 - DNA, 16 bp, Artificial
  oligonucleotide probe
gacgcaccagcgcgag

SEQ ID NO: 26961 - DNA, 16 bp, Artificial
  oligonucleotide probe
gcgacagggcctgcct

SEQ ID NO: 26962 - DNA, 16 bp, Artificial
  oligonucleotide probe
gcgagtcccggaagcg

SEQ ID NO: 26963 - DNA, 16 bp, Artificial
  oligonucleotide probe
gacgcaggcggagggt

SEQ ID NO: 26964 - DNA, 16 bp, Artificial
  oligonucleotide probe
gacgcaggcggagggt

SEQ ID NO: 26965 - DNA, 16 bp, Artificial
  oligonucleotide probe
gacggcgagtgggcag

SEQ ID NO: 26966 - DNA, 16 bp, Artificial
  oligonucleotide probe
gacggcgagtgggcag

SEQ ID NO: 26967 - DNA, 16 bp, Artificial
  oligonucleotide probe
ggaagcctgcgacgga

SEQ ID NO: 26968 - DNA, 16 bp, Artificial
  oligonucleotide probe
ggaagcctgcgacgga

SEQ ID NO: 26969 - DNA, 16 bp, Artificial
  oligonucleotide probe
acgcggtccaccgtgg

SEQ ID NO: 26970 - DNA, 16 bp, Artificial
  oligonucleotide probe
acgcggtccaccgtgg

SEQ ID NO: 26971 - DNA, 16 bp, Artificial
  oligonucleotide probe
gacggcgagtgggcag

SEQ ID NO: 26972 - DNA, 16 bp, Artificial
  oligonucleotide probe
gacggcgagtgggcag

SEQ ID NO: 26973 - DNA, 16 bp, Artificial
  oligonucleotide probe
accatggcacgcgacg

SEQ ID NO: 26974 - DNA, 16 bp, Artificial
  oligonucleotide probe
accatggcacgcgacg

SEQ ID NO: 26975 - DNA, 16 bp, Artificial
  oligonucleotide probe
gacgcaggcggagggt

SEQ ID NO: 26976 - DNA, 16 bp, Artificial
  oligonucleotide probe
gacgcaggcggagggt

SEQ ID NO: 26977 - DNA, 16 bp, Artificial
  oligonucleotide probe
acgcggtccaccgtgg

SEQ ID NO: 26978 - DNA, 16 bp, Artificial
  oligonucleotide probe
acgcggtccaccgtgg

SEQ ID NO: 26979 - DNA, 16 bp, Artificial
  oligonucleotide probe
gcctcggagacggcag

SEQ ID NO: 26980 - DNA, 16 bp, Artificial
  oligonucleotide probe
gcctcggagacggcag

SEQ ID NO: 26981 - DNA, 16 bp, Artificial
  oligonucleotide probe
gcctcggagacggcag

SEQ ID NO: 26982 - DNA, 16 bp, Artificial
  oligonucleotide probe
gcctcggagacggcag

SEQ ID NO: 26983 - DNA, 16 bp, Artificial
  oligonucleotide probe
acgcgcctgacgcctc

SEQ ID NO: 26984 - DNA, 16 bp, Artificial
  oligonucleotide probe
acgcgcctgacgcctc

SEQ ID NO: 26985 - DNA, 16 bp, Artificial
  oligonucleotide probe
gcctagcgcctcgacg

SEQ ID NO: 26986 - DNA, 16 bp, Artificial
  oligonucleotide probe
gcctagcgcctcgacg

SEQ ID NO: 26987 - DNA, 16 bp, Artificial
  oligonucleotide probe
acgcggtccaccgtgg

SEQ ID NO: 26988 - DNA, 16 bp, Artificial
  oligonucleotide probe
acgcggtccaccgtgg

SEQ ID NO: 26989 - DNA, 16 bp, Artificial
  oligonucleotide probe
gcctcggagacggcag

SEQ ID NO: 26990 - DNA, 16 bp, Artificial
  oligonucleotide probe
gcctcggagacggcag

SEQ ID NO: 26991 - DNA, 16 bp, Artificial
  oligonucleotide probe
gacggcgagtgggcag

SEQ ID NO: 26992 - DNA, 16 bp, Artificial
  oligonucleotide probe
gacggcgagtgggcag

SEQ ID NO: 26993 - DNA, 16 bp, Artificial
  oligonucleotide probe
acgcgcctgacgcctc

SEQ ID NO: 26994 - DNA, 16 bp, Artificial
  oligonucleotide probe
acgcgcctgacgcctc

SEQ ID NO: 26995 - DNA, 16 bp, Artificial
  oligonucleotide probe
tggcgtgggggtccaa

SEQ ID NO: 26996 - DNA, 16 bp, Artificial
  oligonucleotide probe
tggcgtgggggtccaa

SEQ ID NO: 26997 - DNA, 16 bp, Artificial
  oligonucleotide probe
gcctagcgcctcgacg

SEQ ID NO: 26998 - DNA, 16 bp, Artificial
  oligonucleotide probe
gcctagcgcctcgacg

SEQ ID NO: 26999 - DNA, 16 bp, Artificial
  oligonucleotide probe
acgcgcctgacgcctc

SEQ ID NO: 27000 - DNA, 16 bp, Artificial
  oligonucleotide probe
acgcgcctgacgcctc

SEQ ID NO: 27001 - DNA, 16 bp, Artificial
  oligonucleotide probe
gacgcaggcggagggt

SEQ ID NO: 27002 - DNA, 16 bp, Artificial
  oligonucleotide probe
gacgcaggcggagggt

SEQ ID NO: 27003 - DNA, 16 bp, Artificial
  oligonucleotide probe
gacggcgagtgggcag

SEQ ID NO: 27004 - DNA, 16 bp, Artificial
  oligonucleotide probe
gacggcgagtgggcag

SEQ ID NO: 27005 - DNA, 16 bp, Artificial
  oligonucleotide probe
gacgcaggcggagggt

SEQ ID NO: 27006 - DNA, 16 bp, Artificial
  oligonucleotide probe
gacgcaggcggagggt

SEQ ID NO: 27007 - DNA, 16 bp, Artificial
  oligonucleotide probe
acgcgcctgacgcctc

SEQ ID NO: 27008 - DNA, 16 bp, Artificial
  oligonucleotide probe
acgcgcctgacgcctc

SEQ ID NO: 27009 - DNA, 16 bp, Artificial
  oligonucleotide probe
gcagcggagcctgagc

SEQ ID NO: 27010 - DNA, 16 bp, Artificial
  oligonucleotide probe
gcagcggagcctgagc

SEQ ID NO: 27011 - DNA, 16 bp, Artificial
  oligonucleotide probe
gacggcgagtgggcag

SEQ ID NO: 27012 - DNA, 16 bp, Artificial
  oligonucleotide probe
gacggcgagtgggcag

SEQ ID NO: 27013 - DNA, 16 bp, Artificial
  oligonucleotide probe
gacggcgagtgggcag

SEQ ID NO: 27014 - DNA, 16 bp, Artificial
  oligonucleotide probe
gacggcgagtgggcag

SEQ ID NO: 27015 - DNA, 16 bp, Artificial
  oligonucleotide probe
gcctagcgcctcgacg

SEQ ID NO: 27016 - DNA, 16 bp, Artificial
  oligonucleotide probe
gcctagcgcctcgacg

SEQ ID NO: 27017 - DNA, 16 bp, Artificial
  oligonucleotide probe
gacggcgagtgggcag

SEQ ID NO: 27018 - DNA, 16 bp, Artificial
  oligonucleotide probe
gacggcgagtgggcag

SEQ ID NO: 27019 - DNA, 16 bp, Artificial
  oligonucleotide probe
acgcgcctgacgcctc

SEQ ID NO: 27020 - DNA, 16 bp, Artificial
  oligonucleotide probe
acgcgcctgacgcctc

SEQ ID NO: 27021 - DNA, 16 bp, Artificial
  oligonucleotide probe
gacgcaggcggagggt

SEQ ID NO: 27022 - DNA, 16 bp, Artificial
  oligonucleotide probe
gacgcaggcggagggt

SEQ ID NO: 27023 - DNA, 16 bp, Artificial
  oligonucleotide probe
gcagcggagcctgagc

SEQ ID NO: 27024 - DNA, 16 bp, Artificial
  oligonucleotide probe
acgccaggcgaggtgg

SEQ ID NO: 27025 - DNA, 16 bp, Artificial
  oligonucleotide probe
ggaagcctgcgacgga

SEQ ID NO: 27026 - DNA, 16 bp, Artificial
  oligonucleotide probe
accatggcacgcgacg

SEQ ID NO: 27027 - DNA, 16 bp, Artificial
  oligonucleotide probe
caccgggtggtcagcg

SEQ ID NO: 27028 - DNA, 16 bp, Artificial
  oligonucleotide probe
acgcaccagtcccgga

SEQ ID NO: 27029 - DNA, 16 bp, Artificial
  oligonucleotide probe
tgctgggtgcaggcga

SEQ ID NO: 27030 - DNA, 16 bp, Artificial
  oligonucleotide probe
gacggcgagtgggcag

SEQ ID NO: 27031 - DNA, 16 bp, Artificial
  oligonucleotide probe
caccgacgggaaacgc

SEQ ID NO: 27032 - DNA, 16 bp, Artificial
  oligonucleotide probe
tggcgtgggggtccaa

SEQ ID NO: 27033 - DNA, 16 bp, Artificial
  oligonucleotide probe
gagcgggtgtggagcg

SEQ ID NO: 27034 - DNA, 16 bp, Artificial
  oligonucleotide probe
gagcgggtgtggagcg

SEQ ID NO: 27035 - DNA, 16 bp, Artificial
  oligonucleotide probe
agcgcaggagacgcct

SEQ ID NO: 27036 - DNA, 16 bp, Artificial
  oligonucleotide probe
agcgcaggagacgcct

SEQ ID NO: 27037 - DNA, 16 bp, Artificial
  oligonucleotide probe
cggatgctgcgagcag

SEQ ID NO: 27038 - DNA, 16 bp, Artificial
  oligonucleotide probe
cggatgctgcgagcag

SEQ ID NO: 27039 - DNA, 16 bp, Artificial
  oligonucleotide probe
gagcgggtgtggagcg

SEQ ID NO: 27040 - DNA, 16 bp, Artificial
  oligonucleotide probe
gagcgggtgtggagcg

SEQ ID NO: 27041 - DNA, 16 bp, Artificial
  oligonucleotide probe
gtccgcaggtccgcct

SEQ ID NO: 27042 - DNA, 16 bp, Artificial
  oligonucleotide probe
gtccgcaggtccgcct

SEQ ID NO: 27043 - DNA, 16 bp, Artificial
  oligonucleotide probe
gtgggcctcctcccaa

SEQ ID NO: 27044 - DNA, 16 bp, Artificial
  oligonucleotide probe
gtgggcctcctcccaa

SEQ ID NO: 27045 - DNA, 16 bp, Artificial
  oligonucleotide probe
gagcgggtgtggagcg

SEQ ID NO: 27046 - DNA, 16 bp, Artificial
  oligonucleotide probe
gagcgggtgtggagcg

SEQ ID NO: 27047 - DNA, 16 bp, Artificial
  oligonucleotide probe
cggagacgcagggggt

SEQ ID NO: 27048 - DNA, 16 bp, Artificial
  oligonucleotide probe
cggagacgcagggggt

SEQ ID NO: 27049 - DNA, 16 bp, Artificial
  oligonucleotide probe
agcgcaggagacgcct

SEQ ID NO: 27050 - DNA, 16 bp, Artificial
  oligonucleotide probe
agcgcaggagacgcct

SEQ ID NO: 27051 - DNA, 16 bp, Artificial
  oligonucleotide probe
tcaccggagccttggc

SEQ ID NO: 27052 - DNA, 16 bp, Artificial
  oligonucleotide probe
tcaccggagccttggc

SEQ ID NO: 27053 - DNA, 16 bp, Artificial
  oligonucleotide probe
agcgcaggagacgcct

SEQ ID NO: 27054 - DNA, 16 bp, Artificial
  oligonucleotide probe
agcgcaggagacgcct

SEQ ID NO: 27055 - DNA, 16 bp, Artificial
  oligonucleotide probe
gacgagcgcaccgcag

SEQ ID NO: 27056 - DNA, 16 bp, Artificial
  oligonucleotide probe
gacgagcgcaccgcag

SEQ ID NO: 27057 - DNA, 16 bp, Artificial
  oligonucleotide probe
gtgggcctcctcccaa

SEQ ID NO: 27058 - DNA, 16 bp, Artificial
  oligonucleotide probe
gtgggcctcctcccaa

SEQ ID NO: 27059 - DNA, 16 bp, Artificial
  oligonucleotide probe
agcgcaggagacgcct

SEQ ID NO: 27060 - DNA, 16 bp, Artificial
  oligonucleotide probe
agcgcaggagacgcct

SEQ ID NO: 27061 - DNA, 16 bp, Artificial
  oligonucleotide probe
gtccgcaggtccgcct

SEQ ID NO: 27062 - DNA, 16 bp, Artificial
  oligonucleotide probe
gtccgcaggtccgcct

SEQ ID NO: 27063 - DNA, 16 bp, Artificial
  oligonucleotide probe
gagcgggtgtggagcg

SEQ ID NO: 27064 - DNA, 16 bp, Artificial
  oligonucleotide probe
gagcgggtgtggagcg

SEQ ID NO: 27065 - DNA, 16 bp, Artificial
  oligonucleotide probe
gagcgggtgtggagcg

SEQ ID NO: 27066 - DNA, 16 bp, Artificial
  oligonucleotide probe
gagcgggtgtggagcg

SEQ ID NO: 27067 - DNA, 16 bp, Artificial
  oligonucleotide probe
cggagacgcagggggt

SEQ ID NO: 27068 - DNA, 16 bp, Artificial
  oligonucleotide probe
cggagacgcagggggt

SEQ ID NO: 27069 - DNA, 16 bp, Artificial
  oligonucleotide probe
tcaccggagccttggc

SEQ ID NO: 27070 - DNA, 16 bp, Artificial
  oligonucleotide probe
tcaccggagccttggc

SEQ ID NO: 27071 - DNA, 16 bp, Artificial
  oligonucleotide probe
tcaccggagccttggc

SEQ ID NO: 27072 - DNA, 16 bp, Artificial
  oligonucleotide probe
tcaccggagccttggc

SEQ ID NO: 27073 - DNA, 16 bp, Artificial
  oligonucleotide probe
cggagacgcagggggt

SEQ ID NO: 27074 - DNA, 16 bp, Artificial
  oligonucleotide probe
cggagacgcagggggt

SEQ ID NO: 27075 - DNA, 16 bp, Artificial
  oligonucleotide probe
gtccgcaggtccgcct

SEQ ID NO: 27076 - DNA, 16 bp, Artificial
  oligonucleotide probe
gtccgcaggtccgcct

SEQ ID NO: 27077 - DNA, 16 bp, Artificial
  oligonucleotide probe
cggatgctgcgagcag

SEQ ID NO: 27078 - DNA, 16 bp, Artificial
  oligonucleotide probe
cggatgctgcgagcag

SEQ ID NO: 27079 - DNA, 16 bp, Artificial
  oligonucleotide probe
cggatgctgcgagcag

SEQ ID NO: 27080 - DNA, 16 bp, Artificial
  oligonucleotide probe
cggatgctgcgagcag

SEQ ID NO: 27081 - DNA, 16 bp, Artificial
  oligonucleotide probe
cggagacgcagggggt

SEQ ID NO: 27082 - DNA, 16 bp, Artificial
  oligonucleotide probe
cggagacgcagggggt

SEQ ID NO: 27083 - DNA, 16 bp, Artificial
  oligonucleotide probe
cggagacgcagggggt

SEQ ID NO: 27084 - DNA, 16 bp, Artificial
  oligonucleotide probe
cggagacgcagggggt

SEQ ID NO: 27085 - DNA, 16 bp, Artificial
  oligonucleotide probe
agcgcaggagacgcct

SEQ ID NO: 27086 - DNA, 16 bp, Artificial
  oligonucleotide probe
agcgcaggagacgcct

SEQ ID NO: 27087 - DNA, 16 bp, Artificial
  oligonucleotide probe
gagcgggtgtggagcg

SEQ ID NO: 27088 - DNA, 16 bp, Artificial
  oligonucleotide probe
gagcgggtgtggagcg

SEQ ID NO: 27089 - DNA, 16 bp, Artificial
  oligonucleotide probe
gtgggcctcctcccaa

SEQ ID NO: 27090 - DNA, 16 bp, Artificial
  oligonucleotide probe
gtgggcctcctcccaa

SEQ ID NO: 27091 - DNA, 16 bp, Artificial
  oligonucleotide probe
cggagacgcagggggt

SEQ ID NO: 27092 - DNA, 16 bp, Artificial
  oligonucleotide probe
cggagacgcagggggt

SEQ ID NO: 27093 - DNA, 16 bp, Artificial
  oligonucleotide probe
tcaccggagccttggc

SEQ ID NO: 27094 - DNA, 16 bp, Artificial
  oligonucleotide probe
tcaccggagccttggc

SEQ ID NO: 27095 - DNA, 16 bp, Artificial
  oligonucleotide probe
gacgagcgcaccgcag

SEQ ID NO: 27096 - DNA, 16 bp, Artificial
  oligonucleotide probe
gacgagcgcaccgcag

SEQ ID NO: 27097 - DNA, 16 bp, Artificial
  oligonucleotide probe
gtccgcaggtccgcct

SEQ ID NO: 27098 - DNA, 16 bp, Artificial
  oligonucleotide probe
gtccgcaggtccgcct

SEQ ID NO: 27099 - DNA, 16 bp, Artificial
  oligonucleotide probe
cggagacgcagggggt

SEQ ID NO: 27100 - DNA, 16 bp, Artificial
  oligonucleotide probe
cggagacgcagggggt

SEQ ID NO: 27101 - DNA, 16 bp, Artificial
  oligonucleotide probe
cggatgctgcgagcag

SEQ ID NO: 27102 - DNA, 16 bp, Artificial
  oligonucleotide probe
cggatgctgcgagcag

SEQ ID NO: 27103 - DNA, 16 bp, Artificial
  oligonucleotide probe
tcaccggagccttggc

SEQ ID NO: 27104 - DNA, 16 bp, Artificial
  oligonucleotide probe
tcaccggagccttggc

SEQ ID NO: 27105 - DNA, 16 bp, Artificial
  oligonucleotide probe
gagcgggtgtggagcg

SEQ ID NO: 27106 - DNA, 16 bp, Artificial
  oligonucleotide probe
gagcgggtgtggagcg

SEQ ID NO: 27107 - DNA, 16 bp, Artificial
  oligonucleotide probe
gacgagcgcaccgcag

SEQ ID NO: 27108 - DNA, 16 bp, Artificial
  oligonucleotide probe
gacgagcgcaccgcag

SEQ ID NO: 27109 - DNA, 16 bp, Artificial
  oligonucleotide probe
tcaccggagccttggc

SEQ ID NO: 27110 - DNA, 16 bp, Artificial
  oligonucleotide probe
tcaccggagccttggc

SEQ ID NO: 27111 - DNA, 16 bp, Artificial
  oligonucleotide probe
cggatgctgcgagcag

SEQ ID NO: 27112 - DNA, 16 bp, Artificial
  oligonucleotide probe
cggatgctgcgagcag

SEQ ID NO: 27113 - DNA, 16 bp, Artificial
  oligonucleotide probe
gtccgcaggtccgcct

SEQ ID NO: 27114 - DNA, 16 bp, Artificial
  oligonucleotide probe
gtccgcaggtccgcct

SEQ ID NO: 27115 - DNA, 16 bp, Artificial
  oligonucleotide probe
cggatgctgcgagcag

SEQ ID NO: 27116 - DNA, 16 bp, Artificial
  oligonucleotide probe
cggatgctgcgagcag

SEQ ID NO: 27117 - DNA, 16 bp, Artificial
  oligonucleotide probe
tcaccggagccttggc

SEQ ID NO: 27118 - DNA, 16 bp, Artificial
  oligonucleotide probe
tcaccggagccttggc

SEQ ID NO: 27119 - DNA, 16 bp, Artificial
  oligonucleotide probe
cggagacgcagggggt

SEQ ID NO: 27120 - DNA, 16 bp, Artificial
  oligonucleotide probe
cggagacgcagggggt

SEQ ID NO: 27121 - DNA, 16 bp, Artificial
  oligonucleotide probe
gagcgggtgtggagcg

SEQ ID NO: 27122 - DNA, 16 bp, Artificial
  oligonucleotide probe
gagcgggtgtggagcg

SEQ ID NO: 27123 - DNA, 16 bp, Artificial
  oligonucleotide probe
gtccgcaggtccgcct

SEQ ID NO: 27124 - DNA, 16 bp, Artificial
  oligonucleotide probe
gtccgcaggtccgcct

SEQ ID NO: 27125 - DNA, 16 bp, Artificial
  oligonucleotide probe
gtgggcctcctcccaa

SEQ ID NO: 27126 - DNA, 16 bp, Artificial
  oligonucleotide probe
gtgggcctcctcccaa

SEQ ID NO: 27127 - DNA, 16 bp, Artificial
  oligonucleotide probe
gtgggcctcctcccaa

SEQ ID NO: 27128 - DNA, 16 bp, Artificial
  oligonucleotide probe
gtgggcctcctcccaa

SEQ ID NO: 27129 - DNA, 16 bp, Artificial
  oligonucleotide probe
gtgggcctcctcccaa

SEQ ID NO: 27130 - DNA, 16 bp, Artificial
  oligonucleotide probe
gtgggcctcctcccaa

SEQ ID NO: 27131 - DNA, 16 bp, Artificial
  oligonucleotide probe
cggagacgcagggggt

SEQ ID NO: 27132 - DNA, 16 bp, Artificial
  oligonucleotide probe
cggagacgcagggggt

SEQ ID NO: 27133 - DNA, 16 bp, Artificial
  oligonucleotide probe
gtccgcaggtccgcct

SEQ ID NO: 27134 - DNA, 16 bp, Artificial
  oligonucleotide probe
gtccgcaggtccgcct

SEQ ID NO: 27135 - DNA, 16 bp, Artificial
  oligonucleotide probe
gacgagcgcaccgcag

SEQ ID NO: 27136 - DNA, 16 bp, Artificial
  oligonucleotide probe
gacgagcgcaccgcag

SEQ ID NO: 27137 - DNA, 16 bp, Artificial
  oligonucleotide probe
gtgggcctcctcccaa

SEQ ID NO: 27138 - DNA, 16 bp, Artificial
  oligonucleotide probe
gtgggcctcctcccaa

SEQ ID NO: 27139 - DNA, 16 bp, Artificial
  oligonucleotide probe
tcaccggagccttggc

SEQ ID NO: 27140 - DNA, 16 bp, Artificial
  oligonucleotide probe
tcaccggagccttggc

SEQ ID NO: 27141 - DNA, 16 bp, Artificial
  oligonucleotide probe
gacgagcgcaccgcag

SEQ ID NO: 27142 - DNA, 16 bp, Artificial
  oligonucleotide probe
gacgagcgcaccgcag

SEQ ID NO: 27143 - DNA, 16 bp, Artificial
  oligonucleotide probe
agcgcaggagacgcct

SEQ ID NO: 27144 - DNA, 16 bp, Artificial
  oligonucleotide probe
agcgcaggagacgcct

SEQ ID NO: 27145 - DNA, 16 bp, Artificial
  oligonucleotide probe
cggatgctgcgagcag

SEQ ID NO: 27146 - DNA, 16 bp, Artificial
  oligonucleotide probe
cggatgctgcgagcag

SEQ ID NO: 27147 - DNA, 16 bp, Artificial
  oligonucleotide probe
gacgagcgcaccgcag

SEQ ID NO: 27148 - DNA, 16 bp, Artificial
  oligonucleotide probe
gacgagcgcaccgcag

SEQ ID NO: 27149 - DNA, 16 bp, Artificial
  oligonucleotide probe
gtccgcaggtccgcct

SEQ ID NO: 27150 - DNA, 16 bp, Artificial
  oligonucleotide probe
gtccgcaggtccgcct

SEQ ID NO: 27151 - DNA, 16 bp, Artificial
  oligonucleotide probe
cggatgctgcgagcag

SEQ ID NO: 27152 - DNA, 16 bp, Artificial
  oligonucleotide probe
cggatgctgcgagcag

SEQ ID NO: 27153 - DNA, 16 bp, Artificial
  oligonucleotide probe
gagcgggtgtggagcg

SEQ ID NO: 27154 - DNA, 16 bp, Artificial
  oligonucleotide probe
gagcgggtgtggagcg

SEQ ID NO: 27155 - DNA, 16 bp, Artificial
  oligonucleotide probe
gtgggcctcctcccaa

SEQ ID NO: 27156 - DNA, 16 bp, Artificial
  oligonucleotide probe
gtgggcctcctcccaa

SEQ ID NO: 27157 - DNA, 16 bp, Artificial
  oligonucleotide probe
gacgagcgcaccgcag

SEQ ID NO: 27158 - DNA, 16 bp, Artificial
  oligonucleotide probe
gacgagcgcaccgcag

SEQ ID NO: 27159 - DNA, 16 bp, Artificial
  oligonucleotide probe
cggatgctgcgagcag

SEQ ID NO: 27160 - DNA, 16 bp, Artificial
  oligonucleotide probe
cggatgctgcgagcag

SEQ ID NO: 27161 - DNA, 16 bp, Artificial
  oligonucleotide probe
gacgagcgcaccgcag

SEQ ID NO: 27162 - DNA, 16 bp, Artificial
  oligonucleotide probe
gacgagcgcaccgcag

SEQ ID NO: 27163 - DNA, 16 bp, Artificial
  oligonucleotide probe
gacgagcgcaccgcag

SEQ ID NO: 27164 - DNA, 16 bp, Artificial
  oligonucleotide probe
gacgagcgcaccgcag

SEQ ID NO: 27165 - DNA, 16 bp, Artificial
  oligonucleotide probe
tcaccggagccttggc

SEQ ID NO: 27166 - DNA, 16 bp, Artificial
  oligonucleotide probe
tcaccggagccttggc

SEQ ID NO: 27167 - DNA, 16 bp, Artificial
  oligonucleotide probe
cggagacgcagggggt

SEQ ID NO: 27168 - DNA, 16 bp, Artificial
  oligonucleotide probe
cggagacgcagggggt

SEQ ID NO: 27169 - DNA, 16 bp, Artificial
  oligonucleotide probe
gtgggcctcctcccaa

SEQ ID NO: 27170 - DNA, 16 bp, Artificial
  oligonucleotide probe
gtgggcctcctcccaa

SEQ ID NO: 27171 - DNA, 16 bp, Artificial
  oligonucleotide probe
tcaccggagccttggc

SEQ ID NO: 27172 - DNA, 16 bp, Artificial
  oligonucleotide probe
tcaccggagccttggc

SEQ ID NO: 27173 - DNA, 16 bp, Artificial
  oligonucleotide probe
agcgcaggagacgcct

SEQ ID NO: 27174 - DNA, 16 bp, Artificial
  oligonucleotide probe
agcgcaggagacgcct

SEQ ID NO: 27175 - DNA, 16 bp, Artificial
  oligonucleotide probe
gtgggcctcctcccaa

SEQ ID NO: 27176 - DNA, 16 bp, Artificial
  oligonucleotide probe
gtgggcctcctcccaa

SEQ ID NO: 27177 - DNA, 16 bp, Artificial
  oligonucleotide probe
gacgagcgcaccgcag

SEQ ID NO: 27178 - DNA, 16 bp, Artificial
  oligonucleotide probe
gacgagcgcaccgcag

SEQ ID NO: 27179 - DNA, 16 bp, Artificial
  oligonucleotide probe
cggatgctgcgagcag

SEQ ID NO: 27180 - DNA, 16 bp, Artificial
  oligonucleotide probe
cggatgctgcgagcag

SEQ ID NO: 27181 - DNA, 16 bp, Artificial
  oligonucleotide probe
agcgcaggagacgcct

SEQ ID NO: 27182 - DNA, 16 bp, Artificial
  oligonucleotide probe
agcgcaggagacgcct

SEQ ID NO: 27183 - DNA, 16 bp, Artificial
  oligonucleotide probe
agcgcaggagacgcct

SEQ ID NO: 27184 - DNA, 16 bp, Artificial
  oligonucleotide probe
agcgcaggagacgcct

SEQ ID NO: 27185 - DNA, 16 bp, Artificial
  oligonucleotide probe
gagcgggtgtggagcg

SEQ ID NO: 27186 - DNA, 16 bp, Artificial
  oligonucleotide probe
gagcgggtgtggagcg

SEQ ID NO: 27187 - DNA, 16 bp, Artificial
  oligonucleotide probe
gtccgcaggtccgcct

SEQ ID NO: 27188 - DNA, 16 bp, Artificial
  oligonucleotide probe
gtccgcaggtccgcct

SEQ ID NO: 27189 - DNA, 16 bp, Artificial
  oligonucleotide probe
gtccgcaggtccgcct

SEQ ID NO: 27190 - DNA, 16 bp, Artificial
  oligonucleotide probe
gtccgcaggtccgcct

SEQ ID NO: 27191 - DNA, 16 bp, Artificial
  oligonucleotide probe
agcgcaggagacgcct

SEQ ID NO: 27192 - DNA, 16 bp, Artificial
  oligonucleotide probe
agcgcaggagacgcct

SEQ ID NO: 27193 - DNA, 16 bp, Artificial
  oligonucleotide probe
agcgcaggagacgcct

SEQ ID NO: 27194 - DNA, 16 bp, Artificial
  oligonucleotide probe
gacgagcgcaccgcag

SEQ ID NO: 27195 - DNA, 16 bp, Artificial
  oligonucleotide probe
gtgggcctcctcccaa

SEQ ID NO: 27196 - DNA, 16 bp, Artificial
  oligonucleotide probe
gagcgggtgtggagcg

SEQ ID NO: 27197 - DNA, 16 bp, Artificial
  oligonucleotide probe
cggagacgcagggggt

SEQ ID NO: 27198 - DNA, 16 bp, Artificial
  oligonucleotide probe
cggatgctgcgagcag

SEQ ID NO: 27199 - DNA, 16 bp, Artificial
  oligonucleotide probe
gtccgcaggtccgcct

SEQ ID NO: 27200 - DNA, 16 bp, Artificial
  oligonucleotide probe
tcaccggagccttggc

SEQ ID NO: 27201 - DNA, 16 bp, Artificial
  oligonucleotide probe
gcagcggagcctgagc

SEQ ID NO: 27202 - DNA, 16 bp, Artificial
  oligonucleotide probe
gcagcggagcctgagc

SEQ ID NO: 27203 - DNA, 16 bp, Artificial
  oligonucleotide probe
gacggcgagtgggcag

SEQ ID NO: 27204 - DNA, 16 bp, Artificial
  oligonucleotide probe
gacggcgagtgggcag

SEQ ID NO: 27205 - DNA, 16 bp, Artificial
  oligonucleotide probe
gacgcaggcggagggt

SEQ ID NO: 27206 - DNA, 16 bp, Artificial
  oligonucleotide probe
gacgcaggcggagggt

SEQ ID NO: 27207 - DNA, 16 bp, Artificial
  oligonucleotide probe
gtccacgctggcgacg

SEQ ID NO: 27208 - DNA, 16 bp, Artificial
  oligonucleotide probe
gtccacgctggcgacg

SEQ ID NO: 27209 - DNA, 16 bp, Artificial
  oligonucleotide probe
gagcgcgacacccagg

SEQ ID NO: 27210 - DNA, 16 bp, Artificial
  oligonucleotide probe
gagcgcgacacccagg

SEQ ID NO: 27211 - DNA, 16 bp, Artificial
  oligonucleotide probe
gacgcaggcggagggt

SEQ ID NO: 27212 - DNA, 16 bp, Artificial
  oligonucleotide probe
gacgcaggcggagggt

SEQ ID NO: 27213 - DNA, 16 bp, Artificial
  oligonucleotide probe
accatggcacgcgacg

SEQ ID NO: 27214 - DNA, 16 bp, Artificial
  oligonucleotide probe
accatggcacgcgacg

SEQ ID NO: 27215 - DNA, 16 bp, Artificial
  oligonucleotide probe
gcctcggagacggcag

SEQ ID NO: 27216 - DNA, 16 bp, Artificial
  oligonucleotide probe
gcctcggagacggcag

SEQ ID NO: 27217 - DNA, 16 bp, Artificial
  oligonucleotide probe
gagcgcgacacccagg

SEQ ID NO: 27218 - DNA, 16 bp, Artificial
  oligonucleotide probe
gagcgcgacacccagg

SEQ ID NO: 27219 - DNA, 16 bp, Artificial
  oligonucleotide probe
gacgcaggcggagggt

SEQ ID NO: 27220 - DNA, 16 bp, Artificial
  oligonucleotide probe
gacgcaggcggagggt

SEQ ID NO: 27221 - DNA, 16 bp, Artificial
  oligonucleotide probe
gagcgcgacacccagg

SEQ ID NO: 27222 - DNA, 16 bp, Artificial
  oligonucleotide probe
gagcgcgacacccagg

SEQ ID NO: 27223 - DNA, 16 bp, Artificial
  oligonucleotide probe
gcagcggagcctgagc

SEQ ID NO: 27224 - DNA, 16 bp, Artificial
  oligonucleotide probe
gcagcggagcctgagc

SEQ ID NO: 27225 - DNA, 16 bp, Artificial
  oligonucleotide probe
ggaagcctgcgacgga

SEQ ID NO: 27226 - DNA, 16 bp, Artificial
  oligonucleotide probe
ggaagcctgcgacgga

SEQ ID NO: 27227 - DNA, 16 bp, Artificial
  oligonucleotide probe
cggacaggacgctggc

SEQ ID NO: 27228 - DNA, 16 bp, Artificial
  oligonucleotide probe
cggacaggacgctggc

SEQ ID NO: 27229 - DNA, 16 bp, Artificial
  oligonucleotide probe
gcctagcgcctcgacg

SEQ ID NO: 27230 - DNA, 16 bp, Artificial
  oligonucleotide probe
gcctagcgcctcgacg

SEQ ID NO: 27231 - DNA, 16 bp, Artificial
  oligonucleotide probe
agcggtccgcgagagc

SEQ ID NO: 27232 - DNA, 16 bp, Artificial
  oligonucleotide probe
agcggtccgcgagagc

SEQ ID NO: 27233 - DNA, 16 bp, Artificial
  oligonucleotide probe
tgctgggtgcaggcga

SEQ ID NO: 27234 - DNA, 16 bp, Artificial
  oligonucleotide probe
tgctgggtgcaggcga

SEQ ID NO: 27235 - DNA, 16 bp, Artificial
  oligonucleotide probe
accatggcacgcgacg

SEQ ID NO: 27236 - DNA, 16 bp, Artificial
  oligonucleotide probe
accatggcacgcgacg

SEQ ID NO: 27237 - DNA, 16 bp, Artificial
  oligonucleotide probe
gcctcggagacggcag

SEQ ID NO: 27238 - DNA, 16 bp, Artificial
  oligonucleotide probe
gcctcggagacggcag

SEQ ID NO: 27239 - DNA, 16 bp, Artificial
  oligonucleotide probe
caccgacgggaaacgc

SEQ ID NO: 27240 - DNA, 16 bp, Artificial
  oligonucleotide probe
caccgacgggaaacgc

SEQ ID NO: 27241 - DNA, 16 bp, Artificial
  oligonucleotide probe
ggaagcctgcgacgga

SEQ ID NO: 27242 - DNA, 16 bp, Artificial
  oligonucleotide probe
ggaagcctgcgacgga

SEQ ID NO: 27243 - DNA, 16 bp, Artificial
  oligonucleotide probe
acgcggaagacgtggc

SEQ ID NO: 27244 - DNA, 16 bp, Artificial
  oligonucleotide probe
acgcggaagacgtggc

SEQ ID NO: 27245 - DNA, 16 bp, Artificial
  oligonucleotide probe
gcaggcagccaatggc

SEQ ID NO: 27246 - DNA, 16 bp, Artificial
  oligonucleotide probe
gcaggcagccaatggc

SEQ ID NO: 27247 - DNA, 16 bp, Artificial
  oligonucleotide probe
gtccggaagtgggcga

SEQ ID NO: 27248 - DNA, 16 bp, Artificial
  oligonucleotide probe
gtccggaagtgggcga

SEQ ID NO: 27249 - DNA, 16 bp, Artificial
  oligonucleotide probe
caccgacgggaaacgc

SEQ ID NO: 27250 - DNA, 16 bp, Artificial
  oligonucleotide probe
caccgacgggaaacgc

SEQ ID NO: 27251 - DNA, 16 bp, Artificial
  oligonucleotide probe
gcctcggagacggcag

SEQ ID NO: 27252 - DNA, 16 bp, Artificial
  oligonucleotide probe
gcctcggagacggcag

SEQ ID NO: 27253 - DNA, 16 bp, Artificial
  oligonucleotide probe
acgcgcctgacgcctc

SEQ ID NO: 27254 - DNA, 16 bp, Artificial
  oligonucleotide probe
acgcgcctgacgcctc

SEQ ID NO: 27255 - DNA, 16 bp, Artificial
  oligonucleotide probe
gacggcgagtgggcag

SEQ ID NO: 27256 - DNA, 16 bp, Artificial
  oligonucleotide probe
gacggcgagtgggcag

SEQ ID NO: 27257 - DNA, 16 bp, Artificial
  oligonucleotide probe
gcctagcgcctcgacg

SEQ ID NO: 27258 - DNA, 16 bp, Artificial
  oligonucleotide probe
gcctagcgcctcgacg

SEQ ID NO: 27259 - DNA, 16 bp, Artificial
  oligonucleotide probe
acgcgcctgacgcctc

SEQ ID NO: 27260 - DNA, 16 bp, Artificial
  oligonucleotide probe
acgcgcctgacgcctc

SEQ ID NO: 27261 - DNA, 16 bp, Artificial
  oligonucleotide probe
gcagcggagcctgagc

SEQ ID NO: 27262 - DNA, 16 bp, Artificial
  oligonucleotide probe
gcagcggagcctgagc

SEQ ID NO: 27263 - DNA, 16 bp, Artificial
  oligonucleotide probe
gacggcgagtgggcag

SEQ ID NO: 27264 - DNA, 16 bp, Artificial
  oligonucleotide probe
gacggcgagtgggcag

SEQ ID NO: 27265 - DNA, 16 bp, Artificial
  oligonucleotide probe
tggcagcgggtcgtgg

SEQ ID NO: 27266 - DNA, 16 bp, Artificial
  oligonucleotide probe
tggcagcgggtcgtgg

SEQ ID NO: 27267 - DNA, 16 bp, Artificial
  oligonucleotide probe
gtccggaagtgggcga

SEQ ID NO: 27268 - DNA, 16 bp, Artificial
  oligonucleotide probe
gtccggaagtgggcga

SEQ ID NO: 27269 - DNA, 16 bp, Artificial
  oligonucleotide probe
gacgcaggcggagggt

SEQ ID NO: 27270 - DNA, 16 bp, Artificial
  oligonucleotide probe
gacgcaggcggagggt

SEQ ID NO: 27271 - DNA, 16 bp, Artificial
  oligonucleotide probe
gacgcaggcggagggt

SEQ ID NO: 27272 - DNA, 16 bp, Artificial
  oligonucleotide probe
gacgcaggcggagggt

SEQ ID NO: 27273 - DNA, 16 bp, Artificial
  oligonucleotide probe
gtggcggaggtcggaa

SEQ ID NO: 27274 - DNA, 16 bp, Artificial
  oligonucleotide probe
gtggcggaggtcggaa

SEQ ID NO: 27275 - DNA, 16 bp, Artificial
  oligonucleotide probe
acgcgcctgacgcctc

SEQ ID NO: 27276 - DNA, 16 bp, Artificial
  oligonucleotide probe
acgcgcctgacgcctc

SEQ ID NO: 27277 - DNA, 16 bp, Artificial
  oligonucleotide probe
gacggcgagtgggcag

SEQ ID NO: 27278 - DNA, 16 bp, Artificial
  oligonucleotide probe
gacggcgagtgggcag

SEQ ID NO: 27279 - DNA, 16 bp, Artificial
  oligonucleotide probe
acgccaggcgaggtgg

SEQ ID NO: 27280 - DNA, 16 bp, Artificial
  oligonucleotide probe
acgccaggcgaggtgg

SEQ ID NO: 27281 - DNA, 16 bp, Artificial
  oligonucleotide probe
acgcggaagacgtggc

SEQ ID NO: 27282 - DNA, 16 bp, Artificial
  oligonucleotide probe
acgcggaagacgtggc

SEQ ID NO: 27283 - DNA, 16 bp, Artificial
  oligonucleotide probe
acgcgcctgacgcctc

SEQ ID NO: 27284 - DNA, 16 bp, Artificial
  oligonucleotide probe
acgcgcctgacgcctc

SEQ ID NO: 27285 - DNA, 16 bp, Artificial
  oligonucleotide probe
caggggaagggtcgga

SEQ ID NO: 27286 - DNA, 16 bp, Artificial
  oligonucleotide probe
caggggaagggtcgga

SEQ ID NO: 27287 - DNA, 16 bp, Artificial
  oligonucleotide probe
gcctcggagacggcag

SEQ ID NO: 27288 - DNA, 16 bp, Artificial
  oligonucleotide probe
gcctcggagacggcag

SEQ ID NO: 27289 - DNA, 16 bp, Artificial
  oligonucleotide probe
ggaagcctgcgacgga

SEQ ID NO: 27290 - DNA, 16 bp, Artificial
  oligonucleotide probe
ggaagcctgcgacgga

SEQ ID NO: 27291 - DNA, 16 bp, Artificial
  oligonucleotide probe
gcctcggagacggcag

SEQ ID NO: 27292 - DNA, 16 bp, Artificial
  oligonucleotide probe
gcctcggagacggcag

SEQ ID NO: 27293 - DNA, 16 bp, Artificial
  oligonucleotide probe
ggtcgacgacgccgag

SEQ ID NO: 27294 - DNA, 16 bp, Artificial
  oligonucleotide probe
ggtcgacgacgccgag

SEQ ID NO: 27295 - DNA, 16 bp, Artificial
  oligonucleotide probe
ggtcgacgacgccgag

SEQ ID NO: 27296 - DNA, 16 bp, Artificial
  oligonucleotide probe
ggtcgacgacgccgag

SEQ ID NO: 27297 - DNA, 16 bp, Artificial
  oligonucleotide probe
acgcggtccaccgtgg

SEQ ID NO: 27298 - DNA, 16 bp, Artificial
  oligonucleotide probe
acgcggtccaccgtgg

SEQ ID NO: 27299 - DNA, 16 bp, Artificial
  oligonucleotide probe
gacgcaggcggagggt

SEQ ID NO: 27300 - DNA, 16 bp, Artificial
  oligonucleotide probe
gacgcaggcggagggt

SEQ ID NO: 27301 - DNA, 16 bp, Artificial
  oligonucleotide probe
acgcgcctgacgcctc

SEQ ID NO: 27302 - DNA, 16 bp, Artificial
  oligonucleotide probe
acgcgcctgacgcctc

SEQ ID NO: 27303 - DNA, 16 bp, Artificial
  oligonucleotide probe
acgcgcctgacgcctc

SEQ ID NO: 27304 - DNA, 16 bp, Artificial
  oligonucleotide probe
acgcgcctgacgcctc

SEQ ID NO: 27305 - DNA, 16 bp, Artificial
  oligonucleotide probe
tcacgccttggccacc

SEQ ID NO: 27306 - DNA, 16 bp, Artificial
  oligonucleotide probe
tcacgccttggccacc

SEQ ID NO: 27307 - DNA, 16 bp, Artificial
  oligonucleotide probe
acgcaccagtcccgga

SEQ ID NO: 27308 - DNA, 16 bp, Artificial
  oligonucleotide probe
acgcaccagtcccgga

SEQ ID NO: 27309 - DNA, 16 bp, Artificial
  oligonucleotide probe
acgcgcctgacgcctc

SEQ ID NO: 27310 - DNA, 16 bp, Artificial
  oligonucleotide probe
acgcgcctgacgcctc

SEQ ID NO: 27311 - DNA, 16 bp, Artificial
  oligonucleotide probe
gacgcaggcggagggt

SEQ ID NO: 27312 - DNA, 16 bp, Artificial
  oligonucleotide probe
gacgcaggcggagggt

SEQ ID NO: 27313 - DNA, 16 bp, Artificial
  oligonucleotide probe
tgctgggtgcaggcga

SEQ ID NO: 27314 - DNA, 16 bp, Artificial
  oligonucleotide probe
tgctgggtgcaggcga

SEQ ID NO: 27315 - DNA, 16 bp, Artificial
  oligonucleotide probe
gcagcggagcctgagc

SEQ ID NO: 27316 - DNA, 16 bp, Artificial
  oligonucleotide probe
gcagcggagcctgagc

SEQ ID NO: 27317 - DNA, 16 bp, Artificial
  oligonucleotide probe
gacggcgagtgggcag

SEQ ID NO: 27318 - DNA, 16 bp, Artificial
  oligonucleotide probe
gacggcgagtgggcag

SEQ ID NO: 27319 - DNA, 16 bp, Artificial
  oligonucleotide probe
acgccaggcgaggtgg

SEQ ID NO: 27320 - DNA, 16 bp, Artificial
  oligonucleotide probe
acgccaggcgaggtgg

SEQ ID NO: 27321 - DNA, 16 bp, Artificial
  oligonucleotide probe
tgctgggtgcaggcga

SEQ ID NO: 27322 - DNA, 16 bp, Artificial
  oligonucleotide probe
tgctgggtgcaggcga

SEQ ID NO: 27323 - DNA, 16 bp, Artificial
  oligonucleotide probe
gtccggaagtgggcga

SEQ ID NO: 27324 - DNA, 16 bp, Artificial
  oligonucleotide probe
gtccggaagtgggcga

SEQ ID NO: 27325 - DNA, 16 bp, Artificial
  oligonucleotide probe
tggcgtgggggtccaa

SEQ ID NO: 27326 - DNA, 16 bp, Artificial
  oligonucleotide probe
tggcgtgggggtccaa

SEQ ID NO: 27327 - DNA, 16 bp, Artificial
  oligonucleotide probe
gcctagcgcctcgacg

SEQ ID NO: 27328 - DNA, 16 bp, Artificial
  oligonucleotide probe
gcctagcgcctcgacg

SEQ ID NO: 27329 - DNA, 16 bp, Artificial
  oligonucleotide probe
gcctagcgcctcgacg

SEQ ID NO: 27330 - DNA, 16 bp, Artificial
  oligonucleotide probe
gcctagcgcctcgacg

SEQ ID NO: 27331 - DNA, 16 bp, Artificial
  oligonucleotide probe
ggaagcctgcgacgga

SEQ ID NO: 27332 - DNA, 16 bp, Artificial
  oligonucleotide probe
ggaagcctgcgacgga

SEQ ID NO: 27333 - DNA, 16 bp, Artificial
  oligonucleotide probe
gacggcgagtgggcag

SEQ ID NO: 27334 - DNA, 16 bp, Artificial
  oligonucleotide probe
gacggcgagtgggcag

SEQ ID NO: 27335 - DNA, 16 bp, Artificial
  oligonucleotide probe
acgcggtccaccgtgg

SEQ ID NO: 27336 - DNA, 16 bp, Artificial
  oligonucleotide probe
acgcggtccaccgtgg

SEQ ID NO: 27337 - DNA, 16 bp, Artificial
  oligonucleotide probe
gcctcggagacggcag

SEQ ID NO: 27338 - DNA, 16 bp, Artificial
  oligonucleotide probe
gcctcggagacggcag

SEQ ID NO: 27339 - DNA, 16 bp, Artificial
  oligonucleotide probe
caccgggtggtcagcg

SEQ ID NO: 27340 - DNA, 16 bp, Artificial
  oligonucleotide probe
caccgggtggtcagcg

SEQ ID NO: 27341 - DNA, 16 bp, Artificial
  oligonucleotide probe
gcgacgagcgagccaa

SEQ ID NO: 27342 - DNA, 16 bp, Artificial
  oligonucleotide probe
gcgacgagcgagccaa

SEQ ID NO: 27343 - DNA, 16 bp, Artificial
  oligonucleotide probe
acgcaccagtcccgga

SEQ ID NO: 27344 - DNA, 16 bp, Artificial
  oligonucleotide probe
acgcaccagtcccgga

SEQ ID NO: 27345 - DNA, 16 bp, Artificial
  oligonucleotide probe
gtggcggaggtcggaa

SEQ ID NO: 27346 - DNA, 16 bp, Artificial
  oligonucleotide probe
gtggcggaggtcggaa

SEQ ID NO: 27347 - DNA, 16 bp, Artificial
  oligonucleotide probe
gcagcggagcctgagc

SEQ ID NO: 27348 - DNA, 16 bp, Artificial
  oligonucleotide probe
gcagcggagcctgagc

SEQ ID NO: 27349 - DNA, 16 bp, Artificial
  oligonucleotide probe
gtccacgctggcgacg

SEQ ID NO: 27350 - DNA, 16 bp, Artificial
  oligonucleotide probe
gtccacgctggcgacg

SEQ ID NO: 27351 - DNA, 16 bp, Artificial
  oligonucleotide probe
gcctagcgcctcgacg

SEQ ID NO: 27352 - DNA, 16 bp, Artificial
  oligonucleotide probe
gcctagcgcctcgacg

SEQ ID NO: 27353 - DNA, 16 bp, Artificial
  oligonucleotide probe
accatggcacgcgacg

SEQ ID NO: 27354 - DNA, 16 bp, Artificial
  oligonucleotide probe
accatggcacgcgacg

SEQ ID NO: 27355 - DNA, 16 bp, Artificial
  oligonucleotide probe
gtggcggaggtcggaa

SEQ ID NO: 27356 - DNA, 16 bp, Artificial
  oligonucleotide probe
gtggcggaggtcggaa

SEQ ID NO: 27357 - DNA, 16 bp, Artificial
  oligonucleotide probe
gtccgagcagcggcct

SEQ ID NO: 27358 - DNA, 16 bp, Artificial
  oligonucleotide probe
gtccgagcagcggcct

SEQ ID NO: 27359 - DNA, 16 bp, Artificial
  oligonucleotide probe
acgcggtccaccgtgg

SEQ ID NO: 27360 - DNA, 16 bp, Artificial
  oligonucleotide probe
acgcggtccaccgtgg

SEQ ID NO: 27361 - DNA, 16 bp, Artificial
  oligonucleotide probe
acgcgcctgacgcctc

SEQ ID NO: 27362 - DNA, 16 bp, Artificial
  oligonucleotide probe
acgcgcctgacgcctc

SEQ ID NO: 27363 - DNA, 16 bp, Artificial
  oligonucleotide probe
tggcgtgggggtccaa

SEQ ID NO: 27364 - DNA, 16 bp, Artificial
  oligonucleotide probe
tggcgtgggggtccaa

SEQ ID NO: 27365 - DNA, 16 bp, Artificial
  oligonucleotide probe
gggtggaacgaggcga

SEQ ID NO: 27366 - DNA, 16 bp, Artificial
  oligonucleotide probe
gggtggaacgaggcga

SEQ ID NO: 27367 - DNA, 16 bp, Artificial
  oligonucleotide probe
tcacgccttggccacc

SEQ ID NO: 27368 - DNA, 16 bp, Artificial
  oligonucleotide probe
tcacgccttggccacc

SEQ ID NO: 27369 - DNA, 16 bp, Artificial
  oligonucleotide probe
tcacgccttggccacc

SEQ ID NO: 27370 - DNA, 16 bp, Artificial
  oligonucleotide probe
tcacgccttggccacc

SEQ ID NO: 27371 - DNA, 16 bp, Artificial
  oligonucleotide probe
gacggcgagtgggcag

SEQ ID NO: 27372 - DNA, 16 bp, Artificial
  oligonucleotide probe
gacggcgagtgggcag

SEQ ID NO: 27373 - DNA, 16 bp, Artificial
  oligonucleotide probe
acgcgcctgacgcctc

SEQ ID NO: 27374 - DNA, 16 bp, Artificial
  oligonucleotide probe
acgcgcctgacgcctc

SEQ ID NO: 27375 - DNA, 16 bp, Artificial
  oligonucleotide probe
gcctcggagacggcag

SEQ ID NO: 27376 - DNA, 16 bp, Artificial
  oligonucleotide probe
gcctcggagacggcag

SEQ ID NO: 27377 - DNA, 16 bp, Artificial
  oligonucleotide probe
gcctagcgcctcgacg

SEQ ID NO: 27378 - DNA, 16 bp, Artificial
  oligonucleotide probe
gcctagcgcctcgacg

SEQ ID NO: 27379 - DNA, 16 bp, Artificial
  oligonucleotide probe
cctcagcgcggaacca

SEQ ID NO: 27380 - DNA, 16 bp, Artificial
  oligonucleotide probe
cctcagcgcggaacca

SEQ ID NO: 27381 - DNA, 16 bp, Artificial
  oligonucleotide probe
agcggtccgcgagagc

SEQ ID NO: 27382 - DNA, 16 bp, Artificial
  oligonucleotide probe
agcggtccgcgagagc

SEQ ID NO: 27383 - DNA, 16 bp, Artificial
  oligonucleotide probe
caccgggtggtcagcg

SEQ ID NO: 27384 - DNA, 16 bp, Artificial
  oligonucleotide probe
caccgggtggtcagcg

SEQ ID NO: 27385 - DNA, 16 bp, Artificial
  oligonucleotide probe
acgcggtccaccgtgg

SEQ ID NO: 27386 - DNA, 16 bp, Artificial
  oligonucleotide probe
acgcggtccaccgtgg

SEQ ID NO: 27387 - DNA, 16 bp, Artificial
  oligonucleotide probe
tggcgtgggggtccaa

SEQ ID NO: 27388 - DNA, 16 bp, Artificial
  oligonucleotide probe
tggcgtgggggtccaa

SEQ ID NO: 27389 - DNA, 16 bp, Artificial
  oligonucleotide probe
gcctagcgcctcgacg

SEQ ID NO: 27390 - DNA, 16 bp, Artificial
  oligonucleotide probe
gcctagcgcctcgacg

SEQ ID NO: 27391 - DNA, 16 bp, Artificial
  oligonucleotide probe
gacggcgagtgggcag

SEQ ID NO: 27392 - DNA, 16 bp, Artificial
  oligonucleotide probe
gacggcgagtgggcag

SEQ ID NO: 27393 - DNA, 16 bp, Artificial
  oligonucleotide probe
gtccggaagtgggcga

SEQ ID NO: 27394 - DNA, 16 bp, Artificial
  oligonucleotide probe
gtccggaagtgggcga

SEQ ID NO: 27395 - DNA, 16 bp, Artificial
  oligonucleotide probe
gcctcggagacggcag

SEQ ID NO: 27396 - DNA, 16 bp, Artificial
  oligonucleotide probe
gcctcggagacggcag

SEQ ID NO: 27397 - DNA, 16 bp, Artificial
  oligonucleotide probe
acgcggaagacgtggc

SEQ ID NO: 27398 - DNA, 16 bp, Artificial
  oligonucleotide probe
acgcggaagacgtggc

SEQ ID NO: 27399 - DNA, 16 bp, Artificial
  oligonucleotide probe
gcctagcgcctcgacg

SEQ ID NO: 27400 - DNA, 16 bp, Artificial
  oligonucleotide probe
gcctagcgcctcgacg

SEQ ID NO: 27401 - DNA, 16 bp, Artificial
  oligonucleotide probe
gcctagcgcctcgacg

SEQ ID NO: 27402 - DNA, 16 bp, Artificial
  oligonucleotide probe
gcctagcgcctcgacg

SEQ ID NO: 27403 - DNA, 16 bp, Artificial
  oligonucleotide probe
acgcgcctgacgcctc

SEQ ID NO: 27404 - DNA, 16 bp, Artificial
  oligonucleotide probe
acgcgcctgacgcctc

SEQ ID NO: 27405 - DNA, 16 bp, Artificial
  oligonucleotide probe
caccgggtggtcagcg

SEQ ID NO: 27406 - DNA, 16 bp, Artificial
  oligonucleotide probe
caccgggtggtcagcg

SEQ ID NO: 27407 - DNA, 16 bp, Artificial
  oligonucleotide probe
accatggcacgcgacg

SEQ ID NO: 27408 - DNA, 16 bp, Artificial
  oligonucleotide probe
accatggcacgcgacg

SEQ ID NO: 27409 - DNA, 16 bp, Artificial
  oligonucleotide probe
acgcggtccaccgtgg

SEQ ID NO: 27410 - DNA, 16 bp, Artificial
  oligonucleotide probe
acgcggtccaccgtgg

SEQ ID NO: 27411 - DNA, 16 bp, Artificial
  oligonucleotide probe
ggtcgacgacgccgag

SEQ ID NO: 27412 - DNA, 16 bp, Artificial
  oligonucleotide probe
ggtcgacgacgccgag

SEQ ID NO: 27413 - DNA, 16 bp, Artificial
  oligonucleotide probe
gacgcaggcggagggt

SEQ ID NO: 27414 - DNA, 16 bp, Artificial
  oligonucleotide probe
gacgcaggcggagggt

SEQ ID NO: 27415 - DNA, 16 bp, Artificial
  oligonucleotide probe
caggggaagggtcgga

SEQ ID NO: 27416 - DNA, 16 bp, Artificial
  oligonucleotide probe
caggggaagggtcgga

SEQ ID NO: 27417 - DNA, 16 bp, Artificial
  oligonucleotide probe
gacggcgagtgggcag

SEQ ID NO: 27418 - DNA, 16 bp, Artificial
  oligonucleotide probe
gacggcgagtgggcag

SEQ ID NO: 27419 - DNA, 16 bp, Artificial
  oligonucleotide probe
tcacgccttggccacc

SEQ ID NO: 27420 - DNA, 16 bp, Artificial
  oligonucleotide probe
tcacgccttggccacc

SEQ ID NO: 27421 - DNA, 16 bp, Artificial
  oligonucleotide probe
caccgggtggtcagcg

SEQ ID NO: 27422 - DNA, 16 bp, Artificial
  oligonucleotide probe
caccgggtggtcagcg

SEQ ID NO: 27423 - DNA, 16 bp, Artificial
  oligonucleotide probe
gtccacgctggcgacg

SEQ ID NO: 27424 - DNA, 16 bp, Artificial
  oligonucleotide probe
gtccacgctggcgacg

SEQ ID NO: 27425 - DNA, 16 bp, Artificial
  oligonucleotide probe
gacgcaggcggagggt

SEQ ID NO: 27426 - DNA, 16 bp, Artificial
  oligonucleotide probe
gacgcaggcggagggt

SEQ ID NO: 27427 - DNA, 16 bp, Artificial
  oligonucleotide probe
tcacgccttggccacc

SEQ ID NO: 27428 - DNA, 16 bp, Artificial
  oligonucleotide probe
tcacgccttggccacc

SEQ ID NO: 27429 - DNA, 16 bp, Artificial
  oligonucleotide probe
gcctcggagacggcag

SEQ ID NO: 27430 - DNA, 16 bp, Artificial
  oligonucleotide probe
gcctcggagacggcag

SEQ ID NO: 27431 - DNA, 16 bp, Artificial
  oligonucleotide probe
accatggcacgcgacg

SEQ ID NO: 27432 - DNA, 16 bp, Artificial
  oligonucleotide probe
accatggcacgcgacg

SEQ ID NO: 27433 - DNA, 16 bp, Artificial
  oligonucleotide probe
caccgcgaggtcacgc

SEQ ID NO: 27434 - DNA, 16 bp, Artificial
  oligonucleotide probe
caccgcgaggtcacgc

SEQ ID NO: 27435 - DNA, 16 bp, Artificial
  oligonucleotide probe
acgccaggcgaggtgg

SEQ ID NO: 27436 - DNA, 16 bp, Artificial
  oligonucleotide probe
acgccaggcgaggtgg

SEQ ID NO: 27437 - DNA, 16 bp, Artificial
  oligonucleotide probe
gcagcggagcctgagc

SEQ ID NO: 27438 - DNA, 16 bp, Artificial
  oligonucleotide probe
gcagcggagcctgagc

SEQ ID NO: 27439 - DNA, 16 bp, Artificial
  oligonucleotide probe
gcctagcgcctcgacg

SEQ ID NO: 27440 - DNA, 16 bp, Artificial
  oligonucleotide probe
gcctagcgcctcgacg

SEQ ID NO: 27441 - DNA, 16 bp, Artificial
  oligonucleotide probe
gtccgagcagcggcct

SEQ ID NO: 27442 - DNA, 16 bp, Artificial
  oligonucleotide probe
gtccgagcagcggcct

SEQ ID NO: 27443 - DNA, 16 bp, Artificial
  oligonucleotide probe
acgcaccagtcccgga

SEQ ID NO: 27444 - DNA, 16 bp, Artificial
  oligonucleotide probe
acgcaccagtcccgga

SEQ ID NO: 27445 - DNA, 16 bp, Artificial
  oligonucleotide probe
gagcgcgacacccagg

SEQ ID NO: 27446 - DNA, 16 bp, Artificial
  oligonucleotide probe
gagcgcgacacccagg

SEQ ID NO: 27447 - DNA, 16 bp, Artificial
  oligonucleotide probe
ggaagcctgcgacgga

SEQ ID NO: 27448 - DNA, 16 bp, Artificial
  oligonucleotide probe
ggaagcctgcgacgga

SEQ ID NO: 27449 - DNA, 16 bp, Artificial
  oligonucleotide probe
accatggcacgcgacg

SEQ ID NO: 27450 - DNA, 16 bp, Artificial
  oligonucleotide probe
accatggcacgcgacg

SEQ ID NO: 27451 - DNA, 16 bp, Artificial
  oligonucleotide probe
acgcggtccaccgtgg

SEQ ID NO: 27452 - DNA, 16 bp, Artificial
  oligonucleotide probe
acgcggtccaccgtgg

SEQ ID NO: 27453 - DNA, 16 bp, Artificial
  oligonucleotide probe
gacggcgagtgggcag

SEQ ID NO: 27454 - DNA, 16 bp, Artificial
  oligonucleotide probe
gacggcgagtgggcag

SEQ ID NO: 27455 - DNA, 16 bp, Artificial
  oligonucleotide probe
caccgacgggaaacgc

SEQ ID NO: 27456 - DNA, 16 bp, Artificial
  oligonucleotide probe
caccgacgggaaacgc

SEQ ID NO: 27457 - DNA, 16 bp, Artificial
  oligonucleotide probe
acgcgagcgggtgcag

SEQ ID NO: 27458 - DNA, 16 bp, Artificial
  oligonucleotide probe
acgcgagcgggtgcag

SEQ ID NO: 27459 - DNA, 16 bp, Artificial
  oligonucleotide probe
cggacaggacgctggc

SEQ ID NO: 27460 - DNA, 16 bp, Artificial
  oligonucleotide probe
cggacaggacgctggc

SEQ ID NO: 27461 - DNA, 16 bp, Artificial
  oligonucleotide probe
accatggcacgcgacg

SEQ ID NO: 27462 - DNA, 16 bp, Artificial
  oligonucleotide probe
accatggcacgcgacg

SEQ ID NO: 27463 - DNA, 16 bp, Artificial
  oligonucleotide probe
gagcgcgacacccagg

SEQ ID NO: 27464 - DNA, 16 bp, Artificial
  oligonucleotide probe
gagcgcgacacccagg

SEQ ID NO: 27465 - DNA, 16 bp, Artificial
  oligonucleotide probe
caccgacgggaaacgc

SEQ ID NO: 27466 - DNA, 16 bp, Artificial
  oligonucleotide probe
caccgacgggaaacgc

SEQ ID NO: 27467 - DNA, 16 bp, Artificial
  oligonucleotide probe
tgctgggtgcaggcga

SEQ ID NO: 27468 - DNA, 16 bp, Artificial
  oligonucleotide probe
tgctgggtgcaggcga

SEQ ID NO: 27469 - DNA, 16 bp, Artificial
  oligonucleotide probe
caccgacgggaaacgc

SEQ ID NO: 27470 - DNA, 16 bp, Artificial
  oligonucleotide probe
caccgacgggaaacgc

SEQ ID NO: 27471 - DNA, 16 bp, Artificial
  oligonucleotide probe
gcagcggagcctgagc

SEQ ID NO: 27472 - DNA, 16 bp, Artificial
  oligonucleotide probe
gcagcggagcctgagc

SEQ ID NO: 27473 - DNA, 16 bp, Artificial
  oligonucleotide probe
acgcggtccaccgtgg

SEQ ID NO: 27474 - DNA, 16 bp, Artificial
  oligonucleotide probe
acgcggtccaccgtgg

SEQ ID NO: 27475 - DNA, 16 bp, Artificial
  oligonucleotide probe
ggaagcctgcgacgga

SEQ ID NO: 27476 - DNA, 16 bp, Artificial
  oligonucleotide probe
ggaagcctgcgacgga

SEQ ID NO: 27477 - DNA, 16 bp, Artificial
  oligonucleotide probe
caccgcgaggtcacgc

SEQ ID NO: 27478 - DNA, 16 bp, Artificial
  oligonucleotide probe
caccgcgaggtcacgc

SEQ ID NO: 27479 - DNA, 16 bp, Artificial
  oligonucleotide probe
acgcgcctgacgcctc

SEQ ID NO: 27480 - DNA, 16 bp, Artificial
  oligonucleotide probe
acgcgcctgacgcctc

SEQ ID NO: 27481 - DNA, 16 bp, Artificial
  oligonucleotide probe
tgctgggtgcaggcga

SEQ ID NO: 27482 - DNA, 16 bp, Artificial
  oligonucleotide probe
tgctgggtgcaggcga

SEQ ID NO: 27483 - DNA, 16 bp, Artificial
  oligonucleotide probe
acgcggtccaccgtgg

SEQ ID NO: 27484 - DNA, 16 bp, Artificial
  oligonucleotide probe
acgcggtccaccgtgg

SEQ ID NO: 27485 - DNA, 16 bp, Artificial
  oligonucleotide probe
gacggcgagtgggcag

SEQ ID NO: 27486 - DNA, 16 bp, Artificial
  oligonucleotide probe
gacggcgagtgggcag

SEQ ID NO: 27487 - DNA, 16 bp, Artificial
  oligonucleotide probe
gcctagcgcctcgacg

SEQ ID NO: 27488 - DNA, 16 bp, Artificial
  oligonucleotide probe
gcctagcgcctcgacg

SEQ ID NO: 27489 - DNA, 16 bp, Artificial
  oligonucleotide probe
agcggtccgcgagagc

SEQ ID NO: 27490 - DNA, 16 bp, Artificial
  oligonucleotide probe
agcggtccgcgagagc

SEQ ID NO: 27491 - DNA, 16 bp, Artificial
  oligonucleotide probe
gacggcgagtgggcag

SEQ ID NO: 27492 - DNA, 16 bp, Artificial
  oligonucleotide probe
gacggcgagtgggcag

SEQ ID NO: 27493 - DNA, 16 bp, Artificial
  oligonucleotide probe
gacgcaggcggagggt

SEQ ID NO: 27494 - DNA, 16 bp, Artificial
  oligonucleotide probe
gacgcaggcggagggt

SEQ ID NO: 27495 - DNA, 16 bp, Artificial
  oligonucleotide probe
acgcaccagtcccgga

SEQ ID NO: 27496 - DNA, 16 bp, Artificial
  oligonucleotide probe
acgcaccagtcccgga

SEQ ID NO: 27497 - DNA, 16 bp, Artificial
  oligonucleotide probe
caggggaagggtcgga

SEQ ID NO: 27498 - DNA, 16 bp, Artificial
  oligonucleotide probe
caggggaagggtcgga

SEQ ID NO: 27499 - DNA, 16 bp, Artificial
  oligonucleotide probe
gcctcggagacggcag

SEQ ID NO: 27500 - DNA, 16 bp, Artificial
  oligonucleotide probe
gcctcggagacggcag

SEQ ID NO: 27501 - DNA, 16 bp, Artificial
  oligonucleotide probe
tggcgtgggggtccaa

SEQ ID NO: 27502 - DNA, 16 bp, Artificial
  oligonucleotide probe
tggcgtgggggtccaa

SEQ ID NO: 27503 - DNA, 16 bp, Artificial
  oligonucleotide probe
ggtcgacgacgccgag

SEQ ID NO: 27504 - DNA, 16 bp, Artificial
  oligonucleotide probe
ggtcgacgacgccgag

SEQ ID NO: 27505 - DNA, 16 bp, Artificial
  oligonucleotide probe
gcagcggagcctgagc

SEQ ID NO: 27506 - DNA, 16 bp, Artificial
  oligonucleotide probe
gcagcggagcctgagc

SEQ ID NO: 27507 - DNA, 16 bp, Artificial
  oligonucleotide probe
tgctgggtgcaggcga

SEQ ID NO: 27508 - DNA, 16 bp, Artificial
  oligonucleotide probe
tgctgggtgcaggcga

SEQ ID NO: 27509 - DNA, 16 bp, Artificial
  oligonucleotide probe
acgcggtccaccgtgg

SEQ ID NO: 27510 - DNA, 16 bp, Artificial
  oligonucleotide probe
acgcggtccaccgtgg

SEQ ID NO: 27511 - DNA, 16 bp, Artificial
  oligonucleotide probe
gacgcaggcggagggt

SEQ ID NO: 27512 - DNA, 16 bp, Artificial
  oligonucleotide probe
gacgcaggcggagggt

SEQ ID NO: 27513 - DNA, 16 bp, Artificial
  oligonucleotide probe
acgcggtccaccgtgg

SEQ ID NO: 27514 - DNA, 16 bp, Artificial
  oligonucleotide probe
acgcggtccaccgtgg

SEQ ID NO: 27515 - DNA, 16 bp, Artificial
  oligonucleotide probe
cggacaggacgctggc

SEQ ID NO: 27516 - DNA, 16 bp, Artificial
  oligonucleotide probe
cggacaggacgctggc

SEQ ID NO: 27517 - DNA, 16 bp, Artificial
  oligonucleotide probe
gtccgagcagcggcct

SEQ ID NO: 27518 - DNA, 16 bp, Artificial
  oligonucleotide probe
gtccgagcagcggcct

SEQ ID NO: 27519 - DNA, 16 bp, Artificial
  oligonucleotide probe
cctctggctggcccaa

SEQ ID NO: 27520 - DNA, 16 bp, Artificial
  oligonucleotide probe
cctctggctggcccaa

SEQ ID NO: 27521 - DNA, 16 bp, Artificial
  oligonucleotide probe
caggggaagggtcgga

SEQ ID NO: 27522 - DNA, 16 bp, Artificial
  oligonucleotide probe
caggggaagggtcgga

SEQ ID NO: 27523 - DNA, 16 bp, Artificial
  oligonucleotide probe
tggcgtgggggtccaa

SEQ ID NO: 27524 - DNA, 16 bp, Artificial
  oligonucleotide probe
tggcgtgggggtccaa

SEQ ID NO: 27525 - DNA, 16 bp, Artificial
  oligonucleotide probe
ggaagcctgcgacgga

SEQ ID NO: 27526 - DNA, 16 bp, Artificial
  oligonucleotide probe
ggaagcctgcgacgga

SEQ ID NO: 27527 - DNA, 16 bp, Artificial
  oligonucleotide probe
gacggcgagtgggcag

SEQ ID NO: 27528 - DNA, 16 bp, Artificial
  oligonucleotide probe
gacggcgagtgggcag

SEQ ID NO: 27529 - DNA, 16 bp, Artificial
  oligonucleotide probe
accatggcacgcgacg

SEQ ID NO: 27530 - DNA, 16 bp, Artificial
  oligonucleotide probe
accatggcacgcgacg

SEQ ID NO: 27531 - DNA, 16 bp, Artificial
  oligonucleotide probe
caggagcgggaagcga

SEQ ID NO: 27532 - DNA, 16 bp, Artificial
  oligonucleotide probe
caggagcgggaagcga

SEQ ID NO: 27533 - DNA, 16 bp, Artificial
  oligonucleotide probe
gcctcggagacggcag

SEQ ID NO: 27534 - DNA, 16 bp, Artificial
  oligonucleotide probe
gcctcggagacggcag

SEQ ID NO: 27535 - DNA, 16 bp, Artificial
  oligonucleotide probe
caccgggtggtcagcg

SEQ ID NO: 27536 - DNA, 16 bp, Artificial
  oligonucleotide probe
caccgggtggtcagcg

SEQ ID NO: 27537 - DNA, 16 bp, Artificial
  oligonucleotide probe
gcaggcagccaatggc

SEQ ID NO: 27538 - DNA, 16 bp, Artificial
  oligonucleotide probe
gcaggcagccaatggc

SEQ ID NO: 27539 - DNA, 16 bp, Artificial
  oligonucleotide probe
gacgcaggcggagggt

SEQ ID NO: 27540 - DNA, 16 bp, Artificial
  oligonucleotide probe
gacgcaggcggagggt

SEQ ID NO: 27541 - DNA, 16 bp, Artificial
  oligonucleotide probe
tggcgtgggggtccaa

SEQ ID NO: 27542 - DNA, 16 bp, Artificial
  oligonucleotide probe
tggcgtgggggtccaa

SEQ ID NO: 27543 - DNA, 16 bp, Artificial
  oligonucleotide probe
caccgacgggaaacgc

SEQ ID NO: 27544 - DNA, 16 bp, Artificial
  oligonucleotide probe
caccgacgggaaacgc

SEQ ID NO: 27545 - DNA, 16 bp, Artificial
  oligonucleotide probe
ggtcgacgacgccgag

SEQ ID NO: 27546 - DNA, 16 bp, Artificial
  oligonucleotide probe
ggtcgacgacgccgag

SEQ ID NO: 27547 - DNA, 16 bp, Artificial
  oligonucleotide probe
acgccaggcgaggtgg

SEQ ID NO: 27548 - DNA, 16 bp, Artificial
  oligonucleotide probe
acgccaggcgaggtgg

SEQ ID NO: 27549 - DNA, 16 bp, Artificial
  oligonucleotide probe
gacggcgagtgggcag

SEQ ID NO: 27550 - DNA, 16 bp, Artificial
  oligonucleotide probe
gacggcgagtgggcag

SEQ ID NO: 27551 - DNA, 16 bp, Artificial
  oligonucleotide probe
acgcggtccaccgtgg

SEQ ID NO: 27552 - DNA, 16 bp, Artificial
  oligonucleotide probe
acgcggtccaccgtgg

SEQ ID NO: 27553 - DNA, 16 bp, Artificial
  oligonucleotide probe
acgcaccagtcccgga

SEQ ID NO: 27554 - DNA, 16 bp, Artificial
  oligonucleotide probe
acgcaccagtcccgga

SEQ ID NO: 27555 - DNA, 16 bp, Artificial
  oligonucleotide probe
caccgcgaggtcacgc

SEQ ID NO: 27556 - DNA, 16 bp, Artificial
  oligonucleotide probe
caccgcgaggtcacgc

SEQ ID NO: 27557 - DNA, 16 bp, Artificial
  oligonucleotide probe
tggcgtgggggtccaa

SEQ ID NO: 27558 - DNA, 16 bp, Artificial
  oligonucleotide probe
tggcgtgggggtccaa

SEQ ID NO: 27559 - DNA, 16 bp, Artificial
  oligonucleotide probe
acgccaggcgaggtgg

SEQ ID NO: 27560 - DNA, 16 bp, Artificial
  oligonucleotide probe
acgccaggcgaggtgg

SEQ ID NO: 27561 - DNA, 16 bp, Artificial
  oligonucleotide probe
tgctgggtgcaggcga

SEQ ID NO: 27562 - DNA, 16 bp, Artificial
  oligonucleotide probe
tgctgggtgcaggcga

SEQ ID NO: 27563 - DNA, 16 bp, Artificial
  oligonucleotide probe
acgccaggcgaggtgg

SEQ ID NO: 27564 - DNA, 16 bp, Artificial
  oligonucleotide probe
acgccaggcgaggtgg

SEQ ID NO: 27565 - DNA, 16 bp, Artificial
  oligonucleotide probe
ggaagcctgcgacgga

SEQ ID NO: 27566 - DNA, 16 bp, Artificial
  oligonucleotide probe
ggaagcctgcgacgga

SEQ ID NO: 27567 - DNA, 16 bp, Artificial
  oligonucleotide probe
agcggtccgcgagagc

SEQ ID NO: 27568 - DNA, 16 bp, Artificial
  oligonucleotide probe
agcggtccgcgagagc

SEQ ID NO: 27569 - DNA, 16 bp, Artificial
  oligonucleotide probe
gacggcgagtgggcag

SEQ ID NO: 27570 - DNA, 16 bp, Artificial
  oligonucleotide probe
gacggcgagtgggcag

SEQ ID NO: 27571 - DNA, 16 bp, Artificial
  oligonucleotide probe
caccgggtggtcagcg

SEQ ID NO: 27572 - DNA, 16 bp, Artificial
  oligonucleotide probe
caccgggtggtcagcg

SEQ ID NO: 27573 - DNA, 16 bp, Artificial
  oligonucleotide probe
acgcgcctgacgcctc

SEQ ID NO: 27574 - DNA, 16 bp, Artificial
  oligonucleotide probe
acgcgcctgacgcctc

SEQ ID NO: 27575 - DNA, 16 bp, Artificial
  oligonucleotide probe
gtccggaagtgggcga

SEQ ID NO: 27576 - DNA, 16 bp, Artificial
  oligonucleotide probe
gtccggaagtgggcga

SEQ ID NO: 27577 - DNA, 16 bp, Artificial
  oligonucleotide probe
caggggaagggtcgga

SEQ ID NO: 27578 - DNA, 16 bp, Artificial
  oligonucleotide probe
caggggaagggtcgga

SEQ ID NO: 27579 - DNA, 16 bp, Artificial
  oligonucleotide probe
gacgcaggcggagggt

SEQ ID NO: 27580 - DNA, 16 bp, Artificial
  oligonucleotide probe
gacgcaggcggagggt

SEQ ID NO: 27581 - DNA, 16 bp, Artificial
  oligonucleotide probe
agcggtccgcgagagc

SEQ ID NO: 27582 - DNA, 16 bp, Artificial
  oligonucleotide probe
agcggtccgcgagagc

SEQ ID NO: 27583 - DNA, 16 bp, Artificial
  oligonucleotide probe
gcaggcagccaatggc

SEQ ID NO: 27584 - DNA, 16 bp, Artificial
  oligonucleotide probe
gcaggcagccaatggc

SEQ ID NO: 27585 - DNA, 16 bp, Artificial
  oligonucleotide probe
gcagcggagcctgagc

SEQ ID NO: 27586 - DNA, 16 bp, Artificial
  oligonucleotide probe
gcagcggagcctgagc

SEQ ID NO: 27587 - DNA, 16 bp, Artificial
  oligonucleotide probe
ggaagcctgcgacgga

SEQ ID NO: 27588 - DNA, 16 bp, Artificial
  oligonucleotide probe
ggaagcctgcgacgga

SEQ ID NO: 27589 - DNA, 16 bp, Artificial
  oligonucleotide probe
caccgacgggaaacgc

SEQ ID NO: 27590 - DNA, 16 bp, Artificial
  oligonucleotide probe
caccgacgggaaacgc

SEQ ID NO: 27591 - DNA, 16 bp, Artificial
  oligonucleotide probe
acgccaggcgaggtgg

SEQ ID NO: 27592 - DNA, 16 bp, Artificial
  oligonucleotide probe
acgccaggcgaggtgg

SEQ ID NO: 27593 - DNA, 16 bp, Artificial
  oligonucleotide probe
acgcgcctgacgcctc

SEQ ID NO: 27594 - DNA, 16 bp, Artificial
  oligonucleotide probe
acgcgcctgacgcctc

SEQ ID NO: 27595 - DNA, 16 bp, Artificial
  oligonucleotide probe
accatggcacgcgacg

SEQ ID NO: 27596 - DNA, 16 bp, Artificial
  oligonucleotide probe
accatggcacgcgacg

SEQ ID NO: 27597 - DNA, 16 bp, Artificial
  oligonucleotide probe
caccgggtggtcagcg

SEQ ID NO: 27598 - DNA, 16 bp, Artificial
  oligonucleotide probe
caccgggtggtcagcg

SEQ ID NO: 27599 - DNA, 16 bp, Artificial
  oligonucleotide probe
acgcaccagtcccgga

SEQ ID NO: 27600 - DNA, 16 bp, Artificial
  oligonucleotide probe
acgcaccagtcccgga

SEQ ID NO: 27601 - DNA, 16 bp, Artificial
  oligonucleotide probe
tggcgtgggggtccaa

SEQ ID NO: 27602 - DNA, 16 bp, Artificial
  oligonucleotide probe
tggcgtgggggtccaa

SEQ ID NO: 27603 - DNA, 16 bp, Artificial
  oligonucleotide probe
gcagcctctggccgag

SEQ ID NO: 27604 - DNA, 16 bp, Artificial
  oligonucleotide probe
gcagcctctggccgag

SEQ ID NO: 27605 - DNA, 16 bp, Artificial
  oligonucleotide probe
tggcgtgggggtccaa

SEQ ID NO: 27606 - DNA, 16 bp, Artificial
  oligonucleotide probe
tggcgtgggggtccaa

SEQ ID NO: 27607 - DNA, 16 bp, Artificial
  oligonucleotide probe
acgcaccagtcccgga

SEQ ID NO: 27608 - DNA, 16 bp, Artificial
  oligonucleotide probe
acgcaccagtcccgga

SEQ ID NO: 27609 - DNA, 16 bp, Artificial
  oligonucleotide probe
cctcagcgcggaacca

SEQ ID NO: 27610 - DNA, 16 bp, Artificial
  oligonucleotide probe
acgcgggtcaccgtcc

SEQ ID NO: 27611 - DNA, 16 bp, Artificial
  oligonucleotide probe
gcctgggtcaccacgc

SEQ ID NO: 27612 - DNA, 16 bp, Artificial
  oligonucleotide probe
acgcgagcgggtgcag

SEQ ID NO: 27613 - DNA, 16 bp, Artificial
  oligonucleotide probe
gcagcctctggccgag

SEQ ID NO: 27614 - DNA, 16 bp, Artificial
  oligonucleotide probe
cctctggctggcccaa

SEQ ID NO: 27615 - DNA, 16 bp, Artificial
  oligonucleotide probe
gcaggtggtggcgagc

SEQ ID NO: 27616 - DNA, 16 bp, Artificial
  oligonucleotide probe
gcgatggccaggtggc

SEQ ID NO: 27617 - DNA, 16 bp, Artificial
  oligonucleotide probe
gcgacgagcgagccaa

SEQ ID NO: 27618 - DNA, 16 bp, Artificial
  oligonucleotide probe
agcgccaatcacgggt

SEQ ID NO: 27619 - DNA, 16 bp, Artificial
  oligonucleotide probe
tggccaggcggagtgg

SEQ ID NO: 27620 - DNA, 16 bp, Artificial
  oligonucleotide probe
ggaaagcggcctggaa

SEQ ID NO: 27621 - DNA, 16 bp, Artificial
  oligonucleotide probe
gacggacgacgcgtgg

SEQ ID NO: 27622 - DNA, 16 bp, Artificial
  oligonucleotide probe
caggagcgggaagcga

SEQ ID NO: 27623 - DNA, 16 bp, Artificial
  oligonucleotide probe
gggtggaacgaggcga

SEQ ID NO: 27624 - DNA, 16 bp, Artificial
  oligonucleotide probe
tggcagcgggtcgtgg

SEQ ID NO: 27625 - DNA, 16 bp, Artificial
  oligonucleotide probe
gcagcaccagcgtggc

SEQ ID NO: 27626 - DNA, 16 bp, Artificial
  oligonucleotide probe
gcgaacgccctccagg

SEQ ID NO: 27627 - DNA, 16 bp, Artificial
  oligonucleotide probe
gcgaacgccctccagg

SEQ ID NO: 27628 - DNA, 16 bp, Artificial
  oligonucleotide probe
gacgagcgcaccgcag

SEQ ID NO: 27629 - DNA, 16 bp, Artificial
  oligonucleotide probe
gacgagcgcaccgcag

SEQ ID NO: 27630 - DNA, 16 bp, Artificial
  oligonucleotide probe
gtccgcaggtccgcct

SEQ ID NO: 27631 - DNA, 16 bp, Artificial
  oligonucleotide probe
gtccgcaggtccgcct

SEQ ID NO: 27632 - DNA, 16 bp, Artificial
  oligonucleotide probe
acgctgctgcgaacca

SEQ ID NO: 27633 - DNA, 16 bp, Artificial
  oligonucleotide probe
acgctgctgcgaacca

SEQ ID NO: 27634 - DNA, 16 bp, Artificial
  oligonucleotide probe
gtccccaaagcggcag

SEQ ID NO: 27635 - DNA, 16 bp, Artificial
  oligonucleotide probe
gtccccaaagcggcag

SEQ ID NO: 27636 - DNA, 16 bp, Artificial
  oligonucleotide probe
tcaccggagccttggc

SEQ ID NO: 27637 - DNA, 16 bp, Artificial
  oligonucleotide probe
tcaccggagccttggc

SEQ ID NO: 27638 - DNA, 16 bp, Artificial
  oligonucleotide probe
gagcgggtgtggagcg

SEQ ID NO: 27639 - DNA, 16 bp, Artificial
  oligonucleotide probe
gagcgggtgtggagcg

SEQ ID NO: 27640 - DNA, 16 bp, Artificial
  oligonucleotide probe
ggtcgagctggcgcag

SEQ ID NO: 27641 - DNA, 16 bp, Artificial
  oligonucleotide probe
ggtcgagctggcgcag

SEQ ID NO: 27642 - DNA, 16 bp, Artificial
  oligonucleotide probe
agcgcaggagacgcct

SEQ ID NO: 27643 - DNA, 16 bp, Artificial
  oligonucleotide probe
agcgcaggagacgcct

SEQ ID NO: 27644 - DNA, 16 bp, Artificial
  oligonucleotide probe
tcaccggagccttggc

SEQ ID NO: 27645 - DNA, 16 bp, Artificial
  oligonucleotide probe
tcaccggagccttggc

SEQ ID NO: 27646 - DNA, 16 bp, Artificial
  oligonucleotide probe
cggagacgcagggggt

SEQ ID NO: 27647 - DNA, 16 bp, Artificial
  oligonucleotide probe
cggagacgcagggggt

SEQ ID NO: 27648 - DNA, 16 bp, Artificial
  oligonucleotide probe
gtccccaaagcggcag

SEQ ID NO: 27649 - DNA, 16 bp, Artificial
  oligonucleotide probe
gtccccaaagcggcag

SEQ ID NO: 27650 - DNA, 16 bp, Artificial
  oligonucleotide probe
gcgaacgccctccagg

SEQ ID NO: 27651 - DNA, 16 bp, Artificial
  oligonucleotide probe
gcgaacgccctccagg

SEQ ID NO: 27652 - DNA, 16 bp, Artificial
  oligonucleotide probe
gtccccaaagcggcag

SEQ ID NO: 27653 - DNA, 16 bp, Artificial
  oligonucleotide probe
gtccccaaagcggcag

SEQ ID NO: 27654 - DNA, 16 bp, Artificial
  oligonucleotide probe
gtccccaaagcggcag

SEQ ID NO: 27655 - DNA, 16 bp, Artificial
  oligonucleotide probe
gtccccaaagcggcag

SEQ ID NO: 27656 - DNA, 16 bp, Artificial
  oligonucleotide probe
tcaccggagccttggc

SEQ ID NO: 27657 - DNA, 16 bp, Artificial
  oligonucleotide probe
tcaccggagccttggc

SEQ ID NO: 27658 - DNA, 16 bp, Artificial
  oligonucleotide probe
tcaccggagccttggc

SEQ ID NO: 27659 - DNA, 16 bp, Artificial
  oligonucleotide probe
tcaccggagccttggc

SEQ ID NO: 27660 - DNA, 16 bp, Artificial
  oligonucleotide probe
cggagacgcagggggt

SEQ ID NO: 27661 - DNA, 16 bp, Artificial
  oligonucleotide probe
cggagacgcagggggt

SEQ ID NO: 27662 - DNA, 16 bp, Artificial
  oligonucleotide probe
gtccgcaggtccgcct

SEQ ID NO: 27663 - DNA, 16 bp, Artificial
  oligonucleotide probe
gtccgcaggtccgcct

SEQ ID NO: 27664 - DNA, 16 bp, Artificial
  oligonucleotide probe
agcgcaggagacgcct

SEQ ID NO: 27665 - DNA, 16 bp, Artificial
  oligonucleotide probe
agcgcaggagacgcct

SEQ ID NO: 27666 - DNA, 16 bp, Artificial
  oligonucleotide probe
tcaccggagccttggc

SEQ ID NO: 27667 - DNA, 16 bp, Artificial
  oligonucleotide probe
tcaccggagccttggc

SEQ ID NO: 27668 - DNA, 16 bp, Artificial
  oligonucleotide probe
ggtcgagctggcgcag

SEQ ID NO: 27669 - DNA, 16 bp, Artificial
  oligonucleotide probe
ggtcgagctggcgcag

SEQ ID NO: 27670 - DNA, 16 bp, Artificial
  oligonucleotide probe
acgctgctgcgaacca

SEQ ID NO: 27671 - DNA, 16 bp, Artificial
  oligonucleotide probe
acgctgctgcgaacca

SEQ ID NO: 27672 - DNA, 16 bp, Artificial
  oligonucleotide probe
gtccccaaagcggcag

SEQ ID NO: 27673 - DNA, 16 bp, Artificial
  oligonucleotide probe
gtccccaaagcggcag

SEQ ID NO: 27674 - DNA, 16 bp, Artificial
  oligonucleotide probe
cggatgctgcgagcag

SEQ ID NO: 27675 - DNA, 16 bp, Artificial
  oligonucleotide probe
cggatgctgcgagcag

SEQ ID NO: 27676 - DNA, 16 bp, Artificial
  oligonucleotide probe
gtgggcctcctcccaa

SEQ ID NO: 27677 - DNA, 16 bp, Artificial
  oligonucleotide probe
gtgggcctcctcccaa

SEQ ID NO: 27678 - DNA, 16 bp, Artificial
  oligonucleotide probe
ggtcgagctggcgcag

SEQ ID NO: 27679 - DNA, 16 bp, Artificial
  oligonucleotide probe
ggtcgagctggcgcag

SEQ ID NO: 27680 - DNA, 16 bp, Artificial
  oligonucleotide probe
gtgggcctcctcccaa

SEQ ID NO: 27681 - DNA, 16 bp, Artificial
  oligonucleotide probe
gtgggcctcctcccaa

SEQ ID NO: 27682 - DNA, 16 bp, Artificial
  oligonucleotide probe
gagcgggtgtggagcg

SEQ ID NO: 27683 - DNA, 16 bp, Artificial
  oligonucleotide probe
gagcgggtgtggagcg

SEQ ID NO: 27684 - DNA, 16 bp, Artificial
  oligonucleotide probe
cggatgctgcgagcag

SEQ ID NO: 27685 - DNA, 16 bp, Artificial
  oligonucleotide probe
cggatgctgcgagcag

SEQ ID NO: 27686 - DNA, 16 bp, Artificial
  oligonucleotide probe
acgctgctgcgaacca

SEQ ID NO: 27687 - DNA, 16 bp, Artificial
  oligonucleotide probe
acgctgctgcgaacca

SEQ ID NO: 27688 - DNA, 16 bp, Artificial
  oligonucleotide probe
gtccccaaagcggcag

SEQ ID NO: 27689 - DNA, 16 bp, Artificial
  oligonucleotide probe
gtccccaaagcggcag

SEQ ID NO: 27690 - DNA, 16 bp, Artificial
  oligonucleotide probe
gtgggcctcctcccaa

SEQ ID NO: 27691 - DNA, 16 bp, Artificial
  oligonucleotide probe
gtgggcctcctcccaa

SEQ ID NO: 27692 - DNA, 16 bp, Artificial
  oligonucleotide probe
gtgggcctcctcccaa

SEQ ID NO: 27693 - DNA, 16 bp, Artificial
  oligonucleotide probe
gtgggcctcctcccaa

SEQ ID NO: 27694 - DNA, 16 bp, Artificial
  oligonucleotide probe
acgctgctgcgaacca

SEQ ID NO: 27695 - DNA, 16 bp, Artificial
  oligonucleotide probe
acgctgctgcgaacca

SEQ ID NO: 27696 - DNA, 16 bp, Artificial
  oligonucleotide probe
gtccccaaagcggcag

SEQ ID NO: 27697 - DNA, 16 bp, Artificial
  oligonucleotide probe
gtccccaaagcggcag

SEQ ID NO: 27698 - DNA, 16 bp, Artificial
  oligonucleotide probe
acgctgctgcgaacca

SEQ ID NO: 27699 - DNA, 16 bp, Artificial
  oligonucleotide probe
acgctgctgcgaacca

SEQ ID NO: 27700 - DNA, 16 bp, Artificial
  oligonucleotide probe
tcaccggagccttggc

SEQ ID NO: 27701 - DNA, 16 bp, Artificial
  oligonucleotide probe
tcaccggagccttggc

SEQ ID NO: 27702 - DNA, 16 bp, Artificial
  oligonucleotide probe
cggatgctgcgagcag

SEQ ID NO: 27703 - DNA, 16 bp, Artificial
  oligonucleotide probe
cggatgctgcgagcag

SEQ ID NO: 27704 - DNA, 16 bp, Artificial
  oligonucleotide probe
cggatgctgcgagcag

SEQ ID NO: 27705 - DNA, 16 bp, Artificial
  oligonucleotide probe
cggatgctgcgagcag

SEQ ID NO: 27706 - DNA, 16 bp, Artificial
  oligonucleotide probe
gcgaacgccctccagg

SEQ ID NO: 27707 - DNA, 16 bp, Artificial
  oligonucleotide probe
gcgaacgccctccagg

SEQ ID NO: 27708 - DNA, 16 bp, Artificial
  oligonucleotide probe
gtccccaaagcggcag

SEQ ID NO: 27709 - DNA, 16 bp, Artificial
  oligonucleotide probe
gtccccaaagcggcag

SEQ ID NO: 27710 - DNA, 16 bp, Artificial
  oligonucleotide probe
gcgaacgccctccagg

SEQ ID NO: 27711 - DNA, 16 bp, Artificial
  oligonucleotide probe
gcgaacgccctccagg

SEQ ID NO: 27712 - DNA, 16 bp, Artificial
  oligonucleotide probe
cggatgctgcgagcag

SEQ ID NO: 27713 - DNA, 16 bp, Artificial
  oligonucleotide probe
cggatgctgcgagcag

SEQ ID NO: 27714 - DNA, 16 bp, Artificial
  oligonucleotide probe
gacgagcgcaccgcag

SEQ ID NO: 27715 - DNA, 16 bp, Artificial
  oligonucleotide probe
gacgagcgcaccgcag

SEQ ID NO: 27716 - DNA, 16 bp, Artificial
  oligonucleotide probe
acgctgctgcgaacca

SEQ ID NO: 27717 - DNA, 16 bp, Artificial
  oligonucleotide probe
acgctgctgcgaacca

SEQ ID NO: 27718 - DNA, 16 bp, Artificial
  oligonucleotide probe
agcgcaggagacgcct

SEQ ID NO: 27719 - DNA, 16 bp, Artificial
  oligonucleotide probe
agcgcaggagacgcct

SEQ ID NO: 27720 - DNA, 16 bp, Artificial
  oligonucleotide probe
tcaccggagccttggc

SEQ ID NO: 27721 - DNA, 16 bp, Artificial
  oligonucleotide probe
tcaccggagccttggc

SEQ ID NO: 27722 - DNA, 16 bp, Artificial
  oligonucleotide probe
gtccgcaggtccgcct

SEQ ID NO: 27723 - DNA, 16 bp, Artificial
  oligonucleotide probe
gtccgcaggtccgcct

SEQ ID NO: 27724 - DNA, 16 bp, Artificial
  oligonucleotide probe
ggtcgagctggcgcag

SEQ ID NO: 27725 - DNA, 16 bp, Artificial
  oligonucleotide probe
ggtcgagctggcgcag

SEQ ID NO: 27726 - DNA, 16 bp, Artificial
  oligonucleotide probe
tcaccggagccttggc

SEQ ID NO: 27727 - DNA, 16 bp, Artificial
  oligonucleotide probe
tcaccggagccttggc

SEQ ID NO: 27728 - DNA, 16 bp, Artificial
  oligonucleotide probe
gagcgggtgtggagcg

SEQ ID NO: 27729 - DNA, 16 bp, Artificial
  oligonucleotide probe
gagcgggtgtggagcg

SEQ ID NO: 27730 - DNA, 16 bp, Artificial
  oligonucleotide probe
gagcgggtgtggagcg

SEQ ID NO: 27731 - DNA, 16 bp, Artificial
  oligonucleotide probe
gagcgggtgtggagcg

SEQ ID NO: 27732 - DNA, 16 bp, Artificial
  oligonucleotide probe
gcgaacgccctccagg

SEQ ID NO: 27733 - DNA, 16 bp, Artificial
  oligonucleotide probe
gcgaacgccctccagg

SEQ ID NO: 27734 - DNA, 16 bp, Artificial
  oligonucleotide probe
gacgagcgcaccgcag

SEQ ID NO: 27735 - DNA, 16 bp, Artificial
  oligonucleotide probe
gacgagcgcaccgcag

SEQ ID NO: 27736 - DNA, 16 bp, Artificial
  oligonucleotide probe
gtccccaaagcggcag

SEQ ID NO: 27737 - DNA, 16 bp, Artificial
  oligonucleotide probe
gtccccaaagcggcag

SEQ ID NO: 27738 - DNA, 16 bp, Artificial
  oligonucleotide probe
ggtcgagctggcgcag

SEQ ID NO: 27739 - DNA, 16 bp, Artificial
  oligonucleotide probe
ggtcgagctggcgcag

SEQ ID NO: 27740 - DNA, 16 bp, Artificial
  oligonucleotide probe
agcgcaggagacgcct

SEQ ID NO: 27741 - DNA, 16 bp, Artificial
  oligonucleotide probe
agcgcaggagacgcct

SEQ ID NO: 27742 - DNA, 16 bp, Artificial
  oligonucleotide probe
gacgagcgcaccgcag

SEQ ID NO: 27743 - DNA, 16 bp, Artificial
  oligonucleotide probe
gacgagcgcaccgcag

SEQ ID NO: 27744 - DNA, 16 bp, Artificial
  oligonucleotide probe
cggagacgcagggggt

SEQ ID NO: 27745 - DNA, 16 bp, Artificial
  oligonucleotide probe
cggagacgcagggggt

SEQ ID NO: 27746 - DNA, 16 bp, Artificial
  oligonucleotide probe
agcgcaggagacgcct

SEQ ID NO: 27747 - DNA, 16 bp, Artificial
  oligonucleotide probe
agcgcaggagacgcct

SEQ ID NO: 27748 - DNA, 16 bp, Artificial
  oligonucleotide probe
gagcgggtgtggagcg

SEQ ID NO: 27749 - DNA, 16 bp, Artificial
  oligonucleotide probe
gagcgggtgtggagcg

SEQ ID NO: 27750 - DNA, 16 bp, Artificial
  oligonucleotide probe
acgctgctgcgaacca

SEQ ID NO: 27751 - DNA, 16 bp, Artificial
  oligonucleotide probe
acgctgctgcgaacca

SEQ ID NO: 27752 - DNA, 16 bp, Artificial
  oligonucleotide probe
gtgggcctcctcccaa

SEQ ID NO: 27753 - DNA, 16 bp, Artificial
  oligonucleotide probe
gtgggcctcctcccaa

SEQ ID NO: 27754 - DNA, 16 bp, Artificial
  oligonucleotide probe
gacgagcgcaccgcag

SEQ ID NO: 27755 - DNA, 16 bp, Artificial
  oligonucleotide probe
gacgagcgcaccgcag

SEQ ID NO: 27756 - DNA, 16 bp, Artificial
  oligonucleotide probe
acgctgctgcgaacca

SEQ ID NO: 27757 - DNA, 16 bp, Artificial
  oligonucleotide probe
acgctgctgcgaacca

SEQ ID NO: 27758 - DNA, 16 bp, Artificial
  oligonucleotide probe
cggagacgcagggggt

SEQ ID NO: 27759 - DNA, 16 bp, Artificial
  oligonucleotide probe
cggagacgcagggggt

SEQ ID NO: 27760 - DNA, 16 bp, Artificial
  oligonucleotide probe
cggatgctgcgagcag

SEQ ID NO: 27761 - DNA, 16 bp, Artificial
  oligonucleotide probe
cggatgctgcgagcag

SEQ ID NO: 27762 - DNA, 16 bp, Artificial
  oligonucleotide probe
gtccccaaagcggcag

SEQ ID NO: 27763 - DNA, 16 bp, Artificial
  oligonucleotide probe
gtccccaaagcggcag

SEQ ID NO: 27764 - DNA, 16 bp, Artificial
  oligonucleotide probe
cggatgctgcgagcag

SEQ ID NO: 27765 - DNA, 16 bp, Artificial
  oligonucleotide probe
cggatgctgcgagcag

SEQ ID NO: 27766 - DNA, 16 bp, Artificial
  oligonucleotide probe
gacgagcgcaccgcag

SEQ ID NO: 27767 - DNA, 16 bp, Artificial
  oligonucleotide probe
gacgagcgcaccgcag

SEQ ID NO: 27768 - DNA, 16 bp, Artificial
  oligonucleotide probe
gcgaacgccctccagg

SEQ ID NO: 27769 - DNA, 16 bp, Artificial
  oligonucleotide probe
gcgaacgccctccagg

SEQ ID NO: 27770 - DNA, 16 bp, Artificial
  oligonucleotide probe
gtccccaaagcggcag

SEQ ID NO: 27771 - DNA, 16 bp, Artificial
  oligonucleotide probe
gtccccaaagcggcag

SEQ ID NO: 27772 - DNA, 16 bp, Artificial
  oligonucleotide probe
gagcgggtgtggagcg

SEQ ID NO: 27773 - DNA, 16 bp, Artificial
  oligonucleotide probe
gagcgggtgtggagcg

SEQ ID NO: 27774 - DNA, 16 bp, Artificial
  oligonucleotide probe
agcgcaggagacgcct

SEQ ID NO: 27775 - DNA, 16 bp, Artificial
  oligonucleotide probe
agcgcaggagacgcct

SEQ ID NO: 27776 - DNA, 16 bp, Artificial
  oligonucleotide probe
gcgaacgccctccagg

SEQ ID NO: 27777 - DNA, 16 bp, Artificial
  oligonucleotide probe
gcgaacgccctccagg

SEQ ID NO: 27778 - DNA, 16 bp, Artificial
  oligonucleotide probe
ggtcgagctggcgcag

SEQ ID NO: 27779 - DNA, 16 bp, Artificial
  oligonucleotide probe
ggtcgagctggcgcag

SEQ ID NO: 27780 - DNA, 16 bp, Artificial
  oligonucleotide probe
gtccgcaggtccgcct

SEQ ID NO: 27781 - DNA, 16 bp, Artificial
  oligonucleotide probe
gtccgcaggtccgcct

SEQ ID NO: 27782 - DNA, 16 bp, Artificial
  oligonucleotide probe
gcgaacgccctccagg

SEQ ID NO: 27783 - DNA, 16 bp, Artificial
  oligonucleotide probe
gcgaacgccctccagg

SEQ ID NO: 27784 - DNA, 16 bp, Artificial
  oligonucleotide probe
acgctgctgcgaacca

SEQ ID NO: 27785 - DNA, 16 bp, Artificial
  oligonucleotide probe
acgctgctgcgaacca

SEQ ID NO: 27786 - DNA, 16 bp, Artificial
  oligonucleotide probe
gcgaacgccctccagg

SEQ ID NO: 27787 - DNA, 16 bp, Artificial
  oligonucleotide probe
gcgaacgccctccagg

SEQ ID NO: 27788 - DNA, 16 bp, Artificial
  oligonucleotide probe
tcaccggagccttggc

SEQ ID NO: 27789 - DNA, 16 bp, Artificial
  oligonucleotide probe
tcaccggagccttggc

SEQ ID NO: 27790 - DNA, 16 bp, Artificial
  oligonucleotide probe
ggtcgagctggcgcag

SEQ ID NO: 27791 - DNA, 16 bp, Artificial
  oligonucleotide probe
ggtcgagctggcgcag

SEQ ID NO: 27792 - DNA, 16 bp, Artificial
  oligonucleotide probe
gagcgggtgtggagcg

SEQ ID NO: 27793 - DNA, 16 bp, Artificial
  oligonucleotide probe
gagcgggtgtggagcg

SEQ ID NO: 27794 - DNA, 16 bp, Artificial
  oligonucleotide probe
ggtcgagctggcgcag

SEQ ID NO: 27795 - DNA, 16 bp, Artificial
  oligonucleotide probe
ggtcgagctggcgcag

SEQ ID NO: 27796 - DNA, 16 bp, Artificial
  oligonucleotide probe
gcgaacgccctccagg

SEQ ID NO: 27797 - DNA, 16 bp, Artificial
  oligonucleotide probe
gcgaacgccctccagg

SEQ ID NO: 27798 - DNA, 16 bp, Artificial
  oligonucleotide probe
agcgcaggagacgcct

SEQ ID NO: 27799 - DNA, 16 bp, Artificial
  oligonucleotide probe
agcgcaggagacgcct

SEQ ID NO: 27800 - DNA, 16 bp, Artificial
  oligonucleotide probe
ggtcgagctggcgcag

SEQ ID NO: 27801 - DNA, 16 bp, Artificial
  oligonucleotide probe
ggtcgagctggcgcag

SEQ ID NO: 27802 - DNA, 16 bp, Artificial
  oligonucleotide probe
gagcgggtgtggagcg

SEQ ID NO: 27803 - DNA, 16 bp, Artificial
  oligonucleotide probe
gagcgggtgtggagcg

SEQ ID NO: 27804 - DNA, 16 bp, Artificial
  oligonucleotide probe
gtccgcaggtccgcct

SEQ ID NO: 27805 - DNA, 16 bp, Artificial
  oligonucleotide probe
gtccgcaggtccgcct

SEQ ID NO: 27806 - DNA, 16 bp, Artificial
  oligonucleotide probe
acgctgctgcgaacca

SEQ ID NO: 27807 - DNA, 16 bp, Artificial
  oligonucleotide probe
acgctgctgcgaacca

SEQ ID NO: 27808 - DNA, 16 bp, Artificial
  oligonucleotide probe
gtgggcctcctcccaa

SEQ ID NO: 27809 - DNA, 16 bp, Artificial
  oligonucleotide probe
gtgggcctcctcccaa

SEQ ID NO: 27810 - DNA, 16 bp, Artificial
  oligonucleotide probe
gacgagcgcaccgcag

SEQ ID NO: 27811 - DNA, 16 bp, Artificial
  oligonucleotide probe
gacgagcgcaccgcag

SEQ ID NO: 27812 - DNA, 16 bp, Artificial
  oligonucleotide probe
acgctgctgcgaacca

SEQ ID NO: 27813 - DNA, 16 bp, Artificial
  oligonucleotide probe
acgctgctgcgaacca

SEQ ID NO: 27814 - DNA, 16 bp, Artificial
  oligonucleotide probe
gtccgcaggtccgcct

SEQ ID NO: 27815 - DNA, 16 bp, Artificial
  oligonucleotide probe
gtccgcaggtccgcct

SEQ ID NO: 27816 - DNA, 16 bp, Artificial
  oligonucleotide probe
cggagacgcagggggt

SEQ ID NO: 27817 - DNA, 16 bp, Artificial
  oligonucleotide probe
cggagacgcagggggt

SEQ ID NO: 27818 - DNA, 16 bp, Artificial
  oligonucleotide probe
tcaccggagccttggc

SEQ ID NO: 27819 - DNA, 16 bp, Artificial
  oligonucleotide probe
tcaccggagccttggc

SEQ ID NO: 27820 - DNA, 16 bp, Artificial
  oligonucleotide probe
cggatgctgcgagcag

SEQ ID NO: 27821 - DNA, 16 bp, Artificial
  oligonucleotide probe
cggatgctgcgagcag

SEQ ID NO: 27822 - DNA, 16 bp, Artificial
  oligonucleotide probe
gtccgcaggtccgcct

SEQ ID NO: 27823 - DNA, 16 bp, Artificial
  oligonucleotide probe
gtccgcaggtccgcct

SEQ ID NO: 27824 - DNA, 16 bp, Artificial
  oligonucleotide probe
acgctgctgcgaacca

SEQ ID NO: 27825 - DNA, 16 bp, Artificial
  oligonucleotide probe
acgctgctgcgaacca

SEQ ID NO: 27826 - DNA, 16 bp, Artificial
  oligonucleotide probe
gtgggcctcctcccaa

SEQ ID NO: 27827 - DNA, 16 bp, Artificial
  oligonucleotide probe
gtgggcctcctcccaa

SEQ ID NO: 27828 - DNA, 16 bp, Artificial
  oligonucleotide probe
gtccccaaagcggcag

SEQ ID NO: 27829 - DNA, 16 bp, Artificial
  oligonucleotide probe
gtccccaaagcggcag

SEQ ID NO: 27830 - DNA, 16 bp, Artificial
  oligonucleotide probe
ggtcgagctggcgcag

SEQ ID NO: 27831 - DNA, 16 bp, Artificial
  oligonucleotide probe
ggtcgagctggcgcag

SEQ ID NO: 27832 - DNA, 16 bp, Artificial
  oligonucleotide probe
ggtcgagctggcgcag

SEQ ID NO: 27833 - DNA, 16 bp, Artificial
  oligonucleotide probe
ggtcgagctggcgcag

SEQ ID NO: 27834 - DNA, 16 bp, Artificial
  oligonucleotide probe
acgctgctgcgaacca

SEQ ID NO: 27835 - DNA, 16 bp, Artificial
  oligonucleotide probe
acgctgctgcgaacca

SEQ ID NO: 27836 - DNA, 16 bp, Artificial
  oligonucleotide probe
acgctgctgcgaacca

SEQ ID NO: 27837 - DNA, 16 bp, Artificial
  oligonucleotide probe
acgctgctgcgaacca

SEQ ID NO: 27838 - DNA, 16 bp, Artificial
  oligonucleotide probe
gcgaacgccctccagg

SEQ ID NO: 27839 - DNA, 16 bp, Artificial
  oligonucleotide probe
gcgaacgccctccagg

SEQ ID NO: 27840 - DNA, 16 bp, Artificial
  oligonucleotide probe
tcaccggagccttggc

SEQ ID NO: 27841 - DNA, 16 bp, Artificial
  oligonucleotide probe
tcaccggagccttggc

SEQ ID NO: 27842 - DNA, 16 bp, Artificial
  oligonucleotide probe
acgctgctgcgaacca

SEQ ID NO: 27843 - DNA, 16 bp, Artificial
  oligonucleotide probe
acgctgctgcgaacca

SEQ ID NO: 27844 - DNA, 16 bp, Artificial
  oligonucleotide probe
acgctgctgcgaacca

SEQ ID NO: 27845 - DNA, 16 bp, Artificial
  oligonucleotide probe
acgctgctgcgaacca

SEQ ID NO: 27846 - DNA, 16 bp, Artificial
  oligonucleotide probe
gtccccaaagcggcag

SEQ ID NO: 27847 - DNA, 16 bp, Artificial
  oligonucleotide probe
gtccccaaagcggcag

SEQ ID NO: 27848 - DNA, 16 bp, Artificial
  oligonucleotide probe
ggtcgagctggcgcag

SEQ ID NO: 27849 - DNA, 16 bp, Artificial
  oligonucleotide probe
ggtcgagctggcgcag

SEQ ID NO: 27850 - DNA, 16 bp, Artificial
  oligonucleotide probe
agcgcaggagacgcct

SEQ ID NO: 27851 - DNA, 16 bp, Artificial
  oligonucleotide probe
agcgcaggagacgcct

SEQ ID NO: 27852 - DNA, 16 bp, Artificial
  oligonucleotide probe
gcgaacgccctccagg

SEQ ID NO: 27853 - DNA, 16 bp, Artificial
  oligonucleotide probe
gcgaacgccctccagg

SEQ ID NO: 27854 - DNA, 16 bp, Artificial
  oligonucleotide probe
gcgaacgccctccagg

SEQ ID NO: 27855 - DNA, 16 bp, Artificial
  oligonucleotide probe
gcgaacgccctccagg

SEQ ID NO: 27856 - DNA, 16 bp, Artificial
  oligonucleotide probe
gtccccaaagcggcag

SEQ ID NO: 27857 - DNA, 16 bp, Artificial
  oligonucleotide probe
gtccccaaagcggcag

SEQ ID NO: 27858 - DNA, 16 bp, Artificial
  oligonucleotide probe
gcgaacgccctccagg

SEQ ID NO: 27859 - DNA, 16 bp, Artificial
  oligonucleotide probe
gcgaacgccctccagg

SEQ ID NO: 27860 - DNA, 16 bp, Artificial
  oligonucleotide probe
cggagacgcagggggt

SEQ ID NO: 27861 - DNA, 16 bp, Artificial
  oligonucleotide probe
cggagacgcagggggt

SEQ ID NO: 27862 - DNA, 16 bp, Artificial
  oligonucleotide probe
cggagacgcagggggt

SEQ ID NO: 27863 - DNA, 16 bp, Artificial
  oligonucleotide probe
cggagacgcagggggt

SEQ ID NO: 27864 - DNA, 16 bp, Artificial
  oligonucleotide probe
cggagacgcagggggt

SEQ ID NO: 27865 - DNA, 16 bp, Artificial
  oligonucleotide probe
cggagacgcagggggt

SEQ ID NO: 27866 - DNA, 16 bp, Artificial
  oligonucleotide probe
gtccccaaagcggcag

SEQ ID NO: 27867 - DNA, 16 bp, Artificial
  oligonucleotide probe
gtccccaaagcggcag

SEQ ID NO: 27868 - DNA, 16 bp, Artificial
  oligonucleotide probe
gtccccaaagcggcag

SEQ ID NO: 27869 - DNA, 16 bp, Artificial
  oligonucleotide probe
gtccccaaagcggcag

SEQ ID NO: 27870 - DNA, 16 bp, Artificial
  oligonucleotide probe
ggtcgagctggcgcag

SEQ ID NO: 27871 - DNA, 16 bp, Artificial
  oligonucleotide probe
ggtcgagctggcgcag

SEQ ID NO: 27872 - DNA, 16 bp, Artificial
  oligonucleotide probe
gtccgcaggtccgcct

SEQ ID NO: 27873 - DNA, 16 bp, Artificial
  oligonucleotide probe
gtccgcaggtccgcct

SEQ ID NO: 27874 - DNA, 16 bp, Artificial
  oligonucleotide probe
gtccgcaggtccgcct

SEQ ID NO: 27875 - DNA, 16 bp, Artificial
  oligonucleotide probe
gtccgcaggtccgcct

SEQ ID NO: 27876 - DNA, 16 bp, Artificial
  oligonucleotide probe
gtccgcaggtccgcct

SEQ ID NO: 27877 - DNA, 16 bp, Artificial
  oligonucleotide probe
gtccgcaggtccgcct

SEQ ID NO: 27878 - DNA, 16 bp, Artificial
  oligonucleotide probe
gcgaacgccctccagg

SEQ ID NO: 27879 - DNA, 16 bp, Artificial
  oligonucleotide probe
gcgaacgccctccagg

SEQ ID NO: 27880 - DNA, 16 bp, Artificial
  oligonucleotide probe
agcgcaggagacgcct

SEQ ID NO: 27881 - DNA, 16 bp, Artificial
  oligonucleotide probe
agcgcaggagacgcct

SEQ ID NO: 27882 - DNA, 16 bp, Artificial
  oligonucleotide probe
ggtcgagctggcgcag

SEQ ID NO: 27883 - DNA, 16 bp, Artificial
  oligonucleotide probe
ggtcgagctggcgcag

SEQ ID NO: 27884 - DNA, 16 bp, Artificial
  oligonucleotide probe
gacgagcgcaccgcag

SEQ ID NO: 27885 - DNA, 16 bp, Artificial
  oligonucleotide probe
gacgagcgcaccgcag

SEQ ID NO: 27886 - DNA, 16 bp, Artificial
  oligonucleotide probe
acgctgctgcgaacca

SEQ ID NO: 27887 - DNA, 16 bp, Artificial
  oligonucleotide probe
acgctgctgcgaacca

SEQ ID NO: 27888 - DNA, 16 bp, Artificial
  oligonucleotide probe
cggatgctgcgagcag

SEQ ID NO: 27889 - DNA, 16 bp, Artificial
  oligonucleotide probe
cggatgctgcgagcag

SEQ ID NO: 27890 - DNA, 16 bp, Artificial
  oligonucleotide probe
cggagacgcagggggt

SEQ ID NO: 27891 - DNA, 16 bp, Artificial
  oligonucleotide probe
cggagacgcagggggt

SEQ ID NO: 27892 - DNA, 16 bp, Artificial
  oligonucleotide probe
ggtcgagctggcgcag

SEQ ID NO: 27893 - DNA, 16 bp, Artificial
  oligonucleotide probe
ggtcgagctggcgcag

SEQ ID NO: 27894 - DNA, 16 bp, Artificial
  oligonucleotide probe
cggagacgcagggggt

SEQ ID NO: 27895 - DNA, 16 bp, Artificial
  oligonucleotide probe
cggagacgcagggggt

SEQ ID NO: 27896 - DNA, 16 bp, Artificial
  oligonucleotide probe
cggagacgcagggggt

SEQ ID NO: 27897 - DNA, 16 bp, Artificial
  oligonucleotide probe
cggagacgcagggggt

SEQ ID NO: 27898 - DNA, 16 bp, Artificial
  oligonucleotide probe
gtgggcctcctcccaa

SEQ ID NO: 27899 - DNA, 16 bp, Artificial
  oligonucleotide probe
gtgggcctcctcccaa

SEQ ID NO: 27900 - DNA, 16 bp, Artificial
  oligonucleotide probe
gtgggcctcctcccaa

SEQ ID NO: 27901 - DNA, 16 bp, Artificial
  oligonucleotide probe
gtgggcctcctcccaa

SEQ ID NO: 27902 - DNA, 16 bp, Artificial
  oligonucleotide probe
gcgaacgccctccagg

SEQ ID NO: 27903 - DNA, 16 bp, Artificial
  oligonucleotide probe
gcgaacgccctccagg

SEQ ID NO: 27904 - DNA, 16 bp, Artificial
  oligonucleotide probe
gcgaacgccctccagg

SEQ ID NO: 27905 - DNA, 16 bp, Artificial
  oligonucleotide probe
gcgaacgccctccagg

SEQ ID NO: 27906 - DNA, 16 bp, Artificial
  oligonucleotide probe
tcaccggagccttggc

SEQ ID NO: 27907 - DNA, 16 bp, Artificial
  oligonucleotide probe
tcaccggagccttggc

SEQ ID NO: 27908 - DNA, 16 bp, Artificial
  oligonucleotide probe
ggtcgagctggcgcag

SEQ ID NO: 27909 - DNA, 16 bp, Artificial
  oligonucleotide probe
ggtcgagctggcgcag

SEQ ID NO: 27910 - DNA, 16 bp, Artificial
  oligonucleotide probe
agcgcaggagacgcct

SEQ ID NO: 27911 - DNA, 16 bp, Artificial
  oligonucleotide probe
agcgcaggagacgcct

SEQ ID NO: 27912 - DNA, 16 bp, Artificial
  oligonucleotide probe
cggagacgcagggggt

SEQ ID NO: 27913 - DNA, 16 bp, Artificial
  oligonucleotide probe
cggagacgcagggggt

SEQ ID NO: 27914 - DNA, 16 bp, Artificial
  oligonucleotide probe
cggatgctgcgagcag

SEQ ID NO: 27915 - DNA, 16 bp, Artificial
  oligonucleotide probe
cggatgctgcgagcag

SEQ ID NO: 27916 - DNA, 16 bp, Artificial
  oligonucleotide probe
cggagacgcagggggt

SEQ ID NO: 27917 - DNA, 16 bp, Artificial
  oligonucleotide probe
cggagacgcagggggt

SEQ ID NO: 27918 - DNA, 16 bp, Artificial
  oligonucleotide probe
agcgcaggagacgcct

SEQ ID NO: 27919 - DNA, 16 bp, Artificial
  oligonucleotide probe
agcgcaggagacgcct

SEQ ID NO: 27920 - DNA, 16 bp, Artificial
  oligonucleotide probe
gtccccaaagcggcag

SEQ ID NO: 27921 - DNA, 16 bp, Artificial
  oligonucleotide probe
gtccccaaagcggcag

SEQ ID NO: 27922 - DNA, 16 bp, Artificial
  oligonucleotide probe
gtgggcctcctcccaa

SEQ ID NO: 27923 - DNA, 16 bp, Artificial
  oligonucleotide probe
gtgggcctcctcccaa

SEQ ID NO: 27924 - DNA, 16 bp, Artificial
  oligonucleotide probe
gcgaacgccctccagg

SEQ ID NO: 27925 - DNA, 16 bp, Artificial
  oligonucleotide probe
gcgaacgccctccagg

SEQ ID NO: 27926 - DNA, 16 bp, Artificial
  oligonucleotide probe
gagcgggtgtggagcg

SEQ ID NO: 27927 - DNA, 16 bp, Artificial
  oligonucleotide probe
gagcgggtgtggagcg

SEQ ID NO: 27928 - DNA, 16 bp, Artificial
  oligonucleotide probe
gtgggcctcctcccaa

SEQ ID NO: 27929 - DNA, 16 bp, Artificial
  oligonucleotide probe
gtgggcctcctcccaa

SEQ ID NO: 27930 - DNA, 16 bp, Artificial
  oligonucleotide probe
ggtcgagctggcgcag

SEQ ID NO: 27931 - DNA, 16 bp, Artificial
  oligonucleotide probe
ggtcgagctggcgcag

SEQ ID NO: 27932 - DNA, 16 bp, Artificial
  oligonucleotide probe
gtccgcaggtccgcct

SEQ ID NO: 27933 - DNA, 16 bp, Artificial
  oligonucleotide probe
gtccgcaggtccgcct

SEQ ID NO: 27934 - DNA, 16 bp, Artificial
  oligonucleotide probe
ggtcgagctggcgcag

SEQ ID NO: 27935 - DNA, 16 bp, Artificial
  oligonucleotide probe
ggtcgagctggcgcag

SEQ ID NO: 27936 - DNA, 16 bp, Artificial
  oligonucleotide probe
gtccgcaggtccgcct

SEQ ID NO: 27937 - DNA, 16 bp, Artificial
  oligonucleotide probe
gtccgcaggtccgcct

SEQ ID NO: 27938 - DNA, 16 bp, Artificial
  oligonucleotide probe
gacgagcgcaccgcag

SEQ ID NO: 27939 - DNA, 16 bp, Artificial
  oligonucleotide probe
gacgagcgcaccgcag

SEQ ID NO: 27940 - DNA, 16 bp, Artificial
  oligonucleotide probe
agcgcaggagacgcct

SEQ ID NO: 27941 - DNA, 16 bp, Artificial
  oligonucleotide probe
agcgcaggagacgcct

SEQ ID NO: 27942 - DNA, 16 bp, Artificial
  oligonucleotide probe
gtgggcctcctcccaa

SEQ ID NO: 27943 - DNA, 16 bp, Artificial
  oligonucleotide probe
gtgggcctcctcccaa

SEQ ID NO: 27944 - DNA, 16 bp, Artificial
  oligonucleotide probe
gacgagcgcaccgcag

SEQ ID NO: 27945 - DNA, 16 bp, Artificial
  oligonucleotide probe
gacgagcgcaccgcag

SEQ ID NO: 27946 - DNA, 16 bp, Artificial
  oligonucleotide probe
cggatgctgcgagcag

SEQ ID NO: 27947 - DNA, 16 bp, Artificial
  oligonucleotide probe
cggatgctgcgagcag

SEQ ID NO: 27948 - DNA, 16 bp, Artificial
  oligonucleotide probe
agcgcaggagacgcct

SEQ ID NO: 27949 - DNA, 16 bp, Artificial
  oligonucleotide probe
agcgcaggagacgcct

SEQ ID NO: 27950 - DNA, 16 bp, Artificial
  oligonucleotide probe
gacgagcgcaccgcag

SEQ ID NO: 27951 - DNA, 16 bp, Artificial
  oligonucleotide probe
gacgagcgcaccgcag

SEQ ID NO: 27952 - DNA, 16 bp, Artificial
  oligonucleotide probe
cggagacgcagggggt

SEQ ID NO: 27953 - DNA, 16 bp, Artificial
  oligonucleotide probe
cggagacgcagggggt

SEQ ID NO: 27954 - DNA, 16 bp, Artificial
  oligonucleotide probe
gagcgggtgtggagcg

SEQ ID NO: 27955 - DNA, 16 bp, Artificial
  oligonucleotide probe
gagcgggtgtggagcg

SEQ ID NO: 27956 - DNA, 16 bp, Artificial
  oligonucleotide probe
gtccgcaggtccgcct

SEQ ID NO: 27957 - DNA, 16 bp, Artificial
  oligonucleotide probe
gtccgcaggtccgcct

SEQ ID NO: 27958 - DNA, 16 bp, Artificial
  oligonucleotide probe
gacgagcgcaccgcag

SEQ ID NO: 27959 - DNA, 16 bp, Artificial
  oligonucleotide probe
gacgagcgcaccgcag

SEQ ID NO: 27960 - DNA, 16 bp, Artificial
  oligonucleotide probe
gcgaacgccctccagg

SEQ ID NO: 27961 - DNA, 16 bp, Artificial
  oligonucleotide probe
gcgaacgccctccagg

SEQ ID NO: 27962 - DNA, 16 bp, Artificial
  oligonucleotide probe
ggtcgagctggcgcag

SEQ ID NO: 27963 - DNA, 16 bp, Artificial
  oligonucleotide probe
ggtcgagctggcgcag

SEQ ID NO: 27964 - DNA, 16 bp, Artificial
  oligonucleotide probe
agcgcaggagacgcct

SEQ ID NO: 27965 - DNA, 16 bp, Artificial
  oligonucleotide probe
agcgcaggagacgcct

SEQ ID NO: 27966 - DNA, 16 bp, Artificial
  oligonucleotide probe
gcgaacgccctccagg

SEQ ID NO: 27967 - DNA, 16 bp, Artificial
  oligonucleotide probe
gcgaacgccctccagg

SEQ ID NO: 27968 - DNA, 16 bp, Artificial
  oligonucleotide probe
ggtcgagctggcgcag

SEQ ID NO: 27969 - DNA, 16 bp, Artificial
  oligonucleotide probe
ggtcgagctggcgcag

SEQ ID NO: 27970 - DNA, 16 bp, Artificial
  oligonucleotide probe
tcaccggagccttggc

SEQ ID NO: 27971 - DNA, 16 bp, Artificial
  oligonucleotide probe
tcaccggagccttggc

SEQ ID NO: 27972 - DNA, 16 bp, Artificial
  oligonucleotide probe
ggtcgagctggcgcag

SEQ ID NO: 27973 - DNA, 16 bp, Artificial
  oligonucleotide probe
ggtcgagctggcgcag

SEQ ID NO: 27974 - DNA, 16 bp, Artificial
  oligonucleotide probe
ggtcgagctggcgcag

SEQ ID NO: 27975 - DNA, 16 bp, Artificial
  oligonucleotide probe
ggtcgagctggcgcag

SEQ ID NO: 27976 - DNA, 16 bp, Artificial
  oligonucleotide probe
tcaccggagccttggc

SEQ ID NO: 27977 - DNA, 16 bp, Artificial
  oligonucleotide probe
tcaccggagccttggc

SEQ ID NO: 27978 - DNA, 16 bp, Artificial
  oligonucleotide probe
cggatgctgcgagcag

SEQ ID NO: 27979 - DNA, 16 bp, Artificial
  oligonucleotide probe
cggatgctgcgagcag

SEQ ID NO: 27980 - DNA, 16 bp, Artificial
  oligonucleotide probe
acgctgctgcgaacca

SEQ ID NO: 27981 - DNA, 16 bp, Artificial
  oligonucleotide probe
acgctgctgcgaacca

SEQ ID NO: 27982 - DNA, 16 bp, Artificial
  oligonucleotide probe
gtccccaaagcggcag

SEQ ID NO: 27983 - DNA, 16 bp, Artificial
  oligonucleotide probe
gtccccaaagcggcag

SEQ ID NO: 27984 - DNA, 16 bp, Artificial
  oligonucleotide probe
gcgaacgccctccagg

SEQ ID NO: 27985 - DNA, 16 bp, Artificial
  oligonucleotide probe
gcgaacgccctccagg

SEQ ID NO: 27986 - DNA, 16 bp, Artificial
  oligonucleotide probe
acgctgctgcgaacca

SEQ ID NO: 27987 - DNA, 16 bp, Artificial
  oligonucleotide probe
acgctgctgcgaacca

SEQ ID NO: 27988 - DNA, 16 bp, Artificial
  oligonucleotide probe
ggtcgagctggcgcag

SEQ ID NO: 27989 - DNA, 16 bp, Artificial
  oligonucleotide probe
ggtcgagctggcgcag

SEQ ID NO: 27990 - DNA, 16 bp, Artificial
  oligonucleotide probe
ggtcgagctggcgcag

SEQ ID NO: 27991 - DNA, 16 bp, Artificial
  oligonucleotide probe
ggtcgagctggcgcag

SEQ ID NO: 27992 - DNA, 16 bp, Artificial
  oligonucleotide probe
gtccgcaggtccgcct

SEQ ID NO: 27993 - DNA, 16 bp, Artificial
  oligonucleotide probe
gtccgcaggtccgcct

SEQ ID NO: 27994 - DNA, 16 bp, Artificial
  oligonucleotide probe
acgctgctgcgaacca

SEQ ID NO: 27995 - DNA, 16 bp, Artificial
  oligonucleotide probe
acgctgctgcgaacca

SEQ ID NO: 27996 - DNA, 16 bp, Artificial
  oligonucleotide probe
acgctgctgcgaacca

SEQ ID NO: 27997 - DNA, 16 bp, Artificial
  oligonucleotide probe
acgctgctgcgaacca

SEQ ID NO: 27998 - DNA, 16 bp, Artificial
  oligonucleotide probe
gtgggcctcctcccaa

SEQ ID NO: 27999 - DNA, 16 bp, Artificial
  oligonucleotide probe
gtgggcctcctcccaa

SEQ ID NO: 28000 - DNA, 16 bp, Artificial
  oligonucleotide probe
gtccgcaggtccgcct

SEQ ID NO: 28001 - DNA, 16 bp, Artificial
  oligonucleotide probe
gtccgcaggtccgcct

SEQ ID NO: 28002 - DNA, 16 bp, Artificial
  oligonucleotide probe
gtgggcctcctcccaa

SEQ ID NO: 28003 - DNA, 16 bp, Artificial
  oligonucleotide probe
gtgggcctcctcccaa

SEQ ID NO: 28004 - DNA, 16 bp, Artificial
  oligonucleotide probe
gacgagcgcaccgcag

SEQ ID NO: 28005 - DNA, 16 bp, Artificial
  oligonucleotide probe
gacgagcgcaccgcag

SEQ ID NO: 28006 - DNA, 16 bp, Artificial
  oligonucleotide probe
gagcgggtgtggagcg

SEQ ID NO: 28007 - DNA, 16 bp, Artificial
  oligonucleotide probe
gagcgggtgtggagcg

SEQ ID NO: 28008 - DNA, 16 bp, Artificial
  oligonucleotide probe
gcgaacgccctccagg

SEQ ID NO: 28009 - DNA, 16 bp, Artificial
  oligonucleotide probe
gcgaacgccctccagg

SEQ ID NO: 28010 - DNA, 16 bp, Artificial
  oligonucleotide probe
cggatgctgcgagcag

SEQ ID NO: 28011 - DNA, 16 bp, Artificial
  oligonucleotide probe
cggatgctgcgagcag

SEQ ID NO: 28012 - DNA, 16 bp, Artificial
  oligonucleotide probe
gacgagcgcaccgcag

SEQ ID NO: 28013 - DNA, 16 bp, Artificial
  oligonucleotide probe
gacgagcgcaccgcag

SEQ ID NO: 28014 - DNA, 16 bp, Artificial
  oligonucleotide probe
gtgggcctcctcccaa

SEQ ID NO: 28015 - DNA, 16 bp, Artificial
  oligonucleotide probe
gtgggcctcctcccaa

SEQ ID NO: 28016 - DNA, 16 bp, Artificial
  oligonucleotide probe
cggatgctgcgagcag

SEQ ID NO: 28017 - DNA, 16 bp, Artificial
  oligonucleotide probe
cggatgctgcgagcag

SEQ ID NO: 28018 - DNA, 16 bp, Artificial
  oligonucleotide probe
agcgcaggagacgcct

SEQ ID NO: 28019 - DNA, 16 bp, Artificial
  oligonucleotide probe
agcgcaggagacgcct

SEQ ID NO: 28020 - DNA, 16 bp, Artificial
  oligonucleotide probe
gtccgcaggtccgcct

SEQ ID NO: 28021 - DNA, 16 bp, Artificial
  oligonucleotide probe
gtccgcaggtccgcct

SEQ ID NO: 28022 - DNA, 16 bp, Artificial
  oligonucleotide probe
gtccccaaagcggcag

SEQ ID NO: 28023 - DNA, 16 bp, Artificial
  oligonucleotide probe
gtccccaaagcggcag

SEQ ID NO: 28024 - DNA, 16 bp, Artificial
  oligonucleotide probe
cggatgctgcgagcag

SEQ ID NO: 28025 - DNA, 16 bp, Artificial
  oligonucleotide probe
cggatgctgcgagcag

SEQ ID NO: 28026 - DNA, 16 bp, Artificial
  oligonucleotide probe
cggatgctgcgagcag

SEQ ID NO: 28027 - DNA, 16 bp, Artificial
  oligonucleotide probe
cggatgctgcgagcag

SEQ ID NO: 28028 - DNA, 16 bp, Artificial
  oligonucleotide probe
acgctgctgcgaacca

SEQ ID NO: 28029 - DNA, 16 bp, Artificial
  oligonucleotide probe
acgctgctgcgaacca

SEQ ID NO: 28030 - DNA, 16 bp, Artificial
  oligonucleotide probe
cggagacgcagggggt

SEQ ID NO: 28031 - DNA, 16 bp, Artificial
  oligonucleotide probe
cggagacgcagggggt

SEQ ID NO: 28032 - DNA, 16 bp, Artificial
  oligonucleotide probe
gtccccaaagcggcag

SEQ ID NO: 28033 - DNA, 16 bp, Artificial
  oligonucleotide probe
gtccccaaagcggcag

SEQ ID NO: 28034 - DNA, 16 bp, Artificial
  oligonucleotide probe
acgctgctgcgaacca

SEQ ID NO: 28035 - DNA, 16 bp, Artificial
  oligonucleotide probe
acgctgctgcgaacca

SEQ ID NO: 28036 - DNA, 16 bp, Artificial
  oligonucleotide probe
tcaccggagccttggc

SEQ ID NO: 28037 - DNA, 16 bp, Artificial
  oligonucleotide probe
tcaccggagccttggc

SEQ ID NO: 28038 - DNA, 16 bp, Artificial
  oligonucleotide probe
gtccccaaagcggcag

SEQ ID NO: 28039 - DNA, 16 bp, Artificial
  oligonucleotide probe
gtccccaaagcggcag

SEQ ID NO: 28040 - DNA, 16 bp, Artificial
  oligonucleotide probe
tcaccggagccttggc

SEQ ID NO: 28041 - DNA, 16 bp, Artificial
  oligonucleotide probe
tcaccggagccttggc

SEQ ID NO: 28042 - DNA, 16 bp, Artificial
  oligonucleotide probe
gagcgggtgtggagcg

SEQ ID NO: 28043 - DNA, 16 bp, Artificial
  oligonucleotide probe
gagcgggtgtggagcg

SEQ ID NO: 28044 - DNA, 16 bp, Artificial
  oligonucleotide probe
gtgggcctcctcccaa

SEQ ID NO: 28045 - DNA, 16 bp, Artificial
  oligonucleotide probe
gtgggcctcctcccaa

SEQ ID NO: 28046 - DNA, 16 bp, Artificial
  oligonucleotide probe
acgctgctgcgaacca

SEQ ID NO: 28047 - DNA, 16 bp, Artificial
  oligonucleotide probe
acgctgctgcgaacca

SEQ ID NO: 28048 - DNA, 16 bp, Artificial
  oligonucleotide probe
cggagacgcagggggt

SEQ ID NO: 28049 - DNA, 16 bp, Artificial
  oligonucleotide probe
cggagacgcagggggt

SEQ ID NO: 28050 - DNA, 16 bp, Artificial
  oligonucleotide probe
cggatgctgcgagcag

SEQ ID NO: 28051 - DNA, 16 bp, Artificial
  oligonucleotide probe
cggatgctgcgagcag

SEQ ID NO: 28052 - DNA, 16 bp, Artificial
  oligonucleotide probe
gtccccaaagcggcag

SEQ ID NO: 28053 - DNA, 16 bp, Artificial
  oligonucleotide probe
gtccccaaagcggcag

SEQ ID NO: 28054 - DNA, 16 bp, Artificial
  oligonucleotide probe
gcgaacgccctccagg

SEQ ID NO: 28055 - DNA, 16 bp, Artificial
  oligonucleotide probe
gcgaacgccctccagg

SEQ ID NO: 28056 - DNA, 16 bp, Artificial
  oligonucleotide probe
gacgagcgcaccgcag

SEQ ID NO: 28057 - DNA, 16 bp, Artificial
  oligonucleotide probe
gacgagcgcaccgcag

SEQ ID NO: 28058 - DNA, 16 bp, Artificial
  oligonucleotide probe
gtccccaaagcggcag

SEQ ID NO: 28059 - DNA, 16 bp, Artificial
  oligonucleotide probe
gtccccaaagcggcag

SEQ ID NO: 28060 - DNA, 16 bp, Artificial
  oligonucleotide probe
gagcgggtgtggagcg

SEQ ID NO: 28061 - DNA, 16 bp, Artificial
  oligonucleotide probe
gagcgggtgtggagcg

SEQ ID NO: 28062 - DNA, 16 bp, Artificial
  oligonucleotide probe
tcaccggagccttggc

SEQ ID NO: 28063 - DNA, 16 bp, Artificial
  oligonucleotide probe
tcaccggagccttggc

SEQ ID NO: 28064 - DNA, 16 bp, Artificial
  oligonucleotide probe
acgctgctgcgaacca

SEQ ID NO: 28065 - DNA, 16 bp, Artificial
  oligonucleotide probe
acgctgctgcgaacca

SEQ ID NO: 28066 - DNA, 16 bp, Artificial
  oligonucleotide probe
gagcgggtgtggagcg

SEQ ID NO: 28067 - DNA, 16 bp, Artificial
  oligonucleotide probe
gagcgggtgtggagcg

SEQ ID NO: 28068 - DNA, 16 bp, Artificial
  oligonucleotide probe
gtccgcaggtccgcct

SEQ ID NO: 28069 - DNA, 16 bp, Artificial
  oligonucleotide probe
gtccgcaggtccgcct

SEQ ID NO: 28070 - DNA, 16 bp, Artificial
  oligonucleotide probe
gtccccaaagcggcag

SEQ ID NO: 28071 - DNA, 16 bp, Artificial
  oligonucleotide probe
gtccccaaagcggcag

SEQ ID NO: 28072 - DNA, 16 bp, Artificial
  oligonucleotide probe
cggagacgcagggggt

SEQ ID NO: 28073 - DNA, 16 bp, Artificial
  oligonucleotide probe
cggagacgcagggggt

SEQ ID NO: 28074 - DNA, 16 bp, Artificial
  oligonucleotide probe
agcgcaggagacgcct

SEQ ID NO: 28075 - DNA, 16 bp, Artificial
  oligonucleotide probe
agcgcaggagacgcct

SEQ ID NO: 28076 - DNA, 16 bp, Artificial
  oligonucleotide probe
gtgggcctcctcccaa

SEQ ID NO: 28077 - DNA, 16 bp, Artificial
  oligonucleotide probe
gtgggcctcctcccaa

SEQ ID NO: 28078 - DNA, 16 bp, Artificial
  oligonucleotide probe
acgctgctgcgaacca

SEQ ID NO: 28079 - DNA, 16 bp, Artificial
  oligonucleotide probe
acgctgctgcgaacca

SEQ ID NO: 28080 - DNA, 16 bp, Artificial
  oligonucleotide probe
gcgaacgccctccagg

SEQ ID NO: 28081 - DNA, 16 bp, Artificial
  oligonucleotide probe
gcgaacgccctccagg

SEQ ID NO: 28082 - DNA, 16 bp, Artificial
  oligonucleotide probe
agcgcaggagacgcct

SEQ ID NO: 28083 - DNA, 16 bp, Artificial
  oligonucleotide probe
agcgcaggagacgcct

SEQ ID NO: 28084 - DNA, 16 bp, Artificial
  oligonucleotide probe
gacgagcgcaccgcag

SEQ ID NO: 28085 - DNA, 16 bp, Artificial
  oligonucleotide probe
gacgagcgcaccgcag

SEQ ID NO: 28086 - DNA, 16 bp, Artificial
  oligonucleotide probe
gacgagcgcaccgcag

SEQ ID NO: 28087 - DNA, 16 bp, Artificial
  oligonucleotide probe
gacgagcgcaccgcag

SEQ ID NO: 28088 - DNA, 16 bp, Artificial
  oligonucleotide probe
gcgaacgccctccagg

SEQ ID NO: 28089 - DNA, 16 bp, Artificial
  oligonucleotide probe
gcgaacgccctccagg

SEQ ID NO: 28090 - DNA, 16 bp, Artificial
  oligonucleotide probe
gcgaacgccctccagg

SEQ ID NO: 28091 - DNA, 16 bp, Artificial
  oligonucleotide probe
gcgaacgccctccagg

SEQ ID NO: 28092 - DNA, 16 bp, Artificial
  oligonucleotide probe
gagcgggtgtggagcg

SEQ ID NO: 28093 - DNA, 16 bp, Artificial
  oligonucleotide probe
gagcgggtgtggagcg

SEQ ID NO: 28094 - DNA, 16 bp, Artificial
  oligonucleotide probe
gcgaacgccctccagg

SEQ ID NO: 28095 - DNA, 16 bp, Artificial
  oligonucleotide probe
gcgaacgccctccagg

SEQ ID NO: 28096 - DNA, 16 bp, Artificial
  oligonucleotide probe
gtccccaaagcggcag

SEQ ID NO: 28097 - DNA, 16 bp, Artificial
  oligonucleotide probe
gtccccaaagcggcag

SEQ ID NO: 28098 - DNA, 16 bp, Artificial
  oligonucleotide probe
ggtcgagctggcgcag

SEQ ID NO: 28099 - DNA, 16 bp, Artificial
  oligonucleotide probe
ggtcgagctggcgcag

SEQ ID NO: 28100 - DNA, 16 bp, Artificial
  oligonucleotide probe
gagcgggtgtggagcg

SEQ ID NO: 28101 - DNA, 16 bp, Artificial
  oligonucleotide probe
gagcgggtgtggagcg

SEQ ID NO: 28102 - DNA, 16 bp, Artificial
  oligonucleotide probe
gagcgggtgtggagcg

SEQ ID NO: 28103 - DNA, 16 bp, Artificial
  oligonucleotide probe
gagcgggtgtggagcg

SEQ ID NO: 28104 - DNA, 16 bp, Artificial
  oligonucleotide probe
gtccccaaagcggcag

SEQ ID NO: 28105 - DNA, 16 bp, Artificial
  oligonucleotide probe
gtccccaaagcggcag

SEQ ID NO: 28106 - DNA, 16 bp, Artificial
  oligonucleotide probe
acgctgctgcgaacca

SEQ ID NO: 28107 - DNA, 16 bp, Artificial
  oligonucleotide probe
acgctgctgcgaacca

SEQ ID NO: 28108 - DNA, 16 bp, Artificial
  oligonucleotide probe
ggtcgagctggcgcag

SEQ ID NO: 28109 - DNA, 16 bp, Artificial
  oligonucleotide probe
ggtcgagctggcgcag

SEQ ID NO: 28110 - DNA, 16 bp, Artificial
  oligonucleotide probe
ggtcgagctggcgcag

SEQ ID NO: 28111 - DNA, 16 bp, Artificial
  oligonucleotide probe
ggtcgagctggcgcag

SEQ ID NO: 28112 - DNA, 16 bp, Artificial
  oligonucleotide probe
gtccccaaagcggcag

SEQ ID NO: 28113 - DNA, 16 bp, Artificial
  oligonucleotide probe
gtccccaaagcggcag

SEQ ID NO: 28114 - DNA, 16 bp, Artificial
  oligonucleotide probe
ggtcgagctggcgcag

SEQ ID NO: 28115 - DNA, 16 bp, Artificial
  oligonucleotide probe
gcgaacgccctccagg

SEQ ID NO: 28116 - DNA, 16 bp, Artificial
  oligonucleotide probe
gtccccaaagcggcag

SEQ ID NO: 28117 - DNA, 16 bp, Artificial
  oligonucleotide probe
acgctgctgcgaacca

SEQ ID NO: 28118 - DNA, 16 bp, Artificial
  oligonucleotide probe
tgctgggtgcaggcga

SEQ ID NO: 28119 - DNA, 16 bp, Artificial
  oligonucleotide probe
tgctgggtgcaggcga

SEQ ID NO: 28120 - DNA, 16 bp, Artificial
  oligonucleotide probe
gcctagcgcctcgacg

SEQ ID NO: 28121 - DNA, 16 bp, Artificial
  oligonucleotide probe
gcctagcgcctcgacg

SEQ ID NO: 28122 - DNA, 16 bp, Artificial
  oligonucleotide probe
caggggaagggtcgga

SEQ ID NO: 28123 - DNA, 16 bp, Artificial
  oligonucleotide probe
caggggaagggtcgga

SEQ ID NO: 28124 - DNA, 16 bp, Artificial
  oligonucleotide probe
gcagcctctggccgag

SEQ ID NO: 28125 - DNA, 16 bp, Artificial
  oligonucleotide probe
gcagcctctggccgag

SEQ ID NO: 28126 - DNA, 16 bp, Artificial
  oligonucleotide probe
gcaggtggtggcgagc

SEQ ID NO: 28127 - DNA, 16 bp, Artificial
  oligonucleotide probe
gcaggtggtggcgagc

SEQ ID NO: 28128 - DNA, 16 bp, Artificial
  oligonucleotide probe
acgcaccagtcccgga

SEQ ID NO: 28129 - DNA, 16 bp, Artificial
  oligonucleotide probe
acgcaccagtcccgga

SEQ ID NO: 28130 - DNA, 16 bp, Artificial
  oligonucleotide probe
gcctgggtcaccacgc

SEQ ID NO: 28131 - DNA, 16 bp, Artificial
  oligonucleotide probe
gcctgggtcaccacgc

SEQ ID NO: 28132 - DNA, 16 bp, Artificial
  oligonucleotide probe
acgcggaagacgtggc

SEQ ID NO: 28133 - DNA, 16 bp, Artificial
  oligonucleotide probe
acgcggaagacgtggc

SEQ ID NO: 28134 - DNA, 16 bp, Artificial
  oligonucleotide probe
tcacgccttggccacc

SEQ ID NO: 28135 - DNA, 16 bp, Artificial
  oligonucleotide probe
tcacgccttggccacc

SEQ ID NO: 28136 - DNA, 16 bp, Artificial
  oligonucleotide probe
acgcgcctgacgcctc

SEQ ID NO: 28137 - DNA, 16 bp, Artificial
  oligonucleotide probe
acgcgcctgacgcctc

SEQ ID NO: 28138 - DNA, 16 bp, Artificial
  oligonucleotide probe
acgcgcctgacgcctc

SEQ ID NO: 28139 - DNA, 16 bp, Artificial
  oligonucleotide probe
acgcgcctgacgcctc

SEQ ID NO: 28140 - DNA, 16 bp, Artificial
  oligonucleotide probe
caggcacccaggcgga

SEQ ID NO: 28141 - DNA, 16 bp, Artificial
  oligonucleotide probe
caggcacccaggcgga

SEQ ID NO: 28142 - DNA, 16 bp, Artificial
  oligonucleotide probe
gtggccaatcacgcga

SEQ ID NO: 28143 - DNA, 16 bp, Artificial
  oligonucleotide probe
gtggccaatcacgcga

SEQ ID NO: 28144 - DNA, 16 bp, Artificial
  oligonucleotide probe
ccaaagcgggaatggc

SEQ ID NO: 28145 - DNA, 16 bp, Artificial
  oligonucleotide probe
ccaaagcgggaatggc

SEQ ID NO: 28146 - DNA, 16 bp, Artificial
  oligonucleotide probe
caggggaagggtcgga

SEQ ID NO: 28147 - DNA, 16 bp, Artificial
  oligonucleotide probe
caggggaagggtcgga

SEQ ID NO: 28148 - DNA, 16 bp, Artificial
  oligonucleotide probe
tcacgccttggccacc

SEQ ID NO: 28149 - DNA, 16 bp, Artificial
  oligonucleotide probe
tcacgccttggccacc

SEQ ID NO: 28150 - DNA, 16 bp, Artificial
  oligonucleotide probe
gcctcggagacggcag

SEQ ID NO: 28151 - DNA, 16 bp, Artificial
  oligonucleotide probe
gcctcggagacggcag

SEQ ID NO: 28152 - DNA, 16 bp, Artificial
  oligonucleotide probe
tggcagcgggtcgtgg

SEQ ID NO: 28153 - DNA, 16 bp, Artificial
  oligonucleotide probe
tggcagcgggtcgtgg

SEQ ID NO: 28154 - DNA, 16 bp, Artificial
  oligonucleotide probe
ccaaagcgggaatggc

SEQ ID NO: 28155 - DNA, 16 bp, Artificial
  oligonucleotide probe
ccaaagcgggaatggc

SEQ ID NO: 28156 - DNA, 16 bp, Artificial
  oligonucleotide probe
gcctcggagacggcag

SEQ ID NO: 28157 - DNA, 16 bp, Artificial
  oligonucleotide probe
gcctcggagacggcag

SEQ ID NO: 28158 - DNA, 16 bp, Artificial
  oligonucleotide probe
tcacgccttggccacc

SEQ ID NO: 28159 - DNA, 16 bp, Artificial
  oligonucleotide probe
tcacgccttggccacc

SEQ ID NO: 28160 - DNA, 16 bp, Artificial
  oligonucleotide probe
tggcagcgggtcgtgg

SEQ ID NO: 28161 - DNA, 16 bp, Artificial
  oligonucleotide probe
tggcagcgggtcgtgg

SEQ ID NO: 28162 - DNA, 16 bp, Artificial
  oligonucleotide probe
gcgatggccaggtggc

SEQ ID NO: 28163 - DNA, 16 bp, Artificial
  oligonucleotide probe
gcgatggccaggtggc

SEQ ID NO: 28164 - DNA, 16 bp, Artificial
  oligonucleotide probe
acgcgcctgacgcctc

SEQ ID NO: 28165 - DNA, 16 bp, Artificial
  oligonucleotide probe
acgcgcctgacgcctc

SEQ ID NO: 28166 - DNA, 16 bp, Artificial
  oligonucleotide probe
gcctcggagacggcag

SEQ ID NO: 28167 - DNA, 16 bp, Artificial
  oligonucleotide probe
gcctcggagacggcag

SEQ ID NO: 28168 - DNA, 16 bp, Artificial
  oligonucleotide probe
gggttggccgagtggc

SEQ ID NO: 28169 - DNA, 16 bp, Artificial
  oligonucleotide probe
gggttggccgagtggc

SEQ ID NO: 28170 - DNA, 16 bp, Artificial
  oligonucleotide probe
ggaagcctgcgacgga

SEQ ID NO: 28171 - DNA, 16 bp, Artificial
  oligonucleotide probe
ggaagcctgcgacgga

SEQ ID NO: 28172 - DNA, 16 bp, Artificial
  oligonucleotide probe
gtggcggaggtcggaa

SEQ ID NO: 28173 - DNA, 16 bp, Artificial
  oligonucleotide probe
gtggcggaggtcggaa

SEQ ID NO: 28174 - DNA, 16 bp, Artificial
  oligonucleotide probe
gacgcaggcggagggt

SEQ ID NO: 28175 - DNA, 16 bp, Artificial
  oligonucleotide probe
gacgcaggcggagggt

SEQ ID NO: 28176 - DNA, 16 bp, Artificial
  oligonucleotide probe
caggggaagggtcgga

SEQ ID NO: 28177 - DNA, 16 bp, Artificial
  oligonucleotide probe
caggggaagggtcgga

SEQ ID NO: 28178 - DNA, 16 bp, Artificial
  oligonucleotide probe
caccgacgggaaacgc

SEQ ID NO: 28179 - DNA, 16 bp, Artificial
  oligonucleotide probe
caccgacgggaaacgc

SEQ ID NO: 28180 - DNA, 16 bp, Artificial
  oligonucleotide probe
acgcaccagtcccgga

SEQ ID NO: 28181 - DNA, 16 bp, Artificial
  oligonucleotide probe
acgcaccagtcccgga

SEQ ID NO: 28182 - DNA, 16 bp, Artificial
  oligonucleotide probe
gcctagcgcctcgacg

SEQ ID NO: 28183 - DNA, 16 bp, Artificial
  oligonucleotide probe
gcctagcgcctcgacg

SEQ ID NO: 28184 - DNA, 16 bp, Artificial
  oligonucleotide probe
caggcacccaggcgga

SEQ ID NO: 28185 - DNA, 16 bp, Artificial
  oligonucleotide probe
caggcacccaggcgga

SEQ ID NO: 28186 - DNA, 16 bp, Artificial
  oligonucleotide probe
gcctgggtcaccacgc

SEQ ID NO: 28187 - DNA, 16 bp, Artificial
  oligonucleotide probe
gcctgggtcaccacgc

SEQ ID NO: 28188 - DNA, 16 bp, Artificial
  oligonucleotide probe
caggagcgggaagcga

SEQ ID NO: 28189 - DNA, 16 bp, Artificial
  oligonucleotide probe
caggagcgggaagcga

SEQ ID NO: 28190 - DNA, 16 bp, Artificial
  oligonucleotide probe
gcgacgagcgagccaa

SEQ ID NO: 28191 - DNA, 16 bp, Artificial
  oligonucleotide probe
gcgacgagcgagccaa

SEQ ID NO: 28192 - DNA, 16 bp, Artificial
  oligonucleotide probe
ggaaagcggcctggaa

SEQ ID NO: 28193 - DNA, 16 bp, Artificial
  oligonucleotide probe
ggaaagcggcctggaa

SEQ ID NO: 28194 - DNA, 16 bp, Artificial
  oligonucleotide probe
acgcgggtcaccgtcc

SEQ ID NO: 28195 - DNA, 16 bp, Artificial
  oligonucleotide probe
acgcgggtcaccgtcc

SEQ ID NO: 28196 - DNA, 16 bp, Artificial
  oligonucleotide probe
ggtcgacgacgccgag

SEQ ID NO: 28197 - DNA, 16 bp, Artificial
  oligonucleotide probe
ggtcgacgacgccgag

SEQ ID NO: 28198 - DNA, 16 bp, Artificial
  oligonucleotide probe
tggccaggcggagtgg

SEQ ID NO: 28199 - DNA, 16 bp, Artificial
  oligonucleotide probe
tggccaggcggagtgg

SEQ ID NO: 28200 - DNA, 16 bp, Artificial
  oligonucleotide probe
gcgatggccaggtggc

SEQ ID NO: 28201 - DNA, 16 bp, Artificial
  oligonucleotide probe
gcgatggccaggtggc

SEQ ID NO: 28202 - DNA, 16 bp, Artificial
  oligonucleotide probe
gcaggcagccaatggc

SEQ ID NO: 28203 - DNA, 16 bp, Artificial
  oligonucleotide probe
gcaggcagccaatggc

SEQ ID NO: 28204 - DNA, 16 bp, Artificial
  oligonucleotide probe
ggaagcctgcgacgga

SEQ ID NO: 28205 - DNA, 16 bp, Artificial
  oligonucleotide probe
ggaagcctgcgacgga

SEQ ID NO: 28206 - DNA, 16 bp, Artificial
  oligonucleotide probe
acgcgagcgggtgcag

SEQ ID NO: 28207 - DNA, 16 bp, Artificial
  oligonucleotide probe
acgcgagcgggtgcag

SEQ ID NO: 28208 - DNA, 16 bp, Artificial
  oligonucleotide probe
gcgatggccaggtggc

SEQ ID NO: 28209 - DNA, 16 bp, Artificial
  oligonucleotide probe
gcgatggccaggtggc

SEQ ID NO: 28210 - DNA, 16 bp, Artificial
  oligonucleotide probe
tggcgggtgacggtgg

SEQ ID NO: 28211 - DNA, 16 bp, Artificial
  oligonucleotide probe
tggcgggtgacggtgg

SEQ ID NO: 28212 - DNA, 16 bp, Artificial
  oligonucleotide probe
tggcgtgggggtccaa

SEQ ID NO: 28213 - DNA, 16 bp, Artificial
  oligonucleotide probe
tggcgtgggggtccaa

SEQ ID NO: 28214 - DNA, 16 bp, Artificial
  oligonucleotide probe
gacggggtcggacgag

SEQ ID NO: 28215 - DNA, 16 bp, Artificial
  oligonucleotide probe
gacggggtcggacgag

SEQ ID NO: 28216 - DNA, 16 bp, Artificial
  oligonucleotide probe
gtccggaagtgggcga

SEQ ID NO: 28217 - DNA, 16 bp, Artificial
  oligonucleotide probe
gtccggaagtgggcga

SEQ ID NO: 28218 - DNA, 16 bp, Artificial
  oligonucleotide probe
acgcggaagacgtggc

SEQ ID NO: 28219 - DNA, 16 bp, Artificial
  oligonucleotide probe
acgcggaagacgtggc

SEQ ID NO: 28220 - DNA, 16 bp, Artificial
  oligonucleotide probe
gtccggaagtgggcga

SEQ ID NO: 28221 - DNA, 16 bp, Artificial
  oligonucleotide probe
gtccggaagtgggcga

SEQ ID NO: 28222 - DNA, 16 bp, Artificial
  oligonucleotide probe
caggggaagggtcgga

SEQ ID NO: 28223 - DNA, 16 bp, Artificial
  oligonucleotide probe
caggggaagggtcgga

SEQ ID NO: 28224 - DNA, 16 bp, Artificial
  oligonucleotide probe
gtccggaagtgggcga

SEQ ID NO: 28225 - DNA, 16 bp, Artificial
  oligonucleotide probe
gtccggaagtgggcga

SEQ ID NO: 28226 - DNA, 16 bp, Artificial
  oligonucleotide probe
tggcagcgggtcgtgg

SEQ ID NO: 28227 - DNA, 16 bp, Artificial
  oligonucleotide probe
tggcagcgggtcgtgg

SEQ ID NO: 28228 - DNA, 16 bp, Artificial
  oligonucleotide probe
acgcggaagacgtggc

SEQ ID NO: 28229 - DNA, 16 bp, Artificial
  oligonucleotide probe
acgcggaagacgtggc

SEQ ID NO: 28230 - DNA, 16 bp, Artificial
  oligonucleotide probe
acgcgcctgacgcctc

SEQ ID NO: 28231 - DNA, 16 bp, Artificial
  oligonucleotide probe
acgcgcctgacgcctc

SEQ ID NO: 28232 - DNA, 16 bp, Artificial
  oligonucleotide probe
gcgagtggcagggcct

SEQ ID NO: 28233 - DNA, 16 bp, Artificial
  oligonucleotide probe
gcgagtggcagggcct

SEQ ID NO: 28234 - DNA, 16 bp, Artificial
  oligonucleotide probe
gtggcaggagcgacgc

SEQ ID NO: 28235 - DNA, 16 bp, Artificial
  oligonucleotide probe
gtggcaggagcgacgc

SEQ ID NO: 28236 - DNA, 16 bp, Artificial
  oligonucleotide probe
gcctcggagacggcag

SEQ ID NO: 28237 - DNA, 16 bp, Artificial
  oligonucleotide probe
gcctcggagacggcag

SEQ ID NO: 28238 - DNA, 16 bp, Artificial
  oligonucleotide probe
gcctagcgcctcgacg

SEQ ID NO: 28239 - DNA, 16 bp, Artificial
  oligonucleotide probe
gcctagcgcctcgacg

SEQ ID NO: 28240 - DNA, 16 bp, Artificial
  oligonucleotide probe
acgcggaagacgtggc

SEQ ID NO: 28241 - DNA, 16 bp, Artificial
  oligonucleotide probe
acgcggaagacgtggc

SEQ ID NO: 28242 - DNA, 16 bp, Artificial
  oligonucleotide probe
acgcgggtcaccgtcc

SEQ ID NO: 28243 - DNA, 16 bp, Artificial
  oligonucleotide probe
acgcgggtcaccgtcc

SEQ ID NO: 28244 - DNA, 16 bp, Artificial
  oligonucleotide probe
acgccaggcgaggtgg

SEQ ID NO: 28245 - DNA, 16 bp, Artificial
  oligonucleotide probe
acgccaggcgaggtgg

SEQ ID NO: 28246 - DNA, 16 bp, Artificial
  oligonucleotide probe
accatggcacgcgacg

SEQ ID NO: 28247 - DNA, 16 bp, Artificial
  oligonucleotide probe
accatggcacgcgacg

SEQ ID NO: 28248 - DNA, 16 bp, Artificial
  oligonucleotide probe
cggacaggacgctggc

SEQ ID NO: 28249 - DNA, 16 bp, Artificial
  oligonucleotide probe
cggacaggacgctggc

SEQ ID NO: 28250 - DNA, 16 bp, Artificial
  oligonucleotide probe
accatggcacgcgacg

SEQ ID NO: 28251 - DNA, 16 bp, Artificial
  oligonucleotide probe
accatggcacgcgacg

SEQ ID NO: 28252 - DNA, 16 bp, Artificial
  oligonucleotide probe
ggaagcctgcgacgga

SEQ ID NO: 28253 - DNA, 16 bp, Artificial
  oligonucleotide probe
ggaagcctgcgacgga

SEQ ID NO: 28254 - DNA, 16 bp, Artificial
  oligonucleotide probe
gcagcggagcctgagc

SEQ ID NO: 28255 - DNA, 16 bp, Artificial
  oligonucleotide probe
gcagcggagcctgagc

SEQ ID NO: 28256 - DNA, 16 bp, Artificial
  oligonucleotide probe
cggacaggacgctggc

SEQ ID NO: 28257 - DNA, 16 bp, Artificial
  oligonucleotide probe
cggacaggacgctggc

SEQ ID NO: 28258 - DNA, 16 bp, Artificial
  oligonucleotide probe
gacgcaggcggagggt

SEQ ID NO: 28259 - DNA, 16 bp, Artificial
  oligonucleotide probe
gacgcaggcggagggt

SEQ ID NO: 28260 - DNA, 16 bp, Artificial
  oligonucleotide probe
caggagcgggaagcga

SEQ ID NO: 28261 - DNA, 16 bp, Artificial
  oligonucleotide probe
caggagcgggaagcga

SEQ ID NO: 28262 - DNA, 16 bp, Artificial
  oligonucleotide probe
acgcgcctgacgcctc

SEQ ID NO: 28263 - DNA, 16 bp, Artificial
  oligonucleotide probe
acgcgcctgacgcctc

SEQ ID NO: 28264 - DNA, 16 bp, Artificial
  oligonucleotide probe
cctcgcctcgaggagc

SEQ ID NO: 28265 - DNA, 16 bp, Artificial
  oligonucleotide probe
cctcgcctcgaggagc

SEQ ID NO: 28266 - DNA, 16 bp, Artificial
  oligonucleotide probe
gcagcggagcctgagc

SEQ ID NO: 28267 - DNA, 16 bp, Artificial
  oligonucleotide probe
gcagcggagcctgagc

SEQ ID NO: 28268 - DNA, 16 bp, Artificial
  oligonucleotide probe
gcgaagcggcgaggtc

SEQ ID NO: 28269 - DNA, 16 bp, Artificial
  oligonucleotide probe
gcgaagcggcgaggtc

SEQ ID NO: 28270 - DNA, 16 bp, Artificial
  oligonucleotide probe
gacggcgagtgggcag

SEQ ID NO: 28271 - DNA, 16 bp, Artificial
  oligonucleotide probe
gacggcgagtgggcag

SEQ ID NO: 28272 - DNA, 16 bp, Artificial
  oligonucleotide probe
accatggcacgcgacg

SEQ ID NO: 28273 - DNA, 16 bp, Artificial
  oligonucleotide probe
accatggcacgcgacg

SEQ ID NO: 28274 - DNA, 16 bp, Artificial
  oligonucleotide probe
tggcgtgggggtccaa

SEQ ID NO: 28275 - DNA, 16 bp, Artificial
  oligonucleotide probe
tggcgtgggggtccaa

SEQ ID NO: 28276 - DNA, 16 bp, Artificial
  oligonucleotide probe
acgcgcctgacgcctc

SEQ ID NO: 28277 - DNA, 16 bp, Artificial
  oligonucleotide probe
acgcgcctgacgcctc

SEQ ID NO: 28278 - DNA, 16 bp, Artificial
  oligonucleotide probe
gcctgggtcaccacgc

SEQ ID NO: 28279 - DNA, 16 bp, Artificial
  oligonucleotide probe
gcctgggtcaccacgc

SEQ ID NO: 28280 - DNA, 16 bp, Artificial
  oligonucleotide probe
tggccaggcggagtgg

SEQ ID NO: 28281 - DNA, 16 bp, Artificial
  oligonucleotide probe
tggccaggcggagtgg

SEQ ID NO: 28282 - DNA, 16 bp, Artificial
  oligonucleotide probe
acgcgagcgggtgcag

SEQ ID NO: 28283 - DNA, 16 bp, Artificial
  oligonucleotide probe
acgcgagcgggtgcag

SEQ ID NO: 28284 - DNA, 16 bp, Artificial
  oligonucleotide probe
gcaggcagccaatggc

SEQ ID NO: 28285 - DNA, 16 bp, Artificial
  oligonucleotide probe
gcaggcagccaatggc

SEQ ID NO: 28286 - DNA, 16 bp, Artificial
  oligonucleotide probe
gtccggaagtgggcga

SEQ ID NO: 28287 - DNA, 16 bp, Artificial
  oligonucleotide probe
gtccggaagtgggcga

SEQ ID NO: 28288 - DNA, 16 bp, Artificial
  oligonucleotide probe
gacgcaggcggagggt

SEQ ID NO: 28289 - DNA, 16 bp, Artificial
  oligonucleotide probe
gacgcaggcggagggt

SEQ ID NO: 28290 - DNA, 16 bp, Artificial
  oligonucleotide probe
gagcgcctcctcgagc

SEQ ID NO: 28291 - DNA, 16 bp, Artificial
  oligonucleotide probe
gagcgcctcctcgagc

SEQ ID NO: 28292 - DNA, 16 bp, Artificial
  oligonucleotide probe
gcgacgagcgagccaa

SEQ ID NO: 28293 - DNA, 16 bp, Artificial
  oligonucleotide probe
gcgacgagcgagccaa

SEQ ID NO: 28294 - DNA, 16 bp, Artificial
  oligonucleotide probe
acgcgcctgacgcctc

SEQ ID NO: 28295 - DNA, 16 bp, Artificial
  oligonucleotide probe
acgcgcctgacgcctc

SEQ ID NO: 28296 - DNA, 16 bp, Artificial
  oligonucleotide probe
gtgggacgacgcgcga

SEQ ID NO: 28297 - DNA, 16 bp, Artificial
  oligonucleotide probe
gtgggacgacgcgcga

SEQ ID NO: 28298 - DNA, 16 bp, Artificial
  oligonucleotide probe
tcacgccttggccacc

SEQ ID NO: 28299 - DNA, 16 bp, Artificial
  oligonucleotide probe
tcacgccttggccacc

SEQ ID NO: 28300 - DNA, 16 bp, Artificial
  oligonucleotide probe
agcggtccgcgagagc

SEQ ID NO: 28301 - DNA, 16 bp, Artificial
  oligonucleotide probe
agcggtccgcgagagc

SEQ ID NO: 28302 - DNA, 16 bp, Artificial
  oligonucleotide probe
acgcgagcgggtgcag

SEQ ID NO: 28303 - DNA, 16 bp, Artificial
  oligonucleotide probe
acgcgagcgggtgcag

SEQ ID NO: 28304 - DNA, 16 bp, Artificial
  oligonucleotide probe
gcctcggagacggcag

SEQ ID NO: 28305 - DNA, 16 bp, Artificial
  oligonucleotide probe
gcctcggagacggcag

SEQ ID NO: 28306 - DNA, 16 bp, Artificial
  oligonucleotide probe
gcctcggagacggcag

SEQ ID NO: 28307 - DNA, 16 bp, Artificial
  oligonucleotide probe
gcctcggagacggcag

SEQ ID NO: 28308 - DNA, 16 bp, Artificial
  oligonucleotide probe
accatggcacgcgacg

SEQ ID NO: 28309 - DNA, 16 bp, Artificial
  oligonucleotide probe
accatggcacgcgacg

SEQ ID NO: 28310 - DNA, 16 bp, Artificial
  oligonucleotide probe
caggggaagggtcgga

SEQ ID NO: 28311 - DNA, 16 bp, Artificial
  oligonucleotide probe
caggggaagggtcgga

SEQ ID NO: 28312 - DNA, 16 bp, Artificial
  oligonucleotide probe
cctctggctggcccaa

SEQ ID NO: 28313 - DNA, 16 bp, Artificial
  oligonucleotide probe
cctctggctggcccaa

SEQ ID NO: 28314 - DNA, 16 bp, Artificial
  oligonucleotide probe
caccgacgggaaacgc

SEQ ID NO: 28315 - DNA, 16 bp, Artificial
  oligonucleotide probe
caccgacgggaaacgc

SEQ ID NO: 28316 - DNA, 16 bp, Artificial
  oligonucleotide probe
tggcgggtgacggtgg

SEQ ID NO: 28317 - DNA, 16 bp, Artificial
  oligonucleotide probe
tggcgggtgacggtgg

SEQ ID NO: 28318 - DNA, 16 bp, Artificial
  oligonucleotide probe
cggacaggacgctggc

SEQ ID NO: 28319 - DNA, 16 bp, Artificial
  oligonucleotide probe
cggacaggacgctggc

SEQ ID NO: 28320 - DNA, 16 bp, Artificial
  oligonucleotide probe
acgcgcctgacgcctc

SEQ ID NO: 28321 - DNA, 16 bp, Artificial
  oligonucleotide probe
acgcgcctgacgcctc

SEQ ID NO: 28322 - DNA, 16 bp, Artificial
  oligonucleotide probe
caccgcgaggtcacgc

SEQ ID NO: 28323 - DNA, 16 bp, Artificial
  oligonucleotide probe
caccgcgaggtcacgc

SEQ ID NO: 28324 - DNA, 16 bp, Artificial
  oligonucleotide probe
cctctggctggcccaa

SEQ ID NO: 28325 - DNA, 16 bp, Artificial
  oligonucleotide probe
cctctggctggcccaa

SEQ ID NO: 28326 - DNA, 16 bp, Artificial
  oligonucleotide probe
caccgggtggtcagcg

SEQ ID NO: 28327 - DNA, 16 bp, Artificial
  oligonucleotide probe
caccgggtggtcagcg

SEQ ID NO: 28328 - DNA, 16 bp, Artificial
  oligonucleotide probe
acgcgagcgggtgcag

SEQ ID NO: 28329 - DNA, 16 bp, Artificial
  oligonucleotide probe
acgcgagcgggtgcag

SEQ ID NO: 28330 - DNA, 16 bp, Artificial
  oligonucleotide probe
acgcggtccaccgtgg

SEQ ID NO: 28331 - DNA, 16 bp, Artificial
  oligonucleotide probe
acgcggtccaccgtgg

SEQ ID NO: 28332 - DNA, 16 bp, Artificial
  oligonucleotide probe
caccgggtggtcagcg

SEQ ID NO: 28333 - DNA, 16 bp, Artificial
  oligonucleotide probe
caccgggtggtcagcg

SEQ ID NO: 28334 - DNA, 16 bp, Artificial
  oligonucleotide probe
gcctagcgcctcgacg

SEQ ID NO: 28335 - DNA, 16 bp, Artificial
  oligonucleotide probe
gcctagcgcctcgacg

SEQ ID NO: 28336 - DNA, 16 bp, Artificial
  oligonucleotide probe
cggacaggacgctggc

SEQ ID NO: 28337 - DNA, 16 bp, Artificial
  oligonucleotide probe
cggacaggacgctggc

SEQ ID NO: 28338 - DNA, 16 bp, Artificial
  oligonucleotide probe
gcctgtgggtccgcga

SEQ ID NO: 28339 - DNA, 16 bp, Artificial
  oligonucleotide probe
gcctgtgggtccgcga

SEQ ID NO: 28340 - DNA, 16 bp, Artificial
  oligonucleotide probe
acgcggtccaccgtgg

SEQ ID NO: 28341 - DNA, 16 bp, Artificial
  oligonucleotide probe
acgcggtccaccgtgg

SEQ ID NO: 28342 - DNA, 16 bp, Artificial
  oligonucleotide probe
gcaggtggtggcgagc

SEQ ID NO: 28343 - DNA, 16 bp, Artificial
  oligonucleotide probe
gcaggtggtggcgagc

SEQ ID NO: 28344 - DNA, 16 bp, Artificial
  oligonucleotide probe
tgctgggtgcaggcga

SEQ ID NO: 28345 - DNA, 16 bp, Artificial
  oligonucleotide probe
tgctgggtgcaggcga

SEQ ID NO: 28346 - DNA, 16 bp, Artificial
  oligonucleotide probe
tgctgggtgcaggcga

SEQ ID NO: 28347 - DNA, 16 bp, Artificial
  oligonucleotide probe
tgctgggtgcaggcga

SEQ ID NO: 28348 - DNA, 16 bp, Artificial
  oligonucleotide probe
agcggtccgcgagagc

SEQ ID NO: 28349 - DNA, 16 bp, Artificial
  oligonucleotide probe
agcggtccgcgagagc

SEQ ID NO: 28350 - DNA, 16 bp, Artificial
  oligonucleotide probe
acgcggtccaccgtgg

SEQ ID NO: 28351 - DNA, 16 bp, Artificial
  oligonucleotide probe
acgcggtccaccgtgg

SEQ ID NO: 28352 - DNA, 16 bp, Artificial
  oligonucleotide probe
tgctgggtgcaggcga

SEQ ID NO: 28353 - DNA, 16 bp, Artificial
  oligonucleotide probe
tgctgggtgcaggcga

SEQ ID NO: 28354 - DNA, 16 bp, Artificial
  oligonucleotide probe
gtccgagcagcggcct

SEQ ID NO: 28355 - DNA, 16 bp, Artificial
  oligonucleotide probe
gtccgagcagcggcct

SEQ ID NO: 28356 - DNA, 16 bp, Artificial
  oligonucleotide probe
accatggcacgcgacg

SEQ ID NO: 28357 - DNA, 16 bp, Artificial
  oligonucleotide probe
accatggcacgcgacg

SEQ ID NO: 28358 - DNA, 16 bp, Artificial
  oligonucleotide probe
tcacgccttggccacc

SEQ ID NO: 28359 - DNA, 16 bp, Artificial
  oligonucleotide probe
tcacgccttggccacc

SEQ ID NO: 28360 - DNA, 16 bp, Artificial
  oligonucleotide probe
cctcagcgcggaacca

SEQ ID NO: 28361 - DNA, 16 bp, Artificial
  oligonucleotide probe
cctcagcgcggaacca

SEQ ID NO: 28362 - DNA, 16 bp, Artificial
  oligonucleotide probe
agcggtccgcgagagc

SEQ ID NO: 28363 - DNA, 16 bp, Artificial
  oligonucleotide probe
agcggtccgcgagagc

SEQ ID NO: 28364 - DNA, 16 bp, Artificial
  oligonucleotide probe
gagcggtctggcggaa

SEQ ID NO: 28365 - DNA, 16 bp, Artificial
  oligonucleotide probe
gagcggtctggcggaa

SEQ ID NO: 28366 - DNA, 16 bp, Artificial
  oligonucleotide probe
gtccgagcagcggcct

SEQ ID NO: 28367 - DNA, 16 bp, Artificial
  oligonucleotide probe
gtccgagcagcggcct

SEQ ID NO: 28368 - DNA, 16 bp, Artificial
  oligonucleotide probe
acgccaggcgaggtgg

SEQ ID NO: 28369 - DNA, 16 bp, Artificial
  oligonucleotide probe
acgccaggcgaggtgg

SEQ ID NO: 28370 - DNA, 16 bp, Artificial
  oligonucleotide probe
tggcgggtgacggtgg

SEQ ID NO: 28371 - DNA, 16 bp, Artificial
  oligonucleotide probe
tggcgggtgacggtgg

SEQ ID NO: 28372 - DNA, 16 bp, Artificial
  oligonucleotide probe
gtccgagcagcggcct

SEQ ID NO: 28373 - DNA, 16 bp, Artificial
  oligonucleotide probe
gtccgagcagcggcct

SEQ ID NO: 28374 - DNA, 16 bp, Artificial
  oligonucleotide probe
gtggcggaggtcggaa

SEQ ID NO: 28375 - DNA, 16 bp, Artificial
  oligonucleotide probe
gtggcggaggtcggaa

SEQ ID NO: 28376 - DNA, 16 bp, Artificial
  oligonucleotide probe
gcgatggccaggtggc

SEQ ID NO: 28377 - DNA, 16 bp, Artificial
  oligonucleotide probe
gcgatggccaggtggc

SEQ ID NO: 28378 - DNA, 16 bp, Artificial
  oligonucleotide probe
gcagcaccagcgtggc

SEQ ID NO: 28379 - DNA, 16 bp, Artificial
  oligonucleotide probe
gcagcaccagcgtggc

SEQ ID NO: 28380 - DNA, 16 bp, Artificial
  oligonucleotide probe
gcctgggtcaccacgc

SEQ ID NO: 28381 - DNA, 16 bp, Artificial
  oligonucleotide probe
gcctgggtcaccacgc

SEQ ID NO: 28382 - DNA, 16 bp, Artificial
  oligonucleotide probe
gcctcggagacggcag

SEQ ID NO: 28383 - DNA, 16 bp, Artificial
  oligonucleotide probe
gcctcggagacggcag

SEQ ID NO: 28384 - DNA, 16 bp, Artificial
  oligonucleotide probe
gtggcggaggtcggaa

SEQ ID NO: 28385 - DNA, 16 bp, Artificial
  oligonucleotide probe
gtggcggaggtcggaa

SEQ ID NO: 28386 - DNA, 16 bp, Artificial
  oligonucleotide probe
gcagcaccagcgtggc

SEQ ID NO: 28387 - DNA, 16 bp, Artificial
  oligonucleotide probe
gcagcaccagcgtggc

SEQ ID NO: 28388 - DNA, 16 bp, Artificial
  oligonucleotide probe
agcgccaatcacgggt

SEQ ID NO: 28389 - DNA, 16 bp, Artificial
  oligonucleotide probe
agcgccaatcacgggt

SEQ ID NO: 28390 - DNA, 16 bp, Artificial
  oligonucleotide probe
acgcggtccaccgtgg

SEQ ID NO: 28391 - DNA, 16 bp, Artificial
  oligonucleotide probe
acgcggtccaccgtgg

SEQ ID NO: 28392 - DNA, 16 bp, Artificial
  oligonucleotide probe
caggggaagggtcgga

(The sequence listing continues in the following parts.)
